United States Patent Application Publication US 2017/0114356 A1 - sequence listing, part 87

SEQ ID NO: 138973 - DNA, 249 bp, Zea Mays
atggcggacctcctcggcgacccggcgtggccgcagctccacccgcggccctgcaccgacacgccatggccaggcctacagtgcgagcttgcgcccgacgacacgtgcgtgctccgcgccacccgcctccacctgggccccgacgtcgccaccccgccctgcaggcccggggccaggctcaaccccgcctcgctgcgcggcctgccgcacctccggacgctctccatcttcgtctgtttcggcgccgcc

SEQ ID NO: 138974 - DNA, 3118 bp, Zea Mays
gttttggatatttgcgctgttgggatatgacaatttgctaattttctaggagggatggctaagtttgcagacgtcctctgtgcagttacactacttgtgttgctcccctgctcggatgttgcattggggcagactactgacccttccgaggtcaatgggctcagggctatcaagggacgattagttgatcctatgcaaaaccttatgaattggaataggggagatccgtgcaggtcaaattggacaggagtcttctgccacaaagtgaatgatgatacatttcttcatgtgacagaattgcagttatttaagaggaatctctcaggaactctggcaccagaggtcagccttttatctcatctgaaaacactggattttatgtggaacaacttaactggtagcatcccaaaggaaataggcaacatcactacgctcaaacttatacttttgaatggcaatcaactctctggtattttaccttatgagatcggtaaccttcaaagtttaaacagattacaggttgaccaaaaccaattgtccggccccatacctaaatcattttccaatttaagaagtgtgaaacgtcttcatatgaacaataattcgttaagtggggccatcccgtctgaactttccacattgcctcttcttcttcacctgcttgttgacaataacaacctatctggacctctccctccagaatttgctgaagcgcctgccatgaaaatatttcaggctgataacaataacttcagtggaagttccatccctactacatataacaacatatccacactactaaagctgagtcttagaaattgcagcttgcaaggagatattccagatttgagtagcatacctcaacttggctatttggatattagctggaaccagttgacaggatctataccaactaataagctcgcttccaatatcactacaattgatttgtcgcacaacatgctcaatggaactatcccacagaacttctcagggctccccaagcttcagatattgtcacttgaggataattatctaaatggttctgttccctcgacaatctggaatggcatcgagcttactggaaatagaagccttattctagacttccaaaacaattctctcaagacaattccggacacatttgatcctcccccaaataccactgtaatgctatatggaaaccctgtgtgtgggggtacgaatggatctctgataaccaacctgtgccaacccatgtcagtaaacatgcaaacatcgcaaaatgaacatggctctagttgtcaaccttgtcctgcggataaaaattatgagtacaatccatcatcaccactaacttgcttttgtgcggtgccacttggagtcggacttcgtctgaagagtccaggaatcacagattttcgtccctatgaagatgactttgagatcaacttaacctctttattgcaactgtttcggtatcagttaagtattgaacgctacatatgggaggttggtccaaggctaaatatgcacatgaagttatttccaagtaattcaagtctattcagtatatctgagattgtgcaactcagacatgtacttgctgcctgggaaattaccctttcagatgtatttggtccatatgagcttctcaacttcacactaggttcttatgcagatgaatttccaaatgcagtgtcaacaggtttaagtaaggctgcactgggcagtatctttgctagcacaattgctggcgctattttactttctgtggtagctaccacccttatagtgagaaggcgttcaagacacagagctgtctcaaaacgttcattgtcaaggttttctgtcaaagttgatggcgttagatgtttcacatttgaagaaatggctatagcaacaaataattttgatctatcagcccaagttggccaaggaggttacggcaaagtctacaagggaattctaggcgatggagcacttgtagcaatcaaacgagcacaccaggattcccttcaaggttcaagggagttctgcacggagatagagctactatcaagattgcatcatcgcaatttggtttcattggttggctattgcgatgaagaggatgagcagatgctggtttatgaattcatgtcaaatggcactttacgtgatcatctttctgccaagtccaagagacctctaagttttggtttgaggttgaaaatcgcattgggtgctgcaaagggaattttgtatctacatactgaagcagatccacctatattccaccgtgatgttaaggccagcaacattctgttggactccaaattcgttgcaaaggtagccgattttggtctctcgaggcttgctccagtgccagatgtcgaagggacattgccagctcacgtatccactgttgtcaagggcaccccaggctatcttgatccggaatacttcctaactcacaaactgaccgacaagagtgatgtttacagcctgggtgtcgtgttccttgaaatgttaactggtatgaaaccaattgagcatggtaaaaacatagtgagagaggtaaactcagcttgccagtcgggcgcagtttctggaataatcgatggccggatgggcttataccccccagaatgcatcaagaggttcttatcactagcaaccaagtgttgccagcatgaaactgatgacaggccttccatgtgggagattgtcagagaacttgagctcatcttgaggatgatgcctgaagaggacctgattctgctggaaacctcagagacagactcgaccgatgtcagtaagtcgttgtcatcttcagcgaccgggaccctcttcgtctcgtcacaggcctctgggagtcttgatgcgagcagcggcatgatctccggaagagtaactccccggtaggcatggtgtaatacttgtgaatatgcaagtttgttctgtaacattataggcttaccactcctaggacctgtcttttatgaattattcatattcagccgaacgtacagtagataatagcttatgatacacaggaacatagctggcattgcattctttacctttctaatatgttaatctgctttctgtaaggtagcgtttggttccagacccagtttgggatggaacagctcca

SEQ ID NO: 138975 - DNA, 356 bp, Zea Mays
atcctttctcctttattatatgaaaattaaaagatgtgaatatcttttgttaatcatacatcatataaaaaattagtttagcctctactcaaaatgtaattgcaaccatccatggttccaacatccagcttccatagcctaaacttactcagaattaaaagacctgaggagaatatttcttgtattaccaggagtcttagaaattgcagcttgcaaggagatattccagatttgagtagcatacctcaacttggctatttgtgagtacatctcagttttagttcccaattaatgtattttagcattatgactatcgattgttgctatgaacttggctcttcgaacagtttaaattt

SEQ ID NO: 138976 - DNA, 1599 bp, Zea Mays
atggcgatgggtgataggttgcgtgccattgatctgtacgagatcctcctcttcgcgacacggctggctcgtagggcgacgacatcctcaatctatcgcgtggccaggatgagaagaaacctgaagatgcaccacagtctgaggttgagaaggacaaggagggcgcggagaatgaagaagaagaaaaggaacctgaggataagtagtctatggaatgatgtttgctccgaccatgagcaggagatgactctggaggaatatgaaaagggctctgacaaggacttgaaaaagaaagaaagtgctgaaagagaagaacggggcaagaaggcttgcctcggatctgttactactcaaaggagaaattgcttatcatctgggaggcgaaggggtgacttgtcgaagagcattttatgtcaaagatgccctgctttactcacagagatagaaattattgaagacagagatagaccaccatacaaccaccttcgatggacgcgggggataactttgcttgacaatggcttaggtttataccaaataggcatcttgggttctttcttggttttgctgaaaacaagattatattattacaacatgagggcaggattaagtaggcatgatttagtccttagtctcttcatcagatgtttgaatactgaccttcaaggggaatgctccaaaccttccagtggttgccggctaatccggccggtcacaaacaaccaagtagagttgcctcgtacttcatctcgcctggctatttttagtagcatgcctgtagacatcatcgctgatcaaagatcttacagtttgtttcggagtgaagttgagtttggggatcaaggagaggactccattatcttgtcaccgcggctgaaggagattagtactcctgaccgccccgctgccctccgtttcctaggggagaagtataataacctcatggagaggtacaagaagcaggtagtcaagtgttccgaggagtgtgaaccaagatataatggcctgaagaagaagtacacagacgagtgtgcagagaggcggcgtctgtacaatgagcttattgagctaagaggtaacattagggtgttctgcagatgcagacctctgagctctgatgaggtcaaccatgggtgtttatctgttgttgagattgacccatcacacgagactgagctgcagtttgtccccagtgaaaaagaaaggaagccctttaagttcgatcacgtttctgggccagaggatgaccaaggttctcgtggtgagggtggtatccttagaaatagtgaagggccattgaaggaccacatttatttgcatcaaaaccatctgccgcctgaggtactcaaagaaaggctccctggtatttctgaaactgctgctatttttgctggtgttgacgtcaccaaggagcccattccagttttgcctactgtgcactacaatatgggtggtatcccaacgaactaccataaggaggtagtggatatcaagggtgataatccagatgctgttatccctggtctaatggctgctggtgaagcagcctgtgcagcaccgcgttggtggatgattgatcgtccagttgtatgtgactaa

SEQ ID NO: 138977 - DNA, 1824 bp, Zea Mays
acggcacggctgacgggcctttccgttccgccgctcgcattctcccaaccctcaccaacggctaaatgcttggaggtatatcgtcgaacacctgacttgcgttgcgtgacagcgcaccccgagaccccgataagatgtggcggctctcttcggccgcggcgctcctccgacgctcgctcgccgccaccgcgcgcctctccgttccgaggtatttgatgcgtgccttgctcgtggtacagcccactgcacgcactaattcacccatggctgtgcgttgcctacaacagtgtggttcagataacaccgacgatgacagggtcattcaggcgtttaagcggtgctgctcaaccagtgcaagcagtggtgtttcagatgcatcaccatgtgctgcttatgtcgagaacctctgcagatctggcaatcttgttgatgctgttcgtgttcttcgacatctgcatgacgagcagatccatgtcggcctgcacacctttaatatgttactgcaacacacagctgaagcaaacatctttactctttttgccaaggtattcaggtacctgctgctttcagaacttactcctgattcaacttcatatatgaatgttgcattggccctccagaagttggatgactgtgaaatgatactcaaatttgtaagagaaattttggaaatcacacactctagagatgctacagttatgaatcgcattatctttgccacagccaaatacggacacattgataaaagtttggtcattttcgaagagttgaagaaatatgaaaccagcttggatgttgtcacgttcaacactgttttggacatgctagggaaagctggacgggtggaccaaatgcttggtgaggtgaagctaatggaaaaacttaggcattttcctgacattgtgacatacaatacactaataaactgcatgcgaaggcttggtagactagatttgtgcaaaaggtttgctttggaaatggtagagagaggcatcactccagatttgaggacatatactgcactaattgatagttttggacggtctggccatattactgaagccctggaaatgtttcacgagatgaaaaagtcgcaccaaccttcagtttatgtctaccgtgcattgacaagcaacttgaaaaaggctggacattttgaactagcacaaaagctcaccgaggatatgaattcaagtgcttcagagttaataggcccagaagatttcaagccaaataataagggtataaggtttagaaaaaatggctaagaggtcactggttgatttttgaggcctgaattctttttatttgcgctatgtgctcacccgtagtcccatactgctatagattctggcgttggttggaatgttttggagaatgaagctcaaagaattagagagatacaaagctttaagatggcagaagcatgatggttaggcagacatgcagtgatacagggtcaagaggacctactgacctgaatgggcatttttgctgcatcattttaagcagctcacgagtcacgagaaatttgaagactcacccatttagacgacctgaaaggctgcatctgtgactcattgatcgctttatgtaacataggcacactgcaggatttggctgtgtgcctgtgacataggcgaatatcatgctaggcagaaacatgaaaaactactgcttctgcaattagtttttttcctgtgaatctttaggcatgaaaagggacaagtttccatattttctccgtttctttacccttgtaatcagagagtgtataacgtactatgagttgacgaagttcaatttattatcttagctattcga

SEQ ID NO: 138978 - DNA, 609 bp, Zea Mays
atccacccggaggcacctcacacacacacactctctctctctccactggctgacgccgcgaccgccccaacccaactgcccttttcggagatctcgccgcctccgccgtcgacttccgtcgcccccctatcccgcgtccgggcttacccgatggcacggctgcactggcttgaggccgtcctgccgctggggatcatcggcggcatgctctgcatcatgggcaacgcccagtatttcatccacaaggccgcgcacggcaggccgaagcacatcgggaacgatatgtgggacgtcgccatggagcgccgcgacaagaagctcgtggaacaatcctccggcaactagggtattgatcaacctcaaacttttctggatgttgacgaacctcgttcaaaagcacagaagtactgctcttttgtttcctgtacaattggaaccaagacttgtttgttttgctttgaaatatcaacagttcggagaataatctgtatctgacatctgtttaattgaacaaagccaaatactttgtcaattgtgtatgcacaattatttccgccaccggggcagatccatgaacacaaaaaaaaacacgtgtcacagttgttttgg

SEQ ID NO: 138979 - DNA, 435 bp, Zea Mays
gataaccaggctaggggcaaacctgcagctgtatgttgcggaagcgctcctgcgcggcgctcatggtgaaggtgcggtcgcggcgggagctgatctcccggcgctgcagcttccgcacactgctcaccaccgcctcctgcctcggcctcttcctggccactacccgccgcccgctgcatgggcgcgggctcgccgatatgcgcctcggctccatttgcagaccccggtgcgcctcacgcagcaaccacgccgcgctctctaacggagaggtagatttgggggcaggcaccgtcaagccgctgcggcgagagacatcgctggagtggcggaggtgactccccagtgaggcctagggtttgggagctcgagctcgcctcggagattgggggggagggggagaagagagagagacagggatacggtccatacggagat

SEQ ID NO: 138980 - DNA, 1030 bp, Zea Mays
ctgtatatatactgctcacgtccacccatttcgttctcaggccggccgagacacagtcataagctgcgattcctcccctctccctccctctctctctctctctagctagcctccgccttcccatctgcccaccattcttaaatcttgaaacaccaatctgccgatctaagcatgacggcgaaggtacacccgaacgtggccgtgccgtctgtcgggctcgggcagccggcggcggtggcggtggcggtgtcgccgccggccgacgaggagccggtgaccctaacggtgtggcgcaagtcgctgctgttcaactgcagggggttcacggtgttcgacgcccgcggcgacctcgtgtaccgcgtggacacctacgcctccgactcccgcgcggaggtggtgctcatggacgccgcgggccgccccgtgctcaccgtccgccgcaggcagaggccgatcggcctcgggctgggcgccgaccagtggctggtgtacccgggcgaggaggcccggcgcctgcccccgctctacgccgtcaagcggccggcggcgcagtacatgcgcggcggcggcggcggcgccaagtccatggcgcacgtcgcggctagctctggaggcgccggcgccggcggcggcgggtacgaggtggaggggtcgtacctgcggcggcgctgcacggtgtacgacgagcggcggcgggccgtggcggaggtgcgccccaaggaggccgtgggctcggacgtgttccggctggtggtgcagcccgggatggaggtgtcgctggccatggccgtcgtcctcgcgctcgaccagatgttcggcaagccgtcgctgctcaggagctggtcctcctagcggagcctgtataccgcccggcccgccgtgccgttccattgccgtgggtgctttgtttccccttctttagcacccccaaacccaattgtttggacccgggagcacaacgattgctctccaggctgctgtatttttcgttcccttgtgtctttgataccaaagccgattaactggggtc

SEQ ID NO: 138981 - DNA, 133 bp, Zea Mays
atccccaaacgacagatgcagaaagcagcaacaacaaacgcgtgaacaaaaggaaacacaactcttttactccgtatataccactacccacaaatgttgtagaagcacggaaaacccgaagagtgttacctaa

SEQ ID NO: 138982 - DNA, 288 bp, Zea Mays
gatctgcatcgtcaagctacagcgggacaggtgcaagagagctcccatggttctatcgagttgggatgatgaaaatagagaggatataggttttccccttaaatctccttggagcccggacctgctagactcgcagtgacctggccacctcccatgtgtaagcctgggcagcttccatcggccgtggttccagtcgttttttttttatttttcctccgatgatattggcgtcgctcctggtcccggccgtctccctcgctaaatagtttcttttttactagcccaggc

SEQ ID NO: 138983 - DNA, 2657 bp, Zea Mays
agctcgccacgacgctctggtcacgctctcccatgcgccgggatggccacagaggtgccagcggcggggacggccggcttgctgccgccgaggaacgccacggcgcaggtggcgctgggcaacaacatttccagcgccgcctcggtcgtgtgctactcgccgatgatggtgacggcccacggcatctggcagggggccaacccgctggagttctcgctcccgctcttcatccttcagacggccatcatcgtcgccaccacccgcctcctcgtcctcctcctcaagcccatccgccagccccgcgtcatcgctgagatcctcgccggcgtgatccttgggccgtccgtgatggggcaggtggatgtctgggcgagcacggtgttcccggtgcggagcttgctgacgctggagacggtggcacacctcggcctcctctacttcctcttcctggtcggcctcgagatggacgtcaacgtcatcaggcggtcggggaagaaggccctcatcattgccgtggcggggatggcgctgcccttctgcatcggcaccgccacgtccttcatcttccggcaccaggtgtccaagaacgtgcaccaggcctccttcctcctcttcctcggcgtcgcgctctccgtgaccgcgttcccggtgctggcccgcatcctcgccgagatcaagctgctcaactccgacctcggccgcatcgccatgtccgccgccatcgtcaacgacatgtgcgcgtggatcctgctcgcgctcgccatcgccatctccgaggtcaacagctctgccttctcctccctgtgggtgctcctctccggggtcctcttcgtgctcgcctgcttctacgtcgtgcgcccgctaatgaggtggatcgtccgccgcgtccccgagggcgaggccatcagcgacgtgcacgtgatgctcgtgctcaccggcgtcatgatcgccggggtctgcaccgacgccatcggcatccactcggtgttcggcgcgttcgtctacggcctggtcatacccagcgggcagctgggcgtcgtgctcatcgagaagctcgaggacttcgtcaccgggctgctcctcccgctcttcttcgccatcagcggcctccgcaccaacattacccgggtgcacgaccccgttaccgtggggctcctcgtgctcgtgttcaccatggccagcttcgccaaggtcatgggcaccatccttatcgctgtctcttacaccatgaccttccgcgacggcgtcgccctcggctttctcatgaacaccagagggctcgtggagatgatcgtcctcaacatcggaagggacaaggaggtgctggatgatgagtcgttcgcggtgatggtgctggtgtctgtggcgatgacggcgctcgtgacgccggtggtgacgacggtgtaccgcccggcgcggcggttggtcggctacaagcggcgcaacctgcagcggtccaagcacgactccgagctgcgcatgctggcgtgcgtgcacaccactcgcaacgtgccgtccatcatctcgctgctggagctgtctaacccaaccaagcgctcccccatcttcatctacgcgctgcacctcgtggagctcaccgggcgcgcgtccaacatgctcgccgcccaccactccgccaccaaccagagccgcagctccagcgaccacatcttcaacgccttcgagagctacgaggagagcgtgggcggcgtgtccgtccaggcgctgacggcggtgtcgccgtaccagacgatgcacgaggacgtgtccatcctggcggaggacaagcacgtgtccctcatcgtgctcccgttccacaagcagcagacggtggacggcgggatggaacccatcaacgcgtccctccggggcttcaacgagagcatcctgtcgtcggcgccgtgctcggtgggcatcctcgtggaccgcggactcagcgccgcggcggcgcgcatggcgagcgtgcaccacgtggcgctgctcttcttcggcgggcccgacgaccgcgaggggctggcctacgcgtggcgcatggtggagcacccgggcgtctgcctcaccatcgtccggttcatcccgccgggctacaaggcccccgcgctggcgccgccgcagcccatgccgccccggggccccgcggccaacgtgcacgcgcgcgccatcaccatcgtcccggacgtccccaagagcgagcggcagatggacgaggagtacctgaacgagttccgggtgcgcaacatcggcaacgacgccatcctgtacatggagcaggtggttgccaacagcgaggatacgctggcggcaatccggggcctggacagcgcgcacgagctgtacatcgtgggcaggcaccccggcgaggccgggtcgccgctgacgtcggcgctcgcggagtggatggagtcgccggagctggggcccatcggcgacctgctggtgtcgtctgagttctccaagatggtgtccgtgctggtgatgcagcagtacgtgatcacgacgccacagccggcggccgcggggccagccgtgccagtggccgtgacggacgaccccgtccggcagtatgtgaccaacgccaaccagcggacgtcggtgggtggcggcggcggcgtgtggggcggcggcgctggagggttctgacctctggcagcaggcac

SEQ ID NO: 138984 - DNA, 717 bp, Zea Mays
aaaagtgctagggttcttctcgcccatcgcagccgccgccgcggctctcgcctcttgactcgctctcgcctctcggagcaaaagctgtgtccgctcctcctggtgatcccggagccagtcctcgccgcaccgcgctgtgtctgctcctcctggtgatcccgcaccgtgctgtgtccgctccatcttcctccgccgccacactcagcgccggtgcgagggcatgtctacctacccgaggacctacgatctcatccatgcggactcggtgttcaccctgtacaggaacagggagaagatcctcctggttgtcaagacgtattggactacccatgaggccatgaccaagatcagtagcaggactgtcaaatctattaatgatatgaaagaacactgcttctggtcccaaattatggagagaaagggtccaacagtcgagacgcctgaatggtgccaggaatgaattggtcatttttactgtagcccagaggcttcgcgcatgggctatgctacagaggcaggactcatgcaggactcagtttttttcccgggagcatagttggcggtctagtcttcggattgatagccactagtgtgtgtttttagattctgttgggctgtgtgctcctatgggcagaggccggaagtgactttcaaggaattgtatcatctcgatgtactgttcttgatgaataaaaatccttccctttcaaaaaaaga

SEQ ID NO: 138985 - DNA, 1298 bp, Zea Mays
gcctggcccgtgctcgcctggtaaaagtgctagggttcttctcgcccatcgcagccgccgccgcggctctcgcctcttgactcgctctcgcctctcggagcaaaagctgtgtccgctcctcctggtgatcccggagccagtcctcgccgcaccgcgctgtgtctgctcctcctggtgatcccgcaccgtgctgtgtccgctccatcttcctccgccgccacactcagcgccggtgaggactaccctcttcctcttcctctccttctccctcaccctctccctctccctgtggttcactaccgggtcgtcggcgaagggcgaacgacgccatgccggcggatccatgcagggctccacaaaagctggatccgtggagggttggattctctttgtagggctggatccatggagggagtgcacggcgctcgtcgcccagctcgaggtgcgagggcatgtctacctacccgaggacctacgatctcatccatgcggactcggtgttcaccctgtacaggaacagggagaagatcctcctggttgtcaagacgtattggactacccatgaggccatgaccaagatcagtagcaggactgtcaagtaaaattctcaatgttgataagaatttttcatgtttggagttgtaccaccgtttctagctccttgaactagtgatctcttgacggtttgtgcttgctgttctttctggacagtacttgctcggataggaaatttaacatgtggggggaaggaagggtaggtagtaagacccctggcccctgcaaagttttcttcaattccgaattgtgtccaaatggtaaatagaagtcattgttgcgagtcaccccgaccccggataagcataatcacaactggattcattctagcattacaattttgttctgtgtaatttcctttttttaaatcttattagcatgtgttgtcccagatctattaatgatatgaaagaacactgcttctggtcccaaattatggagagaaagggtccaacagtcgagacgcctgaatggtgccaggaatgaattggtcatttttactgtagcccagaggcttcgcgcatgggctatgctacagaggcaggactcatgcaggactcagtttttttcccgggagcatagttggcggtctagtcttcggattgatagccactagtgtgtgtttttagattctgttgggctgtgtgctcctatgggcagaggccggaagtgactttcaaggaattgtatcatctcgatgtactgttcttgatgaataaaaatccttccctttcaaaaaaaga

SEQ ID NO: 138986 - DNA, 814 bp, Zea Mays
gggcgaacgacgccatgccggcggatccatgcagggctccacaaaagctggatccgtggagggttggattctctttgtagggctggatccatggagggagtgcacggcgctcgtcgcccagctcgaggtccacgtccaccaccgcgctcgtcggtttaggtttcgtgatctcactactgcattcactgcaggtgcgagggcatgtctacctacccgaggacctacgatctcatccatgcggactcggtgttcaccctgtacaggaacaggtaacaaaaatcatcagttgacgaacggacctgcatcaggcaggaagacgcagggactaatgcattttggtatgcgtcagggagaagatcctcctggttgtcaagacgtattggactacccatgaggccatgaccaagatcagtagcaggactgtcaagtaaaattctcaatgttgataagaatttttcatgtttggagttgtaccaccgtttctagctccttgaactagtgatctcttgacggtttgtgcttgctgttctttctggacagtacttgctcggataggaaatttaacatgtggggggaaggaagggtaggtagtaagacccctggcccctgcaaagttttcttcaattccgaattgtgtccaaatggtaaatagaagtcattgttgcgagtcaccccgaccccggataagcataatcacaactggattcattctagcattacaattttgttctgtgtaatttcctttttttaaatcttattagcatgtgttgtcccagatctattaatgatatgaaagaacactgcttctggtccc

SEQ ID NO: 138987 - DNA, 2275 bp, Zea Mays
aattcgaagccttcccggttaccccttcggcctccacctatcaccacccgggacgtcttccatggcctcctcgtagtagaatagttctatctcaccgcaacaactcctcattacatcctttatgagaggctgatcgattggtagatacgtactcgggtggagcagagcaacgagagacatggcgacgacgacgcgtgttgccgccgccgccaccggcgtgctgctggtcctgtcggcgttggcgaccctggcgcgggccgaggacccgtacctgttcttcgagtggaaggtgacgtacgggaccaagtccctgctgggcgtgccccagaaggtcatcctcatcaacggcgagttccccggccccaggatcaactgctcctccaacaacaacatcgtcgtcaacgtcttcaaccagctcgaccatccgctccttttcacctggaacgggatgcagcacaggaagaactcgtggatggacgggatgccaggcacgcagtgtccgatcctgcctaacaccaacttcacgtacaagtggcagcccaaggaccagatcggcagcttcttctacttcccgtccatcggcatgcagcgggcggcgggcggctacggggccatcagcgtggtcagccgcctcctcatcccggtcccgttcgaccagcccccgccggagaacgaccacgtggtgctcatcggagactggtacaccaaggaccacgaggtgctagcccgccagatcgacgccggcaagggcgtgggccgccccgcgggcgtgctcatcaacggcaagggcggcaaggacctggaggccgcgcctgccttcaccttcgaggccggcaagacgtaccgcctccgcgtctgcaacaccgggatcaaggcgtcgctcaacttccgcatccagggccactacatgaagctggtcgagctggagggctcccacaccctgcagaacacgtacgactcgctcgacgtccacgtcggccactgcctctccgtgctcgtcgacgccgaccagaagcccggcgactactacatggtggcctccacgcggttcatccacgacgccaagtccgcgtccgccgtcatccgctacgccggctccagcgccccgccgtcgccgaacatgaccgagccaccggccggctgggcctggtccatcaaccaggccaggtcgttccgctggaacctgacggccagcgccgcgcggcccaacccgcagggctcctaccactacggccagatcaacatcacccgcaccatcaaggtcatggtctcccgtggccacatcgacggcaagctccgctacggcttcaacggcatctctcacagggaccccgagacccccgtgaagctcgccgagtacttcaacgccaccgacggggtattcagctacaaccagatgggcgacgtgccccctgccgtgaacgggcccctccatgtcatccccaatgtcatcaccgccgagttccgcaccttcatcgagatcgtcttcgagaaccccgagaagagcatagactccctccacgtcgatggctacgccttcttcggcgtcgggatgggccccgggaagtggtcgccggaggtgaggaagacgtacaacctgctggacacggtgagccggcacacgatccaggtgtacccgcggtcatggacggcaatcatgctgacgttcgacaacgcgggcatgtggagcgtgcattccaacatctgggagcggtactacctcggggagcagttctacatcagcgtcgtctcgccggcgcgatcactgcgcgacgagtacaacatgcccgacaacgccctccgctgcggcaaggtcgtggggctgccgctgccgccgtcctacgcccccgcgcgctaagacgacgaaggcctcgttttctcctcgtggtctgaccatccaatccaaactcaaggaacgtcggctggggggcagccgggcggatgggaacgcatgagtggatatatataaccttgagatgcatgccctctcaaatcactgtactggggttctcaaaaaatcattgtaatgggagttatatatataactttatctcaccatttatttacaccaacaagtcattgggtatgcatgttctatcgttacattttgtagttttctctgcttgtttatctttgatcttgacatttcgggtttgtttccgtttttgagctacttgaaaaaccaataaccttagccctaccaacctttttattttttcagatctaaaactagatatatgcccgtgcgttgctacggtatcaatatgataaaata

SEQ ID NO: 138988 - DNA, 3481 bp, Zea Mays
cctagccttgccagtttccacgacagagagagagagagcgagaggaggaaagaagagtcatcgcagacagaagagggtgctccagcgtgcatctcgtcgcccgccgtcggcgtgattgcttggcagcaggatggaggaggccacgcggcgccgtatcacgccgacgacgacgctgctgctggccctggcggtgctggcggcgagcgttcccgccggcttctgcgccatcaaccctcaggacgcttctgctctcaacgccatccagagccaatggacgaacgcccccttgagctggtcctcggcgagcgacccctgcgacgggggctgggacggaatcatgtgcagcaacggcagggtcacgtcgctgcggctgtcaagtgtcaacatccagggcacgctcagcgacagcgtcggacagctcacccagctcatgtacctggacgtttccttcaacctcggtctcaacggccgaatgcccgctacaatcgggaacctggcgcagctcaccacgctgatcctggcaggctgtagcttcaccggagccatcccacagcaactcggcaacctgcagcagctctcgttcctggcgttgaattcgaacaagtttaccggcacaataccccctacgctgggtctactctcgaacctcttctggctggatctggctgacaatcagctcactggatctatcccggtctccacagcaacaacgccggggctcgaccaacttacccacacgaagcacttccacttcaacaagaaccagctgtctggaacactcacaggcctcttcaactccaacatgagcctgatccacatactgttcgacagcaatcaactgactggcccgataccagaggagctagggggcatttcatcgctccaagttctccgactagataggaacagccttaagggaacgattcctcctaacatcagcaacttggtcaatctgaacgagctgaacttggccagcaaccagctcactggaccgttgccagatctaagcagcatgaccaaattgaatgtcgtggatttaagcaacaactccttcgccgtttcagcagccccaaactggttcacaactttaacatctctaacctccgtatcaatatcttctggaaagctttctggcgctgtccctaagggtctcttcaggttgccccagctgcagcaagttgtgctgagcaacaacgagttcaacgggacacttgaggtcacaggcaacatcagcagtcagcttcaggctatcaatctcatgaataacggcattgctgctgccaatgtcaccccaagctacaacaagactctagtgctactagggaacccgggctgcgtggacccagagttgaaagtcttctgcagcctcaagcaggagagaatgatagcgtacaacaccagcctggccaagtgctcctctacggcctcgtgttccagtgaccagcgcctgaaccctgcaaactgcggctgcgcatacccctacgccgggaagatggtattcagagcgccgctcttcacggacctgacgaacagcgccacctttcagcagctggaggcgagcttcacgacgcagttgtctctccgcgatggctccgtgttcctctccgacatccacttcaatagcgacaactacctccagattcaggtggcgcttttcccgtcgtctggggtgtccttcagcgtggcggatctgatacggataggcttcgatctgagcaaccagacttacaaaccaccgtcgaattttggaccctattacttcattgcagatccatacgctcttttggcaggtgcttcttctcgtggcagtaaaaaatcacatatcagcactggcgctatcgctggaattgcggtagccggtggaattcttgtgattgccctcattggcatggtattatttgcgttgcgacagaaaagaagggtcaaggaagtgacaggacgaaccgaccctttcgtttcatggggagtttcccagaaagacagtggaggggctccacagcttaaaggagcaaggttgttctctctgaatgagctgaagaactgcaccaacaatttttcggacacccatgagataggctcaggaggctatggaaaggtgtacaagggaacactcgttgatggaacgcgggttgccataaagagagcagagcgcggatcaatgcaaggtgtggtggagttcaagaacgagatcgagctgctgtccagggttcatcacaggaacctggtgagcctgattggcttctgctacgaacaaggggagcagatgctggtgtacgagtacgtctccagcggaacgctgagagagaacttactaggtacatggacaaaaccacccgtccaccgcatatatatacaacatttcacagaatttccatctcccagttcagttgtaatcgtagcatcagttgttcactcaacaatctgtgtacgcatgcatgaacggccgccatgcagtgagaggaacgtacctggactggaagaagaggctcaggatcgcgctcgggtcagcgaggggacttgcgtaccttcacgagctcgccgatccgcctatcatccaccgggacgtcaagtccaccaatatcctcctcgacgaccacctcaaagccaaggtcgccgacttcggcctctccaagctcgtcgcggacacccagaagggccacgtctccacgcaagtgaaaggaacgctggtgagtcatcacaacggaaacacaacaccatactactagcaggaacctgaacgatcaaaattatcatcaaatataaacttaactaagcatgtggtgtatttatgcagggttacttggatccggagtactacatgacgcagcagctgtcggagaagagcgacgtgtacagcttcggggtggtgatgctggagctggtgagcgggcggcagccgatcgagagcggcaagtacatcgtgcgcgaggtcaagctggccatcgaccccaacgaccgcgaccactacgggctgcggggcctcctggacccggcgatccgggacaacgcgcgcaccgccgggttcaggcggttcgtgcagctggcgatgctgtgcgtggacgagtcggcggcggcgcggccggccatgggcgaggtggtgaaggacatcgaggccatgctgcagaacgaggtctccgggcccgacggggccaccagctccgccggctcctccgccaacgacttcgacggcgccggcggcggagcgaggtcgcacccgtacagcgacgtcgagatcacgagaggctcgtacggggacaacgcgtcggactacatgccgtacttcgaggtcaagcctaagtagaccttccagtttcagacttgtatagcttgtgagatacattgtatagatttgtattatatttcacgtttatattttttggtttctcgagcttaatttttaccatgctacttccgatctatcatgacgcaaactgtacattcctcgaaattttccaagataagttgttctgttcttatttag

SEQ ID NO: 138989 - DNA, 2246 bp, Zea Mays
cttagctggtaccaagcaccattattcaattaaagaaatgtaacctcctgcaggaacttggccagcaaccagctcactggaccgttgccagatctaagcagcatgaccaaattgaatgtcgtggatttaagcaacaactccttcgccgtttcagcagccccaaactggttcacaactttaacatctctaacctccgtatcaatatcttctggaaagctttctggcgctgtccctaagggtctcttcaggttgccccagctgcagcaagttgtgctgagcaacaacgagttcaacgggacacttgaggtcacaggcaacatcagcagtcagcttcaggctatcaatctcatgaataacggcattgctgctgccaatgtcaccccaagctacaacaagactctagtgctactagggaacccgggctgcgtggacccagagttgaaagtcttctgcagcctcaagcaggagagaatgatagcgtacaacaccagcctggccaagtgctcctctacggcctcgtgttccagtgaccagcgcctgaaccctgcaaactgcggctgcgcatacccctacgccgggaagatggtattcagagcgccgctcttcacggacctgacgaacagcgccacctttcagcagctggaggcgagcttcacgacgcagttgtctctccgcgatggctccgtgttcctctccgacatccacttcaatagcgacaactacctccagattcaggtggcgcttttcccgtcgtctggggtgtccttcagcgtggcggatctgatacggataggcttcgatctgagcaaccagacttacaaaccaccgtcgaattttggaccctattacttcattgcagatccatacgctcttttggcaggtgcttcttctcgtggcagtaaaaaatcacatatcagcactggcgctatcgctggaattgcggtagccggtggaattcttgtgattgccctcattggcatggtattatttgcgttgcgacagaaaagaagggtcaaggaagtgacaggacgaaccgaccctttcgtttcatggggagtttcccagaaagacagtggaggggctccacagcttaaaggagcaaggttgttctctctgaatgagctgaagaactgcaccaacaatttttcggacacccatgagataggctcaggaggctatggaaaggtgtacaagggaacactcgttgatggaacgcgggttgccataaagagagcagagcgcggatcaatgcaaggtgtggtggagttcaagaacgagatcgagctgctgtccagggttcatcacaggaacctggtgagcctgattggcttctgctacgaacaaggggagcagatgctggtgtacgagtacgtctccagcggaacgctgagagagaacttactagtgagaggaacgtacctggactggaagaagaggctcaggatcgcgctcgggtcagcgaggggacttgcgtaccttcacgagctcgccgatccgcctatcatccaccgggacgtcaagtccaccaatatcctcctcgacgaccacctcaaagccaaggtcgccgacttcggcctctccaagctcgtcgcggacacccagaagggccacgtctccacgcaagtgaaaggaacgctgggttacttggatccggagtactacatgacgcagcagctgtcggagaagagcgacgtgtacagcttcggggtggtgatgctggagctggtgagcgggcggcagccgatcgagagcggcaagtacatcgtgcgcgaggtcaagctggccatcgaccccaacgaccgcgaccactacgggctgcggggcctcctggacccggcgatccgggacaacgcgcgcaccgccgggttcaggcggttcgtgcagctggcgatgctgtgcgtggacgagtcggcggcggcgcggccggccatgggcgaggtggtgaaggacatcgaggccatgctgcagaacgaggtctccgggcccgacggggccaccagctccgccggctcctccgccaacgacttcgacggcgccggcggcggagcgaggtcgcacccgtacagcgacgtcgagatcacgagaggctcgtacggggacaacgcgtcggactacatgccgtacttcgaggtcaagcctaagtagaccttccagtttcagacttgtatagcttgtgagatacattgtatagatttgtattatatttcacgtttatattttttggtttctcgagcttaatttttacc

SEQ ID NO: 138990 - DNA, 502 bp, Zea Mays
atatcaccgttgtcgtcgctcccctccacgaccctgctctgcctgatgcacaactgcatggtgccaccggtgtacgcgtcgtgcctgatcaaggccgggttgaaaaacacacggctgatcgaccagtgccctggctggaggggctgagctgatgtcaggctcactggtcgtgtctcagcaacgccaatgccaataccggatcaccttcgatcagtggttggaaatagcgggggaagcagaactgaagttccgattctttgattgttttgtccagttgttactaacgttcttattcttttttcgatttcgggttagttacaggcaagtaactgccttagtgatcctgatttacaggtgtttttagttagtgtatgtgcgtttgtgtatctctctgctgtataatgagtagtactcctggagcttcaatcacactgccgcatgacgatgttacatcggatgatggatggtgttagtaggagccagcgatgttattttcagatca

SEQ ID NO: 138991 - DNA, 951 bp, Zea Mays
ctgtcccaatctggcgcggttgtgagctccagaataccaaaatgacgatgcgcgactgtgagctccagaataccaaaatggcaatgcgcggctgcggagtaataatatggcgaagccgcgcgacgagattgttacaatctcaaataactcactataaagccggcggcaccacccggcgtcatccccattgcagtttcaggattcctggcacctcgtccgctccgagtccgcgactctttcactgagatacatacaccccgactcgctagcgagcaggcaggcagaatggagcgccacgccgagaagccgctcctcgtgctgccctcctgcctcctcctcctccttgtcctcctcctcgccccgcttgtctccgccgtccccacgccaagtgagcctcggccatcatggcctccgctgtcccacccccggtgtttcctctctcggtctcggctgctgattttgcctgtgcgatcgcaggaagcctgcgcctggggagccaccagcagcacccgccggctctgaagctcagttcctctcaggagacgacggcgatcgcggcggcgatgatgaacacgggcaggccgacggcgaggatggacgtggaggtgaacgactaccagccgtcgggccccaacaaccgccacgacccacccaagggtcctggaagaacttgaacggggctcagctggacgacgtacgcgcgcccccaataatccttctccttcgtcgtcgtcgtcttcaccggtagtacagagtgcgttgcttgtgctagctcatgtgtatatatataccggccgcgcgtgtgtatggccgtgtgcaagcacatcggtgggtcgttaagttgtgttggttgctgttcgtcagaaagaactgcactgcatgcagatcgatttcgtaccccgctgcaggtgccggtacagtatctatcagcaaaagcagcatcattgctcc

SEQ ID NO: 138992 - DNA, 862 bp, Zea Mays
ctgtcccaatctggcgcggttgtgagctccagaataccaaaatgacgatgcgcgactgtgagctccagaataccaaaatggcaatgcgcggctgcggagtaataatatggcgaagccgcgcgacgagattgttacaatctcaaataactcactataaagccggcggcaccacccggcgtcatccccattgcagtttcaggattcctggcacctcgtccgctccgagtccgcgactctttcactgagatacatacaccccgactcgctagcgagcaggcaggcagaatggagcgccacgccgagaagccgctcctcgtgctgccctcctgcctcctcctcctccttgtcctcctcctcgccccgcttgtctccgccgtccccacgccaagaagcctgcgcctggggagccaccagcagcacccgccggctctgaagctcagttcctctcaggagacgacggcgatcgcggcggcgatgatgaacacgggcaggccgacggcgaggatggacgtggaggtgaacgactaccagccgtcgggccccaacaaccgccacgacccacccaagggtcctggaagaacttgaacggggctcagctggacgacgtacgcgcgcccccaataatccttctccttcgtcgtcgtcgtcttcaccggtagtacagagtgcgttgcttgtgctagctcatgtgtatatatataccggccgcgcgtgtgtatggccgtgtgcaagcacatcggtgggtcgttaagttgtgttggttgctgttcgtcagaaagaactgcactgcatgcagatcgatttcgtaccccgctgcaggtgccggtacagtatctatcagcaaaagcagcatcattgctcc

SEQ ID NO: 138993 - DNA, 1190 bp, Zea Mays
catgttcgtgctttcggtaatgcacttctttgtctctgattaattccggatctctctagaattctccttcttgcccccccccccaactctctttctctggtgattgtctacaccgttgagatgtggagcccgcgtgggccttaccgccaccgtgtgcgtctccacgggtgggcgcgccgccgtcgattgggcgccgacggtggtaccatggtcgacgaggtaagctgacagctacttagacgtctttggtgcctattcactcgaatcttgccctaaacccctctctgtgtatgtatgaaatgtataatctgtaacggtttaggatcgagttttgaggtgtatgcgtagattcggacccccgtgcatttactacgacttggattcggttcaagtgcttacgttgtacttgggcagtgcacctatgcactttaatccagccagattatgggggaacttaagggtttcttaccatttgtgtggcctaaccaaaacccctggtttctttatttcttgttatagatcttaagtcgagactctccgagtctttttggctggatataccatctgggttagaaaagttctaacccgagatctgtttctttcttaaatttactttctcggggtgactgagcgatggcgagctctctgagttcagtcacttgtgactcgagacattttctttgatctcttaacattcagatcagggaatctagggttcttaggtggcttcgacgtcgttgatagattatgtggacttgttggggaccttcggcttccgaaggtcctcaaaaacaggatttaacagtatttctggagtataatgtgtgaacaggtatctttggactcaagtcagcatcgcagtagaccagaataatacgaaggtttatatagcgccgaaggtgtgagcaggaaagcttcggcgtggcatcaaaaagtgaaaccgacttaaagatgaaaaggctatttggacctcgacagattactatagaattattatcaagtgtaaagggcatgaatgtaattttgtatgggttgtgtcccgtgcctataaataggtgaacagtatccccgtactgttcacgctgacttggcattcgctttttgcgccacgcttgtactatcatctccttccagttgaaggtacacttgtaattcaatgatatttctgtttatgcttgataataaaatat

SEQ ID NO: 138994 - DNA, 174 bp, Zea Mays
atgacaacagctactgatcaaaccaaattaacttcaaatgcaggagaacctagggcaagcagcaagggcaaatatgtgtgcatcagggaaggaagtcaattagtcaaacgtacacataactatacattccttttatatatgatagaagcatgctaccttatagttctcgcctaa

SEQ ID NO: 138995 - DNA, 875 bp, Zea Mays
cttagggtccccgaaatgtcaggaccggccctatatactaccgtgctcgagttattttctctaaggattggagatgaacttctctacgatcgtccaaagctcagaccacatttgacttcccttcattttgcaagctgccgatgcaccatttttttgtcgtgatgttacttgttttgtaggtatataatgtttgctaacgtcatcgactcaagccaggtgagggttcagcgtggaggttcatcgaggtctgctgctcgtagctcccgtcgctccactcaaaatccagcagaagtggagcaactgcgagaagaatttaggcgacatcaggattacttgaagcaacaagctgcgcaacatgaatattatgctacacagattcagcaacaacaaacactcatacaacaactagcacaggcccaaaggatacacgtcccggtgcccctccaccacctcccgttcattatccttggtcttcacctccacctatacctacatctccatctactgaacatcagaccctccagctaccttgctgacgcatgaacaagacgacgggttagactttgtcgaaaccctcttcactagtggaggtatcgaccatcactcctcactgtaacccgatggtgatcggcgaccgtgaacttccatgttattgtgttctgatacttgagacttttattatgactatgtatgagatattgtctcttattagtactggatgatgagatgtgtcttattatgactatggatgagacttttgtgatgtaattgataagactatgtatgagacttttgtgatgtaattgatgagactatggatttaaatattgttatgtgattgtgtgtcagatgttttatgtgaaaatatgttgtgt

SEQ ID NO: 138996 - DNA, 1337 bp, Zea Mays
cttagaaattacatttcatttctacagcagatgtatcaccaacatcagggcctgagtgagctcttcaccacgaggacatcctttccaatggagcagcatctgtttttgcgtggaggaaatgcccaaggagattctgggctggttctctcaactgatgctaaaccaaggctcaaatggacacctgagttacatcagcgatttgtagatgcagtcaatcagttaggtggagcagagaaagctactccaaaaacagtcatgaggctcatgggaatcccaggactcaccttgtaccatttgaaaagccatctccagaaatacaggctgagcaagaacctccaagctcaagcaaatgtcagtacatcaaagaatgccataggatgtacatccattgctgataggattcctggaacaagcgctgcaacaatgagcagtacaaatgtcgttccgcaggcagagaagactattcaaattggtgaagcacttcagatgcaaattgaggttcagagacagttaaatgaacaacttgaggtgcaaaggcatctacaactacgaattgaagcacaagggaaatacctacaagcagttttggagcaggcacaagaaacacttggaaaacagaatttgggtcctgcgaacctggaagatgcaaaaataaaaatatcacagttagtttcacaagtatcaactgaatgcttcagtaatgcaattacagatgtaaaaggaagttcaagtgtgcataggttagagcccagacaaatccagtttgttgaaagttcaacaaatagttatttgtctgtggccgaaggattcatcaaggagcagagactacagcaccaacagcaccatggagtactaaaagcacatgatggtagttcattattttgcagaaaaagaccgcatgaacatgagacccagtttgcccttaacagaagcctaagtgagcgtaggatggcacatttgcagaatgatgaacaatacagtaaagcagagtttgggtatgaaagtgacacagagatagtgcatgagtatactgcaccccaaaatggtggaggtagcaccaccagttcggcatcaggaagcaaagtagatgcggagaagctatatctagaagagcaaaagtgtgcaagacaggtcgctgaataccccagagaaagcaagctaatagattttgagaattcgtgttcagggaagaaacttgatctgaacacccataatgtagatgacactgatcaagcttacagacattttgacttgaatgatttcagctggagctgataatatgtaagatgatagaagcaaagaaaatgaagttaaaaataatttcttccaacattgaa

SEQ ID NO: 138997 - DNA, 1454 bp, Zea Mays
atttaatacttccagtacctatctttctttattcgttggagatttgcgccaggatccatttcgaaagaatctagcaagccagccatctgcgtcgtaacttgttgttcttcccctccatcctacttccaagctaccaaggacgggcgcagacggaggaccagcgccgtcgtccaatcccctactagcggcaccggcacgaaggtcagtcgtccaatcccctactaggggaacagccggcggcacgaaggaaggatttggaggatgacagaagctgcagttacaaggtactggtgccatggatgtgtgagggttgttgaggaggccatgggggaggagatcaagtgcccattttgtggtggtggattcattgaagagatgattggtgaggaatttgatgggttggccagccagcagtcagagcgggattcatcacaatggggagcgtcgaacaacccctttgagcagccaagggcggaggcggacagtgaggatgaagaagatgatgatgattacgatgatgatataggccgtgcatttgagagtttcatcaggaggcatgggcggccatcagctctccgtcgggcgtttgacagcatccaggacgaccttagagctgatagggatagtgacttctccattctgatcaatgccttcaaccaagccctcgctttgcaacgctcagtgcttgatgctgatgaggcccgagatgaccaaggtggatctagcaatgatgatggcttgatggaagaatatgtcctgggggctgggctaaccctgctgcttcaatatttgactgagaatgatccaagccagtatggcacccctcctgcaaacaaagaggcggttgacgctctgcccactgtccaaatagcagaggctgtcagctgttcagtctgccttgatgatcttgagctagggtcccaggcaaagcaaatgccttgtgagcataagttccactctccttgtatactgccatggcttgaactccatagctcctgccctgtgtgccggtttgagctgccatctgaagagacagaagatttggatgagcctagcaatgtggacagaacagagaacacccatgaggaagtcagggccgatggccctgaagatgacagtgagagcagtaacagagcgtgggcccttgttccttggttcagtgggctattctcaacacctgaaccacaaactgtcagaggcgctttcactgatcagcagactcgctccacttctggaaccaacatgaatgctggcgaaagctgatctcttcctcctttgtgaataatgcccatacatctgagaatagcaatggaccttgtcagtagataacttatttttctgtactgataatccttcttggatgaatcgcaaggtacaaagtttgtgacagctccattttttgccaggattttagcgatcatttcactgttgattgatttcatagctactgagca

SEQ ID NO: 138998 - DNA, 1043 bp, Zea Mays
atggccacctccgaatttactgatccatccatctccatccccatcccgtgacccgtgcacgccgccgcttcaagtcctaacaagccgcatcgcatcgcatgcgtgtgctgtccgaccgccatctccgcagccggctggcctagctacctcacctcacctcacgcaggcacactgcacacacacccatggtggtggcggcgatgcggcggccgtgcgctgtgccagcgctgctggtggcggcggcgacggcgacgctagtgcttctgctgctgctgtcaccgtcgagcgcgcagccggtgccgtccccggcggcggcgccgggccccgcgggcgggaccgggatcgactcggcgtgcctgaactcgctgctcaacatgtcggactgcctcccgtacgtgagccaggggagcacggcgcggcgccccgacgcgccctgctgccccggagctggcgggcctcgtcggctccaaccccgtctgcctctgcgagctcctctccggcgccgccgactcctacggcatcgccgtcgactacggccgcgcgctcgcgctccccggggtctgccgcgtcgccacaccgcccgtctccacctgcacagccctcggatatcacgtccgcgtgggcccagctgcggcgcccatgtcagggtctccctcgcccatgtcaggcatctctccctccggggagggcccacagttcccaggaacatcgccgaccgcctcgccgccgtcctcgaccagcaccgcggcgcgccgctcctccgccggcgcgggcagccacctcgtggccctcgccatgctgccgttggccgccgccgtcagcgggatgctctaaggtcgacgactccttcgtctccgcatgcattgcgcagctggacattgttgcgtagtataagctttcactgtgttttctattctatgctgcctctgttgtactatacacataccgcggactcgatcgattatcataaggcgttagccttgcttcttgccagccgagatgagaatgagaatacatgcatgtcatgtcccgttcatgtctag

SEQ ID NO: 138999 - DNA, 938 bp, Zea Mays
atggccacctccgaatttactgatccatccatctccatccccatcccgtgacccgtgcacgccgccgcttcaagtcctaacaagccgcatcgcatcgcatgcgtgtgctgtccgaccgccatctccgcagccggctggcctagctacctcacctcacctcacgcaggcacactgcacacacacccatggtggtggcggcgatgcggcggccgtgcgctgtgccagcgctgctggtggcggcggcgacggcgacgctagtgcttctgctgctgctgtcaccgtcgagcgcgcagccggtgccgtccccggcggcggcgccgggccccgcgggcgggaccgggatcgactcggcgtgcctgaactcgctgctcaacatgtcggactgcctcccgtacgtgagccaggggagcacggcgcggcgccccgacgcgccctgctgccccggagctggcgggcctcgtcggctccaaccccgtctgcctctgcgagctcctctccggcgccgccgactcctacggcatcgccgtcgactacggccgcgcgctcgcgctccccggggtctgccgcgtcgccacaccgcccgtctccacctgcacaggaacatcgccgaccgcctcgccgccgtcctcgaccagcaccgcggcgcgccgctcctccgccggcgcgggcagccacctcgtggccctcgccatgctgccgttggccgccgccgtcagcgggatgctctaaggtcgacgactccttcgtctccgcatgcattgcgcagctggacattgttgcgtagtataagctttcactgtgttttctattctatgctgcctctgttgtactatacacataccgcggactcgatcgattatcataaggcgttagccttgcttcttgccagccgagatgagaatgagaatacatgcatgtcatgtcccgttcatgtctag

SEQ ID NO: 139000 - DNA, 1392 bp, Zea Mays
acctccgaatttactgatccatccatctccatccccatcccgtgacccgtgcacgccgccgcttcaagtcctaacaagccgcatcgcatcgcatgcgtgtgctgtccgaccgccatctccgcagccggctggcctagctacctcacctcacctcacgcaggcacactgcacacacacccatggtggtggcggcgatgcggcggccgtgcgctgtgccagcgctgctggtggcggcggcgacggcgacgctagtgcttctgctgctgctgtcaccgtcgagcgcgcagccggtgccgtccccggcggcggcgccgggccccgcgggcgggaccgggatcgactcggcgtgcctgaactcgctgctcaacatgtcggactgcctcccgtacgtgagccaggggagcacggcgcggcgccccgacgcgccctgctgccccggagctggcgggcctcgtcggctccaaccccgtctgcctctgcgagctcctctccggcgccgccgactcctacggcatcgccgtcgactacggccgcgcgctcgcgctccccggggtctgccgcgtcgccacaccgcccgtctccacctgcacaggtccgtcaccccgtcagtctctctactctaaactctgctgcagctatgcacactgcacaattgtcgtatcgtacgtgttttttttggtaatatgaattcgctgagctaatcgtgggttactactgatactgatgcaaaattgcagccctcggatatcacgtccgcgtgggcccagctgcggcgcccatgtcagggtctccctcgcccatgtcaggcatctctccctccggggagggcccacagttcccaggtaagaacatcatttcgtttggttattaaatataacccatgtttcctacaacccgatcgaattcagcgaactgattcatcgagcgagttagcagtacacgtcgttggctcgttgctcttgtgcttgtgcacgatctatccggtttaaccgctagtagtatatttcattcgagaacggagttcttaataatgagtccgcacatgtgcatttctccaggaacatcgccgaccgcctcgccgccgtcctcgaccagcaccgcggcgcgccgctcctccgccggcgcgggcagccacctcgtggccctcgccatgctgccgttggccgccgccgtcagcgggatgctctaaggtcgacgactccttcgtctccgcatgcattgcgcagctggacattgttgcgtagtataagctttcactgtgttttctattctatgctgcctctgttgtactatacacataccgcggactcgatcgattatcataaggcgttagccttgcttcttgccagccgagatgagaatgagaatacatgcatgtcatgtcccgttcat

SEQ ID NO: 139001 - DNA, 1160 bp, Zea Mays
gtttttcttcgcttgcggcctctcgaatctgacccatttccacggttcgcgtgcgccgttgccgcggatctgcgtgcttgtgccatcgggttccgtggatctacggagatggggctcacgttcacgaagctgttcaggcggctattcgccaagaaggagatgaggattctcatggtcggtctcgatgcagctggtaagaccaccatcctctacaagctcaagctcggcgagatcgtcaccaccatccccaccattggatttaacgttgaaactgtcgagtacaagaacattagtttcactgtttgggatgtcggtggtcaggacaagatccggcccctgtggaggcactacttccagaacacccagggcctcatttttgttgtagacagcaacgacagagagcgtgttgttgaggccagagatgagctccaccggatgctgaatgaggacgagctccgtgatgctgtgcttttggtgtttgcaaacaagcaagatctgcctaatgccatgaacgctgctgaaattaccgataagcttggcctgcactccctgcgccagcggcactggtacatccagagcacatgtgctacctctggtgagggtttgtatgaggggcttgactggctttcgaacaacatcgctaacaaggctcgaagcatctaggcaaggcttcaatcagtggaagcaaactgcctctaccattacagctatgaagtatatagtcgtgattgtgtcagacgtggtgtgtttttgggagataaaaggctcttttggtcgaggagctaggtatcagatgttttttatggtacctgtaattttccgtgcttctgttttggttttgtgcaaggtataccatgtctgactgtgtgctcgccactgtctgagtcgttgtactatcccgggccggcctgtccggctgtctcttggcatagcaaaatgatcgcctaatttgttagcacatgctcggtaatatcacgagggcttcggtggtcttattgctcacgctgaattctcaactttgctcttcttttctgcggttgaggttgcatcttgtattgttggctgatttcgagcaatcagaggattgtgctacgtcgtcggaggcatcatgggatagcagctagctttcgtctttgaactgggcttcggttctaaattcg

SEQ ID NO: 139002 - DNA, 1167 bp, Zea Mays
agtttttcttcgcttgcggcctctcgaatctgacccatttccacggttcgcgtgcgccgttgccgcggatctgcgtgcttgtgccatcgggttccgtggatctagttgcgcggagatggggctcacgttcacgaagctgttcaggcggctattcgccaagaaggagatgaggattctcatggtcggtctcgatgcagctggtaagaccaccatcctctacaagctcaagctcggcgagatcgtcaccaccatccccaccattggatttaacgttgaaactgtcgagtacaagaacattagtttcactgtttgggatgtcggtggtcaggacaagatccggcccctgtggaggcactacttccagaacacccagggcctcatttttgttgtagacagcaacgacagagagcgtgttgttgaggccagagatgagctccaccggatgctgaatgaggacgagctccgtgatgctgtgcttttggtgtttgcaaacaagcaagatctgcctaatgccatgaacgctgctgaaattaccgataagcttggcctgcactccctgcgccagcggcactggtacatccagagcacatgtgctacctctggtgagggtttgtatgaggggcttgactggctttcgaacaacatcgctaacaaggctcgaagcatctaggcaaggcttcaatcagtggaagcaaactgcctctaccattacagctatgaagtatatagtcgtgattgtgtcagacgtggtgtgtttttgggagataaaaggctcttttggtcgaggagctaggtatcagatgttttttatggtacctgtaattttccgtgcttctgttttggttttgtgcaaggtataccatgtctgactgtgtgctcgccactgtctgagtcgttgtactatcccgggccggcctgtccggctgtctcttggcatagcaaaatgatcgcctaatttgttagcacatgctcggtaatatcacgagggcttcggtggtcttattgctcacgctgaattctcaactttgctcttcttttctgcggttgaggttgcatcttgtattgttggctgatttcgagcaatcagaggattgtgctacgtcgtcggaggcatcatgggatagcagctagctttcgtctttgaactgggcttcggttctaaattcg

SEQ ID NO: 139003 - DNA, 1216 bp, Zea Mays
aaaatttgttaaattcatatttaaggacctttacataactgctctaagttccattgatacgtttcatcgattttcggaggaatttattcgaggaatctagtgtttgaccggctccgctcgattctgcttcgttaccacgcgggtgctatcgaatcttggcggagatggggctcacgttcacgaagctgttcaggcggctattcgccaagaaggagatgaggattctcatggtcggtctcgatgcagctggtaagaccaccatcctctacaagctcaagctcggcgagatcgtcaccaccatccccaccattggatttaacgttgaaactgtcgagtacaagaacattagtttcactgtttgggatgtcggtggtcaggacaagatccggcccctgtggaggcactacttccagaacacccagggcctcatttttgttgtagacagcaacgacagagagcgtgttgttgaggccagagatgagctccaccggatgctgaatgaggacgagctccgtgatgctgtgcttttggtgtttgcaaacaagcaagatctgcctaatgccatgaacgctgctgaaattaccgataagcttggcctgcactccctgcgccagcggcactggtacatccagagcacatgtgctacctctggtgagggtttgtatgaggggcttgactggctttcgaacaacatcgctaacaaggctcgaagcatctaggcaaggcttcaatcagtggaagcaaactgcctctaccattacagctatgaagtatatagtcgtgattgtgtcagacgtggtgtgtttttgggagataaaaggctcttttggtcgaggagctaggtatcagatgttttttatggtacctgtaattttccgtgcttctgttttggttttgtgcaaggtataccatgtctgactgtgtgctcgccactgtctgagtcgttgtactatcccgggccggcctgtccggctgtctcttggcatagcaaaatgatcgcctaatttgttagcacatgctcggtaatatcacgagggcttcggtggtcttattgctcacgctgaattctcaactttgctcttcttttctgcggttgaggttgcatcttgtattgttggctgatttcgagcaatcagaggattgtgctacgtcgtcggaggcatcatgggatagcagctagctttcgtctttgaactgggcttcggttctaaattcg

SEQ ID NO: 139004 - DNA, 1147 bp, Zea Mays
cctgtgatccaagcccgcacccacagggtcacagagaacttgggaagagaatggatcacctagtcaccggggcgcggccttgcgatctctcggagatggggctcacgttcacgaagctgttcaggcggctattcgccaagaaggagatgaggattctcatggtcggtctcgatgcagctggtaagaccaccatcctctacaagctcaagctcggcgagatcgtcaccaccatccccaccattggatttaacgttgaaactgtcgagtacaagaacattagtttcactgtttgggatgtcggtggtcaggacaagatccggcccctgtggaggcactacttccagaacacccagggcctcatttttgttgtagacagcaacgacagagagcgtgttgttgaggccagagatgagctccaccggatgctgaatgaggacgagctccgtgatgctgtgcttttggtgtttgcaaacaagcaagatctgcctaatgccatgaacgctgctgaaattaccgataagcttggcctgcactccctgcgccagcggcactggtacatccagagcacatgtgctacctctggtgagggtttgtatgaggggcttgactggctttcgaacaacatcgctaacaaggctcgaagcatctaggcaaggcttcaatcagtggaagcaaactgcctctaccattacagctatgaagtatatagtcgtgattgtgtcagacgtggtgtgtttttgggagataaaaggctcttttggtcgaggagctaggtatcagatgttttttatggtacctgtaattttccgtgcttctgttttggttttgtgcaaggtataccatgtctgactgtgtgctcgccactgtctgagtcgttgtactatcccgggccggcctgtccggctgtctcttggcatagcaaaatgatcgcctaatttgttagcacatgctcggtaatatcacgagggcttcggtggtcttattgctcacgctgaattctcaactttgctcttcttttctgcggttgaggttgcatcttgtattgttggctgatttcgagcaatcagaggattgtgctacgtcgtcggaggcatcatgggatagcagctagctttcgtctttgaactgggcttcggttctaaattcg

SEQ ID NO: 139005 - DNA, 133 bp, Zea Mays
gacgagctccgtgatgctgtgcttttggtgtttgcaaacaagcaagatctgcctaatgccatgaacgctgggtttgtatgaggggcttgactggctttcgaacaacatcgctaacaaggtataccatgtctga

SEQ ID NO: 139006 - DNA, 497 bp, Zea Mays
cctgtgatccaagcccgcacccacagggtcacagagaacttgggaagagaatggatcacctagtcaccggggcgcggccttgcgatctctcggagatggggctcacgttcacgaagctgttcaggcggctattcgccaagaaggagatgaggattctcatggtcggtctcgatgcagctggtaagaccaccatcctctacaagctcaagctcggcgagatcgtcaccaccatccccaccattggatttaacgttgaaactgtcgagtacaagaacattagtttcactgtttgggatgtcggtggtcaggacaagatccggcccctgtggaggcactacttccagaacacccagggcctcatttttgttgtagacagcaacgacagagagcgtgttgttgaggccagagatgagctccaccggatgctgaatgagggtttgtatgaggggcttgactggctttcgaacaacatcgctaacaaggtataccatgtctga

SEQ ID NO: 139007 - DNA, 1306 bp, Zea Mays
aagcatctctcactgcattccgggcccactactcaaacgttcggcacgccaggttggcaggtagccgttacatcgataggcactcggccactcgcacgcagacaccacaccagtgtgctcagtgctcactgctcaccataataacgctgcacctcttttcatttcaccatctcctgcccccttaaaaaaaagactcaccgtcgacacgccctcccgtcccgagagttctgaatcgaaaccgtcggccacgagagcagtgcgaggcgcccaccgcgatggctcgaaccaagcaccaggccgtgaggaagacggcggagaagcccaagaagaagctccagttcgagcgctcaggtggtgcgagtacctcggcgacgccggtgagcgcgaaagggctgctgggaccgggggaagagcggcgtctggaggtgactcagttaagaagacgaaaccacgccaccgctggcggccagggactgtagcgctgcgggagatcaggaagtaccagaagtccactgaaccgctcatcccctttgcgcctttcgtccgtgtggtgagggagttaaccaatttcgtaacaaacgggaaagtagagcgctataccgcagaagccctccttgcgctgcaagaggcagcagaattccacttgatagaactgtttgaaatggcgaatctgtgtgccatccatgccaagcgtgtcacaatcatgcaaaaggacatacaacttgcaaggcgtatcggaggaaggcgttgggcatgatatataatatccattctgattgcatcattcttgtgaatttgtttgtaggagctagacattagtgttgttgaatgctgcatggttcctaatccttttcgcagtctaacatctgtggagttagtatgttacatggcaacagctgaacatctgtggactatatggcaacagccgaagattgtgtctgtgggataactggttgttttggttgctcttcagtagtttgtttgcttcagtctgcagtatggactatggagtaaactgcatgctgaaacccgaaccactgctgaaactgcatgctgaaacccgaaccactgctacggcagttgccaggatagcaggagggcctttatgcacagtggaattgagtagagaactgagtaaaccatggttctttctccttttgaactggaacacacacagttggatcttgtttctcttcttaggccattcatcgtgtttattaggggtgtaaatggtacaaatattatctgtccgtattcgaatttgatctatctaagaaggttgaaatccgatccgtattcgagtcca

SEQ ID NO: 139008 - DNA, 1341 bp, Zea Mays
ataataacgctgcacctcttttcatttcaccatctcctgcccccttaaaaaaaagactcaccgtcgacacgccctcccgtcccgagagttctgaatcgaaaccgtcggccacgagagcagtgcgaggcgcccaccgcgatggctcgaaccaagcaccaggccgtgaggaagacggcggagaagcccaagaagaagctccagttcgagcgctcaggtggtgcgagtacctcggcgacgccggtgagcgcgtgcgtgcggggatcagttccctccttttgcctttttttgttgggctgctcttacttgcttgcaagctgtttgatggaatgcaggaaagggctgctgggaccgggggaagagcggcgtctggaggtgactcagttaagaagacgaaaccacgccaccgctggcggccagggactgtagcgctgcgggagatcaggaagtaccagaagtccactgaaccgctcatcccctttgcgcctttcgtccgtgtggtgggtgcaggcgtgtttgtcctctgcatagtatggggttgttccgcattctgtctaatggaaagttattcttctgagaaaaaaaatgcaggtgagggagttaaccaatttcgtaacaaacgggaaagtagagcgctataccgcagaagccctccttgcgctgcaagaggcagcagaattccacttgatagaactgtttgaaatggcgaatctgtgtgccatccatgccaagcgtgtcacaatcatgcaaaaggacatacaacttgcaaggcgtatcggaggaaggcgttgggcatgatatataatatccattctgattgcatcattcttgtgaatttgtttgtaggagctagacattagtgttgttgaatgctgcatggttcctaatccttttcgcagtctaacatctgtggagttagtatgttacatggcaacagctgaacatctgtggactatatggcaacagccgaagattgtgtctgtgggataactggttgttttggttgctcttcagtagtttgtttgcttcagtctgcagtatggactatggagtaaactgcatgctgaaacccgaaccactgctgaaactgcatgctgaaacccgaaccactgctacggcagttgccaggatagcaggagggcctttatgcacagtggaattgagtagagaactgagtaaaccatggttctttctccttttgaactggaacacacacagttggatcttgtttctcttcttaggccattcatcgtgtttattaggggtgtaaatggtacaaatattatctgtccgtattcgaatttgatctatctaagaaggttgaaatccgatccgtattcgagt

SEQ ID NO: 139009 - DNA, 1250 bp, Zea Mays
ataataacgctgcacctcttttcatttcaccatctcctgcccccttaaaaaaaagactcaccgtcgacacgccctcccgtcccgagagttctgaatcgaaaccgtcggccacgagagcagtgcgaggcgcccaccgcgatggctcgaaccaagcaccaggccgtgaggaagacggcggagaagcccaagaagaagctccagttcgagcgctcaggtggtgcgagtacctcggcgacgccggtgagcgcgtgcgtgcggggatcagttccctccttttgcctttttttgttgggctgctcttacttgcttgcaagctgtttgatggaatgcaggaaagggctgctgggaccgggggaagagcggcgtctggaggtgactcagttaagaagacgaaaccacgccaccgctggcggccagggactgtagcgctgcgggagatcaggaagtaccagaagtccactgaaccgctcatcccctttgcgcctttcgtccgtgtggtgagggagttaaccaatttcgtaacaaacgggaaagtagagcgctataccgcagaagccctccttgcgctgcaagaggcagcagaattccacttgatagaactgtttgaaatggcgaatctgtgtgccatccatgccaagcgtgtcacaatcatgcaaaaggacatacaacttgcaaggcgtatcggaggaaggcgttgggcatgatatataatatccattctgattgcatcattcttgtgaatttgtttgtaggagctagacattagtgttgttgaatgctgcatggttcctaatccttttcgcagtctaacatctgtggagttagtatgttacatggcaacagctgaacatctgtggactatatggcaacagccgaagattgtgtctgtgggataactggttgttttggttgctcttcagtagtttgtttgcttcagtctgcagtatggactatggagtaaactgcatgctgaaacccgaaccactgctgaaactgcatgctgaaacccgaaccactgctacggcagttgccaggatagcaggagggcctttatgcacagtggaattgagtagagaactgagtaaaccatggttctttctccttttgaactggaacacacacagttggatcttgtttctcttcttaggccattcatcgtgtttattaggggtgtaaatggtacaaatattatctgtccgtattcgaatttgatctatctaagaaggttgaaatccgatccgtattcgagt

SEQ ID NO: 139010 - DNA, 1295 bp, Zea Mays
aagcatctctcactgcattccgggcccactactcaaacgttcggcacgccaggttggcaggtagccgttacatcgataggcactcggccactcgcacgcagacaccacaccagtgtgctcagtgctcactgctcaccataataacgctgcacctcttttcatttcaccatctcctgcccccttaaaaaaaagactcaccgtcgacacgccctcccgtcccgagagttctgaatcgaaaccgtcggccacgagagcagtgcgaggcgcccaccgcgatggctcgaaccaagcaccaggccgtgaggaagacggcggagaagcccaagaagaagctccagttcgagcgctcaggtggtgcgagtacctcggcgacgccggaaagggctgctgggaccgggggaagagcggcgtctggaggtgactcagttaagaagacgaaaccacgccaccgctggcggccagggactgtagcgctgcgggagatcaggaagtaccagaagtccactgaaccgctcatcccctttgcgcctttcgtccgtgtggtgagggagttaaccaatttcgtaacaaacgggaaagtagagcgctataccgcagaagccctccttgcgctgcaagaggcagcagaattccacttgatagaactgtttgaaatggcgaatctgtgtgccatccatgccaagcgtgtcacaatcatgcaaaaggacatacaacttgcaaggcgtatcggaggaaggcgttgggcatgatatataatatccattctgattgcatcattcttgtgaatttgtttgtaggagctagacattagtgttgttgaatgctgcatggttcctaatccttttcgcagtctaacatctgtggagttagtatgttacatggcaacagctgaacatctgtggactatatggcaacagccgaagattgtgtctgtgggataactggttgttttggttgctcttcagtagtttgtttgcttcagtctgcagtatggactatggagtaaactgcatgctgaaacccgaaccactgctgaaactgcatgctgaaacccgaaccactgctacggcagttgccaggatagcaggagggcctttatgcacagtggaattgagtagagaactgagtaaaccatggttctttctccttttgaactggaacacacacagttggatcttgtttctcttcttaggccattcatcgtgtttattaggggtgtaaatggtacaaatattatctgtccgtattcgaatttgatctatctaagaaggttgaaatccgatccgtattcgagt

SEQ ID NO: 139011 - DNA, 1296 bp, Zea Mays
aagcatctctcactgcattccgggcccactactcaaacgttcggcacgccaggttggcaggtagccgttacatcgataggcactcggccactcgcacgcagacaccacaccagtgtgctcagtgctcactgctcaccataataacgctgcacctcttttcatttcaccatctcctgcccccttaaaaaaaagactcaccgtcgacacgccctcccgtcccgagagttctgaatcgaaaccgtcggccacgagagcagtgcgaggcgcccaccgcgatggctcgaaccaagcaccaggccgtgaggaagacggcggagaagcccaagaagaagctccagttcgagcgctcaggtggtgcgagtacctcggcgacgccggtgagcgcgaaagggctgctgggaccgggggaagagcggcgtctggaggtgactcagttaagaagacgaaaccacgccaccgctggcggccagggactgtagcgctgcgggagatcaggaagtaccagaagtccactgaaccgctcatcccctttgcgcctttcgtccgtgtggtgagggagttaaccaatttcgtaacaaacgggaaagtagagcgctataccgcagaagccctccttgcgctgcaagaggcagcagaattccacttgatagaactgtttgaaatggcgaatctgtgtgccatccatgccaagcgtgtcacaatcatgcaaaaggacatacaacttgcaaggcgtatcggaggaaggcgttgggcatgatatataatatccattctgattgcatcattcttgtgaatttgtttgtaggagctagacattagtgttgttgaatgctgcatggttcctaatccttttcgcagtctaacatctgtggagttagtatgttacatggcaacagctgaacatctgtggactatatggcaacagccgaagattgtgtctgtgggataactggttgttttggttgctcttcagtagtttgtttgcttcagtatggactatggagtaaactgcatgctgaaacccgaaccactgctgaaactgcatgctgaaacccgaaccactgctacggcagttgccaggatagcaggagggcctttatgcacagtggaattgagtagagaactgagtaaaccatggttctttctccttttgaactggaacacacacagttggatcttgtttctcttcttaggccattcatcgtgtttattaggggtgtaaatggtacaaatattatctgtccgtattcgaatttgatctatctaagaaggttgaaatccgatccgtattcgagt

SEQ ID NO: 139012 - DNA, 1303 bp, Zea Mays
ataataacgctgcacctcttttcatttcaccatctcctgcccccttaaaaaaaagactcaccgtcgacacgccctcccgtcccgagagttctgaatcgaaaccgtcggccacgagagcagtgcgaggcgcccaccgcgatggctcgaaccaagcaccaggccgtgaggaagacggcggagaagcccaagaagaagctccagttcgagcgctcaggtggtgcgagtacctcggcgacgccggtgagcgcgtgcgtgcggggatcagttccctccttttgcctttttttgttgggctgctcttacttgcttgcaagctgtttgatggaatgcaggaaagggctgctgggaccgggggaagagcggcgtctggaggtgactcagttaagaagacgaaaccacgccaccgctggcggccagggactgtagcgctgcgggagatcaggaagtaccagaagtccactgaaccgctcatcccctttgcgcctttcgtccgtgtggtgagggagttaaccaatttcgtaacaaacgggaaagtagagcgctataccgcagaagccctccttgcgctgcaagaggcagcagaattccacttgatagaactgtttgaaatggcgaatctgtgtgccatccatgccaagcgtgtcacaatcatgcaaaaggacatacaacttgcaaggcgtatcggaggaaggcgttgggcatgatatataatatccattctgattgcatcattcttgtgaatttgtttgtaggagctagacattagtgttgttgaatgctgcatggttcctaatccttttcgcagtctaacatctgtggagttagtatgttacatggcaacagctgaacatctgtggactatatggcaacagccgaagattgtgtctgtgggataactggttgttttggttgctcttcagtagtttgtttgcttcaggtaaccatgctgcgaactatgatgttttcattctcggtttgcttcagctaaccgagatcgattcagtctgcagtatggactatggagtaaactgcatgctgaaacccgaaccactgctgaaactgcatgctgaaacccgaaccactgctacggcagttgccaggatagcaggagggcctttatgcacagtggaattgagtagagaactgagtaaaccatggttctttctccttttgaactggaacacacacagttggatcttgtttctcttcttaggccattcatcgtgtttattaggggtgtaaatggtacaaatattatctgtccgtattcgaatttgatctatctaagaaggttgaaatccga

SEQ ID NO: 139013 - DNA, 1962 bp, Zea Mays
gagaagggaaagcattctccaatatccacctcctcctcgcccctctctctctctctctaaaagaattgaaaagataagggggaaatcctcaagtgctcgttacataaaccctaacctcgttggattcgcagcaaaagcccaccaattggaagccctccgatgttccagctgcatgctggagctgagccgtgctcggtttgacgaaattttgcatcccttctgtgcttggaccacccgattgaggctgtttctccgagggggcgtgccagcggtttcgcggcccaggtcctcacctgtgctatccggcgccggatccgggtttgttccggtgagaggtcgggcttttggtggggtctgtccagcttggagctcaatttgccggcctgagttggagtcgcgactgcggtggcggtgattgaggtagtcgcgtcgatttgacacgcgtttcttcctgccatttgggtgagccagcctttcctggcaatcttggcgggcgtttcgtcttgctgcgtggcagaaaggtgtgacctttgtgccgtgcgatgcatcccaaggcacgaatccacgccgacccggtgcgcgaggtcgaccactttgactgcctgccggattcgctcgtcctgctgatcctgaacaaggtcgaggacgtgcgatcgctcggccggtgctacgccgtgtccaagcggctttgtgggcttgtcccccttgtccatgatgtgtatgtcaagattgaccgcgtcgtggcggtcgacggcgacgctgaggacgcgctcaacctgtcatcgccgaagcctcggaacatcttctcgcacttcctgaagctgatgctcttcaccatcatcaagcctttccacaacatgcgcaaccctaatggtactgggaggtcattgttcccgcagctctcgcaccactcgccagcgcaggtgctcaggaacttcacgcacatcaggaatcttcggatcgagctcccttctggggatgtgggtactgaggagggagttctcctgaaatggcgagcagagtatgggagcacacttcagagttgtgtgatcctggggggtacccgggttgaccgcaagcctgttggtggagagcatgagcagtctttggaggataatggaagcatgccagagtctttctataccaatggtgggctgaaacttcgtgtcgtctggacaatcagctctctaattgcggcatcaacgaggcactatcttctccgctcaatcatcaatgaccattccacacttctgagcttggtactgacagatgccgatggccaaggcacattgtgcatgggagcagagcagctgaaggagttcagagagaaccagttgtcggcctcagcatgttccaacaggactcaggtcccagcctgcaacatgaagctcaagtatgctccatatcttgaactgcctggtggtatggcgttgcaaggcgccactttggtggctatcaaaccctcacctgacggaagcaatggaagccaccctaaccgtaaagaagccgacgcatttgtctttggagcatttgatgggccatttaaggctgctgtgaaggctttgatgaagaggcgcacttaccttctggagatgaatggcttctagaaatcttgtggtatcgagcttgttggtgctatgcatggcatatttagctaagcttttcatctttgtaatatccaagaaagcaccatctctagttgctgcttttagtctgctgttttagctctttgtacagtgttaacatttgattatataaaaatcgtatcaagttctctagtgtaatagcgaatcgctccatagttcaccatcctggcccctggtgtaatatccaagaaatcatatcagtttcgtaggtgtaagttgaaagtagccttggaaaaggagagccagtttatgccttcaggtacataacattcattttgggattgtgaaatgaaagagactgatctgatgccgacaa

SEQ ID NO: 139014 - DNA, 1804 bp, Zea Mays
gagaagggaaagcattctccaatatccacctcctcctcgcccctctctctctctctctaaaagaattgaaaagataagggggaaatcctcaagtgctcgttacataaaccctaacctcgttggattcgcagcaaaagcccaccaattggaagccctccgatgttccagctgcatgctggagctgagccgtgctcggtttgacgaaattttgcatcccttctgtgcttggaccacccgattgaggctgtttctccgagggggcgtgccagcggtttcgcggcccaggtcctcacctgtgctatccggcgccggatccgggtttgttccggtgagaggtcgggcttttggtggggtctgtccagcttggagctcaatttgccggcctgagttggagtcgcgactgcggtggcggtgattgaggtacaccattcttcgatttgcttgttgcagttctcgatctgaggttcttgttgatttattatagcacttctgagtctctgacgcatgcggccatgcaggtttgcttaaccgcatgccatttctgtgattctgtcatttttctctactcgctcatccgtgttcttacttcttaccaccgatgttcgttctctcttcaggtagtcgcgtcgatttgacacgcgtttcttcctgccatttgggtgagccagcctttcctggcaatcttggcgggcgtttcgtcttgctgcgtggcagaaaggtgtgacctttgtgccgtgcgatgcatcccaaggcacgaatccacgccgacccggtgcgcgaggtcgaccactttgactgcctgccggattcgctcgtcctgctgatcctgaacaaggtcgaggacgtgcgatcgctcggccggtgctacgccgtgtccaagcggctttgtgggcttgtcccccttgtccatgatgtgtatgtcaagattgaccgcgtcgtggcggtcgacggcgacgctgaggacgcgctcaacctgtcatcgccgaagcctcggaacatcttctcgcacttcctgaagctgatgctcttcaccatcatcaagcctttccacaacatgcgcaaccctaatggtactgggaggtcattgttcccgcagctctcgcaccactcgccagcgcaggtgctcaggaacttcacgcacatcaggaatcttcggatcgagctcccttctggggatgtgggtactgaggagggagttctcctgaaatggcgagcagagtatgggagcacacttcagagttgtgtgatcctggggggtacccgggttgaccgcaagcctgttggtggagagcatgagcagtctttggaggataatggaagcatgccagagtctttctataccaatggtgggctgaaacttcgtgtcgtctggacaatcagctctctaattgcggcatcaacgaggcactatcttctccgctcaatcatcaatgaccattccacacttctgagcttggtactgacagatgccgatggccaaggcacattgtgcatgggagcagagcagctgaaggagttcagagagaaccagttgtcggcctcagcatgttccaacaggactcaggtcccagcctgcaacatgaagctcaagtatgctccatatcttgaactgcctggtggtatggcgttgcaaggcgccactttggtggctatcaaaccctcacctgacggaagcaatggaagccaccctaaccgtaaagaagccgacgcatttgtctttggagcatttgatgggccatttaaggctgctgtgaaggctttgatgaagaggcgcacttaccttctggagatgaatggcttctag

SEQ ID NO: 139015 - DNA, 2711 bp, Zea Mays
cgccgctctctcttgagctttccttccctgttcggctcggcatccctgacctcctgttcgcgtccttctctgcccggccacccgccaccgccccgccgcaccggaggcgcgcccgcctaggcctcccctctgccaccgacggcggcggcgatccagccgagccgatcgatcctcgtgtctcgcctgcccaccaggtctttcctcctgacgttcacgtactacgtgcctctcgtccccgctccggccccttgcctgcctgcctgcccgccgtcgccgccgccgctgacgctcgccttgttgtgcccccccgtgtggcgcttctcgcttttccagatcccggccctccgatcacgtcaccggctcggctacctacaggggggaactgggagaggggcagccgggcaggccatgggcgtcgaggcgaagcgagatgcctggtgcggcaccaagaaaacgctaaggtgctgcatcagaacaggctggagatgcgcctctcagcactggcctctgttcagcctagtgctgctgctctacctgctgcacaggcacgcaccgggcctcttcgctctcctgctctccgcttctccggtgatcatatgcaccggcctcctcctcgctgcgctgctatgccacgggagcgcacgccttccggaggtccgtgaagacgggacggctcctgagcaagtttcagctgggaggtcttctagaaatgttgatatcagagaagaacagcagagattttcggtgcctacgacgttggagaagaacgtagccaaggaggcaggctgtggcacaagggactgtaacgggcatgctggtctggatgaaaatgttcctcttctgaagcaggttcatcaaggggatgagactgagagacctgaaggtttccacactcctgttccttcgctgaagcaagaagctgccacggaaggatacatgaagtacaacgcagaaaaagagtctgaaggtgcgttttctagcaaggatgagtgtgccagttcgttcgatgacgtgcatcgtaatgcagttgatggggaagagacagccctaggcctttgctcttcaagagaggatgttagtgacgatgttaaagtggtggcaaaggcagatcagcaagggacagtatccacagatgcacagtctgccgatggaagcgcgggtaaatgcaaatggggccgtgctttctccgtgcgccggaggaagaagcttgctgatataaagatcgaggctattagttctgttccggacaaccagttggaccattctctatgctcgccattcgctacggttggcagccatgacaacagttcatcagggtttggccctgataatgcagagggacacccacctgacgtttctatgacagactcttctccggtgattgatgagaccgagacgggccctcccctgggtctgggtgttgatcgctcttgtcctggtctccttaatactggtgattcagacaaccatttgaacatggcttctctggatcgtcaacctccgagtgttaacaatgaagtggctgacaatagcaaggccaaagatgatggcgaggaggaggagaaggatcctggaactgagcctgcatttctctggacagccgacaacgagaagaacgccatggatcttgggtactccgagaccgaacggagccgtcggctggagacgctgatggtgaagagaaaatccaggaaaaacatacagtttgagctggacggcgtgggcggtctagcagacggtttatcacggttccgtccgaaagttcatcctgtttcagttccagcgcgaaggatgaacccgtttactagcgacgacgcggagatcccaggctcggctcctcctattctgcatccacgagacgaccccttcagtttcctcaccgatgaacagccagacgacaacagtggccaccctgcacaccatagtctgggaccccaggaaccgatgccagctctgcatcaggacgcgctgttcagaaggcacgagagcttcagcttcggcaggccgccgcagagacacgggcccaggctccagccatgctttgccctggaggaatccagcctcggcgaagcgagcgcgagcggtttccagaggcagttcagcgacaggagcgtgtcgtccaggctcagcgtcgtctccgagtgcgacacggtctcttcggccggcgaccaggagcacaacgagctcgtacggaactacattcgcggggtgcgcgagtcgcctggcctgctcgggcaggacgtcgacggcgacgctgtgtgtaccagtaccgccggaaacgagtgctcggacgggatcggcttcgtggagaacgagactctgaatgctgtcatctgctgatggtgaatggatggacttggctgcaacgaaacgaaactttgatatatatattgtggatgaagagcagacgggattgctgttgtagcccctctacgtttttgtttgtttcttgtttgcactcgtctgtctaagtctaacagggggtttgtattctacctggtacatttgcacagtacaaaacacactgttttgctgtacagtattgcgtttagttgcgtcgtactgtacaaaattatcacggatagattgaatggcacgatacccttcacggtcacgggatcatgtgtgatatcgtgcacaggaagctagaaatcataacaagtcaggagacagctctccagaaacgtaataatagggataaaattcttcta

SEQ ID NO: 139016 - DNA, 1129 bp, Zea Mays
aattagaaagcaagagagaaacagatacgtgggcccagcttccatccatctccggtgaactggtccctctagaaaattccccaatcccacactgccactctgccagatcaaagtcacgcgctaggttgagtcccgcccaattcaaatttcaaaagcattccgccatgacaaaacccacagctggtttccagacgccgcgcccttcctcccttcgcgcctcctccaccgccggcgcccgctcctctgcagcgaagctcgcggtcgccagcgccgtccccagggacctcgcctccagcaccaaggtggtgcgtaagtgtctggactacgacggcgacaccaccctccctgctcccgcagcctccacgacgcctctggttgacgtcctggaggacgacctcgcgcctctgctggacctgccagaccctgacgtctccggcgattcctcctcctccgtcatcttcgctgctccggatgacgcggtgatatcttccgccgactccactgtcaccgagctacaggtcgccgcgcccaccgactccatcaccaacagcgacgcagacctcccagtcctggagcaaatcaacctcgccatgtctgagctgcatgcagccgacagcctcagcccgcgctccaagcgcctcctcacggcgctcgccgaggctgctaaggccgagctcatcccctcggacaccgcgcgccgcctacgtggcgccgccttctggggcaaggtgcgcgtttgggtcctcgccgcgacggtcaccaccgtgaccaccatcgacgtcgcgctcgccgcctacctctatgcgcgccgcgtcaacaaccggtaccacgtcatgcccccaacctgatcccagcaccacgtaccccgaccgccttccgtgcgcctcgaccacgatcgggtcgatcgcccagacgaaactgtgatcgatccccctcagttgtttagttctataattctagcgcgttgcatcattaagacattagcattggtggcagtgtggcaccctggtagaggactacgggtcagaaaagtatattcagaagagtacgatttacatatctatcatatggcagagagctctcagatcttgcccacatttgagataatcattgttggagttttgaagtt

SEQ ID NO: 139017 - DNA, 1675 bp, Zea Mays
ccggccggcaaaaacccacacgacccacgcatcggcatcgcattcacgtccaaccgttcgcttgcgccctccgcaacaacgcaacgcatcgtgacgccgccgctttttgcttttccgactgctgtttccgccttttgagtaggcgttgggcgagcttcggtttcgacggacgcagccgtcaccgcctcaccggcccggccatgggcgccgccgccgcctgctctcttcgcctctgccacacgtcaccatccgctgcgacggtagggccgcgatgactccggcggttcgggtggggaatcctcgcgcgcccggtccgggcgccgcggtggtggaggacgaggaggaggcggcggtcgcgtggcgggagctgcgcggcaaggccgcggagctcgcggctgcgggcgaggaacgggcgatcctggcccgccgcatcgaggccgcgctccaggtaaggagggaggcgctgcggcaggcggaggagctggacgagttgacgcggatggtggacctccagcaagcgcgtttggaggcggccgtcgtcggcaggaggcgggcgctcgaggccgtggagcgggggaaggagcggctgcaggagcagatcgaccgggtgctgccgctgtcgaggtccctcaccgccgcgcaccatcgagtgcaggaagcgaaggaggcgttatccggagacaaattcagactcaaggatctgcagaggctgcttcggacgaggcagcagtgcatggttagccaggttgctggtttgtaccctgtgagagtcttccatgatcttccaagacatgcagaaaacccctgtgccgatactaatggggagcatgtgacacttccagaggaaaacagaacattttcaggtggagatggaacacatttacccaccattatcaaatctccagaagcacgtggctggacattttttggttgggacattatgaagcataaaatgaagcaaaaaagttacaggaacaaggtgctacagaggtccgcagctgttctgggatatgcagcacatgcagtcttgctcatagcttgctatcttgatgttcccctccgatatcccttgcgctttggagggtcccgatcttatgtgagtgatcgcttgccttcagctgatacagcatcatcggctgctttagcaagtaccaggaacaccgaatcagaactaacagaataccctcttttcctggaatgccaagacgatgactccactagtgcctcctatgccatttatttattgcacaaggatacggagcagcttctgaactatgttggagctgagagctgtggaaggcacgtgtttggtaacctacgagaacttcttaggatcgtgcagtctgataagtttgtgtacagatgatggttccaatccatgtggttttggagtgcttatgctgtagatgtattatagagatgtaagtaggtgtttttcttttctcttcctattctttcgtgtgattcattccctctttccctgcgctaggttttttatatgtgcaggaaataggcaattatgtttttctagagaaatgaaatgtactcacacgtatggcttcttgcatatcttattcgagaaaaaagatggtccaatcgaaagtcctacaaccactgggtctgtctccttgacaagcaagtgtttgatatttagattatccaataagtcacattt

SEQ ID NO: 139018 - DNA, 1308 bp, Zea Mays
cacgtccaaccgttcgcttgcgccctccgcaacaacgcaacgcatcgtgacgccgccgctttttgcttttccgactgctgtttccgccttttgagtaggcgttgggcgagcttcggtttcgacggacgcagccgtcaccgcctcaccggcccggccatgggcgccgccgccgcctgctctcttcgcctctgccacacgtcaccatccgctgcgacggtaaggagggaggcgctgcggcaggcggaggagctggacgagttgacgcggatggtggacctccagcaagcgcgtttggaggcggccgtcgtcggcaggaggcgggcgctcgaggccgtggagcgggggaaggagcggctgcaggagcagatcgaccgggtgctgccgctgtcgaggtccctcaccgccgcgcaccatcgagtgcaggaagcgaaggaggcgttatccggagacaaattcagactcaaggatctgcagaggctgcttcggacgaggcagcagtgcatggttagccaggttgctggtttgtaccctgtgagagtcttccatgatcttccaagacatgcagaaaacccctgtgccgatactaatggggagcatgtgacacttccagaggaaaacagaacattttcaggtggagatggaacacatttacccaccattatcaaatctccagaagcacgtggctggacattttttggttgggacattatgaagcataaaatgaagcaaaaaagttacaggaacaaggtgctacagaggtccgcagctgttctgggatatgcagcacatgcagtcttgctcatagcttgctatcttgatgttcccctccgatatcccttgcgctttggagggtcccgatcttatacgatgactccactagtgcctcctatgccatttatttattgcacaaggatacggagcagcttctgaactatgttggagctgagagctgtggaaggcacgtgtttggtaacctacgagaacttcttaggatcgtgcagtctgataagtttgtgtacagatgatggttccaatccatgtggttttggagtgcttatgctgtagatgtattatagagatgtaagtaggtgtttttcttttctcttcctattctttcgtgtgattcattccctctttccctgcgctaggttttttatatgtgcaggaaataggcaattatgtttttctagagaaatgaaatgtactcacacgtatggcttcttgcatatcttattcgagaaaaaagatggtccaatcgaaagtcctacaaccactgggtctgtctccttgacaagcaagtgtttgata

SEQ ID NO: 139019 - DNA, 1715 bp, Zea Mays
atcgcattcacgtccaaccgttcgcttgcgccctccgcaacaacgcaacgcatcgtgacgccgccgctttttgcttttccgactgctgtttccgccttttgagtaggcgttgggcgagcttcggtttcgacggacgcagccgtcaccgcctcaccggcccggccatgggcgccgccgccgcctgctctcttcgcctctgccacacgtcaccatccgctgcgacggtagggccgcgatgactccggcggttcgggtggggaatcctcgcgcgcccggtccgggcgccgcggtggtggaggacgaggaggaggcggcggtcgcgtggcgggagctgcgcggcaaggccgcggagctcgcggctgcgggcgaggaacgggcgatcctggcccgccgcatcgaggccgcgctccaggtaaggagggaggcgctgcggcaggcggaggagctggacgagttgacgcggatggtggacctccagcaagcgcgtttggaggcggccgtcgtcggcaggaggcgggcgctcgaggccgtggagcgggggaaggagcggctgcaggagcagatcgaccgggtgctgccgctgtcgaggtccctcaccgccgcgcaccatcgagtgcaggtaatatgagcaatccgtctgcgcgacgcaaaatgctgcgagattgggctgggctattctgggcagctgcattttatccattggggcgtccgctgattgcaggaagcgaaggaggcgttatccggagacaaattcagactcaaggatctgcagaggctgcttcggacgaggcagcagtgcatggttagccaggttgctggtttgtaccctgtgagagtcttccatgatcttccaagacatgcagaaaacccctgtgccgatactaatggggagcatgtgacacttccagaggaaaacagaacattttcaggtggagatggaacacatttacccaccattatcaaatctccagaagcacgtggctggacattttttggttgggacattatgaagcataaaatgaagcaaaaaagttacaggaacaaggtgctacagaggtccgcagctgttctgggatatgcagcacatgcagtcttgctcatagcttgctatcttgatgttcccctccgatatcccttgcgctttggagggtcccgatcttatgtgagtgatcgcttgccttcagctgatacagcatcatcggctgctttagcaagtaccaggaacaccgaatcagaactaacagaataccctcttttcctggaatgccaagacgatgactccactagtgcctcctatgccatttatttattgcacaaggatacggagcagcttctgaactatgttggagctgagagctgtggaaggcacgtgtttggtaacctacgagaacttcttaggatcgtgcagtctgataagtttgtgtacagatgatggttccaatccatgtggttttggagtgcttatgctgtagatgtattatagagatgtaagtaggtgtttttcttttctcttcctattctttcgtgtgattcattccctctttccctgcgctaggttttttatatgtgcaggaaataggcaattatgtttttctagagaaatgaaatgtactcacacgtatggcttcttgcatatcttattcgagaaaaaagatggtccaatcgaaagtcctacaaccactgggtctgtctccttgacaagcaagtgtttgata

SEQ ID NO: 139020 - DNA, 2621 bp, Zea Mays
gttcccccggcaaacacactcggttctcccgtgcctctcgccgtctcgcgtcgcaacgactggccggccgccgccgccaccgccgacctacgtgccaaggtccgcatattcggaaccttcgccggcgagcacccaccaggattttttttgtacatctaagatgtacagggcctcgaatttcatacctgatcctaatcaggtgctcctagatgccaaaccattaagatcgttagctccaatgttccctgcccccatgggagtcaatgttaatcagtcaagtacaccaccattggtctgtgtcactccggttggtcaattttcagcagggtttggtgcaggtaaccttcctgcctttggatcgttcactactttcagtgccacttcaaatggtgtttcttatgcaggcaccagtgctaatggtgccattgatgccacccctatctctgcatacaaaacaaggtcaaacatatcacttgatggtgatgatgatccttactcgggtaaccaaactgaacggaagcctaggagaggccgacctcccggttctggtcgtgatggctcaaatggtaagttaaagcgccctaagcccacttacaagaattttgttgctggcaaagagcttgcctttctggcagcttcatccgatcccagggatatcgtggaagcagttcacatgacctttgaggcactccggcgaagacatctgcagatggatgaaacacaggacgctagcaggcgtgcagacctgaaggctggtgccatcatgatggcaagtaacatcagggcaaattcgggcaagagggtaggaactgtccctggagttgaaataggagatattttctatttcaggatggagctgtgtgtcattggattgcatgcacctagtatgggaggcattgattacatgactagtaaatttggaaacgatgaggattctgtagccatatgtatcgtttccgcaggaggttatgagaatgatgatgatgacacagatgtgctggtatacagtggtcaagggggaaatagtaggaatactgaggagaggcaagaccagaagcttgagaggggtaacctagctcttgagaggagtttgcataggaagaatgagataagggttgtacgtggcttcaaggatccattttgcctaactgggaaaatttacatatatgatggcctgtacaaaattcatgagtcctggaaggagaaaacaaggtctggtatcaattgcttcaagtacaagctgctgcgtgaacctggacagcgtgatggagctgcattatggaagatgactcagaaatggatagatgatcctgctaccagaggcagggttctactagctgatctgtcatctaaggctgaaactattccagtttctcttgtcaatgaggttgaccatgagaaaggacctgcacatttcacctatactaaccaggtcaaatacgtgaggcctctcagttctatgaaaaagctgcagggctgtggatgccagagtgtttgcctgcccggtgatgccagttgtgcttgtggacaacataatggaggtgatttaccctacagttcattaggattattgtcatgccgcaaaccgatgatctatgaatgtggtgaatcttgcaactgttctacaaattgccggaacagagtgacccaaaaagggcccaggctacattttgaggtcttcaggaccaccaatcgaggctggggtcttcgttgctgggaacctgttcgtgctggttcatttatatgtgagtatgctggtgaggtcattgatgaactcaaagttaatttgaatgacaccgaagatgattacatttttcaaactgtatgccctggtgagaagactttaaaatggaattgtggacctgaactattaggtgaagctagcacatatgtatcggctgatgaatttgagccactgcctatcaagataagtgcaaaaaacatgggaaatgtctcccgtttcatgaaccacagttgctcacccaatgtcttctggcaacctgttcaatatgatcatggagatgatggacacccacatataatgttctttgcactgaaacatattccacccatgacagaactgacttatgactatggtgttgctggagctgaatctagtggttcaggctctcgtagaacgaagaactgcatgtgtggatcacaaaactgccgtggactattttgatgggttaagatccttgctctttgtggttaatcatacaaaccactttcagctagatcctttcttagtctccggatgatatgagtatgactgatgattccaattgctgccatgtgtactgtgaagacagcaagttgttgtcaaactgtagaatttctgttgccctgcacggcatggtggccgttctcccaccatttgttcaaatatttatgggggtgtggattgatgtatttcttctgctaatcttgtccaccagctgcaccggtctgtgtaaacttgttatgatccctgtttgctctggacgcctggttgtttaaccgtgactccttggatctggtcatgtaaattatcctggtttaggattatgttgcttttgactcgaattttctgcctcccttgctcgtttcatgtgatgcatcgtggccgatattttcagcaa

SEQ ID NO: 139021 - DNA, 2407 bp, Zea Mays
atggttctatattcggtacatccccttgccgctatcaccaggattttttttgtacatctaagatgtacagggcctcgaatttcatacctgatcctaatcaggtgctcctagatgccaaaccattaagatcgttagctccaatgttccctgcccccatgggagtcaatgttaatcagtcaagtacaccaccattggtctgtgtcactccggttggtcaattttcagcagggtttggtgcaggcaccagtgctaatggtgccattgatgccacccctatctctgcatacaaaacaaggtcaaacatatcacttgatggtgatgatgatccttactcgggtaaccaaactgaacggaagcctaggagaggccgacctcccggttctggtcgtgatggctcaaatggtaagttaaagcgccctaagcccacttacaagaattttgttgctggcaaagagcttgcctttctggcagcttcatccgatcccagggatatcgtggaagcagttcacatgacctttgaggcactccggcgaagacatctgcagatggatgaaacacaggacgctagcaggcgtgcagacctgaaggctggtgccatcatgatggcaagtaacatcagggcaaattcgggcaagagggtaggaactgtccctggagttgaaataggagatattttctatttcaggatggagctgtgtgtcattggattgcatgcacctagtatgggaggcattgattacatgactagtaaatttggaaacgatgaggattctgtagccatatgtatcgtttccgcaggaggttatgagaatgatgatgatgacacagatgtgctggtatacagtggtcaagggggaaatagtaggaatactgaggagaggcaagaccagaagcttgagaggggtaacctagctcttgagaggagtttgcataggaagaatgagataagggttgtacgtggcttcaaggatccattttgcctaactgggaaaatttacatatatgatggcctgtacaaaattcatgagtcctggaaggagaaaacaaggtctggtatcaattgcttcaagtacaagctgctgcgtgaacctggacagcgtgatggagctgcattatggaagatgactcagaaatggatagatgatcctgctaccagaggcagggttctactagctgatctgtcatctaaggctgaaactattccagtttctcttgtcaatgaggttgaccatgagaaaggacctgcacatttcacctatactaaccaggtcaaatacgtgaggcctctcagttctatgaaaaagctgcagggctgtggatgccagagtgtttgcctgcccggtgatgccagttgtgcttgtggacaacataatggaggtgatttaccctacagttcattaggattattgtcatgccgcaaaccgatgatctatgaatgtggtgaatcttgcaactgttctacaaattgccggaacagagtgacccaaaaagggcccaggctacattttgaggtcttcaggaccaccaatcgaggctggggtcttcgttgctgggaacctgttcgtgctggttcatttatatgtgagtatgctggtgaggtcattgatgaactcaaagttaatttgaatgacaccgaagatgattacatttttcaaactgtatgccctggtgagaagactttaaaatggaattgtggacctgaactattaggtgaagctagcacatatgtatcggctgatgaatttgagccactgcctatcaagataagtgcaaaaaacatgggaaatgtctcccgtttcatgaaccacagttgctcacccaatgtcttctggcaacctgttcaatatgatcatggagatgatggacacccacatataatgttctttgcactgaaacatattccacccatgacagaactgacttatgactatggtgttgctggagctgaatctagtggttcaggctctcgtagaacgaagaactgcatgtgtggatcacaaaactgccgtggactattttgatgggttaagatccttgctctttgtggttaatcatacaaaccactttcagctagatcctttcttagtctccggatgatatgagtatgactgatgattccaattgctgccatgtgtactgtgaagacagcaagttgttgtcaaactgtagaatttctgttgccctgcacggcatggtggccgttctcccaccatttgttcaaatatttatgggggtgtggattgatgtatttcttctgctaatcttgtccaccagctgcaccggtctgtgtaaacttgttatgatccctgtttgctctggacgcctggttgtttaaccgtgactccttggatctggtcatgtaaattatcctggtttaggattatgttgcttttgactcgaattttct

SEQ ID NO: 139022 - DNA, 2119 bp, Zea Mays
gttcccccggcaaacacactcggttctcccgtgcctctcgccgtctcgcgtcgcaacgactggccggccgccgccgccaccgccgacctacgtgccaaggtccgcatattcggaaccttcgccggcgagcacccaccaggattttttttgtacatctaagatgtacagggcctcgaatttcatacctgatcctaatcaggtgctcctagatgccaaaccattaagatcgttagctccaatgttccctgcccccatgggagtcaatgttaatcagtcaagtacaccaccattggtctgtgtcactccggttggtcaattttcagcagggtttggtgcaggcaccagtgctaatggtgccattgatgccacccctatctctgcatacaaaacaaggtcaaacatatcacttgatggtgatgatgatccttactcgggtaaccaaactgaacggaagcctaggagaggccgacctcccggttctggtcgtgatggctcaaatggtaagttaaagcgccctaagcccacttacaagaattttgttgctggcaaagagcttgcctttctggcagcttcatccgatcccagggatatcgtggaagcagttcacatgacctttgaggcactccggcgaagacatctgcagatggatgaaacacaggacgctagcaggcgtgcagacctgaaggctggtgccatcatgatggcaagtaacatcagggcaaattcgggcaagagggtaggaactgtccctggagttgaaataggagatattttctatttcaggatggagctgtgtgtcattggattgcatgcacctagtatgggaggcattgattacatgactagtaaatttggaaacgatgaggattctgtagccatatgtatcgtttccgcaggaggttatgagaatgatgatgatgacacagatgtgctggtatacagtggtcaagggggaaatagtaggaatactgaggagaggcaagaccagaagcttgagaggggtaacctagctcttgagaggagtttgcataggaagaatgagataagggttgtacgtggcttcaaggatccattttgcctaactgggaaaatttacatatatgatggcctgtacaaaattcatgagtcctggaaggagaaaacaaggtctggtatcaattgcttcaagtacaagctgctgcgtgaacctggacagcgtgatggagctgcattatggaagatgactcagaaatggatagatgatcctgctaccagaggcagggttctactagctgatctgtcatctaaggctgaaactattccagtttctcttgtcaatgaggttgaccatgagaaaggacctgcacatttcacctatactaaccaggtcaaatacgtgaggcctctcagttctatgaaaaagctgcagggctgtggatgccagagtgtttgcctgcccggtgatgccagttgtgcttgtggacaacataatggaggtgatttaccctacagttcattaggattattgtcatgccgcaaaccgatgatctatgaatgtggtgaatcttgcaactgttctacaaattgccggaacagagtgacccaaaaagggcccaggctacattttgaggtcttcaggaccaccaatcgaggctggggtcttcgttgctgggaacctgttcgtgctggttcatttatatgtgagtatgctggtgaggtcattgatgaactcaaagttaatttgaatgacaccgaagatgattacatttttcaaactgtatgccctggtgagaagactttaaaatggaattgtggacctgaactattaggtgaagctagcacatatgtatcggctgatgaatttgagccactgcctatcaagataagtgcaaaaaacatgggaaatgtctcccgtttcatgaaccacagttgctcacccaatgtcttctggcaacctgttcaatatgatcatggagatgatggacacccacatataatgttctttgcactgaaacatattccacccatgacagaactgacttatgactatggtgttgctggagctgaatctagtggttcaggctctcgtagaacgaagaactgcatgtgtggatcacaaaactgccgtggactattttga

SEQ ID NO: 139023 - DNA, 871 bp, Zea Mays
gtcctagccactcacgaacgcgggccgagtcaccgcccgcccacctcctatccacttccccatctgccagccgtccgagtccgaccacctctcgtatcgattctccaagcgccgcgccgcgccgggcgaagaagctcgtctcgtctccatggcggccgcagcggtggccatctccacctccgtgtgcacgtcctcaaggcgtagcacgggctgtccgaacgtgaggccccaggcccgtccgctcctaggcatgccgtcgctgcgccggaggctgcagacggccttggccgcgacgggcaagacgccgggcgaggcggaggagcaggtccccgcgtgggccaagcccggcgcggacgagccgccaccctgggagcgcgagggcggggccgcgcgtggacaggaggcccggcaggtccccttctacgcgtacctgctcgcgtctacgatcaccgccatcgccgcgatcggctccatcttcgagtacaccaaccagcggccggtgttcgggatcgtcggccccgacagcgccctgtacgcgccgctcctgggcttcttcgtcttcaccggtatcccgacctccgcgtttctgtggttcaaggccgtgcagacggcgaacagagaggccgaggagcaagaccgcagagacggattcctgtgagaggctgtgggtgactccggcgcactcgccggtgccgtcgccgtgcagaagaacgcgcaccgcaccaccgtggtgttcgcagcgacgggtgacgggtcatgtactcaagttatgtatgtcagtgtactgtattctagaattggagagagcagatggatttgcggcacaaatcagagaaaatatcataatcatcattcgtatgagtggaaaata

SEQ ID NO: 139024 - DNA, 984 bp, Zea Mays
atccggcccacggaccgggcgacgggccacctcgttccccatccgctcaggccaatcaacagaagtgacgcgagcacgagcacacatcccctcccttcttcggttattcctcgccgcgtgccctcgccgcagacctctgccatggcggaccagctcaccgacgagcagatcgcggagttcaaggaggccttcagcctcttcgataaggatggcgacggctgcatcactaccaaggagcttggaacggtgatgcgctcccttggccagaaccctaccgaggcagagctgcaggacatgatcaacgaggtcgatgcggatggcaatgggaccatcgacttcccggagttcctgaacctgatggcgaggaagatgaaggacacggactcagaggaggagctcaaggaggccttccgcgtcttcgacaaggaccagaacggtttcatctcggctgccgagctccgccatgtcatgaccaaccttggcgagaagctgaccgacgaggaggtcgacgagatgatccgtgaggccgacgtcgacggcgacggccagatcaactacgaggagttcgtcaaggttatgatggccaagtgaggagcggtccccgtgaaataagtatctatggattgaagcgaattatcaggcacacaagctgtactttgtcatgtccctttgagtacgcatcagtgtcatgcaggtggtaatgtcttgtagtggtccgtttaggcggtgtagtcatgggaacgcgacatcagatacctggtttctttttattgtgatgttatcttgcattattgcacctgtaggatttgttgaagctcatattttccagggttttggatcttttgtgctagtcttaagtctttgtgtatggaggcgtggagctaggattatgatataaagggtcaactaattcatcaatactatatgatgttatcaagcttaagtacttataatatggaataagaattctagttctttataatt

SEQ ID NO: 139025 - DNA, 1848 bp, Zea Mays
tcaccgctgcctataaaaatccggcccacggaccgggcgacgggccacctcgttccccatccgctcaggccaatcaacagaagtgacgcgagcacgagcacacatcccctcccttcttcggttattcctcgccgcgtgccctcgccgcagacctctgccatggcggaccagctcaccgacgagcagatcgcggagttcaaggaggccttcagcctcttcgataaggatggcgacggctgcatcactaccaaggagcttggaacggtgatgcgctcccttggccagaaccctaccgaggcagagctgcaggacatgatcaacgaggtcgatgcggatggcaatgggaccatcgacttcccggagttcctgaacctgatggcgaggaagatgaaggacacggactcagaggaggagctcaaggaggccttccgcgtcttcgacaaggaccagaacggtttcatctcggctgccgagctccgccatgtcatgaccaaccttggcgagaagctgaccgacgaggaggtcgacgagatgatccgtgaggccgacgtcgacggcgacggccagatcaactacgaggagttcgtcaaggttatgatggccaagtgaggagcggtccccgtgaaataagtatctatggattgaagcgaattatcaggcacacaagctgtactttgtcatgtccctttgagtacgcatcagtgtcatgcaggtggtaatgtcttgtagtggtccgtttaggcggtgtagtcatgggaacgcgacatcagatacctggtttctttttattgtgatgttatcttgcattattgcacctgtaggatttgttgaagctcatattttccagggttttggatcttttgtgctagtcttaagtctttgtgtatggaggcgtggagctaggattatgatataaagggtcaactaattcatcaatctctactactctataaggataaggacacaaggagggcgtccaccacggctccacccgacaccgcagcaatccccccgccccactctcctctccctgcaccgaggccgcaatccccgccgcgcccccactctcctcgcccctagatcttgcccgcgtctgtccccgccgccccgctctcctctccctgcaccgagggaattcaagctccagcaacgtcaggatccaacaccaccatggtcacgggaaagaagaggacgttcgtgctctacccgtcgctgggcgtgggccacctgatcccgatggtggagctggccaagcacctcttgcgccacggccacggcgcgctcatcgccgtggtcaacccgccggacacggacgccgtgtcggccgccgcggtggagcgcctcgcggcggccaacccggccatcgcgttccgcctcctgccggtcccggccagcccggacgccggcgcggactgggtgaagcgcgacctggacacgctccggctcgccaaccccgtgctccgggacttcctgctccggtcccagcccgccgccgcgctcatcctcgacatgttctgcgtcgacgcgctcgacgtcgcggcggagctcggcgtcccggcctacttcttcttcgcctccgcggcgggggacctcgccatgttcctcaacctgccgtacctctaccccaccctgccgtcgttcagggacatgggcgaggcgctggtgcgctgccccggcatgccgccggtccgggcgatggacatgtcgctgacggtgcaggacagggacagcgaccggaccaaggtccggatgtaccagttctgccgcatcccggaggggaggggcgtgctggtcaacagcttcgcctggctggagcccagggcactgagagcgctcggcgacggcgtc

SEQ ID NO: 139026 - DNA, 1051 bp, Zea Mays
atccggcccacggaccgggcgacgggccacctcgttccccatccgctcaggccaatcaacagaagtgacgcgagcacgagcacacatcccctcccttcttcggttattcctcgccgcgtgccctcgccgcagacctctgccatggcggaccagctcaccgacgagcagatcgcggagttcaaggaggccttcagcctcttcgataaggatggcgacggtacccacctggccccctcccttttcctccctgctaggctccttgatctcgcggccggatcgggatcgagctcccgtcccgccccgatacagcacgaattgtggggttcgtgtaggagctgttgctggctgcatcactaccaaggagcttggaacggtgatgcgctcccttggccagaaccctaccgaggcagagctgcaggacatgatcaacgaggtcgatgcggatggcaatgggaccatcgacttcccggagttcctgaacctgatggcgaggaagatgaaggacacggactcagaggaggagctcaaggaggccttccgcgtcttcgacaaggaccagaacggtttcatctcggctgccgagctccgccatgtcatgaccaaccttggcgagaagctgaccgacgaggaggtcgacgagatgatccgtgaggccgacgtcgacggcgacggccagatcaactacgaggagttcgtcaaggttatgatggccaagtgaggagcggtccccgtgaaataagtatctatggattgaagcgaattatcaggcacacaagctgtactttgtcatgtccctttgagtacgcatcagtgtcatgcaggtggtaatgtcttgtagtggtccgtttaggcggtgtagtcatgggaacgcgacatcagatacctggtttctttttattgtgatgttatcttgcattattgcacctgtaggatttgttgaagctcatattttccagggttttggatcttttgtgctagtcttaagtctttgtgtatggaggcgtggagctaggattatgatataaagggtcaactaattcatcaatctcta

SEQ ID NO: 139027 - DNA, 1427 bp, Zea Mays
caccaaatttctcaggcctccctccccgcgtcgctttcgccggacaccaccacctgccgctttcccctcgcccctccccctcccctcctcccctcccctcgccgcccatctcctccgcccctttttgaccccggttacgaatccgcaccagggcctgcggcggtatactcggttccctgcccccccacgaccacgccgccgcctcctccccacgcccgcccggcgctcccggaaccgccggtgagtcattcacatgatgtatcatgcgaagaatttttctgtgccctttgctccgcagagggcacaggataatgagcatgcaagtaatattggaggtattggtggacccaacataagcaaccctgctaatcctgtaggaagtgggaaacaacggctacggtggacatcggatcttcataatcgctttgtggatgccatcgcccagcttggtggaccagacagagctacacctaaaggggttctcactgtgatgggtgtaccagggatcacaatttatcatgtgaagagccatctgcagaagtatcgccttgcaaagtatatacccgactctcctgctgaaggttccaaggacgaaaagaaagattcgagtgattccctctcgaacacggattcggcaccaggattgcaaatcaatgaggcactaaagatgcaaatggaggttcagaagcgactacatgagcaactcgaggttcaaagacaactgcaactaagaattgaagcacaaggaagatacttgcagatgatcattgaggagcaacaaaagcttggtggatcaattaaggcttctgaggatcagaagctttctgattcacctccaagcttagatgactacccagagagcatgcaaccttctcccaagaaaccaaggatagacgcattatcaccagattcagagcgcgatacaacacaacctgaattcgaatcccatttgatcggtccgtgggatcacggcattgcattcccagtggaggagttcaaagcaggccctgctatgagcaagtcataaggcaaacttcaccttgacagaaaattttcagagttgacctctccacgagatgagcattctcatgtgaatatatattatcttaacaacagaatgtacgggtttttgaccctgcacctgatcccttcagccacgtccagttattcttatcactgtagtatccatcaacaagtcctgtaattatgaggatggtgttacagagtttctagcaagcatttccatcgagggaatggccctgagttgatccatgtagcaagaaagagaacatgcttacaagcaatatatttgctgtgaaaagggcacgcccctggatcttcctgaagttatgttgataaaaaaaagattatggcatatttctgaattatttctgaactcggcattatttatagtcttcgtttcatgt

SEQ ID NO: 139028 - DNA, 1436 bp, Zea Mays
gtcaaaaaaaaaaaacaccaaatttctcaggcctccctccccgcgtcgctttcgccggacaccaccacctgccgctttcccctcgcccctccccctcccctcctcccctcccctcgccgcccatctcctccgcccctttttgaccccggttacgaatccgcaccagggcctgcggcggtatactcggttccctgcccccccacgaccacgccgccgcctcctccccacgcccgcccggcgctcccggaaccgccgcattcacatgatgtatcatgcgaagaatttttctgtgccctttgctccgcagagggcacaggataatgagcatgcaagtaatattggaggtattggtggacccaacataagcaaccctgctaatcctgtaggaagtgggaaacaacggctacggtggacatcggatcttcataatcgctttgtggatgccatcgcccagcttggtggaccagacagagctacacctaaaggggttctcactgtgatgggtgtaccagggatcacaatttatcatgtgaagagccatctgcagaagtatcgccttgcaaagtatatacccgactctcctgctgaaggttccaaggacgaaaagaaagattcgagtgattccctctcgaacacggattcggcaccaggattgcaaatcaatgaggcactaaagatgcaaatggaggttcagaagcgactacatgagcaactcgaggttcaaagacaactgcaactaagaattgaagcacaaggaagatacttgcagatgatcattgaggagcaacaaaagcttggtggatcaattaaggcttctgaggatcagaagctttctgattcacctccaagcttagatgactacccagagagcatgcaaccttctcccaagaaaccaaggatagacgcattatcaccagattcagagcgcgatacaacacaacctgaattcgaatcccatttgatcggtccgtgggatcacggcattgcattcccagtggaggagttcaaagcaggccctgctatgagcaagtcataaggcaaacttcaccttgacagaaaattttcagagttgacctctccacgagatgagcattctcatgtgaatatatattatcttaacaacagaatgtacgggtttttgaccctgcacctgatcccttcagccacgtccagttattcttatcactgtagtatccatcaacaagtcctgtaattatgaggatggtgttacagagtttctagcaagcatttccatcgagggaatggccctgagttgatccatgtagcaagaaagagaacatgcttacaagcaatatatttgctgtgaaaagggcacgcccctggatcttcctgaagttatgttgataaaaaaaagattatggcatatttctgaattatttctgaactcggcattatttatagtcttcgtttcatgt

SEQ ID NO: 139029 - DNA, 1828 bp, Zea Mays
tttaagacccaatcgccgcaaacccctctgaaatttcttatcccccctcatctgctccacctccgacatcgcgcgagacgagcaagcccaagtatggccggagcagcagcagccgccgccgtggcgtccggggtctcggcccggccggccgcgccgaggagggcttctgcgggacgccgcgctcggctgtcggtggtgcgggccgcgatatccctcgagaagggcgagaaggcgtacacggtgcagaagtccgaggagatcttcaacgccgccaaggagctgatgcctggaggtgttaattcgccggtccgtgccttcaaatctgttggtgggcagccagtagtgttcgactctgtaaagggttctcgtatgtgggatgttgatgggaatgagtacattgattacgttggttcctggggtcctgcaatcatcggccatgcagatgataaggttaatgctgcattgattgaaactctgaagaaaggaactagctttggtgctccatgtttgctggagaacgtattggctgagatggtcatctctgccgtgccaagtatcgaaatggtccgctttgtcaactcagggacagaagcctgcatgggagcgctccgcctcgtgcgcgcattcaccgggcgggagaagatcatcaagttcgaaggctgctaccatggccatgccgattccttccttgtcaaagctggcagtggtgtcgccacccttggcctcccagactcccctggcgtccccaagggggccacctacgagactctaacggcaccctacaatgatgtcgaggcagtgaagaaactgttcgaggacaacgcgggggagattgctgccgtcttcctcgagccagttgttggcaacgctggtttcatccccccacagcctggtttccttaacgctctccgcgacttgaccagacaggatggtgcgctcctggtcttcgatgaagtgatgaccggcttccgtctgtcttacggtggagctcaggagtacttcgggatcacccctgacgtgacgaccttgggcaagatcatcgggggtggcctccccgttggtgcctacggtgggagaagggacatcatggagatggttgcccccgcagggccgatgtaccaggcaggaactctcagcgggaaccctctagccatgaccgctgggatccacacgctcaagcggctgacagagcccggcacctacgagtacttggacaagatcaccggcgaactcgtccgtgggatactggacgtcggtgcgaaagcagggcatgagatgtgcggaggacatatcagaggaatgtttggcttcttcttcaccggcgggcccgtccacaatttcggggacgccaagaagagcgacaccgagaagttcgggaggttctaccgtggcatgctggaggagggcgtgtacttcgctccatcgcagttcgaggcggggttcaccagcttggcgcacacctcccaggacatcgagaagaccgtcgaggccgctgagaaggttctgaagcggatatagggggtccgcttcaagcaagcatgcagagagcatttcctcgtatttacgttcttgtactcttagttctatatgccaccgaggttttgtattgtgcagcagcaggacagcttctgtaagttcctctttctgaattagtgggtcttgtttttgtcagtgccaataaatctatggtccacgattacggtttcgttgttgtactgatgttcagatacaggattgtctagaacctttttttttagaaaaaaaaaacaatatccacattagtaatgcactgacccgggacttgcataagccatctcggactcttccc

SEQ ID NO: 139030 - DNA, 462 bp, Zea Mays
atgggaataatagaaaggttggcatggcctgagttattattaggggccagcaacatctttacaatggtttccttatctttttctcttccaaacacacttgagtcatcgatcagcgaacttgttttgggcctctcctttatctcctgcctgtcggtcccactgttcatgttgggaccaataatttgtctttccttgataagcctatcgagtttcccctcaatcttccttatgtgctgcgctatcttatgattaaagaaacacttgttcaaccaaaaacagcagaaacagctcctaaccttcttcagatggtcatggttggatggaccttctagtttggatcgcagagtctcggctgcatactcatcaagcaagtcatccatctcatccgcgacatccttgagcttggcaagccagctgcgtgcagccttatccttcaattgccgctcctcggcatcttcgaca

SEQ ID NO: 139031 - DNA, 324 bp, Zea Mays
gcgagattctctactctatcctataatactccgcgttcatattcaccctaaatatctaccctataccaactaccacatattctatcatttttcccacacttttttatcccaaaaaaaatccatcgtcggcgggtcgctgtcgcgcacagtggatagaccattcacccagtgacgcgcggagccgtgcacccccgtctcgttttagcgcatgcgagcgggatgcgctgtatttagcgtttggacgggtctactcgatggtagcgcacgacatccagtaagcggctgcagaagatttttactccaagtgttactctatgttcatag

SEQ ID NO: 139032 - DNA, 901 bp, Zea Mays
tctgcgggcgagaagagcagggctgggcgcatccaataccgcgatgccgttcttgagccccctgggtggcgaagacgccgacgacttctacttcggctacgacgccgggtaccaccgcagcggcggcgcgggcaagagcgccaagaaagaggagaagaaaaaggagaagggcttcctctcctgcctcccctgcttcatcccctgctcccccggcgcctccgaccccacggcgcaccgccgcctcctgtcttcggactcaagcgacagcgacaacgcggcggccgccatggatatcaccgccgacctcgcccgcctccgcgagcgctactaccgtctggccgccggcccgcccgtccgcccccgcgacgtccccggcctggtggcgcgccccgacgacccgccgctcgccgtgtccgcgctctcttggctcggcggggacctccgcccgtcctgcatgctcgtggcgctgttgcctgcattgttcccgtccctgcccgtacacgcccgccacgcgctctccgccgcggcccgtcgcctgagcgcccgcgaggccgcgctagacgaagaggtggccgagtacaaggccacctacgccatgaagctggcgtgcgaaaagaccaaggaccgcgtcgccgagacggccgccgaggagatgtgcaagatggcgcgcgccgcgcgcagggccgacaagctgcggtggcgcgccgtggaggccgccgccagggaggtgctcgcgcctgcgcaggcaaaggagttcctcaaggccgtcgaggacgtgtcgggcaaggtggcgcggcacggcgcccggtggcgcgcgcgcgccgggacgctcacggtccccgtcgaggcgttcgagcgcgtgcgcaccaacgccagagcggctgcggacgatacatggtga

SEQ ID NO: 139033 - DNA, 1287 bp, Zea Mays
gaaattctctccaattaggattcgaactaagtacttaaagagtgctactcagaccacttaatcaacctagctagaaacccttttgctacttgctgggtgcatagactgaactatacaaaaaatctactcttgtggggaatgcaaatgtagatgtatataagattgtttgcattgttccctttacagagtttagagagcagattaacggtggctccccgctccagcttgttcgtgttggtgaatcgtccttgtcagatttccttgcaacagtatttcccagcatcggactggacgtgacgtgacgcgacggagtcaagactcgagaggtgcacgaagtgcccacttcgtctcaaaaacaattgcacttgtagatttgaggtgaacagaacaatgattcaatgaacaatcaattatgtgattatgctatgctacggaaggagtacggggcacgatttatctccctgacgagacggccgatttcaggtcgccagaaacggacgcgcctctccgcggaaaccggccacatccccgggctggaacctggaagccagcagcgtacgacacggcacatcgatgcctcgctcgctcgtcatgtcgtagtcccatcgctggcacaccgaccagtcgtttcggctgccggattggctacgctgagctccgagacccatgtgtcacgtactcatgtgtgccgcgtcgtgcgatgtggcgtctcaggcgctctccacagctcggaaaacacagcacagtccacattaacagtagtaagacgattgacaagcacgaagccgcagcacgagcccaagaagacatttttccccccgatgcctacactgcacctcctctgatttgccagcagcagcgcgtctcactggccatgggccactcattcagactcttcagggtctgggtcgggttttgttctgttctgttcgctttctctgaacacgtgcaatgcggcagctggaacgtgaggcccgcgccccgcgccggctcaaagcgggaggagctacggttcagacgtcaagagctgcgacagagatcgctgcgtcacacgcacaccagaaagggagatggcgacgacggggaagcccgcgaggaggcccagcagctcatcctcctccggcgcggacagccgccttgcgctgcccacgagcgcgagtgcctccttcatggatcggcgatccgcactctcttttctccgcctcgcgcggcgacggccgggacagggagcgagcagcgcgtatggtgttcgtggccgcgcgcgcttgctcgtgaggttttgggagc

SEQ ID NO: 139034 - DNA, 1591 bp, Zea Mays
cacatgaccaccttagggtttcagcgtacctaactagttgctacctagcctcgaccaggtggagcaatgggctccacggcggcggcgccctgccacatcgtggccgtgccgtacccgggccgtggtcacgtcaacgcgatgctgaacctatgccgcctcctggcagctcgagacggcgtcaccatcaccatcatcgtgaccgaggagtggctcagcctcctcggcgccccggcggcgctgccggacctcggcctgcgcgttcgctttgaggccattccaaacgtgatcccctccgagcacggccgcgccaacgacatggtcggcttcatggaggccgtgtacaccaagatggcgtcgccgttcgagcagcttctcgacaggctcgcgccgccggcgcccgcggctattgtggccgacatgttcgtgccgtggaccgtaggcgtcggcgagcggaggggcgtgcctgtgtgcatcatgtgcccgattagcgccaccatgttcgcggtgcagtacaacttccacctgctaccacccgcggcggccggcggcggcgcgtctccggatatcactggttcttgttttgttgaaaactacattcctggcacgaaatcaatcaggttcgccgatcttgcgcctacacacaccgatgcgttacttctagacaaaatccttgaagcccactcctctgtaaagaaagcacaatgtatcgtcttcaccaccttccaagagctcgagagcgacgccatcggcgctatgaggcaaaactgcccagtgtacgcagttgggccctgcgtccccttcatggcactgcaagagcacaaggccagcccagacggtgacgactacatggcgtggctggacgcacagcccgcgggctcggtgctctacgtctcgctcggcagcttcctctcggtgtccgccgcccagttcgacgagatcgccgctggcctggccgggagcaaggccaggttcctgtgggtgctccgcgacgccgacgcgtgctcccgcgtgcgaggcctgatccgcgatcccgacgccggcctcatcgtgccatggacgaaccagctgagggtgctgtgccacccttcggtcggggggttcttcacccactgcggcatgaactcgacgctcgaggcggtgtacgctggcgtgcccatgctcaccctgcccatcgcgttcgaccagccgaccaatagccggctcgtcaccgaggtgtggaagaatggcatcggcctcagggacatggcccgcgccgacggcgtcatcgggagaggtgagatagcctcggccgtggacaggctgatgcgccctgacgcggcggagttccaggacatgaggaagcgagtgacactgtggaaggacgcggctcgggctgcgtctgaagagggtggatcctcgtggaaagatgttacgtctttcatcaacttcgtttcacgttgagatctccgaatgtcaaacggagtcagctgtagctgcagtgaattgtgatcgattctcacggagttagtgtgatatctgaatgttagcagaatctttcggcaacaataaacatgctgctgcatccaattgaaagtagctcttttaattgttc

SEQ ID NO: 139035 - DNA, 1749 bp, Zea Mays
cggatcaccagatccgctcccttccccccgtcagcagtagaggcgcgagaagttgtggaagacccgtctcccttcccataaacacgacagaggaaacacacgagacactggatatatggttggacctctggcctctttctcatcttcattccatatgaggggtacatgttctatatatagagacgcgatagccctcagggctatattcgatatttgcccacgtaacccttcattagggtttctcaacacaggggaccggaggtgggacccatccatggagccatagcaataccgacggttccacagctttccttcgccgcaccgctttgcttcctcgcaaagcatcagatcgtggtcgagtcgccgtcaacgacgcggcgctggtaccgcagcatccttcgcccccgcccccgtccccgtcaccgtattcgcatcgtccggcaaacggcgaccagcgcaaacaccttccacaagccattgctttagtttgttccctcttgctataaaatatgcccgctcctgcactactactactactaccagcgatagtggccggcatcatccgtctcgtctctcctctcctctcctttttccccctccctgcacagcgccgctcaccgtcaccggaccacagcagcgatcgatggctgaggtacacaatgagcggcccgtggggatggtgggcgacgtccgggacgcaccggtgggccgcgagaacgacctcgaggccatcgagctcgcgcgcttcgcggtcgccgagcacaacagcaagaccaacgcgatgctggaattcgagaggctggtgaaggtgaggcaccaggtcgtggccgggaccctgcaccacttcaccgtcgaggtgaaggaggccggcggcggcgaaaagaagctgtacgaggccaaggtgtgggagaaggcgtgggagaacttcaagcagctgcagagcttcgagctcgtcggagacgccgcggtcgcctgaggcgcacaggcttttcgctggaggctggagcacaacaatgaaagaatttaactgtcatcccactggaaaagtatgatataatgaataaaccagcgtcttacccacatgtattgtaccctaatgagatatttgaccactgtaatagaatgagatgtgctaaggaatctgaaagccttcttgctttttgttgccaacttgccatacatgatacatccgccaacaggtctcagctatccaagaaagcagaaggatagataacataaaactggagagcaactggaatgtacaaacggtactatctgcgaaagcaatagctgctaatagaacctaacttgagaacattacagtcaactagtcaaacgaccttaacctctgggacattataagctacatcggcagctttggcggctatatgatacatgagaactgctacagagttaagctgaacctacagttgtcctgctattcctactcatcaactctgaagctatataacggcggagctagtcttcattgtcataatcctcgtcctcctccaatctatggtttgttgacagagcaaactggacagggtccatctccatcttgttcatgtcagccagttcccaagcaccaaagaagtccttgagttttgctccttcccttaaccgtggaacagatggtccaggtgctgcagtggctgcagcgcaactagttgctggagctgacagctggggttcgggtggcactgtaacctcatcctcttcatcggttggatctaaattcaagtcaat

SEQ ID NO: 139036 - DNA, 1675 bp, Zea Mays
ccaccgcgcccagtccacgctcccccaaccagcccacctaaacccccgacccatcccgacctcttcctcaaatcctcagatccgccccctcctccacccttgcgccgcgctttcacagctctcccgcctccggatccagatccgccgccaccaacgcctgctcctccccctcccgctgcaccaccaccatcaagaggtccagcagggcggcagcggcagcggcggcggcggcgacatggggcgtgacggcggtggcggtgtcgccggcggcatgtctgactcggtgctccggaaggtgctcctctcctacttctacgtggcggtgtggatcttcctctccttctccgtcatcgtctacaacaagtacatcctcgacccaaagatgtacaactggcccttccccatctccctcaccatggtgcacatgggtttctgctcatccctcgccgtcgcgctcgtccgcgtcctccgcgtcgtcgacctccccacatcgccctccatgacgccgcagttctacacctcctccgtcgtccccatcggcgcgctctacgcgatgtcgctctggttctccaactccgcctatatctacctgtccgtgtcattcatccagatgctcaaggcgctgatgcccgtcgccgtctactccatcggcgtcctcttcaagaaggagaccttcaggtcctcctccatgctcaacatgctctccatctcattcggtgttgccatcgccgcctacggcgaggcgcgcttcgacgtgcgcggcgtcgcgctgcagctcgccgccgtcgccttcgaggccacgcggctcgtgctcatccagatcctgctcacgtccaagggcatctcgctcaaccctatcacctcgctctactatgtcgcgccgtgctgcttctgcttcctcctcgtgccctgggccttcgtcgagctgcccaggctgcgcgccgtcggtaccttccaaccggattttttcgtctttgggacgaactcactctgcgcctttgcgctcaaccttgccgtcttcctgctggtcggcaagacctcggcgctgaccatgaacgtcgcgggagtagtcaaggactggctgttgattgccttctcgtggtctgtgatccgtgacaccgtcacaccgatcaacctgttcgggtacgggatcgcgtttttaggggtgggctactacaatcatgtcaagctgcaggcgctcaaggctaaggaggcacagaagaaagccacacaggctgatgaggaggccgggtcgctcttgcaggagcgcgatggacacagtgatcgcaagagcgacaatcaggcctagagggccagatctgatcctggcttccccatattgggcatctgatgcaaggtgcaaagactggtgttaggtctgcggttgctttcaaggaggaaggcggccattcctcactacctctctttgcccattgtctacatttatttgttctactagtagattaggggactacagatgtactcctgcagatggttaatttggtggctattttcgatatataatgagcttacagtaatctacgagctgagtctttctgcctgcgaagtttctgtttattcgtggaccggtcggcgtgttgtgtggatcagctttgtagtactttagtttcatactccgctttgtggtaaaaaaaaatcaaagaacgtttgcttt

SEQ ID NO: 139037 - DNA, 2144 bp, Zea Mays
ccaccgcgcccagtccacgctcccccaaccagcccacctaaacccccgacccatcccgacctcttcctcaaatcctcagatccgccccctcctccacccttgcgccgcgctttcacagctctcccgcctccggatccagatccgccgccaccaacgcctgctcctccccctcccgctgcaccaccaccatcaagaggtccagcagggcggcagcggcagcggcggcggcggcgacatggggcgtgacggcggtggcggtgtcgccggcggcatgtctgactcggtgctccggaaggtgctcctctcctacttctacgtggcggtgtggatcttcctctccttctccgtcatcgtctacaacaagtacatcctcgacccaaagatgtacaactggcccttccccatctccctcaccatggtgcacatgggtttctgctcatccctcgccgtcgcgctcgtccgcgtcctccgcgtcgtcgacctccccacatcgccctccatgacgccgcagttctacacctcctccgtcgtccccatcggcgcgctctacgcgatgtcgctctggttctccaactccgcctatatctacctgtccgtgtcattcatccagatgctcaaggcgctgatgcccgtcgccgtctactccatcggcgtcctcttcaagaaggagaccttcaggtcctcctccatgctcaacatgctctccatctcattcggtgttgccatcgccgcctacggcgaggcgcgcttcgacgtgcgcggcgtcgcgctgcagctcgccgccgtcgccttcgaggccacgcggctcgtgctcatccagatcctgctcacgtccaagggcatctcgctcaaccctatcacctcgctctactatgtcgcgccgtgctgcttctgcttcctcctcgtgccctgggccttcgtcgagctgcccaggctgcgcgccgtcggtaccttccaaccggattttttcgtctttgggacgaactcactctgcgcctttgcgctcaaccttgccgtcttcctgctggtcggcaagacctcggcgctgaccatgaacgtcgcgggagtagtcaaggactggctgttgattgccttctcgtggtctgtgatccgtgacaccgtcacaccgatcaacctgttcgggtacgggatcgcgtttttaggggtgggctactacaatcatgtcaagctgcaggcgctcaaggctaaggaggcacagaagaaagccacacaggctgatgaggaggccgggtcgctcttgcaggagcgcgatggacacagtgatcgcaagagcgacaatcaggcctagagggccagatctgatcctggcttccccatattggttggttctcgatacattcatgatattgctaccattgtcacttacatgtgagagaagtgttttttgttagcttgcattgtgatataagagttcatcttgagaaagacgttatgtttacatctaacgtttgtggcaatcaaaaatcaatattgcattgtggaccattggctactgaaggcatctgttttgtttacacaaatgaaatagaattctaaaaaaaattgttctgtgaacaggttaccactagcctggaactgcgacaaaataagaaatagtcgaaaccaataaagcctagcattttgttgttctactcggtcattttggtgtcctaaacttgtaattttgctggaatattgtacagggcatctgatgcaaggtgcaaagactggtgttaggtctgcggttgctttcaaggaggtgtgtgccggttgcttgcacatctttaactctgggtctgaagagcaaatcagaagtatttatggtttaggaaatatgcacctgctttgctggagaactttgtcctgctatttatttatagacacttctgatctacaggaaggcggccattcctcactacctctctttgcccattgtctacatttatttgttctactagtagattaggggactacagatgtactcctgcagatggttaatttggtggctattttcgatatataatgagcttacagtaatctacgagctgagtctttctgcctgcgaagtttctgtttattcgtggaccggtcggcgtgttgtgtggatcagctttgtagtactttagtttcatactccgctttgt

SEQ ID NO: 139038 - DNA, 1798 bp, Zea Mays
cgattctccacgtggccaccgcgcccagtccacgctcccccaaccagcccacctaaacccccgacccatcccgacctcttcctcaaatcctcagatccgccccctcctccacccttgcgccgcgctttcacagctctcccgcctccggatccagatccgccgccaccaacgcctgctcctccccctcccgctgcaccaccaccatcaagaggtccagcagggcggcagcggcagcggcggcggcggcgacatggggcgtgacggcggtggcggtgtcgccggcggcatgtctgactcggtgctccggaaggtgctcctctcctacttctacgtggcggtgtggatcttcctctccttctccgtcatcgtctacaacaagtacatcctcgacccaaagatgtacaactggcccttccccatctccctcaccatggtgcacatgggtttctgctcatccctcgccgtcgcgctcgtccgcgtcctccgcgtcgtcgacctccccacatcgccctccatgacgccgcagttctacacctcctccgtcgtccccatcggcgcgctctacgcgatgtcgctctggttctccaactccgcctatatctacctgtccgtgtcattcatccagatgctcaaggcgctgatgcccgtcgccgtctactccatcggcgtcctcttcaagaaggagaccttcaggtcctcctccatgctcaacatgctctccatctcattcggtgttgccatcgccgcctacggcgaggcgcgcttcgacgtgcgcggcgtcgcgctgcagctcgccgccgtcgccttcgaggccacgcggctcgtgctcatccagatcctgctcacgtccaagggcatctcgctcaaccctatcacctcgctctactatgtcgcgccgtgctgcttctgcttcctcctcgtgccctgggccttcgtcgagctgcccaggctgcgcgccgtcggtaccttccaaccggattttttcgtctttgggacgaactcactctgcgcctttgcgctcaaccttgccgtcttcctgctggtcggcaagacctcggcgctgaccatgaacgtcgcgggagtagtcaaggactggctgttgattgccttctcgtggtctgtgatccgtgacaccgtcacaccgatcaacctgttcgggtacgggatcgcgtttttaggggtgggctactacaatcatgtcaagctgcaggcgctcaaggctaaggaggcacagaagaaagccacacaggctgatgaggaggccgggtcgctcttgcaggagcgcgatggacacagtgatcgcaagagcgacaatcaggcctagagggccagatctgatcctggcttccccatattgggcatctgatgcaaggtgcaaagactggtgttaggtctgcggttgctttcaaggaggtgtgtgccggttgcttgcacatctttaactctgggtctgaagagcaaatcagaagtatttatggtttaggaaatatgcacctgctttgctggagaactttgtcctgctatttatttatagacacttctgatctacaggaaggcggccattcctcactacctctctttgcccattgtctacatttatttgttctactagtagattaggggactacagatgtactcctgcagatggttaatttggtggctattttcgatatataatgagcttacagtaatctacgagctgagtctttctgcctgcgaagtttctgtttattcgtggaccggtcggcgtgttgtgtggatcagctttgtagtactttagtttcatactccgctttgt

SEQ ID NO: 139039 - DNA, 574 bp, Zea Mays
ctcaaatcctcagatccgccccctcctccacccttgcgccgcgctttcacagctctcccgcctccggatccagatccgccgccaccaacgcctgctcctccccctcccgctgcaccaccaccatcaagaggtccagcagggcggcagcggcagcggcggcggcggcgacatggggcgtgacggcggtggcggtgtcgccggcggcatgtctgactcggtgctccggaagggcatctgatgcaaggtgcaaagactggtgttaggtctgcggttgctttcaaggaggtgtgtgccggttgcttgcacatctttaactctgggtctgaagagcaaatcagaagtatttatggtttaggaaatatgcacctgctttgctggagaactttgtcctgctatttatttatagacacttctgatctacaggaaggcggccattcctcactacctctctttgcccattgtctacatttatttgttctactagtagattaggggactacagatgtactcctgcagatggttaatttggtggctattttcgatatataatgagcttacagtaatctacgagctg

SEQ ID NO: 139040 - DNA, 824 bp, Zea Mays
tgcttatcattacatgtactaaaactgatgaataatagcttcgactataatatctgtaactcatccttttcttttttgaaggttcgcactattaaagtggaaaagaggatcaatgagattgtgaaccgcttgaataagacaaaggtggaaaggaaacctgatttaaaggctgaaagagaggctattagtgctgctgaaaaggcagaaagaaaggcacagcttagagacaagaaacgtagggaagagatggagaggcttgacaaagagaagcaggctgatatcaggagctacaagggtctaatggtccaagagaagatgacttccaacaagcaaatcgcttctggcagcaagaccctgcaggaacttgaagaagacttcatgtgaggggcggacattataaatgccatgctgaagatttccttgaactgcttctgtcgaagacagaaggggtaccacaggcttgtgagatactggatctaaatgactcatgggcaggccatggtctgttattatctcctcttgttgttgtggtctatgtaaaccttgtttacttgctgaaaaaacaacggtgcatgctctaactgtggttgatttaatggtctgttgcccatcaagttgaaatggtaatggaattatggtttcctggatttttcaaacaataaagacatggcagcagataacttatatattcaattctttgcatggagaacgactcacgaacttctttgtttgtgtcacatatacgctttctgctatgtattttgttgctgtaatagtgttatagaaatgtaccacacttagcttacatttggagattcttcaat

SEQ ID NO: 139041 - DNA, 230 bp, Zea Mays
aatttattgaaccatatcattacctcagtacttgcagattgacatgtctaactgaactcttgtatcatgaaaacaaagagaagactcatttgacgggcagattgacaatgcttcatccataaggcctaattgttgacaagaactaagcttaagagagagaacaaatgaccaaattgtctttgcacgagcaaataattatactataataaatcagaagtactttaattttg

SEQ ID NO: 139042 - DNA, 1336 bp, Zea Mays
ggatcacgtcggcgtcccatctcctcctccacgacacagaacgccgctccctttccgggattctcctctccaatcgcagctaaaacgcaacgcactggatcggacgtcgccaaaaagatcggtggcgacaccataaagaaagaatccgagaaaaggcgaaaggggaggagagaaaggggaggcatctttcttgtgcgacttgtccgttgaccacaggcggagaaatttgttctcggcacacattctctgccacaatggacgatggagctgacctcccctgccaactgctcttctcccacccggagatgcctgacagcttcgacgagttcttcaacagcgccacgacgacctgcacccacacgcacagctgcaacccgcccggcccctcggtcgccatgcacacccacacgtgcctgcacgcgcacaccctggtcctgggcagcggcggggaggacgacgacgacgccagggaggactcggcgaagccgcgcagaccgctggggaacagggaagctgtgcgcaagtaccgggagaagaagaaggcgcacgcggcctttctggaagaggaggtcaagaagctccgcgccgccaaccagcagctccagagacggctgcagggccatgcagctttggaggcggaggtggcgaggctccggggtctcctgctcgatatccggggcaagatcgacgccgaggtcggcggcgtgctcccttttcagaagccgtgcagtgtgggctccgtggcgtgtgccgatcctgctctgtgcttcaacggcaactcggaggttggaggcggctgggaggagagctcaagaccggcagccgcggactgcaggatcgatgaagtgcgagggatgtcacgggaaattgatgtcccagaaggcttgcgtcattccatggatgttgttgcgagcttcgtgagttctgatcccctggctgaatgagcgcgtttgcctgattggcagttttttttttttggggcctctgccagtgccagcttcttttggcttgcttgaaaggtcaaattttcatgtaattagaagaattgaggaactgataatgagtggaactacctccactgtggtccatgcttcttgtgctggtgttcagtgtgtatagctgagattatattgaactaatataaatgcactgaacactgtttacatctgaaaaaaggtcatttctgtgggtgcaagattttttattttatttttctgcaattacaggacgactacaaaatcgtcagattgtttgttcattctgcagaacgtagaggattttttttccgcccagagtttctctggaataccactagcccgattgtactttgttcatg

SEQ ID NO: 139043 - DNA, 1699 bp, Zea Mays
gccaacaaaaacctcccagcactggcaagaacagggaatcgtcccctccctccgtctccaccgcccaccactgatcggatcacgtcggcgtcccatctcctcctccacgacacagaacgccgctccctttccgggattctcctctccaatcgcagctaaaacgcaacgcactggatcggacgtcgccaaaaagatcggtggcgacaccataaagaaagaatccgagaaaaggcgaaaggggaggagagaaaggggaggtacaaaatttctacccgctagaggttagctagctcggcggcgagggaacgagagacgccctaccgtcgattccatatcgtcgctccgatattctgatgccggaatcctgcttttccggctagcttaccgatacctcctaggtggtttccagtcctcacccttccaacctctactatctttttttgtgaatttacctccaccgaattcgggcagctcaccatttcttggagtttggtgtcctttctcgagtgtttccttcctccctcccgggttctactgctgagtggcatctttcttgtgcgacttgtccgttgaccacaggcggagaaatttgttctcggcacacattctctgccacaatggacgatggagctgacctcccctgccaactgctcttctcccacccggagatgcctgacagcttcgacgagttcttcaacagcgccacgacgacctgcacccacacgcacagctgcaacccgcccggcccctcggtcgccatgcacacccacacgtgcctgcacgcgcacaccctggtcctgggcagcggcggggaggacgacgacgacgccagggaggactcggcgaagccgcgcagaccgctggggaacagggaagctgtgcgcaagtaccgggagaagaagaaggcgcacgcggcctttctggaagaggaggtcaagaagctccgcgccgccaaccagcagctccagagacggctgcagggccatgcagctttggaggcggaggtggcgaggctccggggtctcctgctcgatatccggggcaagatcgacgccgaggtcggcggcgtgctcccttttcagaagccgtgcagtgtgggctccgtggcgtgtgccgatcctgctctgtgcttcaacggcaactcggaggttggaggcggctgggaggagagctcaagaccggcagccgcggactgcaggatcgatgaagtgcgagggatgtcacgggaaattgatgtcccagaaggcttgcgtcattccatggatgttgttgcgagcttcgtgagttctgatcccctggctgaatgagcgcgtttgcctgattggcagttttttttttttggggcctctgccagtgccagcttcttttggcttgcttgaaaggtcaaattttcatgtaattagaagaattgaggaactgataatgagtggaactacctccactgtggtccatgcttcttgtgctggtgttcagtgtgtatagctgagattatattgaactaatataaatgcactgaacactgtttacatctgaaaaaaggtcatttctgtgggtgcaagattttttattttatttttctgcaattacaggacgactacaaaatcgtcagattgtttgttcattctgcagaacgtagaggattttttttccgcccagagtttctctggaataccactagcccgattgtactttgttcatg

SEQ ID NO: 139044 - DNA, 1471 bp, Zea Mays
gttcgaaatgtcccgctcccctccccccgctcacacggcgactggcccagcccggtcgccgccgtcgccctatccaactactcgtccagaaatctgccccgccatcgccagcaatgaatagatcagccctgcggacgtcggatttgccccgtcgcggtcaggatctcttcaccgtttgcaagcggtcgcatccccctcaccgcagcttcgccaacaccacgcctataatgcctaaaggccaccaacggagcagcgctagctacggccgctggctctggctcgggcgaccctgcagcgacgggacggctacccatccaacccagcattcaagccaacgcgtcttcaatctgcagcaggattgctccgtggtatccggcgtgttagaggcagctgggtggagtacggtcatcgaagacgctgcgacaagatcactgttccagcgccttcaagtcatccaactaccgagccaaggtctatgcctctgaccaaggcatctttcttgtgcgacttgtccgttgaccacaggcggagaaatttgttctcggcacacattctctgccacaatggacgatggagctgacctcccctgccaactgctcttctcccacccggagatgcctgacagcttcgacgagttcttcaacagcgccacgacgacctgcacccacacgcacagctgcaacccgcccggcccctcggtcgccatgcacacccacacgtgcctgcacgcgcacaccctggtcctgggcagcggcggggaggacgacgacgacgccagggaggactcggcgaagccgcgcagaccgctggggaacagggaagctgtgcgcaagtaccgggagaagaagaaggcgcacgcggcctttctggaagaggaggtcaagaagctccgcgccgccaaccagcagctccagagacggctgcagggccatgcagctttggaggcggaggtggcgaggctccggggtctcctgctcgatatccggggcaagatcgacgccgaggtcggcggcgtgctcccttttcagaagccgtgcagtgtgggctccgtggcgtgtgccgatcctgctctgtgcttcaacggcaactcggaggttggaggcggctgggaggagagctcaagaccggcagccgcggactgcaggatcgatgaagtgcgagggatgtcacgggaaattgatgtcccagaaggcttgcgtcattccatggatgttgttgcgagcttcgtgagttctgatcccctggctgaatgagcgcgtttgcctgattggcagttttttttttttggggcctctgccagtgccagcttcttttggcttgcttgaaaggtcaaattttcatgtaattagaagaattgaggaactgataatgagtggaactacctccactgtggtccatgcttcttgtgctggtgttcagtgtgtatagctgagattatattgaactaatataaatgcactgaacactgttt

SEQ ID NO: 139045 - DNA, 1494 bp, Zea Mays
gccaacaaaaacctcccagcactggcaagaacagggaatcgtcccctccctccgtctccaccgcccaccactgatcggatcacgtcggcgtcccatctcctcctccacgacacagaacgccgctccctttccgggattctcctctccaatcgcagctaaaacgcaacgcactggatcggacgtcgccaaaaagatcggtggcgacaccataaagaaagaatccgagaaaaggcgaaaggggaggagagaaaggggaggtacaaaatttctacccgctagaggttagctagctcggcggcgagggaacgagagacgccctaccgtcgattccatatcgtcgctccgatattctgatgccggaatcctgcttttccggctagcttaccgatacctcctaggtggtttccagtcctcacccttccaacctctactatctttttttgtgaatttacctccaccgaattcgggcagctcaccatttcttggagtttggtgtcctttctcgagtgtttccttcctccctcccgggttctactgctgagtggtgaggtctactgccctgcacctgcaagtttgtttcatttgtgatgtgatccgttagtttgccccccagcaaccgttgctcagaaattcagttcttattaaagcttcaagacccttcaaggaacatcttttagacaagctcttgattccttcacctctctctctcttttcaggcatctttcttgtgcgacttgtccgttgaccacaggcggagaaatttgttctcggcacacattctctgccacaatggacgatggagctgacctcccctgccaactgctcttctcccacccggagatgcctgacagcttcgacgagttcttcaacagcgccacgacgacctgcacccacacgcacagctgcaacccgcccggcccctcggtcgccatgcacacccacacgtgcctgcacgcgcacaccctggtcctgggcagcggcggggaggacgacgacgacgccagggaggactcggcgaagccgcgcagaccgctggggaacagggaagctgtgcgcaagtaccgggagaagaagaaggcgcacgcggcctttctggaagaggaggtcaagaagctccgcgccgccaaccagcagctccagagacggctgcagggccatgcagctttggaggcggaggtggcgaggctccggggtctcctgctcgatatccggggcaagatcgacgccgaggtcggcggcgtgctcccttttcagaagccgtgcagtgtgggctccgtggcgtgtgccgatcctgctctgtgcttcaacggcaactcggaggttggaggcggctgggaggagagctcaagaccggcagccgcggactgcaggatcgatgaagtgcgagggatgtcacgggaaattgatgtcccagaaggcttgcgtcattccatggatgttgttgcgagcttcgtgagttctgatcccctggctgaatgagcgcgtttgcctgat

SEQ ID NO: 139046 - DNA, 905 bp, Zea Mays
gtagctcgttcgaaatgtcccgctcccctccccccgctcacacggcgactggcccagcccggtcgccgccgtcgccctatccaactactcgtccagaaatctgccccgccatcgccagcaatgaatagatcagccctgcggacgtcggatttgccccgtcgcggtcaggatctcttcaccgtttgcaagcggtcgcatccccctcaccgcagcttcgccaacaccacgcctataatgcctaaaggccaccaacggagcagcgctagctacggccgctggctctggctcgggcgaccctgcagcgacgggacggctacccatccaacccagcattcaagccaacgcgtcttcaatctgcagcaggattgctccgtggtatccggcgtgttagaggcagctgggtggagtacggtcatcgaagacgctgcgacaagatcactgttccagcgccttcaagtcatccaactaccgagccaaggtctatgcctctgaccaaggtaagtctacgggctagcctcaatggaaaatgcgctagatgcttggccattggacatttcgccattgattgcagggatccactgagttgcctcaaatgctatggtccgtgcaacatggcatggtagcgtctatagatggccaaatgggccgtgcttgacgggccggcccgaagcacggcccgtttaatagtgccggatcgggcccgacacgacagccgtgccgtgcttgggccgctgtctcggcccgcagtgccggcccggcccggcacgattatatttttttattttataaatcatagtatatatatatttagattttatatttgctatttacaacaaatgcgctagagttctactggttaggttcttacatatagtgctttcagcttggaagaaggaggtcttggg

SEQ ID NO: 139047 - DNA, 495 bp, Zea Mays
attatattggggctgatggttttctccagcaacaagattattatatggatggatggatggatggtgttcaagcgccttgcctgtcctgtcttgccctttgtcccttcgtcgcctcgggcctcggcgtgctcgcattttccattacttcgtttcgattttgagccgggtatcatcttcacctgttgttttgttccgctgctttgcgcctccgtgctcccgcagatccctttgggccgtttcgcctccgcgcgacgctgggagcgagctgagtatggtttggctgggttgttcagtttgcggtgtattcttcctgcaattctagttttcgtgttgattcggtatcgtcctcgacttctcagcgtgtgggttgcaggattgggtccgatcggtgttgtgagagttcgtcatgatggcgtgtggcgaggagatacaggcaggttcactattattgttgatttcgggtttaaggatattctgaaaacaatggttcctaat

SEQ ID NO: 139048 - DNA, 872 bp, Zea Mays
atggcgtcgtgtggcgaggagatggaggcagttttcgtgttgattcggtatcgtcctcgacttctcagcgtgtgggttgcaggattgggtccgatcggtgttgtgagagttcgtcatgatggcgtgtggcgaggagatacaggcagtcgtcctgacttcagaagcagaagaaagggtccagcgctggttacggagatattagttgaagggttgaggttttcttatggttcattcattgtttttcgtttgatgtcgtcatattggtgtgaagatcgcaaccggacttactataagcttgtttgcacttcattggaaatgctgctggctggatctgcgggggcaacagagttttggaagttgattgaggtgttgactggaccggtgtatcaggaaaagatcgttgggatatacataccaaaattgcttttgtattggggcaacatagttttcgaagtagattgtggcattgactggattgatgccatagaccatagtaccgggagaagattgttaggatacatctacctagtcgtaaatcgctcttctattggtttatggtttcccttcgttagtaaatctgcagttttaggagacaccactagagttcgtcctcatagatacaaaaggacattgctggttatggagagatgcacacaagctgagatagaatttccaacaattggtgttgtctccagagcccatccttgttccactggccatttggttcgccttggatttgaaggttcattaagtatatccttgagccaaaatagaaaaaaaaaatcatagaagagctctttggtatccagagaaaaccctccgagtagtgtgcaactgtgcattaatgtgaagtttgataacttggactgaca

SEQ ID NO: 139049 - DNA, 845 bp, Zea Mays
atggcgtcgtgtggcgaggagatggaggcagttttcgtgttgattcggtatcgtcctcgacttctcagcgtgtgggttgcaggattgggtccgatcggtgttgtgagagttcgtcatgatggcgtgtggcgaggagatacaggcagtcgtcctgacttcagaagcagaagaaagggtccagcgctggttacggagatattagttgaagggttgaggttttcttatggttcattcattgtttttcgtttgatgtcgtcatattggtgtgaagatcgcaaccggacttactataagcttgtttgcacttcattggaaatgctgctggctggatctgcgggggcaacagagttttggaagttgattgaggtgttgactggaccggtgtatcaggaaaagatcgttgggatatacataccaaaattgcttttgtattggttcgtcttcagtttctgtgcgctgcaattctttgtttcttatattggggccggtggttttctccagcaagattatatggatggatggggttggaggcgtgtttgatctggcttgtgcttgtgcaatcagaagttaggaactgttcagagttccttgtttgttcactaaccatcctctctcctgccgttcttcgaaaattgacactataagcatgattacccttcattggaaatgctgtttgctggatctgcaggggcaacatagttttcgaagtagattgtggcattgactggattgatgccatagaccatagtaccgggagaagattgttaggatacatctacctagtcgtaaatcgctcttctattggtttatggtttatactcattttctgccggctacaattctta

SEQ ID NO: 139050 - DNA, 1771 bp, Zea Mays
caaatgtctccgggtgtggtaccatcagaatcagatagtgtcgtcggagcctgcacatcaggtggattcgagatcttgggtccattcttattttaatggctgatcttgcttgtggccttttgggtgttcttactttagaagcagaaggaagggtccttgctggttatggagagattagttgaatgttggaggtttgcttatggttcatggccatggttcattcctcgtttttcattttgatgacatcatattggtgtgaagatcgccactggacttgctataagcttgtttacccttcattggaaatgctgttggctggatctgcaggggcaacagagctttggaagtagattgaggcgttggctggactgatgcccatagtaccgggtgaagattgtcaggatatatctacccaaatcgctgttctattggttcatactcattttttgtccgctgcagttattaatttcttatattggggctggttgtccatcttattgggataagatcgttcaaatatatctacccaaatcgctcttctattggttcatactcatattttgtctgctgcaactattaatttcttatattggggctggtggctttttccagcagttcagttatatggatggatggatgaatgggttgtaggcgagtttggtcctgcttatgcttgtgcaatcaggagttcggaattgttcaagttccttgtgtttgttcacttacccatcctccctcatgctgttttccgaaaattggcattgtagctagattacacttcattggagatgctgcatgttggatctgcagggacaacagagttttggaagtagattggtgtgttgactggactggcattcatatatcgagagaagattgttcggacacgatcatgtggatggatggatggtgttcaagtgccttgcctctcctgtcttgcccttgccttgggccttggcgtgctcgcattttccgttacttccttttttatactctgtttcgattttgagccgggacattatcttcttcacctgttgatttgttctgttgctttgcgcctccgtgctctcgcagatccctttgggctgtttcacctccgcacgacaccaggagtgagccgagtttggtttggccgggttattcagtttattctttattatgcaattctagtttttgagtctattttgtagtcctcgacttcccaatgtgtgggttgcaggattgggtccgatcagtggagaattcatcatgatgacatgttgcgaggagatggaggcaggtcagtcttctgtcagatccggcggttcattgattttgtcgattggacatggattggtggtttcaggctcaaatgtctccgggtgtggtaccaccagaaccttcgatccattcttactttaacggcagagaagaaagggtccttgctggttacagggagaggtttgcttatggttcattccttgtttttggttttgatgttgtcatattggtgtgaagatcgccaccggacttactataagcttctttacccttcattggaaatgctgctggctggatcttcaggggcaaccgagttttggaagtagattgaggcattgattggaccggtatattgggagaagatcgtcgcgatatacatacctaaatcacttttgtattggttcatcttcagtttttgtccgctgcaattcttaatttcttatattggggctggtggttttttccagcaatattatatggatgaatggatgggttggaggcgagtttgatc

SEQ ID NO: 139051 - DNA, 1986 bp, Zea Mays
atattgcaactctgtggccactcatcagcaggcgattaaaagagacagcaaaccatgctggactacacattccgcagacatccaacacaattgagagctatacgacagacagcatagaaccgacatcctcatgttcatacacagaatgttatgtgtcacacaaaacactgtgacaaagaaagttcatacgcagggcagctctccagacacacgtggcagaaaacaaggttttctgaaggctggagctgggctacagaagaggaaagcgtgatcactgctccgccacatctgccagtttggttccaccatcagctttctcccccttccaccctagtccaggatgcgacggcgccgctttctcgccctcgaaaccacgggcatcccgcagcgaggcctcaaaatcggtggaatcaattgccgtcgggaggaggctgccaatgtcatccttcgctccgaacccgccagcccgtatgacgtcctccgtagagatggcagcttccatgttcacatgagctgctgcatggccattcaacggaccggtgttcgtgtttccatcgtctgaatctggaaacgtgttcaagggctcctggccttggctcggaacactgtttgtcactgcgtctgggttcttttgttgggcttgctgttcgttgctaaagctctttccatccatgcctgcaatgaattggtagatgtgaggttcctaggcaagacacacaggagcaaaacgcttacttttggaacacagaaatttcacagggatcagttaaatcactggaaaaatgaaggaaaaggaaaatttcccacgttccaaaggaatgtgaataaaggagcatccaactgctagcaatttccagcagctccctatcccactccctatctcagtccccatttcaaactccactctgtaaacagtgcatctacaacgcaaaacaatgttttgcacgctattgctggagttggcctaagtgacgttgtgtatacatcatattatcattgaatcctaggaggagtgccgtataaacaaaagaaactagctccttcaagaacaataaaactaaaaccctctccacagcaaggtcaaagtacacagttagataaccgctggctatccaatatatcgactggagtatggttttcattgtaaggagacagttccatttttttctcacgcgatctgaacattcaaccagttaaagtacaacaagaaattcctagcttattgtgaatcaaaactgtgataatcgtccactacacattgaggtgaaagtgaaactgaaaacaaacattgcccataaacttcaatcctagaaagctgaagagataaatcatttacagcgcattcaatactaaacctaaaaggagagaaatttccactcagattattaacgtgggtggtctgcagtctgcacctactgtagacaaattgtgggtcagtaccaatctataacaattcagcataaagccattgcaaccacaaagttcagtgaacttgtggctcagtcgggattcagcgcgaagttgttacagtctcgactagaacagtgttagtgtattacacacccaatgcactctcctactccaccaatcgccaagacgctgtaataacagaacagatttgccactatccgtccaaacaaacccaacctttccccttctaactttctaagcaacagacatcgagaaaacccccatggacccacccacctccctatctcgatttcccagcaaagctgcaaatcagcgcacgccggccgcgtccaggagtcttgatttgcaagagagggatactcaggcgaccaagcaagatacccgtccctagtccacacgaatcactagggcaagccacccgaagtacgcggagaacccaacatatagcaaacgcatgatcgcacctgccgggttgatgagcaggctcaggaggaagattcaggaacttacctctgctccgctgcgatctacgcttcgactatggaatcgtttctc

SEQ ID NO: 139052 - DNA, 1793 bp, Zea Mays
atggcgtccgcggccgcccctccaacctccctctccctcgcggcccgcgcggccaccagggcagccgccgccgccgccgccccgctgcgcaggggaggcctcgccacggcgtgccagccggcacggtctctggctttcgcggcgggcgacgcgcggctcgcggtccacgtcgcgtcgcgatgccggcaggcgttctccgggcgtggcacgcgggccatggccaccatggcgaagaagagcgtaggggaactcacggaggccgacctcgaggggaagcgcgtcttcgtgcgcgccgacctcaacgtgccgctcgacgagaaccagaacatcaccgacgacacccgcatccgggccgccatccccaccatccagtacatcctcagcaagggcgccaaggtcatcctctcaagccacttgggtcgccctaagggttttacacccaagtttagcttagctccccttgtaggacggttgtctgagcttcttggcattcaggtgcaaaaagccgacgatgttattggccctgaagttgagaagctggtggcggccttgcccaacggtggggttctgctgcttgagaacgtaagattctacaaggaagaggagaagaatgacccagagtttgcacagaagcttgcctccctagcagatctttatgttaacgatgcatttggaacagcccacagggcgcatgcatcgaccgagggagttaccaagtttttgcagccttctgttgcagggttccttctgcagaaggaactcgactaccttgtcggagctgtttcaagccctaaacgcccttttgctgccatcgtgggtggttcaaaggtgtcatccaagatcggggttattgagtccctgttggagaagtgtgatatccttctcttgggtggtggtatgatcttcacgttttacaaggcacaaggtctccctgttggtgcttcattggtcgaggaagacaaactcgagcttgcaacgtctctacttgcaaaggctaaggaaaagggtgtctcccttatgctgccaaccgatgttgtcattgctgacaagtttgcccctgatgctaacagccagattgttccagcatctgcaattcctgatggttggatgggcctggatattggcccagattctgtcgcttcattcaacgcagccctggatacaaccaagacggtcatctggaacgggcccatgggtgtcttcgaatttgacaagttcgctgtaggaaccgaggctgtggcaaagaagctggcagaactcagcggcaagggcgtcacaactatcatcggaggcggagactccgtcgccgccgtcgagaaggtgggagttgctgacgttatgagccacatttccacgggaggtggcgctagcctggaattgttggaaggaaaggagcttccgggagttgttgcgttgaatgaagccgccactgtgaccagaagcaaactctagcgtgcgctgatgccccgtgggaagctagatgtcacgttacggaggtctgctaccgaaaatttctggaccttggcattgtaaaatttctctcttgtctcaggcactagctggaaaattttcgctttagttcctctatttgagctaatggaaatcgccgttgatgccctcttcgccgcccggacgagtggtcttcatcgtgcccacaatcgctgtctcgactccccccgatcgccatctaataagcaggacgctgtgctgagctgccggtctctgttgtcaagaacctgtaaccatttaattgcaagggaaaataacagaggatcaattccgatgctttgcag

SEQ ID NO: 139053 - DNA, 1695 bp, Zea Mays
atggcgtccgcggccgcccctccaacctccctctccctcgcggcccgcgcggccaccagggcagccgccgccgccgccgccccgctgcgcaggggaggcctcgccacggcgtgccagccggcacggtctctggctttcgcggcgggcgacgcgcggctcgcggtccacgtcgcgtcgcgatgccggcaggcgttctccgggcgtggcacgcgggccatggccaccatggcgaagaagagcgtaggggaactcacggaggccgacctcgaggggaagcgcgtcttcgtgcgcgccgacctcaacgtgccgctcgacgagaaccagaacatcaccgacgacacccgcatccgggccgccatccccaccatccagtacatcctcagcaagggcgccaaggtcatcctctcaagccacttgggtcgccctaagggttttacacccaagtttagcttagctccccttgtaggacggttgtctgagcttcttggcattcaggtgcaaaaagccgacgatgttattggccctgaagttgagaagctggtggcggccttgcccaacggtggggttctgctgcttgagaacgtaagattctacaaggaagaggagaagaatgacccagagtttgcacagaagcttgcctccctagcagatctttatgttaacgatgcatttggaacagcccacagggcgcatgcatcgaccgagggagttaccaagtttttgcagccttctgttgcagggttccttctgcagaaggaactcgactaccttgtcggagctgtttcaagccctaaacgcccttttgctgccatcgtgggtggttcaaaggtgtcatccaagatcggggttattgagtccctgttggagaagtgtgatatccttctcttgggtggtggtatgatcttcacgttttacaaggcacaaggtctccctgttggtgcttcattggtcgaggaagacaaactcgagcttgcaacgtctctacttgcaaaggctaaggaaaagggtgtctcccttatgctgccaaccgatgttgtcattgctgacaagtttgcccctgatgctaacagccagattgttccagcatctgcaattcctgatggttggatgggcctggatattggcccagattctgtcgcttcattcaacgcagccctggatacaaccaagacggtcatctggaacgggcccatgggtgtcttcgaatttgacaagttcgctgtaggaaccgaggctgtggcaaagaagctggcagaactcagcggcaagggcgtcacaactatcatcggaggcggagactccgtcgccgccgtcgagaaggtgggagttgctgacgttatgagccacatttccacgggaggtggcgctagcctggaattgttggaaggaaaggagcttccgggagttgttgcgttgaatgaagccgccactgtgaccgtatgaagcatgctttcattttgtttcgtcttcgtcttcacgtgccgttgtatacttgctacattctcgcttgcacttgcacctcctcagccgctcgcccgaaatgtaagagaccaatgttttatagagctaatggaaatcgtttgaacaacgacgaccctaatagtatgtgatttaccgagtgatctttcctcggtaacgtaactagtgatataaaaaacattcaaaggcaatcttggctattcactttgtgcacca

SEQ ID NO: 139054 - DNA, 865 bp, Zea Mays
aataacccattgttccatcaggcaaggccaccttgcgaggcacccatgacctctgccaaagaaaatgttccggtggcgccccaaacgctgcctcgacaaaacagtagcagcggcagcgcgcatcctctgcctccgctgcggcccaggatggccaacggcgccactgagccgccggtaagcggcgtcctcaagtgcacgtgtttccgcctgcccagccgcaccaagaagcctctgccgccgtctccggcgccgaagctcagcagcagagccagccgcaggagcgcagtggctccggacttgtcggcaacgacgacggcgtcccagtcccagcgggtcactttccgggcgtcggcgcctctctccacgtggtggccctcgtcaccgtcagccgtctctgctggtgccggcgccaccgccactccagctcctggtggcagcggcgggatcgccgtcgcgccgaggagggcgtcgtcggcgtccgtggcaccgactatgaaagccggtgctgggagcatgtcgtcctcgtccttctcgcactggcgctgccggtcgctgtcgtcgtcccgggtcatgccgcacggcggccgcgcgtccttctctttccccgtgtcgccggcgtccgcgtcgtccagctgcgtgagcacgccaaagataccgcaagggtggcagcacaagtagctggcgttcgttccttcgatcggcgcctcaagggtggcagcacaagggtggcaccatgctccgtgtgtttcgtgcgtacgctgtatttaacactgggtaattcatcagtctgtcttaaaaaaacgagatgatgtgcgtcgtgagttttctttccatacagataatatatatgtaccgctgtcatgaa

SEQ ID NO: 139055 - DNA, 1368 bp, Zea Mays
cttccctctcatcctctcgacctcgcttcctccctcccatcgtgccctgccttttcctcacgacctcgccgccacgctcgcgtctcgccgctgattgcggtcccccatggagtcgttgttccatcgtcttcctgtatttgtgctgctgatatgtgtaacttgtgtttctccaggtgaaggcggtcgagcacgcgaccgagatggaggcgacggtggctgccgcggaggccgaggaggaggaggctgctgctgcggcttcgacgccgcagcggtctgggaggaaacggccccgcgcgattgggagtgggcgcatagcactcgcctcgtctcgctgtcggctgccgctggtgatcctgctccctgtggcattggccctagccagcaggcaggcagtcggccagggacggatggacggagacgacggatggaagccgcagccactagccagccacaccgcagaccgcgcatgcaggagaaagaagcggtgtttgcatggactgggattgccgacttgactgcggattgacggggacaggtgggagccagaaccgcccgaggaccctcttctcctcggccaagtgacccacaccgcaactggaaccctcttctcctcatccgacgacagtggtggccactgctccggccaggcatagcataggcagcctgtagcttcttctacgcctagccatggcctggcaacctgctactcaagagctcctcctggttacacaagccaaaaaaggtatcccatacccacgctactgcctacacctacgaaacctgcttatcctgctgcaatttctgcttaattcgtggctaaattcaaagaatggtagtgtgaagtggaatcaaaatgggaactgggtgcagactgcctcaaaggatcagattattaaggtacgtggcttgtgctttttatttttctatcttcttcaaagaattttcggattacagtgtgcactctataaccaggattctatactatctatggagatggcccaatccatccttatgatcaaatgatcgataagtttgttttctgatgccagtaaattattgattttggtccatttgctaattcattttgcaactgtatgacattagatccatgaaagagcagcaatccttctgaggggacgtcgctggttagatagttattacagtatcaagatttttatatgttcctttacatattttaaggttcacaaattgatacaggttttatatgtagcagttcatttgttcactgtaaccatacatgtaaaccataagcaaatgtaacataggagattgttatataaagagacttttgcagccactttgatgttttgttttatgcttctttttgtgaaaaattattgtggtgct

SEQ ID NO: 139056 - DNA, 1275 bp, Zea Mays
cttccctctcatcctctcgacctcgcttcctccctcccatcgtgccctgccttttcctcacgacctcgccgccacgctcgcgtctcgccgctgattgcggtcccccatggagtcgttgttccatcgtcttcctgtatttgtgctgctgatatgtgtaacttgtgtttctccaggtgaaggcggtcgagcacgcgaccgagatggaggcgacggtggctgccgcggaggccgaggaggaggaggctgctgctgcggcttcgacgccgcagcggtctgggaggaaacggccccgcgcgattgggagtgggcgcatagcactcgcctcgtctcgctgtcggctgccgctggtgatcctgctccctgtggcattggccctagccagcaggcaggcagtcggccagggacggatggacggagacgacggatggaagccgcagccactagccagccacaccgcagaccgcgcatgcaggagaaagaagcggtgtttgcatggactgggattgccgacttgactgcggattgacggggacaggtgggagccagaaccgcccgaggaccctcttctcctcggccaagtgacccacaccgcaactggaaccctcttctcctcatccgacgacagtggtggccactgctccggccaggcatagcataggcagcctgtagcttcttctacgcctagccatggcctggcaacctgctactcaagagctcctcctggttacacaagccaaaaaaggtatcccatacccacgctactgcctacacctacgaaacctgcttatcctgctgcaatttctgcttaattcgtggctaaattcaaagaatggtagtgtgaagtggaatcaaaatgggaactgggtgcagactgcctcaaaggatcagattattaaggattctatactatctatggagatggcccaatccatccttatgatcaaatgatcgataagtttgttttctgatgccagtaaattattgattttggtccatttgctaattcattttgcaactgtatgacattagatccatgaaagagcagcaatccttctgaggggacgtcgctggttagatagttattacagtatcaagatttttatatgttcctttacatattttaaggttcacaaattgatacaggttttatatgtagcagttcatttgttcactgtaaccatacatgtaaaccataagcaaatgtaacataggagattgttatataaagagacttttgcagccactttgatgttttgttttatgcttctttttgtg

SEQ ID NO: 139057 - DNA, 1132 bp, Zea Mays
gcctgttgtccacttccctctcatcctctcgacctcgcttcctccctcccatcgtgccctgccttttcctcacgacctcgccgccacgctcgcgtctcgccgctgattgcggtcccccatggagtcgttgttccatcgtcttcctgtatttgtgctgctgatatgtgtaacttgtgtttctccaggtgaaggcggtcgagcacgcgaccgagatggaggcgacggtggctgccgcggaggccgaggaggaggaggctgctgctgcggcttcgacgccgcagcggtctgggaggaaacggccccgcgcgattgggagtgggcggtaccgctcggtctccaggttctcccctgctttcctcatcctgctgccgctttacgtttttgcttttaatcgctgtgacagcatagcactcgcctcgtctcgctgtcggctgccgctggtgatcctgctccctgtggcattggccctagccagcaggcaggcagtcggccagggacggatggacggagacgacggatggaagccgcagccactagccagccacaccgcagaccgcgcatgcaggagaaagaagcggtgtttgcatggactgggattgccgacttgactgcggattgacggggacaggtgggagccagaaccgcccgaggaccctcttctcctcggccaagtgacccacaccgcaactggaaccctcttctcctcatccgacgacagtggtggccactgctccggccaggcatagcataggcagcctgtagcttcttctacgcctagccatggcctggcaacctgctactcaagagctcctcctggttacacaagccaaaaaaggtatcccatacccacgctactgcctacacctacgaaacctgcttatcctgctgcaatttctgcttaattcgtggctaaattcaaagaatggtagtgtgaagtggaatcaaaatgggaactgggtgcagactgcctcaaaggatcagattattaaggtacgtggcttgtgctttttatttttctatcttcttcaaagaattttcggattacagtgtgcactctataaccaggattctatactatctatggagatggcccaatccatccttatgatcaaatgatcgataagtttgtttt

SEQ ID NO: 139058 - DNA, 1816 bp, Zea Mays
cggcatcgctcgtccggcccacacgtgaaccgcgcgcagccgaatcgtggcccggcacgtcgcctcccgctcccgggaacgcggcggcgtccctacccgccgctggctgggcagtcatgtcttgggaccagcctccagcaggccccatccgtcatgcacgagtgggttaccttggcacctgccgccgaaggggacgtgcggtatccctttggacagtcgtgcggccgcgcgtgccgcagtccgcaggctcggtacggcagggcggtgggggtgacagacaggacgattggacgaggcgtccatgctctggcagtggcagccagccattgcggtagggctggcgtcacggcgccagtcgcgcgtcgcgccggacaagaccagtcgcacactgtccacaacgaggacccgcaaggcgtcaaatcgcgcggcggctggttcatgacgccgtgagcccgcgcccacgcccggtcagcgacagcctcaaagccttgccccagaaacctacctccccgtttcacgaggcgcggccattagtaaaagtccaccgccatcgtgcgtgaggggaggagggggaggtgctcaggtgaggcgaccaggccagcggtataaagagcgagttactactgctcccaccactgagccgttgccgttgccgttgccgagaccaacgaaagaggtgccccctgcccgccggcccggccaacctcgcgagagcgtgcgtggggatgcagcagatggagtgggacacgagaggaggaggaggaggaggaggaggaggaggaggagggcacggtggcgctgtcggggacggtgggccgagaggaggaggcctcacagtcggaggcgttgctgtcggggtagcggaccagcagcgcgtggaggcgcactaccgcggcgtccggaagcggccgtggggccggtacgcggcggagatccgcgacccctggaggaagacgcgcgtgtggctgggcacctacgacacgcccgtcgatgcggccatggcatacgaccgcgccgccgtcgcgctgcgcggcgccaaggccaggaccaacttcgccgccgggcgcggctcccgcgccactccccccgtccaggctcgcccgctcccgtaccccgcgctggcgccgggccacttcggcgtgctcgacggcgcccgctcgtcgccctggcacgtcgtctacctcccaccgcctaggctgcaccacgccgtggcgccgccgatgcctctcgtggcagtggcaggggacgccgcctcgtcgctgccgtccacggcgctggagctccggacagggcccaaggccctcccgttcgacctcaacgagccgccgtcgctgctgttgggctcgcggtctccataatggacgtggagacggaggtgatggtaggtcagtagtatcgagtagggatcatcgaccattgaactaggtggtaggattgactagtgagggtaatcaactggtgggagtggagaccatcgctccggttgtatatatctaccagaacctattttaggagatcttgtctttctcgtattcgttcatgttcttgttcccatctccttttccacaagttcgtttggtgtctcgtcggcggcgcgctttttgctgggtattttgtttgctgtggggcctttttttttccttttccttcgaaacatgtggctacttgagacgaagatttgcctttgtcgtcttcgttcctattcttaaatagtcaaattcaccgtctcctttttccaaatggtttggtgtctcgtcggcagtgcgctttttgctgggtgtttcgtttggaatttcagttttgagaataaaaaacc

SEQ ID NO: 139059 - DNA, 275 bp, Zea Mays
cgggattccgttgcgctgcagctacctacctacacgcagtgctccttctggcaccaccccccaaacgttacagaacaacgaattcaattgctgtcatgaagaaataagtatacgtactgacaaatattactgcgcggctagaaaattatatttctttctcgaaggaacggagtctggaggagcaattcgagctgtggtctgttgcgacgctaagctctcgagcctgcatgctgaggcacggggcctgcccatcgggctactcgagttgggggttg

SEQ ID NO: 139060 - DNA, 1858 bp, Zea Mays
cgcttgccgccgtagcgtaacgtgccgtgtcgtagtcacgtctgtcccacctggcgttttactttgtcgtccagcccggcgcgacgcccctctacatttgtgatgactacgggctgagcggtgcggcgggcggctttatctgctggcgcgcgccgacgatgcggttggagagatacgatcccgtgtgacgacgacgcgaggcgcggggggacaggaggtgccgtgccgcgccgagcggaaagagagagagagaggtggcgtccagtcagtcagtccagcagccagcgcttaccctcggcgggtggtccacgtgcctgtgcgcgcgcacgcgggcggcgacgggggatggttggcgccgcgcagacagcggctcggtacgcacggatcgtgatgcgtcctcgagcggggccccacgccgcccgtgacgtgctccctcccacaacaggccaggccctacgcgcccgcggtgggcccacccagcggcggctttgatgccttttgtttttgtttacggaatgggatcatgctcctttttttattaccctgctctcaagccctacgagcgcaatgccgcctagccgcccacgccttggacgtgaagcatttttttttcttgatcgaagccgccggtcccctctccccaggttgagcaattttccactccaccgtgggggagcggaagcgaaagcagtcctcctgccgaatcgtaacgcagccacgctaaaagacgagggacggcggcggcgcggtcagtcaaaccgctccctggcagcgccttgccgctccgcaaggcccggcccgctctccccattgttgccgccctttttaaccaccagtacaccacctcctcctcccaccgctattaaagtcccgtccgcggctccgccctcctctgtgtcttccttccacctgaaaacccaacccacacgctcgcgcctccgcgaagaaaaacaccgaggcccatggcgccgagaacgtcagagagagcgatgacatcggcggccgcggggctcgcgcgtggcgccggcccgcactacagaggcgtcaggaagcggccgtggggccggtacgccgcggagatccgcgacccggccaagaagagccgcgtgtggctcggcacgttcgacacgcccgaggacgccgcgcgggcctacgacgccgccgcgcgcgagtaccgcggcgccaaggccaagaccaacttctccttccctgcgtgcctgccgctcgccgccgcggacgtggccggcgcctgccggagcggcaacagcagcagcaccaccaccaccaccaccgtcgactccttcggcggcgacgtgcaggcgccgcccatgcaggccatgccgctcccaccgtccttctgcgccaccggcgccgtacgcttccctttcagcagctaccccgtgacgcacccgtattacttcttcgggcaggcggcagcagggtgccatatgctgaagctgccaccgacgacggtgactgtggctcagagcgactcagactcctcgtcggtcgaggatctgtcgccgtcgccgtcgccgtcgccgccggccgccgtgtcagcgacgagatccgccacgtttgatctcgacctcaactgcccaccgccggccgaggcggaggcatagtcgcggagttttgctgaatgactgcctgtagtttcttcctttctttcgtcttttatccgtagagagaatcggtaggcttaggacccctttgtattcacacggtgtcacggccacacctccgaactctggtactctgatatttagagtgaaactacgaacacgtggtttaaatggttcaaagttaactctatatggtttatagtcatgagaaacggctaaaaaattctgcagct

SEQ ID NO: 139061 - DNA, 1274 bp, Zea Mays
tagccgatgaggtcttaagatgcaactgaagcaaaagaggctactacatcaaggagcagttcaaccactcatttgatggcatagtccatttgatgaggtcttagatgcaactgaacccactccaaggggtttgctcaggaacattgacttgaatttagatccaactgatgaagaagatgagattacagtgccaccccaagcccagtcgatccagcgactagttccgttgcagccactgcgggaccatctgttgcactttctgggtgcttgggaactgcctgacatgaacaatatggagatgggccctgtccagtttgctttgtaaaaaaaatacagattggagagaatgggtattatgacaatcaagactagctctgcccttatagctttcagagtggataagtaggatagcaggacagttgtaggttcatcttaactctttagagattctcatgtatcatgtgtatcatagccgccaaagctgcagatgcagcttataatgtgccagaggtttaaggttggctggctagttgactgtaacgttccgaagctagattcgctcaacacgtagtgctttggcatgtagtaccagttgtacttgtacactcctgtctccagttgctctccagtttaatgttaattatatgcttatgcttcattggatagttgaggaagatcttgctggatgcatgtatggcaaataaaaagcaagaaagagtttcagattacttatcacagctcattccatgacaggagtcaatattttcatatatgatagacctgcgaaaagattgcgagccttcagggataacgcgtcatcatactgggagatgatacctttatttcctgaaacatggttatccaagcacaaggaaaaagttccagcagtgattgcgactcgccagctcaaggtgactgcggaatccaagatgggatcgatgcttctacagctgcttgaagttgttccacaccgcccccaccttggccttgcacagcttctttccgctgccggcatccacctcgacagtaaaatgcatggtcctggcatcacgttctgcacatatattatacatgggatgcatcagtggtggctccaacgatatcaactaggtttatgcagagtgacatgtctttcggtcttgctgttgtgctccgtgaccgtgactgaagcacgcgagctcaatggcctcgaggtcgctctcacacccagtgggtgcgttttggacgtcgtccaccatcccacaggccgttctcgtctcggccatggctgctgg

SEQ ID NO: 139062 - DNA, 101 bp, Zea Mays
gagcgaagaatttctttcagacaaaacatatgctcaataggaagggataaaaccctaagatgggtagccttactaatgatgtattggagaagctcagttgc

SEQ ID NO: 139063 - DNA, 2103 bp, Zea Mays
atggagcagaggttgggggcaacgtatcagtggtggtcatggagtcacagtaagagctgtgaatcggtggagcggaaggggcgggagtggctggatgaggcaggacttgcctctggattacagcttgtattggatatgttggtgactgtgggagaacctgagcttggttcaagccgcggacctgtgtcatggggcgtggcaggtttttgtggagtgactgttgctgagaagagaccaatgatgcaatctcgtgatgttgataaatatttgaacaaagctgacaacattaaccatgtgctcatgaactctggcgacatttctaaaattggtggtcactgcctgcatggtacacatggtttggggactcggctagattctgatgctcagagctcatcccctggagaaaatatgaacaacaaaatcagaaggcccatcgaaatatgtacctttgatgctcaaggtcggtgcaagaaaggaaagagttgcatctctcttcatgaaagggagggatttggttctgcaaagactggtctgctcgcaccagctggttctggaaatcatagaggtatgagcttcctaactagggcaatctgtgagcaacaacttgctataacagagccaacttcttattgctccctgctgtgcataggttctgaaggaggttctcaagtacaacatatatctgacttgaaagtgcatcagttcaaggattcagagggtttgtcaaaagatgaaatgtgtcggaatcttatttatgcatttggcaaagataatcagatgtcggtacatcttgctggtaaacacagctctcccattcctggggtttcacaaaggatgcccgtcagcattggtcattcattggctcagaatccattagttcatgagaagaacaacaaacgtttcatgggacaccatattgatgtggctgctgaaaactatttggatgctggaggtacctatccaagattagatggaggtatttttcagtttgacatagacaaggaaagcagtgttagtgattcccatgtctcaagaacttacctttcagattatccatataaatcatttggcttgtctatttcatctgatcctctccagctcagtgagaagctgtcagcatatggtggagtgacaaatactattcctaacatacatcagaaagaacatcactcatgccatgcttcatacagctcacatagcttaacaggatccagaaatccttgctttgctacctctgaacatactttcggtagcccatctcttctagcaacttctcatctgggaatacagtcccatcatctgttcacatctgatattgagaaggctgatctccatagatgccttgatgttggaaagggctatggtacttctagttctggacccgcattgcttgtgagcagtaaacctgaaccttctatgacgccagttgggccccactctccaattaagaatgaggtctgggaaacatcagtgccttttgtaccttcttttagttttcctgatagcacaacagcttcagaaagtcaatatgatccatttgttgactatgttgaacctcctaaagttgggaatacaaataatctcaagccctccactatatcctgcaacattacaagtcagcatacagatcagtacgcagttactgataaatccttgaattgcaatgacaaattgaccaggaatataactgccaaaggatcaaatgaacctgcttactttattgctcctgatagaggatgcagctctagcctggatgatactatcaaggtgaaagcttgtgacagaaaaaaggatgcagttgattacaatgagaaaacaagggatttccgttttcatttggcagaacatataaaggagttggtcaaaccaatatggaaaaaaggtaatctgagtaaagatgctcataaactggtagtgagaaaatctgtcgagaaggttgtggactccattgagccaaatcaagtaccaactactgaagagttgattacgaagtacatagccacatgtggaccaaagatagaaaaacttgtgaaggcatatgttgataggcacagtacatgtcatccaaccatcaaatacagcagctctgagatgggagcttga

SEQ ID NO: 139064 - DNA, 520 bp, Zea Mays
tcgcgctgctcccggtacgcgcttagaataaggtgccaggtttttttcgattcttcccgccggagacgaggcaccatcagggtatagatggtgtacgtcaatgtcctttgccgagtccaccctgattagcaaatggctacgattctggtattgcgatgtgtctagggcctgccctggcatgctgacctgagctgggtagctgatccatttatcgttagactgtcgcgatctatggtttagggtaaagttgtacagctgatcaatcaatagctagatcgattgagccaatgtctgcacctgacgtttgtcggttttactagttgccataatggtggagctagaagttgcttttgttatctagagaataggcttgatagtagcctgtgagtgatgtattatgcaatgaagcaatgtggcatgtttgaggttcgtagttatcagtttccagttattatgtggattatgctacatttgtcgtcatgttgattttgtctcgttagtctatgtgaagtgatgacat

SEQ ID NO: 139065 - DNA, 356 bp, Zea Mays
ccaacattgatattactaatgcagaaaacgacgatatcgacgaagaaaacatagagcatgatgcaatacttgacaaccagggaaaaggtctaacagctacaattgaatctccaccaaaaaggttcaagcatggatctctgcgcatcaaagaaaagccggacaccagatcttccaagaactgaagattttctcggattattagcagcgttttaggttgtagaatgctctacgtgtaattatatataactgcttaactcttctgaaaatatttcatgtaaatataacaaggtaacttcaaatattgcaacaaatatattaccttctactagtgtttacttaactatattttattttgt

SEQ ID NO: 139066 - DNA, 2612 bp, Zea Mays
atccaaacagctttcaaggagaagcgtacagtccctgctatacagctctcgtcggggtcttctcccccttcggcccttcccccctccctgcgcgccatggaggcccaggagatcgccgctgcagcgcgccacttctgcgccatggttcgaatcgtcggtccggaccccaaggccgtgaagatgcgccgccacgcctttcattttcaccattcggggtcgaccacgctctcggcgtcggctctgctcctgccgcggggcgctttagcggagccgccgctacttctcgaccatatctgctcggcccacgggcacgcggcaggagacgtcgcgctcacggctgcttccctcgtcgagccgttcctggtcgcggagcagcgcaataactccggcgaggagcttcagccgaggttggttccggagacgcgtcttgatgtgtttgttgagtatgagttggggaatgctcaagatgggaagtctggacctccgcggtggcttccagctcgactgcttgccatggttgatgtcccaacagctgctgtttctgctttatccttattgagacatgacgattcattcatcagaaggccaacttgggatgtaggctggtcattggctgatgctaatcagaaacaggttgaaaatgacagcagatcttccctcgagtctaacaggaataattcatctttggagtcagtagactcattgatgttggccaagtctgccacaagaattgctattctaggaatttcaacctccaatttaaatgatgcaagacgtatcaatgtttcagtgatgcaacaacgaggggaccctttgcttatagtaggatctccatttggcctcatgtcacccttccatttcttcaacagtgtatcagttggtgctgttgcaaattgccttcctccatgcactgcaaggagctcattactgatggctgacatgcactgtctccctggcatggaaggcgctccagtgtttgaccaaaattcttgcctcgtggggctgctgatgaacccattaacacagaaaggcagcaatatagaagtccagctcgtgattacatgggatgcaatatgcacggaatggaacagcaaaaaactggaggaaattgaacgacccccaagaaaactacctaatgacaaaaatacagatagtaaatctatggaattacggcatgtatataactatgtgagggttttctcttctacggacaacaaaactaatcagcattgcatatcaccccgttcgctcagagaggctatatctgcagttgttcttgtcacggttggtgatacgtcttgggcttcaggtattgttctgaacaaaaggggtttagttctgacaaatgctcatctcttggaaccttggagatttggaagaacttcaccttcagatttacaagcctcgttcgctggagaacatctcaatgctggagaaaacaaatcattgcaaccacaacaaggcaaaatttccaatgaagatgctgtcaagcataaggtttcgtcatttaacttgggtttcaaaagagggaagagaatatctgttcgtttggaccatgaagagagacagatatggtgcaatgctagtgtggttttcatctcaaagggtccacttgatgttgcattgcttcaaatagaaaaggttccagttgaattaaatacaatcagaccagaatttgtttgtccaacagcagggtcgcctgtttatgttgttgggcatggcctttttggaccccgatcaggcctacactcttctctatactcgggggttgtgtcaaaggttgtccaaatcccagcaaatcaactttctcatctggcccgtgctgaggctgacaatatggacataccagtaatgcttcagacaacagcagcagttcatccaggagccagtggcggcgttcttgttaatacacatgggctaatggttgggataataacaagtaatgctaagcatggtggtggaagcacaatacctcatctgaatttcagcatcccctgcaaattactggttgcagtcttcgagtattcagcaaatggaaacctcgtggttttggagcagttggacaaaccaaatgaagtgctctcatcagtttgggcattggcaccatcatcatccccatttgtcaggagctccccagaaaaaggcaaagaggaaaaggtcttggagttctctaagtttcttagtgacaagcaacaagctctgaaatctaacgtagatctgaaggaactatttaggtacaagactcccagcaaaatatagagtgcgtccactagaattcatacaaggaaaatgtttgttcccagaattttgtatgagacgtttgatcccagaaatccccagtacaaaatgagttatcagagcacagtgccttttttttacagatggttaaggcataagcatcttttcttcgagtgtcaggtagcgcgggctatatggcatactgttcaaatcgctacaatttttaccctccctctagtgtcgtgaatatgtttaggtcatagctagggggattggtaaagatttaaaattgttagctcttttaggggcagcagcagtttgttgggccatttgacattgcgtttcaaagaaaatatgtgacaaactctttacag

SEQ ID NO: 139067 - DNA, 2605 bp, Zea Mays
atccaaacagctttcaaggagaagcgtacagtccctgctatacagctctcgtcggggtcttctcccccttcggcccttcccccctccctgcgcgccatggaggcccaggagatcgccgctgcagcgcgccacttctgcgccatggttcgaatcgtcggtccggaccccaaggccgtgaagatgcgccgccacgcctttcattttcaccattcggggtcgaccacgctctcggcgtcggctctgctcctgccgcggggcgctttagcggagccgccgctacttctcgaccatatctgctcggcccacgggcacgcggcaggagacgtcgcgctcacggctgcttccctcgtcgagccgttcctggtcgcggagcagcgcaataactccggcgaggagcttcagccgaggttggttccggagacgcgtcttgatgtgtttgttgagtatgagttggggaatgctcaagatgggaagtctggacctccgcggtggcttccagctcgactgcttgccatggttgatgtcccaacagctgctgtttctgctttatccttattgagacatgacgattcattcatcagaaggccaacttgggatgtaggctggtcattggctgatgctaatcagaaacaggtctctttgttcatcgaatcaaaatcttccctcgagtctaacaggaataattcatctttggagtcagtagactcattgatgttggccaagtctgccacaagaattgctattctaggaatttcaacctccaatttaaatgatgcaagacgtatcaatgtttcagtgatgcaacaacgaggggaccctttgcttatagtaggatctccatttggcctcatgtcacccttccatttcttcaacagtgtatcagttggtgctgttgcaaattgccttcctccatgcactgcaaggagctcattactgatggctgacatgcactgtctccctggcatggaaggcgctccagtgtttgaccaaaattcttgcctcgtggggctgctgatgaacccattaacacagaaaggcagcaatatagaagtccagctcgtgattacatgggatgcaatatgcacggaatggaacagcaaaaaactggaggaaattgaacgacccccaagaaaactacctaatgacaaaaatacagatagtaaatctatggaattacggcatgtatataactatgtgagggttttctcttctacggacaacaaaactaatcagcattgcatatcaccccgttcgctcagagaggctatatctgcagttgttcttgtcacggttggtgatacgtcttgggcttcaggtattgttctgaacaaaaggggtttagttctgacaaatgctcatctcttggaaccttggagatttggaagaacttcaccttcagatttacaagcctcgttcgctggagaacatctcaatgctggagaaaacaaatcattgcaaccacaacaaggcaaaatttccaatgaagatgctgtcaagcataaggtttcgtcatttaacttgggtttcaaaagagggaagagaatatctgttcgtttggaccatgaagagagacagatatggtgcaatgctagtgtggttttcatctcaaagggtccacttgatgttgcattgcttcaaatagaaaaggttccagttgaattaaatacaatcagaccagaatttgtttgtccaacagcagggtcgcctgtttatgttgttgggcatggcctttttggaccccgatcaggcctacactcttctctatactcgggggttgtgtcaaaggttgtccaaatcccagcaaatcaactttctcatctggcccgtgctgaggctgacaatatggacataccagtaatgcttcagacaacagcagcagttcatccaggagccagtggcggcgttcttgttaatacacatgggctaatggttgggataataacaagtaatgctaagcatggtggtggaagcacaatacctcatctgaatttcagcatcccctgcaaattactggttgcagtcttcgagtattcagcaaatggaaacctcgtggttttggagcagttggacaaaccaaatgaagtgctctcatcagtttgggcattggcaccatcatcatccccatttgtcaggagctccccagaaaaaggcaaagaggaaaaggtcttggagttctctaagtttcttagtgacaagcaacaagctctgaaatctaacgtagatctgaaggaactatttaggtacaagactcccagcaaaatatagagtgcgtccactagaattcatacaaggaaaatgtttgttcccagaattttgtatgagacgtttgatcccagaaatccccagtacaaaatgagttatcagagcacagtgccttttttttacagatggttaaggcataagcatcttttcttcgagtgtcaggtagcgcgggctatatggcatactgttcaaatcgctacaatttttaccctccctctagtgtcgtgaatatgtttaggtcatagctagggggattggtaaagatttaaaattgttagctcttttaggggcagcagcagtttgttgggccatttgacattgcgtttcaaagaaaatatgtgac

SEQ ID NO: 139068 - DNA, 2077 bp, Zea Mays
atccttattacgagtagaaggacaagtctggtgcagtggtgagacctgcctcactgagtcgccaggttgtggttcgaagcagcctcttgcatttgcagggaaagtcttgctttggttgatctcttctgcagaccccactcacgtgggagccttcggcactgggtctgccttttttatttagtgatctgcatatgtacactgcactcagcagaagaaagtacacttctgtcttgtagtaacataacatttgtaggttttggttagtcttcacccacgcatacatgatcaaccagcagcctggtttcttctttaggttgatgtcccaacagctgctgtttctgctttatccttattgagacatgacgattcattcatcagaaggccaacttgggatgtaggctggtcattggctgatgctaatcagaaacaggtctctttgttcatcgaatcaaaatcttccctcgagtctaacaggaataattcatctttggagtcagtagactcattgatgttggccaagtctgccacaagaattgctattctaggaatttcaacctccaatttaaatgatgcaagacgtatcaatgtttcagtgatgcaacaacgaggggaccctttgcttatagtaggatctccatttggcctcatgtcacccttccatttcttcaacagtgtatcagttggtgctgttgcaaattgccttcctccatgcactgcaaggagctcattactgatggctgacatgcactgtctccctggcatggaaggcgctccagtgtttgaccaaaattcttgcctcgtggggctgctgatgaacccattaacacagaaaggcagcaatatagaagtccagctcgtgattacatgggatgcaatatgcacggaatggaacagcaaaaaactggaggaaattgaacgacccccaagaaaactacctaatgacaaaaatacagatagtaaatctatggaattacggcatgtatataactatgtgagggttttctcttctacggacaacaaaactaatcagcattgcatatcaccccgttcgctcagagaggctatatctgcagttgttcttgtcacggttggtgatacgtcttgggcttcaggtattgttctgaacaaaaggggtttagttctgacaaatgctcatctcttggaaccttggagatttggaagaacttcaccttcagatttacaagcctcgttcgctggagaacatctcaatgctggagaaaacaaatcattgcaaccacaacaaggcaaaatttccaatgaagatgctgtcaagcataaggtttcgtcatttaacttgggtttcaaaagagggaagagaatatctgttcgtttggaccatgaagagagacagatatggtgcaatgctagtgtggttttcatctcaaagggtccacttgatgttgcattgcttcaaatagaaaaggttccagttgaattaaatacaatcagaccagaatttgtttgtccaacagcagggtcgcctgtttatgttgttgggcatggcctttttggaccccgatcaggcctacactcttctctatactcgggggttgtgtcaaaggttgtccaaatcccagcaaatcaactttctcatctggcccgtgctgaggctgacaatatggacataccagtaatgcttcagacaacagcagcagttcatccaggagccagtggcggcgttcttgttaatacacatgggctaatggttgggataataacaagtaatgctaagcatggtggtggaagcacaatacctcatctgaatttcagcatcccctgcaaattactggttgcagtcttcgagtattcagcaaatggaaacctcgtggttttggagcagttggacaaaccaaatgaagtgctctcatcagtttgggcattggcaccatcatcatccccatttgtcaggagctccccagaaaaaggcaaagaggaaaaggtcttggagttctctaagtttcttagtgacaagcaacaagctctgaaatctaacgtagatctgaaggaactatttaggtacaagactcccagcaaaatatagagtgcgtccactaga

SEQ ID NO: 139069 - DNA, 2262 bp, Zea Mays
atccaaacagctttcaaggagaagcgtacagtccctgctatacagctctcgtcggggtcttctcccccttcggcccttcccccctccctgcgcgccatggaggcccaggagatcgccgctgcagcgcgccacttctgcgccatggaccccaaggccgtgaagatgcgccgccacgcctttcattttcaccattcggggtcgaccacgctctcggcgtcggctctgctcctgccgcggggcgctttagcggagccgccgctacttctcgaccatatctgctcggcccacgggcacgcggcaggagacgtcgcgctcacggctgcttccctcgtcgagccgttcctggtcgcggagcagcgcaataactccggcgaggagcttcagccgaggttggttccggagacgcgtcttgatgtgtttgttgagtatgagttggggaatgctcaagatgggaagtctggacctccgcggtggcttccagctcgactgcttgccatggttgatgtcccaacagctgctgtttctgctttatccttattgagacatgacgattcattcatcagaaggccaacttgggatgtaggctggtcattggctgatgctaatcagaaacaggtctctttgttcatcgaatcaaaatcttccctcgagtctaacaggaataattcatctttggagtcagtagactcattgatgttggccaagtctgccacaagaattgctattctaggaatttcaacctccaatttaaatgatgcaagacgtatcaatgtttcagtgatgcaacaacgaggggaccctttgcttatagtaggatctccatttggcctcatgtcacccttccatttcttcaacagtgtatcagttggtgctgttgcaaattgccttcctccatgcactgcaaggagctcattactgatggctgacatgcactgtctccctggcatggaaggcgctccagtgtttgaccaaaattcttgcctcgtggggctgctgatgaacccattaacacagaaaggcagcaatatagaagtccagctcgtgattacatgggatgcaatatgcacggaatggaacagcaaaaaactggaggaaattgaacgacccccaagaaaactacctaatgacaaaaatacagatagtaaatctatggaattacggcatgtatataactatgtgagggttttctcttctacggacaacaaaactaatcagcattgcatatcaccccgttcgctcagagaggctatatctgcagttgttcttgtcacggttggtgatacgtcttgggcttcaggtattgttctgaacaaaaggggtttagttctgacaaatgctcatctcttggaaccttggagatttggaagaacttcaccttcagatttacaagcctcgttcgctggagaacatctcaatgctggagaaaacaaatcattgcaaccacaacaaggcaaaatttccaatgaagatgctgtcaagcataaggtttcgtcatttaacttgggtttcaaaagagggaagagaatatctgttcgtttggaccatgaagagagacagatatggtgcaatgctagtgtggttttcatctcaaagggtccacttgatgttgcattgcttcaaatagaaaaggttccagttgaattaaatacaatcagaccagaatttgtttgtccaacagcagggtcgcctgtttatgttgttgggcatggcctttttggaccccgatcaggcctacactcttctctatactcgggggttgtgtcaaaggttgtccaaatcccagcaaatcaactttctcatctggcccgtgctgaggctgacaatatggacataccagtaatgcttcagacaacagcagcagttcatccaggagccagtggcggcgttcttgttaatacacatgggctaatggttgggataataacaagtaatgctaagcatggtggtggaagcacaatacctcatctgaatttcagcatcccctgcaaattactggttgcagtcttcgagtattcagcaaatggaaacctcgtggttttggagcagttggacaaaccaaatgaagtgctctcatcagtttgggcattggcaccatcatcatccccatttgtcaggagctccccagaaaaaggcaaagaggaaaaggtcttggagttctctaagtttcttagtgacaagcaacaagctctgaaatctaacgtagatctgaaggaactatttaggtacaagactcccagcaaaatatagagtgcgtccactaga

SEQ ID NO: 139070 - DNA, 527 bp, Zea Mays
atccaaacagctttcaaggagaagcgtacagtccctgctatacagctctcgtcggggtcttctcccccttcggcccttcccccctccctgcgcgccatggaggcccaggagatcgccgctgcagcgcgccacttctgcgccatggttcgaatcgtcggtccggaccccaaggccgtgaagatgcgccgccacgcctttcattttcaccattcggggtcgaccacgctctcggcgtcggctctgctcctgccgcggggcgctttagcggagccgccgctacttctcgaccatatctgctcggcccacgggcacgcggcaggagacgtcgcgctcacggctgcttccctcgtcgagccgttcctggtcgcggagcagcgcaataactccggcgaggagcttcagccgaggttggttccggagacgcgtcttgatgtgtttgttgaggtaaagataataagggcctgtttgggaatacagttttgaaatactgtagttttgagatagcatagtttacaattgtacatgac

SEQ ID NO: 139071 - DNA, 903 bp, Zea Mays
gaaaccgaacttgacaacttgtagatccgtgggccgagtagcgtcatggcgctaaaaaactctctcgccgcctgtcctaccgcaacgggcaaaaggacgactctcccagctggcctcgtgacgggcgctttccccatctccacatcgccgccccgcgcagctaccgcatcggcgacggcgatgagacacgggacgaggctgctctgcgcactagcgctgacgctgctatgcatggccacccacttccagggtgcatcctgccgcggcggcggcggtggcggtcgcggaggaggaggaggcggtggcggaggaggaggaggacgcggcggcgggtcaggaacaggtggcggccggtcgggaagaggccgctctggtcgcccgttcctcggcggggtcggtgcgggagccgccgccggcgtcggcgcgaggacggccgcaggaggatcgcacggccaccgcagcgtcgcagcgggtggcgcgggcgggccaggcgtgtggagggtggccggcgccggcgcggccctcaccgccgcgttgctcgcctagtcgcctggctgtgatcgtcgcgcgtgttggaggcgcgtaatccaggttagagttagacacgagggggttggtagagttttagtggtagcagaagcagatcggtggagacatgtgtgagtatcgcgccgttctgggatctgaactgaagtgtgtgtcattgtgattatcttgtggagtagtagagttttagcgattagctagctgtgcagtagggcgactttacgatttcttgttgagtaattcccaccacgtataaataagaagaggagttcaaaggtttgtgggcgtgattgtgtgtgtggtacattcaagattcaacttatatctgcaagactgcaacgatctctgtttttttgg

SEQ ID NO: 139072 - DNA, 2016 bp, Zea Mays
ttataggcaaacagagtgtgcttttattaagttggcaataacccatacaagccatacacgtacgatggccgtgcataataataatgatacgaaaacacaacttgcatcaagcaaggcacacttgacaatagcaaatactacttatgttcttatataagtaagcaatgactagtaactgtcgatgcttcaagctccccaatatgtggaggcacacaatatagggcacaagcatttacaggtcccttagaacccgtgaatcttgatgttctctttcttcgcaatcccagcctaccaagacaagtaataattgcacgatcagtattaacagattgaacatctatcggtatggtaaaacagtattcagctggccaggtctgaagattctgaatacctgaactaggaaagtagcaacattcttgcgctggtcaccttggagctgaatgacctgcagcggacaaacagatcagtatatccaccaaccggcagataccatttttacaagcttgaaatgcattgttctcgtatcttacctggcctagctctgggtcctgaactacagtaccattgcagcagaattccttcttcagatccttgaggatcttgttatagctgaactctttcttcagaccctggactgtagtcagactctttctgccgttgcgctgctggatgcgcacatgcacataatccttcgttccaggaccagcaccagagtcctcagcatttgcctcagcaaacggatctatcaaagatgatgccataccatcagatgcaaacagaacactaataagcatgttcaagatgaacttcgtgtgtatgatgttatcaatctattcagtaatactcttcaggaagctggaagatgctatgtattatgtaaaaccacaatataaaaaaaaacatggcatcatgaattgagaagtagccataccaaaggcagatggaagctggacgtcgagatcagacatgaaacttggttgttgaggttttgtaggcaccgagctgatcaagcttttgatttgttgttcttatgcagaagctgccaaaatcatattatcagtcacatgctacacaggccggaaatatttgagaagcacgcagaaactagcacagatagatgatgcagagataaggacggtaacagccagcaagtcacggacaataatctacagaatactcggtcaaacataccccaccagggttccaaaattactctcatataacagctgaagaatagatctagaaacgtgctagacagatacctagatttcctcaaatcccatcccaggtcttctaatctccgttgacgaatcgaagcacgaatactacaaacacgcctacttcccatccaaaacagggagcacgcctacgaatcgggtcgaaaccccatgattcgacagagtggccgcaaggcataaatccgggaagaaccatccctctgattcatagagcaagaaccaccaaaccgcaaaatccgggaccttctgaagactacgacccgagatccgttggttataccagagcagattcgcggcgagaaaggatcaaacccctccagatccccaaatcctagggctgcgaacgatacgacgaattgaatccaggaggggccaaaccgcaaaatccgggaccttctgaagactacgacccgagatccgttggtttacaccagagcagattcgcggcgagaaacgatcaaacccctccagatccccaaatcctagggctgcgaacgatacgacgaattgaatccaggaggggccaaaccgcaaaatccgggatcttctgaagactacgatccgagatccgttggtttacaccaaagcagattcacggcgagaaacgatcaaacccctccagacccccaaatcctagggctgcgaacgagaagacgaattgaattggaaggaggggaaaggggactgcgctcacctctcgctttcctggaggaggcgtggagcgcacgcggttggaggcgaaggcggatgaaaaacgagaggggctgacgggctgtct

SEQ ID NO: 139073 - DNA, 2068 bp, Zea Mays
gcggccgcgtccgcgaggaggatcgccgcgacgctggggcggggcgcatccgccgccgcgggagcccgggaaagcgcatcgacggttggagcctagcccaaggcatctgcatactcctgatcgttgcaattactacaaagcggtccttgagggcaggacaggaactaagcctcttggcaatggcatcattcgtgaggttggagattattctccatcacccagaattgaaatggaagtagcaacaaaatgggaccgtcgttccctgaacaaatctggcggtgctgactacgatttctgtgatcgtcatgcagcagctgctgacgaagaaatctctcaactcaaagaagagcttaggcaggcccgcaaccggattcatgagcttgaagctgagagccgatctgctaagaagaagcttgaccacttggtgaagaatctcgctgaggaaaaggcttcctggaggagcagggagcatgataaggtccgaagcatcttagatgctgttaaaggggatctgagccgagagaggaagaatcgacaaagggccgaagccatgaactcggagttgatggatgagttctctgagctgaagtcactggcaaaacgatatcttcaagactatgaaaaggaaaagaaggccagggaactgatggaggaggtgtgcgatgagttagcgaaggagattgcggacgacaaagctgaggttgaagctttgaagaaagagtcgatgaaggtaagagatgaggtggaggaagaaaggaagatgctacagatggcagaggtttggcgtgaagagagggtacagatgaagcttgttgatgctaagctgacactggacagcaagtactcacagctgtgcgagcttcagactaacctggaggccttcctaagtttccaccgaagcagcagtgtagacaaggaaacaacgagagatggtgaaaggctcagggaagcaattagctcaatgaagctccacggcaaagagttctcgtacaaaccgccgcctccttcggaggacatctttgccgtgtttgaggaactcaggcagagagaagaagtcagtgagaaggaaattggacagtgcaatggagatactcctatgagccgtgcaacaaagatccatacagtgagccctgaaactgacatctttctggggaaaacagcaaagagatatcccactcgaccttgcgccagagacgaggatgatggtgacagtggatgggagaccgtcagccacgcagaggagcaaggctctagcaattcgcccgatgggagcgaaccatcggtaaacggtttctgtggaggaaacggcgcgtcagcaagtggaaccgactgggaagaagataactgtgagaagtgcagatcaagtagcggcatcaccggtatctgttcgacagctggagagaggcacccgaagaaggcgtcgtcttttgcccgactgtggagatcatcaaacggcgacggcgggaggagaacaggttccgagttactgaatggtaggctctcaagcagcaggatgcccgatgccgctctttcccctgatctcaagaacggtgaggcgtgccaagtctcaccgggtgttggggaatggagtccggacctgctgaaccctcatgtggtccgtgctatgaaagggcgcgtcgaatggccccagccccagggcacccaaaagcgcagcctgaagtccaaactcgtgaacgcaaggaccaatggacgtaaggtacagctgcaccaagcgctaggacagatgatatagtatggcatgctcgttcatactagtcgtcgtcagaaagaacaccatggtctttgcctggtgagggaggtatctgaagcggacacctttgcctgttgagggaggtatctgatgcggcattggtcctccatcgagtgttatagctcgctgcccttgtagttgtagagcatttagctcgcttagaaaaatagtgacctccgatgctccgtgtaatcaaatgtaacagcagtattatttacggtatattattttttccccggacgttactcaatagtgctattagcttcttgcgtccctttgtgcggtttctctttcttt

SEQ ID NO: 139074 - DNA, 1152 bp, Zea Mays
tcccagctagacgcgcgtccatgccagatttttatccacgtgaggggtcgttaacgtgaagtgttacattaccaacacgaacagtgactttacaagtctttccaaaaatctgttctacaaagctccaaatcatcatcgccacatacttccttcctgccggccggcatcgagctagctttttcaattaacagtgtgcgttttcccacctcaactgcctttctccctataaaaaaaccccctcgtcgatcaccaccaaagaacacagtaactagcagctagcacatcaaacaagtggcgacagacaaagatttgtgagggtgatccgcgctgagaagagatggctaagatcgccgcggcggcggcggcggcgctgtgcttcgcggccctggtggccgtggccgtctgccaaggcgaggtcgagcggcagaggctcagggacctgcagtgctggcaggaggtccaggagagcccgctcgacgcgtgccgccaggtcctcgaccggcagctaaccggcggcggcggcggcggcggcgttggcccgttccggtggggcaccgggctccggatgcggtgctgccagcagctccaggacgtgagccgcgagtgccgctgcgccgccatccggagcatggtcaggggctacgaggaggccatgccgccgctggagaaaggctggtggccatgggggcggcagcagcagccgccgccgcagggaggaggaggaggacaggggggctactactacccctgcagccggccaggagagggatacggctacggtcagggtggccagcggcagatgtatccaccgtgtcgtcccggcaccaccggcggcgggccaaggatcggccgcgtgaggcttacgaaggcccgggagtacgccgcggggttgccgatgatgtgccggctgtcggagccccaggagtgcagcatcttctccggcggcgaccagtactagctaccatggttaaagcgagtcggcgcgaggtgcaagacgcagcatgtgtactgtgcgcgtgcaaatccagaatgacgtagctctgacgtgggctcgcaatattgtcgcgtgttcgttacaataatgataataactatgaggaataaatatgggaatgttgccagatagtactggcgccggttcttcataatgag

SEQ ID NO: 139075 - DNA, 1365 bp, Zea Mays
aatcaaaaatgttttattgcatgcattatcatgagatcctgatggacaactgaagatgaggggcagagatttacattacatacatggcgacagaggaacaaaaaaaaaatcaatcaatcaataatgcagtgaacgaaaaaatgaagaagagaaagacatgactcctcaggaggccatataataagttagttgacgacgttgcacttcttcctgacctcgccctggccgccggtgagcacgccgacggagcccatcttgaccatggacgcggcgaagtcggcgaagaactcgtccctgtgggcgcccgtggcgtggcggagcacgtaggcgcgggtggaagggtcggcgagcagctgggcgtcggagtggaagaggcccctgcgcttggccacgttggcgtagtagcccaggtcgaaggtgcggaagctgccggggtccatctccaccagggtggtgttgtcgtccaggctggcgcacttggcgcggaggcgcgccatgtacgcgcggtccagctccgggtcggtgtcgcgggcgtcgtccaggcccgtgaagttgtagaggcggtccgagaaggagaagcagtgcgacgtgccgatggtgtggccggccgacagcaccgccaggtccctggtgtccaggcccttggcgccgaacagctgggccagctccgtgaagttgcccgtgggcggcggcagctggtcggtctcgttggagatggacaccctgccgtcccgccgccccagtgggaccgcccagaacgggcccttgctctgagcgagtgagaacaacaacaggtagccagtaagaagagattctcataataacgtacgtatatgcatgctttggtacgtagtacgacgtaccagccacactgcgtccctggccatgagagccagcacgtcggcgcaggagacggtgtcagggcacgccttctccaccgcggccttgaccctctcgatgaagccgaagccgcgcagcgtcaggttcggcttcgcgtccttctccgcggtgttgttcgccgtggagtcgaggagcaccgagccgtcgcacccctgcacacacacactcgtggaagtgcatcctgaggagcggcccggcgaggctgggcgcgacggagagcgcgcgcaccatctccttccgcacgacgtcctccacgctggggcacgactggccgtagaacctctcgtccagctgcgccgccgccgagaacgccgagagcagcagcgccaggagagccgcccaggacgccatccccggtcttcagagctcgatcagagaacagaaaaaaaaggtcgcctctactgcttctgcttctctccctcggccgggctaagctagctaacgaggtagagaaggaagcgtgtg

SEQ ID NO: 139076 - DNA, 1467 bp, Zea Mays
caaatcgacgcccgacgccgcatgatccgtgcacctcgactgctcgccgcgcacgcgccatcgccaatccgccaccgcctatccctagccccgatctctactatctaccgccgccttccttggtcgccgcgcgcggccttcctcgccgcccaagccccaatctcgacgacgcgcctcgcgtcgtcgtcccgcctcgtccctcttctcgccctgccgatggatccggccgctcccgagcctgtccccgcacccgccaccgacaccgatgccgagaccaatggttacgaggatgcctctgaattcgaggacgcggaggctgggggcgagggcgctggggccgggaccgagaccgggaccgggaccgggtccgggtccggaacgatgccggcgggcggtgtagcggagatgaaggagctgcccgaggagcttgccaagggggtggtgtgcctcgaatgcgagacatcggccgaagcggcggtgtcgggtgttggcgggacctgccgcgtctacgtcgtcggcaccgctcatgtgtcgcaggaatcatgtgatcaagtgaaggccatcatcaactacctcaaacctcaggctgttttcttggagctctgtatgagcagggttgcaattttgacaccacaaaaccttcaggttcctactatgaatgaaatgattgacatgtggaagaaaaataagatgaacacttttggaattatctacagctggtttcttgcaaaggttgctagccaacttgaggtgttacctggagctgagttccgggtggcatttgaggaagcaatgagctacggtggcaaagttatcctaggagaccgccctgtccagatcactttgaggaggacctgggggaaaatgtcactatggcacagggcaaaatttctgtactacatcattttccagtctgtatttttaccaagcccagaggaactgaataagatgttaaaggacatggatgatgttgacatgctaacacttgttattcaagagatgagcaaggcatttcctagtttgatggacacacttctacatgagcgagatatgtatatgtcttcaacgttgttgaagtcggccagggaatattcttcagtggttgcagttgtgggaaaggggcatgtttctggaataaagaaaaattggcaacagccaattcaggtaaactgcttattagaattacctgatgctaaccaaggtccttcaaagctgaagattttggcatccattggagcattaaccggagtaataatagcatccggaatatatgtatggggtagaaagtaacagacgtgagtgcaatgtgttcaatgagcctttaaatctcgaaaaaaagtatttagtttatttacctataatctgtttcatttgttctaaatataaatagatgtaatttctgaaattgaaattaaacaaatgaaaggacaggtgcagcagataaatgaaacatgttttttcctctca

SEQ ID NO: 139077 - DNA, 943 bp, Zea Mays
caaatcgacgcccgacgccgcatgatccgtgcacctcgactgctcgccgcgcacgcgccatcgccaatccgccaccgcctatccctagccccgatctctactatctaccgccgccttccttggtcgccgcgcgcggccttcctcgccgcccaagccccaatctcgacgacgcgcctcgcgtcgtcgtcccgcctcgtccctcttctcgccctgccgatggatccggccgctcccgagcctgtccccgcacccgccaccgacaccgatgccgagaccaatggttacgaggatgcctctgaattcgaggacgcggaggctgggggcgagggcgctggggccgggaccgagaccgggaccgggaccgggtccgggtccggaacgatgccggcgggcggtgtagcggagatgaaggagctgcccgaggagcttgccaagggggtggtgtgcctcgaatgcgagacatcggccgaagcggcggtgtcgggtgttggcgggacctgccgcgtctacgtcgtcggcaccgctcatgtgtcgcaggaatcatgtgatcaagtgaaggccatcatcaactacctcaaacctcaggctgttttcttggagctctgtatgagcagggttgcaattttgacaccacaaaaccttcaggtatctgcacatttgtaagatgaataccaacccttcttatttgtaattcctaatataaagttgggcaaaacaataaactataatgttatgccttatgggtggtgtagaggttcggaggttttctcgacctgtgtgagaagattttcttcatataatacctaggggctgtcttacgtcgagttttataatgttatgccttgtggtgtctggattgctgaaccatcgcagaagaaggataatatgtgcttgtcaggcgagtattgattttattgtatctagtaaaggtttttcgggggtt

SEQ ID NO: 139078 - DNA, 837 bp, Zea Mays
ttcgcgcaggcaccggagccacaccaacctcgctgtcaatctcgtcgcaaaccctccacccctctccggtccggtgctgccatgagcttctagaccccctgcccaagaaatgttgtagcgtctcatgctgggatgggcggtgtcagcgccgcctctctcgccctgctgtggctcctcctctgggtggagtcctgcactctccacggtaccgtcacttctttattgtcccgtcttgcttgctcgtcccctaaatcatgtctgcgtcaccccctccatttcacgaggttgctcgtgttggctgggggacgggggtcccgagcctcgtgccgcactccattagagaccccacaacctttccgcgagcgatgctgttcctactcctgccggcggccttgctaccaacctgagcgtgcgtgtgttggtggagcgaggcaattccagtgcacggcgtggattttagttttcgatcagtgaattgcacatacagctacccttgagtcaaactgactatatccgcttgtttctaacatctcccttccacagttccacctcggcgactggtgtgatgaagcaggttagtctgtaagttgttgtgctgtggagcaactgtttcctaatgggaaattcgatctgaaatttcaaaggacctgattgtggaagtagatcctacctatgcaacctatattcaacaagccctaatagtgtgcaattgcaaaaaacgccatagtcttaattcaggaatttaaagaaaggaaaaaattaactttcagacaattggaggcgtgtgttcgatgggggggtattttgtgctgaccactcatcacacatatgcatggc

SEQ ID NO: 139079 - DNA, 1997 bp, Zea Mays
ttggttggttgataccttttttgttttgagtattaccttcatctccaataaagttaagcactcattttcttgagtttggaattttcttttgcaaagacatctctagctgatttgagctctttactgtgttctttggtcatcaccaaaaacatcttgccaccggttagcatttacgcgtcttttgtgccttttgaaattttgaaggtttagtatagctaagcttaagcgcaaaaaaaatattgccttatattcaccccctgctgctgtcgcatattagatccttcagtatatatataaccataagcataaaacaagatcacccattctcccaactccgatgcaaatcctcgaccgaaccagcagacagcaagaaatggccacagagacagctatgccgagaaagaagatgcgcatcctgctcatgcccttcttcgctaccagccacatcgcccccttcacggacctcgcctttcacctcgtcgcggccaggcctgacgacgtggaggccacagttgcagtcactccggcaaacgccttggttgtgcagtcagctctcgcccggcgtggcgccagtcatctggccacggtcaaggtggccacctacccgttcccctccgtggacggccttccaccgggagtggagaaccactccaaggtcaaggccgccgccgacgcgtggcgcatcgatgccgtcgccacggacgagaagctgatgcggccagggcaggagagtctcatccgcgagcacgcgccggacctcgtcatcaccgacatacacttctggtggaacgtcgatgtcgccaccgacatcggcgcgccatgcgtcacgttccacgccatggggaccttcccgacgctggccatgtttaacttgtcacgtgccgccggtgcagtcgacgccgccggtggcgtggtgactcttccggggtttccaccgccggaaattcaggtcccaaccaccgagctacccgagatgctaaggaggcaagaaacagccgacgaccgtgccacaggcaacgcggtacacgcagcgcacaggcggtgcttcgggcttgccgttaacacgttcttcgatttggagcacgggcattgcgagacgttcgtaggcaacggttacgtgaagcgagcatacttcgtcgggcccctatcgttgtcgccgtcaccatcatcgccggtggcagccggcggcggcgcctacggctcacggtgcatcgactggctggacaagaaaccgccccagtccgtggtgtacttgtgcttcggtagcttgactcacgtttcagaggctcagctacgtgagctagctcttgggctagaggcctccgagaagccattcctttgggtggtcaggtcggagacatgggcgccaccggaggggtgggaggagcgtgtcggggacagggggatggtggtcacgggctgggctccgcagaccgcgatactggcgcaccacgccgtgggcgcgttcgtgacgcactgcgggtggaactcggtcctcgagacggtggtggccggcgtgccagtgctgacatggcccatggtgttcgagcaattcatcgccgagaggttcgtgacgcaagtgctggcgatcggagagcggctgtggccagcgggtgccggagtaagaagcacgaggtccgaggagcacgagctggtccctgctggggcagtggcgcaagcggtggcaaggttcgtggagcccggagggcctggggatgcagcgaggaagagggtcaaggagctctctgtgaaggcgcgtgcggccatggcggaaggcggctcctcccaccatgaccttcgcgccatgatcgatgatatcatggaagaagcaggaacggcggctgcaggaccagttctctccggctgatttcagctcgcgtggtgtgatgtcgacgtgcatctgttttcaagttctcaatgtttggtcactatattatgacatatgagtatgttctcaatgtttggtcaataacgttgaacgtattttgtttgattcc

SEQ ID NO: 139080 - DNA, 2006 bp, Zea Mays
ttgatttaattaaatcgagactagttgtccaaagcataatcaaagcaagaccgcccttgcagagcaatctcaaaaaggctcagatcaacacaacctgtaccaacagcaatggcttcagctaagcagagcaagaagacgcgcatacttgtgattccattcttcgccagcagccacatcggcccccacaccgacttcgccgtccgcctcgcagcggcccggccaggagtcgtcgagcccacggtcgccgtgaccccggctaacgtcacggtggttcggtcggccctcgagcgccacggccccgcggcgagcggcacggtcaagatcgtcacgtacccgttcccgtgcgtggacggcctcgctccgggcgtggagaacctctccactgccggagccgacgcgtggcgcatcaacgccgccgccatcgacgaggccctctcgcggccggcacaggaggcgctcctcagggagcagtcccccgacgccgtcgtgacggacttccacttcttctggaacagcatcatcgccgccgagctgggcctgccgtgcgtcgttttcagtgtcatcggccccttctcggggctcatcatgcatctcctcagcggcgccgccgtcgtcggtgacggcggctctgagtctgagtcccgtgaagttgccgttcccgggttgccggagccggagatacggatccccgtcagcgagctgccggagttcttgagacgcccagcgaagggccaaggcacgttgaacccttgcaacgcggcgatggccaggtgcctgggcgtcgcctacaacacgttcgcgggcctggagcaggagtaccgcgaggcgagcatgcgcgtcgcgtccttgaagcgcagctacttcgtcggccccgtctcactgccgctgccgccggccgcggcaggcgtcactgagcctccatgcatccggtggctccactccaagccgagctgctcggtggtgtatgtgtgcttcggcacctacgccgccatctcgggcgagcagctccgggagctggcgctcgggctggaagcctcggggaagccgttcctgtgggtggtcagggctggcgacgggtgggcgccgccggacggctgggctgagcgggttggggagcgtgggatgctggtcagaggatgggcgccgcagacggcggtactcgcccaccctgcggtgggcgcgttcctgacgcactgcgggtcgagctcgctgctggaggcggcggcggccggcgtgccgatgctgacatggccgctggtgttcgaccagttcatcgaggagaggctggtgacggacgtgctcgggatcggggagcgggtctggagcggggcgcggagcacgcggtacgaggagagggaggtcgtgccggcggaggccgtggctcgggcagtggagaggttcttggagcccggtgggccgggggaggcggcgaggggcagggcgcgggatctcgccgtcaaggcccacgcggccgtggcggaaggcggctcgtcgtcccgtgatttgcagcgcctcatcgacgacctggtcgaaggcagggcggctgccggcgtgccgacctcgccgtccgttgcatccgtgggaacgtgaagcgacgctgacagcgagtagagatggaattgctggagttatttctgtccgctgttattactgtaatgtgatactgaaccacgtcgatcctcgattccgatcacgcaaattccgcatcacagcatgcgagcaagtgcatcttccaagttctagccaacataatgaaagtgaaatcgtcgttgaagatggaacctatggacctctagcaggagctgttcagctgttgccatctctcctgtcttttgtccattgcaaatcaaaccgctgtgtactttttgtcaactaccgctacctaccgtgtagtctttgctttcgagctcctctctcctttttttttttccttaagaaaattccttcaatgtcatctaaacttataccaatcccttcaatgtcatcagattttatagcttcccttt

SEQ ID NO: 139081 - DNA, 930 bp, Zea Mays
ttgggcatagagttgactgttttattgttcaatacttggtttcatgttgccaagctagctgaggagatcaagaaaggcgccgcgtcagttgaaggcgtggaggtcaaagtatggcaggtcccagaaattctatccgaggaggtgctcggcaagatgggcgcaccacccaagacggacgcgccgatcatcacgccgcaggagctcgccgaggccagccgacggcatcctcttcggcttccccacgcggttcggcatgatggccgcgcagatgaaggccttcttcgacgcgaccggcgggctgtggcgggagcagagcctggctggcaagcccgccggcctcttcttcagcaccagcagccagggcggcgggcaggagaccacgccgtgagtcgtcatcgttgacccgacctcggcacatcacctcacctcgcattgcttgcaccaactcatccatggcagtggcagtgggtaatagtgtagcatatgctcacgttttcccttaatttgtcgggctgacggcggtgacgcagctgacgcaccacgggatggtgttcgtgccggtggggtacacgttcggcgccaagatattcgacatggagagcgtgcacggcggcagcccgtacggcgcgggcacactttcgccggggacgggtcgcggtggccgacggagctggagctggagcacgccttccaccagggcaagtacttcgccggcatcgccaagaggctcaagggcggctctgcctgatcggatggccttgccatgctcccatgtacacgtatacctacacctatacatacataattacaaatacatgacgacgagagtgacatatagtacgttctatgttgtcgtggtggtttcggttgtattgcttggttgaaatttggtgatcggattgtgcatttgcccaaactaagttccatttc

SEQ ID NO: 139082 - DNA, 107 bp, Zea Mays
tatttttttcactttaaagctttctttttttgtttttttccctttaaagctttctcgatcttttctgacgtctctttgtttatccatttttttctctactcatcctc

SEQ ID NO: 139083 - DNA, 1820 bp, Zea Mays
atgttctgcctcctcccatcacgcgtccgcgtccgcagctctgccccaccgcgcctccgccgccgcaatccgcgcccgcatcccaccatccccgtgcggctccttcgccgtgatgctcgcccacgcatgatagaaggcacacccgcatctcgattcccgccaccacaatctttgccccttgctgacttcgatggaaggcgtaccgctcgctctcacctgcctgtgccccgcgacgcccacccctccccattgctggggccaggcaaggatcatttccaccgtcgcaaaccaccgatcccgcaaaacggcgccgccatcctgctcgtccctaaccaccgcctacagatggattcccctcccccactgcgcacaacagatggctccgcgcatctcgtgaacacagcgggccgccggcggataagcacgcagcagctcaccatgcctgggtcgccaacaaacccgcccctctccttctcatccccacctgccagtgtaggagaagaggacggaggttagcagatctcgtcgcgctggtggagatgaccgaagccgcggagtgcgaggaggagcgggacctgtttgccgatgcataggccagcgaggtgtatgattgttagcatccggacggtgtggccgcggggctcgagctgctgaattcgatctgcgcggtgcacaggtcagcgaggtgtatgattgttagcatcggtgcggtgtcgtagctggtggaattgttgccgaagctagcgacggagtgtgtcgagccggctttggacatcttggatgccctgtctgcggttccagaggggaggatggttcttaaggattgtctgcagacgatacccaatgctgtccggttgctgatgagagtttcagaggcatgcactcgacgagctctgtcgatgttgtggccggtgtgtcggatggctccggaagaatgcgcacctgctgcagtggaggctgggttggcggcgaagcttcagcttgtcatccaaagtggttgtgcgctggagctgaagcagaaggcgtcggagctgctcaagctgtgccgcctcaactacaccgacaccccctccatctccaagtgcaaactcacaaggacaattcagtgagatatgcaaatgatgctggtctgatctgatttggttcgatgatgcgtggtttgtcgattgaccttgctgagtttagagttccgaggaaatggaattggcaaattgacgaatgatggcaagactggtggttaccacaacaattttcggggagacaagaagcgatgcagcctaatgactagcaagttagatggcaagcaggcggggtgtacatgcaaattgttgagaatttgatcagctcaataagcacatgaggttgggtgctcaacttcgtatcagcagaggaaaacatacattgtggaaataaattaattatggtctcagattcaagatatgacagatacttgtagaagtggcaatggtattacagaagccattcatttcgttgaatggggtgagaaaggaggacgtcagtttcttactcctgctggaattttaacatttaacagaaatagcatgagcgccaaagataaggctacgaggaaggatcagatcgatcttcgggtgggctgtctgaggctgacatctagaagatggtgcaagaagctaaactgcgtgcctagaagaatcaggaacggaaaagccctcatcatctaatctaattcgtttgtccattattttgctgagaagtccatccctcgataagtgttcccttcatgagtttataacaccaactccaacatactcactcacctctttcagtctgttcaaagc

SEQ ID NO: 139084 - DNA, 2114 bp, Zea Mays
atgttctgcctcctcccatcacgcgtccgcgtccgcagctctgccccaccgcgcctccgccgccgcaatccgcgcccgcatcccaccatccccgtgcggctccttcgccgtgatgctcgcccacgcatgatagaaggcacacccgcatctcgattcccgccaccacaatctttgccccttgctgacttcgatggaaggcgtaccgctcgctctcacctgcctgtgccccgcgacgcccacccctccccattgctggggccaggcaaggatcatttccaccgtcgcaaaccaccgatcccgcaaaacggcgccgccatcctgctcgtccctaaccaccgcctacagatggattcccctcccccactgcgcacaacagatggctccgcgcatctcgtgaacacagcgggccgccggcggataagcacgcagcagctcaccatgcctgggtcgccaacaaacccgcccctctccttctcatccccacctgccagtgtaggagaagaggacggaggttagcagatctcgtcgcgctggtggagatgaccgaagccgcggagtgcgaggaggagcgggacctgtttgccgatgcataggccagcgaggtgtatgattgttagcatccggacggtgtggccgcggggctcgagctgctgaattcgatctgcgcggtgcacaggtcagcgaggtgtatgattgttagcatcggtgcggtgtcgtagctggtggaattgttgccgaagctagcgacggagtgtgtcgagccggctttggacatcttggatgccctgtctgcggttccagaggggaggatggttcttaaggattgtctgcagacgatacccaatgctgtccggttgctgatgagagtttcagaggcatgcactcgacgagctctgtcgatgttgtggccggtgtgtcggatggctccggaagaatgcgcacctgctgcagtggaggctgggttggcggcgaagcttcagcttgtcatccaaagtggttgtgcgctggagctgaagcagaaggcgtcggagctgctcaagctgtgccgcctcaactacaccgacaccccctccatctccaagtgcaaactcacaaggacaattcagtgagatatgcaaatgatgctggtctgatctgatttggttcgatgatgcgtggtttgtcgattgaccttgctgagtttagagttccgaggaaatggaattggcaaattgacgaatgatggcaagactggtggttaccacaacaattttcggggagacaagaagcgatgcagcctaatgactagcaagttagatggcaagcaggcggggtgtacatgcaaattgttgagaatttgatcagctcaataagcacatgaggttgggtggtgtcctgaatgatatggggctagactcactgtattggttatgtagacaacacccatatcggcatataagctcaacttcgtatcagcagaggaaaacatacattgtggaaataaattaattatggtctcagattcaagatatgacagatacttgtagaagtggcaatggtattacagaagccattcatttcgttgaatggggtgagaaaggaggacgtcagtttcttactcctgctggaattttaacatttaacagaaatagcatgagcggtaagttattatttttccggtctccctagagatgaatgaagaagcttttgacatccgatgtatatcttttaatctaacctgcaaactcaggtgtcctgaatgatatggggctagactcactgtattggttatgtcttatatttatatttgactgtattagttgatgagggcttgcctcagattgaggttacattcgacatcgatgctaatggaattgtgaccgtctcagccaaagataaggctacgaggaaggatcagatcgatcttcgggtgggctgtctgaggctgacatctagaagatggtgcaagaagctaaactgcgtgcctagaagaatcaggaacggaaaagccctcatcatctaatctaattcgtttgtccattattttgctgagaagtccatccctcgataagtgttcccttcatgagtttataacaccaactccaacatactcactcacctctttcagtctgttc

SEQ ID NO: 139085 - DNA, 2349 bp, Zea Mays
atgttctgcctcctcccatcacgcgtccgcgtccgcagctctgccccaccgcgcctccgccgccgcaatccgcgcccgcatcccaccatccccgtgcggctccttcgccgtgatgctcgcccacgcatgatagaaggcacacccgcatctcgattcccgccaccacaatctttgccccttgctgacttcgatggaaggcgtaccgctcgctctcacctgcctgtgccccgcgacgcccacccctccccattgctggggccaggcaaggatcatttccaccgtcgcaaaccaccgatcccgcaaaacggcgccgccatcctgctcgtccctaaccaccgcctacagatggattcccctcccccactgcgcacaacagatggctccgcgcatctcgtgaacacagcgggccgccggcggataagcacgcagcagctcaccatgcctgggtcgccaacaaacccgcccctctccttctcatccccacctgccagtgtaggagaagaggacggaggttagcagatctcgtcgcgctggtggagatgaccgaagccgcggagtgcgaggaggagcgggacctgtttgccgatgcataggccagcgaggtgtatgattgttagcatccggacggtgtggccgcggggctcgagctgctgaattcgatctgcgcggtgcacaggtcagcgaggtgtatgattgttagcatcggtgcggtgtcgtagctggtggaattgttgccgaagctagcgacggagtgtgtcgagccggctttggacatcttggatgccctgtctgcggttccagaggggaggatggttcttaaggattgtctgcagacgatacccaatgctgtccggttgctgatgagagtttcagaggcatgcactcgacgagctctgtcgatgttgtggccggtgtgtcggatggctccggaagaatgcgcacctgctgcagtggaggctgggttggcggcgaagcttcagcttgtcatccaaagtggttgtgcgctggagctgaagcagaaggcgtcggagctgctcaagctgtgccgcctcaactacaccgacaccccctccatctccaagtgcaaactcacaaggacaattcagtgagatatgcaaatgatgctggtctgatctgatttggttcgatgatgcgtggtttgtcgattgaccttgctgagtttagagttccgaggaaatggaattggcaaattgacgaatggtaatgagcatgtatatctaaacttgcagttttacctctagcatcttagctgaagagatttgggtggttgagcagatggcaagactggtggttaccacaacaattttcggggagacaagaagcgatgcagcctaatgactagcaagttagatggcaagcaggcggggtgtacatgcaaattgttgagaatttgatcagctcaataagcacatgaggttgggtggtaagtacagcaagttttgccactaggagtaactagcattaagcaaaaccagcaaattagatttttggcaatgtgggtatatcttttaatctaacatgcaaactcaggtgtcctgaatgatatggggctagactcactgtattggttatgtagacaacacccatatcggcatataaggtagtaatctgtggtcaaatttgcccatatttttcattttcatcgctaacaaaaatggatcttgtgatacctcggttacctactactttgatgaaacctcgtgaatgcattttttttacaagaaaatattttactgttcttctctcagctcaacttcgtatcagcagaggaaaacatacattgtggaaataaattaattatggtctcagattcaagatgtgagtctattatctttgtttttttaccggtatctgatctaagaatgcaactcactctttgttttcatagatgacagttatacattatggaaataaattaattgtggtctccgttggaagaatgtgactttattatctttgtcattttacagatgacagatacttgtagaagtggcaatggtattacagaagccattcatttcgttgaatggggtgagaaaggaggacgtcagtttcttactcctgctggaattttaacatttaacagaaatagcatgagcgccaaagataaggctacgaggaaggatcagatcgatcttcgggtgggctgtctgaggctgacatctagaagatggtgcaagaagctaaactgcgtgcctagaagaatcaggaacggaaaagccctcatcatctaatctaattcgtttgtccattattttgctgagaagtccatccctcgataagtgttcccttcatgagtttataacaccaactccaacatactcactc

SEQ ID NO: 139086 - DNA, 2239 bp, Zea Mays
atgttctgcctcctcccatcacgcgtccgcgtccgcagctctgccccaccgcgcctccgccgccgcaatccgcgcccgcatcccaccatccccgtgcggctccttcgccgtgatgctcgcccacgcatgatagaaggcacacccgcatctcgattcccgccaccacaatctttgccccttgctgacttcgatggaaggcgtaccgctcgctctcacctgcctgtgccccgcgacgcccacccctccccattgctggggccaggcaaggatcatttccaccgtcgcaaaccaccgatcccgcaaaacggcgccgccatcctgctcgtccctaaccaccgcctacagatggattcccctcccccactgcgcacaacagatggctccgcgcatctcgtgaacacagcgggccgccggcggataagcacgcagcagctcaccatgcctgggtcgccaacaaacccgcccctctccttctcatccccacctgccagtgtaggagaagaggacggaggttagcagatctcgtcgcgctggtggagatgaccgaagccgcggagtgcgaggaggagcgggacctgtttgccgatgcataggccagcgaggtgtatgattgttagcatccggacggtgtggccgcggggctcgagctgctgaattcgatctgcgcggtgcacaggtcagcgaggtgtatgattgttagcatcggtgcggtgtcgtagctggtggaattgttgccgaagctagcgacggagtgtgtcgagccggctttggacatcttggatgccctgtctgcggttccagaggggaggatggttcttaaggattgtctgcagacgatacccaatgctgtccggttgctgatgagagtttcagaggcatgcactcgacgagctctgtcgatgttgtggccggtgtgtcggatggctccggaagaatgcgcacctgctgcagtggaggctgggttggcggcgaagcttcagcttgtcatccaaagtggttgtgcgctggagctgaagcagaaggcgtcggagctgctcaagctgtgccgcctcaactacaccgacaccccctccatctccaagtgcaaactcacaaggacaattcagtgagatatgcaaatgatgctggtctgatctgatttggttcgatgatgcgtggtttgtcgattgaccttgctgagtttagagttccgaggaaatggaattggcaaattgacgaatggtaatgagcatgtatatctaaacttgcagttttacctctagcatcttagctgaagagatttgggtggttgagcagatggcaagactggtggttaccacaacaattttcggggagacaagaagcgatgcagcctaatgactagcaagttagatggcaagcaggcggggtgtacatgcaaattgttgagaatttgatcagctcaataagcacatgaggttgggtggtaagtacagcaagttttgccactaggagtaactagcattaagcaaaaccagcaaattagatttttggcaatgtgggtatatcttttaatctaacatgcaaactcaggtgtcctgaatgatatggggctagactcactgtattggttatgtagacaacacccatatcggcatataaggtagtaatctgtggtcaaatttgcccatatttttcattttcatcgctaacaaaaatggatcttgtgatacctcggttacctactactttgatgaaacctcgtgaatgcattttttttacaagaaaatattttactgttcttctctcagctcaacttcgtatcagcagaggaaaacatacattgtggaaataaattaattatggtctcagattcaagatgtgagtctattatctttgtttttttaccggtatctgatctaagaatgcaactcactctttgttttcatagatgacagttatacattatggaaataaattaattgtggtctccgttggaagaatgtgactttattatctttgtcattttacagatgacagatacttgtagaagtggcaatggtattacagaagccattcatttcgttgaatggggtgagaaaggaggacgtcagtttcttactcctgctggaattttaacatttaacagaaatagcatgagcggtaagttattatttttccggtctccctagagatgaatgaagaagcttttgacatccgatgtatatcttttaatctaacctgcaaactcaggtgtcctgaatgatatggggctagactc

SEQ ID NO: 139087 - DNA, 2874 bp, Zea Mays
ctcctgttccgaagttgcccgagtccgccgctccactcctccgtgattccatccatcggtctgacccgctaggtgctagtgccggcagcccgccactcctccgctcgcccgggtcctgacgctctcatccactgcagtcgccggcaccgcttgcagccgcagccgccggaagcttgttgtagctcgctagctaaacggtcagagccgagctggctccgtacccacgcagccacgcttactccgatcctccaaaatcgcggcgccactaatctaaagccctaaacccatgacgcagccgccgcaccacctccctctccatcgccagtaccccagcctcgcctccgtcgcctatggggcgacagcctaagccgcccgcgtccccatccccaccgccgtgcccgccctcggactcggacccggacccaggcagcggcttcgaccccatcgaggagtggctcgtggacttcgacccggccatgtcgagcgagctagaggcaaagggccccgaactcgctgagcaagcggcggcggttccgcttacgctggagacggcggcgcaaaagagcttcgagctcgagtttggtgtgaaggaccagaaggtcgaggtggtgagcagcgaattggacgggctgcttgccccggatcagcttctggtgtctgggatcggcgatttggccgtgagagaggatattccagaggaagcggttgctatgaagatggctgccacaccgcctgcagctgctgatactgatatgaataccactgtatccgttgaagtggaatcggaaggtggcaaagaagggcaggaggcaccggccgcacctgctgatgctgagatgatgaataccatggtgtccgtggaagtggaagctcaaggtggcaaggaagggcaggagagcagcgatgaagagtcggaatcagagagtagcgaggatgatgacgagctgtcatccagcgaggattcctcaagcagcgaggacgagaaagagcagggggtcaacaaggatgaggaatcaagtgaagcctcaagcagcgaagaggaagggctggaagttaggaggcatggtggtaaggctgataacctgcagagcctcctcgaggaaggcgagttgatgatggggagcgatgtggagaatgaggaacaaaagggaggcaccaagtccaaatatgaagcagaggttcttccaccagtcccaaaaattgaaatacagttggaaccacatcatcagactcttccagtagggactatttcagctataatgggtgaaagagtaattgttgaaggttcagtccaacacaaccccctgaatgagggttcaattctctggataacagaaagtaggatgccgcttggtatagttgatgagttgtttggacctgttaagaacccgtactaccttgtgcggtacaactctgaggaagaggtacctgctgggatcagtgcaggaaccgatgtctgttttgtagcggagtttgcagaccacatcctgaatatgaaggagctctatgcaaaaggctatgatgaatctgattctgtagacaaagatgcagaagatttacctgatttctctgatgatgaaaaggaggctgagtacaaacggtcattacgtcaagcaaaaaggcagactgatagacagcacgagcctatgaagacttcttgttacatgaagggatcacagcctagaggtagcggaatacggaagcccatgccgccaaggaacctggatacatcaacacgaggtcatcagccacaacctcattttcgccgctcagatatggctcctgcaggtactgaaaatacagcacgttcattgggtcctcaaaatgcacctatgattgctccaacaatgttgcagcctggcccaatgaaccctgctgtgccaccacctgttcctcttgcaaatcagatgggtggctgcttcatgaacctggcacagcagcagctcttaccgcagcagcctaatatggtttggcctggtggatttccacagcctcctcttcccaacatgggggtagatggagctgcactcgccgccaacatcatgcagaacctcctcgcaggagccagccaattccagcatcagtttcagaacctgaacttcagtggcgcaggagccaaccagttcccgcagcagtttcagaaccagaacttcagtggcggcacaggagccaaccagttcccgcagcagtttcagaaccagaacttgagtggcccagggaccaaccaattccagcagcagtttccgaaccagaacttcagtggcttcccaaaccaaatgcccatgccctttcttcagaccatgcaccagaccggaatgcctgcaaatccaatgccgttcggtggcagaccaccagcgaaccctccatctggtccagcgtctattgcccctatggggcaaggcaactttggtcagcctccaaatccacaaggatttacgattccggcgccacccggtgaagatgggaaacaaggctcgcctccgcagttcagttccaggcagtttcatcaagggagctcgtcatcctttggccggggaaggacgcagcaccgcggtggccggcattcctatggcagaggtggcagaggcggccggcaccccagataggtatctggagcgttgcccccggtgtagattcagtatgagtgttccagtcataatcgagacactaaagattatgtaataccagaagtatgtttcttgtaatgttgcttgctgagtggattggacatcccgtcgaatgacagcgtgttgtaatacacttcctgcgcccagtatgcgtatctctggctccatgtcaccatgatctagtggaaagaggataatttttcttctcatgcaaaggaaattggagtgcaaagaaactcttctattt

SEQ ID NO: 139088 - DNA, 1536 bp, Zea Mays
cccttcctgcacagtacagtggtacttgaagtcgaaggcagcgcagcaggtacgccaggacgccattagcagcggttggccaccagcccaccacccgacgccggaggcccggaggaggaggcggcgatggcggggaagcacgggcgcaacggcttcgacgacgacaacgtcaaccctttcgcgggaggaagtgttccacctgccaccaattctcgtctctcacctctatcacatgaaccggctgatttctacaatgtggacattcctctcgactcatcaaaggatctgaagaaaaaggagaaagaactccaggctatggaggctgagctaaacaaaagagaacgggaattgaaaaggaaggaagaggcggcatcccgagctggcgttgtgatagaagagaaaaactggcctccctttttccccctcatccaccacgacatttccaatgaaatacctatccatctacaaaggatgcagtaccttgcattctcatcattcttgggattgatagcgtgtctcttttggaatgtcatagcaactacaacagcatggattaaaggggaaggtgttatgatctggctgcttgccattatctacttcatatctggtgcgcctggggcttatgtgttatggtatcgacctctttataatgcaatgagaactgagagcgctttgaagtttgggtggtttttcctattttacatgattcatataatattctgtgtgtgggcagctgtggctcctccattccctttcaaaggaaaatctttggctgggattttaccagcaattgatgtcataagcaagaatgctattgtcgggatattttacttcgttggatttggcttgttctgccttgaatcacttctgagcatcggtgtcattcagcaagtctacatgtatttccgtggaagtggaaaagctgcagagatgaaacgtgaggcagcacgtagtgctctaagttcagccttctgatgaacatagggcggtctgattagagcagtagatggataagggaagggaacgagatgtgccaattaagccacgcggtcttgtacatcactgcagtacgtggatttggatcgctgaaagcgtacagctgatcgtctttttgctcttctgtaaaatatgaacaatcatcatatggtccggatgcgtcagggtgttggtttcatttcttgccatggtttagatgtggttgatagggaaaacggtgaagtatttttttggagcagcgaatataatgtatcttcatcgtacttttacatgtgagtgtaatagcttatttcttgtggtaggaatacagctttgctgtgttttcgggaatgacatttgttgtgtaaggttattcacaatggctatttcataacactctttccaatactgccacattatcaagagtgtcatgaaactaagaataaaaaaatgtctcttaatacaaaatttcacttcactatttcataaattagcatactaattaaatgctgtaactaaatagccaataaaaatcagtaaaacatgtgaagataaaacaaa

SEQ ID NO: 139089 - DNA, 783 bp, Zea Mays
gccaggacgccattagcagcggttggccaccagcccaccacccgacgccggaggcccggaggaggaggcggcgatggcggggaagcacgggcgcaacggcttcgacgacgacaacgtcaaccctttcgcgggaggaagtgttccacctgccaccaattctcgtctctcacctctatcacatgaaccggctgatttctacaatgtggacattcctctcgactcatcaaaggatctgaagaaaaaggagaaagaactccaggctatggaggctgagctaaacaaaagagaacgggtgtgttggctttcagtctttctgctccttttgccagttatagcagttctgacaaataagatgcaagttcatgtttcacaaactgctatatgtacaatttgtctcttgtacttaatatgttgccaaagcattcctagtactcgaatatttcatatgataggcttatcttgctttgcatattacttgtattgattaagaaaaatcttccttctgcatacaattgcattgagacggccatgttgctttctatttattgtttgttgatcttttagggatattttgatgttttttctgagatattggggtattctgagtcaatgaaggaaatgtcgtttttgctgcttctcatgtgtttgagactttgaatccatgttccatctgtttatttactttgtacacaattctttatttaaaatgttgatatgattcttttttattcatcttcattggcgtaggaattgaaaaggaaggaagaggcggcatcccgaggt

SEQ ID NO: 139090 - DNA, 2420 bp, Zea Mays
cataccgtacccgtcgtccgcgagtcgcgacccctcgaccgtgcgaacgagcaaaggacaaatatcctcgctcgcagtcgcagctactacgccgccgcacctccgcccgccaccttcttcccggctccagcgatgtcgggggcgatcgggggcgccgaggtccacggcttccggggcgcagcggcgcagctcccgcggtcccgggtgctcgggaggccgatccgggtggcgccacccgccgcggcccggccgggcggtgcgtccgcgggtagcatacgcgccgtctccgcgcctgcgaagaaggacgcttctgaagttaagcgaagcaaggttgagataatcaaggaaaagagcaacttcctccggtaccctttgaacgaggagttggtctcagaggccccaaatatcaacgagagtgctgttcagctgatcaagtttcatggaagctaccagcaaactgaccgagatgtccgtgggcagaagaattactcgtttatgctccggacaaagaacccttgtgggaaagttccaaaccaactttatttagctatggatacactagctgatgagtttggcatcggaacactccgcctgacgaccaggcagacattccagttgcacggtgttcttaagaagaacttgaagactgttctaagcactgtcataaagaatatgggctcaacattgggtgcttgtggcgatctcaacaggaatgtacttgctcctgcagcgccttttgtcaaaaaagatatcctttttgctcaacaaacagcagagaacattgcagcactccttacaccacagtccggggcttattatgacctgtgggtggatggcgagaagataatgtcagctgaagagcctcctgaggtgacaaaagcccgcaatgacaactcgcatggaacgaacttccctgactctccggaaccaatctatggcacccagtatctaccaaggaagttcaaggttgcagttaccgcggctggtgataactctgttgatattctgaccaatgacatcggtgttgttgttgtttcagatgatgcaggagaacctattggctttaacatctatgttggtggtggcatgggaaggacacaccgagtggaaactacattccctcggctggctgatccattgggttatgttccaaaagaagatatattatatgctataaaggccatcgtcgtcacacagagggaaaatggaagaagggatgaccgcaagtatagtaggatgaagtatttgattgaccgttggggaatagataggtttcgggctgaagttgaaaaatattacgggaagaagtttgaaagtttccgaccattgccagagtggcagtttaacagctaccttggctggcaagaacagggtgatgggaaattattctatggagtgcatgttgataatggtcgtgttggtgggcaagcaaagaaaactctacgagagataattgagaagtataatttggatgttagtattaccccaaaccaaaatcttattttatgtgggattgatcaagcgtggagagaacccataactacagctcttgcacaagctggcctgctggaaccgaaggatgtcgaccccctgaatttaactgccatggcatgccctgccttgccactgtgccctttggcacaaacagaagctgaacgggggatcttacccattcttaaacgaattagagcagtcttcaataaggttggtatcaaggattcggagtctgtggttgtgaggataactggatgccctaatggatgcgctagaccatatatggcagagcttggttttgttggtgatggcccaaaaagttaccagatctggctgggtggaacaccaaaccagagtacgctagcagaatcatttatggacaaagtgaagcttgatgacatcgagaaggttttggaacctctctttacctattggaatggcacacgccaggaaggcgaatcttttggaagcttcacaaaccgaacaggattcgacaaattgaaagaggtagtgaataagtgggcagagtcaccatcagccgcatgaagatttcgctttcgttggataaaatcccaggctcgcagcacaattttggccacgggattaattatatgacgaaggaaatccagataagccgagaaatggaaaaaggaagactcgggttgtgagttgctatgtttgttgggttgagtgatcgaatttttttgtgtgtgctctcaaggagacctctgtgaacttgaataaactccacacggagttgtgccaaattagaccgaggcgtccgtgaacttgaatcagttcctcgggatgttgtgcctgagaataaatcccaccgaggcgtctgtgaacttaattcaattcgtcaggaagctgtgccttagaataaattcgacgggtgtccaattttcttgtcattctagcgagat

SEQ ID NO: 139091 - DNA, 148 bp, Zea Mays
tggacaagtttcatgattttctgactttgtgtgtgttttatacaatttttaaacatgtggatgccaagttcacggccatgtttagtgagtatgttgctcgaagtttccggtacgcttctgcaatcggtcgtaacttatgctaagtaac

SEQ ID NO: 139092 - DNA, 170 bp, Zea Mays
ttttttttttgttatggtttcacatgcaatttcactgtgaaggacaatattgaattgcagcaggtggagtccgtgaagtcatatttcacgctccatgaacaacctaaaagagaaccctcttaaacctaacaaaaaagacttaaacgtttgctttattaactctaatttcg

SEQ ID NO: 139093 - DNA, 1138 bp, Zea Mays
ataaatttagcacttgtcctaaattgtagatttgaaaagttgctaaaacactaacaattagaaaaaacatgtgtgctccaacaactatctatttgttggttgctaattataagtgagcatgctttctatttttaattgaactaacgtcagaaatcggtatcaataacatcccctgatgttttgggaggtcaaagttgtcgatgtaagaccatacggtcgcatcgacgacacaaagacatcataggaggtgttgtgacgacgcctcagcataggaggttgtgtagcagtgacggcgctgttaggatttatgggctaggcctaattgagaaattcaattaaatctcaggaaaatctcaaaagcccatatatgagtatgggtagggaatggtggaaccaatagcaccatattgctagtcctagtggagtgaggctagcttaaatatgaaagccacactcacttaccaagtcatggatgagaggagagtgtgtggagagccacacgcgcgcgcgctcgctcgcctcgcttggccgggtcggggcgaagggcgcgggcgcatgacatgcgcgtgaatggtccgccgaaatgcagcccctcgccttgcgggggcgcgacttcttttgtcgtttgaattttttggttgcttggctgttaagtttataatcctaaccgatcgctacaaaatctaaactgaacgcgagattttcgcgggtggataagatcgaagatagctatctgtctcggccctataaaaggcgtctggcagtcagcatccatatcatcccagtttccgctttcgcctctcttcacagctgagctgccttcagttctcttcatcccgaccgcagacgtgcatctacgatcaggagagcaggtctccggaacacttcgccctcgagatcctgcactgggagagggtggataaggtttttgggaagcgtccacacgccactgctcgtgatcttctgacctcgtcgacactgctgatttcgctgcttcgacgtcgtcgaccctgctgattccggcccgcgccatcaaccaatatgtctgattagtacgcatcatctgatttgactttttactttagttcttctgatttggtcatgatttatatttagaatttaatctgaaatttgtcta

SEQ ID NO: 139094 - DNA, 540 bp, Zea Mays
gatgatctttgcggatgggagaaaagtggcagtttgcaaacttataccccaggaaaggagaagtggtttaagaaatcgtttggattcaacatattggatttatgatgggctgcgggtggcagcacctggcagcgtggaccaacctgatggccttctatgtcatcggcttgccgctcgccatcctctcggattcacgctcgccttccaaaccaaggggctgtagatggggcagatatgcagcctcctctgccagaagtgcgtcctctttttcatcaccctgcgaaccaactgacaggagttagacctgaccatattcaacaaggacaacgattttgtctgctaggaatccagaaatactttttcttttcttttttgccatgtgctgttgctgaaacatcgaaccatcagcatcaggcttcgacggagctgtctggtgtttgctcatcagccatcatcaattcatcatcagtgtaacattgtagattgtaacatttggaatctcggagataggaattaaaaatgttctgatacgccaatata

SEQ ID NO: 139095 - DNA, 671 bp, Zea Mays
aatatatttagctccccgtctaaccaaaggcaaacgcgaagccacaaagccatggatgctccgctgagaggcaagagcacggcaagggcagcatggcggcgaccagccgtctcctgcctcctgttcgtttttgttttggtgctattgatctctacgacggcgacagcgacggctacgacagttcagtcgcggcaggcggggctcacctctcgccaaagaggctctggattccgggcgtggcggagggatgtgctgaggccggacaggacggccggcgaagcttgggcgccgccggcgcccaaggccaacagcaacgtcccaggagggcccttcggtcgtcgttgactcatccagatccagtcgcacccgcccaatcgccatcgtttcatgacacatcgaccagaagatagctagcaattcccatctcactggtgtgtgttattttagcttcttttaacgatgaagaactagtggcgatgattgaaataatacaacttattgcatcgaaaattaagaacgatgtgcgttgaggattgtgtttcgtatgtaccatttcgcatggcgtttattcttgcttcatacctgcgaggatttatgtgttatgcttgcagcaatgcaaactacatgcagcttgcttgcacgcaaaagaacaatgcactatatatggattt

SEQ ID NO: 139096 - DNA, 961 bp, Zea Mays
tcgccagctgcatgcgttggcatccttccttcgtcatcatgctgctctgagtctgctcccctctgctttctttttcccttctctgcgccaccggcttcaccatatagctcggagagctcagccctggctgttagtgcctctgcttcatcgtgcgagcgagggcatttggattcggattcgaggcggtgcactgaagtgcctagctagtgcagggagaagcagcaaagctctctctctctctctcccttatatgggagcaaggccggacggggcgccgggggctgtggagtgctgcggccgcaggctggtacgactgctagccttcctcttcctggtctgcgcttgcctcgtgatggccgccatggtggcgacgacggacggcggagcgagcttagcagggccgtcgtcgaacagcgctgcgtcgtccgccacgaagacgggcggctcgccggcgtggcgttcaggcgggacggccgcagacgcgttccggagcagcgagaggaggatccccaaggggcccgacccgattcacaacaggcgtgccgggaagacgacgaccgcgccgcgccggagagactagctagccggaggccggccgggggcggcggcggcggcggcaacagaagctaccactgccggtgctcatcgtcctgcacctgaagcagcagcagcagctgatctgatcgacatacagttcgtgttcggcagctagcccctagccatgctcggagaggtttaattaattacgcagcggactccttcgatgggggtggatttttggtgatcattctgggggtatgtataaacctgcaacctacccttgcaaggattagtttttcttcttctgtttttcttctttcaagtttcaccgaggtggagtggaggttgaccgacattctgttcttcccgcatattcttgtgagattttgattccaatcagtgtctatcaattcaatttcga

SEQ ID NO: 139097 - DNA, 111 bp, Zea Mays
attcagatctaattcaaaccttttggcccttccttacaattttatattgtgccattaaagtactgactttaaagatactatttttatgtatatattttctataaattctat

SEQ ID NO: 139098 - DNA, 1693 bp, Zea Mays
cagccgcatactctttcctataactttcctggaagcggagccagatttctcccagcgcagtcctccctctgtcccctctccaaaaccctctttttcacggtttcctcactctaccagccgtgcagccgcgctgcctccgcccggcgcccgtcgcgctgccctcccatatacctccggtgttgtgtgtcattgtcaggtagccgcctcccccccccccccctcttcagcttgttctccgcggcggcggcggcggcggcttggatcggagcggagggagaagatggtggcatcaatcagggtgcccaagacccaacgcgccaggagggagcttctcaagcacgcgcccaagcttgttgagaccagcaagaagacactgatcctccatggtaccaagactagtgctgtgttgaactctgtgctgtcagatatttaccacctaaagcgtgataatgctgtgaaatataccaagaagaatgacaacattaggccttttgaaagtggtggagaatcttctctggaatttttctccctcaaggcagactgtagccttatagtgtatggttctcattcaaagaagaggcccaacaatctgattttggctagaacgtatgaccaccacatatatgaccttgttgaagtaggagttgagaactacaagtcaatggaatcttatgtttatgataagaagctagcaccattacttggatcgaagcctttctttgctttcataggggaacactttgagagttctgaagagctgaaacatttgaaagaagtgctgcttgatcttttcagaggagaggtcgtagagaatctgaaccttgccggtgtggatcggatctatgtgtgcactgcaatctctcccaccactgtctacatgatgcactgtgctctccgtctaaaaaggtcaggtacatctattcctaggatggagctggtcgaagttggaccttcaatggatctggttgtaaggaggcacagacttccagctgaaagtttgaagaaagaagctatgaagaccgctgaacatgctaagaagatgaaaaatgtcaccaaggatccagtgcagggcaagctgggcaaggtctacatgccagaccagcaggttggaaagttgaccttatcaaacgacgtaaagggactaaagagggagcgccgcgaagccaagaaaaatcaggactcaaagaagcaaaaggtcaaccctgagtaaagagcactgaagtttacctttgtattggatacaggtcaggttaagaaaccctggcttgtatctgtttccaactgctgtgttatccaagtagaagttgctcgctgtcagattagtgccatcttgttaggctaaagatctctgtacgactttcacatcagtattgtgtaccaatccatgttatgacataagcatggaattttgagaatgtgttatcctatcaaatatcaaacgtcttctgaggtctcaagccctgttaaaggaggattgtggtaggcttggtgagccagcgttaaagctagccattctaatggagatcgacaaccagaatgcctaaaggtttagccttgattccttgaatatgctatctgttgttgctgtatcctacagtatatttgctagtcctgatgtcggttcgttatggataagctttgccctcacgaaatggatgccatttctatgattctgtcaatgtagtttagtttg

SEQ ID NO: 139099 - DNA, 541 bp, Zea Mays
cattaggcctgtaggctcgtgtctcagcgatgcggagaaagcggaagacaggtcgcttgttctacttctacctggcctcgcaggcttcgcaaggcggccacacgccgatacctcctccttcacccgctccgtcgtcccccacagccggccacgccaccatgctgccaccggccgcgcgccttgcggcccgccgcctcctcggcctcgcctccgcatctgcgtcggaagccgccggccgccgggtagcttcctctccgatcgcttccgcaggctactccgccgccgcgtccaggggctccgtctccagcaccaggcccttctccacggctcttaactaccaccttgattccccggagaacaagccggacatgaaatgggagttctcacaggcgaatatgaagaaggtcaatgagattctgtctcactatccaagcaactacaagcaatctggtattattccgctgcttgatcttgcacagcagcagcatggtggatgggtgccagttgcagcaatggatgctgtaagttctactatgtgaaa

SEQ ID NO: 139100 - DNA, 1784 bp, Zea Mays
cccgattttgtgctcctgggacctgcactgtttctgtttactttcccccactcttgccatgtctgctctgcatcgatgagaaaattctggttctgctttccttttcagctaggcagatcggctttgacgatgtgaaggaatgccctcacctgtgcacgctagcttacgattatctcaggaagaacaagggttacgaagagaacatttttgcgttctttcagaatagcatggatcccgagcccctgattgtgaagtttatcgaggagcttgacaaatgcatagttggctacttctccttccattggaaatatgccacttacataattacccaggttctcacggtagaaggtgcgactaaaagaaagttcaagaattttgtgttagaggccaccagggaacagagattcgagagagtgacaagaaacttgaaggttacaaggattttctccacactggtggaggaactgaaggccataggactatctagccgtgatgattctccacggaatgatgtgatggttccagtagcacactgcaaccgcagcccagttttactcctgatgggtggtgggatgggagctggcaagagcactgtacttaaagatatccttaaggaagcattttggtctggagcagcagcgaattcagtgatcgtggaggcagatgcattcaaggaaactgatgtaatctaccgagccattagctctagaggccaccacaatgacatgctgcagactgcagagctggtgcaccagtcatccttggacgcagcctcgtcgctcctcgtcactgcactcaacgaaggccgggacgtgatcatggatggcactctgtcctgggagccgttcgtgcagcagacgatagccatggccagggccgtgcaccggcagcggtaccgcatgggatgcggctacaagctcacagacgatgggacaataaccgaggagtactgggagccggttgaggactctaacactgacgaggaaaacgaagtaccggcaaggaagccctaccggatcgagctcgttggtgtggtctgtgacgcatatctagcggttgtcaggggaatcaggagagctgtagtcactgggagagcagtgagggtgaagtcgcagctgcagtctcacaagcgatttgctacggctttcaacagctactgcagcctcgtcgacaacgccaggctctacagcaccaacaccttgggtgttcctaagctgataggatggaaggatggcgagagcagcttactggtggatcccgaagaaatcggctgcttggacaggctacgaagcttgaacgaggaggccgactgcgtccatgagctatacgccgacggccaaccgacaggaggctcgtcgtcagcgtggcaggacctgctggtcatgtcgccgtccagggtgtcggcgcagcgggagctcaaggctgccatcgagaggaacgaggggcgcttcgtcaaaccggcatagccgtgtagctgctacgttcgttcgttagttcggttccaacttccaaaggaatcgttccctagccggattgttgatcagctggaacgatttctgaatagattccttcgtaaccgaacatgcccttatcaggcgcatcatccaaaaacggggaaagatgaagctaatgtgatgctttgattgtggaggtggcctatcttcttcttttgtttccaaacatacgaatttcgcaatgcattttgtatgatgcgatccaaaacgctttgcaccgcaaatttattgcttgagaaaactagtttgttagcatgaagtatcagtgca

SEQ ID NO: 139101 - DNA, 2422 bp, Zea Mays
ccctcgttgacaccgaaccaaacacataaatctgaccggcgcggtggtcagcactcagcattagatatcgtggggcacctcgatccaaagataagcctggacggtacggaatggcacgtcagggcgggaccgccacggcgccaccgcttgaattgaaatcgtccagctgctagctcgagcggatagcagtatagcaccacgccgttgacccttggcgctttgcgagctgctgctaccgccagtccgtcagccacccaccgcgcgtgatcagattggaggcagcgagagcgagtccacgaccacgagcgaaccgagttgtccgcgcccggcgcctcgtcatctcccacctcctctgcggctctgcctcaggtcgggtcccggagcgtttctcgcctacttcgccttgccccctccccacgtcgcggaacgatcggtgcgacggtgccccggccgaacccattctgcctggcacctgcggggtatgatcctgggcggcctgtgccccgcccccgcatcaccttgcctggcgtcgcgctcgaccgcgcggcctcctcagccctgaacaccgcccgcccgcctgccgggtgtgagaggataggatcataggaggagtaaggagcggggcggcggcggcgacggcatgagggccgaggcgacgggctccgcggcgaagctgctggcgccgcggatggtggtgtccgcctccagccgcgtccaggagctggagaggttctcgcattacgtcgctaggcagatcggctttgacgatgtgaaggaatgccctcacctgtgcacgctagcttacgattatctcaggaagaacaagggttacgaagagaacatttttgcgttctttcagaatagcatggatcccgagcccctgattgtgaagtttatcgaggagcttgacaaatgcatagttggctacttctccttccattggaaatatgccacttacataattacccaggttctcacggtagaaggtgcgactaaaagaaagttcaagaattttgtgttagaggccaccagggaacagagattcgagagagtgacaagaaacttgaaggttacaaggattttctccacactggtggaggaactgaaggccataggactatctagccgtgatgattctccacggaatgatgtgatggttccagtagcacactgcaaccgcagcccagttttactcctgatgggtggtgggatgggagctggcaagagcactgtacttaaagatatccttaaggaagcattttggtctggagcagcagcgaattcagtgatcgtggaggcagatgcattcaaggaaactgatgtaatctaccgagccattagctctagaggccaccacaatgacatgctgcagactgcagagctggtgcaccagtcatccttggacgcagcctcgtcgctcctcgtcactgcactcaacgaaggccgggacgtgatcatggatggcactctgtcctgggagccgttcgtgcagcagacgatagccatggccagggccgtgcaccggcagcggtaccgcatgggatgcggctacaagctcacagacgatgggacaataaccgaggagtactgggagccggttgaggactctaacactgacgaggaaaacgaagtaccggcaaggaagccctaccggatcgagctcgttggtgtggtctgtgacgcatatctagcggttgtcaggggaatcaggagagctgtagtcactgggagagcagtgagggtgaagtcgcagctgcagtctcacaagcgatttgctacggctttcaacagctactgcagcctcgtcgacaacgccaggctctacagcaccaacaccttgggtgttcctaagctgataggatggaaggatggcgagagcagcttactggtggatcccgaagaaatcggctgcttggacaggctacgaagcttgaacgaggaggccgactgcgtccatgagctatacgccgacggccaaccgacaggaggctcgtcgtcagcgtggcaggacctgctggtcatgtcgccgtccagggtgtcggcgcagcgggagctcaaggctgccatcgagaggaacgaggggcgcttcgtcaaaccggcatagccgtgtagctgctacgttcgttcgttagttcggttccaacttccaaaggaatcgttccctagccggattgttgatcagctggaacgatttctgaatagattccttcgtaaccgaacatgcccttatcaggcgcatcatccaaaaacggggaaagatgaagctaatgtgatgctttgattgtggaggtggcctatcttcttcttttgtttccaaacatacgaatttcgcaatgcattttgtatgatgcgatccaaaacgctttgcaccgcaaatttattgcttgagaaaactagtttgttagcatgaagtatcagtgca

SEQ ID NO: 139102 - DNA, 603 bp, Zea Mays
ccaggcatcaagaggtcaagattccaggaggcctaaaataggtaaacttgttgttctataaacacctgttctccagattttatgttttctttgagcaatgtaggctttgttatgccactatttatttcctactatttttatgtgtggcaccaaaattgtagtacccttctctacaaaacctgattgctatgtactgttactactcttccttaccttatctcaagatccatgtattgtaccacaaaattcacacccaccggtggaagaggtctcttatggtgcttcagctccacatgctcttcagttccctcgagtaaaagaggttatggtcaatggcgttcatgtgaaagatgaaatactgcgagacttgcatggtataccagcctccttggtgctcacactgctccaaatgtgataactgtgtggagcgctttgatcatcactgcccttgggttgggtaatgtaatggagagcttagtaatgttgatttctttattttctcagaggaaacaagttatggattttttttagaatacaacctggtagctgttcctacaaaacagtctaggcttatctgcatttgtcttcctttgcatcaaaatt

SEQ ID NO: 139103 - DNA, 937 bp, Zea Mays
taattttgcatgagccagctgtttttttgaaaccttccagttcctgaaatggattgtattgctaaaatcgtcgaagttgcaccaatcagggtttatgaagttgcaaccttttataccatgtttaacaggactaaggttggtaaataccaccttctggtgtgtggaactacaccttgtatgattcgtggttcacgtgaaatcgaagagacgttgttggagcaccttggagttaaacgaaatgaggtgaccagtgatggtttattttctgttggagaaatggagtgcatgggttgctgtgtgaatgctcctatgattgctgtggctgactactcgaaaggctcagagggttacacatataactactatgaggacctcactccaaaacgagttgttgagattgttgagatgcttagaagaggtgaaacaccccctcgaggtacacagcacccagagcgaaaaaactgtggccctgccggggggaacaccaccttgcacggagagccgaaacctcctccatgcagggatctggatgcctgctaggtttgcttcggagcattacgagcacgcgcataacttggctcgtactgtaaggtgtgcaaactgcacacagcggaggctgtgttatttgtattctgaagctttcttgtgtttcgtcaagaaagcttctctaacttttatcctgcactatcagataaacggtaaattgatagagaataagatgttttcgagctcatgtttagtggcaaacgctttatatttttggcaagctgtgaaggagctgaaccagtgacaactcgaagaattcattttgttgtattaagtcttcttgttagcccattaaacgatgagatcgtatacttgaaattctcgaattttacaaatcaacattggattctctgcaatgacagatggttgttatcgtatctatcattctcaa

SEQ ID NO: 139104 - DNA, 1387 bp, Zea Mays
tcacacggacccgttgcgtgagcgcacccctcgtactcccatagtcccatcccatggaggccaccccgatctccatgaagccaccgtctccggcgccggcggcgccacccccagccactctggagcccggggacttgccaacgcatgccttcggagggaccgagctggagccgtccagtatgaaccagctcgcaatagctccggaccccaaacggccgagggtggaggaggctgcggacggcaacgggtgcaagcattgcgcctgcaaaaagtccagatgcttgaagctctattgcccatgtttttctggaggtggttattgctctgataagtgtggctgccaaccatgtttcaacaaagaagcttttgcagaaacagttcatactactcgcaaggtgttactttcgagacagaagcgtatgtcaatgaaaatcaataggagacctgaggcgaataccgaaccaatggaagatgctcaccattcttcttcttcaactccaccaaagagaggttgcaactgcaagaagtcaagttgcctaaagaaatactgtgattgctaccaggatgggactggatgttccttgttttgccgctgtgacgattgccagaacccttttgggaaaaatgaaggcataatggctgacgacagtaagcggtatttatacactggtgctgatttggatcacagcgagggcgaacatgacttcgttgtggagcgctcgcctcgtctgcaatcacctatctcgaaggagtcttccttcccaccaaaccccacctcatctcagggcgtcaagcagagacgcgcacgttttcccacacgcgatatcccagtggcaggcgctgccccgctcgtggcactgttccaacaagaggaacagcagcgaccgagccatggacgactccgcgaactacaagaactcgaaccatgactactggcaggtacccaagcacgaggacagctacagcatatcgaaatgcgtccagatcctgaacggcatggcggagctgtcgcaggtggagaaatcggttgcccccgacgtcttcctgcagccgggcaaccgggaaattttcgtctccctcagcggcgacgtgcgcgccatgtggctgaagcgcaagattcagcacctggcttaaattttccttgtgctgtgccgttcttccgagtggagtacaatcttttagattgtgcatgttcttctggtcgtggggtgggcgtgcacaggattctaggttcttttttcgccctgtatactgaggtgtatttctggattacggttatgtattgtctttgtagagagagccgttttcgagcctggtatcggctataataaaatgagattatacattgtttcccggctatggttgccagactgtcatgtacatttcc

SEQ ID NO: 139105 - DNA, 1166 bp, Zea Mays
tgacttgccagatccctgactataataagggtgtaggaggtgtaagaatgctttgtgaatctcataaaaacattatcaccttttgaatttgcagctattgcccatgtttttctggaggtggttattgctctgataagtgtggctgccaaccatgtttcaacaaagaagcttttgcagaaacagttcatactactcgcaaggtgttactttcgagacagaagcgtatgtcaatgaaaatcaataggagacctgaggcgaataccgaaccaatggaagatgctcaccattcttcttcttcaactccaccaaagagaggttgcaactgcaagaagtcaagttgcctaaagaaatactgtgattgctaccaggatgggactggatgttccttgttttgccgctgtgacgattgccagaacccttttgggaaaaatgaaggcataatggctgacgacagtaagcggtatttatacactggtgctgatttggatcacagcgagggcgaacatgacttcgttgtggagcgctcgcctcgtctgcaatcacctatctcgaaggagtcttccttcccaccaaaccccacctcatctcagggcgtcaagcagagacgcgcacgttttcccacacgcgatatcccagtggcaggcgctgccccgctcgtggcactgttccaacaagaggaacagcagcgaccgagccatggacgactccgcgaactacaagaactcgaaccatgactactggcaggtacccaagcacgaggacagctacagcatatcgaaatgcgtccagatcctgaacggcatggcggagctgtcgcaggtggagaaatcggttgcccccgacgtcttcctgcagccgggcaaccgggaaattttcgtctccctcagcggcgacgtgcgcgccatgtggctgaagcgcaagattcagcacctggcttaaattttccttgtgctgtgccgttcttccgagtggagtacaatcttttagattgtgcatgttcttctggtcgtggggtgggcgtgcacaggattctaggttcttttttcgccctgtatactgaggtgtatttctggattacggttatgtattgtctttgtagagagagccgttttcgagcctggtatcggctataataaaatgagattatacattgtttcccggctatg

SEQ ID NO: 139106 - DNA, 1461 bp, Zea Mays
tcacacggacccgttgcgtgagcgcacccctcgtactcccatagtcccatcccatggaggccaccccgatctccatgaagccaccgtctccggcgccggcggcgccacccccagccactctggagcccggggacttgccaacgcatgccttcggagggaccgagctggagccgtccagtatgaaccagctcgcaatagctccggaccccaaacggtgagggttcggcggccccgggcctggggaggacttgggtttctcaatctgggcgtgtcttggggccgttgactggtctgatttgtggtgctttgtgttcgagcaggccgagggtggaggaggctgcggacggcaacgggtgcaagcattgcgcctgcaaaaagtccagatgcttgaagctctattgcccatgtttttctggaggtggttattgctctgataagtgtggctgccaaccatgtttcaacaaagaagcttttgcagaaacagttcatactactcgcaaggtgttactttcgagacagaagcgtatgtcaatgaaaatcaataggagacctgaggcgaataccgaaccaatggaagatgctcaccattcttcttcttcaactccaccaaagagaggttgcaactgcaagaagtcaagttgcctaaagaaatactgtgattgctaccaggtttcgtcttttttttttcttctcaagttctttgctaaataggtgagacaagattatgaaactcagtgttattgacaggatgggactggatgttccttgttttgccgctgtgacgattgccagaacccttttgggaaaaatgaaggcataatggctgacgacagtaagcggtatttatacactggtgctgatttggatcacagcgagggcgaacatgacttcgttgtggagcgctcgcctcgtctgcaatcacctatctcgaaggagtcttccttcccaccaaaccccacctcatctcagggcgtcaagcagagacgcgcacgttttcccacacgcgatatcccagtggcaggcgctgccccgctcgtggcactgttccaacaagaggaacagcagcgaccgagccatggacgactccgcgaactacaagaactcgaaccatgactactggcaggtggagaaatcggttgcccccgacgtcttcctgcagccgggcaaccgggaaattttcgtctccctcagcggcgacgtgcgcgccatgtggctgaagcgcaagattcagcacctggcttaaattttccttgtgctgtgccgttcttccgagtggagtacaatcttttagattgtgcatgttcttctggtcgtggggtgggcgtgcacaggattctaggttcttttttcgccctgtatactgaggtgtatttctggattacggttatgtattgtctttgtagagagagccgttttcgagcctggtatcggctataataaaatgagattatacattgtttc

SEQ ID NO: 139107 - DNA, 1134 bp, Zea Mays
tcacacggacccgttgcgtgagcgcacccctcgtactcccatagtcccatcccatggaggccaccccgatctccatgaagccaccgtctccggcgccggcggcgccacccccagccactctggagcccggggacttgccaacgcatgccttcggagggaccgagctggagccgtccagtatgaaccagctcgcaatagctccggaccccaaacggccgagggtggaggaggctgcggacggcaacgggtgcaagcattgcgcctgcaaaaagtccagatgcttgaagctctattgcccatgtttttctggaggtggttattgctctgataagtgtggctgccaaccatgtttcaacaaagaagcttttgcagaaacagttcatactactcgcaaggtgttactttcgagacagaagcgtatgtcaatgaaaatcaataggagacctgaggcgaataccgaaccaatggaagatgctcaccattcttcttcttcaactccaccaaagagaggttgcaactgcaagaagtcaagttgcctaaagaaatactgtgattgctaccaggatgggactggatgttccttgttttgccgctgtgacgattgccagaacccttttgggaaaaatgaaggcataatggctgacgacagtaagcggtatttatacactggtgctgatttggatcacagcgagggcgaacatgacttcgttgtggagcgctcgcctcgtctgcaatcacctatctcgaaggagtcttccttcccaccaaaccccacctcatctcagggcgtcaagcagagacgcgcacgttttcccacacgcgatatcccagtggcaggcgctgccccgctcgtggcactgttccaacaagaggaacagcagcgaccgagccatggacgactccgcgaactacaagaactcgaaccatgactactggcaggtacccaagcacgaggacagctacagcatatcgaaatgcgtccagatcctgaacggcatggcggagctgtcgcaggtggagaaatcggttgcccccgacgtcttcctgcagccgggcaaccgggaaattttcgtctccctcagcggcgacgtgcgcgccatgtggctgaagcgcaagattcagcacctggcttaa

SEQ ID NO: 139108 - DNA, 103 bp, Zea Mays
cggtatgacacggtacaaaggactattttatcaaattctaaattatagcgactatttcgttgaaatagttcgaaatgaggtttataatagcaaaaaaaaaaaa

SEQ ID NO: 139109 - DNA, 1983 bp, Zea Mays
tttttttatggagtcaaatgaagatactcttgatatgagaacgttatatttttttgacgagatctaaactttctagttttaagtcaagatcattaaatcgctaaaaaaagacacattcagcttaaaggaattttggattttttatacagatattgttaaaaccaaatctaactgaaaccgcacgaaagataaaaaaagtttgaattaataacacgtgacaaatacaaccttatataatggcacaaaaggccttgataacggccccaacccggtcgttgcgctggcagcctcaaagcgcccgcgaaaagagccactgcgccgcgccgcgccgccgcccctccgactccgcgtcggtgatcaaccgtctcgtctccgtgacccatccgtccaccgtgcttctcgcttcctgccgaagaggagggaggtctcgcggcgcggggcgcccgattatccgaccgaccggccgagatggtgctcgcggagctgggcgggagcatcgcccgcgcactggcgcggatgagcaacgccaccgtggtggacgagaaggtgctagcagactgcctcaacgagatctgccgcgcgctcctgcaggccgacgtccgcttcgacacggtccgcgacgtcaaggccaacatcaatcgcattgtcaatctcgacgcgctcgccgccggcaccaacaagcgccgcatcatacagcaggccgttgtcgatgagttgcgcaggatgctggatcccgggaagccatccttcacccccagcaaagggaagcccaatgtggtcatgttcgtcggcttgcagggttctgggaaaactactacctgcaccaagtacgcagattatcatcgacggaagggatttaatcctgcacttgtttgtgctgatacattcagagccggtgcttttgatcaactgaaacagaatgcaacaaaagccaagataccattctacggaagttacaccgaatcagatcctgtgaaaattgctgttgagggtgtggacatgttcatgaaagaaaagtatgatctcattattgttgatacaagtggacgccacaagcaagaagctgccctcttcgaagaaatgcgccaagtttcagaagctacaaaaccagacctggtgatattcgttatggatggtagtattggtcaagctgcatttgatcaggcacaagcatttaaacagagtgcttcggttggtgctgtgattgttacaaaaatggatggtcatgcgaaaggtggcggtgcacttagcgcggttgcagctacaaaaagccctgtgatatttattggaactggagaacatattccagactttgaggttttcgaagtgaatccattcgttagccgtctcttgggtatgggtgacttgtctggcttggtgaacaagatccaggaatttatgcctgataatcagcaaatgcagatcatggataagttgggtgaaggaaccttcacactcaggcttctatatgagatgttccagaacctccagagaataggtcctcttggacagctcgtctctatgatacctggatttagcggccagtttattgaaaagggaaatgagaaggaaggccaagcgaagattaagcggtacatgacaatgatggactccatgaccgatgcagagcttgacgggacggacccaaagctgatgaaccagtcacgaatcaaccggatcgctcggggatccggcaggcgcgtggaggaagtggtgcacatgctggacgagtacaagcgaattgccaaggtgtggaagaaattgccagtgttgaacaacaacaggagatcggatatgaaccgcgacattaggcgcataagcgatgcgattcctcccaatatgctgactcagcttggtggcatcgctgggctgcagaatatgatcaaacaaatgggcgggcgcgatcgaagtagatgagataaaccattcaagtcgtggatagcaaccgttaggtataggtaggctgtgagtactacttggtgg

SEQ ID NO: 139110 - DNA, 1524 bp, Zea Mays
acctaaaccttgctaccatataaaccttttcactgctccagccgccgccgccgccgtttcttcgtcttcctcgcagcgccgccgctccatcttccgctgatccgctcgctcccgcctctcgccacgcaggcggcggcgctcaggcccgtgatttcagcgacggcgtcagcggcttcccctcccgtctcttcccagtcgcctcgcgccctcgcctccggtcctccgcacaccggccggtgaccctgcgtgcgtgcctctctctctctctctctctctctctctctatctctcctcccgcctccagttgatcgtcaacggcgcccgaccccggcggctgcgccgcgcgcagcctgagggcagcgggagcgagcagccgctgctccaccaaggcggtctcgccgctttgggagcgcttatgccccaaagtgaagcgttacctgtcctcttagagcttcagcgcgctgaagcgtgctcagtgccgctttttggaaccctgtttatcattttgtcttctgctatctgcagtttagatacgattatacgaaatgttcctcagatgcatataattatgagttagttattctgaaccttctactgtgaaatgatttctcaccattctgatcacgctgtccattattgtgtttgtggttatatcttcttcattttatatgttcacgtagatccaccatgactggtgtcagcactggattgttgacgggcttgaggagggtcatggaacagcaaaggatttcaaccgctttctgcagacaatcacgagtttcgagctctactgtttctttctctgacctcgatgagaagggtgacatggaatatgatgataactctccaaattcaaagagggagttacgaccccaaggtgtagatcccaataagggctgggaattccgtggtgtgcacagggccatcatctgtggcaaagttggacaagtccctgtgcaaaaaattttaaggaatgggcatacagtaaccgtttttactgttggaactggtggcatgtttgaccagagggtaattgggcctaaggatttgccaaagccagctcagtggcaccgcatagctgtccataatgactacttaagtgcttatgctgttcagaagctggtgaagaatgttaatgatcaagtcaaaaacatacctgagatatgtgttcgacgtgatggcaagattcaattggttaaatctggggacagtgctgctaacatatcattagatgaactaagagaaggactgttctagctatagtgaaagatgtcaggagtatgcttctggcttgaggcaagtttgagtatgtttgtgcttcttagtctcagcactactagtattagagtgatgcttcatgcttgcgtacccctctggctgggttttcattcgtttgaactctagcttatattgccaaatttacttatctgcagaatatttgagccctcaatgaaacatctctctgtgtaatttactgctactgtcttttccatgcgatgcgcatctgtcattaactcattatct

SEQ ID NO: 139111 - DNA, 1090 bp, Zea Mays
acctaaaccttgctaccatataaaccttttcactgctccagccgccgccgccgccgtttcttcgtcttcctcgcagcgccgccgctccatcttccgctgatccgctcgctcccgcctctcgccacgcaggcggcggcgctcaggcccgtgatttcagcgacggcgtcagcggcttcccctcccgtctcttcccagtcgcctcgcgccctcgcctccggtcctccgcacaccggccggtgaccctgcatccaccatgactggtgtcagcactggattgttgacgggcttgaggagggtcatggaacagcaaaggatttcaaccgctttctgcagacaatcacgagtttcgagctctactgtttctttctctgacctcgatgagaagggtgacatggaatatgatgataactctccaaattcaaagagggagttacgaccccaaggtgtagatcccaataagggctgggaattccgtggtgtgcacagggccatcatctgtggcaaagttggacaagtccctgtgcaaaaaattttaaggaatgggcatacagtaaccgtttttactgttggaactggtggcatgtttgaccagagggtaattgggcctaaggatttgccaaagccagctcagtggcaccgcatagctgtccataatgactacttaagtgcttatgctgttcagaagctggtgaagaatgttaatgatcaagtcaaaaacatacctgagatatgtgttcgacgtgatggcaagattcaattggttaaatctggggacagtgctgctaacatatcattagatgaactaagagaaggactgttctagctatagtgaaagatgtcaggagtatgcttctggcttgaggcaagtttgagtatgtttgtgcttcttagtctcagcactactagtattagagtgatgcttcatgcttgcgtacccctctggctgggttttcattcgtttgaactctagcttatattgccaaatttacttatctgcagaatatttgagccctcaatgaaacatctctctgtgtaatttactgctactgtcttttccatgcgatgcgcatctgtcattaactcattatct

SEQ ID NO: 139112 - DNA, 1137 bp, Zea Mays
acctaaaccttgctaccatataaaccttttcactgctccagccgccgccgccgccgtttcttcgtcttcctcgcagcgccgccgctccatcttccgctgatccgctcgctcccgcctctcgccacgcaggcggcggcgctcaggcccgtgatttcagcgacggcgtcagcggcttcccctcccgtctcttcccagtcgcctcgcgccctcgcctccggtcctccgcacaccggccggtgaccctgcatccaccatgactggtgtcagcactggattgttgacgggcttgaggagggtcatggaacagcaaaggatttcaaccgctttctgcagacaatcacgagtttcgagctctactgtttctttctctgacctcgatgagaagggtgacatggaatatgatgataactctccaaattcaaagagggagttacgaccccaaggtgtagatcccaataagggctgggaattccgtggtgtgcacagggccatcatctgtggcaaagttggacaagtccctgtgcaaaaaattttaaggaatgggcatacagtaaccgtttttactgttggaactggtggcatgtttgaccagagggtaattgggcctaaggatttgccaaagccagctcagtggcaccgcatagctgtccataatgactacttaagtgcttatgctgttcagaagctggtgaagaattctgctgtctatgttgagggtgatattgaaaccagggtctacaatgacagtgttaatgatcaagtcaaaaacatacctgagatatgtgttcgacgtgatggcaagattcaattggttaaatctggggacagtgctgctaacatatcattagatgaactaagagaaggactgttctagctatagtgaaagatgtcaggagtatgcttctggcttgaggcaagtttgagtatgtttgtgcttcttagtctcagcactactagtattagagtgatgcttcatgcttgcgtacccctctggctgggttttcattcgtttgaactctagcttatattgccaaatttacttatctgcagaatatttgagccctcaatgaaacatctctctgtgtaatttactgctactgtcttttccatgcgatgcgcatctgtcattaactcatt

SEQ ID NO: 139113 - DNA, 1142 bp, Zea Mays
acctaaaccttgctaccatataaaccttttcactgctccagccgccgccgccgccgtttcttcgtcttcctcgcagcgccgccgctccatcttccgctgatccgctcgctcccgcctctcgccacgcaggcggcggcgctcaggcccgtgatttcagcgacggcgtcagcggcttcccctcccgtctcttcccagtcgcctcgcgccctcgcctccggtcctccgcacaccggccggtgaccctgcatccaccatgactggtgtcagcactggattgttgacgggcttgaggagggtcatggaacagcaaaggatttcaaccgctttctgcagacaatcacgagtttcgagctctactgtttctttctctgacctcgatgagaagggtgacatggaatatgatgataactctccaaattcaaagagggagttacgaccccaaggtgtagatcccaataagggctgggaattccgtggtgtgcacagggccatcatctgtggcaaagttggacaagtccctgtgcaaaaaattttaaggaatgggcatacagtaaccgtttttactgttggaactggtggcatgtttgaccagagggtaattgggcctaaggatttgccaaagccagctcagtggcaccgcatagctgtccataatgactacttaagtgcttatgctgttcagaagctggtgaagaattctgctgtctatgttgagggtgatattgaaaccagggtctacaatgacagtgttaatgatcaagtcaaaaacatacctgagatatgtgttcgacgtgatggcaagattcaattggttaaatctggggacagtgctgctaacatatcattagatgaactaatctttggttgcaggagaaggactgttctagctatagtgaaagatgtcaggagtatgcttctggcttgaggcaagtttgagtatgtttgtgcttcttagtctcagcactactagtattagagtgatgcttcatgcttgcgtacccctctggctgggttttcattcgtttgaactctagcttatattgccaaatttacttatctgcagaatatttgagccctcaatgaaacatctctctgtgtaatttactgctactgtcttttccatgcgatgcgcatctgtcatt

SEQ ID NO: 139114 - DNA, 1559 bp, Zea Mays
acctaaaccttgctaccatataaaccttttcactgctccagccgccgccgccgccgtttcttcgtcttcctcgcagcgccgccgctccatcttccgctgatccgctcgctcccgcctctcgccacgcaggcggcggcgctcaggcccgtgatttcagcgacggcgtcagcggcttcccctcccgtctcttcccagtcgcctcgcgccctcgcctccggtcctccgcacaccggccggtgaccctgcatccaccatgactggtgtcagcactggattgttgacgggcttgaggagggtcatggaacagcaaaggatttcaaccgctttctgcagacaatcacgagtttcgagctctactgtttctttctctgacctcgatgagaagggtgacatggaatatgatgataactctccaaattcaaagagggagttacgaccccaaggtgtagatcccaataagggctgggaattccgtggtgtgcacagggtatggacataaaactggacatcctatatcttttatatgaaattctgcccgttgttttgtttttgaggagcactattgtacagttataatctgttctgcttttgctaggccatcatctgtggcaaagttggacaagtccctgtgcaaaaaattttaaggaatgggcatacagtaaccgtttttactgttggaactggtggcatgtttgaccagagggtaattgggcctaaggatttgccaaagccagctcagtggcaccgcatagctgtccataatgactacttaagtgcttatgctgttcagaagctggtgaagaagtatgtggtttaataaaaaaatcctcatcttaccttgaatacaactatatctatcttttttgctatggatgctgttatatatatatatatttttttttcttttaccttgtgttagttctgctgtctatgttgagggtgatattgaaaccagggtctacaatgacagtgttaatgatcaagtcaaaaacatacctgagatatgtgttcgacgtgatggtatgctgattcgcacaagcttctttcctatcatgtttattattgagactgtattccacataagtagttttcatatgtaactcaacagcaatgacatttttttacgtgataacatagggtgtccttgtatggtaggttacatctaccttttattttcatgtctccgttgaagaaagcctaatgtttggataactattctatgtgcaggcaagattcaattggttaaatctggggacagtgctgctaacatatcattagatgaactaagagaaggactgttctagctatagtgaaagatgtcaggagtatgcttctggcttgaggcaagtttgagtatgtttgtgcttcttagtctcagcactactagtattagagtgatgcttcatgcttgcgtacccctctggctgggttttcattcgtttgaactctagcttatattgccaaatttacttatctgcagaatatttgagccctcaatgaaacatctctctgtgtaatttactgctactgtcttttccatgcgatgcgcatctgtcatt

SEQ ID NO: 139115 - DNA, 819 bp, Zea Mays
acctaaaccttgctaccatataaaccttttcactgctccagccgccgccgccgccgtttcttcgtcttcctcgcagcgccgccgctccatcttccgctgatccgctcgctcccgcctctcgccacgcaggcggcggcgctcaggcccgtgatttcagcgacggcgtcagcggcttcccctcccgtctcttcccagtcgcctcgcgccctcgcctccggtcctccgcacaccggccggtgaccctgcatccaccatgactggtgtcagcactggattgttgacgggcttgaggagggtcatggaacagcaaaggatttcaaccgctttctgcagacaatcacgagtttcgagctctactgtttctttctctgacctcgatgagaagggtgacatggaatatgatgataactctccaaattcaaagagggagttacgaccccaaggtgtagatcccaataagggctgggaattccgtggtgtgcacagggcaagattcaattggttaaatctggggacagtgctgctaacatatcattagatgaactaagagaaggactgttctagctatagtgaaagatgtcaggagtatgcttctggcttgaggcaagtttgagtatgtttgtgcttcttagtctcagcactactagtattagagtgatgcttcatgcttgcgtacccctctggctgggttttcattcgtttgaactctagcttatattgccaaatttacttatctgcagaatatttgagccctcaatgaaacatctctctgtgtaatttactgctactgtcttttccatgcgatgcgcatctgtcatt

SEQ ID NO: 139116 - DNA, 734 bp, Zea Mays
cattttatatgttcacgtagatccaccatgactggtgtcagcactggattgttgacgggcttgaggagggtcatggaacagcaaaggatttcaaccgctttctgcagacaatcacgagtttcgagctctactgtttctttctctgacctcgatgagaagggtgacatggaatatgatgataactctccaaattcaaagagggagttacgaccccaaggtgtagatcccaataagggctgggaattccgtggtgtgcacagggccatcatctgtggcaaagttggacaagtccctgtgcaaaaaattttaaggaatgggcatacagtaaccgtttttactgttggaactggtggcatgtttgaccagagggtaattgggcctaaggatttgccaaagccagctcagtggcaccgcatagctgtccataatgactacttaagtgcttatgctgttcagaagctggtgaagaattctgctgtctatgttgagggtgatattgaaaccagggtctacaatgacagtgttaatgatcaagtcaaaaacatacctgagatatgtgttcgacgtgatggcaagattcaattggttaaatctggggacagtgctgctaacatatcattagatgaactaagagaaggactgttctagctatagtgaaagatgtcaggagtatgcttctggcttgagaatatttgagccctcaatgaaacatctctctgtgtaatttactgcta

SEQ ID NO: 139117 - DNA, 881 bp, Zea Mays
acctaaaccttgctaccatataaaccttttcactgctccagccgccgccgccgccgtttcttcgtcttcctcgcagcgccgccgctccatcttccgctgatccgctcgctcccgcctctcgccacgcaggcggcggcgctcaggcccgtgatttcagcgacggcgtcagcggcttcccctcccgtctcttcccagtcgcctcgcgccctcgcctccggtcctccgcacaccggccggtgaccctgcatccaccatgactggtgtcagcactggattgttgacgggcttgaggagggtcatggaacagcaaaggatttcaaccgctttctgcagacaatcacgagtttcgagctctactgtttctttctctgacctcgatgagaagggtgacatggaatatgatgataactctccaaattcaaagagggagttacgaccccaaggtgtagatcccaataagggctgggaattccgtggtgtgcacagggccatcatctgtggcaaagttggacaagtccctgtgcaaaaaattttaaggaatgggcatacagtaaccgtttttactgttggaactggtggcatgtttgaccagagggtaattgggcctaaggatttgccaaagccagctcagtggcaccgcatagctgtccataatgactacttaagtgcttatgctgttcagaagctggtgaagaagtatgtggtttaataaaaaaatcctcatcttaccttgaatacaactatatctatcttttttgctatggatgctgttatatatatatatatttttttttcttttaccttgtgttagttctgctgtctatgttgagggtgatattgaaaccagggtctacaatgacagtgttaatgatcaagtcaaa

SEQ ID NO: 139118 - DNA, 1296 bp, Zea Mays
tataatttatggatggaatgacaagccaagctcacttctggtgaaattgcagatctcaccttagttgcctcctccgtcttcgctccctccgcagcgtcagatcggccgtcgctcgccgagccctagcgccgccgatctcagcccgtaccagtcttgcagatcggggtcgcgccgcggcggcaagaacgatggccgaggaggccaagtacctggagacggcgcgggccgaccgctccgtgtggctcatgaagtgccccccggtcgtctcccgcgcctggcaggccgcctccgcctccgcctcttcctccgacgccgctaacgccaaccccgttgtcgccaaggtcgtcctttccctcgacctgctccgcccagaagaacgccccgaagagcgcccggaagagcccacgctccagttcaagatggagttggcacaaactaacactgggaatacacctaagagctactctttgaatatgttcaaagatttcgtgcctatgtgtgttttctccgaatctaaccaagggaaactttcatgcgaaggaaaagtcgagcataaatttgacatggaacctcacagtgataatttggcgaactatggaaagttatgtcgtgaaagaacacaaaaatatatggttaaatctagacaagtgcaggtacttgacaatgaccacggtatgagcatgagaccaatgcctggcttggttggtctcataccttctggttcaaaggaaaagaagaaacaagcaccagcgaaaccatccgatgtcaaaagaactcgtagggatcgtacggagatggaaaacattatattcaagctttttgaaaggcaacccaattgggcactaaaggcgctggtgcaagaaactgaccagccagagcaatttctgaaggagatattgaacgatctctgtgtgtataataaacgaggaccaaaccagggaactcatgagcttaagccagagtacaagaaatccacaggggacactgatgctgcttaaagatgatagacgacttggttgtttatgtgcagaatcgctagttctctgtcggtaactcgggcacacaaacacaagcgtgatctagttttatttgtatgctttaagaggtgttatttgtaagctggatacacatttgtttagagaggaaaaggggaaagataattgaaacaaaatgtaagagtctaaattgttggaccaatgttctttatcgggtattaaatttagtcagttggaagtggagtgaataggtgaaacctgaaaattataaaactttgaacacgaattttaccttgagtta

SEQ ID NO: 139119 - DNA, 1294 bp, Zea Mays
ctgatggggaatttttgaaattaatgtctttgcaattggctgccccactgaaggcgtatgctcgaacaaattgttccaggactagttttgagtatactgggtggactctatttggcacgaatcaggctggtagagactcattggactgcagcaggaagaacaagaggaagaatgtcttgttagtgggcaaacttaattaatattcaaccaaagaaagtgttcatattcattcgactgcatagtttctgtgggctacatacgctacatactacacatggtattgttgaaagtgattgcaaactattaggtgactaattttaagagcagatgctatagttgatccgttggtgttgatgcttctcattatgtgtttgttttatatatatcatctctgcttttggtgcctgtcattcttacaccatgctattacaacgacagttcaagatggagttggcacaaactaacactgggaatacacctaagagctactctttgaatatgttcaaagatttcgtgcctatgtgtgttttctccgaatctaaccaagggaaactttcatgcgaaggaaaagtcgagcataaatttgacatggaacctcacagtgataatttggcgaactatggaaagttatgtcgtgaaagaacacaaaaatatatggttaaatctagacaagtgcaggtacttgacaatgaccacggtatgagcatgagaccaatgcctggcttggttggtctcataccttctggttcaaaggaaaagaagaaacaagcaccagcgaaaccatccgatgtcaaaagaactcgtagggatcgtacggagatggaaaacattatattcaagctttttgaaaggcaacccaattgggcactaaaggcgctggtgcaagaaactgaccagccagagcaatttctgaaggagatattgaacgatctctgtgtgtataataaacgaggaccaaaccagggaactcatgagcttaagccagagtacaagaaatccacaggggacactgatgctgcttaaagatgatagacgacttggttgtttatgtgcagaatcgctagttctctgtcggtaactcgggcacacaaacacaagcgtgatctagttttatttgtatgctttaagaggtgttatttgtaagctggatacacatttgtttagagaggaaaaggggaaagataattgaaacaaaatgtaagagtctaaattgttggaccaatgttctttatcgggtattaaatttagtcagttggaagtggagtgaataggtgaaacctgaaaattataaaac

SEQ ID NO: 139120 - DNA, 1701 bp, Zea Mays
cactctcacagcctcacttctccctctgccccacgcaaagcacccaaggcgcccacggccctacggcctcggcacctcccgctcaaaatcctcgccgcgccgcgcggagcgccgtagtgcccgagttcgcatgaagtgtgcctcctcgcgcccgcagccatgggagctcagcagagcgtcaacgcagggaaagccaaggtggatatgaaagtcgatctcacccacatgctgtgcgaggcgctgctgctgccgcccctcagaagctctggcgtcacgttatcacaaatcgttggaaggatctctctcaaacatccaaacctctttgggagaagtgagaagttggatgtgatattggataaaggaatcaacgactccaattttgtcattgcctatagacgccctagggctgagtggttatcacagcaatcatttgtatttcagcactcaatgacaccagaagttgccgtccatggattcccagctgataacttcacacgatcagggagcagagggataaaccttagtcgattgtcatttggtttggagcttaatgaaccagctacatcaaactggacatcgggaaccagtgttaaatttgagaatatccgtcctgttaataaccagggccactctattgccagagaccatgatggttttcctctgacatgcagtggtaatctccatgacaacatgatcatcttgaagcaagaatctggttatgcagatgtcaatgacaatagcttcttaaaagtaaacttccaaatggaacagggattgccacttgtacctaagtcattgaccttcaatagagttaaatgtgcagtttcaaaaggcattaagttgggtccgacatttttggttactagtttgacaggcggatccattgttggggacatggcaccttatcaagcttttgccataggtggacttggtagtgtccgaggctatggtgagggcgctgttggttcaggaagactatgtctaattgctaactgcgaatatacgattcccttggtgaagcatctggagggttctattttcatggactgtgggagtgacttagggtctgctcgtcatgtccctggtaatccagctctgcggcaggggaaaccaggatttggtattggatttggatacggacttcacttcaacactgacctaggtcagatccgtgtcgactacgctatgaatgcatttaaccgcaaaaccatctattttggaatcaacagtagcggtggctcttaggttatgaaagacatagctctcacttaacatagactggcaattcaattcgattcttttccgtggacatagaaggggagttctttttcttgacagtgtgttccggacatgccagcagaatcttattgtttgtactacgtgctggcattcaaaaggtgtatagttgggatccacaagatgcattcttcttattatttattgttatgatcttttttttgtgggtgtgggtagatgctgaacaaatgtttttgctgagaagatggtatgcttaggagtaggactgctccaaatatacttccactgcattatagcttaatttcattaggtttgcaaaatatatacaaatggatgttcatggtcaatgtaacttcgttagatgctaaatattttttaagttagacgctgagcaaacattttgcctgtatgataatgtgagaactgctcactgacgcttccatt

SEQ ID NO: 139121 - DNA, 1727 bp, Zea Mays
agcctcacttctccctctgccccacgcaaagcacccaaggcgcccacggccctacggcctcggcacctcccgctcaaaatcctcgccgcgccgcgcggagcgccgtagtgcccgagttcgcatgaagtgtgcctcctcgcgcccgcagccatgggagctcagcagagcgtcaacgcagggaaagccaaggtggatatgaaagtcgatctcacccacatgctgtgcgaggcgctgctgctgccgcccctcagaagctctggcgtcacgttatcacaaatcgttggaaggatctctctcaaacatccaaacctctttgggagaagtgagaagttggatgtgatattggataaaggaatcaacgactccaattttgtcattgcctatagacgccctagggctgagtggttatcacagcaatcatttgtatttcaggttgtcattgcactgtgtatcctggttattcttctacatttcttataagtaaagctgaagcactggaaacctatcattgttgataatcttttgattgaatttacatttttttcctcacgttcttatggtttgagcaatcagcactcaatgacaccagaagttgccgtccatggattcccagctgataacttcacacgatcagggagcagagggataaaccttagtcgattgtcatttggtttggagcttaatgaaccagctacatcaaactggacatcgggaaccagtgttaaatttgagaatatccgtcctgttaataaccagggccactctattgccagagaccatgatggttttcctctgacatgcagtggtaatctccatgacaacatgatcatcttgaagcaagaatctggttatgcagatgtcaatgacaatagcttcttaaaagtaaacttccaaatggaacagggattgccacttgtacctaagtcattgaccttcaatagagttaaatgtgcagtttcaaaaggcattaagttgggtccgacatttttggttactagtttgacaggcggatccattgttggggacatggcaccttatcaagcttttgccataggtggacttggtagtgtccgaggctatggtgagggcgctgttggttcaggaagactatgtctaattgctaactgcgaatatacgattcccttggtgaagcatctggagggttctattttcatggactgtgggagtgacttagggtctgctcgtcatgtccctggtaatccagctctgcggcaggggaaaccaggatttggtattggatttggatacggacttcacttcaacactgacctaggtcagatccgtgtcgactacgctatgaatgcatttaaccgcaaaaccatctattttggaatcaacagtagcggtggctcttaggttatgaaagacatagctctcacttaacatagactggcaattcaattcgattcttttccgtggacatagaaggggagttctttttcttgacagtgtgttccggacatgccagcagaatcttattgtttgtactacgtgctggcattcaaaaggtgtatagttgggatccacaagatgcattcttcttattatttattgttatgatcttttttttgtgggtgtgggtagatgctgaacaaatgtttttgctgagaagatggtatgcttaggagtaggactgctccaaatatacttccactgcattatagcttaatttcattaggtttgcaaaatatatacaaatggatgtt

SEQ ID NO: 139122 - DNA, 1666 bp, Zea Mays
agcctcacttctccctctgccccacgcaaagcacccaaggcgcccacggccctacggcctcggcacctcccgctcaaaatcctcgccgcgccgcgcggagcgccgtagtgcccgagttcgcatgaagtgtgcctcctcgcgcccgcagccatgggagctcagcagagcgtcaacgcagggaaagccaaggtggatatgaaagtcgatctcacccacatgctgtgcgaggcgctgctgctgccgcccctcagaagctctggcgtcacgttatcacaaatcgttggaaggatctctctcaaacatccaaacctctttgggagaagtgagaagttggatgtgatattggataaaggaatcaacgactccaattttgtcattgcctatagacgccctagggctgagtggttatcacagcaatcatttgtatttcagcactcaatgacaccagaagttgccgtccatggattcccagctgataacttcacacgatcagggagcagagggataaaccttagtcgattgtcatttggtttggagcttaatgaaccagctacatcaaactggacatcgggaaccagtgttaaatttgaggctggcctcaaacttaatttcaattgatcattgttaatttcatgttatacaggttccttatctgttgccttttcccacagaatatccgtcctgttaataaccagggccactctattgccagagaccatgatggttttcctctgacatgcagtggtaatctccatgacaacatgatcatcttgaagcaagaatctggttatgcagatgtcaatgacaatagcttcttaaaagtaaacttccaaatggaacagggattgccacttgtacctaagtcattgaccttcaatagagttaaatgtgcagtttcaaaaggcattaagttgggtccgacatttttggttactagtttgacaggcggatccattgttggggacatggcaccttatcaagcttttgccataggtggacttggtagtgtccgaggctatggtgagggcgctgttggttcaggaagactatgtctaattgctaactgcgaatatacgattcccttggtgaagcatctggagggttctattttcatggactgtgggagtgacttagggtctgctcgtcatgtccctggtaatccagctctgcggcaggggaaaccaggatttggtattggatttggatacggacttcacttcaacactgacctaggtcagatccgtgtcgactacgctatgaatgcatttaaccgcaaaaccatctattttggaatcaacagtagcggtggctcttaggttatgaaagacatagctctcacttaacatagactggcaattcaattcgattcttttccgtggacatagaaggggagttctttttcttgacagtgtgttccggacatgccagcagaatcttattgtttgtactacgtgctggcattcaaaaggtgtatagttgggatccacaagatgcattcttcttattatttattgttatgatcttttttttgtgggtgtgggtagatgctgaacaaatgtttttgctgagaagatggtatgcttaggagtaggactgctccaaatatacttccactgcattatagcttaatttcattaggtttgcaaaatatatacaaatggatgtt

SEQ ID NO: 139123 - DNA, 2206 bp, Zea Mays
cactctcacagcctcacttctccctctgccccacgcaaagcacccaaggcgcccacggccctacggcctcggcacctcccgctcaaaatcctcgccgcgccgcgcggagcgccgtagtgcccgagttcgcatgaagtgtgcctcctcgcgcccgcagccatgggagctcagcagagcgtcaacgcagggaaagccaaggtggatatgaaagtcgatctcacccacatgctgtgcgaggcgctgctgctgccgcccctcagaagctctggcgtcacgttatcacaaatcgttggaaggtaggcatgcatccactggtatatttgttcaagtgcaccgtgtactttagcatccggtgtttccctgtctctttgtgcatgcctttgatgcctgatgcctgacgcctagaacatgtctgtcctagcacgttcttgcacatgcacaacaatgtcttgcgtgttcatgacttcatgcacgtgcagattcttacactatcttcataccagatctgtgcatttgggtgacatgcctatgcatctctccgtgagtctgtatatatgtattttttgtcagagattatactaccgcgttgtgaatctagaatttggcctgcaggatctctctcaaacatccaaacctctttgggagaagtgagaagttggatgtgatattggataaaggaatcaacgactccaattttgtcattgcctatagacgccctagggctgagtggttatcacagcaatcatttgtatttcaggttgtcattgcactgtgtatcctggttattcttctacatttcttataagtaaagctgaagcactggaaacctatcattgttgataatcttttgattgaatttacatttttttcctcacgttcttatggtttgagcaatcagcactcaatgacaccagaagttgccgtccatggattcccagctgataacttcacacgatcagggagcagagggataaaccttagtcgattgtcatttggtttggagcttaatgaaccagctacatcaaactggacatcgggaaccagtgttaaatttgaggctggcctcaaacttaatttcaattgatcattgttaatttcatgttatacaggttccttatctgttgccttttcccacagaatatccgtcctgttaataaccagggccactctattgccagagaccatgatggttttcctctgacatgcagtggtaatctccatgacaacatgatcatcttgaagcaagaatctggttatgcagatgtcaatgacaatagcttcttaaaagtaaacttccaaatggaacagggattgccacttgtacctaagtcattgaccttcaatagagttaaatgtgcagtttcaaaaggcattaagttgggtccgacatttttggttactaggtaatgtgtacccctactattcattctctggaaatctcttctctgacagctcttcatatctctctacctcacagtttgacaggcggatccattgttggggacatggcaccttatcaagcttttgccataggtggacttggtagtgtccgaggctatggtgagggcgctgttggttcaggaagactatgtctaattgctaactgcgaatatacgattcccttggtgaagcatctggagggttctattttcatggactgtgggagtgacttagggtctgctcgtcatgtccctggtaatccagctctgcggcaggggaaaccaggatttggtattggatttggatacggacttcacttcaacactgacctaggtcagatccgtgtcgactacgctatgaatgcatttaaccgcaaaaccatctattttggaatcaacagtagcggtggctcttaggttatgaaagacatagctctcacttaacatagactggcaattcaattcgattcttttccgtggacatagaaggggagttctttttcttgacagtgtgttccggacatgccagcagaatcttattgtttgtactacgtgctggcattcaaaaggtgtatagttgggatccacaagatgcattcttcttattatttattgttatgatcttttttttgtgggtgtgggtagatgctgaacaaatgtttttgctgagaagatggtatgcttaggagtaggactgctccaaatatacttccactgcattatagcttaatttcattaggtttgcaaaatatatacaaatggatgtt

SEQ ID NO: 139124 - DNA, 1840 bp, Zea Mays
ctctcctcctggctcactctgtgcgctcctcggcgcgtgcccacgtctcccacgcctccctccctgcattccccccttcagatccggtctgccccgccgccgccgatgtccgaagatcccgtgggatcccgccgctggcggtgcgacctcggcggcgacgagcgctggctctcgggggccgctggcgacgaccaattcgaccgcctcccggacgcgctcctcctcgtcatcttcaaccgcatcggcgacgtcaaggcgctcggccgctgctccctcgtctcccgccgcttccacgagctcgtgcccctcgtcgactccgtcctcgtccgcgtcgactgcgttatccccgacgagcccccctcctcctcgtcctcctcgtcaacgccgtcctctcctacggcgtccgtgcgcgcccgcggggtcttctcacagattgcgcgcatcgtgctcggcggcatcgtgaagcccatccaggcgcttggtcagatcctctcacccgccaactccgcctccggctttccggcatccgccgcttcgtcgctatcgtcgtcgtcgtcctcctcctcgccactgcctgctggggacgtgtcgcaccactcgccatcggaggtgctccgttccttcaaggagctccgccaccttcgcatcgagctcccagcgggcgagctcggcatggacgatggcgtgatgctcaagtggaaggctgacttcgggtccacactgggcagctgcgtcatccttggagcatcctcagcctcgccgtcgccctccccctcctcagctggctcagatagtccgagcgccgctccctctgatgacagtggccacaccgagcctgatgaatgtgacgattcaggaagcatccctgagtcgttctacacaaatggggggtttaagctgcgagtggtttggtcaatcagctcattgattgcggccgccgcgaggcattacttgctgcagccgatcattgctgatcacatgacgctcgagacattggacctgacagatgctgatggtcagggagtgctcaccatggacaagtgccaactgcaggagctgagggtgagaccggtgtcaacatctaggggctcacaccggacgctcatgccagagctttgcatgtggctgtggtatgcaccatgtattgagctgcctggggggttgttgctgaatggtgcaacgctggtggccatcaagccaagtgaggaaggaacaggggacacagtttggaatgaaactgctgatgcagcctgggtgttggatgcattcgaggagccatatagaacagcggcgaagatgcttctcaagcgaaggacctacagccttgagatgaattcattctaatctatgggagatggcattttggaagcttcagatgtgagaggatgttataactaatgttgtggatgcctttcatgcacctacttcggacgtggcaagtatgcgctattgtacgctatcagcaagaacatggatggaatcaaaacagaaattttgttaacttatgatgctggagtcgaaaggcaaaaccatggccgagttgattgtgttctctgagatcagatgtggcatagatagttttttttatatatatgtatccacatcaaggtactaactttatgtaatttctacttttggattgtggcattgtgccgcttgtttgcagaataacatgcaatgcgctctgtacatcaatgtgtgtcaagattggacccgtagatttggcattagtggaagctataaaattgttactagcacttcaaacagagtttgggaatgttgcttcctttcccccgtgaatctggaaatgttgtagccctgtatgatgtgattcagccct

SEQ ID NO: 139125 - DNA, 630 bp, Zea Mays
ctataattttatgcgctcgcaaaagaggcgtcgacttctaagttcagacgttactcaagattttgatgcaatgagaaagcagctagtgtcagattctgcagcaatatttaggtcaaaagttccggagtcactgatggaaaatctcattaaacgcctgagatcatacttcgagggcaaacattcaccacatgagtagtttttcatgcagttcttcagaagctacttaaggtgtcaattggatcttggtggtctactccctaacgcttcgcgcggcttattttgaggaattttttgttttctttgctgaggttgagacgaggagttctaagctgtatcttttgttgtttccctgatgttataggcaacgcaccaccatccccaccgcttctctgtctagaatgtagaagatacttccttttctccttttgtaagatactatagctggcagattaaagcaagagtttatggtgtttttgaccctttacaaatgtattttttgccccgatcagtctcagttttggtcaatgttctgttacgggcagattcgatagcaacatttttctagattttctggtgtaatctccggaagcaaattgacttgagaatacaatcttttatcgttctgatggt

SEQ ID NO: 139126 - DNA, 2007 bp, Zea Mays
atacacccgcctctctctcctggcctttgcattaaggagccacggacggtgggtctgtgttgcgacttgtctgtgtgtgctatacgacctgccaagtggcaagagcgccaacgccgtctccttgccatggccatcctgaacagagctgacactagtcacactaccaccgcatccaacggcagcgccaccccggctgcccccgttgccattgccatgccttcgcttcctcacccgccactggacgccgacgagttccgcaggcagggacgcctagtcgtggacttcatcgcggactactacgcgcgcatcgacgggtacccggtgcgcccggccgtcgcacctgggttcctgatccggcagcttcccgaggcagcgccggcgcggccggagcccgacgcgctcgccgcggcgctgcgcgacgtgcgcgacctcatcctgcccggcgtcacgcactggcagagcccgcgccacttcgcgcacttcgcggccacggccagcaacgtgggcgccctcggcgaggccctcgccgcggggcttaacgtgaacccgttcacgtgggccgcatcgccggcggccaccgagctagaggtcgtcgtcacagactggctcggcaaggcgctgcacctcccggagagcctgctgttctccggaggcggcgggggcacgctgctgggaacgtcctgcgaggccatgctctgcacaatcgtcgccgctagagaccggaagctcgccgaggtaggcgaggagcggataggagacctcgtggtgtactgctccgaccagacccacttctcgttccagaaggccgcgcgcatcgccggcattcgccgcgggaactgccgtgagataccgacctccagggagagcggcttcactctctcgcccaaggcgctggccgcggcagtgcgagccgacgaggcggcgggcagggtcccgctgttcctttgcgcgaccgtggggaccacaccgacggcggcggtggaccctctacgcgagctgtgcgccgccgtggcggggcacgacgtgtgggtgcacgtggacgcggcctacgccggcgccgcgtgcgtgtgcccggagttcagccacgttgtcgcgggcgtcgaggccgcggagtcgttcagcacgaacccgcacaagtggctcctcgccaacatggactgctgtgcgctctgggtgcggcgtccggctgcgctgacggccgcgctcggcaccgaccacgacgtgatcctcaaggacccggcggcggcgcaggcgcaggcgcagcagcagcagtgcagcgacggcggggtggtggactacaaggactggcaggtcgcgctgagccgccggttccgcgcgctgaagctatggctcgtgctccgctgccacggcgtggagggcctgcgcggcctcgtgcgcgcccacgtgcgcatggccgccgcgttcgaggccatggtgcgcggcgacgcgcggttcgaggtgcacgtgccgaggcagttcgcgctggtgtgcttccggctgcgcgccgtcgccgtcgccgtcgccggagagaagcgtgccggcgactacgacggggtggcagctggcaacgagctcaaccggaggctcctcgaggcggtgaacgcgacggggcgcgtgtacatgagctccgccgtggtcggcggcgcctacattctgcgctgcgccatcggcaactcgctgaccgaggagcggcacgtccgggaggcgtggagcgtggtgcaagagcaggccaccgctatcctgtctgccgcgaccgcgacggcgcgcacgaacgggctgacggttcgccgtgcgcgctgtgacgcggaggccgatgtcagcgacgtgccgacgccccagcagcctcttcctcttgggtagacgacggccgcctcatgattctgaaataagaccaatcgatgttgtggcaatctgtaattccatttagatataagcgtgcacatccgctcaaacttttgaataagaagggtctgcatcagcaggtgtactagttccacccaacaaata

SEQ ID NO: 139127 - DNA, 2425 bp, Zea Mays
ctagttctcccaccttaacaatctgagtgtttgcatcttgtgttttccatgtaattgattcagcgttttgtttgttcagggtcaatcgaagaatactctagatcaaatcacagaggtggatgatggaggatatatgaatcttggtgatttatttgataagttagaccatgaaagtaatgtaactcaacctgccaatgctgaagaagctaagaagagaaagttggcaagagctaggaacagaaaaaactcaaaactgcccagtcgtgttaaactatgtacaaaaggatctgatgctgagcaccaagttaaaaatatccctgtaagtattgctgcaaagccaaaccagaaggacatcaataaaaaaaagagatgtactttgaatggaggaaacaaggtctctggcaacaacactaaagttgtcttctctagtgataaatatatgtatacattttcccctcaatcaggcgggttggacattgaagcacctgagaaccagccttcagaaaggatcctcaaaaagcctaaaaacagtcgaagcaaacttcacatagcaggggatagtgcagtgaagaccgcaaagaataaatctgaacaaagagtaaagcaaaccataagatgttctgggggtgttgtagatgaaaatctaagagttctttctgaggctgaaaatgaaatagaatcgtttcagcttcacagactcgcaaaaggttgcacccaacataaacccttcgatgatagaagtaaacaaaacatggaatcaaacattggtccaaatacaccaagcattttacctgggaggtgccaatttgatgaggccatacacacaattcctacagtgaagaatgtctctgttaagaacggtagggcaaaatcaattgaacaaccagattacccaggatctatcagattatgcactgcacacaatactgccctgaagaaatgtgagggtaaagcttctaagctttcctgtgctttctgccagtctgatgataccacacaggaatctggagagatggttcactaccataatggaaagcaagtgccagcagcatttgatgcaggggctggtgtagtacattgccacaaaaactgcctggagtgggctcctgatgtctactttgaagatgactctgtctttaatcttgcaaatgagttggctagaagtaaaagaatcaaatgtgcttgctgtggaattaaaggtgctgcacttggatgctttgagacgagttgccgaaaaagcttccatctcacctgtgctagattaatcccagagtgcagatgggataatgaaaactttgtgatgctatgccctttgcaccaatcttcaaagttgcccagagaaacttctgggtttaaaaataagtcgcacaggaaactagcacgaaaaagttcatctgaagtaaacactagtcaaagccatgataataagtggacatggccatctggatcaccaccgaaatgggttctatgctgttcagccctttctgccgcagaaaagggtatcgtatcagaactcgcaaaaatagctggtgtgccaatctcaacaagttggagtcctaatgttacccatgttattgcatcaaccaacatgtctggttcttgcaagcgcacactgaagtttctgatggcaatcttgaatggcaaatgggttatctccatggactgggttaaaacttgcatggaacttatggaacctgctgatgaaatgaaatttgaagtttccactgatgtacatgggactgctgacggtcccaggttaggtagacaacgagttatcaacaagcaacctaaattattcgatggcattcaattctatctccatggagactataccaagtcgtacagaggctacctgcaagaccttgtggttgcagccggtggaactgtcttgcagaggaagcccgtgtcaagaaaccatcagaagttgcttgacgagagctccctcatcctcatcgtatacagcatcgagaatcaggacaaggcaaaaccaggatcaagcgatggcatggatactggtcgtagccaagctgatgctcaggctctggcctgtgcctctggtggcaaagctgtgagcagcgcatggatcatcgactctatagcggcttgcaaccttcgaccttccatgctaccctagatgtgtacttgcattgcatgcacggtaggtttgactaatggacagaaaaatagtgtaaggccctgtttcaaatctctagagctagtttttagctaataagttatcaattgtgttaagacaactaacaactatctgagaggtatcccgttctaaaactctcaagtaactttagcgacttactatcagttttagagcttttgaacatagactaagtagtagaacgagacttaagtttcttgatgtataaacactatattttaccatgcaatagttaatgctatgtttttaatt

SEQ ID NO: 139128 - DNA, 834 bp, Zea Mays
ccaaaatgccaatccaccgcagtcgcaggctcgcagctgcccttgcccgccatgatgcctccaccgccgctgcgccttcacctcctcttccgctccgaaaccctaatccctctactccggcaacgacccagctgcgacgcgccccattgccggaccaggaggtacatctccgttcgcgcctccgctgcacagctcgccgccgcggacgtctcgacggcgcagcagcctgcacttgaacttggttggttcttttggcttccctttctcgtctaatgccttttcttcacgtcggcgaatttgctgttattgcggagtgcgttttcgtcgcagggttggaggcagcggcggcgggcttcgtcaccggtaagaggaaggccaccgaggtagcccacgcgttctggagaaatattgttcagaaaggggatacggtggtggatgccacatgcgggaatggcaatgacacgctcgctctgctgaagatggtggctgatgaaacaggccgtggacgtgtttatgggatggacattcaagattctgcgatagagaatacttcctcttttctgaaaatggccgtggatgatgaacatcagcggggactggtaaaactgtttcctatatgtcatagtagaatggaagagattgttcccaaagatgctcctgtcaggcttgttgctttcaacttgggctaccttccaggaggagataaaactgtaatcacagtgcctaggacaactgagttagcattgcgagctgccagcagaattctcagttctgggggactcataagtgttcttgtatacattggacatccaggtggaaggtaaacaccagttg

SEQ ID NO: 139129 - DNA, 3485 bp, Zea Mays
agagcagataaatttcccgaaaaccccaaagattaattcatcttcccttttcgattttctatattccttgcgggtttattttggtttaagtccacgagagaagagaagggaagcaaagcaacactgagcggaggcgagctgtgcgcctcgctcccctcccctgctctcgtcagatccaaaccccacgcgggaacacaaaccctagcacccgttcgcgccaccgcagaggctaagaggcgatgaggggcgttagggcggatggcggcggtggcgcgttctcttcttccaccgcagagaactcgtgcttcgatgcggcgcagtactctttctttggcaaggcgcccatggagggggcggaactcggtgggttgttggagggaggtgtcgacggcgatggtggtggattcggtggacatgatgacgctggttaccagttctcttctacaggcgaagagattgattgtatgagtaatttgtcggaaattgatgatcttgcaagcacttttgcaatgttgaaccgaaatattagcggaacaaggaaccctggcattattggtgatagacgatcaatttcgagagaaagttctttgactgctgattgggttcaagatgctgacttctccaattgggtagatcaggatatactagatggcgatgaatccctggacagcaaacaatggtgctcgcagttgcaatcttcgcctcactttggagagtctaaaccactgtctcgtacatcttcgtaccccaatcaaccactacagcaccgctcaagcgaacctattcttctacacagatctacctcgtttacatcctatcctccatcaggggaaagtcctggattgccttatcctgctcaaggtcttacacggcactcaagcattccatcaccaggtgctggtcacctcatgggttctccaagttcatcgctttctggttctccatatcatatgcctggtctatctcatggactaccttatggacgaaacatgtcttacaccactggagatctttcaacgaacaatgtcctacaaaatgagtggtcaaaccaagctggcccacttgtttttgatcatcttaaccgacggcccagttttttgcagccacacttatctctttcaagtagttcaatgtcttcattgcttttttctcagcagcaccagagattagcaccaggccagccgcctcttcagaattacataaacatgcagcctcacctgttccatcaccatcaacctcctgatgttccttcaccaagagacaaacgatcaaggtcaggaagaggaggaaagcacaacatacgcttttctcaacagccttctgatgctggtagccagcatagtgagagttcagggataaagttcagatccaagtacatgtcatctgaagagatcgaaagtatcttaaaaatgcagcactctgcaaatcacagcaatgatccttactttgatgactactaccaccaagcttgcaaagccaaaagatctgtaacttttcagaagtccaatttctgtcctatgtcaataaaggacttcccctcaaaatccaggtctggtgttgatcagcattcatatctacaggttgacgctaatggaggagtttcattctctgccatacgtagacctcgtcctcttcttgaagctgatttgcctggatctggtgatggtttttatgatcataagtcatccaagaggtcactggagaaagaaccaatgcttgcagccagaataaccgttgaagattctcttcgtcttcttctggttgttgatgatattgatcggtttttacagtctagccagccacaggacagcagtttccaactgaagcgaaggcgagaggtcctgcttgaaggcttagctacatcactccagcttgttgacccttttggccccaacaaacatggccattcgggtgggttggcccctaaggatgacctaatttttcttcgtattatttctctgcccaaaggacgtaagcttttggcacgctatcttcgacttcttttctctggaagtgagctgacccgaatagtctgcatggctgttttccgacaccttaggagcttgtttggtggcttaccgtcagactatagtgctgcagaaacaaccatcgttcttgccaaggctgtttcctcttgtgtgcgccatatggaactcagtgctctcagtgcctgtctcgcagctgttgtctgttcttcgcagcagccacctctccggccactcggtagtgcctctggtgatggggcctctctgataattaaatctgtgctggatagagcgaccgagctactggcggatccccattccgcagccaactacagcagatcagcacgttcgctttggcatgcgtcatttgatgctttctttggactgctgacgaagtactgtgacagcaagtatgaaagtatcgtgcagaggtttgccatgcagggatccaactccatgggaggacctgaaaccaccaaagcagtcagcagggagatgcccgttgagctgttacgtgcgagtcttcctcatactaatgagcagcatcgtcagacactgctagattttgctcggaaatctacgcatctgcctggtttcagccctactgctaaccgtggacttgtcaattctgaatcagttccaggttaacgccactgaagaggcctgatggtcgtctgttttgatttatatatggcacgtaaggtgtgagcttggagaagttccattggctcagcgaagctggcattcaggatatgactgtgtaggatgttatttatttatatatagaaaaccaactttatgtatgtatcctgctgtaactgtgtagtgctgaacagaacatctgttggatttggaggtaagctagttgacttatttcctcccaaagagaacaattgtgagtgcatagcaacagcttaaggcttaagcttgtttgggaacaatggaattggagaagattgagcgctggttcggaggaaatctcattctattcaattttaaataacaagagatttttttcctcgtggactccccttcaaatcccatgtcaccaaaccaactcaaatcccatgtcaccaaaccaactcataagggctaaaatcctcttgaatatcaaggggattttagacaattcaggagccgttcggttgtctaggaacggtgacctgaaaccattccgagtcggatcacttctttaatttatataagttttgatcaacgagaaaaaatctggagctattcccggagaaacgaacatggcctcaatcctcttcaatccatttgctcccaaacaagccaacgggtgtttggtgcaggagctatgtgctcgaacaatttaatcaacaggttcttctgctgcagttacggcattttctgtgctcatttatctatgctgtctgttctaaattataagacgctttgttatgtctatatttgtggcttgtattatgtatcaaacacaatatatatataccggtgttataaaagatacagatgtagaaa

SEQ ID NO: 139130 - DNA, 369 bp, Zea Mays
atgcgcacaccctctcgctgccatttctccacctcctccttgataagtgccgaagtggtagcatcatcagagtcatccaacacctggaccaggaaatttgaccttggccagtccaggctgcaaaccgcaccgatggattgctggtacacctctctctcattgcacatgggcatctgcacgagcaccatggggacgccgtcgggaccggcctcgacgtcctccttgtcggcgggcagcggcggcacgggcctgacgcccttgagcttgatccagaagcagccgaggcagagcacgaggcggtcgacgctctggaccaggaagaggaggacgcaggcgttggttaggaactgcagcggcggcgcgaggtag

SEQ ID NO: 139131 - DNA, 1187 bp, Zea Mays
tgtccccatttgtttgtgaaagtaatgtctgcgtaatattgctcaaccaaacccttctttttaagatgagaaacctactacttatgattatttatacatcttcattagggcttttctactgggcttcctgagagattgcaattgtcccttgtgcgaactataccagggctggagaactgcctaatgctaagacctgcatatgcagttgaatatgattacttacccgcatatcaatgctcaagatcacttatgacaaagaagattgagggtttattcttctctggccagataaatggaacaacgggatacgaagaagctgcagctcagggtataatttctggaatcaatgcagctaggcattctgatgggaaatcattaattattcttgagagggaaagcagttatataggaactcttattgatgatcttgttacaaaagatcttagagagccctatcgcatggtaacacaaaattacatgctgagttctttgaatttttatgctgtctagtgtctaatcaaatatgactaaactccccccttttttcctttgtttttgctgggacatttatggacatctagccgttcagaacaccggctattgcttcgatcagataatgctgatagtcgtttgacccctttgggacgagagattggtttaatagatgatagacgttgggagctttatcagtcaaagcaagcccgcattaagcaagagaaagaacggttgagatctacaaaagttccaggaggtgaatttgctgctgaagttactgcagtatccaaccaacctgtaaaggattcatctacacttgaagccatattaaagaagccacatgtacaatataaactccttgacgagcatggatgcggaaatgaaaatttatctcgaattgagaaggaatgtatagagattgatatcaagtatgaaggtttcatcgcacgacaacaaagtcaattacatcaggtaattgcttatggggttatgcgatagtgttatggagtagatttacgatggaagctgaactgctagaacaatggtacatgaatcgttcaagatgtccaacagtagcacattatgcatgatttcatttgttttgttttgtttacttgataaggcagctaacttttgtgttgtttgttttctctctttgttaagatcgtaacatgattccaaaggacgtagat

SEQ ID NO: 139132 - DNA, 1519 bp, Zea Mays
ccaccgccctcctaatttcgctctcacgtcggtccctcgtccacctctgccctccctcccaaatcccactcatcctccgtctccctcgcgcgtcctcgtcgacttgactccttctctccaagaaccagaccagagaaacggacgggccacctgatcgatcaggagcgcgcggccgcagccatggagctgtcatggtgccggggccttcgcctcctgctcgtggcgtccctgctcgtcctctccgccgcagcgctgccgccctcgcgacgcgtggggaaccagcctccggccgagccgttcgccgccgacgcgctcttcggccgcatgtgcgaccctcgcggcgcgcacccggcgccgcccacctggtgccacacagtgcaccccaggcaacacgttggggccgcggggcaccgccgccaccaccggcccgtgccgatgccgcctccgggccgcgacggcggcggggaggaggagatcgacgtgcgcttcggcgtctccaagcggctcgtgccgacggggccgaacccgctgcacaactgaggcgcacgcgtgccgcacgccacggcgcggcggcggtcagttcaccgtttcttggacgccgaggtcctgatgggccagcgcatgcaagcaccgctcctcggcctctcttgttcctgctttccggccgggcacgcgccacggcgccggaaaggacttacaatggaggaccgatcgacgcctgggcgtgcatgacaataacagagatactggtagagagtagatacgtgtgccatgtataggctcgtgcttcgtcttcgttcccgttccggtccataacttggccttgtcccttcgctctgtttcttgctggggtcctcctgtagggtagttgtagccttcttggcttccattgttcactagaaactgaaggttctttttttttctctctcgcggtgacgtccgcagaatttgtcgtttcgcccgtgtctttctcggcttctcgcccggccccggccgccggctccggcggaaaacgggagcccagacgcgccatcttttcggttccgtttggattcttttcagagttcggcggctgcagatggcgtcatgcgcgcgttactctcctcgctgtggtcggcgtcgcgtcggcgttgttgcggagcagcagcaccgcgccgcaagtaaatgcgctctgcttcctcctgtgagaggctgtgactgcaaaaggaggatgcagaaattaatggcgcgctccacggcctcgcctgccttccgcattgatgccatggcaattggcatcgacgacgcgccttcttcgtcacagcgggcggccgcgccggtagagcaggagttgcacggtcatggtgcggtaactaattccgcgactgacgacggcgttgttgtaacgaactttaaccgacggtgcctgacgaatgcgtcagtactaggagtaaactctgatgagtccagagttccaactgacagcgacaagctgacacctgaccgcactgcaccgtcgtcttcgtcatcgccgatgtga

SEQ ID NO: 139133 - DNA, 936 bp, Zea Mays
cgtccacacctcgggaccatttccttcgttcggtcgtttccctactatcctcctcgcgttcatctcgcccgtacgccgacgctgccgcctggctcgcaccgcccgccggcagtgcctcagtccagatcaagcccctcttcccagatcgggtcctagttgggctaccgcagccctacgccaggtgccgagtccctcgccgatttcttcggcggcgaagagtgcccaccagatccgcccctgatggacaacgtcgagtctgcccctgactcgccggcgcaggcgccgccgtcatccgcctcttctctccccaaggagcaatcgcaggtggaattggagctgaggctgcttcaggctcttgagttctaccctccatcaaaactcaaaggcgttcaccggcattttgttctctatggcctcatggaatatttgcgaaaaagccttgaccgacagttctcttctgacgaagttctacaactcttggaccgcttctttaacctagaaatgctgaaaccagaggatgatgagaaggataacttccgtcagggcgaagaattttcgttgccagagagttttctcaacaaggaagaataatatctagtaacctcgtactttgggtgtcctctggaagagaaatcagaaggctggttcttagtgattccctatttcttgtagcattgtcatctggaacatcggctgcggggagacactgaacactgaagtaaagaaacacatttcctaagctgtggttgtctttactgactgtacagctagcttttgtagactagtgtaatcgaaaataggttgaactgtgtggttgcctggagcgtgaacaaaaagcaaggaggggcaattacaaaagctgctgctgttttacctatcaaacttctctgatcatgactataggtgcagtcctataaagcatccatgattccatga

SEQ ID NO: 139134 - DNA, 1030 bp, Zea Mays
cgtccacacctcgggaccatttccttcgttcggtcgtttccctactatcctcctcgcgttcatctcgcccgtacgccgacgctgccgcctggctcgcaccgcccgccggcagtgcctcagtccagatcaagcccctcttcccagatcgggtcctagttgggctaccgcagccctacgccaggtgccgagtccctcgccgatttcttcggcggcgaagagtgcccaccaggtattcccccttctcttccctgtctgcagtgcgaaacggagttcccagactctaactctaacctcaagctatttggctattttatgcctactagatccgcccctgatggacaacgtcgagtctgcccctgactcgccggcgcaggcgccgccgtcatccgcctcttctctccccaaggagcaatcgcaggtggaattggagctgaggctgcttcaggctcttgagttctaccctccatcaaaactcaaaggcgttcaccggcattttgttctctatggcctcatggaatatttgcgaaaaagccttgaccgacagttctcttctgacgaagttctacaactcttggaccgcttctttaacctagaaatgctgaaaccagaggatgatgagaaggataacttccgtcagggcgaagaattttcgttgccagagagttttctcaacaaggaagaataatatctagtaacctcgtactttgggtgtcctctggaagagaaatcagaaggctggttcttagtgattccctatttcttgtagcattgtcatctggaacatcggctgcggggagacactgaacactgaagtaaagaaacacatttcctaagctgtggttgtctttactgactgtacagctagcttttgtagactagtgtaatcgaaaataggttgaactgtgtggttgcctggagcgtgaacaaaaagcaaggaggggcaattacaaaagctgctgctgttttacctatcaaacttctctgatcatgactataggtgcagtcctataaagcatccatgattccatga

SEQ ID NO: 139135 - DNA, 1128 bp, Zea Mays
cgtccacacctcgggaccatttccttcgttcggtcgtttccctactatcctcctcgcgttcatctcgcccgtacgccgacgctgccgcctggctcgcaccgcccgccggcagtgcctcagtccagatcaagcccctcttcccagatcgggtcctagttgggctaccgcagccctacgccaggtgccgagtccctcgccgatttcttcggcggcgaagagtgcccaccagatccgcccctgatggacaacgtcgagtctgcccctgactcgccggcgcaggcgccgccgtcatccgcctcttctctccccaaggagcaatcgcaggtggaattggagctgaggctgcttcaggctcttgagttctaccctccatcaaaactcaaaggcgttcaccggcattttgttctctatggcctcatggaatatttgcgaaaaagccttgaccgacagttctcttctgacgaagttctacaactcttggaccgcttctttaacctagaaatgctggtatctggaaatccaatatcggaattactttgttatatttcccttctgtttttgtcttatatttgtctggacaatcggagtatattatatctatctctgcattaatttaccacgatttcaaattctcatggaaatcctacagttgggtcacaactgacaagttttacttatgatgatgattgataaatgaagaaaccagaggatgatgagaaggataacttccgtcagggcgaagaattttcgttgccagagagttttctcaacaaggaagaataatatctagtaacctcgtactttgggtgtcctctggaagagaaatcagaaggctggttcttagtgattccctatttcttgtagcattgtcatctggaacatcggctgcggggagacactgaacactgaagtaaagaaacacatttcctaagctgtggttgtctttactgactgtacagctagcttttgtagactagtgtaatcgaaaataggttgaactgtgtggttgcctggagcgtgaacaaaaagcaaggaggggcaattacaaaagctgctgctgttttacctatcaaacttctctgatcatgactataggtgcagtcctataaagcatccatgattccatga

SEQ ID NO: 139136 - DNA, 1659 bp, Zea Mays
cgtccacacctcgggaccatttccttcgttcggtcgtttccctactatcctcctcgcgttcatctcgcccgtacgccgacgctgccgcctggctcgcaccgcccgccggcagtgcctcagtccagatcaagcccctcttcccagatcgggtcctagttgggctaccgcagccctacgccaggtgccgagtccctcgccgatttcttcggcggcgaagagtgcccaccagatccgcccctgatggacaacgtcgagtctgcccctgactcgccggcgcaggcgccgccgtcatccgcctcttctctccccaaggagcaatcgcaggtggaattggagctgaggctgcttcaggctcttgagttctaccctccatcaaaactcaaaggtttcgccatagtgttaagttatttgtttgttggcccttggggtttggcataaattgtcgtcacttaatgtaaacacctatgctaataacactaattcactaacgggaaaatatgtaaacaatgaatgagctacctgattaccgttagcattttttcatataacaaaggttggcatttaatgccaaaaagtttgtgtgcttgcactttgggagtaacaatgtattcgtcctcgttgttgaatgaatgaatggtatatttgcaaaatattttgatgtgaaaaggcgatgtaatttgtgttgttaaggttcagctaaagcttgtttagtggtgtataaggtgggattatagtattgtggaattgaaggtgggtttgtgcccctacagcgacaagttacagggctccagtgccaccttgctgcgctgtcattttgagaaaccagaaaccatgaaatttcctatttggttcttctttcaaagaacatgactgaaaccatcctggctttcaatgcttcagctattcatatgaatttgtcgtccatcacttccgtgatggagtatgcctgtataaataatttgcatggcattttcaaagagcatctaagtctatctgttgagaaaaatagcatgtgccgcattggcagtgatagtctgattacctgttttactaagttgtttcgcacatgttgtaattctggtgtacttgttttaggcgttcaccggcattttgttctctatggcctcatggaatatttgcgaaaaagccttgaccgacagttctcttctgacgaagttctacaactcttggaccgcttctttaacctagaaatgctgaaaccagaggatgatgagaaggataacttccgtcagggcgaagaattttcgttgccagagagttttctcaacaaggaagaataatatctagtaacctcgtaaggaatcatggtactttgggtgtcctctggaagagaaatcagaaggctggttcttagtgattccctatttcttgtagcattgtcatctggaacatcggctgcggggagacactgaacactgaagtaaagaaacacatttcctaagctgtggttgtctttactgactgtacagctagcttttgtagactagtgtaatcgaaaataggttgaactgtgtggttgcctggagcgtgaacaaaaagcaaggaggggcaattacaaaagctgctgctgttttacctatcaaacttctctgatcatgactataggtgcagtcctataaagcatccatgattccatga

SEQ ID NO: 139137 - DNA, 100 bp, Zea Mays
cgaaaatgcaaaaataatgatttatgtctactttagtcgatgtaagtctccacttgtggtcaatataattgttgttatgtgagcgtcttggatgtaacta

SEQ ID NO: 139138 - DNA, 513 bp, Zea Mays
atgaagatcgaggcacgctttgccttccccatcagtgactatgaatttgtagcagaaggaactggaagccgagcagccgaggtcgagcagatctgcagcaggtgccgacgcgaccgagcagcactgcagcaggggccgagcactggagcagccgagcaccaggaagacgagcaggggacggtcgtacggggatcagatggagggctggaggaagagtggatgacgagcgcccgacccgaggaagaggagcaggggacggctggacggggatccaccggtcgctcgccttcttcctcaacccgccgctggactgcgtcgcctgcccgccgggcgcgctcctccaggagaacaagcaggtcggcggcccgcgcgcgttcggaggaagacgagcgcccgaggaagacgacgagcaggggccaggggacggccttccggtcgacggacggacggagcgcactgcgcagcgcaccaaagcagccgccacccgcaaggcaacagccaaacagaagctag

SEQ ID NO: 139139 - DNA, 995 bp, Zea Mays
ccaataaaaccaggtttctgtaatttccagaacagaataagtaatccagcactcagttcagagccaacagcttcgtttggtttttagttgagcatctcgacggttcgccgccggctcagaggaaaacatggcatcgtttcacaaaacatggcggtgtgaaagaaaaagatgggagtccagatttcatttgtagtttcccacacaaaatgacaaaacactagccatctgctgcttgcagctcattggagcaggaaaaacacataggatcgttaatcatctgtctaataacggcataaaggtttctggtcgcaaaaggttgacaacttattacagttctgcattgtggagaaacaagatctcacttcatcttcgcttcggtaaacagaacatgcttgttcacacggggatcatactttctaaactcaagcttctcggtgatgcgacgaggattcttgcgcttcacgtagaagaatccagtgccggctgcagaaaccagcctgatgaagatcgaggcacgctttgccttccccatcagtgactatgaatttgtagcagaaggaactgaaagagggcaaaccataagcataggatcaagatttatagaggtaaaattcaaggttgacatattcaagacagacagacaatacaatgcaccaggcaaacaagccaaatttctacataagttaataaatagcaataaacccaataggattatgtgggtttttaaaaacctacatacacaacaataaataatatttagcctaatcttttatattactatttatataaataatatttagcgtaatcttttatattactatataattaatgtgttatattactatataattaaggcgccgcctcgccttaggctctaccgcctcaaaggaaaaaaggggtcggtcgccttacatcgccttaataactatgaaactgacaacgaacagtgtaatcagaatggcgagaaattattgcaaaggagaagtgtagagaat

SEQ ID NO: 139140 - DNA, 2392 bp, Zea Mays
ccagccccggcccctccgtcgatgccgtcgctggcgccgccgaatcgagcttgcctcgctggactgcgctccatctcctctcttccctagccctggcccctccgtcaatgccgtcaccagtggctacccgagcttgcctcaccgtccccgctgtcgtcccgcgaatccacgaaccacgtcttccactagctcgatttggcgcgaacccccgcgccgcggagggcgccggccgctccgtggcggcgtcgccggccttgcctcgtctctcgcggggtgcctactcctcggtctcgtcgcgaccgcggcgatgctctgcctctcctccccgccctcccgcgcgcgccagcatggtggcagccgcgggatcgtgcccgccggcggcagtggagcgacaccgagggtcacgatcttctccgcgccgcggccgccgccggagggctcgcccgcgcggcaggagctggcggcgcgctcctggctggcgctcccgtggaacgtcagcgtcgtgctcctaggcgccggccccgagtccgtcgcgctcgccgcgcggctcgggcaccgcgtcaccgccgatgccgccatcgattttgcgtacgaattcacaagaacattttaccttcttatcgtcttttacgtacgcaagatgatcagctcgccgatctatcccgtctgtcaatcgtcatcgttgattggtttaggttcacggggacaccgttcttccactcaatggtcgcgagagcacaggctgccgccgacaccgacgtttgcgtcctcgtcgacgccgagatcgtccttcttcccgaaattgtcaacgcgttggatcgtttcagcaaggttgatggcgactggttcctcgtttctctgtcacgtaacgtcaccgatccccgttaccagctcgctgacagtggaagccattgggtacaagcagacggcaaagaagtgagctttacggaggagattccagctgagtggtcatcatcggagggctctgacagagggctgattatggcgtggaacaatccaagcagtgctttacacgcaggagttctgccttcttttctgtatggaagaggagcacagaattggtggctggctcacgaggttctgtcctctgagatgaggcttttctttgatgcaagcagtctggttcttggactgtatcctgagagcattagcgccatgcagcatgtcatggcctcgagtaagaatggcaggttaccttctgtatcctgggagtacggcgtcaatcaccatcttgctgcggtttatggctcgtattgctgtcgatcaccagcgagacgctttcctatgctgcatagagtggtaaagcaatctgaagattatatgctcagcaaagttgacacactcgtatcatcagatttcttcatcagtaaacaaggaaatgcccatggagtagatagcctacggaagaaacaaaacgtttctctatctggatatctacacggttgttcttccgagacctcagcgcctgaccttccatattctttgagcatgctactcgatcttgtcgctgatgagaatggttccgttgtccttggcgtggctggaaaaagctacagggacatgctcatgagttgggcatgccgcctgcgtcgtcttagagttaccaatttcttagtatgtgccttagaccatgagacatatgagttctcaatcttacaggggttgccagttttcagagacccattgtcaccaacaaatgtcagctttgacgactgccactttggaacgaagtgttttcaacaagtgacaaaagtgaagtcgcggattgtccttgagatactaagactgggatacaatgtgctgctgagtgacgttgatgtttattggtttggcaatccgatgccactcctgtactctcttggtcttgctacattcggagcacaatctgatgaatacaatgagacaggaccaataaacttgccacgccgactgaactcaggattctactttgctcgctcagacaacgccaccatcattgcaatggagatgatagtaaaacacgcagccagttcaggcctatctgagcagccgagtttctacgatgtcttgtgtggggagaacggaacaaaccggatcggtgaagacagatgcttggagcccaacacgaacctgaccgttgtgttcttggatcgggacttgttccccaatggtgcctacaagggtctatgggagaagcgtgatgtacgagcaacctgcaaagagcttggctgtttcatcattcacaacaactggataaacaagaggagaaaaaaggtccaccggcaaatggtatctgggctgtgggactacgatcctacctctaggcagtgcttgcaggaatggagtgctcagaatgatggggcaattccatttgtttgaggacactgacagt

SEQ ID NO: 139141 - DNA, 1604 bp, Zea Mays
acgggccctgagtcccctcctcctcgcccgcccgctccgtgttcattgccccactccctcacgcctctcgcgcccgccgctccaccaccccaacccccacccacgctcaggtaaccgcctgacatcgtcatcggcctccgcgatctcggcattatttacccgtccccatggaccagcggcacatggggttcctgactcgtgagtttgtgacagtggttttctctgtgccgccttttgcaggggaagggggtctgggttgcgtacaggcgaaaggcacgcgccgccgctgccgcgcgagcctctccgtccccatcgccgcgcagatggatccgtcgtcggagcccctgtacgcgcaggtcgagccgtacgactccgggttcctcaaggtctccgatgtccacaccatctactacgagcagtccgggaacccgcagggccatgcggcggtgtttctccacggcggtcccggagccggcacgtcgcccggcaacaggaggttctttgacccgcagttctacaggatcgttctgtttgaccagaggggtgcaggcagaagcactccccatgcttgtttagagcagaacactacttgggacttggtagctgacattgagaagctcagggagcatcttggcatccctgaatggcaggtgtttggtggttcatggggaagcaccttggcacttgcctacagccaggagcaccctgataaggtcactggccttgttctgagaggaattttcttgcttaggaaaaaggagtttgattggttctatgagggtggtgcagcagccattttcccagatgcatgggaaccatttagagattttattcctgaggatgaaaggaattgtttcgtagatgcttataacaaaaggttaacttcctctgatcctattgttcaggttgaagctgctaagcgctggacgatgtgggagatgatgactgcgcaacttatccaaaacaatgataacattaaacgaggagaagatgatgaattttcactggcatttgcaaggattgaaaaccactactttgtgaataagggatttttaccctcggactcattcctattggacaatgttgataagatccgacatattaaaggttttattgtacagggacgttatgatgtttgttgccctatgatgtctgcttgggatcttcataaggcttggcctgaagcagaattcaaggtggtagcagatgcagggcactcggccaatgaagttggcatcgctgccgaactgaggtcagccaccgataaactgagagacttgctgcgcaaatgagccggcgaaaggcaacctgcacctctatctgatcatggaactcagaggcccataataattacatagctgtgtaacggttagcactgtgccgttaaacaatgtcattgtcaccatcgatatgttgtttgtttgctcgctggagtgtatgaggaattgaagtttcaagacgggaccagaatgggtggggcgtgtttggtttgcgtttttagacctggtctgtctagccagctatgccagggcaacacaccctggctctcacctagatcctgtttggttgcttaaaagaagaagaagaagaagaagaagaagaaa

SEQ ID NO: 139142 - DNA, 1721 bp, Zea Mays
acatccagatccgtccagatccagattcacccgtctggcacttcacttggcatcacccccgccgtcgcgccgcggccggccgggcctgcaccaaggggtccaggtgaataggtgatgcggccgactcacccgcggcgcggcgcggccctcgtgagaactgcaaaaccaccggccgtatacagtaggcctgcctgcctgcctgcctgcctgccagcaaaccctcccgatcggccgcactgaaatgatcagagtgagtcccctcctcctcgcccgcccgctccgtgttcattgccccactccctcacgcctctcgcgcccgccgctccaccaccccaacccccacccacgctcaggggaagggggtctgggttgcgtacaggcgaaaggcacgcgccgccgctgccgcgcgagcctctccgtccccatcgccgcgcagatggatccgtcgtcggagcccctgtacgcgcaggtcgagccgtacgactccgggttcctcaaggtctccgatgtccacaccatctactacgagcagtccgggaacccgcagggccatgcggcggtgtttctccacggcggtcccggagccggcacgtcgcccggcaacaggaggttctttgacccgcagttctacaggatcgttctgtttgaccagaggggtgcaggcagaagcactccccatgcttgtttagagcagaacactacttgggacttggtagctgacattgagaagctcagggagcatcttggcatccctgaatggcaggtgtttggtggttcatggggaagcaccttggcacttgcctacagccaggagcaccctgataaggtcactggccttgttctgagaggaattttcttgcttaggaaaaaggagtttgattggttctatgagggtggtgcagcagccattttcccagatgcatgggaaccatttagagattttattcctgaggatgaaaggaattgtttcgtagatgcttataacaaaaggttaacttcctctgatcctattgttcaggttgaagctgctaagcgctggacgatgtgggagatgatgactgcgcaacttatccaaaacaatgataacattaaacgaggagaagatgatgaattttcactggcatttgcaaggattgaaaaccactactttgtgaataagggatttttaccctcggactcattcctattggacaatgttgataagatccgacatattaaaggttttattgtacagggacgttatgatgtttgttgccctatgatgtctgcttgggatcttcataaggcttggcctgaagcagaattcaaggtggtagcagatgcagggcactcggccaatgaagttggcatcgctgccgaactgaggtcagccaccgataaactgagagacttgctgcgcaaatgagccggcgaaaggcaacctgcacctctatctgatcatggaactcagaggcccataataattacatagctgtgtaacggttagcactgtgccgttaaacaatgtcattgtcaccatcgatatgttgtttgtttgctcgctggagtgtatgaggaattgaagtttcaagacgggaccagaatgggtggggcgtgtttggtttgcgtttttagacctggtctgtctagccagctatgccagggcaacacaccctggctctcacctagatcctgtttggttgcttgtttgctcgaatacagtcctaactcattgaggcacc

SEQ ID NO: 139143 - DNA, 1502 bp, Zea Mays
acatccagatccgtccagatccagattcacccgtctggcacttcacttggcatcacccccgccgtcgcgccgcggccggccgggcctgcaccaaggggtccaggtgaataggtgatgcggccgactcacccgcggcgcggcgcggccctcgtgagaactgcaaaaccaccggccgtatacagtaggcctgcctgcctgcctgcctgcctgccagcaaaccctcccgatcggccgcactgaaatgatcagagtgagtcccctcctcctcgcccgcccgctccgtgttcattgccccactccctcacgcctctcgcgcccgccgctccaccaccccaacccccacccacgctcaggggaagggggtctgggttgcgtacaggcgaaaggcacgcgccgccgctgccgcgcgagcctctccgtccccatcgccgcgcagatggatccgtcgtcggagcccctgtacgcgcaggtcgagccgtacgactccgggttcctcaaggtctccgatgtccacaccatctactacgagcagtccgggaacccgcagggccatgcggcggtgtttctccacggcggtcccggagccggcacgtcgcccggcaacaggaggttctttgacccgcagttctacaggatcgttctgtttgaccagaggggtgcaggcagaagcactccccatgcttgtttagagcagaacactacttgggacttggtagctgacattgagaagctcagggagcatcttggcatccctgaatggcaggtgtttggtggttcatggggaagcaccttggcacttgcctacagccaggagcaccctgataaggtcactggccttgttctgagaggaattttcttgcttaggaaaaaggagtttgattggttctatgagggtggtgcagcagccattttcccagatgcatgggaaccatttagagattttattcctgaggatgaaaggaattgtttcgtagatgcttataacaaaaggttaacttcctctgatcctattgttcaggttgaagctgctaagcgctggacgatgtgggagatgatgactgcgcaacttatccaaaacaatgataacattaaacgaggagaagatgatgaattttcactggcatttgcaaggattgaaaaccactactttgtgaataagggatttttaccctcggactcattcctattggacaatgttgataagatccgacatattaaaggttttattgtacagggacgttatgatgtttgttgccctatgatgtctgcttgggatcttcataaggcttggcctgaagcagaattcaagagtttggagctgcaggtgatgaatttcagttggatgaagatcttctttaggtaactaggtggtaatgtgtgttgtgtggtatctgggacttgtagcattagtaactagtaagtgtttctctgctgttttcagtattgctgaattcatgtcatgtttaccctatccttcataatatagtatacgaagttcatat

SEQ ID NO: 139144 - DNA, 1824 bp, Zea Mays
ggaatcagagctcgtgcatgcacagactgcactgcagcggtagcaacttgtcagctgactttggtcgcttcccgccacgtcgtgtacggctctaccggcgccatgcgccaacgctactgtacaaggaatcattagccacaacagaacgatccaagcgtctcccattatttaaccccgcggattagctcagtgagtgcactcacgagacgcaagctaagtggttgccagtcatgggcatgcccgacgccaacaggcgcatcaatctcgccgcgccgctcctctccgtccggcgccacggtggtgccgagacagcgcccacggggacgcggttgccagcctacaagcaggcgggagccgccacgtcgtcggagcccccgggccgcaccactaccagcgccgtggccgtggccgtgccattcgggtgggagcgccgccccggtcaccccaagagcgtccgcacccgccgccagccgccgccgccgcccctcacgacgatcgtcgacgacccctctcccgcgacgcgcccctcggacgacacgctctcccgcgacgacgctgccagctgcgtcaccgccaactgcagcgccaccacgggcctcagcgacgccgcgtccgcgggggccgggacggggtcgtcggagccgcgcgcccgcgcccgcggcggcgccatgatggaccggttcctgccggccgcgcacgccgtggccgccgccgggtccccgcagaacgccttccgccgcaaggccgcccggacggcgccggccgccgccgacaggaggttgtacttgttgccagcgcagccgcagaggcgggtgcccctccaccacattgcggcgtgccacctgccgccgcccgtccctcccgctcccatgagcagcccccgtggcaagaacgacgactacgacggcgccagttctgacgcgcgcagcacgccgggcttcgtgtccaggactaggaggtgcggcctgctctccgtccggtgcgtcaggagcgccttgcggcgacgtgcgggcagaccgttccggtccaacggcggcgccagaagccgaagagaaaagaagccactgctgccgcataccggagacgatcacggcatgcaatgctgggaggaagtgtacatcaagtcgctgctccggtcaggccgcggcagcctgatgggaccggcggccgccgtggcctcggagctggacagaaccgtgtgcgaactgtacagcagacgccgacacgggcaggccgccgtccgccccaaggcgagccatctgggtctgctcctggtcctcgacaggtcaaacgaggcttgcggccacgccgcctcaccgccggcgcggaagttctctataaccggcggcggcgacaccgcgttgcttctgaggggcggcgctgctaccaagggcagcttgcgcttgcccaacggcggcgagaagcggctgggacgtgacgacgacgcggccgccgccgatgctgccgccggcggcggggggtacggtttcccgctgcttctggacgacaaggagggcggtagtgccggacgagagatggcgctgtcatcgccgcagccgctgctcccgttgccgttgcccaagtcgcctacggagtcgtggctcgcgcgcgcgctgccgtccgtgtccactcgacccccgaccacgtcttttctgggcctccatgtgcagcccaggaagcatgctccgttgccgtgctgctccattgattccagcagggacgtccatcatgacaggcaacggcaaattcgcgtgcacgatctacacaaatgatggacgaagctatcctgatcgtgttaagtgctagcgagcggctcctggttgt

SEQ ID NO: 139145 - DNA, 116 bp, Zea Mays
cgaagtggtttggagtgggctcgcaattggtttgtttccaatctgtttcagcccatatataaaacaatataggcctggaaaaaaatcctgtgtagtttaactacatgagagaagcc

SEQ ID NO: 139146 - DNA, 1541 bp, Zea Mays
ccacatgcactcgagctcgagctccagtcaccagcggtgacacgagctccgggcactcctccacctgttccgcttgttgccgtacattgctctgcttcttcttggcaatatatatatataatggtcgtcctcgcgaagccgccggctctcgaccaaatctccctgctccgatccccgcagcccggggacgcctcctccttccccggcgtgccggccgtcgacctctccagccccggcgccgccctggccgtggtggacgcgtgcgagcgcttcggcttcttcaaggtcgtcaaccacggcgtgccagcgggcgtcgtggaccggctggaggccgaggccgtcaggttcttcgcgtcgccgcaggcggccaaggacgcgtgcgggtgcggccccgccagcccgctcgggtacgggaacaggcgcatcgggcgcaatggcgacatggggtggctcgagtacctcctcctcgccctcgacggcaacgcctcggtgtccaaggcctcccctgtcccgtcatcctcgctgcgggacgcggtgaaccagtacgtggcctccgtgaggggcctggcgacgtcggtgctggaggcggtggcggaggggctcggcgtggcgccgagggacgcgctgagcggcatggtggcggacgcggcgagcgaccaggtgttccggatcaaccactaccctgcgtgcccgctgctgcagcgcctgccggactcgtgcggcgtcaccggcttcggcgagcacacggacccgcagctggtgtccgtgctgcgctccaacggcacgcccggcctgcagctggcgctccacggcgacgacgggcgctgggtgcccgtgcctcccgaccgcgacgccttcttcgtcatcgtcggcgactcgctgcaggtcctgacgaatgggaggctgaaaagtgtgcggcaccgggtggtggccaacagcctgaagccgcgggtgtccatgatctacttcgcgggaccggcgccggcgcagcggatcgcgccattgccgcagctgctggggcacggcaagcagagcctgtacagggacttcacatggggcgactacaagaaggctgcctaccgctcgcggctcggagacaaccgcctggaccccttccgcatctagtcacccgcaacctgtcgagagctggtaggttcgtacgcgcagatgcctctctctgccatagaccggccccaacaccgctgctctggtgtgtgccccccgccctccggagatcactggaggccaccagtactgattgcttcacggaccagtaagaagggctggccgtacggcttgctatgtaggacagtaggggtaggtgggtagggttggatggatactgccatacggggacaggtgtgctctctgttcggttggattcttcctcttcccatgcttcgtggtgccaatgcaagtgtacagtagctgtggtactagctagctagagagagctttaatttcctgtatttggctcttgatgttgatgctgtatgaatgttattatgggtgctttctatttatggtatgcgatttttttc

SEQ ID NO: 139147 - DNA, 1325 bp, Zea Mays
acttatatcaccccctaccaatcaatccagcacaacagcatcatggcgctcaccacgagcactaacaaccaagccttgcttgacgctcagctagagctctggcacacgtcctttgctttcatcaagtccatggctctcaagtctgcagtggaccttggcatcgccgacgccatccacagccacggtggcaacgccaccctgccccagatagtttccagggccgcgctccacccgtccaagatcccctgcctgcgtcgcctcatgcgggtgctcacagccgccggcatcttcagcgccgcccaccgctcgccggacgacggcggcggcgagctcgtctatggactcacaccggcgtctcagctcttggttggcggctcttcaagcctggctcccttcatgtccctggtgttacaccaggtctacgtgtcgcctttccttggcctcggcacatggttacagcacgagcgctcagacccgaccctgtttgagatgacgcatgggctcactgcctgggacctgaatgaccacaagccagctttcggcgagctcttcaaccaaggtatggtctgcgacagcagcttcgtcatggacatcgtcgtcaaggagtgcggcgacgtcttccggggtctaagctcccttgtcgacgtcgccggagggcttggcgcggcggcactggctatctcgaccgcgttcccgcatgtccagtgcagtgtcctggatctcccgcatgtcgccgccaatgctcccgctaacaccagtgtcaagtatattgctggcgacatgtttgagagcattccaccggcagacgccgtcttccttaagtgggttttgcatgactggggcgatgctgattgtatcaagatactcaagaactgtaagaaagctataccttccagggatgcaggaggaaaggtgataatcgttgatatggttgttggaggccagtcgtcaaacattaagcacaaagagactcaggtcttgtttgatctcttcatcatgacgatcaatggcgccgagcgagacgaacatgagtggaaaaagataatttccgaagctggatttagcgactacaaaatcatacccgttctaggtgttcgatccatcatcgaggtctacccatgattatttggcgaatacgtgtttcgtttttttctgaataagttgtttggttaactagcatgggacgagtgtccatgagatcatgtgtgatgaaaactatgtttgtggtgaagtaagcactttgcaatgatattagtaccatagcatttgttcaatcattgcattgaatttgaattaaaattgaaaggatcaagatgcttaaaatg

SEQ ID NO: 139148 - DNA, 1317 bp, Zea Mays
caacaatagctctgcttgttttttttttcaaataaaaaaagcacgagctcagcgacatggcgcccgccaaagcgcagcacacaagcactaaccagcagacattgctggatgcgcagctccagctctggcatcacgccttcggctacgtcaagtccatggcgctcaaggccgccctagacctcggcatccccgacgccatccaccagcacggcggctcagccaccctcccacagatagtcaccgagctggccgcactccacccgtccaagacaccgtgtctgcgacgcctcatgcgcgtgctcactctcaccggcgtcttcggcgtcgtcgttcagcactcgacgaccgacggcggcagcgatcttgtctacgagctcacgccggcgtctcgcctcctggtcggctcggcgccgtccaacggcccgaacgtgagtccgtttctgaacatgatcctcggcaccgccttcgtgtcctccttcctcgacctcggcgagtggttccagcacgagctgccggacccgtccccgttcaagctggcgcacgggcagcacgtgtgggacatggcccgccacgacgcgagcttcgccaagctctgcgacagcggcatggtcgcggacagcgggttcatcatggacgtcatggtcgaggagtgcgccgacggtgttttccgagggatcagctccctggtcgacgtcgccggcgggctcggcggcgctgcccaggccatcgcgaaggcgttcccgcacatcgactgcagcgtgctggacctcccgaacgtcgtcgccgctgcgcccactagcaccgacgtgaagtacatcgccggcgacatgtttcagagcatcccagccgcagacgttgtcttcctcaagtgggttctgcatgactggggcgatgccgaatgcgtcaagatattgcagaactgcaagaaggccataccatccgaaggagggaaggtgataataatggatatcgtggttggagcggggtcgtccgaccggaagcatgtagagacgcaggtcttgttcgatctctttatcatggctatcaatggagccgaacgagatgaggaagagtggaagaagatcattttcgaagccggatttagctcttacaatatcatacccgttctgggtgttcgatccatcatagaggtctacccgtagtccatacaagttcatgtaacaaagtgctgttttgggcgaccctgatgcagtttcgttgaaagcgtccctgcatgatgctagaatcaacagccacacacaataattaataattcgcatcacgtggacaactttccatgtgtttggttgctctcgc

SEQ ID NO: 139149 - DNA, 1329 bp, Zea Mays
ggctcacaacaacttagcataacaaaagcccttgcccacgccatgacgctcagcaagaagcaaggcgcaggcactgatcagcaggccttgctggatgctcagctgcagctctggcaccacaccatcgcttttgtcaagtccatggcgctcaaggccgccgtagacctccgcatagcggacgccatccacctgcacggcggctcagccaccctctcgcagatagtcaccaaggtcacactccacccgtccaagataccatgcctgcgacgcctcatgcgcgtgctcactctcaccggcgtcttcagcgtcaactccggcgccgttgtcgacgagcccgtttacgggctcacgccggcgtctcgccttctggtcggcccggggctgaaccagaccccgttcctgaccttgatgctcagcactttcttcgtgtcctccttcctcggcctcgacgagtggttccagcacgagacgggtccgtccccgttcgagctggccaatggccgggacatatggaccctgtccggccacgacgcgagcttcggcaagctcttcgacgacgggatggtcgcggacagcggtttcatcatggacgtcgtggtcaaggagtgcggcgacgtgttccgaggggtcggctccctcgtcgacgtcgccggcgggctcggtggtgccacccaaaccatcgcgaaggctttcccggacgtggcgtgcagcgtgctggacctctcacacgtcgtcgccaatgctcccaccgacaccaccgtgaagtacatcgccggcgacatgttcgagagcattccgtcggcaaacgttgtcttcctcaagtggattctgcatgactggggtgatgccgaatgcgtgaagatactgaagaactgcaagaaggctatagcgtctcaagaagaagggaaggtagtgatactggatatggttgttggagcagggtcatccgacgagaagcatgtggagacgcaaatcgtattcgatctctttatgatgtttatcaatggcactgagcgagatgagacggagtggaagaagatcattttcgaagccgggtttagccgttacaagatcatacctgttctcggtgttcggtcgataatcgaggtctacccataaaaatctatgcaactcaagtatactgtatgcgtgaataatctgcgagtgaaatcaaaactaggtgtgaagaagtgagtatactgtatgcacgcgtgaataaatctgcgtgtgaaaaactaggtatgatgaagtgttgtgccatgtgcttgctttatttagttgctaaatgtatcgcatgtactcttgtctgttctaaattataataaaatg

SEQ ID NO: 139150 - DNA, 2285 bp, Zea Mays
gtttatcttctatgtttgaaaaatagcttacctgtttctgtatcaccaccaccagaacatgaggagctttgagaattaagaaccgaaagtaaacactgccaaccactcttccgtcttcaaccctttggcaaccagcaaacaaataccagtaccgctccactacttgattgccgcctcactggcaccgctggtccgctcccagttccagtgacactgcaccagaccacccggctccagcgagatccagacccaaaacctcacctcgcagccaacctctgctcggaggggaagggaagggaagggaagcaatggcggccaacggaggcgggtaccgggcggaggacgactacgactacctcttcaaggtggtgctcatcggcgactccggcgtcggcaagtccaacctcctctcccgcttcaccaagaacgagttcagcctcgagtccaagtccaccatcggcgtcgagttcgccacccgcagtctccaggtcgacggcaaggtcatcaaggcccagatttgggacaccgccggccaggagaggtaccgtgcaatcacaagtgcctattaccgaggagccgtaggggcactgcttgtctacgatgtcacccgtcgcgccacgttcgacaacgtgggccgttggctgagggagctcagagaccacaccgaccagagcatcgtcgtgatgctggtcggcaacaagtccgatctccggcacctggtggccgtctcgactgacgacgccaaggagttcgccgaggccgagtccatgtacttcatggagacgtccgccctcgacgccaccaacgtggacagctccttctcggaggtgctgacccagatataccagatcgtgagcaagaagacggtggaggcctccgaggagggggcggccgcccctggcaagggggagaagataaacgtcaaggatgacgtttctgcgatgaagagggttgggtgctgctcaaactaaggcgaatagccggatacgaactgtttgttcgattgtctttctgtggatgctgagggttagaggaccgttgagagagactatcagcttaaattatttattatcagctctgaattcgtggttctgtcaaattcaatcatttttttgtgttcttgcctcctactgctatatttttttaatgaactgaagaatttgccaaccaatctttctgtgtgtactaagtactaacagaagaacacgaaccctttctataaactactacatccatgcaagttacgaaacagtttatacgtgcaaccaatttagagaagttccatctctgcgccgaattgtgctcggctcacctacagcttcatctggctatacactgacgacgacgcagtagcagcgcccgttcatccaggaccagactgaatcagcggccccggatcagctgcgcgcacacgaggaacagcgacgccgggacgccgagcagcatcaccgccagcaagccggcgccgagccccgggcgcgcgttcacgaggagcgcctcgagaaggccgaccgcgccgcgcacgccgaccacgtagctcccgtggtgccgccgctccagctccgtccacccggtcggcggcagcgggatgccggcgtcgtcggcgtcaagaatgccgtcctcctccgacgactccgcccgcgcctcgcggatgcgccgccgcagcgtcgccatgtcctcgtccaccagccggccgccctcggaggagggagaagagccgccgtcggcgccccacgcgtcgcgccgcccggcgccgaggagcacggccctgttcgcgccggcgcgacgtggcagccgaatgggattgggaggtggccccaagaaactgctcgtggagatgaagtgactagggcctgagccaccaatagctctagctcgggttgctgctgccggtgccatagccattacctgctcctgctgctgctgctggtgccgtcgcctacactggaacgtacgagccgagacgagagggtctggtgtgccaaatgcgaggtgccacgtcccaccgtcgtgcgcggcgcgtgatatatatacggcgacgcccggcgccgggaacagcttggacagggacagggacagggacagggacggggaagtgtagcgtagcgggatttgcgcgcgtgattgcgcgaagggaaaacgtggggagaagggcaaaggatctgtcgacagccgtgtgcgggccgcgtccggcgtccatcgcgttcgtttagcccgcctgcgttctcatgcgtgctcactggccacggcccacggctgccggcgcggacgggacgtgcacgggc

SEQ ID NO: 139151 - DNA, 948 bp, Zea Mays
atgagatggggcattgggaagcagcatgcagcgccatctgcgcggtgcgaggaagatgatggagcggacagagggagcaaggccaaggccaagggcagggcattgtcattctcccctctctcgtggctcgccaagctggcggccaaggagaagcccgcgggtgcgtccgcaaagcgcgcgcccgcgcccgcgtccacgcccaagaagaacaccgccgcggcgccgcctcccgcgttcccgccgtgcctccccaagcgcgccagcccgagccctgcggccgtcaccacgccaggcccgtgcccgtccagctccagcccgccgcgtcgctccgcggccgacgccgtgccgcggcggctgtcggtcggcgacgacgacaatgccgactccgccgccgtgcgccggcacgtccgccgccacctctccgtcggcggggaccgtgagctcccgccgctgggccgcctgatccccttctccctcctggctggctcccggcccgcggcgccgtcggacgcggacgcggacgccgccggcgcggcgcgggcggcgaggcggcacacgcggcgccggcgcctcagcgtgaccggcggccggagaccgtccttctccgggaggacaatgccgcccccgcgggtgcgcgtacggtctccccggcgcgccgccgcggcggcgccggtgctggagggcctcgcggtggtgcggcggacgcgggacccgcagcgcgcgttccgcgagtcgatggtggagatgatcgcgagcggcgaagggcccgccgcgccggaggagctagagcggctgctggcgtgctacctgtccctgaacgcggacgagcaccacgactgcatcgtcaaggtgttccgccaggtctggttcgagtacctcagcctgctgccccgccaggaagcccgcgggagacgacgcccttccgacgggacggcacggcgctgctga

SEQ ID NO: 139152 - DNA, 1064 bp, Zea Mays
cgacttggccaaggttgcttcttggcgaagattgggcctcgggcgaaccgaaggtgtgtccgttgctggagggggtcctcgggcgagacgtaaatcctccagggtcggctgcccttgcccgaggctgggctcgggcgaggcgagatcgtgtcccttgagtggaccgagccttgacttaatcgcacccatcaggcctttgcagctttgtgctgatgggggttaccagctgagattaggagtcttgggggtacccctaattatggtccccgacactgtgattgcactgttccgtgttgatttcagtggcaggggtgaactagcagagtgccagttattctcttcaattcatttcaatggcagtaggcagctcgtaaaaatgacgcttgcttatgtgtgtatatatctgttgtgatattgcagcaaaagatagcacagatgttgtcccgccttaccaagattgccgaggaattcaatgttgcagtgtacatcaccaaccaagtgattgctgatccaggtggtggcatgttcataaccgatccaaagaaaccagtaggcggccacgtgttggcacatgctgccatcatcagattgatgctgaggaaaggaaaaggcaagcaatgtgtctgcaagatcttcgatgcacctaaccttcctgaaggagaagctattttccaggttacatcaggtggaatcatggacgtaaaagactgatttgggttttgagccaaagtttctgcccaagattgttcatgtttctgcagtgaagttcacatagcttgcataggtacacatcgagcgaagttacagcagtggtgtactctgttttatcattgacgtaggaaaaactctatgttgcttaggcctcccactgggtagtttttgcaacagattacatgtttccttatggagggagtatgttaccatgtcctttgctttcccaaatgagtgctaggcactaggcagagaccatctaatgtagttgtttaagcatgctcatctccatgcttgtgtataaataagctggttgttggacaggctgatctcaccaaggttaggagctgcaa

SEQ ID NO: 139153 - DNA, 1326 bp, Zea Mays
aacaacttgggcgcggccggattcgtataggttagcagcacacagtagcaagctcgcgatctgtgcgcccaccatcaccaccaccgccgggaggagaggaccgaccgaccgaccgaagatgcggatgagctgcaacggctgccgcgtcctgcgcaagggctgcagcgacgcctgcaccatccgcccctgcctgcagtggatcgacagccccgaggcgcaggcaaacgccaccgtcttcctcgccaagttctacggccgcgcggggctgctcaacctgctggccgccgcgcccgacgacgccgcccgcccggccgtcttccgctccctgctctacgaggcgtgcggccgcatcgtcaaccccgtctacggctccgtcggcctgctctggtcgcgccggtggcagagctgcgtcgacgccgtcgaggccgtgctcaagggcgaccccgtcgtgcaggtcgacgccggctccgaggccgccgccgccccggcgccgctgctcggcgccagcaggccagccgcgccgccggccgcctacgatatccgccacgtcgccagggatcccgacgccgtcgccgccgccgacctcctccgcgtcgcgcgcggcggcggccgcaggaggttcaagcgcgccggctcgtcttccaacgcctgcaaggcgaaacccctcaagggaaaggctagcagcaacgagcgcgcgtcgcccagccctactcagaggcagcatcagcaggagacggaggagctggagctggaaccggtgccgatggtcgtcgagcttgagcacggcgaggagtccgccggcagccacgaccaccaccaccacctgcagccgcaggggtcggaggaggacaccgacgtggaggccgcctcccacgtgagccaggccgaggccgagccgccggtcagcagccagagccaggcgctggtggcggaccaggagggtgaggaggtcaggctggaactcacgctcggcttcgagccagtcgtcaggcagcagccgaggctgtcgtgctgcgactcgagcggcttgagcgccgcgtcgagcctcatcggcctgcggctgcagctgccagccgcctgagcagaggaggtcatctcatttcacaaggcacagtggcacaccaagtgcagttttgcaaccattgcggtgtttgcttaaagaaaaggttttggacgccgagcagccgactatttcctaggttttgtttttttcattttcttttcttggctgtaattgtaaaggctgatgaactgcacagttttagcgtcgtcataataggagttttgcaattccatatgagattataagctattaaaaaatttgat

SEQ ID NO: 139154 - DNA, 1044 bp, Zea Mays
atggacagaagatgcttctgccccgtttcttctgccccgttcgcacgttcaagggccacgcacctctccgaaaaatcaaagcacagcctcctgtagctagccctagcttgagtctctcccggtctcccctcacctcacgctggttgcctatataaacgaagatcagatctcgcaccggcgtagcatcacacggggaacacacaaaacatactcctgccgaagcgctgagaagtagctagacaagaataatggggttcagtgaggcacaggaagagctcgtcctccgttcatggaaagccatgaagagcgactctgagtcgactgctcttaagttcttcctcaggatctttgagatcgcgccgggtgccaagcagatgttctccttcctgcgcgacgccggcgacgcgccgctggagaaacaccccaagctcaaggcccacgccgtcaccgtcttcgttatggcatgcgagtcggcgacgcagctgaggagcaccggcgacgtgaaggtgagggaggccaccctgaagcggctgggcgcgacgcacgccagggcgggcgtcgccgacgcgcatttcgaggtcgtcaagacggcgctgctggacaccatcagggacgcggtcccggacatgtggacgccggagatgaaggcggcgtgggaggaggcctacgaccagctggccgccgtcatcaaggaggagatgaagaacgccgccgccgccgaggagcagacgaagaacgccgccaccgccgcggaggagacgacgaacgccgccgccgccgaggaggagacgacgaacgccgccgcggctgttgatgcttcctagctcctagcctagcctcctgctacgctcctctgctagcgaccgtggcacgcgcaccgctgcgttaatgggtgtttttggactgctgctggcctgatacctaactacggagctgtcgctaatgctgctgcatttttgtttgtcgaccgcatcatttttgtgatgatgaataaaatattcagaaaaggcccgtcatgcgagtgaaatttgactgaacgtcgtg

SEQ ID NO: 139155 - DNA, 975 bp, Zea Mays
atacgcaatcaatgcttatgtcatcaaatactgaatacaaggaccattatcggattacatgtataacgggttgtcagattaatgtagagtgaggatggtacacctttttccaggtacaatttaatctgaagcacaggaagactcgacaaagattagacatgatgtgcagatatccaccatcataatctcattgagatataagatcccatttcagaaccttgaacctaagatgtcttccattattcagtaaaatttccaacagaactaaaggtcctacaacacatacatttttttaaaggaccaattcaaaatcctggacctcaaactgccaacgcattacaagaaacagggtgtaagatcatctaatgtttgtcgtccttgggcacagcgtctttcttggcagcttgggactccaactccttcactgaagactgttcagtagatctattttgaatcatgaaaatgcatgagaccgtacagaactattaaagcaaatgtgatgctcaaatggttattggtggtttcaagtttcaactttgagcagagcttcaaagcatgagagaagacacagtgacacacgcagcattataatggctacaacaaaaggtgtgtaataaacaaaacaaaaataggtatcgctgaagcaccaatgcgactactgtaaactttgatagtttgatgtacaaacacatcatcactaattcattcgaaatagtaacagtagattgcttattctggatccatataagaatggttgattccaataaaatttcacttccagaccaaataagcccaccgaataatttaaagtaaaatggccaaagtgatgtctgtcctcattggggtcggtgcggccctgtgccatgagcaccatgcactggctaattacaatttggactaatcatccacggctaattacattggtcctgcactagtgccgcacatggacatggacaaaatcaaagttgtatcgcc

SEQ ID NO: 139156 - DNA, 1218 bp, Zea Mays
atggccatggatggtgctgctgtggaggaggagacgatgcatatcggacagggtttgtgggtggcaatgggccagggtaacatggtggtggcgatggccatggatgcgttggggtgcagggcagcggtggcggcaggacgaggcatggcgggtgatagactggcgcgggaggaggcagggatggtggaggtggggaatgcggtagtggtggtgacgacagaagttgaggtggcggtggtgaaggcagcggcggaggtggagatggcggcggcggcgatggtggaggtggcgaaggcggggcgggcgagctccggcggcagcgggccggcgagctggttgaagctgacgtcgagcacggtgagctcccgcagcagaccgatctccggcgggaagcaggaggagaggtcgttgttgatgagaaggatctccttgagtgtgccggacatggttgcgacgcttgccgggaggcagccgccgaaggcgttgtgcgcgaggacaacgacagacgctggaagatggcgtcgagcgggcggtcgaagaggcgaggcaggacggtgccctcgtcccctcgaagtcgttgaagcggacacccaggaagcgcagcgcagggaggtccaggacgacgtccgggaacgggccgacgaagcagttgttgctgaggtcgagctcgtggaggaggcggaggcggcgaagcgcgcgggggagtacgtcgcagaagcggttggagttgaggtggagcagggcgaggtcggggaggagggcgagctccggcgggaggaagcccgcgatgtcgccatggttgaggttgacctcggcgaccgcgagcgcgccgcggcggtcggggccgaaggggagcggcgcgcagtagacgtccgtgtagttgcacacccccgggcctacctaatcggcggtgaggttgttggggtcggagaagatggcctgctgctttcgcgtcccgcaggcgtcggctcgggaaccgccacgacgggtccacctccactgccaccgtcggccgcccctctgaagccgcggtcgccgcgccggctcgggaaccgccacgacgggtccacctccactgccaccgttggccgcccctctgaagccgcggtcgccgcgccgaagaaggaggaggcggcggcggcaaggagcgccagaataacggatcctctcatctcatctccggcgccgaaggaaggtgtagcggcagaatcgtggtag

SEQ ID NO: 139157 - DNA, 576 bp, Zea Mays
atgtcgttcacgggtctgcccctatggcccgaggtgctccgacacggagaagaagacggtgttgctgaatgcaccgccggggaggaacaagtgtgggatgtgcgtgcgcgtgacttcgaccgtccacccaaagaagacgtcggcaatgattcggattggggaatcgatgccagagacaaacttctcgaatgtagatcggagcgagatggatctggatgtcaacgcctgggggcaggccgtggtcgaccgaggcgaagtgctgctgcgcgtttacgccgcaccaagttgggatgcgtgagaggtcgggttgtggaggaggatgtcgtggttggcggtttgaacgttgttgaggagatggtgggtgcgcgaggcgaacatggcagcggcgcgagttcgccgtggcggcggtttgataaggccctaacagaccgaaggataaatcggctgagactgggcaagatgccgccggcgcacgccgacacggaggggatggcgggggtgaggagcgcctcggtgaagatgagcgagcagtcgaggctgagcgagaaggacccgaaggcggcggcgatggcgtag

SEQ ID NO: 139158 - DNA, 611 bp, Zea Mays
gccaagatggcacacctccaccaattcccatgactccaaggttttatctgtggtatctgttctatagagcgcaagctcagatatctcaaactctaatacatagatatccttgtccagctcctctgccttcttccttgcctcctccttctcctcatctgtaaggtctccatataagaggctgacatgcggcatgtatgctgcaaatgccacaaccaagtggaaccagtaagaggagaagagatgcttaacctcggcggtggggtcgagaaggatgtagacgcactggtagaagaagctgccacgggcaacccccgtgacacgagcagtgtagggttggacgctggcggcggcggcgcggagcaccttgacagcttccgagcggcgtccgcggaagtcaccgacgacggtaacgtgcggctcaaaggcggggccgccgtatgcagcgcggaggccctccatgatgcggcggaaacgatcacggacgggctccggcggaagggcccacacggagtacacctcctccggcgactggtcggtggggtccatgcggtctgacactgaccagcggtgaggtcagagcacaagacgggacagcggggttagaggcggcg

SEQ ID NO: 139159 - DNA, 582 bp, Zea Mays
catgctcaggctgcagcttcctcagtcccatagggttatttttctgcagtatttgtcagcaaccgatcctttggttatggctcgtgtcctacaggatgtgttggatacctttacaccaaccattccactaagaataacatacaacaatagtcaagttctggcaggtgctgagctaaagccatctgcggttataagtaaaccacgagtcgatatcggtggcaatgacatgaggactttctacaccctggtactgattgacccggacgccccaagtccaagccatccatcactaagggagtacttgcactggatggtgacagatattcctgaaacaactagtgtcaacttcggccaagagctagtattttatgagagaccagatccaagatctggtatccacaggctggtatttgtgttgttccgccaacttggcaggggtacggtttttgcaccagaaatgcgccaaaacttcaactgcagaagctttgcacggcaatatcacctcagcattgccagtgctacacatttcaactgtcaaagggaaggtggatcgggtggaagaaggtttagggaagagtagag

SEQ ID NO: 139160 - DNA, 1071 bp, Zea Mays
cacccccgcgcgcgcagcctgctgtgatgcgcccaagtcgatcaatcatcgtccgctctcatcatctcatcgcaaagccaaatgtatcgaacggccgtcgtgactgccgcggccttggccttggccgtgctcagcgcggcggcgatgacggcggcggcgccgcaggtgccctgctacttcatcttcggggactcgctcgtggacaacggcaacaacaacttcatcgtgtcgatggcgcgggctaactacccgccctacgggatcgacttcgccggcgggcccaccggccgcttcagcaacggcctcaccaccgtcgatgtcatcgctaagctcctgggcttcgacgacttggtgcccccgttctccgaagcaagcggccagcagctcctccgcggcgccaacttcgcctccgccgccgcggggatccgggaggagacgggccagcagctgggcgcccggatcagcttcagcgggcaggtgcagaactaccaggcggcggtgcaggaggtggtgagcatcctgggcgacgacgaggccgcggcggcggcgcacctggggcggtgcgtcttcacggtgggcatgggcagcaacgactacctgaacaactacttcatgccggccctgtacagcacgggcagccggtacacgccggagcggtacgcggacgcgctggccgagcagtacgcgggcgcgctgcgggcgatgtaccggtacggcgcccgcaaggtggcgctcgtcggcgtggggcaggtcgggtgcagccccaacgagctggcgcagcgcagctccgacggcgtcgcctgcgtggagctggagcagatcaacggcgccgtccggatgttcaaccgcaggctcgtcggcctggtggacagcttcaacaggatcctccccggcgcgcacttcacgtacgtcaacgtctacggcatcttcgaggacatcatcaagtcacccggagcccatgggctgaaggtgaccaacgcggggtgctgcggcgtgggcaggaacaacgggcaggtgacgtgcctgccgttccagacgccgtgcggcaaccgccacgagtacctcttctga

SEQ ID NO: 139161 - DNA, 1506 bp, Zea Mays
gggagcgccgggagtcgcctcgctacaaaagatcgcggacacgcgactctggccagggagacggacaaaaggagaggcgtggacacgggacgcgaggtagacagcgcccggcgtgacgtggcgcgagagggagagcggagaggggggctcaccaaactgcaaagtctgtctcctgactcctcgccggcgtgccggatctcctgtctctctcgcggtcggcggccgcatagcctcgttcactcgcacgacacagggcaggggggcgatgggctgcgcgacgtccaagcagttcagcaggagcgcgccggcgcacgcggatccggccgtgctggcgacccagacctcattcacggtgaacgaggtggaggcgctgtacgagctgtacaagaagctgagctgctccatcgtcaaagacgggctcatccacaaggaggagttccagctcgccttgttcaggaacagcaggagagcgaacctctttgcagacagggtcttcgatctgttcgatctcaagcggaacggagtcatcgatttcgaggagttcgtgcggtcgctcagtgtgttccaccctaaagcagatacgtcggagaagacggcgttcgctttcaagctgtatgatctgaggggaacaggctacatcgagaaagaagagctcagagagatggtcttggcgctgcttgatgagtccgacctctgcctttcagacagcaccgtcgagacgatcgtcgataacacgttcagccaagcggactcgaacggagatggcaggatagatcctgaagaatgggaggagttcgtgaagaagaacccggcaacgttaaggaacatgactctcccctatctgcaggacatcaccatgtcatttccgagcttcataatgcgttcagaagccagtgactgaaatgtttgcgtacatctgcgtgtaaggaagcaccgttccatcagctctgctgtttgttggagcctacagcttagtccatggcacgaggcaccggagaaagttcagaatgtagcagcaacggccagcagagtgcatgagggttgctgccatagctgcaggctgcagccaaacaaaatgatgaccaaagattcatctagtgtcagcttcagggttcagatggtataccagccaacaattttctttctcggtatctaaacaccgtggatgttgcgtttaaaaaaattgttgcagaggatcaacaagtctgttcatcgaagcagtgcctgagtttagaatcagaagctaactgtctattgctgagatgctttcgtctaaatcttgcgtgtagttgtaactgcaaggaaagaataacttgtggagagttggatttgttgatgaaccttagtagttcttgacttggttagttgtttccacatttcttcgcagtgccagtgcgtgcacttgtaacttgcaaattcttctcaatccacccctaatcgaagggtggatccagttccgcatgtaatgaggcaatatcatcaatagtttatgcttcgtttatcgca

SEQ ID NO: 139162 - DNA, 1125 bp, Zea Mays
gtgaatacggcaaaagcgcaggggtattccaggacaagaagcctaatcgccacggccacactactccacctccgcgcggcgatgcggagcagaagcaatggaggtgctcagctccagccgcttcgctagggcactcctcccgaacctcctcgacccggccatcaggctcctcagcaagcccccttgccgccgccgccgtgccgttcagaccctagcatccaacgcccacgcccccaccgccgcgccgtcgccgtcgccctcacttgctctgctcctcgccaccgcgctgcggggcggccgcacgggaggggagctacccgacctcgcgaccgcggccactggcggggccgggataggaacgctgctgatgagcaccacggcggcggcggtgaccaaggcacgggagagcccgtacctgctggcgctggccgccaacccgaccttcgtgtcggggctggtggcgtgggcggtggcgcaggccgccaaggcgctgctcacctccgtcgtcgagcggcggtgggacctgcggatgctcttcagctccggcgggatgccgtcctcgcacaccgcgctgtgcaccgcgctcaccgcctccgtggcgctctgccatggtgtcagcgacgcgctcttccccgtttgtctcggtttcagtcttatagttatgtacgatgccacgggcgtcaggcgccacgccggaatgcaggccgaggtactcaataagatcgttgaggacctgtttgaaggccatccgattagcgaaagaaaacttaaggagttgttaggacatactccgtcacaggtctttgccggagcgattttaggcatcctggtggcatggtattgctgccaaggctgtattgttcccatgtgacgttgttatagtatgaatgatccagaaatggaactgttccatcgcgtggattttgctgcatgtagtgtgactagtgttctggaaagtatttggtcttgactagtttgatcattggtaagatggcaactattgccccttcttgtctgggatttttcctgtatatatgtaacctgatagtatgaaacaatcaagatatccatcctttaaactttaaagtctcaatgccaagttgagactcaatttattcgtgattc

SEQ ID NO: 139163 - DNA, 4532 bp, Zea Mays
gccggaggaatccgccggcacgagacgtaaactgaggcggagcccgcggcggctgatcggggaatacatcgctgtccgcctgtcccgcgtccggcggctggtcccagccgcgacgacctggggcctcatgttctccgcagctcgccgcctcctcacgtcccgcgcccgctcccgcgccctggcggcggccacgccctacccccactccgctgtggcgtccccgtcgtgccctcgctttccgacgcccaaggagatccgcaggggcttggacgagttcgtagttggccaggacaaggccaagaaggtgctctctgttgctgtgcacaatcactacaagaggatatacaacgagtcatcaaataagtgttctgtgaaaagctgggtgcgtggtggtgtcgctacgaacagtgatgatgtcattgagcttgaaaagagtaacatccttctgattgggccgacagggtcaggacaggtaaaacactgttagcaaaaacgttagctcggtatgtgaatgtgccattcgtgattgctgatgcaacagcaattacacaggctggatattctggtgaagatgtggaatctgtaatctacaaacttctagtggctgctgacttcaatattgaagctgcagagcatggtattgtgtacattgacgaagttgataagctcacaaagaaggctgactgccgcaaggatcgaagggatgtatctggagagggtgtgcagcaagcgttgctaaaaatatttgaaggaacaatcatcagcgtgccaggaaaaagaagtcgagaaaatataccccagggttatgttgaggtcgatacacgaaacatactttttatttgtggaggtgccttctttggcttggaaaagatagtttcagaaaggttatatacgattaatagttatacaaatttatgcatttaggaattacctttcttcacatagaatttatatgtttctcaaagtactttttgtactctgcaagacatcaattttatcctgttggatttggcataccaatatgccatgagctgcggaactgcagctggagaactgttcaggaatcttcctctattgatactgtaggttcaattgcttcagcagttggcattgttttagacaatttttgtttgattctgcattgacaacaaaggttttcccaaatggtttcccacttaggttgaaaatgatgatttgattgcctacggcctgatcccagaatttattggaaggttgccaataacagttggcctgaccaatcttagtgaagagcaattggttcaagtagtaaatttctttgattttataatttaaagcaatatttcttaaaattaccatctcaaatatttccaccacctcaaaatattagaaattctctttgcaggtgctcatggagcccaaaaacgcaataggaaagcaatacaagaagctattcaaaatgaatgatgttagtttgtgattcgtttcggccaacgaaataattgcaagatttggccgattttttttactttaaacgataatttataaccaagaaagttatttatgttcatgtttcctccataaggtcaagcttcatttcactgataatgctttgaggatgatagcaaagaaggcactcgcaaaagaaacaggagcccgaggactgcggtctataatggaggacattttgacagaagcaatgtttgagattcctgatggtagacacgggaaagagaaggttattgctgttcttgttgacgaagagtctgtaggaccactacactctcgagggtgtcgagcaaaaatttttcgggatgatggagccttggaactgtatgtttaccagaacaatatcaaactgcccgggctgattcagagcaaccccagacgcagacgcattttccggctctgccttctagtcgcattatcggcaacaaagctttggatttaccagacaattccttgtttttcatcgatatatgaatggattgcatggatactatgcaaggtctacaattttacacaataaaatatgatgaggttgattttcgtgttaaactgttcacacagcaaaagaatggctggaccccacgttctgctttcttcggtagcttgcaatgattttgcaacaacaattcgtatcatttacacgctactggtagcaaacagacagttgttttgatactgaacctgaacaaatggaaaatggtttccaatggttacacatcaaaattatgtttgtatgcatccactgcagtaacacaatgctgagccagaagcaagctaatttttggcattgcggaaatcactaatcgtgctcattatattgatatataaactgacaaacggtagcttatgacttgaatgtgatgagcaaattgtggacataattttttgtggtcatcacagatatccctgctgcacattgcctccatttctttccgttggattgccttgaagtgccccctctccatcgtctccactttctgttggattgccatgaagtgccccttctccatcgtctccactttctgttggattgtcttgaagtgccccttctccggctgttttaaggcctagcttactgagaaagccaccatccagggtgtttgcatcaggagcaggcgctcctccttcattctctgtcttccttttatgggctaggatagcttcaatggcagcggcactggctttagctgcggcttcatccttagcagcaatctctgctctcctcctctccctctcttctctggcaagagcctctgccctcgccttctcttctgcagcccgggcttccgcttcagccttttccctctccacatcctcatataacttggcgatgtcatttcccctcccatctccacgtaatgctccttctaaaagctccctcattccatagctgaacagaaccttctcattcaaaagaataccttttgcaacattgactgcatcatccaaccggtcagcagcaatatatgccttcagcaatgtctcgtagcttgagatgcttgggttaactcccttctccttcatctgattgaagtattcctgagccttgtcgaccatactgaaacccaccaggccatcaataagtttatgatatgcagttgcatcaggcttcagctccaattcgtccattttgtcaaagtaagagataccatcatcgatgcgatcaacactgaagcatgcttccgtgagcagtaaatatgtctccttatccgcaccaacaccactctcacacatctcattgtagagcacctccgccttatctatcagctggttaatctgcaggtgccgaatcaaattattataggatgccacatcaggcaccagcttccattcccccattcttctgaacactgcaactgcatcttcaaatctcccagcagcacaataggtatcaaccatcaccctgaagcttctcagatcaactgcaatccgcagtggcgggtcatgttcctcaagcattctgtcgaacagcttaagtgcatcctccaacctcccattctgcccaagcgcatcaaccacctcattgtagctctcggccccaaacctcaccgcagattcaacacacagcacctctttgtaacactccataaccttttcccccgttcccataaggaagtacgccttcatgagagtcccgtacacaatgccatccagaattggttcgcccccaaccttgtccttgagttcttggtacagctccaaggctttggctccatccccagcacccacgaacccagccatgagaaggctgtagaccttgggatccggcccgacgaatccagaggtgagcatctcatccttgagcttgacggcatccgcgagccggccgtggtctgcaacgaggcactcgacgacgacgcggtaggccgtcggggagggcggcacgggggagccggggcgggcgatgatgcggaggtggtggagcgcgtcgtcggcgaggcggcgcgcggcgagcgcggataggtagagcacgtgcgtggcggcggtgggcgggacggcggcttggagcgcgaagcggtgcagcgcgaagaagtcttcgaggcggcgcgtgcggaggagcgcggcgaggacggcggcgcaggtgaaggatgaggggcggcagttggagtggagcgcgtggcgggtgaggagcgccgcctcggggaggtcggcctggggccccgagaggagcgcgaggatccggttgtggaacgcgaggcgtgacggcgccagcgtggggagcggctccgcgaggcgcactgcccgcggggaaggcgcggggatcgggggcgtcgcgacgaacgtgtccttacggcgctcgcggcgggaagccgtggccgaggcggcgtccgcgtgcgcgagcgggaagagcgccggcacgaggcggcgtgccgagaccggcttcgacagcgacatcttccgcgggtgcgcttgggcgacggccaccgggcggcgacgagggtttggggtttggggcggggatcggccttccgggttggagcattgagaacaggagatatgttactctgtgtttcgccttggctgaagaaaaacgtactcgcaag

SEQ ID NO: 139164 - DNA, 3910 bp, Zea Mays
gccggaggaatccgccggcacgagacgtaaactgaggcggagcccgcggcggctgatcggggaatacatcgctgtccgcctgtcccgcgtccggcggctggtcccagccgcgacgacctggggcctcatgttctccgcagctcgccgcctcctcacgtcccgcgcccgctcccgcgccctggcggcggccacgccctacccccactccgctgtggcgtccccgtcgtgccctcgctttccgacgcccaaggagatccgcaggggcttggacgagttcgtagttggccaggacaaggccaagaaggtgctctctgttgctgtgcacaatcactacaagaggatatacaacgagtcatcaaataagtgttctgtgaaaagctgggtgcgtggtggtgtcgctacgaacagtgatgatgtcattgagcttgaaaagagtaacatccttctgattgggccgacagggacaggtaaaacactgttagcaaaaacgttagctcggtatgtgaatgtgccattcgtgattgctgatgcaacagcaattacacaggctggatattctggtgaagatgtggaatctgtaatctacaaacttctagtggctgctgacttcaatattgaagctgcagagcatggtattgtgtacattgacgaagttgataagctcacaaagaaggctgactgccgcaaggatcgaagggatgtatctggagagggtgtgcagcaagcgttgctaaaaatatttgaaggaacaatcatcagcgtgccaggaaaaagaagtcgagaaaatataccccagggttatgttgaggtcgatacacgaaacatactttttatttgtggaggtgccttctttggcttggaaaagatagtttcagaaaggtgctcatggagcccaaaaacgcaataggaaagcaatacaagaagctattcaaaatgaatgatgtcaagcttcatttcactgataatgctttgaggatgatagcaaagaaggcactcgcaaaagaaacaggagcccgaggactgcggtctataatggaggacattttgacagaagcaatgtttgagattcctgatggtagacacgggaaagagaaggttattgctgttcttgttgacgaagagtctgtaggaccactacactctcgagggtgtcgagcaaaaatttttcgggatgatggagccttggaactgtatgtttaccagaacaatatcaaactgcccgggctgattcagagcaaccccagacgcagacgcattttccggctctgccttctagtcgcattatcggcaacaaagctttggatttaccagacaattccttgtttttcatcgatatatgaatggattgcatggatactatgcaaggtctacaattttacacaataaaatatgatgaggttgattttcgtgttaaactgttcacacagcaaaagaatggctggaccccacgttctgctttcttcggtagcttgcaatgattttgcaacaacaattcgtatcatttacacgctactggtagcaaacagacagttgttttgatactgaacctgaacaaatggaaaatggtttccaatggttacacatcaaaattatgtttgtatgcatccactgcagtaacacaatgctgagccagaagcaagctaatttttggcattgcggaaatcactaatcgtgctcattatattgatatataaactgacaaacggtagcttatgacttgaatgtgatgagcaaattgtggacataattttttgtggtcatcacagatatccctgctgcacattgcctccatttctttccgttggattgccttgaagtgccccctctccatcgtctccactttctgttggattgccatgaagtgccccttctccatcgtctccactttctgttggattgtcttgaagtgccccttctccggctgttttaaggcctagcttactgagaaagccaccatccagggtgtttgcatcaggagcaggcgctcctccttcattctctgtcttccttttatgggctaggatagcttcaatggcagcggcactggctttagctgcggcttcatccttagcagcaatctctgctctcctcctctccctctcttctctggcaagagcctctgccctcgccttctcttctgcagcccgggcttccgcttcagccttttccctctccacatcctcatataacttggcgatgtcatttcccctcccatctccacgtaatgctccttctaaaagctccctcattccatagctgaacagaaccttctcattcaaaagaataccttttgcaacattgactgcatcatccaaccggtcagcagcaatatatgccttcagcaatgtctcgtagcttgagatgcttgggttaactcccttctccttcatctgattgaagtattcctgagccttgtcgaccatactgaaacccaccaggccatcaataagtttatgatatgcagttgcatcaggcttcagctccaattcgtccattttgtcaaagtaagagataccatcatcgatgcgatcaacactgaagcatgcttccgtgagcagtaaatatgtctccttatccgcaccaacaccactctcacacatctcattgtagagcacctccgccttatctatcagctggttaatctgcaggtgccgaatcaaattattataggatgccacatcaggcaccagcttccattcccccattcttctgaacactgcaactgcatcttcaaatctcccagcagcacaataggtatcaaccatcaccctgaagcttctcagatcaactgcaatccgcagtggcgggtcatgttcctcaagcattctgtcgaacagcttaagtgcatcctccaacctcccattctgcccaagcgcatcaaccacctcattgtagctctcggccccaaacctcaccgcagattcaacacacagcacctctttgtaacactccataaccttttcccccgttcccataaggaagtacgccttcatgagagtcccgtacacaatgccatccagaattggttcgcccccaaccttgtccttgagttcttggtacagctccaaggctttggctccatccccagcacccacgaacccagccatgagaaggctgtagaccttgggatccggcccgacgaatccagaggtgagcatctcatccttgagcttgacggcatccgcgagccggccgtggtctgcaacgaggcactcgacgacgacgcggtaggccgtcggggagggcggcacgggggagccggggcgggcgatgatgcggaggtggtggagcgcgtcgtcggcgaggcggcgcgcggcgagcgcggataggtagagcacgtgcgtggcggcggtgggcgggacggcggcttggagcgcgaagcggtgcagcgcgaagaagtcttcgaggcggcgcgtgcggaggagcgcggcgaggacggcggcgcaggtgaaggatgaggggcggcagttggagtggagcgcgtggcgggtgaggagcgccgcctcggggaggtcggcctggggccccgagaggagcgcgaggatccggttgtggaacgcgaggcgtgacggcgccagcgtggggagcggctccgcgaggcgcactgcccgcggggaaggcgcggggatcgggggcgtcgcgacgaacgtgtccttacggcgctcgcggcgggaagccgtggccgaggcggcgtccgcgtgcgcgagcgggaagagcgccggcacgaggcggcgtgccgagaccggcttcgacagcgacatcttccgcgggtgcgcttgggcgacggccaccgggcggcgacgagggtttggggtttggggcggggatcggccttccgggttggagcattgagaacaggagatatgttactctgtgtttcgccttggctgaagaaaaacgtactcgcaag

SEQ ID NO: 139165 - DNA, 4527 bp, Zea Mays
gccggaggaatccgccggcacgagacgtaaactgaggcggagcccgcggcggctgatcggggaatacatcgctgtccgcctgtcccgcgtccggcggctggtcccagccgcgacgacctggggcctcatgttctccgcagctcgccgcctcctcacgtcccgcgcccgctcccgcgccctggcggcggccacgccctacccccactccgctgtggcgtccccgtcgtgccctcgctttccgacgcccaaggagatccgcaggggcttggacgagttcgtagttggccaggacaaggccaagaaggtgctctctgttgctgtgcacaatcactacaagaggatatacaacgagtcatcaaataagtgttctgtgaaaagctgggtgcgtggtggtgtcgctacgaacagtgatgatgtcattgagcttgaaaagagtaacatccttctgattgggccgacagggtcaggtaaaacactgttagcaaaaacgttagctcggtatgtgaatgtgccattcgtgattgctgatgcaacagcaattacacaggctggatattctggtgaagatgtggaatctgtaatctacaaacttctagtggctgctgacttcaatattgaagctgcagagcatggtattgtgtacattgacgaagttgataagctcacaaagaaggctgactgccgcaaggatcgaagggatgtatctggagagggtgtgcagcaagcgttgctaaaaatatttgaaggaacaatcatcagcgtgccaggaaaaagaagtcgagaaaatataccccagggttatgttgaggtcgatacacgaaacatactttttatttgtggaggtgccttctttggcttggaaaagatagtttcagaaaggttatatacgattaatagttatacaaatttatgcatttaggaattacctttcttcacatagaatttatatgtttctcaaagtactttttgtactctgcaagacatcaattttatcctgttggatttggcataccaatatgccatgagctgcggaactgcagctggagaactgttcaggaatcttcctctattgatactgtaggttcaattgcttcagcagttggcattgttttagacaatttttgtttgattctgcattgacaacaaaggttttcccaaatggtttcccacttaggttgaaaatgatgatttgattgcctacggcctgatcccagaatttattggaaggttgccaataacagttggcctgaccaatcttagtgaagagcaattggttcaagtagtaaatttctttgattttataatttaaagcaatatttcttaaaattaccatctcaaatatttccaccacctcaaaatattagaaattctctttgcaggtgctcatggagcccaaaaacgcaataggaaagcaatacaagaagctattcaaaatgaatgatgttagtttgtgattcgtttcggccaacgaaataattgcaagatttggccgattttttttactttaaacgataatttataaccaagaaagttatttatgttcatgtttcctccataaggtcaagcttcatttcactgataatgctttgaggatgatagcaaagaaggcactcgcaaaagaaacaggagcccgaggactgcggtctataatggaggacattttgacagaagcaatgtttgagattcctgatggtagacacgggaaagagaaggttattgctgttcttgttgacgaagagtctgtaggaccactacactctcgagggtgtcgagcaaaaatttttcgggatgatggagccttggaactgtatgtttaccagaacaatatcaaactgcccgggctgattcagagcaaccccagacgcagacgcattttccggctctgccttctagtcgcattatcggcaacaaagctttggatttaccagacaattccttgtttttcatcgatatatgaatggattgcatggatactatgcaaggtctacaattttacacaataaaatatgatgaggttgattttcgtgttaaactgttcacacagcaaaagaatggctggaccccacgttctgctttcttcggtagcttgcaatgattttgcaacaacaattcgtatcatttacacgctactggtagcaaacagacagttgttttgatactgaacctgaacaaatggaaaatggtttccaatggttacacatcaaaattatgtttgtatgcatccactgcagtaacacaatgctgagccagaagcaagctaatttttggcattgcggaaatcactaatcgtgctcattatattgatatataaactgacaaacggtagcttatgacttgaatgtgatgagcaaattgtggacataattttttgtggtcatcacagatatccctgctgcacattgcctccatttctttccgttggattgccttgaagtgccccctctccatcgtctccactttctgttggattgccatgaagtgccccttctccatcgtctccactttctgttggattgtcttgaagtgccccttctccggctgttttaaggcctagcttactgagaaagccaccatccagggtgtttgcatcaggagcaggcgctcctccttcattctctgtcttccttttatgggctaggatagcttcaatggcagcggcactggctttagctgcggcttcatccttagcagcaatctctgctctcctcctctccctctcttctctggcaagagcctctgccctcgccttctcttctgcagcccgggcttccgcttcagccttttccctctccacatcctcatataacttggcgatgtcatttcccctcccatctccacgtaatgctccttctaaaagctccctcattccatagctgaacagaaccttctcattcaaaagaataccttttgcaacattgactgcatcatccaaccggtcagcagcaatatatgccttcagcaatgtctcgtagcttgagatgcttgggttaactcccttctccttcatctgattgaagtattcctgagccttgtcgaccatactgaaacccaccaggccatcaataagtttatgatatgcagttgcatcaggcttcagctccaattcgtccattttgtcaaagtaagagataccatcatcgatgcgatcaacactgaagcatgcttccgtgagcagtaaatatgtctccttatccgcaccaacaccactctcacacatctcattgtagagcacctccgccttatctatcagctggttaatctgcaggtgccgaatcaaattattataggatgccacatcaggcaccagcttccattcccccattcttctgaacactgcaactgcatcttcaaatctcccagcagcacaataggtatcaaccatcaccctgaagcttctcagatcaactgcaatccgcagtggcgggtcatgttcctcaagcattctgtcgaacagcttaagtgcatcctccaacctcccattctgcccaagcgcatcaaccacctcattgtagctctcggccccaaacctcaccgcagattcaacacacagcacctctttgtaacactccataaccttttcccccgttcccataaggaagtacgccttcatgagagtcccgtacacaatgccatccagaattggttcgcccccaaccttgtccttgagttcttggtacagctccaaggctttggctccatccccagcacccacgaacccagccatgagaaggctgtagaccttgggatccggcccgacgaatccagaggtgagcatctcatccttgagcttgacggcatccgcgagccggccgtggtctgcaacgaggcactcgacgacgacgcggtaggccgtcggggagggcggcacgggggagccggggcgggcgatgatgcggaggtggtggagcgcgtcgtcggcgaggcggcgcgcggcgagcgcggataggtagagcacgtgcgtggcggcggtgggcgggacggcggcttggagcgcgaagcggtgcagcgcgaagaagtcttcgaggcggcgcgtgcggaggagcgcggcgaggacggcggcgcaggtgaaggatgaggggcggcagttggagtggagcgcgtggcgggtgaggagcgccgcctcggggaggtcggcctggggccccgagaggagcgcgaggatccggttgtggaacgcgaggcgtgacggcgccagcgtggggagcggctccgcgaggcgcactgcccgcggggaaggcgcggggatcgggggcgtcgcgacgaacgtgtccttacggcgctcgcggcgggaagccgtggccgaggcggcgtccgcgtgcgcgagcgggaagagcgccggcacgaggcggcgtgccgagaccggcttcgacagcgacatcttccgcgggtgcgcttgggcgacggccaccgggcggcgacgagggtttggggtttggggcggggatcggccttccgggttggagcattgagaacaggagatatgttactctgtgtttcgccttggctgaagaaaaacgtactcgcaag

SEQ ID NO: 139166 - DNA, 336 bp, Zea Mays
atgacggcggcaatttctcgctaccagccatgggggtgctcggcgacggggctcaccagggcacggctagatggggtagatgctcgagaggatagcgacgcccgaccttattcccgcgagggcaccgcaacggtccgagaaaggggggggtctccatgcgtgcccgggacaatcgactggatctcccaagagttcggcgaagtctgttacgagctcggggaagcggacgaccaggcaatggggtccaccgtcagtgcctacgcggccagatgtgaacactactggcacaagggtcccaccgcgaagtcactgcgtgctggggatcaggagcgttga

SEQ ID NO: 139167 - DNA, 1803 bp, Zea Mays
gcagctgctgcaccgcgcgctgcggctgggcggtcgccgcagggccggcgtcctgatgctgctcgcagtcgtgtccgccgctgtcttctcctctctcttcgccgtcgtcaaagatgacagcaattcaatcagtatcgtaaataattatgaagtaccaaatgccatacagaagtcagtgtatcccagcacaacacggcctctaatgatgtctggaaaccaatactccaccagtgttgtcaacaaaatcgagcttccaaatcggcttcatcttacgtatgcaaacttcacacatccttgcgaaggtttctcagtccctcctcccctggttgataagaaacgcactggaccccgaccatgccctgtttgctatgtttctgtggatcaggcatttgccttgatgcccctacaagcttcaccatcacctgtcgtaaagaacttaaactatgtatcagaagatggtgttactgcaaatttatcaaatctaggatctggatttggagggcatccatctctggagcagagaaacaaatctttcaacattaatgagtcaatgactgtccactgtggctttgttagaggaaagaagcctggccaaggtactggattcgatatcaaggatgatgatctgctagagatggagcaatgccgtgagctagtcgtagcttctgctatttttggaaattatgatatgattcagcatccgaggaacatcagtgaattttcaaaggcaaatgcatgtttctatatgtttgtagatgaagaaacagaggcttatgtcaagaattctagttctttgtacaataataataaagttggactgtggaggctggtggttgtccgaaacctcccttatgaagatccaaggcgtacgggaaagattccaaaacttctgctccataggctttttccaaacgtgaaattttcagtttggatagatgcaaagcttcagcttgttgcggatccctatctcctgcttgagaggttcctgtggaggaagaataccacttttgcaatctctcggcattacaaacgctttgatgtgttcgaagaagcagaagctaacaaagctgctggaaagtattacaacgcatccatcgattaccaaatagagttttacagaaatgagggcctaacacattattctcctgccaagcttcccatcacaagtgatgtccctgaaggctgtgtgatcatcagagaacacatccccatcacgaacctcttcacgtgcttatggttcaatgaagttgatcgcttcacctccagggaccaaataagtttcagcaccgtccgggacaaaatcagggctagagttggctggatgcccgagatgttcatggactgcgagaggcgcaactttgtcgttcaggcgtaccacagagagctactggagcagatgattgcatcaggtaggatgcccccttcgggggctgtggtggtgaccgacgcagcaccatctcggaaagtccgggcaggtagcaggaaggctactccgtcgaagaagccctccgtgaagcggaaaaaagagaagaaatcgagctcgcgacggcgtctcccgaaacccgtcgccggtggtttgggtgctatgtgacctaagttttcgtcgagtagcagagtcttgatactcccacagtcacacacttatacagcgtgtaccggaatacaaacaatgttccattacttaggtctggggcttgtaatcgtgccccggcgaaatttgttcatattactcttcatcgttgttgtacataacatctccaaaccaatattcaattttgttcattgatgttatgttcagttatt

SEQ ID NO: 139168 - DNA, 1024 bp, Zea Mays
gcaacctgctgctctatatcctacgactagctagctagctagctactgtgtagctactagcgtactctacgctgcagctgggcaagaatcgacgacgccacacgatgacgacgacgatggcttatttgctcgccagtaataagtgcgtgctgctgtccctctccgtcgtcgtggtcctctgtctcggcggcggcgcctccgccatgggcagcctgcccccgccaccgccgatggtgaacttcagcatcggcgtgcagggcgtggtgtggtgcaacacgtgcaggtaccccggctacttcgcgcccatggacgcgtccccgctcccaggcgcgaaggtgtacctgcggtgcaaacacgggctacgcgcgctgacggtggcggggcagtgcggcccgggcggctacttcctgatccagacgtcgcagcaggtgtcggcgttcacgagccagcagtgccgggtgtacgtgccgcgctcgcccgtgcgcgcctgcggggtgcccgcctacccggcggggcgcagggggatgccgctcaagttccaggagttcgtcaagcgcgacaacggcttgcaggggatgtactccgtcggcaaccgcctcttccgccccaagaaccccgccaagtgctagctatctactcaccgatcgacccagatcgtccctgtccatgctccatgcgtacgtacgtgtatctgttgatgcaagccagagccagctgcatgcagggacatgaatagttttctttaaaagaaaaataagcaagctaggttaattggctgttgagatcgttcatcagttagtcgggtaattttagttgcagttggtcgttagaccgtttctgttatagactgaatcagtgaaactagtttcgctgctgctcggtcgattggatatattgatgtactcataatcaagaacgattgagcatactgctgcatacctgccggggttttttttgcactgttatctgcatgcttaccaattattgaattagtcttgagcaaattttgaaaaggaaaaaaaaa

SEQ ID NO: 139169 - DNA, 1016 bp, Zea Mays
gcaacctgctgctctatatcctacgactagctagctagctagctactgtgtagctactagcgtactctacgctgcagctgggcaagaatcgacgacgccacacgatgacgacgacgatggcttatttgctcgccagtaataagtgcgtgctgctgtccctctccgtcgtcgtggtcctctgtctcggcggcggcgcctccgccatgggcagcctgcccccgccaccgccgatggtgaacttcagcatcggcgtgcagggcgtggtgtggtgcaacacgtgcaggtaccccggctacttcgcgcccatggacgcgtccccgctcccaggtgtacctgcggtgcaaacacgggctacgcgcgctgacggtggcggggcagtgcggcccgggcggctacttcctgatccagacgtcgcagcaggtgtcggcgttcacgagccagcagtgccgggtgtacgtgccgcgctcgcccgtgcgcgcctgcggggtgcccgcctacccggcggggcgcagggggatgccgctcaagttccaggagttcgtcaagcgcgacaacggcttgcaggggatgtactccgtcggcaaccgcctcttccgccccaagaaccccgccaagtgctagctatctactcaccgatcgacccagatcgtccctgtccatgctccatgcgtacgtacgtgtatctgttgatgcaagccagagccagctgcatgcagggacatgaatagttttctttaaaagaaaaataagcaagctaggttaattggctgttgagatcgttcatcagttagtcgggtaattttagttgcagttggtcgttagaccgtttctgttatagactgaatcagtgaaactagtttcgctgctgctcggtcgattggatatattgatgtactcataatcaagaacgattgagcatactgctgcatacctgccggggttttttttgcactgttatctgcatgcttaccaattattgaattagtcttgagcaaattttgaaaaggaaaaaaaaa

SEQ ID NO: 139170 - DNA, 1126 bp, Zea Mays
gcaacctgctgctctatatcctacgactagctagctagctagctactgtgtagctactagcgtactctacgctgcagctgggcaagaatcgacgacgccacacgatgacgacgacgatggcttatttgctcgccagtaataagtgcgtgctgctgtccctctccgtcgtcgtggtcctctgtctcggcggcggcgcctccgccatgggcagcctgcccccgccaccgccgatggtgaacttcagcatcggcgtgcagggcgtggtgtggtgcaacacgtgcaggtaccccggctacttcgcgcccatggacgcgtccccgctcccaggtatatatatatacgacagccagtagcagctagcccagtcgtctgtccattgttgccagtgctcctggacgtcgagacgcatatatacacattgcattgcaggcgcgaaggtgtacctgcggtgcaaacacgggctacgcgcgctgacggtggcggggcagtgcggcccgggcggctacttcctgatccagacgtcgcagcaggtgtcggcgttcacgagccagcagtgccgggtgtacgtgccgcgctcgcccgtgcgcgcctgcggggtgcccgcctacccggcggggcgcagggggatgccgctcaagttccaggagttcgtcaagcgcgacaacggcttgcaggggatgtactccgtcggcaaccgcctcttccgccccaagaaccccgccaagtgctagctatctactcaccgatcgacccagatcgtccctgtccatgctccatgcgtacgtacgtgtatctgttgatgcaagccagagccagctgcatgcagggacatgaatagttttctttaaaagaaaaataagcaagctaggttaattggctgttgagatcgttcatcagttagtcgggtaattttagttgcagttggtcgttagaccgtttctgttatagactgaatcagtgaaactagtttcgctgctgctcggtcgattggatatattgatgtactcataatcaagaacgattgagcatactgctgcatacctgccggggttttttttgcactgttatctgcatgcttaccaattattgaattagtcttgagcaaattttgaaaaggaaaaaaaaa

SEQ ID NO: 139171 - DNA, 1138 bp, Zea Mays
ttgtttgtttgtttgatgagaaagcgcaaacgggagagaaaccctagctggctagctctcccgcctctctataaatcagcgcagcctgttcgtacagcgccacacaccacagttagcttcctttcaattattgtatttcagtcgagttgctaaacaacacgaactcctcagtcgtttgagttttgaggaggcaagcaagaggacccatcgatggcctccttgaaggaccactgtgccgtggtggcagttgtagtggcgatctgcttcgtcgtcctcgccgccgccctcccttcgcacgcgtcgacggcggtggacgagccggcgaagtataagcccagcagagcgccagcgccgtcccctgcatctgcatcatcctacgtcccgccgccggtccagcccgtgatcgtcgtccagggcgtcatctactgcaagtcctgcaagctcaggggctacaacagcggcatggacgcgtcccctctccccaatgcgacggcgagcctggtgtgctacggcgacgcggagagcaagtaccgggtgctgaaccagacgagcacggccaccgacacgaacggctacttcatcgtgatggtgtacgacgtgggcatgttcgaccgccgcagctgcaggctgtacctccgctcctcgccgacggcgctctgcgccgcgcccttcatcccgtccaaccccaagctggggctcaccctcgtgagggaccgcgcggccacggcgcccaggggcgcgcgcggcatcttccaccccaagactgcgctcatgtacgcgccgggcaccggcggcaagtgcccgccgtactgatgtgatggtgcgtacgtggtctggactcgggagtcggagcggcgccatgagggggtgttcactggtggtgcatgggcggcatgcatggatcgtcgtcgtgggtttggactttggtcaagaggacaatgtcagaggcaaaaaaataaaaataaaaaaggagaagtatgtggtgattgttgtcacgacgtccgtattgtgtcctcgttttagtcgatactcgatggagtatctgttgactgttgctgttcgttgagtctgtgtaaccgtttcttcgtcaatcggtcaatcctgcctttggacaaaagaacgaaatagttgcacgtcc

SEQ ID NO: 139172 - DNA, 1410 bp, Zea Mays
atggagggttccaattccaactcgcacggtggcgccggaggcggtggtggagggtccagctcgccgacgccgttcctcgtcaagacctacgagatggtggaggacccggcgaccatccacgtcgtgtcgtggggccccggcggcgccagcttcgtggtgtggaacccgccggacttgtcgcgcgacctgctgcccaagtacttcaagcacagcaacttctccagcttcatcaggcagctcaacacatatggtttccggaagatcaatcccgagagatgggagttcgccaacgacgacttcatcaggggacacaagcaccttctgaaacgcatccaccggcgcaaaccggtgcacagccactcgctgcgcacccaagcgagcgggccgctagcggagtcccagaggcgcgagctcgaggacgagatcagcaggctcaggtacgagaagagcctgctcctggcggacctccagaggcagaaccagcagcagcgcgggatcagctggcagatgcagtcgctggagagcaggctggcgcagatggaggagcgccagaggagcgtcgtggcctccctgtgcgacatcctgcagaggcgcggggtcgttcgtgttccggcctccgcgctggagacgacggaccactccagcaagaagaggagggttccgattcccaagaccgatctcttcgtcgccggcgaacaacccaaggtcgaagagcagcaggtgctgccgttcctgcaggcggtgggcgcagaagcgccaggcgtgtcgccgatccgcgttttggatgccgagccgtttcagaagatggagctggccttggtgtcgctggaggatttcttccagagggcggcaccccccgcgcctgctctggaaatgtgcactggtgctgctgctgctgctgctgaacccagccctcctctgactcttggcgagatgctctcagtcccagcaccagtggataccaatatcgatctgcagctgcagtcatcagcttgccagaatccctttgcttcgacctcagggcgagaccagatgtcttctccactggcagaacctccgagctacgcccagagcccgatgctgctgccaatggcacagctccatgggtacgactatagggcagctcaagtcgacatgtgctctgacaccacaactggcgacacttcacaagatgagaccaccagtgaaaccggaggttcccatgggccggccaaggtgaacgatgtgttctgggagcggtttctcacagacgcagagggcaaaagcgaggcgatagaagcaaaggaagatgtcaaggctgccgtagaccgcagctgtcttcgtctccacgacaatgttgatcggatcactgagcagatggggcagctcgattcagctgagaacgactcctatgcaatccagaattgctga

SEQ ID NO: 139173 - DNA, 378 bp, Zea Mays
atgggctcacgcagcggcgacagggcgccaacgtcgtcgtcgtcgtcgtcgctggcgctgcgggccgcgtgggcgtgccttgccctgtgcctgctcctgctgctgtctcgctgcccgccatgccagggccgcgagctgctgcaggcggaggccgaaggggaaggcggcaaggtgatgctgatgcacttcgagggcggcctagtgttcagagtgccaccggcgccagcaagcgtcgacgtcggcgaggaggaggagccggcgccggcggcggcagtgccggtcccggtgcccagcagcaggagggggttcgcgcccgtcgccgccggcagggccgcgcggtcgatgcggtcggtgcccagtcctggcgtcggccactag

SEQ ID NO: 139174 - DNA, 1516 bp, Zea Mays
ctctcgcgtcgctcgtcttcatctccctgtggccggcgctcgttctccaaccatccatgaccgccggtcgctcctttctgtcccgcccgatgctctgcactgccccatcgcttggcctccagctcgtcgttctccctgcttcaagctttttttttccccagccacggagctcgccgtacctcctctctcttcctcactgttcacgcgcgtccccagctcctttgccacgcccggcctgctcttcttcatggccgcgcgcccagattctctgctcgaccgcgccccctgctgcgcgcgctcgtgcgctctgcgcttcgctcgccatcgcaggcagcggcgccctgcttctccccaaccacggcgtcctctgctccctctgccgaccggaacgccctgctcggattccgctcgcggagctctctttccccagcgccgtttgccgtcctggtgcaagctccagctgctgcgcccgactggcttcctgcatcgcgcccagccgcgttcttcacagccggctgctgctccctggcgcagctcgttcagtccagccgcacttgctttcccatggccgcgcgcgaagttttcggctcgtcgcgccctggattccctggccttcgcgccctggctctctgcccagagttccctgttctgctcggcgctctccctgctcgctctggacgcgcagctctcttcgtcgcgcccaggccgtatcccgctccagcttaccgaagtccctcccacggccgtctccctcaagccgccgtgagctccatgctctgaaattcgtgcatcgcctccttcccatttgtcatgccttgcgacgctcgtcatggacctcgtcgtcgacccacgttgtgcccacgacgtgctcgttgactccgatgatttgatttccaatttcatgctgcttatgtcgaccctcagaactccttgtcgtgctcaaccctgcaagtctccaactcgtcgacatcccttgcgtcgtcgaacgatcccgagaaatcggataaagcaataaatcccgtgtggtgcttgccgggtgctcggaaaaagttctatgcaagaatcgttgctgtctgcgcgaagttatggtcaatatggtaatcatactctgattcgctaccgctattattttgttttagtggatggattaatagatatggaggttgcgacgatcctttttctttagcataggcacgcttagtgattatggccagctcggttgttgtgtcggtgtgctgttacgcgaccatttttattaatttagcatacgtatgttgtgatgttcgtaattatgaaatagtcgcgaggtgtggtaaaatataggtgtaaggcacacctgctagcgcgaacgattaaatatcgtatttaactcgtagactgtacaagttaatccgataaaatggcttagaaaactagttaagttagttttaagtatggtgatggccgattgtgattagcaccatcgatctgtattttatgcgtcttaatttacaaaatggaaacatatgtctagtct

SEQ ID NO: 139175 - DNA, 1753 bp, Zea Mays
tgatttagcactatctgctgatacagtgaacacagtgaaaaccttgcgagatatcacagaaacaggtgttgagccactggccctgatgtctcaacttgctacaataatcactgacatccttgctggcacctatacattaacacgagaaagagttcggaggaaattcttcaaacgtccaaccttatcaaaggatgatatggaaaagctgcgccaagccttgaaaacactctctgaagctgaaaaacagttgagggtctctaatgacaagatgacatggcttacagctgctcttcttcagcttgcacctgataaacaatacgtattaccgagttcatccccgagcacaagtcttattcaaggtctgtttacctgccccgagggagacatagcaaggaactctgttatggatcatagtgatatatatgctggtgcccgtagcttggcaagagcatctgaccttggaaatcaataccatagagatgctaatccagtgtctggttccagcaacaacatggcaaacaattaccatgttggaaggagacctggggaacataccccagacagccatgtgttgccaaccggtgctacaagagtgaatgaaggatctaggtatggcaaaactgacagtgaaatgatttggcaggctgtgctagagaatgttcagtcagactcattaagaagattgttagccagagagggtcgactgatatccgtcagcctaggcacagctccaactgtacaattaatattcaactctcgagtaaataaatctaaagctgagaagtataggggccaaattctgcaggcatttgaatctgttctttcttctaccataatacttgaaattcgatatgaatctaaggatgatctggcagcaggccatgctccagttatttctgcctaccctgaggatggctcctcaaatctggtattaaggaggtcttttactaaacatagttcagtttcttcggggggcgagaacttaattaggaggcttcagaaagatagtgtggtccaacttggtagctcaaatcagacacgctggatgcaatctgatccacatatattgactgaaggtgaaattattgaagttggatctcaaatggattggcgtgctgaacaagatagtggcattgttatggcaaacagaagacaagaggctgtctcgggagaaggtttgtcatcacagaatcaagaaatttctcagggaggaaaaattgtgaataatggagatggtcggcaaaagaacattgtgagaggcaaggtatctcttgctaatgttattaaccaggcggaatcttgttcccaacaaggtggctggtctagacacaaagctgtatcaattgcagaaaagctagagcaagataatttgagattggagcctagatccagtttgctttgttggaaagcttcaagcacctctagacggaagctgtctgcactgaagatcaggacacgaagatcacgagctttatcaaggctcgccttgtgcggaaggtgtatttcagtgagatctccaagatgaagcattagggggtcaatcgccccagattttacatgtagctaacttagcagggcacccataatccataatttattctctgtagttgtagcagcgacctagaggtgtcattctgtagcacattgtgtaacatgtaggagagagataaacacatatccccattctttctattgaaacaccagaaatagttgctcttgctccataattcgttaatctgaacttctgaagcca

SEQ ID NO: 139176 - DNA, 1767 bp, Zea Mays
tctcggcctcctctccaccccccttggcctgtcgcgaaacgattgcccgacacgggtccccaaccaagatggcctagccggagaggttgaaccagcgcaatgccggcgccagcgagcggcggcggtggcggggaccacctccgcggccacgcgcacctgaccaactgcatccacctgcgccaccaccacgcccacgcccacgcccacggcgcgtccgggcggaggcgcagccccacggggtcctcggcgtcggcgtcggccgcgctgatgcgggacctcctggccctgcagcgctcgcgctcgctgcgggacccatccacccgccgctccgtcgacgactccgcttccaacaaccgggtcgccgccgacccggacgacgccgaccactcccgcgccggcgcgatcaagacgctcctcgaccagctcacggagaacccgcaccccaagcccggccgccggccccggcgccggttcaggcgaagcgctacccgtcgcgtcgcccagcccgctgccgccccccgcgtctccgtcaactccagctcccaggaggccgtctgcggcaacaggtacctcttcggcggcaccggcggagccgacggcggtgtcgagctgatgcagcagcagcagcaggtgtcgcacgagtcgcacaacgtgtgcggcatcccgtggaactggtcgcgcatccaccaccgcggcaagtccatcctcgacatggccggccggagcctctcgtgcggcctgtccgaccccaagtcgacgtcggcggcgcggaggtccgaacccgccacctccgccgcctcgtgcggccacgtcaacgggtcacgctcgcacccgcatttcccggtcaccgcgaggctgacgtcctcgagcagttcagactccgactctctgcctctgcttgtcgacggcgtgcgcaacgccgtcggtggcatttccagcagcttctccggggagctcgggattttctccaagagcagcgagctggactccgacctcgcgtccgaggcacggtctgggcagaagtcgcggggctcgcaccgtgcccgacaccggagctttacgcagaagtatgctccaaggactttcaaagacgtcgtcggccagagcttggtggtgcaggcgctgtccaatgccattctgaagaagaagatcggactggtgtatgtcttctatgggccacatggcacgggcaagacctcgtgcgccagggtgttcgcaaaggctttgaattgccattccccggagcacccgaggccctgtgattcatgtgcctcttgtattgcacacaatctgggcaagagcaggagcttgctggagattggaccggttggtaatatagatctggatggcattgtggatatccttgacaatgtgatgctctcgccggtgaaatcccagcacagggtgtttataattgatgactgcaacacattgccgcctgatacatggagtgtcatatccaaggtcgtcgaacgtgcacctaggcgtgtggtttttattctcatcagccctaatcttgatctccctcatataatcgtgtcgaggtgccaaaagttctttttccccaaactgaaggagtgcgacattatcagcactttgcagtggatttctaccagcgaaggcctggatgttgatagagatgccttgaaacttattgcttcccggtcagacgggtcactgagggatgccgagatgactctggatcaactcagtctgcttgggcagacaatttcgatgtcccttgttcaagaacttaataactgctag

SEQ ID NO: 139177 - DNA, 947 bp, Zea Mays
aactcacctgcgcggtgacagcacctcgccggcttttcttccctcaggcttgcactttgcacagcctctcacatcacatgccgctgatgcttcgcgtctcctactccttcctgcttccacctattaatccaccccactctcttccctccccgttccacccgcctctaccgccgcgagatccggctccgcttccagaagcttctggaacgcccgttccatgagcgtctgatcggccgccgccatgggctgcgctggatccacccccaaagtcgacgagaacagcaagaaactgaaaaggcctaaggcttggaagcatacccaaccaattacaccggcacggctgaaacagatgcgtgatgagttctgggacacggctccgcactacggaggccaaaaagatctgggatgctctgagggttgccgcggagtccgatctagcccttgcacagaccatcgtggacagtgctggaatcatcgtgtcgaaccctgacatgacgctctgctacgacgagagaggcgccaagtacgagctgcccaagtatgtcttgagcgagccagcgaacctgatccgcgacgggtgattctggaccccaaaaggttttgcagcagcacgaaacagggccacgtgaatttatgcggatggttgattcggtcgctggttctggattgtaactttcagggacagtgaaagctcgtttcagcgctggatgttgtatagtgatgttattggacacgatgtgtagtctctagacctgctactgctgaactcggtcattcagggacagtgaatgcagtgtcgtttaggctatatgctgcagacttattcacctcatatttcagacttcagacttaactgtatctatataaatagtgcagtttgcactcatatttcagacttcagacttcactgtatctatatagatagtgcagtttgcaatgcaaaaaaa

SEQ ID NO: 139178 - DNA, 949 bp, Zea Mays
aactcacctgcgcggtgacagcacctcgccggcttttcttccctcaggcttgcactttgcacagcctctcacatcacatgccgctgatgcttcgcgtctcctactccttcctgcttccacctattaatccaccccactctcttccctccccgttccacccgcctctaccgccgcgagatccggctccgcttccagaagcttctggaacgcccgttccatgagcgtctgatcggccgccgccatgggctgcgctggatccacccccaaagtcgacgagaacagcaagaaactgaaaaggcctaaggcttggaagcatacccaaccaattacaccggcacggctgaaacagatgcgtgatgagttctgggacacggctccgcactacggaggccaaaaagagatctgggatgctctgagggttgccgcggagtccgatctagcccttgcacagaccatcgtggacagtgctggaatcatcgtgtcgaaccctgacatgacgctctgctacgacgagagaggcgccaagtacgagctgcccaagtatgtcttgagcgagccagcgaacctgatccgcgacgggtgattctggaccccaaaaggttttgcagcagcacgaaacagggccacgtgaatttatgcggatggttgattcggtcgctggttctggattgtaactttcagggacagtgaaagctcgtttcagcgctggatgttgtatagtgatgttattggacacgatgtgtagtctctagacctgctactgctgaactcggtcattcagggacagtgaatgcagtgtcgtttaggctatatgctgcagacttattcacctcatatttcagacttcagacttaactgtatctatataaatagtgcagtttgcactcatatttcagacttcagacttcactgtatctatatagatagtgcagtttgcaatgcaaaaaaa

SEQ ID NO: 139179 - DNA, 1260 bp, Zea Mays
aactcacctgcgcggtgacagcacctcgccggcttttcttccctcaggcttgcactttgcacagcctctcacatcacatgccgctgatgcttcgcgtctcctactccttcctgcttccacctattaatccaccccactctcttccctccccgttccacccgcctctaccgccgcgagatccggctccgcttccagaagcttctggaacgcccgttccatgagcgtctgatcggccgccgccatgggctgcgctggatccacccccaaagtcgacgagaacagcaagaaactgaaaaggcctaaggcttggaagcatacccaaccaattacaccggcacggctgaaacagatgcgtgatgagttctgggacacggctccgcactacggaggccaaaaaggtacaggttttagctgtttgtgccaagttgaacagaaccagttcttgtgcgggtgtgtgtgtgcgcgcgcgcgcgcgcttcatggtcctcgcgacgttggttggtttcgtcatctcttatgtttcgatatagtttcatgatagtaactggtcggtgcttgttttgacctgtccaatcattatccttaaaaattaggagtttaactatgagacgtactgctaattagcgtacatcagtgttgtaacgagtcaccgcctcgctgtccagagatctgggatgctctgagggttgccgcggagtccgatctagcccttgcacagaccatcgtggacagtgctggaatcatcgtgtcgaaccctgacatgacgctctgctacgacgagagaggtgagcaaggacttgctaccccccattttcacgactctctttaccgtcctgttgtgcatgcaagaccaatgtcgaaaactgaagactccgttgcaggcgccaagtacgagctgcccaagtatgtcttgagcgagccagcgaacctgatccgcgacgggtgattctggaccccaaaaggttttgcagcagcacgaaacagggccacgtgaatttatgcggatggttgattcggtcgctggttctggattgtaactttcagggacagtgaaagctcgtttcagcgctggatgttgtatagtgatgttattggacacgatgtgtagtctctagacctgctactgctgaactcggtcattcagggacagtgaatgcagtgtcgtttaggctatatgctgcagacttattcacctcatatttcagacttcagacttaactgtatctatataaatagtgcagtttgcactcatatttcaga

SEQ ID NO: 139180 - DNA, 993 bp, Zea Mays
aactcacctgcgcggtgacagcacctcgccggcttttcttccctcaggcttgcactttgcacagcctctcacatcacatgccgctgatgcttcgcgtctcctactccttcctgcttccacctattaatccaccccactctcttccctccccgttccacccgcctctaccgccgcgagatccggctccgcttccagaagcttctggaacgcccgttccatgagcgtctgatcggccgccgccatgggctgcgctggatccacccccaaagtcgacgagaacagcaagaaactgaaaaggcctaaggcttggaagcatacccaaccaattacaccggcacggctgaaacagatgcgtgatgagttctgggacacggctccgcactacggaggccaaaaagagatctgggatgctctgagggttgccgcggagtccgatctagcccttgcacagaccatcgtggacagtgctggaatcatcgtgtcgaaccctgacatgacgctctgctacgacgagagaggtgagcaaggacttgctaccccccattttcacgactctctttaccgtcctgttgtgcatgcaagaccaatgtcgaaaactgaagactccgttgcaggcgccaagtacgagctgcccaagtatgtcttgagcgagccagcgaacctgatccgcgacgggtgattctggaccccaaaaggttttgcagcagcacgaaacagggccacgtgaatttatgcggatggttgattcggtcgctggttctggattgtaactttcagggacagtgaaagctcgtttcagcgctggatgttgtatagtgatgttattggacacgatgtgtagtctctagacctgctactgctgaactcggtcattcagggacagtgaatgcagtgtcgtttaggctatatgctgcagacttattcacctcatatttcagacttcagacttaactgtatctatataaatagtgcagtttgcactcatatttcaga

SEQ ID NO: 139181 - DNA, 663 bp, Zea Mays
atgcataagcgcaggaatggattgaggaatttatttgttagtgatgaatggcatgctaccagcttctccacctctaaagaaggtcggcaagttgagaacattgtcctttcaatgccattttggaatgaagtggataattgcctaagaacttcacaaacacttcttgttgctctaaggatagcagatggagatgagacaccagcagcttctaagattatgacagccatggacgttgcaaagactgccatcaaggattcgttgaaagacaaaccaagtttacttatagaggactatacaaaaaagagaaaccgagagcttggttccaaagggaagaaatacaatacactcttgcttgagcaatttcattgggaaaatgaatgtgttgatgaaaattgcgaattagttcaagaaggtggtggcaatgctatgaattgggctcttgtggatgatgttattggtgtaactcagagtctagaggggcgtaacttgcctagggcggctgctgctgcccctatgaggcatacttatactaggaacaggaagcgtccaaggaagaaagtgactcaagataatgatgaagaagatgacgatgaagaccaagatcagcatggagaatctgattcagcaacatcaatggaagaggatgaagaatctattcgctga

SEQ ID NO: 139182 - DNA, 270 bp, Zea Mays
atggggactgaggactgtaggcagcggactcggaatatgggtggtgatatatcaggatggtcggcaaggcaatccaatcagatgccagttacgacgaacgagaccaatagatacaatcttcatcgtccacaaccaaatacgtatctcaaatccccgatcaaaaagagaaaccagcaaataatgaaaacacaggagcagatccaaaacccaatcccgcgcatgaagagtgtggatccacaccggagggaagaaaaagcttcgttgagatag

SEQ ID NO: 139183 - DNA, 113 bp, Zea Mays
cacacatatatacccaggaatatcatttctccttttaggttatcctccacaaattacaagttcggtattacagacctcgacctctaaggaacatatccaccaagctattttag

SEQ ID NO: 139184 - DNA, 552 bp, Zea Mays
actcatccggctacacacaaaaaaaaacctcaaacgatcattaatggagacttcacggaggagccactatgcaggaggggtcgtcgttgttctcctactgctcgtcgtcgttgtcacgggccgtgaatttaactcaaactcgactgatgatagcaaattacccccatgctatcattggagccgcgacttcaaggggacatgccttggggacaagatttgcacaaatgtttgcctacaccaggatccctacaattttattcgcggcaagtgtcgtggcttcccggcagggaaatgcttctgcctctcatgctagatgacacatagtggcagtagcggtggacctaataataatggtgttgccttcgtgtaatgttgtttgacccatcatttgagagagagagagaaaatggcttatggaaataaaattgctggagatctacaccaaatattattttttctcagggatggttatcatttttttgtggtgacagatagctattataagcaccgtacttacgctgcattaatcttgcgcctttatcacactagagc

SEQ ID NO: 139185 - DNA, 1648 bp, Zea Mays
gggagaattcacctcggtggctcgtcctcatcgctgacgctgatggcggagcccagtcctcacccgaccgtggtgctgcacgcttgcctcggcgtgggccacctgatccccatggtggagctcgccaagctcctcctccgccgcgacctggctgtcataatcgccgtcccgaccccgccgtcgtccactgccgacttcttcgcctcctccgcatccgccgtcgccacgctcgaggccgccaaccccgccgtatccttccaccacctcccgccgccggactaccctgtcccggacccggaccccttcctccggatgctggacgcgctccgcctcacagtcccctccctcaccgccttcctccgctcccttccctccgtcgccgggctcgtgctcgacctcttctgcggcgacgcgctcgacgcggccgcatccgccggcatcccggcctacttctactacacctcctgcgctggcgacctcgccgcgttcctccaccttccccactacttcgccacgacggagggcgggcccagcttcaaagacatgggcaaggcgctcctccacttccccggcgtcccgccgatcccggcttcggacatgcctcacaccgtgctcgaccgcgcggcccggacctgcgcctcgcggatcgtgcactacggccgcgtccccgaggctcggggcttgctgatcaacacctacgagtggctggaggcgcgggccgtcggggcactcagggacggcgtctgcgtccctggtcgccccacgccgccggtttaccccatcggcccgattatcgtcaggggccaggaggcggcggagaaaggggagcggcacgcgtgcctgtcgtggctggacgcacagccggaacggagcgtggtgttcctctgcttcggcagcctgggcgccgtctccgcggcgcaggtgaaggagatcgctcgcgggctggagagctccgggcatcggttcctgtgggtcgtgcggagcccgccggaggacccgaccaagttcttcctcgcgcgtcctgagccggacctggactcgctgctcccggaggggtttctggagcgcacgagtgacagggggatggtggtgaagatgtgggcgccgcaggtggaggtgctgcggcacgcagccacgggcgcgttcatgacccactgcgggtggaactcggtgctggaggcggcgtcggccggcgtccccatgctgtgctggccgatgtacgccgagcagagggtgaacaaggtgttcgtagtggacgagatcaaggccggggtggtgatggacggctacgacgaggagctggtgagcgcggcggaggtggagaagaaggtgaggctggtgatggagtctgaggaaggggagaagctcagggagaggctggcgttggcaaaggagaaggcggcagaggcgctggctgatggcgggccgtcgcggatggcgtttgaggagttcttgaaggatatcatgctcgccaaatgatcatgcactaaagtgagcatcatggctgatcctgttacctgatctgttctaatgttagcttggactatgatctatgtgagatatttccgggtttgttcggttgatttctcccaaagagattcgagggagcatgagtttgacaaataaatatatgctgggtgataaagaa

SEQ ID NO: 139186 - DNA, 1008 bp, Zea Mays
caacaaccagatccagcccccccggaaacctaagctcccgcaaacaaataccctcttcccattctgcccctcccccgcgcagcatgccatcccgccccacgaccacagccccgccgccgccgccgccgccgcccacgaccaccacgtggggagcgagagagccatgtccttccttgacccgctcgcctcgctcggcctcggctacgcgatcgccatcgcgttcggattcctcgtgctcctcgcgtcggtgctgctcgcctcctacttctgcctccgccgcggggccgccagccaggggttcggcaccggagccggcgtcggcgtcggctccaccaggcacgccgcctcctccgcctccagctccggccacatctccatcaccgtgccccgcgtcgtcttcgtcgcggaggactacgactcgcctgggtcctcctcccgcggccccgccgccgcggcctcccccgtcgggctcgacgcctccgtcatcgcgtcgtatccgatggtgcccttctccaaggccggggcgggggcggacacggaggtcgcgtgctccatctgcctctgcgagtacaaggagggcgagatgctgcgggtgatgccagagtgcaggcacaggttccacctcacttgcctcgacgcgtggctgcgtcgtagcgcgtcgtgccccgtctgccgctcgtcccccatcccaacccccgtcgccacgccgctctctaccccactctcggagcttgtcccgctgtcgcagtatgccgccgaccgtcgccggagcaggtttgggtgattaatgggtgatggagatgtgaactgttcggctagagctaccataactaggacaaaagtttttgcttgacagcagtacattattggacccaggaggaagacatgcagtgtacatacattgttcttctgttctaagatagtgtctatcaagtgaggttacctgtgatcttatagttgtacgcggaagattgttctatgaatcatcttatttcatccatgacttgc

SEQ ID NO: 139187 - DNA, 999 bp, Zea Mays
cagctatagaaatttattcgtgtaataatcataatttgttttgtcttttcatcgggtatgtattcactgaaccttctgcttaaccaagtcctggatcaggttgctaaatacatattgcgcgttgaagatctagcagcttcatcatctgaaagtgatgacacagatgactcagattatgagaattggcacccaagattttgggcgctataggacaatgatattcggattgtgactatttatgtcctcgattctactagtttgctgtatttagtatgtagcaactacaaacatcatacgaatggaacacattgtatattgtattgtctattgtagtcttggtacaactatatttaggagaagcaactgttgggttgatttcatttagggcgtcgagctagggagcgtggtgccgagcgaggagagggacgccgccgcgccgggagctaggcgctggggagcagggcgcaacaggaataacgacgacgatggtgtggtctacagaggttcttggtttggaaacgaccgaccaatgctaatagtgctcaacggctgatgggagactagcatgatgtgatctgcaggagctaacaggtacatatgtgctactagtgctcaatagctgaaacgaccgtgcaaactactgtgatgtggtgtgtaggagcaggcgttgccaaatagatacagttgctgctactacatgcactgccagtgagtgatgactgatgaagcaatgctactgcagaaaccgatacagacaatcagacataaaagaccgtgctagcgaaaccagtgatcactctttattccgagtttctaatgagtgtttggtttgagaaatgatatagtccatcatcttctcactccttattttttttatttggtttgtataatggagtgagttaatctatcatcacctcatttctcatagttagttgtttagtactaatatgtggaatagagttatcccaccaaatttgaggaatggacctatgatacacc

SEQ ID NO: 139188 - DNA, 1650 bp, Zea Mays
gagaggtggacacgacgacggtgacggtgaggtggagagcggagtggcggatcgtggctccgatccacaagggacggctccacacatcgggttcctgcctctgctcagcagccatgccggtgaggcggcggcagccgcgtcggccggagacgggtgcggcggagaggtacagggagatggggatcggggctgcgctgtcgcggccctgggactatcccacggcctgcggcgagcttgcagcgctgctgcgcctcggatacgcggacctccctaaggcagcccaggcgctcgttgcctccgacgtgctactcgcgtttcgcctccttcccgatgtgcagacaggatatgcagtaagcacagctaatgttcttctccaagcagtagaagttgctctaccaaagcaaaagaaggcgcaggctgtttcagagttcaagcactctattattgcacataaaaggcgtgcaagagtccaacaaatttcaggttcaccacacataccacaagatatacttgtccatatcttcagtttcctggacatgcattctttggtagcagcaggtcttgtctgctggtcttggaattcagcggcaaatgacaacaaactgtggaagatgaattactcgattttctttggcctcagccatttgagttgcaacaacattcctgtatctggtgtgcaatacagcacgaattcggtgccaaattatccaaactttagctggaaggagtccttccacactaagtatgcaggttgctaaatacatattgcgcgttgaagatctagcagcttcatcatctgaaagtgatgacacagatgactcagattatgagaattggcacccaagattttgggcgctataggacaatgatattcggattgtgactatttatgtcctcgattctactagtttgctgtatttagtatgtagcaactacaaacatcatacgaatggaacacattgtatattgtattgtctattgtagtcttggtacaactatatttaggagaagcaactgttgggttgatttcatttagggcgtcgagctagggagcgtggtgccgagcgaggagagggacgccgccgcgccgggagctaggcgctggggagcagggcgcaacaggaataacgacgacgatggtgtggtctacagaggttcttggtttggaaacgaccgaccaatgctaatagtgctcaacggctgatgggagactagcatgatgtgatctgcaggagctaacaggtacatatgtgctactagtgctcaatagctgaaacgaccgtgcaaactactgtgatgtggtgtgtaggagcaggcgttgccaaatagatacagttgctgctactacatgcactgccagtgagtgatgactgatgaagcaatgctactgcagaaaccgatacagacaatcagacataaaagaccgtgctagcgaaaccagtgatcactctttattccgagtttctaatgagtgtttggtttgagaaatgatatagtccatcatcttctcactccttattttttttatttggtttgtataatggagtgagttaatctatcatcacctcatttctcatagttagttgtttagtactaatatgtggaatagagttatcccaccaaatttgaggaatggacctatgatacacc

SEQ ID NO: 139189 - DNA, 1849 bp, Zea Mays
gtgctggaggctattcagctgttttggcttggcttgtggccggtgagaggtggacacgacgacggtgacggtgaggtggagagcggagtggcggatcgtggctccgatccacaagggacggctccacacatcgggttcctgcctctgctcagcagccatgccggtgaggcggcggcagccgcgtcggccggagacgggtgcggcggagaggtacagggagatggggatcggggctgcgctgtcgcggccctgggactatcccacggcctgcggcgagcttgcagcgctgctgcgcctcggatacgcggacctccctaaggcagcccaggcgctcgttgcctccgacgtgctactcgcgtttcgcctccttcccgatgtgcagacaggatatgcagtaagcacagctaatgttcttctccaagcagtagaagttgctctaccaaagcaaaagaaggcgcaggctgtttcagagttcaagcactctattattgcacataaaaggcgtgcaagagtccaacaaatttcaggttcaccacacataccacaagatatacttgtccatatcttcagtttcctggacatgcattctttggtagcagcaggtcttgtctgctgaaggtcttggaattcagcggcaaatgacaacaaactgtggaagatgaattactcgattttctttggcctcagccatttgagttgcaacaacattcctgtatctggtgtgcaatacagcacgaattcggtgccaaattatccaaactttagctggaaggagtccttccacactaagtatgcagaatgcgcgtcatggaaatttgtatcaaatagagcactatgtgcgcattgcagatcagttatttggctgagcaacctcacatgtgcttctccacaccattgccctaagaatagacaccatgaagtaaaactacgacctctgttacctgatacagttgctaaatacatattgcgcgttgaagatctagcagcttcatcatctgaaagtgatgacacagatgactcagattatgagaattggcacccaagattttgggcgctataggacaatgatattcggattgtgactatttatgtcctcgattctactagtttgctgtatttagtatgtagcaactacaaacatcatacgaatggaacacattgtatattgtattgtctattgtagtcttggtacaactatatttaggagaagcaactgttgggttgatttcatttagggcgtcgagctagggagcgtggtgccgagcgaggagagggacgccgccgcgccgggagctaggcgctggggagcagggcgcaacaggaataacgacgacgatggtgtggtctacagaggttcttggtttggaaacgaccgaccaatgctaatagtgctcaacggctgatgggagactagcatgatgtgatctgcaggagctaacaggtacatatgtgctactagtgctcaatagctgaaacgaccgtgcaaactactgtgatgtggtgtgtaggagcaggcgttgccaaatagatacagttgctgctactacatgcactgccagtgagtgatgactgatgaagcaatgctactgcagaaaccgatacagacaatcagacataaaagaccgtgctagcgaaaccagtgatcactctttattccgagtttctaatgagtgtttggtttgagaaatgatatagtccatcatcttctcactccttattttttttatttggtttgtataatggagtgagttaatctatcatcacctcatttctcatagttagttgtttagtactaatatgtggaatagagttatcccaccaaatttgaggaatggacctatgatacacc

SEQ ID NO: 139190 - DNA, 1859 bp, Zea Mays
agcccagtccgaggtgctggaggctattcagctgttttggcttggcttgtggccggtgagaggtggacacgacgacggtgacggtgaggtggagagcggagtggcggatcgtggctccgatccacaagggacggctccacacatcgggttcctgcctctgctcagcagccatgccggtgaggcggcggcagccgcgtcggccggagacgggtgcggcggagaggtacagggagatggggatcggggctgcgctgtcgcggccctgggactatcccacggcctgcggcgagcttgcagcgctgctgcgcctcggatacgcggacctccctaaggcagcccaggcgctcgttgcctccgacgtgctactcgcgtttcgcctccttcccgatgtgcagacaggatatgcagtaagcacagctaatgttcttctccaagcagtagaagttgctctaccaaagcaaaagaaggcgcaggctgtttcagagttcaagcactctattattgcacataaaaggcgtgcaagagtccaacaaatttcaggttcaccacacataccacaagatatacttgtccatatcttcagtttcctggacatgcattctttggtagcagcaggtcttgtctgctggtcttggaattcagcggcaaatgacaacaaactgtggaagatgaattactcgattttctttggcctcagccatttgagttgcaacaacattcctgtatctggtgtgcaatacagcacgaattcggtgccaaattatccaaactttagctggaaggagtccttccacactaagtatgcagaatgcgcgtcatggaaatttgtatcaaatagagcactatgtgcgcattgcagatcagttatttggctgagcaacctcacatgtgcttctccacaccattgccctaagaatagacaccatgaagtaaaactacgacctctgttacctgatacagttgctaaatacatattgcgcgttgaagatctagcagcttcatcatctgaaagtgatgacacagatgactcagattatgagaattggcacccaagattttgggcgctataggacaatgatattcggattgtgactatttatgtcctcgattctactagtttgctgtatttagtatgtagcaactacaaacatcatacgaatggaacacattgtatattgtattgtctattgtagtcttggtacaactatatttaggagaagcaactgttgggttgatttcatttagggcgtcgagctagggagcgtggtgccgagcgaggagagggacgccgccgcgccgggagctaggcgctggggagcagggcgcaacaggaataacgacgacgatggtgtggtctacagaggttcttggtttggaaacgaccgaccaatgctaatagtgctcaacggctgatgggagactagcatgatgtgatctgcaggagctaacaggtacatatgtgctactagtgctcaatagctgaaacgaccgtgcaaactactgtgatgtggtgtgtaggagcaggcgttgccaaatagatacagttgctgctactacatgcactgccagtgagtgatgactgatgaagcaatgctactgcagaaaccgatacagacaatcagacataaaagaccgtgctagcgaaaccagtgatcactctttattccgagtttctaatgagtgtttggtttgagaaatgatatagtccatcatcttctcactccttattttttttatttggtttgtataatggagtgagttaatctatcatcacctcatttctcatagttagttgtttagtactaatatgtggaatagagttatcccaccaaatttgaggaatggacctatgatacacc

SEQ ID NO: 139191 - DNA, 207 bp, Zea Mays
atgcatctctttgggcttctattaaatcgataaattggattgtacatctttttttattttgatatcgattttgatacatataaggtgtcctacggataatacaaatagaagctatttgatgtctgactcgggcctatatttatatgccgatcgatcaaaatactctaagactctacatttgttatatattccatatatcacattcga

SEQ ID NO: 139192 - DNA, 4410 bp, Zea Mays
atggcgcactgccggctcctccaccgctacgtctcgtccgccgccgccagagccgcagcgccgatccctgcccggcacgtgccccggtcgcccggcacgtccgcgcaaagcgcccgcatacgggagctcggccgcctcggccgcttgcacgaggccagggaggtgttcgactcgatgcccttccgcgacatcatcgcctggaactccatgatcttcgcctactgcaacaacgggatgcccgacgccgggaggtcgctcgctgacgcgatctccggcgggaacctgcgcacgggcaccatcctgctgtcgggctacgcgcgcgccgggcgcgtgcgcgacgctcggagggtgttcgatggaatgggcgtgcggaacaccgtggcgtggaatgccatggttacctgctacgtccagaacggggacatcaccctcgcgcgcaagctgttcgatgcaatgccgagcagggacgtctcgtcatggaacacgatgctcaccgggtactgccatagccaactgatggaggaggcaaggaatctgtttgaacgaatgccagaacgcaacggggtttcttggacagtgatgatttctgggtatgttctaattgagcagcatggcagggcttgggacatgtttcgcacaatgctatgtgaaggaatgacaccagagcaaccaaaccttgtttctgtgctttcagctgtacgccatcttggtaaacctggcattctagagagtatccacgttcttgtgcataagactggctttgagagggatgttgttgtcggcactgctatacttaatggctacactaaggatgtgaatatgcttgacagtgcagtaaagttctttgaaggtatggcagctaggaatgagtacacatggtcaaccataatcgctgcactatctcaggctggacgaatagatgatgcttttgctgtttaccaaagagatcctctaaagtctgttcctagtaggacttcaatgctcacaggccttgctcgatatggaaggatcgatgatgcaaagattctatttgaccagattcatgaacctaatgttgtatcctggaatgccatgattactgggtacatgcagaatgaaatggttgatgaagcagaagatctttttaacaggatgccctttagaaacacaatatcttgggctgggatgattgcagggtatgcgcgtaatgggaggagtgaacaagctttggtttcactccaagctctccataggaaaggaatgttacctagcctgtctagtttgactagtagcttctttgcttgttcaaacatcgaagctcttgagacaggaaagcaagttcattcacttgcagtaaaggctggctgtcagtttaatagctatgtttgtaatgcactgattactctgtacggtaagtacagaagcatagggtctgtgagacaaatctttgatcggatgacagttaaagatacagtgtcttataactcttttatgtccgcgcttgtacagaataatctgtttgatgaagcaagagatgtattcaacaatatgccgagtccagatgttgtatcttggactacgataatatctgcatgcgcacaagctgaccaggggaatgaggcagtagagattttcagaagtatgctgcatgagcgtgagctacccaatccacctatattaacgatacttcttggtctcagtggaaatcttggtgctccccaacttggacagcaaattcacacaatcgctattaaacttggaatggattcaggacttgtagtggctaatgctcttgtctcgatgtatttcaagtgtagttctgcagattcccttaaggtttttgattcaatggaggaacgggacatttttacatggaataccatcattaccggctatgctcaacatggccttggaagagaagctatcagaatgtatcaactaatggtatctgcaggagtgttgcctaatgaggtcacttttgtgggccttttacatgcatgtagccattctggtttggtagatgaagggcaccagttcttcaagtctatgagcagtgattatggattaactcctctgctagagcactatgcttgcatggtcgacctacttgggcgagctggtgatgtgcaaggagctgaacattttatttatgatatgcctattgagccagattcagtgatctggagtgcgcttctcggggcatgcaagattcacaagaatgtagaaattggtaggagagcagctgagaaacttttctctatcgagccatcaaatgctgggaattatgtcatgttgtcaaatatatactcctcccaagggatgtgggacgaagttgcaaaggtacggaaacttatgaaagaacgaggtgtgaacaaggatcctggttgtagctggatgcagataaagaacaaaatgcactcatttgtcactggagatgaggaacatgagcaaattcaaaacatatatgctaccctttgggagttatacactttgctaaaggccacagggtatgtacctgacacggactttgttctccatgacatagatgaagagcagaaagagagctcgcttctgtaccatagcgagaagcttgctgttgcttatggccttcttgttacacccaagggcatgcccatacagataatgaagaaccttagaatatgtggtgactgtcacactttcatcaagtttgtatcctctgtcaccaagagagaaattgatgttagggatgggaatcgattccatcatttcaggaatggaagctgttcatgcgagttcttaaaacttgacccagtttggagcgccgtccgcgctacacgggtacgacacaagtcacttgctgacgtgtgcatgttctatgcattcattcgctacgaaaagctgctcgaggaagacacctctcgccatgttgtcgcactgctcgagggcatgggcgcggccatccaacgaaggacacgcttgggccccgcctccactctcctctccttcttgtcctcattggcttgctgccctacccttctcctcttcccaccaccctccctctcatccacgccctcctgccctcccacgctagatgctcgacatccccatccgcgcgctcgaggcagagtccagggacgccaagatgagcccgaccgcgaccgcctagccgtcagctccaaagaagaagccagggcaccggtggacgtcagggttccgtcgtggtggcctgctagatccagattcaacaagaaagaagatgatgcacttctgtgcctgaacactgaacggacagctaccatagggcaaagtgaagaagaaacagaagagttgagcaagatcacactagagaataaggatattcagcttgatatcgatataagagtgtctgatggagccgaccctatggagctgcatgtttatgattttaaaggacctggtgtggccttatcgatgtacaatagcgatgaggtacagtagaacatcaataggacttgttgctgattgctatattctcttgactggtattctaacttcctatctctatttagtttattaggcctttcgctgaatcctccatggatatggctctttcaaaaaagttgtctctttatctcagcaccaagaatacaatcctcaagaagtatgacgacaggtcacaattggaccatggtgctccattttgcttactgtgatatgtgcagcgaagcgatggcgatggtgtttttgatgttcaggacagaatcaatggccgcaccttatgtgattgtgatagcatagttgtttgcgaggtaattacaaagctgcaggctgccgcctggaggcagtgggaggccctgggcgaccgaagggtgcatgatattctagtttcagatcaatgctgagtgcagggagaggcaatgtcttacctcttggatgttcatctctatattagtccatccataggtatgcagctttggaccgtcgatgttaaatcttgtctcaccagcgactacttctgatggtgtggctacctgagcagcttgtaccgattctgccttagcttgccgatcaacgctgtccaccaggacagagctgaaaacttgaaatggcaagaccagaaccctgaagttgaagtgttggcaagaaactcagataggtggatgaacgttgtgagccacctagctaagagcttgaagacgacagatggtaggtgttagaaatggaaggccatgcggctcccatgttatggaaaaaaaacccaatcatgaattttggaaagctcaagaacctttgttgaaggagataaggcggatccgttcaaggtcaacaatcgtgatgagaaattacagaaaagaggaagaatattgtcgatgaaaaaaagtgctcaaagtaggtgatgtaagtaaaggtgacagactctaaattttacactataagatttaaagacccatttatagttatttttaaaca

SEQ ID NO: 139193 - DNA, 2287 bp, Zea Mays
aacacaccggaggcgcgaccgcctcgtccgcgtctgcttctgcatctgcttctgcttgtgctgctgctgacatcgaatcaaagctgctaaacctcggtccatccatcacccgcggcgcgacacacccaaaggcctctccctcccgtcccgtgtcccgatcgcaccgctccccacgatggcgtcgcacatcatcctgccgccggacgacgccgacgagaaccacaaccaccaggcggcggcggcggcggaggaggaggaggaagagcgggacgagctggggcgcgacgacgacgacgacgagcacggggtgccaccggcgctgccgcccaaggcggcgctgccgttctcggccacgtgcgtgcggatctcccgcgactcgtaccccaacctccgcgcgctccgcaacgcctcctccgtcagcctcgctgacgccgcctacgtcaagatctccgaggccgactttggatacgtcctcgacgacgtgccgcacttcaccgactacctccccgacatcccgacttatcctaatccactacaagatcatccagcctattcaactgtcaagcagtattttgtcaatgaagatgacaccgttcctcaaaaggttgttgttcagaagaacagtcggcgtggtgttcacttccgtcgtgctgggcctcgtcagagggtttattttggcaccgatgaagtgaaagcctgcattgtaacttgtggaggcctgtgccctgggcttaacactgttatcagggaactggtgtgtggcttgtcacacatgtacaatgtcagcagcatttttggaatacagaatgggtacaagggtttctattctagcaactaccttcccctgacaccaaagagcgtcaatgacatccacaaaaggggtggtacagttcttggaacatcacgcggtggccatgataccaaaaagattgttgataacattcaagatcgtggaatcaaccaggtgtatatcattggaggagatggaactcagaagggagcatatgagatcttcaaggaaatccggaagcgtggcctcaaagtttctgttgctggagttccaaagacaatagataatgacattgcgatcatcgacaagtcttttggttttgatacggctgtggaagaggcccagcgtgccattgattcagctcatgtggaagcttgcagtgctgagaatggaataggtttagtaaaactgatgggccgttatagtgggttcattgcgatgtatgctactcttgctagtcgagatgtggactgctgtttgattccagagtctccattttatctggatggagagggtggattgcttcaatatgtagagaagaggctgaaagagaacaagcacatggttattgttgttgctgagggagcagggcaggatcttatcgcgaaaagtttagccacatcagatcaacaagatgcgtctggaaataagctgcttcttgatattggtctttggctgactcacaagataaaggactacttcaaaagcaaaaagatggagatgacgattaaatacatagatcctacatacatggtccgtgctattccaagcaatgcatcagacaatgtctactgtacacttctagcccacagtgctatccatggtgcaatggcggggtacagcttcactgttgggatggtcaacggaagacatacctatatacctttctacagggtgacatccacaaggaacaaggttaaagtcactgacaggatgtgggcaaggcttctgtcgtccaccaaccagccaagtttcctgagtcagaaggatatcgacgaagcgagtgaggcggataggctggcaaacaggccaccactgccaacgggtgccagctctcgcgtggtgaggtctttcgatcaatcttcgtcgtgttcttccaatggagagatctaagtgattgctggtgcaccgcaattgtgtacagaacctacttactatcgttctgagctctggtgcttgggcagcttcgccacgcaacgagttttgctcttgttgttagtcgttatgcatatgccttgagttgtgtaggaggacacgcggatgtgggccctgttagcacgcgtaataaagaaacaccattgatgaagctacttactagaggctctccatctatcatgtatttgctgcagttattatgcaatcggctggtgttctatctgtcttcgcctatctgtactaccgtgcattttcctttggcaccgtgaaatttgtaaggacaattctacatatgccattttaattttatcttctagtatcttatttgtcgtctttctatac

SEQ ID NO: 139194 - DNA, 2112 bp, Zea Mays
gggaaagaaaaactttaggcccacggacccagcggcccaacgtgagaggcggaactcttggcctttttctctccaccccaaagcttgtgcacgcgcgcaccgtccctcaccgccggcctctgctcctcttccgccgccgcaggatctcgtatcgccggagaccatgtaccgcgccgccgggagccacctccgctccctcaagcatcatggtgcttctaggcttgccagtacaagtgttgcgaagcagtcctcaggtggtctgttcagctggcttcttggtggaaaatcaagcgaactccctccccttgatgttccactcccaggcattagcattccctcacctctaccagattttgtagagccatctaagacaaaagtcactactcttccaaatggcgtcaagatcgcctcggagacatcatcgagcccagcagcatctgtgggtctgtacattgactgtggttccatttacgaaacacctgcttcatctggagtatcacatctgttggagagaatggccttcaagagcacagtgaatcggactcacttacggttagttcgtgaggtagaagccattggaggaaatgtctctgcatcagcttcccgtgaacaaatgagctatacctatgatgcattgaagagctatacaccagaaatggttgaagttctcattgacagtgtgaggaatccagcattcctcgattgggaggtcaaagagcagctccagaacataaaatctgaaatagctgatgcgtctgctaatcctcaaggtctacttctggaggcccttcattcggttggatattccggggcactggcaaaacctttgatggcttcagaatctgctgtaaaccggttggatgttagcagcttggaggaatttgttgctgaacattacactgctcccaggatggttcttgcagcatcaggagttgatcatgatgcgctgatttcagttgtagaaccacttctgtctgaccttccgtgcgtgaaacgtcctgaagagccaaaatctgtgtacgtgggaggagactatcgctgccaagcagattctccaaacacacacatcgcacttgcttttgaggtgccaggtggttggaatcaagagaaaactgcaatggttgtgacagtgcttcagatgctcatgggaggaggagggtccttctctgctggtgggcctggaaagggaatgcattctcgattgtatctccgtgtcttgaccaacttccaacagattgaatcattctctgctttcaatagcgtctataacaattcgggcctttttggaatttatgcagtcactagcccagacttttcatcgaaggctgtggatttggcagcaggggaactcctggagattgcgacacctggaaaagttacacaagaacaacttgatcgtgctaaagaggcaaccaaatctgcagttctgatgaacttggaatcaaggtctatagcatctgaagatattggaagacaggttcttacttatggggaaaggaagcccatcgagtatttcctgaaaacagttgaggagatcactttgaatgacattttgtcaaccgcaaaggagatgatgtctacaccactcacaatggcatcgtggggcgacgttattcatgttcctagctacgagtctgttagccgcaagtttcactcgaagtgagaggatccagcatcggacttgcatgacctgttccaacaactgatgtgaagcctgcaacggccctcagctgggacagttactccccccacagaataaaaaagcatgtggtttctagcgccccccctaattactccctctgcatgtatacgccaaacatgttttttttttgtggtaagaatcatcaagccccttggcgactcgtttctgagtttcgcagcggcgctagattttattttatgtggacaagcgagctttcggggtgcgctcgtgcagaaatattttgccaacgtattttgcagtttagaccagaagcagaaaggaccagcgtatcacttttcctgttgttggatgcatgagttcatgacgtccacatttttgcaattttggctgttaccgtttccatcgattctggtgtgcgcgcgcgctcgcgcacttgttattattgttgt

SEQ ID NO: 139195 - DNA, 2007 bp, Zea Mays
gggaaagaaaaactttaggcccacggacccagcggcccaacgtgagaggcggaactcttggcctttttctctccaccccaaagcttgtgcacgcgcgcaccgtccctcaccgccggcctctgctcctcttccgccgccgcaggatctcgtatcgccggagaccatgtaccgcgccgccgggagccacctccgctccctcaagcatcatggtgcttctaggcttgccagtacaagtgttgcgaagcagtcctcagagccatctaagacaaaagtcactactcttccaaatggcgtcaagatcgcctcggagacatcatcgagcccagcagcatctgtgggtctgtacattgactgtggttccatttacgaaacacctgcttcatctggagtatcacatctgttggagagaatggccttcaagagcacagtgaatcggactcacttacggttagttcgtgaggtagaagccattggaggaaatgtctctgcatcagcttcccgtgaacaaatgagctatacctatgatgcattgaagagctatacaccagaaatggttgaagttctcattgacagtgtgaggaatccagcattcctcgattgggaggtcaaagagcagctccagaacataaaatctgaaatagctgatgcgtctgctaatcctcaaggtctacttctggaggcccttcattcggttggatattccggggcactggcaaaacctttgatggcttcagaatctgctgtaaaccggttggatgttagcagcttggaggaatttgttgctgaacattacactgctcccaggatggttcttgcagcatcaggagttgatcatgatgcgctgatttcagttgtagaaccacttctgtctgaccttccgtgcgtgaaacgtcctgaagagccaaaatctgtgtacgtgggaggagactatcgctgccaagcagattctccaaacacacacatcgcacttgcttttgaggtgccaggtggttggaatcaagagaaaactgcaatggttgtgacagtgcttcagatgctcatgggaggaggagggtccttctctgctggtgggcctggaaagggaatgcattctcgattgtatctccgtgtcttgaccaacttccaacagattgaatcattctctgctttcaatagcgtctataacaattcgggcctttttggaatttatgcagtcactagcccagacttttcatcgaaggctgtggatttggcagcaggggaactcctggagattgcgacacctggaaaagttacacaagaacaacttgatcgtgctaaagaggcaaccaaatctgcagttctgatgaacttggaatcaaggtctatagcatctgaagatattggaagacaggttcttacttatggggaaaggaagcccatcgagtatttcctgaaaacagttgaggagatcactttgaatgacattttgtcaaccgcaaaggagatgatgtctacaccactcacaatggcatcgtggggcgacgttattcatgttcctagctacgagtctgttagccgcaagtttcactcgaagtgagaggatccagcatcggacttgcatgacctgttccaacaactgatgtgaagcctgcaacggccctcagctgggacagttactccccccacagaataaaaaagcatgtggtttctagcgccccccctaattactccctctgcatgtatacgccaaacatgttttttttttgtggtaagaatcatcaagccccttggcgactcgtttctgagtttcgcagcggcgctagattttattttatgtggacaagcgagctttcggggtgcgctcgtgcagaaatattttgccaacgtattttgcagtttagaccagaagcagaaaggaccagcgtatcacttttcctgttgttggatgcatgagttcatgacgtccacatttttgcaattttggctgttaccgtttccatcgattctggtgtgcgcgcgcgctcgcgcacttgttattattgttgt

SEQ ID NO: 139196 - DNA, 764 bp, Zea Mays
gggaaagaaaaactttaggcccacggacccagcggcccaacgtgagaggcggaactcttggcctttttctctccaccccaaagcttgtgcacgcgcgcaccgtccctcaccgccggcctctgctcctcttccgccgccgcaggatctcgtatcgccggagaccatgtaccgcgccgccgggagccacctccgctccctcaagcatcatggtgcttctaggcttgccagtacaagtgttgcgaagcagtcctcaggtggtctgttcagctggcttcttggtggaaaatcaagcgaactccctccccttgatgttccactcccaggcattagcattccctcacctctaccagattttgtagagccatctaagacaaaagtcactactcttccaaatggcgtcaagatcgcctcggagacatcatcgagcccagcagcatctgtgggtctgtacattgactgtggttccatttacgaaacacctgcttcatctggagtatcacatctgttggagagaatggccttcaagagcacagtgaatcggactcacttacggttagttcgtgaggtagaagccattggaggaaatgtctctgcatcagcttcccgtgaacaaatgagctatacctatgatgcattgaagagctatacaccagaaatggttgaagttctcattgacagtgtgaggaatccagcattcctcgattgggaggtcaaagagcaggtactttatcactgaaaataaattgaagttctttttttcatcc

SEQ ID NO: 139197 - DNA, 2417 bp, Zea Mays
gtttttgctcccctcctacgtcgtcccgttgcctcgtgaccgcgcccagggtccgaactcccgaagcgtcgcgccgccgcccatcacggacatcggacaggagaagagaagcgggagcaccggagcaggcaccaccgccgaggcgacgaggtcgccgtgctccccatccgctgaggtagctgcactccggcctccgcggctgccggctccgccaacgcccagtcccaaggcgagcaggcacccacggcagcacggctgtcgcggtagtatttaaggaacagggaaacatctgctaccgcccaatctttccccttcccggactgctcgctggacgccgaggacgggtgtgaactaattctctggcaatactcttttccttcttcaaatgtgtgaaaatataggcagtccggtacgtgtccgccgtctgtttccactcaccgtgtgatactgtgatggtggacttggacgagccgctcgatgcggctgtaactgcggagaagggcaaggcggcgctacaacggttacttgaggctgaccctgcactcttcctctccccctctgcggaccttgctgctgccgcccgagcggcctcgcagcacatctactcctcactggtgccactctaccctgctcagcctccaccgctccctaccctcctcacggaccctgccttcgatgccgagcagatttggtcccagatcgagctgcttgcccgcccactcctccctcagctgggccgccagctccgtcgcatcgtgcagcaaccctcctcgcaacagcctcctttgaaaatgcctgctgtcgcggagggtgagcagttggaggaggatggagaaagtagcgattcagaggaattgaagaatgcggaggagttggaggggacagaggatggggaggagttggaggggacagacgatgaggaggaaatgggtgacaaggaggaggaagaagcggagctggatgggagaggagggaatggtgtggaggatgaattcctgaagatagatgaattgacggagttcctggagaagggtgaagaagaggagtatggtgatggagccaaacggagagagaagtcagtgaaaaactggatggttgagagtgacactgaggatgaagatgaggatcaattggatttagaagattttgaggatgatgacgaggatggtgaagcaggcggtggagatattctgtatgaagatttttttgagaatggacacaacaagcaagctaagaagagagatggttccacaaagaaagttcaattcaaggatgaagcacatgaagttgaactccatgacagtgagaatgatgatggaaatgatgaacaagaacatggtctctcaactcacgaaaaggagcgtctgaagatgcgtactaaaatagagcaaatggagaaagctaatcttgaacccagcacgtggaccatgcagggagaggttactgcttctaggaggcccaaaaacagtgccctagaagtggaccttgattttgagcacaatgtaagacctgcccctgtaataaccgaggaagtgacagcttcccttgaagaaatgataaagaaaagaatcgcagagagtcattttgatgatgttgagaagccgtctctcttgccatctaaagctccaaaggagcacaaggaactggatgaaactaagagcaagaagggtcttgctgaactgtatgaggatgactatgcacaaaaagcaggcattgcacctgccccactttctatttcagatgaactaaaggaagaggcaaatactttatttaagaggatatgtttgaaattggatgcgctatcgcatttccactttgctccaaagccagtcattgaggatatgtctgtgcaagcaaatgtgcctgctttagccatggaagagattgcacctgtagctgtttcggatgctgcaatgcttgcccctgaagagatatttgaaggaaaaggtgatgttaaggaagagggggaacttacacaggctgagcgcaagagaagaagagctaacaagaaaaggagatatgcagcatcccataaggagaggacagcgccagccaagttgcagaaagattaaactcaatgtttttttctcactagtttctaaatggtacaagagcgataaactggcaatacatattttccaaattttgtattgtaccctctgctagtagcttttacatgaacagtaaaatgtgaccatttatatttctacagaagcacacaagttcgagagttttgatttgctgaagtgcaattttgagagtgcaaaaaaagacttgtctgttgaaccctaggtatcggtagaaacatcatcctacgacctaaccgacctaaccgatggttatggttatgagtataattttctttccagctattgcaattgaagtcggtcatattcaatctaatttatttctgcacc

SEQ ID NO: 139198 - DNA, 2350 bp, Zea Mays
gtttttgctcccctcctacgtcgtcccgttgcctcgtgaccgcgcccagggtccgaactcccgaagcgtcgcgccgccgcccatcacggacatcggacaggagaagagaagcgggagcaccggagcaggcaccaccgccgaggcgacgaggtcgccgtgctccccatccgctgaggtagctgcactccggcctccgcggctgccggctccgccaacgcccagtcccaaggcgagcaggcacccacggcagcacggctgtcgcggtagtatttaaggaacagggaaacatctgctaccgcccaatctttccccttcccggactgctcgctggacgccgaggacgtacgtgtccgccgtctgtttccactcaccgtgtgatactgtgatggtggacttggacgagccgctcgatgcggctgtaactgcggagaagggcaaggcggcgctacaacggttacttgaggctgaccctgcactcttcctctccccctctgcggaccttgctgctgccgcccgagcggcctcgcagcacatctactcctcactggtgccactctaccctgctcagcctccaccgctccctaccctcctcacggaccctgccttcgatgccgagcagatttggtcccagatcgagctgcttgcccgcccactcctccctcagctgggccgccagctccgtcgcatcgtgcagcaaccctcctcgcaacagcctcctttgaaaatgcctgctgtcgcggagggtgagcagttggaggaggatggagaaagtagcgattcagaggaattgaagaatgcggaggagttggaggggacagaggatggggaggagttggaggggacagacgatgaggaggaaatgggtgacaaggaggaggaagaagcggagctggatgggagaggagggaatggtgtggaggatgaattcctgaagatagatgaattgacggagttcctggagaagggtgaagaagaggagtatggtgatggagccaaacggagagagaagtcagtgaaaaactggatggttgagagtgacactgaggatgaagatgaggatcaattggatttagaagattttgaggatgatgacgaggatggtgaagcaggcggtggagatattctgtatgaagatttttttgagaatggacacaacaagcaagctaagaagagagatggttccacaaagaaagttcaattcaaggatgaagcacatgaagttgaactccatgacagtgagaatgatgatggaaatgatgaacaagaacatggtctctcaactcacgaaaaggagcgtctgaagatgcgtactaaaatagagcaaatggagaaagctaatcttgaacccagcacgtggaccatgcagggagaggttactgcttctaggaggcccaaaaacagtgccctagaagtggaccttgattttgagcacaatgtaagacctgcccctgtaataaccgaggaagtgacagcttcccttgaagaaatgataaagaaaagaatcgcagagagtcattttgatgatgttgagaagccgtctctcttgccatctaaagctccaaaggagcacaaggaactggatgaaactaagagcaagaagggtcttgctgaactgtatgaggatgactatgcacaaaaagcaggcattgcacctgccccactttctatttcagatgaactaaaggaagaggcaaatactttatttaagaggatatgtttgaaattggatgcgctatcgcatttccactttgctccaaagccagtcattgaggatatgtctgtgcaagcaaatgtgcctgctttagccatggaagagattgcacctgtagctgtttcggatgctgcaatgcttgcccctgaagagatatttgaaggaaaaggtgatgttaaggaagagggggaacttacacaggctgagcgcaagagaagaagagctaacaagaaaaggagatatgcagcatcccataaggagaggacagcgccagccaagttgcagaaagattaaactcaatgtttttttctcactagtttctaaatggtacaagagcgataaactggcaatacatattttccaaattttgtattgtaccctctgctagtagcttttacatgaacagtaaaatgtgaccatttatatttctacagaagcacacaagttcgagagttttgatttgctgaagtgcaattttgagagtgcaaaaaaagacttgtctgttgaaccctaggtatcggtagaaacatcatcctacgacctaaccgacctaaccgatggttatggttatgagtataattttctttccagctattgcaattgaagtcggtcatattcaatctaatttatttctgcacc

SEQ ID NO: 139199 - DNA, 1682 bp, Zea Mays
cgttggtcaaaggaacggacgccggaccgcgtctgaaccctgaaagcgagcgaaacggcggtcgggcacaggcaggcgcaggggaggccgcgttatccagccgggcctgtatataaaggcggcgcaccgcgccagcgacggacgcggaggccaacgcgcacgcagaggggatccgcaaggaagcgaaacgaaacacaggcaaaagcgaccgaaaagggcgcaacgcaagcggtcagcagcgtttcctcttgcgttcgggcgagggcgaggcttgccgagcgagcgagcgacatgcttggggaccgcgaggagggcgacgaggagctgttcgagacggcatcgtccgtctccagcgccgacgccgactccgacgacgagggcgaccgcttccctagcgccggcgcggcggggggcgagggtccgtgcgaccagcaggaccgccgccgccgcgcgcccgtgccgcagccgcagccgcagccgctgcggaggatgaactcggacagcatctacgacatggcgtccatggtgtcgcagctcccagccaagaaagggctgtcgcggcactacgagggcaaggcccagtcgttcgcgtgcatgtcggaggtgcgctgcctggacgacctgcgcaagaaggacagcccctacaagcagaaggtcaagtcgtcgtgcaagggctacgtcgcgctgggagggatgatgatggccaacaagcccccttcctccggatcctgcgccggcctgggcctcgccgccgccaacgggttcaggacgtccccgattcaggacgggtaccagtaccaccagtaggcagggcaggatggcggcttggccagagagcactgcaactgcaactgcaactggagcaaggcgtttttgttcctcccgagggtcactgaactgttttttttctctttctttctttccttccttcttcccgttctagactgcttgttctgccgggatttatttccttcacggacgcattagtctgtgagaattttatgaggtggtgtgatttgttacttgttctgctagaggaacttaccgttcaccgttctgcacttttgctgctcggcaaaagaaaaatgtcctttttagcctgtgaatacgaagcacggcagtccaggcagaaaaacatgatcgactgtttcacctttttttttcatgacaatcttgttttggaggtgatcactcatcaggatgaggatatctagttgggaagatgttggggaccttcggcattcgaagatcctcaaaaacaggatttaacagtatttctggaagtataatgtgtgagcaggtaccttcggactcaagttggtatcacgacgggagaagacccgaataatacgaaggtcttgatacaacaccgaagatgtcagcaggaaagcttcggcgtggttgcaggaaatgaaaccgacttaaagatgaaaaggctattcagacctcgatagattactatagaattattatcaaatgtaaagggcatgaatgtaattttgtatgggctgtgtcccgtgcctataaataggtgaacagtaccctcgtactgttcacgctgacttggcattcactttttgcgtcacgcttgtattgtcatctccttccgattgaaggtacacttgtaattcaacgatgtttttgtttgtgcccaataataatatatgattgttcatattgtc

SEQ ID NO: 139200 - DNA, 387 bp, Zea Mays
atggaggcgtccagatctgcttacgagccctccctgtctctctccttctccgcctctctctccggcctaacctacctctccttccctgtcgtctcctacccgccacgcccctccaatagcgttgtccctcgcgcgccccgttcctcgtcgtcttcgcctgcgcaggagccaggaaggtaccctgtagccagcctcgccttcccggccaaatccttcttcggcgcgccactggccaccatcgcgacctccgtcgctcccacgccagccggccgcctccagctcgctcgaggttgtcgtagcagggaagaaggggccttcccgaccaaatccttctttggcacgccgctggccgccaccgcggcctccgtcgcgtcgctactcccatga

SEQ ID NO: 139201 - DNA, 354 bp, Zea Mays
ttggtctccgcgcgggagaggcagcagaggagcttcacgatgttgctgtgccggatgtggccgaggatgtccacctccgacgcgaactcgcgctccagcttcttgtccagactcccgccggcccagatgcgcttcacggccacggtgcccgccgcttcgccgctgctccggctggtgtacgtgacgcggtacacgcgccccgagccgcccttgccgatgaggttctcgtcggcgagcccgcgcagcacggaggcctcgccgaagtccacgggctggaaagcggtgagcttccagggctcctcagccagcgcgagccgccgcttccgcctcctgatgtcgcggacgacgaagacg

SEQ ID NO: 139202 - DNA, 2983 bp, Zea Mays
tgaagaaagagagctgttcgtccaccggggacacagacacagttgctggcagttgaccttgcaacctccacgcggatgacagcaccgtactacacgaatctccaacaggcccgcgaccgcgaggcatccccgtcctggcgtccggaatctcagctggggtccgaccgtccacgtgggacaagaccccccgctttgaatgcggcatccctcgtctaattaccttctgattcgagctcaaggccccgacgcaatctccgctgcctccctgatctgtggccccgagacggtaggaaccacctgtcagcctgtactggctaccacgacgcgccaccgactgtttggtgacccatttcttgcgcgagcagagtcgctaatcgatttccatcctccaactaatctcacaccaatcgggtaattagcgaatatatatatatccatatttactagacaagccccccgggtccccagatccgtccacccccacgctccgatccagcccgtccagttcgacgcgaagcggatcgtagccgtccgaatccgaggggtggacccgtgaattccgggaaggacgaggggtagttggctaccggttaaaacgcccgtgccagtggcccccgtcttcctcctctcctacgcgggcggggaagccaaggaagaagaagtagtagttcgctggaggagttggggcctcgtcctcggatccagagcgcggaaacccgtgcgcgcgtccggatcgacccgctcgctcgacggccgcgggcgcgaggctagggatcaggatcggcggcggcggcggcgatggggaagtccgtggtggtgggcgcggcggtcgtggcgtgcgcggcggtgggggtggcggcggtgctggtgcaccgccggcgcaagcgcgacgccgcgctcctggggtccgcggaggcggagaggaggcggcgcgcggccgcggtgatcgaggaggtggagcgcagcctcgccacgcccacggcgctgctgcggggcatcgcggacgccatggtcgccgagatggagcgcggcctgcgcggggacatccacgcgcagctcaagatgctcattagctacgtcgacaatctccccaccggagatgaacatgggctgttttatgcactggatcttggagggaccaacttccgtgtgctgcgagtccaactaggaggaagggagaaacgtgttgtcaaacaacagtacgaggaggtttccattccaccgcatttgatggtcgggacttccattgaactatttgatttcattgctgctgcattggctaaatttgttgatactgaaggtgaagatttccacctcccagagggtaggcagagagaacttggtttcacgttttccttcccagtgaaccaaacatcaatatcatcaggaacactcatcaagtggacaaagggcttttccatcaatggcacggttggtgaagatgttgtttctgagttgagcagggccatggagaggcagggactagatatgaaagttacggcattggtcaatgatacagttggcacattggctggtgggagatatatggataacgatgtagttgcagccgtaatattgggcactggtacaaatgcagcatatgtggagcatgcaaatgcaattcctaaatggactgggttactgcctaaatctggaaacatggtaattaatacggaatggggaagctttaaatccggcaagcttcctctctcagaatacgacaaagccatggactttgaaagtttgaaccctggagagcagatatacgaaaaaatgatttctggcatgtatctgggagagattgttcgaagaattttactcaagttggcacatgacgcttctctatttggagatgttgttccaactaagctggagcagccatttatattgaggacgccagatatgtcagccatgcatcatgactcttcgcatgacctcaaaactcttggatctaaactgaaggatatagttggggtcgcagatacttccctggaagtaagatacattacccgtcacatctgtgaccttgtcgcagagcgtggagcacgcttggctgccgcaggtatatatagcatcctgaagaagataggccgggacaaagtaccaagcagtggcagtaaaatgccaaggactgtaattgccttggatggtgggctctatgagcattacaagaagttcagcagctgcgtcgaagcaactcttacagacttgctcggcgaagaggcctcttcctccgtggttgccaagctggccaacgatggctctggcattggagctgctctccttgcagcctcacactcccagtatggcgagagtgactagtcttgaaaactggtgtggatcgaacttcgagtgtagctctcatttttatctttttttcccttcaaaacatccctaatattctggctctcctcggggaatttttcggcttcctttcttggctattctgtggatgcacttaaggctctgcagcgggatatagctagtatagagccaatcagtttggaggttatctaatggcataaggtttggacggcaggaacatagaaatggaagctgaacaatgccattcatgttctgcccagtttttcttctccttgtatggtgttgtaaaccaatcaaaacttttaacctttttgtgttggcaataaagaggaggcacgataatttgaccatgtgttctcttcactgcttcgtcaaatatatgattggatttagttttatagtttcgctgttacagtacataaaaacctatattacggggtggcactgtccatcagtgttgttgtaatgagctgtgatgactatcctttgctctggcaaagagcgtgcacaagcacatggcgtcctatatgctaggttctggcctcaggtggtcagggttcccatagccattgctcattctgcttttcttcagacattgcagtcgaaaccgcccttcccatcgtcgtcgatcacttcggcatcggagagttgtttccgg

SEQ ID NO: 139203 - DNA, 1382 bp, Zea Mays
caggccaccaccgccaccgagcgacgaccatggctttgccgtcgcgggcgcggctcctcctcctcctctgcttcgtcgccgccgcggcgctgctcgtcgcgccgggggaggtgtccgccaccgccgccgccgccgacgccggggggcacgggaagcggcgcgggcacagcacgcacacgaggcgcctgcggcccgggaagggcgcggcggccgcgaagccgtaccccgcgaacgcggcgcgggtggaggcgatcgagcggcagttcgcgcggtgggtgcggtccatgggcggccacggccacaacagcagtagcaccgcctacagccgggcgctcagccgcgcgtccctgcccgcgcgcacgctcgtcgtcgacaagaacccgggcgccgggaacttcacgtccatccaggccgccgtggactcgctcccgctcatcaacctcgcccgcgtcgtcatcagggtcaacgccggcacgtacacggagaaggtgagcatctcgccgatgcgcgcgttcgtcaccgtggagggcgccggcgccgacaagacggtggtgcagtggggcgacacggcggacacggccggggcctggggcaggcccatgggcacgttcggctccgccacgttcgccgtcaactccatgttcttcgtcgccaagaacattaccttcaagaacacggcccccgtgccgaggcccggcgccctgggcaagcagggggtggcgctgcggatatcggcggacagcgcggcgttcgtggggtgcaacttcctgggcgcgcaggacacgctgtacgaccacctcggccgccactactaccgggactgctacatcgagggctccgtcgacttcatctttggcaacgcgctctccctctacgaggggtgccatgtgcacgcgatcgcgcggaactacggcgcgctgacggcgcagagccggcagagcctgctggaggacacggggttctcgttcgtgagctgccgggtgacggggtccggcgcgctctacctgggccgcgcctggggcaccttctcccgcgtcgtcttcgcctacacctacatggacaacatcatcatcccgcgcggctggtacaactggggcgacccgacgcgggagatgacggtgttctacgggcagtataagtgcacggggccgggcgcgaactacgccggcagggtgcagtggtcgcgggagctcaccgacgacgaggccaagcccttcatctcactcgacttcatcgacggcttcgagtggctccggctgtagaattcattgttgacacactacatgaccttaattaatttctgtgaagaagaagaagaaaacaaaaatagaacgaaaatactgatgcaattgtttgagctgcgtaagatgagattggtgact

SEQ ID NO: 139204 - DNA, 199 bp, Zea Mays
atggcgggattcagaagccttgcacccaagaccaggaacctggtggtggctggggggcctgtcggccttcgtgctcggggtctactactacaccatgagagccgtgggaggcacggacgagctgcaggtggcgatcgacaagtttgaggagatgaagaagaaggacgctgccagaaactccagcacaggaggatcgtaa

SEQ ID NO: 139205 - DNA, 2100 bp, Zea Mays
ggcgaggagacgaaccgaagattggccaaatctcgcttgcgtttctggggtggtgtctctgactctctggctccgtccccggcaccggcgggcggtggcgtgatggcggactgggaggggatcccgccgcgggagcggcggcagatggaggagatcctgcagctcgacatggaggagctcaacgtggaggtcgtcgacgacaacgaagaagacgaggaggaagaggagggtgacggcaacgaggaggactacgacgtcgatgccttcctcagagataacaatggagatggagtggctagcacctctggaccattcacattcaataggtctctagcttcactgcacacataccttggcgaggttgacgatactcggggtagagttactcttttagatggtggcacaatcctcaacttgccaatgttttatcttcaaggcgttgttctatttcctggagctaccctgcctctcagagtaattcaggatagattagtagtaactattgacaaagctttgagactggtcgatgctccatgcacaattggggtggttctcatgcgacgactcccaaatcatcgacattatgctactgcttcagttggaacaaccgcagagatacgtcaatttggaaggttggaagatggttcattaaatgttgttgcccgtgggcagcaaagatttcgtttaaggaggcattggattgatgttgatcgggtggtgtggggtgaggtacaaattattgaagaagatactcccttgagaactcctagagatgcatttgctcaggtagctgcatgcaataccttcaatttgcatgcttcgtcatcagtcatcagtttggataggtctcctatgaaacaagatcatatagattcagaactagagtgcaacactccatcaccaaacagtaaaataagcaacccttcatcaatggattcaaggttgtgccatctaggttcacagtcaagtgactcgatgaaatcatcctcagatgaagacggggatttgatgcccaaacagttttggaagcggaaacaacattctgtgagggaaagtggtgcatcaagtcattccgacaagaagaccaacatgagaaatgataacaatctttgcttgacgcctctccagtcatcgccaatagcaaaaacaagagatgctaagcggcggcgacagtaccatgcttactcaaagcaggcttctcatgcaccattatcattttggcctcggtgggtatatgaaatgtatgattcatatacacttgctcgcagtgctgcagagttatggagacagataattgcaaacccaagcatggacgatcatgtaagaaagccagatattttgtcatttcacatcggaagcaaacttccagtctcagaatctgtgagacaaaaacttctggagattgatggagtttcatatcgcctacagaaagaaattcagcttctcaaggccttcaatcatattaaatgtagaaattgccagtctcatatagcaaaacgtagtgacatggtggtgatgtctaccgacgggcctcttggtgcctatgtcaaccctcacggttgtgtccacgagacgattacagtcagcaatgcaactgggctagcactcattggcaatccttcgaaagtccacagctggtttcctgggtactcgtggacgattgcagcatgcatggcctgcgagtcccacataggctggctattcagagccaccaagaagaatctgcggcctaggtccttctgggggatccgcagctcacaaatcgcagacgacacacaagtagatcagggtgactgatgctccaaacttccatgcgtataaggccatagtagcagtggactactaagtcatatatgacctggtgttcccaatcctccagtcgtgtctggttcatacgcactgcctgccttttttgtgttggcatagtagggacggtggagttccctgtaaaacaatcactctttttctactgttgtagtagtgctctgcactgaagggatttactgaatctctctttttttggtctaaataagatatctgttttcaatagtatatgcatgattttcatttacagatgttccatggtgtggcatgggtgaa

SEQ ID NO: 139206 - DNA, 946 bp, Zea Mays
aagacgagaggggggaaaaacagggcgagatcgatgactatgagcagtgggcagtcgtcgccgatggagtcaagcagtagagcatgtccacatagcgacgccccggcggtgtgctccaataagctgtgccgcgggatgaaagccgtctacctcgtcctcgtcaagaagcaccagccgaagctcgccgcgctcggagtccacctgcaccacctcctctccagaagcaagcgccgcagcagcctcgccgcgcgggagcagaacccggcgctgatgtccctgtcgtcgtcgctgtcgtgccggtccatggaccccgccgccgcggtggtgcacccgtacccgcgcagccagggccaccgccgccgcgggtcgttgtcgaggcacgcggccccgtcgctgtcgtgccggtccatggaccccgcggccgccgtgtgcaagtaccagtaccgtccccgcgaggtggagttcagctgcaagagcacgccaatgcataggcgccggcgcgaggataagcggcgtctgcgcctgcagagccgcgccgccgagcagggacgcgaccgcccgtcgtcggagccggagtactacggctcggccgcggcggtgacaaggctgttcgcgctcatggacgtcgaggaggtcgccgaggcggcggacggcggctacgacggcagcggcgatctggacctggacctggatgacgccgcggtggcggcgtggtcggcgccgcgtcaggtgcggatcacggactcgccatacctgccgagggaggaggacaacgaggagaggagcgccgtggacaggcgcgccgacgagttcatcatgtggttccacgagcagctgcggacacagcagcagcagcagctcagcacggtgcgcaactgggggtcagataaggtggtggtgcagaagcagcagaccgactggccctagtagtcttgtgattttgtga

SEQ ID NO: 139207 - DNA, 1149 bp, Zea Mays
atggaggtttcggccgagtgcgcgggcggcgggagtgtgaagaaggaggcggacctcttccttgtcgacgacctactcgacctgccgtgcgacgacgacgacgaggagacggtggtgggcgactgggaaggggacgggagtaagcaggctgcggtgttggaccggggttgtggcgccggcggggaggagggtgccgccggtaacgcgtcgaagaacgaatcgtcggcggtgactgcgctggacagctgcagcaattccatctcgggttccggcctcgccgacggggacttctccggcgggctgtgcgagccgtacgaccaactagcggagctggaatggctgtccaactacctgggcgaggacaactttcccacggaggatctgaagaagctgcagctcatcaccggcattccgccggctgcaaccgcgatggcgcccgcgcccgcgcccgccgccgcacaggcacagccggccgctggcgtgttgccacaggaggcgcccgtgctgggcaaggcacgcagcaagcggtcgcgcgtcgcgccatgcagctgggcctcccgcctggtcgtgctcccgccacctagtcccggctcgccgccgtccgcggccatctcgccgtccgagtccggctccggcaccgcggcgctggcgttcccggccaggaagccgttgaagcctgcgaagaagaaggaggcgccgtcgccgtcgctgccgccggtgccaaacaacgccgcggcggcgggcgcgggggaggggcggcggtgcctgcactgcgagaccgacaagacgcctcagtggaggacggggccgctgggccccaagacgctgtgcaacgcgtgcggcgtgcggtacaagtcgggccgcctcgtgccggagtaccggccggcggcgagcccgaccttcgtggtgtcgaagcactccaactcccaccggaaggtgctggagctgcagcgccagaaggaggcgcacccgcaccaccaccaccagtaccagccgcagcaggccctcgcccacgtcggcgccggcgggaccttgaacttgatgcacgcgccgagcccgctgctgttcgacgggccggcggcgccgctcatcggcgacgacttcttggtccacagccacatagggccggacttccgtcagctcatctag

SEQ ID NO: 139208 - DNA, 1400 bp, Zea Mays
cacacccaggctcctcacctcaccaccgcggccgcctgcccaaagcagcccaccactcgggcgcagcaattcgtcgagcatccgccgcgctcgacggccaccggcccaccagggcaccatggcgtccgccacgcgtgctctgggggcgctcctccacagggcctcgtctctgtcttcctccgctcccgctctccggggagcctcgctcctccgcggggacgggcctattggaagcgccggactgttccggaggcatgcggcgaggcggcggatttcgtcgttccagccgctctgcatgggaagacgctcctgcaaaatcgctggaaggaaggatgcccagaacttgaagaagatgaagcgcaacagcaaaattggaaaagaaattgttgcggccatcaagaagggtggcccaaacccttcatccaacacaactttatcagctatactagagaaagcaagggaacttgatgtccctagagaaattttggagcgcaacatcaaaagggcatcagaaaagggacaagatacttacacagaaaaggtttatgaggtctatggttttggtggagtgggtatggtcgttgaagttctaactgacaaaattacaagatcagttgctgacattagaaacgtggtgaaagactgcggagcaaaattggctgatcctggatctgttacctttagattcagacaagctcgagtggtgaacataaaagttactgatgcagataaggaccaactgctcaccgttgcgttagatgctggtgctgatgacgtccttgaaccaaattttgatgatgatgactctgaagaagaagcagaaaggttctacaagatagttactacatcagaaaactacccagttttgctatcgaagcttcaagaagaaggattgaagtttgaaactgataatggctacgaacttgttcctctgaacccaattgaggtggacgacgaggccgtggaactaaacaaggaacttgtttcaaatttgctagagcttgatgacgttgatgccgtctatacagaccaaaaatgagtgaattcatgagctacagctctcaattcaagacgcgctcggccaatggactttgttcgagtatattcacttttcattgatgggaaaaaaatgttaggtctttttatgaagcctggttgagcaccatcggctctacccaaaaacttaacctagttatccagcatctttttgatactttggcatttcgcaagctcatgtctataccttggtttcttcccagcccatcgtgttgggatggtttgatacatgttcagaaagcagatgtgagaaaccatagtaaaataatacgttgatgctgatccatttttgggtcttgttaaattgcaatggaaatgctatgattttggtaagcattgaaatg

SEQ ID NO: 139209 - DNA, 2211 bp, Zea Mays
ggctcgtcatctactcccctcgctaggcatctttgccgagggcgtacggctcgccatttccttttatcgcgcccaactgccctcccgccgtcacggcaaattccagctcccgcgaccgcgacattgcaccctcgccaccgcgaccagcccgtgcctccacattcatccgtcgccatgtacaaacctgtacggccccattcgttgaacaagtgaagaaactggattgtggaatgctcctctttctcagtgttcgccaggaaggatagatccggaggcgcatcgtacgggtggagatttggaccaatccactgtaggattgatgcaccggcgtttgcttcctcctacaagcttcgaaggcctaatgtcagcaaatctgtcccatgccaatcgaataaacagggatgaatcctacacagattttggaaccggaaggcatatgtggaccagaacacttatgtgcagattgaagtggatttttgccagacaaatctctctgcttgcatgattgaagtgcatatgtggcccaatacacttatatgctcttattcctcactgccatctcatttctaaagttggaaagattgaactgaaccttgctctgaacttttttccttctttgttttcttattgttgcagggaggcaatcctttggatttcaaaatgtagttgatctaattcatgcatatgctgccaaagctgttactgaacaactagaccaaaatgagaaccttgtatcagtcaatgcagatgtctgcaatttctgggaaaaggatgttatgccgatgcttttctgtaggagttgcagatttttttttaaaaaaaaaacttcagccgaaacaggatgttatatcgaaacattgaattagcagtggatcgtgttcagaaagttgggttcattgtagggatcagcttccaggggttggttcgttgcaggatcaattgccaacctaccactgagtctaaatttagagtctgttggttacccacccttcaggaagttctatattttataaagccatctccaaaactctaaaattagctaggaattatagctatgctgttggagttgctctcagttccttacaccagttgtttctttaattcaggatgcccagaacttgaagaagatgaagcgcaacagcaaaattggaaaagaaattgttgcggcgtaggtgttgctggacactgtgaacttgcactatcattttaacagcttgcatcaagaagggtggcccaaacccttcatccaacacaactttatcagctatactagagaaagcaagggaacttgatgtccctagagaaattttggagcgcaacatcaaaagggcatcagaaaagggacaagatacttacacagaaaaggtttatgaggtctatggttttggtggagtgggtatggtcgttgaagttctaactgacaaaattacaagatcagttgctgacattagaaacgtggtgaaagactgcggagcaaaattggctgatcctggatctgttacctttagattcagacaagctcgagtggtgaacataaaagttactgatgcagataaggaccaactgctcaccgttgcgttagatgctggtgctgatgacgtccttgaaccaaattttgatgatgatgactctgaagaagaagcagaaaggttctacaagatagttactacatcagaaaactacccagttttgctatcgaagcttcaagaagaaggattgaagtttgaaactgataatggctacgaacttgttcctctgaacccaattgaggtggacgacgaggccgtggaactaaacaaggaacttgtttcaaatttgctagagcttgatgacgttgatgccgtctatacagaccaaaaatgagtgaattcatgagctacagctctcaattcaagacgcgctcggccaatggactttgttcgagtatattcacttttcattgatgggaaaaaaatgttaggtctttttatgaagcctggttgagcaccatcggctctacccaaaaacttaacctagttatccagcatctttttgatactttggcatttcgcaagctcatgtctataccttggtttcttcccagcccatcgtgttgggatggtttgatacatgttcagaaagcagatgtgagaaaccatagtaaaataatacgttgatgctgatccatttttgggtcttgttaaattgcaatggaaatgctatgattttggt

SEQ ID NO: 139210 - DNA, 1355 bp, Zea Mays
ccggctcgtcatctactcccctcgctaggcatctttgccgagggcgtacggctcgccatttccttttatcgcgcccaactgccctcccgccgtcacggcaaattccagctcccgcgaccgcgacattgcaccctcgccaccgcgaccagcccgtgcctccacattcatccgtcgccatgtacaaacctgtacggccccattcgttgaacaagtgaagaaactggattgtggaatgctcctctttctcagtgttcgccaggaaggatagatccggaggcgcatcgtacgggtggagatttggaccaatccactgtaggattgatgcaccggcgtttgcttcctcctacaagcttcgaaggcctaatgtcagcaaatctgtcccatgccaatcgaataaacagggatgaatcctacacagattttggaaccggaaggcatatgtggaccagaacacttatgtgcagattgaagtggatttttgccagacaaatctctctgcttgcatgattgaagtgcatatgtggcccaatacacttatatgctcttattcctcactgccatctcatttctaaagttggaaagattgaactgaaccttgctctgaacttttttccttctttgttttcttattgttgcagggaggcaatcctttggatttcaaaatgtagttgatctaattcatgcatatgctgccaaagctgttactgaacaactagaccaaaatgagaaccttgtatcagtcaatgcagatgtctgcaatttctgggaaaaggatgttatgccgatgcttttctgtaggagttgcagatttttttttaaaaaaaaaacttcagccgaaacaggatgttatatcgaaacattgaattagcagtggatcgtgttcagaaagttgggttcattgtagggatcagcttccaggggttggttcgttgcaggatcaattgccaacctaccactgagtctaaatttagagtctgttggttacccacccttcaggaagttctatattttataaagccatctccaaaactctaaaattagctaggaattatagctatgctgttggagttgctctcagttccttacaccagttgtttctttaattcaggatgcccagaacttgaagaagatgaagcgcaacagcaaaattggaaaagaaattgttgcggcgtaggtgttgctggacactgtgaacttgcactatcattttaacagcttggtatttcattgatttcataatttggattattttgagcatatggttaatccaacatgctgtcatctgctagtatatgttgacataagatgttttacctttttggccgtttaaacttaaatcattggacatctgttcc

SEQ ID NO: 139211 - DNA, 794 bp, Zea Mays
ccggctcgtcatctactcccctcgctaggcatctttgccgagggcgtacggctcgccatttccttttatcgcgcccaactgccctcccgccgtcacggcaaattccagctcccgcgaccgcgacattgcaccctcgccaccgcgaccagcccgtgcctccacattcatccgtcgccatgtacaaacctgtacggccccattcgttgaacaagtgaagaaactggattgtggaatgctcctctttctcagtgttcgccaggaaggatagatccggaggcgcatcgtacgggtggagatttggaccaatccactgtaggattgatgcaccggcgtttgcttcctcctacaagcttcgaaggcctaatgtcagcaaatctgtcccatgccaatcgaataaacagggatgaatcctacacaggtgagatgctggtggcaattgctcatatttttttggtactttttcaagactagacagttttttgaaccaaagcagattttggaaccggaaggcatatgtggaccagaacacttatgtgcagattgaagtggatttttgccagacaaatctctctgcttgcatgattgaagtgcatatgtggcccaatacacttatatgctcttattcctcactgccatctcatttctaaagttggaaagattgaactgaaccttgctctgaacttttttccttctttgttttcttattgttgcagggaggcaatcctttggatttcaaaatgtagttgatctaattcatgcatatgctgccaaagctgttactgaacaactagacc

SEQ ID NO: 139212 - DNA, 1373 bp, Zea Mays
tcaggatgtccgacttcatccccgtctcagcgttcaccagaccgccgctccggtccaccctgtagaccagttcgtccttaccgggcgcggcgtcgatgtagaccgtgcagttctcgtcgatctcctcctggatcagcatcttcgacagctgcgtcaccaccctcttctcgatccacctccttattggccgcgcgccgtacacctgttgttgaagccacacaagagagagagagagagtcagcatcatcaggtgtcaccgacgaattcagatggatcaaaacatggatgctcacataccggatcgtaagagagagacaagatgatgtccaatgcggcgtcggtcacagccagagcgatgcccctttcggcaagacggacggccacatccttcatctgaaggcgagcgaccttcctcagctgctcgtgggacagaggatcgaagatcacgatctcgtcgagacggttcagcagctcagggcggaagtgcctcctcacctgcacacagcaaaaacgatccgattgagcatcacacattcacactgcagaggaacaatgtcgaacgacgattcagaacgttatcgcaatgcatacctcctgcatgaccagatcgcgagcgaccttcatggagttcttgcccaccatcccagcgaggaggtgctcggcgccgaggttcgatgtcatgatgatcacggtgttcctgaagtccaccgtcctgccttgcccatccgtcagcctgccgtcgtcgaggacctggagcagggtgttgaacacggcgacatgggccttctcgacctcgtcgaacaggatcacgctgtacggcctcctcctcacttgttcagtcagctgcccaccctcttcatggccgacgtagcttcagtcacaggtggtgctccgatgaggcgagcaaccgagtgctgctccatgtactccgacatgtcgatgcggacaagaaggttctcgtcgtcgaacagctgttcggctagggccttggccagctcagttttccccacgccagtcggacccaggaagaggaacgagccagtgggctgttgtggcctgccaagaccggccctcgacctcagcaccgcctctgcgacggcgctcacagcctctgtctggccgaccaccctctggtgaagcctgtcagccaggccgaccagcctctccttgtcgttctggccaagccgggtcactggaatacccgtccaacggctcaccacctgcccatagaacgaaacaccatttcagcacgctgcacgactacgctactaggagacgatcggcaattcggcattgctctgcaaattttttgtggcggtgaacaagaacaataacatacctctgcaatttgttcagggccgacggtttcggtg

SEQ ID NO: 139213 - DNA, 207 bp, Zea Mays
atgccaatccccctagaggtccaaagcagaactgctcagagctcgcatgcgtctgggtttgcaagcacaacaacctcctatagaaatcgtcagggagatcggtgcaaagatattttccagcacaacctaattcttcgtaccagcagtgcaaagatatttcaacaagtactcattagaagagcaagtatctgccaaatcctgatgtag

SEQ ID NO: 139214 - DNA, 1913 bp, Zea Mays
atggacgacgaggactactcgtgggtgcggcgcaccaggttctcgcagtctgtcgtcaggtccagctccggcagggagcggtatggcgcgttcatcatcgacccgttcggtcgtggcgccaagctgaggcaggacgggttgggcacgggccccggggtctctagctcggcaaggcggctgccgatccccaaggcgagaccggcagttgcccggtcggaacggaagctgaagcacgcgtcttcagagggccaattgaacagggcgaggaacggtgatcgctcgtcgcaaggatcaccggcgaagcagagccgggagggggtcggcctgagcttggacattccacagctgcatgatgtggctgttcgaccacccaaggagagcccagacgctgcgctggatttctctttccactcggacgagcacagccagaggctccagcgagtgtgttccagcccgtctcctttctttctgcaggatgcaacagtgacagctgatgatggttccagagtgcgcagtgcatctacgaaggtgtccaagccgccgccgaaaccgaagcgaagagccaagtcccctatccccaagcgcgtcatctcggacgtgttcaaggaggcgaaagctgccaccaagaggttctccagcccgcagcggcagaggaagcccatgtccccgcggtcaccagacgacagccctccactcggcttcgcctcgctaagagcaccgagcaagctgaagatcaataccagagcatcctcatggccacgaacaaaccttgacagtggaccggcaagagttgctgcgccggagatccttgagaggtggacggtcgatcgctccgagttgctcatcggccatagatttgcatccggggcctatagccgattgttccacgggatctacaaggaccagcctgttgctgtgaagtttatcaggcagcccgacgatggcgaggacgacgaactgtctgctaagcttgacaagcagttcacttcagaggttacaattctggcaaggctccaacatcgtaatgtcattaagcttgttggggcctgtaattgcccgacggtcttctgtgtcatcaccgagtttctgtccggcggttctctgagggctttcttgcgaaagctggagcgtgaaactcttcctttggagaaggtcatttccatcgctctggatatcgcacgcggcctggaatatattcacctccaagggattgtgcaccgtgacatcaaacccgagaacatcttatttgatggagaattctgcgctaaagtcgtcgattttggagtggcgtgtgaagaaaaatactgcaatttgttaggcgatgatccaggtacttatagatggatggcaccagagatgtacaagcacaagccatatggccggaaggtcgatgtgtatagctttggacttgtcttgtgggaattggtcactggttcactcccttatcaagatatgactccgcttcaggcagcttttgcggttgttaataagaacttgaggccggctattccattgagctgcccagcagcgctgaagcttctgatcgagcaatgttggtcctggcaaccagaaaggaggcctgagttccagcaaatagtttcagtccttgaaaacctcaagacagttcttgaaagagatggaacactcgacaagatcccaggctcgatctgccaggccctggaacccaatgaccagaacaagaagaaggctggcaactggatccagaggctgtcatacgctcaacctgctttctccggacctccacccccaaagttactctagttacacgtcttcttgttcttagcagcttggtatctggtactccagatagcaagtgtgtaaattgaatatttctttgtttcgctgggagaccagagatttcttcatggtatatactcggatacagtactgat

SEQ ID NO: 139215 - DNA, 1663 bp, Zea Mays
cttgcagcgtgctgtcgtgcgtcagtctccgcgacggcccgtgatctgccgaggatgcgccacacgcgcagttcggacgagggacgggtgacgaggtgtgcggtgcgcgtgagtgaggaggcaaggcttctccatctggcaaccggggaccggacgatcaactcatccgcgcgactccgcttcgtcacgcggcgtcgccggcctcctcccgtgcccgtggatgcgatgcaacagtgacagctgatgatggttccagagtgcgcagtgcatctacgaaggtgtccaagccgccgccgaaaccgaagcgaagagccaagtcccctatccccaagcgcgtcatctcggacgtgttcaaggaggcgaaagctgccaccaagaggttctccagcccgcagcggcagaggaagcccatgtccccgcggtcaccagacgacagccctccactcggcttcgcctcgctaagagcaccgagcaagctgaagatcaataccagagcatcctcatggccacgaacaaaccttgacagtggaccggcaagagttgctgcgccggagatccttgagaggtggacggtcgatcgctccgagttgctcatcggccatagatttgcatccggggcctatagccgattgttccacgggatctacaaggaccagcctgttgctgtgaagtttatcaggcagcccgacgatggcgaggacgacgaactgtctgctaagcttgacaagcagttcacttcagaggttacaattctggcaaggctccaacatcgtaatgtcattaagcttgttggggcctgtaattgcccgacggtcttctgtgtcatcaccgagtttctgtccggcggttctctgagggctttcttgcgaaagctggagcgtgaaactcttcctttggagaaggtcatttccatcgctctggatatcgcacgcggcctggaatatattcacctccaagggattgtgcaccgtgacatcaaacccgagaacatcttatttgatggagaattctgcgctaaagtcgtcgattttggagtggcgtgtgaagaaaaatactgcaatttgttaggcgatgatccaggtacttatagatggatggcaccagagatgtacaagcacaagccatatggccggaaggtcgatgtgtatagctttggacttgtcttgtgggaattggtcactggttcactcccttatcaagatatgactccgcttcaggcagcttttgcggttgttaataagaacttgaggccggctattccattgagctgcccagcagcgctgaagcttctgatcgagcaatgttggtcctggcaaccagaaaggaggcctgagttccagcaaatagtttcagtccttgaaaacctcaagacagttcttgaaagagatggaacactcgacaagatcccaggctcgatctgccaggccctggaacccaatgaccagaacaagaagaaggctggcaactggatccagaggctgtcatacgctcaacctgctttctccggacctccacccccaaagttactctagttacacgtcttcttgttcttagcagcttggtatctggtactccagatagcaagtgtgtaaattgaatatttctttgtttcgctgggagaccagagatttcttcatggtatatactcggatacagtactgat

SEQ ID NO: 139216 - DNA, 1631 bp, Zea Mays
cttgcagcgtgctgtcgtgcgtcagtctccgcgacggcccgtgatctgccgaggatgcgccacacgcgcagttcggacgagggacgggtgacgaggtgtgcggtgcgcgtgagtgaggaggcaaggcttctccatctggcaaccggggaccggacgatcaactcatccgcgcgactccgcttcgtcacgcggcgtcgccggcctcctcccgtgcccgtggatgcagtgcgcagtgcatctacgaaggtgtccaagccgccgccgaaaccgaagcgaagagccaagtcccctatccccaagcgcgtcatctcggacgtgttcaaggaggcgaaagctgccaccaagaggttctccagcccgcagcggcagaggaagcccatgtccccgcggtcaccagacgacagccctccactcggcttcgcctcgctaagagcaccgagcaagctgaagatcaataccagagcatcctcatggccacgaacaaaccttgacagtggaccggcaagagttgctgcgccggagatccttgagaggtggacggtcgatcgctccgagttgctcatcggccatagatttgcatccggggcctatagccgattgttccacgggatctacaaggaccagcctgttgctgtgaagtttatcaggcagcccgacgatggcgaggacgacgaactgtctgctaagcttgacaagcagttcacttcagaggttacaattctggcaaggctccaacatcgtaatgtcattaagcttgttggggcctgtaattgcccgacggtcttctgtgtcatcaccgagtttctgtccggcggttctctgagggctttcttgcgaaagctggagcgtgaaactcttcctttggagaaggtcatttccatcgctctggatatcgcacgcggcctggaatatattcacctccaagggattgtgcaccgtgacatcaaacccgagaacatcttatttgatggagaattctgcgctaaagtcgtcgattttggagtggcgtgtgaagaaaaatactgcaatttgttaggcgatgatccaggtacttatagatggatggcaccagagatgtacaagcacaagccatatggccggaaggtcgatgtgtatagctttggacttgtcttgtgggaattggtcactggttcactcccttatcaagatatgactccgcttcaggcagcttttgcggttgttaataagaacttgaggccggctattccattgagctgcccagcagcgctgaagcttctgatcgagcaatgttggtcctggcaaccagaaaggaggcctgagttccagcaaatagtttcagtccttgaaaacctcaagacagttcttgaaagagatggaacactcgacaagatcccaggctcgatctgccaggccctggaacccaatgaccagaacaagaagaaggctggcaactggatccagaggctgtcatacgctcaacctgctttctccggacctccacccccaaagttactctagttacacgtcttcttgttcttagcagcttggtatctggtactccagatagcaagtgtgtaaattgaatatttctttgtttcgctgggagaccagagatttcttcatggtatatactcggatacagtactgat

SEQ ID NO: 139217 - DNA, 830 bp, Zea Mays
cttgcagcgtgctgtcgtgcgtcagtctccgcgacggcccgtgatctgccgaggatgcgccacacgcgcagttcggacgagggacgggtgacgaggtgtgcggtgcgcgtgagtgaggaggcaaggcttctccatctggcaaccggggaccggacgatcaactcatccgcgcgactccgcttcgtcacgcggcgtcgccggcctcctcccgtgcccgtggatgcagagagtggcttgtcgcggcgcggaagggggaacgagcttgcagtcccagtcctggccgggggacggtagccactagcaagcgagtgcgcgtctgcctcggagcgacgtctcgctcgcctttcccccctttcctgcatcctgtgcgctgtgaggaatgacggtctccgcactcactcctccaacggtcgccatccccgaaccacatggattattgtggtgagcgattggactctcttgttctctttggtttgttttcgtggtgggcgagcaagtcgaccttgggagatttcgtgtcgctctggaagggatcaaatgcggcgcctacttacttggtggtctggcactggctggagagctctagtgtcagccagtgttcctgctgtcgcctgcctcatctaggtcccctcccttcgttaagctgttcttgcgagttgttaatctaccgtatcgagggggggggggggggggggtccattgcggcgcctacttacttggtggtctggcactggctggagagctctagtgtcagccagtgttcctgctgtctcctgcctcatctaggtcccctcccttcgttcagctgttcttgcgagttgttaatctac

SEQ ID NO: 139218 - DNA, 1019 bp, Zea Mays
cttgcagcgtgctgtcgtgcgtcagtctccgcgacggcccgtgatctgccgaggatgcgccacacgcgcagttcggacgagggacgggtgacgaggtgtgcggtgcgcgtgagtgaggaggcaaggcttctccatctggcaaccggggaccggacgatcaactcatccgcgcgactccgcttcgtcacgcggcgtcgccggcctcctcccgtgcccgtggatgcgtgcgtccctctccctctccctctcgtactgttcccacgctttttagtcactcgcacggttcaggatcttggcgtcctgcttcgtggccgtggtgattgccattttgattgggaggaggtgcgcgcgatctgcctggtttgatttggatccggtctgatctgacgtgggtatgggtcggttgctgctgcgtcagagagagtggcttgtcgcggcgcggaagggggaacgagcttgcagtcccagtcctggccgggggacggtagccactagcaagcgagtgcgcgtctgcctcggagcgacgtctcgctcgcctttcccccctttcctgcatcctgtgcgctgtgaggaatgacggtctccgcactcactcctccaacggtcgccatccccgaaccacatggattattgtggtgagcgattggactctcttgttctctttggtttgttttcgtggtgggcgagcaaggtgagcagctggcggtgggaaatcaccgggccttttttttatgcttctcccgtgtccgggctcgtcgttgattgattcactgctcttgcttggcggctgaggggctctgatcggcgcatcgggttggagcagtcgaccttgggagatttcgtgtcgctctggaagggatcaaatgcggcgcctacttacttggtggtctggcactggctggagagctctagtgtcagccagtgttcctgctgtcgcctgcctcatctaggtcccctcccttcgttaagctgttcttgcgagttgttaatctaccgtatcgaggggggggggggggggg

SEQ ID NO: 139219 - DNA, 1372 bp, Zea Mays
ccgctgggtacactctgttcttcgtatttatgcatgtttcattgctgtttactgcttatgcgagtagttatacacacatgcatatacatgtcattacatatatcgcactgattatctggattaaattaaaactaaaaatgcctaactttctaacactatacatcacctcccccttcctcttcttaatgagaccactccctctcgtccgccccctccgtgaaaccaacgcccctctctccccgcgcacgagacccatcgcgaatggaagttgctcctgcggtgaagcaactcctccccatggcgcagggccccaactccccgtcctcctccaccacctcgccctcgcccgccgcgccgtccccgccgccgcgccagcagcagtcgcaggcgcccgtgccgcgcatcatcgacaccacgcccttccccaccaccttcgtgcaggccgacaccgccaacttcaagcaggtcgtccagaggctcaccggctccgacacgccgccgcctgcccagaagcccgccaagacccacggccaccaccaccaccacggcggcggcgtcgggcccaagaagccggccttcaagctctacgagcgccggatcggcaagaacaacctcaagatgatcgcgccgctggcggggccgtcgccgcggaaggcggcgccggaggtgctgtcgcccagcgtgctcgacttcccttccctggcgctcggtagccccgtcacgccgctgctggccgaccccttcaaccggtcggcgtcggcgtccccgggcgagcaggacgaggccgaggccgcggccatcgcgcagaggggcttcttcctgcacccctcgccgaggggcgtcgagccgccgcggctgctgccgctgttccccgtcacgtcccccaagatggcgccgtggccgtcgcagcagtgatcgcgcggggcgggcccccgctgccggagaattcctagtactgccgcttcagatactacttgtttaattaactccttggtgcgtcatgttttttttctttttatttttgctcatggtattcaactcttgagcgatcgcgaaggaacggaaagaaagatcacactcttgagcttcttgtgctctctgctgtttctactacgcacttgcctaatctactccgccatcgacgctctccattctcttcagcttttgcttcaccagaaacaacataaaaatgcttctttttttgttttgttttgttttgtcaagggtgaaacgaacgaagcattgcacggtatagtatagtcgaatccttacggtttttagacgtcttcctgatctagcagcctgacagggacggagtttctggggggactgtaattttctagtgtcacagagctcgaaacgatggtgaaaa

SEQ ID NO: 139220 - DNA, 2855 bp, Zea Mays
gatttcaaggtgctggtgaatctggcttggccacatagatcttttttattgttgtcctcagaagacaggtttgctgagactgctttctgtctactgtaaattgatgaaattttggtgatcatatactatggaaaaaaagacagttcacgttccggctgagggtaataatggtgagattgaaaatggtacgagctctagtcagaatcctgagacccttgagcatccagttttgctgtctgcatctcaaactgtgccaaataacttggggataaggaaaaactataaaagggcagcaaacagaggtaaaaagggttccgaaggactaacaggtcaggcatatactttgaggtcatctgatattgatgtcagggtgcttcgctctacatcaggttcaaagacaacatctactgagcatgtgcagcctccaggacaaccagctgccaagagaagaaaaaggagcagagcctcaaacaaaaattcgacagatgagttctcacaaattcgtaaacgggttagatacattttgaaccgaatgaattatgagcaaagcctaattgaagcttatgctagtgaaggctggaaaaatcaaagtttggataagacaagacctgagaaggagcttgaacgagccaaatcagaaatcttacgatgcaaattgagaatacgggaagtcttccaaaatattgattctcttctgtccaaggggaaaattgacgaatctttatttgattctgaaggagaaatatcttgtgaagatatcttttgtgctacttgtggttcgaaaaatgctacattgggtaatgatatcattctctgtgatggagcttgtgacagagggttccaccagaactgtctaaatcctcctctgcgtactgaagatattcccatgggagatgaaggatggctctgcccagcatgtgattgcaagttagactgtatagatctaataaatgaactccagggcagtgacatctccattgaggacccttgggagaaagtttttccagaggcagctgctatgaccaatggctctaagcaagatgaagcatttgatcttccatctgatgattcggatgacaatgattttgaccccaatatgcctgaagagcatgtggctagtaaggaagaagaatcttctgaagaggaagaggatgatgacggaggatcagactctgacgactctgacttcttaacctgttctgatgatttggaacctttgatagataaaaagaaggttgatgacctgggattaccttctgaagattcagaggatgatgactatgatccagcaggtcctgattcggataaagatgtcgaaaagaagtcaaattctgatgagtctgatttcacgtctgattcggatgatttttgtaaggagattaaaaaatctggtggacatgatgaagtttcatcgcctccattacccgatgtcaaggtgggtgatatggaaaagaacactgctcagtctaacacaataagttctgctgacgaccctatggagactgaaatagaccagagtgtggttttaccagtatcaaggagacgtcaagctgaacggttggactacaaaaggctgtatgatgaggcatatggtgaagcatcatctgattctagtgatgaagaagaatggtctgggaagaacacaccaataaaaagcaatgaagagggtgaagttggttctcctgcaggaaaaggctctagagttgcgcaccataatgaactgactacacaaaacactaaagaaagcttgcattctcttcatggttcagtagatgagaaacatggagatcttacttctaatggcagcaatatcaaagataggaaaggacattttggtccagtgattagtcagaagctacatgaacattttaagacacaaccataccctagtcgttctcttaaagaaagcttggcagaagaactagggctaacatttcatcaggtcaacagatggtttgaaaataggcgtcattttgcaaggttagcttcttccaggaaaggcatcagtccagataagcatagcccccaaaatactaatagcccagtgacacctagtatgcaacctaaagaaccagaggggactgtgatggaagaatctaatgtatgcataaacagggatgctaccatctctaaaaaagcggtttcttcaaaagtcggatcaagaaagaaccttagcaagagttcccctaaaagccgggacaaaagttgattctgccgcggatcagaatctgtggcctgaccttacagagaaggcagggcaggcaaagagcaatacagcaggagttgaagaagaaaatgggacgatgaagtttgtagacaaagacatgagccagaatttggattgctcctgaaatttgcaggtctatgggccttgaaacttgggttgtatgactctacactggtagccaaaaaacatagatataccattgcaagtcagctagctctcattagatcatgccaatcaactaacaagcacgtcattcagtttttttcttcttttttttcctgtgggggctattgattcccgttctttgccaactgagggcttcctctgatttctgggtcgctctataggtattagctatcctacagatttgtttgcagcaattactgtcattgcaggaagagctcaattacaaaaccctaaggttcagtaacgacagcacgatgctgctatgacaggatgcagaagatgcattgttttcatcgatgttgattttcttgtaagatggaatgttgtaccaaacctgaacagatcactttgttgtgattcagtgtgcggctatggcctatggatttgtacttgtttgactcacagagcatcgcgctttacatgcaaacggattttcggtaac

SEQ ID NO: 139221 - DNA, 4012 bp, Zea Mays
cttggggttccctggggattcttgattggagctgagctaaccatagcccaaagtcgtatctctttggttaataagatccaaaaggtttatcgatcccaaggggtacagatccataatagacatatagagattattatacgccaagtaacatcaaaagtaagggtttccgaagatggaatgtctaatgtttttttacctggggaattaataggactattgcgagcggaacgagcagggcgggctttagatgaatcgatctattatcgggcaatcttattgggaataacaagggcttccctgaatacccaaagtttcatatctgaagcaagttttcaagaaactgctcgagttttagcaaaagctgccctacgaggtcgtattgattggttgaaaggtctgaaagaaaacgtagttctgggggggattatacctgttggtaccggattccaaaaatttgtgcatcgttccccacaagacaagaacctttatttagaaattcaaaaaaaaaatctattcgcgtcggaaatgagagatattttgtttctccatacagaattagtttcttctgattctgacgtaacaaacaatttctatgaaacatcagagaccccgtttacccctatttatacgatttaagtatacataaagcaattttttttactttaatttaaactatacttttgaccttagaatgctaacaggtctgattttcgattttgtacttaaatttaaattgtattttaataagtaaaagaagtcagttaattcattaaggctatgtttataccgtgtatcaatggtcaagaaggttccattggaacaattattatttatttcaagctatttcggctctttcttaatcttcaaaaagaaatgaattccgtaatggtaacacgaaaaaagaaaaaaaaaggaagtgtggaaaaaatgacaagaagatattggaacatcaatttgaaagagatgatagaagcgggagttcattttggtcatggtattaagaaatggaatcccaaaatggccccttacatctcggcaaagcgtaaaggtactcatattacaaatcttgctagaacagctcgttttttatcagaagcttgtgatttagtttttgatgcagcaagtcagggaaaaagcttcttaattgttggtaccaaaaaaagagcagcggatttagtagcatcagctgcaataaggtctcgttgtcattatgttaataaaaagtggttcagcggtatgttaacgaattggtcgattaccaaaactagactttctcaatttagagacttaagagcagaagaaaaaatgggaaaattccaccatctcccaaaaagagatgcggcaatcttaaagagaaaattatctaccttgcaaagatatctcggcgggatcaaatatatgacgaggttgcctgacattgtgatcgtccttgatcagcaaaaagagtatatagctcttcaggaatgtgccattttggggattcctactatttctttagtcgatacaaattgtgacccagatcttgcgaatatatcgattcctgccaacgatgacactatgacttcaattcgattaattcttaacaaattagtatttgcaatttctgagggccgttctctctatataagaaatcgttgattaagaagaatagtgaattcttgagcaactgcgtagatttataggattaattactattcttttttgttttgcatagataaaagaagggaaatattgatatatattagagggtattgatatatattatgatctgatgtgatttcttggtatattaaatataagattaatacttcaagttgctgagttgagaaagagatgcttgaatcaaaagaattccttttttgaagttcaatttttatcagaggacaatatgaatattacaccatgttccattaaaacactcaaggggttatatgatatatcgggtgtagaagtagggcaacacttctattggcaaataggaggtttccaaattcatgcccaagtactcatcacttcttgggtcgtaattactattttgctagatcagttatcatagctgttcggaatccacaaaccatcccgaccgatgatcagaatttcttcgaatatgtccttgagtttattcgagacttgagcaaaactcagattggagaagaatatggtccctgggttccctttattggaactatgttcctttttatttttgtttcgaattggtcaggtgctcttttaccttggaaaattatagagttaccccatggggaattagcagcgcccacgaatgatataaatactactgttgctttagctttactaacatcagcggcatatttttatgcgggtcttagcaaaaaaggattgagttatttcgaaaaatatattaaaccaaccccaatccttttacctattaacatcctagaagatttcacaaaaccattatcacttagttttcgacttttcggaaatatattggcggatgaattagtcgttgttgttcttgtttctttagtccccttagtagtccctataccggtcatgtttcttggattatttacaagcggtattcaagctcttatttttgcaacgttagccgcagcctatataggtgaatccatggaaggtcatcattgaattaactagtttttgaaatagtctttctttttttagcttagcccaattcatgcatgattccggataatcctcttagttggaaaactaaatagttcgaaaggcgtatgaatatacaacctagagttgtaggagagagaatagactatattatggaagaggtaaagtatatatgcattcaggggggccaagtcaggttagatctatatctttaatgcctataagacagtcatcttttgtgtggctttctaaagaatgattttagaatcggattcaatagaaaatgagaaaataggcaaacaaaatagaagaaacaaatgtatatgggattttttttattcctaagttagattcattatctaatccgatatatagaattcccttctatatggaactggattccatatctagttctatgcagcatatttgttatcaattgtatatcttgatttgattcctattggattttggattagttcgatttcaataggggttcttcctgtattttcgtcttttaatatgttagatgaaggggaaaaaatgggaactcaaagatatcgaagagtaaaaaaaaggatggaataaaagagtgattggttgaaaagaaagagaaatagaataatgagaatcatatggatttacacaaacctctaatgattagaaactaaaaacgagatctcgaagtaattcgaacgatttcgattatcatttatttgtacttattagttacttctacccgatagagcttagaagttggaagtaataatttcttggttgattgtatccttaaccatttctttttttttgacacgaggaactcatcatgaatccactaattgctgctgcttccgttattgctgctggattggccgtagggcttgcttctattgggcccggagttggtcaaggtactgctgcaggacaagctgtagaaggtattgcgagacagccagaagcagaaggtaaaataagaggtactttattgcttagtctagcttttatggaagctttaacaatttatggactggttgtggcactagcgcttttatttgcgaacccttttgtttaatcctaaaaaagaaaatgagtcctttagattagatacttttttctttttttagtacattggcatttgcttatgtaattctaagtatatcaatactttactttactcctatttattatattatttcttttttatattattccggaaattttgtatttatcgggacagacaataccctaggaaccccaagaagggctgatttgagcatgatcaatttagaggatatgctcgccctcttccttcccgtccttagtttaggacagtggaaagtatttttccttttattttaggaattttgggaacatttcaacaaaggag

SEQ ID NO: 139222 - DNA, 3830 bp, Zea Mays
agaacagccgagcgtgttctctgagggctcttttggcatctaatcacttaagagtgatggaagttcttgctcattttttaactaaaaagatcatcatctagtctaatagttttgcataatggggattggggaacaaataaaacctggtataaatcaggggtgtgtaagactaatagatacttgactcttgagcccatgtaaccgatattgattcatctttatttctttgctgtagatttcaaggtgctggtgaatctggcttggccacatagatcttttttattgttgtcctcagaagacaggtttgctgagactgctttctgtctactgtaaattgatgaaattttggtgatcatatactatggaaaaaaagacagttcacgttctggctgagggtaatggtgagattgaaaatggtacgagctctagtcagaatcctgagacccttgagcatccagttttgctgtctgcatctcaaactgtgccaaataacttggggataaggaaaaactataaaagggcagcaaacagaggtaaaaagggttcccaaggactaacaggtcaggcatatactttgaggtcatctgatattgatgtcagggtgcttcgctctacatcaggttcaaagacaacatctactgagcatgtgcagcctccaggacaaccagctgccaagagaagaaaaaggagcagagcctcaaacaaaaattcgacagatgagttctcacaaattcgtaaacgggttagatacattttgaaccgaatgaattatgagcaaagcctaattgaagcttatgctagtgaaggctggaaaaatcaaagtttggataagataagacctgagaaggagcttgaacgagccaaatcagaaatcttacgatgcaaattgagaatacgggaagtcttccaaaatattgattctcttctatccaaggggaaaattgacgaatctttatttgattctgaaggagaaatatcttgtgaagatatcttttgtgctacttgtggttcgaaaaatgctacattgggtaatgatatcattctctgtgatggagcttgtgacagagggttccaccagaactgtctaaatcctcctctgcgtactgaagatattcccatgggagatgaaggatggctctgcccagcatgtgattgcaagttagactgtatagatctaataaatgaactccagggcagtgacatctccattgaggacccttgggagaaagtttttccagaggcagctgctatgaccaatggctctaagcaagatgaagcatttgatcttccatctgatgattcggatgacaatgattttgaccccaatatgcctgaagagcatgtggctagtaaggaagaaggatcttctgaagaggaagaggatgatgacggaggatcagactctgacgactctgacttcttaacctgttctgatgatttggaacctttgatagataaaaagaaggttgatgacctgggattaccttctgaagattcagaggatgatgactatgatccagcaggtcctgattcggataaagatgtcgaaaagaagtcaaattctgatgagtctgatttcacgtctgactcggatgatttttgtaaggagattaaaaaatctggtggacatgatgaagtttcatcgcctccattacccgatgtcagggtgggtgatatggaaaagaacactgctcagtctaacacaacaagttctgctgacgaccctatggagattgaaatagaccagagtgtggttttaccagcttccacttctcctcctcccgctcccgtttccgctcccgtcacccttgctgcaccagcttccactgcccctcctcccgctcccgttttcgctcctcttatcccacctgctcgcttccgggagcgcgatgagactgaggtgcgacctctagctgcagatcctaggttgtttgaccttcagcgtgctacagcagcacgggtacgtcggttcagatatgtacccgtggagtcttggttaccggctcagagggaccctgctgcagttgacctctttagcacccgtattcaggagtcctttttcagagcccagatgtctgcacagattgctctgcgagtgcaccggcttttggaccttcccgcttttctgctagccgccggtgctgactctgaggtgcacctctcttatctgcctggccttcttactcttttgactactagcggcaggtatgttgaggaatgggtccgagttttctacgcgactgtatggatcgaccctaatcaccactggatgaggtttcgttttgagcgagaggatgtcactatttatgccagccagattcgccagctatttggatttcacgagtcatcgactcgtcttcacagcttatgctatggcacctctgaccctcctcgtcgccctcacggcggtgttgctccgggtacagcttacgtcgcggctctgttccgaccgcccttctcagatgggtcgcgacgctcaccggcagatttcaccacaacagcaaagtttctctatcagcttatgagacggacacttctgccgcggatagggtccagggaggccaccactcatatccagctctggctccaagaagccaagatatctcactcagagttcgatgttgtggatttccttatttgtgagatcgaggacaccattctggatggtctgcgtgcacgacgacagctgccatatgctcactatctatgtcacatttttgctcagctgattcgacctccacagttccagggcacacttgaggtctcacgcctcgtctttgggtcctaccgtccagcgcctgaggatcctgtgccagcacctgctccagtatttgacactcaggccgaggatactgcccttcatcagttcgaagctcaggacacagcagttgataataatgattttgggattccgcctcctatgcctccacgctcacatgatcatgaggttgagagttctcgtgctacccctgctgcccctcctgccattgaccctgcttttgcttcgattctccagacacttactcagcaacaggctcacttggcagccgagcagacccgccaggcagcagcccatcagcagttgaccgagagaatgctctcgatgtttcagacaatacaggacaagcatgattctcttatgcagcagcttcttcaggatcgggctgagagaagggcattaatgactcttatgctacatcattctggtatattgattcccccggttcagtcagtcctgcctccacctcttcaggctcctgttgtgccaacgattcagccaggaccctctcttcctacagttggtccttcttcctctccgctccggtcggttaccctggctttcacgtcaccggtttttagctctgtctgccctcagccgtcagtgccaccagcttctgctgttcccactactgctatggcggtgtctgtgaccacttcagatccggcagcccctgcagcgcagcctcagtccgagtcagtatcagctctagcttctacagcagatcctggatccgagactgactctgaccctcagctagcgttcgctctactgcctcgaccgcgaccggatgtgcccccgccgcctcctccaacttctgatgcgtaggctcgggtacccttttggtgtttgacgccaaagggggagagatatgagttgtgagagctagggggagttagttagttagtagagagttattttgatgtaatatatgtgcttgcaattctctgtactagtttggtgcttttggctcacaaactctatatatactctcgatgcttatgttgactgtgtgtgtatattatgttttcaccttatatattatcaccag

SEQ ID NO: 139223 - DNA, 273 bp, Zea Mays
gacaattttatcgaaaccaaacaggccgtaggcgagtttggttggcctcagaatggcgtcaccaagctcctgtaaaaatttcatattttttggacacccgaacgaaaagttatgcccggtttaaggatggtacctcaagttatgtttttgggaggcacgactagaaagcggcggttagggcaaaacttccctatctgcaattacagcggttagggcaagtcgattaatggggtggatcgacttgtgatctgggtaatggtggatgggatagcg

SEQ ID NO: 139224 - DNA, 426 bp, Zea Mays
atggccacggaggagctccaagaaggcgacgagctatgcccggactactaccatagctcagacgacggccgcggccagcggcggctgcaaccgcaccgctggtccggtaggaagccctgctgcctccgcacggacgacgaaaacgctgcatgtaaagtccgccgacccggctcgttgtcggcgcccgtggccatcgtcgtccctgtaaccgcagtggcgacgacgacggaggacgacgacgatgaggcggcatttgtgccgccgcacgtagccctggaggcgaggcggcggcggtcggaggggagggtggcctcgtccatgtgcgaggggctcggtcgcacgctcaagggccgggacctccagttcgtgcgcacggccgtgctccgcatgactggattcatcgagtcctgtccagatgaagactga

SEQ ID NO: 139225 - DNA, 2908 bp, Zea Mays
aatcgtcccgcagaagtagaacgactccagagagcctctcgaaccttccaaattccgttgaaatcttccccgagccctaagattctctcgccggattcgcctgatccgacccgacacgcgatctctcggctcgccgcaatggccgacaaggagaagccggaggctgaggaggaggagtacgagagcgacctcgacgacgcgcccctctccgcgttgtggcgccgcgacgctgcgagcgacgacgagggcgaggacgaggatgaggacggagggacgcccttgaggcggaggaaagccggattcgatgcagattccgacgggcagggcgccgccgaggtttacgacgaggaaggcgaggaggagtacggggggttcgaagcagaggacggcggagtgcgcggggtggctgccgaagcggttgccggtgcggggcaggaggggggcgaggctggggatggggaagttgaaaaggcgggtgaggcagcgccacaggatgaagaggaggacaagaaggggaacgagccctacgctgttccgacgaccggcgccttctacatgcacgacgaccgcttccaggagggccggggccgtggacgtggccgtgggcgccaaaggagaatggtgaacagtagaaggttgtggagtcctaaagacgagcaagcctgggtccatgacagatttgatgagatggatctgcgtgattttcatggtgacaatccaaaaagaaagcagggaggtggttttagaggacgtgatggtggacaaggtggtagaactcgtggcattagccgtggtaacttcagaggcaacagagctagaacatactatcatgatggcagcaagaactacagctatgttccaaaggaatctcatgcataccatgataacaccaagaatgcccgtcattcttcatactctaatgggaaaaatagagttccaaaaccatctcgtgatcactatgatgatgttaaaggttatgacactgtcccaaatgaatctcgcacttactatggtgatgctaagggtcaaaagaatgcaccaagagtagttcaaggaagaggctccaagcattaccaaccacgcttgaaaaatatcactgatgtatcttcagtgcaaaataccaaatctctgactcttgaagacacttcgtcaaatgcaaacttgggaaaagaccgaactcaaggatcaaattcgcgacttgaacaagtccttcctactaagcaggctgttgcatcaaacttgaattcagcttcaccaccattttatcctgcaaggtcatccaatcaagagttcccagttgttcaaggagggaatgcacaacttagtaataacctactgagagggaaggcctttgtaccatcagttggacatgttgaagctgcattgaatggcatgaataaaccttcactgcttccagcatcatcatcatcaaatggtccatttcctttagccactgatcaagtcaatagagactatgggcagcctgcacatccaattgttcaacaaaactcagttcaatcccctacacaatctgcacccaggatgcctgcccagatgtttggtgcaaaattcagcaatagcagtaaaatatcaccagcacaacctacaactattctgggtgatgacactgaaatttcttcacctagtggatcaaacaaatatgattctcggttaacaattaaggggcaacctgatgaccaaggaacagagcattcttcgtttctccgtggtggggctcatgttcttggggctacaggtgcaatgggcattaaacttggtgatcaaaatttccatggtaccccagcattgctgccagttatgcagtttggaggtccgcgaccagttgggcgcggtgttccttcaatcggtatggctctgccaggatttgtgtctcaacaacaacttggtctcaataataattctgagatgacctggctaccaatattgactggtgcctctggagctctaggagcaccttatggttccccttatatagccatggatggaagttattactctcgacaatctgaacaagcatcttcatcagtttctattagagaacctagtgcaaataatgcttcttctctgttgaagtcccaagaaataacagaggttgcaagtgatgaaataactcaacgccaaaataagcctcgtcgatactcggagatgaactttggccaatgaacatagctgtgaccagtgaggattcattggagcttaggacccaagtaagacctgtgcaagagacccaagccttactaagtccttgcaacatctcactgtctgatgtctagcactttcggctatcttgtaactcccaaaatgccaggcttgacagttgaaggtgttgcaaccatatcagtatgatcatttgctgtgattattctgaagggctagtgttgttacactatgaggtgagatttacatggtactccacttcaccgcaatatcagacgtcgtatcagcatactgcatatgggggaggtcttgatggaaatcgtgagaggtctccgtgctgtaaagctcgtgttccatcgtacatcagtctgtgtacttttgggtgtgcgcttgctttgcttctgtgcctctgccttcagctcggtggcactcggctgacatgcatccgttatatttacttgttatatctgatccgatgtattgaagatggttagtagagcatgatttacggtggtgaatcttgctttggtcgtgttgacaaatcagggccttgcacgtaaaagaaccggtgcatccgagacgccagtgcacacagctcatggcgctgccgcaaaagccttgtctatttgcagagtgatgtgtgtaccgtgggcattacaaaataattgcagcctcctttggacggcggtaatattaagtttagcctgctttttttcgaacgttacccgat

SEQ ID NO: 139226 - DNA, 664 bp, Zea Mays
aaaaaatacaggatcggttgtgtacaatattatgtgtctgcgttccagtaagaaaatggaactatagtttgatgatattggcaccaacaagtgcagttccacagtttacaattagtatctccagaaagccacataactcagacaattccatcccttccaaagacttgatacaaggtgcgattttcaggaaaatcataggatgctatcatcctgatgtaatcaaactaaccaccatgcaaagtggagatgaaaaccacaacatccttctcttccaactctgcatcaagaccaccacacagctcccaatcgcagtcatttataaggacaagaaccccaggcctcctgcatgcatgaagcgaaaaaaaaaataaaaaccaaatcatctggctgaacctgaactcagaaaaagaagaaacttttttttttctgaaatctctatctcgctgcattttgagatataccaaatgcctacccaagtgccgcagctcctagtcctctgcctgcagcactgtgctgtcaatggccatcaaaattcctttgtgctggcttgttcctttgtaccaatctgttgccatctactatgctaatggcgagaagtctgaatgaacagatgcatattgcttgcttgggattgagcctgggctcccaattgataactggctat

SEQ ID NO: 139227 - DNA, 1861 bp, Zea Mays
cggttctaccgtcaacgcgccgcggattccccgccctcctccccgtctgctccccgccatcaacgcgcacgcgacctctgctctccgccatcaacgctcactgcatgcctcaccctctccccgccatcaacgcgccgcagatcccccaccctctccccgccatcaacgcgcaagcggatgccacggatccgcctatccgccataaacgccgatccatagatccacgctcgccctgcctcctacgacaccaaccgaaccctcaacctctcctacgacaccttctccagcccgctccccgacgacatcgagcgcctggctttcacagcggcgggacatggaggatgaacgagcaccgggagagagtcggttagatctaaatttccgtggaggtgagcttggacgaggtcaggttcaaacaggcatatctctgaacaccttgggttctctaggctatgagatagatcatggatcgagatggagaatagcagtgtgtcattctaaactgggtgatcagccgaaaagatcccatggataatcattaatgattatgtgcttgatcaaacgagaggtactgtcatatccagccaggttgtttctaatttaacagagggagggaaccaacaaaggcactccatgggggaatggttgtggccaggtttgttaatggtgttgcggctgcaagcgtcgtgtggcatctgtcgcgaccaagcattacgagacagtctcctccagcgctttgcactgctcctatcaaggtcactcttattggcagtctagaaatgccaaaggatgacatatggcttgtcacagctatcctatctggtctcattgaataatgtgcgaagatataagtcacatctttcttggcctcctatcttcgcctccagctgggatgagtctgtctcattacgatggggtgatcttgggctttctgtttcacatatcttcaggcctgtgcctggatgctgtaccatgcttggtcctatgaatattgaagtaaagcaacggaaagttgtagctgttggtaggaaacggactgcacggccaacagaaaatacctgtcctgaagagcttgctgagtcttcagaggaagtaaagacagacactgacaggaatgtcttagttatgtttgatatcctcaggcgaaagaagagcgcaaaattggaaaaccttgtgttgaataggctttcatttgcccaaacagttgaaaatgtttttgcactatctttcttagtgaaagatggtagggtggaaataactgtagatgatagcgggcatataggccaaggaatgcacctgctgctagcgctatagcctcaggagaagtctcatacagtcattttgtttttagatttgacttgaaggactggaagcttatgaaagaagttgttacagagggagaagagctgttgccacataggacttcccagagcaatctttgcaacgaagaaaacgaccaaccaaatctggagttgtggcaacggaagttccaggccccgttgcagctgggagtggttttatactcgctgatgacatcaagtcttaggtgcttccattgatcaatgactcagggaaatatggagggatcatgatgtggttcaagtactatgatgatcaagatggctacaattcttgagtgaagagtgatgtttaggttgttgtctgtggtgtgtgacaatatctgtgtgttacttgtgtgtatgtgagaaattatgtgactctggagtctggatagtgcaataagtattactcaagtatatgattgaatcttatgtcatactattcaaattatgtcatatgtatcttttaaggtatgtaaacatccacttttagcgatgttaacaaaagaatagaacaataa

SEQ ID NO: 139228 - DNA, 1893 bp, Zea Mays
cggttctaccgtcaacgcgccgcggattccccgccctcctccccgtctgctccccgccatcaacgcgcacgcgacctctgctctccgccatcaacgctcactgcatgcctcaccctctccccgccatcaacgcgccgcagatcccccaccctctccccgccatcaacgcgcaagcggatgccacggatccgcctatccgccataaacgccgatccatagatccacgctcgccctgcctcctacgacaccaaccgaaccctcaacctctcctacgacaccttctccagcccgctccccgacgacatcgagcgcctggctttcacagcggcgggacatggaggatgaacgagcaccgggagagagtcggttagatctaaatttccgtggaggtgagcttggacgaggtcaggtatgtcgcctccttctcttcctccaccgacttctacacgctccaggcttgcgctggtgttgccagccattccttgtgctcgacctcgcgtctgcgttggactccgcccctctgccaccgtctccagcgccgacgttgaagagacaacgaaggcgtccacactagcccatgcccccgcctgcctccgtccccgcgacacccagcccccaaacctcgcccgctccccgcgtgatggccgcccatcccgccgtgcccaccccctacccccaccaaccgccggagcctacctcgcctagccacttaagcggggaatccacccgtcggcgccgagagcgaggagcctggatccaggagcgggcaggccgagtgggcgggagggggcgaggacctgcacctctgcatcgacgacagccaggcaaggtggcacgcgccgcccgagcatgctcaccctgcagttcccgtggggtacccgctgctcgcacgcctgtcggtgcgtgggctcaacctcagggccgtcaacaacgccatggttgccatgctcgaggtcatccacctccactccgtcttcctcaccgacgcctcgctgcgccggatggtcgccgtctgcccctgcctccagaaccttgacctccgctactgctgtcgcctggttgcgtcaacttcaccaatgtcggggtgcgcagcctcacgagcttcaccgtcgtcgactacatccacaccaccgagctgtgggtcctggtaccggtcacgccctgcctctgctccttccgcttcagcgagtggcaggctatcacttcactcgatatcaatacgctcgatcagtagatgtagcgaacaatctaatgaagaaatagtatacgatgataaatcatgggctagggcgtgaccggtaccagaggcatctctgtgaaatcgagcggaaggtggtggtgctgaatgactccttgatggccaaatttcgtgatagtttatgggtagtatgtgcacgggcttgagcctttactttatttgagtgaagtgcatgagaagggagttcatgatctgtggagagcgccgacggatgagatttgcctgccactaatggtatcactgtgccaactgaattatttgcgtttgccacgccatgcttgatggctttgcctgctgatcttaagactaaggtattgcattttttacctggggttgatcttgcaaaggttgagtgcacgtgcaaggaaatgaggaatcttgcattagatgatagtatttggaagaagcttgtattcaagtataaaaattatggtaagggctgtagggggcgagcaagagtgcgaaggccatatttggagaagcttggcaggccaataagagatggcagaagaggcctaatccaaccttttggtacaatggctggggaaacaattcttttagccgtccacttaggctgccattgatggtgggaacttagacagacttccttttattggaaatcatggttctgtagg

SEQ ID NO: 139229 - DNA, 2431 bp, Zea Mays
atccaatattttaccaaatactccctgcccagcgccaccgccacggcagcaaatgtggcagcccggtcccgccgccgccttcacggccgcgtccctccacgagcatgttctccgcctccattgcggcggcagcctcctcctccgccgtgcccacgccgcctcccttgtctccggcgccctcaccgcctccttcccgcttgcaggcgcgctgcttctctcatatgccgcgctaccggacatcccgtcggcgcacctcatcctccgccaccacccgttccgcctccgctccgccttcctctggaactcgctctcccgcgcgctcgcctctgctgccctcccctgcgaggccctgcgggtgtacaaccgcatggtccgctccggcgtgcgcccggatgaccgcaccttccccttcgccctgcacgccgccgccgccgttgcccaggcggagcaccctgccaagggcgccgagctacacgccgccgctcttcgacggggcctcctcctcgcggacgtctttgctggcaacacgctcgtcacgttttacgcggtatgtggccgcgcggccgacgcgcgcagggtgttcgacgagatgcctgcgcgggacgtcgtctcgtggaactcacttgtgtctgcattgctgacgaatgggatgctggaggatgcaaaacgcgcagtggtggggatgatgaggagcggggtcccggtgaatgtcgcgagtttggtgtcaatcttgcctgcctgtggtacggagcgtgatgaggggtttgggttgtgtgtccatggtttggtgttgaaatttggactcaactctgtggtgaacctcggcaatgcattggtggatatgtatgggaaatttggagacttggagtcatcaatgcatgtgtttaatggaatgcaagagaagaatgaggtttcttggaattctgcaataggttgctttgctcatgcagggtttcatgaagatgtgctggaaatgtttaggttaatgtcagaacatgatgtcacaccaggatctgttaccctatcaagtttgctgcctgctttggttgatcttggttattttcatttggggaaggagcttcatggatatagtataaggagagcagtggaatctgatattttcattgctaacacactaatggatatgtatgctaagtttggttgttcggagaaagcatctgctatctttgaaaatatcgaggtacgaaatgtggtctcatggaatgcaatgattgcaaatcttacacaaaatggagctgaggctgaggctttcaggcttgtcatcgagatgcagaagaatggggaatgcccaaattcgttcacccttgtgaatctgcttccagcctgttcaagggtggcctctgtaaagatggggaagcagatccatgcatggtcaatacgcagaagcttgatgtctgatctgtttgtatcgaatgctctgattgatgtatatgccaagtgtgggcaactgaatttggcacgatatatctttgacaggtcagagaaggatggtgtgtcatacaacactttgatcgtgggttactcgcagagtcaatgctgttttgaatctcttcatctctttcagcagatgagattggctggaattgagcatgatgctgtttccttcatgggttgtctctcagcatgttctaatctttctgcctttaagcaaggcaaagaaatccatggtgttttagtgaagagattgttagattctcacccttttctagctaattcgttgctagatgtgtacactaaaggtggaatgcttgatacagcttcaaagatcttcaataggattacgcagaaggatgttgcttcatggaacactatgatcttgggatatgggatgcatggtcaaattgatgttgcatttgaattatttgatttaatgaaggatgatggcatcgaatatgatcatgtatcttatattgcagtattgtcagtatgtagccatggtgggcttgtagacagaggaaagaagtacttcagtcaaatgatcgctcaaaatattaagcctcagcagatgcactatgcttgtatggtagatcttcttgggcgtgctggacaactgagtgaatctgctgaaataatcagaaacatgccttttcgtgctaattctgatgtttggggagcattgcttggctcttgccgtatacatggagacattgaactagcacgactggcagcagagcatttgtttgagttgaagcctgagaactcaggctactatactctgcttagaaacatgtattctgagtctgggatgtggaatgaagcaaatggggtcaagaaattaatgaaatcaaggaaggtgcagaaaaatccagcctatagctgggtgcagagcggcaacaagctacaagcttttcttgttggggatgaatagtgatttttggatgatttggcattaaatggaagtgccgcagat

SEQ ID NO: 139230 - DNA, 2138 bp, Zea Mays
caactagccaaggtccaagtgaccatcacgtttcagtttcattctctgggtaggggagctgctgcagccgtgtgtatggcgtcctcttcctcctccctgacgcggttatttatcccgcctcaccgagcgcaccatgaggcagccatggccgcttcggccggcgcctctctgcgtaacggcggcgggatgcagatgctggatcttgtgatgcagaggtgggccgagatggtgttgtgctgcggcgcggattggaattgcgtgtcgcagctgtggaacagggtggtgctgcgcaagtggctaaacatcggcgcggggtccggggattccgacttcagcgccgacgagcacgatacctcggagggcgagaccgaccgcgaaggcatgtctggtttgaatcatgccctatgtaacgaagaaaggatattaggtggattgggtgcaagcacgactggtgacgaaatgagcgatttaccttactgccttagaatgcacagatcagagatcagtcgtgctcagtatgttgatgttagagaactcaggatttatgtagggacatggaatgttggaggcagatttccacccagtgacttggacattgaagaatggctggctacggaggagccagctgaaatttatgttatcggctttcaagagattgttccactcaatgctgggaatatatttggtgctgaagacaatcgtccagttgcagtatgggagcacatcatccgtgaaactttgaataagaattgttcagataaatcagggtttaagtgccatagtgatcctctttcaccatcaaggtttaatccatcagatgttgttctttccatggaacatggattgcttagtgagtctgacaaggatagtgatggggagcttcatccattgattgaacgagaccataattgtggacttcaagctaaaacaaatgaaaatcttgaagctttcccagaagataatttagcctgtgatgccatcattgataatagaacaaaaaggaaaaggccagagtttgtacgtataataagcaagcaaatggtcgggatatttctttcgatttgggttcggagaagcctgcggaagcacattaagaatttgagagtatcaacagttggtgtaggcgcaataggttatattggtaacaagggatcaatatcggtcagcatgtctgtacatgagactcctttctgctttgtttgttgccacctgactgctggtgaaaaagatggagatgacctaaaaaggaattcaaatgccgaagaaatacttcgaagaacagtgtttaacccagagaatgttgtaggcatgcctatgagaatatatgaccataagcggattatatggttaggagacctcaactatcggatcaacttatcctatgaaagggcacatgaactaatctccaaacaggactgggatggattgttcgagagggatcagctgaaaagagaattgaggaaaggatgcacatttgacggttggttcgaaggagttatcagctttgccccaacatacaaatatgagtttgactcagaaaactatgtaagcgatgagagtgaatctgggagaagaactcctgcatggtgtgaccgcattctctcatacgggaagggaatcaggctactttcgtacaagaggggggagcttacactttctgatcaccgccctgtggctgcagtctacgtggcagagattgaagttttccactgatgcagagagcaggaccatctatcatcagagaaggatggatggactggttgaacaaagaggtcgccgaaccacgagatatgcaatttcctagcacaagttccaagtgaggtggtgccatgccaatgacagtttttagaattcagtcagacattgttgatttgcattattgtatcatccttcacaagcagcatatttgccatggattattttttctgcacgcttgtttgatgaagagcatctcaagcactatgctccatgacatagtatcctttgaaaaaaatgtcaaatttgttcatataatgttcttttcttgttttgaactaggaagggatggttcaacatgcttcgtgtgtcgtgcttgccaaataaccatgtttgcacgataatatgattgtctgctgctcaaaccaagacaccatccaaaa

SEQ ID NO: 139231 - DNA, 1787 bp, Zea Mays
tggcgggccactgcagctgtctcgctcatcctttctccgtcctccttcgtccccggccattgctccgagctcgccaagaccgccaggaggcatccgtagcataggcccatccagcctatcccagcagcttccccacgggcgccgcgcatggccaaccgtgaagagagtcaaatgcagcaggcagcacacgtaccatgcaggcttagaaggcagaaatcggagatccttcgtgctcagtatgttgacgttagagaactcagggtctgcgcaggaacatggaacgttggaggcatatgtccacccaatgacttggatattgaagaatggctggatatagatgatgaaccagctgatatttatgttctcggatttcaagagattatcccactggaagtcgggtatatgattggaactgaagacactcgtccggtcgcagtatgggagcatatcatccacgaaactttgaacaagaagtgtccggataaatcgaagtccaaacgccacagtgactctcccccgccagcaaggtttaatccattagactatgttcttgccgtggagaatgagttgcataacgaatccaacagtgatagcgatggggagcttcatcggctgcacaatgcagaatcatccgattcagctcgacgccgtctccggccattggatttagcctgtggcgttcacaattataatggggataaaaggaaaaggctgcagtatgtacgggtaataagcaagcaaatggtaggagtgtttctttcggtatgggtccagagaagcctgcagaagcacatccagaatctgagagtgtcaactgtcggtgtaggtacaaggggttttattggtaacaagggatcagtatcagtcagcatgactatgcatgaaactcatttctgctttgtatgttgccacctggcctctggtgagaaaaacggcgacgaactaaagagaaatgcaaatgttgaagaaatcaatagaaggactgtttttaacccagttcatacgataggtgtgccccagagaatacatgaccatgaaaggattacactgctaggggatctcaactatcgactcaatttatcgtatgagactacgcatgaacttatctccaaacaggactgggatggattgtttaagatggatcagctgaaaaaggaactaggtaaagggtgcacatttgatggttgggttgaagggcctatcaccttccccccaacgtataaatacgagtttaactcagaaaaatatgtaagtgacgcgacgaaatctgggagaagaacacccgcatggtgtgaccgcatcctctcgtatggggaggggacaaggctactttcatacaacagggcggagcttatattatctgatcatcgaccggtgactgcagtttatatggcagatgttgaaattgtctgccccaggaggctgcaaagagctctaacattcagcaacgcagaggctgaggatcacctgttgtctaggaaggaagcacaccttgaacctaagaccaattaaccatgagccaggcaatttcctagctcgacgcaatgcaatgctgatccttgatttctgaatctgttagaaagattcaattgcacagcatagattagtagtagtagtaggatgtgcatttccatccttgcaacaaccttatttgatcaagggtatagtatttgtgagttgtgagaccatgattacagactccttttgagtcattgtatctgtatccttgccattaccgtattacgatgccattggtttgagtaaacaatcattaaattctttgaaga

SEQ ID NO: 139232 - DNA, 1410 bp, Zea Mays
gtccgactcgactgctctcttcctctctgttgcatttcccgtcctgtccttccacccggcggcttaaaccctagttctcactcccatcgccgcttcagctccgccgctgcagatggagttctggggtctcgaggtcaagcctggttccactgttaagtgtgagcctggatatggctttgtgctgcacctttcccaggctgctcttggggaatcgaagaagagtgataatgccttgatgtatgtcaaaattgatgatcagaaacttgccattggaaccctctctgttgacaagaacccacacatacaatttgatctgattttcgataaagagtttgagctgtcgcacacatcaaaaactaccagcgttttcttcactggctacaaggttgagcagccattcgaggaagatgaaatggatcttgattctgaagatgaagacgaggagctgaatgttccagtagtcaaggaaaatggcaaagctgatgagaagaaacagaaaagtcaagaaaaggcagttgctgcaccttcaaaatcaagtccggattccaagaagagcaaggatgacgacgattctgatgaggacgagactgatgattctgatgaggatgagacggacgattctgatgagggtttgtctcctgaagaaggcgatgatgattcaagtgatgaagatgataccagtgacgatgaggaggaagacactccaactcctaagaagcctgaggtaggcaagaagagagctgctgaaagttccgtgctgaaaactcctctatctgataagaaagcaaaggttgccacaccgtcatctcagaagacaggtggcaagaagggcgccgccgtccatgtggcaactccacacccagcaaaaggcaagaccattgtaaacaatgacaaatcggtcaagtctccaaaatctgcgccaaaatctggtgtcccttgcaaatcgtgcagcaagtcattcatcagtgagacggcacttcaggctcactcgaaggcgaagcatgggggcaagtgagtcgcaggtccaatagagtcaacaacaaatgcgaaacatgggagaggagggtaagcgagagtctcgaaagagtgtcggtggaagtaggcctaaccttattttgtttagagacgggctatgcgttcgatgtagcaaaacaaggctgtggtttgtgtacttcaatatttgggttgtgtgtttcgaatttttttttgaacgtgtctcggattgttgtggtgcgaattggttgtttctgtcgctatggtgagatagtgtcacgtttctttctctatttgaaagacctgtcgcattctatttcttgggaactgccagtgcttgccttgttgatttttctgcgttcgaggtagcctatgaatgtgatgatggaccaaacaaaggaaaacaccgggatctaa

SEQ ID NO: 139233 - DNA, 1406 bp, Zea Mays
gtccgactcgactgctctcttcctctctgttgcatttcccgtcctgtccttccacccggcggcttaaaccctagttctcactcccatcgccgcttcagctccgccgctgcagatggagttctggggtctcgaggtcaagcctggttccactgttaagtgtgagcctggatatggctttgtgctgcacctttcccaggctgctcttggggaatcgaagaagagtgataatgccttgatgtatgtcaaaattgatgatcagaaacttgccattggaaccctctctgttgacaagaacccacacatacaatttgatctgattttcgataaagagtttgagctgtcgcacacatcaaaaactaccagcgttttcttcactggctacaaggttgagcagccattcgaggaagatgaaatggatcttgattctgaagatgaagacgaggagctgaatgttccagtagtcaaggaaaatggcaaagctgatgagaagaaacagaaaagtcaagaaaaggcagttgctgcaccttcaaaatcaagtccggattccaagaagagcaaggatgacgacgattctgatgaggacgagactgatgattctgatgaggatgagacggacgattctgatgagggtttgtctcctgaagaaggcgatgatgattcaagtgatgaagatgataccagtgacgatgaggaggaagacactccaactcctaagaagcctgaggtaggcaagaagagagctgctgaaagttccgtgctgaaaactcctctatctgataagaaagcaaaggttgccacaccgtcatctcagaagacaggtggcaagaagggcgccgccgtccatgtggcaactccacacccagcaaaaggcaagaccattgtaaacaatgacaaatcggtcaagtctccaaaatctgcgccaaaatctggtgtcccttgcaaatcgtgcagcaagtaaggttttatttggttagcctttctggttattcggtgagaagtcaatgtatcgatccttactctctgttatttgttctgcccaggtcattcatcagtgagacggcacttcaggctcactcgaaggcgaagcatgggggcaagtgagtcgcaggtccaatagagtcaacaacaaatgcgaaacatgggagaggagggtaagcgagagtctcgaaagagtgtcggtggaagtaggcctaaccttattttgtttagagacgggctatgcgttcgatgtagcaaaacaaggctgtggtttgtgtacttcaatatttgggttgtgtgtttcgaatttttttttgaacgtgtctcggattgttgtggtgcgaattggttgtttctgtcgctatggtgagatagtgtcacgtttctttctctatttgaaagacctgtcgcattctatttcttgggaa

SEQ ID NO: 139234 - DNA, 1299 bp, Zea Mays
gtccgactcgactgctctcttcctctctgttgcatttcccgtcctgtccttccacccggcggcttaaaccctagttctcactcccatcgccgcttcagctccgccggtctcgaggtcaagcctggttccactgttaagtgtgagcctggatatggctttgtgctgcacctttcccaggctgctcttggggaatcgaagaagagtgataatgccttgatgtatgtcaaaattgatgatcagaaacttgccattggaaccctctctgttgacaagaacccacacatacaatttgatctgattttcgataaagagtttgagctgtcgcacacatcaaaaactaccagcgttttcttcactggctacaaggttgagcagccattcgaggaagatgaaatggatcttgattctgaagatgaagacgaggagctgaatgttccagtagtcaaggaaaatggcaaagctgatgagaagaaacagaaaagtcaagaaaaggcagttgctgcaccttcaaaatcaagtccggattccaagaagagcaaggatgacgacgattctgatgaggacgagactgatgattctgatgaggatgagacggacgattctgatgagggtttgtctcctgaagaaggcgatgatgattcaagtgatgaagatgataccagtgacgatgaggaggaagacactccaactcctaagaagcctgaggtaggcaagaagagagctgctgaaagttccgtgctgaaaactcctctatctgataagaaagcaaaggttgccacaccgtcatctcagaagacaggtggcaagaagggcgccgccgtccatgtggcaactccacacccagcaaaaggcaagaccattgtaaacaatgacaaatcggtcaagtctccaaaatctgcgccaaaatctggtgtcccttgcaaatcgtgcagcaagtcattcatcagtgagacggcacttcaggctcactcgaaggcgaagcatgggggcaagtgagtcgcaggtccaatagagtcaacaacaaatgcgaaacatgggagaggagggtaagcgagagtctcgaaagagtgtcggtggaagtaggcctaaccttattttgtttagagacgggctatgcgttcgatgtagcaaaacaaggctgtggtttgtgtacttcaatatttgggttgtgtgtttcgaatttttttttgaacgtgtctcggattgttgtggtgcgaattggttgtttctgtcgctatggtgagatagtgtcacgtttctttctctatttgaaagacctgtcgcattctatttcttggg

SEQ ID NO: 139235 - DNA, 1299 bp, Zea Mays
gtccgactcgactgctctcttcctctctgttgcatttcccgtcctgtccttccacccggcggcttaaaccctagttctcactcccatcgccgcttcagctccgccgctgtcgaggtcaagcctggttccactgttaagtgtgagcctggatatggctttgtgctgcacctttcccaggctgctcttggggaatcgaagaagagtgataatgccttgatgtatgtcaaaattgatgatcagaaacttgccattggaaccctctctgttgacaagaacccacacatacaatttgatctgattttcgataaagagtttgagctgtcgcacacatcaaaaactaccagcgttttcttcactggctacaaggttgagcagccattcgaggaagatgaaatggatcttgattctgaagatgaagacgaggagctgaatgttccagtagtcaaggaaaatggcaaagctgatgagaagaaacagaaaagtcaagaaaaggcagttgctgcaccttcaaaatcaagtccggattccaagaagagcaaggatgacgacgattctgatgaggacgagactgatgattctgatgaggatgagacggacgattctgatgagggtttgtctcctgaagaaggcgatgatgattcaagtgatgaagatgataccagtgacgatgaggaggaagacactccaactcctaagaagcctgaggtaggcaagaagagagctgctgaaagttccgtgctgaaaactcctctatctgataagaaagcaaaggttgccacaccgtcatctcagaagacaggtggcaagaagggcgccgccgtccatgtggcaactccacacccagcaaaaggcaagaccattgtaaacaatgacaaatcggtcaagtctccaaaatctgcgccaaaatctggtgtcccttgcaaatcgtgcagcaagtcattcatcagtgagacggcacttcaggctcactcgaaggcgaagcatgggggcaagtgagtcgcaggtccaatagagtcaacaacaaatgcgaaacatgggagaggagggtaagcgagagtctcgaaagagtgtcggtggaagtaggcctaaccttattttgtttagagacgggctatgcgttcgatgtagcaaaacaaggctgtggtttgtgtacttcaatatttgggttgtgtgtttcgaatttttttttgaacgtgtctcggattgttgtggtgcgaattggttgtttctgtcgctatggtgagatagtgtcacgtttctttctctatttgaaagacctgtcgcattctatttcttggg

SEQ ID NO: 139236 - DNA, 460 bp, Zea Mays
gtccgactcgactgctctcttcctctctgttgcatttcccgtcctgtccttccacccggcggcttaaaccctagttctcactcccatcgccgcttcagctccgccgctgcagatggagttctggggttacctccctttctctctctctctcgcaaactcaatttgccgcgatacctgctctgtgttcgttttgttgcgattcctttgtttgaatttttttggtggtttagccttttattagtgccctcgcaatcaagggccgggtttgattcgctactattatacttatattcgaatgtttttaggtccatgcgaatcatgggtagtgttttgattcgctactactcgctactgacatcttaggatgtagctgttctactaccaatagcaatgtggcattgcctatttgcccagtgtgttaggaaaatgtagattaaatggttgaaatcgtacatgaacg

SEQ ID NO: 139237 - DNA, 1838 bp, Zea Mays
tacaggctaagcccaccacgctgataagccaacaaagctagctgctccccattccccaatatggccgccgccgctgccgccaagcacgtggtgctcttcccgttccccggtcagggccacctctccgcgttcatgtctctcgccggcctcctacacagtgctctccccgacgccgctatcaccttcgtctccaccccgcgcaacgttgcttcgctccagacttccgcgtggtccaacgcgccgttcctcggcttccacgcgctgcccttcaccccggcggatcacggcctgcctccggactgcgagtcgtccgacgccgtacagcccggcgccatcgcgttcctcctcgtggcgttcgagtcgctcgaggccgcgttcgacgactacctcaacaccgccatctccgccgccgccggcggtggccacgacgtctgcgtcgtctccgacccgttcacggcgtggacggtgaccgcggcccggcgccgcggctgcgcgcacgccttcttcgcctcctgcggcgcgtacggcagcgccgtcgtgcactcgctctggagccacctgcccgtccgccccgacccggctaccggccgcgtccacctgcccgagtaccccgaggtcgtaatccaccgctcgcagctctccaagaacgcgtccgccccgcccgccgtcagcaactgcgccgcgggattctacggccggcagatccctctcggctacgagacgggtgcggtgctcgtgaacaccgtggaggagttcgagcccaccggtctcgacatgctgcggcgcaccctcaagatcccggtctggcccatcggccctctcgtgcgcgccgccaacctaccagtctcgccggaggccgaggccgccgtcgcgagcttcctggactgccacccgccgtcgtcggtgctgtacatttcattcggctctcagaactccatacgagcagagcacatggcggagctggcattggcgttagagtcaaccggccggccgttcgtctgggctgtcaggccgccggacggacacgacgtcaagggcgagttccgggccgaccagtggctgccggacgggttcgaggagagggcgcgcacgagcaacagagggctgctggtacgcgggtgggcaccgcaggtgaggatcctggcgcacgcgtcgacgggcgccttcctgagccactgcgggtggaactcagtgctggagagcgtgacgcacggcgtgccaatcatcggctggccgctcgccggcgagcagttctacaatgccaagatgcttaaagaggagtggggagtgtgcgtggaagtggcgagggggaacatggaggatactatggtaaacagggctgcggttgccgacgtggtggagacggtgatgggccagacggcgaaggctgcagagatgcggcggcgcgtgtgggagatcaaggaggtggtggaagggtcctggaacgacggaggcgggtcatcgaggaaggcgatggaggatttcttgcgggcgatgaatctccggtgaagtgaagaacttcgtgtgctgctccgtcttgacctgaatcttgtgcggcattgcaaatgatgctaagttagagcccctttggcggggcactgaacaaagtttctgggccaaatttccaggtagtcgtatgtagggtatcatgcgttgatttgaatgataccattataaatgttacgttttggaaatacactattgttggtttctatatttgtaatcatgtcattacaatttgttatgaaatgatctgtactatctttgtagtattgttggggaccttcggcatccgaaggtcctcaaaaacaggatttaacagtatttctagagtataa

SEQ ID NO: 139238 - DNA, 813 bp, Zea Mays
cccagcagcaggggctttctctggcgtcctggtcgaaacaaccccaccacctccggcacaagcacacgaagccttcgcattcctgtccggcggaaccgctgaaggaagggagccgaacgagcaagcaagccaccaacgaaggttgctagggccggagtggatggggttcatgctgcgggtgaggctcgcctccttcttcgtcggcgcggctgccgccgccgcgggcgggggctacttcctctacaaggactacaagctcgccaacgactctctggccctcaaggtgaaatgtctccaagactcaactgacactcgctacgaagcccttgaaaagcgactcgctgctttggaaggtctgcaaagccctgaggctgcaccggatgtggatacgccatctgattagtctgttcgctacgagactttgatttacgtctgttttcgtttgccccagttgtcttctcctttgaaagcaagtacctgaccaacaacaaaataatctaggatgcttcttttgtactgcaaatgtctgaggctgagattctcccctacatttcatgccagaaaagcacatgaacatcagaactctgattactcaggcatactgagaatggccaaatgggcgtgaacccaaaacccagtttgagacaataatgctgcaatggtttttgccgcgccatctgccctctcagtttttccgaacttgtccatgctgtatatgtatgacaatggcccaaatgggcaaacatactacgtgttatttatgcggtggctaggcctaggcatgctactccctccacgtttaaaatataaaaa

SEQ ID NO: 139239 - DNA, 487 bp, Zea Mays
cccagcagcaggggctttctctggcgtcctggtcgaaacaaccccaccacctccggcacaagcacacgaagccttcgcattcctgtccggcggaaccgctgaaggaagggagccgaacgagcaagcaagccaccaacgaaggttgctagggccggagtggatggggttcatgctgcgggtgaggctcgcctccttcttcgtcggcgcggctgccgccgccgcgggcgggggctacttcctctacaaggactacaagctcgccaacgactctctggccctcaaggttcaaaaccagatacattcaatatgagtcaacgaaagaagtgacgagttctaaaatttagtgaagttgtgtagagaagacctgggaaattgttcggttttgggcaaataaaagcctgatgtatggttattgttttgcagttattttctctctgacagttatgttttgacgttgcatgaatctctcaagaagataatccttgct

SEQ ID NO: 139240 - DNA, 794 bp, Zea Mays
gtcctggtcgaaacaaccccaccacctccggcacaagcacacgaagccttcgcattcctgtccggcggaaccgctgaaggaagggagccgaacgagcaagcaagccaccaacgaaggttgctagggccggagtggatggggttcatgctgcgggtgaggctcgcctccttcttcgtcggcgcggctgccgccgccgcgggcgggggctacttcctctacaaggactacaagctcgccaacgactctctggccctcaaggtacgcactccgcccctcttcctcctcgcttcgcatcagatcttagattgttgcgctcgtatcgctactggtgctctcggtggtggtgattctgaagcagtaatgcttgaagcgcatcggcatgttgcgtgcgggatggggggatcgagggtaaaccctcgacaggagggcgtgcctttgagctttagccctggccgtcatgccacacacatcttgtttgatgatccgatgacggtcgtatggtttggttttactaagaataccagttttggtagattgatgcaaggttgggtagcatttctgtctatcatgtagacatgtacttgtcatatcattgggaaggggattggcataattgttttgttgagacgttggatgcttgcgttgcgtctagggcgtgatctgtattgttttctggaaaaaaatttggtgcaggactgctgcaaaccagactgtttgcagccctgttttctggcaagttggggatacatgaggtttctatggacctttcagtttcaattcaattcatgcttata

SEQ ID NO: 139241 - DNA, 960 bp, Zea Mays
gcgcgtccagatccagcggcctcagtcaccatcaccacccgcaccacacacgagcatacgcgacgactgacaaggcgaggggagcactcggcggcgatgggcggcggcggcgcacatggcggcaccacctacaagggctacaccatcccgcacaacaagcgctggcacaccgtcgccggcaagggcctctgcgccgtgatgtggttctgggttttctacagggctaagcaggatggtgctacgctcttgggtttgcgtcatccttgggatggacatgatgaccactctcatggtcatggacacgggcatgaggcatcatcatcgtcatcttcacattaagttccttactggctgcggacgatgcttggcatgttccaacagctaaagtttgagttaataaattctatcaccctgcatgggactcatgttgtttgcaactggtttagcacgaactggtcttgttactattgtgctaatgtatttgtttcgaagtttcagttaatatgctgtggaaaagaatctggtgcacgttgatgttctttatgatctgttgttcagtacattgctctgcttcgttgctacgttaagaatatatatatactaacatcagaaaaatgtatgtattttatgggcttaatagattcagaactgggaagatgaatgggcagctatgctggtgttttcctttttggtcgatgttgggcgaaggttggtgcttgtattcctttgcttcaggcatggcatgtgaagaagctaacggcaattatcttgaatattatcgtccactagttcatttttgaaacaaacaaaaaaagaacggagtgagtatatctgacgaagcgttgttctgtcagttttgccagcacgcttggcagcgaagtactaatcgataacccggaaattctgatacgccacaagcacttccgaggtcgacctcatctggtcctaagctacaggaca

SEQ ID NO: 139242 - DNA, 1245 bp, Zea Mays
gcgcgtccagatccagcggcctcagtcaccatcaccacccgcaccacacacgagcatacgcgacgactgacaaggcgaggggagcactcggcggcgatgggcggcggcggcgcacatggcggcaccacctacaagggctacaccatcccgcacaacaagcgctggcacaccgtcgccggcaagggcctctgcgccgtgatgtggtacgcatgcgcacccccttgctcccctcccctcccccatcctatcccaccaccccgatccgtccagttcgtccgaatccggtagcttctctccgattcaaggttgcctggctggacgcctccctgcttttgtcaaacacgccgcggctcgtgtgtttcgccctccgccggcgggcttccgcatggtagatcaggaaatgctgggaacagttttttttttcatggattattattcatcataaattgtgcgatttggttggagcaaggcgcggtcgttctgttttctgcggactgttgcaaactacaggcgcaatctgcatggcgaaaatccggttcggggatgtggaaatggagctggatcgctgccgttcaacttatcccgttttggtaggactgtcgaccgactgctgcatccgagagccgcaatcactgcagtcaacagtcatgatcatcgctgcaaccgttcttacttaaaccagctgtgcgacattaggaaggccgaatcggactttcttcacgcttcaggctctagggttctgggttttctacagggctaagcaggatggtgctacgctcttgggtttgcgtcatccttgggatggacatgatgaccactctcatggtcatggacacgggcatgaggcatcatcatcgtcatcttcacattaagttccttactggctgcggacgatgcttggcatgttccaacagctaaagtttgattaatatgctgtggaaaagaatctggtgcacgttgatgttctttatgatctgttgttcagtacattgctctgcttcgttgctacgttaagaatatatatatactaacatcagaaaaatgtatgtattttatgggcttaatagattcagaactgggaagatgaatgggcagctatgctggtgttttcctttttggtcgatgttgggcgaaggttggtgcttgtattcctttgcttcaggcatggcatgtgaagaagctaacggcaattatcttgaatattatcgtccactagttcatttttgaaacaaacaaaaaaagaac

SEQ ID NO: 139243 - DNA, 694 bp, Zea Mays
cacgcgtccaaacatacagctagatagcctctgcatgcctacgtacagcatggccaaggccgagctgctcctcgccctcgtggcttcgctcgtcgtgctgccattctcctccctcgccgtgtaccaggacttctgcatcgccgacctatccgccgccgccacgccgggcggctacccgtgcaagcccccgaaggacgtgaccgccgacgacttccactatggcggcctcgccacccccggcacggcgctgaaacccttcaagatctccctgggctcggccgtcgtcaccacgttccccggcctgaacgggctgggcatctctgccgcgcggatggtgatggtcccgggcggcgtcgcgccgctgcactcccacccgggaggcaccgagctcatcctcgttcagcagcgacaaccccggcctgcagatcctcgacttcgcgctcttcgccaacgacctgcccacggaggtcgtgaacaaggtgaccaacctggacgaactgcagatcgtcaagctcaaggcgctgttcggagggaggggctagacgcatatgtactccgtatataggaacagtcaacggtgttgatcattgaattgtgtgtattattctatacttgtgatggatgtttgtcttgtcattctataaaataaattgtaacgcgcgcagcaggcgtgagagcgaatgtagctgccaca

SEQ ID NO: 139244 - DNA, 917 bp, Zea Mays
acacgccacactcctagtcctagtatatatatacctagtatgtagtaccaaattaacatcgtcagagacacgcgtccaaacatacagctagatagcctctgcatgcctacgtacagcatggccaaggccgagctgctcctcgccctcgtggcttcgctcgtcgtgctgccattctcctccctcgccgtgtaccaggacttctgcatcgccgacctatccgccgccgccacgccgggcggctacccgtgcaagcccccgaaggacgtgaccgccgacgacttccactatggcggcctcgccacccccggcacggcgctgaaacccttcaagatctccctgggctcggccgtcgtcaccacgttccccggcctgaacgggctgggcatctctgccgcgcggatggtgatggtcccgggcggcgtcgcgccgctgcactcccacccgggaggcaccgagctcatcttcgtcatcgagggcagcgtcgtctgcggcttcatcagcgccacgctcaacagggtgtacaccaagacgctgtacgccggcgacctgatggtgctcccgcagggccagctccacttccagtacagccacggcaacaccacggcggtgacgctgtcctcgttcagcagcgacaaccccggcctgcagatcctcgacttcgcgctcttcgccaacgacctgcccacggaggtcgtgaacaaggtgaccaacctggacgaactgcagatcgtcaagctcaaggcgctgttcggagggaggggctagacgcatatgtactccgtatataggaacagtcaacggtgttgatcattgaattgtgtgtattattctatacttgtgatggatgtttgtcttgtcattctataaaataaattgtaacgcgcgcagcaggcgtgagagcgaatgtagctgccaca

SEQ ID NO: 139245 - DNA, 2119 bp, Zea Mays
aacacgaggagagactgcggcagcggagtgcagagagcggacgcaacgcaacaccgcccactctctgtcactgacgatcgaagtgaggagcgcactgaagccagccgccgatgagtcgcctcctctcgcggcagcaccttgccgccgtccgtcgatctgcaccctttgcgtgcgtgtccaggtggctgcacacgccgtcattcgcgacggtttctccgcaagaggtttcaggttccagcccagcggaagtgcagaattttgtgcagggcagctggacagcatctgctaactggaactggatagtcgatcccctgaacggtgataaattcatcaaagttgctgaggttcagggaacagaaataaagccattcgtggagagtttatctaaatgcccaaagcatggacttcacaacccacttaaagctccagagaggtacctcatgtatggagatatatctgcaaaagctgcgcatatgctgggccaacctgcagtcttagatttctttgctaaacttatccagagggtatctcccaagagctaccaacaagctcttgcagaagttcaagtttctcaaaagtttttggaaaacttttgtggagaccaggtacgctttctggcaaggtcatttgctgtaccaggtaaccatcttggacaaagaagtaatggctaccgttggccatatggcccagttgcaattatcacaccattcaattttccgttggagatccccttactacaattgatgggagcactatacatgggaaataaaccagtactcaaggttgacagcaaggttagcattgtgatggaacaaatgattaggttgcttcatgattgtggattgccagcagaggatatggatttcataaattctgatggtgccgtaatgaacaagcttctgttagaggctaatccgaaaatgacccttttcactgggagttcacgggtagcagagaaattggctgctgatttgaaaggccgagttaaattggaggatgctggttttgattggaaaattcttggtccagatgttcaagaggttgattatgttgcatgggtttgcgatcaggatgcttatgcttgtagcggtcagaaatgctctgctcagtctgttctattcatgcacaagaattggtcttctagtggtctgcttgagaaaatgaagaaactttctgaaagaaggaagcttgaagatttaacaattggtccagtccttacagttactacagaagccatgatagagcacatgaacaaccttctcaaaataagaggatcaaaggttctgtttggtggtgaaccgttagcgaatcactcaattcccaaaatttatggtgccatgaagcctactgctgtatttgttcctctagaagaaattctaaaaagtgggaacttcgagcttgtgacaaaggagatatttggtccattccaggtagtcacagaatactctgaggatcagcttgagttggtcttagaagcctgcgaaaggatgaatgcgcatctgacagctgcagttgtctcaaacgacccgctattcctgcaggatgtacttgggagatccgttaacgggacaacctacgccggaattcgagcgaggaccacgggcgctccacagaaccactggtttggcccggccggtgatccgcgaggcgcagggatcgggactccggaagccatcaaacttgtctggtcctgccacagggaagtcatatatgacgtcgggcccgtgcccgagagctgggcgcttccttccgcgacctgattagctagacgaggatagactattccatgtcatcacgagaaataaaaggggaagataagcgaagccagcaggactggagcgaccgaccgagagcgagtggctgcatgcctaggcattcattctctgcacgcaactgcactttcaaccctggagaaaacataataaatgctcgttcccctgtacttgagatacatggtacttggaccggaacgtcggacaactcgtctgttcgcagctgcactgggttatcttcttaggccttatttgtttattatatattctaacaaattttatattaacacttagtttaaaatttgttagattatataatctaaatagattataattttaaacaaaca

SEQ ID NO: 139246 - DNA, 2132 bp, Zea Mays
aacacgaggagagactgcggcagcggagtgcagagagcggacgcaacgcaacaccgcccactctctgtcactgacgatcgaagtgaggagcgcactgaagccagccgccgatgagtcgcctcctctcgcggcagcaccttgccgccgtccgtcgatctgcaccctttgcgtgcgtgtccaggtggctgcacacgccgtcattcgcgacggtttctccgcaagaggtttcaggttccagcccagcggaagtgcagaattttgtgcagggcagctggacagcatctgctaactggaactggatagtcgatcccctgaacggtgataaattcatcaaagttgctgaggttcagggaacagaaataaagccattcgtggagagtttatctaaatgcccaaagcatggacttcacaacccacttaaagctccagagagctctaatgtgcaggtacctcatgtatggagatatatctgcaaaagctgcgcatatgctgggccaacctgcagtcttagatttctttgctaaacttatccagagggtatctcccaagagctaccaacaagctcttgcagaagttcaagtttctcaaaagtttttggaaaacttttgtggagaccaggtacgctttctggcaaggtcatttgctgtaccaggtaaccatcttggacaaagaagtaatggctaccgttggccatatggcccagttgcaattatcacaccattcaattttccgttggagatccccttactacaattgatgggagcactatacatgggaaataaaccagtactcaaggttgacagcaaggttagcattgtgatggaacaaatgattaggttgcttcatgattgtggattgccagcagaggatatggatttcataaattctgatggtgccgtaatgaacaagcttctgttagaggctaatccgaaaatgacccttttcactgggagttcacgggtagcagagaaattggctgctgatttgaaaggccgagttaaattggaggatgctggttttgattggaaaattcttggtccagatgttcaagaggttgattatgttgcatgggtttgcgatcaggatgcttatgcttgtagcggtcagaaatgctctgctcagtctgttctattcatgcacaagaattggtcttctagtggtctgcttgagaaaatgaagaaactttctgaaagaaggaagcttgaagatttaacaattggtccagtccttacagttactacagaagccatgatagagcacatgaacaaccttctcaaaataagaggatcaaaggttctgtttggtggtgaaccgttagcgaatcactcaattcccaaaatttatggtgccatgaagcctactgctgtatttgttcctctagaagaaattctaaaaagtgggaacttcgagcttgtgacaaaggagatatttggtccattccaggtagtcacagaatactctgaggatcagcttgagttggtcttagaagcctgcgaaaggatgaatgcgcatctgacagctgcagttgtctcaaacgacccgctattcctgcaggatgtacttgggagatccgttaacgggacaacctacgccggaattcgagcgaggaccacgggcgctccacagaaccactggtttggcccggccggtgatccgcgaggcgcagggatcgggactccggaagccatcaaacttgtctggtcctgccacagggaagtcatatatgacgtcgggcccgtgcccgagagctgggcgcttccttccgcgacctgattagctagacgaggatagactattccatgtcatcacgagaaataaaaggggaagataagcgaagccagcaggactggagcgaccgaccgagagcgagtggctgcatgcctaggcattcattctctgcacgcaactgcactttcaaccctggagaaaacataataaatgctcgttcccctgtacttgagatacatggtacttggaccggaacgtcggacaactcgtctgttcgcagctgcactgggttatcttcttaggccttatttgtttattatatattctaacaaattttatattaacacttagtttaaaatttgttagattatataatctaaatagattataattttaaacaaaca

SEQ ID NO: 139247 - DNA, 341 bp, Zea Mays
tcgctggtactgggagcgggtgacagttattgtggatgcatgtgctattgtcggttaatgaacttcggaagctatttaagatcttacaatgccctttggcatattttaaatggaaatcaaagcactctgtttctttgttatttatttgttgtataatttgcttccacttgcagaattggtcttctagtggtctgcttgagaaaatgaagaaactttctgaaagaaggaagcttgaagatttaacaattggtccagtccttacagtaagtcaggggcggagccagcccttttttgggggtcagctgaccccggtaaatttctgaatatctaatagaaaatgg

SEQ ID NO: 139248 - DNA, 141 bp, Zea Mays
ctaagtgatattgtgcttctggtgtgattgtgtgtttggggctgttatgtctgtctttgtttctctcctcctgttatcccctgtaattcttgtgtggcctattggctataacttttgtgtttttgcttcttctattaatat

SEQ ID NO: 139249 - DNA, 1004 bp, Zea Mays
ctgttgaaaagccatctttaatcgacacgacaaaggtagcttatgccatgattcctgcaagtggcacttgcagcttggaccatggctaaccgtcaatggttcttgtttggaaatgttaacattcatttccatcttaagatcgttaaactcactttcggacaatattgttcctccaatttcaatagaaaattttagttgggccaacagttcagctgacttctctgtgagttggatagcatttgtccaattttctgtcacctttttgctaacttaaacgtggaaacacttgttgcaggggaccgatatttgaaaccattcgtcattccaaaaccagaagtcaccgttgttcctagggcgaaagatgacgactgcctcattcttgcaagtgatgggctgtgggatgtagtgtcgaatgaagaggcatgcaaagctgcgcgtcggcagatccagctgtggcacaagaacaacggtgtcacatcatcattgtgtgacgagggtgatgaatccaatgatcctgctgcacaagctgctgctgattatcttatgaggctcgcactgaagaagggtaccgaggacaatatcactgtcattgtggttgacttgaaacctcgaaagaaggccaagagcaactcataacactgggatggatccatcacggtagagctgaccatgatatgtccaaaggcttctgctgctagttgttggtcgtccgcaagagacttgaccccacaggtttttttcgttgggcctcaagaactgtaggtgcattttccatggagggttatgatgcttaaccccactctggtttctgatggctaaaacattctctccagtcggcttctaccatgagccctggcacttagtatatccctaatgttgtatgatagttgaacttgtaaagagacaagcggctgagacggtcactaaaattaacatattgttacttcatgattcaaggactatccatctgcctgaatccgatgaaagttttgtattgcagcttc

SEQ ID NO: 139250 - DNA, 1982 bp, Zea Mays
gaccctccccagcggcgtgacgagtcgtggagacctgcccgctacggcgcagccagccccaggccaatcccctcttcccacctcgctcgcttcttcttccttcccttcccctccccgttcccccccacctgctctgcctgcttctttccccctccccacgcgcgcgcaccatcggcttcctcatcacccaccccaccgagactgtactctgtagccataccacacccctcctaccactgcaaggccggccggcccgcccgctcgccgcttcctcgcgtctcgagtccgtgcctgcctggtgcgtcgatcgaccccgagtcccgaccccggccgcctctcacggtggtggtggtggttcttcgacgccgcggtgggcggggggcacgcgtgtggttcgtgcaagccggagggagggggttctgctgtgactgtgatggcggcggcgatgtgcgtggatgacgaggccgcctccgccgccgcggaaagcgcgggggtcgacaagctggatctcggcgcggccgcgggcggcaagaggagcgtctacctcatggactgcgcgccggtctggggctgcgcgtccacgcgcggccgcagcgccgagatggaggacgcctgcgccgcggccccgcggttcgccgacgtgccggtgcgcctcctcgccagccgcagggacctcgacggcctgggcctcgacgccggcgcgctccgcctgccggcgcacctgttcggcgtcttcgacggccacggcggtgccgaggtggccaactactgccgggagaggctccaggtactcttgaggcaggagctgaggctactcggcgaggatttggggcagattagctgcgacgtggacatgaaggagcactgggacgagctgttcaccggatgcttccagaggctggatgacgaggtgtcagggcaggcgagcaggctcgtcggtgccgtccaggagtcacggccggtggccgccgagaacgtgggctccactgcggttgtcgccgtcgtgtgctcatcccatgtggtggtcgccaactgcggggattcgcgtgccgttctctgccgtgggaaggagccagtagagctgtcgattgatcacaaggtgagcctttgcttttgcttggagcgaggcatgatggcgatcgtgcgattcacccgtggttgtttcagcctgacaggaaggatgagcgcgcgaggattgaggccctgggaggcaaggtcatccaatggaacggctatagggtctccggtatacttgctatgtcaagatcgattggggaccgatatttgaaaccattcgtcattccaaaaccagaagtcaccgttgttcctagggcgaaagatgacgactgcctcattcttgcaagtgatgggctgtgggatgtagtgtcgaatgaagaggcatgcaaagctgcgcgtcggcagatccagctgtggcacaagaacaacggtgtcacatcatcattgtgtgacgagggtgatgaatccaatgatcctgctgcacaagctgctgctgattatcttatgaggctcgcactgaagaagggtaccgaggacaatatcactgtcattgtggttgacttgaaacctcgaaagaaggccaagagcaactcataacactgggatggatccatcacggtagagctgaccatgatatgtccaaaggcttctgctgctagttgttggtcgtccgcaagagacttgaccccacaggtttttttcgttgggcctcaagaactgtaggtgcattttccatggagggttatgatgcttaaccccactctggtttctgatggctaaaacattctctccagtcggcttctaccatgagccctggcacttagtatatccctaatgttgtatgatagttgaacttgtaaagagacaagcggctgagacggtcactaaaattaacatattgttacttcatgattcaaggactatccatctgcctgaatccgatgaaagttttgtattgcagcttc

SEQ ID NO: 139251 - DNA, 1914 bp, Zea Mays
gaccctccccagcggcgtgacgagtcgtggagacctgcccgctacggcgcagccagccccaggccaatcccctcttcccacctcgctcgcttcttcttccttcccttcccctccccgttcccccccacctgctctgcctgcttctttccccctccccacgcgcgcgcaccatcggcttcctcatcacccaccccaccgagactgtactctgtagccataccacacccctcctaccactgcaaggccggccggcccgcccgctcgccgcttcctcgcgtctcgagtccgtgcctgcctggtgcgtcgatcgaccccgagtcccgaccccggccgcctctcacggtggtggtggtggttcttcgacgccgcggtgggcggggggcacgcgtgtggttcgtgcaagccggagggagggggttctgctgtgactgtgatggcggcggcgatgtgcgtggatgacgaggccgcctccgccgccgcggaaagcgcgggggtcgacaagctggatctcggcgcggccgcgggcggcaagaggagcgtctacctcatggactgcgcgccggtctggggctgcgcgtccacgcgcggccgcagcgccgagatggaggacgcctgcgccgcggccccgcggttcgccgacgtgccggtgcgcctcctcgccagccgcagggacctcgacggcctgggcctcgacgccggcgcgctccgcctgccggcgcacctgttcggcgtcttcgacggccacggcggtgccgaggtggccaactactgccgggagaggctccaggtactcttgaggcaggagctgaggctactcggcgaggatttggggcagattagctgcgacgtggacatgaaggagcactgggacgagctgttcaccggatgcttccagaggctggatgacgaggtgtcagggcaggcgagcaggctcgtcggtgccgtccaggagtcacggccggtggccgccgagaacgtgggctccactgcggttgtcgccgtcgtgtgctcatcccatgtggtggtcgccaactgcggggattcgcgtgccgttctctgccgtgggaaggagccagtagagctgtcgattgatcacaagcctgacaggaaggatgagcgcgcgaggattgaggccctgggaggcaaggtcatccaatggaacggctatagggtctccggtatacttgctatgtcaagatcgattggggaccgatatttgaaaccattcgtcattccaaaaccagaagtcaccgttgttcctagggcgaaagatgacgactgcctcattcttgcaagtgatgggctgtgggatgtagtgtcgaatgaagaggcatgcaaagctgcgcgtcggcagatccagctgtggcacaagaacaacggtgtcacatcatcattgtgtgacgagggtgatgaatccaatgatcctgctgcacaagctgctgctgattatcttatgaggctcgcactgaagaagggtaccgaggacaatatcactgtcattgtggttgacttgaaacctcgaaagaaggccaagagcaactcataacactgggatggatccatcacggtagagctgaccatgatatgtccaaaggcttctgctgctagttgttggtcgtccgcaagagacttgaccccacaggtttttttcgttgggcctcaagaactgtaggtgcattttccatggagggttatgatgcttaaccccactctggtttctgatggctaaaacattctctccagtcggcttctaccatgagccctggcacttagtatatccctaatgttgtatgatagttgaacttgtaaagagacaagcggctgagacggtcactaaaattaacatattgttacttcatgattcaaggactatccatctgcctgaatccgatgaaagttttgtattgcagcttc

SEQ ID NO: 139252 - DNA, 2819 bp, Zea Mays
gctagttgtgccactgccgtgcctacggccgattgggcgtctatagcagcagcagtgagcacgggtgcacggccatcactcccatcggcagcagggtcaaccactgccaccggcgcacgcagctgtgcacgaggtctcctcacccaccggccgccgcgtccggacccagcccggcaactcgcacctcctcctcctgctgccgcccgcgcgcttggccccgtgctcacacggggggtcgatcagtagaacatcctgctcacggcgttccccgacgcgtggctcgtaaggcactcttcccgcggtacaagtgcgacccacggtgctggcggagaggaacctagcagcggaagatcgagttcagggatggcttctggtggaaccttccggaaccttctcctggtgctccccctctacctcgcgctcgcctcgttggtcggtggcgaggcctcgaggaggttctggatcgagaacgatacctttaggaaggatggagtaccgttccaaatcgtcggtggcgatgttcactatttccgcattgttcctgagtactggaaggatcgccttttaagagcaaaagcattaggcttgaacacaattcaaacatatgtaccttggaatttgcatgagccagaaccacagagctggaaattcaagggcttcacagacattgaatcatatctgagacttgctcaagaactagaaatgctggtcatgcttcgtgtagggccatacatttgtggagaatgggacttaggaggttttccaccttggttgctcaccatagaaccagcccttaaactgcgttcatcagattcgtcctatctttccttggtggagagatggtggggagtactacttctgaaagtggcaccattattatacaataatggaggtccagttattatggttcagattgaaaatgaatttggttcttttggagatgataagaattaccttcatcaccttgttcaactggccaggagatatcttggaaacgacattattctttatacaactgatgggggcgccttgggtaatttaaagaatggatcaattcctcaagatgacgtttttgctgctgttgattttgaaactggatccaatccatggcccatattcaaattacagaagaaatacaacttgccaggaaaatcagtccctttaagttcggaattttatactggatggctaacacactggggtgaaagaatcgcaacaacagatgctactagtacagctaaagcccttaaaaccattttgtgccacaatggttctgctgtactttatatggctcatggcgggaccaattttggattttataatggtgcaaacactggtcaagatgaatctgattacaaggcagacctcacttcttatgactatgatgcaccgattaaggagcatggagatgtgcataatgcaaaatacaaagcgctaagaagagtaatacatgagtgtactgggactcctctccatccacttcctgctaacattaaaaaagcaagttacgggattatgaaattacaaaaggttgtttctctgtttgacatcattgataatatcaatgatcctctgaaagtttctgtttcggagcatccactttatatggaacagataggccagatgtttggatttctcctgtacatgtcagaataccaagggaaactcccatcaagcatcctgtcaattccaaaggtacatgacagagctcaggtgtttgtgtcttgctcagctggtgttagaaccctaagatattgtggtgtaattgaaagatggtctaataaaacactagagataccgaacttaagatgttcatctaagaccagcctatatatcctggtagaaaatatgggtcgtgtaaattatgggccatatatttttgaccggaagggaatactatctcctattcaaatagatggcattactctccgtcactggaaaatgtatccactggcactcaattcactggacatccttccaaaacttcaactaatcactcaaataccttatgctggagccagtaaaatgtccattcatggagactcagaaaagattttacaggactcgtcatgctgttcaaatgaaagcacttctgcggagcctgcgttttatgaaggccatttccgtattgacaacgagactgagataaaggatacattcatatcgtttcgtggttggaacaaaggtgttgcttttgtgaacaacttcaacattggaagattttggccggcatgcggaccacagtgtaccctttatgttccagcgcctatcctcagacctggggataacattgttgtaatctttgaactgcatgctccaaatcatgagctcactatcgattttaccacggatccggatttcacgtgcggtccagaacagtgaaaaagggttgcacgtggacgtggtgtacatactgttacatagcagtacagtgcagtgttctgtccttcctcttgcttttctacgtcggtgctggtatagaatgggtaaatctgctctaggacactactctataaacgtggtattggctactggacactgctcaattgtgtacctttgatagctggatttgctgttgggtaccaaagaaaaaataaaatatcagggacagatcgtgaattctccactttgctccctgtccaaatgggggcccagcagtcacttctccattttggcaagccacaccgagctccgctacgccctgcgggggtgcagcacgatgtggattcctatgcacggggaacggctgtccgttacgacgacggacacggccgtggcggcgatgcccgggcacgacgcacgcgagatgctcgacgtta

SEQ ID NO: 139253 - DNA, 1644 bp, Zea Mays
gctagttgtgccactgccgtgcctacggccgattgggcgtctatagcagcagcagtgagcacgggtgcacggccatcactcccatcggcagcagggtcaaccactgccaccggcgcacgcagctgtgcacgaggtctcctcacccaccggccgccgcgtccggacccagcccggcaactcgcacctcctcctcctgctgccgcccgcgcgcttggccccgtgctcacacggggggtcgatcagtagaacatcctgctcacggcgttccccgacgcgtggctcgtaaggcactcttcccgcggtacaagtgcgacccacggtgctggcggagaggaacctagcagcggaagatcgagttcagggatggcttctggtggaaccttccggaaccttctcctggtgctccccctctacctcgcgctcgcctcgttggtcggtggcgaggcctcgaggaggttctggatcgagaacgatacctttaggaaggatggagtaccgttccaaatcgtcggtggcgatgttcactatttccgcattgttcctgagtactggaaggatcgccttttaagagcaaaagcattaggcttgaacacaattcaaacatatgtaccttggaatttgcatgagccagaaccacagagctggaaattcaagggcttcacagacattgaatcatatctgagacttgctcaagaactagaaatgctggtcatgcttcgtgtagggccatacatttgtggagaatgggacttaggaggttttccaccttggttgctcaccatagaaccagcccttaaactgcgttcatcagattcgtcctatctttccttggtggagagatggtggggagtactacttctgaaagtggcaccattattatacaataatggaggtccagttattatggttcagattgaaaatgaatttggttcttttggagatgataagaattaccttcatcaccttgttcaactggccaggagatatcttggaaacgacattattctgactataaattcactacttctgctcctaccattctgaagtgtgcctttgagattattctttatggttaagtaaatgggccaagctcaataaattccaacaatcccccaccagatcttgaaggaacaacataaccaactctccgcatttcctcaaatattgtttatatactagttttatggtagagattgttaagttaaacatccatctagactcaagagttatacaactgatgggggcgccttgggtaatttaaagaatggatcaattcctcaagatgacgtttttgctgctgttgattttgaaactggatccaatccatggcccatattcaaattacagaagaaatacaacttgccaggaaaatcagtccctttaagttcggaattttatactggatggctaacacactggggtgaaagaatcgcaacaacagatgctactagtacagctaaagcccttaaaaccattttgtgccacaatggttctgctgtactttatgtctgtcactggagcccattcatcagtgcattgcatttgcagtctaggtctattaattctatttcttcatgaggttgtccagatggctcatggcgggaccaattttggattttataatggtgcaaacactggtcaaga

SEQ ID NO: 139254 - DNA, 1430 bp, Zea Mays
aaccagcgcagccctcaattcctcactctttttttatcccctcctctgccattccctccctctcccctcaacccagcgcccccctcccgccgccactagggtttctcctccccgcccacccccaaaccatccccgaagcttccagtgcgtcgcgccgcaaccatgagcgacggtaaggactccctcgacctctccgccctcggcgccgccatccccaactcggccgagctcagcgcggaagacaaggctaaccttgtggcgtcgatcaagaacacgctcgagggattggcatcgcggcataccgacgtgctcgagaacctcgagcccaaggtcaggaagcgcgttgagaagctcagggagatccagggcgaacacgatgaacttgaggcgaagtttttcgaagagagagctgctctagaagctaagtatcagaagttgtatgaaccactttactcaaagcgttatgaaattgtcaatggtgtggtcgagattgagggtatcacaaaagaaagtgcagctgaaaccccagaggagcaaaaaagtggagatgagacctctgctgagcaaaaagaagaaaaaggtgtaccagctttctggcttaatgcaatgaagaatcatgaaattttagctgaggagatccaggagagggatgaggaagctctcaagtacctcaaggacatcaagtggtacaggatcagcgagccgaagggttttaagcttgaatttcactttggtacgaatatgttcttcaagaattcggtgcttacaaaaacatatcacatgatcgatgaggatgaaccaattctggagaaagccattggtactgaaattgaatggtaccctgggaagtgcttgacacaaaaagtgctaaaaaagaagccacggaaggggtcaaagaacacgaaacctatcacaaaaaccgaagattgtgagagcttcttcaacttcttcagtccacctcaagtccctgatgacgacgaggaaattgatgaggacacagctgaacagttgcagaaccaaatggagcaagattatgatattggatctaccatagaaacaaaattatcccacatgctgtctcgtggttcactggagaggctgctcaagatgaggactttgaagttatggatggcgaggacgacgacgatgaagacgacgatgatgaagacgacgaggatgaagatgacgatgattatgatacaaagaagaccaagggaactgctggaggggaagggcagcagggtgaacgacctgcagagtgcaagcaacagtgaggtgtgatgtcattaagttggttttgtggggccgttgggtgggggttcttgttggttttattttatggaactggcggggggatttttctgggacatgttacatgtgggtctgtattgggtttcagatgttatatttttttttttttttttggagtg

SEQ ID NO: 139255 - DNA, 1278 bp, Zea Mays
ccccgatgcgtcaaacacttgacctgcacacggacagcggcggtggcgtcccgatcctgtccacccacccatctaatgcggccgcgaggaggatccacctgattctgctgctcctgctcctccttctagtcgagagaccatgacacggaagtcagcagtagcggattatgtttagtggcacaaggatcattcgtgtagctgaaaggatttgccttcaatggagcttgaagctgctcctgacgataaagtattctgttcagatgatgagatgcagacgctgtggcctctgggacaagtagacccaaagagcgtgaggttcccttgctgcatcgtgtggactcctctcccagtagtttcatggctggctccctacatagggcacgtggggattgctcgggaggatggaaccgtcttggactttgcaggttcgaatttagtgagtgtggatgatctggcttatggttctgtcgccagatgcctgcagcttgacagggcaaagtgctgcttccctgccaacccggcgtcgcacgtgtgcttgaggtcccacgagcactcggatgccgggacggcgatctcgtgggacgacgcgctgcggtcggggagccggcgcttcgagcacaagtgctacaacctcttcacctgcaacagccactcgttcgtggccgactgcctcaaccggctggcttacggcggctccgttgggtggaacgtgctgaacctggccgcgctcgtctggctgcgcggccggtggctggaccccatggccgccgtccggtccttcctcccgttcgccgtcgtctcctgcgtcggcgtcctgatggccggctggtccttcctcctgggcatgaccgcgttcacgctgctcttgctcggctggttcgtgctcggcgtctactgcatgaagggcctcgtcgtctgacgcacgctggctcggagccgaacgtgtgcccagcttcttcactgagcatcggggtcatgtagtagatgaatgaaggatcgaaatcttgaaaggggtgtgagtcggaggggagagacaacgggaaaacaaaatttgagcccgtttttaatagcggaaacccaaatccagatatttataaaatcgaagtttctatttgaaacaaagtagaagtacaagataaaaggaaggagggggaaatagcacaaaaacaaaattgggctagagtcttagaaccgttggaggccgaaactcacgccctccttgctgcgaagctgtcgatctgcagaatgcagctctgttaactgacagtctcctgttac

SEQ ID NO: 139256 - DNA, 778 bp, Zea Mays
aactgtagctgccgcggcgcctgcttctccccgatgcgtcaaacacttgacctgcacacggacagcggcggtggcgtcccgatcctgtccacccacccatctaatgcggccgcgaggaggatccacctgattctgctgctcctgctcctccttctagtgagttctattcccgtccccctccctacccgctgcgcgctgctaggatcttcgcctgcgaaaattttcggttcagtcgtcaggaggtcgagagaccatgacacggaagtcagcagtagcggattatgtttagtggcacaaggatcattcgtgtagctgaaaggatttgccttcaatggagcttgaagctgctcctgacgataaagtattctgttcagatgatgagatgcagacgctgtggcctctgggacaagtagacccaaagagcgtgaggttcccttgctgcatcgtgtggactcctctcccagtagtttcatggctggctccctacatagggcacgtggggattgctcgggaggatggaaccgtcttggactttgcaggttcgaatttagtgagtgtggatgatctggcttatggttctgtcgccagatgcctgcagcttgacagggcaaaggtaagaactttgctcagtcccagatttgagttttttgtgtttatatatatagcattaggacctcgggaatgaaggtgcaatgagaactattgtaatccaagcttttggaaagcaggctggctctgctttaagccacatttctgtttttatctgcatggcatatgg

SEQ ID NO: 139257 - DNA, 664 bp, Zea Mays
aactgtagctgccgcggcgcctgcttctccccgatgcgtcaaacacttgacctgcacacggacagcggcggtggcgtcccgatcctgtccacccacccatctaatgcggccgcgaggaggatccacctgattctgctgctcctgctcctccttctagtcgagagaccatgacacggaagtcagcagtagcggattatgtttagtggcacaaggatcattcgtgtagctgaaaggatttgccttcaatggagcttgaagctgctcctgacgataaagtattctgttcagatgatgagatgcagacgctgtggcctctgggacaagtagacccaaagagcgtgaggttcccttgctgcatcgtgtggactcctctcccagtagtttcatggctggctccctacatagggcacgtggggattgctcgggaggatggaaccgtcttggactttgcaggttcgaatttagtgagtgtggatgatctggcttatggttctgtcgccagatgcctgcagcttgacagggcaaaggtaagaactttgctcagtcccagatttgagttttttgtgtttatatatatagcattaggacctcgggaatgaaggtgcaatgagaactattgtaatccaagcttttggaaagcaggctggctctgctttaagccaca

SEQ ID NO: 139258 - DNA, 1910 bp, Zea Mays
atgggcgctgcagtgcgtgtggccggcgggagaggagcgagggcaagcggggaatggaaatcccaggcgctgaggttggccgaccttgtagagctgctcggtgacggcggccccgaggacgccggtgtagaaggcggcgacgtaggtgccgacgagtggcgcgacggagcgcgccgggcggtggggctccaccataccccacagcaccgtcttctcgcacctgtggaactgccgagttgggtgcagcaggcccacgccgcccgttacggcccaagtgtgcattctctgccgcgccgcgaaaacacaaaaacccggctagtccaaagtgacgatgaaaaaacaaaacaaaacggaaatagctcgcggccgcggtttcttgcgccactccggctcagccgccgcccgccacccgccacagccgccgcagacgagatgggcatcaagggtttgacgaaactgctggcggacaatgcgcccaaggcgatgaaggagcagaagttcgagagctacttcggccgcaaaatcgccgtcgacgccagcatgagcatataccagttcctgattgtagttggaaggacaggcatggaaactctcacaaatgaagctggtgaagtcactagtcatttgcaaggaatgttcaaccggacaataagattactggaagcgggaatcaagccagtttatgtttttgatggcaagcctcctgatatgaagaaacaagagcttgctaaaagatactcaaaaagagatgatgcaaccaaagatctgactgaggcagtagaggtaggagataaagatgcgattgaaaaattgagcaagaggactgtaaaggtcacaaggcaacacaacgaagattgtaaacggctattaagacttatgggggttcctgttgtagaggcaccttctgaagcagaagcagaatgtgcagccctttgcataaacgataaggtgttcgctgttgcttcagaagatatggactcccttacttttggggctccacggttccttcgtcatttaatggatccaagttccaagaaaatacctgtgatggaatttgatgttgccaaggttttggaggagcttgaactcaccatggaccagttcattgatttgtgcatcctgtgtggatgtgactattgtgatagcatcaaaggtatcggggggcaaacagctctgaaacttattcgtcaacatgggtccatagaaagcatcttggagaatcttaataaagacagatatcaaattcctgaggactggccttaccaagaagctcgacgcttgttcaaggagcctaatgtcacattggatattcctgagctaaaatggactgcacctgatgaggagggtctcataagtttcctggtaaaagataatggtttcaacgaagatcgggtgacaaaggccatagagaagatcaaatctgccaagaataaatcgtcgcaaggaagactcgagtcctttttcaagccaactgccaccacatcagcaccgctaaaacggaaggagacttcggataaaacaagcaaggcagctgcgaacaagaaaacaaaggctggtggaaagaagaaataatcttggatgcttgatgtacaactacgactacgaaagcagcggtggcgtgatcacttcgcttagattatttaactccctgttttaactcagagctttggtaaaagtttgctcatgtttcaagctggggtaagttagttgtgtttgaagagattggtgtaccaagtaacaaaacttatcgctgttttttacttcttgtcctttgaagtatgtatgccagtcctcgtccttttaagtatctgtgttgcaacaaaaatttaaggccttgttttgatgcataggctcactttaagatttagtttaaatttcacaccaagctactttaacacgcatggattacg

SEQ ID NO: 139259 - DNA, 2420 bp, Zea Mays
cccgcaaaaacggacggaataagctctctcccgtttccgtcccgtttccatatttttccgtaaatacggaaacggtcgggtcaaatgtagaaaacggtacgggtcgggacgggattttttccgtccgttttcaaccctagtttctggattagaaaaaaaatgaaaaatgaaaaaacaaagtcctacaaacagaaaaattagcgtagtgtcaaatcaaaatttgaaaaaacgtataaatctctcgaatcaaacggtgcccgaagaatggatctcgcggttgagccgaagcttccagaacccaaacccctgcgcatctaaaaccctcctcccgagtcccgacccgacggcaaaaagcaaattcgagtgcgcacacgagcagacccccgcagacagccaggcacactcgcgcgaccatgtaccgggcggcggctgtcatctcgaggtcctcatcagcactgcggaggcagctcgcgcggggcgtggccggggagctgccgcgtctgttggcgcgagggtatgcggccacggcgaaggaggtgtccttcggcgttggcgcccgcgccgccatgctgcagggcgtcaacgacctcgccgacgccgtcaaggtcaccatgggccccaaggggcgcactgtgatcatcgaggggtcccataaaggtcccaaggtcacgaaggacggggtcactgttgcaaaaagcgtggagttcgaggatagcgcgaagaatgttggggcgaatctggtgaagcaagttgctgatgctacgaacaaagctgcaggggatggtaccacctgtgcaactgtgcttacacaggcaattcttactgaaggatgcaaggccgtggcagccggtgtcaacgttatggacttgcggaatggtataaacaaggcaataaatgctatcactgctcacctcaaaagtaaagcgtggaagattaattctccagaagaaattaaccaggtagcaaccatttctgcaaacggtgaaaaggaaattggagatctaatatcaaaagccatggaaaaagttggaaaggatggagtcattactattgttgatggcaaaacattggacaatgagcttgaagcagtacagggaatgaagctgtccagaggatacatatctccttactttgtgactgatcaaaagactcagaaatgtgagatggagaaccctcttattcttatccatgacaagaaaatctcaaacatggattctctccttccagcattagaaatttctatcaagaatcgcaagcctcttctcattgttgctgaggatgttgaaggagatgctctgtcaatgcttgtactgaacaagcatcgtgctggactcaaggtatgtgctgtcaaagctcctggatttggtgaaaatagaaggcacaatctagatgacatggctgtgatgactggaggagaggttattagcgaggaacgcggtcttgatcttggcaaagttcaattacaaatgcttggcactgctaaaaaggtaactgtatcccttgatgatactatcatcctagatggtggaggtgacaaacagcagatagatgagaggtgccaacagcttagagaatcaattgacacaagcactgctgtattcgacaaagaaaaggcccaagagcgtttatctaagttatctggaggtgttgctgtactcaagattggtggagctagtgaagctgaagttggtgagaaaaaagatagggtgacagatgctctaaatgctgcaagggctgctgtggaggagggcattgtgccaggtggtggagttgcccttctttatgccaccaaggagcttgacaagattagcacagcaaacgaggacgaaaagattggagttcaaattatcaagaattctttgaaggctcccttgatgaccatagctgcaaatgctggcattgatggagctatagtcatagggaagctgattgaacaagaggacctcagtttgggctatgatgcagcaaaaggggagtacgtagacatgatcaaggccggcatcatcgatcccgtgaaggtgatccgcaccgcacttcaagacgctgcaagtgtttccctgctgatggcaaccacggaggccgctgtctccgagctcccggcaaccaagtccagaatagccagccgtatgccgcagatgagcgggatggacttctgaggaaattcaggcgccgtgtatgatgctgatctgtgacctgtaaggctaggaattgggaggttggggacgaactttgtttccctagcggatagtcggatacgtctacggagttcattcgaaacgaggtgcagaactgtcaccgagttgcagtttttgatgcagtgcggcgttcgatggtggggtaataaagctggactgatagcgccttccattttgaatgctctgtctgaggcatcgtttggtgccgtcgaagcagctgaattc

SEQ ID NO: 139260 - DNA, 2377 bp, Zea Mays
cccgcaaaaacggacggaataagctctctcccgtttccgtcccgtttccatatttttccgtaaatacggaaacggtcgggtcaaatgtagaaaacggtacgggtcgggacgggattttttccgtccgttttcaaccctagtttctggattagaaaaaaaatgaaaaatgaaaaaacaaagtcctacaaacagaaaaattagcgtagtgtcaaatcaaaatttgaaaaaacgtataaatctctcgaatcaaacggtgcccgaagaatggatctcgcggttgagccgaagcttccagaacccaaacccctgcgcatctaaaaccctcctcccgagtcccgacccgacggcaaaaagcaaattcgacgcgaccatgtaccgggcggcggctgtcatctcgaggtcctcatcagcactgcggaggcagctcgcgcggggcgtggccggggagctgccgcgtctgttggcgcgagggtatgcggccacggcgaaggaggtgtccttcggcgttggcgcccgcgccgccatgctgcagggcgtcaacgacctcgccgacgccgtcaaggtcaccatgggccccaaggggcgcactgtgatcatcgaggggtcccataaaggtcccaaggtcacgaaggacggggtcactgttgcaaaaagcgtggagttcgaggatagcgcgaagaatgttggggcgaatctggtgaagcaagttgctgatgctacgaacaaagctgcaggggatggtaccacctgtgcaactgtgcttacacaggcaattcttactgaaggatgcaaggccgtggcagccggtgtcaacgttatggacttgcggaatggtataaacaaggcaataaatgctatcactgctcacctcaaaagtaaagcgtggaagattaattctccagaagaaattaaccaggtagcaaccatttctgcaaacggtgaaaaggaaattggagatctaatatcaaaagccatggaaaaagttggaaaggatggagtcattactattgttgatggcaaaacattggacaatgagcttgaagcagtacagggaatgaagctgtccagaggatacatatctccttactttgtgactgatcaaaagactcagaaatgtgagatggagaaccctcttattcttatccatgacaagaaaatctcaaacatggattctctccttccagcattagaaatttctatcaagaatcgcaagcctcttctcattgttgctgaggatgttgaaggagatgctctgtcaatgcttgtactgaacaagcatcgtgctggactcaaggtatgtgctgtcaaagctcctggatttggtgaaaatagaaggcacaatctagatgacatggctgtgatgactggaggagaggttattagcgaggaacgcggtcttgatcttggcaaagttcaattacaaatgcttggcactgctaaaaaggtaactgtatcccttgatgatactatcatcctagatggtggaggtgacaaacagcagatagatgagaggtgccaacagcttagagaatcaattgacacaagcactgctgtattcgacaaagaaaaggcccaagagcgtttatctaagttatctggaggtgttgctgtactcaagattggtggagctagtgaagctgaagttggtgagaaaaaagatagggtgacagatgctctaaatgctgcaagggctgctgtggaggagggcattgtgccaggtggtggagttgcccttctttatgccaccaaggagcttgacaagattagcacagcaaacgaggacgaaaagattggagttcaaattatcaagaattctttgaaggctcccttgatgaccatagctgcaaatgctggcattgatggagctatagtcatagggaagctgattgaacaagaggacctcagtttgggctatgatgcagcaaaaggggagtacgtagacatgatcaaggccggcatcatcgatcccgtgaaggtgatccgcaccgcacttcaagacgctgcaagtgtttccctgctgatggcaaccacggaggccgctgtctccgagctcccggcaaccaagtccagaatagccagccgtatgccgcagatgagcgggatggacttctgaggaaattcaggcgccgtgtatgatgctgatctgtgacctgtaaggctaggaattgggaggttggggacgaactttgtttccctagcggatagtcggatacgtctacggagttcattcgaaacgaggtgcagaactgtcaccgagttgcagtttttgatgcagtgcggcgttcgatggtggggtaataaagctggactgatagcgccttccattttgaatgctctgtctgaggcatcgtttggtgccgtcgaagcagctgaattc

SEQ ID NO: 139261 - DNA, 1859 bp, Zea Mays
atgcgtccaggtcttgaatcaccaggcggtgatgctttccatttagccttgtttagtagtgaagacagatacaatagtgaaaatagaccaccacatgtattctttcggatgttagtaatagctctgaagccgattacgtacacctgttcctaccacacactttattctgctttccggttctcaacgtcttggacatcgccgacgagcacagtctcctcggcaacttcttctattggtaactcgggtgcaaggcaagattcaccaccaaatccttgggagcgttctggagctgaaggagcatatggtcctgcacctttcaagcccccatctggtggaagcaccggtgatattgttgaagcttctggtaccgctaaacccgacgaaaatgttactgagagctgcaaaatatttggtaacgtcacaccgctctgtgatgatccaaagactcagaatgttcttggaaatatgaagaaagtattgattgttttggggaggcagcggagttttccaccatttggctccaagcgcgacgacagcctatcgtgcccaggcttctatagatgtctcaactcagtagattggatgaatggacctatcaggccaaactttctagacttccaaggggtggactttgaggcaacgtttggggtgaggagagcttacagtgtaagagacattcaggattactcaaacccgtttgatctctttgagtccctgtttgaagggtttggtgaaatgggtggaatggggggtggccgtgctgctcggaacataccaatgcaaggtgatgatgagagctacaatctggtactcaatttcaaggaagctgtgtttggtgtggagaaggagattgagataaccatattggaaggctgtaacacctgcgatggaagtggtgccaagccaggtacaaaggcaacgacaagtaaaacttgtggagctcatggccaggtagtctcctccacaagaacactgcttggaatattccagcaagtctccacctgcaatacttgtggtggcaccggcgaattctccactccttgcaacacctgtgggggtgatggccgggtgcgaaggacaaagaggatcagcctaaaggttcctgctggagtggattctggaagcaggctgagggtctggtttgaggcgagatgggcaaacattctctacacatgcaaggtttcttacattgatgcaatccttgggacaaccgtcaaaatccccactgttgatggaacagttgaccttaagataccctcagggacccagccaggcacagctctggtgatgtccaagaaaggtgtcccgcttctcaggaaatcaattgcccatggagaccagctggtgcgtgtccaggttgagattccgaagcgtctgagcagcgacgagaagaagctatttgaggagcttgcaaacctgaacaaggctcaaacaaccaatagcaggagatgattgtcgcacaaggcttcgtaggacaacgtgcttgtgtggtaggcaattttgatgcaaactgcagtgatgattggatggaaagagttggtagtgataagctcttctacgaactacatacagcaagggctggagcaaaaatgtgtcgttccacatctgtaacctcgtttttaagctattaaagttgagtcagtgaactggacgtttttgcaatagcttagcatatgcactaggcgactttattagccttttctttgttgttatacgacttttacattcttgaaagccttaggcaaaatatctgatggtggaatcaggtttggacttgacatttctttcacaaatgctgcaccatgcattcatggaatctgtaagctgtaccatggaaatgttgattgtagttttattgt

SEQ ID NO: 139262 - DNA, 1908 bp, Zea Mays
cgaggggcggcacttggattcccacgttttccacccaccaagtcagcaccagagcatccgctcctccgcggcgcgccgcgtgctccccgcagccccagccaccatttaacgccgggtcaccagacgccaatccaatccccctgcaccagacgccaatcccgatcaccgccgcccaacctcacctcccctccgtcccccgagccacctctgtaaccctgttcggtgcctctcactccggctgccagatggacagcgccgacgcggcgacggcgctgggcgcgtggatccggggctacttcacgccggccacgttcttcctcgtcgtcaacctcgtcatcggcaccatcgcgctcacctcccgcgccaccaagcagcgccgccgcagggagaactactaccacgacgacggcaacggccaccaggaaacgctgcacccgcagatggagcagccggggtacggccactactaccacccggaccccacgctgtacgcggcgccgcctccgcccgcgccgctcgcgcgcacgtcctctgtcctcgaccgcctcaggtcgctcggcctgtaccgcttccgctccggggacttcccgcccgagtacggcgccacgccgccgaaccacgcgcaggatgtgcccgctccggtggaggaggaagagacgatcgcgtcggcgcactacgcaaggagccggtccgagccggcgcctgctgcgcgggagggtgagaggaggccggcgccgcccagggtaaagaagtcgggctcggaggtgaggaagtcgcaggtgtcgcgggcggcgcccaggatcgtccaggcggtcaccgaggacgacgtctccgtcgaggaagccgaaggcggcggtttcaggcggaggccgtcgccaccccagcaagagtaccactaccggcaagaatacgtcactccgccgccgccggcacccgccccgctgcagcgcacgtcgtccgtgctggacaggctccgctcgctgggcctctacggcttcctcgctcccgacgaacccgccgccgccgcgtcagttccagcgagcgacggcttcgccaccccggcggacgagaagaggcacgcgcacacgcactacgacatcggccggtccgagccggcacgggagcagcaggacaagaaggagaagacgcaggggggcaactcaacaagggccaagtcgagctcgggggctaggaagacgcccgctcagaggcaggcggaggccggcgccgagtgcgtggacgcgagggcggaggcattcatcgacagcttcaggcagcagcagcaggtgcaccactaccaggaggaggaatacgtcccgcctccggcgcccgcgccgccgctgtcgcgcacgtcgtccgtcctggaccgcctccgctccttcggcctgtaccgcttccgctccggcgacctcggccccgaccttccctccgccaccgccgccacggagacggacaaggagaagcagcaggcggcgcactacgggcggagccggtcggagccggcgcgggagcagggcaagaagcaggacacgaggatgaacaagtcgagctcgagcggcgtcgtggcggaggcggacgcgcatcagtgcgtgaacgcgcgcgcggacgacttcatcaacaagttcaggcagcagctacagctgcagcgactgaactcgctgctcaactacaaggagatgctcaaccgcggcggtgacaagcagtagccggagcgtgcaaggcggagggagaagggtagctagctgtaggatccaatccaaaaccatactgaaaaaaaaatcgatctttggtccatcaaccactagacctcgagtgtggattatgcagtgttgttcttattagcatcgttatgtaagaatcgctattttttcagcttgttaatttcaattggtttgtgttgctggcatc

SEQ ID NO: 139263 - DNA, 1872 bp, Zea Mays
cccaccaagtcagcaccagagcatccgctcctccgcggcgcgccgcgtgctccccgcagccccagccaccatttaacgccgggtcaccagacgccaatccaatccccctgcaccagacgccaatcccgatcaccgccgcccaacctcacctcccctccgtcccccgagccacctctgtaaccctgttcggtgcctctcactccggctgccagatggacagcgccgacgcggcgacggcgctgggcgcgtggatccggggctacttcacgccggccacgttcttcctcgtcgtcaacctcgtcatcggcaccatcgcgctcacctcccgcgccaccaagcagcgccgccgcagggagaactactaccacgacgacggcaacggccaccaggaaacgctgcacccgcagatggagcagccggggtacggccactactaccacccggaccccacgctgtacgcggcgccgcctccgcccgcgccgctcgcgcgcacgtcctctgtcctcgaccgcctcaggtcgctcggcctgtaccgcttccgctccggggacttcccgcccgagtacggcgccacgccgccgaaccacgcgcaggatgtgcccgctccggtggaggaggaagagacgatcgcgtcggcgcactacgcaaggagccggtccgagccggcgcctgctgcgcgggagggtgagaggaggccggcgccgcccagggtaaagaagtcgggctcggaggtgaggaagtcgcaggtgtcgcgggcggcgcccaggatcgtccaggcggtcaccgaggacgacgtctccgtcgaggaagccgaaggcggcggtttcaggcggaggccgtcgccaccccagcaagagtaccactaccggcaagaatacgtcactccgccgccgccggcacccgccccgctgcagcgcacgtcgtccgtgctggacaggctccgctcgctgggcctctacggcttcctcgctcccgacgaacccgccgccgccgcgtcagttccagcgagcgacggcttcgccaccccggcggacgagaagaggcacgcgcacacgcactacgacatcggccggtccgagccggcacgggagcagcaggacaagaaggagaagacgcaggggggcaactcaacaagggccaagtcgagctcgggggctaggaagacgcccgctcagaggcaggcggaggccggcgccgagtgcgtggacgcgagggcggaggcattcatcgacagcttcaggcagcagcagcaggtgcaccactaccaggaggaggaatacgtcccgcctccggcgcccgcgccgccgctgtcgcgcacgtcgtccgtcctggaccgcctccgctccttcggcctgtaccgcttccgctccggcgacctcggccccgaccttccctccgccaccgccgccacggagacggacaaggagaagcagcaggcggcgcactacgggcggagccggtcggagccggcgcgggagcagggcaagaagcaggacacgaggatgaacaagtcgagctcgagcggcgtcgtggcggaggcggacgcgcatcagtgcgtgaacgcgcgcgcggacgacttcatcaacaagttcaggcagcagctacagctgcagcgactgaactcgctgctcaactacaaggagatgctcaaccgcggcggtgacaagcagtagccggagcgtgcaaggcggagggagaagggtagctagctgtaggatccaatccaaaaccatactgaaaaaaaaatcgatctttggtccatcaaccactagacctcgagtgtggattatgcagtgttgttcttattagcatcgttatgtaagaatcgctattttttcagcttgttaatttcaattggtttgtgttgctggc

SEQ ID NO: 139264 - DNA, 1270 bp, Zea Mays
ctgatgcaggacctcccgcagccgccacctcaacccaggaacagagcgaggcgacgccgcggcacctcttctccggtaagtgagatcgcatatctcgtcgcatgcggcgaagaatttttaggtccggtagcttgttctctgctttattcgtggtgaagtttgggcggttcgaagttgatgaattgcttgtacgattcgactgggggtttgtcgtgcttattaggcacgattcgtcgttggttaggtggctgtagcatccctgcttctgttttgcactttctatgcgtatttttgcactctatatgtgttaaggttgacttaaatctgattattcgctcggttagatttggtatcctcatagtgtgtaggtctatctgtcttagaaatactaagtcaaatgttccgcattagcttgcaacccaaagtcttccgcagatagtaatgatatacggaatatcacatttggcagttgatattgattatttaggcgaagggaaatggcaaccgttccaggggatctgatctggcaggttgtgaggaagaacaactccttccttgtgaagcagttcggcaacggcaatgccaaggtgcagttcaccaaggagccgaacaacctctacaacatccactccttcaaacactcgggtttggcgaacaagaagactgtgacgatccagccagctgcaaaggactcggctgtggtcctctctactaccaagaccaagaagcagaacgcacctgcgaagctcagccacaagtctgtgatgcgcaaggagttccgcaagatggccaaggctgtgaaaaaccaggttagtgacaactactacaggcctgatctgaccaagccagctcttgctaggctaagctcggtgtaccgcagcctccaggttgccaagtccggtgtcaagaagaagaacaggcagtcctaagcgctaagtttgtgttctgtcagggggcatgttggtgctcgtagtcccagcttatatttatctatgttccaacagttgagacttgttagaactgagcaaaccatgttaagatgctgctgtgtgtcattccttaaaaaaattgccttgcactttgtgattactgtctcgttgctgtgtgtcattctatgacaaatcgtttgtcgcttgattgtgctttgtttgtaaacttgcttgtcgtgactagcacttgttatcgcatttttgattggttctgtaaacaatatccgataaacaagattagtatcctgcacgagtgcatgtttaaactatttttaacaata

SEQ ID NO: 139265 - DNA, 852 bp, Zea Mays
ctgatgcaggacctcccgcagccgccacctcaacccaggaacagagcgaggcgacgccgcggcacctcttctccgggaaatggcaaccgttccaggggatctgatctggcaggttgtgaggaagaacaactccttccttgtgaagcagttcggcaacggcaatgccaaggtgcagttcaccaaggagccgaacaacctctacaacatccactccttcaaacactcgggtttggcgaacaagaagactgtgacgatccagccagctgcaaaggactcggctgtggtcctctctactaccaagaccaagaagcagaacgcacctgcgaagctcagccacaagtctgtgatgcgcaaggagttccgcaagatggccaaggctgtgaaaaaccaggttagtgacaactactacaggcctgatctgaccaagccagctcttgctaggctaagctcggtgtaccgcagcctccaggttgccaagtccggtgtcaagaagaagaacaggcagtcctaagcgctaagtttgtgttctgtcagggggcatgttggtgctcgtagtcccagcttatatttatctatgttccaacagttgagacttgttagaactgagcaaaccatgttaagatgctgctgtgtgtcattccttaaaaaaattgccttgcactttgtgattactgtctcgttgctgtgtgtcattctatgacaaatcgtttgtcgcttgattgtgctttgtttgtaaacttgcttgtcgtgactagcacttgttatcgcatttttgattggttctgtaaacaatatccgataaacaagattagtatcctgcacgagtgcatgtttaaactatttttaacaata

SEQ ID NO: 139266 - DNA, 906 bp, Zea Mays
cacgccctggtataaaagaggcgagggtcactgatgcaggacctcccgcagccgccacctcaacccaggaacagagcgaggcgacgccgcggcacctcttctccgttgatattgattatttaggcgaagggaaatggcaaccgttccaggggatctgatctggcaggttgtgaggaagaacaactccttccttgtgaagcagttcggcaacggcaatgccaaggtgcagttcaccaaggagccgaacaacctctacaacatccactccttcaaacactcgggtttggcgaacaagaagactgtgacgatccagccagctgcaaaggactcggctgtggtcctctctactaccaagaccaagaagcagaacgcacctgcgaagctcagccacaagtctgtgatgcgcaaggagttccgcaagatggccaaggctgtgaaaaaccaggttagtgacaactactacaggcctgatctgaccaagccagctcttgctaggctaagctcggtgtaccgcagcctccaggttgccaagtccggtgtcaagaagaagaacaggcagtcctaagcgctaagtttgtgttctgtcagggggcatgttggtgctcgtagtcccagcttatatttatctatgttccaacagttgagacttgttagaactgagcaaaccatgttaagatgctgctgtgtgtcattccttaaaaaaattgccttgcactttgtgattactgtctcgttgctgtgtgtcattctatgacaaatcgtttgtcgcttgattgtgctttgtttgtaaacttgcttgtcgtgactagcacttgttatcgcatttttgattggttctgtaaacaatatccgataaacaagattagtatcctgcacgagtgcatgtttaaactatttttaacaata

SEQ ID NO: 139267 - DNA, 924 bp, Zea Mays
tcgatcgctagaaactagggtttacgagcacgccctggtataaaagaggcgagggtcactgatgcaggacctcccgcagccgccacctcaacccaggaacagagcgaggcgacgccgcggcacctcttctccggttgtgaggaagaacaactccttccttgtgaagcagttcggcaacggcaatgccaaggtgcagttcaccaaggagccgaacaacctctacaacatccactccttcaaacactcgggtttggcgaacaagaagactgtgacgatccagccagctgcaaaggactcggctgtggtcctctctactaccaagaccaagaagcagaacgcacctgcgaagctcagccacaagtctgtgatgcgcaaggagttccgcaagatggccaaggctgtgaaaaaccagccccatctgattgctgaaaagtctaatttgcattttgtttttgccttgcaggttagtgacaactactacaggcctgatctgaccaagccagctcttgctaggctaagctcggtgtaccgcagcctccaggttgccaagtccggtgtcaagaagaagaacaggcagtcctaagcgctaagtttgtgttctgtcagggggcatgttggtgctcgtagtcccagcttatatttatctatgttccaacagttgagacttgttagaactgagcaaaccatgttaagatgctgctgtgtgtcattccttaaaaaaattgccttgcactttgtgattactgtctcgttgctgtgtgtcattctatgacaaatcgtttgtcgcttgattgtgctttgtttgtaaacttgcttgtcgtgactagcacttgttatcgcatttttgattggttctgtaaacaatatccgataaacaagattagtatcctgcacgagtgcatgtttaaactatttttaacaata

SEQ ID NO: 139268 - DNA, 916 bp, Zea Mays
tcgatcgctagaaactagggtttacgagcacgccctggtataaaagaggcgagggtcactgatgcaggacctcccgcagccgccacctcaacccaggaacagagcgaggcgacgccgcggcacctcttctccggcgaagggaaatggcaaccgttccaggggatctgatctggcaggttgtgaggaagaacaactccttccttgtgaagcagttcggcaacggcaatgccaaggtgcagttcaccaaggagccgaacaacctctacaacatccactccttcaaacactcgggtttggcgaacaagaagactgtgacgatccagccagctgcaaaggactcggctgtggtcctctctactaccaagaccaagaagcagaacgcacctgcgaagctcagccacaagtctgtgatgcgcaaggagttccgcaagatggccaaggctgtgaaaaaccaggttagtgacaactactacaggcctgatctgaccaagccagctcttgctaggctaagctcggtgtaccgcagcctccaggttgccaagtccggtgtcaagaagaagaacaggcagtcctaagcgctaagtttgtgttctgtcagggggcatgttggtgctcgtagtcccagcttatatttatctatgttccaacagttgagacttgttagaactgagcaaaccatgttaagatgctgctgtgtgtcattccttaaaaaaattgccttgcactttgtgattactgtctcgttgctgtgtgtcattctatgacaaatcgtttgtcgcttgattgtgctttgtttgtaaacttgcttgtcgtgactagcacttgttatcgcatttttgattggttctgtaaacaatatccgataaacaagattagtatcctgcacgagtgcatgtttaaactatttttaacaata

SEQ ID NO: 139269 - DNA, 873 bp, Zea Mays
tcgatcgctagaaactagggtttacgagcacgccctggtataaaagaggcgagggtcactgatgcaggacctcccgcagccgccacctcaacccaggaacagagcgaggcgacgccgcggcacctcttctccggttgtgaggaagaacaactccttccttgtgaagcagttcggcaacggcaatgccaaggtgcagttcaccaaggagccgaacaacctctacaacatccactccttcaaacactcgggtttggcgaacaagaagactgtgacgatccagccagctgcaaaggactcggctgtggtcctctctactaccaagaccaagaagcagaacgcacctgcgaagctcagccacaagtctgtgatgcgcaaggagttccgcaagatggccaaggctgtgaaaaaccaggttagtgacaactactacaggcctgatctgaccaagccagctcttgctaggctaagctcggtgtaccgcagcctccaggttgccaagtccggtgtcaagaagaagaacaggcagtcctaagcgctaagtttgtgttctgtcagggggcatgttggtgctcgtagtcccagcttatatttatctatgttccaacagttgagacttgttagaactgagcaaaccatgttaagatgctgctgtgtgtcattccttaaaaaaattgccttgcactttgtgattactgtctcgttgctgtgtgtcattctatgacaaatcgtttgtcgcttgattgtgctttgtttgtaaacttgcttgtcgtgactagcacttgttatcgcatttttgattggttctgtaaacaatatccgataaacaagattagtatcctgcacgagtgcatgtttaaactatttttaacaata

SEQ ID NO: 139270 - DNA, 845 bp, Zea Mays
tcgatcgctagaaactagggtttacgagcacgccctggtataaaagaggcgagggtcactgatgcaggacctcccgcagccgccacctcaacccaggaacagagcgaggcgacgccgcggcacctcttctccggcgaagggaaatggcaaccgttccaggggatctgatctggcaggttgtgaggaagaacaactccttccttgtgaagcagttcggcaacggcaatgccaaggtgcagttcaccaaggagccgaacaacctctacaacatccactccttcaaacactcgggtttggcgaacaagaagactgtgacgatccagccagctgcaaaggactcggctgtggtcctctctactaccaagaccaagaagcagaacgcacctgcgaagctcagccacaagtctgtgatgcgcaaggagttccgcaagatggccaaggctgtgaaaaaccagcctccaggttgccaagtccggtgtcaagaagaagaacaggcagtcctaagcgctaagtttgtgttctgtcagggggcatgttggtgctcgtagtcccagcttatatttatctatgttccaacagttgagacttgttagaactgagcaaaccatgttaagatgctgctgtgtgtcattccttaaaaaaattgccttgcactttgtgattactgtctcgttgctgtgtgtcattctatgacaaatcgtttgtcgcttgattgtgctttgtttgtaaacttgcttgtcgtgactagcacttgttatcgcatttttgattggttctgtaaacaatatccgataaacaagattagtatcctgcacgagtgcatgtttaaactatttttaacaata

SEQ ID NO: 139271 - DNA, 933 bp, Zea Mays
ctgatgcaggacctcccgcagccgccacctcaacccaggaacagagcgaggcgacgccgcggcacctcttctccggtaagtgagatcgcatatctcgtcgcatgcggcgaagaatttttaggtccggtagcttgttctctgctttattcgtggtgaagtttgggcggttcgaagttgatgaattgcttgtacgattcgactgggggtttgtcgtgcttattaggcacgattcgtcgttggttaggtggctgtagcatccctgcttctgttttgcactttctatgcgtatttttgcactctatatgtgttaaggttgacttaaatctgattattcgctcggttagatttggtatcctcatagtgtgtaggtctatctgtcttagaaatactaagtcaaatgttccgcattagcttgcaacccaaagtcttccgcagatagtaatgatatacggaatatcacatttggcagttgatattgattatttaggcgaagggaaatggcaaccgttccaggggatctgatctggcaggttgtgaggaagaacaactccttccttgtgaagcagttcggcaacggcaatgccaaggtgcagttcaccaaggagccgaacaacctctacaacatccactccttcaaacactcgggtttggcgaacaagaagactgtgacgatccagccagctgcaaaggactcggctgtggtcctctctactaccaagaccaagaagcagaacgcacctgcgaagctcagccacaagtctgtgatgcgcaaggagttccgcaagatggccaaggctgtgaaaaaccaggtactagcacatggaatcacattatgcttgattgtacggtaatatggcagtgtttgttttgctactgcaatgcgtggcttttttatgtattggatattgtttccaacacatgaaatttgttgct

SEQ ID NO: 139272 - DNA, 672 bp, Zea Mays
aacaaacaaaatggatcgtggcccactggaccacggtcgtagacgggctgggcgtcgaagtctctccgctcaagacacgggcccacgtccacagatcggaggagagcactggcttgtatccctctggcctctctcgtctccagcgacggcagcgggcgagggttacgcgaaggcgaagcggagtagtggaagcagaggcggcagccatggcggtgatggagaagctcaagatctttgtcgttaaggagcccgtagtcgcggcctcctgcctcatcgctggattcggtctctttcttccagcagttgtccggccaatcctggattcatggcagaccgcggaacaagttcctccacctcttctaaatgatgtggttgcaggtgtcaccggcaagaaaaagtagtaaacttgcattgttttctcatgccaatattgccccacattttcttccccgtgttttttctggcgaccagattggaaggcttttcccaagagtgtcttgaactctagatggtatccgcggaataatcattgtacctgaatcatatactgcaatgtggcagttatgaaaatctttcccctcctacaaaggttgatagaatgccataccctttgaactgtgttcgagatgtcatcgtttatgatttctcggtcgagctgtatagatttcgttt

SEQ ID NO: 139273 - DNA, 1861 bp, Zea Mays
gttgtagcaagtaaaagattactctcttgtttcctcttttcgcttttcgctgagacgggaaacggtttggtgtttggtttgggtcggaaataatcaaaggattggcggggacgcacgactcgtggggcccgcagataaaggggctgaccgggtcgctggagccctccgacgacgaggccctgcggccggacgaggaggccggcgtcggcgcggcggaggccgcgccggcggaagcggacgacggcatcgaggtctgctgcttcgacaaccgcggtgtcggccgcagctccgtgctccccaacaaatcctactactcgacggcaatcatggccacggatgccttggccttgatcgatcatttggggtggaagaaggctcacgtcttcggccactccatgggtgccatgattgcttgcaagctagctgccatggcacctcacaggctatgttcgctggcattgcttaatgtcaccggaggtggctttcagtgcttcccaaaggtagacgcgcagatgctatctcttgcattccgtttcttaagggcaaaaactccagaggaaagagcccttgtggacctggaaacacattatacgaaggaataccttgaggagactgtcgggtcatgtactagaagaatggtcctctatcaagaatatgtgaagggcatatcgtcaacagggatgcaatccaattgtggttttgaagggcaagttaatgcatgctggactcacaaaatgactactaaggaactagatacaatacggtctgccggttttctagtttcagttattcatggaaggtacgatatcattgcacaattgtgccatgcaaaacgtctagcagaaaggcttcttcctgttgcaagaatggtagtgcctcatggtgcacatctagtgagccatgaaagaccagacgaggtgaacaatgcacttatggatttgataaaggccaccaaatctgagataaaacctgaagagtggtcagcccagcccgagaacacgtcggaaaccggggcgctcatttctgcgagacccatcaccgtcatggtgcgaacagatgcaggcgtagacgctaccgcagcggtctataacttgcttgggaagctgcaactgagcttcctttatctcataggcatgatactcatggggtttgaactcatgaggaacattgtaagggtgatgaagccagtaagggttgcagcaattgagtcgtaagtcataagaaccaaatacatgtacactgttcttgagaccttgtggtagtcgagatgggagatgatgattttagagtagcatctgctaacacatgtgaaactcggcctgctcctagtagcagaataatacgaaacactgagaaaacagtgcgcgcctggacagaaatgtctatggcaaggttgcccgttggcgtatgtacctataagagtatctgtaccataccgagatttggaatcgaagctttgctgcttatttcgtgtcgcgtcgctgggcatcttctttcctacatggcgctttacaacgctgcaaggtgacaaatagtagcgtaaaactgaagagagaacgaaagtggcagccacaactgggtttgttttgggtgtgacgtgtgcggtacctaataaaagtttagccacgtcaattctcttgccgtgctttcgggggaaaaaagaactgggtttcactggtgcaaatggcacgaaatatttttcctggtctgaatttgtttgtagtcgatcgtatctgagtgtaaattcgtttatttgagtttagatcggttaggataggagcctgaatatttaacatttgataccgtacctgaacttagatatttgtatttatatattcatgtatatggatagttggatact

SEQ ID NO: 139274 - DNA, 2063 bp, Zea Mays
tccgacggctataaataaccgccccccttcctccgcagctctgctctgctcccccgcgtctttccctctttttccaagcggtcaaagccaaatcagtcgcgagcggcggcggtaacgagaacgagacgcgcgcgctagctgaatcaggagcagggcccagggaggagagtggagagccgccggcgagcagcaatgccttactgcgaggtgggcaggtacgcggacggcgacaagtgggagggcgtccgcctcttctaccgccgctacggcagcggcgccaccaaggtgctcctcgtcatcggattggcggggacgcacgactcgtggggcccgcagataaaggggctgaccgggtcgctggagccctccgacgacgaggccctgcggccggacgaggaggccggcgtcggcgcggcggaggccgcgccggcggaagcggacgacggcatcgaggtctgctgcttcgacaaccgcggtgtcggccgcagctccgtgctccccaacaaatcctactactcgacggcaatcatggccacggatgccttggccttgatcgatcatttggggtggaagaaggctcacgtcttcggccactccatgggtgccatgattgcttgcaagctagctgccatggcacctcacaggctatgttcgctggcattgcttaatgtcaccggaggtggctttcagtgcttcccaaaggtagacgcgcagatgctatctcttgcattccgtttcttaagggcaaaaactccagaggaaagagcccttgtggacctggaaacacattatacgaaggaataccttgaggagactgtcgggtcatgtactagaagaatggtcctctatcaagaatatgtgaagggcatatcgtcaacagggatgcaatccaattgtggttttgaagggcaagttaatgcatgctggactcacaaaatgactactaaggaactagatacaatacggtctgccggttttctagtttcagttattcatggaaggtacgatatcattgcacaattgtgccatgcaaaacgtctagcagaaaggcttcttcctgttgcaagaatggtagtgcctcatggtgcacatctagtgagccatgaaagaccagacgaggtgaacaatgcacttatggatttgataaaggccaccaaatctgagataaaacctgaagagtggtcagcccagcccgagaacacgtcggaaaccggggcgctcatttctgcgagacccatcaccgtcatggtgcgaacagatgcaggcgtagacgctaccgcagcggtctataacttgcttgggaagctgcaactgagcttcctttatctcataggcatgatactcatggggtttgaactcatgaggaacattgtaagggtgatgaagccagtaagggttgcagcaattgagtcgtaagtcataagaaccaaatacatgtacactgttcttgagaccttgtggtagtcgagatgggagatgatgattttagagtagcatctgctaacacatgtgaaactcggcctgctcctagtagcagaataatacgaaacactgagaaaacagtgcgcgcctggacagaaatgtctatggcaaggttgcccgttggcgtatgtacctataagagtatctgtaccataccgagatttggaatcgaagctttgctgcttatttcgtgtcgcgtcgctgggcatcttctttcctacatggcgctttacaacgctgcaaggtgacaaatagtagcgtaaaactgaagagagaacgaaagtggcagccacaactgggtttgttttgggtgtgacgtgtgcggtacctaataaaagtttagccacgtcaattctcttgccgtgctttcgggggaaaaaagaactgggtttcactggtgcaaatggcacgaaatatttttcctggtctgaatttgtttgtagtcgatcgtatctgagtgtaaattcgtttatttgagtttagatcggttaggataggagcctgaatatttaacatttgataccgtacctgaacttagatatttgtatttatatattcatgtatatggatagttggatact

SEQ ID NO: 139275 - DNA, 92 bp, Zea Mays
ccttccgtttcagcatgttgcacgtggcttctgctggtgtttcagcaggtgtcgagctcttcgtgccttcattacgttttcgtttctatgtt

SEQ ID NO: 139276 - DNA, 116 bp, Zea Mays
tttttttcttttttcttttaaaaaagagtttaggtatcctagaaaagaagctggacattgtagcctagcaccatgtctccagcatctttatctatacatgaagtaacacatatctc

SEQ ID NO: 139277 - DNA, 103 bp, Zea Mays
gggtccctgacatggctctcaagtctatgttgatccgtcttcgaccgtgtccccggcatggccctcgagtctatagactcaactcactatctaggactcgttc

SEQ ID NO: 139278 - DNA, 1253 bp, Zea Mays
tagatacttagatggcatcacaatgtgtgagctataaaagaatgcctgttttagggagaacagagagctgaatgctgttcaaaaggtcaattgcaatgttaacactctttttgaaacataatcttttcaaataaagctacagatgcttctatgaaaaaatgatgtaaattacttgtgacttgttctgtaaatcgtttcttagttgttttacaactcattcagggataacatggtggatcctgctgctgtctttgggatgctttttggaagtgactattttgaagattacgttggccagcttgctctagcatctatagcttcagtggaggttgaggaaaactcaaatagtcaagaggcaagagcaaaagttcaagaaaagataaaagaattacaaagagaaagagaacaaaagcttactcagagtctgaaggaccgacttcaatcatatgtagatgggagaaatgatgaatttgtgagctatgcaagcgcagaagctaggcgtttatccgaagcagcatttggcgaggctatgcttcacaccattggttatatttatgtccggcaagcagcaagagaactcgggaaaagtagaatttacatgggtgtaccttttatagctgaatgggttagagacaaaggacaccacattaaatcacaggttaatgctgcttcaggtgctatttctctaatacaacttcaagaagggatgaaaaagatggaggggagtgaggacagcgaggagcaacttatgaagagttttgaggagaaaaaagatgccatgctcagctcgctttggaaaatcaatgtggttgatatcgagtccacgctctcacgtgtctgccaagcagttctgagagatagcatggtctccaaagatgtcctgaagctgcgagccaaagcgttgaaaaagctcggaacgatattccaaggcgcagagtctatgtaccgtcgtgaaaacagcctgcgcgttgaaacgagcacagaccaacaagccgcttcgtcacactgaagccacctgtggaccaccgtgtaggaatggatttggtgttttgtgtgtgtgtgtggctttcttctttgtttgtaattgtgtatgctatattaattttcttgtagaagatgtgaaacatttaacacaaagattttaactgctattgatgcagaaatataacctgcagctgccttttttctttcttgatggtagaattgtatttgtacacttatttgccaagtgtgttggcttcattgttcactat

SEQ ID NO: 139279 - DNA, 1538 bp, Zea Mays
acgaaactgacgcgagggcccagctcacggacctgtcctgtgtcctccgcagcacagcacgaccccatcggcgtcaccccggcgacttctgcgtcctctgccctccacgctcccccgctctgccaggcttcccagaagatttggttgatttccccccaatccagtgattccatccctgttctccacttccaccggaacctcccagagacttccagaaggctctagcgacccccgccgctttagagctacccgcggcgagattcaggagctgcctgccatggtgaaggacagcgcctactacgatgtcctggggctcagcgtcgacgcgtcccccgccgagatcaagaaggcgtattacattaaggcgaagctggtgcatccggacaagaatcccgggaaccctgacgcggcactcaagttccaggaacttggagaggcttatcaagtcctaagtgatcctgggaaaaaggaggcgtatgataattatggaaaggagggtattccccaggataacatggtggatcctgctgctgtctttgggatgctttttggaagtgactattttgaagattacgttggccagcttgctctagcatctatagcttcagtggaggttgaggaaaactcaaatagtcaagaggcaagagcaaaagttcaagaaaagataaaagaattacaaagagaaagagaacaaaagcttactcagagtctgaaggaccgacttcaatcatatgtagatgggagaaatgatgaatttgtgagctatgcaagcgcagaagctaggcgtttatccgaagcagcatttggcgaggctatgcttcacaccattggttatatttatgtccggcaagcagcaagagaactcgggaaaagtagaatttacatgggtgtaccttttatagctgaatgggttagagacaaaggacaccacattaaatcacaggttaatgctgcttcaggtgctatttctctaatacaacttcaagaagggatgaaaaagatggaggggagtgaggacagcgaggagcaacttatgaagagttttgaggagaaaaaagatgccatgctcagctcgctttggaaaatcaatgtggttgatatcgagtccacgctctcacgtgtctgccaagcagttctgagagatagcatggtctccaaagatgtcctgaagctgcgagccaaagcgttgaaaaagctcggaacgatattccaaggcgcagagtctatgtaccgtcgtgaaaacagcctgcgcgttgaaacgagcacagaccaacaagccgcttcgtcacactgaagccacctgtggaccaccgtgtaggaatggatttggtgttttgtgtgtgtgtgtggctttcttctttgtttgtaattgtgtatgctatattaattttcttgtagaagatgtgaaacatttaacacaaagattttaactgctattgatgcagaaatataacctgcagctgccttttttctttcttgatggtagaattgtatttgtacacttatttgccaagtgtgttggcttcattgttcactat

SEQ ID NO: 139280 - DNA, 1442 bp, Zea Mays
acgaaactgacgcgagggcccagctcacggacctgtcctgtgtcctccgcagcacagcacgaccccatcggcgtcaccccggcgacttctgcgtcctctgccctccacgctcccccgctctgccaggcttcccagaagatttggttgatttccccccaatccagtgattccatccctgttctccacttccaccggaacctcccagagacttccagaaggctctagcgacccccgccgctttagagctacccgcggcgagattcaggagctgcctgccatggtgaaggacagcgcctactacgatgtcctggggctcagcgtcgacgcgtcccccgccgagatcaagaaggcgtattacattaaggcgaagctggtgcatccggacaagaatcccgggaaccctgacgcggcactcaagttccaggaacttggagaggcttatcaagtcctaagtgatcctgggaaaaaggaggcgtatgataattatggaaaggagggtattccccaggataacatggtggatcctgctgctgtctttgggatgctttttggaagtgactattttgaagattacgttggccagcttgctctagcatctatagcttcagtggaggttgaggaaaactcaaatagtcaagaggcaagagcaaaagttcaagaaaagataaaagaattacaaagagaaagagaacaaaagcttactcagagtctgaaggaccgacttcaatcatatgtagatgggagaaatgatgaatttgtgagctatgcaagcgcagaagctaggcgtttatccgaagcagcatttggcgaggctatgcttcacaccattggttatatttatgtccggcaagcagcaagagaactcgggaaaagtagaatttacatgggtgtaccttttatagctgaatgggttagagacaaaggacaccacattaaatcacaggtgctatttctctaatacaacttcaagaagggatgaaaaagatggaggggagtgaggacagcgaggagcaacttatgaagagttttgaggagaaaaaagatgccatgctcagctcgctttggaaaatcaatgtggttgatatcgagtccacgctctcacgtgtctgccaagcagttctgagagatagcatggtctccaaagatgtcctgaagctgcgagccaaagcgttgaaaaagctcggaacgatattccaaggcgcagagtctatgtaccgtcgtgaaaacagcctgcgcgttgaaacgagcacagaccaacaagccgcttcgtcacactgaagccacctgtggaccaccgtgtaggaatggatttggtgttttgtgtgtgtgtgtggctttcttctttgtttgtaattgtgtatgctatattaattttcttgtagaagatgtgaaacatttaacacaaagattttaactgctattgatgcagaaatataacctgc

SEQ ID NO: 139281 - DNA, 1480 bp, Zea Mays
acgaaactgacgcgagggcccagctcacggacctgtcctgtgtcctccgcagcacagcacgaccccatcggcgtcaccccggcgacttctgcgtcctctgccctccacgctcccccgctctgccaggcttcccagaagatttggttgatttccccccaatccagtgattccatccctgttctccacttccaccggaacctcccagagacttccagaaggctctagcgacccccgccggtatcgacctctgcctctccttcgtggcggaagatccggcccttctccccccgtcgattaccgtcggcctcctccattgccgctggcattaaccgtctcttggtgcctgtagctttagagctacccgcggcgagattcaggagctgcctgccatggtgaaggacagcgcctactacgatgtcctggggctcagcgtcgacgcgtcccccgccgagatcaagaaggcgtattacattaaggcgaagctggtgcatccggacaagaatcccgggaaccctgacgcggcactcaagttccaggaacttggagaggcttatcaagtcctaagtgatcctgggaaaaaggaggcgtatgataattatggaaaggagggtattccccaggataacatggtggatcctgctgctgtctttgggatgctttttggaagtgactattttgaagattacgttggccagcttgctctagcatctatagcttcagtggaggttgaggaaaactcaaatagtcaagaggcaagagcaaaagttcaagaaaagataaaagaattacaaagagaaagagaacaaaagcttactcagagtctgaaggaccgacttcaatcatatgtagatgggagaaatgatgaatttgtgagctatgcaagcgcagaagctaggcgtttatccgaagcagcatttggcgaggctatgcttcacaccattggttatatttatgtccggcaagcagcaagagaactcgggaaaagtagaatttacatgggtgtaccttttatagctgaatgggttagagacaaaggacaccacattaaatcacaggttaatgctgcttcaggtgctatttctctaatacaacttcaagaagggatgaaaaagatggaggggagtgaggacagcgaggagcaacttatgaagagttttgaggagaaaaaagatgccatgctcagctcgctttggaaaatcaatgtggttgatatcgagtccacgctctcacgtgtctgccaagcagttctgagagatagcatggtctccaaagatgtcctgaagctgcgagccaaagcgttgaaaaagctcggaacgatattccaaggcgcagagtctatgtaccgtcgtgaaaacagcctgcgcgttgaaacgagcacagaccaacaagccgcttcgtcacactgaagccacctgtggaccaccgtgtaggaatggatttggtgttttgtgtgtgtgtgtggctttcttctttgtttgta

SEQ ID NO: 139282 - DNA, 1576 bp, Zea Mays
atttcaaacccgaattcatgtccaccgggtacgaaacccgtgggtatccatacccacgggtccaattgccatccctatgtgggtggagctcgctggtgcacggctggaggcagttgcagccttgcaggtgatgatggcgtggaaccccaggacgacctcatgcagtcctgcttgcattttgagtgggccgtattttacttgttgagctggacctagacacgtgagaaccaggtcgtgaagagatgaagacgtatgggacacactggccattggatttgcagcggatggcagtgatcgcgtgactgcagaggccagtcgatgagcgcgactgcagacaatcttgttccccgtccgcgaggcgcggagccccgactccatcgccgggagcccgggacccctacgccgcgccgctgccaccaacagcgacagccgagagggcgagccgcctgccgcggggccgcgacacgaccggcaaccggccgaggggcgaagcaacaggccagcgtggacgccgatcgtgccaagcgcccagtcccgattccgccctgtctaacagtacgagactctaagtccgccctggtgagtgtgcttcactgcttctccggttcttcccctcgcactggtcccgatggaatccgacgccgaggaggcggcggcggcggcggcggtggacccaggcgctggacggctgaaggggagcccggagctgactgtggacgcggacatgcgggaggtggcgaagagggccgcgtggagcgtcagttccttcaaggacggcaacggcgtcgcagccctgcgcgacgacaacctcgacgcctactggcagtctgatggggcggagccgcacctggtgaacatccggttccagaagaaggtgcagctgcagcttgttgctctctacgtggatttcaagctcgacgagagctacacgcccagcaagatctccatccgggccggggatggcttccacaacctcaaggagattaaaactgtggagcttgcaaagccagttggatgggttcatatatcattatccggggctgatccacgcgaaacattcattcacacatttatgctccaaattgcggttttatccaatcatctgaatgggagggatactcatgtccgacagatcaagatctatgggccaagaccgagccctgtcccccaccagccgttccatttcatttccagggagttcatcacgtactccactattagatgacagtgggtgcgcaaccaggagaaggaaacactgaggatcagtcggcagctcatggctctggatgatggtgcgcagttagggagtgtttggttaaaagaaccacttcatcgaagatgagatggtgcatcgtgaatctattgatcaaatttgatgagataacctcattgctcgtattaatactaactaactatgaggtggggtggtgatggatcaactcgttttattccacaaactaaaaaaaatgagaagtgagaaaatgatggtctagcttatttctcaaactaaacaccctattaatctctttgccttactccgtactgtctgtccggtcttgggcctgtagtagtggtt

SEQ ID NO: 139283 - DNA, 3592 bp, Zea Mays
gttccttccccaactatcgttaggcttctccaccccgccctccccgccctccccgccgaacgcgcctcactctccctccatgcagatcaatgcgtccttccaccccaaccgtgctcctcgcccttctctcgtcgtcctcgttccccctagactggcgtggagtgaagatccatccggactccgattgatttcttctcctgctggtaaaagaaacggagagattcggccaagattgggatcaatctgcgcatggttgcaggtgatcaagatccaatacttgaaaataggatgttgacatgttactgtttagatgacaccagatgataatgcccttatagctctcaaaaaaggcagtaaacttatcaagtatagtaggaagggaagacccaagattcgtgagttcagactttctagtgatgaaacatcattggtttggtattcccatagcaaagtgaagtaccttgtactgtcttctgtctctagaatcattcctggacaaagaactgctgtatttaggaggtttttacgccctgagaaggactacctatcattttctttgatatacaagaacggacaacgttcccttgacctggtttgcaaggatcaagcagaagttgaggtctggttttcaacgcttgaggcacttattacttcatgccgtaaaagttattcagctgatggtccaagtgatagattatcagtttctgacgaagtatcacattaccaagatacttttcatgatacaacactagatattgcatcgagtatcacacgtacttttaactcagcaaaaacagatgttgtatctgatcgtgcaaatatgctaagagcaagtacagacagtagccggcttagtatttccagtgcccctagttcttcaagtcaaggttctggacaagatgacattgaatcccttggtgatgtttatgtgtggggtgaggtgtggactgatatgatccctgcagaaggatccgcaaactatttgtgctccaaagcagacattttaattcccaaaccacttgaatcagatgttgtcttggacgtacaacagatagcgtgtggttataggcacattgcactcactactaggcaaggagaagtatttgcatggggcgaagaacttggcggacgacttggtcatgggaccgatgcagatattagccgtcctaaacttgtcgaagccttagcagtgtcaaatgtagaatatgttgcgtgcggcgagttccatacttgtgctataactgcctctggtgatttgtacacttggggtgatggatactacaatgctggattgcttggacatggtgctggaactagtcactggcttccaaaacgagtctcaggacctttagaaggggttcaggtattgtctgtttcatgtggttcatggcattcagcactgaccacatcaagtggtaaagtgttcacctttggtgatgggacatttggtgcccttggacatgggaatcgtcatactgtcgcatatccaaaggaagtcgaaactttgagtggatttagaacaataaaagttgcctgtggactctggcattctgcagcgattgtggagaccactaatcaggcaggtgtgaatgtgatatccaggaagctatttacctggggtgctggtgataagaatcccctaggtcacggggataaagatgctaggctagttcctacttgtgttcaatctctcattgattataatttccatcaggtagcttgtggacatagtatgaccattgccctttctacatctggtcatgttttcacaatgggcagctctagcaatggccagcttgggaatccaaaatctgatggtaaacatcctaccccagtacaagataggctggctggagaattggttgaagagatctcatgtggctcatgccatgttgcagtcttgacttcacgaagcgaagtatatacatggggaatgggagccaatgggaggctgggacatggtggtgttgaagataagaaaaaaccaactcttgtggaagcattaaaagatcgtcacgttaaaagtatagcatgtggttctaatttcacgacctgcatttgtatacataagtgggtttcaggtgctgatcagtctgtctgctcaggttgtaggcaaccatttggcttcacaagaaagagacataattgttacaattgtgggcttgttcattgccatgcatgtagttcaaaaaaagttctgaaagctgctttggcaccaactcctggcaaaccacatcgcgtatgtgattcatgcttcatgaagcttaaggcagcggagaccagcagcaacagctcacatagcaaaagaaatgccattgctcgtcgctctgttgatagcaaagacaggtcagagagaccagaaataaggtcttccaggcttgcaactggatcaacagcagaaccactcaagcaagctgagctgaaagcagttagaaacgagataaaaccagatcctatgtccacgatgagggcaccccaagttccttccatgctaccttttaacaatcttgcttttggcgcaacatttggtggtccagctagtctgaagcccatgacaatggctccaatgccaatggccatgcctatgtcaccagctcctctcacaaagaagccaactccagcagcagcaactcctctttgtggtaaaagtgataccgataacttgaagatggctaaacaggtgctgaatgaagatatctcaaagttgcaatctcaggttaataaactgaaacaaaaatgtgatgcccaagaagagcaactgcagaaagcggaaaggagagctgaacattctgcctctacagctgcagaagagtcttcaaggcgtaatggtgtcttggagttcattaggttccttgacaatgagctcaagagcatcgcagatagggtgcccagcgacgctgccgacggcttaaaagccttgcaaaaccattcggagaggtttctcacagaacaaggtgttcgtccactggaagccacaggtatgcatcgtaagtgcgcaagcataggcaacctcgtaatgtctcaggacggcagtgctggaaacgcgagcagctcggctgcttccttggcgagcgagtctccatgccaccgtatcatggagaacagctcgagagctaacggcgacttagcaccgaagctcggtggtacccatggagaagtgcagctgattgagcagtttgaaccgggggtgtatgtgacgctcatccagcttagagatggcactaaggtgttcaagcgtgtccggttcagcaagaggaggtttgcggagcagcaggccgaggaatggtggagggagaaccaggagagagtgttcaggaaatacaaccacccggccaactaaccagcctcaccagacttcaccattggacacttcaagaagaaggcaaagttttcttcatgttgcttggggcattgctcctgcggctgtgtgccgtgggcctgtggcgatgtagaattaggttgtggatggggaagatgctgatgtagattctcattctgttgttgtttacctcctacagtttaccctttctctagctcacctcctacagtttactgtttcgcagttttgatatctcaaattattcattcaaca

SEQ ID NO: 139284 - DNA, 1628 bp, Zea Mays
cccatcccccctatatataaacaaacgcacctggcacccgccacaaaaaggactcagcaacgcaaggccagctcgagacaagtcagggccaacagaaacaaccaccaccacagcagcacgcgagaaacaaacaagaagagcaagcaagcaagcagatcgcaacaaccgcgcgcggcatggcgatggccgtgagcgggaggtggacgcgggtgaggacgctgggccgcggcgcgtcgggcgcggaggtgttcctggccgccgaccaggcgtcgggggatctgttcgcggtcaagtgcgcgccggcggcggcgggcgcggagctgctgcggcgggagcgcgcgctcatggcgggcctccgctcgccgcacgtcgtcccatgcatcggcggccgcgcggggcgcgacggctcgtaccagctcttcctcgagtacgcgcccggcgggtcgctggccgacgtggccgcggcccggagcggcgggcggctcgaggagcgcgccgtcgcggcgtacgcggccgacgtggccgcggggctcgcgtacgtccacgccgccggcctcgtgcacggcgacgtcaagccgcggaacgtggtcgtcggcgccgacggccgcgccaagctcgccgacttcgggtgcgcgaggagggccgcggacgacgacgccgcgctgccgatcggcggcacgccggcgttcatggcgccggaggtggcgcgcgcggaggcgcagggcccgcctgccgacgtctgggcgctgggctgcaccgtcctcgcgatggccaccggccgcgcgccgtgggccgccgccgccggcgacgtgcttgccgcggtgcgcctcatcgggtacacggacgccgtccccgaggtgccccagtggctgtccgccgaggccaaggacttcctgggccggtgcctggcgcggcgccccggcgaccggtccacggcggcgcagctgctcgagcacccgttcgtcgcctccaagagcacgctggacctggacggcgccaagggcacgtgggtgtcgccaaagagcacgctggacgcggcattctgggagtccgagagcgacagcgacagcgacgacgaccaccgccaccaccacgacgtcgacgtcgacgcggtgtcggcacagagcaccgccgacaggatcggcgcgttggcctgccctgcttcggcgctgccggactggtgggactccgacgagggctggatcgacgtgctctccgcaccagccgaagcatcgtccgacgcgacggtggacgagggcccttgcgtcggcgacggcggtgccggaacagaggaagaagagagggcagaccaggccgccgagcccctcgacacggacgccgacggcgcccacaatgcaggagaagctgacgctagcccgcctgatcgcgagtggcatctccgtgtgagttcaccctgtgatggtgaaatgcaatgtactagattgttgtgtgacacaaacaacaatgcaatggatttccttctttccaccaccccaaatttgccctgtttatcggtcggcttcatggatttcaagaatctctgttctttcctttcctcccattctgtttctggcataggatcgccgagtcgaacattctcgttagctgctacgaattcacacacgtaa

SEQ ID NO: 139285 - DNA, 800 bp, Zea Mays
acccacgcggaaaaaaaggaaaaaggctcgattcgctgttgcctcattgcctgccacagctcgccgcggacgccgtcgccgctcaagtgaagtccggagtgggggcttgcgatctccgctgcgggcgcggaagatggctgacccagagttggaagctatcaggcagagacggatgcgagaactacaacacggtgcggcaaatcagcaaaatgcgggccaacaaaaggctcaggaagacgcgaaacaggaagctgaggaacgccggcagatgatgcttgctcagatattatcttctgaagcaagagaaaggctttcccgcatagctttggtcaaacctgacaaagcaagaggggtggaggatgttttgctgagagctgctcaaactggtggaatatctgagaaggtgtctgaagaaagacttatctcccttctagaacaaattaacagccacacaagcaagcaaaccaaagttacgattcagaggcgtcggaatgtccttgacgacgatgattagatgcaacctgcaaggctctgcttcgagtgtattattggcttgtgataaattaaaagtggtaccgaactgtttagacaatgatctcatgcgactatcagcagcaatgaaaacttggtacttggtagactatttcattggatattcggcggtatatgatccgatgtcttattttggtgtgtgtgcccccatcgaggacagtcgatattggctgtgtttatccccgaaacactgttcttccttgagtcatggcattattaatgggtgcgttttgcactcattttatttc

SEQ ID NO: 139286 - DNA, 1777 bp, Zea Mays
ggttccgccgataagctacagtgttctacaaacagacaagccacatggtttcttgttttgcacaaggagattcagcaaaacgatgtagtgtgtacagaagcttgaagaatcagctgcagatcgattacacttgagcctattcttctaatcaagtaacatggactcagttctatgatcattggctcattgctaaaaaaaattgcctcgggcagtaggtagacacgtataactatttatctatgagcaaaaaaggaacatgccaatgccaatgaaacaagcatatctaactagatgcctactggatatcaaaacaggtcaagccaaacatgttacatccaagttttgatgcctttgggatatccaaaccagctgatcagtgctcaatattaaaaagcgggatagaatgacatgagaccccctacataccctaacccaccaaacaaattcatggatccttaataacaaattcataaatgcaagataatccattgagatcaacacatctctaattaccagccatacagactagcagccatgtcaagcagtaagagacatgcaaacagtcatacatatttcaaatttgcaatttaaaacatctcaagccatctactaaacaaagtagcatacctgctcagcatttacctgaaaagactgacaacaactatcacaagaaaattggtacgatttcttgcagtgcaccctcactctgggccatcatcatctccaacacatagagacttcagaaacaaaggtaacaatcattcagggaagcacaaggcataacagtacaaaccatccaagtcatgataactcaaaatcacgaattaggtgcaacttcaaaacaacacacctgacctcaattacctctcacgtttgtgttcacaactcttattagcatggaaaactgcagaaaataaaaagtacttgcaatataggttgttctaacctctaatatattatccagctgatagtaaagataccacactgagtccagcaacactagtaccacgacaaaacggataacccattctcatataggccatagcagcagatcaaaacttcccgagcatcggaccaccacatcatctcttgaggttgagcaagaccaccgcgatggcagccgtgacagctgctccagcagccgcggcagccacaagagcgggagacaccacgccctcatccttaggcgtcccggccctggcagaaacggaatcacgtccctcctcttcctccttcccgcccttgccctcggcagtggcggaacccttcagggtctcgatctcctcctcaagggcggccttctcctggtacgcggtctgcagctggtccccgagccttgcgcccctgcgcatctcctcctcatggctggccttctctgcggctaggaggccctggagacgctcgacctcggcgcggagcgtggcggcctcgctctctttggtggcggcgacttgctcggcagcggcgacctcctcgcgggcctgggacaccaggacctcgaggcgccgggactcagaggacaggaaccggttctcgtgtcccacggcatcgagcttctcctccaggtcgcgcttcgccgcgcggagggcctccatctcgtccgccaaattgtggagcttgggcgtgctgtccccgccgttgatggagatctcgaagtccgcggcggcggcggcagtgggggaggcgaacgtctcctcgccgttctccatcggaaaccctcctccccctctcgcggcggcgcggtggaggtggatgcggtgcgagggtggaaatggga

SEQ ID NO: 139287 - DNA, 1082 bp, Zea Mays
cgagaaggggggacaggagacacgaccagcgctactgcccggcccacacaactcaacaccagaccaccagagtgccaccgaaacgtcatctcttggttcgaaacgcccgccgccgctgaggccgagcgacgtcagcgcctcgcgaacgcgtgcatggactgctcctcggcgccgatcgacacgcacaactccgcggccgaggaagccgccctgccgaggaggataccttcggccccggaggcatcctcgtccggcctcggcctgcagtggatgcgcggctctgtaaccctgtcgctgcggacgcccgatcaggagcccgcggccgtggcgctctcgctcaacaccaggcatccgcagggccatctgcaggaggagcttgcgacggcggcggcggcggcggtcgtgcatgagggcgcgcaggcgcaggcacagcagcccctcggcgagagggacatgcccgaggagcaccgcgccatcgccgacatggcggcccggctcgggatcgcggcgggcgcgcgggaccgcgcggtggaggtgttcatgaggatggaggagcgcaagggcaagtccaagtcgcaccactactacaccaagggcgcggggcggagcggcgacgcgctgtacgcggcgtgcctctacgtggcgtgccgtagcgcgggcgcgccccggacgttcaaggagctggcggcggcgacgcgcgacgggcccgcggcgaggaaggacatcggcaagctcatcgcgctcatccgcaagcgcctcggggacgaggccggcggcgaggccatggacatgggcgtcgtccgcgcggcggactacgtggagcgcttcggctcgctgctggggatcggggagggcgaggtgcgcgccgtgcaggaggccgcgcggaggatgcaggaccacctcgacgtacggcgcaacccggactccaccgccgccgccatcgtcttcatggccatggagcgccgggccggcgccgggagttccatccgggacgtgtccgcggccaccggcgtcgccgagaacaccatcaagcaggcatacagggaactctacccgcacgccgacctgctcttcccctgaag

SEQ ID NO: 139288 - DNA, 498 bp, Zea Mays
tcctagacattgcaggttaaaagagaagaggtgggatgcaaggaaatttcttacttcagctggagtcatgtcatctctttctgcaactgtggggagcttggccgttgctgtgggtcaacgagaaggcgcagatagctctgcatttgccctcgcattggtttttgctgcagttgtaatgtatgatgcatcaggaattagatggcacacaggccgccaagctgcgttgttaaatcaaatagtctgtgaattcccagcagaacatccaatcatttcaacctttaggccactacgggaacctcttggacacagcccacttcaggtttttgcaggagcacttgttggctgtgcagtcgcttatttcatgggaaagtctgtatgaggaatgagctaggatttgcattgtacacgaatcctattgaccttaatatataaatcttcttgtaaaaaaaattctctttgtacatgtttgcctgtcataaatgtcagaattttcttttc

SEQ ID NO: 139289 - DNA, 630 bp, Zea Mays
tgcatcaaggagcttaccaactaattcatggcctccttgacttgtggtcatgcttcttttgagaaggcgcctctgatttcttccattccatatgctgttggcaggaggactatgacgacattgtgaatggctggaacgcgaagctgaaacggagctctgccggcgagcagaggtgggggttgttcattgccaccaagtgatttggcctggcagcaggagggctcttcggaataagaatggatgtggctctaactctgcttctagaccggtgatggttcagcttagaagcaggggatcttcatcatcagaataaaaacgtgtgttgttgtgttgctgtgtctacgccactagtatttctgttgttacttatgttctaggtaaactgcgcagccagagcagagctgaagaatatgtactgcttgctcgctcttgtgtggttgtgtctacccctactagcatttcagctttgttgtaggtaaactgcgaacccagagttgcagaacccgtactgctcgtttaagttcatggtgaactacgagctaaaaggctgttgccagagtcgatgtcacttgtcactggaggtccccggttcaattcagatgttgctttggcacgtgctattcttttgga

SEQ ID NO: 139290 - DNA, 2232 bp, Zea Mays
tgccccccccgcgcgcgtgtgtccggacgctcgggcgctggtgatccggttgatgcagcagcggggcctcgcccacaactgccgctcccgcggcttctcccgctcccgccgcgcagtcgagggcgcctgaaacgcacccgccccacgcacgcagcgcaaccgaaaacccctcgatccggctctcctcgcgctgcagcttttataacgccgtagacgacaacgaaagagaacgaaaagaaaataaaacccaacacacctaccgtcgtccgtaaaggaaggaaggaaggactcgagagatggacaccgtcggcgtccccgtggtggccgttgcgaatgggatcggggaggtggagcgcaaggtgcagaagagctactgggaggagcactccaagtgcctcactgtcgagtccatgatgctcgactcccgcgccgccgacctcgacaaggaagagcgacccgagatcctgtctttgcttccctcttacaaagggaaatcagttctagaactcggtgctggaattggacgctttactggagatctggcaaaagaagctgggcacgttctggcactagactttattgaaagtgtgattaagaagaaccaaagcataaatgggcatcacaagaacataaccttcaggtgtgccgatgtgacatctaacgacttgaagattgaagataactctgttgatctgatattttcaaactggctattaatgtatctttcagatgaggaggtccaaaagcttgtggggaaaatggtaaaatggttaaaggtcggaggccatattttctttagagaatcatgttttcaccaatctggagattccaaaaggaaggtgaacccaacacactatcgagaaccaaggttttataccaaggtatttaaagagggccattcatttgatcaagatggaggttcgtttgaactttctctagtgacctgtaaatgcattggggcttatgtcaaaaacaagaagaatcaaaaccagatatgctggttatgggaaaaggtaaaatcaacagaagacagagattttcaaagattcctggacaacgtgcaatacaaaacaagtgggatattacgttatgagcgtgtctttggtgaaggttttgtgagcactggtggaatcgagactacaaaggaatttgtgggcatgctcgatcttaaaccgggccagaaagtacttgatgtcggatgtggaattggaggcggcgacttttacatggctgcaaactatgatgtccatgttcttggtattgatctttcggtgaacatggtttcatttgcaattgaacgtgccattggacgcaagtgctctgttgaattcgaagttgctgattgcaccacaaaggattacccagaaaatagttttgacgtcatctacagccgtgacaccatccttcacatacaagacaagcctgctctgttcagaagcttcttcaaatggctaaagcccggcggcaaagtcctaatcagcgactactgtaagaatcctggaaaaccatcagaagaatttgctgcgtacattaagcagagaggctatgaccttcacgacgtgaaggcttatggacagatgctgaaggatgctggttttcataatgtcatcgcggaagatcgcactgagcagttcttgaatgttctacagagggagataggtgaagttgaaaagaacaaagacgctttcctggcagacttcacccaggaggactatgacgacattgtgaatggctggaacgcgaagctgaaacggagctctgccggcgagcagaggtgggggttgttcattgccaccaagtgatttggcctggcagcaggagggctcttcggaataagaatggatgtggctctaactctgcttctagaccggtgatggttcagcttagaagcaggggatcttcatcatcagaataaaaacgtgtgttgttgtgttgctgtgtctacgccactagtatttctgttgttacttatgttctaggtaaactgcgcagccagagcagagctgaagaatatgtactgcttgctcgctcttgtgtggttgtgtctacccctactagcatttcagctttgttgtaggtaaactgcgaacccagagttgcagaacccgtactgctcgtttaagttcatggtgaactacgagctaaaaggctgttgccagagtcgatgtcacttgtcactggaggtccccggttcaattcagatgttgctttggcacgtgctattcttttgga

SEQ ID NO: 139291 - DNA, 1842 bp, Zea Mays
agtaacaatttgagtactcaaattttcactaccgatctgcagatcctgtctttgcttccctcttacaaagggaaatcagttctagaactcggtgctggaattggacgctttactggagatctggcaaaagaagctgggcacgttctggcactagactttattgaaagtgtgattaagaagaaccaaagcataaatgggcatcacaagaacataaccttcaggtgtgccgatgtgacatctaacgacttgaagattgaagataactctgttgatctgatattttcaaactggctattaatgtatctttcagatgaggaggtaagaaccggaaatacttatgagttatgaatgctggtccaaaagcttgtggggaaaatggtaaaatggttaaaggtcggaggccatattttctttagagaatcatgttttcaccaatctggagattccaaaaggaaggtgaacccaacacactatcgagaaccaaggttttataccaaggtatttaaagagggccattcatttgatcaagatggaggttcgtttgaactttctctagtgacctgtaaatgcattggggcttatgtcaaaaacaagaagaatcaaaaccagatatgctggttatgggaaaaggtaaaatcaacagaagacagagattttcaaagattcctggacaacgtgcaatacaaaacaagtgggatattacgttatgagcgtgtctttggtgaaggttttgtgagcactggtggaatcgagactacaaaggaatttgtgggcatgctcgatcttaaaccgggccagaaagtacttgatgtcggatgtggaattggaggcggcgacttttacatggctgcaaactatgatgtccatgttcttggtattgatctttcggtgaacatggtttcatttgcaattgaacgtgccattggacgcaagtgctctgttgaattcgaagttgctgattgcaccacaaaggattacccagaaaatagttttgacgtcatctacagccgtgacaccatccttcacatacaagacaagcctgctctgttcagaagcttcttcaaatggctaaagcccggcggcaaagtcctaatcagcgactactgtaagaatcctggaaaaccatcagaagaatttgctgcgtacattaagcagagaggctatgaccttcacgacgtgaaggcttatggacagatgctgaaggatgctggttttcataatgtcatcgcggaagatcgcactgagcagttcttgaatgttctacagagggagataggtgaagttgaaaagaacaaagacgctttcctggcagacttcacccaggaggactatgacgacattgtgaatggctggaacgcgaagctgaaacggagctctgccggcgagcagaggtgggggttgttcattgccaccaagtgatttggcctggcagcaggagggctcttcggaataagaatggatgtggctctaactctgcttctagaccggtgatggttcagcttagaagcaggggatcttcatcatcagaataaaaacgtgtgttgttgtgttgctgtgtctacgccactagtatttctgttgttacttatgttctaggtaaactgcgcagccagagcagagctgaagaatatgtactgcttgctcgctcttgtgtggttgtgtctacccctactagcatttcagctttgttgtaggtaaactgcgaacccagagttgcagaacccgtactgctcgtttaagttcatggtgaactacgagctaaaaggctgttgccagagtcgatgtcacttgtcactggaggtccccggttcaattcagatgttgctttggcacgtgctattc

SEQ ID NO: 139292 - DNA, 777 bp, Zea Mays
tgccccccccgcgcgcgtgtgtccggacgctcgggcgctggtgatccggttgatgcagcagcggggcctcgcccacaactgccgctcccgcggcttctcccgctcccgccgcgcagtcgagggcgcctgaaacgcacccgccccacgcacgcagcgcaaccgaaaacccctcgatccggctctcctcgcgctgcagcttttataacgccgtagacgacaacgaaagagaacgaaaagaaaataaaacccaacacacctaccgtcgtccgtaaaggaaggaaggaaggactcgagagatggacaccgtcggcgtccccgtggtggccgttgcgaatgggatcggggaggtggagcgcaaggtgcagaagagctactgggaggagcactccaagtgcctcactgtcgagtccatgatgctcgactcccgcgccgccgacctcgacaaggaagagcgacccgaggtgctgcatcaacatcctcctctccggctccccccgttttcgtttccgttgctgctgctgctgaatgatttacttttttttgggggtgcttacgttctgtccataccggaatcttgccatatctcggacgcagaaaaatgattggcccgtgctgtaatggcacggcatggcctctgttcagcgttcaccctctgggaaaaagttgccttgacagcaactgctcgatatgttcataactggacagtaatttttttcccaggacagtcgcatcggcgatatattgatcaacgaaaacgtgacgattttttttaagaaa

SEQ ID NO: 139293 - DNA, 2359 bp, Zea Mays
cgaaccttccgctcgggaacgggaagttgtctgtcatttgagaatcgagttgtcgagagtcgagacgcacacgctcgtacgcaacttctcaaaaagcagcctgccctgttcattttctctctcctcccgtcggcgaaattttatacgccagcaaaaccgccctgtggaggaaatagagaaaaaaaacccgaatcatacggccagaaatattaaacagacagaaaggaagaggagaatagcggcgaggacgaagtggcccgcccaggaaatggcgtcgatgcagagctggcgcaaggcctacggcgccatcaaggacaccacaaccgttagcctcgccaacctcaactcggacttcaaggatctggatgtggcgatcgtgaaggcgactaatcacgtggagtgcccacccaaggagcgacacctgcgaaaggttgttgcggcgacatccatcgccaggcctagggcggatgtcgcctactgcatccacgcgcttgcccgccgtcttgccaagacccgcaactggattgttgctctgaaagcacttgtagtaatccatagacttcttcgtgagggtgatcctacatttcgagaagagcttcttaactttacacaaagggggcgtattctgcaactttcaaactttaaggatgactccagtccaattgcttgggattgttctgcctgggtgcgcacatatggtttgtttttggaagaaaggttggagtgcttcagagttctgaagtatgatgttgaagctgagcgtttgtccaaacaaggtcaaggtcctgaaaagggtcacagtagaaccagagagttggattcacaggatctgttagagcagctgccagcattgcagcagttactataccgactcgttggatgtcggcctgaaggagctgcaaataataactacctggtgcaatacgctttagctttggtgctaaaagaaagctttaaaatttattgtgcgataaatgatggaattatcaaccttgttgataagttttttgagatgccaagacatgaagcacataaagctcttgaaatatacagaagggctggccaacaggctggaaatctatctgatttctacgagaattgccggggtttagaacttgcgaggaattttcagtttcccactctgagggagccgccacaaacatttcttgcaactatggaggagtatgtgaaggaggctccacgcatggtcccagttcgagaacccctggaacttcctgagaggcttcttcttacatacaaacctgaagaatcggaggacattcctgagcctgcttctgttgaagaggaaaatgcaccagttgaagagcctgttctggtaccacctgttactgaagttgtttcacctcccaagaccgaggtggccgatactggtgacttactgggcttagatgatccaaatcctgctgtatcagctatagaggaaagcaatgctcttgccttggctattgttccaacagatggggcttccacaactggtaacactgcatttcaagataaggggtttgatcctacaggatgggaactcgcccttgttaccgcaccgagcaacacgacttcatctgcgtctgtcggtcaattgggtggtggatttgacaagctcattttggacagcctttatgatgacggggcctacaggcagaggcaacagcaacaggtgtatggttcagcagtgcctaatccattcatgacaaatgatcctttcgtgatgtcaaaccaagttgctcccccaccatcagttcaaatggctgccatgtctcagcagcatcagcagatccccacgatgatgcaaccaaatccttttggaccacctatgcagccacaggtaggcatgggcccagcaacaaacaatccctttctggatgctggattcggggcattcccagtggcgaacaatagccatcagcaacacaacccatttggcagtgcccaacttctgtaggctacgtagttacaagagcaaatttgtgcttcagcagatgcgattttttcggtgattatatcgtgcattgtgctcggccattcttccatgcgatgcgtgtattatgaattggcttcaccacacggggagctatggcttgacccaacccttgttgtaaagaaattagcgacttgtgtaacatcgaatgtatgtcaataaacagtaggcaatgttattataactataaacaaaatagcggtggtatgtaggagttctgtttatttcattgctgtttgattgccggtcttgcatgcacattgattggccatgtgttctaaccccagaactgaagcgttattgtacctatacacatgcatatactacttgcgattggtaattattttacgttgttcacattta

SEQ ID NO: 139294 - DNA, 976 bp, Zea Mays
cgaaccttccgctcgggaacgggaagttgtctgtcatttgagaatcgagttgtcgagagtcgagacgcacacgctcgtacgcaacttctcaaaaagcagcctgccctgttcattttctctctcctcccgtcggcgaaattttatacgccagcaaaaccgccctgtggaggaaatagagaaaaaaaacccgaatcatacggccagaaatattaaacagacagaaaggaagaggagaatagcggcgaggacgaagtggcccgcccaggaaatggcgtcgatgcagagctggcgcaaggcctacggcgccatcaaggacaccacaaccgttagcctcgccaacctcaactcggacttcaaggatctggatgtggcgatcgtgaaggcgactaatcacgtggagtgcccacccaaggagcgacacctgcgaaaggttgttgcggcgacatccatcgccaggcctagggcggatgtcgcctactgcatccacgcgcttgcccgccgtcttgccaagacccgcaactggattgttgctctgaaagcacttgtagtaatccatagacttcttcgtgagggtgatcctacatttcgagaagagcttcttaactttacacaaagggggcgtattctgcaactttcaaactttaaggatgactccagtccaattgcttgggattgttctgcctgggtgcgcacatatggtttgtttttggaagaaaggttggagtgcttcagagttctgaagtatgatgttgaagctgagcgtttgtccaaacaaggtcaaggtcctgaaaagggtcacagtagaaccagagagttggattcacaggatctgttagagcagctgccagcattgcagcagttactataccgactcgttggatgtcgggtgattatctccgttaacttctggctatctagtctgctagctccttctaatttgtttatttcccccttttcttttacttgaaacataaca

SEQ ID NO: 139295 - DNA, 1885 bp, Zea Mays
ggaaaaaaatccgaaatggccgctagtggcctcggtctctccacctccttcctccccggccacgacaccctcctccggcgccggcgccggcggccggcgggccacgccgccgcgtcgttccggccggtgacggcggagctcggcggcgtcgcgacggagctgggccgccagctggtggaggcggtgggcgtggggctcccctgcaccgtcatgcagtgcggcgacgtcatctaccgcagcacgctcccccggaacgacgggctcaccatcacggcccccggcctcacgctcgcgctcgctaccgtgtcgtacctctggtccacgccaggcgtcgcgccggggttcttcgacatgttcgtcctcgccttcgccgaacgcctcttccgccctaccttccgcaaggatgacttggtatttgggaagaagctcggggagggcgcattcggggtcgtgtgtaaggcttcactggcgaaccccgaagcggcgaagaagcaaggggatttggtcgtgaagaaggcaacagagtatggtgcagtggagatttggatgaatgaacgtgtcaggagggcatgcgctagtagctgtgcggattttatttatggcttttgcgagacaaaagcaaaaggtaagggagctgaagaatattggcttatttggcgttttgaaggtgaggatacactttatgatctcatgcaaagcaaggaattcccttacaatgtggagacaaaaattcttggcggtatccaagacttgccaaagggaatagcgagagagaataagatcattcaaacggtgatgagacaactcttatttgctcttgacggacttcattcgacaggaatgaaccttcaaaattattgatcttggagcagcagctgacttacgtgtaggaattaactatattcctaaagagttccttttggatccaaggtatgctgctccagaacaatatattatgagcacacaaaccccgtctgctccttctgttccagttgcaacaactttgtctccagtcctgtggcagctgaaccttcctgacagattcgacatatatagcttgggtctcatattcttacagatggcattcccttcactacgaactgatagcaacctcatacaatttaatcgccaactgaaaagatgtgattatgacttacaagcttggaggaatctggtggagccacgagcgagtgctgagctccggaggggctttgacatcatggatttagacggtggtatcggatgggaactcctcacctcgatggtccggtacaaagcacggcagaggaccagtgctaaggccgcattggcacacccgtacttcaaccgtgaagggctccttggcctctccgtcatgcaaaacgtacggctgcaactgttccgcgcaacccagaaggactacagtgaagcagcgcggtgggttatcggcctcatggcaaggtcaggaactgaagatgtgggaggctttacagaagcacagcttcaagagcttagggaaataaaaccaaagaaaagcagcacccagcggaacgcgcttgcctccgtgctgcgcctgcagaggaagatcatgagaacgatcaaggagagcatggacgagctcaacagccagcgcaaaagcatctggtggagccggtggatacccagggaggagtaggccggccgcaggcgcacatgtacatcgtccacttctgtatgaaacgtcacctattagcactggtgaattggtgatagtataatacactatcctacttactgctttgtacatgctgacgactggtgagtaaaattcatctgaaaaaaaaatcggagtaacgcgatgtatagctgtaaatattttgcattgaagcatcatgatttttgagatcagctctctgcttgaatatcc

SEQ ID NO: 139296 - DNA, 1935 bp, Zea Mays
ggaaaaaaatccgaaatggccgctagtggcctcggtctctccacctccttcctccccggccacgacaccctcctccggcgccggcgccggcggccggcgggccacgccgccgcgtcgttccggccggtgacggcggagctcggcggcgtcgcgacggagctgggccgccagctggtggaggcggtgggcgtggggctcccctgcaccgtcatgcagtgcggcgacgtcatctaccgcagcacgctcccccggaacgacgggctcaccatcacggcccccggcctcacgctcgcgctcgctaccgtgtcgtacctctggtccacgccaggcgtcgcgccggggttcttcgacatgttcgtcctcgccttcgccgaacgcctcttccgccctaccttccgcaaggatgacttggtatttgggaagaagctcggggagggcgcattcggggtcgtgtgtaaggcttcactggcgaaccccgaagcggcgaagaagcaaggggatttggtcgtgaagaaggcaacagagtatggtgcagtggagatttggatgaatgaacgtgtcaggagggcatgcgctagtagctgtgcggattttatttatggcttttgcgagacaaaagcaaaaggtaagggagctgaagaatattggcttatttggcgttttgaaggtgaggatacactttatgatctcatgcaaagcaaggaattcccttacaatgtggagacaaaaattcttggcggtatccaagacttgccaaagggaatagcgagagagaataagatcattcaaacggtgatgagacaactcttatttgctcttgacggacttcattcgacaggaattgttcacagagatataaaacctcaaaatgtgatattttcagagggatcacgaaccttcaaaattattgatcttggagcagcagctgacttacgtgtaggaattaactatattcctaaagagttccttttggatccaaggtatgctgctccagaacaatatattatgagcacacaaaccccgtctgctccttctgttccagttgcaacaactttgtctccagtcctgtggcagctgaaccttcctgacagattcgacatatatagcttgggtctcatattcttacagatggcattcccttcactacgaactgatagcaacctcatacaatttaatcgccaactgaaaagatgtgattatgacttacaagcttggaggaatctggtggagccacgagcgagtgctgagctccggaggggctttgacatcatggatttagacggtggtatcggatgggaactcctcacctcgatggtccggtacaaagcacggcagaggaccagtgctaaggccgcattggcacacccgtacttcaaccgtgaagggctccttggcctctccgtcatgcaaaacgtacggctgcaactgttccgcgcaacccagaaggactacagtgaagcagcgcggtgggttatcggcctcatggcaaggtcaggaactgaagatgtgggaggctttacagaagcacagcttcaagagcttagggaaataaaaccaaagaaaagcagcacccagcggaacgcgcttgcctccgtgctgcgcctgcagaggaagatcatgagaacgatcaaggagagcatggacgagctcaacagccagcgcaaaagcatctggtggagccggtggatacccagggaggagtaggccggccgcaggcgcacatgtacatcgtccacttctgtatgaaacgtcacctattagcactggtgaattggtgatagtataatacactatcctacttactgctttgtacatgctgacgactggtgagtaaaattcatctgaaaaaaaaatcggagtaacgcgatgtatagctgtaaatattttgcattgaagcatcatgatttttgagatcagctctctgcttgaatatcc

SEQ ID NO: 139297 - DNA, 312 bp, Zea Mays
atggaaatggagatagatccggtcgccgaggccgctgctattgccgaggagttgaggctgcaggaccacaatgacgctgaggatgctcggcatttcatcctcggcagcagcgcagctgctgctgtcaatgtggaccctgtgctagagcctgttggtggtggtactgggacgggatcgacaagcccgactgatgagagcacggttgaaggtgatagagcagggaagaagaggtctaaagcttggaatgacttcacagagggcatgtacaacctattgaatatagaggctcttaaggagtctctagaggactga

SEQ ID NO: 139298 - DNA, 1265 bp, Zea Mays
tcgtttttagaaccctggtcactgatcaaaattgttattcctctgcagcaatagtgtataacttggagatatggatttgcaagagaagacgaccccaactcataaaggaaaaggaaagaaaaaagaaagcgcaaagaaaaaagaaagatcaaggaagagaacgtcatctgttttggattccactaatgtttcagacacagtcatcagcgaggaaatgtcagagtataatcttgatgaacctactatggaggaaaaactggcaaccctgaatttaatcaatagagagaatgaaatacatggtactgagaagcaatcgctctctgtggcaccaccaagtgcagattcagtccatatcttgctgaagcaagctcttcgtgctgatgatagtgtagcactgttaacttgcttgtataatagagatgagaaggttattacgaagtctatatcactcctaacaccagcagatgttgtgaagcttctcaagttctttgtcttgcaaatacaatctaggggtgcagtgttggtttgtttactcccgtggctgcaaactttattgaatcgacacatgagcagcatagtgtctcaggagtcttctctgtcattgctcaactcgctctaccagcttattgatgcaagaacgtcaacatttaagtcagcattgcaactctctaccactctagattaccttttcagcgagattgctgatgatgaagctgatgaggaggtaccaccaccgataatctatgaagataaggacactgatgatgacgagtccgaagttgatgctatggaaaccgacagagaagaggctgaagagctaggtgctgttactgatgcctctgaaaattcagatggaagtgagatcatgagcgactgattgccttttactctcccaactgctgaagtccaaatatcaacatcaattattcacgtaagatggaattcacgataattgctcaagatagttgtgcttgtactttgtggatcttaattgagtgaatgtttcaaatagcttttggatgacatattgacatttgagctgagaaaagggtagttaatgcaattgattgagtaaagcaaacattacccatcttatagtttgtactatctgtgaagggtaattgtttctgtatatggtgcttgaggtcatatttactcatgctaacctcgacctctcggaagtgcccaagagaaccgttgggtcgatggtctaacatgcgacgtgtggtgtttttcttgtttgaatgcacaccaattcgttcttt

SEQ ID NO: 139299 - DNA, 929 bp, Zea Mays
tgtgtttaaggatcgtgctgatttgtatattgtcatgatttgtttacctttttggatcgaggatcctggctactcgaacaacgctaatgctgtacatttctaagtttcagtattactctttaattggctattgcattttgacacaaccgactaatttctagacctttacctcctcaggggtgcagtgttggtttgtttactcccgtggctgcaaactttattgaatcgacacatgagcagcatagtgtctcaggagtcttctctgtcattgctcaactcgctctaccagcttattgatgcaagaacgtcaacatttaagtcagcattgcaactctctaccactctagattaccttttcagcgagattgctgatgatgaagctgatgaggaggtaccaccaccgataatctatgaagataaggacactgatgatgacgagtccgaagttgatgctatggaaaccgacagagaagaggctgaagagctaggtgctgttactgatgcctctgaaaattcagatggaagtgagatcatgagcgactgattgccttttactctcccaactgctgaagtccaaatatcaacatcaattattcacgtaagatggaattcacgataattgctcaagatagttgtgcttgtactttgtggatcttaattgagtgaatgtttcaaatagcttttggatgacatattgacatttgagctgagaaaagggtagttaatgcaattgattgagtaaagcaaacattacccatcttatagtttgtactatctgtgaagggtaattgtttctgtatatggtgcttgaggtcatatttactcatgctaacctcgacctctcggaagtgcccaagagaaccgttgggtcgatggtctaacatgcgacgtgtggtgtttttcttgtttgaatgcacaccaattcgttc

SEQ ID NO: 139300 - DNA, 675 bp, Zea Mays
aggatattctattcatcagtcggaggtggtgagtttggtctgcaacaggacaatgtaacttagaaaaacgttgtcttgccagttattgggtacttgtgcagttcatatagcatgatagcaatttaagtcatttttactgttggatgcaaattttacgggctatatttttttccagcttattgatgcaagaacgtcaacatttaagtcagcattgcaactctctaccactctagattaccttttcagcgagattgctgatgatgaagctgatgaggaggtaccaccaccgataatctatgaagataaggacactgatgatgacgagtccgaagttgatgctatggaaaccgacagagaagaggctgaagagctaggtgctgttactgatgcctctgaaaattcagatggaagtgagatcatgagcgactgattgccttttactctcccaactgctgaagtccaaatatcaacatcaattattcacgtaagatggaattcacgataattgctcaagatagttgtgcttgtactttgtggatcttaattgagtgaatgtttcaaatagcttttggatgacatattgacatttgagctgagaaaagggtagttaatgcaattgattgagtaaagcaaacattacccatcttatagtttgtactatctgtgaagggtaat

SEQ ID NO: 139301 - DNA, 1319 bp, Zea Mays
actctctaccagtctaccctaaccagcccgacagccgccgccgtttctccatcttcctcgcagcgccggcactacatcttcgctcccaccccgactcgcgctcaacacgcaggcgacggcggcagcgctcaggctcgggctctcagggacggcggggcagtcccagactcggcgtcgtcgtcagcggctacccttcccgcctctcgccaatcgcctcgcgcccgcgactccggtcctccgcacaccggcctgcgaccctgccaatagtgtataacttggagatatggatttgcaagagaagacgaccccaactcataaaggaaaaggaaagaaaaaagaaagcgcaaagaaaaaagaaagatcaaggaagagaacgtcatctgttttggattccactaatgtttcagacacagtcatcagcgaggaaatgtcagagtataatcttgatgaacctactatggaggaaaaactggcaaccctgaatttaatcaatagagagaatgaaatacatggtactgagaagcaatcgctctctgtggcaccaccaagtgcagattcagtccatatcttgctgaagcaagctcttcgtgctgatgatagtgtagcactgttaacttgcttgtataatagagatgagaaggttattacgaagtctatatcactcctaacaccagcagatgttgtgaagcttctcaagttctttgtcttgcaaatacaatctaggggtgcagtgttggtttgtttactcccgtggctgcaaactttattgaatcgacacatgagcagcatagtgtctcaggagtcttctctgtcattgctcaactcgctctaccagcttattgatgcaagaacgtcaacatttaagtcagcattgcaactctctaccactctagattaccttttcagcgagattgctgatgatgaagctgatgaggaggtaccaccaccgataatctatgaagataaggacactgatgatgacgagtccgaagttgatgctatggaaaccgacagagaagaggctgaagagctaggtgctgttactgatgcctctgaaaattcagatggaagtgagatcatgagcgactgattgccttttactctcccaactgctgaagtccaaatatcaacatcaattattcacgtaagatggaattcacgataattgctcaagatagttgtgcttgtactttgtggatcttaattgagtgaatgtttcaaatagcttttggatgacatattgacatttgagctgagaaaagggtagttaatgcaattgattgagtaaagcaaacattacccatcttatagtttgtact

SEQ ID NO: 139302 - DNA, 1246 bp, Zea Mays
ttcctcgcagcgccggcactacatcttcgctcccaccccgactcgcgctcaacacgcaggcgacggcggcagcgctcaggctcgggctctcagggacggcggggcagtcccagactcggcgtcgtcgtcagcggctacccttcccgcctctcgccaatcgcctcgcgcccgcgactccggtcctccgcacaccggcctgcgaccctgccaatagtgtataacttggagatatggatttgcaagagaagacgaccccaactcataaaggaaaaggaaagaaaaaagaaagcgcaaagaaaaaagaaagatcaaggaagagaacgtcatctgttttggattccactaatgacacagtcatcagcgaggaaatgtcagagtataatcttgatgaacctactatggaggaaaaactggcaaccctgaatttaatcaatagagagaatgaaatacatggtactgagaagcaatcgctctctgtggcaccaccaagtgcagattcagtccatatcttgctgaagcaagctcttcgtgctgatgatagtgtagcactgttaacttgcttgtataatagagatgagaaggttattacgaagtctatatcactcctaacaccagcagatgttgtgaagcttctcaagttctttgtcttgcaaatacaatctaggggtgcagtgttggtttgtttactcccgtggctgcaaactttattgaatcgacacatgagcagcatagtgtctcaggagtcttctctgtcattgctcaactcgctctaccagcttattgatgcaagaacgtcaacatttaagtcagcattgcaactctctaccactctagattaccttttcagcgagattgctgatgatgaagctgatgaggaggtaccaccaccgataatctatgaagataaggacactgatgatgacgagtccgaagttgatgctatggaaaccgacagagaagaggctgaagagctaggtgctgttactgatgcctctgaaaattcagatggaagtgagatcatgagcgactgattgccttttactctcccaactgctgaagtccaaatatcaacatcaattattcacgtaagatggaattcacgataattgctcaagatagttgtgcttgtactttgtggatcttaattgagtgaatgtttcaaatagcttttggatgacatattgacatttgagctgagaaaagggtagttaatgcaattgattgagtaaagcaaacattacccatc

SEQ ID NO: 139303 - DNA, 1168 bp, Zea Mays
ggccccccagtgtcggtcttgttttgaactaggatggttaatggctttgccgctttgggcaacgcgcgggcagtgggcactgctgtaccaggctataccagcatcagcgaagagccggcgttcttgagacttgagagaggagagcgaccgacgacctcgaagcttggcctgcgcggtggtgacgatggatgtcaaatgccggcgtctggaggggaaggtggccgtcgtgacggcgtccacgcaggggatcggcctagccatcgccgagcgcctcggcctggagggcgccgccgccgtcgtctcctcccgcaagcagaagaacgtggacgaggccgtggaggggctcaaggccaaggggatcaccgtggtgggcgccgtctgccacgtatccgacgcacagcaacgcaagaacatcatcgagacggccgtcaagaactttgggcacattgatattcttgtctccaacgctgctgcaaatcctactgtgaatgtcatacttgaaatgaaagaggttgttctcgataagttgtgggatattaacgtcaaggcttctattcttcttattcaggatgctgctccccacctacgggcagggtcatctgtgatccttatttcttcaattgctggttacaatcctgagcaaggattgacaatgtatggtgttacaaagaccgctctctttggtctcacaaaggctcttgctggtgagatgggacccgatattcgtgttaattgtatagcccctggttttgttccgacacggtttgctagtttcttcatagacaacgagaccattaggaaaaagcttaacgagaggactatgcttaagagattgggttccgtggaagatatggcggcagctgccgcattcctggcatctgacgatgcatcattcatcacagctgaaaccattgttgttgctggaggggtgccgtcgagattgtaaatttggctcaagtttgtaccgattgttactaggttggtgacatagcaactatactgtaataatccactctgaaaatgtgggtcgtgctaagttggccaccgttagatctaataattttttaggtgtcttggtatttgtttgagataataatctactcagattatctgtcacttagttcaaattttattggattatataatataaatagataatcccaaacaa

SEQ ID NO: 139304 - DNA, 2209 bp, Zea Mays
ggccccccagtgtcggtcttgttttgaactaggatggttaatggctttgccgctttgggcaacgcgcgggcagtgggcactgctgtaccaggctataccagcatcagcgaagagccggcgttcttgagacttgagagaggagagcgaccgacgacctcgaagcttggcctgcgcggtggtgacgatggatgtcaaatgccggcgtctggaggggaaggtggccgtcgtgacggcgtccacgcaggggatcggcctagccatcgccgagcgcctcggcctggagggcgccgccgccgtcgtctcctcccgcaagcagaagaacgtggacgaggccgtggaggggctcaaggccaaggggatcaccgtggtgggcgccgtctgccacgtatccgacgcacagcaacgcaagaacatcatcgagacggccgtcaaggtcgcaactgtggaagggggttccagtctttcagggcttgttttgttgtcctcgtatttgctcagtccaaaatagttcattttcagatggattacattgcattgtcagcttcctcttgttgctaagcgatcccatcaggcctccctgcggttaacgttttgctgaaccttggggaagagggggattcctgtcaactctgtttttttcctagtaggatctggctctgttgctcacccgacattacctgcctgccctcgttagtcgccacctcgtattttctctagctgcttgcttaatactagcttcgtgctaaaatagtactctctccgttattttttatttgtcatgtttaatataaaaatgaactaacgagcgacaaatatttaattacggaggtagtagtcgttttagaaaatttgtagattcgtacaattcttgatgcatgtgttttgtatgtgtgtctagatttatcatctatttgaatataaacataaagaataatagctaaaccgactaatattttggaatgtagtacattttttggtgcaacggcattgtccaaactagctaagaaacatgggttcatggttggtaaaacacagacattgatagatacatctttaaactgggtaacagtgagatctatttgtgcataagtgcaaataatgccgctactagagctagaattgtctttttcttaaattatgaactaagacaacctcatttatacaaatatctactggaatttcacttatgagtataacgctcttttatcagtttagtcaatagcttttccaagcttacgaacagtagcgtagtatatatttatcatgtgaaagtgaaagtctcgagccaaaaggccgtgtcatttctcttttatctgttcatcttgtgacattgaggttgatggctagctcaacttgcatttacttcattagtacttcgacacacagtggtcataccttgtcttattcgcttgcatctaaagtgtacctttttcgtatctcaaatcacttgttttgttgatcatgttgtacattattttagtttatgttcatgtcttatatattgaaaagcatttgaggatgtgaggattcgtgtagcagtaatcaactgattatatggttgcagaactttgggcacattgatattcttgtctccaacgctgctgcaaatcctactgtgaatgtcatacttgaaatgaaagaggttgttctcgataagttgtgggatattaacgtcaaggcttctattcttcttattcaggatgctgctccccacctacgggcagggtcatctgtgatccttatttcttcaattgctggttacaatcctgagcaaggattgacaatgtatggtgttacaaagaccgctctctttggtctcacaaaggctcttgctggtgagatgggacccgatattcgtgttaattgtatagcccctggttttgttccgacacggtttgctagtttcttcatagacaacgagaccattaggaaaaagcttaacgagaggactatgcttaagagattgggttccgtggaagatatggcggcagctgccgcattcctggcatctgacgatgcatcattcatcacagctgaaaccattgttgttgctggaggggtgccgtcgagattgtaaatttggctcaagtttgtaccgattgttactaggttggtgacatagcaactatactgtaataatccactctgaaaatgtgggtcgtgctaagttggccaccgttagatctaataattttttaggtgtcttggt

SEQ ID NO: 139305 - DNA, 1020 bp, Zea Mays
ggccccccagtgtcggtcttgttttgaactaggatggttaatggctttgccgctttgggcaacgcgcgggcagtgggcactgctgtaccaggctataccagcatcagcgaagagccggcgttcttgagacttgagagaggagagcgaccgacgacctcgaagcttggcctgcgcggtggtgacgatggatgtcaaatgccggcgtctggaggggaaggtggccgtcgtgacggcgtccacgcaggggatcggcctagccatcgccgagcgcctcggcctggagggcgccgccgccgtcgtctcctcccgcaagcagaacgtggacgaggccgtggaggggctcaaggccaaggggatcaccgtggtgggcgccgtctgccacgtatccgacgcacagcaacgcaagaacatcatcgagacggccgtcaagaactttgggcacattgatattcttgtctccaacgctgctgcaaatcctactgtgaatgtcatacttgaaatgaaagaggttgttctcgataagttgtgggatattaacgtcaaggcttctattcttcttattcaggatgctgctccccacctacgggcagggtcatctgtgatccttatttcttcaattgctggttacaatcctgagcaaggattgacaatgtatggtgttacaaagaccgctctctttggtctcacaaaggctcttgctggtgagatgggacccgatattcgtgttaattgtatagcccctggttttgttccgacacggtttgctagtttcttcatagacaacgagaccattaggaaaaagcttaacgagaggactatgcttaagagattgggttccgtggaagatatggcggcagctgccgcattcctggcatctgacgatgcatcattcatcacagctgaaaccattgttgttgctggaggggtgccgtcgagattgtaaatttggctcaagtttgtaccgattgttactaggttggtgacatagcaactatactgtaataatccactctgaaaatg

SEQ ID NO: 139306 - DNA, 186 bp, Zea Mays
atgccagcccaactaactggagtaacaattaacggcacaacacaagcaagtgttgaagatgatacagacacaagtgaacaacaagaacaacaacaacaacaacaaccctatatgtacatacacgaggcaccgcacatcaagggatatgatccatcaaggacaaaagatatctctactacttattaa

SEQ ID NO: 139307 - DNA, 89 bp, Zea Mays
gtgattatttgttgccagagatagatatgattgatgattctctcgatctgttggcattattggcgaccttttatctgctagctacctag

SEQ ID NO: 139308 - DNA, 1793 bp, Zea Mays
agccttctcgtctgtccccttaatttttcaacctgctctggtggctggtttggccaccaatttcctctcaaagatacagcgaaatgcgcattattatatgtactgccgccgtcgtttaatcggtgtgttcatctcagctgtcgtgcagggcagcaggtggcgaggaggtcgtctcgtcgcggacagccgaggccgttgacctctccagctgctggacgcaacacggcaacgcgcaaacgcctctcctctgtgcgtaccggactaccggtaccgcgcgttcagtttccacttccacccgcgtcgtccgtctctctccgctcagcttgaggtgtccggatcacggcggttgcaacctgcagccgcaccagcaagccgctgctccctctcctaaccggccgctgcagctgccatgtgggagtagaagtgccagccagcattgatttcttccaaccgcctcgatgcgatcgctcaccattccctccttgtaccgccatggcagaccagccggaggagatgccggcggcgccggccatccgcctggggcctccgcacccgtacctgaagacccacgggggcaaggtcgcgaggctgcaccggctggactgggccgtgctgctgctcatcgccgccgccgacgtcgggctcaacctcgtcgagccgttccaccgcttcgtcggcgaggacatgctcgcggacctccggtacccgctgaagagcaacaccgtgcccgtctgggccgtgccggtgtacgcggtgatcggcccgatcgtcgtgttcgtcgggttatacctgaagcggaggaacgtgtacgacatgcaccacgccattctaggccttctcttctccgtgctcatcaccggcgtcctcaccgacgccatcaaggacggcgttggccggccgcgccccaacttcttctggcgctgcttccctgacggagtgccgaagtacgacaacatcacaagaggagtcctgtgcgacggcgtcgcgagcgtgatcaaagaagggcacaagagcttcccaagcggccattcttcgtggtccttcgctggcctaggcttcctgtcgtggtacctggcgggcaaggtcaaggcgttcgaccggcgcggccacgtggccaagctctgcgtcgtgctcctgccgctgctgctcgcggccatggtggcggtgtcgcgggtggacgactactggcaccactggcaggacgtgtttgccggtgggattcttgggttggtggttgcgtctttctgctaccttcagtttttcccaccgccatctggtgaacaaggattctggccccatgcgtactccgagcacattctcaaccctgagcgcgagggccaagcgcagtcaacagcgagctccaaccaccaccgacgcctgtccagcagaggccacgtggcagtggagatgagcaccgcgaccgcgagccaggaagcatcgtcgttaggtcccatggaggagatggaggaaggacgcggtgcccggtgatggatcagaacgctgcatgcatgccgcccgttacgaacagcgcgcgctagctgcagcttcagtcttcaaagtcgcttcgtttccttcattcctttctttttcttttttctctctcttctttttgctcgcttggttgatagatgtgatggtctatctaatagtaaggtgctgtttgttgtgtcggtcctgctgtaaattagaggtataggtaggtaggtgaaccatgcatgtttcatatgtttgatgcagtacgatgatgattagcacgcactgtacaacggaagcatgcgtgcgtgcgtgccccg

SEQ ID NO: 139309 - DNA, 1719 bp, Zea Mays
gttcatttatgcccaacagagacgcgaatgatcttggatctcttcttcttggttcatggtttgcttatcctgaggcaaccaaaccaactactaccatccccagctgtcgtgcagggcagcaggtggcgaggaggtcgtctcgtcgcggacagccgaggccgttgacctctccagctgctggacgcaacacggcaacgcgcaaacgcctctcctctgtgcgtaccggactaccggtaccgcgcgttcagtttccacttccacccgcgtcgtccgtctctctccgctcagcttgaggtgtccggatcacggcggttgcaacctgcagccgcaccagcaagccgctgctccctctcctaaccggccgctgcagctgccatgtgggagtagaagtgccagccagcattgatttcttccaaccgcctcgatgcgatcgctcaccattccctccttgtaccgccatggcagaccagccggaggagatgccggcggcgccggccatccgcctggggcctccgcacccgtacctgaagacccacgggggcaaggtcgcgaggctgcaccggctggactgggccgtgctgctgctcatcgccgccgccgacgtcgggctcaacctcgtcgagccgttccaccgcttcgtcggcgaggacatgctcgcggacctccggtacccgctgaagagcaacaccgtgcccgtctgggccgtgccggtgtacgcggtgatcggcccgatcgtcgtgttcgtcgggttatacctgaagcggaggaacgtgtacgacatgcaccacgccattctaggccttctcttctccgtgctcatcaccggcgtcctcaccgacgccatcaaggacggcgttggccggccgcgccccaacttcttctggcgctgcttccctgacggagtgccgaagtacgacaacatcacaagaggagtcctgtgcgacggcgtcgcgagcgtgatcaaagaagggcacaagagcttcccaagcggccattcttcgtggtccttcgctggcctaggcttcctgtcgtggtacctggcgggcaaggtcaaggcgttcgaccggcgcggccacgtggccaagctctgcgtcgtgctcctgccgctgctgctcgcggccatggtggcggtgtcgcgggtggacgactactggcaccactggcaggacgtgtttgccggtgggattcttgggttggtggttgcgtctttctgctaccttcagtttttcccaccgccatctggtgaacaaggattctggccccatgcgtactccgagcacattctcaaccctgagcgcgagggccaagcgcagtcaacagcgagctccaaccaccaccgacgcctgtccagcagaggccacgtggcagtggagatgagcaccgcgaccgcgagccaggaagcatcgtcgttaggtcccatggaggagatggaggaaggacgcggtgcccggtgatggatcagaacgctgcatgcatgccgcccgttacgaacagcgcgcgctagctgcagcttcagtcttcaaagtcgcttcgtttccttcattcctttctttttcttttttctctctcttctttttgctcgcttggttgatagatgtgatggtctatctaatagtaaggtgctgtttgttgtgtcggtcctgctgtaaattagaggtataggtaggtaggtgaaccatgcatgtttcatatgtttgatgcagtacgatgatgattagc

SEQ ID NO: 139310 - DNA, 1068 bp, Zea Mays
agattataaggcgaagagccgtcgtgatcaccagacgagttaccagaccaagccgcagcaggaatttctcagatgtctaaagccaagcttcctcacgtcgagacggattcttccggcgacgacgatgggccgaagccaaggctagtgttccgtagacgcatgcgcacaccagttaagctgctcggtggccggaaagtctcggacgtcctgctatggaggaacaggaacctgtcagcggggatcctcgcgggggcgacgctggtctggttcctgttcgacgtggcggagtacaacgtggtgacgctcctttgccacgtcgcgctgctcgggatggtcctgctcttcgtctggtccaacgccgcgcctctccttgacaggccgcctccacagatcccggaggtgatcgtttctgaacacgcgttcagagaagctgcgcggaccacccattacagactggctcactttgtatccgtcctctacgacgttgcgtgcgggaaggatctcaagaagttcctcatggtgattggttctctgtggatactggcgatacttggagacacatgcagcttcacgacgctgttatatggcgggcttttgtgtgctctgactttaccggcgctgtacgagagatacgaagccgaggtggaccatcttgtggccaagggacgcgaagacctcaagaaattctacaggaaggttgactccaacgtgctcaacaagataccaagaggccctgtcaagacaaaggctctctgatcaagatgtgtgctttgtcaaattgccggtgcacgccggcagtcccgtacataaaagaaaaacagtaaccagtgtcaccagaccatctcaaatcagtttttatggtatctgattgtacgtgctagactactgctgcaatgatccaccatactttaccgtgtcagcagtaaacaagcctaaaatctgaagtaatttattcgtaaaaaaacaaataggtactggaagattgtaagtgttgccaaaacggaaaagtggcgaataaaaatctgaggtcattcggtgtgggaccgatctttgcgtcaacaagtacta

SEQ ID NO: 139311 - DNA, 257 bp, Zea Mays
atgtgcgaaaagatcattttctcctttatgttcaagagaatatgtccctgcgacatttttcactcgaatgtcaagtgctggaaaaataacctgcaaacatcaacggaaaaatcttataccagtataccacaaatgttctgtgcatcacgacggccttatagttggccaataaatttccacaaatataccaatctatgggcatttcagaaattaatctatctatggtaaaaacatgtaactatacaaggtccatgctt

SEQ ID NO: 139312 - DNA, 918 bp, Zea Mays
ctgtggtctcaataccttctcgcctcctcctcctacccctcacacccgacgctcgccctcgtcgtcggcgacgcgcgcagcccacccgctgcctccgcgagccgggctgactgacggccatggcggccacggcagatccgcgggccaagcctccatcagccgcgccgcaccacctcgccgagccatgggcgcatcaggcctcaccagccgcccaccgcatgccctcgcccaaggccgcggccggcggtggctgcggcgcccgcgatcgccgccggtcttcctcgtcccaccgccgggcccaagccatcggggccaaggccgacgccacgccatacgacggcgggatcgaggcgctccggggccaagctcatgggccacctgcgcgacgcggcggaccggctccgcgagccccaccggcctagcagcaggggcaccgccgcgctgccgcccgctcctcgccctccgccgtccaaggctactacccccgcgagtccgccaccaccgccgcccgggacggactgcgagcccgagctcagggcaccgcctgctcctcccgcacctgctgcgcccccgcagccggacgctgccacgaggccgtggaacctgcgggagcgcacgccgaggcggcccgccgccgccaggtcgtgggccgcgtcgccgtccccgccggcaccgcccccgtcgtcgcgtaagcggcgcaggcgcgctcccttctccgtgcctctggcggcggaggagatcgaggaggacatctacgcgctgacgggcgcccggccgcggcggcggccccggaagcggccgcgcgccgtgcagcggcacgtcgattcgctgttcccggggctgtggctgaccgagatcaccgccgacgcgtaccgagtgccggacgactagctccacggaccacgagcacaccgggtc

SEQ ID NO: 139313 - DNA, 1919 bp, Zea Mays
aacagcaggcggtggccgaggaggagggaatagccgaatagggatttttgaggttttcggcggcagaaatacgagcgaaaactcaaaacaggcgcgcgactgaagagagagcgctagctggaagagacgggcgagccgatctggcgtggcagccgttccctgccccgtccccgcataaatcccaacaaggacgctggcgctgcgtgtatctccctcgcaagagacaaaaaaaaatatcacacacacggcgcggcggtcatagtgcggctgattcggatcgggcactagctacatgaccaccctcctcgccaataggatcactacgctcgtgcgcgcccctcctcctcccatggccgccgccgccgtcgcgggagcgcggaggccattgcaccggaccttggcgcacccgccaccgcccgaggaggacgagcatcagcagcagcgcgcgtgccgcagcaggggatcctcgtcctcctgctcggcttcctcgtcatcgacgcccgcccggccccggggcacggggatggtggtgatcgtcggcgccacgggcaccgggaagaccaagctgtccatcgacgccgcggaggcggtcggcggggaggtggtgaacgcggataagatccagctctacgccgggctggacgtgaccacgaacaaggtggcccccgcggaccgccgcggcgtgccgcaccacctcctcggcgccatccgccccgaggccggcgagctcccgccctccacgttccgctccctcgccgccgccacggccgcctcgatcgccgcgcgcggccgcctgccggtcgtcgcgggcggctccaactccctcatccacgcgctcctcgccgaccgcctcgacgccggcgccgccgaccccttctccgctccaccgcagccggcgccgccgcggtggggccgccggcccgcgctccgatccccgtgctgtctcctctgggtccacgtcgacgccgcgctcctcgcggagtacctggaccggcgcgtggacgacatggtgcgcggcggcatggtggaggagctgcgggagtacttcgccgcgaccaccgccgccgagcgcgccgcgcacgccgcggggctgggcagggccatcggcgtgcccgagctgggcgcctgcttcgcggggcgcgccagcttccgcgccgcgatcgacgacatcaaggccaacacgcgggacctggcggccgcgcaggtgcgcaagatccgacgcatggccgatgcctggggctggcccatccagcggctcgacgcgtcggccacagtccgcgcgcgcctccgcggcgcggggcccgacgcggagtcggcgtgctgggagcgcgacgtgcgcgcgcccgggctcgccgccatccggagcttccttctagagctggacggcggcagcgtcgtcgacggcgctgtggtggaggaggtggagccgcgggtgcgatgctgcgacgtggtggggtgagcgagctcggtcctcagctgctgtcactttccgggcggagttattcgcgatatacgccgcgaaaaggctgcggggggcttttggactcgagggtttaggccgccgattttgcagggtcccggcggccgctgaccggtggggtccggcgaagggcacagcgagtgagtgagtgacacagggacatgagaatgagagaaggagacagagggagaaaagaaaatgcttcatgtttagtgtttactacaaatcattactattagttaccattagtgtaggcagagataagcattgatgaagggagagggaggagactgtgaattcgaggggtatcttttcttctttttgcttttggttcgtccgttccctaactgcaccactgtatgtacgtactactaatccaccactactagacagttcaaattttgaaatacacttatgcagtacagctgagcctgcttcc

SEQ ID NO: 139314 - DNA, 1116 bp, Zea Mays
gttagggtgactctcgtaccttctaggtatgcaatttcttttctgcttcctttaataagtcaatacttgtcccttaatttttatattcaaatgttcaggctcaggcaaaaatacatagagcagaacgcttactatcaaagattgaagcttctttggtacttgccgatccatgtgatgatcaagaaatgattacagatgaggaaaagtctgttttccgtaggattggtttacggcttaaggcatatttgccacttggagttcgtggtgtttttgatggtgtaattgaaaatatgcacttgcattggaagcacagggaagttgttaaactaatttcaaagcagaagaccttgtcattcgttgaagagacggcacggcttcttgcatatgagagtggtggtatactagttgcaattgaaagagttccaaagggttatgcactcattttttaccgtgggaagaactataggagacctattaacataaggccaagaaacctcttaacaaaagctaaggcattgaagcgtgcggttgctatgcaacgccatgaggtttgtttgagttggaatgtagagttttttttttaattggaaattcttctaggtaacagcagaatctttctgatttcctttaaactaataatttattatgcaggcccttagtcagcatatagatcaactggaaagcaatataaagcagatgaagttggatttgggtattgaggactatgaggaacaagatgaggatagctcagattcagaaaatgaatatgacaacgcagtcacctctgttagctatgatgaggatcaagacgattttgacgaatcagctgatgaagatgaatatgatgattacgacgatgaagatgacgagattgacagctagtggtttggaattgtttcttgtgatgtgccgctctgaattagtgattctctggacgttgtacttctgtctctgggacatttcgtggtacgagaaaacaaagttgcttcttgtgttcactagtccttttctattagttaacctcaagggctcaaggtttagtttccaactttccaagttgttccaaccagttccatctcgcgaaggacagtgagacggaggaatggatgttgcaaa

SEQ ID NO: 139315 - DNA, 1013 bp, Zea Mays
gttagggtgactctcgtaccttctaggtatgcaatttcttttctgcttcctttaataagtcaatacttgtcccttaatttttatattcaaatgttcaggctcaggcaaaaatacatagagcagaacgcttactatcaaagattgaagcttctttggtacttgccgatccatgtgatgatcaagaaatgattacagatgaggaaaagtctgttttccgtaggattggtttacggcttaaggcatatttgccacttggagttcgtggtgtttttgatggtgtaattgaaaatatgcacttgcattggaagcacagggaagttgttaaactaatttcaaagcagaagaccttgtcattcgttgaagagacggcacggcttcttgcatatgagagtggtggtatactagttgcaattgaaagagttccaaagggttatgcactcattttttaccgtgggaagaactataggagacctattaacataaggccaagaaacctcttaacaaaagctaaggcattgaagcgtgcggttgctatgcaacgccatgaggcccttagtcagcatatagatcaactggaaagcaatataaagcagatgaagttggatttgggtattgaggactatgaggaacaagatgaggatagctcagattcagaaaatgaatatgacaacgcagtcacctctgttagctatgatgaggatcaagacgattttgacgaatcagctgatgaagatgaatatgatgattacgacgatgaagatgacgagattgacagctagtggtttggaattgtttcttgtgatgtgccgctctgaattagtgattctctggacgttgtacttctgtctctgggacatttcgtggtacgagaaaacaaagttgcttcttgtgttcactagtccttttctattagttaacctcaagggctcaaggtttagtttccaactttccaagttgttccaaccagttccatctcgcgaaggacagtgagacggaggaatggatgttgcaaa

SEQ ID NO: 139316 - DNA, 515 bp, Zea Mays
aaggtctgtcagcagcaattgttaagctctgggagaagagcttggtggtgaaaatagctgtcaaacgtggaatacagaacacaaataataaaataatggcagaagaaataaagaatctaacagggggtaccttgcttcttcgaaataaattttatattgtaatatatcgtggaaaagacttcctcccaacatctgtggcagctgtgttggctgaaagagaggagttgacaaaggatatttacaatatggaggagcagagaagaagggttttgattacacaaccttcggatgatggcttagatggccatgctcttgctggtactcttgctgaatttcaggaggcccaagctcgttggggaagagaagtgactgctaaggagcaagaagaaatgaaagaagcttcttctagatcagaaaagcaaaagctttacaggaaactcgaacacaagctttctattgctcaggcaaaaatacatagagcagaacgcttactatcaaagattgaagcttctttg

SEQ ID NO: 139317 - DNA, 2058 bp, Zea Mays
gcgcaaaagcctttttccgagatcggcgaaacaaatcgctgtaaaacccagcctgctaatcgccccactaggagtagtaggaggactctccgaggtccgagcggggtaggcaggtgtccgaaacggatcaccaaaccccgccggcgcagccgagagatccgacgtcgccgcgatccatggccgcctcgacggcggcggcgcggcgtctcctcctcgccctcgccgtcctcgccgcctgcctcggctcggcgccgcacggggccgtcgcgctccgctcgctcggcgtcgggggcgccaaggcggccgacggggacgcggccgtggacctcgacgcgtccaacttcaccgccttcctccagacttcgccggagtcgttcgcggtcgtcgagttcttcgcccactggtgtcctgcctgcagaaactacaagcctcactatgagagggttgcaaaacttttcaatggcccagatgctgcacatccagggactgttgtgatggcacgagttgattgtgcatcaaaggtgaacgtggatctttgcaacaaattctctgttgaccattatccttacctggtgtggggtccgccaacaaaattcaatttggctcagtggaaaccaaagcaagagaatagtgaattggaactaattgatgatggaagaacagcagatcggttactgaaatggataaataagaagatgggaagctcattcaatttagacgacaaaaagtatgagaatgaaagtatgcacccaaaaaatacttcagatcctgaacagattgttcgagcaatttatgacgttgaggaagctacatctcatgcattgcagataattttggagcacaagatgatcaaaccagacactcgtgactcgcttattagctttttacaaattttggtggctcatcatccatcaaagaggtgtcgaagaggatctgctgagctacttattgactttgatgatcactggcatacaaacctctcattaagtttggaagacagtactacactgttgaaaggtgcaggagagaaagtatgtggaaatggagtgccacgtggatactggattttctgccgaggaagtaaaaaggaaacaagaggatttagctgtggcctatgggttttgctgcattcactaactgtccgaatcggagatggagagagccaaacaacatttacatcaatttgtgatttcatccacaatttcttcatatgtgaggaatgccgcacacacttctatgaaatgtgttcaagtgtatcagtccccttcaaatctgcccgtgaccttgccctctggctatggaccgcgcataacaaagttaacgagaggttgatgaaagaagaaaaggagttagacaatgctgatccttcatttcctaagatcatatggcctccaaagcaactctgtccattgtgctaccgttcttctagtaggacggctgatggagccatgcaggttgagtggaatgaagatgaagtattcaatttcttggttaactactacgggaagatgcttgtatcatcctacagggagacctccatgcagtcctttcaagtagcctcaatttctgacgattcttccgcatccagtgccgcaacagtacctattggagctgccctgggtatcgcccttgctagctgtacatttggggcgctagcatgcttctggaggacccaacagaagaacagaaagcaaagaaagaactggaactgaatatcttgcaccacttgcaaaccctaaactgcatgtctgcatcagaagtagcctccgtgagtgtaaattttctggaccggttatcttgacgatgggcccaaaagagtcgaaaacagatgaaaaacatacagagtagatttagtagtgctgagtcacgtggtagtgttgcgcgacggcgcgaactttgttgcaacaggtaatacagattgaacgtgtaaactctgcccttaacatgtttctcggatacctttacctggttatcgatgtaatattatcaatttaatgagtgaaaacgctgtgccttactttattgctgagctgaaacttcatcgatgttgtatctgtc

SEQ ID NO: 139318 - DNA, 2161 bp, Zea Mays
gcgcaaaagcctttttccgagatcggcgaaacaaatcgctgtaaaacccagcctgctaatcgccccactaggagtagtaggaggactctccgaggtccgagcggggtaggcaggtgtccgaaacggatcaccaaaccccgccggcgcagccgagagatccgacgtcgccgcgatccatggccgcctcgacggcggcggcgcggcgtctcctcctcgccctcgccgtcctcgccgcctgcctcggctcggcgccgcacggggccgtcgcgctccgctcgctcggcgtcgggggcgccaaggcggccgacggggacgcggccgtggacctcgacgcgtccaacttcaccgccttcctccagacttcgccggagtcgttcgcggtcgtcgagttcttcgcccactggtgtcctgcctgcagaaactacaagcctcactatgagagggttgcaaaacttttcaatggcccagatgctgcacatccagggactgttgtgatggcacgagttgattgtgcatcaaaggtgaacgtggatctttgcaacaaattctctgttgaccattatccttacctggtgtggggtccgccaacaaaattcaatttggctcagtggaaaccaaagcaagagaatagtgaattggaactaattgatgatggaagaacagcagatcggttactgaaatggataaataagaagatgggaagctcattcaatttagacgacaaaaagtatgagaatgaaagtatgcacccaaaaaatacttcagatcctgaacagattgttcgagcaatttatgacgttgaggaagctacatctcatgcattgcagataattttggagcacaagatgatcaaaccagacactcgtgactcgcttattagctttttacaaattttggtggctcatcatccatcaaagaggtgtcgaagaggatctgctgagctacttattgactttgatgatcactggcatacaaacctctcattaagtttggaagacagtactacactgttgaaaggtgcaggagagaaagtatgtggaaatggagtgccacgtggatactggattttctgccgaggaagtaaaaaggaaacaagaggatttagctgtggcctatgggttttgctgcattcactaactgtccgaatcggagatggagagagccaaacaacatttacatcaatttgtgatttcatccacaatttcttcatatgtgaggaatgccgcacacacttctatgaaatgtgttcaagtgtatcagtccccttcaaatctgcccgtgaccttgccctctggctatggaccgcgcataacaaagttaacgagaggttgatgaaagaagaaaaggagttagacaatgctgatccttcatttcctaagatcatatggcctccaaagcaactctgtccattgtgctaccgttcttctagtaggacggctgatggagccatgcaggttgagtggaatgaagatgaagtattcaatttcttggttaactactacgggaagatgcttgtatcatcctacagggagacctccatgcagtcctttcaagtagcctcaatttctgacgattcttccgcatccagtgccgcaacagtacctattggagctgccctgggtatcgcccttgctagctgtacatttggggcgctagcatgcttctggaggacccaacagaagaacagaaagtactaccatttacgttctttaaagaaaatttgactaaacattttaggttcgtaggattccattactaatccgagccttgtagattcatatcatagagaagtgattagggtctttttgtctcctttgttcatttcacaggcaaagaaagaactggaactgaatatcttgcaccacttgcaaaccctaaactgcatgtctgcatcagaagtagcctccgtgagtgtaaattttctggaccggttatcttgacgatgggcccaaaagagtcgaaaacagatgaaaaacatacagagtagatttagtagtgctgagtcacgtggtagtgttgcgcgacggcgcgaactttgttgcaacaggtaatacagattgaacgtgtaaactctgcccttaacatgtttctcggatacctttacctggttatcgatgtaatattatcaatttaatgagtgaaaacgctgtgccttacttta

SEQ ID NO: 139319 - DNA, 2166 bp, Zea Mays
gcgcaaaagcctttttccgagatcggcgaaacaaatcgctgtaaaacccagcctgctaatcgccccactaggagtagtaggaggactctccgaggtccgagcggggtaggcaggtgtccgaaacggatcaccaaaccccgccggcgcagccgagagatccgacgtcgccgcgatccatggccgcctcgacggcggcggcgcggcgtctcctcctcgccctcgccgtcctcgccgcctgcctcggctcggcgccgcacggggccgtcgcgctccgctcgctcggcgtcgggggcgccaaggcggccgacggggacgcggccgtggacctcgacgcgtccaacttcaccgccttcctccagacttcgccggagtcgttcgcggtcgtcgagttcttcgcccactggtgtcctgcctgcagaaactacaagcctcactatgagagggttgcaaaacttttcaatggcccagatgctgcacatccagggactgttgtgatggcacgagttgattgtgcatcaaagcacaggtgaacgtggatctttgcaacaaattctctgttgaccattatccttacctggtgtggggtccgccaacaaaattcaatttggctcagtggaaaccaaagcaagagaatagtgaattggaactaattgatgatggaagaacagcagatcggttactgaaatggataaataagaagatgggaagctcattcaatttagacgacaaaaagtatgagaatgaaagtatgcacccaaaaaatacttcagatcctgaacagattgttcgagcaatttatgacgttgaggaagctacatctcatgcattgcagataattttggagcacaagatgatcaaaccagacactcgtgactcgcttattagctttttacaaattttggtggctcatcatccatcaaagaggtgtcgaagaggatctgctgagctacttattgactttgatgatcactggcatacaaacctctcattaagtttggaagacagtactacactgttgaaaggtgcaggagagaaagtatgtggaaatggagtgccacgtggatactggattttctgccgaggaagtaaaaaggaaacaagaggatttagctgtggcctatgggttttgctgcattcactaactgtccgaatcggagatggagagagccaaacaacatttacatcaatttgtgatttcatccacaatttcttcatatgtgaggaatgccgcacacacttctatgaaatgtgttcaagtgtatcagtccccttcaaatctgcccgtgaccttgccctctggctatggaccgcgcataacaaagttaacgagaggttgatgaaagaagaaaaggagttagacaatgctgatccttcatttcctaagatcatatggcctccaaagcaactctgtccattgtgctaccgttcttctagtaggacggctgatggagccatgcaggttgagtggaatgaagatgaagtattcaatttcttggttaactactacgggaagatgcttgtatcatcctacagggagacctccatgcagtcctttcaagtagcctcaatttctgacgattcttccgcatccagtgccgcaacagtacctattggagctgccctgggtatcgcccttgctagctgtacatttggggcgctagcatgcttctggaggacccaacagaagaacagaaagtactaccatttacgttctttaaagaaaatttgactaaacattttaggttcgtaggattccattactaatccgagccttgtagattcatatcatagagaagtgattagggtctttttgtctcctttgttcatttcacaggcaaagaaagaactggaactgaatatcttgcaccacttgcaaaccctaaactgcatgtctgcatcagaagtagcctccgtgagtgtaaattttctggaccggttatcttgacgatgggcccaaaagagtcgaaaacagatgaaaaacatacagagtagatttagtagtgctgagtcacgtggtagtgttgcgcgacggcgcgaactttgttgcaacaggtaatacagattgaacgtgtaaactctgcccttaacatgtttctcggatacctttacctggttatcgatgtaatattatcaatttaatgagtgaaaacgctgtgccttacttta

SEQ ID NO: 139320 - DNA, 768 bp, Zea Mays
atcaaaaaagaagacgtaattgcgcaaaagcctttttccgagatcggcgaaacaaatcgctgtaaaacccagcctgctaatcgccccactaggagtagtaggaggactctccgaggtccgagcggggtaggcaggtgtccgaaacggatcaccaaaccccgccggcgcagccgagagatccgacgtcgccgcgatccatggccgcctcgacggcggcggcgcggcgtctcctcctcgccctcgccgtcctcgccgcctgcctcggctcggcgccgcacggggccgtcgcgctccgctcgctcggcgtcgggggcgccaaggcggccgacggggacgcggccgtggacctcgacgcgtccaacttcaccgccttcctccagacttcgccggagtcgttcgcggtcgtcgagttcttcgcccactggtcgacccctcgtctctgacttcgttcattcgttttttttacccttttggttcccgttgattcgatgcggccggcctcgttccaaatctctcggcgcgttagtctccgagtcgcggaagttgagatcgtacgatatgtgggaattgagatatttgaatctgtgactcgaaatccaagtgattatttcgtctcagctatggtgtgggcgacacctgaataatatagctccagcgattttttgtgttttttgggaatgctaggattgtttgttagtgtaagctgaggtctatcgggtggttgggtgcacggctcaatccgattagagtgttgctgccgagcttcac

SEQ ID NO: 139321 - DNA, 2635 bp, Zea Mays
cgatcgacgcccctcttatcacaggagggcggcggggctgctgtcggctactcggctccacgagaccacgactggagttcggcgaatcgacagtaggtggaggcggggctcacggccgacggagcctctcaccaacgcccaacgcccaacgccggttccctgggttgggctggccacttgctcctcgccggctggggctgaggtgtggccggcggcagctaggaacagcgacctgcgccagtcgaagcaacattgcgtcagggagcggaagacatgcgcgccgttggtgaatgacagctttgcatcaccttctctgccgctcccatttctccctcgaggcaagaaaaataaatcctagggtttctgcctccaatccgcggccgatgcctgacgccaatgagctggaagccgcccggcgcgtggcgaccttcaccttggcggagctctctatctcctcttcgacgttgcctcctcgctccaacctcccggcgctctttcgccgctgcctccagttgctgcctcttctcaacgctggcgatccaaaactagccgctcgatgctgccgcggcctcctcgcttccgttggcgccatcctctctcgggacctctcgccctccctcctccctgcaatcgaggtcttcactgagagtgttgtttctagtgaccatttgaggagctgcttgattatagccaactgtgctgcacgtgaaggatcaaggatgttcgctgaggctgacccatacgaggatgagcacataatgcttgaacttgtgtgccgccacttcatttcatcattactggacgagggggcatttgaggtgtttctgagtgcactttcttggtcggggagggcattgcagcggactccagaaatcagctttcagggggcttttgtgctggttcaaaggacctacctctctttgccggctgttgtacaagcacatcttttactgctcatgtcaagatgcaccagtggtcaaaatcttaactcgcatatgctagcgtttagatatgccatgaatctttatgtcagatatttaccggcattgcgtgttttcaacataacccgcagtgcaatacccccactgaattatttgggcaagaaaagatcttttagttgtatcaaagatagcactgatcagaaactcagaagtcagatctatcgtctgctttcgttttgtgaattgcactgtggtgatgatcttcctgtcaatgagagtgatattggttgcataattgaaatgaaccagcatatgtttcttgaaaagttcaggcaagaatgtattgtgtttgtgaagggtatattgtctagtatcctgtgctgtgcaaagcaaaaggaggtgagtgaacctgatactgaggtatcagatgagattatttgccttgctgcagcaactagggtaatgggctcctcaattctatacatcctgcacaataaaaattatgaagcaaactgcaaggaatacaatgttatatgtgaaattatcagtttgcttgggcaatatggaacagatgagcttcatagatatgacctcctggctattattggggagtcagtggaaagtgaaagtgcctcaatgctaatgttggctcattttgctagcttatcaacttgttgtttaagaagaaggcttggctttctgtggaaaggttgtattatcatgatgatgatcgccacaaatcttattgctgaagagcaaagttggggtacatttcatctccctatggatgtctccaaatattctccagttttctgcaataccgaaaaggggattgtagaggtttctgctcgaactaaagagataatattacggtataaaagcatacataaatctcataataaaggcaggcgcttttatgatgatggaatcagtttgggcgctcctgaggaatgcaattccagagttggaaagcctgccggtcaaaggttttttgagtgtcatcctgaatattcacgaaagtcgtgggctgatatactggattatgttgaatgtgaagaaggaaaagattattcaaatgccttgaagcaactccaaaagtttaagaagtttaaatatagaaaatggttcgacaagagacaatctaaacggcagtgtatcatggatactttgggactcaagtcaaggagctagtgtggtgagagcatctcaatcaccaggtcgggttcgaagcagcatctccattttttagagagaaaggtttgccccgatttctcctcctaggagttctcactcaggtgggactgtgggagcctcgggcactagatcagtcgcctctaaagtcaagaagctagtgtggcgaatctagttttttagagagaaacgtcgtcgcgattcaccaaggaagcatgctgtttggctggagtggatcgaggccacttgccttatgcgtgaatcttgattcctgacttatgcatgaatcttgatttgtggcttaatgttagattttaattctagcatatcctaacttgtagtgtgctaaaaagcagctttgttgttgtcgaagcgaggatattaaaatctggttccaccggcggctctttgtatcccctagatgctttcctgagagaaaatgggtaaatatcggtatgctattaaacgagcctgttttcgcttgtgttttgctaaacatccag

SEQ ID NO: 139322 - DNA, 2256 bp, Zea Mays
cgatcgacgcccctcttatcacaggagggcggcggggctgctgtcggctactcggctccacgagaccacgactggagttcggcgaatcgacagtaggtggaggcggggctcacggccgacggagcctctcaccaacgcccaacgcccaacgccggttccctgggttgggctggccacttgctcctcgccggctggggctgaggtgtggccggcggcagctaggaacagcgacctgcgccagtcgaagcaacattgcgtcagggagcggaagacatgcgcgccgttggtgaatgacagctttgcatcaccttctctgccgctcccatttctccctcgaggcaagaaaaataaatcctagggtttctgcctccaatccgcggccgatgcctgacgccaatgagctggaagccgcccggcgcgtggcgaccttcaccttggcggagctctctatctcctcttcgacgttgcctcctcgctccaacctcccggcgctctttcgccgctgcctccagttgctgcctcttctcaacgctggcgatccaaaactagccgctcgatgctgccgcggcctcctcgcttccgttggcgccatcctctctcgggacctctcgccctccctcctccctgcaatcgaggtcttcactgagagtgttgtttctagtgaccatttgaggagctgcttgattatagccaactgtgctgcacgtgaaggatcaaggatgttcgctgaggctgacccatacgaggatgagcacataatgcttgaacttgtgtgccgccacttcatttcatcattactggacgagggggcatttgaggtgtttctgagtgcactttcttggtcggggagggcattgcagcggactccagaaatcagctttcagggggcttttgtgctggttcaaaggacctacctctctttgccggctgttgtacaagcacatcttttactgctcatgtcaagatgcaccagtggtcaaaatcttaactcgcatatgctagcgtttagatatgccatgaatctttatgtcagatatttaccggcattgcgtgttttcaacataacccgcagtgcaatacccccactgaattatttgggcaagaaaagatcttttagttgtatcaaagatagcactgatcagaaactcagaagtcagatctatcgtctgctttcgttttgtgaattgcactgtggtgatgatcttcctgtcaatgagagtgatattggttgcataattgaaatgaaccagcatatgtttcttgaaaagttcaggcaagaatgtattgtgtttgtgaagggtatattgtctagtatcctgtgctgtgcaaagcaaaaggaggtgagtgaacctgatactgaggtatcagatgagattatttgccttgctgcagcaactagggtaatgggctcctcaattctatacatcctgcacaataaaaattatgaagcaaactgcaaggaatacaatgttatatgtgaaattatcagtttgcttgggcaatatggaacagatgagcttcatagatatgacctcctggctattattggggagtcagtggaaagtgaaagtgcctcaatgctaatgttggctcattttgctagcttatcaacttgttgtttaagaagaaggcttggctttctgtggaaaggttgtattatcatgatgatgatcgccacaaatcttattgctgaagagcaaagttggggtacatttcatctccctatggatgtctccaaatattctccagttttctgcaataccgaaaaggggattgtagaggtagcgcttgcctatatcatatattgattcttcctggttcatatttattttcctttttttctttttgcattattttatttctacaattccattcaatttgagtaccatgtatgcaggtttctgctcgaactaaagagataatattacggtataaaagcatacataaatctcataataaaggcaggcgcttttatgatgatggaatcagtttgggcgctcctgaggaatgcaattccagagttggaaagcctgccggtcaaaggttttttgagtgtcatcctgaatattcacgaaagtcgtgggctgatatactggattatgttgaatgtgaagaaggaaaagattattcaaatgccttgaagcaactccaaaagtttaagaagtttaaatatagaaaatggttcgacaagagacaatctaaacggcagtgtatcatggatactttgggactcaagtcaaggagctagtgtggtga

SEQ ID NO: 139323 - DNA, 2291 bp, Zea Mays
cacgcttggcggtccccgtagaccaagtccactcgccgatccctctccgagatctccacccacttatttcccctcccaccgcggccaggcctcagtcctctctgtcgcggagccgccgcaacccagcgtcccccgaagtctaaccctagatccggaccggccatggcgtcccgccgggtcgtctcctcgctcctccgctccgcgtcccgcctgcgggccgcctcgcccgctgctccacgaccgcgcgcgccaccgcaccgcccgtccccggccgggtacctcttcaaccgcgctgccgcctacgcctcttccgccgcggcccaggcggcacctgccaccccgccgccggccaccgggaagaccgggggcggcaagatcaccgacgagttcaccggcgctggcgccatcggccaggtgtgccaggtgatcggcgccgtcgttgacgtgcgcttcgatgagggcctcccgcccatcctcacggcgctcgaggtgctcgacaacaacatccgcctcgtgctcgaggtggcgcagcaccttggcgagaacatggtgcgcaccatcgctatggacggcacggaggggctcgtccgcggccagcgcgtcctcaacactggctcccccatcaccgtgcctgttggcagggctacccttggacgcatcataaatgttattggtgaaccgattgatgagaagggtgacataaagacaaaccacttcctccctattcatcgtgaagcccctgcttttgttgagcaggccactgagcagcaaattcttgttactggaatcaaggtcgtggatcttcttgcaccctaccaaaggggtggaaagattggtctcttcggtggtgcaggagtgggtaaaactgtgctcattatggagttgatcaacaatgttgctaaggcccatggtggtttctctgtgtttgctggtgttggagaacgtacccgtgaaggtaatgatctgtacagggaaatgattgaaagtggtgtcattaagctagatgacaagcagagcgaaagcaagtgtgctcttgtttacgggcagatgaatgagcccccgggtgctcgtgctcgtgttgggttgactggtttgactgttgctgaacatttccgtgatgctgaaggacaagatgtgcttctgtttattgacaacattttccgttttactcaggcaaactctgaggtgtctgctcttcttggacgtatcccatctgctgtgggataccagccaacccttgccactgatcttggaggactgcaagagcgtattacgacaacaaagaagggttctattacatctgtgcaggccatctacgtgcctgccgatgacttgacggatcctgctcctgctactacctttgcccatcttgatgctacaactgtgttgtcacgacagatctctgagcttggtatttatcctgctgttgatccactggattccacatcaagaatgctttctccccacgtgctgggtgaggatcactacaacactgctcgtggtgtgcagaaggttcttcagaactacaaaaatcttcaggatattattgctatcttgggtatggatgagctcagtgaggatgacaagctgacagtcgcccgtgcaagaaagattcagcgtttcctgagccagcctttccatgtcgctgaagttttcacgggtgctccaggaaagtatgtggagctgaaggaaagcgtgaagagtttccagggtgttttggatgggaagtatgatgacctccctgagcagtcattctacatggttggtggcattgaggaagtcattgctaaggctgagaaaattgccaaggagtctgcttcataaggaggcttcttgcttgttcaaccctgtacaagttccatttttggattttaagcgtttatttatgcttttcccagttaggcatgacgagctggagagtccatctcctgctgagagatgtttgttttacccttctttgcttcctccaccttacacccaaataagcaactgcagtgacgttggttttggctgcacccaaactacatgactgaagaaacttgtggcctgtgtaacgcgaatccatcagaacgccaaagttatggcttctggttgtggcaaattatggttcctccctgttcggttgagtggttgcattctggaggtatcttgttctggactcaggctaatgattgtgcgtgcaactgtttcggagtcatttcaaaggttatccactttcgttggagttgatttcataacttatggtgtgtttggttgaggagcggagaggaatggaatggtttcattcttat

SEQ ID NO: 139324 - DNA, 2677 bp, Zea Mays
cacgcttggcggtccccgtagaccaagtccactcgccgatccctctccgagatctccacccacttatttcccctcccaccgcggccaggcctcagtcctctctgtcgcggagccgccgcaacccagcgtcccccgaagtctaaccctagatccggaccggccatggcgtcccgccgggtcgtctcctcgctcctccgctccgcgtcccgcctgcgggccgcctcgcccgctgctccacgaccgcgcgcgccaccgcaccgcccgtccccggccgggtacctcttcaaccgcgctgccgcctacgcctcttccgccgcggcccaggcggcacctgccaccccgccgccggccaccgggaagaccgggggcggcaagatcaccgacgagttcaccggcgctggcgccatcggccaggtgtgccaggtgatcggcgccgtcgttgacgtgcgcttcgatgagggcctcccgcccatcctcacggcgctcgaggtgctcgacaacaacatccgcctcgtgctcgaggtggcgcagcaccttggcgagaacatggtgcgcaccatcgctatggacggcacggaggggctcgtccgcggccagcgcgtcctcaacactggctcccccatcaccgtgcctgttggcagggctacccttggacgcatcataaatgttattggtgaaccgattgatgagaagggtgacataaagacaaaccacttcctccctattcatcgtgaagcccctgcttttgttgagcaggccactgagcagcaaattcttgttactggaatcaaggtcgtggatcttcttgcaccctaccaaaggggtggaaagattggtctcttcggtggtgcaggagtgggtaaaactgtgctcattatggagttgatcaacaatgttgctaaggcccatggtggtttctctgtgtttgctggtgttggagaacgtacccgtgaaggtaatgatctgtacagggaaatgattgaaagtggtgtcattaagctagatgacaagcagagcgaaagcaagtgtgctcttgtttacgggcagatgaatgagcccccgggtgctcgtgctcgtgttgggttgactggtttgactgttgctgaacatttccgtgatgctgaaggacaagatgtgcttctgtttattgacaacattttccgttttactcaggttagttttgcagggatttcttttgcctgaaaacgatacaacttttgaagagattatctttctagtttcctgtttgaatattgtgtccatgttaaatctgttggcattgttgcgctcttgatatcaggcaaactctgaggtgtctgctcttcttggacgtatcccatctgctgtgggataccagccaacccttgccactgatcttggaggactgcaagagcgtattacgacaacaaagaagggttctattacatctgtgcaggccatctacgtgcctgccgatgacttgacggatcctgctcctgctactacctttgcccatcttgatgctacaactgtgttgtcacgacaggtttgtgttcatttgctacaactgtgttgtacatgatgtgctcattgtgatggtgggagcttcgtgtgcagatctctgagcttggtatttatcctgctgttgatccactggattccacatcaagaatgctttctccccacgtgctgggtgaggatcactacaacactgctcgtggtgtgcagaaggttcttcagaactacaaaaatcttcaggatattattgctatcttgggtatggatgagctcagtgaggatgacaagctgacagtcgcccgtgcaagaaagattcagcgtttcctgagccagcctttccatgtcgctgaagttttcacgggtgctccaggaaagtatgtggagctgaaggaaagcgtgaagagtttccaggtacagtttgaactgtttttttttttgctcagaaactgctgcttggaaatattgtattccttactatgctttctcataatgtttagatatgcatctgtagacatcactgggtccttgctttgctttaccatttttgttgtttgaggccctcatgtttagttttgtcagacaacactcgtgcattctatacatgttgcagtatgatgtttctgtttcacgatctgcttttctatggaatcttatattgtgcagggtgttttggatgggaagtatgatgacctccctgagcagtcattctacatggttggtggcattgaggaagtcattgctaaggctgagaaaattgccaaggagtctgcttcataaggaggcttcttgcttgttcaaccctgtacaagttccatttttggattttaagcgtttatttatgcttttcccagttaggcatgacgagctggagagtccatctcctgctgagagatgtttgttttacccttctttgcttcctccaccttacacccaaataagcaactgcagtgacgttggttttggctgcacccaaactacatgactgaagaaacttgtggcctgtgtaacgcgaatccatcagaacgccaaagttatggcttctggttgtggcaaattatggttcctccctgttcggttgagtggttgcattctggaggtatcttgttctggactcaggctaatgattgtgcgtgcaactgtttcggagtcatttcaaaggttatccactttcgttggagtt

SEQ ID NO: 139325 - DNA, 893 bp, Zea Mays
acttatttcccctcccaccgcggccaggcctcagtcctctctgtcgcggagccgccgcaacccagcgtcccccgaagtctaaccctagatccggaccggccatggcgtcccgccgggtcgtctcctcgctcctccgctccgcgtcccgcctgcgggccgcctcgcccgctgctccacgaccgcgcgcgccaccgcaccgcccgtccccggccgggtacctcttcaaccgcgctgccgcctacgcctcttccgccgcggcccaggcggcacctgccaccccgccgccggccaccgggaagaccgggggcggcaagatcaccgacgagttcaccggcgctggcgccatcggccaggtgtgccaggtgatcggcgccgtcgttgacgtgcgcttcgatgagggcctcccgcccatcctcacggcgctcgaggtgctcgacaacaacatccgcctcgtgctcgaggtggcgcagcaccttggcgagaacatggtgcgcaccatcgctatggacggcacggaggggctcgtccgcggccagcgcgtcctcaacactggctcccccatcaccgtgcctgttggcagggctacccttggacgcatcataaatgttattggtgaaccgattgatgagaagggtgacataaagacaaaccacttcctccctattcatcgtgaagcccctgcttttgttgagcaggccactgagcagcaaattcttgttactggaatcaaggtagtcttgttcatttttcgtgctagaattactttgagtcctctaatttagtagcacctatgcggtcattgcctgaatggtgattatacattatagtataatgtttctttgacatacaggtcgtggatcttcttgcaccctaccaaaggggtggaaagattg

SEQ ID NO: 139326 - DNA, 1558 bp, Zea Mays
tcatctgagggggttatcgggccgaaatttctacatgggcctaaccccagatccaagcttccaaactcatcgccctccccacggccagaaccctagcctcgtcgccatggcctcctccttgctccgctccggccaccgcctctttctccgacgccaccgcctacccgcggcattctccaccgctacggccgaggagctaatcgacgtacgcaagcttcccaccaactacgacccctccaccttcgacccgtcctccccgtcccgcccgctgccgtccgaccgcgtgtggcgcctcgtcgaggatgtctcctccctcaccctcgcggagaccgcggctctctcctctctcctcctccgccgcctcgacataccctccgcaccacccatcgccatcctcaactccgccgcggggctgggcggcgccgccacggccggcgcggcgggggagaaggcgggggcggcggcggcggcggcggccgagaagaccgtcttcgagctgcggctggagggctacgacgctgcgagcaagatcaaggtgatcaaggagatccggtcgttcaccgacctggggctgaaggaggccaaggagctggtggagaaggcgcctgcggtgatcaagggcggcctatccaaggacgaagccaaggcgatcatcgagcggatgaaggcagttggcgccaaggtcgtcatggactgatcagaacaagcctttttcaacggtgaaatcctgcaactgcgaatctatgcttcatttcagatcaactttaagtgcaaggatggacgggtggattgtggacagttcctctatgaacttgcggaaattgatgtggcacagcgctaataggttttcaagcacgttaatcaaatgaacattgatcctgcaatgctatagggtattggcatcaatcgctcgtcattatgttcgaatttgtgacctttcaattgtgggaagttaaaatgacatagttagttattttgttcatcgcagggtcttgtttgagactggatgtccatatggatacaataacattttgctcttgtttctgtgaatgtacaaatcgattcttattgaatgcaacttaactctcgactgttgttgctataatgctatgtgcaggtggccaggtgctgtagctccatgcgcttctctatcctcagggttgatgccgcatgctgcttggctcggcactgttactgaaatttcgaggctcaacggtcttcaatcattcatgtcatcatgtgtttcttcttgtcctgtttaggaatagccttcgctaacaggaaacagggaataaattatttctaaatttgagataaaaagcatgcacagttggagtattaaagcatgtgttctacttctaggcctctggttgacgtcttgccttacgtagactgattggtacactgtctcactcacggtttgccacacctaaagttaggctagtttgactagattagaagtgtgttttgtttgtagctatagttgtgataagatttttctttcattaatgacttgtaaaaacgttacaaaattcttttaggcataacaagatgtggc

SEQ ID NO: 139327 - DNA, 860 bp, Zea Mays
cagaaccctagcctcgtcgccatggcctcctccttgctccgctccggccaccgcctctttctccgacgccaccgcctacccgcggcattctccaccgctacggccgaggagctaatcgacgtacgcaagcttcccaccaactacgacccctccaccttcgacccgtcctccccgtcccgcccgctgccgtccgaccgcgtgtggcgcctcgtcgaggatgtctcctccctcaccctcgcggagaccgcggctctctcctctctcctcctccgccgcctcgacataccctccgcaccacccatcgccatcctcaactccgccgcggggctgggcggcgccgccacggccggcgcggcgggggagaaggcgggggcggcggcggcggcggcggccgagaagaccgtcttcgagctgcggctggagggctacgacgctgcgagcaagatcaaggtgatcaaggagatccggtcgttcaccgacctggggctgaaggaggccaaggagctggtggagaaggcgcctgcggtgatcaagggcggcctatccaaggacgaagccaaggcgatcatcgagcggatgaaggcagttggcgccaaggtcgtcatggactgatcagaacaagcctttttcaacggtggccaggtgctgtagctccatgcgcttctctatcctcagggttgatgccgcatgctgcttggctcggcactgttactgaaatttcgaggctcaacggtcttcaatcattcatgtcatcatgtgtttcttcttgtcctgtttaggaatagccttcgctaacaggaaacagggaataaattatttctaaatttgagataaaaagcatgcacagttggagtattaaa

SEQ ID NO: 139328 - DNA, 898 bp, Zea Mays
ggcttggcccacacatcagccgccggacgaggaaacctttgcgatagcaggagcagtccaggactcgttttttttcttgctagaaccttgcgagttccgactccctcactcatctccgtccgtccgccgcaccgtcgccgagcgccgctccgcgccggagacgtcctgtttttttgccgcctacgagcgctgtccctcttttctttccgcggctctgccccaacttctgcatccgaatctcccacgaagttgtcacggcgatggcagcgaccggcggcgtttcaactgacgatatcccgatcctgcaggcagagaacctcaccagcaacgtcaagtccgtccactacagtcgaacattcttgtcgatcattggtggagttgttgctggaatctggggattcacaggcttgacgggatttgtcttctactttctgataatgatggttgcatctatcgggctcttagcaaagtcaaagttttcagtgcagacatacttcgatagttggaccaggatttcaattgaaggagtttttggtggccttatgtcattcgtgctgttctggacatttgcttatgacattgttcatatcttctgatggacgtagaaagagctaccctccaaggaaaatatggaatttcatctgatgtcgaacattcccaatgggctctttgtacactcagtttttattttggtaattgttgatataatattttgtgatactatatcgttggacctaagcagagctcataaactgatgtagcaactccttcgcttggatgatctgtagcagttgtgatttgtcatttccagtaatgaatgtaaactttgattgatggacactcggatttttttgcattatcacttgaaatgtgaatggccggtctggtgctgtctcac

SEQ ID NO: 139329 - DNA, 1122 bp, Zea Mays
gtccaggactcgttttttttcttgctagaaccttgcgagttccgactccctcactcatctccgtccgtccgccgcaccgtcgccgagcgccgctccgcgccggagacgtcctgtttttttgccgcctacgagcgctgtccctcttttctttccgcggctctgccccaacttctgcatccgaatctcccacgaagttgtcacggcgatggcagcgaccggcggcgtttcaactgacgatatcccgatcctgcaggcagagaacctcaccagcaacgtcaagtccgtccactacagtcgaacattcttgtcgatcattggtggagttgttgctggaatctggggattcacaggcttgacgggatttgtcttctactttctgataatgatggttgcatctatcgggctcttagcaaagtcaaagttttcagtgcagacatacttcgatagttggaccaggatttcaattgaaggagtttttggtggccttatgtcattcgtgctgttctggacgtatcctttttcttcgataatttataaacagtcttgttcatactctatttctgttcttcatgtgcttgtgtagataggctgaatattgcaaatagttgggatggtaaaccaacatgttcatactctactggttgcatattgggtaacatactgttgccatctattttggtggaatataaatgaacaatattttagtcaatcggacaaaacaatccctgaaccagcgaagcagtttatttttcctaatctataaacatgtttatgcttatttcctatctatgttcaactggtttagtgttggtccttctctgctcttgttcatccttgatgagagagatagatttgcttatgacattgttcatatcttctgatggacgtagaaagagctaccctccaaggaaaatatggaatttcatctgatgtcgaacattcccaatgggctctttgtacactcagtttttattttggtaattgttgatataatattttgtgatactatatcgttggacctaagcagagctcataaactgatgtagcaactccttcgcttggatgatctgtagcagttgtgatttgtcatttccagtaatgaatgtaaactttgattgatgg

SEQ ID NO: 139330 - DNA, 542 bp, Zea Mays
ttgtagtgagcgagaccgctgcattccaaactcaatatatatactgcctgtaacagtattattcttattacatcacttggaggaccattaatctgagacatcttggcagcagcagcagcagctagctagccagccaagaacatcgtcccgtttgcattggacgcatcctctcaaaacaggagcaagggggagaagagaacggggggagaggggagagagaatgaaaaataatacagctagctagctaggagatctatagattagtagtagtagccggcactagtacgttaagatacctagagatattttttatatatatctcggaccatgaagcctcaattccccacaacaacagctcaaaaccatctgcgtcgtcgtctcttttcctcctggtgctcagctcagctcagctcatatggaccgagaccgagcaagagcggagagttccagccggcaggcagtgggagccaacgcgcgcgtgtgcacacgcgcccttgcgcttctcctatctgtgcgggtgcgggtgcggccgcacgttttct

SEQ ID NO: 139331 - DNA, 453 bp, Zea Mays
ttgtagtgagcgagaccgctgcattccaaactcaatatatatactgcctgtaacagtattattcttattacatcacttggaggaccattaatctgagacatcttggcagcagcagcagcagctagctagccagccaagaacatcgtcccgtttgcattggacgcatcctctcaaaacaggagcaagggggagaagagaacggggggagaggggagagagaatgaaaaataatacagctagctagctaggagatctatagattagtagtagtagccggcactagtacgttaagatacctagagatattttttatatatatctcggaccatgaagcctcaattccccacaacaacagctcaaaaccatctgcgtcgtcgtctcttttcctcctggtgctcagctcagctcagctcatatggaccgagaccgagcaagagcggagagttccagccg

SEQ ID NO: 139332 - DNA, 1449 bp, Zea Mays
ccgacactttgaagcccgaagcacgacgggctcgtgccgggccagcacggcaatgcccatcttgcaggactagcttgcaggcattgccgtagcagctgtggccgcgtgctcgagcagtacttgagacttaagaaagggacacgaaccaaccagcctagcgacgccgacgccgccacgtcccaacgaaaaagaaacaaaaaagaagaagaggacagactgccagagtcatggcggccacgagctccgcctgcgcgtgcgcggcggtagcgctcgcgtccttcccgtccgccgcctccacctccgccccttcccgcgtctcggccagcagccaccgcggtcagcggcactccagggccgccaccgtcagatgttccagcacgtcgcccaacgtgtcccagggcgcgccggcgccggcgccgcccaagccgcaaatcgagctcgagttcgtcgggccgaagcccggtgccgacggctccttcccggtggaccgggcggaggcggccagcggcgagaagctcctccgtgacgtcatgaacgagaacaagatcgagctctacgccgcatacggtaaggtgatgaactgcggtggcggcggaagttgcggcacttgcatcgtcgagataatcgatggaaaggagctcctgaatgagaggacgaacaccgagaatcggtacctgaagaagaaaccagactcatggaggctagcttgccagactattgtaggcaacaaagagaactctggcaaggttgtggtccaacggctgccccagtggaagagatgaccgtgcagtgcagcaccacgttggtggatgattgatcgtccagttgtatgtcactaaaacgccatgccctgtgcattagagaagagacagaatcacctcgtcatatcgcttgtgaccagttctctgatactagtttgcaagtctgggcttcggtccacagtatatatgtgggatatatatctgtaaacaaaaaaaacaagaaggcagggcatgttgggatatatatctgtaaacaaaaaaacaagtttgggcttcggtccacagtatataagctgttttcacaaatggagaccagagtactccggtgtatgttggtagctttctgaaagaaaaaaaaaacaagaaggcagggcactagaattttcagcccttcaaaatttcctttcctgcatgttgtctctacggacatatgaatttttaacgaacatgtcactgctaacagaggcgtgcctctctgatacgtgcatggtgtcccgttacatgattctctccatgccatcgtgaattcgtgatgcagaacaatgtgatatggatgtatctgatttgtaatgttttgtatgcttatattccaatcatccgttgtagtctagctggtcaggatattcggctctcacccgaaagacccgggttcgagtcccggcaacggaacttttttatgtttttttag

SEQ ID NO: 139333 - DNA, 100 bp, Zea Mays
cgcagtgcgcacttgcctgcggcagcggcgcggcctgctcgctcgggctcacccgcggcggcggttcagcgagcttgctcggggcggcggcacgaggcct

SEQ ID NO: 139334 - DNA, 987 bp, Zea Mays
ctccagcctctgggctttggcgccctcaccggccatgctgcgtgcgactcacctcccactcccccagcagccactgccggcgcattcttcctttgattaatgtaagtttggcccggggctggacggcggcggctaggatttggtgcccactgagctgcctcacggttcaacctcatccaaggaaatcctgactggagtttctctaaacttcagcataccacgcagagtacaagacttattcagctcctgagtgtatctagaatattctttgtatgcttccctgctgtcgagtctagctgcttcctgtaattttgcaatagaaaaaggatcattaaggtgtacttctccatttttcctccagtgatgatctcccgggttgggaagagagtttgcttctgcacttccaggtggtaaagttcttgacgggaatgccaactcatggagatgaagtgcatcttgtgcaagcatttcaaatgttgagccctcaactctactaggtgtaccttcaaaacacttactgaccacttctgaagcaagaccaagggcctcaaatatctgggcacctttgtacgacgccagggtggaaatccccatctttgcaagaaccttcattattccattgttagaagcatagaaatacttgtcaataagttcctttggatacagctgtccgtcatcttgaagaggtattttctcatcaatctgtaaccgccatatggcttcaatagccaaataagggcatatagcatctgcaccaaatccaagaaggctacagaaatggtgcacttcacgaggttcagctgaatcaacaagcaaccctatgcgtgtcctctcaagattcaagacaagatgctgatggacagctccaactgccaatagagaactgacagctacacgatctggagagaaacctgtatggaaaaatagttcaaacctgacattttaaacctccaaatgctagagagtatatgacaagtaattttacag

SEQ ID NO: 139335 - DNA, 170 bp, Zea Mays
ctactatgacatatatggacatctacagtcagtgttacatatataatgctaaataattgtttcttatttgtaggatgacatgtcacactttaggaaaaaaatggctgctatattactatcttcagacctgaataagagaagggggtgtctgttatacaaaaatgaaaaag

SEQ ID NO: 139336 - DNA, 2470 bp, Zea Mays
gctggtacgacacagaccacgttcaattcaaaacccaaatcaactccgacgctcccagacaccagaccaccgtcgctcgctcgcctgcacaacctctccatccaggccacagctcgagaccaacgaccgacgcctagacgcggctgggcggtcggcctcacctcgttcccccgcctcccttcttcctgctccgcgtctcgatctcgactcccccgccgcgtcgcgcgacccggccagatctcgcccaccctgcgccgcggccatggataacttgatcaccctcgtcaacaagctgcagagggcttgcacggctctcggagaccacggagaggagagcgccctcccgacgctctgggactcgctgccggctatcgccgtcgttggaggacaggtgcccttcttcccttcccgggcacgttttttcgcgttggttctgattggatctggtgctgtcgccccagcttcgtgggtgtggatctcgcgggttgctggtggaaccgcgaggagctctggtaaatcatctgtgttggagagcgtggttgggaaggatttcctaccgaggggttcaggcattgtaacccggcggccgctggtgctgcagctccacagaattgatggtgacagggaatatgcagagttcatgcatcttccgagaaagagatttacagattttgctgctgtgagaaaggagatagctgatgaaactgaccgagaaacaggccgttcaaagcaaatatcaactgtccctatccatttaagcatattttctccccatggtaagatgcaaactcttgaagggtacattgttaccgtcgcattatcacatctcaactgtcctcttcctattgtgaatcttactcttattgatcttcctgggcttactaaagtagcagttgatggccaaccggagagtattgtacatgacattgaaaacatggttcgctcatatattgaaaagaagtgcacggttgttgattcaggtgaaaggacctttggtgtgctcacaaaaattgatctgatggataagggtaccgatgctgttgatatactggaaggaagatcttaccgtctccaaacaccatgggttggtgttgttaatcgatcccaacaagacatcaacaagaatgtggacatgattgctgctaggcgtagagagcgagagtattttgcatctacaccagaatataagcacatggcttctaggatgggatctgaatatttaggaaagatgctttcaaagcatttggaacaagtgatcaaatcaaggattccggggatccaatctcttataacaaagacaattgcagagctggaaactgaacttaatcgtcttggaaaacccattgctaatgatgctggggggaagctgtacacgatcatggaaatatgccgtatgtttgatggtatttacaaagagcatctggatggagtgcgccctggcggagagaaagtttaccatgtcttcgacaatcaatttcctgtagctattaaacgattgcagtttgataaacaactctctatggaaaatgtgaggaagcttataacagaggctgatggataccagcctcacttgatagctccagaacaaggatatagacgccttatagaatcttgtcttattagtatcagaggtcctgctgaggcggctgttgacgcggtccatgcaattctcaaggaccttgtccgcaaggctatcaatgaaacacatgaactgaagcagtttcccacccttcgtgtggaagtaggcaatgcagcttttgagtcattggatagaatgagggatgaaagcaagaaaaatacattaaagctagttgacatggaatgcagctacttgacagtagatttcttcaggaagcttcctcaggatgttgagaagggtggaaatccaagccactctatttttgatagatataatgactcttatcttagacgaattggacaaactgttctgtcatatgttaatatggtgtgttcgaccttgaggaactccatcccaaaatctattgtttattgtcaagtgcgagaggccaagcgctcgctgctcgatcacttcttcactgaactgggagcaagagagatgaagcagctttccaaacttcttgacgaagacccagcagtcatggaacgcagaactaaccttgcaaagaggctcgagctgtaccggagtgcccaatccgaaattgatgccgttgcatggtccaaatagtcctgatggccaagatatctgttcttaccccttgtctggcgattctctctcctattctggggcatatatagctgattttttgtgttgtaggtcaggtcattttatatatcaccggagctgtacggtgtcatgttccttgtgcttgaggatctaggggggcacttgtatctcgaacaagttcgtacatcgcgctttcgttccatctatgtgcagctgcatgaaaaccatgtttttctgtcacgcaaaaagtttgtcctattaaaa

SEQ ID NO: 139337 - DNA, 903 bp, Zea Mays
atgccagtcggggcgcaggacgaggactcctaccggtggaacgccccggacatcctctgctaccggtgcgactcgtgcagggccggcgtgatggagcaggtgcgccaagactggcacaagatctttgtgctcgacgtcgccgtgctcgccgctctcgtctgcatctgctcatgcgggtgttgtgccttcaggaacgctcgccactcccggtcccagtacccatacggggtaaaccaaacgtccaagataaacccacgctgggactactgcgcccccggtgcctggagcagtgcagggaggaggagcgggagaagcggcaagagcggagcaggcacgaggccgacgaccgcagcggcgagggctcgtcggaggatgagcgcgagcgcgagcaggagaaggaggagaagcagaaggaccggcggtcgtacgtgttcgaccggcgcagcctccgacgagcgcgagcgcgagcaggagaaggaggagaagcagaaggaccggcggtcgtacgagcagtccggctcctgcaagccgccgacggcgtgccagtacagcggaggcatgccagtcggggcgcaggacgaggactcctaccggtggaacgccccggacatcctctgctaccggtgcgactcgtgcagggccggcgtgatggagcaggtgcgccaagactggcacaagatctttgtgctcgacgtcgccgtgctcgccgctctcgtctgcatctgctcatgcgggtgttgtgccttcaggaacgctcgccactcccggtcccagtacccatacggggtaaaccaaacgtccaagataaacccacgctgggactactggtactctaagatagagagttctgttgtttactctctctgctttcccatttatcgcctcttattgtttgtagagtaa

SEQ ID NO: 139338 - DNA, 150 bp, Zea Mays
gacacagagggcagagcgccgccgccgccgccgagtcaaggaacaaggatgatgggcagtgggatgggcgcgtacggcggcgcgctgcgaccggtggagagcgcggccggggagacgatgctgctgtggggcctggggcagcccgagtcg

SEQ ID NO: 139339 - DNA, 105 bp, Zea Mays
aaaagtgttataaagcagataacaaaggctaaaaatgttataaatatacagaaatcatctgaatcctctattctctgggtgaaagaaaaggtagaagaaagagta

SEQ ID NO: 139340 - DNA, 2184 bp, Zea Mays
cttttccctgtttccccgtccggagcgaggcgaggggtgagggtgacgcaaccgagcgccgccaaccgcgaccgccttcctcacctgtgtcacctccgccgccatcctcacttcgatcgcctctgccgtcatcctcagcttgtcctgtcgcactgcttgtgccgcaccagcttgttgccttccgcgcccggctgcgccagccaggctcgtccggccctcgcgccgcttacttctattttgcccggccccatagaattcgaaccgcaaatgagacaggcgctactgcagccgtgggaaaggaaacgcaaaacaacgccaacgccgtcttctcttcctggaggcgggcctgggaaggaggtggagcgcagctggctccgctagggtttcccctgttctcggtggaggcgccgcgcctccgggacacgggctgcgtcaggtgactgctgcaggctcgttgatgcaagggaggtcaagccgtctgtgattctcttcctgaagttctatcccgatgccgtccatcacgcactacgtgctggatcgcctcctagagacacggtcgcctgttcatgtccagaaggtggttcccaagcctccgcccccgcctcctgacaaggccacaccggtgccagtgtctactgccaggacacggtcgtcgctggcatcactctatgccacgcctgagaacaccaccctgccggacttgccttcctcgttcccgggaacctggtcgccatacctcatcaaccataagaggcggggagcctcccttgccaggaccttctctcagggtgatgctgggagggaggtcagccagccaaacctccctgtgatgctgcctgctttgccgagagggtgtgaacccactcaagtccaggagcccgagtttgtgtttcagcaagcaggcaatggtcaagctgaaggtgaaagtgctgtagaagaggctttgaatggcaaaagtgtaatgctacagaaaggcaaggggtctgttatagctgaaatagagcaggagcagcctgagtttgagttttgtcaaagtcttgaagcattagtgaagcctgttaatgttagaaggcctttgaatggtgaggcacccaaaatttgtgagagtgacacctttgaatggcggaagcctagttcacctcttggaacctctgttggtacaccaggtgcagaattctacgatgcatttgaagaaatatccagtgacggtggaactcggtcatcgcgaggcatggatgatgacctccgtgaaatgaggttaagtctgttgatggaaattgagaggaggacacaaacagaagaagcacttgagatctggcaacaggaatggaagaacctgagtcaccacctatctcttgttgccttatcactaccatctccaagtatagctgaggattctgattgtttaaaggtggatcctggagctgagttgtgccagcaaataactgtttcacaacttgtggctgctgctattgctcggggttttgctcgtgctgaagttgaatcagagatggaaactatgattgcgacaaagaactttgagattggaaggctgtcggatagggtccagtactatgaagctgcaaacagggaaatgtctcaaagaaaccaagaagctatcgagatgtcaaggcaacaacgcaaggggcgtaagaagcgacagaagtggttctgggcttcagttgggcttgcagtcacccttggcgccacagccattgcctggtcttacgtaactccgtcgcagccccaggccagtgcagatccaagtagtgctgccagccagtaagctactaagtaagctaggatgaagacatactcctcgttccagaagcctaacaaagatctagctatactcctatagagggaaaaaaatgctgtataagttttctctttggtgatcggccgtgatcgccgccgcaatcttgatctgtcgcttcgtttgtagaagcgttgtatggcccatctcgtagatggttgagcaaataacacaatggatgtgggcgtgtggctatggttagtgaaccatgcccgtagcccactcaagcggagtttattttgtcaagttcactttattatttatttatttatttttgctcttccgaaatatgatggatcatggaagtcgtctgccgagcggaccggaccgactggttctggggcctgtggctgtggtctgtggagagg

SEQ ID NO: 139341 - DNA, 1525 bp, Zea Mays
aacggacactctatatctcctctcatcgtcgcgcaaaatcctcgccaaccgatcctcctcctcctcgctcgacgagtcgtctgtgagaacaatggcaactgccgcgggtggagccaccgccggctcgcgccgtcgggcgctgctcctgatcgcgaactacgccgcgctgctggtggggtccgtctcgtcgagcctgctgtccaggttctacttcgcgcgaggcgggcggaaccggtgggtggtgacgctggtgcagtcggcgggcttcccactgctggtcgtcgccgtcctcgtcgccggccgccccgccgcggcgccgcgccccttcacgtggttctcgaggcggttcctcacggtgtgcctcgtcatcggcgcgctcatgggcgccaacaacctgctcttctcgtacagcacgtcgttcctgcccgtgtccacgtcgtcgctgctgctgtcgacgcagttggcgttcacgctcgtgctggccgccgtcatcgtccgccacccgctcaccttcgtcaacctcaatgccgtcgtgctcctgaccgtcagctccgtgctcctggcgctccgctcgggggactccggcgagaacccggacgggggcggcgcggccgcggcgcactatttcgccgggtacgtggtcacgctgggcgcggcggggctgttcgccgcgtacctgcccgtcatggagctcctgtaccgccaggccgtgtccggcgggttcgtcctggccgtggaggtgcaggcggtgatgcaggccatggcctcgctggtggcggcgatcgggctggcggccaagggaggcctgggcggcgacgtggcgcgctggaagggctcggcggcgctctactgggtcgtggtgtccaccctggtccttacttggcaggcgtgcttcatgggcacggcgggggtgatctacctcacgtcgtcgctacacagcggcgtgtgcatgaccgccgtgctgacggcgaacgtgctgggcggcgtggtggtgttcggcgacccattcggcgccgagaagggcatcgccaccgcgctctgcgcatggggcctcgcctcctacctctacggcgagtacaccaagaaaaagaaagaagaggaggatgaggccgtcgccgtcgccgacacgtccgctgacagcgtccggaagagcctcacaggcggcgccggagacgagctagaagccgtctgaaaacaaactaaaggccatagggggtatgaaccgtgtgatcagggacgaagcaagaatggaaactgaaaagggtgtagctgcagttgttgagtcatgttagatcgatggattataggcaaagttacaagcaaccaaacttgtaactgatggccagctcttctggctgctagctagtagctattaatctagtcatgaggtttcactagcggtttaagtgatcagggtttagtactttagtgtagtgtggggtgggtggaatacaacatgtaaaccagctgttcctcctccttactcactgtcgtcatcaatattcaatagccgctgttgttgata

SEQ ID NO: 139342 - DNA, 180 bp, Zea Mays
caaggacctcacagtggtggctgcacttgtgtacctccctaacgatctaccacttttatactattgaaattagaagacaattaatagcatatacagttggttaggaagaagcacactttctgcagatgacttatgcatggtgaactaacactaaggaagtagcatagaaaacagttggag

SEQ ID NO: 139343 - DNA, 428 bp, Zea Mays
ttacaatgtttggaattgtgattctaaaatatagagcttgggcccttggcaaataatagtttggtaagggcacaatctacaactcagtcttatacttatgattttgtttgcatattgtttccgaaatgggaaaagaaaggccaaaagttatctaatgcagcaaccttatacgtgtcattcaaagcttatgaagaagactctaggagcagctttaagaaacaagaaagaaattatcggtgtcgtgtgtcggtcatcagacaacttttcttgaccaccaactccaagcgatctgacagattattgtataattgcgccgctggaattgtgtctatggtctgtagcctgttcggcgtgactcaaaatataaacctttggatatacatgcaacagtctacaagctgttatgtagtagttcaattattttgttc

SEQ ID NO: 139344 - DNA, 207 bp, Zea Mays
gccattccagggatgcttctagctctggtactctttttttataacaggagattcaaggatgtgaattttccaccagctatgtctccccaaaacggtgggattatatgtggtatgcagtatgctctaacggggtatgatattggcttggtagctgcactagctgctgggatcttttcttagtctcctcaacgaccttactgtacctgg

SEQ ID NO: 139345 - DNA, 2010 bp, Zea Mays
gccgtcaatggaaggtcccagactctccccaccatgcccctgcccacgcgtccccactcctgcgctgatatctcgcacccgtagacaccgccacagcaccccggcccgccgcgcgatctccagcccccgccccatgcgccttcgtcaaacccctccgccgcggtaatgcaggcttgagatcgagcagatccgccatcccgcgccctcgctctcgctctcgccccgacacgcattcaccctggccccgctgccctgcgccgccataccctcgccccatccttccctgcccccgcaccgcatccaacacgcagatccagcgccgtcgccgcgagcatacagaggcaccgcgcggacacgacgacgtcgcgtgctgtggtgaaggaggtcgccctgaactggttggctacaaaggcgacaaggtgggtggtgtcgcggaactccacgagcaggcccacgagcgccgggagcgagcgcgcgcactcctcagtcatgaggcccacgacgcctcaccttcctcaagctccacggcgtcctcaccctcgcgagctagcaacgccttcctctccgtcgtccgtgtgcatctccatgacgcttatggatgtgtacgccaagaccagccggctcgagctggtcctgcaggtgctcggcgaaatgcctagcaggaacgtggtctcgcggaccatgcttgccgcctcgctggtaagtttctatacaacaagcagcaaatgtattactaaccttgcacttagacaggtttgcgtgagcagtgatgcatattggatctatcctagatttctcaaaatacgagatttgactccgcccattttcaaccgtatcggtgaagatagggacaagagctgacttgaggaagatgatggattttggatgcttgaacgaacggtggaaaaaatcgggtacaagtggcttcaaaaacacacgagtacattctctattcctttatttttaaggactaggcataatctgccgcacgacacaatataccaaactgcacaaaactgaagcattccattagttcacatgtttgattagggtagggcaagtgcaattagtaacgaaaacaacacgacattgtaaaaggaccattgtcgcaaaaagtatttattcttcagcattgattacaaatcaagccagctaaataacaagtttcagaaacttgcaacaacgcttcaaaatatctgtaggaaggactgtcgccatggcacgccagccctttattcatccgattctgtgcggacagctgcagaaataaccatgttaatgtgtatttcgcatgtttgttatgttggacactgaagttttccattatgtagatcattgtgtctgaatattttgttttttcatgtagagcactaaagctacaatgtttttattgggccctgatcatacctatgctctgtttagccagtgattttgtgagaccattatccaaaaattgttgcctggctacggtcgatatatatatatagtcttattttccgttttgcattctgtctggttctgtatatattctatttagaaaacactggctattttccgttttgctctgtttagtcaatcaatttaactgttgtaaaagatgcagtgatttctatgaacacaatttttggatgaacacattatatttacctgtagcagttgtcacaggagaatttatcctctgtgttttaagttacaagtgtccagtcagaaaatacattataaatagaaatcactggaactcatagcagtagccctggcacacttaatcaccataaaaattggatgaacacaatggaactcatagcagtgctgaaagggaaatgtgcccttgggacatttctaaatattttggtgattgagtgccaactcaagtgcttaaaatgtgaatttatgcaatggatgaacaaagtgcaaatcaagagcaaaggtatgtttctaagtcttagtacattggttttgtgtactaatatatttgtctaagtggtagaaacagaaagaagaagagaagaa

SEQ ID NO: 139346 - DNA, 1682 bp, Zea Mays
gaatttctaccattctctccccccgaattgatgctgccatctgccattgccattgtgtgagggagacgacgtgaaaggagaccaagggccacgagatggctctgcgcggcaacctgcccgtgctgctccttttgttcgccgcggcggccaccgcgagcggtaagtcggcgaggctcgaccttttcccagcagcaccgggagcatcggtaaccgcgcgggcgaggggcgaccggcgccggcacgcgtacatctccgcccagctcccgtcgcgccggggcggaaggcagagggttgccgcggaagtggcgtcgtcgtccgcggtctccttgcctatgtcgtcgggggcctacgcaggcacagggcagtactttgtgaaggtcctcgtgggaacgcccgcgcaggagttcacgctggtagcggacaccggcagcgagctcacctgggtcaaatgcgccggtggcgcctccccgccgggtctcgtgttccggccagaggcctccaagtcgtgggcgcccgtcccgtgctcgtccgacacgtgcaagttggacgtgcccttctccctcgccaactgctcctcgtcggccagcccatgctcctacgattaccggtacaaggaaggatcggctggggcgctcggcgtcgtgggcaccgactcggcgaccatcgcgctgcccggcggcaaggtggcgcagctgcaagacgtggtcctgggttgctcctccacgcatgatggccagagcttcaagtcagtagacggcgtgctgagcctgggcaacgccaagatctcgttcgcgtcccgcgccgccgcgcgcttcggtggtagcttctcctactgcctcgtcgaccacctcgccccgcgcaacgccaccgggtacctcgccttcggcccagggcaggtgccccggaccccggcgacgcagacgaagctgttcctggaccccgcgatgcccttctacggcgtgaaggtcgacgccgtccacgtggccggccaggccctcgacatccccgccgaggtgtgggaccccaagagcggcggcgtgatcctcgactccggcacgaccctcacggtcctcgccaccccggcgtacaaggccgtggtcgccgcgctgaccaagctcctggccggggtccccaaagtggacttccccccgttcgagcactgctacaactggacggcaccgcgaccgggagcgccggagatcccaaagctggcggtgcagttcaccgggtgcgcgcggctggagccaccggcgaagagctacgtgatcgacgtgaaacctggcgtgaagtgcatcggcttgcaggagggcgagtggcccggcgtgtcggtcatcggcaacatcatgcagcaagagcacctctgggaattcgacctcaagaacatggaggtcaggttcatgccgtcgacctgcacccggtgatcgtaaagctgacctcgatggttttgttgatcagagcatttgaagggaaatgttttttctgaacataaaaaaatagaaaacgaaaatgatgctctgcataaatcaactttctgcacgagatacatattgatattctgcgcgatttgctatccttgcatcgaacctagtacagtacgcgcttgaccgcaatgtatcggtgtcacccatcaacaacttatattatcatacaaagccatcactaccggaatccgggtctttgcc

SEQ ID NO: 139347 - DNA, 1564 bp, Zea Mays
gaaatggcgtcgcgcggccacctgctgctagcgctgctcgtcctggcgtcgtcgtcggcggcggcggcgagcggcgcgcgacaccaggcgcacgggaggcggggaaagccggcgcggccgcggccgcggccgcggctggagctcgttcccgccgcgccgggcgcgtccctgcccgaccgcgcgagggacgacgcgcgccgccacgcgtacatccggtcgcagctgctggcggcgtcccgcacccgcgggcgccgcgccgccgaggtgggcgcgtccgcgtccgcgtccgcgttcgccatgccgctctcgtcgggggcctacaccggcacgggccagtacttcgtgcggttccgcgtgggcacccccgcgcagccgttcgtgctggtggcggacaccggcagcgacctcacctgggtcaagtgcagcggcgccggcgacgggaccggcgatgcgccgcggcgggtgttccgcgccgccgcgtccaggtcgtgggcccccatcgcgtgctcctccgacacgtgcacctcctacgtgcccttctccctcgccaactgctcgtcgccggccagcccctgcgcctacgactaccggtacaacgacggctcggcggcgcgcggcgtggtgggcaccgactccgcgaccatcgcgctgtccgggagcgagagccgggacggcggcggcaggcgcgcgaagctgcagggcgtcgtgctgggctgcaccgcgtcgtacgacggccagagcttccagtcctcggacggcgtgctcagcctgggcaacagcaacatctccttcgcgtcccgcgccgccgcgcgcttcgggggccgcttctcctactgcctcgtcgaccacctggccccgcgcaacgccaccagctacctcaccttcggcccgccggggcccgagggcggcgccgcggcgtccagcagctcctcctccgccgcagcgcggacgccgctgctgctcgaccgccggatgagcccgttctacgccgtggcggtcgacgccgtgcacgtggccggggaggcgctcgacatccccgcggacgtgtgggacgtcgcccggggcggcggcgcgatcctcgactccgggaccagcctcaccgtcctcgccaccccggcgtacagggccgtggtcgccgccctcagcgagcgcctcgccggcctgcccagggtctccatggacccgttcgagtactgctacaactggaccgccgccgcgctggagatccccgggctggaggtgcgcttcgccgggtccgcgcgcctgcagccgccggccaagagctacgtcgtcgacgcggcgcccggggtgaagtgcatcggcgtgcaggagggcgcgtggcccggagtgtcggtcatcggcaacatcctgcagcaggaccacctctgggagttcgacctcagggaccggtggctccggttcaagcacacgcgctgcgccctatgatgattgctcacggacgccgcgcatcattcctctatgccttgataaaatttgtgacgagtttggagggagttgggtttttttttcctgaatgaatgaatgaaaatataatttttagcgc

SEQ ID NO: 139348 - DNA, 2492 bp, Zea Mays
gcccccgcgacagcgactccgcccccagacctcgtcaacccgccgcccgcacgtcactccactaacgtgtccccccggcccaccatacccgatggttccccgccaccccacgaccttgacctcgcccgggccgcgccgtcgctgtccccgcgcctgcagcccccgcacgcagccccacccccgacgccacacactcgcacacactaccggaccagggcgaccagaacgctgcgacgggctgcgctgcgcagtccacgccacgccacgccgcacggcaggccgacggaatagtaccgtgccgttggcggcacgtacagcagttcaggccggccttcccctcgcggctctgtccgttataatccgcacgaccgcacgcacggtgcagaagtaagggctgggaccaccggacgacgatgcggggctcctcgggcgcgcgcatgaccgcgcaggacgcggcggaggcggcggtgggcgcggtcgggtgcggctacgacctgacgggggacctccgcctgggccgcgccaagcctggtggccggctggtggacctcgacggcgccgggaagggcccggggacgtcccagtccgcgtccccgtcgccgcgggagctggcgttccccggcggggccgccgtggcgggcgtgccggccggggtcgtcgccggcaagggcgagcgcgcgcggttccgctccgacgtgctccccttcgcgcagatggcggaggaggtgaaccggtcgctgtcgctgcccgccagcaagatcccctcgggcgccttcaacgccatgttcgactaccgcgggtgctggcaccgcgacgccgccgccacgcgcagcctctgcttcgacgcccgcctcgtcgagctctacagcgtcgaggccgtgcgcgccagcctcgccctcagggaccacgtcaggcgggacctcccgcccgtctgggaccccgccgcgctcgccgagttcatcgacaagtacgggactcacgtcatcgtcggggtgaagatgggaggcaaggacgtggtgtgcgtgaagcagctcaagggctccagcctcacgcagagcgacgtgcaggcccggctcaaggagctcgccgacgacaggttctcggaggattccacagcaagttccaattcttccaccgcgggaggcggcaggttgtcgcaggggctaaacgttgggcccggatcggccgcctggcagtccttcagatcacccgtcgtgtctcacaaggatgacatggtgtgcattcacgtcaggagaggcggcgtcgacagcggccagggccacggcaagtggctctccaccatcaccggcttcccggacgtcatctccatgtcgttcgtgcccataacgagcctgctcaccggcgtccggggcagcggcttcctcaaccacgcggtgaacctctacctcagatgcagacaagccggccatagaggagctgcagcagtttctcgagttccaggtgcctcggctctgggctccagagttcggtcagctcccgctctccctccagaggcggaagaacatcctgccgtctctccagttcaccctcatgggccctaaacttcacgtcaacactgccaaggtcgactcctgcctccgcccggtgaccggcatccggctgttcctggaaggcaagaagagcgaccagctgggcgtccacctgcagcacctgtcggcgacgcccggcgcgatcacggtgctcggcgaggccgcgtcctcggcggacgacgcggccgccgtgaacgagcgcgcctacatcgagcccgtccggtcgccgctgctctcgcacatctgcacggcgcccgtgcagtacaacggcgcgcttatcgacgactgcgccgccatcgtcaccagcgcctggctcgaggtgcgggacgcctgctgcctcaagaaggtgctcttcctgcgcctcggcttctccggcgtcgcggacatgaagatccgccgctccgagtggggcggggccctggtcgcgccgcgcaggtccgggtcgctgtcggcgcgcctcagcgccgcgctgtccggtggcctggcgccggcgccgccggcggtggaggagaaggtggaggtcaactccgccatattccccaagggcccgccggtgccgctcccggttcagaagatggccaggcacatcgacaccaccgaggtgagcaggggccccgacgacctgccgggctactgggtcgtcaccggcgccaagctctgcatggaaggcggcaaggttgcgctcaaggtcaagtactcgttgctcatcgcagtgcaagaggaccctgaaggacactgacgctttgaggcctccattgccgtcgtcgacgcctcaactctctctgtctgtgttgtgttgcggcggtgtaaagttcagttgtgggcaactacgttgtacagaatacagtgtgcccagaggctgatgtttttttggtttgttcactcagttcttgcaaatctaggaacagtttaggtttagatataatactgagaaattacctg

SEQ ID NO: 139349 - DNA, 2647 bp, Zea Mays
agcaaaaatgagacgacgaagcagcaagactcccgccgcaggactgcttccttcgtatgatcgtatcctacgtcctgaccccagcccgcccgcggtctcctacaaatccccgtgcccgactgcccgtagcccccccaagctccggcctccggctgccccgcccccgcgacagcgactccgcccccagacctcgtcaacccgccgcccgcacgtcactccactaacgtgtccccccggcccaccatacccgatggttccccgccaccccacgaccttgacctcgcccgggccgcgccgtcgctgtccccgcgcctgcagcccccgcacgcagccccacccccgacgccacacactcgcacacactaccggaccagggcgaccagaacgctgcgacgggctgcgctgcgcagtccacgccacgccacgccgcacggcaggccgacggaatagtaccgtgccgttggcggcacgtacagcagttcaggccggccttcccctcgcggctctgtccgttataatccgcacgaccgcacgcacggtgcagaagtaagggctgggaccaccggacgacgatgcggggctcctcgggcgcgcgcatgaccgcgcaggacgcggcggaggcggcggtgggcgcggtcgggtgcggctacgacctgacgggggacctccgcctgggccgcgccaagcctggtggccggctggtggacctcgacggcgccgggaagggcccggggacgtcccagtccgcgtccccgtcgccgcgggagctggcgttccccggcggggccgccgtggcgggcgtgccggccggggtcgtcgccggcaagggcgagcgcgcgcggttccgctccgacgtgctccccttcgcgcagatggcggaggaggtgaaccggtcgctgtcgctgcccgccagcaagatcccctcgggcgccttcaacgccatgttcgactaccgcgggtgctggcaccgcgacgccgccgccacgcgcagcctctgcttcgacgcccgcctcgtcgagctctacagcgtcgaggccgtgcgcgccagcctcgccctcagggaccacgtcaggcgggacctcccgcccgtctgggaccccgccgcgctcgccgagttcatcgacaagtacgggactcacgtcatcgtcggggtgaagatgggaggcaaggacgtggtgtgcgtgaagcagctcaagggctccagcctcacgcagagcgacgtgcaggcccggctcaaggagctcgccgacgacaggttctcggaggattccacagcaagttccaattcttccaccgcgggaggcggcaggttgtcgcaggggctaaacgttgggcccggatcggccgcctggcagtccttcagatcacccgtcgtgtctcacaaggatgacatggtgtgcattcacgtcaggagaggcggcgtcgacagcggccagggccacggcaagtggctctccaccatcaccggcttcccggacgtcatctccatgtcgttcgtgcccataacgagcctgctcaccggcgtccggggcagcggcttcctcaaccacgcggtgaacctctacctcagatacaagccggccatagaggagctgcagcagtttctcgagttccaggtgcctcggctctgggctccagagttcggtcagctcccgctctccctccagaggcggaagaacatcctgccgtctctccagttcaccctcatgggccctaaacttcacgtcaacactgccaaggtcgactcctgcctccgcccggtgaccggcatccggctgttcctggaaggcaagaagagcgaccagctgggcgtccacctgcagcacctgtcggcgacgcccggcgcgatcacggtgctcggcgaggccgcgtcctcggcggacgacgcggccgccgtgaacgagcgcgcctacatcgagcccgtccggtcgccgctgctctcgcacatctgcacggcgcccgtgcagtacaacggcgcgcttatcgacgactgcgccgccatcgtcaccagcgcctggctcgaggtgcgggacgcctgctgcctcaagaaggtgctcttcctgcgcctcggcttctccggcgtcgcggacatgaagatccgccgctccgagtggggcggggccctggtcgcgccgcgcaggtccgggtcgctgtcggcgcgcctcagcgccgcgctgtccggtggcctggcgccggcgccgccggcggtggaggagaaggtggaggtcaactccgccatattccccaagggcccgccggtgccgctcccggttcagaagatggccaggcacatcgacaccaccgaggtgagcaggggccccgacgacctgccgggctactgggtcgtcaccggcgccaagctctgcatggaaggcggcaaggttgcgctcaaggtcaagtactcgttgctcatcgcagtgcaagaggaccctgaaggacactgacgctttgaggcctccattgccgtcgtcgacgcctcaactctctctgtctgtgttgtgttgcggcggtgtaaagttcagttgtgggcaactacgttgtacagaatacagtgtgcccagaggctgatgtttttttggtttgttcactcagttcttgcaaatctaggaacagtttaggtttagatataatactgagaaattacctg

SEQ ID NO: 139350 - DNA, 2632 bp, Zea Mays
agcaaaaatgagacgacgaagcagcaagactcccgccgcaggactgcttccttcgtatgatcgtatcctacgtcctgaccccagcccgcccgcggtctcctacaaatccccgtgcccgactgcccgtagcccccccaagctccggcctccggctgccccgcccccgcgacagcgactccgcccccagacctcgtcaacccgccgcccgcacgtcactccactaacgtgtccccccggcccaccatacccgatggttccccgccaccccacgaccttgacctcgcccgggccgcgccgtcgctgtccccgcgcctgcagcccccgcacgcagccccacccccgacgccacacactcgcacacactaccggaccagggcgaccagaacgctgcgacgggctgcgctgcgcagtccacgccacgccacgccgcacggcaggccgacggaatagtaccgtgccgttggcggcacgtacagcagttcaggccggccttcccctcgcggctctgtccgttataatccgcacgaccgcacgcacggtgcagaagtaagggctgggaccaccggacgacgatgcggggctcctcgggcgcgcgcatgaccgcgcaggacgcggcggaggcggcggtgggcgcggtcgggtgcggctacgacctgacgggggacctccgcctgggccgcgccaagcctggtggccggctggtggacctcgacggcgccgggaagggcccggggacgtcccagtccgcgtccccgtcgccgcgggagctggcgttccccggcggggccgccgtggcgggcgtgccggccggggtcgtcgccggcaagggcgagcgcgcgcggttccgctccgacgtgctccccttcgcgcagatggcggaggaggtgaaccggtcgctgtcgctgcccgccagcaagatcccctcgggcgccttcaacgccatgttcgactaccgcgggtgctggcaccgcgacgccgccgccacgcgcagcctctgcttcgacgcccgcctcgtcgagctctacagcgtcgaggccgtgcgcgccagcctcgccctcagggaccacgtcaggcgggacctcccgcccgtctgggaccccgccgcgctcgccgagttcatcgacaagtacgggactcacgtcatcgtcggggtgaagatgggaggcaaggacgtggtgtgcgtgaagcagctcaagggctccagcctcacgcagagcgacgtgcaggcccggctcaaggagctcgccgacgacaggttctcggaggattccacagcaagttccaattcttccaccgcgggaggcggcaggttgtcgcaggggctaaacgttgggcccggatcggccgcctggcagtccttcagatcacccgtcgtgtctcacaaggatgacatggtgtgcattcacgtcaggagaggcggcgtcgacagcggccagggccacggcaagtggctctccaccatcaccggcttcccggacgtcatctccatgtcgttcgtgcccataacgagcctgctcaccggcgtccggggcagcggcttcctcaaccacgcggcagacaagccggccatagaggagctgcagcagtttctcgagttccaggtgcctcggctctgggctccagagttcggtcagctcccgctctccctccagaggcggaagaacatcctgccgtctctccagttcaccctcatgggccctaaacttcacgtcaacactgccaaggtcgactcctgcctccgcccggtgaccggcatccggctgttcctggaaggcaagaagagcgaccagctgggcgtccacctgcagcacctgtcggcgacgcccggcgcgatcacggtgctcggcgaggccgcgtcctcggcggacgacgcggccgccgtgaacgagcgcgcctacatcgagcccgtccggtcgccgctgctctcgcacatctgcacggcgcccgtgcagtacaacggcgcgcttatcgacgactgcgccgccatcgtcaccagcgcctggctcgaggtgcgggacgcctgctgcctcaagaaggtgctcttcctgcgcctcggcttctccggcgtcgcggacatgaagatccgccgctccgagtggggcggggccctggtcgcgccgcgcaggtccgggtcgctgtcggcgcgcctcagcgccgcgctgtccggtggcctggcgccggcgccgccggcggtggaggagaaggtggaggtcaactccgccatattccccaagggcccgccggtgccgctcccggttcagaagatggccaggcacatcgacaccaccgaggtgagcaggggccccgacgacctgccgggctactgggtcgtcaccggcgccaagctctgcatggaaggcggcaaggttgcgctcaaggtcaagtactcgttgctcatcgcagtgcaagaggaccctgaaggacactgacgctttgaggcctccattgccgtcgtcgacgcctcaactctctctgtctgtgttgtgttgcggcggtgtaaagttcagttgtgggcaactacgttgtacagaatacagtgtgcccagaggctgatgtttttttggtttgttcactcagttcttgcaaatctaggaacagtttaggtttagatataatactgagaaattacctg

SEQ ID NO: 139351 - DNA, 2329 bp, Zea Mays
ggctgccccgcccccgcgacagcgactccgcccccagacctcgtcaacccgccgcccgcacgtcactccactaacgtgtccccccggcccaccatacccgatggttccccgccaccccacgaccttgacctcgcccgggccgcgccgtcgctgtccccgcgcctgcagcccccgcacgcagccccacccccgacgccacacactcgcacacactaccggaccagggcgaccagaacgctgcgacgggctgcgctgcgcagtccacgccacgccacgccgcacggcaggccgacggaatagtaccgtgccgttggcggcacgtacagcagttcaggccggccttcccctcgcggctctgtccgttataatccgcacgaccgcacgcacggtgcagaagtaagggctgggaccaccggacgacgatgcggggctcctcgggcgcgcgcatgaccgcgcaggacgcggcggaggcggcggtgggcgcggtcgggtgcggctacgacctgacgggggacctccgcctgggccgcgccaagcctggtggccggctggtggacctcgacggcgccgggaagggcccggggacgtcccagtccgcgtccccgtcgccgcgggagctggcgttccccggcggggccgccgtggcgggcgtgccggccggggtcgtcgccggcaagggcgagcgcgcgcggttccgctccgacgtgctccccttcgcgcagatggcggaggaggtgaaccggtcgctgtcgctgcccgccagcaagatcccctcgggcgccttcaacgccatgttcgactaccgcgggtgctggcaccgcgacgccgccgccacgcgcagcctctgcttcgacgcccgcctcgtcgagctctacagcgtcgaggccgtgcgcgccagcctcgccctcagggaccacgtcaggcgggacctcccgcccgtctgggaccccgccgcgctcgccgactccctccctgcaggttcatcgacaagtacgggactcacgtcatcgtcggggtgaagatgggaggcaaggacgtggtgtgcgtgaagcagctcaagggctccagcctcacgcagagcgacgtgcaggcccggctcaaggagctcgccgacgacaggttctcggaggattccacagcaagttccaattcttccaccgcgggaggcggcaggttgtcgcaggggctaaacgttgggcccggatcggccgcctggcagtccttcagatcacccgtcgtgtctcacaaggataacgtggtgggatcctcgcaggacatggtgtgcattcacgtcaggagaggcggcgtcgacagcggccagggccacggcaagtggctctccaccatcaccggcttcccggacgtcatctccatgtcgttcgtgcccataacgagcctgctcaccggcgtccggggcagcggcttcctcaaccacgcggtgaacctctacctcagatacaagccggccatagaggagctgcagcagtttctcgagttccaggtgcctcggctctgggctccagagttcggtcagctcccgctctccctccagaggcggaagaacatcctgccgtctctccagttcaccctcatgggccctaaacttcacgtcaacactgccaaggtcgactcctgcctccgcccggtgaccggcatccggctgttcctggaaggcaagaagagcgaccagctgggcgtccacctgcagcacctgtcggcgacgcccggcgcgatcacggtgctcggcgaggccgcgtcctcggcggacgacgcggccgccgtgaacgagcgcgcctacatcgagcccgtccggtcgccgctgctctcgcacatctgcacggcgcccgtgcagtacaacggcgcgcttatcgacgactgcgccgccatcgtcaccagcgcctggctcgaggtgcgggacgcctgctgcctcaagaaggtgctcttcctgcgcctcggcttctccggcgtcgcggacatgaagatccgccgctccgagtggggcggggccctggtcgcgccgcgcaggtccgggtcgctgtcggcgcgcctcagcgccgcgctgtccggtggcctggcgccggcgccgccggcggtggaggagaaggtggaggtcaactccgccatattccccaagggcccgccggtgccgctcccggttcagaagatggccaggcacatcgacaccaccgaggtgagcaggggccccgacgacctgccgggctactgggtcgtcaccggcgccaagctctgcatggaaggcggcaaggttgcgctcaaggtcaagtactcgttgctcatcgcagtgcaagaggaccctgaaggacactga

SEQ ID NO: 139352 - DNA, 2103 bp, Zea Mays
agcaaaaatgagacgacgaagcagcaagactcccgccgcaggactgcttccttcgtatgatcgtatcctacgtcctgaccccagcccgcccgcggtctcctacaaatccccgtgcccgactgcccgtagcccccccaagctccggcctccggctgccccgcccccgcgacagcgactccgcccccagacctcgtcaacccgccgcccgcacgtcactccactaacgtgtccccccggcccaccatacccgatggttccccgccaccccacgaccttgacctcgcccgggccgcgccgtcgctgtccccgcgcctgcagcccccgcacgcagccccacccccgacgccacacactcgcacacactaccggaccagggcgaccagaacgctgcgacgggctgcgctgcgcagtccacgccacgccacgccgcacggcaggccgacggaatagtaccgtgccgttggcggcacgtacagcagttcaggccggccttcccctcgcggctctgtccgttataatccgcacgaccgcacgcacggtgcagaagtaagggctgggaccaccggacgacgatgcggggctcctcgggcgcgcgcatgaccgcgcaggacgcggcggaggcggcggtgggcgcggtcgggtgcggctacgacctgacgggggacctccgcctgggccgcgccaagcctggtggccggctggtggacctcgacggcgccgggaagggcccggggacgtcccagtccgcgtccccgtcgccgcgggagctggcgttccccggcggggccgccgtggcgggcgtgccggccggggtcgtcgccggcaagggcgagcgcgcgcggttccgctccgacgtgctccccttcgcgcagatggcggaggaggtgaaccggtcgctgtcgctgcccgccagcaagatcccctcgggcgccttcaacgccatgttcgactaccgcgggtgctggcaccgcgacgccgccgccacgcgcagcctctgcttcgacgcccgcctcgtcgagctctacagcgtcgaggccgtgcgcgccagcctcgccctcagggaccacgtcaggcgggacctcccgcccgtctgggaccccgccgcgctcgccgagttcatcgacaagtacgggactcacgtcatcgtcggggtgaagatgggaggcaaggacgtggtgtgcgtgaagcagctcaagggctccagcctcacgcagagcgacgtgcaggcccggctcaaggagctcgccgacgacaggttctcggaggattccacagcaagttccaattcttccaccgcgggaggcggcaggttgtcgcaggggctaaacgttgggcccggatcggccgcctggcagtccttcagatcacccgtcgtgtctcacaaggatgacatggtgtgcattcacgtcaggagaggcggcgtcgacagcggccagggccacggcaagtggctctccaccatcaccggcttcccggacgtcatctccatgtcgttcgtgcccataacgagcctgctcaccggcgtccggggcagcggcttcctcaaccacgcggtgaacctctacctcagatgtatgtactgttagtctggtctggtggagtcgtctggtgtgtgattgtgttgtgttggatgtgctatctaatcgtcggttgctcatccggttttcctgctcgtaacgtggaggcagacaagccggccatagaggagctgcagcagtttctcgagttccaggtgcctcggctctgggctccagagttcggtcagctcccgctctccctccagaggcggaagaacatcctgccgtctctccagttcaccctcatgggccctaaacttcacgtcaacactgccaaggtaagtcacccgctagccggccatcgaacacaacacgacggcattcgcattcccagttcgggacttcttttaatccatcggtgctctcttctcccgtacaggtcgactcctgcctccgcccggtgaccggcatccggctgttcctggaaggcaagaagagcgaccagctgggcgtccacctgcagcacctgtcggcgacgcccggcgcgatcacggtgctcggcgaggccgcgtcctcggcggacgac

SEQ ID NO: 139353 - DNA, 2213 bp, Zea Mays
gggtcggtccttctttcctctacgaaaaaaccattttttcagtataaaatttcgtttttctcctctcagtctccgacgccgccgcactcatccccccagacgaccaccctcctcctcctcccccacccacctcgccggaaccctagcgccgaccgcctgccgtgcccatcgacggcgatcgcattgctgcgccccgatggcgacccgcgcctccaagaattgcctctgcgcgggcagctcttcgttcgatgaccccgacgtggtcgaggtgtctccggcaaccgccgcggctgcagggtgggcctccggccaccacaagaggaagcggagccaggttgtaccgcaagaagtgattgaaatcgatgatgatgatcctgatggagtcatacttattggtgataaagcacaggtggaaaagaataagcaaactgctgtatgtcccatggattgctcaaagcatgccaagagtggttgggttcaggacatccctggtccaagcacatatgcttcaaaatataccagttcctgggttgacctgaaagtgtttcaagacgaggcagtttacaactattctgatggctacccctttgatggatttgaagaagactatgcttatgatgaagatgagtttgaggatgatggttatgacactccactcattgaaagtgagtttcaatttagtttgtctgccaagtttgataacttcaatgttctacatggtctggaggcttctttaccgtggaagcataagactgctattgagattgcaaataagaccaaacctagtaaggctgtagatgataaaatcgaagaaaaatacaaggccttcaaacgatttgatactgttgatgatcatagtgatcattattattcaaagccagaatcaagaaaggttcaggcggtaaaaaagccatcaaaagactgggtcaaacgtattcagcatgagtggaaagtcttagagaaagatttgccagaaactatatttgtgagggcatatgaggatagaatggacctgcttagagctgtcattatgggaccagctggtactccttaccatgacgggctcttcttctttgacatttacttccctcctcagtatccaaatataccaccgatggtgaattaccgtgctggtggtttgcggcttaatccaaacttgtatgcttgcgggaaggtgtgccttagcctcctaaacacgtggactggcagtggatgtgagaagtggaacccggccaattcaactatgctgcaggtcctggtctctattcaagctttggttttgaatgcaaagccttatttcaatgagcctggctacgctatgcatgctaacacagcccacggggagaagaaatccctgacatataatgaagacacgttcctgcactcctgcaggacgatgctgtattctcttcgaaatccaccaaagaatttcgaggattttgttgctggccatttccgcaagtatgggcgcaacatcctcgtggcttgcagagcctacctggagggtgcccaggttggatgcctttctggtgacggagtgcaagacgtcgacgaaggcgacaagagctgctcggtgaggttcaagcagtcactgaagaggcttcacgaggaacttctggcggagttcaccgcgaagggcgcggactgtggcaagttcctcagcgagaaggcaaggtccggagcttccacatcggcagcggacaccacgttgaggctgtaaggcggagtcgggcttgctgttggaaataaacctgccattcaagctatcctcggtcgatggggagttgggccacaccgatgcaacacaacacagcaagtttgatgcctgagctgccgatcgtctaactgctttctgtaggtagtctatgtatatatccctgtctagatcttctggtaaagacataagcgagacatattgggcgtttagggacaccattataccgtaggtatttacgtgtttataactgctggccgcagccccggcagctgtgtcgggctgtgacctcgtcctcagcttcagcttgtgctgatatgattgggaccacccaccatttggatatcaaaatgatgttggtctaggttaggcgattcctgactgattcgttcgtgggatattcggtgtgtgccgcctcctgttcttttacgactgagctccagtgggtccgtttggttgctcacactatggtggttctggttcagccaatgatttgaag

SEQ ID NO: 139354 - DNA, 2073 bp, Zea Mays
gggtcggtccttctttcctctacgaaaaaaccattttttcagtataaaatttcgtttttctcctctcagtctccgacgccgccgcactcatccccccagacgaccaccctcctcctcctcccccacccacctcgccggaaccctagcgccgaccgcctgccgtgcccatcgacggcgatcgcattgctgcgccccgatggcgacccgcgcctccaagaattgcctctgcgcgggcagctcttcgttcgatgaccccgacgtggtcgaggtgtctccggcaaccgccgcggctgcagggtgggcctccggccaccacaagaggaagcggagccaggttgtaccgcaagaagtgattgaaatcgatgatgatgatcctgatggagtcatacttattggtgataaagcacaggtggaaaagaataagcaaactgctgtatgtcccatggattgctcaaagcatgccaagagtggttgggttcaggacatccctggtccaagcacatatgcttcaaaatataccagttcctgggttgacctgaaagtgtttcaagacgaggcagtttacaactattctgatggctacccctttgatggatttgaagaagactatgcttatgatgaagatgagtttgaggatgatggttatgacactccactcattgaaagtgagtttcaatttagtttgtctgccaagtttgataacttcaatgttctacatggtctggaggcttctttaccgtggaagcataagactgctattgagattgcaaataagaccaaacctagtaaggctgtagatgataaaatcgaagaaaaatacaaggccttcaaacgatttgatactgttgatgatcatagtgatcattattattcaaagccagaatcaagaaaggttcaggcggtaaaaaagccatcaaaagactgggtcaaacgtattcagcatgagtggaaagtcttagagaaagatttgccagatggtgaattaccgtgctggtggtttgcggcttaatccaaacttgtatgcttgcgggaaggtgtgccttagcctcctaaacacgtggactggcagtggatgtgagaagtggaacccggccaattcaactatgctgcaggtcctggtctctattcaagctttggttttgaatgcaaagccttatttcaatgagcctggctacgctatgcatgctaacacagcccacggggagaagaaatccctgacatataatgaagacacgttcctgcactcctgcaggacgatgctgtattctcttcgaaatccaccaaagaatttcgaggattttgttgctggccatttccgcaagtatgggcgcaacatcctcgtggcttgcagagcctacctggagggtgcccaggttggatgcctttctggtgacggagtgcaagacgtcgacgaaggcgacaagagctgctcggtgaggttcaagcagtcactgaagaggcttcacgaggaacttctggcggagttcaccgcgaagggcgcggactgtggcaagttcctcagcgagaaggcaaggtccggagcttccacatcggcagcggacaccacgttgaggctgtaaggcggagtcgggcttgctgttggaaataaacctgccattcaagctatcctcggtcgatggggagttgggccacaccgatgcaacacaacacagcaagtttgatgcctgagctgccgatcgtctaactgctttctgtaggtagtctatgtatatatccctgtctagatcttctggtaaagacataagcgagacatattgggcgtttagggacaccattataccgtaggtatttacgtgtttataactgctggccgcagccccggcagctgtgtcgggctgtgacctcgtcctcagcttcagcttgtgctgatatgattgggaccacccaccatttggatatcaaaatgatgttggtctaggttaggcgattcctgactgattcgttcgtgggatattcggtgtgtgccgcctcctgttcttttacgactgagctccagtgggtccgtttggttgctcacactatggtggttctggttcagccaatgatttgaag

SEQ ID NO: 139355 - DNA, 3287 bp, Zea Mays
ggttgtcttatgccgtatcaataaccaagtgtgacgttgcagggtttgaaatcatggatttgtttacaattgactcggatagtgagtcatatactgggaccagtgacagtgaagaccaagaatgtgaatttacatatagtgaccatgcccaaaacatcttgtccagtctggatgagagcattggcaagattgataattttttgacttttgaaagggggtttctgcatggggatatagtctgccctgtttctgatccctcaggtcagctgggacgtgttgttggtgttgcaatgtttgttgacttggagacaagctcaggtgacataattaaagatgtaaacagcaagaagctatcaagagtgagatcttttgtttccggtgactgcgttgttatggggccatggattggacgagtgataagagcatttgatcttgtcacacttttattcagtgatggagcaaagtgtgaaatcctgttaagggattcggatgtactgaagcccattcctcctgttctttttgaagatgcaccttacttttattatcctggccaacgtgtgaggatagtcgatccgtcagtttccaagtcagcaacatggttatgtggatcatggaggcccagtagagatgatggtattgtctctcatgtcgatgtagggctggtgcatgtgaactggatcacatctgtaaccaatgtttggggagataaatcatcaagtcctccaaacattcaggacccaaagaagctcaccttgctgtcatgtttcccttacgctaattggcaactaggtgattggtgtgctcttatgactgacaacaatggatgcctctggatggattctggcaagtcttgtattcttagtgaagaccagaagtgtgactctcatgcacacatgtattttgaaagttatggttcagattgttctcaaacatttgttgttgccaagacaaagagcactgttgatgttctgtggcagaatggaactgtatctcttggtctagaaccccaggcattactccctgtgagtacccttggtgaccatgatttttggccaggtcaatttgtcctagaaaaactgactgtagaagatgctgcaagatgtccgcgaacggcaatagtgagtgatgtggatgcactggagcgaacagtaaatgtaaaatggattggtccagcacatagtgacattgtcagctatggaagtgaccctgcagtggagactgtaagtgtttatgagctagtagagcacccagatttctccttctgcactggcgaggtcgttatcaggtcagctatgaacatagacaagtctgaagcagatcccacaaatgggtcattggcaagcaaagaatcattggttacctcctctggcttcttatcatgcaccggaaatgtacttgggtacaaggacaatggaattgaagtgcaatgggctaatggtgttatatccaaggtgcaacattttgagataattggattggacaagcttcttgataatagttctgtagaatcaatgaatgaggaacatacaattggtgattcattagacgaggctgagcaggaggaattgaaccatgagattgctctggagtctactgaagactgcactggctccttgtgcaaagccactgcttttctatttcccaagacagcttttgacttcctgacaaatgtggctgctagtttgtttggtattcatggttctccatctccaagctcagttttggtagatcctcgatatgaaattgtgaagatggcagaaatgcagccatgtgcagaagaaacaccaaaagaagaacagatagtgaagtttgtggcgcagattgacaagccaattctctcttcagaagatgccatctcaaaaagattcgatgtagtcactgactgtttggatcatcattttgtgaaggaaaatggccatgaaagtgttacaagaggttggttgaagaaggtgcgactggaatggaacatcctgcaaaatgacctaccagatggtattcatgtgagagtttatgaggaaaggatggatcttctgagggcttgcatcgttggggcacctggaacaccttaccatgacaatctttttttcttcgatattttctttcctcctgattacccccatgaaccaccttctgttcactatcactctggtggtctccgcctgaatccaaatctgtatgagtcgggaaaagtgtgcctcagcctcctgaagacatggacaggcactggtaacgaagtgtggaatgctgagagctcaactgttcttcagctgctgttatcgcttcaggcccttgttctcaacgaaaaaccttacttcaacgaggcgggatacgacaaatttgtgggcaaggctgatggagagaagaactccatcacgtacaatgagaatgccttccttctgtcatgcaaatccatgatgtatgttttacgcaagcctccaaagcattttgagacgttggtcaaggagcatttcacctgccgtgccccgcacatcctggatgcctgcgaggcttatcttgggggcgatctcgtcggacacgcgcacgacaaagcatacgtagcagaggacggcaacaagaactgctcaaccggtttcaagataatgcttggtaagcttctgccgaagctcgttactgccttctgtgaggccggtatcaccagcgaccggtaaaaccagcgcaagcctgctctctgctgcatcagcaatggaattgggaccctttattatattgcgcgtgtatattcgatgcttgtgtattccaaataaaatggcgcctggtttgtgtgttacttgtgcctgtcttgtaaatgtgaaacagtatatacagatgattgctgaactgatatgcttggtcttgtaaatgcggaacggtatgtacgcatgattgctggtgtttatgttgctaagctgaaggcagctaaacactcaagtgtttgggtttgggctgtcttctgcggtcagtgtgaaataaaatgtaaatgtgtgttgttcaatcgttttggactattggcatagcagctgtgtattcatatatttgctcatattgcaatctgaaatacgaaggcaaggggatccattgttgccgtgctgtttatcttgtatatggatgtgctggattgatttttatttttattttttaatacaatttattgcgcaaattacataaatatctcgaaaattcacactaccgaaaaccataggttgtcatggggctaaataacattttggggaaaaacaccataaataagtgaaataggtaatgtttaatttttaacatctatttcaaaa

SEQ ID NO: 139356 - DNA, 80 bp, Zea Mays
cagaacactagctagctatgcccagctaaaatttgagttgtttctccgtgggatcgaagtggcaaattcctgcagccaac

SEQ ID NO: 139357 - DNA, 1261 bp, Zea Mays
accccttaaaccctcgtcaaaaccgctgctcactgaatatttccatttttaccctttcctcgcccctacccccgccaccgccgccgccgtcgccgcagccatggcgtcgcggcgctgtctcctccgcttcctctcgatccgcctcgttcctcagagatctcaacctcttgcgccgatctcgactgcgacccggaccctaacctctttgtccgaggccctcggctccccagctccccgggccctcgcctccccccggctgtactacccctcgcgctgccacttcgcgacccgctcctccggcgacgaggacgacggagaagacgaagaagagcactacgacgatgaggggagcgatggggaatggggggacgatgaggaggtggtggcggcgaagaaaccgagcgggaagaccgaagaggagaaggtagcggaggcggcggagatcggctacaaggtgttgggaccgctcggggctgacgataaacccttcaagccctacgagcccgtcttcgccgtcgtacagatcggctcgcaccaattcaaggtgagcaatggcgactccatcttcacggagaggttgaagttctgtgatgtgaatgacaagttggtcttaaaccgagttctcatgcttggttcacaagctcaaacagttattgggaggccaatactacctgatgctgctgttcatgctgttgtagaagaacatgccttagatgcaaaagtgatcatattcaagaagaaacggagaaaaaattaccgccggacgaagggtcatcgacaggaattgacaaaactgagaataaccaacattgaaggaatagataagccagaggctgctgctgttgctacctaaacccagggcaaagagagaaagtaacagtgccttttgtttatggcagcaaggcctgcctaggcaatcattctggcgggttgtgttagtcaataccagtgaaatgtcgcttcttttcttgttttaatttgaagggtagaaccgtagaagctgtcagcatttacgatatctgacatgatgccaatgtaccgagcagtttgggtggtgtggatcagctattgtagtttacagtggcacccatttttttcatttttggttagcttttctgttcacatcctttacatgtgttctcaactcctgatatatcagttacatgttgacggctagagtgtaataatgaaaccgcggtgcgtcgtttcgatgtctgaaaactgtaagacctggtttatgcaaactttacacttgcctgca

SEQ ID NO: 139358 - DNA, 2296 bp, Zea Mays
tctctcgctcccggatcgccgcgagctcctttttgatctttgactcgcatcgcgtctcctctcgcctccgttttggataagcccgtctggaagcctctcctgctttcatttcgccggcccgcggagaacagctcggcgggttcccttcgtgcagcgttcggagagctcttcctgctgctctgcgacggacggggacggagaggtcaaaaatgtaccatcacggatgatggatggtctccggtatcatctgcgtgggacatagatggaggactacttttcacgcttcctaaaccttggttggcagctaagacaatactttgacagaattaatagaaaatttggttcggaccattaatcggattcctcaacgtcttggagtccaattctctgctagccatggaggatcattgactggcaccacagtatactttcatgaaagggcatctacgttatctgttaatactattaccactacagaaaaacagactgcaaatggaacatctgaaggcgcaattttcagaaaaggactttccagtatttacgaaagatcatgtgtcaggtcttcctatcttttacatggcttcatgctggtacgaagattggcattcagtgtgcgagatctgtggaatctattttcaagtgaagtacacgccaaactaaccaggatcttacatcgtttctggacaacactacagggatcttgtgaagacataggatggttgcaaagaactcgggcatcacttcgttcagttgatgggacaggtcgcttcaaggagattttgcatgagataaggaatggcgtgcattgcctgcctgatacactgatttacttatttattcctggcctttttagcaaccacagtccactttacttcaccaatacgaaacgattcttttcaaaaatgggattggcttgccatattgcgaaaattcatagcgaggcgtcagtggagaagaacgcgtgggaactgaaacagtacattgaggagctctactgggggtctggtaagcaggttctgctccttggtcatagcaaaggtggagttgatgcagctgcagctctttccttgtactggtctgagctcaagggtaaggttgctggcctggcgttggttcagagcccatatggtggcaccccggtcgcctccgatatccttcgagaaggccagatcgctgataaggagacaaggaggatcatggagctcatcgtatgcaaactaatcaagggcgacatcagggccttggaggacctcacgtatgccaagagaaaggacttcatctcccagcacaaactccccatcgatgagctgccgatcatctccttccacaccgaagccagcaccgcgcccacagcgctcgcgtcgctgacccgtgtcgcccaagccgagctcctcccatggctacccctgccacggttcttcctgtctgcatccgagtttgtcgagtcaatgctcgcctctctgaaggtccccgtggttgcgcctgtgtctgcagccatggcggtgacagccctccacctgcggctgcgctatggggagaggagcgacgggctggtgacacggcgcgacgccgaggtgcctgggtcagtggtagttagacccgagaggaggctggaccacgcgtggatggtgtactccacgctgaagatgggcagcgctgaggccgatgcgagcgagatgtgcgaggctctgctggccatgctcgttgagattggcaggaagaaattttgctgaccatctggtcatctggagttctccatggttttggttatatatgcacatatatgtcacgcatactacaaatgatagagtattacagtctttacagggaacagtggaaattagattaatttccttggtgaaagcagggctctgtgataaaaccatatgctactttttttgacaatatgcatactttgtggcaatatgcattaattttggacgaaccataggctactttggctatgtaatgttcttcgcacttcacatttaatttagttttttttaatggttttggtttatacactcggctttattttagtaggagagtcactaaccatagcgactgctgagtaaagcctttaaaaaagtgtaaagctaaaaaacatggtttgagtaaaatataaagctaaggaaaagatgttttgatatgttagatttctaaccaaaaataactttagtgcatgtttggaaggagaggtgtttggattcttgtgactattttttagtcattctattttattcattttagttctaaattattaaatacgaaaattaaaatagagttttagtttttg

SEQ ID NO: 139359 - DNA, 2296 bp, Zea Mays
tctctcgctcccggatcgccgcgagctcctttttgatctttgactcgcatcgcgtctcctctcgcctccgttttggataagcccgtctggaagcctctcctgctttcatttcgccggcccgcggagaacagctcggcgggttcccttcgtgcagcgttcggagagctcttcctgctgctctgcgacggacggggacggagaggtcaaaaatgtaccatcacggatgatggatggtctccggtatcatctgcgtgggacatagatggaggactacttttcacgcttcctaaaccttggttggcagctaagacaatactttgacagaattcgcagaaaatttggttcggaccattaatcggattcctcaacgtcttggagtccaattctctgctagccatggaggatcattgactggcaccacagtatactttcatgaaagggcatctacgttatctgttaatactattaccactacagaaaaacagactgcaaatggaacatctgaaggcgcaattttcagaaaaggactttccagtatttacgaaagatcatgtgtcaggtcttcctatcttttacatggcttcatgctggtacgaagattggcattcagtgtgcgagatctgtggaatctattttcaagtgaagtacacgccaaactaaccaggatcttacatcgtttctggacaacactacagggatcttgtgaagacataggatggttgcaaagaactcgggcatcacttcgttcagttgatgggacaggtcgcttcaaggagattttgcatgagataaggaatggcgtgcattgcctgcctgatacactgatttacttatttattcctggcctttttagcaaccacagtccactttacttcaccaatacgaaacgattcttttcaaaaatgggattggcttgccatattgcgaaaattcatagcgaggcgtcagtggagaagaacgcgtgggaactgaaacagtacattgaggagctctactgggggtctggtaagcaggttctgctccttggtcatagcaaaggtggagttgatgcagctgcagctctttccttgtactggtctgagctcaagggtaaggttgctggcctggcgttggttcagagcccatatggtggcaccccggtcgcctccgatatccttcgagaaggccagatcgctgataaggagacaaggaggatcatggagctcatcgtatgcaaactaatcaagggcgacatcagggccttggaggacctcacgtatgccaagagaaaggacttcatctcccagcacaaactccccatcgatgagctgccgatcatctccttccacaccgaagccagcaccgcgcccacagcgctcgcgtcgctgacccgtgtcgcccaagccgagctcctcccatggctacccctgccacggttcttcctgtctgcatccgagtttgtcgagtcaatgctcgcctctctgaaggtccccgtggttgcgcctgtgtctgcagccatggcggtgacagccctccacctgcggctgcgctatggggagaggagcgacgggctggtgacacggcgcgacgccgaggtgcctgggtcagtggtagttagacccgagaggaggctggaccacgcgtggatggtgtactccacgctgaagatgggcagcgctgaggccgatgcgagcgagatgtgcgaggctctgctggccatgctcgttgagattggcaggaagaaattttgctgaccatctggtcatctggagttctccatggttttggttatatatgcacatatatgtcacgcatactacaaatgatagagtattacagtctttacagggaacagtggaaattagattaatttccttggtgaaagcagggctctgtgataaaaccatatgctactttttttgacaatatgcatactttgtggcaatatgcattaattttggacgaaccataggctactttggctatgtaatgttcttcgcacttcacatttaatttagttttttttaatggttttggtttatacactcggctttattttagtaggagagtcactaaccatagcgactgctgagtaaagcctttaaaaaagtgtaaagctaaaaaacatggtttgagtaaaatataaagctaaggaaaagatgttttgatatgttagatttctaaccaaaaataactttagtgcatgtttggaaggagaggtgtttggattcttgtgactattttttagtcattctattttattcattttagttctaaattattaaatacgaaaattaaaatagagttttagtttttg

SEQ ID NO: 139360 - DNA, 1296 bp, Zea Mays
agatacgagcacaccaaatgaccaaatggcactagaccacggcgccgagcacatctttctctttccctaccgaccgagagggagatgagcggtggcgtgcggagggtcctggaggcgtggaggctcggcgtggtgaagtacggcgaagcgctccagctgcaggagcgtctcgtcgcggaccgcaaggccggccgcgtcggcgacctcgttctgtcgctgcagcacccgccgacctacaccctgggcaagcggcgcgagaaggcggagcggaacctgctcgcgccggaggccgacctgcgcgccctgggcgccgagatccaccgcacggagcgcggcggcgacgccacgttccacggcccccggcaagccgtgctctacccgctcctctcgctccgcaccttggggcttggcgcgcggaggtacgtcgaggggctcgagtccgcgatgatccaggtcgcggcgctgcacggcgtctccgcgaggcccggggaccccggcgagaccggggtgtgggtcggggaccgcaaaatcggcgccatcggggtcaggatctcctccgggttcacgtggcacggtctggcatttaacattgaccccgacctggagtacttcgagcacatcgtgccatgcggcatcgccggcaagggggtgacgtcgctgcggcgggaggtgggggacggagcggagctcccggccgacggggtcatccatgaccagctcgtggggtgtttggcgacaactttgggttttactgatgtggaattcaaggatgattctgagcgtggagacctgatcggagttacagcttcacagtactgacgcctgattcagttttgcgttagaacgtcctgtaatcaaatttcggaatgtttttttttcttcatcagatacgtcctgtgatccatttttgaagcacagcttgtccaggaaaggcacaactctgtctgtacattgtttttagaattcgaatcgtcagtgaaaactgattgcagcaggcaactgtcgatgctatgatcctcttcagttctctgatttttttaagtactgaacgtttgaaaagatggggcaacgatgtccaagaagaaacctcgacgctgtcacgatgatctgctgctataggtccacaagaaatcaactatcactctccagaacacaaacatgttactagaaagcacaaatattttgctttcttactgcttttgtgtttcgttgatgggttatttttctcttccctccgttgtggttgtaagatactattttcagctagagttagtgtattatgtgtggttaactttt

SEQ ID NO: 139361 - DNA, 87 bp, Zea Mays
gaacatgaatacattgacttgaaaaggaaggatgctgaaaacttatcggaggacccacgagacctagaccttaacctgaagctataa

SEQ ID NO: 139362 - DNA, 1928 bp, Zea Mays
cacctgtcacacccggtttcgctgttgccgggcactggcagtgtggccgtacgcccgcgcaggcaccgatcgctatcagcgaggggcgtccgggacgagatgacgaggcatctggttgtaagattcatgggtgacgcacgcaggcaccaatcagccagcaagagaacgggggacgagggcagggcgcaaggctacggcgatcgctgccccgcacatgccacgggcatgcttgccccatatgggctatggggtggtagtggtacccggatcccggcggcagccttgctgatcgctttgcctgtccccttttgatcccagtaaaacgttgcctccatgccccgctcgtcctctccatctgcggtttcattatttatttttttactgcgccgttaaacgccaccgccgccgtaccccgtacctacctacttaaacgccaccaccgccgcgccgggcgccgctcgacagcaagagcattcaatacactccatatcaaccagctagctagctagctcgctctgagcaaggttcgcgttcgcggcgatcagctcagcgcggtggcggctgcgacggccgcgagatgagtcgcgccgcgcagacaggagggggcggggccggaggggcggcgaggctcaaggcgtcgccacgggcgctcttctcctgcggcatcttcagcacctgcacgcaccctgcgctaagcccgacggcgacgcccaacaacaatgtggtgccagggagtggcggcggcggcggctcgggcgcgccctgcgccgaggcgtcgtccgcgtcgcctgcggtgctggaggcggcggcggcggcggcggcggccacggcacctcctccgcagcggcagcaccagcaccagcgggccgcgcagaggaacgccggcccgtcgtcgtcgtcttcctcgtcgtcctcgtccgcgtcgcagagcttcacgcagtggaggctgccggtgcaccacccgccgcaggcctcaggaaccggcggcgacgcgctgctgagcgccgaggagaagttcgcgacgggggaggtggtggcggcgctgcgggcggtggagcgggaaatggaggccgcggcgaggccggtgccggcgggggtggtggccggggtggtcgcggcggtgcgggagccggccacggcgcgcctcgccgccaaggtgctgctcgtcgtgctgctggaggagggcaaccgggagacggccgtggaggccggcgcggcgtcggcggccgtcgaggcggtggcggcgtccgggccggcgggggccacggccgaacgcgcgctggccgcgctcgagctcctctgcacggcccccggcggcgcccccgccgtgcggagggaggcgctcgcggcgccggtgctggcgcgggccgtggaggcgatggccggccgcggccgggagtgcgctatcggcgtcctggccgccgtatacggtggcgctgccggcggggaggacggggcctcgtcctcgccgccgccgccagcagtggtgaaggcggtggtggcggcgatgcagggcgagtgcagcgcgcgtgggcgtcgcaagggcgcgcagctgctgcgcgcgctgcaggagggcggccgcctcgggctcgcgtgggacggcatcggcgatcagtgaatcctcttcggcttacacgtgggaccctggtcgcagtgaccagttcttaggtagttgctgtgggacctaggccactgaagcgtgggaccgagtcaggacgggagggagcagtgacacggtcggtggggtgatttgattgatatgttgtggtcaccttttgtagcctgtgatttgtaccatcaaaatttatcgcgcccctgacgcgtctgctctgcgcccgttgtttgctgaacctgcaggctgtaataatcccacgattttcacggaaaattataaatgaaccagttcaaataaacgtcgatgagagggg

SEQ ID NO: 139363 - DNA, 662 bp, Zea Mays
ttaaacagttgtttgtgatccatccctgacatgaattattcacatctttcttacttcctttcttattgcttaaacagctatggatgtattagacatttactagttatttctaatgtcctttttttgcagcttgttcaccacaatttgcgggaaacttagaatcatgagaggctctgatgctgctggcatggtatccaatcttcctgcagctccaagatcaccggagcagatagttgggaccagaataaggaacgttgcccggcatgcagagtcgtgaactgaaaggaaaggacagagtttacatggcgctgaagggagcggtgtttttacgtgaagtgctccggttaagtctctctctctctctttttttttgtaacccccacatgtgcaatgagatgtgtgtggccctactgtaagacaccccattttgcccacgaggttgtcacgtgttattgtagatggtcgcctttgtgttatgaacgatcaaactcggcagtagcctgcttgctgcttcctctatgatactttcctccgtatttggaagctcgtacttcatatggtagaagtaagaaaaaaaaagcccatgttgcccattaagattttttgttctcctgatgtgtgtgcgagtgaactaaactattcagtggatctagaaagaatct

SEQ ID NO: 139364 - DNA, 1352 bp, Zea Mays
ctaaacaaggcaccaccaccaggcaccaggcaccaggcaccagccgcaccatcgcctattcgcctcctctcgggctcgctcgctcgcccccactctcgtgcttctgcttccccacccagtcacctcgacctcagcccctctcgccctccctaatctcgactccgatgccgccgccgctcctccaggcgcgcgactacatgggcgccggcgccacccctctgtcctgctcctccagcggcgagggcacggggccgcacctcgcgctgcggctcgggctcccagggtccgactcccccggccgcgacgcggggccggagccggaccacgcccacgtcgacgccgcgctcaccctcggccctgcccccgcccccgcccccgcgcctcccagggtcggcgcaaagcgcgggttcgccgactcccgcgaccggtgcgcgaagcgggacgccactgctgcggatgacgctgctgggggagtgaccggggaggagaagcgggtaggtgcggccgctgccggagctccgccggctgccaaggcgcaagttgttggatggccgcctgttaggagctaccggaagaacacactagctatgagtgccacaaagacaaacggggaagatgaaggtaggagtgaggcgggatgctgttatgttaaggtcagcatggatggagccccatacctaaggaaggtggacctcaagaccttttcgagctatgaggacctttcgcttgctctggagaaaatgttcacctgcttcatcactggtcaaagcggttcgtgcaagacttcaagaagggagaggcttactgatggttctagggctgatgcccttcaggaccaagaatatgtccttacttacgaagataaagatgctgactggatgctcgttggtgatctcccctgggacttgttcaccacaatttgcgggaaacttagaatcatgagaggctctgatgctgctggcatggctccaagatcaccggagcagatagttgggaccagaataaggaacgttgcccggcatgcagagtcgtgaactgaaaggaaaggacagagtttacatggcgctgaagggagcggtgtttttacgtgaagtgctccggttaagtctctctctctctctttttttttgtaacccccacatgtgcaatgagatgtgtgtggccctactgtaagacaccccattttgcccacgaggttgtcacgtgttattgtagatggtcgcctttgtgttatgaacgatcaaactcggcagtagcctgcttgctgcttcctctatgatactttcctccgtatttggaagctcgtacttcatatggtagaagtaagaaaaaaaaagcccatgttgcccatt

SEQ ID NO: 139365 - DNA, 1244 bp, Zea Mays
gaccttgtcgacaagtcgcgcatgggctgttttaggcccgttcggcctacaagacggacaagcccaagcacaaacaaaaactgcagaagcagaacactagaacagatcctcgcttagcctacctggctccatgtcggtattgccaagtcagctcgcatcagaatcaggagatcaggataagcctatccagagcaggccacacggcatcctccctatgggtcacggccatcttcgcgcctgagagtgcgaggcgtccacccacacaaatcccaaatcctcagcacgatacgatccgccgaattaagttcgtgcacgtacgcacgcaccgggacaccagcaacccccaacagcgccactgtccagtgcgcgcgtcaagcttgcttagctagccgccatggcctccctcgccgccgtctccgtgaagcccgtggccatcaagggtctcgccggcagctccatctccggaaggaagctcgccgtcgccaggccgtcggcccgctccatccgcaggccccgcgcagccgccgtggtggccaagtacggcgacaagagcgtctactttgacctcgacgacatcggcaacaccaccggacagtgggacctctacggctctgacgcgccctcgccctacaacccgctacagagcaagttcttcgagacgttcgcggctccgttcaccaagagaggtctgctgctcaagttcctgctgctgggcggcggctcacttctggcctacgtcagcgcgtcggcgtcaccggacctcctgccgatcaagaagggacctcaggagccgccgcagccgggcccgcgcggcaagatctaagctcagcttctccatttgcatggtctagtagcttgctttgtactgctagcgccggtcgatccgtcgcaatcgtcatggatcatctctctatcttgttgttacgctgttcataatttggtatatttgccattccgctattgtgtactctttggcatacatacaataattaaaatggcgttgcgtggctctcatataattaaccttcacataacctgaagactcaagtacgtatagtatgggcaactttattgtagatactatctggagtctcgaatatttgtcgtccgctagttcatatttaaactaaacaacgataaataaaaaagaactaagtgagtatatttttttgtgggagaagggttatccattaatacatccacggttctgtaaattccatttcatgacatgaaaaaaggaaaaa

SEQ ID NO: 139366 - DNA, 2161 bp, Zea Mays
aaacagccctaacagcaggggcagcggtttccgaaaagagaggcgtggagtgggggagagggccgagccaagccacctccaccgcagcaggcggcggagccgtacgcgaagcgaaagcgaggaaagccttctgaatcaggcttcctcgcgccgccgccgcttcctgctctcagcggcgtggataggtttcccgcccgcccgggcctggttgctcgtcttccttccttggtacaattcaattgattacctcaccagggagggagggtgctgcatccacggaccacggcttcacatgagtgaaagggatagaaagtgcagcgaccgtggacgaaaggactcgtgcttttgagcaattcaggaggagtacaagcatcacgaagccttcattctggaatgctgtccagtcgaaggaacagcgggattatcctacgggaagggtcagttagggactggtccgagttcaacgatccctctccgtccccaaaaccgttgtactcgcagtcctatgtcgcagtgagaggattcctgctgtcgagcaagctaaagtcagtgtatgcggctatgacttcacagaggcatagccgatcgcaggagagatcaaaatcaaaggggttgagctgcaggagagttgcagtccgtctactgttctttttcatgttaggcattttcattgggttcatgcctttattctctgtcgacgtctacaagaaaatagtatctgaaaacaagatgcttccgttccacgagggtgtgattgagacggaaatggtgggtaccaaagttaaggagtcggagacgattgtagtagagaaagagatcgaactgatcgacgagcctcatattcaagagagccctccagtccctgcattgttggatgatgatgtggatttttctgaatcatcacctgtgttgcctgctattagagaatctgacattcccgtgaagaagctgctgataatcgtgacaatcacttctgtccggccacaacaggcatattacttgaatcggctagcccataccttgaaagctgtacaggcacctcttctatggttagtggtggaatggcctgaacagtcctatgaaacagcagaaattctgaggtcttccggggttatgtacaggcatcttatgtgcagaaagaataccacgagtgttcggaagattgctgtttgtcaaaggaataatgcaatctatcatgtcaaaaggcatcaccttgatggtataatgcattttgctgatgaagaacggtcatactcagctgatgtatttgaagaaatgcagaagatcaggcgctttggctcatggcctgtaacaatccatattggaacaaagtatagggcagttctggaaggccctatttgcaaagctaaccgagtcatgagatggcacacagtccagacggttcaaaagaagagttcaactcgtcgattcccaattggtttctctgcatttgctttcaacagtacactgttatgggaccctcaaagatggaaccgcccgcctatggattctgttataatccacacaggtggaagaggtggtttgcaggagtcacggtttatagaaaagcttgttaaaagtgagcgccaaatagagggtcttccggacaattgcaacagggtcatggtctggaattttaacctggaacctcctcagctgaactaccccgcaggctgggcactttataagaacctagaagctgacatgcctgtaatatagcttcctgcgagctgcgttatgccttgctcctagaggtggtttctcccggcaaggcagaaggttgaagcacgtctccagcggcatgttagttctaaatttcaactccctgtccttaccaggtgcccaggtaaagctgctgggtgatgccatcctgaacaagttgcgccaaagatttcgtgccgagatctgtcttcggtaatgcaatgtcatcctgaacaagttgcagcggcaatcaaaataggattttccccctgccttttagtctcgtgtattccttttgtgctcttcattttttttcctcatcagctcgatacgacatgtagactttcttttaggttttttttgtttttcatactgtgtgttaccttacagatgtaaaagcgcccccgtacattgcaactgttaaagaggaaaagcaaaataccgtcatttagcttcttca

SEQ ID NO: 139367 - DNA, 591 bp, Zea Mays
atgggcatggctttctccaaccaagaaagtgttcaaggatggcaacgcgagaggcatggaacaacacacgaaattaaaggtatgattcctagatatgctgtctgtaagaacgaaagcaagcaagaggggatgcaaaggttgagtaaagctaaccaagcttcaatggcgtatgctcaactggacaaaagggtctccaacactgtgtatatatttgatgtttttgtagacgcccttgtcgtcgcagatgaactggatgctgccgcactgatggaggaaggggtactggagccgcatggatggaggatggggtgtcgggaagtcggtcgaagatgcctcgtcgtcgcagatgagctggccgaggtcgcgccaatggaggaaggggtgttggggaagtcctttggctctagattgagaccacacttctcaccatgggttcgcaggcggcgcagtggcgttgagcgcccgtcgctggtcgccattgctgcatcaggatcttgtgcgagggtggcgtcgggaagtgggctcgggggcggggcgacgtgtcagcgaggaggttctgcagcgtcgaggctagggttccaagaaacctag

SEQ ID NO: 139368 - DNA, 105 bp, Zea Mays
tctccttgttatcaatgtccatctcaaagacaacattacaataatcagtgtctaacatatattctaaatattgtaaatttcattgtccaaacaacaaaatttgcg

SEQ ID NO: 139369 - DNA, 1700 bp, Zea Mays
atggacgcgcaggcgcagcctttcaccaggcgggcgctgtccaggagctgcgggtccaaggggagccggctgtccgttgaccatccgccgccgccgctggccggcggcccttcggcggacaagggggtggcagggagctcgtcctcgctcgcggtgccgcccgagccggcccgtcgtgagggcccgccctcagacgcggagaaggtgagggagaagttctccaagctactgctgggggaggacatgtccggcaccggcaaaggggtgacctctgctctcgccctttccaacgccatcactaatcttgcagcttctgtgtttggtgagcagcgccgtctgcagcccatggccgacgaccagaaatcgcggtggaagaaggaggtcgactggcttttgtccgtcgccgaccacattgttgaatttgttccttcgcagcaggtcgccgagaatgggacctccgtggagataatgataacccagcaacgtcaagatctacagatgaacatccccgcgctgcgcaagctcgatgcgatgctccttgaatacctcgacagtttcgcgggtaagcaggagttctggtatgcgtcgaaagacgcagatggaccgggcaagggcagcacgccgaggcaggacgacaaatggtggctcccgactgtcagggtccctcctgacggtctgtcaggtgcatacagtaaatggcttcagaaccagaaggacctcgttgcgcaggtgctcaaggcagcaatggctatcaacgctaatgtccttatggagatggaggttcctgaatcgtacacggagtcgctaccgaagaatgggaagtccacccttggggattcagtgtacagacttataaccgacgatcatttcgaccctgaagaactgctacgctccgtggactcgtcggatgaacacagcattgttgatctgaagaacaggatcgaagcctcagcagtcatctggcagaagaaaatgacccacaacaaggacagcaaattgccctggggacatagtcacgagaagcggggaatgttcgaagggagggcggagaacgttcttctcctcatcaagcacaggtttcctggcattgcccagtcggcgctggacataagcaagatccaatgcaacaaggatgttggccttgccattttggagagctactccaggactctggagagcctggctttcacggtcatgtctcggatcgaggacgttctgagcgcggacttggccgctcgagatctcaggaacacggaatcgatgagaatcgccgccagcttagcttcggacgacaccgacaaggtcgtctcagacgctaaagccgaggtagagaagacggggagaatggagccggtttcgccggcgctatctgacttggtcggcccgaagctgacgaagatctcgccagttgcaaccaagaggttttcgtaccttgagaatctgggtggaacaagaagcccgatagcaagacactagctgctgtaggtagggggtgtagtgagggtagatggatcatgccgtcgcagagccttcggaagaagctttgtacatagcatagatgcccactgcgaacgtttgtctaacgataatgtgacatctaatcgactaatagaggcagaagttcttagagcgcaaacattatcaccaaaaccatgccctgccctggctttcataatcactttatttaacacttttatctt

SEQ ID NO: 139370 - DNA, 2061 bp, Zea Mays
gccagcagttctgcttcctcttccttccctctctctgccccagaggccagacacagcgtccccgaaatctagccagccaccgcccaccgcctccctcctccccgcctctctctctttctctctctgcgccaagaaagagaaggcgccacgttgacattgcggatgccgtagcgggggcgcgcgcgccagccatgcgctcgtgatgatccggccgttccagaagatcggccacggcctcgaaaaggttctcgtccaggcgccggaggtcgtcgtcgccgccgtcgttggcctcggacggcacgggcgcctgcctcctcgatggacgcgcaggcgcagcctttcaccaggcgggcgctgtccaggagctgcgggtccaaggggagccggctgtccgttgaccatccgccgccgccgctggccggcggcccttcggcggacaagggggtggcagggagctcgtcctcgctcgcggtgccgcccgagccggcccgtcgtgagggcccgccctcagacgcggagaaggtgagggagaagttctccaagctactgctgggggaggacatgtccggcaccggcaaaggggtgacctctgctctcgccctttccaacgccatcactaatcttgcagcttctgtgtttggtgagcagcgccgtctgcagcccatggccgacgaccagaaatcgcggtggaagaaggaggtcgactggcttttgtccgtcgccgaccacattgttgaatttgttccttcgcagcaggtcgccgagaatgggacctccgtggagataatgataacccagcaacgtcaagatctacagatgaacatccccgcgctgcgcaagctcgatgcgatgctccttgaatacctcgacagtttcgcgggtaagcaggagttctggtatgcgtcgaaagacgcagatggaccgggcaagggcagcacgccgaggcaggacgacaaatggtggctcccgactgtcagggtccctcctgacggtctgtcaggtgcatacagtaaatggcttcagaaccagaaggacctcgttgcgcaggtgctcaaggcagcaatggctatcaacgctaatgtccttatggagatggaggttcctgaatcgtacacggagtcgctaccgaagaatgggaagtccacccttggggattcagtgtacagacttataaccgacgatcatttcgaccctgaagaactgctacgctccgtggactcgtcggatgaacacagcattgttgatctgaagaacaggatcgaagcctcagcagtcatctggcagaagaaaatgacccacaacaaggacagcaaattgccctggggacatagtcacgagaagcggggaatgttcgaagggagggcggagaacgttcttctcctcatcaagcacaggtttcctggcattgcccagtcggcgctggacataagcaagatccaatgcaacaaggtatgtatgggactgggatgcctcgtcagatatacgccatttgttgctttgtttgttcattcgaatgccttgcgtacctcccttttgtattcgtcaggatgttggccttgccattttggagagctactccaggactctggagagcctggctttcacggtcatgtctcggatcgaggacgttctgagcgcggacttggccgctcgagatctcaggaacacggaatcgatgagaatcgccgccagcttagcttcggacgacaccgacaaggtcgtctcagacgctaaagccgaggtagagaagacggggagaatggagccggtttcgccggcgctatctgacttggtcggcccgaagctgacgaagatctcgccagttgcaaccaagaggttttcgtaccttgagaatctgggtggaacaagaagcccgatagcaagacactagctgctgtaggtagggggtgtagtgagggtagatggatcatgccgtcgcagagccttcggaagaagctttgtacatagcatagatgcccactgcgaacgtttgtctaacgataatgtgacatctaatcgactaatagaggcagaagttcttagagcgcaaacattatcacc

SEQ ID NO: 139371 - DNA, 940 bp, Zea Mays
ttgacacacctcccgagccacgtccgccgcgcgccccccctgcaccggtgcgccctgctgcccgattcgtcggggggcgcgggaatggagctggagctggaggcggcggcccggcgcttccacctctggttccgcgggctgcgctcgctgcgccgggacctggcgtcggcccggtggtcggacgacccgacggcccagctccccgcgcaggtgggccgcttcgtggcccacctggagtcgtactgcgccgcgcgcgccgggctggacccggtgtggacgctgtcggcgccgtgggccacccccgcggagcgcggcgccgcgtactggctcgccgggtggcgccccaccacgctggtccacctgctgtacaccgagtccgggcgccgcctcgaggcgcagctgccggacctcctcctcggcgtgcggtcggggaaccttggcgacctcacccccgcgcagctggcgcaggtcgacgacctgcagcgccgcacggtggccgaggaggacgcgctggcaagggagatggcgctcgtgcaggagggccacggcgtcgtcgtgctgccggcggcgccggacgggtccggcggactcgacgtggccggcctcgtgcgcagggccagggcggtgctggacagggccgacgcgctgcggctgcgcaccgtgaagcgggcggtggagatactggagccggcacaggcggccgagctgctcgttgccgccgccgacctggagatcgggttccgggagttcgggctcaagcatgggtcgggacgaatgacatgactgccccagttttttcgagctcccctgcacttcccggcattttatttttcttcctttttttttctcctcacgattttgccgagttgtacccggctgggccgtcgtgacagggcacggaaacacgaataaaaaaatgcacgagattgacttatgagaa

SEQ ID NO: 139372 - DNA, 1888 bp, Zea Mays
ggcgagcggcgactgcgactgcgatacgctaaactggacgcagtttctggggaggggcggcgcgtagaggcacgccgccgagcttcgggcatcccatctgacgcgaccggtcttcgggcacgccgccgatcgagctatggacgcgtcgagctccctgtccctcctcgcactggtgaccatgctcagcctcctccactccgccacgaccgacgccgccgcgggtctgccggcggcgcggacgagccaccggaggctactgctgctacaccagcaggacaccaacctcgccgcgctgcctccgcctgcacgcgtgcacgtcgtcccagtcgacgtccacgtcccttctcatggaaccggctcttttccggcagcgtctcccggtccacacgggggcaagaacggtccgagtgaggcagcgccagcgacgccggcgacggcggcggcctatctgtcgagatccatgaggtggctgtacatggttgcggttccggcggtcgccctgctggcgctcgctggactggcgtgctggcttctgtgtcgcaagagcgccgttgccaccattgggccttggaagaccgggctcagtggccagttgcagaaagcgttcgttacaggagtaccgaagctgcagcggtcagagctggaacgtgcctgcgaggacttcagcaacatcgtggtgagctacccgcactacaccgtctacaagggaactctatcgaccggcgtcgagatcgccgtggtgtccaccatgatcacgtcgagcaaggagtggacagagcattcagagagctgcttccggagaaaggtagacgccctgtcgcgaataaaccacaagaacttcgtcaacctgctcggcttctgcgaggaggaagaaccgttcaccaggatgatggtgctcgagtacgcgccgaacgggacgctccacgagagccttcatgccgaggatttcgagcgcatcgcttggcgaggtaggatgaggatcgtcatgggactagcgtactgcgtccagcacatgcacgagctcagccctcccgtggcgcaccctgacatgcagtcgagctccgtactgctatctgaagacggcgctgcgaagatagcggacatgagcgtttggcacgaagtgatttctcaaggcaaaacgacgacaaatggtgacgaacaagcgtcgtccgctggcctgctggcggggaatgtgtacagcttcggtgctctgctgcttgagatcatctccgggaagcttccgactccataccccgcacacgagcgctccctgcagatgacctcggctctggtggagcgcgtaaccaacgacgaccggagcgtagcctcgttgcttgatccaacgctgggtggagaccacagggaagacgagctagcggtcatcggcgaggtgatccgggcctgcatgcagagcgacccgaggcgaaggccgagcatgagggaggtcgccgccaggctgagggaggccgtgggtatctcgccggtcgctgcgacgccgaggctgtctccgctctggtgggccgagctggaggtcctttccgccgcggaagcaagctaataatagtgggcgagaggacaggacaggaacagggcaggatgatgtcgcgcaatctgaccagtttgttctcaagaaaaaaaagccttgcagccctttgtgcatgctgtaaatgtgaatgtgaagctgcagggaaggaatagtaatccgtgaatgtaaatctgaaactctgaaggtgctagatgtacgtagctagtgtcttggcaaaggtatcagtaattcagtataaagtcagagcagcactctccctgccttgtcccagcccaggacaggcacgccgctcgccatggccggcaacccgccatggcgccatacaaaacctcaattattgat

SEQ ID NO: 139373 - DNA, 1978 bp, Zea Mays
attgaacgcatcgttgacaaaagatgtgacgctgcctgcaactgcaatcagtccccgttccgttttcactttcaccggaacaaaggaaaaagaaaagtgtgtgtgtgtgtgttattgcattattggctcctgcacctactaccgccacgaagcgaccccgacccgttcctcgtcgtcgtcctcttcggatcttcgcttcatccacacaacatcgcatccctttttttctctctcaggggaggggcggcgcgtagaggcacgccgccgagcttcgggcatcccatctgacgcgaccggtcttcgggcacgccgccgatcgagctatggacgcgtcgagctccctgtccctcctcgcactggtgaccatgctcagcctcctccactccgccacgaccgacgccgccgcgggtctgccggcggcgcggacgagccaccggaggctactgctgctacaccagcaggacaccaacctcgccgcgctgcctccgcctgcacgcgtgcacgtcgtcccagtcgacgtccacgtcccttctcatggaaccggctcttttccggcagcgtctcccggtccacacgggggcaagaacggtccgagtgaggcagcgccagcgacgccggcgacggcggcggcctatctgtcgagatccatgaggtggctgtacatggttgcggttccggcggtcgccctgctggcgctcgctggactggcgtgctggcttctgtgtcgcaagagcgccgttgccaccattgggccttggaagaccgggctcagtggccagttgcagaaagcgttcgttacaggagtaccgaagctgcagcggtcagagctggaacgtgcctgcgaggacttcagcaacatcgtggtgagctacccgcactacaccgtctacaagggaactctatcgaccggcgtcgagatcgccgtggtgtccaccatgatcacgtcgagcaaggagtggacagagcattcagagagctgcttccggagaaaggtagacgccctgtcgcgaataaaccacaagaacttcgtcaacctgctcggcttctgcgaggaggaagaaccgttcaccaggatgatggtgctcgagtacgcgccgaacgggacgctccacgagagccttcatgccgaggatttcgagcgcatcgcttggcgaggtaggatgaggatcgtcatgggactagcgtactgcgtccagcacatgcacgagctcagccctcccgtggcgcaccctgacatgcagtcgagctccgtactgctatctgaagacggcgctgcgaagatagcggacatgagcgtttggcacgaagtgatttctcaaggcaaaacgacgacaaatggtgacgaacaagcgtcgtccgctggcctgctggcggggaatgtgtacagcttcggtgctctgctgcttgagatcatctccgggaagcttccgactccataccccgcacacgagcgctccctgcagatgacctcggctctggtggagcgcgtaaccaacgacgaccggagcgtagcctcgttgcttgatccaacgctgggtggagaccacagggaagacgagctagcggtcatcggcgaggtgatccgggcctgcatgcagagcgacccgaggcgaaggccgagcatgagggaggtcgccgccaggctgagggaggccgtgggtatctcgccggtcgctgcgacgccgaggctgtctccgctctggtgggccgagctggaggtcctttccgccgcggaagcaagctaataatagtgggcgagaggacaggacaggaacagggcaggatgatgtcgcgcaatctgaccagtttgttctcaagaaaaaaaagccttgcagccctttgtgcatgctgtaaatgtgaatgtgaagctgcagggaaggaatagtaatccgtgaatgtaaatctgaaactctgaaggtgctagatgtacgtagctagtgtcttggcaaaggtatcagtaattcagtataaagtcaga

SEQ ID NO: 139374 - DNA, 1724 bp, Zea Mays
ggcagttcctcttctcagtcatgctcttcgaccggttgtcgccggtgaccaggcggtgcgatcgcatccctttttttctctctcaggggaggggcggcgcgtagaggcacgccgccgagcttcgggcatcccatctgacgcgaccggtcttcgggcacgccgccgatcgagctatggacgcgtcgagctccctgtccctcctcgcactggtgaccatgctcagcctcctccactccgccacgaccgacgccgccgcgggtctgccggcggcgcggacgagccaccggaggctactgctgctacaccagcaggacaccaacctcgccgcgctgcctccgcctgcacgcgtgcacgtcgtcccagtcgacgtccacgtcccttctcatggaaccggctcttttccggcagcgtctcccggtccacacgggggcaagaacggtccgagtgaggcagcgccagcgacgccggcgacggcggcggcctatctgtcgagatccatgaggtggctgtacatggttgcggttccggcggtcgccctgctggcgctcgctggactggcgtgctggcttctgtgtcgcaagagcgccgttgccaccattgggccttggaagaccgggctcagtggccagttgcagaaagcgttcgttacaggagtaccgaagctgcagcggtcagagctggaacgtgcctgcgaggacttcagcaacatcgtggtgagctacccgcactacaccgtctacaagggaactctatcgaccggcgtcgagatcgccgtggtgtccaccatgatcacgtcgagcaaggagtggacagagcattcagagagctgcttccggagaaaggtagacgccctgtcgcgaataaaccacaagaacttcgtcaacctgctcggcttctgcgaggaggaagaaccgttcaccaggatgatggtgctcgagtacgcgccgaacgggacgctccacgagagccttcatgccgaggatttcgagcgcatcgcttggcgaggtaggatgaggatcgtcatgggactagcgtactgcgtccagcacatgcacgagctcagccctcccgtggcgcaccctgacatgcagtcgagctccgtactgctatctgaagacggcgctgcgaagatagcggacatgagcgtttggcacgaagtgatttctcaaggcaaaacgacgacaaatggtgacgaacaagcgtcgtccgctggcctgctggcggggaatgtgtacagcttcggtgctctgctgcttgagatcatctccgggaagcttccgactccataccccgcacacgagcgctccctgcagatgacctcggctctggtggagcgcgtaaccaacgacgaccggagcgtagcctcgttgcttgatccaacgctgggtggagaccacagggaagacgagctagcggtcatcggcgaggtgatccgggcctgcatgcagagcgacccgaggcgaaggccgagcatgagggaggtcgccgccaggctgagggaggccgtgggtatctcgccggtcgctgcgacgccgaggctgtctccgctctggtgggccgagctggaggtcctttccgccgcggaagcaagctaataatagtgggcgagaggacaggacaggaacagggcaggatgatgtcgcgcaatctgaccagtttgttctcaagaaaaaaaagccttgcagccctttgtgcatgctgtaaatgtgaatgtgaagctgcag

SEQ ID NO: 139375 - DNA, 1719 bp, Zea Mays
ggcagttcctcttctcagtcatgctcttcgaccggttgtcgccggtgaccaggcgatcgcatccctttttttctctctcaggggaggggcggcgcgtagaggcacgccgccgagcttcgggcatcccatctgacgcgaccggtcttcgggcacgccgccgatcgagctatggacgcgtcgagctccctgtccctcctcgcactggtgaccatgctcagcctcctccactccgccacgaccgacgccgccgcgggtctgccggcggcgcggacgagccaccggaggctactgctgctacaccagcaggacaccaacctcgccgcgctgcctccgcctgcacgcgtgcacgtcgtcccagtcgacgtccacgtcccttctcatggaaccggctcttttccggcagcgtctcccggtccacacgggggcaagaacggtccgagtgaggcagcgccagcgacgccggcgacggcggcggcctatctgtcgagatccatgaggtggctgtacatggttgcggttccggcggtcgccctgctggcgctcgctggactggcgtgctggcttctgtgtcgcaagagcgccgttgccaccattgggccttggaagaccgggctcagtggccagttgcagaaagcgttcgttacaggagtaccgaagctgcagcggtcagagctggaacgtgcctgcgaggacttcagcaacatcgtggtgagctacccgcactacaccgtctacaagggaactctatcgaccggcgtcgagatcgccgtggtgtccaccatgatcacgtcgagcaaggagtggacagagcattcagagagctgcttccggagaaaggtagacgccctgtcgcgaataaaccacaagaacttcgtcaacctgctcggcttctgcgaggaggaagaaccgttcaccaggatgatggtgctcgagtacgcgccgaacgggacgctccacgagagccttcatgccgaggatttcgagcgcatcgcttggcgaggtaggatgaggatcgtcatgggactagcgtactgcgtccagcacatgcacgagctcagccctcccgtggcgcaccctgacatgcagtcgagctccgtactgctatctgaagacggcgctgcgaagatagcggacatgagcgtttggcacgaagtgatttctcaaggcaaaacgacgacaaatggtgacgaacaagcgtcgtccgctggcctgctggcggggaatgtgtacagcttcggtgctctgctgcttgagatcatctccgggaagcttccgactccataccccgcacacgagcgctccctgcagatgacctcggctctggtggagcgcgtaaccaacgacgaccggagcgtagcctcgttgcttgatccaacgctgggtggagaccacagggaagacgagctagcggtcatcggcgaggtgatccgggcctgcatgcagagcgacccgaggcgaaggccgagcatgagggaggtcgccgccaggctgagggaggccgtgggtatctcgccggtcgctgcgacgccgaggctgtctccgctctggtgggccgagctggaggtcctttccgccgcggaagcaagctaataatagtgggcgagaggacaggacaggaacagggcaggatgatgtcgcgcaatctgaccagtttgttctcaagaaaaaaaagccttgcagccctttgtgcatgctgtaaatgtgaatgtgaagctgcag

SEQ ID NO: 139376 - DNA, 1711 bp, Zea Mays
tcgcaaacgaggactccgtctttcgccccccgcggcggcgctcgcgttgaaccggcgctcgtgacgtgaccctgctcgcaccggccggctagcaacgcgcagggcacgggcacgggcacgacgctgcccgctggtgacgctccagttggggtgggcaggggcttcacgccacttgtgttgcaccgttctcaggtgccagcacacagcacgggttttgcacggaacggcggaagcgtttctccggtttcctgccgctgctacggccagcctacgggcagggcggttaccttacctaggacgcacggccggccggccggtggaaacgcgtggagcactcactagtagtagtacgtcgtttcgccgtaggagccagggcagcaaggcggccgtgcgtggtggtcactggctcattgcttgcggcggcatcgcccgatgaatgtcgtagcagcacagcactcccaggtttcacaaagttgtttcggtcctcttggcgatacacaagttcccatcactctgaatctgaggcttcaaaatcactctcacaagtcacgagccagtgaagcgagcgagcgagcgagaagccctggccaggcgtaactggtggtcagggttccagtccaaagtcgccagcgctgactctgactccagcatctgactcaagccagctcagtagccagtgaagtctttagaccgtccaccacaacgcagaaaaagtccaatctgttcgtgaggcgcccaattatgcatggggggccagtcaaaagaagaagacgaagaaaccaagcacatccaggcacgtttataaaggacagtgtaagcctcgctggtcgtcatcgtcactcgcgcctcggtgagctgcttcaattgaaggctgcaccgctgcaggctactcctatatagctagtctgcagagatgcttgggaggaggaggaggacgagaggcggcgcctcgccatccaagtcgcaggaacccaccagcaccggcgcggccgtcactgctgacgccggccagggcgcggcgaccggcgcctcgcagtcgcagctcgtcacgcggctcgatgagcctgccacgacgaggctgcaacgcatgagccacaggctgagcctgctcgagcagcacatggaaacactggaggccgacgttgccaaggccagcacggactcgtacgagtagagtattactcctaggtagcgatctttgcagccgaacagcttgtcacgctccagtgtcgaattcagcatggctactccaccagccagtgctatctattgctcgggcggctaagtatataatttttagaaggatcatggatacatttggtgtccgcagatagtaattgtttatctgtggagactacggggcaacacagacttgctttggggctgactcgccggcggcttccgaaacacggaacggatcgggtgcttgacgacgcgtttgcgccgtcttaggccttgttcgtttacgtcggattgcactcggaatcgttccagttaatcaaagtttatataaattagagaagcaatccggctaggaatcgttccgacctacgaatccgacacaaacgaataaagccttaggctgtcgtatattttgaagcttgttccccgaaagtcagacctgcaactgcaatgggatggggttccaattccaacccacaatggaaaagaaaaagaaataagaccctccttttgttcatccatgaaaata

SEQ ID NO: 139377 - DNA, 1633 bp, Zea Mays
gacgcgcaacgcctcccccctgtctgtgtgtctcgactagcttcccgagctgcactgctctgtttcgctgactgctgcagctgacgagccgagctgagctcagcctgctcccacgacgtacacgcaggctcaccacaccacaccacaccacaggccagccatggtggcgatcacggcgccgagctcgatcgagcagatcccgctgatgcggtgccccagggccaatgcggtgcagcaggcgggcgcggccgtcccgtgcgtggacctgtcggcgccgggcgcgggcgcggcggtggccgacgcgtgccgcagcgtgggcttcttcagggcgacgaaccacggcgtgccggcgcgcgtggccgacgcgctggaggcccgcgcgatggccttcttcgcgctgcccgcgcaggagaagctggacatgtccggcgccgcccggcccctggggtacggcagcaagagcatcggcgccaacggcgacgtcgggtggctggagtacctcctcctgtccgtcagcgccaacaccgtgaagatctcgtcgctgccgccctcgctccgggcggcattggaggagtacacggcggcgttgagggaggtgtgcgggcggggtgctggagctgatagcggaggggctgggcgtggagcggtccctgctgcgcgcgatggtggtggggcgggaaggcagcgacgaggtggtgcgggtgaaccactacccgccctgcccgctgctgccgccggtggactgcggcgtgacggggttcggggagcacacggacccgcagatcatctccgtgctctggtccaaccgcactgcgggcctgcagatcaagctccgggacggcaggtgggtccccgtgccccccacaccggaatccctcttcgtcaacgtcggagactcgctgcaggttctgacgaacgggcggttaaggagcgtgaagcaccgggtggtggcgccggcgccggcgccggatggcgcgcggtcccggctgtccgtgatctacttcggcgggccggcgccgtcgcagcggatcgcgccgctgccgcaggtgatgcgggacggggagcagagcctgtaccgggagttcacgtgggccgagtacaagcgcgccatgtacaagacccgcctcgccgaccaccgcctcgggcccttcgagctgcgcgccagcaccaacggcggcaacaggcccggcgagcccgcggcgggcagcgcggacccggcgcactgcagcggcggcagcgcctgcggcatgccgcagccgcagcaggtggcgcgggtgcactagactacgctggctttggcttggacatggttagcagtgccaaggctagctcgcctcctaggctgagctgctgctgctccctggtccatgccccatggagccgaagtgcacctggctctctatctcgctcctccgatccgtcgcttttgtttaacccatatcgggtaactgaaatgtagcagtaatatccggtgggctggccggtccacgacaggaagcctgtgacctgcctgctgcttctggctgcaggctctctgtgcgccgccagagactgaccgctgccctgcagcagcctgcatgcgtgtactacatggccgtccttgtaaaaacctccctccctcccttcccgtagt

SEQ ID NO: 139378 - DNA, 1269 bp, Zea Mays
caatgataaagttgatgatgcggagtaatcctggcttccagctgcgacaacgtcgtctctctgttttgtgtgctactgctttctggtgttatctctctgggtttcagcccctttgtgactgtagtatgtagacttcatcgcccagtctaggtggatgcttgattgatgtgttgtcgcacttgttgtggtctgatggttgtgatgcctcaatcaggtactccaccatgatgtaataatgggttctgaacttggccaccatgctgttatgcgctgaaaacctttctgtaaacatgttgtatttctattatgcaagtaatagagttgggggtatccctctcataaaaaatataatatcatccgctcaaactcgcaatccaattgaatttatttcaaaaacaagtcaacttaacttcgcatccatctttctcccacacttcaactggcgccggagcagatggaacgagctcaacacttcaccacagcaaagtagcagcaaccaacaaatcatcgtatctttttatattgcaagcatgcgtgtgcaagtcacaaacaggttacaatcacatatgtccattaaaaggcaggacatatgccagcatcatttcaactaatctaatcagtcttatttcatcttgaccatccagctgcaaaaaataagctggtggatatgtagtcctggcagataagaagacgccagaggaaatacctgaagatttccaacgataatgaggtacattatcacacgagcatctcatgactaattcattcttaactatccagaccatgcctgaggagccaccgcatgggtgacagagctcaacctatcgtgcagggtgttacattctgcaggctggcctgcatccaccatacggagcgcaaggccatcaactacttgatcctttgggtaacccattcgagcaaccttatcagcaatgcctatcggatggttctgcactgactgagatggtcccaggtgatgaagcaccatgggagcactgcaatgtgcttgttgattaaggacagcaacaatagtagcaggattgctggaagggcttccgtaagcagggctgtaggcctgtgcattcccttgtaccgtatatgatgctacaccgcatggactaactttacttggctgaggtacaaatgagccattgccaagtgaatgaagttgctggtgctgctccgtcaatggaacagaaactgtgttgctttgtacataaataggagcagcttcatgatgcttccgctgggatgaggaaattgtagagt

SEQ ID NO: 139379 - DNA, 1468 bp, Zea Mays
gggggacggccgacgagccgaccgcctcagctctgcggctctgcctgctcacctcgttctcccggcgcggcccggcggggacggcaaccaccgcacggcgaataaaaaaacagaaccagcggcgccacgtccctgtcctcctcctctctctctccacatttcctctcccgataagagtgaggcctcggctcagcttgagcttcccctccctcccctcctgcgctccagctcccctccatcctcggccaaaaattctgcggcgagctccgatccggtgcgactactaacccacgccgcagaagccgcgcgtcctgatcgcgcgggggtcgaggagaggggaagcgcggcgccgcggttgcctgccaccgcaccgccgcaggagaaggaagaggagcccgtatccctccgccccgctgcccgccggaccgatggactccgagcactggatctcgcgcctggccgccgcgaagcgcttctacgcggcgcagctcggccacagcgatcgggccgggatggatgagctggagatggacgaggaggtcaggcccgagttcccctgcccctactgctacgaggaccacgacgtcggatccctctgcgcgcacctggaggaggagcacccgttcgaaccccaagccgcgaatcgccgccggctgcgcagattcatcattccaggcagccaggccctctctttgctgagccgagatctacgggaagcccacttgcaggtgctcctcggaggaggcggacagagatccagcgacaacagcagcagcagcagcgccacgaacatttcggctgatcctcttctgtcgtcgttcggccttggcttccctacctcagacgcggagcaagcatccaagtcgactgtttccattcctgatgatgcaacgacggtgaaagaagcgcccgctcaggcacggaagctaagtatcgattcgtcgctcacaagtgaagaaagggagctgaagcggaagcaagcccgcgtcagagccacgttcgtgcaggacctgctgctctctactctattcggcgactgatgacgaaccagagcgagcctggtattatcactggaaggtgcagagttgatgtgggcgtgatgtatctttctaagttattgtaagccggtctctgtcttcacaactgacgatctgtgtgtggtacgcaccacgcacgcaagtcgcggttgtgcgtgtacgtctgaactctggagcattggtttgttgtaccaacataatgagtcacaacggcggatggctggctatacgtacactgcagtagtgcgtaggagcgattagaccagttccgaaactacagccatgaagcgcatggctgtacactgcactgtataggttacgatcagtgagttccgaaactgtgcttagaccggggctcctctgccttttctctttttttccccctttgatctctgatctggccttatcccaaacagaaagaaaattccacc

SEQ ID NO: 139380 - DNA, 2042 bp, Zea Mays
gggggacggccgacgagccgaccgcctcagctctgcggctctgcctgctcacctcgttctcccggcgcggcccggcggggacggcaaccaccgcacggcgaataaaaaaacagaaccagcggcgccacgtccctgtcctcctcctctctctctccacatttcctctcccgataagagtgaggcctcggctcagcttgagcttcccctccctcccctcctgcgctccagctcccctccatcctcggccaaaaattctgcggcgagctccgatccggtgcgactactaacccacgccgcagaagccgcgcgtcctgatcgcgcgggggtcgaggagaggggaagcgcggcgccgcggttgcctgccaccgcaccgccgcaggagaaggaagaggagcccgtatccctccgccccgctgcccgccggaccgatggactccgagcactggatctcgcgcctggccgccgcgaagcgcttctacgcggcgcagctcggccacagcgatcgggccgggatggatgagctggagatggacgaggaggtcaggcccgagttcccctgcccctactgctacgaggaccacgacgtcggatccctctgcgcgcacctggaggaggagcacccgttcgaaccccaagccgcggtgagtgcccccccaccggacgccttagcttctcggagatgcaaagtgaaagctaatctatcatacgtcagtgttataagcctgtggctggggtttttgtcaatatacaaccatggactgaagtctgctacaagaaagcttacaaataggtatctatgagaagaaacgattcaagtttgatccgaagaatgaacatcgctgccttcggactagtgaactggaacatcagctttggaaggaacccagtaactcagtatcaggggtagaacttctagcttatcctaagttgtagatttaagagcttagttgtctccaatgtttatggtatctgctgctgcaagttgatttgaggaccctttctcttcgcctcagttgaaacgatcttttgcataagctataagcctatagcatggacgaaactcaccttaacgatgtcgttgcatttatgcccatcttgctggttactttattcctgccctgattttttgcactgcccattccaggcctgccctgtctgctcagagatggttacgaaggatatggttaaccatattactacgcaacatggatatttattcaagaatcgccgccggctgcgcagattcatcattccaggcagccaggccctctctttgctgagccgagatctacgggaagcccacttgcaggtgctcctcggaggaggcggacagagatccagcgacaacagcagcagcagcagcgccacgaacatttcggctgatcctcttctgtcgtcgttcggccttggcttccctacctcagacgcggagcaagcatccaagtcgactgtttccattcctgatgatgcaacgacggtgaaagaagcgcccgctcaggcacggaagctaagtatcgattcgtcgctcacaagtgaagaaagggagctgaagcggaagcaagcccgcgtcagagccacgttcgtgcaggacctgctgctctctactctattcggcgactgatgacgaaccagagcgagcctggtattatcactggaaggtgcagagttgatgtgggcgtgatgtatctttctaagttattgtaagccggtctctgtcttcacaactgacgatctgtgtgtggtacgcaccacgcacgcaagtcgcggttgtgcgtgtacgtctgaactctggagcattggtttgttgtaccaacataatgagtcacaacggcggatggctggctatacgtacactgcagtagtgcgtaggagcgattagaccagttccgaaactacagccatgaagcgcatggctgtacactgcactgtataggttacgatcagtgagttccgaaactgtgcttagaccggggctcctctgccttttctctttttttccccctttgatctctgatctggccttatcccaaacagaaagaaaa

SEQ ID NO: 139381 - DNA, 1558 bp, Zea Mays
acggcgagtcagtctcagtgggggacggccgacgagccgaccgcctcagctctgcggctctgcctgctcacctcgttctcccggcgcggcccggcggggacggcaaccaccgcacggcgaataaaaaaacagaaccagcggcgccacgtccctgtcctcctcctctctctctccacatttcctctcccgataagagtgaggcctcggctcagcttgagcttcccctccctcccctcctgcgctccagctcccctccatcctcggccaaaaattctgcggcgagctccgatccggtgcgactactaacccacgccgcagaagccgcgcgtcctgatcgcgcgggggtcgaggagaggggaagcgcggcgccgcggttgcctgccaccgcaccgccgcaggagaaggaagaggagcccgtatccctccgccccgctgcccgccggaccgatggactccgagcactggatctcgcgcctggccgccgcgaagcgcttctacgcggcgcagctcggccacagcgatcgggccgggatggatgagctggagatggacgaggaggtcaggcccgagttcccctgcccctactgctacgaggaccacgacgtcggatccctctgcgcgcacctggaggaggagcacccgttcgaaccccaagccgcggcctgccctgtctgctcagagatggttacgaaggatatggttaaccatattactacgcaacatggatatttattcaagaatcgccgccggctgcgcagattcatcattccaggcagccaggccctctctttgctgagccgagatctacgggaagcccacttgcaggtgctcctcggaggaggcggacagagatccagcgacaacagcagcagcagcagcgccacgaacatttcggctgatcctcttctgtcgtcgttcggccttggcttccctacctcagacgcggagcaagcatccaagtcgactgtttccattcctgatgatgcaacgacggtgaaagaagcgcccgctcaggcacggaagctaagtatcgattcgtcgctcacaagtgaagaaagggagctgaagcggaagcaagcccgcgtcagagccacgttcgtgcaggacctgctgctctctactctattcggcgactgatgacgaaccagagcgagcctggtattatcactggaaggtgcagagttgatgtgggcgtgatgtatctttctaagttattgtaagccggtctctgtcttcacaactgacgatctgtgtgtggtacgcaccacgcacgcaagtcgcggttgtgcgtgtacgtctgaactctggagcattggtttgttgtaccaacataatgagtcacaacggcggatggctggctatacgtacactgcagtagtgcgtaggagcgattagaccagttccgaaactacagccatgaagcgcatggctgtacactgcactgtataggttacgatcagtgagttccgaaactgtgcttagaccggggctcctctgccttttctctttttttccccctttgatctctgatctggccttatcccaaacagaaagaaaa

SEQ ID NO: 139382 - DNA, 1190 bp, Zea Mays
acggcgagtcagtctcagtgggggacggccgacgagccgaccgcctcagctctgcggctctgcctgctcacctcgttctcccggcgcggcccggcggggacggcaaccaccgcacggcgaataaaaaaacagaaccagcggcgccacgtccctgtcctcctcctctctctctccacatttcctctcccgataagagtgaggcctcggctcagcttgagcttcccctccctcccctcctgcgctccagctcccctccatcctcggccaaaaattctgcggcgagctccgatccggtgcgactactaacccacgccgcagaagccgcgcgtcctgatcgcgcgggggtcgaggagaggggaagcgcggcgccgcggttgcctgccaccgcaccgccgcaggagaaggaagaggagcccgtatccctccgccccgctgcccgccggaccgatggactccgagcactggatctcgcgcctggccgccgcgaagcgcttctacgcggcgcagctcggccacagcgatcgggccgggatggatgagctggagatggacgaggaggtcaggcccgagttcccctgcccctactgctacgaggaccacgacgtcggatccctctgcgcgcacctggaggaggagcacccgttcgaaccccaagccgcgtatcgattcgtcgctcacaagtgaagaaagggagctgaagcggaagcaagcccgcgtcagagccacgttcgtgcaggacctgctgctctctactctattcggcgactgatgacgaaccagagcgagcctggtattatcactggaaggtgcagagttgatgtgggcgtgatgtatctttctaagttattgtaagccggtctctgtcttcacaactgacgatctgtgtgtggtacgcaccacgcacgcaagtcgcggttgtgcgtgtacgtctgaactctggagcattggtttgttgtaccaacataatgagtcacaacggcggatggctggctatacgtacactgcagtagtgcgtaggagcgattagaccagttccgaaactacagccatgaagcgcatggctgtacactgcactgtataggttacgatcagtgagttccgaaactgtgcttagaccggggctcctctgccttttctctttttttccccctttgatctctgatctggccttatcccaaacagaaagaaaa

SEQ ID NO: 139383 - DNA, 1315 bp, Zea Mays
gggggacggccgacgagccgaccgcctcagctctgcggctctgcctgctcacctcgttctcccggcgcggcccggcggggacggcaaccaccgcacggcgaataaaaaaacagaaccagcggcgccacgtccctgtcctcctcctctctctctccacatttcctctcccgataagagtgaggcctcggctcagcttgagcttcccctccctcccctcctgcgctccagctcccctccatcctcggccaaaaattctgcggcgagctccgatccggtgcgactactaacccacgccgcagaagccgcgcgtcctgatcgcgcgggggtcgaggagaggggaagcgcggcgccgcggttgcctgccaccgcaccgccgcaggagaaggaagaggagcccgtatccctccgccccgctgcccgccggaccgatggactccgagcactggatctcgcgcctggccgccgcgaagcgcttctacgcggcgcagctcggccacagcgatcgggccgggatggatgagctggagatggacgaggaggtcaggcccgagttcccctgcccctactgctacgaggaccacgacgtcggatccctctgcgcgcacctggaggaggagcacccgttcgaaccccaagccgcggcctgccctgtctgctcagagatggttacgaaggatatggttaaccatattactacgcaacatggatatttattcaagaatcgccgccggctgcgcagattcatcattccaggcagccaggccctctctttgctgagccgagatctacgggaagcccacttgcaggtgctcctcggaggaggcggacagagatccagcgacaacagcagcagcagcagcgccacgaacatttcggctgatcctcttctgtcgtcgttcggccttggcttccctacctcagacgcggagcaagcatccaagtcgactgtttccattcctgatgatgcaacgacggtgaaagaagcgcccgctcaggcacggaagctaaggtatattttatacgcatccatgctaaaatgaaacgctagtgagtcgacaggcttaacaaccacatcgttttttcgcccagtcgtggcggacaccatagtcttcatgttactttctggactactagtttagagtcgggcatctgaactgtctcgtgtgacagggaaatcttatatgtggccaccatgcaaatctgagccagtagttctcgtagtcttgtagactagatagctcgttttgtttacccgttcggaaagatgcctcctgttgaataataaagtcttccaaccagcaacttggtttcattg

SEQ ID NO: 139384 - DNA, 993 bp, Zea Mays
acggcgagtcagtctcagtgggggacggccgacgagccgaccgcctcagctctgcggctctgcctgctcacctcgttctcccggcgcggcccggcggggacggcaaccaccgcacggcgaataaaaaaacagaaccagcggcgccacgtccctgtcctcctcctctctctctccacatttcctctcccgataagagtgaggcctcggctcagcttgagcttcccctccctcccctcctgcgctccagctcccctccatcctcggccaaaaattctgcggcgagctccgatccggtgcgactactaacccacgccgcagaagccgcgcgtcctgatcgcgcgggggtcgaggagaggggaagcgcggcgccgcggttgcctgccaccgcaccgccgcaggagaaggaagaggagcccgtatccctccgccccgctgcccgccggaccgatggactccgagcactggatctcgcgcctggccgccgcgaagcgcttctacgcggcgcagctcggccacagcgatcgggccgggatggatgagctggagatggacgaggaggtcaggcccgagttcccctgcccctactgctacgaggaccacgacgtcggatccctctgcgcgcacctggaggaggagcacccgttcgaaccccaagccgcggtgagtgcccccccaccggacgccttaggccctgtttggcacagctgctgctggttgaaaaagcagcttatctgataagctggtgaaaagcagcttatgcttgttggctgcttttagtgtattctgagaagcagctgaactaataagctgctggagaagctagctgtttggcaaaacttctgcttaaatttgtgaagaagctgaaaataagctgtgccaaacagggccttagtctggtgtgttttgccctcctatgaattgctagagaggatttagcgaatttgtgcttggttgacctgggaactgaccacatgatgctagtcgtgtcggcgc

SEQ ID NO: 139385 - DNA, 1891 bp, Zea Mays
cagaatacatgaatgagaatatcagttcctcctatatctttgtgtctcctgtgtttgtgattccacttctagttaagtagcctttggactacactcggtagcaaagggttcttaacagggagagctccacctgggctgcgcccctagattccgcgcgcagtttcctgcgccttccagaagcttccacacccgtctccagaccggtctcgtcggctcgtcgcttcgtctatccagacgcttctctcatccccttttctctcccctcctctcctcccgtctcctaccccgaaccaaccaaacctcaccgaatcgcaacgacagcgagaacgtccaaacgagcgcgagtctccggcgataaccaagagcgcgggcacgcaaagcggcgaagcgggaaggaagcagtaacgatggggcttgactattacaagatcctaggcgtcgacaagggcgccaccgatgacgacctcaagaaggcctaccgcaagctcgccatgaaatggcaccccgacaagaaccccaacaacaagaaggaggccgagaacaagttcaagcagatctcggaggcgtacgaggtgctgagcgacccgcagaagcgcgcggtgtacgaccagtacggcgaggagggtcttaaggggcaggtgccgccgccgggcgccggcggggcggggcccggcggcgcaaccttcttctccaccggcggcgacgggccgacggtgttccggttcaacccgcgcaacgcggaggacatcttcgccgagttcttcggcggctccagccccttcggcggcatgggcggcggtggcatgggcggcagcggcatgggcggtgggatgcccggcatgcggagcggcggtacgaggttctcctcctccatcttcggggacgacatattcggctctgcgttcggcggcggcccggacgggcacggcatgcacgccggcgggcgggccgtgaaggcgccggccatagagcggaagctgccgtgcagcctcgaggagctgtacaagggcaccaccaagaagatgaagatctccagggaaatctctgacgccagtgggaagacgatcccagtggaagagatcctaacgatcgacgtgaagccggggtggaagaagggcaccaagatcacgttcccggagaagggcaacgagacgcccaacacgatcccggcggacctcgtcttcatcatcgacgagaagccgcacccggtgttcacccgcgacggcaacgacctggtggtgacccagaagatcccgctggcggaggccctgacggggtacaccgcgcacgtgacgacgctggacgggcgcagcctgacggtgcccatcagctccgtgatccacccgggctacgaggaggtggtgcgaggggagggcatgccgatacccaaggacccgtccaggaagggcaacctccggatcaagttcgacatcaagttcccggcgaggctcacggcggaccagaagtccggtgtcaagaggctgctcgggcagtagagcgcgcttgtgttgttttggagtattgtgtatcagacattttcgtgttggtttatcttgaactggggaggagggaagggagctgccatttgcagcctccgcaacgacgacgacgatgacgaggccaccaagtgttgagtacagaacagctactgttgtacggtgtatggttgagaaacttgagatgtgtagcggaggattccttgtgcgaacttccagatcgtggtggttgtctgttcactggtccacgtcgttgcatttgcaacttgcaaggatcgcggatggagtaactgttggccacgaacacgcgcattctctgtatttgttagtgtaagaaatagtcattgcaaacggtagttgtacaccgcaaaaaagaataaaattcaaggtttaag

SEQ ID NO: 139386 - DNA, 764 bp, Zea Mays
gctcccccaaattcgtttgtttcccacggcgcaagaaagaaacaagggtacaagaacagcccgctaaaggaaagaaacaagggctacacaagaacagcttgagagctcctctccgatcccgacccaccgcctgcaactcttcttctctcctacgtgttcgtcagcccgctaagtgttaagatggcttcaagtgatggtcaaacagaagctgcggccccatctgtccccaaaaaccctgctatggcatcatgccggaagaagaaaacagatgatgctaccttcctcgaagatctgaaagaccacatcgatgagttcatccatgcctccatggatgagcacaagacctgctttaagaagacgatccagaagatgtttgggatgtcgaaggctgttgcagagagatccgcggcagaagcgaaggaagctggagttgaaagtgctttgccacttcagaccagtgtctcgcagtagaatttcacgttggtagtttcttgcttgacgccggcctttttttatacaagggttttgttgctctgtgttgtctgaaacgtataagcgtctcagtggcatgttttcataactgtattgtagtgctttcatcattctccgaagtttgttgtgtgagtatgccttaaatataccagtgtagtttgcttcattctccgatgccttgtatggccgtagaccccatgcatatggacatcctgaacccaactgtcaactgattgagtggttcctgattggctaaaggaaagacatcttgc

SEQ ID NO: 139387 - DNA, 5799 bp, Zea Mays
atggagtcctccgacgacgggggctccgggccgctgctgctggcggcggggatggggagtcccggccattcgttggtccccgcggccgtcggcggtgcgagtagcgcacctggcgcctccggatccggggggaagccgccggtgaagcgcgtcatgaagacgccctaccagctggaggttctggagaggacgtatgcagaggattcgtacccaaacgagacgaagcgggcggagctatcggtgcagttaaacctcacggacaggcagctgcagatgtggttctgccaccgccggctcaaggaccggaaaccgctggccaagaggcaactgagggacgacgaggttagcgccccagtcatagcgccatcacctgtgcttccgcctccatcgccgcccagcgagatgatagcggggactgttggaacctatcgtgagcagctgccaccctattccaggagagggcctgaccggccatccgtgcctaggctatctgtgcccgagattgggaggagatactacgaacctccacaagttatgctgcctcacatggcaccagtgcaccttacacaagcggagcatcgggtgatcaattctgtagaagcacttataggggagcctttgagggatgatgggccagtgcttggtattgaatttgatccacttcctcctggtgcatttggcacacctatagttcctgagccaccaaggcagcccttccgatcatatgataccaagatgttttttgggcatgattccaaacccatgaaggctttggcatttttgcctgccacagaccctttacttccaaatagagggaaacagaagtccttggttgggtcttctcatcttggctcacaggcagtacatgaatatcaatttcttcctgagcagccaagtgacacatatgagagggcaagccagtcacacttctataatgctccagcagaggcatcaaacttgagggtagctcctctgtctacaggttcacgctttctacatggacttgagcaggcacctagctatacgtttcacagtcaatcatctggttctagccattcggctcatcgtggcagatcgccgattgcattggcattgacagatcatgagggggctttgtcaaatattaatgttagcccaactccaatccatggcaaatttagcatccctcaagttgctggatttgaaagctccctcgcatcctctgaaagaatgggatatcatgatgatgatacatatcgtgtggacagaaagcgcaagcataatgaggaagctaagactgttagggaggttgaggctcatgaaaagagaatcagaaaggagcttgagaagcaagatctgctgaatagaaagagagaagaacaaatgcagagggaaacagagagacttggtcgtgagagacgaaaggaagaggagaggttgatgcgtgaaaggcagagggaagaagagaaattccaaagggaacaaagacgtgcacacaagcgtatggaaaagtttatgcagaaacaatctataagagctgaaaaactaagacaaaaagaggagcttcgacgagagaaagaagcagcgaagcagaaggctgctaatgagagggctacagcacgtagaatcgcgcgggagagtatggaactgatggaagatgagcgcttagaattattagaactggcctctcgtagtaaagggctcctctcaatggtttctcttgatagtgacacattacagcagcttgattcatttagaggaatgctgggaaagtttcctcctgaaactgtgagactgaaggtgcctttttcaataaaaccatgggcagattccgaggatattattggaaaccttttgatggtttggaagttctttgttacctttggtgatgttcttgggcttccatcattcacattggatgagttcgtgcaggctcttcatgattatgattcaaggctcttaggtgaattgcatattgctctgttgaaatctatcattaaagatattgaggatgttgcccggactccttcagttgctttaggtgtaaatcagagcagttctgccaatcctggaggtggtcacccacaaattgttgaaggggcgtatgcttggggcatcaacatacttaactggcagcaccacttgaactttcttacatggccagaaatattgcgccaatttggtttatgtgctggttttgggcctcagttaaagaaaagcaatgctgaaattgtccatcaccgtgacaataacgaggtccataatggtgtagatgtcatttccattctgcgaaatggttcagcggctgtgaaggctgctgctttaatgaaagaaagagggtatactaatcgcaggtctcgacaccgtctgacacctggaacagtaaagtttgctgctttctatgtactgtcacttgaagggagcagaggtctcacgatattggaagttgcagaaaagatccagaaatctggactgagagaccttacaacaagtaagacaccagaggcatctgtatctgcggcattgtcgagagacactaagctttttgaaagaacagcaccttcgacatattgtgttaaaactccttacagaaaggacccagatgactctgaggctgtgttgtcagcagcacgtgaaaaaatcagggtttttcagaatacactttcagagtgtgaagaagtggagaaggatgtggatgaggctgagagggatgaggattctgaatgtgatgatgctactgatgacgctgatggtgacgacgtgaatattgagggcaaggatgccaagtctcctctagttggagctcaatatgacacacaaattacagtagttggtgatgtaaagaaagaatcaaacagtgtgatgaacatatcagtgccaccaagcattcaaattaaatctagtgcaagtgtaccgttgcatactttagacagtaaagcaagtagttcaactgacccacaagttggagatgatgataaagacactgagatagatgaaagtaaccaaggggagtcctgggtacaggggttagctgagggtgactattgtgatcttagtgtggacgaacggctcaatgctttcgttgcgcttattggtgttgccacagaaggaaattctatccgtgcaattctggagactttacaggaacgcctagaagcagcaagtgctttgaaaaaacaaatgtgggctgaggcacaacttgataagaggcgttcaagggatgactttactagtaaggtgcagtatgattcttgtgtgggtataaaggttgatacagatcaaaaaaataatgctgctgaaagtacacttgtgccagtggataaccctattagaaacaacaacggaaattccagtttgacgaacaacgatttacttgttgataagcagaaccagcttattactggtgatgtatttcaacaatggaatggtgtaagccaagaattgagtactaaccccgaaagcttgtctgttcagcaatatgcttcatctgagaaaactagatctcagttgaaatctttcataggtcacaaggcagaacagctatacgtgtacagatcgctaccccttggacaagatcggagacggaaccggtattggcagttttctgcatcttcatcatcctatgaccctggttcgggaagagtcttttttgaatctagagatggatattggagggtcattgattcatctgaggcgtttgaagctttggtatcttcccttgatactcgtggcatccgtgagtcacatctacactcaatgttgcaaagtatcgagccaacttttagggaagctgttgagaggaagaagtgtgttagtttagaacacacaactgggtggactgacaatggaagtaatgaaagtccaaactgcaacaatgagtttggaagtccatgcagtaccctttctggtgttgcttctgataatcttatggcatattcagatactttcaagatagaaattgggcacaacgaagctgagaaaagttctatctcgaaaagggcttctgtgtttctgaaatggatgtggagagagtgctactgtcaccaatccacgtacaccatgaaatatggaaagaagcggtgccctgagttgattcaatcttgtgaccattgctaccagatatacttagctgaagaacaacactgttcttcttgtcacaagtcattcaaacccattcacaatttcttggagcacttatcacaatgcgaagataatcagagaacaaatcctagttggaagacacaaattgtgggcctttctgtacccgtaggattgagattgctgaggttgctcttagctaccattgaggcttcagtaccggcagaagctctcctacctttttggacggatttgtatcgaaaatcttggggtgtgaagttgtattctgcatcatctgctgaagaagtcttgcagatgcttagtgtgctggaaagtgcaataaagcgagattacttatcatctaattttgaaacgacaactgagttgcttaattcaaacacacaagatgctacccagaattcagttggaggttctggatctgccactatacttccatgggttcctgacaccaccgctgctgtcgccttaagattgttagacttggatacttccatctcatacaaacttcattcaaagttggtttcaaataaggagcaagaagctggagatttcatgaagcttccactgagatacccttctattaataagaacaaacaagaaatagaacagttcatacctattggttttgatcaacaggatggaacattgctaactaacagcaatggccgtagaggtcgtggacggggaggtagaggtggaaggggaagtagaggaggtagcaggggaggtagttctcgtggtggtggtggtagggttcccaggggtattggtagctcatccaggattcagttcagggatgacaatagtgtgccctatgggagagcccctcgaaagaatgtacgtggtgggcgtacccgtggccgcggccgcggccgtggacttcgaactgtcagacctcggcaaccatctgaattcagtgccacatcaattccaaagttaaacctattgggcagctttagcatgttaagtaaggcaaatcacactggcaatatgcattctccagagagcttgggtgcagaagagtgggtcttggagagaagggaatatgtcaaggatgatgatgacaatttggtctctcgatatgatgagtcagaggaggaaaatggtgagcctatgaatgaggaatatgatgagcagatctcaggctatccaagggacaattctgagttcagccccatacagatgatgggtgatgtgagccacgatgaggatgctgaaggggatgagggcgaggaggatggagaggactatgaaactgaagatcctgctggtgatgaggatgatgacgttgagatggattgggatgatgacattcgggacaacgatgatggtaatggagcagccaacgcagatgaggatgaaggtggtacatcatcatattcttcagagtatagtgagtgatgagagtggattgaagttgtgcaggtttgtggtttgccaactatgtaagaggctgccagttctaaactgtgctgtggctatggccctatttctattcatttttaactaaaatttatttagggtcttatcattttgttaagaatcatttggatggtgacccattaccatctctagttgtggctcgttattgcatagaagctagccgacagtggaagatcggctttgtacagggatgttcgaaacttcgaatcaggttatttgtggtgtatatataatgccaaattaccaatcacaagaagt

SEQ ID NO: 139388 - DNA, 247 bp, Zea Mays
gactactgccagggcaggcagcgcagcgggacggaagagcatcaaacgccatcaccagcagaagcagcagcagcaagtcaataataaaagtcggaggcatcaaatccaaaaggtttttattagcatggaagcgatccaaacccctgaccaattcgggacgagcagcaggcggagggggagttgcatctgtgccctctcctgttgctcctcctcgcggtcgcgcgcgcccgggtcctgttgttccgcg

SEQ ID NO: 139389 - DNA, 127 bp, Zea Mays
ggagctggttggttatgacgacccgggatctaatttgatttgcccccttagcttgacgccatgtttatttcagcttaatattcctatgagttttgagacctgattaattaaaactttagaacctttt

SEQ ID NO: 139390 - DNA, 984 bp, Zea Mays
atggacaacaaagttaggcatgaagtggggagccacagcaggggcaggaggtgccctgtttccaggcccctcctggtcataccccatcattgctcctgggctgtagagctgatcagctccgccgtttgcttctctgaggacgctaccaccaccaccactctggtgatggccggcaataaacgcgttgctgctgccggtgactgcggcggcggcagggacgacgacggcggactccctggccatggtgtagccgcactgcctaggatgcgtctggaagaagaccttggagacgacgagctcgccgtcgcgctcctcctcgtcggagccgaggtggtactggtgcatcacccagttggtcttctcgggcttgcgctgcttgccgtagtttgtgtagagcaccaggatcttcttgtacccgcggggcctgccgttggacagcaccggcctggtcttgcccgtcttgtgccaccgcgtctcgccgccgtcgtcgccgctgtgcaccttccgccgcttcctcgtccccgtcgtgtacgccctggacggccggtggaagaagtgccgaacaagcccgtccttgctcacaccggggagcctctccgggtgcgtgtagcagatgccgttctcgccgtcgatggtggggatgaactcgtcgacgagggggtggagcttccgcgtgtccggcctcgccttcccctccaagtgctccagcagctcctggtccgtcgggtcgaacttcacgccggccggcagccccggcaagtcctggatcgtcgtgctcttctcatattgcgcgcggtggccgcacgacgggcacatcttgaccaggacggcgagcgacgccgccgccgtcttgcccacggcggctgcggccggagacaggctgctctccacggcggcgcgcacgtcgttgaagccattgcaccacgtcataacaacgaattgatcgaaccccctaattttagctgcttccttgtcgatcgatag

SEQ ID NO: 139391 - DNA, 2542 bp, Zea Mays
gacccactcttctcctcgctctaaactcttcctaccccgctacccgctctctcgttggacgtgacttcggaagattgccggagatgtcgtcgatggccacgaagctcttcaacaccgccgaggtggagtcgtcggacgcgcaagccctagtcgcggacatgcggaaggctatcggcaccatgaagtccctcgccgtagacttcgagagggacggaaagtccgataaggtgaagaagcttgaggagacggttctggagttggtggcttcgtacgaggactgcgcggccatggcccaggcaattaaggcagtacctggagtgtatcagtcatctgatcagccaacggatttcaaaacattgatcggggtggaggctagcaagattagggaagcgtcatcggcatcacaacagaaccacccactctttcggcagttcagggagtctgtctggaatgttcaccatgctggtcagcctatgcctggtgaggaacaggaggacattgtcatgactagcactcagatgagcatcttaaatgtcacatgcccattaactggaaagcctgtgattgaattgatgaatccagttcgctggtatgcgtacaattccgttctatactctctttgaatatacataatggggttttctatctcaataagtgaaggttgcgcggaacactgttgaacctggtaaaattgacagaatgttttaagtgccaccatgctaaaagagaatgatcatccgcgatattattttcaactggtaaagatggagcgaatttgtgcgcacaagcaacatgtttcagcagcacttcgaattttgtttttatacttgctcctgtatcttcttggcgacttactgagatctggattttgctggactcattcgatgtggtatttatgtcagtagaatgatttgttctcagctccgtctacctcctggagctattagtttgccattgtcaatagtgtaacatttttttacgccagatatctggtgctactcgtacaaccctttctggcaacctgactactttgaggcagcccaaaaatagtaatttcctttctgtcaccatggtgtaatttgatacaaccctgtgccattttggctgataaatccccaattggtattacttcatgatatactttgtttctttagtataaggatttgactgaaaacaattaatcccattcatgtgacacaaaatcgtaaaaaaaatatgaatataataggatcaattttgtttcacaaaagttatgcattaataatgttcttttttttttgtcgaaggcttgccataatgaaaataaatatgccttatgcagatggaataacatttatgctaccgaatggggattggtagttactacttcctctatttcaaattatagctcactttctctgtcctaaatcaagcatatctaactttgacaaagttttttttaaaaaaaaagcactagcatctgcagctagagctgtttcatcgtgtcactaggtcgcgagctcaaagcaacctctacacatttacgggggaaaggctttcctcggcttatgccttctttagacctcactcacatgggagcctccggcactgggtctgccatttatgtaatatgtcttgataatgcattttgaaatatatgaaatgccatatttttttaaaaaattgaatcaaatttatagaactataatttgaaatgagggcagtacgtaggcatttaaaatgttatctgttcatatacatgtagatataattcattgccttgactgaactgaactgatgataattccctgtgcagtgtggattgcaagcatatctatgaaaaggaccctgtaatgcaatatataaggaccaaaaaaccaccgcagtgccctattgcaggctgtcctagggtcctagaaagagggaaggttatctgtgatcccttcctccttattgagatcgaagagctgcgttcatcagagaccgccgctccgaatgccacaaacatagatgactggaccgatctaaatgacgaagacgaggagtgaggaaggcccggtaaaaggataccggcagctgttattgtttaggaggatagggtttagtatgttcttcaggatacactgtcttgttggattctgtaggaggatgggttctagtatgttcaggaatcaggatgcgctcgtcttgttgggttttgcttctgatgacttcgatatgttccatggcaaatgcgactttaaagtttgggagacttagaattctacactttatggttgcatattcttctgtgtcactgtttttgtcctattggattgattgccaccaggagatgcgaacgttgactttggacgtgatggccgatgggtaacatgatcagcgaccaggagagacccactgttatccttttgggtccacaaactcttttctacgacaaatcctgtggcagattttgatatttttttttcagttgaactttatattcagtcttcattagtttgaaacccatgattatggtgacacaccttactcgaaatttccaggtaaaagaagaaacacaaac

SEQ ID NO: 139392 - DNA, 1350 bp, Zea Mays
atgcgtcccaacgcgacccactcttctcctcgctctaaactcttcctaccccgctacccgctctctcgttggacgtgacttcggaagattgccggagatgtcgtcgatggccacgaagctcttcaacaccgccgaggtggagtcgtcggacgcgcaagccctagtcgcggacatgcggaaggctatcggcaccatgaagtccctcgccgtagacttcgagagggacggaaagtccgataaggtgaagaagcttgaggagacggttctggagttggtggcttcgtacgaggactgcgcggccatggcccaggcaattaaggcagtacctggagtgtatcagtcatctgatcagccaacggatttcaaaacattgatcggggtggaggctagcaagattagggaagcgtcatcggcatcacaacagaaccacccactctttcggcagttcagggagtctgtctggaatgttcaccatgctggtcagcctatgcctggtgaggaacaggaggacattgtcatgactagcactcagatgagcatcttaaatgtcacatgcccattaactggaaagcctgtgattgaattgatgaatccagttcgctgtgtggattgcaagcatatctatgaaaaggaccctgtaatgcaatatataaggaccaaaaaaccaccgcagtgccctattgcaggctgtcctagggtcctagaaagagggaaggttatctgtgatcccttcctccttattgagatcgaagagctgcgttcatcagagaccgccgctccgaatgccacaaacatagatgactggaccgatctaaatgacgaagacgaggagtgaggaaggcccggtaaaaggataccggcagctgttattgtttaggaggatagggtttagtatgttcttcaggatacactgtcttgttggattctgtaggaggatgggttctagtatgttcaggaatcaggatgcgctcgtcttgttgggttttgcttctgatgacttcgatatgttccatggcaaatgcgactttaaagtttgggagacttagaattctacactttatggttgcatattcttctgtgtcactgtttttgtcctattggattgattgccaccaggagatgcgaacgttgactttggacgtgatggccgatgggtaacatgatcagcgaccaggagagacccactgttatccttttgggtccacaaactcttttctacgacaaatcctgtggcagattttgatatttttttttcagttgaactttatattcagtcttcattagtttgaaacccatgattatggtgacacaccttactcgaaatttccaggtaaaagaagaaacacaaac

SEQ ID NO: 139393 - DNA, 1027 bp, Zea Mays
atgcgtcccaacgcgacccactcttctcctcgctctaaactcttcctaccccgctacccgctctctcgttggacgtgacttcggaagattgccggagatgtcgtcgatggccacgaagctcttcaacaccgccgaggtggagtcgtcggacgcgcaagccctagtcgcggtgaagaagcttgaggagacggttctggagttggtggcttcgtacgaggactgcgcggccatggcccaggcaattaaggcagtacctggagtgtatcagtcatctgatcagccaacggatttcaaaacattgatcggggtggaggctagcaagattagggaagcgtcatcggcatcacaacagaaccacccactctttcggcagttcagggagtctgtctggaatgttcaccatgctggtcagcctatgcctggtgaggaacaggaggacattgtcatgactagcactcagatgagcatcttaaatgtcacatgcccattaactggaaagcctgtgattgaattgatgaatccagttcgctgtgtggattgcaagcatatctatgaaaaggaccctgtaatgcaatatataaggaccaaaaaaccaccgcagtgccctattgcaggctgtcctagggtcctagaaagagggaaggttatctgtgatcccttcctccttattgagatcgaagagctgcgttcatcagagaccgccgctccgaatgccacaaacatagatgactggaccgatctaaatgacgaagacgaggagtgaggaaggcccggtaaaaggataccggcagctgttattgtttaggaggatagggtttagtatgttcttcaggatacactgtcttgttggattctgtaggaggatgggttctagtatgttcaggaatcaggatgcgctcgtcttgttgggttttgcttctgatgacttcgatatgttccatggcaaatgcgactttaaagtttgggagacttagaattctacactttatggttgcatattcttctgtgtcactgtttttgtcctatt

SEQ ID NO: 139394 - DNA, 850 bp, Zea Mays
ggctccacgtgaccgtggtgaggcagcgcaaaagggatcaggatcacgatgccacctctccctgggctcggctgtcgaggccgccgacgagaacagcggcgccgagcacggagagcgcggcggccgccctgctggcgcgtggcggcgcggcggcagccttctggtcgtcggaggtggagccggtgtcgtcgtcgtcggccgtgggcggctcggcgatggcggcggacttcttcttcttcttggtcttggccttggccggcccgggcgcgggtgccggcgcgggcgccggcgtgggcggcttgggcccgaacagctcgtaggggagcggcaccttgtcgacggggtagatggcgagcgggaagtccttgctgacggggctgcccagcagcatccagttcacccccgtggacacgttgacgttgttccccgaccgcttgatgtcgtacctgtagggcccgtcgtggccggacccctgcgtgttgaccttgccgctgagggtgccgagcatggacaggctgtagaaccggggcagcacgcagtagagcaccatctggatctgctcctgcggcgacagcccgttcagcacgcccgccttcatcttgtcgaaggcggcgttggtgggcgccatgatggtcagcccgttgtagctgtccgtcagctgcgcgttgatctgcgtgtccacgcgcgtgtcgtgcagcagctgccggaactcgctgaactgctcgtccttcagcgccttgttcacgtccgtcggcggcgccgcgtccgccgcgcccgcgcccgagcccgacgacgacgccggccctggcgcggccttctgcgtcgcgccaagcagcggtgacgccgccag

SEQ ID NO: 139395 - DNA, 569 bp, Zea Mays
acctggcagcctcgcagttcccaactctttgttaaaagtaacttttttcttgccttctgctacatctgttctccgattcagatgttgagccagctttaaggcctcctacgacgagatcttcgatggagaacgcgggaataccacggtcccaccgaacgccttttgaactaacaaatcggacagaaaaaaaaagcccatgcttatgatcaagtctgctgtaaggagaaagaaacaagacgacgtcatgggaggactggaagcgcccaactttcacgcatgtgcaagtgcaacgaacacctcatgattcttgctagcggctctgctctatgattagatccagatgtttagtctgtgtgctgctgcttcgtgggtaggtagccactggtttggagccgaaggccacctcgacgcgtcactcgtgctcattagtcattagtgctcatgcttttgttagtgtgttcgtttgttttggaaagggtaaagaaaacgcaatgtttggtactgctacaaagattcgatcagagtgactcaatgccatctatttagcgtttccgaaaaaaaaaaaaaaa

SEQ ID NO: 139396 - DNA, 2264 bp, Zea Mays
aaacagaagcaacagcgcaccgccaagacctctccctctccgtctcgtctctccccgcacggtcgcccctcttccggttctccctgatggatcccaaggcagcggcgaaatcgaagcgctcgcacaccgtgcgcggccgccgcgtccaccagacccccgccgccgcggcagcgcacaggcagaagcgtgccacagccgccgccgccgccgccgccacctcgtccggcccccgcagccgcaacctcccctcgaactgggaccgctacgatgccgagggcgaggcggaggactccgcggccgcgggggaatggacaggcgaggtggctccgcgcagcaagggtgccgacttcggattcctgctagagcaggcccgagcgcagccctccggggcccgagacctcatcgcgccgtgtgtcccctcccaggacttgccatttgattttatgcaggcttctacctctatgctcgaagttaaaggtgaaggaatcttgtcctggtgtgctgatgataactttatattagaggacgacctagcaccagattttgaggtgccttttctctccatggatctgaatgcattggccaatcacctttcaaagattaggctttctcggagactttttattgaagatgatctatttcctgaggctatggctgatgcatcagaagacaatgaaatagcgattgaacttgacacctctgtggaaattgacgctaaaggcagttcagttggacataacttgaactttgaacccagaaaagatacaagtcatcatgagtctgccagcaacatctgtgctgatgatcagataaaaacagaacgtcagccgcaatgttttgcacgagaaaatacagcatctacaaaggttagtactcattcagtgaattcagatagtgaagacaagagctacaagcaagtcatggatactgatcctggtacaagccatagcaaagggttgatgtttgaggtgggcgctgcagaagaagaacttgacatgctcctcgattcatttggcggaactcacctttccagctccaacttggacgaaccatttgagcccgtttcaactttgcaagagatcagtcggtccaatgagaaggttggacctagcttgtcttccggaccacctttgcttgcacctctcgacgatgctctagatgacttgctttcagagacttctcatactgctgcacagaacgaaggctttgctacgcaatgtataacttctcaaccgacggctgattctggccagaacaccgacttcagatacactaagaaaattgatgtgacaccatcaattcatgattcggtggatgatttgctcgaagacacttcaccatgcttaaatgagccgaaacaaactacaactgcacaagcatcgaacagcaccccgcttgatagcgtacccatccgttctggtccatcaaatgcatctgcatcggaagattttgattcatggtttgattctctataggacagaagaaggtcggtgccgtgaggaagtaatggctggcttcagggcatcttctcggacatgcatagtacctttggcctttatgtactccattactgaattaaacttcgtaacagtacggcgaacttgatttcagtgttagcatctttgtatggagagcagccactagataacaatatatttttccttgagagatgacaaaagctctttattttaagagatgacaagaggttgttgcgggcgggcgccggactgccactcctcgtccttcacggtgccgtacttcttccttcgatgttgagccagctttaaggcctcctacgacgagatcttcgatggagaacgcgggaataccacggtcccaccgaacgccttttgaactaacaaatcggacagaaaaaaaaagcccatgcttatgatcaagtctgctgtaaggagaaagaaacaagacgacgtcatgggaggactggaagcgcccaactttcacgcatgtgcaagtgcaacgaacacctcatgattcttgctagcggctctgctctatgattagatccagatgtttagtctgtgtgctgctgcttcgtgggtaggtagccactggtttggagccgaaggccacctcgacgcgtcactcgtgctcattagtcattagtgctcatgcttttgttagtgtgttcgtttgttttggaaagggtaaagaaaacgcaatgtttggtactgctacaaagattcgatcagagtgactcaatgccatctatttagcgtttccggtgtgcttgatttcgtagctaa

SEQ ID NO: 139397 - DNA, 1287 bp, Zea Mays
acgaccaccacatctccccgctgggacctggtgctcggcggcgtgcgccccactacccaaccaactgaaccatgcacaagagcactgcacgacgcccgcacggcaccgaccccgcaccaagccaacggaaaccgagcacccgcacccgcacccgcccggggtggaattgggaactgagaaggaaaaaaaaacacccacacccacacccgctctgccccatccgcgcgcccctcctcctccaccgcccgtcccgccgccgcccggccgtctggtggcgatggcgtaccgggcggacgacgactacgactacctcttcaaggtggtgctcatcggcgactccggcgtcggcaagtcgaacctgctctcgcgcttcacgcgcaacgagttcagcctcgagtccaagtccaccatcggcgtcgagttcgccacccgcagcatccacgtcgaggacaaggtcgtcaaggcccagatctgggacaccgccggccaggaaagataccgcgctatcacgagcgcgtactaccgcggagcggtaggggcgctggtcgtgtacgacgtcacgcggcacgtcaccttcgagaacgtggagcggtggatgagggagctgagggaccacacggacgccaacatcgtcatgatgctggtagggaacaaggcggacctgcgccacctcagggccgtcccgaccgaggacgccaaggccttcgccgagcgccagaacgccttcttcatggagacgtcggccctggaggcgatgaacgtggaggacgccttcaccgaggtgctcgcgcagatctaccgcgtcgtcagcaagaaggcgctcgacatcggcgacgaccccgccgcgcctcccaggggccataccatcaacgtcggcggcaaggacgacgtgtccgcggtcaagaagtctgcctgctgctcgtcttagcttgagaggatagagcgtgtacttgggtttggttgttgatacttcagcactagagggcacatgacgttattgcagtcatggtcctcgatctgtattcattcgtttccaggtgtctcgttgattttgccatttgattcattcaggacttgggcctttctggtgtagtgtagggataccttgttccttttatttcttgtacctgcatactgtcgcttctcttatcaaactagctgcattacttcaacagtctatttatttgcttttgctagactgctgccatgttgcaaattgcaattgcaatccaattggtcactagggtacctcattggattgtgtcgatgcttggcaattggcatggt

SEQ ID NO: 139398 - DNA, 1794 bp, Zea Mays
atgtcgaggctgcacgcgagcgtggtcgtcgacgactgcatcgaggggttcgacgtgttggacgaggacaccgcgagcgccaacgcggctgacttcgcctccacagtgggggacgccacaccccaggccaccgagacgcggctcaatgcgggatgggtgcgctggctggaagggtggactggcccctacgacgacatcgcagcagcacaaaccctcttctccgacgacgccatccacctctccgaatcagaacccgaccatctcgtttacgatttcctcaacctcgtgaccgctcaggttctccctgtcgtggaggccagggccgcgatgggcgcggtcgtggccgtgagggactctgcgatgttccattcccttctcgccgcgggaaatttgctgccgcccttcctcacgctgccgcagccacacgacgaggcagatacgaacttcggttccagccaggacaaggagctgctcgaccatctcgaaggtatgctagccaccgaatccgtggtggtgaagagagaccagcgcatcgtgccactcgatgtgacgctcaaggggaagagcgtctccgtgcgcgccgacctcaacgcgccgcttgacgcgcaccagaacagcaccgaagacatccacgccatccagtacctcttcagcaagggcgccaaggtgcaaagagccgatgatgtgattgagcctgaagttgagaagctgagatgagaactgtcagctctatggcgctctttctgtccatttccacacacttgacaaacatgttagttttggatggccctgttatttcctgtcaaaagcaacaaatgtacattcagagtagcagaggcatggtggagtgttctcatagggatccaaacattacatgctggaagcatcagtttgagttggcaggaagtgcatttcaaccggaaccttggtttgagtctgagctgctggcacccaacaaaacatccttgattgtcaagctacggatgggtgagcttggtttggacgtttttctaggaaaggaaacggtatggctgcatggactgaatttgtttgctgttagttcatcgaatatggctttaaaggtgctagaagaggacaagtatgattattgctcagaattctttgagcttgcaactgaatttttcagctcaggtaatgctgaagagggtgctaacattctcatgaattgcaaaacattgatcatgagtgtcagtagcatacttctggaggacaccctcaacaagtctcagttatcagactctgactttaattgggactgcaatactcaagacgttgagaagctattacccttgactttgccttggaatctggtgacatatgatcaattggagaccaacttgcctcactcattaagctatgggataatcagtgttgccgtcagaaagctagtatgcctcgctgctcttcatgattacagtggtagcatgagtgatgcaactatgacatatttcgacatgcttgctacggttttctgcacaactgaagaaattaagtcgtcaatcattgtctacattatcagcggcttgagggcaagtcacatttcaagcggtggggaatgtcagcagcagtacaaggaacacgttgagaagctgaggatgaagcacggtgtgagaaagcagaagacatcgactagagctggaactcacgtgaatgggctctaatggaccatgtaatgcgtaatgggccaagaatgagccgtgtaataatacatcataggctgagctcgtgcagctatataggatccaaactgtaagaggaaagcatcagagaaga

SEQ ID NO: 139399 - DNA, 348 bp, Zea Mays
atgagaagcatgagagccacgcagcctgcagatgcgagcagcagtctttttctcttgaactgtagcattgctgcctctgccaatgcaggctctctcccaaagatggcgagcgaccgacaactgaaagaagagctcctgaacacccttctgaaagggaagagaaacaatggcagaggaagaacaggcagagctctcacacaatgcgtctctctctctctctcacacacacacacacacactatcacctcaagtcattcctttcttccaagaacgaacgaactcaaggagaaaacctatatatatgcactaaagaatgaacgatcagcaggactaaaaggaacagaatga

SEQ ID NO: 139400 - DNA, 550 bp, Zea Mays
cggtacacacaaatgcaatgatctctgtatattttgtttggactgatttgtgtctgctttgatgtaatttcacaaactgttttccttgtgcaggttcggagcaacagtggtagatgtggtggcaacattggttcgcttgaatgagacaagacccgcttttcctgcaccctgctgaagtgtttttttgtttgtctccgtcatcacaatgatacacgaatcatgtagaaaatggcttatccagggaaccggcttgatttgtttgtcttgttgagaagaagctgatgtggtattagttgttcatttgttcattagggatatccgtggcagcaagcgcccagagtcgtttggtttttgcctgagtaggtgaaattcggacctccagaacttgttgcttgctgagctcgccatggagtgtttgtttctagctaacgttcttctctgtttggtgaaagctgctcccctttacttcatactcctgtttgttttgttgtccggttccagttaacgagctgaatctatttccaacattagtttccctgatttctatttg

SEQ ID NO: 139401 - DNA, 1783 bp, Zea Mays
atgactcatgagagagggaggcggagttggaggcggagcatttaccggcggcagcctctgcctagtacactggagtcgctgcgaaacggagagacggagactcttggactggaggcatgatggaggcaaagcaggcggcgcccgaccggctctcctccctcccagcggagctgcaggacgagatcctcatccgcctcgacctcagggacgccgtgcgcacctccgcgctctcccgcacctggcgggacctctggaagtcgctctcggtgatctccctctccttccccttcggcacgcacccttccgtcgtcgacagcgtcctcctccgctacatcggcccccgcgtctctctcttccgcatctgtgtcgacgacgcatgtgccgaccgcatcgacgactggctcatcgcgctctcccgctaccgtgtcgagtccatcgacatgtgtggcacactcagatcactcggcaacttcaatctctactcctccatcttctccttaggtgatctcgtgtctctgctgctgaaaaactgccgcatcccacccctccccgtaggattccccggcttccccgcgctccagaagctagtcctcgcctatgttatcttcccatcgaacgggttcaaacaattggaggctatcattcgtcgctcacccttgcttcataccctgcatatgtttgacgtgttcatccctggtgaatacccagactcagtgatcgaggcgcccaatctccgtgtcctgtcaatctattcaccgtatgactatcgatggcgatttggagagctgtcgtgtctcgaatatgccaacattcatgtgttccactgtccgcagcatgaacatgattttggagttttccttgctcggtttgctcacgttcaaaagttcggtctcttctctccggctgtcgatgttaagatgccttatacacttccattcaccttttataacttgaagaaattgcagttatgtgtggatttcaatgaaattcactccattttgtccatgtttaccatgctaaggagctgtcacaaccttcaaaacttaaaaatagagtcgcggcacgacagttatgagagttttgaggcagattgggagttcttaaatgctctgtggactgatggcatgtgtgccaatcttcaaattgtgcgcatgattgatatcatttcgcttccgaatgaaacttcatttatgaagcttatactttctaaagcaactcttcttcacacattatatgttggcgcacacccatatgattttgatgatcacataattgacatgctaaaatgcgaaagagcttcagctcaagctcgtgtacagtttgaaggttcggagcaacagtggtagatgtggtggcaacattggttcgcttgaatgagacaagacccgcttttcctgcaccctgctgaagtgtttttttgtttgtctccgtcatcacaatgatacacgaatcatgtagaaaatggcttatccagggaaccggcttgatttgtttgtcttgttgagaagaagctgatgtggtattagttgttcatttgttcattagggatatccgtggcagcaagcgcccagagtcgtttggtttttgcctgagtaggtgaaattcggacctccagaacttgttgcttgctgagctcgccatggagtgtttgtttctagctaacgttcttctctgtttggtgaaagctgctcccctttacttcatactcctgtttgttttgttgtccggttccagttaacgagctgaatctatttccaacattagtttccctgatttctatttg

SEQ ID NO: 139402 - DNA, 1998 bp, Zea Mays
ctcttgaactggaggcgtgatggaggcgaagcaggcggcggctgcggtcgaccggctctcctccctcccggcggagctgcaggacgagatcctcgtccgcctcgacctccgggacgccgtgcgcacctctgcgctctcccgcacctggcgggacctctggaagtcgctctcggtgctctccctctccttccccgtcggcacgcagccctcagtcgtcgacagtatcctcctcccctacataggccctcgcgtctccctattcgacttctgcgtcaacgaggcgtctgtcggccgcatcgacgactggctcgtcgcgctctcccgctgccgcgttgagtccatccacatatctaacagactcggatcatgcgactacttcaacctccactcctcaatcttctcattaggtgatctcgtgtccctgcggctggaaggctgcaacatcccacccctccctgtaggattcgccggctttcctgcgctccaggagctagacctcgcctttgttaacttcccatcgaacgaggacaaacagttggaggctatcattcgtcggtcgcccttgcttcataccctgtttatgtgtaatgtgtgcatccctgatggttacccagactcagtgattgaggcgcccaatctccgtgtgctgtcattcgtttcagagtatgactatggatgccgatttggagagctgccgtgtctcgagtatgccgacattgatgcgttattctgtccgcagcatgaacatgattatggatttttccttgctcggtttgctcacgttcaaaggctcaccatcttctgtccagtacgctatttttactttgttctccttattatgtgctttgttataaatcaaggctgaaacgctagcgattggctcaagctgattacatagttcagaaatataacgtcgtctcctatacttgtgaaatagcatgaaaagctacactaattattaataataaaaaaagaaacaatcctttcattcctgccttacttccatctgcctgtggtcctttgtttcgcagaaatcccatccatatttctagaccttgtatggcttttatccactttttgtcacaggctgccgatgttaacatgccgtacacacttccattcaccttttataacctgaagaacttggagttatgtctgaacttcggtgaaatggactccattttgttcatgtttaccttgctaaggagctgtcgcaaccttcagggcatagaaatagaggacatcgatcagagttttgaggcagattgggagttcttaaatgctctgtggactcatgacatgtgttccgatcttcaaactgtgcacatgatgtgtatcagttggcttccaaatgaaatttcatttatgaagcttatgctctctaaagcaactgttcttcgcacattagatgttgatagacaccctgctgattttgatgatcccataattgacatgctaacatgcaaaagagcttcagctcaagctcgtgtcctgtttggaggtttggagcaacagtggtagttgaggtggtgtattactgagtgcaagattggttcacttgaatgatacaagacccgctttccctgctccctgctgaagtgtttttttttgtttttctccatcatcaccatgatacacgaatcatgtagaaaatggcttatccagggaactggcatgatttgtttgtcttgttcagatgaagctgatttggtattggttgttcactagatcagtagagatattcgtggcagcaagcgcccagagtcgattggttaacgaagcatacctccaaacttgcctgagtaggtgaaattcggctacccattcgttagaacttgttgcttgccaagcagagctcatgcaataagcaatccatggggggttttgtttctagctaaatttcttctctgtttagtgaaagcttctcccctttacttcatactcctgtttgtattgttgtccggttccagttaacgtgccgaatctatttccaacatt

SEQ ID NO: 139403 - DNA, 1340 bp, Zea Mays
cagatatttgcaccgtcgacctctgctgctggcctgtcgctgcgtagtgtagtgtcatcttatctcttcctcctaccttcactctcaaaatcttcagggagtcgtagaggagcagcaggtgcaccaaaaggatggcagcgccaggctccctgcgacttctccaggccccgtccttcgctgcggccaagtgccagccggtgggtggccgggcatccgcgcggcgagcgccacggccactgttcgccgtgcgcgcctcggctgctgacgccgccaacagggatgccgtgctcaaggccttccgcgagaacagggctctcaagacttctttgagactatatgatgtgaaaaagagaggtctctgttacactgcttttgtctgttgttttcttctagagggaggtgcaacacatgttgacatagcatgtgacaaggacttagtaaagcttgccatggatcttaccaaccttccgatctgtgtctcatctgtagatccttcagcgttccattctgcagtacaagcaggagctaaaatggttgagattggaaactatgattctttttatgagatgggcattgagttctcctctgagcagatactgaagctaacaagggaaacaaggaagatgcttccagacatcaccttatcagtaacagttcctcacacacttagtttgccagatcagatgagactagcagagctactcgaagaggaaggagctgatataatccaaactgagggtgggaaatgttctagcccgacaaaacctggagtgcttggattgattgaaaaggcaacaccaacactcgccgcagcatactccatctctcgggctgttagtattccagtgatgtgctcgtcagggttaagctcggtgactgcaccaatggcagtaactgcaggagctgctggagttggagtcggttctgctattaacaaactcaacgacgttgtggcaatgatcgctgaggtgagaagcattgcgcaagcaatggagcttgcgccaagaatcgtgtccgaaaccctgagaacaattagttactagtggctaggaatacccttgccatttctgagcaaacttgagcagtcaataagaaagcaaaagagaggcatcgactctgcattttattctctctacgctgtcttttgcctgtggcagtgaatagcgcattagcatcatagaagtattagcttgatcaatggaagttgttcatgcgcttcttcatcgctgcaagtgttgtcatcttgtcgaactcacaataagcttagataagtgctgggtttgtgggaacatcgtttgtgcaatataaatgagatcttgcacctacaaatttgactcttc

SEQ ID NO: 139404 - DNA, 1331 bp, Zea Mays
cagatatttgcaccgtcgacctctgctgctggcctgtcgctgcgtagtgtagtgtcatcttatctcttcctcctaccttcactctcaaaatcttcagggagtcgtagaggagcagcaggtgcaccaaaaggatggcagcgccaggctccctgcgacttctccaggccccgtccttcgctgcggccaagtgccagccggtgggtggccgggcatccgcgcggcgagcgccacggccactgttcgccgtgcgcgcctcggctgctgacgccgccaacagggatgccgtgctcaaggccttccgcgagaacagggctctcaagataatttccggtcttcagaactttgacaggagcagtgttgcatctgttgtcacagctgcagataagggaggtgcaacacatgttgacatagcatgtgacaaggacttagtaaagcttgccatggatcttaccaaccttccgatctgtgtctcatctgtagatccttcagcgttccattctgcagtacaagcaggagctaaaatggttgagattggaaactatgattctttttatgagatgggcattgagttctcctctgagcagatactgaagctaacaagggaaacaaggaagatgcttccagacatcaccttatcagtaacagttcctcacacacttagtttgccagatcagatgagactagcagagctactcgaagaggaaggagctgatataatccaaactgagggtgggaaatgttctagcccgacaaaacctggagtgcttggattgattgaaaaggcaacaccaacactcgccgcagcatactccatctctcgggctgttagtattccagtgatgtgctcgtcagggttaagctcggtgactgcaccaatggcagtaactgcaggagctgctggagttggagtcggttctgctattaacaaactcaacgacgttgtggcaatgatcgctgaggtgagaagcattgcgcaagcaatggagcttgcgccaagaatcgtgtccgaaaccctgagaacaattagttactagtggctaggaatacccttgccatttctgagcaaacttgagcagtcaataagaaagcaaaagagaggcatcgactctgcattttattctctctacgctgtcttttgcctgtggcagtgaatagcgcattagcatcatagaagtattagcttgatcaatggaagttgttcatgcgcttcttcatcgctgcaagtgttgtcatcttgtcgaactcacaataagcttagataagtgctgggtttgtgggaacatcgtttgtgcaatataaatgagatcttgcacctacaaatttgactcttc

SEQ ID NO: 139405 - DNA, 1265 bp, Zea Mays
cagatatttgcaccgtcgacctctgctgctggcctgtcgctgcgtagtgtagtgtcatcttatctcttcctcctaccttcactctcaaaatcttcagggagtcgtagaggagcagcaggtgcaccaaaaggatggcagcgccaggctccctgcgacttctccaggccccgtccttcgctgcggccaagtgccagccggtgggtggccgggcatccgcgcggcgagcgccacggccactgttcgccgtgcgcgcctcggctgctgacgccgccaacagggatgccgtgctcaaggccttccgcgagaacagggctctcaagggaggtgcaacacatgttgacatagcatgtgacaaggacttagtaaagcttgccatggatcttaccaaccttccgatctgtgtctcatctgtagatccttcagcgttccattctgcagtacaagcaggagctaaaatggttgagattggaaactatgattctttttatgagatgggcattgagttctcctctgagcagatactgaagctaacaagggaaacaaggaagatgcttccagacatcaccttatcagtaacagttcctcacacacttagtttgccagatcagatgagactagcagagctactcgaagaggaaggagctgatataatccaaactgagggtgggaaatgttctagcccgacaaaacctggagtgcttggattgattgaaaaggcaacaccaacactcgccgcagcatactccatctctcgggctgttagtattccagtgatgtgctcgtcagggttaagctcggtgactgcaccaatggcagtaactgcaggagctgctggagttggagtcggttctgctattaacaaactcaacgacgttgtggcaatgatcgctgaggtgagaagcattgcgcaagcaatggagcttgcgccaagaatcgtgtccgaaaccctgagaacaattagttactagtggctaggaatacccttgccatttctgagcaaacttgagcagtcaataagaaagcaaaagagaggcatcgactctgcattttattctctctacgctgtcttttgcctgtggcagtgaatagcgcattagcatcatagaagtattagcttgatcaatggaagttgttcatgcgcttcttcatcgctgcaagtgttgtcatcttgtcgaactcacaataagcttagataagtgctgggtttgtgggaacatcgtttgtgcaatataaatgagatcttgcacctacaaatttgactcttc

SEQ ID NO: 139406 - DNA, 2712 bp, Zea Mays
gctcccggcagcacgtcgcctcgccccccactcccacgtctctgtccctctccctgccctcccccgtcttcccaaccaccacccacccgttcttttccagccaaaccaacgcacgcacacggcacaccctccttctggcagcagagcggcagccaatggccatcgagacggacgcggcggcggcgagggcgagggcgtcgggctcggtttcagatacggcgcccatgtccccggccgccgaggcggcagcggctgcggcggccccgggcccggcgcgcccgcgcgggtggctgaggaagctcatccccacggactacctgccccggagcagccggcgctggaggctggccgccccgtccgccgccggcgcgtccaggctcgcctcgtcgctctcccgctccctcaggtggaagcgcctcccggggctctcctccctcaccctgcgcagcggctccgcggcggcggcagtggacgccgtcgcgttccgcgtcatgtacgtcgtcgaggccgtcgtgctgggcctcgcgctctcctgcttcttcctctgctgcggctgccacctctaagctcccaccccctgcttttcttcccctagctcttcactactctggtcgtctccggctcgcggctcggcctccgcctcggcgtgtaacaaaaatgcccatcgtgttggttttttttctttcgatgatctccctgtctgtaaatttcctaccttttgctttcggtaggtaaaaaagaacacgaaaacttgcgatgcctatagttcaatttgcgttttgttggatgctgtgaacgcacgaaattgcgatctcggatactgggacccactgagttcttgtttgttcatgcaaattgctgccgctgtggcgctgtcccgttaaaaaaccaataccggaggacctggtcgccgccggcgcgagcctcgctacgcgccgtggccgcagcatccgacgtggtgttcaccatggtcggtaaccccggcgacgtccgtgcggtggtcctggagcacggtatgccgatatggtgccctcgcgggcctcgccatcgaagcgccgacatccgggggcgacgtcggcgcccaggacggcacgctcttcgcccatgcggcgacgaggccgtagtcgcttggctcgagccgctcttcaccttcctcggcagggcgacccgcatggggcagctggcagagcagcaagatcgccatccagatcgcggtgggcctcggcgagttcgtggtcttcgcccacctggcggggctcaacgcgccgctgttcctcctcgcggtgtccaagagcgcggctggatcgcgcgtcacgacttcttcggcaactgattgctccgccgcgagttcacgtcagaggtgggtggcagcgtgccgtacatcgtcaaagacctcggcatggcgctcgaggtcggggacggcggggaggagtccaacgtgctgcctggagcggcgctgtaccggcagatgttctcggcgatggtggccaatggcgacggcgacttgagcttgtagggactgatcaccgccgttgagcgcctgaacggcattggcgagtagagcgcagggctggtctccaaaatgcagcactggacttgaaaacttgtgtattttttctgaataaaatttggggccatgtcaatttgtcaaatcatgacggggctttacgtccgtcgtgtatcgcgtttgacttgctgattttcgtttgtcattttgccagacactaaaaaacatgtggattgtgaaataacaccgcagaaacaactgcaactacctcaactgaattatctgacggctgagggctagttcgcgaggactgtaaacaccaaggggcttcctgctgaaccgtgcaagatttttgacgtgtcagacagatatttgcaccgtcgacctctgctgctggcctgtcgctgcgtagtgtagtgtcatcttatctcttcctcctaccttcactctcaaaatcttcagggagtcgtagaggagcagcaggtgcaccaaaaggatggcagcgccaggctccctgcgacttctccaggccccgtccttcgctgcggccaagtgccagccggtgggtggccgggcatccgcgcggcgagcgccacggccactgttcgccgtgcgcgcctcggctgctgacgccgccaacagggatgccgtgctcaaggccttccgcgagaacagggctctcaaggttcatctcctttacatgtctccttcaacgtactaatcccattgatgtcagcgtttaggcatcattcggaagctgaaaacgaggctaaactgctttctggttaataaagaatgtgagaaattggtgcgttccaaaatccaaacacgcatgcccctgggatgctgcaagtttcacatgttactattttccctggggtagagatctgtggatgtactgccgtcttcggagtggacagttgaaggagcctttcttttgtttggatgagttatccttacttagcgatgattagctgatagccactggctcttgaactgtgcagataatttccggtcttcagaactttgacaggagcagtgttgcatctgttgtcacagctgcagataaggtgtggacaatacatctacctgtcaacgcttactggtgttactatttcgttcttgcagacttctttgagactatatgatgtgaaaaagagaggtctctgttacactgcttttgtctgttgttttcttctagaggt

SEQ ID NO: 139407 - DNA, 765 bp, Zea Mays
ggaatgggtgaagtatggtgtccactctcgacgcggaggcgctcctgctccttgttgtggcagttgcgtatgtcgctgatgaagaccgagagcccccgcatccccaagagcgccatctgcccctgttccggtcgccgccgccgcctctagagaaaccctagatccgcgtgccgccacgcgagatctgacgtccggatcggaggagcaaaatcctacggggggggcggaatggatcgtcgcctccacgcgcggaggcgacgggaggaggaagattttttgatacatccgcggcggtcgtcgtaggtggggaagggggactgggaagggaggatggcgcacgtcgcgccggagatccttgccgccgacgacgccgcgccctccacccgcttccacgtcctgccgttcccgcggctgtcggagcgagccacggagatcctcgcgcaggcgcgcaccgcgcgccagctggagccccttatcatcaggccctcctcgcagtggtcgcgccttccacggccttccatggagagccagggtgggtcgacgcgttggggccgaggagagtggatcgtcggatggcgtgacgaggatcgagagcgagggcggcgatctgagttgaggcggcggggattgagggagagaggatcgcattctggggagccggggaggcgacacggggcggagtccgtggggattccttcggtgggggagggggcggacgcggcggcgggatgggcggggagcagacgacgatgcgcggagctttga

SEQ ID NO: 139408 - DNA, 1262 bp, Zea Mays
gagcaggcattggctgatccctactttaaaggcattgcaaaagtggagagggaaccatcctgtcagccaatttcgaaaatggaatttgagtttgaacagaagtttaccaaagaggatgtcaaggaacttatattccaggagatactgcagtaccatcctcaacttctgaaggactacaagaacggctctgaaaagacgagttttctatatcccagtgctgttgacaggttccgtaggcaatttgctagcttagaagaaaatggagagaggaatgccacgcttgacaggaaacatgtttctctcccaaggacaacaaccgttcactccactccaattcctgcaaaggaaggtccagcagcaacctcccagattgctcaaaggattccagcagctagaccaggaagagtggtaggcccagtattgccattcgagagcgcaagcgtcaccgatcaacacatcgcccgacgggtggcaaggaacccagctgttcctccagcaacgaacacctcgtcagtctactgctaccacctcaagtcggacagctccgacaggcaggagcatcatctagagcgtgagaaagatcgaaggcagtataggccagggcagcatttcatggatgccaaggtagcccctgagatgggccgggatatacgcccgtcacagtactatgtctcaaggggcttgcccaaagctgatctaacagacagggccaccctccataggagcgctcttcatggcgttgctcccttcaatggcatcgcagcggccgctggtggttacagccaggccggtgttcttcactatggagttacaagtttgtactaagagcgatgcccttggggagggtaatataagatggggaaaccggagtgcagatccagctgcccccttcccactcttgcactgcctggaaaatcggagcacgcgcgtacctgatccacgatgcatgtgtccggaaaggattttcaggctgggaactggcgagtgtcaccttcattgctcctgtttgaatgagctatggggatggtcttgggccaacgttgtgatctgaagtgaaaagcaaggtggtcgacaattcgggttggttaactgcctgcccctttcgaagaaagggggaaaattatccatgtgaggaaaaggctagggaaaatttgtggatagctgtacagtgcaacacttagatttgtatttaaccaactgaaatgttttgttccagttataaacgtttaaatcatataatgttgtttatataggtggaattt

SEQ ID NO: 139409 - DNA, 1361 bp, Zea Mays
gtgcgcgtaaatataaccccgcaacaagtgggacgccgcttctgctcctccgtcgtccgctcctctcctctcccccacccgtcgtctccttgtcgtccttgcctgcggattggggcggcacggcagtcggcacagcctctcgcttctcccgcgcgcgagccctttctccacggccgcggcatgacgttgccggaggcgaatgccggtgcgacgccgcagaggaagaaggtggggagctcggttccatcgtgcggaaagagactgtttcttcttcttcttcttctccccccctcatcacgagccattgacgacctgcgctgtggagcagtgctgcctgcctggatggggattaattagctccagcggagcgccgtgtgccgggcagcggcgcccgtgtatgacgactcactggacaaggacccgcgtctccggattttggcgcggcaggagctgcgggatttgggggatctggatttcgtgcggggtttaattttttttgaccctgagttgcttgctccctccctgcgccggagaatatgcctcttctcctgggatgggatttgcatttaccatactgattttcttgccttcttaggaggacaaccccctcccctcgtcttatccgaatcctcggaggagccacctttaaagctaggttttcagtttcaaatccccacccctcaaaaatcacgccatcgttgtaagcgggagcgctgaattctttctttagtaggaatattaagtacctcgcgacgggacgggtggtcgaggagtcgtcctggtaaacgcgggtattggattcggctgacttgaactcgccagagatggagttcttcagcgagtacggcgatgccaacagatacaagatccaggagatcattggcaaagggagctatggggtcgtctgttcggctattgaccaacatacgggcgagaaggtagccatcaagaagatacagaacatcttcgagcacctgtcggacgctgccaggatcctccgcgagatcaagcttctccggctgctgaggcaccccgatatcgtcgagatcaaacatgttatgctgcccccgtcgaggagggactatagagatatttatgttgtgtttgagctgatggataccgaccttcaccaagttattaaggctaacgatgacttgacgaaggaacaccatcagttctttctctatcagatgctgcgtgcattgaaatatattcatactgctaatgtttatcatcgtgatttaaagccaaaaaatatattagcaaatgctaactgcaaactcaagatatgtgattttgggctagcaagggttgcatttaatgactctcataccacagttttctggacggtatgttatttt

SEQ ID NO: 139410 - DNA, 777 bp, Zea Mays
gtgcgcgtaaatataaccccgcaacaagtgggacgccgcttctgctcctccgtcgtccgctcctctcctctcccccacccgtcgtctccttgtcgtccttgcctgcggattggggcggcacggcagtcggcacagcctctcgcttctcccgcgcgcgagccctttctccacggccgcggcatgacgttgccggaggcgaatgccggtgcgacgccgcagaggaagaagaactcgccagagatggagttcttcagcgagtacggcgatgccaacagatacaagatccaggagatcattggcaaagggagctatggggtcgtctgttcggctattgaccaacatacgggcgagaaggtagccatcaagaagatacagaacatcttcgagcacctgtcggacgctgccaggatcctccgcgagatcaagcttctccggctgctgaggcaccccgatatcgtcgagatcaaacatgttatgctgcccccgtcgaggagggactatagagatatttatgttgtgtttgagctgatggataccgaccttcaccaagttattaaggctaacgatgacttgacgaaggaacaccatcagttctttctctatcagatgctgcgtgcattgaaatatattcatactgctaatgtttatcatcgtgatttaaagccaaaaaatatattagcaaatgctaactgcaaactcaagatatgtgattttgggctagcaagggttgcatttaatgactctcataccacagttttctggacggtatgttatttt

SEQ ID NO: 139411 - DNA, 836 bp, Zea Mays
gcgtaaatataaccccgcaacaagtgggacgccgcttctgctcctccgtcgtccgctcctctcctctcccccacccgtcgtctccttgtcgtccttgcctgcggattggggcggcacggcagtcggcacagcctctcgcttctcccgcgcgcgagccctttctccacggccgcggcatgacgttgccggaggcgaatgccggtgcgacgccgcagaggaagaagaactcgccagagatggagttcttcagcgagtacggcgatgccaacagatacaagatccaggagatcattggcaaagggagctatggggtcgtctgttcggctattgaccaacatacgggcgagaaggtagccatcaagaagatacagaacatcttcgagcacctgtcggacgctgccaggatcctccgcgagatcaagcttctccggctgctgaggcaccccgatatcgtcgagatcaaacatgttatgctgcccccgtcgaggagggactatagagatatttatgttgtgtttgagctgatggataccgaccttcaccaagttattaaggctaacgatgacttgacgaaggaacaccatcagttctttctctatcagatgctgcgtgcattgaaatatattcatactggtatgcacctctaaaagattccttattttagcctgaaaggtctcctgactagcattgacagactgatgtgctgcttttctgttttcaattaggagtatgaacggttctgattagcatttgcacatgagttcaactctagtggctgagtgctaaccaatcctaatgacttactttcatgtgtgtattactctcgatcattcctt

SEQ ID NO: 139412 - DNA, 2147 bp, Zea Mays
ataagaaattcgattttcacccaaccctaagcccctcctccctcgtaatcccactccagccgccgccgcgccgccgcctctagcctccggatccaatccagcatcgccgccgcaaaccatgggcttcgacgtgggcgtcgtcccgttcaaccccgacggctggggtcctcctgacgtcccggcgattccgcagtctctggggggcggtgcctccatccccttcgcgcccttctcccgctccgacaagctgggccgcatcgccgactggacgcgcaaccacgccggtcccgccgcctacgccgcggcgtcccgggactccgtattcgacttcacctccgcggacgactcgctcgtcgccggggccgaggactcctcgttccgcctcgtcgatgctaagccgcagccgcggccgcaacggttcggccccaagtggcgcttcaaccagcgccagcagctcccacagcgccaagacgaggaggtggaggcgcgccgccgcttggccgagaaggagcgcgcacgccgcgatcgccacttccagaacaaccgctcacatcaccaccctggcttccggggcaaccagccctcgtcgtcagccaagccctccgtcgacatccagcccgactggaccatgcgcgagcagatccccttcgccaacttcaccaagctctccttctccgtgtccgaccagcccgaggatctcctcttatgcggcgccgtcgagtcctacgatcgggcctatgaccgtgtcaaccccaaggccgcgcgccgtctcgagcgcttcaagtcccgcaacttcttcaaggtcaccaccaccgacgaccctgtcatccgccgcctcgctgaggaggacaaagccacggtgttcgcgactgatgccatcctcgccgctctcatgtgcacgccccgcagcatcctatcatgggacattgtcgtgcagcgtgtgggcaacaagctgttccttgacaagcgtgatggctcccagctcgacctgctcactgtcaacgagactgcgcaggagcagcttcctgagaacaaggatgacatcaactccgcgcactcgctcgctgttgaggccacctacatcaaccagaacttctcacagcaggtgctgcaccgcaatggtgagaaggttaactttgacgagcccaacccatttgcttctgagggtgaagaggctgcatctgttggctaccgctaccgccgttggaagttgaatgatgagatcagccttgttgctcgctgtgaggtgcatgctgtcaatgttgatccaagtggtactcgccagtttattaccgtcaatgccttaaatgagtttgattcaaagattactggtgttgactggaggcagaaacttgagacccagcgtggagctgtccttgctacagagctcaagaacaatgccaacaaacttgctcgctggactgcccaggctttgcttgctggtgctgacatgatgaagttgggctatgtgtcacgagtgaacccccgtgatcagtacaaccattctgtgctcactgtgatgggatacaagccaagggattttgctgcacagatcaacctcaacactgcaaacatgtggggaatcgtcaagtcaattgtggacatctgcatgaagtttgaagagggcaagtatgtgtttgtcaaagatccagcaaagccacagttgaggatctatgaggtaccatctgatgcgtttgagaatgattatgttgaagagccacttccagaggaggagcaggttcgcccgcttggagaagttgacgccactgcagaggaaatggatgcagttgctgaggcagaggccaacaatgtatcttctgctaatggtggtgagggtgggaagagtgcagaagcgacccttgcttgaagggaatagagggttcttttaccctttgcatgaaatattcctttttttggttaattatctgtgtcgtggaagacatgatccgctggtattgatacatgtcttcttatggttaatgcgaaaactatcacatttgtttttttttctttcatgcttagacatgctatagattttttaagcagcccttgatcgtttctgctgcaatgtttctgtgtaagaactattgaatctgattctgtgttttttgttaagccttgtcaacagatgcatcgttgaaactttt

SEQ ID NO: 139413 - DNA, 1165 bp, Zea Mays
ccaatccgcatcacagcttgccacttcagactcctctgcgctccatccctctgcactccggtccgcgcgagacgagcagcttctcccagacgctagacacgccaccgcatcgtctgcgccgcgagatcgagaatgtccatctctatgcggctcgcgatccctgctcctgccgtcaccgccgccgcgccgacgcggctgagggtgcgagcggcagcggcggggaaccgcggctctctctccgtcgcgcgcgccgccgtacgggcggagacgggcgcgctcaggggatgcgcctcgctgccaaagaagccgctgggagcggcccagccgtgccggagcagaggggccgccgccgtgtgtcactcgtcggcgcacctcagcgcgcgcaccatccagtggatctccgccggagccagcgcagtgctattagttgctaaaggcactgccatacacaaatctttccttgtgccattttttgctcttcaggcaccttgcagcataatctcatggatcaagggtgactatggtcagtggactgcttttcttgctctgttggtgcgtctattcttcttcattccaggtgaactggagcttccactgtcaacaatgctgcttgtgagtgttgctccttaccaattcatggatctgaggggaactcaaggtggtgccgtactgtcactggccatagctgcgtatctcgccttccagcacttcactagggtgggcggcccaggcaaagccttcgagcagggatccattgttgcgaccttggccatcatctgcatcatgattgtgcccttgatgcttctattctgatttgcatttagttggaatgaatttgcttctcattatgtgcgtatagaaggacaaataaatttaaccttgtaatgcagcatccgagttctctttcccaaaacgtatgcactgatatatccttccctgttagtgctcttcggtggttattgctcttcggtggttattgagttctctcagcatgtttattctcttgttggatcttgcatggactataatttggaagccacaaaaccacctgagggcttgtttggacaatctcggattgaagtagattgagctggtatgggatgtatcgaagtgtaatatgaactaatttctctttcaatcccttcaatacacctcaattcgctcc

SEQ ID NO: 139414 - DNA, 2059 bp, Zea Mays
atccgcatcacagcttgccacttcagactcctctgcgctccatccctctgcactccggtccgcgcgagacgagcagcttctcccagacgctagacacgccaccgcatcgtctgcgccgcgagatcgagaatgtccatctctatgcggctcgcgatccctgctcctgccgtcaccgccgccgcgccgacgcggctgagggtgcgagcggcagcggcggggaaccgcggctctctctccgtcgcgcgcgccgccgtacgggcggagacgggcgcgctcaggggatgcgcctcgctgccaaagaagccgctgggagcggcccagccgtgccggagcagaggggccgccgccgtgtgtcactcgtcggcgcacctcagcgcgcgcaccatccagtggatctccgccggagccagcgcagtgctattagttgctaaaggcactgccatacacaaatctttccttgtgccattttttgctcttcaggcaccttgcagcataatctcatggatcaagggtgactatggtcagtggactgcttttcttgctctgttggtgcgtctattcttcttcattccaggtagagtagcaaacatggttcatataagagtactttttagattcattctgtctgctaataatcaaatgtgtacttcttttttgagataattgaatactatgtttttcgaaggaacaaagtagaccatgtgcccaacctgaacaaattttattacttctttgaaatcattcatttgcatgattcaagaaaaaaggaaaatggagattataaagtatctattgtaatcgtatgatagcaaacttgaaggcagttcacctctttgtagcatcggttctgaaccgatatatgtttaggtctacccagttgtttattattgtaggtgaactggagcttccactgtcaacaatgctgcttgtgagtgttgctccttaccaattcatggatctgaggtatggaagattttaacaatggccctgatgcatatcatgatgaagttttgtttacacaacttcttattaactaacgtaaagtcggttgtttagactactgctgctatagagacaaacattgtagaagcagtagaagccggtacggattaaagtcaaacgaacaaactaaaatacaagaacattttggttaaccaagtagtaaccattttttcattgtagtactgaactatgttatgtgtgaatagcaggaagcacttatgtctatatatcaataattgatatagaaccaatccagtttttttaagttgacaccctgatcagaagccatacaacataccttgaagccacattttctttgataaggacttttaacctacatgccactgagacattttttggggggtggggtggggacaccccgagacttgtagtggtagcatactttgaagtattatcatgctggctttcatattctcaagttcccttatgaaaactgcttaatttttccaggtaaaaatgcttattttcatgaactgaaaaatcattgtttttttgctcatgtatactgaatcctctgatttccaatttctggttacaggggaactcaaggtggtgccgtactgtcactggccatagctgcgtatctcgccttccagcacttcactagggtgggcggcccaggcaaagccttcgagcagggatccattgttgcgaccttggccatcatctgcatcatgattgtgcccttgatgcttctattctgatttgcatttagttggaatgaatttgcttctcattatgtgcgtatagaaggacaaataaatttaaccttgtaatgcagcatccgagttctctttcccaaaacgtatgcactgatatatccttccctgttagtgctcttcggtggttattgctcttcggtggttattgagttctctcagcatgtttattctcttgttggatcttgcatggactataatttggaagccacaaaaccacctgagggcttgtttggacaatctcggattgaagtagattgagctggtatgggatgtatcgaagtgtaatatgaactaatttctctttcaatcccttc

SEQ ID NO: 139415 - DNA, 1464 bp, Zea Mays
ccaatccgcatcacagcttgccacttcagactcctctgcgctccatccctctgcactccggtccgcgcgagacgagcagcttctcccagacgctagacacgccaccgcatcgtctgcgccgcgagatcgagaatgtccatctctatgcggctcgcgatccctgctcctgccgtcaccgccgccgcgccgacgcggctgagggtgcgagcggcagcggcggggaaccgcggctctctctccgtcgcgcgcgccgccgtacgggcggagacgggcgcgctcaggggatgcgcctcgctgccaaagaagccgctgggagcggcccagccgtgccggagcagaggggccgccgccgtgtgtcactcgtcggcgcacctcagcgcgcgcaccatccagtggatctccgccggagccagcgcagtgctattagttgctaaaggcactgccatacacaaatctttccttgtgccattttttgctcttcaggcaccttgcagcataatctcatggatcaagggtgactatggtcagtggactgcttttcttgctctgttggtgcgtctattcttcttcattccaggtagagtagcaaacatggttcatataagagtactttttagattcattctgtctgctaataatcaaatgtgtacttcttttttgagataattgaatactatgtttttcgaaggaacaaagtagaccatgtgcccaacctgaacaaattttattacttctttgaaatcattcatttgcatgattcaagaaaaaaggaaaatggagattataaagtatctattgtaatcgtatgatagcaaacttgaaggcagttcacctctttgtagcatcggttctgaaccgatatatgtttaggtctacccagttgtttattattgtaggtgaactggagcttccactgtcaacaatgctgcttgtgagtgttgctccttaccaattcatggatctgaggggaactcaaggtggtgccgtactgtcactggccatagctgcgtatctcgccttccagcacttcactagggtgggcggcccaggcaaagccttcgagcagggatccattgttgcgaccttggccatcatctgcatcatgattgtgcccttgatgcttctattctgatttgcatttagttggaatgaatttgcttctcattatgtgcgtatagaaggacaaataaatttaaccttgtaatgcagcatccgagttctctttcccaaaacgtatgcactgatatatccttccctgttagtgctcttcggtggttattgctcttcggtggttattgagttctctcagcatgtttattctcttgttggatcttgcatggactataatttggaagccacaaaaccacctgagggcttgtttggacaatctcggattgaagtagattgagctggtatgggatgtatcgaagtgtaatatgaactaatttctctttcaatcccttc

SEQ ID NO: 139416 - DNA, 1836 bp, Zea Mays
atgtgcaatcgctcaatcaagaaatctagggcatatagcctgattagttcaccaaaatccggcggagtggaggagctctccgtggaggagcgcaacctgctgtccgtcgcctacaagaacgtcatcggcgcccgtagggcctcgtggcggatcatctcctccatcgagcagaaggaggagggccgcgggaacgaggcgcacgccgcctccatccgcgcctaccgctccaagatcgagaccgagctcgcccgcatctgcgacggcatcctcgcgctgctcgactcccacctcatcctatccgccggcggcgccgagtccaaggtcttctacctcaagatgaagggtgactaccacaggtaccttgctgagttcaagtctggtgcagagaggaaggatgctgcggagagcaccatgaatgcctacaaagctgctcaggacattgctcttgcagatctggctccaacccaccccatcaggcttggccttgctctcaacttctcagtgttctactacgagatcctgaactcccctgatcgtgcctgcaaccttgcaaaacaggcactgtataaaccagatgcagatacaaatgacatgatttctgaaaagttgatggtacaaattaatcttaacgaaggcattgaagaggatatcccaccaagccaatatactaccaggtgtgaagagaaattaactatgactcaagctgccatctcaagggaagctggacctccaggttatgatcctggagaaaactttcttcaggtcagttcaatgattactagctgtgagcagagtgtgataatggctcctagcgctatcgcaagaggagttggtccaccaggatatacgcctggagaacaccagggcaatggggctccatggaatacaagctatgagcgaagaccgtttacgagtcctgcgactagctcaagagaagtcagacctccaggatatgggcctgaagaaaaccaaggcagtggcatttcctgtaatacaagcagagagcaaatattgtttatgagccctacaaccatctcgagagaacttggtctaccaggatatttgcccagagaaaaccagcgcagtgacacttcatggaatacaagctgtgagtcaggactatttatgagtcctgcgaccacctcaatagaacatgaaatagcgcagtcattttcacaacaaaggaaaaaaagagagggcggtggtcctacatatcatgaaacttttgcttatgctcaagggtcgtttgctcgtgtacctgaagcttacgttctaagcctgggcatttatctgcttcccaacagagagtgcacgaggactttgttcacgtgtggcatccccacaatcaaaatgtgggagcaacaggttctggaaataagtgctatggtgccccctccatcaacatctgctgatcgtctgggacttgtattacttggttgtatacgagacgtcttgtggcacggccatttcttaaggtatctcttgatattggaccgcacgaactggaagaccaacatgctgacagctctcttggttccttacattttcttcactctgcctaatgtgctgttttctctgatcagattggttagagcttcccggttccatcatcctgctcacagcggtcgccccagtctgttcgcacacaccttcagggacgacctcgtcggtgtcttcatatgccttgcgatcggatgctacctgctccaagagcacatcagggcgtcagatggactcaggaacgccttcaggaagggcaatggcgtgtccaactccattggcatcctcctgctcttcatctaccctgtctggaccggggtgctgcgaatcctgtag

SEQ ID NO: 139417 - DNA, 1812 bp, Zea Mays
cttggactccttgcatatcggtcagtttgccgtcagaacaaggagaaaaaaaggttccggtcttcatcccttccatttccaaaggacgacgctctcaccattcacgaacggcgactgcggatcgatcgtgcgtcgtctcctgcgccggcctcccttccagtcagtttcagatagtgtcttcagtgccatggcgccgctacgccagggagcaagtcggtccgccatggctgggtggggcatgtaccacggactgaaacataaaccaacgcaaatccaatgattgtaaaacatcagtttcgatggacaaaaatattttcctatggaatatattacatactagactgactattaaattctaaaattcgtttacaggttcaaacaagggacgatacgcatcggacaagaaatggacatcaaatcctccgagaactaaagtttcactcagatcttcgtcgaccttttgagttgcacaatgtctattttgcaacatatgtataattatatatgatgacctactcagctctttgaaaacaatttatgtaaatataacagcttaattctacgtagtggacaaaaatgttgactctgattacagctcagataactctatttcatataaacatatagcatctgcagtaattaaattagaaaaaatttctaacgcgcgcagggcgcgcgccagtgactagtatttgttaggtcctcgcagatgctagcaagatgatagtgttgtagcatggaggaccattgtctctagtgtctgaaatacgagactggcatgcaggtcgatgtctgagcacagagctcggaagatgtgcgtatcaaccaataggctgtggctgtgcctgcaagatgccctgaaggacgcgcttcttgaaaagtcagaactgcaaaggtgcgcaaaccaaacctctgattgaatgcttccatggctcatagtccctagattcttgtctctatctgatagcccattgtttaccattgtccgttcatgtgtcagctttgctgcatctgatcacaatgatctctcagcttgttgtaacatcgtcttgaccattgtccattgcgctcatatcagctacatacatggttgaaaaacttgttataaaaatgtgccatttcaaacacggattcgattgtaatttgaaaagttaatttatactgtattatctgatgcatcattcactggagaatgggggataacaggattcgggctaagaacatccattcttttcaccgtgtatctctttgcaatctcagccattcgatctactatactatccatagaacatattccaaaggagataagcagccggtgcacgccccttgggagccaaaggaatatatctgtgtgggtatatgtagcttttcatctccaatgatcctggaaagggaattgactacattccaatcttttcccctgcttgttcatgaaattcacgatgtcacatgatttaccgccacttagatctgtcaaaaggctgccatttcttcgttcaggtgtatgggcgtggaaggtttgcatccatcggatgtgttggaccagcatgttgtagttttgattcgtgctgcgtgcatcgagccatcaggagatctctgcatcggaatcatatctgcacaaagccgtcggaaagatgcaggattcccactgatattttgaaccatcatccaggaggctaggtattagattttatatatacgtggtctgtattttgattaattaaatcaaatcaatcttatacctggtctgtgttttgtttaattaaatcaaataaatcttaagtttatattaaatgtgatggtgttattacc

SEQ ID NO: 139418 - DNA, 644 bp, Zea Mays
cttggactccttgcatatcggtcagtttgccgtcagaacaaggagaaaaaaaggttccggtcttcatcccttccatttccaaaggacgacgctctcaccattcacgaacggcgactgcggatcgatcgtgcgtcgtctcctgcgccggcctcccttccagtcaggttcaaacaagggacgatacgcatcggacaagaaatggacatcaaatcctccgagaactaaagtcgatgtctgagcacagagctcggaagatgtgcgtatcaaccaataggctgtggctgtgcctgcaagatgccctgaaggacgcgcttcttgaaaagtcagaactgcaaaggtgtatgggcgtggaaggtttgcatccatcggatgtgttggaccagcatgttgtagttttgattcgtgctgcgtgcatcgagccatcaggagatctctgcatcggaatcatatctgcacaaagccgtcggaaagatgcaggattcccactgatattttgaaccatcatccaggaggctaggtattagattttatatatacgtggtctgtattttgattaattaaatcaaatcaatcttatacctggtctgtgttttgtttaattaaatcaaataaatcttaagtttatattaaatgtgatggtgtta

SEQ ID NO: 139419 - DNA, 689 bp, Zea Mays
cttggactccttgcatatcggtcagtttgccgtcagaacaaggagaaaaaaaggttccggtcttcatcccttccatttccaaaggacgacgctctcaccattcacgaacggcgactgcggatcgatcgtgcgtcgtctcctgcgccggcctcccttccagtcaggttcaaacaagggacgatacgcatcggacaagaaatggacatcaaatcctccgagaactaaagtttcactcagatcttcgtcgaccttttgagttgcacaatgtctattttgcaacatatgtcgatgtctgagcacagagctcggaagatgtgcgtatcaaccaataggctgtggctgtgcctgcaagatgccctgaaggacgcgcttcttgaaaagtcagaactgcaaaggtgtatgggcgtggaaggtttgcatccatcggatgtgttggaccagcatgttgtagttttgattcgtgctgcgtgcatcgagccatcaggagatctctgcatcggaatcatatctgcacaaagccgtcggaaagatgcaggattcccactgatattttgaaccatcatccaggaggctaggtattagattttatatatacgtggtctgtattttgattaattaaatcaaatcaatcttatacctggtctgtgttttgtttaattaaatcaaataaatcttaagtttatattaaa

SEQ ID NO: 139420 - DNA, 1583 bp, Zea Mays
cttggactccttgcatatcggtcagtttgccgtcagaacaaggagaaaaaaaggttccggtcttcatcccttccatttccaaaggacgacgctctcaccattcacgaacggcgactgcggatcgatcgtgcgtcgtctcctgcgccggcctcccttccagtcaggttcaaacaagggacgatacgcatcggacaagaaatggacatcaaatcctccgagaactaaagtttcactcagatcttcgtcgaccttttgagttgcacaatgtctattttgcaacatatgtataattatatatgatgacctactcagctctttgaaaacaatttatgtaaatataacagcttaattctacgtagtggacaaaaatgttgactctgattacagctcagataactctatttcatataaacatatagcatctgcagtaattaaattagaaaaaatttctaacgcgcgcagggcgcgcgccagtgactagtatttgttaggtcctcgcagatgctagcaagatgatagtgttgtagcatggaggaccattgtctctagtgtctgaaatacgagactggcatgcaggtcgatgtctgagcacagagctcggaagatgtgcgtatcaaccaataggctgtggctgtgcctgcaagatgccctgaaggacgcgcttcttgaaaagtcagaactgcaaaggtgcgcaaaccaaacctctgattgaatgcttccatggctcatagtccctagattcttgtctctatctgatagcccattgtttaccattgtccgttcatgtgtcagctttgctgcatctgatcacaatgatctctcagcttgttgtaacatcgtcttgaccattgtccattgcgctcatatcagctacatacatggttgaaaaacttgttataaaaatgtgccatttcaaacacggattcgattgtaatttgaaaagttaatttatactgtattatctgatgcatcattcactggagaatgggggataacaggattcgggctaagaacatccattcttttcaccgtgtatctctttgcaatctcagccattcgatctactatactatccatagaacatattccaaaggagataagcagccggtgcacgccccttgggagccaaaggaatatatctgtgtgggtatatgtagcttttcatctccaatgatcctggaaagggaattgactacattccaatcttttcccctgcttgttcatgaaattcacgatgtcacatgatttaccgccacttagatctgtcaaaaggctgccatttcttcgttcaggtgtatgggcgtggaaggtttgcatccatcggatgtgttggaccagcatgttgtagttttgattcgtgctgcgtgcatcgagccatcaggagatctctgcatcggaatcatatctgcacaaagccgtcggaaagatgcaggattcccactgatattttgaaccatcatccaggaggctaggtattagattttatatatacgtggtctgtattttgattaattaaatcaaatcaatcttatacctggtctgtgttttgtttaattaaatcaaataaatcttaagtttatatt

SEQ ID NO: 139421 - DNA, 1582 bp, Zea Mays
cgtcagaacaaggagaaaaaaaggttccggtcttcatcccttccatttccaaaggacgacgctctcaccattcacgaacggcgactgcggatcgatcgtgcgtcgtctcctgcgccggcctcccttccagtcaggtgtgttttttctcagattttttcttctcacgcaactttttctagaaaaaaatggcgttagggttttcgtcttccgttggaatgtctcttcctccttcttccgctgtctcactcgatcttccgatgaactgtctcttcctatttcttccgctgcgcaatcacggcacggagaaaaccagaccaaaaaaggctctgtggttagacttagacgcagaaatgcgaaaacggagaggcgagctcggcccgtgctcgctcacctcggcgcgacggagtgggcggggacggcgcccgctggcaggagtgagagtgggagctggggcgccgttgcttcgccggtgctcgcgacccaccgccgtgcagcatcgcttccgcctccgcttctcctgtcttaatataaagcatacaaacatgtaaaaaccacatatcattcgtttcagcaacaagtttcagatagtgtcttcagtgccatggcgccgctacgccagggagcaagtcggtccgccatggctgggtggggcatgtaccacggactgaaacataaaccaacgcaaatccaatgattgtaaaacatcagtttcgatggacaaaaatattttcctatggaatatattacatactagactgactattaaattctaaaattcgtttacaggttcaaacaagggacgatacgcatcggacaagaaatggacatcaaatcctccgagaactaaagtttcactcagatcttcgtcgaccttttgagttgcacaatgtctattttgcaacatatgtataattatatatgatgacctactcagctctttgaaaacaatttatgtaaatataacagcttaattctacgtagtggacaaaaatgttgactctgattacagctcagataactctatttcatataaacatatagcatctgcagtaattaaattagaaaaaatttctaacgcgcgcagggcgcgcgccagtgactagtatttgttaggtcctcgcagatgctagcaagatgatagtgttgtagcatggaggaccattgtctctagtgtctgaaatacgagactggcatgcaggtcgatgtctgagcacagagctcggaagatgtgcgtatcaaccaataggctgtggctgtgcctgcaagatgccctgaaggacgcgcttcttgaaaagtcagaactgcaaaggtgtatgggcgtggaaggtttgcatccatcggatgtgttggaccagcatgttgtagttttgattcgtgctgcgtgcatcgagccatcaggagatctctgcatcggaatcatatctgcacaaagccgtcggaaagatgcaggattcccactgatattttgaaccatcatccaggaggctaggtattagattttatatatacgtggtctgtattttgattaattaaatcaaatcaatcttatacctggtctgtgttttgtttaattaaatcaaat

SEQ ID NO: 139422 - DNA, 745 bp, Zea Mays
tcagaacaaggagaaaaaaaggttccggtcttcatcccttccatttccaaaggacgacgctctcaccattcacgaacggcgactgcggatcgatcgtgcgtcgtctcctgcgccggcctcccttccagtcaggtgtgttttttctcagattttttcttctcacgcaactttttctagaaaaaaatggcgttagggttttcgtcttccgttggaatgtctcttcctccttcttccgctgtctcactcgatcttccgatgaactgtctcttcctatttcttccgctgcgcaatcacggcacggagaaaaccagaccaaaaaaggctctgtggttagacttagacgcagaaatgcgaaaacggagaggcgagctcggcccgtgctcgctcacctcggcgcgacggagtgggcggggacggcgcccgctggcaggagtgagagtgggagctggggcgccgttgcttcgccggtgctcgcgacccaccgccgtgcagcatcgcttccgcctccgcttctcctgtcttaatataaagcatacaaacatgtaaaaaccacatatcattcgtttcagcaacaaggtgaggttcattagtgttaaactgtaaaaacgctaatataaacaaagtagcttgattccttaactacctaaattgttttttagtttcagatagtgtcttcagtgccatggcgccgctacgccagggagcaagtcggtccgccatggctgggtggggcatgtaccacgga

SEQ ID NO: 139423 - DNA, 1424 bp, Zea Mays
cccacccttgcgcttgcttcccctcgtcctcggcggctcctcctttgaccaccaactccggcggcgccgtacgtcgcagccgcacgccacccggaaatacctacatggggcgaccggcgcgctcccgttctccagccacagagccgcctccggcggtcaccggccttcgctcctccaagatctcctttcgctcccgtaagatcgtcaagacagcatccgcgaaacctttggccacgaccgccctggcactagcgccgcaggcgcctccgcctccagtgcttcctgcgctgtcgtcccccggagagcttgcggccgcgctgcgccacctccaagccgcggaccctctcctcaccgcggtcattgccaacactgaggcgcccaccttcaccgccacaccctccctccccgcgttccactccctcgcgcgctccatcctataccagcagctcgcgacctccgctgcggacgccatctacgcacgcttccttgcgctcctcccctctgcttcggcggcggccgcagccgtagccgctgacgcggtcacacctgccgccgtccttgccctcgccgccgctgacctgcgtaccatcggcgtatccggccgcaaggcatcctacctccacgacctcgcggccagattcgcagccggggagctctctgactccgcagtcgccgcgatggatgaggctgcgctcctcgcggagctcaccaaggtcagaggcgtcggcgagtggactgtccacatgttcatgatcttctcgctgcaccgccccgacattctgccgtgtggcgacctcggtgtgcgcaagggcgtgcaggagctgtacaagctcaagtcgctgcccaatccggaggagatggcagcattgtgcgagcggtggaggccataccggtcagtcggcgcgtggtacatgtggcgcctcatggagagcaagggcgctgcgtccaagaagaagaataagggtaatgcgagctcttagttaggtatgtatatgtatgtgatggtagttcttgtcccaaagctgttaaatttaggccatctccggcagcttacctataaccatactcatattcaaactatactctataaacagtgcaatctacaatataaaacgatgcaaaacgttgtttttagtgatcatataggtgcaatgtacagtaattcacccgtatggtcacaaaaaacacattttgcactgtagattgtattatttgtagagtgtagtttaaatatgagtatgagtaagctgctttagctgattctggggtacatggtgtccctgtcccagatttgtgacagtctgtgttcaaatcagagttattgcagacttacaactgaagttgattagttttagagtcaattgcatgttgtaaacttgtgattttattagatattcataattgatgcagctaagttaatggtt

SEQ ID NO: 139424 - DNA, 310 bp, Zea Mays
cgagttacgccgcacaagttctaccgaagcgcgccgccgacttcctgggctcgagacgcgactccagtcgcccaccacttcgagcatgccctggtctgcgacccaaccggacgacggcgcccgcgcagtcctcaacgcccggcgaggaggcccagaacgctccacgccgcaagcacaggaatgtccctggacgtccagggtgcggcaccgttgaacaccctcccggcaacgctcccgttctctctctgctcttcctttcttctctctcgactgcgcgaatacatcgtcagcgtatactcgttggtttttt

SEQ ID NO: 139425 - DNA, 2480 bp, Zea Mays
acccgtgtgccccgctccgtcctacgccaccgccgccggattcgctcccacctccggcggtcacgcccgttaccaacacccccacctcgcgtcgtccgccagctcctctctgccgcggcgcaaccatctccatctcccacgattacagcgaccacaagaccagcgacgcctccaccaacgagaaggatccattcaattcatccagtccacgcacacccccgtctttgactcgcactccgcttccagatctaggcgggccgaggaacgatgaacggaggcgccgccccaccatcagctgcggccgcggcgacgccgcctcaccggcggctgccggactttctccagagcgtgaacctcaagtacgtcaagctggggtaccactacctcatcacccacctgttgacactgatgctgctcccgctgatggccgtgatcctcctggaggccgggcgcaccgaccccgaggacctgcggcagctgtggctccacctccagtacaacctcgtgtccgtgctggtcctctccgccgtgctcgtgttcggcgccaccgtctacgtgctcacccgcccccgccccgtgtacctcgtggacttcgcctgctacaagccgcccgcgcacctccaggtccggttcgaggaattcatgcgccactccaagctctgcggcttctccgacgacgcgctggagtttcagcgcaagatcctggagcggtccgggctcagcgaggagacgtacgtccccgaggccatgcacgcgctcccgccccagcccacgatggccaacgcccgcgccgaggccgagaccgtcatgttcggcgcgctcgacagcctgttcaggtccacgggcgtcaggcccaaggacgtgggcgtgctcgtggtgaactgcagcctcttcaacccgacgccgtcgctgtcggccatgatcgtgaacaagtacaagctccgcgggaacgtccgcagcttcaacctgggcgggatgggctgcagcgccggcgtcatcgccgtggacctggcccgcgacatgctgcaggtgcaccgcggcacctacgccgtggtggtgagcacggagaacatcacccagaactggtacttcgggaaccgcaagtcgatgctgatccccaactgcctgttccgcgtgggcggcgcggcggtgctgctgtcgaaccgcggcggcgaccggcggcgcgccaagtacgtcctgaggcacgtggtgcgcacgcacaagggcgcggacgacagggccttcaactgcgtgtaccaggagcaggacggcgagggcaagaccggcgtgtcgctgtccaaggacctgatggccatcgcgggcggcgcgctgaagaccaacatcacgacgctgggcccgctggtgctgcccgtgagcgagcagctgctcttcttcgcgacgctggtggccaagaagctgctggtgagcgccaagacgaagccctacatcccggacttcaagctggcgttcgagcacttctgcatccacgcgggcgggcgcgccgtgatcgacgagctggagaagaacctgcagctgagccccgcgcacgtggaggcgtcccggatgacgctccaccggttcggcaacacctccagcagctccatctggtacgagctcgcctacatggaggccaagggccgcgtccgccgcggccaccgcgtctggcagatcgccttcggcagcgggttcaagtgcaacagcgccgtgtggcacgccctgcgcaacgtcaagccgtcgcccgacagcccctgggaggactgcattgaccgctacccggtggagctcgtcgacggcttccccgcacaccaatagtactagtatccgttctcttctcaatcccacccacccacccaccccggctcccctcccctccacacatccatcgacaaagagatcttagcctcaaatcccctaatctggctggctggctggcatggcaaggagggtgctttccctggacaagtgttcggcggcagcatcgggtctttggtgtgtacttgatggatcatcccccagcttgtgtccaagcgagggcgagcatggtccccctcccccagcttgtgtggctgcacctgcacctgaacctgcggtaagcttgagtacgtactgctgatgattgttgtatgtgcatctgtctgttcagccatcgctgccagccagtgtcatttaccgatattagctagctagtggtccagtatccagatcacagaggaaagtgccgttccttccgtttctaccaaagaaggtcatgttggtgacgaggaaatcctgagtgtcttgagtgtgcccatggaccatggacactctgtttgccgtgttcgattggaaatctcgctcttgcttgtttaactgtacatggatcactggtctgccattgatgaggcgatgtatgatttatatccgttgttttcccttcatcagattatactcttgttaaattcgtaagatcttgttcacaaaagctgtttcacttctccata

SEQ ID NO: 139426 - DNA, 91 bp, Zea Mays
cgacagtgcaggagaaggttatgtcatacatatcggacatgactgcctaactgcacaagaaatgaaaaaatgtcagatatgactacctcgc

SEQ ID NO: 139427 - DNA, 2202 bp, Zea Mays
atggcgtcggagatgagcaagaacgtgaaggccctcgacgagcaggaggtcacctcgcagcactcgcgcgcccagaccagcgccgccgccgaggagcaacagcagcagcaggcggtggatccgctggcgcgacagtcgtccatcatgtcgctgacgctggaggagctgcagaactcgctgtgcgagccgggccgcaacttcgggtccatgaacatggacgagttcatggccaacatatggaacaccgaggagttccaggccgccacggccggctgcaacaaggagggcgcgtatcgggagccggtgcccgtggcgacgacgacgggcacaactgtacacaaacaaaagcttgaggcctcgagaagcacccaccaattgggagacgacggtgcacgaaacgaaatacacgactacacgagccgagaagaagtgagacgagccagtaggaaagcgccaagcaagcagcgccactgcaccaggagctgcaacgcaagcgcatccactcatcatcgtccccctgcccggtcgctccactcccctccccccgcgcgcacaaacaacagcagcccgatgtccgccgccgcgtcctctgccaccgcctgcttcctctccccgctcccgccgcctcgccgcccgcgtcatttcctcaggcacctcgcgcgcgccgcggtcaccaagcccgagcccgcctccgcctcctcgctcgccctcccctcgccgtggctttgggcccggcggctctgcgagctggtccccgccgaagccgggggccggcttctgtcgtcggccgcgggctccctcatcgtcgcgctcgcctcagcgtcgcttgtcctaggtgacaccggcgccgcctccgcgttcgtcgtctccacgccgcggaagctgcaggcggacgagctcgccaccgtgcgcctcttccaggagaacacgccatccgtagtctacatcaccaacctcgccgtcaggcaggacgcgttcacgctcgacgtgctcgaggtgcctcagggatccgggtccgggtttgtctgggataagagcggccatatcgtcaccaatttccatgtcatccgtggcgcgtcagacctgagggtgacacttgctgatcagtcagtgtatgaagcgcaagttgttggatttgaccaggacaaggatgttgctgttttgggtatcaaagcaccaaagaataaactaagacctatacctgttggtgtgtcagcagacctactggttggtcagaaagtgtatgccattggaaacccatttggccttgaccacactcttacaacaggtgttatcagtggcttgcgtcgagaaatcagttcagccgccacaggacgtcctatacaagatgtgatacagaccgacgctgctatcaaccctggtaacagcggtggtccactccttgatagttctggaaacttgataggtgtaaacactgctatatactcgccctcaggagcatcatctggtgttgggttttccattccagttgacacagtcgggggcattgtggaccaactcataaaatttggcagggtgacaagacctattctgggaataaaatttgccccagatcaatccgtagagcagcttgggttgagtggagtgcttgtcttggatgctcctccaaacggaccagctggcaaagcgggtctgcaagcaaccaaacgagatccctatggccggcttatcctgggcgatataattacctctgtgaatggtacaaaggtgacaaacggaagcgacttgtataggatactggaccagtgcaaagttggagacacggtgaccgtggaggtcttgcgtggcgaccacaaagagaagatccctgtggtcctggaaccgaaggctgacgaatcctagtactagtaaacccagcttcttcttctgtaccatagcatcagtttctcgctttggtgcagaggcgcaaacacacaaggcgtcttagcattttcgccctccacggggttcattcgctgtacataattcatgcatgtagatgttgttaccatctcttgtctggtggaaaaggggtatccagactccattccaggttgccgtaatgccgtcgtgtattattaatacgatgctcatcagatgaccatccaggccggtcaagggacctgcaggccgacgattgaactcgctgatgtcacagatcaccaaacccgttttttgacgaaaaaaaaagattaattgtgt

SEQ ID NO: 139428 - DNA, 282 bp, Zea Mays
atggatgatgggatggtgctgcagcacctgagggaaacacatctgaattccacctcgcatggcatttggcggcttgaaggttgcctgcacgtcaaaaacaacagacatgaaagtgctttagtaaggctacacagtcccactactggccctattaaggaagacgagaaaaaggaggtgtcagcacatgaagccgagggaaaccattatctatatctatattattttattaagaacctaatgcttggtactattacggttttaccctctatactgacactctaa

SEQ ID NO: 139429 - DNA, 1068 bp, Zea Mays
cgccgcgcgcctccctttccgccattgcaatctttgtttccgggaggggaggggatggaagggaaggttccgtccagcgcaggccgcagagacagagagcgcgaggaacagggagctagctagcagagctaataagaaagaaacgagcagcagcagggtcggtggccaagcatggagcgcaggaggagccggcacgccttgttgctcctctcggccgtcatggcgtccctcgtcaccggctcgaccgccgggatataccacatcgtcggcgccggcaaagggtggcggatgccccccaacaggacgtactacgaggactgggcgcgcaccaggcagatcagcataggtgacaagctgatgttcctgtaccggagcggggtgcacaacatcgtggaggtgccgacgcgggagctgttcgacgcgtgcagcatgcgcaacatcaccagccggtaccagagcgggcccaccatcatcgagctcaccgaccccggcgagcgcttctacttctgcggcgtcggcgagcactgcgaggccggccagaagctcgccatcaacgtgctcctcgtcccgccgccgccgccggacacggacgacgactgctccagcgccgcccgcctcccgggccacgcgggcgcggggctcgccgccgcctgcatgtgcctcgtgtccgcgctgctgacaatggcggtgtgaatcggcacgctgccgccgtagattattggcgattgctggctgacggcgttgcttgctgctgcgtgtaaatcagtaacagtttaggcgtgtccattgagccattgtcttccccagctaatggaaggcggaaagccgtgtcgaggtactccctccgtttcgttttagttgtcgctggataatgcaaaattgaactatcgagcgacaactaaaaagaaactgagggagtaactgtttgtcagcacaggaaggaggataggaggacgacagcgggaaatcggaagtaaaatcagaggtgagggaaccattatgtaaattcagaactactaggtaccgtaatctatattaaccgcaaaaaagataaccatttactacaaa

SEQ ID NO: 139430 - DNA, 4092 bp, Zea Mays
gcggctcgctgctggtctgttgcgcgcgcccgccgcgaggtatggctccccgccgctgaatcggtcctggggcggtttttgcctttgcgcgacttggcccgtgcgccgtgaccttattgcgcgggcgacgcgcggttttcgcagggtaggtttggtgccatggaagggacggcggcggaggtgggcggcgctggcgctgacgcggccggggatgtgcagattaagggtgccaaggagaatgcgcagcccacggcggcgcagcagcagcagccgtccggcagcgaggcgctggagatgccggccacgccactccagcgggacatagactggtccgagcatttctccttcttcacctcgctgggtgggttcgggggcagctcggacggcgcgaggggcctcaccagcgtcggcctgtccaattccgagtccaggccagacagtgtggcacagcgtggcttggaccacgacactgaagagagggtggaggagctcacattgaagaattgcatcaatactggtatccagcctgaggtttctgctggtgggagcacaagcagcagggataggcctacccgtattaagggcctgtggggtaattttacacggatcgcccggagaactagcgatttggccagcagggaaaacaccgcactgagttctggcgacattgcaaacttgagggctggtgatgcttctagcatggaaaagctggcgacgagccttgccagcaatatcatctcaaggaacaacaatgcgtctggcaatgaggcacctatgagtcatgttggatatgtcaataatgagttcatgatgtgcagccagcagattctcttgtctccatggtctaatcaggataatgctcttaaagtaagcagcttctcaaataggattcttaaccggatgagaagtaagactgtggcaccctcatctagggttctacgatcaccacttcaaatcaaatcaaaaggtaaaggggttgtgtgccaaggtgcacgggaggagatccaagtgcaagctaatgcaagacccagagaccctttggacaagattccgactattcctagctcaattcatgattgtatggccagagtggaccatatgcttttcagtactggtggaaatgttacaaaatcccactctgagggatctagcctgagggaactgattaagcctgggtggcaaacaatgactaagtttgagaaaatgcatttgtttaagcagatcattgatcttgtggataagtgtcatgcacagggttttactttgcagcatttgcgaccatcatattttatggtcctttcttcaaatcaagttaaatatatcggctcttataccacacaagatttgccaacatcaatcaaacaagaggttgctagagaagatcttgtgaatagaaaaagaacttttggacagagaattgatcaccaagagtctaatgaccatggaaatttgacgctgaagtatcaaaaggttgatgagcaaggctcagtcgctatcaggcaaccagcaaatacattttggaccgacaaaatatgtgacaatcaaaatgaagatgtcaatcgaggtgttttgaggcaagaaaattttagccacactgccagagaaggttttaagttggtcgaaccatatggcagtaatatatcttgtgctcagcatgtatctagttctgccacccaacaaccagcatttgaattgaggaatcttgaggaaagctggtacaaaagcccagaggagctcagtcaatttaaaggcacattcccatcaaacatctacagccttggggttcttctatttgagctcttttgctgttctgagacatgggaggtgcactgtgctgcaatgtcaaatcttcgtcaacgcatcctgcctccaaattttctttcagaaagtcccaaggaggctggcttctgcctttggttgctgcatccagatccttgttcaagaccaaaagcaaaagagattcttggatgtgacttgataaatgggggtcaggatttgtcgttgttagatgaggcaccagtttccatcggtgaagatgacactgaatctagtttgctacttaacttcctttctcaattgaaagaagaaaaggcgatgcagtctgccaagttatcggcagagcttggaagcttacaaacagatatcacagaggttgacaaaagacactcagcaagaatgagattgagtttagatgatacagatgtactgccaagttctagtgctttgtcaggagcttctgtgagtgcccttcaaggtgcattgctgtcaggtttgttaccagcgtcatacaagtcgagcatatatgaggagagggtaatgaggaatttggtgcagcttgaaaatgcatactactccatgaggtcctcgctggacacctgtgaaacaaatgtaatcaaacggccagataacgaggctttgagggcccgtgaaaatttccatcaacttcatagtgattctgatgccaaggacgagaaaacagatcgtcttggatgcttttttgatggtttatgcaaatatgcccggcacaataggtttgaggtacgaggaattttgaagaatgcagatatacttaactctccgaatgtcatctgttcgttgagttttgatagggatgaagaatattttgctgctgctggagtttcaaagaaaataaaaatatttgaatttgatgcactcttaaatgatcgtgttgatattcattacccactgatagagatgcctagcaagtccaagcttagctgtgtctgttggaacaactatataaagaactacctggcttcaacagactatgatggcactgttcagctatgggatgccagctctggtcaaggattcacacagtttacagagcaccggaaaaggacttggtctgtgagtttttcagatgtcgaccctactaagttggcaagtggtagtgatgattgttgcgtgaaagtatggagtattaatcagaaaaattgtgttgatacaatcagaaatgtggccaatgtatgctgtgtacaattctctccatactcctcccgcatgctagcttttggttcagctgattacaagatatactgttatgatctgaggaacacaaggataccttggtgtactattttgggacatgggaaagctgtcagttatgtgaggttcttggatccatacacacttgtctctgcatcaaccgacaacacattgaagatatgggatcttaaccagactaattgcagtggattatctaccgattcttgcagcctgactctgaatggtcataccaatgagaagaattttgtagggctatctgttcatgatggatacataacttgtggctctgaaaccaatgaagtgttttcttactacaaaactttccccatgccaataacttctcataggtttggttctattgacccgataactggacaagtgacaaatgaagacaaccagcaatttgtgtccagtgtttgctggagagggaagtcaaacatggtagtggctgccaactccagtggtagcatcaaagtgcttgagcttgtgtgaatgaacgagagtcatattggagaagaaggttctagtgttgccatgcgggcctgcgatgctttcgtgcccttgggcactaaaagactcgactgctctatgcaagcatcctacaacaccgatcattggttattggaagctttgcttgaaactcacaagcaaactaaagtttttttttttccaagagtatgatggcctcacctccatttttgtgtttggcattttgagacggtacctattcatcgtgatgcaaacttcttttgggctagaggtgcgcgggacttgctatgactgttaagagcaaacgatggaaagaaagggaaaaaaatgatcatgtagctcgaagaagttaatcgtgctgtgtgaatgtttcaaggagaatgtctcaaatagttttatacccccttcattattgtacatatatctagggctgcctaatgaaaggccttgtaagttgtaactagagtagaatgctgatcatgagttaagtataatgaatggtcttcacaaaagattaatcaatggaagattcatacaaagtataatgaatgattatccttttggctggaacaa

SEQ ID NO: 139431 - DNA, 166 bp, Zea Mays
tgtttttttttctttctttttttctctctcacgtctccacgcaaactagtggcggagccagaatttctataaatgtagggccgattattacactaaaaatgtttataccagctaaaaaatttaaatcacataaatacatagataaatatcacatatgaactttgtt

SEQ ID NO: 139432 - DNA, 737 bp, Zea Mays
ctccgccccacctcttgtccagtgccccaaatgctggcgaccacctgcagccggccgccgtgcccgtgcccgtgcgcgcggtcgcggcggctccccgcggcgaccttcggcggcaccagtagcgcgaagcgaagggcgccgaggagagcggcggcggcggtgcggtgcgggctgctgcccgtggacccgtgggcgccgacgatggactcccagagcgtggcgtcgcagctcttcgccgtctcgctcttcccctacctgggattcctctacttcatgaccaggtccaagaccgcgcccgggctcacgctcttcggtttctacttcctcctcgtcttcgtcggcgccaccacaaaagttcattatggtacctcactgtccaacgttgactggctgcacgggggcgctgaatcgctgctgactctcaccaacctgtttatcgttttggggctgaggggagccctgaggaagctggaggaagagggcacagacgagattgtttctgaagcttctcaagacagtgcagaaaaaagttctgtctagatgggttcatcatcagtacccctgaaggtgcacgagtgcgctgtttttcttcttctgcagctcaactagctcgtagtgatgttttgggtgtaaggaaatctggcagatctactctgtgcatattatgctgataagaaaacaatgtacaggcatctcctgcaattctgagtagtaacatattatgctgacgctggctt

SEQ ID NO: 139433 - DNA, 755 bp, Zea Mays
ctccgccccacctcttgtccagtgccccaaatgctggcgaccacctgcagccggccgccgtgcccgtgcccgtgcgcgcggtcgcggcggctccccgcggcgaccttcggcggcaccagtagcgcgaagcgaagggcgccgaggagagcggcggcggcggtgcggtgcgggctgctgcccgtggacccgtgggcgccgacgatggactcccagagcgtggcgtcgcagctcttcgccgtctcgctcttcccctacctgggattcctctacttcatgaccaggtccaagaccgcgcccgggctcacgctcttcggtttctacttcctcctcgtcttcgtcggcgccaccatacctgctgggatttacgcaaaagttcattatggtacctcactgtccaacgttgactggctgcacgggggcgctgaatcgctgctgactctcaccaacctgtttatcgttttggggctgaggggagccctgaggaagctggaggaagagggcacagacgagattgtttctgaagcttctcaagacagtgcagaaaaaagttctgtctagatgggttcatcatcagtacccctgaaggtgcacgagtgcgctgtttttcttcttctgcagctcaactagctcgtagtgatgttttgggtgtaaggaaatctggcagatctactctgtgcatattatgctgataagaaaacaatgtacaggcatctcctgcaattctgagtagtaacatattatgctgacgctggctt

SEQ ID NO: 139434 - DNA, 1323 bp, Zea Mays
cggtaaaccattcccctccgccccacctcttgtccagtgccccaaatgctggcgaccacctgcagccggccgccgtgcccgtgcccgtgcgcgcggtcgcggcggctccccgcggcgaccttcggcggcaccagtagcgcgaagcgaagggcgccgaggagagcggcggcggcggtgcggtgcgggctgctgcccgtggacccgtgggcgccgacgatggactcccagagcgtggcgtcgcagctcttcgccgtctcgctcttcccctacctgggattcctctacttcatgaccaggtccaagaccgcgcccgggctcacgctcttcggtttctacttcctcctcgtcttcgtcggcgccaccagtacggctacttctccggtccccatctctgtctcagctccagttttagcatcggtagcaagtactgtggtagtattgtgctcataacttgattttttttttttttaaaaaaaaaaggtacactcttacatgttggtaagttttagtatatcagtacttagcttgtctacagaaaatgtacgtgaaacataaacgcacatgcttttttctgagaggttatatgaaactgcaagagcaattagctaagagattctctttgcatcgttaactacgaatggatgtatacttagctctaaagttctgcagaagaaaaatctgaagctgaattagttgagtgattggaccgtttttctttccaaggtcgcagtgacccttgcaaggcgtctggcatttcaaattcctatagtgtagctgcaattcctacgccgcatagccctcttgcgtttagtattgttttgttgctgaccatttagctgtctagcagaacattatgccagtgccattattaatcgtttccatgttgtttcatgcaccggtttttatccctggagcagtacctgctgggatttacgcaaaagttcattatggtacctcactgtccaacgttgactggctgcacgggggcgctgaatcgctgctgactctcaccaacctgtttatcgttttggggctgaggggagccctgaggaagctggaggaagagggcacagacgagattgtttctgaagcttctcaagacagtgcagaaaaaagttctgtctagatgggttcatcatcagtacccctgaaggtgcacgagtgcgctgtttttcttcttctgcagctcaactagctcgtagtgatgttttgggtgtaaggaaatctggcagatctactctgtgcatattatgctgataagaaaacaatgtacaggcatctcctgcaattctgagtagtaacatattatgctgacgctggctt

SEQ ID NO: 139435 - DNA, 1532 bp, Zea Mays
tgcaggacgaaggcccttcccgccacggccgtaagaacctccctcccgctcccgcaataactactacacaactccaactcgcgcccacacggccacaccacaggaccacactacaggccggagcgagctgcccagcccatccatccatggacgcgagcctccgcacgctgcccccggccggcaccagcagcttcccgggcgaggtccgctccgccgtgtcctcgctgctgctctcctccccgggcaccagcgccctcgacaccgtgttctcgcacctcccgccgccggtcaccatcccgccgctcggctccagcgtctactaccgccagtgcgagctgctccgccacttcgccgcctcacagtcacagccgcaggcgcgccagcacgccgccgcctgctcggcctcctcctcgtcgccgtcctccgccgccgcctccagcttccagttccagcagtccgtgccgcccgacgacatgctgcggcagaagctgtaccgcggcgtgcggcagcggcagtggggcaagtgggtggcggagatccggctgccgcagaaccgggtgcgcgtgtggctcggcacctacgactcccccgagaccgccgcgcacgcctacgaccgcgccgcgcacaggctccgcggcgagtacgcgcgcctcaacttcccgggcgccatggacgggccggacccggactgccccgagcacctgcgccacctccgcgccgccgtcgacgccaagatccaggccatccgcgcccgcatggcgcggaagcgcgcgagggcgcgcaggcagcgcgaggagagggtcagcgcccggtccggcttgcaggccgcgtcggagggcgccgcgacgacgacaacgacgacgaccacctccgagacgtcggcggccacgccgtgcgggtcgcccgacggggtgctgtccgtgagcgccgcctcgggcgtcgccgactgcccgctggaacggatgccgtcgttcgacccggagctcatctgggagatgcttaacttctagccggccggctaataaccgcgtcgaacgggaaacgaatcggttggcagcatgcagaaggaccattgcttcgacatggctgccccgcgagagctcgttcgttcgtagacctcgcatctagcgctgttccttttcaaattacggtcttacgtatatagggagtataatataaccaacgattccctatattttaatacaggggaaaattataccatgagcaataaaaacgcccgacaaaaccgggcctaatagccgtgattagtagtagctgaaagcgtctcgacgagttgtaatgactgatctctgtttctatgtctccgactttcaatctcctctgtttcttgctagtactatctctcttcggcctgcttgtgtgctactgctgcaacacacgcactctactttcctatcagagtaagagatggttgcgtcgcgtgagagctgcaatgcaagcaatctcctgaggctcagatcgcagaagcgtggctgcggtctgcactgcacacgctctgtggagctgaaccc

SEQ ID NO: 139436 - DNA, 2207 bp, Zea Mays
gctaaaccttcaaccttacatgggccctggcccgctatctcgacgtcgagctaatatattgtatctccaaagcccctggcctgcagttttccccctttcctttcctctaaacctctctaaaaccctgcgccccaatccatggccagaccctgcggcgccgcgctccagcggcacgcggcagtggccgtccttcgcgcggccgccgccgctggcgacctgtccaaggggaaggcgctccacgcccgtctcatcacagccgcccatttcgacgtcgtcctgcacaacaacctcatctccttctacgccaagtgcggccgggtcgggctcgcccgcacggtgttcgacgccatgcccttccggaacgccgtgtccgcaaacctcctcatgtccggatacgcttcctcggggcgccataaggaatcgctccagctgctcagggtggtcgactttggcatgaacgagtacgttctgtcggcagcggtgtccgcgaccgccaatgtcaggagctatgacatggggaggcagtgccatgggtatgctgttaaggctggcttcgcggagcaacgctatgttttcaacgcggtgctatatatgtactgccagtgtgctcacatggaggatgcgtccaaggtatttgagagtgtgtccggttttgatgcattcgcgttcaactcaatgataaatgggtatcttgatcgagggcaactggatggttcattagggattgtgagaaatatgaccggggaggctgagaaatgggattatgtgtcttatgtcgcagttcttggtcattgtgctagcatgaaggactctgttcttggggctcaggtgcatgcccaggctttgaagaagaggctagaactaaatgtgtatgtggggagtgcacttgttgatatgtatgggaaatgtgaccatgttcatgatgctaatcgtgcatttgaggttttgccagaaaagaatgttgtttcttggacagctgttatgactgcttacacccagaatgagctgtatgaagatgcattgcagttgttcttggacatggagatggaaggagttcaacccaatgagttcacttatgctgtggctctcaacagctgtgctggccttgcagccttgagaactggtaacgcccttggtgcctgtgttatgaaaactgggcattgggaccatttgctagtcagtaatgccctcatgaacatgtactcaaagagtggaagcattgaggatgcgcacagggtcttcatttccatgccacttcgtgatgtagtctcttggaatttgatcatcacaggctatgcgcatcatggccttgcaagggaaggaatggaagcatttcacagtatgctatcagcagcagtgatcccatcctatgtcacctttgtcggagtattgtcagcttgtgctcagttgggtcttgttgatgaagcattctactacttgaatactatgatgaaggaagttggaattacacctgggaaggaacattatacttgtatggttggtttattatgcagagttggaaggctagatgaggctgagaggttcatagtgaataactgcattggcacagatgttgttgcatggcgatcactgctaaattcttgtcaggtatataaaaattatggtcttggtcatcgagtagctgaacagattcttcagttggagcccagtgatgttggaacctatgttttactctctaacatgtatgcaaaagccaaccgatgggatggcgttgtgaaggtccggaagcatatgagggagagggccgttaggaagtcacctggtgttagttggattcacgtgggaagtgatgttcatgttttcacatcggaggagaaggtacatccgcagatggaccaaatcgccaaaaaacttgaagagctgatcgaccagataaaagctatcggatatgttccaaacttcgcagtggtccttcatgatattgatgatgaacgaaaagaggagcaccttatgtatcatagtgagaaattggctctagcctttggccttattcacacacctaagggagcaacaatccatatcatgaaaaacctcaggatatgtgatgattgccatgttgctatcaaactcatatcagttgttactagcagaaaaatagttgtaagagatgctgttcgatttcattgtatagaaggtggcatttgctcatgcaatgattattggtgatttgtggtgcaattgtcttg

SEQ ID NO: 139437 - DNA, 249 bp, Zea Mays
atggtaacggtaatgataatgatttggcatactgctgcagcctgcagatgttcgcctagctcaggccttcttcattcatcagggtggtggcacagggaaagaaaatggcgacataataaaaacggttcgaaagcgtcgcgcaggaaagcaccacaacttcggcaaggatttcaaaggttcgagttggctgccagccttgatctgagctcatcagcaacagcgtcaatgaactcctccgtgttcaggtaa

SEQ ID NO: 139438 - DNA, 951 bp, Zea Mays
agagtgttcctccggttagtagctgaccggccggcgacgtacgcactgcgctagcaatggcgcctccacggcggccgagcatggggcggcagaaaatcgagatccggcgcatagagagcgacgaggcacggcaggtgtgcttctccaagcggcgcgcggggctgttcaagaaggccagcgagctctccatcctatgcggcgccgacgtggccgccgtcgtcttctcccccgccggcaaggccttctcgttcggccacccctcggtggagtccgtcgtcgaccgcttcctcgcctcgtccaccccctcgcctgccggtgccggtgccggtgccggccactcctccgccggcggcggcgaggaccgcgcggtctccgagctgaaccgccagcacggcgacctgcgcgcgcagctggacgcggagaaggcgaggcaggagcgcgcggacgaggccatccggaaggagcgcgaggccgggagccccgccatggcgtggatcgacgcggacctgggcgccatgggccacgacgacctggtcgcgttctgggccgcgctggccggcgtgcaggccgctgtggccgccagcgccgatcagctgctgcgtgacgcgctgctcgtcgggcgcaggggccgacagcagcagcagccagcggcccagcttggcggtggtggtgtggccttcgacgtcggcgcgtttggcatcggcgtgcaggtgccgccgcctccaggattcgctggcgtcgacctgcaggggttcgggggacaggctgctgccatcctcggcgccggcggcccctcgtgaggtggtggaatggaatgcatgtgcgcgcagttcgcttgagttgttgcattcgcatggaggacgcgtcgtgcctatgttaggtttggtgataacatcgcaaatttgcaaacagtgtttaaattaaatttgatgtgtgcttcctgcttctctc

SEQ ID NO: 139439 - DNA, 1392 bp, Zea Mays
tgcgtcggttgctttggacaggaaacttgtggtagactgggttccttcctgtgatcttgaagattctgcagcagaagagaatcttgatgcctacgaaaaagcatgggaattgttaaagggtgcagatggtgtgttggtgccagggggttttggagacagaggagttcaagggaaaattctggctgcaaaatatgcgcgagaaaacaacattccatatcttggcatttgcttgggcatgcaaattgcagtgattgagtttgcacgttctatcatgaagttgcacggtgcaaacagcacagagttcgatccaaccacaaaaaccccatgtgttattttcatgccagaggggtcaaaaacccatatgggggcaacaatgcgccttggatcaaggaggacctttttccaggtcactaactgcaaatctgctaaactgtatgggaatgctagctacgttgatgaacggcaccgccacagatacgaggtgaatcctgatatggtcccagaatttgagaaggcagggctttctttcgttggcagggatgaaagtggtaaacgcatggagattatcgaactgccaactcataggtttttcgtcggtgcacaatttcatcctgaattcaagtcaaggcccggcaagccatctccgcttttcttaggattggtagcagcgtcatcaggtcagcttgatcacctgctccaacctggtcttatcagttcgactggcagacacacctgcagcaaaggaggagcgcaaaaattaaaggctgggcacgtcatgaagccactgaatggcctggtgaacgcacactattcagcaaccggcaatggcgccattcccatctagcagcgcagagctgcgacgcgtcgcgtgcttgtttgggatttctcttctaccgttactgcttgttctttttttttccctttccttcgagggtgttcttccgtacgttctgccaggccaactgagaagaagagaagggctgtttgctctagcgacacgggcagccgcgtttccgatgttttaacgtggaagcatttggcatggaagctgtcgcatgcatcaagaggcaaatctagcaggttagctagagtttgattagtagtggtaatccgatatatatgctggttgatttgttcgtttgtttgctaagattacaagggccggtgatgtgcagctagctggtagtgtagcctgccgtctcgcctcatttgtacattgtaaaacaactgctactctccattgactgactgaatggacgagtataaacgtattggaccaacatgctgcgtgtgtgtttagtttatcactggtagaaaagctactatcgaatgccagttttatatacaggcgaggccgatacagaagggattttcagtctaaatttgaattgc

SEQ ID NO: 139440 - DNA, 984 bp, Zea Mays
ccccaacctcccttggtttggctggcggctagcccctaaccaaaaaaaataaaataaaaccaactctcccattcggccatttgcccatttcccatctcgccttcgcttcccacgcccctccgtcccgcctcgccgcggcaaggcaccgccgccaaccgccctcgtccctcttcgactcgaccgcgtgagtgagacgaccgcgcgcgcccctcgcccgcccgccaggaggagatcgacccccgaacgcgtcatgaagtacgtgctggtgaccggcggcgtggtgagcgggctcgggaagggcgtgacggccagcagcgtcggggtcgtcctcaagtcctgcggcctccgcgtcacctccatcaagatcgatccatacctcaacatcgatgccggaaccatgtctccgctcgagcatggcgaagtgtttgttttggacgacggcggtgaggtggacttggaccttggaaactacgaacgatttctggacatcaagctgactcgtgacaacaacataaccacggggaagatctaccagtctgttattgacaaggaacgtagaggggattacctaggaaaaactgttcaggttgtgccgcacatcacagatgaaatacaagagtggattgaacgtgtggcaatgaatccagttgatggcacagaagagccagctgatgtttgtgtcatagaacttggtggcactataggggacattgaatcaatgcctttcattgaagcattaggtcaattttcataccgtgtagggcctggaaacttctgcttggtgcatgtcagtcttgtaccagttttaaatgtggttggtgagcagaaaacaaagcccacccaacatagtgttcgcggacttagaggacttggactcatgcctgatattttggcatgccgtagtacacagccacttgaagaacatgtgaaagtgaagctcgcacaattttgtcatgttccgatatcaaatatcattaatctccg

SEQ ID NO: 139441 - DNA, 722 bp, Zea Mays
cacccccaaagtgtaagcacaagcacaaccaaaagcaaagaagagacgaagtcgatcgatcgatctcagcaaccaagcaggtaggtaggcatggcggccgagaaggagggcgcggtggtgaccaagggccacgacgaggggatgaaggcggcggcggcgctgctggaggagttcgggctcccgccggggctgctgccgctggaggacgtgacggaggtggggttcgtgcgggccaccggctacttctggctcgcgcagcgcaagaaggtggagcaccggttccgcaagatcggcaagcaggtgagctacgacgtcgagatcgccggctacgtccggcccaggggcatcaggaggctcaagggggtcaaggccaaggagctcgtgctctggccgcccgtccacgagatggccgtcgacgacgacccgcccaccggcaagatccacttcaagagcctcgccggcgtcaccaagaccttccccgttgacgccttcgccgccggccagtagccacccacgcgtaccatcttatatcactatagtaatacatcatacaccattatatatggcgcatatatatagtattaattaatctcttgtgttactaccttatatatatgttatgtgtgtacttgctttgctaatcctgatgatgatgaagaacgtaacctctagtttttttcctgacaaatataatgaaatgaaactgaacaataaaagtataa

SEQ ID NO: 139442 - DNA, 1001 bp, Zea Mays
gcagggcgacttcatccggttcctgatcaaggaggtgcagggcgcggcgttcgtcgacatcgaggacgtggtcacctttgtcaagtggctggacgtcgagctctcacgtctggtggacgagagggcggtgctgaagcacttcgactggccggaggggaaggcggacgcgctgcgtgaggccgcgttcgggtaccgcgacctgaagaaggtcgagtcggaggcgtcgtccttctgcgatgacccccggcagccctgctcttctgctctcaagaagatgcaggccgtcttcgagaagttagagcatggagtgtacagccttgtgcgtgtgcgagacggcgcaatgagccggtaccgtgggtatcagatcccatgggagtggatgcaggacactggaattgttagtcagatcaaactgcaatcagtgaagctggcaatgaagtacctgaggagggtttcctcagagattcaggccatacaggtcggccctgacgaagaggagctggtgcttcaaggagtccgatttgccttcagagtgcaccagtttgcaggcggtttcgacgtcgatacgatgcgcgcctttcaggagttgaaggagacggcgtcagcctttcagcagtggggaggccaaaaccaacacctgcatcagcaaaggctcgctggcagaagttgagacgcatgtatttatagcaatccgttactacaggatagtggaagcatctatttacctggccaaatgctccactccttttctttttttttaaccttcccgtcaagaagctatatttcgacagattctttattatttttaatatgcataagagcatgcagaaagacgcttagcgtgtcaataccttgcgtgtgggctatcatttacacgctcctatgagtgattaactcgcatccatcgatggacatttctctcttcttacgttctcgcctcaagacaaggattttacaggtgcgaaaacacccgtgtctgcttgtcgtgattgatttttttt

SEQ ID NO: 139443 - DNA, 1004 bp, Zea Mays
gcagggcgacttcatccggttcctgatcaaggaggtgcagggcgcggcgttcgtcgacatcgaggacgtggtcacctttgtcaagtggctggacgtcgagctctcacgtctggtggacgagagggcggtgctgaagcacttcgactggccggaggggaaggcggacgcgctgcgtgaggccgcgttcgggtaccgcgacctgaagaaggtcgagtcggaggcgtcgtccttctgcgatgacccccggcagccctgctcttctgctctcaagaagatgcaggccgtcttcgagaacaggttagagcatggagtgtacagccttgtgcgtgtgcgagacggcgcaatgagccggtaccgtgggtatcagatcccatgggagtggatgcaggacactggaattgttagtcagatcaaactgcaatcagtgaagctggcaatgaagtacctgaggagggtttcctcagagattcaggccatacaggtcggccctgacgaagaggagctggtgcttcaaggagtccgatttgccttcagagtgcaccagtttgcaggcggtttcgacgtcgatacgatgcgcgcctttcaggagttgaaggagacggcgtcagcctttcagcagtggggaggccaaaaccaacacctgcatcagcaaaggctcgctggcagaagttgagacgcatgtatttatagcaatccgttactacaggatagtggaagcatctatttacctggccaaatgctccactccttttctttttttttaaccttcccgtcaagaagctatatttcgacagattctttattatttttaatatgcataagagcatgcagaaagacgcttagcgtgtcaataccttgcgtgtgggctatcatttacacgctcctatgagtgattaactcgcatccatcgatggacatttctctcttcttacgttctcgcctcaagacaaggattttacaggtgcgaaaacacccgtgtctgcttgtcgtgattgatttttttt

SEQ ID NO: 139444 - DNA, 1234 bp, Zea Mays
ctccgaccgacagacgacgagcgagcgcagcccaagcccaagcaagcagggcacggccatgcccgtggcccaatcctaggcgtccatttcgtattccacggccggcgaagcagcagcagcagcagcagccatggtggccggcagggtcaaggcggccatgggcttccagcggagcccggccacgcccaagcccggggcctcctcctcctcctcctcctcgcgcaaggcgccgccgccgctgcagctgcccgggtcggccgcgctgccggagacgccgcgccggaggtcctcgggctctccggcgccgccaggctccgggtccaagggcggcggcggcccattctcgcgctacttcccgcggtcgtccgcgcaggtgcagccggcgcgcgcgtcgggccagcccgagccgccgccgccgccgccgccgccgccgtcgtgcccgggccccgccgccgccgctgacctcgcccgcctcgtcgaggagctccgggagcgcgagtcccgcctccgcaccgagctgctggagcacaagatcctcaaggagaccgtcgccatcgtgccgttcctcgagaccgagctcgccgccaagagcagcgacctcggccgctgccgcgacgcgctgtcgcgcctcgaggccgagaacgcaagcctccgcgccgagctccacgccgccaggggcagccagcagagggtggttcagctggagaaggagctggcggaggtgaagaggcaccgtcgccgggactccggccccgatgccgaccgtcacgatgatgactgctcgtcgtcggtgtcgtcgcacaactccgactccgatcgctccaatgcgccgaccaacgcggtcgtgcccgggctgttgatcgtccctcctcctgctcctcctcctcctcccccgccgccgccgccgccttcttacaagtccaggtcctacttctctgcctcgtcgcgcgcatcgccggccaactcctcctcgtccagctccacctcgtccgcgccatcgacgccaacctactcttcagacaccgcggcgtcgcgaaaccgcgtgccggagctctcccagctcccgccgatacccgccccacccccgccgccgcccccacccccgccaccggcaatgccggcgcgcggacgccgcagcgcgtgctcgtcaccttcgacctcgagcggcagcagcggcggcggctgcggcagaggctcggggcctcctgcgccgccgccgccgcctccgcctgcg

SEQ ID NO: 139445 - DNA, 3149 bp, Zea Mays
aagctgaaagagaagctacagccagcaacagcaagcaggccgaaccaaactccagcgagcaagcaagctatagctagctagtagccaagcagaagccaaatacccaaaggcgagcgatggcgcccggaagcatcgccagccggtggcgcgagctccagggcgcggactcctggtcggggctgctggacccgctggacatcgacctgcgcgcgaacctgatcgcctacggcgagctcacgcaggccacctacgacgggttcaaccaggagcggcggtcgccgcacgccggcgcctgcgtgttcggctactccaacctgctggccggctcgggcgccgcggcggccgggagctacgccgtcaccaggttcatctacgccacgtcggcgctccccggcgtgcccgaggcgttcctgctgctgccgctgccggacctgctgcccgagtcctggagccgggagtccaactggatgggctacgtcgccgtcgccaccgacgacggcgtcgccgcgctcggccgccgcgacatcctcgtcgcgtggcgcggcaccatgcgcggcctcgagtgggtcaacgacttcgacttcacgcccgtgtccgccgcgcccgtgctgggccccgccgccgccgccaacccgttcgccttggtgcaccggggcttcctctccgtgtacacgtccagcaacccggactccaagtacaaccagaccagcgccagagaccaggtcctggcggaggtgagcaggctggtggcactgtacaaggacgaggtgacgagcatcacggtgtgcgggcacagcctgggcgcgtcgctggcgacgctgaacgccgtggacctcgcggccaacggcgtgaacgcgccgccggccgggtcgtcgcagccgccgtgccccgtgacggcgctggtgttcgcgagcccgcgcgtcggggacggcaacttcaagagggcgatcgcgtcgttcccggacctgcgggcgctccacgtgaagaacgccggcgacatcgtgccgacgtacccgccgctggggtacgtggacgtggccgtgcagctgcccatcgccacggggcggtcgccgtacctgcggcagcccgggacgatcgcgacgctgcacaacctcgagtgctacctgcacggcgtggccggcgagcagggcagcgccggggggttcaggctggaggtggaccgcgacgtcgcgctggtcaacaagggcgaggacgcgctcaaggaccagtacccggtgcccgcccagtggtgggtcgccaagaacaagtgcatggtcaagggcgccgacggccactatgcgctccaggacttcgagcagatctgatcagtggtcagagcgagctcgccgctgcatgccatgcatgatgcaggtgtcgtgcgtgctcgtaaactactactacctctctatcggtcgatcacgatgtatgaagtatgaataatgagcgtcgtcgatacgcatgcgtgtatgatcatccagattcaggttgtgtgtgtgatgcttctcacctcttcctcctacgaaccggagattgtgacggggagtcagttatatttataaataaaccatcctctgattgtgattgtgtctcatacatggcgtcataataatcatgcacaaacgaaacctacaagagcagctaccgatgttgtctgctgccactgccagcatgccaagcgtttactcagactgctgtctactactcatcatcctcgtcctcctcgcaatccaccaagctccagcgcccgtcggcgccctccaccattcccctgttgagcggcacccaccaccctggcggcaccccgtggtggtcccgcagggcgtcgtacgccttgttcaccagcgccacgtcccgcgccacggcgagctcgaacccgccgcgcgcgccccgcgtgcccgccacgccgtgcaggtacacctcgaggttgtgccaggtctgctcgcccccggggcttctcaggtacggcgactcccccgtgtcgatcgcgagctccgcgcctacgtcgtggtagaacacgaccgggtacttgggaaccacgtcgcgggcgttgcggacgcggaggagccgcagccccgggacggcgtcgaaccgcttcttgaagccgccgccgccgacgcgcgggctggcgaacgcgaacgaggtcaccgggcaggcggccgcgcccgtggccgccacgttgtagccgttggcggcgatgtcgaacgcgttgagcgtggcgagcgccgcgccgaggctgtggcccgtcacggtgatgctcagctcctcgcccctgtacgcgtccaccagcctccgcacctcgcccagcgcctgatgccgtgcgctgtcctggttgtggctggacgccgggtcgctggaggtgtacatggacagccagccgcggtgcaccatggcgtcgccgtccccgaggaggcctcccgtcggcaccatggggaactcgaggtcgtcggcccactccagcgcccgcatggtgccgcgccacgcgaccacgacgtcgcggcggccgagcgcggccttcccttcgtcggtggccaccgcgacgtagccgatccagttggactccctgcaccggcgcgacctggacacggacctgaggatgaaggcgtccggcacggccaccgacgacgtggcgtacaggaacctggtgacccggtacgcggcggcgtgcgccggcagccgcacccggtcgaagaagtgcgccctggcgaagcgggacagccccgcgtgcggcgacgcccgctcgcggttgaaggcgtcgtaggtcgcctgcgccatctcgccgtagcggagcacggtgcgccgcaggtcgaggtccagcgggtccagcattcccgcccagccgccgtcgccgtggagctcgcgccaccgccgggccgtgtcgccgaggccgccgtgctgggacatgttgccttgctgctgcttctgatgatgatgatccagcttgctcagcgtcgttatctatgtgtttatatggaggatacagtgatggtagcttgcttggtctcttgcttctgatgacgaaggttgccaaacggcaaaggcgtgacatgcaccgtgctgggacagacattcttcgtgtgcagccgcatccccaaatgggcagtgcgaaccgtctgtgagcatggtgaagtggcgcacgctgcgtgtcccgg

SEQ ID NO: 139446 - DNA, 1595 bp, Zea Mays
aagctgaaagagaagctacagccagcaacagcaagcaggccgaaccaaactccagcgagcaagcaagctatagctagctagtagccaagcagaagccaaatacccaaaggcgagcgatggcgcccggaagcatcgccagccggtggcgcgagctccagggcgcggactcctggtcggggctgctggacccgctggacatcgacctgcgcgcgaacctgatcgcctacggcgagctcacgcaggccacctacgacgggttcaaccaggagcggcggtcgccgcacgccggcgcctgcgtgttcggctactccaacctgctggccggctcgggcgccgcggcggccgggagctacgccgtcaccaggttcatctacgccacgtcggcgctccccggcgtgcccgaggcgttcctgctgctgccgctgccggacctgctgcccgagtcctggagccgggagtccaactggatgggctacgtcgccgtcgccaccgacgacggcgtcgccgcgctcggccgccgcgacatcctcgtcgcgtggcgcggcaccatgcgcggcctcgagtgggtcaacgacttcgacttcacgcccgtgtccgccgcgcccgtgctgggccccgccgccgccgccaacccgttcgccttggtgcaccggggcttcctctccgtgtacacgtccagcaacccggactccaagtacaaccagaccagcgccagagaccaggtcctggcggaggtgagcaggctggtggcactgtacaaggacgaggtgacgagcatcacggtgtgcgggcacagcctgggcgcgtcgctggcgacgctgaacgccgtggacctcgcggccaacggcgtgaacgcgccgccggccgggtcgtcgcagccgccgtgccccgtgacggcgctggtgttcgcgagcccgcgcgtcggggacggcaacttcaagagggcgatcgcgtcgttcccggacctgcgggcgctccacgtgaagaacgccggcgacatcgtgccgacgtacccgccgctggggtacgtggacgtggccgtgcagctgcccatcgccacggggcggtcgccgtacctgcggcagcccgggacgatcgcgacgctgcacaacctcgagtgctacctgcacggcgtggccggcgagcagggcagcgccggggggttcaggctggaggtggaccgcgacgtcgcgctggtcaacaagggcgaggacgcgctcaaggaccagtacccggtgcccgcccagtggtgggtcgccaagaacaagtgcatggtcaagggcgccgacggccactatgcgctccaggacttcgagcagatctgatcagtggtcagagcgagctcgccgctgcatgccatgcatgatgcaggtgtcgtgcgtgctcgtaaactactactacctctctatcggtcgatcacgatgtatgaagtatgaataatgagcgtcgtcgatacgcatgcgtgtatgatcatccagattcaggttgtgtgtgtgatgcttctcacctcttcctcctacgaaccggagattgtgacggggagtcagttatatttataaataaaccatcctctgattgtgattgtgtctcataca

SEQ ID NO: 139447 - DNA, 1648 bp, Zea Mays
ggtggatcggtcgaacgggcggagacgtcgagacaacacgccagcccctcaccttttttctctctcaacccgccagcgccaccagcaacttccctcagatcccatccacccctcgctattaaagcagcccaggccgccgcccgccgccgctcacccaccaatccacagcgagacccgaccccgccgtcgcgatgaggccggcgctgctcaagtccacggccgagctcctccgccgcagccgcggctacgcctcctcggccaacccggagcggaaggtggccatcctgggcgctgcgggcggcatcgggcagccgctctccctcctcatgaagctcaacccgctcgtctcctccctctccctctatgatatcgccgggacccccggcgtcgcggccgacgtctcccacatcaactcccccgccctggtgaaggggttcatgggggacgaccagctcggggaggcgctcgagggctccgacgtcgtcatcatcccagccggggtgcccaggaagcccggcatgactagggacgacctcttcaacatcaacgccggcatcgttaaggggctctgcactgccatcgccaagcactgccccaacgctcttgtcaatatgatcagcaaccctgtcaactccactgtcccgattgcggcggaggttttcaagaaggctggtacttatgatgagaagaagctgtttggtgtgactactcttgatgttgttcgtgctaaaactttttatgctggaaaagcgggtgtgccagttactggggtgaatgttcctgttgtcggaggccatgcgggtattactattctgccactcttctcgcaggccactcctgcaagcaattcattgtcccaagaagacattgaggccctcaccaagaggacacaagatggtgggacagaggtggttgaagcaaaggcgggaaaaggctctgcaacgttgtccatggcatatgctggtgctgtttttgcagatgcatgtttgaagggtctgaatggagttccagacattgtagagtgctcttttgtgcaatcaactgtgacagagttgccattctttgcctccaaggttcggctcggcaagaatggagtggaggaagtgcttggtctgggtgagctcaacgagttcgagaagaaggggctggaaaacctcaagggcgagctcaagtcttccatcgacaagggtatcaagtttgcccacgggaactaggcaccttgcccggcttctaacaattgatgccccttgcatttttgtttgactgcctatttttcctgccccccgtatggttggggcaatgaggcgtagtggtcgataataaaacccagcggaacaaagaaaacgtgtaccagaaactgtttgcaaacaccggtgcctttttttttgtgttgaaccaccattagttgagccgtgagggaatggtgaacaagctttccacttgctcatttccgagcgcttctctttgattgtatgcatggtttggactcatgactggacttcttggcagttggcttggcacccaggaatctaatcactggagttgctgctgttatcgagattttgcagcgttgcattctgatcggaactgttgagctggacaatttgatggttctaaatgcatcgtatggatgcttgttcgtatgcac

SEQ ID NO: 139448 - DNA, 134 bp, Zea Mays
tcccacaaaaaaccagctcagcccagctgtgagtttgacagtccatctccatgcagaagggaagcacaacagaatcgaagggaacttgaccgctgaaccgcggcggcgcgagcgagacgttacgcgccgctccg

SEQ ID NO: 139449 - DNA, 1169 bp, Zea Mays
aactccgtttcgaattctagggttttgctgctctccgaccccgagctccgaaggccgcagcatcaggcgcggcccccctcgcgtgtgaccgagatggtgagcgccccgcccccgcacggatccgatctccgccgtgtttgatccccggatctgcggctgcgtgtttctgacccgatatgttttgttgtttttttttgcaggcgctgccgaatcaggggaccgttgattaccccagcttcaagctcgtcatcgtcggcgatggtggaactggtaaaactacatttgtgaagaggcatctcactggagagtttgagaagaaatatgaaccaaccattggtgtggaagttcatccgttggatttcaccactaactgtggtaagatcaggttctactgctgggataccgcagggcaagagaagtttggtggcctcagggatggatactatatccatggccagtgtgcgatcatcatgtttgatgtaacctcaaggcttacttacaagaatgttcctacgtggcatagggacctgtgcagggtctgtgaaaacatccccattgtcctctgcggtaataaggttgatgtgaagaacaggcaggtcaaagccaagcaggttactttccacaggaagaagaatctgcagtactatgaaatttctgccaagagcaactacaactttgagaaacctttcctgtacctcgcaaggaagctggctggtgatccgaaccttcactttgttgaagctgttgctcttaagcctccggaagttaccatcgacatggctatgcagcagcagcatgaagctgagcttgctgcagcagctgcacaacctcttcctgatgacgatgatgatctgattgagtagaaaggatcatgagtcttgaacttgagcaggagttgtgccttgcgtgttttaagttgttctagggtgaactcttgagttctcattgtctggatcatctttttctccttggatgtgttgcatcttttgagtgtggaaatggatggtactcctcgccatgaatttgctggctactttatacattgctttgtaactctgtttgatgataaactttgttgtggcaatcctcttagtgctgatataatcttctatttctcagctgttcaatgtagaaatgcttctaccttttttaggcacgttccaggtgta

SEQ ID NO: 139450 - DNA, 1322 bp, Zea Mays
aaagaacaacagcaggccaccgctgctataaaaccctccgcctccaccggcggctcgccaaactccgtttcgaattctagggttttgctgctctccgaccccgagctccgaaggccgcagcatcaggcgcggcccccctcgcgtgtgaccgagatggcgctgccgaatcaggggaccgttgattaccccagcttcaagctcgtcatcgtcggcgatggtggaactggtaaaactacatttgtgaagaggcatctcactggagagtttgagaagaaatatgaaccaaccattggtgtggaagttcatccgttggatttcaccactaactgtggtaagatcaggttctactgctgggataccgcagggcaagagaagtttggtggcctcagggatggatactatatccatggccagtgtgcgatcatcatgtttgatgtaacctcaaggcttacttacaagaatgttcctacgtggcatagggacctgtgcagggtctgtgaaaacatccccattgtcctctgcggtaataaggttgatgtgaagaacaggcaggtcaaagccaagcaggttactttccacaggaagaagaatctgcagtactatgaaatttctgccaagagcaactacaactttgagaaacctttcctgtacctcgcaaggaagctggctgggtaattgactacccttcttctgtgcattgcatttagtagtcacaaccaattaccactctatgtttgttcttgacaatgtctttgtttttaacagtgatccgaaccttcactttgttgaagctgttgctcttaagcctccggaagttaccatcgacatggctatgcagcagcagtgagtgtcaccttttgtcttcatccaacttataatcattatggtcctactatccttttaatgtgtctcctcaatttgaaatattgcgggaactgattcacttttcatttgctcaggcatgaagctgagcttgctgcagcagctgcacaacctcttcctgatgacgatgatgatctgattgagtagaaaggatcatgagtcttgaacttgagcaggagttgtgccttgcgtgttttaagttgttctagggtgaactcttgagttctcattgtctggatcatctttttctccttggatgtgttgcatcttttgagtgtggaaatggatggtactcctcgccatgaatttgctggctactttatacattgctttgtaactctgtttgatgataaactttgttgtggcaatcctcttagtgctgatataatcttctatttctcagctgttcaatgtagaaatgcttctaccttttttaggca

SEQ ID NO: 139451 - DNA, 1120 bp, Zea Mays
gcagtcgcgagtaaagaacaacagcaggccaccgctgctataaaaccctccgcctccaccggcggctcgccaaactccgtttcgaattctagggttttgctgctctccgaccccgagctccgaaggccgcagcatcaggcgcggcccccctcgcgtgtgaccgagatggcgctgccgaatcaggggaccgttgattaccccagcttcaagctcgtcatcgtcggcgatggtggaactggtaaaactacatttgtgaagaggcatctcactggagagtttgagaagaaatatgaaccaaccattggtgtggaagttcatccgttggatttcaccactaactgtggtaagatcaggttctactgctgggataccgcagggcaagagaagtttggtggcctcagggatggatactatatccatggccagtgtgcgatcatcatgtttgatgtaacctcaaggcttacttacaagaatgttcctacgtggcatagggacctgtgcagggtctgtgaaaacatccccattgtcctctgcggtaataaggttgatgtgaagaacaggcaggtcaaagccaagcaggttactttccacaggaagaagaatctgcagtactatgaaatttctgccaagagcaactacaactttgagaaacctttcctgtacctcgcaaggaagctggctggtgatccgaaccttcactttgttgaagctgttgctcttaagcctccggaagttaccatcgacatggctatgcagcagcagcatgaagctgagcttgctgcagcagctgcacaacctcttcctgatgacgatgatgatctgattgagtagaaaggatcatgagtcttgaacttgagcaggagttgtgccttgcgtgttttaagttgttctagggtgaactcttgagttctcattgtctggatcatctttttctccttggatgtgttgcatcttttgagtgtggaaatggatggtactcctcgccatgaatttgctggctactttatacattgctttgtaactctgtttgatgataaactttgttgtggcaatcctcttagtgctgatataatcttctatttctcagctgttcaatgtagaaatgcttctacctttttta

SEQ ID NO: 139452 - DNA, 730 bp, Zea Mays
tatttttgttacattctctgatgctctttctgttttttgttcccattcagtatccatggccagtgtgcgatcatcatgtttgatgtaacctcaaggcttacttacaagaatgttcctacgtggcatagggacctgtgcagggtctgtgaaaacatccccattgtcctctgcggtaataaggttgatgtgaagaacaggcaggtcaaagccaagcaggttactttccacaggaagaagaatctgcagtactatgaaatttctgccaagagcaactacaactttgagaaacctttcctgtacctcgcaaggaagctggctggtgatccgaaccttcactttgttgaagctgttgctcttaagcctccggaagttaccatcgacatggctatgcagcagcagcatgaagctgagcttgctgcagcagctgcacaacctcttcctgatgacgatgatgatctgattgagtagaaaggatcatgagtcttgaacttgagcaggagttgtgccttgcgtgttttaagttgttctagggtgaactcttgagttctcattgtctggatcatctttttctccttggatgtgttgcatcttttgagtgtggaaatggatggtactcctcgccatgaatttgctggctactttatacattgctttgtaactctgtttgatgataaactttgttgtggcaatcctcttagtgctgatataatcttctatttctcagctgttc

SEQ ID NO: 139453 - DNA, 2373 bp, Zea Mays
gccggccgcgtgtctggctggaccggcgcccgcgcaggcgcacacggctctcccaaccgcctcgctcggccgcgcccgcgcgcgaactacaagatgccggaccgacacgtcgcgctccccccggggcccgctctcccgtcctcctcccaggcgcgaccgcgcgagacgcctgcccgagtgtaaccgtcgccgtcgagcccccatccgcattgcgtttttcgggcgcgttcaggcgggacgcatgatgcgctgctagcgtgttcaggccttcaaaacgcagcacacaccggtccgttgcttgccggcccaccgctggcggcgcgcggatcctctcccaccgcgtatctttccgtttggatccccgagtcggagctcgatcagatcggtgcctctgcctgcgtgcgtctgctctggtctactatatatgaccacgggcgcgggctgacgctccatcgcccacacgtcgaagcaggtgattggcgatccttgtccgtcctcgctcgctagctgatcgacatggccgacgacgacccaagaacgacggcggcggcgagcagcatgccggacttcaagcagtcggtaaagctcaagtacgtgaagctggggtaccaccacctgatcagccacggcgcgtacctgctgctggccccgctgccggggctcgtggcggcgcacctctccaccttcacggcgcgggacctggcggagctgtggcagagcctgcagtacaacctggcgtccgtgctcgtcgcgaccacggcgctggtggtcacggcaaccgcgtacgcgctgacgcggccgcggcccgtgtacctggtggacttcgcgtgctacaggccccgcgacgagcgcaggtgcagccgcgcgcggttcatgaactgcaccgagtcgctcggcaccttcacgccggagaacgtggagttccagcgccggatcatcgagcggtcggggctgggcgaggacacgtacctcccggaggcggtgctcaacatcccgcccaacccgtccatggccagcgcgcgggaggaggccgagatggtcatgttcggcgcgctggacgagctgttcgccaagaccggggtgcggcccaaggagatcggcgtgctggtggtgaactgcagcctcttcaacccgacgccgtcgctgtccgccatggtcgtcaaccactacaggctccggggcaacgtcgcgagctacaacctcggcggcatgggctgcagcgcggggatcatcgccgtggacctcgccagggacctgctgcagtgccaccggggcacctacgccgtggtggtcagcacggagaacatcaccctcaactggtacctgggcaacgaccgctccatgctggtgtccaactgcctgttccgcatgggcggcgcggcgctcctgctgtcgaaccgcggctcggcgcggcgccggtccaagtaccagctggtgcacacggtgcgcacgcacagggccgccgacgaccgctgcttcggctgcgtgaggcagcgggaggacggggagggtagggtgggcgtgtcgctgtccagggagctgatggccgtggccggggacgcgctcaagaccaacatcacgacgctgggcccgctggtgctgcccatgtcggagcagctgctcttcttcgccacgctggtggcgcgcacggtgctgaagcgcaaggtgaagccctacatcccggacttcaagctggcgttcgagcacttctgcatccacgcgggcgggcgggcggtgctggacgagctggagaagaacctcaggctcaccgactggcacatggagccgtccaggatgacgctgcaccgcttcggcaacacctccagcagctcgctctggtacgagctcgcctacgccgaggccaagggccggatcaagaagggcgaccgcacctggcagatcgccttcggctccggattcaagtgcaacagcgccgtgtggaaggcgctccggtcggtgaacccggccaaggagaagcggggcaacccctggatggacgacatcgataggtaccccgtcgccgtccccaaggtgtcagccatctgatcaaattcgtttgcagcctgcaggcatcgccatggccatgcctgcctgtacatgcatgcatgccttctgatccatcgggttgtagcaaaagccatagtaggatatgtatagttggagtggagtcgatcgttttctgtacacttgtgaatcggccgccggtacgtctgctagctgttcattcttcttcgtcgttgtcgtagtacacgtcatgtatgtatataagtgtattttatatagtgcgtgcgtgcttgacacgggccatagggaatactgtaatacatgagctgaaagcacgaggcctgcgaggcccgttcgctgtgcggccac

SEQ ID NO: 139454 - DNA, 1068 bp, Zea Mays
ggcccgcgtcatcagccccgtgcgccacgaacgccagcagcgcccccaccagcaaactcctcccccacccacccacacaccaccaaccgtgcctgcctgcataaatgaaggtccgcgcgctcccggctctggcagtcagtccatccaccaaaccagcactcgcttcgctccaccaccagctcgaaacccatggaagcggaggcgttcccgatacggttcacgcggggcgtgcgcgcctactggcggcgccacaagtaccaccgcctggcgggcggcgccgacggcaagcagccccgctcgcggcagctgggctccggcggcggcggcgcgcgcgtgcggcggcgggtgcgcgtgctcctggcgggcccgcggcgcgcgctggcgcgggcgcgggacgcgtacgtgggcggcatgctggcgctgggcaggcgcgcgtcggcgctcgcgctgccgggcgccgtcgaggcgctctgggccaagcgggtgccgcgccacaagcagcagcagcagcagctcccggcgcccggcaagcccacggagttcgagcagcgcctcatcttcgagatctacaagtccatcgtcgcgtccaaggagctcaccaccatgctccactcctccgccgcgcacctgccgcccgccgcctctgcggcgggcctcccgtccacgcacctcctcgacatgtgatgagccgcgccgctggatggagaaggagagagaacgcgcgcgccgccggttatcagttgtaacgtaacgtaacgagagaggtttggaggagaatcccaagctgtcaaatactagcgtcgtccaagttatcaattgtaattgtgattgtaatgacgcacgcatgcacacccacgtactgggcatccatgcaggcaagccaaagccaccacccctgccgcaaaaagatgcatgcagcagcctgtaaatttctaagaaaaatctagcgaccaaaatgaaacttgtcgaattcctcccgtgccgacgacggcagagatcgaaagcgacatgcatgcatgcagtgcaaggccagaatttttccaagaaacaccgccgcacgtacggccg

SEQ ID NO: 139455 - DNA, 3295 bp, Zea Mays
aggccactcgtacctgctgctctaactccgggtcaccattttttgatgagtagagggggctccccgtctcggccctcctgccggttgaggccagcagagtgatgagtgaacggagtcatgcttgtgagattaggctttgtcgttgtagcctccgtcgcagctttaactcttcagagagctaacagtggggccaggcacagcaaagactatgtccaagcaaggaaaaggaaggataaggctaacaattctgaacatggggagaaagaagaagagaaggaagaggttaaaacaatcagcggcataatcaactcagcccgctcgctaggcgatgacgacgatgatatgctttccgagatcgaaagcctcctatcaggagacattgacatccctataccaagcgatcgcttcgacgttaatggacggtcacggtacaacaacgcttacatggctaacgaggcctctgagatagagaagctgcgcagcctggtgagggaaatggaagagagagaggcgaagcttgagggcgagctgctagagtactatggaatgaaggaaatggagactgacatcgccgaactgcaaaagcagctcaagatcaagacagcggagatcaacatgctcaacgacaccataaactcactgcaggcggagcggaagaagctgcaagatgacgttgcatgtggagaggttgccaataaagagcttgaagcggctagaggcaagatcaaggagctgcagcggcagatacagctagaagcaggccagacaaagggtcagctgatgttgctgaaacaacaggtcatcggattgaaggccaaggaggaagaggcggggaaaaaggaagctgaggttcaacggaagctgaagaagctcagggagttggaagtggaggtacttgagctaaggaggaagaacaaggagttgttgtatgagaagagagatctcattgtgaagttggatgcagctgaagggaaaataactgagagtgatgtagttgccaatgcaagagaagagataaacaagctgaggcatacaaatgaggacctcacaaagcaagtggaaggcctacagatgaacaggttcagtgaagtagaggagttggtatacctgcgctgggtcaatgcctgtctgagattcgagctccgcaattatcagactccatcagggaaggtctctgcacgtgatcttaacaggacactgagccccaaatcacaggagagggccaaacaactgatgttggagtacgcaggatctgaacggggtcagggtgacacagaccttgagagtgttgtttcttcaatgccttcttcacctggaagcgaagactttgacaacatgtcaattgacagttcttccagcagatacagcttcctaagcaaaaggtctaatctgatgcaaaaattcaaaaggtggggaaggagcaaggatgacagcagtagtttagcctcctccatcagtggctctccaaggaggaaaccaaagggcccactggaagctctaatgctaaaaaacgctggagatggtacagccataacaacatacggaaagagggatcccaatgatgtcttggatgacgaaaatgtcgcgtcctcattccaattgatgtccaagacagttgaaggttttgctgatgagaagtatcctgcttacaaagataggcacaaacttgcaactgaacgggagaaggctataaaagagaaggctgggcaagcaagagcacaaaggtttggtggtggccacagttcagctctaatttcctctccaaaaggtgcactccctccaaaacttgctcaaattaaggagagatcccctgcagctaatgctgaatccagtgagcaatccagtgacaaccaaaacaacaccctggtggtgagccagatgaagcttgccaacgttgagaagagagcaacaagagttcccagaccacctccccctcgatcaaccgctgcttcaggggctaccagtattgcaagtggagtacaaacgccacgggcaccaggtgcaccacctcctccaccaccacctccagggaaagttggtggcccaccgccaccaccgccacctccaggtgctctaccaaggaaccttggcgggggtgacaaggtacaccgtgcgccggagattgtagagttctatcaaagtctcatgaagcgtgaagcaaaaagggagacatctttagggtcaatatcatccaatgtatctgatgccagaagtaatatgattggagagattgagaacagatcaacattcctcttagctgtaaaagctgatgtggagacacaaggagaatttgttgaatctctagcaaatgaggtccgagcagcaagcttcataaatattgatgacgttgttgcatttgtaaattggttggatgaggagttgtctttcttggttgatgagagagcagtgctaaaacattttgattggccagagagcaaaacagatgcaataagagaagcagcttttgagtaccaggatctgataaagctacagaacagggtttcaacctttaccgatgatccacaacttgcgtgtgaagaagctctcaagaagatgtattctttgcttgaaaaagtggagcagagtgtctatgcactactccgtacaagagacatgaccgtctcacgctacaaggagtacgggatcccatttgactggctgtcagattctggagtagttggcaagatcaaagtggcatctgtccagcttgcaaacaagtatatgaagagggttgcctcagaacttgatgcattagaaggcactgagaaagagcccaatagagagtttttgcttctccagggtgtgaggttcgctttccgggttcatcaggtaaaatcctcacatctatatattcaaaacccaggtactttacaggtaaattaaaggcttcgaatcagtaacttattcctctaccttctgcagtttgctgggggctttgatgcagaaagcatgaaagcttttgaagagctaagaagcaagatgaccacacaggcatctgctccaccaatatctcaaggctgaagcataaattgagcacaggattcagcacacatctggtcttacttgctggagagtgatttttagttgtgtatattaagtgtacagactacagaagagagattcaaattccggtgttgtgtcaagcaagttgtatatgccaagataatacaagtcaggtttgttcatttgtataacagttttagctcaagcataacacttttcattttgaatgttgtaactgtaaacaggcagttccagaatcacagtagagatcagatgcatagttttgcaactg

SEQ ID NO: 139456 - DNA, 827 bp, Zea Mays
acgcggaaaccctagcagctcaacaccctcgaggtacatccattcgcagtcggccgtgtcctcggagccgcgggagatggcggatcaggagaccgtagctgtggttgaggcacctaccccggttcttggggaaccgatggacctgatgactgccctgcagctcgtcatgaagaagtcaggtgctcatgatggccttgtgaagggtcttcgtgaggctgccaaagccatcgagaagcatgccgctcagctctgcgtgcttgccgaggactgcgaccagcctgattatgtcaagctggtgaaggctctctgcgctgagcacaatgtccacctggttactgtgcctagcgccaaaactcttggagagtgggctgggctttgcaagatcgactctgagggcaaggcgaggaaggttgtaggctgctcctgtgttgttgtcaaggactacggcgaagaatctgaaggccttaacatagtgcaggagtacgtcaaatcgcactagatacagtctgtcagtatctggaagttgtgttcaacactacattttgcacctgagtttaaatatgtgtttggttcttgggctttgctaggagattagaacagttttcaagtgagcctaggatccatgtgaacgatttgaatatctcgcctcttgtcttgcaagtgttctcatctgctgttaatacaaaatcagcaagagctagtattttgttcttccttgtccttgccatagcatgtggtttcgtgctgctgcccattcgttcgatggtggtttttatatgctggggttgtggaaagcgcttgcggatgtagcccttcatgtttgggaa

SEQ ID NO: 139457 - DNA, 919 bp, Zea Mays
acgcggaaaccctagcagctcaacaccctcgaggtggcggcgcgctcctccccttctccctgctactagtccccccccgtctcaattcgccactgacgtccattccgcttgcttgattgctccaggtacatccattcgcagtcggccgtgtcctcggagccgcgggagatggcggatcaggagaccgtagctgtggttgaggcacctaccccggttcttggggaaccgatggacctgatgactgccctgcagctcgtcatgaagaagtcaggtgctcatgatggccttgtgaagggtcttcgtgaggctgccaaagccatcgagaagcatgccgctcagctctgcgtgcttgccgaggactgcgaccagcctgattatgtcaagctggtgaaggctctctgcgctgagcacaatgtccacctggttactgtgcctagcgccaaaactcttggagagtgggctgggctttgcaagatcgactctgagggcaaggcgaggaaggttgtaggctgctcctgtgttgttgtcaaggactacggcgaagaatctgaaggccttaacatagtgcaggagtacgtcaaatcgcactagatacagtctgtcagtatctggaagttgtgttcaacactacattttgcacctgagtttaaatatgtgtttggttcttgggctttgctaggagattagaacagttttcaagtgagcctaggatccatgtgaacgatttgaatatctcgcctcttgtcttgcaagtgttctcatctgctgttaatacaaaatcagcaagagctagtattttgttcttccttgtccttgccatagcatgtggtttcgtgctgctgcccattcgttcgatggtggtttttatatgctggggttgtggaaagcgcttgcggatgtagcccttcatgtttgggaa

SEQ ID NO: 139458 - DNA, 1369 bp, Zea Mays
acgcggaaaccctagcagctcaacaccctcgaggtggcggcgcgctcctccccttctccctgctactagtccccccccgtctcaattcgccactgacgtccattccgcttgcttgattgctccaggtacatccattcgcagtcggccgtgtcctcggagccgcgggagatggcgtaagttctcccaccgaaaccatttgctccttgtgctgtttttttttcagaggaggtaccgctggctgctgtgtgggggcggttggtgtcggctgctagccgatggtgatttaccgggatgtttggggttcaggtggatagtaggccggctgacagagctgcaaggtttggctgatctgagggttgcaggggcctagcccgtcttatcatcttccgcaatttttgcgctttattgtagataattattcatatagatgggcattgttgcacaacactggaaagcgatccaacatgatttgctgctaaaacacaggaaggctacctagacgagtttctttattatatattttataattataatcatggtctattagcgattcactgtattatgaattcgatcgtttgttgaccgctacatgcctacaacacaggaagctcatcagttcacgatgattttgtgctttggcagggatcaggagaccgtagctgtggttgaggcacctaccccggttcttggggaaccgatggacctgatgactgccctgcagctcgtcatgaagaagtcaggtgctcatgatggccttgtgaagggtcttcgtgaggctgccaaagccatcgagaagcatgccgctcagctctgcgtgcttgccgaggactgcgaccagcctgattatgtcaagctggtgaaggctctctgcgctgagcacaatgtccacctggttactgtgcctagcgccaaaactcttggagagtgggctgggctttgcaagatcgactctgagggcaaggcgaggaaggttgtaggctgctcctgtgttgttgtcaaggtgagtatatcatttcctacggtactactacaagcgaccactttcaattatatttgcgtaagctgttttttgtctgctacatttggatcaccaggactacggcgaagaatctgaaggccttaacatagtgcaggagtacgtcaaatcgcactagatacagtctgtcagtatctggaagttgtgttcaacactacattttgcacctgagtttaaatatgtgtttggttcttgggctttgctaggagattagaacagttttcaagtgagcctaggatccatgtgaacgatttgaatatctcgcctcttgtcttgcaagtgttctcatctgctgttaatacaaaatcagcaagagctagtattttgttcttc

SEQ ID NO: 139459 - DNA, 1261 bp, Zea Mays
aagcacgctacgcagcagccttccagctccagccaagcaaagcacagggtccattgcactgcattgtatcgcagcatttctctgcttcgcttcgcttgcttcaggaaagcttgagctagctcgaagtagaaggacaaggcagcaaagtcacgcaccatgagaaccatcgcggcgaggaacacgcacgactcgctctccttctccaggcgccacttcaagtggcccgtcctcggcaagagcaagagccacggcgccgcgacgttcggggacgaggagtacatgaagagctcggaggcggaggacgacgacgagacgaccatggccttctcctccgcctgcccgtccttccactccgatggcttcgtgtcccctccgctgaagccggcgccgtcggcccagcagcagcaagcggcggcggcggtggcggcggggcagaggaggaggatgaaggtccggactgccgtgtcgcgcctgcggtccgcgctggccaacgccgtggccgggcggcaccgacaggtgggcatgggcgcgcggctcaccggcacgctctacggccaccggcgcggccacgtgcacctggcgttccaggtggacccgcgcgcgtgcccggcgctgctgctggagctggcggcgcccacggcggcgctggtgcgggagatggcctcgggcctggtgcgcatcgcgctggagtgcgaccgcgccagggccagggggtcgcccgccgccgcgctgccgtccccgtccccgggcgccggcaagaggctggtggaggagacggtgtggcgcgcctactgcaacggcaagagctgcgggtacgcggtgcggcgcgagtgcggcgccgcggactggcgcgtgctccgcgcgctcgagcccgtgtccatgggcgccggagtcatccccgccgccagctgcggcggcggcgagggcgacgtcatgtacatgcgcgcgcggttcgagcgcgtcgtggggtctcgcgactcggaggccttctacatgatgaatccggacggtagcggcggcggcgctcatggtcatggcgggcccgagctcagcgtctacctcctcagagtctgatcggccgccatggcagtggcagtgacatctgcacctcggccctgatcgtttttttctgtgcatgccaagctgtgaaaatggattagtaggcacctaggtgtagctgttagcacttctagggggtgtttgataaagtggctaagtcccttcctttcacatccaatgtttgatgctagattaaagtatt

SEQ ID NO: 139460 - DNA, 453 bp, Zea Mays
atggctcgccccgcgccccggcatgcggcatccccctccatccaggctccacccaacgctgccgcctgccgcctgccgcctgccgccgagaccctcgcgctcgtcgatcgccgtggaaatgcatctcgacagcgaccaccccgccggcgttcgtcccacgatacgggccccagggcctgcgccgccgcaccggcccggtcacgctcaacttctcgagcccccgcagcggccacgcggggaccggaggcgatcttccgggaggacgtcggtcacgccgccgccgagacgtacctcggctggttatcggtggatatgaggatatcacatcttattgcactccgtgtatatgctgttttactcatgcccggtttcatagaaggtcagaatttacttgatgggtcaatcagcaggagcacatattgtggcctgcgtgctcttagagcaagcacttaa

SEQ ID NO: 139461 - DNA, 587 bp, Zea Mays
atggctcgccccgcgccccggcatgcggcatccccctccatccaggctccacccaacgctgccgcctgccgcctgccgcctgccgccgagaccctcgcgctcgtcgatcgccgtggaaatgcatctcgacagcgaccaccccgccggcgttcgtcccacgatacgggccccagggcctgcgccgccgcaccggcccggtcacgctcaacttctcgagcccccgcagcggccacgcggggaccggaggcgatcttccgggaggacgtcggtcacgccgccgccgagacgtacctcgtaacgggactcgccttcacccggctcggatacctcgggtcaggttattagaagtgtagtactgtagtctatggagaacaaccaagaaatgggtcagctaagtttaaagaaagtcacgtgctatatagcgtcctcgagcacttataacagtagatccagagaaattatgtgtgttggaattgtacatgcccagagataacagcaaatcaagtccgttgtggcatttgtaactggaggagcttggatcatcgggtaagtgacagtttcctcataaatcacactacattacaggg

SEQ ID NO: 139462 - DNA, 926 bp, Zea Mays
ctgtctgtctccagccaaagccaaaccaaccaaaagccctcgcgacgcgtcttcccggtagatccaccccctccgtaaataacccggtcgccgtctccacctcatcatccctgcagttgtggatcagttcgtcctccgtctctctccacaagtctcctctaggcgccaagcaatgacaaggtcagcaccgccggcctctcctccggcgccgaagcccgtgctgcgcgggagccagctggagcagctccgcgagatcttccggcgcttcgacatggacggcgacggcagcctgacgcagctggagctgggggcgctgctgcggtcgctgggcctgcgccccacgggggaggaggcccgcgcgctgctggcggccatggactccaacggcaacggcgcggtggagttcggcgagctggcggccgccatcgcgccgctgctcaccacgcagacgcacctcgtcgaccaggcccagctcctggaggtgttccgcgccttcgaccgcgacggcaacggctacatctccgccgccgagctggcgcgctccatggcgcgcatcggccagccgctcaccttcgaggagctcacgcgcatgatgcgcgacgccgacgccgacggtgacggcgtcatcagcttcaacgagttcgccgccgtcatggccaagtccgcgctcgacttcctcggcgtcgcctgatgccctctgatggaccgatcgatcgatcggtctcgctcaccgcccgccgccgtaaccccgtggccctgtccctcgcccgccgttgattacctgttctctctctctctcttttttttgttaggaagatgctcatccggttaatgtaggataactgacacaagataatgtaactcaaaaactcatcgctggtttgtaacatggatgaactcggaaaatgtgtacatattttggatgg

SEQ ID NO: 139463 - DNA, 868 bp, Zea Mays
aaaaaaggaggccatggaggagaacattcctcacccgagggaggcacaagggcccaccgtcgcccaaccggccccggcggtcgtcacgccccgcgacgacgctctagctcccgtagcccagctgctgtcgtcctcgggcgatgatgagtcgtccgacgacgagctggaggtcgacttcgagttcccgttcgtctgcagggactcccccgcgggcacggccgccccggccgacgagctcttcgcggacggccggatcagggccttctacccggtgttcggccgcggcacggccgggtgcgtcccccgtggcggcggcggcggcggcagcggcagctgctgcacggcgctgccggccgctccgccgcgggtgaggggccagctgggtcgcctgttccaggaggagacacgggagcgcagcacctccgccagctttacggcgtcgtccgggcccgccacggacgaggacggcggcctggatggcgcggcgccggggagctactgcgtgtggcgcccgggtccgtccgcgtccgcgtcgccctccccgccgccgccgccgccgcccaggaagagcgggtccacggggtccatggcgcggtggcgccgcatcagcgacctcgtcgtgggccgcagccacagcgacggcagggacaagttcgtcttcctcgccgccgcgcccaggagggggcccaaggacaaggagcctgccgccactgccccgcccgcggtcgccgcccaccagatggcggcggcgtacctcgccaggggcgtcccaccgcggcgcacgttcctgccgtaccgcgaggagctcgtgggcttcttcgccaacgtgaacggcatcagtcggagccaccaccgtccgccgttctga

SEQ ID NO: 139464 - DNA, 1004 bp, Zea Mays
atgctccgccactgcaacaccaccacccagcagcagcaccagcgccatcgccatcgccagagcatcccggccactgccctcgcccccgccaccatgccgtccaccaccttctcgctcttctccccgctgccctgcagcaccaaggctcatcaatacgcgccggcggactggttcgacgacgacgacagcaacagcgccgtcatcgccacccctccatccccgtcctcctcctccacgggctccgtcgactgcacgctctcgctcggcacgccctcgtcgcgcctcgccgcgcccaagcagcgcccgttgccggcgtcgtcttgcggaaccatgccgtgggacgtcgccgccgccgctgaccagtcctgctgctgctgccgccgccgccagggcagcagcagcagcagcaggccctctgtcgttgtgaacaagagcgccgtcatgccgtgcgccgggcaggaccccttgctcgtggaccgccgctgcgcgaactgcggcacctcgtccacgccgctgtggaggaacggaccttgcgggcccaagtccctgtgcaacgcctgcggcatcaggttcaagaagaaggaacggcgcgcggcggcgacggcagccatggaccagggcggttgcgcctacgtcgcggagcgggcgcagtacggggcggcggccgggagggcgtactacggcagctgcgaggggccggcgttcccgtgcgacggtggtgacgtcgcggacgccgaggcagcgccgcagaatttcctcgcgtggcggctcgacgtcgtcgctccggcgcaggcgcaggcggccgcgttcgctgcggtctggccggagcagacgaccttgttccagtacaactaatcctctgtgttgggtgggcggctgggggtgcaactgcaacctttttggggctggatctggatggggcggttgtctggtgtctgcacgcatgcattctgtctatctccaaatttaacctatccaattaaccattagttattccgtagtac

SEQ ID NO: 139465 - DNA, 754 bp, Zea Mays
atcagctcagcatacacaacatcatcatcatcatcttctcgctagtcgagcgagcccttgtagttaattaagctagtcgatcgatccaagagaagaagaagcagcagacaggaatggcgtcgctctcgatgacgacgagcgcagcggcccgcgcgcagtggacgcctaggcagaacaagctgttcgagcaggcgctggcggtgtacgacaaggacacgcccgaccgctggcacaacatcgcctgcgccgtcggcggcgggaagtccgcggacgacgtcaggcgctactacgagctgctggaggaggacgtcggccacatcgagtccggcaaggtgcccttccccgcctaccgctaccccgccggctacggggccgccgacaggctgaaacagctgaagatctaggaggtcaattgaacatataggacgaacgatcgatgatccagaagatgcaaacatgtgtgtatataggattaatgggacagtatcagtatgcatgcaatggtccatgctgcaagtgcatgcaagtggtgtgtgaaagcaagaatcagattagatgcatgcatatgcatgtgttaatttagtagtaataattgtagtatgggatgagtcctatgctagccagtcacgcgcgatcgaccgaccgacccatcgatctccaatgcttctgttccctctccctcctacttgtccacttgtgtgtatatataaatattatgtatttttattattatatatactctgcctgttctaaa

SEQ ID NO: 139466 - DNA, 339 bp, Zea Mays
acaatggcttccggcggcgggtcgtcgtcgtcccgcgcgtggacgcagcggcagaacaagcagttcgagtgcgcgctggcggtgtacgacagggaggccccggaccggtggcacaacatcgcccgctacatgggcggcaccaagtccgccgacgaggtgcgccgccacttcgagcagctcgtccacgacgtcacccagatcgaggccggccgcgtccccttcccccgctacatgggcagctactacggcagcgcgccggcgcccgtcgccggcgccggcctcgacgacgacatggccgccgccacgagaaccaagcagtacccgaagttccagcgatga

SEQ ID NO: 139467 - DNA, 209 bp, Zea Mays
tatttttattttttttctttttcccaccaaactttttgtggtgtgttcctacagtatgtagacctacatattcaattttggcacaattatcaaaatgtttgctatacctgttagatttagttcgtttaattgaatttcttcggataattcagatttgaactgcaagtcactcgaaaaatggaaaacggtgaatgcaaaaattatattca

SEQ ID NO: 139468 - DNA, 617 bp, Zea Mays
ttttttatttttgtttgcttctcttcaggttggatctttgcctagtacttcggtcactgtattgacttaaacctcttgttattcttcttatcaatatatcttggcagacctcctgccttttcaaaaaaaaaaaaagaagaggtacctgcacacttctgtccatttcaattatttttagatgaatacttttaaactcaatttattgtatcatctgcacttttaggagttgaaaatgacattgcaactcctggtcggttgattgatatgctggaagccagtcacacaaacctacatatggcataccctgttctagatgaggcagaccggatgctagatatgggttttgagccacaaatttgaaaaatagttgcatagatctacccagacagacaaaccttgtattggagtgccaaatgacctagagaagttgaagccttggcaagacagtttctgcaaaatccttacaaggtaatcataggatcgcctgaacccaaagctaatcattccatacaacaaattgcggaaggtatttcagatcatgagaaaagtatccaagactcagtaagctattgtctgatctaattgatgggaatcgtatcttgatatttctccaaaca

SEQ ID NO: 139469 - DNA, 288 bp, Zea Mays
agggatgttgtgctctggagtttggatagctctaagaactttactgttaattcattatataagtttagaactgacggaggtgtaaggaataatgtgcttaaaaccatctggaagtgcgggttgcctttgaaaattaagattttcctttggcaattatacaataggaaagtacaggctgctactgtgttaaaagagaggggttggaaggggagtagccgatgtgttctctgtcaggataaggagtctattgatcacattttctttagatgtgttctgtcaaagtttctt

SEQ ID NO: 139470 - DNA, 92 bp, Zea Mays
atggtgacgatatataagaggaacctggatagtatggctcttgagggaaggatcatcgaatgcaggttgcttggagatgtgaacatagtcga

SEQ ID NO: 139471 - DNA, 530 bp, Zea Mays
tagaccacttgctagaagatttatttagggggtgtttagtttctagggactaatgtttagtccctttattttattccttttttgtatatggaagaagatgaggggcatgtttcatttgctgcgtccgagtttattatttacaagatgcaccaacaatccccaagccaagagttgccgcggctttgctcgcccagcttattgcactgttcgcactactccactagatacatatattaataacatcggaagagctagctactggaaccgatgcgaccgcaccaaaccatttctcgtcgtccatggcaacatccggcaccaccagcccttcttcctcatgttcttgtccctccgacggctcaagtcaaggtcgggcgcgcgcctcaaactaagtctcaactctcaagacgatgactaacctgtaaccttgcacgccatgcgtaaggccaaagttagtctctatatgacggtgccgtccttgatggttgcgttcttcaggactaccacgatcccagaccggatgtagtatcctt

SEQ ID NO: 139472 - DNA, 739 bp, Zea Mays
atgtcaggtcacgatgaggaagatagcacgacagccactgccctccagccgtccctggcgtccatcgccgcgacactaggtgaagtccaacgccagctctgcgactttgcccagcagatgtcttccatctcctcccgtgttgcggccgtcgaggcatgtccatctgcatccacgccagccaccccgcagcaggacattccctatggcctgccgggatacggcggcatccccaaggctgctgcttacccttccagtctgaaggatagcagtaccccaataaggcaaaaagggtgtcaggccaacgacggctacaacaacatcaacctcgccacgacaaaaggcagcctgtcggcagtgggagacccttacagggacattcacgcgctccgaaggggttcaataccggcgccaagacccaactcgcctgccacaagctccatggcgttcatggtagcagaagggacgttgctcacccttcgagtcagatgcacaacggagctcaggcggtcttggtcagcctcgcaccttccatctgtaaggtagcatgagaacaaactattcctttataataggttaccatctgtctgtgatccggaccagtaaagatccgctcaagtaaacccggcctctagcgccatccgtgatcaagaccggtaagagtttccccctttgtaaacctggcctctggtatgcagatttttggtgaccagctatgaaagaagaaagtgttctcatacat

SEQ ID NO: 139473 - DNA, 347 bp, Zea Mays
ttctccctgccaccaccgcccctgcgccaccggcgaggacgacgcggcgtgggagcgcgccatctccgccgccatcaagtccacctcggcgcccaagaccctcaccctcgatggcgtcgtcaagtcctccacgggcggcctcccctccgccgcgctcctcgagcgcttcgctgcctccctcgaggagctctccgtcgcggggcgcgcctcttctcgctcgcgggccttccccgcctcccggcgctccggcgcctctccctcgagctctccgtcgcggggcgcgcctcttctcgctcgcgggccttccccgcctcccggcgctccggcgcctctccctctccaccgtc

SEQ ID NO: 139474 - DNA, 819 bp, Zea Mays
ctactccacgacggccagggcgccagtgaaggccggggcggcctcgcagtgcccgccggacccggacccggacccggtccccgcgacgacggccagcgtcatcgactcctggcggtggaaccgcttgtgcttgtcgatgaacgcctccaccgtgcgccggaactcgtcggcgtcgtccgcgccccagcggcacgcgcgcgccgacacggacgaccgccgccgccgcccgttctccgactccgtccgccgcagctcgggggccgccggcggggacgccgcgcgccgaacctgcagcagccgcgggcccgccgccatcttctccgacctgctccgccgcggcgcggcgcgcgccagcttgctcgcccgcgccgccgcggggctcccgggcctgtcgtcggacgccggggccggtgggggcgcgctgaaggcttccagcgatgtggagggagccggtggagctgtaggagcatcggaaaacgaggaagggaatacggcgctggcggcgtcctgcggtggcggtgtgccggcggtcgtgctcgtctgctgcccgccggaggcggaggagaacgacgacgacgacgaggagaggtcgcgctcgcgccgcgacagcgcgaggaggaggagcacgatggcgttcccgaggacgaagacgaagcgggcgttgaggaggagcgaccccgcgagacgcagcgcggcggcggcggcggaaggcacgcgggacgacgaccaggacaggaacgccaccagcgcgaggagctcccccacgcgcagcatccggtacaggagccgcagacgcatcgctgctccggcggccgccat

SEQ ID NO: 139475 - DNA, 366 bp, Zea Mays
attgattcggcacgactggaagtggaagaagtcctcctgtgccctgcacagcacagtgtgagacatcgaaaaaggcgatgccctctgcatttgtctactcgcatctgattctggatttgtctgacgcgtcgcgtcatctgccactgccagtcacacggacggaccggccggacgcctcgccattcgattcgaccagccagcgagcatcatccagcatgcatgcaatttccgtccatttccatggctgccaaacggacgagagtaaagttcatcggccgctccgttggatccggatccacgccgcgcatccaacgctaaacccccgtttcgtagtcacagggttctctctctctctctctcctatgg

SEQ ID NO: 139476 - DNA, 612 bp, Zea Mays
tgacaactgacaaggcgacagcagttgcacctagagacgcgccgtcaggccagggtatcgcactgaggctgctagggccggacgcctacgagccgccggggctgctggtgccggacgccaggccgcgcgcccacggggctgctggggccggacgcgccgtgccgaggccgccccatggccggatcctgcgacggtgtggcgcgcgctcaccggggcctggccagagcgcccgccccgccggggggccagcctactcgccgcctgggggccacgcgccgagtccgtgcccgcctgccgccgcgaggctgcgttcctggcaccgccgcggaaccgcgcaggccggatccacgcgccgccgcgaaaaatgccgccagggctgccggcggctctgggaaaggaggagcggttagggttttaccctaactgccactcttgtatggccggttgggccgctgcctgaccgcctgggccgcgctggccggctaggccgcatgggctgttcgcccacatgtttgaatgggctaaatttactcatttttattttctgtatttttaaatacatgactatgattatttgtatcacagttttaatcagtatttattatctaaatt

SEQ ID NO: 139477 - DNA, 1103 bp, Zea Mays
cgctttacacgcactcgttcctgaatcagcacagccccagcctaccggtgccggctgctgcttcgctgggagccagaggcccacccagagctcgcaagcttgtcatggctctgcctctgcggccagtccatggcttggcgtcccttcttcttctgctcctcgtcctcctgtcctgcaactgccactgccacgggggaggaagcgagcggggagcaggcgcgacaaagaggctggagcgcgacgtcacgtcgcccctggccacggtcccggtggtgaacccgacggcgacgatgccgttgcccaccgcgacgccggcggcgccttcgctgccgctggccaccggcgccggcggcgggagctggtgcgtggcgagccccagcgcgggcgcggcggtgctgcaggtggcgctgaactacgcgtgcggccagggcggcgcggactgctccgccgtccagcggggcgggagctgcttcagcccggacaccgtccccgaccacgcgtcctacgccttcaacacctactaccagaagaaccccgtgcagaccagctgcgacttcggcggcgccgcagtcctcaccaccaccaacccgagtacttcgacgtgccagtatccagcaacgagcaccggagcttcggtcctgaacacgtcgactccgctgacgccaggatacggatctgcccccggcgggtacgggagctctccaccggctggagacggcaggtcccctccgctgtacgggaacatgtcgccgccggactacggcgacaacaccagcgccgccgtgaccgtgagggcactgcccggccgcaagacggcggcggccgtcgtggcgctggccacgacgtcgacgtggctcctcatcgcactgacggtgagcggctgaacctgcacgccaggcccgcgcgccgcgttgcctccgcgcacgtgcagttcgttcagttgcagactcgcagctcaggtggcgcccgaaggtgatgtctctgttagaaaatattttatgtgatctaattccaaggggtgcgacccgttgtggtgtcccttcactatgtatatatatgtacacttcatgagatgaatacaacagtcctgtcattttgtcgtt

SEQ ID NO: 139478 - DNA, 1068 bp, Zea Mays
ctcgcatattgtggcagccaccaccactacccagttccaagctcgctgaaaaaagcttcgtccattgcatcccgtccggcaggccaaagcctcgctcggacagtcggaccggtccactacaccaccaatggacatggacgccgaggctccgctcctcctccccatcgacatcaccatcgtgccgtcggcgccctcctcctccccttcgacccggagcatcgtcctccgcatagcggccgtgctcgccgtggcgtgcgcgtccctgctagcgcagcacgaggccagcaagggcttcgcagtcgccgtcgcgaacgacgcggcgcggggcagcgcggcggcgcggcgcttcgacctgcacttggcgtccaacggccgcgccgagcgcgccctcctgcgcgccagccgcgccgtggagcgcgcgctgttcccggacgcgtcgttcccgcgcaggcaggtgcggcgcgtgaccgtccggatggccgcgcgcaacctcaccgcgggcgccggcgccacggtgcgcgccgcggccccgggggagtacgtcgtgtccctgagccccggcctcgtcgcgtcgtcgtcggcgtcggcgaacgacgccgccgtggccgccgcgctgcgccgcgcggtcgcgcgcatgtggctctgggacggccgcggcgccgcccccgcgcgcgtcacggaggctatggtcgactacctcgcgggcgcggccggtgacgacgaggcggcggcggcggccgaggacgcgcacgggtgcggcacgttctcggcgcggcttctgaggcgcttagaggcgcggcgcgagggcttcgtggcgcggctgaaccgggcgatgaaggaccggtggagcgacgccgccgtggacgcggcgctcggcgcgccagcccggctcgcctgccgccaccacgcggaggaaacgacggcggcgctgacccgccgcgggcagctggaaaatggtggctggaggtgagtgggtggtcgctgtcagtgcatgcgattgcaacctcgatcggtcgtttcatttcatatcaacaacaattgctttgcttgtaaatggtggtggtggtg

SEQ ID NO: 139479 - DNA, 1379 bp, Zea Mays
gtgtttgcacatgtatgttgctttgcacatgcatgtaattgctcatgtatccattcgtttgaacacttgacggaacagttgctggctatttttatgcagtgctgttgatcaatttaagaagcaattttctcatcttgaagagagtggtggtaacggtccatcagttccaacggacaggaaacatgcatcccttcccaggaccactgtggttcactcgaatccaattcctgccaaagaacaacctcttggtgcctcatcaagggttagaccagtctctgatgattcatgtaagaacccttgggagaaaggaagtggtcctggaaatgttcccaggacatctctgactccacaagggctgcaagcacaagcaggatcagtaagagttaatggcccagtgacggattcaaggtatcctcctcaccaacagatcccacaagcatacggttaccgccaaatgcctgcaaggttggacagtaccaacccatcgcaggccatgggaggttacacgctgcagtcgcagaaggcctatgcttgtgcaaacggcaaaggctcgcctgatgtggccgtgaacatgagagctccccccttccatctcccagctggaccaaagaagaacccattagataggatagcacctgacaccaccgacatatacacaagatccctgaacggcatcgtcgccgccgccgctgcatcagtgggcgctggcgctggtactcaccgaaacatcggcgttgtgccatctggcatgtcaaggatgtattagctgctgctgaaatgctggcaaatcctacctagccttgtggccacagcttctccgggactagccggcaaggctacaaggagtgggcatgtggtgcaaggagtgattcataagaggtggtcccgtggtcttggactcctggacatgttcttaggtcacgtgttgaggcggaaaaatggcgccattttgcgcacaactgaaggtttgatcgattcatttgattcaattgaagctaatgtatttgctaatagtaaaaggacgctgatccaagggaaaggctggagaaattctgacataaatgcaacataggccgttggccgttgcagtgggacctgagggcgtgtgtatacaatgtattattctcgttttatcgaccgtcacatctggtattatcatgctatcagccacctttaatctttatctaccacaacagttcaatacattgtctttactgttaacctacattcgccttagcgccttaaccacctttactttatactaactccatttgtttttatttaacgctggctaatataactttacactaaaacaagtcaaatattaaaaaccggaggcagtatattttttagttagaacaaaacacgaaataaaaata

SEQ ID NO: 139480 - DNA, 2851 bp, Zea Mays
tgtacatgaatatccttttctgtaaatccaccaaaagaaaagattgacttgggcgccgtgttttcaaaagccactagtagtgttggatgtggaccacacaggagatgcagatcggacggtgggcaagcgcccagcaccacaccaccccaccccgcaccaggcccgggcccccatcatataacggccaacaagccacgagcgacacgaaagaaatctccctcccgttccctttcctcccccgctccgcctttccctttcctcccccttctcttcctctctcctctccttgggggcgcggcgagatcgggcggaggagccctaccgccccccctcgccgcagcggaggcgggtgctcagctccgcggaaggttagaggtgcggggctgcgtttggaaccggcggtgggcgcgggagatccggccagcggggatgcagcaggaccagcggaacaagacttctgcagaggtcgacttcttcacagagtacggggatgcgaaccggtacaagatccaagaggtcatcggcaagggaagctacggggtcgtctgctctgccatcgatctccacactcggcagagggtggcgatcaagaagatacatggcatcttcgagcacgtctccgatgccgcgaggatcctccgcgagatcaagcttctgaggctcctgaggcaccctgacattgtcgagatcaagcacattatgctgcctccctcgagaaaggacttcaaggacattttcgttgtttttgagctcatggagtccgacctccaccaagttataaaggccaacgatgacttgaccaaggagcattaccagttctttctctatcagttacttcgggccctcaaatacattcatactgctaatgtttaccaccgtgacctcaagcccaagaatattttagcaaactctaactgcaaattgaaaatatgtgactttggactagcccgagtcgcattcaatgataccccaacaacagtcttctggacggattatgttgcaacaaggtggtacagagctccggagctctgtggatccttcttcaccaagtatacaccagctattgacatttggagcattggatgcatatttgctgaggtgttgacagggaagcctttatttcctggtaaaaatgttgttcaccagctagatttgatgactgatcttctaggtacaccatcaacggacacaatttctcgggttcggaatgagaaagcaagaaggtacttgagcagcatgagaaagaaggaccctgttccattttcccagaagtttcccagtgcagatcctttggcacttaaactgttagaaaaactattagcgtttgatccaaaggaccgtctgacagcagaagaggcattgcgtgatccatacttcaaaggtcttgccagggctgaaagagaaccatcctgtcagccaatcagaaaagtggaatttgactttgagcacaaaagaatgtcaaaggaagagataagagagttgatattccgcgagatactggaatatcacccacaactgctgagtagctacattaatggcacagagaggacaacctttctctacccaagtgctgttgatcaatttaagaagcaattttctcatcttgaagagagtggtggtaacggtccatcagttccaacggacaggaaacatgcatcccttcccaggaccactgtggttcactcgaatccaattcctgccaaagaacaacctcttggtgcctcatcaagggttagaccagtctctgatgattcatgtaagaacccttgggagaaaggaagtggtcctggaaatgttcccaggacatctctgactccacaagggctgcaagcacaagcagcaggatcagtaagagttaatggcccagtgacggattcaaggtatcctcctcaccaacagatcccacaagcatacggttaccgccaaatgcctgcaaggttggacagtaccaacccatcgcaggccatgggaggttacacgctgcagtcgcagaaggcctatgcttgtgcaaacggcaaaggctcgcctgatgtggccgtgaacatgagagctccccccttccatctcccagctggaccaaagaagaacccattagataggatagcacctgacaccaccgacatatacacaagatccctgaacggcatcgtcgccgccgccgctgcatcagtgggcgctggcgctggtactcaccgaaacatcggcgttgtgccatctggcatgtcaaggatgtattagctgctgctgaaatgctggcaaatcctacctagccttgtggccacagcttctccgggactagccggcaaggctacaaggagtgggcatgtggtgcaaggagtgattcataagaggtggtcccgtggtcttggactcctggacatgttcttaggtcacgtgttgaggcggaaaaatggcgccattttgcgcacaactgaaggtttgatcgattcatttgattcaattgaagctaatgtatttgctaatagtaaaaggacgctgatccaagggaaaggctggagaaattctgacataaatgcaacataggccgttggccgttgcagtgggacctgagggcgtgtgtatacaatgtattattctcgttttatcgaccgtcacatctggtattatcatgctatcagccacctttaatctttatctaccacaacagttcaatacattgtctttactgttaacctacattcgccttagcgccttaaccacctttactttatactaactccatttgtttttatttaacgctggctaatataactttacactaaaacaagtcaaatattaaaaaccggaggcagtatattttttagttagaacaaaacacgaaataaaaata

SEQ ID NO: 139481 - DNA, 2703 bp, Zea Mays
accccaccccgcaccaggcccgggcccccatcatataacggccaacaagccacgagcgacacgaaagaaatctccctcccgttccctttcctcccccgctccgcctttccctttcctcccccttctcttcctctctcctctccttgggggcgcggcgagatcgggcggaggagccctaccgccccccctcgccgcagcggaggcgggtgctcagctccgcggaaggttagaggtgcggggctgcgtttggaaccggcggtgggcgcgggagatccggccagcggggatgcagcaggaccagcggaacaagacttctgcagaggtcgacttcttcacagagtacggggatgcgaaccggtacaagatccaagaggtcatcggcaagggaagctacggggtcgtctgctctgccatcgatctccacactcggcagagggtggcgatcaagaagatacatggcatcttcgagcacgtctccgatgccgcgaggatcctccgcgagatcaagcttctgaggctcctgaggcaccctgacattgtcgagatcaagcacattatgctgcctccctcgagaaaggacttcaaggacattttcgttgtttttgagctcatggagtccgacctccaccaagttataaaggccaacgatgacttgaccaaggagcattaccagttctttctctatcagttacttcgggccctcaaatacattcatactgctaatgtttaccaccgtgacctcaagcccaagaatattttagcaaactctaactgcaaattgaaaatatgtgactttggactagcccgagtcgcattcaatgataccccaacaacagtcttctggacggattatgttgcaacaaggtggtacagagctccggagctctgtggatccttcttcaccaagtatacaccagctattgacatttggagcattggatgcatatttgctgaggtgttgacagggaagcctttatttcctggtaaaaatgttgttcaccagctagatttgatgactgatcttctaggtacaccatcaacggacacaatttctcgggttcggaatgagaaagcaagaaggtacttgagcagcatgagaaagaaggaccctgttccattttcccagaagtttcccagtgcagatcctttggcacttaaactgttagaaaaactattagcgtttgatccaaaggaccgtctgacagcagaagaggcattgcgtgatccatacttcaaaggtcttgccagggctgaaagagaaccatcctgtcagccaatcagaaaagtggaatttgactttgagcacaaaagaatgtcaaaggaagagataagagagttgatattccgcgagatactggaatatcacccacaactgctgagtagctacattaatggcacagagaggacaacctttctctacccaagtgctgttgatcaatttaagaagcaattttctcatcttgaagagagtggtggtaacggtccatcagttccaacggacaggaaacatgcatcccttcccaggaccactgtggttcactcgaatccaattcctgccaaagaacaacctcttggtgcctcatcaagggttagaccagtctctgatgattcatgtaagaacccttgggagaaaggaagtggtcctggaaatgttcccaggacatctctgactccacaagggctgcaagcacaagcaggatcagtaagagttaatggcccagtgacggattcaaggtatcctcctcaccaacagatcccacaagcatacggttaccgccaaatgcctgcaaggttggacagtaccaacccatcgcaggccatgggaggttacacgctgcagtcgcagaaggcctatgcttgtgcaaacggcaaaggctcgcctgatgtggccgtgaacatgagagctccccccttccatctcccagctggaccaaagaagaacccattagataggatagcacctgacaccaccgacatatacacaagatccctgaacggcatcgtcgccgccgccgctgcatcagtgggcgctggcgctggtactcaccgaaacatcggcgttgtgccatctggcatgtcaaggatgtattagctgctgctgaaatgctggcaaatcctacctagccttgtggccacagcttctccgggactagccggcaaggctacaaggagtgggcatgtggtgcaaggagtgattcataagaggtggtcccgtggtcttggactcctggacatgttcttaggtcacgtgttgaggcggaaaaatggcgccattttgcgcacaactgaaggtttgatcgattcatttgattcaattgaagctaatgtatttgctaatagtaaaaggacgctgatccaagggaaaggctggagaaattctgacataaatgcaacataggccgttggccgttgcagtgggacctgagggcgtgtgtatacaatgtattattctcgttttatcgaccgtcacatctggtattatcatgctatcagccacctttaatctttatctaccacaacagttcaatacattgtctttactgttaacctacattcgccttagcgccttaaccacctttactttatactaactccatttgtttttatttaacgctggctaatataactttacactaaaacaagtcaaatattaaaaaccggaggcagtatattttttagttagaacaaaacacgaaataaaaa

SEQ ID NO: 139482 - DNA, 1485 bp, Zea Mays
gaactctggagacatacattgcattacactggaagttccaaattcgttatgtaatttttacacctctctttgctggtgcttgttacattttagagcacgttcctttacacacagtggcattcacttcatcatattgtaatggtttcgtgagggtatcattaagttgaccggttagattggatcggaaaagggtagctgaccttactagtgatttcgtgtatagtgttaattaaaaaaggaacgttttttttttcatcatgttcatttctatttttatttaaaacctcttggaaacatttgtctggtattttctgggcacgtctgtccatggcatttctgaatccgtgtctcgtttttccctctgtttgctaaatgctagttaccttgtcgcattcgtacgtgatgcaggaagcttcatgtatgttttcctttacgcgcaatgctattcatcatactcaatgcaatggtttggtgtggtgtaataagttgaccgatttatgatctatttctgcagggaaagaaacaatccaccagctgtacggcacacgggtggctgtgctcgctggcgattttatgttcgcgcagtcttcttggttcctagcaaacctagaaaacattgaagtcatcaagctcatcagccaggtaattaaggatttcgcgagcggcgagataaagcaagcgtcgacgcttttcgactgcgacgtgaccctggacgactatctgctgaagagctactacaagacggcctccctgatcgcggcgagcacgaggtccgcggccatcttcagcggcgtgggcagcggcgtgtgcgagcagatgtacgagtacgggcggaacctgggtctggcgttccaggtggtggacgacatcctggacctgacgcagtcggcggagcagctcgggaagccggcggcggggagcgaccttgccaagggcaacctgacggcgcccgtgatcctggcgctgcgggaggagccccggctgcggggcatcatcgagtccgagttctgcgagcccgggtccctggcggccgcggtggagctcgtgcacaggggcggcgggatccggagcgcgcgggagctcgcggaggagaaaggcggcctggcgttgcgcagcctgcagtgcctcccgaggagcgagttccggagcgccctcgagcgggtggtgcactacaatctccagcgggttcggtagaggaaggtgctgtgcttccatgtggcagtggcatggcagtgcgtgttgtttagtgtaaccgacactgccgcgtgcccaccaacctcgtggagcatgcatctgtaaggttctccatttctttggggggtgagtgagggcactagtagcatggtgtgcagtggttgtgaggttctattgttgttgtaactacaagcaggtaaactgttctggacgacaccacgatgtatatgtacatatgaaatgcactgctgctgtgggatgtatgcaatgagccaatgagtaggtttatct

SEQ ID NO: 139483 - DNA, 1737 bp, Zea Mays
aaaatttctcgtggattctatggccagcgtaggtacacaaagcccctttctcctccgcatgctcatatttaaatcccacagtgcgtgctgcccgaaagatttgggtatccctgcctccgtggtagaagtcctggcagctccagctccaagcgcattagctcgacctaattccttcttcaactgttgtgtacttgtgtgggtgtctctctccctctgcccgagatgttgtctctgagctgcagctgcccaggggtgtcgtccatgagcaagacggcgctcgattgggggcacctggtggcctcctgccgcagccgctggcacggcgcgcgggcgccgcccagacggcggcgcacgccatgtgtttgcttggttgccttaccgaccactacccagcctggccctgctgctgttgatgtgccctcacggacggttcctgctgtcacaacatcaagcgcccctgaacgcatttctgtttctgcgctgctcgaggttgtctcagacgacttgctcaacctcaacaacaatctcaaatcgcttgttggtgcagaaaatccagttttagtttctgcagcagaacaaattttcagtgctggtggaaagaggttaagaccagcattagtttttctggtatcgagagcaactgctgaattagctgctttgccggagctaactacagaacatcggcgcttggctgagatcatagagatgattcatactgcaagtctaatacatgatgatgtcatagacgatagcgggatgcgaagagggaaagaaacaatccaccagctgtacggcacacgggtggctgtgctcgctggcgattttatgttcgcgcagtcttcttggttcctagcaaacctagaaaacattgaagtcatcaagctcatcagccaggtaattaaggatttcgcgagcggcgagataaagcaagcgtcgacgcttttcgactgcgacgtgaccctggacgactatctgctgaagagctactacaagacggcctccctgatcgcggcgagcacgaggtccgcggccatcttcagcggcgtgggcagcggcgtgtgcgagcagatgtacgagtacgggcggaacctgggtctggcgttccaggtggtggacgacatcctggacctgacgcagtcggcggagcagctcgggaagccggcggcggggagcgaccttgccaagggcaacctgacggcgcccgtgatcctggcgctgcgggaggagccccggctgcggggcatcatcgagtccgagttctgcgagcccgggtccctggcggccgcggtggagctcgtgcacaggggcggcgggatccggagcgcgcgggagctcgcggaggagaaaggcggcctggcgttgcgcagcctgcagtgcctcccgaggagcgagttccggagcgccctcgagcgggtggtgcactacaatctccagcgggttcggtagaggaaggtgctgtgcttccatgtggcagtggcatggcagtgcgtgttgtttagtgtaaccgacactgccgcgtgcccaccaacctcgtggagcatgcatctgtaaggttctccatttctttggggggtgagtgagggcactagtagcatggtgtgcagtggttgtgaggttctattgttgttgtaactacaagcaggtaaactgttctggacgacaccacgatgtatatgtacatatgaaatgcactgctgctgtgggatgtatgcaatgagccaatgagtaggtttatct

SEQ ID NO: 139484 - DNA, 1606 bp, Zea Mays
tcccacagtgcgtgctgcccgaaagatttgggtatccctgcctccgtggtagaagtcctggcagctccagctccaagcgcattagctcgacctaattccttcttcaactgttgtgtacttgtgtgggtgtctctctccctctgcccgagatgttgtctctgagctgcagctgcccaggggtgtcgtccatgagcaagacggcgctcgattgggggcacctggtggcctcctgccgcagccgctggcacggcgcgcgggcgccgcccagacggcggcgcacgccatgtgtttgcttggttgccttaccgaccactacccagcctggccctgctgctgttgatgtgccctcacggacggttcctgctgtcacaacatcaagcgcccctgaacgcatttctgtttctgcgctgctcgaggttgtctcagacgacttgctcaacctcaacaacaatctcaaatcgcttgttggtgcagaaaatccagttttagtttctgcagcagaacaaattttcagtgctggtggaaagaggttaagaccagcattagtttttctggtatcgagagcaactgctgaattagctgctttgccggagctaactacagaacatcggcgcttggctgagatcatagagatgattcatactgcaagtctaatacatgatgatgtcatagacgatagcgggatgcgaagagggaaagaaacaatccaccagctgtacggcacacgggtggctgtgctcgctggcgattttatgttcgcgcagtcttcttggttcctagcaaacctagaaaacattgaagtcatcaagctcatcagccagtaacaggtaattaaggatttcgcgagcggcgagataaagcaagcgtcgacgcttttcgactgcgacgtgaccctggacgactatctgctgaagagctactacaagacggcctccctgatcgcggcgagcacgaggtccgcggccatcttcagcggcgtgggcagcggcgtgtgcgagcagatgtacgagtacgggcggaacctgggtctggcgttccaggtggtggacgacatcctggacctgacgcagtcggcggagcagctcgggaagccggcggcggggagcgaccttgccaagggcaacctgacggcgcccgtgatcctggcgctgcgggaggagccccggctgcggggcatcatcgagtccgagttctgcgagcccgggtccctggcggccgcggtggagctcgtgcacaggggcggcgggatccggagcgcgcgggagctcgcggaggagaaaggcggcctggcgttgcgcagcctgcagtgcctcccgaggagcgagttccggagcgccctcgagcgggtggtgcactacaatctccagcgggttcggtagaggaaggtgctgtgcttccatgtggcagtggcatggcagtgcgtgttgtttagtgtaaccgacactgccgcgtgcccaccaacctcgtggagcatgcatctgtaaggttctccatttctttggggggtgagtgagggcactagtagcatggtgtgcagtggttgtgaggttctattgttgttgtaactacaagcaggtaaactgttctggacgacaccacgatgtat

SEQ ID NO: 139485 - DNA, 1657 bp, Zea Mays
aaaatttctcgtggattctatggccagcgtaggtacacaaagcccctttctcctccgcatgctcatatttaaatcccacagtgcgtgctgcccgaaagatttgggtatccctgcctccgtggtagaagtcctggcagctccagctccaagcgcattagctcgacctaattccttcttcaactgttgtgtacttgtgtgggtgtctctctccctctgcccgagatgttgtctctgagctgcagctgcccaggggtgtcgtccatgagcaagacggcgctcgattgggggcacctggtggcctcctgccgcagccgctggcacggcgcgcgggcgccgcccagacggcggcgcacgccatgtgtttgcttggttgccttaccgaccactacccagcctggccctgctgctgttgatgtgccctcacggacggttcctgctgtcacaacatcaagcgcccctgaacgcatttctgtttctgcgctgctcgaggttgtctcagacgacttgctcaacctcaacaacaatctcaaatcgttttagtttctgcagcagaacaaattttcagtgctggtggaaagaggttaagaccagcattagtttttctggtatcgagagcaactgctgaattagctgctttgccggagctaactacagaacatcggcgcttggctgagatcatagagatgattcatactgcaagtctaatacatgatgatgtcatagacgatagcgggatgcgaagagggaaagaaacaatccaccagctgtacggcacacgggtggctgtgctcgctggcgattttatgttcgcgcagtcttcttggttcctagcaaacctagaaaacattgaagtcatcaagctcatcagccagtaacaggtaattaaggatttcgcgagcggcgagataaagcaagcgtcgacgcttttcgactgcgacgtgaccctggacgactatctgctgaagagctactacaagacggcctccctgatcgcggcgagcacgaggtccgcggccatcttcagcggcgtgggcagcggcgtgtgcgagcagatgtacgagtacgggcggaacctgggtctggcgttccaggtggtggacgacatcctggacctgacgcagtcggcggagcagctcgggaagccggcggcggggagcgaccttgccaagggcaacctgacggcgcccgtgatcctggcgctgcgggaggagccccggctgcggggcatcatcgagtccgagttctgcgagcccgggtccctggcggccgcggtggagctcgtgcacaggggcggcgggatccggagcgcgcgggagctcgcggaggagaaaggcggcctggcgttgcgcagcctgcagtgcctcccgaggagcgagttccggagcgccctcgagcgggtggtgcactacaatctccagcgggttcggtagaggaaggtgctgtgcttccatgtggcagtggcatggcagtgcgtgttgtttagtgtaaccgacactgccgcgtgcccaccaacctcgtggagcatgcatctgtaaggttctccatttctttggggggtgagtgagggcactagtagcatggtgtgcagtggttgtgaggttctattgttgttgtaactacaagcaggtaaactgttctggacgacaccacgatgtat

SEQ ID NO: 139486 - DNA, 1936 bp, Zea Mays
cgctacgaggcagctgcttctggcggcgacgcgagctgagcgatcctgacggacgaaccagcagccagctccagtgtccaccagcgagagcgtccagatggcaaatatgggcgatggtggcgctagcaggaggcgcccgtcgccggagccgctccgactcccgcggccgcccgccatcgttgacggtggtcgcgcttccggttctcccgtggcggttgctgccgaggcgacgaaggccccgtactcagtcgccttcagcgtgccggcgtcgccgtcggggctgcacctcgccgcgtgcgcgtccgtccacagcgtggcgccgccgccactgccagtgccacagccggtggaggaccagcaccaccaggcggaggccgcgccgcagctgctgaaccactcgcagcaggcgctgacgatccggaccgacgagccgccaccgctgcagcgggtgcgaaccgtgtcgcgcagcgacagcgcgcgcgaccgccgcttcgaccacttcaagaccttctccggccgcctggagcggcagctgtccaacctccgcggggtggccgtggacatcgagcccggccccggcggcgccgactccacctcaaataagatgatatccgaggaggagaccgacgaagacgacgacggcggcgaggtccccaccgcggaccgctacttcgccgccctggaggggcccgagctagagacgctgagaccgacagaggtgtcggcgctgcccgaggacgagacgtggccgttcctgctacggttcccgatcaacgcgttcgggatgtgcctgggcgtgagcagccaggccatgctgtggaagacgctgcagtcggagccgtccacagcgttcctccacgtgagccctgccgtgaaccacgcgctctggtgggtctccgccgcgctcatggcgctcgtctccttcatctacctcctcaagatcgtcttctacttcgaggcggtccggcgcgagttccatcacccgatccgcgtcaacttcttcttcgcgccgtggatcgcctgcctcttccttgtcaagggcctgccgcatcctgtgtggaccatccaccacgccgtctggtacattctcatggtgcccatcttcctcctggacctcaagatctacggccagtggatgtccggcggcgaccgccggctgtccaaggtggccaccccgaccaaccacctcgccgtcgtcggcaacttcgtgggagcgctgctgggcgccaatatggggctccgcgaggtgcccatcttcttcttcgccgtcggggtggtgcactacctggtgctgttcgtgacgctgtaccagaggctccccaccaacgcgcagctccccagggagctccacccggtcttcttcctcttcatcgccgcgcccagcgtcgcgtccgtcggatgggcaaggctgtgcggcgacttcaactacgccgccaagatcttctacttcacctccctcttcctctccatgtcactggtggtgcgtctcaacttgttccggggcgtccgcttctcgctcgcgtggtgggcgtacacgttcccgatgacgagcgtggccatcgcggcggcggtgtacgcgtcggcggtgaccaacgtgctcacccgggcgctggccgtggggctgtccggggtggcaaccgtcacagtcgtcggcgtgctgatgaccaccgtctaccgcgcgttcgtgcgcaaagaccttttccccaacgacgtgtccatcgccatcactcagcgtcccaaggctaagttcggaaagatcctcgcgcacatccgcgcctccggcgacggcgtcaaggacctcgtcctcgccgtctccaggcacggcggctcctccggatccgacaccaacagcgccagcgagtcgccgtcgcccatggcgcgtggccgccgcagggcagagccgtaggccaccgcaccgtccatctccaaacaattc

SEQ ID NO: 139487 - DNA, 1944 bp, Zea Mays
atgaggcggggagccaccaaggacgacgccgcgcccgacaaggtcatgggccctctcttcccccgcctccacgtcaacgacaccctaaagggcggacctcgcgcgccacccaggaacaagatggcgctctacgagcagttcagcgtcccctcccaccgctacagcgccgccgtaccgcccgcgccttccccagcgcctccatggggcgcgcaacgacccgcctccgcggtcccgtccacgtccgccagccaggttggcggcggcgatagacctatcttcccattatttcgtgtgccttcaactgaacctgttcgttcatcagatcagacgaatgccaactccaatggccagggtgccaatggtacaatagctgaatctgggaggcagaggcagtccacacatcttaagagcaaggatactaatgctgcaggaccacctgccgagggtaataattccgttgggaagaaattggctaatgatgatgattttacagttccctctgtcttgtattctggaatgcctccgcattccagccaagaaaagctcactctcttccctaccacaagcccatgtaagagtgtgcctgcaaaatattctagcactgacaagagacgcttagaaggaatggatgcttctgatgtgaaatcgaagggtccctcaggtatcaaggagaaagagccagtacaagtgaggatagacttggaagacaaagagacaactccgtcatttcaagtgctaaacgacaaaacatggagtccagacccaaagttatcttcgcacatggacaggctgaagaagcaacatgctgaagctgagagttatcagataaggaccaggaatgagaatgctgtcgagacccaaagccctccaaaaaatggagtgtcgttgttgtctaagccatatgttgataggagggaacagaatggtgattctgatctattggggcatggcctaagagagacaggtgtgaagaggaaaagatcacatcatgacgtggagcaaaacgatgatctgtctgattcctctgttgaatctttgcctggaatggagatttctccagatgatgttgtcagtgctattggtcccaagcatttttggaaagcgagaagagctattgtcaatcagcagagggtatttgctgttcaagtattcgagctgcataggttgatcaaagtgcagaagttgatcgctgcatctccacatgtacttattgagggggatccttgccttggcaaatccttggcggtgagcaagaaaaggctggctggagatgtggaaacacagcttgaatcagctaaaaacgatgatggcgtgcgaccaacgcagctagagcactcgaaagagaagactgaagcgaaccaaccttcaccatctcaagacgaacaggccgcaactaatggtgacgttgctgcctcgatgcataccccttccgacaacaaacagaagagctggtgcattcctgcacctccaagtcagtggctgattcctgttatgtccccgtctgaaggacttgtctacaaaccttataccgggcactgccctccggtgggaagtcttttggcgcccccattttttgccagctaccccacctcctcctcctccacagctgggggggatttcatgagttcggcatgtggagccaggctgatgagtgcccctgtgtacttcccgtctttcagcatgcctgcagtgtcagggtctgcagttgagcaagtgagccatgttgcagcgtcgcagcataaacggaactcgtgtagtgaagcggtgttggcatcaagggacagcgaggtgcaaggcagtagtgctagcagtccggcatcttctgaaacagcagctcaacccagggtcattagggttgttccccacacggcacgcacggcttcagagtcggcagcaaggattttccgctcaatacagatggagaggaaacaaaacgacccgtga

SEQ ID NO: 139488 - DNA, 1663 bp, Zea Mays
ctaaaagacacgtcagccccacacagaagccgacatgtcctgctcctctgaattctgatccgtgcggtgcggccgtgcgggtgtccgtctcctccattgcgaagccgcgagctcctgcgtcaaccagatcacacgaaccaaaccagcgcctcctcccccgagtctcaccgccagcgcccatggcgacacgctactggatcgtgtctctgcccgtgcagtcacctggcgccatcgcaagctccctgtggtctcgcctccaggactccatctcccgccactccttcgacactccgctctaccgcttcaacgtcccggatctccgcgtcggcaccctcgactcgcttctcgccctcagcgacgacctcgtcaagtccaatgttttcgtggagggcgtgtcacacaagatccggaggcagatcgaggacctcgagcgcgccggaggggtcgagagtgggaccctcaccgtcgatggcgttcctgtcgacacctacctcaccaggttcgtgtgggatgagggcaaataccccacaatgtctccgctcaaggagattgttggcagcatccagtcacaggttgccaagattgaggatgatatgaaggtgcgagcagcggaatataataatgtaaggagccagcttagtgcaatcaacagaaagcaaagtgggagcttagcggttcgtgatctttccaatctggtaaaaccggaggatatgatcacctcggaacatcttgtgacacttcttgcaatcgttcccaagtactcccaaaaagactggctgtcaagctatgagacacttgatacatttgtggtacctaggtcatctaaaaagctctatgaagacaacgaatatgctctctacactgtgacactatttgctaaggttgttgacaactttaaggtccgtgctcgcgagaagggttttcagatccgtgatttcgagtacagtcctgaagcacaggaaagccggatgcaggagatggagaagctactgcgagaccaagaagctatgaggaccactcttcttcagtggtgttatgccagctacagcgaggtattcagttcctggatgcacttttgtgctgtgcgtgtctttgtggagagcattcttagatatggtctgccgccatcattcctgtctgctgttcttgcaccatctacaaagagcgagaagaaagtaaggagcatcttagacgagctctctggcgatgcccatagcctgtattggaaatccgaagacgatgtaggcgttgctggtctgggaggcgaaaccgaggcgcacccttacgtctccttcaccataaattttgtctgagacaaagtatggttcctagaccgtctgtggcctaggcaatataatacttggaagcagctattggaacgcaagcgcggaacgagcatgtatattactctgttgatttatcggttcatgtggtcctgtagttcatatcacagagagatcagccgacggatgctgtaatttctgaggaacctatggaattcctgtagttcatgtggtcctgtaatttctgaggactacctacctatttccctgcagcactgcaccttgtaaaaagacttaacccgtgtctgtagcagctggctactggatttattacatctacaataaaagtcatttttaatggttgtttcataagagttttc

SEQ ID NO: 139489 - DNA, 501 bp, Zea Mays
gatccgttgggtttttattcacatgttggtgttgttcttcactaacgcaacatttggaacgcagcctgtattggaaatccgaagacgatgtaggcgttgctggtctgggaggcgaaaccgaggcgcacccttacgtctccttcaccataaattttgtctgagacaaagtatggttcctagaccgtctgtggcctaggcaatataatacttggaagcagctattggaacgcaagcgcggaacgagcatgtatattactctgttgatttatcggttcatgtggtcctgtagttcatatcacagagagatcagccgacggatgctgtaatttctgaggaacctatggaattcctgtagttcatgtggtcctgtaatttctgaggactacctacctatttccctgcagcactgcaccttgtaaaaagacttaacccgtgtctgtagcagctggctactggatttattacatctacaataaaagtcatttttaatggttgtttcat

SEQ ID NO: 139490 - DNA, 823 bp, Zea Mays
gacatgtcctgctcctctgaattctgatccgtgcggtgcggccgtgcgggtgtccgtctcctccattgcgaagccgcgagctcctgcgtcaaccagatcacacgaaccaaaccagcgcctcctcccccgagtctcaccgccagcgcccatggcgacacgctactggatcgtgtctgctgcctaactgctatctgtccagcccaggctgcccagctgatcggacgcctaaaaccaaccttttgtgttggctccgcgttcaggttcgtgtgggatgagggcaaataccccacaatgtctccgctcaaggagattgttggcagcatccagtcacaggttgccaagattgaggatgatatgaaggtttgattgcacgtcttaagtcttattacacaactccgctcctctctgcctatccttttttgtgtcctgtcccggcctgccccagtttatcgctggtatagcaacatcaactcattagctagatgctagactcacgggtattttatttgctactgttgcagtcctggttggaattgaggagctatggttgctcttcaggcttcacaactgaaatacatgcaaccatattcatatatgtataataagaggccatgttttatacttagacgtgtacattacgaaggagctcagtacagttgccaagatattctaggggatttttgccttctttcatgtcaattcaacgttatcactacattgttctaaccactgtttgtttgactattagatctacttccacttgtcctagcatatagttgtcacgtgcttctgatacagatttgtggagccactaggacgcaaa

SEQ ID NO: 139491 - DNA, 950 bp, Zea Mays
attagtcgctggagatagagccgagaacaagggcaactgacgcggtcaccctcgcccccaacacagagagaaggtctgctctccaccggatggactcccacggcaagcccaagcccgccggttcgacgccgccgacgccgccgaagccgccgaagccgccgacgccgccgaagccgccgacgccgccgacgccgacgccgccgacgcccgaggcgaggaaggggttcatgcgccgcatcttccctttcctcctagccgccaacctctttgtcgtagcttatgtcctcgtgcgggccaaccaaaaggactcagcaaagaaggacccaacgactgatcctgctactgcaactgctgggaagcctgctgagccagtctctatccccagaaaggagctcccaccaatccctgaagatgaccagcgcaagctctacaaatggatgctggaagagaagcggaagatcaagccacgcaatgctgccgagaagaagaaactcgatgaggagaaggcccttctaaaagagttcatccgagcaggatccctcccaagcttctaaaagagatcaagccatttgggtctcttgtgtctgatgttcagccaagaagatgattgggcctgattggattgtgtacaaacacagtactgtgctatcttgtaaactgatgtctccatgatgtagcctcctcgagttcaaaggttgtgtggatgcaaactagtgttgtgtgcattggttctagagattcttcaaggctaaaaaaactaaagtgtgtcaaattcttctgttccattccatccgcaatttgctccgttgacaattttatgttctgtggctctcgtgtgatgagtgaactcatcgcgtgtgatgagctcatcgattgccatgtactgtattgttgagaccccaactgggccccaaccctatttagaatgttcttaactgcgtagtgcaaaa

SEQ ID NO: 139492 - DNA, 6322 bp, Zea Mays
atggctcagaactcgtcccgtcttcaccgcctcctcacattactagacactggttcgacacaagcaacgaggtttgcggctgcacgccaaattggagaaatcgccaagtcccacccccaggagctgaattcgttgctaaaaaaggtttctcaatatattcgtagtaaaaattgggacacgagggttgcggcagcccatgcgattggtgccatagcagagaatgtcaaacacacatcattgaaggacttgtatgcttccgtgcaagcagaaaaacatgcttccggtttctctgatggaagtgatgatgctggctcagcattgccacggactgatagtgcagcaacatctgatcttgcttttggaagctttgacataggcagggtattggaatttggatctcctctattggcatcaggtggacaggaatacgacattgctgatagtggcaagaatccagcagagcgtctagctcgccaaaagaaaaatctccggcgtcgtttaggactggatttatgtgagcagtttatggatgttaatgacgttatcaaagacgaggatcttcttgcccaaaaaaattattggggttcacatgtacagaataatggattccattcatttaattcaggtcataatattcagcagttggtttctaccatggtccccaggtatcccaagcattctaattttcgctctagacgattaagtgccagggagttaaatatgctgaagcgtaaagcaaagagtaatgcaaaagatcatacaaaggctgtatctgaggatgatgaggttacactgaaaggatctgtgccctccaatggagcttcttctgaacaaggtgtatttgatacagctgtcgaagaagacaatctggagtacaatgagaacggaagatggccttttcaacaatttgtggatcagcttattcatgatatgtttgatcctatttgggaagttcgccatggcaccattatggctttaagggaaattttgacacatcatggtgcttgtgctggagtatattttcctgatctgagcttgccttcctctgacttggatggtaaaaccaactttgactcccttaaaagggaacatggtatcgatctaaacgaagatgtccatttggaacaccttgaaccagcattaaagaagcataagaaagagccaaaatgtgctgaaagtatgatggattgtgataaggagttggttgacagtgattatctaaaaacggaaggagatctgagcaatgtgcctgatgtattaactgccgaaccaaattctactcatgtaaaagttgagcctgagttctgtgttgatgattcagctgacccctctaaaggcgtttcgacatgtaaatcacagaaaaaactcaactccatatcacatctgagttctcatattcttgctccagaaagttcaaaattcatgaaactgatgaaactagccaaatactcatatatgaagaattgggaatttcttcaggattgtgcaatccgcttcctttgtgtgctttcactggaccgctttggtgattatgtatccgatcaagttgtcgccccagttcgtgaaacttgtgctcaagctcttggtgctgtgctgaagtacatgcacccttctttagtatgtcatacattcaaaatcttgctgcagatgcagcacagacaagagtgggaagttcgtcatgggagccttcttggcattaaatacttagttgctgttcgccaggaaatgcttaaagatttgcttgactatatcattcatgcttgtaaagctggtctggaggaccctgatgatgatgtccgagcagtggctgcagaagccctgattccagctgccgactctttagttaggctaaatgaccaaattttgcatccaattgtggtgttgctttgggatatactgcttgaccttgacgatttaagcccatctacaagcagtgtaatgaacttgttagcagaaatatattctcaaccagagatggtcccaaagatgcttggcacagcagcttcaggggaaaagggagaatttgatctaaacgaagcaactcagattgctgagcaagaagacgaactaacatctattgaaaacccttacggtctagctacactgacaccccggctgtggccctttatgagacatagtattacttctgttcggcgttccgccatacgaacactggagaagcttcttgaggttggcaacactaggagttctgctggaacaaccccatctaaactctggccaacatcaatattaggtgatgcactgcaggttgtatttcagaacctacttttggagtcaaatgatgatattcttcagtcttctgaaagggcttggaaacttctacttcagtgccctgagaaggaccttgaatatgctgcaaggttatattttagtaattgggtacaacttgctaccactccatttggctcagcattggattctacaaaaatgtttttaccagttgcccttccacgaggaaatcgttcgagagctgctgcaaagattagatctgctaggctagaacatgagtacacaacaatgatctcgtttggttctacaggggaaagtatttcacatgaaaagcattcggacgttccctctattttttcgaatataattgttggctctgatcctgacaaatctgttactcatacacgggttcttacgtcaatggcccttgggctttttgcctctaagttgcccgtaagctcatggcaagtggttttaagtccactagcaaatcacctcatgtctctctcaggagtccagagacaagtggcttcaatgatcatcgtttcttggttcaaagatctgagaggcagagatcctgtatcagtgggtacattgctagcttttctatcttccttgaaagagtggctggtggacttattgacttgctctgatccagcattacccacaaaaggttctgtgcttccatattctgaactttcaaggacatacacgaagatgcgcaatgaagccaataatttgctccacttaatcgattcatgtgctgctttcaaagattatagtagcagcttaaaccttaacactgacgtgctgactgttgatgatgctatcaactttgcatcaaagcttttgttaccatctgaatctgatattccttcagaaactgagaacattttcttgaataacatagaatcagcaaaacaaggcctattgtctacatcaggttacttgaaatgtgttcagaataatttgcatgtgacagtctgttctttggtggcttctgctgtagtttggatgtcatgtttgcccagcaagttgaaccctgttattttacctttaatggctgccattaaaagagaacaggaggaagtacttcaagataaagctgctgatgcacttgctgagcttatatttagctgcattggccgcaagcctggccccaatgacaagctaaccaagaatctctgcactctaacatgcactgatgctagtgagacacctcaagctgcaataatcaactcaatgcaggttattgaggaccagaatttgctatcgattggaaagcgttttagcagtcatagatccaggggccatacaacgtctggtggcgatgaaaggtcaaaaatggagggttttataagccggcgtggatcagagttggctttcaagcatctctgtgtgaaatttggaccttcattgtttgaaaaccttcccaagttatgggattgccttactgagtttcttagacctgtaaaaacagaagatggtattccggaagatgatgcaagtattgcacagctgggcagatcgtatgaggataaggacccacagtcactcattaataatatccaggtcgttcgttccatttcacctcacttggctgagcccttaaggcctcaactgctaaatctccttccctctattcttgggtgtgttcgtcatcctcatgtggctgttagactagctgctgcaagatgcatcacatctatggcaaagtcattgaccgatgatgtgatggtactggtgatagaaaatgtcatcccaatgttgtccgatttatcttctgtctgtgcaagacaaggagctgggattctgttaagccttcttgttcagggtttggctgtggagttggttccttatgctcctttccttgtcgttcctcttctgaagtgtatgagtgacccagatggttctgttaggcagactgtgactcacagttttgctgctcttgttcctttgctgccattatcaaggggtgcttctttaccatgtggactaagtgaacgcttatctagcagtgctgaagatgtgcaatttctggaacagctccttgacaatacccaaattgatgatttcaagcttaatattgatcttaatgttgaactacgaaggtatcagcaagaagggatcaactggcttgcattcctccgtcggtttaagttacatggaattttatgtgatgacatggggctcggtaagacgctccaagcatctgctattgtagcaagtgacattgcagaagcacgtgcacggaatgatgaaaaaattctgacatctttgattatctgcccttctacattagtggcccactgggaatatgaaatagagaagtacatagacagctctatcttgaaacctcttcagtacgttggttcttctcaggacagagtgacactccgtagtcagtttgataaggttaatgttatcataacatcatatgatattatacggaaggatattgattttcttggaaatatcacttggaactattgtgttctggatgaagggcatataataaaaaactcaaggtctaaaataacgtttgctgtgaaacagctgaaagcgcaacaccgtcttatcttgagtggcacacctattcagaataatgtgttggagttatggtctttatttgacttccttatgcctgggtttcttggaacagaaaaacaattccaagctgcatatggaaaacccttgctagctgccaaagattctaaatgttcagcaaaggatgctgaagctggtattcttgcaatggaggcactgcataagcaggtcatgccgtttctactgagaagaacaaaggatgaagttttatctgatcttccagagaagataatccaggatagatattgtgatctcagtctattgcagctcaaactttatgacaaattttccagctccaatgcaaaagacgagatttcaactatagtaaaagcaaatgaactggaggaatctgcacctcaaccaaaggcaactcggcatgtgtttcaggcattgcagtacctattaaaactatgcagccatcccttgcttgtaactggggagaaccccccaaatcatcttgtggatcttctgaatgaaataggtctgggatctggcagtgagcttcatgagcttcaccactcacctaagcttgttgctcttcaagaaatacttcaagaatgtggtatagggtcagaaatatctagtcctgatgcttctacagctgttgggcaacacagagttttgatttttgctcagcataaggcttttcttgacatcatagagaaggacctgtttcaatctcatatgagaagtgtcacatatttgcggctggatggctctgttgatccagagaagagatttgaaatcgttaaagcattcaattcagacccaaccattgatgtacttctgctaacaacccatgtcggtgggcttggcttgaacttgacatctgccgacacattggtgttcgtggaacatgattggaacccaatgaaggaccttcaggctatggacagagcacatcgattgggtcaaaggaaagtggtgaatgttcaccgtctcatcatgcgtggcacccttgaggagaaggtgatgtctctccagaggttcaaggtgtcagtcgccaatgctgtcatcaatgctgagaactcgagcttgaagaccatgaacactgaccagctgcttgatctgttcacatcaacccctgcttcaagaaaagcaagcgacgagcagagtaagaggaaatctggtggcaaaggcttgaagtccattcttaatggtctggatgagctttgggatcagtcgcagtatgccgatgagtatgatctgaaccagttcctggcgaagctgaacggctgagccaccaccggctggctcgtgtacagtgtataaagcaatttggggcaggttaattttgttgttgctgttgtttgatagaggaaggaaaagattagatgctaacagatataggtggtggttggggttacgatctcaatttttttggtttccatcttcctcaatttttgttttgaggagttgtatatactctgctcacctataatcaaagctgcagctcttatcagaa

SEQ ID NO: 139493 - DNA, 924 bp, Zea Mays
actgaagagggaaggagaagcgggtggtctgacatggatccaatgcgacgccaggctccaccaccagttataaatgcaggcagcctagccaagcagaagtcgcctgttcggcctgagacatcaacatcgaaagatgctgtgttctccagttcgacttttttgggacgttcaagcggatcgtcaaggcggcctgctgtatctagtagccgagagctaagcactgaagcggagcaaacacgtagccgcacaactgacgcgagcccaggggcattccagaggtctggagctccacggtggagcccgcagatgcctgattcctcggacggcaggcgttcgtcttccagcaggcgccactcatctaaccccaagaactacgagtctaccattaggggcatgcagggcctaaactttgatggcgatgacagggtgcactattagcatctcatctgtctgggagggtgcatcgcctcccctccccatagatggatgtaccaaggacggccagataataagaggtttgggtgagtgagcccgagcagtccgggtgacgtctcgtaggaactgtgtatgctgcttagcctctgttgttgtacaggcttgtcatttgtttggtctgcgcttaccggtagggcgcgccttgtccggtgaacgatgatggtgtattatgagagggatttcttaaggggttcacgtttggtgtgcttgggttgctttgatagaaacatttgggagaggtttatcgcgcctgctctgctctctcatgtaactccagattgctgagctggcacctgctctgctctctcatgtaatgtaactccagattcctgagctgctatgtttttttttaatcttgtgtctctgagatgctgttgtgctgctggtgacaggtcctcagctcgttgctgttaacctgtcctagtgttg

SEQ ID NO: 139494 - DNA, 854 bp, Zea Mays
tccgacacggcgacacctcagccctcaggtagccccgtagccgcctagcagggccgtgctcgagaaaattaggagaccaacagcacgaagggggaaaaaaggagagcagaaatccccaatccctcctcacttcgacccttgctcggaatctccccgcagcgtccggctgaatccattcgattcactcatggtaggcttcgtcttcttctgctgattcgctggatcgtctccaccgacgcggctgcgcccacacctgccgtcacagccatggagccgcgcatcggcaacaggttccgcgtcggccgcaagctggggagcggctcctttggggagatctacctcggcaccaacgtgcagaccaacgaggaggtcgcaattaaactggaaaatgttaagacgaagcatcctcaattgctttatgagtcaaaattatacagaatacttcaaggaggaactgggattccaaatgttaagtggtttggcgttgagggtgattacaatgttttggttatggacttactgggaccgagtcttgaagatctttttagcttttgcaacaggaagttgtccctcaaaactgttttgatgcttgctgatcaaatgatcaatcgagttgagttttttcattccaagtcattcttgcatagagatatcaagcctgacaattttctcatgggtctcgggaaaagagcaaaccaggttgattagctatattccctcaatctatatttatttatgggtctattagtaggtacacacattaataactgattttaatctctgtataggtttatgttatcgattttggacttgcaaagaagtacagagatacatcaacacaccagcacattcca

SEQ ID NO: 139495 - DNA, 346 bp, Zea Mays
cagcatcatccacaggggaccctgatgtccttggcctcaggctctttagcagtcctctatccccgcaaggatctggtcgatgtcctcaccatccacatccattccctcccttctttttcttctttgatttctttcccatgccatcatccacatcaggggcaggcacagaatcctgggctttcatctcctctggctcaggcctggggatgctccatccctgcaaggatctggtcgacgttgtcaccatccatcataaatgcacccttccttttcttcttctggcttcttcgcagctactgcggcagtcattgaggcatcctcgtcctcctcagccacaggtgggggt

SEQ ID NO: 139496 - DNA, 1606 bp, Zea Mays
cttatggatgtttgtgtccgcctcttggaaaacaccgtttgaagattgtagaattcatctctgttttgctaacaattggtagcgaaatagctgagaagaagctaataagccaatcagtgataaagcattgcattgatttattttttcagtacccttataataactttttgcatcatcatgttgagaacattattgtttcttgccttgaggttaaaagaaatcaattgattgaccatattcttaatgactgtggtcttgttggtaaagtccttgccgctgaaaaaagttcttctctggcagtggagtctaatgggccaacattaccatcagaagggaaagaacctccaagaattgggaatattgggcacataactcgaatagcgaataagctcattcaatttggaaatagtaacagcatgatccagagtcacttgcaggagaacagtgagtgggctgtatggcaaatagatgtcctgatcaaacgcaatgaggtggagaatgtttaccattgggcatgtggccgtccaacatctctacatgatcgtgggagggatagcgatgacgacgacttccgagacagagactacgatgtggcagcactcactaataatatgagccaggcatttcgatttgggatatacaggaatgatgacattgaagaggcacaaggatcccacgaacgagatgatgaggatgtctactttgatgacgagtcagctgaagtagtaatatcttcattgtgtttgggggatgatcaggacagcagttcactcttcacgaattcaaactggtttacgtttgatggtgatagaggaatcaatgaccgcctagctgcctctgttcctccatcatccccggattctgaagcgatttccttaaacactgagaatactgatgaagcgctaactggtgaaaccactggaggcactgagtcactgcgggaaagtgcatcccttgccaatgaactagcagaagtcgctaacgacaatgatgctgatgccacggacggtgagaaaattttgtgtacagaagaggacagtcaagcctccgaggggcctgtggatgctaaagaggacaagactggaggagcgtctaaagcagcgaatgaatctgtgcctgacaatgccttgcctgaatcccaccacactgattgtcggtgcgctgactcatctgaatcaggaacagaagaagatgtggagattgatgatgagaagaaatctgagactgctatgacaaatgaatgagcgttatgggcttggaatgataggatggcggatcagattcttttgctggtgagcaatgccactcaagcaggggcgccgtacaattttaacagcgctgctttgctattgaggagtctggttgttactgcatactcgggcacgcacgctcttttatcatctcacctcatcaccatcatcccacatggaccaatgtcgtctggcggctcctgattttggtctcttcgaactgtaatatctgcagtgagttttttccatcagtttttatttttttttccgggtttctgcatctgtaatagctatttcttcaagcgcaaaacatgtcttctctttgttgctataaaaagcatatagtttcaccaaaa

SEQ ID NO: 139497 - DNA, 375 bp, Zea Mays
gagcatccagatattgttgtccagcttgtcgacctcattggtatcacatcaataatggaggtgttggtgagattgattggtgctgatgaaaccatatacttgaatttcgcggatacattgcattggttagagaatacatatgtactggaaatgattgtggataaatttagctcatcagactctcctgaagtgcatgcaaatgctgctgaaattctttctgcggtaactcgatgcgcccctcctgctcttgctgcaaaaatatgcagtccaaggtgtgaggagatcttgggcaaaaggaaacccataggcaagatctcctcaaagatggaaacccccaatcaggatcctatactaagggcccgtttggcagcatga

SEQ ID NO: 139498 - DNA, 3537 bp, Zea Mays
gtccatccgtcacggcgccaccacctctacctccttccctcaccttccagagcccactgctcctcggcggcggcggagatgagcgtgtggaactacgtcgtcacggcgcacaagcccaccagcgtcagccactcctgcgtaggcaactttaccagccccaaccagctcaaccttattatcgcgaaatgtacccggatcgaaatccatttgcttacccctcagggcctccagccgatgcttgatgtgcctatatatggaagaattgcaacgattgagctcttccggcctcataatgagactcaggactttcttttcattgctacggagaggtacaaattctgtgttctgcaatgggatgcagaaaagtcagagctaatcaccagagccatgggtgatgtttctgatcgcattggccgccctactgacaatggacagattggaatcattgaccctgactgtagactcattggtcttcatctctatgatggcttatttaaggttataccatttgacaacaaagggcagctgaaggaagctttcaatatcagacttgaagaacttcaagtactggacatcaaatttctacatggttgtgctaaacctactattgttgtcctctaccaggataataaagatgtgaggcatgttaagacttatgaagttgcactgaaggacaaagattttgttgagggtccttggtcccagaataatgtagataatggtgctggtttattaataccagtaccagctccacttggcggtgtgataataattggcgaggaacaaatagtttactgcaatgccaattccacatttaaagcgataccaataaaacaatccatcatcagagcttatggacgggttgacccagatggttctcgatatttactcggtgataatactggaattttgcatttacttgtccttacccatgaacgagaaagggttactggtttgaaaattgaatacctgggagagacttcgattgcatcatctatttcgtatcttgataatggtgttgtttacgtcggttcacggtttggcgattcacagctggtgaagctgaacctccaagctgatgcaagcggttcatttgttgaaattcttgaacggtatgttaatcttggaccgattgtggacttctgcgtggttgaccttgataggcagggtcaaggtcaggtggtcacttgttctggggcgtttaaagatggttcccttcgggtggttcgtaatggtatagggattaatgagcaggcttcagtagaactccaaggcataaagggattatggtcattgaaatcttcgatcaatgatccatttgacatgtaccttgtcgtgagctttataagtgagacacgattcttggcaatgaacatggaagatgaactagaagagactgagatagaggggtttgatgcacaaactcaaactctgttttgtcagaatgcgatcaatgatcttcttatacaggttactgctaattctgttcggttagtcagttgcacctcccgggagttagtgaatcaatggaatgcaccagcaggattctcagtcaatgttgcttcagctaatgccagccaggttctgttggcaaccggtggtggccatcttgtttacctggaaattagggatgctaaacttgttgaagtgaagcatgctcagctagaacatgagatttcttgtcttgatttgaacccaattggggagaatccacaatatagttccctagctgctgttgggatgtggacagatataagtgttagaatattttcgcttccagatcttgaattgataaggaaggaaaatttgggtggagaaattgttcctcggtctgttctgctgtgcaccttggagggggtttcgtatttgctttgtgctcttggggatggtaatttgttcagttttctactgaatgcaagtacaggtgaactgactgatagaaagaaggttaccctcgggacccaacccatcagccttcgtaccttctcatcaaagggtaccacccacgtgttcgcttcgtcagataggccaactgtcatctatagcagcaataagaagcttctctacagcaatgtcaatttgaaagaggttaatcatatgtgccctttcaatacagccgcttttccagacagtcttgcaattgctaaagagggtgaactttcaattggaactatcgatgatatacagaagcttcatatccgcacaatcccccttaatgaacaagcacgtcgcatttgtcaccaggagcaatcaaggacactagcattttgcagtttcaagtacaaccagagtgtggaggaaagtgagactcatttaatacgtctgctagatcatcagacgtttgagtccctgtgtgtatatcctctagatcaatatgaatgtggctgctccatcattagctgttcgtttgcggatgatagtaatgtttattactgtgtgggaactgcatatgttatacctgaagaaaatgaaccgacgaagggccggattcttgtatttgcagttgaagatggaagcttgcaattgatcgtggagaaagaaaccaaaggagcagtttattcgctgaatgcattcaatgggaaattgttggctgctatcaaccagaagattcaattgtataagtggatgtcacgcgaggatggttcacatgagctgcagtctgagtgtggccaccatgggcacatacttgccttgtatactcaaacacgtggtgacttcattgtggttggcgatctgatgaaatcaatatccttgctggtgtataagcatgaggaaagcgcgattgaagagcgtgctagggattacaatgcaaactggatgactgcagttgagatgcttgatgatgaagtctacgttggggcggagaatagctataacctattcacggtgcgcaagaacagcgatgcggcgacagatgacgaaagggccaggcttgaggtggtgggagagtaccaccttggggagtttgtgaacagattccgccacggttcactggtgatgcgccttccagactcggatatagggcagatccctacggtcatctttggcacaataaacggggtgattggcattattgcctccctcccgcacgaccaatacatcttcctggagaagctccagtcgacccttgtgaagtacataaagggcgtcggaaacctgagccacgagcaatggcggtccttccataacgacaagaagacggcggaggctcggaacttcctcgacggtgacctgatcgagtctttccttgaccttagccggagcaagatggaggaggtgtccaaggcgatgggcgtccccgtggaggagctgtccaagagggtggaagagctgacgaggcttcactagtgtagatggaacatggaagcgttgcttgtaagcaagtagtaacttgttccctgagctgtagcctccgcggctcgcacgatcaaagtgttcggccgtggctgcagtctatcctatgctatatcctatcgtgatttgtttgtttgagctgtgccagtttcttttctttattattaatgcttaatgttaaaa

SEQ ID NO: 139499 - DNA, 711 bp, Zea Mays
ctgaccgatgcggaaaacgcaaaggcgtggtggcctgtctgcgagcaaccatgcgcaaggggtttccctctctgcgcgatgctgggtatcgacggtaaagtggtgatgccaaaaggtgcgccaaaatccaaagtagcggcaacgtgcgactactccgcagaagtcgttctgcatggtgataacttcaacgacactatcgctaaagtgagcgaaattgtcgaaatggaaggccgtatttttatcccaccttacgatgatccgaaagtgattgctggccagggaacgattggtctggaaattatggaagatctctatgatgtcgataacgtgattgtgccaattggtggtggcggtttaattgctggtattgcggtggcaattaaatctattaacccgaccattcgtgttattggcgtacagtctgaaaacgttcacggcatggcggcttctttccactccggagaaataaccacgcaccgaactaccggcaccctggcggatggttgtgatgtctcccgcccgggtaatttaacttacgaaatcgttcgtgaattagtcgatgacatcgtgctggtcagcgaagacgaaatcagaaacagtatgattgccttaattcagcgcaataaagtcgtcaccgaaggcgcaggcgctctggcatgtgctgcattattaagcggtaaattagaccaatatattcaaaacagaaaaaac

SEQ ID NO: 139500 - DNA, 1176 bp, Zea Mays
atattggtagctcatcatcgatccagcagcacacagacgagccgacacaagcagttagctatagctgctagcctgatcgccaatggccaccgccggcagcaagcaaggaggaggctcgtccaagccgcctgcggctgctggtcaggagttggacccgaggtacgagtgggaggagaacgccagcagcttcatcctccgcatccacctctcaggcttcaggaaacaagatttcagggtgcaagtcgacggcgccggccgcctcaccgtccgcggccagcgctccgacgccgccgccgccaacgccaacgccaggcactcccgcttcaacaaggtcttccagctgccatccacctccaacctcgacgacatcgccggccgcttcgaccttggagtcctcacgctcaccgtgcccaagcgcctgcccgcgcccgcaaaggaagaccagcagcaggccaagaagcccgaggatgccgatgccgatgccgctgccgccaccaagcaggtggcgggagccaagggcgccaaatcggagccggagcagcagcacaaggaggcggcggcaaaggaagataagcccaaggcggccgccgccgccgcagcacctgcaccggcagccgacacgacggcaaaggaagataagcccaaggccgccgccgcagcacctgcaccggcagccgacacgaagaagcagcccgagacgcaggccaacgcagagagcaaggcgacggatccgaccgaaagcctggcggagcggcgcaccgaggaagagcgggccaatgcaaatgctgcagctgcggcggagcaccagagaaaggcatgccgtggcttcaaggagcgcgtggcggaggagctccaggggctggcgggctccgagtgggcggagggccttgtggagacggtcaagaggaacagggaggtgatcgccgtcgccgtcgccgccttctccctcggcgtattcgtctccagcaggctcttctccaggtccagcaggaactagaagccaaccatgcatgcatctctgtgacaatcgtaatagcgcttgtcaccaccacaaactacgtgacacatacagtccatgatgtggatatatacatgcactgcacagacacaagtgaattgtaaacatgtttataaatgtaacagtgttgatgaattgtcgaacaagtttattcatgt

SEQ ID NO: 139501 - DNA, 1179 bp, Zea Mays
atattggtagctcatcatcgatccagcagcacacagacgagccgacacaagcagttagctatagctgctagcctgatcgccaatggccaccgccggcagcaagcaaggaggaggctcgtccaagccgcctgcggctgctggtcaggagttggacccgaggtacgagtgggaggagaacgccagcagcttcatcctccgcatccacctctcagaaggcttcaggaaacaagatttcagggtgcaagtcgacggcgccggccgcctcaccgtccgcggccagcgctccgacgccgccgccgccaacgccaacgccaggcactcccgcttcaacaaggtcttccagctgccatccacctccaacctcgacgacatcgccggccgcttcgaccttggagtcctcacgctcaccgtgcccaagcgcctgcccgcgcccgcaaaggaagaccagcagcaggccaagaagcccgaggatgccgatgccgatgccgctgccgccaccaagcaggtggcgggagccaagggcgccaaatcggagccggagcagcagcacaaggaggcggcggcaaaggaagataagcccaaggcggccgccgccgccgcagcacctgcaccggcagccgacacgacggcaaaggaagataagcccaaggccgccgccgcagcacctgcaccggcagccgacacgaagaagcagcccgagacgcaggccaacgcagagagcaaggcgacggatccgaccgaaagcctggcggagcggcgcaccgaggaagagcgggccaatgcaaatgctgcagctgcggcggagcaccagagaaaggcatgccgtggcttcaaggagcgcgtggcggaggagctccaggggctggcgggctccgagtgggcggagggccttgtggagacggtcaagaggaacagggaggtgatcgccgtcgccgtcgccgccttctccctcggcgtattcgtctccagcaggctcttctccaggtccagcaggaactagaagccaaccatgcatgcatctctgtgacaatcgtaatagcgcttgtcaccaccacaaactacgtgacacatacagtccatgatgtggatatatacatgcactgcacagacacaagtgaattgtaaacatgtttataaatgtaacagtgttgatgaattgtcgaacaagtttattcatgt

SEQ ID NO: 139502 - DNA, 1499 bp, Zea Mays
gcgtgccggtgcctctgcctcctcccaccccttctcacgacctccctccgggcaggacaccataacaacgaccgcccggccgcagccactgctctctctctgtctctgtctctgtctcaacaacccgccgctaccgccacccgcacgttcaactaccaactgatcgagggggcgcgccggttgatcgggagcagatcgctcgctactgggacatagctagctagcttgtagtcgctcgctgcgcgtcccgccgccatgaccccagccacggcggttgccgtcgcgtccgaggcgtgcgtcctctcggactccacggtggcgtcgtcgtcgtccacggccgagaccgccgcggcgcgcgcggaggttccggcggccggcagcaccgatgagacgggcagcggcggcggtggggcggcggagcgccggtcccgcttccgtcggatctgcgtctactgcggcagcgccaaggggaagaaggccagctaccaggatgccgccatcgacctcgggaaccagctggtggagcggggcatagacctggtctacggcgggggctccatcggtctcatgggattggtctcccacgcagttcacgccggaggtcgccatgtcatggggatcattccaaaatcactgatgcccatagaggtaaccggagagcctgttggggaggttagagccgtctctggcatgcatgagaggaaggctgagatggcccggtttgctgatgcttttgttgcattgccaggtggctatggaactctggaggagttgcttgagatcattacttgggcacaactggggatccacaagaagccggttgggcttttgaacgttgatggattctacgacccgcttctgtctttcatcgacttggctgtcagagaaggtttcgtatcggaggcggcaaggcgcatcatcatctcagccccaacagccaaggagctagttatgaagctggaggactacgtcccggagtatgacgtcggcttggtctgggaggagcagaagcccaacagcttggtcccagctgctgggatcacctcatcctgatgatctctcaccttccagcctgcaccgcatcatatatacacatataactaagtaactaaccgatcgaagcctgccacaaattttttgttcatctgccaaagtcctaaccaaagggtaattcctcaaggcgtggtctattctcttctattctatgtgctggccggcgtagatcttttttgtttgtttttgctagaattagtacttgcaagcagtagtgactgacgaggatgcatctccatgctgtttgggtgtgttgctgaattttgtattgcacgtggttttagttatgctgcgtctgcgtgccctgtgaggttaaggaattgggcctgtttttgctttcatcgcgtctggcccagaaagatggcacgctgcgagttgacgacgaccacagatccacaatcttctaaagcgtttaattctctctgtcaaatacagtaaaataaaaa

SEQ ID NO: 139503 - DNA, 333 bp, Zea Mays
atgtgctggaaggtgaagtcgaaacaacgacacaccccttgctggagtcggagtgcagtggaatgggcgtcgtgggtgcggcggcaggcaccagtggggagaggaggagcccgagctggtggggatggccttaccgtgtatgacggcgacaggctgctatggtgggggatggcttctcgctctacagcggtgggggagggacctcacgtgttggttgcttcctgcttgtggtggggtgcggcgggcggcagcgggcgagcacgggaacgtctgcgggaagtgaggatggaggagattgcgtccgcccggatggaggagattggaggcgcgtaa

SEQ ID NO: 139504 - DNA, 2496 bp, Zea Mays
atgtccttaaacagtctccaccgggggcgctccgcctccatcccgagttcgcgacccgtcgcctccctcctcctcattttcaagtttttgcttggttttcaccacttcgcgtcctgtctcctgtatgtgagtcctagcgccgccaaggaggccaggccaccaccgctcctgaactgcactgcgctctcctctccgctccaccagcggctgccgggcatccaagtccagtcgacacacagagaggataagccaagagcagccggtgggtgcggggtgaaccgtctgcctggaccgaggtttacgagtgagatgacggacgccggcgctggttccggcctgcagacgccggaccaggtccccaggggagcgggagctggtgcggtcgttgtggtggcccttcgcgccgccgccagggagatctccaagacggccgccgtctgggcgctgacgcacgtcgtccagcacggcgacagcatcctgctgctcgtgctcatcccgccgccgagctcaggcaggaagttctggggcttcccgttcttcgcggggagctgcgcaagtggacacaaggcagtgctgaatcagaggtcggatgtggctgagctgtgctctcagatggtgcggaagcttcgcgatgtgtatgatcccaacaacaagatagacgtgaaggttaagatcctgtccgggtcacctcccggcgccgtggccaaggaatccaagcgggtgcaagcagcctgggttgtgctggacaaggagctgaagcacgaggagaagcgctgcatggaggagctgcagtgcaacatcgtggctatgaagcgctcccaacccaaagttcttcggctgaacctggtgggatcgcattcgcatgagagggaagagtcgtccagaccacctcctcctccggcgccatcgccaccgccacctgagccgagcacgagtccgagtccgagccgagtgccatcgtcagcgacacctagcagcagcccagagtcagaagaagcgcccttcgacactagtaccaccgacgtcggagcgtcctgcgtctcgagctccgattcggacacgaacagcttttcgacgaataaagggacgacgacgacgacaacgacagcggcggccaaggacagcgtccagcgctcggacgccgactctgagagtgaggcttcgtcgctggagccatggatggctaccattttattacagacgcctgcagataggctagtcggaaaccggcccaggcccaggaggacgcccaccgcagactctctgctcgagaagatcgccaagctggacctcctgactgagatcagcgcgatccggagcaggtccgacctgaacttcagagggaacgtgagggacgccgtcgcgttggacaggagcgcgccgccggggcctccgcctttgtgctccatctgccagcacaaggcccccgtgttcgggaagccgccgcggtggttcagctacgcggagctggaggtcgcgaccggcggcttctcccgcgccaacttcttggccgaaggcgggttcgggtccgtccacagaggcgtccttccagacggccgggccgtcgccgtgaagcagcacaggctcgctagctcacagggcgacgtggagttctgctccgaggtggaggtcctgagctgcgcgcagcaccgcaatgtcgtcatgctgattggcttctgcgtcgagaataagaggcggttgcttgtgtacgagtacatctgcaatggatcgctggacacacacctttatgaccgtaacaaagaaacgctggagtgggctgccagacacaagattgcagtaggagccgccagaggcctgcgctacctccacgaagagtgtagggtgggctgtataatacaccgtgacatgagaccgaacaacatccttgtcacacacgatttcgaaccactggttggagatttcggcttggctaggtggcaacctgatggcgacatgggtgttgagacaagagtcattggcacattcggctatctggcgcccgagtatgctcagagtgggcaaataacggagaaggcagatgtctactcgttcggggttgtactagtggaacttgtaactggacggaaggctgtggacatcaacaggcccaagggccagcaattcctaaccgaatgggctcggcctctgctggaagagtgcgccatggacgagctgctggaccctcgcctgggagggcgcttctgcgagaacgaggtctactgcatggtgcacgcggcaaacctgtgcatacggcgtgaccctcatctcaggccgcgcatgtcccatgttctgcgcatactggagggcgggggcggcgacatggtggtggactcagctggcagcaggagctggcggatgcagcagcaccagcgttggcaggagcagagcagcccagcagctcaacgtgattcatcacagcgtgggcaggagactgcgggaagcccgtggagtcgagaacgaaggcagaacttgtgccatagatactagctagctagc

SEQ ID NO: 139505 - DNA, 2427 bp, Zea Mays
aaaacagcggagggtacaccggccggcatgcacatacgcatacttgtgatatacgcaaatccaatcccacaatgaaacagtctgcaggcgacgcggcacggcacgtgtgaagccatgatggatggatggatggtgtaggagagcagtacgcagacagacgcgcctccgcctccctccatggactggaccgccgcggggcgggattgtactccatggacgacgacacgctcatggcatactacgctacctgcaccgtgctccgagcccagcccaaccgatcttcttcctcctgcctgtgcctgcggatctccatgaccacccaccgaccgcgaggtaaaaagatgtgtcagggaagacgaaccggactggagcaccggccccacctactctatgcacctatttaaatcgctcaggttggttgaattgtcctcctcctccctgctcactgcactgtgtcaccactcgctgctccacctcacttcactcgaaggccttccgtccatctcccaaggcgcccccgcttgtcctcttccttccgtgtcggccgaggccacgcacatggcgctgcctctgccacccctcctcctcctcctccttggaatgctcgcctcccgcgcgccggcccagacggccacgctgcacgagcgcgacgcggcggcgctgcgcgacctccgggccagcctgcgcgacctgccgggctcccgcttcttcgacacctgggacgacgcccggagcccctgcgcgtacgccggcgtcgtctgcgcgcccgacgaggacagcacccccacccccacctccgtcacgctacgcgtgtccgtgctcaccctgggcacggggctcgccgactccccgggtctagcggggacgctcccggactcgctggccacactcgcggcgctcacggacctggtcctctaccccggccgcgtgtccggccccatacccgcgggcctaggcgcgggcctccgccgcctccgcctgctgtcgctggcgggcaaccagctgacgggccccgtgccggcctccctcgcggggctgcccgacctccacacgctcgacctcggcgggaaccgcctcgacggcgccgtcccgccggacctgctcctgccggcctcgcccagcctcaaggtgctcatcctcgccaacaacggcggggtctccggtgagatccccgccggcttcgcttcctccgggctgttccacgtcgaccttgcgcggaacgcgctcgccggcgcgctcccgccgctgccgcccacgctacggtacctgtccgtcgctggcaacaccatggagggcacgctggagggggccttctgctctggcgacggcggctctgccagcccgcccctacccgccgacctggcgttcctcgacctgtccatgaacaacttctcgggccaaatcccggcggcgctgttcgcgctgccgggcctctcgtcactgctcctgtcgcggaacaacttcacgggtgcgctggccgtgccgtcccagcagcagcagtgggccgtggtggacgtgagccacaacggcatctcgggcgaggtcccggaggcgctggcggcggcggccagcctgtacgtcaacaacaaccggctgtccggggaggtgccggcggcggtggcacgcagcgtgctggacgggcggatgaccacgctgtacgcgcagcacaacttcctgacggccttccccgtgccgcctgccgcgccgctgccggactccgccgcgctctgcctgtcctacaactgcatggacctgccgatggcgtccgcggccgacggatgccccaccatcggcgggcccctcgaggccaggcccgccgagcagtgccggagcaccaccggcgacggctgacgggcggactgagatgtgatgtgacacgggcgggtggacacgcacgctcgcggcacgtcacccggcacgggtgggctggggacggacacccaggctggctcgctggctgggggcgctttgtccgcttgttttagctggagctcttgttgttttgggtcgtgtgatttcagttcaaaagcgcgacagaattaggagctgcccaggccagttgtttatacaggccgtcgtcctgttccagacgcgtttctgtctgtgggctcttatttcttgggccgtcgtctagtgcgccctggtcttcaatggtttgtttgtttcctggactgagggggtttgctcggtttccctttcttttctgtttgaggcccatggaagccgatttgccacatgggcgttctcttttttttcttcttccccttgtaccctagaagatttaattgccacacggcccatgacatccagttaggctctccaaagatcttttacttgtcctacttcttatttaaaactttaatttagctttatttgtttggtattataatctgtcgagattatagtataactaatccaccaggtaac

SEQ ID NO: 139506 - DNA, 1012 bp, Zea Mays
gtgaaactgcctgctgccgaggtggccgacggagagcatgctgagttgaaaaggggtgttggccacgctccacgataagtatgttatgttgcccccctgtcattatttatttatttgtttatttcaatttaaatttgcatgcagttaggctggtaacgtgaacagtctctaatcacatgattgctgttccctgtggaaggaatgcatgggtcaccacattgtgttatgctgccttggggcacgtagtttatcaacaacatatcttatgtttttttttttgtagaaaaaatcattcccgtatgcccttgactaggaaaacatatgtcggcccatcatctcagaaaattctcatcctggaagtgatgtccttaggattgagattcagattctcatcctgtcggagcatcgccaaatgtagcggtggcctgggcatcgcaaattctgtaggtactactagaatggtgaatggaggcgccgcaccacacgggtgggccggtttttttttggtttttaacctttttcgaacaaaacttacaaacttacatttagatccctagatgatttatttcagttgctataggctatgacgccgagttaacacagaacggcggcgacgcggcgggaagaggataacggcggtgtggcatgagaagatctatggtgccgagctaggggtcacgtcggcttgcacgtcaaccctagccgccgtcgtcacgtaagagctcggcgtcataggccatgacgccgagctaggggtctaaaaactgaagtaagttatccagggatcttagtgtaagttttgttcaaaaaaaaggttaaaaaacaaaaaaaaatcggcacaggtgggctctgccattggtggtcgtattagatcagagccggactttgtcaggacgtgagcagaaaatgcttaaattgtcattattgcccacagctcagctcagctcagacaaccatcggctccgtccgtcctgtactagcaagaaacaattcaaaccgaccgtttctatcc

SEQ ID NO: 139507 - DNA, 587 bp, Zea Mays
tagcttccttcctcaaccgaaccctagtcgccgcaacccaaccctagccgccgcacccatggatcgaaatgctcctgtcgtcgctgtggcagatgctgttgatgctgctcgtgctgcggctgttgcagctgcggaggctagatgtgctgcgttggtggctgagaaggaggcacaagcggcggtgcaatctgccagtaatgccgccgacaaggttaaacttgtcgtcaaagctgtgaagtatcgaagctttgttgaagataactccaaggaacatgttgatttcaagtatcatgttagcgtcaagaactcactgcgatatgccattcaagagatgagtagacaatcttcactgttacataacatgaataggatgtgttgtagtatccctgaagttgaagggggtaaggttggaaagcttgctgcccatttgaatgatatttgcaagaacctcgagaagacttgtattgtctgtgaagaggatctggagaataaatctcctggttgggaccttcatcatcccccttcggatgttgaagaggaccctgacatttctgatgttgaggaccaagtggatggatatgtgtcag

SEQ ID NO: 139508 - DNA, 1373 bp, Zea Mays
atgggtgatagacatgattggatgtatgaaggtttcaagaagggtgggtgtcacacaagtgaatggtttgccaagacgcagatgtttctggaccatgcagctgctttgtcacaaatagataatattaggatgcttgtgtacgagtatgtgaataatgggaacttagaacagtggcttcatggtgcaatgcgtcagcacggtgttcttacttgggaggcccggatgaaagtcgttcttggaattgccaaggcgcttgcttatttacatgaagccatagaaccaaaagttgtacaccgtgatatcaaatcgagcaatatcttaattgatgaagaattcaatggcaagctttctgattttggactggccaagctcttgggtgctgggaagagccatatcacaacgcgagttatgggcacattcgggtatgtggctcccgagtatgccaatacaggtctgttaaatgagaagagcgatgtctacagttttggggtgctactactggaagcagtgactgggagggatccagttgactatggtcggcctgctaatgaggttcatctggtggagtggctgaaaatgatggttggcactagaagagccgaggaggtggtggatcctgacatggagttgaaaccagcgattcgtgctctgaagcgtgctcttctagtggcactgcgatgtgtagacccagatgctgagaaaaggcccactatgggtcaggttgttcggatgctcgaggcagaagacgtgccttcacgggaggaccgccggagccggagaggccacagcagccacgcagacaacgagtccaaggcaagttcaagcgagtttgagataagcagtgaccgaagagagtcggggccgtcatcgaggttccaggcctaactcccagtgagagcacggcagattaccatctccaagaacccggtttcagttcagtacgccgggttatcccttaccttgcctgctcgatcatggactcaggccgttcgaaatatttgggaatccttgcggggtggggctttattggatggttggtactgatagagataggggaaggcttgcatcttgtgctggagtaggtattttactcccatttccttggtggtgggcggagtcggatcgattccgtgggaggggaggttgagacttgtggatgtggatcctattcgtgttctgtttgcccagcagcatgtacagaaactttattattattccctggttcttggtttaggactcatcggcgagtagaaaagatgactggctatttcctcatgtcatgagtctctccaaggtcgaagcaatctatgccgttcatttactgtagacatcgctccaaggtcgaagcaatctatgccgtcatcctttccgta

SEQ ID NO: 139509 - DNA, 549 bp, Zea Mays
aggagagcaagttccaacaccctatctagaagaccacatcctgattcctcattgtttcatgttacttcggtagtacctcaatggatggatcaggcgttggatatctatgcagctgacaccttctcatagcagctcctcactaccctggctactaccacaggtaacaccggaccttataccttgcaatcaggcattctcaaatataaaggccatgtttgggtggggtcttgtgaagctcttcagattcagattatatctgcattacatgacaatctagttgggggtcactcaggatttcctcttgcatatcaaagaattaagcaattgtttgcctgaaagaacataaaacctatgatcaagtcatatgtggcagcttgcacagtttgccaacaatctaagcctgatcgacacaagtaccagaggctactttgcaaatcataagcctggacttcattgaggggcttcccaggtctgctcatggacactattttggtggttgtggacctattctctaaatatgcacacttctcgacattgttgcgtccctac

SEQ ID NO: 139510 - DNA, 436 bp, Zea Mays
acaaccagtcgcctacccactgcctcgcatcggcatcggcgtgccggtgctgccaagctaaaattccccaactcgcgtcgcgtcgtcagtgtgcgtgccagtcctccggcccaaaccccccgcacccaacccccagccccggcaaccgatggcggggtccgcggccgacgcggagcaggagcaaaagcgggcagcggcggcggcgtacgactacgagggcgacgcgcgctgggccgagtactggtccaacgtactcgtcccgccgaacctcgcctcccgccccgacgtcgtcgaccacttgaagcgcaagttctaccagcgctacatcgaccgaaatttcaatctcgtatactaccgaaaacgagaaaaatcactgaattttggtgaatctcaaccgaaatttgtaacactggtcaggatactgatactgttatag

SEQ ID NO: 139511 - DNA, 2096 bp, Zea Mays
gccccgatcgtcttttcccctgctgccaaggtccaaccaaacacgatcggaggatagggctcccctcccggcttttctatccctccctctcctctgctcctgtgctatcctccgttcatcactcccccaggatcccctgcagctaccattgctacaacacgggtacagtacaggtgaggagggagaaaacaaacgaacgaaataaagagagtacgcatgggtttgcagatgatccatggcaggccctgcgccttgtgctgcccgtcctcctcctcctcgtcctccgccttgtggatgaggatgcaggcccagctgcccccaaagcagtctcaccatccattgaacggaggaagggcaatctcctctgaatccctcgcggcactggcatggcatttcctgctaaggcgtcgcagcagggacggtgccacagctctcgcatcttcatccggggtgcttcaaatcgcagaggacaaatcatctgcggccaacttgacaaagcacaaggtgagtgcagaaaggaagctcctcaacgacgctcttgacagaactggtgtgcgatatgagactgagagctggatggatgaagagacatcgtcctggatggacagggatctcacggacagcgatttgcggtaccgcttgctaatgcagaacctcgaggaactggagaccagcttggttggtaaagacctggagatggacatccttgagcagcttggggctctgggatcgttcaacgcttctgtggccaggggtgtctcggcgttacatggtcgaccagatggctctctgcttgatgatccggagccggagacgactcctctggatgcggggcaagaagacagccaagtggtcgtcgtccggagtggcaagagccaggagaggaagctgagaaggatgagagcatcatcagatgagaaaggatccaggacctcggtgaaggtgaacccaccacgaagacccaagaaatcccgtaaggcgagtagcagccagtttatatccgagtggaaaagtcacccaggccaaaggaggatcattgtgcgtgagcaatcagcactgctgtccaccatcaaggaatgtgcaggtcttgagaagataagggagaagatggtgaaggaagggcaggaggtgagctaccacaggtgggcggaggcagctggggtggacgaggcagagctggtgagcaggctgcaggcaggttactgctgccgggacaggctactggtgaccaccgagtggctggtcaggtgcatcgcgagaacatacaccggcatggggacggccttggacgatctgcttcaggctgggaagatgggcgttcttgacggcgccgagaagttcgacagccggaaggggtgcaggttctccacgtacgtcaagtactggatcaggaaagggatgctcgctctgctggctgaaaactcaggagtcaccctgctgcctgcaagaatggagagcatcatgcgcaaggtgaaggaggcgcggcgtgggatccggtacaggcagggcaggaacccgtcggactcagaggttgccgccgccgtgggcgtgtcggtagccaacgtgaggctggcgcgcaagtgctctcgcagggccgtctcgctctactcggaggtcgcgatcggacaggacgtcaagttcgcggaggtgatcccggacgagtcggcgtctccggacgaggcggcgctgttccggggccagctgagggagcggctgctgctggtgctgggcaggctgcccgcgcgggaaggacgcgtgctgcggctgcggcacgggctggaggacgggcggtgcaggtcgctggaggagatcggcggcatctacggcgtctccaaggagtggatcaggaagatcgagaagtcggccatggccaggctccgggacgacgacgccgtgcgccgcgacctccacgacttcgtctagtctgtctgcagtgcactagaacaatttgttagctggtagggaacgatgtcatgtacgtagtaccatactatctatcagcagactgaaattgaagctgctattcacacgaaatatacaatgatagagatttgtgattcatgacggttataatgtcatgcttgctttcatgtttc

SEQ ID NO: 139512 - DNA, 2407 bp, Zea Mays
caatctatttgtttccgccgccgtgtctgtctcggcccaggcaagccaccgcatgcaccgccgtcgctcacaccgttccagcgcctcgtaccctcactgacgtagtgcgcgctgctccgccaacgcccccagcgacccaaacagactccgacccgcgccgtccgttccgtgtccggcctcgccgccgattctctcggagctcctgccctgccgtgcgggagcacttcttcgaacagatggaggctcgccgcgcgaggccgagcaaccagacgcactccagctgttggacgaatccctcctcctccacgccaggccctgcgtcgcctgaattcctcactacggtccgcggagcagcattttgcggccgtggcttcgcctccgccacagcaaggttgtcgtcatactcctttttatgtgtgaagaaggagaggaggtgcttatcgtagtcagtgacagtggtggatccagcagctcttgtggaaagcggcggaggggagttgacagtaacaacagcaacaaccgcggaagggggtgtgatgcttgcttgcagatgttgctgttatcgccttgggggtgattattctgtcctgtgctctaatgatgctcggaatgatgatggaactccccgtcagtgcgcctggttaatcacaatgaacggaggaagggcaatctcctctgaatccctcgcggcactggcatggcatttcctgctaaggcgtcgcagcagggacggtgccacagctctcgcatcttcatccggggtgcttcaaatcgcagaggacaaatcatctgcggccaacttgacaaagcacaaggtgagtgcagaaaggaagctcctcaacgacgctcttgacagaactggtgtgcgatatgagactgagagctggatggatgaagagacatcgtcctggatggacagggatctcacggacagcgatttgcggtaccgcttgctaatgcagaacctcgaggaactggagaccagcttggttggtaaagacctggagatggacatccttgagcagcttggggctctgggatcgttcaacgcttctgtggccaggggtgtctcggcgttacatggtcgaccagatggctctctgcttgatgatccggagccggagacgactcctctggatgcggggcaagaagacagccaagtggtcgtcgtccggagtggcaagagccaggagaggaagctgagaaggatgagagcatcatcagatgagaaaggatccaggacctcggtgaaggtgaacccaccacgaagacccaagaaatcccgtaaggcgagtagcagccagtttatatccgagtggaaaagtcacccaggccaaaggaggatcattgtgcgtgagcaatcagcactgctgtccaccatcaaggaatgtgcaggtcttgagaagataagggagaagatggtgaaggaagggcaggaggtgagctaccacaggtgggcggaggcagctggggtggacgaggcagagctggtgagcaggctgcaggcaggttactgctgccgggacaggctactggtgaccaccgagtggctggtcaggtgcatcgcgagaacatacaccggcatggggacggccttggacgatctgcttcaggctgggaagatgggcgttcttgacggcgccgagaagttcgacagccggaaggggtgcaggttctccacgtacgtcaagtactggatcaggaaagggatgctcgctctgctggctgaaaactcaggagtcaccctgctgcctgcaagaatggagagcatcatgcgcaaggtgaaggaggcgcggcgtgggatccggtacaggcagggcaggaacccgtcggactcagaggttgccgccgccgtgggcgtgtcggtagccaacgtgaggctggcgcgcaagtgctctcgcagggccgtctcgctctactcggaggtcgcgatcggacaggacgtcaagttcgcggaggtgatcccggacgagtcggcgtctccggacgaggcggcgctgttccggggccagctgagggagcggctgctgctggtgctgggcaggctgcccgcgcgggaaggacgcgtgctgcggctgcggcacgggctggaggacgggcggtgcaggtcgctggaggagatcggcggcatctacggcgtctccaaggagtggatcaggaagatcgagaagtcggccatggccaggctccgggacgacgacgccgtgcgccgcgacctccacgacttcgtctagtctgtctgcagtgcactagaacaatttgttagctggtagggaacgatgtcatgtacgtagtaccatactatctatcagcagactgaaattgaagctgctattcacacgaaatatacaatgatagagatttgtgattcatgacggttataatgtcatgcttgctttcatgtttc

SEQ ID NO: 139513 - DNA, 437 bp, Zea Mays
ttctgatcatatcactgttctcgtggcgccgtagcatagttcagacattcatgtactggcaggtgttgaagctgatgtaccatgctcccgtgacatccagctatcaccagagtacctgggcgaaaatcggccggattgtgaacccgtacatccaccgctacgctccgttcctccagacgcccatttctgcgatccaaagatggtggttcaggtagagagacaggccgagctgcaaacatagcacagtcgagtcgccgcgttcttatgtaatgctgtaaccttttcccagaattctggagggccattatcataacaagaaggtttttagctgcagggccaccaacgccgaattgcaaaactcagcaaaaatgttccgtgttttttttttgttgggcaccgatgcctgccttcgtagatttgcttgcaatctttgcttc

SEQ ID NO: 139514 - DNA, 532 bp, Zea Mays
ttctgatcatatcactgttctcgtatgcctattcagatttccgtgctattctgaaacttaagttttgtctgaggaactacggagtacatctttgacctttaaccttccgtgttgcaggtggcgccgtagcatagttcagacattcatgtactggcaggtgttgaagctgatgtaccatgctcccgtgacatccagctatcaccagagtacctgggcgaaaatcggccggattgtgaacccgtacatccaccgctacgctccgttcctccagacgcccatttctgcgatccaaagatggtggttcaggtagagagacaggccgagctgcaaacatagcacagtcgagtcgccgcgttcttatgtaatgctgtaaccttttcccagaattctggagggccattatcataacaagaaggtttttagctgcagggccaccaacgccgaattgcaaaactcagcaaaaatgttccgtgttttttttttgttgggcaccgatgcctgccttcgtagatttgcttgcaatctttgcttc

SEQ ID NO: 139515 - DNA, 1272 bp, Zea Mays
cgcagcgggtatcgtcgtcggctcgtcgccggcggtgccaaattcccctttccccctcggcgtcgacgggccgaacccccgcgggtgctgtctgctgtctgagcaggagcagaagcaggctgcgggcggggcactgccccgtcgtcctcgtcccgccgcgacgtgtatgcgacgcccgagatctgtcccacgatttcgaggaaatcgacaagatcatggagcacaacatcagtgtcatcgttcctcatcagaacctcagcaacctctgcgggcgtaaccgtcacctccttgatcagtttctcaatctctggatacgtgtcatggtactcgatggagtggtagttgttggcaaggatttggaaagactctggggtgcaataccccatgtggatgtgcatgtccatccttccaggccgcagcagtgccgggtcaagccgctccttgtaattggttgtgaagacgatgatcctttcttccccacttgttgaccacagcccatcaacaaagttgagcagtccagacagcgttacctgttcagaaaatccaaattatttgtcaagataactgaggaagtggtggaatcgagaagatagtactcaccttgccttcccccttgttttgttctgtagaatctgactcatcatgtccctcggcctcctgccgttgtttgagttcgatggtgcagtcaatatcttcaatgactagaatggatcggttgtccatgttaacaagaagcctcctgaggtctgagttggatgtgaccgcagttagctcgagatcatatatgtcaaacctgagatggttggccatggctgcgattaggcttgacttcccagtcccaggtggaccatacagaaggtcatcgatgatggactgcttcagcttcttgtccatggcaagcgtgtcgaatgtagatgggtggtggagttcaatcggggaccaattgccgtactcagtcatgtgtatcatgagggttctctcctgggctttaatggccttggctgtggccaaaatgaacgggaggtacgatctgagggctttgtccttgtgcttcttgttgaaggtcagctcgaagaagtgggactcgttctggctgctgttgagggagtcatttgagttgtctttgcagacaaggcaccacttgaactccgtgccttgataaacatcgagcatctcgtcgccctcatccatgctgaccatcatcttgtcgtcctcgtccatgctgctgacgcgcaggcgctgctggatgtcggtgttcatgcgcgtggcgag

SEQ ID NO: 139516 - DNA, 601 bp, Zea Mays
cttgaggaactcaaggagatccttgagtacgatgtcactgttgtcgttcctcattagaagttcagcaacctccgcagaatccggaacgactccggggtgcagtaccccatgtttatgtgcatgtccatccttccaggccgcagaagtgctgggtcaagccgctccctgtagtttgtggtgaagacaatgatcctctcctccccgcttgtcgaccagagaccatcaacgaagttgagcagaccagatagcgtcacctgcagatcaccaaaattccaaactctgccgacgcagtgggcctggcggtacgcctctcgccttcatcccgcagctgcagctcaatgctgcagtcaatgtcttcaaccacgagaatggagcggttgctggtcccgacgagcagcctccggaggtcggagttggacttgacctcggtgagctcgaggtcgtagatgtcaaacttgaggaagttggccatggcggcgacgaggctggacttgccggtccccggtggtccgtagagcaggtagccccgcttccaggccctcccgatcctcctgtagtagtccttcctcctgacgaaccgctggaggtcctcgacgacgga

SEQ ID NO: 139517 - DNA, 97 bp, Zea Mays
agggcctaagtatgtcacgaaatatatggcggattttagttttcacatgcactcagcatcatgtacctggcactggcactgtagtgcacatttttat

SEQ ID NO: 139518 - DNA, 2202 bp, Zea Mays
ttcgtctcccgttcgcccccgcgtgctctcttgtcgccactgccgcggccgtcgctctaccgcctctacgccaggtgcctagtcctgtcctcgccggtcccttcgccgagttttcatcgggtccttcgccaggtctccatcggtccggtcgcctgcgacgagcatccaccaggaatgtaacggcagggctgatcaatcagcaactacgcctctccgcaggtccccacgactacacgtggaagataagagtttgggcaagtcaccattgccaccaaatcgccgggagacctctgctaacagaaagactaaaaatgctcataggaaatacaaaaatcaagagagcctgaaaaggaatagcgcaagtgctgcattatcacctaggaaagatatttcagatgtgtctaacaaaaagagtgacaaacatgagttaaagcccaaccgttgtgaagtgctaacaggaaagaggaagagaggaacagaaaggaggctgtcatcgaagaagcaacgttgccaggatcccaaactattgcctgcggtttgccaagagattgcaccttgcaatgaacccagaaaatctacacacagaaggattgaaaaggacccctctattgaggaatttgaggtgaagcttaaagttgctaatgagagattgacaaacattgatgaaaacatcaacaagctaagtgggaccgagagagaagaaatgggaaatttctgtggttctgattggacaaaagagcaggacatggcattgcgcaaagcttacttcagtgcccgaccatccccacatttctggaagagagtttcaaaaatggtgccagggagatctgctgaagactgcttcaacagaatttataatgacctctcaacaccgactccaattgcaccacgtcccagaacaagtaaaacaacattttctcctataggaaatctcacattatctgatccaaagcttccaaatatcttggaacctacagtcggaaggcaaaagaccgctaaccaaaagagtctagtagcacagaagacagttaggcatttgttgcagaagcattgccgcattgaccaagctcaagaggccgaccacttctcaatttttgaaagctcaccaagtgccttacaattgaacttatcttttgaagattctcctggtactcctgacagttatatgaattcagattctctaggcaagcacagtggaagttcttcagcacggaagaaaccattttcaaggttaagaactaagccatctgaaccgagcccagcagttctaaagcctataaagaatgctatcttacatgagaagtacattgatcaattggcacgtagagaaggcacaaaaaggcctcgcagaaggactccagcaggctctaaaactgctgattctgggaagtctctttctgagcagcaagctggtagtctgaaggctgctaaaaatgctctcatctcagaagcaacggacttcataagcagttttaaggcgctgcaagccaattcccttgcacatgttgtggagaatagcgaagacgagattgaatgtgatgccagtgattgtagctatgctgataaagaatgaggaggtgcttacagtcttgatgcccagcggcacttagcaatcatttcctttatgtcaactgactttagtcatcacttatcagtgcctgttgctgcaataaggctaggcagttgtcagggctgtctattctgcctgatgctgtatttagttttgaacctcttagtgccctcagagatgttagttagttgtgaaagtgctaccttcatcgtgccttatgaagactgaaatcactggagattacaatggtcgaacctgattctcttgtttgcataaagtagaaagcttcatcaaacatagtttgttccactttttttcttgaacacacaagagaactgcatatcattttcattaaagaagaaaaaaatatgacagatccagtgccagaggcccccacatcaatggggtatggggaaggcataaactgagttaaacctccccgcaaaaacagaaatgaatggtctgttcaattgataaggaggtttcagccatgttacattagtgcggcgctaattaaaaatactctccatgtaagatccacatagttttaccttttctttccagtgaccttatgaacccaggtaagatgtatctcagaattagtctcctaaagcctctgaattttatgcgtc

SEQ ID NO: 139519 - DNA, 2491 bp, Zea Mays
ttcgtctcccgttcgcccccgcgtgctctcttgtcgccactgccgcggccgtcgctctaccgcctctacgccaggtgcctagtcctgtcctcgccggtcccttcgccgagttttcatcgggtccttcgccaggtctccatcggtccggtcgcctgcgacgagcatccaccagctactgggtgaacatgggcacaccaatgtcgccgtggaaggggcggctgcgctctcaccacgcgaccgttcaaagtttgtccaagaggaggctcccttctcggaccaagaacccggaggagaaagagaagctccgaacatcgacgaagaaggctgccccgaagaagacggcgagaggtcgccccgctggagctgctcaacagcagccgatggctcgcttaggactgtcgtcgcggcatgctggaagagactctgagcatccagttgtgatagacgatgatgtaaacggggaatgtaacggcagggctgatcaatcagcaactacgcctctccgcaggtccccacgactacacgtggaagataagagtttgggcaagtcaccattgccaccaaatcgccgggagacctctgctaacagaaagactaaaaatgctcataggaaatacaaaaatcaagagagcctgaaaaggaatagcgcaagtgctgcattatcacctaggaaagatatttcagatgtgtctaacaaaaagagtgacaaacatgagttaaagcccaaccgttgtgaagtgctaacaggaaagaggaagagaggaacagaaaggaggctgtcatcgaagaagcaacgttgccaggatcccaaactattgcctgcggtttgccaagagattgcaccttgcaatgaacccagaaaatctacacacagaaggattgaaaaggacccctctattgaggaatttgaggtgaagcttaaagttgctaatgagagattgacaaacattgatgaaaacatcaacaagctaagtgggaccgagagagaagaaatgggaaatttctgtggttctgattggacaaaagagcaggacatggcattgcgcaaagcttacttcagtgcccgaccatccccacatttctggaagagagtttcaaaaatggtgccagggagatctgctgaagactgcttcaacagaatttataatgacctctcaacaccgactccaattgcaccacgtcccagaacaagtaaaacaacattttctcctataggaaatctcacattatctgatccaaagcttccaaatatcttggaacctacagtcggaaggcaaaagaccgctaaccaaaagagtctagtagcacagaagacagttaggcatttgttgcagaagcattgccgcattgaccaagctcaagaggccgaccacttctcaatttttgaaagctcaccaagtgccttacaattgaacttatcttttgaagattctcctggtactcctgacagttatatgaattcagattctctaggcaagcacagtggaagttcttcagcacggaagaaaccattttcaaggttaagaactaagccatctgaaccgagcccagcagttctaaagcctataaagaatgctatcttacatgagaagtacattgatcaattggcacgtagagaaggcacaaaaaggcctcgcagaaggactccagcaggctctaaaactgctgattctgggaagtctctttctgagcagcaagctggtagtctgaaggctgctaaaaatgctctcatctcagaagcaacggacttcataagcagttttaaggcgctgcaagccaattcccttgcacatgttgtggagaatagcgaagacgagattgaatgtgatgccagtgattgtagctatgctgataaagaatgaggaggtgcttacagtcttgatgcccagcggcacttagcaatcatttcctttatgtcaactgactttagtcatcacttatcagtgcctgttgctgcaataaggctaggcagttgtcagggctgtctattctgcctgatgctgtatttagttttgaacctcttagtgccctcagagatgttagttagttgtgaaagtgctaccttcatcgtgccttatgaagactgaaatcactggagattacaatggtcgaacctgattctcttgtttgcataaagtagaaagcttcatcaaacatagtttgttccactttttttcttgaacacacaagagaactgcatatcattttcattaaagaagaaaaaaatatgacagatccagtgccagaggcccccacatcaatggggtatggggaaggcataaactgagttaaacctccccgcaaaaacagaaatgaatggtctgttcaattgataaggaggtttcagccatgttacattagtgcggcgctaattaaaaatactctccatgtaagatccacatagttttaccttttctttccagtgaccttatgaacccaggtaagatgtatctcagaattagtctcctaaagcctctgaattttatgcgtc

SEQ ID NO: 139520 - DNA, 626 bp, Zea Mays
actttccagatcatcgcacgacaaaagcatggcggcgggctacggcgaggaactcctgggcagggtgtcgggcctggtggcggcgtgcacagtgcgcgtgtcgcgcgcgacgcggcgcctcctccggcgccaccagaggaggaggccaacgaagcaccaccagacgacggccgacgtggttgcggcggcgctgtgcgcgcgcggggcggccatcgacaagggcagggcgtcgtcggggtcggcgggcgaggtggccctctggagccggcggatcctgatgggggagcgctgccagccgctggacttcgcgggcgccatccactacgacagcttcggccgccggctggcgcgcccgcccgtgccgccgcgctccgcgtcctccctgtcgtgccgcggcgacgttgacgcgggctactacccggcggccgagaacggtgacgccgtctaggtcagctggctgatgatgtatggccctcatcattcatttcttaggttaattgtcgtcgtcgatggcatgtataaagacagtgtacgcgcgtacgtacgtactccattcgattcctcgttcgttgccagatgatccacatgtgtttctaattataatttatgaaaactgtcctttttgc

SEQ ID NO: 139521 - DNA, 2073 bp, Zea Mays
atggacagccgcgcgcccgcgctgctgctgctgctgctgctggcgttgaccctctccctagcggccaccgcgggcgcagacccgccggagcgggagcggtcggcgctacgtgccttcctatccggaacgccgcacgagcggccgctgcaatggaacgcatccctccccacgtgctattggacgggcgtccgctgcgactcccccgccaacgccacggtgaccgagctccacctccccggggtgggcctcgtcggcgccgtccctaccggcaccctctccggcctccagaacctccaggtcctgtcgctgcgtgacaaccgcctcgcggggcccgtcccgcccgacgtcctcgctctcccgcgcctccgcgcgctctacctccagggcaacctgctgtcgggcgccgtcccgccggagctcgccacgggggcgctgcccgagctcgagcacctcgcgctctcgcgcaaccagctctcgggacccataccggacgcgctgctcgtggggctgcccaggctacggtcgctcaagctcgacgcgaaccggctctccggtggcctgcctgctgggactgggagcggcgccaggctggaggcgttcaacgtctcgtttaacgacctccaaggacccatccccgcgaacctcgcgcgattcccgccggagtcgttccaagggaaccccggcctctgcggcaagcccctcgtcgaccgcccgtgcgccgtgccgtccacgggggcgacgaagaaacggaagctttctggcgcggcggtcgtggccatcgcggtgggctgtggcgcggcggccctgctggtggtggtgctccttctatccctgtgcgcggtacgccggcgccgtcaacactcggcggcggcggaggaggcgaaggcgacgccgcccacgcgcgggctgacggcgtcgggcggcgacttcacgtcctcctccaaggacatcagcgctgccgccggcagcgcggagcgtggccggctggtgttcgtggggaaacacgcgcacctccggtacagcttcgacctggaggacctgctgcgcgcgtccgcggaggtgctcgggaagggcggccttggcacgtcctacaaggcggtgctggaggacggcgccaccgtggttgtcaagcgcctgcgtgacgtggcggcggcgcggcgagagtttggcgcctgcgtggaggccgcggccggagccgccgaggggcaccgcaacctggtgccgctgcgcgggtactactactccaaggacgagaaactgctcgtcctcgactaccttcccggcggcagcctctccgcccgcctccacgggagccgcggcaccgggcggacggccatggactgggacgcgcgggtgcgtgccgcgctgtgcgccgcgcgcggcgtggcacacctgcacacggcgcacggcctggcgcacggcgacgtcaagtcgtcgaacctgctgctccgcccggaccccgacgcggccgcgctgtccgactactgcctccagcagatcttcccgccggctccagcgcgccccggcgggtaccgcgcgccggagctcgcggacgcgcgccgcccgacgctgtggtccgacgtgtacgcgctgggcgtgctgctcctggagctcctgacgggcaggtcgcccgcgcaccacgcggcgtccgggtccggcctggacgacggcggggccatggacctcccgcggtgggtgcagtcggtggtgcgcgaggagtggacggccgaggtgttcgacgcggagctggcgcgggcgggcggcggcgctgcggaggacgagatggtggcgctgctgcaagtggccatggcgtgcgtgtccaccgcgccggacgcgcggcccggcgcccccgacgtcgtcaggatggtccaggaggtcatcagcgggcgcaccaccacggaggagaacgagaggattaggggcgcggaggaggaggcggagcggtccagaggcccgacgccgtgacgtgacgacggtgcaacgcgacgcacacacgtacatggcaaaattgtttgctttaagtttgttccaacaccttcattgtttagtacagtatctaactcggtccggcat

SEQ ID NO: 139522 - DNA, 1661 bp, Zea Mays
gtcgacacgagcgaactccaggataaggtctggccaggctgctcgtcccgtcctcctctcgtggtcttccagaagccatggccgccgccgccgtccactgttccagggcatacgttcctttgagctctggcgcttactcaaggaaaaaaccaacttgccacaagtattgtgcatcggtggagcttacttggaaaccatgccgactagttggatatcgggattttcgactgaaagagctagcttgccaacaattggcccatggagtggatgaacaatatcctgtgaaaagtagcactgtggagcaagctcaggaccgccagccctgtctgccacaaggtgatgcttacttcgctggcctgtcgaagaaagaaatcgagagaaggcggaagattggcgctgccaacaaggggaaggttccctggacaaaaggcaggaaatggagtgaagagcacaagaaggtcatcaggcaacggactgctgaagctctgagagatcccaagatcaggaagaaaatgttagggcaccgtcagctacatagacaaacaagcaaagacaagataagtgcggcgctgaggacggtctgggagaggcggatcgtttctgtccgatccagacagaaggttctgcagatctggtccaacagtatagctgaagcagcaaagaacggtggtcacggccaagatatgcttggctgggacagctacgagaggatcaagtcagagatggtatctacgttcctgtggatcaaggagaggggacgtatggtgaagaagcttgaaagggccgtggcaaaaatagctgccaagaggcttcaagtggtacggagaagggaagaacaggccacaaggatgaagaagctgaaacctgactgtcagacgttgctgcaaaacgcggaccgtcaaccagcaagagtggtagtatctgcaaggccaaagcttaaggagaggctagctaagtggcacggtcgaaagaaagagctcgagacagtgataagttcacgggcaaggaaaagaggattgcgaaatccaccacgaaggcaaatggcagcagaaagcctcgaggctctgtcaacttcggctgcaggagcaccataggaaggatgggcatgtaccctagctactgagcagctgggagctcgtagtcgccttatagagaagcagaagcccatgcctaatgaccaattcattaggcaggcacggggttttttgtttgcgttgctgaaactacgtgtagtaatttttgttttatagccttattaggctttctgtcaaaggaacatgtttatgctccctccaatgaaactacgtgtaacatgatttatgggtacaaaaaataaatgtactagaaaaatacagttaaaaaacatttgaataccactactcgtacacttacacttacgttaattgtcgaaatgaactgattactgccattttgggctgggcgtgccatacaacaatcatggggcaacatgtaacgtacgtctagtctaatcagcgcttcccaaacttaattaaagctggtaccaaaccaaggtggtagctgctacattcacaacgttgatgcgccaaacaagctggtccaatagctacctaactgcatcacacatatacacagctacaacaataggccagaatatccataacacaacaagaactatcctg

SEQ ID NO: 139523 - DNA, 3413 bp, Zea Mays
cctcttgcttttttttccatttcccctccaatgaccgcgcaagctatctccctctcgctgccgacgccgcccacccaccaccaccatcatgccaaacctccacccccgcctcggctcctgctcaaagccagctcgctcccggaagcgctgcgaggcgtggagacattccgcgacgggcggctcctggtctccctcctgcggcagtgtgcagatgtcccccacggggacgaagacaccgagcgcctctccgcggcgcgtcacctcgctccacagctgcactcgctggccgtccgtgcgggccgcgcccgggacccgcgcgtcgcgtgcgcgctcgccgacctcctcgcgcgcctgggccgctgggcctcggcccggcgcttgctccaggaagcgacggcagcagaggaggaggggaaggaagagggagacgaggaagtggatacgatgctgtggaacaagcgcgtggccatgctcgctgaggcggaggagtggggcgacgcgatcgccgcgttcgcggagatgcgggcgcgcggggtggctcccgacgggtacgcgtgcgcgcgggcgctccacgcgtgcggccgcgcgggggcgccccgcgaggggcaggccgtgcacgcgcacgccgccaaggcgggccatgtcgccgcacacccgctcgtgccgggcttccttgccggcatgtacgccgagagcgcggacgtgggcgcggccaggcgggtgctcgagacggaggacgcgccgcccgtcgcgtggaacgtcgtcgttgcctgctgcgcgcgcctcgggctcgttgacgacgcgctggacctcgcggagcgcatggcgaggtcggggccggtggaggccagccccagcctcgcgacgtggaacgccgtgctgtcgggctgcgcgcggcacgggcgcgaccgggaggcgttcggcgtggttcggagcatgctggagcgagggataccaccggactccagctccatgtcgagcctgctcaagtctgtggccagcttggggctgcttgcgcatggcatggaagcccattgcttcttcctcaggcaccggctcgagccggacgtgtacactgggacggcgttcgttgacatgtacgccaagtgtggccgcctggaatacgcccagaaggtgttcgacacgctggagcttaggaatatcaccacatggaactcgctggttgctgggtactcgaacgcgggtcagttcgaccatgcactggaccttgtggaggagatgaaaaggaacaggcttgaccctgatataaccacttggaacgggctgatcagtggctattcgatgaacggtcggagctcgcaggctgtgctgctgctccggcagatgaaggcgattggattgacacccaatgtggtttcttggacctcgctgatctccggaagctgccataatggagactacgaagattcgttctacttcttcaatgagatgcagaaggaccacgtccagcctagcgtggttaccatgtctgtgttgctgcgggcttgcgcagggctggctttgctggcgaaagggaaggagctgcattgcttcgcactgcgaagaagagcgtatgaccgtgacatggttgttgcaacagccctaatcgacatgtactccaagtcaggaaacctggcaagtgcgacgcggatattcgaaaggattcaggaggagaagaatctggtgtcctggaatgcgatgctcaccgggctggcagcacatgggcagggccgtgaggcaatagcgctgttcgacgacatgtgtagtgctagtgcaggagcaggagcaggattgaagccagacagtataaccttcacagcgctgctcactgcttgcagatcaatggagttgatcactgaagggtgggactatttcgatgccatggagagcagatacggcgtgacaccgaccgttgagaactacgcgtgcatggttgatcttttggcaaggtgcgggtacctggatgaagcgacggacttcatcaacaggtcaccattcaagtcagcggcgagcctatggggagcccttctaaccggttgcgtggtacatggaaaccttgctcttgccgaggcagctgcaaggaaactgttcaagctagagccgtacaattcagccaactacctgcagatggtgagcttgtacgagcgtgaacagatgttcgatgaagccgagagcctcaagtatgcaatgaaagcgagagcgctgaacactcgacctgggtggagctggatacagatcgagcaaagcatccatgtgttccaagtcgaggggaagccaccacacccagacaccgcggagatataccaacaactggttcgtctggttcttcagataaggaaggcagggtatgtggcggacactagctgcatagcgtataacgtccccgaagaagacaaggagaagctgctgctcagccacaccgagaagctagctatcacttatgggctgatccactcagatgcgagcgggacgcccatcagggtgatcaagaacaccaggatgtgcagtgactgccatgaggtggccaagcacatatctgctctatgcggacgccaaatcattcttcgagacgccgatcggtttcaccattttacggatgggaaatgctcttgcaatgatcgctggtaaatggcagatcatctttattgcttgcttgctataggaggggagggtttctatgtctaagcggaacggagtgtagcaagatggaatcagatcctctacagtcggcctgtgtctgtgtgagctggcatcggccggcccctaaaccctaaccctgattaaggtagagactatatacacacatatatagaaacagtacacccattacattagaaaaacacagtaatgtgacacggtaatctctcactgattcttctgacgaatatcatcacctctacgagattatgcactgcacatcttacggatctagctggactgaagatcggtccagtgacatctcaaaatgaacacctcacagaattaactctctctctcactgatacaacagcaaactacaagtctacgacaatgccgacgatgtgcatgccaatgggcagcactgccaccggagaagcaaaattagggaggggggcatatatagacaagacaggcaatgaacatgaaccgactccttttctcaagtatcagcctcgggggccagcaaaatccggctcaaggtaaaaaggaccccgacaacacgtataaccaaaaacaaatggaatcaactcctgtcgcctagagacgaggcgaggaaggggaatcgccaccgccactgcgcggcttgtcatgctggaacttcaccacgatgcacgtgatgttatcgccgctcccgcgagagaacgcggtctctgtcagcttccgagctgcagcctctggttcctcctccattttcacaagtgtaacagcgtcct

SEQ ID NO: 139524 - DNA, 423 bp, Zea Mays
agcagaggccccaacggtttggacttgagtaggatgaaaaaagacatccaaccttggcaagaacgacgttcagcagaatatatgacccatgctcctttaggctctttaaattccgtgggtggcgtagctaccgagatcaatgctgttaattatgtctctcctagaagttggttagcgacctcccattttgttctaggattcttcttttttgtgggccatttgtggcatgcaggaggagcccgagctgctgcagcagccttttgaaaagggaattgatcgcgatttagaacctgttctttatataacccctcttaactaagattttttatttatacctgttctagtttttttctgttctggctcagttattccatctagcccagtatacttcgtattgagtcggtccagggcggggcgaggagc

SEQ ID NO: 139525 - DNA, 1686 bp, Zea Mays
tgcgtcgcactgcctccacacgacgactccacgaacacgagcggccacaagacgagatccaggcggctgtgtagctacgctgccatgacgtctaccgtgacgacgcccagccggccgctcgccgccgggagccgtccgcggcggtccggacccgccgtgctctcgctcagcaagggcggcggcggtcagcggcggcagcggcggctggcgccgtccacgagctgcgccgtgctcgcgtcgcccgacaagcagagcacggccaacaagctcccgctgtcgtcgaggaagcaggaggaggaggtggagaaggccacggactacaacgaggtcgcggcagcgctggagaccatctacaagctcagccccgccgtggaggtcgaggagaagaagcgccagggcggcaatgaagacgacggcggtggcgaggccaagaagaaaaggaagcgcagagtggcgggtaggagcacggtggtcgtgaggagccggcgtcggcgtggcgggaggaggatggacctcgggaagcgggtggagatgaagggcgcggccgccgctagcagagagcagcagcaggggggagaggagcaaggagagcgcgagttcgaggagatgctgctgcgggagcactcggtgtcgacggacatgggcagcctggactggaagcgcatgaagatcccgccggtgctcacctcatcgcagagcgcgcggctcttcaagaccatgcagcccatgaaggcgatcttcgaagcgcaggagagcttgcgagaggagctgcagagggaccccaccgacgcggaggtcgccgaggccaccggcatgaccgtccaccagctccgccgccgcctcgatgtcggccgggccgccaggaacaagctcattaagcacaacctccggctggtgccgtacgccctcaacaagtactaccctgacatgggcggcgacgagaggttcgacgagctgtgccaggcgggcgccaacgggctgatcaccgccatcgatcggttcgagccgaagcgcggcttccgcatctccacgtacgcgctcttctggatccggcactccatcgtgcgcgccatgacgctgtccagcttcacccgcttcccgttcgccatggagtcggagcggcaggagatcggcagggcgcgggaggagctggcgttcgagctcggccggccgcccacggacgaggaggtgcgggcgagggtgggcctctccccgcagaggtaccgcgacgtgctgcggatggccaggcccacatactcgctgcacgcccggaaccgcgtcacgcaggaggagctcatcggcgaggtcaccgacgccgaagccgtcggggtcgacgccggcggcaagcacgacgcgctgctccgcctcgccatcgatgacctcctggactctctgaaacccaaggagagcctggtgatcaggcagcggttcggcctggacggcagggggaggcgcacgctaagcgaggtcgccggcaacctcagcatctcgcgggagatggtgcgcaagtacgagctcaaggcgctcatgaagctcaagcaccccacaagggtggaatacctgcgcaggtacatgtgatcgggctgagctgagctgagcttcttctgctgctatggaatgcattgtaatccgaattcttctattattattgtataataatacaagactatagcagatatatagacg

SEQ ID NO: 139526 - DNA, 650 bp, Zea Mays
cgccattgcgtcgcactgcctccacacgacgactccacgaacacgagcggccacaagacgagatccaggcggctgtgtagctacgctgccatgacgtctaccgtgacgacgcccagccggccgctcgccgccgggagccgtccgcggcggtccggacccgccgtgctctcgctcagcaagggcggcggcggtcagcggcggcagcggcggctggcgccgtccacgagctgcgccgtgctcgcgtcgcccgacaagcagagcacggccaacaagctcccgctgtcgtcgaggaagcaggaggaggaggtggagaaggccacggactacaacgaggtcgcggcagcgctggagaccatctacaagctcagccccgccgtggaggtcgaggagaagaagcgccagggcggcaatgaagacgacggcggtggcgaggccaagaagaaaaggaagcgcagagtggtgagttgttccgtcagtcctgtcctgtcgacttgatgagctaagctagtagtcgtaggacatcgtcgttgcggtgcggttatcatgggcatgtgcatgcgcaggcgggtaggagcacggtggtcgtgaggagccggcgtcggcgtggcgggaggaggatggacctcgggaagcgggtggagatgaagggc

SEQ ID NO: 139527 - DNA, 1675 bp, Zea Mays
tccatccatccagttagttagttagttagttagttgagggagaagaagcaggggaggggaagcgatgagcaacgtgctgcgggctcgccgccgcctggacctcctgcaggtggtgctcttcttcgtcgctgtgctcctcgtcgtcgtcgccgacgccggcgtgacgagccagtaccggcggaagctggaggcgacggtggagatgccactggacgccgacgtcttccgcgtcccgccggggtacaatgccccgcagcaggtgcacatcacgctgggtgaccaggagggcacggcgatgatcgtgtcgtgggtgacggccaatgagctgggcagcagcaccgtcatgtacagcgaggcgtcgccggacccggagaagatggagctccgggcggagggcacccacacgcgctacgactacttcaactacacctccggcttcatccaccactgcaccctcacaaacctcaagcatagcaccaagtactactacgccatggggttcggccacacggtgaggagcttctgcttcaccacgccacccatgccgggccctgacgtgcccttcaagttcggcctcattggcgacctgggccagacgtttgactccaacacgacgctgtcgcactacgaggcgaacggcggcgacgccgtgctgtacgtcggcgacctctcctacgccgacaaccacccgctgcacgacaacacccggtgggacacgtgggcgcgcttcgtggagcgcagcgcggcgcaccagccgtgggtgtggacggcgggcaaccacgagctggacctggccccggagctgggcgagcacgtgccgttcaagcccttcgcgcaccgctacccgacgccgttctggtactcggtgcgggtcgcctccgcgcacgtcgtcgtgctcgcctcctactccgcctacggcaagtacacggcccagtgggagtggctgcgggccgagctggcgcgcgtggaccgcgccgccacgccgtggctgatcgtgctcgtgcactcgccctggtacagcagcaacggctaccactacatggagggcgagacgatgcgggtgcagttcgagcgctggatcgtcgccgccaaggccgacctcgtcgtcgccggccacgtccacgcgtacgagcgcagccaccgcgtgtccaacgtcgcctacgatatcatcaacgcccggtgcacgcccgtccggacaagggacgcgcccgtctacgtcacggtaggcgatggcggcaacatcgagggcatcgcggacaacttcacgcagccgcagccgagctactcggccttcagggaggccagcttcggccacgccaccttggagatcaggaaccggacacacgcatactacgcctggcaccgcaaccaggacggcgccaaggtcgtcgccgacggcgtctggctcactaacaggtactggatgcccaccgacgacgacatcaactgatgagtgatgatcacatcatgcatatgccatcgccaccactcatcaccggatccgggagttcggccgtagattagatctcgcttcgttctcggttcagttcgtccatgtcctctcatgataattgtgtcagcaaactttcaatttatttggcttgtgctaaagcacaataatatatcatatgtttagtactgcataggttagatttttttctgtgaccgagtaaaa

SEQ ID NO: 139528 - DNA, 1506 bp, Zea Mays
ttaaaaaaaatggtttatgaagcccttgcagcatgggaagctaaccatctgcatccaaaaggttggcaaggagccacttctgtttcagagattcgatctatggtgcaaaatgcttttcccgagaccagttgtcattgtttaaaaaacaggggtgtaatccagttagcactagctgctgaaaatgactctacgggagcctcaaagttctcgctgggacgcctttacaagtgccgagagaatattaagtgtgacatctgcagagacacctcaaagtcttgccagtgagcttcgtgatttcatcaacactagcactttagttgaatcacacacacaaactacttcaatggagtcttcacagggcctacttagtttccaggacgtactgcttctaacgattatagggtatatcttagctggtgaaaatttccctacatctatggctggtggtccattttcttgggaagatgagcggtctcttaaagatgttatagtggactctatccttgaacgaccatcatctgtgaagttgcgcttccttgatggcctggatagtgaacttgaagctaaagctagatctaaagatggcgagaggaataaaaactctagcgaggtagcacccagtactgatgatgattttgatgatgaatggggtacctgggatgacagtgataatactgatcaccaaaaggaggaagcttatggggacatgcaacttaagttggaagtgcgagatagagttgatcagcttttcaaattctttcacaaattatccagtatgaggttaagaaatcaagcccttggtgaaggtatagcagcattaagtagattcgagactgacggttactcgaggaaatgcttgctttataagttactattagctctcttgtcgaggtacgatgtacctggcctcgagtatcattcatcaactgttggtcgtctattcaaaagtggactaggtagattcgggcttggacagtctaaaccagccttcggtgatcaatctgttcttatcatttttgttcttggaggtattaatactcttgaggtccgggaagtcatgacagcgatatcggagagcagcagaccagatgtggagcttattctgggtgggacaacccttcttaccccagacgacatgtttgagttgatgttgggatcgtcaagctttgcttaggctcaaccttcactcttgagtcatgtgcgggacttggaaagaaatcggagcatatttttttcttattctccagaatagttacttgtctgatgtagcagaagcattcagactcggaagaggatactaccagaagaaagcagtccattcagagtcaaaatagtttgcaagatgaacctacgagtattgctggaaggtgtaagaaacagtgtgtctagttatcagtggctgactcttgttgtaaaacatgtagcagagatatatcaagcaaaagatgcgtaagaactcaagtaatttgttttgtcactaacatgagcagatgccgtttggctcca

SEQ ID NO: 139529 - DNA, 736 bp, Zea Mays
tacttttttgtataatgtgtttacctttgtacaaaggaagcaagtaggcctttttttttgtaatatccgtttctcagttcagtgtatcgttcagccaaattacttttaactttggactagatatttcttccttttttcgtcatatattttgcaagcgtacagttcagtgtatcgttctctaattgttatatgttggatctgagattatggctaagacacaaaaggttttagttactgcagctttaaagcagtgtattaacgatatacaatcagttttggcgtatcctaacaaacgaaacggtatgttctatgcaaggtccgggaagtcatgacagcgatatcggagagcagcagaccagatgtggagcttattctgggtgggacaacccttcttaccccagacgacatgtttgagttgatgttgggatcgtcaagctttgcttaggctcaaccttcactcttgagtcatgtgcgggacttggaaagaaatcggagcatatttttttcttattctccagaatagttacttgtctgatgtagcagaagcattcagactcggaagaggatactaccagaagaaagcagtccattcagagtcaaaatagtttgcaagatgaacctacgagtattgctggaaggtgtaagaaacagtgtgtctagttatcagtggctgactcttgttgtaaaacatgtagcagagatatatcaagcaaaagatgcgtaagaactcaagtaa

SEQ ID NO: 139530 - DNA, 106 bp, Zea Mays
gtcattctcattatccctctccacactgtctttctcattctcccctccccgcaaatctcattcacattcctacgtgcatccacgcctagctaaaattaaattaaaa

SEQ ID NO: 139531 - DNA, 864 bp, Zea Mays
atggcgatgatgcgaggcaaaaaaggctacggtgatgtggggatggaatggaagcaaagagcagttaatggatgcaaagttggtgctcgcgccccgactgacacaccctctgtcgtgctgtgcggtggcggcaactccctaccgaccactggcgcggacgggtcgaagcgccgcgtctgctacttctacgacgtggaggtgggcaactgctactacgagcattgccacccgatgaagccgcaccgcatccgcatgacccacgcgctgctcggccgctacggcctcctcgaccagatgcaagtgttccgccctcaccctgcccgcgaccgcgacctctgccgcttccacgccgacgattacgtctccttcctccggtccgtcacccccgaaacgcagcaggatcagatccgcgcgctcaagcacttcagcgtcggcgaggactgcccccgtcttcgacggtctctacagtttctgccaaacgtacgcggggggttccgttggcggctggaagtgagcgaggatagaaggggaccatggcatgggggcgacgatggaaggcagggctgtgaccttgcatacgacggaatcagggcgccgaagcgagatctgcgggcgtggctggcgggcagaatcagacaggcgcggcgcgtggtgtgggagagggaaataggattttgggggctgggaatgtcggctgccgctgccgcggagggggtggagggcgttgatggcggcttcgatcacggtttcagggagcggagcgaaggggaggatgtcggggggcagaacgtccaccctgtggacgcctacgctgcattcttaagagatagtaaagattttgcaaatgtatggagatctttataa

SEQ ID NO: 139532 - DNA, 178 bp, Zea Mays
cgcgccaggatttggtacaacaacgtccctcacccaaagctggtggagtataagaaagatcagaactgggttacaagatttggtgattatcttgtttttcctggaggtggaactcaattcaaagatggcgtgggaagatacattcagtttgttgaacaggtggaaaaccattgtacga

SEQ ID NO: 139533 - DNA, 771 bp, Zea Mays
atggcgcccagcagcagcatagcagtactgctgctcctcgtcgtcgccgtcgtcctctccaacgtcccctcctcgggcgccctggcctcctcgtcgtcgtctctgctgcaccagtcgtctccgtctgagagtgagactgagaccgacagtagcagcggagaatctacttcgtcgtcgtcgtcggaagaggccggcgagaaggagaaggagaaggagcaggagatggagaaggcggtcgcggcggagaaggctgcccagcaggagctgctcaagtacgccaaggagaagggcatcgtgtcaccgaccaacggcacggggtggtacaagggcatcgcccgggagttcgtggacgcccacaacgagctccgcgcgcgctacggcgtgccgcccatgaagtgggacaggaagctggcgcggcaggcgcggcgctggtccaaccgcatgcgcaaggactgcgagctcgtccacagcggccacaagtacggcgagagcctgttcaggagccacgacgactggaacgccaccgccaaggaggccgtcttctggtggggcaaggaggagtccatctacgacagggacacggagcagtgcacaggcggcagggcgtacaaggagtgcggccacttcgcgctcatggtcggcaagaggagcaccaaggtgggatgcgcacgagcagagtgcttcaagggaggcgtcttcatcacatgcaactactatgccacggacctcaagaagaagaacaagaagaagaagaagagcaccaccaactga

SEQ ID NO: 139534 - DNA, 4033 bp, Zea Mays
ggagaggaagcaggacctgggagacctcgcctcgtccgtcctcctgcctacttccttgcttttggtaggtgctgcttgttttatcttgaaatgggctctcatgatggcgaggatgaagagttgccacccccccctccggtgccaccagatgtgattcccattaaagctgaagatgctgtgggtgaatcaccagcaaaccatatattaaagccaaagagattactgatggacaggcctggtataggaagaaaagggcagccgacccagctctattcaaatcactttaaagtcgctgtgaagagtacagaagacgtcttctttcactactatgtaaacctgaagtatgaggatgatcgacccgttgatggtaaagggatcggcagaaaggtgattgataaactgcagcagacatatcgtgcagagctttctaacaaggactttgcatatgatggagaaaagagcctgtttacagttggtggtcttccacaaaaaaagaatgagttcaccgttgtcttggaggacgtatctactggaaagactgctgccaatgggagccctggaggtaatgacagtcctggaggtggtgataggaagagagtgaggaggccataccagacgaaaactttcaaagtggagataaattttgcagcagaggttcctatgagtgctattggtcaagtcattagaggcgaagaatctgagaactccctggaggcgcttcgtgttcttgatatcatactgaggcagcattccgcagaacaaggctgccttttggttaagcaatcatttttctacaacaacccttcatgctttgttgacttgggtggtggtgtgatgggttgtcgtggatttcattcaagcttccgtggcacacagagtggactttccctcaatgttgatgtctcaacaacaatgatcgtgaaacctggccctgttattgattttcttctttctaaccagaatgttaatgatcctagcagaattgattggcaaaaggccaagcgtgctctcaagggcttgaggattagaaccactcctgcaaattcagaattcaagatttttggtctcagcgagaggatctgcaaagaacaaacgtttccgctgaggcagagaaatggtagcaacggagattgtgataccattgaaataactgtctatgactactatgcaaagaaaggaatcgatctaaagtattctggtgatttcccctgtataaatacagggaaggcaaagcgcccaacatattttccaatcgagctatgctcgcttgttccgcttcaaagatacaccaaagctttgtctacgctacaaaggtcatcccttgtggagaagtctagacagaagcctgaagaaaggatgaccgttctaaatgatgcactgcaacgcagtaactacgattctgaccccatgttgagggcatgtggtgtttcagttgctccaaaatttacccaagttgaaggaaggatccttcaagccccaaagctgaaagccggcaatggtgatgatatcttttcacgaaatggacggtggaatttcactaataggaagttttatgaaacctgctctgtgaataagtgggcggtcgttaatttctctgcacgttgtgatgttcggaatcttatccgtgacctgatgaggaatgcatctgcaaagggaattgtatggtttagcttttcacatatcttctattgtagcagttttctgctgctgacgttttcttctggcagcaaatggaggaaccttttgatgtgtttgaagagagtccctctatgaggcgtgcacctgtgtcaagaagggtggatgatatgtttgggcagataaaatcaaaacttcctggagctcctaggttcctcttgtgccttctccctgagaggaaaaattgtgaaatctatggtccttggaagagaaagtgcctggccgagtttggtattgtcacacagtgtctagctccattaagagtcaatgatccgtacctgcttaatttgctgatgaagatcaatgcaaagcttggtggtctgaactcgttgctgcaagttgaagcatcttcgtcaataccacatgtgtcgcaagtacccaccatcatcttaggtatggatgtttcacatggtcatccaggacaagatagaccttcggttgcagcggtggttagttctcgtcaatggcctcttatctctagatatagagcatcagtgcacacccaatctgccagactagaaatgatgtcctcgttgtttaagccgcggggtactgatgatgatggcctcatccgggaatcactgatcgacttctacactagctctggaaagcgaaaaccagaacacataattattttcagggatggagtcagtgaaagtcagtttacccaggtcatcaacattgagctggatcagatcatcgaggcatgtaagtttctggatgagaagtggtcacccaagttcactgtgattgttgctcaaaagaaccaccacaccaagttctttcagacggcatcaccagacaatgttcttcctggaactgtggtggatagtaaagtttgccatcctaagaacttcgacttctacatgtgtgcacatgctgggatgattggaacaacaaggccgacccactatcatgttctgcacgacgagataggtttcagtgccgacgagatgcaggagtttgttcattcgctctcttacgtgtaccagaggagcacgacagccatctcagtggttgctccagtgtgctacgcccacctcgctgcagcccaggtgagcacgttcctgagattggaggagatgtcagacgcgtcctccagccagggaggagggcatacctcggctggcagtgctcctgtgccggagctgcctcgcctgcatgacaaagtcaggagctccatgttcttctgctagctgatgtgcgtgcgcatcaggatcgagctccatgttttgtgttagtaaggcctagttagtaaggctgtagaaagaatgtttaatgtttgcatgctaaagtccaaacaatcaaaaccactactatatctaccagagcactgatcgatcaaacaacaagagtcagcatcaatcaatcaaaaccaccactattctatctaccgatcaatctactctatacctgaagcactcactcgctcgcaaacaaccaagggatcatggatccttgagtagctccattgtccagtccctgaccttgacgaagcatttcatggacagcctctcgtacgccatctcgtacatccggaggttcatgtaggcgaagctcaagtaggtggcgatgcactcttggtgcctgtggtacagcgccgggatggtcagagcggccaccacacttgcgtagcaggcggtcgggaaatctgtaacgctgccgacgatggacacgctccacaggcagaggaaggctctgtagaagagcagcgagtccctgcccagagcgatgtcccggaaagcgtccgaggcggcgtccagagcagagcgcagcagcgccgccgcctcgtccacggcctgctgcggaacgcgcagctccgggacgggaggctgcggcctgttcaggaggcgcgccgctttggcccacaggaagagcacggtgaggagcaggagcagcacgttggaggcgagggacaccaaggtgtagccgccgtacaagagcagccaggaggagacggtgcccgccagcaggcaggcgctcacgtcggcgcggccccggcgccacagcagcacgtcccagactgctgcagcaatccgatccgattccgatccagatatattagttagtagatccaatctcgggcggccaatccgtaataataattggctgagagaaaaggtgggagagagtaccgaatcctccgacggcacatgtcccggcgccgccgccgccgccgccaacaccaacaccagcatccaccaccatcgtcgtagttaatactaagggaagggaactagagaaggaagggaggggccgatgcaacggaagaaatggatggaattcgaccaacagctagctagagcgaagcagaacccaatcccaatcaaaacccgag

SEQ ID NO: 139535 - DNA, 4052 bp, Zea Mays
ggagaggaagcaggacctgggagacctcgcctcgtccgtcctcctgcctacttccttgcttttggtaggtgctgcttgttttatcttgaaatgggctctcatgatggcgaggatgaagagttgccacccccccctccggtgccaccagatgtgattcccattaaagctgaagatgctgtgggtgaatcaccagcaaaccatatattaaagccaaagagattactgatggacaggcctggtataggaagaaaagggcagccgacccagctctattcaaatcactttaaagtcgctgtgaagagtacagaagacgtcttctttcactactatgtaaacctgaagtatgaggatgatcgacccgttgatggtaaagggatcggcagaaaggtgattgataaactgcagcagacatatcgtgcagagctttctaacaaggactttgcatatgatggagaaaagagcctgtttacagttggtggtcttccacaaaaaaagaatgagttcaccgttgtcttggaggacgtatctactggaaagactgctgccaatgggagccctggaggtaatgacagtcctggaggtggtgataggaagagagtgaggaggccataccagacgaaaactttcaaagtggagataaattttgcagcagaggttcctatgagtgctattggtcaagtcattagaggcgaagaatctgagaactccctggaggcgcttcgtgttcttgatatcatactgaggcagcattccgcagaacaaggctgccttttggttaagcaatcatttttctacaacaacccttcatgctttgttgacttgggtggtggtgtgatgggttgtcgtggatttcattcaagcttccgtggcacacagagtggactttccctcaatgttgatgtctcaacaacaatgatcgtgaaacctggccctgttattgattttcttctttctaaccagaatgttaatgatcctagcagaattgattggcaaaaggccaagcgtgctctcaagggcttgaggattagaaccactcctgcaaattcagaattcaagatttttggtctcagcgagaggatctgcaaagaacaaacgtttccgctgaggcagagaaatggtagcaacggagattgtgataccattgaaataactgtctatgactactatgcaaagaaaggaatcgatctaaagtattctggtgatttcccctgtataaatacagggaaggcaaagcgcccaacatattttccaatcgagctatgctcgcttgttccgcttcaaagatacaccaaagctttgtctacgctacaaaggtcatcccttgtggagaagtctagacagaagcctgaagaaaggatgaccgttctaaatgatgcactgcaacgcagtaactacgattctgaccccatgttgagggcatgtggtgtttcagttgctccaaaatttacccaagttgaaggaaggatccttcaagccccaaagctgaaagccggcaatggtgatgatatcttttcacgaaatggacggtggaatttcactaataggaagttttatgaaacctgctctgtgaataagtgggcggtcgttaatttctctgcacgttgtgatgttcggaatcttatccgtgacctgatgaggaatgcatctgcaaagggaattcaaatggaggaaccttttgatgtgtttgaagagagtccctctatgaggcgtgcacctgtgtcaagaagggtggatgatatgtttgggcagataaaatcaaaacttcctggagctcctaggttcctcttgtgccttctccctgagaggaaaaattgtgaaatctatggtccttggaagagaaagtgcctggccgagtttggtattgtcacacagtgtctagctccattaagagtcaatgatccgtacctgcttaatttgctgatgaagatcaatgcaaaggtttgggacatgattttgtctttcttttgcactgtattgttccctggttcatgattatattatcctctttcctctgtttttaactagcttggtggtctgaactcgttgctgcaagttgaagcatcttcgtcaataccacatgtgtcgcaagtacccaccatcatcttaggtatggatgtttcacatggtcatccaggacaagatagaccttcggttgcagcggtggttagttctcgtcaatggcctcttatctctagatatagagcatcagtgcacacccaatctgccagactagaaatgatgtcctcgttgtttaagccgcggggtactgatgatgatggcctcatccgggaatcactgatcgacttctacactagctctggaaagcgaaaaccagaacacataattattttcagggatggagtcagtgaaagtcagtttacccaggtcatcaacattgagctggatcagatcatcgaggcatgtaagtttctggatgagaagtggtcacccaagttcactgtgattgttgctcaaaagaaccaccacaccaagttctttcagacggcatcaccagacaatgttcttcctggaactgtggtggatagtaaagtttgccatcctaagaacttcgacttctacatgtgtgcacatgctgggatgattggaacaacaaggccgacccactatcatgttctgcacgacgagataggtttcagtgccgacgagatgcaggagtttgttcattcgctctcttacgtgtaccagaggagcacgacagccatctcagtggttgctccagtgtgctacgcccacctcgctgcagcccaggtgagcacgttcctgagattggaggagatgtcagacgcgtcctccagccagggaggagggcatacctcggctggcagtgctcctgtgccggagctgcctcgcctgcatgacaaagtcaggagctccatgttcttctgctagctgatgtgcgtgcgcatcaggatcgagctccatgttttgtgttagtaaggcctagttagtaaggctgtagaaagaatgtttaatgtttgcatgctaaagtccaaacaatcaaaaccactactatatctaccagagcactgatcgatcaaacaacaagagtcagcatcaatcaatcaaaaccaccactattctatctaccgatcaatctactctatacctgaagcactcactcgctcgcaaacaaccaagggatcatggatccttgagtagctccattgtccagtccctgaccttgacgaagcatttcatggacagcctctcgtacgccatctcgtacatccggaggttcatgtaggcgaagctcaagtaggtggcgatgcactcttggtgcctgtggtacagcgccgggatggtcagagcggccaccacacttgcgtagcaggcggtcgggaaatctgtaacgctgccgacgatggacacgctccacaggcagaggaaggctctgtagaagagcagcgagtccctgcccagagcgatgtcccggaaagcgtccgaggcggcgtccagagcagagcgcagcagcgccgccgcctcgtccacggcctgctgcggaacgcgcagctccgggacgggaggctgcggcctgttcaggaggcgcgccgctttggcccacaggaagagcacggtgaggagcaggagcagcacgttggaggcgagggacaccaaggtgtagccgccgtacaagagcagccaggaggagacggtgcccgccagcaggcaggcgctcacgtcggcgcggccccggcgccacagcagcacgtcccagactgctgcagcaatccgatccgattccgatccagatatattagttagtagatccaatctcgggcggccaatccgtaataataattggctgagagaaaaggtgggagagagtaccgaatcctccgacggcacatgtcccggcgccgccgccgccgccgccaacaccaacaccagcatccaccaccatcgtcgtagttaatactaagggaagggaactagagaaggaagggaggggccgatgcaacggaagaaatggatggaattcgaccaacagctagctagagcgaagcagaacccaatcccaatcaaaacccgag

SEQ ID NO: 139536 - DNA, 3965 bp, Zea Mays
ggagaggaagcaggacctgggagacctcgcctcgtccgtcctcctgcctacttccttgcttttggtaggtgctgcttgttttatcttgaaatgggctctcatgatggcgaggatgaagagttgccacccccccctccggtgccaccagatgtgattcccattaaagctgaagatgctgtgggtgaatcaccagcaaaccatatattaaagccaaagagattactgatggacaggcctggtataggaagaaaagggcagccgacccagctctattcaaatcactttaaagtcgctgtgaagagtacagaagacgtcttctttcactactatgtaaacctgaagtatgaggatgatcgacccgttgatggtaaagggatcggcagaaaggtgattgataaactgcagcagacatatcgtgcagagctttctaacaaggactttgcatatgatggagaaaagagcctgtttacagttggtggtcttccacaaaaaaagaatgagttcaccgttgtcttggaggacgtatctactggaaagactgctgccaatgggagccctggaggtaatgacagtcctggaggtggtgataggaagagagtgaggaggccataccagacgaaaactttcaaagtggagataaattttgcagcagaggttcctatgagtgctattggtcaagtcattagaggcgaagaatctgagaactccctggaggcgcttcgtgttcttgatatcatactgaggcagcattccgcagaacaaggctgccttttggttaagcaatcatttttctacaacaacccttcatgctttgttgacttgggtggtggtgtgatgggttgtcgtggatttcattcaagcttccgtggcacacagagtggactttccctcaatgttgatgtctcaacaacaatgatcgtgaaacctggccctgttattgattttcttctttctaaccagaatgttaatgatcctagcagaattgattggcaaaaggccaagcgtgctctcaagggcttgaggattagaaccactcctgcaaattcagaattcaagatttttggtctcagcgagaggatctgcaaagaacaaacgtttccgctgaggcagagaaatggtagcaacggagattgtgataccattgaaataactgtctatgactactatgcaaagaaaggaatcgatctaaagtattctggtgatttcccctgtataaatacagggaaggcaaagcgcccaacatattttccaatcgagctatgctcgcttgttccgcttcaaagatacaccaaagctttgtctacgctacaaaggtcatcccttgtggagaagtctagacagaagcctgaagaaaggatgaccgttctaaatgatgcactgcaacgcagtaactacgattctgaccccatgttgagggcatgtggtgtttcagttgctccaaaatttacccaagttgaaggaaggatccttcaagccccaaagctgaaagccggcaatggtgatgatatcttttcacgaaatggacggtggaatttcactaataggaagttttatgaaacctgctctgtgaataagtgggcggtcgttaatttctctgcacgttgtgatgttcggaatcttatccgtgacctgatgaggaatgcatctgcaaagggaattcaaatggaggaaccttttgatgtgtttgaagagagtccctctatgaggcgtgcacctgtgtcaagaagggtggatgatatgtttgggcagataaaatcaaaacttcctggagctcctaggttcctcttgtgccttctccctgagaggaaaaattgtgaaatctatggtccttggaagagaaagtgcctggccgagtttggtattgtcacacagtgtctagctccattaagagtcaatgatccgtacctgcttaatttgctgatgaagatcaatgcaaagcttggtggtctgaactcgttgctgcaagttgaagcatcttcgtcaataccacatgtgtcgcaagtacccaccatcatcttaggtatggatgtttcacatggtcatccaggacaagatagaccttcggttgcagcggtggttagttctcgtcaatggcctcttatctctagatatagagcatcagtgcacacccaatctgccagactagaaatgatgtcctcgttgtttaagccgcggggtactgatgatgatggcctcatccgggaatcactgatcgacttctacactagctctggaaagcgaaaaccagaacacataattattttcagggatggagtcagtgaaagtcagtttacccaggtcatcaacattgagctggatcagatcatcgaggcatgtaagtttctggatgagaagtggtcacccaagttcactgtgattgttgctcaaaagaaccaccacaccaagttctttcagacggcatcaccagacaatgttcttcctggaactgtggtggatagtaaagtttgccatcctaagaacttcgacttctacatgtgtgcacatgctgggatgattggaacaacaaggccgacccactatcatgttctgcacgacgagataggtttcagtgccgacgagatgcaggagtttgttcattcgctctcttacgtgtaccagaggagcacgacagccatctcagtggttgctccagtgtgctacgcccacctcgctgcagcccaggtgagcacgttcctgagattggaggagatgtcagacgcgtcctccagccagggaggagggcatacctcggctggcagtgctcctgtgccggagctgcctcgcctgcatgacaaagtcaggagctccatgttcttctgctagctgatgtgcgtgcgcatcaggatcgagctccatgttttgtgttagtaaggcctagttagtaaggctgtagaaagaatgtttaatgtttgcatgctaaagtccaaacaatcaaaaccactactatatctaccagagcactgatcgatcaaacaacaagagtcagcatcaatcaatcaaaaccaccactattctatctaccgatcaatctactctatacctgaagcactcactcgctcgcaaacaaccaagggatcatggatccttgagtagctccattgtccagtccctgaccttgacgaagcatttcatggacagcctctcgtacgccatctcgtacatccggaggttcatgtaggcgaagctcaagtaggtggcgatgcactcttggtgcctgtggtacagcgccgggatggtcagagcggccaccacacttgcgtagcaggcggtcgggaaatctgtaacgctgccgacgatggacacgctccacaggcagaggaaggctctgtagaagagcagcgagtccctgcccagagcgatgtcccggaaagcgtccgaggcggcgtccagagcagagcgcagcagcgccgccgcctcgtccacggcctgctgcggaacgcgcagctccgggacgggaggctgcggcctgttcaggaggcgcgccgctttggcccacaggaagagcacggtgaggagcaggagcagcacgttggaggcgagggacaccaaggtgtagccgccgtacaagagcagccaggaggagacggtgcccgccagcaggcaggcgctcacgtcggcgcggccccggcgccacagcagcacgtcccagactgctgcagcaatccgatccgattccgatccagatatattagttagtagatccaatctcgggcggccaatccgtaataataattggctgagagaaaaggtgggagagagtaccgaatcctccgacggcacatgtcccggcgccgccgccgccgccgccaacaccaacaccagcatccaccaccatcgtcgtagttaatactaagggaagggaactagagaaggaagggaggggccgatgcaacggaagaaatggatggaattcgaccaacagctagctagagcgaagcagaacccaatcccaatcaaaacccgag

SEQ ID NO: 139537 - DNA, 1218 bp, Zea Mays
aaaaaaaacaaaatcttcaggtcgtcggccagggccagggccatggcgctgcggctgccaagccaccagctcgctcccctcgcggtcctcgtctgtgccgccgtggcagcgtatgacgaggagctgtctgcttctccgccgtcggataacaacaacacaccggcgggcctgggcatcaaggtgcccttccgcccccgagtggcaatcgtggtcggcatcttcaccatgatcttctccctcaccttcctcctcctcatgtacgccaagttctgccacccctcctcctcctcgtctccgccacagcccgcctccaacaatggcgcagctgcagcagcggtgtgcgtcggactccccaagcaggtcatcgagtcgctgcccttcttccggttcgccaccctgcgcggggcgcgccatgggatggagtgctccgtctgcctcgcccgcttcgacgacgccgacctcctccgcctcctgccgcgctgccgccacgccttccacctcgcctgcgtcgaccgctggctccagtccagcgccacctgcccgctctgccggtccaacgtcgacgccgacgacgccaagctcgacgccgaccacgcgctgtcttccggacgcttcgacgacggcgctgctgctgaggcggcggggagcggccgcgatctcctcgacatcttcgtggagcgcgtgcccggaccggacaggcacaagcaccgcatcatcgtgtccgacgtggtgttcaagagccggtggagcgagctcaactctgcggacctcatcgctctcgacacggagatgcttcgctccatgtccagcggccgcttcgtgttcccgccagattccccttattgcgcggcaccggagcacaagctagcagcagaggatcaggaggagacgacgatggcgaacaagaacaaggagaggaagcgcctgctggagcctgtcgttgtggtggacgcaccactcggtggcgagtgcagcagcggctccgccgtgtcggcgtccgcggccaggatgatatcgtccggggtgcgctccatgtcggagatcgtgagcctgccacggctgcgcgccgcggcgagggagcggctgtcggaggaggagaatcggcggtggctgcccatcgcacggcggacggcgcggtggttcgccgggcgcgccagcggggggcaggaggagcaccgagctgtccacgtcgtggcggcggagcatgatggtgtgtag

SEQ ID NO: 139538 - DNA, 1813 bp, Zea Mays
atcgatagagcgcgagatcgatcgatcatgccgggccgctcggtggtctccatcctcctcctcctcctcctccatggcctcctctgcctgcagctggttgccttgaccgagatggacgacgacgacgtcatggaggacggcagctgcatgcatttcagtgtgtccccgccgcctgctccgccggaggacgcggatgagcggcgcgactatttccgcgccatgcaggccaaggatctgttccggcacgagcagatgatcacgatgatgggcagcgaccggaacggcagcagcaggaggcggcgggcgaaggagtcgtccaagctgccggaggtgatgtccgccacgtccatgttcgagctgccgatgcggagcgcgctgaacatcgcacacgtgggcatgtacctggtgtcggtgcgcatcggcacgccggcgctgccgtacaacctggttttggacaccgccaccgacctgacgtggatcaactgtcgtctgcggcgccgcaagggcaagcactatgggcgacagtcgacggggcagacgatgtcgatgggcggggaaggcgcgaaggaggcgagcaagaactggtaccggccggccaagtcgtcgtcgtggcgcaggatccggtgctcgcagaaggagtgcgcggtgctgccctacaacacgtgccagagccccagcaaggcagagtcgtgcagctacttccagaagacgcaggacggcacggtgacgatcggcatctatggcaaggagaaggcgacggtgacggtgtcggacgggcggatggccaagctccccggtctcatcctgggctgctccgtcctggaggccggcggcagcgtggacgcccacgacggcgtgctgtcgctggggaacggcgacatgtccttcgccgtgcacgccgccaagcgcttcgggcagcgcttctccttctgcctgctcagcgccaacagctcccgcgacgcctccagctacctcaccttcgggcccaacccggcggtgatgggtccgggcaccatggagacggacatcctgtacaacgtggacgtgaagcctgcatacggggcccaggtgacgggcgtcttggtgggcggggagcggctggacatcccggacgaggtgtgggacgccgagaggtttgtgggcggcggtgtcatcctagacacgagcacgtcggtgacgtcgctggtgccggaggcgtacgcgccggtgacggcggcgctggacaggcacctgtcgcacctgccgcgggtgtacgagctggagggcttcgagtactgctacaagtggaccttcaccggcgacggcgtggacccggcgcacaacgtgacgatacccagcttcacggtggaaatggcaggcggcgcgaggctggagccggaagccaagagcgtggtgatgccggaggtggagccaggggtggcgtgcctggccttcaggaagctgctacggggagggcccgggatattgggcaacgtgttcatgcaggagtacatctgggagattgaccacggcgacggcaagatcaggttcaggaaggacaagtgcaacacccatcatctccacaacagcagaggcggagaagttaataacaatgctgccgcctcctcaagcgtcgtgcatcgcgtcaattgattcattcctctcttctccatctaccaaaacaatacattttctttccaatttgttctaatgatctgatttctatctttcctgattgtaagatagatctcaggtctacatgctcatgaactaacatcgcctcaaaacagagtattgaaatatatatatatataaatgaatgtcatcccttggc

SEQ ID NO: 139539 - DNA, 1481 bp, Zea Mays
agcccgctgccgcaaaaaacacagacaccaaccaaccgcctctctctctctctctctctgtctctcccgctgctgagatctcatctgactgcccagagggagattgagactgcggaattgaagcagctacccaacatgtacgccgacgccctcgcctcctcgcagcccccgccgccacccttcctctccatgggcgtcatggaccacgaagcctacgccgccgtgccatccatggtatcagaatatgacctcggaggagaaggggacctgttcaaagctccacaagtcatcatccaagaagaagcgctgctcagccttgatcctgtcgcagctgcctgctcaatgatgaatcaaactattaaggatgcaggcatccagaacgacgctctcctgagtgaagtgttgtatgagtgcgagaaggaactcatggaaaagtctgcaatcgaagagacaatttctgaacttatggatgttaagatccctatgctgcaagctgaacaactcccggccatggagaatgagaagcgttccattcctgaatgctcgctccagaaaagtgttagttctggatgcctcaactcggcagattggatgaatggagctgtcaggccaaactttctagacttccaagggctggactttgaggcagcgtttgggctgaggagagcttacagtgaaggagacattcagaaccttggagccaacacgcctcgaccagcagcaaatgtttgtgtgaccatcagtgacctcaagaccgaagaaaggaagcaaaagctttccaggtatagaaaaaagaagatcaagcggaactttggcaggaagattaagtatgcttgtaggaaggctctggcagacagccagccaagggtgagagggagatttgccaagatcgaagaatgcgacctgctgctgctgaattcaagcacttagatggaggttcagtcgatcattcagctgttcaaaatccacctcctctacccagccgttttggtgcgagccgagggagttaagagctgaaagtggtggtagtctagttggttagctagcccctgtacaaaggcttgaatgaagatggcaataaaactcagctctcccctctgcttgcttggcactgcactccttgtgccttactgaaaacaagagcaaaaacagactcatgaagattaacaaatttcacggtgtattccttcctttccttgtgccttactgcaccacaatcaatccaactcaaaagtaataggtgacggtagctactttattacatcctgccttggtctgtcggcaattatgtgaaaactgaaaagaaaaaagcaaacctcaagagatttagtcgctggttaattcaccccatagacccacttctccgcattgctggtataagagaccagctccttgggttcaaaccacaaggcgatctcatcctttgctgtctccgggccatcacttccatgaatgatgtttctggtgtgttcataacaagc

SEQ ID NO: 139540 - DNA, 1551 bp, Zea Mays
atgcggcggtggttcgcggtggcggcggacctgagcagggcgctgcacgggttcctggtgttcgaggtgtcgtggcgcgacgtgcacggcatcaactacctgaacgagctgctgagcgacacgtccctggcgctggaggcgcggtacatgaagaagtgggagttctacagcgcggagcaggcggccggctgcacgcacctgtggttcctgggccgcgcctccgaggcgcgggctctgaggggctacctctccgcgctgcacacgcactcggacccaagcgagcagctggaggagtgcagcagcgcgctgcgccggacgtgctcctcctcctcgctcacggccgtctccgaggacgaggacgaggacgacgacgagctggacggtcgatctgcagacggcatcttgatgagctccccgtccccgactaggagcaggagcagcagcagcaggtgggcgcgcgcggcggcggcggcggaggtcccgttcgtggcccctgcgcagtacagcgacacgctgatcctgttccggttcagggacagccagctgccgctgaagctgcggcagatcatcatgtcggacatcaggctgctgacgctgctggagtcgggcctgccgtcgtgggtcatcttcttccagtcgtacccagtgctgtgccagctgtaccggccgtggatgcggccgctggcgcggagcctgtacctgctggcgtcgctggtgacggtgctgatcggcttctacgacctgtacaagaacgtgccgctgctcaagtcggcggcggcgcgcatctgcgggccgctgttcgggtggatcgagacgtgggacatggtgaccaggatccagtacctgggcaccatcctgttcctgcgcaacctgcgcaagtgcctgcagagcctcgtggcgctgctgcgggcggcgcgcgcggtggtacgcacggtggcggcgccggtggccgaggcggcggggcccctggtggcctcctgtggcgaggtgtgggacctggtgggcgagggcctgctggcgccggcgtgggcactggcggtggacctggcggaggtggtgtgggcgcccttcgacctggtgctggacagcgtgggtggctgcctgtggccgctgctgcaggtggcgctgctgccggtgagaggggcggcggcgctggcgggctgcgcggggtcgctgctgtcggcaacctacaacttcggcaaggacatatgggagaccatgagcagcatattcgagctgaaccacatgtcggaggcgcagcagagtgccttcgacatgtcgcagataaagacgctatggaacgatctattctcacagatcttccgcgccatcaggggcatactcaatggcatcttggtgttctttgcatcctgcaacaggcacaggctcagcatctacaaccatgcgcagtctaggttccgccatatgcttcgcgtcgctaggctgcatcaggcgccgccgcattcgtcgtcgtgtcgttgcaagccgcagaagcccaaacgccgtgcttcggatgatgatgcagtggcggaatgtgacaggtgcaagtga

SEQ ID NO: 139541 - DNA, 96 bp, Zea Mays
gtgagatcatccccatcagtataactcaagggcatagcaacatagctggttcacaacaagataatgacaaatattccatcccaaacaagacacaac

SEQ ID NO: 139542 - DNA, 134 bp, Zea Mays
ggttttttatgtttcgagtggcttgcagttgaaatgtgaatttttcgaagaaattcaattaaacgaactaaatctaatagttatagaaaatgcttttatagttgtgcaaaaatggaacatgtaggtctacatag

SEQ ID NO: 139543 - DNA, 108 bp, Zea Mays
tgtgcttggccaggcaaaagccaagccatgctaccctgtgcttatctactgtggtgttgtagttgtaggcagggagggtgtaatatcccaaaaaaaaatatttaccaa

SEQ ID NO: 139544 - DNA, 661 bp, Zea Mays
atgtttgtccttatttttaggtgagctttggttttgcagccatgtagcttgactttccagcgacccccttgctatatccgctggccccggagctgacggttcttggccatggatgggcacggacagtcagatgaagcggcgtccaaggcgtggcgcggcgcagcgagcggcgtggtgagcgcgcccgtggcccgcgtgtgggagctggtgtcctccacgtctcggctgcgcgagtggatgcccatggtggagtcgtgcaccgcggtggccggtgacgaggacgtgccgggctacgtgcgcctcgtgcgcggcggcctcatgttcccccagcagcagcaggggtcgtcgtgggtgagggagaggctggtggccatggaccacaccgcccgctcctacacctacctcatggaggacggcaacgtcggcctcgccggctcccgcaacaccatcagcctcctggactacggcggaggcgcaacgctggtggtgtggagcttcgagatggagccggtggacgacgccaaccaggatgccctgctcgactacctccgcatcctctacaagtcgtgcatcgacaccatacctccttgtctgctctgacctgatattaaatcatctattcaatatatatatgcgtcatccttacatacatggataataa

SEQ ID NO: 139545 - DNA, 85 bp, Zea Mays
gaccaatagcaatagggatatgcatgttcatgtaccatgctgtgcctatgtctgtgtgcggtgcacagcaggatcaagaaagacc

SEQ ID NO: 139546 - DNA, 1814 bp, Zea Mays
cctgcttctgcttcagacgaggcgagatccccaatccatcaccacatcacactagatcacccaacctccctccacatccatcttgcagcatccgccatggcgccgccgcccaagccagccgaatcttccaccaacaagaagaaggtcacccccgcggaggtcgcattcctcgtcgaccgctacctggccgaaaacggattcaacgccgccctcgccgcgttccgctccgaagccgcgcacatctacagccccaccaaatacagcaagaagacgcccaagaggctcatcccgctcgccgacatcctccacgactacatcgccctcaaggaggcccgcgtcgccatcgaatccgcaatgcaggccatgcaatctctcgtttccacctactacgcatccggctcctcgtccgctgctccgcctcatatgaacatgaacatgaacatgatgatgcctccccttcccccgcctcacgccgccaccggtgcccagccgtcatcgccgccgctcttcttctacgcgccgaattcttcgtcgcctccgtcacaaggaaccgccggccacgcctcgcctctcgttcatcactacgctcacgcatccgccgcgggccttgtccacaactcctcctcagatctgtccactccagctcccacctctctgcccactaataaaaagaggaaggcttcagggaagaccgccgccgcttcagcctccaagagatcctgcattgctcctaatacaaccaccgacgcaaagggtagagctgtacccgcggcgtttcaaccgtcgaatcatcagaagaacatgggttccgctgcccaaccaacttcagctcaacattcagctccactccaaacttcatctgttgcaaagagcttgtttgcgccgctcccacctccggcccactcttctccctacacgccgcagcaacaagatcagcctgctgctgcttatccgtctgcaactccagcgtgtgccgttgcccaacaggaaatcggcccctcccagtgctctatcgtttcttcttccaagaccctcatcgtcagccctctcaaagggagcgcgtactatgctgtcgagaggagctaccatctcagctcccccttgaaaccgaccgcccgcagttcccccttgaaaccaaccacccgcaagttgaacttcgattgcaccgagctaggtccctgtgagcagatttgcgacaaggcctctgcctctgcctcctccgacgaagacaagcaatatgactttgacatggatttcacgaacttcgatatatgtgatggtgaattttcgttttctgagctcctgcttgacttcgatcttgacaatgaaggtgtcctgaacgcttccacaagtgatcaagttcaaaggctagagcctgctgctgctgctgctagtggtcatatggcagcgggtcctgttctacctgattcagtgaagccagtcgcagcagattctgctcaggaattgaatccccaaggagcgaccgctgttacttctgtcagggctattacgaagaggataaagattgtgagccctgccaagggccgggcagcttcttagagcagctagcaggtagattttcagatctcgccaaatcaggtggcattccatgaccaactgccctgctctgtctgtctgagggcattttcaatgtagcatgcatgactctaatgttatgttagcattttatgttcacgatgtaaaggctaatatcgcgttactaattactacttttcacaagtttgctgtgctgctcaaaattctgtctattgagagatttgcaaattttgttataatttaaaaccatagatgga

SEQ ID NO: 139547 - DNA, 1310 bp, Zea Mays
atatattgcagattattctttttgcagagagagaatcaaaatcactttgcgtgcagcatcgattgggtcggaaatcgagggtttggtaagcgagatcgccgccggtgacagactgacagggacgagatggacgccggcggaggcggcgtcttggccgccgtgctctgcatgctgctggtcttcgccatcttccttctcctcctctggcgccgccgctccgatgccgccaccgccgataaccaccgcgtcccgccccagcccctccaggaggatcaggtgctgcacggtcgcgcggcggcgcgacggatgcgtcggaggcctggggctgccggagcaggctcctctactgcgtcaactagccgcaatgctgtagaggacgacgcggagagtgacgatgaggaggtccccgaaggtcgcaacgtacccagatcctccaaaaaggagaagaaaaggcaagagcgagagatgcagcgtcaggccgaagaacctgcacgggattcatggaggagtaaacaagaccgatacgacgaaatgaggaggaagaaggatgaggagcgtgaggcacaagagaggcaattggaagaagaagctagggcacgaaaagcaaaggaggaggctgctgctgctttagagtttgagaaatggaaaggggccttctctgttgatgctgaaggtacaacagagagtgagacacaagacgatggtcagggtttgctccacaactttgtggaatacatcaagaagcagaagtgtgttcccctagaggacctagctgcagagttcaggatgcgaacccaggactgtatcaatcggattgttactctggaaagcatgggtatgttatctggggtgatggatgaccgtgggaagttcatctacatctccactgaagagatgaaggcagttgcagagtacattaggaagcaagggagagtgagcatatcacatctggccaacaactcaaaccagttcatcgatctggagccgaaggcccagtacgaggtggagagccagcaggatgacagtgcagaagcaggcacagaagcatgagaattccttgtgacctggcaccatgtcgtgctcaatgatgttttgtagtgtgatgacttaacatggtttgagttgggcactggccatataatatatgcagtagtcggtataaacatacttgttctgacatgctagataccattaccccatgcagagaactcaggcttttgttctatcatcatgattgaaaatcatcggttgaccttggtggtgttggggaggaggtatggcacaggaatgatgttttttcatttgttgct

SEQ ID NO: 139548 - DNA, 1352 bp, Zea Mays
atatattgcagattattctttttgcagagagagaatcaaaatcactttgcgtgcagcatcgattgggtcggaaatcgagggtttggtaagcgagatcgccgccggtgacagactgacagggacgagatggacgccggcggaggcggcgtcttggccgccgtgctctgcatgctgctggtcttcgccatcttccttctcctcctctggcgccgccgctccgatgccgccaccgccgataaccaccgcgtcccgccccagcccctccaggaggatcaggtgctgcacggtcgcgcggcggcgcgacggatgcgtcggaggcctggggctgccggagcaggctcctctactgcgtcaactagccgcaatgctgtagaggacgacgcggagagtgacgatgaggaggtccccgaaggtcgcaacgtacccagatcctccaaaaaggagaagaaaaggcaagagcgagagatgcagcgtcaggccgaagaacctgcacgggattcatggaggagtaaacaagaccgatacgacgaaatgaggaggaagaaggatgaggagcgtgaggcacaagagaggcaattggaagaagaagctagggcacgaaaagcaaaggaggaggctgctgctgctttagagtttgagaaatggaaaggggccttctctgttgatgctgaaggtacaacagagagtgagacacaagacgatggtcagggtttgctccacaactttgtggaatacatcaagaagcagaagtgtgttcccctagaggacctagctgcagagttcaggatgcgaacccaggactgtatcaatcggattgttactctggaaagcatggataggttatctggggtgatggatgaccgtgggaagttcatctacatctccactgaagagatgaaggcagttgcagagtacattaggaagcaagggagagtgagcatatcacatctggccaacaactcaaaccagttcatcgatctggagccgaaggcccagtacgaggtggagagccagcaggatgacagtgcagaagcaggcacagaagcatgagaattccttgtgacctggcaccatgtcgtgctcaatgatgttttgtagtgtgatgacttaacatggtttgagttgggcactggccatataatatatgcagtagtcggtataaacatacttgttctgacatgctagataccattaccccatgcagagaactcaggcttttgttctatcatcatgattgaaaatcatcggttgaccttggtggtgttggggaggaggtatggcacaggaatgatgttttttcatttgttgctattccgctgaagcctaatggaacgtgtctatttcgaacaaaa

SEQ ID NO: 139549 - DNA, 1421 bp, Zea Mays
atatattgcagattattctttttgcagagagagaatcaaaatcactttgcgtgcagcatcgattgggtcggaaatcgagggtttggtaagcgagatcgccgccggtgacagactgacagggacgagatggacgccggcggaggcggcgtcttggccgccgtgctctgcatgctgctggtcttcgccatcttccttctcctcctctggcgccgccgctccgatgccgccaccgccgataaccaccgcgtcccgccccagcccctccaggaggatcaggtgctgcacggtcgcgcggcggcgcgacggatgcgtcggaggcctggggctgccggagcaggctcctctactgcgtcaactagccgcaatgctgtagaggacgacgcggagagtgacgatgaggaggtccccgaaggtcgcaacgtacccagatcctccaaaaaggagaagaaaaggcaagagcgagagatgcagcgtcaggccgaagaacctgcacgggattcatggaggagtaaacaagaccgatacgacgaaatgaggaggaagaaggatgaggagcgtgaggcacaagagaggcaattggaagaagaagctagggcacgaaaagcaaaggaggaggctgctgctgctttagagtttgagaaatggaaaggggccttctctgttgatgctgaaggtacaacagagagtgagacacaagacgatggtcagggtttgctccacaactttgtggaatacatcaagaagcagaagtgtgttcccctagaggacctagctgcagagttcaggatgcgaacccaggactgtatcaatcggattgttactctggaaagcatggataggttatctggggtgatggatgaccgtgggaagttcatctacatctccactgaagagatgaaggcagttgcagagtacattaggaagcaagggagagtgagcatatcacatctggccaacaactcaaaccagttcatcgatctggagccgaaggcccagtacgaggtggagagccagcaggatgacagtgcagaagcaggcacagaagcatgagaattccttgtgacctggcaccatgtcgtgctcaatgatgttttgtagtgtgatgacttaacatggtttgagttgggcactggccatataatatatgcagtagtcggtataaacatacttgttctgacatgctagataccattaccccatgcagagaactcaggcttttgttctatcatcatgattgaaaatcatcggttgaccttggtggtgttggggaggagggaggtggtgtttgagtctagcagcaagagatttggcaatgattctgtagatgacaaagactttgctcggagacaaggcagacttgtagtcaggttcacaaatcgtcctattagtaatatatagcctttgcagtgccggttgtgttc

SEQ ID NO: 139550 - DNA, 1518 bp, Zea Mays
atggcacaggcacagccacaggcgcaggcgaccagtgaagtcgtcgtcaagtgtgccaccaaggccatgacgaatgacaaagacagggccgccatcgccagcgccagcgcggcggcgtctcaggggtcggtaggcagcggtgccgccacgcccttcaagttcaacgtccacgcgccggagttcgtgcctatgtcgcctgccgccgccagccccatggccagccccatgtcggcaccggcaggtggctactactcgcccttcatgcagatgcaaccgggcttggcgcccgccgattggagctttttccacgagcacgagcccgtcttcttcatgcccgacttagcgcacgctaagttcggcgcggccaccgccaccgccgctggcgctgctgggagcaacagcgcccaggccaagggggccgccaccaccaccgatgttgcacagaagattgttaagcaggttgagtatcagttcagcgacatcaacctggtggcaaacgagttcttgctcaagattatgaacaaggacacagaaggctatgttccgttgtcagtcattgcatcctggaagaagatcaagtctcttggggcaaccaaccagatgctggtgaaggctcttcgcacctccacaaagctcaatgtgagtgacgacggcaagaaagtccggcggaggcaggcattcacggagaagcacaaggaagagcttcagtcccgcatgatcatagcggagaatttgccagaggactcgtctcggaacagcctcgagaagatctttggcgtcgtgggaagtgtgaagaacatcaagatatgccatccacaagagcctaacaccgcaagggcttccaagtccgacacgcttgtcagcaacaagatgcacgcacttgtggagtacgagacgtcgcagcaagccgagaaagcagtggagaagctgaatgatgaacggaactggaggaaagggctccgtgtccgcacagtgctcaggcgctcgcccaagtcagtgacgaggctgaagcgtgcagacttggaccactttgtggcctccgacgacgactcgccgcactcctcatcagactccccgacggcggactgctcttcacctgccgaggcagcggcggctcacgctcacgtctatcaccagcagcagcaagaggagcagcagaatgggggcaattgcaagcacaaaggcagctgggctcgaggacgagctggcacggcgaccaagctgcacatcacggcgccgcagagcccccagtcggctcccgcgggcatggccggcggccacttcgacccgaccagcccccgcccgtcgtcgtcgtcccagaagcagtgcccctccagccccggcagcaggcagctccctgcttctgcctctgcctcctcccacaagtgccccttcagccccaggcaggctcagcatcatcctccccagggccccaggatgcccgacggcacgcgcggcttcaccatgggccggggcaagccaacgtcgccaccagcagcggcagcggtcctcgtttag

SEQ ID NO: 139551 - DNA, 1661 bp, Zea Mays
aagcagaacgggagttgagttgagacagtctgaacacgtggagtcgacgtgtgcccgcgccggcgccggccaaacgcaatccgctgacgcagagcgctaaacaaaagaagggtccctgttgccggggcccagccgccgcgcacgcccaaaacacacactgacgcgtggggccaccgcctttttttcccctttgctgcgtgtcttgttgttcctcctctcctccctcgcggacacacaaacccaaagcagagaggtgagagggagaggaccgagggagagaggagagagagcgatcgagagatgaggagggagcttgcctcccccttagctactgccgccgctgccacggccggtgcctcctcctcggctgccgcctcgctccggggctggtgggacgatgtcaacgagtcgccccagtggcaggacggggccttcttctccctcgccgccgcctacgccctcgtctccgccgtcgcactgattcagctcgtcaggatccagcgccgggtgcccgagttcggatggaccacgcagaaagtcttccacctcatgaacttccttgtcaatggggtccgtgctctggtgttcggcttccatgtccatgtcttcctccttcgcacaaaagtatacaagttggtgttgctagatctccccggcttgttgtttttctccacctacaccttgctcgtgctcttctgggcagaaatataccatcaggctaggagtctcccaacggacaagctaaggcctgcatacattgccgttaacgccatcatatacgttgttcagctttgcatatggatatacctcggaataaatgataatgccgcggttgagctggccagcaaaatattcattgtagctgtctcctttgttgcgcttcttgggttttcagtatatggtggaaggttgtttgtcttgctgagacgtttccctattgaatctaaggggcggcaaaagaagctgtatgaggtacacctgccccctacacgcgtgctagggtgaaaaggcgtgcacataatgtcgaatgtcgtgctcacatttaatgcgagccatgcagtagttatctcttcgcaaagcgaccaccataccgaataccagggttgggaccgtgacagcaatttgtgttacctgctttctgataagatgtgttgtggtcgcgctatctgcatttgatgctgatgtatctctcgaggttttggaccatccagtcctggatttcttctattatatgtttgcggagatactcccttctgcgctggttctcttcgtccttcggaagcttcctcccaagcgggtatcggcgcaataccaccctattaactagggagttctttgtttttatgatgttacatgctaagaactccggataagctggaactgctgaaaacctacatccggttgtattgctgtaatattttatggaagcatcccagggttggcaagatgcatcatcaccatcatgctctatgagaaaagagttttgagtggtgctaatgagtttgtgctactgctagccagagcatcacatgacatctccagcagagtaccataccattatttgaattgcatgtgcattcttgacgcggacaaggccaatgatttatcgccttgttggtcccagtgacttttatggagtacttgtgtggtaattgttggta

SEQ ID NO: 139552 - DNA, 1531 bp, Zea Mays
aagcagaacgggagttgagttgagacagtctgaacacgtggagtcgacgtgtgcccgcgccggcgccggccaaacgcaatccgctgacgcagagcgctaaacaaaagaagggtccctgttgccggggcccagccgccgcgcacgcccaaaacacacactgacgcgtggggccaccgcctttttttcccctttgctgcgtgtcttgttgttcctcctctcctccctcgcggacacacaaacccaaagcagagaggtgagagggagaggaccgagggagagaggagagagagcgatcgagagatgaggagggagcttgcctcccccttagctactgccgccgctgccacggccggtgcctcctcctcggctgccgcctcgctccggggctggtgggacgatgtcaacgagtcgccccagtggcaggacggggccttcttctccctcgccgccgcctacgccctcgtctccgccgtcgcactgattcagctcgtcaggatccagcgccgggtgcccgagttcggatggaccacgcagaaagtcttccacctcatgaacttccttgtcaatggggtccgtgctctggtgttcggcttccatgtccatgtcttcctccttcgcacaaaagtatacaagttggtgttgctagatctccccggcttgttgtttttctccacctacaccttgctcgtgctcttctgggcagaaatataccatcaggctaggagtctcccaacggacaagctaaggcctgcatacattgccgttaacgccatcatatacgttgttcagctttgcatatggatatacctcggaataaatgataatgccgcggttgagctggccagcaaaatattcattgtagctgtctcctttgttgcgcttcttgggttttcagtatatggtggaaggttgtttgtcttgctgagacgtttccctattgaatctaaggggcggcaaaagaagctgtatgaggttgggaccgtgacagcaatttgtgttacctgctttctgataagatgtgttgtggtcgcgctatctgcatttgatgctgatgtatctctcgaggttttggaccatccagtcctggatttcttctattatatgtttgcggagatactcccttctgcgctggttctcttcgtccttcggaagcttcctcccaagcgggtatcggcgcaataccaccctattaactagggagttctttgtttttatgatgttacatgctaagaactccggataagctggaactgctgaaaacctacatccggttgtattgctgtaatattttatggaagcatcccagggttggcaagatgcatcatcaccatcatgctctatgagaaaagagttttgagtggtgctaatgagtttgtgctactgctagccagagcatcacatgacatctccagcagagtaccataccattatttgaattgcatgtgcattcttgacgcggacaaggccaatgatttatcgccttgttggtcccagtgacttttatggagtacttgtgtggtaattgttggta

SEQ ID NO: 139553 - DNA, 1481 bp, Zea Mays
aagcagaacgggagttgagttgagacagtctgaacacgtggagtcgacgtgtgcccgcgccggcgccggccaaacgcaatccgctgacgcagagcgctaaacaaaagaagggtccctgttgccggggcccagccgccgcgcacgcccaaaacacacactgacgcgtggggccaccgcctttttttcccctttgctgcgtgtcttgttgttcctcctctcctccctcgcggacacacaaacccaaagcagagaggtgagagggagaggaccgagggagagaggagagagagcgatcgagagatgaggagggagcttgcctcccccttagctactgccgccgctgccacggccggtgcctcctcctcggctgccgcctcgctccggggctggtgggacgatgtcaacgagtcgccccagtggcaggacggggccttcttctccctcgccgccgcctacgccctcgtctccgccgtcgcactggctaggagtctcccaacggacaagctaaggcctgcatacattgccgttaacgccatcatatacgttgttcagctttgcatatggatatacctcggaataaatgataatgccgcggttgagctggccagcaaaatattcattgtagctgtctcctttgttgcgcttcttgggttttcagtatatggtggaaggttgtttgtcttgctgagacgtttccctattgaatctaaggggcggcaaaagaagctgtatgaggattgtctactcaaataaggtgataaatactaaagtatgcttgcacaacggcttcaggtacacctgccccctacacgcgtgctagggtgaaaaggcgtgcacataatgtcgaatgtcgtgctcacatttaatgcgagccatgcagtagttatctcttcgcaaagcgaccaccataccgaataccagggttgggaccgtgacagcaatttgtgttacctgctttctgataagatgtgttgtggtcgcgctatctgcatttgatgctgatgtatctctcgaggttttggaccatccagtcctggatttcttctattatatgtttgcggagatactcccttctgcgctggttctcttcgtccttcggaagcttcctcccaagcgggtatcggcgcaataccaccctattaactagggagttctttgtttttatgatgttacatgctaagaactccggataagctggaactgctgaaaacctacatccggttgtattgctgtaatattttatggaagcatcccagggttggcaagatgcatcatcaccatcatgctctatgagaaaagagttttgagtggtgctaatgagtttgtgctactgctagccagagcatcacatgacatctccagcagagtaccataccattatttgaattgcatgtgcattcttgacgcggacaaggccaatgatttatcgccttgttggtcccagtgacttttatggagtacttgtgtggtaattgttggta

SEQ ID NO: 139554 - DNA, 1294 bp, Zea Mays
aagcagaacgggagttgagttgagacagtctgaacacgtggagtcgacgtgtgcccgcgccggcgccggccaaacgcaatccgctgacgcagagcgctaaacaaaagaagggtccctgttgccggggcccagccgccgcgcacgcccaaaacacacactgacgcgtggggccaccgcctttttttcccctttgctgcgtgtcttgttgttcctcctctcctccctcgcggacacacaaacccaaagcagagaggtgagagggagaggaccgagggagagaggagagagagcgatcgagagatgaggagggagcttgcctcccccttagctactgccgccgctgccacggccggtgcctcctcctcggctgccgcctcgctccggggctggtgggacgatgtcaacgagtcgccccagtggcaggacggggccttcttctccctcgccgccgcctacgccctcgtctccgccgtcgcactggctaggagtctcccaacggacaagctaaggcctgcatacattgccgttaacgccatcatatacgttgttcagctttgcatatggatatacctcggaataaatgataatgccgcggttgagctggccagcaaaatattcattgtagctgtctcctttgttgcgcttcttgggttttcagtatatggtggaaggttgtttgtcttgctgagacgtttccctattgaatctaaggggcggcaaaagaagctgtatgaggttgggaccgtgacagcaatttgtgttacctgctttctgataagatgtgttgtggtcgcgctatctgcatttgatgctgatgtatctctcgaggttttggaccatccagtcctggatttcttctattatatgtttgcggagatactcccttctgcgctggttctcttcgtccttcggaagcttcctcccaagcgggtatcggcgcaataccaccctattaactagggagttctttgtttttatgatgttacatgctaagaactccggataagctggaactgctgaaaacctacatccggttgtattgctgtaatattttatggaagcatcccagggttggcaagatgcatcatcaccatcatgctctatgagaaaagagttttgagtggtgctaatgagtttgtgctactgctagccagagcatcacatgacatctccagcagagtaccataccattatttgaattgcatgtgcattcttgacgcggacaaggccaatgatttatcgccttgttggtcccagtgacttttatggagtacttgtgtggtaattgttggta

SEQ ID NO: 139555 - DNA, 1064 bp, Zea Mays
aagcagaacgggagttgagttgagacagtctgaacacgtggagtcgacgtgtgcccgcgccggcgccggccaaacgcaatccgctgacgcagagcgctaaacaaaagaagggtccctgttgccggggcccagccgccgcgcacgcccaaaacacacactgacgcgtggggccaccgcctttttttcccctttgctgcgtgtcttgttgttcctcctctcctccctcgcggacacacaaacccaaagcagagaggtgagagggagaggaccgagggagagaggagagagagcgatcgagagatgaggagggagcttgcctcccccttagctactgccgccgctgccacggccggtgcctcctcctcggctgccgcctcgctccggggctggtgggacgatgtcaacgagtcgccccagtggcaggacggggccttcttctccctcgccgccgcctacgccctcgtctccgccgtcgcactggttgggaccgtgacagcaatttgtgttacctgctttctgataagatgtgttgtggtcgcgctatctgcatttgatgctgatgtatctctcgaggttttggaccatccagtcctggatttcttctattatatgtttgcggagatactcccttctgcgctggttctcttcgtccttcggaagcttcctcccaagcgggtatcggcgcaataccaccctattaactagggagttctttgtttttatgatgttacatgctaagaactccggataagctggaactgctgaaaacctacatccggttgtattgctgtaatattttatggaagcatcccagggttggcaagatgcatcatcaccatcatgctctatgagaaaagagttttgagtggtgctaatgagtttgtgctactgctagccagagcatcacatgacatctccagcagagtaccataccattatttgaattgcatgtgcattcttgacgcggacaaggccaatgatttatcgccttgttggtcccagtgacttttatggagtacttgtgtggtaattgttggtattcctgaggactagatctgaaactg

SEQ ID NO: 139556 - DNA, 1868 bp, Zea Mays
aaacgatttcgcggtgctcgtgcttcgctgcccactttctccacttcctcctcctcgcgagctcagctcgcgcaccgccgcagacagcgccgccgccctctcctcctccccttccgctttgccgccacccactgctgccggccgccgcaggcaccccatggccccgaccgggcggctcctcgcggtagccgccctctccttcctatgtctgcaggggccgtggggagattcaggcagcgcatttgctcagagccagccgccgcttcaccggaccgttcgcgcagaggcaaatgacggcggcggcctcatgccggagctcccgcccagcggcctcatgcccatgccggagctctcacccagcggctctcccacgccatttgtccccttcctggcgcccgctccgctcgcgccattctttaacaacagcacgccaaagctctcaggaaaatgcacgctgaactttaccgctgtcgacaaactcatgaccaccacagctgtcgactgcttcacctcgtttgctcctttcctggccaatgtcatctgctgcccgcagcttcaggcaacactgaccatcctcatagggcagtctagcaagcagacagggtctctcgcattggatcccacggtggccaactactgcctgtccgatgtccaggagctgttgctgagccaaggcgccagcgacaaccttcacagcctctgctcggttcacctctctaatgtaaccgagggatcctgccctgttagcaccgtcgatgcgtttgagagcgccgttgattcgtccaagcttcttgaagcctgtcgcaagattgactctgttaatgagtgctgcagccagacatgtcagaatgcgataaatgaagctgcccagaaaatctcgtccaaggacgcaggtttgacgagctacaccgggagtcccaagactgacagctgtaggaatgttgttctgagatggttgtcaagcaggcttgacccacggtccgcgaaggaaatgctgaggcagatttccaactgcaatgtcaatggagtttgtcctctaagctttccagacacaagtaaggtggcaaaagagtgtggtggaacaatgacgaacagtactgcatgttgcaaggcaatgttaacttatgtagcccatttgcaaaagcaaagcttcataacaaacttgcaagctttaaattgtgcctctttccttggggcaaagttgcaaaagatgaatgtcagcatgaatgtctatagctcttgtcaaataacattaaaagatttttcactgcaagttggatctcaagaatctggatgcctccttccaagtatgccctctgatgcatctttcgacagcacttctgggattagcttcacatgcgatctgaatgacaacatcgcagccccatggccatcttccatgcaagcaccatcttcatcgtgcaacaagtctgtcaatatcccagagcgacctgctgcgacatcggcacaaagtggtgtgaaccacaagaacctaaagctaagactgcttgcctctttggtctcccttcttctggtgctcttggtacaagtttagcaaggtccagttgccctattatcgcgatgattcgttcaggagagctaactggaagtcagtgaagcgctgagttttttgcgatctcgcggtcgcatcgaagtgtagtaggtttcacgtgtattttattttattttattttttgaatctcctggtagcaattagtgtagtttgttgtaaggaatatatgtataatataatgatagtagtaacttatattcatttgtatagcgagaaagaacgtctggtggacggattccagcattgtttaacacaatgtttattgtttactaattgatgtgtttgatgttgatag

SEQ ID NO: 139557 - DNA, 2019 bp, Zea Mays
aaacgatttcgcggtgctcgtgcttcgctgcccactttctccacttcctcctcctcgcgagctcagctcgcgcaccgccgcagacagcgccgccgccctctcctcctccccttccgctttgccgccacccactgctgccggccgccgcaggcaccccatggccccgaccgggcggctcctcgcggtagccgccctctccttcctatgtctgcaggggccgtggggagattcaggcagcgcatttgctcagagccagccgccgcttcaccggaccgttcgcgcagaggcaaatgacggcggcggcctcatgccggagctcccgcccagcggcctcatgcccatgccggagctctcacccagcggctctcccacgccatttgtccccttcctggcgcccgctccgctcgcgccattctttaacaacagcacgccaaagctctcaggaaaatgcacgctgaactttaccgctgtcgacaaactcatgaccaccacagctgtcgactgcttcacctcgtttgctcctttcctggccaatgtcatctgctgcccgcagcttcaggcaacactgaccatcctcatagggcagtctagcaagcagacagggtctctcgcattggatcccacggtggccaactactgcctgtccgatgtccaggagctgttgctgagccaaggcgccagcgacaaccttcacagcctctgctcggttcacctctctaatgtaaccgagggatcctgccctgttagcaccgtcgatgcgtttgagagcgccgttgattcgtccaagcttcttgaagcctgtcgcaagattgactctgttaatgagtgctgcagccagacatgtcagaatgcgataaatgaagctgcccagaaaatctcgtccaaggacgcaggtttgacgagctacaccgggagtcccaagactgacagctgtaggaatgttgttctgagatggttgtcaagcaggcttgacccacggtccgcgaaggaaatgctgaggcagatttccaactgcaatgtcaatggagtttgtcctctaagctttccagacacaagtaaggtggcaaaagagtgtggtggaacaatgacgaacagtactgcatgttgcaaggcaatgttaacttatgtagcccatttgcaaaagcaaagcttcataacaaacttgcaagctttaaattgtgcctctttccttggggcaaagttgcaaaagatgaatgtcagcatgaatgtctatagctcttgtcaaataacattaaaagatttttcactgcaaggtaagttattcaagacttatcaattgattacgcataagggtcatatttatcttctggctctgcattttgtggcaactgaactgatgaagtatttatttaccttttcaaccggtgtgtttgaatgactggcccctactggatttgcaaacagttggatctcaagaatctggatgcctccttccaagtatgccctctgatgcatctttcgacagcacttctgggattagcttcacatgcgatctgaatgacaacatcgcagccccatggccatcttccatgcaagcaccatcttcatcgtgcaacaagtctgtcaatatcccagagcgacctgctgcgacatcggcacaaagtggtgtgaaccacaagaacctaaagctaagactgcttgcctctttggtctcccttcttctggtgctcttggtacaagtttagcaaggtccagttgccctattatcgcgatgattcgttcaggagagctaactggaagtcagtgaagcgctgagttttttgcgatctcgcggtcgcatcgaagtgtagtaggtttcacgtgtattttattttattttattttttgaatctcctggtagcaattagtgtagtttgttgtaaggaatatatgtataatataatgatagtagtaacttatattcatttgtatagcgagaaagaacgtctggtggacggattccagcattgtttaacacaatgtttattgtttactaattgatgtgtttgatgttgatag

SEQ ID NO: 139558 - DNA, 2163 bp, Zea Mays
tgctgctgaccgtgaccaccggagcggagaatgaacgaatctatctgctcctatcaagtacacaacacaagtagacagactatagaataggatgaatagttcttctcccctgcgcgatggcgatggcttcctcgtgatgcggcgctcggtctcacgccacacatgacaagtcacatgcgcatgcaaaccaaccacatcacctccctctcctctccacgagagggatgagatgagaacatgatcattccatgaccccctcctccgccaccgctcgccgccggacctcccagaggaggcgtccctgcaatgccgcctctgcctccgccagggccctcgccgccggcctctggaggctgcgccacgccgagcggatgatggcggccggggcctcgccgccgcccgccgcccaaacgaaaccgcaaaagctcatgggacggagccggacgaggccaagccaccacctctgccgttgccgatgtactagcagcagcactaggaatggcatcctagacaagatcgacgcgtgcttggacggctcctcgtccatggagaaggccaccaaatgggatgccaaccactcgcatctgaggggaagaagagcacggggactccgattggacaacatcttcttcgcctcgacatcagcaatgtcttcccctctgctgctgctcatggaggcggagctggagaaggcgcgaggcgaagccagggagctggaggaggagcggcgccttatgaccaagcgcctggaccgcttcctgcggaggctggccgaggagaaggcggcgtggaagtcccgggtccgggacaaggcccgccacgccgtggccgccctccaggacgagctaggcgcagagcggaggcaccggaggcagctggagcaggccaacgccaggcttctgcgcgacctggcggaggcgcgggcggcggccaagcagcaggcgcagagctacgagatggagcgcaaggcgcgggagctgatggaggacgcctgctccgagctcacgcgggaggtggaggaggaccaggccgaggtggagctgctccgcggggagtgcctgcgcatgcgggaggagatggaggaggagcgccgcatgctgcagatggccgaggtgtggcgggaggagcgcgtgcagatgaagctgtccgacgccaagctcgcgctcgagaacaagtacacgcacctcaaccgcttgcaggcggagatggaggccttcctccgcaacaagggcgacgagtcagcctcccactccgccgtgctgcgggaggcgcgcctcataagcgacgccgctgcagccacaagctcggaccacttccgccgcaaggaaagcgaaaggcaacatgctgccgctgcggaaagggaaagggacggcgacgggcgcaggaacagcaggcccgcgagccccgcgtcgtccaaatccagcgacatgctgcagtccgtcagccccgcgaccgacctcttcttggccaaggccgacggcggcgacggcgacgacgacgacgacgacgacatgttcgccgacggtggcagctcggccgacctggaaatggcttcctgcagctgggtcggcaccagcgaccgctcagcttcggtggccaacggcaacggcggggtgacgacggaggctcgttcgtcaggcgcgagccggcgttcaaccaagaacaccgcgctcatacgcaggctctggaggtccgccatcaccgagagcaggaagaagaccgggaggacagctgccgactggtcgccgtcttattcggacaggaggatgtcgagcgtgaccgcggaagggccgccgccgccgcttcctcctccagccgtcgcaggcgagcagtgcagctcgtcaggcggctctggattgccacagcgggtagggggagggggaggcaggctgaagcagagcctcaaggagaagctgatggaggcgaggatggacgatcagaagcccctcccctccgtgtgcaaaaaccttgatgacgagcaacactaccaaaattcatcagatcacaaattctgaatatatggtattgatagattaataggcatatataaataccaccataacatccatgtactactccctgtattatattatattatattgtattatattgcactcctacataacatactagtcttgatgtccaatgtacattgttcacatc

SEQ ID NO: 139559 - DNA, 1370 bp, Zea Mays
tctgttggatcgatggcaatataaatccactactgcagtactagccagctacctagctatagccaagaactctatctagctagagacgatggccagcgtcgtcgcagcagcaagagcggcggcggcagtggtgctgctcctggctgtgtcgacgacggcgccgtcagcggatgcccacgtggtgatcggcgcgtacaacaagacgtgcccgcaggcggaggacgtggtgctcaaggagatgacggccatcgtggccaagtcgccggacctcgcgggcgccgtgctccgcctcttctccgtcgactgcttcgtgggtggctgcgagggctccatcctgctcgactccaccgccggcaacaccgccgagaaggacgcggcactgaaccagggcgtccgcgggtacgaggtggtggacgccatcaaggctaggctcgacgccgcctgccccggcgtcgtctcctgcgctgacacgctcgcgctcgccgcgcgtgactccgtcaggctgacgaaaggcccgttcatcccgctcccgactggccggagggacggcaacaggtcggtggccgccgacgtcgccctgaactcgccgccgccggacgccaacatcaccgatatcatcgccctgtttgctaaaaagttcaacctcaccgccaaggacgtcgccgtcctctccggcgcacacacaatcgggaaggcgcggtgctccacggtgtcgccgcggctgtacaacttcggcgggcagaacggcgcgtccgaccccacgctggacgccaactacacggccacccttcgcggccagtgcaagcccggcgacaacgccaccctcgtctacctcgaccctcccacgcccaccaccttcgacgccgactactacaccctcgtcgccggcaacaagggcctgctctccacagacgccgccctcctcctcgacaccaccactagcgcctacgtcgcgagccaggccaacgccaccgcgccggcgaccgagttcttcgccgacttcgccacgtccttcgtcgccatgagcaagctgggcgcgctcacgcaccacaatggagagatcaggcaggtctgctccaaggtcaacccgccgacgtcgtcccagctgtccaacgcagccgccgtccccggtgggttggcagtgtcactcgctctagctgtggtggctctcgtgctaaagctctgagtctgacagctgacagccagcgcctgtttattatgatttgttccagtttggtgattcaatttcaatttcctctgatttgtgtttgcgtggcttcatgtgctgtgttagtttcatccatgatttcgcatggaatttgctttgcaaggtttctcactcgtgaattgcattattgggcaagtccagt

SEQ ID NO: 139560 - DNA, 1344 bp, Zea Mays
gttgggcacatggcatgcacgtcgtcgacggtgccggtagtggtcatgtcatgccgaccatgaactgcgcgcatatccagcaaggtcaacggcagccaccgcggacgaaggaacattcttcttccattgctggcctataaatacattgcgttgttttagttggtgtttcattccctggcaggctcgacgtgatcgtcgcagtaatatccatcaaccgccatggcctcctgcgtgccgtcgtcgaccttgttccggaggctgctgctggtgctccagctcgcggtggcggcgctgacgaccctgggcgcgcaggcgcagctgcagtacgggtactacaacgagacgtgcccgggcgtggaggacctggtgcgcgacgccctgcttgccaagttcgccgacgacgtgacgctccccgcgggcctgctccggctccacttccacgactgtttcggcgccgggtgcgacgccaccatcatgctcaagtcccacaacgggacggcgcagcgggacgcggaccccaactcgacggtgcgcgggtacgaggccatcgaggacgtgaaggccaaggtggaggcggcgtgcccgctggtggtgtcctgcgccgacatcatggccatggccgcgcgcgacgccgtgaactacaccaagggccccgcgtaccaggtggagaccgggcggcgcgacggcaacgtgtcccgcaaggaggacgcgcagcggctcctgccccccgccgacggcaacgccaccgtgctgacgcgctatttcgccgcccagaatttgacgatgaaggacatggtggtgctgtcggcggcgcacaccctcggcgtcgcgcactgcccgtccttctccggacgcctgtacaactacaccggcgccggcgaccaggacccgtcgctggacgcggcgtacgccaagaacctgacggaggtgtgctcgtcgccgtccgacgtggccagcgtgcagccgctggacccggtgtcgccgaccaccttcgacatggggtacttcaaatccgtgtacaaccaccaggcgctgctggcctccgacgctgcgctgctggaggacagcctcaccggcgcctacgtcaggctcatggccaccaacgcctcctactacgccgacaccttcttcgccgacttcgccgtctccatgatcaacatgggcaggatcggcgtgcgcaccgccaccgacgacggcgagatcagggctacatgcgccgtctacgtcgactgactgaccgcccgatgacgacgctcgcttgctgagatttttcactttttcttctttcagttttccaacaagttcgttgctcatgcatgcatggcacttcttaaatggcatcgt

SEQ ID NO: 139561 - DNA, 1145 bp, Zea Mays
aaaacaaacaagcttcggttctccgtagcgactgcgctgcaatcaggtcgtcgtagtacgtaggtgttagccacatacgcatcaggaagctaacgagaagatcagatcggaggtaacggcaatggcaatggccaaggccagcatcctcgccaccttcgcggccgtggcagctctggcggcggtgcagctcgccgcggcggcggaccaccccgtgggaggcgacggctcctgggacgccagcggcaccaccggctacgacgcctggtccgccaagcagacgttcaagcagggcgacaccttgtcgttcaagttcgcgccgtcgcacgacgtgacggaggtgagcaaggccggctacgacgcctgctccggcagcaaccccgtgaagtcctacaccggcggcagcgcctccgtgaagctgtcggccccagggaagcgctacttcatctgcagcgtgcccggccactgcgccgcgggtatgaagctggaggtcaccgtcgccgccgccgcggtcaccgccgcgccggcccccgccaagacgaccaagccccggcaccagaggagcgtctccccgaccccggcccctgccgcggctccggctgcgccgtccaccgacgagatgcccaccgtgtcctcgcccaccgcggcgccggcgcccaagtcctctgacgcctccacgcttggagccaaggctgtcgtggggctcgccgtcgccacgatgctcaccttcttggccatgtgagggcgagtcgtgctgcgtgacgcgcatgatttttgcagataaatgtattatatacatacatatatactccagcgattcattattgcattgcattgcattgtcgtcagtgcggcgcacccaccgacggttgttgctgacaagagttcatttaattgccggccttttttttattcgattgttaattatactgctacgatgtacttactacttgaattattagtgtatttgttgtcactgttgatcatccaataaatttatcattattattcttccaacacagttggtatttggtgatcacgacctgtatttaaggtctgaatgatatatgtatgctcacaaatgtcttgacttcttaaaaaataaatgatgagtactactactacagtactactggtaccgaacaatc

SEQ ID NO: 139562 - DNA, 2407 bp, Zea Mays
agcagtcggcatctacgactacgattgagtcaagacgccgttgggctgggcgcctctggggcgggcggcggcgcatcaggcgacggcaacgcaggtggtggaggtgacggcagcagctggtccggcggcggtggcgacgcgatctccgccagcggcggcggtggtgacgggaatgccggcgggggcagctgctgctcgggaggtgggagcacgggcaccggcggcggcggtgactggaatgccggcgcgggcagctgctgctcgggaggttggagcacgggcaccggcggcggcggcggcgacagaggggtgtcgggcacagccgtcggccgtgagggcggcggcggccaggcggcggcgtccggggagggaaaggcgggatcttgcgcgggcgtgggcgtgggcggcgggcgggcggccgtggcgggcgagcggtatgcggggtccgtgtcgggcaggacgggctggcacgcgtcggcggcggcgcacgcggacgatgcggaggcggggctggacttggcggcgcggtggaggacggcgcggaaggcgaggacgacgccgacgacggcgagggcggccaggagggcgaggaagatcttggtggccttgcccacgtagcagccgccccgcatggctggcggctctggctgctcgtcctgtgtgcctgtgtctcgtggccttccttggtttggtggtggttgatggctggtggggcggtggtggctgagggagtgagtgagtactcagtagtggaggagtgatccagatttgaatcgtaccaaaaattacaggccaggccaaattcatcttcaactgcaaacctcatcaggaacggaaggatgtcggaacggccagcagccgctttcttccttttacttttttctgatatttctatcggctacgatctcatgcgttagcgagtgccgccccgcccgcgctatccactcgtctctccgtccccatggccacttatctcaacgcaccgccggcagccaccacgacgactgcaagctgccgccatgccttctccggtggcagcctccgtctactccggccgagccgaccgacgctgcacgtgacgtgccaagccgccgcctcctcccagcagccgtcgtccccgtccaggaggtcagcctgcctcctcggcatcgcgtgcgccgtcctgctccgcccacgtgccgcctccgccgccgaaaccgacgacgagccggccaacaacggctggtggctgaccgagttccccttgcccgtgcccaagatcgtcaacaaggagatcaacaacgcggagacgggcacgcgctccttcctcaagaacggcatctacatggcggacatcgggcccagcttcgcggcgcacgcgtaccggctgcgcagcacggccttcgacctgctggcgctggaggacctgctgggcaaggacgcctccaactacgtcaacaagtacctccgcctcaagtccaccttcatgtactacgacttcgacaagctcatctccgccgccgaagacaagccgcccttcgtcgacctcgccaaccgcctcttcgacagcttcgagacgctccaggaggccgtcacagccaaggacgacgccaggatcggcgaccgctacgccgagacaaagctcatcctccaggagctcatggccaagatggcctagcagaaccacaatttttcattcatatatcatgatgtgtaaatgaatacttgaaactcacaaggggtattgcagaattcccagagcagggaaatacaattatcatgtcaggctgtgtgcgtgtccgacaacgggtacacagttgtttacatacacgcccagctcagctcagaggcattgggcattgggcaaacgacaaatcaagactacgaatgaaagcaaaaaaattgaaaatggcaacacatcccaacatacaaatcagatcaggtcctaagattaatataataggccagcacacccaccgctgccagccgttagcgcaatcaacaaggccacaaaccaaataaaattggcaactcacaccacctccagacaaggggatgcaaatgatcggttgcatcaccaaatcaacacacacacaagcattacactggcagctcgcttccgccgtatttcatcattgtgagctccgcatctgggtttggcgcctggggatcccgatctcacaggagttcacccttgcagcaaaccgcaatgagcaaagagactcccctgtcgaggacgcttcaggagacagattcacaaacatcagtgtcttcgagtcccctccgagacacggctgtgttgccaaaagcatcagttagtacttgataccatttaagattaaacttttagccgaaaccaatgtgtcggaacaatacctggagcagatatgtcagctttgagttccgaaatggaacgtgttcctctttc

SEQ ID NO: 139563 - DNA, 112 bp, Zea Mays
caaaggaacaactttgagctgttataaattatttatagttttgaaatatatgctagctgaagtgaccatcctcaataagaagataaagacggggtatacttatataagaagg

SEQ ID NO: 139564 - DNA, 3261 bp, Zea Mays
caacttgtattggctgtacgcgttatccgtaactcatgtttccattataaaaaaagaaaaatgttcggagtcccataaatgtaaaaagctcgtaaacaacacaacagggaagaaagaaagaaacaaacaaacaaagaaaaagtcccgtccaacctcccacgcctctcgtccgtcttccattcctcactgccgccgccgccgcgccgcctgcttccgggagagcccccacctagaggaagctcctccggtcctcccatcctcctcctcatccaatcgtgccaacccgacccatctcatcacccgtccaagggcggagccgtcgttcccgtgcctcccgagacccatccaacccatccgggcttggattgctttcgaatcgaatctcctggatttttccaccacacacatgcatccttttggatttgtttagttcataagcccttcagactggcagatatcaagaggtcatacacatctcgcacctctaagtgggtgtgggtctgcaacaattctgcaaccaccttatccttgcctttgggagtaagcccgacctacatctggaggcttcgtcgagccttggaaggcctttttgttgattacggctaatttccaatggcagctgagatgtaacaaatttgctcagttcagttctctaggaaaagttcccgtggttcagcaatgtgattggtttcataggttttttcgtgtgttggtgatcaaagcaatctggtgtaagcttgcgtagttgacatcagagtttgtttcttatggttaggttcttttgcttttcatcctctactgcacatcacagatccaaggaggttttttccccagcagatgaaaccatgcatgcagcgtcaaagaaggattatcagttggagtccatgactggctcagttcgttcaaaccagatgacagaagaaaataaccgttcagctgttagtggtcattgtggcagtagcccatcatctcatcaagaatgctgtaggtcagaagacttgaatagatatgtgtgctctgatgagggcaaggaggttgggcacctaaagaagagtcagtcgcttgtaaacatgcttcaaaaggatcatggtcgtaattctagcgaaggctctgaggttgatgttacaaaccatgaacacaaatatgatccctctaatttgaagagatctgaagttgttggagaatctagtaagctgtacagactgaaaaatgaggatgattttgatgcctcatctgacctaatcagccatgacttttgtgaacctttaggtgatcacactgttgattctgatagccatcatgacatgccttattcccaaagcaatctcccaagatcacaatctgcaatatttcagaatgattgcaccagtgatccagaaggttctgtcgattctgagatactagggtgcagatctgttgacggtttatgttcactgactgatgagaaatttgactacctgagaggtggtgaaatgtatcactgtaaatcaaatttggatgtttattgtgcaccttctccaaatatgcaccgggcatcaaacattgacgaccatggttcagtaggttgctctgatgttgctgcagagggtcaacggtccactggaagcacagaagaattttttgtcagggatgggatcctagtaggtcacgaatactgggatggcaaatacatttgtggcgatcactcgctgggtccagttgcccttttctgtgcagattattaccattctgggaatgatgtcgacctcagtgaagctacaggtcaagagagagagctgtcgaacagagatagcacactccaccagtcgcttgtagtggaagtacctgagtcggtgagcatttctgatacaaacgacattagtggggaacctgaacacagtagaactgacattgatgaggacccaagtgaacttactccaagaacctacaatattaaaagaatcgaggattggatcaatcagattgatatcaatgatatcgctttggatgggcaaggagagaattcagtttctgctttagccaaatctcgtgaaccgatggctggcgttcctgctgtgcggcctgatgctaaaagcccgcttggtatggagatagcttacacttatatttcgaagttaactcctgcttcatcatcggcacagttggcaaaccttggtttggttgcgatcccaagactgagcgcattctcaggtttgcgcgtattaaacttatcagggaactcaattgtgcgagtaacagcaggagctcttccaaaaggccttcacatgttaagcctgtcaaagaataacatatcaacaattgaaggccttagagagttgacacgattgcgcttgttggatatcagctataatagaatatctagaattggccatggattggcctcctgttcctcgttgaaggagttatatctggccggtaacaagatcagtgaggtagatggtcttcaccggcttctgaagctcaagattctggacttgcgccacaacaagatttctacatcaaagggcctcgggcagctagctgcgaattacaactctctagaagccattaaccttgccggcaaccctgcacagaagaatgtaggcgatgagcacctgaagaagtacctgcttggtctcctgccaaacctcgctgtgtacaacaagcagcctattagggcgactggatcaaaagacgtctcggaccgccatacccgcaagatctcttcttcgcaccattctgaccgtggtggcagacccgaccgcagatcttccaggttggtgggtgccccgtctgctcacaagccacagagctcgcggcatggacgctctggatatgtgtcaagctcagcgctcaagtacacgagagcccgcaacacgcacaagacctcgctggggtcaaggccccttgaacatgcgagtgccatagatctggcgaagcaaacccagacagagggaaggacacagtaagatcagtcaagcacgaccatcgatatactaccatggtattgttgtgaagtaaagcgaggcaccagttttgctggtggattttttttctctctcacgtgaataaagctcaaaacagtaaacagagcagtgctttcatatcagcccatatttttttttctaatattgttgagtggtattgatggcaattgggaattgtatgatttacttgccttatgaataaagcttgaaagaaacaaaataaagattagtattttttttcaagatgtcttctataagactgtactattgcttggtggtgaaattttgtgaacat

SEQ ID NO: 139565 - DNA, 625 bp, Zea Mays
atggccatccgcgtcagcagctcggtcgccgcaaccgcaagcaacaggagcctcctgctcgtagtagccggcgtcgctctggccctcttggcgtcgccgtcggcggtgtcggcccgccggcgccccgtgcggctgcgcctgtacatgcacgacatcgtgggcgggccggggcagacggcggtgcggctggtgaagggcccggccgggcccggagaacccgtcgatgcacccgggcaactgcttcggcgacacggtggcggtggacgacctcctgacggcgggcctcgccgccggctccgcgcccgtcggccgcgcgcaggggacctacatgacgggctccatgagccgcccggtgttcgtggtcgccgtcacgctcatgctcgccgcggggccctacaacgggagcacgctcgtggtggccggccgcgacgacacctcgcagccggtgagggagctcgccgtggtcggcgggacgggggcgctccgccgggccgcgggccacgtgctgtggagcacggccagggtggagtcctcagtgcacgccgtgctgcaactggacgtgcacgcgtccgtgccggcgccgagcaagactgctgctgcggagttgctcgtcagctctgcctga

SEQ ID NO: 139566 - DNA, 762 bp, Zea Mays
tgctcaccaaacccagaaggatccaaccaccgcaaccactacggcgacgacccacccgccggtggacttggagcctcccgacgaccccgacgaccctgaccctgcggacggggatccgcctccgccgtcggcgtcgccggcgtccgtggtgccgttgccgtccgtggtgacgtagacatccagctggacggtggcgtcggtgccgttgatcccatccggcgtcttccacagcacgtagcccgtggccatccggaacgtcccggtgccgccgacgacggggatctcccggacgtcctggccggtgtcgtcgcggcccagcacggcgagcgtgctcccgttgtgggcccccgacgtgagcagcaggttggcgcacaccataagcgccgccccggtctgggacgccagcatgtagaagccctgcatgcggcccagcgcggcggacgcgggcgacgcctcctccgtcagcgggtcgtcgatcaccatggtgtcgccgaacgtcatgcccagcgccggcgccgtcggggtggaccccgcgccgggccccttgatcaccttcaccgcggtcgggctggcgcccgacgtgatgtcgtgcatgaagaagctcaggtgggtggtgccgttgtccgcgtccgccgccatcgtcaggatggggaatgagggggcgacggacgtggcaatggcaacgaggaagacgaggaggacgggcgcggtggtggtggccatggcggcggaaggccggccgccgcttgccgcgtgaaggga

SEQ ID NO: 139567 - DNA, 1720 bp, Zea Mays
atttccatgggtgtttagtttcatatctgcagtgaatcttgcaaagtagtggcacgtgttttagtttttagtgcggaaggaaaaaggtaaaaaaaaaagaagaggaagcaaaggtgaggttggattggtgaactgggcagggcatggcaggagggaggggcaccagccaagccaaccatagcaacttctctaccctaggcgtctctgtcagcccactccgatttgggccgccaccactagtgatggcccatcaccgccgccgcctcctccactctccctccatccatttaccaccccaccccgccgccgccctcctcttctctcccctgagcctgactggaaccttcccgagagaggatacaaaggcacccggatcgaggaaaccaatccattccattccacacaaggctaggcacaagcgaaccaaacccatggcgtccgacggcagcggcgtggtgacggtgtacggcagcaacggcgcggagctgctggagccgtccaagcagcccaagtcggcgactttctccgtcaaggtggggctggcgcagatgctccggggcggggtcatcatggacgtggtgaccccggagcaggcgcgcctcgcggaggaggccggcgcgtgcgccgtgatggcgctggagcgggtccccgccgacatccgcgcgcagggcggcgtggcgcgcatgtcggacccgggcctcatccgcgacatcaagcgcgccgtcaccatcccggtcatggccaaggcccgcatcgggcacttcgtggaggcccagatcctggaggccgtgggcgtcgactacgtggacgagagcgaggtgctgacccccgccgacgacgcgcaccacatcaacaagcacaacttccgcgtccccttcgtctgcggctgccgcgacctcggcgaggcgctccgcagggtgcgcgagggcgccgccatgatccgcaccaagggggaggccggcacgggcaacgtcgtcgaggccgtgcgccacgtgcgctccgtcatgggcgacgtccgcgcgctccgcagcatggacgacgacgaggtcttcgcctacgccaagcgcatcgccgcgccctacgacctcgtcatgcagaccaagcagctgggccgcctccccgtcgtgcagttcgccgcggggggtgtcgccacgcccgccgacgccgcgctcatgatgcagctcggatgcgacggcgtcttcgtcggctcgggcatcttcaagagcggcgaccccgcgcgccgcgcccgcgccatcgtccaggcagtcacccactacagcgaccccaccatcctggccgacgtcagcacggggctcggggaggccatggtcggcatcaacctcaacgaccccaaggtggaacgatacgccgccagatccgagtgaaccctttctttccgtagtcatctccatccatctgccttggattgcatttccgtcgtctcatgtctctcaatcagtaataatggaatgaatgaaatggtaagaaacaaagctatggtactatgcagaacctctttaattttgtgctactgtactaagttagcctagtcccccccaccctggattatcatgtactcaaatgttggatggattgtatgtctgtcactgagccagaccttattgctatgaacgatgaatcaatcctctttctcgaggctaagacggctaatcgccttgatcggaaaggtgaagtgaatgagcaaaatcttgtttgcact

SEQ ID NO: 139568 - DNA, 849 bp, Zea Mays
atctccagaaaagggtgagtgaggtgtggaattgataatctgaatacacatacacccatctcaacacgttttaccagcaacggacaacaagatacaagctccatactaactatgtttctattcctcatcagaagagtcgattgaaggaacctttttttcctcactgacagcggaagaatcctactcataaaacaaaaaaaaggtcagttagagacaaaaggcagacagactgcgcataaatttccacttcgtggccaacagaaaaaagaacacatcaatgaggagacattaccttcattttgtcccagtccttcaatttagaaccaagcatgtatgtgtcacgaagaggtgcccatgctggttcatcttcatctttgacggcgtgctagaaaaggcagatatcaaacatgagaaagacagcccaaggcattaagattcacatttcacttacaaagcaattatcgcaccagagtggatagtagcaaacaccagctagtaacaccacctatcaggctaaagactaacccacacatgtgactcttcaatttgtaaaaccaaatttgttaactggcctcgttagtctttagttagaacaatcatgaaaaccaggacccctaattttaccactgctgtccagccttgtcgttattatcccatggcaaacaaacaaatctttaggagcacggagcctgggtactggctagcacctagggtgcctagaaaattaggcattttgtctttgccagtaaagagagaaccgggcacagaacaagaggatggcaccgtgttcatggttgccgctactaaaccatttactcaaatggttatggtcgccaggtctagtcagcc

SEQ ID NO: 139569 - DNA, 2278 bp, Zea Mays
agcctgatgacattatccaccaggaaaaggagaagagcccgtggccgtggcctggccccagctcccagccccagccaacaaaagagaagcccggcccgaactctccttccatcggccgtcgaccgatccgtctccactccaggttcacttcgcctctccctcgccctctctctctccttgcttctacccctctcccctccaggctccaggtgccctaccgccggaccggcgcccgcctcatgaaggccaaggcatccgccgccgccgccgaggatgacgccgaacccaagaagatccggtcctcacgcagtaagcaccgccgacgccgtcacagccgctcctcctctaggtccgaatctccgccccgcaagcgctccaagaagaacagcaagaggattcctgacaagaagagcaagaggagcaagggcagccgcggcggcagccttagacgtcggcaccatagtcttagccatagccgtagccttagtagcagcccttcctcagtagcccgacgcagcagctcctcatgtagcagcagcagcgcctctgagaggtcggtgagcccgccacccaggagcaggtccagagatgtaaggaggaaaaagggcagagggaggggcagggagagggatcgtaaggggagaaagttgcggagatcggcaagttcatctagcatctcagcaagcagtggcagtagcaggagcaagagcaggaagcggatgactgttggtggcactaaggatcgcgctacaactacaagggataagatggaaaagggctacactgatcgccgttcttgtcggtctgtcatgaacgtggacgagcacgttgatggggatgaagacaggctcgccattgccaaggtggtggacaatgatattgacaggcacaagaagaatttggaatcggagagctcaccttccaagaatgccaatacaacagaagagaaagtacctgcaagtggtggaaattcagatgcccaggatctggagctgattcttaggcagaaagctcttgaaaacttcagaaagttcagggcagcagcgaccatgggaggcaaaacagacagtggagctgcagggaaggaagcatcaatagacgatagcgtacacaatgctggcatggaggttgctgatgccacacattctcagagtcaggaaaccagtcttggagcgaggtattctgctggatcacctagatcacagaattttgggaatggtgcgaatcgttcttggaagcaggacaacggtgctggcatgagttgtggtggatcacccggattacttgagcctgctgagactggtggcccgactcaactgaagggaagagcagaagaatcaactcgtttggcttctcagtttttgtcaccacgggatgccaggaatggccgcagtgtaatgcaaaggctggcgccccctccaggtagttctgctagtgtaaaccaaatgttaggaagcagtgcagggctgaatcatgtcgatggagctccaagggttagatcagttgtgagcatacccgctagggaaaggcttgatggtagcacacatactacaccccttagccccagtgaggattcttcccctgttgaaagcggcggcaaagttggactccctctgaatgacactaacaaggctgaaggaaccaatggagagaacagaaaaacaagtgaagcttcggcctctgacggttccgtattgtcacctaccgaagacaagagccaggctagtattgagggtaaagatagttttcagaagaagactttctctagaatgcatgatggagagacggtggaggtgagctacaaagtctacatacccaagaggaccccagcccttgcaaggaggaaactgcagcgctgaaaacgccacaattcatcatcggtcttactatctgcaaaaactataggttttggctggatatacctattctgtgaaccacgagtgcccagcatacatgccttatggaatctggatatctgttgctcaactaaataaacagttttcctacagcaaatgtattaattgcctgggattgggtgattgagtcgttgtaatcagcaaacgtgacgtccaatactgatgaatctgtcacctgcatctattgctgttggcatagtagtattttagacatgcagtagctaccttgctgcaagcggacgttggacttggacagacactgcagaatgcagatgtgcctgactgtactctctagtctgagattgttaagcctgaagttcatatttctgctttatattattgtcgttttgatttgtttgact

SEQ ID NO: 139570 - DNA, 2343 bp, Zea Mays
aaaggagttaaatcctgtggcccatcctgctaagatgaaaattgaaaaggcccatgatcctgggctctctcgtctttcctcgacgagattcccaaaccgctccgccgccgccgctcgtcagcctccgttccaaccgccgcgccggcgacatgccgcccaaagagctgccggggttctactacgacccagagaagaatcgctacttccccatcaggggccccatcccgggcgctgccgcccgccgcggcacgccagcgccacctccggccgtggacacaacgggatgcagcaggaaaagggctaggcggccggagctgctcaacgccagggagatgtacggcggcggagtcatgttctccaataaagccgccaggtccacgttcaagcagcagtgccactacgcgcaggcgtctcagcccatggtctggaagtaccaagccaccacctctgtggctgataaggcgctcgaacaattggacgccatggttcagacaccgcaagggttgaaagagtccaggctgctagtctccggcagcatgaacggttcgattcggttatacggattagggactgctctgagtaactttgagaatgaggcagagtttttgccccaacctgcttgtactcttgtgggaaagcacaagccaggaccactccccagcatttggtcacctggaacaggcttcatagctttctcatccagtatatcatgcataaagaagctcggacgtcatgtccctgatgcatcgaacaccaattcatcagttcagcgagcattgtatcctgaactcgttacttattgtactctctatttatttggacatttggtgttgccatagttgcacatgtttgcattatgttttctttattattaactggaaatatgttgtgagcttgtgtcccttgacgttgtaaaacatggtggctactcttggatctggagaatctcgtgcctctttatatattatggatctttctgaagctgttgacttggcaatcggaccatggactacctacagagttcattcacttgatcgaacaatgtggacagctgattgtagttctgatggcacacatgcagctttcggttcggaccttggtgctggtctgatcgatttggaaacaaggggatcatcatggttatgtcgttctaaaagcgacattctttccctgaaatttgtgcactcgggaaaagttgtgctatgtggtctacggaatgggagtatagcccctgttgatgtacggcaaaaacagcataatcagcctactggagtagcttcatctagcaatgctaggaggacagttcccatgctgcccacaagacatggtgggaagcaaagaaaccaggctagcaaggataaattttcaagagttatttctatgtcgtcagcagtttgtagcttggtttcactctcatcagatgagaactacttcttaggaagctccatggatggatctatcaaactcttcgatcttcgcctcattcagaagggaggtatacagtcgtacgaggggcatgtgaactcacacacacttttaccacttgctgttgatccatctgagaccttacttatgtcaggtggggaggactgcactgttcgcatatggagcatcaaaacaggcgagctaatctttgcgcggagcatgggagacagtcccttcacgtcatcttgttggcccgaaagcagccatggcttgtgcagtccttggctgtttgatgtaaaccacagctggggagcttggttggggtcacgtgctgggttgttctatatgcatggtacttgagttattctgcactactacttacgttactaaattggagccttggagtctagagcaaaaaaaaggtggctgtattctcaagaaacatgagaccactgagctctggagtgaatgaaggacgtcgtctttggaagttacacatcacctagagctagggtgtccagtccttggtaggaattagacatgtttctcttagtggtggatactgtctagctaggaagagagtcttgagggattgatggacgcatgcatcttcaattcctgtgtattgtattactacaggtacaatctgtaatgttacacactgatgatgaattgatgatggctgatgagcaaacataccaggcagctctgtcgaagcctgttgctgatggttcaacatttcagcaacagcacatggcaaaaaagaaaagaaaaactctttctggattcctagcagacaaaatcgttgtccttgttgaacatggtcaggtctaactcctcccagttggttcgcagggtgatgaaaaagaggacgcagttctggcagaggaggccgcatatctgccccatccacagccc

SEQ ID NO: 139571 - DNA, 219 bp, Zea Mays
atgaggccgacgtggggatcgtcgaggaggaacggagcctggcacagcgccaccacctggcgcgggaaggtgagcggtttctggccgagggcgtgcgggttgccgacgttggtgaagatgatcttcttgccctccttctgcagctcggaggcgcggaggtacagctccccgcgcaccgcgtactgcaccctcttgacgttctcgttcagctcctcgtag

SEQ ID NO: 139572 - DNA, 794 bp, Zea Mays
atgggcacgggcatggatataaatttctacccgcgggtacggtcgcgagcggatataggtagcaaccgcggatatggttgcggacggatatttgcaatatccgatccgaatccgatccgttgccatccctattctcgtgtcgacgcgtgcccactacgagccgtgaggattagtgtggatatcttcgtcccttgcatttcgctggctcctccatggattcttttggccgtggactccgaccccgacgcctacattggtgaatctgttggcatggaatctggtggcacgactgcagctttcatggattcttcttttggcaccgagactctcatgttgactgccatggactctcatgtggggcgaaatgatgcgagtaaggacaatgagatggtacaagcaacatctaggttagattgggattctatggttctccgtgatgtttgggaggaggaatggggacatgatgtttgagatgcagatgtattctcaacttggacttgctgaagaggacaatgctgaggaaagtagaagagaggaagcctttagaggtgttacaagggattttgaacaatctgagcatgttatgtttttggaagagagccttatagaccaagcatgcgaagactacctaccagatgagaagagtgttatgtatgataaaacaaatccatcaatgcaacctggtattttgtttcctaacatgaaggaacttcgaattgctatgaaagaggtcctaacatgaagctatttagtggccaagttctatggaggctggtttgaaccctcttgatatc

SEQ ID NO: 139573 - DNA, 728 bp, Zea Mays
gttaccggttgcaacaccgctactccgccgacggcttgacggtggggctgggcgtgcagtggacgccgccgttccgcaagctagcaccgggcgccgagcatcggcctggcacgctgcagatgtgcgcgggcaacagctgcctggtcttccagatcgcgtgcgccggcggcgcggtccccaggatcctgcggcggttcctggccgacgcccgcgtcacgttcgcgggccgcaacgtggcggccgactgcaggatgctgcgcgcgcaccacgggctggacgtggcgtccacgctggagctccgcaggggcgggggtggtggtggtcgccagtccttggcggagatggcagagcggctgctggggatcccccgcggcctggtggagaagccccagtgggtcggcatgagcaagtgggaccgtcggaggctgtcgccggcccaggagcgctacgcggccgtcgacgcgtacgtctcgtgccgcctcggcgagtgcatccgccgcggcgtggacgccgtgtcgagccaagacgactacgtgtccagcgacggcgacgagttcgtggagagtggaggccgtgaagatctgtggtacttgttgcgaaacattcacatgtgatcaaacccatccgataggttactaaccaagagtcgcaccccttggagagtacccctgcagtctgtatataatccaatgttcccctgcaataaagacttatcgctgtcatttgtc

SEQ ID NO: 139574 - DNA, 2043 bp, Zea Mays
gtggcaccgccttccgacacccaagtcgaagtcgaagtcgagtgcatgcgatcgacgtgcatcgtcgttacttattacctctgatccgatccctcccgcgaaaccaagcacgaggttccccttgtttcccgtcaccaaatcgtgcccatgctttcctcgtccgccgaggccgccggccctgcgcggcacggcgagatgaagaagaagaagcgcatgcgccgcggcccggtggcctcgccggggcccagcgccgtgaccgtggccgtggcctcgcagacatgtggaaagtggcgtccagatgaatcacagagacctgaaatcgatgatgctcccgttttcgctccgacagaagaggaatttaaggatccaatcgggtacattgctagcattcggccgcaagcagaaagatatggaatttgccgtatcatcccaccatcttcttggagacctccatgtcctctgaaggagaagagtttctgggaaactgccgagttcaatactcgagttcaacaagttgacaagcttcagaacagggagcccacaaagaaaacaacacagtctcaagttcagaggaaaagaaagaggagaaagaggctgaggtttggtatgacacgcaggcgtcccggttcgagcgtgggctccgaagagaagtttggctttcaatctgggtctgatttcacgctagcggagtttcaggaatatgctaatgggttcaagcaggaatattttggaatgaaagggagtgatgaaatttccatttctagcattagaaaccgcataaaaatatgggagccgtcagtggaggaaattgagggcgaatattggcggatagttgtaggctctactgatgaagttgaggtggattatggtgctgatttggacactgcaacgtttggtagtggttttgctacattatcttctttggatggaaataagcaagatccatatggtgtgtcttgttggaacttgaatattctgccacggttgccaggctctgttacctcatttgaagatgaggatatacctggtgttgtagttccatggctttatgtaggaatgtgcttctcttcattttgctggcatgttgaagaccattttctttattctctaaattacatgcattttggcgaaccgaaagtttggtatggtgtccctagtggtgaagcagtaaagctagaagaatctatgagaaaaaacttacccaaactgtttgaagaacagcctgatctacttcatgagctggttacacagttatctccatctgttctgaaatcagaaggactttctgtttaccgtgctgttcagaagtcgggtgagtttgttctgacactaccgcgagcataccattgtggattcaactgcggcttcaactgtgcggaggccgtaaatgtctctcctgtggattggctgcctcatggacagtgtgctgttgagctctatagagagcagcgtcgcaagacatcgatatcacatgacaagctattactcaaggctgcaaaagaagctgccagacaactttggatgaatcacagaggtggtaaggtagaatatagatggatgaacacctgtggaaaggatggagtcctgacaagtgcaattaagacaagagttaaaatggagggtgcagcatgggaggtgaatgctcatttggaaagtaagaggatggacgaggactacgattccactgatcgggagtgcttttcatgcttctatgatctgcacttgtctgctgtgagttgccagtgcagacctaaccgctttgcttgcttaaaccatacaaaccttctctgttcatgcggaatggacagaaaaaccgtcttctttcgatatagcatggaggagcttgatactcttgtagcagctctggagggtgatccggctgcattttattggtggggacacaaccactagtgtgctcaactggctggttctttgatgcagcatagaaagattggactcatgtaaaaagcacatacatttttttttcaggattagggtcagtgattaattgatgccaatcttgttgctggatttggtgggcgc

SEQ ID NO: 139575 - DNA, 1741 bp, Zea Mays
ctcgtgtgtctctaactctatctataaaaacagtgagggctgcaagcaaaatttgccggtatcgtagtgctcgctgtctggtacgtctgcgctgtgatcgtctctccccccttgcttccttccgcagttccgctgcttgtagttgcatgcatgtggctgtgaagatgatggcatcgtccaccgaggaggagctagagatgaacaagaagaaggtgtgcgtggtcggcgccggcgtctcggggctggtatccgcccgcgagctacgccgggagggccacgacgtgacggtcatggagcagagcggaggcgtcggtgggcagtggctgtacgacccgaggactgacgccagcgacccgctcggtgctgccggcgtgcacagcagcgtctacgcctctctccggctcacctcgcccagggacatcatgggcttctccgacttccccttcttcccccgcagcaacgacgacggcgactcccggcgctacccagggcacgccgagttcctgaggtacatcagggactactgcgacacgttcggcctcatggacgccgtcaggctcaacaccaaggtcctgcacgtgggacgaccactgttggacgacgacggtgttgtgacgcggtggacggtgaggtactgctcgtccggacatggtgtctctgagcacgaggcggtcgcggaggaggagttcgacgccgttgtcgtggcctctggccactactcccagccacggctcccagccatcaacggcatggacaagtggacgaggaggcagctgcactcccactcgtaccgcgtccccgactccttccacgccgaggtggtggtgctcgtgggcttccaccagagcggcgtggacatcgcgctggagctctgcaaggtggcgagggacgtgcacgtcgtcagcgtcaagtccttggaaggcctcactcccggcgtgcgcaaggctgtgcccaggcaccacaacctgcacctgcacctccagatcgagtgcttgtgcgaggatgggaaggtcatgttcgctgacggctcgtgtgtcgtcgccgactccatcatctactgcactgggtacgacttctcgttcccgttcctggacacgggagggctggtgaccgtggacgacaaccgcgtgggcccgctgttcgagcacaccttcccgccggcgctggcgccgtcgctgtccttcgtgggcgtgccaagccaggtgcagacgccgctgttctacgaggtgcaggcgaggtgggtggcgcaggcgctgtcggggcggaggctgctgccgccggcggaggagatgctgcgggcggccgaggagtaccaccgcgccagggagaaggccggcgtgcccaggcgcatgtcgcatgccatcttcttcgacttcgactactgcgacgagttcggggagaagcacgtgggcttgccgcgcccgcccgagtggaagaaggagctcatgcgggcggccgttgcgcgcttgctccaagacacggagaccttccgtgacgactaccgcgacggtgaccttgtcctggagagcctgcgcctagagggctggtcctcagctccctccccgggcacgcttaacgacaaggagaatggaattgccatgcatgatatgatgcatgacagagatggagagacactggaataagctactagggcacagtcaacatgaatgatttggcttccagtgccacatatgcaataaagttgcaacgataagggtgtccaagttgcttggcatttggc

SEQ ID NO: 139576 - DNA, 697 bp, Zea Mays
gctcaacacatgaactgctgacccatgatgcatgtatataggtacgacttctcgttcccgttcctggacacgggagggctggtgaccgtggacgacaaccgcgtgggcccgctgttcgagcacaccttcccgccggcgctggcgccgtcgctgtccttcgtgggcgtgccaagccaggtgcagacgccgctgttctacgaggtgcaggcgaggtgggtggcgcaggcgctgtcggggcggaggctgctgccgccggcggaggagatgctgcgggcggccgaggagtaccaccgcgccagggagaaggccggcgtgcccaggcgcatgtcgcatgccatcttcttcgacttcgactactgcgacgagttcggggagaagcacgtgggcttgccgcgcccgcccgagtggaagaaggagctcatgcgggcggccgttgcgcgcttgctccaagacacggagaccttccgtgacgactaccgcgacggtgaccttgtcctggagagcctgcgcctagagggctggtcctcagctccctccccgggcacgcttaacgacaaggagaatggaattgccatgcatgatatgatgcatgacagagatggagagacactggaataagctactagggcacagtcaacatgaatgatttggcttccagtgccacatatgcaataaagttgcaacgataagggtgtcc

SEQ ID NO: 139577 - DNA, 1347 bp, Zea Mays
atggcgtcgtcgtccaagaaggtctgcgtggtgggcgccggcgtctcgggtctggtctccgcccgcgagttgcgccgggagggccacgacgtgacggtcatggagcagagcggcggcattggcgggcagtggctgtacgacccgaggaccgacgccgacgacgccctcggcgcgcacagcagcatctacgcctctctccggctcaacacgcccagggagagtacgggcttctccgactttccctttgcctaccccagcaacgacgacggtgccggcgacggccggcggtacccggggcacgccgagttcctgaggtacatcaggcgcttctgcgacgcgttcgggctcatggacgccgtcaggctcaacaccaaggtcctgcacgtcgccccgttggcgccgcgcagccacggcgacggcgtgacgcggtggacggtgaggtgctcgtcgagacttggtgactgtcaggacgaggcggtcaccacggaggagacgttcgatgccgtcgtcgtcgccgtcggccaattcacccagccaaggctccccgcaatcaatggcatggacaagtggagcaggaggcagctgcactcccgctcgtatcgggtcccggactccttcgaaaaccaagtggtggtggtcgtgggatgccaggcgagcggcgtggacatcgcgctggagctccgcacggtggcgagagacgtgcacatcagcgtcaagtccgtggacgacgacgtcgccgtgtcccccggcatgaggaaagctgtgtccaggcaccacaacctgcacctccacgtccagatcgatagcttgtgcgaggacgggcatgtggtgttcgccgatggctcctcggtggtcgccgacgccatcgtctactgcaccgggtacgtctactcgttcccgttcctggacacgggaggcctggtcaccgtggacgacagctgcgtcggcccgctgttcgagcacacgttcccgccggcgctggcgccggcgctgtccttcgtgggcgtaccaaagaaggtggtggtgccgcggttcttcgaggcgcaggcgaggtgggttgcgcaggtgctgtctggccgaaggtcgctgccgccggaggccgagatgctgcgctcagcggaggagaacaaccgcgcgagggggaagcacctggcgcacgacatcctcgacgactatgactactgcgacgacttcggggagaagcactgtgggttcccgcggctggagggctggaagaaggagctccgttggtcgtccctcgcgaggagacacgacagcacggagagcttccgtgacgtctaccacgacgacagcaacttgattcgggagggctttcaagcatagggg

SEQ ID NO: 139578 - DNA, 210 bp, Zea Mays
atgatggagtcggcggcgacacgcgagccgtcggcgaacgttacctgcccatcctcgcgcaagcactcgatctggaggtgcaggtgcaggtcgctgtgcctggcgacggccttggacacggcgggagtgagcgcctccatggacttgacgctgacgtgcacctccctcgccaacttggagagctccagcgcgatgtccacgccgctatga

SEQ ID NO: 139579 - DNA, 999 bp, Zea Mays
atggccggtgccggcggcgactggcccttcacggccgacgacgacgcgtacggcgccgactcctcggcgatgttcgcggagctcgccgcagggtgctgggccgccgccggcgggacggcggcggaggagctgatgatgtcgatgctgctgccgccgcctgaggatcatcatcaccaggcggcggtactggcgacggcgccggccgccgtgtcgtccaggtccagctccaccgacgacgacgacggggcgccggcggccgcagccaccaccgaagcagcgagcaagccaccggcggcggggaagacgacgatgacgaagtcgtcgtcggcggggcagaagcgggcgcggcagccgcggttcgccttcatgaccaagagcgacgtggaccacctggaggacgggtaccgctggaggaagtacgggcagaaggccgtcaagaacagccccttccccaggagctactaccgctgcaccaacagcaagtgcacggtgaagaagcgcgtggagcgctcctccgacgacccctccgtcgtcatcaccacctacgagggccagcactgccaccacaccgccgtcgcctgcttcccgcgcgccaaccacgccgccgacggccgccaccacctgccgttcgtcgaattctctgctgcctcctccgcgcaccaccactaccacagcaacccctacagcggcaccgccagctgcgtcaacgaccaccacctgccgcccctcctcccgacgacgacgacactcgcgcctcggcacaacgctctcgacaacggccagcaggagctgcaggcggcgatgtcgatgccagtggcttccgtgccaacgacgtcgttgttgccgccgcctactactgctctggcggcgccgccagtggcttccgtgtcaatgacgtcgtcgtcatcgttgccacctgctagcagtagcgctgctccggccgccgtcgacaagggacttcttgacgacatggtgccgccggcgatgaggcacgggtag

SEQ ID NO: 139580 - DNA, 94 bp, Zea Mays
gcggcttcgtacgcgtccctcgccaccgccaccatagacagaatgaacaagttcaagtgttactaccagctgtgaagaagcaacagagcaccac

SEQ ID NO: 139581 - DNA, 705 bp, Zea Mays
atggccacaggtgaaggtgcggaagacatgacagatgctgttcaaaacttggaagaagagttagttcgtgtaaatgctaatgatgaagaggatggagaggatatgacatctgtagagacaccaaggcgttctgttgactcaacatcatctagctccaagaagcggaagaaagagtggaaaggaaaaaagacttcatcaagtgacccgcttcttgatgtgttcaatgaagtgagtggtgatctcaaggttgccaccatgtcaattggaaaaatggcgcaagctatggatcgtgaggcatccaaccaagagaaggcaagagatgaggatccacaacaaaagctaagagagaaggcgatcaatgaggtccggagacttgaatttactggctcagaagttatcaaagcagctggtgtgtttgttaggatgccagatcaaatggggatgttgtttgcacttccagaaccactgaggagggaatacattgtcgacatgctacgtgatgaagaagcaaggagagagagagagagaggtcaaagtgaaggtgatggtctagatgttgaatgatggagctttggaagttgctgttggtttagttggtctcaatctgtttacctttagtgttcttcatatgttgttgttgaatgacggtgaatgatgataaaaactgaatttttatgatgttgaacgttgttgaatgttcacgaa

SEQ ID NO: 139582 - DNA, 468 bp, Zea Mays
atgacatgcttacctcgctgcttgcgcgatgactcgaggtcgaggctgagcacgaagacgaacatctcgctgaccagaactccaggaccagaacttcaggagcatgaggagcgtgaagacgacaacctgggagctgggcatcgcaccacctccttcagcatgaacctcgcggctccgatcttctcggccactacttacgagcatcctgggcttccccaggacggcgcccacggcggaaaagtcgggggaggtcgtcgacgccgccacggccgcggttgcgacgggggcggtgagggcgcaagcgctcggcgtgggcatggggatgtgcgcagagcgagaggcggagggaggagaacgtgggacggtggtggagacgacggaagcagttgccagggagaagatgtgaacgcaaaaatcgacaacaatgggccacaccaactgttgggccgcacaaactgggctgcataa

SEQ ID NO: 139583 - DNA, 2255 bp, Zea Mays
ccaacaacacctcttaacctcgcacaacaacgcttggacgcgccggtgaggtggacgagaggcggagtcggcggcggcggcggcggcggcggcggcggcgatggcgggcggcggcggggagcgggacgcggacgaggagacgcggaaccagatgatgcagaacctattcggagaccagtcggaggacgaggacgatgcggacgacgacggccagcagcaacagctgcagtcacccccgcaccaccaccacgagatagaggacgacggcgatgaagacggcgacgacgcccgcagcgacgcgcctgcccgccacggcggataccactcggaagaagtggatggagaggcagagaatggaggagaaggtgaaggcgaaagtgaggggcaagttgaaatggaagaggaaagtgaaggcgaagctcatcgtgctgaccttgatcaaggagaaagtgatggggacaaagtccatagctccccagaaagagaactcgatgaccagaggatggaatctgatgcaaaaggactggatagtgaagatgaaggctaccagcagaggacagtatcaagcagaagaaggggagttgttgcctctgaatcagagggatctgaagataattactatgctgatggagctcaagaagatgaggaacctcgccaaacaaggaaacaaagctctccgatggaggaagaaagagatcatgaagtagttcgtgatgtgtttggtgacagtgatgaagatgaaccagctccatatcgttctcgccatgaaatcgatgaagaatctcatagatctcccatggaggatgaagaccagtatgagaaggacatgcaaccagatgacactgtggctgatgaagatatgcgatatgaatctgatgagaatcgtgaactgaaaccaaaagagaaaccagtcggtccaccactagacctggtggttccatttaagcaaccaccagctcgacctgacaaaatgaatgtgatcaaggtatcaaatattatggggattgaccctaaaccctttgatccaaaaacatatgtagaagaagatgtttttgttacagatgaatctgggactaagaaaaggatacggctagaggacaacattgtgcggtggagaaccattaggaatgcagatggcactacatcttgtgaaagcaatgcacgctttgtaaaatggaaggatggaagtatgcagcttctgattggcaatgaggttcttgatatatctgtacatgaggcgcatcatgaccaatcccatctgtttttgaggcatgggaagggaattctacaatcacaaggaaggctattgcacaaaatgcaatttatgccatcctccttgttttcgaagtcacatcgcttattaactgccctggttgattctcagaataagaaaactgttaagatgcaaaaatggtttgagactaaggatcctgagaaagcgaaaatggaaaaagaaaggattcagggccaaaatattcgagcccattcaatccttcaacgcaaaagggaaaaagtgaaccgcaagtacacacaacctgctcggccaaggcgacagctttctccaggatttttggaagacgctctagatgaggatgaggagccagactatggttctcggcgaatgccaggtcgtagacgtttcgaggatgaattggaggctgaagcactagctgagaggcgtatcatcaacgcgaagaagtcaaatatgagcagaaatgttccccgcaaaccaccgtaccctcctgctcgtctgccgagacgtcaagctgatgaatactcggagagtgagagggaggagtcagaatatgaaactgacggcgaggatattgaacattcaccgcctcgtggaagggaagatgagctggatgaggaggaagaatacgaggaagaagttgaggaagaagcgcctctctcagatgaagaaatggagatgcaggctcccaaaaggaagagagaatcagggggtggtggtgggcacatgcgcgaggagctggcgtccgaggacgacgaatccccaccaaggaagcaaccgactgttcagcatcgtagaaaggctgtcgtgtttgatgacagcgacgaggactagtgtgtgtatgacctgacctttacagtttattttttccatttcttgtcgagaatgatttatctgaaaagaagatgttggtaactgttattttccggcgggccggtttattatgagatggtgaagcaaaaaaaaaatatgttgggcaatatgctatcatgtcaccggggtg

SEQ ID NO: 139584 - DNA, 2249 bp, Zea Mays
ccaacaacacctcttaacctcgcacaacaacgcttggacgcgccggtgaggtggacgagaggcggagtcggcggcggcggcggcggcggcggcggcggcgatggcgggcggcggcggggagcgggacgcggacgaggagacgcggaaccagatgatgcagaacctattcggagaccagtcggaggacgaggacgatgcggacgacgacggccagcagcaacagctgcagtcacccccgcaccaccaccacgagatagaggacgacggcgatgaagacggcgacgacgcccgcagcgacgcgcctgcccgccacggcggataccactcggaagaagtggatggagaggcagagaatggaggagaaggtgaaggcgaaagtgaggggcaagttgaaatggaagaggaaagtgaaggcgaagctcatcgtgctgaccttgatcaaggagaaagtgatggggacaaagtccatagctccccagaaagagaactcgatgaccagaggatggaatctgatgcaaaaggactggatagtgaagatgaaggctaccagcagaggacagtatcaagcagaagaaggggagttgttgcctctgaatcagagggatctgaagataattactatgctgatggagctcaagaagatgaggaacctcgccaaacaaggaaacaaagctctccgatggaggaagaaagagatcatgaagtagttcgtgatgtgtttggtgacagtgatgaagatgaaccagctccatatcgttctcgccatgaaatcgatgaagaatctcatagatctcccatggaggatgaagaccagtatgagaaggacatgcaaccagatgacactgtggctgatgaagatatgcgatatgaatctgatgagaatcgtgaactgaaaccaaaagagaaaccagtcggtccaccactagacctggtggttccatttaagcaaccaccagctcgacctgacaaaatgaatgtgatcaaggtatcaaatattatggggattgaccctaaaccctttgatccaaaaacatatgtagaagaagatgtttttgttacagatgaatctgggactaagaaaaggatacggctagaggacaacattgtgcggtggagaaccattaggaatgcagatggcactacatcttgtgaaagcaatgcacgctttgtaaaatggaaggatggaagtatgcagcttctgattggcaatgaggttcttgatatatctgtacatgaggcgcatcatgaccaatcccatctgtttttgaggcatgggaagggaattctacaatcacaaggaaggctattgcacaaaatgcaatttatgccatcctccttgttttcgaagtcacatcgcttattaactgccctggttgattctcagaataagaaaactgttaagatgcaaaaatggtttgagactaaggatcctgagaaagcgaaaatggaaaaagaaaggattcagggccaaaatattcgagcccattcaatccttcaacgcaaaagggaaaaagtgaaccgcaagtacacacaacctgctcggccaaggcgacagctttctccaggatttttggaagacgctctagatgaggatgaggagccagactatggttctcggcgaatgccaggtcgtagacgtttcgaggatgaattggaggctgaagcactagctgagaggcgtatcatcaacgcgaagaagtcaaatatgagcagaaatgttccccgcaaaccaccgtaccctcctgctcgtctgccgagacgtcaagctgatgaatactcggagagtgagagggaggagtcagaatatgaaactgacggcgaggatattgaacattcaccgcctcgtggaagggaagatgagctggatgaggaggaagaatacgaggaagaagttgaggaagaagcgcctctctcagatgaagaaatggaggctcccaaaaggaagagagaatcagggggtggtggtgggcacatgcgcgaggagctggcgtccgaggacgacgaatccccaccaaggaagcaaccgactgttcagcatcgtagaaaggctgtcgtgtttgatgacagcgacgaggactagtgtgtgtatgacctgacctttacagtttattttttccatttcttgtcgagaatgatttatctgaaaagaagatgttggtaactgttattttccggcgggccggtttattatgagatggtgaagcaaaaaaaaaatatgttgggcaatatgctatcatgtcaccggggtg

SEQ ID NO: 139585 - DNA, 2438 bp, Zea Mays
atgggcttcctccgccgctccgccaccaccgccgtcctcttcgctctccacctcctcctcctcgccaccgcctccgtcgcgtcctcgccgtcatcctccctgccggagcagcaggacgacgacgtgcaggcgctgctccacctcaagcgcggcctcgcctccggcgccgacgctcctctccggcagtggtcgctggagtccggcgcccaccactgctcctggccgggggtcacctgcgacgcgcggtccggccgcgtcgtggccctcgccctcgcgctcggcggtcgcctcggcggggagctgtccccggcggtcgctcgcctcaccgagctcagagcgctgtccttcccctcggccgggctcggcggcgagattcccccgcagctctggcggctggggcgcctgcaggcgctcaacctcgccggcaactctctccgcggccgcctgccggccaccttcccggaggggctcaaaagcttggacctttccgggaaccggctgagcgggggaatcccgccgggtctggggagctgcgcgacgctccggcgcctgcgcctgtcctccaactggttggctggaaccatcccgccgcggatcggggagctcgcgcggctccgcgttctggacctgtccgggaaccggctcaccggcggcgtgccgccggagctcctccattgcaggggcctcgtcaggatggatctcagcaggaacttgctccacggccggctgccctcgggcctcgcgcagctcaagaacctgaggtttctctccctctccggcaacaatttcagcggcgagataccttccggtttgggccagctggggtcgctggaatttcttaatctgtccaacaattctctatcaagggaggttcctgctgatcttgtggcactgcgaaatcgcactgtcttactgcttggcaacaacaaactatctggggaggaggagataactgctgctgctcccggctcaccagttcatgtagttactgctcattcagttacaggtgaactgtttcctgtttctcctatagcaacagctatccgtaagctgatcgatacaggtccaggcacttctaatggcagcaccacgaccaccagcagcagcaatggtggcgatggtggcttgggaaccaaagagattgctgccatagcttcagcatcagccattgtggtgcttctgttagttgcactcaccctgtgcatctgcacaaggaaatggcgtctgaaaccatcagagcgctcctttgcgagcaaagaagtcaaggttttcgctgatgttgatattggagcccccctgacatatgagaccgtcgttcgcgccactgggaatttcaacgctagcaactgcattggtaacggcggctttggcgcgacatacagagccgaggtggcacctggagttcttgtggcaataaagaggcttgctattgggaagcagcacggcgacaaggagttccaagcagaagtgaggatcctcgggcaatgccgtcatcctcatcttgtcactctgttggggtaccacatcaacgagtccgagatgttcctgatatacaactacctgccaggtggcaatctggaaaggttcatacaagagaggggcaggaggccgatcagctggagaaggcttcacaagatcgccctggatgtcgcccgcgctctcgcttacatgcacgacgaatgcgtgccccgcgtcctgcaccgggatgtcaagccaaacaacatactgctcgacaacgagtgcaacgcctacctttccgatttcggattggcgaggctcctccggaactcggaaacgcatgcgacgacggacgttgccggtactttcggttatgtggctcctgagtacgcaatgacgtgccgcgtgtcggacaaggcagacgtgtacagctatggagtggtgctgctggagctgatttcggacaagaaggcgctggacccgtcgttttctccatacggaaacggcttcaacatcgtcagctgggctgtgaggcttatccagagaggcagggtccgcgagttcttcgtcgagggcttgtgggagaaggccccgcatgatgatctggtcgagttcctgaacctggcggtgcggtgcacgcaggagtcgctcgcttctaggcccacaatgaagcatgtccttcgatgcttgagggaactccgtccaccttcgtactaggaagacaaggagcgcccccgggcgcctaaatacttaactaagaagagctgatgggctgacagctaggtcgtctccctgcgacgccaagggggggttgggtagtagctgtggtgaggaggtgccatcaattttgatctcctctagcagcctcctctccaccaggttttactgatgcatcacattctaggtagatggatgcttccttcctccccctctctctctctgtccgtctctcaaaaagaaaaaaacaatgaaaaacatag

SEQ ID NO: 139586 - DNA, 594 bp, Zea Mays
tatgtgtattatactgctaaaaatatcttcttcttctcggccgtacaaatggggcgcggcaaggtgcagctgaagcggatagagaacaagataaaccggcaggtgaccttctccaagcgccggaacgggctgctgaagaaggcgcacgagatctccgtcctctgcgacgccgaggtcgccgtcatcgtcttctcccccaagggcaagctctacgagtacgcctccgactcccgcatggacaaaattctagaacgttatgagcgatattcctatgctgaaaaggctcttatttcagctgaatctgaaagtgaggtgagatcacaggttgtgaaatttagcatgcaccttactttgtttcatgcgccaagccgccaatgcttcattaattattatcatacgttttgtatgagtaagatcgctctcgtgtgtgaaaatatgtgtaaattttctttttgtgtttttttgaacaaaacaataagcatcgttcaaacaatttaacttaattaaaggttgtagggtactaggatgaccttatattttatgttaaatactatcaactggacctttgaacgttcacatgtaaatgcaaagatg

SEQ ID NO: 139587 - DNA, 1379 bp, Zea Mays
acactctctgtgtctctcgcgtcgcgcccggccgtcgcctcccctccctccctgcaccgaccgatccctcccctgaacccctcctcacatcctaccacctctttaaagctacccagctacctgcctgcctcgcctcaacctcgccggcggccgcagccgcatagaccggaagagaaaggaagcagagatcggaggcaggcgaagatggggcgcggcaaggtgcagctgaagcggatagagaacaagataaaccggcaggtgaccttctccaagcgccggaacgggctgctgaagaaggcgcacgagatctccgtcctctgcgacgccgaggtcgccgtcatcgtcttctcccccaagggcaagctctacgagtacgcctccgactcccgcatggacaaaattctagaacgttatgagcgatattcctatgctgaaaaggctcttatttcagctgaatctgaaagtgagggaaattggtgccacgaatacaggaaactgaaggccaaaattgagaccatacaaagatgccacaagcacctgatgggagaggatctggagtctttgaatccaaaagagctccaacaactagagcagcagctggagagctcactgaagcacatcagatcaagaaagagccaccttatggccgagtcaatttctgagcttcagaagaaggagaggtcactgcaggaggagaacaaggctctacagaaggaactttcagagaggcagaaggcggtcgctagccggcagcagcagcagcagcaggtgcagtgggaccagcagacacaggtccaggtccagacaagctcatcgtcttcttccttcatgatgaggcaggatcaacagggactgccacctccacaaaacatctgcttcccgccgttgagcatcggagagagaggcgaagaggtggctgcggcggcgcagcagcagctgcctcctcctccggggcaggcgcaaccacagctccgcatcgcaggtctgccgccatggatgctgagccacctcaacgcataaggagggcgagcaaatggcgtgcgaagtgattgattgctcaccgttgattgaacgatagcctaagttcatggcggcagcaaactaagctaaaactattgttatgtttgcaaggaagggtagggtaacccgctgtgtaatctttgtccagctagcatgtaccaactgagatgcatgcatgcttattattgtccaattacccgtgaatctagcggtgcttttggtgagaggccggccggtcgggtgcagtttacttcaaatatggtttgtgattttgtgtaaatagtattaactaggagtcctatggtaagtaaattaattaatgggaggatgcatgaataaaacctctcttgtgctgcaga

SEQ ID NO: 139588 - DNA, 800 bp, Zea Mays
tgccgcctcgttgcatttgcatcggcaacagaacagtttgatgtgtgtctcgtcttttgtgtagctttcagagaggcagaaggcggtcgctagccggcagcagcagcagcagcaggtgcagtgggaccagcagacacaggtccaggtccagacaagctcatcgtcttcttccttcatgatgaggcaggatcaacagggactgccacctccacaaaacatctgcttcccgccgttgagcatcggagagagaggcgaagaggtggctgcggcggcgcagcagcagctgcctcctcctccggggcaggcgcaaccacagctccgcatcgcaggtctgccgccatggatgctgagccacctcaacgcataaggagggcgagcaaatggcgtgcgaagtgattgattgctcaccgttgattgaacgatagcctaagttcatggcggcagcaaactaagctaaaactattgttatgtttgcaaggaagggtagggtaacccgctgtgtaatctttgtccagctagcatgtaccaactgagatgcatgcatgcttattattgtccaattacccgtgaatctagcggtgcttttggtgagaggccggccggtcgggtgcagtttacttcaaatatggtttgtgattttgtgtaaatagtattaactaggagtcctatggtaagtaaattaattaatgggaggatgcatgaataaaacctctcttgtgctgcagattcatgagcctcatttttttttgaaagatcgagaaagtcaactgtgtaggggttgaatgagggacaattaaaat

SEQ ID NO: 139589 - DNA, 654 bp, Zea Mays
atgtcttcgctgccaggaggcttcctgtgcgtgcgcgtcctgcgcgggatcgacctcgtcagctgcgacgccaagggcagcgacccctacgtcgtgctcagcctggatggacagaaactgaagacgagcgtgatgaagaagacggtgaacccgttgtggaacgaggacctcaccttggccgtcatggacgcgtcggcgcccatcaagctagaggtcttcgacaaggacacgttcagcaaggacgacatgatgggggacgcggagttcgacgtggaggcgctggcgcagatcgtgcagatggacctggaggacatccgcagcggcaccgtcgtccgcaccgtccgccccggcggcacgggaagctgcctcgccgacgagagccacatcatctgggacaagggccacgtcgtgcaggacctcctcctcaggctccggaacgtcgactccggcgtcatccacctgcagctcagatgggttgccaccccacctgaaggcagccagctggaggccaacaagaaggccatgaacatccagtgcaagatctgcatgcagaccttcatctgcaccacctccgaggccaagtgcaaagaacatgcggaggcgaggcatcccaagaacgacctctaccagtgcttcccccacctcaagaactag

SEQ ID NO: 139590 - DNA, 1419 bp, Zea Mays
atggcggtcgacgactcgacgcctgctgctaagagtcgtcgactagagagaagcgtcgtctctagcatctcgaatttgccggagcacctccaacaagagatcttctcccgcgtgggcgacgtcaagtccctcttcatgttcgccgtgacaagccgcgggtggctccgccgcttcacagaccgggccttcctccgcgagctcttccccagtcacggccgccacggcgcgcgcctgctcggcgtcttcctgcaggacgcgccgttcaatcgccccgacacgtcgctgatgccggcgcagatggcgccgccgccgccggcgcagcagcagcagcgcgcgtcgtcgtgcgcgccgaccttcctgccggcgccgggctcgccgctgggcgcccgccgtctcgtcgacgacgccgccttcgacaacgccgacctcctagccgcgcaccgcggcatcgtgctggtgcggctcgccccgcgcacccctgacgaggaggcctgccacttgttcggcgtctgcaaccccgtcaccggctaccgccacgtcctcccacccctggagtggagcctcgccggtagcagactgaacggctacgcaatcgtcacggccgccgatatgccgcagcaccatccgccggcgacggcgcgcttcaagttctcacaactgctcgtcatcacccagcaaatagatctccattatctggtaggggtggtggacgtgtacgtgcactcgtactcggccgccacgggcagctggagcgagcccaccggatgcctggacagcaacgccttctcgctgatgggcgacggatcggcggtcatccaccgtggcgcggcgcactggctgtgcgtcgacgacggcggtttgcgctaccggccttcagtctacagacgcggctaccacacgtacacgctcagcgtggacgtggccaccgcacgcgtctccctgacaaggatccccgtccgtgtcggaggcaaacaactcctctacgtcaccggcgacggcgagctcgcggtcgcctccgtgtacttcatatacgtgattctttggactcaggcagccggaggcggaggcggaggcgacaccacccctgcgtggacccgcacattgtttaccataccagtggcgccggtgcctttcccacacgtagacgggtatctgaagcaccggctggagaggtggtgcaacttcagccatggatcgttgctcgcgctgttcagggccaggggcgtcttaatcctcgaccttaacaccaaggccatggaggaagtctccatccccgacttgcacaacaaggcgacgatcttcatggctgaatatggtgctaatcggaatcagacgtggctgccctacgagatggacgtggtggagttcttcatgctccaccttggtggaggtactgtctcagagattggatctccatag

SEQ ID NO: 139591 - DNA, 1428 bp, Zea Mays
atggcggtcgacgatgcgcatgcgcctgctaagaagagatgtcgacgagcgacggaaagcatctccggcatctcgtctttgccggagcaccttcaacaagagatcttcctccgcgtgggcgatatcaaagccctattcatgttcgccgtgacaagccgcgggtggctccgtcgcttcaccgatccgaccttcctccgcgagctatgtccgagacacggcggcaatagccgccatggcgcgcgcgtcctgggcgtctggctacagtgcgccgtgttcgatccctacgacaaggtgatggtacaggcgcggatggcgccgcagcagcagcagggcgcgtcgtccatggcggcgccgaccttcctgccggcgctgggctcgccgctcggcgcccgccgtctcgtcgacggagacgccgccttcgactacgccgagctcctagccgcgcggcgcggcatcgtgctggtgcggctcgccccccgcacgcctgccgagatggacagccgcccgtacctgttcgccgtatgcaaccccgtgaccggccaccgccacgtcctcccgcctccggagtggagcctcagcgaagtgagaggctacgccatcgtcaccgcggccgacagtccgcagcttcatccgccagcggcggcgcacttcacgttctcgcggctgctcgtcatcgcccaccatagacaaggtatcagaggcgacgcgtacctgcactcgtactccgccgccacgcgcagctggagcgcgcccaccatgtgcctggaccgcggcgacatgcgcgcggtgacggtgtgtgactggtcggccgtcgtccaccgtggcgcggcgcattggctgtgcgtcgacatcgagcgctaccacctcgcaaccagaaccagaggcagaggcagaggcgacgacgaccgccacatgtacatgctcagcgtggacgtggccaccgcacgcgcctccttgacaaggctccccgtccgtgtcggcggcaatccactcctctacgtcaccggcgacggcaatctcgcggtcgccaccgtgtacatgtcgcacgtgactgtttggacagagtcccctgcgtctacggctccggcgtggctccgcacttcgtttctcatgccagcggcggcgccggcggtaccttacccacccccgcaattgcggcaccaggagaattggcgcaacttcaaccatggatcgttgatcgcggtgttcaggggcaccaagatcttcatcctcgacattgacaccaaagcgatggagaaggtctccgtcctcgacttccacagcaaggcgatgatctccctggctgctgctaactggcaggcaacgtgggtgccctatgagatggacgtggtggagttcttcatggtccagcttggtggcatacgagatcgactgggacctactatctcagaaattcaatctccatag

SEQ ID NO: 139592 - DNA, 743 bp, Zea Mays
tctctttacaatctgcctgcctatatatctgctgtagttgcatctccgatcaaacaagcacttcatcactatcaaaagaaacctgctacagtttacaaagtatattctcttttttcttgccaccactcagagctccatctgtaaatcatggcgtcccaggccattgagagccaccgtgcaggtgcagaggtcatcaccggagacgccgcatgcaggaagaagtccattgagctgctggaggagctgggccttcccaagggcctgcttcctatggaggacatccaggagttcggatacaaccgtgacacggggttcatgtggctggtgcaggggaagaagaaggtcgagcacaccttcaagaagatcaagcagacggtgtcgtacgccgccgaggtgacggctttcgctgggaagggcaagctgaggaagatcactggcgtcaagaccaaggagctgatgctctggcttagtgtcgtcgaggtgtacatcccggagtcctcgccagagaaggtcaccttcaagactggcaccggcctctccgacagctttgacgccgctgcctttgcccttggagaatgaggaatcaccagatgagagacaaatgatgatatgcaagaaaaaaacaacagtctacttaggggtctttgtttagggattataatctgctcagattatataatccaacaaatgttaagtctaagaagcatgctctatgagcttatatgatcttctcgatacagaaa

SEQ ID NO: 139593 - DNA, 1917 bp, Zea Mays
atggcgaccagcaagatggcgagggtagtgagcacggccgtgctgctgctgctgctgctggcaactgctgctggggactcggcggcagcatcgtccggtagcaacctggggccaagaaagccgctgacgctgcaggctggcgctgatgattgcatcacaccagaaaacttctgcgacttctctgatgatcagtgttgcagtggctccgtttgtacagagaccatctttggtaaggctgttgggcgtcatcgaggtctatgtaccgggggcctcaccagacagagaaggtcaccttcaagaccggcatcgtcggcctctccgacagtttcgctgccgctgcatttgcccttggggaatgaggaatcactgcatttgccacggtacgacgacgacgacgtgttcgattcttcaacagccccggagtacgacgacaacgtgttcggcgcacactgcgcgcaagccacgcggcgtgatgcagttgcgggagacgtcgatccggttgcggtgtgtctcgcacctgacaacgacgggtacatggtccaagacaacacctccttctctaagcccgtcggccgcttgtgctgggtagatccgctgctcgccaatcagcacaaaaaggtccgcgacgggctcatcggcgggacggagctgtcacacacagtccgcctcctccactgctccttgttgtcgccaaaccaggcggaggtggtggaatcgtttgagctagagtccgcccctcctcctcccgtcatctacgactgttacgtcgagctgggctcctacagcatcatcccgtcgctcttctgcgcggagcaggccaaagaggatgaggtatccgtcgacacgcccaccaagtgctcgacgatgggtttccacgacataacaacaccaccattcaggccctcttcaccaccatgttgtggctgcacgcgcgatcctcccgctcggtgcagtcgttgtccttgcggcgtgtcgtcgggatcgcccagacgaacgtctgactcgacgcgagcatcccggtggccagctcatggagcgggatcgtccccagtgagcacgggctcccgaagtacccgtacaccaccgacccttcgtactggccatcgagcatcagctatgtgcgtgcggccaacatcgcctgtctggagcagctcgccatcgatgctacagtgtccgtgtgcacaactcccgacgcgtcgctcccctcctacatcaacacagctccatctcaggtttcctgtatactgcagttggtgatgcccaaggaggaggttccgagcaccttgcccaacaggtgttcgctgaattgcttcatcatcatacaacgttgtttctcgcctttattccattgcagcagggatgcagtgtcgctccccaaccgtgtcgcgagcatcaccgacatccacatcgaggaggacagccctgtgtgcaagcttgttgttgagatcatgggtttctcaatttttgttgcacgacttggattaccaggtgttgacctcatctcgtacagggatatgattaatcatgggcatctgatcactgaagcaatttcaatacctatgagcggtgatgcagataatggttacgaaaattatatgcatgttaagatgagtgaaaggatttattaacgctggttttgctggagttattgccatctcagtcaagaacaaggatgggccagaggggatatttaccaacagaaaagctgtcgaagcccatcagttcacaatgcatgtgaattttgataggttttctgtaggcattttggttggtgatgagctggtggtcaccggcatgggcgctgactgtcatattatcacctcctactacaggtggccttttggacagactggtcatttctccccatgtaatacccactttgtaggaaaattctaaaaagagaaattatattacttt

SEQ ID NO: 139594 - DNA, 1879 bp, Zea Mays
gatggctcagtggttcactcagcgaaggcttggaatggaattcaacagtcaagtgctatacgtattctctggaatagctaactggtagcaacgaaattaaaaaaaaaaagacaaatcagaataattaggtaaaggagaaactggtcccaaaggtcatacatgtgactggacttttgactctctttcagttctgtttttcttatatgtgtttgcttcttgtcccccaaccattcccggatcccctttctcacttgagctttgacgtgaaccacagaatacagagtttcagaaacatcaaaactcacctctgagttttctcacccatccacagaatacaggaaggggaactcacatggaaagttttcttcctgcagccctgggagagctcatggctcgacacataaacttcatcatcaacaagtgcttcaagccgcacacaatggtcatggaggaaagcctacaaagggctcttctccgagcacaggtcatcgatgaggaggccatgggacggcaaatcacaaatcaagccatgatccagcagctgggcatgctgagagatgccatgcaccgaggctattacgcgctcgatgccttcaggtaccagcctcactgtggagaggactgcaatgatccagctattaggggcatgctatccctatccaaggtaccctctccaaaggaaccctatttcttcagtcaaactgcgcagtcccgggtacaactacaagatgcacttgacggattgagttccatgattgttgatctaaatgagtcagtcatgttcttgatgagctatcctcgtctgtaccgccaaccttacagcatgcatatcctactggctaactgcatgtttggtcgccatatggaagcagaacttgttgttaaatttctgttgcacacaccccctcattgctctcgagaattggaggtcatgccaattgtcgggccacccagagtcggcaagagtaccttagtagctcatgtttgcaaggacgaaagagtctgtgattatttctcagaaatcttgtggttgtgcgagtctgattttacaagtgatgagctagctggcagacaagggtgtggaatgaaacgccacaattgtatgccaaacttgaacagaggcaagagattgcttgttgttgttgaactgtgtggaaatctatatgaagatgcatggaataggctgtaccttgtttccaaacggagctttcctagtggtagtaaaatcatagtcacaagccattcagacacgattgtaaagtttggaacaacaccggctctaactctgaagcctctgtcccatgaggcgtactggtatttcttcaaggctcttacgtttgaaagcatggatcccaagaagcatccaacgcttgcacagcttgcaatggagatagctagaatgttgcatggttcgttccatggtgcacacatcacatcttatttgctgagggaaaaatttaacatacacttttggttcaagtttatgtgcttcttgagagggttcatccagaagcatgtctccgagatcggtgtgaatccatttgatcttctgaaccaaaatagacctgtacgacatggaagaatggctacaccttccgaagatttaatagtttgtcatcagtatcaccgttcttcacaagaggaggttccggagataaggatccaagatgtgctgtatggaagcactaagagacatggaaaatttgaggtcctagtatggagatctcagatacccccttactacagctatgtcaatgtttgtgagattcgagagcgtaaaattacaggtgccaagaggaagcaccctatgaaagatagaactactttctgataattttgtaatttttctggtttatgcaggaacacacacacattcatc

SEQ ID NO: 139595 - DNA, 1716 bp, Zea Mays
cttgtgttttcttacccatcctgctgtgttctcttcctgagaagaaagagaggactcacatggaaagttttatatctgcagccctgggtgaattgatgactagatccataaatttcatcatcaacaagctctcgaagccgccggcactggccatggaggaaagcctacaaaggactcttctccgagcacaggccatcgacgaggaggccatggggcggcacatcacaaatcaagctatgatccagcagctaagcatgttgagagatgccatgcaccgaggctcttacgcactcgacgccttcaggtacgagcctcactatggagaggatgacagcgatcaagttgtgagtggatttatgtccctatccaaggcaccctttgcaaaggatcaatatttcttcagtcgaactgcacagtttcgggaacaactacaagaggcacttgacagattgggctccatgattgttgatctgaatgagttggtgatgttcttggcgagctaccctcgcatgcattgccaaccttacaacatgcatatcctactgggtaactgcatgttcggtcgccagatggaagcagaacttgtcattaaatttctgctgcacacacagcttcatagttctgaagaactggaggtgctgccaattgtcggtccacccagagtcggcaagagtaccctaatcgctcatgtttgcaaggacgaaagagtccaagatcatttctcagaaatcgtgtggctgaatgaccttgattttacagatggagagcatcaaaatcaagtgtcaaactcgaacaaagacaagagattgctagttgttatagaactatctggaaatctgtatgaagatgcttggaacaggttctatcttgcttccaaacggagcttttgtagcgggagtaaaatcgtactcacaagcagttcagacagagctgtaaagtttggaacatcacaggctctaactctgaatcatctgtctcatgaagcatactggtatttcttcaagacacttgcatttggaagcattgatcctgaggcacacccagggcttgcacaagtagccatggagattgctaggacgcagaatcgttcaatccctggcgcatgcatcatctgttatttgctgaggaacaattttaacatccacttttggtgcaaggttctgaggttcttaagagtgttcgtccagaatcatgtctccaaattcaacaagcatccatatgatcttttgagccaaaacagaccaatacagattagccgaatggctacaccttctgaatatgtcgttattcgtcgtcagtatcagtgctcttcacaagaggaggttcccaagataagagcccaagatgtagtgtatggaagcatgaagacttgcggaaaatttgaggtcctattatggagatctccaatacccccctactatagctatgccagtacttatgagattcaagagccaaggactacaagtgccaagaggaagcgttctatgaaagatggagtcacattttgttaattttgccattatacatgtgtcatgtaggaacatagttttgttcattttttttctcggtataggatgccacaagttacagcacaggccaagtgtaaaaacatgtaaggtgtcacaggttacagttacagcatcattaaactgcactgctacattttcatatgtgaaatacaagtgcttatgtattctattttagaatacaagtgaa

SEQ ID NO: 139596 - DNA, 1515 bp, Zea Mays
ctcttctcctgctccgtcgcccgccttcgctgctcgggagtcgggacccacctgaccaaccatggaagctgatccgccgttgccgccagcgagcgcactgatggtggagctcgtggaggaggtcctgctgcgcttcccacctgcggacccggcaagcctcgtccgggccgcgctcgtctgcagacgctggcgccgcatcgtcacgggcccgcggttccgccgccgctaccgcgacctccacctccaccgcgggcgcgggggttcgcatcccccgatgctgggcttcctcgccaacgccggcacggggacccgcttcgtgcctacctccaccttccgccccgcatccgcgcgcgcgcgcgcggccgcggatggcctcctccttctcggcggctggcgcgcgctcgacgcccgccacggccgcgccctcctgcgccgggacaccggccgcgacgcgcccgtcgactgcgagctcgccgtctgggaccccgccacaggccgccgtacggacctgccccgcctcccctggtcgccctacccctacagctggaacgccgccgtgctctgcgccgccacaatcaccgcctccgcctgtgaccacctcgactgctgcggcggcggccacttcctcgtcgtcgtggtgggcaccaaccacgcggagatgttcgcccatgtctactcgtcggaggcgggcgcgtggaacgcgcccgcgtccgctcggcacccagacgacaacgtcgacttcgcgcccagcgcgctcgccgggaacgcgctctacttcgcgttccagacgggcgcggcggccctggagtacgatttgggcacgcgggagatggcggtggtgcgcctgccgccgccgccacgcttggactggcagcgcgctgtgctcgccaccagggacgatggtcgtctgggactcgccacggcaggcaagtccacgatctacctgtgggcgagggaggcgccgcctcgaggagatgggagttgggtacagaccagagccatcgagcttgacacgctgctccctgtcggtgccctctcggcctttgttgatgtggttagctttgtggatggcgtcggtgtcgtgtttgtgcggacgggcgatgggctattcaccattgatctgatgtctcgccgggtcacaaaggtattcaaggacactttcttctccggcattttcccctacatgagcttccacactccagcactggaagttgcctcaactggtgaggggccaagttcaggtacttaaggtgcttatgtgcaggtttctcagtcaaggggaaacttagttgcctctcggtgggttcttgcttttaattcaagggctctaagttttctctaaaggattctatcttgtaaatttgttagtttgatcactgccttgtgtagttgtgtgtgaactggtaaatgtgtgtgtgttctcctgaactgtagcttgcaaagaaatcctagaatgaatgtgatttcccttctgtgtacatatgtatgctcaagaaaacaagcatttgaagtgaa

SEQ ID NO: 139597 - DNA, 1551 bp, Zea Mays
tacagagtgagttttagaaacatcaatactcatcttgtgttttcttagttcttacccgagaactcccaaatggaaagtttcctttctgcaatcctgggtgagctgatatctcgatccatgaatttcatcatcaacaagtggtcaaagccactgacactggacatggaggaaagcatacaaggggctcttcttcaagcacaggtcatcattgaggaggccatgggacggcacatcacgaatcaagctatgctcctgcagctgggcatgctaagggacgccatgcaccgaggctattacacacttgatgcgttcaggtaccagcctcactatggagaaggtgctaatgatccatctggtaggcgctttctgaccctatccaaggcaccctgtgtaaaggatctctatttcaccagtccaactgtacagtttcaggaacaactacgagaggcactcgacaaattgagatccatgattgttgatatgaatgagttggtcatgttcttgatgagctaccctcgcctgtatcgccagccatacagcatgcatatccttctgtgtaactgcatgtttggtcgccagatggaagcacaacttgtcattagtttccttttgcacacaaaacctcatagttctgaagaattggaggtcctgccagttgttggtccactcggagtcggtaagagtacactaatcgctcatgtttgcaagtatgaaagagtccgtgattatttatcagaaatcttgtggttgcatgactgtgatttcacggatgatgagctaactttcagacagggaggtgcaatgaaacgtcagattcttttgtcaaacttgaagaaaggcaagagattgctagttgttattgaactatatggcaatctctgtgaagatggatggaacaggttttaccgtgcttccagacggagctttcttagcggtagtaaaatcatcgtgactagttgttcagacaagattgtaaagttcggaacaacaccagctctaactctgaagcacctgtcccctgaggcttactggtatttcttcaagacacttacatttggaagcacggatcccgagatgcaccctaggtttgcacagctggtcatggagatagctagactgcagattcgttcaatcaatagtgcatatactacctctaatttgttgagggacaattttagcatacacttctggtgtaaggtgctgagcttcttgagagggttcatccagaagcatatctgcaaattcggtgtgcatccttttgaacttctaaacaaaaacaagcctgtacagcttggaagaatggcttcactttctgaagatttcatgatttgtcatgagtatcgctgctctccccaagagggggttccagagataagaatgcaagatgtgatgtatggaagcaataagaagcaaggaaaatttgaggtcctaggatggagatctcagatacccccctactacagctatgtctatgtttgtgagattcgagagcgaaaaattacaggtgcaaagaggaagcactgtgtggaagatggagccacatccagttaa

SEQ ID NO: 139598 - DNA, 1683 bp, Zea Mays
ttcttatatgtgtttgcttcttgtcccccaaccattcccggatcccctttctcacttgagctttgacgtgaaccacagaatacagagtttcagaaacatcacaactcacctctgagttttctcacccatccacagaatacaggaaggggaactcacatggaaagttttcttcctgcagccctgggagagctcatggctcaacacataaacttcatcatcaacaagtgcttcaagccgcacacaatggtcatggaggaaagcctacaaagggctcttctccgagcacaggtcatcgatgaggaggccatgggacggcacatcacaaatcaagccatgatccagcagctgggcatgctgagagatgccatgcaccgaggctattacgcgctcgatgccttcaggtaccagcctcactgtggagaggactgcaatgatccagctattaggggcatgctatccctatccaaggtaccctctccaaaggaaccctatttcttcagccaaactgcgcagtcccgggtacaactacaagatgcacttgacggattgagttccatgattgttgatctaaatgagtcagtcatgttcttgatgagctatcctcgtctataccgccaaccttacagcatgcatatcctactggctaactgcatgtttggtcgccatatggaagcagaacttgttgttaaatttctgttgcacacaccccctcactgctctcgagaattggaggtcatgccaattgtggggccacccagagtcggcaagagtaccttagtggctcatgtttgcaaggacggaagagtctgtgattatttctcagaaatcttgtggttgtgcgagtctgattttacaagtgatgagctagctggcagacaagggtgtggaatgaaacgtcaaaattgtatgccaaacttgaacagaggcaagagattgcttgttgttattgaactgtgtggaaatctatatgaagatgcatggaataggctgtaccttgtttccaaacggagctttcctagtggtagtaaaatcatagtcacaagccattcagacacgattgtaaagtttggaacaacaccggctctaactctgaagcctctgtcccatgaggcgtactggtatttcttcaaggctcttacgtttgaaagcatggatcccaagatgcatccaacgcttgcacagcttgcaatggagatagctagaatgttgcatggttcgttccatggtgcacacatcacatcttatttgctgagggaaaaatttaacatacacttttggttcaagtttctgtgcttcttgagagggttcatccagaagcatgtctccgagatcggtgtcaatccatttgatcttctgaaccaaaatagacctgtacaacatggaagaatggctacaccttccgaagatttaatagtttgtcatcagtatcaccgttcttcacaagaggaggttccggagataaggatccaagatgtgctgtatggaagcactaagagacatggaaaatttgaggtcctagtatggagatctcagatacccccttactacagctatgtcaatgtttgtgagattcgagagcgtaaaattacaggtgctaagaggaagcaccctatgaaagatagaactactttctgataattttgtaatttttctggtttatgcaggaacacacacacattcatc

SEQ ID NO: 139599 - DNA, 1363 bp, Zea Mays
ctcttctcctgctccggcgcccgccttcgctgctcgggacccacctgaccaaccatggaagctgatccgccgttgccgccagcgagcgcactgatggaggagctcgtggaggaggtcctgctgcgcttcccacctgcggacccggcaagcctcgtccgggccgcgctcgtctgcagacgctggcgccgcatcgtcacgggcccgcggttccgccgccgctaccgcgacctccacctccaccgcgggcgcgggggttcgcatcccccgatgctgggcttcctcgccaacgccggcgcggggacccgcttcgtgcccacctccaccttccgcctcgcacccgcgcgcgcgcgcgcgcccgcggacggcctcctcctcggcggctggcgcgcgctcgacgcccgccacggccgcgccctcctgcgccgggacaccggccgcgacgcgcccgtcgactgcgagctcgccgtctgggaccccgccacgggccgccgcacggacctgccccgcctcccctggtcgccctacccctacagctggaacgccgccgtgctctgcgccgccacaatcaccgcctccgcctgtgaccacctcgattgctgcggcggcggcggccacttcctcgtcgtcgtggtgggcaccaaccacgcggagatgttctcccatgtctactcgtcggaggcgggcgcgtggaacgcgtccgcgtccgcgtccgctcggcaccccgacgacaacgtcgacttcgcgcccagcgcgctcgctgggaacgcgctctacttcgcgttccagacgggcgcggcggccctggagtacgatttgggcacgcgggagatggcggtggtgcgcctgccgccgccgccacgcttggactggcagcgagctgtgctcgccacaagggacgatggtcgtctgggactcgccacggcaggcaagtccacgatctacctgtgggcgagggaggcgccgcctcgaggagatgggagttgggtacagactaactatctactggctaactacaaaggaaacgaatggaaataacaggaatatttgttgcactggaagttgcctcaactggtgaggggccaagttcaggtacttaaggtgcttatgtgcaggtttctcagtcaaggggaaacttagttgcctctcggtgggttcttgcttttaattcaagggctctaagttttttctaaaggattctatcttgtaaatttgttagtttgatcactgccttgtgtagttgtgtgtgaactggtaaatgtgtgtgtgttctcctgaactgtagcttgcaaagaaatcctagaatgaatgtgatttcccttctgtgtacatatgtatgctcaagaaaacaagcatttgaagtgaa

SEQ ID NO: 139600 - DNA, 692 bp, Zea Mays
atgtccgctcgaacagcagcaggaacctccacctcttgcagcttggtcgccaaggtgccgatagaagcgatgttacccgccactgtcttctcaagcgtctcccaatggcggtcttgcgcgtcgaggcggtcacagatctgcttcagcagccgagcttgggcggccatgaccagagccatcgagcttgacacgctgctccctgtcggtgccctctcggcctttgttgatgtggttagctttgtggatggcgtcggtgtcgtgtttgtgcggacgggcgatgggctattcaccattgatctgatgtctcgccgggtcacaaaggtattcaaggacactttcttctccggcattttcccctacatgagcttccacactccagcactggaagttgcctcaactggtgaggggccaagttcaggtacttaaggtgcttatgtgcaggtttctcagtcaaggggaaacttagttgcctctcggtgggttcttgcttttaattcaagggctctaagttttttctaaaggattctatcttgtaaatttgttagtttgatcactgccttgtgtagttgtgtgtgaactggtaaatgtgtgtgtgttctcctgaactgtagcttgcaaagaaatcctagaatgaatgtgatttcccttctgtgtacatatgtatgctcaagaaaacaagcatttgaagtgaa

SEQ ID NO: 139601 - DNA, 1215 bp, Zea Mays
ttcataaaacaaaaaggacagcttcagctaagtggtgaaatgaaaacaatacaaaaaaaaggtatcagtaccccaaccatctcacagccctgaagagaattgcctagggtcttgacaacacgtacatacgtattcctcgatgcaatatcgtgcaatacaaacaacccctcacacaaaaaggtgctaggcagctcataagatacaaggagcacgcctgaacaaggagtaaaccaatcaacacatcagcaatgctgcctactaaactctcatccagcatagccacctgcttcatcagtactcggacggtgagatgacgtcgtcgatcttcaggatcatcttcaccacctgagtggccagcaggatctgctgctgcttgccaatcagggtctcaaagacgttctgctctttcatgtcgttggtgcctacatcgttgcagtctatgccgcagtgggggttgctctcctgcaaaggtgttcagggatcggttgccacacgatttagaagtaatccaacagcgagaaaaccatctttcagctctacagagagctcgagacgacaatagatcacgtgctgcagcaaccacacaaagttatatctagccagaccgtatacgcgcgcctattgcttattggtagtgtgacacgtgaactcagttagaataacataacaaacccaagagttgggcatcacctgactgtctaccaagaccgtatgcgtgcacttattgcttattggtagtgtgacatgtgaactcaattaaaataacataacaaatccaagagttgggcatcatctgactgccaagaaaaaggatctagagtccagcttaaagcgagggtataaaaagtctgataccttaacttgctgagcttttaccgccgtcaaggtatcaattggcgacaaaccactgttttcagccaaggccagtggaacagcgtctaatgcatcagcgaatgacctgatagcgtactgcaaagaaaaacacaatcagaagcaacaaattccatcctcttattttccaaatagaagcaccaaagccaacagttacctgctcaactccagggtgccgatctgcagcagtttcaacagcaattgagcaagatatctctgctgagccaccgccgtacacgattgagttgttccggatcagattccttgccacacaaagagcatcatgaagactgcgcttggtctcctcaatcatcattttatttc

SEQ ID NO: 139602 - DNA, 1412 bp, Zea Mays
agtccagcaggtgcatactgatgatgacgtcgccgtcgggggactggagcatcttgtccgcgcccttggggccgagcgaggtgcggaggatccgcgcgacggccttgcccgcgccgatgttggccttctgcgcgtcgagcccccgcaggcgcgtcttcttctcctgctcccgcaggatgatgaaggggcgcccgaactcgtcgaaggcgagcgccatggccggcgctcggtccggatccgaggcggccgaggcgaagtaggaggcggcggcggggcgggcggcggggcgcgggtggtggagtgtgggcggggagggagggaggagagtgtggtggttgttctaggggtccagtcccgtacagaattttcttttgggcttggtgggcttcgtggtcagtttgggctgagaacctgactctctttcacggtgaggctatggcccattaggcccaaacgtaacatgctcctggccccacagccccacgtaactcgctgtcgtgtgtcgtcctcgcgcgccccatggcgaatgcggccgcctccgccctccgcgtcgtcaccggttgccggtccctccaactcatcctcgacgcaggccggcgggggcggggacacgtcgcggcagcggcagggccggcccgcgcgcgccggctccaacccgctcctcgtcgtctgcggctgcttcagcgtcgtcacggccgccactgcgtcgccgtcaacgtcgtctccgatgtccagtgcttccgcgctggctccgacgtgcgtggcctgctccactgcgactttccccttctcgtcgtcgcccgccctgggtccctcatccgatgcgctaccttccgcagatattcggggccatattccggtgctacgcggtcgtcttctcactcttcgtcgccgtcctcgagaccgagtcggggttcatcatccggttctagacgatatttgaatactggctgggaatgctccagatctttgttgctgtcatgacgaaggcatacccaagtattgaaaggggtgatctgattttgctccaggagattgcgagctacatgatttttgcttgtggagctgtctatgtgatatcggctgaaagttttcatacaaacactccccaaaatattatcatggctattcatgaagtccctactagctgtgtctattataggtccgtactgcggctcgaatgctcgatccctggcttcggctacctcggctggatggacgactggctccggtccccagccctagacaacctccaggacctcgaactaaactcacacagccctcaaaaggttgctgttgttcgtaggaaccgatcagctagacgtctcggtggtctccgcgccaaggttgggtgtttttgggaagtctatcgctgcttccctaaactctatatccctacagcattactttga

SEQ ID NO: 139603 - DNA, 1902 bp, Zea Mays
atggagcaggcagtagtatggctgctgaacgtcgtcgtgtcagtgtgggagggcggcggccttcccgcagaggatggcgttggcggggatggcgtactcgttggagaggctctgctccggcgtccacaccctgaggtagagctgctgcccgaggtactgccggtcccacatcgccgaccgcaggttccacatcccctggttgtccagcgacaccaggatcgccgaccacccgttggggtacacctgaacggtgtgtcttgcctgcgcgtccaccaagttgtacgtctgccgctgcgtctcattccactggccatcgccgtaccctacaacccagaagtcgtatccatcgaggtgccacgactgcagctcctcctccgtgttctggaacaccacctccacgaactcgtgcaggccgagcctgagcacgggcgtcccggcgcgcggcaccgccgcggcgccgtcgagccgcgcggggaggccgtcccagtcgatgacgccggcgatgtcgtatctgtcggcgagcttgagcggcgtgtcgggcacgacgaaggacacggcgttgacggcgcagcgcctacgcccggcgccgtcgagggaagcggagctggccagcaccagcgtcctggacgtcgggatggcgccgtagtggaaggagccctgcgggttggggcgcgccgcgctggccgtgaggttccaccggaacgaccgcgcctggcccagcgaccagccgtagccgggcggcggggccggcggcagcgggccgggcgcgcgggccgtggcccccgcgtaatgcagcgtggcgacggccgtgagctcggcggcggcgaagcgcgtggacgccaccacggcgtagtccagcggcgcctggtccagcgtgacgaggaacgccagcgactggcccgcgtggacgtcgagcgagtcgtaggcgctctgcaccgggtgggtgccctccacctccaccagccgcagcgcgtggccctgcacccggacgttgacggaggcgcggagcccgatgttggacacccggaacaggtacgtcccgccttgggcgccgacgaacggcgcggccccggacgcggcggcgccgttgatgagcagcgcggcgggcggcgggagcgctccgccgccgccgtcgtccagcgcgcgccggaggtccgcgtgcggggacgcggcggcgtaccagtcgccgacgagcagcgtgaagtccccggccggcggcgggtagggcaccgggatggcgggccgctggtacacgttgagcgcgccgaagccgcccgcggcgcggtgcagggccagggacgggaagtagaagaaggttccgatctggtccttggcctggaagcggtacgtgtagttggcgcccggcgggatgccgcagttggtgcccgctaccccgtcctgccacgagttcttgcgctgcttgacgccgttccaggtgagcaggaacggctcgtccaggctgttgaccacgttcaccaccaggttgtcgttcgtcacgcagtcgatgcgcgggcccgggaactggccgttgatcaggatgccctgctgcgtggtgccgagcgggctgattggcccgtaggtgacggtccaggtgaagtagcggtaagggtcgtcggcgccggcgagcgacgctgctgccacggcgagcaggaggaggaacggcgcgggcgggggtgccgccattgctggcggcgcggggaaggctggttgcttgatcccctagatctggaaggaagcagcagccgccagcaggcagtggagtggagtgtggggaagacgaggcgaggcaggctttatagctggactggtatgtgttgcagattaatcaaatgcatgcggaaagagaaacgcgcattcgttcggagctttgatgaatgcacagcacaggagaggaggtggtaa

SEQ ID NO: 139604 - DNA, 1574 bp, Zea Mays
tttttttttctattctctgccccaaacgcacaagccctagccgccgaccaccatggcggcggcgccacctccggacccgacggttctaattgaagacctcgtcgaggagttcctcctccgcattcccccggatgaccccgccagcctcgctcgcgccgccctcgtcagtaggcactggcaccgcgtgatcaccggccccgtcttccgccgtagattccgtgagttccaccgctcgccacctttgcagggctacatctccaacatccacaattccatccagttcgtccctatatcgtcgttccgcccgcgccatgctgacctcgacgacgtgatagcgatccactcaagccctggtcgcgtccttctctgtcgccgccccgggaagggtctggatgtcttccccgggaagggtctggatgtcttcctctccgtgtgggatcccatcaccgatgagctgcgggatttgcccgcgctgccgctgccggtggtcccaggcccgtgcacatgtaactgggacgcggccgtcatctgcgccgtaggcgagggctgcaaccatatccattgcggcttcaaggtcgtctgcgtaggaacttctcaaaggagggacttctcctgtgtctattcacccgaggctggtagctgctggagtgatctcatctttgctgcttcaggggaacacaccaactcctttgagacggggacctgtgtccacgctgggagctccctctacttcctgagtcgattcaaccatgaaatcgtcaaatatgacttgctgacggatcgaatgtctaccatttgcttcagagtagaacctgacgcccaaattaacggcatggccactgtgcttattgccacagaggacggcaggctaggagttgccaaaacaagcaattcaacgcttggttgttcaacacttcacctgtggataagggaccatgaaagatgggaagaaagaaggcccattgagcttcgtatgctgctcccagatgatgccctacgcgatcctcaattcccgcctgaattttttccagacaagccttggctggctggctttgcagggacaagagctggtgtcattttctttaagacacgtcttgggtattttgttgttgatctgaattcagggacgagcaagaacataggcgagtgcttaggttggggttgcattattccctatgtgagcttctgcactccagcgccaggagcaatatccacagatgagggaccagaagctggtctcgagggctaggatctggcttgtgaagtgaataagaagctctaaatcaagaaggatatttactagaccagaagcatggtttgggtgggacggatatctctacatgattttgttgctgttctgaccttgtttgtgctcctgaacttgagtttgcatattgcaatcaaattatgataatggtattggctctcatatgaaagcatggcacatggaatttaatactgtgtatgactgtggacaattttcctcttctacgttttaacataggaccaagggataaaatcagcttactccaatccagttttatgaatagttcatttgatagctttgttgaata

SEQ ID NO: 139605 - DNA, 977 bp, Zea Mays
attctctgccccaaacgcacaagccctagccgccgaccaccatggcggcggcgccacctccggacccgacggttctaattgaagacctcgtcgaggagttcctcctccgcattcccccggatgaccccgccagcctcgctcgcgccgccctcgtcagtaggcactggcaccgcgtgatcaccggccccgtcttccgccgtagattccagtagaacctgacgcccaaattaacggcatggccactgtgcttattgccacagaggacggcaggctaggagttgccaaaacaagcaattcaacgcttggttgttcaacacttcacctgtggataagggaccatgaaagatgggaagaaagaaggcccattgagcttcgtatgctgctcccagatgatgccctacgcgatcctcaattcccgcctgaattttttccagacaagccttggctggctggctttgcagggacaagagctggtgtcattttctttaagacacgtcttgggtattttgttgttgatctgaattcagggacgagcaagaacataggcgagtgcttaggttggggttgcattattccctatgtgagcttctgcactccagcgccaggagcaatatccacagatgagggaccagaagctggtctcgagggctaggatctggcttgtgaagtgaataagaagctctaaatcaagaaggatatttactagaccagaagcatggtttgggtgggacggatatctctacatgattttgttgctgttctgaccttgtttgtgctcctgaacttgagtttgcatattgcaatcaaattatgataatggtattggctctcatatgaaagcatggcacatggaatttaatactgtgtatgactgtggacaattttcctcttctacgttttaacataggaccaagggataaaatcagcttactccaatccagttttatgaatagttcatttgatagctttgttgaata

SEQ ID NO: 139606 - DNA, 576 bp, Zea Mays
agcaagcagcatcgaccgacgccaacgacagagaagagagtccatctgctcgttgccttgattttgtggaacgaagcgatggctcgcagcggcgccatggtttcctgcatgctgctcctggtggtggcgcaactgctcatggtgatggccacgcagacagcggcggcggcgggcgaccaacgcggagctggacgccggctgctgtggcaggtgacctgccactacagcgcctgtaactgccgcacttgcccgacatatggctgggcgtgctgcagcacttgctgctagctagctagctagtgtgagttcttccgcgcgcgcgcagccttttgcacacccctcttgcttagctcatgcatgtccagtagtagccggttgctgcactcgtcgtcggcggcggcggcggcggcgtcatctctggcgtggttacgttctcatcagcgacttctaatggcgctctcgatctttatttcctgcagtcctttttgtaataagaagccaattgatgtgtgtgcacgcgcaatcctaataataaatagatcttctttgtgccttgcctttgtttgatatatatat

SEQ ID NO: 139607 - DNA, 1518 bp, Zea Mays
tttgagttgcatcaaagaattgcacttgagaggtttcatggccacatgataatcccagttgtgatgaagacattgcatgaaaagaccagaggtttgaaaatgtctttcatcaagcgcagaccgcttgaggcagaggtgacagtgttggacaaagaaaagagggaatggagatatccagtggacttatcgaacatgacatgcacttgtaggcagtggcagattatcgggctgccatgcacccatgccctatttttcattacttctcttcgtggtgtagccagcgaaattgatcaatatgtacataagtactactctattgccaagttcaaagcaacatatgctgagaatgtgccttccatagaggcaaagcatcagtgggaggtcgtgaatcctggtttctttctcaaccctccagtccagactagagcaccaggaagaccaagaaaaactagaataaggtcaagtgccgagggtagtggacttggaccaaggaagagaaaatgcaaaaggtgtggaggattaggacatattgcgagaaattgcaagaatgcagtagatccagcagcaagaattgcaagaatgcgagaaattggagctcgggatcggcttggagctcctcccggcgtggctgctgtcaggccgttgaagacgcaggccgccgcgccggtgaagaagactcctgccgcgccgcgtccgaagatccgagaagcaggctgccaggcgaaggagagagggagagttgaagtcgggagaagcaggccgccagtcgggcgttgggaggaagaggagaggcggctacgcagagtagcgtggcgtaggcgcacggcgccgggtcgcgccacgcgcgggtctggctctgcgaggtttgcgagcacacgccgacggtggtcacgtgccgcgcggacgctgccgcgctctgcgcctcctgcgacgccgacatccactcggcgaacccgctcgcgcgccgcccacgagcgcctccacgtggcgcccttcttcggcgcgcttgccgatgcgcccaagcccttcgcctcggcggcatcgcccaaagcaactgacgacgacgggagcaacgaggacgaggcggcgtcgtggctcctccccgagcccgaccacgggcagaaagaaggcgccacgacagaggtgttcttcgcagactccgacccgtacctcgacctcgacttcgcgcgttccatggacgacatcaagaccatcggcttccagcagagcaggccaccagagctcgacctcgccggcaccaagctcttctactccgctggctggcaggacgcgctgcgggaggagcttcttgccggcgagaaggtgccggttgagagggtgaaagggcatgggcatgcggcgacgtcgtcgtggcgtcccgccgccaagctcagccagcctcacgaactcgccagcgccatctcggcatgggcatgctggcaggagaactggcagaatggcgtgagctcggccagtacacagaacatggtcacatgcaagtttaacgggtccccgtag

SEQ ID NO: 139608 - DNA, 1200 bp, Zea Mays
atggcggcggcgccacctccggacccgacggttctaattgaagacctcgtcgaggagttcctcctccgcattcccccggatgaccccgccagcctcgctcgtgccgccctcgtcagtaggcactggcaccgcgtcatcaccggccccgtcttccgccgtagattccgtgagttccaccgctcgccacctttgcagggctacatctccaacatccacaattccatccacttcgtccctatatcgtcgttccgcccgcgccatgctgacctcgacgacgtgatagcgatccactcaagccctggtcgcgtccttctctgtcgccgccccgggaagggtctggatgtcttccccgggaagggtctggatgtcttcctctccgtgtgggatcccatcaccgatgagctgcgggatttgcccgcgctgccgctgccggtggtcccaggcccgtgcacatgtaactgggacgcggccgtcatctgcgccgtaggcgagggctgcaaccatatccattgcggcttcaaggtcgtctgcgtaggaacttctcaaaggagggacttctcctgtgtctattcacccgaggctggtagctgctggagtgatctcatctttgctgcttcaggggaacacaccaactcctttgagacggggacctgtgtccacgctgggagctccctctacttcctgagtcgattcaaccatgaaatcgtcaaatatgacttgctgacggatcgaatgtctaccatttgcttcagagtagaacctgacgcccaaattaacggcatggccactgtgcttattgccacagaggacggcaggctaggagttgccaaaacaagcaattcaacgcttggttgttcaacacttcacctgtggataagggaccatgaaagatgggaagaaagaaggcccattgagcttcgtatgctgctcccagatgatgccctacgcgatcctcaattcccgcctgaattttttccagacaagccttggctggctggctttgcagggacaggagctggtgtcattttctttaagacacgtcttgggtattttgctgttgatctgaattcagggaggagcaagaacataggcgggtgcttaggttggggttgcattattccctatgtgagcttctgcattccaggtaccctggcaccctgctttcactctgtattttgctcatttgcacttgcacaataa

SEQ ID NO: 139609 - DNA, 1423 bp, Zea Mays
gcatgcatgcatgcatggtacgaacgtctggatagagtctccgagctgagtgtggtccgacgtggaagtgtacgtctcaacacacgacgcatgtgaccgacaagggcaagttgaagtctatgcatggatgggcctgagcgccgcgctgaatgaatctggacgggtggtagggcatctcggtgggcaaaacaaataactccgtgtgctgcatggctgcctttggaatctttgcatgcagctgtgtgctgaactgaaacccttcgctctatctatataaacagatgcccttcgctctcgtctcagcaggcagcatcgtctcaagttttgttctcctctcctagctagccagcacctgcagatctgctcgttgccttggtaattcatcatgtagtacgtagcatcagctagtatttatctcaagtatatatatacgcatatgtgtcgtcgcagtactttcccttatctctctatacacactacacgcatacataccaataccatccgtcttaactcttaatctttgcctgcatacgtacactgcacgtacgtactgcagggctactgattttgtggaacgaagcgatggctcgcagcggcgccgtggtttcctgcatgctgctcctggtggtggcggcgcaactgctcatggtgatggccacgcagacagcggcggcggcggcggcggcgggcgaccaacgcggagctggacgccggctgctgtggcaggtgacctgccactacagcaactgtaattgccgcacttgcccgatatatggctgggcgtgctgcagcacttgctgctagctagctagctagctagtgtgagttcttccgcgcgcgcaagcagcctttgcataccacccctcttgcttagctcatgcatgtccagcagtagccggttgctgggctcgtcgtcgtcgtcgtctgcggcggcggcggcgggggcgggggcggcgtcatctctggcgtggttacgttctcatcagcgacttctaatggcgctcgctcgatctttatttcctgcagtcctttttgtaataagaagccaattgatgtgtgtgcacgcgcaatcctaataataaatagatcttctttgtgccttgctttgtttgatatatataataaaagtcttcgttgcaaacgtacatcttttttatttaggaaattcattttttactaccgctttccggacggcatgcaggcctcaagtgtgctgtaaaaaaaagtgcaagttgagagagagccgtttcatgtcacgctcgaaatccagtggactcgttttgagacaatttattatccaccaaccatctaaagttaacttggcgccaccttttttccgcgatacgtagtattagtagagctgggcatctttgtactaagaatacgaaaacatcgtacaaccaaacaaaagaatagaacaggc

SEQ ID NO: 139610 - DNA, 1257 bp, Zea Mays
gcatgcatgcatgcatggtacgaacgtctggatagagtctccgagctgagtgtggtccgacgtggaagtgtacgtctcaacacacgacgcatgtgaccgacaagggcaagttgaagtctatgcatggatgggcctgagcgccgcgctgaatgaatctggacgggtggtagggcatctcggtgggcaaaacaaataactccgtgtgctgcatggctgcctttggaatctttgcatgcagctgtgtgctgaactgaaacccttcgctctatctatataaacagatgcccttcgctctcgtctcagcaggcagcatcgtctcaagttttgttctcctctcctagctagccagcacctgcagatctgctcgttgccttggtaattcatcatgtaggctactgattttgtggaacgaagcgatggctcgcagcggcgccgtggtttcctgcatgctgctcctggtggtggcggcgcaactgctcatggtgatggccacgcagacagcggcggcggcggcggcggcgggcgaccaacgcggagctggacgccggctgctgtggcaggtgacctgccactacagcaactgtaattgccgcacttgcccgatatatggctgggcgtgctgcagcacttgctgctagctagctagctagctagtgtgagttcttccgcgcgcgcaagcagcctttgcataccacccctcttgcttagctcatgcatgtccagcagtagccggttgctgggctcgtcgtcgtcgtcgtctgcggcggcggcggcgggggcgggggcggcgtcatctctggcgtggttacgttctcatcagcgacttctaatggcgctcgctcgatctttatttcctgcagtcctttttgtaataagaagccaattgatgtgtgtgcacgcgcaatcctaataataaatagatcttctttgtgccttgctttgtttgatatatataataaaagtcttcgttgcaaacgtacatcttttttatttaggaaattcattttttactaccgctttccggacggcatgcaggcctcaagtgtgctgtaaaaaaaagtgcaagttgagagagagccgtttcatgtcacgctcgaaatccagtggactcgttttgagacaatttattatccaccaaccatctaaagttaacttggcgccaccttttttccgcgatacgtagtattagtagagctgggcatctttgtactaagaatacgaaaacatcgtacaaccaaacaaaagaatagaacaggc

SEQ ID NO: 139611 - DNA, 1683 bp, Zea Mays
atgatgctgccaaaggcggtagaccacttccgcgagaacggtgaagcggcagtccaccagatgctttggaaaggcgccgtgtatgttcttgacttcttggtcgagaagggaggggatgctacaaatacttattggatcctaatgaccgagagggtcagttctatggttgtccaggagacagttagccaaattctgtctggtctgattcacagttacgagggcaaaggagactcaaatccaaatgataacttggagaggcttgagatggcgcatatcaagttggaagctgctcttgagacatgcagcaagtggcacatcactgatttgtcgttgttgcgttggcgcaagaagctgaagcgagctgctcaagagtgtgatgacacgctatacaaatacaagaagatgatccttgaagatgaacagatggaacaggaggttaggaattcctactttcctagacgaatagcgcatgctaccaaatctttcattttctctgcctttggccacaacaactacgagtccagcagatctgctgttcgaagattcgagtggtatgcagatggtgctagtgagtttctgagattcgtagagcttggtggcgcaccttgctgtcacatgccattcaactcttttgccaagcacctttttgcaggcaaggaactacagcacaaaattgttcgtggaaacgagtaccctttgtttctactatggttgatgccctttgttacggaagagcatggaatcgaagcttgcctgatatttatcaagaaagacggaaatacactggaggatgactttttctttagtgtaatactgcagctttcagaaagtacagacatagttgggatcacaatgaagtgcttgcagttgttcccccatcattttcagcccacagttgatactatcaagaaagaacttactcaactaactacacaggacttttcatgggtgccatatgttgatctatggcacagaaaacactgggacaatcttcataggtttagcactcaatggtttcgcccagatccattatgttgcaagcagcatgatcagcataagcttcagtatagcaacctaggcacagttgatgcttctctggattcaattattgaagtaaatatgcagtgtcagatctcgctacccaagtacaacaaccatcggaccgcactgtctgaatgcaaatattctctgcgcgattatcaaaagctgaaagctggattcctctttactccccattgtccttcagaaaacatgctacctgcagatacaagttctacgatggtgccgatcttcaggaggggacaacattgcgaggatactgacattgccttggaacaactgaaagaaatcatgatgtcaaaggcgatagattacttccgacaatacactgaagcgacagtctaccaaatactttggaaggctatacatggcactgcgtacattcattttgaaaagccagccatggaggctccaggtgcacggagaagttttaggggagctaggaaaagaaaactagtccaaccaatggaccaggatgtgcagcatcggacgcgtatgatctctcacttgctcgacttatgggctccacatgctcccgttaggctacgaggcttgatcttggactggattcagaaagaaaaggaaagccagttagcagcaccagtgcaccactgttgcacctga

SEQ ID NO: 139612 - DNA, 1116 bp, Zea Mays
ttctcattccaaaactgaatattttattccaaatcatagatccacatttcagtcagtgctatgtcgagttgtagcaaatcttcaatataacaataactaaacgcaaaagatcaactattataaaactgggaacacagcctttgcagtcataatcaaccagctaataagatgcctactacccaactgaatgctaataagcatcatccatgctaaaagagatgccttattgtgcccaggtgctacttcgcctcgctcactagtgactggggtgaccccagtcccaaccgccatctgaaactgtcatgcatacaagttccctaaaaaatacctggattgtagaaggccacgcagggaaagacggcggcgccttccttatcttcatctaccaccctccgttggagagacttgaggtctagtgagaagacaccctcatcaaacgaggtcacaaagacgatgtcaaatccctctgcggaaccaaccagaagtagtgatctgtatctaataacggggaccaacgtctggagctcaatgaccctacgtggtacccatcctcctcaatgttttaaatgtctggctaagcaccttagcggtaagggtttgaatcagctaaaatggctatagccggctatagcttgcagctaaaccatttagcggttttagaagaaaatatgacatatcttcatattagagcacaaactcataaccagccaaatttgttaatatatctaatatctatttcacatatcaataagcatctagtaatgaagaagcaaagaaaacgtgggaactggacaactggtaacctgccttgctgctgctgctgggattccgacatggcgaggaaatttttgtgcgtctgtcagatgcaggggcttgcttgctacttagagacgacggcttcgctgatgtcttgatggcgctccaacggcaacctgctgttgatgcatggtcgtgctgaaacctgaagccgatctggaattatggatgctgcccgcggtggtggtggacggctggacgccaggaggatgcagggcgacgcgtgaggtgtgaagcaaggggctgggcgaagcaacaacggcgactagctactcacaacggtggtggcgtgtggaaagg

SEQ ID NO: 139613 - DNA, 1784 bp, Zea Mays
atgcgcgcacggtagagagcttgtcgacggagatggcggtgatgagcggcgctgcagacagcatgttgccaaagctggtggacgatccggaggcggtggcgctggcggtagagccgtgggcgcagccagggaggaagaacaagaagacgtgccgtcgggctttgctcgtcggcagcctgatgacgctgctgctcctggcgtgcttcgtcctcggccgagagagcgcgtcgtcagcggcatggctgcagatcgatctcctcgccaagctgaccgccatgaacaatggaacggcagggcttacgacgacgacgcacgctcctcatggccgtgacgagctcctcggcggccttctcccggcgggcatgaacaggcggacgtgccggagccggtacgagtcgtggcggtactacaagtacttcccgtacgcggcgtcgccgcacctccaggacaagctgcgggcctacgaggcccggcacaggcggtgcgcccccggcacgccgctctacgccaagtccgtcgagcagctccggtccggccgcagcgccgacggcatggagtgcacctacgtcgtgtggctccccttcgacggcctcggcaaccgcatgctgtccatggtgagcggcttcctctacgcgctgctcacggaccgcgtcttcctagccgccttgcccgcggactcggccgacctcttctgcgagccgttcccggacacgacgtggcggctcccgctggaggacttccccgtcgccgacctgctcccgcgggggcagagcatcgagcggtcgtacacgagtcttctcgacgccaaggaggtcggcccggacgcgaacgcgacggcgggcgtgccgccgtacgtgtacgtgagcttggggtggcagctcaaggaccccctcttcttctgcggcgagcaccagctcgttctcggcaaggtcaactggctgctgctgtacagtgacctctacttctccccgtcgttgtacgcggtggccgagttccaggacgagctccggcggctgttcccggccaaggagagcgtgggccacctcctgtcccggtaccttttccacccgaccaaccccgtgtggagtctgaccaccaggtactaccgctcgtacctggctaccgcaaagcggaggatcggtgtgcaggtcaggatgttcagctatggctccatctccgccgacgacatgtacagccagatcctcgcgtgctcccagcaggagcacatactgccggagaccgaagacggtgatgaggacgaggtggtggccgcgacgaggaacggcgacaatgccgatggctccaactccacggccatcttggtggcgtctctgtacgcggactactacgagaggctgaggtcgaggtactacgaccacggggcgaagggcggcgagagggtggccgtgttccaaccgtcgcacgaggagcgccaggcgacggacaacatggcgcacaaccagagagcgctcgcggagatctacctgctcagcttctccgaggagcttctcacgtcggggaggtccacgttcgggtacgtgagcagcaacctcgccggcgtccggccgacgatcatgctcaccgcttatgaccacaaaattccggagccgccgtgccggcgggccgtgtccatggagccgtgcaacctcacgccgcccctgggcgtggagtgccgtggcaagcccgtggacaaggaggacctggcacgccatctcagagtctgcgaggattccaaggactcggtcaagctttttgactaataacaacgcccgctactaactttt

SEQ ID NO: 139614 - DNA, 956 bp, Zea Mays
atccccgccacaacggcgccggcagcggcattagcaacctaaccctcgcccaaccgacacacttcaacacactgtacacccgaccggaccctcccaccacccatgggcctgtgcgtgtcgctcggcgggacggccggcgccgaggccgcgcgggcggcggcgcccagctgcaagtgcggcacggcgctggtgctcatgcccagcggcgacatgcgggagtaccctttcccggcgacgacggccgcgcgcgtgctggaggacgcctccgccgccgccgacggcggcgatggctggctcctgtgcgacgcggacgggatgggcttcgagggcccggccccgccggcggtgccccacgcggagccgctccgcgcggggcagctctacttcgtgctcccggccgccgcgcgccgccgcggcctgcggcgcgaggaggtcgccgcgctcgccgtccgggcctcggccgcgctctcctcccgggcctccgcatccgcctccgccgcgccgggaaggcggaggcgcggcgccgtcgtcgcgcccctcgtcttcgcgccaccgccggaggacgaggaggaggagcgcgagcagcagaagtcgacggccttggcggcgccaccggtgcggcggcccgcgcgccccggcaggcgcctcgtgcggttcgcgtcggacctcaccgcgatccccgagtgagtaggcgggtcgggctcagacggacgggaacggattcgctgccattgaattggctctggaactggaagcagaggacgaggacgcctggagtcgggacggacagaggaaattccaggcaggcaccgtcagattctcatcgaggggaggccctgatcactgcacgtgcaagtcatggacgaaacgtgaatacaaatgtaaaaaatgaatagcgatgattcatggtcttaccaagatcgctccacaactcacttgcgtagttgcatgtcgta

SEQ ID NO: 139615 - DNA, 89 bp, Zea Mays
atttatttgctcatgtactgtgctctcgatgacgatgcgtcctgcaaacaagaaaagcaagagctgagcatcagtgcaacgaccggccg

SEQ ID NO: 139616 - DNA, 1064 bp, Zea Mays
atccttcggttggtgacgaacgcacagcatcggcaggcatctgcgtgcgcgtgccagtgacagacgacagatgatctccttcttcgacgaggccgaggccatgatgcagcttgacttcgccgccggccagccgctgctgccagtgccagtgccagtgccaggcatgcacgccgtcggcttcgccttagacgacttcgacttcggagcgacgacggccggcgatgctgccggtttccatttcggcgccggcacggcgacgtgcggcggcgctgcgggcggttccggtttcggtacctgcacgacggcaggcggcgccgaggacgaggaggagcggctgcgccggctgaagcgcaagatatcgaaccgggagtcggcgcggcggtcgcgggcgcggcggcggcagcgggcggaggagctggggcgcgccgcggaggcgctccgcgcccagcgccgcgcgctggcggcgaggtcggacgccgcggcggcccgcgcgctcgccgcaaggctcgacaccgcgcggctccaggcggaggcgcgcgcgctccggcgccggctgggcgtcgcgcagaggcaggccgtgctgctgctcgcgctggcacgcgcgcgcctcgcgcgggcgcaggtaggaacaggggcgccggtcgtggctgtgccgccgccgccgcagccgcagcacggcgctggcgtcgtcgcggcgggggcgattacgtggtgacggcgggaagataaatcacgagggagatggacacgtgtcgttgcagttgagcacgagttttgctttgccttgtgtcctgtactgccgcgcatgcggcccctgctgaaataatcacagtgccgttttttacaagacaaaggaatagtcttttttttttgtcgacgagcaaaaagtttccaaatcaaagatgcctcaacctgcataccgcgactcaacaaaactcagccgcaaaccttttctgttcatttttgttgttttttcgtttcctttcccttaagtttcttggagtttgtatttctctttcccttctaataatatagatcgcggcaaaacttttactccttccttt

SEQ ID NO: 139617 - DNA, 928 bp, Zea Mays
cggtgcatgcaacccctttccttgtgttttaaatacttttcgcacacttaagtctagtgaaatgtgcattaggttcataggaattgcttgaaaccctttgatgcattgctttccttgatatccatacctttatagatacttctgtgaagtatcaaaatatgatttacaaaaatgcttagccttgcttagatcttgtggatagaggttgtccttaatttaactcgagaaaggatggcttctacctgcaagaatattttcatttagagcaatggtgggatcttactgcaaagctccctgtgatgctcttttcatccttgggagcagaaacaatcctaaggatggaagtatgtaaatcgagacttgggttaggaacaggtgatgttctacccaggttgattaaggattaacacgtatgtaggcttgatgatcgaggaccctttaactggtcacatgcctcgtcatgggtaagccttgcctcgggcagactaaggccggaataagataacacgaaatgggcgtggagcggtggcgagagtagcgtgtaccctccgtggaaagaggctggacggtggtgtatctgtgctctcggtttgcgtgaacctgatccggtcttaagaaccccggtggcgggttgacatatgcaagggttaagtgctacatatgtcgtgtgattggagatcctcagctgagtataatcgattcggatcgccgtaccttcgcggttatgaagacttggtcactgccctgcaacctaaagtcaggacgtgaacactatggataaaaatgatgttggcttgatgtgatgtgaaattagactagatgcaaattgagtctattaatacttaagatggcgttaaaagattgaaagtaaggactcactttagtaagctacttctgcaaaagtataagttgattttgctaaagcctc

SEQ ID NO: 139618 - DNA, 2627 bp, Zea Mays
ccacctccacctaaacggcctaataatcctcagatccgacggcccgcgctcgatccccgccgtccatcttgtgctaaaccctgtcgccaacgaattaaattgaactcggcacgcgcacacgtccgcggccgcccgcacgccgccagcaacccccctcccgctccccgcaaaaccctagcgctctctacctctgtctctctctgttcgtcggcgatggcggcagcggggggcgaggaggaggccggcgagagccggaagcttttcgtgggcgggatcccggccggggcgcaggagcccgagctgcgggcccacttttcgcgctttggggaggtgcgctccgtcatcgtgatgcgcgaccgagagacgggccacggccgggggttcggcttcgtcgagtttgaggaagaggctgccgctggcaccgcgctcggcgacggggagaagctcaagcacttcctctgcggccgcatggtggacgttaagagggccaggacaagagctccacgaaaccagggcgagcagcactcgcagcctcagcaggctgagcaaggccggggtcaggggaaccaagacaatcagtcgcccgctggtaatggtaccgctgactgtggcaacagtgtgagctatgattcaaaaaaggtattcattggcggtttgcgggataatatcaccgagaaggagttccgggcttactttgagacgtttggcacggtaacggacgtcgtggtgatttatgacagcgcgacgagccggtcgagggggttcggtttcgtcacctttgattcggaggaagcagtggggaaggtgatgcggcagagctttcacgacctgaacgggaccaaggtagaggccaagattgctatccccaaggatgagcagtattaccgtaacagaggaggccatggtgctcgtccctttggcgggagggatcctgccgctcctggctatggagggttcatgtaccaaacatacaatgctagatctggcccctacaatggctacatgccccaacctgctcccacacatccctactttcctgccccctattttgctgcggggggctatccctatgggagtggatacccaggtcaaggcgtcatgccaaacattcctggcatggggcctaggcggggtcctccggcctatggaacataccctcaaatgtatccggtgtataacattatacatagagctggttatggtggtccagccacttcttttcagcatgaaattaatggtggaggtgattacaaaaaggatcaaacgaatgtagatatgcagcaagttgacaacactgctagcgttgcgacaaagttggaaaatatgaagctaggttgacaatgactttcaggtgcgtgtattctgataccctgctggttaaaattcatactttttttactggcaggaattactgcaatgcacccattttttaactatggctgttatgtgttccttgaaattgatacagcatgtaagtcttttcgtgaaactagcgttagtctgcccattttccaatagcattatcatcgtctggattagcatgcttgcattagtaatatgaaactggaacgtttatcctgattctgttatcttcagctacgattttaagaatccaagttcttcaaatttagtattgccatggtgaattttagtgatgcatctggacaccctaaatggttattatattacttcacttcgtgctatttatttaattagctatgacaacaaactttggcatcaacagtgtagtgtttactttcagtatttgagatattggttggcagttcatacaccagttaattagccttatcaattgctaaaatggtaattccttcgctgtttggacaatgcaatagagatggaaagatggatgactgagggcagattcatgctgtcctgacacagatgcttttgtccagtttatatatcataccttttttgttatacgagttttgtacatccttctttaccacatgaaatgaaagtaaaatggaatggtttgtttcccatagatatccatgcatcctagttctagtcatccaaatttgattagattaaagtagtaatgctttattcttagtgcagagggaacagtagttcgacaagaaagccagttctgactataactgaaccaaattagctgattttttgaatatattggatggatgcagagcatgtgcctgatggagtaaagttattaataggcaattatgtggtaatttgatttgcaaatctgtatcctgttgcaaggcgactgaattaaagtttgagctaggaccttgtttctgtttggggtctgagttttgcttgcacatagttaagctcgaggactattacttctacaacgatgacactggagttagtctattgtttgggaacccgcaactgtgaagactttgagctgagagattctttggttgacaagtacatcattagaattcttcaaacttacgtaccgttcctatccccactgcctgtaaaacagaaagcatgcgagtcgctggctggctgttgacctcacctcccctctcctctcctctcctcttgtaccaatgttaaattcttacgaccgtttaatgtatcttaatcagacaatccagaatcgaccctaatcgtctgctttgctc

SEQ ID NO: 139619 - DNA, 1650 bp, Zea Mays
ccacctccacctaaacggcctaataatcctcagatccgacggcccgcgctcgatccccgccgtccatcttgtgctaaaccctgtcgccaacgaattaaattgaactcggcacgcgcacacgtccgcggccgcccgcacgccgccagcaacccccctcccgctccccgcaaaaccctagcgctctctacctctgtctctctctgttcgtcggcgatggcggcagcggggggcgaggaggaggccggcgagagccggaagcttttcgtgggcgggatcccggccggggcgcaggagcccgagctgcgggcccacttttcgcgctttggggaggtgcgctccgtcatcgtgatgcgcgaccgagagacgggccacggccgggggttcggcttcgtcgagtttgaggaagaggctgccgctggcaccgcgctcggcgacggggagaagctcaagcacttcctctgcggccgcatggtggacgttaagagggccaggacaagagctccacgaaaccagggcgagcagcactcgcagcctcagcaggctgagcaaggccggggtcaggggaaccaagacaatcagtcgcccgctggtaatggtaccgctgactgtggcaacagtgtgagctatgattcaaaaaaggtattcattggcggtttgcgggataatatcaccgagaaggagttccgggcttactttgagacgtttggcacggtaacggacgtcgtggtgatttatgacagcgcgacgagccggtcgagggggttcggtttcgtcacctttgattcggaggaagcagtggggaaggtgatgcggcagagctttcacgacctgaacgggaccaaggtagaggccaagattgctatccccaaggatgagcagtattaccgtaacagaggaggccatggtgctcgtccctttggcgggagggatcctgccgctcctggctatggagggttcatgtaccaaacatacaatgctagatctggcccctacaatggctacatgccccaacctgctcccacacatccctactttcctgccccctattttgctgcggggggctatccctatgggagtggatacccaggtcaaggcgtcatgccaaacattcctggcatggggcctaggcggggtcctccggcctatggaacataccctcaaatgtatccggtgtataacattatacatagagctggttatggtggtccagccacttcttttcagcatgaaattaatggtggaggtgattacaaaaaggatcaaacgaatgtagatatgcagcaagttgacaacactgctagcgttgcgacaaagttggaaaatatgaagctaggttgacaatgactttcaggactattacttctacaacgatgacactggagttagtctattgtttgggaacccgcaactgtgaagactttgagctgagagattctttggttgacaagtacatcattagaattcttcaaacttacgtaccgttcctatccccactgcctgtaaaacagaaagcatgcgagtcgctggctggctgttgacctcacctcccctctcctctcctctcctcttgtaccaatgttaaattcttacgaccgtttaatgtatcttaatcagacaatccagaatcgaccctaatcgtctgctttgctc

SEQ ID NO: 139620 - DNA, 1527 bp, Zea Mays
gtgatggttgtctgacttgtggggacggctcgtgatctcctgctcgatccctgtggctgtgacgccgcgcgcagtctatctcggcgggtacgacgtggaggagaaggcggcgagagcctacgacctggcggcgctcaagtactggggcccttccacgcacatcaacttcccgctggaggactaccaggatgagctggaggagatgaagaacatgacgcggcaggagtacgtggcgcacctcaggaggaagagcagcggcttctcgcggggcgcgtccatgtaccggggagtcacaaggcaccaccagcacgggcggtggcaggcgcgcatcggccgcgtctccggcaacaaggacctctacctcggcaccttcagcacgcaggaggaggccgcggaggcgtacgacgtcgcggccatcaagttcaggggcctcaacgccgtcaccaacttcgacatcacgcgctacgacgtcgacaagatcatggccagcaacacgctgctgccgggcgacctcgcgcgccgcaggaaggacgacgccagcgacgacaacccggcgcccgccgccgcagccgccatcgccatcgccgaaccggcggcgcatcagcctgccgccggcgtcaacgacgccagcgagacgtggaagcatgtggtggcatcggcggcgctggccgccgcgccgcgggacaaccaccaccaccgccaccacgacgtgctgtccggcgaggccttctccgtgctgcacgacctggtggccaccgccgcggacggcggcgccggccaccaccaccaccacgcccacagcgccgcgcaccacgtgcccatgtccagcgcgacgtcgtcgctggtcaccagcctcggcaactcccgcgagggcagccccgaccgcggcggcggcctgtccatgctcttctccaagccgccgcaggccgccaagcccatgagcccgctcatgccgctgggctcctgggcgtccgcgacggcgtcggccagggccgccgtctccatcgcgcacatgcccgtgttcgccgcctggaccgacgcctgatcgtaccactcgatccaccgattcatgacatggccagcggccggccggttccaccatgcattatgtgccactccggccgaccgacggacggctagccacccaccacgtaacccggccgttctagctcggtgcacgtccgcgcgctagctctccaccgggttgcgtcgctggacttcttcacaccacttagttgattttaattacggttcttgggaggtagtgagttcattagttaattagctaatagccatcggaggagattggtcagaagctagctaggcgatatgatggaagggcaggagcgcacggcgcgcggcctctgctgtttccttcttctccggctccgtcgtgtgcggcccggacaaggaggggttttgtaaaatggaggccggcggagatcggatcacgtgcgtctactctaaaatctatatccagaactaatccactactaatgttaagtcatagcctctttgaattctctt

SEQ ID NO: 139621 - DNA, 1377 bp, Zea Mays
acgagaaggccacgtcagatatcctcagcttcgaatcgcccctcgcgttacgtgtccgcgagcagatccagcacctcatacgctcttctccctcccccttcttgaccacgttcctccactcccccccatagctctgggatctggccatggctccctctcctggtgtcgtgtcacccaggaggcggcgctcgatgacttcgtcgacgatggcgttgacgacctggtggtctcgctctaccagatggacctcgatctcacgctcttcctcctccgctcctaactcctcccggagaagatcaagaagtacacgatgcatatctctagggccacggccgaggcgactggtgaagttgcggcaatctgatgcgggaggtggccgacctcatccttagcttccctgacgagacgcccgtcgtcgtcctctctgccatggggaagaccaccaataacctcctcctgctaacaaggatagatgcgtgtgtgcctgattcgttgtctgtggaggccggagagaatgcggtgagctgcggtgcccccaaggcgtccgaaatccctaagctcgctgtcatcaaggacctgcatcttaggacggttgatgagcttggtttagataagtcgattgtttcagagaaatttttgaagtacttctggtggtgctggaacaagttgaaggagaagactgatgatgatattcccatgccagcctatttcaggttcctcgcgctgctcgcattcaagatattttctgctgagcaggtagatgttgctgttctcgaggttggcctaggagggaagtttgatgcaactaatgtggttaaagcacctgtagtttgtggcatatcttcccttggatatgatcatatggaaattcttggtgaccaaatcctgttcttggtgataaacttggtgtcgataaacgggttgttagttctcatgaatgtcatgttgtctcgaaataaagagcttctgtccgcacctaatcgcctaaaatggaaatgtttgactcattgtttaattcggggggaagctgaaggtggtctgatccgggacgatgttagcgaaagtcaatttaatcaggtgctgaacattgagttgcaacaaatcatcgatggagactgtcaccgcagccagaaaaccacggtctcaatttgaggagcctttccatctatgtttgttagaaggcatataatgcctatttatctcttgtattcgaacatttggcaattaagaaatagaagattacttccccaatatcccttattcctaatctcacctttcacggcttctggtgaacaatcacttgctattaccgactgacatgtccactcctcatatgtgagatattggggttgatatatatgttgttcgtttccatgt

SEQ ID NO: 139622 - DNA, 813 bp, Zea Mays
ccacacacgccacaactcacgcatccatctaccacacaaaaacttcatatttgttcatttgtctccagcaatacaatggagtactcgtctactagggtggtgtgtttagctctggcgttggccatggtcgccgtgacgccgtgcgcggcccagaactcgccgcaggacttcgtgaacccgcacaacgcggcgcgcgcggccgtgggcgtcggcccggtgtcgtgggatgagaacgtggccgccttcgcgcggagctacgccgcgcagcgccagggcgactgcaagctggtgcactccggcggcgggcccaaccactacggggagaacatcttctggggcggcggcagcgcctggaaggcgtcggacgccgtcggcttgtgggtgggggagaagcagaactacgactacaacagcaacagctgtgcggcggggaaggtgtgcggccactacacgcaagtcgtctggcgcaaatccaccgccatcggctgcgcccgcgtcgtctgcaacaacggcggtggcgtcttcatcacctgcaactacaacccgccgggcaacttccgcggacagagaccctactagctacctagctagctagttccaatatcgattatacgcgtacatatactctacatgctaccgattgaataagccacaaactaagcttaggccaccagttgattaggtttcttgtgaacctactcacccaggtttaagtgaagtgtgcatacatgtatgtgtatgttctgtgtggggtgtgacagttcgtttagtgtttcataaaataaataaatctctactactacttaagtcctt

SEQ ID NO: 139623 - DNA, 2505 bp, Zea Mays
cctggctccccatggaaggccgtggaaggtgcgaccgagccccagctcaacatggaaggcgcgatccactctcctcgccccatcatcggcgtccactatccatcgaagagtcccgccttcccagccccccttccccacatatggctggcgaacccatcgccaccgtgccatcggggcccgactccgcggcggaggccgaccgcctcctggcgctggccgagttggagctctccgcgggcaggctccgagccgcgcgcaggcacgctctccgcgccgcccgcctgtacccgatctccccgtgcgccccggtggtggccaccgccgccaatgtgctcctcgccgacgcctcctcccaccacgccgtgctgctgctgcccgagcccgacgaccccgaagcctcgccgctctccacctccgagctccgccgccacttcaagtcgctcgtcaagtccctccgcgtcggcctcgacgccgccaccgcagccgcctaccttttcgtcgtcgccgccgccgatgaggcagtcggccgcgccaccgaggcctacgaggtgctcaccgcccctgcccctgggaccttctggaccgcctgcgccgggtgccgcctcctccatgagttcgagcgcaagtatgtgggatactgagtgcgatttctgtttcagctctagaaattgctgatcaattaattgtggggggaggcgtctctacttccttcccagttggtcaaggcggacaagcggtcgtcggtctggtatccccttcctgtgtcctctctcctctgtgtagatggcgaattcgtggagtccgaagaatctgaatgttctcgtgttctttacataattcgttgccaatttatggcaagttttgtttgctccatttgttttatggtattatgatctggatctgatgagcccattcaaattcttttgcccagccgccgtccctctttttctattgtctgtctgtgcattggaattgctggatctatcacgatcttgtttgtcaatcacatcgcaaatacacccaacttttgtttgcgccggggggctacatcggaactcagggacattaagcaatacgacagcagcaacgcataaaagtttggcacatgcattgattcagagtttcagacaagaaattcagagtctaaccccatactttttgtgtgattttcttcatcctttctgtccgtttccttttctctcttaactgttcattcttcttgctaccccaaacatgccctaactgtgttacacctttctccaaatctcacttttttatagaacaaaaaaacaagacctacgactcgacctagaattgagatgtgttctagaaatgaaaaaatgcgtgtctcgacaattcccaggaattgcttatttgcagcatacctcagtgaaaaatgaattatatcttcttcaaataaagaacatgctaggtcacattctcagcgttgggcaaactgtcccttcaactaatagttccctccgagaagaaaaactgtacgtttcaaagtagttgtccaagttatgcaacttgcttttatgtaacgacagcaagaaaactgatctaagacctgtattgtggtgaattttgcagctgtgcaagacagggatcacaaattcttgacaaagacagtggaagaagcataccgaggagtcgattgcggtgacggaggtctatttggagcagttgtcgtccgcaatgatgaagtggtagttagctaccataacatggttctgaagcacactgaccctactgcgcatgctgaagtaactgcaattagagaggcttgcaaaaagctcgggaaaatcgagctctctgactgcgaaatttacgcgtcctacgagccatgcccaatgtgctttggtgcagttcatctctcccgaatcaagaggctggtttatggggccaagggggaggctaccatcgccattgacctgcaatgcactactctcttatgatcatgcgtgtactgccacattctgatatgagtactcaactttaaattaatcaatctactgtaagtcacaacttttggataaaatttcttcctagctgataaccatttttatgtcacattccagatgaaccacttccagagttccagttacttactcttaccgggatgggactgggcacaagagagttatccatgataatttctaacaaatgatgaacatgcttattatttgcttgctcattatttgcttctcggagttttttatatgtggactatacaatgaaaacacaacctatcatgatgccatgtcctttaaggtgacaccaatggagaattcctaatggctatgcaacaacagcttgtccacgaaattcgtgaagtatggacaacttcagttgagaatctactttatatgaaggaagaccttatcatccctcatggatgtgttcattctcttgtaatctacgaagttctgttaaagttagtcgaaccattttctgattctatgttctctcatttgtttgacaacaacacatcttttataaatt

SEQ ID NO: 139624 - DNA, 283 bp, Zea Mays
aagaagataacctcaagtccctacatgaatatgagaaagtgaagtaaaggttatgttgaaacttggatacttaaactgatttcacgagtaactcacacaacaagtgtaagaaaatgaaaagaattactggcatcttatggactttatggcccaaacatttttgaggatgctatatgggcatatattgctcctccttcaaatttcatgattttttgagactatttgtgtattattataattttttctacagaaaattatcaaaatgcatttaaattcataaaat

SEQ ID NO: 139625 - DNA, 686 bp, Zea Mays
atggcgtcctcgcggaagctagcgcccctagctgtggccttagcaaccatcgccttggtggtgacggtcacgccctgcgcggcgcagaagtcggtggaggacgacgtcgtcgacctgcacaacgcggcgcgcgccgacgtgggtgtcaagcccgtgtcgtggaacaatagcctggccacgtacgccgagagctacgcggagacgcgccaggacgactgccagctcaagttctccgacgggccctacggcgagaacctcttctggggcgccgccggcaccaactggacggccgccgacgtcgtggggctgtgggtggcccagaagcagtactacgaccacgccagtaacacctgcgctgcaggaaagaagtgcggcgcctacacgcaggtggtttggcgcggtaccaccagcatcggctgcgctgccgtcgtctgcagcaacgaaggcggcgtcttcgccatctgcagctacaacccgccgggcaacctcgacggccagagtccgtactagcttggcgatcatcgatcatatacgcacgcagctgtggatgcttgcaatacctactacgtgtaagtgtcgtatgcatgagtacatgtatacacataccgtacgtgtgtgtcgacggatgaaataaaattgggaaccgcatgccatatttatgctttgctgtgtatacaaacgttata

SEQ ID NO: 139626 - DNA, 1063 bp, Zea Mays
tgcccgtccattttgtacctcctgctcccagagtctagtaaacgaaatccatgtttatccgaaaactttcctgccgatcctatactgttactcgctaatttatttttaaactaaaccacgataaataaaaaaaacggatgaagtatatgctatccaataataccgtggaaattcttggctcccttggaagatcttgaaggcgccaccattgaccgtgaccatgccaagtgcctaccttctgcaaattatgctatatatcttgcttggacttgcccctatatacgattataaataccatggccagccaccactcgccacatctcatgcacgccgatcacacattggacttgcactggtgcttgctcataattactagttcatcagcaaacaacaaacaatggcaccgaggctagcgtgcctcctagctctggccatggcagccatcgtcgtggcgccgtgcacggcccagaactcgccgcaggactacgtggacccgcacaacgcggcgcgcgccgacgtgggcgtcgggccggtgtcctgggacgacaccgtcgccgcgtacgcgcagagctacgcggcgcagcgccagggcgactgccagctgatccactccggcgggccctacggcgagaacctcttctggggctccgccggcgccgactggtcggcgtccgacgccgtgggctcctgggtgtccgagaagcagtactacgaccacgacaccaacagctgcgcggaggggcaggtgtgcggccactacacgcaggtggtgtggcgcgactccaccgccatcggctgtgcccgcgtcgtctgcgacaacaacgccggcgtcttcatcatctgcagctacaacccgccgggcaacgtcgtcggcgagagcccctactagactgtcatgcatactacaattatatatttatatacgcttaatattaatttcagcatgcatgcatattataaatagtgttgtcaactctgtatatcattatattacgatgattatattgttgatgaacataataagtcaataaaaccatgcaggcgatttgtgagccatatttaa

SEQ ID NO: 139627 - DNA, 501 bp, Zea Mays
ctcctccgctccttccacgcagccaccccacgcttgcatcccgcagctgcgcggcgccgcatccggctccttccatcctagcggcgatcccccacccgctccttgcaatctcgcggatccgagcagatatcacacagccgccccacgcccaagcgcgcatcccgcagccgcgcggcaccgcatcccgcctccctcattccatcctcgctacgatcccccacctgctccttccatcctcgcgtctccgagcgcgctcgatcgggttcccataatcgcggctaccataaactcgatggcacgcgtgttgagggcatggggaggaggtgcgcggccgccatcaattctgtcctacccatctgctccgcgatccccgccattcttgtcgctcaccttccatcgacgatgccgcattgacctcggcaacctctgcccacctacaagaacaaatggggaggcgactcgttcagttgctgctcccctacctgcagaggcgactcgttc

SEQ ID NO: 139628 - DNA, 714 bp, Zea Mays
cgctcgcctcctcatggatcgcacgcccaccccgcgtacatctctgggcggcgatgcccgccccatccttgctccattctcgcggtcgtcggtcgaccctacctcgccatcccccatcccattcgcttgcaccagcggcccgagctccaggtcgagtgccgagctgtagaagggcaagatctacttcctcatgccggtcatggcaagttgcccaccccgacgcctgcgcccaataagccgcccgtcgatcgccggtcaatccgcttcggtgcgaggaggcgacaacgtcctcttgctccgatccacctctcccccaacccgctaggacgccgctgccgagagcgagcagaggcttccctcctccgacgggggaggaagatgctcaccaagttcgaaaccaagtgcaaccgggtcaaggacctcgccttccactcgcgtcgtccatggatcctgtctagcctctacagcagcgtcacccagatgtgggtctaccgcatgggcaccatcctcaaccgcttcgcagtggcgtccagttccacgccacataatcgctctttgtatccggagtagtatcgctccccttcctgactggacgtactcctagcccactagcattggccttgagcacgcacgaaggctcattcatcagtaactatccggtgatttgccgtataaactgtcacatgatgtttctacctcacaagtggttgtact

SEQ ID NO: 139629 - DNA, 430 bp, Zea Mays
aggaaatcataagtcgagattaaagttgatcaactcgacactcgaacaactgaatgagcaagtattacaagtgctgaaagttgtgagtgctcaagtccaacttctttatcgcataagttttggtgaagatacttattctggaacctttaaaagcatcaacgttagtgttcaagaactcaaagagtaaatgaagatggaagaccaagatgatatttatggagactattctgatacattgtcaagcactgagttcgacaatatgaacatctcaacatactgatccatggaagaacatgtatcattgtttaatgatgaggaaagacagggatttctcttaagtacaatgcttgctagcgtgtgcgacatgccagatcacccaaaagattgacaaatgatgtgtatatggttgattcatttaattttgttatgc

SEQ ID NO: 139630 - DNA, 1780 bp, Zea Mays
cacagggccggcagtagtgcacagtgcagccgctgctgctctgccctctacggctacgagtgcgaggagccgaggacacctttccctttcccttccacctcccctcccctccgtctctcgtccccattaatatctagccgcctctccccccgtctcttctccaaaactgtgagcgagaggcagggagtgcgctcgacggccgccgccattagtgatttagtgttgagagagggagagaatctaaagtgaccggacgctgtccttccttgctgatcggcgacacggtccatccctccctcgctcgctagggttccttttcgtccatggatcagagcttcgggaatctcggggccggagctgggagcagcagcgggggctccaactccaaggcggcggcagccgccgtgtcctcctcgtctttcctgcagctgccgctgtcgacggcgtcccccgcgtactacggcgcgccgctcgcgctcctgcaccacgccgccgcggccccgtcgtcgtcgcagcagcaccagcagcagcagcaccaccaccactacgccaggcacggcgccgagatgtcggcagcggaggccgaggccatcaaggccaagatcgtggcgcacccgcagtactcggcgctcctcgccgcctacctcgactgccagaaagtgggcgcgccgccggacgtgctggagaggctgacggccatggcggcaaagctggacgcgcgcccgccgggccgccacgagccgcgcgacccggagctggaccagttcatggaggcgtactgtaacatgctcgtcaagtaccgggaggagctcacccggccgatcgacgaggccatggagttcctcaagcgggtggaggcgcagctcgactgcatctccggcggcggcggctcctcctcagcgcgcctctcgctcgccgatggtaaatcagaaggtgttggctcttctgaagatgacatggacccgaatggtcgcgagaacgatccgccggagattgacccacgagcggaggacaaggagctcaagtaccagctgctgaagaagtacagtggctacctgagcagcctcaggcaggagttttccaagaagaagaagaaagggaagctcccaaaggaggccaggcagaaactcctccactggtgggagctgcactacaagtggccgtacccttcagagacggagaagattgcgctcgcagaatcaacgggcctagaccagaagcagatcaacaactggttcatcaaccagaggaaacggcactggaagccatcggaggacatgcctttcgtgatgatggaaggcttccacccgcagaacgccgctgctctgtacatggacgggccgttcatggccgacggcatgtatcgcctcggttcatgaactacacacttccatggacgactgtgggggcctatccaatcgtcggaccgtgggagtatatttcagtgttgcggtgcaaggacattgttgtggaatttttgttgctgattgccaaggggtgggtcggtcgatgtagcgtctatgcatggcttgtagttctcctgtaatgttgttgttaatttccgcttggcggcttgtaatctaggtgtatctctggaacttgaatcctgggtgattaatccggcaagcagctgcctgtttgtatgattgtatggttcgggttggtggaacatgatgcatgctaaggcgtggcctgtctggatcaaaaaaaaagaagatgtcttttgtaccagtggaatgattggaacttcagattgctgaacatttccgatctacattca

SEQ ID NO: 139631 - DNA, 473 bp, Zea Mays
tattattataaaacatacattatttattacactagttcacagttaatacagcttgtttatagcaagttttgttttgctcaaacatattcagtttgttatgattataaaatagggcagaacatgtatgcaagtgattgttgtaaagaagcagtcaattagttgtttttggtagagtatatttttttattcagaatttattatctggttagtgatatgcaatcatttatgtattcattagtctatagttaatacattaatgtttcactgcaagctttctttttttgaaacatattgagatttttatgattgtataacaggacagaacatgtatgcaactagttgtttttcatgtatgtaactgtatgcagctgtgtttttttcatgtatacaactttatgcaatgtgtgtttcatgtatgcaactgtatgcaactatatgcaactgtgtttcatgtatgcaactgtatgcaactt

SEQ ID NO: 139632 - DNA, 607 bp, Zea Mays
cctggaataacactacgttagtgtttgttagacgatgtccgcttgacgagtatccctcgaccgagcacttgcttaatttaaccatcttcaggttggtccatcagcttcatcctgcggatttagcccgtgcttggggtcgacttggcttgtcttccgcatcacatgattatttatcgtacctcatgagatgcacgatgcacatgtatgagcacaagtagaacgagtataagatagatactctatactaaaaaggatgaaacacttaaaatcaagcattaagcaccatggatatcatagcagagcatcgactacattcattaaccaaattgacctaataacactagaaaatctatttttattcctagctttttattaactctctaaactgtgtaacttaattacttgatttagcgagctatctaaatcgatcatcacaatatacgcatgctaaattaataatatttactgtgaccaacaattctatttaatctatttatagacctagttaacgggaatacgaatcaacttaccctgactaattcgacgcgatagttgcaagcacgaggatggtttccggttgacgtctttgatcacatatggctggcga

SEQ ID NO: 139633 - DNA, 293 bp, Zea Mays
cttgttctgttggagcagtacttgatgaaacttggcaaaaacatgtacaattacaaactcaattggatcattataaagaaattgtcatttagcatgtgtcaattgcagcagttaacaaagaaaaattagaacatgttaatctagggtggggtgtaagtgagcaaccaaatattgttgagacttcgtgtgaagattatatcgatgtaatgtaacggagaactatgatttgtcataaacatggacctgcatatggtgaaatcttttcactgaagtacctgctaaacaaatgtcat

SEQ ID NO: 139634 - DNA, 514 bp, Zea Mays
tcgccggcttcttcgatctctcgccgccgtgcgcgctctgctcccgcctcggcatcggcagcctcttcgggacccacctgcaccacagaggcgtcagcggaggtggggcgccgagcgccagcgccgcttgctgtgtgatgcgcacgccaaagacctgtcgcgccttggctactgtagcacgtaccgctagctcgtggacgccggagacatgtgcgaggactgcgtcgcggcggcggcgcccgagaaggtgttgctgtcgtcgatgggctggtgtgatctggatgagcgggacctcgcctgtgcctgctgcagcgtcgcgctcgagagcggtttctactggtcgtcgcacgcgcggcatggctcagactgtggccacaagcaagaggagaaggcaccgaggtcaaatggaagacgctggagtgagatgaggtggatgaagcgaggagaggagaggcatctagaagcatgtgtggacggaactctcgagaggcagagggactgtgggagtatgtag

SEQ ID NO: 139635 - DNA, 647 bp, Zea Mays
agttcactcgcagctgccaccgcggctctcgcctctctctagagttcactcgcctctcgcctctccagtcaggctgcgcgacgcaggccgggtgggcgcggagccccagcagcgcgtcggcgtcgaccagcgccgtgtcataggccacgtggtgggagtgggactccagcgccggaggagatgacccctgccacgggagaaaaggacgtggacgccccgttcaccgaggagatgcgggcggcggccatgcggctgcactccagggaccaggccagggacggcacgaaggaggcgcccctggagccacccgtcgccaagtggcagaccactgtcgaggggtacctccgcttcctcgtcgatagcaagctcgtcttctagacgctcgaggccatcgtcgaccgcgccgccgtcccctggtatgccgagttcagggatactggtttggagagatcggagccgctcggcagggatctggaatggttcaggcagcaaggtcacgtagttctggaaccatctgggcattgcgtacgcttcctttctggtagagctatctgagaagaaaccccccggcgtttgtttgccatttctactacgtgtacttcgctcatgctgccggaggccgaatcatcgtcaaaaaaggtgatgaa

SEQ ID NO: 139636 - DNA, 864 bp, Zea Mays
atggccgcccgctcgccgcgcggagccgtgccggatggctccctcgccacgacgcccaaggtgacgatgctgtcagccacgctgtgctacacgggggagacatgcaaatacattacctgcctcactcctgcttgctccttgcaccccagaacaatcccgctccttcttctccgacgcctcctgggtctccctgacctagacaggagcgtgaagataccaccggcagttaaggcgtgcatcctcgacgatgctgtggcacgcgacatcggcgtggggcaaccgctcagtaatggcagaagttctctgctccgaagccgagtcggcggcgagaggttcctgtgggcttgttgcagtggtagtagcagcactactgctggtacctctggcatcatactcacatggcacattgccacatgcatcctcgaggtgaggcatccataccagtgtggcggcggcggctgccaagaacagctgaaccgtcacaagatcgctgccactcacctctcacgctactgcgcgtacctgatggcctggtatccggacctgctccctgaccatgaggagtggagcaccgccctgtatgagacggtgaaggacgacgctaggcgtgccctcgcagggtgcagcgccggctgtgctgcggtactgggaccagaggccgagtatgtgagcaggccagtgatccagtcgctgagcgtctactccaggcacgaggggctcaggaaaggcgtcgtgcttggaaagcagctggtggagctgatggaaggcgaggaaactgcgtggatggtgctggcggaattctggtcggagatgatcctgtacgtcgctgcctcggacattgcattgcacggggtggtgagctga

SEQ ID NO: 139637 - DNA, 1389 bp, Zea Mays
cgatcatcgcacacatgccatgcagcagtcccttatttaggagaccttgaacaatggcttgtatcccttgagatccttgacgagcccctgcactgagcccgcggcggcgagcagcgagacgaagaggcaagcgtagctgagcacgttcatccacgtccacgccggcgagaagcggcgcgtcttggcctgcgccatgtacatctggatggggaagtagacggtgagcggccagaaggagacggcgccgatgagccccaggaagtcgttgaagaatgggaagaccgtggcgacgagcgcggtgagcacgacgaggagccggcgacgacggcgagctcggcgtggaggaaggcgcagtcgggccagcggccccgcgcccaggcctccacgaactggtagatgggctggcagaagacctggtaggcgccgaccaggtgcacggcgatgcagacgttgccgacgtcgatgagccagaaggggtcgtagaagccgaagcccgtgaggaagttgcccggcgcgtcgctgccgaacgccgcgtagcccagcacgccgcacagcatgtagaacgcggtggtggtggacacgccgatgaaggacgccttcttcatcaccacgttctccggcgggctcgaccgcagcgtgtcctggatctcgatcagcacgttggagtaggtgtaggcgaaggcgatgtcccccagcgactggaacgtcttccagaccttctcggccgcggtgactcaattaaaagtctcgactcagaatgagagatagaacgtacgtacagtagctgccatgcatgagcttgcctgcgatctttgcgatggagaggccgagtccgatggaggagtaggcgagggacatgacggcggcgacgatggagagccaccagagcttgtggaagttggggagctgcgacagcaggatctggatgcccgcgaagatgatcatgttggtggtgttggacgcctcgcagtcggcgccgtggcccctgctgtggaagcagttggaacgcttgatcgccctgcaccggcgccaccacgtacgtaccagcaggttaacactctcgcatggatcatggatgcatggctgcatttgctacgaactaacactatccgtaccccatgctgatggccgtggtgatggtgtagccgatggtgacgcccaccaggttcacgtactgcgccagcgagcacagccggtacttggactcccctgacgagaatcaaatacatttgaatggatttgaatgttgagtcgtcgagcttgagcagcagggacgacgtagtacgtacccaggtatgacctgacggcctgtccgtaggtgtagttccgcttgccctggccggggcccggcggcgcgcggtagcagtcggcgagtaggctggagcagaa

SEQ ID NO: 139638 - DNA, 610 bp, Zea Mays
ggccgacttcggaagattaggcccaggtaccgttttcctttattttatttcattttcttttccttttctttctcttttcaatttctagatttcaaatttgaattcagttttaatatgtgaacttatattctttttttatgtacaagttgaacacaaataggaaggtttaactaatttccttatatttattgtctttatctttgtttagtattctttcttctcttgctcaaactcttgaattccccctttagagaatttgatatatttcctttcacattattttatgttgtcacaaaatgcacaaaataaaatcccagcatgaatgcatgatgcatattttagtggcttttatgttattaattataattatttgtttttacctagggtgtacacatgtaatgatgcataaaggttatgctcacataaggagaaattgtttttctattgatattatttctgacaaattgcaaagtgggtgttacactaccttatgcattatgagtagctctagtttagcattagtttagcctctctctgccttaaattttcacctctcttctgctctacatcgactagaggcgtcttgggtggcctgcagctaccaagacat

SEQ ID NO: 139639 - DNA, 2585 bp, Zea Mays
gcgctacctcgagcaagcttgcgttgccgccctccctccccgtcgtgctcacgtgggttggtcaaccccctccccgcgccgcgagcaccttcacctccctcccgcctacatccacatggcagcgccgtggccgtcgcgcgcggcctgctaacagcaggcaaacagcaacacctcgcggtccctcggctgctgcgcaccgcgccgctcgccatggcgccaccgctgccgctgccgctgctgcggtggctgctcctggcggcagcggtcgccgcgaccgtggcgcagccgcagccgcagccgctggcgtcgcggacggacctggcggcgctgtacagcctgcgcgcctcgctggggctgcgcgcgcgggactggccgctcagggccgacccgtgcgcgcgctgggcgggcgtggactgcgcggcgggccgcgtcgtgggcgtcaccgtcgcggggctccgccgcacgcgcctgggcgccgcccggcccccgcttctcgcgctcgacggcctgcgccgcctcaccgcgctcgcccgcttcaacgcctccggcttcccgctcccgggggagatcccgccgtggctcgccgccggcctgccgccgccgctcgccgtgctcgacctcacctccgccgccgtcaacggcacgctgccgcccgacctcggcgcctccgggaacctcacggccctgctcctgtccgggaacacgctcacgggccctgtcccgcccgcgctgctctccgccgcgggcctccgcgtcctcgacctctcccgcaacaatctctccggaccgctgcccaacgtctccgtctccctcggcgccgccggcgcctccgtgtttaacgtctccgggaattctctgtatggcgtcgccgccgacgccattggggcgctcaggagacggtttcaggtcgtcgacgtgtccagcaactacctggacggagcgtggaacgggtccgacacaacagtgcttgccacgacgaattgcttctacggtgtaccggcccagcgtagccgtgcggactgtgaggagttttacaggaagcaaggcgtcaagcttgttgatcctccagcgccctcgcctgtgccttcgtcagagccaccgccttcaccctcaccagagaagaagaagaagaagaagcacgggatctccaaaaaactactcattggagtccttgtagccgccggaacactggttgctgtgttttttatcgcactgctgttctgtttagtgaagaggagaagcagaggaaggaggggagggagagggaggggagtggcgccaaacgaggaaggcacgcgctctgtctccgtgcggaggagggacagcagcgtcaatccggtggtgttatcgccatcggcggtgtctccaagtgccaacgatggacctaaggatgcgtctgccgttatcggtgagatcacctacgagcagctggtccttgccaccggcggttttggcgacgaccagctcatcaaacacgggcattcgggggacatgtaccatggtgtgttggagaatggctcccatgtcattgttaagaaggttggcgcaaagggcgccaacagacatgcgagtgaattggatttctacgtgaggtactcgcacgaaaggatcgttccgctgctcgcgcatttgagcaatgacgatgacgaattcatggcttacaagtatatgccgaagggggatttaacccatgcgttgcacaagaaacctgtagacaccgcagatggcttgccctccctggattggataactagactgaagattgcaactggcgtggctgaggctatgtgcttccttcatgaggaatgtagcccgccattagttcacagagatatccaatcaagcagtgtccttctcgatgataaatacgaagtgcgacttgggagtatgagtgacatatgcatccagcaaagtgggggaagccagaatgtcttcactcggatattgagatcatcaaagtctctcgacaagcacacatcaggtccaccggccacttgttcctacgacgtgctctgcttcggcaaggtgctgctagagctggtgaccggcaacttgggcatcagcggaccaaacgacgcggcgtcggaagaatggctgtcgaacacgctgaaccacatcaacggcggcgacagggcgagcatcgccggcatcatggacccgctgctcctggtggacgaggaccacctggaggaggtgtgggcggtggccgtcatcgccaagacgtgcctaagcgccaagccgtcccgccgtccctcggcgcgctacgtgctgcgcgccctggagaacccgctgcgcgtggtgcgccagggctcctcccggtccaactcggcgcggcagcagctgcggagctcgtcgtcccggagctcgtggcagtccgtgttccaggggaaccaccgggtgcagagcctggacgccgcagcgacggcggcgttggcgctggaccggcggcactcgctgaggtcgcacggtagcggaggcgaggcgtcgttctcgttcaagagagccttgcccgtgcccacggacaccgcgccggagccggctgcggcgctcgacgaggacgccgttattgtctagtgtaggaggcg

SEQ ID NO: 139640 - DNA, 1304 bp, Zea Mays
cagcccgcccggacgcaaggggcacgagggagaagcgaggaacggcggcggcggcaacatggcggcgcggaacatccttcgcggtgcggcatgcggccaccgcttcctcgtgcccgtcccctcaggcgctcttgctggttctggaagccggagcatcggcgctgtcgctcaggtctgtccattcccctccaaagccctaaagctaggcttcctgtgctaacccgaatcaagcaagccccgtcaacctcccccgccgtcgtcttcttctctgttgctctcctctccaccgggtccccatctcctcccttcaccgccccagaactcctcactcgggcgctgccgctgcgaggtctccgtggcatcgggccttcgtcattacgcagcagacgaagcagtgggaaacttggaactgcatgcacccaaggcaaaacgtcggtcatatatcccaacgaaaaatggaacagccatgatgcttccgctccatattcattacgaagatgtactacgtcaggatctgttgctcaaacagaatcatgccaatatcatgcaagttccagggttgtttgaggtcaaattagcaccaaaagctggctctgatctcaagatcccaattgggaaaatggccatggaggttttgagtggtcagagattcaaagaggcaaaaattgaccctttcgccaaagcaagaaagtcttctcgaaccaatccatttattggggccgacaaggacggtagcactgtcttcgcgcaaccaaccgttcttcgagggcatgcaatgtacaactttttggtgaggatgctgacagtgatgtccatgttaaattctcgggccgacattcgggagaacactgtgaagttcttcatggaaacggagttctgtgagttctctccagaattggaagaccatttcgagatatttgagcacatccgaggtttcaatgtgactatcgttacttcagccaatacaaaagatgagacctcactactgtggagtggcttcatgcttaatgacgagggagagaccaagtaaggtagaactgttgatctttgtttctgcttaatctccctgatattgtagttgctgcccaactgaaccttcagttggctgttgatgtcaaaaatgattttggaaatttggtgcttcgtgctctaggagtgcgcaatgtcgcagccttctgttttgtagactgaatgagataacgtgattgtttttcatcttgacgcgtggagctcatgtttgataactacgtctagttccatgtatgaacataataatcttggtctaataagcattgttttgctta

SEQ ID NO: 139641 - DNA, 1689 bp, Zea Mays
cagcccgcccggacgcaaggggcacgagggagaagcgaggaacggcggcggcggcaacatggcggcgcggaacatccttcgcggtgcggcatgcggccaccgcttcctcgtgcccgtcccctcaggcgctcttgctggttctggaagccggagcatcggcgctgtcgctcaggtctgtccattcccctccaaagccctaaagctaggcttcctgtgctaacccgaatcaagcaagccccgtcaacctcccccgccgtcgtcttcttctctgttgctctcctctccaccgggtccccatctcctcccttcaccgccccagaactcctcactcgggcgctgccgctgcgaggtctccgtggcatcggtactcccgacccgccccactccgttcgatcgatccacttttccttttcgcgaaactttctgccctttttcttcgttgattgatcctggaatcggtgttttcctttgttcactcggattctcggacccgaagcctaccaaattttggagtaatttggtttgtactctgtagtgatgcaatggaacgacttaaaagtaattttgtttgtagcgctgcagcggaatggtttagttccgagaatctgcggttaagtttgttttgttcatgggatgtatgcaccaaggctaggctgatgcaacaaagggaattcgttgttttttcttttttcaacaaatcagaagctcaaatgatgaaatgaacattcttaacaactggacatgaacagggccttcgtcattacgcagcagacgaagcagtgggaaacttggaactgcatgcacccaaggcaaaacgtcggtcatatatcccaacgaaaaatggaacagccatgatgcttccgctccatattcattacgaagatgtactacgtcaggatctgttgctcaaacagaatcatgccaatatcatgcaagttccagggttgtttgaggtcaaattagcaccaaaagctggctctgatctcaagatcccaattgggaaaatggccatggaggttttgagtggtcagagattcaaagaggcaaaaattgaccctttcgccaaagcaagaaagtcttctcgaaccaatccatttattggggccgacaaggacggtagcactgtcttcgcgcaaccaaccgttcttcgagggcatgcaatgtacaactttttggtgaggatgctgacagtgatgtccatgttaaattctcgggccgacattcgggagaacactgtgaagttcttcatggaaacggagttctgtgagttctctccagaattggaagaccatttcgagatatttgagcacatccgaggtttcaatgtgactatcgttacttcagccaatacaaaagatgagacctcactactgtggagtggcttcatgcttaatgacgagggagagaccaagtaaggtagaactgttgatctttgtttctgcttaatctccctgatattgtagttgctgcccaactgaaccttcagttggctgttgatgtcaaaaatgattttggaaatttggtgcttcgtgctctaggagtgcgcaatgtcgcagccttctgttttgtagactgaatgagataacgtgattgtttttcatcttgacgcgtggagctcatgtttgataactacgtctagttccatgtatgaacataataatcttggtctaataagcattgttttgctta

SEQ ID NO: 139642 - DNA, 1112 bp, Zea Mays
cagcccgcccggacgcaaggggcacgagggagaagcgaggaacggcggcggcggcaacatggcggcgcggaacatccttcgcggtgcggcatgcggccaccgcttcctcgtgcccgtcccctcaggcgctcttgctggttctggaagccggagcatcggcgctgtcgctcagggccttcgtcattacgcagcagacgaagcagtgggaaacttggaactgcatgcacccaaggcaaaacgtcggtcatatatcccaacgaaaaatggaacagccatgatgcttccgctccatattcattacgaagatgtactacgtcaggatctgttgctcaaacagaatcatgccaatatcatgcaagttccagggttgtttgaggtcaaattagcaccaaaagctggctctgatctcaagatcccaattgggaaaatggccatggaggttttgagtggtcagagattcaaagaggcaaaaattgaccctttcgccaaagcaagaaagtcttctcgaaccaatccatttattggggccgacaaggacggtagcactgtcttcgcgcaaccaaccgttcttcgagggcatgcaatgtacaactttttggtgaggatgctgacagtgatgtccatgttaaattctcgggccgacattcgggagaacactgtgaagttcttcatggaaacggagttctgtgagttctctccagaattggaagaccatttcgagatatttgagcacatccgaggtttcaatgtgactatcgttacttcagccaatacaaaagatgagacctcactactgtggagtggcttcatgcttaatgacgagggagagaccaagtaaggtagaactgttgatctttgtttctgcttaatctccctgatattgtagttgctgcccaactgaaccttcagttggctgttgatgtcaaaaatgattttggaaatttggtgcttcgtgctctaggagtgcgcaatgtcgcagccttctgttttgtagactgaatgagataacgtgattgtttttcatcttgacgcgtggagctcatgtttgataactacgtctagttccatgtatgaacataataatcttggtctaataagcattgttttgctta

SEQ ID NO: 139643 - DNA, 1427 bp, Zea Mays
actcagagctccaatggccgccgctctcccgcactcccgccttcacctcccgctccacacgcccagtcccacctcccgccgccgcccctgcccccgttcccgccgccgccttccctccttcgtcgccgtatcgcgcctccagaacaccaccgccgcgacccacccggtcctcccgcccccggctccgcccccctccgccgcgctcctcgccgccgagggcgcctccctcgcgccgcgccgcgagcaccgcttcccgggctcggtctcctccccaacaagcaccgcctctgcctctaacgaggcggagtacgccgtcctgcttcgcgccctccaggtgcgccgcgccgtcgccgccgaggtgctcgttgccgcgctcggcggcgggaaggtcggcggcctgacctacatcaagaacctcacggggcggatggggccgttcgtggaccgcgttgttgtcgaggccgcagcgatgcggcgggaccgccccgagctcgcccacatgtccttcaacgcccgtgcaaaggcgtacatccaggagtccggccttgtggagcttgtcaagtggttcaagcacaactcgatgacatatccccagatcgcaaaagttgtttgcgcatgttctggcgatttggggaaagttagaaagatgataaagtggcttaggtcaatttatgtaaaaggagattttttggggcgtgtccttgcaaacggtggatctttcttgaaccggagctttgaagaattggaagagattattggctatttggaaagccttggtgtcaggagagactggattggttatgtgatcagcagatgcccacagctgttgagcttgtctatggatgagttggagacacgagtcaggttttatacggatttgggaatggacaagaaggactttggcacaatggtctatgattatccaagagttcttggatttttaagcctggaagagatgaacagtaaggttcaatatctgaaagagtttggtttaagtactgaggaacttgggaggttactggctttcaagccacaactcatggcctgtagcattgaagaaaggtggaagcctcttgtgaaatacctgtatcaccttaacatttcacgggatggcatgaagcgaatgttgatggtccaacctacaatattctgtcttgatttggagacagtgattgcaccaaaggtacaatttttaattgatattggtgtgaggagtgatgcaatcggcaatgtgcttgcgaagtttcctcctgtattaacttatagcttgtacaagaaaatacgcccagtggacgagggttgcaatcaacccctctcaagcggtccaaggacccacttgaataccacagtgttttgctttgcttttcttaatcccgttcgcgaggaatctccacaacttggagtctctcgcccttacaaagatgttc

SEQ ID NO: 139644 - DNA, 2559 bp, Zea Mays
ctttgcccgagaataaacaaaacgacctcctccgcccgcccgcccgcccgcctgcccgtcggcgttgtttcgtctccaccgccgctctcctctccagtctcccaccaccgctcgtctccccgtaccgcccgcaacccccctcccctgcgagatccggggcgcgatgtggcgcagctgcgtctcgcgaggcctctccagggccaaggcctccgcctccaggctcctctccacggcgtcgtcgtcctacacggtggtcgaccacacctacgacgcggtggtggtgggggccggcggcgcggggctccgggcggcgatcggcctctccgagcacggcttcaacaccgcgtgcatcaccaagctcttccccacgcgctcgcacaccgtcgcggctcagggaggcataaatgctgcacttggaaacatgagtgaagatgactggaggtggcatatgtatgacactgttaagggaagcgattggctgggtgaccaggattctattcagtatatgtgcagagaggcaccaaaagctgttatagagcttgagaactatggactaccattttcaagaactgaagagggaaagatataccaacgtgcctttggagggcagagcttagattttggcaaaggtggacaagcctaccgttgtgcctgcgctgctgacagaacaggacatgctatgctgcacacactatatggtcaagcaatgaagcacaacactcaattttttgtggaatactttgctttggaccttctcatggacaatgaaggaaaatgtcagggaatcattgccttaaacatggaggatggaactcttcaccgtttccgtgcttctaatacaattctagccacaggaggttatggcagggcatatttctcagcaacctcagcacacacttgtactggagatggcaatgctatggttgcacgtgctggtttacctctccaggatcttgagtttgtacaattccatcctacaggcatttatggtgctggatgcctgattactgaaggttcccgtggtgaaggtggtatccttagaaatagtgaaggtgaacggttcatggaacgatatgctcctactgcaaaagatcttgcttctcgtgatgttgtttcaagatcaatgacaatggaaattagagaaggacgtggtgtagggccattgaaggatcacatttatttgcatctgaaccatctgccacctgaggttctcaaggaaaggcttcctggtatttctgaaactgctgctatttttgctggtgttgatgtcaccaaggagcccattccagttttgcctactgtgcactacaatatgggcggtattccaacaaactaccatggggaggtagtggatatcaagggtgataatccagatgctgttgttcctggtctaatggctgctggtgaagcagcctgtgcatctgttcatggtgcgaataggctaggcgcaaattcgcttcttgacatagttgtttttggcagagcttgtgcaaacagggtagcagatatttctaaaccaggtgagaagcagaaacctctggaaaaagatgctggagaaaagaccatagcctggttggacaagctgaggaatgcgaatgggtcattgccaacttccaagatccgtctcaacatgcagcgtgttatgcaaaataatgctgctgtattccgtacacaagaaacacttgaagaaggttgtgagctgattagcaaaacatgggaaagtttccatgatgtgaagctcagtgaccagagtctcatttggaactctgacctgatagagacccttgagctggaaaatcttttgataaatgcatgcataaccatgtattcggcagaggctcggaaggaaagcagaggagctcatgctcgtgaggatttcacgacaagagatgacgagaagtggatgaagcactcactggggtaattatcttctgttcactaagctaccagaaacaatatcaaataatttttctgctgttagtttattgcactgtttgacatgcttgccagtgtcacagaagccaatccgtaggcacaaaaccatagattgtgtaatttgtgtttgagcgaactataaaatgtaggagtacctgtgaaccactagtaacgaatggcatgcatcagcaggtcataaaaagctcatgtagataatcgacaacttacatatttggtggcagaaatcaaatgcatggtctgaaaaatacttccctttcagtagagctatccagattcaccgatgttacttgtacacacaggtactgggaaaacgagaaggttcgattggcatacaggccagtgcacatgaacacattagacgatgaagtagagtccttcccgccgaaagcccgtgtctattgatcgattcgagcctcacaccctcgggaattccgtgtaaggtgttaataaagcagatgggcgttcctggctgagaacatgatctgaactcgtgacccccctttttctgtggttctgtattttgtctgatttgctagaaataaaaggaacacatgctaatgcctgacagacgtttgtgtacatgaaattttgcatgggtttgtt

SEQ ID NO: 139645 - DNA, 2314 bp, Zea Mays
ctttgcccgagaataaacaaaacgacctcctccgcccgcccgcccgcccgcctgcccgtcggcgttgtttcgtctccaccgccgctctcctctccagtctcccaccaccgctcgtctccccgtaccgcccgcaacccccctcccctgcgagatccggggcgcgatgtggcgcagctgcgtctcgcgaggcctctccagggccaaggcctccgcctccaggctcctctccacggcgtcgtcgtcctacacggtggtcgaccacacctacgacgcggtggtggtgggggccggcggcgcggggctccgggcggcgatcggcctctccgagcacggcttcaacaccgcgtgcatcaccaagctcttccccacgcgctcgcacaccgtcgcggctcagggaggcataaatgctgcacttggaaacatgagtgaagatgactggaggtggcatatgtatgacactgttaagggaagcgattggctgggtgaccaggattctattcagtatatgtgcagagaggcaccaaaagctgttatagagcttgagaactatggactaccattttcaagaactgaagagggaaagatataccaacgtgcctttggagggcagagcttagattttggcaaaggtggacaagcctaccgttgtgcctgcgctgctgacagaacaggacatgctatgctgcacacactatatggtcaagcaatgaagcacaacactcaattttttgtggaatactttgctttggaccttctcatggacaatgaaggaaaatgtcagggaatcattgccttaaacatggaggatggaactcttcaccgtttccgtgcttctaatacaattctagccacaggaggttatggcagggcatatttctcagcaacctcagcacacacttgtactggagatggcaatgctatggttgcacgtgctggtttacctctccaggatcttgagtttgtacaattccatcctacaggcatttatggtgctggatgcctgattactgaaggttcccgtggtgaaggtggtatccttagaaatagtgaaggtgaacggttcatggaacgatatgctcctactgcaaaagatcttgcttctcgtgatgttgtttcaagatcaatgacaatggaaattagagaaggacgtggtgtagggccattgaaggatcacatttatttgcatctgaaccatctgccacctgaggttctcaaggaaaggcttcctggtatttctgaaactgctgctatttttgctggtgttgatgtcaccaaggagcccattccagttttgcctactgtgcactacaatatgggcggtattccaacaaactaccatggggaggtagtggatatcaagggtgataatccagatgctgttgttcctggtctaatggctgctggtgaagcagcctgtgcatctgttcatggtgcgaataggctaggcgcaaattcgcttcttgacatagttgtttttggcagagcttgtgcaaacagggtagcagatatttctaaaccaggtgagaagcagaaacctctggaaaaagatgctggagaaaagaccatagcctggttggacaagctgaggaatgcgaatgggtcattgccaacttccaagatccgtctcaacatgcagcgtgttatgcaaaataatgctgctgtattccgtacacaagaaacacttgaagaaggttgtgagctgattagcaaaacatgggaaagtttccatgatgtgaagctcagtgaccagagtctcatttggaactctgacctgatagagacccttgagctggaaaatcttttgataaatgcatgcataaccatgtattcggcagaggctcggaaggaaagcagaggagctcatgctcgtgaggatttcacgacaagagatgacgagaagtggatgaagcactcactggggtactgggaaaacgagaaggttcgattggcatacaggccagtgcacatgaacacattagacgatgaagtagagtccttcccgccgaaagcccgtgtctattgatcgattcgagcctcacaccctcgggaattccgtgtaaggtgttaataaagcagatgggcgttcctggctgagaacatgatctgaactcgtgacccccctttttctgtggttctgtattttgtctgatttgctagaaataaaaggaacacatgctaatgcctgacagacgtttgtgtacatgaaattttgcatgggtttgttacttgttgatgctgtacctgctgttttgagctcgcatgattcatgaacgttgcctgattcacggtgcattggtgcgacgttggttgacag

SEQ ID NO: 139646 - DNA, 1005 bp, Zea Mays
atggatccgccaggctccaacccagatggagtagtaaacatgacgagggcaatgcaggctctgtcccctttgctgaagcacccaagggcgacgatcgtcaaagtggaaggtctggtgctagcggccgctgggctgctgcttctccagctcttcttgggcttctacaggcggcgctggcgtagctccgtcctcagcactgtcctgcgggcgtcttccaaactcatggaggcgctcatcatctacacccttggtgcgatgcagtcctccccgatcaagaactcgtcgtatcccgtctgggctgcttttctcgtcatggcttcggcgggcaccaccgccgtacaggactatgatttctgtggcagcttctacaacaagtacatggagggtggagtcgacatgatcaagtacttcttctactggatcatgttcggtctgctccttgatccaaatacttataccttcaagacaaccctggacctgcagcggcatctcaagaattccagagcaagttccaattgcgtaatggccctcttttatttcgctttattcacaaagctctgcgaatccatcggtctagcagctgtgggatacaagatgcagaaatcgaatctttttttccgcccaaacccaaggaagatccgtttcggcatacaggccgtagagacggaagagtatgaccctcagagcatgaagggcaacgggtatgcagtctgctaccgtccgtttggaggtggtggactcgttaccatcgaccagctggagaggatggcggatggggatcgctggaaggcgctgcaagatttctgggccaagacaaccatccatgccgctaagtcgcactacaccaccaagcaacacatgcaacaccttgaaagtggcggggagttcctcacgcacatctgggctctgcttgctcatgcaggcattctctaccttaatcctgtgaacaatgaagatcaggaggaccaggctaatctaggctctggaccctcagctgctgcatga

SEQ ID NO: 139647 - DNA, 441 bp, Zea Mays
agaagaaatggtcacattggtggggggtagttcatcctgagatcaataatttcttctcttctgcctggacttagccctcttcttcctcgcctcctctttctgcttttcggcctcctccttctcaaacttctccttttccctcttatgcaagaagtcctccaccgacaggacacgcaccccgagggtgaggatggagaggccgacgaacgcaagtgtgagcagcacggacaccaccatggccgtgatgctgtcgtcgtcggcggccaccctcattgcgacatctgcatcttcgagggccaactccacttcgccggccatagcaacagcagccgggcgtccgcgccgcagcccatacctcgcgaggattaggggactcgaagcccttctcgctcctccctccaacacattcctagcagcacgcctcaacggaagagaccgagc

SEQ ID NO: 139648 - DNA, 5453 bp, Zea Mays
atggccgccactccggaccgagccaatgccgacctccgccatggcctctccgtcgacacccccctgccgccccagattgccagagagaagcaaggccttgatactgaaatacccctttctcctcagtggcttatgaaggtgggggaaaacaaggatcctgtttcacatggtatccgctcagatgtttcaaaaacatcaggggctggtgaagaccaaggctacaatacgaagaaaaaggatgttttcagggcttcagttcttgatggtgaaactgggcgtcgtgaccgctggcgcgatgatgaaagggaaccaaattcaacccatcggtggagtcgctggagggagacagataaggaacatggcgatgcacgcaaagcggaaagatggtcagatgacacctccaagcattctgtggatggacgtcgtgttccgcaggagcgctggggcgattccaataataaggatggcagttatgaccaacgacgtgagaataagtggactgcacgttggggttccaatgataaggagtctgaaaattggcgtgataggtggggggattcaggcaaagagggtgatgcttaccgtgaaaaaggtttatctcaccatgggaaggatgccaacagttatgaaaaggatgacaatatttctcgttcatggaaacctagttattccgcaggccgtgggcgtggagatttgccaaattatacttctcagacactgccgaaatcacctgctccttctggatatggtagggggaagctagacaatgattttgcaaagtttccaaacagtcgtggaaagttcacatctggtacaagtgcaatcagtagtggatcttcacgaccattccatcttggtcttctttctgacagacctggtggtatatcagatcgttcggcattcagatacagtaggctgaaattgcttgacatataccgaaattgtgatgtcactgattttaagttatctgttgattgtttggaggaactctctgtgttcatgcaagaggatgttttagaacctttagcactatctgctcctgttgctgaagaagcgaccattttaaaagctattgacaaaggggatatcgtaaacagtggtgtccatcaggcttctaaagatggttctgttggaaaagctggtagagaagaccagccaggaggtgtggaagtctcaggtcttgctggaaatactgatttggcagcaagaggggaaccaatgcatcctgcgacatctacttatgttgttccacaaaggtcacagtttattggagaacataaacttggaccatctgaatttgggcatcaaatacctaatttcttaaatcaagaatcaaaaactgttggcatgttgggttttgataactttgccagtccagtgcattctcatcctaatccagaaaacctctctctatactataaagatccacaaggtcaaattcaaggccctttttctggtgccgatattattggctggtttgagactggttattttggcattgatttgctggttcgtccagtgaatgcaccccatgatgttcctttcttaatgcttggggatgttatgcctcacctgcgagcaaaggtaaggcccccaccaggatttgccacttcaaagccaagtgatatgctagctccagagaccctacctacagggaagtttgtcagctctagcatgcaagcaggatcaactggcattggaatatttgacagtgggccaatcaggaaagataatgctgttgaggctcaaaatcgtttcctggagtcacttatgtccaatagtgcgcggaatccttcggcaggcactatctctataactggaggtatgaatgaacttgttagtactagctttggcaacatttctgtgcgcggaggtgagagcggggtcaatctgaactatcttttggcacagaaaggactgttggagagacaaaactctttgcaaaaccctgtttcatattggacaggagatgctccagcatcaaaagtacatcccatggctgatacatctcgccaatctttgcaatctcaaaatgttgatttactagccatgctgcaaccaaaggagaagcctcaagttcctactggtaattcgggtctgccactatgctccaattaccctgaagcaagtatcgttaatcccaacttgcatagtggagatcttgctcaaggggctcttaatatgcgtcaagatatgcagaactcccagaacattggtattggagttcaacaacacaacttaatgccacaaaaccgaccagctttggctcagttgccatctgagaagcttgctgagatgtctcaagatccacaactgttaaatatgattcgtcaagatctgcagaactcccagaacattggtattggatttcaacaacacaacttaatgccacaaaaccgaccagctttggctcagttgccacctgagaagcttgccgagatatctcaagatccacaaatgttaaatatgcttcagcagcaatatcttttgtcacaactacagttgcagtctcagacaccttttacacctcagcctccactctctatgttggacaagatgttattgctcaagcagcagcagcagcagcagcaactgcagcagcagcaacaacaactgcaacagcaactggagcagcaacaaaagctattgttgcagcagcaactgctctctcagatggtgcctcacgcgcatcctaatcaacacactgatgattcttatgcattgaagtatacttctgtgccatctgatgattctaccagtcttggttttagaagaatgcaagaggctattgaagtagatcagaaattttctgtccatggtatgcaagtgggtcaacaacctagtcagtcaattatgaattttagaaatatggatggtatagctttattgcaaaatcctgtaactgcactgccggtgccccatgaaactgctgtgggtgcacttccaaaagaggaccactctcgtcctggaatgtcggaagattttgcaaatgtcgacttacaattgaaatcaactatggtacactcaaagctggtggaagttgcagataggaacgagggttttaaatctcacgaagtggacactgcagcagaaaaaaataaaatgtctgaaaaggagttgaattctggatctactataatcatggggagtgcttctgatgaagctaagaatttgcatgaaccaccactagatccaaagtcagaaaatttatcttctgatatttctggtcaggttcaagagtcaaacctgtctgcagaagatacgcctcctggcatcacagcagctgtggcaactgaagtaaaagttactgatacacaggagaccaaaaaagcagaaaagaaaaggaagcaaaagaaaaaacaggctgctgcagatgctggcaaaggaacatcaaaggcggttgtagcccagcagcaaaggcaggaaactgaggttgacaattctgatattggtggtaataagcatgatttaacagatgatacagaggaactattttggggttcacctatcagagtgcaaaatgagattttaccctccaaaagttttccagaggaacatgacgctgacaaagctgaatcgcagtttagttctctatcatctgatcctcatagcatggcaagccagcgtgcatggaaacaacctactcaaggtctcaggcctaagtcactgctagaaatccaagctgaggaacaactgcgtgcacagaaaggattaactactgaaactgctaagccagcagcttcagttccttcaatttcttggagtggcatgtcaatatcttccgagcaacattatgggggttcaaatatatcattgggaagtatggaaagtgctgttgagagaaataaaagaagccagttgcatgatttgctggcagaagaagttctggcgaggtcaagcattgcagataatgagaataatgccaacgatgcatttttctctcctctgtcgcctgctgctgttcaggctgatgctcctgcccttgatgataatgacttcattgaggccaaggacaaaaagaacaaaaagaggtcagcaaaaacaaaagcttctactgtgaaggctccatcacctgttgtttcctttgatccaccagctatttcgatgccttctgaaaagggaaagtctgccaagcaagcacaacaggagttagaaatattgccagctccaccaagtggtccatcgtttggagattttgttctttggaagagtgatcagactagctctgtgcctgctccagcatggtctaatgactcagcaaaggtgcagaaacctttgtctttgagagatattcagagagaacaagaaaggagaaccgcatctatccagcaacaagcaccctcaccaactccagcaaaggtggccccgaaccaaagaagtcatgtgaatgcttcttcctggcaagcttctggaccacctccatcacaggcagttgcccctgtccaaatgagttccaatgctcccagtcattccaggtcaagtgctgaagatgatttgttttggggcccttctgagcactccaaacaagatacaaagcagtctgagtttccaagtctgttgagccaaagcagaagttccatgatgaaggatcattctgcactgaatcgtcaaaagtctcaggcaggcagattgccagttccttctgctgctactgcaaaccaatctggcaaagggaaagcagaggctacaaacaagcagactgaggcaatggacttcagagattggttggatagtgaatgggccaagcttactggaacaaatgatgtaagcttccttgagttctgcataaagcaatcaactaccgaagcggaaatactcctccatgagaacattggttcccttgaccgcaaccacgagttcatcgacaagttcctcaactacaaggccttcctgtcagcagatgtgatccacatggccttccaagctcccagcagccgtggtgacggtgcagggtgggcaaaccctgctgctgcagctagaggaggcacggtcatagacgcggagctggatggcggcgggaagaaaaaggggaagaaggggaagaaggtgagtgccgcagtgttggggttcaacgtggcgagcaaccgtataatgatgggcgagatccagaacgtggattaggaggatggcggcacaccaacaccaccgtgtatataacatagtttggcctttggttacatgccaccgaagtctcagggctcgagggaagctgggggtgctcggaatggcggtctggtctacctgtttttgccgagggtgggaaactgagcttagatacagggtcatgtgctggtgattttgggttcctgtaacaattggttaggatcctgtaacggacagaaatattttcttcaatagaaactcaccagatggattcagttcagtagtttgtgacgtcgttcagctttttgcacggtgtgggcagtggccccagcgctgccatccccacgtcg

SEQ ID NO: 139649 - DNA, 1324 bp, Zea Mays
gtcgattcgacgaactacattgttccctctttcctctcctctttccccatccgtccaatcaacccgaccgggctgctctgctgcctctccggcgccattgacgagcaagagagtcctcatcctccggcacctggtccgtcgcgtgccgtgcccacccgctaaggccagggcgccccgacttgagctcaccgcgccgaactcgaaccgctgctgttcctcgggtcgtcgaggatgccggagcactcagagaacgcggcggcggacctgatgggcaacatcatggagaccatcgcggagaacctcccgaggcagaagtccgtgcggttcgacgacggcgacggctcctccatctccgagcaggccaagaagctgttcggcggcggcgagagcaggaagaagtcggtacaccacgtgctgggcggcggcaaatccgccgacgtgcttctgtggcggaacaagaagatctcgtccagcgtgctgggcgtggcgacgctggtgtgggtcttcttcgagtggctggactaccacttcctcaccatcctctgcttcatgctcgcgctcggcatggccgtccagttcgcctggtccatcttctcgtccagcgtgccccgcgtgcagctgccggaggagctgttcgcgagcgccggcgcggccgccggcgcccaggtgaacagggccctgggcttcctccaggacgtggcctgtggacgcgacctcaagcggctggtcatcgtgatcgccgggttcttcgctgcggcggtcgtcggcagcttctgcaacctcctgacggtcatctacatcgggttcgtgtgcgcgcacaccctgccggtgctgtacgagaggtaccaggaccaggtggacgagttcctgtacaacatgctagggctggtgcagagccagtacagcaagctggacagcaagggcatcctcaaggggggcgtcaagttcaggaagagcgactagctgatttcctcccatctacgactacgatttgattcatcctgggagtcttgatcgatcgacacttgttctgttctgtacagcgagtaacaaccgctgctgctagctacattctttactgtactgtacttgtgtgatgacatcatatcttcgcgtcgcgtgtactgaagaactacacattgcactaaggttgctttcgtacgtgtacgtgctcatctttcttccttggaaatcactcggatgtgccgccctttgcaaaatgcagcgatcccttgtttttttttctttttcttgaggaactggcttcttttggttttgtatttccggtcgggttcatcaggattcttcaaacaaaaaaaaaaaa

SEQ ID NO: 139650 - DNA, 1309 bp, Zea Mays
gttccctctttcctctcctctttccccatccgtccaatcaacccgaccgggctgctctgctgcctctccggcgccattgacgagcaagagagtcctcatcctccggcacctggtccgtcgcgtgccgtgcccacccgctaaggccagggcgccccgacttgagctcaccgcgccgaactcgaaccgctgctgttcctcggggcagggtcgtcgaggatgccggagcactcagagaacgcggcggcggacctgatgggcaacatcatggagaccatcgcggagaacctcccgaggcagaagtccgtgcggttcgacgacggcgacggctcctccatctccgagcaggccaagaagctgttcggcggcggcgagagcaggaagaagtcggtacaccacgtgctgggcggcggcaaatccgccgacgtgcttctgtggcggaacaagaagatctcgtccagcgtgctgggcgtggcgacgctggtgtgggtcttcttcgagtggctggactaccacttcctcaccatcctctgcttcatgctcgcgctcggcatggccgtccagttcgcctggtccatcttctcgtccagcgtgccccgcgtgcagctgccggaggagctgttcgcgagcgccggcgcggccgccggcgcccaggtgaacagggccctgggcttcctccaggacgtggcctgtggacgcgacctcaagcggctggtcatcgtgatcgccgggttcttcgctgcggcggtcgtcggcagcttctgcaacctcctgacggtcatctacatcgggttcgtgtgcgcgcacaccctgccggtgctgtacgagaggtaccaggaccaggtggacgagttcctgtacaacatgctagggctggtgcagagccagtacagcaagctggacagcaagggcatcctcaaggggggcgtcaagttcaggaagagcgactagctgatttcctcccatctacgactacgatttgattcatcctgggagtcttgatcgatcgacacttgttctgttctgtacagcgagtaacaaccgctgctgctagctacattctttactgtactgtacttgtgtgatgacatcatatcttcgcgtcgcgtgtactgaagaactacacattgcactaaggttgctttcgtacgtgtacgtgctcatctttcttccttggaaatcactcggatgtgccgccctttgcaaaatgcagcgatcccttgtttttttttctttttcttgaggaactggcttcttttggttttgtatttccggtcgggttcatcaggattcttcaaacaaaaaaaaaaaa

SEQ ID NO: 139651 - DNA, 631 bp, Zea Mays
agctccacacgtactgctcacccagccagtcttgttgctgctgctagctgctagcttgctcgagctagttaggtcgagcgagggcgcagtgagccaacttagctagtgaggcatatggcggccatggccaggtctgatgatcagtgcgaccgtcttgtgtgggcattgcccatggagcgtccgctcagggactgccgcggcaccggcgacgacgacgacgacgactacgacgtcgccccggctgcttaataattaactaacggatcaaaatctgcagtatgcatggcatgtgatctagagttagagattgtacaagcgatgacgatgagtgagtatgtgtgtgccgaacgaggtctcgagatgatagatgtatatcatcatttcttgcctccaagctagctagctaataataacttagggcttgtttgggagcaagcccttagtttactctcttgtagtagtaatattaattaatgtgtagcttgcctagctagttagaaataaaaaaggcgttcatgacgaatgagcagctaatgatgtactagagttgataagtcaggataattgctgactccatgtatttatatggatgcatgttaattggtgtaacaaaggttatgtgttgtttact

SEQ ID NO: 139652 - DNA, 120 bp, Zea Mays
atggcctggtgcgaccgccttgtgtcagcagcatgggcggcattgcccgtggtggagaagagctgccgcggcgccggcgacgacgacgacgacgactacgacgtcgctccggctgcgtaa

SEQ ID NO: 139653 - DNA, 593 bp, Zea Mays
tctcttctccagctggggctgcttacaggattgcctatggtgatggagctaggtttggaaaagggttctgtgcagctctgagtgattttatcctcatgcaattgcagttagcatcagttttgttcacattctcacttggaacaaaagcacactactacggtcgtactattctccatgggggtgctaaataccggcctacagggcataaatttgttgttttccatgcaagctttactgagaattatcagttgtattccagaagtcattttgtcaaaggagttgagttgatcttccttttgatagtctacaacatctttaggagatcttatgttagcaatatcgtgcatgtgatgatcacatactcaacatggtttatggcagtggcttggctgtttactccttttctttttaacccagctggttttgcttggcaaaaaattgtcgacgactgggctgactggaataggtggatgaagaatcaaggaggcataggagtgcaaccagagaaaagctgggagtcatggtggaatagtgagaatgcacatctacgttactcagtattgagttctagaattcttgaagtgttgctctca

SEQ ID NO: 139654 - DNA, 1022 bp, Zea Mays
cctgaccacacggcgtccttctcttgagcagctggttgttgctcgttctcgcttgggggctgtgtgccgtctcacagcttgacgcctccaccgatcctccacaagggggttgaagaggactggaagggattgatgaaggggtacaagtcaaaatctgcccttaagcagttccaacagatgctcgcaggacacactgagagattttaagtgtcggaagggaaataatgatggagacaatcatggtgagtgctgcttgtggggtgatgaattccctgctgcgcaagcttgccactctactggagaaggaatacatgctactgaaagatgtgaagcacaacattaccttcttaagaaatgagcttgctagcatgaacttgctcctcttcaagctggcagacatagaagatctcgacgtgcaagtaaaggagtggaggaataaggtacgagagctcgcctatgatatcgaggattgcattgataactttatggttaatgataggcccaacagaagccttattcggaagactataggtaggataaagaagttatggtttcaacatgatattggcaaacagatccaagaactcagaacccgtgttgtggaggagagcgatcgccgttatagatacaagctggacgattcaaccttcaggcctgaaatgatggaaatcgaccatcgtctcaaggcgctctatgttgacacaaacaagcttgagggcattgatagcccagtggaacaaatcatacagtggcttacaggaaatgggaaacacgatcaagaactaaacataatggccatagtgggcttcggaggtttaggcaaaactacccttgcaatgcaggtatacaataaattcaaggacaaatttgattgcacagcttttgtgtcagtgtcaagaggccccaacatcaagaaagttttgatggacttacttaaagatgtgggagctgccattgacacaacagatgatgagatgcgtctcatcaacaaactcaaaggacatctcacaaaaaagaggtaa

SEQ ID NO: 139655 - DNA, 2354 bp, Zea Mays
aagtgtggtggccttaccatggctatcattactgtatcaagcttgctagctagtaaagatcctgacattggatcagtggaacagagtggcaaattctattgggtctacactcgagaataatccagacatagaggtcatgagaaagattctatctatcagttatttgatctaccacattatctgaaaacttgtcttctttatataagtatcttcccagaagattacatcataaatagaaagagtttgatagttagatggattaatgaaggatttgttcaagaagaatatgggaaaaatgcacatgatataggtgaaagttactttaatgagcttatcaatagaagactggtccaaccatggtttatcgatcatgacagtgggagtgtggtgacttgtcgagttcatgacatgattcttgatttaatcataacaaagtctgtagaggagaactttgttactttgttagactctcgagaacttacatcaagtccacagaacaagatacgaagattatctatccaatgtggtgacggagaaccaccagctttggtgctagaagagtcaacatcgctatctcatgtcagatcagtgactatctttgggcatgggaagcaactgccatctctttcaaacatgaaggctcttcgcgtgcttgacctagaaggttgtaagggattagaaaaccaccacctggaaaatatagagaggctaatccacctgaaatacttgaaccttagagaaacagaaatcacagagctcccaaagcaagtggtaaaactccagtacttggatacattggatataagaaacactggggtgagtgagttacctccggctattattcaacttcggcaattggctaggctgttcattgatcttgacaccagattaccatatgaaattggtaaaatgcaaaatttggaagagctgacacatgtcaatacgtgtatgtaccatatgaacttcctgaaaaagctggctcagctaagtaaacttagagagttggagataagttgggatcattacggaacacgagttgataaagtttcttatgcgggtattttgatacattcacttcacatactggccacacataaccttcggtctctcactgttcacatcatggacgaacagagcttccctcttcatacctggcatcctgctccttctgcacttcgaagactccacttcgacatgaacaacaacgaacaatttccaaagttccaacctgggtgggatcacttgtcaatctccaagaactaagcttccgcattacaaaaatgacacaagatgaccttgatgtacttggagatataccggctcttcgctctcttgccttccacatggaaatctgcaccaaaactacaccctgggaagatcctagacccgaggattggcttaggatcagaaaagggtttcaaagtttgaactccttccgcttcgaatgtggcccttgggagtggatgtgtctcatatttgaagctggatcgatgccaaagctcgaaatacttgaccttgaggttccatctgttgagaattacttgattcaaaaacttggttttgatcttggcatcaataacctctcctgcatctccacagttactcttagatttagtaatcggggatgcagccaagaaaatgaagttgccatcaggaaatcagtcagcatacatcgcaatagacctgcactggaaataataagaaaaaaggctcgaagttgaagaggcaaaaggaaaatctggatgggctgatagtaaacctgaaactctggtgaacttcgagttgggacttgtgagcatcagataaaggaagcaatgcagtgagttgataagagatggcgtgtgatcacaattcacagcacagacgaatccaaggaacctttccgcttttggggtttgaagatgacgcgatggaaattctcttgctgcgattgaagcgtcagccaattagaatcagaattgacacaactccggatcatgtctctctgtgctagaaacgttgattacctgtgcaaaaaaaaaagaagaagaaaaagatatcgttccaggaacaccgtggaacagctccagtgctccaaccaaacaggggcaagaggtgtttccgtgtttggcccagtagtccatgtatcctttgcatgtgaatttctccatttttctaagcgtgaatagattgggagttaggtggtgtttgttttgaagaattaattcattctatataagttgatgcatcatgagtatattctaaattagtatattctaaaaatttagtgtaatgaactcatttatcatattattactaattattagtgtataagaaatgaatcactcatttcattttccaaaccaaacaagaaa

SEQ ID NO: 139656 - DNA, 1605 bp, Zea Mays
tgggggtgtgggtgtcgggcgggccagcagctggacaagcaagcaagcaagcaagccaataatggcgtctcactctcatcggtcccggtctcccacggcgccctgtcccagctgggggcacgcccacgcgccgcggtgccggcggcggctcgtccgggcactgctgctcgtagcggcgctggcgctggcggcggcaggtggtggtggtcgtggctccgcggccgccgccgccgccgccacccagcagaggatcccggccatcttcatgttcggcgactccatcgtggacccgggcaacaacaacaaccggctgacggaggccaaggccaacttcccgccgtacgggcaggacttccccggcggcgtcgccacggggaggttctccaacggcttggtccccggggacctcctagcttccaagctgggcatcaaggagctgctgccgccgttcatcggcaccgacctgcagctcgaggacctgctcaccggcgtggccttcgcctgcggcggcagtggctacgatccgctcacgtccaagctcgcgacgaccctgtcgagcgccgaccagctccagctgttccaggactacaaggataagctggcggccctggccggggaggaggagatggagcgggtcgtctcgcaggccgtctacttcacggtgatgggggcaaacgacatcgtaaacaactacttcatcctccccatcagacgccaccagtacgacctctcgtcctacgtcgacttcctcgtctcctcggcgatcaacttcacaaggactctgaacgacatgggagctcagaggatagcgttcctcggcgtgccgccactaggatgctgcccgtcacagatcacgctcgcggggagcccgtcgcgccagtgcgatcctgctaggaaccaggcgtcggagctgtacaactccagggtctccaaggagatagagcgcctcaacgcggagcgaagcggttcaggctccaagttcgtctacgtcgacatatactacaacttgctcgacctcatccagaatccagcttcgtacggtttcaaggacgtgagcgagggttgctgcggcagcacggtgctgaacgccgccatcttcatcgcgtaccacagcgcgtgccccaacgcgcccgactacatattctgggacggattccaccccacgcagaaggcatacgacatcgtggtggacaagctcatccagcagaactccaagtacctgatgatgtgaagacagacacttgctgctgcatggcacgagggctctacctttccccgtacaaacacacggcctgacgtcgaccattattcatggacgactccccacatggcagtggcatttgccaaatgtatgatacatattaacatataaatatactatacatgcctgtgcgccaatatcatacataatgattcattagttctagtttgtatgtttttagctccaagtccatcatccttacgacgattattatatgttgtacagaaccaccacagatatgtaactagttgtgacactgacagcaaccagccaaccagaacgcctttacatttgtagaaccgtgtcggtcgggaagtacctcacggtgtgtaaccatatatata

SEQ ID NO: 139657 - DNA, 1310 bp, Zea Mays
agcagagcagttggtaggacagcaggagaagcctttctctcttcccgttccagtgttgtgtaggccatcgactcgagtgctcgggcagatagaagagagagagagagagaggggggagatgcagcggctcacggggcgggacatgtgggacgtggaggagtgccagagcccgcgcatgggcagcgtcatcctcggcgtcgacggcggcgccagcaacaccgtctgcgtctgcatccccgccgccatgcccttcaacgacccgctccccgtcctctcccgcaccgtcgccggctgctccaaccacaactccgtcggagaggacagggcaagggagacgctggagagggtgatgtcgcaggcgctgctcaaggcgcgccggcgacggtcaaatgtctgcgccgtctgcttggccgtagcaggcgtcaaccatccagtcgatcagcagagaatgctggactggctcagggacatatttccaagccatgtcaagctgttcgtggagaacgacgcggtggcggcgctggccagtggaaccatgggcaagctgcacggatgtgtgctgatcgcagggacagggaccatagcgtatgggttcaccagtgatggtagggaagctcgagcagcaggtgcagggccagttctgggtgactggggcagtggctatgggatttctgcccaggcattgacagcagtggtgagagcttatgatggccgaggccccgaaacagtgcttaccaacaacatccttgacttccttggactggcatcgccagatgaattgatagggtggacatatgaagaccaatcatgggctcgtatcgctgaccttcttccagttgtggtagaatcagctgaaagtggtgatgaggtggcaaacaagatcctacacaattcagttggggaactagcttccagtgtcaaggctgtagtgcaaaggcttgaccttggtggtgaagatggcaagcatccatttccacttgttatggttggtaaagtccttgaggcaaacaaaaagtgggacattgggaaagaagtgatagattgtgttaccaagaattacccaggtgcctatccaatacatcccaaggtggagccagctgttggtgcagctttattagcatggaatgctatagcaagcgaattagatggcgacattagaactgttcaataatggaacatcctgcaaattattgtatattatgttttactgctgaatcatcacctagccttttgcatttgctgtaacaggttgcttgaaaaggttgtaatcttctcgagaaagaaaggtttacaacaaggaatttgattta

SEQ ID NO: 139658 - DNA, 442 bp, Zea Mays
tggggaagcaatatgagtccaggatacaaaaaattattactctctggaatctcagctttattttggtctatttggcttagtcgaaatgaagttgcttttaatcataaaccaataccatcaattctgcaggtcattttcagaggtacttactggttcagattctggagacttctacagaaggaggaatcacatcaacaaatcctcgatgtctgtcaagcgttggaagtggtggcgatggaagtctttgcaaatcatggatggcgctcaaatgcaagaattgaggatgcctagagttacctacattctagtgattttgcttctttaagttagtttcattatctatgcaacgtttctcggatgtaataattgtcttgtgttggctgtacgcattaccatgctaaagccggaactcatgtttccattatcaaaaaaaaaaaaaaaa

SEQ ID NO: 139659 - DNA, 5502 bp, Zea Mays
aggggaatggaaactccatcagaggccttgaagccggcggaggctaaaccggcgaagccacggccagtggcgcccacgggcaggttcgccttggggactgcttcgtccattaaaaagcgagctgatggttcggctccggcggaggtgggtgtgccccggtcttccttgatgaagtctacctcgtcgctgaacgccagttcggcgacgagaagaagcagcacggggactgctgggaagcaacaggacaatgggagctcagctgctgctaagaagtctagtcctacgctgtcggatggcgcgaggaagactaaactggtgtcagctcccgctgctggctcaaaaccagcagtggagaagaaaacatccttggtcgagaggacaggtgccgatttggccaggaagcctgctgttaaggcatccccaacttcaacactgaagaaggtccagtcaaagacagagagctccaatggcagcagtggcagcaccaggagagtgtcctccaatgcttctgtgccatcgccacgttccgtcacaagcaatgcagcaaggaaactgggtactcaagcatcatctgctgcgtctaatcggcggaagagctcaaccgcagatagccgtgattcgagattcatgatgctgccacaggtggatttgaaggctagcgatgaagtgaggctggattcaagaggtcatcgagttcgtagtctcaagcagctgaggttatcacatgctcttgagtttgtgtatctgagggacaaccttttatcaagtttggagggcattgagattctcaagggggtaaaggttcttgatttgagttttaatgattttaagctccctgggtttgagcctcttgggaactgtgttgtcctccagcaactgtatcttgctggaaatcaaataacttcacttgctagccttcctgaacttcctaacttggagttcctttctattgctcaaaacaggctaaagtcagtttgtatggctcgacagcctcgacttcaagtgttagcagctagcagaaacaaaatatcaactttgaagggatttccacattttccttctctagagcatttgcgtgttgaggagaatccactacttgagatgccacacttggaagctgcttctatcctacttataggtcctactttgaagaagttcaatgaccgagatctgaaccccaacgaggctgaggtagctaagcaatatcctgctcatacagctatttgcattcgggatggttgggaattttgctcccctgaacttgctgctgattcaacattttctttcctacttgagcaatggaataataagctgcctcaaggttacatggtgaataaagcttatgttgaccatccgtttgaagaggatccatgccattgccattttagattcacaaatcttggtggtgagggtgagctagtcctcaaataccaatggtttctgggtggcaaaacaccaacagattttgttgctatccctggtgcatcgagcgaggtgtactggccaaaacgtgaggatgttggaagatgtttgaaagttgaatgcactccaatagtaaatggtgcagaattttcgcccgtttttgctgtatctttacctgtttctccaggtactggatgtccaaaggtcatcaatctggcagtcagtggtgaagtagtggaaggaaacatactcagtggagttcctgaaattgcctggtgtggtggaacacctgggaaaggcgttgcaagttggttaaggcggaggtggaacggcaatgctgtagtaattgatggagctgaggggatggaatatcagttgacagtcaatgatatcaattcaagtttggtatttatgtacacccctgttacagacgagggtgtcaagggagagccgcaatgtacaatgacagattttgtgaaggctgcaacaccatcagtcagcaatgtgcatgttctgggagatattgttgaagataacattatcgtagggaaaggaaaatacttcggtggcagagagggactaagtaaaatccggtggtttagagagaaggaaaatggtgaatttcttcttgtgctatcagacagcatggagtatacactaaccaaggaggacgtggggagacacctcaaatttgtatatatccctgttaaccttgaaggtcaggagggtgaatctgcttgtgcgataacagatgtagttaagaaagcccctccaaaagtattcaatctaaagattgttggggaatctatggaaggaagcaagatatctgccagtgctactgttacaggtggaactgaagggtccagcagggttcaatggtacaaggcatcttcctctgaatttaagaatgaacatgagcttgaagcccttactccgtcacgagtttctaagacattccgcattcctcttggtgctgttggatattatatcgttgcaaagtttacacctgtggcacctgatggtgaagtcggtgaaccagcctatgctacatcagatggccttgtggaaacactaccacccagcctgaacttcttaacagtcactggtgaattctctgagggtcagatattaacagcatcatatgggtatatcggaggacatgaaggaaatagtttatacagctggcaccttcatgaggctgaagatgacgaaggcactccactttcagaggcaaccggtttgctacaatactgtgttacaaaggaagctgttggaaagtttgtttctttcaaatgcacccctgtcagagatgatgatattgttggtgaggcaagatcattcataggaaaggacagagttactccagggatgccgacattactttctcttgaagtaactggtgatgcaattgaaggaacaactatgtttgccagtaaaaggtattggggaggagaagaaggggacacaatgttccgctggatactgacaaattctgatggaaccgagaaagaaattgaaggagcaacaagttcatcatacaccttgaaatgcaatgacattggcttctacatatctgtcttgtgcaagcctgttagaaatgatggagttgatggttctttagtgtcgactgaagcgattggtcctattataccagggccaccaacatgtcaatctcttgaactagctggctctatggttgaaggtggccgtttgacctttcatgctgtgtatacaggaggtttgcggggaagttgcatccaagaatggttcagattacatgatgatgggcacaaggacaagttgactgctgatgaatgtctagaccttgatctagctgatatcgattgccggattgaacttatgtatacacctgtacgagaagacggagtgcacgggttaccaaggagtgttacttctgatacaatcttacctggggagcccaagggtgtcaatcttattctacctgagtgttttgaggacaatgaaatttctcccatcaaaacctatttcggtggcaaggaaggcactggcaaatatacatggtttcgaaataaagagaaacttgataacttggaatttgatctggttgctgaatcatcagaagttgttggagaaaccttaaaatataagccttcattgaatgatgttagttcctatctgattctttattgggttcctacacggcgtgatggaaaggttggtgatcctttgatggctatctctgatgatccggtcatggcagcttttccatctgtttcggatgttcacttagagcagaaaagttcagatgtatattgtggactaggcatctattatggtggatatgagggattaagcttgtatagatggtacagggaatctagtgatggaactaggcttcacatagatggtgctgattcagtcacatacgaagtgacagatgctgattacagctgccgtctactgtttggttatactcctgttcgttcagatgggataagtggagaagaaaaactctctgaaccatctgatgtaattttgccagaactactcaaaatcgagacactcaatttcaaggggaatcaggttgaaagagaaacactgactgctgctgaacaaattccgtacagtgagattcaacaacatatatggaaaaattataagaaagagatgaaatatcaatggtttatttccaatgaatcaggaggcgatcagtcttttgaaccattggcaacccagtgttctcgctcatacaaagtgcgctttgaggatattggtcgttgcctgaaatgcgaatgctttgtcactgatgtatttggacgatctagtgaattggtatccgctgtgactgctcctattttgccaggaaggcctaaaattgaaaagctggagattgaaggaagaggtttccacactgacctatatgccgttcagggtacctatagcggaggcaaagaaggcaagagtaaaatacaatggctcagatcgatggttggaagccctgatcttatctccatacctggcgaaactggaagaacgtatgaagctaatgttgatgatgtagggtataggcttgttgcaatttatacacctgtaagagaggatggagttgagggacaacctgtttctgtttcaacagaacagattgcagttgagcctgaactttacagggaagtgaaacagaagctcgatgatggttcagtcaaatttgaggttctgtgtgacaaggaccgaacacccaaaaaggcacaagtaatgggccatttggagcggagggttttggaagtcaaccgaaagaggataaaagtagtaaagcctggatctaagacatcattcccgagtactgaagtacgaggaacctacgctccaccgttccatgtcgagctgtatcgcaatgaccagcaccgcttcaagattgttgtcgacggtgatactgaagttgacttaatggtgcaaacacggcacatgcgagaccgcatcatcctcacgatcagaggcctcgcccagaagttcaacagcacctccctcaacacacttctcaggatcgagtcatgatagacctgacagtgtaaaaaccaactattacgggaagctgtaccccttgttccgattggttagagtgcgtggttttagtaggattcgtgacatgccagccttttgtgtgtatgggtgtgggacgggccgagcgtgttggattacaattttttccctgacacatctctcaaatcagagcagcatcagctggttgctctgactggtgccgtcgtgcgtcatgaaatgtacatagggtggttagagcgagaaagagagtggtgtttcttggtgctgtatttattatgcactggttgggttgggttttttcgactgccattctcatactaagtattggttctttcttttttcggtcgttgggtttgcatatacttgtaccgacaacacagcttggggtgattgggcgagtgctgttcagaatgcctggtccacacttgtgtacgactggaatcctacggtggcgtattcacatgctgttttatggtgcaaatgtaaattcatctgttcataaacgagaatcaaaatcgtcggccacgtgtattcgtcgta

SEQ ID NO: 139660 - DNA, 813 bp, Zea Mays
cccatcccacgcctcgccgtgtccaggctttaagccacacgcacttgagctccaccgccactaccaccagtaccacaccactccgcgctagctgaggacggtacagcggcacagaggtgcgacgtacgacgacgacgacgcaggcgccacacatggcatcccagctctccgccgccgtgccccggttccacggcctccggggctacgccgcgcccaggtccgcggtggcagcgctgccgtccgtgagggtgggcaggaagaggtcgtcgtcgcagggcatccgctgcgactacatcggctccgccaccaacctgatcatggtgacgacgacgacgctgatgctgttcgcggggcggttcgggctggcgccgtccgcgaaccgcaaggcgacggcggggctgaagctggaggcgcgcgactccggcctgcagacgggtgaccccgccgggttcaccctcgccgacacgctggcctgcggcgccgtcggccacatcctcggcgtcggcatcgtgctcgggctcaagaacaccggcgccctcgaccagatcatcggctagatccctacgtcgccgttgttaagatcagactcagcagcctcgatcgcgccgccggccggcaggtgcaggtggtgactttgtaacgtgtgtgcgtgcgtacgtgtacattgcatccatcttggttccaatggacatatagctcctgttgctcctctagtcctcttgcgttgaccccgatcgatgagtatgacttctaccttccatgatagcaattagcaagcggttaaaacttataaaaaagagataaatccagatc

SEQ ID NO: 139661 - DNA, 255 bp, Zea Mays
atgcccagaaacatcaatcccatgaatttcagcttcatgactagcacccatcccgacactccccccgctaactcccaggctaagttgatctctagcaaatgcaggggttgtttcagcattgaggacttcttcccctccattcatactactccctcctatctctcttgcattgctttcagtttcagcagcaggctgtacaaaactgctttgctgtgcttggttgctataattcggatccaacgtgtcactcattaa

SEQ ID NO: 139662 - DNA, 393 bp, Zea Mays
cccgcagatgcttgtccgtgctgttaagcttctcaagaacctccacttcatggcgaagcccgctgcgattgacttgataagaagcattattcaggctgaaggtgcttccacagagcaggcattatcatcagctctaacaagtattatggatgcgctgaacagtactgactggaatacaaggaaggctgtctcactagctctttcaagtattgcgatcagttctgggtatttggttacctctttcagaaattcctgccttcgctcccttgagtgtagtaaatttgacaaggtaaaaccggtacgtgacaccattatatacatgcaattcagctgtgaaaagctattccagggtctcatactcctgaaccatgaagctggatcatcaacaaaagg

SEQ ID NO: 139663 - DNA, 882 bp, Zea Mays
ccggccttcgccgtgccaacgacacacctcatcaccggccggaacattccacgaccgaagaaaccagtccctagctagtccacgcacgaccaacaaggcaggcgagcgacgacagtccaaagcctccaagaagaagaagaacgaagatgctgcggatggaggtgcagcagcagcagcaggagtcgggagtgagcggcggcgtggtggcggacgcggcggcggcatccggggcggatgccgcgccgacgacgacgacgatggtggccgcggcgccgcactcggcgtcggcgctggcggtgtacgagcgggtggcgcgcatggcgggcgggaacgcggtggtggtgttcagcgccagcggctgctgcatgtgccacgtcgtcaagcgcctgctgctgggcctcggcgtcggccccaccgtgtacgagctcgaccagatggccgccggcggcggcgggggcagggagatccaggcggcgctggcgcagctgctgccgccgggccagccgcccctgcccgtcgtcttcgtgggcggacgcctcctcggcggcgtcgagaaggtcatggcgtgccacatcaacggcaccctcgtcccgctcctcaagcaggccggcgcgctctggctctgatcgcgccgccgccgtcgtcgtcgtcgatcggccactgcaacagtgtgtgtgtgtgggtgtccatctccgtgcatgcgatcgatcgctgccccttagaccttagttagttactcacttactaccttagcttgcgttttaatgtaacctctactaagctagctagctcttgttctgttccgtgcccatgcatgagagagatcgagtaatgctgcaatcgcctgctgcaattaatgcagcagcgcacgacgtcgccgat

SEQ ID NO: 139664 - DNA, 750 bp, Zea Mays
cgatgctccacgtagtatatacaacacgcgcataccagtctaaactcgaagccctgattgggagctcagctgattgagcagtccaagaaccaaaggataaggtgggtggggggaccgccggagccgggagggacgagaagcgagcgaggtgccgtcgtcagctagcactagcagccatggaaggcggcgcgcacgagttcgacggctccaccttcaaggagtgcttctccctctcgtggaggaacccctacgtcctccgcctcgccttctccgccggcatcggcggcctgctcttcggctacgacaccggtgcgttgcgactgcgtgcgcgtccttcttcctgcctgtgctgtgtgtcactgtagtgtagttccatttcttcacccgccatatccagctcaaagaaagatgggccctataggagttcggatgatgatcgtgtccagctagatgatatggctagctagctattggtgaccgaactgtgtttaatttcctgttagcgtctgctagctggaaaagtgttcgacgatatcgtacgtgttattagtgagcaagtgaccagtgacgtgagctccgcttccgtgtctgtgcgtgcgtgtgatgagtgctgcaggtgtcatttcgggagctctgctctacatccgcgacgacttcgtttcagtggacaggaacacatggcttcaggtaagaagagccaaaagaacaacaaggaaaaggatcagtctcgtccgatgggcgccgagaaac

SEQ ID NO: 139665 - DNA, 1944 bp, Zea Mays
cgatgctccacgtagtatatacaacacgcgcataccagtctaaactcgaagccctgattgggagctcagctgattgagcagtccaagaaccaaaggataaggtgggtggggggaccgccggagccgggagggacgagaagcgagcgaggtgccgtcgtcagctagcactagcagccatggaaggcggcgcgcacgagttcgacggctccaccttcaaggagtgcttctccctctcgtggaggaacccctacgtcctccgcctcgccttctccgccggcatcggcggcctgctcttcggctacgacaccggtgtcatttcgggagctctgctctacatccgcgacgacttcgtttcagtggacaggaacacatggcttcaggaaatgatcgtgagcatggcggtggccggcgcgatcatcggcgcggccatcggcgggtggaccacggaccggttcgggcggcgggcgtcgatcctggtggccgactccctcttcttcgcgggcgcggcggtgatggcgtcggccacgcgccccgcgcagctcgtggtgggccgcgtcttcgtcggcctcggcgtcggcatggcctccatgacctccccgctctacatctccgaggcgtcgcccgccaggatccgcggcgcgctcgtcagcaccaacggcttcctcatcaccggcggccagttcctggcctacctcatcaacctcgccttcaccaaggcgccggggacgtggaggtggatgctcggcgtcgccgcgctccccgccgtcgtccagttcggcctcatgctcgcactgcctgaatccccgcgctggctctacagacaggggagggcggaagaagcagaggcgatcctgcggcggatctactcggcggaggaggtggagcgggagatcgaggagctgaaggagtcggtggcggcggagcgtgggtcgtcggagaagctgagcctggtggcgctggtgcggacggcgacggtgcgccgggggctggtggccggcgtggggctgcaggtgttccagcagctggtgggcatcaacacggtgatgtactacagcccgacgatcgtgcagctggctgggttcgcgtccaaccagacggcgctggcgctgtcgctcgtcacctcgggcctcaacgcgctcggctccgtcgtcagcatctacttcatcgaccgcacggggcggaggaagctgctggtcatcagcctcgtgggcgtcatcctctcgctcggcgtgctcacggccgtgttccacgagaccgcgtcccactccccggccgtgagcgccaccgagaccgctcgcttcgacgcctcgctgacgtgtccgtcctaccgcccgtcgtcgccggccagcggcggggcgtcctgggactgcacccggtgcctcaaggcggccgcgggttcgagcgagtgcggcttctgcgcgtcgggcgccggcaggctcctcccgggcgcgtgcctggtgtccaacaacacggtgcgcgacgcgtgccacggcgagggccggctgtggtacacccgcgggtgcccgagccggtacggctggctggcgctgctgggcctggcgctctacatcatcttcttctcccccggcatgggcacggtgccgtggatcgtcaactcggagatctacccgctgcggtaccgcggcgtgtgtggcggcgcggcggccaccgccaactgggtgtccaacctggccgtggcgcagtcgttcctgtcgctgacggaggccatcgggacgtcgtggacgttcctcatcttcgggggcctgtccgtggccgcgctcgccttcgtgctcgtctgcgtgccggaaaccaagggtctcccgatcgaggaggtggagaagatgctcgagcgccgggagctcaggctcaggttctgggccccgcgacacacacaagacaacggcaaggagagtggcaagaatgccggcgtttgagactgtttgc

SEQ ID NO: 139666 - DNA, 2251 bp, Zea Mays
cgatgctccacgtagtatatacaacacgcgcataccagtctaaactcgaagccctgattgggagctcagctgattgagcagtccaagaaccaaaggataaggtgggtggggggaccgccggagccgggagggacgagaagcgagcgaggtgccgtcgtcagctagcactagcagccatggaaggcggcgcgcacgagttcgacggctccaccttcaaggagtgcttctccctctcgtggaggaacccctacgtcctccgcctcgccttctccgccggcatcggcggcctgctcttcggctacgacaccggtgcgttgcgactgcgtgcgcgtccttcttcctgcctgtgctgtgtgtcactgtagtgtagttccatttcttcacccgccatatccagctcaaagaaagatgggccctataggagttcggatgatgatcgtgtccagctagatgatatggctagctagctattggtgaccgaactgtgtttaatttcctgttagcgtctgctagctggaaaagtgttcgacgatatcgtacgtgttattagtgagcaagtgaccagtgacgtgagctccgcttccgtgtctgtgcgtgcgtgtgatgagtgctgcaggtgtcatttcgggagctctgctctacatccgcgacgacttcgtttcagtggacaggaacacatggcttcaggaaatgatcgtgagcatggcggtggccggcgcgatcatcggcgcggccatcggcgggtggaccacggaccggttcgggcggcgggcgtcgatcctggtggccgactccctcttcttcgcgggcgcggcggtgatggcgtcggccacgcgccccgcgcagctcgtggtgggccgcgtcttcgtcggcctcggcgtcggcatggcctccatgacctccccgctctacatctccgaggcgtcgcccgccaggatccgcggcgcgctcgtcagcaccaacggcttcctcatcaccggcggccagttcctggcctacctcatcaacctcgccttcaccaaggcgccggggacgtggaggtggatgctcggcgtcgccgcgctccccgccgtcgtccagttcggcctcatgctcgcactgcctgaatccccgcgctggctctacagacaggggagggcggaagaagcagaggcgatcctgcggcggatctactcggcggaggaggtggagcgggagatcgaggagctgaaggagtcggtggcggcggagcgtgggtcgtcggagaagctgagcctggtggcgctggtgcggacggcgacggtgcgccgggggctggtggccggcgtggggctgcaggtgttccagcagctggtgggcatcaacacggtgatgtactacagcccgacgatcgtgcagctggctgggttcgcgtccaaccagacggcgctggcgctgtcgctcgtcacctcgggcctcaacgcgctcggctccgtcgtcagcatctacttcatcgaccgcacggggcggaggaagctgctggtcatcagcctcgtgggcgtcatcctctcgctcggcgtgctcacggccgtgttccacgagaccgcgtcccactccccggccgtgagcgccaccgagaccgctcgcttcgacgcctcgctgacgtgtccgtcctaccgcccgtcgtcgccggccagcggcggggcgtcctgggactgcacccggtgcctcaaggcggccgcgggttcgagcgagtgcggcttctgcgcgtcgggcgccggcaggctcctcccgggcgcgtgcctggtgtccaacaacacggtgcgcgacgcgtgccacggcgagggccggctgtggtacacccgcgggtgcccgagccggtacggctggctggcgctgctgggcctggcgctctacatcatcttcttctcccccggcatgggcacggtgccgtggatcgtcaactcggagatctacccgctgcggtaccgcggcgtgtgtggcggcgcggcggccaccgccaactgggtgtccaacctggccgtggcgcagtcgttcctgtcgctgacggaggccatcgggacgtcgtggacgttcctcatcttcgggggcctgtccgtggccgcgctcgccttcgtgctcgtctgcgtgccggaaaccaagggtctcccgatcgaggaggtggagaagatgctcgagcgccgggagctcaggctcaggttctgggccccgcgacacacacaagacaacggcaaggagagtggcaagaatgccggcgtttgagactgtttgc

SEQ ID NO: 139667 - DNA, 1322 bp, Zea Mays
acccaatccgcccaagcgcgcgcgcaaattccacactctcctcgaccctcgattcgttcccgccgccaaccaagcgacgtctcctcttccacgcatcctagggcggcgacacctgccaagaacacccgtcgccgcgctctcccgatggcgaccagcgacgagctcgcccagatcgacatctctaaggaggagaaggacaagctggtggcggaggtgatgcgctacgtgctcttcaagacgcaccagagctccgactgccccatcaagcgggaggagctcaccgggatcatcaccaagaactaccgccagcgcgcgctgcccacgctggtcatcaacgaggccaaggagaggctcgccgcaaccttcggctacgagatgagggagctacaaaggacccgcgcgccggccacgcgctctggccggccggcacagcggcagtttaacgcggatgccaagagctatgttctggtcagcatgttagaccctgaggtgtacagcaagtacgtcgaggacaaggccgccgcccatctgtccggcttcgctttcgctgtcattggcattattcatcttgctggtggcaaaatgcccgaagaggacctctggcatcagttgaagcgggtgggtttgaacgagactgatgaagctcaccttgttcttggcaacaataagcaggcgctcgaacacctagtgcagcaaaggtacttgctgaaggagaaaattgctggaccggaaggtcatttcgtgatgtacgagcttgccgagagggcgttggatgaatccatcagcgtgaagattaaagatcatatttcacaggttgtgggcacatgcttgcagaagtagattgaagtggatggatacgacaatcagtagccctgtaggttatctgccttgcggtaggactagctgactcttatcaggctgggaagctacatatcatcttgcatggatacgaggctcgtactctgcatgcagattttgtacaggagatgtgtgcttgacaagccctggcaactttggtgttactatatccttgattatctagattattatgtggacgacatgctgttgatcatcgcagcaggcttggcactaccttttgcagtgacctaatgtcacaaaacagcctgtcagtcattgcatgcgttgtgctctccttctgtgtgtagctgagtattcagtgacctgaccacatcgacatcataacgataatgctgtagcgcgccgagtccattcacaagtcttgactcttgactcgcagtaaaaatcaatttatttcaatttatttttgaaccaaaatttatttaggatcttgatattttgtg

SEQ ID NO: 139668 - DNA, 1443 bp, Zea Mays
acccaatccgcccaagcgcgcgcgcaaattccacactctcctcgaccctcgattcgttcccgccgccaaccaagcgacgtctcctcttccacgcatcctagggcggcgacacctgccaagaacacccgtcgccgcgctctcccgatggcgaccagcgacgagctcgcccagatcgacatctctaaggaggagaaggacaagctggtggcggaggtgatgcgctacgtgctcttcaagacgcaccagagctccgactgccccatcaagcgggaggagctcaccgggatcatcaccaagaactaccgccagcgcgcgctgcccacgctggtcatcaacgaggccaaggagaggctcgccgcaaccttcggctacgagatgagggagctacaaaggacccgcgcgccggccacgcgctctggccggccggcacagcggcagtgtaaggcgtcctttttttctctctctctcgtttattattattttgttcctttcctctgtatgtcaaccacagcggttacgggctggcaatgactggtagaatgtgtgggaaatgtctttagttaacgcggatgccaagagctatgttctggtcagcatgttagaccctgaggtgtacagcaagtacgtcgaggacaaggccgccgcccatctgtccggcttcgctttcgctgtcattggcattattcatcttgctggtggcaaaatgcccgaagaggacctctggcatcagttgaagcgggtgggtttgaacgagactgatgaagctcaccttgttcttggcaacaataagcaggcgctcgaacacctagtgcagcaaaggtacttgctgaaggagaaaattgctggaccggaaggtcatttcgtgatgtacgagcttgccgagagggcgttggatgaatccatcagcgtgaagattaaagatcatatttcacaggttgtgggcacatgcttgcagaagtagattgaagtggatggatacgacaatcagtagccctgtaggttatctgccttgcggtaggactagctgactcttatcaggctgggaagctacatatcatcttgcatggatacgaggctcgtactctgcatgcagattttgtacaggagatgtgtgcttgacaagccctggcaactttggtgttactatatccttgattatctagattattatgtggacgacatgctgttgatcatcgcagcaggcttggcactaccttttgcagtgacctaatgtcacaaaacagcctgtcagtcattgcatgcgttgtgctctccttctgtgtgtagctgagtattcagtgacctgaccacatcgacatcataacgataatgctgtagcgcgccgagtccattcacaagtcttgactcttgactcgcagtaaaaatcaatttatttcaatttatttttgaaccaaaatttatttaggatcttgatattttgtg

SEQ ID NO: 139669 - DNA, 1513 bp, Zea Mays
cgcgcgcgcaaattccacactctcctcgaccctcgattcgttcccgccgccaaccaagcgacgtctcctcttccacgcatcctagggcggcgacacctgccaagaacacccgtcgccgcgctctcccgatggcgaccagcgacgagctcgcccagatcgacatctctaaggaggagaaggacaagctggtggcggaggtgatgcgctacgtgctcttcaagacgcaccagagctccgactgccccatcaagcgggaggagctcaccgggatcatcaccaagaactaccgccagcgcgcgctgcccacgctggtcatcaacgaggccaaggagaggctcgccgcaaccttcggctacgagatgagggagctacaaaggacccgcgcgccggccacgcgctctggccggccggcacagcggcagtgtaaggcgtcctttttttctctctctctcgtttattattattttgttcctttcctctgtatgtcaaccacagcggttacgggctggcaatgactggtagaatgtgtgggaaatgtctttagttaacgcggatgccaagagctatgttctggtcagcatgttagaccctgaggtgtacagcaagtacgtcgaggacaaggccgccgcccatctgtccggcttcgctttcgctgtcattggcattattcatcttgctggtggcaaaatgcccgaaggtaaggaaaaggggatcaaaacatatcctttggttaggaaaacatcctcctctgatgttcccaagttctttcggatcccattttagaggacctctggcatcagttgaagcgggtgggtttgaacgagactgatgaagctcaccttgttcttggcaacaataagcaggcgctcgaacacctagtgcagcaaaggtacttgctgaaggagaaaattgctggaccggaaggtcatttcgtgatgtacgagcttgccgagagggcgttggatgaatccatcagcgtgaagattaaagatcatatttcacaggttgtgggcacatgcttgcagaagtagattgaagtggatggatacgacaatcagtagccctgtaggttatctgccttgcggtaggactagctgactcttatcaggctgggaagctacatatcatcttgcatggatacgaggctcgtactctgcatgcagattttgtacaggagatgtgtgcttgacaagccctggcaactttggtgttactatatccttgattatctagattattatgtggacgacatgctgttgatcatcgcagcaggcttggcactaccttttgcagtgacctaatgtcacaaaacagcctgtcagtcattgcatgcgttgtgctctccttctgtgtgtagctgagtattcagtgacctgaccacatcgacatcataacgataatgctgtagcgcgccgagtccattcacaagtcttgactcttgactcgcagtaaaaatcaatttatttcaatttatttttgaaccaaaatttatttaggatcttgatattttgtg

SEQ ID NO: 139670 - DNA, 2247 bp, Zea Mays
gcagaagcggatgaggaagcagtgtaggagagccaccctcgcttcccacctccagtgtctcatccgttccgacgacaaacacctccctttccctgcgctcccgtcttccttccagagctgccttgtctgcacatgcagaagcgccaagagcgagcgcctcatctctttatattgctctcacaccctccgtttctcgctcccacccactgccactgtacttgtgttgtgttagtgctgtgctgcgagaagaaggagaagcagaggaagagcaggtgctgagaagcctgccggcgcgcgttacgacaagcatatatgggggagatcaccaatgtcatggagtaccaggccatcgccaagcagaagcttccgaagatggcctacgactactacgcgtccggcgccgaggacgagtggacgctgcaggagaacagggaggccttctccaggatcttgtgagctctctctctctctccacatctcctccttcattcgctttgctatactggcttcttattcttcagctggtgtaggagcagcggttgatgagataaggcaactaggccagttagtaaaccaccatcagtagttctgttcattgatcagaggctctgcttctagtactctttcagggtttcagttcctgtaaagttctgctgctcatctattcagggagactggagttcttttgcacaaaaaacatgtggttcatactgtcagcttcaaaacaaaccgcgcagcaggtttctgacgacaattcgctagctgtgttatatgactcatcaagtccatccaataagctagcctgagttttcgcagccggttttcttcatgctatctgcactttgggatttcttcatttcttgtattcatgtactgaaagcctgatctgcggcgcttccttcgttcgaatgcactctgcttcagagccgcgcagctgctcacctgattcttcatctttttttccctcctttgctaaggttccgtccgcgcatactgatcgacgtgtccaagatcgacatgaccaccaccgtgctggggttcaagatctccatgcccatcatggtcgcccccactgctatgcagaagatggctcacccagatggggagaacgccactgcgcgcgcggcggctgcggcaggcaccataatgacactgtcgtcctgggcaacttcaagcgtcgaggaggttgcctcgaccgggccagggatccgcttcttccagctatacgtctacaaggacaggaaggtggtggagcagctggtgaggcgagctgaaagggctgggttcaaggccatcgcgctcaccgtcgacacgccgcgccttggccgcagggaagctgacatcaagaacagatttgtcctgccaccacacctgacgctcaagaacttcgaaggtctggacctcggcaaaatggaccaggctgctgattcagggctggcttcctatgtcgccggccaagtcgaccgcaccctgagctggaaagacgtcaagtggttgcagaccatcaccacgctgccgatcctcgtcaagggagtgctcaccgctgaagacacgaggcttgcggtggcgaacggcgcggcggggatcatcgtgtcgaaccacggcgcgcggcagctggactacgtgccggcgaccatcagcgcgctggaggaggtcgtgaaggccgcccggggccagctccccgtgttcgtcgacggcggcgtccgccgcggcaccgacgtcttcaaggcgctcgcgctcggcgccgccggcgtattcgtcgggaggccggtggtgttctccctggcggcggcgggcgaggccggcgtgtccaacgtcctgcgcatgctgcgggacgagttcgagctcaccatggcgctcagcggctgcacctccctcgccgaaatcacccgcaagcacatcatcaccgagtccgacaagctcagcgccatcccgtcgcgcttgtagatgaggcaaaatcaatcgcctgctacgcctacgcctacgctacgccgccggtcgatcggggatactcagctcgtgcatggatgcatgcatgcgtgctcgacgacgatcatgataccatatataatctaggactgcgcatatatatatattttgttccagaaatgatcgatcacgtactgtactgtaaaatcttatagattattacacgcatggtgtgtgctgcatcttcattagttgttaataatggcgcacatggtgatctctctgtatttgaatatttgatcacaaagtatttgtttc

SEQ ID NO: 139671 - DNA, 2507 bp, Zea Mays
gcagaagcggatgaggaagcagtgtaggagagccaccctcgcttcccacctccagtgtctcatccgttccgacgacaaacacctccctttccctgcgctcccgtcttccttccagagctgccttgtctgcacatgcagaagcgccaagagcgagcgcctcatctctttatattgctctcacaccctccgtttctcgctcccacccactgccactgtacttgtgttgtgttagtgctgtgctgcgagaagaaggagaagcagaggaagagcaggtgctgagaagcctgccggcgcgcgttacgacaagcatatatgggggagatcaccaatgtcatggagtaccaggccatcgccaagcagaagcttccgaagatggcctacgactactacgcgtccggcgccgaggacgagtggacgctgcaggagaacagggaggccttctccaggatcttgttccgtccgcgcatactgatcgacgtgtccaagatcgacatgaccaccaccgtgctggggttcaagatctccatgcccatcatggtcgcccccactgctatgcagaagatggctcacccagatggggagaacgccactgcgcgcgcggcggctgcggcaggcaccataatgacactgtcgtcctgggcaacttcaagcgtcgaggaggttgcctcgaccgggccagggatccgcttcttccagctatacgtctacaaggacaggaaggtggtggagcagctggtgaggcgagctgaaagggctgggttcaaggccatcgcgctcaccgtcgacacgccgcgccttggccgcagggaagctgacatcaagaacagatttgtcctgccaccacacctgacgctcaagaacttcgaaggtctggacctcggcaaaatggaccaggctgctgattcagggctggcttcctatgtcgccggccaagtcgaccgcaccctgagctggaaagacgtcaagtggttgcagaccatcaccacgctgccgatcctcgtcaagggagtgctcaccgctgaagacacgaggcttgcggtggcgaacggcgcggcggggatcatcgtgtcgaaccacggcgcgcggcagctggactacgtgccggcgaccatcagcgcgctggaggaggtcgtgaaggccgcccggggccagctccccgtgttcgtcgacggcggcgtccgccgcggcaccgacgtcttcaaggcgctcgcgctcggcgccgccggcgtattcgtaagctacctacctaccctgctacccagcgctgatacaaccaccgcacagacgtctaataacgtcttcattattcgtcttcctggcctgccgtcgtcggactggctgacgtacgtacgtacgtaccggtggactacggtggttgcaggtcgggaggccggtggtgttctccctggcggcggcgggcgaggccggcgtgtccaacgtcctgcgcatgctgcgggacgagttcgagctcaccatggcgctcagcggctgcacctccctcgccgaaatcacccgcaagcacatcatcaccgagtccgacaagctcagcgccatcccgtcgcgcttgtagatgaggcaaaatcaatcgcctgctacgcctacgcctacgctacgccgccggtcgatcggggatactcagctcgtgcatggatgcatgcatgcgtgctcgacgacgatcatgataccatatataatctaggactgcgcatatatatatattttgttccagaaatgatcgatcacgtactgtactgtaaaatcttatagattattacacgcatggtgtgtgctgcatcttcattagttgttaataatggcgcacatggtgatctctctgtatttgaatatttgatcacaaagtatttgtttcaaatttttatgtgtgcccctatctctgtggagaacaacaaaacaacatttttttttgcttgccatcagaaaaaacgaaacagaacaacaggcagcatcagaacccaatcaaattccaatctcgtcgaaaacaaacaaacaaaccacgtcttcctcttacgttgggaaaaaaaagagataaactacgtatatatactgtgagcgatgcccctcaagtcaggcgatgaggcactaataacaggtactagtagtattttatctagctagcaagcagaggacgacgtcagcaaggccgggcggtctgttagtgcctcatcgcctgacagcctgagcctggcgtccgccggcgtagggcggggcggcggcggcggccgtccgggccttgcgcttctgcaggaacagctgcagcgaccgcttcatggacagcccggcgtccgccgcctggtcgatgtcgaccgccggtcccacgaggcctctgcctcgcgcgcaccgccgcgccagcgccacggcgctagtcgtagtgctgctgctgctgctgtcgccgtcctgctgccggccgtcgccgccgtctacccgcgtcagctgctgctgctgccgccgccgccgtccccggtggtccgccagggtctcctcgctcg

SEQ ID NO: 139672 - DNA, 2359 bp, Zea Mays
gcagaagcggatgaggaagcagtgtaggagagccaccctcgcttcccacctccagtgtctcatccgttccgacgacaaacacctccctttccctgcgctcccgtcttccttccagagctgccttgtctgcacatgcagaagcgccaagagcgagcgcctcatctctttatattgctctcacaccctccgtttctcgctcccacccactgccactgtacttgtgttgtgttagtgctgtgctgcgagaagaaggagaagcagaggaagagcaggtgctgagaagcctgccggcgcgcgttacgacaagcatatatgggggagatcaccaatgtcatggagtaccaggccatcgccaagcagaagcttccgaagatggcctacgactactacgcgtccggcgccgaggacgagtggacgctgcaggagaacagggaggccttctccaggatcttgttccgtccgcgcatactgatcgacgtgtccaagatcgacatgaccaccaccgtgctggggttcaagatctccatgcccatcatggtcgcccccactgctatgcagaagatggctcacccagatggggagaacgccactgcgcgcgcggcggctgcggcaggcaccataatgacactgtcgtcctgggcaacttcaagcgtcgaggaggttgcctcgaccgggccagggatccgcttcttccagctatacgtctacaaggacaggaaggtggtggagcagctggtgaggcgagctgaaagggctgggttcaaggccatcgcgctcaccgtcgacacgccgcgccttggccgcagggaagctgacatcaagaacagatttgtcctgccaccacacctgacgctcaagaacttcgaaggtctggacctcggcaaaatggaccaggctgctgattcagggctggcttcctatgtcgccggccaagtcgaccgcaccctgagctggaaagacgtcaagtggttgcagaccatcaccacgctgccgatcctcgtcaagggagtgctcaccgctgaagacacgaggcttgcggtggcgaacggcgcggcggggatcatcgtgtcgaaccacggcgcgcggcagctggactacgtgccggcgaccatcagcgcgctggaggaggtcgtgaaggccgcccggggccagctccccgtgttcgtcgacggcggcgtccgccgcggcaccgacgtcttcaaggcgctcgcgctcggcgccgccggcgtattcgtcgggaggccggtggtgttctccctggcggcggcgggcgaggccggcgtgtccaacgtcctgcgcatgctgcgggacgagttcgagctcaccatggcgctcagcggctgcacctccctcgccgaaatcacccgcaagcacatcatcaccgagtccgacaagctcagcgccatcccgtcgcgcttgtagatgaggcaaaatcaatcgcctgctacgcctacgcctacgctacgccgccggtcgatcggggatactcagctcgtgcatggatgcatgcatgcgtgctcgacgacgatcatgataccatatataatctaggactgcgcatatatatatattttgttccagaaatgatcgatcacgtactgtactgtaaaatcttatagattattacacgcatggtgtgtgctgcatcttcattagttgttaataatggcgcacatggtgatctctctgtatttgaatatttgatcacaaagtatttgtttcaaatttttatgtgtgcccctatctctgtggagaacaacaaaacaacatttttttttgcttgccatcagaaaaaacgaaacagaacaacaggcagcatcagaacccaatcaaattccaatctcgtcgaaaacaaacaaacaaaccacgtcttcctcttacgttgggaaaaaaaagagataaactacgtatatatactgtgagcgatgcccctcaagtcaggcgatgaggcactaataacaggtactagtagtattttatctagctagcaagcagaggacgacgtcagcaaggccgggcggtctgttagtgcctcatcgcctgacagcctgagcctggcgtccgccggcgtagggcggggcggcggcggcggccgtccgggccttgcgcttctgcaggaacagctgcagcgaccgcttcatggacagcccggcgtccgccgcctggtcgatgtcgaccgccggtcccacgaggcctctgcctcgcgcgcaccgccgcgccagcgccacggcgctagtcgtagtgctgctgctgctgctgtcgccgtcctgctgccggccgtcgccgccgtctacccgcgtcagctgctgctgctgccgccgccgccgtccccggtggtccgccagggtctcctcgctcg

SEQ ID NO: 139673 - DNA, 2468 bp, Zea Mays
gcagaagcggatgaggaagcagtgtaggagagccaccctcgcttcccacctccagtgtctcatccgttccgacgacaaacacctccctttccctgcgctcccgtcttccttccagagctgccttgtctgcacatgcagaagcgccaagagcgagcgcctcatctctttatattgctctcacaccctccgtttctcgctcccacccactgccactgtacttgtgttgtgttagtgctgtgctgcgagaagaaggagaagcagaggaagagcaggtgctgagaagcctgccggcgcgcgttacgacaagcatatatgggggagatcaccaatgtcatggagtaccaggccatcgccaagcagaagcttccgaagatggcctacgactactacgcgtccggcgccgaggacgagtggacgctgcaggagaacagggaggccttctccaggatcttgttccgtccgcgcatactgatcgacgtgtccaagatcgacatgaccaccaccgtgctggggttcaagatctccatgcccatcatggtcgcccccactgctatgcagaagatggctcacccagatggggagaacgccactgcgcgcgcggcggctgcggcaggcaccataatgacactgtcgtcctgggcaacttcaagcgtcgaggaggttgcctcgaccgggccagggatccgcttcttccagctatacgtctacaaggacaggaaggtggtggagcagctggtgaggcgagctgaaagggctgggttcaaggccatcgcgctcaccgtcgacacgccgcgccttggccgcagggaagctgacatcaagaacagatttgtcctgccaccacacctgacgctcaagaacttcgaaggtctggacctcggcaaaatggaccaggtgatgtatagcgagctcaagtttcagtgcagtacatcatatggagctttgtgcactctctgtctctgatacggagcttaatgtgtgcgcgccgatcgagcatgggcaggctgctgattcagggctggcttcctatgtcgccggccaagtcgaccgcaccctgagctggaaagacgtcaagtggttgcagaccatcaccacgctgccgatcctcgtcaagggagtgctcaccgctgaagacagtaagcttgcggtggcgaacggcgcggcggggatcatcgtgtcgaaccacggcgcgcggcagctggactacgtgccggcgaccatcagcgcgctggaggaggtcgtgaaggccgcccggggccagctccccgtgttcgtcgacggcggcgtccgccgcggcaccgacgtcttcaaggcgctcgcgctcggcgccgccggcgtattcgtcgggaggccggtggtgttctccctggcggcggcgggcgaggccggcgtgtccaacgtcctgcgcatgctgcgggacgagttcgagctcaccatggcgctcagcggctgcacctccctcgccgaaatcacccgcaagcacatcatcaccgagtccgacaagctcagcgccatcccgtcgcgcttgtagatgaggcaaaatcaatcgcctgctacgcctacgcctacgctacgccgccggtcgatcggggatactcagctcgtgcatggatgcatgcatgcgtgctcgacgacgatcatgataccatatataatctaggactgcgcatatatatatattttgttccagaaatgatcgatcacgtactgtactgtaaaatcttatagattattacacgcatggtgtgtgctgcatcttcattagttgttaataatggcgcacatggtgatctctctgtatttgaatatttgatcacaaagtatttgtttcaaatttttatgtgtgcccctatctctgtggagaacaacaaaacaacatttttttttgcttgccatcagaaaaaacgaaacagaacaacaggcagcatcagaacccaatcaaattccaatctcgtcgaaaacaaacaaacaaaccacgtcttcctcttacgttgggaaaaaaaagagataaactacgtatatatactgtgagcgatgcccctcaagtcaggcgatgaggcactaataacaggtactagtagtattttatctagctagcaagcagaggacgacgtcagcaaggccgggcggtctgttagtgcctcatcgcctgacagcctgagcctggcgtccgccggcgtagggcggggcggcggcggcggccgtccgggccttgcgcttctgcaggaacagctgcagcgaccgcttcatggacagcccggcgtccgccgcctggtcgatgtcgaccgccggtcccacgaggcctctgcctcgcgcgcaccgccgcgccagcgccacggcgctagtcgtagtgctgctgctgctgctgtcgccgtcctgctgccggccgtcgccgccgtctacccgcgtcagctgctgctgctgccgccgccgccgtccccggtggtccgccagggtctcctcgctcg

SEQ ID NO: 139674 - DNA, 2468 bp, Zea Mays
gcagaagcggatgaggaagcagtgtaggagagccaccctcgcttcccacctccagtgtctcatccgttccgacgacaaacacctccctttccctgcgctcccgtcttccttccagagctgccttgtctgcacatgcagaagcgccaagagcgagcgcctcatctctttatattgctctcacaccctccgtttctcgctcccacccactgccactgtacttgtgttgtgttagtgctgtgctgcgagaagaaggagaagcagaggaagagcaggtgctgagaagcctgccggcgcgcgttacgacaagcatatatgggggagatcaccaatgtcatggagtaccaggccatcgccaagcagaagcttccgaagatggcctacgactactacgcgtccggcgccgaggacgagtggacgctgcaggagaacagggaggccttctccaggatcttgttccgtccgcgcatactgatcgacgtgtccaagatcgacatgaccaccaccgtgctggggttcaagatctccatgcccatcatggtcgcccccactgctatgcagaagatggctcacccagatggggagaacgccactgcgcgcgcggcggctgcggcaggcaccataatgacactgtcgtcctgggcaacttcaagcgtcgaggaggttgcctcgaccgggccagggatccgcttcttccagctatacgtctacaaggacaggaaggtggtggagcagctggtgaggcgagctgaaagggctgggttcaaggccatcgcgctcaccgtcgacacgccgcgccttggccgcagggaagctgacatcaagaacagatttgtcctgccaccacacctgacgctcaagaacttcgaaggtctggacctcggcaaaatggaccaggtgatgtatagcgagctcaagtttcagtgcagtacatcatatggagctttgtgcactctctgtctctgatacggagcttaatgtgtgcgcgccgatcgagcatgggcaggctgctgattcagggctggcttcctatgtcgccggccaagtcgaccgcaccctgagctggaaagacgtcaagtggttgcagaccatcaccacgctgccgatcctcgtcaagggagtgctcaccgctgaagacacgaggcttgcggtggcgaacggcgcggcggggatcatcgtgtcgaaccacggcgcgcggcagctggactacgtgccggcgaccatcagcgcgctggaggaggtcgtgaaggccgcccggggccagctccccgtgttcgtcgacggcggcgtccgccgcggcaccgacgtcttcaaggcgctcgcgctcggcgccgccggcgtattcgtcgggaggccggtggtgttctccctggcggcggcgggcgaggccggcgtgtccaacgtcctgcgcatgctgcgggacgagttcgagctcaccatggcgctcagcggctgcacctccctcgccgaaatcacccgcaagcacatcatcaccgagtccgacaagctcagcgccatcccgtcgcgcttgtagatgaggcaaaatcaatcgcctgctacgcctacgcctacgctacgccgccggtcgatcggggatactcagctcgtgcatggatgcatgcatgcgtgctcgacgacgatcatgataccatatataatctaggactgcgcatatatatatattttgttccagaaatgatcgatcacgtactgtactgtaaaatcttatagattattacacgcatggtgtgtgctgcatcttcattagttgttaataatggcgcacatggtgatctctctgtatttgaatatttgatcacaaagtatttgtttcaaatttttatgtgtgcccctatctctgtggagaacaacaaaacaacatttttttttgcttgccatcagaaaaaacgaaacagaacaacaggcagcatcagaacccaatcaaattccaatctcgtcgaaaacaaacaaacaaaccacgtcttcctcttacgttgggaaaaaaaagagataaactacgtatatatactgtgagcgatgcccctcaagtcaggcgatgaggcactaataacaggtactagtagtattttatctagctagcaagcagaggacgacgtcagcaaggccgggcggtctgttagtgcctcatcgcctgacagcctgagcctggcgtccgccggcgtagggcggggcggcggcggcggccgtccgggccttgcgcttctgcaggaacagctgcagcgaccgcttcatggacagcccggcgtccgccgcctggtcgatgtcgaccgccggtcccacgaggcctctgcctcgcgcgcaccgccgcgccagcgccacggcgctagtcgtagtgctgctgctgctgctgtcgccgtcctgctgccggccgtcgccgccgtctacccgcgtcagctgctgctgctgccgccgccgccgtccccggtggtccgccagggtctcctcgctcg

SEQ ID NO: 139675 - DNA, 158 bp, Zea Mays
tcaccctttttctttgaacatgtcatctttttttccctcgtattcttttggggggcgtttgtactaatttctagtggttggaacaaatcattatttttttaatttttataccaatataatataacatgcatgataatgatctagtatatgcatgcata

SEQ ID NO: 139676 - DNA, 163 bp, Zea Mays
ctcgcctccgccggcggcggcagcggcggcggaggaagagcagccgcagtcgcggcaccgtcgtccgcccccgtcctgaggcgcaggctgagctcaacgcctcctccgccgccgccgccgttgctcaaaccactactctcctcgtcgtcgccaccgccaccgc

SEQ ID NO: 139677 - DNA, 1819 bp, Zea Mays
agacagcaacagttcttttttttctgaccaatgaaacaccaaagagcgaaacacagcaacagatatgttggagaaactggacaagcaaatctacttacaaccaggcagaagagcctcaattcatctctccccgatttgaaaagcctcggtttatttctttacatctccagctccctccttataatagagactcgaaaagatcctactcgattgcgcgtctcatcagtgggcagtggctggctggctcaacaagcagctaagcatgcagaatctgactgctcgaaggtgtcaggtcgctgaactccttaggagcgtccacgtcctgccagcaaacggagtagcctggcgctcccctgctaccaggaccgccgccagcgggctcctcccgcacatgcccaatcgcgacgtggaggcctcgcccgacgactacgatcctactgtcgacgcagctcaccgagaagggcttcatgatgcgctcgggcatgggggcgccgccgaccgtgtcccacgagtccgtctccgggtcgtacaccttgaccttcatcctctcgtactccgagacgacgaacaggcgtcccgcgacgacgacgctcagccccgtccacccttcccgcatccccgccggcatcgcctcccaccggtccgccctcgggtcgtacacctggcccctcggcgccgagaagaagggccacgcgcacccctcggtcacgtacagcctgccgccgagcacggcggagtcggccgacgccatgttggcccccatgctggcgaccggccgccacgcgccggcgccagcggggtcgagcacctcggcggagctcagctcgaactggtccgcgctgtaccctcccgcgacgtacacgcggccgtcgatgacgccgccggcgaagaaggaccgcgccgccagcatccgcgccatcacggcccacctgttccggcacacgtcgtaccggagcacgaggtgcagcgggcagtccatgtcggagaccagcccgccgcagaccacgagcgcgtccccgccgtcgccggcagcagggacggccacgcagccgaacccgcgcgggcaggcgcggtcgcggcacggcatggccgggatggcgtgccagctgcgctgccccaggtccagcaccttccactggatctcgcccgtgcagcggtggaacgccagcgtgaacagccacggcgcgcgcagccccagcgcccgccgctgcgcgaagaaccgggccttgtctgccaggagatggcgccagcgccggcacaccagcctgcacgcgccgtgggactccacggccagccgcagcaggcagttcagcgccgcgtcgtcggggagccccgggatcagcgcctccgccgcctcccacgacgcctgctgcggacccgacgacgaagccggggtcgccgccaggcggaacctcggcgtcagcttcatctggccgtcgccgagcttgtggacgggcgcctggtgcgaggacacccgcacgcgacgcatgctccacccggccggccctccgccgcgggaggaaatcgagccgagaagagaacctcgaccgcgacctgctggctggccggttaggtcagggaggaaatccccgcaccaatttattgccgaggggggcctcgacgaggaattcaatcggccgccggcctggtacaatcggtaagtgacgaggaatcaatcgctgcacagctttgactggaaaaataatcgcggagaagaagagaaggggaactggcctagcctgctggtgctggacgctcgctccccaagcccggtaagagcaggctcggcctcggggacgccttcttcccttgacgcccg

SEQ ID NO: 139678 - DNA, 233 bp, Zea Mays
gatctcggatggcaacagagatatgctcgtttttgtggaagaataatgtcctctcagttcttgtgctacttctctacccctttctctgggtttggactgtgattggaacattgtggtttagcactgcaagaggctgcttgccagaggaaggacaaaagtggggcttctttgatatggctgcttttcagttactgtgggctcgcctgtattgcgtgtctagctatcaggaaggt

SEQ ID NO: 139679 - DNA, 2285 bp, Zea Mays
cctcctcccccgtttgactgcaccacccactcccccaccccagcgcctcctataaatcccgccccgaacccgaatccaccacaccgaaaacccaaccccagctcgctcttctctccctcactccaagtctcaccatccacacaggccagcgcgcaaacgccacaaagctagcctttctgctcccgctcgatcagctggctccgttgatcaccgggccgggccacaacccccagctctctgactgattagtttccgctgcaatggcgtcctccatctctgctccagctccaccggcggctccggccaccgcgccggcttcgggcagacccaagaagccgtcccagttcaaccccagcaccggcaagaccaggaccccggtccccgcgcggccaatgcgcgccgccgctcccaagtggaacccgctccagcggctcgccgcggcggcgctcgacgcgctggaggaggggctcgtcgcgggcgtcctcgagcgcgcgcacccgctgccacggaccgccgacccggccgtccagatcgccggcaactacgcgcccgtcggggagcgcccgcccaccggcgagctgcccgtgtccggccgcgtcccggcgtgcctcgacggcgtgtacgtccgcaacggcgccaacccgctccacgcgccgcgcgcggggcaccacctcttcgacggcgacggcatgctgcacgccgtgcggctccgcgggggccgcgccgagtcgtacgcgtgccggttcacggagacggcgcggctcaggcaggagcgcgccatcggcagggccgtgttccccaaggccatcggcgagctgcacggccactcgggcgtggcgcgcctgctcctcttcggcgcccgctccctctgcggcgtgctcgacgcgtcccaggggatcggggtcgccaacgccggcctggtgtaccacaacaaccgcctcctcgccatgtcggaggacgacctcccctaccacgtgcgcgtcaccgccgacggcgacctcgagaccgccgggcgctacgacttcggcggccagctcgacaccgccatgatcgcgcaccccaagctggacccggccaccggcgagctcttcgcgctcagctacaatgtcgtgtccaagccgttcctcaagtacttctacttcaccgccgacggccgcaagtcccccgacgtcgagatccccgtggacgcgcccaccatgatgcacgacttcgccgtcaccgagaaccacgccatcatcccggaccagcagatcgtgttcaagctccaggagatggtgctgggcggctcccccgtggtgtacgacaggaacaagaccgcgcggttcggggtgctgccgaagcgcgccaccgacgcgtcgcggctgcggtgggtggacgtccccgactgcttctgcttccacctctggaacgcgtgggaggacgaggccacgggcgaggtcgtggtgatcgggtcctgcatgacccccgcggacgccgtgttcaacgagtccgccgccggcgaggagagcttccgcagcgtgctgtcggagatccggctggacccgcgcaccggcacgtcctcgcggcgcgcggtcctgagcgacgccgaccaggtgaacctggaggccggcatggtgaaccggcagctgctgggcaggaggacgcgctacgcctacctcgccatcgccgagccgtggcccaaggtgtcgggcttcgccaaggtggacctcgaggccggcaccgtcgacaagttcatctacggcgacggccggtacggcggcgagccctgcttcgtgccgcgccccgacgcccccgcgggcgccgcggaggacgacggctacgtgctgtgctacgtgcacgacgaggcccgcggtgcgtcggaaatgctcgtcgtcaacgcccgcgacatgcgggccgaggccgccgtcaagctgccgggccgcgtcccgtacgggttgcacggcacgttcatcgccggcaaggagctgcagcggcaggcctagtggtgccgtgccgtgctgcggctacctcgtcgatcacgaactcgaccaactcacgtacatacactgatatacacacacaatacagtagctagctagatagtgacgtggcaactcgattatttaccgtgtacgtagtacagtaatttgttcattattagagcagtagagggccgtgtgggactgatttttgaggcagacgccggccctacatcttcatgtatatatacaaaaacatataggaatcaaaattgttgaattttaatttttgttcagaaataaaaaaggggattttttgttatacat

SEQ ID NO: 139680 - DNA, 1590 bp, Zea Mays
ctgcatccacacacacttgagccccacccgtgccgccgccccgcatcccttagcgctgccgctgccgctgccgctgccgccgcccatgtccgccgccccgccccgccgcgtggtcatctgcggcggcggcgtggtgggcgcgtgcacggcctacttcctcgccacccacgccgcgtcccccaccgtcccgacgctcgtcgagaggtgcgccccggcgtgcgccgcctcggggaaagccggcggcttcctggcgctggactggtgcgactccaccccggcgctctccaggctcgcgcgggcctccttcgcgctgcaccgccgcctggccgacgccctcggcggcgccgacgcctacggcttccgccccgtccacaccctctccgtcctgctccccccgcaccccgccgcctcctcctcgccgccgcacccgctgctcccgccctgggtcgacccctccgcgtccgccgccccgccgagggagcccgggacccccgacaccaccgcgcaggtccacccgggcctcttcaccaaggccgtcctcgccgcgtcgggagccgaggtcgtcatcggcgaggtggagcgcgtcgccgtggcctgggacggccgcgtcgccggcgtcgtggtcaaggggcgcgacggcgtgctggacgccgacgccgtcgtgctcgcgctcggcccgtggtccggccgcctcgaggtggtcagcgaggtgttcgacgtgtccgggctcaaggcgcacagcatcgtgctccggccgcgcgagcccgagaaggtcacgccgcactgcctcttcctcagctaccagccggagcccggcgccaagatgctcgaccccgaggtgtacccgcggcccaccggggaggtgtacatatgtgggatgagcaaggacgagaacccgccagatgacccagcaacgataacaggcgagccagactcgattgcaatgctgcataagatcgcagggaaagtgtccagccagctgaagaaggaggagggcgctgaggtggtcgcggagcaggcgtgctacctgccgtgcaccgccgacgggctgccggtcatcggggagataccaggcgtgaaggggtgctatgtggccacgggccacagctgctggggtatcctcaatggtccggccaccggcgcagccctcgccgagctcatccttgacggcaaggccaagatcgttgatctcgaacctttcagcccggcaaggtttctcaagagaaggagcaggcgtggagtctgacagtgtgaatgttcagattcaagctcgctactgaataaaacactcttggttctcccttttgcatgactgatgagtgttgcaaaacatgtatgtgcgaataaatcatggatatatagtacttgatgttctgtatttgttgttaatcacagacggacaacttgccaacacccatgatcagattcagatgttcatttagctgaggttgagctcgacaagctgttgcatctgcagctattctacgtacaccatgtctacgcaatgtttccttgtggtcaagtgacacaagtaaccttataaaaaaggtattttcactgttctaaatctaaagtacaagacgttttatc

SEQ ID NO: 139681 - DNA, 2114 bp, Zea Mays
ctgcatccacacacacttgagccccacccgtgccgccgccccgcatcccttagcgctgccgctgccgctgccgctgccgccgcccatgtccgccgccccgccccgccgcgtggtcatctgcggcggcggcgtggtgggcgcgtgcacggcctacttcctcgccacccacgccgcgtcccccaccgtcccgacgctcgtcgagaggtgcgccccggcgtgcgccgcctcggggaaagccggcggcttcctggcgctggactggtgcgactccaccccggcgctctccaggctcgcgcgggcctccttcgcgctgcaccgccgcctggccgacgccctcggcggcgccgacgcctacggcttccgccccgtccacaccctctccgtcctgctccccccgcaccccgccgcctcctcctcgccgccgcacccgctgctcccgccctgggtcgacccctccgcgtccgccgccccgccgagggagcccgggacccccgacaccaccgcgcaggtccacccgggcctcttcaccaaggccgtcctcgccgcgtcgggagccgaggtcgtcatcggcgaggtggagcgcgtcgccgtggcctgggacggccgcgtcgccggcgtcgtggtcaaggggcgcgacggcgtgctggacgccgacgccgtcgtgctcgcgctcggcccgtggtccggccgcctcgaggtggtcagcgaggtgttcgacgtgtccgggctcaaggcgcacagcatcgtgctccggccgcgcgagcccgagaaggtcacgccgcactgcctcttcctcagctaccagccggagcccggcgccaagatgctcgaccccgaggtgtacccgcggcccaccggggaggtgtacatatgtgggatgagcaaggacgagaacccgccagatgacccagcaacgataacaggcgagccagactcgattgcaatgctgcataagatcgcagggaaagtgtccagccagctgaagaaggaggagggcgctgaggtggtcgcggagcaggcgtgctacctgccgtgcaccgccgacgggctgccggtcatcggggagataccaggcgtgaaggggtgctatgtggccacgggccacagctgctggggtatcctcaatggtccggccaccggcgcagccctcgccgagctcatccttgacggcaaggccaagatcgttgatctcgaacctttcagcccggcaaggtttctcaagagaaggagcaggcgtggagtctgacagtgtgaatgttcagattcaagctcgctactgaataaaacactcttggttctcccttttgcatgactgatgagtgttgcaaaacatgtatgtgcgaataaatcatggatatatagtacttgatgttctgtatttgttgttaatcacagacggacaacttgccaacacccatgatcagattcagatgttcatttagctgaggttgagctcgacaagctgttgcatctgcagctattctacgtacaccatgtctacgcaatgtttccttgtggtcaagtgacacaagtaaccttataaaaaagtgctctttctctccgtatggttcaccacatgcctgtgatctctctcaagctaggtatcatagaagtccgtcatggaattgaagtggtagagtgcagccttcctttcccagcttctgctcggtgacatctaccagcttccagacacagtagctcagcctgagtgttaacggactcgagcaagaagatgccatccttcagcaagttctgcttcggcataagctgtttgcaagttgctctcgcccacctctgcttcagatggttctgaagaactggctgcctccgtacccccaccagcaggtgcgcctgaatccgtttcttcctgctgtgcctgcgcagtgctaggcggggaaccaggtggcgggttctgttctgccagactaagacgaagcgacctcccttccagctcctgcattgccgttccataaccatgttagccactgcaacagtaaggtcaatgggactcaagtgatatgaactatgaaggtatacactcaagtaaatcgcaattcatgtattcacattgacgaagtgcaattagcatctatattagctaccttgtgtgctct

SEQ ID NO: 139682 - DNA, 2111 bp, Zea Mays
ctgcatccacacacacttgagccccacccgtgccgccgccccgcatcccttagcgctgccgctgccgctgccgctgccgccgcccatgtccgccgccccgccccgccgcgtggtcatctgcggcggcggcgtggtgggcgcgtgcacggcctacttcctcgccacccacgccgcgtcccccaccgtcccgacgctcgtcgagaggtgcgccccggcgtgcgccgcctcggggaaagccggcggcttcctggcgctggactggtgcgactccaccccggcgctctccaggctcgcgcgggcctccttcgcgctgcaccgccgcctggccgacgccctcggcggcgccgacgcctacggcttccgccccgtccacaccctctccgtcctgctccccccgcaccccgccgcctcctcctcgccgccgcacccgctgctcccgccctgggtcgacccctccgcgtccgccgccccgccgagggagcccgggacccccgacaccaccgcgcaggtccacccgggcctcttcaccaaggccgtcctcgccgcgtcgggagccgaggtcgtcatcggcgaggtggagcgcgtcgccgtggcctgggacggccgcgtcgccggcgtcgtggtcaaggggcgcgacggcgtgctggacgccgacgccgtcgtgctcgcgctcggcccgtggtccggccgcctcgaggtggtcagcgaggtgttcgacgtgtccgggctcaaggcgcacagcatcgtgctccggccgcgcgagcccgagaaggtcacgccgcactgcctcttcctcagctaccagccggagcccggcgccaagatgctcgaccccgaggtgtacccgcggcccaccggggaggtgtacatatgtgggatgagcaaggacgagaacccgccagatgacccagcaacgataacaggcgagccagactcgattgcaatgctgcataagatcgcagggaaagtgtccagccagctgaagaaggaggagggcgctgaggtggtcgcggagcaggcgtgctacctgccgtgcaccgccgacgggctgccggtcatcggggagataccaggcgtgaaggggtgctatgtggccacgggccacagctgctggggtatcctcaatggtccggccaccggcgcagccctcgccgagctcatccttgacggcaaggccaagatcgttgatctcgaacctttcagcccggcaaggtttctcaagagaaggagcaggcgtggagtctgacagtgtgaatgttcagattcaagctcgctactgaataaaacactcttggttctcccttttgcatgactgatgagtgttgcaaaacatgtatgtgcgaataaatcatggatatatagtacttgatgttctgtatttgttgttaatcacagacggacaacttgccaacacccatgatcagattcagatgttcatttagctgaggttgagctcgacaagctgttgcatctgcagctattctacgtacaccatgtctacgcaatgtttccttgtggtcaagtgacacaagtaaccttataaaaaagtgctctttctctccgtatggttcaccacatgcctgtgatctctctcaagctaggtatcatagaagtccgtcatggaattgaagtggtagagtgccttcctttcccagcttctgctcggtgacatctaccagcttccagacacagtagctcagcctgagtgttaacggactcgagcaagaagatgccatccttcagcaagttctgcttcggcataagctgtttgcaagttgctctcgcccacctctgcttcagatggttctgaagaactggctgcctccgtacccccaccagcaggtgcgcctgaatccgtttcttcctgctgtgcctgcgcagtgctaggcggggaaccaggtggcgggttctgttctgccagactaagacgaagcgacctcccttccagctcctgcattgccgttccataaccatgttagccactgcaacagtaaggtcaatgggactcaagtgatatgaactatgaaggtatacactcaagtaaatcgcaattcatgtattcacattgacgaagtgcaattagcatctatattagctaccttgtgtgctct

SEQ ID NO: 139683 - DNA, 1167 bp, Zea Mays
cagcagaactactaagattcaattgcccgattcgctcgtttggttctgcgcatccaggggaggtgtacatatgtgggatgagcaaggacgagaacccgccagatgacccagcaacgataacaggcgagccagactcgattgcaatgctgcataagatcgcagggaaagtgtccagccagctgaagaaggaggagggcgctgaggtggtcgcggagcaggcgtgctacctgccgtgcaccgccgacgggctgccggtcatcggggagataccaggcgtgaaggggtgctatgtggccacgggccacagctgctggggtatcctcaatggtccggccaccggcgcagccctcgccgagctcatccttgacggcaaggccaagatcgttgatctcgaacctttcagcccggcaaggtttctcaagagaaggagcaggcgtggagtctgacagtgtgaatgttcagattcaagctcgctactgaataaaacactcttggttctcccttttgcatgactgatgagtgttgcaaaacatgtatgtgcgaataaatcatggatatatagtacttgatgttctgtatttgttgttaatcacagacggacaacttgccaacacccatgatcagattcagatgttcatttagctgaggttgagctcgacaagctgttgcatctgcagctattctacgtacaccatgtctacgcaatgtttccttgtggtcaagtgacacaagtaaccttataaaaaagctgtttgcaagttgctctcgcccacctctgcttcagatggttctgaagaactggctgcctccgtacccccaccagcaggtgcgcctgaatccgtttcttcctgctgtgcctgcgcagtgctaggcggggaaccaggtggcgggttctgttctgccagactaagacgaagcgacctcccttccagctcctgcattgccgttccataaccatgttagccactgcaacagtaaggtcaatgggactcaagtgatatgaactatgaaggtatacactcaagtaaatcgcaattcatgtattcacattgacgaagtgcaattagcatctatattagctaccttgtgtgctctaatttgttgattcagtttgaagtgcccacaggccacagataacaatgccactggatcagttggcatttccat

SEQ ID NO: 139684 - DNA, 579 bp, Zea Mays
atggcgtcccccgagcccgccgtggatcccagcctcgcgcaagagacccccaccactcccacacccaccacggcgcactcgtccgcggcggagcaagaagggccgccgcagccgcaagagcctgccccagcagcggagggggagagtgaggaagttgaggaggaaggagagtgcgggttctgcctcttcatgaaggccggcggctgcagagacaccttcgtggcgtgggaggagtgcgtggaggcggcgcagaaggagggcgccgacatggtcgagcgttgccacgaggccaccgccaacctcaagaagtgcatggacgcgcacgccgactactacgcgcccgtgctcatggccgaggaggccgtcaacgagcgcgccgaggccgaggccgctgcagctgcagctgcagctgctgctgagactgcgaaggccaagggatgggagccagcgaccgaaggagagattaaggaagaggccgtgccccagccggccgccggcgaggagaagaaagaagaaacaattgctcagaaggagaagaaagaagaagcggtttctgagaaggttcatattagttcgtga

SEQ ID NO: 139685 - DNA, 112 bp, Zea Mays
agcgtatcccacgtgtcgcgcgcgtccccatcagtcgccacgtaccacccagccccatccgacgcctctcgttcgtccatagccacaacgatctacccacggccgtcgaatc

SEQ ID NO: 139686 - DNA, 1700 bp, Zea Mays
ctcccgctcccctcatcgccttcgtggcctggcctgcccgtcgtgtgcgcctctgcgcctctccctccctccctccctcccccgatcgtaaccgccgcctccgatcgatcgccacgatgcggctcttctgacgaaccgccgggcgcgtcaccgtcaccgaccgagacccgcgcccctcgcctggactccatggccgcgtcctccccgatggtgctgtcgctgctcctcttggcgtcgctcacggcgctgctggtcctcgcgccgcgcctgtccccgccgcagccgccgacgggcgagcaggcgccggcggcccccggtggtggtggcggcgaggaggaggaggaggccgacgacctccgcctgttccgccgcgcggctctggagtcgtcggcggcgggcggccctcccaaggtggccttcctgttcctgaccaactccgacctcaccttcgcccctctctgggagcgcttcttcgcggggaacgaggcgcggctgcgcgtgtacgtccacgccgacccgtccgcgcgcctgcttcttccacccacgccctccttccggggccgcgctcctggacgacccgggcaacgcctacttcgcgctgctgtcgcagcactgcgtgccgctccactccttcccgcgcctctacgccgcgctcttcccgacacccacgcgtgcacgcagcagctacatcgaggtgctggagggcgagccgcagatggcgtcgcgctacgcggcgcgcggcggcgaggagggcatgctcccggaggtgccgtacgagcggttccgcatcgggtcgcagttcttcgcgctggcccggcgccacgccgtgctggtggtccgggagcgccggctgtggcgcaagttccgcgcgccctgcgtccccgagatggcgcaggactcgtgctaccccgaggagcactacttcccgacgctgctggacatggcggaccccggcggcgtggcgcggtacacgctgacgcgcgtcaactggacgggcagcgtcgcgggccacccgcacacgtacgaagccccggaggtctcgccaaggctcatcgccgacctccgcgcctccaaccacacccaccacccccacatgttcgcgcgcaagttcgcgcccgactgcctcggcccgctcctcgccatcgccgacaccgtcatcttcaaggactgatggcgggcggctccatccaggtactacttactactcggcagcagagggctgggcctggggctagtcaaggccgccgacgacggacggcgcggcaccggaatcagtggcgttcttctcccgtttggaccccccctgcagcgtcatgcatgttcatcagctccagtgtttctgtgtagtagattaggagtgtagagaagaggaggacgacgacgacgacagcacgcggcgacctaatgcgaagcggcaggttgtggttgcgtgcgtgtacgcgtcctcgatcgtcgtgcatccggggaaaaaaagaagaaaaaatatcgcgcgtgtttgtgtttgtgttttgcctaccgtagccagccaaagaaggttgtacagcagctagtaatgggtatggccactgctagtgcaagtaataaatcctagtattgtacagcttattaggtagccgccactcctgctctgtgggtttcgtgtctcgatgttttttgtactttgcagtgtactacgtacatactcagatgtgcttccatcc

SEQ ID NO: 139687 - DNA, 1774 bp, Zea Mays
ctcccgctcccctcatcgccttcgtggcctggcctgcccgtcgtgtgcgcctctgcgcctctccctccctccctccctcccccgatcgtaaccgccgcctccgatcgatcgccacgatgcggctcttctgacgaaccgccgggcgcgtcaccgtcaccgaccgagacccgcgcccctcgcctggactccatggccgcgtcctccccgatggtgctgtcgctgctcctcttggcgtcgctcacggcgctgctggtcctcgcgccgcgcctgtccccgccgcagccgccgacgggcgagcaggcgccggcggcccccggtggtggtggcggcgaggaggaggaggaggccgacgacctccgcctgttccgccgcgcggctctggagtcgtcggcggcgggcggccctcccaaggtggccttcctgttcctgaccaactccgacctcaccttcgcccctctctgggagcgcttcttcgcggggaacgaggcgcggctgcgcgtgtacgtccacgccgacccgtccgcgcgcctgcttcttccacccacgccctccttccggggccgcttcgtggccgccaggcccacgcggcgcgccgacgccagcctcatcgccgccgcgcgcaggctgctggcggccgcgctcctggacgacccgggcaacgcctacttcgcgctgctgtcgcagcactgcgtgccgctccactccttcccgcgcctctacgccgcgctcttcccgacacccacgcgtgcacgcagcagctacatcgaggtgctggagggcgagccgcagatggcgtcgcgctacgcggcgcgcggcggcgaggagggcatgctcccggaggtgccgtacgagcggttccgcatcgggtcgcagttcttcgcgctggcccggcgccacgccgtgctggtggtccgggagcgccggctgtggcgcaagttccgcgcgccctgcgtccccgagatggcgcaggactcgtgctaccccgaggagcactacttcccgacgctgctggacatggcggaccccggcggcgtggcgcggtacacgctgacgcgcgtcaactggacgggcagcgtcgcgggccacccgcacacgtacgaagccccggaggtctcgccaaggctcatcgccgacctccgcgcctccaaccacacccaccacccccacatgttcgcgcgcaagttcgcgcccgactgcctcggcccgctcctcgccatcgccgacaccgtcatcttcaaggactgatggcgggcggctccatccaggtactacttactactcggcagcagagggctgggcctggggctagtcaaggccgccgacgacggacggcgcggcaccggaatcagtggcgttcttctcccgtttggaccccccctgcagcgtcatgcatgttcatcagctccagtgtttctgtgtagtagattaggagtgtagagaagaggaggacgacgacgacgacagcacgcggcgacctaatgcgaagcggcaggttgtggttgcgtgcgtgtacgcgtcctcgatcgtcgtgcatccggggaaaaaaagaagaaaaaatatcgcgcgtgtttgtgtttgtgttttgcctaccgtagccagccaaagaaggttgtacagcagctagtaatgggtatggccactgctagtgcaagtaataaatcctagtattgtacagcttattaggtagccgccactcctgctctgtgggtttcgtgtctcgatgttttttgtactttgcagtgtactacgtacatactcagatgtgcttccatcc

SEQ ID NO: 139688 - DNA, 614 bp, Zea Mays
atgcagaggccgcgttgacggcactggaagcagcagcagagcaggccaggaacaagaacagcaatgaactcgccgccgggcgacgacggaggcggcagcgcgcacggcttattcgggtcgggcggcatccgcgggttcggctacggcgtcggcgtgtccatcggcatcctcctcgtggccaccaccatcgcgctcgccatctacttctgcacgcgcacctccatgcccgagtccgccgccgcgcccgcgccgccgcggcagggcggcgacgccgagcggggcatcgacgaggccacgctcgaggcgttcccggcggtggcctacgcggaggcgaggaaggcggcggcgaaccaggcgtgctgctgccccgtctgcctcgactgctacggcgacggcgacgtggtccgggtgctccccgactgcggccacctgttccaccgcgcctgcgtcgacccctggctccggcagcgccccacgtgcccggtctgccgcacgtcgccgctgcccagccccatgcccacgccgctcgccgaggtcacgccgctggcgtccgcgcggccgtcgtgagggctgtttttttttcctctctctctctctctcgcgctcgtgtgtct

SEQ ID NO: 139689 - DNA, 776 bp, Zea Mays
atagcattcttttcataaaacgaccccaccccgaaaatctccccgctcacaaagcagtcctcccaccgcacgcaacgcagcctcgacctcgacctcgccgtcgccatggtgagcaagcagacccgccgcctcctcgtccttgccgccgtcgccgtatgcctccacctccccgccgcctctgtcgccaccgacgtcgattactgcagtaaaaaggagtacccggtgaaggtgagcggggtgcagatcgtgcccgatccggtcgagcccggcaagcccgccactttcaagatctccgcttctactgataaaaccatcgagaaggggaagctggtgatcgacgtcaagtacttcttcttctacgtgcactcggagacgcgcgaaatctgcggagagatctcctgtccggcgaccggcgacttcgtgctgtcccacgagcagacgttgccagggttcactccaccggtgaggtttccgcgcagccagcgtgcagccagtcacccatttaactctgtttagggaaaccccaggggtcgtacacgatctacatgaagatggtcggggacgacgacgaggagctcagctgcatctcgttcggcttcagcattgggttcgtcgcctccagctgaaacccgcctgagctgcgcgccagaagtcgcccaacatggatgtaattatgtaaaccaatgcattacggagacgctcagatttcttcaacctagagcacagatatttgtcgactctgaaatgaaatggcttgcgtgccgtcgttgttcgtc

SEQ ID NO: 139690 - DNA, 821 bp, Zea Mays
agcattcttttcataaaacgaccccaccccgaaaatctccccgctcacaaagcagtcctcccaccgcacgcaacgcagcctcgacctcgacctcgccgtcgccatggtgagcaagcagacccgccgcctcctcgtccttgccgccgtcgccgtatgcctccacctccccgccgcctctgtcgccaccgacgtcgattactgcagtaaaaaggagtacccggtgaaggtgagcggggtgcagatcgtgcccgatccggtcgagcccggcaagcccgccactttcaagatctccgcttctactgataaaaccatcgagaaggggaagctggtgatcgacgtcaagtacttcttcttctacgtgcactcggagacgcgcgaaatctgcggagagatctcctgtccggcgaccggcgacttcgtgctgtcccacgagcagacgttgccagggttcactccaccggggtcgtacacgatctacatgaagatggtcggggacgacgacgaggagctcagctgcatctcgttcggcttcagcattgggttcgtcgcctccagctgaaacccgcctgagctgcgcgccagaagtcgcccaacatggatgtaattatgtaaaccaatgcattacggagacgctcagatttcttcaacctagagcacagatatttgtcgactctgaaatgaaatggcttgcgtgccgtcgttgttcgtcaaccgtctttctgcatgtttgctaaagtttagtctcagttacatctccagtgtttgaatgacaattacgataattataaaactaaaatttatcgcatagatgaagactaaga

SEQ ID NO: 139691 - DNA, 575 bp, Zea Mays
gataaacccatgccttctatatcaccgcaaaaaacagatcatgccttccacaattcttttttcttgttcagataaaaccatcgagaaggggaagctggtgatcgacgtcaagtacttcttcttctacgtgcactcggagacgcgcgaaatctgcggagagatctcctgtccggcgaccggcgacttcgtgctgtcccacgagcagacgttgccagggttcactccaccggtgaggtttccgcgcagccagcgtgcagccagtcacccatttaactctgtttagggaaaccccaggcatgcatgtcttctcccaggctgttcaaatatgcgattgacgcgtttggtgcttctgcttcgtcgcaggggtcgtacacgatctacatgaagatggtcggggacgacgacgaggagctcagctgcatctcgttcggcttcagcattgggttcgtcgcctccagctgaaacccgcctgagctgcgcgccagaagtcgcccaacatggatgtaattatgtaaaccaatgcattacggagacgctcagatttcttcaacctagagcacagatatttgtcgact

SEQ ID NO: 139692 - DNA, 1372 bp, Zea Mays
ctgccttcctccgtctccccacctccgctcccactttccccaccaccaccattatcgccaagaccacacgcgtccagactccagaggcaagcaaaagcgaggcaagaaagcggcagcctcctcgatcgatcgatcgatcgaatcgaggtctcaaagtctgacagccccaccgacaggctgcgccgccggcggagtccactccgcccggcgctatgaccatcaagaccttgaaggcgcgcatcctgcgcgcgctcaagtcgtccctcccggcggcggccggggccgacggcgcagcgccggcgccgccgtccgcccgccagtaccacggcgacgtcgacgccctgtccgacgacgcgtccttcttcgatgcgcgggagccggagacgcccaccaaggcgcaccgccggcggcggccctccgcggagccgctggacgcgtgggagctggtggacccggaccaggaccaggaccaggaccaggaccaggaggacgcccgcgcgtcacccgacccgctgctggggttccctcggggcggcgggggctccggctccggctccggctccggcgtggtgctgtacacgacgacgctgcgcggcgtgcggcgcaccttcgaggactgcaacggcgtgcgcgcgctgctggagggcctgggcgcgcgcttccaggagcgggacgtgtccatggaccggggcctgcgggaccagctgtgggcggcggccggggagcgcgccgtgccgccgcgcctcttcgtgcgcggccgcgacctcggcggcgccgcgcgcgtgctcgcgctccacgaggagggccgcctcgcgccgctgctgccgctggcgccggcgccggcgccggcgccggtgacgcgcggcggcgggacggcgaggctcaggtgcggcgcgtgcgcggggctcgggttcgtcgtgtgcggcgcctgcgacggcagccgcaaggcgctccagctccaaggcgggcggtgccaagggtgcaacgagaacggcctcgtcatgtgcgcgctctgctcgtaggaggcagcggtccgtttgcttgcccgtcgtccgttactgcgacgcgacgacgacgacgacgtcgatccttctgtactgccgatcgatgtgctagcttgagtggttcggtttgaaggggtttaagggggattggaggggattcaatccccttctatataaatttgtatagaaggggattgaatccctcccatccccctcagggcttgttcgtttagaccaatccccctctggattggtctaagcgaacatgccctcaatccacccctaaccgaacagggcctaatgtgtgatgtatatatgctatgctagtttagatgtgtccatgtcaaaacccatccgatatgcttcag

SEQ ID NO: 139693 - DNA, 3017 bp, Zea Mays
tcatctcgcgcgcggcggtccatggccaccgccgccaccgcttcccacccggcttccgcctccacctccggccgcgacgctctcgccgccgcctcctcctcccccgccgccgtctgcctcgtcccgttcaggtggtgggcgcgggtgcgggaggaggaggcggcgggcggggtgcagtacgcggccaccgccgccgcgtcgccctcctactacggcctcaggctgcttcacagcttgctgcacccggatctcgtcctgcgcctcgagcgcggggagtgccgcgccggtggcgggaacggaggcgggcgcagctacgcgctcgtcccggccgacgagctctccagggcgctcgccaggcaaaactctggtttgggtttacaaaataagcactcctttgctggagatagtgctggtgcttatcctttggtgcttaggatctctgtccgagaaacaagtatcttgacactgaagatcagcaaaaaggacaatccatttgagaattacaaacgggctaacaagatttttaatgtggattctcaaccagttcatgtttgggatttttcagggcagacaaacctaatattaatgaatgaatggaatagactacatgactgctgccatgcagatcaagagaatcttctggaagtgcaagtctatgcaatgtctgactccttaacatccaaaattggtggtaccaacaaagaaaattatggagatattagtgatatgaattctgattcgtcttacagaagttttggaagagctggttctatggggttaataggattggagaatctcggaaatacttgctttatgaacagttcaattcaatgtttggctcacacaccaaaacttgttgaatacttccttggtgattatgccaaaaatataaaccggactaatccattgggattgaacggtgaacttgccttggcgtttggagaactgttgaggagcttatggaccactgacggaaaaccagttccacctcattatttcaaggaaaaaattgcatgttttgctcctcagtttggtggctttaatcagcatgattcacaggaacttcttgcttttttactggatggtctccatgaagatcttaaccaggttaaatgtaaaccgtatgaagaagcaaaggatgcaagtggccgtcctgacgaagaagtagcagatgagtactggagcaaccatttagctcgaaatgactctgttatagttgatacatgccatggacagtacaaatctacattaacttgtcctacttgcagtaaaacatctgtcacctttgacccatttatgtacttatctttgcctgtaccttccacggcaaagagggtaatgactgtaacagttttcagcactgatggtagcagagaaccatgctcgtatgacgtcagtgtgccaaaatttgggactctgagtgatcttgttcaggctttaagcattgtttgcctacttggagatgatgagatcctgctggttacagaggtctataataactgcatcatccgatacttggaggagccttcagattcagtttcattgctgagggatggagataaactagcagcataccgtctacccaaaagacatgagaaatccccccttgtggtttttacacaccaacattttgtccagcattctagtgatggtaatttaactccacaaatgagggagtttgaggccccacttttggcagcacttccagaggaaattagtggattatctcttcaggatatctacctaaagttgttgagtccatttcaactttccaacggggctagttcgcttaatgattgtatggagtctaatagtgactccgtcgatacgccttctgattcaggcagtatcaattttcagaacagccaattggaagatggccctgaaagcaaccactgtagtgctagtgaatgtgaagtaacaaaaggacctgatgatttatacgatggggtttctggttctaacaaggaagcacatatggacttcgaattttatttaaaaagtgaaaggggcgagggccagcaacagaagatagaaattaatgagctccatttattattggagacagcaccaagccggttgcatgtgaatgtccactggctacagaatgcttcaagaaaatatgccacctcaatgctgaacaatctacctgagatccacaagctcgagcttatcccgaaaggaactgaagattctgttgcactacatggttgtctggaagcctttctaaaagaggaaccgttggggccggaggacatgtggtattgcccgcgctgcaagaagcatcagcaagcgatgaagaaactggatctgtggaggctgcccgaggttctggtgatccacctcaaacggttctcctacacccagttcacaaggaacaagctggagacgttcgtcgacttccccaccgtcgatttggacctgtcgtcctacgtcgcggacaagagcgagcagccgagcagccattatcgcctgtacgctgttagcaaccactacggaaacatgggagggggccattacaccgccagcatctatcatgaggaagggaaggggtggtacaagttcgatgacgactgcgtgacccctatgagcgaggacagcataaagaccccggctgcctatgttctgttctacagacgagagtgactgactggggattgaagcgcatttttctgcaggtgggttttggcgtgtctgagttttctaacgtttcggcatttgaatctctcaagccatactgacgcctaccggtgatacaacaacattatgtacagattcatctgccaacaggagagagagagagagagagagagagagagagagagagagagagagagagagagagagagagagagacctagctcagtgcaatattctttttttcgcatcagctcacagtattcttatatgggtagtacatggaccccacccacccgcacacaccaacattgtaattcctccgacttcaaccggtgatcacatcacattcaccattaaagaaagggtcaatagacaca

SEQ ID NO: 139694 - DNA, 3098 bp, Zea Mays
tcatctcgcgcgcggcggtccatggccaccgccgccaccgcttcccacccggcttccgcctccacctccggccgcgacgctctcgccgccgcctcctcctcccccgccgccgtctgcctcgtcccgttcaggtggtgggcgcgggtgcgggaggaggaggcggcgggcggggtgcagtacgcggccaccgccgccgcgtcgccctcctactacggcctcaggctgcttcacagcttgctgcacccggatctcgtcctgcgcctcgagcgcggggagtgccgcgccggtggcgggaacggaggcgggcgcagctacgcgctcgtcccggccgacgagctctccagggcgctcgccaggcaaaactctggtttgggtttacaaaataagcactcctttgctggagatagtgctggtgcttatcctttggtgcttaggatctctgtccgagaaacaagtatcttgacactgaagatcagcaaaaaggacaatccatttgagaattacaaacgggctaacaagatttttaatgtggattctcaaccagttcatgtttgggatttttcagggcagacaaacctaatattaatgaatgaatggaatagactacatgactgctgccatgcagatcaagagaatcttctggaagtgcaagtctatgcaatgtctgactccttaacatccaaaattggtggtaccaacaaagaaaattatggagatattagtgatatgaattctgattcgtcttacagaagttttggaagagctggttctatggggttaataggattggagaatctcggaaatacttgctttatgaacagttcaattcaatgtttggctcacacaccaaaacttgttgaatacttccttggtgattatgccaaaaatataaaccggactaatccattgggattgaacgtatgtagattttcttgttaacatgcaaaaagtccactccaaggattcagacaattctttactgacttttctattaactagggtgaacttgccttggcgtttggagaactgttgaggagcttatggaccactgacggaaaaccagttccacctcattatttcaaggaaaaaattgcatgttttgctcctcagtttggtggctttaatcagcatgattcacaggaacttcttgcttttttactggatggtctccatgaagatcttaaccaggttaaatgtaaaccgtatgaagaagcaaaggatgcaagtggccgtcctgacgaagaagtagcagatgagtactggagcaaccatttagctcgaaatgactctgttatagttgatacatgccatggacagtacaaatctacattaacttgtcctacttgcagtaaaacatctgtcacctttgacccatttatgtacttatctttgcctgtaccttccacggcaaagagggtaatgactgtaacagttttcagcactgatggtagcagagaaccatgctcgtatgacgtcagtgtgccaaaatttgggactctgagtgatcttgttcaggctttaagcattgtttgcctacttggagatgatgagatcctgctggttacagaggtctataataactgcatcatccgatacttggaggagccttcagattcagtttcattgctgagggatggagataaactagcagcataccgtctacccaaaagacatgagaaatccccccttgtggtttttacacaccaacattttgtccagcattctagtgatggtaatttaactccacaaatgagggagtttgaggccccacttttggcagcacttccagaggaaattagtggattatctcttcaggatatctacctaaagttgttgagtccatttcaactttccaacggggctagttcgcttaatgattgtatggagtctaatagtgactccgtcgatacgccttctgattcaggcagtatcaattttcagaacagccaattggaagatggccctgaaagcaaccactgtagtgctagtgaatgtgaagtaacaaaaggacctgatgatttatacgatggggtttctggttctaacaaggaagcacatatggacttcgaattttatttaaaaagtgaaaggggcgagggccagcaacagaagatagaaattaatgagctccatttattattggagacagcaccaagccggttgcatgtgaatgtccactggctacagaatgcttcaagaaaatatgccacctcaatgctgaacaatctacctgagatccacaagctcgagcttatcccgaaaggaactgaagattctgttgcactacatggttgtctggaagcctttctaaaagaggaaccgttggggccggaggacatgtggtattgcccgcgctgcaagaagcatcagcaagcgatgaagaaactggatctgtggaggctgcccgaggttctggtgatccacctcaaacggttctcctacacccagttcacaaggaacaagctggagacgttcgtcgacttccccaccgtcgatttggacctgtcgtcctacgtcgcggacaagagcgagcagccgagcagccattatcgcctgtacgctgttagcaaccactacggaaacatgggagggggccattacaccgccagcatctatcatgaggaagggaaggggtggtacaagttcgatgacgactgcgtgacccctatgagcgaggacagcataaagaccccggctgcctatgttctgttctacagacgagagtgactgactggggattgaagcgcatttttctgcaggtgggttttggcgtgtctgagttttctaacgtttcggcatttgaatctctcaagccatactgacgcctaccggtgatacaacaacattatgtacagattcatctgccaacaggagagagagagagagagagagagagagagagagagagagagagagagagagagagagagagagagacctagctcagtgcaatattctttttttcgcatcagctcacagtattcttatatgggtagtacatggaccccacccacccgcacacaccaacattgtaattcctccgacttcaaccggtgatcacatcacattcaccattaaagaaagggtcaatagacaca

SEQ ID NO: 139695 - DNA, 926 bp, Zea Mays
ggttattatcctctctctctctcttctttcttggtatccttctgttttgttttcctccacaaacctctttcaattcaaccatagacgacgacgaagacagcgccgagaagatctcgccttcacaacaacgacgaacagcgggtacgtacttggagatccaagaagctaagaaatgtcagcccagtttgcatccgagcatgcttgctatgtcaactgcaactattgcaacactatcctggtggtgaatgtgccaagcagttgttcctacaacgtggtgactgttaaatgtgggcattgtacaatggtgctgtccatggatctcagtcccttccatcagcaggcacgcactgtcccagacaaccaggttgtccagaacagagggtttcagtataacaattttgggagctacgagcaagcctcgtcaagaaatctacgaacgcctcccatgtatccagtgtcaaacaatcagccacaagtgccaccaatacgaccctcagagaagagacagcgtgttccatcagcatacaacagattcatcaaggaagaaatacaaaggataaagacgagcaacccagagattagccacagggaagcattcagtgctgcagcaaagaattgggctcatctccctcggctccatttcggcctcagcgtcgctgacggcggcggcggcagcaactagggaagacgatgattacggatcgagctcttcgccttacacatatatatatgcagtgtgctatgtcgtgcttggattttgtaagccttattaagttttttgacaacctgtgttttcagacctgttgcgtacttgcatgcatgaatcctgcattgcgtgcagtaattaacatgtttgatgctatatatgatatatgcatgcatggtgtacaacattactaaataaatggaaaatatttgttcaagaa

SEQ ID NO: 139696 - DNA, 931 bp, Zea Mays
cagaggaaattgggctacacgccctccctaatccttccatatatagggcacaggagacatcgtcttgctcatccatatcgcttgctggctttgctttcttccttcctccctctagatctcgccttcacaacaacgacgaacagcgggtacgtacttggagatccaagaagctaagaaatgtcagcccagtttgcatccgagcatgcttgctatgtcaactgcaactattgcaacactatcctggtggtgaatgtgccaagcagttgttcctacaacgtggtgactgttaaatgtgggcattgtacaatggtgctgtccatggatctcagtcccttccatcagcaggcacgcactgtcccagacaaccaggttgtccagaacagagggtttcagtataacaattttgggagctacgagcaagcctcgtcaagaaatctacgaacgcctcccatgtatccagtgtcaaacaatcagccacaagtgccaccaatacgaccctcagagaagagacagcgtgttccatcagcatacaacagattcatcaaggaagaaatacaaaggataaagacgagcaacccagagattagccacagggaagcattcagtgctgcagcaaagaattgggctcatctccctcggctccatttcggcctcagcgtcgctgacggcggcggcggcagcaactagggaagacgatgattacggatcgagctcttcgccttacacatatatatatgcagtgtgctatgtcgtgcttggattttgtaagccttattaagttttttgacaacctgtgttttcagacctgttgcgtacttgcatgcatgaatcctgcattgcgtgcagtaattaacatgtttgatgctatatatgatatatgcatgcatggtgtacaacattactaaataaatggaaaatatttgttcaagaa

SEQ ID NO: 139697 - DNA, 1543 bp, Zea Mays
ccttgtattctcaaggaaacctttatccatggctggaggtatcatactactcctgcttgtcatccccctcgtcgtgagaattgaagggagtgtcatgggggagagatccaactcgttctcacaggactccaataattctagccctgctgaaaacaaactcgaaccaggtgaaaagtccttcgcatcggaggcatactgtgagaggtgtccagacctagaataggtgtgaagtgtgtgtgcgtgctgggcgcgatgggtggagtgagccactgtaaccaggatacatatacactgtcttgtggagggggaaaaggggatgcataatgagaattatcaacagaacttctctcattccttttctctgttcctgcttcctcttctccgatctctcatcttgtcctctacttccctattctgattaggtctgctgctctggttggtgatcctaaaggggttgctaacaattggtatcagagggaaatcgttcctcgaccggaagcatccatggcgtctccttcactggtcgatactcagctcatcgaagcgttggagcaccaaacccgggttatcctcgccgaactcgacaagcggttcacggcgctcgactccaagtgggaagcgcgagtccagacgcaccaagtagcggtgggcgccgtcgtggagtggcggccccaggtggatgcctccatcgaacatcttcaacaacaccaagcagatcagccgcacctccgctccgtcgggaacatgccccacgagggcggcctcctctcttccgccatcaccaagcagatcgaacccgtctgccttaaggagcttgcattgctgggggacgccgactcgcgggtccaggccaccgaaaccgacgtcgtgttcccttccagcaaaatgctcagcctcgtcggcgcggtcgacaaggaggaacgccactcaacccaggaagtcccgagacgcgcacctcgtcgcaacgcgctacgaggggggaccaaacccaccccttcgccgtcttcgacgaccacagcgccgctggagcatcctgcactgggttcgcgcgagacgtggtcccgcgcctcctccacgctttgctcgtccgcgtcatgttcgtcgagcaggtggagggcatgcgcgacccggaggacgagggcttggcgcccaacgagaggaacctgcaacgcgtctgggcgcgcgacacactctactcaggcaccgccttcacccgcagcctcgggaacctcaccgcctccgcggcgctgcccacgccgctctacaggtatgtggcgccctgctacgactgttggggtagggtcaaccccgacgtccacgctgctccacacgcaagcatcaactgctccatgggtagaggaacaagtcagtggtagctcgcccctcgggtgttcgaccaaatgtctttgccaggctatgcaaaacattgtcaagccaaatccgccaaggatgaacgagatcacgggtgctgctcgtttgaaacctcaaggctcatttcactatggatctatcaatgggagccagatttacaagatgaggaatg

SEQ ID NO: 139698 - DNA, 1755 bp, Zea Mays
ccttgtattctcaaggaaacctttatccatggctggaggtatcatactactcctgcttgtcatccccctcgtcgtgagaattgaagggagtgtcatgggggagagatccaactcgttctcacaggactccaataattctagccctgctgaaaacaaactcgaaccaggtcctcttttcatattggttatattggttatttattagggatcagtgagcttcgaattgagtaaatctgtaattacttctacactactaattatcattatgtgactgctcgtaaaggtgaaaagtccttcgcatcggaggcatactgtgagaggtgtccagacctagaataggtgtgaagtgtgtgtgcgtgctgggcgcgatgggtggagtgagccactgtaaccaggatacatatacactgtcttgtggagggggaaaaggggatgcataatgagaattatcaacagaacttctctcattccttttctctgttcctgcttcctcttctccgatctctcatcttgtcctctacttccctattctgattaggtctgctgctctggttggtgatcctaaaggggttgctaacaattggtatcagagggaaatcgttcctcgaccggaagcatccatggcgtctccttcactggtcgatactcagctcatcgaagcgttggagcaccaaacccgggttatcctcgccgaactcgacaagcggttcacggcgctcgactccaagtgggaagcgcgagtccagacgcaccaagtagcggtgggcgccgtcgtggagtggcggccccaggtggatgcctccatcgaacatcttcaacaacaccaagcagatcagccgcacctccgctccgtcgggaacatgccccacgagggcggcctcctctcttccgccatcaccaagcagatcgaacccgtctgccttaaggagcttgcattgctgggggacgccgactcgcgggtccaggccaccgaaaccgacgtcgtgttcccttccagcaaaatgctcagcctcgtcggcgcggtcgacaaggaggaacgccactcaacccaggaagtcccgagacgcgcacctcgtcgcaacgcgctacgaggggggaccaaacccaccccttcgccgtcttcgacgaccacagcgccgctggagcatcctgcactgggttcgcgcgagacgtggtcccgcgcctcctccacgctttgctcgtccgcgtcatgttcgtcgagcaggtggagggcatgcgcgacccggaggacgagggcttggcgcccaacgagaggaacctgcaacgcgtctgggcgcgcgacacactctactcaggcaccgccttcacccgcagcctcgggaacctcaccgcctccgcggcgctgcccacgccgctctacaggtatgtggcgccctgctacgactgttggggtagggtcaaccccgacgtccacgctgctccacacgcaagcatcaactgctccatgggtagaggaacaagtcagtggtagctcgcccctcgggtgttcgaccaaatgtctttgccaggctatgcaaaacattgtcaagccaaatccgccaaggatgaacgagatcacgggtgctgctcgtttgaaacctcaaggctcatttcactatggatctatcaatgggagccagatttacaagatgaggaatgaaccacctgttatcatcaatggaaagaaacgggttatagtgagtgccttggtgtggagaattaaatcactcgatataatgaccagttacattcttc

SEQ ID NO: 139699 - DNA, 3031 bp, Zea Mays
ccttgtattctcaaggaaacctttatccatggctggaggtatcatactactcctgcttgtcatccccctcgtcgtgagaattgaagggagtgtcatgggggagagatccaactcgttctcacaggactccaataattctagccctgctgaaaacaaactcgaaccaggtgaaaagtccttcgcatcggaggcatactgtgagaggtgtccagacctagaataggtgtgaagtgtgtgtgcgtgctgggcgcgatgggtggagtgagccactgtaaccaggatacatatacactgtcttgtggagggggaaaaggggatgcataatgagaattatcaacagaacttctctcattccttttctctgttcctgcttcctcttctccgatctctcatcttgtcctctacttccctattctgattaggtctgctgctctggttggtgatcctaaaggggttgctaacaattggtatcagagggaaatcgttcctcgaccggaagcatccatggcgtctccttcactggtcgatactcagctcatcgaagcgttggagcaccaaacccgggttatcctcgccgaactcgacaagcggttcacggcgctcgactccaagtgggaagcgcgagtccagacgcaccaagtagcggtgggcgccgtcgtggagtggcggccccaggtggatgcctccatcgaacatcttcaacaacaccaagcagatcagccgcacctccgctccgtcgggaacatgccccacgagggcggcctcctctcttccgccatcaccaagcagatcgaacccgtctgccttaaggagcttgcattgctgggggacgccgactcgcgggtccaggccaccgaaaccgacgtcgtgttcccttccagcaaaatgctcagcctcgtcggcgcggtcgacaaggaggaacgccactcaacccaggaagtcccgagacgcgcacctcgtcgcaacgcgctacgaggggggaccaaacccaccccttcgccgtcttcgacgaccacagcgccgctggagcatcctgcactgggttcgcgcgagacgtggtcccgcgcctcctccacgctttgctcgtccgcgtcatgttcgtcgagcaggtggagggcatgcgcgacccggaggacgagggcttggcgcccaacgagaggaacctgcaacgcgtctgggcgcgcgacacactctactcaggcaccgccttcacccgcagcctcgggaacctcaccgcctccgcggcgctgcccacgccgctctacaggtatgtggcgccctgctacgactgttggggtagggtcaaccccgacgtccacgctgctccacacgcaagcatcaactgctccatgggtagaggaacaagtcagtggtagctcgcccctcgggtgttcgaccaaatgtctttgccaggctatgcaaaacattgtcaagccaaatccgccaaggatgaacgagatcacgggtgctgctcgtttgaaacctcaaggctcatttcactatggatctatcaatgggagccagatttacaagatgaggaatgaaccacctgttatcatcaatggaaagaaacgggttatagtgagtgccttggtgtggagaattaaatcactcgatataatgaccagttacattcttccaaagcccccttggttggcatttgatccaggcaaattgtttagagttgattacagctccagttccacaagtgcttccttaccgtatgcattgcaattttcacttgatgtccagacgatggaaacagttgatatagtcgttcctaatcagagatatactactggagaacaagtgtctgtggcagtttctgttgcagctactcaagggctggcatcagtgaatactatgaaattccagggcataatccagggtgtcaaggtagctattttggtggattccggcagctcccattcctttgtgagtgcagatctggcctcacaactatccagcgtggtgggcatggtgacactagtgtcagtgcaggtagcggatggcggtctcctgcagtgttattgccagttgttaggtgctaaatggatggtgcagcagtgtgagttctctaccaatttcagagtacttgacatttcagcatacaatgtcattgtggacatggattggttgtccagctacagttcgatgaaggtccattgggcccagtggtgggtgataattccttatcaaggctcttttgtattgcttcatggttgttcagctgttttgccaccaaggttttggattatagatgatggttggcaagagacacttgactattatccagagacgttgcatcagatgcttgttgcgaatgctgatgggagtttcaagctaccagggaattctgtgaaagactttcttgactctaaaactgccttgaagatacatgttttgataacaaattttcagaacaagcttcttgaagtaatcaatgcaactgaacttcctgaatttttgggggggccatgcacttatactatgggaggatgcctgatgtctaacaaaggtccatggaacgatccagatactatgaagctttcacataacaaggaagcaaagtttacaagacataatagaggtactgctctaaactccgatccggacaagttgtcttttaatgggttcattttgtgggagtattcaatcaagtgtgttgattggcaaccatgggcaccacccatgtcattggagattttgctggagattggtacgagtcgtcctaggccgtggccaaattttgcaccacctctaattccaagtcaaggatattgctcagttgtcaggcaaagtgaccacaatagcagatgtgtgaagtttccttattttgggagatgctcagccgagagtcaatgttttcagttcaaggccttgcaatacgtgttgcttcattcatggcatcaggatcctggatatgttcagtttctgcttcgacttgggggcaagtcgaattttaaggaggggagaatgtgagaggtgtccagacctagaataggtgtgaagtgtgtgtgcgtgctgggcg

SEQ ID NO: 139700 - DNA, 2776 bp, Zea Mays
ccttgtattctcaaggaaacctttatccatggctggaggtatcatactactcctgcttgtcatccccctcgtcgtgagaattgaagggagtgtcatgggggagagatccaactcgttctcacaggactccaataattctagccctgctgaaaacaaactcgaaccaggtctgctgctctggttggtgatcctaaaggggttgctaacaattggtatcagagggaaatcgttcctcgaccggaagcatccatggcgtctccttcactggtcgatactcagctcatcgaagcgttggagcaccaaacccgggttatcctcgccgaactcgacaagcggttcacggcgctcgactccaagtgggaagcgcgagtccagacgcaccaagtagcggtgggcgccgtcgtggagtggcggccccaggtggatgcctccatcgaacatcttcaacaacaccaagcagatcagccgcacctccgctccgtcgggaacatgccccacgagggcggcctcctctcttccgccatcaccaagcagatcgaacccgtctgccttaaggagcttgcattgctgggggacgccgactcgcgggtccaggccaccgaaaccgacgtcgtgttcccttccagcaaaatgctcagcctcgtcggcgcggtcgacaaggaggaacgccactcaacccaggaagtcccgagacgcgcacctcgtcgcaacgcgctacgaggggggaccaaacccaccccttcgccgtcttcgacgaccacagcgccgctggagcatcctgcactgggttcgcgcgagacgtggtcccgcgcctcctccacgctttgctcgtccgcgtcatgttcgtcgagcaggtggagggcatgcgcgacccggaggacgagggcttggcgcccaacgagaggaacctgcaacgcgtctgggcgcgcgacacactctactcaggcaccgccttcacccgcagcctcgggaacctcaccgcctccgcggcgctgcccacgccgctctacaggtatgtggcgccctgctacgactgttggggtagggtcaaccccgacgtccacgctgctccacacgcaagcatcaactgctccatgggtagaggaacaagtcagtggtagctcgcccctcgggtgttcgaccaaatgtctttgccaggctatgcaaaacattgtcaagccaaatccgccaaggatgaacgagatcacgggtgctgctcgtttgaaacctcaaggctcatttcactatggatctatcaatgggagccagatttacaagatgaggaatgaaccacctgttatcatcaatggaaagaaacgggttatagtgagtgccttggtgtggagaattaaatcactcgatataatgaccagttacattcttccaaagcccccttggttggcatttgatccaggcaaattgtttagagttgattacagctccagttccacaagtgcttccttaccgtatgcattgcaattttcacttgatgtccagacgatggaaacagttgatatagtcgttcctaatcagagatatactactggagaacaagtgtctgtggcagtttctgttgcagctactcaagggctggcatcagtgaatactatgaaattccagggcataatccagggtgtcaaggtagctattttggtggattccggcagctcccattcctttgtgagtgcagatctggcctcacaactatccagcgtggtgggcatggtgacactagtgtcagtgcaggtagcggatggcggtctcctgcagtgttattgccagttgttaggtgctaaatggatggtgcagcagtgtgagttctctaccaatttcagagtacttgacatttcagcatacaatgtcattgtggacatggattggttgtccagctacagttcgatgaaggtccattgggcccagtggtgggtgataattccttatcaaggctcttttgtattgcttcatggttgttcagctgttttgccaccaaggttttggattatagatgatggttggcaagagacacttgactattatccagagacgttgcatcagatgcttgttgcgaatgctgatgggagtttcaagctaccagggaattctgtgaaagactttcttgactctaaaactgccttgaagatacatgttttgataacaaattttcagaacaagcttcttgaagtaatcaatgcaactgaacttcctgaatttttgggggggccatgcacttatactatgggaggatgcctgatgtctaacaaaggtccatggaacgatccagatactatgaagctttcacataacaaggaagcaaagtttacaagacataatagaggtactgctctaaactccgatccggacaagttgtcttttaatgggttcattttgtgggagtattcaatcaagtgtgttgattggcaaccatgggcaccacccatgtcattggagattttgctggagattggtacgagtcgtcctaggccgtggccaaattttgcaccacctctaattccaagtcaaggatattgctcagttgtcaggcaaagtgaccacaatagcagatgtgtgaagtttccttattttgggagatgctcagccgagagtcaatgttttcagttcaaggccttgcaatacgtgttgcttcattcatggcatcaggatcctggatatgttcagtttctgcttcgacttgggggcaagtcgaattttaaggaggggagaatgtgagaggtgtccagacctagaataggtgtgaagtgtgtgtgcgtgctgggcg

SEQ ID NO: 139701 - DNA, 702 bp, Zea Mays
gttgttcagctgttttgccaccaaggttttggattatagatgatggttggcaagagacacttgactattatccagagacgttgcatcagatgcttgttgcgaatgctgatgggagtttcaagctaccagggaattctgtgaaagactttcttgactctaaaactgccttgaagatacatgttttgataacaaattttcagaacaagcttcttgaagtaatcaatgcaactgaacttcctgaatttttgggggggccatgcacttatactatgggaggatgcctgatgtctaacaaaggtccatggaacgatccagatactatgaagctttcacataacaaggaagcaaagtttacaagacataatagaggtctgctgctctggttggtgatcctaaaggggttgctaacacatacgcggtgaactggaacgaaccaccagacctgcaaatgcaagactccttcgagcgacctgagctatatcggaagcaatcagtgcaaggtgattcattttttgcttgcttgcttgcttgccgtgatgaatccaaatttcttggcattatttgaactatatacttgtgatattcgccccgatagcgggtcttttgcctttaagagcatggcccgtgttgtttggggttgtcgtccgcgatcgcattctcgatctcttttcacaattaatgccaacccctaagtctctactc

SEQ ID NO: 139702 - DNA, 1063 bp, Zea Mays
atcgggtgaaatggaacaaatcaccaccaccactccagcaatcgcaagactccttcgagccggaggcatatcgggtgaaatggaacaaatcaccaccaccactccaacaatcgcaagactctttcgagccggaggcatattgggtgggatggaagcaacatgcgcaaggagaaacagacgttgctgatgggacgacgccagcacgcggccatggcctgcatgtcgcgaccgggatgcttttcacgaggaagagcttgcttccagggacagccctaccggaaggcaccaggttcagcggccacggcttccccgatccgcagaggttcgcgctacgggcagacgcggacgccatccccttcagctacagccagctcgacgcgatcctaaggatgttccggatccctcgagggtccaagaaggcggagcaagtcgctgacacactccgggcatgcgaggccgagtcctcggacgctcatgcctgcgccacctccgagcaggcggcggcggactttgctgcctcctcgctcggggtcagggccagcgacctggtatcggtcgtcaccgccgtccacggggggaaggacgccactaggtacgtggtggcgcccgacggcgtcacacgcatcggcaaggcggcgggggccgcgaccgcggtgccgtgccacccgatgccgtacccgtacatggtccattactgccaccggccgacggacgtggaggcgctccgcgttgagctgactgggctcggagacgacggcgcgaccatcgcgatcgccatgtgccacgccaacaccatgagctgggacgaccgctacttccagatgttgaacgcgacgcgcggcgaggagatctgccacttcatgccgtggaactatgtgctatggctgccggctgccgaccttctagcgaataactaggatcaccttctaggcgggtgatacaccgtccattctaaaatgtaaaaaataaaaataaaaactatatacatagttttttattatgcacttagatatgcgttataattagatatataataaaaaaataaacgacttataatttataa

SEQ ID NO: 139703 - DNA, 979 bp, Zea Mays
cccagccggccaagctccctagtgcccagctccactgctcccatggcgtgcgccggtgccagctcgagtccctccccagccgcgtctcctcccctcctgacatccgctcttctttcttccttccccggcgccagatcccagctcgcagagcttcctctgcgcggcattcctgtgtcccgagctccctcagccatggcgcgttctccctgcgcgcccagctgcttctctccctccctctacttcttcctcgttgcgtgctcatctccctgcgtgtgctgccgcgagtccttccatggctgcgcgcgaagccctctgctcgccgcgccctggatctcctggccaccgcgcctgcttcctctctcccttctcggcctctgttccgagctcgcgcccagcttccctgtgcgcgcttagcttggagctctcgcagctcagctcgggtcttttccatggccgcgcgcacctcaagctcggctctctggtgccgcgcgtgcctctagttcgcccctgctcgaactgcgttcgccctgctgcgcgtgtcgagctcctctgttgtgtgcgcgaagttctctgttcgccacggcacgtcgagctcccgcgacgaatccttttcaagctcgccgcgacgcccggcgtcctgcctgctttgctcacctccgtcggctactcgttggtgctccaactcgtcagttgtcgttatcctatcagcgccagcacgcgaatgtggtcgtgttcatcgtattcgccaacgctctattgccgattcgactatcgtcgctggtgatagttttgcatgctgtcgttcgtcgacctcgctgattgtcgtctatccccatcgcatcgtcgacctcgcctattgtcgtcgttcgtcgtcgcgtcgcgtgtgcagctcaatatacatcaccctcatgtatcttcgtcgaacctgtcatcccctgcttgactcccaagcaaaccccctgatccacgtcctgctcgc

SEQ ID NO: 139704 - DNA, 977 bp, Zea Mays
cccagccggccaagctccctagtgcctagctccactgctcccatggcgtgcgccggtgccagctcgagtccctccccagccgtgtctcctcccctcctgacagccgctcttctttcttccttccccggcgtcggatcctagctcgtagagcttcctctgcgcggcgctcctgtgtcccgagctccctcagccatggcgcgttctccctgtgcgcccagctgcttctctccctccctctacttcttcctcgatgcgcgctcatctccatgcgtgtgctgccgcgagtccttccatggctgcgcgcgaagccctctgctcgtcgcgccctggatctcctggccaccgcgcctgcttcctctctcccttctcggcctctgttctgagctcgcgcccagcttccctgtgcgcgcttagcttggagctcccacagcctagctcgggtcttttccatggccgcgcgcacctcaagctcggctctctggtgccgcgcgcgcgcctctggttcgcccctgctcggactgcgttcaccctgctgcgcgtgtggagctcctctgttgtgtgtacgaagttcactgctcgccactgcacgtcgagctcccgcgccgaatccttttctagctcgccgcgacgcccgttgtcctgcctgctttgctcacctgcgtcggctactcgctggtgctccaactcgtcagctgtcgttatcctatccacgccagcacgcgactatggtcgtgttcatcgtattcgccaacgctctgttgctgattcgactgtcgtcgctggtgatagtttcgcatgctatcgagcctcgactcgctcggccttaatctccatcacatcgtcgacctcgccgattgtcgtcgttcgtcgtcgcgtcgcgtgtgcagctctatatacatcaccctcttgtatcgtcgtcgaacctgtcatcccctgcacgactcccaagcaacccccctgatccgcgtcctgctcgc

SEQ ID NO: 139705 - DNA, 1245 bp, Zea Mays
agccctcgctcagttggccggcctcgccttcgcatccgtccggccgcagtcaacctccggttcggagttcccattccccaccaaccaccgtctccatcgcaccgtcgcactgtcgcctcgccggccgcacctacgccgttgaagtcgctgtcgcagctgcaggacggaaagggcttcaacaagtgtgctaccaactgtccaactaccaagataagcatgcattgctgttttttctgtagtgatagatgcttttatgccaccatttggttcattttcacatgttttctttagcagaatcagtatggaaatactgctctttttttgctgtctttgttccattttctgtactatcttctccttttcatgatctttgttttggaaattgcgacatcaaatcccagtcaatctaaactttgtatgcttgcttggtttatctagtcatgtattaatactcatcacatttcagtgtctgctttgcaaaccaaattgatggttaagtgcttgcctatttgttctgcctgatttcatcgcagctcagttgtatgattgctgggtttcctacttttcagcttttgttttccgtttcatgttgtagtgttgctgtgtttcatgttttgatgagttttgttcatttatttgtagaacaacactctgtgttggtgtcaagatctatagagcaggcatttctatgggcagtgcatcaggactcgaaggaagcatagcatcatcggtttttgtgtttcattaattctcatttcaagatggcatctgctggcctaaagccaggggtgcctgttattctacgggagctggagccatcctcagagatgttcaagcaaggagcgtcccttcgagtcacaggaaggagttttactctgcttttaagaaagcaaatattcaagggtacaggcaaagctgggacaccatctcacaagcaagtcaaaggcctctaacaacagcaacgacaagctagatttctattacatcagacaacatggtgtcactcgcttggtagttctgtagccatgcagcaattctcttctccatgtcttgcacttcagctttgtccttctatagcagcacgcaccacttctgcacgaaggagatagcaatgtatatgacatcagtaggtctgttcaggaaccacttctctattgccatcttatttgtataggtcagatcatccaagttagccctgcaaacataaacatacctagccacttaaaggcaccaagttttgtttcc

SEQ ID NO: 139706 - DNA, 796 bp, Zea Mays
agccctcgctcagttggccggcctcgccttcgcatccgtccggccgcagtcaacctccggttcggagttcccattccccaccaaccaccgtctccatcgcaccgtcgcactgtcgcctcgccggccgcacctacgccgttgaagtcgctgtcgcagctgcagtctccagtcattcgatgtggagtccgcgactgccaccattcaagacggcagcgtaagtctgaaggttgacacccagcatctgagggatgtcagtttccgcacgaactcggtgtaccaattcattggtgaacttcagatccgtgaagttgatgatgcgattctactcgcgcgcatcggaaggaacgtcgatggcctcgacatgaacctttaccagcaggctctactcatccgacggcagcacgaagcaaagctgctgagctccaggagagcatgatctgcttgctatcttggagcaggaggcgcatggtggttgtagttattaggtttctttgtttctcaacagtgcaattgcatatgtaaacgtgaagagaactggaccaagaactggttaattgagagggtctgctgcatatgatttgcgatctctcttgccctccaaagggctgccatggcatgtgtagatgtgactgccaatttgtgatcatcttacttgcagcagaatgctggttttattttattgacatgagaacagccttgtggatcatgtttactgggatgctttgttgtgttaaaagttgggtcatgttcttttgttgtaaaggtataaataatggaggaggtcatggtgtgaaga

SEQ ID NO: 139707 - DNA, 972 bp, Zea Mays
agccctcgctcagttggccggcctcgccttcgcatccgtccggccgcagtcaacctccggttcggagttcccattccccaccaaccaccgtctccatcgcaccgtcgcactgtcgcctcgccggccgcacctacgccgttgaagtcgctgtcgcagctgcagtgggcagtgcatcaggactcgaaggaagcatagcatcatcggtttttgtgtttcattaattctcatttcaagatggcatctgctggcctaaagccaggggtgcctgttattctacgggagctggagccatcctcagagatgttcaagcaaggagcgtcccttcgagtcacaggaagtctccagtcattcgatgtggagtccgcgactgccaccattcaagacggcagcgtaagtctgaaggttgacacccagcatctgagggatgtcagtttccgcacgaactcggtgtaccaattcattggtgaacttcagatccgtgaagttgatgatgcgattctactcgcgcgcatcggaaggaacgtcgatggcctcgacatgaacctttaccagcaggctctactcatccgacggcagcacgaagcaaagctgctgagctccaggagagcatgatctgcttgctatcttggagcaggaggcgcatggtggttgtagttattaggtttctttgtttctcaacagtgcaattgcatatgtaaacgtgaagagaactggaccaagaactggttaattgagagggtctgctgcatatgatttgcgatctctcttgccctccaaagggctgccatggcatgtgtagatgtgactgccaatttgtgatcatcttacttgcagcagaatgctggttttattttattgacatgagaacagccttgtggatcatgtttactgggatgctttgttgtgttaaaagttgggtcatgttcttttgttgtaaaggtataaataatggaggaggtcatggtgtgaaga

SEQ ID NO: 139708 - DNA, 963 bp, Zea Mays
aagaccgccttgttgtttttgtgcctcgctagatcgttccgtaagggcacccatcgtcatagatacgattcatagcttctgccactacttgtgcgcgaagagccaagaaatgcgtcaggggttgtgaagggaaggagtgccgatggccggtggccacccggcgccgctgcggccggtggtggttgcgatgaaaggccacccagggtctggcaagtccacggcggcgcgcgccatcgcgaccgcgctttgctgtccgctcctggacaaggacgatgtgagggactgcatgttgcccctagagggcttggctgctgctgggatgctcaacgacctctcctacgccgtgctgtggcggatggctgagcgccaggtaaggctcggactgtctgtcgtcatcgattcaccgctgtcacgccgctctcacctcgacatgctgacacgcctagccggtgtgcttgtggtcgtcgtggagtgtcgccctggtgataacgaggaatggcgccggaggctggagagccgtgggtcggctgttgccaatggtggcggtggtgatggatggcataagccaaagacatgggctgagctggagaggcttctggaagggtaccaaggttgcacagactatgaaattggggatgtaccgaggattgtagtggatacaactgatccgacagttgatgcacaggtggcagctgaaaaggttgtggttttcattagatcccatcttgcttgtagccaaccatcttgtgggagacaggattcacctgtttgccattagaaaccaaaatgtacactagcttaagcattaggtaaagtttcgttgcaaaaggttgatctgttgtactgcaatgctcaaagttcttttttttatgggtgtaacctaaaggttctgttactgttgggacttcaaagggattttgttgttgttgttgtgtgatctagaggtttcgtaaaaagatgttc

SEQ ID NO: 139709 - DNA, 1227 bp, Zea Mays
aagaccgccttgttgtttttgtgcctcgctagatcgttccgtaagggcacccatcgtcatagatacgattcatagcttctgccactacttgtgcgcgaagagccaagaaatgcgtcaggggttgtgaagggaaggagtgccgatggccggtggccacccggcgccgctgcggccggtggtggttgcgatgaaaggccacccagggtctggcaagtccacggcggcgcgcgccatcgcgaccgcgctttgctgtccgctcctggacaaggacgatgtgagggactgcatgttgcccctagagggcttggctgctgctgggatgctcaacgacctctcctacgccgtgctgtggcggatggctgagcgccagaacaacactctgtgttggtgtcaagatctatagagcaggcatttctatgggcagtgcatcaggactcgaaggaagcatagcatcatcggtttttgtgtttcattaattctcatttcaagatggcatctgctggcctaaagccaggggtgcctgttattctacgggagctggagccatcctcagagatgttcaagcaaggagcgtcccttcgagtcacaggaagtctccagtcattcgatgtggagtccgcgactgccaccattcaagacggcagcgtaagtctgaaggttgacacccagcatctgagggatgtcagtttccgcacgaactcggtgtaccaattcattggtgaacttcagatccgtgaagttgatgatgcgattctactcgcgcgcatcggaaggaacgtcgatggcctcgacatgaacctttaccagcaggctctactcatccgacggcagcacgaagcaaagctgctgagctccaggagagcatgatctgcttgctatcttggagcaggaggcgcatggtggttgtagttattaggtttctttgtttctcaacagtgcaattgcatatgtaaacgtgaagagaactggaccaagaactggttaattgagagggtctgctgcatatgatttgcgatctctcttgccctccaaagggctgccatggcatgtgtagatgtgactgccaatttgtgatcatcttacttgcagcagaatgctggttttattttattgacatgagaacagccttgtggatcatgtttactgggatgctttgttgtgttaaaagttgggtcatgttcttttgttgtaaaggtataaataatggaggaggtcatggtgtgaaga

SEQ ID NO: 139710 - DNA, 1137 bp, Zea Mays
atggccaacttcgtgctctacatgtatggcaagtgtggggatgctgagacagcgagggctgtgtttgagaggatgcagatgcggagtgtgtcacgctggaatgtcatggtgtcgttgtacatccaccaagggaggatggaccttgttgtgtccatgttcgagaacatggtagagcaaaccattgtcacttggaaaaccatcatagcagggtataaccagaatgggcttgatggcatggcattgaatttcttctcacgaacgctgagtgcttcttccatggagccagatgcattcacagtggttagtgtcctatcagcttacactaaccttcgcatgctgaagattggaaaacagatgcactcttatatcttgagaactggaatgtcgtgcaggagtcagatcatgaatgctctcatctcaacttatacaaaatccagaagtattaagactgcaaggaggatcatggaccaggcagtggttgctgatctgaatgttatctccttcacggctctcctagaaggctatgccaagcttggagacacaaagcaggcaagggaactcttcgacgttatgaataatcgagatgtcattgcctggactcctatgattgttggctattagcagaatggtcaaaatgatgaggccatggaactcttcatgttaatgatcaaaagtggcccaaaatcaaacagtcatacgctttctgttgttctcagcctgtgcaagcttgacatatcttgattatgggaagcagacccactgcaaggctatgaggtccttacaggagcaatctgtctcgtcaacaatgccattatcacagtgtacgcaaggtcaggcagcgtgccactggctagaagggtgttttattagatttgctggggcaaggaaatgattacatggacttcaatgatcgtggctatggcttaacatgctttgggagaacaagtcgttgccattttgaagaaatgatccgtgtcgatatgaaaccagaccgtataacatacgtcgacttgcattccagcctacgtgcatgctggttttgtagacaaagggaagaggtactatgagtagatgtagaatgagcatggcattgtatcagagatgagccattacaaatttaatgtctttttaagagtc

SEQ ID NO: 139711 - DNA, 1543 bp, Zea Mays
ccgccaagttccctgcccgctcctccttcagctcccagccgtcgaagctctctgcgcgcaggggcttcccagccatggcagcgcccgcctccctgctcccaacgtcgtgcccagctgcctctctctctccctcagcgcgcctcccctgcatcgcgcgctccctgctccaagcttgccgtcaaagctcccctgtcgcgcccttggctcggctctgcgcgccgcgcgctgctttccgagctcgcccaaatcagacagtgccttctctgctcctccccgtctccttcctctacctccagctgctttcccatggccggcgtatggcttcgcggtcgcccaatctccctactcggttcctgccggtgctcagctcctgtttgacccgctgcgcggttcttccccacgacatcgttttccctgcgttcgctcggccctgaagttccctggcgctcgcccagctcagatttcgttgcgcactccttagttcgacacctgatgcttctccatggatggccgatgctgctccatcggttcgcgctcgtcgcgcacatggccggagctcttccctgcgtcgtgtgcgttccgtcatccttgctgtgacttcgcgtcgtgaagtttccctgcacgcgtcgagctcccgcgccgaatccagccccatgttgatgcgtctctattccaacttgtcagccacggcctcgccttggtctatgctgcagcccaccgtcaaaatcgtcggagtcgctcaactcgccaatcgcatcttggccggtcgtcgatttctttttcgccatagtacaacaccgttgttgttagatccggtctccaacccgccatggcgcttgccggactttgccggtgaagtttgtcgtcgtcctctggtcccagcccgacccatccgtgcactcgctcctcatccatcgagcttcgcgcgtgctcttgtttgtggtcgagctgctgaactcgtccttccttgttcctgacttcatcgtcgccagagtcctcactggatttgtgtcctcgtcagctagctccaagcccgatctcgtcgtcgttctgtacgtcatcaagaaatcccaagaatcaggtgaagacgaagctagccgggtgatattcaccaagtgctcgacaaaagctcgaacaagtcgtcgatcaccatcctcatctacgtcaagccccaagccgtgaagacactcttatgctggccacgcgtcaccagctcgataaaaaggaatcccatgggtatctggtcaagaatagaaactgtgtgcctcgctcatcagacgtgtgtgatcaatgacgtcaaccggaaaccgtcatcgtgcttccgactatcgcgtcgaattagtcagggtaagcaaatttgttattcgtgctagtggattgatgaatggtttgactaggtataatatttattagattgtctgagtcgctttggtaatttgatcgatgtcgtaggatgaaagaggtcgcaataggtcctagtgcttgcgggattgcaggtgttaaaaatgtgatgttttattaatatatatgtgatacacaggtt

SEQ ID NO: 139712 - DNA, 465 bp, Zea Mays
atggccgatgctactccatcggttcgcgctcgccgcgcacatggccggagcttttccctgcgtcgtgtgtgttccgtcatccttgctgtgactttgcgtcgtgaagtttccctgcacgcgtcgagctcccacaccgaatccatccccatgttgatgcatctctgttccaacttgtcggccgcggcctcgccttggtctatgctacagcccgccgtcaaaattgttggagtcgctcaactcgccaatcgcatcttggccggtcgttgatttcctattcgctatagtacaacaccgctgttagatctggtctccaacccgccatggcgcttgccggactttaccggtgaagttcatcgtcgtcctctggtcccagcccgacccatccgtgcgctcgctcctcatccatcgagcttcgcgcatgctctcgtttgtggtcgagatgctgaactcgtccttccttgttcg

SEQ ID NO: 139713 - DNA, 482 bp, Zea Mays
gacacacattgttaaaatgtcatttaacataaaaatattgtaggcacagcaaggcatatttgcaaggagtgaatggtttcttagcttttgcatttagaaatcagcagtaggaagtaagatcttatgccttgtagaaagtgtgtcaactcattttggaaagaggcaagtgaagtacgtgagcacttgatatgtgatgggtttcttaaatggtacatgatatggaacttacatggagaagctagctcttccgtgaatcatgggaactatgacgatgctgaggttatagtggagcctaacgagaatgatgacatatctggtttgcttagagatttagttgttggtttagatgataaaggtgattttgaggacaatagttccattattgggtgttgtgatgagctacggccattgaaaaattggtagcagaaaacaaaaaagagttgtatcctaattgcaaaaaatatacacagttgtgtttccta

SEQ ID NO: 139714 - DNA, 1784 bp, Zea Mays
acactctttggttgaactcttcgcaccttaccttctattctcaaggaaacctttatccatggcccgaggtatcatactgctcctgcttgtgacccccctcgccatctccatggcactgccatcactatcaacgagaatcgaagggagtgtcataggggagagatccaacttgttctcacagctgcactccgataattctagccctacagaaaacaaactccaaccaggtgaaaagtcctttgcatcggaggcatatgcggtgaactggaacgaaccaccagaccaacaatcgcaagactccctcgagcagctagagccgtatcgagtgatatggaagcaaccagtgcaaggtgaaaagtccttcgtatccgaggcatatccggcgaaatggaacaaaccaccatcaccaagcaagcaatcgcaagactccttcgagccagaggcatatcgggtgaaatggaacaaatcaccaccaccacaccaacaatcgcaagactccttcgagtcggaggcatatcgagtgaaatggaacaaatcaccaccaccacaccagcaatcgcaagactcctttgagccggaggcatatcgggtgaaatggaacaaatcaccaccaccacaccaacaatcgcaagactccttggagcaggaggcatatcgggtgaaatggaacaaatcaccaccaccacaacaacaaacgcaagactctttcgagcaggaggcatatcgggtgaaatggaacaaatcaccaccaccacaccagcaatcgcaagactccttcgagccggaggcatatcgggtgaaatggaacaaatcaccaccaccacaccagcaatcgcaagactcctttgagccgaaggcatattgggtgggatggaagaaacatgcgcaaggagcaacggacgttgctgatgagacaacgccagcacgtggtcatggtctgcatgtcgcgaccgggatgctcttcacgaggaagagcttgcttccagggacagccctaccggaaggtaccaagttctgcggccacggcttcctcgatcccgagaggtttgaactacgagcggatgcggatgccatcccgttcagctacagccagctcgacaccatcctgaggatgtttcggatccctcgggggtccaagaaggcagagcaagtcgccgccacgctccggacatgcgaggctgagtccccagaggctcatgcctgcgccacctccgagcaggcggcggccgacttcgctgcctcctcgctcggggtcagggccagcaagctggtcgcgctcgtcaccaccgtccatggggggaaggacgccactagatacgtggtggcgcccaacggcatcacacgcatcggcaaggcggcaggggccgcggccgtagtgccgtgccacccgatgccgtacccgtacatggtccactactgccaccagccggcggacgtggaggcgctccgtgttgagctgaccgggctcggagacggtggcgtgacaaccgcgatcgccatgtgccacgccaacaccatgaactgggacgatcgctacttccaaatgctgaacgtgacgcgcggcgaggagatctgccacttcatgccgcgcaactatgtgctctggctaccagctgccgagcttctagggaactagtggcaatgccactatgttaggtgtcgttgctttgataaaatgaagtgtatgacaatgacagcatcaacaattgttcgtatgaacatatggttggacatgataactgcgagaaagagaggatatatgttgttgcgccctatgaattgtg

SEQ ID NO: 139715 - DNA, 1577 bp, Zea Mays
acactctttggttgaactcttcgcaccttaccttctattctcaaggaaacctttatccatggcccgaggtatcatactgctcctgcttgtgacccccctcgccatctccatggcactgccatcactatcaacgagaatcgaagggagtgtcataggggagagatccaacttgttctcacagctgcactccgataattctagccctacagaaaacaaactccaaccaggtgaaaagtcctttgcatcggaggcatatgcggtgaactggaacgaaccaccagaccaacaatcgcaagactccctcgagcagctagagccgtatcgagtgatatggaagcaaccagtgcaaggtgaaaagtccttcgtatccgaggcatatcgggtgaaatggaacaaatcaccaccaccacaccaacaatcgcaagactccttggagcaggaggcatatcgggtgaaatggaacaaatcaccaccaccacaacaacaaacgcaagactctttcgagcaggaggcatatcgggtgaaatggaacaaatcaccaccaccacaccagcaatcgcaagactccttcgagccggaggcatatcgggtgaaatggaacaaatcaccaccaccacaccagcaatcgcaagactcctttgagccgaaggcatattgggtgggatggaagaaacatgcgcaaggagcaacggacgttgctgatgagacaacgccagcacgtggtcatggtctgcatgtcgcgaccgggatgctcttcacgaggaagagcttgcttccagggacagccctaccggaaggtaccaagttctgcggccacggcttcctcgatcccgagaggtttgaactacgagcggatgcggatgccatcccgttcagctacagccagctcgacaccatcctgaggatgtttcggatccctcgggggtccaagaaggcagagcaagtcgccgccacgctccggacatgcgaggctgagtccccagaggctcatgcctgcgccacctccgagcaggcggcggccgacttcgctgcctcctcgctcggggtcagggccagcaagctggtcgcgctcgtcaccaccgtccatggggggaaggacgccactagatacgtggtggcgcccaacggcatcacacgcatcggcaaggcggcaggggccgcggccgtagtgccgtgccacccgatgccgtacccgtacatggtccactactgccaccagccggcggacgtggaggcgctccgtgttgagctgaccgggctcggagacggtggcgtgacaaccgcgatcgccatgtgccacgccaacaccatgaactgggacgatcgctacttccaaatgctgaacgtgacgcgcggcgaggagatctgccacttcatgccgcgcaactatgtgctctggctaccagctgccgagcttctagggaactagtggcaatgccactatgttaggtgtcgttgctttgataaaatgaagtgtatgacaatgacagcatcaacaattgttcgtatgaacatatggttggacatgataactgcgagaaagagaggatatatgttgttgcgccctatgaattgtg

SEQ ID NO: 139716 - DNA, 1648 bp, Zea Mays
ctcttcgcaccttaccttctattctcaaggaaacctttatccatggcccgaggtatcatactgctcctgcttgtgacccccctcgccatctccatggcactgccatcactatcaacgagaatcgaagggagtgtcataggggagagatccaacttgttctcacagctgcactccgataattctagccctacagaaaacaaactccaaccaggtgaaaagtcctttgcatcggaggcatatgcggtgaactggaacgaaccaccagaccaacaatcgcaagactccctcgagcagctagagccgtatcgagtgatatggaagcaaccagtgcaaggagcaacggacgttgctgatgagacaacgccagcacgtggtcatggtctgcatgtcgcgaccgggatgctcttcacgaggaagagcttgcttccagggacagccctaccggaaggtaccaagttctgcggccacggcttcctcgatcccgagaggtttgaactacgagcggatgcggatgccatcccgttcagctacagccagctcgacaccatcctgaggatgtttcggatccctcgggggtccaagaaggcagagcaagtcgccgccacgctccggacatgcgaggctgagtccccagaggctcatgcctgcgccacctccgagcaggcggcggccgacttcgctgcctcctcgctcggggtcagggccagcaagctggtcgcgctcgtcaccaccgtccatggggggaaggacgccactagatacgtggtggcgcccaacggcatcacacgcatcggcaaggcggcaggggccgcggccgtagtgccgtgccacccgatgccgtacccgtacatggtccactactgccaccagccggcggacgtggaggcgctccgtgttgagctgaccgggctcggagacggtggcgtgacaaccgcgatcgccatgtgccacgccaacaccatgaactgggacgatcgctacttccaaatgctgaacgtgacgcgcggcgaggagatctgccacttcatgccgcgcaactatgtgctctggctaccagctgccgagcttctagggaactagtggcaatgccactatgttaggtgtcgttgctttgataaaatgaagtgtatgacaatgacagcatcaacaattgttcgtatgaacatatggttggacatgataactgcgagaaagagaggatatatgttgttgcgccctatgaattgtgatatagtgttgtggtggaggatgcatcaaatgatggggaagctaccttagttgtgcaaactacttttaagaactccatttttcttactaccatcaaagacggtccttctcattctatggttgaggataatacagaacctgttttggtagaggacacaccagttgatgatgaagctaccttggtagtgcatggtccttctctttctatggttgaggataatatagaaccttgactggtagaggatcctccgatagatatagtgtcttcttcatccacaagagctagaaaggatgaggaccttgcatgcccgcctttagctcccccctcaccatcaactacgacagttaggcgttggtgtaagtcctataatatctcgtcgcttcatcgaagtgctcgtcttgcacaacgtggtgtgtgttt

SEQ ID NO: 139717 - DNA, 101 bp, Zea Mays
gagactggaccgaccaaaagctactaaaagcatgtccatactaaaagcatatccagtgatgctttcgattttgcactgcgagaaaatcaacttttagaaag

SEQ ID NO: 139718 - DNA, 633 bp, Zea Mays
atgatgcaccagcaacacaacaccaccatatcgccgccgtcgtgggcggcggcggcggcggcggcggcgagaggcaagagaggcgtcgtcagcttgcaggggccgaggccgctgccgctgatcctgcctccgggcaccaccaccaccacgtcgtcgtcgtcgtcttcaacgccccggccggccaagagaccccgccgcgtcgtcaacagcggcggcggcgacgacgacaacgtcagggcaccgccggcgttggccgcgacgccggggccactgatcctgtacgagcacacgcccaaggtcatccacgtacacgcggacgagttcaaggccctcgtgcagaggctgaccggccggcagctgaccccgccgggccgcggcggcggcggcggtcaggaggccgtgattcgcccgctgccgtcgcagcagacggctggcgacgaccccctggtgctcacgctcgggcacgggcagaagcatgccgcgctcccgccgccgctgccggttgttgaccatcacgcgccgcccgtgctgctgccttcgccaggcggtgctgttggtggtctcctcctctccccgggaagcttcctcttctcgcccaccaccatgcaggccatacaggagctcatcagctga

SEQ ID NO: 139719 - DNA, 612 bp, Zea Mays
ctcttaggcgtcacccgtttcctacagacagatccacaagtccaggaactaaagacgcagttggcaacaggaactgcaggagaagggtgggctgaaagagatggattattgatatgccggggcagagtcttcgttccagataattcaagtgtgtgggatcagttgctgatagctgctcatgcagcaggtcatgagggagtagagaagaccttgcatagatggaggagctcattccacaatacccatattaggagacgggtacaggaatttgttcggggctgtgcagtctgccaaagaaataagtccgaacatcttcaccctgctgggctattacatccattaccagttccctctgaagtatggagtgatatctccatggacttcgtggaagggtttccaaaggtggggggtaaatcggttatcctcacagtggttgatcgtttctccaaatttgctcacttcattcccttgggtcacccttattcagcagcttcagtagcacgggcattttttgatgatattgtcaggttacatggcctgccctgttcgatagtaagtgtaacacctcaggtgttaccatggctagagcacaccttggtactaaggattgtg

SEQ ID NO: 139720 - DNA, 1030 bp, Zea Mays
acgtaccgaccggccggccgggcgacccagagatgtggctcccgttcctgtacccgccgccggcgtcggtgtacgtgacggtgatgtccgtcgtgtcgctcttgtccgcggcgaacgccggcctctccgagctccgcggcaaccacgtgtcctactccaagttctggcacgtggccgcggcggcgggcggcgacggcagcaacaagcagcgcgcgcgggccggtggcggcgccgtcttgacaggccgggacgggatgctggtgacctacgccccggcgttcgccgccgccgcggcgtccttcgccgtgccgggcgccgtggaaggcgcgcgcgcgcggctgctcagcgccgcgctcaccgcccacttcctcaagcggcttctcgaggtgctgttcgtccatcggtacagcgggagcatgccgctgggcacggcggtcggcggcgccgccaactacttggtcgccacggccaccatggtgtacgcgcagcgcctcagccgcagcgtccaggacccgcccgtggacctgcgcggccccggcgtggtggtcttcgccgtcggcctcgccggcaacttctaccaccactgcctcctctcgaggctgagggcagacggcggcggcagcaaggggtacaagatccccaggggcgggctgttcgggctcgtcgcctgcccgaactacctcttcgagatcgtcgggctcttcggggtcgccatgatcgcgcagacggtgtacgcgctcgcctacgccacaggagcggcggcctacctcgccggccggagctgcgccaccaggaggtggtaccagtccaagttcgacgagttcccagcgaggatcaaggcgttggtgccgtatgtgctgtagccaactcccagctctggctctatgtttgaataaatatataagaaacaagtaagagcctctttggcagggatttgtagcttttctctatgaaaaaagctacaactatatcaaacacttttttcaatgcactatgcattctttatcgagtgtcacaaacactcggtaga

SEQ ID NO: 139721 - DNA, 1471 bp, Zea Mays
gttttttcttattctctctcaaaaaaagttataggagcttaggctaagatgctctaagcgtggagctaccgagggccgaggccaaataatacaatcaattattgggctcaacgtttgagggcacgtttgagatgtgcgtctttttgtagaacccatcaccatcagaccagactgctgttgcctgtcccagaaagccagctatgtcgtcgtcggcgccgcagacggagccgcacgtggtggaggactgccgcggcgtgctgcagctgatgagcgacggcacggtgcggcgcagcgcggagcctccggcgctgttctcggcggtggacgtctcggaagacgagtgcggcgtggagtggaaggacgtgacgtgggacccggcgcacggcctgaacgcgcgcctgtaccggccgcggcacctgggcgcggccaacgacgcgcggatccccgtggtggcctacttccacggcggcggcttctgcatcgggtccgggcggtggcccaacttccacgcctggtgcctccgcctgtgctccgagctccccgccgtggtgctctccttcgactaccgcctggcgcccgagcaccggctcccggccgcccaggaggacggcgccagggccatgtcctggctgcgctccgccgccgccgggcggcggcgacccctggctcgccgacgcggccgacttcgcgcgcgtcttcgtggcgggcgactcggcgggcggcaacatcgcccaccacgtcgcggtcgggctcggcagggccggcctgggacccggcgtccggatccgcggcgcgctcctcctggcgccggccatggccggcgacgcccgcacgcgcgcggagcagctggagtgcccgcgcgacgcgttcctcaccaccgagatgtgcgacaggtacgcgcggctggcgctgcccgagggcgccagcagggacgactcggtgctcagcccggcggggccgcgggcgcccgggctggaggccgtggagatggcccccgtgctggtggtggccggcgggcgcgacgtgctgagggaccggaacgcgcagtacgcgcggcggatgaaggaggagtggggcaaggaggtggagtacgtggaggtcgccggcgccgaccacggcttcttcgtggtggacccctggtcggagcgcgccgacgagctcgtccgcatcgtgcgccggttcgtcgtggaccacatggacacggagtaggacgggtgacctgatgatgaccaggctgccggtgccggtgccggtgccggaggggccatcatggtttgttgccacgcttggatcatgaataattgaatggctttgcttttcttctttcctgttggtgtcttttcttttcttgattacgattggtttgattatccgtggatgcatttcttgtttttttttcttgagtgattgatcaccttatccactactacaccgaaatcagaatgttcactcctgagattcgatccgatcc

SEQ ID NO: 139722 - DNA, 378 bp, Zea Mays
caaccatctaagcaaactgacactttttcttttaatcacagaacgttgacgagtatacagaccggctaaccaacaatgaattgtcatcaccaaccaaaaggataaagcacacccaggttagcaaagccatgccagattctacatgttccaagaatgacaacatttagtccatcctgaaatacatcaaggtatgaggctccatcacttttggtcatgagacttatgtacatattaacctgatgtcgaagccttcctaaaactgtgtctatgcaagaatggctaggtcacttttgatcagtagacttttatttgcacgcatagaaaaggccccatcacttttggtcataagacttttatgtacatattaacctgatgttg

SEQ ID NO: 139723 - DNA, 1151 bp, Zea Mays
ggatacgtgtatatgccaaccatgcccgcagtttcagctgccaccggcgcgtcgtcacctccggcggcggccaacgccgtcgtggaggacatctacggcttcctgcgcgtcctaggtgacggcaccgtcctccggtcaccggaggaacccgcgttctgcccggcctccttccccagcagccacccgtccgtgcaatggaaggaggccgtctacgacaagcccaacaacctccgcgtccgcatgtacaagccgtccgcggccggccggacgagggagaagctgccggtgctcgtgcacttccacggcggcggcttctgcctggggtcgtgcacgtgggcgaacgtgcacgccttctgcctccgcctcgccgcggaggccggcgccgtcgtgctctccgcggggtaccgcctcgcgccagagcaccgcctccccacggcggtcgacgacggcgcgggcttcctgcgctggctgcgcgaccagtcgtccgccgccgccgacggatggctcgccgaggccgccgacttcggccgcgtgttcgtcaccggcgactcggcgggcggcaacatagcgcaccacctggccgtgcgcgccgaggccgacgccgacgtcgacgtcctccgcccggtcacggtgcggggctacgtgctcctgatgccgttcttcggcggcgtccggcggacgcggtcggaggccaagtgccccgccgaggtgctcctgaacctggacctgttcgaccggttctggcggctggcgctgccgcccggcgccaccagggaccacccggccgcgaacccgttcgggccggacagccccgacctgggctcggtgcacttccgggcgccgctcctggtggtggtcggtggcctcgacatgatgcgcgaccgcaccgtcgactacgcgcagcgtctggcggccatgggcaagcccgtggagctcgtcgagttcgccggcaagccccacgggttctacctgcacgagccggggtccgaggccaccggcgagctgatcggcctcgtcagccgattcctgcgcagttgcgaggcgcgcgcgggtgcttgatttgcccggtgcaatgtgccgactgtaacggacctcgatctcgcatcaaggttcgtgcatgtgtcttgttgtcgtgctgcatgcacgacgcg

SEQ ID NO: 139724 - DNA, 832 bp, Zea Mays
cgacgacgaccagggtgggcgcgaagtcgacggcgtccagcggcggcgcgcccgggccgaacgggttggccacggggtggtcgggcgtggcgccctccggcagcgacaggcgccagtagcggtcgttgagggggcggtcgaggaaggcgtcggcggggcactcggcctccgaccgcgtgcgcgccacgccgccgaagaatggcatgagctggacgtatccccgcacggcgacgggggccaggtccgcgggcgagccgccgaagcgcacggcgaggtggtgcgcgatggtgccgccggccgagtcgcccgacacgaagacgcggccgaggtcggcggcctcggcgacccaggggtccccgccgccctgcctcgccagccacaggaccgccgccgcgccgtcgtcgatggcggcggggaggcggtgctcgggcgcgaggcggtagtccggcgccaccacgagcgcgcccaggtcggaggccaggcgcaggcagtagttctggcagttgggccaggcgcgggacccgatgcagaagccgccgccgtggtagtagaagaagaccggcaggcgccgcccggccccggccccgcggtcccgggggaggtagaggcggagcgccagcccgcgggcctcgtcgaacgtcacgtccttccagtcgaccgtgccgtcgtcccgcaccggtgtcgcgaaccccggctgcgcgcgccgcaccaccgtgccgtcgctgtacacgaacagcacgccccggcactcgtccacgacgacccgcggcgcggcctcggacgccatgggtgggtgggcgctggcgcgtggctggagtggtcgagtggagcg

SEQ ID NO: 139725 - DNA, 1615 bp, Zea Mays
atatggcgcacggttctgccttgcacccgcgagaccctccactccgcgcagcaccagccgccatccccgcccgccatctgcgcgcgtctggcgtctccctcgcccccgctctcctctctgctgtccacgccctctgctcgcgtgtcttccagccacccgcgagcagagccttcgcccccggatcccacgcccgcgagcagagctgctgtccatgccgtcggatccgctcctccctcggaaggagaatctccaaatctcgccaccatccccgcctaccatctgcgcgcgttggccgtctaccggctacgcgcatgtgactgtcgttggatcccaggtctcgcccaattccaagcgcccccgcttcgagcgtcgcccccaacaagacgtccggatctgcgctagccctagctcgcgaggtcgacgccgatggatccaaggacaccagcgtcgcccctctccgagctcccccaatggccgccgcggggatgttctgctggtccacaccaagtgcgccgtccacaccaagctcctcgccaacgacttcctcctcttttccatggccgcgagctccgctagacaccgctgtcttcgaccctgctgcgccaacaagtgttcgaagaagagggaaatcgagcgccagatggccacggccaagctattcgcggaggaacagctcgcagaggttgtcgccctcaagagaggcatcttcgtggggactggttgttttgctgagaaaaaaataccgatcatggagatacatggagccaaatgttatctgatataccagcttccatcgcttgggtttttcttgttggctacctgtaatgaatcagtggttagcaccttctgttggtttatccaaggccagaggaaggatctcaatattcgatggtgtacagaagagtttaccggttgtttcacccatcttgttattcactatcttgatattcaccatcctgatcagaatgtggccaccaatggccaccatcgagtttttgacatcacacctgaaaatagcaatattcttggtcctcacttagatacatgtctgaaaactttggtattttctgaagagtggtctgaatcagcagtcttacttgtcctatcaggaatgaaagagcctggaccaacaactcttgctttagggattgatttgacctcattggggttgaatttgaactcccaagataatctttacaagacatttggctctccgtggtcaagtgagccagctgtaggagaacctgattatcagatcccagcttgtttctctgcaaagccaccaccagcactgcaaaagtttcaccctttgacactattctacatcttttacagcatgcctaaagatgccactcagttatatgctgctaatgaactcagctcaatatctagcgtgcttttggaagtctgttcaaggggtggagtgaggagaagatatattttgctcccacatacaagtactcttgcaattcagattcttatgctggagagactgccacatcaaagaaaaagaggagaaccccagcctggtgtgaaagaatactatggcatggagatggcactacagcagtctgtgtccttaagcaaatcacaaaacactgcactagaccagtga

SEQ ID NO: 139726 - DNA, 1566 bp, Zea Mays
aatgtaactgaatgcaattctctctgctttgtcatatgaaaaacaaacatgctcatgcattgccagttttttaacattacaggtgctattgcacatccataaattaaattacttggtatgaaatgttgctatcatcaacatgcaggccataatgattggtgtagacttgtcagcacgagaatactacattcctggtccttctggctcttacctaaactatggggctgctgctagtgaggtagagattgatcttctcactggagcctccacaattgttcgaagtgatcttatatatgactgtggccagagcttaaaccctgctgtggacttgggacaggttgaaggggcgtttgttcaaggaatcggctatttcatgagtgaggaatatgtcaccaactcagatggattgcttatctctgacgggacttggacatacaagatcccaactgtggacaccatcccaaagcagttcaatgtgaagttacttaacagtggattccacaagaaacgcgtgctctcttcaaaagcatctggggagccaccgttgcttcttgcagcttcagtgcactgcgcaacaagagaggcaattagagctgcaaggaacgaacagcactgctctggatccaaaccttcaccatcccattttgatctggaagttcctgccatcatgcccgtggtgaaggagctgtgcggcctggacaacgtagagaggtacttggagagcctgctgagctccgaatgaaaagcctactctcaccgtcagcacttgttacccttactcccttaggccttgttcgtttctgtcggatcgcacccggaatcgttccagctaatcaaagtttatataaattagagaaacaatccggttaggaatcgttccgacccaccaatccggcacaaacgaacaaggccttagggcctgttcgtttttcacggacctggaacggttcctggccggattgtttctctaatttatgtaagttttgataagttggaatgaattctggtctaatcctggacaaacgaacgggcccttagccgtacaataccagacgtagatagcataacgatagcacaatgcgcgattgtgccgaagtcatcagagaagagagaatcatagctgttagatgatatcaccaagtcttttgcacctacgtcttgtcagcgagaacattttgggtttcgaacaagacagacttcctctgtgtgtaaaaactttgggcatacccccctcttctcatctccattggtgagattggtgtgtacatgctattgtagttcagagttcagacagagtgacacggatatcagagcagatcataagaacgtacttgcagcgatggaactgagattattttctatattctttggccactgaatgtgcttcaaatgacagcagcagcaacattttgtatgtatcaggagaaggacgcactcctggtagctcatgtgtaccattttacaactcagctcaagatgtatgagcctgtttctttgcctgaactaagctgtcctacggcctggtagggttgagtagagccggaatattctcaaacaggtttggtg

SEQ ID NO: 139727 - DNA, 1373 bp, Zea Mays
aatgtaactgaatgcaattctctctgctttgtcatatgaaaaacaaacatgctcatgcattgccagttttttaacattacaggtgctattgcacatccataaattaaattacttggtatgaaatgttgctatcatcaacatgcaggccataatgattggtgtagacttgtcagcacgagaatactacattcctggtccttctggctcttacctaaactatggggctgctgctagtgaggtagagattgatcttctcactggagcctccacaattgttcgaagtgatcttatatatgactgtggccagagcttaaaccctgctgtggacttgggacaggttgaaggggcgtttgttcaaggaatcggctatttcatgagtgaggaatatgtcaccaactcagatggattgcttatctctgacgggacttggacatacaagatcccaactgtggacaccatcccaaagcagttcaatgtgaagttacttaacagtggattccacaagaaacgcgtgctctcttcaaaagcatctggggagccaccgttgcttcttgcagcttcagtgcactgcgcaacaagagaggcaattagagctgcaaggaacgaacagcactgctctggatccaaaccttcaccatcccattttgatctggaagttcctgccatcatgcccgtggtgaaggagctgtgcggcctggacaacgtagagaggtacttggagagcctgctgagctccgaatgaaaagcctactctcaccgtcagcacttgttacccttactcccttagccgtacaataccagacgtagatagcataacgatagcacaatgcgcgattgtgccgaagtcatcagagaagagagaatcatagctgttagatgatatcaccaagtcttttgcacctacgtcttgtcagcgagaacattttgggtttcgaacaagacagacttcctctgtgtgtaaaaactttgggcatacccccctcttctcatctccattggtgagattggtgtgtacatgctattgtagttcagagttcagacagagtgacacggatatcagagcagatcataagaacgtacttgcagcgatggaactgagattattttctatattctttggccactgaatgtgcttcaaatgacagcagcagcaacattttgtatgtatcaggagaaggacgcactcctggtagctcatgtgtaccattttacaactcagctcaagatgtatgagcctgtttctttgcctgaactaagctgtcctacggcctggtagggttgagtagagccggaatattctcaaacaggtttggtgtgaaaaaaattgttgtaatctgcgagttgtgggaaaagctgttgtgggctgtgagcta

SEQ ID NO: 139728 - DNA, 1185 bp, Zea Mays
gaacaagacgaggcaaacacccctggaaatggaaagcaatttttaaaaaactttccatggcacttgccagccagccgcctacctgccgaaagagatcctcgaatggcccacctgccagcctcagcacccgcagcgttaaccctctgcccacccaacctcttccccccagctcaaagcatcctctgcggcgcaacggccacaccttccccggtcccgcctccgtctgtcccgcggcctccgctctcctcgccgcccgcccgcctgtccctccctctctctccctccctcctcgccgccatgaacaacctcctcacggattcctttgagctccctcggcgggactcctcaagagacgcagatattgaaatgggaatgcatcaggctgatgcttcagacaacttgaaagatttcttgaagaaggtcgatgcaattgagagtataattgcaaagctgtcaaatctattgaataagctccagactgcaaatgaggaatccaaagcagttacaaaagcaagttccatgaaagcaattaagcagcggatggagaaagatattgatgaagtggggaaaattgctcgtcaggcaaagacaaaagttgatgaactggaaagagataacctatcgaataggcaaaaacctggatgtggaaagggttctgccgtggaccgatcaagagagcaaactactggagcagtgaaaaagaaattgaaggaacggatggatgattttcagaccttgagagaagcaatcaggcaagagtatcgagaggttgtcgaaagaagggtttttactgtaactggtaatcgtcctgatgaagagacaattgatgacttgatagagaccggaaaaagtgagcaaatattcaaagatgctatccaacatcagggaagaggccagatactggacacagttgctgaaatacaggagcgacatgatgctgtaagggatctagagaggaagcttttggagttgcaacaggtgatgcttttttttgcataagttgtttgtaataatacattatgttacaaaagctatgacattcaacgaactatacagtctggtttccaaaagaaagactctaaaaataacactaactggtgtagttattgcgtccctagctcatgtgattacgtgtggtctgggatggggtaggcagtcaactcttggagctggctgctgggatta

SEQ ID NO: 139729 - DNA, 1571 bp, Zea Mays
gaacaagacgaggcaaacacccctggaaatggaaagcaatttttaaaaaactttccatggcacttgccagccagccgcctacctgccgaaagagatcctcgaatggcccacctgccagcctcagcacccgcagcgttaaccctctgcccacccaacctcttccccccagctcaaagcatcctctgcggcgcaacggccacaccttccccggtcccgcctccgtctgtcccgcggcctccgctctcctcgccgcccgcccgcctgtccctccctctctctccctccctcctcgccgccatgaacaacctcctcacggattcctttgagctccctcggcgggactcctcaagagacgcagatattgaaatgggaatgcatcaggctgatgcttcagacaacttgaaagatttcttgaagaaggtcgatgcaattgagagtataattgcaaagctgtcaaatctattgaataagctccagactgcaaatgaggaatccaaagcagttacaaaagcaagttccatgaaagcaattaagcagcggatggagaaagatattgatgaagtggggaaaattgctcgtcaggcaaagacaaaagttgatgaactggaaagagataacctatcgaataggcaaaaacctggatgtggaaagggttctgccgtggaccgatcaagagagcaaactactggagcagtgaaaaagaaattgaaggaacggatggatgattttcagaccttgagagaagcaatcaggcaagagtatcgagaggttgtcgaaagaagggtttttactgtaactggtaatcgtcctgatgaagagacaattgatgacttgatagagaccggaaaaagtgagcaaatattcaaagatgctatccaacatcagggaagaggccagatactggacacagttgctgaaatacaggagcgacatgatgctgtaagggatctagagaggaagcttttggagttgcaacagatatttatggacatggcagttcttgtcgaggctcaaggagacatgatcaacaacatcgagacacatgtctcgaatgccaccaaccacatacaacaaggcgtgagcgcgctccagaacgcgaagaagctgcagaagaactcgaggaagtggatgtgctacgccatcatcttgctgctggtgatagtggcggtcattgtcgtcgcggtcatccagccatggaagaagtgagcctagggtggctctaaacagggaggagggcgtgggagatacgtttttttttggctgtctgtgtaatatctgtgcagttgttgtgggtggttctgtgatttatggttgtacttatggtcggcaccagagaagctttggtatttccattctttctgtttgggatagttcgtgcagtccattgaccatagctctcagaaatgttattgtggtgaccatatattcatatgtcggtcagctgatgaaaagaatggtgcttctgaatctttccacaaacagtgtgctggtgcccggtaatggctgttggattaatgtaggtttgattcaattaatatttaataatagtcaatgctaatagtctactttaa

SEQ ID NO: 139730 - DNA, 1948 bp, Zea Mays
taaggctagatggctatagcactagcgtttggaggcacagaaccccccaatccaggcgggcaatccccacaggccacaatggcgtcgctgctgcgcctcccctcgctgctgtccccgtccaagcccctgctccggcgccggctgccggcggcgaggctcgcggcatccgccgcatccaggggtcaagcctcggcgaccgcgggcgcggcggcgccggcggccgcggagacccgcggcggggacagggaggggcaggtcacgccgcggtccgcggacttcaacgcctggtacacggacgtcatcgccgctgccgagctcgcggactacgggcccgtgcgagggaccatggtcattcgcccctacggatacgccatctgggaggccatccaggattatttgaatgtcaaattcaaggagacagggcacagcaacatgtacttccctcagttcattccatactcatttatagagaaggaagctagtcatgttgaagggtttagcccggagcttgcattggtcaccattggaggaggaaaagaactagaggaaaagcttgtggtaagaccaacaagtgagaccattgtaaaccacatgttcaccaaatggattcagagctatcgtgatcttcctctcatgataaaccagtgggctaacgtgacaagatgggaaatgcggactaaaccattcatccgaactcttgaatttttatggcaagaaggccatacagcccatgccacccttgaggaggcagagaaggaggcgatgcagatgattgatgtatataccaaatttgcctttgagcatgctgcaataccagttattccaggtagaaaatcaagagtagaaacatttgcgggtgccaatcggacctacactatagaagctatgatgggtgacaagaaggccttacaagctggaactagtcacaaccttggccaaaacttttcacgagcttttggaacacagtttatggatgaaaatggtcaaatcgaacacgtctggcagacctcttgggctattagtactcggtttgttggtgggattatcatgacccatggcgatgatgccggtctaatgcttcctccaaggattgcacccattcaggtcataatagtaccaatatggaaaaagggtgatgagaaggctgttgttgtggaagctgtagattcagttcaaaaaatactcaaagaagcaggaattagagttaaagtggacgactcagagctgcgaactcctggatggaaattcaatcactatgagatgaaaggggttcctgtaagaatagagataggtccacgtgatgtcacaaataagagtgttgtggtttctaggcgtgatgtccctggaaagcaaggaaaggagtttggagtgtctatggagccttcgatattggtgaaccatataaagggtcgtctagatgacatacaagcatcccttttacagaaggccataacattccgtgatagtaacattgtcgacgtaagctcatatggcgagctgaaggaagctatttctgaaggaaagtgggctagaggtccttggtcagctagcgatgctgatgagctgaaagtgaaagaagagaccagcgccaccatcagatgctacccattcgagcagcctgagggcaccaagaaatgcttcatgactggcaaccccgcagaggaagtcgcaattttcgcaaagtcatactaggcccactgtgtgtccactgtcagagataagaacagcatttccttttcaattttataggattgtaccctgtctacctaaggtccagattgatgacggttcatggaacagcattgtgtgctgctgatatttaaaatgtaaatttgataatcaataggtcaattttgttccactaacactggaggtaagttgtttgcctactcagtatcaaatgtttcaaacaagttccccaatatgctaaatcatgcaagttatcaca

SEQ ID NO: 139731 - DNA, 1789 bp, Zea Mays
tttttttgttgatctggtgtgatgcctgtacctttctgtatgaaacgaaacgatattcttccaatcatgtagtgcagccgtggattatggtcaatgggagcatcgttatgcataacgtgacaaatttgacatactgtttggctttacatctgaatgctcctcttgttatgtgatacttttcagtgttgcacttcatcaatacctcaatatttttgttgccgatttgttgtaggattatttgaatgtcaaattcaaggagacagggcacagcaacatgtacttccctcagttcattccatactcatttatagagaaggaagctagtcatgttgaagggtttagcccggagcttgcattggtcaccattggaggaggaaaagaactagaggaaaagcttgtggtaagaccaacaagtgagaccattgtaaaccacatgttcaccaaatggattcagagctatcgtgatcttcctctcatgataaaccagtgggctaacgtgacaagatgggaaatgcggactaaaccattcatccgaactcttgaatttttatggcaagaaggccatacagcccatgccacccttgaggaggcagagaaggaggcgatgcagatgattgatgtatataccaaatttgcctttgagcatgctgcaataccagttattccaggtagaaaatcaagagtagaaacatttgcgggtgccaatcggacctacactatagaagctatgatgggtgacaagaaggccttacaagctggaactagtcacaaccttggccaaaacttttcacgagcttttggaacacagtttatggatgaaaatggtcaaatcgaacacgtctggcagacctcttgggctattagtactcggtttgttggtgggattatcatgacccatggcgatgatgccggtctaatgcttcctccaaggattgcacccattcaggtcataatagtaccaatatggaaaaagggtgatgagaaggctgttgttgtggaagctgtagattcagttcaaaaaatactcaaagaagcaggaattagagttaaagtggacgactcagagctgcgaactcctggatggaaattcaatcactatgagatgaaaggggttcctgtaagaatagagataggtccacgtgatgtcacaaataagagtgttgtggtttctaggcgtgatgtccctggaaagcaaggaaaggagtttggagtgtctatggagccttcgatattggtgaaccatataaagggtcgtctagatgacatacaagcatcccttttacagaaggccataacattccgtgatagtaacattgtcgacgtaagctcatatggcgagctgaaggaagctatttctgaaggaaagtgggctagaggtccttggtcagctagcgatgctgatgagctgaaagtgaaagaagagaccagcgccaccatcagatgctacccattcgagcagcctgagggcaccaagaaatgcttcatgactggcaaccccgcagaggaagtcgcaattttcgcaaagtcatactaggcccactgtgtgtccactgtcagagataagaacagcatttccttttcaattttataggattgtaccctgtctacctaaggtccagattgatgacggttcatggaacagcattgtgtgctgctgatatttaaaatgtaaatttgataatcaataggtcaattttgttccactaacactggaggtaagttgtttgcctactcagtatcaaatgtttcaaacaagttccccaatatgctaaatcatgcaagttatcac

SEQ ID NO: 139732 - DNA, 1010 bp, Zea Mays
aatagtagacatgagtgtcacccctcagtcctcactcctgcttgccaagctacagcagcagcagcagccgcagcaagatagtgtagcgtggcaagggcagtgatagttagctagctgctcgctcgcctgggacgacggcgacgacgaagcggcaacgctaatggcgtcctccaactcgaagcaagcgctgctcctggccgccgtcgcgtgcctcgcgtcgctggcctccgccacgcagtggacggtcggggacgaaggcggctggagggccaggcttaacgagaccgcctggaccgacggcaagacgttcacggttggcgacaccctgctgttcgtgtaccccaaggagaagcacacggtggtgaaggtcggcaagaacgccttcgtggcgtgcgacctgagcgccaacctgcagctggggaactggaccagcggcagcgacgtcgtgacgctggaccagccgggcatggcgtggttcatctgcaacaagcccacccactgcctcaacggcatgaagctcgccatcgacgtggtcggcggcacctcaggcccagccccgatgccgttcccgggagtcccggccgtagccccgtctccgctggtgcggttcccgttctcggacctggcgggcccggtccccgacctggcggccctggccccagccccggccccagcagcatcgtcgccgccgtctgcagccgtgaggtgcccggtcggcggcgcggtggccgccgcggcagccgtcgttgtcgcggccgccctcgcgctctagccctcttctccccccttcctgcagaattgttacttgccctggcatgacttcgtttccagtgtgtggtctgtggtgggagagcattgctgctgttcgtgcttggaccttggactaggtagcattagcatgtgttatttttttttcttctttcgaacatgtgtgtgtcaggcgatctgagtttgccgtattgctggccggcatttaataaactcattctaataaagtttaactctttata

SEQ ID NO: 139733 - DNA, 199 bp, Zea Mays
ttgagctgatttttttggggtgggctgagttaccctttttttaattggtcatgaatgtgctttactacttttgcattttgattatactacgtgaattatctgtcttttatatcctgtatgaactctatgtttcccccttattatgcttctttcaagggaggtgctgctgaattttgcaatattttctctctttatttca

SEQ ID NO: 139734 - DNA, 183 bp, Zea Mays
atggccgcgcgcgcaccgctcatcatgccgcgcgccgcctccagcaccggtccgctcccggctgcgtcgacgaccgtggccaggcaccagtccgcgcagtgtctccgcgcgaggggggctgtcggcggcctcttcttcgaccagaggtcagcacgcccggtccaccacctcctccctggcgct

SEQ ID NO: 139735 - DNA, 1275 bp, Zea Mays
atgccgcctcgtagagctcagggtagtccgcaagctcctagtggggactcgatgagtccggcggcaaagttagacgcgatgcaggccatgcagcaggagttggcccttctgaggcaagccattcctgtcgcccctgcaggtgctgctcagggagctggaggtggagaagtgcccgggggcgctgtccctgcgggtgctgttcctggtggcggggccggggtgtctcttcctgtcagtggtctttctctgatgcagtggatgggcatgaagttggattcttttgatggcagtggtactccggtcgaggcggcagattggctgacttatgtggaggataagatgaatgtcttcgagattgcttatgaagatcaggttcgctttggcactcagctgctgaagggtgaggcgcagatttggtggagaggcgtgcaggcagcgcactcctcctcaccaggagtcctatcgtgggatgttttcatcaggcagttcgaaaggagattctacccggtcacctttctggagaaaatgaagattgacttgcagtcctacaagcaggagaagaagtctgtcacagagtatgaggtgggcttcaacaaaatggtctgctttgtccctcatgtggcctataatgagatggagaaggcgagccaattccgtcagggtctgaagccttctatcaggcatgctctgggggcctttccgttggtggacttccgtaccatagtggagcaggcgctgggtgtggagatgcaacaccagtacaccatggagtcgcagaagtcttcgggtgttgatcaacctcgtagccaggacgcgaggaggggcaacactggaggtccagctcacaagaggggcaagtctcagcatcagcgccaccatccttaccgtggcaaatcttctgactcaggtacttcaggaggaagtactcagaggtttcgggccgttcctaagcccgggttggggctggtgtgtttccgctgtggagatgcgcatcgccgtgcagagtgtcagtggagtggcaggtgttctatctgcagtcaggaccacaaggatgtggtgtgtaggaggaatcccaatgggaagctcagatgggagccgatagcttcctcctcttctcagggcactatcaatatgatgtcaagtgctgagcagcagttttcagtccctcttcctccacagcagctttatgtgcccgggacttctcagttcgtgccaatgcaaggttttccgcagtatcaggttgtgcctactcctgcgccgtccacccctgtgctg

SEQ ID NO: 139736 - DNA, 949 bp, Zea Mays
cggcgcctacttccaaacggacaaaccccatcgaaaaccctctctcaaattcacaaggccccgccgccgccgcctcgtcccccattcatcttcgccgaaaccctaaccctagtcgccccgcggccacccttcccggcgacgccatgtcgaacccgaagggctccaagatgctccagttcatcaactaccgcatgcgggtgacgatccaggacgggcgccaacttgtgggcaagttcatggcgttcgaccgccacatgaacctcgtcctcggcgattgcgaggagtttcgccgcctcccgccctccaagtcctccaagactaccggtgaacgcgaggagcgccgcacgctcggcctcctcctcctccgcggcgaggaggtagtatccatgaccgtcgagggcccaccaccgcccgacgagtcccgcgccaaggccgcggcggcgggcggagccctcgccggccctggcatcggccgcgccgctgggcgcggtgtgcccaccggcccgctgctccaggcagctcctgggctcgctggtcctgtacgtggggttggtggacccgcccccggcatgatgcagccccagatctcgcggccgccgatgcccaacctgtcggcccagccggtgtcgtatccgcaggtcgtgcgcccgccgcaggggatgcctcccccaatgcgtcctggaatgccgccgcagatgcagatgccgttccgcccgcctggagcgccgcctgctccgttccctggggcaccgccacaacagttcatgaggggaccaccgccgatggggccgccacaagtgaggcccgggatgccggggccaccacctcctggaatgaggcctggaatgcctccgccaccattcggacagccgaggccagggatgccacctccgccacctggcccgcagcagcctggacaaaacccgcctcagtagttccttacctgtaa

SEQ ID NO: 139737 - DNA, 397 bp, Zea Mays
ggataagcttcttgcgatacacctatgggagattttttttgtatcgcgagaaaggatcataaatcacacctatggaagacgaagacctgtgaattgcaccaatgctttcaccattctgtctcatatcagggtatctagtcctagtagtttcctttgggtattgtgggagagaaccatgccagtgtgtaccactcatcctttgatgtgagaggggactttgtatgtaaagaggccaggactttaactgttggtattggttaagttaggaaatatggataacttatttcatcgttgtcttaattctggacccacccttttccgtgtgtgtcgatgaagcgaggtaattgacttgtagaaattactttctggtttctggattctggccactttcttgttc

SEQ ID NO: 139738 - DNA, 4329 bp, Zea Mays
gcttttgtatggtaggggaggggaggggggagggaaaagatggctccgggctcacacctccttgtccttttgccaaccgccgtcgtccagctcaatcctttgtggcctcttcctcacgcgccaagccagcccgtgatgctcggcgacagtagagtagtggtagccgacacacacacacacacactgcgcatacgattccctactcccatgatcccatcccatcatctcccacccagcattcacaaaaccccaagggcaaaataatatggactgtagatgctgcagtgctccactccattcagagacagacagcgctcggttcatcagttgcattgcgttcatctgctgccccagctcgtgctctctcccagtcccagtccctcgcaagctgacctctgcgttccttcagcactggcactggcagtgaggcgctgtgctgctccagtagctgtagctgtaagattctagatgtgtgggtgattaccaagaggctggagactcccactctcttcggttccagctcgaggtcgagaaaaggtttctttcgccgtttctgatcatttgctcatcatttctggcctcgctgccatcggttgcgcagtagaaaagctggcaatcatcagaagaattccaagagagaggaggaggagaattctctctgtgtgtggcaagctagagctagcaagcgtaagtaagtaaggttcaaggatgggtcgagggagttgcggttgcaggcatcctctgctcgccgtcttgctgccgttgctgctagtgctagcaatggtgcccgagtcggcgcagctgcagtcgtcgcagacgtggtcgctgctcaagatccagcagctgctcagctacccgccggtgctccgcacctggggcaacggcaccgacttctgctacggcggggactacaagaccgcctccgccttcgtcgagtgctacggcgacagcgtgacgcagctccacatcatgggccccggcggcgccccgccgctgcccaagacgttcaacctggacgccctcttcacgacgctgacgaggctccccgacctccgggtgctgacgctcaccgggctcggcctctggggcccgctgccggggaaggtgtcgcggctggcgtcgctggagatcgtcaacgtcagcggcaactacctctacgggcagctcccggaggggctatcccggctgggcggcctccagacgttcatcgccgacgacaacatgctctccggcgagctgcccgggtggctcgggaggctggcgtcgctggccgtgctcagcctccggaacaactcgctgcagggcgcggtgccggagtccgtccgggacatggggtcgctgcggtcgctggcgctcgcgtgcaacaacctctccggccaggtgccggacctgagcgcgctgacgaacctgcaggcggtggacctctccaacaactcgcttggcccggcgttcccgcgcctggggcggaaggtggccagcgtcgtgctcagcggcaaccgcttcggcaacggggtccccgccgaggaggtcgcctcgctctacctcctggagcgcctggacgtgtcgaggaaccggttcgtcggcccgctcccgccggcgctgctcgcgctcccgtccatcgagtacctcagcgtcgccggaaaccgcttcacgggcctgctcgccgccaacatgtcctgcggcgagaacctccggttcgtggacgtgtcgtcgaacctcctgacggggacgctcccgtcgtgcctgaagacgctcccgtcgtcctccaactccaagcaggtgacggtcctggcggcgtccaactgcctgtccggcggcgccggcagcacgcagcacccggccctgttctgccagaaccaggcgctggccgtgggcatcgtgcccgtgcaggcgcggggcggcggcaaggccaagggcaaggccggagccgtggccggcgccgtggcggccgcgctggccgccgcgctgctcgccggcgtggccgcgttcctcttcgcgcggagggcggccgtgaggcgcgccaaggccaggccgccccggcggctggtggagcacgcggcgtcgtccatgtcggtcggcggcggcggcgcgtacccgtcgcagctgttcgccgacgcgcggtacatctcgcagacggtgaagctgggcgcgctgggcgtccccgcgtaccggtccttctcgctggtggagctggaggcggcgaccaacgacttcgaggtgtcgcgcctgatggggcaggacgcgcacgggcagatgtaccggggcacgctcggcaacggcacggcggtgacgatccggtcgctgcgggtgcggcgcagccagacgtcgcaggcgttcaaccggcacgtggagatgatctccaggctgcggcaccggcacctggtgagcgccctggggcactgcttcgagtgcagccccgacgacgccaccgtcacgcggctgtacctcgtgttcgagtacgtgcacaacgggaacctcaggagcaggatctcgcagggaaccgaagggaggaagctgccatgggtgcagaggatctcggcggccatcggcgtggccaagggcatccagttcctgcacgggggcatcatgccgggcctcttcgccaacaacctcaagatcaccaacatcctcctggaccagaacctcgtcgccaagatcggcagctacaacatccctatcctcgccgagaccgccaaatccgagggaggaggaggaggaggaggaagcaagtatccatctgacagcagggtgccccccaatggcgacaagatcgacatctacgatttcggcgtgatcctgctcgaggtcgtgaccgggaggcccatcacgtccatacacgaggtggaggtcatgaaggagcagctgcagtcggcgctgacgtcggagagcccggggcggcggagggcgctggtggaccaggcggtgagccgggcgtgctccgacgagtcggcgcggacggtgatggagatctgcctgcgctgcctggccaaggaggcggagcagcggccgtcggtggaggacgtgctgtggaacctgcagttcgcggcgcaggtgcaggacgactggcgcggggactcgcggagcagcgccagcgaggagtcgccgctgtcgccgtcgcagatcccgccgcggagggacagggagaccagcgcctggtaataagccaagcccgctctaggtgactgttgttgggcgatccgattaggcggcgaggcaggcatgcatcaagtgagatttcgttggtaaacaagtgtacagcagctgcaggctgcagctgaagctggaaacccaccacaggatgtgtacagctctttgcttcggcctactagtactagcactgctttattttatttttttcaatgcgtctttgccacctcattgattcacctactatatggatcgtttgactatgtgtaagcacaactgtatttggcgtcaatcttaccagaggtctcagttgtaggaccaagcgtgacttgactcgctgttgcagcacatttggctctttgcatggcacgatggcatcacagtcacagagtcagaaggccaaacaggcacactggcaaactactgtggattagtgagtgcactgctctccaacagttcgatgtaatgcagctgctctgcccttctccagacagctatggcggacagcaaccgcaatccttaaatcctgaaagatgcctgccgctggtcctgtcctccagcacagatagtcatcattgcgtacgtccccaatgcgagaatcgtgacatatctcgttctcggcctatatcgttgcccaccgtccacggtccaccatgatcagatgatcttcaaatttcaggtgcggcatgatgaggaatgcagaacacctttcgagcgatagccaaaaatcggatctcacttcgagatcgaccttgtctgccttgctgttccaagttgagtgtgctctgtccctgtcaaactcaacccacaaagcaagagcaacacggtccgtcaaacaaccattcccacgctataatttttgtacatgggcaggatcctttcaattcatgagaagataggtcaacaaccgctacattacgacagccaccaccatgagcaaccggggctcttgatgggggcagaacgacgacgacagactacaaaccaatcactggggttcttcaatgtttcgacaagcctggcgaaccagaaacacaaggagtgggtgtgttttttttttcacgctttcttattgtgcccctatcgggcacgacgagcatccttatgcactagtcggctgtccagctctgctccacgatctcacggactttgcggttgtactcccgcttgttctcgctgaac

SEQ ID NO: 139739 - DNA, 4639 bp, Zea Mays
gcttttgtatggtaggggaggggaggggggagggaaaagatggctccgggctcacacctccttgtccttttgccaaccgccgtcgtccagctcaatcctttgtggcctcttcctcacgcgccaagccagcccgtgatgctcggcgacagtagagtagtggtagccgacacacacacacacacactgcgcatacgattccctactcccatgatcccatcccatcatctcccacccagcattcacaaaaccccaagggcaaaataatatggactgtagatgctgcagtgctccactccattcagagacagacagcgctcggttcatcagttgcattgcgttcatctgctgccccagctcgtgctctctcccagtcccagtccctcgcaagctgacctctgcgttccttcagcactggcactggcagtgaggcgctgtgctgctccagtagctgtagctgtaagccctgttgccagttcgtgaagaaagggagcaaatctggggtgcctgcaggagggggtggaagaggggagaggcattggcatccagtgcttgcttgcttgcttgccagggggtgaaaagaaccggcggtctaccactcagatccgtcccctgtgcagtgcaggattggacatttttttttctggtcgccagtagctatctccaataactatacctcgttgctgcgagttcccaagttcgttgctgccttcgttttgctggctcaggctccctgcgtaactgcattcagagcttagaaatcttttcttccagattctagatgtgtgggtgattaccaagaggctggagactcccactctcttcggttccagctcgaggtcgagaaaaggtttctttcgccgtttctgatcatttgctcatcatttctggcctcgctgccatcggttgcgcagtagaaaagctggcaatcatcagaagaattccaagagagaggaggaggagaattctctctgtgtgtggcaagctagagctagcaagcgtaagtaagtaaggttcaaggatgggtcgagggagttgcggttgcaggcatcctctgctcgccgtcttgctgccgttgctgctagtgctagcaatggtgcccgagtcggcgcagctgcagtcgtcgcagacgtggtcgctgctcaagatccagcagctgctcagctacccgccggtgctccgcacctggggcaacggcaccgacttctgctacggcggggactacaagaccgcctccgccttcgtcgagtgctacggcgacagcgtgacgcagctccacatcatgggccccggcggcgccccgccgctgcccaagacgttcaacctggacgccctcttcacgacgctgacgaggctccccgacctccgggtgctgacgctcaccgggctcggcctctggggcccgctgccggggaaggtgtcgcggctggcgtcgctggagatcgtcaacgtcagcggcaactacctctacgggcagctcccggaggggctatcccggctgggcggcctccagacgttcatcgccgacgacaacatgctctccggcgagctgcccgggtggctcgggaggctggcgtcgctggccgtgctcagcctccggaacaactcgctgcagggcgcggtgccggagtccgtccgggacatggggtcgctgcggtcgctggcgctcgcgtgcaacaacctctccggccaggtgccggacctgagcgcgctgacgaacctgcaggcggtggacctctccaacaactcgcttggcccggcgttcccgcgcctggggcggaaggtggccagcgtcgtgctcagcggcaaccgcttcggcaacggggtccccgccgaggaggtcgcctcgctctacctcctggagcgcctggacgtgtcgaggaaccggttcgtcggcccgctcccgccggcgctgctcgcgctcccgtccatcgagtacctcagcgtcgccggaaaccgcttcacgggcctgctcgccgccaacatgtcctgcggcgagaacctccggttcgtggacgtgtcgtcgaacctcctgacggggacgctcccgtcgtgcctgaagacgctcccgtcgtcctccaactccaagcaggtgacggtcctggcggcgtccaactgcctgtccggcggcgccggcagcacgcagcacccggccctgttctgccagaaccaggcgctggccgtgggcatcgtgcccgtgcaggcgcggggcggcggcaaggccaagggcaaggccggagccgtggccggcgccgtggcggccgcgctggccgccgcgctgctcgccggcgtggccgcgttcctcttcgcgcggagggcggccgtgaggcgcgccaaggccaggccgccccggcggctggtggagcacgcggcgtcgtccatgtcggtcggcggcggcggcgcgtacccgtcgcagctgttcgccgacgcgcggtacatctcgcagacggtgaagctgggcgcgctgggcgtccccgcgtaccggtccttctcgctggtggagctggaggcggcgaccaacgacttcgaggtgtcgcgcctgatggggcaggacgcgcacgggcagatgtaccggggcacgctcggcaacggcacggcggtgacgatccggtcgctgcgggtgcggcgcagccagacgtcgcaggcgttcaaccggcacgtggagatgatctccaggctgcggcaccggcacctggtgagcgccctggggcactgcttcgagtgcagccccgacgacgccaccgtcacgcggctgtacctcgtgttcgagtacgtgcacaacgggaacctcaggagcaggatctcgcagggaaccgaagggaggaagctgccatgggtgcagaggatctcggcggccatcggcgtggccaagggcatccagttcctgcacgggggcatcatgccgggcctcttcgccaacaacctcaagatcaccaacatcctcctggaccagaacctcgtcgccaagatcggcagctacaacatccctatcctcgccgagaccgccaaatccgagggaggaggaggaggaggaggaagcaagtatccatctgacagcagggtgccccccaatggcgacaagatcgacatctacgatttcggcgtgatcctgctcgaggtcgtgaccgggaggcccatcacgtccatacacgaggtggaggtcatgaaggagcagctgcagtcggcgctgacgtcggagagcccggggcggcggagggcgctggtggaccaggcggtgagccgggcgtgctccgacgagtcggcgcggacggtgatggagatctgcctgcgctgcctggccaaggaggcggagcagcggccgtcggtggaggacgtgctgtggaacctgcagttcgcggcgcaggtgcaggacgactggcgcggggactcgcggagcagcgccagcgaggagtcgccgctgtcgccgtcgcagatcccgccgcggagggacagggagaccagcgcctggtaataagccaagcccgctctaggtgactgttgttgggcgatccgattaggcggcgaggcaggcatgcatcaagtgagatttcgttggtaaacaagtgtacagcagctgcaggctgcagctgaagctggaaacccaccacaggatgtgtacagctctttgcttcggcctactagtactagcactgctttattttatttttttcaatgcgtctttgccacctcattgattcacctactatatggatcgtttgactatgtgtaagcacaactgtatttggcgtcaatcttaccagaggtctcagttgtaggaccaagcgtgacttgactcgctgttgcagcacatttggctctttgcatggcacgatggcatcacagtcacagagtcagaaggccaaacaggcacactggcaaactactgtggattagtgagtgcactgctctccaacagttcgatgtaatgcagctgctctgcccttctccagacagctatggcggacagcaaccgcaatccttaaatcctgaaagatgcctgccgctggtcctgtcctccagcacagatagtcatcattgcgtacgtccccaatgcgagaatcgtgacatatctcgttctcggcctatatcgttgcccaccgtccacggtccaccatgatcagatgatcttcaaatttcaggtgcggcatgatgaggaatgcagaacacctttcgagcgatagccaaaaatcggatctcacttcgagatcgaccttgtctgccttgctgttccaagttgagtgtgctctgtccctgtcaaactcaacccacaaagcaagagcaacacggtccgtcaaacaaccattcccacgctataatttttgtacatgggcaggatcctttcaattcatgagaagataggtcaacaaccgctacattacgacagccaccaccatgagcaaccggggctcttgatgggggcagaacgacgacgacagactacaaaccaatcactggggttcttcaatgtttcgacaagcctggcgaaccagaaacacaaggagtgggtgtgttttttttttcacgctttcttattgtgcccctatcgggcacgacgagcatccttatgcactagtcggctgtccagctctgctccacgatctcacggactttgcggttgtactcccgcttgttctcgctgaac

SEQ ID NO: 139740 - DNA, 447 bp, Zea Mays
atggcaagagggtccacaccggaccaatcccggcagatggcggtcagccggtcgccgttgaactgcaaaatcgaagaaaaggaggggctgcaaccagcaggattgaaaggaaggggaggagctgcaggatttgaagggaaggggagggcgacggaaatagtgcaagaccggattggaagggaaggggaggagctacaagctgcaagagaacgaggagccgccaacactcatctcactgccgccgccagcactcagctcgcagccgccaaatctgctatgggtatgcgccccctctcctccagcactcagatcttgcctggagagctcacggaggggaggggccggtgcagagccgccaggagaccaacactgccgccggtgcagatccgccaggagactaacggcaagtcagcaacgctgcagaccttcaaggcgtcttcaaagtga

SEQ ID NO: 139741 - DNA, 2948 bp, Zea Mays
tgcgtctctttcgcaaccatatcgctctccgacgactgctgtatcgcccccctgtctctctgcaacgactgttgggccgccgccgccctacgccagtcgccaggtgtcgacaccttcgtcggtatctttaccggcgacgagcacgcaccaggttctagtcataaatattggaagatctttattggtaattccagctatgtgccctgcctttattggagattcttcagggtgatgatagatgccaattcatcattctctggaggtgctcagttgcagccaagtacaagcatgaatacttattccttcatgcctgctccatcgtccccaatatcattttcatcaaataacatctctggctcttcagtcattgatggctccattgtgcagcaaagtccaccccaagaccaggcgcaaaagcagaggtcttcaagtctaacatcacatcctattattgaggctggtggtgcattgcatgctccaaagaaattaagaattgatgttaggcaagatgaactgcagcaacagctgattcagcgtctgctccatggtcagggttctcttcatctccaggggcaacagaacccacagcttcaagctttgatccagcagcataatctggcacatatgcagcagaggcagcagcagctgctgcaatcatttgctcagacacaaccatctcaaattggcattcctcatcagcctcagcttccgccatcactagcacagcctggaatagctgtacctgttaggactcctgtcaacaatggcctttgttcccgcaggctaatgcagtatttatatcacaagcgtcgtcgtccggagaataatcccataacatattggaggaagcttgttgaggaatattttgcaccaacagcaagagaaagatggtgtgtgtcatcttacgaaaagagagcgaatgcttcagtttctactgcacaaacggctcaggacgtgtggcgatgtgacatatgcaaaacacatggtgcaaaaggatatgaatctacctatgaagtgcttcctagactctgtcaaattagatttgatcatggtgttatagacgaatacctattccttgacatgaccaagcccaacgaattccaattgcctaatggactaatggtgctggagcatacaaaagttgttcaaaagagcgtttatgaacacctacatgttatacatgaggggcatttgagaatcatattcacaccagaattaaagatcatgtcatgggagttctgttcacgacgacatgaagagtatatcactcgccgggttctggcaccgaaggtcaataatttgctacaggttgcccagaaattccaaaccgctgccactgaaaatggtcctgctggggtttcaaataatgatgcacaaaccatttgcaacatgtttgtggctgcatcacgacaactagcgaagaatctggagcaccacaccttgaatgaacatggcctttctaaacgatatgttcgctgcctgcagatatcggaggtggtgaataacatgaaggacttgattgagttcaccaacagaaacaattttggtcctatagagggcctgaagaattatccaaaaccaaatgtgtcggagcttccaggacagaatccgcgtgagacaaaacaaacaacggctgctggtggtcttccgaatgaccagaacaacaccgaagctatgggtaccaaacaagaaacaagcgctcgtgtggacaacggagcttctgttgctggagccgtcggtaatagtgctccgcagaacgctgcagcactaaacggttaccaaaatttaccgagaagctccagcgcaaatcagagtcagcttcagcagggggcatccggtgccttcaaaggtcctgccgcgacgcgcaatggcatgcagatggaagcatctaggtccttctgtggacctaaccaagtgcagctagcacgattccaacatcctgggtcatttcagcacccaatgccccagcacaacaacctccagggcttggggttgcaaaacaatcaccggggcctgggcgtgagcccacagtatcagcagcatgctttaaatcagctgattcaagaagttaagaacgctaaaaggcacacactgccacagcaaccacctctagatatccctaacataagcagtggtatcacatcaggaggtgctaacaccaacagtgctggtacaggagatcagggacagcgcatggccgtaaatggtgctgccaccatctataccgggcctactagtgtgatcaataacagcacagccagaagtaacaatttcaagtcggtaagcagcaatctggctgttgctgctgctcctgctggaggcaatgccgcgactttgaaggccaagcccttccatgaatttgatgacctggagcatctcatcgctaatgaattggtggggagcgggctgctcaacggtaacgagttggcgtggaacagttgacagagtacaaagacatctcgctgctcagacttgagcgttaaagtgttgagaacagccttcttggtagattttgctagcatggaaactagtatgtgtcggtggaaagctaccccagatcctagtttctgtttctcttttggtagattttgtattgccggtcgggacagttaactgataggagttggatttggcttgtaaatgtgagataggagttgcattgcctctgactgtcaaattatttgttccatgttccggttattcccaggctgagccaaattttttttggctaattacttcatgcagtagtttgcattggccggattggcaagaatatgtagttagtacagaacgatacaacacttctggcgattacaatcaagtttccatggtggttacgggatctgttccgctaaccatggcgacgatccagtcctgggcaccattactgctggataggcgcacgccttgtgtaacgcatcaaccagacactctacctgtctaacatc

SEQ ID NO: 139742 - DNA, 2818 bp, Zea Mays
tgcgtctctttcgcaaccatatcgctctccgacgactgctgtatcgcccccctgtctctctgcaacgactgttgggccgccgccgccctacgccagtcgccaggtgtcgacaccttcgtcggtatctttaccggcgacgagcacgcaccaggttctagtcataaatattggaagatctttattggtaattccagctatgtgccctgcctttattggagattcttcagggtgatgatagatgccaattcatcattctctggaggtgctcagttgcagccaagtacaagcatgaatacttattccttcatgcctgctccatcgtccccaatatcattttcatcaaataacatctctggctcttcagtcattgatggctccattgtgcagcaaagtccaccccaagaccaggcgcaaaagcagagggttctcttcatctccaggggcaacagaacccacagcttcaagctttgatccagcagcataatctggcacatatgcagcagaggcagcagcagctgctgcaatcatttgctcagacacaaccatctcaaattggcattcctcatcagcctcagcttccgccatcactagcacagcctggaatagctgtacctgttaggactcctgtcaacaatggcctttgttcccgcaggctaatgcagtatttatatcacaagcgtcgtcgtccggagaataatcccataacatattggaggaagcttgttgaggaatattttgcaccaacagcaagagaaagatggtgtgtgtcatcttacgaaaagagagcgaatgcttcagtttctactgcacaaacggctcaggacgtgtggcgatgtgacatatgcaaaacacatggtgcaaaaggatatgaatctacctatgaagtgcttcctagactctgtcaaattagatttgatcatggtgttatagacgaatacctattccttgacatgaccaagcccaacgaattccaattgcctaatggactaatggtgctggagcatacaaaagttgttcaaaagagcgtttatgaacacctacatgttatacatgaggggcatttgagaatcatattcacaccagaattaaagatcatgtcatgggagttctgttcacgacgacatgaagagtatatcactcgccgggttctggcaccgaaggtcaataatttgctacaggttgcccagaaattccaaaccgctgccactgaaaatggtcctgctggggtttcaaataatgatgcacaaaccatttgcaacatgtttgtggctgcatcacgacaactagcgaagaatctggagcaccacaccttgaatgaacatggcctttctaaacgatatgttcgctgcctgcagatatcggaggtggtgaataacatgaaggacttgattgagttcaccaacagaaacaattttggtcctatagagggcctgaagaattatccaaaaccaaatgtgtcggagcttccaggacagaatccgcgtgagacaaaacaaacaacggctgctggtggtcttccgaatgaccagaacaacaccgaagctatgggtaccaaacaagaaacaagcgctcgtgtggacaacggagcttctgttgctggagccgtcggtaatagtgctccgcagaacgctgcagcactaaacggttaccaaaatttaccgagaagctccagcgcaaatcagagtcagcttcagcagggggcatccggtgccttcaaaggtcctgccgcgacgcgcaatggcatgcagatggaagcatctaggtccttctgtggacctaaccaagtgcagctagcacgattccaacatcctgggtcatttcagcacccaatgccccagcacaacaacctccagggcttggggttgcaaaacaatcaccggggcctgggcgtgagcccacagtatcagcagcatgctttaaatcagctgattcaagaagttaagaacgctaaaaggcacacactgccacagcaaccacctctagatatccctaacataagcagtggtatcacatcaggaggtgctaacaccaacagtgctggtacaggagatcagggacagcgcatggccgtaaatggtgctgccaccatctataccgggcctactagtgtgatcaataacagcacagccagaagtaacaatttcaagtcggtaagcagcaatctggctgttgctgctgctcctgctggaggcaatgccgcgactttgaaggccaagcccttccatgaatttgatgacctggagcatctcatcgctaatgaattggtggggagcgggctgctcaacggtaacgagttggcgtggaacagttgacagagtacaaagacatctcgctgctcagacttgagcgttaaagtgttgagaacagccttcttggtagattttgctagcatggaaactagtatgtgtcggtggaaagctaccccagatcctagtttctgtttctcttttggtagattttgtattgccggtcgggacagttaactgataggagttggatttggcttgtaaatgtgagataggagttgcattgcctctgactgtcaaattatttgttccatgttccggttattcccaggctgagccaaattttttttggctaattacttcatgcagtagtttgcattggccggattggcaagaatatgtagttagtacagaacgatacaacacttctggcgattacaatcaagtttccatggtggttacgggatctgttccgctaaccatggcgacgatccagtcctgggcaccattactgctggataggcgcacgccttgtgtaacgcatcaaccagacactctacctgtctaacatc

SEQ ID NO: 139743 - DNA, 2823 bp, Zea Mays
tgcgtctctttcgcaaccatatcgctctccgacgactgctgtatcgcccccctgtctctctgcaacgactgttgggccgccgccgccctacgccagtcgccaggtgtcgacaccttcgtcggtatctttaccggcgacgagcacgcaccaggttctagtcataaatattggaagatctttattggtaattccagctatgtgccctgcctttattggagattcttcagggtgatgatagatgccaattcatcattctctggagcaaagtccaccccaagaccaggcgcaaaagcagaggtcttcaagtctaacatcacatcctattattgaggctggtggtgcattgcatgctccaaagaaattaagaattgatgttaggcaagatgaactgcagcaacagctgattcagcgtctgctccatggtcagggttctcttcatctccaggggcaacagaacccacagcttcaagctttgatccagcagcataatctggcacatatgcagcagaggcagcagcagctgctgcaatcatttgctcagacacaaccatctcaaattggcattcctcatcagcctcagcttccgccatcactagcacagcctggaatagctgtacctgttaggactcctgtcaacaatggcctttgttcccgcaggctaatgcagtatttatatcacaagcgtcgtcgtccggagaataatcccataacatattggaggaagcttgttgaggaatattttgcaccaacagcaagagaaagatggtgtgtgtcatcttacgaaaagagagcgaatgcttcagtttctactgcacaaacggctcaggacgtgtggcgatgtgacatatgcaaaacacatggtgcaaaaggatatgaatctacctatgaagtgcttcctagactctgtcaaattagatttgatcatggtgttatagacgaatacctattccttgacatgaccaagcccaacgaattccaattgcctaatggactaatggtgctggagcatacaaaagttgttcaaaagagcgtttatgaacacctacatgttatacatgaggggcatttgagaatcatattcacaccagaattaaagatcatgtcatgggagttctgttcacgacgacatgaagagtatatcactcgccgggttctggcaccgaaggtcaataatttgctacaggttgcccagaaattccaaaccgctgccactgaaaatggtcctgctggggtttcaaataatgatgcacaaaccatttgcaacatgtttgtggctgcatcacgacaactagcgaagaatctggagcaccacaccttgaatgaacatggcctttctaaacgatatgttcgctgcctgcagatatcggaggtggtgaataacatgaaggacttgattgagttcaccaacagaaacaattttggtcctatagagggcctgaagaattatccaaaaccaaatgtgtcggagcttccaggacagaatccgcgtgagacaaaacaaacaacggctgctggtggtcttccgaatgaccagaacaacaccgaagctatgggtaccaaacaagaaacaagcgctcgtgtggacaacggagcttctgttgctggagccgtcggtaatagtgctccgcagaacgctgcagcactaaacggttaccaaaatttaccgagaagctccagcgcaaatcagagtcagcttcagcagggggcatccggtgccttcaaaggtcctgccgcgacgcgcaatggcatgcagatggaagcatctaggtccttctgtggacctaaccaagtgcagctagcacgattccaacatcctgggtcatttcagcacccaatgccccagcacaacaacctccagggcttggggttgcaaaacaatcaccggggcctgggcgtgagcccacagtatcagcagcatgctttaaatcagctgattcaagaagttaagaacgctaaaaggcacacactgccacagcaaccacctctagatatccctaacataagcagtggtatcacatcaggaggtgctaacaccaacagtgctggtacaggagatcagggacagcgcatggccgtaaatggtgctgccaccatctataccgggcctactagtgtgatcaataacagcacagccagaagtaacaatttcaagtcggtaagcagcaatctggctgttgctgctgctcctgctggaggcaatgccgcgactttgaaggccaagcccttccatgaatttgatgacctggagcatctcatcgctaatgaattggtggggagcgggctgctcaacggtaacgagttggcgtggaacagttgacagagtacaaagacatctcgctgctcagacttgagcgttaaagtgttgagaacagccttcttggtagattttgctagcatggaaactagtatgtgtcggtggaaagctaccccagatcctagtttctgtttctcttttggtagattttgtattgccggtcgggacagttaactgataggagttggatttggcttgtaaatgtgagataggagttgcattgcctctgactgtcaaattatttgttccatgttccggttattcccaggctgagccaaattttttttggctaattacttcatgcagtagtttgcattggccggattggcaagaatatgtagttagtacagaacgatacaacacttctggcgattacaatcaagtttccatggtggttacgggatctgttccgctaaccatggcgacgatccagtcctgggcaccattactgctggataggcgcacgccttgtgtaacgcatcaaccagacactctacctgtctaacatc

SEQ ID NO: 139744 - DNA, 2035 bp, Zea Mays
acaaatacacgaggctgggagaccactgcacttaaccactactccgcatctactgacgccgccgccgccgccgccgcgctctctccgtcggactaggttcgttcgtcgcctgctcgcgcctcgctttccttcgcttgcttcgcctgcgccgttgcttgtttcgtttgtgctggttcggtttggtttgcctaacattgcagttgcccgtcgctgcatccggtgcggcgggcaatctatccttaggcgagaacgaaccccagggttgggcgctttcctagctcttcccgcctgctttctaagctccggccgtcctgccttgtcccaggattcgccggtgacgaagcatgcaaatttctcctattttcgaatttttttgtttcatttgcttgttgttcctgtatgtggctagcgatggcaatggcgagagtgacgaagaaaatcgatcggattcccattgatttccacgcgaaagatgagatcttaaccagctacttctgactcgcgatgccgctgccactggcgttattattattattattattattattgctgttttgtttttcccctgtgggtgctgttttgcctttcctatggatggatacctgagacgctaatcctggcggccggtgatgtgacaaaaaatatttgctactcttgatggggcaggagccccgcctgatgattacgaaccaccaagatctctgaggccctctgtaataaaccttggtgtttgtctctgaatgtattgaaaatttgaaataatatttttatgtaaaattgatgcttatataactcgtctgtatggatgatgagctgaggtgagctaccctggtcggtagatactcatcagatcccctgcttctttctcttaatcaatttactatgatgcgtgcgcttttctgcgttttgatctccaactgcaagcacatatcgaaggctttgtaggcttctatcgacctattgagctcaaattctgtgctatatcaatcgcaatcgtcatctctacttatgattggcatgatctcctaccaccttacgtggaggtcaggactctcttggtcatgcatacgtacgatgacgctgcacacttgtttccttcaacagcaatctttgcctacccccacagatatatgcttccgagttccgacgactgacactcccctatcttccgtacagtcagaggatccgtcatggcgaagaaccccaaggtgttcttcgacatcctcatcggcaagtccaaggccgggcgggtcgtgatggagctcttcgccgacaaggtgcccaagacggccgagaacttccgctgcctgtgcacgggcgagaagggcctgggctccgcggggaagccgctgcactacaagggctcggccttccaccgcgtcatcccgggcttcatgtgccagggcggcgacttcacccggggcaacggcacgggcggcgagtccatctacggcgccaggttcgccgacgagaacttcaagctgcgccacacgggacccggcgtgctctccatggccaacgcggggcccgacaccaacggctcccagttcttcatctgcaccgcgcagacgccctggcttgacggcaagcacgtcgtcttcggcaaggtcgtcgatggctacgccgtcgtggacaagatggaggctgtcggttctcagtcaggtgccacggccgagagcgtacgcatcgaggactgcggccagcttgccgacgactgagggcctcgctgtgtccgattgtaaccaaatgaatgatcaataaatttctttctttcattcttttgtttctgtggagatggataccggcctgtagttaattaaccaatataaactatggatggatggggcggtgatttgatcaagacatctgtatttgttactcttatctgtctattgtatttagaaatatttggaaaaccgttttctaggtttatataccagaaatgtttgaattagcggatgtaacacaggaacaacatccgccgattgtcctgacggcagcacatttttcatctgataaactttgtggagactgt

SEQ ID NO: 139745 - DNA, 955 bp, Zea Mays
acaaatacacgaggctgggagaccactgcacttaaccactactccgcatctactgacgccgccgccgccgccgccgcgctctctccgtcggactagtcagaggatccgtcatggcgaagaaccccaaggtgttcttcgacatcctcatcggcaagtccaaggccgggcgggtcgtgatggagctcttcgccgacaaggtgcccaagacggccgagaacttccgctgcctgtgcacgggcgagaagggcctgggctccgcggggaagccgctgcactacaagggctcggccttccaccgcgtcatcccgggcttcatgtgccagggcggcgacttcacccggggcaacggcacgggcggcgagtccatctacggcgccaggttcgccgacgagaacttcaagctgcgccacacgggacccggcgtgctctccatggccaacgcggggcccgacaccaacggctcccagttcttcatctgcaccgcgcagacgccctggcttgacggcaagcacgtcgtcttcggcaaggtcgtcgatggctacgccgtcgtggacaagatggaggctgtcggttctcagtcaggtgccacggccgagagcgtacgcatcgaggactgcggccagcttgccgacgactgagggcctcgctgtgtccgattgtaaccaaatgaatgatcaataaatttctttctttcattcttttgtttctgtggagatggataccggcctgtagttaattaaccaatataaactatggatggatggggcggtgatttgatcaagacatctgtatttgttactcttatctgtctattgtatttagaaatatttggaaaaccgttttctaggtttatataccagaaatgtttgaattagcggatgtaacacaggaacaacatccgccgattgtcctgacggcagcacatttttcatctgataaactttgtggagactgt

SEQ ID NO: 139746 - DNA, 951 bp, Zea Mays
acaaatacacgaggctgggagaccactgcacttaaccactactccgcatctactgacgccgccgccgccgccgccgcgctctctccgtcggactagaggatccgtcatggcgaagaaccccaaggtgttcttcgacatcctcatcggcaagtccaaggccgggcgggtcgtgatggagctcttcgccgacaaggtgcccaagacggccgagaacttccgctgcctgtgcacgggcgagaagggcctgggctccgcggggaagccgctgcactacaagggctcggccttccaccgcgtcatcccgggcttcatgtgccagggcggcgacttcacccggggcaacggcacgggcggcgagtccatctacggcgccaggttcgccgacgagaacttcaagctgcgccacacgggacccggcgtgctctccatggccaacgcggggcccgacaccaacggctcccagttcttcatctgcaccgcgcagacgccctggcttgacggcaagcacgtcgtcttcggcaaggtcgtcgatggctacgccgtcgtggacaagatggaggctgtcggttctcagtcaggtgccacggccgagagcgtacgcatcgaggactgcggccagcttgccgacgactgagggcctcgctgtgtccgattgtaaccaaatgaatgatcaataaatttctttctttcattcttttgtttctgtggagatggataccggcctgtagttaattaaccaatataaactatggatggatggggcggtgatttgatcaagacatctgtatttgttactcttatctgtctattgtatttagaaatatttggaaaaccgttttctaggtttatataccagaaatgtttgaattagcggatgtaacacaggaacaacatccgccgattgtcctgacggcagcacatttttcatctgataaactttgtggagactgt

SEQ ID NO: 139747 - DNA, 89 bp, Zea Mays
gccatgttcatatggagtaatttatgttcagattgagcatttgaaaatttcatcagtacatccatcctggaaagcagttgtactattta

SEQ ID NO: 139748 - DNA, 946 bp, Zea Mays
aagcgaacagcctgcgggcctggcgctctgcctctccctctcggtcagttgtctctctctcactctctcttgtgtcccatttctaaccctagccgccaagcttgagctcccaagtcccaaactgcccgtctgccctccagccgtgcagggcttcaggccatccgggctccggcttccggcatccatcaggcgtcctcataagatggtgtagggcagcgagcgccgagcagagcagcaaggcagagcagcgagcagccgagcagcgaggcagcgggcgtcctcagaatccgggctgccgagccgccgagcagagcagccgagagcagcgaggcagcgagaacggcccacgagaaggcccgtgcgggtgcggtcgccctgggccgaacaaccccggaccgccgtccgctgcttcctactcttcaccgcttcaccccgcgtgcgcgctttctctgttgctctgctacaactgcggcgccgccgccgccgccgccctacgccagttgccgagcccttcatcgctcttctcgccggcgacgagcacccaccacaacaagtctttcacccacagaaggcaaagatgatcaagaggcgctactttaggcaggaccatggtgataacagcggctcctcatcttcctcctcatcggattgtgactcggacaacgatttggcagaagaggcagtcagcagtgaggaagtagaggagcaggaagaagaggaagcagtcaaggaagaatcaggagaagaagaggaaggagaactagaacaacaaattgtagaagggagtgagtattttactacatatcattgtgtgggttgaggtctcttgcatgtattcttcgctgtttgtctgttatgttgcacaattttgtcttgtgtttcttcaagcggacaacatgttgttgttggatgagtttaatgtattcaacaccaatgttatcctaaa

SEQ ID NO: 139749 - DNA, 865 bp, Zea Mays
aagcgaacagcctgcgggcctggcgctctgcctctccctctcgccgtgcagggcttcaggccatccgggctccggcttccggcatccatcaggcgtcctcataagatggtgtagggcagcgagcgccgagcagagcagcaaggcagagcagcgagcagccgagcagcgaggcagcgggcgtcctcagaatccgggctgccgagccgccgagcagagcagccgagagcagcgaggcagcgagaacggcccacgagaaggcccgtgcgggtgcggtcgccctgggccgaacaaccccggaccgccgtccgctgcttcctactcttcaccgcttcaccccgcgtgcgcgctttctctgttgctctgctacaactgcggcgccgccgccgccgccgccctacgccagttgccgagcccttcatcgctcttctcgccggcgacgagcacccaccacaacaagtctttcacccacagaaggcaaagatgatcaagaggcgctactttaggcaggaccatggtgataacagcggctcctcatcttcctcctcatcggattgtgactcggacaacgatttggcagaagaggcagtcagcagtgaggaagtagaggagcaggaagaagaggaagcagtcaaggaagaatcaggagaagaagaggaaggagaactagaacaacaaattgtagaagggagtgagtattttactacatatcattgtgtgggttgaggtctcttgcatgtattcttcgctgtttgtctgttatgttgcacaattttgtcttgtgtttcttcaagcggacaacatgttgttgttggatgagtttaatgtattcaacaccaatgttatcctaaatgctaaacggtaaaca

SEQ ID NO: 139750 - DNA, 1648 bp, Zea Mays
aagcgaacagcctgcgggcctggcgctctgcctctccctctcgccgtgcagggcttcaggccatccgggctccggcttccggcatccatcaggcgtcctcataagatggtgtagggcagcgagcgccgagcagagcagcaaggcagagcagcgagcagccgagcagcgaggcagcgggcgtcctcagaatccgggctgccgagccgccgagcagagcagccgagagcagcgaggcagcgagaacggcccacgagaaggcccgtgcgggtgcggtcgccctgggccgaacaaccccggaccgccgtccgctgcttcctactcttcaccgcttcaccccgcgtgcgcgctttctctgttgctctgctacaactgcggcgccgccgccgccgccgccctacgccagttgccgagcccttcatcgctcttctcgccggcgacgagcacccaccacaacaagtctttcacccacagaaggcaaagatgatcaagaggcgctactttaggcaggaccatggtgataacagcggctcctcatcttcctcctcatcggattgtgactcggacaacgatttggcagaagaggcagtcagcagtgaggaagtagaggagcaggaagaagaggaagcagtcaaggaagaatcaggagaagaagaggaaggagaactagaacaacaaattgtagaagggagttcaggataccaaagtgaggacaactcatggaatgatgttgatggtgcatctatagacgatgatgaacacagcagcccaagagatgaagaacgtcatgaaataagtttgcccattatgaaatcttctggtgctaatgctgactctgccaaaagtgctgataacacagatgacgctgttgatgcagacttccctaactgcattctgaaatgcaaatctgtgtttaagtgcaagctctgtcctaggatcatgtgcttaaatgtggagatggtcaagatacatctgaaatcaaagaggcatgctcgttccgagaaactactaggagaagggaggcttaagctgatgctcaacagcgatggtgaactggaggaagagcaagagacacatgctgaacgacatgctcggactatagccctttcccagcaagtacaaaagcagaagaaggattcaggtaggcagcgacagaatcggagaaagaagaagaggtctcgggttaatctggaagaggcacagaacaacaaaaaacaacgcaaagctaaatgaagtgggtcttgcagaagcttccaagttcttttgtagcttcaactgctgtgttcccaaactttgtagcggccataccgttaggatattcaagtatccaagagttttctcgtcggctgtaccccgtttcggcctaaactgttagtaatttgttgaattttagatatttaattgaagtggatcaaaatgatatttttgagccgagcagctgatataggctcctcgaactacagtgtgtcgcctgtgccaaatcatcacaggttcatgatccacacgaactataattgtgcttctcaaactgtggtgtggagcttgagccattttagaggagtcacacactgtgtgtgtattttaaaaaaagcggatctggtttctcattttgtattaaaccgtttggctgttttcagcaacgtcctctata

SEQ ID NO: 139751 - DNA, 1754 bp, Zea Mays
aagcgaacagcctgcgggcctggcgctctgcctctccctctcggtcagttgtctctctctcactctctcttgtgtcccatttctaaccctagccgccaagcttgagctcccaagtcccaaactgcccgtctgccctccagccgtgcagggcttcaggccatccgggctccggcttccggcatccatcaggcgtcctcataagatggtgtagggcagcgagcgccgagcagagcagcaaggcagagcagcgagcagccgagcagcgaggcagcgggcgtcctcagaatccgggctgccgagccgccgagcagagcagccgagagcagcgaggcagcgagaacggcccacgagaaggcccgtgcgggtgcggtcgccctgggccgaacaaccccggaccgccgtccgctgcttcctactcttcaccgcttcaccccgcgtgcgcgctttctctgttgctctgctacaactgcggcgccgccgccgccgccgccctacgccagttgccgagcccttcatcgctcttctcgccggcgacgagcacccaccacaacaagtctttcacccacagaaggcaaagatgatcaagaggcgctactttaggcaggaccatggtgataacagcggctcctcatcttcctcctcatcggattgtgactcggacaacgatttggcagaagaggcagtcagcagtgaggaagtagaggagcaggaagaagaggaagcagtcaaggaagaatcaggagaagaagaggaaggagaactagaacaacaaattgtagaagggagttcaggataccaaagtgaggacaactcatggaatgatgttgatggtgcatctatagacgatgatgaacacagcagcccaagagatgaagaacgtcatgaaataagtttgcccattatgaaatcttctggtgctaatgctgactctgccaaaagtgctgataacacagatgacgctgttgatgcagacttccctaactgcattctgaaatgcaaatctgtgtttaagtgcaagctctgtcctaggatcatgtgcttaaatgtggagatggtcaagatacatctgaaatcaaagaggcatgctcgttccgagaaactactaggagaagggaggcttaagctgatgctcaacagcgatggtgaactggaggaagagcaagagacacatgctgaacgacatgctcggactatagccctttcccagcaagtacaaaagcagaagaaggattcaggtaggcagcgacagaatcggagaaagaagaagaggtctcgggttaatctggaagaggcacagaacaacaaaaaacaacgcaaagctaaatgaagtgggtcttgcagaagcttccaagttcttttgtagcttcaactgctgtgttcccaaactttgtagcggccataccgttaggatattcaagtatccaagagttttctcgtcggctgtaccccgtttcggcctaaactgttagtaatttgttgaattttagatatttaattgaagtggatcaaaatgatatttttgagccgagcagctgatataggctcctcgaactacagtgtgtcgcctgtgccaaatcatcacaggttcatgatccacacgaactataattgtgcttctcaaactgtggtgtggagcttgagccattttagaggagtcacacactgtgtgtgtattttaaaaaaagcggatctggtttctcattttgtattaaaccgtttggctgttttcagcaacgtcctctatatctatctct

SEQ ID NO: 139752 - DNA, 900 bp, Zea Mays
aggggtttgctgagctaaaggcttgaatgatctcgaacaacatgccacaatggagcccaactttgggtataggagacactttaatctgcatttcttgtgaagcacatatcaaaggcttttaggcaacattttggaaaagcctattgagctcaaagattaagcaatgtcatcttatcaccatctccaattgaatgagcttgagctgtatgccagcataggtgtcatattggcatgttgaatacatgtagcaacaacaacagcagcagcaacgacatcatagcctgcgaggctacttctacttgatgctcaattactctgttctgatagtattttgtatgggtattgcatcatagcacgtgaggctacttgatgctccattactctttgttctgattatatattttttgccctgttatttacagaggtctcgggttaatctggaagaggcacagaacaacaaaaaacaacgcaaagctaaatgaagtgggtcttgcagaagcttccaagttcttttgtagcttcaactgctgtgttcccaaactttgtagcggccataccgttaggatattcaagtatccaagagttttctcgtcggctgtaccccgtttcggcctaaactgttagtaatttgttgaattttagatatttaattgaagtggatcaaaatgatatttttgagccgagcagctgatataggctcctcgaactacagtgtgtcgcctgtgccaaatcatcacaggttcatgatccacacgaactataattgtgcttctcaaactgtggtgtggagcttgagccattttagaggagtcacacactgtgtgtgtattttaaaaaaagcggatctggtttctcattttgtattaaaccgtttggctgttttcagcaacgtcctctata

SEQ ID NO: 139753 - DNA, 2126 bp, Zea Mays
aagaaccagtggctctgcgcattctacctcccgcgcccacacccgcacggccgcacactccattccaaccggcaagcaaagcaagcaaacaaacaaaacgaaacagcacagcagcaaagatcacacggcctccgctcgctcgacggcccactcggttccgatcgatctcgcgatcgcacaactagactcgagtcgagcgatcgagcgcccgacgaccaatggcggccaaggcggtggcttcgccgctcgcgttccgccgcgacgtgcgtggcccgctcggccgtcctgccccgggcggctgccggagcgggaccgggaccgggacagggctgccgggggtgctgtactggagcggtggcgccggcggcggcagcaggctgctcgcggcgcgggcgcgcgggaggaacaggttcggcggcggcggcggcgggcggggcgcgtccagggacgagacagcggaggaggacgaggacgaggccgccgacgtggtgatcgtcgacgccggggacgaggaggagtacgcctccgacgagctgtccggtttcaggggcctggttcttgatctctcctacaggcctgtcaacgtggtgtgctggaagcgcgccatctgcctggagttcattgggaaggcccatgtgttggagtactacgaccagaccgtctcttcgcctagcgggtccttctacatccctgcagttttgagggttccacagttgctgcaggtagtaaagagaagaagggtcaagcagagccttagccgtaaaaacattctttacagggatgacttcacctgtcaatattgttcttgtggtgacgacttgacaattgaccatgttattccgatctcgcgtggcggtaaatgggaatgggagaatttggtgactgcctgtgcaagatgcaactccaggaaggggcagaagacactggagcaggcaaacatgaagctgcgcaagatccccagggcgcccaaggagtacgatatcatggctgtgcccttgacaaaatctgcgttcagaacgctcaagaggaaccatggcctccctgaagtgtggctgcagtaccttgccaggccatctccatgaccaagacccccctcctcgtcatcgccatacgggccagcaacagcaagcaatctcactgtacattaacattattatagattatacaccatgcagcgcacaggcaaagactgcagatactgactccttatatacatgcccattctgtacacaataaactgttgcatgtactaaggacttatcttccaataaactgttgtaagctggtgcagaaacccgttgatgttgttcaaccatcatagagagaaaattcacaagcggcccagcggggcaaatacaacaaacacatctcaacgtagtactttggatcacaacagaaagtagacagctgcagaaagtatggaagtagacggttttcacatattgtacagaggaaagtaagtttgtaaatgcttgatagaattcccatgttcatttcaggttcttaaaccaaccaacttaaaataagcactacacttgtccagaatctagagagagagagagagaggaactagaatccagagaggaaaggcaaataaacgaaaaatacagcctcaaaacccatgatccatcattgcaaaacccagttaatcatccttctattcctaaaatacctgacacgccagaacacagaccatgactaccaccaaacacaagcaactagctaagcctctagctcctatgaactataggaaacaagctcaatgggacatcagaatttcctcaaacaacccaccacagccttaggttccaccccgacaccactgtcaacggcttgagctaacgaaaaatattaacagccatttagacccgccaacttctcagtttgtgttttcaggtcctgtggggcgacatcatttcctttctcgccatttttctctcctgctttgcctaataaacgctctttgttcaagacgtcagtcccaaccccagtgagttctgttgatccagtctcccctttaggacttctctccatgtcggtgacgctgggcagcttcacatcaatgacctgaagtagcattcactagtgtcagctacaacaattatagctgtgttactttttatatt

SEQ ID NO: 139754 - DNA, 182 bp, Zea Mays
cttcacaatacaacaaagttgacaaaaaatcacaaaaaccacaagttcacaattcatgatataacaagttcacatggatcacaaatttataatataaaaagtttacaaagatcacaagtttataatataacaagttcacagtataaaaagttcataaagatcacaagttcacagactcaacg

SEQ ID NO: 139755 - DNA, 1529 bp, Zea Mays
ccgtctcacgcctgagctgcaagccctcttggcgccacacagcgcaggatgagccacagaacagaagcgtctcttcctcctcctcttcttcctcctcatctgcaccaccacagaacacagattcgcgagcccaagaccaagagcaagagaagaagagctcagctgctgctgcggtgctgccggtgccgggcggagtttaacatcgcgccgcagctaactcaacgcagttaagcttctcctactcctagcttagccaatagccatggcgctggctagccaggtcgccgctaaccagccgccgccgccgacgctctcctcccccgcccgccgcctcccaagagccagcagcaacgctctgctgctgctccagccggcggccgcggtcctcggcggccggaccctgaggcttcggcctcccggcgcgcggaggagggccctggacgccgtcgtcgtcgcgcgggcgtcgtctgaggcgaaggcggagaccgccgaggcgggcggcggcggcgggggagcggaggaggagcggccgtacgaggagtacgaggtgacgatcgagaagccgtacgggctcaagttcaccaagggccgcgacggcggcacgtacgtggaggccatccagcccggcgccgccgccgacctgaccggccagttcgaggtgggcgacaaggtgctggccaccagctccgtcttcggggaggagatctggccggcggcggggtacggccagaccatgtactgcatccgccagaggatcggccctctgtacatgaagatggagaggaggtttggtaagtgggacggcgccggcgacctcaccgagaaggagatcatcaggttcgagaggaactccggagtggtcagcggcagggtgcgggagatccagctgcaaaactaccagaggaagatggagcagaagatgcagagggaagaggacctccgcatggggctcaagctgtacaaggacgggaagtacgaggaggcgctggagaagttcgagtcggttctggggtcgaagccggagcccagcgaggccgccatcgccagctacaacgtcgcctgcagctactcgaagctgggccgggtagaggctgcgctttctgcgctggaggatgcgctcaagtcagggtatgaagacttcaaggcagttcgcaccgacccggatctcgcgaacctgaggaagtcggaggagttcgagcccttgctgaagaactacgacgagtcgttcatcaacgagaacgccatcaacgccatcaagtccttgttcggactcggaaacaagtgaggcgattgttagcttagcttgccctcgtacctgaccatttgccgtgcagatacattgtgtgtatgagtactgtccaaatgtaaaggaaaatatgcaattgtgcttgtcagccacatgccaaatatgttaaggatcaagaaggtgaatatgttagcggacaaactcacgagacaagtattgagaactctggattggattcttttttcaggttcaaacagtttaatgacttgtcaagaaaagaaaa

SEQ ID NO: 139756 - DNA, 889 bp, Zea Mays
ccagccctgagcccctgagccctccccccgctattgtaacaagaaatgggaactgaggagttctccttctcctcttgctgcatgctgatgtgctgactgggtcactctggagttcaggtaagtgggacggcgccggcgacctcaccgagaaggagatcatcaggttcgagaggaactccggagtggtcagcggcagggtgcgggagatccagctgcaaaactaccagaggaagatggagcagaagatgcagagggaagaggacctccgcatggggctcaagctgtacaaggacgggaagtacgaggaggcgctggagaagttcgagtcggttctggggtcgaagccggagcccagcgaggccgccatcgccagctacaacgtcgcctgcagctactcgaagctgggccgggtagaggctgcgctttctgcgctggaggatgcgctcaagtcagggtatgaagacttcaaggcagttcgcaccgacccggatctcgcgaacctgaggaagtcggaggagttcgagcccttgctgaagaactacgacgagtcgttcatcaacgagaacgccatcaacgccatcaagtccttgttcggactcggaaacaagtgaggcgattgttagcttagcttgccctcgtacctgaccatttgccgtgcagatacattgtgtgtatgagtactgtccaaatgtaaaggaaaatatgcaattgtgcttgtcagccacatgccaaatatgttaaggatcaagaaggtgaatatgttagcggacaaactcacgagacaagtattgagaactctggattggattcttttttcaggttcaaacagtttaatgacttgtcaagaaaagaaaacgcatcaattcttcctggttcaccattttttact

SEQ ID NO: 139757 - DNA, 2340 bp, Zea Mays
gcagctccacaacaattcgtgcctgcctgccctgcctctcggacacctccctcgtcctccccctcctacgccgcccccgtcctcggcccccacgcgctcgcgcggcgcacgaggcgacgaacccgacctcctcctccgcgcccgtccctgccaccggtcgccgatgagctcggagggctggggcgctgacctgagttttatggagagaggatgccagagctgcgaagcagtactcgccaagcatgcctaaggtcgaagaagcttgaagatctgcagctaggagagccgcctgcgaaaccggtctcacctgctccgccgagggcaggaaagcgtgctcctacacgtgctgctaggggcagaaagggtgccactgggaaaggagtgccccctgcacctacgactagaagaaagcggggtaatattgtcgacttggaagctgatccagcttgtgaagacccccctaaagctgtcaagggactggaagttgctgctgctgctgcacccaagaaccttcctttgaaggaggtagccgaggttggtgttctgaaaatgaatggtgtgagtgcagagaagattattggggctgaagatgaatcaacagcgacacctgtgccagagagggttcaagtaggtaattctccagagtacataactgacaggaagttaggtaaaggtggttttggtcaggtctatgttggtcgaagggtttctggtggagctgcccgcactggtcctgatgcatatgaggtcgcattgaaattagagcatcgaaacagtaaaggatgcaattatggccctccatatgagtggcaggtttataacactctcaatggttgctatggcataccatcggtccactacaagggtcgtcagggcgactactatatacttgtaatggatatgcttggtcccagcctttgggacgtgtggaattcaatggggcaggcgatgactccaaatatggctgcttgcattgctgtagagagcatatcgattcttgagaagctccattctaaagggtttgtgcatggtgatgtgaaaccagagaattttctgcttggtcagcctggatcgcctgacgataagaaactttaccttatagatctcggtttagcatccaagtggaaagagaataatggtcatcatgttgattatgatcaacggcctgatatctttaggggaacaattagatatgcgagtgtccatgctcatttggggcgcactggtagtaggagggatgatttagagtcactggcatacacccttattttcctgattagaggaagattgccttggcaaggctaccagggagataccaagagtttccttgtttgcaagaagaaaatggctacttctccagagatgctttgttgtttctgtccagctccattcaaacagtttcttgagattgtcacaaatatgaaatttgatgaagagccaaattatgccaagcttatctctatttttgatggtttgattgaagcacctgcgtcgagaccagtcagaattgatggggccctcaaggttggacagaaacgtggaagattgcatgcaaatctagaagatgaacaacctaaaaagaaggttagattagggagcccagcggctcaatggatttcagtttataatgctaggcgacccatgaagcagaggtaccattacaatgtggctgactcaaggctaagtcaacatatagaaaagggtaatgatgacgggctttacgttagttgtgtggcttcctcggcaaacctttgggcactcatcatggacgctggaactggtttctgttctcaagtttacgagctctcaccagtttttctccacaaggactggataatggagcagtgggagaaaagttactacataacagcaattgctggatcaaccaatgggagttcattggttgtcatgtccaaaggaactccttacacacagcaatcatacaaggttagcgaatcgttcccttacaagtggatcaataaaaagtggaaagaagggttccatgtaacatctatggccactgctggaaatcgctggggcgtagttatgtcaaggaactcagggttttctactcaggttgtagagttggacttcctgtaccctagcgaaggcattcatcggcgatgggagagtggttacaggataacttccacagcggccaccaatgaccaagctgctttcatcttgagcatgccaaagcggaagccgatggacgagacgcaagaaaccctccggacctctgcctttcccagttcacatgtcaaggagaaatgggcgaagaatctctacatagcctcgatctgctacggacgaacagtgtgctgatagtcgaagagaggg

SEQ ID NO: 139758 - DNA, 2348 bp, Zea Mays
gcagctccacaacaattcgtgcctgcctgccctgcctctcggacacctccctcgtcctccccctcctacgccgcccccgtcctcggcccccacgcgctcgcgcggcgcacgaggcgacgaacccgacctcctcctccgcgcccgtccctgccaccggtcgccgatattggaaggagctcggagggctggggcgctgacctgagttttatggagagaggatgccagagctgcgaagcagtactcgccaagcatgcctaaggtcgaagaagcttgaagatctgcagctaggagagccgcctgcgaaaccggtctcacctgctccgccgagggcaggaaagcgtgctcctacacgtgctgctaggggcagaaagggtgccactgggaaaggagtgccccctgcacctacgactagaagaaagcggggtaatattgtcgacttggaagctgatccagcttgtgaagacccccctaaagctgtcaagggactggaagttgctgctgctgctgcacccaagaaccttcctttgaaggaggtagccgaggttggtgttctgaaaatgaatggtgtgagtgcagagaagattattggggctgaagatgaatcaacagcgacacctgtgccagagagggttcaagtaggtaattctccagagtacataactgacaggaagttaggtaaaggtggttttggtcaggtctatgttggtcgaagggtttctggtggagctgcccgcactggtcctgatgcatatgaggtcgcattgaaattagagcatcgaaacagtaaaggatgcaattatggccctccatatgagtggcaggtttataacactctcaatggttgctatggcataccatcggtccactacaagggtcgtcagggcgactactatatacttgtaatggatatgcttggtcccagcctttgggacgtgtggaattcaatggggcaggcgatgactccaaatatggctgcttgcattgctgtagagagcatatcgattcttgagaagctccattctaaagggtttgtgcatggtgatgtgaaaccagagaattttctgcttggtcagcctggatcgcctgacgataagaaactttaccttatagatctcggtttagcatccaagtggaaagagaataatggtcatcatgttgattatgatcaacggcctgatatctttaggggaacaattagatatgcgagtgtccatgctcatttggggcgcactggtagtaggagggatgatttagagtcactggcatacacccttattttcctgattagaggaagattgccttggcaaggctaccagggagataccaagagtttccttgtttgcaagaagaaaatggctacttctccagagatgctttgttgtttctgtccagctccattcaaacagtttcttgagattgtcacaaatatgaaatttgatgaagagccaaattatgccaagcttatctctatttttgatggtttgattgaagcacctgcgtcgagaccagtcagaattgatggggccctcaaggttggacagaaacgtggaagattgcatgcaaatctagaagatgaacaacctaaaaagaaggttagattagggagcccagcggctcaatggatttcagtttataatgctaggcgacccatgaagcagaggtaccattacaatgtggctgactcaaggctaagtcaacatatagaaaagggtaatgatgacgggctttacgttagttgtgtggcttcctcggcaaacctttgggcactcatcatggacgctggaactggtttctgttctcaagtttacgagctctcaccagtttttctccacaaggactggataatggagcagtgggagaaaagttactacataacagcaattgctggatcaaccaatgggagttcattggttgtcatgtccaaaggaactccttacacacagcaatcatacaaggttagcgaatcgttcccttacaagtggatcaataaaaagtggaaagaagggttccatgtaacatctatggccactgctggaaatcgctggggcgtagttatgtcaaggaactcagggttttctactcaggttgtagagttggacttcctgtaccctagcgaaggcattcatcggcgatgggagagtggttacaggataacttccacagcggccaccaatgaccaagctgctttcatcttgagcatgccaaagcggaagccgatggacgagacgcaagaaaccctccggacctctgcctttcccagttcacatgtcaaggagaaatgggcgaagaatctctacatagcctcgatctgctacggacgaacagtgtgctgatagtcgaagagaggg

SEQ ID NO: 139759 - DNA, 1457 bp, Zea Mays
accggcacttgtcttcttccataccacatttccactggagcgaaaaatggtgatgctacctctccagcactcgtaggccgccacaattatgcgcttccatttccacttctctgagaccagacagctcgagtctttatccgtcgcccccacttgacccctctcgccactccctcccctccatcaacaattcggtttcttgggtgattttttttcttgcttgctcggtttcttgtggggcgggccgcgaaccggcgaggcgggggcgcggggcaacgcaaagcagcgcaggggcaacgcagtgcagcaaaagcttcgatctttatccgccggattcctctcctcccctttcctctctctccgtctccccgcttgctttgtgcttcgttgttgagaggaggggagaggaggggagacccacatccacttgcctttctcctctctcctctcgcagccccccttccaactcctcctggtccctggaaaaaggagaccttttggtgcaagattcgatctgctgtggctgcctcgaccttgctgcgtgcgcggagatttggtttcttggctggcgcgcgcgggcagttggagctctttgattcaacaggttcagattgcagcggcgagcgactgctctgcggtcgaggctgctgctcgccgggtgattccgtgcccgctcttggtggcggcgggcggtgtcctcgtctgatccgtttcttcgggaggctttggttgatgtgctgggtttcctcggagctcagttccccaattcgccattttgatgaggagctcttcccactgtgagagctactgcgctcctcccctgtgctacctcccctgcctccccaaatccaaagacgttgcagtcggtgacccggagtccgggtccccgagccctgccgctgtcgccgaggacaagccgcccgtggtccagaagatcgaggaatctgtggcggcaaccggcggcgatggcgtcggtgatggtgacaagtgctatcgggaggtggcggtggctcccaagagttgcttgaagagggctaattgcgaggacagcagtaagaatgcggtgaaaggcaatgtgaagtggaaggatttgctggggaaggatctcacgctcacgcaggtcaaggaattcgagccaagcgaatctggagactcagacgacgaagagtacgctggcgcctgcgcctgcgtaatccaatgaggccagggatctttagtgtaaattctgtgaagaaaaaaaatcaaaacaaacaaacagaacgctctcagtcagccattagtcctggtcagtagagggtagggagcagctgtgttggtaattggtatgtggatgccatggctcgtgttgtgttctgtcagcagcttcaactgtaaaatgttgttacaaatgcatagctttagaagatattattattatctgccaaatgtgatatgttctcctgtctgaaatcttcttgtaa

SEQ ID NO: 139760 - DNA, 1981 bp, Zea Mays
tctcaaacggtgttacctattgtagggaatgtcatgcctaggtatcaagtgggctcgacaaagggtgattcaagtagtagacgacactctgaggagtggcggcaacctagcacagatgatgtgcgcatgagcaagccggggtcgagatatttcacggcgtttggggtggatctgtcccctgataatatggcagttgccattgtatattttgtgcaaggggttttaggtcttgcacggcttgctgtgagcttttacttgaaagatgatcttcatctagatccagctgagactgcagtggtatctggtttctcgtccttgccgtggctgatcaagcccctctatggctttatcagtgattccattccactctttggatatcgaagaaggtcatatctttttctgtcagggttacttggagcactttcatggagcttaatggccacagtagtgagcagtaaatacagcgcagcattctctattcttcttggctcactttctgttgccttctcagatgttgtagtggattctatggttgttgagagagcccgtggagaatctcaaagtacatctggatcactccagtcactctgttggggatcttctgcctttggaggaattgtgagtgcttatttcagtggttcacttgtggatacttatggagtaagatttgtctttggtgttacagcgtttttacccctgatgacatctgctgttgcagttcttgtaaatgaacatggcattccttctggagaacacaatacctttctctctggttccggatttgttgagagctctaagcagcatgtcaggcagctttgggcttcagtaaagcaacctaacattttgttgccgaccttgtttatatttctttggcaagcaacaccgcagtcagattctgctatgtttttcttcatcacaaataagcttggattcactccggagtttctagggcgcgtgaagcttgtaacctcttttgcatccctgcttggtgttgggctctacaactattttctgaaggaagttgctctgaggaagatttttcttgtgacaaccattataggttcagctcttgggatgacacaggtgcttcttgtaactgggctaaatcggcagcttgggatcagcgatgagtggttttctattggtgattcattaatcatcacagtccttggtcaggcatcgtttatgccagtcttggtgttagctgcaaagttgtgccctccaggaatggaagccactttatttgcaactttgatgtccatttctaatgctggaagtgttactggtggtctggttggtgctggtctaactcggatatttggggtcactagggatacctttgggaacctacctctgttgattgtcgtctgcaatcttagttcattgctgcccttacctcttttaggtctccttccagagggatcaggtgacaccgataacggagaaacaaaaaataactgatttactgagggttttatctccattgttctggtactcaagtatagcataccacagtgcccagcttcaactcagatatggcccatcgagttgaaattcaaaaggccagtagagaaatacggaaatcacactggatttaagttcagtcggtcaccgccatcatcaggcagtatctcctgtgactattaacctgtgtgatggaagtgattcattgatgatctgcaaatgatctatggcgcacaggtactcacctctttttagtttctaagctaccttgtacacgaagacaaggtaggttttatctttctctagagtctttgagtttttgttgttaatgcgaccccatgaaaattagactagtggtcaaaggctattaattggggattaccttgcgaagtcaaatgtattgtgccaaaaaaaggagggagtatgtatacattattggaaacctagagtacggaaatgtaaagaaaaatacttgcacacagtttgacttgtcgtacagtgtcaggttctgcttaca

SEQ ID NO: 139761 - DNA, 945 bp, Zea Mays
gagcgcttccaattctttttcttccctccggtcgtcttctccctcccctgccccaattccccaacacagcgcaagggccagacgcccagaaccagacgagcacggacggacctccgcaggccgcatccctccacgtgcacgagttccgaggcgccccttcgatccgcccggcccggccctctccaccgcgcgcgcgcgtccgtcgctagcgtttggccgtctccctcttgagccccgagtacccccacgacgcggcaaggaacctcgccatgagggtccacccggctccgcggaagcgcaccatcgccgtgcagcgctgcgccacggcggcggcggcggcggcggcgggcgcactcggcgggaagaagctgcgccgcctgccgcacatcttcgccaaggtgctggagctccccttcgcggccgacgcggacgtgtccgtcgaggaggacgcggcggcgctgcggttcgtcgccgcggccgtcgacggggtctcccccgatggcgcccgcgctcacgccgtcgagatccacccgggggtcaccaaggtcgtcgtccggggcctctcccccgccgacggcggcggcggggtcgacgacgatggggccgccgctttcgagctcgaccgctggcgcttccgcctcccgccctgcacgcgccctgccatggccacggccacctactcccagggcgagctcgtcgtcactgtccccaagggcgccggccccgacgacgcggccgctgtcctcggtggcacggagcgcgtcctcgtgcttgtatagtatatctacatgtcccgtccatgactcatctccactgctttgctgattcgcctgtttctattcctactactatactaataccaaatatttatttatatgacgcgcgagatgatgataaacgatgcacttagagtagtagtaataataataatgcctgtggatccgc

SEQ ID NO: 139762 - DNA, 1980 bp, Zea Mays
atggctggaatccgtccccttcccgtcctgacctgtgctctcctcgtctccccggtggtttcttcgttgagattttcggttttttccaagggcgtgggttttcatatctacaattcaaagtctattgatcgcgcagagttcagagccttcttcaatatctggaatcatggtggcccaaactggattcatgaatacatgaactttattaatgaagagaaggctaattggtggactattcgtggcaagaagagtatttcttacgctgacattgttaagctactgctatctggtgctaatacggttccgattctcaacaagaagttctcatatattattgggaatcctgttcaggaaagaatttctgttttcagacgcttgggatcttcaattcgttattcaggatctcagggatatcggtattcgtcatatcctcggaattcaggatctcggggctttcggaatccgatgactgcgaagaacaaggaattccccatgaatgttcttcatcacagggcgccttcctcgacacctctcgcgtccctagagctttcactgggtgtcacttcaccaaaacccccaaccgctgctagttcccccgtttgctggcgagcatcggtccctcccacaatgttgtaccggcgggtcgatccggagcccttcctgccatctggcttcagcgccatggtggtgcaacaccgtgaaatcatgtccaggtcagtctctaggagactcccaccaatgcatgaagactgggcaatcttaaatattcaacctttaccggatcatgcggttctttttcctgcagttagagatgtggttagagaatatctagttgagcatcgaaggcttggggtgagagacatccagcgctctcatttgggtcaggttttggtgcagttttatagtgtgctggaaagagataacctggttcttcttgggcctcagcaatacctggatgctacttttactacgctaaggcataatgatgcctggaatcacatggccctcttttttaaccgtgaatgttggttgatgttgttgggttttcccttggactatcgctccttagagtacttgcaagctgtcattggttcattcgacagattgattgtgtgggaggaggacaggcacaatgtgactaggactctgcttagggtggtgtcacgtcgcttgaagaagtccctcagttcattgtcttttctgaagcagaaggtttttttggggattcttggactgtgcaatgcgagatcattcagcaaaatctgcttggtggtcaaccccaagatgaagatccagtcctggtggtccctaaagatgattcagcaggacattcaacgagaggagcagcagatcagcaaccatcactctggcctgtctttggacagctctattggcctaaacccgggtgctccagtccagaatggtcagattttggatggcttgggcttggttgggccggtagagcctgataatgttcctactgtcatcgctctgggtgtcgtgcctccaaatgggcttcaagaggttgatggtccacttattcaggggaaccaccaagaactggaggatgtcccactcccatatgctcatcaggaggggcaaattaaccatgtttataacaatgtggagatgaattttatgtttgctcaggattggcaaccagactcggtcttccaattgcacatggagataaaaaggatggcacaattttacaggctatgggcaaattactttgctcctgtgggcaaaccagagatttcagtgaagattacaaaaagtggtcgcccttttttatgtcgattttgcttcaggaggattcatttaactggtccaagtccttcctttcctccgagataccgcctactctgctggagccttagatggagggtctttcatttgctattcccaagagttgcccgaataacaagtttatggatactgtcctctcggagggctctcaggacaagatccctgaaatag

SEQ ID NO: 139763 - DNA, 3219 bp, Zea Mays
aacacgagaagcagcaggccaaaccaatcccgttcccgtcggcctctagcaggtcctccccaaatcccccgcgatccccgaaaccctaccctccagcgccgcaagcccgcaacacgacccttccgccacctccgtcgcgctcccgcaatccagggtcgcccggcattggttttggagcgggaggtttgagctcttctaagaatcggttttgcgaggctttcgatgggttcggaccgtgaaggccgcggctcggaggccgtggcggcgagtaagccgcggaagaggcaactggtgatggagtccagcgattccgaggccgacgagttctgcatctccacgcggcagaatgctagtggtgccgcgtcgttgggcaatgctggtgtcagcagccaaggcagtggcgatcggtcggaggagaaacctgtgacttctagtcctgagaagcttccaggggttaagtccagtgatgtagatggttcagacaagaaaacgggagttcagctggagagcagtagttcgcagcctgctgtcaagaggatcagagttgagactgtccatggtgatggcaatggatgcagtggaggcgcatctaagtgtgggactggtggaaaaatgctgcctcgggggctcccagcatggcggtttgagaggccagaagtaaggggagggcgtgttctggatgacaaaggtggggtgagtatgaaagcaagcagtgcttcaaagatgaaggagcaggtatcaagtttgggtgacaagagacaggcagagctgcagaaacatgaaagaaggacaccattgaagactgatcagggcaaagcaatcgattctggccaacaggaggttttaaggttgcaagggaaaaggggtgttttaaggatattgccaaagaatgataaggtgaccagggatactggtgatggtaagattctgtcaaggcaaactgaggtggatgaggagactggtaatggcaggattccaacaaagcgaggtgttttaaagctcctgccgaagaacaatggtgctgtgatggagagtaatgaatgcaagcttctgtccaagaaggttaaggtggatgaggaaactggggatgacaagatgccaatgaagaaaactaaggtggttgataaggagaccagtgatggcaagattcttgcaattacaactaacttggatgcagagtttggtggccataagttgccaatgaagaactgtactgtggacatggaaactgttgctgggaagtttcagcaaaagaacagtaaggcagatggagaaaccaaagggagatataaaggatatgaagagaaaagtggcgcccctgcagaatttcagaagcatgatgcaaatggtgagaagagagttctgggaaagctactctctcccgttgcgctgaggaaaagtgatccaagcgtagtgggagtttctttgggccagagaatgaaacaacaaaattcaaagcaacaactgaagaactattctctgagcttgaaagatgatagcactaaatcaagtgaacagaagaatctgaaaaaaagattgcttgagcataaagggtcatcagagagtttgtcaaagaaggcacaactgaaagctgttgatcagcaagccacatctggccctgtgctcaacaagcttgaaaagaagccaagaggaggacccctcaacaaacataagcaggatctcaggaacaagataaaacatgtgcttttagataatgggtggaaaattgacctaaggcagaggaaaaacaaagattatgaagactcagtctatgtttctcctaccgggactggctattggtcaatcactaaggcttatgcagttttccaagaacagtttcaaaatatgggtcgctcatctaaacttaataatactaaaccaggtgcttcagatgctatatcgaaggatgatctagcattgctaaaaaagaatatagtaaagagaaggactaataaggaaatttgtggtgctgaaaagaaacctggggttagcagaaacagaagctctaaagatatccttgctaatagagattttagaaacaagcatcagaacaaggaggatagggtaaaaattaaagatcggagatgtgggcttcttgtccgtgggagtacccatgatactgaagataacatggatggctatattccatatgaatggaagcgtacattatgttcatggatgatagatctgggggttatttctgaagacatgcatgtcaaatacatgaacagcaatagaaccagggaaatgttggcaggtaaaattaccagggagggtattttctgtgggtgctgttccaagattctcacaatagcgaagtttgaacttcatgctggttcaaaagagaagaagccctatgcaaacatctttctggaaggtggtaaggtatctttgttgcaatgcttacttgatgcatgggagaagcacacacaaagtgaaaataagggattttacaagatagataaaggcgacgatgaacatgatgatacttgtgctatttgtggggatggtggcgatttggtgtgctgtgatcactgtgcttccacttttcatttggactgtttgggaattaagcttccctctggcgattggtattgtcgcagctgtttatgtaggttctgtggttttccccaagaaaagccatcatcttctcctgagttattactttcttgtttgcaatgttcaaggaaatatcaccaaacttgttcatctggaaccgggacagactctggttgtaccatgcctggtacctctattgattgcttttgcagtccaggatgtagaaagatttataaacgattaaacaagcttcttgggataaagaatcatatggaggctggattttcatggagtctggttcactgttttgctaatgatcaggccatgcccaataaaaataaagaaaagttggcacagtgcaactccaagacagcccttgctttcacagttctggatgagtgctttcagccacacattgacgatagaagtggaattaatatgattcacaatgttgcatataattgtggttctgatttcagtcgtttagacttcagtggtttctatgcatttatcctggaacggggtgatgaagtaatagctgcagcatctgtaaggattcatggaactgatttagcagaaatgccattcataggcacaagaggcatgtataggcaccaagggatgtgtcgtcgactactgaatggaattgaatcggtaatt

SEQ ID NO: 139764 - DNA, 1323 bp, Zea Mays
atggagaatacttggacaactggttttggttttaagcctgttgcaccttccaagaaacaaagaatgaagtcgttaaatctcttgattatgaatgggaccggtctactagagaagaggttgctgccaacacaaacagttgatggacagatcactaccaagacagctaatgctgttggatctgataagatggatgctaaaatgcttggtgaagcaagtggatctgtgacacccattcatgtttctagtgaacccgatgcctctgacaatcgtgaaattaatcgccatgagagtcctcatcctttaggaaactctgcaggcttgacattggaccagtctcctgctgcagacgaaaatgaagcgaaaataactacagaaaggacacccccagtatccataggtgatgctaagacagtcaaggtgcatacacttcctggagctacttgtggagttaacttgcagtgcatggttgaagcagagaacattcaacaagagaaatacaaagaaaccaatgggagattgattgctgaaaatactatttcagagcagaagtgtgaagatagatctaattccagtcgttcaaattcatgtgctactccggtgactgtggatcaatgttctcatttatctaatgagattgggaaaggtgacaactgtttatctagtgaagtttctgttggagctgctcccataacaggcaaaactgaatctagtttgacatctgttcattgcgctaaccaagaggatgagaaagcttacgcagcccctgtggacactaaaatacctttagtcattatggatgaaaagcctgataagcatgagtttaaaactatggttgtagggtgtagtcaaggctcaatggaacctaaaagtttggaaaatagaactagtattgtaaatggaacctcaatggacgcctatagagataaaatacctaatgaagatcacagtgcttctgcagttgacactggagtatctgtgaagctatatgctcagcaaatggagacgattgaggaaaaaactggctcagttttaccagattcggaacactcttctagttgcaaagatgtgttggtgaccttgactgagtcaaagccacttaaaaatgacattcttgaaatggatgatgcagttattaaggtaggaatgactggtcagagtttcaatgaagcaggaataacagctcctgcgctcaacatttcagatcctgttggtgaaaatgtggttaagcctactcaaacttgtggggagggtcaacttcgtggagaggatgtcatatacagtaataacgtcatggaagatgacctaacttctagagcatgctga

SEQ ID NO: 139765 - DNA, 453 bp, Zea Mays
tttagtggacatcaagaatagctggtagtgggcactcattggtataaaggagagatcgttgggctggcgactggcatggatggatttttactgtgtgcgaggcacttctgggagcgcggggaccgtccgcgggaaggcatgacacagttggctcttaagctttcctgacttttggttcttctacattgaggctgttgaccatggagcctttttttagtagtagaagtaagcaaattgaaccatggaagttctatacgacccacaatccgggtcaacattttgttgtagatatacatgtctggtagttttctgttgtcctcctggtcgacccgaactccttattaagagctggtacttggtacccatggtatgcatgtgaaattctgttccttgtacagagagtagaaaagaaaatgaaagccgtgccagcggttataagccgtcgcttgttta

SEQ ID NO: 139766 - DNA, 570 bp, Zea Mays
gaggacaaaccctaccccgcgcagccgcagccttttgccgcgtcggacaccggtgcgtgctcgagctccaccagtcgctgccgccatgtcgctgattgcgggggaggactttcagcacatcctgcgtttgcttaacaccaacgtggatggcaagcagaagatcatgtttgccctcacctccatcaagggtgtcggccaccatttctccaacatcgtctgcaaaaaggccaacatcgacatgaacaagcaggctggtgagctatcctagatgagcttgagcgcctcatgactgtggttgccaaccctcgccagtttaaggtccttgactggttcctcaacaagaaggactacaaagatggtaggttctctcaggttgtttccaatgccctcgacatgaagctcagggatgaccttgagaggctcaagaagattgggaaccaccgaggtctccgtcactactagggcctgcgtgtccatggccagcacaccaagactactggaaggcgtggaaagactgttggtgtgtcaaagaagagataaactccttgaggcatattgatgcctatcttg

SEQ ID NO: 139767 - DNA, 179 bp, Zea Mays
tatttttctttttcttgcaaagagtttgatgagaatctactgaggaaagtgtttgaactatactatgaaaatgggttattggatctatcatatgctccagatgttggtgactatttagtctgcgaggtattaatattctgaatatggtctccctcaagtttattttttctgaaacttaa

SEQ ID NO: 139768 - DNA, 1073 bp, Zea Mays
agagcatgagcatggcgccttcctgcctgcatcgatcgacgagggctgcacgaacgatggggtccgcctccgcctcagtgatgacgaccagcctgctggcgctggcgctggcagcgctggctttcgtctccagggccgcggcgcagggcaacggctgttccagcgtgatgatgaccctggccccgtgcatggacttcatctccagcaaggcgtcggagccggggatctcctgctgctcggtgctggctggagtcgtgcagaccgacccccgctgcctctgcatggtcctggacggcaccgccacgtccttcggcatcgccatcaaccagaccagggcactggagctccccggcgtctgcaaggtcaaggcgccgccgctcagccagtgcacaggcgtccctgcggcacctgcaccgacgcctcccgacgaaccagcagcggcagcggaggaagaagccgacacagctgcagatgccccttcagcaaatggagcctcaagctccacaaactcaaagaatgcagcgagcttactgcttctcatctgcgcattgctgtatgccttctaataagtggtgatacaacttcgctggccatgtcaccgtgcaggaattaggtctttccctgagtcctgactatgtacttacccatgattctcggcaaattttttgtatggtatggtatgggtttctgatgtgccacatcaaacaacattgcttttcgccaaatgagaaagatcagttctcgcccattgtttcagcggaattattggtgattggcaccacatggtgatcattatcaagaataagaacaccacccatcagattgcagtgaactctatttcaatgtatatgttcccaaaagtttccctgcctgctactttgagctaaccatttcggaataagaaaatggtagacgatggtaggcaataaacaatcttcagaataagaaaatgagctgcagcatggtagatgtggcattaccagctggttatgcagattttagagagtgtcagcattttgttgccctgaaaaaaaaatgccatgctaaattgatgatgacctgatttctcactg

SEQ ID NO: 139769 - DNA, 1129 bp, Zea Mays
ctcgctcgtttctcattcagcgcccgtacagccaccactcaaccgagccatatcgaaagttctcaacatcgcttcgtgcagcctgcatcgatcgacgagggctgcacgaacgatggggtccgcctccgcctcagtgatgacgaccagcctgctggcgctggcgctggcagcgctggctttcgtctccagggccgcggcgcagggcaacggctgttccagcgtgatgatgaccctggccccgtgcatggacttcatctccagcaaggcgtcggagccggggatctcctgctgctcggtgctggctggagtcgtgcagaccgacccccgctgcctctgcatggtcctggacggcaccgccacgtccttcggcatcgccatcaaccagaccagggcactggagctccccggcgtctgcaaggtcaaggcgccgccgctcagccagtgcacaggcgtccctgcggcacctgcaccgacgcctcccgacgaaccagcagcggcagcggaggaagaagccgacacagctgcagatgccccttcagcaaatggagcctcaagctccacaaactcaaagaatgcagcgagcttactgcttctcatctgcgcattgctgtatgccttctaataagtggtgatacaacttcgctggccatgtcaccgtgcaggaattaggtctttccctgagtcctgactatgtacttacccatgattctcggcaaattttttgtatggtatggtatgggtttctgatgtgccacatcaaacaacattgcttttcgccaaatgagaaagatcagttctcgcccattgtttcagcggaattattggtgattggcaccacatggtgatcattatcaagaataagaacaccacccatcagattgcagtgaactctatttcaatgtatatgttcccaaaagtttccctgcctgctactttgagctaaccatttcggaataagaaaatggtagacgatggtaggcaataaacaatcttcagaataagaaaatgagctgcagcatggtagatgtggcattaccagctggttatgcagattttagagagtgtcagcattttgttgccctgaaaaaaaaatgccatgctaaattgatgatgacctgatttctcactg

SEQ ID NO: 139770 - DNA, 1041 bp, Zea Mays
ctcgctcgtttctcattcagcgcccgtacagccaccactcaaccgagccatatcgaaagttctcaacatcgcttcgtgcagcctgcatcgatcgacgagggctgcacgaacgatggggtccgcctccgcctcagtgatgacgaccagcctgctggcgctggcgctggcagcgctggctttcgtctccagggccgcggcgcagggcaacggctgttccagcgtgatgatgaccctggccccgtgcatggacttcatctccagcaaggcgtcggagccggggatctcctgctgctcggtgctggctggagtcgtgcagaccgacccccgctgcctctgcatggtcctggacggcaccgccacgtccttcggcatcgccatcaaccagaccagggcactggagctccccggcgtctgcaaggtcaaggcgccgccgctcagccagtgcacaggcgtccctgcggcacctgcaccgacgcctcccgacgaaccagcagcggcagcggaggaagaagccgacacagctgcagatgccccttcagcaaatggagcctcaagctccacaaactcaaagaatgcagcgagcttactgcttctcatctgcgcattgctgtatgccttctaataagtggtgatacaacttcgctggccatgtcaccgtgcaggaattaggacaaaatctactgtatcattttgatagactacgaagaccaacgacgagatgtaaagccatatcattctctttcactaaaggatagatgaagcctcaagaccaatgaagcctccgtgatgaagactatccccctcggagatcaagcgaagccactaggtatctgtctccctgatgaagactcttcgctcttcccctcagagatcaagcgaagccactaggtgaactttgctgagaagcaaagtcaaaaaagaaataaggagaaattggctcattcacaagacatggagctctgtctacgatgactgtgtaaacactagacagaaccatatagcatgaaatggaaagcaaataactgaaccaccttttattgg

SEQ ID NO: 139771 - DNA, 216 bp, Zea Mays
cacaattgttgtcgtaatccatccaggagacagagacagcaccatgtagagctgaataataataataataataataataataataataataataataataataataataataataataataataataataataataataataataataataataataataataataataataataataataataataataataataataatgctggaatgaggaac

SEQ ID NO: 139772 - DNA, 2852 bp, Zea Mays
gcggtccgcggtcgcatgcacggctcgccggcggaggcaactgttaattattacgccgtgtaccagcagcagcctgcaggacgacggcacgcgcgcgcgcgcgcggcatgccgttgagtggcaggccatggggcggcggcggcggcagcggtggcggcagctcgggtaggctcgcgtcgtccggcgcgctcctcccggcggcgctgggcggcgcgcgcagcgggcggcggccccggctccggcggttcatcgtgtccccccacgacccgcggtacgtggcgtgggagcactcgctggtggcgctggtggcgtactcggcgtgggtggcgcccttcgagttcgggttcgtcccggacccgcggggcgcgctggccgtcgccgacaacgccgtgaacgcggcgttcgccgtggacatcgcgctcaccttcttcgtggcgtacgcggacggcgggacgtacctgctgcaggacgacccccggcggatcgcgtggcggtacgcccgctcctggctcgcgctcgacgtcgcctccaccgtgcccaccgaggtgtaccgccgggtcctgccgcgccaggccaggagctacaacttcttcggcatgctccggctctggcgcctgcaccgcgtcggcacgctcttcgcacaactggagaaggacaggaagttccgctacttctgggttcgatgcacaaggctcatctgcgtgacgctgttcgcggtgcactgcgcggggtgcttctactacctgctggcggacaggtacccggacccggggcacacgtggctgagctcctccatgccggacttcaagcagcagagcgtgtggaagcggtacgccgcgtccatgtactggtccatcaccacgctcaccaccgtcgggtacggcgacatgcacgccgtgaacacgggcgagatggtgttcaccacgttctacatgctcttcaacctcggcctcaccgcctacctcatcggcaacatgaccaacctcgtcgtccacggcaccagccgcaccaggaaatacagggacgcgatcaaggcggcgacgagcttcgcggtgcggcaccagctgccgccgcggctgcaggagcagatggtgtcccacctgagcctcaagttcaggaccgactcggaggggctgcagcagcaggagacgctggacgcgctgcccaaggccatccgctccggcatctcgcactacctcttcttcgccctcgtccagggcgtctacctcttccagggcgtctccaatgacctcatcttccagctggtctctgagatgaacgccgagtacttcgcgcccagggaggacgtcatcctgcagaacgaggcgccgtccgacttctacatcctagtcaccggtagtgtggtggctggggtggccagggccggcgacgtcgtcggcgagatcggggtgctgtgctacaagccccagctcttcacggcgaggacgcggtccctgtgccacctcctgcgcatggagcgcagcgcgttcctcaggatcgtccaggcgaacgtcggcgacggcaccataatcatcaacaaccttatccagtacctcaaggagaagagggacagcggcgccatcgccggcgtcgcggaggagatcgagtacttgctagctcggggccagctcgagctccccgtcacgctctgctacgccgcgtccagaggagacgacttcctcatgcatcagctcctcaagcgcggggtcgatcccaacgagtcagataactattggcatacagcactgcacgtctcagcttccggtggacatgagcagtgcatcaagcttctgctagagcatggcgctgatcctaatgcttcaggagcatgtgattggggccaccaaccaaaccttgcgctgatcgtaatacaatgtccagacgcgcaaggaagagtgcccctgtgggaggccctgtcgcgggggcaccgcggggccgcgcagctgctggcggacggcggcgcggacctggcgtcgggcgacgcggcgctctacgcgcgcgcggccgtggaggcgggcgacgtcgcgctgctggaggacgtggcgcgccacggcggggacgtgacggtggcgtgctgcgacgacggcggcaccgcgctccaccgcgccgtgctccagggggacgtcgggatggccagggccctgctggagcacggtgccgacgccgacagggaggacggcggcggccggaccccgcgggacttggcgggccagctcggccaccgcgacatgcaccagctgttcgggccgccctcgcagtcgcagcaccgggaagcggtggagagtccgatcaggcggcagggctcgggaacggaggaccatggcagcagctgcaggcccgccgtcgcggtcgcggctcggccggcggtcaccaggttcaagagcgcgcccgcggcgagggtcccggtcgcggtcgcgcagcacgacggcgccggttcgtcgccgtcaccgtcgtcgtccaggcacagcagtccgcggcggatggtcagcttccggaactccctcttcggcgtcctctcctcgtcacaagtgaacaggcacgacggagcagctggcggcggggggcatagccgccacgagaggcacacgcacagcaggtcgcgggtcagggtgaccgtctcctgccccgagcagggcgtcggcgcgaggaagctggtgttcatgcctgagacgatggcgcagctcgtggagctcgccgggagccagtttgggttcgccccgacgagggtggtgaccacagacggtgcccaggttgacgacgccaggctcgtcagggacggcgaccacctcctcgtcgtcacccatcagtggcagagggtgcccgacactaagatcgtgcatacgaatcagtag

SEQ ID NO: 139773 - DNA, 1552 bp, Zea Mays
gataaccttagcatatgcgttatgtgcaggtggctggggtggccagggccggcgacgtcgtcggcgagatcggggtgctgtgctacaagccccagctcttcacggcgaggacgcggtccctgtgccacctcctgcgcatggagcgcaccgcgttcctcaggatcgtccaggcgaacgtcggcgacggcaccataatcatcaacaaccttatccagtacctcaaggagaagagggacagcggcgccatcgccggcgtcgcggaggagatcgagtacttgctagttgctagctcggggccagctcgagctccccgtcacgctctgctacgccgcgtccagaggagacgacttcctcatgcatcagctcctcaagcgcggggtcgatcccaacgagtcagataactattggcatacagcactgcacgtctcagcttccggtggacatgagcagtgcatcaagcttctgctagagcatggcgctgatcctaatgcttcagacgcgcaaggaagagtgcccctgtgggaggccctgtcgcgggggcaccgcggggccgcgcagctgctggcggacggcggcgcggacctggcgtcgggcgacgcggagctctacgcgcgcgcggcagtggaggcgggcgacgtcgcgctgctggaggacgtggcgcgccacggcggggacgtgacggttgcgtgctgcgacgacggcggcaccgcgctccaccgcgccgtgctccagggggacgtcgggatggccagggccctgctggagcacggcgccgacgccgacagggaggacggcggcggccggaccccgcgggacttggcgggccagctcggccaccgcgacatgcaccagctgttcgggccgccgtcgcagtcgcagcaccgggaagcggtggagagtccgatcaggcggcagggctcgggaacggaggaccatggcagcagctgcaggcccgccgtcgcggtcgcggctcggccggcggtcaccaggttcaagagcgcgcccgcggcgagggtcccggtcgcggtcgcgcagcacgacggcgccggtttgtcgccgtcgccgtcgccgtcgtcgtccaggcatagcagtccgcggcggatggtcagcttccggaactccctcttcggcgtcctctcctcgtcacaagtgaacaggcacgacggagcagctggtggcggggggcatagcctccacgagaggcacactcacagcaggtcccgggtcagggtgaccgtctcctgccccgagcagggcgtcggcgcgaggaagctggtgttcatgcctgagacgatggcgcagctcgtggagctcgccgggagccagttcgggttcgccccgacgagggtggtgaccacggacggtgcccaggttgacgacgccaggctcgtcagggacggcgaccacctcctagtcgtcacccatcagtggcagagggtgcccgacactaagatcgtgcatacgaatcagtagatgtgaacgtattagagcagcgtgtttggacatcgtggctgttcactgtattggtaactcagaactgatttattaagcg

SEQ ID NO: 139774 - DNA, 873 bp, Zea Mays
atctattagtacccagaccgaattctgttctagctatatatatgtgcttcttccagcatcaggctgcttaaggctttaccggccagtcaattcaagcagagagtggccagtgctatcaaaaagggaaaggtgatcgtctatatatggatccatgccgaggaaggagttcgtcaaggaggggctccattgctgctggagctggacatggtcactttgatgcagacgacgatgcagcagcactagttcctcctccttaccgcctgttcccggagccggaggagacggccgcccgcgacatccagctccgtcagttcttctccgtggatcggcgccagccgccgcagctggaggtggaacgttcatacctattaggcaaaaatgataagctccgtccgtctagcttcggcgaaggagtaaccgaagggaagataatcatttgtcgaacttgatgttaccttcagacagagaagggccatgaaggatgaaaacgagagatatatggaacatttctcatattaaaagtcgtacatacctttcccgactatgtacgtcatttgtacatggtgaggcatgctcccgtaactatgtacaaatatgtatactggccgatcctacaaataggtgtttagtgccactgctatagggttaaccaattgtaaccccatgtttgtatcaccttcgtgcaagaccacctccaaaaggcattcgtccttgtgtacttgtcaacaactgagatctttgaaggttcagcattctaaaggtctcctatgtaatgtagtatctcttgttactccttcgtgtgtaaaggataatgaagcggcttgttttcttacaagcctaacatacaacttgctgaaatgatttcacttcgta

SEQ ID NO: 139775 - DNA, 2241 bp, Zea Mays
cgtctcgggcttcaccgccgcaacacacgtactcccccaatctactagtgtctctccaccaaatttttggtctcggatacaaccaagatgtcttcatctttgcacgacttaacaccaaggcatctttaatgattccacgaggccagctggcgacaacaactaccagcattttatcctggaggcggcgtcaccgtcgccgatccctcctctcaactggcaacaatgggtgcacaggatgcaactgccctgagtgttcagcagggccgagcgaggacagctgctgaaaacctcgtccacgtccctgccgcccaggtttcacttccaggtgccctagccctagggaactttgagcaagagctcggagaagacgcgctgctgccgccggtgctgagccaggagcagcaggacgccgtgaagagatacaaccatctgatgggggtccacgtggcgtacttccgcgtgtgcatcgaccctacggtggccagttccaggcggctcctccagcaggcaatccaggatctcaagaaccactgtgctggcgatgctctggtggcgcattattacgtgaacaacaggaacaacaacgacccagcagatcagccagacactactacggccattcggcagcaagcaattgctcgctctgctgatgcctcctctcggcagcatcatggcgcctgcagaggattcaacgaccatcatggcggcggcgttgttccttccgttcaccgggaggaggaggaagctctggcggctccggtggtggcgatgagcatgagccccgccttgcggctcgtggacatcaagggcaaagtcgcagctttctgtgccgatcgcaacgggagccgcttcgtgcagcaggcgcttgaggcggcagcgccggaggagatcgccatggtttacaaggagatcatgccctgcgtgcgcacgcttgccgtcgacatgtttggaaaccatgccatccagaagattcttgagcatgggccgaggtcctgcaagcgaggggtcatcagtaatctgatcggccatttgttgcccctaagccttgacaagtacagctgccgggtggtacagaagtctttcgacgtaggggagcacgaccagaaggtggcgatggccaaggagctcggcagcaaagtgctgaggtgtgtccgcgaccagttcgcgaaccacgtcgtccagaagtgcgtcgagtgcctgccgtccaaggacatccactccatcctccgaagcttctacggccgggccaaggcgctgtccacccatcccttcggctgccacgtcatccagaaagtgctggcccgctgcaaagaccacgagatctaccacgcgctgacggcggagatcatggagaacgtgaacaagctggcggcggacaggttcggcaactacgtggtgcagcagctggtggagcacggaggcggcgccatgcggtccgcgatggtcaggaggttcgccggccgcgtcgtcggcatgagctaccacaagttcgcctccaacgtggtggagaagtgcctggcgttcgggagccaggaggaccgccggctcatcgccgacgagatcgtcgccggcggcggcggcggccagcagcagcacttggaccatctcgtggacatgatgatcaacccgtacgcgaactttgtgatccagaagatggtggtgacggcggaggagcggcaggtgaggttgctgctggaggtggcaagtagcaacgcggcgagcctggcgaggtacgcgcatggacggcacgtcatcgacgccatggagaggttccttggcggcgccaaggctgttgtgcacgcagaccctgctgcactaccctgccgccgccgatgatgagctcggcggctagcgacaccgccgactgcaatggctcctctcgatcgatcgtcgatgctgcagcaaggaccactagtactgtccaccctgtacgtgaagctgggctggcacatatgcatgcatggcaaaaacaagccatatcataataagaccaaaggaatatgaaggctgcttagcgtcttcatatatcatatcgcatcagtatactcaattcgtccgctcggtttctccttggtgtagagtataatataggtgaattgtccatctcctctcgtcagcttaaacttttgtgttaaattggttgatgcttagaacttaatatggtatcagagctatatatatgcctcgagtccaaaaatactggttatcacaattaaataaaaataattattgctcgctctt

SEQ ID NO: 139776 - DNA, 1049 bp, Zea Mays
aacaacgcaacgcatcgcatcacagccagctatagccaggctccttgttttccaaattaaagccttttttcttaatttccctagctccaagtcgagtgtgtgtgatcgagagagctagctagcagatcgagcgcgcgcatgatggcgacgacgacgaggagtaggccgatgctgctcgccttggccgcggtggtggcgacgctgctggtggtggccgcgccggcgccggcgtccgggcagcccggccccggcggcgtcgttgggggcgccatgtcgtgcacggcgtcgctggtcaccagcttcacgccgtgcctcaacttcatcaccaacggcagcgcctccccgaccgacgactgctgccggtcgctgggggcgctgatgagggccagcaccggctgcgcgtgcctcatcctcaccggcagcgtctccgtcggcgtgcccgtcaaccggacgctcgccgtccggctgcccagggcgtgcaactccacctctctccagctgcagtgccgagacgcgtcctcagctcagagcccagctccaggccccgtcgcagatgcgcctgcgccctctctgtccacggccccgttgccaccaccagcgacggcggcggcagcgccggagcctgacgaagcaccggcgccggccacgcccacggccgcggcgccggtcagccaggggcagacgaggccgacggttgtgcccggcgcctcctcctcctcctcctcgacagcaagctcggacgcgccagcgacggctgggtttgtactgttgcttgcaattggagctgcgctcatgacctgatgcgatggttcgctaaataacgtcggagcactggagtgtcttggtgaatcttattagctgctatttaattattagtatctgtttgttactaaatcgatggtgttctgaactggcagtgcctgctgtattttaccacatttttttgtcacggtgtttgaacctttcatcagtttcgtcgtcaggacttagcagaataatgtactgtgtactgttatggtggaatatatttttttattgtcttattcagc

SEQ ID NO: 139777 - DNA, 2706 bp, Zea Mays
attgtcgcggcgcagacctgggagaggagcaggagcggccagtcagcggagcggataggaggcaggaggagtcgcgccggagatggacacgcccgaccgcgccgccgcgcagtccgcggccacgcgcaccgaggactcgccggtgttcagcttcctcaacaacctgtcgcccatcgagcctctcaggtcgtcggcctacagcaccaacagcctccaggggttccagtccatcaacatcacgtccatctcctccatcttcacctccccgcacgacaacgtgagcaaggaaccgaggctcccaaagagcccgcttggtgaaatttctgacaaggaggttcgtgccgacgccgccggtacgaacgagccacccgagccttcgaacgcggccaggttgtttgcctgcactagcaccgtgactcgagaaacgcgcacgggtacatgtacgggcgtggctggtcctcctcccaccaccggggggccatgtgatctggccctgcctcgtcagttcgacaataacggcagtccagaccacaacacgacgccctgccacggtgtcaggtcagaccttaaacaggacaaggctaggaagctgctacaagctgcacagaacgctaaaaaaaacgcgctggagaagaggaagtgcttgttttccaccgaagtccggctcctggacggcggcggcggcggcggcggagagcctgggagtgacagtgatggagtcttgggatgcgagtggtccgacttagtctccccgacctcagcgaagcttttggccttcgacgccacgatggacgagcatcacagaggagtgcatttggcggctcagaacgcagagtcgtgtgggtatttgctgtcgaaacttgccggagacggtggcgtatcggacggagcatatcctactgcgtctgctcaggtatactatcaggaacttgtgatgggagaagatcagtcagagaacgccgctcctcaaatggacgctcaggaaaccatctcagccgaagaaacccaggataatatctatgaagcggatgtgtgtgttccattagagtacaaggtagtggagagccaacagcagcgtggcatacggagacgctgcctggtcttcgaggcagctggtgggttttcgaatagcgctgtgaaaagggggactattgaagatcgctcggtctcaacatgtagtaagggcaaaagccctgcggaaagccagccgcgtggactgcgaggcatcgggcttcatctgaatgcgcttgcgttaacaccaaaggggaaaatggcctgtcaggatcctcctcctacggcttctgctctccttccatcgtcagcgtctgaaaaggatgcgcgtggcgagctgctttgtgcaggagagaatttcgcacactcgggcggtgagctgttggagtttcccttggatggttgttcggctggaggagggtttcctgtaaatgaccatcatgtctcaggtcagagcgtcagccctcaaaagaagagacggaaaacggataatggcgatgatggtgaggcatgcaagcgatgcagctgtaagaagtcgaagtgcctgaaactttactgcgagtgtttcgctgctggtgtgtactgctcagaaccttgttcgtgccaaggatgtatgaacaagcccatacacgaggaaaccgtcctctccactcggaagcagatagagtttcgtaacccgctagcgtttgctccgaaagtgatccgcatgtctgatgccggtctggaaacaggggaagatcctaacaacactccggcttcggctcgtcacaagagaggatgcaattgtaagaagtcaagctgtctcaagaaatactgtgaatgctaccagggaggtgttggatgctcgagcaactgcagatgtgagagttgcaaaaatgcttttggcagaagagatgccgagactgaactccctgaagaaatgaaacaagaagaaagtgaccagacagaaaatcctcaacaagaaaaggagaacgatcaacaaaaagcaaatgtacagggcgaggatcacccgctcctggaccttgtcccaataacaccgccttttgatttttgcagttctctgctcaaactgccaaatttctcaagcgcaaaaccgccgagaccgaccaaggctcgcagcgtgacctcccgctcgtctgcttcgaaagccactgcagcagtacagccttgtagatcatccaagcttgctgctagtgctagtgctagtggtatcgatgaggagacgccagatatcctgcacgaacctgactctctcagtaactgtgtcaagactactacttcaccgaacggaaaacgggtctcgccgccacataacgcgctcggcagctccccgaaccgaaaaggtggcaggaagttgatactcaagtcaattcccttgttcccgtcactcacgggagacacaaacagcggctctgcaatgaacagcactgatagcgcattctgcgcgtcacctctcactttaggaccatcttaaagctgtgaagttggtggccatgggaccggagtacgacttgtagtccgaacacgtgtgcctcgtatcctacggcaaggctcgaggtactgtagactgtagtaagttaggctttttaaagttgtagtaatctgtatttgtaaaatatgtagactcaataatctgtatgtaagatgctgcgatgggtgaagctgtttatctttatcaaattgtagcaacattac

SEQ ID NO: 139778 - DNA, 1145 bp, Zea Mays
aacctattaaaatggcttttttatcccacaataagtgatagtcaatccccacattgggggaacacctttattgaagcatcttatcagctgcttttacaccaatagcttgtacattaaattgtaaaactcaacacaaacaacaaagcaactcaaaaactcacttcgttttgacactgacaccgtccgttccagcaatgatcactgaactcgccatgttcaagaacaacccatggtcaacaactccttccagagctgcaatttcctgtcctgctgccaacgcatccttgattggcgtcttgaagtataaatcgacgatgtagtttgagttgtcagtaacatagggcttgtcgccttcaaaccttagctttgcctcgactccttcctccttaaacagttcctgcaatcttacaaggttgtacttccagcagaactgcacaacttccactggcatggctagaccactacctcctaacccatcaactagttttgtctcgtcaacaataacaataaacttgtccgatgctgcctcaaccatcttctcacgaagaagagcaccaccccgccctttcacaaggttgaggtcaggagcggacctcgtcggcaccgtcgatggcgaggtcgatgagcgggttgtcgtcgagcgtggagagcgggatgccgagcgactgcgcctgctcgaaggtgcgcttggatgtgggcacgccgacgatcttctcgagcttgcccgcggccaggagcgcgccgatctcggcgacggcgaaggcggccgtggagcccgtcccgagcccgagcaccatcccgctcttcacctgctcgacggcgcgcaccgccgccagccgcttgaggtcgtcctgcgtcagcgccgccgccgccgccgccggcgcggactgcgcgcggacggccccgaggcgggcgcggcgggcggaggccacatggcgcgcggcggttgggtggaggcggactgagatcgcggtggcggccatgggagcacgtgtgggtggcgggaggggaggtgctgcagttcggagaggtgaggtcaggagtgtggggagatgagggggaggcgatgggaagttggtggtggaggctagcggcgatggtgatcgtcagaggttgggttggtggtgacttggaaggccaggctt

SEQ ID NO: 139779 - DNA, 459 bp, Zea Mays
atgcacatggtacacaactgcattgtgtgcccatatgatcagtcacgctacgctgctcagacacagaaccacgagaagcacatcacggatgctcaactgactgatccgtcacctcttcttgaacccgtacttcttgcgctcgtagaagaggtcggtcttggcgctaccgaggttgacgatcttggggcacccgtcccggtccttctcctgctgcgtgcactccttgcagtagtaggcgtccgagatgcccacgccgccgcagatgacgcaccgcccctggaacgacccgtagttgcactcgtcgcagacgcggaccagcgtgcacggccgcacgtacgagtcgcagacgacgcacttgccgtcgcacttctcgcacagccgcccgatggcgatgccgggctgcttccggcacatgatcaggtccgggtggtgtttcgccatgcctcaaatgttaaccct

SEQ ID NO: 139780 - DNA, 122 bp, Zea Mays
ccaactaacccacacgacagctcccgaccgcaacgcaagcgtcaaaccaaataaattctactgccctagttgtgaatgttttccacaaaatcccaaatccccaaaacaacaaccggatgagg

SEQ ID NO: 139781 - DNA, 546 bp, Zea Mays
atggtgatggtccctcccggcgagtgggtcccccacgtcgaggcctacgtcgacgtctcccgccccgccgtgcagcattctgctagcgtggatgcacttgctgccctggtgaacaaagacaagttgaccctttttgatttggtgtccaagatggatctttatttgacgacaacagaccacattgtcagatcaagaggaatactgcttcttggggaaacattgtctcgaatttcatttaaatatttagatgttattaccattacaacattgtcagacttctttatatcaagattgactgacatgtttatatttatatctggtattaagttagtaaatgttagaagggcaggtctgtcagattggcaagcaatacgaggagcccttgttggttgcctggctttattgcacaggaaacatggtgttggttgtattgtgattgctgatgtcaaaagactagttgagtctttcttacagaatgttccagtgcagtcacttgcagctgctgaccgcaaggttgatttgattattcagtgcaaagatggttag

SEQ ID NO: 139782 - DNA, 113 bp, Zea Mays
ggtcgatattgtcgggtacccaggaactaggtgcccaaagtaggctcaagactctcaacggcccacttcccgaccaagtccctgccaactcagcgaggcagaaggtcccgatg

SEQ ID NO: 139783 - DNA, 3439 bp, Zea Mays
atggtggaagttgtcatgaagctgtttccagatccatctggtttggcagcacagtttgcaggggacgtttttgagattctgagcaagtattttcctgtctacttcacacacggagtgggtaatggtttggacactacacgggaagacctctctagagcattgatgcacgctttttgttcaacccaatattttgagccttttgtcatccctttgcttcttgacaaactttcttcctctcttccattggcaaagattgattccttaaaatatttggacaaatgcattcgcttctatggagctgatagaatggttagacatgcatcagctgtttggtacaagttgaaagaagtgatttttaacctttcttcagatcaattattaatatcagaggctctgaattgtttgaagactgctattatgtatactgattcttctgataaagatcttttcattaatttgatcttgttggatgaggatattgtgaacaagatccactctgtatcaagcgtggaaaagaccatattgagttcattagaggacctggcccaactgcatgcacttggaagtgttatttctatccttgctgaatcgtctacatatttctgtactagagttcttcaagagcactttgcacacttggtagatattgtgggaaccaaagctgactatgaatcctggcagttgaataattgtaatggatcatcttctgctcctgtcaactatggagcactctatttatctgttcaattgctttcatcctgtagagaagtggctttggtatcttatgaagatttttcttctgttaaattagcaaagggttcctggtggcttatcttgcagaaaaagctggagcagttaatccatctccttcgatccatttttgctatagcttctcaatctatgcagccaaatttcagacaagaatatgtctcttgtgctgtgaagggcttgctaacactagcaacattcccggaacaatgctcgcctctgccagcaaatgcttatgaggatattctgcttatgttcacgtcaataattataaataagtttgaaaatttagatctgtggagattgtcattgaaagcattggctagcattggttcatctattgccaagttccatgcttctgaaagggaagtagtttactacagaacggttgttgacaagattgtttctttggctgaatcttatgatacttcaatgcctctcggtctaagacttgaagcaagttatgaagttggaactgctgggttgaactatatgttaagagttgcgaaatcacttgaagtcgctgttgtcaccaatatttctgaatctgaggctaatggaagaatggaatgtgctgaccatgtggcccatttatttgagtgttactctaaccgggtccttccatggttattagcttctggtggtgtcaatgaacttgcattgagctttgcactgcatctattggatgagactgaggatttgactgtgttagatagaatcagctcacagggcctccttgactcactaatgactgggatgaagcttttagttggagtatgtacagaggagcaacaatcacttattgttcagaaagcacatagcacaatatcttcaatgctctcactcccaatggaattgatgacagaccgtcttttgcctgtagatgagttagttcctttacattctgtttcagaaacagctctcatcagcatgttttcgtcgattataataggccttcggcctcaaacacctgtaccagatatgatggtgatgattaaactctttactgtcttcctactaaatgggaaaatgccagctgcttatgcattagcttctattttcaataaatatctacataatccagagttttctcatgagaatcagatggataaaatacttgatgatattcttgagaggtgtttctcaactgtattagccaacagctgctcaaagacatctcaatcttgtgctggcacttcagatgttaatttctcagatgtttcgtctagaaacaagctttctaagattaatatcttgtctagcttggcttggattggcaaaggattacttatgagaggagacgagaaagtgaaggacatttcaatgtttcttcttaagatcctattctcagatgagattttgtctacagttccatcccaccaggaagaaccttatggcggtgattcatcagatacttctcttgcaatatctgcagctagtgcattccatgtgatgatgagtgattcagaaatgtgtctaaataaaaaatttcatgcaagaataaaaccattatacaagcagcgtttcttctcaataatgatgccgatcttcctctccaaaattaaagaaacaactgtggtcacgacaaaattggcactataccgagcttttgggcatatcatttccaatgctccagtaccagcagttataactgaagcacaccagattttactcgtgatggttgatagcttagctaaattaagtatggatgttggggataaggatctggtgtacagtttgttacttgtcttctctggaatgttgatggatgaaaaaggcaaagagtgcattctggacaacatccaaatcacaatcagcgttcttactgaacttgtttcctatcctcacatgatggttgtgcgggagacagcattacaatgtttagtagccttttcgacgtttcctcactcaaagatttatcctgtgcggcgaaaggttgtgcaggcagcagtcagggctctcgacgataagaaacgggctgttcgtcgagtggctgtccgatgccggcacacatggcagtccttcacttaaggggagtctctttcggtggtgtcaggtagtcgggggaggcaagcacaaaaaactggtcttactgggcgatcctgttgggagtcgatgagtgtacatggtcggtttgcatgctccactgttgtggttgtttcaacttgaggtttgagcatttcataggctattcacctttctgtgcggacaggatctagagctgtcattgtaaggtgagagatactgggagcggggtctgctgacgagtttatgttcgagacctggtctttggatcagctgctgccaagttccagatgttcgaagttctccgaagagccatggggccatggggaggaatgtccctggaaattggccctcagtctgggttgccagctcttgtgcccttttcttttccttgatcctggacattgccttgtgtgtctgatacagatcagaaaactgatgcaggatcgcttgggagttgggaatgtaacctaaagtcccagtattcttggcctcccgatgttggagaattcaagcatgctggcatgcgtgcgtttgtgccaacagtttttagtttgctttcatgtttcaaccaggctctgccgctcagaacgtgtcgagtatactttccagttggccagatcgtgtcaggttgtgcagtacgtag

SEQ ID NO: 139784 - DNA, 3788 bp, Zea Mays
ctccctttctcttttctctcttcgtcttcctgctctcgctgagcctgcaggatctgaatccgagctcgctcgcatccactatctgcaggccccacgcgccctgttccttcctcccgctaacaatcgccctgttcccggtttgatccgttgaattctgcccggcgcgcgggggcttgcgggtgcgcaccggaggctgcatcttttcccggccaagattcggtccggtggggccgttcttggcacgatttcacgggccgtttggccttccctcgccggatttgttccggctccaggcaccaaattccaatcttttcctgctgctgctgcctctgcgacactttattcttctcccccaattagcggcggttagtgtggattctgatttgtaggttcatttcctggtttcctccgtgagcttctgcggttggcgtggttacgccagtccctcgcgatttacatctgtgattcgtttgaaaatctgggagtgtggagatttgggaggtcttctcgctcctgtgctctatgaggagcagcttcctgtcggagtcgccgtgcgacgagcagcgcatccatggatatggtttcaacccgcagtcatggctgcaggtggagcgagggaagctgcccaagtcgtcctactcgccttcctccattgagtcacttatcaagattgctgagccacatgtagtgccattgtataagcctttggattatgttgaggtgctgtcaaggatccacgaggagcttgaacaatgtaggccgagcgagctgccaggcctgtacttggtccagtcccaggtgtttcggggccttggagaagcaaaattgcgccagaggagcctccactctgcctggcgttgtgcaagcagcgtccatgagaaagtcatatttggggcatggttgcggtacgagaagcagggggaggagatcatatctgacgtccttgcatcatgtcagaaatgctgtcgagagtttggtttacttgatgttgcctctgagatgcctgtgcggaattttgaggtaattggttcatgggagacaggctcctcgtctcaagtttcttccatggtaaccttccaagtacaggatggtagggtgacatgtgataggtgcaagattgcgtctttgtcaataccattttgctccatgcttaatggaccgttcaatgagtcacagcttgagcttgttgatttgtcagagaatggtatttcgttggagggcatgagagctgtttctgagtttagttctacatgtagtttaggggatcttcctgtggaaatcttattggagatcctggtgtttgcaaacacattttgttgtgacaggctaaaagatgcttgtgataggaaactggcttcatttgtttcaacaaggcaggatgctgttgagctcatgccgttggcatttgaagaaaatgcgccagttcttgctgcttcttgcttgcaaatttttttacaggaacttcccgattgtctagctgatgatctagtaattagcctcttcttaggtgcaactgcacaacaacaacttatcatggttggacatgcatcctttttgctgtactgcttgcttagtgaagtagcaatgaacattgatccgaggacagaaacaactgtattattgttagagaagcttgtgcagctagcagttacccctactcagaagcaaatagcttttcatcaacttgcatgcattagacttttgagaaaggaatatagtgaagctgaacaccaatttgaggttgccttctctgccggtcatgtgtattcaattgctggtattgctagagtcgctggcattcaaggccaaaaggctttggcttatgagaagctcagttcagtgataacatcaaatttgccactggggtggatgtatctggagaggtctttgtattctgaaggtgatagaaagctggcagaccttgacaaagcaagcgagctggatcctactctcacttacccttacatgtatcgagctgcatccttgatgagaaaaaaagatgctaaacatgccttagaggaaattaaccgactcttgggtttcaagttagcattggagtgcctggagctacggatctgtctatacctggctcttgaagactataagtctgctatctgtgatatccatgcgattcttactctttcacctgattatcggatgttggaaggacgtgtagctgcttccaaaataggcactcttcttggtgcacatgtcgagcagtggaatacggctgagtgttggctacaactttatgagcgctggtcatcagttgatgatattggctccctttcagtgatctatcggatgcttgagtcagatgcagcaaaaggtgtcctctactttaggcaatctttgctgctccttaggttgaactgtcccgaggcagcgatgcgcagtttgcaattggcaaggcatcatgcagcaactgagcatgaacgactagtatatgaggggtggctcttatatgacacggggcactatggggaggccctacaaaaagcggaagaatctatttccattcaaagatcatttgaagctttctttctgaaagcctatgttttggctgattcaggagttgatccttcttattctgcgacagttatctcacttcttgaagatgcattgaaatgcccttcagaccggcttcggaagggtcaggcattgaataaccttggtggtgtctatgttgattgtggaaagttagattcagcagctgattgctatacaagtgcattgaaaattcgacacactagagcccatcaaggtcttgctcgtgtacattttctgaggaacaacagggaagctgcatatgaagagatgacaaagttgatagaaaaagctaaaaacaatgcttcggcttatgagaaacgctcagaatattgtgaacgagaacaaactatgacagatttgcaaacagtgacccaattggatcctttgcgtgtttatccatacagatatcgagcagcagtgctgatggatagccacaaggagaatgatgcaatagcggagctcagccgtgcgatatccttcaaagcggacctgcatttgctgcatctccgtgcggctttccacgagcacattggagatgtacccagcgctctccgtgattgtagagccgccctctccttggacccgaatcaccaggagatgttggagcttcagaaacgtgtgaacagccaagagccctgacacattgtggtgctgtattgtgtattgtacaccacgactcatgccactttggtttgcctcgtgacagacagccttgacctgattcattttttttcgtttttccgttaattaattaatcaatcactgtaatacgaagttttcaggaagaaagtaacagagagcaagagagagaactagttatatgaaagcaggcattgataaagcctttttaactcgatgcctgtggcctctgtagaagtattgtgctaatccctgaactgtatcttgaaaaagtgattcgtgcataatgtatttttcagttctgttctctttatccagattttactgaaattaaccttgagtgaattgtgctccatcaaagatctacctgcctgtgtttttttagtggcatcgagtgtttataactttttgattcgtggtgtcttattcagcgaacccttggagttgtaactgcatgatcacagtttgaacaacgttttcttgttttgtttcttttaccaatcataaagtattcataatgaaacctgttcattttgtttgaatctgtaacttgtattcagcttttcgatgccttacaaacgaatgcaggtcctatgaaa

SEQ ID NO: 139785 - DNA, 102 bp, Zea Mays
gggtcaaaagagaaggatttggaacattcaattcccatcatatgtacaataagagatgattttatacaaagcccagaccaacttcaagtcagcaatagatga

SEQ ID NO: 139786 - DNA, 1494 bp, Zea Mays
aacagcagcagaagcaaaagccgcaggccgcaactactccgatctgagtatcacagtcacagctaatagctagccagcagcccagcacccagcaactacccgtacgtacgaacgtgcgcttccgatggcgaccacggtgatggcctccgcgaccgcgagctcccccgccttctccgcccccggcgcgcgcgccaggcgcgccgcccggcttccggcggggttccgcggccgtgtcgccgcgccgccgcgccgcctcgcgctgctcgccagggcctcccagcaggccgatgacgctgccgccgacacgagcgcgagcgcggcgccggctgctcggaagctggggctctgggacgcgctggcgttcagcgggcccgcgccggagcggatcaacgggcggctggcgatggtgggcttcgtgtccgcgctcgccgtcgaggccacccgcggcgacggcatcctctcgcaggccggcaacggcgccggcctcgcgtggttcgcgtacaccgccgctgtcctgtccgccgcgtccctggtgccgctgctccagggggagagcgccgagggcaggagcggccggttcatgaccgccgacgccgagctctggaacggccgcctcgccatgctcggcctcgtcgcgctcgccgtcaccgagtaccttaccggcgcgcccttcgtcaacgtgtaaaatacatacaagccgcaacgtacagctgtgatagactggtagtacgtttaatttgtaaaaggataatgtagtatatggtaattggtaatacgcgtacgtatacgtatgcatgcatgcgtaattacaatagcttggaaatttactgtcttctatagggttccctgaaaaaaaacgtaataataattttttggcacctgaaaaaattgtggaatggttctattacactagtacaaaaaggctcaaagcctgcggcacccatatatttttacagacggatccggttatccaccgactgtgctatttctagtggcggttccttaagaaaaccgccactagaaatcatttttatccttaatttttcgagtttttcaaacgacctcgtatgataaaaccactaaaataaaagttgtagatctctaaaagttatgaaactttgtagttgacaacttttttatttgaactcatttaggttctcaaaaattgaatctaagtatggcaaatttaaaattcaaattttgcaaactacctcggatgaaaaaagtgtcaaaataaaagttgtagaacttcaaaagttatttatctttgtagttgacaacttttttatttgaattcgtttagggtctcaaataagcaatttacactcaaatggttgtaatatgtggagaaaacaactacaaactagacacaagtcatgtcatagacggagtggtagtggagggtacgcgcaagggtgaggtctacggttcgattcctcacaaccgcgtagcgcgcgaaaaatgccgcgactttttttactatttttaaaattt

SEQ ID NO: 139787 - DNA, 99 bp, Zea Mays
aaggagcaaaagccatcgacgctgctcttgctacagcaagtctctcttgcagtcttgcctgctgctacgagccaacggctccatctccagttctccaca

SEQ ID NO: 139788 - DNA, 567 bp, Zea Mays
ataccagtgatggcctccgtgagctccatcgccaccgccagtgcaagtcgtgccggtgccttccaggcgtcgtgtgcgctcgcgccgcgccaccggcatgccttgatcgcgagggtccagagcgagtacgttgatctaacagcggaagagacgacgacgacgaccgcgcccaccacctccaccttcgttctcctcgccacatactcctgcagcggcggccgccccgacggccagggcaaaggcggcgggccccaggctgtgggacgcgctggcgttcggcggcccggctcccgagcgcactaatggccggctcgccatggtgggcttcgtgtccgcgctcgccgtcgagaccgacgccggctccggactagcctggttggcggccacgaccgtcgtgctctccatcgcgtcactcgtgtcgttgctcaatgcatggggacagcgacagcgccgaggtcaggagcggcgccgtcatgagcgccgatgccgagctctggaacggccgcttcgccatgcttggcctcgtcgcgctcgccttcactgctcaccggcgcccagctcatcaac

SEQ ID NO: 139789 - DNA, 644 bp, Zea Mays
cttgaattttccgtcgtctttattgaggtgaataaaaaaatcccagatcttcgaacagaaatccagtatagtacttaattcgaactgaaatccagtagtacttcagaaccgcaacactacaaagcttccaccgcatgaaattagacaaacagtttgcacacaaccactgacagaaacatgtataaccatcagtactacttgctgagtcgctgtcactgtacataactacagactgaattcctgacgggcagggtcgtaaaacaaccaacagatcgctggcgtcgcctaaaacagccactccagtggcaagcagcaatcactagtcagatcacatcagatgcacctagcagttctcccttgacaccatggcgaatgccagccaattctcatggaagcaagccctaccattggcgaggaattcagaagggcatggaaaccgagcaacggaagcagaattgcctagtcttgctgacacagtgaacacaattcaggagctgcgggttctggtaagatggaaataacaaaacagcaacgaagccaagactaattgctagatgttgggccatctgagttgagataacccatcttctcagacagcacattcatatcatcctcgattacagggctatcgttctcctcgccaa

SEQ ID NO: 139790 - DNA, 1048 bp, Zea Mays
atgacagccggggtcgggatcttacttgtcacaaatgttgaggatagtgccaatagattcatctgcgcttgtgtggtagtgttctacacatcactttaacatattgtgagctcttttcctttttcaccagtcttcttgctagcctttttgtattgtgtactccattatgatatggagaattctaattttgacctctataatgctattctgcaatttattgcaacgagtttttgttatgtgattacgaatttgagttatcaatcttatttaatgaaactaatatggcaggagaaagtggagtttttgaggggccagaattggagcgttacactgactaggagcagggcttcaccctcctcaagccagcctcctggcccaaggtggagaagatgggcgtgacagcgttgtttcaacaggagggtgaagggagcaacaatattgggtttgtcgtcaaccttcggcttaattcgctgacggagttcgggacgccgccagttcatcgcgggcaaacttctgcaagcagagaagaaaaaggatgttctcagtgggagagagatcaggtcatggcggcctggcagtgtatgaaattgagtacacactggatagcactaggtgagggatgaaacagatcttctcgggtgcatttgttgcttcaaggaagctttatctgctcaacatagcctattcagacacccggacagtgagtcaagaattgttctggacaaagcattccattcttttgattatgtatagtttatattttctatggcagaaaatatagtcgtgagtatttgtttgtttgtaaaaagagtgctaatcaaaaggttgcattgtcgtcttgtccagtactattgcacctttatcagtgatgtcaggctataagtaatttcagtttagataatgaacttcatcttgcacatattggtaacattatttgtgtcgaaagcagtaaaatgtcgtgatcttaattcctagcctaacactactgcatttgtaatatcttggacttgaaattttatacagtggagtacatctatatttttttgag

SEQ ID NO: 139791 - DNA, 350 bp, Zea Mays
gaaattgagtacacactggatagcactaggtgagggatgaaacagatcttctcgggtgcatttgttgcttcaaggaagctttatctgctcaacatagcctattcagacacccggacaagccgcgtcacagatgaaaatactggaattcgaatatatgggcatggatgaaatccatttggtaatattcgcacaaagaagtcgcatgcaggagcaggacatgggcgcgactgttggcacatggcgttaggtataaccgttaatgcatcctgatgctgatgggttgctgtggatgtttgcttacattcctcttgattgctcgccaataatgtgcgacatggcgttctgattcg

SEQ ID NO: 139792 - DNA, 2731 bp, Zea Mays
agccaacttagagtagactgcatacgaactccaaggctctctatgagagagagagaggtaggctaagtattaaatatacaacttatctcatgtgagagttattatataaatagatttttaggtgattatatatgacacgagaatattataaggcctgctatattattaaccatttctacttgctctcaagcatacaaagcgcacatggggtctcaccttagctcggtttgggcttgggggaacaataaattaattaataaaaaagaaaaaaaatgaaaggaagataggccaggccggagttgactacggccacggcccacgaggcatgatcggcccaacagagcgcacaggcaaggcaaaccgtcagcactcagtggagccctggcgggctggcctcccctcttcttcgcctgcacctgcacgcgcccccgacctcaccctctgctgacctcgctcccctcccgtagccgccggagccctcatcggtttatcctcccgctgccacctgcaacagccccgggcggagatccatcctaactctacgtgcaggtgaccccaagtcctcaagtgggtggcgcaaccatgcccaaggttaagaatccccacgttttcatggacatatcaatcggtggaggtagcgccgagaggatcacattcgagctatttgcaaatgtagttccaaagaccgcggagaacttcagagcactatgtactggtgaaagaggccttggagcgtctacacagaaaccactctattataagggaacatatattcatcgcatagttaaagggtttgttgctcagggtggtgatttttcaagcggagatggtattgcttcattagcccaggcttcttctttcaactgactttttgctgtagtgtactttataagctcaatactgcattctatttccaggaaaaggtggagagagcatttatggtggaaaatttccagatgaaaacttcaagctactgcacaatcagcctggtgtcctgtccatggcaaattctggaccaggcaccaatgggtcacagttttttattacattcaaggctctacctcatcttgatggcaaacatgtggtctttgggaaggtggtcagtggaatagctttgcttaaaaatcttgaagcagctggcagtgaaactggaaatccttcttgtcaagtgaaaattgtagactgtggtgaagtttccaacacaaattctcaagatctgctaaagggagagaaagaaaaaaaactaagaacagcagatggtaactccaatgctgaagggagagccaaattaaaaaaagcatctggtgattataagcaaagaaagaagagaaaacattattcatctgattcatatagctcagatacttcagactcgtcgtcctattcttcagatagtggctctgattcagaatcacagtcatcaatgaatactagctcgtccagtgatcataggcgtaagagaagaaagggatctaagaaggataagcgcaagctcacgaagaggaagggtaagcatacaaggagtaagagaaagagtagaggatccaaaaggcgtcctagacggagctatgggagttccagtgatgattcagtaagctcaaagacagataacagcagttctgacagtgaaaatggtggtcattataccaagcgttccttgccgaaagataaagagagtaccaaaatgacaaattcagaacaaggaagaacgtttccagatgtagacaaagtcaaacaaacagttactaccatcaaccgatcacaatcacatgatggaagtaaaccctcaaacaaagatgacaatggggctgatgacagatctggaaattacagttcaaaagataggaatgatccaggtgcaagctctaggatcagtcctatacagactgatgtaaatttaacgaaaccagtaaatgtatatggcaacattggtggtgataatgcagatgctggcatgtctataactggtacagaaaggcacctgccaagcaatgaacctgtgtccaccaatggtaaagatttagctgtgggttctgcagacaatgggcagcctcagcgaatcaggaaagggcgtggttttactcagaagtatgggtttgcacgccggtacaggacaccatctcccgagcgcccccctgttcgaccccgctacgatggagggagagaggataggtggaacaatttcaataggtaccaaagaagaggacggagcaggtcacgcagcccggcgacgcgtcatgaccgtggagggtatcgccgccccagcccaaggcgcagccgcagccctgcagacccgagacgtgatgcgaacgataggcctcgatcaggtcacggtggaggcggtcctgaccaccgtggccacatcccccctgccaacaacaggtccaggtcgaagagccgggatcccttgagatccaggtctcctgatgctgccccagccaagagggagagctcgagatacaaccgcaggcgcagcagcagctcgaggtccagcagccctgatgctgatggaaacaaaggcttggtctcgtactgagatgtaacgccacaacgatttacatgcgccaagaaccatctttcttgctagtttagcgttatgtacgcttttgtaatggcttctaaacttgtttttttgatgtagctgtacatttggatgtcctgttagacgtgaaatgttttttacgtcagatatttataactacttctgagtcagtataacgcgaagagtgct

SEQ ID NO: 139793 - DNA, 2790 bp, Zea Mays
agccaacttagagtagactgcatacgaactccaaggctctctatgagagagagagaggtaggctaagtattaaatatacaacttatctcatgtgagagttattatataaatagatttttaggtgattatatatgacacgagaatattataaggcctgctatattattaaccatttctacttgctctcaagcatacaaagcgcacatggggtctcaccttagctcggtttgggcttgggggaacaataaattaattaataaaaaagaaaaaaaatgaaaggaagataggccaggccggagttgactacggccacggcccacgaggcatgatcggcccaacagagcgcacaggcaaggcaaaccgtcagcactcagtggagccctggcgggctggcctcccctcttcttcgcctgcacctgcacgcgcccccgacctcaccctctgctgacctcgctcccctcccgtagccgccggagccctcatcggtttatcctcccgctgccacctgcaacagccccgggcggagatccatcctaactctacgtgcaggtgaccccaagtcctcaagtgggtggcgcaaccatgcccaaggttaagaatccccacgttttcatggacatatcaatcggtggaggtagcgccgagaggatcacattcgagctatttgcaaatgtagttccaaagaccgcggagaacttcagagcactatgtactggtgaaagaggccttggagcgtctacacagaaaccactctattataagggaacatatattcatcgcatagttaaagggtttgttgctcagggtggtgatttttcaagcggagatggaaaaggtggagagagcatttatggtggaaaatttccagatgaaaacttcaagctactgcacaatcagcctggtgtcctgtccatggcaaattctggaccaggcaccaatgggtcacagttttttattacattcaaggctctacctcatcttgatggcaaacatgtggtctttgggaaggtggtcagtggaatagctttgcttaaaaatcttgaagcagctggcagtgaaactggaaatccttcttgtcaagtgaaaattgtagactgtggtgaagtttccaacacaaattctcaagatctgctaaagggagagaaagaaaaaaaactaagaacagcagatggtaactccaatgctgaagggagagccaaattaaaaaaagcatctggtgattataagcaaagaaagaagagaaaacattattcatctgattcatatagctcagatacttcagactcgtcgtcctattcttcagatagtggctctgattcagaatcacagtcatcaatgaatactagctcgtccagtgatcataggcgtaagagaagaaagggatctaagaaggataagcgcaagctcacgaagaggaagggtaagcatacaaggagtaagagaaagagtagaggatccaaaaggcgtcctagacggagctatgggagttccagtgatgattcagtaagctcaaagacagataacagcagttctgacagtgaaaatggtggtcattataccaagcgttccttgccgaaagataaagagagtaccaaaatgacaaattcagaacaaggaagaacgtttccagatgtagacaaagtcaaacaaacagttactaccatcaaccgatcacaatcacatgatggaagtaaaccctcaaacaaagatgacaatggggctgatgacagatctggaaattacagttcaaaagataggaatgatccaggtgcaagctctaggatcagtcctatacagactgatgtaaatttaacgaaaccagtaaatgtatatggcaacattggtggtgataatgcagatgctggcatgtctataactggtacagaaaggcacctgccaagcaatgaacctgtgtccaccaatggtaaagatttagctgtgggttctgcagacaatgggcagcctcagcgaatcaggaaagggcgtggttttactcagaagtatgggtttgcacgccggtacaggacaccatctcccgagcgcccccctgttcgaccccgctacgatggagggagagaggataggtggaacaatttcaataggtatggaagaactggtccttatagtagacgctctccagtaaggagataccatggctcgccaagagccaatagcccatccaggtaccaaagaagaggacggagcaggtcacgcagcccggcgacgcgtcatgaccgtggagggtatcgccgccccagcccaaggcgcagccgcagccctgcagacccgagacgtgatgcgaacgataggcctcgatcaggtcacggtggaggcggtcctgaccaccgtggccacatcccccctgccaacaacaggtccaggtcgaagagccgggatcccttgagatccaggtctcctgatgctgccccagccaagagggagagctcgagatacaaccgcaggcgcagcagcagctcgaggtccagcagccctgatgctgatggaaacaaaggcttggtctcgtactgagatgtaacgccacaacgatttacatgcgccaagaaccatctttcttgctagtttagcgttatgtacgcttttgtaatggcttctaaacttgtttttttgatgtagctgtacatttggatgtcctgttagacgtgaaatgttttttacgtcagatatttataactacttctgagtcagtataacgcgaagagtgctatgcgttcttaggtcgaggcatgaatgttcgagtgtggttttgggtaaaactgaaacgtgttggtc

SEQ ID NO: 139794 - DNA, 2228 bp, Zea Mays
ctcctacctggtgacgtaaatccgccagtggtcgaagcggtggtttgggattgtcatgtgtgctaggtagtcagtccatgactctcttgagggatgttgctaaagatttctagtttgtcacacctgcagtgcaggtgaccccaagtcctcaagtgggtggcgcaaccatgcccaaggttaagaatccccacgttttcatggacatatcaatcggtggaggtagcgccgagaggatcacattcgagctatttgcaaatgtagttccaaagaccgcggagaacttcagagcactatgtactggtgaaagaggccttggagcgtctacacagaaaccactctattataagggaacatatattcatcgcatagttaaagggtttgttgctcagggtggtgatttttcaagcggagatggaaaaggtggagagagcatttatggtggaaaatttccagatgaaaacttcaagctactgcacaatcagcctggtgtcctgtccatggcaaattctggaccaggcaccaatgggtcacagttttttattacattcaaggctctacctcatcttgatggcaaacatgtggtctttgggaaggtggtcagtggaatagctttgcttaaaaatcttgaagcagctggcagtgaaactggaaatccttcttgtcaagtgaaaattgtagactgtggtgaagtttccaacacaaattctcaagatctgctaaagggagagaaagaaaaaaaactaagaacagcagatggtaactccaatgctgaagggagagccaaattaaaaaaagcatctggtgattataagcaaagaaagaagagaaaacattattcatctgattcatatagctcagatacttcagactcgtcgtcctattcttcagatagtggctctgattcagaatcacagtcatcaatgaatactagctcgtccagtgatcataggcgtaagagaagaaagggatctaagaaggataagcgcaagctcacgaagaggaagggtaagcatacaaggagtaagagaaagagtagaggatccaaaaggcgtcctagacggagctatgggagttccagtgatgattcagtaagctcaaagacagataacagcagttctgacagtgaaaatggtggtcattataccaagcgttccttgccgaaagataaagagagtaccaaaatgacaaattcagaacaaggaagaacgtttccagatgtagacaaagtcaaacaaacagttactaccatcaaccgatcacaatcacatgatggaagtaaaccctcaaacaaagatgacaatggggctgatgacagatctggaaattacagttcaaaagataggaatgatccaggtgcaagctctaggatcagtcctatacagactgatgtaaatttaacgaaaccagtaaatgtatatggcaacattggtggtgataatgcagatgctggcatgtctataactggtacagaaaggcacctgccaagcaatgaacctgtgtccaccaatggtaaagatttagctgtgggttctgcagacaatgggcagcctcagcgaatcaggaaagggcgtggttttactcagaagtatgggtttgcacgccggtacaggacaccatctcccgagcgcccccctgttcgaccccgctacgatggagggagagaggataggtggaacaatttcaataggtaccaaagaagaggacggagcaggtcacgcagcccggcgacgcgtcatgaccgtggagggtatcgccgccccagcccaaggcgcagccgcagccctgcagacccgagacgtgatgcgaacgataggcctcgatcaggtcacggtggaggcggtcctgaccaccgtggccacatcccccctgccaacaacaggtccaggtcgaagagccgggatcccttgagatccaggtctcctgatgctgccccagccaagagggagagctcgagatacaaccgcaggcgcagcagcagctcgaggtccagcagccctgatgctgatggaaacaaaggcttggtctcgtactgagatgtaacgccacaacgatttacatgcgccaagaaccatctttcttgctagtttagcgttatgtacgcttttgtaatggcttctaaacttgtttttttgatgtagctgtacatttggatgtcctgttagacgtgaaatgttttttacgtcagatatttataactacttctgagtcagtataacgcgaagagtgct

SEQ ID NO: 139795 - DNA, 356 bp, Zea Mays
gagaacaagacagcagtgtagatcgtcgatgatgagcatcacgagtaggaagtcgaccttggtcctcatactcatcgtcgtcctcgtcgcctcgaaggatgaggcgagcattggggcggacgctgaatgcaacaaccttccagtcagctgctatataaagtgcctgcggccgggcgcctgcaacagctgctgcaagcagaatcacttcgtccgtggagagtgcattgggtgggactgctggtgctgcagagcctagctagccctgctctcatctgaccaatgcaaggagatttacttgtaataataatcatcataataatcaatggtaccagcatgcatcgatcgatggatagaca

SEQ ID NO: 139796 - DNA, 235 bp, Zea Mays
cccattcacattttcattctcggctatcacgtgtctttctcatcccccctcccacaaagcctattcccattcccacgtgcatcccacgcctaatccactgcaaagccccgtgttctgccattcccattcccagctgcctgtctttctcattccccctccctgcaaagcccattcacattttcattctcggctatcacgtgtctttctcattccttctcccacaaagcctattccc

SEQ ID NO: 139797 - DNA, 167 bp, Zea Mays
gtcataaagctcaaacaatcttgagcatttggttttacattatattctctggtttctgtttttgtgatttgtgttctgatgatgcaaacacttccatttttatgttactcctgcacaagttttcctgcacaaccaactgtcttttgaattctttttgttatttgatc

SEQ ID NO: 139798 - DNA, 622 bp, Zea Mays
actttacatacgcagtttagtgttgtgagagttgttttgttgtgacatgctttggactattaggtggctgaattctgaattttcagatttggaatagcgtctaagtctgaatttccaaagtagtttcttggacagttaacatcgcagatcctttgcacgatgcatcattttaaataacacggtgctgcgtcatgaaatgaagtctgttttcactctcatgttcatgttcatgcacaaatatggaagccacattttgtgtttatcatgctttcctatatctttatgtacatgtgatttaatgctagttgtgtatttatgagaattttggtttattttgtaggattccggctctcatcaagtgactcctccccctcacgttgactttgcggacagatgtctcaattctagtggtggagctacgaacaacaatccgatgtcctgatcgagagcgatggagttaatgtttgaacttgtgtgtttgaacttatgaactaaaaatgtgaactatggatgtgaacttgtgtgaatttgtgaacttatgtatttggacttatgtgaatttgtgaacttatatatttggacttgtgtgaatttgtgatatgaacatatatcaatgtgtttg

SEQ ID NO: 139799 - DNA, 1046 bp, Zea Mays
gccattggaagccaccagcaagagaccaacagcaagggtgcgaagaaagggtggccccctagctagcctagctagagagagagagagagagagagtcatcataatactcagagagaagcacgagcacagctgcactagctagctagctactgcaaagaagcaagctctcgatcacaatggccgccattccttctctgctgcgtcgactcgccattgtcgtcgccaccaccgccatggttatcctccttccctccccgtccgtcgccggcgaccccgacctgctccaggacatctgcgtcgcggacctcacgtccaccgtgaaggtgaacgggtacgcctgcaaggcggcggcggcggtgacggcggacgacttctacttcagcggcctaggcggcgcgggcaacacgagcgccagcgcctacggctccgcggtgacgggcgcgaacgtggagaaggtgccggggctgaacacgctgggcgtgtccatgtcgcgcatcgactacgcgccgggcgggggcctgaacccgccgcacacgcacccgcgcgccaccgagatggtgttcgtgctgcagggcaccctggacgtgggcttcgtcaccgccgccaacaaccgcctggtggcccgcaccctggcgcccggcgacgtgttcgtcttcccccgcggcctcgtccacttccagcgcaacgccggcgacggccccgccgccgtcttgtccgcgttcaacagccagcttcccggcacgcagtccctcgccgccgcgctgttcgcggcgtcgcccgagctgcccgacgccgtgctcgccaaggcgttccaggtcggcaccaaggaggtggacaagatcaaggctaggctcgcgcccaaaaaggcctgaagatcgtactgttgacgcggtcatccttgaattttttttctaccctattatgatttatgacttggttgcttccctgctgtacctccactaataagcaactgtatcagctagtctgctgcatgccttttatctgttatgtatgatccttcagctcctgcctacctttaatcgatt

SEQ ID NO: 139800 - DNA, 1516 bp, Zea Mays
attcgcaccaccgccgcgccgcccaaaccctagccgccgccgccgccgccgccgccatggtcgccgtcaaccgccccctcgtctccgtgaaggccctagagggcgacatggtaaccgacgcccccggcatcgccttaccgcccgtcttcggggcgccgatccgccccgacgtggtcaggttcacccacaagctgctgtcctgcaacaagcgccagccctacgcagtctcccgccgcgccggccaccagacgtcggccgagtcctggggtaccggccgcgccgtgtctcgtatcccccgcgtccccggcggcggcacccaccgcgccggccagggagcgttcggcaacatgtgccgcggcgggcgcatgttcgcgcccaccaagatctggcgcaagtggcaccgccgcgtcaacatcaacctccgccgcgtcgccgtcgcctccgcgctcgccgccaccgccgtcccggccctcgtccaggcgcgcggccaccgcatcgagtctgtccccgagatgccccttgtcatttccgactccgcggagtccattgagaagacctcccaggcgctcaagatcctcaagcagatcggcgcccacgccgacgccgagaaggccaaggactccgtcggcatccgccccggcaagggtaagatgcgcaaccgtcgctacatcaaccgcaagggcccgctcatcgtctacggcaccgagggctccaaggtcgtcaaggccttccgcaaccttcccggtgtggatgttgccaacgtcgagcgcctcaacctactagaccttgcccccggtggccaccttgggcgctttgtgatctggacccagagcgcgttcaataagctcgaggaggtgtatgggagctatgacgccccgtcgcagaagaagaagggcttcgtgctgccgaggcctaagatgtccaacgctgacctgggcaggatcatcaactctgacgaggtgcagtctgtggtgaagccactcaacaaggaagtgaagcgcagggagaagaggaagaacccactcaagaacatggctgctgtgctcaaactcaacccctacctcggcactgcccggaagatggccacccttgctgaggctgctcgtgtgaaggccaggaaggcgaagctcgactccaagaggaccaagcttaccccggagactgccaaggttaaggctgctggcaaggcatggtacaagaccatggtctcggacagcgactacaccgagtttgagaacttctcaaagtggctcggcgtgactcagtgagcggcaagggtagttaagttttgagtagctcagcttatgttgagaggaaagaggatccatcaaatctgttttatcctgcatcatcataacaagttgctacaagtcttgcatgttcgtgttgtttgtgcatttccgcgagaacatagtatttttatattcgaaccagttgtctgaactgtgcttggatttgtgcactgatgcttggctcaacctttctgtatcacgaatgagctggtccttgctgaaaa

SEQ ID NO: 139801 - DNA, 802 bp, Zea Mays
cgccgccgccgccgccgccgccatggtcgccgtcaaccgccccctcgtctccgtgaaggccctagagggcgacatggtaaccgacgcccccggcatcgccttaccgcccgtcttcggggcgccgatccgccccgacgtggtcaggttcacccacaagctgctgtcctgcaacaagcgccagccctacgcagtctcccgccgcgccggccaccagacgtcggccgagtcctggggtaccggccgcgccgtgtctcgtatcccccgcgtccccggcggcggcacccaccgcgccggccagggagcgttcggcaacatgtgccgcggcgggcgcatgttcgcgcccaccaagatctggcgcaagtggcaccgccgcgtcaacatcaaccaccgccgtcccggccctcgtccaggcgcgcggccaccgcatcgagtctgtccccgagatgccccttgtcatttccgactccgcggagtccattgagaagacctcccaggcgctcaagatcctcaagcagatcggcgcccacgccgacgccgagaaggccaaggactccgtcggcatccgccccggcaagggtaagatgcgcaaccgtcgctacatcaaccgcaagggcccgctcatcgtctacggcaccgagggctccaaggtcgtcaaggccttccgcaaccttcccggtgtggatgttgccaacgtcgagcgcctcaacctactagaccttgcccccggtggccaccttgggcgctttgtgatctggacccagagcgcgttcaataagctcgaggaggtgtatgggagctatga

SEQ ID NO: 139802 - DNA, 2477 bp, Zea Mays
acaaaaatccccgatctactttactcccctggccctaagccaaacccaaattcccccatcccacgacgccgccgctgccaccaccaccaccatgggaagaaaggacacctcgtcctcctccgcggccgccggcggcgggaaaaaggagaaacctatgtcggtgtcagccatgctcgcctccatggacgcccccgcggcgaagcccaagtcctccaagtcggcggcgccgtccaaggccaaggcgaagccctccaaggcgccggcgtcctcgtacatgggcgacatcgacctgcccccctccgacgacgaggaccaagaggaggcccagctcgccgccgccaagcccaagccggcccgcgccgccgtcgacctcagcgccggcgctgcgccgtcgcacaaggacgccaagaagaaggacaagcgcgaggccgtggcggccgcagccgccgaggccgccaggcaggaggcgctgcgcgacgaccgcgacgccttctccgtcgtcatcggcgcgcgcgtcccgggctcctccgccgccgacggcaccgtcgacgacaacgtcagggacgtcgtgctcgagaacttctccgtctccgcgcgcgggaaggagctgctcaagagcgcctccctccggatctcgcacggccgcaggtacggcctcgtcggccccaacggcatgggcaagtccaccctgctcaagctcctggcctggcgccaggtccccgtgccgcggaacatcgatgtcctgctcgtcgagcaggagatcatcggcgatgaccgctcggccctcgaggccgtggtcgccgccgacgaggagctcaccgccctccaggccgagcaggcgaggcttgaggcctctaatgatgctgatgacaacgagcggcttgtggaggtgtatgagaagctgaatctcgtgggctctgacgtcgcccgtgcccgagcgtccaagattcttgcggggctggggtttgatcaggcgatgcaggccagatccacaaagtccttcagtggtggctggaggatgcgtatttcgcttgcccgtgcgctcttcatgcagccaactctgctgctgctcgatgagccgactaatcacctggatctgcgcgctgtgctatggctggaggaatacttgtgctcccagtggaagaagacattgattgttgtttcccatgaccgtgacttcctgaatacagtgtgcaatgagatcatacacttgcatgataaaagtcttcatgtgtaccgtggaaattttaatgattttgagagtgggtatgagcagaaaaggaaggagatgaaccgaaagttcgaggtgtatgagaagcagatgaaagcggccaggaagtctgggagcaaggccgcacaggataaggttaagggccaggcgctatcaaaggctgctaaagaggccgccaagaacaaggggaaagggaagagtgctgcagatgacgatgatgaccagaaacaggtagctgtgccgcggaagtggcgtgactacagtgttgagttccatttcccagagcctacagagctcacaccacctctccttcagctcattgaggtagggtttagctaccctggtaggccagacttcaaactctcaggtgttgatgttggcattgatatgggaacacgtgtagctattgttgggcccaatggagctgggaagtctacgctgcttaatttacttgcgggtgatcttatcccaacagaaggggaggcaaggaggagccagaagctgaggattggacgatactcgcagcattttgttgacttgctgacaatggaggaaaatgcagttcaatatttgttgaggctccacccagatcaggagggaatgagcaaagcagaggctgtccgtgctaagctcgggaagtttgggttacctggacacaaccatctcactccaattgtcaaattatctggcgggcagaaggcccgagttgtgttcacttctatatcaatgtctcaacctcacatactcctgcttgacgagccaacgaatcacttggacatgcaaagtatcgatgcattggcagacgcgctggatgaattcactggaggtgtcgtcttggttagccatgactcacgattgatatctcgtgtttgtgaggatgagcaaaggagcgagatatgggttgtggaggatgggactgtgaacagatatgatggcacatttgaggattacaaggatgaactcatggaagaaataaagaaggaagttgaagaataatgctgctccaagttagttgtgctttgctgtttatttatataataggctgttttcttgaactgaaattgcatgtactattactgagttctctttactctggtttgcagagtattcatatatggttccaactttgtaaaaatggggcatgcttgttttatgttatacaagagaaacctgagaatatggtattatttgtttgtatattttgttgtgacatatatgtgactggacgaccggtgcagcacttctc

SEQ ID NO: 139803 - DNA, 1236 bp, Zea Mays
ggacattatttagagtacttgtctttttctgtaaagtagtggccattggtcaacaaaatattacctttgccaaagaattaggagatgcaactgcatgttggtcacttctctttttttccttgaaaacctgaaagttcaatttacttagaaactagatgaaacacaagttgttatttatcctcaagtagattaattaccactaagataactaaacaccatataggtattcaccaaacagtcactgtaagtcgataactctgaagtccaaaataaggcatgttgtagcaagcaatcattcaacttttttactgatattagttcagttctcactagctgatgggcagaggtttgatctatggtgtaaatagctattttttcttgtttattgtgtagtcgtgatcttgttttatgcaatcatatgtacttaccattttgcatcttttgaggtgcagatcagtggagtgcactcaaaactgagaattttttccccaagaagattctttatttgttttaacaaactagattcatccatgttgttttaagattcatccatgttgtttgcatactgaatattacttctaaagaaacatgttacatccataatttttgttttgggctattacacaagagaccgttttcactgcactgttctatccagatttttatcgactacaattttgtactaaccaactctacctacagaaacaagacctgcctacagtgatgaacttgcttaatataaaacacacgagccctcctcatccaccaccgatggaggatggatggcatatatgattctctaggcacctgttatgtactaattgaattttaatttcagtatacactgtgtaatggtcaaaggagaaaacttgatgaatggagaatgtacaaagatcaaagtatggctaaatgaccttgctggaagtgaatgggcaacaaagacatatgcacagggagaaaggttgaaacaagcacagaacgtaaacagttcactttctacacttggtgatgtcatatgcactctttaggtatttaaatttgagtcctttatttaagttttgttagtcttgtaactcaattttgaccacttgtaggtcgttgctattttaaattataggaattcaaagctaacacaattgctaaaagactcactaagtatgtagtcttttgtttatagaatgctataatcttatacattacttttataattcaatgtttaaacaatacaggtggaga

SEQ ID NO: 139804 - DNA, 459 bp, Zea Mays
atggagcagagagaaagtcgccggctttccgtgagggaacaggggcgcagctgggacgagcttgggcgcgagctgcgcgcagagagactcggcggccatgggcagggactcgcggccggcgaactggagaccacgggggtgcggaagggaagcagcttcggcttgcaggagcgcagaccggcgcctgagaagccgagcacgagcagaagcgccggcgcggccacagagaaacaaggggcagagaaggagtgcgcatggaagagccgttcggtcggacgcacggcagcttgggcgcagaagctggagagagatggagggaggagagagcagcagggagctggcagcgcgcaggggaaagagatcgatggccacgagagctcaacggcagaggttaaagatgatctcgcgggggataaaaccacaggctgccgagtagtgaaaaaatccgggaagagataa

SEQ ID NO: 139805 - DNA, 2295 bp, Zea Mays
ccacagcaaactgtgagcccgcctcgcaatctccgccaacgcacacggcacaacaaaaccaaaaagttctcacacgctgacgccaccgcaccgcatctccctcccattccactccagtccaccaccgctcccattccccagccgccgtcgccatggccagcgccgcccactcccttctgcacacaccggaggcccacagggccgccacccgctcgcccttctctcctcccgcgcccactcccttcctccatctccgccctcaccgcctccccctccgcctccgctccacctccccgaccgcctccgacctcaccgccttccccccgaacccgaacgggatctttgcgtccgaccggcccatcgacgtggacgccgccacggaggccgagctgcgggagaacgggttccggagcacgcgccgcaccaagctcgtctgcaccgtgggccccgccacctcgcgcccggaccagctcgaggcgctcgccgtcggcgggatgaacgtggcccggctcaacatgtgccacggcgacagggagtggcatagggccgccatccgcgccgtcaggagcctcaacgaggagaagggcttcgccgtcgccgtcatgatggacaccgagggcagcgagatccacatgggggacctcggcggcgcatcctcggtcaaggcggaggatggagaagtatggacgttcagtgttagatcatttgaattgcctctcccagaacgaactattaatgtgaactatgatggatttgctgaagatgtgagagttggtgatgagctccttgtggatggtggaatggctcggtttgaggtgattgagaagataggaccagatgttaagtgccgttgcacagatcctggtttattgttgccacgtgccaatcttacattctggcgtgacggcagtatcgtccgtgagaggaatgctatgcttcctacaatttcatcaaaggattggcttgacatagactttgggattgccgaaggtgtagatttcatcgctgtttcatttgtcaagtctgcagaagtaattaggcacttgaaaagctacatagctgcaaggagccgtggaagtgacatggcagtcattgcgaaaatcgagagcatcgactctctaaagaacctggaggagatcatccgagcgtcagacggcgccatggtagccagaggggacatgggggcgcaggttcccctggagcaggtcccctcgatacagcaaaagatcgttcagctctgcaggcagctgaacaagccggtcatcgtcgcctcccagctcctcgagtcgatgatagagtaccccacgcccaccagggccgaggtcgcggacgtctccgaagccgtccgccagcgcgccgacgccctgatgctttccggcgagtcggcaatggggaggtacccggacaaggctctcagcgttctgaggagcgtcagcctgaggatcgagaagtggtggagggaggagaagcggcacgaggcgctggagctccggagcgtctcgtcctccttctccgacaagatatcggaggagatctgcaactcagcagctaaaatggctaatggcctgggagtggacgccgtctttgtgttcaccaagaccgggcacatggcctccctgctctcgcggtgccgccccgactgcccggtcttcgccttcacgacgtcgacgtccgtcaggaggcggctgaacctgcagtggggcctgatccccttccgcctcgccttctcggacgacatggagagcaacctgaaccgcaccttctccctgctcaaggccaggggcatgatccagtctggggacctcgtgatcgccctctcggacatgctgcagtccatccaggtgatgaacgtaccctgaggtagaagagccttacctttacctccatgccgcacggtcccgtatcggaaggaacacgcgtgttatcggcaccttggaaggacggtttcttccttccctgcgcctaaatcgctgccctttgttttcgctgtatcagatgctgctatgctatgctaggctctagtctggcccagggaactgtggcaataatctgtggctttcaggctggtgttagaactcttgtactacttgtaggcttaggtgatttttatcgtgcaagtagttggtttgatgtttttgtgtggtataaaagcgactcaagctatgggcctaggcctctttggtataccttttttttctgaagagtttttttagagaatctggattcgttgataacctagctctcacgagaatctcaatattacggggggcttacttacagagaaatatgaagggg

SEQ ID NO: 139806 - DNA, 2063 bp, Zea Mays
ctccctcccattccactccagtccaccaccgctcccattccccagccgccgtcgccatggccagcgccgcccactcccgcgcccactcccttcctccatctccgccctcaccgcctccccctccgcctccgctccacctccccgaccgcctccgacctcaccgccttccccccgaacccgaacgggatctttgcgtccgaccggcccatcgacgtggacgccgccacggaggccgagctgcgggagaacgggttccggagcacgcgccgcaccaagctcgtctgcaccgtgggccccgccacctcgcgcccggaccagctcgaggcgctcgccgtcggcgggatgaacgtggcccggctcaacatgtgccacggcgacagggagtggcatagggccgccatccgcgccgtcaggagcctcaacgaggagaagggcttcgccgtcgccgtcatgatggacaccgagggcagcgagatccacatgggggacctcggcggcgcatcctcggtcaaggcggaggatggagaagtatggacgttcagtgttagatcatttgaattgcctctcccagaacgaactattaatgtgaactatgatggatttgctgaagatgtgagagttggtgatgagctccttgtggatggtggaatggctcggtttgaggtgattgagaagataggaccagatgttaagtgccgttgcacagatcctggtttattgttgccacgtgccaatcttacattctggcgtgacggcagtatcgtccgtgagaggaatgctatgcttcctacaatttcatcaaaggattggcttgacatagactttgggattgccgaaggtgtagatttcatcgctgtttcatttgtcaagtctgcagaagtaattaggcacttgaaaagctacatagctgcaaggagccgtggaagtgacatggcagtcattgcgaaaatcgagagcatcgactctctaaagaacctggaggagatcatccgagcgtcagacggcgccatggtagccagaggggacatgggggcgcaggttcccctggagcaggtcccctcgatacagcaaaagatcgttcagctctgcaggcagctgaacaagccggtcatcgtcgcctcccagctcctcgagtcgatgatagagtaccccacgcccaccagggccgaggtcgcggacgtctccgaagccgtccgccagcgcgccgacgccctgatgctttccggcgagtcggcaatggggaggtacccggacaaggctctcagcgttctgaggagcgtcagcctgaggatcgagaagtggtggagggaggagaagcggcacgaggcgctggagctccggagcgtctcgtcctccttctccgacaagatatcggaggagatctgcaactcagcagctaaaatggctaatggcctgggagtggacgccgtctttgtgttcaccaagaccgggcacatggcctccctgctctcgcggtgccgccccgactgcccggtcttcgccttcacgacgtcgacgtccgtcaggaggcggctgaacctgcagtggggcctgatccccttccgcctcgccttctcggacgacatggagagcaacctgaaccgcaccttctccctgctcaaggccaggggcatgatccagtctggggacctcgtgatcgccctctcggacatgctgcagtccatccaggtgatgaacgtaccctgaggtagaagagccttacctttacctccatgccgcacggtcccgtatcggaaggaacacgcgtgttatcggcaccttggaaggacggtttcttccttccctgcgcctaaatcgctgccctttgttttcgctgtatcagatgctgctatgctatgctaggctctagtctggcccagggaactgtggcaataatctgtggctttcaggctggtgttagaactcttgtactacttgtaggcttaggtgatttttatcgtgcaagtagttggtttgatgtttttgtgtggtataaaagcgactcaagctatgggcctaggcctctttggtataccttttttttctgaagagtttttttagag

SEQ ID NO: 139807 - DNA, 1974 bp, Zea Mays
agtcaggggtaaacccgtcacttcactcctcgcccacggagtcctccgtccccctcccaacaagggcaacgacacagtgacccaccgctcgggcccacctgtcaacgtcgtccttcccctgcccccacaccgcctaccacgtactctacgggcccacacaccgtccacgtcacccacccccatccgccatacagcatacaggccagggccactcactctttataagaccttgcggggcacctcactgtcccactcctccgtctccgttctcgtctccgaagacaagaagggaacacgaaccgccggagatgaacaccgccggcgagcctcctttggggcacaagtaagacggcgtatactgtagcgcttgtttggtcgtaataggcagggcacgccgcacgcgccattcatgttttggttgccgagtgaggacggtggttgtggttggttggagaggggaacgaagggggagggagggtgcggcggcggtgctgtaagtggcggtcatcgatgacgtttcggttcccggtgaagaaccagcagggcacgatcgacggcagtccgtttgcgccggcgacggcgagggtgtcgatgttccggaggctgatggtgcgggtgaccccggccgagcggctggcagctggggacggcaaggagagagagaaggacgagaggggaggggaggcggaggctgggtcggtggggctggacaagatggtgctcagcttcatggaggagtcctccgcggccgtggagcggccgtcgcgcgggcggtgcggcaactgctttaacggcaaccatcaggacggcagcgacgacgaggacttcgacttcctgccctccgcctccgcgcccgccgcggcgccggccgcgggcggcgacgccttggagctgctgaagttatttcttcttcctccccttcttttccgccttccgtccccgttccttctcgcacgcagggcctggtgcagtgcgcgagcacggcggagcggaacctcctggcggacgcgtcgcggatcgcggagcgctgcgggcggaagaaggcggacgcccggcgcgccgtggcggacgggctccgcgcgctcgggtacgacgcggcggtgtgcacgtcgcggtgggacaaggccccctcgcacccggccggcgagcacgagtacatcgacgcggtggtggcggaggcggagcccggggcgacggacggcgtccgcgtccgcctcgtggtggaggtggacttccgggcggagttcgaggtggcgcggcccaccaaggcgtaccgcgcggcgctgcaggcgctgccgccgctgttcgtgggcaccccggagcggctgggccgggtggtggccgtggtggcggacgcggcgcggcagagcctccgcaagcgcgggctccacctcccgccgtggcgcaagcacgagtacatgcgcgccaagtggctgtccccgcacgcccgcagcggcggcggcggcggcccggacgagacgccggcgctcgcgacgccggttcccgctttctccggcgtgttcgagccgcggttcggcgagaagccgaaggcgcccggcgacgacggcattcccgacggcggagatgacaagaaggccacggtcgtggtgccgccgtcgccgtggcggcccgaggcggctagcaagctgagcccgcagccgccgcaggcaaggaggaaggtggtgaccgggctggcgtccctgctgctgctcgccagctgatcaacccaaggagatacgctctccccggctccggctccggctccaaaacaaatttccaccttttttttttgttgcctcccttccctcgctcgcgttcgtcgatccgtccgagggccggctccaggtgttttagcggtttttttccggctcctcggaacagtgagagagaaagaaacgcctcccttttcccgtcgtttttttcttcttcttgttctttctgttcatgcgagaaaaaaaaaacaagagtttcagt

SEQ ID NO: 139808 - DNA, 1624 bp, Zea Mays
gggggagggagggtgcggcggcggtgctgtaagtggcggtcatcgatgacgtttcggttcccggtgaagaaccagcagggcacgatcgacggcagtccgtttgcgccggcgacggcgagggtgtcgatgttccggaggctgatggtgcgggtgaccccggccgagcggctggcagctggggacggcaaggagagagagaaggacgagaggggaggggaggcggaggctgggtcggtggggctggacaagatggtgctcagcttcatggaggagtcctccgcggccgtggagcggccgtcgcgcgggcggtgcggcaactgctttaacggcaaccatcaggacggcagcgacgacgaggacttcgacttcctgccctccgcctccgcgcccgccgcggcgccggccgcgggcggcgacgccttggagctgctgaagggcctggtgcagtgcgcgagcacggcggagcggaacctcctggcggacgcgtcgcggatcgcggagcgctgcgggcggaagaaggcggacgcccggcgcgccgtggcggacgggctccgcgcgctcgggtacgacgcggcggtgtgcacgtcgcggtgggacaaggccccctcgcacccggccggcgagcacgagtacatcgacgcggtggtggcggaggcggagcccggggcgacggacggcgtccgcgtccgcctcgtggtggaggtggacttccgggcggagttcgaggtggcgcggcccaccaaggcgtaccgcgcggcgctgcaggcgctgccgccgctgttcgtgggcaccccggagcggctgggccgggtggtggccgtggtggcggacgcggcgcggcagagcctccgcaagcgcgggctccacctcccgccgtggcgcaagcacgagtacatgcgcgccaagtggctgtccccgcacgcccgcagcggcggcggcggcggcccggacgagacgccggcgctcgcgacgccggttcccgctttctccggcgtgttcgagccgcggttcggcgagaagccgaaggcgcccggcgacgacggcattcccgacggcggagatgacaagaaggccacggtcgtggtgccgccgtcgccgtggcggcccgaggcggctagcaagctgagcccgcagccgccgcaggcaaggaggaaggtggtgaccgggctggcgtccctgctgctgctcgccagctgatcaacccaaggagatacgctctccccggctccggctccggctccaaaacaaatttccaccttttttttttgttgcctcccttccctcgctcgcgttcgtcgatccgtccgagggccggctccaggtgttttagcggtttttttccggctcctcggaacagtgagagagaaagaaacgcctcccttttcccgtcgtttttttcttcttcttgttctttctgttcatgcgagaaaaaaaaaacaagagtttcagttgtccgcggccccgggggaacggaaggaatccggggcagttttggttgggtccccttgccctctgttcttgggaggaactgaagcctcggcctggcttgcagtgctgtaccgtgttcgtcaggtcatgtcaggcttgtgacttcaattgaaagaggtactactacagtagtagt

SEQ ID NO: 139809 - DNA, 118 bp, Zea Mays
aaaaaaaaaatcatcgtaactgtttgtgtaaaaatgaatggtttacacattatcatcataccctatgtatttcttatattcttgagtccatcgtttgttgtgcccttattgttttacc

SEQ ID NO: 139810 - DNA, 3276 bp, Zea Mays
ggcgatcgcgcttgatttttagcgctctcctgtgagcctccggctgcggcgtcgcagagatgggctgtgccccggtggtgtgggccgcggtgtggttgcttgctgccgcggtggcagggttcgccgatcccggcggcctcgagcgcgcgtttccaatagtgaagccagactacgggcacacgaaactccaactcgcaaaagaaggtctggaagcaattcagaggatcagaactccaatagctgctgtttctgttattggcccctatcggtcgggcaaatcttttcttctcaaccaacttctctccctatcatgtgacaatggttttggagttggacacatgcgggatacaaaaacaaaaggtatatgggtatggggttcccccgttgaggtggatatcggtggctccaaggtgtctgttctatacctggacaccgaaggatttgagagtgttggaaaatcaaatgtatatgatgataggatatttgctctggcaactgttttaagttctgttctgatctacaatcttcctgaaacaattcgtgaagccgatatatcgagactttcatttgccgtcgaaattgctgaagaattctatggaagagtcaaggggcaagatgttgcttttgagccagccaaacttctgtggttgatccagagggattttctccaaggaaaatcggttcagcagatggttgatgaagctctccaacgggtacctaacaacaatggagacacaaatattgacgagctcaaccaaatcagagactctttggcggttatgggagataacagtacagcttttagcttaccacagcctcatctgcaaaggacaaagttatgtgatatggaggaccaggaacttgatccgttgtatgtaaagaagagggatcagttgaaagaagtcgttgcatccatgataaaaccaaaaattgtgcagggtagaactctgaatggaacagagtttgtatccttcctagggcagatagttgatgctttgaataaaggtgaaattccatcagccgggtcgctggttgaaattttcaataaggccattcttgaacgttgcttgaaggtgtacagtgaaataatgggcagagcaggtctaccagtgtcagtggatgaacttcgggagttccacgacctggcaaaagatgaagctagaaggcttttcaacaagcagcatttcggtaaacatcatgctgctcggtccatcctcaagcttgatgaagagattaaaaaggtgtacagaaacttgggccaagctaacgagtatcagtcatcaaagctgtgcgaagcacggttctcagagtgcgaagataaaatggaacgactccaagtcttgaagcttccgtccatggcgaaatttgatgccggattccttctctgcaatcgaagttttgaaacggactgtgtggggccagccaaggaaagctatcgacaccggatgtcaaagatgctggcaaggtcccgtgctcttttcatcaaggagtacaacaacaagctcttcaactggctcgccatattctccctggccatggttgtcgttgggcgcttcttggtcaagttcttcctgctcgaagttgctgcgtgggtgatgtttgccttcctagagacatacacgaggctgttctggtcgtcggagtccctgtactacaaccccgcctggcacgcgatcgtctcttcttgggaaaccgtcgtctacagccccgttcttgatcttgacagatgggcgttcccgatctgcgctgtcctgttgtttttggcgttttattggcgttgcctcggtggaaggaggggaattgcccggtcactgctacctctgtacaacggggcttattacagaagctccagtcgcacaagaacagactgatccctcgaaccatgcgcacaatcacaccattagcgtgcacatatagttgtatcatgcttattccaacactgcattcttcgattatgagtcaaaactcgggtgttgctgtaaatatgaaacccagaaggtttgtcaattgtataaatatatggctgcttgctaaacttcttggatttatttgtttgtttatttattaagctctgatcctctggggtttgtctccgtagtgtcaagcccattgaatggcgtagctgctgtagttggtctgcttgtcggcgtagcggtcccagatcatgatcccggcgtagctgggcgccttctgcaccaccgggaggacgccgtagtacaggttcttggggtgcacgtacccgaccgtccgctccgacgccggcaggccgacgtagagcccggagcccgggtacgccgcggcccacttgtcccactcctgctgccagtacgcggcgcagcgcgcgtcgccgtagagcctgacgttgacgcgggtaacgagccccgtggcgagcagccgcagcgccggcccgtccggcgggaacgcgcaccgcggcgtcgccgacagctgcacgggcgtgcgggcgcggaactgccggttgtagctccacaggcgcgcggccagcgcgtcgaggtggtccggcggcgggcggccgccgcggtcgaggaagaagtcgaggccgtcgacgtacgcgtcgccgaacgggcggcgcacgccggcgcgcggcgccggcgccgggaagtaggcgtaccagaggtagtcggcgaggtccgcggcggcctcggcgctcggcagggagtgctgccggccgccgagggagaggaacaccatgatgctcttcgactggcagtgcttgatgtcggcgccgatgccggcgacggggtggcccgagaggtccaggctcggcgggctgttgccggggccggccgagacgttgaggaaggagatgacgacgatggtgtacgtgcccgtgtcgcaggcctctcggagcgtgccctcggccttgttccggccccagaagacagtcacctgcccggtcttccccgcggccgcggccgggccggcgaggaagagggagccagcgacggccacaagggccgccaggggcagtagagtggttgctggtctattacttgcgaccgccattggtgtctcgttggttaattgctgctaccactactcgtcactactcttgcgtgtgcgtgtagcagcagtcacccatcacccattatatgcctttcatttggtgttcgtcttagacttgtcttgttttggatcgaatcgggaaagaggaggacagctcaccgagctagaaggacgtggacgtggtacatagcatggcggcgaatcgactatgcatgctgttgtgtttgaccgacgcacgacgcagtgtctcgt

SEQ ID NO: 139811 - DNA, 1736 bp, Zea Mays
gccgcaatgcgcgaacggtacggtgtctgttttttcttctttcgtggatggaagtcattttcgcttcggcatatatcgatcagcaggttgctggtgagctgtcctccatgtgtacttcaattccacacgggtccggtccggccggagaaggaacaatcagaacctagctagctggctgaaaaacgtgccccggtcaactctcagcagctgaattccacgcgtctctctctccctcgaatgtactctgctcctccgatcctataaatagctgactcgattctacctaattctccacaccactgatcaagcaataggacgatcgagcaagaagcaagcagcagtaacaagaaaccatcatcgatccatgtatccaccaatggcggcgctcggaggacggcggaggagggcgtcgtcagcggccctccagctagccttgtttgcggtggccctggtctccctggccggcccagccacggccgcggggaacaagaccgggcaggtgaccgtgttctggggccggaacaaggccgagggcacgctgcgcgaggcctgcgactcgggcctctacaccatggtgatcatgtccttcctcgacgtctacggcccgcagcgcggcggctaccagtaccacctggacctgtcgggccacccgacggccggcatcggggacgacatcaagcactgccagttcgtgggcgtgccggtgacgctctccgtcggcggcttcggctccggctactcgctcccgtcgacgcaggcggcgctggacctgttcgactacctctggaacgccttcctcggcgggtcgaagccgggcgtgcgccgccccttcggcgacgcgtggctcgacggcgtcgacctgttcctggagcgcggctcgcccgccgaccgctacgacgtgctggcgctcgagctcgccaagcacaacatccgcggcgggcccggcaagccgctgcacctgacggccacgccgcgctgcgggttcccgcccgccggctacctgcgccgcgcgctcgacacgggcatcttcgagcgcgtccacgtccggatctacgacgacgccgactgcgaggccaggtggcacctcgcgtgggacgagtggacggcggcgtacccggccaccaggttctacgtcggcctcacggcgtcggagatgacgcacggctgggtgcaccccaagaacgtctactacgacgtcgcgccgtccgcgcagaaggcggacaactacggcggcttcatgatctgggaccgctactacgacaaactctccaactacaccagcatggtcaaggactacgcttgattggatttctcgactcagttcagagcagacatgcatgctagctgcgtcagccgcttcgatctagctcaccgacctatataagccgaagtactgtgtagtgtgtttgcattttattgtaagaaactaagaaggaataaattggcgaataaacaagagtaaaatacaccgggttgttgagtgaaattcagcattaagggtgtgtttgtttcagcttatagattatataatctggattataatttaaattatataatttagattataatctagatatattataatctatatgtagttgtttgctagtctagattatacaaatgtagattattcataaagacagcagtacccttgtttgtttatgtgaggtgagaaaagaaggatggtatatattgtaatttctatttacataacaatgggtagtgggacttttgcc

SEQ ID NO: 139812 - DNA, 1251 bp, Zea Mays
accacccacccgttttatccacgcacggcgtcgaacaccccgcggtcgctcacgtgaggcgccaccccgcgcacccagtcagcgcccgcctccaccacccacccacacgacaaaaatccgccatggccttcgcgctcaaggccgccgccgcggggtcggcgtcgttctccgccgcggggccgaggcggcgcgccgcggcgactggtagggtctcgttccggagcgccgcgcccgtggtcgccgtcagggccgcggcggcggcggccgccgctgtggcggaggacaagcgcagcatctccggcaccttcgccgagctcaggcagcaggggaagactgccttgattcccttcatcactgctggagaccctgacttggccaccacagcaaaagcactcaggatccttgatgcgtgtggttcagacgtgatcgaactgggtgtgccttactccgatccattggctgacggccctgttattcaggcctccgcgacgcgcgctctggcaaagggcaccacatttgaggatgtcatctccatggtaaagggggtgatacctgatctgtcctgccctgtagcgcttttcacatattacaacccgatcctgaagcgtggtgtccccaacttcatgagtattgttaaagaagctggggtacacggtcttgtggtaccagatgttcctttggaagagacagatgtcttgaggagtgaggctgccaaaaacaacctagagctggtgctattgacaacaccgactacaccaaatgaaagaatggagaaaattgcacaggcttcagaaggatttatttatcttgtaagcactgttggagttactggtacacgtgcaaatgtaagcggcaaggtgcaatctcttcttcaggatatcaagaaggtgacagaaaaacccgtggctgttggctttggtgtgtcgactccagagcatgtccggcagattgcaggatggggcgcagatggtgtgattatcggtagcgcagtgatgaagacgttggaggaagctgcttctccagaagaaggattgaagaagctagaagagttcgccaagaacctgaaggccgcattgccgtgaaccaaccattttcgttagcaaagaaattaagattttttttttcctttcaatcttggctttcagggttgttggttgttgtgtagtgaaaataattgtgtccctatgttgaatgctcaaatgaataaatcaagatcccatatattatattagcagagcagaaggcagtgtt

SEQ ID NO: 139813 - DNA, 1766 bp, Zea Mays
ttctttttttttgcctctccagaagtttctgcagggaggcacagcaagagagagagcccagcactagataagtagggggggaaagaagagcatccaagcgtactcctcgatctccttcaagcagctaacataattaactcatgggtgcatagagatatgccgccgacgacccatcatatctatgggtccctccccttgcactgcatctccttcaattcctagtgtttgcttctccctttcttgacctttgcttggaaccattgattgatagttacttattattgggcatggagcacgtcatctcaatggaggagatcctcgggcccttctgggagctgctaccaccgccagcgccagagccagagccagagcgagagcagcctccggtaaccggcatcgtcgtcggcagtgtcatagacgttgctgctgctggtcacggtcatggtggcggcgacatgatggatcagcagcacgccacagagtggacctttgagaggttactggaagaggaggctctgacgacaagcacaccgccgccggtggtggtggtgccgaactcttgttgctcaggcgccctaaatgttgaccggccgccggtgatggaagaggcggtaatgatggcgcctgcggcggtgagtagtgccgtagtaggggaccccatggagtacaatgccatactgaggaggaagctggaggaggacctcgaggccttcaaaatgtggagggcggcctccagtgttgtgacctcagatcaacgttctcaaggctcaaacaatcacactggaggtagcagcatcaggaataatccagtgcagaacaagctgatgaacggcgaagatccaatcaacaataaccacgctcaaaccgcaggccttggcgtgaggcttgctactagctcttcctcgagagatccttcaccatcagacgaagacatggacggagaagtagagattctggggttcaagatgcctaccgaggaaagagtgaggaaaagaaaggaatccaatagagaatcagccagacgctcgagatacaggaaagccgctcacctgaaagaactggaggaccaggtagcacagctaaaagccgagaattcttgcctgctgaggcgcattgccgctctgaaccagaagtacaacgacgctaacgtcgacaacagggtgctgagagcggacatggagaccctaagagctaaggtgaagatgggagaggactccctgaagcgggtgatagagatgagctcatcagtgccgtcgtccatgcccatctcggcgccgacccccagctccgacgctccagtgccgccgccgcctatccgagacagcatcgtcggctacttctccgccacagccgcagacgacgatgcttcggtcggcaacggtttcttgcgactgcaagctcatcaagagcctgcatccatggtcgtcggtggaactctgagcgccacagagatgaaccgagtagcagcagccacgcattgcgcgggggccatggagctcatccagacggcgatgggatccatgccgccgacctccgcctccggatctacaccgccgccgcaggattatgagctgctgggtccaaatggggccatacacatggacatgtattaggcactgcgggtttcgtgatcgctgggaacattttatttgcaggcgtcgctgaataaggctggttgtctcgatctcccttgacatgaaatccaaataactcacaattaaccatgagtgttccgtttggtcccagtttcgaaggtattgttaatc

SEQ ID NO: 139814 - DNA, 765 bp, Zea Mays
ctccttcaagcagctaacataattaactcatgggtgcatagagatatgccgccgacgacccatcatatctatggttacttattattgggcatggagcacgtcatctcaatggaggagatcctcgggcccttctgggagctgctaccaccgccagcgccagagccagagccagagcgagagcagcctccggtaaccggcatcgtcgtcggcagtgtcatagacgttgctgctgctggtcacggtcatggtggcggcgacatgatggatcagcagcacgccacagagtggacctttgagaggttactggaagaggaggctctgacgacaagcacaccgccgccggtggtggtggtgccgaactcttgttgctcaggcgccctaaatgttgaccggccgccggtgatggaagaggcggtaatgatggcgcctgcggcggtgagtagtgccgtagtaggggaccccatggagtacaatgccatactgaggaggaagctggaggaggacctcgaggccttcaaaatgtggagggcggcctccagtgttgtgacctcagatcaacgttctcaaggctcaaacaatcacactggaggtagcagcatcaggaataatccagtgcagaacaagctgatgaacggcgaagatccaatcaacaataaccacgctcaaaccgcaggccttggcgtgaggcttgctactagctcttcctcgagagatccttcaccatcagacgaagacggttcaagatgcctaccgaggaaagagtga

SEQ ID NO: 139815 - DNA, 1571 bp, Zea Mays
ctccttcaagcagctaacataattaactcatgggtgcatagagatatgccgccgacgacccatcatatctatggttacttattattgggcatggagcacgtcatctcaatggaggagatcctcgggcccttctgggagctgctaccaccgccagcgccagagccagagccagagcgagagcagcctccggtaaccggcatcgtcgtcggcagtgtcatagacgttgctgctgctggtcacggtcatggtggcggcgacatgatggatcagcagcacgccacagagtggacctttgagaggttactggaagaggaggctctgacgacaagcacaccgccgccggtggtggtggtgccgaactcttgttgctcaggcgccctaaatgttgaccggccgccggtgatggaagaggcggtaatgatggcgcctgcggcggtgagtagtgccgtagtaggggaccccatggagtacaatgccatactgaggaggaagctggaggaggacctcgaggccttcaaaatgtggagggcggcctccagtgttgtgacctcagatcaacgttctcaaggctcaaacaatcacactggaggtagcagcatcaggaataatccagtgcagaacaagctgatgaacggcgaagatccaatcaacaataaccacgctcaaaccgcaggccttggcgtgaggcttgctactagctcttcctcgagagatccttcaccatcagacgaagacatggacggagaagtagagattctggggttcaagatgcctaccgaggaaagagtgaggaaaagaaaggaatccaatagagaatcagccagacgctcgagatacaggaaagccgctcacctgaaagaactggaggaccaggtagcacagctaaaagccgagaattcttgcctgctgaggcgcattgccgctctgaaccagaagtacaacgacgctaacgtcgacaacagggtgctgagagcggacatggagaccctaagagctaaggtgaagatgggagaggactccctgaagcgggtgatagagatgagctcatcagtgccgtcgtccatgcccatctcggcgccgacccccagctccgacgctccagtgccgccgccgcctatccgagacagcatcgtcggctacttctccgccacagccgcagacgacgatgcttcggtcggcaacggtttcttgcgactgcaagctcatcaagagcctgcatccatggtcgtcggtggaactctgagcgccacagagatgaaccgagtagcagcagccacgcattgcgcgggggccatggagctcatccagacggcgatgggatccatgccgccgacctccgcctccggatctacaccgccgccgcaggattatgagctgctgggtccaaatggggccatacacatggacatgtattaggcactgcgggtttcgtgatcgctgggaacattttatttgcaggcgtcgctgaataaggctggttgtctcgatctcccttgacatgaaatccaaataactcacaattaaccatgagtgttccgtttggtcccagtttcgaaggtattgttaatcat

SEQ ID NO: 139816 - DNA, 1522 bp, Zea Mays
cttcaagcagctaacataattaactcatgggtgcatagagatatgccgccgacgacccatcatatctatggcacgtcatctcaatggaggagatcctcgggcccttctgggagctgctaccaccgccagcgccagagccagagccagagcgagagcagcctccggtaaccggcatcgtcgtcggcagtgtcatagacgttgctgctgctggtcacggtcatggtggcggcgacatgatggatcagcagcacgccacagagtggacctttgagaggttactggaagaggaggctctgacgacaagcacaccgccgccggtggtggtggtgccgaactcttgttgctcaggcgccctaaatgttgaccggccgccggtgatggaagaggcggtaatgatggcgcctgcggcggtgagtagtgccgtagtaggggaccccatggagtacaatgccatactgaggaggaagctggaggaggacctcgaggccttcaaaatgtggagggcggcctccagtgttgtgacctcagatcaacgttctcaaggctcaaacaatcacactggaggtagcagcatcaggaataatccagtgcagaacaagctgatgaacggcgaagatccaatcaacaataaccacgctcaaaccgcaggccttggcgtgaggcttgctactagctcttcctcgagagatccttcaccatcagacgaagacatggacggagaagtagagattctggggttcaagatgcctaccgaggaaagagtgaggaaaagaaaggaatccaatagagaatcagccagacgctcgagatacaggaaagccgctcacctgaaagaactggaggaccaggtagcacagctaaaagccgagaattcttgcctgctgaggcgcattgccgctctgaaccagaagtacaacgacgctaacgtcgacaacagggtgctgagagcggacatggagaccctaagagctaaggtgaagatgggagaggactccctgaagcgggtgatagagatgagctcatcagtgccgtcgtccatgcccatctcggcgccgacccccagctccgacgctccagtgccgccgccgcctatccgagacagcatcgtcggctacttctccgccacagccgcagacgacgatgcttcggtcggcaacggtttcttgcgactgcaagctcatcaagagcctgcatccatggtcgtcggtggaactctgagcgccacagagatgaaccgagtagcagcagccacgcattgcgcgggggccatggagctcatccagacggcgatgggatccatgccgccgacctccgcctccggatctacaccgccgccgcaggattatgagctgctgggtccaaatggggccatacacatggacatgtattaggcactgcgggtttcgtgatcgctgggaacattttatttgcaggcgtcgctgaataaggctggttgtctcgatctcccttgacatgaaatccaaataactcacaattaaccatgagtgttccgtttggtccc

SEQ ID NO: 139817 - DNA, 603 bp, Zea Mays
gcaacccaggaatcagagaaacatgcagatgaacatgatcaccgcaaaacgagacctactggactaacaacagttttccagctaggcatgcaggcctgattcaggacccaggaacaaacaagaaccaagatcagcaatgacctaaaatcacaaatcacaaacgagctaacacactagttttgacaaaatgcaaatccacttgagatacaggacagagggacacccaggcaagacatgttttccttattcatgctgacgatccctttcctcgtcatcatcttcatcgcggtcttcatctccatttcccagcttagcacaagcagctttcatcaacaactttgcgccctcctgcacgagatcttgaagctcctttttactaagacctgcccaatgcgtcataagagcgcgagcgtgacacaaatttcatcaggagatttaattaaaacattttcaaaacacattttgtttctggctttccagatggcctagcatatagcagagacacctataatgtgaatgatgtctaaccctggtaaatgtttttttaaccaaagccaacattgatcaatatcaccaaggatgtccttcttgttaatgatcttc

SEQ ID NO: 139818 - DNA, 182 bp, Zea Mays
ggaaataggacttctcattttccaaacatttattccgattttagggcaaacttgtagaaattccgaaggacgcgtcattgcacaaaaaaatctgaaacttggtgtgttttcttcttatgtgctgctgcaaaagagaaaaatataaaaaaatatttgaaaaaaaatcgcaaaaaaaaagaaaa

SEQ ID NO: 139819 - DNA, 868 bp, Zea Mays
atggcaaccccaaacatgaagaattacaggcactctagcccctttggcagcaagggtgttgaaagggctaaatctgcttgccgctcaaaatggaataacaggatcttatccaccccattcccaatgctcccaatagtggcagttgtgaacttcacaaacttaagcatatggaaacccagggccctacacccaagaaccacgaatactctttacaaatctccagagctcacgccagaaacaacagcgttcaagcacggcgcccatgccctaggccccagacccctattcgcaggtcgcagcagccgccaacacccagatcctagaccacgccgccaccgcgccaccggagtccggcggccagccaccgcccccgcccacccgcgtgccagcgagcgcgagccggcgagtccctggttccctgcgcgtgcgagaccagagatccaggcagcggacgagccctgtccgtccccagccatcagcgaccagctggtgccggtcatccctgctgcgacgagctggtgccgtgaagctgccctccaggcctacagatccattgttggtcgtgtgtgctgcccgtatccctacaaccatgctgctgcctggtgctgctgccttgagccgaccatgcaacacaaccgtgctggtgctggtgctgctgctggtgacatggtgaaaactccgagatctcctgttaccacagatctagcacttatggccattctaggtgcagcaggaggcaatgacaaagcttcaaagtgtggttgtgatattgacaatggtgaggctgggccatcattggtggtggtggagcaacaagcactagccactttgtagcaaacatgtggtcactagcatggtcatttgactt

SEQ ID NO: 139820 - DNA, 113 bp, Zea Mays
ttctattcttggaatggtcggatattaaagtgcctacctttttagaatgtggtcccctgatgcaatattgtggctcatgtagttttaaatttaggaaaggggacactatttac

SEQ ID NO: 139821 - DNA, 3442 bp, Zea Mays
cttttcagtactgttattttaacttttgttcccctatataggcatatatctgattgatatgctgaccaatgatttttcaggaacaagaagatgcagagcaaagccacaaaagaaggaagaggaatccacagaaaacaacaagctggagaatggacctctggatgcaacagaagaggtgcatcatggagtcgaaaaaggtgatggacatgttacccgcaagagaccaaggagagcagcggcctgttctgatttcaaagagaaatccatacgcttatccgaaaaaaaatctgttgttatggtcaagaagaatcggatggaggaggaagaagtagatgctgtcaatcttacaaaacttggaccagaagatccaccaccttgccggaagttgatcgattttatcttgcatgatgcagaagggaacccacaaccctttgaaatgtcagaaattgatgacttctttataacagctcttatcatgcccatggatgatgatctagaaaaagagcgtgaaaaaggagtacgctgtgaaggatttgggcgaattgaggactggaatatttctggttatgatgaaggtactcctgtaatctgggtgtcaactgatgttgctgactatgaatgtgtgaaaccatcaaccaattacaaatcttattttgaccacttctatgagaaggctcaggtgtgtgttgaagttttcaaaaagcttgcaaaatcagttggtgggaatcctaaccagggcctggatgaattgcttgctagtgttgttcggtcaaccaatgccatgaaaggatatagtggaaccatgagcaaagatttggtgatatccattggagaatttgtatacaatcaacttgttggtttggatgagacatcaaacaatgatgatgaaaagtttgctaccctgccagttcttctttctctaagagaccagtgcagatctagggtggaactgaccaagttgccctctaacttctcgaacacaagtctgaaaattaaggactcagagtgtgatgagacagcagaagacgatgatgatgcaaaattagctagattacttcaacaagaagaagaatggaaaatgatgaagaaacagaggggtaggcgtggaacaccatcccagaaaaatgtctacataaaaatcagtgaagctgagattgccaatgactatccccttcctgcatactataagccatttagccaggaaatggatgaatacatatttgatagtgatgacagcatattttctgatgatgtgccagttaggatactcaataactggacactgtacaatgcagattccaggcttatatctttggaattgatccctatgaaatcaggggcagaaaatgatgtggttgtctttggatctggtttcatgagagatgatgatggcagttgctgttctacagctgagtctgtgaaatcttcgtcttcctccagcaaagctgaccaactggatgcgggaatccctatttatctgagcccaatcaaagaatggattatagagtttggtggctcaatgatttgtataaccattcggactgatgtggcctggtacaagctacgccaaccaacaaaacaatatgctccatggtgtgagcctgtactgaaaacagcaaggcttgctgttagcatcattaccctgttgaaagagcagagtcgtgcctcaaagctttcttttgcagatgtcataagaaaagtagctgaatttgacaaaggaaaccctgcatttatatcttcaaacatcacacttgttgagagatatattgtggtgcatggacagataatactccagcagtttgcagattttccagatgagactatccgtcggagtgcatttgtcagtggtcttttattgaagatggaacagaggaggcatacaaagttagttatgaagaaaaaaactcaagtgatgaggggagagaatctgaatccaagtgcagcaatgggtccagcatcgaggaaaaaagcaatgcgtgcaacaacaaccaggctcatcaacagaatctggagtgattactatgcacatcatttccctgaagattccaaggagggagatggaaatgaaataaaagaaattgatgatgaacaagaagaaaatgaagatgaggatgctgaagatgaaggacagattgaagagaacatctcaaagactcctccatcaacacggtcccggaagttgctatcacaaacttgtaaggaaatcagatgggaaggtgaaacatctgggaaaacattgtctggagaaactctatataaatgtgcttatgttagggaactcagaatacctgttggtggaacagtagctctagaagatgattcaggagacacagtcatgtgttttgttgagtacatgttccagaaagttgatggttcaaaaatggttcatgggaggattctgcaaaaaggttcacagacaattcttgacaatgcggcaaatgagagggaggttttcttaactaatgactgcttagaattcaaattagatgacatcaaagaattggtaatggttgatatccaatcaaggccttggggtcacaagtacagaaaagagaattctgaagctgataaagttgagcaggtcaaagcagaagagagaaagaaaaagggccagcccatggtatatttctgcaaaagcttgtactggcctgagaagggtgccttctttgccctctcccgagataaaatgggtcttggtagtggtttatgtagttcttgtgataatatagagccagattctgatgaattaaaaatattctcgaagaccagctttgtctacagaaaggttacatataatgtcaatgagtttttatacataagccctgatttttttgctgaagatgaggatcgtgcaaccttcaaggctggccgaaatgtgggtctaaagccctatgcagtttgtcaaatattatccatccctgaaggggctggatctaaaaaactcaatccagcatcagcaaatatcagtgctagaagattttacagaccagatgacatttcatcagccaaagcctatgcttctgacatcagagaggtctactatagtgaggatgtaattgatgtgcctgtggatatgatagagggaaaatgtgaggttagaaagaagaacgatcttgcaagttcagaccttccagtgatgtttgaacatgtatttttctgtgaacttatatatgaccgtgccagtggagctctcaagcagttgcctccaaatgttaggtttatgtctatggtgcaaaggacaagtgcgttgaaaaagaacaaaggaaagcagatctgtgagcctgatcaaatagattcaggtaaatggttggatgtgcctaaagagaaccgtctagctactcttgacatttttgctggctgtggaggtttatcagaagggctgcagcaagctggtatgtattgttaacactgatgctgtataccatgaacatgaccaacaaat

SEQ ID NO: 139822 - DNA, 5028 bp, Zea Mays
cttttcagtactgttattttaacttttgttcccctatataggcatatatctgattgatatgctgaccaatgatttttcaggaacaagaagatgcagagcaaagccacaaaagaaggaagaggaatccacagaaaacaacaagctggagaatggacctctggatgcaacagaagaggtgcatcatggagtcgaaaaaggtgatggacatgttacccgcaagagaccaaggagagcagcggcctgttctgatttcaaagagaaatccatacgcttatccgaaaaaaaatctgttgttatggtcaagaagaatcggatggaggaggaagaagtagatgctgtcaatcttacaaaacttggaccagaagatccaccaccttgccggaagttgatcgattttatcttgcatgatgcagaagggaacccacaaccctttgaaatgtcagaaattgatgacttctttataacagctcttatcatgcccatggatgatgatctagaaaaagagcgtgaaaaaggagtacgctgtgaaggatttgggcgaattgaggactggaatatttctggttatgatgaaggtactcctgtaatctgggtgtcaactgatgttgctgactatgaatgtgtgaaaccatcaaccaattacaaatcttattttgaccacttctatgagaaggctcaggtgtgtgttgaagttttcaaaaagcttgcaaaatcagttggtgggaatcctaaccagggcctggatgaattgcttgctagtgttgttcggtcaaccaatgccatgaaaggatatagtggaaccatgagcaaagatttggtgatatccattggagaatttgtatacaatcaacttgttggtttggatgagacatcaaacaatgatgatgaaaagtttgctaccctgccagttcttctttctctaagagaccagtgcagatctagggtggaactgaccaagttgccctctaacttctcgaacacaagtctgaaaattaaggactcagagtgtgatgagacagcagaagacgatgatgatgcaaaattagctagattacttcaacaagaagaagaatggaaaatgatgaagaaacagaggggtaggcgtggaacaccatcccagaaaaatgtctacataaaaatcagtgaagctgagattgccaatgactatccccttcctgcatactataagccatttagccaggaaatggatgaatacatatttgatagtgatgacagcatattttctgatgatgtgccagttaggatactcaataactggacactgtacaatgcagattccaggcttatatctttggaattgatccctatgaaatcaggggcagaaaatgatgtggttgtctttggatctggtttcatgagagatgatgatggcagttgctgttctacagctgagtctgtgaaatcttcgtcttcctccagcaaagctgaccaactggatgcgggaatccctatttatctgagcccaatcaaagaatggattatagagtttggtggctcaatgatttgtataaccattcggactgatgtggcctggtacaagctacgccaaccaacaaaacaatatgctccatggtgtgagcctgtactgaaaacagcaaggcttgctgttagcatcattaccctgttgaaagagcagagtcgtgcctcaaagctttcttttgcagatgtcataagaaaagtagctgaatttgacaaaggaaaccctgcatttatatcttcaaacatcacacttgttgagagatatattgtggtgcatggacagataatactccagcagtttgcagattttccagatgagactatccgtcggagtgcatttgtcagtggtcttttattgaagatggaacagaggaggcatacaaagttagttatgaagaaaaaaactcaagtgatgaggggagagaatctgaatccaagtgcagcaatgggtccagcatcgaggaaaaaagcaatgcgtgcaacaacaaccaggctcatcaacagaatctggagtgattactatgcacatcatttccctgaagattccaaggagggagatggaaatgaaataaaagaaattgatgatgaacaagaagaaaatgaagatgaggatgctgaagatgaaggacagattgaagagaacatctcaaagactcctccatcaacacggtcccggaagttgctatcacaaacttgtaaggaaatcagatgggaaggtgaaacatctgggaaaacattgtctggagaaactctatataaatgtgcttatgttagggaactcagaatacctgttggtggaacagtagctctagaagatgattcaggagacacagtcatgtgttttgttgagtacatgttccagaaagttgatggttcaaaaatggttcatgggaggattctgcaaaaaggttcacagacaattcttgacaatgcggcaaatgagagggaggttttcttaactaatgactgcttagaattcaaattagatgacatcaaagaattggtaatggttgatatccaatcaaggccttggggtcacaagtacagaaaagagaattctgaagctgataaagttgagcaggtcaaagcagaagagagaaagaaaaagggccagcccatggtatatttctgcaaaagcttgtactggcctgagaagggtgccttctttgccctctcccgagataaaatgggtcttggtagtggtttatgtagttcttgtgataatatagagccagattctgatgaattaaaaatattctcgaagaccagctttgtctacagaaaggttacatataatgtcaatgagtttttatacataagccctgatttttttgctgaagatgaggatcgtgcaaccttcaaggctggccgaaatgtgggtctaaagccctatgcagtttgtcaaatattatccatccctgaaggggctggatctaaaaaactcaatccagcatcagcaaatatcagtgctagaagattttacagaccagatgacatttcatcagccaaagcctatgcttctgacatcagagaggtctactatagtgaggatgtaattgatgtgcctgtggatatgatagagggaaaatgtgaggttagaaagaagaacgatcttgcaagttcagaccttccagtgatgtttgaacatgtatttttctgtgaacttatatatgaccgtgccagtggagctctcaagcagttgcctccaaatgttaggtttatgtctatggtgcaaaggacaagtgcgttgaaaaagaacaaaggaaagcagatctgtgagcctgatcaaatagattcaggtaaatggttggatgtgcctaaagagaaccgtctagctactcttgacatttttgctggctgtggaggtttatcagaagggctgcagcaagctggtgtatcttttacaaaatgggcgattgaatacgaagagcctgctggtgaagcatttaataaaaatcatccagaggctgtggtctttgtagataactgcaatgtgattctaaaggcgattatggataaatgtggggatactgatgattgtgtttcaacttctgaagctgctgaacaagcagcaaaacttccagaagtgaacattaataatcttccagtccctggcgaagttgaattcataaatggtggtcctccgtgtcagggattctctgggatgaatagattcaaccaaagcccatggagtaaagttcagtgtgagatgattctagcattcctctcattcgctgagtatttccgtcccagattctttctgttagaaaatgttcggaactttgtttccttcaacaaagggcagaccttccgtttggcagttgcatctcttctggagatgggataccaggtccggtttggaattctagaagcaggggcttttggtgttgcccagtccaggaaaagggcgtttatttgggctgctgcacctggagagatgcttcctgattggccagagccgatgcatgtgtttgctagccctgagctgaagataacactgcctgatggccaatactatgcagctgcaagaagcactgctggtggagcgcctttccgagcgattactgttagagatacagttggggatctgcctaaagtgggaaatggtgccagcaaactcacgcttgagtatggaggtgagcctgtgtcttggttccagaagaagataagagggaatatgatggtactgaatgatcacatatctaaggagatgaatgagctgaacctaataaggtgtcaacacattccgaaacggccgggttgtgattggcatgacctaccggacgagaaggttaagctgtcaaatgggcagatggctgacctgataccttggtgcctgcccaacacagccaagaggcacaatcagtggaaaggactgtacgggaggctggactgggaaggcaacttccccacatccgtcactgatccccagccaatgggcaaggtcggcatgtgcttccaccctgatcaagacaggatcatcacagtccgggaatgtgctcggtcacagggctttcctgacagctatgaatttgcgggcaacatccagaacaagcaccggcagattggcaatgccgtgcccccgcctcttgcctatgcacttgggaggaagctgaaggaagccgttgacaagcgtcaggaagccagcgcaggcgtgcctgcaccatgagaagttttccttccatcaaaccatgacccatgaagctaagcgctgaggtcgtccttgaggaccagttaattttggttttatcagtcttaatggactcctgaatgtatatgttagagaagtgtcgattgctgattgttaccctgattcagggtagcggttatatctaaaaacttgagaaaatctagtgtactctagttgccatgtgttccattttgttggctctaaactttcaactagtgttggtgattaatgacaacatgagattaacttaaattttgtagaggcatttaaattatgccactaatagtgactatttagtcgctcaatttttttgcccctaattatggaatttatttttt

SEQ ID NO: 139823 - DNA, 96 bp, Zea Mays
ctatccccgcctccggagccgtacgatcccctagctgatccagagatgaaggaattttatttcgaatgtatttataaaaggcacttcgttgcaatc

SEQ ID NO: 139824 - DNA, 937 bp, Zea Mays
ttgaggtactaattttaagaagcccatgggaatactctcgtttcaaaaagaactccttccacgcccagccatctctaaaccctacccacagccaccgccgccgccgccgctccctgacccctagtgtccggatttaacttcaaacatggcggacgtcgatgtcgagccggaggtcgccgccggtgctcccaagaagaggacgttccgcaagtacagctaccgcggcgtcgacctcgatgcgctgcttgacatgtccaccgacgacctcgttcagctcttcccagcgcgcgccaggagaaggttccagaggggtttgaagaggaagcccatggcgctcatcaagaagctgcgcaaggcgaaaaaggatgctcctgtcggcgagaagccagagccagtgaagacccatctccgcaacatgatcattgtccccgagatgattgggagcattgttggtgtctacaatggcaagaccttcaaccaggttgagatcaagcctgagatgattggccactatcttgcagagttctccatttcctacaagccggtcaagcacgggaggcccggtattggtgccactcactcctcgcggtttatccctctgaaatgagttgttacccagatctgtagcgtcccaagggtgtccagtggcattgccctttcagctttgctgcttgtttcgaacaagttacatacccaagacattttgttctgtttccagcactagatttcaaagctaagcattgcataactatgctgttttgttggaagtatgtgagtataatcttatctaatatgtgatgttacgttctttgttgtttccttgattttgggttgcttatttctgaaattctgaagatgaggcttacaactctggtgtttgctgttagtggtttcattggatttaaatttgaagatgtcaatttattgggcgctcgtt

SEQ ID NO: 139825 - DNA, 456 bp, Zea Mays
ccaagagtatgttgtccgtcaaactgtcactcttcaacttttaactggctaactgtctgataaataaggttatatcataacctggccaatacccaaagatggcagaatgatgtaggaaactaacatactacatatgtagcaacaatcaaccaaaaaattctaaacaaattcctctagtgtctatgtcttttttccccttgccttattttcatgccctcacactaccaaaagtcagaagtattgcactacacaagaaataatactactggtcctaacctaatcagtaaatactggagagcgctgaaatcaggagttcatccttgcaacacaagattttcagttttgttaataaaacgccgcccataaatcctcctaaacactaaattctaacatgatgaaaaaatgtaaaaacaacaccaatgcgaagacagtccaaatccccaatgtcatcctttg

SEQ ID NO: 139826 - DNA, 96 bp, Zea Mays
tttttttaagcaaatctgtgttccttctaatgtttgttcaaatatgatatacaaattgtatatttcatatagaaggaacacatgaagctagacatc

SEQ ID NO: 139827 - DNA, 345 bp, Zea Mays
gggtttggacgatgtatgttggtatgttaggctctgactgcaggaacaaggatctaaggctgttttcggtcatcagatggcaaagaaaggtgctgtgccgctcacctgtatcagtacacaagtgcggtggttggttggattagttttgcgatcttagcatagcggttatggagggtgtaatgcaatataaatgatttcgatgtggcttcattgccaaaactttctttttcgcgtgtcctgtggttgttgtagtaatatgtgttggctacgtttacgtattggttatcccagttttggtctgtgctcacacattcaatcctgagttatatgcatgataggttcgtc

SEQ ID NO: 139828 - DNA, 328 bp, Zea Mays
ggctctgactgcaggaacaaggatctaagtacacaagtgcggtggttggttggattagttttgcgatcttagcatagcggttatggagggtgtaatgcaatataaatgatttcgatgtggcttcattgccaaaactttctttttcgcgtgtcctgtggttgttgtagtaatatgtgttggctacgtttacgtattggttatcccagttttggtctgtgctcacacattcaatcctgagttatatgcatgataggttcgtcaactttggtctgtaagaaggtgcataatcccaggtcatcgaccgacacatcgaaaaagaatttggagt

SEQ ID NO: 139829 - DNA, 2492 bp, Zea Mays
gaccgccttatcgtcaccatcttcttcggtccggtcccagccaaaccttcctcttcttcggtctcctcgtcgccatctcgtttgtggccgccaccgcgccccatccctaccctacccgggacatacatttgctatttaaaagcctagcgacagagccgagtgtgcctctgcttcctcctccctccccccctcgtctgccctcgagatcccacaccgcgcgcgtgccacgttgtcttcgtcctctgcgcgccttcggtcaccccgccgcctgtactgtacatgcggtagtacggcgcaggaacaagaaggatttgccagcatgagcggggagctgcaggtgcatgcatctatcgttgggttcttggcttggttggggggtgaactgagtctggatgcgccgaacgggatgttgggggaggcgagagtgagagcacggtcgctcgcttgaggtgcggcgccgtctgccgtgcggtgtcgtggcggtctagtagaggaagctaggaagaggatgatgggagctctgcagctgcagagcaatggcgacggcgctgctgagggactcttaccggacccgggctacgtcgaggttgatcctaccgggaggtatggcaggtacaacgagattctcggcaaggggtcctcaaagactgtgtaccgggccttcgacgagcaccggggcatggaggtggcgtggaaccaggtgcagctgcacgacttcctgcgcggcccggcggagctggagcgcctctacggcgagatccacctgctcaagtccctccgccaccgcgccgtcatgcggctccacgcgtcctgggccgacgccgccgcgccccgcctcgccgtcaacttcgtcaccgagctcttcacctccggcacgctgcgccagtaccgcctccggcacccgcgggccggcgccgccgcggtccggcgctggtgccggcagatcctcgacggcctcgcctacctccacgcgcgcggcgtcatccaccgcgacctcaagtgcgacaacatcttcgtcaacggcagccagggccaggtcaagatcggcgacttcggcctcgccaccgtggcccgccgccgcggctcgccgcacgcggcgcgctgcgtcgtgggcacgccggagttcatggcgcccgaggtgtacgcggagggctacgacgagcgcgccgacgtctactcgttcggcatgtgcgtcctcgagatggtcacgctcgagtacccctacagcgagtgcgtgcaccccgtgcacatctacaagaaagtcacctccgggataaagccggcggctctgtacaaggtgaaagaccccgcggtgaggcggttcatcgacaggtgcctggcgccggcgtcgcggcggccgagcgcggccgagctgctcagcgacccgttcctgcagctggaagacggctgcggcctcggctacggagacgacgcggactacagcgccatgtacaactacctgcaccagcccgcgtgcctggaccaccaccaccatgccggcagcattggctccacggcgagcaacggggtggtgtccaatggcggcggcggcggcggcggcagatgggacgacgagtccgaggacgaggacgacgatggcagcatgttccaaggcatcgaccagctgttcaacgagcacgaagacgacgagctgcacgttgctggtgtcgacatcaccatcaagggcaagaggatgcaggacggacgcatcttcctccggctgcgtatcgccgacaaagatggcacaggtgatggcactctcgctctgaccattgaacgttgaaaaaaagaaagaaagaaacatcttgttttcaacgcaatgcgcggagagaccttaattttcttgttcattattatacttatacagggagggtccggaacatctacttccccttcgacgcggacgcggacacggcgctgagcgtggccaccgagatggttgcggagctggacatcaccgaccacgaggtgacccacatcgccgagatgatcgacggcgaggtgggcgcgctgctgccgcactggaggccgggtcctggcatggacgacgacgacggcggcggcgccggtccggacacgtcgggcgctaccgaccgctgcaagaactgccggtccagcgcgtcctccgccgggtcgctggacgactacatgtcggcggcggcggcggcgcggcgcggctgccggtgcgcggagctgcacggccggttcgaggagatcacgttccaggccgacgaagagcaggtgcggttccagggctctgggtgcagctccgacgacggaggcgggcaggctgagcagtgcgccggggacggaggcagtactgtaactgaacgttcagaccagccatgacctggttcctcgcaggagcaactcctgttttaaaaatctgaaaatgtcaccagtgcagccgcacagctgcttgtaagtgaacttttttgtggctctggttgagcatacgatcgttaagacggatatagtttgaagtttcaaca

SEQ ID NO: 139830 - DNA, 2381 bp, Zea Mays
gaccgccttatcgtcaccatcttcttcggtccggtcccagccaaaccttcctcttcttcggtctcctcgtcgccatctcgtttgtggccgccaccgcgccccatccctaccctacccgggacatacatttgctatttaaaagcctagcgacagagccgagtgtgcctctgcttcctcctccctccccccctcgtctgccctcgagatcccacaccgcgcgcgtgccacgttgtcttcgtcctctgcgcgccttcggtcaccccgccgcctgtactgtacatgcggtagtacggcgcaggaacaagaaggatttgccagcatgagcggggagctgcaggtgcatgcatctatcgttgggttcttggcttggttggggggtgaactgagtctggatgcgccgaacgggatgttgggggaggcgagagtgagagcacggtcgctcgcttgaggtgcggcgccgtctgccgtgcggtgtcgtggcggtctagtagaggaagctaggaagaggatgatgggagctctgcagctgcagagcaatggcgacggcgctgctgagggactcttaccggacccgggctacgtcgaggttgatcctaccgggagtacaacgagattctcggcaaggggtcctcaaagactgtgtaccgggccttcgacgagcaccggggcatggaggtggcgtggaaccaggtgcagctgcacgacttcctgcgcggcccggcggagctggagcgcctctacggcgagatccacctgctcaagtccctccgccaccgcgccgtcatgcggctccacgcgtcctgggccgacgccgccgcgccccgcctcgccgtcaacttcgtcaccgagctcttcacctccggcacgctgcgccagtaccgcctccggcacccgcgggccggcgccgccgcggtccggcgctggtgccggcagatcctcgacggcctcgcctacctccacgcgcgcggcgtcatccaccgcgacctcaagtgcgacaacatcttcgtcaacggcagccagggccaggtcaagatcggcgacttcggcctcgccaccgtggcccgccgccgcggctcgccgcacgcggcgcgctgcgtcgtgggcacgccggagttcatggcgcccgaggtgtacgcggagggctacgacgagcgcgccgacgtctactcgttcggcatgtgcgtcctcgagatggtcacgctcgagtacccctacagcgagtgcgtgcaccccgtgcacatctacaagaaagtcacctccgggataaagccggcggctctgtacaaggtgaaagaccccgcggtgaggcggttcatcgacaggtgcctggcgccggcgtcgcggcggccgagcgcggccgagctgctcagcgacccgttcctgcagctggaagacggctgcggcctcggctacggagacgacgcggactacagcgccatgtacaactacctgcaccagcccgcgtgcctggaccaccaccaccatgccggcagcattggctccacggcgagcaacggggtggtgtccaatggcggcggcggcggcggcggcagatgggacgacgagtccgaggacgaggacgacgatggcagcatgttccaaggcatcgaccagctgttcaacgagcacgaagacgacgagctgcacgttgctggtgtcgacatcaccatcaagggcaagaggatgcaggacggacgcatcttcctccggctgcgtatcgccgacaaagatggcacagggagggtccggaacatctacttccccttcgacgcggacgcggacacggcgctgagcgtggccaccgagatggttgcggagctggacatcaccgaccacgaggtgacccacatcgccgagatgatcgacggcgaggtgggcgcgctgctgccgcactggaggccgggtcctggcatggacgacgacgacggcggcggcgccggtccggacacgtcgggcgctaccgaccgctgcaagaactgccggtccagcgcgtcctccgccgggtcgctggacgactacatgtcggcggcggcggcggcgcggcgcggctgccggtgcgcggagctgcacggccggttcgaggagatcacgttccaggccgacgaagagcaggtgcggttccagggctctgggtgcagctccgacgacggaggcgggcaggctgagcagtgcgccggggacggaggcagtactgtaactgaacgttcagaccagccatgacctggttcctcgcaggagcaactcctgttttaaaaatctgaaaatgtcaccagtgcagccgcacagctgcttgtaagtgaacttttttgtggctctggttgagcatacgatcgttaagacggatatagtttgaagtttcaacaggcaggtgctttccctga

SEQ ID NO: 139831 - DNA, 2398 bp, Zea Mays
gaccgccttatcgtcaccatcttcttcggtccggtcccagccaaaccttcctcttcttcggtctcctcgtcgccatctcgtttgtggccgccaccgcgccccatccctaccctacccgggacatacatttgctatttaaaagcctagcgacagagccgagtgtgcctctgcttcctcctccctccccccctcgtctgccctcgagatcccacaccgcgcgcgtgccacgttgtcttcgtcctctgcgcgccttcggtcaccccgccgcctgtactgtacatgcggtagtacggcgcaggaacaagaaggatttgccagcatgagcggggagctgcaggtgcatgcatctatcgttgggttcttggcttggttggggggtgaactgagtctggatgcgccgaacgggatgttgggggaggcgagagtgagagcacggtcgctcgcttgaggtgcggcgccgtctgccgtgcggtgtcgtggcggtctagtagaggaagctaggaagaggatgatgggagctctgcagctgcagagcaatggcgacggcgctgctgagggactcttaccggacccgggctacgtcgaggttgatcctaccgggaggtatggcaggtacaacgagattctcggcaaggggtcctcaaagactgtgtaagaagtaccgggccttcgacgagcaccggggcatggaggtggcgtggaaccaggtgcagctgcacgacttcctgcgcggcccggcggagctggagcgcctctacggcgagatccacctgctcaagtccctccgccaccgcgccgtcatgcggctccacgcgtcctgggccgacgccgccgcgccccgcctcgccgtcaacttcgtcaccgagctcttcacctccggcacgctgcgccagtaccgcctccggcacccgcgggccggcgccgccgcggtccggcgctggtgccggcagatcctcgacggcctcgcctacctccacgcgcgcggcgtcatccaccgcgacctcaagtgcgacaacatcttcgtcaacggcagccagggccaggtcaagatcggcgacttcggcctcgccaccgtggcccgccgccgcggctcgccgcacgcggcgcgctgcgtcgtgggcacgccggagttcatggcgcccgaggtgtacgcggagggctacgacgagcgcgccgacgtctactcgttcggcatgtgcgtcctcgagatggtcacgctcgagtacccctacagcgagtgcgtgcaccccgtgcacatctacaagaaagtcacctccgggataaagccggcggctctgtacaaggtgaaagaccccgcggtgaggcggttcatcgacaggtgcctggcgccggcgtcgcggcggccgagcgcggccgagctgctcagcgacccgttcctgcagctggaagacggctgcggcctcggctacggagacgacgcggactacagcgccatgtacaactacctgcaccagcccgcgtgcctggaccaccaccaccatgccggcagcattggctccacggcgagcaacggggtggtgtccaatggcggcggcggcggcggcggcagatgggacgacgagtccgaggacgaggacgacgatggcagcatgttccaaggcatcgaccagctgttcaacgagcacgaagacgacgagctgcacgttgctggtgtcgacatcaccatcaagggcaagaggatgcaggacggacgcatcttcctccggctgcgtatcgccgacaaagatggcacagggagggtccggaacatctacttccccttcgacgcggacgcggacacggcgctgagcgtggccaccgagatggttgcggagctggacatcaccgaccacgaggtgacccacatcgccgagatgatcgacggcgaggtgggcgcgctgctgccgcactggaggccgggtcctggcatggacgacgacgacggcggcggcgccggtccggacacgtcgggcgctaccgaccgctgcaagaactgccggtccagcgcgtcctccgccgggtcgctggacgactacatgtcggcggcggcggcggcgcggcgcggctgccggtgcgcggagctgcacggccggttcgaggagatcacgttccaggccgacgaagagcaggtgcggttccagggctctgggtgcagctccgacgacggaggcgggcaggctgagcagtgcgccggggacggaggcagtactgtaactgaacgttcagaccagccatgacctggttcctcgcaggagcaactcctgttttaaaaatctgaaaatgtcaccagtgcagccgcacagctgcttgtaagtgaacttttttgtggctctggttgagcatacgatcgttaagacggatatagtttgaagtttcaacaggcaggtgctttccctga

SEQ ID NO: 139832 - DNA, 177 bp, Zea Mays
ggcacaacaaggtgcacgcacgcatcaatcggcacaaaatgtacgaaagatgtggtggcactcactttccttgcaataattctcctgcatcttttattgttcattcatttcccctctttcacatgttgcgaattagacatgtgaaccatgaatgagtaattctctgcagaggaacct

SEQ ID NO: 139833 - DNA, 196 bp, Zea Mays
tttgtgttcatgcgacttattttagaaacttgagctcacaaacttttcttagttggtctctgtatggtggaattatattattttatattttttgtccgttcagtcagtcgttgtgaactctcttctaatcgctcacttcatttatcgtgttgtaccaagacatattgcatggagtaaacaataacatcagttaacc

SEQ ID NO: 139834 - DNA, 133 bp, Zea Mays
aaaaaaacatctctttagcagatttaatcgccggcttgaagccgaatgagatgcaaaacaaacagaatcaagaaataaaaagcgacatccatcctatcaaaggaatagtttttagatagaaaggaatagggac

SEQ ID NO: 139835 - DNA, 1761 bp, Zea Mays
acacacacgagcgcagcgcacgcagcctgcaggcagaggactgctctcctctgcgcgaagcgaggcgcggtggccggtgctggggcgagggaagcgaggcgggttggggtcggcggccgcctccgctgtctcagtcggcgggagcaggaggtgcgcggcgcgcggagctgacggtcccgaccgaccggcaccacggcggccgcggcggaggccatcggcgggggcggggaccccgaggccgcggcgaggcggcgctgggatctgcccggcaaggtggccgggaacattgcaatggggaaaattgatatgtctactgacgaagaatcagattgtgtagctatatgtccacctaacagaaatgctggtcacgaggaagttgtgagtggcagccatgatgaagattcttcaggaaagcaagagaacccttatgctgtgaactcacatatggacagcaatggccaggaagatgtgtctgtaaacctagacctgctcaagctgattcatcagcaggaatcttctgtcagcaattcaccaacaaagcctgcagtagctagacagcaagggtctggccatactgtccttgagccatgcgctgttgcacctgaaagaagatcatctggagcagggaatattgctcgaattcctcatcccaccagcagcggggaaaaactttcggataaaagtagctcctcaccaagaagcatggcaaagaagagtccatcattcacacccaggaagcctctccaatctgacaacacttctcacagtcaagatgatgactcatattctgtcacttcttcaactgtaacttcagcaagagctgggaaaactaagaagacaactgttgctgttgcacctacattcgtctgtgctaatcgtgctgagaagagaggagagttttacacaaaattagaagaaaaacgcaaggctttggaagaggagaaactccaagcagaggccagaaagagggaagaggaagaagaagctctaagacaactgaggaagaacttggtcgtccgagcaaaacccatgccaagcttctaccaagagggacccccaccaaaggttgaacttaagaaggtgcctccaactcgtgccaagtcaccaaaattgacacggagaaagagctgcagtgaaacccctcatacaccagagggaggaaatggcagtgcagtatgctgccggttgcatcgccacagcattgggaacgccagagatgttagcagcaaggcacaatgttctccaaagagcgcctcaaaggctggatcagctactagatccagggtcaccaaatccagggaagacctgaaggcttccgtgaagaaagtgggactgccaagcgccgcgaacttcgctgtacaaacctaactcatcaggcattcactcccatatgccatttttcattttaatttatacctcacatcaccaaaaagatggcctcgtgttatttttgcattgtccttgtaagaacctggctaccagagacctgcgctgttcccgtcctgtaaatttgttgaaggttttgtaagggggtaaccgagtcagtcctgtgagaaccaagcgggtgggcagctgatgggatattggagtgacatattgtcgttgtgtggcggcattcgcgcgttctatgtattgtatctgagctgtaacttattgtggacattggcaaagcgattctgattgttgtcgcaaaatttgatcaggtcgtgtttcgaacttttaatcaggtatccttatgaattggaaactgggttgtgtttt

SEQ ID NO: 139836 - DNA, 444 bp, Zea Mays
tacgagcagcttgaaatggaaggcaagttattgaagggggaagacttagattttgcttttgatcgtatttcggctttctcagacaatatggagaatcaggaatacatattcttgacggaagaaagtcttgaagacatctgtgagtcaaagcttgctcttagagctgaagtttctgatttggaaaggcagcttgcttctctggagtggaggcttgatatacttacagcacaagctaccaccattaaccagggaaagaagtcccgctcatctgctaatactagagctaatggacaacttactggcttagataagatgtttgctaagagaagtttagaggaccaggaccccgacacttggacgcagtcgggttgctgggcagagaaggtgcggtacagttcacgcgataaacacttaaacagtacccgcgatgaacagtattggtag

SEQ ID NO: 139837 - DNA, 1535 bp, Zea Mays
gagacaaatttgctttcagtttgaataaatttaccacctgcttgctcaccaaacttgtcatggcggtatatgatagggaccactccaacttgttgttcaagatgacaagttaagaggagatccggtaaactcccaccattttgttgtcgaactgagccgaattaactccatatttgctaaaagtaagagacagtacatagaagcacaagtagaatatgctaaagaagaagctatactatcagttctgagaactcagttggcatcccaacagtcatatattcatcaggatagccattctctaaggaggaaaaactccgaacttgctgaagagcttaaagatctttcccatcaagtgcaggaatacttatctgagactgttacaggcctgtgtgcagaccttgctcggctttcaggtgcaaatattttggaaggagatcacaatttaaagcttctgcgccaggactgctacataagtcatcagaagaagttcatcaaccatcttgtcaatcaacttgctgctcacctatttctaaagatagcctgccagctcgaagaacagataaaaatatcgagtgcctactcatttctgaaagctgtagaattggaattgcagggctacttctcagcttttgatggccgcctgggccggtacaatttaattgatcaagcagcatctgaaatgtttgaagagggatcagttgacgacagtgattcttatcttcatgctgtgagggatatccttagcagtcactcgagttcccaagcaacgtcaccagaatatgtgtcatcatatggtttgatcgggcagataacagagctgcaggatgagctccagtaccttcagcatgagaccgaaaatgtccttccacgtgagcgaggaagatgcaccgacgaactatgcaggatgatccaaacactggagcaaattctcgctgtgtccctttctgatgagcaaccaaagctgacaccatggccattggcgcattcacttgaagacctcgaaatggtcagccagcaggtctccgcttccgttagtgaggtgacactagctcgagacgaaaaggccgagaagctgaaacagccttcacgcaacgcgcagcaggaaaggcaggtgttctcagatttcttctgccacccggaacgactcgagaatcgagtggaagagctgctctcccgctttagagctctccctgagtagtaccgtccatttcatttgccaagatgggtggaggaacccttggccctccgattttcaaacgggcatcgtgtctcattgcctattcgtttctttttctcgtgtctggacgactggaagtgcagttttttgcatatatatattcaaaagcacgcggcacagttttttttttgactaagataagacatcgtctgtggtttacccggcccggcgtgttcagttgataaaaggaagtgtatcagttgataaaagcgtaattcgttcaaatagtttactcaaatctttgaagtattgtttgtcgccaaaatgagagagcgcttaaaaagagaagtagcacgcc

SEQ ID NO: 139838 - DNA, 601 bp, Zea Mays
catgagccagctacttactcggcttcgcggcagtacagatccggccgacacttcgtcgtcaagctctcgccatttgcaactccttgctccgccgacctcgacgcaaactacaacttctcgcttgcgcctgtccaggatctgctctcgccatggacagggaagccaagaaagaagcgttcaggaagtatcttgaatccagtggcgtgctcgataccctcacgaaagctcttgtggcgctgtacgaggagaacgataagccttcatctgcagtcgaatttgttcagcagaagctgggtggcccgtcaatctctgactatgaaaagctcaaggcagagaagctggacttgcaattgaagtatgataagcttttagagacccacaaggaaacatgcagacagctggaggaacttaagaatatgaagtacggtgcaccctggaactgaaataacgtgtgttgacattgtaaatgtatcatgaagcatgtactttttacacctctctgaagcattgctaagctctttatacaatggaaacatctctcatgtatctgattttagccatctggatcccttttggattatgaagacacccaactcactgt

SEQ ID NO: 139839 - DNA, 1864 bp, Zea Mays
aatattttaatttttgtactttgttggaatactctctcatttagaactcacaaattttacatgaattacgcaacaaatttcatatgcagaaaaaggcactacgcaaaaaaaaataaacattccaatatcccaaaagtctcatagagcaaagatgattatttgctcgttccgtttttttcttagaacatttataaaacgcaaaaaaagggaccccagcacatttatgaaacggaccattgaatgtgctcaaggcttctttcctccagaatcccccatctgagcaagggcgccgtcggctagcgccgcagcattgacgtggacgccgaccctctccggcagccgcttgcagcgcgtcccttccccgctcccgcggcatggactgcgcaaagaggagggcggtggcggacctccacaacgagctgatggtggagatcttctcgcgcgtgcccgtcaaagacctccgccgttgcacgtgcgtgtgcaaatcttggtgcaacatcatcaccgaccccctcaacggcaagaagctgccccagaccctggaaggcttcttccaaggcgtcgtcggagggcctcacagctacggccaattcaccagcctgtcggggagcggagaacgcgtgcctccggtcgacccttccttctccttcatcacggcagtgctgcctggcgtggagcgcatggtcctcttggattcttgcaacgggctcctgctctttgggtgcacccgggaggacaagttcgggtacatcgtgacaaaccctgcgaccaaggaattgatgactgtgcccgccagctccggctcttgtcctcctccacctccatttgaaagggacatggatgctggggaaagatacgcgcacacctttctgatgattaaccctgctgtctcctcgcacttccacttggtccagatctgggagaatagggcggtgaaggaggtggaaacggtacactcttactcgtctgaaaccaaggcatggagtgacaggtcaagcaagtgggggcgaggtgcagagggcggtgaatgggagctgtggggtgaatccgtgattggagtcatgtgtggctgggctttggtcgatggtctgctgcattttcttgccttagatcttcagaaacaagagaatgtgataattgcagtggatggggaaggggaaacttttaggattatcggctggcatggtaaggatgtggaagcaattgtttttattggtcaatcccaagaccatctacactgcatcggtgtgaatgcgcaattagatcaaggctctgaagtgcgcttcacgcggatgtctatctgggttcttgaggactatgatacacaagcatggatcctaaagcacaatgtgagctctttgcagttctttgaattactgagtcacccaatcaaagacttcgatattatggccattcatccagatcacaattcgttcatccttgttcagcactggaaccagaaacttgtatcatataacatggatactcaggaactgcgtggtctctgcactcttgaaaagggctatgtggttattaccccttacataccctgtttcttggagtcatcggttcttgccaccaaacactgaggttgttgtttctgggggacttctctgcatgttcaacaagagcttgatcatccaagtgtttggcaaactagcagtgtgggtaaatctactagaattaggtggtgcaaagttggattacatgtctttaggtgatctagtctgatgatgctttaatgtcctttcgtaatgctttgagaaagctgtttacaggacaacatggttagttccatgatatatcagtgagaaagctgtttacaggacagcatggttagttctatgatatatcaaattagatc

SEQ ID NO: 139840 - DNA, 1749 bp, Zea Mays
cagcacatttatgaaacggaccattgaatgtgctcaagtcttctttcctccagaatcccccatctgagcaagggcgccgccgccgtcggctagcgccgcagcattgacgtggacgccgaccctctccggcagccggttagttccgcgttcgccgcatttcgcactccccgtctttcgtgctaatccatcccgaacttcaccttcccaactcacagcttgcagcgcgtcccttccccgctcccgcggcatggactgcgcaaagaggagggcggtggcggacctccacgacgagctgatggtggagatcttctcgcgcgtgcccgtcaaagacctccgccgttgcacgtgcgtgtgcaaatcttggtgcaacatcatcaccgaccccctcaacggcaagaagctgccccagaccctggaaggcttcttccaaggcgtcgtcggagggcctcacaactacggccaattcaccagcctgtcggggagcggagaacgcgtgcctccggtcgacccttccttctccttcatcacggcaatgctgcctggcgtggagcacatggtcctcttggattcttgcaacgggctcctgctctttgggtgcacccgggaggacaagttcgggtacatcgtgacaaaccctgcgactgaggaattgatgactgtgcccaccagctcctgctcttgtcctcctccaccttcggttggtggggaaagatatgcgcacacctttctgatgtttaaccctgctgtctcctcgcacttccacttggtccagatctgggaggataatgcggtgaaggaggtggaaacggtacactcttactcgtctgaaaccaaggcatggagtgacaggtcaagcaagtgggggcgaggtgaagagggcggtgaatggaagctgtggggtgaatccgtgattggattgacgcgtggctgggctttggtcgatggtctgctgcattttcttgtcttcgatcttcagaaacaagagaatgtgataattgcagtggatggggaagggaaaacttgtaggatcatcggctggcatggtaaggatgtgagaacaattgcttttattggtcaatcccaaaaccatctacactgcatcggtgtgaatttgcaattacatcaaggctcccaagtgcgcttcacgcaaatgtcgatctgggttcttgaggactatgatacagaagcatggatcctaaagcacaatgtgagctcttcgcagttctttgaattactgagtcacccaatcaaagacttccatattgtggccattcatccagatcacaattcgttcatccttgttcagcactggaaccagaaactggtatcatataacatggatactcaggaactgcatggtctctgcactcttggaaagggctatgtgattattaccccatatgttccctgtttcttggagtcatcggttcttgccaccaaacactgaggttgttgtttctggggacttctctgcatgttcaacaagagcctgatcatccaagtgtggggcaaggtgatctagtctgatggtgctttaatgtccttttgtaatgctttgagaaagctgtttacaggacaacatggttagttctatgatatatcagtgagaaagctgtttacaggacagtattgttagttctatgatatatcaaattagatcacacttaattgctggccaatataggtattagcttcggttttttgttgtgattattcaatattgaatgcgcacctgcgcacctatggtat

SEQ ID NO: 139841 - DNA, 1674 bp, Zea Mays
cagcacatttatgaaacggaccattgaatgtgctcaagtcttctttcctccagaatcccccatctgagcaagggcgccgccgccgtcggctagcgccgcagcattgacgtggacgccgaccctctccggcagccgcttgcagcgcgtcccttccccgctcccgcggcatggactgcgcaaagaggagggcggtggcggacctccacgacgagctgatggtggagatcttctcgcgcgtgcccgtcaaagacctccgccgttgcacgtgcgtgtgcaaatcttggtgcaacatcatcaccgaccccctcaacggcaagaagctgccccagaccctggaaggcttcttccaaggcgtcgtcggagggcctcacaactacggccaattcaccagcctgtcggggagcggagaacgcgtgcctccggtcgacccttccttctccttcatcacggcaatgctgcctggcgtggagcacatggtcctcttggattcttgcaacgggctcctgctctttgggtgcacccgggaggacaagttcgggtacatcgtgacaaaccctgcgactgaggaattgatgactgtgcccaccagctcctgctcttgtcctcctccaccttcggttggtggggaaagatatgcgcacacctttctgatgtttaaccctgctgtctcctcgcacttccacttggtccagatctgggaggataatgcggtgaaggaggtggaaacggtacactcttactcgtctgaaaccaaggcatggagtgacaggtcaagcaagtgggggcgaggtgaagagggcggtgaatggaagctgtggggtgaatccgtgattggattgacgcgtggctgggctttggtcgatggtctgctgcattttcttgtcttcgatcttcagaaacaagagaatgtgataattgcagtggatggggaagggaaaacttgtaggatcatcggctggcatggtaaggatgtgagaacaattgcttttattggtcaatcccaaaaccatctacactgcatcggtgtgaatttgcaattacatcaaggctcccaagtgcgcttcacgcaaatgtcgatctgggttcttgaggactatgatacagaagcatggatcctaaagcacaatgtgagctcttcgcagttctttgaattactgagtcacccaatcaaagacttccatattgtggccattcatccagatcacaattcgttcatccttgttcagcactggaaccagaaactggtatcatataacatggatactcaggaactgcatggtctctgcactcttggaaagggctatgtgattattaccccatatgttccctgtttcttggagtcatcggttcttgccaccaaacactgaggttgttgtttctggggacttctctgcatgttcaacaagagcctgatcatccaagtgtggggcaaggtgatctagtctgatggtgctttaatgtccttttgtaatgctttgagaaagctgtttacaggacaacatggttagttctatgatatatcagtgagaaagctgtttacaggacagtattgttagttctatgatatatcaaattagatcacacttaattgctggccaatataggtattagcttcggttttttgttgtgattattcaatattgaatgcgcacctgcgcacctatggtattgccc

SEQ ID NO: 139842 - DNA, 1346 bp, Zea Mays
ttctccttcatcacggcagtgctgcctggcgtggagcgcatggtcctcttggattcttgcaacgggctcctgctctttgggtgcacccgggaggacaagttcgggtacatcgtgacaaaccctgcgaccaaggaattgatgactgtgcccgccagctccggctcttgtcctcctccacctccatttgaaagggacatggatgctggggaaagatacgcgcacacctttctgatgattaaccctgctgtctcctcgcacttccacttggtccagatctgggagaatagggcggtgaaggaggtggaaacggtacactcttactcgtctgaaaccaaggcatggagtgacaggtcaagcaagtgggggcgaggtgaagagggcggtgaatgggagctgtggggtgaatccgtgattggagtcatgtgtggctgggctttggtcgatggtctgctgcattttcttgccttagatcttcagaaacaagagaatgtgataattgcagtggatggggaaggggaaacttgtaggattatcggctggcatggtaaggatgtggaagcaattgtttttattggtcaatcccaagaccgtctacactgcatcggtgtgaatgcgcaattagatcaaggctctgaagtgcgcttcacgcggatgtctatctgggttcttgaggactatgatatacaagcatggatcctaaagcacaatgtgagctctttgcagttctttgaattactgagtcacccaatcaaagacttcgatattatggccattcatccagatcacaattcgttcatccttgttcagcactggaaccagaaacttgtatcatataacatggatactcaggaactgcgtggtctctgcactcttgaaaagggctatgtggttattaccccttacataccctgtttcttggagtcatcggttcttgccaccaaacactgaggttgttgtttctgggggacttctctgcatgttcaacaagagcttgatcatccaagtgtttggcaaactagcagtgtgggtaaatctactagaattaggtggtgcaaagttggattacatgtctttaggtgatctagtctgatgatgctttaatgtcctttcgtaatgctttgagaaagctgtttacaggacaacatggttagttccatgatatatcagtgagaaagctgtttacaggacagcatggttagttctatgatatatcaaattagatcacacttaattgcaggccaatttaggtattagcttcggtattttgttgtgtttatgcaatattgaatgcgcacctatggtattaccttgtgtcttgtgtgttctgcttgttggcttttctccct

SEQ ID NO: 139843 - DNA, 1968 bp, Zea Mays
atccataaaaggcaccattaaatctttggctattagcacgcttctcccctcccaaaccccccatctcagcgagggcccagtcggctagcgccgcatccgcagccgtcgacgcagaccctcttcggcagccgcttgcagcgcgtcccttccccgctcccggtgccatggactgcgcaaaggggagggcggtggcggacctctacgacgagctgatggtggagatcttctcgcgcgtgcccgtcaaagacctccgccgttgcacgtgcgtgtgcaaatcttggcgcaacctcatcaccgaccccctctaccgcaagaagctgccccagaccctggaaggcttcttccacggcgtcgtcggagggcctctcagctacggccaattcaccagcctgtcggggagcggagtcggagaacgcgtgactccggtcgacccttccttctccttcatcacggcaatgctgcctggcgtggagcgcatggtcctcttggattcttgcaacgggctcctgctctttgggtgcacccgggaggacaagttcgggtacatcgtgacaaaccctgcgaccaaggaattgatgactgtgcccgccagctccggctcttgtcctcctccacctccatttgaatggggcatcgatgttggggaaagatacgcgcacacctttctgatgattaaccctgctgtctcctcgcacttccacttggtccagatctgggagaatacggcggaggaggaggtggaaacggtgcactcttactcgtctgaaaccaaggcatggagtgacaggtcaagcaagtgggggcgaggtgaagagggcggtgaatgggagctgtggggtgaatccgtgattggattcaagtgtggctgggctttggtcgatggtctgctccattttcttgccttcgatcttcagaaacaagattatgtgataattgcagtggatggggaaggggaaacttgtaggatcatcggctggcatggtaaggatgtggtagcaattgtttttattggtcaatcccaagaccatctacactgcatctgtgtgaatgcggaattagatcaaggctctcaagtgcgcttcacgcggatgtcgatctgggttcttgaggactatgatacacaagcatggatcctaaagcacaatgtgagctctttgcagttctttgaattactgagtcacccagtcgaagacttccatattgtggccattcatccagatcacaattcgttcatccttgttcagcactggaaccagaaatttgtatcatataacatggatactcaggaactgcgtggtctctgcactcttgaaaagggctatgtggtggttattaccccttacataccctgtttcttggagtcatctgttcttgccaccaaacactgaggttgttgtttctgggggacttctctgcatgttcaacaagagcttgatcatccaagtgttgggcaaactagcggtgtgggtaaatctactagaattaggtggtgcaaagttggattacatgtctttaggtgatctagtctgatgatgctttaatgtcctttcgtaatgctttgagaaagctgtttacaggacaacatggttagttccatgatatatcagtgaaaaagctgtttacaggacagcatggttagttctatgatatatcaaattagatcacacttaattgctggccaatataggtattagcttcggtttatattgtgattattcaatattgaatgcacacctatggtattaccctgtgtgttcagcttgttggcttttcccctctgtttttttcttcttaatataatacttcctctgctccaatttataattcatttgactttttatcctaagtttgaccgttgtcttattaaaaaaatcataatttattgttaatctttgacgtgatattgtttagtatataatatactttaaatgcggctttgaatttttcatttttttcgcaaaaaaaaaa

SEQ ID NO: 139844 - DNA, 118 bp, Zea Mays
gagtgattttggggagcatttatttaattaagaattcaaataggaaaagaaaagaagaaacccctctctctcttgcccctttggcccagcctagctcggcctaccccagcgcctcgtg

SEQ ID NO: 139845 - DNA, 1913 bp, Zea Mays
cggcacatccataaaaggcaccattaaatctttggctattaggacgcttctctcctcccaaaccccacatctcagcaagggccccgtcggctagcgccgcatccgcagaccgcagccgtcgacgcagaccctcttcggcagccgcttgcagcgcgtcccttccccgctcccggcgccatggactgcgcaaaggggagggcggtggcggacctctacgacgaggtgatggtggagatcctctcgcgcgtgcccgtcaaagacctccgccgttgcacgtgcgtgtgcaaatcttggcgcaacctcatcaccgaccccctcaaccgcaagaagctgccccagaccctggaaggcttcttccacggcgtcgtcggagggcctcacagctacggccaattcaccagcctgtcggggagcggagaacgcgtggctccggtcgacccttccttctccttcatcacggcaatgctgcctggcgtggagcgcatggtcctcttggattcttgcaacgggctcctgctcttcgggtgcacccgggaggacaagttcgggtacatcgtgacaaaccctgcgaccgaggaattgatgactgtgcccgccagctccggctcttgtccccttccacctccatttgaaagggacatggttggtggggaaagatatgcgcacacctttctgatgtttaaccctgctgtctcctcgcacttccacttggtccagatctgggagaataaggcggcgaaggaggtggaaacggtgcactcttactcgtctgaaaccaaggcatggagtgacaggtcaagcaagtgggggcgaggtgaagagggcggtgaatgggagctgtggggtgaatccgtgattggattcatgtgtggctggacattggtcgatggtctgctgcattttcttgccttcgatcttcagaaagaagagactgtgataattgcagtggatggggaaggggaaactcgtaggatcatcggctggcatggtaaggatgtgagagcaattgtttttattggtgaatcccaagaccatctacactgcatcggtgtgaatgtgcaattagatcaaggctctgaagtgcgcttcacgcggatgtcgatctgggttcttgaggactatgatacacaagcatggatcttaaagcacaatgtgagctctttgcagttctttgaattactgagtcacccaatcaaagacttccatattgtggccattcatccatatcacaattcgttcatccttattcagcactggaaccagaaacttgtatcatataacatggatactcaggaactgcatggtctcggcactcttggaaagggctatgcggttattaccccttacataccctgtttcttggagtcatcggttcttgccaccaaacactgaggttgttgtttctcggggacttctctgcatgttcaacaagagcctgatcatccaagtgtggggcaaggtgatctagtatgatggtgctttaatgtccttttgtaatgctttgagaaagctgtttacagggcaacatggttagttccatgatatatcagtgagaaagctgtttacaggacagcatggttagttctatgatatatcaaattagatcacacttaattgctggtcagtataggtattagcttcgatattttgttgtgattattcaatattgaatgcgcacctatggtattaccctgtgtgttcagcttgttggcttttcccctctgttttttcttcttcttaatataatactccctccgctctaatttataattcatttgattttttaccctaagtttgactgttgtcttattaaaaaatcataattattgttgatctttgatgtgatattgtttagcatttaatatactttaaatgtggctttgaatttttcattttttcccgcaaaaaaataa

SEQ ID NO: 139846 - DNA, 1628 bp, Zea Mays
ccaaattcagagcatctagggctattagaaaacgtgcaaggcttctttcctcccaaatcccctgagcaaggcccccgtcggctagcgccgcagccgtcgccgtcgacgccgactctcaccggcagccggtacgttccctgttcgccgcatttagcactccccgtctctcgtgctcatccatccctaccatcaccttcccaactcttagcttgcagcgcgtcccttccccgctcccggcgccatggactgcgcaaagggaaggtcgatggcggacctctacgacgagctgatgttggagatcttctcgcgcatgcccgtcaaagacctccgccattccacttacgtgtgcaaatcttggcgcaacctcatcaccgaccccctcaacggcaagaagctgccccagaccctggaaggcttcttccacggcggcgtcggagggcctcgcagctacggccatttcaccagcctgccggggagcggagtgcctccggtcgacccttccttctcttttatcaaggcaatggtgcctggggtcgagcgcatggtcctcttggattcttgcaacgggctcctgctctttgggtgcacgcgggagggcaagttcgggtacatcgtgtcaaaccctgcgaccaagaaattggtgactgtgcccgccagctccggctcttgtccgcctccacctttatttgcatttgaagcggaagtcgattatgatagtggggaaaaatatgcacacacctttctgatgtttaacccggctgtctcctcgcacttccacttgttccagatctggcaggatatgacggtggaggatgtggaaacggtgcactcttactcgtctgaaacgaaggcatggagtgacaggtcaagcaagtggcggcgaggtgaagagggcagtgaatgggggctgtggggtgaatgcctcatcaaattcaggatgggcagggctttgatcaacgatctgctgcattttgttggcttcgattctcagaaacaagaggatgtgatagttgcagtggatggggaagggaagacttgtaggatcatcgactggcatggtaaggatgtgagattaatcatttttattggtcaatcccaagaccgtctgcactgcatcggtgtcaatacgaaagcaggtcaagaccatatacacatcacgcggatgtcaatctgggttcttgaggactatgatacaaaagcatggatcctgaagcacagtgtgggctctttgcagttttttggattactgggtcgcctggtccatgatttcaatattgtggccattcatccagatcacaattctatcatcattgttcagcactggaaccagaaacttgtatcatataacatggatacccaggaactgcgtggtctccgcactcttgaaaatggctgtgcctatgtggctattaccccatacgttccctgtttcttggagtcatcagttcttgccaccaaaggttgaggttgttgctttttggagacttctctgcatgttcagcaatagcttgatcatccaagtgtggggcaaactagcagtgtgggtaaacctactagaatcaggtggtgcaaagttggattacatgtctttaggtgatctattctgatggtgctttaatgtcctcttg

SEQ ID NO: 139847 - DNA, 1854 bp, Zea Mays
ccaaattcagagcatctagggctattagaaaacgtgcaaggcttctttcctcccaaatcccctgagcaaggcccccgtcggctagcgccgcagccgtcgccgtcgacgccgactctcaccggcagccgcttgcagcgcgtcccttccccgctcccggcgccatggactgcgcaaagggaaggtcgatggcggacctctacgacgagctgatgttggagatcttctcgcgcatgcccgtcaaagacctccgccattccacttacgtgtgcaaatcttggcgcaacctcatcaccgaccccctcaacggcaagaagctgccccagaccctggaaggcttcttccacggcggcgtcggagggcctcgcagctacggccatttcaccagcctgccggggagcggagtgcctccggtcgacccttccttctcttttatcaaggcaatggtgcctggggtcgagcgcatggtcctcttggattcttgcaacgggctcctgctctttgggtgcacgcgggagggcaagttcgggtacatcgtgtcaaaccctgcgaccaagaaattggtgactgtgcccgccagctccggctcttgtccgcctccacctttatttgcatttgaagcggaagtcgattatgatagtggggaaaaatatgcacacacctttctgatgtttaacccggctgtctcctcgcacttccacttgttccagatctggcaggatatgacggtggaggatgtggaaacggtgcactcttactcgtctgaaacgaaggcatggagtgacaggtcaagcaagtggcggcgaggtgaagagggcagtgaatgggggctgtggggtgaatgcctcatcaaattcaggatgggcagggctttgatcaacgatctgctgcattttgttggcttcgattctcagaaacaagaggatgtgatagttgcagtggatggggaagggaagacttgtaggatcatcgactggcatggtaaggatgtgagattaatcatttttattggtcaatcccaagaccgtctgcactgcatcggtgtcaatacgaaagcaggtcaagaccatatacacatcacgcggatgtcaatctgggttcttgaggactatgatacaaaagcatggatcctgaagcacagtgtgggctctttgcagttttttggattactgggtcgcctggtccatgatttcaatattgtggccattcatccagatcacaattctatcatcattgttcagcactggaaccagaaacttgtatcatataacatggatacccaggaactgcgtggtctccgcactcttgaaaatggctgtgcctatgtggctattaccccatacgttccctgtttcttggagtcatcagttcttgccaccaaaggttgaggttgttgctttttggagacttctctgcatgttcagcaatagcttgatcatccaagtgtggggcaaactagcagtgtgggtaaacctactagaatcaggtggtgcaaagttggattacatgtctttaggtgatctattctgatggtgctttaatgtcctcttgtaatgctgtgagaaagctctttacaagacagcatgcaggttagcattacatattactagttcgagctgcccaacacatgtaagttctcagttttgagtttcagatgctacactttgtgtttccagaatgatgtctccatcttttttgtgtgcttcctttttctcggcctatattagcgagccattactgactgaatttgtgcttggtcggtgctgtatatgtattttatgctgggaaatgcatttatcttccacatgtagcggatgtcatgtctctgaaatgtttgaactgagaacttgtcacatt

SEQ ID NO: 139848 - DNA, 997 bp, Zea Mays
agagacagagagagggggttactcggcgactcatcgccacccacaccctagtactataaaggaggccggccatctcctcccccttcctcaggcatgagcacccctctcctccgccgtcccatggccgcgccctgttcctgggacacttccttccacgaaaaaaagcagaagcagaagctctagctacctctactaccgacctggatccactcaacccgctacgctaagctccccttcccgttcgacaagtgaagagaagaggttattcatccatctgcgctgcagcctgcaaaggagaaggagaaggaggcgcttgacatgggcaagtacgtggagctgctggacatgggcgtgcgcatcgccgcgcgcttccactcccactgcccgcagaccgcgcgcctctactaccacccgcccgctggcgggccggcggccgcgggggacggccgcaagggcgactccgccaccgccgccaccgccgccgccgccgtgatgctgaagcagcaggcgcacaggttcgacgcctccgagatcatcctccacaccgtcgtctaggccggctgcgtgggtgggatgctcgccggagccgtcgacggggccgcggcgatctatcgatttttatcaccattcattgacggggagagccagagtgtgttgtgctgagaagcctgagatgtgatgtgatgcgcctcccgtttttttattttttaccatgagttcaaatgcatttcggttcgtcgaaccattgttctgttaattttttttttgcccgggttctaaacttttcccggggtgaagagtcgaagccgagcgtgtgtgcctcctgccgtcttttgatctggctacgagttaaggcttggcttgttcattgtaatctcgatccatatggaatttggagaggattatggtgcattcaaattcctccctctactcccttctaattccaatgatatgaatactatacgtccaattcccatttggagacgttccatgcgtg

SEQ ID NO: 139849 - DNA, 1199 bp, Zea Mays
gccgccccatccccatccgcatccccgccgccgcgaatcgtgcgacctccgcgcgacccggcctgccccctgtcgcgccctacgacaccgtctcctcgcgcccaagcccatactaaaaaatcagccaaatccctcgcatcttccctcccaccgatgcaatcgcgccgccgcccccatcccttcccccacccccatcggcgatgtgcctactccagcgggcggcgctctactttctgggtggcgccgacgaccgcgaggcgctggcgtacgcggcgcggatgccggagaccgggaccatgtcgctgacggtggtgcggttcaagctccggaactgggttgggatgggcgggcgcgacgaggcgagggacgaggagctactgcaggagttctggagcaggcacaggcacaacgagcggggtggtgtacgtggagaagacggtggaggacgcggagggcacgacgtccgtggtgcgcgccatgagcgagaagttcgacctgctcatcgtgggtcggcgcggcggggaaggcgaaggtgacccggaggggtccacggcgctcaccagcgggctgtcggagtcgagcgagttcccggagctgggcgtgctgggggacatgcttgcctccgcggagttcgcgtccaaggtctccatcctcgtcatccagcagcagccgcccaagaaaaccattgccacaattaagttgttctgctttcttgcgctggccgcaaagcgtgggctgactgattgggaaggtggatatttcccagtcactctccatttcactgaaaattacccaagtaacccaccaacctgcaagttcccacgaaggtttttccatgtcaatgtctatgattctggggatgtatgcctgtcaatacttggtgatgcatgggcgccctctatcacagtgcggcaaattcttataggcatccaggagctgctggagaacccaaacccagcctctcccgcacaggattttgcttacgatgtttttgcagaggtcttaaaataacttatcctgaaaattctctattttttatatgattatgtgcttaaaactgtgctcttatgtgccatttactgtcattcgctagaggtcatgatatggttactttctcttactgctacagaactgcagtgacaaatggtggtgccattaagcatgatggctcatatgaatcagatcctgcagttgaggta

SEQ ID NO: 139850 - DNA, 2127 bp, Zea Mays
atggagctactattgcagggatggatcacttccgcacaatgcatgagcataactcccgttcgagaggagctcggtgtggacgtcgacacattggaaggagggaggcgcgaggtagcagtgaggtcaccgatagaggacagggaagaggcggcggcgttcgcggatcctagcatcgcgcgcgaggaggggtcgtggggcgcaggcggcggcgttgcggggctggcggctcccaaatgtggattccccggcgttcccattaattttgagattgatttgtatataattcccagattgttcgagttgaactccaaggtgctgctgcatttcttttattctcgtctggtacctcttgtacttcttctggttgaaggttccacgcctatagatattggagaacatggatgggaaatgcttctggtagtaaaaaaggcaacacaagaggctggttcaaaatttgaactgctaggttttgcagctgtgcataacttctatcattatcctgagagtattcgcttacgaatcagccagatacttgtgttgccaccttatcagggtgaaggccatggtcttggtcttcttgaagcaatcaattatattgcacagtctgagaacatttacgatgttacaatagaaagcccttctgattacctgcagtatgatcataagagcatggacaacttcagggcctgcatatatgacctcatgaagggggagatccttggcagtgcctctggaactaacaggaagcgtctgttgcagatgccaaccagtttcaataaggaggcatcttttgttgtgtattggacacatgagattggggatgaggatgaacaaactgttgagcagcagccagaatatctcaggacgcaggagcaacaactcaatgagctcgtggacatccaaatcgaggagattgatggggtcgccaagaacgtcacttcatgtggcaaggataagatggcagagctggcggtcggctgggtcgtcgagcccaatggcaccacctacctcaaggaggggacatgcttgatcaagcaaccgggcgacacctacgacgacttcgccagctccaagcccgacaacgagtgccactacgtcgtcttcgacttggacttgaacaatttttatgactgtgggagcagtggcgtcagtttgagtgcatttgcattcttgttctctgagttggttcagtacaaccagactaaagttgacaacattactgagctagaacggagtcatgctagaacgatagatgcgcataccaatcgtaacaccattgcttctgttgttgcccatttcggagcgtcatggtgcgtgatgtccctatccatgaactacaagtttgaggagatggcgcagacccacctcgaggtcttgttcctctacatggacgctgatgatgtccaggagatggtcttgttcatactatttgctgtcagcatttctttcattcactctactctttatcagagtaaagcttctatgaatatttgctcaaggtctggatctaggggaataaaactgaccatacaaatgtgggagacatcaatggaaggtcaattaagtttaacaaagaaaactacaccatctaattactactacatttgtgaaaagaatggtggctcattgtctgacaagatggatgaacttgcttgctttgcccctgatatgctggcattaggagcctctggttatgggccagaaaaatcagagcaaattatgaatatggcaaaagaggacatgagtgtgggcacatcgtggaacatcttgagaccggagactgttgaatcacttatgtacctatggcgcttgacggggaatacaacataccaagattgggggtgggacatattccaggcatttgagaagaacttccgtgtagaatttggatatgtgggactgagagatgtgaacactggtgaaaaagataacatgatgcagagcttcttcctggcagagacgctcaagtatctctacctacttttctttcctccatcagtcatatcctttgaggactgggttttcaatactgaagctcacccattaagaattgctccagtaaatggtaacaaaggcattggaacaccggtccgtccattcgggagaaaacagggaaagcctgagtaa

SEQ ID NO: 139851 - DNA, 664 bp, Zea Mays
acttacaattttgtttaaaaggaactaaatcactgctaatactggagtagcatatctttggtgaatacttgccagtgaattggtttccgctatagtatatatatatatatatatatatatatatatatatatatatataagtatacactcttctaggattatagtatatagataagtatacactcttctaggatcaatcgtgaggagttctttagattttcttgcgtcatggaaaacaaaaagagggtggatgcactagtgtttttctcgttacttctcctcggatactttgctgctcatgcgcatgggaagggtcatgtcacaaatgatatcggtgtttctactctagctaaagaaggaattatgcgaggaaaaggagcacaatgcgctcaagggtttcttccatgcaaagataacaagtgctactgctgcattggtggccgaactcatggttgctactctacgctggctgagtgtagtcatgcctgcttctaaacaaaaattaaagatcgatgttattatatacattgtaatggtaggtaatgctattaataatatatgggagttttagttttggtattagactttttttcgattcgcgaaatttagtcaaaatctaaccagtttttagaggacttaaatatgaagtatgtttcccaataaa

SEQ ID NO: 139852 - DNA, 339 bp, Zea Mays
atggcggccgagatctctctttccctggtgccgtgtgtgctcgccctcgcctatgccgcgcccctgcgctcgtcgcggtgctccagctcgcccctgcgcgctcctctccccaagatccctccctgcatgccggacgtcgtccgttccctggtggccgagcatagcccttgcgctcgtaccttctctgttcaatttctagaacacctaggtctatccatggtcactcccttcgtcgttggtgttcggctccctgtttcagttgtttcagtttgtcgtgccgcgccatcatcacttctgtcgcgagctcgatcctcgttgtcatcacttcgccatgtttga

SEQ ID NO: 139853 - DNA, 330 bp, Zea Mays
ctttcctccaccataaggaaatcgcatcacaacacacatctctgcaaagcacacagagaagaggtaccaccaagtgaacaaatcatatcacccattgcacaggaagcgctggtaaatcagccaaattcccagcgaatggcgagatcctctagcttttcggccccgctggagcacccacgaacaggaaaacagcagccctagctccgcgtcagcggcattgcccccaaggctagtactatgttgaaaagctagtactaacctgattcactgctgaatccaaatagagttgacacaccttagtgatttctgcacatccgaggagattggggg

SEQ ID NO: 139854 - DNA, 629 bp, Zea Mays
acttacaattttgtctaaaagtaactaaatcagtgctaagtttggagtagcatatctctggtgaatacttgctagtgaattggtttccgctatagtatatatataagtatacactcttcttggattatagtatatatataagtatacactcttctaggatcaatcgtgaggagttccttaaattttgttgcgacatggagtacagaaagagggtggatgcgctagtgttttttcttgttacttctcctcggatactttgttgctcatgcacatgggaaggatcatgtcacagatgatgtcggtgtttctactccagctaaagaaggaattatgcaaggaaaaggagcacgatgcgctaaaggttctcctccattttaagataacaagtgctactgctgcattgggggccgaactcatggtcgctactctacgctggctgagtgtagtgatgcctgcttcaaaacaaaaaataagatcgctattattatatacattgtaatggtaggtaatgctattaatagcatatgggaattttagttttggtattatacattttccgattcacaaaatttagtcaaaatctaaccagcttttagaggacttaaatataaagtatgtttgcctataaa

SEQ ID NO: 139855 - DNA, 561 bp, Zea Mays
ataaggggtatagatatagatatatagaagatatagatagatagatatgatagaatagataacttacaattttgtctaaaagaaactaaatcactgctaagtttggagtagcatatctttggtgaatacttgccagtgaattggtttccgctatagtatatacatatatatacaagtatacactcttctaggatcaatcgtgaggagttccttaaattttcttgcgacatggagtacagaaagagggtggatgcgctagtgtttttctcgttacttctcctcggatactttgctgctcatgcacatgggaaggctaaagaaggaattatgcaaggaaacagagcacgatgcgctaaagggtttcctccatgcgaagataacaagtgctactactgcattggggggcgaactcatgctcgctactctacgctggttgagtgtagtcatgcttgcttctaaacaaaaattaagatcgctgttattatgtacattgtaatggtaggtaatgctattaataatatatgggaattttaattttggtattatacttttttgcaattc

SEQ ID NO: 139856 - DNA, 663 bp, Zea Mays
ataaggggtatagatatagatatatagaagatatagatagatagatatgatagaatagataacttacaattttgtctaaaagaaactaaatcactgctaagtttggagtagcatatctttggtgaatacttgccagtgaattggtttccgctatagtatatacatatatatacaagtatacactcttctaggatcaatcgtgaggagttccttaaattttcttgcgacatggagtacagaaagagggtggatgcgctagtgtttttctcgttacttctcctcggatactttgctgctcatgcacatgggaagggtcatttcacagatgatgtcggtgtttctattccagctaaagaaggaattatgcaaggaaacagagcacgatgcgctaaagggtttcctccatgcgaagataacaagtgctactactgcattggggggcgaactcatgctcgctactctacgctggttgagtgtagtcatgcttgcttctaaacaaaaattaagatcgctgttattatgtacattgtaatggtaggtaatgctattaataatatatgggaattttaattttggtattatacttttttgcaattcacgaaatttagtcaaaatctaaccagtttttagaggacttaaatataaagtatgtttccctataaa

SEQ ID NO: 139857 - DNA, 518 bp, Zea Mays
actcttctaggattatagtatatatataagtatacactcttctaggatcaatcgtgaggagttccttaaattttcttgcgacatggagtacagaaagagggtggatgcgctagtgtttttctcgttacttctcctcggatactttgctgctcatgcacatgggaagggtcatgccacagatgatgtctgtgtttctactccagctaaagaagtaattatgcaaggaaacggagcacgatgcgttgtagggtttcctccatgcaaagataacaagtgctactgctgcattggggggcgaactcatgctcgctactctacgctagctgagtgtagacatgcctgcttctaaacaaaaattaagatcactgttattatatacattgtaatggtaggtaatgctattaataatatatgggaattttagttttggtattatacttttttccaattcacgaaatttagtcaaaatctaaccagctttttagaggacttaaatataaagtatgtttccctataaa

SEQ ID NO: 139858 - DNA, 801 bp, Zea Mays
ctcctttctatacataccctctcctttctatacaatcacacacccctgccatgaaccccttccctcttccttctcacacaggagcagcccatgcgttttcctctctatgcattatgcctccgtggtctaaggggtcgcctcatcgtcttcctcgcgtcgttggatgagcagccatgtcgtctttctcgcatcgtcttcctcttccttgcgtgcctgctcggctattcttcatgtgtaggtgacaaatcatctccttctccctcttcttcgcctccttcttcctcgtcactacgcaaacatcatggcggccaaggagctcgcaccaaactccctactcacctagcgacgcagctggcctagcccctcgccggtgcggcctggcgtggcccacgcagctagcccgcctcgcccccagccgagctcccgcagccaccctgcgtgatccctggccaggctgatgtctagccgagccttccctgccacgacacgcccttgtatggtgctgctgcgcaccgctcagccctgactctaccaagcagacgccaccgccgtcagccccacctgccgtagtgcccgccacgtcggcgtcgcgcccgctccggcaggccaatccgttttcctactgtggtcgttcgtgcagtatggaataggaaaaaaaaggaaaccgccccgtgtggccccacctgcatgcccattcgttgcctagcgccacggcgcgatcttctcactgcacacatgatcgcagcacggaaaggagaaccgtcataggcccctgtatgttccttcctatacgatatcctc

SEQ ID NO: 139859 - DNA, 439 bp, Zea Mays
ggttcgcattcggtttaccttctaaaacctggggtgacaggtggcatagcaggagtggagggcagcgacggctgcacagctctgcgtgcaatggcttgcattttttgctcctcgttggcgatgcgtgtgcgaccatgagctctcgacacaggcaggtcatgtcacagatgatgtcggtgtttctactccagctaaagaaggaattatgcaaggaaacggagcacgatgtgttgtagggtttcctccatgcaaagataacaagtgctactgctgcattggggggcgaactcatgctcgctactctacgatggctgagtgtagacatgcctgcttctaaacaaaaattaagatcgctgttattatatacattgtaatggtaggtaatgctattaataatatatgggaattttagttttggtattatacttttttccaattc

SEQ ID NO: 139860 - DNA, 436 bp, Zea Mays
actcttctaggattatagtatatatataagtatacactcttctaggatcaatcgtgaggagttccttaaattgtcttgcgacatggagtacagaaagagggtggatgcgctagtgtttttctcgttacttctcggatactttgctgctcatgcacatgggaaggatgatgtcggtgtttctactccagctaaagaaggaattatgcaaggaaacggagcacgatgtgttgtagggtttcctccatgcaaagataacaagtgctactgctgcattggggggcgaactcatgctcgctactctacgatggctgagtgtagacatgcctgcttctaaacaaaaattaagatcgctgttattatatacattgtaatggtaggtaatgctattaataatatatgggaattttagttttggtattatacttttttccaattc

SEQ ID NO: 139861 - DNA, 515 bp, Zea Mays
actcttctaggattatagtatatatataagtatacactcttctaggatcaatcgtgaggagttccttaaattgtcttgcgacatggagtacagaaagagggtggatgcgctagtgtttttctcgttacttctcggatactttgctgctcatgcacatgggaagggtcatgtcacagatgatgtcggtgtttctactccagctaaagaaggaattatgcaaggaaacggagcacgatgtgttgtagggtttcctccatgcaaagataacaagtgctactgctgcattggggggcgaactcatgctcgctactctacgatggctgagtgtagacatgcctgcttctaaacaaaaattaagatcgctgttattatatacattgtaatggtaggtaatgctattaataatatatgggaattttagttttggtattatacttttttccaattcacaaaatttagtcaaaatctaaccagttttttagaggacttaaatataaagtatatttccctataaa

SEQ ID NO: 139862 - DNA, 423 bp, Zea Mays
atagtatatatataagtatacactcttctaggatcaatcgtgaggagttcattaaattgtcttgcgacataaagtacagaaagagggtggatgcgctagtgtttttctcgttacttctcctcggatactttgctgctcatgcacatgggaagggtcatgtcacagatgatgtcggtgtttctactccagctaaagaaggaattatgcaaggaaacggagcacgatgcattgtagggtttcctccatgcaaagataacaagtgctactgctgcattggggggcgaactcatgctcgctactctacgatggctgagtgtagacatgcctgcttctaaacaaaaattaagatcgttgttattatatacattgtaatggtaggtaatgctattaataatatatgggaattttagttttggtattata

SEQ ID NO: 139863 - DNA, 117 bp, Zea Mays
caaattctttcagaaatattgcctaaatattccaaatatttttgtagtttgttcattcgttcgtccaaataatctttgttcagtcgttatgctgccgaaattccgatcgttcgttcg

SEQ ID NO: 139864 - DNA, 1421 bp, Zea Mays
acttacaattttgtctaaagaaactaaatcactgctaagtttggagtagcatatctttggtgaatacttgctagtgaattggtttccgctatagtatatatatacatatatatatataagtatacactcttctaggattatagtatatatataagtatacactcttctaggatcagttgtgaggagttccttaaattttcttgcgacatggagtacataaagagggtggatgcgctagtgtttttctcgttactctcctcagatactttgctgctcatgcacatgggaagggtcatgtcacagatgatgtcggagtttctactccagctaaagaaggaattatgcaaggaaacggagcacgatgtgatgtagggtttcctccatgcaaagataacaagtgctactgctgcattggggggcgaactcatgctcgctactctacgctggctgagtgtagtcatgcctgcttctaaacaaaaattaagatcactgttattatatacattgtaatggtaggtaatgctattaataatatatgggaattttagttttggtattatacttttttccaattcacgaaataccttctaaaacctggcatgacaggtggcatagcaggagtggagggcagcgacggctgcacagcgctgcatgcagtggcttgcatttgtagctcctcgttggcgatgcgtgtgcgaccaagagctctcgacacagacaggtcatgtcatagatgatgtcggagtttctactccagctaaagaaggaattatgcaaggaaacggagcacgatgcgatgtagggtttcctccatgcaaagataacaagtgctactgctgcattggggggcgaactcatgctcgctactctacgctggctgagtgtagtcatgcctgcttctaaacaaaaattaagatcactgttattatatacattgtaatggtaggtaatgctattaataatatatgggaattttagttttggtattatacttttttccaattcacgaaataccttctaaaacctggcgtgacaggtggcatagcaggagtggagggcagcgacggctgcacagcgctgcatgcagtggcttgcatttgtagctcctcgttggcgatgcgtgtgcgaccaagagctctcggcacagacaggtcatgtcacagatgatgtcggagtttctactccagctaaagaaggaattatgcaaggaaacggagcacgatgcgatgtagggtttcctccatgcaaagataacaagtgctactgctgcattggggggcgaactcatgctcgctactctacgctggctgagtgtagtcatgcctgcttctaaacaaaaattaagatcactgttattatatacattgtaatggtaggtaatgctattaataatatatgggaattttagttttggtattata

SEQ ID NO: 139865 - DNA, 207 bp, Zea Mays
actcttatcctttaccttctactaggtcatgccacagatgatgtcggtgtttctactccagctaaagaaggaattatgcaaggaaatggagcacgatgcgttgtagggtttcctccatgcaaagataacaagtgctactgctgcattggtgggcgaactcatgctcgctactctacgctggctgagtgtagtcatgcctgcttctaa

SEQ ID NO: 139866 - DNA, 751 bp, Zea Mays
ttcatgactggtgattttctttgtaaatacattttacttttcttacttctaaaatacatgttccatcactacttgactttacaactaagttgactcgattttgtgctgttagcatctatttacattggatgggaagatggccgaacaaaatctttggacacaaaatcatcgtatttcatagttgttctaaattgcacatagtaacgaacaaaattggatcataaaactacaattctatagtttgaactttgaagtactcatatcactttcttgataagattgaaattgccttgcagttgggtatgagccctacttcggcaagacagtgtacccggagcccaagcgatgccggcgtacggacgacaagaagtggcggtgctccaatgaggccgccccagtctccaagtactgcgagcgccagatgcaccgcgcccacaaccgttcaagaaagcatgtgaagaagtgaatgacgccatggagcggcacgacacgacgtgggatcaccaggaggaggataaccttgcagcgtggcggctgtcttgcagctcgtgagtcacgcgagagaataggttaacaacgggaataggttacagtgagcatcttcaagaggatgcttaaaaattttccccaaaatgtgattattagcgacaggcaaaaatttattagatgtagattataagtttactccatcagttcacagaatagaacacttaaatgaaaactgggccaactaataaatttccagagtatg

SEQ ID NO: 139867 - DNA, 578 bp, Zea Mays
atggcggcgctctacctaagcagtagcggttgtggtggtgttgcagggcagggcggtgcagctgcgagggctcgaggggtgacttgcccgctgcagtggtggagtggagggcagcgatggctgtataggcgctgcctgcggtggcagttgcagctcctcgttggcgatgggtgtgcggccaagagctctcgacacaggatcggtcgtgaggagttccttaacatttcttgcgacatggagtacaaaaagagggtggatgcgctagtgtttttctctttacttctcctaggatactttgctgctcatgcgcatgggaacggtcatgtcacggatgatgtcaatgtttctgctccagctgaagaaggaattttgcgagaaaaaagagcacaatgcgctcaagggtttcttccatgcaaagataacaagtgctactgttgcattgggggccgaactcatgattgctactatacgatggctcagtgtagtcatgcatgcttctaatcaaaaattaagatcactgtttttatatacaatgtaatggtaggcaatgctattaataatacataagggaattttag

SEQ ID NO: 139868 - DNA, 140 bp, Zea Mays
ctgaaggaggagttatgcgagcaacaggggcacattgtgaagtatctgttccgtgcaaagataaaaggtgctactgctgcgttgggggtagaattgatgagtgttacctaacaatgcctttctgtaattatgcctgcttc

SEQ ID NO: 139869 - DNA, 480 bp, Zea Mays
gaagccagcaattttgcacataccgcgcaccacatacgtatagaaatcgtctggaaccgcgaggaatttcttcaaattttcttctgacgatatggagaagcacacaaagcgcgtggacgcactagtgcttttctcgttactgctcctcggatcctgtgcgcagggtcttcaggatgaggtgggcgctcctcctgctctatcagctgaagaaggggtcatggagacgagagcagaatgtagacaggtgttgcttccgtgcaaggacaacaagtgctactgctgtatcgggggcggaactcgtcagtgttacgctacactagctgagtgtagacatgcatgcctgcccctaaacacgaattagtactaagttcgctgttgttggtacaataatgtaacggtgggcagtattttcgaaaatggcttagaagggaattgatcggacatggtataaataaatcacaaaagaaaattagaaagata

SEQ ID NO: 139870 - DNA, 252 bp, Zea Mays
tgaaatattttttcctcacataaagagttttttcacagcctcacagaaaaccctaaaatttagtgtgtgaaaaagacagactgtcggctctctatcattatatgttactaatatataacatgtgcatagaaaagggtgaatttgatcgagagaccaaattgttaatctcaactgccttccaacactatttatcccaaaaaatggcgtccaaaaaatacaaaaataagtaatccttattcagagacgtataga

SEQ ID NO: 139871 - DNA, 577 bp, Zea Mays
atgcccctcttttttcaggcgagaagacggcagcggagatctggggctcaccttctggagttgttctctacgtcctgtgtatgcgctgtggtagtacggttgctccaccaccgccagttgaaggactcatgcactgagcgtaggaccaacacgcgattgacggcgtggattgatgttgaccaccgcaccggggcgcatgatggctcggcaagctgcgacgaggtcgagcggctcgtcggcgagcgtggggtgcaggagggagcgggagcatggggaggaatactctctttgccaaatgctcatacttgcatcctaccgccggtcgtctccaccatcgtgcgacagtttcgcctttcatggggttgcatggcttctctccctgagatctcactgccgacccacgcagtggcgagtagcgtcttgttggccacaccctagggctggtggagcctcccatcggccatctccaccatcgcacgacgatttcacctttcctggggtccgcatagcttctctccatgagatcttgtcgccactgttctcaaccgccgcaatagggagtacgggagcgatggaa

SEQ ID NO: 139872 - DNA, 877 bp, Zea Mays
tgcaagctgcctcgatcgcggcctcgacctagtagcccgtccctgtcgcgcccagtcgctcgctgcgcctataaaagccgcccgcggctcgcgtaggctaccagcgcaaactctgcaagggcttcggatcccacaccgaggaaaggagaagagagcgagggtcggaataatggcggccgaggagggtgccgtgatcgcgtgccacaccaaggacgagttcgacgcccgcatggccaaggccaaggagcagggcaagctggtggtcatcgacttcatggccccctggtgcagtgggtgccagatgatggccccggtgtacgcggactgcgccagcaagtacccttccgcggtcttcctcgaggtcgacgtggacgaactgctggaagtcgcgaagatctacggcgtccatgtgatgccgaccttctgcttcatcaggaacggcgagacgctcgagagctttgctaccgtcgacgaggacgagctccgggacgccgtcaggaagtacgccgccgctggcactacgacggctcctgcctcggcgtccgcctaattcaggagatgtgatgtgtagcaaatagcgcgcgcgcaccagtcgtcaataaataaataaataaataaataaataaataaataaaggccaacgtacgacgacaaattagtggcgcgcgcggtagtagctagcagagtatgcgccgccactgtgtcgatctgcagtttggtcgtttaaaagtgattgtagtgtgtactatgttcagctcgatgatctcggagtcgctatatacgctcgctcccgtgctggacgggttatcgatctgatgaacaagaatacaataatatgtatggatacttgtgacggggttccgcggaagtctggctt

SEQ ID NO: 139873 - DNA, 823 bp, Zea Mays
tcgaacggccgatctcgtcctcacccattcgcggcagtttcaccgccgctcattcaccgcgcgccagccgtcatcagacatcagctgcccagcttttactgctcccatcaaagccgtgcatgcgaaaagcgcgcggcgaaggaaaaggaggcggtaaaaaaagcaacttcacgcgagggagccgcgaccgcgagcgcctccgcatttcgaaccaaagggggcagaactgagagatcgagagaaataataaaaaaaaatccgtcttcttgtggtcttctccaaaccctagcgcccccggccccggtctccgcccccccgccttcgccgtcgcggtcgcgccccatggcggggaagtcgcgaccgcccaagcggatcctcgagtcctataccatcaagggttcggacagagtcatcaagcctggcgattgcgtgctaatgagggcatctgatgcttcaaagccaccttatgtggcaagagttgaggcaattgaagcagcaggatctcgaggcaccaatgtgagagtacgagtgcggtggtattatcgaccagaggagtccataggtggtcggcggccatttcatggttccaaggaggttttcctctctgaccactatgatgtacaaagtgctgacaccattgaggggaaatgcaatgtccacagcttccgtagctatacaaagcttgattctgtcaatgctgaggatttcttctgccgcttcgagtataaatcagctactggcagctttgtaccagatcgtatagcagtgtaagaacacagcaagacttgcaatttcattattttggatttgcattcatgttgca

SEQ ID NO: 139874 - DNA, 1548 bp, Zea Mays
tcgaacggccgatctcgtcctcacccattcgcggcagtttcaccgccgctcattcaccgcgcgccagccgtcatcagacatcagctgcccagcttttactgctcccatcaaagccgtgcatgcgaaaagcgcgcggcgaaggaaaaggaggcggtaaaaaaagcaacttcacgcgagggagccgcgaccgcgagcgcctccgcatttcgaaccaaagggggcagaactgagagatcgagagaaataataaaaaaaaatccgtcttcttgtggtcttctccaaaccctagcgcccccggccccggtctccgcccccccgccttcgccgtcgcggtcgcgccccatggcggggaagtcgcgaccgcccaagcggatcctcgagtcctataccatcaagggttcggacagagtcatcaagcctggcgattgcgtgctaatgagggcatctgatgcttcaaagccaccttatgtggcaagagttgaggcaattgaagcagcaggatctcgaggcaccaatgtgagagtacgagtgcggtggtattatcgaccagaggagtccataggtggtcggcggccatttcatggttccaaggaggttttcctctctgaccactatgatgtacaaagtgctgacaccattgaggggaaatgcaatgtccacagcttccgtagctatacaaagcttgattctgtcaatgctgaggatttcttctgccgcttcgagtataaatcagctactggcagctttgtaccagatcgtatagcagtgttttgcaagtgcgagatgccatacaatccagatgaccttatgatccaatgcgaggaatgttctgactggtttcaccctgcttgcattgggatgacaatcaaagaagcaaagaaactcgagcattttttctgccagacctgtacagctgaaaatggtaagatggttgagaattcacatgaagctacagcgcaatcagaagaaaagccggtggagtcaaaaaggcggcgaaggtgatggccgtgctgattaaatttatgaaatctatgctcggttgtacaaagccttcccacgtttcacgtttgagaactgtaattttattgttcgtcgcagtttgtggtcctgggctggggtccctctaatgtcaggcacactgtatatagcttgtaacctggtcagattgttgtattagagcacactagggtttgtgtgatagcacggaagttcggactactgagtatgtgtagagtatggcattataatgccagcatcaggtgatcaggcttcttctgggcattaggactcctgcatgatccagcaataatacttccatgcagctggacctggttagtcactagtaagttgtcaggaaacttagtactgccatgtgaactttttttgaaaccctctatgtaatgtaagcatctgtgtcctacttgcaaactgttgcacgaaattgggcacccaccctggcccattggctgcggttgcataattgcggcaactaacttgtgttttaagtttggaggaacaataataaagtttaggctcattgaactggtc

SEQ ID NO: 139875 - DNA, 1720 bp, Zea Mays
tcgaacggccgatctcgtcctcacccattcgcggcagtttcaccgccgctcattcaccgcgcgccagccgtcatcagacatcagctgcccagcttttactgctcccatcaaagccgtgcatgcgaaaagcgcgcggcgaaggaaaaggaggcggtaaaaaaagcaacttcacgcgagggagccgcgaccgcgagcgcctccgcatttcgaaccaaagggggcagaactgagagatcgagagaaataataaaaaaaaatccgtcttcttgtggtcttctccaaaccctagcgcccccggccccggtctccgcccccccgccttcgccgtcgcggtcgcgccccatggcggggaagtcgcgaccgcccaagcggatcctcgagtcctataccatcaagggttcggacagagtcatcaagcctggcgattgcgtgctaatgagggcatctgatgcttcaaagccaccttatgtggcaagagttgaggcaattgaagcagcaggatctcgaggcaccaatgtgagagtacgagtgcggtggtattatcgaccagaggagtccataggtggtcggcggccatttcatggttccaaggaggttttcctctctgaccactatgatgtacaaagtgctgacaccattgaggggaaatgcaatgtccacagcttccgtagctatacaaagcttgattctgtcaatgctgaggatttcttctgccgcttcgagtataaatcagctactggcagctttgtaccagatcgtatagcagtcatatattagatagctttggttttcggaagcagcatttccccctacatgcgacccaattagattgcttattggtactcgggttggacaaggattaataggagtaaaccatgtcaaaaaccaaaggaatgacttgttttgtgttgatagtgctaaaattgttttgcaagtgcgagatgccatacaatccagatgaccttatgatccaatgcgaggaatgttctgactggtttcaccctgcttgcattgggatgacaatcaaagaagcaaagaaactcgagcattttttctgccagacctgtacagctgaaaatggtaagatggttgagaattcacatgaagctacagcgcaatcagaagaaaagccggtggagtcaaaaaggcggcgaaggtgatggccgtgctgattaaatttatgaaatctatgctcggttgtacaaagccttcccacgtttcacgtttgagaactgtaattttattgttcgtcgcagtttgtggtcctgggctggggtccctctaatgtcaggcacactgtatatagcttgtaacctggtcagattgttgtattagagcacactagggtttgtgtgatagcacggaagttcggactactgagtatgtgtagagtatggcattataatgccagcatcaggtgatcaggcttcttctgggcattaggactcctgcatgatccagcaataatacttccatgcagctggacctggttagtcactagtaagttgtcaggaaacttagtactgccatgtgaactttttttgaaaccctctatgtaatgtaagcatctgtgtcctacttgcaaactgttgcacgaaattgggcacccaccctggcccattggctgcggttgcataattgcggcaactaacttgtgttttaagtttggaggaacaataataaagtttaggctcattgaactggtctggttcaacgaaac

SEQ ID NO: 139876 - DNA, 1759 bp, Zea Mays
gtactcagtagtcagaaagacgcaagccggcaaagttcatctgcggctgcttactgttcccaagcagttggcattggcaatccgccagacgcaagcgtccccctccgctcctctcaaccggcacggcgccaggtccgcggcgaaatcggtggacggcatgccgcggcgcgaggcggcgaggcttctccgccgcctgggcccgatcgctgtccagtcgccgaagcgaggcatgcctcataatcaatatgaatccacaaaccacgctgtgaattcttatagaagattccactggattcccagtgtacagcaccctctgtgtggacctacaagtagtgggggaatatatgaaggtcaacgcagtgctaacaaggcttgtgaagttcagaagcgcacatttggttctgctgcaacacagtttcagaggaatccagcctattcagtgctgaactctgatgacattgcttacttcaagagcatcttgggagaaaatggtgtagttcaggatgaagacagagttgcagttgcaaatgtagattggatgggtaaatacagaggtgcaagtcagctagtacttttaccaaaaactactactgaggtatctaagattctttcatattgcaacaccaaacgattggctgtggttccacaaggtggcaacacaggtcttgtaggtggaagtgtgcctgttttcgatgaggtgattgttggccttgcaggcatgaataaaattatttcctttgataacgtaaatggaattcttacttgtgaagctggttgtgtgttggagaatttaagtaccttcgtggaaaatgaagggtttattatgccacttgacttgggagcgaaaggtagttgccacatcggtggaaacatttcaactaatgctggcggcctgcgttttatacgctatggttcacttcatggaaatgttcttggtcttgaagttgtcctggctgatgggactatccttgatatgcttactactttaaggaaagacaatactgggtatgatctgaagcacttatttataggaagtgaaggctcgctaggagtagtcaccaaaatatcagtacttacacctgcaaagctatcttcaaccaatgttgcatttctttcctgcaatgattacacaagctgccagaaattactactggcagctaggaggagcttgggtgagatcttgtctgcatttgaattcatggatcatcactgtattgatctggctatgcaacatttggaaggagttcaaaatcctttacctgcatcaccgtacaaattttacgttctagttgaaacaacaggaagtgatgaatcatctgacaagacaaaactggaagcttttttgttgcgttcaatggaagatggtttagtagctgatggagttatcgcacaggatatcagccaagcatcaaacttttggaggatccgtgagggtatatcagaagcatccgtcaaagttggagctgtgtacaaatatgacttgtccataactgtagagaagctctatgatattgttgaagaaatgcgctgccgtcttggtgataatgcagaggtattgggctatggccaccttggagatgggaatctgcatttgaacattgtatcaagcaaatatgacgacaatattctcgcacaaattgaaccattcgtctatgagtggacatcagcacaaagaggaagcatcagcgcagagcatggtttggggctaatgaaagctgagaagattcactacagtaaatcacctgaagcagtgagtgtt

SEQ ID NO: 139877 - DNA, 1768 bp, Zea Mays
gtactcagtagtcagaaagacgcaagccggcaaagttcatctgcggctgcttactgttcccaagcagttggcattggcaatccgccagacgcaagcgtccccctccgctcctctcaaccggcacggcgccaggtccgcggcgaaatcggtggacggcatgccgcggcgcgaggcggcgaggcttctccgccgcctgggcccgatcgctgtccagtcgccgaagcgaggcttttcaggcatgcctcataatcaatatgaatccacaaaccacgctgtgaattcttatagaagattccactggattcccagtgtacagcaccctctgtgtggacctacaagtagtgggggaatatatgaaggtcaacgcagtgctaacaaggcttgtgaagttcagaagcgcacatttggttctgctgcaacacagtttcagaggaatccagcctattcagtgctgaactctgatgacattgcttacttcaagagcatcttgggagaaaatggtgtagttcaggatgaagacagagttgcagttgcaaatgtagattggatgggtaaatacagaggtgcaagtcagctagtacttttaccaaaaactactactgaggtatctaagattctttcatattgcaacaccaaacgattggctgtggttccacaaggtggcaacacaggtcttgtaggtggaagtgtgcctgttttcgatgaggtgattgttggccttgcaggcatgaataaaattatttcctttgataacgtaaatggaattcttacttgtgaagctggttgtgtgttggagaatttaagtaccttcgtggaaaatgaagggtttattatgccacttgacttgggagcgaaaggtagttgccacatcggtggaaacatttcaactaatgctggcggcctgcgttttatacgctatggttcacttcatggaaatgttcttggtcttgaagttgtcctggctgatgggactatccttgatatgcttactactttaaggaaagacaatactgggtatgatctgaagcacttatttataggaagtgaaggctcgctaggagtagtcaccaaaatatcagtacttacacctgcaaagctatcttcaaccaatgttgcatttctttcctgcaatgattacacaagctgccagaaattactactggcagctaggaggagcttgggtgagatcttgtctgcatttgaattcatggatcatcactgtattgatctggctatgcaacatttggaaggagttcaaaatcctttacctgcatcaccgtacaaattttacgttctagttgaaacaacaggaagtgatgaatcatctgacaagacaaaactggaagcttttttgttgcgttcaatggaagatggtttagtagctgatggagttatcgcacaggatatcagccaagcatcaaacttttggaggatccgtgagggtatatcagaagcatccgtcaaagttggagctgtgtacaaatatgacttgtccataactgtagagaagctctatgatattgttgaagaaatgcgctgccgtcttggtgataatgcagaggtattgggctatggccaccttggagatgggaatctgcatttgaacattgtatcaagcaaatatgacgacaatattctcgcacaaattgaaccattcgtctatgagtggacatcagcacaaagaggaagcatcagcgcagagcatggtttggggctaatgaaagctgagaagattcactacagtaaatcacctgaagcagtgagtgtt

SEQ ID NO: 139878 - DNA, 1113 bp, Zea Mays
tttttatgaaattcatgtataaaatcttcaagatagtgattactgcttactgattgtgcttcccagaaattactactggcagctaggaggagcttgggtgagatcttgtctgcatttgaattcatggatcatcactgtattgatctggtacttgcataagaaattctgtttgaaataattttcacattctagagagaattaagacacaaaattgttacttgagttgattaggtgctctgagtagcgctcctcagatcatgagttcgactccctatggtaacaaatttcagactgagttaaaaaaatcccctcggctctctcatgatgtctaagttccggttgtggtcacggtcgcagtcattctcacaaggactatggtgccgctgtgtatgggtggaacaggggttcaggggttttctcgacttgtgtgagaagagcttcttaatacaatacctggtggatttgctcaataagcccttaaaacaaacttgactaaggggttccttatccaaagttaatggaatatttcttttttactgttagattggtttttgatagattgcttttgttttggaggctatgcaacatttggaaggagttcaaaatcctttacctgcatcaccgtacaaattttacgttctagttgaaacaacaggaagtgatgaatcatctgacaagacaaaactggaagcttttttgttgcgttcaatggaagatggtttagtagctgatggagttatcgcacaggatatcagccaagcatcaaacttttggaggatccgtgagggtatatcagaagcatccgtcaaagttggagctgtgtacaaatatgacttgtccataactgtagagaagctctatgatattgttgaagaaatgcgctgccgtcttggtgataatgcagaggtattgggctatggccaccttggagatgggaatctgcatttgaacattgtatcaagcaaatatgacgacaatattctcgcacaaattgaaccattcgtctatgagtggacatcagcacaaagaggaagcatcagcgcagagcatggtttggggctaatgaaagctgagaagattcactacagtaaatcacctgaagcagtgagtgtt

SEQ ID NO: 139879 - DNA, 969 bp, Zea Mays
atggtgcgcctcgcgcgtgactccttcacgctcccacccgaggacaagcttccgctcggcccctacatcaagacggccccatctccagcttccttgatactgcagttggtggtgaccgaggaggaggatgaggttttccacacctcggtcgccaagtgctcgacaaaatgcttcagccaggaaatcgtcttgttgaagcctagcaatgatgcgccaacgtccacgctcgtgcctgctacaccaagggcaatagtcaaggttgctgacaactcgttcacaaggtacatccccatcgattcattggcctcgagtggtgttgttctatcacgctatgccattgaaggtcatgaggctcctaaggtgctggtggaaatgactactcagtgtttagtaataccacgcctattctctgctactgaggtggacataggaccttggccaccccctcttgagaacaagtacacatggctcagtgacaccatgacaccatatttcagttttgatctgtcattctgttacggtcaggaagctctgaagcaaagaccaccatggcctccacctacacagtgggttatgcatattgtgggtgctcaactcaggccaataccctggccatcttatggctctcgttcagttgggcaacgtttatggtgggatccaggtggtgatcaatgtttgcttactaaatttcattatattaatggcttgggggccttgctaaggcaacatgctaatttgtcttttgtcaagaagaaagagtggctggttttattgcaatttttatccggtggtcagcacaacatatctaaagaagctatggtgttcatgcaaagaaactatagtggtctgcacaagtctattattggcttcaattcacaaatgcagaagaatcacaatggatgtggtagcagtataaagacagcctccatggccaccacctgtgcaatttgtgatccatggtgggattga

SEQ ID NO: 139880 - DNA, 465 bp, Zea Mays
aggttcagttcactcgccacccgctaggttccatcatcatcattcatcaacagccgcttcgttgctctccacagtctccacgccgccgactcctgcgacgcacagacactggtcacccatggccggccgccgccgccgctgtgtgcatccccgtcaagcacggttgttgccgctgccttccccaggagtgccctcgcctctggaatccaacactctcaggtccgcctgcgttcgttaccctaacggcctacaccctcgctccatgccccccctgtttccattcggttcacgtttcgttgggtagaccggtagatgtggagagagatcgaagcagacagcaggcagggtccggagttccggacatggattcattaatggtcatgcccttataatgctgcccaaataaaatgtttatagtgctgcctaaataaaatgctcaatggactcagagtcttcttgcctgat

SEQ ID NO: 139881 - DNA, 1857 bp, Zea Mays
gttcactcgccacccgctaggttccatcatcatcattcatcaacagccgcttcgttgctctccacagtctccacgccgccgactcctgcgacgcacagacactggtcacccatggccggccgccgccgccgctgtgtgcatccccgtcaagcacggttgttgccgctgccttccccaggagtgccctcgcctctggaatccaacactctcagggaagttgctgttgcagaaagcccctccaaaaagatttgccacgccttaagctctaccccctcttcggcacctggccctgatgtttgggtggatctcttggacagcctgcttctccaaataattgttcttgttagctcattccatgatctccttgctttcattggcacctgccgttcttggcgcgctgtgctctcttccctcccacctgtatatacctttaacatcccacctctccaccttcgatcagatggttgtgattctcacccccatcgctggtacatgagggcaaaacttttatccgatatcaattggcagctcactgatcctgcgaagcaaacctcctcccttagttgttcggccctccaagactttcaggtctacatgcggtatttgggctgctcatatggttatcttatcttctccaatttggagcaatgcctccttgtcaatgtgtacagcggtgctaccgtgcggcctcccaagctcaaattcactgacaaccgcaatgtctaccatggagcccttgttgctccaatcaacttatctaattcatgtctcctattttgctcaagatcatccatttttcagtggaaggttggatcagacttttggtctgagcaccctttgggtgtcgagtgtattagtcaaatcgtgtcgttcaaaggtgagatatttgctattgacttacttaggaggcttcacagaatacagttggaacctcagctgagcttgcaggaagtagcagttgtctgggacgcggacatgtttctaggcctggatagtacacaatggttggtggtctgtggtgacatgcttctcatggttcacttgtcagtaacaatcgattctccctgttctggattttctgagacctttaatgtatgccgcctcgactttcaagttgagccagctaagtgggtaaaagtggataatatgggagacaatgctctatttgttggtactgatgggaggagtccaacgttttcttgcctgggtcccgagaaatggggcgggaaaaggaactgtatttacattgccagcccgcttgcagattctaatgagccttggggtgtgttcgaagttggtcaggcggtgcgttgttacaatgcaaaaaagtatctgacccgtgtacattcgagccgactgccaagcctttgggtgcttcccagtcttgtttatggtgttggccagtgaccaatccacgcttgccttggagttttggcaatttgtgaggatccatttcctttgatgctccaatatgatgtattagttagtcctgttgctttgttatttcttattttggcattcagtgtcctgtacagattgcagctaaggtgttgttgatgttgatctcaagatatatctaggtttctaaaccgagttttctcactgtgctgctggacagtaactgaaactatttggtatgagactttgctatgacagagcctaaagttcattgtagatgatggtcatttgaagtactttagcattgttgtggaagatgaatagattattgtattatggttggccacagacaactgctctttgttgcagcgatccacggttgagttgagcaaggtgctggcacacagttgtgttgcatccaactgccttaagtcatctaccaggaacttgtttgctgtc

SEQ ID NO: 139882 - DNA, 4200 bp, Zea Mays
atggccggccgccgccgccgctgtgtgcatccccgtcaagcacggttgttgccgctgccttccccaggagtgccctcgcctctggaatccaacactctcagggaagttgctgttgcagaaagcccctccaaaaagatttgccacgccttaagctctaccccctcttcggcacctggccctgatgtttgggtggatctcttggacagcctgcttctccaaataattgttcttgttagctcattccatgatctccttgctttcattggcacctgccgttcttggcgcgctgtgctctcttccctcccacctgtatatacctttaacatcccacctctccaccttcgatcagatggttgtgattctcacccccatcgctggtacatgagggcaaaacttttatccgatatcaattggcagctcactgatcctgcgaagcaaacctcctcccttagttgttcggccctccaagactttcaggtctacatgcggtatttgggctgctcatatggttatcttatcttctccaatttggagcaatgcctccttgtcaatgtgtacagcggtgctaccgtgcggcctcccaagctcaaattcactgacaaccgcaatgtctaccatggagcccttgttgctccaatcaacttatctaattcatgtctcctattttgctcaagatcatccatttttcagtggaaggttggatcagacttttggtctgagcaccctttgggtgtcgagtgtattagtcaaatcgtgtcgttcaaaggtgagatatttgctattgacttacttaggaggcttcacagaatacagttggaacctcagctgagcttgcaggaagtagcagttgtctgggacgcggacatgtttctaggcctggatagtacacaatggttggtggtctgtggtgacatgcttctcatggttcacttgtcagtaacaatcgattctccctgttctggattttctgagacctttaatgtatgccgcctcgactttcaagttgagccagctaagtgggtaaaagtggataatatgggagacaatgctctatttgttggtactgatgggaggagtccaacgttttcttgcctgggtcccgagaaatggggcgggaaaaggaactgtatttacattgccagcccgcttgcagattctaatgagccttggggtgtgttcgaagttggtcaggcgtctatggcgggaaagtcgaaggaggaaggggatcggtggaaggagttgatggcgaagttggagctgctgacagagaagaaggtgatgggtgtggaaggagttcaacaacagctgctgggaaaagcgggcagggctgcggtgggtgcatggaaggccgaggaggagagggtccaaggggcgcaaaagttggagacaacacatgaggtgttgcggtgcatggccagggacatggatatagaacctgaggaacagagttgggtgggtcctcgatctggagcacgagggtgtcggtgtgaagttgataaccagggtgatggaggtgtggcccttccggtgttcgatgaaataccgcacaacggtagcgaggcggtgatttttcttttctatgagggttctgaatacacggtgcttgatgccatgccaattgaggctgtaatttgggatgaggaactgcaacagttagatagagagatggatgagccgctggagtacaaacagaaacagtccacaaagacccacgaaggaattgtgaaagagcaggaacctatcaatgttgagagatctgcttcctcggcagtcatggaggattcaccaatcctaggtgtcgttgcgaagaagcatgatgccccagttgcagattatatggaagaggccatcgaggaggatggttttgttaccacggttgaggctgatcctacttccaaggagattcttttgactgctgcaggagaagatgaggaatgggcttcagatgatgataagaacactgaggaagaaggttgtcctgaaggtttttcagctataagagtatatgatgaagacgtgaacatgaaatttcttctctgtggagtaccatgcaccctggatgcatgtttgatgggtgcactagaagatggtttgaattcactcttgaatattgagatttgtgcgagtaaacttcagaaccgagtcagtgctcatccactccttcaagctgaagatcttccacaggagttgttgcgaagtcacaacttgcagttttgcacatgtgtcgtttcttgtttctggctgcgccaaacttgttttgatgatcagcttctagggagccgtatcaggaatgaaattattgagaagtggcagttagtttgtgttctattgtataatgaggataacaagccatcttcatttgagtgttggccatccacgggtgtggcttgcagagattctacttttgaagtctggataaccatgccaaaatgggcagcacaggttttgaaacatcttgcaccagaaatctcctacagaagcttggttgcacttggaatctcttgggtaaatggtacaccagtgtcctcatttgattggcaggatgcaggccggcttcttttcttgtgctctaataagtgcggagatcaagctattctaaatggctcatttgctcatggatccaactgggcagcgcctcttactaaggatagtttcatgcttgccctatatgaagcatgtactggacatgagatgagatcggaatgcaataatgtgtttctctttgatgggaggcaaaacaaaggcagtgttcgacatgtgatatctgaactgacacaatggtggttcaatgcttttagcctaggaaacaatgctatggcagttcagtcacagccagacactcaacaaaaaatcatgaaaaaattaatgggcttacaattcagaatggtgtatgataaaggcaaggagaatataaggttgatgttttgccacgagtgggttcatttatggcttagtatggtgacattgttgtccaaccagttgagatacaggagcagggcgatattagaaggcttcatcagctttgggtggacataatttagcagtaaatactatatcgttttcaacctttcatgattccgttgtttgggggtactatgggagggctgttctttattactcggtctagagcctgtttgggtggacagatctgaaaatcggtgttgagcagttggtgaggcagtgtccagttttccagcaaacacaaggagagcagcagtttccatgggtggttacttctttaactcattgtataggtatgcagtcttggtgttggcagtttctatgatcaaaggcagtttccaacgttaggtggctgcttggatacaacaacgggctgctgacagttctgtgatcaaagaacatttatcctgggctcaggcgctcagcgacactgcaaaattacagttacctcaagcaaagttttcgtcactttcattattctagactctacacagtgttggacccctgcttggggacaagcaagctttcaagtggggcagatgtcacgaccctgaattgaagataggttgtgccatcgatgtctgaagcctgaagatggtgccgaatgggaaccagtagctgaaaaagagaggtgtggtgcttgtgtggagttgtaagtcggatgggccgacgggccgtattgtacgcgggtaattgagccagcccaggaagtgtggggttaaatactgtaagtgaactggaaagcggcaggaagaaatagaaacagaaaataaccagccacaaacccccatacctcgccacattaaaggcttgtttggtttgtggctaactatgccccattttgcctaaggttagtcgttcgaattgaataactaactttaggcaaaaaagttaggcaaagtgtggcaattgaggtaacgaaccaaacatgccctaagccctccgcccctggttgtctgggacgcggacatgtttcttggcctgtgtaatgcaccatggttggtggtctgggtctgtggtgacatgcttctcttggttcacttctcagtaataattgatccctcttgtggattttctggaactttttatgtatttcgcctagactttcaagttgaaccagccaagtgggtaaaagtggatggtgtgcgagacaatggtttctttgttagtattgataggaggaacccaacattctcttgcctgggtcccgagaaatggggtgagaaaaggaactgtatt

SEQ ID NO: 139883 - DNA, 1297 bp, Zea Mays
ccttgtcccttgtctcattttatttgtttgtcctttgcttatattctatcaagtccatggcttaccataccatctttccaaactataggttattcaaactgatatttgatgagttcacagtacgcattattccaagagatgctcctctactagaatctgttggaccacaaaagtgtcttgctttcagcacagatggtgcaaaatttgcaattggtggagaggatggacatctcagaatattccattggccaagcataaaagtgcttttggatgagcccaaagctcataaatccttccgagacatggatatcagcttagactcagagttcttagtttcaacatccattgatggatctgcgagaatatggaagatagatgagggcgcaccactggtcaatttgactcgatcctcggatgagaagatcgagtgctgccgcttttctagggatggcatgaaaccgttcctgttttgcactgttgcaaaaggtcccaaagttgttacagttgtctggaacataagcgattgggagagaattgggtacaaaagacttctggggaagcctatctccacactctcagttagcttggatgggaagtatctggcattaggaagccacgatggtgacttctgtgctgttgatgtgaagaaaatggaagtttcccactggagcaagaaggtccatcttggctccccagtcacctccattgaattttgtcctagtgaaagggttgtaatctccacatcacatcagtggggagcagagctcacgaaactgaacgtgcctgccgactggaaaggtttgttcaggcaaataccgtttggtcctcatgtccctgtccctgacacagtttccctaaccaaccgcctgttcctgtatacgtaaatagtcatgtctctcttctctggcagaatggcaggtctggctcgtactcctggcgctcttcctagcctccgccgtcctgttctacgtgttcttcgagcgatcagacacgttctggaactttcccatggggcggcaccagccggcgaagccatggaacgtgctcaaggagtctcctccggtccccgaggaccagactccatggtgatggtattgcttccatcgcgtcatctgtgaagagaagagcgatactgtcccagacccaacaaagccaccgcgtgctgtttatcttgttacaattataaatcgtccatgcttgttctaccactctcagccagtgaccacgcaagtttgtaaccctggactgccataaaccaggtgatagtaattgaacattctgtcttcgtgcgagtgtc

SEQ ID NO: 139884 - DNA, 1344 bp, Zea Mays
ccttgtcccttgtctcattttatttgtttgtcctttgcttatattctatcaagtccatggcttaccataccatctttccaaactataggttattcaaactgatatttgatgagttcacagtacgcattattccaagagatgctcctctactagaatctgttggaccacaaaagtgtcttgctttcagcacagatggtgcaaaatttgcaattggtggagaggatggacatctcagaatattccattggccaagcataaaagtgcttttggatgagcccaaagctcataaatccttccgagacatggatatcagcttagactcagagttcttagtttcaacatccattgatggatctgcgagaatatggaagatagatgagggcgcaccactggtcaatttgactcgatcctcggatgagaagatcgagtgctgccgcttttctagggatggcatgaaaccgttcctgttttgcactgttgcaaaaggtcccaaagttgttacagttgtctggaacataagcgattgggagagaattgggtacaaaagacttctggggaagcctatctccacactctcagttagcttggatgggaagtatctggcattaggaagccacgatggtgacttctgtgctgttgatgtgaagaaaatggaagtttcccactggagcaagaaggtccatcttggctccccagtcacctccattgaattttgtcctagtgaaagggttgtaatctccacatcacatcagtggggagcagagctcacgaaactgaacgtgcctgccgactggaaagaatggcaggtctggctcgtactcctggcgctcttcctagcctccgccgtcctgttctacgtgttcttcgagcgatcagacacgttctggaactttcccatggggcggcaccagccggcgaagccatggaacgtgctcaaggagtctcctccggtccccgaggaccagactccatggtgatggtattgcttccatcgcgtcatctgtgaagagaagagcgatactgtcccagacccaacaaagccaccgcgtgctgtttatcttgttacaattataaatcgtccatgcttgttctaccactctcagccagtgaccacgcaagtttgtaaccctggactgccataaaccaggtgatagtaattgaacattctgtcttcgtgcgagtgtctgagtgtgtatccaggtattaccatgccgaccactgtcctgcttcctgatgacgaggtggctgatttcctcgtctttatttatacgttttgggatcaagagaaataaaggagctaaaacctctttgctattcaattttgaatagcaagatgattttgtc

SEQ ID NO: 139885 - DNA, 1427 bp, Zea Mays
aacatatgacctctaggtcagtgttaaaatccttcacgactttatctcttaatttgagagacattgttccatctggtctcatgtactatacaatttcatattcagtgaaagctccagctaaatccagcatgccagtccactcgaaaaagataatgccagagatgcaaatattccgctacatagaagcagcttcactcggcggcgccgtttgctatatcctacatggattccacccccaccgacccacaaacgaaggacgataccatgcgtggacatccgcccttgaatccgcctgtgtcgacaaccttgaagccgccgcccttcaagtagccaccaacgccgcgttgatgacgacctacacgctgcgccgcatctggtcttgaagaagccgccaacgccgcgccggtgacgacctacaggtcgcaccgcacccgcccttgaagaagtcaccaacgccgcgcctgtgaagaatgcattcctccaacgacgatggtgtctctcccgccgccgcccgcctttcgtcgaacaaaactgcacgcgcagctgggaaaaagtcgcggaaagctactgaattgagcgtgctctggaggatttgggatagtttggcttgcgcatatatgcgggatccatcgtctcctttacgggaagccgaaaaaatggggaaaggaacaacagtctgttggaggcgaagaattcggagtttcgacgcgaaaaacactattcagattgatatgcggcatctcttggagttgctcttagagaagcaatccgggccggaacagggtcctttcgattgtttgggattggagcctcagattaattcctagccggattacttctctaatttacatagattttgatgagctaaaataaattatgtcttattccggtacaaccgaacgggtcctaagggcatgttcgtttgtgttggattggtgggtcagaacgattcctaaccgtattacttttctaatttatataaactttgattagataaaatgatttcggatgcaattccacacaaacgaacaaagcctaattgaggacttggatcttgagatgagggaagggagcacgacggacacagaggcaagggaaccggccgttggctggctaccagcgtggtgcacgacacgatgggatggaacccggcagcgccgacgagaggagcgcggcgcaccgcgcacgtcacaaggagtggcgaaggagcgccgacgagaggagcgcggagacctcgctggcggatctcagacagcgagaggagccgagggccgaggcttggagtccccaagaaaattaaagatgactgcccgtcagaaacgcgtgacgtgagcagccggagtagatattccgacgagtcttgcggcggcacgcgagagcttgactcgggagtgcagctccagcgccagcgccacgacgactactcg

SEQ ID NO: 139886 - DNA, 1151 bp, Zea Mays
attctaggatggaaggaaattcagaggccacgagcaccaaatccgctcgaagcgagccggaaatatcaaaatttccggaatccgccgccgccgccgccaggctgaccaatggacctctccgtcgtgccatccctctccctctccccgcgccgtgcccttccactcccggccaggagggctgcgcggcgtccggccttcgtctgccgctgcagttgctccctggacgcgtccccggtggccacccggcggttgttcgcctccctcctcgccaccgcagcagcggtgggggttggcgtggccggaggcggaggggaagccggcgcggtgtccacgagcaggagggcgctcagggcgtccaagattcctgagagcgaattcaccaccctgcccaatggcctcaagtactacgacatcaaggtaggaagtggggctgaagctgttaaaggatcccgtgttgcggtacattatgtggccaagtggaagggcatcacattcatgacaagtaggcagggtcttggtgttggtggtggaacgccatatgggtttgacgtaggcaattctgagagaggcaatgttttaaaaggattggatcttggggttgagggaatgaaagtcggaggccagaggttgataatagttcctcctgaactggcgtatggaaagaagggtgtccaggaaattcctccaaacgcaactattgagctggatgtcgagcttctatcaatcaaacagagtccattcgggactcctgtgaagatcgttgaaggatagctttgcatagagttctgaaagaaatggtacatatctgcatggacagtagagtactagagtgttgctattgaaaaaggctagtttactaaaatatgctggttgtattctcttgatagtacactcttgtaagatttcgacttcactgaaacatagattttttttttcaccgcttatattcaacagttatctacgtgtctaaatcttaatttatggcttctgctatgtttgaacttcaatctactcttaacttatttgagagtaaaagatttttgttattgatgttatatttaataatgtatccttaccaatttcttcattacatgtattgcttagaagaatccttgtagtaaacatttagttgcaaagaaaaaaaaacataa

SEQ ID NO: 139887 - DNA, 1637 bp, Zea Mays
ggccacgagcaccaaatccgctcgaagcgagccggaaatatcaaaatttccggaatccgccgccgccgccgccaggctgaccaatggacctctccgtcgtgccatccctctccctctccccgcgccgtgcccttccactcccggccaggagggctgcgcggcgtccggccttcgtctgccgctgcagttgctccctggacgcgtccccggtggccacccggcggttgttcgcctccctcctcgccaccgcagcagcggtgggggttggcgtggccggaggcggaggggaagccggcgcggtgtccacgagcaggagggcgctcagggcgtccaagattcctgagagcgaattcaccaccctgcccaatggcctcaagtactacgacatcaaggtaggaagtggggctgaagctgttaaaggatcccgtgttgcggtacattatgtggccaagtggaagggcatcacattcatgacaagtaggcagggtcttggtgttggtggtggaacggtaatgctataacatattctgcctctttctccatataattgctacatgttgttctcacattggaatgcacttttaacttgtaccagtcagtggtggtactaagctaaattttctgacatcttatgaaattataatgctggagaagctccttgggtgaatctttatttgcataagtaaaattttcttgacagtttccatattgcaaatcctggttaattttttgattttggtatttatggagtgattatacattatatgcttgataatttcagatgtagttctttagtatttgctgcttttacaagtcttaagattatgtgcagccatatgggtttgacgtaggcaattctgagagaggcaatgttttaaaaggattggatcttggggttgagggaatgaaagtcggaggccaggtcagtaaatgcaagttttgatttgttttccatgtttgatctttcatttcgagtaaaaggaaatacattgactctatctggaactagtatatgagcactgattcggttagctatgaaccagaatgagtataactaagttctccatgtgtccatcgtatgattctttatgaaagaacaatgtcaatgattgtccgaggacatgttgatgtaatttattgtgcaagttccttgtgtcatgcctaagaacaatattgaacattcacttgtgtttcaaacaaaagaaaagatgcacagcaattgttggtctacttcatccatttcattcttttcaacatacataaacgggaattttagcagcatcggaaaacatgatggtgtattttcagaggttgataatagttcctcctgaactggcgtatggaaagaagggtgtccaggaaattcctccaaacgcaactattgagctggatgtcgagcttctatcaatcaaacagagtccattcgggactcctgtgaagatcgttgaaggatagctttgcatagagttctgaaagaaatggtacatatctgcatggacagtagagtactagagtgttgctattgaaaaaggctagtttactaaaatatgctggttgtattctcttgatagtacactcttgtaagatttcgacttcactgaaacatagattttttttttcaccgcttatattcaaca

SEQ ID NO: 139888 - DNA, 1731 bp, Zea Mays
atgcccgccagtgccgccaccaccacaaccacctcctccgcggctccctctccctcgttgttgccgtgcttgcatgtccatgcacacggcagggcctcggctgcggcggcctgctgcctactcgtgctcgtgactttcctggtggtggccgcctgctggtgggaccccaggacgcgagaagcttccagctggttcctgtcgccgccgcggtctgccccctcttccttctcgtccttgacgagtgccggtggagttggcggtggtggcgagcacctattggccaccgccagctcgtactactccgccgccgccggcttcaggaacagcactggcaaagaggtgcaccaggaggtccggggtcatggtggtgatgatcgtggcttcctctccttcgtcaactccagcttcggctatgacgaagcgccgccgccatccgcaccggctccggcgtctccagtgacgggaggctcagatgaggtgataatccagtccacgccgccacaggttgagaggagaagagacgacgtgaaactggagcgactagagcttggcctcgcgagagctcggtccgcgataatggaagccatcaggaagaaggacaaggtatctccgttgcctgacaaggactacgtgccgatgggaccggtgtacaggaacgcccacgtgttccacaggagctacctggagatggagaggcagctgaaggtgtacgtgtacgaggaaggcgagccgccggtgttccacgacgggccgtgccgcagcatatactcgacggagggcaggttcatccactccatggagacggagacggaggcggaggagggccggcggctgcggacccgggacccggcccgcgcccacgtcttcttcctcccgttcagcgtcgtcaagatggtgcagacgatctacgagcccggatcgcgcgacatggccccgctcaagcgcaccgtcgccgactacgtccgcgtgctctcctccaagtacccctactggaaccgcagcctcggcgcggaccacttcatgctctcctgccatgactggggcccgtacgtgtcgtcggcgaacgcgcagctgttcggcaactccatccgcgtgctgtgcaacgccaacacgtcggaggggttcgacccggccagggacgtgtcgctgccgcaggtcaacctgcggagcgacgcggtggagcggcaggtgggcgggccgtcggcgtcgcggcgcccggtcctggccttcttcgcgggcggcaaccacgggccggtccggccggcgctgctggcgcactggggccccggcgggcggcggggaggcgacccggacgtgcgggtcagcgagtacctgccccgcggcggcggcgcgccgtcgtacgcggacatgatgcggcgcagccgcttctgcctctgccccggcggctacgaggtggcgtccccgcgcctggcggaggccctgtacctgggctgcgtccccgtcgtggtggacgacggcgagtacgcgctgcccttcgccgacgtgctcgactgggacgccttcgcgctgcgcctgcgcgtcgccgacattccccgcctcaaggagatcctggcggccgtgtcgccgcggcagtacatccggatgcagcgccgggtgaggatggtgcgccgccacttcatgctgcacggcgggccgccccgccggtacgacgcgttccacatgatcctccactccgtctggctcaggaggctcaacgttaggatcgcagca

SEQ ID NO: 139889 - DNA, 1632 bp, Zea Mays
ccactacacaccaccacgttggaaatatagcaaacaactagagacgttagattaaaaggagttgtgatgatttagtcgtgcttaacgttcggcaacgtcagctcgcacttcggctgattgcaaattctgataggcacgacaccgaccgactgacgcactgcacactcatcacgctagccgccgtctcgtcaccactaaccacgatctctatctctctctgccaggtgggtcccagagacgccggcgccgccgctatacaaaattacaggcacgacgacatccatcgcagtcacccacgagcccaacaaaccactcccacccggtggctcgtcctcggacgccaagccactccgcgccccaatccggaagcgccgccgccgccgatcgaccggccgtcgacccatgctccgctcggcgctcttccgctcagcccccgggctccgccggtctccggcgacggcccacttatccaccgccgccgccgccgccgcagcgtggctctccaacggccctgcctccgccccgtctagggtgcgcctcctcatcggcggggagttcgtcgagtcgcgcgccgacgagcacgtcgacgtcaccaaccccgcgacgcaggaggtggtgtcccggatcccgctcaccacggccgatgagttcaaagctgccgtcgatgccgccaggacggccttccccggctggcggaacacgcccgtcacgacgcggcagcgcgtcatgttcaagttccaggagctcatccgggctaacatggacaagcttgcagagaacatcactacggagcaggggaagacgctaaaagatgcttggggcgacgtgttccgcggcctagaggtggtggagcatgcttgtggaatgggaacactgcaaatgggcgaatatgtatcaaatgtttctaatgggattgacaccttcagcattcgggagccacttggtgtttgcgctgggatatgcccatttaattttcctgctatgattcccctatggatgtttcccatagcagttacgtgtggcaatacttttgttcttaagccatcggaaaaggacccaggggctgctatgatgcttgcggagctagcaatggaagctggtttgcctaagggtgttttgaacatcgttcatggcaccaatgatgttgtcaataatatttgtgacgatgaggatattaaggctgtatcttttgttggttccaatacagctggtatgcatatttattctagagcatctgctgcaggcaagcgtgttcagtgcaatatgggagcaaagaatcatgcaattatccttcccgatgctgatagagatgctacattgaatgcccttattgctgctggatttggtgcagcagggcaaaggtgcatggcattgagcactgctgtttttgttggcggttcagaatcatgggaggatgaattagtcaaacgtgcaagtggccttgttgttagttcaggaatggttaatgatgcagaccttggtccagtgatcagccgacaggcaaaggatcgtatctgtaaattagttcaaagtggtgttgacctgtgtgctcgtatattgcttgatggaagaaagatagtggtgccttatccagttgtttattagcctgcctgcagatatactacatcatgt

SEQ ID NO: 139890 - DNA, 1145 bp, Zea Mays
tggagaactaatgcccctcagcaccccaaaatgagtcacaaattatctatgttgcgtaatctgtattcaaactgcaattgtgttagtttccaccttcaagcccctgcttcccaaaatccctgtaaacgcattatccttttgtgatgatggaagcacatgtgcatgtattacttaacagttcatcagaagatttacccatatttcctcagtgtcagtggtagctgctgcttacgaagagtcttactcaaattaagtattttctcaaatctcaaacaaacttggaaagattgtacaagtgtgtgggggtggggtgggggggtgggggtggtcaagtgttgctgttagttagcaagtcattcccaaaataaatctaggaaacttatcttgatgaaggtatattaattgaaccttgctaacttattggaacaggaggaaatatttggtccagtgcttctcttaatgaaggcggagagcctagaagatgccatccaaatcataaacagaaacaagtatggcaatggtgcttccatatttacaacatctggcgtctctgccaggaaatttcaaacagacattgaagctggccaggtgggcatcaacgtgccgattccagtccccctgccgttcttctccttcacgggcagcaaagcttcattcgcaggagatttgaatttctacggcaaggctggcgtgcagttcttcacccagatcaagacgatcacgcagcagtggaaggagtcgccggtgcagcgggtctcgctctccatgcccacctcgcagaagtgagacgtcaaaggacgctcacgccactctccaaagctccactcctctggacatagacccacgcatggccacaagagaaggataattggtaggcatggcgacactccatgcacggccatgatactagtgtgtgctcgctttgctcttttgtctggacatcttgcatgcgcattcagaacatccaatgacgaaggtttagatatatgtgagcgctgcccattatgctgttaggattactgtaaaagccccaggtcctttgatcgagtgtcatgtgtaaacccacaataagaggagaaataaaaatgtcgccgtgctggtttgtggcatctctcacacccatttccgttcatctctttggcttc

SEQ ID NO: 139891 - DNA, 1204 bp, Zea Mays
gataagccccggatgagcccccgatggccaaggtctcgcctcctcctcgggatcatcatgtcgtcgttggtccctcgagagcggcaaattaataagtaaatgagcaactttttctcgcgtgtggtccagactcccgtcttcttcctcgaccgctaaccttaccggtccccaaatgtcgcctctcgtgctgctgctcctcgcgcacctactcgccacggccactgcagcgggagcagcgcggaccagggacgacgggcctcctgctccgtcgtcgtcgtccccgcgggtgccggcgacgacgccgccgtggccggaccagttccacgcggtggtggtgacgaacctgagcgcgcgcggcggcgggctgcagctgatcgacctgtactacgactggccgcgagggcgcgacctgaacatcgtccgcgaccagctgtccggcgagcggcgctggagctggaacgtggagtggagcaacggcaccgccttcctgttcgactccgcgtcctgccgcaccttccagttcgccgtgggcctcctgccgcccgactggaaggcccgcggcgccgcctacctggggcgcgaccgcgtcgacggcttcgactgccacgtctggtccaacttcgtcttcgcccgctactacgaggacgtcgccaccggacgccccgtcagctggaacttcaatgggctgcagcggcatgtgctgagcttcgaggcgggggcagtgctgcaggactcctccaagtggcaggcgccggcttactgcttcaccaacaccaatggcagcagtgccgacgccgccgcttcgtcttcctgagatcacgtcgctgggcctccggagtccgggctccacctgcagctggacgctgcatgtcatttggcagtcggctctcatcttgatggttgactcaggagagccttttactattagtcagtaccgattctcgcgtcgcgtgggctagaatccgtgcgatgccacggaacataaattgacgagccttcaatagcgcgacggacgacgtgagtataatggtgggattgtttagtggtgctattaagaatcaactcaataatcataatacatattgaatcctgtcatttttattgaaagagatccaagaaattccaacacacgtttaagcatcgtctcggatgtttatctttcaaacgtctgacaagaaaaaatgatgttctgttaacaattaat

SEQ ID NO: 139892 - DNA, 1071 bp, Zea Mays
aatttggatgtctgcttccaaccctgtctagctccctcggtccagcttcgactggctcgcagtggcaactggcaggtaggcacacgcgaagcgataaggtcggttaagccgtaacagtcgttgatgtcgccgccgccgtcgtccctcgtggtgctcccgctcctcctccccctcctcctcgccgctgtatcccacgctacggctaatgcggccggtgccggcgcccctcccccagtgccgacgccgtggccggagcagttccacgcggtggtcttcaccaatctcaccgagagcggcggccggctgcagctgatcgacctgtactacgactggcccaggggccgcaacctcaacctcatccgggaccagctctccagcgacccgctctacgacgtcgagtggaccaacggcacctcctacttcttcgactccgggtcctgccgcaccatgcgtttccccgtggggatcctgccgcctgactggctcgccgccggcgccgtctatctcggccgcgagcacgtcgacggcttcgactgccacctgtggaccaaggtcgacttcgtctggtactacgaggaagtcgccaccggccgccccgtccgctggaatttcttcaatgggatgcagcagcatgtgatgagctttgaggtgggaggagtgctggaagactccaagtggcaggcgccccctcgctgcttcagtggcggcaatgccgacaccgccaacgcggctgcggatggagttcatggcgaggaagccggtagtgttgatgtgatggacagcatgatcaggttcgccgtggctccggctgcagcagtagctgcatcatttgaccagtgagatttttgttttcctgatgtttggctgatgagagagtctctgccaacggtgatccacgcgtcctggtgattctgctacgctctgttgatcacattgtgctttgtataaccctggctgatttgtggtaacaccgacagtcactgtacatttcctggtactgatccactgaacttaactatcctgctgtcatggaacatgaggggcacaaatagacttgcgtttttggttgca

SEQ ID NO: 139893 - DNA, 2749 bp, Zea Mays
acgccccgccttgccttcatcctcctcctctcctccatctctcctcgccccagcgcgcgcgcggcatcgccgtcgagctacttactcgagcttcagttccagctactggagcacgcagttcatattaatacacagcttagctgtaccaagcggcatcttgcacgctagctaaactagaggaactcgctgcgcgcatgtctccaataatggcgctccaggcatcgtcgtcgtcgccttccgcgttccgtgcggtcccggccaccgccaacgcttcctgccggcgtcagttccaggtgcgcgctcaggtagccggcggcagcagcagtagcagcatcggagccgatggtgggaagatgatggtttccaaggagccggcggcggcggccacgtcgtcgggaccgtggaagatcgacttctccggcgagaagccgccgacgccgctgctggacaccgtgaactacccgctccacatgaagaacctgtcgatcttggagctggagcagctggcggcggagctccgcgcggaggtcgtgcacaccgtgtccaagaccggcgggcacctgagctccagcctgggcgttgtggagctgtcggtggcgctgcaccacgtgttcgacaccccggaggacaagatcatctgggacgtgggccaccaggcgtacccgcacaagatcctgacggggcggcggtcgcggatgcacaccatccgccagacctccgggctggcggggttccccaagcgcgacgagagcgcgcacgacgcgttcggggtcggccacagctccaccagcatctcggcggcgctgggcatggccgtggcgcgggacctcctggggcgcaagaaccacgtgatctccgtcatcggcgacggcgccatgacggccggccaggcctacgaggccatgaacaactcgggctacctggacgccaacatgatcgtggtgctgaacgacaacaagcaggtgtcgctcccgacggccacgctggacgggccgtccaagcccgtgggcgcgctgagccgggcgctgactaagctccagtccagcaccaagttccggcgcctccgcgaggcggccaagtccgtgacgaagcagatcggcgggccgacgcacgaggtggccgccaaggtggacgagtacgcgcgcggcatgatcagcgcctccgggtcgtcgctgttcgaggagctcgggctctactacatcggccccgtggacgggcactgcgtggaggacctggtgaccatcttcgagaaggtgaagtcgatgccggcgccggggcccgtgctgatccacatcgtgacggagaaagggaaggggtacccgccggcggaggcggcggcggaccggatgcacggcgtggtgaagttcgagccggctacggggaggcagctcaagtccaagtccccgacgctgtcgtacacgcagtacttcgcggagtccctgatccgggaggcggagagcgacgagaaggtggtggccatccacgcggccatgggcggcggcacggggctgaactacttccagaagcggttcccggagcggtgcttcgacgtgggcatcgcggagcagcacgcggtgacgttcgcggcggggctggccgcggaggggctgaagccgttctgcgccatctactcgtcgttcctgcagcgcgggtacgaccaggtggtgcacgacgtggacctgcagcggctgcccgtgcggttcgcgctggaccgggcggggctggtgggcgccgacgggcccacgcactgcggcgccttcgacgtggcgtacatggcgtgcctgcccaacatggtggtgatggcgcccgcggacgaggcggagctgatgcacatggtggcgacggcggccgccatcgacgaccggcccagctgcttcaggttcccgcgcggcaacggcgtcggcgcggcgctcccgccggggaacaagggcgtggcgctggaggtgggcaggggcagggtgctggtgggcggcggcacgcgggtggcgctccttgggtacggcgccatggtgcaggcgtgcctcaaggccgcggaggcgctgaaggagcacgacgtgtacgtgacggtggccgacgcccggttctgcaagccgctggacacggcgctgatccgggagctcgccgccgagcacgaggtgctgatcaccgccgaggagggatccatcggcgggttcggctcccacgtcgcccactacctcagcctgaccggcctcctggacgggcccctcaaactgagatccatgttcctgccggaccggtacatcgaccatggcgcaccgcaggaccagatcgaggaggcagggctgacgccgcggcacatcgccgccaccgtgctgtccctgctggggaggccattggaggccatgcagctcaagtgaacgacgacgacgacgataacgacgacctagcttcaccatcaccaccaacagataaataaaaagcaaaccaaaccaaggcgtttgtacagtacaggagatgggtccaaggccttgggccggcctgttggcaccgtagtagcaaggatagcaaatgcttccaaacgcaggctgtcaagtgcaggtggatatgtctttctcctagccagtgacgacatagagcatacatctgcgcgggcggtcccacaagtcagctgatcctctgctagttttttttatttttattttaaagaacgtctttttgtataggatgctgcaagcatgtacgcatggtactagctacaagcatatatagaataacaaatcaaaattca

SEQ ID NO: 139894 - DNA, 416 bp, Zea Mays
gtcgctcccatgcctcagcagtgacgggcatggccaaaacagcgtcgcgcactgtgtaggataacattgtctgggtgcttcctgcctaggtgacttttgtcgcaacttggaggagaccactcaccagtttgcctttccgattggaatttcctgtccttgtccatgttctcgcagaggagatgggctggtttatgagaacatttgaggatgggaacacagctagcagcataggatccatgacataacagccctgttaattattgtgcagcagcggagaagatcgagaagactgtcgcacgcgtttgctatagggagtagactgtcgagaagactgtcgcacgcgttttcgaataacccttagagtgttgatcaagccgacggtctccatagaagcaacctgcaaggttagtccagca

SEQ ID NO: 139895 - DNA, 282 bp, Zea Mays
gtttgtggagtggacttgactgacaaagtagtggacataattttccatgtatttgatgctaactgtgatggtaacatgagctcagaggagttcttgagttcgtgtagaaaaccttactcagaaggagttgtgtctttctttctcacgcagagaggaaaagatggtcatgccaagagttccagggcagcacctcctgccgccaaggagtatgacgaagacgaggaggagcacacggagaccttttgcggaagctacatcggcctttacattggcagcaactaa

SEQ ID NO: 139896 - DNA, 590 bp, Zea Mays
cactgcgcgcttcgtactgctggccgggctgctccagcaccaggaacgctcgctcctgctcgtcgacgttagattttcccagacgcgcgagctccccagcaactccaacacgttgctcgcctcgctcagtcttcaagccatcgtgccgctggttctagccaaagtcgggcgcgttctttccttcgccaggcagcacctccagtcgtcgtttcttttccacggctgcacgctcaccgactcaagcgcttggccatggagctcggtttcgtgtgtgcctgtgctgggtcgccgggtcacatgctcgtccgttttgatgttgtgcacgttccggcttgtggaactcgccggcgttgtcagctactactagacctcacagtggtactgtgatgccgccgtggagacgtctactgtgccatctattctctgttgtctcgctacacctgattgtcatcctcgtccttgtctcgatctcgctacggcagcatcggcgctctcgatatcgtcctgagttcactccgcgtgctgcgacgtctcgctcacctcatcgccaagtcgtcgtcgccctcgcggttatcgggtcgattcgatca

SEQ ID NO: 139897 - DNA, 586 bp, Zea Mays
gcgcttcgtactgctggcccgggctgctccagcaccaggaacgctcgctcctgctcgtcgacgttagattttcccagacgcgcgagctccccagcaactccaacacgttgctcgcctcgctcagtcttcaagccatcgtgccgctggttctagccaaagtcgggcgcgttctttcctttcgccaggcagcacctccagtcgtcgtttcttttccacggctgcacgctcaccgactcaagcgcttggccatggagctcggtttcgtgtgtgcctgtgctgggtcgccgggtcacatgctcgtccgttttgatgttgtgcacgttccggcttgtggaactcgccggcgttgtcagctactactagacctcacagtggtactgtgatgccgccgtggaggcgtctattgtgccatctattctctgttgtctcgctacacctgattgtcatcctcgtccttgtctcgatctcgctacggcagcatcggcgctctcgatatcgtcctgagttcactccgcgtgctgcgacgtctcgctcacctcatcgccaagttgtcgtcgccctcgcggttatcaggtcgattcgatca

SEQ ID NO: 139898 - DNA, 569 bp, Zea Mays
ttcatctgaacccgctgtccgcatgctctgtgtttgagacccctttggatttattgttataatgagttttgcttgccggtgttcaattagtgtaccattgaatttttagcagagcactgatcaataactttttgagtaccaatgatgtaaagggacacaagctctagcaatgtttctgcttctcatgtaggccgtgtaagacgtcgcaaacatccaactgaggctaccatagatgggaatagagttaatggacaaccattgcttgtcagtgatcaggacaaatataaatcagtgcttacccatacgtattctacagtatggatgattggaggctttgcctttattatttatatgggtcatctatatatctgggctatggtggttgtgattcaaatatacatggcaagagaacttttcaacttactcagaaaatccagtgaagagaaacaactgccagggttcagggtcctgaattggcactttttttcacggcaatgctgtacacttatgggcgctttcttagtcgtcaactggtgaatatagtgacttcagatcacttgctttataag

SEQ ID NO: 139899 - DNA, 325 bp, Zea Mays
tattgattcttttgatgtctctacatgtgttgctgcggaggaagccgacagcgcagctatggtcgttgagaagaaggttgtcgcgtctgtgtagcttgtcgccgttgctgcgcacaaggcgggctgcgccatggatgctatctgtttgtattacttttggttggttgcattaagtgttgtactgtgtgtttggtaatgcagttacttttgtattcagtgaactgtttggtaatgcggttccttctgtatttagtgaattgtgtggtactgcgtacacactgtagttccttttgtattaagtgtagtagtgatgaggtaatgcatt

SEQ ID NO: 139900 - DNA, 1146 bp, Zea Mays
gggatcgcccaccgcaacaactacacgccgcggcgcaccgccgccgcgccggctggggaacgacggcgacgcatatatcatccatccgagatggagctgttcgagcgcgcgaggacggtgcggctgcggagccaccacgacaagtacctgtacgccgacgaggacgaggtgcacgtgatccaggaccggaacgcggcgtccccgaacgcgcggtgggtggtggagcccgtgccgcactcccccggcgtgctccgcctccgcggccgctacggccgctacctctcggcctccaacgagcccttcctcctgggcggcacggggcgcaaggtgctgcagacgctgccccaccgcctcgactcctccgtcgagtgggtgcccgtgcgcgacgacgccggcagcaacgcgcacgcccgcgccgtgcgcctccggacgcgatacggcaacttcctccgcgccaacgcggggctcccgccgtggcggaactccgtcacccacgacgtcccgcaccggcacacagggtgggtggtctgggacgtcgagatcttccaggcgctcccgccgccaacggggcccgattcctcatcgtcctccgccgccgcggaaaccgacgccgacgccttcgcgtcctctccggctccgtcgtcgtcgtataacaacaaagcgccgcactcttcggctccgttaccaacgtcggcgctgaggccgccgccccctcccgcgcaccaccgcgaagagaacttggttccgttcaaggggcagcccgcgccgccgccgccgggctacatcgcaccacccgctccgggattttacaggctcgagtcgacggattccttctccgtgccgctgcacaaggtggaggggcgagcggtccactaccacatcggggacagcgacggggaggtgaggccggacgaggagccgcactacttaacgttcaacggaactagcctggaggagctgctggagaggctcaaggaggagacggggctgcacgacgtcatcatgtgctcgcgcagccccatcaacgggaagctcctgccgctccgtctgcagctgccgcccaacaacgccgccgtgcatatcgtgcttgtgcaggagtcatcaaatggtgcgctttcttctcttcgacattatatttatgagtaa

SEQ ID NO: 139901 - DNA, 2720 bp, Zea Mays
atgtcttctcgaaatgaagctccatcttccgtggctggtgactacgacccgaagagcgatcctacccggaagccacggaagtctgctgatccagggtggaagtatggattttggccggatcttcaaaataaagataaggtggaatgcaccctatgtggtcaggttgttagtggagggataaagaggttaaagcaacatttggcaggggcatatggagatgcaaagttatgtcccaaggctagcagtggattaaggaaggagatgacaagttatttggaggcaaacaagagaaaaagaccaatgtttctagatgaagatgaagaagatgatgaagtggtggaggtggcagcagcagatggggcgaatgatacatctgctgtggagtctcaagcatccaaggtgcagcctagttctggtacagcagccaaaaaaagacaagcaaccttgcaatttaaggcaaatagtaaagcacagccaaagacagccaagtccgtagttgagatgttgcagagaacaccagaggaggtggtggatgagagactttcaggctcttatcagcccacaatcttggctagtgcaaaaagcaaggaggacaaacactatgtggacatgcagtgggctttgttcttctatgagtgcggtgtacctttcaatgccgcagcagctaggcagtttcagattgcaattgaggccacagcacagtttggttcagggtataagcctccaacaccttaccaactaggcgagccattgctacaagaggttgtgaagtcaacaactacaatgagggaggaacatgagcgtgcatggaaacactatggttgcacactcatgtctgatggatggtctgataggaggggacgccatctcattaacttcttagtgaacagcccagagggcacttactttttagagtctgttgatgcatctagtgaagtacatgatgcatacatgcttgctgatttgcttgagaaaaaagttgatgagattgggagagacaaggttgtacaagttgttactgataatggtgccaattacaaagctgcaggcaagcttctaatggagaggattcctacattattttggagtccatgtgctgcacattgcttggacctaatgttggaggacataggaaacttgaaggaattcaagaaaccaattgcaagtgcaaggcgtgtgacaactttcatataccgacacgggagaattcttgctgccatgagagagaaaactggtggggctgatcttgtgaggcctgccgccactcgttttgctacttcctttctcacattgaagagcttgtacaagcacaaggatgctttgaaggctttatttgcaagcacagcttggactgataacagattgtcaaagactagtgctggattggatgtgtataacattgtcttctccacacagttttggaattcagtagaagattgccttagagcttcagggccactacttattgtacttagggtggtagatggagatgagaggccagctatgccagaggtccaagcattgatgaaatgtgcaaaggaaaagatcaatcaaagctttgctgtccaaagcaagaagactttactcaagaaaatcataactataattgaacggcgttgggagaaacaaatggatcacccattgtatggggctgcaatgtatttgaacccaggaaagttgcatcctctcataagaaatgatgatgatgctactgttggtcagctaagaggttgctttcttgatgtgcttgcaagaatggtagatgatgaggaaactagagacaagatcaattctcaagcaatagattacgagtttcttagaggagcagctttttcaaataagatggccaaagataacctacaaactatgaccccacttgagtggtggcgttcgtatggtggtcgtgctattgagttacaaagatttgctagacgtttggtgagtctttgtgcgtcttcatcaggttgtgaacgcaattggagtacctttgaatttatccatacaaagaaaagaaaccgattgttgcataagaggttgaattctattgtcttcatttcctacaacagaaagatgaaagctaggttccaaaaactacgccagaagaaggggaaaaactttgatccattggttcatgaggacttcgactgggacaatgagtgggctgattctttgcatgtagtccctgaaggtgggcgtgggtgtgagtgtgaccttacatgggaccttgtggataatgccattggagcatcacaagcacttcgtggccgaaacttaccaagaagggcccataatgtgtattcaagaagaaattctgttgctgcacaaaatatgtcagaggctgaagaggaagatgaagatgaagaagatgttccacatgatgatgcagaaatcacagattgtgaagatgaatctaatggtggcaatgatggtgaagaaggggaggcacccaatatcccaggagagtttgatgatgatttttgagcgacgggagagtagctattgctagattacattagcatatttgctgcattactaactgcagctagttactattaattatgccattacaaactatctatgtggctatttcagatttggtattgtgctgttttaaattttgtgacttgctattgttcctttagaaactactttgtggctatttcagatccactattgtgctattgtgaatttgtgatgatttctagtttatgagctgtaac

SEQ ID NO: 139902 - DNA, 699 bp, Zea Mays
gcactgcttgaaaatgttggagcttcaatgtgtccagatcattcggattggtttggaactggtggacttgatgctcagtcgcgaaatgctgatagatcagttgttacaaaatttttgcaagcacatcctgcagactatgcaactaagaaactgcaggagatgattcgcttgatgaaacagaggcacttctcagcagctttcaaatgctactggaactaccacaagatcgattctctttcaaatgacaatttgtattacaaaatggttatccatgtgcataatgattctgtttttagacgataccagcaagagatgagaaaccaagggctgtggcctctgtatagaggtttctttgttgatgtgaatttgttcaaggcaaacaataagaaggcagctgaactagccaaagatggtaacactttactgaaaaatatcaatggtgccttggattcaaatggttcagttgtggatggtttggctgatgaggattcaaatctaatggttaaactaaaattcttgacatacaagttgcgaacatttttaattcgtaatggattgtctacccttttcaaagatggaccatctgcttatagaacttactacctaaggcaaatgaagaactggggaacatcaacaaacaaacagagagagcttatcaaattgttggacgagtgggctgtattcattagaaggaagtac

SEQ ID NO: 139903 - DNA, 702 bp, Zea Mays
gcactgcttgaaaatgttggagcttcaatgtgtccagatcattcggattggtttggaactggtggacttgatgctcagtcgcgaaatgctgatagatcagttgttacaaaatttttgcaagcacatcctgcagactatgcaactaagaaactgcaggagatgattcgcttgatgaaacagaggcacttctcagcagctttcaaatgctactggaactaccacaagatcgattctctttcaaatgacaatttgtattacaaaatggttatccatgtgcataatgattctgtttttagacgataccagcaagagatgaggagaaaccaagggctgtggcctctgtatagaggtttctttgttgatgtgaatttgttcaaggcaaacaataagaaggcagctgaactagccaaagatggtaacactttactgaaaaatatcaatggtgccttggattcaaatggttcagttgtggatggtttggctgatgaggattcaaatctaatggttaaactaaaattcttgacatacaagttgcgaacatttttaattcgtaatggattgtctacccttttcaaagatggaccatctgcttatagaacttactacctaaggcaaatgaagaactggggaacatcaacaaacaaacagagagagcttatcaaattgttggacgagtgggctgtattcattagaaggaagtac

SEQ ID NO: 139904 - DNA, 1753 bp, Zea Mays
gtatacctggttgtgcaaagtcagctctgtgtaaggaaatattgaacacacctggtggccttggagatgatcgcccttttcatagcttgatgggggatcttattaaagttttcaaagggctgtccatgatctatggtcgcttccctgacagtatttcttgcgtctcagcccttggtgctgtcatttccgacactggccacatcccctgccctccatcttccatcctcaactcttgcatccatggaagatactggcaaaaggtcgctgatgaaagaagaaagaagccagctagaataacccttgctgataaaaatgcaccaaatgaagaagctactttaacagtagagatagaactgataaatcattgtttccagatcgaggatatgtgtgggtccacaaaggcagctgctgtccctgtggttcctgactcagaaggcacggattcaaatccattttctcttgaggctcttgccgttttcatgtttcgcgtcctccagcgggtcaatcatcctggaaatctggacaaggcctcacctaatgcaggctatgttttgctaatgttttaccacttgtatgatggcaagagtcgaagagaatttgaaaatgaactttatgaacgttttggctcccttgttaagatgcctctcctgaagccagatagagcgccattgcctgatgcggtgaaagccatcttagatgaggggattagcttgttcaagatgcatcggagcaggcatggaagagcagagccatcaaaaggttcatacgctaaagaatgggcacaatgggaacaaaggttgcgtgcgaccttgtttgggaatgctgatcatcttaactcaattcaggttccttttgactatgctgtgaaagcagtactggaacagttaaaagctgttgcaaagggtgatctcaaaacacctgatactgggaagcggaagtttggaaatatcatgtttgctgctgttcgattaaccccgcctgatatattgggccttctccgtaaggtggcagagaaggacacggctgtcgacagttttgtgaacaagataagactggaggacaacctaacgaaggttcacgtcacccttgcccacaaacgaggccatggtgtgtctgctgtcgcaagctatggcatctaccagcaccaggaagtccccgtgtcattcaacgcattgtactacactgacaagatggccgctctcgaggcacagctgggagcagtaaacgatgagccgatcaattccaggaacgagtggccacatgccactctgtggacggctccaggcgtcactccaaaggaggcaaacatgctgccgcagctggcttcagaaggaaaagcagaacgggtgccgattgaccctcccatcaccatatcgggggtggtggacttctactgatttgtctcctcggttttaggatacggatgtgcagaggtgaaggtggaataaagaataatttgctgctgcgggccttacgttattagctgattgtggacaagacaatcgtcgagtcttacaccacataaatttttgatactataggactgacctggactgctgcatttctacttccatgttttccaataagtgcaagataccatcgattttttaagccagcacttagcactagaggagataattatctgtatagcaagcacatcattctactttctagtgtatttttgaatttccagaggccgtttgacaggacagttgaccagaaataaagttcgtgttggtggtatgttaccttt

SEQ ID NO: 139905 - DNA, 647 bp, Zea Mays
cccacgcatcgccccgcacccacccgatcgtccaaccgtgcgagcaccctagctttgcctctacactcctcccgccgcctcctaccctcctccgcgcgacggcgcgagccgcagccggcccccgctcgcgttgtccacgaatcccgccgcttgacgccgtccatgccgcgccgcacgccctcaaccgcccgcgaatcccgccgcgacccgcacgccgtccctacgcccgccgctaaacccccgtcgcgaaatgcctgcacgcacgcctgctagccgctgcgcacgcccgccgcgaatcccgccgcgcgatgccgtccatgccgcaccgcacgcccgcaacggccgcctccctacgcgcttgggaaccgcccgcacagcccgtcgcgacccgcaagcccgcgcgcccaaatcctgtcatggtctagggccgttgctgggaatggcaggcggagcgaggtctccccgcgcgtggacgcgccgacctcgcactccgacatggcgccgcggcggcgcgacttggagaccgcgggcttcttcttgggcggcttgatcgccacgcggagcgaggcgcagtcgtccatgacgtactcgtaggacaccccatggagtggcaccgtctctgcccgagacccagaccttccttggca

SEQ ID NO: 139906 - DNA, 339 bp, Zea Mays
atgccttgtcattcaacaccttactactcaaccttacattacaatctacctatgcgttttttggactgcactcctaggtggttattttatttgttttttaatgaaaaaaaatagttaacctttcatatctatacttgtgcttgaatacatatgtccctgctgactcgttctactgcactcagtgataacaaagggaccttggatgagtcagatcgtttccttacaagtccatctgagtttgtcggcgatgtttttggaaatttatctgcattcagtcacattgtattattcaagtcagaagaaagacatgttctccagttgcttctgcacaattccttt

SEQ ID NO: 139907 - DNA, 112 bp, Zea Mays
ctttgaatcttaaatcgcttacacatgcaaatatttggatgccttaacagaaaaaaatgctttttactgccctgctatttcgtacaaaccttgtattttgaaagacgatgac

SEQ ID NO: 139908 - DNA, 509 bp, Zea Mays
ctccgatcggacggaccaccgggccagcagcggggcggatcgtgacgtcagcagccatggtgaaggcctaccccacggtgaacgaggactacctcaaggcggtcgacaaggccaagcgcaagctccgcggcctcttcgccgagaagaattacgccacgctcatgctctgtcttgcatggcactccacgggcaccttcgatgtgggcaccaaaaccggggggcccttcggcaccatgaagaaccccgtcgagcaggcgcacagagccaacgcaggactggaaattgtcgtcaggttgctagagcccatcaagggatttatggaggcgagggcttcgattggacccaggaatcgcccaaatccgcttgtcttcgacttcggttcatccccacgaatttctagggttttagtgtcgattttgtccccttcattacatttgattggcggtgaattgggccccgttttgatgattccttgggttcgttggacggcaggaaacaagatcctctag

SEQ ID NO: 139909 - DNA, 106 bp, Zea Mays
tttcccttttctttctctttccaattttacaaggattcaaattgaattcaaataatccactgaattcaaatctttgttgtgaatttgtaacttaggttaaatattc

SEQ ID NO: 139910 - DNA, 2079 bp, Zea Mays
gcaccattactccgtcgttgcgtgctagttttctttgatgatattttaatctacagttcgagctttgaagaccatattcagcatgttcgagcagtcttcgaactactcatacagtatcaatggcaaattaagttgactaaatgttcatttgccaagcctcagttatcctatctcggtcatgtcatttcagcggccggagtagctacagacccaagcaagattcaggttgtttctcagtggtcttctcccaggactgtgaaggaattacaaagttttttgggtttggcagggtactaccgtcgctttgttcgtcattttggtcaaacaagctttagtgtctgctcctgttttggcattaccaaacttttcattacccttctgtttagaaacagatgccagcaatcatggggtcggagcggtgttgttgcagtccggtcacccaattgcgtatcttagcaaggcgttgggacccagatcacaatggttgtcgacttatgaaaaggaatttttggccattttgattgctgtcgaccattggcgccattacttgcaacttaaggaattcatcatatttacggaccatcgcagtcttgctcagttggatgaacagaggttgcacacaccatggcaaaagaaaatgtttactcgttgttgggactgcaatatcgcatcctgtataagaaaggagtagagaacggggctgctgatgctttatctcgacatcctataggcccttcagcgagttgcctggcggtgtcgtcctgtcagccacagtgggtcaccgaagttgctgatacatattttgcagatacccactcttcggatatcattgctaagctcgctgtggattcgtccgctgttccacattttacctggcaagatgggttgctccgttataagaagcgcatttgggtaggaccttcagctcatctgcatcagaagttgatagctgcttttcatacatctgcagtaggcggtcactcgggatttccggtaacatatgtccggttgaagcaattgtttgcttggcaaggtctgaaaactgaagtgcacacatatgtcactcactgtttgatttgtcagcaagccaaagctgatcgtgctaggctacctggtctgctacaaccccttccggttccttcttctttatgacagatcatttctatggatttcattgaaactttgcctagttcacattcgtatacatgcatcctggtggttgtcgatctgttttcaaaatatgccaattttttaccactgaaacacccatttacagctctgacggttgctcgccttttccacgatcaagtgtataaacatcatggattgcctcattctatagtttctgattatgacaaggtgtttctcagtaacctgtggaaggaattatttcggattgctgatgtccagctacgtatgagctcagcttatcatccgcaatccgatgggcaaacagagcgtgtaaatcaatgtttggagacgttccttcgttgttttgtccatgcctgccctcatcaatggagtaagtggctatcagttgcacaattctggtataactcgtctccacattcagctacgggaaggtcgccatttgaagtgctctatgggtgtcgccctagacagtttggtatttcggattctgctgtcattgcttccactgatttatcgatatggctgcaggaccggcaggtcatgtctgatttagtaaaacaacacttggaaagggctaaattgcgcatgaaacgacaggctgacaaaggccgttctgaacgggaatttgctagtggtgattgggtgtttcttaagctccaaccatatgtttagtcgtctgttgctgttcgtgctcatcagaaattggcatttaagttttttgggccatttcaggtgctgcgacgtgtgggagccgtggcatacgaattacagttaccatcttcgtcacggattcatcctgtatttcatgtatcccagctcaagcgtgccttgggtacaggtttggtgtcttctccagtgctgcctaatgagcaatttcagttcagtgtgcctgtaaagatcttgcagcgtcggacggtggctcgtggg

SEQ ID NO: 139911 - DNA, 1427 bp, Zea Mays
aagaagagattatcgctcacagcatgcaaaacagaacaatctcctctccgaattcaatcatccctccgccgcaccactcttcctccgcctctgctccgcttctgcactcagcgtcctccggttgctgacggatccctcttcgccgccgccgccgcggacccaccgtgggagaggaggcgatgcgaggcgaggaggcgggagcgatggaggccgccgactacgggaagctcttcgtcggcggcatctcatgggagacgagcgaggaccgcctccgcgagtacttcggccgcttcggcgaggtcaccgaggctgccatcatgcgggaccgcagcacggggcgtgcccgcgggttcgggttcgtggtcttcaccgacgcagcggtcgccgagcgcgtcaccatggagaaacatatgatcgacggacgaatggtggaagcaaagaaggctgttcccagagacgaccacagtattgtgagcaagagcaatggcagaagcacagggtcacctggaccgggacgcactaggaagatctttgttggaggcctgccctcgagcatcacggaggctgacttcaggaggtattttgagcagttcggtgtcataactgatgtggtcaagaaggctgttccaaaggagcagtctcctggacctgttgcacgctcacccgtgggagtggggcagaactatgctgcgaacagggttcatagcttcctcaatggcttcaaccagggttacaatccaatccccatgggaggttacggcatgagggtggatggaaggtatggcttcctttcaggtgcacgaaatgggttctcttcttttggcccagggtatgggatgggtatgaatgttgaaggtgggatgagcggaacatttggtgcaacctctggtttcatcagcaactccaacgggaggcaaatgggttcgtacttcaatgcaagttcgaacagattgggtagccctattgggtaccttggtcttaatgatgttcctgggtcaatgttgggttccatgtctaggaatgtttggggtaatgggagtctaaactatccgagcaatcctgcaaacatgagtgcttttgcttcaccaggaaatgggggccaagtcagtcttacaggtgacaattggggaggtcttccttctgctcatgggataggcaacatttcaggccttggatcagggaaccttggtcgtggagctggagataataactttggtttgccttctggcagctatggaagaagcaactcaactggtacaattggtgagcctttttctgcagcaggcaatacatatgatgtaaacaatgcagatacatatgggagcagctctgtttatggtggcacagtctggaggttcacatcatctgaggttgacatgcattcttttggtcatgatattggaaatgttggtccgacaatcaaatga

SEQ ID NO: 139912 - DNA, 2346 bp, Zea Mays
cctgcctctcaacgattccacacctcttctcttcttcctcctcctcctgtgtgaggcgccatgagggcgtcgacgatggctggggcgatcctcgtcgccgccacgctgctgctcgtcgtcgccgtccgggacggccactgcgcgcaactgtgcatggactcaacgttcccgcgggcgaccaacgcgtccctctccttctgcggctacaacggcacctcctgctgcaacgccacggacgacgccgccgtccagaagcagttcgcggccatgaacatctccggcacgccgtgcggcgacgtcgtcaagaacgtcctctgcgcgagatgcagcccgtacgccggcgagctgttcaccgtgacgacggccccgcggacggtgccgctgctgtgcagcaccaccggcgcgtcgagccgcctgagcagcgccgccaagcccgcggcggcggcggcaacggcaacgacggactactgcacgcaggtgtgggacacctgcaaggacgtgcgcgtgccggggtcgccgttccaggcgcccaggggcacggcgccgtccccggcgccgcggctgaccgacctgtggcagtccgcgggcgagttctgcggctcgctgggcggcgccggcaggtcgccgtgcctggacggcggcggcgcggcgttcaactccacccgcccggcggcgctgccgctccgcggcatgtgcctggagcgcgtcggcaacggctcctacctcaacatggcggcgcacccggacgggtccgcccgcgtgttcctcagcacccaggccggcaaggtcttcctggccgccgtgccgccgcagggctccgggcgggcactgcagatggacgcggccaacccgttcctcgacatcaccgacgaggtgcacatggacaacgagttcggcctcatgggcctcgccttccacccggatttcgctgccaacggccgcttcttcgtctcctacaattgcgacaagacgcagcaggccacgtgcgccggccgctgcgcctgcaactccgacgtcggctgcgacccgtccaagctcggcgccgacaacggcaagcagccgtgccagtaccacagcgtcgtcgccgagtacagcgccaactccacctccggaacgccggcgacggcgacctcggcgaacccggcggaggtgaagaggatcatcacgctggggctgccgttcacgacgcaccacggcgggcagatcctcttcagcccggccgacggctacatgtacttcgccatgggcgacggcggcagcgtcggcgacccctggaacttcgcgcagaacaagaagtcgctgctcggcaagatcctccgggtcgacgtcaacaccatgccgagtggcaacaccacggctggctggggcaactacgccatccccaaggacaaccccgcctccgctgatcctagcttcgcgccggaggtcttcgctctcggcttcaagaacccctggcggtgcagcttcgactccggcaagccgtcctacatgtactgcgccgatgtcggccaggcggcgtacgaggaggtggacctggtgatgaagggcggcaactacgggtggcgcgtgttcgagggccccctgccgttcaacccgccgtccacccccggcggcaacacctccgccgactccatcgacgccatcgcccccgtcatgggctacgcccacagctccgtcaacagcaacgtcggctccgcctccatcaccggcggctacgtctaccgctccatgacggacccatgcctcaacggcaggtacctgtacgccgacctgtacgccaagtcgatgtgggcggggaccgagacgccggagggcagcggcgtgtacaacgtgtcgacgatggcgttcggctgctccaagagctcgcccatcccgtgcgacttcgccgccgggagctcgctgccgtcgctgggctacatcttctccttcggcgaggacaacgccaaggacgtctacctgctcaccagcaagggcgtgtaccgggtggtcgaccctgccgagtgcgactacgcgtgccccgtcaagagctcggccccgggcgccggcacgccgccgcccggtgctgccccgagttcggcgctcagggcacgcgcgccggcgttggccacgctgctcgcgggcgtgctgctcggcttcctctgcttcagcttttgaggagcgtgttctgttttgggggttgacagcgatttgttgattttcagatggtcctgctgagacatgtacgtgcgtatgaatgtatcataattaaatgtgcagcaaatagcatttgatttgttctggtaattctttgacaatctttgtcccagttcaagagggaaacaacgattaacagctgggagcaaattc

SEQ ID NO: 139913 - DNA, 231 bp, Zea Mays
atctcatatagaggttcaaacaaatgagtgtttggagaacaatgggggttgcttcctcgacaaagctaataatatacattatttactattaagctcaaaattcaaaatgaatcatggactcaatccaaagaaccaggccttattacttgatgttccttagtcttatggattattcagacttcctatttaccatggtatactgtatatacgaaaaaaacatagaaacacatc

SEQ ID NO: 139914 - DNA, 98 bp, Zea Mays
ccacctatatcgtttgctgagaatgatgcgttatggatacagcttcgacttcgaggtgtctcgaccgtccttgactcagggaaccttatcacagattc

SEQ ID NO: 139915 - DNA, 917 bp, Zea Mays
atgacctcgtactgtgtagttgctgttgaatcagtcgggcgacaaatccccatagctttcctggacagagttaaggaagacttcaccaaaaagtatggaggcgggaaagcagctactgctgcagcgaacagcttgaagagggagtttggaccaaagcttaaagagcacatgcagtactgtgtggaccaccctgaggaggttagcaagcttgccaaggtgaaggcccaagtctccgaagtcaaaggagttatgatggaaaacattgagaaggttcttgaccgtggtgagaagattgagctgctagttgacaaaactgaaaatctgcgttctcaggcacaggatttcagacagcagggcaccaacgtgcggcgaaagatgtggctccaaaacatgaagatcaagctgatcgtcctgggcatcatcatcgcgctgatcctcatcatcatcctgtcggtgtgccacggcttcaagtgcggcagcaagtgagggggggggggggggggcgtgacttacagatggctggtgtgccctggcaccggcgaggagaaagaccatggggagttttgctcttttttggtcgtcgtgttgttgagtcctggcgctgattattcttggtgatcgtcagagggagttattcctgatgtcggtgttgattgctgttggttgggaagtgacggtgaaccggggggaggggggaggggttgtgtcgtgtaattttggatgctactgttgtgcatgtatagcttgtgtgctaccctgttccatgctgtttgttactcctatgccagtagatgttacgtactactacttttgatccccagcttgctggcaactcttggataatggtcgttctccacttaccgtttcagttcttcacttaccgtttcgagaataaactgaatgtgccttgatcacct

SEQ ID NO: 139916 - DNA, 134 bp, Zea Mays
tatttttttcacaccaatcaatcttaaatttaaaccttaagattatggcacaactcgattcgagtttaaactaccaaagttttgaatagttagtatttgtctacattttaaatccaaacacacgccggtctacg

SEQ ID NO: 139917 - DNA, 1398 bp, Zea Mays
gttcgtcacgcgccggcggcatatgacagaggcaaataagcagcgaatcggcaccctcaacggccgccgccgatgcacgcacgtcacagccgctacatggctacatcacgccgcacccggcccaacggcacccgtagggccggccgtggcccataggcggcagccacgttcgcgtccgggccggtccgcggccacaactaattcccggaatcccgggtcccgcgcgcgctagctctctctatctctccaccacctcacctgccgccatgacaccaccccgcgcgcacgctgccgcagcgacaccggcgcgctcacaccgccacagcccacaccccctccgtctatatattccgctccccgcccgcctctagccatagccttatagccacataccggccagccgcagcaagtgcccagaaggccagaaccagaaccaagcagctcgttgcaacctcatatcatcccctgccacgcacctccgtccgccgcgccatggaatcgaggaggagggccgtgcccaccgtgacggcggttgcggtggcgacgctgctgctgacgatgatgacgtcgtcgggcgtgggcggcgacttcgcggcggaccgggcggagtgctcggagcagttggcggggctggcgacgtgcctgacgtacgtgcaggagcaggcgacggcgacggcgccgacgcccgactgctgcgcgggcctcaaggcggtgctgcagagcagccgcaagtgcctgtgcgtgctggtcaaggaccgggacgaccccaatctaggcctcaagctcaacgtcgacaaggcgctcggcctccccgccgtctgccacgcgcccgccaacatctccgactgccccaggctgctggacctgccggccggctccaaggacgcacaggtgttcgagcagtacgcgaagcagcaggctgcggcggcggcgcagggcggcgcacccaccagtggacgcagcagcgcggcggcgagcacgaccgcgggcgcgcagaagagcggagcctcagccgccggtcggtggttgggagtggggagggtcggtggtgctggtggcggcgcacgcgcggtggcgccgctcgccgtgcctttcctgctcctgctcgggtagataataatcactttacgcgcggccaacggcccgagtcccggcggtttggttggcgccgcgcgttgccgacttgtggtgtgcttcgggtgcgtgcgtgtgtggtggggtacttttcacactatattggaaaaagaagctattatctttggatgaaaaaaagtgtcgttgtataattatctttttttcgtgtccgtgtatgcaactcctcctctcatagacccatagcgccaaatagtcatccaatgaatattctatctgactctttatatacctctctcttagttt

SEQ ID NO: 139918 - DNA, 2392 bp, Zea Mays
ctccccttcgtttgtttgtttgattgattggcgagtaacaactaccactacctgcaaccgcagcaatctcccctcgccaactccgtctcgggttaaccattcgtcattgccgaggaggaggcccggtcgtcgtgtgaggtgttctggatctcggatggcgtcggccaagtcgtcgcggtcgcggcccgcgggccactcgggggtgttcccggtgggcagcgccgccgcggtggggagcgggggcgggggaggcggcggcggcgatggcggagtgcagctcgccgacaagcttaagattttcaagaccgacaacttcgatcccgacgcctacgtgcagtccaagtgccagaccatgaacgagaaggaaataagacatctgtgttcctatctccaagacctaaagaaggcttcagctgaagagatgcgtagaagtgtttacgcaaattatgctgcatttatcagaacatctaaggagatatcagaccttgaaggggaactactgtcaattagaaatctgcttaatacacaggcagctttaattcatggtctatctgaaggagttcagatagattcattgacttcaggccctgaaggttctgcagaagacgacatatccaatgttgaagatcaggagccttcagaaatacagaaatggtctgcagatttccctgatatgcttgatgttttgctagctgagcgaagagtggatgaagcactggatgcactggatgaagcagaacgggttgctgttgatgcaaaacgaaaacagactctaactgcagctgaagttttggctttgaaaagatcaatctctgataatcgtcagaggctggcagatcagcttgctgaagctgcttgtcagtcttccactcgtggtattgagcttcgagctgcggcttctgccctcaaaagacttggtgatggcccccgagctcacagcctcttactcagtgcacataatcaaaggcttcaatgcaatatgcaaactatacatccatctagcacttcatacggtggggcatacactgcagcacttgctcaacaagttttttcagtcatagctcaggcactaagtgactctgtggatgtgtttggtgacgagtcatgctacgcgtctgaactagtaacgtgggctaccaagcaggttatgtcctttgcactcctggtaaagaggcatgtgttgtcctcttgtgcagctgctggaggcttgagggcagctgcagaatgtgttcagatatcacttggccattgttctttgctggaagctcgtggtctgtctgtttcatctgtcctcctcaaacaattcaagcccagtctagagcaagcgttagatgctaacttgaggagaattgaggagagtactgctgcactagcagcagctgataactggatactcacatatcccccaactggtattcgtccattaactagattgtctgctgctaatttggcacttcagcctaagctctctagcagcggacaccgtttcaattcaatggttcaggatttctttgaggacgttgcaccactacttagcttgcaattaggtggttcaacaatggatgggatcacacaaattttcaattcatatgtaaacttgcttataaatgctttacctggttccatggatgatgaagctaacttagatggtttaggtaataagattgttagaatggcagagactgaagagcagcagttagctttattagctaatgcatctttactagctgaggagttgctacctagagcagctatgaagttatcatcaataaaccagtctatggatgatttgtgtaaaagaggaacagataaacaaagccgtgtacctgagcaacgtgaatggaaaagaaaactacatcgaatggtggacaggttgagagatagtttttgcaggcagcatgctcttgaacttatatttacagatgaaggtgatactcatctcagcgcagaaatgtatatcagcatggacaatactgttgaagaaccagagtgggttccatctccaattttccaggaactgtatgcaaagttaaacaggatggcaagcattgctgcagaaatgtttgttggtagagaaagatttgctactttactaatgatgcgcctcactgagacagtcatactgtggctctcagaggaccaggccttttgggaagagattgaacagggggctaagcctttaggccccctaggtctacaacagttctacctggacatgcaatttgtcatcatatttgggcaaggtcgttttctctctagacatgtacatcaagtcattttggacgtcattgatagagcaatggctgcattttctgctactggaatgaaccctgatagcctgctgccctctgtagcctacagtaattgcaactggcagccagtagtaacctaa

SEQ ID NO: 139919 - DNA, 3115 bp, Zea Mays
accggtacccttccctcactctcccggttctttcccggcgctggattcagatccgcacgcttctccatttccgtaaagctccgtgcctcctcctcgtctcttcactccaaatccaccgaggccatcgcctgggccccggggaaacccctcgcgctcgtggccctgtgagcagccgcagccatggcgcagccgctcgtcgtgaagaaagacgacgatctcgacgaggaagagtactactcgccattcctgggcatagagaagggcgccgtgctgcaggaggcccgagtcttccatgaccctcagctcgacgcgcggcgatgctgccaggttatcaccaagctcctgtacctgctcaaccagggtgatacctttaccaaggttgaggctacagaggtcttctttgcaacgaccaagctgttccagtctaaagatgcgggccttaggaggatggtgtacctcatgatcaaggaactctcaccttcagccgatgaggtcatcatagtaacaagctctttgatgaaggacatgaatagcaaaactgatatgtaccgtgcaaatgctattagagttctttgtcgtattattgactcaacccttctcacccaaatcgagaggtatttgaagcaagccattgttgacaagaatcctgttgttgccagtgcggcccttgttagtggcatctacttgcttcaaacgagtccggaagttgtaaaaagatggagcaatgaagttcaagaggctgtgcagtcaagagctgctcttgtgcaatttcatgcccttgctcttcttcaccaaattagacaaaatgatcggttggctgtcagcaagcttgtcactagcttgaccaggggttcagttcgctctccgttggcccagtgcctacttattcgctacactagccaggtgattagagagtctggtgtgtaccaaggtggagatcgtcctttctttgatttccttgagtcctgtctccggaataaagcagaaatggtcatacttgaggctgcaagagcaattacagaactgaatggtgtcacaagccgagagcttacacctgcaattactgtgctgcagttgttcttaagttcatccaaacctgttctcagatttgcagctgttcgcacacttaacaaggttgcatcaactcatcctttggctgtcacaaattgtaacatagacatggagagcttaatctctgatcagaacaggagcgttgcaacccttgcaattacaacactgttgaagacaggcaatgagtcaagtgttgatcgtttaatgaaacagatgaccaactttatgtcagacatagctgatgagtttaagattgttgttgttgaagcaataagatccctgtgcttgaagttccctctgaaatatcgctcattgatgaacttcttgagtaatattctacgggaagagggaggattcgagtacaagaaagccatagttgattcaattattatactcattagagatattcctgatgcgaaggaaagcggtttatttcacttatgcgaattcatagaagactgtgaattcacctatttgtccactcagatacttcactttttgggaaatgaaggccccaaaacatcagatcccagtaaatacatacgctatatatacaatagggtgatacttgaaaatgctacagttcgagctagtgcagtcagcacattggcaaaatttggtgccttggttgactcactcaagcctcgcatatttgtgctcctgagacgctgcctgtttgatggagatgacgaggtgcgcgatagagcgaccctttacctcaaattgttaggtggggaagctacagtgggtgagacagagaaggatgtgaatgaatttctcttcggctcacttgatgttccattagtaaacttggagacgagtctgcggaattatgaaccttcggatgtaccttttgatatttcatctgtttcgaaggaaacaaaatcccaaccccttgcggagaaaaagtctacaggcaagaaatcagcaggtccagcatctgctgtcagtggctctgtttctacagttgatgcttcgtatgagaagcttctttcgtccattccggaattcgctgattttggaaagctttttaagtcatctgcacctgtagaattgactgaagctgagaccgaatactcagtgaatgttgtgaagcatatttttgatcgacatgttgtgctccaatacaactgtaccaatacaattcctgaacaattgcttgaacaggttattgttttggttgatgcttctgaggctgacgaatttttagaagttgcttcaaagcctttagaatcattaccatatgattctcctgggcagacctttgtggcttttgaaaatccagaaggtgtcattgccaccggcaagttctcaaatatcctgaaattctttgttaaggaggttgatccatccacgggtgaagctgaagatgatggtgtcgaggatgagtaccagcttgaagatcttgaaatcgtttctgctgattatatgttgaaggtgggagtatctaacttccgaaatgcctgggaaaacatggatccagagactgagcgagttgacgagtatgggcttggagtaagggagagtttggctgaggctgtaagtgctgttataagcatccttggcatgcagccttgtgagggaactgacgtggtcccaagcaattcaaggtcgcacacttgtctgctctctggtgtgtttattggcaacgtgaaagtcttggtgagactgtcatttggaattagtgcaccgaaggaggtggccatgaagctggcagttagatctgacgatccagagatcagtgacaggatccacgaaattgtcgctaatggctaaaaacaatggtagtatcttttttttactccttttcttttggctttcatgctacgggaagtttgaggggattcaattaattagagtatatgtaagtttggtttccagtcgaatctatcattcgttgcaccatcattcttccttgacacagtacaccagtttttggttgttttggatctgtacaattttccttatatactgaggacttaaaatagtatacgcaataatatgcaggtaaagttttgctggaaaaaatgagcatattgccccc

SEQ ID NO: 139920 - DNA, 3623 bp, Zea Mays
atggcgccgcctcgcgtcaccaggaagaaggggaagggcgccggcggcaagaccgacctgcgtcccgaccggaagcagttcaaaaggcaccacaaggaggatgcagccgctgagcagggggatggcaacggagagcggcagcagtcggcagcgccgggttctgcagcgctcctcgccgcagcttctgacgaagctgactttccaagagggggacacagcctcctgagcaaggatgagatggcggaggctcgtgcggaggcggagcaggatttcgagagggaggcgaagaaggggaagggaaaaaggaagaggagtggcggcgagtcgtctggttttggcgtggatgacgacttggggatactcttcggtggggccaccactgggaagctcccacgctttgctaatcgcatcacagtaaaggttggagacagcgaaatcaagataacagcagcagaagcaagcagggctagaagcaaaattgaatggtccagcagcggaatcgagggcttgttttggacagtttcagttgctagaatatggtacaagttatgcacctcgatgcacattaagattaagaatatttcaccaaatatgaagctctggggtgttgtaattgaggttaaccagaaagatattgtgttaagtctacctggtggaattagaggctttgttcgctcagaggatgtttgcgacattgctttgcaggaaaatcgtaaggatagtgggaacaatttatgcgcagaagttgttcatgttggtcagcttgttccttgtatagtcctacgagtcgacgatgatagtagagaaggaaaagtaaacaaacgggtttggctatcattgcgattaagcctattgtacaagggacttgccctggatggcttgcaggaaggaatggtacttactgcccaagtcaaaagcatcgaggatcatggttacattcttcattttggagtatcttcctttagcggatttatgcagaaggatgacaaagaagatgtgaagactgagcgccgacaactgatgcaatgtgttgtgaaggcgattgacaaaactcgggccattgttcacttgagttctgatgaagacttgctttctaaatctactattaaggatctgaaaggcctttctattgatcatttgattcctgggatgatggttaatgcacgtgtccattcatttcttgaaaatggactcatgttatcatttcttacttatttcagtggaacagttgatatttttaatttgttgaattccttcccctctggtaattggaaagatgattacagtaagaataagaaggtaaatgctcgcatcctgttcgttgatccatcaacaagagcagttgggcttacattgaacaaacatttacttcatcttgaagtaccccctattaatctaaaagctggagatatctacgataaatcaaaggtgctgagggtagataaaaaggccggtctctttcttgaaataccttctccaactccatcacctggatttattagtatacgtgatgtgtcagacaaggatgcaaaaaacttggagaagttcaaggaaggcagtagcttacgtgtccgtatacttggagtgcggaatcttgaaggagttgcaataggcaccataaaagacagtgcttttgaagggtctgttttcactcatgatgatgttaaacctggaatgttagtgagagctaaggttgctactgttgagccattcggtgctattgtacagttttcaagtggcgtgaaagcactttgtccgcttcctcacatgtcagagttggaacatgttgttaaaccaccaaagaaatttaaggttggagctgagcttcttttccgtgtgttgggctgcaaatccaagagagttacagtgacatacaagaagtctctggtgaaatcaaaacttgatgtgctttcatcatatgctgatgcaaaaattggtttagtgactcatggatggattactcatattgaaaagcacggttgctttgtaaaattctacaatggagttcaaggttttgttagcagatctgaccttggattagaggctggaactgaagcagaaaatgtttatcatgttggccaagtggtcaaatgtagaattatcaatgtgatccctgcttcaaggaaactaaatgttagttttgtcatatcccataataggattgctccaatagacactccaaagttgggcagtattgtctctggtgttgtggaacggcttactcctgcagctgttgttgttagtgtaaatggcttctccaaggggacaatactgaatgaacatttggcagaccatcatggtcaagctgctcagttgaagaatgtgttgaaacctgggcacgagttcaaccaactcttagttctcgatactgaaggtcaaaatttagttctttcggcaaagcactcacttataaattgtgcaaatgacattccttcagagatatcacagatgcatcctggtgttgtagttcatggttacatctgcaacattattgaagctggttgttttgtccgtttcctcggacatttgactggtttctctcccaaggacaaagcagttgataggtggatagaaaagctttctgatgcgttctatgttggccagtcagttcggagtcatatactcagcgtaaatgcagaaactgctagagtaaaactcgcacttcaacagtcaatgtgctcctcaatggattcttcatttattcagggatactttcttctggatcagaagattgcagcattgaagtactcaagcaatgactgggctcgccattttggcattggtagcttagttgaggcggaggtgggagctatagaagaatatggtattatccttaacttcaaagaccatctggatactgttggtttaatcgagcaccatcaacttggtggcagtagtgtggaagtgggatcttctgtgaagggtcttgttttggatttatctgatggagttgttaacttgtccgtcaaaccagagctaattgacagtgtcagaattgttggaaaaaagaagaaacgccaaagggccgtagttgcagacttggagcttcatgaggaagtgaatgcagtcgtggaaataatcaaagacagctatatggtcctttccatccctgagtacaattatgcaattgggttttcaccactgatggattataactcacaactgcttccccaccaccactatgataatggacaacgcattactgtggttgttggaaatatcccaagttctgactcttctggaagacttatcttactaccaaaagcttcagcacagtattcttccctctctgattctaaaagggctaagaagaaatcaggctacaaaattgggtcacttgttgaagcagagattattgatatcaaaccgcttgagcttctactgaaatttggtggcaatcttcatggaagaatccatattactgagattcttgaagaggattctgctgagcatccctttagtgaactcagaatagggcaaaagcttactgccagaattgtttcagaggctgaaccttctggaaagagtggcaaaaaattcaaatgggaattgtctattaggccatgtatagtcaatggagagtttgctcaaaaagaacaaaatcacaccacaaatgggattgt

SEQ ID NO: 139921 - DNA, 564 bp, Zea Mays
atttatcagatgaatatgttgaaaatccacagaaggatttccccgttggaatgcttgtacacggaaggatcctgtctacagacccatcatcagggagagttgaggcatcacttaggaagaccactggttcaaaattggaaaagctggatgatattagttatagtgacttgcatgttggggatatcgttgatggccaagttaagcgggtggaatcctttggattattcgttacaattcggagaagtgaattggttggtctgtgccatgtatcagaactttctgatgaacctgtcgttgatattaactcttgctataaagctggtgatatggttaaagccaaaattctgaagattgatgagacgcggcatcgagtatcacttggaatgaagaagtcatactttgattctgatctgactgctgacacaaatgatgatgaaagtgctcttatggacatcagcgttgcccctcagatggttgaatatcataacagaaatttagttcaccgcaaagcagaaccaagggcttctgttctgcctcttcaggtttccttggatgaatcggaag

SEQ ID NO: 139922 - DNA, 1252 bp, Zea Mays
cgacctagaggataatattagtaatacatgtcttgaaattgctaatggaactgaagcaaatgctaaaaagagtgataaacagttaaagaaggaagcaagaaaacaaagggaactagaaatcagtgctatggaggaaagggctttgcaggaagatataccacaaactccagatgattttgagaagttagttaggagctccccaaatagtagttttatctggataaagtatatggcaactttgttagatcttgcagatgttgagaaagcacgtgcagtagctgagagggctttaaaaacaataatccccagagaagaagaagagaaactaaatgtttgggtagcatatttcaatctggaaaatgaatacggtagtccaagggaggatgctgtgaaaaaggtattccaaagagccttgcaatattgtgatcccaaaaagctgcacttggctcttcttgcgatgtacgagaggaccgaacagtatgagcttgcagatgaacttctagacagaatgaccaaaaggttcaaaacttcctgcaagatatggttatgccgcattcagtttgctctcaagcaaggcaaggatgttgagtacatcaaagccattgtaaaccgtgcacttctaagtttgccacacagaaagcgcataaaattcctctcacaaactgctattctagaattcaaatgtggggtgcctgaagaaggaagatccagatttgaactaatattgcgggagtacccaaaaagaacagacctttggagtgtttatctagaccaagaaatccgccttggtgacgtagaagttatacgggcattgtttgagagggtgacttgtctgaccctacctccaaaaaagatgcagttcttgttcaagaagtatcttaatttcgagaagtcactgggtaaagacaacgaaagaattcagcttgtgcaacagaaggcaatcgaatatgttcagagttcactgccgtcacaagacaactcttgaactacatggagacttaataagcccacaaacaatcattaggaaataccagtcgtactgtagatgtgatctctttgatgactccttgaacattattgtgaaaaggtcaatgtaaaatgtgggctgttcaaaattttgtttgaaacctttatataagttatgagtctagtatgtcatgtttcacccaattttttggaaggaactattctaagccggatctggttcgaatattgaccttttctatctgtggtattgactgatgaggcacaa

SEQ ID NO: 139923 - DNA, 1603 bp, Zea Mays
caaattcccttctccctcacgtctctttctctccccaagccgcctcctccctgccgttccgtggagcaccaggccagtgccgttccgatggtcattccaagccagtgccgttctcctttggctgtccctgctccagccgtgagctcacccaggccacggcctcgtcgaaccgcacagcccctgcgctccttccccagccgcgcttagcccagccctccctgctcgatctccttcgagccgtaacggctccctggcgtgtccggctccctgcccctctccatggcgtcgcccagctctagctcgccccccctctgatctgtgcgcaggggtttcttccatggcgagctcccctgcaaacttcatctagccgccgaccgagtttccttggtggtcgcttacccccagcatcggccagagcttgctgtcattccccaacaaacatgtggttgtaggtgagagatttcagaagtctgttggatgaagaaaagagaagtgaaatttgtgcagcgcccgtcaggtgttaggtttaatagatattgtgtctaccgtgtgagggaatcgcgccagcttcctttgggtttgggactgggagctccatcgctctatgcggcggtgctcgcccgtgtctcagctgccttcaatgggcccccttgcccgcgcagtcgtctttggggtccatattgatggtcacttggtcgtggaagggcttcttattgcagtcatagtgttccagctctccaggaagagctacaaaccaccaaagaagccactcactgaaaaggagattgatgagctatgtgatgagtgggagccagagctgctatgccctccaatcaaggagggggccaaaatagatgctccaacattggaaagtgccgttggaccacatacgattgttgattgttgatggtaaagaagttgtgaactttgcatcagcatgaggtctggagtctagacacagcgttgcaaactgaggtttaatcatcttagcaactacggtatgtgaccctgagcgcgtgattgttgcgaaacaacgaccacctcggtctacaccttaaaggtttgcgtgacatggcttttcatagtgctcaattggatccatcccctgagcataggagaaaagtatcaatttgtacagtggatccaagtattctataaagcatgcatcctccaatttcccacaagcgagaatggcatgatatgatggatgaaatggctgttgcggtcaaatgtctttcaaggatcaattgtctttcaagaaccacacttatgtattggtttgtgtgcagttcaagctctgcaaggtaaggtctgttcagtttggccagaaagtcatcccctacctgaacacctacgacgaccgcaccatccgactccgaccctctcatcaaggccaacgacaccatcaagatcgatctggagaccaacaagatcatggacttcatcaagttgtatttgccatttcatagacttcatcaagttatatacttagttaggctcaatgttaacacaaacagttgatgagcaagtttaaatttagagtacacttatgtatgagttatttgacaatacttatttatgagatattgaatattatttatct

SEQ ID NO: 139924 - DNA, 1472 bp, Zea Mays
acagatttctccgactacgactgcctgcgccgccgccagccccttgcgttgagcaatatcctcgtcctcccgagagcgatccccgtcgcccctgtccgcggccgccgaggcgccgactcgccggcgcggcgccgtcttccgccactgcgccctaccgcccaggacgaagctccagctccggcccaccgtctccctgccggcactgccgcgccgagggcccgagctcctcctcgccccatgcccccgcggccgccctgcccagctccgccccgcgcgttcgcggctctgcgcccccgccaggccgagcttcgcacgttcgccgtccgcgccttcggcttccgcagttcgcacagctgacagcagtccattcaccgtccgcgcctccggtcaccgcacagtagtgagtgcattcgccgtccgtgcctccgatcaccatacaaccgtgaccgttagcagcaccttgattttagctcgtcctccgccactggtggcagcgacgcgcttccgaggaggttagagcattggctgctatggcgccgcctcacgtcaccaggaagaagggaaagggcgccggcggcaagaccgacctgcgtcccgaccgtaagcagttcaaaaggcaccacaaggaggatgcagcagctgagcagggggatggcaacggagagccgggttctgacctagaggataatattagtaatacatgtcttgaaattgctaatggaactgaagcaaatgctaaaaagagtgataaacagttaaagaaggaagcaagaaaacaaagggaactagaaatcagtgctatggaggaaagggctttgcaggaagatataccacaaactccagatgattttgagaagttggttaggagctccccaaatagtagttttatctggataaagtatatggcaactttgttagatcttgcagatgttaagaaagcacgtgcagtagctgagaggtctgtctactgcccaaaacatttgtttttatattttaatatcaaaaagatctttggtgataagaagttgttttctaccatcttaatagtgttgatagatgtgatttggttttgtgttggttttattttcgaaggatgtagaatttacttgttgaaacattctttcaaaaatttccttttgttctgtcaattcaaatgatacatgtttgtcctttttctgttagtttatttaaacttttttggatgcatctctctgtcatcatcttctacaactgtttctcctgtctttagagctttaaaaacaataatccccagagaagaagaagagaaactaaatgtttgggtagcatatttcaatctggaaaatgaatacggtagtccaagggaggtaaggttgaataatgttgtagtttgggttgctgtgctgtacttggatatactgagacacttggttgtgtacactacaggatgctgtgaaaaaggtattccaaagagccttgcaatattgtgatcc

SEQ ID NO: 139925 - DNA, 2006 bp, Zea Mays
acagatttctccgactacgactgcctgcgccgccgccagccccttgcgttgagcaatatcctcgtcctcccgagagcgatccccgtcgcccctgtccgcggccgccgaggcgccgactcgccggcgcggcgccgtcttccgccactgcgccctaccgcccaggacgaagctccagctccggcccaccgtctccctgccggcactgccgcgccgagggcccgagctcctcctcgccccatgcccccgcggccgccctgcccagctccgccccgcgcgttcgcggctctgcgcccccgccaggccgagcttcgcacgttcgccgtccgcgccttcggcttccgcagttcgcacagctgacagcagtccattcaccgtccgcgcctccggtcaccgcacagtagtgagtgcattcgccgtccgtgcctccgatcaccatacaaccgtgaccgttagcagcaccttgattttagctcgtcctccgccactggtggcagcgacgcgcttccgaggaggttagagcattggctgctatggcgccgcctcacgtcaccaggaagaagggaaagggcgccggcggcaagaccgacctgcgtcccgaccgtaagcagttcaaaaggcaccacaaggaggatgcagcagctgagcagggggatggcaacggagagccgggttctgacctagaggataatattagtaatacatgtcttgaaattgctaatggaactgaagcaaatgctaaaaagagtgataaacagttaaagaaggaagcaagaaaacaaagggaactagaaatcagtgctatggaggaaagggctttgcaggaagatataccacaaactccagatgattttgagaagttggttaggagctccccaaatagtagttttatctggataaagtatatggcaactttgttagatcttgcagatgttaagaaagcacgtgcagtagctgagagagctttaaaaacaataatccccagagaagaagaagagaaactaaatgtttgggtagcatatttcaatctggaaaatgaatacggtagtccaagggaggatgctgtgaaaaaggtattccaaagagccttgcaatattgtgatcccaaaaagctgcacttggctcttcttgcgatgtacgagaggaccgaacagtatgagcttgcagatgaacttctagacagaataaccaaaaggttcaaaacttcctgcaagatatggttatgccgcattcagtttgccctcaagcaaggcaaggatgttgagtacatcaaagccattgtaaaccgtgcacttctaagtttgccacacagaaagcgcataaaattcctctcacaaactgctattctagaattcaaatgtggggtgcctgaagaaggaagatccagatttgaactaatattgcgggagtacccaaaaagaacagacctttggagtgtttatctagaccaagaaatccgccttggtgacgtagaagttatacgggcattgtttgagaggagggtggcttgtctgaccctacctccaaaaaagatgcagttcttgttcaagaagtatcttaacttcgagaagtcactgggtaaagacaacgaaagaattcagcttgtgcaacagaaggcaatcgaatatgttcagagttcactgccgtcacaagacaactcttgaactacatggagacttaataagcccacaaacaatcattaggaaatgccagtcgtactgtagatgtgatctctttgatgacattattgtgaaaaggtcaatgtaaaatgtgggctattcaaaattttgtttgaaaccgttatataagttatgaggcattaagtctagtatgtcatgtttcacccaatttttttgaaaggatctatcctaagccggatctggttcgaatattgaccttttctatctgtggtattgactgttgaggcacaattgaatgggtaactgtctgtgctactcctagcttagaaagcacaaaatactagaatatctgtctgcgcttaatccctt

SEQ ID NO: 139926 - DNA, 121 bp, Zea Mays
cgggcgaagacggatccatcgtaattcacacacacaaaaaaaaggctacacaaacaccactatcgctatgtccagaggcaaacattattagcaagctgaatcaggctgtagagtagcctca

SEQ ID NO: 139927 - DNA, 1023 bp, Zea Mays
agaccagagtttgttctcacaccacatgcaaagatcgcccacgccatcttcccaatggagctccagttccatccccagcagcaccacagctaccaacaacaacaacaaccaccaccgccagccacgaaggaacccaaacccaagccaagaacgagaaccaagtgcggcggcggcggcggcggcagcagcaagttcgtgggcgtccggcagaggccgtcggggaggtgggtggcggagatcaaggacacgacgcagaaggtccgggtgtggctgggcacgttcgagaccgccgaggccgccgcgcgcgcctacgacgaggccgcctgcctcctccgcggcgccaacacgcgcaccaacttcgccgccgcgccgccgcccgactcgccgctggccgcccggatccgcggcatcctcgaccacaacaacaacaacggccggacgccgccgaagaagaccttaccgcaccgccccaccgccgcccgcttcttccccgcagccgcggccagcaccgctagcacctgcagcagcacggccagcccgaccagcagcagtcctagctccagcatcagcttcgccaccagcacccacgcccgcgctcccattcccaccctcccggatcctcggagtcagagcgcgaccgaggaagcttattacgcgccgtactcggccaccggcggcggcgaagagttccagctagccgcgaccacgcaccagtacgaacaacagtcatgggcgctcaacgccgccagcagccccctaacaccaccaccacctccggacgcacgcgacgtgggtagcgtgaacgctcgccgcttggcggtcgcggcggagacaggcagagacaggatgatcaagctggagaagaagagcagctctgcgtcgctgtcgctgtcgccccacggcgtcatcgacaggggtccggacaaggatctagcgtttgacgtggggaatgatgcgtctgactccctctgggatctgccgccgatctgcccactttcttcttgcaggtctatgatgttttag

SEQ ID NO: 139928 - DNA, 1582 bp, Zea Mays
gatcgagtggcgaatgaaggcacaagtcctcggtggtggcgggccccagagaccatttgctttcgcgcccttgtcacctagcagctagcagcagagggaggaaggacaagcccacacacaagctctcttcttttctctctgccgtctctcctccttcgctgccgtttggtgctcgtgtcgcgtgtggctgcgctcgtatatagcgtagctttctaggatcccaccagcagagtagcagtagcaggcgcctggtttccggtttccctgcagtgaaggaagaggaagcccaaccccaaggacagcagcgtacaatcaggctgatgcttgttggaactcagctgttgatgcttgtaagcctcgctgcctggctgcgtcctgtgctgtagatacgagatcccgcagcgttcgtttgttgcacttgcaccggcttgctgctagcttgcgacaggactaggaggagctagccgaggaggaggtgtgtgactccatggacgcgggccagcaggatgcgtgggactgggactgggaggtcctgctgccagaccacaggagctcatcctccgtgcgccaccaccacggcagcaacaataatacccttgacgatcaagaagaagcagaggagctcgacctgctgctgcctgcgccaggaggggacgacgtcgttgacgcgcacgacgacgagtgcaaggacatcggcgtcgtgccggacgacgaggccaagaagtcctcctccgtcgcgcctagcgctgccgccggcgatccgacgatggcctcctccgagggcgccgtggaagcgaaggagccgttccagagccctgatgacgccaaggccaccgccgacgacggcggcaagtttgctgcccagcagcaggaggaggaggagggggaggacgaggaggaagatgccggcaaggaaaacgacgacgacgacaaggcggcgcgtgcgccgcagtgcgtggtgttcagcgtggggaagctgaaggtgaacgggatcggcgcgctgtgctcgttcggcgtcgcggccgccaccctctgcgtgttcctcgtcggcggcaggcagcaccacaggcggcaggagcagcgggaggagacgatccagctgcagttctacggcgacgataagaggatccatcaggtggtgcagcagacgtcgaggctgaaccaggccatgtcgtccgtgatgggggcgggaggaggcgcgtccgcgagggccaacatatccttcggtggattctacgatggattctgacggaacactggggaacagatgggtgtagctagtatacactgccgcgtactactggtggacgatgtaaataattattgggggctcttattattattattagaccttggtttaatgctacacagatacggacggacggatggatgggttataggtttattcaagttgatagtaactaaggggcatagggaagtcttaattagttgacaagttattagtaactaaaaacgtcgaaccatgcgtgcatgctcctcttgggtttacatatatttgtattcattatatattaatgaatgatctgtgtgcatgcaataaaaaaaaagaaaaaaaagagaa

SEQ ID NO: 139929 - DNA, 879 bp, Zea Mays
acccgctctgctctgctctcggctgccgcctatttcccttccctctccgggcgctttgcataggagtcggagccgccgcccgtcctccatcctcctgcacggcaggggcagccacacttgttggttcctctccctctaccctctcccgtgtggcggcgggggatatcatctatgatggggtggctgcggctccactccctcttctcccctctccggaggatgtgggtgagggcgcattccgagcgccggaaccggagggggatgcgcatcctgtacaaggacgtgcagtcctgccaggacgaggacgtgcgcgtgctctggtccatcctcatcgactcccaccgccaccaccaccaccacccggccgtcctcgacctcgagctctgaagaagaatctcatcagcgcgatggcgtgcacgtacgtatttatgcacgtgggatcgatatgtgatcaagagagcacagcactggccttccattattccttcagaaaaagaaaaaaaggactcgaggttgaagaagaagaagaagaagaagaagatagactgagagagaggtgtttaattctatgcttttgtgtgctgctgttttccttttcttttcttttttttttgcacctttgttctgggcttgaaaaaactgagtgtgaggttgagctctctgtacatagacacacacttgctcaagtgccttaccttcaattctaccgtgcgtactgtacacttgtgttctttgtgtatttgcattgcgtgtatctcggatggaagcctgctctggttgttaggctagtgtatctgcctctgcttttctttcttcttctttacatcatctttttgttttagattgcctgtccatttctgcttgatgggtgccctgacg

SEQ ID NO: 139930 - DNA, 1121 bp, Zea Mays
acccgctctgctctgctctcggctgccgcctatttcccttccctctccgggcgctttgcataggagtcggagccgccgcccgtcctccatcctcctgcacggcaggggcagccacacttgttggttcctctccctctaccctctcccgtgtggcggcgggggatatcatctatgatggggtggctgcggctccactccctcttctcccctctccggaggatgtgggtgagggcgcattccgagcgccggaaccgtaagccatcgacctctctcgccccgcccgcccgcccgcctccgatcattctcggtcgcttttgctagctagctgcattgcacttgcacttgccctgaaacacatcgcgttcttttctttttgcctgcgctgcgctgccagggagggggatgcgcatcctgtacaaggacgtgcagtcctgccaggacgaggacgtgcgcgtgctctggtccatcctcatcgactcccaccgccaccaccaccaccacccggccgtcctcgacctcgagctctgaagaagaatctcatcagcgcgatggcgtgcacgtacgtatttatgcacgtgggatcgatatgtgatcaagagagcacagcactggccttccattattccttcagaaaaagaaaaaaaggactcgaggttgaagaagaagaagaagaagaagaagatagactgagagagaggtgtttaattctatgcttttgtgtgctgctgttttccttttcttttcttttttttttgcacctttgttctgggcttgaaaaaactgagtgtgaggttgagctctctgtacatagacacacacttgctcaagtgccttaccttcaattctaccgtgcgtactgtacacttgtgttctttgtgtatttgcattgcgtgtatctcggatggaagcctgctctggttgttaggctagtgtatctgcctctgcttttctttcttcttctttacatcatctttttgttttagattgcctgtccatttctgcttgatgggtgccctgacgacgacgcgtccctggccggccgccggcggccctcgttttctcgcgcacggatggccgtgtgctcatgtacacatatcgatcgatgcttctatgtaatccaa

SEQ ID NO: 139931 - DNA, 2389 bp, Zea Mays
ccaccattggtgcggcgtggttctgccacgacgcccgcgacaaatccctgcgcgacggcatcttcgcctcccatcccctcccagcttcccctcccactccggccctcacacaaattgcccctctccttgtcctcctctttacacgctgccgaccacggctgccgccaaccacccgccccacccgtccaccgctgccgagtgctagccatttggagctgccgcgccatggcgtccgtggccgccaccaccacgctggcaccggcactcgcgccccggcgccgggcgcggccagggaccgggctgctgccgccgcgccgggcctcggccgtccgctgctcgctcgaccgtaacgtctccgacatgggcgtcaacgctcccaaagggttattcccacccgagccagagcactacaggggcccgaagctcaaggtggccatcataggggcaggccttgcgggcatgtccaccgctgttgagctcttggaccagggccatgaggttgatttgtacgagtcccgtccgtttatcggtggtaaggttggctcctttgttgacaggcaaggaaaccatatcgagatggggctgcatgtgttcttcgggtgctacagcaatctcttccgcctcatgaagaaggttggcgctgataataatctgctggtgaaggaacatacccatacttttgtaaataaagggggcacgattggtgaacttgattttcggttcccggtgggagctccgttacatggcattcaagcattcctaagaactaatcagctcaaggtttatgataaagcaagaaatgcagttgctcttgcccttagtccagttgttcgggctctggttgatcctgatggtgcattgcagcaagtgcgggacttggatgatgtaagtttcagtgattggttcatgtccaaagggggtactcgggagagtatcacaagaatgtgggatcctgttgcttacgctttgggtttcattgactgtgataatatcagtgcacgttgcatgcttactattttcaccttgtttgccacaaagacagaggcatccctgttacgcatgctaaagggttcacctgatgtttacttaagtggcccaataaagaagtatataacagacaggggtggtaggtttcacttaaggtggggatgcagagaggttctctatgagaaatcacctgatggagagacctatgttaaaggccttctcctcaccaaggctacaagtagagagataatcaaagctgatgcatacgtcgcagcctgtgatgttccgggtatcaaaagattacttccatcagaatggagggaatgggaaatgtttgacaatatctacaagttagatggtgtccctgttgtcactgtccagctccgctacaatggatgggtcactgaacttcaagatttggagaaatcaagacaactgcaaagggcggttgggttggataaccttttgtacacggcggatgcagacttttcctgtttttcggaccttgctctctcatctcctgctgattactacattgaagggcaaggttccctgatccaagctgtgctgactcctggagatccatacatgccattgccaaacgaggagatcattagtaaggttcaaaagcaggttgtagaactgttcccatcttcccggggcttggaagttacatggtccagtgtggtaaagatcggacaatcgctgtaccgtgaggctcctggaaacgacccattcaggcctgatcagaagacgcccgttaaaaacttcttcctctctggatcttacacgaaacaggactacattgacagcatggaaggagcaactctctccggcaggcgaacgtcggcctacatctgcggtgccggggaggagctgctggccctccgaaagaagctactcatcgacgacggcgagaaggcgctggggaacgttcaagtcctgcaggctagctgaacaacccctcctgcactgcagagaagcttggatctttccaaccacacatacatgctggaatggacaaaccaaccaaccattggcttttctcgcttcagggtgctggcgattcccgcagcgacctcctgtgtatcgtatccaatttgagcattagatctgccccccctgcaggcgtttctttcctatccctgatccgagaagcagggtgtagtctaggtggctggcatacgggattacatcaggcagtgtgtaagttcagctggaactcgattggtaattgggatggatgattgatgatatatatatagcacacactgttcttgcgtcttgcaagaaaatatagcaagcgatgatccggcgacacttgctgggagactgtaccaacgatcttacttcattttggccattgtgttttttttttttttacaaaatagcagcatcctgt

SEQ ID NO: 139932 - DNA, 1446 bp, Zea Mays
atgcgcatttgagctatggtttatggaaagcttgccggccttgacgctggaaggagaaaccagtcagtctccggcgctgcccctcccgccgtggccggcgacgggtggaggcagtatgtggagcgagagacagtgggcagccggagccggcgtgtccctctgaaggcctcacgacctgccggcttgtgatggccacgagcgcgtgcgcgtgagcgtcagcgtccgacctccagtggtccgtgtttccccgagcaagagcgaacagcagtttggcggcggctgatggcaccaagcgcagccgccggaccgccgtccctggcccggccatcgacatcgagtagcagccacctgcggcgcgccggcagcgccctccagcccgtctccgtcccgcgcgccttggtgcaggggcggaggcgcctcacgggcgccgtccgagccgcgccggacgcgccgccggtggtcagggctgccgtcagcgccgtcaccgagctcctcagagccctctccccgaacaaggcgctcaggtaactaacccagcatctcacactcgtcaaccccatcagtcatccatccgctctggaatatggatccccgtggcgttctgtgctcttgcggtcggctgtgcaggggcgctgctacccagcagcagcagggcgaggagccggatccggacccgacctgcggcagcgtcgaggacgtgctcgccgtgctccgagacgattaccggcgcgcctacttcctcaccggggatttcactccgggaatatacaccgaagactgcttgttcgaggacccgacgatcaagttccgcggtactcccagaacctgggtctgctggtgcccttcttcgacagcccttcgctcgagctagagaacattgagaagggttcgagggccgaaacgaagttcgtcaaggcgacatggaaactaaggttcatcttcaagctccaaaaggcacacgacgtatctgaggcttccatggaggccgctggtcgcgatcggagggagcacgacgtatgatctggatggagatttcaaggttactcggcactccgagagctgggacgtctctgcgcttcaggccatcgctcagatcttcgtctcggccccggaggagaagctggaaggcagctgaggctgaggcagagcatgcaatgtacagcgccacgcagacgcaggatcagtgatctgaatccgtgatgagcaggtgtccaaagccgtctgtcagagctccgctggtcttctctgtgcaaacaaactgtaccctctctgttccaggttataaacattcgaataattttgctacttacctagatatatgttacgtatatagatatatagtaaagggcggttattatgacacaaatttgtagggtgtaggtacaggttttgaatttgacatttgatgaacactatataaaaaccgactctcctatattccaaacg

SEQ ID NO: 139933 - DNA, 1450 bp, Zea Mays
atgcgcatttgagctatggtttatggaaagcttgccggccttgacgctggaaggagaaaccagtcagtctccggcgctgcccctcccgccgtggccggcgacgggtggaggcagtatgtggagcgagagacagtgggcagccggagccggcgtgtccctctgaaggcctcacgacctgccggcttgtgatggccacgagcgcgtgcgcgtgagcgtcagcgtccgacctccagtggtccgtgtttccccgagcaagagcgaacagcagtttggcggcggctgatggcaccaagcgcagccgccggaccgccgtccctggcccggccatcgacatcgagtagcagccacctgcggcgcgccggcagcgccctccagcccgtctccgtcccgcgcgccttggtgcaggggcggaggcgcctcacgggcgccgtccgagccgcgccggacgcgccgccggtggtcagggctgccgtcagcgccgtcaccgagctcctcagagccctctccccgaacaaggcgctcaggtaactaacccagcatctcacactcgtcaaccccatcagtcatccatccgctctggaatatggatccccgtggcgttctgtgctcttgcggtcggctgtgcaggggcgctgctacccagcagcagcagggcgaggagccggatccggacccgacctgcggcagcgtcgaggacgtgctcgccgtgctccgagacgattaccggcgcgcctacttcctcaccggggatttcactccgggaatatacaccgaagactgcttgttcgaggacccgacgatcaagttccgcggactctccaggtactcccagaacctgggtctgctggtgcccttcttcgacagcccttcgctcgagctagagaacattgagaagggttcgagggccgaaacgaagttcgtcaaggcgacatggaaactaaggttcatcttcaagctccaaaaggacgtatctgaggcttccatggaggccgctggtcgcgatcggagggagcacgacgtatgatctggatggagatttcaaggttactcggcactccgagagctgggacgtctctgcgcttcaggccatcgctcagatcttcgtctcggccccggaggagaagctggaaggcagctgaggctgaggcagagcatgcaatgtacagcgccacgcagacgcaggatcagtgatctgaatccgtgatgagcaggtgtccaaagccgtctgtcagagctccgctggtcttctctgtgcaaacaaactgtaccctctctgttccaggttataaacattcgaataattttgctacttacctagatatatgttacgtatatagatatatagtaaagggcggttattatgacacaaatttgtagggtgtaggtacaggttttgaatttgacatttgatgaacactatataaaaaccgactctcctatattccaaacg

SEQ ID NO: 139934 - DNA, 1456 bp, Zea Mays
atgcgcatttgagctatggtttatggaaagcttgccggccttgacgctggaaggagaaaccagtcagtctccggcgctgcccctcccgccgtggccggcgacgggtggaggcagtatgtggagcgagagacagtgggcagccggagccggcgtgtccctctgaaggcctcacgacctgccggcttgtgatggccacgagcgcgtgcgcgtgagcgtcagcgtccgacctccagtggtccgtgtttccccgagcaagagcgaacagcagtttggcggcggctgatggcaccaagcgcagccgccggaccgccgtccctggcccggccatcgacatcgagtagcagccacctgcggcgcgccggcagcgccctccagcccgtctccgtcccgcgcgccttggtgcaggggcggaggcgcctcacgggcgccgtccgagccgcgccggacgcgccgccggtggtcagggctgccgtcagcgccgtcaccgagctcctcagagccctctccccgaacaaggcgctcaggtaactaacccagcatctcacactcgtcaaccccatcagtcatccatccgctctggaatatggatccccgtggcgttctgtgctcttgcggtcggctgtgcaggggcgctgctacccagcagcagcagggcgaggagccggatccggacccgacctgcggcagcgtcgaggacgtgctcgccgtgctccgagacgattaccggcgcgcctacttcctcaccggggatttcactccgggaatatacaccgaagactgcttgttcgaggacccgacgatcaagttccgcggactctccaggtactcccagaacctgggtctgctggtgcccttcttcgacagcccttcgctcgagctagagaacattgagaagggttcgagggccgaaacgaagttcgtcaaggcgacatggaaactaaggttcatcttcaagctccaaaaggcacacgacgtatctgaggcttccatggaggccgctggtcgcgatcggagggagcacgacgtatgatctggatggagatttcaaggttactcggcactccgagagctgggacgtctctgcgcttcaggccatcgctcagatcttcgtctcggccccggaggagaagctggaaggcagctgaggctgaggcagagcatgcaatgtacagcgccacgcagacgcaggatcagtgatctgaatccgtgatgagcaggtgtccaaagccgtctgtcagagctccgctggtcttctctgtgcaaacaaactgtaccctctctgttccaggttataaacattcgaataattttgctacttacctagatatatgttacgtatatagatatatagtaaagggcggttattatgacacaaatttgtagggtgtaggtacaggttttgaatttgacatttgatgaacactatataaaaaccgactctcctatattccaaacg

SEQ ID NO: 139935 - DNA, 1325 bp, Zea Mays
atgcgcatttgagctatggtttatggaaagcttgccggccttgacgctggaaggagaaaccagtcagtctccggcgctgcccctcccgccgtggccggcgacgggtggaggcagtatgtggagcgagagacagtgggcagccggagccggcgtgtccctctgaaggcctcacgacctgccggcttgtgatggccacgagcgcgtgcgcgtgagcgtcagcgtccgacctccagtggtccgtgtttccccgagcaagagcgaacagcagtttggcggcggctgatggcaccaagcgcagccgccggaccgccgtccctggcccggccatcgacatcgagtagcagccacctgcggcgcgccggcagcgccctccagcccgtctccgtcccgcgcgccttggtgcaggggcggaggcgcctcacgggcgccgtccgagccgcgccggacgcgccgccggtggtcagggctgccgtcagcgccgtcaccgagctcctcagagccctctccccgaacaaggcgctcaggggcgctgctacccagcagcagcagggcgaggagccggatccggacccgacctgcggcagcgtcgaggacgtgctcgccgtgctccgagacgattaccggcgcgcctacttcctcaccggggatttcactccgggaatatacaccgaagactgcttgttcgaggacccgacgatcaagttccgcggactctccaggtactcccagaacctgggtctgctggtgcccttcttcgacagcccttcgctcgagctagagaacattgagaagggttcgagggccgaaacgaagttcgtcaaggcgacatggaaactaaggacgtatctgaggcttccatggaggccgctggtcgcgatcggagggagcacgacgtatgatctggatggagatttcaaggttactcggcactccgagagctgggacgtctctgcgcttcaggccatcgctcagatcttcgtctcggccccggaggagaagctggaaggcagctgaggctgaggcagagcatgcaatgtacagcgccacgcagacgcaggatcagtgatctgaatccgtgatgagcaggtgtccaaagccgtctgtcagagctccgctggtcttctctgtgcaaacaaactgtaccctctctgttccaggttataaacattcgaataattttgctacttacctagatatatgttacgtatatagatatatagtaaagggcggttattatgacacaaatttgtagggtgtaggtacaggttttgaatttgacatttgatgaacactatataaaaaccgactctcctatattccaaacg

SEQ ID NO: 139936 - DNA, 1353 bp, Zea Mays
atgcgcatttgagctatggtttatggaaagcttgccggccttgacgctggaaggagaaaccagtcagtctccggcgctgcccctcccgccgtggccggcgacgggtggaggcagtatgtggagcgagagacagtgggcagccggagccggcgtgtccctctgaaggcctcacgacctgccggcttgtgatggccacgagcgcgtgcgcgtgagcgtcagcgtccgacctccagtggtccgtgtttccccgagcaagagcgaacagcagtttggcggcggctgatggcaccaagcgcagccgccggaccgccgtccctggcccggccatcgacatcgagtagcagccacctgcggcgcgccggcagcgccctccagcccgtctccgtcccgcgcgccttggtgcaggggcggaggcgcctcacgggcgccgtccgagccgcgccggacgcgccgccggtggtcagggctgccgtcagcgccgtcaccgagctcctcagagccctctccccgaacaaggcgctcaggggcgctgctacccagcagcagcagggcgaggagccggatccggacccgacctgcggcagcgtcgaggacgtgctcgccgtgctccgagacgattaccggcgcgcctacttcctcaccggggatttcactccgggaatatacaccgaagactgcttgttcgaggacccgacgatcaagttccgcggactctccaggtactcccagaacctgggtctgctggtgcccttcttcgacagcccttcgctcgagctagagaacattgagaagggttcgagggccgaaacgaagttcgtcaaggcgacatggaaactaaggttcatcttcaagctccaaaaggcacacgacgtatctgaggcttccatggaggccgctggtcgcgatcggagggagcacgacgtatgatctggatggagatttcaaggttactcggcactccgagagctgggacgtctctgcgcttcaggccatcgctcagatcttcgtctcggccccggaggagaagctggaaggcagctgaggctgaggcagagcatgcaatgtacagcgccacgcagacgcaggatcagtgatctgaatccgtgatgagcaggtgtccaaagccgtctgtcagagctccgctggtcttctctgtgcaaacaaactgtaccctctctgttccaggttataaacattcgaataattttgctacttacctagatatatgttacgtatatagatatatagtaaagggcggttattatgacacaaatttgtagggtgtaggtacaggttttgaatttgacatttgatgaacactatataaaaaccgactctcctatattccaaacg

SEQ ID NO: 139937 - DNA, 1359 bp, Zea Mays
atgcgcatttgagctatggtttatggaaagcttgccggccttgacgctggaaggagaaaccagtcagtctccggcgctgcccctcccgccgtggccggcgacgggtggaggcagtatgtggagcgagagacagtgggcagccggagccggcgtgtccctctgaaggcctcacgacctgccggcttgtgatggccacgagcgcgtgcgcgtgagcgtcagcgtccgacctccagtggtccgtgtttccccgagcaagagcgaacagcagtttggcggcggctgatggcaccaagcgcagccgccggaccgccgtccctggcccggccatcgacatcgagtagcagccacctgcggcgcgccggcagcgccctccagcccgtctccgtcccgcgcgccttggtgcaggggcggaggcgcctcacgggcgccgtccgagccgcgccggacgcgccgccggtggtcagggctgccgtcagcgccgtcaccgagctcctcagagccctctccccgaacaaggcgctcagtcggctgtgcaggggcgctgctacccagcagcagcagggcgaggagccggatccggacccgacctgcggcagcgtcgaggacgtgctcgccgtgctccgagacgattaccggcgcgcctacttcctcaccggggatttcactccgggaatatacaccgaagactgcttgttcgaggacccgacgatcaagttccgcggactctccaggtactcccagaacctgggtctgctggtgcccttcttcgacagcccttcgctcgagctagagaacattgagaagggttcgagggccgaaacgaagttcgtcaaggcgacatggaaactaaggttcatcttcaagctccaaaaggacgtatctgaggcttccatggaggccgctggtcgcgatcggagggagcacgacgtatgatctggatggagatttcaaggttactcggcactccgagagctgggacgtctctgcgcttcaggccatcgctcagatcttcgtctcggccccggaggagaagctggaaggcagctgaggctgaggcagagcatgcaatgtacagcgccacgcagacgcaggatcagtgatctgaatccgtgatgagcaggtgtccaaagccgtctgtcagagctccgctggtcttctctgtgcaaacaaactgtaccctctctgttccaggttataaacattcgaataattttgctacttacctagatatatgttacgtatatagatatatagtaaagggcggttattatgacacaaatttgtagggtgtaggtacaggttttgaatttgacatttgatgaacactatataaaaaccgactctcctatattccaaacg

SEQ ID NO: 139938 - DNA, 1951 bp, Zea Mays
gcgcagaggcggcagggtgggcgaccagtctcctccgcacgcttcccaccgagctcacacactgcacactcccacactcccactcccacctgtaggttcacgggaggcgaggaccctgccccccctgcattcttcccgtatcgcggaccgatcctcgccgcgggaggcgagcggagcggggcgtttctgcgggggagaagcgcgtccctgcaatttctgagagaggggaggcggcgagtggaaaagagcaggcgttgctatcctatcttgctgacacagcggcggtgtggcgaggcgcatggcgagggcgcgcggtggcgccgcgtggtgggtgctggcagcggcgtgggtgctgtgggcggctgcggctgcggcggaggcggaggccaggtcgccgtcggcgaggagggtgcaccggcacctcaagcgcctcaacaagccggccgtcaagagcatcgagagtccagatggagacatcatcgactgcgtgcatatctcccaccagccagcgtttgatcatcctctcctcaagaaccacacaatacagtttaggccggcgtaccaccctgaaggtctatacgatgataccaagagcagcataggctcaaacaatgctggcgagaggccgatgctccagatgtggcatcgaaatggcaggtgccccgagggcacggttccaatcaggagaaccaagaaggacgacctgcttcgagctagctccgtgaggcggtatggcaggaagcggcacactgctccgaacccactgtctgttgatcccaacatgctcagtgagggtggccaccaacacgccattgcgtacgtccagggcgacaagtactatggtgcaaaggctaccattaatgtgtgggagcccaagattcagcaggctaacgaatttagcctgtcccagctctggatcttggggggttcatttggggaggatctcaacagcatagaggctggctggcaggttagccctgacctctatggagacaacaacaccaggctgttcacatattggactagtgatgcataccaagccacaggttgctacaacatgttgtgctctggtttcattcagataaacagcgaggttgccatgggggctagtatcttccccatctcgaactacgcgggctcccaatatgatattagcatcctgatctggaaggaccccaaggaaggaaactggtggatgcagtttggcaaggaatacgtcctgggctactggccgtccttcctcttctcctacctcgcggacagcgcgtcgatgatcgaatggggcggggaggtggtgaactcggagcccgacggcacgcacacatcgacccagatgggcagcgggcacttcccggaggaagggttcagcaaggcgagctacttcaagaacgttcaggtggtggacagcagcaaccagctcagcgcccccaagggcgtgggcaccttcacagagcagtccaactgctacgacgtgcagaacggtaacaatggggactggggcacctacttctactacggcggccctggcaagaactcgaactgcccgtgactggtgcttctaatgtgtagtgtgaagtgccgtcaccattagcaaaatgtaacccaagcgttcaggttcgcttatacagcgtcaatctgcatctccttgttcagtcctagctaggtagtgtgtaacatgtgcatgtgctctctagactctaatgttttcttcttcttttcattgtattttgttcttgtgccatgtaaagtttctgaagagaaggagcatggcttgaggctgcggtgggtggttgggctggtcggtggtgacctctactgatttttgcgaagtctgcttattggtcaccttcgccagttattttgaaagtgtgctatagcttgtttgatgatgaatgatagtaatgctgtaatggtattgagcttagtggttattattgcatccagttaaacc

SEQ ID NO: 139939 - DNA, 958 bp, Zea Mays
tttcttccatgttcaattcgattggcattgctgtgttaattagtcgtcctgttttgtatttttttcctacaagttatagtggttacattaatgactgaatcaagatcttgacccactttattgatgacacccttttttcttcttattgcttctcctatcgtctctgagtttgtcattccattcaaacacgaaatttgtgtcagtatagatgccatggaaattttggtttagcttgagtattttgtagatacttcattcttgagtattcttgagtttgccttgttataaattgcagcacactccaatggtcttctaaatgaatagcacgttatagtcaagagtatgacttaccaaattcattattggtttccaagcatcttgaaagagaagtccatcgtctctcttactgtcatctcagcatggctaacagaagcacacagcgacaagattaccccacatgttgtatcatggtttactagagaggctactcaagatgaggaatttgaagttatgtatggtgaggacgatgatgaagacaaagatgacgaggatgatgatgattatgatacaaagaccaagggggctgctggagggggaagggcagcagagaacgacctgttgagtgcaagcaggagtgagtgctgcacattgaatattgacatgcattggttgtggagcaattagtctggttctacttgatgcaaggtcattgagttgttgaagtgatattttgtcgaatattttatatgccgttgcaaagcacgggcatctaactagttgtatatagaaaaatcttagatccttgtggcaaacaatttaccgactaattttagcaacttaacctataaacaggccgactaacaaattagctaattgttagccggagggccggcaaactatttatccattagctatttgatcatgctaataggtgctaatagatcttataaaaagaaaa

SEQ ID NO: 139940 - DNA, 672 bp, Zea Mays
aaaattaaaaaaatcgataggtggagccacgttgtatatgcggatctccattcaccaatcgccttcctgtcgccctcccgctcggctcggcgaacgcgatctgttccccaacctccgcagccgctccaccgtcctccactccggctgccgaatcgacccgccccgatccagatcaggagctgagggatggacgcgaacaggcgccagagtgggatccagcagttgctggctgcggagcaggaggctcagcaaattgtgaatgccgctagagctgccaagtcagcgaggctcaggcaagcaaaagaggaggctgagcgggaaatagccgaataccgtgcccagatggaggctgagtttcagaggaaggttgcagaggtatgcacgccatgtcccatttttccccactggactacaggacctcacttctgtgtcttggtgactacagagcagcggcgactccggtgcaaacgtcaagcgtctcgaggaagaaacggcggcgaagatcgagcaactcacccagcaggccgcaagcatctccccggatgtcattcagatgcttctgcggcatgtcaccaccgtcaagaactgaggagtgctgttcccgaactatgctcgcagacttgtaccgtcgatctatttatttttgtcaagagtgagagtggtgaggaataa

SEQ ID NO: 139941 - DNA, 790 bp, Zea Mays
aaaattaaaaaaatcgataggtggagccacgttgtatatgcggatctccattcaccaatcgccttcctgtcgccctcccgctcggctcggcgaacgcgatctgttccccaacctccgcagccgctccaccgtcctccactccggctgccgaatcgacccgccccgatccagatcaggagctgagggatggacgcgaacaggcgccagagtgggatccagcagttgctggctgcggagcaggaggctcagcaaattgtgaatgccgctagagctgccaagtcagcgaggctcaggcaagcaaaagaggaggctgagcgggaaatagccgaataccgtgcccagatggaggctgagtttcagaggaaggttgcagagagcagcggcgactccggtgcaaacgtcaagcgtctcgaggaagaaacggcggcgaagatcgagcaactcacccagcaggccgcaagcatctccccggatgtcattcagatgcttctgcggcatgtcaccaccgtcaagaactgaggagtgctgttcccgaactatgctcgcagacttgtaccgtcgatctatttatttttgtcaagagtgagagtggtgaggaataatatgcccgcttgtatccataattcctgttcgtaactacggaataagccgccgcagctttagcggcaaacgtgactagtactgtcagaacctaccattgttatttggtacaattggtaaataatattgttttaaactggatttttcgaacaagctgttttgttgataccatgcttggggtttctgtttc

SEQ ID NO: 139942 - DNA, 1376 bp, Zea Mays
gcacggcccagtccaacttctcgttcccccaaaccctaatccctttctccactgccacgttgtatataagccgccgccagcttcaacgcagctgccctcccaaaccctcgcgccgccgctccccagcacatcgctcccagcgcgccaaatcggcggcaacctcggacccttcactcacccagctatggcggagcgaggcggcgagcgtggcggagaacgcggcggcgagcgtggcggttttggccgcgggttcggtcgcggcgggcgcggcgaccgtggtggtcgccgtggtggccggcgcggcggccgccagcaggaggaggagaagtgggtgcccgtcaccaagctcgggcgcctcgtgaaggagaaccggatcaacaagattgaggagatctacctgcactcgctgccggtcaaggagcaccagatcgtggagaccctcgtcccggggctcaaggacgaggtgatgaagatcacgcccgtccagaagcagacccgcgccgggcagcgcacgcgtttcaaggccttcgtcgtcgtcggcgacggggacggccacgtcgggctcggcgtcaagtgcgccaaggaggtcgccaccgccatccgtggcgccatcatcctggccaagctctcggtcgtgcccgtcaggaggggctactggggaaacaagatcggccagccgcacactgtgccctgcaaggtcaccggcaagtgcgggtccgtcaccgtgcgcatggtgccggcgcccagggggtccgggattgtcgctgcccgcgtgcccaagaaggtcctccagttcgccggcattgaagatgtctttacctcgtcccgtggctccaccaagacactcggtaacttcgtcaaggcaacctttgattgtctgatgaagacctacggcttcctcactcctgagttctgggccgagaccaagtatgccaagaccccgttccaggagttcaccgacctcttggctaagccgacaaagggtcttctgatcgaggctcccaccgagacagtggaagcttgaacgtcttagtttactgttccaagtgtcgcgaaaagagttttctgtactagctacatattttaaatgttattttgaattatgatgagaaaccaaggtatgcacccaagataattgatgtcctgttgttttcgtatgtgggtatcgaaccccaaagatgtcctattgttttctgtactccgcatgtgatgaaaatctgtcctgcctgtgttaggccatctgcactagtctacgcatagattatccaaaaacactgttctgcattagagtggagtttgaatatgtacgaggatgggtaagctcctagagatagtctgtcttagtcttacagtgtttttcaacacgcgatgaatgc

SEQ ID NO: 139943 - DNA, 1318 bp, Zea Mays
cagcaactctccacaaagtataaattatatcaacaaaagaatgcatattaacacaagtaaaactttgtggtaaacaatatccactggtctgtacgtagctgtaaataacgccacttgctgcttatatatatataacttaacagacaacagatggcacgtggtattcctccgtttctacaaagtacaaaccttccacttccctagcagttgatgccacacgtctgggtatccgggccagtgacgcgggtggtgaaggggtcgatgcgaacccacagcaaggagaagatggacgccagcaggatggcccagacgacgacgatggtcggggtgcggttctgcctgcccatgaggcccttgaggaacgggtacaggtggacgatgacccagaaggcgaagaagagcttgccgaagagcgggccccacgactggtatccgctgttgatggcgtaggagatgccggcgacgacgccgaccaggttgatgatcaggatggtggtgggcgggatcaggagcgtcgtccacttgaacatgtacagctccgcgaagtcgccgtcctcgtccgaggccttggaggtgacggtgaagttggtgtcgatgccggccagcaccttgagcaggccctggaacacggcgaagaggtgcgcggagatgcccccgatcacccagaactgctcgttcctccaccactcgtcgatgcccaccccgctccacctcatctccaggatgcccgtggcgaagatcgagatgaagagggagatgaaccagatgctggcgaagttgctgatctgcacgcattccattccaagacagatggcgggcaggatgcagtagatgagaagcgggatggacgtgagcgggtagatggtggtgttgatgtacgcgaatctctccaggaacttgagccgccctccgtagccgtaccacagggggcagtgccggctgaagaggatctccacggacccaagagcccaccggagcacctggttcagacggtccgaaagattgatgggggcagaccccttgaaagctggccgcttgggcatgcagtagatcgaccgccagcctcgcgcgtgcatcttgaatccgaagagactccggagttgcggactgaggaacaccaccatactccatcagagtggaggcaacaaacgctgcggactggccaaatctcttctccaggctcatttgagacataagaagtgatttctcgtcgtcaaatccagcgcctgccatgtaaaaaaaaatttgacagcatgaatacatgcttcgaaaccctcaaaatatacaagaaaagacagcgtgagacagaaagataaca

SEQ ID NO: 139944 - DNA, 633 bp, Zea Mays
atggcggccaagatattttccatccttatgctccttgctctttctgcatgtgttgctaacgcgaccatttttcctcaatactcacaagctcctatagctgcccttcttcccccataccttccatcaatgaccgcttcagtatgtgaaaacccagcccttcaaccctacaggctccaacaagcaatcgcaaaaagcaacttacctttatcacccctgttctttcaacaatcgccagccctatctttggtgcagtcattggtacaaaccatcagggcacaacagctgcaacaactcgtgctaccagtgatcagccaacaacaacaactactaccattcagccagctagctactgcttactctcaacagcaacaatttcttccatttaaccaattggccgcactgaacccctctgcttatttccagcagcaaatactactaccatttggccagctagctacaacaagccccgcttcctttttgacacaacaacaattgcttccgttctaccagcagtttgtggctaaccccgcaactctcttacaactgcaacagttgctgccctttgtccaacttgctttgacaaacccagcagccttctaccaacaacacatcattggcggtgccatcttttag

SEQ ID NO: 139945 - DNA, 456 bp, Zea Mays
atggcggcaaagatattttccatccttatgctccttgctctttcttcatctctagcaaacctttctccctactctcagcaacaacaatttcttccattcaaccaactgtctacactgaaccctgctgcttatttgcagcaacaacaactactaccattcagccagctagctactgcctactctcagcagcaacaatttcttccatttaaccaattggccgcactgaacccctctgcttatttccagcagcaaatactactaccatttggccagctagctacaacaagccccgcttccttcttgacacaacaacaagtgcttccgttctaccagcagtttgtggctaaccccgcaaccctcttacaactgcaacagttgctgccctttgtccaacttgctttgacaaacccagcagccttctaccaacaacacatcattggcggtgccctcttttag

SEQ ID NO: 139946 - DNA, 456 bp, Zea Mays
atggcggccaagatattttccctccttatgctccttgctctttctgcatgtgttgctaacacgaccattttccctcaatgttcacaagctcctatagctgcccttattcccccatactctccatcaatgatagcttcacaacaacatctactaccattcagccagctagctaccgcatactctcagcaacaacaatttattccatttaaccaattggtcgtactgaaccccgctacttatttgcagcaacaaatactactaccatttggccagctagctgcagcaagccctgcttccttcttgacaccgcaacagttgctgcctttctacctgcagtttgtggctaaccccgcaaccctcttacaactgcaacaattgctgcactttgtccaacttgctttgacaaacccatcagcctcctaccaacaacacatcattggtggtgccctcttctag

SEQ ID NO: 139947 - DNA, 723 bp, Zea Mays
atggcgaccaagatattttccctccttatgctccttgctctttctgcatgtgttgctaacgcgacaattttccctcaatgctcacaagctcctatagcttcccttcttcccccataccttccatcaatgatagcttcagtatgtgaaaacccagctcttcagccctataggctccaacaagcaatcgcagcaagcaacatacctttatcacccttgttgtttcaacaatcgccagccctatctttggtgcagtcattggtacaaaccatcagggcacagcagctgcagcaactcgtgctacctgtgatcaaccaagtagctctggcaaacctttctccctactctcagcaacaacaatttcttccattcaaccaactgtctacactgaaccctgctgcttatttgcagcaacaactattaccattcagccagctagctactgcctactctcagcaacaacaacttcttccatttaaccaattggccgcactgaaccccgctgcttatttgcagcagcaaatactactaccatttagccagctagctgcagcaaaccgtgcttccttcttgacacagcaacagttgctgcctttctaccagcagtttgcggctaaccccgcaaccctcttacaactacaacaattgttgccctttgtccaacttgctttgacagaccgagcggcctcctaccaacaacacatcattggtggtgccctcttttag

SEQ ID NO: 139948 - DNA, 519 bp, Zea Mays
atggcgaccaagacattttccctccttatgctctttgcactttctgcattcattggcacaaaccatcagggcacaacagctgcagcaactcgtgctacctgtgatcagccaagtagctctgcaagtctttctccctactctcagcaacaacagtttcttccattcaaccaactgtctgcactgaaccctgctgcttatttgcagcaacaacaactattaccattcagccagctagctactgcctactctcagcaacaacaacttcttccatttaaccaattggccgcactgaaccccgctgcttatttgcagcagcaaatactactaccattttgccagctagttgcagcaagtcgtgcttccttgacacagcaacagttgctaccgttctaccagcagtttgcggctaaccccacaaccctcttacaactgcaacagttgctgccatttgtccaacttgctttgacaaacccagcagcctcctaccaacaacacatcattagtggtgccctcttttag

SEQ ID NO: 139949 - DNA, 723 bp, Zea Mays
atggcgaccaagatattttccctccttatgctccttgctctttctacatgtgttgctaacgcgacaattttccctcaatgctcacaagctcctatagcttcccttcttcccccataccttccatcaattatagcttcaatatgtgaaaacccagctcttcaaccatataggcttcaacaagcaatcgcagcaagcaacatacctttatcgcccttgttgtttcaacaatcgccagccctatctttggtgcagtcattggtacaaaccatcagggcacaacagctgcagcaactcgtgctacctctgatcaaccaagtagctctggcaaacctttctccctactctcagcaacaacaatttcttccattcaaccaactgtctacactgaaccctgctgcttatttgcagcaacaactattaccatttagccagctagctactgcctactctcagcaacaacaacttcttccatttaaccaattggccgcactgaaccccgctgcttatttgcagcagcaaatactactaccatttagccagctagctgcagcaaaccgtgcttccttcttgacacagcaacagttgctgcctttctaccagcagtttgcggctaaccccgcaaccctcttacaactacaacaattgttgccctttgtccaacttgctttgacagacccagcggcctcctaccaacaacacatcattggtggtgccctcttttag

SEQ ID NO: 139950 - DNA, 969 bp, Zea Mays
ctggtgcaccatcggacagtccggtaatccatcaaccatattattgagaccaacaagcaacatagaatgtggaatccaatagcaacaatagaacaacaatgacgaccaagatattttccctccttatgctccatgctctttctgcatgtgttgctaatgcgaccattttccctcaacgctcacaagctcctatagctgcccttcttcacccatacctcccatcaatgatagattcagtatgtgaaaacccagctcttcaaccctataggctccaacaagcaaatgcagcaagcaacttacctttatcacccttgttgtttcaacaatcgccatccctatctttggtgcagttattggtacaaaccatcggggcacaacagctgtagcaactcttgctacttgtgatcaaccaagtagctatggcaaacctttctccctactctcagcaacaacagtttcttccattcaaccaactgcctacactgaaaccttttgcttatttgcagcatcaacaactattaccattcagccagctagctactgcctactctcagctacgacaacttcttccatttaaccaattggccgcactgaacctcgctgcttatttgcagcagcaaatactactaccttttagccagctagctgcagcaagccatgcttccttcttgacatagcaacagttgctgccattctaccagctatttgcggctaaccacgcaaccctcttataacttcaacagttgctgccctttgtccaacttgctttgacaaacccagcaacctcctaccaacaacacatcattcgtggtgccctcttttagattgcttattagctgtaattcactaatgaagttttttggctgatgtatgtggcctcctagaaataagaaattacatttcgagattctaatgtgatattggtctccaagggtgttcgataattatttttccaaagattgggagtaa

SEQ ID NO: 139951 - DNA, 920 bp, Zea Mays
cctcctagattagtaggtaatccatcaaccatattattgagaccaacaagcaacatagaaagcgaaatccagtagcaacaatagagccacaatggcgaccaagatattttccctccttatgctccttgctctttctacatgtgttgctaacgcgaccattttccctcaatgctcacaagctcctatagcttctcttcttcccccattccttccatcaatgatagattcagtatgtgaaaactcggctcttcaaccctataggctccaacaagcaatcgcagcaagcaatttacctttatcacccttgtttcaacaatcgccagccctatctttggtgcactcattggtgcaaaccatcggggcacgacagctgcaacaactcgtgctacctgtgattagccaagtagctctagcaaacctttctccctactctcagcaacaatagtttcttccattcaaccaattgtctacactgaaccctcctacttatttgcagcagcaacaactattaccattcagccagctagctattgtctactctcagcaacaacaacttcttccatttaaccaattggcagcactgaaccccactgcttatttgcagcatcaaatactactaccatttagccagctagctgcaccaagtcgtgcttccttcttgacacaacaacagttgctgccgttctactagcagtttgcggctaaccccgcaaccctcttacaactacaacagttgttgccctttgtccaacttgctttgacaaacccagcagcctcttaccaacaacacatcattggtggtgccctcttttagattgcttattagttgtaattcactaatgaagttttttggctaatgtatgtggcctcccagaaataagaagttacatttccatattctaatgtgatattggtctcca

SEQ ID NO: 139952 - DNA, 2820 bp, Zea Mays
cccgccagcatctccctccgagtccagggggcaggggcaccattaccgagtagtttaattagtgctagttgtattaccattgttagtgacttaattaccctcacgcgaagcaccttacctctgctagtcctcctacgtctcttctcttcgcttaatcttggtcggtgatttgattcttcacttcttgcgcgcattgcagagggtgctcggtctgcagctatcttaggttaaccagtcgtgtgtggtctatcgatttcgatatagtactactgctctgttataatcagcgggaaggaggaagatgacggtgacgccacggatcacggtgagcgacgggcggctgacggtgcgcggccgtacggtgctcaccggcgtgccggacaacgtgtcggcggcgcacgcggccggggcggggctcgtcgacggggccttcgtcggcgcccacgccggcgaggccaagagccaccacgtcttcaccttcggcacgctccgggactgccggttcctgtgcctgttccggttcaagctgtggtggatgacgcagcggatgggcgtctccggccgcgacgtccctctggagacccagttcatgctcgtcgaggtccctgccagtgacggcgacggcgacgacgcccccgcgtacgtggtgatgcttccgctgctggaggggcagtttcgggcagcgctgcaggggaacgaccgcgacgagctgcagatctgcatcgagagcggggacaaggcggtgcagacggaccaggccgcgcacatggtgtacctccacgccggcgacaaccccttcgacaccgtcaccgccgccgtcaaggcggtggagaagcacctgcagacgttccaccaccgcgacaagaagaagctgccgtcgttcctcgactggttcggctggtgcacctgggacgccttctacaccgacgtcaccgccgacggcgtcaaacacggccttcagagcctgtccaagggcggcgcgccgccgcggttcctcatcatcgacgacggctggcagcagatcgcctccgagaacaagcccgaccccaacgtcgccgtccaggagggcgcgcaattcgccagccggctgaccgggatcaaggagaacaccaagttccagaccaagcccgacggcgacggcgacggcgagcaggcgccgggcgggctgaagcgactggtggccgagaccaaggacgcgcacggcgtgaagcaggtgtacgtgtggcacgccatggccgggtactggggcggcgtgacgccgacggcggggacggcgatggagcgctacgagccggcgctggcgtaccccgtgcagtccccgggcgtgacgggcaaccagccggacatcgtcatggactcgctgtccgtcctggggctgggcctggtgcacccgcgccgggtgcgggacttctacggcgagctccacgcgtacctcgcctcctgcggcgtcgacggcgtcaaggtggacgtgcagaacatcatcgagacgctgggcgccggccacggcggccgcgtcgccatcacccgcgcctaccaccgcgcgctcgaggcctccgtggcgcgcagcttcccggacaacggctgcatctcctgcatgtgccacaactccgacatgctctacagcgccaggcagactgccgtcgtgcgcgcctccgacgacttctacccgcgcgacccggcatcgcacaccgtccacgtcgcctccgtcgcgtacaacaccgtcttcctcggcgagttcatgcagcccgattgggacatgttccatagcttgcatccggcggcggagtaccacggcgcggcgagggccatcggtggctgcccgatatacgtcagcgacaagccggggaaccacaacttcgagctgctcaggaagctcgtgctccccgacggcaccgtgctacgcgcgcagcttcccggccggcccacacgggactgcctcttctccgacccggcgcgcgacggcgcgagtttgctcaagatttggaacctgaacaagtgcggtggcgtggtgggtgtgttcaactgccagggagccgggtggtgccgcgtgaccaagcggacgcgcgtgcacgacgcgtcgccgggcacgctgaccggcaccgtgcgtgccgacgacgtcgacgccatagcgcgcgtcgctggtgacggcggcgggtgggacggcgagaccgtggtgtatgcgcaccgcacgcgggagctagtgcgactgccccggggcgtcgcgctgcctgtgacgctaggcccgctccagtatgaggtgttccatgtgtgcccgctccgcgccgtcgtgccggggttctcgttcgcgcccgtcgggctgctcgatatgttcaacgctgggggcgccgttgaggagtgcgacgtgatcagcaatgtcggcggcaaggccatggctctcagggttcgcgggtgcggtcggttcggcgcttactgctcgcgggagccggcgaggtgtctattggactcggcggaagtggagttcagctacgatgccgacaccggcctcgtgtccgtcgacctgcccgtgccggagcaggagctatatcggtggacgctggagattatggtctaggccgtgacgctgtgcgctgacgccattctgagccggacgacattgtcatttgctatgtgcacgagagatagatgtattgtggtgttgttgtataattggtatggagagagtatgcttttgttatgtctgtatctgcataccctgcgtgctttgaatgttatataatacttgatagataataaaggatggtgttcctgaatgttatataatacttgataataaaggatggtgctcttttaatacgaata

SEQ ID NO: 139953 - DNA, 2890 bp, Zea Mays
cccgccagcatctccctccgagtccagggggcaggggcaccattaccgagtagtttaattagtgctagttgtattaccattgttagtgacttaattaccctcacgcgaagcaccttacctctgctagtcctcctacgtctcttctcttcgcttaatcttggtcggtgatttgattcttcacttcttgcgcgcattgcagagggtgctcggtctgcagctatcttaggttaaccagtcgtgtgtggtctatcgatttcgatatagtactactgctctgttataatcagcgggaaggaggaagatgacggtgacgccacggatcacggtgagcgacgggcggctgacggtgcgcggccgtacggtgctcaccggcgtgccggacaacgtgtcggcggcgcacgcggccggggcggggctcgtcgacggggccttcgtcggcgcccacgccggcgaggccaagagccaccacgtcttcaccttcggcacgctccgggactgccggttcctgtgcctgttccggttcaagctgtggtggatgacgcagcggatgggcgtctccggccgcgacgtccctctggagacccagttcatgctcgtcgaggtccctgccagtgacggcgacggcgacgacgcccccgcgtacgtggtgatgcttccgctgctggaggggcagtttcgggcagcgctgcaggggaacgaccgcgacgagctgcagatctgcatcgagagcggggacaaggcggtgcagacggaccaggccgcgcacatggtgtacctccacgccggcgacaaccccttcgacaccgtcaccgccgccgtcaaggcggtggagaagcacctgcagacgttccaccaccgcgacaagaagaagctgccgtcgttcctcgactggttcggctggtgcacctgggacgccttctacaccgacgtcaccgccgacggcgtcaaacacggccttcagaggtacgcgcgctctgtccgctcttgcgtgtcagtgactcctccgtgccaacgtgccgtcctgacgcggcaactctcctctgcttttgcagcctgtccaagggcggcgcgccgccgcggttcctcatcatcgacgacggctggcagcagatcgcctccgagaacaagcccgaccccaacgtcgccgtccaggagggcgcgcaattcgccagccggctgaccgggatcaaggagaacaccaagttccagaccaagcccgacggcgacggcgacggcgagcaggcgccgggcgggctgaagcgactggtggccgagaccaaggacgcgcacggcgtgaagcaggtgtacgtgtggcacgccatggccgggtactggggcggcgtgacgccgacggcggggacggcgatggagcgctacgagccggcgctggcgtaccccgtgcagtccccgggcgtgacgggcaaccagccggacatcgtcatggactcgctgtccgtcctggggctgggcctggtgcacccgcgccgggtgcgggacttctacggcgagctccacgcgtacctcgcctcctgcggcgtcgacggcgtcaaggtggacgtgcagaacatcatcgagacgctgggcgccggccacggcggccgcgtcgccatcacccgcgcctaccaccgcgcgctcgaggcctccgtggcgcgcagcttcccggacaacggctgcatctcctgcatgtgccacaactccgacatgctctacagcgccaggcagactgccgtcgtgcgcgcctccgacgacttctacccgcgcgacccggcatcgcacaccgtccacgtcgcctccgtcgcgtacaacaccgtcttcctcggcgagttcatgcagcccgattgggacatgttccatagcttgcatccggcggcggagtaccacggcgcggcgagggccatcggtggctgcccgatatacgtcagcgacaagccggggaaccacaacttcgagctgctcaggaagctcgtgctccccgacggcaccgtgctacgcgcgcagcttcccggccggcccacacgggactgcctcttctccgacccggcgcgcgacggcgcgagtttgctcaagatttggaacctgaacaagtgcggtggcgtggtgggtgtgttcaactgccagggagccgggtggtgccgcgtgaccaagcggacgcgcgtgcacgacgcgtcgccgggcacgctgaccggcaccgtgcgtgccgacgacgtcgacgccatagcgcgcgtcgctggtgacggcggcgggtgggacggcgagaccgtggtgtatgcgcaccgcacgcgggagctagtgcgactgccccggggcgtcgcgctgcctgtgacgctaggcccgctccagtatgaggtgttccatgtgtgcccgctccgcgccgtcgtgccggggttctcgttcgcgcccgtcgggctgctcgatatgttcaacgctgggggcgccgttgaggagtgcgacgtgatcagcaatgtcggcggcaaggccatggctctcagggttcgcgggtgcggtcggttcggcgcttactgctcgcgggagccggcgaggtgtctattggactcggcggaagtggagttcagctacgatgccgacaccggcctcgtgtccgtcgacctgcccgtgccggagcaggagctatatcggtggacgctggagattatggtctaggccgtgacgctgtgcgctgacgccattctgagccggacgacattgtcatttgctatgtgcacgagagatagatgtattgtggtgttgttgtataattggtatggagagagtatgcttttgttatgtctgtatctgcataccctgcgtgctttgaatgttatataatacttgatagataataaaggatggtgttcctgaatagaaagggtccaagaaagaaaaaaaagaa

SEQ ID NO: 139954 - DNA, 2801 bp, Zea Mays
cccgccagcatctccctccgagtccagggggcaggggcaccattaccgagtagtttaattagtgctagttgtattaccattgttagtgacttaattaccctcacgcgaagcaccttacctctgctagtcctcctacgtctcttctcttcgcttaatcttggtcggtgatttgattcttcacttcttgcgcgcattgcagagggtgctcggtctgcagctatcttaggttaaccagtcgtgtgtggtctatcgatttcgatatagtactactgctctgttataatcagcgggaaggaggaagatgacggtgacgccacggatcacggtgagcgacgggcggctgacggtgcgcggccgtacggtgctcaccggcgtgccggacaacgtgtcggcggcgcacgcggccggggcggggctcgtcgacggggccttcgtcggcgcccacgccggcgaggccaagagccaccacgtcttcaccttcggcacgctccgggactgccggttcctgtgcctgttccggttcaagctgtggtggatgacgcagcggatgggcgtctccggccgcgacgtccctctggagacccagttcatgctcgtcgaggtccctgccagtgacggcgacggcgacgacgcccccgcgtacgtggtgatgcttccgctgctggaggggcagtttcgggcagcgctgcaggggaacgaccgcgacgagctgcagatctgcatcgagagcggggacaaggcggtgcagacggaccaggccgcgcacatggtgtacctccacgccggcgacaaccccttcgacaccgtcaccgccgccgtcaaggcggtggagaagcacctgcagacgttccaccaccgcgacaagaagaagctgccgtcgttcctcgactggttcggctggtgcacctgggacgccttctacaccgacgtcaccgccgacggcgtcaaacacggccttcagagcctgtccaagggcggcgcgccgccgcggttcctcatcatcgacgacggctggcagcagatcgcctccgagaacaagcccgaccccaacgtcgccgtccaggagggcgcgcaattcgccagccggctgaccgggatcaaggagaacaccaagttccagaccaagcccgacggcgacggcgacggcgagcaggcgccgggcgggctgaagcgactggtggccgagaccaaggacgcgcacggcgtgaagcaggtgtacgtgtggcacgccatggccgggtactggggcggcgtgacgccgacggcggggacggcgatggagcgctacgagccggcgctggcgtaccccgtgcagtccccgggcgtgacgggcaaccagccggacatcgtcatggactcgctgtccgtcctggggctgggcctggtgcacccgcgccgggtgcgggacttctacggcgagctccacgcgtacctcgcctcctgcggcgtcgacggcgtcaaggtggacgtgcagaacatcatcgagacgctgggcgccggccacggcggccgcgtcgccatcacccgcgcctaccaccgcgcgctcgaggcctccgtggcgcgcagcttcccggacaacggctgcatctcctgcatgtgccacaactccgacatgctctacagcgccaggcagactgccgtcgtgcgcgcctccgacgacttctacccgcgcgacccggcatcgcacaccgtccacgtcgcctccgtcgcgtacaacaccgtcttcctcggcgagttcatgcagcccgattgggacatgttccatagcttgcatccggcggcggagtaccacggcgcggcgagggccatcggtggctgcccgatatacgtcagcgacaagccggggaaccacaacttcgagctgctcaggaagctcgtgctccccgacggcaccgtgctacgcgcgcagcttcccggccggcccacacgggactgcctcttctccgacccggcgcgcgacggcgcgagtttgctcaagatttggaacctgaacaagtgcggtggcgtggtgggtgtgttcaactgccagggagccgggtggtgccgcgtgaccaagcggacgcgcgtgcacgacgcgtcgccgggcacgctgaccggcaccgtgcgtgccgacgacgtcgacgccatagcgcgcgtcgctggtgacggcggcgggtgggacggcgagaccgtggtgtatgcgcaccgcacgcgggagctagtgcgactgccccggggcgtcgcgctgcctgtgacgctaggcccgctccagtatgaggtgttccatgtgtgcccgctccgcgccgtcgtgccggggttctcgttcgcgcccgtcgggctgctcgatatgttcaacgctgggggcgccgttgaggagtgcgacgtgatcagcaatgtcggcggcaaggccatggctctcagggttcgcgggtgcggtcggttcggcgcttactgctcgcgggagccggcgaggtgtctattggactcggcggaagtggagttcagctacgatgccgacaccggcctcgtgtccgtcgacctgcccgtgccggagcaggagctatatcggtggacgctggagattatggtctaggccgtgacgctgtgcgctgacgccattctgagccggacgacattgtcatttgctatgtgcacgagagatagatgtattgtggtgttgttgtataattggtatggagagagtatgcttttgttatgtctgtatctgcataccctgcgtgctttgaatgttatataatacttgatagataataaaggatggtgttcctgaatagaaagggtccaagaaagaaaaaaaagaa

SEQ ID NO: 139955 - DNA, 2894 bp, Zea Mays
cccgccagcatctccctccgagtccagggggcaggggcaccattaccgagtagtttaattagtgctagttgtattaccattgttagtgacttaattaccctcacgcgaagcaccttacctctgctagtcctcctacgtctcttctcttcgcttaatcttggtcggtgatttgattcttcacttcttgcgcgcattgcagagggtgctcggtctgcagctatcttaggttaaccagtcgtgtgtggtctatcgatttcgatatagtactactgctctgttataatcagcgggaaggaggaagatgacggtgacgccacggatcacggtgagcgacgggcggctgacggtgcgcggccgtacggtgctcaccggcgtgccggacaacgtgtcggcggcgcacgcggccggggcggggctcgtcgacggggccttcgtcggcgcccacgccggcgaggccaagagccaccacgtcttcaccttcggcacgctccgggactgccggttcctgtgcctgttccggttcaagctgtggtggatgacgcagcggatgggcgtctccggccgcgacgtccctctggagacccagttcatgctcgtcgaggtccctgccagtgacggcgacggcgacgacgcccccgcgtacgtggtgatgcttccgctgctggaggggcagtttcgggcagcgctgcaggggaacgaccgcgacgagctgcagatctgcatcgagagcggtaatccgttccttccatgatcaccggatgagatagcagctcagctcgactcgaccgatgacgatcaccggatggtcatcctcatccctgcaggggacaaggcggtgcagacggaccaggccgcgcacatggtgtacctccacgccggcgacaaccccttcgacaccgtcaccgccgccgtcaaggcggtggagaagcacctgcagacgttccaccaccgcgacaagaagaagctgccgtcgttcctcgactggttcggctggtgcacctgggacgccttctacaccgacgtcaccgccgacggcgtcaaacacggccttcagagcctgtccaagggcggcgcgccgccgcggttcctcatcatcgacgacggctggcagcagatcgcctccgagaacaagcccgaccccaacgtcgccgtccaggagggcgcgcaattcgccagccggctgaccgggatcaaggagaacaccaagttccagaccaagcccgacggcgacggcgacggcgagcaggcgccgggcgggctgaagcgactggtggccgagaccaaggacgcgcacggcgtgaagcaggtgtacgtgtggcacgccatggccgggtactggggcggcgtgacgccgacggcggggacggcgatggagcgctacgagccggcgctggcgtaccccgtgcagtccccgggcgtgacgggcaaccagccggacatcgtcatggactcgctgtccgtcctggggctgggcctggtgcacccgcgccgggtgcgggacttctacggcgagctccacgcgtacctcgcctcctgcggcgtcgacggcgtcaaggtggacgtgcagaacatcatcgagacgctgggcgccggccacggcggccgcgtcgccatcacccgcgcctaccaccgcgcgctcgaggcctccgtggcgcgcagcttcccggacaacggctgcatctcctgcatgtgccacaactccgacatgctctacagcgccaggcagactgccgtcgtgcgcgcctccgacgacttctacccgcgcgacccggcatcgcacaccgtccacgtcgcctccgtcgcgtacaacaccgtcttcctcggcgagttcatgcagcccgattgggacatgttccatagcttgcatccggcggcggagtaccacggcgcggcgagggccatcggtggctgcccgatatacgtcagcgacaagccggggaaccacaacttcgagctgctcaggaagctcgtgctccccgacggcaccgtgctacgcgcgcagcttcccggccggcccacacgggactgcctcttctccgacccggcgcgcgacggcgcgagtttgctcaagatttggaacctgaacaagtgcggtggcgtggtgggtgtgttcaactgccagggagccgggtggtgccgcgtgaccaagcggacgcgcgtgcacgacgcgtcgccgggcacgctgaccggcaccgtgcgtgccgacgacgtcgacgccatagcgcgcgtcgctggtgacggcggcgggtgggacggcgagaccgtggtgtatgcgcaccgcacgcgggagctagtgcgactgccccggggcgtcgcgctgcctgtgacgctaggcccgctccagtatgaggtgttccatgtgtgcccgctccgcgccgtcgtgccggggttctcgttcgcgcccgtcgggctgctcgatatgttcaacgctgggggcgccgttgaggagtgcgacgtgatcagcaatgtcggcggcaaggccatggctctcagggttcgcgggtgcggtcggttcggcgcttactgctcgcgggagccggcgaggtgtctattggactcggcggaagtggagttcagctacgatgccgacaccggcctcgtgtccgtcgacctgcccgtgccggagcaggagctatatcggtggacgctggagattatggtctaggccgtgacgctgtgcgctgacgccattctgagccggacgacattgtcatttgctatgtgcacgagagatagatgtattgtggtgttgttgtataattggtatggagagagtatgcttttgttatgtctgtatctgcataccctgcgtgctttgaatgttatataatacttgatagataataaaggatggtgttcctgaatagaaagggtccaagaaagaaaaaaaagaa

SEQ ID NO: 139956 - DNA, 2666 bp, Zea Mays
catctccctccgagtccagggggcaggggcaccattaccgagtagtttaattagtgctagttgtattaccattgttagtgacttaattaccctcacgcgaagcaccttacctctgctagtcctcctacgtctcttctcttcgcttaatcttgcgggaaggaggaagatgacggtgacgccacggatcacggtgagcgacgggcggctgacggtgcgcggccgtacggtgctcaccggcgtgccggacaacgtgtcggcggcgcacgcggccggggcggggctcgtcgacggggccttcgtcggcgcccacgccggcgaggccaagagccaccacgtcttcaccttcggcacgctccgggactgccggttcctgtgcctgttccggttcaagctgtggtggatgacgcagcggatgggcgtctccggccgcgacgtccctctggagacccagttcatgctcgtcgaggtccctgccagtgacggcgacggcgacgacgcccccgcgtacgtggtgatgcttccgctgctggaggggcagtttcgggcagcgctgcaggggaacgaccgcgacgagctgcagatctgcatcgagagcggggacaaggcggtgcagacggaccaggccgcgcacatggtgtacctccacgccggcgacaaccccttcgacaccgtcaccgccgccgtcaaggcggtggagaagcacctgcagacgttccaccaccgcgacaagaagaagctgccgtcgttcctcgactggttcggctggtgcacctgggacgccttctacaccgacgtcaccgccgacggcgtcaaacacggccttcagagcctgtccaagggcggcgcgccgccgcggttcctcatcatcgacgacggctggcagcagatcgcctccgagaacaagcccgaccccaacgtcgccgtccaggagggcgcgcaattcgccagccggctgaccgggatcaaggagaacaccaagttccagaccaagcccgacggcgacggcgacggcgagcaggcgccgggcgggctgaagcgactggtggccgagaccaaggacgcgcacggcgtgaagcaggtgtacgtgtggcacgccatggccgggtactggggcggcgtgacgccgacggcggggacggcgatggagcgctacgagccggcgctggcgtaccccgtgcagtccccgggcgtgacgggcaaccagccggacatcgtcatggactcgctgtccgtcctggggctgggcctggtgcacccgcgccgggtgcgggacttctacggcgagctccacgcgtacctcgcctcctgcggcgtcgacggcgtcaaggtggacgtgcagaacatcatcgagacgctgggcgccggccacggcggccgcgtcgccatcacccgcgcctaccaccgcgcgctcgaggcctccgtggcgcgcagcttcccggacaacggctgcatctcctgcatgtgccacaactccgacatgctctacagcgccaggcagactgccgtcgtgcgcgcctccgacgacttctacccgcgcgacccggcatcgcacaccgtccacgtcgcctccgtcgcgtacaacaccgtcttcctcggcgagttcatgcagcccgattgggacatgttccatagcttgcatccggcggcggagtaccacggcgcggcgagggccatcggtggctgcccgatatacgtcagcgacaagccggggaaccacaacttcgagctgctcaggaagctcgtgctccccgacggcaccgtgctacgcgcgcagcttcccggccggcccacacgggactgcctcttctccgacccggcgcgcgacggcgcgagtttgctcaagatttggaacctgaacaagtgcggtggcgtggtgggtgtgttcaactgccagggagccgggtggtgccgcgtgaccaagcggacgcgcgtgcacgacgcgtcgccgggcacgctgaccggcaccgtgcgtgccgacgacgtcgacgccatagcgcgcgtcgctggtgacggcggcgggtgggacggcgagaccgtggtgtatgcgcaccgcacgcgggagctagtgcgactgccccggggcgtcgcgctgcctgtgacgctaggcccgctccagtatgaggtgttccatgtgtgcccgctccgcgccgtcgtgccggggttctcgttcgcgcccgtcgggctgctcgatatgttcaacgctgggggcgccgttgaggagtgcgacgtgatcagcaatgtcggcggcaaggccatggctctcagggttcgcgggtgcggtcggttcggcgcttactgctcgcgggagccggcgaggtgtctattggactcggcggaagtggagttcagctacgatgccgacaccggcctcgtgtccgtcgacctgcccgtgccggagcaggagctatatcggtggacgctggagattatggtctaggccgtgacgctgtgcgctgacgccattctgagccggacgacattgtcatttgctatgtgcacgagagatagatgtattgtggtgttgttgtataattggtatggagagagtatgcttttgttatgtctgtatctgcataccctgcgtgctttgaatgttatataatacttgatagataataaaggatggtgttcctgaatagaaagggtccaagaaagaaaaaaaagaa

SEQ ID NO: 139957 - DNA, 2675 bp, Zea Mays
catctccctccgagtccagggggcaggggcaccattaccgagtagtttaattagtgctagttgtattaccattagggtgctcggtctgcagctatcttaggttaaccagtcgtgtgtggtctatcgatttcgatatagtactactgctctgttataatcagcgggaaggaggaagatgacggtgacgccacggatcacggtgagcgacgggcggctgacggtgcgcggccgtacggtgctcaccggcgtgccggacaacgtgtcggcggcgcacgcggccggggcggggctcgtcgacggggccttcgtcggcgcccacgccggcgaggccaagagccaccacgtcttcaccttcggcacgctccgggactgccggttcctgtgcctgttccggttcaagctgtggtggatgacgcagcggatgggcgtctccggccgcgacgtccctctggagacccagttcatgctcgtcgaggtccctgccagtgacggcgacggcgacgacgcccccgcgtacgtggtgatgcttccgctgctggaggggcagtttcgggcagcgctgcaggggaacgaccgcgacgagctgcagatctgcatcgagagcggggacaaggcggtgcagacggaccaggccgcgcacatggtgtacctccacgccggcgacaaccccttcgacaccgtcaccgccgccgtcaaggcggtggagaagcacctgcagacgttccaccaccgcgacaagaagaagctgccgtcgttcctcgactggttcggctggtgcacctgggacgccttctacaccgacgtcaccgccgacggcgtcaaacacggccttcagagcctgtccaagggcggcgcgccgccgcggttcctcatcatcgacgacggctggcagcagatcgcctccgagaacaagcccgaccccaacgtcgccgtccaggagggcgcgcaattcgccagccggctgaccgggatcaaggagaacaccaagttccagaccaagcccgacggcgacggcgacggcgagcaggcgccgggcgggctgaagcgactggtggccgagaccaaggacgcgcacggcgtgaagcaggtgtacgtgtggcacgccatggccgggtactggggcggcgtgacgccgacggcggggacggcgatggagcgctacgagccggcgctggcgtaccccgtgcagtccccgggcgtgacgggcaaccagccggacatcgtcatggactcgctgtccgtcctggggctgggcctggtgcacccgcgccgggtgcgggacttctacggcgagctccacgcgtacctcgcctcctgcggcgtcgacggcgtcaaggtggacgtgcagaacatcatcgagacgctgggcgccggccacggcggccgcgtcgccatcacccgcgcctaccaccgcgcgctcgaggcctccgtggcgcgcagcttcccggacaacggctgcatctcctgcatgtgccacaactccgacatgctctacagcgccaggcagactgccgtcgtgcgcgcctccgacgacttctacccgcgcgacccggcatcgcacaccgtccacgtcgcctccgtcgcgtacaacaccgtcttcctcggcgagttcatgcagcccgattgggacatgttccatagcttgcatccggcggcggagtaccacggcgcggcgagggccatcggtggctgcccgatatacgtcagcgacaagccggggaaccacaacttcgagctgctcaggaagctcgtgctccccgacggcaccgtgctacgcgcgcagcttcccggccggcccacacgggactgcctcttctccgacccggcgcgcgacggcgcgagtttgctcaagatttggaacctgaacaagtgcggtggcgtggtgggtgtgttcaactgccagggagccgggtggtgccgcgtgaccaagcggacgcgcgtgcacgacgcgtcgccgggcacgctgaccggcaccgtgcgtgccgacgacgtcgacgccatagcgcgcgtcgctggtgacggcggcgggtgggacggcgagaccgtggtgtatgcgcaccgcacgcgggagctagtgcgactgccccggggcgtcgcgctgcctgtgacgctaggcccgctccagtatgaggtgttccatgtgtgcccgctccgcgccgtcgtgccggggttctcgttcgcgcccgtcgggctgctcgatatgttcaacgctgggggcgccgttgaggagtgcgacgtgatcagcaatgtcggcggcaaggccatggctctcagggttcgcgggtgcggtcggttcggcgcttactgctcgcgggagccggcgaggtgtctattggactcggcggaagtggagttcagctacgatgccgacaccggcctcgtgtccgtcgacctgcccgtgccggagcaggagctatatcggtggacgctggagattatggtctaggccgtgacgctgtgcgctgacgccattctgagccggacgacattgtcatttgctatgtgcacgagagatagatgtattgtggtgttgttgtataattggtatggagagagtatgcttttgttatgtctgtatctgcataccctgcgtgctttgaatgttatataatacttgatagataataaaggatggtgttcctgaatagaaagggtccaagaaagaaaaaaaagaa

SEQ ID NO: 139958 - DNA, 2689 bp, Zea Mays
catctccctccgagtccagggggcaggggcaccattaccgagtagtttaattagtgctagttgtattaccattgttagtgacttaattaccctcacgcgaagcaccttacctctgctagtcctcctacgtctcttctcttcgcttaatcttgtactactgctctgttataatcagcgggaaggaggaagatgacggtgacgccacggatcacggtgagcgacgggcggctgacggtgcgcggccgtacggtgctcaccggcgtgccggacaacgtgtcggcggcgcacgcggccggggcggggctcgtcgacggggccttcgtcggcgcccacgccggcgaggccaagagccaccacgtcttcaccttcggcacgctccgggactgccggttcctgtgcctgttccggttcaagctgtggtggatgacgcagcggatgggcgtctccggccgcgacgtccctctggagacccagttcatgctcgtcgaggtccctgccagtgacggcgacggcgacgacgcccccgcgtacgtggtgatgcttccgctgctggaggggcagtttcgggcagcgctgcaggggaacgaccgcgacgagctgcagatctgcatcgagagcggggacaaggcggtgcagacggaccaggccgcgcacatggtgtacctccacgccggcgacaaccccttcgacaccgtcaccgccgccgtcaaggcggtggagaagcacctgcagacgttccaccaccgcgacaagaagaagctgccgtcgttcctcgactggttcggctggtgcacctgggacgccttctacaccgacgtcaccgccgacggcgtcaaacacggccttcagagcctgtccaagggcggcgcgccgccgcggttcctcatcatcgacgacggctggcagcagatcgcctccgagaacaagcccgaccccaacgtcgccgtccaggagggcgcgcaattcgccagccggctgaccgggatcaaggagaacaccaagttccagaccaagcccgacggcgacggcgacggcgagcaggcgccgggcgggctgaagcgactggtggccgagaccaaggacgcgcacggcgtgaagcaggtgtacgtgtggcacgccatggccgggtactggggcggcgtgacgccgacggcggggacggcgatggagcgctacgagccggcgctggcgtaccccgtgcagtccccgggcgtgacgggcaaccagccggacatcgtcatggactcgctgtccgtcctggggctgggcctggtgcacccgcgccgggtgcgggacttctacggcgagctccacgcgtacctcgcctcctgcggcgtcgacggcgtcaaggtggacgtgcagaacatcatcgagacgctgggcgccggccacggcggccgcgtcgccatcacccgcgcctaccaccgcgcgctcgaggcctccgtggcgcgcagcttcccggacaacggctgcatctcctgcatgtgccacaactccgacatgctctacagcgccaggcagactgccgtcgtgcgcgcctccgacgacttctacccgcgcgacccggcatcgcacaccgtccacgtcgcctccgtcgcgtacaacaccgtcttcctcggcgagttcatgcagcccgattgggacatgttccatagcttgcatccggcggcggagtaccacggcgcggcgagggccatcggtggctgcccgatatacgtcagcgacaagccggggaaccacaacttcgagctgctcaggaagctcgtgctccccgacggcaccgtgctacgcgcgcagcttcccggccggcccacacgggactgcctcttctccgacccggcgcgcgacggcgcgagtttgctcaagatttggaacctgaacaagtgcggtggcgtggtgggtgtgttcaactgccagggagccgggtggtgccgcgtgaccaagcggacgcgcgtgcacgacgcgtcgccgggcacgctgaccggcaccgtgcgtgccgacgacgtcgacgccatagcgcgcgtcgctggtgacggcggcgggtgggacggcgagaccgtggtgtatgcgcaccgcacgcgggagctagtgcgactgccccggggcgtcgcgctgcctgtgacgctaggcccgctccagtatgaggtgttccatgtgtgcccgctccgcgccgtcgtgccggggttctcgttcgcgcccgtcgggctgctcgatatgttcaacgctgggggcgccgttgaggagtgcgacgtgatcagcaatgtcggcggcaaggccatggctctcagggttcgcgggtgcggtcggttcggcgcttactgctcgcgggagccggcgaggtgtctattggactcggcggaagtggagttcagctacgatgccgacaccggcctcgtgtccgtcgacctgcccgtgccggagcaggagctatatcggtggacgctggagattatggtctaggccgtgacgctgtgcgctgacgccattctgagccggacgacattgtcatttgctatgtgcacgagagatagatgtattgtggtgttgttgtataattggtatggagagagtatgcttttgttatgtctgtatctgcataccctgcgtgctttgaatgttatataatacttgatagataataaaggatggtgttcctgaatagaaagggtccaagaaagaaaaaaaagaa

SEQ ID NO: 139959 - DNA, 569 bp, Zea Mays
gaggctgttcagtgctgctgagctgttgttgtcaaaacctaagagtgttcaacgatgttagaattcaaattttaagagcattgttatcagactttttattaaaagtatatatatggttgctattgtaccaatgagttcgaaccacattgtgaagaaaactatagcagtccacggcaacgagccaatgatcccttgcaggacaatgatctgaaacgtcttcactttcatgacagatcttgttgccacccaagaatccctccagatagaaggcggaggaagaacatctttgcttgatagatgcaacctgggagacaaggataaagttcatattcagttatagcaccattccagatcccatgttggtgtaacttggctacaatacagaaacctactagaaggctctcaaataacattagagttcctaaatgtggttttgctacacaacgaatgcaaaatagttcagactaaaaagaaaaggtaatgaaacatacacaaaacatccgaccctggtttaattcctacaagaaaatgaagaatgtttaatggaataacacactttcaaggaaaaa

SEQ ID NO: 139960 - DNA, 1812 bp, Zea Mays
ctgaaccctaacaaagcaggcgcctttttgctcctccctcccttccacgcaagcgactgctgctgcttccccacaccccccggtaggctcaccgccggcgacgagcacgcgtcccaccacacccaaacccaccgccaccggtgctcgctccgcccaggaccagcgggggagcctccagatctcggcgcgccgcgcaggccagcatggcgtcgtcctccgacgagcagtccaagccgccggagccgcccgccgccgccgccgtggtcaccgccgcagcaccgccacagacgcacgccgagtgggtcgcttcgcttcaggcctactacgctgccgcggggcacccctacgcctggccggcgcagcacctcatggcggcggctgcggcgggggcgcacttcggcacgccggtgccgttccccgtctaccacccaggcgccgccgcggcgtactacgcgcacgcatccatggccgcgggcgtcccttacccgacgtgcgaagctgtccccgcggtggcgctgcccactgtgccggaagggaaagggaagggtaagggcggaggcgcgtcgcctgagaaaggcagctccggggcgccctccggcgaggacgcttctaggagcgatgacagcggcagcgatgagtcatcggagactagagatgatgacactgaccataaggattcatctgcgcccaagaagaggaaatctggtaacacatcggctgaaggtgagccgtctcaagctactgttgtgcgatatgctgcggttgagtcaccatatcccgcaaaaggaaggtctgcctcaaagcttccagtgtctgcacctgggcgtgcagcgcttcctagtgccaccccgaatctaaacattgggatggacatttggaatgcttctcctgccttggctgtgcctgcagtgcagggggaagtgagtcctgggttggcacttgcccgacgtgatggcgttactcaactggacgaacgtgaaataaagagggagaggcgaaaacaatctaacagggagtctgcaaggagatctagattacgcaagcagcaagagtgcgaggagttagcccggaaggtagctgacctaacgaccgagaacagcgctctcagagcagaacttgacaacctcaagaaggcttgtcaagacatggaagcagaaaattcacgtctgttgggtggggtggctgacgcccaggtaccaagtgtcacgaccacactgggaatgagcatcgagccgccgaagttgcagctgcagctgcagcagcatcatgatgaggagggccagctccacaagaaatctagtaataacagcaatgggaactgtgctggaggcagccacaaaccggaggctaacactactaggtgagatacagaggtggatgaggaagtgacaaagatgagatgagatgaggtgtttcttatctaaccacaacacccatcatcggtcagtgtgtgtgttttttcttagcgaagctgtcgttttagtcctcgcagcccgctggggccatgtagagtcgcccccactgcagccatgtattatttatggctcgtcgcggtgtgctttgtgtttttttgtgtgttgtgtaaaaactattgatgtaacaaaacctagagagcctagaggttttttttatgtctgctaactcctgacgagggatgtaatgtaaccggccaatttgttgcctgatcgttcgttagatgaaatgctagcaaatgtcactcgatagccttgcctgcctcgctttgctgtttatacgggttattgaaagtctggtggtgtttttatggtgtttttcatgttgtggcttgtagta

SEQ ID NO: 139961 - DNA, 1791 bp, Zea Mays
ctgaaccctaacaaagcaggcgcctttttgctcctccctcccttccacgcaagcgactgctgctgcttccccacaccccccggtaggctcaccgccggcgacgagcacgcgtcccaccacacccaaacccaccgccaccggtgctcgctccgcccaggaccagcgggggagcctccagatctcggcgcgccgcgcaggccagcatggcgtcgtcctccgacgagcagtccaagccgccggagccgcccgccgccgccgccgtggtcaccgccgcagcaccgccacagacgcacgccgagtgggtcgcttcgcttcaggcctactacgctgccgcggggcacccctacgcctggccggcgcagcacctcatggcggcggctgcggcgggggcgcacttcggcacgccggtgccgttccccgtctaccacccaggcgccgccgcggcgtactacgcgcacgcatccatggccgcgggcgtcccttacccgacgtgcgaagctgtccccgcggtggcgctgcccactgtgccggaagggaaagggaagggtaagggcggaggcgcgtcgcctgagaaaggcagctccggggcgccctccggcgaggacgcttctaggagcgatgacagcggcagcgatgagtcatcggagactagagatgatgacactgaccataaggattcatctgcgcccaagaagaggaaatctggtaacacatcggctgaaggtgagccgtctcaagctactgttgtgcgatatgctgcggttgagtcaccatatcccgcaaaaggaaggtctgcctcaaagcttccagtgtctgcacctgggcgtgcagcgcttcctagtgccaccccgaatctaaacattgggatggacatttggaatgcttctcctgccttggctgtgcctgcagtgcagggggaagtgagtcctgggttggcacttgcccgacgtgatggcgttactcaactggacgaacgtgaaataaagagggagaggcgaaaacaatctaacagggagtctgcaaggagatctagattacgcaagcagcaagagtgcgaggagttagcccggaaggtagctgacctaacgaccgagaacagcgctctcagagcagaacttgacaacctcaagaaggcttgtcaagacatggaagcagaaaattcacgtctgttggtaccaagtgtcacgaccacactgggaatgagcatcgagccgccgaagttgcagctgcagctgcagcagcatcatgatgaggagggccagctccacaagaaatctagtaataacagcaatgggaactgtgctggaggcagccacaaaccggaggctaacactactaggtgagatacagaggtggatgaggaagtgacaaagatgagatgagatgaggtgtttcttatctaaccacaacacccatcatcggtcagtgtgtgtgttttttcttagcgaagctgtcgttttagtcctcgcagcccgctggggccatgtagagtcgcccccactgcagccatgtattatttatggctcgtcgcggtgtgctttgtgtttttttgtgtgttgtgtaaaaactattgatgtaacaaaacctagagagcctagaggttttttttatgtctgctaactcctgacgagggatgtaatgtaaccggccaatttgttgcctgatcgttcgttagatgaaatgctagcaaatgtcactcgatagccttgcctgcctcgctttgctgtttatacgggttattgaaagtctggtggtgtttttatggtgtttttcatgttgtggcttgtagta

SEQ ID NO: 139962 - DNA, 1910 bp, Zea Mays
ctgaaccctaacaaagcaggcgcctttttgctcctccctcccttccacgcaagcgactgctgctgcttccccacaccccccggtaggctcaccgccggcgacgagcacgcgtcccaccacacccaaacccaccgccaccggtgctcgctccgcccaggaccagcgggggagcctccagatctcggcgcgccgcgcaggccagcatggcgtcgtcctccgacgagcagtccaagccgccggagccgcccgccgccgccgccgtggtcaccgccgcagcaccgccacagacgcacgccgagtgggtcgcttcgcttcaggcctactacgctgccgcggggcacccctacgcctggccggcgcagcacctcatggcggcggctgcggcgggggcgcacttcggcacgccggtgccgttccccgtctaccacccaggcgccgccgcggcgtactacgcgcacgcatccatggccgcgggcgtcccttacccgacgtgcgaagctgtccccgcggtggcgctgcccactgtgccggaagggaaagggaagggtaagggcggaggcgcgtcgcctgagaaaggcagctccggggcgccctccggcgaggacgcttctaggagcgatgacagcggcagcgatgagtcatcggagactagagatgatgacactgaccataaggtaccaaacaacttgctgtgccacaagggaccatttttaaattgcatgtttttcctgtaattagctggctttctgtggttcatgtttgttctcctcaggattcatctgcgcccaagaagaggaaatctggtaacacatcggctgaaggtgagccgtctcaagctactgttgtgcgatatgctgcggttgagtcaccatatcccgcaaaaggaaggtctgcctcaaagcttccagtgtctgcacctgggcgtgcagcgcttcctagtgccaccccgaatctaaacattgggatggacatttggaatgcttctcctgccttggctgtgcctgcagtgcagggggaagtgagtcctgggttggcacttgcccgacgtgatggcgttactcaactggacgaacgtgaaataaagagggagaggcgaaaacaatctaacagggagtctgcaaggagatctagattacgcaagcagcaagagtgcgaggagttagcccggaaggtagctgacctaacgaccgagaacagcgctctcagagcagaacttgacaacctcaagaaggcttgtcaagacatggaagcagaaaattcacgtctgttgggtggggtggctgacgcccaggtaccaagtgtcacgaccacactgggaatgagcatcgagccgccgaagttgcagctgcagctgcagcagcatcatgatgaggagggccagctccacaagaaatctagtaataacagcaatgggaactgtgctggaggcagccacaaaccggaggctaacactactaggtgagatacagaggtggatgaggaagtgacaaagatgagatgagatgaggtgtttcttatctaaccacaacacccatcatcggtcagtgtgtgtgttttttcttagcgaagctgtcgttttagtcctcgcagcccgctggggccatgtagagtcgcccccactgcagccatgtattatttatggctcgtcgcggtgtgctttgtgtttttttgtgtgttgtgtaaaaactattgatgtaacaaaacctagagagcctagaggttttttttatgtctgctaactcctgacgagggatgtaatgtaaccggccaatttgttgcctgatcgttcgttagatgaaatgctagcaaatgtcactcgatagccttgcctgcctcgctttgctgtttatacgggttattgaaagtctggtggtgtttttatggtgtttttcatgttgtggcttgtagta

SEQ ID NO: 139963 - DNA, 2139 bp, Zea Mays
aacccacggactaacacacgcgcacgcgtacagcaaagaaatggcgatggcgatgcagccatcttagcccccctcccctctccctaccctccatggccgtccctcctctgctgctcgtcgccgttgccgtagccgcgctctccatcctcgtcctcgtcgtcttcgccttccggcgatgcaggcggcggcggcaacgccacccgctgcaggccgcggcggtggccccgaccccggtcgctgtccaggatgaggacatagataggcctcttctttctgaaaatcagagcgatcactctagacagaatattagttttcttggaagttctgtaggagaaccttcgaagattcaaacaaataggagtaacacttcgcctagaagtcatgcaattgctgatacagggaggatttatcctgctgaatgttgtgttacacaaggagaaactcatgtaatcaatgttgaaaatgatacttctgaagagttccaattaggaagcacactaagacgtacaccgccaccaaaatggccaacacctgaccagaagcacagaagaagggtttctggagatgacaatcataatggaagtgttcctttgaaggataatacatatcatagccgcctggatttagaggttatagctggtccatctcatggaataagctgttctcggcagtcaagtagaccttctatgctcccaataactcttggaagggttcccccaagtgatttagtgttgaaggactctgaagtatcagggaaacatgctcagataaactggaatggaaagacattaaaatgggaacttgtggacatgggcagcttgaatggaactttcttgaactcccaggcggttcaccatccaagtgctgggtctaggcattggggtgaacctgctgaacttgcacatggtgatattataactctagggacttcatctaaactgtctgttcaaattttactgcaaaatcaacgagttcctgctggtgttggtatggcatccgatccaatggtggcacgtagaagtggaaagaaacttccaatggaagacataagcttttgccagtgtcctctgcagggtgttgaacattttgggctctttggaatttttgatggacacggtggggatggagctgctaaagctgtcagcaagattcttccagaacatctgggatacattttatctcatcctgaaacaaaagaacgagtgcaatcatattctgatgcttctgatgttcttagatatgcttttactttgacagaagacacaattgatcatcagtacgagggatgtacaggcacagcacttcttatttggtttgaccagaataaagattgttttgcccagtgcgctaatcttggtgactctgcatgcgtcatgagtgtcaacggcaagacgatcgatatgactgaagatcaccgggtaactagcgcgaccgaaagagctaggatagcaagaactgggcagcccctgagagacggtgaagctcgtcttagcggactaaatcttgctaggatgtttggtgacaagtttctcaaggagcaggacccgcgcttcagctcagaaccatacgtgagccaagccgttcgcatcaccaaagcgtgcacagccttcgccgtcattgctagcgacgggctctgggacgtcatcagcacgaaaagggcggtacagcttgtcgtcgagggaaaggagaggaggagctccggcgacgccacctcagcggcggccagagtagccagccgtgtgctggacgaagctcggagtctgcgaaccaaggacaacacatccgtaatattcgtagattttgacgtcctgagaagggatccctgtatctcgccagttgattgacatggcagattccggagactgcagcttcccatggatcgtcgtcttcctggctgctctattatatagctcccaagttttgttgtgttttcagtgagatgatgtggtgtaggaggcagagtgcgtgcataccgtgtaatctggtgcatgccttttagagtctcctctctctctctctctctctctctctctctctctctctctctctctctctctgtcaccctagttgatgaaccgatgatcacccatcatccaggaatggcttaacaaatctccattaactgtgaagtcattcgcc

SEQ ID NO: 139964 - DNA, 2032 bp, Zea Mays
atggcggccggcggcagcggaggcgaggccgcgcagaaggcgctgcagtcggtggcgcagagcacggggtggacgtacagcctcctctggcgcctctgcccgcgccaaggcgcgctggtctgggcggagggctactacaacggcgccatcaggacgcgcaagacgacgatgacgacagtgcgtcagccggcgggcgcggaggacgccggggacgaggagacggcgctgcgccgcagccggcagctcaaggagctctacgactcgctggcggcgggggaggccgcttacgacggtggtggaggagtcggcgacccacagcagcagcaccagcagcaggtggcggtggtgccgccgcctcgccggcccgtcgccgcgctggcgcccgaggacctgacggagacggagtggttctacctcatgtgcgcctcctactgcttccctcctgccgtcgggttgcccggggaggcgtttgtaaggagagctcatgtgtggctatgtggtgcaaacaaagctgacagcaaggtgttctcaagagcaattctcgctaggacagtagcatgcattccagtcgacgatggtgtcctggaaattggaactacagaaaaggtagaagaagacattttcttaattcaacatgttaggaacatcttcgtggatcaacatggcgcccacataatgcctaccaccctctcagggtattcaacttccaccccaaccacacagcttaatcatcagccattccagacaaaaacaggaatcagtctcaatctaggagacgagcataatagtgaaatggaagatgatgacgacggcaggattgatttagagaacaatactgaaaatgattcaacaaggcggcatttgccacaggacgccagtgtaggcaatgagctggaaacgctcaatgcagagagcagtgggccgatgctgattgctaatctgacagcgcaggatgaatattgtccgttgcatcgttttcacagtgaagacctaagcagtaaatacctacagtcatcaggggcagaagatcaagcagcagtagcggaaaacgcacactacatcaaaacggtccttacaatcctacggttcaacgcgtgccggcaaacgcaagcaggcctcctcaaacatcgccaaaacctacctggcactctccaagaactcgccattctcaaaatggaactggaagcgcaaaggaataagcagcatgttgatccctgagggcacccagcagaggatgctcaagagcgtcctgctcggtgctcctagcagcagcagtcaccggacgtcgtcctcagcacctgagacgaggggtgacgatggcgaaggcacgagccggtctcggagaggtccggtgccgtcccagacagagctgagcgccagccatgtcctcaaggagcggcggcggagggagaagctcaacgaagggttcgccatgctccggtccttggtgccgttcgtcacaaagatggacagggcgtcgatcctgggcgacacgatcgagtacgtgaagcagctacggaggcgtatccaggagctggagtcacgagctcggctggttggcagcaaccagaagacgacgatggcgcagccgccgccgcctgcagcctcaacggaggagagaggtcgtcgtcaaaccagcggcggttacctcgctcgcgcaggtacatgcagcagagcagcggaggcgagcggcaacagcaacctcggggaggagcctccggcggcggcggcgagcgacaccgacacggaggtgcaggtgtccatcatcgggagcgacgcgctgctggagctccggtgcccgcacagggaagggctcctgctccgggtcatgcaggcgttgcaccaggagctccggctggagatcacctacgtccaggcctcctcagctggcgacgtgctacttgcaaagctgcgtgcaaaggtgaaggaggtgcatggcaggagaagcagcaccactgaagtgaagagagcaattcacctcatcgtttcatcagactggaactggatatgcgagaagaatccatgtgtagca

SEQ ID NO: 139965 - DNA, 531 bp, Zea Mays
atgtctgaccaaggtgcttcgaggccgagcaggagcagtcgtcaagttcccacaaagagcagtgctgtggttgcaggaggttcctcaagtgcagctacaccgacgagtgctgctgcaaatgaaatgccatcttcaagtgttcaagctccaccatcagaaggtacagaacatgtggtcgtaaatgatgatgatgataatgtacaagttggatgcaaaaggaagctgaaatctgatgtgtggcttgaatttgaacaagtaacagttgggggtaaaatgaaagctgaatgcacttggtgtaaaaagctactagttggagatagtagagccggtactaatcacttgcgtggtcatcttagatgttgtcaatcaagacaggttaggaaaggattaaaacaaacctccttaaaactaggaaaagatgagaatggggcagtagttgttgagaagtatgtgtttgatcaggaagttgctaggaaagaacttgcactaatgatatgtgtccatgagtatcctctatccatgaatgtataa

SEQ ID NO: 139966 - DNA, 1304 bp, Zea Mays
atgtcactctacttggcgcccacggccgccgctgccaccaccaccaccaccaccctcccaaggcagctgctaccagcgccgtccatcgacctaaggcggctggaacgacgtggcatggcgctgcccctgccaccggcgccggcgccgccgccaccgctggtcagtgccaacaacaggcatgccggagcgaagcacaaggccgtggtggtgatgggcgccacggggaccggcaagtcgcggctggcggtggacctggcgctccggttcggcggcgaggtcatcaactcggacaagatccagctgcacgccggcctggacgtgaccacgaacaaggtgaccgagcaggagcgcgccggcgtgccgcaccacctgctcggggtggcgcggcccgacgaggagttcacggccgcggacttccggcgcgaggcgacccgcgccgcgcgcgccatcaccgcgcgcggccgcctgcccatcgtcgcgggagggtccaactcgtacgtggaggagctggtggacggcgaccgcgccgcgttccgcgaccgctacgactgctgcttcctctgggtggacgtgcagcgcgccgtgctgcacggctgcgtggcgcggcgcgtcgacgagatgcgcgcccgcggcctggtggacgaggtcgcggcggccttcgacccgcgccgcaacgactactcgcgcggcctctggcgcgccattggcgcgcccgagctcgacgcgtacctgcggtggccgggaccgggtgtagacggcgacgcggaaagcgagggcgagcgcgaccggctgctggccgccgccatcgaggacatcaagtccaacacccgccgcctgtcgtgccggcagcgcgccaagatccagcgcctggccaagatgtggggcgtccggcgcgtcgacgccaccgaggtcttccggaggcgcggcgacgaggccgacgaggcctggcagcggctcgtcgccgcgccgtgcatcgacgccgtgcgctccttcctacgaaccgacgacgccgcggcgaccgtcgccagtgacctggcggtggacggagtcgtgcccgtgttcgctcccgcgccggctgcggccgtagcaggataacggacgacgaagctcctccatgagcgcgttgacagctgcactgcattcacgaatagccattatgtataaggacaccattacttggtgcgatggctgcgatcgtcgtcaagaaggaaaaagggagtggtcgagaagcgaggggaatgacgagcatgattatagtagtatctacgtcggaacttgcatgggactcagtcgcacaaagagat

SEQ ID NO: 139967 - DNA, 434 bp, Zea Mays
ctactaggtcagtcaaagcacaagcaaaccagcaatctctcttccattcacctctgttctcttgcgagttgtggtgattccattacacggcacctaaatgtatggttggcttcttagcatcacggcatcctcaatgatcaggtccctgttcagacttcggagcacacaaatttgttgcagtctcagcctcttgcaggtgcatagaacaccagagctcctacagctttatttaggaggtgaactgactctttacacagaagtagcatgtagttaccaggaggtgaattgactccttccacagaacagaaggccacatattctggacgcaaatctgttatgattgtagatttgtctcatttcgtgaactgcaatgcctctaaagttgctagatttgcaagttccgaaatttcattgaatttcccatccctcatcaa

SEQ ID NO: 139968 - DNA, 1778 bp, Zea Mays
ttgccctcctctctttcttcctccccgctccccaccccctcaaacccgaaaggaaccctaatcctagccgcacgcgggaggcagctaagagagcttgaagcaccagccatggcggaccacgacctcacggcgctgatggcggcgcagctggaccggcacctggtcttcccgctgctggagttcctccaggagcggcagctctactcgaggccggagatcctggaggccaagatccgcctcctcagcggcaccaacatggtcgactacgccatggacatccacaagtccctccacggcaccgatgacgttcccgaggacatggtcaagcgccgctccgaggtcgtctccaggctcaggtcgctcgacgaggccgcagccccgctcgtcgccttcctccagaacccgcagctcgtgcaggagctcaggcccgacaaacagtacaacatccacatgctccaggagagataccagattggtcctgaccagattgaagctctgtatcagtatgccaaatttcagtttgagtgtggtaactactcctgggctgctgagtacctgtaccagtatcgtgctttgtgcacagatactgagcgaagtgtgagtgccctctggggaaagctagcagcagaaatcctaatgcagaactgggatgtggctttggaggaattcaaccgcttgaaggaaataattgattcaaagaacttctcatcacctctgaatcagctccagaacaggatatggctgatgcattgggctctgttcatcttctttaaccatgaaaatggtagaaatgggatcattgatctgttcttccaggacaggtacttgaatgctatacagacaaatgctcaccatcttctgagatacctagctactgcagttgttgttaacaaaaggagaaggaatatgcttaaagagttgattaaggtcattcagcaggagcagcatagctacaaggatcccataactgagtttctgcaatgcttatatgtcaactatgattttgatggtgctcaacagaaactcgtggagtgtgagcaggttatactgaatgatcctttcctgggcaagcgcgttgaagagggaaattttgtcactgttcctttgagagctgagttccttgaaaatgcccgactgtttattttcgagacatactgccgtatccatcggtgcattgatatcagcatgcttgctcagaggctgaacatgagctacgatgaggccgagttgtggataatgaacttggttaggagctcaaaactggatgcaaggatcgattcagtgtcaggaactcttatcatgacaaccaatcacatcaatgtgcatgagcagattatcgagagcatgaagggccttaacatgcggacgtacatgctcgcaaagaacatcgtggagccagctcagcaggcagctcggtaaggttagcggagtacagttttgaggcgccaacaactagtttagaggtagaggtctattgtgtggcagtgaattcgtcaccgggattgaacacatgggactgggaggtggcttgccgtttggtacagcttagtatgctgacattttcaatattttgtactcggaatttcgtaacagtttatccttctcaatgtatattactattaatgcctgtttggatcacattaattgaaacaaatatctagaaattgtttctcattttattattaggttacttttcaactcctgagaaccaatcagggcattaatgtaatgaatgatgatgctacaggatccttctcttctaggcattgtgttttctc

SEQ ID NO: 139969 - DNA, 205 bp, Zea Mays
ggagctatggtttcgtcaccgggattgtgtggcagtgaattcgtcaccgggattgaacacatgggactgggaggtggcttgccgtttggtacagcttagtatgctgacattttcaatattttgtactcggaatttcgtaacagtttatccttctcaatgtatattattactattaatgcctgtttggatcacattaattgaaaca

SEQ ID NO: 139970 - DNA, 1247 bp, Zea Mays
aaaaagaaaagagagggagaggaagcgagcggctgggcgccccaagccccacatggtgcagcgaggtccacgctaacaacttctcgaccttggcctcccacggctctgccgcattgccgcgcgccgccggccggcactcgccgtcctgacgcgagaaggaagatgctctaggaagttgggggcctggctagggacagcctgtgtcccgccgtgggatcggtgggagagggggaggcaggcatgtgtgatctggtggcccgcacgggccggcacctgcagcgctacgagaacggccgtcgccttgtggccgggtgcataccattcagatatagggatattaatgatggagcttctgatgatgaacaaaagaaacttgttgaagttctcatgatcagctcccaaagtggaccgggtcttctatttccaaagggaggctgggagaatgatgaaactgttgaagaggcagctgcaagggaagctatcgaagaagctggagtgcgaggagatttagtgcaactgctggggttctacgatttcaagagcaagcagcccgaagcaacgtgcagagccgcaatcttcgccctgcacgtgaaggaagagctagcctcctggccagaacagagcacccggcagaggagctggctcaccgttcccgaggcggcggagcggagccgctacccgtggatgcaggaggccctcgtgacaggcttctccgcctggctcgagaactggagaaacggtggtggcggcggcggcggctgcgtggaccgaactgagagatgacaccaccttaaagcatcaggggggcccccggcggagaagccatctgctagctatttcttggcgttgtatcttgcttggactagaattttcttccagaggctgactgcctggcatacatgcatgagggctctctgatgctcggtagcttttgtttactttgtcgctttattacaccgtcgtcttcaggatgacagtctcctcagctgatgatggcccgaggtttgttaaattgtaagcttgctgattctcgcggtcgccagctatatttaactgtcttgtattgagccttgagacaaagcaagctttgtgtatatcatgtgtcgtcgtcgtcgtggtgtactggtgtttgcctttttttgaagagttactggtgtttgccttgctatggaagtgcaacgggagtcctcttgttgtcacagtcgcaacttctctgcctttttaccctcggaaagatgctcttgcga

SEQ ID NO: 139971 - DNA, 351 bp, Zea Mays
atgccggccagcgtcacggcgcggtccgacacgcagttgaagaccctgccggccgccgcgccgggcttctccacggccagcgacagcatgctggacaggtcccggacgtgcgccacgttggtcagctgcatcccgttccccgggatcggcaccggccggttccgcacgatcctgtcgaagaaccactcctcgcagtccttgttgttgccggagccgatcatgtactgcggccggaacgacgcccagcagctgccgaactgctccgcgatgtacttctccacgcccacgtggccggcgctctccttcacggcgtccccctccacgtgcggcggctcctccgtcggcttatag

SEQ ID NO: 139972 - DNA, 1248 bp, Zea Mays
atggtgcacgttctgccgccccgcaaccgcccgcagccccaccctccccgcattccgccggcagcctcgcatcccgcagccgccctccttccgagttccatcgtccgtgcagccccgcagccgcgctccgcctacactcaccttccatcctcgcggaacccccaacgctcaccttccatcctcgtgcaccttccatcctcgcggatcccgagctccctccgcgcccgcccacggatccccaacgacgtcgacgtcgtgggggagcagcgcgtttatggcgcgcgtgttgagggcatggagagggtgcgcgaccgccatcaacgctctcctacccatctgctccgcgatccccgccattgttgcatcagatgcagaaggaggctatggcgccgcagcacgctccgcctgacttctcgcatcgaggttgcggcggcgggaggaagcggtagcgcgaggcagaccccgtgtcctggcagctcttgtcgttgcagcggcagcagcatcaactgcaggcgacttggacgaggcagcaacaacaaccaagcgcaggggcccaagttcatcaacctggcgcaactacacaagcggccgacgacgggcctccggctcgaattggacgagggctcggagcacgtgccgtgcacggccccttcctcggcagccttgcccctcgcctgctgcagctgcgcgtggagcgtcgcgctgagtaggtcggcttccatgcgccccagatctcagtcctcgcccaccctgcgccccggatctcggtcctcgcccaccctctccatggaaggggatcgaggaatccgcgtccgctatggagagcagcatgcggcggattcaggaatccaggggctggccttctccatatccgtcaccaccacagttcttccttgttttacatatattatgataattggtaacgaactatatgggggcaaagctggagatgactcctcaaattatgtacccagcagctggacttggctgactgtcgtcatgacacttgctcccaggtgcatgaattgtgagctccaatcaagggtgggcatgttacgagcatcaagggatatgatccggtgttttgcatccatgttttctccgtttgaagaatctgtacgcgtccacacccctgttctggtggctttagtttgtacaaccctgacccatacttattgcgaggatgcgtatagcttgcttcagaacttagacataaagaaacttctgatattcaaccacagatggtga

SEQ ID NO: 139973 - DNA, 2229 bp, Zea Mays
atggggtgcgggccatccaaggaggacgcggagggcggcgccgagtcgcgctgccgggagcggaagcacctgctgagcgccgccgtccacgcgcgccacgcgctcgcgggcgcgcacgccggccacaccgccgcgctcaagaacgtcggagccgcgctctccgactacgccgcgggcgagaccgaccgccacgacgccgtcctggtgccgcgctccgcctccgccgcggccgcgctcagcgccgggcagggctcggcggccacggtggtcaaggcgctgccgtccccgctcgacgccttgctcccgccgccgccgcccccgggtgccggcgacggcgacggtgacgacggcgggcacacgacgctgcacaggtccatgagcgcgcccgacatccagctccagccgcccatccggaagggccgctccggggaggcgcccatcatggaggaggacggcgagggcgacgcccccggggacgacgcggggcggcgacgggaggacgacgacccgcagctccagcctcctcctcccccaccgccgccggcgaacaatcccccgccctcgcgctccccgccgcctgtcccggctgcgaaggccaacctggagcgggcgacggcagaggggaattcgtggaaggactacctgttcggctcccccgacgccatgcccggcccgccgcccacgctggaccccagcgccagcgccgccgccgagtcgtcgtgggcggccgagcggaggatgcccgcgcctccgcctccgccgcccgaatccgaccaacagcctacgaagcagccgcagccagtgccttccgccgaggagatcgccgagggaaagaagcccgcggctgagctcgtcacgcgccgggctaggaagccggagggcaagaagggcagggtcgtcatggtgacgccccagccggcgaggctgggcgacatcctgcgcaggctcgacgatgaattcctcaaggcatcccagggcgcgcacgaggtgtccaagatgttggaggcagcaaggatgcattatcactccaatttcgccgagacgcgaggatttgtggatcattctgcaagagtgatgcaagccatcacttggaatcgctcatttaaagggatccctccaccagaaaatgtgaagaatgagttggctgatgatgaatgggaaacacatgctaccgtactcgataagttgcttgcatgggagaaaaaactatgccatgaagtgaaggaattcgaggttatcaaagtgacatatcaacgaaagctggctgttcttaacaaaaaaaagcaaagtggtgctagttcttcatcagttgagaaaacaaagtccattgttagtcacttgcacacaaaatatatagttgatttacagacaatggagtcaacaattgcagaaattgatcgtctaagagatcaacagctttacccaaaactccttgaactggtgaagggattcgcacacatgtgggatgtcatgtacgctcgtcacaaagcgcagctcaagatcattacagagcttaaagcgtccgatatctcggttgctacacgggaaacaagtgagcaacaccatgagcgaactttgcagctgtggaacgttgttcaggagtggcatgtacagtttgacaggttcatgacatatcagaaggagtacataggaagcctctacaactggatcaagctaaatgtgatccctattgataccaacattaagcctaattcgtcacagccacatgaggccacacctccaatcaagaggttgctgcatgcttggcatgatatccttgagaagctccctgataatgaaacaaagaaggctatacacacatttgcagaagtggtgaacacaatcctagttcaccaggatgatgaactgaagttgaggttaaagattgatgatattaggagggaccttgagaagaagaggaagcagttcgatagttgggcgcagaaaaattgggacagaggagcaagtattcctgatggcgacaatcccgggcgtgttgatcctgcagctgagcggaaagccgtcgtggatagggtggagaatgcactgaaggacctggaagataattataggacccaatgcaaggtagtcagggataaatccctcaatcttctgcggtcaaacctgccggagctgttccgtgctgtgtcggaattctccctccagtctgcgggttatttcaagggcttgtggtcgatcgcgcaaaccaatgaccagctggatgattga

SEQ ID NO: 139974 - DNA, 719 bp, Zea Mays
ccatatctccaattgtgccctgccattcacgccgccgccaatagcaggttgtagagcaggtggtggttagggaggagtcgaatataggtgacccgttcatctttgagacgtagcgccacaatggcataagggagctttgccctgcgaatggaggagcacaagataatccgtgcccgtgctctcacccccctgcataaacccaattctgttacgatgaggttcattttcgagctcaaaggtactctaattacttatctgaactttctcaagttcacaattcgaaaattggaaattgtaggctgtttcctgtatttttccctttctaagtcaaatcatccaatttgaggatcactcaatctttcttgtcgatgcttgtctaggctcatgggtcttatgtccagaaacttagctggtctccaaaactcccatctaaccgaccatttgcaggtttctgtcctgataatgcaatggttgttgacagatacactacaatccttggggctccatttaaatttgaaattccactttttattgtacagaaagtaccacctaataatgtccacagttttgtacatcccattttttctactatggtccaaggtggtaatataaaattattcagaaatctgcttcaaaaacaactaatcacttctgttttcagagattcacaatctcagacttagccattttttctgttagactgcagatagttcagaaat

SEQ ID NO: 139975 - DNA, 2234 bp, Zea Mays
atggacgtcggcctcgcttccgcggtcaccgcgctccggacctgcaccgatgtcgcgcacctcgcgcatgtgctcgagcagtttcgcctcgcccgatgcggcaagctcgtccgggacgctcgcgccgtcgctccgtcaagggcctctgcttcgacctcttcatcattaggggtggaattagagctttcaatgcatgccggaggaccggggtctcgaatttccaacatttggcttcttttcaggttgaagactgtttctgtgagattgtcgcgagatgacagtctccggccatgccaagcactgctgtctcggtattcagaaactgttgtccctttgattcggaggttttgctcgacgcccattaaggttgaggaggtcgccaacatcgaagctgatggaaaggtctcatatctggatgccgctgctctgccctgcgacaactctgactgtcgtggtgagcccagtcatggcagcaggccatggacgaaacggttgaagcattatggaccttctcagaagggaaaccgtaaccatcatgaaacgaaactgccaggcagtggcagggatggatcttctaggaagggcagccaccctcagaagggtaaaacgaaactgccaggcagtgggagggatggatcttctcggaaaggtagccaccatgaaacaaaattggcagacagggatgaacttattcagaagggaagtcatcatgaaaaggaattggcagacacacccttcaaaccttttcttttccagattgtattggatacttctatgagttctcttatgcctgtacttgacggatgggtgaaaatcggtaatcgtctggaaagagataaagtcaatatggttttgttccatctgaggaagcagagaatgtataacaaggctctgaagtttgtggagtggatcgaaagaagaaaactattaaattttgaagaacgtgattatgctagccatctggatttgatagcacggaactatggtgttgaagctgcccaaaagtacatcgagagggtcccagaagccttcaggagtgaggtgctttatgaaactctgcttgttaactgtgtatgccgtgatgatgcccagaaggcagagcaagtcttcaatgaaataagggaactctctttgcctttaactatctctgcttgcaaccaaatgttattgctgtacaagagggtttctcgaaataaggtggttgacattctcacattgatggaaaaggaaaatataaagtattctatattcacctacaagctcatgattgacttaaaagtgcgatcaaatgacatattaggcatggaacaagtcttaaattctatgaaagaaaatggtcttgagccaaattttaccatccagactatggttgctaaattctacatatctgggtgctttacagagaaagcagaagaggttatcaatgctatggaggtacatgtaaaggctaatcgtcatgccgtcaggtctcttcttgacctctatgctattcttggaaggccagttgatgtagagagagtatggaacttgtgcgctgaaccaaagttggaggactttttggctgcaattaaggcatggagtaaacttggacatatcgaaagagcggaagagatctttgacgtgttggtaaagacgtttccgaaactcacttccaagtactttaatgctatgttggaggtgtatgcggaaaataaacttctggacaaaagcaaaaagtttatagaaaggatgtgtttggatgggtgtacaatcggccctcttacctgggatgcagttgtcaagctttatgtgaatttaggcgagttgtcaaaggccgactcgtttctgatgaatgtcacagaagataatcctgacagacatccccttttcagctcatatgtaatcttactaaaggcatacgcagaaaagggcgatatccataacgcggagaagatatttgatagggtaaagcagaccaacttccctgcaagaactctgccctataatttgttacttgcagcttatgccagtgcccaggttacaccctatgggttcagagagaggatgaaagctgacaagttcagcccgggcaagagtcagatcgaacaactgaagcaactcgacagcttgtagaaagcaggcaaatccagattgattttcttccttttcaccccttcaccgtgaccacatggaacattttccttgcaaagcagttagactggaatagaagaatctaccaggatgcatttgttctt

SEQ ID NO: 139976 - DNA, 807 bp, Zea Mays
gactctgagataggaggtgggattgcagagtcacgcgtcagttcgttccctcctctgtgtaccggccagtaaaatccgaacccacagcgagaaatggcggcggcagcgctccgtccggcgatcctccgccgcatccgcctctccccctccccttcgctcgccctcgccgccgctgggacaggtgcatcccacccgcacgcgctggggcggtggctcgcgcggcccatgtcctcccacgacgcgcacctcacccgcgacgaagtcatcgaccggatcctcgacgtcatcaagagccaccccaagatcgacccctccaaggtaaccgaaccctccacccaatcccgcatcacgatggcgtcgagccccacaaatcctactaaccctaggctgtggccgcgggcggcggcaggtgaccccggaggcgcacttcgagaaggatctggggctcgacagcctggacaccgtcgaggtggtcatggccatcgaggaggagttcaagctcgagatcccagacatggaggctgacaagatcgactcactccctctggccatcgagtacgtcgccaaccaccccatggctggctgagcctctgctcgcccgagaggaggcgagttgaggtgaggcttcgcttggttttgtttccgagggcaaataatctgctggagtggcacagaaaaacttgttcctggtgctctgcattgcttcacggtgacggatgatgatgtcgaaatggaacattaacattttcagcgttagattgttgtttttgtgtgcgtgttatatctatatatactggttgacaaact

SEQ ID NO: 139977 - DNA, 1030 bp, Zea Mays
gactctgagataggaggtgggattgcagagtcacgcgtcagttcgttccctcctctgtgtaccggccagtaaaatccgaacccacagcgagaaatggcggcggcagcgctccgtccggcgatcctccgccgcatccgcctctccccctccccttcgctcgccctcgccgccgctgggacaggtgcatcccacccgcacgcgctggggcggtggctcgcgcggcccatgtcctcccacgacgcgcacctcacccgcgacgaagtcatcgaccggatcctcgacgtcatcaagagccaccccaagatcgacccctccaaggtgaccccggaggcgcacttcgagaaggatctggggctcgacagcctggacaccgtcgaggtggtcatggccatcgaggaggagttcaagctcgagatcccagacatggaggctgacaagatcgactcactccctctggccatcgagtacgtcgccaaccaccccatggctggctgagcctctgctcgcccgagaggaggcgagttgaggtgaggcttcgcttggttttgtttccgagggcaaataatctgctggagtggcacagaaaaacttgttcctggtgctctgcattgcttcacggtgacggatgatgatgtcgaaatggaacattaacattttcagcgttagattgttgtttttgtgtgcgtgttatatctatatatactggttgacaaactagtttggttgattgagtctgatcgttgttgggttatttgaattgggttcgtgatagtttcccatgatattttatctgttttccatgtgcttttgggaacctaaattgataagaacggcttacaaggattgatgtaggttaaaagtctcagggttcatgacagctgttagtgtggcctcttgttgtccaactcttgttcctgttaatgaggcttgagtctgttttatttgtcaacattatggttttgttggttggaagtattccacctattgcatgagaagagatcaaaggaaagtgtggcctcttgttctaaca

SEQ ID NO: 139978 - DNA, 1162 bp, Zea Mays
ctcgccagtgcccaccccgccagccggcacgaagcgcggcgttaatatctcccctcccttccctcttctggtctccgccccgctccttgcctccgatccccaattcctccttcggatctcgcattcagcgcagcgcaggtgtgaaggaagggggacgcggaggaagatggggctcgcgttcgggaagctcttcagccggctcttcgccaagaaggagatgcggatcctcatggtcggcctcgacgccgccggtaaaaccaccatcctctacaagctcaagctcggcgagatcgtcaccaccatccccaccatcggtttcaatgttgaaactgttgagtacaagaacattagcttcactgtctgggatgtcgggggtcaggacaagatcagacctctttggaggcattacttccagaacacccagggtcttatctttgttgtggacagcaatgaccgtgaccgtgttgttgaagccagagatgagctccacaggatgctgaacgaggatgagctacgtgatgctgtgctgcttgtttttgccaacaagcaagatcttcccaatgccatgaatgctgctgagattactgacaagcttggattacactccctgcgccagcgacactggtacatccagagcacttgtgccacaactggcgagggtctgtatgaaggcctggactggctgtccagcaacattgcgagcaaggcttgaggcctaccttgaatgtcaaccgcgaactgactaggagctccggatgtatcatggaaactcaggacagaatcgcagttgcaacctgttagatgtcttctaccggcactatatatattttttgtttgatgtgtaatgatgttactgttcaacgtttattaccctactatactgttggatgttctttggacctgtttcatttcgcacaaggattggacttccaatatcatgctacattttacattcgtggtaaatacctgattagaaagttagccgaggagatccaatgtcatggtacatggaaatccagattaggttaaacattcttaagtatacagaagactggtaccctagccaccactttttttagcagttgtgtttttttcatttgtctagaattctcaatcctggtgaagcggtgtcattttgatttgattgtaagctttagttgaa

SEQ ID NO: 139979 - DNA, 671 bp, Zea Mays
aaattctggctttacaagattccatagagtaaccaaacacatataccatcagacgactgggctggaccaagaagaaatccagtagcacactagacactagcagtaacgccaagaaagaatggcgtgctgcaccaccaccagccgtctcgtcctctcggcggccgccgccctgctcgccgtggccggcggcgccgcggaagccccgagctactgcgcgccggggcaggccatcccgtaccgtccgctgtccggctgcacctggtacgttgcgagccggagctgcgacgtgatcgaggccatgctcccgaaccgggccgtcctcaaggagacgtgctgcagccagctgcgggacatcccggcggagtgccggtgccgggcgctgcgggtgatgatggagacgcccctcgtcgtgggcgcggagccgggggcccagcagaggtgccgggtcgcgcaggcccgcttcgcccccgccctcgtcgccgcggccgagtgcggcttgctcaccgcccacggcaggcgcttctgcaacgcgctcgacgccgagtgatgcggtgaccatggtgatgatactgctccccgtaccgtgcgtggtcgaataagaagggcgtatattattcatggatctatactaatctattaagattctaatatcaccgtccagacctcccaca

SEQ ID NO: 139980 - DNA, 702 bp, Zea Mays
cgttcacactcaactccctcgattagtaataacaggaaaaccatccgccggaggccggagggcagattctccaccaccgcctccaccccgccctcacgacgcgaatctgcggcgaacccccctctcgtattccttctcgccgccctgccccgagcgcaccgtttagaggccgccaggctccggcacccccgcccgcccgggctcgcctggggtcgggatgccctgctgcccgccgtcgctgctcggagtcggcccacggctgcgctccttcctccgcgactacgacgcgctccagtccctcgccctcgtactcatctacctccagattggttgtgcactgatcggatcacttggggcattgttcaatggggttcttgtgatcaacctggtgattggtctatttgctgttgttgcaattgagagcagtagccagagacttggtcggacatatgctgtccttctcttctttgctgtcgtccttgacgttgcttggtttatactcttctcacatgctatctggtatgtcttcggcagccaccatctttcagcttatttaccccagttttttttttcatttggtacattgtgaatctggcacctagaaatggatgtgataatctctatacttgtatggttataattgactgattttttgagtgggtttatttattcatctttcaccatagcataattatttttttt

SEQ ID NO: 139981 - DNA, 1342 bp, Zea Mays
cgttcacactcaactccctcgattagtaataacaggaaaaccatccgccggaggccggagggcagattctccaccaccgcctccaccccgccctcacgacgcgaatctgcggcgaacccccctctcgtattccttctcgccgccctgccccgagcgcaccgtttagaggccgccaggctccggcacccccgcccgcccgggctcgcctggggtcgggatgccctgctgcccgccgtcgctgctcggagtcggcccacggctgcgctccttcctccgcgactacgacgcgctccagtccctcgccctcgtactcatctacctccagattggttgtgcactgatcggatcacttggggcattgttcaatggggttcttgtgatcaacctggtgattggtctatttgctgttgttgcaattgagagcagtagccagagacttggtcggacatatgctgtccttctcttctttgctgtcgtccttgacgttgcttggtttatactcttctcacatgctatctggactattaatcctgatgataagtatggtcaactgtttgttttctcactcagacttgcattgtggatgcaaatcattgggttttcagtcagatgatatattagggggttcaatctatgatccttcttactactcgtcactgttcgaggatgttcgaaacaatgcatgcaatcatcagggtgataaacaaagtggtagtaatgacagtggttcaacatccgcgggccagtcaccacgacttaaatcttttgcttgtagatctcttctggctaatgatgtggaaagtggactaagaagaccgttgaactcctaggataaaacagcgggctcatgttgaagttcatttctcggaccagtgggagggggctgtccagcgaaaggagcttggcaaatactgtaactgtgacttcatgtgggcatccacagcagtcttggcgccattttggagcaccgttcgtactcagcgagctttgagttaagccggatgtttctgcaaagagctgttcaatgttggtgttgcatatcggtttatgtcatgcgatatgtttactgctcatcacggtccaatttttctgacctgccttcctgtttcttttagctaccaaggaaaatgaagcaggtagttcattagttatttagtaaattggctattttttttctagccgtagcttgccagctgcttctcttcgagcattttggtcattgttcatagtgctgtcatgacaaggagcacatctctagatcagtaaaggaaagaaatgtaaatctcattcgtttctggaaagaggtgaaatgcatgagactcgtttaaaacgttgcagggtt

SEQ ID NO: 139982 - DNA, 1488 bp, Zea Mays
cgttcacactcaactccctcgattagtaataacaggaaaaccatccgccggaggccggagggcagattctccaccaccgcctccaccccgccctcacgacgcgaatctgcggcgaacccccctctcgtattccttctcgccgccctgccccgagcgcaccgtttagaggccgccaggctccggcacccccgcccgcccgggctcgcctggggtcgggatgccctgctgcccgccgtcgctgctcggagtcggcccacggctgcgctccttcctccgcgactacgacgcgctccagtccctcgccctcgtactcatctacctccagattggttgtgcactgatcggatcacttggggcattgttcaatggggttcttgtgatcaacctggtgattggtctatttgctgttgttgcaattgagagcagtagccagagacttggtcggacatatgctgtccttctcttctttgctgtcgtccttgacgttgcttggtttatactcttctcacatgctatctggactattaatcctgatgataagtatggtcaactgtttgttttctcactcagacttgcattgtggatgcaaatcattgggttttcagtcaggtttttgtcttcgttcttatggattcagatgtatagattagggccttctttcaccacgccaacatattttgaaaccaaccatgaagcaagaactagtttcttgagccctagatctgattcagttagacggaattccatggcagatgatatattagggggttcaatctatgatccttcttactactcgtcactgttcgaggatgttcgaaacaatgcatgcaatcatcagggtgataaacaaagtggtagtaatgacagtggttcaacatccgcgggccagtcaccacgacttaaatcttttgcttgtagatctcttctggctaatgatgtggaaagtggactaagaagaccgttgaactcctaggataaaacagcgggctcatgttgaagcagttcatttctcggaccagtgggagggggctgtccagcgaaaggagcttggcaaatactgtaactgtgacttcatgtgggcatccacagcagtcttggcgccattttggagcaccgttcgtactcagcgagctttgagttaagccggatgtttctgcaaagagctgttcaatgttggtgttgcatatcggtttatgtcatgcgatatgtttactgctcatcacggtccaatttttctgacctgccttcctgtttcttttagctaccaaggaaaatgaagcaggtagttcattagttatttagtaaattggctattttttttctagccgtagcttgccagctgcttctcttcgagcattttggtcattgttcatagtgctgtcatgacaaggagcacatctctagatcagtaaaggaaagaaatgtaaatctcattcgtttctggaaagaggtgaaatgcatgagactcgtttaaaacgttgcagggtt

SEQ ID NO: 139983 - DNA, 1567 bp, Zea Mays
cgttcacactcaactccctcgattagtaataacaggaaaaccatccgccggaggccggagggcagattctccaccaccgcctccaccccgccctcacgacgcgaatctgcggcgaacccccctctcgtattccttctcgccgccctgccccgagcgcaccgtttagaggccgccaggctccggcacccccgcccgcccgggctcgcctggggtcgggatgccctgctgcccgccgtcgctgctcggagtcggcccacggctgcgctccttcctccgcgactacgacgcgctccagtccctcgccctcgtactcatctacctccagattggttgtgcactgatcggatcacttggggcattgttcaatggggttcttgtgatcaacctggtgattggtctatttgctgttgttgcaattgagagcagtagccagagacttggtcggacatatgctgtccttctcttctttgctgtcgtccttgacgttgcttggtttatactcttctcacatgctatctggactattaatcctgatgataagtatggtcaactgtttgttttctcactcagacttgcattgtggatgcaaatcattgggttttcagtcaggtttttgtcttcgttcttatggattcagatgtatagattagggccttctttcaccacgccaacatattttgaaaccaaccatgaagcaagaactagtttcttgagccctagatctgattcagttagacggaattccatggcagatgatatattagggggttcaatctatgatccttcttactactcgtcactgttcgaggatgttcgaaacaatgcatgcaatcatcagggtgataaacaaagtggtagtaatgacagtggttcaacatccgcgggccagtcaccacgacttaaatcttttgcttgtagatctcttctggctaatgatgtggaaagtggactaagaagaccgttgaactcctaggataaaacagcgggctcatgttgaaggtggaccatattttggtaacctaaatcctgtagccatctttctcttaaacatagaggcttacacaccgcagcagttcatttctcggaccagtgggagggggctgtccagcgaaaggagcttggcaaatactgtaactgtgacttcatgtgggcatccacagcagtcttggcgccattttggagcaccgttcgtactcagcgagctttgagttaagccggatgtttctgcaaagagctgttcaatgttggtgttgcatatcggtttatgtcatgcgatatgtttactgctcatcacggtccaatttttctgacctgccttcctgtttcttttagctaccaaggaaaatgaagcaggtagttcattagttatttagtaaattggctattttttttctagccgtagcttgccagctgcttctcttcgagcattttggtcattgttcatagtgctgtcatgacaaggagcacatctctagatcagtaaaggaaagaaatgtaaatctcattcgtttctggaaagaggtgaaatgcatgagactcgtttaaaacgttgcagggttatcacatg

SEQ ID NO: 139984 - DNA, 2571 bp, Zea Mays
atggctcagcaaatggcttcagttcatttgaatgatacaacagttgttgatgccaagcccttgcgtacattgactcccatgttccctgcaccactagggcttcacacgttcactcctcagaactcaccttcagttgtttgtgtgaccccatttggaccatatggtggagggactgaattggggatgcctgctgttccaccaatgtttgcagcgcctgtacctgctgcaggagcagaacccagccagagacagccgcatacagctaatatgaacggaggagacactgaattggggatgcctgctgttccaccaatgtttgcagcgcctgcacctgctgcaggagcagaacccaaccagggacagccacatacagctaatatgaacggaactgcagtcaacagttcggtcacatctttgcaaactccttcagctgccacacaggaatctggtaagaggaagaggggcaggccaaagcgtgtgcctgatactactgtttcttcggctccttcagctcctctggctcctactatttctccagttccttcacttcctgtggttactccagttccttcagctcctcaggaattgaacactattgtttccctgacgccttcttcagacgccccacaagaatctggcaagaggaagaggggacggcccaaacgtatacaagacgttcctgtaatggttcctctgacctcgcaaggagatagcacatctgttattcagacacttccagggtccagtgtacatgaatctggtacgagaaggggacgtcccaaacgtttgcaggatagttcagatattgtcactccaattgactcaaaagatagtgagtcctctccccagccacctattgccgcacctgccgaaagtggtaagaggaagaggggacgtccaaagcgcattgatggttccgtgactccttcaagtcattctgttttttcaatagatgatgatgctgttgacacgatgaaacgtggacgacctaggaaaattgataccaaactgttacagtttccatctttattttcagatgatcctagacaaactgcagataatgtactcatgatgtttgacgccctgcgacgcagacttatgcagatggatgatgtgaaacaagctgcaaagcagcagcctaacttgaaagctgggagcatcatgaacaatgctgaacttcgtgtcaataaggacaagaggataggagaggttccaggtgttgaggttggtgatatgttctacttcagaattgagatgtgcttagtggggttgaatagtcagagcatggcagggatagattacatgtctgccaagttcggtaatgaggaggaccctgtagctattagtgttgtgtcagctggtgtatatgataacactggagatgatccagatgttctagtttatactggacatggcatgtcgggtaaggatgaccaaaaacttgagaggggtaatcttgcactagagaggagtttgcatagaggtaatccaatcagagtcattcgtagcgtaaaagacttgacttgtccaactggcaagatttacatatatgatggtctttacaagatcaaagaagcctgggtagagaaagggaaatctggtttcaatgtgtttaaacacaagttgcttagggaacctggccaacctgatggcattgcagtgtggaagaagactgaaaaatggagggaaaatccatcatctagagaccatgttatattacttgacatatcatatggtgtggaaaataaccctgtctgccttgtaaatgaggttgacgatgaaaagggccctagccgcttcacttatacaactaatttgacatatgggaattctctcagctcgatgagaaagatgcaaggttgcaaatgcataagtgtatgcctccctggtgataacaactgctcctgtacgcatcgaaatgctggtgaccttccttacagtgcttcaggcatacttgttagccgaatgcccgttttatacgagtgtggtgattcctgcacatgttcacaaaattgccggaaccgagttgtacagaaaggtacgcagatccgttttgaagtttttaagacaggagatcgtggttggggcctccgtagttgggatccaattcgagcaggcacatttatctgtgaatatgcaggtgaaatcattgacataaatagagtgaatggtgaagatgactacatatttgagacttctcctttagagcagaatttaagatggaactatgcaccggaattgctgggtgagcctagtctttctgactcaaatgaaacaccaaagcagctgcctatagtcatcagtgcaaaacgaaccggcaacatagctcgctttatgaaccacagctgctcacctaatgtgttttggcaaccagttctgtatgatcatggtgatgagggatatccacatattgcattctttgcaattaagcatattcctccaatgacagagcttacctatgattatggtcagaaccagcgtaatagtattcaaatgggaacccattctggttttcggaagtctaaaagttgcttatgttggtccccgaagtgtagaggttcctttggctaa

SEQ ID NO: 139985 - DNA, 648 bp, Zea Mays
atgtcaaagtcagtgtctgaagaaagagtatatcgccgcgactgtttagagcctaaatggccttctcgacaccattgcttaaattttaatgaaacttatctcacgttgatggaatatgaagggcataatggtggaaaatgcaccatcagtaacgactatcctaatgaaaaggagtattgcaaggccgctgactccctaaaagatctgcacaccgatttgcaggcagcatctctgctccagccatatccacccttcatgcggacacgaaatcatcccactacaagcgaagcacgagcggaaccacccgaatcagacaccttcagaaggcagccgtcagtgcaatcaacagttgagacgcgacagatcgagacaaaaaaatgtggacctctagacgaggtgcggatcgagggggacgcgcggctggcggggttcggcggcggttccggggatggcgcacacgggttcggtggtggtttccgggaacagtgcacgacgcattgtgccgcggccagtgccgacttgtgcgacggcgggtggtcgggctcggggatggggcgtcggcgctcggggacggggatgtcgcggcggatttctgggcgcggggacggggatggcggggtcggggtcgggctgggggatcgagattga

SEQ ID NO: 139986 - DNA, 671 bp, Zea Mays
ataatatagacacatacctcccaatctatcttatctgttcttcttccttctcagctcttcctctcgttcctatgattccgacgatcgccggaatcctccgccgggtgtgacaaactggtatcagaggctcgtcaccgcatcgttggtgctcggcttaggcggcgcagactgggtgttcaggagttatcgtcacagcgcctagcaagtcaacagcacaggctcgtcagttggtggccgccatgaagtggagaagaggctgaccgagaagtttcaaggggcgctggattgttcatccacaactctcaaggagttatcgcagaatatggatgggatcgggttattggctagtaaactgggtcaaatggagagcaggtagttggagagcgacaaattggtgcaatacttacaggcgaagatggacctctcgatgaagtcgttggcacaagtgtctcaggaccagatcaagttacaaacatggtatactacacagatgctggagaagattcagaacttctaggaaaacaatattagtattggctagggcctatgatgcactggggataaatcagcgatcagttgtgtctatgccatttgaagaattagctctctgcattgaatctcctgcagttctccagaccactaaggcattaattatttgtcttccatctgca

SEQ ID NO: 139987 - DNA, 658 bp, Zea Mays
gtttcggcggtctcttagagttccaccgacacaacccttggaccaacgtagggtcataaaccctgcaggagagaggagctgggtggaggtggcatggagtggcaaaggtcaccggacaccagttaacacagtgctgggatctatagctcgttttcactatccaggggtggtacaattcaacggggcagagacaggggcgtatcactgggctcactggggcctcaaaccatatggacccgaccgtactcaccaagacgcagtgtggtcatcattttgggaacaatttagattggacgaaacagcgaacgaagaccatgcaaaacgtgtattccacaatgctgctagaaaaagttataaatggttcaatgtcagatgcaagggtcaaaagctgttaccgtgtacttcaagaaaagtgaaagggtcaaagaatgaccaacaagcaggcatgttggggatcggtgatggggttgtgagtcgcgatagctttggtcgtcggtctgtttcctcggtggggagtagatctcgaacttcaacttcgagggaatcagagcttgatgagcaactaagacagcaacaacaacaagttcaacaactatctcaacaagttcagatgatgcacggaatgctgatgcaggttactataacttttgatccatga

SEQ ID NO: 139988 - DNA, 1614 bp, Zea Mays
atggccgctgacacttcgaagcccttcttcccggcggcgccgcactcggctctccgcccctccaggagcgccgcctcgcgcgcgttccctgagagctcctactggcgcgccttccgctcctcggagctcgtgtccgacgccggcttccccgtcaccgatctcaccttcgcctcctctgtggaagacagagctgcccctaccctcgccgcttcctggtccacctccgtgcacgtcttctcctccgaccccctcgagaagctccgtaggatctctgtcgcgggcgatctcgccttctccccgtccttccgctgcgacggcgccctcctcgccaccggagacaagaagggtgtcgtccgcgtattccgcgccgacaaggccgccacgggggccctccgcacgctgcgcgcccacgccgccgagacccgcgtggtccggtacccagtcgctggcggcgacaagcttcacctcctcaccgccggcgacgacgcgctcctcgcctactgggacgtgccctcggagactcccgtcttctccatccccgccgcgcaccaggactacattcgcggcggtgcggcctcccctgctgatcacaacattttcgccactggctcttacgaccgcagcgtcaaattgtgggatgcccgcaccagcaataccggcccatctttgtccttctcccacggggaattggtggaaagcgtgctattccttccgtccggcgggctgctggccacggccggagggaacgtggtcaagatttgggacgtcattggtggtggctggctcgtgcactctgtggagagccatgtcaagacagtgatggacctgactcttggcaagatggtcaacactggggagatgcggctgcttagtgcgggcattgatgggtatgtgaagagctttgattttgggaagcttaagatgacacactccttgcggtaccctcagccgctcctttctgtggctgtctcgccctgtgggtctgtggtggtggcagggtctgcgaaagggaagatttatatgagaaataggaagaagaaggctgtggatgaggaagagcaagggatgaaatctgttggtggtgcgattgactgggtatctccagagccggagaagtcagtgttgaggccaaattactttaggtacttccgccgtgggcagaatgagaaggcaaaggagggtgactttgtgattgagaagccgaagaaggtgaaatatgcagagcatgataagttactgagaaagttcaggcacaaggatgctctggtttcagcattggtcaagaacaacccgaggagtgttgtggctgttatggaggagctggtttcaagaagaaagctcataagatgcatcgggaatttggataatgaggaacttggtcttcttttggagttccttcaccggaatgcaactttgccaaggtatgctaagttgttgttgtgtttggcaaacaaggttgtggagatgcgcgaggctgatatccgatcagatgagaagctgaaggtgcatatgaggaatcttaagagaatggttgcagaggagattcagatacagcacatgctgcagggcattcaagggatgatttcaccaatgcttgcacttgcaaccagatga

SEQ ID NO: 139989 - DNA, 232 bp, Zea Mays
cttttagatttttaaatttcaaatctgagtttaaaccaacaaatttgacatgaatgcagcaacaagaaatcccaacatgttatgcaagattcattttatttctttatttattagttattctatttatgaaagtggatgcttgcaaatatataaaacaaaaaaataattgacacaaccatataattaaggactctttatttgtctagatttttcggtgttacacaaggacatc

SEQ ID NO: 139990 - DNA, 1978 bp, Zea Mays
aggtcggataccaaaagaccaaaccggaaggtgttttaatactacaatcccaattgccatattcaggatactaaattttagaagcccggtcattggaggagcttttggttaaaaaaaaactctctttcgacgtcctctttgcagtcgatctgaaaaattacagtctacagtttacagccatgttactctccggccgccaccactgccaccacaaattcaccccttcctcaccgccggccgccttccgctccacccatctccgccgtctccggccgcttcggcccctagcccttgcatccgccaaccctcctccgccaccgtcgccactaccttccctattcccgtcgccaaggcgtccatggcggtggcggcacagcgccagcgacgttatcgaagaccttcctcctgtcgaggccgatggaaacgacgccgtcaaggtcaagaagagcttctgggcagcggtgagcctcatcatcggcacggcggtcgggccgggcatgctgggcctgccgtccgccaccatccgctccggccaggcgccctccgcggtctgcatcctgctctcgtgggcctacgtcgtgtcctccatcgtcctcgtcgcagagctcagcttcgccgccatggcgcgtgacggcgtcgacgaggtcagcttcacgggacttgcgtcgagcaccctgggggcgggccctggcgcggtcgtcgctgtcgtgtacgccgcgctcagcttctccctgctcgtcgcttgcgtcgccggcatcggctcgctcgtctcccagctgttccccggggtgagtccggtcctggccaacgccctgttcccctgcttcgccggcgtcctcatcgccttcttccctttcaaggccgtcgacggcgccaaccgagccctctgtggcctgatgcttgtttccattaccgctctcgttgtgactggcgtgtccgtcggtcggaccagcttgctgggatctctcagctacgcgtgctggagcccaggcgcgatcctgccggccataccggtgaccgtgctcacgctcgggttccatgtcatcacacccttcatctgcaagatcgtgggagactcggtgtacgacgctcggaaggcgatactgattgggggcgctgtgccattggccatggtgctgtcatggaatgccgtcattctcgggctggctagtgctggcggcaatgctgggtttgatgaccctatcaaactcctcctctcagtgaatccagccgcgctgcctgctgttcgaggcttcgcttttgctgcactggcgacgagcctgatagggtacgcagtgagctttccgaagcagttggcggacacagtggagctgattcttcagaggttttctcagaagcaaggaagcatgcaccaagctaatggtagcggtggatatggcagaaatggggcgattcttacatggatggtgctgatcattcccatctttattgcgtcgttcttctcagcagtcttctccaaggcactggattttgctggggtttatgcaaactgcttcctgtttgggatcctgcctcctgttatggcctggatccatcggtcacagaagaaaaggagatctcctgattcatgtgaagatgttctacctggcgggaatgctgctctgctgatacttttcgctgttgctgttgtcctagcaatctggcactagtagaaggtaagcacaccagggactcattctgtttgtttgccagactgttcgtcagtgaactgaaagcactgaggtggttagaactttgaggttttgaatgttcatggcatcaatgctttatagttcctctccccgtatcatgattttcttctttgtttgtcctaagttggacgctaactaactatttacccatttaaatgtctctttggtaagattctggtgaaaccgactgtcttttaggtcaagaatgttgcatcttcgcttctgaactaacgaagttatgaaatgcatcctgtgtttgcgtgtgt

SEQ ID NO: 139991 - DNA, 1718 bp, Zea Mays
gcggtggtggtgtggtggtgccgatggttctctttttcccgtcaagctgtcatcggcgtcagcatccatccaccgtaagcggcaaggcggccgaccgctacccccaaccatcgcgacccctgccccttccccgttcgtcccctcccccgggccgccgccgccaccaatcccacctcctcgccctcgccccctcgctttgacccccctcacccgcgaagcttcgtctccttgacccctcctccccctctctctatttatccccctccctatccactccccgccctctccaagaccaagaccaacaccactccactccctccatttccctcacctcccgcagcagctagccgccagccaacaaccgaaccaaccaaccaacccacaggccacagcgagcgagtaaagcgtccaatggtagcgatggcggccgtgcagcagcagcagcagcagcagcgccgcgacgcggaggcggagctcaacctgcccccgggcttccggttccacccgacggacgaggagctggtggcgcactacctctgcgcgcgcgccgcggggcgccgcccgccggtgtccatcatcgccgaggtcgacctgtaccgcttcgacccctgggacctgccggagcgcgccctcttcgggcgccgcgagtggtacttcttcacgccgcgggaccgcaagtaccccaacggctcccgccccaaccgcgccgccgggtcgggctactggaaggccacgggcgcggacaagcccgtggagcacgagggccggacggcggggatcaagaaggcgctcgtgttctaccacggcaagccgccgcgcggggtcaagacggagtggatcatgcacgagtaccgcctcgccgaagccggcggcgcccgcgccaagaagtccggcgccggcacgctcaggctggatgactgggtgctgtgccgcctgtacaacaagaagaacgagtgggagaagatgcagcagcagaaggagaaggagaagaaggcgatggagtcggaggcgtcgctctcgcactcccactccgacacgcggacgccggaatcggagatcgacgacgacccgttcccggagctgggctctctaccggcgttcgacgacatgggcgcagccccagcccctgccggcgtcgtcctgcccaaggaggaggtggaggacttcggcgacctcggcggcgacgactggctcgcgggcatcaacctcgacgacctgcagatgccgggggacgccgccgatttctacggctccatgctcgtctcgccgatggccgccaagatggagccggacggcggcttccccttcttctgagatccttcggcgactccggggacgaccggatgcagcgcaacgcaaactgtgtatagttcagattttcttcatggaaccaacaacaacaaaaaaagttcttgctaatatcttgttctagtggtgtagtgcagaagtagcagcaacatgattgaagttccattgtagtactgatgttcatcgccacttgagctgtgacaagtgacgacattctttcgtttcttggctgcaaattcttcgttgtccagaatataatttcagatgggtaatgccaattcgggacgtgttaacttgtttcttgcctctgaacatacaatagcttgttgtgcttggttgcgagagcggtttttgtttggagccttaagatggtccattttttttaaatatctaatcaagattcttgatgt

SEQ ID NO: 139992 - DNA, 888 bp, Zea Mays
ttagcaatggtgaggggtgagatgaagccgatcgagaacgaggagacacggcagatatgcttcaccaagcgtcggcagagcctgttcaacaaggccagcgagctctccatcctgtgcggagcgatggttggctccgtcgtcttctcaaccttcggcacgccgttttccttcgggcacccatccatcgacgacgtcgcaaaccggttcctcagccctcctcctcctcctccgtctgatgctcccgctgcttcgtcgggtggtggtgctggtgctggtgcaagtggaagcagcagcaacgacggcagctgcagctgggctgtgacggacacgatccgtaggctgaactcggagtacgcagagctgcgacaggctctggactcggagagcaagaagagggagacgctgcaggaggctacaggcaaggagatgggtgcgcgtatgatgcagctactgaacgccaacgtctcggaattaggccttgccgagctgctggagttcctcgagtgtctggaggcagtggatggtgtcgtcaacaacgagacagcaaacaagacgacgacgacgcttgatcttgaagccaccaccaccaccagcggcggcagcagccaaactcgtcaagggttagtgccacagccacctatggagacggtggtagcaccggcaccggcagcggcagacctgcagtaccagctgcttggtggtgagcacagcggtgccgccgatcctatggcgttcgcagctcctactactagttggagcagtgaattcgtcgttgatggattcgaagtcgacgaccccatgcatggtggtggtggtggtggtgatgatctccatgatgtttattatgcccttggggatttcccgggcgatgaccagaatcatggttga

SEQ ID NO: 139993 - DNA, 1565 bp, Zea Mays
ctctctgtgtcatcaccctcattccgacagttccgctagaaggaaaagaagaaaaaaaaactctctttctctctctttcccagccctctctctccctctccacccggccgccaccatgtcaggcctctacagccagggcttctcccctgcaagaaccctctccccccagattaggagcaaccccgacgctgacagccagtacttggccgagcttctcgcggagcatcagaagctggggcccttcatgcaggtgctgccgatatgcagccggctgctcaatcaagaaatcatgcgggtatcaagcatggttcatgaccatggatttagtgatcttgacaggcgccggtttagaagtcctagccctatgtcctcaccaattgtccggcctaatctacatggcaatggatttggtccttggaatgggatgcaccaagagagattgggctttcctcctcctggaacaagtatggactggcaaggagcaccaccaagccctggctcttatattgtcaagaagatcgttcgcttggaagttcccgtcgactcttaccctaatttcaactttgtggggcgcattctagggccaaggggtaattctctaaagcgagttgaagcatcaactggctgccgtgtttttattagagggaagggttccatcaaagacacagaaaaggaggagaagcttaaaggaaaacctggctatgaacatctgaatgagccactgcatatattgatcgaggctgaattaccagcgaatatcgttgacacaagactgagacaggcacaagaagtcatggaagaattgctaaagccagtggacgagtcacaagatttctacaagaggcaacagctgagggaactggctatgctgaactcaaccctgagagaagacagtcctcatcctggaagcgtatcccccttcagtaacggcagcatgaagcgcgcgaagccaagccagtagagggaagcttctggctctcctccaacccttgagtcgtccacggcgcggcaccgacaaggtggtgcccttggaactcgcgctgtccgtgtctgtctcgtgggtgcttgtgtaatagaaggtatgcatctgctgctagacaggatagtctgggtaccaggtgcgtcgtcgtctcaaggagacgaggagggatcggtggccgatgaactgcctttgatcttggtgggtggatccggccgtgctgttgttgtaactgcttgtaagggtgatggacattattcgttttattcgttgttggctgttaaccctgagtagattatggtgctgaggagatagtggtttcagtgggagactagttaaaccctgatagtagtgtgagctgttcgtttaggtgtttaattagcttgtactattctcgaatatttgtcgtccgctagttcattttttgaactaagccgcgacaaataaaaaagaactcagggatagtattattattcgcgttacattgtgtggagttgcaacactagagatgatgacacatcccgctctatgatagtttgatgacgacagctttggatgaaccatgtggatctatctattagaatgt

SEQ ID NO: 139994 - DNA, 1398 bp, Zea Mays
aatttctcatcggattacttgctgccaactcttgatccaacgatcgctccgtttccgcttccttccctcctccccgcgattgattgggccggtgtgctgacggtgccgtcgctgcttgcttcctccgcagccagtacttggccgagcttctcgcggagcatcagaagctggggcccttcatgcaggtgctgccgatatgcagccggctgctcaatcaagaaatcatgcgggtatcaagcatggttcatgaccatggatttagtgatcttgacaggcgccggtttagaagtcctagccctatgtcctcaccaattgtccggcctaatctacatggcaatggatttggtccttggaatgggatgcaccaagagagattgggctttcctcctcctggaacaagtatggactggcaaggagcaccaccaagccctggctcttatattgtcaagaagatcgttcgcttggaagttcccgtcgactcttaccctaatttcaactttgtggggcgcattctagggccaaggggtaattctctaaagcgagttgaagcatcaactggctgccgtgtttttattagagggaagggttccatcaaagacacagaaaaggaggagaagcttaaaggaaaacctggctatgaacatctgaatgagccactgcatatattgatcgaggctgaattaccagcgaatatcgttgacacaagactgagacaggcacaagaagtcatggaagaattgctaaagccagtggacgagtcacaagatttctacaagaggcaacagctgagggaactggctatgctgaactcaaccctgagagaagacagtcctcatcctggaagcgtatcccccttcagtaacggcagcatgaagcgcgcgaagccaagccagtagagggaagcttctggctctcctccaacccttgagtcgtccacggcgcggcaccgacaaggtggtgcccttggaactcgcgctgtccgtgtctgtctcgtgggtgcttgtgtaatagaaggtatgcatctgctgctagacaggatagtctgggtaccaggtgcgtcgtcgtctcaaggagacgaggagggatcggtggccgatgaactgcctttgatcttggtgggtggatccggccgtgctgttgttgtaactgcttgtaagggtgatggacattattcgttttattcgttgttggctgttaaccctgagtagattatggtgctgaggagatagtggtttcagtgggagactagttaaaccctgatagtagtgtgagctgttcgtttaggtgtttaattagcttgtactattctcgaatatttgtcgtccgctagttcattttttgaactaagccgcgacaaataaaaaagaactcagggatagtattattattcgcgttaca

SEQ ID NO: 139995 - DNA, 510 bp, Zea Mays
atgatttgcattaaaaccagacgacagcaccataaacaaaaaaaattcagatgtccaaattgttcatacatatcctcttcggctcttctagtaaaatgttctaatctcctaggcaagccccagatgcaaaagcataattttaagcccaggtccaaatcaagagtatcactgaaacatgtcacacatctagtgcgacttgacatactcctgcactatgttaaggccctcagattcttcaccgtagtcctggacgacgacgcaggagcagcctacaaccttccttgccttgccctcagagtcaatcttgcaaagcccggcccactcgccaagagtcttagcggcaggaacagtgaccaggtgaacattgtgctcagcgcagagtgccttcaccaacttgacgtaatctggctggtcacagtcctcagcaagcacgcaaagctgagcggcgtgcttctcgatggccttggcagcctcacggagacccttcacaagaccgtcatgagcacttga

SEQ ID NO: 139996 - DNA, 1482 bp, Zea Mays
gaaaacaattgccaagtgccaaccaagctcggtggctgaatagaaaaattgtgcccggcagcgagccagcgatggccagattcacgctgttctgctccggcatgtcagcatgtgacgaggacgccaccatcctctgcacctcaaaagtgagagcgagagcccccccctcaacatcactgacaccaccaaagcacgggaaagcagaggaagcggagcagagctttgtgggagcgtcaatggcaggaacttgggtgaagatggagcagaagggcgccggtccgggagcacggagctcccacgccatcacgctgctcgggggcacggcctactcgttcggcggcgagctcaccccgcgcgtcccggttgacagcaccatgtacgccttcgacctcaacacccagacgtggtcggcgctggacgcgacgggcgacgtgccgccgccgcgcgtgggcgtgaccatggcggccgcgggcggcacggtgttcacgttcggcgggcgcgacctggagcacaaggagctgaacgagctctacgccttcgacgcggcgacgcgggcgtggacgctgctgtcgtccggcgccgacggcccgccgcaccgcagctaccactccatggcggcggacgcgggcgcggggcgggtgtacgtgttcggcgggtgcggcgacgccggccgcctcaacgacctgtgggcgtacgacgtggcggcggggcaatgggagcagctgccgccgccgggggaggcgtgccagccgcgcggcgggcccgggctggtcgtcgccggcgggaaggtgtgggtggtgtacgggttctcgggcgaggagctggacgacgtgcactgctacgacccggccacccgggagtgggccgcggtccagaccacgggcgacaggcccagcccccggagcgtgttctgcgccgccgggttcgggaggcacgtggtgctgttcggcggcgaggtggaccccagtgacctcggccacctcggcgccggcaagttctcggccgaggcgttcgcgctggacacggagaccggcgcgtggacgcggctggacgacagggcggaggccgagcaccacccggggcctcgcgggtggtgtgcgttcacggcgggggagaaggacggccagcgagggctgctggtgtatggcggcaactcgccgacgaacgaccggctcggcgacatctacttcttcacgcccgttcttgaggccgcaagctagcgcgtgtgacgaactggctggcaatgtgtagcagttcaatctgcatgtgcagggcttgtatgttgtgaattgtgatcatcgtcttgtgtcgtagttgagtttcctggtttgtttttcttaacttccgtcgttttttggatttttatatgctgtgtgatttgagaataattatggcaaaaattaaatcccacccatgtatctgtgtttttatttggagtgtaattggattgaatagatacatcgaatactgacgggtatcact

SEQ ID NO: 139997 - DNA, 982 bp, Zea Mays
aatcacatccctcattcaatgtgtacatgttgttgtgccacacaccttggctacctagctcgtcgcgacttgttctaaccagctagctctgcaaagcgcaagacttctctttccatccatccatccatccatctcgatctttctctctcatatgagcagcagagcagatgatgagctcctcctccggtattaagcaagaagggcccaagctgttcagctcgaggaggatcctcgcaagggaccgctcgagcgtggccgtggccgacgcgtccttccgggtatactacagtctcggcgccggcaccgtgccgttcctgtgggagtccaagccaggcacgcccaagagctccgtcaccccgccggcgccggcctcgtcgaccgccggcgccgtgccggtgccgccgatctcgccgccgccgtcctaccagcaggcggtgtcccggtccaaggccaacaagttcgcgaggaagcagaggccagcaagaacctcttggcctcccgcaggttggatcatcggctggctgagcctgaacgtcaggcggcggtcaccgccgtcgtcgtcgccgacggatcaccagcagcgctgcgtcgcccggaacgaacatggtgtcgttgtcgtcgacggcgacgacgagcggcggtcgccgcgttcttccaccttgtgcttctgatcggattctgatgagctgccccggccggatcggacgtaccggtggattactggattattagctgttgcactacgtgcggtgttcattgggtgttgttgattagttagttgttgcacagtgcaggatcgctcgtcggtgtggtacgtacgtgtttgttaatgttctataataggtcgttggactctttccctttccagtgtcgttcagctttatttgcatatagatcatctaggggttcggttttttttatatgaataagtggctatatatatgtgcatgcatcattactgtgtgttgtgttctgtgcattt

SEQ ID NO: 139998 - DNA, 306 bp, Zea Mays
atgccatcagtccccgcaaacatcgcgccggcaaggaacatctaccacgctcgccgccaacaacctctacaccatcctccggaggtgctggagaagatgcaggcgccgatcaaggaccccacgatccccgtgaacgcgtcggccgcggagctgcaggaggctgacggggtgttgtttggcttcccgacgagacaaaatgttgtggagtcgtacactgttccatttcaaatgccgccattcccaaaacatatattcttggaggccctggcggcggtacaaggtgtcaacataattgcttatgattaa

SEQ ID NO: 139999 - DNA, 2652 bp, Zea Mays
atgccgggaccggccgtggaggcagcggccaggagcggcggcgaccaccacggcggctgctgcgggaaggcggccggcaagtgggagaagacgtacctggatgtcctgggcatctgctgcaccgccgaggtggcgctcgtcgagcggctcctgacgcccatccaaggcgtgagggcggtcaccgtcgtcgtcccgtcccggaccgtcatcgtcgaccacgacaccgccgccgtctcccagttccacattgtgaaggttctgaacaaggcgggcctcgaggcctccgtccgagcctatggcagcagcgccggcgccggcgggcggtggcccagcccgttcaccgtcgcctgcggcgccctgctcgccctgtccctgctcgcgccgctgctccccccgctgcggtggctggcggtggcggcggcctgcgtgggctcccagcccatgctgctccgggcgttcgccgcggcgggcaagctgacgctggacatcaacatcctgatgctcatcgcggtcgccggctccgtggcgctcgggagcttcacggaggccggcgccatcgtgttcctcttcaccgtcgccgagtggctggagacgctggcgtgcagcaaggccagcgccgggatgctgtccctcatgtccacggtgcccaagaccgtcgtgctggccgagacggggcaggtcgtcggcatgggcgacgtcgcggtcggcaccgtcgtcgcggtcagggccggcgacgtggtccccgtggacggcgtggtcgtcggcgggcacagcgaggtcgacgagagcagcctcaccggcgagtccttccccgtgccgaagcagccgcagtcggaggtctgggccggcaccatcaacttagacggctacatctccgtgaggacgacggccctcgccgagaactcgacggtggcgaagatggagaggctggtggaggaggcccagaacagccggtctcggacgcagcggctcatcgactcgtgcgccaagcactacacccctgccgtggtcgtcctcgcggcgggggtggtcctcgtgcccgccctgctgggagctcgcgacctggagctggagcattggttccggctgtccctggtgctgctggtgagcgcgtgcccgtgcgcgctggtgctgtccacgcccgtcgccaccttctgcgcgctcctgcgggcggccaggatggggctcctcgtcaagggaggcaacgtcctcgagtcgctgggcgaagtcagggtcgccgcgttcgacaagaccggcaccatcaccagaggggagttcagcatcaaggacttccatgtggttggggacaaggttgaaatgaaccagctactctactgggtatctagcatcgagagcaaatcaagccatccaatggccgctgcacttgtcgagtacgctcagtccaaatctgtacagccgaagccggagaacgtgaccgagacctgcatctatcatggcgagggcatctacggggtgatggatgggaaacagatctacattggaaacgaaaggatcatagcaaggtcctcgtgtcgtcatcatcaacatgctggccaccaagaaacagacggtctcaaaggcgtgtccatcggccacgtgatctgcgacggcgatctggtggggaagttctcgctgtccgacacctgcaggacaggggcggccgaggcgatcctgcagctgaggtcgatggggatcaagtcggtgatgctgaccggggacagcgcggcggcggccaagcacgcgcaggagcagctcgggggcgtcctggaggagctccacgcggggctcctgccggaggacaaggtccggctcgtccggggcctgcaggcgcggcacggggcgacgctgatggtgggcgacggcatgaacgacgccccggcgctggccgcggcggacgtgggcgtgtccatgggcctgtccgggtcggccgcggccatcgagacgagccacgccgcgctcatgtccggcgacatcctcagggtgcccaaggccgtccggctcgggcgccgcgcccggcgcaccatcgccgtgaacgtggcctcctccgtcggcgccaaggccgccgtgctggcgctcgccgtcgcgtggcgccccgtgctgtgggtggccgtgctcgccgacgtcggcacgtgcctgctcgtcgtcctccacagcatgctgctgctcagggacggcgccgcccgccgcccgaggtgctgcgctagcgctacggcgtgcaagagcaagcaggcgtccaagccgtgctgcgcgacggtgaagccggtggcgacgacgaggcacaggcacgggcacgggcacgggcacgggcacgcaggcgcggggaagcccgggacgctaggaggcgacaagcagggtaaggactgccatggttgctgccagaaggagagcaagccgcccgaggacgccgtcgtgatcgccattccgggacgggccgtggagcaccggaaggaggccttccctcacgagaacgcgggagccggggggtgctgcgctgcagcgcacggtgccgaagacgaggtatgcattgtcatcagcgccaggtcgccctgctgcagcaccgcgaggagtcggtctggttctcccaaggacgcattgtgctgccacggctccggtggtaaagacggcggcgccatctcagccctcgtgtgctga

SEQ ID NO: 140000 - DNA, 86 bp, Zea Mays
gggtgatgatgaacggttgctggttaaaagtacagctcaaacatacagttcataatatacatacacacatacgacggcatatatgt

SEQ ID NO: 140001 - DNA, 85 bp, Zea Mays
ttttttttctcgaatacgcaagagaattgcgtattttttatattaatagaagaagcaaaaacacaaaagtcatagccaagaggcc

SEQ ID NO: 140002 - DNA, 2061 bp, Zea Mays
agcgtgtgcctagcatttcttccctggctgaaggcgtgggtctcgagagctgcttaaaaagctttgcacaaaaatggcttcgcctgcgataccattcgcccccctcacgtcccatcgcgccgctcccttcgtcctggggtgtcctcctccatggccaccgccaccgccgcctgccgctcgcccacggccgccgccgccgcgccctgacgctgctgctgctgctagactgctagaggaggaggccggggcaggcagctcgcgagctcgatcgcctggcgggcccgagctggagtcgatggtgctggatctcaatgccgagtcgccgacgcccggctcggcctcggccgcctcgagctccagcgtcgtagtgggcgggggcttcttccggttcgacctgctcggagggacacccgacgaggagggttgctcgccctcgccacccatcgtgacgcgccagctcttccccttgccgtacccggacgctgcaggtagcaccgccgcctcgacggcgtcgaacgggtcgccgccgccggaggtggcgggggcatgggcgcgccgcccagcggatctcggggcgccggcgctggcacaggggaaggtgatgtctgcgccttcgtcgcccgcggttttgtctcctgccgccgggaagaagagccggcgggggcccaggtcgcggagctcgcaataccggggcgtcaccttctacaggaggaccggccgctgggagtcacacatctgggactgcgggaagcaggtctacctgggtggatttgatactgcgcacgccgcagcaagggcctatgatcgcgctgccatcaagttcagaggccttgacgccgacatcaacttccagttgaaggactatgaagatgacttgaagcagatgaggaattggactaaggaggagtttgttcacatactccgacgtcaaagcactgggtttgccagggggagctcaaagtaccgcggtgtgacactacacaagtgtggtcggtgggaagctcggatgggtcagcttctcggaaagaagtacatctaccttggtctatttgacagtgaaatcgaagcagcaagagcgtatgatagggcagccattcgcttcaatggaccggatgctgttaggaactttgattctgtttcctatgatggagatgtcccacttccacctgcaattgagaaagatgtggttgatggagacatccttgatctgaatttgaggatttcacaacctaacgtgcatgatctcagaagtgatggtaccctgactggttttggattaagttgtaattctcctgaagcttcaagctccattgtttctcagccaatgggcccccagtggcctgtccatcctcacagcagatcgatgcggccccagcatccacatctgtatgcatctccttgtccaggcttctttgtgaacctcagggaggcgcctatgcaggaagaggagaaccggtccgagccggcgtgtccccagccgttcccctcctgggcatggcaaacgcagggctcccgtgccccagttctccctgccaccactgcagcatcatcaggattctctaccgccgctgccaccggcgtggacgcggccacagccggccacagcgtgccgccgccgtctggtagcctccggcagttctcgggctaccaccagctccgcttccccccaaccgcctgacggagacagaccacctcctgttgagttggcggcggcggcggcgtctcatagctggccggtggttggctggctgcccatgcaacgccacgccggtgggtgcgggtcggtattcggtaacagtcgccactgttgggtatggttttgtgggactacagaggatgcagtgatctctcgctgctgctgtgtgctgtctctctcgctccctctacccacccacacctgtttgtaatatgaatttatcgccctctcgcgctcgtgattcgtccatcttcgtttcgttttgatggccaccggatgggatcatgagcgtgttgcgagaaattgtgtaataaaccatgcgtatttttatttatatttatttattgtgacgatggtacatgata

SEQ ID NO: 140003 - DNA, 2064 bp, Zea Mays
agcgtgtgcctagcatttcttccctggctgaaggcgtgggtctcgagagctgcttaaaaagctttgcacaaaaatggcttcgcctgcgataccattcgcccccctcacgtcccatcgcgccgctcccttcgtcctggggtgtcctcctccatggccaccgccaccgccgcctgccgctcgcccacggccgccgccgccgcgccctgacgctgctgctgctgctagactgctagaggaggaggccggggcaggcagctcgcgagctcgatcgcctggcgggcccgagctggagtcgatggtgctggatctcaatgccgagtcgccgacgcccggctcggcctcggccgcctcgagctccagcgtcgtagtgggcgggggcttcttccggttcgacctgctcggagggacacccgacgaggagggttgctcgccctcgccacccatcgtgacgcgccagctcttccccttgccgtacccggacgctgcaggtagcaccgccgcctcgacggcgtcgaacgggtcgccgccgccggaggtggcgggggcatgggcgcgccgcccagcggatctcggggcgccggcgctggcacaggggaaggtgatgtctgcgccttcgtcgcccgcggttttgtctcctgccgccgggaagaagagccggcgggggcccaggtcgcggagctcgcaataccggggcgtcaccttctacaggaggaccggccgctgggagtcacacatctgggactgcgggaagcaggtctacctgggtggatttgatactgcgcacgccgcagcaagggcctatgatcgcgctgccatcaagttcagaggccttgacgccgacatcaacttccagttgaaggactatgaagatgacttgaagcagatgaggaattggactaaggaggagtttgttcacatactccgacgtcaaagcactgggtttgccagggggagctcaaagtaccgcggtgtgacactacacaagtgtggtcggtgggaagctcggatgggtcagcttctcggaaagaagtacatctaccttggtctatttgacagtgaaatcgaagcagcaagagcgtatgatagggcagccattcgcttcaatggaccggatgctgttaggaactttgattctgtttcctatgatggagatgtcccacttccacctgcaattgagaaagatgcagtggttgatggagacatccttgatctgaatttgaggatttcacaacctaacgtgcatgatctcagaagtgatggtaccctgactggttttggattaagttgtaattctcctgaagcttcaagctccattgtttctcagccaatgggcccccagtggcctgtccatcctcacagcagatcgatgcggccccagcatccacatctgtatgcatctccttgtccaggcttctttgtgaacctcagggaggcgcctatgcaggaagaggagaaccggtccgagccggcgtgtccccagccgttcccctcctgggcatggcaaacgcagggctcccgtgccccagttctccctgccaccactgcagcatcatcaggattctctaccgccgctgccaccggcgtggacgcggccacagccggccacagcgtgccgccgccgtctggtagcctccggcagttctcgggctaccaccagctccgcttccccccaaccgcctgacggagacagaccacctcctgttgagttggcggcggcggcggcgtctcatagctggccggtggttggctggctgcccatgcaacgccacgccggtgggtgcgggtcggtattcggtaacagtcgccactgttgggtatggttttgtgggactacagaggatgcagtgatctctcgctgctgctgtgtgctgtctctctcgctccctctacccacccacacctgtttgtaatatgaatttatcgccctctcgcgctcgtgattcgtccatcttcgtttcgttttgatggccaccggatgggatcatgagcgtgttgcgagaaattgtgtaataaaccatgcgtatttttatttatatttatttattgtgacgatggtacatgata

SEQ ID NO: 140004 - DNA, 273 bp, Zea Mays
attttctatttcttttctccattttcaaatccaatttgagttcaagtttaaattcaaacttttgtggatcttcatttataaactttatttttgaaattaaaagtgctaagcctgaagatatttagttatacatttttatgtatattttcatatctcttttcttttcttcccttccatttgaatttcaaatcaacacaagttttaagttcaaacacttaatttggatacacatatagaacttcagtataatgtgcaaaaacatattttatatat

SEQ ID NO: 140005 - DNA, 2171 bp, Zea Mays
aaaattaaagatgctaactctattaagcaatatcgctcgatatgtctccttaacgtcgatttcaaaatcttcaccaaagtcctctctaataggctttcccaggtagccaaggtggtcgttgggggcaatcagacgagcttcataaaatacaggaatatactggaaggagtggtgatattgcacgaggtcattcacgatttgaaataaaaaaagagaggtctgattttaaaaattgattttgaaaaaaatctatgacaaggggtttccaaaggccacatctctggaggttttagatgatgttctaccgggtggtatctcgtatattcaatacgcagatgatacattaattatgattgacagatcagaaaaatcaattttaaatttgaaattaattctatacttctttgaatgcttgggaacctttcctacgaaatatctaggcatccctatctctgaccacaccattaactcggtagtttcagatcctattttggtgaaaatgagtaaaaggttagctgaaaaagaaaaatcccacatggccaaatgggggatgatgactagtccgaaagaccaagggagtctaggcattctagagagcataatgatgaatgaatgtttgttagtaaaatgaattaggaacatttcttaggggttcgagaatacttggttcaaacttatcaaagcgaaatatatgatcaaaggaaacttttttctgtcaactgttagaggagcgtctcaattttggagagggttgcacaaaattaaacactttcaaatgcgcgtatggaaccgtttggcccatagccaagcttttttctgcaaacaattaaattgggctagctcgctgcatagttcgcggcccatcgaaataacctctctctctaaagccctccagaagcccagaagcatatattttccttttccgttgcatcctctttttgatattttttccttttcagtttggcatcagaatcagaagaactccaacttgcgtcggcaaccgcgaaaagcggagggagggggaagggacgtgggaccgatccaatcatcaatccactagcttcactgggaaacgaagaaagaacataggactgatccggtcggtgggacttcctctcgaatcgccccgatcgagaccctagttgccccacgaaccgaggatccaagatgagtttcctgttcgggaagcggaagacgcccgccgagctgttaagagaaaacaagagaatgctggatcgatccatcagggaaattgagcgagagaggcaaggattgcaggcccaggagaaaaagctcatcactgagatcaagaaaacagctaaagaaggccagatgggagctgtcaaagtaatggccaaagaccttattcgtacccggcatcagataacaaagttctaccaactcaaatctcagctccaaggagtttctctaagagttcagacactaaaatcaactcaagctatgggtgatgccatgaagggcgttacaaaggcaatggctcaaatgaacaggcagctaaatctgccagggttgcagaggataatgcaagagtttgagcggcagaacgagaggatggagatggtgagcgaagtgatgggagatgccatagatgatgctttggaaggagatgaggaggaagaagaaactgaggagcttgtgaatcaagtacttgatgaaattggcattgatatcaaccaagagcttgttggagccccgtcggccgctgttgctcaacctgcttcagcgggaagggttgcccaggctgaaagtgctgggaatgctgacactggaatcgacgccgatttgcaggcaaggctggacaatctgaggagaatgtaggtgctacaccagcaaaagagtagtgccttctagctctgttgcctgcgaatgtgaatacctagtcaatcaaagcaaaacgtttacaagccagtgtgtatgttgaaatgaatgaagcgttcgatatgccggtagtaatgacaaatgttaaatatacatatttacaatttcttcccctctgagttcatgatggattgatgcctgcagatgcggcatgtcagctgcgtgctaactgtgatttgcaagctgttgcttaaatacacagcagatatctaagctttaaattgccatgcttcctttccggcgattcaacgtcgtcgaagctccgaatcgtt

SEQ ID NO: 140006 - DNA, 1880 bp, Zea Mays
ggatataaataacggcgcaaactcatctgattgcaaagcattagctaaatcaaaaccatgtcatccttactgtctatatcgtatgcattgctaaaaaaattagaaccgagctgagtattcataactaatctgtttccctattcagactgcggataaaattatctgctctaaattaaattaagcgcagtctgtacttattgacggatatcttttgttttgcctgttttacatctcgcaccaatttaatcagagaattaaattatctttgtgttctcgtgtaaagaaaaataaaaaaaattcagccgtagcctcatccattacgcgtcatcgttcctatcttcttccttcccagatttttccgccgccgttccctgttgaattctctgccgtcgtccttagcaacggcagatttttcctggctcgccggtgcttatccccgcagccgccctcgccggatttttctcagccgagctcgtcttctacggcgccgcccctgggagtcttcaaatatcagccgtgctttgcttcttctccgtggccggcgtcctctaccccatccatggccagagcttcctgtccgacgctcagccgaagccgcccagccaaagtctctttcctggccgcacgcccagcccgctctccttcctctcagctccgtgctctgctcggccggatttccatgaccgcgcccaaggtcctcccatggcgtccgtcttcctgagctcacccctcttgctgtgctgctcgccccagctcgaatttctctctgtgcgcgcgagctgccaaacacgtttccctgtgtcctggttcgagctcgccccttcggtgtccatggccgcccagtctccactccccattcctgccgtggtcgacgcctctccctgctccaccttcttccttgtcgtggctgttccacagctcagctctgctcaagcagttcctatggcgcgcgcccagccagccctccatttttcctctgctgcgcgcagctcgccgagcagtccctgcgcgtttctctctcgcgcagatctctctccttcccggcgtttctctctgttgctccgcgctatagcgaccgtcggaccgatcgttccctgcgcgccgactttcctgtgcgcgccattgggagctcgtcagccactgttggcttatcacagaatccccaacgtcgtcgacctcgcttagccagtcgaccatagtcgctgccgcgcgcgcttgtccctgatgcccatcgcgcagtatttgggtcttgccgattggccgctcttgccgccgttaattccgcttcgcagctcgcctgctgttgtggtgctgacaccccacaatactcgtgtcggtgcatcgttgtctgggcgggagttgtcgtcactagttcgctttcgtctaaattgtcaccacggatgcttaagtctctggtcgcgcgtctttctatctcgcgctcgtgagttggaagctctgcacgttcgtcgtcctttagtcttagttcaacccccacctcgccagctcgctccagacacgcctcagtaagaaatttcaagaaacgggtgaagacgaagccagcagcgtgatattcaccaagtgcgcgacaaaagttcgtttcgtcaaaattatttagtcgaggagaagatcttcagcaattgattaccgaagaaagaagacccctggatgacgtcaaccggaaccgtagtcgtgcttgcgactatcgcgtcgaattagtcagggtaagcgaatttgttattcatattaacggattgatggatagtttgactaggtaaaatatttattagattgtctgagtcgctttggtaaattggtcgatgccgtaggataaaagaggtctcagtattgcagaaatgtgggtattaaaaatgaaaggtgat

SEQ ID NO: 140007 - DNA, 1310 bp, Zea Mays
cttccaacccagccgtgcctgctcgccaccattcggcgtttcttccggtgggaacagagggcaacagttgacgcggcagccaaaatcgccacgccctggacttcctcctcggtgccctgctcgctcgtcttcctgacgtccggctagagctccatttttcccccagttcccatcgtcgcgcccctggtcccagacatggccaccgcgccgtgaaactccctgtgtcgagctcggtccctgctccagtctctactcggcgttctgcgcgcccatctcccccggctcctttcagctcggatccctgcccgcggagtttttcccctagccaagatcgtccttgcgcgctgtcgtcgcctagttcgcgtcccgctcttgctccagctatggcgcttcatcgccgcagttccctatcctatgcgcgctccgctttttgtgcgcgtgtgttcgtcgtctctgttccagtcatccgcacaattttctctgctcccttgccgtggtcgtcgcgtgcctgcgcgcagctcacgccctgctagcccctgctgcgggttgtcgagctctctgcgcacgctcacctcgttctttccttgtttgccgagcgcacgaattttatctgctcgccacagcgtgtcgagctcccgcactatcatcgcttctatcgcaagctcgttagccacagttatcttgaccgtgtcagctcgtcagacctgtaactctatatacagcacccttccgtatcgtcgtcaagctcgtcgaacctcgttcttctctgctcgctttcgtcgaacaccgaatcccggatattagacaaaaataagtgaggcccctgtgtattgcttatcaagtactcggttgaagacttcaatccaagatcgtcgccgttccgcgtgtcatcaagaatgccaagaatcggatgaagacgaagctaacagcgcaatattccccaagcgctcgaccaattgcctggatcggaaaatcactaccgatctcgcggattcgagtcgactattgaaacggtaaattaatgaattattcagaatagttcgatcgttaaataaattaatgtgctagtgcgatgcccattaggtgctcgattatttgtgtgagtcacggaactctcgtgacttcatgatctttgcaattatcaagctagattcagttatggcgagttatttcgctattccggtcaattagctgaattagtgtaccgagtagaattttagtaggcatgtgtgttgataaaatattttaatcacttataaagatgtagtgtaatttataaagcaagagattagttcagaatttaattaatt

SEQ ID NO: 140008 - DNA, 476 bp, Zea Mays
tttttttaatcaataacagaaagatcctgatgggatacagtgatcatacatgcactcaacatatcatgatcttcttttattacaaattaaagcatgtcaccatctttccatttcaggactgaaccaagattgtgagcacattgtattgctaagacaattttgtcgtacaacgttcgtccaccctccatttgtagatttgtctgcatctactctttgcggatcgtcgactcattgttcttgtcatatgtgttcgaacagtttctttcagatgtcaagaggtggatcttgtttctacagtgagttggtgatctggagacgatcgagtgtagagtgttgaaggcacatctccaatattcctacacaaaaacacaatgcacatcaactaacagaagtgcaataccctctcatttattagcctcatcaaactgaattgaaagacaacaaactgaactgaaagtcaacatacatgccaggta

SEQ ID NO: 140009 - DNA, 757 bp, Zea Mays
atttcagtttggttatggtttaactcttcttttgctatttgtgtcgaccatttatgtcacaataacttcactcaatactctgtacataactgactggtcatgatatcatatttcgataaagtatttatgacaatctaagacacacaaatggtctgtggaaaacctttggatggcaagcttgtatcgtatgccttccaaattttatagtagtaccattttttatttttgtttggatacctcttctaacagagatcttggtaatttgaacttatatggtcatctggtgcctgagcttggaaaattggagcatcttcagtatttgttatgatcaccgtaggcaggttttctccacacagatgggtttgagcaaccaggacattgttgcactttttggtggtcacaccctagttggtggaatcagggaagatgccacaagaacaggtttgggtttgagggagcttagacgtccaaccctttgatctttgacaactcttcaaggagcttctgagtggagagaaggaaggccttttgcagctaccaagggacaaagctctcctctcttatccatccttctgcccacttattgacaaatatgtagcagtatatatatctttgatccttgtcatttgttcggggtcagtttatgttaacctgggtggctgtaataaatatttgtcggccttgtgttttgttatcttcttttctcttgaatggttcatttgaagatggggtgaactaaactgaatatgtagtctgt

SEQ ID NO: 140010 - DNA, 318 bp, Zea Mays
atgaatctccagcccttgctgagccagtcgatggacaaaggagagttcgagcctttgaggtggtgctttggtggaagaggtggtgctctggtggaagcctggaaggtcgcaggatgtctttctttgacagcacgcgcaaaattaagggtctgtttggacagacgcctacggcgccgcaacacgcctaaggcacggcaactccaagttggtgtgtctgctactttgcttgcttcccagagcctccaactccatttccattctcttctgttcttcactcttcaacaacaacagcactccggagatgagcagtacttctga

SEQ ID NO: 140011 - DNA, 1150 bp, Zea Mays
cccaaactttcaggactactggcaccaaccactcgcattcgtcactcgtccctctcccctctctcccccaaggccccaacccacttgagcgagccctagagaaggcaaaagccatggcgtccttggttgttcgtgccgccggcgccgccgccgccgccgcccgtcttccctccctccgtcctcgccgcaacggcagcggggtgctctccggcttgagggtcggaacagggcactacggcgcgcggctcgcgcttgcttcgtccacagagtctgacccccgcatgccaggcgaggatgagttcgaccatttctaccgtgttctcgccaagaagactgacaacctgctcagctgctacattccaatgccgcttgcactttctgaagaggagaaggccgtgcagaaggagttcaagctgatcgcgagcggatgcatcgacctcctggttggtgcgatgcgccgcacccccgcagagaaaaggcgcccactgttcttggtgtttggtgagctgtacccggtatttgagtttgtgaggtggactgccgaggcggggtgtgccaagtggtggatggcgctgcagatcatcgagaagctggagatcgtgcgcaagatggtgtcgagcgctttcggcggcgcccctgttgacagaagcatggtgttcgccaggaaggtggacctcaccggtgtcgacggcgaggcgctcgccggccacggcctcgggagcaacttatcagtggtgatcttcgtgctgatggacagcgtcttcagcaacgtcaagtcggacatcgatgccatggtctctgctgcttccactccttattagccatcgtcacctagctacctacgtgtctacacgatcgagatttgcagtcactagcctcaagtctccaagtgattggatctctgccacagtgctcttactactgccctagctcaagtcttgatgtgatcggccgggtgcctacaatggtgtccgttgtagctactagtatcaacctttgttgttcgttctagctattactagtatctactttgttatgttggatcatgcatgtgattgggttctctgctactgcccaaagtactatggtttcagttctacccagtacttcattgtgttgaatcagtcacattatatgatttctgatatta

SEQ ID NO: 140012 - DNA, 1390 bp, Zea Mays
cccaaactttcaggactactggcaccaaccactcgcattcgtcactcgtccctctcccctctctcccccaaggccccaacccacttgagcgagccctagagaaggcaaaagccatggcgtccttggttgttcgtgccgccggcgccgccgccgccgccgcccgtcttccctccctccgtcctcgccgcaacggcagcggggtgctctccggcttgagggtcggaacagggcactacggcgcgcggctcgcgcttgcttcgtccacagcttctcacaaagagttcaagatcgcctgccttactgtcgatgacagcagtttgggcccgggggatgaatattttggcctctatactcctaagctgcttgcagttactgaagatgattatgagtctgacccccgcatgccaggcgaggatgagttcgaccatttctaccgtgttctcgccaagaagactgacaacctgctcagctgctacattccaatgccgcttgcactttctgaagaggagaaggccgtgcagaaggagttcaagctgatcgcgagcggatgcatcgacctcctggttggtgcgatgcgccgcacccccgcagagaaaaggcgcccactgttcttggtgtttggtgagctgtacccggtatttgagtttgtgaggtggactgccgaggcggggtgtgccaagtggtggatggcgctgcagatcatcgagaagctggagatcgtgcgcaagatggtgtcgagcgctttcggcggcgcccctgttgacagaagcatggtgttcgccaggaaggtggacctcaccggtgtcgacggcgaggcgctcgccggccacggcctcgggagcaacttatcagtggtgatcttcgtgctgatggacagcgtcttcagcaacgtcaagtcggacatcgatgccatggtctctgctgcttccactccttattagccatcgtcacctagctacctacgtgtctacacgatcgagatttgcagtcactagcctcaagtctccaagtgattggatctctgccacagtgctcttactactgccctagctcaagtcttgatgtgatcggccgggtgcctacaatggtgtccgttgtagctactagtatcaacctttgttgttcgttctagctattactagtatctactttgttatgttggatcatgcatgtgattgggttctctgctactgcccaaagtactatggtttcagttctacccagtacttcattgtgttgaatcagtcacattatatgatttctgatattagccagcagtatccactccactgtgttggattagtcacattagggtttgttcgttttgctctcaatccatatgggttggatgagattgagtgggttccgttcccaaataaatcaaaaaaaa

SEQ ID NO: 140013 - DNA, 1701 bp, Zea Mays
accaaccactcgcattcgtcactcgtccctctcccctctctcccccaaggccccaacccacttgagcgagccctagagaaggcaaaagccatggcgtccttggttgttcgtgccgccggcgccgccgccgccgccgcccgtcttccctccctccgtcctcgccgcaacggcagcggggtgctctccggcttgagggtcggaacagggcactacggcgcgcggctcgcgcttgcttcgtccacagcttctcacaaagagttcaagatcgcctgccttactgtcgatgacagcagtttgggcccgggggatgaatatgagtctgacccccgcatgccaggcgaggatgagttcgaccatttctaccgtgttctcgccaagaagactgacaacctgctcagctgctacattccaatgccgcttgcactttctgaagaggagaaggccgtgcagaaggagttcaagctgatcgcgagcggatgcatcgacctcctggttggtgcgatgcgccgcacccccgcagagaaaaggcgcccactgttcttggtgtttggtgagctgtacccggtatttgagtttgtgaggtggactgccgaggcggggtgtgccaagtggtggatggcgctgcagatcatcgagaagctggagatcgtgcgcaagatggtgtcgagcgctttcggcggcgcccctgttgacagaagcatggtgttcgccaggaaggtggacctcaccggtgtcgacggcgaggcgctcgccggccacggcctcgggagcaacttatcagtggtgatcttcgtgctgatggacagcgtcttcagcaacgtcaagtcggacatcgatgccatggtgtctgacccttgccgcatggcagacgaggatgtgcaggagttcgaccattactaccgtcatctggccaagagggctgccaagctgcatgccatctacccgcctgaactaccaaagccgctttcagaatctgaagatgagaaggccgtgcaggagaggttcaaggagatggcgaacgagagcatcgacctcgcggctggtgcgatgcgccgcatccccgcggagaaatggcgcccactgatctcggtgtttgcttatgtgttccttgtatttgtgcgggtgaggtggtatgccgagagagggtgtgccaagtggtggatggcgccgcagatcatcgaggggctccaaaccgtgcgcaggatggtgtcgagcgcatgcggcggcacccctcttgacattgacaaggtgttcgacaggatggtggccctctccggtgtcagcgttcaggcggcgcccggcggccacggcgtcgtcgggagcaacgacttatcagaggtgatcttcgccctgatcgacaacgtcttcggcaacgtcaagtcggacatctatgacatggtctctgcttccactccttgttagccatcgtcaccaagctacgtacgtgtctacatacaggatcgagatttgcagtcactagcctcaagtgattggatcatgcatgtgattagctctagtcttgatgtgatcatgcatgtgatacctggtgcccaaagtactacgtttctgttctacacttctacccagtagcaacttcactgtgttggatcagtcacattatatgatttctgaaattagccagcagtatactccattgtgttggatcagtcatatcataagatttctgatattagcctttca

SEQ ID NO: 140014 - DNA, 421 bp, Zea Mays
ctacacattcagttgtacttgtccatatccagtacccttcgcttgggttcagtaaagcttccccttgccctcaggttttagctcgagaccactgcgtaagtgctggaattcctgtgttcacgctagtactcacctctccccagtcaccaaacttcgcccctcacagaaacttgcacgccatcttcctgccagtggtgaccatagcagcagtttacatcctcaccatggccaagattcgtcggaggttgtctcggtcgtgtggtgcccgttccttgttcctcatagaattcccagaagaagatgaaattcaagaagtagtttctaaaaaggagtttgctccagtgcctattcagcaagtggatggagctatctaactggttattgggtagaaaggtcttgagcctcttcactgcaacaaagg

SEQ ID NO: 140015 - DNA, 471 bp, Zea Mays
tcaaacatttttgaggatgctatatggacatatgttactcatacgccaaattttgtgaatttctgagactatttgtatattattaatttctttttgcagaaaatcatcaaaatgcatttaaatccataaaatattatagtatcgaccaaaaattgcaaataagttatcaagactaataaacattccataagaagataacctcaagtccctacatgaaaatgagaaagtgaagtaaaggttatgttgaaacttggatacttcagctgatttcacgtgtaactcacacaacaagtgtaagaaaatgaaaagaatcactggcatcttatggactttatggcacaaacattttttagaattttatatgggcatatattgctcctccgtcaaatttcatgattttttgagactatttgtgtattattataattttttctacagaaaattatcaaaatacatttaaattcataaaat

SEQ ID NO: 140016 - DNA, 109 bp, Zea Mays
attttcctgttgtcttatttctgttttaaaccttacttcaaatccaaatccggattataaattcaaatatgagtgcaataatacaagaaaatcacgcatgatgcaaagt

SEQ ID NO: 140017 - DNA, 1049 bp, Zea Mays
aatatatttgttcgaagaaaaaagaacggcccatgtcccacggtcccacccagtagggcgttcctctcccgtgtggattctccccacctccgccgccgtttccccgcgtgctttctctctctctctcgatctcgagcgacgactcggttacagccgccgtcctacgccaggtcccaggtcttcgtcgggcccgtctccggcaacgagcaccaacaagatttttgtgtgtaaagatttgcgagcaccattcactttttcatcagtgtgaaattaaaacacttcaagcatgagctctcaccgtgtgaagtggaatgaggacaatttgtatgaaattgagtcaaacaaaccggtgaggcagaagataacagagccaaagacaccatatcacccaagatagatgatgatggatcattgtcgccaacacgtcctttcgacaaatgtcttgatgagactgtccaggctgaagctatcttaacagccttaaatggtgtggcttcttcaagcattagcatttcaaaggatgatggttggggatcgtcagatgatgatacagatgccatagatcaagatgctgaccctgaagctgacacgacaaggttgagtttcaaggagcatcgccgtgcccactacgatgagtaccgcaaggttaaggagctgatgaggactggatcccttactgctgaggaggccgatgaggataacagagctgccaccagctccgaagacaaaggtgtggggaaaggagggccgaatgataacatgaagccctcgcctcaaacatgaggagttcatatgaaggttctgattcctctgttatttattgtatcattgtatgcaatacagttgttactcttgttttgttttgagatgctggtgtgccaaaatggatttgatgaccgataattttattggtgttggctacctggtcgaatggtcgtcgctccattttgttggtgacttaacaatttcaattgagaaaatatgtttcaaaccgagcaaactgcttgatgctgaaatcagttattcgccaagagtgaatcttcctatca

SEQ ID NO: 140018 - DNA, 91 bp, Zea Mays
gaatatcagaaaactttggagatcaatggtcatgataattgctacaaatcctgcttgttcttatacatcaccacttgaaaccatcatctga

SEQ ID NO: 140019 - DNA, 294 bp, Zea Mays
atgtcggacaggtgggagctgtcgtcatcgcagatgtcaaaggacgaccctgacttcgactcgccgccgtcgtcgcagatgtcgaaggacgcccccgactccgactcaccgccgtcgtcgcagatgttgggggacggctctggcaggggacaggttggatccggatctgagaggcggcagcggcaggggcgagaggcgagcgctgccggaccaggtgttggagaacgtggcgtagaggaggaggactcagactcgtcgtcgtcgttgcagacgggtgccggatctctacagtga

SEQ ID NO: 140020 - DNA, 625 bp, Zea Mays
atggtgagccatatcctgggcctcatgggggtgtctcgattaaaagagcatctaggtcacatatatgggagtatgaaggcatgtcgtaaagtgccaaatcatgtgaaggacataatgtctcaaaaagtaacagatgggagaattaggagggcacgtggtggtggtgatgatgaagatggtgaacttagtggtccatgttttgcagctaggacacaacctaaattagctacagaccaatatattggtcctggtcaagatgaagaaacaacacctctctgtccaagatcaaaaaggcagaagaagctctccatcaagggcctgcacatgcttgagaagtgatctaatcttcaagcacaagcacaagaatatggcgtatacatggactgattcaatggcaagattttgaacatgtggctctattgtatcaaccgtgtgctctgtttcagtttcagcgcaatattgctgtcatatttagttcatgtggcctaacaatatttagaactgtgattgatttctatgcattatttaaactatggactaccaaatatttgtgactcaccactagtgttatattcactggtgcatggatgttgccaaagaactttatttacataatatttggttt

SEQ ID NO: 140021 - DNA, 3448 bp, Zea Mays
tgccacgcggaaacatccgtccttccctaccggcccggaggcagctgcccagctcccctacgaatctcgattccccaaacaacattgccaccgccgcctgggcgcctcgcttcccctcacctcgccctctccaccaagccgcgagccgcctcccccatagggttcctctccccggagccgggggcagcaagggggatggaggggtgggcgtccgcggcggcgtacacggccgccgcgctggcctccgcggcggcggcgacggtggtggctctgcggctcgtgcaccggcatctccttcactacgccgagcccacgcaccagcgtttcatcgtccgcatcatcctcatggtcccggtatatgcagtgatgtcatttctttcccttgtcttaccgcatcaagcaatctacttcaattctattcgagaaatctatgatgcttgggtcatctacaatttcttttcactttgcttggcatgggttggaggtcctggtaatgtggtggtaagtttgaatggacaatctctgaaaccctcatggttactgatgacttgctgtttaccagctattcccctagatggacgttttatacggagatgtaaacaaggctgtctgcagtttgtgatcctaaaaccaatcttggtcgttatcactttcatactttacgcaaaaggaaaatatgaagatggaaacttcagtgtcaaccagtcctatctatacataactatcatctatacaatttcatactctatggcattgtttgctcttgcactgttctatgcggcatgcagagatctacttcagccatataaccctgtcccgaagttcatcataatcaaatcagtggtgttcctaacatattggcagggtgtgctggttttccttgctgcaaaatctggtttcataaaaaatgctgagaaagctgcctatctccagaacttcgtgctatgtgttgagatgctcatagcagccattgggcaccgattttccttctcctacaaggaatacgctggctccaatgcccgccctttcggtggctttaggggaagccttcttcacgcgatgaaattcaatgacttctatcatgacactgtacaccagtttgcacctacatatcatgagtatgtgctgtacagtaacgagggggaggatgaaccaacaaaatacagccccagcactatggtgccaaccggagagcacatagtggagctggcggaagtcaccgttgtgaactcgaaggctccagggatgtcaaggtttttgatgtatgagcctgatcaggcagaaacaatgccctcccaagtcatggaagcgaacagaactgcttccgcggaaccatacgacctctcaagcttcctcaacgtagagctatctgatcatcctgatgaggtccctgcgattcctgatgcaagagaacaatgacatgttgaggtgtatattcatggtgtaaatgggcgatagcgctgttgagctgatcatagattaaggtgtagtgttgtacatagaaacgtcacatgtcggcgacgtttcattgttcgctcatcttgggggcaagtttatgtttttttcttctttgggtgggttaaagatgagccaagctgacagatcaattcaaggtgtaagtggaaatacgcggtgtaagcaacttgtcgtagatttgctgaattccttttgccgatgaggtgggtcatgggtgtcggttgaacgtggtttgtgtactgattgttgtaaaggttcacttatataacctgcgaggttgcactgagatccaagtggttaactgtatgatgacttaatttccttgttgctgaaatggtatactcatcttattttaggccctagaccatattcgcccagcattacaaaaagagagtagttaatgagtagtacagcatatgactatagggcggcctcctaaatgaaaaaaagtaccttatcatttggaaccagacaccagtgcactggcgtctgcttaacacaattgtacaatcaaagtaactcactctttggcggcaacaactaccagactactagtagttcaggattatcatctgaaacaagccaacctaaccgcatcggccatctccttagaaggattcatcccggcagctttcatctgatacatgattctggtggcctctctgtaccgtccgccgcgagcataggccatggccagggcactccagcacgcggcgtcaggcttgccaccgatcgtctcaaacgccctggtggcgtccgccagctgcccttgcttcgcgtacatgtgtatgagcccggagccaacgaactggttcgtgtccacgccgcgcttgatggcgtcggcgtgcacctgctgcccgcagcagcaccctgggtcctgtgactctgcgaacaccgcgaggatgctcgacagggagaagctgctccttggaacgcccgaggacgccatgtccctgaagacatccacagcctcgctcagtaggctttcacggtggcaggatgtgatcaggctcgtccaggccgcctcagggactggttcctgacagtggtgctgcatcgtcgtcgcgagaactcgccgcgcgcttctgtgaaaaccgcctccatcgcagtacagctgcactagcgagctgccaatgtcaccgtggatcctgcctttcttgacgacgagagcgtgtacctgctcaccgagacgtagctcgcctgcacgggtacatgaccgcagcacggccacgatggcatgggagtagcaatcgccgtccaggaccggcgttccatggcacatgtgggcgaacagacgcatcgcttcatggtggaggcagccatccgagtaggcggacaccatggtcgcccacgccatgccgttagtggtgggcattccgtcgaatacccggcgggcagcttcgatgtccccacacgcggcgtaagaaagcaggagacggttggcgaccggcgacgggagtccatcggaggcgcgacgggcggttatgtgcgcgtgcacggaggccacctctgctgcgtcggcgcactccctgagaagggatatgtagatgtcctcgtcgggcgggatgcccagcgcgtccatcaggcggagcacgtcgccggcgccggacgagggcggatgtgagtccgtagcttccggcggtggtttcttggtgcaatccttgccgctagtggtgtcagtcgcggtgttggtggggacggggagcttcggacgcgagaggagaggcggcggcggtttggccggtttgtttagggccggcaaccgtgctttactggtggccatggccggggtggtggcgttcgcggagagctgccggcagcgacgggtaaggcggggagtcgcggtggtggcgcagagcggtttcgcgacggagcagcgcgccatgtgcgaggttggctgaacccgaggcaccacccgagcgaaggttcggcttgtccaagagaggatttgtcgagatatttagggggtgtg

SEQ ID NO: 140022 - DNA, 331 bp, Zea Mays
aattcgcgcgccctcaagcgtcagccgcgtcgacctccctgctcgctgttctccagctcgctctggccgcggacaccgtcgagtcgtcgaaccccgtcctcctctgctcgactcccaagcaggctccctgatccacgtccttctcgccgtcgatttcccacgcctgtggccacggcactcgctcctcggatccttgtcgtcgatcttcagtcctcgtcagttgctaacgtgcagcacgcctcgctctcgtgctcgccgtcgtttggtcatgagatgttcgtccctgcgcgctcactatgtcgtcgcacgccaagtcgattctgcctcgtgg

SEQ ID NO: 140023 - DNA, 967 bp, Zea Mays
ttctttcagccgcctggacaggcttcatcttcctctcgcacgcgatgtgctcatctccctcctatcctctgctccccagctccgatccagcgctctgggctgtgctccctctctcctccatgcgtgaggtgccagcggactgaccttccccatgcagctccttcctctcgctcccgctccagcttctctacgctgccgccgttccctcgcgcagcgtcgtcctagacccggctgggcgcgctcgggtcttgttggcgcggcggcggcgacccctgtggccgcagctcactcccggtgcttctctccctgcttcaatttttttccagccatggtgctcgcgccggcgtcctcgactcctcagtctggcgcgctgtttttttttccatgtccctgtgcgcgagctgattcagcttgtcggtcatccactgctcctcggcgctccttgctcggcctccgacggctgtcgtccctcgccacgccctggccgcatcgctggctcccctcggttccagccatcagttgccgcggcatcctctcagttctcggtcagggaattcgcgcgccctcaagcgtcagccgcgtcgacctccctgctcgctgttctccagctcgctctggccgcggacaccgtcgagtcgtcgaaccccgtcctcctctgctcgactcccaagcaggctccctgatccacatccttctcgccgtcgatttcccacgcctgtggccacggcactcgctcctcggatccttgtcgtcgatcttcagtcctcgtcagttgctaacgtgcagcacgcctcgctctcgtgctcgccgtcgtttggtcatgagatgttcgtccctgcgcgctcactatgtcgtcgcacgccaagtcgattctgcctcgtggtgctcgccaaatgttcgatggaacgtctaatctgataattgttgccaattctggggattttcgagtttatttgatcgcggtaag

SEQ ID NO: 140024 - DNA, 1342 bp, Zea Mays
gaacgataatctctaatcctatgtggtaaagcattttgctgattcagctattgtgaaagatgcacatattggcttactgctatgacagacccgatattgtttgaaagaggaggcctcccgactccaggatggtaaagtcagcttattactcttcgtttcctctggttctgtaaagatcttaaattccttccatattgtgtatttcaggattctgggctttggtggctccactgtgtcattgtttgcccaggtggaaatcatgatgtcctgcttagaaatccacagtgctctactgtccattgactatggtgcagtaatctcttccaataggtccactctgtgcagagtgcagtgaacaatgaaacattggaggacacgatacagaaaggcgtcaaccgtcgacattgagaaactgaatcctgcctttcttttcatgcgggagctgccagagcttcacatggtttcactgtgaagacaggtgcggaggtccctcttcaccatggatttatatagagagtagagggcatcataatacttcacatctcaatgtattttaccattatatcttgactccgtagcaacgcacgggcatacacctagtccctactataagaaccaaagctggttacgtttacgttgcccataccacagagctagagagctaagaatttccccatggcggcctctcttcaagctctcgcctgcgccatgctcctcctagccgtctccccgctcgcttgcacggcctccaagacgctgctgcaggacaggtgcgagagctatgcgggtggcgaccggagcagctacgactactgtgtctggacgctgcggcgcgacaacaagagcgccaccgccgacgagctgggcctcgccgtgatcgcggcgaggatggccagggcgacggccaaggccaccggggtcaagatcgcctggctgcgggccaacgagacggtcccggtgcggcgtgactgcctggccgcttgcgccagggagtacgccgccgccgtgcgccggctcgggcacgccgcgtcggccgcactggccgggaagctgcagcacgcgcagacgctgctcgcggaggccacgggcgcccccacgctctgcgacgccgcgttcgcggccgcccggcaggacacgccgctgactgacgcctacctcggcctcgacgaccagatcgagttggccatcgccatcttgccggcgccgcggccgtcgctgccggctaggacgtgatgtgaactatatgtataaagcgctattcatcgggcgcgttgtttttttttgtatggattggagtaataaaataattgacatgagtgggtgcttggtttgtagggactaa

SEQ ID NO: 140025 - DNA, 1296 bp, Zea Mays
taaacttaaacaacttgaactccatggcactctgaatttgaccaggtaatggcgttttgctatcaggactgagacagaaactcggcataccacggatacaagtagctgtgcctacgcgttcatcgaccaaaaccccatctcagcaatgatgcctcgtcctcttgcagctctcctttccactgatgccatcctctccttcatcgctctatttccaagagctgcatcatcccgagacatcctaccactgggttcctctctcgaagtcgagtcctaggaatccagcgccttacaaatttacaatcatcagacgggacattctcctctggcttctacgaagtctacacccatgccttcacattctcagtatggtactcaaaggcggcggccaacaagaccatcgtgtggagcgcaaaccctgaccaccctgtccatgccaggaggtcggctctaaccctgcaaaaggacgacaacatggtgctcaccgactacgacggcgcagccgtgtggcgagctgatggcaacaacttcaccggtgtccagcgtgctcggctcctgaacaccgggaacctcgtcatcgaggactcaggaggtaacactgtatggcagagttttgattccccaacggacactttcctgctgacgcagctcatcactgctgcgaccagattagtccccacaacccaatcgcgtagtcctagtaactacatcttccgcttcagcgacctgcctcaagtctcagacatatactggccagaccctgaccagaacatctaccaggatggtcggaaccagtataaccgtacgaggttaggaatgcttactgatagcggggtgcttgactcgagcgacttcgctgatgatcaggcgcttgtggcctccgacgtagggccaggcgtcaagagaaggctaactcttgaccctgatggcaatctccgtctgtacagcctgaacgattcagatgggtcatggtcagtttcaatggtagcaatgacccagccttgcaatattcacggtttgtgtggtcctaatggcatctgccactactcacctagacctacatgttcgtgcccaccaggttatgcgacgaggaacccgggtaactggaccgaaggctgtgtggctattgtcaacacaaccttttgtgaccgctatgacaagaggtctatgaaatttgtgagacttcccaatacggatttttgggggtcagatcgacaacatcttctgtcggtttcttttcgaacttgtaggtatatctgcatcagtgactgcacctgtaaaggctttcagtatcagtaa

SEQ ID NO: 140026 - DNA, 144 bp, Zea Mays
cgcatcccccccttggcgcaggataacacaagccgcgttcttcccccttgtgttccatctcgtgccaacccatctgggctgggacatgcagcgacaatttcactcgtcggtccagggacccccggggtcgaaacgccgacacat

SEQ ID NO: 140027 - DNA, 639 bp, Zea Mays
agaagggtacggtacggtgcccataccatagcttcgtctgtataccctatatctctatagccaacacacacacaaatactctccattccattccatctcaaaggatagaataatgggcggtctctccaccaagcttttcgtggtcctcctcctgctcgtttgttacaccgggacgcaaggcgggccggtgactatggtgtcggcgaggaagtgcgagtcgcagagcttccgcttcaagggaccttgctcgagggacgccaactgcgcaaacgtctgcctgaccgaaggtttcaccggcggcgtgtgcaagggcctacgccaccgctgcttctgcaccagggactgctagtactgcctcgtctcgcctcgcctcggctcgtgtcctgcgtgtgcatagccgcagcggatcagtaaaacatgcatgcatgcgttaccgaatatttggcagtaccagcaagttaatggattaaataatatgtaatggaacaaagcctgttttgaacgtggaactgctgagtgctagcagcgctcgtgtttattggcatatatgaactctatggcgcgtttggactttgccgtgcgagaaattttttttacctgttttcttgtgtttatcgtagaaaaaaataaaccgataca

SEQ ID NO: 140028 - DNA, 98 bp, Zea Mays
ctcacgagggtatttagttcttttagctaccacgttattggtagccgtgtacaaccgtaaaacactgttttattatcgagagagtaataggaagctag

SEQ ID NO: 140029 - DNA, 968 bp, Zea Mays
gttgtggacccacttggcagtcaccctgagtggctccagacgggtcgcagtcgacccacacggccagcggcctcgcccgcctccttatttagaaccgacgacgacacccatccgacccgatcggcgggagagcacgagacgcccctctgcttccttttctctgtcgctcaaaagttgctggagccctcttctctctctcctctccgagccccaaccatggatgaggcgcaagttgtggagtcaaaggatggaaccatctcagttgcttctgcatttgttgctcatcaggaagctgtacaagacagggatcacaaattcttgacaaaagcagtggaagaagcataccgaggagtcgattgcggcgatggaggtccatttggagcagttgtcgtccgtaatgatgaagtggttgttagctgccataacatggttctgaagcacactgaccctactgcgcatgctgaagtaactgcaattagagaggcttgcaaaaagctcgggaaaatcgagctctctgactgcgaaatttacgcgtcctgcgagccatgcccaatgtgctttggtgcagttcatctctcccgaatcaagaggctggtttatggggccaaggcggaggctgccatcgccattgggtttgacgacttcattgcagatgctctgagaggcactgggttctaccagaaggccaacatggagatcaagaaggccgacggcaatggcgcactgatcgccgagcaggtcttcgaaaagactaaggagaagttccagatgtactgatgcttggctgaagagggatttcggatttgtacaatgctcacccagaaggaataaatacatcgcccaaatgtccattgtttcgaaaaaatttacctcaatcccaatgcttagcattctgatgatgcctgaattccttgtaaacagacacaagattgttctttgctgtaactcatgtgcagttagtggaattc

SEQ ID NO: 140030 - DNA, 782 bp, Zea Mays
tccggcggtgctccatatcccgtggagtatatgggcattggacagtttgtggagtcaaaggatggaaccatctcagttgcttctgcatttgttgctcatcaggaagctgtacaagacagggatcacaaattcttgacaaaagcagtggaagaagcataccgaggagtcgattgcggcgatggaggtccatttggagcagttgtcgtccgtaatgatgaagtggttgttagctgccataacatggttctgaagcacactgaccctactgcgcatgctgaagtaactgcaattagagaggcttgcaaaaagctcgggaaaatcgagctctctgactgcgaaatttacgcgtcctgcgagccatgcccaatgtgctttggtgcagttcatctctcccgaatcaagaggctggtttatggggccaaggcggaggctgccatcgccattgggtttgacgacttcattgcagatgctctgagaggcactgggttctaccagaaggccaacatggagatcaagaaggccgacggcaatggcgcactgatcgccgagcaggtcttcgaaaagactaaggagaagttccagatgtactgatgcttggctgaagagggatttcggatttgtacaatgctcacccagaaggaataaatacatcgcccaaatgtccattgtttcgaaaaaatttacctcaatcccaatgcttagcattctgatgatgcctgaattccttgtaaacagacacaagattgttctttgctgtaactcatgtgcagttagtggaattc

SEQ ID NO: 140031 - DNA, 529 bp, Zea Mays
atcccaaatattttaacacaaggagcactagactggtcggagatatgtagcgaccccagcctcacgcggtcacgcctcaccatcttcaccggcggcgcgccaggacaaggagcagcgggactacagactcatcgcaaaagccgtggacgaagcgtaccgggcggtggagtgcgacggcggcgggtaccccttcggcgcggtcgtcgtccacggcggcggcgacgacgaggtggtcagcagcagccacaactcggtccggaaggacgccgacccgtcggcgcacgccgaagtgaccgccatcagacaggcgtgcaagaagctggggaaaaccagcctcgccggctgcgagatctacacgtcctgcgagccgtgcccgatgtgcctggggctcattcgcctggccaagataaaggtccgttccgtccactacgtactgccgaccatcgtttaattaactagaaacgacattgatatagagcgagctgaaggtgacgactgtgtgtaacgacgtgtacagaaggtggtgtac

SEQ ID NO: 140032 - DNA, 976 bp, Zea Mays
atcccaaatattttaacacaaggagcactagactggtcggagatatgtagcgaccccagcctcacgcggtcacgcctcaccatcttcaccggcagcgcaccacgccgccgccgccgccgtcccacgcattgtctgttgctcagcttctcctagcccagctcctgctagctaggctaggcctaggctgctacatactgccatcatccatggagtcgcctcctgatcaggagagtacatctccgacttgggatttgtcttacgaccagcagcggcggcggcggcggcgcgccaggacaaggagcagcgggactacagactcatcgcaaaagccgtggacgaagcgtaccgggcggtggagtgcgacggcggcgggtaccccttcggcgcggtcgtcgtccacggcggcggcgacgacgaggtggtcagcagcagccacaactcggtccggaaggacgccgacccgtcggcgcacgccgaagtgaccgccatcagacaggcgtgcaagaagctggggaaaaccagcctcgccggctgcgagatctacacgtcctgcgagccgtgcccgatgtgcctggggctcattcgcctggccaagataaagagcgagctgaaggtgacgactgtgtgtaacgacgtgtacagaaggtggtgtacggagccaagtcggaggtcgccgctgccgccgggctcaacggcgtcctcccagaggtcttcagagagtactaccagaaatccggcgtggagatgaggcaggccgagggcgaggcggcaacccggatcgccgaggaggtgttcgagaagaccaagggcaagtttcgcaacaagtaaacgcgctggagatggcgccgggcggatggctgttgcctgttgctagtggaatggttgccgtttccaagctttttgtccgggggacctttgatcagaggtcacatgcccagagaccggaataaattcacccctttccccccctaaaaaa

SEQ ID NO: 140033 - DNA, 1062 bp, Zea Mays
atcccaaatattttaacacaaggagcactagactggtcggagatatgtagcgaccccagcctcacgcggtcacgcctcaccatcttcaccggcagcgcaccacgccgccgccgccgccgtcccacgcattgtctgttgctcagcttctcctagcccagctcctgctagctaggctaggcctaggctgctacatactgccatcatccatggagtcgcctcctgatcaggcggcggcggcggcggcgcgccaggacaaggagcagcgggactacagactcatcgcaaaagccgtggacgaagcgtaccgggcggtggagtgcgacggcggcgggtaccccttcggcgcggtcgtcgtccacggcggcggcgacgacgaggtggtcagcagcagccacaactcggtccggaaggacgccgacccgtcggcgcacgccgaagtgaccgccatcagacaggcgtgcaagaagctggggaaaaccagcctcgccggctgcgagatctacacgtcctgcgagccgtgcccgatgtgcctggggctcattcgcctggccaagataaagaaggtggtgtacggagccaagtcggaggtcgccgctgccgccgggctcaacggcgtcctcccagaggtcttcagagagtactaccagaaatccggcgtggagatgaggcaggccgagggcgaggcggcaacccggatcgccgaggaggtgttcgagaagaccaagggcaagtttcgcaacaagtaaacgcgctggagatggcgccgggcggatggctgttgcctgttgctagtggaatggttgccgtttccaagctttttgtccgggggacctttgatcagaggtcacatgcccagagaccggaataaattcacccctttccccccctaaaaaatactccatttcacatggtttgttgtatcagtgtgttatttctttttttaacgcccgcctcgaccgtgtgacattttttttcttaataatgtagggtgttacttgttgggaacataattaggtgtactctcaagactcttaaatctcagctggtaaccctcatcagcac

SEQ ID NO: 140034 - DNA, 914 bp, Zea Mays
atcccaaatattttaacacaaggagcactagactggtcggagatatgtagcgaccccagcctcacgcggtcacgcctcaccatcttcaccggcggcgcgccaggacaaggagcagcgggactacagactcatcgcaaaagccgtggacgaagcgtaccgggcggtggagtgcgacggcggcgggtaccccttcggcgcggtcgtcgtccacggcggcggcgacgacgaggtggtcagcagcagccacaactcggtccggaaggacgccgacccgtcggcgcacgccgaagtgaccgccatcagacaggcgtgcaagaagctggggaaaaccagcctcgccggctgcgagatctacacgtcctgcgagccgtgcccgatgtgcctggggctcattcgcctggccaagataaagaaggtggtgtacggagccaagtcggaggtcgccgctgccgccgggctcaacggcgtcctcccagaggtcttcagagagtactaccagaaatccggcgtggagatgaggcaggccgagggcgaggcggcaacccggatcgccgaggaggtgttcgagaagaccaagggcaagtttcgcaacaagtaaacgcgctggagatggcgccgggcggatggctgttgcctgttgctagtggaatggttgccgtttccaagctttttgtccgggggacctttgatcagaggtcacatgcccagagaccggaataaattcacccctttccccccctaaaaaatactccatttcacatggtttgttgtatcagtgtgttatttctttttttaacgcccgcctcgaccgtgtgacattttttttcttaataatgtagggtgttacttgttgggaacataattaggtgtactctcaagactcttaaatctcagctggtaaccctcatcagcac

SEQ ID NO: 140035 - DNA, 913 bp, Zea Mays
agatctctagcactagctttgatcctttccgccgccaactttggcttgggatttgtctctgacttgggacactcgctgaagagagtacatctccgacttgggatttgtcttacgaccagcagcggcggcggcggcggcgcgccaggacaaggagcagcgggactacagactcatcgcaaaagccgtggacgaagcgtaccgggcggtggagtgcgacggcggcgggtaccccttcggcgcggtcgtcgtccacggcggcggcgacgacgaggtggtcagcagcagccacaactcggtccggaaggacgccgacccgtcggcgcacgccgaagtgaccgccatcagacaggcgtgcaagaagctggggaaaaccagcctcgccggctgcgagatctacacgtcctgcgagccgtgcccgatgtgcctggggctcattcgcctggccaagataaagaaggtggtgtacggagccaagtcggaggtcgccgctgccgccgggctcaacggcgtcctcccagaggtcttcagagagtactaccagaaatccggcgtggagatgaggcaggccgagggcgaggcggcaacccggatcgccgaggaggtgttcgagaagaccaagggcaagtttcgcaacaagtaaacgcgctggagatggcgccgggcggatggctgttgcctgttgctagtggaatggttgccgtttccaagctttttgtccgggggacctttgatcagaggtcacatgcccagagaccggaataaattcacccctttccccccctaaaaaatactccatttcacatggtttgttgtatcagtgtgttatttctttttttaacgcccgcctcgaccgtgtgacattttttttcttaataatgtagggtgttacttgttgggaacataattaggtgta

SEQ ID NO: 140036 - DNA, 600 bp, Zea Mays
ttctcacatatgcagggcaacacaggagggcagacccagtgccgaaggctccaacatcaccttgctctttcctacaaaatccatattgtctttcccgggaaaccaagcatggtaaattgagaccccaagcaagaagcaatgaaaacaaacacgtcacaatttcaagatcattgtccagcctacttaaagcaaatttacagaaataaagttacaagcataattgtcctagtttttaccgcaagggatattcatctcaaatacatattttcaagttcagaaatcgtacagcataagctcaaaccaggcgaatggatagggggtctgagtagcactacacaggtcctgtgtttgactcctcacgggagtaaatttcaggctaaggttaaaaatatcccctactttgtcccatactcccatgacaaacaggcccaaggcccggccctagtcgcagtcattctcacatgggctatggtgccgttgtgtatgggtggaccaggtgcccaggggttgtcttaccccctacaggttaagtttttttaagctcaaacaagtacatttatgcttgtgtgcaacatttgagatgctcatgtagagttttga

SEQ ID NO: 140037 - DNA, 877 bp, Zea Mays
ggaaacaactttttcattgggaagaaatcaattattccaccgagccgaccgatcgagacctcgctcatctttgtaggacacccgcaccctccgcgtcgaacacccgatccggacaccgctccaggctccacctctctcccatctcacgccaacgctcactggaccattcctccgtgctggggagcggcggagagctatccacctcgtctcaggcaccctctggcgtccccctccccccgccgcgtgccggcgagccgcggagatccggggttctgacctcgctccttctgctggtatggaatcgctatttttccgcgactgcttgttcgtttcgttctgtgggatctcctggccgctgcgtaaccctagatatccggaccgttatgtttggtgacctggtggggcggatctgatcttcagcactctgtttgcggcttttgtgggattaatcgttctgtttgtgctggtgtgggtttaatttgtcaggatttgttgggggggggggggggggggggggggtggctgaaatcctgttcgctacgttgaatccgccatccggtcgcgcttcagtggctttgcgtgcgttcggttgacggcacggtatttggatcggagtcacggaaggacgggatcatccttgcgacaagaaggggcgaccgcatctggatctccgcggtggcgccctccctggcattcgtgaatctccctctgttgatttcccacatcctccacgctccctcatcctcggtgttgaccctcagcatcctgctataccagcggatctcgagttcccttgacctggaacctgtttcgtattgcacgacattataaacacgagttattgtttcctgaagaaacatgagtctctgaatgaaga

SEQ ID NO: 140038 - DNA, 948 bp, Zea Mays
atcaaccacaggctaggaggaggggacacacacacgtacaaaccgagagcacacaccgtcccctgcccgcccaccgccgcgacacgcgcgccatggccatgctggctcgctccgccgcgcacctcttcttcttccttctcctcgtatccaccgcgcccgccgtgcggaccatccccgacgaagcccgcggccccggaaacaacatccacgaggcgtgcagcaagacgctgttccccaaggtgtgcctgcacgcgctcaaggacaaccccgagtgccaggcgggggcggtcacgccgcgccggctggccgagctgctcgtgtacgtgtcggccgaggtgggcatgaccgtggccgcgttcgcgcaccacgagctcaactccatcaaggacgacgtcctgtacaagtgcctcgacacctgctccgaggacatcgaggaggccgtggcgcacctcagcgccctctcccgcgacttctccgacgccaagttcctcgaggtcaagtcctggctctcctccacgctcggcggcacctccacctgcgacgacgcatgcaaagacgcgcccgtcagcgacatcaagaacgcctgcatcaccaagagcttcgagtttgagaagctgctgcgcgtcacgctcgacctcatcaccgatgcctcagggtccatgtcggccgaggtcgcactgcctccgtcggcggcatcgggcgccagcgggccggcaccggcgccgttcggaggttacggctcgtccgctggcgccccggcctacggcgcgccgtctcctgctggtgacccagcttatggcgccagcggctcgccggcaccaaccccgctgtagagtgtactgcttccgacgcgtacgcgactgcatgcatgagcgatatataatgtcaccttggtgcagactcctgcgctccgaaggattttttaaatatttttaaatatttttaata

SEQ ID NO: 140039 - DNA, 1328 bp, Zea Mays
attcacaatcacaccaccacctttaccaccgaagagagaaacgcgagcaaccagcgatcgccccatggccgccatggctcgttccgtctccctcgtcgtggcgcccctgctcctcctctccctcctcgtctccgccgcggccagcgcgcggaccgtgggcgacaccgtgcaggacgcgtgcagcaagacccagttccccaagatctgcgtggacagcctcgccgccaagccggagagccagaaggcgacgccgcgcaagctggcggagctgttcgtgaacatcgcggccgagaaggggtccgggatggccaccttcgtgcaccgcaagtacagcgacaaggaggacagcgacatgttcaggtgctacgacagctgctccgacgacgtggaggaggccgtcgcccacctcaacggcctcgtccgggagcccaccgacgccaagttcctcgagctcaagtcgtggctctcctccacgctcggcggcacctccacctgcgaggacgcctgcaaggacctgcccaagaccagcgacaaggacgacgtcgtcaacttcagcctcgacttcgagaagctgcagcgcgtcacgctcgacctcatcaccgaggcgtccggcaccatgtccgcaggcatcgccctgccaccctccaacgccggagcgccctcctacggcgcggcggcgccttccgggggctccgccgatgcccccgccggcgcctccgagggccctgcgagcgccagcggcccgtctggtgacgacgcgccggcgtccggtgctggtgccagcgcgtcggctgctgatgctccggcggcggcggcctcatccggtccctctagcgcaccagcgccatcgtcgtcgtctgagtcctccgccgcaccaggcccatcttctgatggcacctccagcgccccagcaccatcgtccggcgacgattctgattccgacgacgatgggtcagcttgagcctgaccgatgacgcgggtttgggttaccggtgccactcaaaatacgatcccttttattgtaaaagagggatcccttctttccattgcattcttgcaatccgtttcttcttgactatgtttcttcttgactatgtaacgataataacatgagaaaattatctgaatgacattatattttttctaatgctttatttatcatcgcaaatatcttaattaattctttctataccacttaaatgtacttttttattatttcttatcattgctggtgatatagaagagtaaaataattgtatgttctaatttcttgtatggtactcatgatcacatagaaatataagaaataacacccgagttatatactt

SEQ ID NO: 140040 - DNA, 339 bp, Zea Mays
atgccacaacagctaacatacgcacctgtcaactgtatctccgtatttggtgttggatctggtgtcgtcatcgttggagcaggtggaggctcgcctcttgcgatgggactcatagacgagggtggcctcaatgaccatcacattgaggaggacggactcgtcatcccacccggagacggtggtcatgtgccttgcttcctctctagggacaacgcgatgggggcgacggcggatgggagagccaagccttttatggatccatgcgaatcgacgacgaagcgtttctggcgacgacgccgagatggaggcggtggatgcgaaaggatcagagagaagtag

SEQ ID NO: 140041 - DNA, 108 bp, Zea Mays
gcagtgcggagaggcgcccaaaccaggtcaggttttaataactctgattcaaaagaaaaagaaaaaaacataagcatatataggagcattagcagcaattatgcatga

SEQ ID NO: 140042 - DNA, 1609 bp, Zea Mays
gctagatacaggccacaatgctaatcctgttgtttatacatccttgataaggaatttcttcatgcatgggaggaaggaagatggacacaaaatcttcaaagagatgaatcgtcgaggatgccagcctgatcttactctactgaatacatacatggattgtgttttcaaagctggtgacgttgaaaagggaagggcaatatttgaggatatcaaaggttatggtttccttccggatgtacgaagttattccattttgattcatggtctcacaaaagctggccaagctagggaaacttccagcattttccatgccatgaagcagcgaggttttgctcttgatgctcgggcttataatgctgttgttgatgggttctgcaaatctggaaaggtggacaaggcctatgaagctcttgaagagatgaaggtgaaacatgtacctcctacggttgctacatatgggtcaattattgatggtttagctaagattgataggttagatgaagcttacatgctttttgaggaagcaaaatcaaaaggaatagaattgaatgttattgtgtatagctctctcatcgatgggtttggaaaggttggtaggatagatgaagcttatttgatattagaagagatgatgaagaagggtttggcaccaaatgtttacacatggaacagccttatggatgctttagtgaaagctgaagaaatcaatgaagcacttatttgtttccagtcaatgaaggaaatgaaatgttccccaaacacttacacatatagtattcttataaatggactttgccgcgtacagaagtacaataaggcttttgtgttctggcaagaaatgcagaaacagggattggtccctaatgttgtgacttacacaaccatgatttctgggctcgcaaaggtagggaacataaccgatgcttgcagtctctttgagaggtttaaagccaacggtggaatccctgacgctgcaagtttcaatgctcttatagaggggatgagccatgcaaatagagctattgaagcatatcatgtatttgaagaaactcgattacgaggatgtaggattaatgtaaaggcatgcatcagtcttctagatgctttgaacaaagctgaatgtattgaacaggctgctgttgtaggtgcagttttgagagagattgccaagtcccatcatgcttctagatcattgtaaaattcagcttgacttggtgatagtttgacagtattggcattgatatgatgcttgggttagcacaggacaaattacactgtaagccaaattgatgtggcttgtatagtctgtactgtttgactggttgagaataggaagttttgacattattgtgatccagcattgagatagtgctctaggatttggtgagaacactcatgcatttctaccactggtggtattggacagcaggtctggatctcttgatatcagctgggcaatagttgaataatatcggtcgatcagtgtcttgctctaatgctacttggtaccttcatatttgccaactggaggatttttctccagatatgtcaaaacatctctggttcagcatgttgattcaaaaaatttaaatgaaacttcaagacaggt

SEQ ID NO: 140043 - DNA, 911 bp, Zea Mays
aaaaagggggtttacattctttttggaacggatgagttcctatttttctggttggggaggtgttcagttattctatcacttgtggtttgagtattaaattatttatgatttttataaataaattagagatgttcttttaatttgctattgtctatgtatgttcagatttgttctaataataaagtgttattcttctgaaaacttgtggcatattataaatggagaggaaatgtggcatgttcatatctggagaaagccttgtgtcttctttttcgttcttcatcttttaaggctagtttgagaatctaattttcttaagggattttaatttttacaaggaacattagtttttttctcggtaaaataggaatctcttgagaaaatggggttcccaaactagcctcaggggtcttctcctgtatttttagttgactcgagtcaagtagatgattatgtgtattcgattaatcacatcaccattttgaagccgttaatttatcttaacagtgtacccaaaaagaaaatctattgctccgaatttatagacatgatgtaatttgttcttaacagttaatgtatcttcttgcaagaaaaaaacagctaatgtatcttcagtattcaaaggaaagcgggggagcgtcttgttatcatttggagagacatgatgattatccgctagagatccctgtcaaatgctctttggattggattcgtccaagatgaaggattttgtacgaggacgcaacagctgtgtttcgcagtgtcaaatttctatttcaagttcgataaataatatagaatagcttttcagctagtttctaattcaagttcgaccaaggaaaataatctagaatagctttttgtgctaacattgtaattggcgattgcggataattcgttgcttggacaaa

SEQ ID NO: 140044 - DNA, 1282 bp, Zea Mays
gaacaacacgcattcctacaatcggacaatcctactccaagcattgagggacacggaggcggcgccgttcggcactgcacgctcacgggctcgcgcattagtggatactctcccccggcgccacgaaatcgtccgctctcaccaccttccatcggtccctcacgatcttgccaagaatccaagatccgcctgcggtagctagcggtcctatcttgatccgatggtgtcaccgactccgggagggaaggatgcaagggagggtggcggcaaggcggagtggatgatctacgccttcgtggcgcgcggcaccgcggtgctggcggagtacacggagttcaccggcaacttccccgccatcgccgcgcaatgcctgcagcggctacccgccgggtcgtcctccgccggcaccggccctgacggccgtggcgatgcgccggcacggttcagctacgcctgtgaccgacacacattcaacttcctcttgtaccgcggctacgcctattgtgtagttgcggaggaatccgttccaaagaatgtctcagtggcatttcttgaaaggttaaaagatgacttcatgaagagatatggtggtggtaaagctgacacagctcttgcaaaatgtctaaataaagaatatggacaagttataaagcagcacattcaatatgttcttgatcattcagaggaactagataaaatgttaaaagtgcaagcccaagtttcagaagtgaaaaatataatgttagacagcatagaaaagacactgggccgtggagagaaattgagtgaactccaagacaagacttctgagctacatattcaggcccagcagttcaagaaacagggagtgaagattcgcaggaagacatggctacagaacatgaaaattaagttggtgattcttggaatccttttgctccttgtaatcatagtatgggtatctatttgtcagggctttgactgcaccaagcatgaaacataatagaaatggtacaacgctgctccatccattttaaattataacatgttttggctctttttagatctatagttatgtctagatacatagttaaagctataaattcagaaatgctaaaacattttataatttaggacagaggatagtactaggttggagctgtgatagattttgtgctggtgaagccaagtgtacctctacatatgcttcggctctctagtttcgtatcacggtacaaatgtaaatctgagttggtcctaaagtgtactcgcgatgtaagactaacatgattccttccgtact

SEQ ID NO: 140045 - DNA, 1088 bp, Zea Mays
gtttatcgttattttctcattttttaattagttgcctctttttagatgttagttgatttcatatcctataaaagtagttgatgttagtaggtaaataaattacatttgtatgtctcctcagatttgatttgaccgtgtatgcctggttctcttaacttcccatggattgtatcatgtgtacatgattttcaattgataaaataaagtttaatgctataagcataacaagagcagaagattacacagcagtatgatggttatcatgcttgctttagttatacattatacatggtgtgggggacatcagtaaactattattaactgaaatcattgtcctaagaaatgttagtgtttgtgcaagttgagtgtgctgcatggaaatcatcaacttgttcctatgaccgctatggacgtcgtaataatcagaaataaaaaaggttctttttatatgttgccatagttttatttatttgttgaattcctgcatcacttaaaagtctgttttacagttagtttgaattggcaattccttataattttgccatttctgcctcttgtatttttagacactgggccgtggagagaaattgagtgaactccaagacaagacttctgagctacatattcaggcccagcagttcaagaaacagggagtgaagattcgcaggaagacatggctacagaacatgaaaattaagttggtgattcttggaatccttttgctccttgtaatcatagtatgggtatctatttgtcagggctttgactgcaccaagcatgaaacataatagaaatggtacaacgctgctccatccattttaaattataacatgttttggctctttttagatctatagttatgtctagatacatagttaaagctataaattcagaaatgctaaaacattttataatttaggacagaggatagtactaggttggagctgtgatagattttgtgctggtgaagccaagtgtacctctacatatgcttcggctctctagtttcgtatcacggtacaaatgtaaatctgagttggtcctaaagtgtactcgcgatgtaagactaacatgattccttccgtact

SEQ ID NO: 140046 - DNA, 414 bp, Zea Mays
atgccgccattcgcaaccgcaccccagctctgcaagctctcgcaacccaccgcgtccgagatgaagtttgtcgccgcgtacctgctggagagcctgggcgccgacgccgccaccgaggagagggttgacgcgctccctgccccggccccggcgctcccgaccaagaatgacgtgcgtcgcatcctgatctccatcagcgccgaggtggagcaggatcgcctcgaccggctcttagccctcctggaggtcaaggacattgccgagctgatcgccacgggcagggagcagcttgcctacgcgccgtcaggagccgcggctggcgtgatcgccgctcctgccgctgccgaggccgtggaggcaaccaagaaggaggaggacgacgacgacgtagccctcttcaacctcttcgactga

SEQ ID NO: 140047 - DNA, 234 bp, Zea Mays
atggctgcatcaaagatcgaggtggcaggctatgatatcgatgataaaaacctcaaaagcaccgccaggaagaaggtgacggccgggagcgagctgtctgccgcagatgccaccgttgcagtggtgaacttgaggctcacgtggtataggttcacccctaccgtaatcctgaaaggcaatttccacagaagagctgtaggcagcaagatgagggagccaacttcctggcgatag

SEQ ID NO: 140048 - DNA, 109 bp, Zea Mays
actcaagtgatacaaatatctatagtctgaaattagagttaaaaacaaacataaacgagttggattcaaacaagactaaacacaaaattcggatagaatttgatttagt

SEQ ID NO: 140049 - DNA, 851 bp, Zea Mays
tcctttggaggatacggttggacttcggaaaatactctaaccgctccggctccgatttcctcgcgtccaaggaagctgcagcgagccagccatggacggcccagcccggtcgacctcgagccacgcccgcatcctcgccagcttgcctataagcgccgccacggcgcctggtagcgctcccaaaacgcccaccacgccgccagtcgcaaccgcacaccagccctcgcaacccaccaccacgtccgagacgtccgagatggaggagttcctcgccgcgtacctgctgccgtgcctgggcgccgacgccgccactggacagagggttgacgtgctcccgggcccggccaccgcgctcccgaccaaggacgacgtgcgtcgcatcctgagatccgtcagcgccgaggtggaggaggatcgcctcgacctggtcttcgccctcctcgaggttaagggcatcgccgagctgatctacacgggcggggagcagctggcctacgcgccgtcaggagccgctgctgccgtggttgccgctcctgccgctgccgaggtcgaggaggaggccacgaaggaggaggatgaggacgtcgccctcttcaacctcttcgactgatcgtgcaccctacgtggaccgatcgatgccatcctcgcccgcccgcccttgctgctctgattgtagtaccgtattactgtagtaataaaaccatggtgcccttgctgtctagatccgagatagagcctgtgtttgatgccgatcgaaaggttttggccggatatcttgctgatcggagattgatctgaggctgttctaatcaattccagtagttaatacatgattttaattgtttgtgttt

SEQ ID NO: 140050 - DNA, 770 bp, Zea Mays
ccattccgcggcgccggcggataccttctccctgcatcgccatcggagcccaagatttgctacgccatgtgcttcgacgactgctgttgctgcggctgctacgacgccttctgcgaccggtgctgcccctgcatctcctacgacacgcgcgagaccatcttcagcatctgcatctgcttcctcgtggtcgccgccgtcgtcctcttcgtcgtgctcctcgccgcctacgggttcatccgccacgtggaggtcgccgtcgaggccgcctcgctgaccaggttcgccctcgtgaccaccccggccaccgcgttcgcctacaacctctccctcacgctcaccgtccgcaaccggaactgggccatgagcatcaagaacaccaagccgctggaggccgactacagcttcgacggccagcggttcgaccgcatcgaactcgccgacaagggggacgtccaccccgcgggcaagacccgggtgtaccacctcgactccggcgcggaaggcgcgtacgtggcgctggggaacgccggcgtcgccgaattcgggaaggagaacgcaacggggctgttccaggtggaggtggcgctcgccggcgaggtgaggtacaaggcgcacgtcaccaagtgcaagctggccgcgacgtgcccgctgaagctgcagctcgcgccgccggggacgccagccgtcgtcttccagaaggtcaaatgcaagctcgacaagcccgacaagaactgctagacaacgagccggccgagtggcgagtgttgttc

SEQ ID NO: 140051 - DNA, 162 bp, Zea Mays
cttttccttgacggcatcctccctggcgtgcagctgctgccggcggcgggcagcggccgggtcggcgtccgcggcctccccgatctgctgcttccactcgaactgcgacgtgatgacgagcacgagcaggaggaagacgagcaccaccggcctcgtattcat

SEQ ID NO: 140052 - DNA, 2053 bp, Zea Mays
aacgctaacgccaaggctaatcccgaacccgaaatggcaggtagctctgctcgatgactcggcccctctcgaaagccacgaaaatcgctgggccgttcgattcactcacctcactccacctcttgactgaagaagccgtctgcctgcctccgactcccgcgtctctcctccaagtgatctccttccacctttgccgatcgcccgttgccaccggccgggcgatcctcgtacttccacttccaccatggcctcctcctcctcttcctcctcctcctcctcctcctcctcctcctcctcccgcttcctcctcccgctgctactgctctgttcgcacctctccctcgcctcggcagaggaggcggcgtcggcggcagcggacctcctcagcgaggcgcgcgcgccggggttcgccgcgtggctgcgcggcgtgcggcggcgcatccaccagcgccccgagctggccttccaggagttccgcaccagcgagctcgtgcgggccgagctcgacgcgatcggcgtcccgtaccggtggcccgtcgcccagaccggcgtcgtggccaccatcgcgggcgccgccgccggccccgtcgtcgcgctccgggccgacatggacgcgctccccgtgcaggagctggtggactgggagcacaagagccaggagagtgggaaaatgcacgcttgcggacacgacgtgcacacgacaatgcttctgggggctgccagaatactccaggatcgcaagagcgacctaatgggcaccgtgaagcttgtattccagccggcagaggagggccagggcggcgcgtactacgtgctgcaagaaggcgtccttgacgacgcgtcagccatattcggcttgcacgttgacccggccctccccgtcggcgtcgtttcgtccaggccagggcccttcgcggcgacgtccggtcggttcctggcgacggtcaccggtaaaggcgggcacgccgcgatgccccacgaatccatcgaccctgttgtagctgcagccactactgtcgtcagcctccagaagatcatctcccgagaaatcgatcccctgcagggcgcggttgtgtccgtcacttttctgaagggaggagaagcgtacaatgtcatcccagagaatgtggcctttggcggcaccatgaggagcatgacgaatgaaggtctatcgtatctcaagaagaggatcaaagagatcgtcgaaggacaggcagcggtgcaccactgcagtgccagcgtggacttcatggaggacacgatgaagccgtacccggccgtggtcaacgacgaagggatgtacgctcacgccaaggaggtggccgagggcctccttggggagaagaacgtcagggtgggtccccaggtgatgggcgcggaggacttcgggttctacgcgcagaggatggcgggcgccttcttcaccatcggggtcggcaacgcgagcaccatggcgaccatccattccacccactcgcctcacttcgtcgtcgacgaggacgtgcttcccgtcggagctgcgttccatgctgctgtggcgattgaatatgtcaggaagaaccgtgcgtcgacctaaacgctaaactcaaataaatcagacggaacaaaacggcagtagtttgtcttaggtgtcactatatataatgcgagtatttacatctagtcgctctcgttcctgtgtcgttagaaacaaagcagagtgattgggattaattcttagatcagttgcgagttgcgactacatgacacactttgccgctaaactgaagcgctgccataaaaatccataaagcactagctagtcaatgcatgtgcgtgaaatatataaataaacaaaaaaaagtacagaacatataactctaagaatcaaactttttattcttgcgtccgactactaattcatagaaaattaatattagtattttgtggtgaggaagttcgcggtaacgtaagcagtcgcggatatgactcccgagccacctgaaacataatctatatatctttagtttacacttgtttttataccaaattataatagaaagaggattttttt

SEQ ID NO: 140053 - DNA, 661 bp, Zea Mays
aggatcatcatgtttctgttcttcggccaggttgttcctcctaggcctgaagaaatacggcaagggggactggaggaatatatcgcgcaacttcgtctagaccaggacgcctactcaggtggccagccacgcgcagaagtacttcattaggctcaactccggcggcaaggacaagaggaggtccagcatccacgacatcaccacggtcaacctgacggacgattagtcgccctcgccgtcccaatcctccctgatcaccagccagtcgaacgcaccagctccagctccggccgcggggatatgccaggtcccattggcgcccgacgccaagcgacatggtgccggaactctgcccttcagctcaccgaaccggacctctgtcgcgccggcctacaggatggagtttcatgaccaacaaggcctgcagtgtggacctctgcatgatcagttgctcaccagccgagagcagttggggctgctctcccttcatctcaaacagaggcaaatcctacctaacaaccctacattttagcaaccggacgatttcctcccatctcgatcgaaggctaactgcaccggtgtataaaatactgtagatatttctgctaccgagaggaggaggggccatcaccatcgaaccgagagagctgggagcagttgg

SEQ ID NO: 140054 - DNA, 1882 bp, Zea Mays
aaacaaacccggctctctcacttgggtgctgtttggttcaagaaatgtaacgcaaatggtaatgataatggtttacattcgattaatggcggtaataaatttgaataggctagtatcaatttttagtatggtatctgattacggttggactaaaacaaacatgatttaacgttatcggtcacccattgcgttacaaatatatgaaccaaacggcacattacttcaaggccgacgggctatctcactgatagtgataggaacagaacccgtgcatatttcagtcgtcgctcgcggagccgtggcgcatcgcgactcaggcactcaccgaccgcggatatggccccgccgccatggcctctccttgcgacttccctcctcctcatcctattccaccactcgcctcgcgccgcggtggcgtttccgccgtctctgggcgacagcctcctgggcgccgcccgcgcgccgggtttcgcggcttggctgcgcggcttgcggcgccgcatccacgagcgccccgagctcgccttccaggagcaccgcaccagcgagctcgtccgcgacgagctcgacgcgatcggggtgccgtacgcgtggcccgtcgcgcagacgggcgtcgtggcgaccatcgccggcggcagcgatggccccgtcgtcgcgctccgagccgacatggacgcgctacccttgcaggaattggtagactgggaacacaagagcaaggagagtggaaagatgcatgcttgtggacatgatgctcacaccacgatgcttcttggggcagctaaattgcttcatgctcggaaggatgatctgaagggtaccgtgaagcttgtcttccagccaggcgaagaaggctacggcggcgcttaccatgttctcagagaaggtgtcctggatgacgtgtctgccattttcggcttgcatgtggatccaggacttcccgtaggcaccgtttcgtccaggccagggccgtttctagcagcagcaggtagatttcgggtgacggtcactggaaaaggaggacatgctgcagggccgcaggatgctgtggatcccattgttgcagcatcctctgccatcgtcagccttcagcttcttgttgcccgcgaaattgatcccctccaggctgcagtggtctcggttacgttcatgaaaggaggtgatgcttacaacgtcattccagagtcagcatccttcggcgggaccttcaggagcttgacaacagaaggcttttcgtatctcatgaagaggatcaaagaggtaaccataccgatgaaggaagcactcatatctatttctccaccaatgtgttgtgcagtggatcagtccagatttaaaacagcatacaaaaatgatatatttatatacctctaatcgaagatcatagaaggtcatgccgccgtccaccgctgcaccgccgccgtcgacttcatgcaggagaagctccgcccgtacccagccaccgtgaacgacgaagggatgtaccgtcacgccagagaagtggcagaggccatgcttgggcaggacaaggtgagtgtaggcgcgcagatgatgggcgccgaggatttctccttctacgcggagaagtttgcaggggcgttcttcatgatcggagtccgcaacaagagcatggaggaggcgatgcgtcctctccactccccgtacttcgtgatagatgaggacgtgctgcctgtaggagctgccttccactctgcagtagcgatggagtacctgaacaaatactcaacgacccggcaaactgagctgctgcgcattgagctgtgatagattattgcgcttgtaataagggttacgaggccgaggttatgttgcacaaaagaacgtttgcattgtgcccatagaataaatacagtttctcctt

SEQ ID NO: 140055 - DNA, 1907 bp, Zea Mays
aaacaaacccggctctctcacttgggtgctgtttggttcaagaaatgtaacgcaaatggtaatgataatggtttacattcgattaatggcggtaataaatttgaataggctagtatcaatttttagtatggtatctgattacggttggactaaaacaaacatgatttaacgttatcggtcacccattgcgttacaaatatatgaaccaaacggcacattacttcaaggccgacgggctatctcactgatagtgataggaacagaacccgtgcatatttcagtcgtcgctcgcggagccgtggcgcatcgcgactcaggcactcaccgaccgcggatatggccccgccgccatggcctctccttgcgacttccctcctcctcatcctattccaccactcgcctcgcgccgcggtggcgtttccgccgtctctgggcgacagcctcctgggcgccgcccgcgcgccgggtttcgcggcttggctgcgcggcttgcggcgccgcatccacgagcgccccgagctcgccttccaggagcaccgcaccagcgagctcgtccgcgacgagctcgacgcgatcggggtgccgtacgcgtggcccgtcgcgcagacgggcgtcgtggcgaccatcgccggcggcagcgatggccccgtcgtcgcgctccgagccgacatggacgcgctacccttgcaggaattggtagactgggaacacaagagcaaggagagtggaaagatgcatgcttgtggacatgatgctcacaccacgatgcttcttggggcagctaaattgcttcatgctcggaaggatgatctgaagggtaccgtgaagcttgtcttccagccaggcgaagaaggctacggcggcgcttaccatgttctcagagaaggtgtcctggatgacgtgtctgccattttcggcttgcatgtggatccaggacttcccgtaggcaccgtttcgtccaggccagggccgtttctagcagcagcaggtagatttcgggtgacggtcactggaaaaggaggacatgctgcagggccgcaggatgctgtggatcccattgttgcagcatcctctgccatcgtcagccttcagcttcttgttgcccgcgaaattgatcccctccaggctgcagtggtctcggttacgttcatgaaaggaggtgatgcttacaacgtcattccagagtcagcatccttcggcgggaccttcaggagcttgacaacagaaggcttttcgtatctcatgaagaggatcaaagagatcatagaaggtcatgccgccgtccaccgctgcaccgccgccgtcgacttcatgcaggagaagctccgcccgtacccagccaccgtgaacgacgaagggatgtaccgtcacgccagagaagtggcagaggccatgcttgggcaggacaaggtgagtgtaggcgcgcagatgatgggcgccgaggatttctccttctacgcggagaagtttgcaggggcgttcttcatgatcggagtccgcaacaagagcatggaggaggcgatgcgtcctctccactccccgtacttcgtgatagatgaggacgtgctgcctgtaggagctgccttccactctgcagtagcgatggagtacctgaacaaatactcaacgacccggcaaactgagctgctgcgcattgagctgtgatagattattgcgcttgtaataagggttacgaggccgaggttatgttgcacaaaagaacgtttgcattgtgcccatagaataaatacagtttctccttgctctatgttttcatacaccaatttgttagaacttagggttagaacttaacatgatcgctattctccctccgtctaaaatataagttcgtatatatgtctatatttattatcattcattcggatagtaaaaagaggacaaaaaaa

SEQ ID NO: 140056 - DNA, 128 bp, Zea Mays
atattttgcatttctttctccatttcaaagtttaccatttgaatatgaatttgttagtgagttttacacatagttcaagttcacaaaaataccagtataagaatatatatatttatttatatatcatt

SEQ ID NO: 140057 - DNA, 4406 bp, Zea Mays
ccttttcccacccctctctccctatcacccactgtcagtccaatcaatagttgccgttttggtgcttcaccgacaccgacactttctctcccctccttttctttagagagagatagaaaaaaaaacaaaagaaaagcctcagcacgctaatcatcagcagctggtaacaacgcggtggttgcgctgctcgcctctacaagcaacgcaccaacgccaacgcggcgcggcattattatacaccacaccaccacacccacccatcccacagctcatataccagagccggagcagcttagcgcagcccagagcggcgccgcgccaagcacaacccccacccgccacagccgcgtgcgcatgtgagcggtcgccgcggccgggagaccagaggaggggaggactacgtgcatttcgctgtgccgccgccgcggggttcgtgcgcgagcgagatccggcggggcggggcggggggcctgagatggaggctagcgcggggctggtggccggctcgcataaccggaacgagctggtggtgatccgccgcgaccgcgagtcgggagccgcgggcggcggcgcggcgcgccgggcggaggcgccgtgccagatatgcggcgacgaggtcggggtgggcttcgacggggagcccttcgtggcgtgcaacgagtgcgccttccccgtctgccgcgcctgctacgagtacgagcgccgcgagggctcgcaggcgtgcccgcagtgcaggacccgctacaagcgcctcaagggctgcccgcgggtggccggcgacgaggaggaggacggcgtcgacgacctggagggcgagttcggcctgcaggacggcgccgcccacgaggacgacccgcagtacgtcgccgagtccatgctcagggcgcagatgagctacggccgcggcggcgacgcgcaccccggcttcagccccgtccccaacgtgccgctcctcaccaacggccagatggttgatgacatcccgccggagcagcacgcgctcgtgccgtcctacatgagcggcggcggcggcgggggcaagaggatccacccgctccctttcgcagatcccaaccttccagtgcaaccgagatccatggacccgtccaaggatctggccgcctacggatatggcagcgtggcctggaaggagagaatggagggctggaagcagaagcaggagcgcctgcagcatgtcaggagcgagggtggcggtgattgggatggcgacgatgcagatctgccactaatggatgaagctaggcagccattgtccagaaaagtccctatatcatcaagccgaattaatccctacaggatgattatcgttatccggttggtggttttgggtttcttcttccactaccgagtgatgcatccggcgaaagatgcatttgcattgtggctcatatctgtaatctgtgaaatctggtttgcgatgtcctggattcttgatcagttcccaaagtggcttccaatcgagagagagacttacctggaccgtttgtcactaaggtttgacaaggaaggtcaaccctctcagcttgctccaatcgacttctttgtcagtacggttgatcccacaaaggaacctcccttggtcacagcgaacactgtcctttccatcctttctgtggattatccggttgagaaggtctcctgctatgtttctgatgatggtgctgcaatgcttacgtttgaagcattgtctgaaacatctgaatttgcaaagaaatgggttcctttcagcaaaaagtttaatatcgagcctcgtgctcctgagtggtacttccaacagaagatagactacctgaaagacaaggttgctgcttcatttgttagggagaggagggcgatgaagagagaatacgaggaattcaaggtaaggatcaatgccttggttgcaaaagcccaaaaggttcctgaggaaggatggacaatgcaagatggaagcccctggcctggaaacaacgtacgcgatcatcctggaatgattcaggtattccttggccaaagtggcggtcgtgatgtggaaggaaatgagttgcctcgcctggtttatgtctcgagagaaaagaggccaggttataaccatcacaagaaggctggtgccatgaatgcactggtccgtgtctctgctgtcttatcaaatgctgcatacctattgaacttggactgtgatcactacatcaacaatagcaaggccataaaagaggctatgtgtttcatgatggatcctttggtggggaagaaagtgtgctatgtacagttccctcagaggtttgatggtattgacaaaaatgatcgatacgctaacaggaacgttgtcttttttgacatcaacatgaaaggtttggacggtattcaaggacccatttatgtgggtactggatgtgttttcagacggcaggcactgtatggttatgatgctcctaaaacgaagaagccaccatcaagaacttgcaactgctggcccaagtggtgcctctcttgctgctgcagcaggaacaagaataaaaagaagactacaaaaccaaagacggagaagaagaaaagattatttttcaagaaagcagaaaacccatctcctgcatatgctttgggtgaaattgatgaaggtgctccaggtgctgatatcgagaaggccggaatcgtaaatcaacagaaactagagaagaaatttgggcagtcttctgtttttgtcgcatcaacacttcttgagaacggagggaccctgaagagcgcaagtccagcttctcttctgaaggaagctatacatgttatcagctgcggctacgaagacaagaccgactggggaaaagagattggctggatttacggatcgatcacagaggatatcttgactggatttaagatgcactgccatggctggcggtctatttactgcatcccgaagcggcctgcattcaaaggttctgcgcctctgaacctttccgaccgtcttcaccaggtccttcgctgggcccttgggtccgtcgaaattttcttcagcaagcactgcccactttggtacggatacggcggcgggctaaaattcctggaaaggttttcttatatcaactccatcgtttatccctggacgtccattcctctcctggcttactgtaccttgcctgccatctgcctgctcacggggaagtttatcacaccagagcttaccaatgtcgccagtatctggttcatggcacttttcatctgcatctccgtgaccggcatcctggaaatgaggtggagtggcgtggccatcgacgactggtggaggaacgagcagttctgggtcatcggaggcgtttcggcgcatctgttcgcggtgttccagggcctgctgaaggtgttcgccggcatcgacacgagcttcaccgtgacgtcgaaggccggggacgacgaggagttctcggagctgtacacgttcaagtggaccaccctgctgatacccccgaccacgctcctcctgctgaacttcatcggggtggtggccgggatctcgaacgcgatcaacaacgggtacgagtcgtggggccccctgttcgggaagctcttcttcgccttctgggtgatcgtccacctgtacccgttcctcaagggtctggtggggaggcagaacaggacgccgacgatcgtcatcgtctggtccatcctgctggcctcgatcttctcgctcctgtgggtccgcgtcgacccgttcctcgccaagagcaacggcccgctcctggaggagtgtggcctggactgcaactgaagtgggggccccctgtcactcgaagttctgtcacgggcgaattacgcctgattttttgttgttgttgttgttggaattctttgctgtagatagaaaccacatgtccacggcatctctgctgtgtccattggagcaggagagaggtgcctgctgctgtttgttgagtaaattaaaagttttaaagttatacagtgatgcacattccagtgcccagtgtattccctttttacagtctgtatattagcgacaaaggacatattggttaggagtttgattcttttgtagcaatgtgtcccgcccccccactgttgttgtaaaatccgcccattcgcccagaaccgcggtgggcggcgctgctagctttgtgatcatatagaaaacgacttggttgtttttggacattttgaattgaaggaaggatgaagaaggtatggaacacatgtttgtgttttgtgtttccgtcttccttttttttttggtcttcgggaatggtgtggagtggagcatgcatgaggacggtctcatcccggaggggctggcaggcagctggctgccaccaaaaagtcgaaagactactagatagaagcggcatgggcgctgcgaccgaccaaaccgccaagcgagaccggctgaggagggcatgggc

SEQ ID NO: 140058 - DNA, 327 bp, Zea Mays
atggccatggcgccgcggacggcattggcagcagcacgggaacaggcaagcaccaccactagtactagccaggcgcacgccgacagcgggaacggcggcgactgccacggccgcaaccacagccatagccacggtcatcatcatcacggcggcggcgggaaggccaagccagggacgacgccggccgccgcgtccaacccttggatcatctcggcaggggcggcagcaccgcggcctcgagtagtgttcgggttcacggaagctgccggcgtcatcatcctcgtccttgcagccgccgtttcctggtcgcttaccaccacttattag

SEQ ID NO: 140059 - DNA, 505 bp, Zea Mays
aagtttcaagctaggggccggggctttttaaggcaacggtggagagcgtcagtggcagcagctcgtggtccgtccggggtttgctgctccgttttcttcagagcagcgtccatccatggagaggacgaagaaaccatgccttggtgtcgtcgctctgcttctcttcctgctcctggcgtcggccgcccatggagctcagcctgcagatgccaaggacatagcagcaggtgacggcgacggcgagagggccacggtgaggacagggcacgggcacggctacagcagcagccacagcggcgggcacccgagcggcggcacgcccgagcagggcggcgcaggggtcgtcgatccccgtaacctcaacgccagaagccaccaccgccgtggcgcggcgaccagggcaaatgtatactcttcttggctcgtctgcacgcttgtcgcaggaggtgttatgctgctgctttgaggtactagctgggagatgacgtgtgatgcatgtacaaat

SEQ ID NO: 140060 - DNA, 576 bp, Zea Mays
agatcagacattcaaacaactagcaacacatttttcaacaccattaaccttttcaacaggctaatcaagatggcccgtacccatgttttcctgctgctggccttcatggtgctgctgtcaaatgaggtagggataattgcatcaacagaaagtagcagcaatattgatgcagattgtaccccggcggttattaagttgggtgacaattgtatcccgaaggactgcagccacaactgcattgccctcggagctcgtagtggaaactgcatcgaagggccagcatgcaattgtgttttctgtggacccgggattgcaccacctccgctacaataggattctgctgcatggttgctgatatttagaaacttctgctcatggactcgatgtacactaacagtaacaacgctggagcaagttaaatggctagaataaatgattagtgatttcttaaagatgatgaatatgtctgtgcttttatccaaagctaaaaaatacaggaaataaaaaatatataattggttagcgctataccgtatatatgtaatatgagatgtgtgcagatagtagttaaatctc

SEQ ID NO: 140061 - DNA, 2096 bp, Zea Mays
atctgtcctgtcactcctgtcttgtctcccttttctattgttcattcacccccgtgcgctctctccctgccgtggcgacgactgggcgacagccgccgccgccgcagtcgcaaccgtacaccaggcgccaaggccttcttcgggaccttcgccggcggagtatattctgtgccaatgaaatgtctgcctctgaaaaccaggctgctgaagccagaatggacaaaagtgccatgaaaattggcccaactgggaacaaaatccgtattcgtttgccattatcactgagaaagcggttggccgaaggccttcaaaccatgagcacaggattacctgaggatacaacaaaacacgctgctaaggaagtacctgaatatactgatgacactgccaaggctaatttcattgtcccagacctgaatctgacaatcgctgctggcacgcaggataaaagggaaagcatttgccctgtaagaaaagggtcatgtgaagagcgacacacggacattatgagcaatgggctgcctcctgacagcagcgaaacaacaaagaagcaagcatgtgtaggagccatggacaacacccaaagcatggaaccttcaatcacaggagtgcaaagtgaagtggaaaagaataactccattaagaaaccctgtgaacctgctagtgaaaatatcttaagcaagaagctactctatgagacaaacagcaatacctcaaggaagagagtaactgaagaagctaagatcaacaacccaagcaagaacctgaaaacctctgcagtgaagtgtggagaggcaaatgactgtttcctaaccagacggtctgctgatcaatctaatgacaagaaatttagcaaaaaactgtgtagctctgcggtacaagctactgacagctgccagaacatttctggaatgaaacttcctacctctgttggcgtggctgtagaacaaagtaccagcactgcattctcggaggccacaaaagtgtataaagagtttgagaagcaggttaagaggactgtataccttgacaacttgtcttgcctagctacagatggagtcattacgacggctttgaaccagttcggtagtgtcaaacacgttagttttctgaccaactatacagttccatttgacattcccaaatctgcattagtagaaatggaaactgagaaggatgctgattctgtggtcaagatactagatgagttcccattcatgatatctgggatgccaaggcctgtgagggcgaagcatgccacagctgaaatgttcaatgaccgtccatgtaaacctggtataaagttagaattccgttgggtgggccctacagaccctgattatcataatgtcagaaagttcaagtttttgtccaagaggcatgagttggagaacttagcactgatcaagaatgaactgcgagaggagcaacttctcgcgaggcatcagcaggacaatctaaattttcattacatgaagcttgagactgtagacagcatgattacgagtggctgcatcaatcgcctgactcacatttacaacctccgtttcgctgacatgtattgagagtgtcaggtgtacatggacttgttttgacctcggaacatacctgttgggtggaattgagctgtgaacatgatgttacgatctgattaaagtctgcttttaatacttttcggctgttagtgttttttaaatgcttttaggctgttttttaaatgcttttagctgtgaacatatcctagtttggaccacacgtagctccctggttttcggcattgaacaatcagctgatggcgctgtatggatggaattcggactactgtactaagcatttaacaaaggagagcttgggtgctaaagatactgaatattactatatgtctaggcctacttttgtaatggagattttttcccctgttcttgcgcgcgcgcgtgtgtgtgtttgaaaaaatgaacaatttcctgtaaaatgcatagaccattcgtgctcaaacatgcccttagaatgggctgatcagacagacgtcaatatcaattttgtttcttacaatgatgtcattgaataataatagtttcttgagcaaactataataa

SEQ ID NO: 140062 - DNA, 369 bp, Zea Mays
atggccaaagaaaacacgacgacgcctacaaccaaacaccagcacaaaatgaggaagatcgtggtgcgccgttgttgccaagcttcaacacaccccacgcgaggcagctctgattcttcactaacgagcttgaacctctgtccggcccccgatagatgcccgaccctccgaaacaatacagcccacgaagaagggggctcgtcagctgtcattgttgtcgagccacaacccctgatgcagcagcttcgacttcatgttgcaaagccccaccttcacccgcataccagacgccgagaatcaaaagcaactaccgaaggcgaagccgaggccgagacaaacttcaatgtgacaccttcaaaaagggagtga

SEQ ID NO: 140063 - DNA, 485 bp, Zea Mays
gctcagcatgtgatgttgtagtatataaagatgaccaagggggtggcaactggcaagaggaggggacaccgccgctccactctctgcagctcatcagcagcagcagcatctctgagagagcccagagtaggcaactaggcatggagatcgagagggaagctccgggtagcgagaaggcgaggagctggagagctaatgcggcggcggcggcggcggcgcaggcgcagcaagtctctaagacgacgaagcctgacggcggtgaccagccgatgaaggagcctgcatggaagaggttcctggctcatgttgggccagggtttatggtgtcattggcatacctggatcctggcaacttggagacggacctgcaagcaggagcgaaccaccgatacgagctcctctgggtgatcctcattggcctcatcttcgcgctcgtcatccagtcgctagctgctaatctcggagtggtgacaggtgattcattt

SEQ ID NO: 140064 - DNA, 1051 bp, Zea Mays
aagctcacttggacccctcttcggctcttcccacaatctcacagccctcgaaggcaccacccgcgccgccgccaccgctccgaaattacagccatcgtagtgcggcggctaggtcggccggcgtttggaggagctccgaagatgtggtgccagtcgtgcaaggaagggtacgacgaggaggacgccgggacctgcaaggagtgctacgaggaggccagcgagacggaggaggagctcaagcgggagatcgacgacctccgctcccgcctcctcttcctccgcctcccctcccctaccctcgacgccgcatccgcccccaactgcgacctcctcctccacgccatcccctccaccggcgcgggaggcgaacgcgatgctgggcgcacccccgacacacccgccgtgcccgcccatcgcgtcatccttgccagcagatctcctgttttcagagcgatgcttgagaatgagatggaagagagtaggagtggcgtcatcaagatctatgatgtgtcttatgacatccttcgtgcttttgtccattacatgtacactgcagaagctcttctagacgaacagatggcatctgacctcttggtgttggctgagaagtacgaagtaaagcacctgaaggcatactgtgagaagttcatagcatccaaagtgaatgacgacaatgctattacccactacgccttcgcgcaccgtcacagcgcaaagcagctgctggaggcctcgctttctgtgctcatggccaacatgtctacgctatcggatcgtgaagaatacaaggagcttgtggagaaggacccaaggcttgttgtggagatttatgaagcatatctcaaccggcaagtcaacactgcagctgggaaggacacaaattgtagcaacaggaagtgataattacgaacagaactcgtgcagtagcaatattctaactatgcatttatgcattcatgtaagcaagttaagaacatcatattctcatgctgtcttgatttaactgctaatttttttgatgataaatcaattagacgtgttggtggaaaca

SEQ ID NO: 140065 - DNA, 2151 bp, Zea Mays
ttcttattccatcctgctcatgacacccccccacacccaatgaacatggagcatgccgtcttcctcttcctggtttggcttaacacggcagcaataaccaccttgtgcgccggcggcggccaaactcggttctcctactcgggcttcgccggcgctaacctcaccgtcgacggcaacgccactgtgacgcccgacgggctcctggtgctgaccagcagcaagaccaacctccaaggccacgccttctaccacacgccgctgcagctgagcacgtctccgggcggcaaggtggcgtccttcgcggccgccttcgtgttcgccatcgtgtccgactacaccgacttcagcgcccacggtatggccttcgtggtggccccgaacaagggcttccccggcgcgttgccggccgggtacctggccctcctcaacgtccagaacaacggcaacgcgagcaaccacctcctggcggtggagctcgacaccacccagaacaccgacttcaaggacatcaacgccaaccatgtgggcatcgacatcaacgatctacactcggtgcagtcctcccctgcggggtactacgacggcggcggcgttttgaggaacctgaccctcttcagccgggaggcgatgcaggtgtgggtggagtatgacggcgacgcgggccggatcgatgtgaccctggcacccataagggtgggcaataacaagccggcgaggcccttggtctcggccatctgtaatctctcgacggtgctcaaggagcagtcgtacgtcggcttctcgtcggcaacaggtgggatcaactcgagacactatgtgctcggctggagcttcgcgatgaacggtcctgctccagccatcgacatcgccaggctgccgaagctgcctccatttgggcccaagcctcgttccaaggttctggcgatcgtcctgccaatagcgacagcagcagccatcgtcgctgtcggcagcctcgccacccttctcgtgctgagaaagctgaggtacgctgaggtccttgaagagtgggagcttgagtttgggccgcaccgcttctctttcaaggatctgtaccacgcgaccagtgggttcaagagcaaacacctacttggtgccggtggattcggacaagtgtacaaaggagtccttggcagcagcaagtcggtctgcacggaggtggctgtgaagaggatctctcacgagtcaaggcaagggatgaaggagttcatcgccgaggtagtcagcatcgggcgcctccgacaccgtaatctggcacagctactcggctactgcagaaggaagggtgagctcctcctggtgtacgagtacatgccaaatggcagtcttgacaagtacctctactaccgcgaggaggagaacaaaccagtgcttgattgggctcaaaggttccatattatcaagggcgtggcatcggccttgctctacatccacgacaagtgggagaaggttgtcatacaccgagacgtcaaggcaagcaacgtgctcctggacagcgagatgaacggccgcctcggcgacttcgggctcgcaaggctgtacgaccacggcaccgacccgcagaccacgcacatcgtcggcaccatgggctacttagcccccgagctgatacgcaccggtagggcatccaagctcacagacgtgttcgccttcggtgctttccttcttgagatcacctgtgggcgaaggccagtcagtattgacgacgatgccgctcaagaaatgctagtggactgggtcctcgagcacttgcgcgaagaagggtctctcgctcacaccgtcgacgtgagtttacggggtcaatatgatgtcgatgaggtgttcctagtgctcaagctaggtctgctgtgctcgcatccatacacaaacataaggccagatatgcagcaagtcatgcaatatctcgacggaagcacaccacttccagatttgcagcccacagatatgaccttcagtgcaatggctctaatgcagaatgaaggattcgactcatatgccatgtccattcagtccattggcactatatctttcatatcaggtggaagatgacaagcatacatgcatgggacttagagagtgtgtgtgttgtgtcggtgtggatggcgtgcttccttttggcaatgtatatatact

SEQ ID NO: 140066 - DNA, 348 bp, Zea Mays
atggcacgcccgttgttccttgtataccagctcgtaagcctctgcctaaggcttaccaatctatgctccggcgacgaccagcagttcgtatactctggcttcaccggcacaaacctctcgacggatggcgttgcagcgatcacgtcggatggcatgctcgagctgacgaacgggacgctccagcgcaagggccacgcgttctacccggagccggtgcgcctccgcgagcctgccaacggcacggcgcggtccttctccacctccttcgtgttcggcatcctgtccgaccatgtcgagctaagcgcgcacggcatggcgttcgtggtagccggcagcagggaccactag

SEQ ID NO: 140067 - DNA, 1989 bp, Zea Mays
ggaaacgatttgcactggcggttttattacgccgaccgccagtgaaaatcgattttcactggcggttttattacgccgaccgccagtgaaaatcgattttcactggcggtcctcagttacccgcctgtacaaatgatgatttctactggcccctagcactggcggttacgaaaaacgccactataaataggtttacaaccgccactatagaacttctctgtactagtggacttctccggcgctcttcccagcggctacctgggcctcctcaacgtccagagcaacggcaactccagcaaccgcctcttcgccgtcgagctcgacacgatgcagaacgacgagttccaggacatcaacgacaaccacgtcggcgtcgacgtcaacagccttcactcggtgcagtcgtactacgccgggtactacggcggcggcggcggcagcggcggcttccgcaacttgaccttgattagcggagaggccatgcaggtttgggtggactacgacgctgaggtcgcacagatcaacgtgaccatggctccactcagcatggccaaacctgcgaggccacttgtgtcggccaggtacaatctctcaacgatcctgactgatgatggcccggcgttcgtcggcttctctgctgcgaccggtgggacgctgaaatcacggcactatgtcctcgggtggagcttcagcatcgaccgccctgctccggccattgacctcagcaagctaccgaagctgcctcgtgtttcggccaaggacaggactaggaccctggagatcgtcttgccggtagcaaccgcggcattcctccttgccgccggcatggccatcttgttactggtgcgacgacatcggaggtacgctgagctgcacgaagactgggagctcgagttcggaccacacaggttctcatacaaggatctgttccatgccacggacggcttcaagaactctaaccttctcggcatcggcgggtttgggagggtgtacaagggggtgcttcctgcgtccagaacagaaatcgcagtaaaacgggtgtcgcacgaatcgaagcagggcatgaaggagttcatctcggagatcgttagccttggacgcctgcaacaccgcaacctcgtccagctgctagggtactgtcgacggaaaggcgagctgctgctggtgtacgactacatgccaaacggaagcctcgacaagtgccttcacgaccgagaggggcagcacactttagactgggctttgagggtccaaattatcaaaggcgtcgcgtctggcttgtcgtacctccatctagactgggagaaagtggtcgtccatcgagatattaaagccagcaatgtcctcctcgacggcgacatgaacgggcggctaggagactttggcctcgcgcgactctacgaccacggcggggcagacggcccaaagaccacccatgtggtaggcaccatagggtacatagctcccgagcttggtcgcaccggtaaggcatcccctctcacagacatatttgctttcggcatcttcgttcttgaggtcgcgtgtggacgaaggcccatcagcaagcagctcacgcaggacgacgacagtgacggcggcgccttgttattggtggactgggtgcttagtcactggcagaatggatcactcactgaaacagtggacatcaggcttcaaggggactacgacagtgacgaggcatccatggtactaaagctggggctactatgttcacacccattcgtggacgcaagaccaacaagcatgcgacaagtcacccagtaccttgatggccacgtagcattaccggactttatgccgccctgccatatactacccagcagcatgatgattccggagcaaagcgagggatttcttatgtacaacaatacgtcaagccaaatattcaaggcaagcaatgggagcatgtctagcctctcagggggaagatgacctagctgttatatgtgtgtgtgtctctctctcatg

SEQ ID NO: 140068 - DNA, 2049 bp, Zea Mays
ctcgaacccgtcgcccctgtctgcgccgtgttcctcttcccaatggcctcctcctcctccgtcccaccggaaccctagcgccgcggcccaccactaccagctcgctcggctcgtgtccagatcccacgccgcgccacaccacatggcggcggacgcggcgcagcagggcccgggcgtccaccggaggcgcggcggggccgccccgcgcgcctggtgctgctccttcgccggcgtgcccgacagccccgacctccgcccgatcccctcctcggcagcgtcccctgcggcggcgtcgaggaagctgccgcccaagtccccgtcggcggcgtccttctacggctcgcccacctcgtccaggctcgcgggcctcggcggcctcatcgacccgcgccgcatcctctcgcccggccgcgtctcccccatcgaccccgacggcgccgtcccgctccctcctcctacgccgccgccgccgccgcccgctgagtttccggcagctgtgggcaccgcggagcagccggcgccggtgctggcgtcggcattgccctcggcagcggcggcgccgcaggtggtgtccgtgcgggaggaagcggacgcgcacgcggctggcgtgctggatctgaagctcttcctgcgggggagggacgggaggtgcgtcctcatggagctcgactccagggtgttgtgcggctgcagcgacttcttcgccgccatggccccgcacgaggacgctgctgccactgctgctggtgccggcgctgccgggaagacgatcgaggtggacggggtcgataatttggatgctttcagggctgcagtggaactcatgtacgaccctgatccaatgcggggtcttgcagctgccggtgtgtcaagggctatagatgtgcttgaggtatgctcctctatcatgttcagcaagggaatcaaaacatgtttgacatacatagaagctgttccctggaatgagaacgaggaggagaagctgaagaatctctttgcaagattcacttttgacgaagcaatatcccaggatatactggcaagactgcgaccacacaactggaaaagctcagatgacctcgctgtacagcttattcaatctgtcactaacagcaccagcactatggcaagaaaagacatgcaatctttggtgaatggtcttctaagcaaaagttcagtctatcaaaaggactcgtcaggattaaacaaggagagcctgtatcagatctgttattcatgtctagagtcactggtggacctctttgaagaggccatagaaccaacatattacacaggtcaggctgtggtagttagagggagcaaaccactgatcgagcgaatctctacgcaaacagagaacctcaattggctattggatattctagtaaacattgacattgcagaagaatttgtagaactgtgggcgaagcaaggcaggctcattaggatgcacgagcaagcatcagcgatcgtcaggtatgagctaagtcgaatatcagctggtgtgttcattgcacttggtaaaggaaaagtgcagtgtcgtggtgacgtacgaagcctcctctttcatggatggttcagcacaatgttgttggattttggctggcttcagcgctgccccaaaggtctcgacctaagatcgttggaggagaatttagggcgaggccttttaaccctccctctcaggcagcagcaatgtttgttcgaggaatggttccagttctatgcgaccaaaggacccgagtgtccgaaccttattagagctttccaggtatggtggagaaggtctttcattagatcattggtagaacctcaaaactaagtttttccttgatgtactagtatgttgcgtgtatgatttgtaaaattgcaactgttctgatgacccttaaaaatgttttttcgtttgtagtttagttcttcccattgtatgtgaatagctggatgaatttgcttgaggataacatctgcggcgtggagtatgtaataacccaacccagtcatatgtcgaacttttgtactttttgtagcatgacagtcaatagtgtc

SEQ ID NO: 140069 - DNA, 2874 bp, Zea Mays
atcagtgcacaagtatctgccattgaaacaccatctgatttggggagcaaaggcaaattcgtcagaaacctactgacagaccctgttacaaacaaaaaaaagacagactgtccgttccgtgttaatcgtagattccaacgaattggtgagcagggatcaggtaacatggtgacaatcagtgaccagagctggggaaggaagagtgatgctgctcaaaatttgaaactccacgcgagatttcaggctttagttacagaaggcagcacctcaaaaaaaggaaacaccaaattcaggccaaactgggcccttgcacgcctgttgaccagacggggcaagttttttggcaaagcccagcccacaaacgtttgccccaaaggtgtcataccctacgtaccaccactgcccagatttgcagccgccgtcaattctcctactctcccagttttgccttcacacaagccaccatacaaatcttacgccgaggttgtgagacgaggggttaaggcaatggaggacagaggcaaaactggattctctggatatggagcaggcagagctttgggtcacaatagaggtgatcgaatggagcttcggcaaggacaggttcaggggaacaacactggctttgggcagggaagtggaccttttcagccggcaacaatgcttgggggtaattgccagcagattgccccaaattttggtggttcgttttttgggcaagggaatttggtgtttggtcagcgactgcaaggttcgcagttagggttcaatcatggatttggtggcagcactggaggcaatagggatttgtcttggacacatgggcgagatcatcgtgctcggtctacacatgcaccccgtgctgggaagttcagtgccaacaaacatgttgtaagggtgggaaactggagaattctctgcaacaccaggggcagcgcaccaataaaatgatgcagaacagtgctgaacctgaacctacctatgaagctgaatgcaaaacggataatggaagaaatggttgacaataggcatgacaaaaaaaggatggagaagcaagatgagaatgtaatagttcaggatgctataaagatcactcccaggattgaggcaccaaaaggtaaaccaaaatggtgtttccgttgtagaactaagggacatgctacaacagaatgtaccgtgatccttttctgcaatatatgtgagggaggtgatcatgtagcagccacttgccccatcaagaaaaaacctcgaccggtggctctctcggtcggttatgctgtggatggtttaggtttctttcatattccacatgggccgatttctactaccaaaaatgaaaagaatatggcactaatcaaagttataggaggtgcacttcaacaagcagatttggttgcccacttacagcggctggtgcctgaaaagtttgaatgggatgcgcaactgcatgcaccaaatacatgggtaacatcctttccttcaaaagtagaattaaagcgaacagtgaactttggttctgctgatctaaagaatggcttagtgttaaaatttgaagaatttgaggaggaggaatactttggagtggaactgcctcgtgtgtggatgcgggtactgaatttacctaacgtacttcgaacatatgaggtgttgtgggctattggaacgatgattggagctactacaaaggtgaatatgatcactactcgaaagagtaattttggtcgatttgaggtggctgttctaaacacatcaataatgcctacacagatagatgttgtcatcggcacaagatggtttgaattacaacttcaaattgagagtacaagttcttcttcagggacaagaacgactgaggataatggtaacactaatggcgacaatcatgaaaaaggcaatgactcagaaatgaaggatgaagaagctggtgctaatgatcataagtcctctcaatcaaatgtttctttttcagttaaaggagcagggacctctaaaggacagcatgttgatgatggttccattgaggatttagaggaagatgatttattggatgttggttgggaggtggcagatggtcctactactgatttaccctcttaattgtatctggataattatgtagtccaaaatgacaacaacaatattcaaattcagaaaaatatgggcaatgatgttgagcagatacaaccccatatgcaggctactttaaggaaaaattgcttgttcacaattagtgaaacacatgctgaatcacaacctgcagcaatacaaacaaagcaaaaccagaaagaagatgatggcggcatcgaagctactgcatcagatgccctaggtcctttgctagatagggccttgacagagcttaaagaaagacagtttccacataatggcagcacagaggatggtcaagttctgactgacaaccaactacacactccaccataccaggtgaaaaaaaactataatgctaggacaccgaagaggaggagtaaaaggagggaggactctgtcaacgaagattccatcgaacgtgctgaaaggttggtggcaaaaaggaatttggagaattctaaaggtagtgttcagaggaacccactggataagacaatggtccgtgttgcaaaaagaggaaaacatgacataaatcaagtggggatgtcgtgcgcttgagactacaatgatgcaaattttctcatacaacggatggagttttagtaatcgaattgatttttaataaatttcgaaatatggttgttcttgagatattaaacatcgtgtatattggtttgagatgtaataattgaacaaccacatgcatctattggtgcagaagctagaatatttcaatatattccctattctaaaaaaagttaaata

SEQ ID NO: 140070 - DNA, 520 bp, Zea Mays
caaataaaaaatataatcgtgttgtgtcgggtcagcactacaggccgaggctacagcccaagcacgacacgacgttgttggctcttacaagtattaagtcgtttctaagaccacattggcgcaatggactccatggtgtttgaggttgctgaattggatggagcaacaatgatttatcacactaacaataaaatgaaagattatttgttggttttaaacgttagtaattgctacgaagtagcataatttatatggagcgcatccagtttttattgatgcctgactttagcaatcactccatattttgatctatctttttttaagtttgagttcatgtgacttattttagaaactttagctcacaaactttctcttatttggtctctatatgtggaattatgtcattttataatctccgttcgttcagtcagtcgttgtgaactctcttctaatcgctcacttcattgaccgtgttgtaccaagacatattgcatagagtaaacaataacatcagttagcc

SEQ ID NO: 140071 - DNA, 162 bp, Zea Mays
cgtaacttgtgctcaataacatggatatcatttttgcattcacggttttacatttttcgagtgaattgcagttcaaatctgaattatccgagaaaattcaattaaacgaacaaaatctaatatttatagcaaacacttttataattgtgccaaaatggaaca

SEQ ID NO: 140072 - DNA, 1566 bp, Zea Mays
atggtgcagcaaccacgaatcaactctgcaatagtgagtgccatccgtgcggccaggatgtcaaagaacactaatccagcagcagccggctcatcagcaggctcgcatcactatatacagaatgttgataggcccgacagggcatacacaactgaaagggccaagcgaggcggaaaggcaaacgcttcgagcggccagatctttgtgacgactgcgccggatcattttgggccaatccttgccgaacatgaccccaggaggaacaccggtgtgcgagttggagaaacatgggaagatagacttgagtgtaggcaatggggtgctcatctgcctcacatagccggaattgctgggcagagcagatttggtgctcaatcagtcgccctgtccggaggctacgaagatgatgaagaccacggggagtggttcctttataccggaagtggcgggagggatctaagtggaaacaagcgaacaaataaggagcaaggttttgatcaaacatttgtgaagatgaatgaggctctccgacaaagctgcttgaggggttaccctgttcgggttgtacggtcccataaagagaaacgctcttcgtacgctcctgaattgggtgtgaggtatgatggaatttacaggattgagaagtgttggaggaagattggtgttcagggaacgttcaaagtctgcaggtatctgtttgtacgctgtgacaatgaaccagcaccttggaccagtgatgatcatggtgaccgtccaaggccattgcccaacattcccgagttaaaagatgcaactgatataaatgagagagatgagcgtccttcatggggctacgatgagaaggaaggccgctggaaatggatgtacgagccgccaacgagcaggaaacctgttcgcactgggcttcgtcctaagaccggcaagcaagcccggaaaagagcaaggagtgatgagatgcctaacgaccctgaaaaactcctgaatgagtttagctgttgtatctgcttccaagtgatggcagagccactcactgctccctgtggtgacagcttctgcaaggcttgtctgctgggggcatatgataaccagtcctccgtgagagaaagaagccatggcggccgcactctgagggctcagaagatcgtcaagagatgcccatcctgtgcaactgacatcagcgacttcctagcggatccacagatcaaccgagacataatggatgtgattgagtcactgcaacggaaaggcgacaccaccaccaaggacgacgctgcttcatatggatatggtgctgacaaggccgaggaattccgtggtggtgacctgcaagaggaagctgatccggagatggatgctgaggataactctgaatctgacacggatgctgatgcttcttgtggcagaactgtggttgggatcaaggatcaggaaggccagcagctgcagccccagaagcgcaagggtggcgttgccattattggcactgatgatggtcctagcaaaaggattacagcaagtgctgatgtggaacagaaaggttggaataccagtactgtcgtcgtttag

SEQ ID NO: 140073 - DNA, 567 bp, Zea Mays
atttaaaacattggtatatacagtgcggatagcgtgacagcgtcaacgccagccatggcggcggctcagtcctccaccgattcgttggctccgcacctccgccgccgtccgcgccgcctcgtattcgaccgccgctacggctggatctttgacgaatggacgcaccccgccgaccaagccctctccggcggccgcggaatgttctgtgcgctgacgatggcgcggtcgctggtgagcgctgcggcgtgctcgattaactatgctgtcagttcaatcagcagagttctggaacgccccaaaagactccacaagaagcagcaagcctggttccgtgaacttgaatgctcgggagttgtagctgatcttaagttaatacagacttgaagccattctgaactagaatgcaccacaactggttgcatgtgttccgtaaagaagcatgatcatctgtaagcacggtatcagaaaattatgagacacttatccttagcaaaaagctatttgtcctgtttctactctaatgtggcaatgatggcacatttattttactggggcactaaccatgaa

SEQ ID NO: 140074 - DNA, 686 bp, Zea Mays
atttaaaacattggtatatacagtgcggatagcgtgacagcgtcaacgccagccatggcggcggctcagtcctccaccgattcgttggctccgcacctccgccgccgtccgcgccgcctcgtattcgaccgccgctacggctggatgtaagagacacacgagcacccgcagccccacctcccccctgcggtatccgccgacgtcctgattccgtgctctgacgctccctcgcccctcctctctcccgcagctttgacgaatggacgcaccccgccgaccaagccctctccggcggccgcggaatgttctgtgcgctgacgatggcgcggtcgctggtgagcgctgcggcgtgctcgattaactatgctgtcagttcaatcagcagagttctggaacgccccaaaagactccacaagaagcagcaagcctggttccgtgaacttgaatgctcgggagttgtagctgatcttaagttaatacagacttgaagccattctgaactagaatgcaccacaactggttgcatgtgttccgtaaagaagcatgatcatctgtaagcacggtatcagaaaattatgagacacttatccttagcaaaaagctatttgtcctgtttctactctaatgtggcaatgatggcacatttattttactggggcactaaccatgaactcatggcagtactg

SEQ ID NO: 140075 - DNA, 1439 bp, Zea Mays
ctcaaagcatgtcatcctcagctggtagtccgagagtgacagaaaggaaagcagacagagacagccacgagcaccacgacgatgacgacgacggcgagaagggatcaggtttctttgacaaggtgaaggatttcatccaggacgtcggcgagaagatcgaagaggtggtaggcttcgggaagccgaccgccgacgtgaccggggtccacataccccacatcagcctggagaaggcggagctcgtcgtggacgtcctcatcacgaacccgaaccccgtcccgatccctctcgtcgacatcgagtacctgatcgagagcgagggaaggaagctcgtctccggcacgatccccgacgccgggaccatccacgcgcacggctcggagaccgtcaccatccccttcctgctggtctacgacgacatcaggagcacgtacagggagatcgagcccgggagcgtcatcccctacaaggtcagggtggtcctccacgtggacattcccgtggtcgggagggtctcgctcccgctggagaaggacggcgagatcccggtgccgtacaggcccgacgtcagcgtcgacaggatcaagttcgagcagttctccttcgaggagtccaccgcgacgcttcacctgagcctggacaacaggaacgccttcgacctggggctcaactccatggactacgaggtgtggctcggcggcgtgagcatcgcgtccgctgagctcagggaggctacggatatcaagagacgggaagtgaccaccatgaacttgcctatcagcttcaggcctaaggatttcggctctgctatgtgggatatgatcagggggaagggcactggttacaccatcaagggacacatcgatgtcgacactccgtttgggcacatgaaaataccaataagcaaagaaggggggacaacccgtctcaagaagggggatgatgacgacgacgatgacgacgacaaggactagaaacgaagggatgagctatttagctttcctgaagcagataacaaatatgaaatatttccctgccagtttagtttgctacatatttaatttaagctatcctaccagcttataatctctagttagctttacttcctccactatttggtacatctgttttatctttatttcttatcttggaattcatttatatccttcatagtgcttctttaatctgtgtatgaccatatatagtcatgcatcaaggacatcaaagatgagcaaatgagacaagattactctttatacccatctagtcggtgtggtgttatatgatgatgtttatttctcctgttgaatgtagtggtttaaagtaccgttgtccaccaattgtaacgatatgcatagcactgtttagaggcaaattatcttacactttctacggtgatgtacatcgtgagaattaatctttaacaatttgagataact

SEQ ID NO: 140076 - DNA, 1818 bp, Zea Mays
attccctcggacgccgtgccgcgtggtgtcgtgtcgcctattcttcctcttgcaccgcagtgttcttgccgccggcaactcggctcggctcaacaagccacgcaaccttccgccgtcgagactcgtgaggcgtcgtcgcccctgccctctctgccgacaggggacagggtggagagttgcccgggctcgggttgactcgtgtgggcgcctctttcacgcgttcggaggttgtcttgtatcacccattgcctgcaccaggagtgacaaacaacctcaaggatgggatccagtcaaaagttatggaaacggttggcaatgcaatcaactcattcgatccaaatgcgttgcctcggcatatagaaggggcattgggaacagctggaaacctcattaactcatttgagccaaaatggtctgggaaaaatgagtttgatttaaatggggaagctgatttccttgatggatatgaatgccctgatgaatattggggctctgcacctgtgaaggcgcacaaaccagttaacattaagaacctgctgggtggcgttattgcgataatcggtcgcaatttgggaaatactgaagctgaacagccaaaggacactaagaccagtgtctcattccttgggtcggctgatgatggtaacacattcttgcattcctcagtctacatgccaagtgctccaccagtacttgatgaagaagccttaaattacaacatttatagggctgtactggaagcagagccaccagaatggcttcctgacagttatgctagtgcgtgtatgcagtgcgctgctctttttactgcccttacacgtggaaggcatcattgtcgattctgtggagggatattttgcagggcatgctcaaagggacgatcgctgttgcctgccaagttccgtgagcggaatccgcaaagagtctgtgatgcttgttatgataggcttgatccattgcagaacttattgattaattctgtcagcaatgcctcacaaactgcaaagcatgatgtcatggattggacttgtgcaagagggtggttaaattttcccattggattaacaatggagcatgagatatacaaggcagcgaataccttgacaagttacagccaggtggcaagaataaaccctgagaagtctattccccatgcagttcttagtggagcaagtgggcttgccatattgacagttgtaaaagctggtgctattcttacttacaaacttggaactggcctagtagttgctcgaagatctgatggatcatggtctgcaccatctgctatactttctgctggttttggatggggagcacaggttggtggtgagcttatggatttcatcatagtgcttcgtggcccagaagctgtccaaactttctgcagtcgaatgcatttttcacttggggcaggtgtaagtgctgcagcaggacctgtgggcagagtagcagaagcagacctgagagctggtgataaaggatcaggagtttgctatacatacagctgcagcaaaggtgcatttattggtgtctcattagaagggaatctagttgccacacggatggatgctaatctgcggttttatggtgacccatatctaacaaccagcgacattctcacggggaatgtggaacagccaaatgctgccaaatttctttacactgcactggataatctatactcagggctggattggtagtgtacatatgtactttgaatttttttttcgattgtaaaagttgtatatatccacaaaatgctttcgtttgttcggcgtggcaaaataattaatgaaatgctctgtattaatgaacttc

SEQ ID NO: 140077 - DNA, 1859 bp, Zea Mays
attccctcggacgccgtgccgcgtggtgtcgtgtcgcctattcttcctcttgcaccgcagtgttcttgccgccggcaactcggctcggctcaacaagccacgcaaccttccgccgtcgagactcgtgaggcgtcgtcgcccctgccctctctgccgacaggggacagggtggagagttgcccgggctcgggttgactcgtgtgggcgcctctttcacgcgttcaaagttgtgtgctattcattgattgccatgtcaacacgtagggaggttgtcttgtatcacccattgcctgcaccaggagtgacaaacaacctcaaggatgggatccagtcaaaagttatggaaacggttggcaatgcaatcaactcattcgatccaaatgcgttgcctcggcatatagaaggggcattgggaacagctggaaacctcattaactcatttgagccaaaatggtctgggaaaaatgagtttgatttaaatggggaagctgatttccttgatggatatgaatgccctgatgaatattggggctctgcacctgtgaaggcgcacaaaccagttaacattaagaacctgctgggtggcgttattgcgataatcggtcgcaatttgggaaatactgaagctgaacagccaaaggacactaagaccagtgtctcattccttgggtcggctgatgatggtaacacattcttgcattcctcagtctacatgccaagtgctccaccagtacttgatgaagaagccttaaattacaacatttatagggctgtactggaagcagagccaccagaatggcttcctgacagttatgctagtgcgtgtatgcagtgcgctgctctttttactgcccttacacgtggaaggcatcattgtcgattctgtggagggatattttgcagggcatgctcaaagggacgatcgctgttgcctgccaagttccgtgagcggaatccgcaaagagtctgtgatgcttgttatgataggcttgatccattgcagaacttattgattaattctgtcagcaatgcctcacaaactgcaaagcatgatgtcatggattggacttgtgcaagagggtggttaaattttcccattggattaacaatggagcatgagatatacaaggcagcgaataccttgacaagttacagccaggtggcaagaataaaccctgagaagtctattccccatgcagttcttagtggagcaagtgggcttgccatattgacagttgtaaaagctggtgctattcttacttacaaacttggaactggcctagtagttgctcgaagatctgatggatcatggtctgcaccatctgctatactttctgctggttttggatggggagcacaggttggtggtgagcttatggatttcatcatagtgcttcgtggcccagaagctgtccaaactttctgcagtcgaatgcatttttcacttggggcaggtgtaagtgctgcagcaggacctgtgggcagagtagcagaagcagacctgagagctggtgataaaggatcaggagtttgctatacatacagctgcagcaaaggtgcatttattggtgtctcattagaagggaatctagttgccacacggatggatgctaatctgcggttttatggtgacccatatctaacaaccagcgacattctcacggggaatgtggaacagccaaatgctgccaaatttctttacactgcactggataatctatactcagggctggattggtagtgtacatatgtactttgaatttttttttcgattgtaaaagttgtatatatccacaaaatgctttcgtttgttcggcgtggcaaaataattaatgaaatgctctgtattaatgaacttc

SEQ ID NO: 140078 - DNA, 1874 bp, Zea Mays
attccctcggacgccgtgccgcgtggtgtcgtgtcgcctattcttcctcttgcaccgcagtgttcttgccgccggcaactcggctcggctcaacaagccacgcaaccttccgccgtcgagactcgtgaggcgtcgtcgcccctgccctctctgccgacaggggacagggtggagagttgcccgggctcgggttgactcgtgtgggcgcctctttcacgcgttcgtttcgttgtttcagaaagttgtgtgctattcattgattgccatgtcaacacgtagggaggttgtcttgtatcacccattgcctgcaccaggagtgacaaacaacctcaaggatgggatccagtcaaaagttatggaaacggttggcaatgcaatcaactcattcgatccaaatgcgttgcctcggcatatagaaggggcattgggaacagctggaaacctcattaactcatttgagccaaaatggtctgggaaaaatgagtttgatttaaatggggaagctgatttccttgatggatatgaatgccctgatgaatattggggctctgcacctgtgaaggcgcacaaaccagttaacattaagaacctgctgggtggcgttattgcgataatcggtcgcaatttgggaaatactgaagctgaacagccaaaggacactaagaccagtgtctcattccttgggtcggctgatgatggtaacacattcttgcattcctcagtctacatgccaagtgctccaccagtacttgatgaagaagccttaaattacaacatttatagggctgtactggaagcagagccaccagaatggcttcctgacagttatgctagtgcgtgtatgcagtgcgctgctctttttactgcccttacacgtggaaggcatcattgtcgattctgtggagggatattttgcagggcatgctcaaagggacgatcgctgttgcctgccaagttccgtgagcggaatccgcaaagagtctgtgatgcttgttatgataggcttgatccattgcagaacttattgattaattctgtcagcaatgcctcacaaactgcaaagcatgatgtcatggattggacttgtgcaagagggtggttaaattttcccattggattaacaatggagcatgagatatacaaggcagcgaataccttgacaagttacagccaggtggcaagaataaaccctgagaagtctattccccatgcagttcttagtggagcaagtgggcttgccatattgacagttgtaaaagctggtgctattcttacttacaaacttggaactggcctagtagttgctcgaagatctgatggatcatggtctgcaccatctgctatactttctgctggttttggatggggagcacaggttggtggtgagcttatggatttcatcatagtgcttcgtggcccagaagctgtccaaactttctgcagtcgaatgcatttttcacttggggcaggtgtaagtgctgcagcaggacctgtgggcagagtagcagaagcagacctgagagctggtgataaaggatcaggagtttgctatacatacagctgcagcaaaggtgcatttattggtgtctcattagaagggaatctagttgccacacggatggatgctaatctgcggttttatggtgacccatatctaacaaccagcgacattctcacggggaatgtggaacagccaaatgctgccaaatttctttacactgcactggataatctatactcagggctggattggtagtgtacatatgtactttgaatttttttttcgattgtaaaagttgtatatatccacaaaatgctttcgtttgttcggcgtggcaaaataattaatgaaatgctctgtattaatgaacttc

SEQ ID NO: 140079 - DNA, 879 bp, Zea Mays
ccgatggacgcgacggcgtcggacccctcgtcggggcgcagacggcagctgcagggcccccgcccgccgcggcttgccgtcaacgtggagtccctcaagatcaagaagccggccgtcacgcgacgactgaagaccaccgaggtcatcgaagtccagcttgccgacttcaaggccgccgttcagcgcctgacaggtcttggcgccgctgtcgccgcaaccgactacatggacatgaaatacacaggaccaggaccgtctatggtgtcgtcaccacgggtggagttcagtgacggatctacggcggggtgctccagcccccctccgtctgagaagacagtggaggaggaaggaaaaaaaagaggaaggagaggagaaggaaggaagaggaaggaagaagaggaggaaggaagaggaaggaagagaaaaaaagaggaagaagagagaaaaaaggagtccccgcggccacgactgtggttactctcgcccaccaccaccgctgtctcagcctccgcgagggcgaggctagcggccaccgagagggcgatctggccgctgtctctgccccgccctcctacggactacggagaggacgcggacagcttggcagccgttcttagcctgccgggacggccggggatcctgtcgcctgcggctctgccgccggctgcgttctctgggcagttctcggcgctgccgtttgacccaagctgcctctcatggctcaaggagctgacccccttcctgccctctgcaagcagatgcgtagaggagctggaatgcctgttcacgctgaaacgaagcaccctgctgcttcccggaatgccatgtccggccaccgtctcgacgtttgagttgttcagagatgtcctagaaatgtaa

SEQ ID NO: 140080 - DNA, 3795 bp, Zea Mays
atggcgtgccgacgcaaggcaccttcgccgtcggtcaggggtaaatcaggcaatggagaaggagcacctgctggacatgttggtgatgccgagcaatctctgaaagctgaacctgttggtgacccacaagttggagtatattcgccatcaatcagtcgtctctttcagcagcttgttcatgttcgaactatcatctcatccttcaatgggaagctgccatctgatgcttggttcaatcatgtaaaaaatttgacctcagatgcagaagaatctctcgaatatctgcactacaagatgatgctggccaagcttggggttgggatagagttcaagaaagtaatgcccaatgtgtcagggacttgttccaaaacaacagctttaagcttcatgcacttactagcttcacaggaacttgtttttttaccagttaccgacaaattggagggccttcgacctggaagccctggtttgactggtgtagttcttggaaactacagtgagatattgtcacttagttcttcggtcatgcggtgcatccttttgtgtcgtggcattttaggcattattaacatagttaacatgaggcttaagaaggatagtctggaacttcctgcatttgcttttgatgatctgacatatgctggtcagaacaagggaactggaatgaatgcgcatcgtgtgccggcacacatgactgaccctatatatttgttgcctatgtttatcaggagtcttttgtgtttggatctctcaaactgcagtggccttacacagctgcctgcttccattggcaacctttctaatctggttgcattgaacctctctcactgttattcccttcacacactgccggcgtcagtaggaagactgaagaacttgcaaattcttgttctttcctgctgccatgaactaaggattttaccagtgtcactttgtgagctttccaagctaaggttgctggatttagcaggctgttccggccttcaaaacttacctgcttctttagtaaatctttgcaatctagagattctgaacctatcatattgcaaagaactgaaggagcttccacaaccatttggtaacctccaggaactgaagtacttgaatttatcaggcagccatcgggttgacttggatgttgagtgcctatatacacttgcaaatttgaagtccctaactttgtcgccgcttacaaatattcaaggctttcctggttccttcaaagatcttgcgaatcgcttggatagtttaagattgtggaagaaccagatccatccccagtgtggcccaaaggctgtttctttgcattcatataggtgttatgagcaaagtatcattgacatgttactttctgatgaggctgacaatagtagcaaccagatagtcacttctgcttgcatagttggtgaaagtggcatgggaaagactgagctagtccatcgaatttacaataaccgaatgattttggatacctttgatttgagaatatggctgcatatgtgtgataaaaagaggctattaggtaagatagtagagctcactacttttgcatcctgtggtgatgcctcaatcagtgttcttgaagaaattgtaatagaagaacttgctagcaagaggttgttacttgtactagacgattctgaaatcaaggaccagtatttctggggttatctatggaagctacttaatgtttgtgcaaaaggaagcgctgtcattgtaactaccaagagcatggtagatgctaaccagactggagcaatgcaaaccttttacttgagtcctctatccaaagaagaatgctttatgattttcaaggaacatgtgcttgaagatttagttgtgaataattactgtcagttagaaagcattggctggaagtttgcggagaaatgtggtggcaatccaatgtgcattaaagccctaagtgggttgttatgtcattctgaagttggattgtctgaaattgatatgattgttgatggtatcttaccagcattaagattatgctacgatcttttgccagcacaccttcagcagtgcttcaaattttgttccctattccccaaagattatatttttgtcaagcaccatatcatccgattatggatagctgaaggcttagtcttctgtgaagaaggtactaagccagaagatactgctctgcattattttgaccaactattctgcagatcatttttccagcgttctccatttcatagtgatcataaagatagctttgttatgcatgagctatttcatgatctggcacactctgtttccaagaatgagtgcttcagatgtgaggaaccattctgcagcttagctgaaaatgtttcccacctatcccttgttctttcagattttaagacaactgcactttctaatgaagtaaggaatttgcagtcttttctggttgtcagaagatgtttcccagtggtgagaatttttactttggatgatattttcgtgaaacatagattcttaagggcactaaatttgagctatacagacatactagagttgccaatttctattggaaacatgaagcacctgcggctcttggctctcaacaacaccaagatcaaaagccttcctattgagataggacaagtaaacagtcttcagacattggaactgaaggattgttgccacctcattgacttaccaggaagcataagtaatttggcaaagctgcgacaccttgatgtgcaaaaagaatcgggcaacattattgttggcatgcctcatggtataggatatctgacagatctccaaactctcacaatgttcaacattgggaatgatatgttgcattgttcgatttcagagttgaacaatctgaatggactaaggggacatgttcatgtaactaggcttgagaatattatgacagccaatgatgccagagaagcaaatatgatgggtaaacacttgctagaggctttgacactggagtggtcttaccaggatgaaggcatggacgatgacatgggcaaagaaattgctagtgagattcttcaaaatcttcaacctaacagcaacattatggagcttatcattcgaaattatgctggagatctgtttcctgtctggatgcaggacaattacctttgcaagctcacctcagttacacttgataactgccatggctgtagtgagctcccttaccttggtgatctaccatctcttaaatctctcttcatacagagaataaatgttgttgaaagatttggaatcgagaccagttctttggccactgaagtaaaatatcccactagatttccatcactggaggtgctgaatatatgcgagatgtatgatttgcagttctgggttagcacgagagaggaggattttccacgactctttcgactttctatcagtagatgcccgaaactaaccaaattgcctcgccttatttccctagtgcatgtgtcatttcattacggtgttgaactgccgaccttctcagaacttccatcactggagtcactaaagatcgaaggcttccagaagattagatctattagtttcccacatcaattgacaaccttgaataagttggaaattattgactgcaaagagctgttatcaataaatgcctattccttgtctgtttcaaattttaaagttgtcaggtgcctaaagcttgatttggttggaagttcaatggaagaccatatcagccacaaagtggttaatggaaggtatgaatgctcatctacaacatttaaatgtactttgttgttctttttgcttttattcttccttcaacacaactctaagtccatctag

SEQ ID NO: 140081 - DNA, 989 bp, Zea Mays
gatagtgagatggctgagttggagaaaatgacattcatgaatgttatcaatgaattatttgcattctattcatcaaccatcaatggaaaatcaaccaataagggtacttgctcgaaggattttgtggcaagcaaaaatgttgttttgaaggattacaatgatgagaatgaggttgatcttgatgagttatatgcagcaacaaacaatgagaagaaagtgtctgaattggatctttacatgagtgagggcctagtgaaggctaatgaaggtgatgcaccatttgattccttatcatggtggaaggggcaagtgacaatttttcctattctttctagccttgctcgtgatgtcctatcaatgcaagtgtcaactgttgcttcagagtcggcatttagctctggtggacgtgtggttgatgccttctgttcaaagcttaaacctgaaattattgaagccttggtttgtactaaggattggaagcttgcttcagagaaagatttggagggtaaaataaaaactataagtgaagctatgaatactatggaggtggacgataaggttgagacttgagatcttcaagcaagcatggattgcttgcacaatcttatgtcatttaaaaactatcttttattgttatagtctattgtgtagaactgtcttgtgctatgttagactcttgggtgatgtgaacttattgctattatatttgaacgattgtgttagactattgtatggtgcaaacttactgcactatcgtgttgatcatctaaggtttatgtagtgctatattgtatgatgtgttgaatgatgtgaacttattgctatattatcatgttgaactattgtctagtatgatgtgaatttattgctatattgtcatgctagagtactatgttgtatgatgtatacttattgatatattgttatgttagagtactatgttgtatgatgtatacttattgttatattgtcatgttggaccaactgaa

SEQ ID NO: 140082 - DNA, 3252 bp, Zea Mays
ctcagcctcacagtcacagcagctttacgcaatacgcaccaagccaccaacagctgattctctactaatccaatctccaaaccaaccatcgagttctcgcgccacgtactgatccggcaatggacaacaatggagagaagacgacgaccatcatccacactctgcgagatgcgctgcttcactttgcagtcaagtccaagaagctcgcgtcgccactgctggagccattcgggcgggcgaccgagccgaccaccgtcaacgacgacgagctgatggcgctcaagtccaaactgcggcggatccgcgccaccctccgcgacgccgagagcctgtccgtcaccgattgctccgtccagctgtggctggccgagctcggcgacctcgagaaccgggccgaggatgtggtcgaggagctggagtacgagtcccgccgctcggcgcagctggaggagctcaagcaagacttgctctacgccgccacgacgcggaagcagcgccgggaggtggcgctgctgttcgcgcccccgcccgcgaggcggctccgccgcaagatcgacgacgtctgggcgaggtacgaagagatcgcgtcggacaggaagacgctccggctgcggccaggcgacggcggctgcgcgccccggcccgcggccagcccgctcgtgccaagcagcgtgcttccccgtaccgagcgcctccacgggaggcatggcgacgtcgagagggtcgccgcgctggtcctcggggatccggacggcgggacgagctacgccgtcgtgcccatcgtcgggatggccggcgtcggcaagactgctctgatgcagcacgtctgcggcatggagacggtgaagtcgtgctttgaactgacgcgctgggtttgggtctcccaggattttgacgttgtcagcgtgacccgcaagattgttgaggcgatcaccagatcgcgcccggagtgcggcgagctgagcacgcttcatgagctcatagttgagcaccttgccgggaagaggtgcttgatcgttcttgacgacgtgtgggatgacaatcccagccactggaacagcctgacggccccgctgagccactgcgcgccagggagtgcggttgccgtgacgacgaggagcaacaaggttgccaggatggtgagcaccaaggtgtatcatctcaaatgcttgtcagatgaagactgctggcttgtatgccagcgacgggcactgccaaatagcggtgccaacgtccacaaagaactcgttgagatcggtgagaggatcgccaagaaatgccacggcttgccattggcggcagaggcagctggtagcgtcctgagcacttcagccgtctgggagcactggaatgaagtcctgaataacgacttgtgggctgacaatgaggtgaagaacctggtactgccggtgctgaaggtgagctacgaccacctgtccatgccgctgaagcgcagcttcgcgttttgttcattgtttccaaagggcttcgtgttcgacaaagatctgctagtccagctgtggactgcgcagggctttgtggatgctgaaggagactgcagccttgaagcgatcgccaatggttacttcaatgacttggtgtcaaggtgcttcttccacccttccccatctcatgctctcagcgaagggaagtttgttatgcacgacctgtatcaagagcttgctcagtttgtttcaggcaatgaatgtaggatgatacagctccctaattcgacgaaaatagatgagagctctcggcatttgtccttggtcgacgaggagtccgattcggtcgaagaaataaacctgagctggttctgtggtcatcgtgatctccggaccttcatgttcattgcaagaacagaacagaaccccgaggagatgaccttcagaacaaagattccatctgagctgatcacaggttttgaatgcttaagggctttagatttgagcaactctaatatcatggagctaccgaaatccattggaagtctgatacacctaaggttccttggtctggacaacaccgcaattcagatgctgcctgagtcaatttgtgctcttctccacttgcagacaataaagcttaaccattgttcttcccttactcagttgcctcagggcatcaagctcctattgaacctaaggtgcttagagattccacattcaggcataaagatgccttctgggattggagagttgactaggctgcagagactaccttttttcgccatcgagaatgagcctgctggatgcaccatagcagacctcaacgaactggtaaacctcgaaggacatcttcacatcacaggtttaaacaacctggatggtgcacaagcttccatcgccaacctttggaacaagccgcggattaaaagtcttacactcgaatggtccggagttacaaattttagcaagtccctttgtgatccgcaaggaaacgctgtgagctgcatatcagacagtcagcaccctgcaatcagtgcaacagcagatcaggttttgaattgcctcaagccacattcaaatctggaggagcttagcatcaagggttataacggatccttttctcggtcatggttaggatggctgcccttggacaggttagcttctattgaactgaaagactgtcgtaattgcaaagaagtaccgccccttggctgcctaccatcactgaaacacattttgatacaatcactgccaagtgtgaagctgattggtccagagttctttggaaatgctggagataccacttctaacattaggagcagaatctgtaatgtgtttcctgcactgaagtcactaaagttcagcaacatggaagcttgggaggaatggctcggtgtcaagagtgagcacttccccaatcttaaatatttcagcatcgtcagatgcagcaaactgaagctgttgcccaagttcacttcagaaccaaagctgaaaatacggtactgtgacctgctgcaaatgcctttgtgtcagaatccggtgaagcacataccagctaaaaaggaaatctcatatacgtgcattgcggaaggtgacattttagttcttgaagcttcctgttcctatggtgcatagaatcctagacggtaatcattgatctgcttaatcagggttgcagtgcaaggatgtcatcaatgcaactaggagctgattggtgtatgtcctccatgcatgaaactgctgtaaaactggggcctgtgtggataattgaaatagaaaggcaaaggggaattagttctgggtg

SEQ ID NO: 140083 - DNA, 816 bp, Zea Mays
ctactctgactctcatctgaagcgcgcgagagaaacgcgtatacccaggcggcggttgaggaagaggaggagaagaagaagaagatggcttcctccgcatacgcctcatggtccaagcggtggatccgtcccgaggtacgtacgccgttgctgtttcccatctgatcgttcattcggtttctatcgatcggagaattgggtcatcggggatggatggatggatctgacgggatttgccgatcccggtgtcgcgcgcgtccatggatcaggtgtacccgctgttcgtgccgatggccgtggccttgggcatctgctcgtaccagcttgtgcgcaacatcacgggcaaccccgaggtgcgggtgaccaaggagaagagggcggccggcgtcctggacaaccacgacgagggcgagaggtacgctatgcacggcctcaggaagttcgtccgcgggaagaagcccgagatcatggcctccatcaactccttcttcgccgaccctcccaaggacgattaagctagattccgtcatggatggatggatggatggattcccgattcccgatcgtccatagtatgttttaccattcattagctgccggcggcgcgccttgattcgtagccgtcgtcggtacatttttttttgtttctaaaattctaattctcccatataaatggaacatcatgcatttgtcgtgtttgcttgcatggctgcgaacgaattcagcacgccttgtgattttcatcacatatttgattgataacggatgactgtatgatattgttgcgtcccaacaaattatgttgatttatttaca

SEQ ID NO: 140084 - DNA, 697 bp, Zea Mays
ctactctgactctcatctgaagcgcgcgagagaaacgcgtatacccaggcggcggttgaggaagaggaggagaagaagaagaagatggcttcctccgcatacgcctcatggtccaagcggtggatccgtcccgaggtgtacccgctgttcgtgccgatggccgtggccttgggcatctgctcgtaccagcttgtgcgcaacatcacgggcaaccccgaggtgcgggtgaccaaggagaagagggcggccggcgtcctggacaaccacgacgagggcgagaggtacgctatgcacggcctcaggaagttcgtccgcgggaagaagcccgagatcatggcctccatcaactccttcttcgccgaccctcccaaggacgattaagctagattccgtcatggatggatggatggatggattcccgattcccgatcgtccatagtatgttttaccattcattagctgccggcggcgcgccttgattcgtagccgtcgtcggtacatttttttttgtttctaaaattctaattctcccatataaatggaacatcatgcatttgtcgtgtttgcttgcatggctgcgaacgaattcagcacgccttgtgattttcatcacatatttgattgataacggatgactgtatgatattgttgcgtcccaacaaattatgttgatttatttacaccatacgcatgtatt

SEQ ID NO: 140085 - DNA, 421 bp, Zea Mays
ctactctgactctcatctgaagcgcgcgagagaaacgcgtatacccaggcggcggttgaggaagaggaggagaagaagaagaagatggcttcctccgcatacgcctcatggtccaagcggtggatccgtcccgaggcggcggaagagaggggaaaaaagtcgctgacccgtgagaactacgcatgcgccagacggcggcacgaaaaaggcgaaggcaattcgtgtttggccaccgacgaccgcgtgcgtgccagtgtcaaactagttggcgtcgtcggcatgtgaaaaaaaaagaggcgaaccgatggtcgttgcctccacgtccaggctgtcaaacggccggctcgcgtgcacccacgacgtcgccgccgccgcttacttggcttctgattcgcgaaagctgggtacccgattccagctg

SEQ ID NO: 140086 - DNA, 1882 bp, Zea Mays
cctcgcattccagacgagcgcgacggccctggagtacgacttgggtgggcacgcgggagatgccgccgctgccatgcctggactggcagcgcgttgtgctcgccaccagggacgatggtcgtctgggactcgccatgacagtgttctcttcctgagaaagagaggacgggctcacatggaaagtttcctttctgtagccctgggtgaattggtgactagatcaataaatttcatcatcaacaagttctcgaagccgccgacacttgccatggaggaaagcctacaaaggactcttctccgagcacaggtcatcgacgaggaggccatggggcggcacattccaaatcaagccatgatccagcagttaggcatgctgagagatgccatgcaccggggctcttacgcactcgacgccttcaggtacaagcctcactatggagaggacgacagtgttcaagttgtgagtggattcatgtccctatccaagttaccctttgcaaaggatccctatttcttcagtcgaactgcacagtctcgggaacaactacaagaggcacttgacagattgggctccatgattgttgatctgaatgagttggtgatgttcttggcgagctaccctcgtctgcatcgccaaccttacagcatgcatatcttactgggtaactgcatgtttggtcgccaggtggaagcagaacttgtcattaattttttgctgcacacacagcctcatagctctgaagaactggaggtcctgccaattatcggtccatgcagagtcggcaagagcaccctagtcgctcatgtttgcaaagatgaaagagtccaagatcatttctcagaaatcttgtggctgaatgaccttgcttttacagatgacgagcgagctttcagacagggatatgcaatggagcatcagaatcaagtgtcgaactggaacaaagacaagagatcgctagttgttatagaactatctggaaatctccatgaagatgcttggaacaggttctatcttgcttgcaaacggagcttttgtagcgggagtaaaatcgtagtcacaagcagttcagacagagctgcaaagtttggaacagcacaggctctagctctgaagcatctatctcatgaagcatactggtatttcttcaagacacttgcgtttggaagcatggatcctgagacacacccaaggcttgcacaggtagccatggagatagccagaacgcagaatcgttcaatcaacgccgcgtacatcatctgttatttgatgaggaacaattttaacatccacttttggtgcaaggttctgaggttcttcagagtgttcgtccagaagcatgtctccagattcggcacgcatccatacgatcttctgaaccagaacagaccaataaggattagccgaatgggtacagcttctgaatatttcactattcatcgtcagtatcattgctcttcacaagaggaggttcctaagataagagtccacgatgtggtgtatggaagcatgaagacttgcagaaaatttgaggtcctatcatggagatctccaatacccccctactacagctatgccaatacttatgagattcaagagcgaaggactacaagtgccaagaggaagcgttctacggaagatggagtcacattttgctaattttgccattacctgtgtcatgtaggaatattgtttcgttcagttttttctgggtaggatgccacaagttacaacacagaccaagtgtaaataaaacctgtgaagtgtcacaggttatagttacagcataatcaaactgtactataataactcttgtatttccgttatgctataataactcttgtatttccgttatgctataatggaaatgaggttgctatataa

SEQ ID NO: 140087 - DNA, 1684 bp, Zea Mays
caaaggtcatacatgtgcagggactattgactctgtgtatgtctctttatatgtcttttcttcttgaaaccgacgccctttctctcctgggagctttgacgtgaagcatagcatacatagtttgagaaacattaaaactcaccttgtgttttcttacccatcttgcagtgttctcttcctgagaaagagaggacgggctcacatggaaagtttcctttctgtagccctgggtgaattggtgactagatcaataaatttcatcatcaacaagttctcgaagccgccgacacttgccatggaggaaagcctacaaaggactcttctccgagcacaggtcatcgacgaggaggccatggggcggcacattccaaatcaagccatgatccagcagttaggcatgctgagagatgccatgcaccggggctcttacgcactcgacgccttcaggtacaagcctcactatggagaggacgacagtgttcaagttgtgagtggattcatgtccctatccaagttaccctttgcaaaggatccctatttcttcagtcgaactgcacagtctcgggaacaactacaagaggcacttgacagattgggctccatgattgttgatctgaatgagttggtgatgttcttggcgagctaccctcgtctgcatcgccaaccttacagcatgcatatcttactgggtaactgcatgtttggtcgccaggtggaagcagaacttgtcattaattttttgctgcacacacagcctcatagctctgaagaactggaggtcctgccaattatcggtccatgcagagtcggcaagagcaccctagtcgctcatgtttgcaaagatgaaagagtccaagatcatttctcagaaatcttgtggctgaatgaccttgcttttacagatgacgagcgagctttcagacagggatatgcaatggagcatcagaatcaagtgtcgaactggaacaaagacaagagatcgctagttgttatagaactatctggaaatctccatgaagatgcttggaacaggttctatcttgcttgcaaacggagcttttgtagcgggagtaaaatcgtagtcacaagcagttcagacagagctgcaaagtttggaacagcacaggctctagctctgaagcatctatctcatgaagcatactggtatttcttcaagacacttgcgtttggaagcatggatcctgagacacacccaaggcttgcacaggtagccatggagatagccagaacgcagaatcgttcaatcaacgccgcgtacatcatctgttatttgatgaggaacaattttaacatccacttttggtgcaaggttctgaggttcttcagagtgttcgtccagaagcatgtctccagattcggcacgcatccatacgatcttctgaaccagaacagaccaataaggattagccgaatgggtacagcttctgaatatttcactattcatcgtcagtatcattgctcttcacaagaggaggttcctaagataagagtccacgatgtggtgtatggaagcatgaagacttgcagaaaatttgaggtcctatcatggagatctccaatacccccctactacagctatgccaatacttatgagattcaagagcgaaggactacaagtgccaagaggaagcgttctacggaagatggagtcacattttgctaa

SEQ ID NO: 140088 - DNA, 2439 bp, Zea Mays
cctgttcttctctcccctcctgctactgccgcccggctccgctccgctcccctcccgaaccccgttccacctccacccgccgctcccgtcccgtcccgtccatacccgcgccgctctcgactcgctcctcgacctcaaggctacctacctcgacgggccccgcaccgtacccgcccgctagctcccgcggctgcagcagcaggacgagctcgccgccgccgtgcactagaagaagaggtcgctgtcggtcgccccgccccgcccaatcctggttcctggacctgcgccgcgtcgtttcgcctcaggttccagtgtctcgatttgccaggataacttgtataattgaagctttcctttgtacgatgatgggggcatgccatggaccagaactgagggggctagggtttgctatgtggtagtagctcctgcttcaggtggcgtcagctgttctgggtggggtaatatgatgaaacagatatttggacggcgcaaggcgtccaaaaccgcagacaaggagttcactggtgggaggacgttcagccagctgtcggggtctggagttgctgacctgagtggccaaccgccaattctgtcgagtactgggcacgcctatgggagtggaaaccgtacggggttccaagactcgaggataaatgataatttgttttcttccaacttccgtccgttgccgagctttaaggatgtgccgaatacagagaaacagaatctgctcatcaaaaagttggacgtttgttgcactctgtttgactttacggatgcgtcaaagaacatgaaggagaaggaaataaagacgctgatgttgttggagatagatgagtatgtaaggactgctaacgtgaagttccctgagatcgttgtggaggcaatcacaaaaatgatttcggtgaacttgttcaggacactaatttccccacctagggagaagaaggcgcttcaagcttttgatctagaagaggacgaaccgttgatggaccctgcgtggccacatttgtaccatgtgtatgagttgctcttgacatttgtccagtctccacaaaatgatgctaagctggctaagagatatattgactattcctttattctgaggctgcttgacctctttgactcggaggacgctagggagagggatcgccttaagatggtgcttcaccgtatctatgggaagttcatggtgtatcggccatttatccggaaagctatcaataacatattctaccagttcatatatgaaacagaaaagcacaatggaattgcagagctcttggagatttttggaagtatcatcaatgggtttgctttgccactcaaggaagagcacaaactgttccttgtaaggaccttaattccacttcacaagccaaggtgcactacaatgtaccatcaacagttgtcttactgcattacacagtttgttgaaaaagattgcaagcttgcggattctgttattaggggcctcataaaatattggcctatcaccaacagcacaaaggaggtactgttcttgggtgagttggaagaggtactagatgcaacacaacctggcgagtttcaaaaatgtatggttcctctttctcaccagatcgctcgctgctcgaacagccctcacttccaggttgctgagagagtattgtttttctggaacaatactcacttcgagaatcttgttaagcaaaacagtaaggtgatcctgcctatcgtcttccctgcattggagaaaaatataaatgggcactggaatcaagtcgtgcgaagcctcagcctgaatgtccgaaagctattctccgatcgtgacccccaaatgttcaatgaatgcttgcggggttatgaggaagacaaagacagagagaaggaatttagactgaagcaagagttggcatggaaacgtctcgatgagattgcatcagcaaaagtcacaagtggtgaggctgtcctcgtgtctccaaccttgcatcgtcaaccttcagtcttgtaggaacctgcgctacatgagtggtccttgcagagtcgttagacattgtacaggattgggttgtagataaaagcgggtatatgaagccaccaaggcaggtgtgcgaaatcgaggaaagagagatgaggagccagtagtgcatcatttctgtacatcccgtgccatggcttcttttggcatcctggtggttcactttgctgctgtagtccgttgtttgggagaatggatgttttttttcttcttataatggaaaatgtcgagatggcgtgcagtcagtttaaatgataaaagttataagcttttcctttcgcatatagttttgatacaatttgtcatggttgtgaatgcaagcgaatcatatcaaatccctgagaatgctgtaacgcggtggtcacatgtgtggggatttttttattttatccccaggaaaaaatattttaattttcatc

SEQ ID NO: 140089 - DNA, 777 bp, Zea Mays
gttaccaacgcacagactagctaaacatcacagtattacacactgacagatcaacgacaataagctttgtcagcaatggaggtagtctcgtcgaagctagcttggttcgcgctcgcgttcaccgtggtggccgccgccgctgccggccgtgtcgtctcggcccagaacacggcgcaggacttcgtgaacctgcacaactccccgcgcgcggacgtgggcgtcgggaacgtggcctggaacaccacggtggcggcgtacgcgcagagctacgcgaaccagcgcgcgggcgactgccggctggtgcactccggcgggccctacggggagaacctgttctggggctcggcgggctacgcctggacggcgtcgaacgccgtgggatcctgggcggcggagaagcagtactacaaccacgccaccaacacctgctccgctccgtccggccagtcgtgcggccactacacgcagctggtgtggcgcgcctccactgccatcggatgcgcccgcgtcgtctgcagcaacaacgccggcgtcttcatcatctgcaactattacccgccgggcaacgtgattggacagagcccttactagcaacctctatatatatacgtacttgcaataatccgcgctatatccacaagtgtgtgtaacctactaacctacatacatttgtgagcagcagcatcaatcatacgcgcgtgtgatgccatgcatgccagcatgagttgttacatatgttcgccccgcatatgcatttcaagatttaatttcttcatg

SEQ ID NO: 140090 - DNA, 604 bp, Zea Mays
gcattagatggagtgggatctctagagctaccagcatcagcaggagctgctcctacgctattgcgacggctgctacattcttgtggagttggcatggggcttctaactgagcactgactactgagtacctaagggcctcaggggtggcattgatctactagtggacgtcgtggctagctggctgttggcggacgtcgtggctgctggcgggcgtcgtgggctcgtggcgccgtggatgctgggcgaggcacgaccgttcgacggctggggcggtggctgatgctggtcgtcgagggccagcgccggtggcgcgaatgcagggccggtagctgccacggatgcaaggctcggcgactcagagatctagagtaggtacctggaggagtgggggctgggtcgttggggcggcggcgcagagagccagggacgcacgtctcagggttaggagaaaaggagtagcaggctagcagcagggacacggcgcttgggtgcttggtggccttagccggctttggttcatgggccaaaaacataatatgtgaattaatatttcggatatccagtggatatccgtgaataaaatatactatctgtaccttactcg

SEQ ID NO: 140091 - DNA, 348 bp, Zea Mays
atgggaggtgaagccatgtgcgatgtgtgggacgcattgattaccttcctgaccgagaagcagcgaatttcgcttagtttttctcgttctcactatagagcgagaaaggaaaaccacacagagagtgggagccaaaaaacatgcttcctgctgctcccaacccgctccccacactccaacccctcaggaatcccttcacgcacaatttgccaaatggttttcgtcaaaaagattcccttctacttaagaatcatttggaaccactctattggagaattagctctcggagctaaagaatcatggagcagagcaatcccaaacgaatcctacgacagcttggaatactga

SEQ ID NO: 140092 - DNA, 753 bp, Zea Mays
catagattgagtttcacttaatggttcatgattctagttgtcatgtggaattcggcgcctaagcagttcatgtcttgctcttctctactatgtactctagtacttgtcatggaacataactaatcaatctttattaaaatgttgtgaccaatatatattttaattaagttgggtttgctactttatattttgattgacaccttattcgtggttggatggctgatatgagggcgcctttacagtgcaatggagaccttaaagtttgggattagtagatggtttggtccttaagcaagatgtcctcggtcaataccgatggaaactctggttcctacagcagcaaatcagcctaccaaactttttcttggggactatcaaatttgcccccaggagaagaacttgatcgcatgtttggacaggaccccctggttcttccggctattgagggaagacagtgtgggatggatcctggatgactagcattacatctatcatacatttgtccagttctctggagttttttatcctttgttttgtaccttcctatgtttctccatttgtcaaggcctaaattccatctttagttacttctggaaatttttctcccatttatttgattccgatttctggataaaagttgctccttggtaatcatgaggagggctctgaaaagatccttgctcagatggtcgccaaggattgtacaatctcaagaattttgtcagtgcttatggttgatttgggctcttctac

SEQ ID NO: 140093 - DNA, 1097 bp, Zea Mays
acacttcagctaaataaatgagtagagttaacatatatctttctcaagggatgggggactaggggagtcactagcattgattgtgcaccttgaatccctttcttttcttatataaggaggtatcctctacactaaactacgaacaagtatcagagacactctctgtcaggtgtctgcaatggacaacctcaaaacccattctgaatatgccgatcaacctcaggggccacaagcaaatgccgtttctttcgctttaccaacaggtcaggtcttagacttagatagtcatatgattggccaacagcacacgaatctgtcatcattctggttctcccttgagcagcacaggctgcagttggatcaggcccttcaactccataaccaacagttgcaggtgtcactgcagcagcaaatatctatgcagaactcaactctactgaaccttgtggaatctatgacaagagatgtgctgatgcaaaagaatgatgagatagccagcctgcgagtagagttgcagaggaaccaagaggatctagaaacaacactgcatgacagagatgagtggatgaaggtcgctatggccgcttatgaaattaatcagacacttatccgcatgcttcgtaccgtgcagctggaagcgaattctcatgtttcatctaatgatctagatgctccaagttatagtgaagcatcgagcatggcgaggacagcattggagacagcacagcccaatctgatctgcaaggtctgcaactctggtaatgccggcgtacttatgttgccatgccaacacctctgtgcatgtaagccgtgcgtagcctggcttgcgacatgtcctatctgtggtgctgtgaagactgatgctatcgaggctcgatttgtttataagaagtaaaaacgccaaagcagcaatccgaattcgtttataagagcatgtcagctttcctttttttcgtgttaggtgttataggctgtagccttgttctgttatgcattctggtataatgttctggtagtcttcatgccgatgccatgtttctggattctcaaaatgttttgatatagttgccatgttgtcttcggttactatatttttc

SEQ ID NO: 140094 - DNA, 1129 bp, Zea Mays
ctcctccgtccttcaccgcttccttgaccctctctctcccccaccccacccacggaaagcttcgagctttcactctataccccagggagaaggaaggaagccggcacagtctactggccttgtggtgccggcaactgactaggatcgagaaatagggttcttggagagcggccggtccatggcacagcggggcgagctggggcggcagctcccgctgagaggccccctcaaagccctagaggcagacatccaccacgctaacgccatggcagatgctattcagaggaattatggtggcgcatgtgtgcagatgaggctgtcgttcagctccctggctccattgtttttgtacttcatccaatggctggactgcggctgctgttatgcccttcccagctatttaggattgtttcacattctcatatgcaaggtttatgctgatggagatagctcagtgtcgacatatgaaaggcgggcaagccttagggaattctacgcaattatctatccgattctgcagcagcttgagagtagtttgatcgagagggacctgaaagggaagggccgatgcaaggatatagtgagtaggaggaggatggaggattggaaaaaggtttccggtagggatgtggaaagggaggatgaatgcgggatttgcatggaggcatgcaccaagatggtcctgcctaattgcagtcatgcaatgtgcataaagtgctatagggactggtataagagatcagagtcttgccctttctgccgaggaagcctcaaaagaatccgctcgacagacctttgggtgcttacaaattccaacgatgtcatcgaccctgcacatttagaaaaggaaaacgtgaggcatttctatagctacattgacagcttgcccctaatacttcctgatagcattttctttttctattacgagtatctactataacgctgaggcaacatacatcagatgtgtaaattgcgaaaagcagatgaaatcatggttttcttttgtagatgaacccccctctcactctgaccacatgcatgtctatttactcataggctgctaatgtaaacattaatgcatctgtcaataaagttgttaggagatatttattaatattgtcaagtgaat

SEQ ID NO: 140095 - DNA, 192 bp, Zea Mays
atgaccgaccgcccggcacagcaccaaattcgcgcttccaactcacgacctgttggaccggaccaggaagggacaggagatgaagctgttggagatgaagggaagatggaagttgaagctgtccagaaattaagaagaggtacgcaagcaaggaagttgaatccaaaatacattggtgccaactggatgtaa

SEQ ID NO: 140096 - DNA, 1986 bp, Zea Mays
cggacggcggcagtggccgcgcggaacggcgagaggacgacgagtggaggttcacgtggggggtgccgctctgctagcgcgtgaacggtcatcttggactttggagtgctccttgtgctgcagtggacgcgtggtgccgctatggatgcaggagccaagaagaagaggaggctggaggaggggcaacgtggtggtcaagaactgccggtgccggtgccgccccggggcccggacctgatcaacagcctccccgacgagattctttgcagcatcatcaccctcctcccgaccaaggacggcgcccgcacccagatcctctcgcgtcggtggcggcctctttggcgcaccgcgcctctcaatgtcgaggtcgctatcaattacgttgggcacatgtcgtcctactgcagccgtctctgcagcctgttgagcacgcacgagggccctctccgtcgcttctcactcacctatcagctatttggcaacaacttccagttggtcgactcattgctgcaatcccccaggatcaatgacttcccggagttggagatttgttcatacaatgtacttccgccgtctgtgctccgtcttctgcctctagtctgcgccctgcacttaggcaagcgggctccaccacgatatagcgatctcatttttttcccagacctcaaccagctcaagctcctaaattgtagtcatttccccaacctcaagcacctcacacttgctagggtccatatatctgacactgctctccatgccgttctgtctggatgccctgtcctagagagcatggttctggatggtaacatcggttgccacagtctacatatcagttcgccgacccttcggagccttggtgtgtcggatggtgttaaagtcttggagggaaagctgcaagagctcattgttgaggacgctcctctcctagaaatgcttatcccacagcctccaagttatggtctggtgatctgggttattcatgcacccaaactgaaaacattggggtatcttcatgatgacatcccaacatttcagcttggaaccatgttttttgagaaaatggtgcctattattagcctgcccaatgtgatgcgtactgtaagaactttagccctcctcaccactcctgatctggatcttgtcattggcttcttaaaatgctttccatgcgtggagaagctatacattgtgtcatatactcggatgcttattaagaacgaacaaggctatgctccacttgaatgccttgatcggcatctcaagaacatgcagataataaattatgaggacaatagtgcagatgtaaatttcgtcaagttcttcatcttgaacgccagagtgcttgaatctatgaagtttgtggttcgtcaaggccagtgtgatacaaaatggattgccagacaacacaagaagctagaggtacatggcagagcttctcgaggtgctacattttgttttgaagctgatgccacacgtaggatgtctagcttggtacacacgaagcacatccatgatttggcttcagatccatttgatgaatcattatgtgggtgccctggtgattatgtcttttgaagatgtctatcagtcagacagtttgaggtatgttgaaatggactgctgctagagacgccctggtgttctttggacttgctgcttggctcatctttggcatgttttgggtatacaatttagaaggaagttgtctcatgtccgcaatgcactctaattacgatgaaatatgttgtgctgtgtactgtgacaacaaaaagtctatccgtaaggtgctggagaagttctcttgctatggtgatctctttatatttgtgtgtgaattttgctatgattgatgatcgtttgccccttctagtcagggttttttttatcacttgtcctgttgaatgaaagccgatcattctcagtttacatgatgtttggaattggattttccctaataataattaatttaggtaaattgttataata

SEQ ID NO: 140097 - DNA, 645 bp, Zea Mays
atgagaggcatcatatattttcatgaaccagtaagagataaggaagaaaaatggagaatacagacgacaaagcttgtgaatgacttggttgaatgcatatcagatttagaatacaaagatattcttattgggcaactgcagaatgagttactgggtagttataggtcccttgagatacaaacagtggagagttgggaagctttgatatttcttactgttgtactgggaaaatttcatgagtcctactcatttgttgatactgctaaactgaatatgcatcatcattgtcaagaaattgaaaaggaaattggttctgccaagagacatttagaagaacaatcttgcattattatccagtctcaagctgaacagaaacagtcaagaaatttgaagaattttatggaacagctcaaagctcgtactacttctgaaatgtcagaaaaggcaaagcatcatctggaagttacaaataagctgaaattgttggatgaaagaaatgaaacattagaagaacacgtacgagagattaagtctagaacaactgatatgtctaatgttgtactacaagagaggaataagttggtcaatgagctgactggactaaccaataccatcgaggaggtaattcatggaggtaattcatga

SEQ ID NO: 140098 - DNA, 289 bp, Zea Mays
ctaattttgtggttattttcaaagggtagaagtttgatgcctactggtaagatactttacatctactgatttatgagccgtagaccggacaggagatgaagatgatgccttacatgaatgccaaggcaccgaacggtgaagcctgggtggccatcattactcacctattgatgcatttgttctcactaagacgtaggaattctttggactatgtatttagctcagaaatttctgtttctgtatgttgtacctcttatactaactcataattctttaccttacaatattc

SEQ ID NO: 140099 - DNA, 244 bp, Zea Mays
aacagagaagacagagcaacaaccaccgctgtgacccaccggacaccgggtggagggggatccagccagccatggcgagtgaatgcccatgaccatgagccccgagctcgagcaggtggacggcgagatccaggacatcttctgcacgctccacaagccttctgaccaggttatacttgagcacgactatacatttacgacaccatactgtgggagtgaaatgtggttgtgaactcaagcactg

SEQ ID NO: 140100 - DNA, 282 bp, Zea Mays
atgaccatacaatacattaggcatctaagttgtattatcttcgttgtttctcctgcaaatgctgacttagctcattctgatgctctccaactagcaaggcttgctgatcctaatgggtctcgtacaatccttcctatcactaagtttatcatgggcaggggcactcatgctcgtaacttgttcctaggaaatgtgattccagtcaagtttggttatcttgttggtgattcatgtgcaagagacacccggtttttcatggttgtccctgctcctcatatttaa

SEQ ID NO: 140101 - DNA, 1674 bp, Zea Mays
ctctgccaattcgcttcctttcttccgcaaaatggcggacaatgccctagcaaatccaatcccctccgtcgccgccgcccacgacgacgatgaggaccccgatcttatcagcctcctaccggattgcatcctcgccaccatcctctcccttctccccctccctgccgccgggcgaacccaaatcctatcccaccgctggcgccgcctatggccctccgcgccactccacctcctcgactcccacctccccgtccccacctcctccctctgcgttgccatgtcccggatcctcgcctcccactgcgtcagcgctgtgaggttccatatcctcctcgcccgtccctccgcctccgacctcgactcctggttccgctccctcgccgccaaaagcctccaggaactcgtcctccggctgccctccgacgacacccttcgcctccctccatcattcctctccttccggtccctcagcaccgcggagctcaccaactgccgcctccccgaggacggcgaagtctatttcccgcacctcggcgagctgaccctccgccttgccatcgccccatccgccgccgcgctccatggcctcctgatcggctgccccaagcttggcagcctatcgctcgaccgcgtcttcggctgccggaccctccgcgtgcggtcctggagcctccgcagcctcacagtgtcggtctccctgacgccgtggcgcgtccaggagaggggcgccattgagctggagcatctcgtcgtcgaggatgcgcccgccctggagaggctgctggcacacgacatcaactggggcccatcgataaatgtagcgcgtgcgccgaggctgcagatgctcggctaccttgggatcggtatcccggagctgcagctcggctcggcgttgtttcgttccatgtgcgctgttagactggcggcggacctccggtctgtgaggacgctggcgctggagatgtcagatccgcagctgaagtttgtggccgacttcctgatgtgtttcccctgcttggagacgctccatgtcacgtctcacatggttattcctcagggcatgagaatattgaattatgagatgggtgatgatcgcatagagtgcctcagccatcacctcaagaaagtagtgctgaaaggttacttggggcgaaagcatgagatgcagcttgccatttcccttgttcgtcatgctagggttctacaggttttcaaattcttgtgtgaaaatgagtgcaacagcaaatgggtgacaaaccagaaaagacagttacaggtggacagccgggcatctttgctggctcaatttgtttttgagaaattcagcaagggctacatcaggttttcgaagtcagcaagtaacatatctttagttgatccatttgatacttaataaccctgaactattaaataaatgttctctctattttcatgccattaatttaatcacagatagaaaatgggatccttttctgattggacttgtctgaaacttgcatggattctctttgagacatgatttacctgaacgaagcagatcttgctgggtagttatgctaccattttctgtcttatgggcatgcatatgcttcagctaagatgtgtgagaagagaacctgtagccaggggcggaggggcataatcccattatggcccaagccatacaaaaaaaaa

SEQ ID NO: 140102 - DNA, 1653 bp, Zea Mays
ctctgccaattcgcttcctttcttccgcaaaatggcggacaatgccctagcaaatccaatcccctccgtcgccgccgcccacgacgacgatgaggaccccgatcttatcagcctcctaccggattgcatcctcgccaccatcctctcccttctccccctccctgccgccgggcgaacccaaatcctatcccaccgctggcgccgcctatggccctccgcgccactccacctcctcgactcccacctccccgtccccacctcctccctctgcgttgccatgtcccggatcctcgcctcccactgcgtcagcgctgtgaggttccatatcctcctcgcccgtccctccgcctccgacctcgactcctggttccgctccctcgccgccaaaagcctccaggaactcgtcctccggctgccctccgacgacacccttcgcctccctccatcattcctctccttccggtccctcagcaccgcggagctcaccaactgccgcctccccgaggacggcgaagtctatttcccgcacctcggcgagctgaccctccgccttgccatcgccccatccgccgccgcgctccatggcctcctgatcggctgccccaagcttggcagcctatcgctcgaccgcgtcttcggctgccggaccctccgcgtgcggtcctggagcctccgcagcctcacagtgtcggtctccctgacgccgtggcgcgtccaggagaggggcgccattgagctggagcatctcgtcgtcgaggatgcgcccgccctggagaggctgctggcacacgacatcaactggggcccatcgataaatgtagcgcgtgcgccgaggctgcagatgctcggctaccttgggatcggtatcccggagctgcagctcggctcggcgttgtttcgttccatgtgcgctgttagactggcggcggacctccggtctgtgaggacgctggcgctggagatgtcagatccgcagctgaagtttgtggccgacttcctgatgtgtttcccctgcttggagacgctccatgtcacgggcatgagaatattgaattatgagatgggtgatgatcgcatagagtgcctcagccatcacctcaagaaagtagtgctgaaaggttacttggggcgaaagcatgagatgcagcttgccatttcccttgttcgtcatgctagggttctacaggttttcaaattcttgtgtgaaaatgagtgcaacagcaaatgggtgacaaaccagaaaagacagttacaggtggacagccgggcatctttgctggctcaatttgtttttgagaaattcagcaagggctacatcaggttttcgaagtcagcaagtaacatatctttagttgatccatttgatacttaataaccctgaactattaaataaatgttctctctattttcatgccattaatttaatcacagatagaaaatgggatccttttctgattggacttgtctgaaacttgcatggattctctttgagacatgatttacctgaacgaagcagatcttgctgggtagttatgctaccattttctgtcttatgggcatgcatatgcttcagctaagatgtgtgagaagagaacctgtagccaggggcggaggggcataatcccattatggcccaagccatacaaaaaaaaa

SEQ ID NO: 140103 - DNA, 564 bp, Zea Mays
attaacactgccacagatacattcaaatacattctgaatatagcattctgctgcagaacactttgagaaatggctgaagaggatgtccaaccccttgtgtgtgacaatggcaccggaatgatcaaggcgggtttcgctggtgacgacgcaccgagagctgcctttcctagcattgtaggcaggccacgccacactggtgtgatggtgggcatgggccaaaaggatgcatatgtgggtgatgaagcttagtccaaaagaggtattctgacactgaagtacctaattgagcatggcatagtcgacaactgggatgacatggagaagatctggcaccacaccttctacaatgagcttcgtgtggcacctgaggagcaccctatactgctgactgaggctcctctgaaccccaaggcaaacagggagaagatgacccagattatgtttgagacattcaactgcccagcaatgtatgtggccatccaggtcgttctttccctgtacgccagtggtcgaacaacaggtattgtgctcgactctggcgacaacgtagatctcgtcgatccg

SEQ ID NO: 140104 - DNA, 1549 bp, Zea Mays
gtgtactactggattctcacaccgcagcatccgttcacgtgtcttcaccccgagtgctgtctctctccttcctctctgctacggctgggtgaggcggggggctactgccgccgcctaacgccaggttccgaggccttcgtcggtctatttgccggcgatgaacatccaccagggatggttgcaacaatttgggcatagcgttggtatcagtggttcgaagatggttctccatatgacccacaatgtattcagttttcgatgctttgctgccaatgggcgtggcttcagtgcggattctaccaataagagaaaaattaaaagcaagaagaggcgaaaggatgttgcactggaatcaagtgaggtaatatctggaaatccaaggaacagggaccaatgtctgctcttgagaaaaagaaagctgaagagaacaaagattatcaagctattgattatgatgctccaattgagtcagataaaagtactattggctttggtactagggttggaattggtgttgcagttgttatatttggactagtcttcgcttttggggatttcctgccttatggaagtgttagccctagcaaagaaagtgcagtagttaaacaaaagctttctcaagaggaagaagaaaaatttaagaatgcactgcaaggctttcaagcaacgctgagtaagtcgcctaatgatcctactgctcttgagggtgcagcagtatcgttgtccgaactaggtgagtatgagaaggcatcaacattccttgagaagctaattaaggtaatccctgataaagcagaagcataccgtttgcttggtgaagtaaagtttgaactcaaggattatgaagggagttcatcatcatacagaagtgctttatcttcatcagataatattgattttgaagttctccgtggactgacaaattcattacttgctgctaagaagccagatgaggcagttgatataattctgttatgccgtcgaaagttgaatgaaaagagtcaaacaggactagcagatttggaggctacaaatgacaatggtcgccaaaagcctcaagatattgacccgatccaagttgacctgcttttagggaaggcttattccgattggggtcatatcagtgatgctatttctgtctacgataagctaataactgatcatcctgaagacttccgtggttatttagcaaagggaatcatattaaaggaaaatggtaaagcaggtgatgcagaaagaatgtttattcaggcaaaattcttcgccccggaggcagcgaaggcactagttgatcgctatgcgcaaagatagtcgataagagattgaatggtgttgttttaaaccaatgagatcattcggattccagaaaaacgatcaacatgtttggaacgtcttgtatgatagcaacattatgggatctgggacattttgaattgtattgttttagaacaggcctgacgcagtatcgaaaaaagccttcccactgagacaagagattctgggttcgacagtctctgaaaaaatgcagggcaagccctgcccttggtta

SEQ ID NO: 140105 - DNA, 1640 bp, Zea Mays
gtgtactactggattctcacaccgcagcatccgttcacgtgtcttcaccccgagtgctgtctctctccttcctctctgctacggctgggtgaggcggggggctactgccgccgcctaacgccaggttccgaggccttcgtcggtctatttgccggcgatgaacatccaccagggatggttgcaacaatttgggcatagcgttggtatcagtggttcgaagatggttctccatatgacccacaatgtattcagttttcgatgctttgctgccaatgggcgtggcttcagtgcggattctaccaataagagaaaaattaaaagcaagaagaggcgaaaggatgttgcactggaatcaagtgaggtaatatctggaaatccaaggaacagggaccaatgggtgccagaattaagaactgaaagtgaaaacaaatctggtaaaaaagtcatggataagaaatttttggaaaaagtggaagcggttcgaaggtctgctcttgagaaaaagaaagctgaagagaacaaagattatcaagctattgattatgatgctccaattgagtcagataaaagtactattggctttggtactagggttggaattggtgttgcagttgttatatttggactagtcttcgcttttggggatttcctgccttatggaagtgttagccctagcaaagaaagtgcagtagttaaacaaaagctttctcaagaggaagaagaaaaatttaagaatgcactgcaaggctttcaagcaacgctgagtaagtcgcctaatgatcctactgctcttgagggtgcagcagtatcgttgtccgaactaggtgagtatgagaaggcatcaacattccttgagaagctaattaaggtaatccctgataaagcagaagcataccgtttgcttggtgaagtaaagtttgaactcaaggattatgaagggagttcatcatcatacagaagtgctttatcttcatcagataatattgattttgaagttctccgtggactgacaaattcattacttgctgctaagaagccagatgaggcagttgatataattctgttatgccgtcgaaagttgaatgaaaagagtcaaacaggactagcagatttggaggctacaaatgacaatggtcgccaaaagcctcaagatattgacccgatccaagttgacctgcttttagggaaggcttattccgattggggtcatatcagtgatgctatttctgtctacgataagctaataactgatcatcctgaagacttccgtggttatttagcaaagggaatcatattaaaggaaaatggtaaagcaggtgatgcagaaagaatgtttattcaggcaaaattcttcgccccggaggcagcgaaggcactagttgatcgctatgcgcaaagatagtcgataagagattgaatggtgttgttttaaaccaatgagatcattcggattccagaaaaacgatcaacatgtttggaacgtcttgtatgatagcaacattatgggatctgggacattttgaattgtattgttttagaacaggcctgacgcagtatcgaaaaaagccttcccactgagacaagagattctgggttcgacagtctctgaaaaaatgcagggcaagccctgcccttggtta

SEQ ID NO: 140106 - DNA, 2984 bp, Zea Mays
aagcatatagagctatttaccaaagccagagccatgatagcactcgtggttgcactgttatcctgggtggtcactccatgttccaattaaatttgtaataaaattatcttaaccatcgggttaatgtcataattgccaattaacatttttggaacattaagaccaattaaagagtgacattaagaatcattaagttgagcggtagcatgaatcttgcacagcttaattattttcccaggttaaacaaggaatacaggtagtaaatctaggaaatccttaattaggtacatcccatcaaattatgcaatatatcaaaaaggtaaacattattatatgcagtgaataggtacaaacagaatatgcagagggagaatccacttgccttgcacaaaatcgtcctgcgtgtcgtcttcaaacgtatttgggtcctctaccacacaatcagtttctaatagcgtcgcacatcgtacatacaaaagaaaacattcaccaataaataaacatacaccattacataggtgaagcatacatcatacaataaaacatacatttaaacaaatcacatttataagaaggaatgcaaaacatgatttgtatctaccctataaatcttaaccatatcaacgatcaatttatttgctatgactaactactttgtttcattatcttactagaaaacttgtatgacaattcgactatggatatgcatactatataaattcatttaaaatcatagatacaactttaacccaaattctagggaatctagtttatttactaaataattatctctatcgtaaaacacgggtcacattctagttttagtctttctttctaaaaggaaattatatcaattgttaaaatattatttataaatcacataaccatagtattaaagaactaaattaaactacaaattttatctctactatttagattacgttggactatattgtttcaacgtcaataaaatatttactatttcttagcgaataaccaatataattatattgcgcatgagcgtgcgagtcttgtctataagtcagaatcataatgtaagcaacggtgaacgcatacttatttatctagcgctttttgttactaatatgtagtctacctattccttagtcctttactccaacaaaccataattaaattaattctcaatgggtataaccaaattaaaatgcacaaactcgaaagacagcagagacactaactaaaatatcttatcacatacacatgaagttaatcgttccacatacacatgatttggattccaaaatatacaaatttaaaaataatgaatcgctgcaggggttagatatcttattcaacttatacttcagggggtagactagaagatcgccttcttctaccactggaatgcacataccagagaagcagggagccacgaccgtggggctttgggcacgaagaagggacaaccagacggctttggcgcgtgacacggcacagcacgagcacgaaggcccaggggaggcagggacggcctcgggtcgtcgaacggagcaggggatgacgtcgaggcggccacgggcgtcacgacgagctgcttgccggcgacaaagaatagaggcgaccaacagaggaatgaaatgcgtgggcgcgagctcaaagtggtcgggaactggcgctcggtattaccttaaatagagagaagagagggaggacgccgggagagggagaggcgcggcaaccggcgccatgaacggccatcaatggcgccatttccacgctggccttcaatggggcgcgaatgaaaggggagaggaagataacgggcggccgttacagcgcggggatggggcacgtggggccgagcgcggacgccggggcgcggtcgccggggcgtcggggctagcggcgacgcagctccaagcgcgagcgcaggcccgtgcggcggctggagtgggggccgagtgggccccgcccgtaagggacagagagggggggaatttagggcaggggcgcggcgcgcggctgggccattcgcgggccgcctcggctgggccggattcggcctgaccgagggtttggttttcttttcttttttttctttcaaatataaatgaatatatatttaaaatatttggaaaatccaaaataaatcataataatatttagaacttaaatataatatttaatactaattaatctgttttcacggtaaaagaatagattcatcagtcaaatactagtaaacaaaaatctatgctccatatattaatacaccaaacacttgattcaaattttaaatttaccttctactaaacttaacaactagtaacacattattttaattgatggatttgaggtgctacacataccgagggatgttgccgagcactcgctggatatccgagctagagcccgacccgtgaagcagcctctgcgccgattcgacgaagaaaagcgcagagccataggcgaggagatccacaagctgatggctgcggggttcatcaaagaggtattccatcccgaatggttagccaaccctatgcttatgaaaaagaaaggtgggaaatggaggatgtgtgtagactacactggtctaaacaaagcatgtctaaaggttccctaccctctgcctcgcatcgatcaaatcgtggattccactgctgggtgcgaaaccctgtcattcctcgatgcctacacaggttatcaccaaatcaagatgaaagagtccaaccagctcgcgacttctttcatcacaccttttggcatgtactgctatattactatgccatttggtttgaggaatgcagatgctacataccaaaggtgcatgaaccacgtgttcggagagcacatcggccgaacggtcgaggcttacgtcgatgacatcgtagtcaagacgaggaaagcctccgacctcctctctgaccttgaaacgacattcaagtgtctgagggcgaagggcatgaaactcaatcctgagaagtgtgtcttcggagtcc

SEQ ID NO: 140107 - DNA, 2145 bp, Zea Mays
atggcagcctcgccgctgccgagatgggcgccgacaccaagcccgaccagaccactcagggtgtcgagcgccggcggccaaacagccgtgtcttcgtcatcatggagctgggcattctgccgctcgttcatcggctccgccgtcgtctacccgccgtggaggcgctctacaccaccgccaccgccaccgccagcgccagcgggtgatccggcggcggccaatgctgctgcggacgatggtcgtcgtcacggccggttttgctctcatccgttggactgtgttggagccagagactgcagccttccagaggacgccggcggcggccgtgaggtgttcctgacatgggaggatctttcggtgacagcgtcgtcgtcgactggcgggaaggcgaaacccgcggtaattctcgacaagatcagcgggtacgcgcgccctggtgaggtgctggccgtcatggggccttcggggtgtggcaagacaaccctacttgatgccctagctggacgacttggttctgacaagagaaggacggcgggtaacatcttgatcaatgggcgacgagagaaacttgcctttggaacatctaataatgttacaagcagcggtggatggtgcaccatgcatacctgtcttctcattgcattgaaggcctacgtgacccaagagacgctgctgatggcgacgctgacggtgacggaggccgtccactactcggcgcagctgcagctgccggactcggtgccgccggccgacaagcgggagcgcgccgaccgcgccatcaagcagatggggctcgccgcggtggccgggcaccggatcggcggccgcgtgtgcaaggggatcagcggcgggcagcgccggcgcgtgagcatctgcgtcgagctgctggcgtcgccggcgctggtgttcctcgacgagcccaccagcgggctcgacagcgccgcgtcgttccacgtcatgagccgcatcgccgggctcgcgcgggccgagagggtcacggtcgtcgccaccatgcaccagcccagcagcgaggtgttccagctcttccatggcctctgcctcatggcgtacgggaggatggtgtattttgggccagcgtcggatgccatccagttctttgattcgaatggttacccatgtcctatgagaaggaacccttcagaccacttcttgatgatgataaacaaagatttcgagagaagtttggcaataagaaacgaagcattatttatgatgaaacagcagggcgcagctttcacaaagaaaaggcaagctactttcttgaccaaatgtgtggtgttaaccaagagatcagtaatcaacatgcatcgagacatgggctactactggttgcggttcggtatttatatagccatctgtgtgagcattggcaccatcttcttcaacgttggctatggttttgcatcgatccaagcaagagcgtctatgttaatgtttacatcaaccctattgacaatgatgtcaatcgggggattcccctcgtttgtcgaggacatgaaggtgttcagaaaagagcagctgaatgggcattacggtgctactgcatttgtcatcgctaacacggtctcatcaacactgtacctggggatcatctccataataccgggcgcagtatgctactacttgaccgggctccagaggcgcttggaccacttcctctacttcgcggcggtgctatgggcttgcacgatgctggtcgaagggctgatgatgatcgtcgctgcccttgtgcctgatttcctgctgggcataattactggctcagggatacagggcctgctaatgctcaacgctggtttcttcaggcttccacacgacctccccaaacccttgtggaagtacccgacgtactacatctcctaccacaagtacgctacgcaggggctctacaagaacgagttcctaggtttagtgttcgatgatggtgtgttaggaaaggggctcactgttagtggtgactatatactgaggaccagcttgcaggtcgagatgggctactcgaagtgggtggaccttgcaatattgcttgccatggtcttcatctatcgggtccttttcttagtcactattaaagtaggtgaggcggtcaaacccatgattaaatgcatgtcgattaaagtttaa

SEQ ID NO: 140108 - DNA, 344 bp, Zea Mays
acatttgataatatgtagttgactataaggggagcattatagtcagtaatcacttttactcttacggtgtcaaaccagttttttaatggtgatcatgagtgttccaaatattttattgcatgtttactatctcgacaatctggaatgcgatattgcacgactagatgtaacacctcgttggagcatgtttacaaagagtctaattaaaaggattggagatctcgacaaaaggtcaattagtgccggcaaatcaacctacgggaactttcatatgcatggagatgtcgagattgtttctggtttccccgtaagccagttcaatctccaacactggaacgaaaaag

SEQ ID NO: 140109 - DNA, 671 bp, Zea Mays
acaccagcacaagcaaaacatacatagagcagcagaccagcagctcgacgatctactatagctagctagaaagcatatattagatccaattaatggcaaaatccgcacaggcatcagctgcgctgctcatcgccgtgttggcgaccctcgccatgatggagagcgcccacgccatctgcggcatggcaaacgaggacttcaagctgtgccagcctgcggcagcggccaacgacccgacggacagcccgtcggcggagtgctgcgccgcgctgggtaaggctgacctcgggtgcatctgccgctacaagggtgtcgccggcatatggatgaggatctaccacatcgaccccagccgcgccatggcgctgccgggcaaatgcggcctcacaatgccaagcaactgctcctgatgcgcgtgatgccgtgattgacgtgctggcccctggccggaaacaagttgtgtgtgtattctcgtacgtatatatatgttatgggtagctaaataagtggagctcgagatgatgaaatgccctgtgctccttgatggctgcttcatctagctagttttggtttgagtgtgtgattgtgtgcgtgcgcgtgtgtgctgaaagctcaacgtgtaccttattatagggaaagatctatggaatacaaaatatggatcggatata

SEQ ID NO: 140110 - DNA, 411 bp, Zea Mays
ttgcttcacctgggcacaactgctagagcagtcaagcatctccaccagactgttgcagtccttgtgcttgaagtccttggagacagggctgaggcatggggtggagcagctttggactccggttggggtgagcagtggcagcgagttcgagcgtatgaaggagaggtcgttctccatgacgcgatcgccgaaggtgagcgaggtctcaccattgggcatgttgagcatgagctgcaggcagcgcttacggggggtgggggcgcgacagacggaggagcggcggatggtctcacgcgctacaaatgggcgagcagctggggaggaggcgcaggcgatgaggggttggcgacggttgcagagggtggagtgagagctagggttggtcggcggacgcgggatgggggtggctga

SEQ ID NO: 140111 - DNA, 1288 bp, Zea Mays
acctgaactattgcgctcgtatcttcttccttgtgcgcgtgcagccgccgtgcttgcgggttgcggccctgcctctctcctctccggctctcccaccggccaccggccaccggccgccaccgtcgccgccatgccttttcgattccagttcccatggctcaagaacccaactacaaacggcggcacctccaacatagacactaaccctagcccccgcttccccaaccccttcctccctatccaagcccatgtcacctccttcctctcctccttcccccgggcgctcccgccgccgccgccctgggcgcgcatcacctcgccagcctccacctccggggccctacctacctctgagatcgaggagcggctcgccggggtgcccgtgtacgcgctcgccaacgccgcccaggagttcgtgcttgtgtcgtccacacgcgtgggagggcaagggggcgagagcgtgagtccaacgcaggcgctcgggctgctctgcttccggaaggaagatgctgacgcgctgctggagcagatggatggcgatatgcgcgccggctctggtgtcgttcctgtcgcgctgaacaaggttatccaaatgaagtcggatggtgtggcgtttagattcctccctgattcatctcaggtggctaatgcaattaagttgatgcaagatgaaggactgtatgccggagagggatttccaggagtgccagtttttcagtcaaggagcctggtcttgatgagtgacaacaagagatatcgtccagtttttttcagaaaggaggacttggataactcactgcaccggacctcccgtgatcagcaaaaacctaatcctgctgttaggtttggtgacactcaggtttcttctttggaagatatcattaaatctatgaaggatagctcctcctcaaaatgggatgatgttgtatttattcctcctggatttgaccttgctactggctcgacaccatcacagctccgcaagtagttcattctttagaaggttgttaccagtgttattcctagcaacattatatttgactgtctggacactttgatagtagtacattatatatacacattatttcttagacagtgtatgtgcttttgtgccctgaactcgaattactgttagttcctgtgttagatgtatgtagtgtgacattagttagctggaaactgatgtagaatctcggtagcattcagttttgttatgccacttaaattaatacattttttgaggcgataattaatacctttcatctgttaacgaaagattgcacttctt

SEQ ID NO: 140112 - DNA, 515 bp, Zea Mays
tttgtgctggattgttttctagtttagaattttgtggattcagtcgagaagtggggaacacgttctgctacttttcacttccatcagggaagcagataagtatctgtcaattattttgtagaaatccagtgggcagcttgtgttcttttttatacatagtttagataattcttgaataattctgagagcatttacatcccttagttatttgttgatatatgatatcgtatttttctgctctttttgtatgccatatttatcttctaggcttcaagctccaagtaatagcattggattcaccttgaaggcttcccaccgatatggcatgtttcaagaatatgttctggtgagtctatggtatatacgagtagtcacttatgcctctacgatataagataatgttttatcagtttctacataatactttgcatgccaaccatctcagtgtatttgtagtagtatggtgtataaatgctgctggtcataaagccacgcttgataaggtgttctaaact

SEQ ID NO: 140113 - DNA, 2343 bp, Zea Mays
tcttgcctacttatgagttttgagtcatctgtgtactttttagacaaccacaccagtcttgctttaataccctcacacaccaccattgtccgtccccaacctctgtctccacagcgatccgataccatgtccatgcttctacagttcctctttctcagcctcatcctactcgcagcgtccactacgggtggtgatggccagcagttcgcctactccggcttctccactaacgatctcgtcgtcgacggagctacaaccatcacatcaaacggcctcctcgagctcaccaacggaacggaccagcagacaggccacgccttctacccaaccccggtgcagttcacgaggtcgcccaacggaacggtgcagtctttctccacctccttcgtgttcgcaatcctgtccgtgtacaccgacctaagcgcccacggcatggccttcgtcgtggcgccgagcaggaacttcccgggcgccttgcctgggcagttcctcggcctcaccgacatccggaacgacggcaacgcgagcaaccacttcttcaccgtcgagctggacaccatcgagaacaaggagttcggcgacatcaacgccaaccacgccggcgccaacgtcaacggcctcagatccctcaactccagctccgctggctactacgctgacggggacgtcaacggcggcgagttccacttccacaacctgagcctgatcagccgtgaggctatgcaggtgtggatggactacgatgccacggcttcaagcatcacggtcaccatggctccgtcgaaggctgcgcggcctgcacggccgctgttcacagccacccacaacctcacaagcgtcgtcaccgacgctgcatacgttggcttctcctcggcgaccggcacgatcaacacgaggcattacgtgctcggctggagcttcgccatgaacggtccagctcccgccattgatgtttccaggctacccaagctcccacgcatgggcccgaagcctctatccaaggcactggagatcgttctgccgatagcaacggccgcgttcgtcctcgccgtgggcagcgccgcgttcctgctcgtccggaggcatctgaagtacgctgagctgcgggaagactgggagctcgagttcgggccgcaccgcttctcctacagggacctgttggatgcaacggaagggttcaaggacgagctcctgctcggcgtcggagggttcgggcgggtgtacaaggggacccttcccgtgtcgaaactggaggtggcggtgaaacgagtgtcccatgactcgaggcagggcatgaaggagttcatcgcggaggtcgtcagcatcgggcgcatccagcatcgcaacctcgtgcgtgttcttggctactgccggagaaggggcgagctgttcttggtgtacgagtacatgccgagcggaagtgtcgacaagtacttgtacggcaataatgaagggacgacgaggcccgtcctgagttgggagcacaggtggcgcgtcgtcaagggcatcgcgtcttgcttgctctacctccacgaggagtgggagcaggtggtcgtccaccgggatatcaagccgagcaatgtccttctggacagcgacatgaacgggcgactcggcgacttcggccttgccaggctgtacgaccacgacgctgacccacaaaccacgcacgtggtcggaaccatagggtaccttgctccggagctagggcacacgagcaaggcgacgcctcagacggacgtgttctctttcggcatgtttgttctcgagattacatgtggcaggaggcctgtcgtcgtcgtcgtcgtcggtgacgacgaaagctcacaggaggaaagccagtgcatgctggtggattgggtccttgagcgttgggcaagcagtggagcactgctggaaactgtggatgccaggcttggaggggactacaacgctgcggaggcttgtttggcactaaaactagggctgctatgctctcaccccttctccaagtcgaggcctaccgcacggcaggtcatgcagtaccttgacggtgaggtgccgctaccggagatggcgccaacggatatgagccttcacatgatggcgataatgcagaatgaaggattcgatgactacgtcgtcacgggatccacagcaagcattggtacaacatctgttgtttctggtggaagatgaggtatatactgctatatatgcatgtagacgtagcctgtagcatacgttttgggcgttccatcaccggagtatatgtaaggtttaccatcctaataaatatatgtgactttgtaataagttgtaacactagcaacactaccggaattcgactctttaccaaatgtc

SEQ ID NO: 140114 - DNA, 2299 bp, Zea Mays
tataggcatgcagcatcctgtaaaagcgctgttcgcctgttcctctctgctccttcccagagagcgaaaggaaaagagggagaaagaagggaggggggagggagaaggagaaaccacccagccatcgtcccaatttttgccgcccaacggccacgccaagcttcggatcatcagatatgcatcagatgaagacgaagcataggtctttcttgtccttcctgtgcttcatcatcgtctcccttgtctttgccttgtccgattgcgcagttagcagtggagaccactttgtctaccatggctttgccggagttaacctcaccctcgacggcaacgccctagtgacaccagacggcctcctcgagctcaccaacgacacggtcaatctaggccacgcgttctaccctactccactgagcttcaacacgcagcagcggcctaacggcactgtgcgatccttctccgtctccttcgtgttcgccatcctctccgtccacgcggacatcagcgccgacggcatggccttcttcgtcgcgccaaccaagaacctctccaacacctgggcgcagtacatcggcctcctcaacagcgggaacgacggcaacacgagcaaccacatgtttgccgtcgagctcgataccacccagaacgacgagttcaaggacatcgacaacaaccacgtcggcatcaacatcgacagcctcacgtccctgcgagcccaccacaccggatactatggaggcgacgacagcggttccttcagcaacctgactctgatcagcgggaaggcgatgcaggtgtgggcagactaccatggggagaccacgcagatcgaggtgagactggctcctgcgggagcagccaagcctgcaagacctcttctttcagccgtctgtaacctctcagcggttctcgtcagtgacaaatcctacatcggtttctcagcgacgaccggtgcgataagcacacggcactgcgttcttggctggagcttcgctatggacgggcctgccccggccattgacctatccaagctgccagagctgccgcgtcttggccccaagccccgttccaaggtcctggagatcaccctgcctatagccactgggctgttcgtcctcgccgttgggctagtcgttgtcctgctcgcttacagacggttgaggtacaaggaggtgaaagaagattgggaagttgacttcgggccacaccggttctcgttcaaggatttgttccacgccacaggtgggttcaggaagaagaacctgctcggcgtgggcggttttggacaagtctacaagggggtccttccagagtccagagcggaggttgctgtgaagagggtgtcccatgagtctagacaagggatgaaggagttcatcgccgaggtggtcagcatcggccggcttcgacaccgcaacattgtgcccctgcttggctactgcaggcgagaaggtgaactcctcttggtgtacgactacatgtcgaacggcagtctcgctcagcacttgtactcagaaggtggccagcagccagcattgggcagctgggcccagaggtttcgcatcgtcaagggcgttgcagctgggctgctctacctccacgagaagtgggagaaggtcgtcgtccaccgggacatcaagccaagcaatgtgctccttgacagcgaaatgaacgggaggataggagactttggcctctcaaggctctatgaccatggcaccgatccacagaccactcacatggttggcaccatgggctacctagccccagagctggtacgctcgggcaaagcgtccccgtcgacggacgtgttcgccttcggcgtacttcttctcgagatcacttgtgcccagaggcctgtgctgcggcagcagcagcagcagcacacgttgatggactgggttctggagcactggcagaacgggctgttagctgagactgtggacccgagtctcagaaaggattataacctcgatgaggcatgcctggctctgaagctgggacttctatgctcgcatccatttgtcagtgcaagacccaccatgaggcaagtgatgcagtacctcgaaggcgatgcagcaataccagagctgacaccgacacatttcagcttcactatgcaggcgttgactcggcaggacgaagggtttgaatcaccttctagcatgttggatccaccattattaactacaagcatgggcacattttcgagtctctcgggaggaagatgatattcttggtgtaaaaactcactggatcacaaggaaatatataatggaaaaaaatatgttccatggat

SEQ ID NO: 140115 - DNA, 2388 bp, Zea Mays
agacctccgctcatgtccgccgcagcggcgctctcagcccggccgcgaccgccaactcctgccgccatcatccattcactcttcgtctccctatccgacccgtccgcaatccgcctcctgcccgccccgctcctcgtcttctcccaactccgccgcctcctgccgcccgacgccgccacccaactcctcctccacccaatcgcctcgctcctccacctccaccgctccgacatccgcataggcctccagcttcacgggctctccctgtccgccggcctctcctgctactcgcacctcctgccccacctcctctccttctactcccaccacccgtcgctcctccccaccgcttcctccctcgccgccggctccacgtcacccgaaccctacaatgtcctcatctccgcctgcctcaaccacggcctcccgcgccacgcgctcgccgcgtaccagaagatggtcgacaaggatgccgttccccctgatgccttcacttaccccaaagttctccgcgcctgcgccgagaccgcggacctcgtcctcgggcgagcggtgcacgtgcgagccgcagccgccgggatggacgggcacctgtttttccagaatgcactggtgtccatgtacgcaaagtgcggggaccttgcggctgcgcgcagggtgttcgacggaatggataatagggatgtggtgtcgtggaactcgatgatctctggctacgctgcatctgggcagtggagagaggcagtagagttgtttcgtcagatgcaggccgagggtgcagaggcgaactcggtaacatggaacacgatcgccggcggttacattcagatgcgtgattatagggcagcactcgggttaattcgggatatggtgagaggtggtgcagaagttgattttgtgactttggtgattggatcaaacgcgtgctcacgggctggatggttgaggcttgggaaggagatacatgggttggcagtccgaatgcaatgtcatgaaatcgacagtgtggtcaatgctgtgatcacaatgtatgccaggtgcaatgatatggagcgtgctctcatgctgttcagaacgatgagatgcccaggtctggtagcatggaacacaatgctagctggttttgcattgttggatgatgcagaagcagcttctaggcttttccgtgaaatggtatgcagtgatgtgcagccaaattatgttaccgttgtcacctatcttgcactctgtgctcgtgttgctaacctgcaacatgggcaggaacttcacgcgcacattattaggcaaggattcaaacggtactgtttgctttggaactcccttatagatatgtattcaaagtcagggaggctttcagtggctcaaaatgtatttgatactatggatgaccgggacatgatatccttcacttcaatgatagcagggtatggaatgcaaggaaaaggaattgtttctctgcgctttttcaagcagatgattgacagtgggatcatgccagatgccatcatcatggttactgtactatctgcttgtagccactctgggcttgtggatgaaggggaagagcttttcgacaagatggtgagctcatatggtataaagccccagatggagcactattcttgcatggttgatctatatgcgcgtgctggactattggaaaaggcagaggaattgctcaaccagactcccttccctccaacatcaacaatggtggcagcattagtaggagcttgccatgagcaaggtaacgtaataattggtgaaaggtcagcaaggaggctcttggagatgaagacagagaatgctgggcactatgttctgattgctaacatgtatgcagctgcaggatgctggaatgagctagcaacagtcagaaaactgatgagggatatgggtgtcatgaaagcacctgggttagcatgggctgatcttggtaacgggttcaccccttttttggttggggatagatccaaccctctagcaccagaaatctatgaggttttggatgaactaactgaacaaatgaggaatatgagtaattgtagtgatctggacatactatccatgtaggaactcatggggtaaagtggcaatggtaggataagaatgataaattactgctgtggtgtaaaatggagttctttaatacactgtacatgggatttcaccatgaaccatagtgattaaagaaaaaaggtgatgtccttcaagaagcagctcatgcaagggctactgtgaagatgggctgctcaccatacaccgaataacacagaattttaactgccacatctattgccattattggccttggcaaatcagtggccttgagttgtaaatatttcacatttattgccatgattggcaatgtcaaagcagcactttgat

SEQ ID NO: 140116 - DNA, 279 bp, Zea Mays
ccatcatccatggagtgcagaggacatcagagcgagagagagaagaaaatttgtcgctgcggggtgggagctgtgaaggaccgccgcgcacgctggccatctgcgacctcactgcggctgtattggcttgccggtgaatcaccaaagctcgtgtacctgggctctgcgtgggtggtcacgattgggtatccaggcagggtggctaccttgtcagactccatctttgccgacgtggttcgacctccaccgcgattagggcatagcgccaccggattcacg

SEQ ID NO: 140117 - DNA, 966 bp, Zea Mays
cgggcgagcagcggaccattgattcgcacacgcatcctcagctcaggtagacgcggacctccaaaccaacccaagctagcgatccatctcagcaccagcgagcgagcttccttgtccgcctctgcggttcccttcgctcctcgacctcgatcaatcaatcattcgtgggctcgtggcccggccccggccctccttcgcgccgcgccaccttccatgctcgctcgctcgcacatggccgctcacccctcgcgcacatgacacggcgtaggtagtagaccgatcaattcctctttcttacacggaatgctataaatacagagccgccggccaccggatgatgatgatgatgaataggccgcaaccgcagcaagccggcccgctgcagctcctccgttcgctaggactaggagtaggcggaggcggaggcgcccggcggggggccatgaagtcggccacgtcgctcctgctcggcgccgcgctcgccaccgccttcttcctgctctacacctccctctgccgcgacctcggcagcgccgctgccgccgcgcccaggtcgggatcgccgccgccgacgacgccgcggcgggagcaggagaccggcgacacggccgccgctcggcaggaggccgccacgggagagggcggggaagaacgtgtggctgcgagcagcgacggcgaccacagaggcggcgacgccacagcggaggagaatggtcagagcaaggaggaggagcagcggcggattgtgatgcctgccacgtcaactacccacgaggtaagtcgttgatatttggcttctactgtccggttgccattatgatttgttcaacaaaactcagcggttggggtgattacccgtcgcttgtagaatttcgttgttgtctagtaggtttttttcccgaaattaggttattaatagtttttctggctgtttattacattctgtacttcgatcgcctggtcact

SEQ ID NO: 140118 - DNA, 1926 bp, Zea Mays
agctcaggtagacgcggacctccaaaccaacccaagctagcgatccatctcagcaccagcgagcgagcttccttgtccgcctctgcggttcccttcgctcctcgacctcgatcaatcaatcattcgtgggctcgtggcccggccccggccctccttcgcgccgcgccaccttccatgctcgctcgctcgcacatggccgctcacccctcgcgcacatgacacggcgtaggtagtagaccgatcaattcctctttcttacacggaatgctataaatacagagccgccggccaccggatgatgatgatgatgaataggccgcaaccgcagcaagccggcccgctgcagctcctccgttcgctaggactaggagtaggcggaggcggaggcgcccggcggggggccatgaagtcggccacgtcgctcctgctcggcgccgcgctcgccaccgccttcttcctgctctacacctccctctgccgcgacctcggcagcgccgctgccgccgcgcccaggtcgggatcgccgccgccgacgacgccgcggcgggagcaggagaccggcgacacggccgccgctcggcaggaggccgccacgggagagggcggggaagaacgtgtggctgcgagcagcgacggcgaccacagaggcggcgacgccacagcggaggagaatggtcagagcaaggaggaggagcagcggcggattgtgatgcctgccacgtcaactacccacgaggccacctcccaccatagaccgcagccgaagcagcagaagaagagcccaccaccagcgtcccaggatctggcggacctgctccggcgagcggcgacggcggacaagacggtgctgatgacggcgatcaacgaggcgtgggcagcgccagggtcgttcctggacctgttcctggagagcttccgccagggcgaggacacagcgggcctgccgcggcacctgctggtcgtggccatggacggcagggccctggagcgatgcaacgccgtgcaccccttctgctacctgttccgcgtcgacggcatggacttcgccgccgagcagaagtacatggagggcgactacctggagatgatgtggcgccggaaccggttccagcagagcgtgctggagctgggctacagcttcctcttcacggacgtggacatcctgtggttccggagcccgttcccgcgcctgccccgcgccgcgcaggtcgtcatgtcggccgacttcttcgtcggcgacgccgactcgcccaacaactaccccaacggcggcctcctctacgtccgctcctcgcccgccacggtgggcttctaccgccactggcaggcgtcgcgcgcgcggttcccgggccaccacgagcagtacgtcttcgacaggatcgtcaaggaagggtacgccggcgcccgggtgcagttcctggacacggccgtcttcgggggcttctgccagcacggcgacgacctgggcagggtggccaccatgcacgccaactgctgcgtggggctggacaacaagctcttcgacctcaagaacgtgctacaggactggaagacctacagagcgcgcgccgccgctggcaacgcgcagggtttctcgtggcgggtgcccggaaaatgcatacactgactcagctggctccatccttgtctaaactctggaggggttgagctcatttttcgattgttcgccagatagtacaacttaacagctacatctcttttttttccctaatgtatacatacatatattgtttatatatatatatttgtaaagctttttatggaatgtagaaaaattattattaatgacgcaaacaccaccgcgtttcatctcaatccgcgcatatctcaaacgcaacgtcgaggacaaggaccaagcatatgcagggctccgtccattccacaacaccatccgcggggttacaa

SEQ ID NO: 140119 - DNA, 756 bp, Zea Mays
atgtcgcggtcggacggggagagcggcagcggcgcaacgggggccatctgggtggtgatttgcgcgccgccacctcctagcaagccgaacggagatggggacggcgtcgcctgctgctggaacccaaagggcgagggcgaaggagtcgcgccaaacgccggcgccgaagagggcgtgccgaatgccgaggtcgacgagggtgttccgaaattgagtgcgccgaacgccggcgccgaagacggcgtgccgaatgctgaggtcgacgagggcgtcccgaaattcagcgagccgaacggcggggtcgtggaagtggtcccgaacgctggcgtcgacgacgatgccccgaacgcaggggtcgtggaagcggtcccgaacgctggcgtagacgacggggtaccgaaagcgggagtcgacgaaggggtgccgaaggcaggcgtcgacgagagggtgccgaaggccggggtggacgacgtcgcgccaaatgcgggggtggcggatggcgtgccaaaaaccggggtgctggaggggttcccgaaagcgggagtgatggatggggtcccgaacatggcggtggcggcggagatcgccggcgtcaatgttcgggatgcgggtttagggttctgttctagtgagagtagaggtgaggaaacaaggaggggccgggggttattcaaatttcaaaaactttcgggggtcggcacgaaagcatctccggtctcgagaagggggtgtttggttactcctgctaaagtttag

SEQ ID NO: 140120 - DNA, 682 bp, Zea Mays
aatagagttttaaaaagagagtaatatagggagtgatatagaagtttgctatcaatttttcttctctcgtggctccgacgctcctttctttctcggaggcgacagctcgaactcgaatccctcatccagcctggcgctggcgtcgccggtcgccgccgctcgattgcctccgcctgaatatcccttgccccataaggcctgaccttgaaagcctcgcctcttgatcccggcggcggcggaggggagggcgatgccgaagcggacgacacacacctactcgagcgaggacgcactgccggagggccccgagtccgaccttttcgtatactactgcaagcactgcgcctcacatgtcctcatcaccggtcagctcctcctcccccattcgcttaattttctcagatctggtagtctgctaggaattaagggaggttgggtccttaaattcaagcggaagattcagctttgaactcttcgaggaggggatagtttttatctaggaaaaaattagctaccagttctagaccacacgacaacatttctctgcatacttcaattttcttcgtttgtattctagctgtggaggtactgtagcactagtctagttagtctgcatctagtgtgtgtattgcacaaatgtaattgtaccagcgagtgaagggaacaaatcatgcaaatctaa

SEQ ID NO: 140121 - DNA, 1284 bp, Zea Mays
aatagagttttaaaaagagagtaatatagggagtgatatagaagtttgctatcaatttttcttctctcgtggctccgacgctcctttctttctcggaggcgacagctcgaactcgaatccctcatccagcctggcgctggcgtcgccggtcgccgccgctcgattgcctccgcctgaatatcccttgccccataaggcctgaccttgaaagcctcgcctcttgatcccggcggcggcggaggggagggcgatgccgaagcggacgacacacacctactcgagcgaggacgcactgccggagggccccgagtccgaccttttcgtatactactgcaagcactgcgcctcacatgtcctcatcaccgatacccaattgcagaaaatgcccaagcgaaagactgacagagcacatgttttagacaaggctaagcatctttcaaggctaaatgttaaggaggcaggaaaagtaatgttgaaacgtggtgaaggaaagcttgaaaagcagtttcgcatgagctgtgtgggatgtgacctttttgtttgttaccgatcagaagaggatctggaggttgcccctttcatatacgttattgacggagcactgagttcagttgctgctgagacaaatccacatgatgctcctgtacctccttgcatcacacaactggaaggtggacttgtccaagtagccattgaagtggaagaccgggcacaacgttcagcaataacaagagtgaatgctgatgacgttcgagtaacggtagctgcccttgctgctcgaggggaagctaacagtgagttgctagaatttatgggcaaggttcttggcctaagactgactcagatgacccttcaaagaggatggaataacaaatctaagcttctaattgttgaggatttgtctgcacggcaagtgtatgagaagctcctagaagctgtacaaccttaggcacccgagcgatggagcaatgtggtatgcagtatgcgtctggatattctctttcgagggcataggagaaggtttccatctatattgtgcaacaagtggagcagaacgtgtcgagacgaggtcgaaacatggctcaaatgtataactagaccatagcagtatccggttcattgtttctgtcgtgactcagatattgtatcctgtggtctcaagggaggtggttttgtgatttccacattctgatccagactgtttttgtggccacgacgcgtgctcgtgttatttatttgcaaaataaatagatatatataaaattaaagcgtgcgagcatgagt

SEQ ID NO: 140122 - DNA, 1600 bp, Zea Mays
atcaatttttcttctctcgtggctccgacgctcctttctttctcggaggcgacagctcgaactcgaatccctcatccagcctggcgctggcgtcgccggtcgccgccgctcgattgcctccgcctgaatatcccttgccccataaggcctgaccttgaaagcctcgcctcttgatcccggcggcggcggaggggagggcgatgccgaagcggacgacacacacctactcgagcgaggacgcactgccggagggccccgagtccgaccttttcgtatactactgcaagcactgcgcctcacatgtcctcatcaccgatacccaattgcagaaaatgcccaagcgaaagactgacagagcacatgttttagacaaggctaagcatctttcaaggctaaatgttaaggaggcaggaaaagtaatgttgaaacgtggtgaaggaaagcttgaaaagcagtttcgcatgagctgtgtgggatgtgacctttttgtttgttaccgatcagaagaggatctggaggttgcccctttcatatacgttattgacggagcactgagttcagttgctgctgagacaaatccacatgatgctcctgtacctccttgcatcacacaactggaaggtggacttgtccaagtagccattgaagtggaagaccgggcacaacgttcagcaataacaagagtgaatgctgatgacgttcgagtaacggtagctgcccttgctgctcgaggggaagctaacagtgagttgctagaatttatgggcaaggtgattttcttcaatgacactctaatcttattgtggtgtggtattgtgcactttgagccttgtaaaaagtgatattctgattgctccagcgtgccatcacatgcaataagtgtaggttaaaatgtctttgaatctatgctcaaattatacaaagaagtatgcccttggttataaatttatacaaatttagttggtagtctaaattctgaggcagccattttccagtagggggcttatttataactgggaaggttttagcctttgacaataaccagtttcgattttcaaccttgttatgtgaagatgtccatgttgatggcttgtgaaagcaggttcttggcctaagactgactcagatgacccttcaaagaggatggaataacaaatctaagcttctaattgtgagttcttactgctaatagtatccagttctgatgcactgaactgaatcctatattatttttctttcccgcaatttttttacatgtatctactattgtttctcttctaaaaatatacttgggattttgctctaaggttgaggatttgtctgcacggcaagtgtatgagaagctcctagaagctgtacaaccttaggcacccgagcgatggagcaatgtggtatgcagtatgcgtctggatattctctttcgagggcataggagaaggtttccatctatattgtgcaacaagtggagcagaacgtgtcgagacgaggtcgaaacatggctcaaatgtataactagaccatagcagtatccggttcattgtttctgtcgtgactcagatattgtatcctgtggtctcaagggaggtggttttgtgatttc

SEQ ID NO: 140123 - DNA, 1220 bp, Zea Mays
atcaatttttcttctctcgtggctccgacgctcctttctttctcggaggcgacagctcgaactcgaatccctcatccagcctggcgctggcgtcgccggtcgccgccgctcgattgcctccgcctgaatatcccttgccccataaggcctgaccttgaaagcctcgcctcttgatcccggcggcggcggaggggagggcgatgccgaagcggacgacacacacctactcgagcgaggacgcactgccggagggccccgagtccgaccttttcgtatactactgcaagcactgcgcctcacatgtcctcatcaccgaaaatgcccaagcgaaagactgacagagcacatgttttagacaaggctaagcatctttcaaggctaaatgttaaggaggcaggaaaagtaatgttgaaacgtggtgaaggaaagcttgaaaagcagtttcgcatgagctgtgtgggatgtgacctttttgtttgttaccgatcagaagaggatctggaggttgcccctttcatatacgttattgacggagcactgagttcagttgctgctgagacaaatccacatgatgctcctgtacctccttgcatcacacaactggaaggtggacttgtccaagtagccattgaagtggaagaccgggcacaacgttcagcaataacaagagtgaatgctgatgacgttcgagtaacggtagctgcccttgctgctcgaggggaagctaacagtgagttgctagaatttatgggcaaggttcttggcctaagactgactcagatgacccttcaaagaggatggaataacaaatctaagcttctaattgttgaggatttgtctgcacggcaagtgtatgagaagctcctagaagctgtacaaccttaggcacccgagcgatggagcaatgtggtatgcagtatgcgtctggatattctctttcgagggcataggagaaggtttccatctatattgtgcaacaagtggagcagaacgtgtcgagacgaggtcgaaacatggctcaaatgtataactagaccatagcagtatccggttcattgtttctgtcgtgactcagatattgtatcctgtggtctcaagggaggtggttttgtgatttccacattctgatccagactgtttttgtggccacgacgcgtgctcgtgttatttatttgcaaaataaatagatatatataaaattaaagcgtgcgagcatgagt

SEQ ID NO: 140124 - DNA, 1716 bp, Zea Mays
gtcctctcccccgcggttcccttcaacgtcgcctccctagagatccgccgcttctctgccctctgctcgtcgattcggcgcctcctctccttcacgcgcccacgctgccgtcgcctcctcctcactgtcgtccatgccgtgtagccgcctacggccatggccgctggagccagcgactatttgacggtggagtaccactccagagactcccctctttcccctccgacgacgagggagccaccggcggcagcggcgtcctcgtacaccacggtgggcacggtgggcgatcttctcatgaagtggtggtagtgcctcgtggacgtcgacggagacgcggcgtgcctgcccctcgtcctcctgctccttgtcttctccgccgccccgtctcctgctcacggctgcgaccgctgcgtgcgccggtccagggccacctattaccaggcctcctcgctcgccctcaacggtacccctgccttgtggggtcgtccaactggcggttcatgtcgcgggaccacgggccggcgtggagcacggcgcaggcgccgctgtagttccggctggtggtgaccggtggctacgacggcaagtgggtgtgggcggagtcggaggtgctgccgcgccggtgggaggccggccgcgtctatgacgccggggtgcaggtctccgacgtcgcgcaggaagggtgctacctctgcgacacgcgcaagtggcagtgatgctcgcacgagctggattgtacagttttttgttttggtcgggaatgggacgaaagatatgaaatgatgattagcggagccggagagccgaatcaaatctattaaccggtggcgctggaagggagttttttggaacctaagatgtcgttgaagaacatcccgttactccacgccggacttgccgcgcgccgcatgcaaggtgctcgacggtttgctgctgcactgggcaggcatggcagcaggccggggctactgggaggacaggtgcgccggatgttctcgccggagaccaccgtcccggagccgctgcccaacccagactactccttcacgttgaagtacatcgtcggtgtcctccgacctggcagcatctcgggttgctgcagttgatcgccgtgccgcgaggatgacgtcgtcggtgtcctccgatgacaaggaggatgacgtcggcggctccggctccgcgaaggcctcaaggcctgcagcagacttccgcctctcgtccatggcggcctctacggcctgcattgagagcttcacaaacctcatctccatcccaatctcatttgtgctactcgcatcgttcttcggtttctttctttggaggaacaagatggacgacacacacgaggttggctgatgacgctcgacatacgagagcaacaagatgcgcgaagagcaagctgcgacgcgtgctactgtgccagtcgcccactgcctgctctgcggagttcaccatggaggttggcgacgaactcgtgaggttggacaaacaacgtcgggtccgacggtggaggatccatttccgacgaggtagagccgggagccggcaactgggagtgaaacacagaggaatggaagagccgttttgctccatggttacggttgatgcctgtttagagttgttaaaattggagaggatagcaaaagaacaaagagccagctgttataatactactattctaattacaagtttgggaatactatttttaagaagccc

SEQ ID NO: 140125 - DNA, 1580 bp, Zea Mays
agcgcccgccgagtcgctctcgcctgcctccagccccgctctcgcctcctgctgggcgctatcgccctcactatagcctgcattggcacaagcctaacatggactgctaaaaaacctttgacagcctggcggcaaaaccctccccaatacccatttctcgcaaatccccgccacccccatttccaccgccagattcggtgccgtcaggatcgatttcttgtgcatcttggagcatctacaaggggtgggcgactcagcaaaatctgctggcatctcctctcttttcttgcatcgaattttgtaattgccgactgaaccgtgcagagaagtcttgacaagcgcatgggcggaggtggaaatggggaatcgtgcgatctcctccaagtcctttttgagggggccttggctggaggagctgctggtgttgttgttgaaacagctttatatcctattgatacaataaagaccaggcttcaggctgcacaaggcggaagtaaaattcaatggaaaggcatgtatgatgggttagctggaaatattgtcggtgttcttcccgcttctgcaatttttgttggagtatatgaaccagctaaaagaaaactactggaattgtttcctaaaaatttgagcgctattgctcatttgactgcaggagcaattggaggggctgcttcttctctcattcgtgttcccacggaggtggttaaacaaagaatgcaaatgagtcagtacaagactgcacctgatgccgttcgccttatccttgctcaagaaggaattaaaggtctttatgctggctatggttcctttctcctgcgagatctgccatttgatgccattcaattttgcatatatgagcaactccgaattggttatcgattaacggctaagagggagttgcacgacacagagactgcaattattggtgcttttgctggtgccattactggcgctttaaccacacccctcgatgtcatgaagacaagattgatgattcagggacaaacaaaccaatatagaggattcattgactgtgctcaaactatcatgcgagaggaaggtgctggcgcattttttaagggtatcgagccaagggtactatggattggcattggcgggtcgatcttctttgctgttctggagaaaacaaaatcggttctagctgagaggaatacccgtaggtgagaggatgaacgaaagctcttggcatcgtgatcatttccctatggcacgaggcggaaatgcgcctggccagattttggagccccagtttcccattctattctgttccgtttgagctacgttgatggagactcatgttgcgtgatattccctctgtttttttattcgtcgctttttagtttaaaaataaactagcagttgacaaatattcgagaacgagataatactagctaagatagttggccttttcaggcattacgatgagcctagagtaaggtaacgtagaaacagcaacaagcaaactagcactacaacgatagtaaggctgtcttctatcttttatttcaaatattacttgtgaactgtataatctataatacaaaataaagttttacgtg

SEQ ID NO: 140126 - DNA, 1695 bp, Zea Mays
agcgcccgccgagtcgctctcgcctgcctccagccccgctctcgcctcctgctgggcgctatcgccctcactatagcctgcattggcacaagcctaacatggactgctaaaaaacctttgacagcctggcggcaaaaccctccccaatacccatttctcgcaaatccccgccacccccatttccaccgccagattcggtgccgtcaggatcgatttcttgtgcatcttggagcatctacaaggggtgggcgactcagcaaaatctgctggcatctcctctcttttcttgcatcgaattttgtaattgccgactgaaccgtgcagagaagtcttgacaagcgcatgggcggaggtggaaatggggaatcgtgcgatctcctccaagtcctttttgagggggccttggctggaggagctgctggtgttgttgttgaaacagctttatatcctattgatacaataaagaccaggcttcaggctgcacaaggcggaagtaaaattcaatggaaaggcatgtatgatgggttagctggaaatattgtcggtgttcttccgtgagtattagtattacagtgaagactgaagaagttttatgctagcctataggatgctatcatgctgttagcaatacaagcagaaggaacctggatgtgtcacttatcttttaatcgcttctgcaatttttgttggagtatatgaaccagctaaaagaaaactactggaattgtttcctaaaaatttgagcgctattgctcatttgactgcaggagcaattggaggggctgcttcttctctcattcgtgttcccacggaggtggttaaacaaagaatgcaaatgagtcagtacaagactgcacctgatgccgttcgccttatccttgctcaagaaggaattaaaggtctttatgctggctatggttcctttctcctgcgagatctgccatttgatgccattcaattttgcatatatgagcaactccgaattggttatcgattaacggctaagagggagttgcacgacacagagactgcaattattggtgcttttgctggtgccattactggcgctttaaccacacccctcgatgtcatgaagacaagattgatgattcagggacaaacaaaccaatatagaggattcattgactgtgctcaaactatcatgcgagaggaaggtgctggcgcattttttaagggtatcgagccaagggtactatggattggcattggcgggtcgatcttctttgctgttctggagaaaacaaaatcggttctagctgagaggaatacccgtaggtgagaggatgaacgaaagctcttggcatcgtgatcatttccctatggcacgaggcggaaatgcgcctggccagattttggagccccagtttcccattctattctgttccgtttgagctacgttgatggagactcatgttgcgtgatattccctctgtttttttattcgtcgctttttagtttaaaaataaactagcagttgacaaatattcgagaacgagataatactagctaagatagttggccttttcaggcattacgatgagcctagagtaaggtaacgtagaaacagcaacaagcaaactagcactacaacgatagtaaggctgtcttctatcttttatttcaaatattacttgtgaactgtataatctataatacaaaataaagttttacgtg

SEQ ID NO: 140127 - DNA, 1305 bp, Zea Mays
ctcgcaaatccccgccacccccatttccaccgccagattcggtgccgtcaggatcgatttcttgtgcatcttggagcatctacaagggagaagtcttgacaagcgcatgggcggaggtggaaatggggaatcgtgcgatctcctccaagtcctttttgagggggccttggctggaggagctgctggtgttgttgttgaaacagctttatatcctattgatacaataaagaccaggcttcaggctgcacaaggcggaagtaaaattcaatggaaaggcatcgcttctgcaatttttgttggagtatatgaaccagctaaaagaaaactactggaattgtttcctaaaaatttgagcgctattgctcatttgactgcaggagcaattggaggggctgcttcttctctcattcgtgttcccacggaggtggttaaacaaagaatgcaaatgagtcagtacaagactgcacctgatgccgttcgccttatccttgctcaagaaggaattaaaggtctttatgctggctatggttcctttctcctgcgagatctgccatttgatgccattcaattttgcatatatgagcaactccgaattggttatcgattaacggctaagagggagttgcacgacacagagactgcaattattggtgcttttgctggtgccattactggcgctttaaccacacccctcgatgtcatgaagacaagattgatgattcagggacaaacaaaccaatatagaggattcattgactgtgctcaaactatcatgcgagaggaaggtgctggcgcattttttaagggtatcgagccaagggtactatggattggcattggcgggtcgatcttctttgctgttctggagaaaacaaaatcggttctagctgagaggaatacccgtaggtgagaggatgaacgaaagctcttggcatcgtgatcatttccctatggcacgaggcggaaatgcgcctggccagattttggagccccagtttcccattctattctgttccgtttgagctacgttgatggagactcatgttgcgtgatattccctctgtttttttattcgtcgctttttagtttaaaaataaactagcagttgacaaatattcgagaacgagataatactagctaagatagttggccttttcaggcattacgatgagcctagagtaaggtaacgtagaaacagcaacaagcaaactagcactacaacgatagtaaggctgtcttctatcttttatttcaaatattacttgtgaactgtataatctataatacaaaataaagttttacgtg

SEQ ID NO: 140128 - DNA, 1355 bp, Zea Mays
ctcgcaaatccccgccacccccatttccaccgccagattcggtgccgtcaggatcgatttcttgtgcatcttggagcatctacaagggagaagtcttgacaagcgcatgggcggaggtggaaatggggaatcgtgcgatctcctccaagtcctttttgagggggccttggctggaggagctgctggtgttgttgttgaaacagctttatatcctattgatacaataaagaccaggcttcaggctgcacaaggcggaagtaaaattcaatggaaaggcatgtatgatgggttagctggaaatattgtcggtgttcttcccgcttctgcaatttttgttggagtatatgaaccagctaaaagaaaactactggaattgtttcctaaaaatttgagcgctattgctcatttgactgcaggagcaattggaggggctgcttcttctctcattcgtgttcccacggaggtggttaaacaaagaatgcaaatgagtcagtacaagactgcacctgatgccgttcgccttatccttgctcaagaaggaattaaaggtctttatgctggctatggttcctttctcctgcgagatctgccatttgatgccattcaattttgcatatatgagcaactccgaattggttatcgattaacggctaagagggagttgcacgacacagagactgcaattattggtgcttttgctggtgccattactggcgctttaaccacacccctcgatgtcatgaagacaagattgatgattcagggacaaacaaaccaatatagaggattcattgactgtgctcaaactatcatgcgagaggaaggtgctggcgcattttttaagggtatcgagccaagggtactatggattggcattggcgggtcgatcttctttgctgttctggagaaaacaaaatcggttctagctgagaggaatacccgtaggtgagaggatgaacgaaagctcttggcatcgtgatcatttccctatggcacgaggcggaaatgcgcctggccagattttggagccccagtttcccattctattctgttccgtttgagctacgttgatggagactcatgttgcgtgatattccctctgtttttttattcgtcgctttttagtttaaaaataaactagcagttgacaaatattcgagaacgagataatactagctaagatagttggccttttcaggcattacgatgagcctagagtaaggtaacgtagaaacagcaacaagcaaactagcactacaacgatagtaaggctgtcttctatcttttatttcaaatattacttgtgaactgtataatctataatacaaaataaagttttacgtgactgcgtgatc

SEQ ID NO: 140129 - DNA, 117 bp, Zea Mays
atggcccagtgtcaaacattgggagataagtgtgatgcccatggcgagaaggctctagcgatctcaggaacaaggaagaagaatagaaggaaggcagcgcgaggaagcagaagctag

SEQ ID NO: 140130 - DNA, 107 bp, Zea Mays
gaaatgtttctatattttctttcgtaatgacttctagtttcagttcagcatttatacagcctaatcttgggccaatgactagttacaaggccgtatatggcccaaca

SEQ ID NO: 140131 - DNA, 276 bp, Zea Mays
atggtgttggaccctttgctgattccgcagttcattgaggtggtgattggtgaatgtttatttgagctgcagtttcgggttgaagaaaacatggatagtgacagtccagttcatgtggatatggatgacttaagccgtggggaggacaaaaataagtcggatcaattagaggatgtggctcgtgggggtaatagtgctccagatagtggcaaatatgtttcaaagggtgctggtaatgatggtaatactggtaaaaagggagcggtgcatatgtaa

SEQ ID NO: 140132 - DNA, 288 bp, Zea Mays
tctgaccttgacggccgtctcgatgaggctcttgcgctgctgtgcgtcggagacgtggcagacggcaccaaccgcggtgatacccttggccctgagcccctccaccgcctcgttcacctggacctgcttgcgggaggagatgacgacggcggcgccctccagaccgaggcgctcggcgatggcgaggccgatccccatcgtggacgccgtcacgatggccaccttcccctccagacgccggcacttgacatccatcgccgcgcaggccgaccttttcaacttcaactt

SEQ ID NO: 140133 - DNA, 1561 bp, Zea Mays
aattaagcgccagctgcgcgccacagtaccccaaccgaccctgccggcgacggcgttcataaattgggatgggggcagaaacagattcgtgttcccacctgtagagagaactgtagatccctgtcatccaatcactcaccatgcaatacctcaccgatgttgctcgctccaaggacctgctcaaggttgtaggccattcggtgaccatggcgatgagcgacggggagttcctcaagtcgaggaaatgggccgtcggtggccacgattgggaggtacacttgcgtcccaaggatcacccggtgggccaccagcgcccggtgacgctgaggctcgtcttgatctccgaagcgcgctgcggcgacgtcgaggccaagctcagctgccgcctggttgatccgatcgggaggctgaagccgtcgaaggagaagagcatgtcgcataagttctacaagtccggcgattactccggtgcaatccaggtgacggcaagagaggatctggagcagtctggctacctggtggacgattcctacaccgtggaatgcagcatcacggtgctcaaaaaggcgccggcgctgaatactgcggctgcggcgacggccatggatcgcgatgctgcgatgctgccgtccctcgaactgcaacggcgcttgggcgaatttctgcagaaggggatgggcgcggacgtcacgttccatgtgtccggcgagaagttcgccgcgcacaaggccatccttgcctcgaggtcgccggtgttcatggcggagctgttcgggggaatgaaggaggaatcgtcccggcggcacatcgaggtgaagggcataaagcccgaggcgttcaaggccgtgcttcacttcatctacactggcacggcgccggaactgaacaagaagggcgacggcgcgacgtcgttggcgcagcatctgcttgccggcgcggacaggtacggcctggacatgctcaaacatttctgcgtggtcaggctcgcggactgcatcaccgtcgacacggtggcgaccacactggcgctagcggagcagcatggctgctcgcagctcaaggctagctgcatcgagttcatcgcgggatatcttgacgccgtcttggagacagaggggtacaagcacctggaagcaagctgcccctcggtgctcgctgatatcctcaaggctacgcggcgaccaaccaattgaagcgtcgagcgggatgttttttccttttcatctttattttttaatgactccatcttcatgtgaacgatcagctacactagttgctacattcttcatctttcatccacttctgattctggaatcttgatgcagtaattgtggtcttggcaacatgttcagaatcatggcttctctatttcagattatattttccagttttgctataccgtgtcggatgaaaaccttctttccaacaactgttttcccggctcttttttccctaaatcgtatacataggagggaataaaactacgatttaaatgaaattttgcctcaggattcatatatttcttcataattcatttgtgttcttaactaattttagtttt

SEQ ID NO: 140134 - DNA, 3267 bp, Zea Mays
aacgagcgcgttcctccaccgccgccaccacctcccactctgcaagagctcatggctcagcagaatgagatcctgagacagctggctcaacgtcagccaccacctcagcactatggtggtggagaccatcagtgtcaccctgcggcggctacataccaggaattcctcagcacccagcctccattgttcacaagggcggaggacccgcttgacgcagatgtgtggctgcgagtggtggaatccaaattcccactactccatggagcttgctcagaggtcaccaaagtcaggttcgccacccagcagcttcgcggacccgcaaggacttggtgggatcattttcttgctatgcagccagaggaccgagaggtggagtggagggagttcaaggcagctttcagaggacaccatataccagccgggattatggacaagaagctcaatgagtttttggcactcactcagggcaacaggacagtgttgcagtatgcccaggcctttaatgacttgtgccagtatgctgggtatcatgcagatacagatgagaagaagagagacaggttcaggagggggctcagcactaagctccgtgatcgtctcaacaccgtcagggccaacagctacaatgagttggtcaacatggctatctcccaagaggactgcattacagctagacaggcagagaagaagaggaagacccctgtggcaggaccctcagctcagccacagcgcttcaggattgtgtccgacacccagggcaggggaccccagcagcagcaagggcgatgggtgatctgaccgcagcagcagcagcagcaggcacccaaccgcacccaatttccagctcagaggaacaatcagctgcagcagcagtaccgccaggcaaatgacaacaggtgcttcacatgtggcaacactgggcattatgccaagaattgccccaggaaccaacagaggcaggagcagcatcgcatagttttatcagtgccaagtttagtgccaagtgccaattgccttttcaccacaccaatggaggtatcacaatttccacccccggaggcagggttgccacttaccaaattaacaagaatgtgcctataaagtttggtagtctgataattaaaaccaacctcctcattttagggttggatagtgtggatattatattgggaactgattggttgaccagaaatcaggctgtgatggatattgcagctagagccattgaggtgcactcaccaacttgtggtgaaaccacactatatttgcctgaccagggttgcacccgatcttgtgctttcattatgttagaatccccagtggaaaagatcccagtggtccatgactacccggatgtttttctggaggaattgccagggatgccacctgaccgagatattgagttcgccatcgaattgcaacccgggaccgctcctatctccaagagaccctataggatgcctcccgcggaattggcagaattgaagaagcaattgcaagagttgttggacaaggggtttattcgtccaagcacttcaccatggggatgtccagcattatttgtgaagaaaaaggatgagagtttgaggatgtgtgttgactaccgtcctctcaatgcggtgactatcaagaacaaatacccactgccccgcattgatgttctgttcgatcaattggtaggagccaaggtattctccaagatagaccttcgctcaggataccatcagatcaagatccgtgccagcgatattcccaagacggctttctctaccagatatgggctgtatgagtttttggtgatgtcttttgggctgaccaatgccccggcttattttatgtacctgatgaactcagtgtttatgccagaattggataagttcgtggtcattttcattgatgatattctggtctattccaagaatgaagccgagcacgccaaacatttgcatactatacttcagagactgcgtgaccatcagttgtatgctaagttgtctaagtgtgagttctggcttaaggagattaaattcttgggtcacacaatttctcaggatgggatatcagtggatcctgagaaggtacaagaggtaatggactggaaacccccgactacagtgaaacaaattcggagttttctgggattggcagggtattatcgacgatttattccggatttctccagaattgccaaaccaatgactgaactgttgaagaagggagtcaaatttgagtggggccaaaagtgtgaagatgccttcataccttgaggcaacatttgacaacagccctagtgctggcccaacctgacaacaccaagccatttgaagtttattgtgatgcttctggtaccggattgggatgtgtcttgatgcaagagaacagagtcattgcttatgcttctcgggcactcaggccccatgagcagaactaccctacccatgatctagaattggcagctgtggttcatgctcttaagatatggagacactacttgatgggagctcactgtaacatctacactgatcacaagagtctcaagtacattttcactcaggcagatctgaacatgaggcagaggagatggttggagttaatcaaggactatgatttggaggtgcattaccacccagggaaagccaatgttgtggcagatgctttgagcagaaaggcccagtgcaattgtatgagcatggatgcaagagtcaccaccctgtgtgatgagttgtgcaagctgaacctggaagttgtttcttcgggtaacctaagctatatctcggtggagcccacattgcaagaacagatagtcagggcacaggttgaggataagggtgttcaggttatcaaggatatgatcaagcaaaaggcagagaaataccagtgtttccgataggacagcaagggaattctatggtttggagatcgattggttgttcccaaggaccctgagctcagaaagaagatactggatgaagctcacctctccaaattctccatgcatcctggtagcaacaagatgtaccatgatctcagatctctatattggtggactagaatgaaaagggaaattgccaagtacatatccgagtgtgacacctgccagagaattaaagctagtcacttgaaggcagcaggccctttgcaaccccttcccatcccatcttggaaatgggaggacatttgcatggacttcatagtgggattacccatacctctaggcaccatgattctatttgggttattgtggacaggttgaccaagactgctcat

SEQ ID NO: 140135 - DNA, 474 bp, Zea Mays
ttgactccccaaaccgacgtgagcaaagcatagtcacacagcgaaggtgtgagcgagcgagacggagacagagagagagatggtgacgacggactgggggccgatcatcgtggcggtggtgctgttcatcctgctgtcgccggggttcctgttccagctgccggcgagggtcagggttgtggagttcggcaacatgggcaccagcgccctcgccatcctcgtccacgccatcctctacttctgcatactcaccatcgtggtggtagccatcggcgtgcatgtgtacacaaccaaaccggatccggtggagtagattgaaatttgcgtgtgtgtttttcagttctgctgctcttgtctattttttcagtactcaatataagtggatgcaggagtatctattttgtaatatatacgcagataacacgattatcgtctttattgatcatgatattgagcaagcgaagaacatataga

SEQ ID NO: 140136 - DNA, 1324 bp, Zea Mays
cggcatcagcgtcttcccctccctcgtctcgtcaatcccctcgcgccctctcctccggtcctccgcacacggcacaccgtccggtgaccctgcgtgcgtgcctccctctctccttccgcctccggtaccggccccagcggctgcgctgcgcgccgcgcgcgggctgctggcagcgggagcgagcagctgctgctccacaaggcggtcgcgccgctttgggagcgcctgtgctccaaagcgaagctttacccgtctgcttagcgctgatgcgtgcgcttagtgccacttttttggaaccctgggttgagcatggagcatttacctgattttgttaccaatttctgctagtaatagttattttggacacagaatggaagggcgccgctcaaatgaagtatcatctgccgaagctgtcttggtgggagcattgtcgtctggtgtcaatgctcccacgtggtttgtgctcaagattacgtttttgctccttgcattgtgttttacggctatgcttgctctagcattttcgtcgaagaactttgtaatcgttgcacatgttcttctgctggtgactattggaaccgtgctatttgtgctgcttaacaggtttctggctgaagttgggctcgtgcctgttgaacagcagatgaaggagatgggcatccacaaaacagaagccacagatgaagacaagagaaattaatcagtgacaccttttttttttgatatggaaagcagtttaacattcaatggacagagtgacattatctctcatgatagaatcagcactcacttcagagacatgaagttcagacaccacaattttgcacagatgaccatacatctttgtacgtacttccaaatggaaacccaggtcgaaatctgtagtgaaaagggatgtagctgcaagcagagcacatcaagcctgctttccctcttccttgggcttgctcttttttttttacttggtgtagcagaagcatgagcaccagggaaactgaaacaagaactccattgccagagaaatcaccaatacttttgtttggagaagtgtgcccaagggatttgcatgcaatgtaacccttacatatacgacatggatgccgtttatcagtggacattaggatttatggtctttgtgcaatatatatggtcgtgtcagactatcgttcctttcatttattctttattaaccctcataaacctgattgtgagaagtcatgatggcttttgattctttgaaggtcgattgaaatgttggaaaagccttccggatggaaagcatatgttctttagctgccgatgggtaaccttttggtcgttcagg

SEQ ID NO: 140137 - DNA, 364 bp, Zea Mays
catcacgaagcaaagtagaacatccagaatgccccttctctaataacagggttgtataatgagcaagcaatctatctttgcactttctccaataacttttgttgctgttaatattcaaatagtgaccaactcactctttctcccgcttcaaacattcatcaaccttttgaaagaagcatcgaccattaaaaatagtgaaagggaattaggcttacacctttttcctaattgattttggtggtaactttgagcaagaaattttcaaagtcattctcgtaacactctatttaacccaacctaattttaataaaaatatccaagacattccttaacagagcccgatcaatctatccatcctcaagtt

SEQ ID NO: 140138 - DNA, 2115 bp, Zea Mays
ggctgaggttcaccgagccgccgcttcggttctcctctaaaaccctagaaactaactcccacctcccggttcccgccgtcctcgctcgccccccattctccggccctccccaccgccaccattttccccggcgacatgggccgcaatcttccagccgagcaagtggaagcacccaggagcagcaagatggacaagaagagaaagaaggacaagaagcggaagctggcagccgaggccgaggaggaggcggcggtgacggcgacagtggagaccgtgaagagcagcaagaagaagcgggtggagaatgaacccggcgcaggagcagtggaggcggagaacggcgctgagaagaccgtggcggtgaccgggaagggttcggaggaccctaagtacgcgccgctacggtcgttctccgctgccgagctgccgtctcaggtgctcgaatgctgcagcgcgttcgcgcggccgtcacctatccaggcacacgcctggccgttcctcctcgacggccgggacttcatcggcatcgccgccaccggatccggaaagacaatcgcctttggcgtgccggcgctgatgcacatcaggaagaaggtaggggggaaagcagggaagaaggctgtgccacggtgcctcgtgctatcaccaacgagggagctcgctcagcagattgcagatgtacttagtgaggctggtgcaccatgtgggataaaatcagtctgtctttatggtggaactaaaaaggaaccccaaatatctgcccttaaatctggagtggatatagtcataggaactcctggtcgtatgaaagaccttattgaaatgggtgtttgctgtcttaatgaggtttcgtttgtggttctagatgaagcagataggatgctggatttgggttttgaacctgaagtcagggcaattttgagccaaacatcatctgtacgccagatggttatgttcagtgcaacatggcctcttgctgtccacaaattagcccaggagtttatggatccaaatccgataaaggttgttattggatcagaagaccttgctgctaaccatgacgtgatgcaaattgttgaagtattggatgatagaacaagggattcaagattacttgccttgcttgacaaataccatcaagcacaaagcaacagggttttggtttttgtgctgtacaagaaagaagctgcacgagtggaaacaatgcttcagagaaggtagcagatttgttgccatttcttcaatttaatccctgaacaatatttctctccatatttttataatatatgtatgttctaaaggggatggaaggctgtttcagtccatggcgacaaggctcagcatgatagaacaaaagctttatctttatttaaagaagggaaatgcccattaatgattgctacagatgtcgcttcacgtggacttgatattcctgatgttgaagtagtgattaactatagttatcctttgaccactgaggactacgtccacaggataggaaggactggtcgtgctggcaagaaaggtgttgcacatacctttttcactcaagcgaacaaggccttactgatttttcatccctgctgacggaagcttgatttctccgttggtgatgctatggatgtgatcagatcagccatttgcaagctgattgcagccacggatgagtattgtggcagtgggcaatcccaaaatatagctctcttgttataggttagtttattatgagtagcattcggcttatgtttttctggaccgtccccattatgcattagcttgggctgcttggctgtatgtaataataagcaacattctgcttattatgatttgcattctcttggaggcttagtttggaaacttaaatcgtctccggtatttccagggattgagtgggaaaataagctattttcccactcaatcttcagggaaaccggaggggatttaagttttcaaactagcccagagtgtagttaaattcagtgcgtccttagtacaagcagcccggttatggtaatgataggatagtgaaaggtgtacttctatcctggttagagtaaaaaaagaatatggttttccgtgttatagtaaaaaaaagaggatggttttgcagttgga

SEQ ID NO: 140139 - DNA, 2300 bp, Zea Mays
ccacctcccggttcccgccgtcctcgctcgccccccattctccggccctccccaccgccaccattttccccggcgacatgggccgcaatcttccagccgagcaagtggaagcacccaggagcagcaagatggacaagaagagaaagaaggacaagaagcggaagctggcagccgaggccgaggaggaggcggcggtgacggcgacagtggagaccgtgaagagcagcaagaagaagcgggtggagaatgaacccggcgcaggagcagtggaggcggagaacggcgctgagaagaccgtggcggtgaccgggaagggttcggaggaccctaagtacgcgccgctacggtcgttctccgctgccgagctgccgtctcaggtgctcgaatgctgcagcgcgttcgcgcggccgtcacctatccaggcacacgcctggccgttcctcctcgacggccgggacttcatcggcatcgccgccaccggatccggaaagacaatcgcctttggcgtgccggcgctgatgcacatcaggaagaaggtaggggggaaagcagggaagaaggctgtgccacggtgcctcgtgctatcaccaacgagggagctcgctcagcagattgcagatgtacttagtgaggctggtgcaccatgtgggataaaatcagtctgtctttatggtggaactaaaaaggaaccccaaatatctgcccttaaatctggagtggatatagtcataggaactcctggtcgtatgaaagaccttattgaaatgggtgtttgctgtcttaatgaggtttcgtttgtggttctagatgaagcagataggatgctggatttgggttttgaacctgaagtcagggcaattttgagccaaacatcatctgtacgccagatggttatgttcagtgcaacatggcctcttgctgtccacaaattagcccaggagtttatggatccaaatccgataaaggttgttattggatcagaagaccttgctgctaaccatgacgtgatgcaaattgttgaagtattggatgatagaacaagggattcaagattacttgccttgcttgacaaataccatcaagcacaaagcaacagggttttggtttttgtgctgtacaagaaagaagctgcacgagtggaaacaatgcttcagagaaggggatggaaggctgtttcagtccatggcgacaaggctcagcatgatagaacaaaagctttatctttatttaaagaagggaaatgcccattaatgattgctacagatgtcgcttcacgtggacttgatattcctgatgttgaagtagtgattaactatagttatcctttgaccactgaggactacgtccacaggataggaaggactggtcgtgctggcaagaaaggtgttgcacatacctttttcactcaagcgaacaaggcacttgctggtgaacttgtgaatgttctgcgggaggctgatcaggttgttcctccagcccttatgaaatttggcacacatgtcaagaaaaaggaatctaagatatacggatctcatttcaaggaacttacagcagatgctcctaaatccacgaagatcacatttggcgattctgatgaggactgatgtgatgacagcttaggccttgttcgtttctatcggattggtaggccggaacgattcctatccggattgcttctctaatttatataaactttgattagctggaacgattccgggtgcaatccgacggaaacgaacaaggccttactgatttttcatccctgctgacggaagcttgatttctccgttggtgatgctatggatgtgatcagatcagccatttgcaagctgattgcagccacggatgagtattgtggcagtgggcaatcccaaaatatagctctcttgttataggttagtttattatgagtagcattcggcttatgtttttctggaccgtccccattatgcattagcttgggctgcttggctgtatgtaataataagcaacattctgcttattatgatttgcattctcttggaggcttagtttggaaacttaaatcgtctccggtatttccagggattgagtgggaaaataagctattttcccactcaatcttcagggaaaccggaggggatttaagttttcaaactagcccagagtgtagttaaattcagtgcgtccttagtacaagcagcccggttatggtaatgataggatagtgaaaggtgtacttctatcctggttagagtaaaaaaagaatatggttttccgtgttatagtaaaaaaaagaggatggttttgcagttggattt

SEQ ID NO: 140140 - DNA, 1479 bp, Zea Mays
ctagatattgcaaaagctactggttgatccatgtcacaatgtttcctattcccattaactacccaccaatgccaatcattgctctgtaccactcagaacttaaggcgttggagaaacacaatgggcgatttgattttagccactggaatatgttacagatacatactgtacatggttctgttctgctgacaccgacatagtacaatccgtgccactgtcctgaatcctgatatgatcttttggagccacctcatcctctccatgtatcatgtctaacatatgagggcaatattattcaatgccttctcttttccttatttgcaggttaaattatagtattcttagataggatattttgttttccatattactctacaaaatctttgcattatctatgtcctatcattgccacctaaaaccgtttttttacacaaaagaagttttaagggctatcttttatccttggagccgtaaggtaatactcatcttaggaagttgtacttgtgttcaatgaaacagcaacagggttttggtttttgtgctgtacaagaaagaagctgcacgagtggaaacaatgcttcagagaaggtagcagatttgttgccatttcttcaatttaatccctgaacaatatttctctccatatttttataatatatgtatgttctaaaggggatggaaggctgtttcagtccatggcgacaaggctcagcatgatagaacaaaagctttatctttatttaaagaagggaaatgcccattaatgattgctacagatgtcgcttcacgtggacttgatattcctgatgttgaagtagtgattaactatagttatcctttgaccactgaggactacgtccacaggataggaaggactggtcgtgctggcaagaaaggtgttgcacatacctttttcactcaagcgaacaaggccttactgatttttcatccctgctgacggaagcttgatttctccgttggtgatgctatggatgtgatcagatcagccatttgcaagctgattgcagccacggatgagtattgtggcagtgggcaatcccaaaatatagctctcttgttataggttagtttattatgagtagcattcggcttatgtttttctggaccgtccccattatgcattagcttgggctgcttggctgtatgtaataataagcaacattctgcttattatgatttgcattctcttggaggcttagtttggaaacttaaatcgtctccggtatttccagggattgagtgggaaaataagctattttcccactcaatcttcagggaaaccggaggggatttaagttttcaaactagcccagagtgtagttaaattcagtgcgtccttagtacaagcagcccggttatggtaatgataggatagtgaaaggtgtacttctatcctggttagagtaaaaaaagaatatggttttccgtgttatagtaaaaaaaagaggatggttttgc

SEQ ID NO: 140141 - DNA, 859 bp, Zea Mays
cgagcaaatatagtttgacatgcttccggttgcaagagtccagctgattaccgaggtccaactagccagaaactggttgtttctgcttcaactaaacaagacaattaatcaacttcgcagctcatgcagtagagcgtgcaaagaattttacaaggactgccaagaacgataggcttacaacttcacatacccttacaaggatgatgaccagactgaaacctgcacccttgccaggattgcttatgagcaaagaataagctccccttttgcagcactcgtcatttcaattctggtttccgtttgcctcagctcattgaaacttacatcagtggcattgcttgttctgcctctttcttcaccaattgcgttgctagcttccgttacgttctcagaggagctaagccactctgcctctttctctgagggaggagagtttctactgtcgccttcatcaacactttccctcactgatttccattctagccttcttaagaaacattcctcaatatcatccagtgatacgtcttcactgtcgttactgtatctaatgtaaggcagatggaaatcggttgatgtgtgcctcctggacacaccaattagctgctcactgtctactcttagtgcagtggccttgtcaatatctcttggtcttccgttagcactgccattatagtttttctcactgccactatcattttcatcatcctgttggtcatggccatcatcctcgtcaagttcaccagatgaagataacgaagatgagaatgaagaataggcccctgcatcatcatcctcgcgttcccgaagtgttttgagaattaaggttttgagcaagttcatcacttgaacagcatgcatc

SEQ ID NO: 140142 - DNA, 1678 bp, Zea Mays
tttccctccaaaagccgcacagcagcaaccgccggcgcgcgcacctcacttccatgatccatcgcagaggagagcagcagccagacgtcgcggcgtgaccgtgactccgtgagagcgcgcccgctgcactgcactgcatctgaatgaggagctgggcgagggcggcgctgggcgtcgcggagctgctcgtcagcgcggccatccacctgggctacgccttctacatcttcggcaccgcggtcgccgccgacgtctcagcctccctcgtgaagggcctgatggccggcggcggcgtggccaaggacgtcgccgtcgatggtgaggacgaggccgcggcggtgctcgacgacggggccgtgccgcccatcgtgctggtgcacggcatcttcggcttcggcaaaggcaggctgggcgggctgtcgtacttcgccggcgcggagaagaaggacgaccgggtgctggtgccggacctgggctcgctcaccagcgtccacgacagggcgcgggagctcttctactacctgaaaggcgggcaggtggactacggcgaggagcacagccgggagtacgggcactcgcggttcggtcggacgtacgcgcgaggccactaccccgcgtgggacgaggagcacccggtgcacctggtgggccactcggccggcgctcaggtgatccggctgctgcagcagatgctccacgaccgggagttcgaggggcacggcgacacctcggagcgctgggtgctgagcgtcacctccctctccggcgcgctgaacggcaccacgcgcgcctacatcgacgggatgcgcgccgagaaagaaggcggcgggcggtggctgcgccccgtctgcctcctccagatctgccgcgtcggcagcgtgctctaccactggctggacctcccctggctgaagcgctactacgacttcggcttcgaccacttcggcatgtcgcggcgcgtcgtgggcgtggcggggctcgcggagatcctgctcgacgccggcagcggcggcgggcggcgggggcccttcgccacgggggactggatcctgccggacctcaccatccagggcgccgcccggatcaacgccagggtgcgcacgttcccggccaccttctacttcagctacgccagccggcgcaccgccaggtcgccgccaggcagcgccggcgccacggtgccgtccggggtgacgaggatccacccgctgctcttcatccgcgtcctgcagatgtgccgctggcgctaccccgccggcgctgacccgccgtaccaggggtacagggacgaggactgggaggacaacgacggcgcgctcaacaccttctccatgacccacccgaggatccccgtcgagcatcccagcgtccaggtggagaaggatgaggattgccgtccgctgcgcccggggatctggtactacaagatcgtggaggcggaccacatgacgttcgtcatcaaccggcggcgaggaggcgtgcagttcgacctcgtctacgacagcatcttcgacaactgccggaaacatgtcttccggactgccccgccgccgacgctaccggtccagagctgattccacaccaacgacgtccgcgagaggccgtacaccattattccagcggtcgttccgactgattgacattatttgtgaatatatcgtttgttattactgtctaa

SEQ ID NO: 140143 - DNA, 1097 bp, Zea Mays
ccaaagaaatcagatcgactggagctgaaccagtttcaaaaagataggatggcaacaaccattacacagttttatttcttatatattccatctgtggtatggatgcaggaacataataaatgatgtccaaaactcaacctgatcagagcactgccgaaaacagctattgcaaaacgttttcatagctgcacctggcagccggcacatacaacagacagaatcgtatagactgacaactccgataaccgttgcatctcatctcatgtgcttattcatcaagtggggggtgggggagggaggcatcccattttcacacgacaacaaattttgtgttgcgcctaaggtacttaacccaatcgactggacttggtgaagtatcctcacgtctagcttgcctttgactcaattaccctctttgcaaaagagggcaaacagaatgatgccgtgtggatctgaaaatatagaaatagaatagaatcaggaaacagcttgagttctaatgcaaaggcggtgaaatcagcaaaaatacacacctccgagttgtagaacttaaggggtccttttgatttcgtagaatgttcatcctcctcgatgttgaaaacagggtgctggaaatcaacagcaggcccttcggtggagcaaagcatgaacccaataactccgctgcaatggaagcatatcaacccagtggataaatagagaaactggcacaatatggtacactggattcgttgtgcatacctagggtatgtaggtactgttgtccaagcatagttaactgagcctttgaaaacttggcggcaattgacgaaaatatcttcaatgatgtgcatatgtagccatatgctctctgcctgggtgcatacaactccacctggacgcaaagctctggccaccgactggaagaaaggcttctcaaaaagctcctgagcaggacctggttatgcaggcagatgttgatcaaacattaacggcagagctaggtaacaaacacacgattaacaacagttacctatcggatcagaagaatccacaattactgcatcatatgtaccctctggagcatttttcaagaaggcaacccctgcatcaacata

SEQ ID NO: 140144 - DNA, 1963 bp, Zea Mays
aaatcaacccattttccctccgcccagatcgctgtgaagttgaccccgcttccctcccagctcagcgacctccttgccgattacgagtgccgtgtgtgccccgctccaccacaaatcgatcggaaacgcacgcccctttctcttcgccttttcgcgtcgtccagatctcagtcgttcttcgctccatgagctaggaatccgaggtgtcctctaggctaagcgaagttggccggcggcggctaggatggggttgatatccgggatgatgatgggggtcattgttggcgtcgccatcatggccggctggagccgcgtcatgcgccgacgcagcacgaagcgcatcgccaaggctgcggatatcaaggtgcttgggtctctcagcagggacgacctcaggaagctgtgcggtgataacttcccggagtggatatccttcccgcagtttgagcaggttaaatggttgaacaagcatctgagcaaactttggccttttgttgtagaagctgcaacagtagtggttaaggaatccgttgaaccactgctagatgattaccggcctccaggaataaaatctttgaagttcagcaaattttctcttggaaatgtgtcaccaaagatagaaggtattcgtattcaaaatcttcaaccaggtcaaatcatcatggatatagatttccgttggggtggtaatccaagcataatcctagctgttgatgctgtagttgcatcactgccaattcagctcaaggatcttcaggtctatactgtcatacgtgttatatttcaactgtctgaagacatcccttgcatttctgctgttgttgtggctctccttgctgatccagagccaaaaattcagtacaccctgaaggccattggaggaagcctaactgcagttcctggactttctgacatgattgatgacactgtcgattcaattgtttctgatatgctcttgtggccacacaggcatgttgttaaacttggtgtcaatgttgatacgagtgacttggagcttaaacctcagggaagactttctgttactgtggtaaaagcaacttctttgagaaataaggagatgatcggtaaatcagacccttatgtgaaactgtatgtgcggccaatgtttaaggtcaaaacaaaagtcatagatgatgacctgaatccggaatggaatgaaacatttgacttgattgtcgaagacaaagaaacccaatctgttatttttgaggtttacgacgaagacaaacttcagcaagacaagagactaggtgtggcaaaactagcagtaaacactcttgaatctgagattacccaagacgccactctgaagctgctacattcactggatccaattaaaaataaggacaccaaggataggggcacattacatcttaaggtaaagtaccacccctttacaaaggaagagcagctggaagccctagagatggaaaaacaagccatagaggagaggaagcgtctgaaggaggctgggataattggtagcacaatggatgctgttggttctggtgttggatttgtgggtactggcattggcgctggcctcggtttcgttggttcaggaattggtgctggcgcaggccttgttacctctggtattggtgctgtcagcagtggccttggtaaagccgggaagttcatgggcaggactgtgacagggcctttcagcatgtcccgcaagaacggcagcagctctactgctccccagcatgatcaaccttcggcgtagtctgatgtacagtgaaagacaattgtcatatttgtgacagggttgccattctactctgtatacgtgctatacctaggactatacgtagcacttcgtttttgtttctgccactgcctggtgcctggttatatgaaatatgttttcgtcgttgtattgaaacgaggatctttcaaagtaaagattgctgtaaattgcatcagctttcccgaacta

SEQ ID NO: 140145 - DNA, 2044 bp, Zea Mays
ccgcttccctcccagctcagcgacctccttgccgattacgagtgccgtgtgtgccccgctccagtaagccaacagctcattcctcctcaccacgctgctcgttactaaccaagcaatcaatttcctcctctttccattctcccagccacaaatcgatcggaaacgcacgcccctttctcttcgccttttcgcgtcgtccagatctcagtcgttcttcgctccatgagctaggaatccgaggtgtcctctaggctaagcgaagttggccggcggcggctaggatggggttgatatccgggatgatgatgggggtcattgttggcgtcgccatcatggccggctggagccgcgtcatgcgccgacgcagcacgaagcgcatcgccaaggctgcggatatcaaggtgcttgggtctctcagcagggacgacctcaggaagctgtgcggtgataacttcccggagtggatatccttcccgcagtttgagcaggttaaatggttgaacaagcatctgagcaaactttggccttttgttgtagaagctgcaacagtagtggttaaggaatccgttgaaccactgctagatgattaccggcctccaggaataaaatctttgaagttcagcaaattttctcttggaaatgtgtcaccaaagatagaaggtattcgtattcaaaatcttcaaccaggtcaaatcatcatggatatagatttccgttggggtggtaatccaagcataatcctagctgttgatgctgtagttgcatcactgccaattcagctcaaggatcttcaggtctatactgtcatacgtgttatatttcaactgtctgaagacatcccttgcatttctgctgttgttgtggctctccttgctgatccagagccaaaaattcagtacaccctgaaggccattggaggaagcctaactgcagttcctggactttctgacatgattgatgacactgtcgattcaattgtttctgatatgctcttgtggccacacaggcatgttgttaaacttggtgtcaatgttgatacgagtgacttggagcttaaacctcagggaagactttctgttactgtggtaaaagcaacttctttgagaaataaggagatgatcggtaaatcagacccttatgtgaaactgtatgtgcggccaatgtttaaggtcaaaacaaaagtcatagatgatgacctgaatccggaatggaatgaaacatttgacttgattgtcgaagacaaagaaacccaatctgttatttttgaggtttacgacgaagacaaacttcagcaagacaagagactaggtgtggcaaaactagcagtaaacactcttgaatctgagattacccaagacgccactctgaagctgctacattcactggatccaattaaaaataaggacaccaaggataggggcacattacatcttaaggtaaagtaccacccctttacaaaggaagagcagctggaagccctagagatggaaaaacaagccatagaggagaggaagcgtctgaaggaggctgggataattggtagcacaatggatgctgttggttctggtgttggatttgtgggtactggcattggcgctggcctcggtttcgttggttcaggaattggtgctggcgcaggccttgttacctctggtattggtgctgtcagcagtggccttggtaaagccgggaagttcatgggcaggactgtgacagggcctttcagcatgtcccgcaagaacggcagcagctctactgctccccagcatgatcaaccttcggcgtagtctgatgtacagtgaaagacaattgtcatatttgtgacagggttgccattctactctgtatacgtgctatacctaggactatacgtagcacttcgtttttgtttctgccactgcctggtgcctggttatatgaaatatgttttcgtcgttgtattgaaacgaggatctttcaaagtaaagattgctgtaaattgcatcagctttcccgaactatatgaaatttgtgcagtctgttgaagtaaaaaaagaaaagaaaa

SEQ ID NO: 140146 - DNA, 1190 bp, Zea Mays
aggagccgactcgactggacgagatgcgagggagcaccgaagccgctgtcgcgggagccgttgcccttgacgtcgtcgctgccgaagtgcttcaaagttcaaaccggtgccactgccgcagccgtccttgtggccgctgccgccgccgccgccgccgccacacttcgccgccggcaagatgggccgcgtgattcgcgctcagcgcaagggtgcggggtccgtgttcaagtcccatacccatcaccgcaagggccctgcccggttccggtccctcgacttcggcgagcgcaacgggtacctgaagggcgtggtcaccgacgtcatccacgacccgggccgcggcgcgccgctggccaaggtcaccttccgccatccattccggtacaagcaccagaaggagctgttcgtggctgctgagggcatgtacactggccagttcgtttactgcggacgccgtgctacactctccattggcaacgtcctgccgctcagggggatccctgagggtgccgttgtctgcaacgttgagcaccacgtcggggatcgcggtgtcttcgccagggcgtctggggactacgcgatcgttatcagccataacccagacaacggcacatcgaggatcaagctcccctctggtgctaagaagattgtcccaagtagctgccgtgccatgattgggcaggtcgctggtggtggcaggactgagaagccaatgctgaaggctggcaatgcctaccacaagtaccgcgtcaagaggaacagctggcctaaggtgcgtggtgtggccatgaaccctgttgagcatcctcatggaggaggtaaccaccagcacattggtcatgcctccactgtccgccgtgatgctcctcctggccagaaggttggtcttattgccgcaaggagaactggtcgtcttaggggccaagctgctgctactgctgccaaggctgacaaggcctaaatttgcgttacgcagcattagccatcttatatagattaaaaatatttttcctgcatggatcttaattttgtatcattctgatagcgatgaactgatgatactatggacattccagtttttgttgcaagctattgatgatattttttcttctttaatcaaagttgtactatatgttgtgctgtttttgtctagctgctacaaaacttaggtactccttcctgcacttttt

SEQ ID NO: 140147 - DNA, 1204 bp, Zea Mays
ttagtccattacccaccgaaggccccgcccaaccaccttcgtatccgacggcccaccccgctcgtctatatccgcctccaaaccctagctcttccattcttccccctccggcgccgcctcccccagacacttcgccgccggcaagatgggccgcgtgattcgcgctcagcgcaagggtgcggggtccgtgttcaagtcccatacccatcaccgcaagggccctgcccggttccggtccctcgacttcggcgagcgcaacgggtacctgaagggcgtggtcaccgacgtcatccacgacccgggccgcggcgcgccgctggccaaggtcaccttccgccatccattccggtacaagcaccagaaggagctgttcgtggctgctgagggcatgtacactggccagttcgtttactgcggacgccgtgctacactctccattggcaacgtcctgccgctcagggggatccctgagggtgccgttgtctgcaacgttgagcaccacgtcggggatcgcggtgtcttcgccagggcgtctggggactacgcgatcgttatcagccataacccagacaacggcacatcgaggatcaagctcccctctggtgctaagaagattgtcccaagtagctgccgtgccatgattgggcaggtcgctggtggtggcaggactgagaagccaatgctgaaggctggcaatgcctaccacaagtaccgcgtcaagaggaacagctggcctaaggtgcgtggtgtggccatgaaccctgttgagcatcctcatggaggaggtaaccaccagcacattggtcatgcctccactgtccgccgtgatgctcctcctggccagaaggttggtcttattgccgcaaggagaactggtcgtcttaggggccaagctgctgctactgctgccaaggctgacaaggcctaaatttgcgttacgcagcattagccatcttatatagattaaaaatatttttcctgcatggatcttaattttgtatcattctgatagcgatgaactgatgatactatggacattccagtttttgttgcaagctattgatgatattttttcttctttaatcaaagttgtactatatgttgtgctgtttttgtctagctgctacaaaacttaggtactccttcctgcactttttattgacaatacgcagcattagccatcttatgttgtgcatttttttcc

SEQ ID NO: 140148 - DNA, 735 bp, Zea Mays
atgggccgcgtgattcgcgctcagcgcaagggtgcggggtccgtgttcaagtcccatacccatcaccgcaagggccctgcccggttccggtccctcgacttcggcgagcgcaacgggtacctgaagggcgtggtcaccttccgccatccattccggtacaagcaccagaaggagctgttcgtggctgctgagggcatgtacactggccagttcgtttactgcggacgccgtgctacactctccattggcaacgtcctgccgctcagggggatccctgagggtgccgttgtctgcaacgttgagcaccacgtcggggatcgcggtgtcttcgccagggcgtctggggactacgcgatcgttatcagccataacccagacaacggcacatcgaggatcaagctcccctctggtgctaagaagattgtcccaagtagctgccgtgccatgattgggcaggtcgctggtggtggcaggactgagaagccaatgctgaaggctggcaatgcctaccacaagtaccgcgtcaagaggaacagctggcctaaggtgcgtggtgtggccatgaaccctgttgagcatcctcatggaggaggtaaccaccagcacattggtcatgcctccactgtccgccgtgatgctcctcctggccagaaggttggtcttattgccgcaaggagaactggtcgtcttaggggccaagctgctgctactgctgccaaggctgacaaggcctaa

SEQ ID NO: 140149 - DNA, 519 bp, Zea Mays
atgacggaaatagatatgcaggaagtaagagcaaagaacaaatcaggttctcatttaaacaagcttgggtacaacaatgtaatgctcaagttcaaagagaggacagggaaaacttacaacaagctacagttcaaaaataaatgggacaagctgaaaaaagattatagtaattggaaacaattgggaaaagatacaggatgtggttgggaccctaacaagaagttgtatgttgctccagattggtggtggaagaaggcaaacataataaagacaacaacatcttgtgagtttatggtcctggcaagaacacaagagacacctgactcttccataaaagatgttatgcaattggtgaaggcatgtggtgctatagctggcagcaaagatcacttcattgcaactcaagtctttaccaaaaatagtgaaagagaaatgttcttgacttcggatacacccgaggagcgctttcagtggttatcaatgaagtatgaatggatgacaatgaacaagaagggctag

SEQ ID NO: 140150 - DNA, 789 bp, Zea Mays
atgccttccatcctggcgataaaaaaagtcaaccagctgcagccaccatttcttgcgccaatggggcatccctcctccattcacagcttctacctgtacagcgagtacatggccacagccgccgccgccgcgacgtcgtcttcgtcgtcgtcgtcctcggactcgcttccgttcagcatggtttgcggcgacgaggcgcccgcggccgtgtcctggcgcgccgcggacgccgaggtctcggtggcggcggtccccggcgcggggctgcgtcaggcgcctagcaagggcgcgttcatcggggtgcggaggcggccgtgggggaggttcgcggcggagatccgcgactccacgcggaacggcgcgcgggtgtggctcggcaccttcgacagcgccgaggccgccgcgatggcctacgaccaggcggcgctgtccgcccggggctccgcggccgcgctcaacttccccgtggagcgcgtgcaggagtcgctccgagcgctggcgctgggcggcaacgcggccggtgcctctgcctccgcggggggctcgcccgtgctggcgctcaagtcgcggcactcgaagaggaagcggcgcaagaagtccgagcttctggcggcggcggcagcaaaaggcgcggcggcagcagcaaaagccacggcggcgggcggcaggagccagatcaagaacgccgcggcggcggccgagcagcagcgcttcgtcgtggagctggaggacctcggcgccgagtacttggaggagctcctcagaatctcggagagctatagcagctaa

SEQ ID NO: 140151 - DNA, 2283 bp, Zea Mays
cgacacgccgcgcgctcggcgcaaagattggcctggagggcaggcaggtgcagtactggttccagaaccaacgctcccagacgcaggcgaaggccctggcgcagaacaacagggtggtccagcaggagaacgccgcgctgatggccgagaacgcgtcgctccggcacgccatactgaccgggtcctgcctcgcatgcggcggcgcgacgacggcggcggcgcccgccgagctgccgccggagagcaggcgcctggtggcggagaacgcgcggctcaggggcgagtacgcgcgcgccaccgcgctgctcaaccagatcctgctctcggcgccggcgcccccaggcccagcagcagcggcagtcgtcgtctcctccagctccgtcgcccgccccgtggccgaccgcgccgctcggctccgcggccacgcggaggccgccatggaccagttcctgctgctcgccaccaagggggagccgctgtggctgcccaccacccccgacggggaggcgctcaactaccagctggggtacaagcacaagaaagcactcccggtgcaccacgggctctgcccggacgagttcgtcatggaggcctccagggccactggcgtcgtcagagcctctgccacctacctcgtcgccacgcttacagacgcgaggcgctggtccgagatgttccccagcgtcgtggcgagtgtgaccgccaggagggacgcagccatctccggcggcgttttcggctcgcatattcagctgatgaacgcggagctgcaggtgcattcgccgcgtctgctcaaccgcagcatcaacttcttgaggtacaccaagcgggtggcggaggggcggtgggcggtgatggacgtgtccgtggacggcatccttggaccgccaggcagccgcgtcgctgacgccgccgccgccgctgccgctgcaaacggcgtcactcttgtgccggcatggtacacgggctgcaggctgctgccgtccggctgcctcgttgaggacatgcgcaatggctactgcaaggtcacatgggttgtccacgcggagtacgacgagaccaccgtgccaacgatgttcaggccactgttccgctctgggaaggctctcggcgcgcaccgttggctcgcgtcgctgcagaggcagtgcgagttcctcgctgtcctgcactccagccaggtctccagaggcggcgacaacacagcagccgccatttcgtcgatggggaagagaggggtcctggagctggcccagcgcatggtggcggatttctactcggctgtgtctggtcccgtcacccagccgtcgagcagcatcgacgagtggtacggcagcgccggcgccggcgccaggaggaccgacaccgccgtgcgcatggtgacctcgaagaaagccggcaccgtggccgaccttgtgctgagcgccagcaccacggtttggctgccgaacactccgccgcagctcgtgttccgttacctccgcgacgaccagcgccgtggcgagtgggacgccttcttcgccagtagcgcagcggtgacggagctctgctctgtgcccacgggccatctcaatggcaacgctgtctccgtcctctactccaatgttaccgatggaaccgaccgcaagaagacgctgatcctgcaggaggcgtgcacggacgcgtcctgctccatggtggtctacgctccggtcgaagaggattccatgcgcgcggtcatgaacggtggcgaccacgcctccgtcttcctgttgccgtcggggttcgccgtccttccggacggccacggcagggctcgccacgccccgagctcctcctccagcacacccgtcggctgcgacgacaccactgctgggtccctgctcaccgtggcatgtcaggcgctggtgcccggctcatccccgtctgacaaccgcgctgccccaggggccttcgacgacgttggcaagctgctctgtcgtgcactggagaagatcaaggctgccgtcaagaccgacatcgtcaccccagcttgatgcagaagggcgaggcagaagagtcgggcacaatgtcgaacaataatgcttctaccatttgatatttgtcgacaaaataatgacgtttagactcagttatcagcggggcagtaccccatcgtcgttctcgttttcaccgtttttccccccgcgtttgtcatggatttatgtcggtttaataatgtttatatgttaggatggtttgtcatgatgttttcttgtagtgattgggttgttagtacttgttgcttaaaaatttcagtttttcttt

SEQ ID NO: 140152 - DNA, 221 bp, Zea Mays
atgttacgtttgcagatatggacctcagtggttttctccacattaggaaagctggaagagccttttgaactcagttttttgctaacagtggtgttatggtgaaactgagttttgtgtgtatgtaccaacagctaaaatgtaaacacgacattatcatagctgagtacaggaataattatctcttatatcttattgtaaaatctgaaacagttctcctgtag

SEQ ID NO: 140153 - DNA, 980 bp, Zea Mays
acggcatcaggcctagcgtgtccctgagtcttccatgttagaaagaaagaggagctccttccggcacctgagacctagaaccctcttccccctcgatggccgtagggagcggcggcggctcgcggcgcgcgcgtccgaacgtgctagtgacggggacgccggggacggggaagacgacaacgtgctcgctccttgccgacgccgcaggcctccgccacgtcaacatcggcgacctcgtccgcgagaagagcctccacgacggctgggacgccgacctcgagtgccatgtcatcaacgaggacctggtgtgcgacgagcttgaggacatgatggaagaaggtggcatactagtagattaccacggatgtgatttctttccagaacgttggtttgacctcgtagttgtgctccagactgacaactcaattctgcatgatcgcctgacgggtagaggttacatgggttccaaactcgccaacaacatagagtgcgaaatcttccaagtgctcctcgaggaggcgagggagagctacagagaggacatcgtgatgccattgcgaagtgacaacgtggaggatattagtaggaacgtaggtgcactgacagactgggtaaacaattggagacctagttagacctgtcaaaagaaatgttgccttatgtgttgtatttggatatgtattgggtggaccagctgccatgtttgtaatgtacggggtgttttggttaaagaaacgaagtcgttcatcctcgtcttattcttttcttctaatggagtcaattacttaaatcattaccacaacattacttaagttaatatgtgctacatgcacaaggaatgcgatgatgctataaaaattcatgaggcagtgtggtctgcggaaattttgtttttaaattttttttatgatcggtcgggaaaccgatcgaaattcaacggatttttcaaccagaatgcattttcaaattaaaaaaacaaa

SEQ ID NO: 140154 - DNA, 1063 bp, Zea Mays
acggcatcaggcctagcgtgtccctgagtcttccatgttagaaagaaagaggagctccttccggcacctgagacctagaaccctcttccccctcgatggccgtagggagcggcggcggctcgcggcgcgcgcgtccgaacgtgctagtgacggggacgccggggacggggaagacgacaacgtgctcgctccttgccgacgccgcaggcctccgccacgtcaacatcggcgacctcgtccgcgagaagagcctccacgacggctgggacgccgacctcgagtgccatgtcatcaacgaggacctggtgtgcgacgagcttgaggacatgatggaagaaggtggcatactagtagattaccacggatgtgatttctttccagaacgttggtttgacctcgtagttgtgctccagactgacaactcaattctgcatgatcgcctgacggaggttacatgggttccaaactcgccaacaacatagagtgcgaaatcttccaagtgctcctcgaggaggcgagggagagctacagagaggacatcgtgatgccattgcgaagtgacaacgtggaggatattagtaggaacgtaggtgcactgacagactgggtaaacaattggagacctagttagacctgtcaaaagaaatgttgccttatgtgttgtatttggatatgtattgggtggaccagctgccatgtttgtaatgtacggggtgttttggttaaagaaacgaagtcgttcatcctcgtcttattcttttcttctaatggagtcaattacttaaatcattaccacaacattacttaagttaatatgtgctacatgcacaaggaatgcgatgatgctataaaaattcatgaggcagtgtggtctgcggaaattttgtttttaaattttttttatgatcggtcgggaaaccgatcgaaattcaacggatttttcaaccagaatgcattttcaaattaaaaaaacaaatttatattttttggtcgaaaatgtattatcgtcgaaattcattgtttttactaaaaaactatgattaagtttggaaaaaaaatcaaa

SEQ ID NO: 140155 - DNA, 1299 bp, Zea Mays
cagggaaagagctcccattagggttccccatcacctgctcatagcagcgcatcctctgctcatcgcgacagccgtcatcctagctagcaacgctccgtgtggcggcgctcacagcgcctgacggcattgacccttgctcctagcgtaggtggcaatcgcatcgcccttccgtgggctcgcagtagtggcattatctagcatcggttctctgcagcgccccaagccgacggtctcctagctgtgacgaccatccccatcagcgacaaccctctcgatgctctgtatgttttggaggcaatgcaagtggtattttggagcatgtttttttgataatatgttttttattaaaaacaatcagagtacaagcaggggaaaacttgagttggtgtgcacctacttgcgaaattgagtttgttgtattatgactactaaggtagttgctgctgcctgattgtttgtatccagattcacaatccaccctcattagttgttgctgccagcttgtttgttatccagattcatagctataatgacacattattttgggggtagatggtgtatcttagttgtatgattttttgacatcagtgtatatagttcacgtttttactttagtgtttataattttgcaaaacttgacacttgaatagagcagggggtataaagtctttgatctgcagaaatacaaggacccaaaggtacttgacacttgaacagagcatctcttccaatagactattctaaatttctaatgcaccaatattttttgttgtgctctactacagtatggctaagaaggttgtttgggataatgcaattttgaagcacctaattgacatttgtaaggaggggattttagctggttgggataatgaccttttttgttgtgctttactaaagtgtgacttcttagctcaaaggatgttctgagtttattctatgtttttgtgttggaccaaattatattatctatgacttacatgttctggttttttgtttagatgcacgataatatggaagacttagcaaaaaagcgtcatgaatctcttcacttactgaattatcacagcatgctgcaattcttggaaatttaggcactctttacaataaacggtatttccacaaaggtgaatatagagaaacagaagctctagagtctggttatcaatgggtcatgagatgtttggatcgttcaagatatttttataagatgtttagaatgagccatgatatttttatggcacttcatgaaatcgactcataatgttacatcaattgagtcactgcaatgtttctatc

SEQ ID NO: 140156 - DNA, 1202 bp, Zea Mays
gaatcatcacagccacatatattcaaacaccaatacacaccacatcgaccaaaacgtatttagacaaactacaaatcgcacacatcaaacaacttcttgttctccaaccgcaatcgcgatcctaccaatgcgcataactgaaatgttttacacacatccattcaaaataattaatcgagtcgatcgagagcgatatgcatcggctcaccataaacaaacccaatcggtgtttgtaaggacgatggcgattccgatttgtgcatcactccgaacatccgacgagcgttgacgacttgccttcttctccacgcaaaacatggggttcctcgcctccacaaaataaaataaaacaaaacagcacatatacacaatttaatcaccggagaacaatgccgatgtggaatcaaacaaagatcatcgtcgtctcaccggggtgaacggcgtcgatgttggggctgcgcagatccggcgaagtgagacgcgtagacggtcgaactgcgcagatcaacgacacgacatgggctgtctcaaacaccatcgcgacggcgcgggttgggactgcgcaggtcgaacgaagcacgcgatgcggaggggatcggggctgctgttttgtggaggaaaagaggaggttggtgttgctgcacaaggggaaaaaagagggggggcgagcagagctgctgctcggccatgggagagagggggcgctgggggaggggtggagcagcggcgctgcgcaggaaggggcgccgagcatagggaacttcaggcgcccaagctgttggccgagcagaggtccggccatggctgcctctacccctgcgcaagggagaccagggatggacgccatgtgcaggagctcggctgcagggggacgcgcccatggggaagaggaggagctgcagctcgcctacacccttggagccgaggagaggaagggcgccatggggggctctgtgtcctgctgcaagcgccatgggagaggcttgctgccgtggaggttgtcggctggagcagaggggcgagaggaactcgtctgcgccaaggaagggagcagggagcgccagggttgggtgctcggctgctcaagcctcgtcggtgccatgggaggaagggaaggaagctccctgcgcgttggggaagaaggcgtgggggagaaaaggctgatggcggctggaaaaacaataggggtgggaatgcaaaat

SEQ ID NO: 140157 - DNA, 767 bp, Zea Mays
gaactagtgtttcatgtaaatactcatgttcaaaattttgaatctggatattgaagagcaatcacacaaacactcgatttcacacatcgaggagccaaacactaaataattcagaaggatccctggctggtgctgctgtctgggatgtactccgcaggcaggaccttccaaagcttaatgaatatctagctgttcatcgggaagaatgtgcagctagatgtcaagcagtgtcttctgttaaatatcctatttatgatcaaacagtgtaccttaacgattatcataagaagatgttgaaggatcaatatgagggactgaagacaatcgagcagattacaatggactcagctacggtcgagaccaatatgttcaagctctgcaaggtgaggtctattcagttttgccaaaaaggcatcccctacctgaacacctacgacggccgcaccatccgctaccccgacccgctcatcaaggccaacgacaccatcaagatcgatctagagaccaacaagatcatggacttcatcaagtttgacatcggcaacgtggtcatggtgactggcgggaggaacaccgggcgtgtaggagtcatcaagaactaggagaagcacaagggcagctttgagaccacgtgctgcttggaggtttttgctatgtctagttttctcctatttgttgtacaggaaaacatagaatagaagtcaaatttggtggtcgcaaaagtgtggagactttaattcatataaaattaggcttaacattagtgc

SEQ ID NO: 140158 - DNA, 112 bp, Zea Mays
cttatacaaattttgggctttacacttcctcttccgaaggtcctcaaaaacataattaactatttgttttcagcataagctattacagggaacttcgtcttcaggatggaag

SEQ ID NO: 140159 - DNA, 1232 bp, Zea Mays
gaacaaataaaaatatataattaatttagtgcacacggagtggggaaacgaaaaggaaagctctctcattgccaaattgcccccgactcaagccccccgcgccgccggcgttggtggaatcgatcgacccggcctcgccggacaatccaccagcgttggtttcacctcaggtttttgtgcatggaagatgacaatgaggtcactggagagtcacctgtggctgatgaatgggatatgttgtccctgacttcatcaatatatgctagcccattattccgaagaggatttgatccaattaatttgcctggatatgggaatgtgattaatattcaggaaggcacacaaactggattagtcatgtcagatggcttcgtgttccctccaagtgagcatgaaaatttgccaatagaaccagagcatgaggatttgccaatagaaccagggcatgatgaatcaaatacaaacagcgttgaaaaggaaagtagttgtgctggaaataacgatgatgactggtgtcatgtttcacctgaagaaatcgatgacgtaagtaatgaaaatctagctgacaacagtgacttgcctactgccagtgaagctacggtaccagattcccagcctacagaaataaatgctaagcgagagaaagatcataggacatgcaaggctgatcatacttgtgaaagatggtggaaaaagaaaaccacgtatctatttcatcatataaaaggagtgactacactctgctcagttgtggcagctggtgctgttgttggttttgttgtaatgggtcagaggtggcagcaggaccattggcaccttcatcaatttaagttcagtgtcagcggtgagagcatgaatcgagtcattggagcattcagtcgtttgaaggatgggcttcctgggagtgagcaactaagatctatgctgccgactcgcgtactcccacaacagccgctgagcgcttgagtacatgcaccaaattttggtgggctgcttctagtgtcaatttttgttgcttatatgatcttgagaaagttcattctttttcttgtgctacttgattttatgttactgtaaattagtggtcgagacttctcacggtgctgttctttaaaacatagcaaccgtgaagggacatggtggaaacacagagggcactataacaatatgtatccatatcacctgttttactttctatctcaatgacatgtgcttgtagtttggcttgttcg

SEQ ID NO: 140160 - DNA, 453 bp, Zea Mays
atggcggtggacccctgcgatcgtgtgggcgctctgttgccgtcggcaccgctgcgccaggcgggtgttctgggcgtgtcacgggaagcctccgcgcatgtacatgccctcagctcggggcccctcacctcctctgccatggcgctcgacgctcaccaggcccttctccacatccgcctctgccgtgcgctgactgcggggatgtggtcgccatgggcacccgcacctccgtctctgcctgcttgcagtggggccccacactgccgtgcactctcactgacgcagctcgtgtgcgacggctcctcactctcggtcgcgctgccgtggctccctgttgccacgctgggcgaggccaaacctaacgacatcctcgccatcgacccccggtgtagtagcgccgtcgtgatggaggtcaccaggaccggcgggaatttcttgccaatttaccagtag

SEQ ID NO: 140161 - DNA, 1855 bp, Zea Mays
gaaggcctagtgctccaaacaaagaacttccctttattcctccttggcaaggccatgccaccgtcgagcccaggaggcggaagtcaacgtaaccaagcgaacccatccatggcctccgctgctgccgtcgtctccctcaacgtcggcggcgagatcttccagaccaccaccgccacactttcccgcgccggcgcctcctccccgcttgcctccctcggtccctcctccccgtctgctccgcacttcctcgacggcgacccgcgcctctttgcccaactcctatccttcctccgccatggccgcctccttgctccgtcctatccctcagccacgctcctcgctgaggcgcgccacttcgcgctcgatggcgccctcctcgcttctctctccccggcctccgcctttgccccgctctcgctgcgcccttccgcgctcctcccgctcaccggccgcgtcgcgccctccgccgtagcgctgtgcccctcgccgcctcacccggtctccctcgtcgccgcacacggtggggtcgtcacctgcttcgacgccgcgctcgcctcccgcaccagcgtcctcacgccgctgcccgccgttgactcgctcgccgcggtgtcccccgtcctcgccctcgccggcgcccgcgacttccacggggtccacctctgccggttctccgacgacgcctccgccggctgtactgatccgaatgtgctttcgtggccgggatcgccctccgccaccgtgctgtccatggccactacgaccgcgtcagaagcaccgtcgccaccctggctcttctccagcttcgagtcagcgcggcggaactcgagtgccgtggtggtgttcgacctcaattccttgtctcctgtggtggaaatcgggcggaaggaggtgttcggcgcggacatcgaggctgcgatcccagcgagcaagctcgcgtggcttggtgggcacagcctccttctcgccgctggctctcactctggcccggccggggtagtgggggacatacgtctctgggatgtccgggcgagcgccacggtgccagtgtgggaggtcagggagaaggaggattgctttgctgatgttgcggcgtctgacgcactgtcagcggtgttcaaggtgggtgcagcatccagtgaggtgttcatggctgacctgaggaggcttggtaacggtggtggcgttggattggagccatgggtgtgcattggcgatggacagaaggcggctgcagccgcatcatctggaaggaaagagaggaatggttgtagaattgagtgctactgcagttgggtgtttgtggcacggggcgcggacgtcgaggtgtggagtcaggtgggattggcaccagaagccggtggaaagaaggtgatgaggaggaattgggttggcagtgaactatccacaaagcccaagattgtgagctgggcatttggtggcagcaggatggcattggccagagctgatcagctgtctgtggagatatgggatagtgctacagcagcaattggcgcaaacccctgagtagagggaggatatcgcaaaagcaagccgacgcttgtcaatgttcaattgctgcttgttcctctatgcaatgtaaatttactttagcgtgttgtttgtgttgtatcccagatagttagaatcttgaatgcaatgcctggaaggtatggaatgattttactggggttgaatatattctgtgttttctgatcatgcaatctactgaattttgttatcaccctaggaaaaagagtaatacagtatctttttaagcaattgtggaaaaagttctttgccagggtaaactttgtttaactgagttattctttttgggtattgaaaatctaacttc

SEQ ID NO: 140162 - DNA, 219 bp, Zea Mays
atgacatttatgataaataatgtagttctttttgcatctaggatagattgtttagacagattaaatacattaaataaaaacataaccttaacatatatttacaaagatagcatgaatggattaaccaataaagctctacacgtagaactgatattgcttccatcagtagtggcttctgtgcgtgtaccgcagccgctgccgcctgcttggcaccactga

SEQ ID NO: 140163 - DNA, 519 bp, Zea Mays
cacatctaaacaaccaaacttttttagggctaccactgacatatagaaaatatggtgaaaaaaagttctgatgcttcaagagaggataatgttacaattggagattataactgaaagttcacagtatactcaaaatgaaatatttgcaatgtcgaaattcagttatatgattatgctcacctgagacatcattggaccaacattatcatagcaaggggatacatcattgctggggttggccaatgtgggtaaacaacagctctagaagaccccattattagatcaggctgtcaaaagtacacattatgctggtttgtggacatgccaggagacacataaccaatgccatactgcataaactgaggcacaacaaagttgaaaacaaatgggctcaagttgaagtcaggcactgagctcctaacatacttgcaagaaaataagtgttacaccttaccatctcattattaacactaatgttggaaaattaacagggcctaaggttaatttgacaatgcagca

SEQ ID NO: 140164 - DNA, 1617 bp, Zea Mays
aacaaacacgaaacgcaggtccgaatccaaatctagcggcacgcttaacgtcgcgatcccgcggactccacccacgcccgcggcggcagcgcggatcccgcctagggctcgcgtgtcggtcgctccggcgctaactagtaactaccccctcgcggcgacgggaggtcggtagcggcgatcgcgctagcggagccgcttcttcgccctcgacgccgccggcctcgatcaggccccgccgacggaatggcatccaaagtccgctttacagtgggttctcaagtttgggttgaggatgctgaggtggcttggattgatgggttggtggaggaggtacaaggagatgaattaattataaactgcacttctgggaagaaggttactgcaaatgtctcaagtgtgtatcctaaggatgcagaagcgaagcgctgtggcgttgaggatatgacgaggctagcttatcttaatgaaccaggagttttacagaacttaaagtctagatatggaatgaatgaaatatatacttatactggcaacattttaatagctgttaatccatttcaaagacttccccacctttataacaatcacatgatgggaatctataaaggcgcagaatttggcgagctgagcccccatcctttcgctattgcagatcatgcatataggcttatgatgaattgtggaaaaagtcaagccatattagtgagtggcgaaagtggagctggtaagacagaaagcactaaaagccttatgcagtatcttgcatttatgggtggtaaagctcaatctgggggaaggtcagtgcaacaacaagtactggagtcaaatcctgttcttgaggcatttggaaatgcaaaaacagtcaggaataataattcaagtcgttttggaaaatttgttgagattcagtttgacaagaatgggaagatctcaggagctgccataaggacttacctcttagaaaggtctcgtgtctgccaaatatctgatccagaaaggaactatcactgcttttacatgctatgtaatgcaccagctgaggaccgtgagagatataaactgggagatgccgcatcatttcactatcttaaccagtctagttgtattaagcttgatgcgatggatgatgcttcagaatatatcataactaggagggcaatggacattgtgggcatcagttctgatgaacaggatgcaatatttagagttgttgctgctattcttcatttgggcaatgtggaattttcagaagggagtgaagcagattcttctgtacccaaagatgacaagtcccagttccatcttaggacagctgcggagcttttcatgtgtgatgagaaggctcttgaggaatctttgtgtaagcgtgttatggtaacacgtggtgaaagtattgttaaaaatttagatgcacgagcagcagctctcagtagagatgcactagccagaattgtttactctcgtttgtttgattggcttgtaactaagataaatacttcaataggacaagatctaagctcgaagcttttgattggtgtactggatatatatggttttgagagtttcaagacaaacaggtgcttaactgatccaagagggtcagtgaaaatcccgtga

SEQ ID NO: 140165 - DNA, 345 bp, Zea Mays
atggaacaagaagaatatacaaaggaagaaattgattggagttatatccagtttgtagacaaccaagagattcttgatcttattgagaagaaacctgggggtataattgctctactggatgaaacttgcatgctgcgaaattcaacccatgaaatatttgctgaaaagctgtatcaaaaatttaaggggaacttgcacttcagtaggccaaagttctcacggtctgatttcactattcatcactacgctggaaatgattgcagatcctaccgggggtgctacgaaggttgtatggatgagaggtgggaggacgggaacgactacgacacagagatccgtggctga

SEQ ID NO: 140166 - DNA, 567 bp, Zea Mays
atggcgggagtattagaggcaataagaataagctgccttggatatccaacaaggaggagatttgatgaatttgttgaccgttttggtgttttactacctgaagttcttggtgaaagttatgatgaagttactgctacaaacatgcttcttgacaaagtcaatctcacaggatatcagatagggaaaactaaagtgtttctgcgtgctggtcaaatggctgaattagatgctatgagaactgaggtcttgggatgttctgctagtaaaatccagagaaaagtacggtcatacttagctcgaaaaaaattcattcagttgcgaatatctgctactcatctccaggctatttgcagagggcaaattgcaaggcattattacgatgatctccgcagggaggctgcttcattgaccatacaaacctgctaccgtatgtactttgcaaggaagaactacataaatctctgtactgcatcaactactatccaatctggtctacgtggtatggctgctcgcaagaaactccagttccgtcaacatacaaaagctgcggtgaccattcaggtatga

SEQ ID NO: 140167 - DNA, 2096 bp, Zea Mays
atggctttaatgggttctcttgagaccaaaattgatgaaacagaacagaagtttgaagaaatgaagagagcaagggaagagtggctgaagaaagctacagatgcagagtcaaagataaatgaactgaccaacacagtgctaagttttcaagaaaaggtaactaatatggaagcagaaaatcaactacttcggcagcaggcactgttgcgtactcctgttagaacaatacctgaaaacacatctccaaaatctaatttgactaatggcagtccgcgcattgatgaacaaaagacacctcatggaactcctgctcccaaagattatgggagctttggacagcctagagcatccttttttgagaggcagcatgagagtgttgatgcacttataaactgtgttagtgaaaatattggctttagtgaaggaaagccggttgctgcaataaccatatataagtgtcttgttcattggaagatctttgaaacagagaaaacaagtgtttttgatcggcttattcaaatttttggttctgcgatgcagaaacacgatagcaatgaggatcttgcatactggctgtcaaattcatcaactttattgatcatgcttcaaaagagcctaaaagctgctggctcaacaggaatcagtccacagaaaaggccacagactcaatcatcatttcttgggaggatggtattccgctcttcaaacatcacggttgatatggaccttgtgcgccaaatcgaggcgaagtatcctgcttttctttttaagcagcaacttacagcatttgtggaaggcttatatggtatgatacgagacaatgtgaagaaagatctgtcttcattgttggcatatgctattcaggtcccaagaactgtgaaagctagtatggtgagaggccgttcttttgggtcatcaagtttgccaaggggacgttcattttcgactcaaggtagttattggcaagcaatagtcgacaatttgagtgaactcctgaaaattttgcaagacaactgtgtcccatctatttttatccagaagatatttacccaggttttctcatttatcaatgcacaacttttcaatagccttcttgtacgtcatgagtgctgctctttcagtaatggagaatatgtgaaacaagggttggcacaactagaggtgtggtgtggagaagtgaagccagagtatgcaggatctgcgttggatgaactcaagcatatcaggcaagctgtcggtttcttggtcatattcaaaaagttcaggatttcatatgatgagattgtcaatgatctctgcccagtactaagtgtgcagcagctttacaaaatatgcactcagtactgggatgataaatataacacagagagtgtgtcagaagaggtccttgaggagatgcgaacattgatgaccaaggaatcaagcgatgaaactctggggaacacctttctactggatgatgaaattagcttgcccatatcacttgaggagatagcagattctatggatgccaaagaatttcagaatattgccccaccacaagagcttactgcaattcctgcctttcaattcttgaagagctaagccctggaaggcctaggcctacgttgctgcacgggcatacgcaaatacatctagattcttccatcagatgttatagggtttcgattctccttgtgctgtgtaattatgttgtccttgtagattggttttgttgtgttaagtttcagttggctcggttggcattagataagttgttagttgaggttgggataggttttttttttgttctgcctcctgatatgcgtttgtgcagtacacttagactaaaatcttcatgtttttgttatatatgacggtggaagctagggatccgttggaaatcattcttttatccagatttgattgggtttggttatgcagagaaatgtcaataacttgtaatggctggggcagctagatcgtgagttgttgcctccatgggggcagttgtagacttgtagtggcgtgagtttgtggcagtcactgccctgggctgtttatatttgcccactttacattttatctctcttatgcagctctaatgcgtattcaag

SEQ ID NO: 140168 - DNA, 240 bp, Zea Mays
ctgctccaccccagagcagctctactctaaaactctgggtggagcagctctgctccagagtttagattgtttctcataaccagtggcaatggcgggtaaataactcaaaactccatgactaggttgcttttttggagttttcagagcagcaaaagaggtactccaaaaaattgtactgcagctccaaaaactccatagagtttacaactctagagttagggtgtttggcatgctctggcc

SEQ ID NO: 140169 - DNA, 328 bp, Zea Mays
cttccgcccgggacatctttctatggtactggagaagcgagtggcacacttgaacggactgggaaacgagttttcacatggaacacagatgcatggggttacgggccaggaaccacttcattgtatcagtcacacccttgggttttggctatcctccctgatggaaaagcattgggtgtccttgctgataccactcgacgttgtgaaattgatttgaggcaaaaatcgactataaagttctctgccccatctgcctaccctgtcatcacgtttggaccatttaatgctccagctgatgttatgacatctttatcgcatgcaatcggta

SEQ ID NO: 140170 - DNA, 297 bp, Zea Mays
aaggattggagacccatatttatagccctagaggctgcactaccacaccttctcacacacactacacaacaggattgtcctctatatgctaaagagactacagaggacagtcaaaagcgacggttgtcctctagatgctaaagagactacagaggacagtcaaaaagcgactgctgtcctctagatgctaaagagactacataggacagtcaagctgtcctctagatgctaaaggactacagaggacagtcaaaagcaggttgtcctctagatgctcaagacttattccatcactgt

SEQ ID NO: 140171 - DNA, 349 bp, Zea Mays
ttcgaaaacgcaagagagctatgtatcattatattaagaagaaaaggtgaggtaaaaatagaaacctcatacaactccacacaaacccactagattataggtagaaatacaacaatataaacagcgtcatgcgttcgccactaagtccaactattgatagaactgaaaaacacactccttgtgaacacaaaagaagtgagcaaaccacaaactgctgctatgttgtgcataaccaggagagatgccgaagcgccactgtgtgtgaccaccgtcaccacaacaagctgccacctgcctgtaaggactgtgctacgtgtggacagcaattacgcccttattgagtttgtgc

SEQ ID NO: 140172 - DNA, 1397 bp, Zea Mays
atgccgaagcgccactgtaaagctgaaggtgtcctctttgaagatgctggagatggatatgcattcacacaaggagactatcttttgacatattatattgctgaactccactcgtcggtggttactgtcaaagtcttcaaatctgaagggtcatggaagagaccaaaacgaaatcttaaaataaatatattgcttggtggaggtgctatgataagtacaaatggcattgatggcgaagaaatacaccttacaatgccttctgaatctgaagtgtcaaacttagtcgcaactagcgaatttgagcacaagaaacgaatggagatgattcatcctatacctgatatagaggagtcactgaggcaggaacgtgctgagctatcaaaaatacctgttgatatgaaaagtggagactggttccttaagattgttccatggattggaggccgtattatctcgatgacccatcttccttctgattcccagtggcttcacagcaggattgagatacatggttatgaagaatacagtgggactgaatatagatctgctggttgcactgaacagtacaaagtcatcaggtgtgttgaacaatctggagaggaggaatctatttgtatggaaggagacattggtggtggtcttgttctccagcgccagatatctattctgaaggacaacccaaagattgttcagatcgactccagtattcaggcaagaagtgtaggagcaggttctggtgggttttcaaggttggtctgtttacgagttcatcctacattcaccctgctgcacccaactgaggtagtggttgccttcacggccatcaatggttcaaagcaagagatctccccggaggcaggagaaataacattcgagggagaccttaggcccaatggggaatggatgctagtggacaagtgtgtcgggctgagcttggtgaatcggtttaatccccgggaggttagcaaatgttttgtgcactggggaactgctaatgtgaagatggagctctggtcagaggaaagaccagtgtctaacgacacgccgttgaggatttgccaccagtacgaggtgtggcaaacaagctaaacactgccccgacagcagaaataaaaagatcaatttggaggaggacgcttcagttcaggcttgcacttgttttacggtctttgtattgatggtcgtccaccaaaacacctttcattgtattttggacatgtgtcgttagttattaccctatggcaggacgtttggtctgctaaaaacatggttgctctgcaatctctgctactgttcctggaataaataaagctgattgctgcaatctccatcatatctttcagttacccagtttctgtttgaaaatcatggttcctaggtggtttatcagaatttgg

SEQ ID NO: 140173 - DNA, 103 bp, Zea Mays
gtcaatggttgtgaactctcttctaatcgttcacttcaatggtcgtgttgtaccaagacatattggatggagtaaataataacatcagttagccaaatcaaaa

SEQ ID NO: 140174 - DNA, 105 bp, Zea Mays
ttttatttttattatatgccctcttttttgtgctactaggaagaagcatggactatgggcttcgttgttctaccaacggcccatatgccagtgtgatatttccgc

SEQ ID NO: 140175 - DNA, 165 bp, Zea Mays
atgtcatattcagggtattcagatgatcaagcgtttgcagttaacttcgttcttgtcaccaacttgagcactggggttaccaaaggaggacgggacatacctgaggtcaacactatggatattgttcaaggtgttccaagggagctcaccgagaagttgatttga

SEQ ID NO: 140176 - DNA, 1394 bp, Zea Mays
ttggccttgccacttcctccgcctctgccctgctctgctcagcttctcacctcccagctgggctccccacccctctcgctccctgttctatcctctcgttccctctgcaaccttctctctctctagcttatcccgataatggctgcctcgagcagcaccacctagctagccgtgcccgctccacgcaacacgtacgtacgtccgctgctcggcgtcggttccgcctcgtacaacaaccacactttgcattgagccaggtcgtccagcttctgaggaggagcggcagcacgcacctgggcgccggcccactgctgcagctgggctgctagcttgagctgagcttgccgttgggcgcgcgcgtgcatggcgcccaagagcaggcgtgggaaggccaagggcgagaagaagaagaaagatgagaaagttctccctgtggccattgacatcactgtcaacctcccggaccagtctcatgtcattctgaagggtatttcaacggacaggatcatcgatgtgaggcggctgctctgcgtcaacaccgccacgtgtgccatcacaaattattctctcacacatgagatgcgtgatggtgcgttgaaggatgccgctgacattgctacactaaaaccctgcactctcacattggtcgaagaggagtacagcgaggagagcgcggtcgagcatgtccggcgtctgctggacatcgtcgcttgcaccacctgcttcggcccagcgccgccacctcctcctccgccgtcccccaaggacgccgatgccgctaaggagacatccagctccagctccacatccaaggccgtcgcatccgcctcctcgggtgggcgccgcacggcctcaccgccgccggcctcgccgtcctccgctgccgcgaaggagtcgtcagccgcaaaggaggcagcagccaaggagtccgcggctgcggtagagctggaggccgagatgagcggcgcgtgccctcgcctcggcgccttctacgagttcttctcactagccaacctcacgccgccactccaatttgtaaggcgagtgttgcagcctcgacaggaggaacagccttcggatgaccatctgttctttcttgaggcaaagctatgtagtgggaagttccttgttgttgaagctcggcgaaagggattcttcagtctaggaaagcagcgagtcttgtgccacaacctagtcgatcttctgaggcatcttagtagagcatttgacaatgttagtctatctccttgaacttctggattttttttcattattgctaatagtacttcgaatgctgaagatatttgaccttgttattcagtgcccaccttggagttattacttattactattttctgaatcatattcataattcaaggaggatttgaggatct

SEQ ID NO: 140177 - DNA, 318 bp, Zea Mays
ggaagggatggaaagagcgacatggtgccatgggcagatgaatttctctatctcacatccatgccttgcaaaactgctgaggagagggaactccgtgacaggagagcattcctacttcacagcctctttgtagatgttgccatctttcgggctattgcagcagtaaggcatgtaatggagggtacagagttatcggcatcaaccaatatagatgaagtcttgtattctgagacagtgggacattttagcatcactgtcacaagagattcttcagatgcaagctgcaagatggacactaagatagatggaaacagagcc

SEQ ID NO: 140178 - DNA, 550 bp, Zea Mays
aagacctaaatcagctgggggttcaggaaaacagatgaaacattatcgcccaaccaccagaaaggtgtatgaccctgatagtcatgatccaacatatacttcacaatacaaggcaaggaattcctattcaaataaccggtattatttcttaaggaagagaacagttgtacctacaacgtacacagatcctcaacagcatgtgaaagttcagacatttggtgccaggtttggtcgcaagatttacaaggctgtgacctatcgggttaagccagcgactgcaacaacagaggtgctagatacttttaagagtacagagcagatgagtggtaaagcagaatcacaggtagcaaactcacaagcacacaatcctacctcaacagatcacaaaggaagtgagtcacatggaactttagttgcaagtagtggaaatgctccatcatacaaagatgttgcactagcacggcctggaacaattgccaagactcaaatacagaaacctagagacgatgtaccacagaaccaaccatcacttggtcagattattgcacaa

SEQ ID NO: 140179 - DNA, 1147 bp, Zea Mays
ctcctaatctcatgcatcctgtgccatttatttatccaccatatagtcaaccacaggtggttccaaacaccacatttcccatgaacactaatatttttcggcctaaccattatggatggcaaccttatatgggcccagcgccatcagaatttgtgccaatgtcagcatggtcaagtagccatacaattgacttcattcccacaccacatgttgttgatcctatttctcaatctttagcagataagcatattcaatctgatgcagctgttgttagtataggcccttcactggacagtagcgctgtagtggccaaagaggagatggagactcctgcagtggcagtaagtggcaatttgataagcaacaaacatgatgatcaagataaacaattaaaggatgccactagaattgaactgagtcctgaaatgcaagaagacaacaagcatgatgaaggtagtttcaggatatatgtaaaggggaaaagccgtcggaaacaaactctgagaatcccaataagtttgcttaacaagacatatgggtcacgctcatttaagcttgtctataacaaagtagtcagagagaatgacatcttcaggccttcaagtgtgtcctttgctgaagttgtttcatctggcaactaggttatgcaaattctaaagcatctaattatgacattagtacccaaaagaaaattgtcatggatctccaattcaaatgtactgaaatgaagttattatttggaaggcagcattattctcataccatattccagatatgaaatcccaccactcgaaactattcaaaaaggataaatattttttcatttcaaatacggtaccgacaatcctgtgtagagtccagaaaagatgcaaggaattttgtgagatccagaactaataggagatggaagtattacgaataataatactagactgtctagacaggctgaattttcttcaattttgatagattaagagaaaggaatcctcttcaatttttggagctcacttttgggcttttgaagccgagcctttagattttgttcttttgttacgctgcggcacctaataaatgacttgccttctatgttttcgagaaacttacattattcttttttatataacaataatactgtctattcagtaaa

SEQ ID NO: 140180 - DNA, 1232 bp, Zea Mays
aacggatagatacgcatcgaggcagagggcttggccgagatctccccactaccccgcagcgtctttaaaaccaggacctgcttgtttgattgtttcatcgatcgtcaatgcaagtttgtccattcgcattggtctgaatactgtagctactagcgcgagtgccactgtgccgcagctgcctgctcgccattactgcaagctgtgttcaatcaaagcttaattaggctccctctacatctgatccagctaagtagctagccagcactacagaagggcgtggcaagaatcaggagagagatagcaggggggctagctagctgagctcgtgcgacgaagaatggccggaattggcaggaacatggtggcgccgctcctggtgctcaacctcatcatgtacatcatcgtcatcggcttcgcgagctggaacctgaaccacttcatcaacgggcagaccaactaccccggcgtggccggcaacggcgcgacgttctacttcctggtgttcgccatcctggccggcgtggtgggcgcggcgtccaagctggcgggcgtgcaccacgtgcgcgcctggcgccacgacagcctggccaccaacgccgcgtcgtcgctcatcgcctgggccatcacggcgctcgccttcgggctggcctgcaaggagatccacatcggcggacaccgcggctggcgcctgcgcgtgctggaggccttcgtcatcatcctcgccttcacgcagctcctctacgtgctcatgctccacacgggcctcttcggcggcagcggtggctaccgggaccacgactacggcgtcggcggcgcggccggcgagcccaagggggtcaccagggtctgaggattctgatcgatgcagctcgtacatgtgtcatcatatcaggcgctgctggagtgtgatgacgtaataagtagtacccatatatatatatatggtgtgtgttgacgtaccacgtatactacgtacgtgtgtacctagtagctagctagtcagtccatcgtctgctcatctcgtcaggtcatcagatctctcggttctggtttgtacatcagtacgtgcatgcatgtatcccgtgtcaaatgtatttcgtcacccgtcagtttcagccggtcagtgaccaagtttatttcgtcacccctcagttcagtgacattggtgacatgaggtcgtggtgtcaacttttggctcaatgtattatgtacctgatcttttttacaggatt

SEQ ID NO: 140181 - DNA, 1913 bp, Zea Mays
gccgttctcgtcttccagaagtctctccgtatctccctccccgaagccccgccggaccaccttaacctccccaccacaagcccgcacacaccatcccgctccgctcaagtcgcctccgcattcctgccccctctacccgcccgccgccgcgcggacgacgggagacgccggcaccatgctctgcctctcgctgtgcgcaccgcaccttcacctccacctcccccgcagcccgaccgcacgacccgccgccgccacgtgcaggaacgcgcgctgcatcggcgtcacgctatgcctccggatgccgacgacaccggaggaacggcggcagaagcgcgggctggcccagttcctggacttatcggccgcgccgacactcacgccacccgcgcccacgcccgtgcatctcacgcccgcggccaaacggcgcggggcgctgcgggagatgcgccgggtgtggtgggtgtgcggggtcgggtactgggtgcaggggttccgctgcttcccgtggctggcactcaacttccacctcacgcgcggcatggggctcagccccgccggcctgcaactcctgcagaacgctgggagcctcccgctcgtcgccaagccgctcttcggggtcctctccgatgccgtctacatcggccgcgcccaccgcataccctacatctcccttggagtgtggctgcagctcattgcttggggagtacttgcaaccattccagttacaggggatgcgtttccaactctaatggcatgcattctcattggaaatctaggagcatctgtcacagaagtcgatccttgctggggaacttgtctggtggttacattctgcttaaaacacaggaaccaaagatcatgttcacagcattctcagtccttcttggcttccagctagcactgtccctaagtacaaaagagacattgccaagctctcgaggaaactccagaaatcgtcttgtcaaaagctctttggcagctaacttccgcaagcaattctcaaacttgatgacagcgatcagagaggaaaggatcttataccctcttgcatggatcatgacatcctttgctgttgtgcctgttctttctggaaccatgttctgctttcaaacacagtatttgaatctcgatccatcggttattggtctatcgaaagttgtgggacaggtcatggtcttatcactaactgtactctacaatcgatatcttaaaaggataccactgaggtgccttaccacaggacttcagatactatatgctctggcagttttgtcagatttgatccttgtgaaacaagtaaaccttgtgctagggataccgaacgagattcatgttctttgcttctcagctctagctgaagctctagctcagttcaaggtattgccattctcggttttgttgtcaagtctctgcccaccaggctgtgaaggttctttgttcgccttcttcacatctggactggtgctttcagcaatacttagtggagtattcggagttggattgtccaccctgatcggtgtgtcttctgtggactactccagcttgcctttgggtattttgctgcaaagtttggctgcattgctaccgttgggatggatatcctttgtgcctgagaaatggactgccgatgacacggttgtaataaaaagatgaagtgttttcaccatacaaatttccaggcaagatcctgttaggcaatgacacaatgtagataaatgtagcccacccagtcaacactggtgaggttacatgtataggtatccagattctcttcaattagaatagttcttattattactgtactatatgcaatacaggatagcccttatgctcctgctgaatatagcacacaaattgcattgaattagttgtctcgtgaaacgagattggactataaaatttgcttcacatgc

SEQ ID NO: 140182 - DNA, 2066 bp, Zea Mays
gccgttctcgtcttccagaagtctctccgtatctccctccccgaagccccgccggaccaccttaacctccccaccacaagcccgcacacaccatcccgctccgctcaagtcgcctccgcattcctgccccctctacccgcccgccgccgcgcggacgacgggagacgccggcaccatgctctgcctctcgctgtgcgcaccgcaccttcacctccacctcccccgcagcccgaccgcacgacccgccgccgccacgtgcaggaacgcgcgctgcatcggcgtcacgctatgcctccggatgccgacgacaccggaggaacggcggcagaagcgcgggctggcccagttcctggacttatcggccgcgccgacactcacgccacccgcgcccacgcccgtgcatctcacgcccgcggccaaacggcgcggggcgctgcgggagatgcgccgggtgtggtgggtgtgcggggtcgggtactgggtgcaggggttccgctgcttcccgtggctggcactcaacttccacctcacgcgcggcatggggctcagccccgccggcctgcaactcctgcagaacgctgggagcctcccgctcgtcgccaagccgctcttcggggtcctctccgatgccgtctacatcggccgcgcccaccgcataccctacatctcccttggagtgtggctgcagctcattgcttggggagtacttgcaaccattccagttacaggggatgcgtttccaactctaatggcatgcattctcattggaaatctaggagcatctgtcacagaagtcgtaagtgatgctgttgtcacggagttcagtaggacacagaaggctggtgtactacagtcatatgcattcgtagccctggctgcaggatccttgctggggaacttgtctggtggttacattctgcttaaaacacaggaaccaaagatcatgttcacagcattctcagtccttcttggcttccagctagcactgtccctaagtacaaaagagacattgccaagctctcgaggaaactccagaaatcgtcttgtcaaaagctctttggcagctaacttccgcaagcaattctcaaacttgatgacagcgatcagagaggaaaggatcttataccctcttgcatggatcatgacatcctttgctgttgtgcctgttctttctggaaccatgttctgctttcaaacacagtatttgaatctcgatccatcggttattggtctatcgaaagttgtgggacaggtcatggtcttatcactaactgtactctacaatcgatatcttaaaaggataccactgaggtgccttaccacaggacttcagatactatatgctctggcagttttgtcagatttgatccttgtgaaacaagtaaaccttgtgctagggataccgaacgagattcatgttctttgcttctcagctctagctgaagctctagctcagttcaaggtattgccattctcggttttgttgtcaagtctctgcccaccaggctgtgaaggttctttgttcgccttcttcacatctggactggtgctttcagcaatacttagtggagtattcggagttggattgtccaccctgatcggtgtgtcttctgtggactactccagcttgcctttgggtattttgctgcaaagtttggctgcattgctaccgttgggatggatatcctttgtgcctgagaaatggactgccgatgacacggttgtaataaaaagatgaagtgttttcaccatacaaatttccaggcaagatcctgttaggcaatgacacaatgtagataaatgtagcccacccagtcaacactggtgaggttacatgtataggtatccagattctcttcaattagaatagttcttattattactgtactatatgcaatacaggatagcccttatgctcctgctgaatatagcacacaaattgcattgaattagttgtctcgtgaaacgagattggactataaaatttgcttcacatgcatttgttcccataccattagatcctaaactgacgctcagatacatcttctccataaagataaaaaaaa

SEQ ID NO: 140183 - DNA, 181 bp, Zea Mays
gtgttcgagcaatttggatttccagctgggacttcaaccgcagtcttgccattctttttaatcactggttcaatatttagatatccccggatgttcaatttcaaggctagggtggagatgctccattagtgaaagaccgatcttcccataccaatcatcttcctcgcccactcaatgaatc

SEQ ID NO: 140184 - DNA, 1721 bp, Zea Mays
gcagccggccagtggggggcatggaccgcgtggcgccctgcgcaccaggctggggataatccgcgcaatgcaatttgaggccattacgcccttggctcgtacgtacttactcactctccccccacccgcgccaggccagacagactaactgagcacccgctgcaaggagtccgcgcccatggcgagcaccaacatggcgtcggccacctcgcggttcatgctggccgcgggcgtgcccaccggcagcagcggcggccgcgtcaacttcgcctcggcgcccaaccggcttggcaggaggctcgtggcccgggccgacaacgaggccgccgcagctgaggcggcggaaggggagggtgccgtggccaccaagcccaaggccgagaagccgccgccgatcgggcccaagaggggcgccaaggtgaagatccttaggagggagtcctactggtacaacgggatcggcaacgtcgtcaccgtcgatcaggttactagctcactctcctcgtcatagctagagcatatatatatagatagaaaatcaagaatttattttgttaatgtggaacatggcaataccatagttagagaatcgccgttagcattattattatatacaggatcccaacacccgctacccggtggttgtgcggttcaacaaggtgaactacgccggcgtgtccaccaacaactacgccttggacgaggtctcagaggtgaaatgagtggggccggccggctcaagggctccgcgctagctaccgtgtgattgatttgtagtagttgtgaaatgaggctgtgaagctgcatgctgtgctggctagcgtcacaacatcgatcctatgtgtaatagcataatccacataatcatatcatgtaattgcttgctttattcaccgtgtactcaataatctctcttgctctctaaaattgttgtattgttatatgtggttttgtacatgcacataaatcgctctctgccaccactgtttgcgctgtgccaaggactcaacctagttgagctaaagaaaatggtgttttcctaataagaaatagaactattctatcctaacagactattactgtaccattccgtgttctgtcattcccattccgtcctcactgcaaagcccattcccagctgcatgtctttctcattccccctccctgcaaagcccattcacatttccattcccggctatcacatgtctttctcattccccctcccacaaagcctattcccattcccacgtgcatcccatgcctagctaaaattaaattaaaaaaacaggctccaaggagattcgaacccgcaacctctcaaataaatgtgtttgtagctaccactacaccacatgtgtgtttttgtttacatctattatagtaaaaacatataatacatctctcccgaagcccacctgctacccttgcacaatgtgtagtagtagataagtatcactgagattattaaattatatttttggattgagggagtagtatttaaaaaagagccttgcatgcaatttcttttgtttgaataatgttttcaacttaaatacttttttttgcatgtgtaacatttattcccatagtatttttccatggatctaacttataaatcattttcataaaccaatgccaaagatgaatccatgtttcttacttggaaaccccgaacaaacaccactagcatgaggcgctcgcgttggcgtcgctcaccgacg

SEQ ID NO: 140185 - DNA, 1588 bp, Zea Mays
gcagccggccagtggggggcatggaccgcgtggcgccctgcgcaccaggctggggataatccgcgcaatgcaatttgaggccattacgcccttggctcgtacgtacttactcactctccccccacccgcgccaggccagacagactaactgagcacccgctgcaaggagtccgcgcccatggcgagcaccaacatggcgtcggccacctcgcggttcatgctggccgcgggcgtgcccaccggcagcagcggcggccgcgtcaacttcgcctcggcgcccaaccggcttggcaggaggctcgtggcccgggccgacaacgaggccgccgcagctgaggcggcggaaggggagggtgccgtggccaccaagcccaaggccgagaagccgccgccgatcgggcccaagaggggcgccaaggtgaagatccttaggagggagtcctactggtacaacgggatcggcaacgtcgtcaccgtcgatcaggatcccaacacccgctacccggtggttgtgcggttcaacaaggtgaactacgccggcgtgtccaccaacaactacgccttggacgaggtctcagaggtgaaatgagtggggccggccggctcaagggctccgcgctagctaccgtgtgattgatttgtagtagttgtgaaatgaggctgtgaagctgcatgctgtgctggctagcgtcacaacatcgatcctatgtgtaatagcataatccacataatcatatcatgtaattgcttgctttattcaccgtgtactcaataatctctcttgctctctaaaattgttgtattgttatatgtggttttgtacatgcacataaatcgctctctgccaccactgtttgcgctgtgccaaggactcaacctagttgagctaaagaaaatggtgttttcctaataagaaatagaactattctatcctaacagactattactgtaccattccgtgttctgtcattcccattccgtcctcactgcaaagcccattcccagctgcatgtctttctcattccccctccctgcaaagcccattcacatttccattcccggctatcacatgtctttctcattccccctcccacaaagcctattcccattcccacgtgcatcccatgcctagctaaaattaaattaaaaaaacaggctccaaggagattcgaacccgcaacctctcaaataaatgtgtttgtagctaccactacaccacatgtgtgtttttgtttacatctattatagtaaaaacatataatacatctctcccgaagcccacctgctacccttgcacaatgtgtagtagtagataagtatcactgagattattaaattatatttttggattgagggagtagtatttaaaaaagagccttgcatgcaatttcttttgtttgaataatgttttcaacttaaatacttttttttgcatgtgtaacatttattcccatagtatttttccatggatctaacttataaatcattttcataaaccaatgccaaagatgaatccatgtttcttacttggaaaccccgaacaaacaccactagcatgaggcgctcgcgttggcgtcgctcaccgacg

SEQ ID NO: 140186 - DNA, 297 bp, Zea Mays
atggaggagcgcatggattgcacgaaggcgaagggaggcatcagaccgagcgccggtggcaaggagatcaacggcaagctgtacttcacccaggagcaggtgatcgctcgtctcacgtcccgcctcaacttcaacaccggtgggacggggacacgtggcagagcgcaagctggccctggaggacgccatcgcgggagaggccgtgacagggggcgcgacaaggacacacgctcggctaagggtggcggcgaggtcaatgacaactcctaccactattgtggcaagtcctggcattaa

SEQ ID NO: 140187 - DNA, 1187 bp, Zea Mays
gtcagtaactgtggagagcacgagaaagtggggcatctactttttttagactactgctctcggcctcctctccgctccattttcgcaattccttcgagctccgctccgaccacgtcagccttcaccttgccgtctccgttacgcgccgcgagcccgcgagcgtttggggagttttggagcggaggaggcaagggaggacggacagggaagtttggttgtggaaatggatgtggtggaatcctcgccgtcgtcgtcgccgatatcgtctccggccgggtcttcggatctcattaaggctggcacattcatttgtgagttcagcgggattatccttactcaccagcagtcagaggttgtggcagcaaacggcgattgcttggtgcgtccaagtaggtttcctccaaggtggttggattggggtgatatatctgatgtctaccctgattatgtggcgccagaccatccttctattcctgagttaaaatttgcaattgatgtgtcaagggcaaggaatgtggcatgctatttcagccacagttgcagtccaaacgtgtttgtccagtttgtgctgtttgatcattacaatgtgtcttacccccacctcatgatctttgccatggaaaacattccaccgttgagggagctaagcattgactatgggatggttgacgaatggattggacagttaactatgtagctggagtatctatttagaaggcagtaatctccttcttttacctttatttttgaagttttcattatgcttcactttgggatcatcaagccaactgctggctaaaattcctcagctgtccagcagtggaggtttccaactagcataatgttcctctggcgttgaaagaggcttgcataaggtgaccaagctatcatcaacagaacatcagccgttcattgtatatgttgcctgataacctaggtgccttagccaattttctagatgatctcgcttttgaagtataatgtgtgctgctgtaggaagcttgtttggcgtggctggcgctgagtttcagccttaaccttcgtgttatgagttgtcgctgttggaactcattttctgtacatatatctgtaaattatctagctggaaatgtgcccgcttctgttgggaaatgttggtccatatgtggcaaagttatttggataccttgtggaattgaagattccgc

SEQ ID NO: 140188 - DNA, 2831 bp, Zea Mays
gggcgctccattttggagatttcgcaacctctgcctcgttctgccatttttttttcttgcctgcaccaacgtcatctaaccagtcattagttggtgaaatcctccactcccctgcagaccacgtcagccttcaccttgccgtctccgttacgcgccgcgagcccgcgagcgtttggggagttttggagcggaggaggcaagggaggacggacagggaagtttggttgtggaaatggatgtggtggaatcctcgccgtcgtcgtcgccgatatcgtctccggccgggtcttcggagtccatagacctcaacttcctgccgttcctcaagagggagcccaagtcggagcccgcgtcaccagagctcgggcccctgccgctgcctgcgcccccaacccagacgccccagcagcagcatgcagcggctccggctcctgaggccacggcgcctctgtcgccagcgactcctgacctctcgtccgctccggtgatggcgccgctgcagtcgctgccgcctaacctggacgaggacgcgctccttcgggagtactaccgcctcgcgggcctctacctctcgtctgcgaggtccggggcgatcatcccagcgctagctccggaggcggccgcaccggcggtggtgcagtcggggtccgggtctgtcgtgaagaagcgccggccgcgttcgtcggacctcgtgcgggtctcctcgctcggcgtgcaggaccagatctacttccgcgacctcgtgcgcagggcgcgcatcactttcgaatgcctccgcgggcttctactcagggacgacgagcgcgccgagtccctcggccttgcggccgtcgccgggttcggcgttgccagggaccggcgccgcgtccgcgcggacctgcgtgccgcagcgctcatgggggaccacgacctctggctcaatcgcgaccgccgcatcgtcgggccgatgcccgggatctcggtgggtgacgctttcttcttccgcatggagctttgcgtgcttggactccatggccaggtgcaggccggaattgattatgtcagtgcagggaggtctgcatctggggagcctatagccacatctataattgtatctggtgggtatgaggatgatgatgatcacggcgatgtacttgtgtacactgggcatggcggccgtgatcccaacctccacaagcattgcgtcgatcagaagctggagggcggcaatcttgccctcgagcgcagcatggcttatggtattgagattcgtgtaatccgtgctgtcaagtcaagacgaagccctgttggtaaggtttacttctacgatggcctctacaaggttgttgactactggctcgaccgtgggaaatctgggtttggtgtttataagtatagactgctgcggattgagggccaagaacccatgggtagtgtgaattatcgagtagctgaacagcttaaggtggatgtgtttgctataaggccaacagggtatttgagctttgatatctccatgggccgtgataccttgtcagttgcactcttcaatgatgttgatgatgatcaggacccactcttattcgaatatctggcacgtccaatatttcctacctctgctgtccaggggaagtttgctgaaggtggtggtggtggttgtgattgtgctgagatttgctcaattggatgtaactgtgcagggaggaatggtggcgagtttgcatatgataggactggaaccctgctacgaggcaagccactggtatatgagtgtgggccatactgcagatgcccacctagttgccccaacagggttagtcagaaggggcttcaacataggcttgaggtattccggtcaagggagactgggtggggagttcggtctttggatctcattaaggctggcacattcatttgtgagttcagcgggattatccttactcaccagcagtcagaggttgtggcagcaaacggcgattgcttggtgcgtccaagtaggtttcctccaaggtggttggattggggtgatatatctgatgtctaccctgattatgtggcgccagaccatccttctattcctgagttaaaatttgcaattgatgtgtcaagggcaaggaatgtggcatgctatttcagccacagttgcagtccaaacgtgtttgtccagtttgtgctgtttgatcattacaatgtgtcttacccccacctcatgatctttgccatggaaaacattccaccgttgagggagctaagcattgactatgggatggttgacgaatggattggacagttaactatgtagctggagtatctatttagaaggcagtaatctccttcttttacctttatttttgaagttttcattatgcttcactttgggatcatcaagccaactgctggctaaaattcctcagctgtccagcagtggaggtttccaactagcataatgttcctctggcgttgaaagaggcttgcataaggtgaccaagctatcatcaacagaacatcagccgttcattgtatatgttgcctgataacctaggtgccttagccaattttctagatgatctcgcttttgaagtataatgtgtgctgctgtaggaagcttgtttggcgtggctggcgctgagtttcagccttaaccttcgtgttatgagttgtcgctgttggaactcattttctgtacatatatctgtaaattatctagctggaaatgtgcccgcttctgttgggaaatgttggtccatatgtggcaaagttatttggataccttgtggaattgaagattccgcggagccaggtttgtccgtaggtcattgcattaatgattttgtgaaattatttgtggtgaa

SEQ ID NO: 140189 - DNA, 107 bp, Zea Mays
gggaagtccccagttctcactgatgcaccgtcggtgccaacggttgccggagtaagagaagctgcctcgtttcagctcattccttcagactctacagataaagctac

SEQ ID NO: 140190 - DNA, 903 bp, Zea Mays
cgtgcccacgtcagatgcgaccgagatccatcttcacgaacggcgataaaatatgagctcatttggcgtcatagtgtgctcatctggtgccatataagtgccaaattatctgccctcgcctcgctccttcgctttcattcctcggcctccgcagctagcgcaacgcaaaggcagttccggcgggggcggactgggaacacatgggaatgagatgagatcattgctcggtcgtgctggcctgggccgtcggcgcgcgttgatcttgcatgtgttctcaggtcgcccccggagggccttccttgctgctgtgttccgctagacctggagtatctcgacgacggtggcaggcacacgcagtgacggcaccactacgtctgttccgccacgagagcctatgtaacggtatgtttattttgctgctgcagcactcttcgtcctagctcatgtcaactgccccgacaataagaaaccagtgcaggcatgtctataaagaaaaagatctacgtggtacggtctgggcactgatgattagttgctcttgttcaggccaactgataaccaagtaaatgaacatgtaagagtactactccatagattactctgctccgtttttttattactcgctccgtttttttatttgctacgttctagtttaaaaataaattaatatgcgataaatattcgagaacgagagtattgctttatagatctgttaaaatttggtttaggcgggaccagccaatttttctccttctttctgtttttatctccgatctaattaaaaattgtgacgtcgtcacagcgacaacaccttcacctggtaagttgcaacgagctttagatagtatgcattgacggcggttgtttaatcatttacatccgcaattgtttaatcaatgcaga

SEQ ID NO: 140191 - DNA, 984 bp, Zea Mays
cgtgcccacgtcagatgcgaccgagatccatcttcacgaacggcgataaaatatgagctcatttggcgtcatagtgtgctcatctggtgccatataagtgccaaattatctgccctcgcctcgctccttcgctttcattcctcggcctccgcagctagcgcaacgcaaaggcagttccggcgggggcggactgggaacacatgggaatgagatgagatcattgctcggtcgtgctggcctgggccgtcggcgcgcgttgatcttgcatgtgttctcaggtcgcccccggagggccttccttgctgctgtgttccgctagacctggagtatctcgacgacggtggcaggcacacgcagtgacggcaccactacgtctgttccgccacgagagcctatgtaacgcactagcaaggctcgcgatgtcggcatcgagggcagaccagcgggggactcatggtgggaggcgcaacaagccggtgggggagtctgacgacactgacggaggccagcatgctggagggcaggccagtgggggaatgacgacgggaggcaggcgggggattaacgtcggagggtaggccagcagggtcccttgtcccatcaagccggcagtggcgccgtgcctctgtgctagtctcgagtgtataaggcatggatgacgggagggtggagaggaagtgggtcgaaatggttcgtttgtttttaaggaatccctagaacccacattttcaagaagtattttgacccagaaccaacctaacccacgagcattttgaaccaaacgtgggttgttgtgggttgaactcgttccaacctgcatcaacccactaaccaaacacaaactccgagtgtatgttgtatttggttgagtagagtgggagaatagagttgctccattccatttttggatgtttggtttctaacaaaatgagagcggagtggctcctagatcttcatatgaaaatttattataaatagttggaa

SEQ ID NO: 140192 - DNA, 360 bp, Zea Mays
atggatcttgatccggacgcagaggcggtggagcatgatcttcaggatcacaacgagcgtctggatgaattggccttgtttggaactggcactggcagcaatgcaaatgtggccatagatgttgatgcggtgctgccgagcctggccgggacggtgactgccccctcgagccccactgccactggtggtagcactgcccgtgacaaccggccgaggaagaggctagcgacatctagggtttgggttgacttcgaggaagtaactgggatcgacgagaaagatcttcatctggtactggacacttacttaggcaccaagaacattgtaaagctgaaattgaacatgaccaagaaggcatag

SEQ ID NO: 140193 - DNA, 185 bp, Zea Mays
tctatgtttggttgatgagtgcaaatagataattttctccattagtcaatctgtattttaagatatgacacattcatacaaccattagtcatatcttaaaatgacaaatataaatatagatcataaaatgtataataattactatataatcttacacatgacgcatccatacaaccatcacacta

SEQ ID NO: 140194 - DNA, 1515 bp, Zea Mays
atgcgcccgcttccggcgtccgtggcgtcccgactggcggccgtgcttgcggatccggtcggcgtcccgctgcccgtcttcaactccctcctctctgcgcttgccgcctccgtggacccttcccacgggcacctcccgctctacctcttccgccgccgcctactcccgttccgccgccccgatgccttcactctctccgtcctcacctcggccctcccctccgctgccgtcaccctccacgccctcgcgctccgcctgggcctcctccacgcggaccccgtcctcgccaactctctgctccgtctgtacatatgcccaccggtcccctgtcagggcctcgcgcgccgcctgttcgaggaaatgcccgcgcgcaccgcgtcctcctacaacacccttatctcgcactcgcacgacgacgtgtggggccttgtgcggcggatggtcgccgacgggtgcgcgccagaccggttcactatgtcagccgtgctgccggtgtgcacgtctgcgcgctggggcagggagcttcattgctatgccgtcagagattggatgtgtggggacgatgatttccatgtgagcagcggcctggtgtccatgtactgcagggttggccacccggactctgcaagaactgttttcaataggatggcacgaaggaacgttgtttgctggacagccatggtgggagggtacatagagaatggcatgtttgatgatgccgtggattgtttccgggcaatgtggcttattgatgccattccaccgaacaggattacgttgatcactgtgctctcggccattgaggccctctcgagcttagcagaggggaaacaggtgcatggttttgcagtaagaatgatgatgcacgcagagatgtcgctgaacaatgctttgattgatacatacgcaaagtgtggggccttgcattatgcaaggcggatctttgatgataccagttggtgcaaagatgtgatctcatggggtgcaatgattttgggttatggcattcatggtatgggtgtggaagcagttgctttgttcgatcagatgctttcatctggggttaaacctgacagcattattggacttggtgttctttcagcttgttgccatgcaggtttggtgttgaagggccttaatacatacagctccatggtaaatgatcacggggttcatccaactgaggagatgtgtgcctgtatggttgatttactgggccgatctgggaatgtttaccatgccttggattttgtgaagtcaatgagtgtggagccaggctctagtgtctggggagcacttctggatgcctctgttaagtacgacaacaaagaaatccaagatctggcttccaggtctcttcttagattggaacaagggaaaccatctaatcttgttgcagtatcaaacctaaatgcctcttcagaaaggtggaatattgttaaacaagtaagggatacaatcaaccagggatcattgaagaaaaaaactggttgtagttgggtaaatccaatatag

SEQ ID NO: 140195 - DNA, 104 bp, Zea Mays
ggttcttgttatatgtttgtactgtactaggcgcgccaagacgatgaggctggatctggtgcctgttaccgtaggacagatccattatcgattactcatcgtaa

SEQ ID NO: 140196 - DNA, 1257 bp, Zea Mays
atgggcatccatcgtcgtcgtcatcatcgtcgtcaatcgtcatcatcttgtggaggtttgcttctcccattccacggcgatgtcctgcgcaaccttcacagcgtcggaggaaacgccggagaggcctctcctggtgaagccaacagagtagagcccggactcccccttccagccgtgtgggaacggcacccttgggtacccttcctgcgtgaagaaatcacttcccttgagccactgagggacgttgctgtggtagccggtggcgagtatgaccgcgtccgcagcgacgcggcggccgtcgacgagctcggcgccgccacggaagaacctcttgatgcccggcacgacctgtatgtggccggagcggatcctggcgagggcgccgatgtccagcacgggggtcctgcccctggcgttcttgagctcgagagggcccccggcggggcgccggatgccgagcttctccaggtcgccgaggaagaggcgcgcgagcaggacgaggacggcgtccaccagccagagcggcaggaagcggagcaggaagacggcgacggagaaggtggcgacgccgaacatctcccggggcaggacgtgcaccgcgtccctgacgaccatggacgggagggcattgtggtcgcagaggtcgaggcagacctccatgccggagtttccgcagccgacgacgagcacgcgcttgccgcggtacgcctcgccgcacttgtactcggagacgtgggagacggggccggcgaagtcctgggcgccgtcgaactcgggcacgatgcgctcggcgttctcgcccgtggcgacgacgagccagcggccgatgtactcggtggaggcggcgctggcgacgtcgtcgtcggcgagagcgtcggcggcgcgcacgcgccagagccccgcggcccggtcgtagcgcgcggacgtgacggcctggttgaagcgcggctggacgcccgcgcgctcggcgtaggcctggaggtagtcgacgaactggcgcttggtggggtactccgggtagtggtcggggaagggcatcccggggagctcgcagaactggcgcggcaggtgcaggcggaggcggtcgtaggtgcggcgctgccagagcgacgcgatgcagtcggcgcggtcgagcaccacgcacggaacaccgcgcgcccgcaggcacgccgccaccgacaggccccccggccccgcgcccaccacgatgggcccgttcacccacaccacccggccttccgcaggcggcggcgctga

SEQ ID NO: 140197 - DNA, 840 bp, Zea Mays
cgccacaacctcgccgcgcgcgccctgcctccaccccgcgcccgccccaccgcgcgcaggctcgcgcgccgccaccagcgcggccagccctcgccaccctgcggccccgctgccgccgctagaaaccggccgcgcgcgccccgacgcctcgccagcccaccgcgcccccgccccaccgcgcgccaccccgccagcgccccgcctccgcatgctcgcgcgcagctggcccaccgcgccccgccgccccaccgcaacagggaacaaatgcggtggctccgggaaggaccgggtggccgaggattttatgccgtctagcccagggacaacaatgacctccaagacgagcggcagcataaccaccatcctgagcaccacggggaagctctcctccgtgggcagcagcttcatggcgtccgccggcagccgcagcaccagcggcgggtttgacgagggggccaagtactccgacggccagatcctcgaggcgcccaacctccgcaccttcacattcatagagctcaagacggcccccaagaacttccgtccggacagcgtcctcggcgaaggagggttcgggagagtctacaaagggtgggtggatgagaagaccatggcgccgaccaggaacggcaccggcatggttgttgcggtcaagaagctcaactcggagagcatgcaggggtttgatgaatggcagtcggagataaattttctaggaaggctctcccatccgaacctagtgaagctcttgggctactgttgggaggacaaggaacttcttctcgtgtacgaattcatggccaaagggagcttggaaaaccacctattcaggagtgagtt

SEQ ID NO: 140198 - DNA, 870 bp, Zea Mays
atgcccccgccataccgagaaaatcgtgcacagcaacagctcacctcgcctacaccgcaacagcaacagcaaaatacccaaacccggttatctgtggtttatgcaaatcatgtattgagaaatgcacttgttttagatgagatccacttctccgtgttttcggctctgattagcctgatgctgctttcacaagacagaaatcttgctttctatggagttgaaccaggatcaagcggccttactggcccatttaaccaaggaatcatgcagccaaaattgatgtgcaccattgccaatcctgttgatgttttgcacggagctattcacgacgcgtcaacaatgaaccatgtaattttacagagtgacgtactgacatatgtatatgcagttccatatgtgcttccaaacctatcatctgtcacccatgcccacatcgttgctggcggagagcacgcaagtcatcgtgagttcaacctccatgatgccacagtcaggatgatggaaatcgaagcctacgaaaccctgcaaactttgggcttcatccaacacctatattggaaaatgcctaagttagacgctgcacttggtataaaaatatatgcaaaatattccttcgtttttgcaaataggtgtaatgctgcatttcggaggcatgataaggttagcaaagaagaatggactgctattgatttctacattaacaagcataggatctatgagcgtatcagtttccatccaagcaaaatagtgtttcaaaaggaagcaaaacagtttctattttactttctcaggtgtagtgaaattgtatcatttttagcagataaggttatcaaagaaaaagaacgtactgctattgatttctacatataa

SEQ ID NO: 140199 - DNA, 612 bp, Zea Mays
acggcatacgcgccacccccaccacccccctcttcgcgccatcccccccttcatcggcgtgccatgacgacgacgcgcctttgcgccgccctgaccacgttcctgccactactactactctcctccgccgcggtgtccctggccaatgccgccggcagggagagcgaggatggccgcggccagcaagcggccacgaccgcgagcgtgtacgtggtgatggtgaaggctcctgcccagggcgtcgactccgaggcgtaccacatgcgcatcctcgccaccgcgctcggcagcgaggagaaagccaagcgggcgctgatctacagctacaaggccgccgctagcgggttcgccgccaagctcacgccggcgcaggtcgccgcgttgcagagtgagctccataattcaccgattaattctcccgtgctcttgttaatttacttttttgcgatgcttgcctgatttcctgtgcaaactcatggcgattcccccgtgtgctcttgtttgttggcctggccagagcatcctgacgttgtgcaggcgctgcctgacgtgaagtacacccttgaggacaggaaccacctcaactgaaccgagtgcggctttcaccaacac

SEQ ID NO: 140200 - DNA, 892 bp, Zea Mays
acggcatacgcgccacccccaccacccccctcttcgcgccatcccccccttcatcggcgtgccatgacgacgacgcgcctttgcgccgccctgaccacgttcctgccactactactactctcctccgccgcggtgtccctggccaatgccgccggcagggagagcgaggatggccgcggccagcaagcggccacgaccgcgagcgtgtacgtggtgatggtgaaggctcctgcccagggcgtcgactccgaggcgtaccacatgcgcatcctcgccaccgcgctcggcagcgaggagaaagccaagcgggcgctgatctacagctacaaggccgccgctagcgggttcgccgccaagctcacgccggcgcaggtcgccgcgttgcagaagcatcctgacgttgtgcaggcgctgcctgacgtgaagtacacccttgaggacaggaaccacctcaactgaaccgagtgcggctttcaccaacacgatacatagctcggcactagtgccatctcatgttagcaagtgtgcatgtgcccacaccctagggtcagaatttatataagcatgctatgtgtgggctagtgatggtaatttagtctcttcataaagattgaatgctgtacccggagcgtacgtacatattactacccagcctgctgttcattgtttgatatcaccgtggatccacgagactgctgcacctgatgagaggctagagctagaagatggatttcagaacatgcgtgtgcccaaccaattgcacatttcaggctttcaaacgtgctgttcatctgtccttctgtttcccttttttttttcaagaaacgagagaacattgtaccttgagcaatatgtatttgagcacgaatttaccctgcgactgcaatagatg

SEQ ID NO: 140201 - DNA, 106 bp, Zea Mays
gaacaaaaaattcagaacatgttaatctagagtggggtgtaagtaaccaaccaaacattgttgagattttgcgtgaagattacatcgatgtaatgtaacagacaac

SEQ ID NO: 140202 - DNA, 683 bp, Zea Mays
ccaaaactctagaatcagagcaatgttcagaaggccaaggctatgtatggttagatttattcgttggaaaatggtacgaacgacgcccacctgaacgtcggcccttcgtactcgtcttccccaccgccgccaggagaggagtggtaccggacagcgttgatagcgtagtcagcagcgtcgcgttcctcccccacccaagacacacggcagtcgaagtgcaggacgggcaccgcgctaggcttactgacgaagaccttgacgagcgcggccctgggcagcgggtctcggcccacgaactgcagcggggcgagcagcaccgacacgaggacctcctcggacctggactcagacccggcccggcagcgcaggagcacgtcctgcgcgcgcggggcatcagacacggtgtcgaagtcgtgcgccagatgcgagtggggaggcgacgccgttggagcaggaggggcggtgctcctcgattcaggtgggctcgaagatccagatgccgcacgtggaggtggtggcgcctcctgctgcagcgttggtggtcagcgtcggagatggagcggagaggatagatagactgagatacgttgggaggaggaagggagagagagatgaggccgcgagagggtgcctggagccgcggcgagcatgggcacgaggtgaagcatagcggcagcaagtag

SEQ ID NO: 140203 - DNA, 86 bp, Zea Mays
gtcggggcgtcgggggcgtcgattcgctcgacggctgacgaagcgcggcctcccgtctggccttgacggctccgccttcccctccg

SEQ ID NO: 140204 - DNA, 1831 bp, Zea Mays
tgaccgcccttgacgtgtcccacggaccacagcgacccacccacccagcgggggcggcgtcaggcgtgtgccatcaaccaagcttgaaacttcttcccttctctttcccttctcctcccgccgccctcgcgctctcgcttcctctccacgaccgtcacaaccaccgccaccgccacctcctcgcgcgggggcaactgtgaggtgagggcgaggcggggcgatgctggcgtggaaggagaaggtggcggaccgtctcgcccgcctgctcgccgactcccctgtctctccctcccctgctcaggccgccgtcgagccatcgcaggctaaatcttttccaccagaacattttactccccccaagacatcatcattatcttcgtatgtattttcccttctaccaacctcaaacacagggcatgagcagaattcaccttgttcagagactttgagaccattacctcctgaatcacttcctaaaaaatggagatggagtgatgtaacttggaaagatcctcccgtggaattgagtgaggagtctgggtctgaaagtgatagagatgaaaggaatgggaattttggtaacgacccagtccttcagtcatataggcccataaataactcaaatggcaatgaggaaacatcgacttcagattgtgtgggcactcttcgttatctaactgaaaagtctatgtttgtgtctccaaaactatttgcattctttcaatcttctctccctgggactttgaaggggtgccactgggtattgctatatagcacctggaagcatgggatatctctgagaacacttcttcgtagaagtgagaatattcagggtccatgcctattgattgttggagatatgcaaggggctgtgtttggtggcttattgaacagtcctctgcggcccacagagaaaaggaaatatcagggaacaaaccagacgtttgtgttcacaacaatacatggtgaacctagacttttcagaccaactggtgcaaacagattctactatttgtgcttgaataatgctttagcatttggaggtggtggaagcttcgcattgtgtgttgatgaagatctgttacatggaagcagtggatcatgtgagacatttggaaactcatgtttggcatatagtccagagtttgaactaaagaatgtggagttatggggattcacacattcatggagccgatcgacataaccgatgctagttgtcttcatttgtgacctggcaacagatggaaaggggcatgaaaatgctaggtggaactgttaggggaattcactgtcacttggggctggtttggtttcaagggaattggaggggattcaccaaaccagccctcggagatttgtactcccagttctcttgtttggcttgtggattgaattaaatattgagagctggacaaggaattcatatccttctgtttggtgagtgggatttggagtggtgccgtaagtcatgatgcgcacacatcttccacttaatgcccaatcaccacctatctctgtctaaacttctcatcacgtcaatattttcaaacccattaaacccttgtctcgaatctttccatttcctcccaccaattacctctaaccacacacaacgtggttaatccactgtacatgatcattgtaatgtctagtattcattcacttgattaacacatttcatatttgtacatgcctctctgttcagtgtaattactttgaatcaacttgccttcttggagccgtgtgcctgaagtgcattcttcagcatggaaaaaaactgtgatgatagatattaaaacgaagtattgtgtgttattcagtgaattcatgc

SEQ ID NO: 140205 - DNA, 1826 bp, Zea Mays
gtcaggcgtgtgccatcaaccaagcttgaaacttcttcccttctctttcccttctcctcccgccgccctcgcgctctcgcttcctctccacgaccgtcacaaccaccgccaccgccacctcctcgcgcgggggcaactgtgaggtgagggcgaggcggggcgatgctggcgtggaaggagaaggtggcggaccgtctcgcccgcctgctcgccgactcccctgtctctccctcccctgctcaggccgccgtcgagccatcgcaggctaaatcttttccaccagaacattttactccccccaagacatcatcattatcttcgtatgtattttcccttctaccaacctcaaacacagggcatgagcagaattcaccttgttcagagactttgagaccattacctcctgaatcacttcctaaaaaatggagatggagtgatgtaacttggaaagatcctcccgtggaattgagtgaggagtctgggtctgaaagtgatagagatgaaaggaatgggaattttggtaacgacccagtccttcagtcatataggcccataaataactcaaatggcaatgaggaaacatcgacttcagattgtgtgggcactcttcgttatctaactgaaaagtctatgtttgtgtctccaaaactatttgcattctttcaatcttctctccctgggactttgaaggggtgccactgggtattgctatataggtaacgtgttagtcacattgtcactcttgcagttttttttctgtgaaaataccctgtttaatgtttatatgcatacttctaattcttccttgttttttaacaactgaagcacagcacctggaagcatgggatatctctgagaacacttcttcgtagaagtgagaatattcagggtccatgcctattgattgttggagatatgcaaggggctgtgtttggtggcttattgaacagtcctctgcggcccacagagaaaaggaaatatcagggaacaaaccagacgtttgtgttcacaacaatacatggtgaacctagacttttcagaccaactggtgcaaacagattctactatttgtgcttgaataatgctttagcatttggaggtggtggaagcttcgcattgtgtgttgatgaagatctgttacatggaagcagtggatcatgtgagacatttggaaactcatgtttggcatatagtccagagtttgaactaaagaatgtggagttatggggattcacacattcatggagccgatcgacataaccgatgctagttgtcttcatttgtgacctggcaacagatggaaaggggcatgaaaatgctaggtggaactgttaggggaattcactgtcacttggggctggtttggtttcaagggaattggaggggattcaccaaaccagccctcggagatttgtactcccagttctcttgtttggcttgtggattgaattaaatattgagagctggacaaggaattcatatccttctgtttggtgagtgggatttggagtggtgccgtaagtcatgatgcgcacacatcttccacttaatgcccaatcaccacctatctctgtctaaacttctcatcacgtcaatattttcaaacccattaaacccttgtctcgaatctttccatttcctcccaccaattacctctaaccacacacaacgtggttaatccactgtacatgatcattgtaatgtctagtattcattcacttgattaacacatttcatatttgtacatgcctctctgttcagtgtaattactttgaatcaacttgccttcttggagccgtgtgcctgaagtgcattcttcagcatgg

SEQ ID NO: 140206 - DNA, 1685 bp, Zea Mays
gtcaggcgtgtgccatcaaccaagcttgaaacttcttcccttctctttcccttctcctcccgccgccctcgcgctctcgcttcctctccacgaccgtcacaaccaccgccaccgccacctcctcgcgcgggggcaactgtgaggtgagggcgaggcggggcgatgctggcgtggaaggagaaggtggcggaccgtctcgcccgcctgctcgccgactcccctgtctctccctcccctgctcaggccgccgtcgagccatcgcaggctaaatcttttccaccagaacattttactccccccaagacatcatcattatcttcgtatgtattttcccttctaccaacctcaaacacagggcatgagcagaattcaccttgttcagagactttgagaccattacctcctgaatcacttcctaaaaaatggagatggagtgatgtaacttggaaagatcctcccgtggaattgagtgaggagtctgggtctgaaagtgatagagatgaaaggaatgggaattttggtaacgacccagtccttcagtcatataggcccataaataactcaaatggcaatgaggaaacatcgacttcagattgtgtgggcactcttcgttatctaactgaaaagtctatgtttgtgtctccaaaactatttgcattctttcaatcttctctccctgggactttgaaggggtgccactgggtattgctatatagcacagcacctggaagcatgggatatctctgagaacacttcttcgtagaagtgagaatattcagggtccatgcctattgattgttggagatatgcaaggggctgtgtttggtggcttattgaacagtcctctgcggcccacagagaaaaggaaatatcagggaacaaaccagacgtttgtgttcacaacaatacatggtgaacctagacttttcagaccaactggtgcaaacagattctactatttgtgcttgaataatgctttagcatttggaggtggtggaagcttcgcattgtgtgttgatgaagatctgttacatggaagcagtggatcatgtgagacatttggaaactcatgtttggcatatagtccagagtttgaactaaagaatgtggagttatggggattcacacattcatggagccgatcgacataaccgatgctagttgtcttcatttgtgacctggcaacagatggaaaggggcatgaaaatgctaggtggaactgttaggggaattcactatttgtactcccagttctcttgtttggcttgtggattgaattaaatattgagagctggacaaggaattcatatccttctgtttggtgagtgggatttggagtggtgccgtaagtcatgatgcgcacacatcttccacttaatgcccaatcaccacctatctctgtctaaacttctcatcacgtcaatattttcaaacccattaaacccttgtctcgaatctttccatttcctcccaccaattacctctaaccacacacaacgtggttaatccactgtacatgatcattgtaatgtctagtattcattcacttgattaacacatttcatatttgtacatgcctctctgttcagtgtaattactttgaatcaacttgccttcttggagccgtgtgcctgaagtgcattcttcagcatggaaaaaaactgtgatgatagatattaaaacga

SEQ ID NO: 140207 - DNA, 717 bp, Zea Mays
ctctgctctcttatcttctttccagcgcgcgtaggcttcctctgggattttttgcttgccgacttaatcttccagctgagcgtagagcttcttcctcctcagccatcgcccaagtcttcttcttctacgcgcacagggttctcctctgcgcatcctctgcctctcccagcgccgtggcttctctgagttcgtcgctggacacgcaccgtcctctgctcgttcggtgcccctctctccaagcttccatggcggcgttcccatggcgccttggagccccagctcagccgacggccgggaggacgcgctgggtctccctctgctcggtcgtctccctcctcccgctccagctcccctgtgtgccgtggatctcgcgcccctgcccaagtccggctgcctggttctgtccagttcgcgtcctgctcgcctttacgtcgcggttgtagcgttccgttgtttctgcgcgtgcggccgcgaagctccctgttcagttcgcctccgtcgccttgtcgtgcgcgcgaaattgctcgcagtccatatcaagtccgtgatgtgcgcgctggacacgatgaaatgctgcgtgtcgtgcgtcgtccatcctaggtcctcatcgtcgcgtcgttcgccttcgcactatgtgcgacagcaccgtcgttttccctgtcttgtactcgcatggtttcctgctcgccggtgcgccctctcggctcgcttggcctt

SEQ ID NO: 140208 - DNA, 1597 bp, Zea Mays
ctcgactctcgcgtgcagagtgagcgcagcggtccaccacgcgaaaggccgactccagttctccccctcgcctcacatctcattcctctcctctctcctccccccctctcgctcgagctctgttggaggcaggagggcaggccagggcgccaggccaggcgaggtggttcggttgacgagttcttcctcttcctcgacatcgccgatcccgccacgcgctgcccgcagcggaggtgagacacaataatcttagatggagaggttaagcaccaaccagctctacagttctggtgttcctgtaaccgtaccaacatctctgccttgtataccagtctctctggatgagagcttcccgaggcttcccgatgcacagagtgttttgatggagagagaattgaggagcactccactaccacctcaccagacaactgttgctcctatccgtggtctgtttcactccaatactggatctgttggtcctttgtgctcacctccgtctgtaaggttctcttcgcattcaaatcctgagcaataccccaaccacaattcatacaattctcaagtaccaagcactgcaagttcctcaacgctgaattatgggtcacaatatggaggctttgaaccatccataaccgatttcccaagagacattgaaccaacttggtgccccgatccagttgagagcattcttggatactctggtgatgtccctgctgggaataatttgactgggaccacttctattggagcttcagatgatcttactaagcaaactgaatggtggacagagtttatgaatgaggattggaaggacatggttgataacccgacttccacagaaactcaaccggttgggcaacctgtgcaatcatccaactcagttcaccaatcagctacccaacaaacagtttcatctcaatctgttgaaccgttggcagttgtggcaccctcacccactgctggctccaatactggcaaggcacgcatgagatggactcctgagcttcacgagcgctttgtggatgctgtcaatatacttggtggcagtgaaaaagcaactcctaagggtgtcctgaagctaatgaaggcagacaatttgaccatttatcatgtaaaaagtcatcttcagaaatacagaacagctagatacagaccagagttatctgaaggctcttctgaaaagaaagtggcatcaaaagaagatataccatctattgacttgaaagggagttttgatctcactgaagcacttaggctccagttggaacttcaaaagcggcttcatgaacagcttgagatacaaagaagtttgcagctaagaatcgaggaacaagggaagtgtcttcagatgatgctagagcagcagtgcatacccggggcagaaaaggcgcaggatgcttcaaccgctgcagatgaattgaggtcaccttctgagattccagaatcttctaccgtcaaggaagttccagaaaacagtcaaaatggatcaaccaagcaaacaagcttaaatcaagttgtttttgtccttccgtgggaacagatgaacgctatagttaacttccttgcaaagcctggctaggtgcatgtaactaggagt

SEQ ID NO: 140209 - DNA, 2126 bp, Zea Mays
ctcgactctcgcgtgcagagtgagcgcagcggtccaccacgcgaaaggccgactccagttctccccctcgcctcacatctcattcctctcctctctcctccccccctctcgctcgagctctgttggaggcaggagggcaggccagggcgccaggccaggcgaggtggttcggttgacgagttcttcctcttcctcgacatcgccgatcccgccacgcgctgcccgcagcggaggtgagacacaataatcttaggtgaggagcatagttcaaaagtcaagatagaaagggcattggacactggaggaacgttgtgttggtggtaactgaggtttgtgcttgtttgtagatggagaggttaagcaccaaccagctctacagttctggtgttcctgtaaccgtaccaacatctctgccttgtataccagtctctctggatgagagcttcccgaggcttcccgatgcacagagtgttttgatggagagagaattgaggagcactccactaccacctcaccagacaactgttgctcctatccgtggtctgtttcactccaatactggatctgttggtcctttgtgctcacctccgtctgtaaggttctcttcgcattcaaatcctgagcaataccccaaccacaattcatacaattctcaagtaccaagcactgcaagttcctcaacgctgaattatgggtcacaatatggaggctttgaaccatccataaccgatttcccaagagacattgaaccaacttggtgccccgatccagttgagagcattcttggatactctggtgatgtccctgctgggaataatttgactgggaccacttctattggagcttcagatgatcttactaagcaaactgaatggtggacagagtttatgaatgaggattggaaggacatggttgataacccgacttccacagaaactcaaccggttgggcaacctgtgcaatcatccaactcagttcaccaatcagctacccaacaaacagtttcatctcaatctgttgaaccgttggcagttgtggcaccctcacccactgctggctccaatactggcaaggcacgcatgagatggactcctgagcttcacgagcgctttgtggatgctgtcaatatacttggtggcagtgaaaaagcaactcctaagggtgtcctgaagctaatgaaggcagacaatttgaccatttatcatgtaaaaagtcatcttcagaaatacagaacagctagatacagaccagagttatctgaaggctcttctgaaaagaaagtggcatcaaaagaagatataccatctattgacttgaaagggagttttgatctcactgaagcacttaggctccagttggaacttcaaaagcggcttcatgaacagcttgagatacaaagaagtttgcagctaagaatcgaggaacaagggaagtgtcttcagatgatgctagagcagcagtgcatacccggggcagaaaaggcgcaggatgcttcaaccgctgcagatgaattgaggtcaccttctgagattccagaatcttctaccgtcaaggaagttccagaaaacagtcaaaatggatcaaccaagcaaacaagtatgcacatctatatgaccgaaaggttttagcttatggttgtgtgacgacgaggcacacagatcactgatgtttcttgccttttgtttcagaataagctaagggccgatgaagttgcaagcatgaaatgtgtttcatgatccgattggctgtttccaggcttaaatcaagttgtttttgtccttccgtgggaacagatgaacgctatagttaacttccttgcaaagcctggctaggtgcatgtaactaggagttagttgtatattacctaccctcacggtatcactgaatcccagtgttatgcggatgatgtagtcttcagaagacagcgcaagcacattgtcaggggtttgacttgttttgccccccattacttaggtatcaagtagcgtctcctaggcatttgattatgggctaattcaagtgtttacaataatgtttagcacctgttgtttaaaacatgtcatggtaccaaatatgacgaagatgtattgcatttatatgagagaatgagagatttgaactgcttt

SEQ ID NO: 140210 - DNA, 2056 bp, Zea Mays
ctcgactctcgcgtgcagagtgagcgcagcggtccaccacgcgaaaggccgactccagttctccccctcgcctcacatctcattcctctcctctctcctccccccctctcgctcgagctctgttggaggcaggagggcaggccagggcgccaggccaggcgaggtggttcggttgacgagttcttcctcttcctcgacatcgccgatcccgccacgcgctgcccgcagcggaggtgagacacaataatcttaggtgaggagcatagttcaaaagtcaagatagaaagggcattggacactggaggaacgttgtgttggtggtaactgaggtttgtgcttgtttgtagatggagaggttaagcaccaaccagctctacagttctggtgttcctgtaaccgtaccaacatctctgccttgtataccagtctctctggatgagagcttcccgaggcttcccgatgcacagagtgttttgatggagagagaattgaggagcactccactaccacctcaccagacaactgttgctcctatccgtggtctgtttcactccaatactggatctgttggtcctttgtgctcacctccgtctgtaaggttctcttcgcattcaaatcctgagcaataccccaaccacaattcatacaattctcaagtaccaagcactgcaagttcctcaacgctgaattatgggtcacaatatggaggctttgaaccatccataaccgatttcccaagagacattgaaccaacttggtgccccgatccagttgagagcattcttggatactctggtgatgtccctgctgggaataatttgactgggaccacttctattggagcttcagatgatcttactaagcaaactgaatggtggacagagtttatgaatgaggattggaaggacatggttgataacccgacttccacagaaactcaaccggttgggcaacctgtgcaatcatccaactcagttcaccaatcagctacccaacaaacagtttcatctcaatctgttgaaccgttggcagttgtggcaccctcacccactgctggctccaatactggcaaggcacgcatgagatggactcctgagcttcacgagcgctttgtggatgctgtcaatatacttggtggcagtgaaaaagcaactcctaagggtgtcctgaagctaatgaaggcagacaatttgaccatttatcatgtaaaaagtcatcttcagaaatacagaacagctagatacagaccagagttatctgaaggctcttctgaaaagaaagtggcatcaaaagaagatataccatctattgacttgaaagggagttttgatctcactgaagcacttaggctccagttggaacttcaaaagcggcttcatgaacagcttgagatacaaagaagtttgcagctaagaatcgaggaacaagggaagtgtcttcagatgatgctagagcagcagtgcatacccggggcagaaaaggcgcaggatgcttcaaccgctgcagatgaattgaggtcaccttctgagattccagaatcttctaccgtcaaggaagttccagaaaacagtcaaaatggatcaaccaagcaaacaaaataagctaagggccgatgaagttgcaagcatgaaatgtgtttcatgatccgattggctgtttccaggcttaaatcaagttgtttttgtccttccgtgggaacagatgaacgctatagttaacttccttgcaaagcctggctaggtgcatgtaactaggagttagttgtatattacctaccctcacggtatcactgaatcccagtgttatgcggatgatgtagtcttcagaagacagcgcaagcacattgtcaggggtttgacttgttttgccccccattacttaggtatcaagtagcgtctcctaggcatttgattatgggctaattcaagtgtttacaataatgtttagcacctgttgtttaaaacatgtcatggtaccaaatatgacgaagatgtattgcatttatatgagagaatgagagatttgaactgctttagtttggtctccgaccataaca

SEQ ID NO: 140211 - DNA, 1101 bp, Zea Mays
catctcattcctctcctctctcctccccccctctcgctcgagctctgttggaggcaggagggcaggccagggcgccaggccaggcgaggtggttcggttgacgagttcttcctcttcctcgacatcgccgatcccgccacgcgctgcccgcagcggagacacaataatcttaggtgaggagcatagttcaaaagtcaagatagaaagggcattggacactggaggaacgttgtgttggtggtaactgaggtttgtgcttgtttgtagatggagaggttaagcaccaaccagctctacagttctggtgttcctgtaaccgtaccaacatctctgccttgtataccagtctctctggatgagagcttcccgaggcttcccgatgcacagagtgttttgatggagagagaattgaggagcactccactaccacctcaccagacaactgttgctcctatccgtggtctgtttcactccaatactggatctgttggtcctttgtgctcacctccgtctgtaaggttctcttcgcattcaaatcctgagcaataccccaaccacaattcatacaattctcaagtaccaagcactgcaagttcctcaacgctgaattatgggtcacaatatggaggctttgaaccatccataaccgatttcccaagagacattgaaccaacttggtgccccgatccagttgagagcattcttggatactctggtgatgtccctgctgggaataatttgactgggaccacttctattggagcttcagatgatcttactaagcaaactgaatggtggacagagtttatgaatgaggattggaaggacatggttgataacccgacttccacagaaactcaaccggtacgctagttaattatgccatttttggtgggtggactttttgtactcccgtttgtgcttagtatttcctagctgtacgttgatgccaaatccacaaatctgtaatcatattgttgttgtcctacaggctacacgtcctgttttttcccaaaacaaatgctttgtaatcttattttcattatatcttgtttgtattgatatgatataacaaatctacacttggaaatcttaaaaaga

SEQ ID NO: 140212 - DNA, 1666 bp, Zea Mays
ctctctcctccccccctctcgctcgagctctgttggaggcaggagggcaggccagggcgccaggccaggcgaggtggttcggttgacgagttcttcctcttcctcgacatcgccgatcccgccacgcgctgcccgcagcggagacacaataatcttaggtgaggagcatagttcaaaagtcaagatagaaagggcattggacactggaggaacgttgtgttggtggtaactgaggtttgtgcttgtttgtagatggagaggttaagcaccaaccagctctacagttctggtgttcctgtaaccgtaccaacatctctgccttgtataccagtctctctggatgagagcttcccgaggcttcccgatgcacagagtgttttgatggagagagaattgaggagcactccactaccacctcaccagacaactgttgctcctatccgtggtctgtttcactccaatactggatctgttggtcctttgtgctcacctccgtctgtaaggttctcttcgcattcaaatcctgagcaataccccaaccacaattcatacaattctcaagtaccaagcactgcaagttcctcaacgctgaattatgggtcacaatatggaggctttgaaccatccataaccgatttcccaagagacattgaaccaacttggtgccccgatccagttgagagcattcttggatactctggtgatgtccctgctgggaataatttgactgggaccacttctattggagcttcagatgatcttactaagcaaactgaatggtggacagagtttatgaatgaggattggaaggacatggttgataacccgacttccacagaaactcaaccggttgggcaacctgtgcaatcatccaactcagttcaccaatcagctacccaacaaacagtttcatctcaatctgttgaaccgttggcagttgtggcaccctcacccactgctggctccaatactggcaaggcacgcatgagatggactcctgagcttcacgagcgctttgtggatgctgtcaatatacttggtggcagtgaaagtgcgtactgcttgcagacatatgtctcccatgattgattcgttttgacattttccttaaattgttgcagaagcaactcctaagggtgtcctgaagctaatgaaggcagacaatttgaccatttatcatgtaaaaagtcatcttcagaaatacagaacagctagatacagaccagagttatctgaaggctcttctgaaaagaaagtggcatcaaaagaagatataccatctattgacttgaaagggagttttgatctcactgaagcacttaggctccagttggaacttcaaaagcggcttcatgaacagcttgagatacaaagaagtttgcagctaagaatcgaggaacaagggaagtgtcttcagatgatgctagagcagcagtgcatacccggggcagaaaaggcgcaggatgcttcaaccgctgcagatgaattgaggtcaccttctgagattccagaatcttctaccgtcaaggaagttccagaaaacagtcaaaatggatcaaccaagcaaacaagcttaaatcaagttgtttttgtccttccgtgggaacagatgaacgctatagttaacttccttgcaaagcctggctaggtgcatgtaactaggagt

SEQ ID NO: 140213 - DNA, 93 bp, Zea Mays
gtttcttcttgcatacttgtctcttcgatttattcgtcgctcgggaatcatgagcaaataagaagaatagaatcaagttcatctcatcaaaaa

SEQ ID NO: 140214 - DNA, 879 bp, Zea Mays
atggggagcaagggggtggcgctcgcgctgctgctctgccttagcggcgcggccgtgggcgcgtgggctcgcccggtcgccaccaaggacgctgctgccgacgagaagttcctgtggctcaagaagcactttggcaagggtggtggcggcttgggaggcggcggcggaggtggcggcgggctgggtggtggtgttggccacggcttcggaaaaggtggcggccttggcggtggcatcggccatggtcttggtggtggctatggtaaaggtggaggtcttggtggtgggatcggccatggcattggcggagggtatggtaagggtggtggctttggaggaggaatcggccacgacattggtggaggcattggccatggcatgggcggtggctacggcaagggtggagggattgaccatggcatcagcggtggctatggaaaaggcggtggccttggtggtggatatggcaaaggtggcggactcggaggcgacattggccatggcatgggtggaggccatggcaaaggtggtggaattgggcatggcatgggtggtggattcggcaaaggcggtggtggtcttggcggcggtagtggctacggtgctggtggcggcgggggccttggtggtggaagtggacatggcatgggtgccggattcagcaagggtggtggtcttggcggcggcgatggccttggcggtggaagtgggcatggcatgggtgccggattcggcaagggtggtggtcttggtggcggcggcggcggaggtggtggcggtgggtttggcaaaggatttggctttgggtttggcaaaggcagcgggttcggtggtggtggcggcggtgggggcggcggcggcatcggtgatcaccattga

SEQ ID NO: 140215 - DNA, 169 bp, Zea Mays
atgtgtcgacaaccgtacactaatcagctaatcctttttagcgatatcgataagtctctgttgtatgtttgcagggatgacatatcggcacgaattgtcctcataacttaacagatcaatcacaaaattacttcgaagaatctttgcatcctatagacaaagacataag

SEQ ID NO: 140216 - DNA, 123 bp, Zea Mays
atggcacggctggttgggttggccacttcgagcttttcgcttgccatgaacatgaagcttgcaccggacaggacgaacaagttcatggagatcatcagcgtggttcaggcgcatcaacgctga

SEQ ID NO: 140217 - DNA, 1382 bp, Zea Mays
aaacaatttggcataagatacatctccccttctcacccaaccctccaagcaacattgaccgcaaagggccatccgctgcggtcagtgtaggtttctgaatcatagcttggcgatgcctgaggctagacaaatactgagctagccttcagaaaaaaaagaaaagaaagagattgagaagcagggagaaaaaatggcactggcccattgaggaagcttgagaaccagttaacaagaattgccaacatattcttggacaatcttgttaacagagttttaaggtttcccagcagacatttttcgagtccaggaagagcgcgtgcaaccaccacattcatataattaataagcaaggtttagagaagaggcaacatgggcacaaagatgaagaaggggatcctgaagccgttccgctatatctcaaccatcatggatggtaaggaggctgaaatgcaaattgggttcccgacggatgtaaaacacgtggcacatattggttgggatggtcctggctccacgaacaacaacaacaataacaacagcaacaacaatagtggcggagcacctagctggatgaaggattaccactcggcaccgcttgactcgtcctcttttaggagtgagagtgggggcacggctgctgcaaatccctgggcttctcaagagatagtcatggatggagcaagcgtcggagaaacctccttcagggacacgaaaagcgaggcaggcgtcgacgtcggcgggggcgactccccaccgtcccccgccacccgccggtcgagacggcaccgctctcggggctccggcacctcatccatggacgccaccggcggcgagggcgaggagaagactaaggagaagagcaagaagggcacccgaaagaaccgcaagaagcaggacaagtcggccggcgacgacgcctcgggcacatgccaggacctccccgccgttcccaagaagtccaaccgccggaaaaacaagggaagctccgaggggagcggtagcgccgcggccaaggacaccaccgcggccgcgccggaggaggtggcggcgtcggcgtcggcgaccgcacccgccgtggacgacgactagggatatataatccaagttgctgcggcctcgtataagaacttttggagatgaaattaacatgccgaaaggtacttaatcatatggtattcagaagggcacgtgcaatggggagttcaaggtcacgtacattagcattctcaggagtgggtgtgcacgcacaaatgccatttttttctctctgtttctttctctaatattgatccgcttttttgtggacatgttatctcgttcaagatttcgtatataaactaatactttgggcgggatatataaatctgtctcactcatttata

SEQ ID NO: 140218 - DNA, 1432 bp, Zea Mays
aaacaatttggcataagatacatctccccttctcacccaaccctccaagcaacattgaccgcaaagggccatccgctgcggtcagtgtaggtttctgaatcatagcttggcgatgcctgaggctagacaaatactgagctagccttcagaaaaaaaagaaaagaaagagattgagaagcagggagaaaaaatggcactggcccattgaggaagcttgagaaccagttaacaagaattgccaacatattcttggacaatcttgttaacagagttttaaggtttcccagcagagaagagcgcgtgcaaccaccacattcatataattaataagcaaggtttagagaagaggcaacatgggcacaaagatgaagaaggggatcctgaagccgttccgctatatctcaaccatcatggatggtaaggaggctgaaatgcaaattgggttcccgacggatgtaaaacacgtggcacatattggttgggatggtcctggctccacgaacaacaacaacaataacaacagcaacaacaatagtggcggagcacctagctggatgaaggattaccactcggcaccgcttgactcgtcctcttttaggagtgagagtgggggcacggctgctgcaaatccctgggcttctcaagagatagtcatggatggagcaagcgtcggagaaacctccttcagggacacgaaaagcgaggcaggcgtcgacgtcggcgggggcgactccccaccgtcccccgccacccgccggtcgagacggcaccgctctcggggctccggcacctcatccatggacgccaccggcggcgagggcgaggagaagactaaggagaagagcaagaagggcacccgaaagaaccgcaagaagcaggacaagtcggccggcgacgacgcctcgggcacatgccaggacctccccgccgttcccaagaagtccaaccgccggaaaaacaagggaagctccgaggggagcggtagcgccgcggccaaggacaccaccgcggccgcgccggaggaggtggcggcgtcggcgtcggcgaccgcacccgccgtggacgacgactagggatatataatccaagttgctgcggcctcgtataagaacttttggagatgaaattaacatgccgaaaggtacttaatcatatggtattcagaagggcacgtgcaatggggagttcaaggtcacgtacattagcattctcaggagtgggtgtgcacgcacaaatgccatttttttctctctgtttctttctctaatattgatccgcttttttgtggacatgttatctcgttcaagatttcgtatataaactaatactttgggcgggatatataaatctgtctcactcatttatatcatatgtattatatatgcgtttttgttatgcaatatatatatgcagctcaatgcgtgttttcaga

SEQ ID NO: 140219 - DNA, 4131 bp, Zea Mays
atgtcgggagatcacgccaagaaggagatggagaccggcgaaaagcccactacaagccatgggagcacttcatcggaagagtcccgcaccaagagaaaggagaagaagaactcctccaaagggaaggagaagaagtcttcttcacaccaaaaggagaagaaggagaaatccgcttctcacaagacgcgtcgaagtggggacaagaaaaagaggatgaggaaagtggtctactacgagaccgattcttcatcgccatccacctccggctccgacgcggcatccgtcacttctaagcgccaagagcgcaagaagtatagtaagatccccctacgctaccctcgcatttccaaacatacacctttgctttccgtcccattaggcaaaccaccaacatttgatggtgaagattacgctaggtggagtgatttaatgcgatttcatctaacctcactccacaaaagcatatgggatgttgttgagtttggtgcacaggtaccatccgtaggggatgaagactatgatgaggacgaagtggcccaaatcgagcacttcaactctcaagctacaaccatactcctcgcttctctaagcaaggaggaatacaacaaagtacaagggttgaagaatgtaaaggagatttgggacttactcaagaccgcgcacgagggtgatgaactcaccaaaatcaccaagcgggaaacgatcgagggggagctcggtcgcttccgtcttcgccaaggggaagagccacaagatatgtacaaccggctcaaaaccttggtgaaccaagtgcgcaacctcgggagcaaaaagtgggatgaccacaaggtggttaaggttattctaagatctcttattttccttaaccctactcaagttcaattaatccgtggcaacccaagatatacactaatgactcccgaggaagtaatcgggaattttgtgagctttgaatgtatgattaaaggctcaaagaagattaacgagcttgatgaaccctccacgtccgaagcacaaccggtggcatttaaggcgacggaggagaagaaggaggagtctacaccgagtagacaaccaattgacgcctccaagctcgacaacaaggagatggctttaatcatcaaaagctttcgccaaatcctcaagcaacggaaggggaaggactacaaatcccgttccaagaaggtttgttacaaatgtggtaagcccggtcactttatgctaaatgtcccattatcaagtgacagtgacagggataacgacaagaaaggcaaagaggagagaaaagaagaggacgccgccaacatcgccgtcaccaagggactcctcttccccaacgtcggccacaagtgcctcatggcaaaggacagcaaaataaagaaggttaaatctaaatcctccactagatatgagtcctctagtgatgataatgctagtgatgaggaagataatttgcgcaccctttttgcaaaccttaacatggaacaaaaggaaaaattaaatgaattgattagtgccatccatgagaaggatgatctcttggactcccaagaggacttcctaatcaaggaaaataaaaagcatgttaaggttaaaaatgcttatgctctagaaattgagaaatgtgaaaaattatctagtgagctaagcactttccatgagacgatagacaaccttagaaatgaaaatgctaatttgttagctaaggttgattctcatgtttgtaatgtttcaacttccaatcctagagatgttaatttgcttgctaggattgaagaattgaacatttctcttgctagccttagaaatgaaaatgaaaaattgcttgctaaggttaaagattttgatatttgcaatgctactatttccaaccttagaagtaaaaatgaaatattgcatgctaagtgggagacgcctggcattaaggatggcattggcttccaaaagggggacaatgtcaaacttaatgcccctcctaagaaattatctaattttgttaagggcaaggctcccatgcctcaggataacgagggttacattttataccctgccggttatcccgaggacaagattaggagaattcactctaggaagtctcactctggccccaatcatgcttttatgtataagggtgagacatctagttttaggcaaccaacccgtgctaagttgcctaagaaaactcctattgcatcaaatgatcatgacatttcatttaaaacttttgatgcatcttatgttttgactaacaaatccggcaaagtagttgccaagtttgttgggggcaaacacaagggctccaagacttgtgtttgggtttatgcatccgggggctcaagttggatactcgacagcgggtgcacaaaccatatgacaggggagaagaagatgttctcctcctacgagaaaaaccaagatccccaacgagctatcacattcggggatggaaatcaaggtttggtcaaaggtcttggcaaaatagctatatctcctgaccgttctatttccaatgtttttcttgtagattcattggattacaatttgctttctgtatctcaattatgcaaaatgggctacaactgtcttttcactgatgtaggtgtcactgtctttagaagaagtgatgattcaatagcatttaagggagtgttagagggtcagctatacttggtagattttgatagagctgaactcgacacttgcttaattgctaagactaacatgggctggctctggcatcgtcgactagcacatgttgggatgaagaatcttcacaaacttctaaagggagaacacattttaggactaacaaatgttcattttgagaaagacaggaattgtagcgcatgccaagcaggaaagcaagttggtgcccatcatccacacaagaacatcatgacgaccgacaggccgcttgagctactccacatggatctattcggcccgattgcttacataagcatcggcgggagtaagtattgtcttgtaatagtggatgattattctcgcttcacttgggtattctttttacaggaaaaatctcaaacccaagagaccttaaagggattcttgagacgagctcaaaatgagttcggcttaaggatcaagaagattagaagcgacaacggaacggagttcaagaactctcaaattaaaggctttcttgaggaggagggcatcaagcatgagttctcttctccctacactccacaacaaaatggtgtagtggagaggaagaatagaactctattggacatggcaagaaccatgcttgatgagtacaagacttcggatcggttttgggccgaggcggtcaacaccgcttgctacgccatcaaccggttgtatctacaccgaattctcaagaagacatcctatgaacttctaaccggtaaaaagcccaacatttcatattttagagtctttggtagcaaatgctttattcttgttaaaagaggtagaaaatctaaatttgctcctaagactgtagaaggctttttactaggatatgattcaaacacaagggcatatagagtctttaacaagtccactggacaagttgaagtttcttgtgacgttgtgtttgatgagactaacggctctcaagtagagcaagttgatcttgatgagataggtattgaagaggctccgtgcatcgtgctaaggaacatgtccattggggatgtgtgtcctaaggaatccgaagagcctccaaatccacaagatcaaccatcctcctccacgcaagcatctccaccaactcaaaatgaggatgaggctcaagttgatgaagtagaagatcaagcaaatgagccacctcaagatgacgacaataatcaagggggagatgcaaatgatcaagacaaggaggatgaagaacaaaggccgccacacccaagaaaccccaacttacatttggctcctgggccccaaattcctggagagggccctgactccggggttgttagctgttcagctaaatcgcgaaccaggagaccgttaacaaataccgcaacccacatcaataaccgatcagttccccattcaacgctaagcgagcaagctcatgagcacgcctattacaagaccgattacaatgatcaaaactcaacattgaaaaagaaagattag

SEQ ID NO: 140220 - DNA, 720 bp, Zea Mays
atgggctccgtcatcggcacggcggtctatggcgttggctcgctcgtcgggaacgtcatctcgtcgccgttcaacggcgccgcctgcgagcgcgtttgctcggggacatgggacatgctctgcttcatcgcgtacctctgcatcaaaaggttactcaatttcttcttggctgtcatactcgtcctcgtcgtgctctacgccatttatatcctatgcaagataggcgtcgtcaagtgcctggcgaagaacgcctgcaaggtggtgtgcatgcccttctggggctgctgccgcgtgctctgccacctctggcgcaaggtgctcgacaccgagcgggtgtaccgcggccggcgcggccagcgccagcccggcgacatcgaggtcggggacctcagcacgaacagctacggctacagtggctcgttgtcgccgtcatcctccgattacaatggccaccgtgggggcgccgtgccggccagatccaaattggaatcgtcggcggcgcgggagaggaggaaggacaggttgcggcagtccctgcgcccgaggagggccaactccaaggtagagcacgccgtgagaataagccgtgagaatcaaagtgaacgccggcaccagcaccatccccattcgatcggggccagcaaaaagaaggcggcttcgtccgttcacggtcatggctcggcacctcgtgactattcgcatgcgcatcgccgcacatga

SEQ ID NO: 140221 - DNA, 1386 bp, Zea Mays
cacgaggatcctgcctgcgggaccctccactttgttggcatcgcagcaagcagcggcgcggtacggtcgcgtacggggacgggaatacgggatgcgatccaatcggagtgttccagtccagcgagcgcacggccgcgcgacaagccttgctcggcgcggaggaggcaggtgccaactgtgcgtgaatgaggcacgatctgacagccgctggacgtgagatttccggacaggagaaccgcgctgccacacccccccgcacggcccctgcggcgcgatgcgctatccatccatggccacgatccgtccgtgccatgccgatcccgcctgcggctcagcagcgactccacgggccacggccgcgggggggattcaccgcatcgcgatctccgatccgatccgatcccgcccgatcctcgcgccatcttttctttttttttcttcttctatagtgtgtagatagtgtgcatataaatatacccacactgttcctccggtgattgcatcgttggcagcgccattcatccatttgtctttttgatttgttttgacctgagggcaaggcagggcagaacagagagcattcgtctcgatcaaccagatctcgatcaatggaggtggcgggggcttgctgccacgccggcgaggagaggaaggtggctgtgcctatcggcaacgatgcggaggtggagccatgcgtcatcgccgtggacgacagctccgtcgaccgcgccatcgtcaccgcgctcctccggcgctccaagtacagagtcactgcggttgacagcgggaagagggcgctggagatactgggctcggagccgaatgtgagcatgatcatcacagactactggatgccagagatgaccggctacgacctgctcaaaaaggtcaaggagtcttcgaagctgaagcggatcccagtggtgatcatgtcctcagagaacgtgcccaccagaatcaccagatgccttgaggaaggcgcggaggacttcctgctgaagccggtcaggccgtccgacatctcccgcataacaaccaggatgctgctacactgaacttctttcaccagtggccacccaagccaggcgtagtgttttcaattcaagtcacagtagaggtataggaacggagtcaatttagggtagcaattagccgcaggaagtttgatgtaatgtggcctttcattcattagtgcttcgagctttctttggcgtcttactcgatcaagaacaggcagggattagttgtagggttccagttccagaagtagcgactttgttgtcttaagtataacgaatcgtgaaagtgtaaatcactgcacgaatcattctgttaaagaggaacattacaatttacattggcttagccgttttctttttcaactaa

SEQ ID NO: 140222 - DNA, 549 bp, Zea Mays
atggcacgcggcaaggacgcagggcacggcaatagggggctagacttggcgaggaactcgacggcggcgtcacagacgagatccgcgcacgggactgatggacgtgcgcaggacgaacacggccatggactgggcgccgagtgtggatggagcgccgggagatccagaacccgcgcagaaaaatccggcaccgagagcagggaaacaagcagcggacgcaaggaggaagacgccgacgaactggagtcgggcaccgagcgagtagggatcactggtgaggctcggagctttggggagggagggacgttgagggaaaagctcaagcagagccagtggcgcgcgatgggagaggagggcgcgaccagacgctctgagaaggagaccgagctcggcgttgaggactggggcgagctggagcaccgggagaggaggagcaggcgaccgggacgcgagcaagcagggcgcggtggagcacgggccgagcgccatgggagaacgcaggaagaagcagccggcgcggtggagagaagcaagcgatgtcgcggctga

SEQ ID NO: 140223 - DNA, 342 bp, Zea Mays
atgacctatgtgatggggatgaggaattttggcccagcagcagggaatcggacgccgaccaaggagaagcgttctgccacggacgaacacagggagctgcgcggcggcgcgagcagggaaggagcacgcgcgcgcaagggagctcgacggctgggcgagcgccatggaagaaggggaatccaagcgcagggactgagggacgcgcgtaggacgaacacaaccatggactgggcgccgagtgtggagggagcgccgggagatccagaacccgcgcagaaaaatccggcaccgagagcagggaaacaagcagcggacgcaaggaggaagacgccgacgaactag

SEQ ID NO: 140224 - DNA, 4122 bp, Zea Mays
tctttacaggctacacagaaaaacctgcacccaaaagttgtaaagctcaccaagaaccttgcaggataacacaagtgctgaattttggaaatggatcatgggcgttatgctccacaacatggatgggagaacaacagtgcaccaaatgggtatggtgtaattaatgagccagattttaggtctggtggatcctacaatgctaggagatctgtggatgaaggctttcctagagattcatatggaaggggtgcattctatcatgatacacatgatagaaatatgtatgcatcaccaccctctgccggtggaatgtggtctcagcctcgaaggaatcatgatgaggactatgcaactgcaagagaccatagaaggagcaaaaggattggaagcagagaacgggcggagtttcatggtgagtttgaagaccggtaccgcagttctcaccaaagcagggaggacagctatgagagagatcatgaatatggtcgttatggttatgattcggattatgaaagaggcaagagagatagtagctggagaagacgtgattcatgtgacagcgaacgtgaaaggagtggattaagtcgtgaaagagaggaaagcccgtacacgcgccatagccgttctcgatcacatgggcgcgatgaccgatcaagatcacggtctagatcaagatctcctcgtccgagaagtcatggtcggaaccaaagagatggcctgtattatgataatcgatttgacagaagaagggaatatgattgggatgatagggggcatggtgattcagtggctccatctgccactgttgttgtcaagggactgtccctgaagactaatgatgatgacctatataagattcttgctcagtggggacctctacgcagtgtgcgtgtgatcagggaacggaattctggcatgtctcgtggatttgcttttattgacttccccactgtggaagcagcccgtagaatgatggaagctacaggagagaatggtctcgaaattgatggcaggaatgtgttctttcagtacagtagtaaaccaaccggggggatgggtgggccttctcttggacaagaaaattttacgaggcctacttatgggcacaggactgctgctgcaccgtgtgactggatttgtactatatgcggatgtatgaattttgcccgcaggacctcctgctttcagtgcaatgaacctcgtactgaggatgctcttccagctgatgcgacaggttccgcttcacactttgggagaaggggatctgaactaggtccaactcatgttttagttgttcgtggcttggatgaaaatgctgatgaggaaatgcttcggtacgaatttgctaagcacgcaccaataaaggacatccgccttgttcgggataagtttactcatgtgtctagaggttttgccttcgttcatttccattcggtggaagatgctacgaaagctctggaagctacaaacgggattacacttgagaaaaacggtcaggttttgcgtgtagcatatgctaaaagtacacatggacctgcatcagggggttctcagtcaaacagccttgctgcagctgccattgaggctgcatcatttgctcagcagtatgatgccataggttgggctccaaaagagtacaatcctgatgacaaacagaacaacaactctgaatctcaaaaagatggcagcacagcacagtcgggatttgtttgggatgaaaaatctggttactactatgattctgcatctggattctattatgatggaactactggcctttactatgacagcaactctggagtttggtattcatatgatcaacagactcaacaatatgtcccttgtaatgaccagagcaacactaaggcagccggggaggcggccagcgaaaacacgaaaacctcagatagtaatagtggcaaaaaggttgtgatctctgcgcctgctgccacaattaaacaaagtgagaaaacttcacttcctgacgctgttcaagctgctgcaaatgctgcactggctgcagaaaagagagaaaaggagaaggcaaaagagattaaattggcctcaaaaaatagtctcatagctaataagaagatgagcaatgtcctagctatgtggaagcaaaggaatcaagaagggcaggccgcacgaattgtccttgatgacaaagaaccagcaaattctgatgataaatttagtcattcacgtagtggaactggattctctttgaaaagcaagccaaattctgaccttgaaaatgctatgggcaattctcttggccaaggaatgacatcgactcaaacattggattctgttgtaaagcctagacctgtcagtaacagcttagggactacagttatgggtgtcataagaggttctgctagaggagtgatcaagtcagatactacgtttcacgcattatctgatgctggtagcactgattcccgcaccactataaccacaagagcaagtgggttaatgacaagttctgaggcacttataactcctgcacccttcaaaactgatgtgtctgccttagtctctaatactccatcgggagtttctgggagtggtaaacgtcggttttctgaggcaccgggacaatcccagtacagggatcgagctgcagaaagacgaaatctgtatggatcatctcatggcactgatactgttggattggattcaactggtgactatccgtcccgaaagggttcaagtgagatagggtcgatgccgtttcctcctggtgtgggtgaacgttccagtggtgaaattggcaacagcgaaaactatgaagttattaccgctgatagagcaatcgatgaaagcaatgtgggcaaccgcattctacgcaacatggggtggcaggagggactggtaaggtcatctcccacgtatttctcaatttcattgagatgctcaggcttgatagcattttctttacagtatatcatgcatctgatcacgagtgtttatgctctcttatttctcgtgctactgcaaatgcttcggcgaaagggcctgcgtaatggttaaaacttccgagtagcacctccaggtccaggtttgatccccctctggggtgaatttcgggcttggttaaaaaaaatccctcgctgtgccccgcctgctcccggattacgtcctgcacgccaccatatggttgggctgttgcagagtgggcagtgacgacccgctagtaatgggagccaggttcggggattttttctcggccgggaccatgttttggtctcttaatataataccgggagggtgttctttccctccccggctgagtttttttagtgcaaatgctttagactttggaatacggtttatgtatttttttttgaaaaaaggtaaatatgcctatttgtagtatggtagaagtgtgaaatatttttttaatgcaactctggttttagttcaagttgtgtggagcttgttaaggagttagtatcggctagcaaatcttaagcttgtcttgttgatctctttccacaaataactaatgaactgtacctgtgtcttgaatagttgattctgagtcatggctcttcctttgtgtctagactactgtgtaagaatcaagagtcactgagtctttcgcctgagcgagaagatgtttagtgggaatgaatagtttgttggacacaaaaagtgactgaatgcaggggaatcactgtgcccatatttcctacattgtggaaagtgcgaaaatagtgttgtattccttctgatgtgagtgcatttgtattgtttctgtttcttgcaactactacgcaaatatccagggtctcggaaaggatgccagcggtatcaaggaaccagtcctggcaaaatccgtcgacgccagggctggactgggaagtcagcagcggaagcctgatccatcccttgaagcccaagccggggacagctacaaaaccatcatccagaagaaggccatggcaagattcaaggagatgtcttagctacactgttttatctattttattgctgcattttgtagtccgtttttaacagcatgcatttttttgtttgctcgtgtgttttttaaataaactgagccgctgaattgtgatttattatcctgaaaggggcactacatagttcgagacc

SEQ ID NO: 140225 - DNA, 3334 bp, Zea Mays
tctttacaggctacacagaaaaacctgcacccaaaagttgtaaagctcaccaagaaccttgcaggataacacaagtgctgaattttggaaatggatcatgggcgttatgctccacaacatggatgggagaacaacagtgcaccaaatgggtatggtgtaattaatgagccagattttaggtctggtggatcctacaatgctaggagatctgtggatgaaggctttcctagagattcatatggaaggggtgcattctatcatgatacacatgatagaaatatgtatgcatcaccaccctctgccggtggaatgtggtctcagcctcgaaggaatcatgatgaggactatgcaactgcaagagaccatagaaggagcaaaaggattggaagcagagaacgggcggagtttcatggtgagtttgaagaccggtaccgcagttctcaccaaagcagggaggacagctatgagagagatcatgaatatggtcgttatggttatgattcggattatgaaagaggcaagagagatagtagctggagaagacgtgattcatgtgacagcgaacgtgaaaggagtggattaagtcgtgaaagagaggaaagcccgtacacgcgccatagccgttctcgatcacatgggcgcgatgaccgatcaagatcacggtctagatcaagatctcctcgtccgagaagtcatggtcggaaccaaagagatggcctgtattatgataatcgatttgacagaagaagggaatatgattgggatgatagggggcatggtgattcagtggctccatctgccactgttgttgtcaagggactgtccctgaagactaatgatgatgacctatataagattcttgctcagtggggacctctacgcagtgtgcgtgtgatcagggaacggaattctggcatgtctcgtggatttgcttttattgacttccccactgtggaagcagcccgtagaatgatggaagctacaggagagaatggtctcgaaattgatggcaggaatgtgttctttcagtacagtagtaaaccaaccggggggatgggtgggccttctcttggacaagaaaattttacgaggcctacttatgggcacaggactgctgctgcaccgtgtgactggatttgtactatatgcggatgtatgaattttgcccgcaggacctcctgctttcagtgcaatgaacctcgtactgaggatgctcttccagctgatgcgacaggttccgcttcacactttgggagaaggggatctgaactaggtccaactcatgttttagttgttcgtggcttggatgaaaatgctgatgaggaaatgcttcggtacgaatttgctaagcacgcaccaataaaggacatccgccttgttcgggataagtttactcatgtgtctagaggttttgccttcgttcatttccattcggtggaagatgctacgaaagctctggaagctacaaacgggattacacttgagaaaaacggtcaggttttgcgtgtagcatatgctaaaagtacacatggacctgcatcagggggttctcagtcaaacagccttgctgcagctgccattgaggctgcatcatttgctcagcagtatgatgccataggttgggctccaaaagagtacaatcctgatgacaaacagaacaacaactctgaatctcaaaaagatggcagcacagcacagtcgggatttgtttgggatgaaaaatctggttactactatgattctgcatctggattctattatgatggaactactggcctttactatgacagcaactctggagtttggtattcatatgatcaacagactcaacaatatgtcccttgtaatgaccagagcaacactaaggcagccggggaggcggccagcgaaaacacgaaaacctcagatagtaatagtggcaaaaaggttgtgatctctgcgcctgctgccacaattaaacaaagtgagaaaacttcacttcctgacgctgttcaagctgctgcaaatgctgcactggctgcagaaaagagagaaaaggagaaggcaaaagagattaaattggcctcaaaaaatagtctcatagctaataagaagatgagcaatgtcctagctatgtggaagcaaaggaatcaagaagggcaggccgcacgaattgtccttgatgacaaagaaccagcaaattctgatgataaatttagtcattcacgtagtggaactggattctctttgaaaagcaagccaaattctgaccttgaaaatgctatgggcaattctcttggccaaggaatgacatcgactcaaacattggattctgttgtaaagcctagacctgtcagtaacagcttagggactacagttatgggtgtcataagaggttctgctagaggagtgatcaagtcagatactacgtttcacgcattatctgatgctggtagcactgattcccgcaccactataaccacaagagcaagtgggttaatgacaagttctgaggcacttataactcctgcacccttcaaaactgatgtgtctgccttagtctctaatactccatcgggagtttctgggagtggtaaacgtcggttttctgaggcaccgggacaatcccagtacagggatcgagctgcagaaagacgaaatctgtatggatcatctcatggcactgatactgttggattggattcaactggtgactatccgtcccgaaagggttcaagtgagatagggtcgatgccgtttcctcctggtgtgggtgaacgttccagtggtgaaattggcaacagcgaaaactatgaagttattaccgctgatagagcaatcgatgaaagcaatgtgggcaaccgcattctacgcaacatggggtggcaggagggactgggtctcggaaaggatgccagcggtatcaaggaaccagtcctggcaaaatccgtcgacgccagggctggactgggaagtcagcagcggaagcctgatccatcccttgaagcccaagccggggacagctacaaaaccatcatccagaagaaggccatggcaagattcaaggagatgtcttagctacactgttttatctattttattgctgcattttgtagtccgtttttaacagcatgcatttttttgtttgctcgtgtgttttttaaataaactgagccgctgaattgtgatttattatcctgaaaggggcactacatagttcgagacctggatgctttggttcccttgtgtgttagttttcatttgcacgacctatgtgcccgggtgttcataagttgatttgccacaatgtggtcgtagagtctcaacatcaggtcatatcacatatcgttttttt

SEQ ID NO: 140226 - DNA, 407 bp, Zea Mays
aaatattggaccaaggaacaggcccatgaactcgctaaagcgcaggaggcccggctctgttctgatatatcgctccgccgctagggttttcagggatcccgcctcacaccgccgcaaggactcgcgacggacggagcaacggaggaagcaactacgcggcagccatggtgaacgttccgaaaaccaagaagacctactgtaagaacaaggaatgcaggaagcacaccctgcacaaggttacccagtacaagaaaggtaaggatagcctttcagctcaagggaagcgacgttatgaccgcaaacagtctggatatggtggtcagacaaagcctgttttccacaagaagaggtgcaagcactttgagatcggtggtgacaagaaaggcaagggaacctctctgttctaa

SEQ ID NO: 140227 - DNA, 817 bp, Zea Mays
aaatattggaccaaggaacaggcccatgaactcgctaaagcgcaggaggcccggctctgttctgatatatcgctccgccgctagggttttcagggatcccgcctcacaccgccgcaaggactcgcgacggacggagcaacggaggaagcaactacgcggcagccatggtgaacgttccgaaaaccaagaagacctactgtaagaacaaggaatgcaggaagcacaccctgcacaaggttacccagtacaagaaaggtaaggatagcctttcagctcaagggaagcgacgttatgaccgcaaacagtctggatatggtggtcagacaaagcctgttttccacaagaaggcaaaaacaacaaagaagattgtgctgaagctgcagtgccagagctgcaagcactactctcaacacccgatcaagaggtgcaagcactttgagatcggtggtgacaagaaaggcaagggaacctctctgttctaagcgtatcataaacttgctcagggtctcaagtatctgtcagaatttaccattacaaacaccctgtgcttagcttctgcatatgttcttttgtcacatctttttggtacgttgtagtttgtatgagaccaagctattgtttcgtgttattattatatttcatgaaattgtcaacatgaccgtttgcttgactgtaaacatagttctgagctttgggcaaacagtagtttaatttatcgtatccatcttgagactgttgtttgttcgaaatataatggtggaatgacgtcgttaagcgcatggtacgtttgttcgaaagtcttacaatgttacgcgtt

SEQ ID NO: 140228 - DNA, 718 bp, Zea Mays
aaatattggaccaaggaacaggcccatgaactcgctaaagcgcaggaggcccggctctgttctgatatatcgctccgccgctagggttttcagggatcccgcctcacaccgccgcaaggactcgcgacggacggagcaacggaggaagcaactacgcggcagccatggtgaacgttccgaaaaccaagaagacctactgtaagaacaaggaatgcaggaagcacaccctgcacaaggttacccagtacaagaaaggtaaggatagcctttcagctcaagggaagcgacgttatgaccgcaaacagtctggatatggtggtcagacaaagcctgttttccacaagaaggcaaaaacaacaaagaagattgtgctgaagctgcagtgccagagctgcaagcactactctcaacacccgatcaagaggtgcaagcactttgagatcggtggtgacaagaaaggcaagggaacctctctgttctaagcgtatcataaacttgctcagggtctcaagtatctgtcagaatttaccattacaaacaccctgtgcttagcttctgcatatgttcttttgtcacatctttttggtacgttgtagtttgtatgagaccaagctattgtttcgtgttattattatatttcatgaaattgtcaacatgaccgtttgcttgactgtaaacatagttctgagctttgggcaaacaaaataaaaaaaaatct

SEQ ID NO: 140229 - DNA, 617 bp, Zea Mays
aatatccaacaaagtttaacttaaatatcatctaatatccaacaaagttaatctatccatcatcacatcacataagatcatctccattcacacgtacaaatagacaatataacatagaaacagagtacaagtcccttcattatgaacttttacactagaataaattatgagtttaactccttttttacaagcttcaagtggactgtcgttctattttccttctacatgtcagcttcatatgttgcttccacttagcactctgcaagtaccaagtaataccaattgacacacgatttagtttacacaatgtaccaacattttacaactaggaaatatgcactgtatgcacaaagaaaaacccacagccaagcactgtatgcacaaatatgcactgtatgcacaaagatcataaggctatgttccatgtatcctacaagctactttactattcaacggtgcatttatgtaaattggttgtctaatgattttggcacttatgtcaggagcttcaaagtttccaaagtcacgagtgaaaactaaaaaacaataatacaacatggacggaggtaaacaatatgaagatattgttgctaacatgttcttggatggcaatatga

SEQ ID NO: 140230 - DNA, 733 bp, Zea Mays
aagcacccctgcgtctgatgccgtcccttcccatccacatgagacaaatttgaaattgagattaaagtcacatactaccattacattatgtgaaagagttccttttctatttctatatggaggggccctgtcttctgcgatagtgatgggtacatgtgtgccgtcaatggcactaaggcaattttgcattaaaggaagaaatatggaaatatgttgaggacatgtggcaattagcaaaggataattgtgtgtttacagttgtagctcacctggaaaaagggcttgaaccaagaatctgttgcaatcctagcatgagtataagtgagctaggaagcttcataaatcgttgagtaatatgggaactatctcaaaaacttcagatatttttcgatggatagtctccccactatgttgaaaagcctttttgtaacatttggttactggcgttgtgggagatcatatacatgaacatcccaagctgctcctcaatgctaaatcctcttgtgtcatgtagtaaatccccccttctaagaaaatttgatgtggctttgaatatttcgttctccattctaaactcagatttgcaccagctctcatgcccttcaagaatttatttaacctttttagcactggtgagggaggatgtgtggatgggccttttctcttccgagaggtatgggattatagcagggagaacaacaaaaaatagttcatcgtcatcttcctcctcctc

SEQ ID NO: 140231 - DNA, 462 bp, Zea Mays
atggctggggatggcggcactatggacgacggtgaatcgaacgtcggtgcagcggatggaggcatcgcaatcgatccgtcgcggtcatctccccatcgcaatcgccccccatcgacgcagtggatgctggcggcgcagcggatcgaacgttcattaagccaaaattcctgtgcgaaaagaggcggcgtgctgctcgggatagttgcctggcgttcggaggctgggacgagatccccatggaagcttggctcagggttgggccgaaatccctatgctgctgtcttccaaagaggccaaaaaatgtcgcacagattcttcacacccaatgggatgacacgtctttcgacgatggaggtcaccatagacagctggtcacactttgcactagctccacatgctacatatggaatagctcagtgcaccatcaagcataatttttggatgcaggagacttacaggtag

SEQ ID NO: 140232 - DNA, 487 bp, Zea Mays
agtgcagccttgctgatttgaccgagctacgcgtagcagcgccgagcaccaatgcccagccacgcgcgtgcccaagccatgccactgccacgccagaatgcagtagcccgaaaccaccgccactcagtcattcgtccatcgtaatgtctaccattaatggagctccatggcatgcgtttctctggatttatggtgcagctatggccacgggaccgcgtgaagtctgcagccccgactcctctgcttcccctctcctctcctataaaaggcagcatccccttctgcactccctcacagcgttcctccaaccttcttgttaatctctattcatccccaccgttgcgttgcagtcgacgccgtcatataacaccgatcggagctgccgacgcggtttgccgccgacgaggacgccccgaagccgacacagtgcttccgtcaaccttcctccgtgccgtcctctgttcatcgccgtcgttcgagagctccg

SEQ ID NO: 140233 - DNA, 456 bp, Zea Mays
actgcagccttgctgatttgaccgagctacgcctagtagcaccgagcaccaatgcccagccacgcgcgcgcccaagccatgccactgccatgccagacatgcagtagcccgaaaccaccgccacttagtcattcgtccatcgtaacgtctaccattaatggagcttcatggcatgtgtttctctggatttatggtgcagctatagccacgggaccgcgtgaagtctgcagccccgactcctctgcttcccctcttctctcctataaaaggtagcatccccttctgcactccctcacaccattcctccaaccttcctgttaatttatgtttatccccaccgttgcgttgcagtcgaccccgtcgtataacaccgatcggagctgccgacgccctttgccaccggcgaggacgcctcgaagccgacgcagtgcttccgtcaaccttcctccgtgccgt

SEQ ID NO: 140234 - DNA, 141 bp, Zea Mays
ggagaactgcgcctcattatattaagaagaatattaagaagaagaaaagaaacaaaaggtcagagagacctgatacaaaggtctccttaaggaggccaaaaacatagaaaactgaaaaagatccatcaaaacacactcaag

SEQ ID NO: 140235 - DNA, 564 bp, Zea Mays
ttggtggcatggggaaaagtgtgccgacctttgcagcttggaggtctgggggtattgctagccttcctgagctctgttgggccctccgcatgcgatggctttggttgcaaaaaagtgacccaagacgtccttggtctagtctgtccattcaagtccctagcaaagctcgatccttcttctccaaggtgctgatttctgaggtggggaatgggatcaacaccatgttttggacagataaatggatcccagatattgctcccagattatttagcattgtcccaaaaagaattactaacagaaggactgtgcagcaggctctattgaacagacgatggattgcagacatcaaaggggctcttacagttgaagccattgtagattatctacacctttggaatatcctcgcatattttgtgctgcaacctaacaggctaacactgaggatagacacatttcagcttatcatcgaatggcagctactctgcaaagtcagcttatactgggtttttcttagggtctaccacctttgggcactataaaagggtttggagatcttggattctt

SEQ ID NO: 140236 - DNA, 360 bp, Zea Mays
atgctggtcacgaccagagcaaggtacgttggcagccatgcggtgctgcagctcctcctcaggggtttccacgccatcatcgtcgacaacattcacaactccaagcttgttggcccacgccagggaaggaatcgggggaagaggacaacacgttggcggatctgttgggcaaaaagccacacgggggaggtggatccttcggggcaagaaagtcgtgccaagggaggtggagccgccgagatgggagccgggcaaccatgccaactgggagggtggagcttcgggtgtccgcatgatgagaaggcattggacgagcacccttctatacgaaaccgaaaagataatttgccgaaactgtaa

SEQ ID NO: 140237 - DNA, 531 bp, Zea Mays
atggaaaagagtcggatctgctgcccacctgcaggggacgtgctggagacaaggcgactagagggagcttgcggccctagaagtcgcagggaacaggggcgccaaggagggaatggagcagagagcgtcgctgggaaggggcgctcagctaggggagggaaacaagggcgccatgggcgacggcgagctcactgctcgagctgggggctgcaggggaaatccggctgcgaggagctacgcttccgggagagggagccgagcagagacgtcgcgacatggggaggggacaacagagctgctgggcgtcatggggataggctcctgttgtgcctgctcggactccaagctgccggcggggtggagaaccagcagggagctgcacggctgggaaatatgggcgccattggtttgtttcaagcgctgaaacaatggaggggcagagggctccggctggggagtggtggctcggccacggcaagaacagggaaggggaggctggtcgtcgaccttgggcgcggccagggaaagtag

SEQ ID NO: 140238 - DNA, 107 bp, Zea Mays
aatgcgatatggcttactcgaaggaaccttcttcgagaactctgttacagaggaaacaatggttaataggaatagccaagtttagcaatctaccatctaaaaatttt

SEQ ID NO: 140239 - DNA, 1670 bp, Zea Mays
caacaggaaaaagttggaggaaaagtaatacaccgccaagggggtgtcatatttctttttcgtggtagaaactacaattacaggacccgcccatgttttccgcttatgctctggaaacccgttgcacctgtgtacccgcgccttgtcacgaaggtcccaggtggcttaactccagatgaggccacagaaatgcgcacgagaggacatcagttaccaccaatttgtaaacttggaaaaaatggtgtttatgccaaccttgtgaaccaagtcagagaagcatttgaagcatgtgatcttgtccgtgttgattgctcaggtcttaacaaaagtgattgcagaaaaattggagctaaactaaaggatctagttccttgtatcttactgtcttttgagtttgagcatatactgatgtggagaggaagtgattggaaatcatctcttcctccattagaaaatagttatgaagtgacgaaggtgcaagaaagttttagtggcaaagaatctaatgaaaaggttacacattcaggaaatgttctggcccagattgagttggtcagtgctgcaacatctcacaagaactggaacttggatgaaggtcaagaaaaatttaaagattccactgacagtgatatggtactgaattctgcaaaggatgttcctgcattgttccattctactggtatatctagaactgaaccctcagcagacattccattggaatattccccattaaatccagtatgtgatattatggatccatccctgaactgccgaagtatcccaacaaacaactgtgaaagtagagctctggtagagaagtcagaacattgtccggatgattataatttggaaatgaagaggaaaagaaacgatggtacaaaaggtacagttgttctaaatagcggttctaaagtagagggattgttatgtcttttggaacaggccattcacagtggcagggcacttgttctgagtgaagatgagcttgctgattcagatctggtctatgaaaagtctgttgcttttacaaagtcaattccgcgaagactggtttttgagaatactcgaaggaagtccagtgccaggagaaatgtgccagacaatcatgcaagaactaaaacacatcttgtagaaaataaaatgttgagcagtcctgttgaaaataaatttatcgttaatggaggatctgcaatgcagacaattgaccatggacaagagtttctttctgatgttgttcatcaaggtaccttaagagtagatgaactagcaaagttactagcttgagaggtgattgctcttttattaaccacacagaccagtatcaacatcctttgaacacatatgcaagatttgcatgaactctgaatttggttaaaacaggtctcaggtctgttgcgtcgtggcgagtcctttttaaccttgaaatactgaactatggtgctgtttggttcaaaaaatgtaacgcaaatggtaatggtaatggtttcggctcgattactggcggtaacaaatttgaataggctggtatcaaattttagtgtggtatctgattacggttggactaaaacaaacatgatttaacgttatccgttacccattacgttacaaatatatgaaccaaacggcacctataatcctgtgcgatgtacaaacaaccttcagaatacata

SEQ ID NO: 140240 - DNA, 197 bp, Zea Mays
ctcaccggtggtttaagtagtacggttcccggccacggtagcccactggttcgcgacagcataacaccggagcaatggttggcgagttggagcacgggagcaggccgggttagcgtggttggccgctgggcagggacgagcacagacatggccagatggaagatggatgcaggatctgcccatggaggtgcagaggc

SEQ ID NO: 140241 - DNA, 342 bp, Zea Mays
cgactacgagagtcggtcgcggctccgtccgtaccctcccgtcggcgaagtcacgcccatcccgtcccaacggtagcagtaacttcaggatttgtggccgggacaagaggacaaggctccgacccagcgggcagagtggtctggcgactcaggttgcccaggatggaggagaaaggcgaggtccggtttgtggccagcgaacaaggtaggtgaatactgattaggttcttgattcagagttctgacgctcaatgattttgcatgcttcactgttcggactgagtttactaggaagcctgttcccaaaatgtacgtgcacactgcacagtattcctctgtgat

SEQ ID NO: 140242 - DNA, 381 bp, Zea Mays
gtattcctttttgccaactcgaaatgtaagcgctacttccacaactacctgaagcctacaaagcttgcctagacaacaatgcacaagaagcaacacaagaaggatatccatgattaagctgtcaagaagatgcgttgcaccaccaagaagccatactccaggtcaactgtgggtgcttccttggaagttatccagaagaatagagctgagaagccagatgtccccggtactattagagaagttgtgatgctcgatacctctaaactcatctgaacggtcatgaccttgcaacaagatcaagaagtgcgtaagaagcaaacaaatggcacagtccagaagggttctaagggttccaagttgggtggtggtggtgggaagcgt

SEQ ID NO: 140243 - DNA, 1818 bp, Zea Mays
atctctatctctctctccttatctcttccccgcgcgctcctcctcctttctccgaaacgagcgtctctcccatggcttccctacgcgctagccgctgcgcgcccgggtcctgctcctccctcttctctggcctccgcgccctagcccctctgctcgctcggcgcccatctcctacggcgcctggccgaagctccctgctcagttcctcctgcgccgcgcccagctccctcctctcaagctctgtgtgcgcgcgcccatatcccctgctcctgcgcgtcgcaacttcccttccgtcgagccctgcatctccatggcacggacgtctgcgtcctccatctcctccttccccagcaggtgcccatcgtccccgacctcgcgtggttgggccgctccagcgccggtcgtcgcttaccgagccatggagtttgtacttgtgctcgaccaccacttcgccccagccgctgtggggtttggtcatcagcagggtgctgctgtgggcacatgcctccctcctcgagcaccaatcggagttcgggtcgtcagccgctgtgctgctcagcttcctgctgcacatgttcggcccatcaatgtctacttattcggtggtcgcatctcgcgctagtacttgcccaagtcaccgccgtcgcccagcttggcctctgctctgtccctgcggcgctccagctcgtcggcgcttggtttccagctcggccttgccatcccccgcgcgcgccccatttttcatggcactcggcagcgcagagtcttcatcagccatggcgagttcctcgctgccacggctgtccggtgtttggcccgcgccgtccctgctcctctcggcgactcggccagctgcttgcgtgtgctgcgcgacctcgcgtccgagatgggcgcgtgaatgacgtgaggaagacgctgcatatgcttgtgtccgagctcgtccggccacaacctcgtcgaaccgcgaagctccctcgtcgtgcgctctgacatcggctgccgccgattctgccattgagttcacgagtgctccttgctctgttcgtttcgccatgggcaatttctccacgctttaaatccatgctgctcgccccgcatgcgctcgctccgatgttcgcgtttgtcgtcgagtcgtcgaacccgtcatcccctgctcgactcccaagcaaaccccctgatccgcgtcctgctcgccgtcgactctcggcaccacaagctcattttcccttgttcacatcccccacagaccctgtctcatcacgcatgtgcgttatcgatctcgtcgtcgtttcgtacatcctcaagaaatacaaagagtcgggtgaagacgaagctagcagcgtgatattcaccaagtgctcgacaaaaagctcgaacaagtcgtcgatcgtcatcctcgtctacgccaaagatccgagaagattaggcgcagaaggaaataaattagtacgcggccggagaattctcgatgtggatgaagatgaagcgcgattcgacgcagcactcgccctattttcggtgaaatactgagctgaaaggtggcgtcaatttcgtgatttcaagtcggatttaattgatggtaagttgattcgttattccagtcaactaggtatataaatagattaaatagaattgttggtcgcgataattattattaatttatcataagtatattgtgacgttcgatctagatgaatcgataaatcaagttaattaagatactgttgggcctatgcttcgtcgtcgaaggtcttataggaagaagcggtcttcggctgaagctgtttgtataagatggccgaaggttcctcttcgtga

SEQ ID NO: 140244 - DNA, 488 bp, Zea Mays
aggagccttccgcaaaacaagtagattccacttctcgtaagagaagaactcttggcatgttgttcaaagatgatcaggttggatttgatacaggtgaaaatattctacggaaacaagtcgatgaacagatcttggagaagatccgagaacttgaacactgcgctgctaagagtggggagaccctgcagatattaatatgcaagcaacaagaactcactggccacatcgaacagctgaggaaaatccttcagtgagaatgtgatggcgtgggttcagatatgaaagccgacatataaaactcgaaggtagtgcttgccaaaggtgaagaaaatcaaaagggacaagaagcgaagccatcgatgtaatgtaataaagaaatatgcaccctagttttctgtgatgaatctttaacccctatgagctgctaaaacactcacttgtgaatgtcaatatgtcatagtattattgtacgccatgattatactcgc

SEQ ID NO: 140245 - DNA, 3560 bp, Zea Mays
gatcctcactgccgatcgacggcgcgaatcgcagagttctctacttctcgattgtcccgccgccgtcccagctcgccgaacaccgacacgtcgcggcctctgtctctaggggccgccgatcctgcagagaggcaatagataagcacagtgcttctgaagaagttgtaatggataacattctgccaaacagtgatttttctgaaggtttacatttgtggcaatcaaatagttgtcatgcatttgtagccgttgaaggatcaggttaccattatggtgtaaggccacattcagggtcaacctatgctgttcttactcatcgcacacagagttggcaggggcttgagcaggacataacagaaaaggtcacccttggtaccgagtactttgttgctgcatatgttagagttcatggggaagttcatgagcccattggagttcaggtcactctcaaacttgaggaggacggttcttctaccaactatctttctattgcaaggattttagcctcacaagaacgctgggaaaaggtggaaggttcgtttaatctaacaactctaccgagacgtttggtgttctaccttgaaggcccccctcctggtgtggatttgctcatagattcggtcaccatctcctacaagaaaacagcttcatcagttggtggaacagagaacatcattttaaattatgatttttcgaaaggccttcatccttggaatcccatccgctgccatgcatatgtggcatcacaatggtctggtttccttgatggtattagagggaactcaggagagaactatgctgttgtttcaaagagaacagaacactggcagggtcttgaacaagatattacaaatcaagtgtctacaggcactgtttatgtcgtttctgctttcgttagagttgatgggattgttcaaggccaggttgaagtcaaagcaacccttaggttgcaaaatgcagatggatcaacacattataaccctgttggaagtgtggttgcctcaaaagaaaagtggaacaaattggaaggttccttttctttaacaaacatgccaaaaaatgttgtattttacctggaaggacctcctgctggtgtggatcttgtcattgattctgtcactgttgcttgctccagacataaacagtcaaaagaagtaaaagtaccaagtggagttgagactataattaaaaatcctcacttcgaagatgggttaaaaaattggtcaggaagaggatgcaatatctgcagacatgagttcagtgcatatgggaatgtccggcctttaaatggcagctatttcgcttcggcgactggacgggttcacaattggaatggcatccagcaagagatcacgggcagggtgcagcggaaagttctttatgagatcagttctgctgttcgaatatttgggagtgccaatgatactgaagtgcgtgctactctgtgggtacaagaatatggtcgtgagcgatatgtgggactggccaagtaagttgtttttgtttcttgttctctgttgataatgctctttttcagagccaatgacattattccttttctttctataaccaaagaaaccagacttctgatcagcaatggacacatttgaaaggaaagttcctccttcatgctccctttaccaaagctgttattttcatagaagggcctcctgctggaattgacattcttgtagatggtcttgtcttatctccagcaagaaagctccaagctgcaccatgcccaaaaattgagaatgttctgtatggaactaatctattgcacaataatggcttcactcgtgggctttctgggtggagtcctatgggttcatgtcgattgagtatccagactgaagcaccccatatgttaccttctatcttgaaagaccgtgcaagccagaagcatataagtggtcattatatccttgccacgaaccgcacagatgtttggatgggtccttcgcaggtcataactgataagctaagattgcatgtcacttacagagtatctgcttgggtacgagttggttctggaggacatggacgtcaccatgtaaatgtctgtcttgctgtggataaaaaccaatgggtcaatggtgggcaagtggatgctgatggggatcaatggtatgaaataaaaggagcattcaaacttgaaaagcagccatccaaagttactgcatatgttcaaggccctcctgcaggtgttgatatcagagtcatggactttcaaatatatgccgtcgacagaaaagcacggtttgagtatctgaaggagaaaacagacaaggtaagaaagcgtgatgttgttctaaagttccaaggatcgaatgcagtgaatcttctaggttcatctttgaggatacaacagaccgagaatagctttccatttggatcttgcatcgcgagacacaacattgagaacgaggatcttgctgagttttttgtgaagaacttcaattgggctgtatttgagaatgaattgaaatggtaccatacagaagcagaacaagggagacttaattataaagattctgatgagttgcttgagttttgtgagaaacataagatacaggttcgtggccactgtttattctgggaagtggaagacgctgtccaaccttgggttcagtcattgcaaggtcaccacttaatggctgccatccaaaatcgtttgcaaagcctattgtcaaggtacaaaggtcgatttagacatcacgatgttaacaatgagatgctacatgggtctttctatgaagacagattgggaagggacattagagcttacatgttcagagaagcacataagcttgatccttctgctgtcctatttgttaatgattacaacgtcgaagatggatgtgacacaaaatctacccccgagaaattggttgagcaggtcgttgatctccaagataggggcgctccagttggtgggatcggtgtgcaaggtcatatcagccatccggtaggagaaatcatatgtgattccctggacaagctcgccatactgggtctcccgatctggattactgagttggatgtcacagcagagaacgagcacatacgagctgatgatctagaggtgttcctccgggaagcatttgcacatcctgctgtggggggaatcatcctctggggattctgggagatgtttatgtttcgagagcacgcccatctggtcgatgctgatgggacaatcaacgaggctggcaggaggtaccttgctctcaaacaagagtggctgacccgtatgaacggcagtgtcgatcaccaaggagagtttaagttcagaggataccatggttcgtacacagtggaagtgaacacgccttcaggcaaggtagctagatcgtttgttgttgacaaggatagcccggttcaggtgatcgctctgaatgtttaatgtgtgggaaatcatgcgcgtgtcctgtattttagcgatgtactgaggtgttgaacacagatagtttcatagctgatgccacgccttcagtgtacagaatattttcacgtttattctctgttctattttttgggtgattataacgcgatattta

SEQ ID NO: 140246 - DNA, 3460 bp, Zea Mays
gatgagatgaggaggcgctgcagctggctctcgtctttgttccgccctcgccgggctgaccgctcgctcccgcaaccagatccacagggtcccgattccgagcccaaggcaatagataagcacagtgcttctgaagaagttgtaatggataacattctgccaaacagtgatttttctgaaggtttacatttgtggcaatcaaatagttgtcatgcatttgtagccgttgaaggatcaggttaccattatggtgtaaggccacattcagggtcaacctatgctgttcttactcatcgcacacagagttggcaggggcttgagcaggacataacagaaaaggtcacccttggtaccgagtactttgttgctgcatatgttagagttcatggggaagttcatgagcccattggagttcaggtcactctcaaacttgaggaggacggttcttctaccaactatctttctattgcaaggattttagcctcacaagaacgctgggaaaaggtggaaggttcgtttaatctaacaactctaccgagacgtttggtgttctaccttgaaggcccccctcctggtgtggatttgctcatagattcggtcaccatctcctacaagaaaacagcttcatcagttggtggaacagagaacatcattttaaattatgatttttcgaaaggccttcatccttggaatcccatccgctgccatgcatatgtggcatcacaatggtctggtttccttgatggtattagagggaactcaggagagaactatgctgttgtttcaaagagaacagaacactggcagggtcttgaacaagatattacaaatcaagtgtctacaggcactgtttatgtcgtttctgctttcgttagagttgatgggattgttcaaggccaggttgaagtcaaagcaacccttaggttgcaaaatgcagatggatcaacacattataaccctgttggaagtgtggttgcctcaaaagaaaagtggaacaaattggaaggttccttttctttaacaaacatgccaaaaaatgttgtattttacctggaaggacctcctgctggtgtggatcttgtcattgattctgtcactgttgcttgctccagacataaacagtcaaaagaagtaaaagtaccaagtggagttgagactataattaaaaatcctcacttcgaagatgggttaaaaaattggtcaggaagaggatgcaatatctgcagacatgagttcagtgcatatgggaatgtccggcctttaaatggcagctatttcgcttcggcgactggacgggttcacaattggaatggcatccagcaagagatcacgggcagggtgcagcggaaagttctttatgagatcagttctgctgttcgaatatttgggagtgccaatgatactgaagtgcgtgctactctgtgggtacaagaatatggtcgtgagcgatatgtgggactggccaaaaaccagacttctgatcagcaatggacacatttgaaaggaaagttcctccttcatgctccctttaccaaagctgttattttcatagaagggcctcctgctggaattgacattcttgtagatggtcttgtcttatctccagcaagaaagctccaagctgcaccatgcccaaaaattgagaatgttctgtatggaactaatctattgcacaataatggcttcactcgtgggctttctgggtggagtcctatgggttcatgtcgattgagtatccagactgaagcaccccatatgttaccttctatcttgaaagaccgtgcaagccagaagcatataagtggtcattatatccttgccacgaaccgcacagatgtttggatgggtccttcgcaggtcataactgataagctaagattgcatgtcacttacagagtatctgcttgggtacgagttggttctggaggacatggacgtcaccatgtaaatgtctgtcttgctgtggataaaaaccaatgggtcaatggtgggcaagtggatgctgatggggatcaatggtatgaaataaaaggagcattcaaacttgaaaagcagccatccaaagttactgcatatgttcaaggccctcctgcaggtgttgatatcagagtcatggactttcaaatatatgccgtcgacagaaaagcacggtttgagtatctgaaggagaaaacagacaaggtaagaaagcgtgatgttgttctaaagttccaaggatcgaatgcagtgaatcttctaggttcatctttgaggatacaacagaccgagaatagctttccatttggatcttgcatcgcgagacacaacattgagaacgaggatcttgctgagttttttgtgaagaacttcaattgggctgtatttgagaatgaattgaaatggtaccatacagaagcagaacaagggagacttaattataaagattctgatgagttgcttgagttttgtgagaaacataagatacaggttcgtggccactgtttattctgggaagtggaagacgctgtccaaccttgggttcagtcattgcaaggtcaccacttaatggctgccatccaaaatcgtttgcaaagcctattgtcaaggtacaaaggtcgatttagacatcacgatgttaacaatgagatgctacatgggtctttctatgaagacagattgggaagggacattagagcttacatgttcagagaagcacataagcttgatccttctgctgtcctatttgttaatgattacaacgtcgaagatggatgtgacacaaaatctacccccgagaaattggttgagcaggtcgttgatctccaagataggggcgctccagttggtgggatcggtgtgcaaggtcatatcagccatccggtaggagaaatcatatgtgattccctggacaagctcgccatactgggtctcccgatctggattactgagttggatgtcacagcagagaacgagcacatacgagctgatgatctagaggtgttcctccgggaagcatttgcacatcctgctgtggggggaatcatcctctggggattctgggagatgtttatgtttcgagagcacgcccatctggtcgatgctgatgggacaatcaacgaggctggcaggaggtaccttgctctcaaacaagagtggctgacccgtatgaacggcagtgtcgatcaccaaggagagtttaagttcagaggataccatggttcgtacacagtggaagtgaacacgccttcaggcaaggtagctagatcgtttgttgttgacaaggatagcccggttcaggtgatcgctctgaatgtttaatgtgtgggaaatcatgcgcgtgtcctgtattttagcgatgtactgaggtgttgaacacagatagtttcatagctgatgccacgccttcagtgtacagaatattttcacgtttattctctgttctattttttgggtgattataacgcgatatttacattaccat

SEQ ID NO: 140247 - DNA, 2481 bp, Zea Mays
agtctgtatgagcgccgagaatcgagtttgcgctctcctttccggctttccgcccaaacagccgtcgggcgtcccacggccgccgcccctgccggagatacgcgtagccgggagttaagggatgagtcctcaaatgctgttattggaaacatcttaagttagagtaagttgctgaaactatggaagaggttcaaaactgtgtgatgaagctgcggagcaatccaaggcggcacagggataaagtgtatgttggctgtggggctggatttggtggagacaggctaatggctgcttataagttgctgcagagagtcaaggagcttaattacctagttctcgagtgtttggcagagcgaactctggcggatcgataccgaattatggtgtcaggaggcaaaggctacgatcctcgggtcaaagagtggatgtctttgcttctacccttggcttttgaacggaaagtttgcatcataactaacatgggggcaatggatcctcttggagcacagaaagaagtactgaacctggcatctgtcttgggactggagataacagttgccgtagcttatgaatcatcctttgaaactcaaggaagccctgtattgtccgatgaatcaacaggagggagagggggatgtagcacatatcttggggcagcttcaattgtacattgcttggaaaactataaaccacatgttgtcattacttcacgggttgctgatgcttcactcttcttagcacctatgatctatgaattaggttggaattggaatgacacacagttggcacaaggaacattagcaagccatcttctagagtgtggctgccaactcactggaggatatttcatgcaccctggagatgcatacagggattttccttttgaacaacttctggatttgtctctcccatttgccgaagttagttgcagaggagaagtcattgtcagtaaggtagatggcagtggaggccttttgagcccccatacatgtgctgaacagcttctttatgaagttggagatcctgcaaactacataactcctgatatggttgtagatttctgtaatgtacagttccatcaaatatcaaaagacaaggtcagctgtgatggagcaaaaccttctaatgcttgttgccctgagaaactcctgcaattatctcctactgaaagtggatggaaaggctggggagagatctcatatggggggcatcaatgtttaaagcgtgcccaggcagcagaataccttgtaaggtcgtggataggtgaaaggtacccaggcattaatgaaaaaattgtctcatatgtcatgggctatgatagtttgaaagctattggaggtgatgaggatagttacttggccaagcaagtattggatgtaaggcttcggatggatggtctcttcgagcttgaagagcatgctgttcagtttgtcgaagaatttattgctctatatacaaatggtccagctggtggcggtggaatcagcactggacacaggaaggaaattattctgcaaaagatgctggttgatcgggaaaacatcttttggcgatcgcatgcaaagaaggcgagcattccctgcctgcataatcaagctacatattctgaaacaggtcaggcacgtatttcacaagcgcaacgaaacccaacatgtcgtacaatggccattcaacactttgaagcaagcacggagaccccagcatcccctgctccagctttacctgggaaaagggtcgctctctaccatgtggctcacagcagggccggtgacaaggggaatgatatgaacttctctgtcattcctcactcccctgctgacatcggccggctcaggtccgtaataactccggattgggtgaagaacgctgtgtcacctctgcttggttcgtcttcgtttcctgacgagcgagatgttcagcatcgaaacaagctgcttgagcttgtcaccgtggaaatttactacgtcccgggcataagctccctgaatgttgtggtgaggaatatcctggatggtggcgtcaactgctcgaggaggatagatcggcatggaaagaccttgtcagatgtcatattgtgccaacaagttatcctaccgccatgattgtcaatattcttatccgtattcgaattaaaatatggtaaatagtatctgtattcgaaccaaaatatggtaaatagtgacatccgaatttgtatccgtgcgtatttgatccgaatacatctctattaattgactacagtacccactataaacttatgtgtattaatattattaaggtttgttttttagagcctgtgtgaactctgggagacttgatgctaataccagagccgtgtacaggtgaagacggagcaattctgtcacccgttttacgcttacccatattatattatattatattatattatattaaatattatctcaggaattactttttttcgtttttactgtagcaaaattttggtttgacaaaaaaata

SEQ ID NO: 140248 - DNA, 2178 bp, Zea Mays
agcctccaccccccctactatccgcatccttcatcccagtagttgatgagtcctcaaatgctgttattggaaacatcttaagttagagtaagttgctgaaactatggaagaggttcaaaactgtgtgatgaagctgcggagcaatccaaggcggcacagggataaagtgtatgttggctgtggggctggatttggtggagacaggctaatggctgcttataagttgctgcagagagtcaaggagcttaattacctagttctcgagtgtttggcagagcgaactctggcggatcgataccgaattatggtgtcaggaggcaaaggctacgatcctcgggtcaaagagtggatgtctttgcttctacccttggcttttgaacggaaagtttgcatcataactaacatgggggcaatggatcctcttggagcacagaaagaagtactgaacctggcatctgtcttgggactggagataacagttgccgtagcttatgaatcatcctttgaaactcaaggaagccctgtattgtccgatgaatcaacaggagggagagggggatgtagcacatatcttggggcagcttcaattgtacattgcttggaaaactataaaccacatgttgtcattacttcacgggttgctgatgcttcactcttcttagcacctatgatctatgaattaggttggaattggaatgacacacagttggcacaaggaacattagcaagccatcttctagagtgtggctgccaactcactggaggatatttcatgcaccctggagatgcatacagggattttccttttgaacaacttctggatttgtctctcccatttgccgaagttagttgcagaggagaagtcattgtcagtaaggtagatggcagtggaggccttttgagcccccatacatgtgctgaacagcttctttatgaagttggagatcctgcaaactacataactcctgatatggttgtagatttctgtaatgtacagttccatcaaatatcaaaagacaaggtcagctgtgatggagcaaaaccttctaatgcttgttgccctgagaaactcctgcaattatctcctactgaaagtggatggaaaggctggggagagatctcatatggggggcatcaatgtttaaagcgtgcccaggcagcagaataccttgtaaggtcgtggataggtgaaaggtacccaggcattaatgaaaaaattgtctcatatgtcatgggctatgatagtttgaaagctattggaggtgatgaggatagttacttggccaagcaagtattggatgtaaggcttcggatggatggtctcttcgagcttgaagagcatgctgttcagtttgtcgaagaatttattgctctatatacaaatggtccagctggtggcggtggaatcagcactggacacaggaaggaaattattctgcaaaagatgctggttgatcgggaaaacatcttttggcgatcgcatgcaaagaaggcgagcattccctgcctgcataatcaagctacatattctgaaacaggtcaggcacgtatttcacaagcgcaacgaaacccaacatgtcgtacaatggccattcaacactttgaagcaagcacggagaccccagcatcccctgctccagctttacctgggaaaagggtcgctctctaccatgtggctcacagcagggccggtgacaaggggaatgatatgaacttctctgtcattcctcactcccctgctgacatcggccggctcaggtccgtaataactccggattgggtgaagaacgctgtgtcacctctgcttggttcgtcttcgtttcctgacgagcgagatgttcagcatcgaaacaagctgcttgagcttgtcaccgtggaaatttactacgtcccgggcataagctccctgaatgttgtggtgaggaatatcctggatggtggcgtcaactgctcgaggaggatagatcggcatggaaagaccttgtcagatgtcatattgtgccaacaagttatcctaccgccatgattgtcaatattcttatccgtattcgaattaaaatatggtaaatagtatctgtattcgaaccaaaatatggtaaatagtgacatccgaatttgtatccgtgcgtatttgatccgaatacatctctattaattgactacagtacccactataaa

SEQ ID NO: 140249 - DNA, 101 bp, Zea Mays
cacaaatgttacaataaaaggtccaccaagtgtttgctatccttgcatcatctcatcataaatttgttcacatattttaaaaacgacattgtctacagctc

SEQ ID NO: 140250 - DNA, 1063 bp, Zea Mays
ggcgctcggcgactgacgtccgagcctccgtgatcctgattttctatctccgtacctcgtggcggaatgctcctacatgcgtcatccgctgcttaccatccgcttttcctcgtccccgccagaaccggagaccgaggaggagcccctcctcgattgcacgccgccaaactccaaaccctcaacgggctacagctacgctcttccttctccgctctcagctgctcctgctctccctctccttctcccggcgatggtgggaaacgcagcgcccgcagcctgttcgatgagctttccgttctttctccagtcgttccatgggaggtggatgatatatggagaatatatgcaggttatttcttcatcttgcatatccccctgagctttggagggcttggtgtgattgccaaagtaatgcagcgctcgtcacttgactcgatgacaacggtaatttctacactcatgcttcagttagcagagcttgttttgaccttagtgctactccagtattctgcaaagccagggcaagctatccaacctttcttttgtgggaaggtttttacagaacggaattgggtcaaagagactgtattaggctttgtagttttgataaccctggtattgaccacatccatcttagctgacaaattggtagggtctgaggatgcatatgacccggtattaaaggagatcctttctggcagtccagcctctgctctagtgtgtttctttctctactgtgttattgctccactatcagaagaaaccatctaccgtgggttccttttgacggctttgtcatcttcaatgaaatggcgagacgctgtcgtgatcagttcgctcgcgttcactgtggcacacctgtccggtaaaagttccattcaactgttcgttgttggatgtattacagggctggcttactgtcgaactggaactttagctgcttctttcaccattcattctctgtacaatgcagtattattgtatacggctttgatatcatgatcattttgtataatttgaatgcaaatgcttttactatacggcttgttcgttttgctctcaa

SEQ ID NO: 140251 - DNA, 837 bp, Zea Mays
aggatactgatggtgtttactgtcctccgaaatttatgcctactagcatggatgatgaagagaaacgtcataaaaagattcaaggagagataaagcgatagcccgagtggcaatagaaaacccctatattaaagagataatcgatgatgctgcggacaggcctgaagagtggaaggaaacagtgggcgatgaaagcagggaatttgggaggtacatgcgacagagagaagagcaagagaagcaagaagaggagttgttcactcgggctcctgtaaccaaacgtgataagcaggtcgagaaacgcagaaatagacaacttcatgggctaggatgcttaactgatggtttcgaccttgggatgaacatgttgttgggaggagacaaggaagatgatggcggttcaagcaagtcacatggcaagagcggaaaccgaaagaagcacctcaagagcagcaagaagaggaagaggcattagctctggacccacactgttgtagcacttcaacatactgatacagcctagaagacggttcaagcaagccacacggaaagttgaagctggagaaaataccaagaaaccaagtagagaaaaaaaagctttggttccttaggcgtattatttctgaaatagaacacttgatctgagcgactgatcctgagccaatggaatagtattatgaattatatggattgaacatggtaggtgtaccaagttttgttcatcgatagagtatcccagatgtgatcggttacgaattgtttccccgagtctcctatttttgcttgtatgaagattctgcagtaatcatattaaatgcttgattaaaagagaaacaa

SEQ ID NO: 140252 - DNA, 861 bp, Zea Mays
gcggcgacaaaagcccgggggcctagcgcccccggcagccgtcgtcggcgcggacggtatccgcgcgcctctggcgcgccccttcggggcgctgcgccgcaacggcatgcgagctccccatccgacccgtcttgaaacacggaccaaggagtctgacatgcgtgcgagtcgacgggttcagaaacctgagatgcgcaaggaagctgacgagcgggaggccctcacgggccgcaccgttggccgaccctgatcttctgtgaagggttcgagttggagcacgcctgtcgggacccgaaagatggtgaactatgcctgagcggggcgaagccagaggaaactctggtggaggctcgaagcgatactgacgtgcaaatcgttcgtctgacttgggtataggggcgaaagactaatcgaaccatctagtagctggttccctccgaagtttccctcaggatagctggagcccacacgagttctatcgggtaaagccaatgattagaggcatcgggggcgcaacgccctcgacctattctcaaactttaaataggtaggacggcgcggctgcttcggtgagccgtgccacggaatcgggagctccaagtgggccatttttggtaagcagaactggcgatgcgggatgaaccggaagccgggttacggtgccaaactgcgcgctaacctagaacccacaaagggtgttggtcgattaagacagcaggacggtggtcatggaagtcgaaatccgctaaggagtgtgtaacaactcacctgccgaatcaactagccccgaaaatggatggcgctgaagcgcgcgacccacacccggccatctgggcgagcgacatgccccgatgagtagga

SEQ ID NO: 140253 - DNA, 110 bp, Zea Mays
gagacttgttcattcttttcatttctatactatacttaaagcatcagtttcaacggtcgtcatgcgtcatttttttacaaataacccctcacagctatttcaaatgaacc

SEQ ID NO: 140254 - DNA, 2410 bp, Zea Mays
cactcgcgtccctctcttttcctcttctccattccgtcgcgtactcgcgtgcacagaaattccttcctctgcctccctgttcagctctccttttcccttcctcctcctgtaattctgttcgtgtgcgtgtaatttccgtgcaaatacacgcacgccgattttcgaaagcaaaaaaaaaaaaaggcgacggcaaggaatcccccgattaggaaagattctccgctccccgccttcaaatcccccaccggccaccacgacccgcctggattcgcctacgctctgtgctgccgaggtcgggattggtgctggaattcggtgcgccgagttgttccttgctcgattagacttccggttcggttcgcttcgttccaatcggggtttgctgcttccgccgccaccggtgcgctccgagctgctcaagctgggcgccggataccctctcgggctgcccgatctgattcagtccccaacaccacccccgctccgccgctgtggctgccgctcccctccccgctgactccggcgccatttcgacccgcgcggccggatccttggatggttccgatcgatccgggaccaagagacccaaggcttcgtcacctcacccgggccccggcgccggtggatccatggccggggagaaggcgccgcgcgcgttctccatcgaggagctcccgggccacctcatcggggaggtcctgacctcgggtgggctcgctgccgccgacctcgcgaggctcgaggccacctgccgcgcgctcaggccgctcgccgagtacgccgcgtccaagctctgcgccgcgcgggcggcgttcgctgccatggggccagccgcccggggtgagctgctggagaggtgcgggggaagctggaagagggtgctcaggttcctgcagtccgtagagcagtcgtcaggcaccgtcgagacctcatcgggcagcatgcaagtagccacaggaagatatcacacacttttggtccatgactcttctgtctattcttgtggatccagcttgtgtggtgtgttaggtcatggcccagatactacacaatgtgcagcattcagtcgggtttccttcccatcactttcccgtgttataaacatctctgcttcacacaaccatgctgcttttgttacggagtctggggaggttttcacctgtggtgataattcatcattatgctgtggtcatggcgaagtggggagaactatatttcgaccaatgcaagtagaagcgcttaaagggattccctgcaagcaggttgctactggtctaagttttactgtgattcttacaagggatggacaagtatatacttgtggaagcaatacacatggccaacttggtcacggtgacaccatagacagggccactccaaagcttatagaattgtttgaaggccccactcaggtggtgcagattgcagccggcgcaagctacacttttgctgtaacagatgatgggactgttcattcgtttgggtcttgcactaatttctgccttggacatggggatcagcatgacgaacttcttcctcgtgcaatccaatcatttaagaggaggaacattcatgtagtccgtgtttctgctggagatgagcatgctgtggctcttgatgcactaggacacgtttatacttggggcagaggatactgtggagccttaggtcatggtgatgagaacgataaaactagcccagaattgatcggcagcttgaagggccaagttgctgtgcaggtatgtgcaaggaagaggaagacgtttgtcctcacggacgagggctcagttgttgcgtttggatggatgggttttgggagtctagggtttcttgaccgaggaacatcagacaaagtaatgaggccccgcgttcttgagagcctgcaggatcactacgtctcccaaataagcaccggactgtatcacactgtcgcagtgacaaataagggcattgtattcgggttcggggacaacgagcgagcacaacttgggcaggagtacattcgtgggtgcttaaaacctaccgagataatgttccaaaagagtatcgaagacataccaattgcggcgcctagtggttgacctcaaggccaagaggccaagaccaccattttggacactgttgcctgcatatatgttgtacttatattgaaattcttctcggtaagtgtattttatactttgtgatttgtgatgaacgggggaggacggaagagcaaagttggaggacagtgttgtgttgtgtagccaaagaagcatgtagtttagtaacgtgtgatgtaccgaataattcaacccaccatttttattctgtataaaatttattggtgtgtttgtattctttttcttgttcctcccacttttgctatctcggaatttattgtattactgcttaatgccctgtttgtttc

SEQ ID NO: 140255 - DNA, 942 bp, Zea Mays
atggagagtgaaggagctggtgagcactttgtagaacaagctgatggtagtagccatgttgtgtggacttctgcaatgtccgcttacatgctcagtaacctagcaagccttgtggctgaagggatcaggacatcaacaggcttcaagaaagttcaccttaacatgtgtgctaaggctctaaatgactatttcaagatgaagctcactgaagaacaagtgaagaaccatttgaggacatggaagagaagatatgcgaagataaacagacttaggaagttaagtgctgcttcttggaacgaagataactacatgatcactcttgatcatgaacattatgcaaactatgtgcagacatggtctattcaccaaaagcaactgatagtgttggtcgttttgcccttaccaagctgttacttttacatgcaggatcacaaatctgatgctgagtttttaaacaagcctttggagaactataaggaaatgttcactgtctttggaaacaatatggctacaggaaagtatgcaaaaggatcaagtgaagctctaggtactgaagatagaaacagtatggctgaaacagagattgatgagggagatgttaatgctgttcctagtcctatagatgatattggggcttcatcctcagctcctagacctaggaagaaggcaaaggttactagtaatgaagaggcagggctgattggagcattcaaagatggtgctgaaaggcttgcaatggctattgagaaggctggttcagatgacctaccacctgacttgcttcaaacattgcaaagtattccaggttttgatgacacacacaaggccttttactttgcatatctagtgaaaaatcctggattagcaaggcagttccctactctcccattgacatatcagataagtttgcttgctcggttcgttagtgagacctttccttag

SEQ ID NO: 140256 - DNA, 866 bp, Zea Mays
aaacgcaggctaccgcgacgaagaagagcataagcaaacataaacgggcttgtgctttgtggaaaacatgccgccgccgccgccggtgaatccacagcggctttcgccggcagagtcccgagagcggacgctgtacttcttccatggtctgggcgtggacgtgcccctcccggtctcggccgagcggcccgacgcctacacctcgctcgtccgcgccatcgtctcctccgccgcagtcacctcctcgcgcgtctcctgcaccctcaccgtctctcccgccgtcgcgaaccagtacaacacgctccacggcggcgcggtggcggccgtggctgaggccgtcgggatggcgtgcgcgcgcgccgcggctggggacaaggagatgttcctcggcgagctcagcaccgcgtacctcgctgctgcgcgactcaactctgaagtggacgttgaagcgcagatactgaggaagggcagatcagtcgtggttaccacaatcgatttcagacttaaggacaccaaaaagctctgctacacatctcgagccaccttttacatcatgcccgtggcaagcctataagcccaagtttttatatggacaattccttctgtttacaggaccggagtttgtgttgtgtatatttaacttagaataccatatatcagcaatctgttgtattgataatgaagcagaagtcatattgattgagccatgatgcccaccactgcatctgtcccagactcaacctgtccacccacatacgtactaatttgttatggtttataaagggagagtggaagatcacgatcatgtgatgcttataaagttttaaatcagaaaatttctgctgtgtttatctgaaaatcagttt

SEQ ID NO: 140257 - DNA, 792 bp, Zea Mays
actcacggtgccgcggaacagcgaagcaaacgaccagacgtaggaggagatggcggacggagagccagggcataagctgtcgccggcggactcccgggcggtgacgctggcattcttccgcgccctaggcgccgacgcgcgcctcccggcctcggccgaccagcccgacgcctactccgctctcgtccgcgcaatcctctcctctgttgccgtctccgcctccccgaccccgcggatctcttgcaccatcaccgtctcgcacgccgtgactaacacgtacaacacgctccacggcggcgcggtggcggccgtagccgaggccgtcgggatggcgtgcgcgcgggcagccgccggggatcgagagatgttcctcggcgagcttagcatcgcgtacctcgctgcagcgcgatgcgatgtgatcttctaattaaattctctgcacctcgcttttccagcatccatttgttggtcgaatcccacattgctatgtactcttggggcaactttgtgcagcaattcaacacgtcaggataatttgggggattggggagtctagctactgcttttgaactggttattattattatgtagttacaccacagttctatgatgttttagaagtaaatagctgattgtaaataagagttgttgggcaagcattgcagctttgccagaaagggtgtgtatttgattgacatatagtagaacctctagcaatgttggaggtgaacattctagtagaatgataaatgtgaaatatatcaggcctgccaatatctggtttaccgggag

SEQ ID NO: 140258 - DNA, 851 bp, Zea Mays
actcacggtgccgcggaacagcgaagcaaacgaccagacgtaggaggagatggcggacggagagccagggcataagctgtcgccggcggactcccgggcggtgacgctggcattcttccgcgccctaggcgccgacgcgcgcctcccggcctcggccgaccagcccgacgcctactccgctctcgtccgcgcaatcctctcctctgttgccgtctccgcctccccgaccccgcggatctcttgcaccatcaccgtctcgcacgccgtgactaacacgtacaacacgctccacggcggcgcggtggcggccgtagccgaggccgtcgggatggcgtgcgcgcgggcagccgccggggatcgagagatgttcctcggcgagcttagcatcgcgtacctcgctgcagcgcgatgcgattctgaagtggacgttgaagcgcagatactgaggaagggcagatcagtcgtggttaccacaatcgatttcagacttaaggacaccaaaaagctctgctacacatctcgagccaccttttacatcatgcccgtggcaagcctataagcccaagtttttatatggacaattccttctgtttacaggaccggagtttgtgttgtgtatatttaacttagaataccatatatcagcaatctgttgtattgataatgaagcagaagtcatattgattgagccatgatgcccaccactgcatctgtcccagactcaacctgtccacccacatacgtactaatttgttatggtttataaagggagagtggaagatcacgatcatgtgatgcttataaagttttaaatcagaaaatttctgctgtgtttatctgaaaatcagttt

SEQ ID NO: 140259 - DNA, 707 bp, Zea Mays
actcacggtgccgcggaacagcgaagcaaacgaccagacgtaggaggagatggcggacggagagccagggcataagctgtcgccggcggactcccgggcggtgacgctggcattcttccgcgccctaggcgccgacgcgcgcctcccggcctcggccgaccagcccgacgcctactccgctctcgtccgcgcaatcctctcctctgttgccgtctccgcctccccgaccccgcggatctcttgcaccatcaccgtctcgcacgccgtgacttctgaagtggacgttgaagcgcagatactgaggaagggcagatcagtcgtggttaccacaatcgatttcagacttaaggacaccaaaaagctctgctacacatctcgagccaccttttacatcatgcccgtggcaagcctataagcccaagtttttatatggacaattccttctgtttacaggaccggagtttgtgttgtgtatatttaacttagaataccatatatcagcaatctgttgtattgataatgaagcagaagtcatattgattgagccatgatgcccaccactgcatctgtcccagactcaacctgtccacccacatacgtactaatttgttatggtttataaagggagagtggaagatcacgatcatgtgatgcttataaagttttaaatcagaaaatttctgctgtgtttatctgaaaatcagttt

SEQ ID NO: 140260 - DNA, 1591 bp, Zea Mays
cccccaactgctggtgcctaccgaactcacgagcaaagcaaaggctccaaacttactcgtcgccctcaaaaaccacgctaatcagtgccaaaacgcaaataacgcgagggagaagaagagacagaaacagtaagggtttgactgtttggctaacgtcatggcgtcgacctctccgcgccgctcctctggcggggactcagcttccccgtccgcacccctcatcccctcgccgccgacctccccggcatccggcccctccggtggcccgctagggcggctcacgagcctccgcggcgcggcgcggttcatccgccgcacggggagccggcgcctgatgagggagccctccgtggcggtgcgggagacggccgccgagcacctcgaggagcgccagaccgactgggcctactcgaagcccgtcgtcgtgctcgacatgctctggaacctcgccttcgtcgccgtcgccgcggccgtactcgccgcatcggtgggcgagcggcccaccgtgccgctccgtgtctggatcgtaggctacgtgctccagtgcctcctccacgtactcagcgtcaccgtcgagtacaggcgtcgacgcaggaacgcggaccaggagggagcgggtgatgaggatttaaagctcagtattgtgaagcacttggagtctgcaaacacgatgttttccttcatatggtggattgttgggttctattgggtgtctgcaggtggtaaagctttatcacatgatgctcctcagctttattggctgtcaattgtttttctggcgtttgatgttttctttgtggtcttctgtgttgccttggcttgtgtgattggaatcgctgtttgttgctgccttccctgcattattgctatcttatatgctgtaactgatcagcaggagggagcatctgaagatgacataaacaacctatccaaattcaaatttcagacaatgagtgatgcagacaagctagctgctggcattgcagcacctgtgggtggagtgatgacagagtgtggtaccaatcctcctgtcgaacatattctctcagctgaggatgcagagtgctgtatctgcctatgcccgtatgaagatggcgtggaactacgtgagcttccttgcaaccaccattttcactgcagctgcattgacaagtggcttcacataaatgctacatgcccattgtgcaagttcgacatcatcaagagcaaccgtgacatagaagaggtctaggtcactaaggaaaaaacgccgcaaaacttttcgtcatgtctctgctgtgttcttcagtactaccgctaccacatttgcgatcctgagttgtgattaccggtcctttaggtgatgcacaaatggtactcgtgaatattctttttattagcagttttctgcagggcctgtacattctctttctgctcgatccgattgcattgcagattgatttgtaaatgagtacatggtcacgttgaaccttgaaagcagtcaatcatttcaaaaatggtttatgaattggaagctagtatacaggctgcttttggttggcattaatgattagagggcaatatgaatgcgggaaggtttgtgcagatgttc

SEQ ID NO: 140261 - DNA, 1588 bp, Zea Mays
cccccaactgctggtgcctaccgaactcacgagcaaagcaaaggctccaaacttactcgtcgccctcaaaaaccacgctaatcagtgccaaaacgcaaataacgcgagggagaagaagagacagaaacagtaagggtttgactgtttggctaacgtcatggcgtcgacctctccgcgccgctcctctggcggggactcagcttccccgtccgcacccctcatcccctcgccgccgacctccccggcatccggcccctccggtggcccgctagggcggctcacgagcctccgcggcgcggcgcggttcatccgccgcacggggagccggcgcctgatgagggagccctccgtggcggtgcgggagacggccgccgagcacctcgaggagcgccagaccgactgggcctactcgaagcccgtcgtcgtgctcgacatgctctggaacctcgccttcgtcgccgtcgccgcggccgtactcgccgcatcggtgggcgagcggcccaccgtgccgctccgtgtctggatcgtaggctacgtgctccagtgcctcctccacgtactcagcgtcaccgtcgagtacaggcgtcgacgcaggaacgcggaccaggagggagcgggtgatgaggatttaaagctcagtattgtgaagcacttggagtctgcaaacacgatgttttccttcatatggtggattgttgggttctattgggtgtctgcaggtggtaaagctttatcacatgatgctcctcagctttattggctgtcaattgtttttctggcgtttgatgttttctttgtggtcttctgtgttgccttggcttgtgtgattggaatcgctgtttgttgctgccttccctgcattattgctatcttatatgctgtaactgatcaggagggagcatctgaagatgacataaacaacctatccaaattcaaatttcagacaatgagtgatgcagacaagctagctgctggcattgcagcacctgtgggtggagtgatgacagagtgtggtaccaatcctcctgtcgaacatattctctcagctgaggatgcagagtgctgtatctgcctatgcccgtatgaagatggcgtggaactacgtgagcttccttgcaaccaccattttcactgcagctgcattgacaagtggcttcacataaatgctacatgcccattgtgcaagttcgacatcatcaagagcaaccgtgacatagaagaggtctaggtcactaaggaaaaaacgccgcaaaacttttcgtcatgtctctgctgtgttcttcagtactaccgctaccacatttgcgatcctgagttgtgattaccggtcctttaggtgatgcacaaatggtactcgtgaatattctttttattagcagttttctgcagggcctgtacattctctttctgctcgatccgattgcattgcagattgatttgtaaatgagtacatggtcacgttgaaccttgaaagcagtcaatcatttcaaaaatggtttatgaattggaagctagtatacaggctgcttttggttggcattaatgattagagggcaatatgaatgcgggaaggtttgtgcagatgttc

SEQ ID NO: 140262 - DNA, 729 bp, Zea Mays
tgggggcacctcgccgcatctgtgacacgacaggagggagcatctgaagatgacataaacaacctatccaaattcaaatttcagacaatgagtgatgcagacaagctagctgctggcattgcagcacctgtgggtggagtgatgacagagtgtggtaccaatcctcctgtcgaacatattctctcagctgaggatgcagagtgctgtatctgcctatgcccgtatgaagatggcgtggaactacgtgagcttccttgcaaccaccattttcactgcagctgcattgacaagtggcttcacataaatgctacatgcccattgtgcaagttcgacatcatcaagagcaaccgtgacatagaagaggtctaggtcactaaggaaaaaacgccgcaaaacttttcgtcatgtctctgctgtgttcttcagtactaccgctaccacatttgcgatcctgagttgtgattaccggtcctttaggtgatgcacaaatggtactcgtgaatattctttttattagcagttttctgcagggcctgtacattctctttctgctcgatccgattgcattgcagattgatttgtaaatgagtacatggtcacgttgaaccttgaaagcagtcaatcatttcaaaaatggtttatgaattggaagctagtatacaggctgcttttggttggcattaatgattagagggcaatatgaatgcgggaaggtttgtgcagatgttc

SEQ ID NO: 140263 - DNA, 567 bp, Zea Mays
atgggcgcaaagaatgacggcgcagaggagccgcgcggtcagtcatggaagcaggggcaagccaggagctccggctggggttgcggcaccagtgagcagagcgctcgggcgcggcgaggacacacgcgcagggggcgagccaggcgcgacaacagggagatgggagggcacgatgcaggggaggacgcaggggatgggcgcgccatggaagtgacggtcgggcgctggggcgaagtcaagggcgcgaccatgggcgagctggccgagcacctgggagatggggtgcgcagggcgagctcggctgcgcgcggcatgggcgagcgcgccagagagctccggccggcgagcacgcgcaggggagctggagcctgggcacgccatggcgaccgagtgcggcatcgggagcaagcagggcaccgagcagagaagcgcgtagggaactccagggcacgacaacagggagacggaggaagacgcgcggccatggacaggggctcgcggccggcgagcagaggagctgggcacggctggggaagagaggagcagggagctccggggaggagataa

SEQ ID NO: 140264 - DNA, 888 bp, Zea Mays
atgtactacgcgtgcgggtactgcaaaaacggctcttcctgccgcttcttccacggcgtgcccgaggacgacgctgcggagcgagagatggccgtcatgcgcgccaaggccttggccgccgcgccgccgacgcagcagcagcagctcatggcgtccgcgtaccccttctcgccgtcgcctaagggaggcgtcagcctcagcttcctgatccagcagcaccagcagcagcaaagcgagacccaaagagcagcgcacctcagtaatcctcttatggtggatatcagggtacaagcaaaaagattgaaaatccaaatggaaggaaaagccggggaaactattaggtatatccaacttcaatcaggagcaaagattcaagtcacaagagaccatgaagctgaacttggtgcactaacaaggcaagttgagctttctggcaaacctgagcagataagcaaagctgaacagttgatcaaagaagttctggcagaggccgatgttgggtcatccggtgctggatctggaggccagaaatacaatgcaacacagcaaggtgctgagacgttccagatgaaaattgctaataacaaggtatacaccttgttctatttggacaagggtgggactgattattgggaaggtggtgagactataaagtccatgcagaccaattctggagcccgtattcagtcttcaatcagtgatagtggtctttctcaggatgctaagcaatgcagaaacctgaagttcctccataccgaagggtgcttgtccatcactaaggcgtctctaagagcccttgtgcagtatgccaagagactcgagtctcttactctgggaagctaccctcaaattgagcaacatgccatcttttccttactgatgaactaa

SEQ ID NO: 140265 - DNA, 821 bp, Zea Mays
gccgcatcagatatccgcacaaaccaagccatcagcgccatggcgatctccacctggagcgcgcgccttctcctcacccctgcttcctcccgcgccaccctatcaccccctcgccctcccactacaaacccgctctcatcgttctttcctcgcaatcgtctccatttcgtgcgcccgcgcccgcgcccgccgtgcgcctacatctctgcgccagcgccgggcccggaggccgcatacgcgccgccttctctcgacgccaccgccgcggcagccgatgtcgccgctgcgatatcctcctccgacgcggtcacttgggccggcgtctgggcgctgctctcgcgacacagggcccgcatcgcggtctgcatcgccgcgctcgtcgcctgcaccacctgcacgctctccatgccgctcttctcagggaggtttttcgagaccctgattgggagggggaacgagccattgtggaggctcttatccaagattgcgatactgtacacactggagcccatcttcaccatcatattcgtgatcaatataactatcatctgggagcaggttatggcaaggctgcggagccagatatttcgaaggattctgatccaaaagatgttattttttgatcgtcacaaggttggtgaattgaccggtttgttgacatctgatttgggttccttgaagagtgttgtaagtgataacatatccagagatcgtggactgagggcactctctgagatcattggtacactttgtatacttttcacactatcaactgagctagctccagttcttgggctccttatggtgtccgtctccgtgct

SEQ ID NO: 140266 - DNA, 1334 bp, Zea Mays
gggcaaattatctgttggaaccatggtatcttttattggttacaccttcacattaacctttgctgttcaaggagctgttaatacccttggtgatctgcgtggcacattggcttccgtagagagaataaattctattctttcagcgaaggacattgatgattcacttgcatatggtttagccaaagaacttgatggcaaagagtttgatgattccaatggagtgtatgaaaatggatctgttaacaaacatttcatgtcagagctgaaatcatccagtagctgtagtaatctagcctggtctggtgacattcgtctgaaagaagtccatttctcttatccattgagatctaatgtggagattttaaatggccttgaccttacaattgagtgtggaaaagtcacagcacttgtcgggcctagtggtgctgggaaaagcacagtggtacaacttctagcacggtattatgagccaactcaaggttccatcactgtcgcaggagaagacatccgtgtatttgacaaaagggaatggtctcgagtagtatctctagtcaatcaggatccggtcctattctccgtgtctgttggagaaaatattgcttatggtctcccagatgatgttgtctctaaggatgagataataaaagctgctaaagctgccaatgctcatgaattcatcatctctcttccacaggggtatgatactcttgttggagagcgaggtagtctcctaagtgggggacaaaggcagaggattgcaattgcacgagccctcttgaaaaatgctcctattctaatacttgatgaggctactagtgcactggacgcgacaagtgagcgactcgtgcaggaagctctcaatcacttgatgaagggaaggacttctctggtcattgctcacaggttgagtaccgtacagaatgcacatcgaattgctgtttgttcagagggcaggataactgaactggggacacaccgagaactggttgctaagggaggcagttatgcatcacttgtcgggacacagagacttgctttcgagtaatcacacgtcaactgcgaggaacggatcgactgcaatgtaggggattctatatattactctattttccttcagggcccatcggaacataggaattctcgtggaaatcagaatgaatttcatgggtaaaatatagaaaacagaagatgaaaaaaaacccaccttctgaatgtggccttggttataggttgtttcttatccacagaagcaacacatgaatcagaaaacacatgtatgtatcgaactttataatatattaacctaaacaaaggacaacaaacttcttatcctc

SEQ ID NO: 140267 - DNA, 1735 bp, Zea Mays
ttaaagttaaaaaacatttaatttttcgaaaagtgacagccacaactagcacatatacaggaaccattattgcatctgactctagatctaacggacacccgacgctgatagtatagtacagttgttgccagaaaccagatacgtatccactgacgtaaatggtattccgtaccttctgacgatactgtgcgatgaagtaacctccttttaccactggatccttggcgcttcctcgtcacgttcccagacctcgaaagactattcccctcaaccctccaaaagaagaggactgttgaaacttggatgccatggcatacgtccacacgccaccgtaccagtcgagatcaagacggcaataatagacaagaacaaggtgcgtggcagtgcactcgacgatattaatggagctgctttgcacgggcggcagagagccgtagacagagcagtgacggtcgtcgtacacagatcacgatgctgctcccacactcttcgtcagcctctgcaactgctaccactcgtgggctagcactagcagcagcagcaccgccgccgcgtccgaccgctcgcccccggcgcgcacgcctcctgcctccacgcgcgcgggccgagacgcatgcgacgggcgttggcgccgaccgcgcggccgaggcgcttctccagagcgggctgcgccgtgagtcgctgccgcggcacgtcgcggtggtgatggacgggaactcgcggtgggcgcgcgagcgggggctgacgcccgcggacggccacaaggccgggggccgcaacctggagcgggtcgttgcgctgtcgcgcgcctggggcatccgcgcgctcaccgccttcgtctgctcccgcgagaacttgagccgccccaaggccgaggtcgactacatgatgggcttgtccgagtggctgataggcgacaacatcgacaagctctcgaggcaggggatccgactgcaggtgatcggcgacgccgcgaagatgccagcctctctgcggagcgcagcggcgcaggccgacgaggccacgaggcaaaactcgcagctgcacgtgatgctggccatctgctacagcgggcgatgggacatggtccaggcgtgccgggagctggcccgggaggcgcaggcgaaccggctcagtccggacgacatcgacgagtcgatcatcgccggcaagctcgcgacgagcgccgccggcgagttctcctgtcccgacctggtcatcagaaccagcggcgagatgaggctcagcaacttcttgctatggcagtcggcgtactcggagttgttcttcaccgccaagatgtggcctgactttggggaggctgagtacctggaagcgttgcgctccttccagggcagagaccgccgcttcggccaatcaaaattactctaaggcctcgtttggtttaagagtccctctattttagttttatttagttcctaaattgtcaaacagtaggattaaaacagagactaaactgatttagtctctagtctctcaagatatggttaaaaagactaaatcatattaattctacatttgcccttcatttagttcaattgtactaatagcaggagaatattaaaggctattttagtcttcttatgagtcatttagtatatttttactaattttagtccttagaaacaaacatgttagagactaaattttagtcccctaactaaactttagtccctagactaaagaaaccaaacatggtctaacttgatggagt

SEQ ID NO: 140268 - DNA, 1638 bp, Zea Mays
taacaagtggtatcagaggggtctgatcctcgtcactgttccactctggatcccacaacctcccacccctacgacactcgtcttcgtcgccagcgcgccgccatgaacgtcgacttccagcacctgctcgacgaaatgtccaagcgcttcgacggctacgatgcgaagctgacgcagcgcctctccgactacggcgtcaagctgcagcagcgaatgctagatcgcaatctggaactggagcgtcgtatggcggatctcgacacacggatggacgacaagttggcttcgctctccacggccaacgagacgcgcttgtcgcagctcgagtcggtggccatctccttcgacggttggcatccctgcatggagggttccgtcgacgacatccgtcttcacgtctccaagttgaccaatctctacgaacggtcggcagtggagcaccctaccgtcatgactggtgtgcttgttccggctccctctccggccgtgcgcccatctgctgctgcctccacggacgctcaacctgacaggcaccgcctgaatccatcaatccgggatgatggttgcggagttgtcacaattcttgatcatcacccggcaaagggtgcgtcatccccttctcaccccatgtgtttgcttctcctattttccactgttcgagatccgagtttaaggaacccgtgggtggaagtttggctggtttatctgatcattttcctaaaatgttgtttcctacgtccgatggggatcaacccaagttatggatctgtagatgtgaggattactttgatctgtatagtgttgatccagcgcagtgggtgagggtgtcatctatgcatttcagtgctgctgcatctcgcttggtgcaaactgtgcagagccatcttagatcccgttcgtggttagagttctgtggttgggttttggctcgatttggctatgaccatcacgaattgttgatccgccagttgtttaacattcgtcaaacttcatcggtgtctgagtacatcgatcgtttctcatccctttgtcgaccaattgacagcttacggatcgcacacagaccccctttatttcaccatgcgctttattgatgatttgcgtgatgatattaattcttctattttggttcaacgtccatcttcttggaattctgcctgtgtgttggctcaattacaggaggaggtctcggagtacggcaagaggccaccgacccggcaacctgatccattctcgagaactcagtcaacaccaccagcttctcttccacttccaccacccccgtggaaaggagagaaacagacaactctgggcgaggaccgtcggggcgctaactcaaataatatggaggacaagtggtctacccttcgggcttatcggcgtgcaaggggctgtgtattaagtgtgcagagaaatggtctaaggatcaccgttgtgctgattcgattcaactcaatgctgtgcaggagatatttgagctgttttagtgggattcggatgctcaatcagaagggaatgacccaatccaacctttagagcagatatttatgttcgtgtcggtggctgctgtatctagaatgccaggtccacgtacattttgtctgggtggcattattcatcaccaagctgttcgaatca

SEQ ID NO: 140269 - DNA, 106 bp, Zea Mays
caaggaacaatggccaaggaagcgccaaaattactctggatttaataaccagctatttcagatgtgcatacagtacaagttacatgatgaacacagccactactag

SEQ ID NO: 140270 - DNA, 483 bp, Zea Mays
atgctctccagcctgacgaatagcatcaggctgtcgaagagcatctgctcgaagtcatcatccttcttgtggatgtccttgtagccataccgcgccacgcatctaaacatgtggaagttcttgggaccaattcgcttcacaaggaacctttcatccagtggcacagtgtagacaggaaggtatttcacacacacaaagaccagggtggagtggatggcagggaggttggtgatgaagtgtgagaagatgtgaggaacaccacttgccagctcggtgtacaccaggcccacaccaggcaccctgaccagaccgaggcttggaccaaggcctaggatccatgccatggacaccttgctgtgcatctcaaactcataccgcttgagcgtaccatagtgccatacatacatgatgatgaggaaggcaacagcaaacacaagtggaacccagccaccctggtcgatcttccgcaccacagcggtgaag

SEQ ID NO: 140271 - DNA, 157 bp, Zea Mays
ctctcatgatagctcacagaatcataatacatagaaaagccatcatacacaacattctcatcacaagtcatacacaattccagcacactagttcttccaaaacagaggttcaaacatacaaaggttccaccacaaaggttcgaagcattcaaacaga

SEQ ID NO: 140272 - DNA, 468 bp, Zea Mays
atggaagacgctcagattcctccttctcggccatctccatcgcgccctgctcgcccagacctccacgctattcgtcgcctgtgctggtcaaactctcctcgacctcgacctcgacctcgtcgcacgttagaccggcctacctccctctacgtgctggctgcgttcggccttggtcctgatcgtcgtggactgaacgacgccgtagtggcaccctcccctccaaaccggcgtgtccctgtcgatgcagctctgtcatcgtcttcagccgtcgaccttacctcgcctatcgttctcaacccgccccgccatacgctcacctcgcctagatgctctggccacgcctgctctgcttcagctcaccgtcgatgcttcgtcgatgtcgtcgtgctgtcgcgccatcgcctcggtctggtcgtcggccaggacctctcaatactcggctcccaggcgtgtcttcctgctccatag

SEQ ID NO: 140273 - DNA, 96 bp, Zea Mays
gattttttggtggcgcggggctgtccgtcgatggcagaacgggtcggtggcagaacaggtcaaaggcagaacagtcagaggcaaactactattact

SEQ ID NO: 140274 - DNA, 4809 bp, Zea Mays
atggaatctctatttgtaggcttgtctcataacaagccaaaaaaatcggtggcaaccgcaatagttcgagaagttttatctcatgactggttgctcctagactatatttgcacgcaaggtgatcttgctctcatcgattttatcaaggaaatcccttgtgaaccaagggtagaagtcgttcttattgatgatgcctttgttgaaaggaagtggatggagtgtttatttcagccgagcgcatatttaggtgacgaggtgtttattccgataaacatccgagagacgcattggtatcttgctgtgatccatgcaagaaatatggagatacaagtgctcgattcacttggtacttcacaagaccgcaaagacctcactgactttattaaaggactgcaaagacaaatagatatgatatctcaacgtaaggagttaaaagaccacaggtggccagacctccaagttgcttcttggccgctcagagaaatagacatgggatatgcaaagcagacagatagctcttcatgtggcctctttcttttgaactatatcgaatactggacaggggatgaactgtctgacagttttacccaggatgacatgtcacactttaggaaaaaaatggctgctatattactatcttcagacctgaataagagaagggggtgtctgttatacaaaaatgaaaaagaagttgactctggaagcccatctgatgttgagatattagaaaacccaacagattctaataagaggaaactactccacgtgcttgatgatagcgaagtagtgtttgaagatgaggaaggccctattactcaagcagacttgcaaaggtggtttgttgatgattgggataaaagagctcctgtaaaagtctctaacgatggttgcaccagtgactttttaatggttggtctttccacaaaggacatgccagtgaccaaagccgattcaatagatgttttatgtgattatatcatggcaatagaagacgatgcgacactagagagaacatgggtgcgaagtttcaatccttttaagatagaaatatctgtcaaagacctgcaaaacatattaacgacaactcaagatatgattctaagatgttttgatatggctgttcggctgcttgccaataaagagtcacgtaaaccgaaagaagaaatcataaataatagaaagcattatatggacatgcgtttttggagaatggttggttttggtaaacttccaaagtaccatcaggatcctacaacagaagagttggctaaaacactagattgttggccatcaatgaattattatatcacgggttgtagatatgttctcatgccatggaaattcaatggatgtcacgcccttttcgtaatagatcatgttaaaaagcatgtgacttttatcgattttacaccgactcaagattggtgtaaacacatgccatacaagaggtttaataccagctacctcgttctacaagctatggccatgtgggggaatgacagacgactgaaatttgttggggataacattggggtattcgttgatcaaaatggtaaacttattcaagacggcagaattatttggttagacacaccagcttctgttgttatacataaaccatatgctgtggcccgcctgccacgacatgttgagttttatgcaaataacgtcacaatagattatggtgaatttgagttgtctattctgcgcgctaggctcctcctccagctcctggtcgtgatggtggtggttgctccattcttggaggaattgggtccaccattgctcaagtgtctcaacgactatggcagtgagatcagcaagtgccagttctaccttgacatgttgaacgagtgccgccgtggtggtgtctgcctgagcttttcctccaattgggattattcatggcatgagcaggagttttgtaatgtgggtgatgatgcttgtcttattctgtgggatgctcgaactggcattgccccacctgttaagctagcgggtaccaacccggcggcgctggaaaggaaagcctgccgtcctgtcctctgtctccttttgctgccgcctgccggcctggaggaagggagggagggaggtgttcatctgcgcggcggcttcggtgtctggaggggctccgaggggaggcggggagccatggcgcggaagcacggctggcagctcccagcccacaccctgcagatcgttgcaattacagttttcttccttctgctggttgcgttttatgtcttctttgctccgtttttgggaaagcaagtactcgagtatattgccattggcgtttatactcctgtggcacttgcagttttcatcctttatattcgatgcacaagtataaaccctgcggatcctgggatcatgtcaaagtttgaggatggccttattaagataccaaccaatggctctggaatagaaggcatgaatttgccccagaaagcaaacaatgctacaggaacaaactccccaacgtctacttgcagaagttctttagatggacattctaatcaaagaggttcatccataggggaggcaaacatgaatctaggatcacaattgccaaagaaaagatcaagctgttggttgctaggtgggcttctgtgtgctatatttgtcaaggaggattgccgaaaaactgatgactcagagttgcaagcaaatggtgaggaggctctgttttgcacattatgtaatgctgaggttggcaaattcagcaaacactgcagaagttgtgacaagtgtgtggatggatttgatcatcattgtcggtggctaaataactgtgttgggcggaagaattatttcacattccttgctctgatggcaatcagtcttatctggcttgcaattgaatttggagcgggaattgctgttattgtactctgttttgtcgataagaatgcatcacgaaatatccaagacaagttggggaatggcttgactcgtgctccgtttgctgttatcgtgggcatatttaccttactttcattggtggcatgcatacctttgggcgaacttttcttcttccacataatattgataagaaagggaattacaacttatgattatgtcgttgcaatgagagctatgagtgaggcagctccagaggatgaggaaggagcaaatatcatttactccccatcaaattcagcaacaactgggttcagtgtaggaagttcacttggtcttcaccacaaaggtgcttggtgtacacctccaaggatatttatcgatcaggatgaaatgatcccacatttggagcctggaatggtgccttcaactgtggaccctgatgctgctggatatgctgaaagagcaaacagagctaagaaggcagtcaaaatcagtgctcgcagcctcgcaaagctcgataaaaatgaggtaatgaaagctgctgcaaaagctcgggcatcatcctcggttctgcgaccaatagatgcccgtcgtggtcatgaagctgatgtcatctccagcgacaatgccagtgtcaggagcggcatgagtggtgactacagcggcacaaaggaatcaaacatcgagatgaaactttctccacttcagaactcatacccccaaagccttgcaagccaggatgaatatgataccggcacaccaaccgcaagcagtctaagcagtccggtctacatccacaagcttgcctctcactctcagttcagtgcagcgcctcgccctgcgcctcctgaaagatttgtgccagctatggtacggccacccgttcctaccacacaaataaccaacccagggataccgcggccagctgttcccacaacacaaataaccaacccgatgttccaatcagccacgtcttatgttcgagagaaccgaagggcctctgtcatctgggatcaagaggctggtcggtacgtgtcagttcctgcacagacaagaatgggaagtggagtcgatctgccagcaagaaacccacggttcttgacgaacccaagtggcgagccaagcagccatgtgaggagcgtggtgcctggcaatgcctcgtcctcagcaatgccatcagggcagccttcagagaggttgacatattctgggcagtcaatattcttcggtggccccatgctgagcacccctggcgtgggcgccaataggaatgaggcagacgcaagagcacgccccgagggaagcagagatcctaatgccctgtgtgagaaagcgaggactggctctggctcctcgccaatatttgctcctggggcgttccagaggaacccaccctttgacaaatgacttgctcctgctcatgaagtttatctgaagtgccgttacgctggaataacctcagcctgaagagttgacagatagtttaggttgctcttttgggcttgccagaaggacggacaaaggcagccgtaggaatgaggctgctgccggctgtggcgataacgaaaaaaccacaaatatcgctcggagccagtgctgactttttccagtgttgggagagcgatggagtgactggtgtacactgtcatcttgttaggaattcatcagatacttgatgcgcgacagatagaaagagctctaatttctggcgatgtcaaacgctgatctgcagctgactttgtaggcgtcgattgcggtcactgtatgtgcgccatgggatactattcgacatgtgtaaaatgttcgttggggtgcactttcggacagtactcgtgcgtagtacttgctcgctagtagtaacaggtcttgagtttatccttgtagcagcatccttgtatgttgtgaaaccatctctgcgttttgctatgttgttcgctgttt

SEQ ID NO: 140275 - DNA, 1059 bp, Zea Mays
atggcgcgggctgcggctggtggcaaagatcgtgatggtgttggcggtggtcggggaggtatacaaatcactgctcatcttaatagggcaagcattgaaccaaatttccatgatctgtatctgaagttctttgataaagtaaactcaaaatccttgaacaaggaaatactgaaagccacatatgagaactgcaagttccgaggagcgctccttgctaaaaacctaggcagttggttgggaaagttcaccattggtaggaatcagacactaagggctaaggagattgatccaaaatctcttatagtggaggcatatgagaaaggattgatgattgcggtcataccattcacttcaaagatccttgaaccttgccagtcaagtatcgcatatcgacctccaaatccctggaccatgggaattctaagtctacttgctgaaatttataatcttccaaacctcaagatgaatctgaaatttgatattgagcccatgtatgccactggtgtggtacctggaaaggtgataaaatatgtagtagctgcactgcattggggtactcgtcataaaaatgattgcctccagataataagttcttccactgcttcaaattcagttttgccaattgttggaaaagttcctgctaacacttcttggccagaatttgagataaaaatagactatgaaggtatatttgattccgatagtggtgatgagaataactcgaagttgttggtgatgcaaagacatgggaaacctgatgctatgatgcagtcatggatgaatcaatttgaggccgattctgacaacaaatgctggacatcttttcaagagcgggtctcaagagcaccaaatcaagtgttgaggtattgtcgagaaccaaatgccaaacgtaacatgtgtattatgcaggcaaggatcatcaagtttgacgtcggcaacgtggtcatggtgactggcgggaggaacaccaggcgtgtaggagtcatcaagaacagggagaagcacaagggcagctttgagaccatccacatgctgcttggagctttttgctatgtctag

SEQ ID NO: 140276 - DNA, 733 bp, Zea Mays
agatatctcagataacctcttctccacgatccgtgatcgagccacctctatgcaaagcctcagcaccccatatatttcctcatttctagatcctactcaaccggcgtccaataacctctcgcttccatgtacgccgtcgcccagcacctctctttctcccacaactgttgttcccttagaaggaagaagaaatcatcagctcctcccctctcctctcctcccgtaactgttcctccactcgcgcggtgcacgtcgtggagagactagcaactgcccggcccgatgccttattcaaaaccctccagaacgcccgctcgacctccactcctctccaagctgtgctctgcttaccctcgacgctcctggtcgcatgactcgcatcgctctgcgctcggaaaaccgcccgcatgttggagctccattgcaccgccaagccaactctgcgtcgcgcttggaacaccgtcagtctcgccacacgtcacttcctccggccacgctcgtctccggcggctgcgtcccagcactggcccgctcgtcgaagtccagccgtgtgtgggctggtgagccccgccgggtcccgtgctccatctgccgcgccgctcggtgcacccagccggcacgtcacctccggcgagcccctgcactgccacggccgtcccatccgtgcgttgaagagtcgacgttcacgttctccactgcccgagggagcccagatgaagcttcgtccgtaggt

SEQ ID NO: 140277 - DNA, 706 bp, Zea Mays
cgcaggaaccgaaacgaaagcgctagacgtccgccgtcccattcgctttcccccaaggcctttctatctgcagccggtgcggcggctgtgctgtctgcctttctcccgtctccgccaaccgctccgctagccaccacgcccgccgctttcctgccgtggcctccgtcggggttcctcaacgggtaacccttctgccttcaacgcctccaccacccatcgctcgcatgcgcgtcgatcccaagtgcgaaccccctccactctagtcctctactccctccatctactttctcctgcgatcaatgatcatcatcccgtcgccacgtcttctgttggctcgctttacagacgccacttgcgtcgcgatatttatttatttttctttgtcacctcgattgttagggtttacggtctgcaggtcggtatgccccagcgctcaatcgccaatttatctgcaagtctcagcacttgtggataatttggatccatgtggtttggtttcgttctaccgccgtgctctgcgctacaccgttaccttcgccttttgcttcgcgcattgcagatttggtgccgcgttgtagatagtttatgtttggtcgaaccagtttcttccatgcagaaaataaaaaatattgtttggaccacaattgtttgttccttcgatgtttcgttgaaataaagcggggaaagtttttatctaaaaaattgt

SEQ ID NO: 140278 - DNA, 2871 bp, Zea Mays
cgcaggaaccgaaacgaaagcgctagacgtccgccgtcccattcgctttcccccaaggcctttctatctgcagccggtgcggcggctgtgctgtctgcctttctcccgtctccgccaaccgctccgctagccaccacgcccgccgctttcctgccgtggcctccgtcggggttcctcaacgggtaacccttctgccttcaacgcctccaccacccatcgctcgcatgcgcgtcgatcccaagtccgttggaatgaggcacgaggggcccgggctgtcaattaggcatgatgctgcgggctccatggcaggagctatcttcatgtccaacagcgtcacaagggaccaatgcttccaagcaagcattttcggtctacccttggagtatcgatcctttgtcagccacatcagaaaagggatgcccttgtttctctttgactatacactgcgtaagctttacggagtctttgaggctgcctctgatggagggtttaatattaacagtgacgcacttagatcagttcggcgctcatatccttcgcaggttcgcatcaatattatttggaagtgcaagccactaagtgaggatgagttttttcctgctatagaagacaactactatcggccaaggaagttctactttgacctttcctatgagcaggttgttcggctttatgaactgtttggcaacaagagagtaggacgccctattcatgactatcaaaaaaatgagtgtttgcaaacaaaccgctcaagcaaagggatacctgacaaagaaagcttgactccagatcctcattccagtaatcaatcacgccttttggttcccaacatttccgaaatcataagatattctactcctacaagcatacacacagatttaccacttaatgttgaggcatacccaagcacgttgatgcccttgggaactgaagttaatggagccaaaattgctcccaccttcagctcccatagtgaccaaatagaacctttttctcaaagtgagtttttcccagctgcttcaatgacagatgctgtttcaactcaagtatctgccccttgctctgaaactaataaccagttggttgggcaatcacatccattaccgcacaactatccacagaatattttttctgctggatttacagcccaggacccaattgaaggatctaaatttgttgcaaaccaattgtattcattatgtcgtgattatatgcacgatggcttgttaacttctggatatggaactcaaaatcgaacttacaaagggatgaatcacttgaattcaacttgtcctccatatgacccattacatccttttttgccagtgtcaaataatttcgattatcaggctcaatgtgacatctattccaaccaaggctgccctgatacatgtaatgacatatgtgcatatgagtgtgagtgtttaagtgaagaagtggtagcagcggaggaactgaaccaacgaggtatttctacatgcccacaagttcttggatgggatgggaaagcagtatcagcaattcatcaacagaatatgtgttctactgattactttcagatttctgatcgtgatgaagactctgaaaatgatcagatgaaacatggtactcatagcaatgcttcagattcatcagatcgtgaaaatggtattgttgatccacgacatacacaacatgctgtaggaactgaaaacaacacaaaggatcagtgtagccagccaaaaaaaggtgtattttctcgcttatcagtgaggaaggaactgacttctcaagatgccactggttctacactcaaccaattggtttcttctcttgttcggaagacagaacagtggagccacaacaatagaccgattgaagatggtctcattattcctttgattggggagcaggctgactgttctcatgcagcgctgaacctgctgagtgaactagagctggataaagacgtgagcatagagccacaacttcccttcttgaacttcaagagacgcagtgaagcagggaaggtggatgcaaatttaggaaaggagatcagtgggaaaatgaagagaagaaagcttgtgcgtccttccttaggagaaaacaatgattctacaaattttggagagcagcttataggaaattgcacacaagacaagaatcaaaaccatcaggaaagtgaaaaccattttgacattgacctaaacatacctgcagcaccaatagacgacggcccagtggaggttaacagaattgcagtgtgtcctagtgttgttatcaaggtacaaacagagaaaccatatgaaatagatacaaacaaggtaaactcaaatgtgatggagacaactgaagaacatgatccatccagtgcacccacacaaaaggttatccctgattttaacatggcagacttgaacacaatggatgaatctaaacttcgcacaatcctcgagcatacatcatcattgttgcaagcacttgctgaagtaaaaaatggggagtccaacaactgtgaacaggctaagtcaagctttgaagataagaaagtaaacatggcatactctgacggggccaccaaatctgagtgcgattagcagtagctgcaaagatattgatgtttatacgctaaactggtgcccgtcagtgcatgcagtggctttatccttaatcatagtaatattttttttgggttttttttggggtgcgggtgggagtgggattggggttttatcttctggaagagggaagagtgactatccccactcgttggaacctgaaagactagccatggaaccatgatccgtctaatgcgaagatgttctttaaattttgttcatatactcttgttactgcaattttagcgacaagaaattattgaattttctgcca

SEQ ID NO: 140279 - DNA, 280 bp, Zea Mays
ctgtttattaatgatgctaaacaggaagggtcaagtctagggaattattacattctaatctttcatggtagttgaactgtttagtttggtgggctgagatgtctatcttttgtctggtcttgaatgttcttttctaccgttgcattttgattatactatggcaattattttttcttttatatcctgtataaactatatgcttcccttgttatgctactttcaagggaggtgctgccggattttgcaatactttctttctctatgtgttgcataagtcttg

SEQ ID NO: 140280 - DNA, 1120 bp, Zea Mays
acagtttacacccacaaagtgaaaaacatccggtgcgaatgctgtttgaaaacctaggtttttctcgcggttaagccgttaagctcgtgcttgctcactgctgatccctcgactgtgtcttttcgctttggagctcgaggaagcttgccttgccatccgccacagcaggctcatccatcaggatctactaatttggtaaatgatggcagtcatcctgcctaggaccgtccgcagggcggcggaggcagcgttgtcactacactccgtaccgccgcgcgccgcctgtcactttgcgcggtctttgggcggcgtctcttctgcttgcagcatggagttcgtgtcgtggcaaaatggcgggggcatcctgcaccgggcggcctccgttgaccccactgctgtggtggaggctggagcggttgtgcactctggtgccgtcctcggcaaagaggtcgtcgttggttctggggctgtggttgggccttcagtttccataggtcaatcaactagggtcgggtacaatgttgtcttaagcaattgctcagtgggtgagttctgtattatccacaatggatcctccattggtcaagatggttttggcttttttgtggatgaggctggacaagttaagaagaaaccacagatgctgtgcgcaagaattggagaccatgtagaaataggggcaaatacatgcattgacagaggcagctggagagagacaacggtcggaaatcataccaagattgataatctggtccagataggccacaatgtggtcattgggaagtgctgcatgatatgtgggcaagtagggattgctggttctgcaacgtatgtatagcttcattggttgcacctttcttctgcttatgattgttgtatgattcgtgtgggccatttctcaagattaatcctgttatgggtatgcagactgggggactatgttacattgggtggtagagtggcaattcgggaccatgtctcagtcgcatcgaaggtgctgtgttcacagctctggtttttttttttttgctttgccttctttgtgcaccttgtatcaaagctagtttgaattcggcgcaacatcgttttgccttgtctaatgtcatatcgtggttacatt

SEQ ID NO: 140281 - DNA, 1361 bp, Zea Mays
acagtttacacccacaaagtgaaaaacatccggtgcgaatgctgtttgaaaacctaggtttttctcgcggttaagccgttaagctcgtgcttgctcactgctgatccctcgactgtgtcttttcgctttggagctcgaggaagcttgccttgccatccgccacagcaggctcatccatcaggatctactaatttggtaaatgatggcagtcatcctgcctaggaccgtccgcagggcggcggaggcagcgttgtcactacactccgtaccgccgcgcgccgcctgtcactttgcgcggtctttgggcggcgtctcttctgcttgcagcatggagttcgtgtcgtggcaaaatggcgggggcatcctgcaccgggcggcctccgttgaccccactgctgtggtggaggctggagcggttgtgcactctggtgccgtcctcggcaaagaggtcgtcgttggttctggggctgtggttgggccttcagtttccataggtcaatcaactagggtcgggtacaatgttgtcttaagcaattgctcagtgggtgagttctgtattatccacaatggatcctccattggtcaagatggttttggcttttttgtggatgaggctggacaagttaagaagaaaccacagatgctgtgcgcaagaattggagaccatgtagaaataggggcaaatacatgcattgacagaggcagctggagagagacaacggtcggaaatcataccaagattgataatctggtccagataggccacaatgtggtcattgggaagtgctgcatgatatgtgggcaagtagggattgctggttctgcaacactgggggactatgttacattgggtggtagagtggcaattcgggaccatgtctcagtcgcatcgaaggtgctgtgttcacagctctggtttttttttttttgctttgccttctttgtgcaccttgtatcaaagctagtttgaattcggcgcaacatcgttttgccttgtctaatgtcatatcgtggttacattactctgagcagtgagcactcttgaatcctttgagctctgattcagttgtgcttacagtggtgcaaactattcttttctccatgctgagcagccgagcctaagaagtttatatgcaacttgtgtgtcttcacacctagtggtttcagcaaatagaatgtatagtcaaacaaaagatgttaactgtttataattatggcaagcacctgcatacctccaccccaactcagtggcggatgcacagggtatgctgggtatgcacccgcataccctgcaaaatcagtgaatatttacatattatataatagtattgttgtatgtagaaactaaaatggaaaaagaa

SEQ ID NO: 140282 - DNA, 1414 bp, Zea Mays
acagtttacacccacaaagtgaaaaacatccggtgcgaatgctgtttgaaaacctaggtttttctcgcggttaagccgttaagctcgtgcttgctcactgctgatccctcgactgtgtcttttcgctttggagctcgaggaagcttgccttgccatccgccacagcaggctcatccatcaggatctactaatttggtaaatgatggcagtcatcctgcctaggaccgtccgcagggcggcggaggcagcgttgtcactacactccgtaccgccgcgcgccgcctgtcactttgcgcggtctttgggcggcgtctcttctgcttgcagcatggagttcgtgtcgtggcaaaatggcgggggcatcctgcaccgggcggcctccgttgaccccactgctgtggtggaggctggagcggttgtgcactctggtgccgtcctcggcaaagaggtcgtcgttggttctggggctgtggttgggccttcagtttccataggtcaatcaactagggtcgggtacaatgttgtcttaagcaattgctcagtgggtgagttctgtattatccacaatggatcctccattggtcaagatggttttggcttttttgtggatgaggctggacaagttaagaagaaaccacagatgctgtgcgcaagaattggagaccatgtagaaataggggcaaatacatgcattgacagaggcagctggagagagacaacggtcggaaatcataccaagattgataatctggtccagataggccacaatgtggtcattgggaagtgctgcatgatatgtgggcaagtagggattgctggttctgcaacactgggggactatgttacattgggtggtagagtggcaattcgggaccatgtctcagtcgcatcgaaggttcgactcgcagctaatagcttggtgacaaaagatattcaggagcctggtgactacggtggattccccgctgtaccgataaatgaatggcgcaggcaaattgcaaatttgcggttgttctcgaagaaagctagcgtgaaaagatagcatccagcaaccccccctgcgcgattttttttccctgacggtagtatttgacagtgactgtagccctcattttttaatcgagcgacattgcttggcttgtttgctgccgcttttgtctctggtgctccaaaatttcggctacacaatggaattcgaccttttgaaagattttttggactcttggttgtttaacttggccataaggaaccctctgcattagtagcggattattttctagctgtctgctcttcatgagttcactttcagagtttgaggcagcagaggtcgttcagttcctgagtccatgtcaataccggcaaaaactataatgatgcaagtcacatataatctgatgcagaaacaccaaaaaaa

SEQ ID NO: 140283 - DNA, 1781 bp, Zea Mays
ccataatggcaattatctcgcgggagagagagacgggaggaagcggattccatccacaccgtcgtgcaccacttttccccgcacccaccacgcggcgccgcccgagcacgaccatggcgtcgccgtccatccccgccgctctccgccacccgcacctccccgccgatggaggacttcttttccactcgtccggcgacccaaccgcgcgctcctcgctctcgttcaggataggagacatgacaatgagaaggtgtcagacaggtcctggtcctgttttggctgcaaggagtcctggtttgggcaacgttgacaatctccatgagagttcaagcttatctaggagctgggatttgaacagacagattgatgatgaccgtgatgtactcatagaatgtagagatgtccataagtcatttggagagaaacaagtattaagaggtgttagtttcaagacatggtgaagcagttgggataattggaccttcagggacgggaaaatcaactatattgaaggttatggctgggctgcttgctccggacaagggtgatgtaatcatttgtggaaagaaaaggcatggtttagttagcgatgaggatatagagggtctccgcattggtttggtctttcaaagtgctgcactttttgattctctcacagttcgtgaaaatgttggattccttttatatgaaaattcaagcttacccgaggaccgcattggtaaattggtgacagaaactttggctgcagtaggactaaagggtgttgaagatcgtatgccatccgagttgtctggtggaatgaaaaagcgtgttgctctagcacgttcgataatatttgatgatacaaaggatgtagtggagccagaggtattgatgatgagctaagaaggcgttttcctctttttattatcggatatatactctgaactggaaaggctgtttctgtccataagcagacgctccttacatttcttcctctggtaggtccttttatatgatgaacctacagctgggctcgacccgattgcatcaactgtcgtggaagaccttatacgttctgtgcatatgactggacgggatgcccttggcaagccaggaaaaatagcttcctatgttgttgtgacccatcagcatagcacaataagaagagctgttgataggttgctatttcttcatgaggggaaggttgtttgggaaggaatgacacatgagttcacaacatcagctaatccaattgttcaacagtttgcatctggtagtttggatggacccataaaatatttttgaagacccaacccagtagtgaatgaagcataggtgttttgttacaccctcttaaagatcatcccaacaaaatctagagcatcaagaatccaacaatatctggagcatcaagaatccgaaatggggggtctatggcagttgggagaaggaaacacatttggtttgtcattgtttcattgagtttaacaggcatctgcagcagtatcattcggtcacgtcaccttctatgcgcataattgtggtaccagcttgtcaaataagcattagttttctatacaccattctttgagggaaactgtgcgagcgatccaagataaactacatcattcgtcaggaaaactgagctatcatgccaaaaacaaaaaaaaatactaaacacccttcttttagtcatttataaacgagactgatgtaaatgtttactgtaactgttgcttatggtatagcagcgtcgattcctcagtattctcagataattttatttatacgtttgtctg

SEQ ID NO: 140284 - DNA, 1664 bp, Zea Mays
ccataatggcaattatctcgcgggagagagagacgggaggaagcggattccatccacaccgtcgtgcaccacttttccccgcacccaccacgcggcgccgcccgagcacgaccatggcgtcgccgtccatccccgccgctctccgccacccgcacctccccgccgatggaggacttcttttccactcgtccggcgacccaaccgcgcgctcctcgctctcgttcaggataggagacatgacaatgagaaggtgtcagacaggtcctggtcctgttttggctgcaaggagtcctggtttgggcaacgttgacaatctccatgagagttcaagcttatctaggagctgggatttgaacagacagattgatgatgaccgtgatgtactcatagaatgtagagatgtccataagtcatttggagagaaacaagtattaagaggtgttagtttcaagacatggtgaagcagttgggataattggaccttcagggacgggaaaatcaactatattgaaggttatggctgggctgcttgctccggacaagggtgatgtaatcatttgtggaaagaaaaggcatggtttagttagcgatgaggatatagagggtctccgcattggtttggtctttcaaagtgctgcactttttgattctctcacagttcgtgaaaatgttggattccttttatatgaaaattcaagcttacccgaggaccgcattggtaaattggtgacagaaactttggctgcagtaggactaaagggtgttgaagatcgtatgccatccgagttgtctggtggaatgaaaaagcgtgttgctctagcacgttcgataatatttgatgatacaaaggatgtagtggagccagaggtccttttatatgatgaacctacagctgggctcgacccgattgcatcaactgtcgtggaagaccttatacgttctgtgcatatgactggacgggatgcccttggcaagccaggaaaaatagcttcctatgttgttgtgacccatcagcatagcacaataagaagagctgttgataggttgctatttcttcatgaggggaaggttgtttgggaaggaatgacacatgagttcacaacatcagctaatccaattgttcaacagtttgcatctggtagtttggatggacccataaaatatttttgaagacccaacccagtagtgaatgaagcataggtgttttgttacaccctcttaaagatcatcccaacaaaatctagagcatcaagaatccaacaatatctggagcatcaagaatccgaaatggggggtctatggcagttgggagaaggaaacacatttggtttgtcattgtttcattgagtttaacaggcatctgcagcagtatcattcggtcacgtcaccttctatgcgcataattgtggtaccagcttgtcaaataagcattagttttctatacaccattctttgagggaaactgtgcgagcgatccaagataaactacatcattcgtcaggaaaactgagctatcatgccaaaaacaaaaaaaaatactaaacacccttcttttagtcatttataaacgagactgatgtaaatgtttactgtaactgttgcttatggtatagcagcgtcgattcctcagtattctcagataattttatttatacgtttgtctg

SEQ ID NO: 140285 - DNA, 1669 bp, Zea Mays
ccataatggcaattatctcgcgggagagagagacgggaggaagcggattccatccacaccgtcgtgcaccacttttccccgcacccaccacgcggcgccgcccgagcacgaccatggcgtcgccgtccatccccgccgctctccgccacccgcacctccccgccgatggaggacttcttttccactcgtccggcgacccaaccgcgcgctcctcgctctcgttcaggataggagacatgacaatgagaaggtgtcagacaggtcctggtcctgttttggctgcaaggagtcctggtttgggcaacgttgacaatctccatgagagttcaagcttatctaggagctgggatttgaacagacagattgatgatgaccgtgatgtactcatagaatgtagagatgtccataagtcatttggagagaaacaagtattaagaggtgttagtttcaagattagacatggtgaagcagttgggataattggaccttcagggacgggaaaatcaactatattgaaggttatggctgggctgcttgctccggacaagggtgatgtaatcatttgtggaaagaaaaggcatggtttagttagcgatgaggatatagagggtctccgcattggtttggtctttcaaagtgctgcactttttgattctctcacagttcgtgaaaatgttggattccttttatatgaaaattcaagcttacccgaggaccgcattggtaaattggtgacagaaactttggctgcagtaggactaaagggtgttgaagatcgtatgccatccgagttgtctggtggaatgaaaaagcgtgttgctctagcacgttcgataatatttgatgatacaaaggatgtagtggagccagaggtccttttatatgatgaacctacagctgggctcgacccgattgcatcaactgtcgtggaagaccttatacgttctgtgcatatgactggacgggatgcccttggcaagccaggaaaaatagcttcctatgttgttgtgacccatcagcatagcacaataagaagagctgttgataggttgctatttcttcatgaggggaaggttgtttgggaaggaatgacacatgagttcacaacatcagctaatccaattgttcaacagtttgcatctggtagtttggatggacccataaaatatttttgaagacccaacccagtagtgaatgaagcataggtgttttgttacaccctcttaaagatcatcccaacaaaatctagagcatcaagaatccaacaatatctggagcatcaagaatccgaaatggggggtctatggcagttgggagaaggaaacacatttggtttgtcattgtttcattgagtttaacaggcatctgcagcagtatcattcggtcacgtcaccttctatgcgcataattgtggtaccagcttgtcaaataagcattagttttctatacaccattctttgagggaaactgtgcgagcgatccaagataaactacatcattcgtcaggaaaactgagctatcatgccaaaaacaaaaaaaaatactaaacacccttcttttagtcatttataaacgagactgatgtaaatgtttactgtaactgttgcttatggtatagcagcgtcgattcctcagtattctcagataattttatttatacgtttgtctg

SEQ ID NO: 140286 - DNA, 1481 bp, Zea Mays
gcttaacagtatcagaagggtccgtgtcctggaaataggataggagacatgacaatgagaaggtgtcagacaggtcctggtcctgttttggctgcaaggagtcctggtttgggcaacgttgacaatctccatgagagttcaagcttatctaggagctgggatttgaacagacagattgatgatgaccgtgatgtactcatagaatgtagagatgtccataagtcatttggagagaaacaagtattaagaggtgttagtttcaagattagacatggtgaagcagttgggataattggaccttcagggacgggaaaatcaactatattgaaggttatggctgggctgcttgctccggacaagggtgatgtaatcatttgtggaaagaaaaggcatggtttagttagcgatgaggatatagagggtctccgcattggtttggtctttcaaagtgctgcactttttgattctctcacagttcgtgaaaatgttggattccttttatatgaaaattcaagcttacccgaggaccgcattggtaaattggtgacagaaactttggctgcagtaggactaaagggtgttgaagatcgtatgccatccgagttgtctggtggaatgaaaaagcgtgttgctctagcacgttcgataatatttgatgatacaaaggatgtagtggagccagaggtccttttatatgatgaacctacagctgggctcgacccgattgcatcaactgtcgtggaagaccttatacgttctgtgcatatgactggacgggatgcccttggcaagccaggaaaaatagcttcctatgttgttgtgacccatcagcatagcacaataagaagagctgttgataggttgctatttcttcatgaggggaaggttgtttgggaaggaatgacacatgagttcacaacatcagctaatccaattgttcaacagtttgcatctggtagtttggatggacccataaaatatttttgaagacccaacccagtagtgaatgaagcataggtgttttgttacaccctcttaaagatcatcccaacaaaatctagagcatcaagaatccaacaatatctggagcatcaagaatccgaaatggggggtctatggcagttgggagaaggaaacacatttggtttgtcattgtttcattgagtttaacaggcatctgcagcagtatcattcggtcacgtcaccttctatgcgcataattgtggtaccagcttgtcaaataagcattagttttctatacaccattctttgagggaaactgtgcgagcgatccaagataaactacatcattcgtcaggaaaactgagctatcatgccaaaaacaaaaaaaaatactaaacacccttcttttagtcatttataaacgagactgatgtaaatgtttactgtaactgttgcttatggtatagcagcgtcgattcctcagtattctcagataattttatttatacgtttgtctg

SEQ ID NO: 140287 - DNA, 116 bp, Zea Mays
tttttccagttcttttctatataaattcctattttgaattcaagtctagattgaggttcaaatctttaatatgcacaaacaaagatccaacatgatgcaagtttattatctctaag

SEQ ID NO: 140288 - DNA, 1464 bp, Zea Mays
gtacgtccactccatccgcacccagtctcggcgcctcaccccccaaaatcctctcgcggtcgcggatcgctcttccctccccctcttatctctttctcttctcccattccttccttccactcccccgcccagcgccaccatggcctcctccgtcgcggtgtccctccgcgccctcgctgccgccccgctccccaagtccagccccgccacttcctgccccttcttcgtgctccttgcgccggcgctgccccgacgcctgctccgcctccgctccgcacgccgcctgccgctcgccccgctcgccgcctccgattccgccttcgagtcctccgtcggagttaactacgcggagcccgacgactcggagaaggataaggaggtggagttgttcggatcgggtgacgacgagggggcgggtgagttggtggatgaccattccgtagaggtctcagccgctgtcgaggacgaggtggaggaggaggtcggggagtacgttgagccgcccgaggaggccaaggtctacgtcggaaacctgccctacgacgtcgacagcgagcgcctcgctcagctcttcgaccaggccggcgtcgtcgaggtcgcagaggtcatttacaacagagaaacagatcaaagtcgtgggtttgggtttgtcactatgagcactgtcgaggaggctgagaaggctgtggagatgttccatcgctatgatgtcaatggaaggcttctgactgtaaataaagcagctcctagaggctctcgtgtggacagacctcccagacaatctgggccttctctcagaatttatgttggcaacctgccttggcaagtggatgattctagattggtggagttgttcagcgagcatggtaaagtagttgatgccagagttgtctatgaccgagaaactgggcgttcgcggggatttggttttgttactatggcatcgcaggacgaattggatgatgctattgctgcccttgatggacagagtttggatggccgtgccttgcgggtgaatgttgcagaggagcggccacggcgaggtttctaatgaggttgtatcgggtggactgcacgcttgttccatgggttgggagcatcatagcatgttctgatactggtttagacctgccattctctttccttgtgttgctgagcttctatcatcgtgtcttattgtgaagagggaactcttcactaatattttgttatgtacttgttgtgttcaaaagttcttgtactgtaggctactgttatgatgcgcctagctcaatttgtcgatgcaattcgaaattttgtctaacatctgttcatgcaaaatactgtgtatgtgcagtttggctcttctgctttcttggcgagatcatgttcacgaaacgtacacttgtagctgccagccggcggtggtgccaaaatacacaaacaccgtatcaatgacacatgggccacatgctagaggaagct

SEQ ID NO: 140289 - DNA, 123 bp, Zea Mays
gtttcttctcttctcaacccctctagtttgagttttgagtttattcttaccttcacttgtttagagagtgttttggggttaatctttggtttagaaactataatgcatttattgcaacctcag

SEQ ID NO: 140290 - DNA, 246 bp, Zea Mays
gatattttattcaatgaaggggacaatgttttgttctatgttgctctcacaattttcaaggtaactcaccaacttatattagttaaagattactttcatttgctttcacattacttatgtccaccacgtttgcaaatgcgagaagatgatctactacgcacccaacatatcggtgatgtgattgatattttgcaaacaaccacacatcatctatatgaccctgatgaactcctgatggtaatcttt

SEQ ID NO: 140291 - DNA, 2820 bp, Zea Mays
aatctgccagaatataattacattagatttgagggtatggggaagacaccgaagaagaagaaactaagtgaatcgggatcgagaggcagcccgagaaccagcaggtgcaactcgaggagcagccaatgcagcggcgagcagatcagctcgcacccagcgccagcggtggacgaggacgacgccgtcttcatcgggctggcctccgagctgaaggaggaaggcacgaggctattccagaccagggactacgagggggcggcgttcaagttcgacaaggcgatcaagctgttgccgcagggccacaacgacgtggccttcctccactgcaacatcgcggcatgctacatgcacatgaaccccgaggagtaccaccgtgccatcgacgagtgcaactcggcgctggatgcgtcgccggcgtacacgaaggcgctgctcaagagggctcggtgtttcgaggcactggataggctagatctagcttgtagggacgcggagaaggctctgagcctggagccgaacaacgtgacggcgtcggagctgtacgagagcatcaaggaggtgatgcagatggaggaggacgtgtcgtcgctggagagacaggttgcgtcgtcgtcggtccaccacgagcctgctgctgccatcagtagtctcgccaaggagaggatacagaggagggtgtcgcggaaatttaggaactcaatcgtggaggaggaggtgtgggagatgattcagggggaggaagtggacgacgatcatgggaataacgacgatggccaagaggaccatgctgggagtaacgaggatgatggcgacaaagagagacacagcggcagtagtaatgggaagcataataattcagagacgcaggagaagccctgcagcctgctgcagcacaggcacgggcaccaccctgaagagaaagagacgaaaatcttcaagaacgccgccgagcagtacagcaagcagtgtggtgccagtgccacgaacgaagctgcagggcagcactctccggggaggaggcatggccaagatgagcatgagaagcatctcaacgagatcctggtgaaaggcatccagatgcctgctgagaagggaaagcacacggcgacgacgacggcacagaataatcaagccagcgtcgtggagaggcgtaataagaagcattttgaggtgggcagccatagcaggcatacgacgacgcaggaaagatacgagagatacgccaacgccagcgccagcctgccggggaagcactccttactggacgaaaagtacatgccgccagaacggcaaatcaccatcaggacatcgaactacggtggtgctagagaaaagcatccaaaactatacgccggcagcagcagcagggagaaccatgaggctgccagagaggtggtgaagaagaagttcaagttcgttcacggggacgacataaggatcgtcctaatccccgagaactgcagcctgttgcaggtgatggacatcgcccggtacaagtacaacccgcacctcaagtcgttccttctcaagttcatggacaaggagggggacctggtgaccatcacctccaccgaagatctgaggtgggtggaggacctctacccgcaggtgcccgtccggctgcacatcaaggaggtgagccccgagcgggagatcaccagggacctggtgatgccccagcagctgtcctgtctccctgagcgagagccgaacctgaaccactacagcgcccacactacctccgacgagtacgagtgcgggagctcgaggagggacgacgagcggagtcaccctccttgcgccaccgacgagtggatggtgcagttcgctcgcctgttcaagaaccacgccggcttcgactccgacgcgtgcgtggacctccgcgacctcggcatccggctctactacgaggccatggaggacaccatcacgagcgaggaggcgcaggagatattccaggcggcggaggccaagttccaggagatggcggcgctggcgctcttcaactggggcaacatccacatgtcccgcgccaggaagcgcctggttctatccgaggacacctccagggagtccatactcgcccaggtgaaggccgcgtacgagtgggcctgcaccgagtacgtcaaggccggcaggaagttcgaggactccatagacgtgaagcccgacttctacgagggcctcatcgcgctcgggcagcagcagttcgagcaggccaagctctcgtggcgctacgccgacacgtgcaaggtggacatgggaaccgaggtgctggagctcttcaaccacgctgaagacaacatggagaaggggatggagatgtgggaagggatcgagtatctgcgagtcaaagggctgtccaagtcgaggaaggggaaggcggccgcggtggtggacaagctggtggccctcagtgagcagggaaaagatctgtcgccggatgaagcctttgagcaggcatccaacatgcgctcgcagctcaacatctcgtggggcaccattctctacgaacgctccgttgtggaattcaagctggggctttctagctgggaggaaagccttcaggaggccattgagaagtttaagaccggaggcgcttccgtagcggacatcagcgtcatggtgaagaaccactgtgtcaacggaaacaatcaagaaggattaagcttcaacatcgatgagatagtgcaggcatggaatgaaatgtacgatgcgaaaaagttaaaaaacggtagctcctctttccggctcgaacctatatttcggaggaggccttcaaagctgcataatatactagagcacatgcactgcacgtga

SEQ ID NO: 140292 - DNA, 1587 bp, Zea Mays
ctcagctcctcgcacacacatcacatcctatgtactcggctgctacgtagctatatatagctgcagaacagttttagttaccggactgtaggcacaccaagctaggtatataacctagctctagtctagaataaaacatctatctatctttatctatctatctatctatttgttgaacaggggccccccggaaactagctagctaggatgccaacagcagaggcgacgacgcccgtgccgccggagctgtcctccgggcaagggcggacggtttgcgtgaccggagctggagggttcattgcctcctggctcgtcaagcgcctcctggagaagggctacacagtccgcggcacggtcaggaaccctgtggatccaaagaacgaccacctgaggtcccttgacggcgccgacgaccgcctcgtcctcctccgcgccgacctgctggacccagagagccttgccgaggccttctccggctgtgacggcgtcttccacgccgcctccccggtcaccgatgaccctgagatgatgatcgagccagcgatccggggcacgcgctacgtgatggcggcggcggcagacgccggagtgaagcgcgtcgtgttcacgtcctccatcggcaccgtgtacatgaacccctaccgtgaccccagcaagcctgtggacgacacctgctggagcgacctcgagtattgcaagaacacccagaactggtactgctacgccaagacggtggcggagcagggcgcgtgggaggtggcgcggaagcgagggctggacctggtggtggtgaacccggtgctggtgctgggcccgctgctgcagccgacggtgaacgccagcacggaccacgtgatgaagtacctgacggggtcggccacgacctacgtgaacgcggcgcaggcgtacgtgcacgtcagggacgtggccgaggcgcacgtccgggtgtacgaggcgccccacgcgcacggccgctacatctgcgccgagagcaccctgcaccgcggcgacctctgccgcgtcctcgccaagctcttcccggagtaccccgtacccaccaagtgcaaggaccaggttaaccctccggtggtaggatacaagttcaccaaccagcgcctcaaggatctggggatggacttcgtgccggtcctccagtgcctctacgagacggtcaccagcctccaggagaaaggcatgctgcccgtgcttccgacaaaacacgaccatgcatgaccaactcggcaaatcatgatcatatcgatcccatccttgacgatactagctgctgctaccacgcatatcatatcatatatatacgatatatatagtggattcatataattgaccttatatatatatatatatatatatatatatatatatatatatatataatatgtgtgtgtgtgtgtgttattagtgtgtacaattaaatggcaactctaatgggtgcatgcatctgcatgcatgctttcctgacaagtgccacacatgcctgcaatgtatctctttggacgaatatttatatacaatactccgttgccaaatagatcatctatatatttccgagtaatacttttaacaaat

SEQ ID NO: 140293 - DNA, 1512 bp, Zea Mays
ctcagctcctcgcacacacatcacatcctatgtactcggctgctacgtagctatatatagctgcagaacagttttagttaccggactgtaggcacaccaagctaggggccccccggaaactagctagctaggatgccaacagcagaggcgacgacgcccgtgccgccggagctgtcctccgggcaagggcggacggtttgcgtgaccggagctggagggttcattgcctcctggctcgtcaagcgcctcctggagaagggctacacagtccgcggcacggtcaggaaccctgtggatccaaagaacgaccacctgaggtcccttgacggcgccgacgaccgcctcgtcctcctccgcgccgacctgctggacccagagagccttgccgaggccttctccggctgtgacggcgtcttccacgccgcctccccggtcaccgatgaccctgagatgatgatcgagccagcgatccggggcacgcgctacgtgatggcggcggcggcagacgccggagtgaagcgcgtcgtgttcacgtcctccatcggcaccgtgtacatgaacccctaccgtgaccccagcaagcctgtggacgacacctgctggagcgacctcgagtattgcaagaacacccagaactggtactgctacgccaagacggtggcggagcagggcgcgtgggaggtggcgcggaagcgagggctggacctggtggtggtgaacccggtgctggtgctgggcccgctgctgcagccgacggtgaacgccagcacggaccacgtgatgaagtacctgacggggtcggccacgacctacgtgaacgcggcgcaggcgtacgtgcacgtcagggacgtggccgaggcgcacgtccgggtgtacgaggcgccccacgcgcacggccgctacatctgcgccgagagcaccctgcaccgcggcgacctctgccgcgtcctcgccaagctcttcccggagtaccccgtacccaccaagtgcaaggaccaggttaaccctccggtggtaggatacaagttcaccaaccagcgcctcaaggatctggggatggacttcgtgccggtcctccagtgcctctacgagacggtcaccagcctccaggagaaaggcatgctgcccgtgcttccgacaaaacacgaccatgcatgaccaactcggcaaatcatgatcatatcgatcccatccttgacgatactagctgctgctaccacgcatatcatatcatatatatacgatatatatagtggattcatataattgaccttatatatatatatatatatatatatatatatatatatatatatataatatgtgtgtgtgtgtgtgttattagtgtgtacaattaaatggcaactctaatgggtgcatgcatctgcatgcatgctttcctgacaagtgccacacatgcctgcaatgtatctctttggacgaatatttatatacaatactccgttgccaaatagatcatctatatatttccgagtaatacttttaacaaat

SEQ ID NO: 140294 - DNA, 990 bp, Zea Mays
ctgagctgatcacgagtctctcagcgagtgctggagagcccactatgtccgccgccggcggcgacctgccggagactgtggaggtgacgctgcgcgccgtcggcccgtcccgtccaaccaccctccgcctccctccgcttctctcggtcgccgagctgcgcggctgcatcgcgcgcgaacgccgtctagcaggcacggaagaagttcgactccgcttgatcctgcgggggaagacgctcccgcaccaagacgacagccatgtcactctccgcgatggggatactcttatagtcgccgtggcacctaagcctcctgttaatcatcttcttgatgatgacgttgaggacgaagaagaggatgaactgaagttcagaataccacaaacgacaaccttgtggaagaggaaattttttatgtttcttcgagacaaattgagattgcctgatatcattttgatggcgctgttttctctcagtatgaaagcatggattatcattgcaatgtggttcctattggcaccgattgctcagaagtacgacattggacctttatatataattggtactggtttcttgatcatacttattaatctcggaagacgacagcaaggtgatgttagtgcatactccatattcaacgaagattttagggagctgccaggaacacttaatgcagatcgcattgatgcagacatccgggcaggtcaattttaagcccttactgggcattgcagagatagggaccatggtatgctgagatttgtacagaagcgtactgggcattgcatttgtttgtgcatggaaagcagtgtggagataaaggctgtgcccctctaaggttaaggtcaaataaatttctgacctgtaagtgaaaatgttgcctggttacaattggaaattaccgtgatactttgcagatctgtacttgtgaaaccaaaagagcagagtagcttaagactggcaacaaagtgattttattcctctcttgcaa

SEQ ID NO: 140295 - DNA, 521 bp, Zea Mays
aagggatacacgtcccggtgccccccacctcccgttcattatccttggtcttcacctccacctatacctacatctccatctaccgaacatcagacccctctagctaccttgccgacgcatgaacaagacgacaggttagactttgttgaaaccctcttcaatagtggcggtatcgaccatcactcttcactataacccgatggtgatcgacgaccgtgagcttccatgttattgggttctgatacttgagacttttattatgactatgtatgagatattgtctcttattagtactggatgatgagatgtgtcttattatgactatggatgagacttttgtgatgtaattgatgagactatggatgagacttttgtgatgtaattgatgagactatggatttaaatattgttatgtgattgtgtgtgagatgttttatgtgaaaatatttgttatgttgtgtgtgctatatagctgttgatatatttgttatattgtggaatgtggtgtaaaatataaacaa

SEQ ID NO: 140296 - DNA, 243 bp, Zea Mays
atggacgacatccacggcgaggtcatggccaagtcgagtggggctgtggccaggctagcttggctggacgcaaggagaagtgttggcgagttgggagcggaagggagctccggccatggaaacacagagggctggggcggccatggggagcaggcatggctgggctgggcgagcgaagaggcgaggcggccatggggagcaggcatggctgggctgggagcagagcgcgcgctgcgagcttga

SEQ ID NO: 140297 - DNA, 311 bp, Zea Mays
ctcccataacccatccgagtgccacgttcaaccaggtgtgggtgtgaagttcgccggtagccgagaggagggatgtgtccgtcgcacttgaattccggtgttgccagcagtcagtgaatgggaggggcctcgacgggtttgtcgtcgtgcgagaatcacgcacacccgactcctcgaacgaggaagactctggacgccggagaaattgtttgccggagcatcaaggtccgtcgcggtactcggactcccgcaggcagtactcggctctgcgtaaccctcgacgaacaagtgaccgaggacccaggtgttca

SEQ ID NO: 140298 - DNA, 526 bp, Zea Mays
atttgtcacagtttatatttgtcctagtttagttcgaaaatgaaccagggagcaacaaatattcgagaatggagatagcaatgaacctgtatgctgtgacagctgtgaactcactaaaacttgtttaacgtcactttttccaccatgaattaagaacagaagctacactagtcctagaccaaaaatgtgaaaaatgcaggtgaccccggtgcacgccctgggcgctggcaacagcccgatgcagggcctggtgatggaggtgatcctcaccttctcactgctcttcgtcacctacgccatgatcctggacccgcggagccaggtccgcaccatcggcccgctgctgacggggctcatagtcggcgccaacagcctcgccggcggcaacttcaccggcgcgtccatgaacccgacgcggtccttcggtcccgccatggccaccggggtctggaccaaccactgggtctactggatcggcccgtttaggttcagcaggggtctagacgcaccatgaaatcacctatcg

SEQ ID NO: 140299 - DNA, 833 bp, Zea Mays
agcacgcacgaagcccgatggacgaagagcgagtgcgacgcagtgacaacgagcacgcacgcaagcgtcaacgcgagccagcggcaagcacgagtgctgagcgttggcaaactcaacgaacacgaccacggtcgcgtgctgacgtggataggacaacggcagctgatgagttggagcaccaccgagtagccgacgtgggtgagcaaagcaggcaggacgccgagcgtcacggcgagctagaaaatgatttggcgtgggagctcgacgcgccgtggcgagcagagaacttcacgcatacaatagaggggttcgacacgagcagcacgggcaaaccaggggcgcgcgagatccgggaggagggagcagaggatgggcgcgccgccatgggagaggactggggggtcacggcgcagcgggttgggcgccatggaagagggcagagctcggcgagctcgaaggaaatggggaggaagagcgaggtaccagggagattcgatttggccgagccggcagaggaggaactccgcgagctagagaaacgcgcggtcggagcagaggagcgcgcgccagggagaaccgagcgggtgctgggcacagccaccgacggggaaagccgccacgcagagaaggaagatgagcgcgcggccagcctggaggagcaggggcgcgacacaggaggaggaagatggcctagcgagcactggagacaggcgacggtggccatgggcagggaactcgtcagggcgcgtcccgagcagagggatgagcgcacaggagctcaggaacgactagtgagcgctgcaattgacagagagaagggtccggcgatttga

SEQ ID NO: 140300 - DNA, 1685 bp, Zea Mays
aacattttcaatcttttagcacgtacaggaaaataagaactgaaacaagcgcatgtcccccgtcccgagtcctagcgcgactccgtgcgacggcgaggcctctgtcccgtcctcgtctcctcgaggcccggaggctgcgagtctgtgacacttgaccgtgaggcggacggcgactcggaggacttcaccagcgagtccctcaagcaccgaggccgagccgcccaccgcccgccgccgcctcgcctggcgctagtcgccgttgccgagcctgttcggcacatccgttggggtgccggggcaccgatcaggctgcgcacagccgaagtcggcctccgggtgccccaagctgcagagcagcgcgccagcgcccgtggaccggtgaatcaagagttgctgctagctgtgtttggctggcagggaagttggaggagagtcccaggaaatcaaggcatattatatttgtcttccacagaatggaatgtaggagagaaaacttgccaattgaatttttagatgttttttcaaagaaatattcggaactgaggcatgacctgatacggacagaacggcatctgttgaaggagatggggtttatttgccatgtcgagcacccccataagttcatatcaaactaccttgcaacacttgaagcccctcctgagcttactcaagaggcatggaaccttgccaatgatagcttaaggacaactctgtgtgtgcgatttaagagtgaagtagtagcatgcggagttgtgtatgctgcagctaggagacaccgggttccccttcctgaagatcctccgtggtggactgtctttgatgctgatgaagcaggaattcaggaagtttgcagggttcttgctcacctctacagcttgcccaaggcccaatacattccagtatataaagacaacgattcctttactgttaagagaatctctgatctacaggcttcaaaggaaagtccagcaagggctgttgctagcgataagggtacccctgtaccctcaagttctagccaggagaaggatccagtggctaagactatactgaacaaggtgaaggaaaaaagtgatgacgaaggtaaaccattgcccgctgaatttgatggaaaagaaaacccggtggcaaactcaaaaaatgacaagtctgattctggtgtcgaccggagtcgagaaagagagagatcaagagggcgggaacgtgatgccaggggtagggattctgatcgtgatagcaggggtcgcgagtctgatcgtgagagggaccggagacgctgctctagggaaagaagttcaggacactcagacaaggagaaatcaaggcgccattcatcacgcgaccgggctgactactacaattcgcattcatctcgtgagaaagatcggcataggcaccattgatcaaggtgacgaggatccccggtctgcagggcttcgctgcatggagaccaccacttggcagtgccgaccggatcatgaaaacttgtggattatcatcccactggtggttgtattggcttgattgtgttttgcaccttggattgtaacttgcaagatacgctagccatgagctgtgtgcaacttgaatttataaacacaacatataagatacaattgacgcacgtgcactaactgccattccagcagagcttgtggaatgttataaagaaacagtttgtggaa

SEQ ID NO: 140301 - DNA, 1977 bp, Zea Mays
aacattttcaatcttttagcacgtacaggaaaataagaactgaaacaagcgcatgtcccccgtcccgagtcctagcgcgactccgtgcgacggcgaggcctctgtcccgtcctcgtctcctcgaggcccggaggctgcgagtctgtgacacttgaccgtgaggcggacggcgactcggaggacttcaccagcgagtccctcaagcaccgaggccgagccgcccaccgcccgccgccgcctcgcctggcgctagtcgccgttgccgagcctgttcggcacatccgttggggtgccggggcaccgatcaggctgcgcacagccgaagtcggcctccgggtgccccaagctgcagagcagcgcgccagcgcccgtggaccggtgaatcagactacccttgtttcaaatcctgggtccgccattgggggcggtgaggccaccctagtagaggctagaggatgatatacacggcgatcgacacgttctacctgacagatgagcagctccgtgactcgccatcacggaaggatgggatcgacgaggccaccgagactgcgctccgcgtctatggctgtgacctcatccaggagagcggcatcctcctcaggcttgatggccacggcacaagtattgttccatcgcttttactgcaagaaatcatttgttcgatttagtgcaaagagagttgctgctagctgtgtttggctggcagggaagttggaggagagtcccaggaaatcaaggcatattatatttgtcttccacagaatggaatgtaggagagaaaacttgccaattgaatttttagatgttttttcaaagaaatattcggaactgaggcatgacctgatacggacagaacggcatctgttgaaggagatggggtttatttgccatgtcgagcacccccataagttcatatcaaactaccttgcaacacttgaagcccctcctgagcttactcaagaggcatggaaccttgccaatgatagcttaaggacaactctgtgtgtgcgatttaagagtgaagtagtagcatgcggagttgtgtatgctgcagctaggagacaccgggttccccttcctgaagatcctccgtggtggactgtctttgatgctgatgaagcaggaattcaggaagtttgcagggttcttgctcacctctacagcttgcccaaggcccaatacattccagtatataaagacaacgattcctttactgttaagagaatctctgatctacaggcttcaaaggaaagtccagcaagggctgttgctagcgataagggtacccctgtaccctcaagttctagccaggagaaggatccagtggctaagactatactgaacaaggtgaaggaaaaaagtgatgacgaaggtaaaccattgcccgctgaatttgatggaaaagaaaacccggtggcaaactcaaaaaatgacaagtctgattctggtgtcgaccggagtcgagaaagagagagatcaagagggcgggaacgtgatgccaggggtagggattctgatcgtgatagcaggggtcgcgagtctgatcgtgagagggaccggagacgctgctctagggaaagaagttcaggacactcagacaaggagaaatcaaggcgccattcatcacgcgaccgggctgactactacaattcgcattcatctcgtgagaaagatcggcataggcaccattgatcaaggtgacgaggatccccggtctgcagggcttcgctgcatggagaccaccacttggcagtgccgaccggatcatgaaaacttgtggattatcatcccactggtggttgtattggcttgattgtgttttgcaccttggattgtaacttgcaagatacgctagccatgagctgtgtgcaacttgaatttataaacacaacatataagatacaattgacgcacgtgcactaactgccattccagcagagcttgtggaatgttataaagaaacagtttgtggaa

SEQ ID NO: 140302 - DNA, 1988 bp, Zea Mays
aacattttcaatcttttagcacgtacaggaaaataagaactgaaacaagcgcatgtcccccgtcccgagtcctagcgcgactccgtgcgacggcgaggcctctgtcccgtcctcgtctcctcgaggcccggaggctgcgagtctgtgacacttgaccgtgaggcggacggcgactcggaggacttcaccagcgagtccctcaagcaccgaggccgagccgcccaccgcccgccgccgcctcgcctggcgctagtcgccgttgccgagcctgttcggcacatccgttggggtgccggggcaccgatcaggctgcgcacagccgaagtcggcctccgggtgccccaagctgcagagcagcgcgccagcgcccgtggaccggtgactaggactacccttgtttcaaatcctgggtccgccattgggggcggtgaggccaccctagtagaggctagaggatgatatacacggcgatcgacacgttctacctgacagatgagcagctccgtgactcgccatcacggaaggatgggatcgacgaggccaccgagactgcgctccgcgtctatggctgtgacctcatccaggagagcggcatcctcctcaggctaccacaagcagtgatggccacggcacaagtattgttccatcgcttttactgcaagaaatcatttgttcgatttagtgcaaagagagttgctgctagctgtgtttggctggcagggaagttggaggagagtcccaggaaatcaaggcatattatatttgtcttccacagaatggaatgtaggagagaaaacttgccaattgaatttttagatgttttttcaaagaaatattcggaactgaggcatgacctgatacggacagaacggcatctgttgaaggagatggggtttatttgccatgtcgagcacccccataagttcatatcaaactaccttgcaacacttgaagcccctcctgagcttactcaagaggcatggaaccttgccaatgatagcttaaggacaactctgtgtgtgcgatttaagagtgaagtagtagcatgcggagttgtgtatgctgcagctaggagacaccgggttccccttcctgaagatcctccgtggtggactgtctttgatgctgatgaagcaggaattcaggaagtttgcagggttcttgctcacctctacagcttgcccaaggcccaatacattccagtatataaagacaacgattcctttactgttaagagaatctctgatctacaggcttcaaaggaaagtccagcaagggctgttgctagcgataagggtacccctgtaccctcaagttctagccaggagaaggatccagtggctaagactatactgaacaaggtgaaggaaaaaagtgatgacgaaggtaaaccattgcccgctgaatttgatggaaaagaaaacccggtggcaaactcaaaaaatgacaagtctgattctggtgtcgaccggagtcgagaaagagagagatcaagagggcgggaacgtgatgccaggggtagggattctgatcgtgatagcaggggtcgcgagtctgatcgtgagagggaccggagacgctgctctagggaaagaagttcaggacactcagacaaggagaaatcaaggcgccattcatcacgcgaccgggctgactactacaattcgcattcatctcgtgagaaagatcggcataggcaccattgatcaaggtgacgaggatccccggtctgcagggcttcgctgcatggagaccaccacttggcagtgccgaccggatcatgaaaacttgtggattatcatcccactggtggttgtattggcttgattgtgttttgcaccttggattgtaacttgcaagatacgctagccatgagctgtgtgcaacttgaatttataaacacaacatataagatacaattgacgcacgtgcactaactgccattccagcagagcttgtggaatgttataaagaaacagtttgtggaa

SEQ ID NO: 140303 - DNA, 1988 bp, Zea Mays
aacattttcaatcttttagcacgtacaggaaaataagaactgaaacaagcgcatgtcccccgtcccgagtcctagcgcgactccgtgcgacggcgaggcctctgtcccgtcctcgtctcctcgaggcccggaggctgcgagtctgtgacacttgaccgtgaggcggacggcgactcggaggacttcaccagcgagtccctcaagcaccgaggccgagccgcccaccgcccgccgccgcctcgcctggcgctagtcgccgttgccgagcctgttcggcacatccgttggggtgccggggcaccgatcaggctgcgcacagccgaagtcggcctccgggtgccccaagctgcagagcagcgcgccagcgcccgtggaccggtgaatcagactacccttgtttcaaatcctgggtccgccattgggggcggtgaggccaccctagtagaggctagaggatgatatacacggcgatcgacacgttctacctgacagatgagcagctccgtgactcgccatcacggaaggatgggatcgacgaggccaccgagactgcgctccgcgtctatggctgtgacctcatccaggagagcggcatcctcctcaggctaccacaagcagtgatggccacggcacaagtattgttccatcgcttttactgcaagaaatcatttgttcgatttagtgcaaagagagttgctgctagctgtgtttggctggcagggaagttggaggagagtcccaggaaatcaaggcatattatatttgtcttccacagaatggaatgtaggagagaaaacttgccaattgaatttttagatgttttttcaaagaaatattcggaactgaggcatgacctgatacggacagaacggcatctgttgaaggagatggggtttatttgccatgtcgagcacccccataagttcatatcaaactaccttgcaacacttgaagcccctcctgagcttactcaagaggcatggaaccttgccaatgatagcttaaggacaactctgtgtgtgcgatttaagagtgaagtagtagcatgcggagttgtgtatgctgcagctaggagacaccgggttccccttcctgaagatcctccgtggtggactgtctttgatgctgatgaagcaggaattcaggaagtttgcagggttcttgctcacctctacagcttgcccaaggcccaatacattccagtatataaagacaacgattcctttactgttaagagaatctctgatctacaggcttcaaaggaaagtccagcaagggctgttgctagcgataagggtacccctgtaccctcaagttctagccaggagaaggatccagtggctaagactatactgaacaaggtgaaggaaaaaagtgatgacgaaggtaaaccattgcccgctgaatttgatggaaaagaaaacccggtggcaaactcaaaaaatgacaagtctgattctggtgtcgaccggagtcgagaaagagagagatcaagagggcgggaacgtgatgccaggggtagggattctgatcgtgatagcaggggtcgcgagtctgatcgtgagagggaccggagacgctgctctagggaaagaagttcaggacactcagacaaggagaaatcaaggcgccattcatcacgcgaccgggctgactactacaattcgcattcatctcgtgagaaagatcggcataggcaccattgatcaaggtgacgaggatccccggtctgcagggcttcgctgcatggagaccaccacttggcagtgccgaccggatcatgaaaacttgtggattatcatcccactggtggttgtattggcttgattgtgttttgcaccttggattgtaacttgcaagatacgctagccatgagctgtgtgcaacttgaatttataaacacaacatataagatacaattgacgcacgtgcactaactgccattccagcagagcttgtggaatgttataaagaaacagtttgtggaa

SEQ ID NO: 140304 - DNA, 593 bp, Zea Mays
aacttcaaaacatatagatgcaaatcctttaacttaaaatccaaatataatccaataacttcaactcaaagtattaaacagtaagcataattgaaaataatcctataactacaaatccagagctattgtaactagctactaaagtagtcataaggttgctgcataatcaagaaatgtaggtgaacgttaaaatgaaacaattaggggaaactatatgagcaaacatagatgttaaactaactctatttgcagcattacacattcataactatatgagcaaacagagatgttaaagtaactttattggtagcattacacattcacagatcattcaactatgcacataagtaaacaatgattattttcttaccaatatataagcctttgcaatgtaggactgtgagcctgtgcattgtggatactgtactttttcacgattaaatttgttcttcaaacaactaatatggcctacatgccagatattaaactaataagaactgaaactagacttgattttagccaaaaggccgagaaaatatgaattaaaatatgagttgaaaagaaggtatgcccaataacccaccttcgcacct

SEQ ID NO: 140305 - DNA, 1747 bp, Zea Mays
aacttcaaaacatatagatgcaaatcctttaacttaaaatccaaatataatccaataacttcaactcaaagtattaaacagtaagcataattgaaaataatcctataactacaaatccagagctattgtaactagctactaaagtagtcataaggttgctgcataatcaagaaatgtaggtgaacgttaaaatgaaacaattaggggaaactatatgagcaaacatagatgttaaactaactctatttgcagcattacacattcataactatatgagcaaacagagatgttaaagtaactttattggtagcattacacattcacagatcattcaactatgcacataagtaaacaatgattattttcttaccaatatataagcctttgcaatgtaggactgtgagcctgtgcattgtggatactgtactttttcacgattaaatttgttcttcaaacaactaatatggcctacatgccagatattaaactaataagaactgaaactagacttgattttagccaaaaggccgagaaaatatgaattaaaatatgagttgaaaagaaggtatgcccaataacccaccttcgcaccttaagttcacatatccatgtgtgttgtaatccttatcaataatatcatctcacaagttcctagctgatagctggacagagaagaaaaaatacagatttagaaactgaactacatacagctgatgaacacacaaaaaataatagcagaagacatgaccctgatgagcagagaattgattgctcacttgtcttgtggaggtttttagaacaacacattttcctttccttgtgagtttaaatcaatgttagcaccatcctcctcagcttaatcctcagtgttcatttccaagatctagaacagttgagaaaaggtcaagtcgtgtatgagtaacataaacaaaataaatgatttccatactctctgcccgacaaataccaaataataaggaaataaaaaattagtagcataatttccataggactggagtgcagtagagtcaactacaagaatgcatgtcatcatggttcatttatgatgtgagatatttgaatgctccatagatacacagatctataaagccatcaggtcttcaaaacttattgtttagggactgtgatactcaaaattttgaaagctaaggtagttggtatatgcaacattgtatacaatatcatacattgtacatgtgtagtgttgtctagtgaaacgaaagctgtggattcttttttgtttggctagccaacaaaaaagcatgaaacctagacttttgccatggaaaatgtgataaagaagggtattttttggatgatcgtatccgatttgttagaagttgtaggctctgtaaagaactctgtgatggttccaagcgccatagcgagttgcaatattaggaacgaataaatcggatttatcatatctatctgaagattcttgcggaaaagaaaaaaatgtctatgtattataatgtaagatgttaccatcctaaagaaacatataataaatgtgtttttttggtttattagcctgaaaattttgtatgagtaggaaaataaaaaaattatgagtgatccctgatttctgtaactatattggtatctgtacatgtagattcgatcgtttaaggatccttttttattgtttgtatgtgtgtcgatgtggtattaataggttcgttggttaactataaataatgtggagggatggaaggcatatgtg

SEQ ID NO: 140306 - DNA, 823 bp, Zea Mays
atattaataagaagcaattacggcggttcaagtaggtttgtcccgtcgtttcattccggccggccgccgccacaccaaagcaaccatggccttttctgccgccctcgcctgggccgccacgcaactcctccgcgggagcctccctcctgcccgcttcgccgctgccgtctcgcctctcacatacagcagcagccgccaactctgcagtacccccatcgccaacgattcctccgccgcaggaccgtgggacgaggccgagacggagatcctccgcgacgtcgagcccatcgtgaatatcgtcaaggacatcatccactcccgcaggcaccctgagttcaagtcaagatgtctctttgtcgttagaacaaatggcgattgggaggatttctcataccacaagtgtctccgggcataccttcaaaagaagtatccatcctattcagacaagtttctgaagaagcatcttgttaacaagagctccaatcttttccgtgttcagaagaaggccatggtggatcctttgcctgctggcagttgacaggatcttaggtttccctgctatggttagggcttagaagtgttatatggtcttcggtgaacaaatttaatgtgttttttttataaataaaaattaaactggttatgactatggcccaaatacatattttgggctgggatcgtaaggatgttgcatggtgaacagatttaatgtgttttttatagttgatacatgcatggatcgtgttgatccttgctgctgcatgatttacccacctatgattctgtacgatttaccagtcttggttctgcatgatttaccaaa

SEQ ID NO: 140307 - DNA, 946 bp, Zea Mays
atattaataagaagcaattacggcggttcaagtaggtttgtcccgtcgtttcattccggccggccgccgccacaccaaagcaaccatggccttttctgccgccctcgcctgggccgccacgcaactcctccgcgggagcctccctcctgcccgcttcgccgctgccgtctcgcctctcacatacagcagcagccgccaactctgcagtacccccatcgccaacgattcctccgccgcaggaccgtgggacgaggccgagacggagatcctccgcgacgtcgagcccatcgtgaatatcgtcaaggacatcatccactcccgcaggtataaaaatggtgaatttttaagcccagatgatgaaaaggttgtaagagaaaagcttctttctcatcatcctcgtgcagaagaaaagattggttgtgggcttgatggtataatggttgacaggcaccctgagttcaagtcaagatgtctctttgtcgttagaacaaatggcgattgggaggatttctcataccacaagtgtctccgggcataccttcaaaagaagtatccatcctattcagacaagtttctgaagaagcatcttgttaacaagagctccaatcttttccgtgttcagaagaaggccatggtggatcctttgcctgctggcagttgacaggatcttaggtttccctgctatggttagggcttagaagtgttatatggtcttcggtgaacaaatttaatgtgttttttttataaataaaaattaaactggttatgactatggcccaaatacatattttgggctgggatcgtaaggatgttgcatggtgaacagatttaatgtgttttttatagttgatacatgcatggatcgtgttgatccttgctgctgcatgatttacccacctatgattctgtacgatttaccagtcttggttctgcatgatttaccaaa

SEQ ID NO: 140308 - DNA, 675 bp, Zea Mays
caaatttgattcagattttctcactgtcttttgtaagatgacagtcgaatcgaatttgatcgaatatgtacgtcagttttagtttgatttaggtttcccttttgaacatatcaattcctctgaatcgaatttcagtctccaatccagaagatttcatgtttttttaatgtgatttaggtgagcattggaggcatgtgtatttctaggacaagactctggtaaggaaaagattgatatcaagcaacaacactcgtgtcaaggcagagtctggcacctgttaacgatgatgagtttagtgcaacctcatatcatgctttgtatctgtaactggtagaaacaaagttgttgcaacatcatccattgccgatgatttgttagaggttgacatgccatcaaaacgcaggaggctgttgaatcaagacacaagactatctagagcagaataccttgatgacaacaactcatgtgttactggtatatcagcagaaggcaaacttcttgtggataagaaaaaacttcaagctggattgatgttgatgtggtgcttttgtgactaatcatctttagagcttttgtgaatgatctagctagctatctgtaaatgatctagttgtgaatgatattataattgtgatgcttttgtgaatatataattgtggtgctattgtgtttatg

SEQ ID NO: 140309 - DNA, 85 bp, Zea Mays
cactacaaacatgtagctatgcaataatacaaatatttaagcacatgacacattcacacatgtccatatcacagatcataacaac

SEQ ID NO: 140310 - DNA, 1931 bp, Zea Mays
cgctcctccctctccctccccgttctctttctatctcctgttctcctctcaaacctcaataaaaccacgctttccctcctctccacttcggattctgctctgccttcgcctcgtcactacccacgccactgcatagaccgagaaaaaggacgaattttttcctcgccgcaacctcacaccatggaagaggcgatgccgccgccgccgccgccgctctcatcttcctcctccgccgccgtggcctgagctctcccatcgctcgctctctccatcgggcctacctatcctagcagtgaataagtcatggcagctttcgccgcgttgttcgaccccctctactgcccggaggagcacctcgatctgtaccacgaaggacccgtcgaggttgtggacgagcagtggcaggaccagcgcggacagcagcaaccggcggctcttgacgacgagctgccggcgctgttcgaggcgctccgggacaaggagggggtggtgctggcgggtgatggggaggaggatgggtacggcggctcggcaggccgggaggccgcagtcggctgggcgtcacgcgccgcggcacggctgggcttctctgcgctcacttccgcgctgtccgccgcctacctggaccgctgcttcctccccgggggcgcgctccgtctcggcgaccagccctggatgtcgcgcctcgccgccgtcgcctgtgtcgcgctcgccgccaaggtcgaggaaacgcgcgtgccgctgctcctcgacctccagctctgcgccgccgccagctccgacgctgacgcagcggacgcggacgtgttcgaggccaagacggtgcgccggatggagctgctcgttctctccgcgctagggtggcggatgcaccctgtcacgcccttctcctacctccagcctgtcctcgccgacgctgcgatgcgcctacgcaactgcgaggccgtcctgctcgcggtcatggccgattggaggtggcctcggcaccggccctcggcgtgggccgccgccgcattgctcaccacagccggcggcggcgacgacgactcggagctgctcgcgctcatcaatgcccccgaggacgagaccgcggagtgcgccaagatcatctccgaggtgacaggcatgagcttccttgtctgcgacgtcggcggcatgatcgccgggaataagcgtaagcacgcggcggcgcggatgtactcgccgccgctgagcccgagcggcgtgatcggcgcgctgtcctgcttcagctgcgagagctcgttgtccgccacagcggactcgcgcaccctcgctactacggctgcgggggtcggcccgtgggcaccgtcagcgcccgtgtccgtgtcgtcttcccctgagcccccaggtcgggcccccaagcgcgctgcggcggcgggggtcccgcatccgcttccccccgacgaggagagccgcgacgcctggccgtccacctgcgccgcgtgacgcaccgtgccggaacggtgcctatggcgagatcccccgctcaggtagtcaggtggcggtggggatataaaggagcatcagaatctcgcgccggtgacgagaacgaaccattttgcccattgccgcgagagatggggggctagattgcaagaagaaaaggatgtaatgtctgcatgctcatgtatggcagcacattttgcaatgatggttctcgatcgtaactgtttggggggatcgtaactgttcggctggctacaagccgacactgttgcagctgtttggactgctgcagctgcaatccatagagagaaaaatactgtagaagccgcagccgcagccggattgcagccgcagcaagccgcagcgaacaagcttattattagttgcaattgtagtgttgctagttcttgttggttcttggcattgcttgcttggaaggccaatgacaggggccgcctttgtcc

SEQ ID NO: 140311 - DNA, 2456 bp, Zea Mays
ctagaaccctagtgccctcatctgtctaaaaccctagttcggtgaagcactagcctgagcggcggcgcggaccggcgagacgactgaccgaacgagtgcgccagagagctccctgcaaaccttgccgcgcagtaaatggaacgcagacgtgcagacaaggaggaggcagaagagccgctgaggcccgaggaggaagaagatgaggaggacgaagaggaggggtgggacgactggtgctccgacggcgaagatgttggcggtgggctgctgtgtttgttctgtagctcgagtttcgactccgagagctcactcttcgagcactgcgccgccgagcactgctttgatttccacatgattgtgaaggagctggggctggatttctacagctgcatcaagctcatcaactttgtccgctccaaggttgcagagaaaaaatgctggagctgtggccaagcattctcttccaacacagaactctgcagccacttgcacacagtggagaattgcctaattgagggaaaggtgccatgggaggacgatgtgtacttgaaacctttcatggaagatgactcccttttgcacagcttgtcaatcgatgacgatgatgaagatggggactgtggagtgtcaatggaaaagggacaatattcagctgggaatgaggttttagctgaaccatgggggaacaagctgagcagcatatcagaaagaaatgattctgacatcagtgctcaatttcagcaagagtgtactattggtagtacacaaagggaagtcagagagtcccttcatgtggcgattgatggccacctaaaggttgcacgtgctagtgttaattccaaagcaatcaaaactgtggatgataactactttggatcttatagttcatttggtatccacagggagatgctcggtgataaagtcagaacagatgcttacagagatgcaattttaggcaatcctagcctaataagtggagcaactgtactagatgttggttgtggcacaggaattctaagtctttttgcagctagggctggtgcatctagagttgttgctgttgatgggagtgcaaagatggcttctgtggctacccaagttgcaaagaataatggtctgttgtatgatgagaacgtggaagcagaacagaagcaaggcagtgctcaagttataagtgtcgtacatacaaaggctgaagagctaaaccagaaaatacaagtcccacaaaatggctttgatctattagtgagtgaatggatgggatattgcctgctgtacgaatccatgctaagttctgtcatatatgcacgtgatcattttctaaaacctggtggtgctattctcccagatactgcaatgattgtaagtcagttgcttccttgtattctgtcctgtattttctgctgtttgacaactcgtgcctgatccaccctttagcttggtgctggcttcgggaaaggtggaactagcttgccattttgggaaaacgtatatggctttgatatgtcatgtattggcaaagaagtaacttcaacttcagctcgatttcctgtagttgatgtactgtcttctcaggatattgtgacagagactgctgtactccattcctttgatcttgcaagtatgaaggaaagtgagatggattttactgcaagctttgagctgatgctcagtgaaagtagtgccactgtgtcaggagtgacctggtgctatggcattgtcttgtggtttgacacggggtttaccgacagattctgcaaggagaagcctgttgtcctctccacctctcccttctctacaccaactcactggtcacagacaatcttcacctttgaagagcccattgcaatggcgaaggaggaatcaaccctgggttcatctgcattggctggcacagatgagtgcccagctacggcgctcaggtctcggatcagcatcgtgagggcatctgagcaccgcagcatagacatatcggttgaaaccacagcaatcagttcagatggccggaagcgcagctggcctgttcagatattcaacttgtgaccaatcattatacctctttgggcttcctaccaccacaagcaattgttactagaatttgtcttggtcgtttaagttttgcacactgaatggagcactttgtgctactgattttttggtaaaacgatgatcgtgagaattagattggaaggctttctggaatggttagggtgtaatgttgtacaataatctaattcgcattggtttggccctagttcagttgaatgatgttgacggggttgaaggcaaacataatgtatttgttgtagtcatcaaacgtgttgcgcacaattcacaaacagcaatggcatgtagctgtttatctaaccgatgcacacctgcattgtactttaaaattaaacaaaaaaagtagagcttatggaatcagtgtatatgatatgatgccctccattcgt

SEQ ID NO: 140312 - DNA, 613 bp, Zea Mays
tctaaaaccctagttcggtgaagcactagcctgagcggcggcgcggaccggcgagacgactgaccgaacgagtgcgccagagagctccctgcaaaccttgccgcgcagtaaatggaacgcagacgtgcagacaaggaggaggcagaagagccgctgaggcccgaggaggaagaagatgaggaggacgaagaggaggggtgggacgactggtgctccgacggcgaagatgttggcggtgggctgctgtgtttgttctgtagctcgagtttcgactccgagagctcactcttcgagcactgcgccgccgagcactgctttgatttccacatgattgtgaaggagctggggctggatttctacagctgcatcaagctcatcaactttgtccgctccaaggtgtgtcagcaacacccttctgctgacagttatattttttttgggacacgttaatgcctgcaatagtgttacaggctcaactgctttgcttaggccctgattggttacgcttctccaccacgcttagattcgtggaaacgccaagtttctcgcaatcattcgattttcacttattacttcaacagataaactgtcgattctgtaagaacaaaaataa

SEQ ID NO: 140313 - DNA, 1503 bp, Zea Mays
gtgtggtctgaaaacaccgaatactctgaataacctttttcaggtcagaacagatgcttacagagatgcaattttaggcaatcctagcctaataagtggagcaactgtactagatgttggttgtggcacaggaattctaagtctttttgcagctagggctggtgcatctagagttgttgctgttgatgggagtgcaaagatggcttctgtggctacccaagttgcaaagaataatggtctgttgtatgatgagaacgtggaagcagaacagaagcaaggcagtgctcaagttataagtgtcgtacatacaaaggctgaagagctaaaccagaaaatacaagtcccacaaaatggctttgatctattagtgagtgaatggatgggatattgcctgctgtacgaatccatgctaagttctgtcatatatgcacgtgatcattttctaaaacctggtggtgctattctcccagatactgcaatgattcttggtgctggcttcgggaaaggtggaactagcttgccattttgggaaaacgtatatggctttgatatgtcatgtattggcaaagaagtaacttcaacttcagctcgatttcctgtagttgatgtactgtcttctcaggatattgtgacagagactgctgtactccattcctttgatcttgcaagtatgaaggaaagtgagatggattttactgcaagctttgagctgatgctcagtgaaagtagtgccactgtgtcaggagtgacctggtgctatggcattgtcttgtggtttgacacggggtttaccgacagattctgcaaggagaagcctgttgtcctctccacctctcccttctctacaccaactcactggtcacagacaatcttcacctttgaagagcccattgcaatggcgaaggaggaatcaaccctgggttcatctgcattggctggcacagatgagtgcccagctacggcgctcaggtctcggatcagcatcgtgagggcatctgagcaccgcagcatagacatatcggttgaaaccacagcaatcagttcagatggccggaagcgcagctggcctgttcagatattcaacttgtgaccaatcattatacctctttgggcttcctaccaccacaagcaattgttactagaatttgtcttggtcgtttaagttttgcacactgaatggagcactttgtgctactgattttttggtaaaacgatgatcgtgagaattagattggaaggctttctggaatggttagggtgtaatgttgtacaataatctaattcgcattggtttggccctagttcagttgaatgatgttgacggggttgaaggcaaacataatgtatttgttgtagtcatcaaacgtgttgcgcacaattcacaaacagcaatggcatgtagctgtttatctaaccgatgcacacctgcattgtactttaaaattaaacaaaaaaagtagagcttatggaatcagtgtatatgatatgatgccctccattcgt

SEQ ID NO: 140314 - DNA, 1465 bp, Zea Mays
acacgtatattacaacagctgtgctgctaggcacccactccccagtcaaggcatatccattccatggatctcgcgtccctgctcctctcccagctgctgctgcttccggtggtaacggttgtctccggcgagaccgccgcgcacccgggctacgcgcacgctgaggaggcatgcagcggtatgctagaggcagaggcggagaaagcaacggtgctggtgcctgcgccggagcggcgcgaagagttcgacggcgggcggatcgtggacatcagccactactaccgcgaggacatgccggagtgggagtcatcagagggctccggcgagttcctgcagctggcgcggtccatgcgcaacggctccgacatcgctaacttctcggagctccggctcactgcgcactccggcacccacgtcgacgcgccgggacacgtcttcgagcactactacgacaccggcttcgacgtcgacaccctcgacctcgctgtcctcaacggaccagcgctgttggttgacgttcccagagataagaacatcacagctgatgttatggcatccctaaacattcctaaaggtgttcgacgtgtactctttcggaccctaaatacagacagaacactctaaaagattctgtcctctatatattctccgtctccagcagcgtcctctaaattccgtcccctaaagctacagtgttaacagattcacattttccatttctttttcatttttctttgttttcttctcatttgacgctacataaatgatacgtaaaaattgtatttattaattttgaaagtaataaattcgaaatgtcaatattaattacattgcttgttttgttgttgtgtaattgttgtcgataacgcgccacatagtataatatcgttggcaaaatatgttttcaaatggacaagcttgcaccgtaagcccgtactcttcttcgagaagccatagcctagcttctcttgcacgagaagcgcatggcttctaccgaagcgtacttcctctataaataccaagtgagccttccatacttcactcaaccttgcctttacaaactccacaaccatgaatccctacttagaaaacaattttcttgtgcggttgatggaagaaatggaagaggaagaagaagagttgcagttggcgaggcacatggtcaataggaggcgacgtgtacgcaatgagcgtcgtcatggtggttcgattccagggcgtgttaggattcatcgtgatcacatgagcggcgatgcaagaatccgagcggactactttggagccaacccggtgtacacggatgctcaatttcgtaggaggtatttacaattaacacattctttttaccatgtacaaaacttcatgacccctattatgacacatgaaatgtatggtaggttccgcatgcgtcgccatgtctttgagcgccttgttgatgttgtgcaacaagtggatccttatttta

SEQ ID NO: 140315 - DNA, 1012 bp, Zea Mays
acacgtatattacaacagctgtgctgctaggcacccactccccagtcaaggcatatccattccatggatctcgcgtccctgctcctctcccagctgctgctgcttccggtggtaacggttgtctccggcgagaccgccgcgcacccgggctacgcgcacgctgaggaggcatgcagcggtatgctagaggcagaggcggagaaagcaacggtgctggtgcctgcgccggagcggcgcgaagagttcgacggcgggcggatcgtggacatcagccactactaccgcgaggacatgccggagtgggagtcatcagagggctccggcgagttcctgcagctggcgcggtccatgcgcaacggctccgacatcgctaacttctcggagctccggctcactgcgcactccggcacccacgtcgacgcgccgggacacgtcttcgagcactactacgacaccggcttcgacgtcgacaccctcgacctcgctgtcctcaacggaccagcgctgttggttgacgttcccagagataagaacatcacaggagttgactacttgtcagtgggcgcatttgatgaatgcattccagctcatctagtatttcttgaaaaaagggaggtcatacttgtcgaagccttgaatctggagcatgttagccctggaatatacatcttgcattgcttgccactaagattgcggggtgctgaaggttctcctgcaagatgcatcctcatcaagtgacatgggatggtgtgaggacccaataatatggagctgggctagtgctgatccaatcgacactaatatgagctgaagatactacataaaacatgaacaatatggagttttatatactggaccccagtccaggttttaaatccacccctgcaaggggtgagtttatgtttgtgtttgggagtgtatatttctatattgcaatttgaaaaaaaactatgtatgtaataaaataagaatacatcaattcattcacatgacaattgaaaaatgtggctcc

SEQ ID NO: 140316 - DNA, 1998 bp, Zea Mays
acacgtatattacaacagctgtgctgctaggcacccactccccagtcaaggcatatccattccatggatctcgcgtccctgctcctctcccagctgctgctgcttccggtggtaacggttgtctccggcgagaccgccgcgcacccgggctacgcgcacgctgaggaggcatgcagcggtatgctagaggcagaggcggagaaagcaacggtgctggtgcctgcgccggagcggcgcgaagagttcgacggcgggcggatcgtggacatcagccactactaccgcgaggacatgccggagtgggagtcatcagagggctccggcgagttcctgcagctggcgcggtccatgcgcaacggctccgacatcgctaacttctcggagctccggctcactgcgcactccggcacccacgtcgacgcgccgggacacgtcttcgagcactactacgacaccggcttcgacgtcgacaccctcgacctcgctgtcctcaacggaccagcgctgttggttgacgttcccagagataagaacatcacagctgatgttatggcatccctaaacattcctaaaggtgttcgacgtgtactctttcggaccctaaatacagacaggtatgttttaggctgtctccagcagcgtcccctaaatttcgtcccctaaaggaatattctctgtcctttacagaacactctaaaagattctgtcctctatatattctccgtctccagcagcgtcctctaaattccgtcccctaaagctacagtgttaacagattcacattttccatttctttttcatttttctttgttttcttctcatttgacgctacataaatgatacgtaaaaattgtatttattaattttgaaagtaataaattcgaaatgtcaatattaattacattgcttgttttgttgttgtgtaattgttgtcgataacgcgccacatagtataatatcgttggcaaaatatgttttcaaatggacaagcttgcaccgtaagcccgtactcttcttcgagaagccatagcctagcttctcttgcacgagaagcgcatggcttctaccgaagcgtacttcctctataaataccaagtgagccttccatacttcactcaaccttgcctttacaaactccacaaccatgaatccctacttagaaaacaattttcttgtgcggttgatggaagaaatggaagaggaagaagaagagttgcagttggcgaggcacatggtcaataggaggcgacgtgtacgcaatgagcgtcgtcatggtggttcgattccagggcgtgttaggattcatcgtgatcacatgagcggcgatgcaagaatccgagcggactactttggagccaacccggtgtacacggatgctcaatttcgtaggaggttccgcatgcgtcgccatgtctttgagcgccttgttgatgttgtgcaacaagtggatccttattttattcagcgtccaaattgtgcgggatggtgcacaatggttggttgataatacagacatcaaactagttggagttgactacttgtcagtgggcgcatttgatgaatgcattccagctcatctagtatttcttgaaaaaagggaggtcatacttgtcgaagccttgaatctggagcatgttagccctggaatatacatcttgcattgcttgccactaagattgcggggtgctgaaggttctcctgcaagatgcatcctcatcaagtgacatgggatggtgtgaggacccaataatatggagctgggctagtgctgatccaatcgacactaatatgagctgaagatactacataaaacatgaacaatatggagttttatatactggaccccagtccaggttttaaatccacccctgcaaggggtgagtttatgtttgtgtttgggagtgtatatttctatattgcaatttgaaaaaaaactatgtatgtaataaaataagaatacatcaattcattcacatgacaattgaaaaatgtggctcc

SEQ ID NO: 140317 - DNA, 1179 bp, Zea Mays
acacgtatattacaacagctgtgctgctaggcacccactccccagtcaaggcatatccattccatggatctcgcgtccctgctcctctcccagctgctgctgcttccggtggtaacggttgtctccggcgagaccgccgcgcacccgggctacgcgcacgctgaggaggcatgcagcggtatgctagaggcagaggcggagaaagcaacggtgctggtgcctgcgccggagcggcgcgaagagttcgacggcgggcggatcgtggacatcagccactactaccgcgaggacatgccggagtgggagtcatcagagggctccggcgagttcctgcagctggcgcggtccatgcgcaacggctccgacatcgctaacttctcggagctccggctcactgcgcactccggcacccacgtcgacgcgccgggacacgtcttcgagcactactacgacaccggcttcgacgtcgacaccctcgacctcgctgtcctcaacggaccagcgctgttggttgacgttcccagagataagaacatcacagctgatgttatggcatccctaaacattcctaaaggtgttcgacgtgtactctttcggaccctaaatacagacagcttatgtggaagaaagaatttgatacaagttatgttggcttcatgaaggatggtgcacaatggttggttgataatacagacatcaaactagttggagttgactacttgtcagtgggcgcatttgatgaatgcattccagctcatctagtatttcttgaaaaaagggaggtcatacttgtcgaagccttgaatctggagcatgttagccctggaatatacatcttgcattgcttgccactaagattgcggggtgctgaaggttctcctgcaagatgcatcctcatcaagtgacatgggatggtgtgaggacccaataatatggagctgggctagtgctgatccaatcgacactaatatgagctgaagatactacataaaacatgaacaatatggagttttatatactggaccccagtccaggttttaaatccacccctgcaaggggtgagtttatgtttgtgtttgggagtgtatatttctatattgcaatttgaaaaaaaactatgtatgtaataaaataagaatacatcaattcattcacatgacaattgaaaaatgtggctcc

SEQ ID NO: 140318 - DNA, 1131 bp, Zea Mays
acacgtatattacaacagctgtgctgctaggcacccactccccagtcaaggcatatccattccatggatctcgcgtccctgctcctctcccagctgctgctgcttccggtggtaacggttgtctccggcgagaccgccgcgcacccgggctacgcgcacgctgaggaggcatgcagcggtatgctagaggcagaggcggagaaagcaacggtgctggtgcctgcgccggagcggcgcgaagagttcgacggcgggcggatcgtggacatcagccactactaccgcgaggacatgccggagtgggagtcatcagagggctccggcgagttcctgcagctggcgcggtccatgcgcaacggctccgacatcgctaacttctcggagctccggctcactgcgcactccggcacccacgtcgacgcgccgggacacgtcttcgagcactactacgacaccggcttcgacgtcgacaccctcgacctcgctgtcctcaacggaccagcgctgttggttgacgttcccagagataagaacatcacagctgatgttatggcatccctaaacattcctaaaggtgttcgacgtgtactctttcggaccctaaatacagacaggatggtgcacaatggttggttgataatacagacatcaaactagttggagttgactacttgtcagtgggcgcatttgatgaatgcattccagctcatctagtatttcttgaaaaaagggaggtcatacttgtcgaagccttgaatctggagcatgttagccctggaatatacatcttgcattgcttgccactaagattgcggggtgctgaaggttctcctgcaagatgcatcctcatcaagtgacatgggatggtgtgaggacccaataatatggagctgggctagtgctgatccaatcgacactaatatgagctgaagatactacataaaacatgaacaatatggagttttatatactggaccccagtccaggttttaaatccacccctgcaaggggtgagtttatgtttgtgtttgggagtgtatatttctatattgcaatttgaaaaaaaactatgtatgtaataaaataagaatacatcaattcattcacatgacaattgaaaaatgtggctcc

SEQ ID NO: 140319 - DNA, 1192 bp, Zea Mays
acacgtatattacaacagctgtgctgctaggcacccactccccagtcaaggcatatccattccatggatctcgcgtccctgctcctctcccagctgctgctgcttccggtggtaacggttgtctccggcgagaccgccgcgcacccgggctacgcgcacgctgaggaggcatgcagcggtatgctagaggcagaggcggagaaagcaacggtgctggtgcctgcgccggagcggcgcgaagagttcgacggcgggcggatcgtggacatcagccactactaccgcgaggacatgccggagtgggagtcatcagagggctccggcgagttcctgcagctggcgcggtccatgcgcaacggctccgacatcgctaacttctcggagctccggctcactgcgcactccggcacccacgtcgacgcgccgggacacgtcttcgagcactactacgacaccggcttcgacgtcgacaccctcgacctcgctgtcctcaacggaccagcgctgttggttgacgttcccagagataagaacatcacagctgatgttatggcatccctaaacattcctaaaggtgttcgacgtgtactctttcggaccctaaatacagacagaaagcttatgtggaagaaagaatttgatacaagttatgttggcttcatgaaggatggtgcacaatggttggttgataatacagacatcaaactagttggagttgactacttgtcagtgggcgcatttgatgaatgcattccagctcatctagtatttcttgaaaaaagggaggtcatacttgtcgaagccttgaatctggagcatgttagccctggaatatacatcttgcattgcttgccactaagattgcggggtgctgaaggttctcctgcaagatgcatcctcatcaagtgacatgggatggtgtgaggacccaataatatggagctgggctagtgctgatccaatcgacactaatatgagctgaagatactacataaaacatgaacaatatggagttttatatactggaccccagtccaggttttaaatccacccctgcaaggggtgagtttatgtttgtgtttgggagtgtatatttctatattgcaatttgaaaaaaaactatgtatgtaataaaataagaatacatcaattcattcacatgacaattgaaaaatgtggctcccatcactct

SEQ ID NO: 140320 - DNA, 762 bp, Zea Mays
gcatttactgtactttaagaagggtttatttttctccaaaagtaagtaaaaaaaatgagttgaaacggtgtgcaggaccagcgctgttggttgacgttcccagagataagaacatcacagctgatgttatggcatccctaaacattcctaaaggtgttcgacgtgtactctttcggaccctaaatacagacagaaagcttatgtggaagaaagaatttgatacaagttatgttggcttcatgaaggatggtgcacaatggttggttgataatacagacatcaaactagttggagttgactacttgtcagtgggcgcatttgatgaatgcattccagctcatctagtatttcttgaaaaaagggaggtcatacttgtcgaagccttgaatctggagcatgttagccctggaatatacatcttgcattgcttgccactaagattgcggggtgctgaaggttctcctgcaagatgcatcctcatcaagtgacatgggatggtgtgaggacccaataatatggagctgggctagtgctgatccaatcgacactaatatgagctgaagatactacataaaacatgaacaatatggagttttatatactggaccccagtccaggttttaaatccacccctgcaaggggtgagtttatgtttgtgtttgggagtgtatatttctatattgcaatttgaaaaaaaactatgtatgtaataaaataagaatacatcaattcattcacatgacaattgaaaaatgtggctcc

SEQ ID NO: 140321 - DNA, 2150 bp, Zea Mays
agattactacggcccattaactcaaatttacggcccaaaatggcgaggcaggcgaaacggtgacggagctggtagttccccaaatcccgagccgcgccaccggcagcagggagaaacgccgccgcccgctcgccccgtgcactgctcctccgccttagcccgtagccaccagatccttggcgcaccagccctccatcgcagtcctggttaggctaggggatgtcaaatctcgattccgcgacgccggcggctgcagtggcggagatagggacggcggagcgggactctaccaccgcttctgtttcagctttaaatgggacacatagatgcaagaagaagaagataaagaagaatacgactcgggagcagcaagagttacaacttgatttggattcaacattgacagcagaggcggagggacaagtagaggcaaagggaaacgaggtggaggagcaggatgccactgatgctgttgcttctggtattttgatggaggggacagcaaaatattatgaggaggactccaaggtgaaggtcagtctgatgcccgagaaggaagccaacaccactgttgtttcagtttctgagagtacaccaaaacacaagaagaggaggaaaaagaagaacaagattcaggggcaactagattctgcaaaggcatcatctagtgttgtttccatggatataattgcagctgataaatctgaaaatggttgcacagatgtggtaggggcatcaggacatgctgatatcaatatggatcccataaatggtgatgatctaagtagtgctcagtcaaaggcaaatgatgctgatgttttactgaagaataaggatggaaacaagggggataagaattgcgctgagaacagcgtcttgttgcaggagagctctgcaagaagaaaaagacggaggggaaaaagaaagtggggttcagccggtggaggaccaggcttctcttctgataatggaggcgtggttgctgagcatagcctgcattcttcagcaaaccatggtcttagctgcatatgtgctccatgtttagttgaggcacatgaaaagaagatccaaaatatctactcaccaagaggatcactggtaaggtttcaaaggaagaaactcctgatcttggaccttaatggtctgctagcagatataaatcaagattaccataatgcacacttggcacatgcaaaggttcgaaccaaattagttttcagaagaccatactgtgacgattttctgagattctgcttccagaattttgagctaggaatatggtcatcaaggaaaagggaaaatgttgaatcggttgttgatatccttatgaggggtcttaagcaatgcctactattttgttgggacatgtcttactgcactgttacagggtgcaaaacaattgacaacaaggacaaaccattagtgctgaaggaactaaaaagggtttggaataaggatgagccagacctcccatgggggcagggagagttttcaccttcaaatacattactggtggatgattcgccctacaaggctctgtgcaacccgccaaacactgcaatcttccccgaaccctacaattacatgaaccagagggatgattattccttgggacctggtggagatcttcgggtttatctgcagagaattgctgctgcagacaatgttcaaaattttgttcgggataacccatttggtcagaagtccatcacagagagtgatccaaactggaatttctatgtgaaaatagtcgataagatggagaagcaaatagttgatcaagtggaaacgaaaatagttgatgaagtggagaggtccttaggttaataggaacaaaggttcaatcaagagaaagttctgtatttgtttgtgttgattagcaggtgttttgcattgcgccagtgctatcatgtgtaatctaatttagtaattgttgtttcatagacaaaacatgatttgaagaatcttgataggttttgttgttccaaccgagggatgaatcattgtttgtcctgtatcgagtgttacaggctttctggtttgctaacttagctatttctggaagtttggttgactatgctggaggatgattcagttcgatggaactgttatatactcgaattgttgtaaatcatctcagtttcatggtt

SEQ ID NO: 140322 - DNA, 2144 bp, Zea Mays
agattactacggcccattaactcaaatttacggcccaaaatggcgaggcaggcgaaacggtgacggagctggtagttccccaaatcccgagccgcgccaccggcagcagggagaaacgccgccgcccgctcgccccgtgcactgctcctccgccttagcccgtagccaccagatccttggcgcaccagccctccatcgcagtcctggttaggctaggggatgtcaaatctcgattccgcgacgccggcggctgcagtggcggagatagggacggcggagcgggactctaccaccgcttctgtttcagctttaaatgggacacatagatgcaagaagaagaagataaagaagaatacgactcgggagcagcaagagttacaacttgatttggattcaacattgacagcagaggcggagggacaagtagaggcaaagggaaacgaggtggaggagcaggatgccactgatgctgttgcttctgtgatggaggggacagcaaaatattatgaggaggactccaaggtgaaggtcagtctgatgcccgagaaggaagccaacaccactgttgtttcagtttctgagagtacaccaaaacacaagaagaggaggaaaaagaagaacaagattcaggggcaactagattctgcaaaggcatcatctagtgttgtttccatggatataattgcagctgataaatctgaaaatggttgcacagatgtggtaggggcatcaggacatgctgatatcaatatggatcccataaatggtgatgatctaagtagtgctcagtcaaaggcaaatgatgctgatgttttactgaagaataaggatggaaacaagggggataagaattgcgctgagaacagcgtcttgttgcaggagagctctgcaagaagaaaaagacggaggggaaaaagaaagtggggttcagccggtggaggaccaggcttctcttctgataatggaggcgtggttgctgagcatagcctgcattcttcagcaaaccatggtcttagctgcatatgtgctccatgtttagttgaggcacatgaaaagaagatccaaaatatctactcaccaagaggatcactggtaaggtttcaaaggaagaaactcctgatcttggaccttaatggtctgctagcagatataaatcaagattaccataatgcacacttggcacatgcaaaggttcgaaccaaattagttttcagaagaccatactgtgacgattttctgagattctgcttccagaattttgagctaggaatatggtcatcaaggaaaagggaaaatgttgaatcggttgttgatatccttatgaggggtcttaagcaatgcctactattttgttgggacatgtcttactgcactgttacagggtgcaaaacaattgacaacaaggacaaaccattagtgctgaaggaactaaaaagggtttggaataaggatgagccagacctcccatgggggcagggagagttttcaccttcaaatacattactggtggatgattcgccctacaaggctctgtgcaacccgccaaacactgcaatcttccccgaaccctacaattacatgaaccagagggatgattattccttgggacctggtggagatcttcgggtttatctgcagagaattgctgctgcagacaatgttcaaaattttgttcgggataacccatttggtcagaagtccatcacagagagtgatccaaactggaatttctatgtgaaaatagtcgataagatggagaagcaaatagttgatcaagtggaaacgaaaatagttgatgaagtggagaggtccttaggttaataggaacaaaggttcaatcaagagaaagttctgtatttgtttgtgttgattagcaggtgttttgcattgcgccagtgctatcatgtgtaatctaatttagtaattgttgtttcatagacaaaacatgatttgaagaatcttgataggttttgttgttccaaccgagggatgaatcattgtttgtcctgtatcgagtgttacaggctttctggtttgctaacttagctatttctggaagtttggttgactatgctggaggatgattcagttcgatggaactgttatatactcgaattgttgtaaatcatctcagtttcatggtt

SEQ ID NO: 140323 - DNA, 3776 bp, Zea Mays
tgctagctggaggggctgtagctggacagtgactgagagtgagaggcagcagcggtccggtggctggcctccttgctggatgctcgccgtcagggaggtacgacgagcacgaccgcctctccctcccgggagcgttccctctccggcgaggtccctcctccgggaaatgcggcggggcagttacaaatgacatcttcttcttcttctccttcgtaacctgctgcaaaggagggcaacctcctgcatttccgggttctctttccacgagaagggaagggggaaccggaggatgccggccaagtacctgggggcgttggcggaggacaggcgcccggatctctatcgccaggtgggctgcgtcaccgggatcttgcaggccttcgaccgccgccaccatctcgcctcctcccacaagaggctcctccccccaacaggccatgcacccagcaatccaagcaaagggggagaatgcacgagatattcaccccaggttgttctggagaagaactcgagtaaaacttgggctgatagccaaagagcaccagcaacagaactatctcaaacctcatattcatcatcaccctcttcgtcattctcatcccttgatggcaacaggtcaacacaacaagacctatcatccactgaccgaatgctatttccagagaggccgtttaagagctcgccgaagctcaagagttcttttgacagtgacaatggactcgactaccctgatgatgcgcttaccaagtccaagaacatgcccatagttcaatccagcctgccaactcttggtataagaaatcttgtgaaggattcaatctacaaggatagccatgaattgtcagtcagaattagcactgaagaagaagtaaaagatcacccatccaactgtggagatcaacctatgcaattgaatgggcctcaccatgacagtacacaaggaaaaagcaagggtctcatggacatcaacgaatcgcttcgagtgctagccaagctcagggaagcctcgtggactcctcctgaatctgttcatcatgcaagactctcatatgatgctcctcggttctcatacgatggaaaggaagcaacatcaaaattgagggaggtaccgaggttgtcattggacatcaaggaaggtcacctttggaatcgtgaaattgactctaggttggacccaagcttgagttctgcagacagaaacagcaacactgttactgggtccaatgcagctttcgagacccagcaggaacagcctgcctgcaagcggcttcctagcgttgttgcaaagctcatgggtttggaagagttgccagagcataatcaaagtacagcatcatcacatgcatgcaataccgttcaagagaacaagcaagatgccatgttgaactccttgagcatctcctaccagtacgagcatgctcctcaacaagaaaggaatcctgattcaactgtaagaaatttacccaactctaagttccctgtccaaactgcaccatggaagcaacaagaaaggattgtccttccacgaaaactgccaaagggatcaaaaggagcccacggaagagaacctgctgcaccatggaaccagctgaaggatcttgattttcagcaaccaaacaaagaccttagagcacttaaacagattttggattctgcaaaaggactattagaaaataagaaacgggaggaagcatttatgccaaagctatataatggaaaccatgatgaccaagagatggccagtgcgaacatgagactgaaccgtaacaccaacaacatgtggatgcctgaagagagcaacgctgaaagctctttcaaatcgcctattgtgataatgaaaccttcaaaatctgcaaacctttacagcaaagtggattcttctgtcttcccattaggaggttcatctgatctcccacagccacaaacaagcaatagcactgatagaaggaaagcttcaacgattaatagaaccgccaaagggcaatatgcgaaattgagtccaagggtgcctacttctcaaccccttgtttcttgtgacaggagatcatatggaaggaatgatgatagcagcaacaaccaaaaatctagttcactgctggtcactgagagctcaaccagaagacagcagctgccaaggaatagtagcgtaagtatgcaaaagaacaaaaattccactagcccaaaattactacagagaaaacttgatccagagcggagggctagaccacctattccttctgctgagtctaacaaaagcgaaaggcaatctggagataggaacaattcagaaacagtgtcaccccgaagcaaattcagaaggaaacttgtgcgcccacaaggtgatgatggcatgcccattggattgaacaacaggacaaggagcctgtatcagcatgacaatgatatgtccataaggtcagatggcagtataagtgttgcttcagagctggatattataagcaatgacagatctacaggagttaatatttctaactttgagcaaggcattggaactccatctggaaggaacccacagaaagtgaaaacctcatacgatgcaaatatggacgtgccatctgtagacccttcagctgctatttcggaacggcccagtccagtttctgtgttggactcttcatttgatcaggaggatttgttccctaccagcaggactccaaattcacttgctgttgatgatgagcgcgaaacattagaggaaccctggaaaccatctgtcgctatacagtccaagaacaataaactcgcaaatgttgcgagcttgcttgagaagctccagcagcttagcgtgaacaaggatgaggatgcacctccggttgaccatattgctttcttgtgtgagacagagagcccagaccaccgctacgtgtctgagatactgctggcctccggtcttctgatgaaagacctaggttcaggacagacaggtctccagctccactcctctggctacccgatcaaccctgacttgttccacgtgttggagcaaaggaaggctggatgggtcagtacacctgatggcatccatcagagcagaagcggcacaaaatctgatcccaggagagcgcaccggaagctgatgtttgacactgtgaatgagcttctccttcagaagtttgagaaggaaaccgccgtttatgcgctcagttccttcaccagagcgaaggatccacctgcaaagacttttagcgggcaacagctgccgaagttcatatcttcgggaattgaagaactggatatggagcgatcgtccatcagccagaaggacagcagcgtgatacctgatgcagagatcctgcggaggctgcagggatggacgagcttcagcaaggagctcccggggatggtgctggagatcgaaaggtcgatattcaaggagctggtggacgaggtggtgcatggggagtctgctgacggcccggagatgaaggctgctggcagacggagaaggcggctctttgcttgatacggtttgtttgaccatcgccatccaccatttggatgggcctgatttgtgaagctgtaactttgtttgtcttgccatgagagtgagaccctatttcatctcaagagaagagggagagagagggggtagcgcagatttggtgagagacccgaaaatgggcattcgttcgtgctatatatagatactatgtataccattgtttcttgactccttgtgatttactgtggatgatgctatttcagtaaaaaaaatggacgaatgacagttgttttttgccatgtaaaaggcaaat

SEQ ID NO: 140324 - DNA, 316 bp, Zea Mays
acttaagcggacggttatccagcgctgatggcaggcggaagccgtactccaccagtgtctctttacgcgcccggtcaccgcgatacatgccgccaatttgtggaaaagaaaaatgagattcatcgacgaccagcagcccatcggcaggcaggtaatcaaacagcgtcggcggtggctcacccggtccacgaccggagaggaagcgcgagtagttttcaatccccgaacagtagcccagctcgttcatcatctccagatcaaactgggtacgctgggtcagccgctgctcttccagcagtttgttgttttccaacag

SEQ ID NO: 140325 - DNA, 2649 bp, Zea Mays
tcgctttgccattgttttggtgaaccacctcaacaaatccaagctagccataccagcaccaccattgccattgcctccccccatgtcttcttaacctccatgcatgctgcatgccacggcatcaccagttcaccacttaacctcacctccaccgccatggccggcaccaatggcaccgctcgccttctccagctccttgctattgctaccagctcgttgccactgctgcaactattagtgctactacagctactatgcctcgcctcggcgcttaatcaagacggcacactgctgctgtccttcaagctatcgctcgtctctgaccccctcgcctccctctccggctgggggtacgccgacgccacgccctgcggatggaacggtgtcgtctgttcgccggactcgcgagtcgtcagcgtcgtcctacccaacgcgcagctcgtcggccccgttgccagggagcttggcctcatcgagcacctccgccaccttgacctctccggcaacgcgctcaacggaaccattccgtccgacctgctccgcgcgccggagctccgcgtgctctcgcttgctggcaatggcattaccggcgaccttccggaggaggtcggccagctgcgcagcctccgcgcgctcaacctagctggcaacgcgctctccggcaccgttccgcagaacattaccctgctccccaaccttaccgccgtctcgctcgccagcaacttcttctctggcgcgctccccggggggactttcccggcgctgcaggtgctcgacgtcagcgccaaccagctgaacggcactctgccgtcggacttcggcggtgccgcgcttcgctacgtcaacctctcgtccaaccgcatcgccggcgccataccgccggagatggcgtcgcatctgccggccaatgtcaccatcgacgtgtcctacaacaacctcactggcgccatcccggcgttgccgccgttctcagcgcagaagcccacggcgttagtgggcaacgccgagctgtgcggaaggccgctggacagcctatgcggcttcacgtcctcctctgccgtggaacccccgaacggtaccgcaaagtcgccgccggccatcgcggcgatacccagggacccgacggaggcgatccctggcgatggtaccggcagtgtcactggagcgtcggcatccggagggcagcgcggcaggatgcggcttgccactatcgtcgccatcgccgccggcgatgtggctggtatcgccatcctattcgtggtggtcctgtacgtgtaccaggtgaggaggaggaggcagcgtcaggaggtggcgaagcagaggatgggcgtcgtgttcaagaagcccgagccggacgagtctccggacgcagtcggccggagcctttcctgctgcctgcgcaagaaggccagcgacggcgcggaggaagtcacagacacgtcggcctccttcgccgccaaggagggcaacacagacaggaacagcaaggcgggagttgacgccgcagcgtgcaagaagaagggcggtgacggcgcggtgctggtgacggtggacggcggcccggagctggagctggaaacgctactgaaggcctcggcgtatatccttggcgcggccggcaggagcatcgtgtacaaggccgttctggccgatagcgcgcccctggcggtgcgccggatcggcagcgactgcgccggcattcggcgtttcagcgagctggacgcgcagatgcgcggcgtggcgaagctgcggcacaacaacatcctccggctgcgcggcttctactggggacctgacgagatgctcatcatccacgagttcgctgtcaacggcaatctcgccaacctctccgtcaaaaggaagccagggtcgtcaccgatcaacctcgggtggagcgctcgtgtccgcatcgcgcgcggcgtggcgagaggcctcgcgtacctccacgataagaagtgggtgcacggcaacgtgaagccaagcaacatcctactgaacgcagacatggagccgctgctagccgacctcggagtggaccggctgatccgccgcgcggacggcgggttgatgaggccgtcggcggcggcagttcggttcgggagcaagcgttcggccaagagcctcccggatctgtcgccgccgcgcagccacgtaggcactgcgccgtcagcgagcccggtcgccagcgctcccgccgacacggcggcgcactaccgggcgccggaggccgtgagaagcaccaaggcgagcggcaagtgggacgtgtactcgttcggcgtgctgctgctggagctggttgccgggcgcgcgctgacgagcctggagctatgccagtgcgcagcggaggatatggcgcaggcgctccgggtggtggatcccgcgctgcgcggcgagatggaagggcgggaggaggcggtggcgagctgcctccggctgagcgccgcctgctgcgccatggcgccgagcaagaggccgtccatcaaggacgcgctgcaggccatggagaggatacctgcagcggccgaggcttccgcctcgtcgtcctcaatatccacggcagcgcagagtcatgactcatgagtaaagggggaaaaaacgtcttgcattgccgttggtgcggttgtggttcgtgcagtcaaaattttattt

SEQ ID NO: 140326 - DNA, 828 bp, Zea Mays
atagggccctgcgcggcgtggtcggctccgcggccggcacttgtccggcaactaccacacctcgccctcttctcgtagcttcggccaccgcaacaaaaggtacgtaggcagctgtacgtgagcacctgtgcccgactcaaccaatctactcgctgctacaacagagtttgcctgttgccttgcttccacctcccggctgcagctgcacctgctgctcgatcggatcggccgcgcgcggcatgtcgaccaccacccccaccaacgccgcctcccagcagggcgacgacgctgcggctggccgcgcggacaagaagccggcgcaagagacggtgacgaagacggtgcagacggtggaggtgcggtcctcggcagggcagcccgacgaggagggcgtgctcaagcccgtgaaggtggtgcacgagatccccgccaaggacagctccggcgtcaagcaggactaggactagctaagctgcctagctcgatcgatcatctagctaggatcgatgctgctgctgctaagctgagtggatttgatgctgctgcggtcagaaatcttatcgtcatttccaccccccaaccagatcctagctagtaattgcaaataaacaaatgttgcgttggatcctaatgtgaattagtgatctgtgcggcctgccgcttcatttgtaaacatgtactaataagacgcctgattttgtgttcgacacgatttgttgatcaagcgtcctaccgtttctcgagtatcccgttgagaaaataaacagttttttaaatcaaaaccagaacataaatgatcagatctgtagagaaaataaataaatttta

SEQ ID NO: 140327 - DNA, 779 bp, Zea Mays
atagggccctgcgcggcgtggtcggctccgcggccggcacttgtccggcaactaccacacctcgccctcttctcgtagcttcggccaccgcaacaaaaggtacgtaggcagctgtacgtgagcacctgtgcccgactcaaccaatctactcgctgctacaacagagtttgcctgttgccttgcttccacctcccggctgcagctgcacctgctgctcgatcggatcggccgcgacgacgctgcggctggccgcgcggacaagaagccggcgcaagagacggtgacgaagacggtgcagacggtggaggtgcggtcctcggcagggcagcccgacgaggagggcgtgctcaagcccgtgaaggtggtgcacgagatccccgccaaggacagctccggcgtcaagcaggactaggactagctaagctgcctagctcgatcgatcatctagctaggatcgatgctgctgctgctaagctgagtggatttgatgctgctgcggtcagaaatcttatcgtcatttccaccccccaaccagatcctagctagtaattgcaaataaacaaatgttgcgttggatcctaatgtgaattagtgatctgtgcggcctgccgcttcatttgtaaacatgtactaataagacgcctgattttgtgttcgacacgatttgttgatcaagcgtcctaccgtttctcgagtatcccgttgagaaaataaacagttttttaaatcaaaaccagaacataaatgatcagatctgtagagaaaataaataaatttta

SEQ ID NO: 140328 - DNA, 325 bp, Zea Mays
ccacccagacccccgctcccaggccccgcagccgcgcatccctccgtgcccgcccgcagccgcgccgcccgtggtgccgccacaacggttgtctcctctacaccgcatgccccccttgtgtcctcacaacccccacgcttcaatgtcttcctccccttgccctagatctagatttactttgcagaagagcctgtacggcggtcagatcgacacacggaggaacaaccgcggtgaggagctcctcttcaacagcagcaagcaagctttctggtatggagctgaacagcactcttggctatcagttgtcaagtctgcaggctctgaa

SEQ ID NO: 140329 - DNA, 94 bp, Zea Mays
gcgaaaaacaacttctctggtaatcttccgtactccatatccaacttggcctcgcttgagtacctgaaatcggagaactgtttggaagcctcag

SEQ ID NO: 140330 - DNA, 303 bp, Zea Mays
acttataatatttagtcgatgacacagatgagtgcactttccgagctttccaactatatgtgttgaatcatatcaaattctttatgctctgtaccattgtctgcaagataattgattttggacacattgacaagttttccgtgcacgagctgataattttggatgagaagaatgctgaagtgcacaagatttctagtagagtaaatgatcttgatctgcaactaatgaagaattgaaaaggttatcttgcttcgacgaagtcctatatgaatctctagcttgcctacactgaggagtacattg

SEQ ID NO: 140331 - DNA, 258 bp, Zea Mays
atggaggaagctattggatctcagttagagaacgatgaagaggttcgatgtgaagaagatgccaatgataaaggtatggcttgggctatacctagccataatggctcctccgcccctgggtgctccaccaccgtcggccaggggttgtcacagcgttctagagtgctggccgactttgtgacgccgacgtgtggctccactttttcaatggtagggcatggcacgaaccttgacgtgctccctctcatgttgtcctag

SEQ ID NO: 140332 - DNA, 1401 bp, Zea Mays
gcagatagttgaagtgggccactcccacagccacctccttctctccggtagcagtaacgcagaagaggcaaacgggcagcgagctagatctcgcgtccccgctgcgactgtgaagccaccgtcgtcagatcggacaaggcgccggagcctcagcaatccctgagcagactagaggagtagctaaggcaaagggaggtggcaaagatgctgccgacgaccgcgtccaaggggcgcggggcctcccgctccgccccgccgctcttcggtccctacctccgccgcatcgtcaagtggcaacaaatggatattgaatacacattttggcaaatggttcatctctgtacttcaccaaaagtagtctatcagcacaccaaatatcacaagcaaacaaagaaccagtgggcccgtgatgatcctgcatttgttgttattctgattcttttcctcgtgtttgcaacatcagcttactgtgcagcatatggagagagtgcctcacatgctgctctaacaatcacttcggttgtgtttctccatttcttgtttgctgggatagttttggccacactttgctggttccttacaaattcttacttgagagaggaacctaacagccatgttgttgagcaacgcgtggagtgtgcacacgaaattcttggcaggctctatgcatttgacgttcattgtaactcgttctttcctgcgtttgtcatcctatatgtggtgcagtattttctgtcgcctctattggtcgcgcatggcttctttccagctttgttatctaatctactcttcgtggtggcaatttcttattatcactacctgaactttctaggatatgatgttcttccatttctggatagaacaacattcttcctgtacccgattggtctcgtcatcatcctgtctccacttatgatactaatagggttcaatccgacaagatattttctaagcttgtacttcggttaaagtctacggctagaatgccatgtacaagcaaaaatatggtgattggcgataactaatggcagatctggatacatactctgtagtaaagcattttagatatcttgtgtgaacgggggcgagtgaagttcagtaaagctcggagcattctatggatgtatcaggtgcctgtggcaaggctaacaatggaagacatatagtcttttgattgttatcaaatatcctttttgggtgtcaatttgttgttcataatatgagctgtttgcgttactttgggcccagtgaccagtgtatacttgtagtagaactgctacgtagagtctattgtactatcacatcggcatcagaattgcatcaagttctaccaccagtcatctctgtcatgtttactgtaagggcattctcgttctcgctaaagctcaatttttcgccggt

SEQ ID NO: 140333 - DNA, 1380 bp, Zea Mays
gcagatagttgaagtgggccactcccacagccacctccttctctccggtagcagtaacgcagaagaggcaaacgggcagcgagctagatctcgcgtccccgctgcgactgtgaagccaccgtcgtcagatcggacaaggcgccggagcctcagcaatccctgagcagactagaggagtagctaaggcaaagggaggtggcaaagatgctgccgacgaccgcgtccaaggggcgcggggcctcccgctccgccccgccgctcttcggtccctacctccgccgcatcgtcaagtggcaacaaatggatattgaatacacattttggcaaatggttcatctctgtacttcaccaaaagtagtctatcagcacaccaaatatcacaagcaaacaaagaaccagtgggcccgtgatgatcctgcatttgttgttattctgattcttttcctcgtgtttgcaacatcagcttactgtgcagcatatggagagagtgcctcacatgctgctctaacaatcacttcggttgtgtttctccatttcttgtttgctgggatagttttggccacactttgctggttccttacaaattcttacttgagagaggaacctaacagccatgttgttgagcaacgcgtggagtggctctatgcatttgacgttcattgtaactcgttctttcctgcgtttgtcatcctatatgtggtgcagtattttctgtcgcctctattggtcgcgcatggcttctttccagctttgttatctaatctactcttcgtggtggcaatttcttattatcactacctgaactttctaggatatgatgttcttccatttctggatagaacaacattcttcctgtacccgattggtctcgtcatcatcctgtctccacttatgatactaatagggttcaatccgacaagatattttctaagcttgtacttcggttaaagtctacggctagaatgccatgtacaagcaaaaatatggtgattggcgataactaatggcagatctggatacatactctgtagtaaagcattttagatatcttgtgtgaacgggggcgagtgaagttcagtaaagctcggagcattctatggatgtatcaggtgcctgtggcaaggctaacaatggaagacatatagtcttttgattgttatcaaatatcctttttgggtgtcaatttgttgttcataatatgagctgtttgcgttactttgggcccagtgaccagtgtatacttgtagtagaactgctacgtagagtctattgtactatcacatcggcatcagaattgcatcaagttctaccaccagtcatctctgtcatgtttactgtaagggcattctcgttctcgctaaagctcaatttttcgccggt

SEQ ID NO: 140334 - DNA, 1384 bp, Zea Mays
gcagatagttgaagtgggccactcccacagccacctccttctctccggtagcagtaacgcagaagaggcaaacgggcagcgagctagatctcgcgtccccgctgcgactgtgaagccaccgtcgtcagatcggacaaggcgccggagcctcagcaatccctgagcagactagaggagtagctaaggcaaagggaggtggcaaagatgctgccgacgaccgcgtccaaggggcgcggggcctcccgctccgccccgccgctcttcggtccctacctccgccgcatcgtcaagtggcaacaaatggatattgaatacacattttggcaaatggttcatctctgtacttcaccaaaagtagtgcagctatcagcacaccaaatatcacaagcaaacaaagaaccagtgggcccgtgatgatcctgcatttgttgttattctgattcttttcctcgtgtttgcaacatcagcttactgtgcagcatatggagagagtgcctcacatgctgctctaacaatcacttcggttgtgtttctccatttcttgtttgctgggatagttttggccacactttgctggttccttacaaattcttacttgagagaggaacctaacagccatgttgttgagcaacgcgtggagtggctctatgcatttgacgttcattgtaactcgttctttcctgcgtttgtcatcctatatgtggtgcagtattttctgtcgcctctattggtcgcgcatggcttctttccagctttgttatctaatctactcttcgtggtggcaatttcttattatcactacctgaactttctaggatatgatgttcttccatttctggatagaacaacattcttcctgtacccgattggtctcgtcatcatcctgtctccacttatgatactaatagggttcaatccgacaagatattttctaagcttgtacttcggttaaagtctacggctagaatgccatgtacaagcaaaaatatggtgattggcgataactaatggcagatctggatacatactctgtagtaaagcattttagatatcttgtgtgaacgggggcgagtgaagttcagtaaagctcggagcattctatggatgtatcaggtgcctgtggcaaggctaacaatggaagacatatagtcttttgattgttatcaaatatcctttttgggtgtcaatttgttgttcataatatgagctgtttgcgttactttgggcccagtgaccagtgtatacttgtagtagaactgctacgtagagtctattgtactatcacatcggcatcagaattgcatcaagttctaccaccagtcatctctgtcatgtttactgtaagggcattctcgttctcgctaaagctcaatttttcgccggt

SEQ ID NO: 140335 - DNA, 1250 bp, Zea Mays
ctccttctctccggtagcagtaacgcagaagaggcaaacgggcagcgagctagatctcgcgtccccgctgcgactgtgaagccaccgtcgtcagatcggacaaggcgccggagcctcagcaatccctgagcagactagaggagtagctaaggcaaagggaggtggcaaagatgctgccgacgaccgcgtccaaggggcgcggggcctcccgctccgccccgccgctcttcggtccctacctccgccgcatcgtcaagtggcaacaaatggatattgaatacacattttggcaaatggttcatctctgtacttcaccaaaagtagtctatcagcacaccaaatatcacaagcaaacaaagaaccagtgggcccgtgatgatcctgcatttgttgttattctgattcttttcctcgtgtttgcaacatcagcttactgtgcagcgttccttacaaattcttacttgagagaggaacctaacagccatgttgttgagcaacgcgtggagtggctctatgcatttgacgttcattgtaactcgttctttcctgcgtttgtcatcctatatgtggtgcagtattttctgtcgcctctattggtcgcgcatggcttctttccagctttgttatctaatctactcttcgtggtggcaatttcttattatcactacctgaactttctaggatatgatgttcttccatttctggatagaacaacattcttcctgtacccgattggtctcgtcatcatcctgtctccacttatgatactaatagggttcaatccgacaagatattttctaagcttgtacttcggttaaagtctacggctagaatgccatgtacaagcaaaaatatggtgattggcgataactaatggcagatctggatacatactctgtagtaaagcattttagatatcttgtgtgaacgggggcgagtgaagttcagtaaagctcggagcattctatggatgtatcaggtgcctgtggcaaggctaacaatggaagacatatagtcttttgattgttatcaaatatcctttttgggtgtcaatttgttgttcataatatgagctgtttgcgttactttgggcccagtgaccagtgtatacttgtagtagaactgctacgtagagtctattgtactatcacatcggcatcagaattgcatcaagttctaccaccagtcatctctgtcatgtttactgtaagggcattctcgttctcgctaaagctcaatttttcgccggt

SEQ ID NO: 140336 - DNA, 1828 bp, Zea Mays
ctccttctctccggtagcagtaacgcagaagaggcaaacgggcagcgagctagatctcgcgtccccgctgcgactgtgaagccaccgtcgtcagatcggacaaggcgccggagcctcagcaatccctgagcagactagaggagtagctaaggcaaagggaggtggcaaagatgctgccgacgaccgcgtccaaggggcgcggggcctcccgctccgccccgccgctcttcggtccctacctccgccgcatcgtcaagtggcaacaaatggatattgaatacacattttggcaaatggttcatctctgtacttcaccaaaagtagtctatcagcacaccaaatatcacaagcaaacaaagaaccagtgggcccgtgatgatcctgcatttgttgttattctgattcttttcctcgtgtttgcaacatcagcttactgtgcagcatatggagagagtgcctcacatgctgctctaacaatcacttcggttgtgtttctccatttcttgtttgctgggatagttttggccacactttgctggtaatcccgatgttgtacagttatagtgcacctgcttcatgtcgtcttgggactgaaaaagacaacattgatataatatctattacaatgtgaactgatgtgcaacctagatatggagttttattgttcaccattgctgcctttcttactctaattacaatcctcaaggtgttacctgaacatgtctagtgctatgaggagggaaaaatgcttggctgcaaataacaattaggaatgaaataaactccctagaagcttgctcttgtgggatgctagtcacatcggctggcagtagtacagcttaaatgtttgaaattttgtattccttttggaattgtattcttaaaccgtagtgtctttgtaggtgttagcctactctgtcacatctatgtcctattgccttctagttaaactccaattagtagatctgcatacctcttacattggcaatcagagttattagatactgtaattcgatgcaggttccttacaaattcttacttgagagaggaacctaacagccatgttgttgagcaacgcgtggagtggctctatgcatttgacgttcattgtaactcgttctttcctgcgtttgtcatcctatatgtggtgcagtattttctgtcgcctctattggtcgcgcatggcttctttccagctttgttatctaatctactcttcgtggtggcaatttcttattatcactacctgaactttctaggatatgatgttcttccatttctggatagaacaacattcttcctgtacccgattggtctcgtcatcatcctgtctccacttatgatactaatagggttcaatccgacaagatattttctaagcttgtacttcggttaaagtctacggctagaatgccatgtacaagcaaaaatatggtgattggcgataactaatggcagatctggatacatactctgtagtaaagcattttagatatcttgtgtgaacgggggcgagtgaagttcagtaaagctcggagcattctatggatgtatcaggtgcctgtggcaaggctaacaatggaagacatatagtcttttgattgttatcaaatatcctttttgggtgtcaatttgttgttcataatatgagctgtttgcgttactttgggcccagtgaccagtgtatacttgtagtagaactgctacgtagagtctattgtactatcacatcggcatcagaattgcatcaagttctaccaccagtcatctctgtcatgtttactgtaagggcattctcgttctcgctaaagctcaatttttcgccggt

SEQ ID NO: 140337 - DNA, 402 bp, Zea Mays
atggatcacggcagcggatcacgagatctgggaggggagcagagggggaggagggcgttgatgccaggtgtggcatcggatcatgaaagcggatcacgggatctgggaggggagcagaggggcaggagggcgtgtgcggcagcggaccatggcggcaacgaaagcgcgagcgagagcggggcggagggggaggaccgctccaagatggtgctgctcgaggagcccgccgtgcaggccaagcgcctcctcgagcagcggtgcgcagacaaggtggagcgggccgccaagtccatctcccgcatcagcctcgacgtcgacagctcaccaccaaggcaaggaaggggtgcatcgtgtggggtgggcgagcatcgcgcggggagggtgatgggccaaaacgggggc

SEQ ID NO: 140338 - DNA, 570 bp, Zea Mays
tccaacagtgccaatccttgccgctcggatcatcgtcacgtggtgcgaatcttcaatcgttttggtggagggaagaagggaggaaggaaagggggagaatccaaggtggtggacttccggatcgttcttagggatttgcccaaacatccggtgaaggcacctaatttctgctttgggaatagagggatgtagcagcacgaccactacacctttaataaaggaatcaccatttaataatgttgttaatcagaattggtcaagtctagtgatttgccttgttcttggttgagcgtttatcttggggtgggctgagttcctcatcccatttgttttgcttcagttggggcataaatgagtttaccactttgcatttagcttctactatgtgaattatatgtctttatatcctgtatgaacttcatgttttcccctccttgttatgttagtttcaaaggagatgctgccggattttgctatatttcctttctttattacgcctcttgtgttgagtaagttaggtgggtggggtttttggtaatatccattgtgtgtgaccagtggggtgttaca

SEQ ID NO: 140339 - DNA, 686 bp, Zea Mays
gattggttatcgtaggaaaaaagttaggaaaaggaaggttgcagaagaagatattggagatgatttcctattagatagtagtgagggagcgagtagcccaacctatgacgagtcaggtgacattgagtcaaatgatggtgagttcacttttgagttaattatgcactatttgtcatgtcctttttatgattaaaattatctttaatatcattgtgtaaggtggtggtgatgatgaagatggtgaccctagtggtccaagttctgcagctaggccaccaactcataatggtcctggtcaagatgaacaaccagccgctctccgtccaagatcaaaaaggcagaagaagctctctatcaagggcttgtacatgcttgagaagtggtctaatatttaagcacaagcacaagaatacgacgtatgcatggactgattcaatggcaagattttgaacatgtggctctaccgtatcagctctgtttccgtttcagcacaatattgctgctatatttggtttatgtgacctaccaatatttagaactgtgattgatttctatgcattatttgaactatggactatcaattctttgtgtctcaacactagtgttttatttactggtgcaaggatgctaccaaagtactttatttatgtaatatttggtttatttggactatctcattattctat

SEQ ID NO: 140340 - DNA, 204 bp, Zea Mays
atcagtaggatggttaaccacgtgcactttatcttcgctgtccgaatcccacaacatcgcaggaacagtgctagcgcctccacccatctcgtcgctgtccagcgcttggtgctagccggcagaacatatcaccaaatgaaatgcatcaagctgtacaagaaatgcaatagtattgtacctgtcttttggagagccgccacgtga

SEQ ID NO: 140341 - DNA, 2511 bp, Zea Mays
tctccgcaaccttcacttgccagttcccactcctaactctctcttcgtttactcttcttcccacccccagcgttcgcttccatccaagctcatatcatcatagatcgacggactaggccacgcgccccaatactcagaactagtcttgagtaaagcatggcgtcgtcttctccgtcctgccgtggcagcggcggcaagtcggacgtggaccggatcaagggcccctggagccccgaggaggacgaggccctgcagcgcctggtggcccgccacggcgcccgcaactggtccctcatcagccggtccatcccgggccgctccggcaagtcgtgccgcctccggtggtgcaaccagctgtcgccgcaggtggagcaccggcccttcacggccgaggaggacgacaccatcctccgcgcgcacgccaggttcggcaacaagtgggccaccatcgcgcgcctcctctccggccgcaccgacaacgccatcaagaaccactggaactccacgctaaagcgcaagtactacgccgccagcgacgctgttgttgctgacgctgacgacgagcgcccgctgaagcgcacaagcagcgacggccacccagggctctgcttcagccccggaagcccatccgggtccgacctcagcgactctagcaaccacagccttccctccgtcatgccgtcagccgcttctgctgccgccgtcacctcccaccagcagcagcagcacgtgtaccgccccgtgccgcgcgcgggcggcgtggtcatgctaccggtggcgcctcttgcgccgccgccgccgccacagcctccggcgacctccttatcactgtccctctccctgcccgggctggacggccagaagcccgaagcatcccaagcggttctgacgccggcaccggcaccgcctcaacctcctcttcagatacagcagcagcagcctgctccacctcagatgccgccaccacaagcccaaccgagcttgccgttccagctgcaggcggccgcgacgaacctcacgtcgcagcagccggcagcagcgccgttcagctcggagttcctgttgttgatgcaggagatgatccggatcgaggtacggaactacatgtccgggtcggggctcgatccgcgcaccgacggcgccgccgtgcacgccgtgagcaagcgtatgatgggtatggccaagatcgagtagtttcagcgcgcatgcacacagcggcagcagcaggcgtggaagatacaaaagaaaacgaaccgccgatcgatccgcggcggccagcgcgtgtatgaagtagtaatgaaccagcaagaacggcgtggccttgaaccatacggaggccgtgtggtgcggcaagtgaacagctccaaccatcggctttttagctcatgacaatatcataccctttgttaatctagccgtttctctatcttttattcttcttccccttctttttttttgaatttttgggtctccaagcaagcaagcagagacgaagacgaagagaactttgtctgttgtctgcctgcctgccactttggaggtaagatgctacctgaataaactgcagagcaaaggatccttctttccttgatgctggtggtaaccagtaatcagtaacagacatcctagaaattgtcgtattgttcttgtacagagacgagaaaaaggagtgaaacagaggaggaatcagtgataagagacagaggcttcaagtttggtagatggagatttttgttagatgggaaagtttgttagatggtagagacgtacaggatacactagaatggtctaccaggagctgagctcatctcctagtttgttagatggagattttttgttttgtgctcgtcctgtagtggaccagtcctgagctacactccctgtttaggattctcttgactgcccgtaccgtacgtaggcagtggatggatgggcaaaggcaagggaaggacgaagaggaattatatatggccaggatggctgccagccagccagctagctggccactggcagaagctgctgcagacttgagtgagcgagggccgccggagtggaggatgagcgagtgacagctaactgcctgcctgtctgtccagcactcccgggcgtccccggcgccggcgtgtcctctccaacggtgactagttcaactgcccccccgcttctgttctacagacagacagtcagacaggcacggcttctttcatcagccttcgtcggtggacgatgacgatcccatctcccatggacgcctttggaacggcacactgtaggaggcaaaggcatcacctaacacggaacgcaacggccaatggatggacatggacgttggtggactctcctcgacaaaaagaaaaaaaaaggctcaagccaagatggagcaggacggatgatcctccctcagattgcagttcggagtaggtgaactacgtacgttctccctccggcgaccaaaacgcgctttgtaatgtacaccacctcctttagagaaaataaactaatttgctttag

SEQ ID NO: 140342 - DNA, 119 bp, Zea Mays
gcatacatactgtggctcctgtattgttgcatttacattggaatttgtaactcatattttgtttgcattaaaaaaagctgaaaatgggagaaagaaacataaaaagaaaaaaaataaaa

SEQ ID NO: 140343 - DNA, 445 bp, Zea Mays
cccacatgctctccatgcttgagctcgccccttgtcagcttcagctcgtgcccagggcctctgctcgccggacgctgtagcacatgctccctgctcggcctccctggcgtgctgctccctcaccttggcgtccctgcgagctccttctccctcgcccgatttccagctcaggccttgccgacgccgcttctctgaccttgccttgacactaaatcgctgcagcacaccatgccgtgtgtgctgcagtgtcatcgttcactatcctcatccttgccaattttcctcgtcgtttctcggctacaacctcgtcagctcctgcgcatcgtgcgcgtcttgtgttcgggtcgagccccaggattttgaggaaaaggaagctccagtgcatcgaccggtgaaatgaataaactagtggtagtcatggtccttgcgaaatccgagatcaggt

SEQ ID NO: 140344 - DNA, 6704 bp, Zea Mays
gtctacataagccatgtgcctatcaccctatgtggccaataagcttcagagaaacggatgtccccaaaaaaaacaagaatattgagctactaaaacacagtgcattcaaaaggcttgagaacctcggaatacatgtggacactgtgttctgcccttgagtgaaaaagttgaaataatattccaagatgatgtgtaaacaagactaagaattagagagaacatactctggaaaagatgccgcaaattttttgttgatgacggatggggttcatactccaaataatagtcaatccgagatgaattgaaacaacagttttgacctggaagaaaggttgcaaattatactatactaagcacagcacataagttaggacatgaaaatgttctcatctattaattcaacatctatcaatctgatgtgatcagtttgggtttttgcatgggctatatattgttgtagctttccaatggaaaaacactgacaatttgaagtagacggtttttttttttttgagaaattattccatgtggcaccatataagaaacgctgaaaaagaaaagtaaattttcatctattgtgtcatacaactccaactatatccagatccctaatatggccaggaggttattgtttgtagaaatatctatttgatatttggatcaaaatcaagacaagtttcatatgaaaccataaaggtatgtggctgagttatggtgcaacctaagcgaactatccaaaattagtcatatgttctgtcatactgaagagcaaacttactagaaaattaattctatgttttgctcagtaaactagttacttgcctgtaacacccggcaccggctcaccacgcgatgggcctcgatgtcccatggcccaactcggagcagcctaaaggcaggaccacaacggcaggagagggatggaaatcaaatcagaaatcggaaacagggttcgtccccttcgctcgtcttcctccacggagaggcggcatatcgaaggtggagtcgctggtggggggtcaggcagatctagcagcagcggtggcacaggaagcggcggaggatctgcccgttctgcctcagttcggtcgatctgcgggcaacaccacggcatcaggctttgacgagggacctgtcttcgacgacgagatgcccatcgacttcggttcccaggggaagaccgcgtccatggcggcagcacgcgccgtgggggtccccggatccaccgcgacgccctccgtgcccttcttcgacaacgtcgacatcttccacctcaatagtgaacccgtctacgacgtctacgatgacgacgaggatggcgatccgtcgcagcaggccgtggtgctcgctgcggacaagaagtactaccccaccgctgaagaggacgagcaaccgctggagcagcccatcgtcgcagacgcgcttgcgctgttcgagaagatgcgaggcaaggggtaccacgctgacgtgatgaggctgcgcgatgcagacagggcggtccaggtgctcggggagatgatggaggccggcttcaggccatggaacttgacattgacatacagttttgtggtggctgtgctcgtgaaggcaggaaggatggaggaggcactaaagttgaaggatcagatgttgctggttgctggaaagatggatgtggttctcgcgacaacattgatgcatgggtattgcttgctcggtgaagttgggaaagcgctggatttatttaacgaggctgtcagggatggtgtgacagcaaccaatgtgacatatgcggttctgataaaaggttgtgatgcagaggggatgacagataaggcatatgagctatgtcgtcagatgatagagcagggattgctgtcaagcacgcatgggttcaatttggtgataaaaggtctgttaagagacaagcggtgggaggatgccatcggcttgcttgaggttatggttgatataccttctgctggtactgcggctaagtgggaagagcttgatatcatgacagaatgtgttgttcaatgcaatcttgtcactactgcgtcctctgattttcatcctgaattcatcagtctgtttgtcaaaaattttggtggctctgtggcagtatcaagcaagagagtattgtttctcagttggggctacatggaggagtatgaggttctgattccatttcagttcctccaggttcgtgagagccaagtaaatgatgtttgccaggacatgggtgtgggagataagtgcttggctgccattcatgactttggcgatgttcggggtgtagatgaagcaaaggaggagcttgttgagatagtgagctgtctgcatggttcactgaactccaagaagcttggagcaaaattgcccaggggtgtcctgcttgttggccctccaggaactggaaacactcttctagcaagggcagttgcaggagaggctggaattccatttttctatgtttctgctagtgagtttgttgaagctttcgttggaagaggtgttgcccgtgtcacggaattgttcaaggaagccaaagaagctgctccatccatcatttttattgatgaacatgttgtgggtggaaatagaggtagaagttttaacgatgtgagggaccaaactctaaaccagctaattgccgaaatggatggttttgactcggacatgaaagttattgccatggctgctactaacaggccaaaagcactggatgttgctctttgtcggcctggtcacttctccaaaaaggtgcggtcttggagacttggtacttttactctaggagtaagtggtctgcaacttgggccatacatgaggagacaatgggatcctggtattacaaatgggcaattggtgatgagccgcgaggagctagctttacagatcgcagtgtttcttggggacaagcaacatttcgtcggggcggtaatgtaacacccggcaccggctcaccacgcgatgggcctcgatgtcccatggcccaactcggagcagcctaaaggcaggaccacaacggcaggagaaggatggaaatcaaatcagaaatcggaaacagggttcgtccccttcgctcatctcgtcttcctccacggagaggcggcatatcggtgcatcatcagctcctcacgtcccggctcaccatcggcagccacggggacgtgacattgccctgtaatgtcatataccttttagcaaggtccacatgcatatggttgtagtgtgttgtgtgtctctgtgtgggtgtgttttttctgtaaagcctgttttctctgttatctataaagttgcgcagttctcctgcgctttcaggaaaaaaaaaggtccacatgcatattagctgttcagcaaaaaatgctgccagctgcttaacgcccagccccactttctaagaaataaattatattgatccttctctcccaccggcattcctgaaataaacttggttgttctttgtgtgcaaagtctaaaatacaacaagtgtgcctgacaggctgacactatgctgaagtactttaactttaccgcacagaccacacaattgtacaagctttaaattgtatgatgtattccatctcataactttactaactaaatcttgtgttaattctcaatatttaggctcagacaatccatcagtatagattatttgcttcttatgcagtatgtaaagttgcacggctccataacaactgctaactggaggtgaaagtttgagaagacattaagataacattttaggaagaaaacaggaagatgcagtttaactaagttgaaaggccataggctaaaatctatagtgcctttgaactgcctggatgatctggacacaacatatagaatttatcaaaaggtgaagctaaggtgaaaggatgtttgtggttttgtgcacttgccggcaacaaaacacaaaccggtcaagatcagaatcacacatgcatcatgcattcatgcatgcacctacataccagtgcagctgcaaggttgggaaacactttacacatgcagcctatcttctgaaatactgtaggagtataaagtagtgtaccgtttaagcatggatcaaaaaatggagcaaattggcagaattcagggttcactccttattcattgcagtacagcatatacctctgttacagaggttatcaagcatttgtttacatcacccctttagcatgcctctaaaaacttataatgatgtttcaagttgtggtacacggggactgcagcaaacaagaatggagtaggcgtcttgatcgacaagagccttaaagatgaggtagtagatgttaagagactaggagatagaatcatcctagtcaaactggtcattcgggacttggttctcaatgttatcagcgcgtatgctcctcaagtaggtcttaatgagaactcaaagagggagttctgggaaggcctggaggacatggttagtagtgtgccagttggcgagaagctcttcataggaggagatctcaatggccatgtgggtacatctagcaccagtttcgagggtgtgcatggaggcttcggctttgggactaggaatcaaggagaggaatcctgaactttgccctagcctatgacatgtttatagcaaacactttctttaggaagaggaaatcccacctggtgaccttcagtagtggccaacacactagccagattgatttcgtcctcttgagaaaagaggacaggcatgcctgcttagattgcaaggttatacctggagagtgtgtggtaacccaacataagcttgtcgtagctgacttccgttttaagattcatttacaacggaataagcataacaaggtcactagaacaaagtggtggaagcttaaaggggatgtggcctaaactttcaaggagagagttattgaggagggcccttgggcagaagagggagacgcaaacatcatgtggaggaagatggcgacatgcatccgaaagatagcttcagaagagtttgggttgagtgaaggaaacagaagggaagttaaagacacttggtggtggaacgaagatgtccaaaaggctatcaaggagaagaaagattgctacaaacgcttacatcatgacaagtgtgcagacaacatagagaagtacaggatagcgaagaaaaagtctgcaaagcgagcggttagtagagcccggggtcaagcctatgacgacctttatcaacgattggacacaaagcagggagaaaaggatatctttaggatggccaagattcgtgaaagggagacaagggatgtcaaccaagtcaaaatgcatcaaggatgaagcaaaccaactattagtgaagaatgaagagatcaagaacagatggaaaggagtacttcaacaaattgttcaatggagggaatgagagttctacaatagaattggacgaaccattcgatgacaacaacaggggttttgtacgaaggatacaagaaatacgaagttaaggaggcgctaaaaaggatgaagataggaaaggcgatgggccctgatggtatccctatcgaggtatggagatgccttggagacatagcgatagtatggctgactaagctttttaacaacatctttcggacaaacagaatgtccgacgagttgcggcggagtacgttagtacaatttcaagaacaaaggagacgttcaaagttgtactaattaccgtggaattaagctcatgagccatacaatgaagctatgggagagagtcattgaacaccgcctgcggaagatgacgagcgtgacccaaaatcagtttggtttcatgcctgggagatcaactatggaggccattttcttactaagacaacttatggagaggttcagggaacaaaagaaagacctgcatatggtcttcatagacttggagaaggcttatgacaaagtacctaggagtgtaatgtggtgggccttggaaaacacaaaagtatcaacaaagtacattaatcttattaaagatatatacactaacgttgtgacaagtgtccgaacaagtgatgaagacaccgatgactttccaattaacataggactacatcaagggtcggctttgagccccttatcttttcgctttggcgatagatgaggtcacaagggacatacaaggagatataccgtggtgtatgttttttgccgatgatgtggtacttattgagaagagtaggagtggtgtttcgcaaaagttggaattgtggaggcagacgctggaagcaaaaggttttaggcttagtaggtctaaaacagagtatatgaagtgtgatttcagtgccatggggtatgaggatggcgatgttagtcttgatgggcaagtggtacccaagaaagacacttttcgttacttaggatcaatgcttcagaaggagggagacatcgatgaggatggcagtcatagaattaaagctggatggttaaagtggcggcaagctgcgggtgtcttatgcgacccccgggtgccacacaaactaaaaggcaaattctacaggacaacaatccggccggctatgttgtatggagcagaatgttggcccactaaaagacgacatgtccaacaactaagtgtggcagagatgcgtatgttgcgctggatatgtggccacacaaggagagatcgagtccggaatgatgatatacgagagagagtaggagcggcgtcaattgaagagaagcttatgcaacatcgtttgagatggtttggacatttccaacgaagacct

SEQ ID NO: 140345 - DNA, 2456 bp, Zea Mays
aaaacactgacaatttgaagtagacggtttttttttttttgagaaattattccatgtggcaccatataagaaacgctgaaaaagaaaagtaaattttcatctattgtgtcatacaactccaactatatccagatccctaatatggccaggaggttattgtttgtagaaatatctatttgatatttggatcaaaatcaagacaagtttcatatgaaaccataaaggtatgtggctgagttatggtgcaacctaagcgaactatccaaaattagtcatatgttctgtcatactgaagagcaaacttactagaaaattaattctatgttttgctcagtaaactagttacttgcctgtaacacccggcaccggctcaccacgcgatgggcctcgatgtcccatggcccaactcggagcagcctaaaggcaggaccacaacggcaggagagggatggaaatcaaatcagaaatcggaaacagggttcgtccccttcgctcgtcttcctccacggagaggcggcatatcgaaggtggagtcgctggtggggggtcaggcagatctagcagcagcggtggcacaggaagcggcggaggatctgcccgttctgcctcagttcggtcgatctgcgggcaacaccacggcatcaggctttgacgagggacctgtcttcgacgacgagatgcccatcgacttcggttcccaggggaagaccgcgtccatggcggcagcacgcgccgtgggggtccccggatccaccgcgacgccctccgtgcccttcttcgacaacgtcgacatcttccacctcaatagtgaacccgtctacgacgtctacgatgacgacgaggatggcgatccgtcgcagcaggccgtggtgctcgctgcggacaagaagtactaccccaccgctgaagaggacgagcaaccgctggagcagcccatcgtcgcagacgcgcttgcgctgttcgagaagatgcgaggcaaggggtaccacgctgacgtgatgaggctgcgcgatgcagacagggcggtccaggtgctcggggagatgatggaggccggcttcaggccatggaacttgacattgacatacagttttgtggtggctgtgctcgtgaaggcaggaaggatggaggaggcactaaagttgaaggatcagatgttgctggttgctggaaagatggatgtggttctcgcgacaacattgatgcatgggtattgcttgctcggtgaagttgggaaagcgctggatttatttaacgaggctgtcagggatggtgtgacagcaaccaatgtgacatatgcggttctgataaaaggttgtgatgcagaggggatgacagataaggcatatgagctatgtcgtcagatgatagagcagggattgctgtcaagcacgcatgggttcaatttggtgataaaaggtctgttaagagacaagcggtgggaggatgccatcggcttgcttgaggttatggttgatataccttctgctggtactgcggctaagtgggaagagcttgatatcatgacagaatgtgttgttcaatgcaatcttgtcactactgcgtcctctgattttcatcctgaattcatcagtctgtttgtcaaaaattttggtggctctgtggcagtatcaagcaagagagtattgtttctcagttggggctacatggaggagtatgaggttctgattccatttcagttcctccaggttcgtgagagccaagtaaatgatgtttgccaggacatgggtgtgggagataagtgcttggctgccattcatgactttggcgatgttcggggtgtagatgaagcaaaggaggagcttgttgagatagtgagctgtctgcatggttcactgaactccaagaagcttggagcaaaattgcccaggggtgtcctgcttgttggccctccaggaactggaaacactcttctagcaagggcagttgcaggagaggctggaattccatttttctatgtttctgctagtgagtttgttgaagctttcgttggaagaggtgttgcccgtgtcacggaattgttcaaggaagccaaagaagctgctccatccatcatttttattgatgaacatgttgtgggtggaaatagaggtagaagttttaacgatgtgagggaccaaactctaaaccagctaattgccgaaatggatggttttgactcggacatgaaagttattgccatggctgctactaacaggccaaaagcactggatgttgctctttgtcggcctggtcacttctccaaaaaggtgcggtcttggagacttggtacttttactctaggagtaagtggtctgcaacttgggccatacatgaggagacaatgggatcctggtattacaaatgggcaattggtgatgagccgcgaggagctagctttacagatcgcagtgtttcttggggacaagcaacatttcgtcggggcggtaatgtaa

SEQ ID NO: 140346 - DNA, 1119 bp, Zea Mays
atgccccgcccgccctgctctccgtcgcgcccttccagggatcctccatcgccgctcccgccatcatcgcgcccgcgctccatcgatggaaggtgtcgccccgccatcctcgcctcgctccccgcgacacgcggcgccagcttgtgtcgcatcttctatctattcaccagcaaggtacctggcacagaacccagccgaatcctagaacccagccggatcctagaaatttcccattggcatctggtgaccgtatccggtggttgggcgtcagacgcagcggggcggtaccggtgcttggagttggaccacccgtgcaaggcaccgtggtgcgacgggccgctcggcgcgctggagagcaacgggtgggtgtactcggcgcactgctccttcaagctctttgtggccgatgcgtcgtggtggtgccttgacgggaagtggctcttcttctggggcgactctaaccacgtcgacaccatccggaacctcctcaccttcgtcctcggcatcacggacacgtctgctgtgacacgccagtttgatgcagtgttcaccaatcccattggtggggcagggactctaaggatcacaagcatcttcaacggccactggaacatgagcatgaactatctcggcttgcattccctccggaacagaggtttccggcagctcatccggtcctacttcatgtccggtgatcgtgttccagacgtcatggtcctgaactctcgcctgcacgatggctgctactggaccagcgtccgcatctacgcgcaggctgcggatttcgcagcacagttctggtccggagtcatggacaaagtccgggctcgtgggcatgcagtgcccagggtgttctaccggacgcagatgcctcagggtggtatagatgcagggaaaaaccacgcgactcccttcacggaattgagagatgaagctggtgtcacatactcacatccgcagggatgggtcacgttgcagacacttcctaatgaagtccttgtagtgctgcgaaaggtaatcaggtattggaagaacttccttgctgttcccaatcttgaacatagcagaaatctgttggcaaataaaagggaaacattcttgaatcgtaattatgattaa

SEQ ID NO: 140347 - DNA, 1022 bp, Zea Mays
ccattatgaacttatttttaatgaaccatgctccttcttcgttgctcacaacagggtccatgtacttggcacatgatatacatatacgagatggacttaaaaattaacaaaggtcttcttttggtggtagataattttggttttcttatgattctctttatgaagtgggtgtggtacctctaaacaaatagatgatctgttgacttatggcagtcaggcattacatttttttgcatgaaatcgacatctgagaagtgataattttgttttgatcgcttctctattgcaagatttagatggctactatcctttgcaattgatcaagaatggtgagctattctaaggaagcttctgaacaatatacctgttgtcctggagtgtcacagatggcaaagatttgcgcttagagaaggaggaagaacggtcggtgctagagtcatctccaaagttcttagctgatcagtttccactttcttctctgtagtctggttgcaactgttgatgatattgtaggtgtatgaaatcttctaagcaaactgttaaatacattgcacccgatcagaagggatgctctataatgcagcctggtaaacctccctcctgggcccagctgtcctctgctttcagtgtgaaactactgatttggggtgtgatctccgtacatcgtgctccagccgcactcagatctagccttggccgggagacaccgcgacagaggctggacgtgctcttcccgtcctcatgccccatgccgctgcgcgctcttcccttcacctctcactacacggcggctgcggggcaggggtgaaagaggcgaggcttctccagcttctcgaggccggagaccgtttgctcaagggtgtcgttcttgacggcctcctccgacagcgtggacgcgtggttctcaacctatattattgttgtattacattggacacatagggaagggaaaaaatccggtgaattatagggtgtgatctgtctgcctatacttgtggtggcattcatttgtgcaaatgatt

SEQ ID NO: 140348 - DNA, 1910 bp, Zea Mays
ccattatgaacttatttttaatgaaccatgctccttcttcgttgctcacaacagggtccatgtacttggcacatgatatacatatacgagatggacttaaaaattaacaaaggtcttcttttggtggtagataattttggttttcttatgattctctttatgaagtgggtgtggtacctctaaacaaatagatgatctgttgacttatggcagtcaggcattacatttttttgcatgaaatcgacatctgagaagtgataattttgttttgatcgcttctctattgcaagatttagatggctactatcctttgcaattgatcaagaatggtgagctattctaaggaagcttctgaacaatatacctgttgtcctggagtgtcacagatggcaaagatttgcgcttagagaaggaggaagaacggtcggtgctagagtcatctccaaagttcttagctgatcagtttccactttcttctctgtagtctggttgcaactgttgatggttagcacattctttatcttcaattattggaagaaacatttttgcgccaattacatgaaagtggttgcagttttaagggtctgttcaatccctctccaagatattgtaggtgtatgaaatcttctaagcaaactgttaaatacattgcacccgatcagaagggatgctctataatgcagcctgggtgtgatctccgtacatcgtgctccagccgcactcagatctagccttggccgggagacaccgcgacagaggctggacgtgctcttcccgtcctcatgccccatgccgctgcgcgctcttcccttcacctctcactacacggcggctgcggggcaggggtgaaagaggcgaggcttctccagcttctcgaggccggagaccgtttgctcaagggtgtcgttcttgacggcctcctccgacagcgtggacgcgtggttctcaaccatggccttggtcacggcaggaagcagagcctggtgccagagaagctcccagtgccccatgtgttggcagcatatcagcatgaaagatcctatgaggtgaaaattgcaacctctactctgtcttaactcctaagggactgaattgctggttctcacttattcttgcgacactctgcagccaagagctactagaggctgttgaacaagagaggaacatccgatctaatccttcacgtaatactgctgttttccaccatccaatgctgggtgattttgaggtgggcatgtttcttcatgcatgtttggggaactttttaggttaagaaactccatcaagaaaagcagttaggaatgatggtggacaaaggcctggtagcaactaggacagggttgagtcagtaccacctgtctcactggcctagaatgtttgaggtgatcaggatgctggaaggagacatgctcacagagagatgggaggtgtcgcagaacgtggacatgccagagttcgtctcatcggagctcctacttcaaaagtacatggattttgcagcggacgaatgctcgcttggtgtagaagccatggagctctctggactaaggtgaccatctgatcgatcgaatcggccatcacacaggtcgcataggtgtcttgccatatcaagcctatattattgttgtattacattggacacatagggaagggaaaaaatccggtgaattatagggtgtgatctgtctgcctatacttgtggtggcattcatttgtgcaaatgattttgatatattgatgtagagaatatatatgttgtttatttctatgtaatcgttgcacactataattttatcaaacaacttttgtattgttgcaaggggcgacaaaaatccagtggattgtagtgtgtgatttgtctatctataactgtggtggtattcatttgtgcaaatgatttgttgtatatt

SEQ ID NO: 140349 - DNA, 774 bp, Zea Mays
atggccttggtcacggcaggaagcagagcctgccaagagctactagaggctgttgaacaagagaggaacatccgatctaatccttcacgtaatactgctgttttccaccatccaatgctgggtgattttgaggttaagaaactccatcaagaaaagcagttaggaatgatggtggacaaaggcctggtagcaactaggacagggttgagtcagtaccacctgtctcactggcctagaatgtttgaggtgatcaggatgctggaaggagacatgctcacagagagatgggaggtgtcgcagaacgtggacatgccagagttcgtctcatcggagctcctacttcaaaagtacatggattttgcagcggacgaatgctcgcttggtgtagaagccatggagctctctggactaaggtgaccatctgatcgatcgaatcggccatcacacaggtcgcataggtgtcttgccatatcaagcctatattattgttgtattacattggacacatagggaagggaaaaaatccggtgaattatagggtgtgatctgtctgcctatacttgtggtggcattcatttgtgcaaatgattttgatatattgatgtagagaatatatatgttgtttatttctatgtaatcgttgcacactataattttatcaaacaacttttgtattgttgcaaggggcgacaaaaatccagtggattgtagtgtgtgatttgtctatctataactgtggtggtattcatttgtgcaaatgatttgttgtatatt

SEQ ID NO: 140350 - DNA, 486 bp, Zea Mays
atgggagatgcaggggcagggagaagtggatcccgggctgccggagttgaggaaggcgagctcaaggggctaagtgccatggaggctagtggccatgggggctttgcgtctcggcgtccatggagggagaagcagagagtattggagcaagggccgtcgaatgaaggagctgtcccggggctaggggagcgccctgcgctagaaggagaagggggcagagctctgagtgccggactggagatggcgagctgtataaatggagagagagagctctggacatgtcaggtggcagtgagcagtggcaggtggaaaaatgtcgacattgggcgggcatttttggcattttctgcttgttttcgaatcttggttgctgcacaaaatatcttctttgatctacactctacaattgttgtacagaacatgaagttattcaggtactggttagagagttatagacccacaaaaattggtttgtcagtgggttaa

SEQ ID NO: 140351 - DNA, 1043 bp, Zea Mays
cccaaatccaacccgaagaatcaaaccatcacaagctctagttttccagctctgcagcacacaagctagttaagctcctgcaacctccaagaaactaggcaatcgtttcctcctctgcttcagtatctccccttccagcagtagctaagctgccatatggcgacaagcaggcttgcgctcgtgtccgtgtttgccgcagccgtcctgctgggcatggcgtcggcggcgacctacaacgtcggcgagccggccgggtcctgggacctgcgtaccaactacggcacctgggtctcctccaagaggttccacccgggtgaccagaccgtgttcaagtactcgccccaggcgcacgacgtggtggaggtgaacaaggcggactacgactcctgctcaatcgccagccccgtcgccacccacaactccggcaacgacgccatcgccctggcctcccccggcacccgctacttcatctgcggcttccctggccactgcgacgcgggcatgaagatccagatcaacgtcgtgcccagcgccaactccctcggccccgccagcgctcctgccgccaactctcccgtctctcccccgcccatgtccgcgccctcttccgccgctaccaaggccaccggtttcggcgcccttgccgccgtcatgatcgccgcaggcctcatggcttactagatactctgtcgcttgctgcgtacatttagttttccttagatattatatatacgttgtattgtattcttttgagagatcagagttcagacgaatgacatggcatacatgtatctacgtaaagacagatgactagtttatacattattcatattgtatatcattcaggtttcgctcttcggtgtatgtatcgatattcattcagatagatagagatagagatgaccacgggcggatccaggatttttggtcgatggtgtcaccgagaaactagagtatataaggttcttgtttctagctagtgtaacgacatatattttaatggtacattaaaataaaaggttataagatacaaaccatttaaa

SEQ ID NO: 140352 - DNA, 87 bp, Zea Mays
tgtccagagtggttgagtgtggtggttgtgttgcgtctgttggtatgttgtgtcttgttatgtcatgtgtgtggcgtgtgcgtgtga

SEQ ID NO: 140353 - DNA, 1084 bp, Zea Mays
atggaaacaactgtcagttttgatagtgtgcaggaggtggatattttggcatattacacgttgagtggtgaactcaagtatcagtttgggtctggaagcatgagcataacagactatctcttaaatctagaaaatcttttgtgtggttgtggaggtttctacctacaagactggtctttagcatggtatgacagcatgtttgtgtatccactctgtagaaaatatcttatgcttcatgtctttagcatggcacttgtgtctcaaatcctttcaacaattggatccattttagtgaaaatccatggaggatccagtggaattggtacattcgctatacagattgccaagtacctcggaattaaggtttttgtcactgcaggaagtgaagagaaactagcagcctgcaaagttttgggtgccgatgtatgcattaactatagaactaaagacttcgttgaacgtatcaaacaagaaaccaacggaaagggtgttgatgtgattcgggataatattggaggatcatatctccagcgcaatctaaacaacttaggtgttgatggtagacttttcatcattggcttccaagggggcatagcagctgaagtgaacctgcaagctgtgcttgcacgccgtttgaccatacaagctactggactgcgcaacagaagccttgccaaaaaggcagagattgttagtgaggtggaaaagaacgtgtggcctgctgtcgctgctggcaaagtgaagccgatgatttacaagacgtttcccttatgtgaagctgctgaggctcataggttgatggaagctagcacccacatcggcaagatactgctgctcccactgcacctgtggcgtttgcgctcttactctcggaggagtcagttcaagaacatatgcaacttctgtgacagcctgcatggatgttgtactggtgtagcatgtcttttttatatatcttgtagtactagattggatcttttaccccgagaaattatcttgtcaattggatccttaaagtgctgatgacatttttctgtgagctatgatataatcaatctggagatagagccactacagcacgtca

SEQ ID NO: 140354 - DNA, 609 bp, Zea Mays
ccaccctactacgcattccatcaccgatataattcactcctctcaacgctcgctgcacacacacaccagtgaacctagccagccatttgccgcatcgatcatcagtcgctgtcacgcgcgccaaaccaaaccaaagcccaaacccagctgcaagtgctactgacagcagctagcaaacacacacccgtcgccatcgctatggacggcgactggtccaaggacggcggaggtggagagccgaccaaatatcgcggcgtgcggcggcggccctggggcaagtacgcggccgagatccgcgactcgagccgccacggcgtccgcatctggctgggcaccttcgacaccgccgaggaggccgccagggcgtacgaccggagcgcctactccatgcgcggcgccaacgccgtcctcaacttcccggaggacgcgcacgcctacgccgccgcctgccgcggctccggatcctcctcatcctcgtccaggcataggcagcagcagcagcagggctccggcagggacgtgatcgagctcgagtacctcgacgacgaggtgctgcaggagatgctcaggaaccacgagccgtcgtcgtctgcgaggaagaagatgtaa

SEQ ID NO: 140355 - DNA, 125 bp, Zea Mays
ttttttataatttgcttttcattattttagtgaatgtcaggccatgtaacctgcagaaaggagaaagaactggccctatagggcaaaccttatttatccgtgcaaaagtctagatttttgttaac

SEQ ID NO: 140356 - DNA, 111 bp, Zea Mays
tttatctcttaaattcgggtgtgacaaaaaccgggtgtgacatagtcccacacctgttgctgttctctctagtggtccctctagtcacagggctagtgctactgcaaaacc

SEQ ID NO: 140357 - DNA, 105 bp, Zea Mays
ttttttttctcattcttactcccatatttgcaaaaacaaaaagtagatattttgatactatcaaatcctcgtctcaaagatataatcagagattgaacaaaaaaa

SEQ ID NO: 140358 - DNA, 197 bp, Zea Mays
agacagagtctcgctctgtcacccaggctggagtgcagtggcgcaatctcggctcactgcaacttctgcctcccaggttcaagtggttctcctgcctcagcctcctgagtagctgggactacaggtgcgtgccactacgcctggctaatttttctatttttagtagagaccaggtttcactatgttggccaggatgg

SEQ ID NO: 140359 - DNA, 279 bp, Zea Mays
atggccaccaaacctgggcgagtaggagctgccacagcagggaggaaaatagatgggggcatcgacataggacttgagggtgttggtgtcacagagctggagagggctagcgccaggacgagttcggccatgggagccgaggacaagcgccagggagatggctggcgagtagggaaaagcgagggggagatgggcgcgagaggaagggagctcccttgccgagcactggggagcagcgaggacgagcagaggcgtggccaccatggcggggagggatga

SEQ ID NO: 140360 - DNA, 1937 bp, Zea Mays
atggcgtccctgcacaacgccagcctggtcctcaccgtcgaccgcacgggctgcgccaactttaccagcctgcagaaggccgtggacgccgtgcccgactacgccgcggcccgcacgctgatcgccgtcgacgcgggcgtgtacgcggagaaggtggtgggccgcggcaacctcaacacgaccatcgtctggaacgacaccgccaactccaccggcggcaccttctacagcgccaccgtcgccgtcctcgccgccaacttcgtggcctacaacgcggtggcgctgcgcgtccggggcgaccaggccgccttctactggtgcggcttctacagctcccaggacacgctgctggacgagcagggccgccacttcttccgcggctgctacgtcgagggctccatcgactttatcttcggcaacgcgcgctccctctacctcggctgcaccatcagctccgtcgccaacgccgccgcgaacggcaccgtcacggggagcgtcacggcgcacgggcgtgcgtcgctcgccgagaggacgggcttggcgttcgtggactgcaacgtcgtgggcacggggcaggtgtggctgggtagggcgtggggcccctacgctaccgtcgtcttcgccaggacgtacctctccgccgtcgtcgcgcccgcgggatggaacgactggaacgaccccgccaggcagcagtccgtgttcttcggcgagtacgactgcacgggccccggcgccagcggtggcaccgcgcagagggtggcgtacgcgaggcagttggaccagcgccaggccgcgccattcatggacctctcctacatcaacggaaaccagtgggcgcttccgccgatactgggcgctgccggcgaggacatcatatctgccgaattcagtcgtggccagccaggacagcaccatgtaaatctagtataacatgtcaatcagtttgcaatctgtatggagtggagtcagtcaactatgagtatgagcaaggaaggaggaaaggccactgctcagtcgcgtctcccaacgccagggttccgccaccgccgacctcaccacccgcaaaccgatcaacggccgccgcatccgcgttactgccgaacacaaactcgcccccgccagtggccgccccatcatcaattgattcgtccttgatggtgacgcgctcaccagcactgtgccttggcacccagtgctgctgctccatgttccatggtggcgggcgacgaggaggtctatcccggcgatttgaggacggggctgcccggctgcagctggtaggcgtggaggaaaccgtcgctggccgtgccggtgccggtgccggtgccgccgccaaagcagtgcgcctgctggtctgccgcagcggaagaccataggaactgggcgaaggggacctccggcgacgacggcgtggtggccagcagttggaggctggactccggcgggggcgtgagtggcgcggtggacggctcggtgaggcccgcggacgcggaaaaggccggcggcgacaccagctgctgcggctccctggcgtatgggccgatggcgaagatggaggccgtgggcgagctgtagctgctggcgttggcgttgaggagcaccacgggcgacggcgactccgaggtgagcacggacgtggcgggcgacggcggcggcgccacgaaggccagcgtaggttggggcgcgtggcgcgcatagttgtagctgcccggcgcctgctcggcgcatggtgcgcccggcggctccggcgaccgcgacgcgtcggcgatgcgctgggggtggccgtgcggccggaacgacttgagcttggccttcagacgcgaccaccatctcgtcttcttctgcatgacatcccaagacccaaagcatgaaggcaaggcaggcaaacaacaccatcagagtttagaacacaccatggatcagctcagctatgctac

SEQ ID NO: 140361 - DNA, 107 bp, Zea Mays
acaaattatactacatggtgtagctatttatgcaattcgttacactgcgtaaaaaatctggcatgttgttcactggtggacgcatctccgggttggagcgtaaaaac

SEQ ID NO: 140362 - DNA, 1578 bp, Zea Mays
gtttttttacatatgaacacgggcacacgaatcgtcggctcacggcctcgtcacgcccaccctctccctcttcgggttccaggcttccaaagttgtcagagacggcgagagtagggggtttccaggaagcttcgccagggcgccggtaagttgactggatttgctgctaggcagtcaggcaagctcgagttttgccatttgagaaggagagggaaaatgatgacctcgtggcttctgggccgccggggcccctccggcttctcctggagttccaccgccgaccaagtcacgcagggcatctccgccgccggcctcaccgccatcgtcactgcccaatcccatccaggggcgtccagcggcatcggcgcggagacggcgcgaacgctggcgctgcgcggggcccacgtcatcatggccgtcaggagccttcccgctgcccaggccgtcaaggacgccgtcctcgcccaggcgccgggggccaagctcgacgtcatggagctcgacctctcgtccatggcctctgtccgcgctttcgcgtcccaattcatcgacaggggtctccccctcaacatccttatcaacaatgcaggagtaatggcaataccttttgcgctttcaaaggatggaattgagatgcagtttgcaactaatcatgttgggcatttcctgctcacacaccttctattggataccatgaagaggacctctcatgaatcaaatttggaaggaagaattgtcaacgtgtcatcagaggggcacagacttgcatatcgggaaggaatccgttttgacaagatcaacgatgaatcagtgtatagtagcattggtgcatatgggcaatcaaagcttgcaaacatattgcatgctaatgaacttgccaggcgatttgaggaagataatgtcaacataactgcaaattctcttcatcctggttccattatcacgaaccttcttcgctaccacagtatcctagatgttctccatcggacgctgggtaaattggtgttgaaaaatgctgagcagggtgcggcaactacatgctatttggcactccacccgcatgtgaagggcgtgtccgggaagtacttctgcgactgtaacctgtacgagccaagcgcgaacgccaaggacatggagttggccaagaggctctgggacttcggcgtcgagctcatcacctagctcatgcttcttgttgttagcgacttgttttcagacatggatgtaatgtaaatcccttgacagatggtaaattctgtaggccctcgaggagctcctgtgtggtaaactcattcacctcaatctatctacgtgtattaaggtggattagggtgtaaattaaattaatttacactccaatcgccctcgaggagctccggggtggataatgctttggttggatattttagtattcacctgaatttacgtgtattaagatgaattagggtgtaaattaaattaattacactccaatccatctcaatatatatggattaggtcgaatactagagtattgtaatacttcaaaatcctattttggataaattagtaaaacgtatttcatgatttaaataaata

SEQ ID NO: 140363 - DNA, 95 bp, Zea Mays
gaccaaattataccgtcttcaatgtctactcttccgtacaaaattaaagactcactctgctagagacaccaaaaaagatgttttaagaaacccat

SEQ ID NO: 140364 - DNA, 312 bp, Zea Mays
aagggcaaggagcttgcaaggaggcaggagcaattaagtctgcgtgaagcaaacatcaagcatcatgaggaagagcttcaacctcatgaggcaactctcaagaacaagaatgataggaaaaaggatacaatagaaccatctccagggcgtgagaaagaagaagcacccatgctacaccaagtagacaaaatgtaatagacaaagaaattatattcccttaggcaagttaggacaagtgggggagttataaacattagaagtacagagttccacacatgccattgcaagacatactttgtttaatttccctaa

SEQ ID NO: 140365 - DNA, 987 bp, Zea Mays
atgtcaatcgcaaagagggccatacctgaggctacaccaatcgaagaggccagccaaatcatccgcgacaactggctgaatgtaattgaggagcatcatctgaagtactcggggaactctcaggtaaacgacatcctggacattggctgctctattggagtaagcaccagatacctcaccgagaagttcccatcagctcaagctgttgggctcgacctatcatcgtactttcttgctgtggtggcacaaagggaagaaaaactgtcccggccaaagcctattcgctgggttcatgccaatggtgaggcgaccgggctgtcttcaaattcatttgaccttgtctcccttgcttatgtgtgccatgagtgcccagcacgagcgataaccggattggtgaaggaagcattcaaggtccttcgcccaggaggaacaatcgccttaacagacaattcgccgaagtccaaagtacttcagttcgttgttggagcatctccaacaaccttcaaaactattttatcaaagcatgctcaagaggagagtaaggctcttacccgcaagactcgcatcctggatgtggtctataattcatcaaacaatgagcttgtgaggactcagactcttgtgaatagcgccattgtacaagttgatgctgcaccattcaagcagtggtacctcactcactgtggagtggacatcggtaggaagaagaagatgcatgtcgctaagaaggatgcgactgaggaacaagacggtgaggctatagtcgaggaaacaaagaagagtaaccatgtgcagaagaagattgagaagcgtcagcaggatcgagcagtcgacactcatattgaagagcaatttggcagtgggagattgttggcctgcatttctgctcgtcctgggcagtgtggccgagctaatggctacatccttgagggtaaagagctcgagttcgacatgaagaagctccagagtatcacccacagaaagtag

SEQ ID NO: 140366 - DNA, 553 bp, Zea Mays
cgtgcctggcttcgctcatcgtctcgcgggcatcccatggcggagcatcgcgaggcaaggcctctcccgcgtgttcctggtggcgaaggcctactgcgtgatccaagtcatcaacgagcacctctgctcggtcgccttagtgcgaggcgccagcatgctgccagccctgaacctggcgggcgacgtggtggtgatggatagggtcagcatgaggctcggccgggtcacgccgagggacatcgtgttgatgatctcccccgaggacccgcgcaagtggctcgtcaagcgcgtcgtcgggatgcaggggactccgtcacctaccttgtcgaccccgacaacagcgactcctcctccagaaccgtcgtggtcaaaggatgaggaggtgatactgagaaatggagctacaataaaggatatggagggagacaagttaatcattccccatgagagtctggatatatcaattgagaggctgaaggaacatggtataacaactaagaaatcctctcaaaatctgaagaaaatcgggcaatatgttttatactgtagttaa

SEQ ID NO: 140367 - DNA, 222 bp, Zea Mays
atgcttgggacaaagtggccagcaagaatggagccatggaaaattggcaggaggggtgcggcagcggcaaccgatgtatcccttggacaatctggttttgacatgatgcaaatcaatatgctgtacactgtattccgcacttgcacagattgtttggctaattacaagattatctcagtgttttgttttggatttagagtacacttatgtatgaaatattga

SEQ ID NO: 140368 - DNA, 330 bp, Zea Mays
atggagaggaggccgagcaggaaggaagtgcggttgtgcgcaaggagctcggcatgggcgccgcgctggagaggcacagtccgagcaggaaattcttgggtgcgcagagctgtgctgaaaccagggccgtggtcgagcagggaccggaacaccgtcctgggcgagctgaagacggtggggcagaaggcgcgcgcaggcgagcttgaagaggaccgcaatgaggggagagagaaggagcatcgcggcgagcagcaaggaagaagacgtgcaagggagaagcgaccgacgcgtagagcagggagcagagaagcagacgccgagctggggtga

SEQ ID NO: 140369 - DNA, 120 bp, Zea Mays
ggaaagagatcagttttcaggaaaatggaagtgttcattgtattcgttagggaatcaaaatcagataaatggttgggggcaagtatttaatggaaaagtttgagcattccattgaaaaaa

SEQ ID NO: 140370 - DNA, 438 bp, Zea Mays
atggcgcccagcatcttttctctctctcttgcgctcggcttctgtttctcctcctcgcgctgctctttcttcccccagccgttcaccactaccgtgatgctgcctctgctcgcgcccaagttttcctcgctcctgcgctccatggtcgcctcccatctcgcgctggccccgctgtctgcgcgcagccacgtcctcgagctcggcttcgagctccatctccctgcgccgctactctgctggtcggctaccgctccctggtcggcacactgctttgagtttgccgagctccctcgccatcgcaggagatccctcctgctccagctcgtcggccgtatccctctgctcggtcaccgtcgttcctccctggacggtctcaagcgccctcgcctcccggtggtttcagcttgccgtcgactatccttgccacgcgtgctttag

SEQ ID NO: 140371 - DNA, 651 bp, Zea Mays
atgtgctatttgttttcactcagaattttctggtggctgcaggtccagaaaaggtttgaggcacttaagaaaaggaaggatctaagtgcctttactgaagaagatttggatgagagaataatgaaacaacagcaagaggaggaggaacggaagcggcagcgcaaagaaaagaagaaagagaagaaaagagaacaggcaacccaacatgaacctgaggacgttgatcctgacatcgctgccatgattggttttggtgggtttggttcctcgaagaagtgacagctctgtgttggccgcatccctttggtgaccttctgccctgaagatattgctcaaccccataaacacctgtgctatgaaaaatcgtttttgccagaatcctgataagatttgaacgaagtgcactggatgcaagggtactaagttttgacactgggatattgaactgtgtgtatgggagttgattatcaaaaggaatatctaagggtgttttggataaacctgtttatttgctacttctggtattcctgcttagaaacagctgatggtcgtgattgtttgttgtgggaatgcagatgtgcgaagtggaacaaaccaaaagaattgccgtctcattttctagaggaataaacttgtgtattgcagttaaca

SEQ ID NO: 140372 - DNA, 279 bp, Zea Mays
atggtctcagctgcccttgtgcttcttcctgttcttgatgactcctacacgtccgatgttcctcccgccagtcaccatgaccacgttgccgatgtcaaacttgatgaagtctatgatcttgttggtctccagatcgatcttgatggtgtcgttggccttgatgagcgggtcggggtggcgggagataagtcattggtagaaaacttgatgaagaccatagcaaaaagctccaagaagttccatatgccacaaagtctttacaaatatgtaacaatgtag

SEQ ID NO: 140373 - DNA, 2089 bp, Zea Mays
atggagaagctggataagagaaagttcgagcagcggactctgaatttgcaaattttctcaaaaaatggcagtcggattttaaaatgctctagaagtaaaggagattctgatgaagagggtatggattctatggatgatgatgatgactccaatgatgggaatttaccaaatgctaaggtccttacaagaaagacgataagtgaatggtgccagttagtatcaaaggaacctaaagcacctgccttgcgtaatctactaaatgctttttgagatgcttgtcgatatggtgttcactctgatgggcacttgatgcagagatttcaatgtgccagggtgttttatcaaataataatgtttgttctttctgagtcggacaacatttttcgtgctcttttggaaattcaagatgacattaacaaaggaaatattatgaacctgagaaattcaaagaaatggctaactgttgatcctctcataaagtcctacctatcaagttctcttgaccttcttagtcaacttacagacaacaagatacttgcctttgttttgactcggttgagggtatcagtggtcgttttttctgcatatccatcaacatcaagtaggcttgtcaagattttatttcgcttgcgggcaagtggtgatcggagtttgtctctgttggcatttcttatgatccgagaagtagcttcactgttacgtgactgtttggatcactgtttaactaaatcctacaatacataccttgccagtatctccttccgctagattcatatgtaagtttcaggtttgttcttgtatatcttggtacaatgtgaaatcttacattttcatatatgtagggccaaatggagaggttagacagattataggggaattcacactttcaaatttactagcattacaaggaggaaaggtaattgtagagacagatgaaaatggtgtcccaaatgaagggtcagcctccattcttgggcagcaccttggccatgtagcagaaagcccaaccttagctcctttagacatcccaagatttgacaatcgcaggtttaattcacacaaggaacaaataataaaggatgttgaggaaaccagaactaaacgaaaggttcataggatagaactatgggaggcagctcataaaaagaagaatggtagatacacaacagaaaaagcagagacactgatggctgcatcttatgaggaatttaaaaaagggcgaggggacaacgatggtaatcgcctttcatctaaagattacaatgaagtgttcaatgatattgttgccaaggatttcaaagcacgtgggtactatgatgataagtactggagtcaagtacaagcttttcatggtttaccgtttgttattcaaacagaggaagaaagaatgtaccaagagaaagtaaatgaaattgacaataaaatggaatccgtgagtggtctcatgaagcattggcttacttttatgtcaaaaaagtatccagaagatttgaccctagagatgagagaagctttacaaaatgaagtaagcttgcattcaaccatgggtggtgatagttatgaccaatgcactgaaaatgacacatctgaaaattatgctgccaaagatacgagtagcatccaagaagattcaaatgctgacgtgacctctcgaacaaatgaagtgcataacatggttaatgtcgagcagcaacaacaacaatctgtccatagaagtcttggacgaactcaagtccatacatctacaccacatgagcaaacaccttcaaaggaggcacaacttgatggcaatgtagtcacagatttgccaagtgatcctatattgcacaacatgagacaaaagcaagtctaccttatttcactgataaacaaaggcagagttgtggccaaagggaagttagtgactacagatagccaaagagaaatattaggagcaaagcttggaccagaatattgtggggttcttgttgaaggccttgaaaatattgaacttggcaatattatagatgaggaggtacctagaccatctaatcatattcgtacactaattgatgctattggctatgttattccttggccaattacacat

SEQ ID NO: 140374 - DNA, 186 bp, Zea Mays
atggcgctcgcccctgcgcagccatggagcttccccgtcgcgccctttgctccatcttccccaaccgcacgctgctcggagtcccctgtgaagcccgatttctgcgagcccctggagtttgccgagctccatcccttgcctgctatggcgctcggttttcctcggcccgtgctcgtcggaggatga

SEQ ID NO: 140375 - DNA, 1453 bp, Zea Mays
ttttttttcctcatccggttgttgttttggggatttggaattttgtggaaaacattcacaactagggcagtagaatttatttggtttgacgcttgcgttgcggtcgggagctgttgcatgggttagttgggccgcaattggtgtttcagcccattaatcctcccaaaccctagccgcctccctcctaaccccctccccccttgtgcagctgccccccacttctcccacaccttggccgccgcccccctgcccatctcctcctctctcaattcttgcagccaccaaaccctagcccccccccccaatcccctcatcccaaggtgccaatccttgccgctcggatcatcgtcacgtggtgcgagtctttaatcgttttggtggaggggagaagggaggaaggaaagggggagaatccaaggtggtggactcctagatcgttcttagggatttgcccaaacttccggtgaaggcaagtaaaactgtgatggttattccgtctgtcagatgaggatgtcttatacttgtttatgttgtgctattatgttcaaattcatattttcttttgagtaccatcatttgaaaatgttcgtgtttcatggatttcatatgttgagtttgaggtttgattatgttactcaagtggttattatgtggaatgggtggaagtaaatgtctagcacatttttatttgggaagaacacatgatgttgtcatgcataatgcactcatcatccattgcattgaagtttcgtcgcgatcttatggtccgaccgtaccggtacattgagcatcatatgttgcccgagaaggggtatggtgcagcttcatatccttagagatatggaggcagaagtcattattgcatttttagccatgtgcattcatgggagaggtgttgaatctattatgtagatgtggataatttggacttgtgcctagtgattctacttggcgttgagtttttagttacttttttacttgctgcaatttactgttcaaaagaaaagaaagaagttttgaacacgtggttgtgtaagcacagttgatttacaatgtcctatttcttgtcgttatgtttacttgctgagatgtgttatctcacatcttgcattgtttgatgcaggcgcctaatttctgctttgggaatagagggatgtagcagcacggccactacacctttaataaaggaaccaccatttaataatgttgttaatcagagttggacaagtctagtgaatcgctttgttcttggttgagcgtttattttggggtgggctgagtttcttatcccatttgttttgcttcagttgggtcataattaagttttaccacttttgcatttcagtttctactatgtgaattatatgtctttatatcttgtatgagcttcatgtttcccctccttgttatgctagttttcaaaggaggtgctgccggatttttgctatatata

SEQ ID NO: 140376 - DNA, 1200 bp, Zea Mays
catctcctcctctctcaattcttgcagccaccaaaccctagcccccccccaatcccctcctcccaaggtgccaatccttgccgctcggatcatcgtcacgtggtacgagtcttcaatcgttttggtggagggaagaagggaggaaggaaagggggagaatccaaggtggtggactcccagatcgttcttagggatttgcccaaacttccggtgaagtcaagtaaaactgtgatggttattccgtctgtcagatgaggatgtcttatacttgtttatgttgtgctattatgttcaaattcatattttcttttgagtaccatcatttgaaaatgttcatgtttcatggatttcatatgttgagtttgaggtttgattatgttactcaagtggttattatgtggaatgggtggaagtaaatttctagcacatttttatttgggaagaactcatgatgttgtcatgcataatgcactcatcatccattgcattgaagtttcatcgcgatcttatggtccgaccgtaccggtacattgagcatcataagttgcccgagaaggggtatggtgcagcttcatatccttagagatatggaggcagaagtcattattgcatttttagccatgtgcattcatgggagaggtgttgaatctattatgtggatgtggataatttggacttgtgcatggtgattctacttggcgttgagtttttagttacttgtttacttgctgcaatttactgttcaaaagaaaagaaagaagttctgaacacgtggttgtgtaagcacagttgatttacaatgtcctatttgttgtcattatgtttacttgctgagatgtattatctcacatcttgcattgtttgatgcaggcgcctaatttctgctttgggaatagagggatgtagcagcacggccactacacctttaataaacgaaccaccatttaataatgttgttaatcagagttggacaagtctagtgaatcgctttgttcttggttgagcgtttattttggggtgggctgagtttcttatcccatttgttttgcttcagttgggtcataattaagttttaccacttttgcatttcagtttctactatgtgaattatatgtctttatatcttgtatgagcttcatgtttcccctccttgttatgctagttttcaaaggaggtgttgccggatttttgctatatata

SEQ ID NO: 140377 - DNA, 3747 bp, Zea Mays
aaaagtaaattaaattgtcgacacatctctgcctttccttcacaagtgcacactttccaattcagttcaattttcattcgaattcgttttcgtttttcgttcttttttgtttttccccattctcacacgaacaagacgaacacgttcgtccccatcgccgtgttcttcgcgccgccgctgcccaccgatcgaatccgcccgccgcctcccagtaacctccggatccctactcctccaagcttctgtacatctcatcctattcgatttgtctctcgattgccatcatcagtcgcaacccagatatgagtttcactaccaaattctagggtttggggcatatggcctcgtgggtttgggagtgtgatcgacgggcagtgtaatttaataattagctaggatgtcaagagatgatcacgttgaaatctaagtcttgaagagatgattgcggagaagccaaactggattcgtcacgagggcctacagatcttctccatcgacatccagcccggcggcctccgcttcgccactggcggcggcgaccagaaggttcgaatatggagcatgaaatctgtggacaagaataataatcacaatgattccagccaagggttgctagctacaatgcgtgaccattttggatcggtaaactgtgtgagatgggcaaggcatggccgctatctggcttctggatcagatgatcaggttatcctaattcatgagagaaaagctggttctggaacatctgagtttggtagtggggaacctccagatgtggaaaattggaaggttattatgaccttaagagggcatactgcggacgtggtagatcttaactggtcccctgatgattcaacattggctagtggtagcttggataatactgttcacatatggaacataaccaatggtatgtgcactgccgtcttgagagggcattccagcttggtcaagggtgttacctgggatcctattggctctttcatcgcaagccaatcagatgataagaccgttataatatggcgtacaagtgactggagtcttgctcacaagacagaaggccattgggaaaaatctcttggttcaacattttttaggcgacttgcgtggtcaccttgtggccacttcattactacgactcatggcttccagaaacctaggcattcagcccctgtgcttgaaagaggcgagtggtctgctacatttgactttctaggacataacgcacctatcgtggtggttaagtttaataactcaatgttccgtaagagtttctccaatggtcaagacacaaaagctgcaccagctggatgggccaatgggacatcaaagatatcatcaaaagaacagcaaccatataatgttattgctattggaagtcaggacagaacaattactgtttggacaacagcgagtgcacggccattgttcgttgctaagcattttttctctcaaagcgtggttgatttatcttggagccctgatggttattcactttttgcatgctccttggatggatctgttgccaacttccactttgaagcaaaggagcttggatacaagttaagtgattctgatctggatgaattgaagaggagcagatatggtgatgttagaggacggcaatcaaatctggctgaaagccctgcacagttactgctagaagaagcatcagcaaagcaatcggctagcaaaaaagggactccgattgtccagcaatttcaagcaccccaaaaactttctgcagatgtgcttaacccagctcctgttgtgcaaaatcagaaagctcctgaagctttacctgaagatgagaagaaatcatcagatcctgctgctgatggtatgaataaagttactcggttatctagtccagtgaagcagagagaataccggcgtcctgatggcaggaaaagaataatcccagaggctgttggatttccatccaaccaggataacatacccagccgttctcagaaccacgttatagatttttcatccttagatcagcgaatgaatgggataagaccatcttattgtagtagcagtaactgtaacaactctggagttaaggactgctctggtgtcacagcaagggctaacattacagaaagtcttgttattcaaaaagcttcaaccaatgctagcagtgatggaaggctgactgtagaacgcactggatctgttgttccaggctctttgaactgccctgcactttctatacatgtattagataagaaagacaatgaggattccttgccagtctgccttgaggcaaatcctgtagaacacgctgcaggtgatatgaatggtgtcggtggtgccttttcaacaaaaggaacagaaataaggtgtacaagaggaacagaaactctttggttggatcgtatatctgcaaaggttactgccttggcaggcaatacaaatttctgggctgttggctgtgaagatggttacctgcaggtttacacaaaatgtggaagacgagccatgccggcaatgatgatgggatctgcagctgtttttatagactgtgatgactgctggaaattgcttcttgtcacaagaagaggtttaatgtatatatgggacctccataacaggacctgcattttgcaggactcattggctgctttggttgcatctccagatgagtcatcagcaaatcatgcaggtgcagtaaaggttatatctgctaaattctcaagatgtggttttcccttagttgtccttgccagccgtcatgcttttctttttgacatgagcatgaagtgctggttaaggattgctgatgattgttttccggcatcaaattttgccagctcatttatttttccccaagctggagagctaggcaagttgcagattgatgtaggcaagtttatggctagaaagcctatatggagcagggttacagatgatggtttgcagacacgtgcccatttagagacccagttggcagcttctttggctttgaagtcaccacaggagtaccgccaatgcctcctatcctacatacggtttctggcaagagaagcagatgaatcccgtctacgtgaggtttgtgagagcttcctaggtcctcccatgggcatgcttggatctgagtcatctacggatcccaaaagtccagcgtgggattctgatgttctcgggatgaagaagcaccaactcctcagggaagacatacttccatcgatggcatctaaccggaaagtccagcgtctgctcaacgagtttatggatctcctatcagagtatgaagctgctaagagcaaagttgacccaatggatatcacaccggcgctaccacaacaagcaccagaagccaatgccaacgtggtcacctcgtagctgcaccagttccgttgatagttccgttgctggcgacttactgacctctcggtaagtatgataggatagcaatcttggtaagtccttatatgaatcaatcaattagttgtgcttgtaactggtagattgtttagcgagggaggcgacctcaggcaaacattgatattgaacccgttagctgtaacgctgtgtaacagtagaagaaagaagctgaggtcgccaggtaatttattgttaaactgtaggaggccgggtaaactcatgcccttcttgttccaagctaccgtatgcagtggtggcccactggccgtgtgtattttggcgaaaacctgcgtcgtcaaaactggcattgacatcttttagaggaacaggaacaatgagcatttcggcggtgatgat

SEQ ID NO: 140378 - DNA, 300 bp, Zea Mays
atgggaaaaaagactcggctggagctagcatggaggcgagaacgccatggagtccggggcacggacgagcacagtggacccggtgtccaagcgttgagccagggcagactggagaagccgacgctgggaacggcggtcgagcgctttctgggcgtgatgcagcggcagccaattgctaggggaaggagacggccgtgggagagggagcccgcaggaaatccggcaccgggaacagagaacagggaagcaggggcgcgcgtgggagatggggagctgcgcgcgtccatgggagggcggtag

SEQ ID NO: 140379 - DNA, 307 bp, Zea Mays
atgggaaaaaagactcggctggagctagcatggaggcgagaacgccatggagtccggggcacggacgagcacagtggacccggtgtccaagcgttgagccagggcagactggagaagccgacgctgggaacggcggtcgagcgctttctgggcgtgatgcagcggcagccaattgctaggggaaggagacggccgtgggagagggagcccgcaggaaatccggcaccgggaacagagaacagggaagcaggggcgcgcgtgggagatggggagctgcgcgcgtccatgggagggcggtagcagagag

SEQ ID NO: 140380 - DNA, 840 bp, Zea Mays
tcgtcatgctgcctgcgcatggctacccggagctgcgtaaattcaagcatcgggtcggtaactacggcagcggctggcagaatcagcaagtggagttcgctcgtttccctggccccatcgtgatgacctcgaactgcatcatcgacccaaccgtaggcgcttatgacgatcgtatctggacccgcagcattgttggctggcctggcgtgcgtcatctggacggtgatgatttctctgcggttatcacccaggcgcaacagatggcaggcttcccgtacagcgaaattccgcaccttatcaccgtgggttttggtcgccagacgctgcttggcgctgctgatacgctgattgatctggtgagccgtgaaaaactgcgtcatatcttcctgcttggtggctgtgacggcgcacgcggcgagcgccactacttcaccgatttcgccaccagcgtgccggatgactgcctgatcctgaccctcgcctgtggtaaatatcgctttaacaaacttgagtttggcgatatcgaaggtctgccgcgtctggtagatgcaggtcaatgtaacgatgcttactcagcgattattctggctgtcactctggcagagaaactgggctgcggtgtcaacgatctgccgctgtcgctggtgctctcctggtttgaacagaaagcgatcgtcattctgctgacgctgctttctctgggcgtgaaaaatatcgtcaccggcccgactgcacctggtttcctgacaccagacctgctggccggtgctgaacgagaaattcggcctgcgttctatcaccactgttgaagaagaacatgaagcaactgttgagccgcgt

SEQ ID NO: 140381 - DNA, 198 bp, Zea Mays
atggcgagcacagggaagctcgcgtcgggggaagctcatctgggcgtgctggaagaagagcgtgcgctgcccgaggacgcttggtccgagcaggagaaatgggcgcgtagaggagggagaggaaggagagagccgccatgggaaagagaggagagctgggcacgagtggccaaggagaagaagagctccatgagctga

SEQ ID NO: 140382 - DNA, 249 bp, Zea Mays
atgcggatagcttgttggatgcaacagtcattgcaccctctgatcattgagagatctgagggttcctatgtctatgacattaatgggaacaagtatctggactctcttgcaggattatggtgcacagctttaggtggtagcgagcctcgattagtcaaagcagcaactgagggtgcatggttatgttgtgcgataagatccatctatgaattgtttgtgcttctacatttaggaacaatgggcaattag

SEQ ID NO: 140383 - DNA, 489 bp, Zea Mays
atggggacgcgccatggacgagcggagcgtgagcttgagcgaaatctaagcagggaaagagctccgaccggacttggcagaggaagcagagaaccaggcgcggccataggggagggatacaggcaaggaactgcggcgcgcagggacgctcggccggacgcggcaagaagagagagggacgagccgaaggaggcgcgagcagggaggagcgctcagccatggaggaaccttgggcgcgggaaggaagctccagggagcagggagggcgcacggctgaagagagatggaagaaggagagaggagcagcgcgcctggagcaacgatgccacgacagggaaggagctcgacgccggagctggagaaggtggccgcagtccgaacaccggcgagcagggagaggaacaagctccggccaagcgtgctgtcgcgggagaactagagagggcgagcgtggagctagagccatgcgcaggagaagctgggtgctag

SEQ ID NO: 140384 - DNA, 720 bp, Zea Mays
atggaaaagacccgagctgggcgagttgcacgcgaccacggcgcgcagggacaacacaggccatcggcaaactccggcgggcagcaacagagcagggcgcgccatggggaaaacagagaacgccgagctcagcgcgcgcgcaggggtgggatctggactgggacgagagcgcggggaaggggccgagccacacggccgacgaactccatggctaagacgagcaggaagggcgcgctacaggggcacacgacggctggcccccgaccatcgcggccacggccatggggacgcgccatggtcgagcggagcatgagcttgagcgaaatccgagcagggaaagagcgccggccggacttggcagaggaagcagagaactatgcgtggccacaggggagggatacaggcgaggaaccgcggcacgcagggacgctcggccggacgcggcaagcagatagagcgacgagccgaaggaggagcgagcagggaggagcgcgcagccatggaggaaccttgggcgcggcaaggaagctccagggagcagggagggcgcacggctggagagagatgggggaaggagagaggagcggcgcagctggagcagcgatgccgcggcagggaaggagctcgatgccggagctagagaaggaggccgctgtccgaacgccggcgagcagggagaggaagaagctccggccaggcgtgctctcgcgggagaactag

SEQ ID NO: 140385 - DNA, 122 bp, Zea Mays
gtgtgagaaaacgcccggactatcacattcacatggtttacagaatcaatacctttgaatcctctactccaaaagctacgcacgcagtgcactgcattccattccgatagatgccatcatcc

SEQ ID NO: 140386 - DNA, 765 bp, Zea Mays
attgaggtttctagagttagaagcttgttgtatgatctagttatggaataccaaggatctatggaaggcatgacaacaactgatggagtaggtgcaaccaataggaatgttgtcctcaatgaaggagatgatcttgtctttggcatgtttgacaaatatttgtcagaggaaactgaagaaagttcaacctttgtgcgtactgaattagatttgtatttggaggaaccaacaatgccaagaactcaagaatttgacatcattcattggtggcaatatgtcgggattaaatacccaactttgagaaatatagctcgagatatcatggcaattcctgttacaactgtggcatctgagtcagtctttagcactgggggaagggtaattagcccacatcgtagtagccttgctccaaaaacagtggaaggattgatgtgcatgcaagcgtggtcacgtgctgacatgctaggtgataaatcttgctttattaatgcattaatggctcgtttggaagatgaggaggatgaaatggatgatcctaatagtatgataactgactgaaaattggaaagcaagcaacaagtcagcaatctacattcaggtcagttttccctagttttttgttcatttaatcatttttgaccttcaagcaggttattaaattatgcaacatattttctttgttgcaggtcacctagagctggagtgtattgtggactattgttgctgctgtgcttgaagtatgggtgtatctgtatatgatgcctg

SEQ ID NO: 140387 - DNA, 750 bp, Zea Mays
ctgtgtaattggcaatgtcattttggtttaaccaagttaaaccttatttatatcttggtactagattcaaatatgagagcacgaataaatatcgattattgtgtaaaaagaaaaggaaaaaaaaggaaaatatcctacagtcgatcctatctaccgccgcttccctccccctgatatttttcactggctgccttatctgagttatctcccacgcgcgcaggcttcttccccagccgcccctcctctctctatcttcagcgcacaattatctccctcatgtcttcctcccacgcgcgggctcgccctagctcttgctcctccaggctggccgcgcgccctcccagccatggaactcgcccggtcgcggtctcgccttggtctctactgcagctcgccgtcgggccgacctcaagctctaccacgccaccgtcctcgtctcccttttccatggccgccacgcctttgcttccgtgttcctctgtggcctgcgcttcccccagcccccagcgccagctccagctcggccctgccctctaccggcgctccttccctgctcgctgtcttcgtactcgctccggtcacagccgccgtcgaatcatcagaccccatcccccatggcgctcgccctactctctagtgttttcctgctcgtccgtctgcaggttccatggagatcgacgcttctctctggtctccaactcgctagctgtcaacctggccttaccgccgctgtagctccggggaccgcga

SEQ ID NO: 140388 - DNA, 115 bp, Zea Mays
ggtcttggtgaaattgtttaaaggttgtgtgtgtctaatcgcagctagccgtcaatcgccattcgtcgcgcacgcgcgttcgatacaagaccggtcgggtgaaccacgtgcttgc

SEQ ID NO: 140389 - DNA, 2794 bp, Zea Mays
gtcgtctccccgttcgaggggatcaggggaattggacgggcttgcttcgactccacctcgcctccgtcggcgtctcatctcatgctgggactctggtggggtggggattgacttcgctatagcccaatccagtcagcagcagcttcccgccgccccatgcctcgtcgcggccggtggcgatgggcgacgtcccagtcccttctccagctccccctgtttccggcatcgatatgaccccacgccgccgccgtgagccctccgagccccgcagcgacagcgactgggacgctggatccagtcgcgagggctccccggacctcctccgccgcgcgcccgccgtccagatctcgcgcgcctcctcttcctcgtcctcctggctccgcgagatcgagcgcgaccgtgtgcgcctcgtcagggagtgggtccacatggctgcccgcgaccgtgacgacgacaccggacccccaccgtcccccgtccatgaacacgctcgcagggacgcccccaggatccgcggccgccaagcgcgcctcgagctcgtcatgcgcatggccgccgaccgccaagccgagctccaccgcctctcgcagcaccgcgccgtctctgactttccgcatcgcaacagaatccatgcgctgctccggggtcggtttctgcgcaacagcggtttaccagaggagaggaggcccccatctgtggccgcaagggagcttggccagctgcggcaaaggcatcctgtctctggtttgagagaagagttccgcttcagattggagaatcttgtccgtggtcaagcagatagccaagtggatgcttcttcagttcacgatgttgagttatctacaaatgatcgttctgaattaaggcctcctgaaactactcaggagagacatgagcggacaagtgagattgtcagtcttcaacaaatcgacagtacggcaatgacatcaggatttgaaagtggcagccctaacattgctgaagtcttctgcgggtctcatagccaagcagaaagtcaggatgatttggaacatgagagaagagactggcaacgattttcccatgctgtgattggagaggaatctgaaagaacttggcgtgaaaatgcagacaacatgtcatctcatgaggggacagcagttgaagatgataataacgatcatcttccagaagcaaatgaagagtcaaccagtgttgatcaccttcctgaaggacttgaagggtctatcactgatggtagtcttcctgaagcgcaagaagatcagcatgacagtgatcatcttcctgcagtgcttgaagagctgcatggaaataatcactttcaggaatcacatggggaatggagaagagatgatcgtcctgttgaagtctatgatgagtggcagagtgatgatcatctccctgaagtaaatgaagagtggcataatgatgatgagtctaatgatactgcagacaattggcatgataataattctgaccaaccaattgatcatgatgctgctcttattagaagagctaatactttcatccctggagatgatgataatgtgtacagcacagaattgagggaacttctaagcagaaggagcgtttctaatcttcttcacagtgcttttcgtgaaaacttggatcgacttatccggtcatatgtggaacggcaaggtcgtggtcctctcccttgggatctggaaggaacaacccctgcccctccatcaccagttcaaattcaggaggagcaaagagatgatgaggaccaggaactgcagcgcactgtcaacaggcctcctttagtgataccacccccacctatgcctcctcgtcagccactttggcattcagagttgcatcgtactaattggatcagacaaaacattcatcgttcatcttctgatattgaatgggaggctatcaatgatttaagagctgatatggctagacttcagcaaggcatgagccatatgcaaaggatgttggaagcttgcatggatatgcagctagagttgcagcgttctgtaaggcaagaagtatcagcagccttgaatcgtttcattggggagcaaggtggtgaaagtaaagaaataatcgatgatggatcgaaatggataaatgtgagaaaagggacctgctgcatatgctgtgagactccgattgactcccttctgtacagatgtgggcacatgtgcacttgctcgaaatgcgcaaacgaattggttcgaggtggagggaaatgcccgttgtgccgcgcacccataatcgaggtcatccgagcatacttcatcatgtagatacaaaaggaagacagcaagaagatagaagaggcccaaattgtttttggtctgtgtggagtcgttagcgggttgtgtattcaattttgttcattctctctaatgcgtttggttaagtttttttccggcttcatttcgttttggtctgcttgccctattgtaagtaatgtacggttttgggtgtggcggcaggacgggaaggtggtcttctctcattaggacttgggtcactgctaattatgttccacaacgactaatggggttggaggttgtcgaaacacgagatgaggaaacttttggtatctttttgttcgtgtagcaccagcaaagtgcggcttggtcgcttcagtgtttcgtgtgattttgttgttggtcttggctatgtggtcatgatattttaggcttctagtttgcagatggatgtaaaagtggtactttgttgtcatgggcgatgctatttcctggatgtttgctttttctttccacaatagtaaaacagatcattttta

SEQ ID NO: 140390 - DNA, 1915 bp, Zea Mays
cccagacgccagagtgccagacctcgtgtgtcctgcccaccaaacgcgggatcccaccaaaggccaacacacagtaaaatctcgtcgccgccgttgggctcgtcgccgtgcgtgggtgaccgcgatggacccgaaccgccctccgcttgggcgccgcgccttcctctcctcttccgtccacgctgcaaccgcgctcctctcgatccttctcctcgtcacgctcctccgcctccccctctccacctccccgcacgccgcctccaccatcgccgaccagaagcctaaggagcagacctgcgatcccacctccccgctcgactgcgccgacccgcgcttgttccatctcatgatgcgcagcgccatcgaagccttcccggccgtccattttgctcgcttcggccgccccgtccccggtgaccccccatcctcctcttgcgacatggcctggcgctcccgctcagacttcgactccccctctaaggctaccaccaaggactaccgccgcttcgccatcggccgcgacccccacacatgcgcctactccgtcctctcaatcggcgattaccattccggccccaatgcccgcaagccccgccgcggcgccaccaatgccaccatcgctactccaccaccgcctgcgctctcccgctcccagttcgccaagggcgcgtacctcgcttacctcggcggcggcgaccgctgcaagcccatgccacactacctgcgcagcctcctctgcgccctcgccgaggctcgctacctaaaccgcaccctcgtcctcgatctcacactctgcctcgctgcctcctatgccgcccctgggactggggaaatgcctgaggaaggcaagcgccttgccttctacatcgacgtcgagcacctacactcccaggtccccatcattgaggagagacagttctgggcagactgggacagttggggggtgcagggccaactccgggcacacctcattgaggacaccaggcttgcacttataaagttctccaaggtgaaggacaccctcatcatcagaaaattcggagacgtcgagccaggtaactactggtacaatgtctgcgagggtgaggcaaagcatttgctcagcccattgcactgggtgatacgctggactccaagcttgatgcacattgttgatgatatcctctcaaggatgcaaccagactttgattcggtccatatcgatgccaagggtgaggacctgagacagagggtcgaggaagttcttggtggagggcggcaggtgtatgttgcaggggttggggtcaacagggcattgctggagtcactcaaggaaaagtgcattgtgcattatctggatgagtttgaggacctgtgggggacagacagcaagtggttcttggagatgaagaggctcaatggtggcgttcctgtggaatttgatgggtacatgcgtgatgttgttgatagagaggtcttcctcaaggggaagaagaaggtggaggtgctccggtgatttggttttttctctttgattggttacatgcgtgatgttgttgatagagaggtcttcctcaaggggaagaagaaggtggaggtgctccggtgatttggttttttctctcacctagataacttgttgtttgttgatacatcctagagaagttgaacagcacaagcatgcttttgccaagctagtcttttaaacctcactatatctgaatttagttctcaaactcatcggtaggggatttattttgctagcaattatcatttccatggaaatttggtaaaccatcaatgtatacctggttttgtgcttctgatagcactgttccatttaatttattagattcctaacactggttgctgctcaattatgatgtaataaggatttgtaatatttactatgctatttacttcatttcataacctc

SEQ ID NO: 140391 - DNA, 249 bp, Zea Mays
ttttttatctatttcttttattattattatttttcaagttcaagacttctattcaaatttaaattcctatttgaactttgacttcaaatattaatcacaattctaatatgaataatgattttattacccgccctaatattttttttatcttattatgtgtattcttttatttttcttctctcctcttttctcttttattttgatttacaaattcacttcaaatccgagttaaggtttcaaaattcaaat

SEQ ID NO: 140392 - DNA, 920 bp, Zea Mays
cgcctgtgggagggacttcacctgcacgggcggcttcacggcttccgcgtccttaagccgatccgaagacaccatgcctccagggaggaagggaatacgaagcacaaggcaaccctcaccagaaatcacttctactgagtatgagaaacaaagggcagcaaatgtgatgaggaacaatcagatgttccaacggcttgggattaatcagttacgcacaatgatgactgctacaagagtaaagagcacatatgatggtccagaggaatcagggtctttgtttgacggcgaggatagtgaaggttctgatccagaggaggattcccatgttgcacaaggtgtacatagccacaacccaactcatgttgttgacaaacctacacaacaaacacgaggttctaaaagggttgtggcccctgatgttcatggacaacagattagattcactaggcaaaggagtgctgccacaaatcaacaatcctccctaagcctaactactactacacaagctggttcaagagccaccacaaaccaagaatccacccaaaacttggctgctgcaacacaatttacttcaagtgttgccactgagcaagattacaccgcaggcctgactactgctgcacaacctagttctcccacacaaactgaggtcaatgaccacaatagagatgaagaattggtaccaaggcaaagaagtaggggcaaacaacttgaatccttgagcagagggttaggcactaagattccaatccaaatctctaatgggaagcgaaggccagagccacctattcaggctgcaaagtttgcatcggagggtgggatcatactgaggcaacacattccaatatttccgcactggaaggagtacaagaagcaagagaacgagggtaaaattacagactacattgggaagcttgctg

SEQ ID NO: 140393 - DNA, 241 bp, Zea Mays
tcgccttggcagtagattcctcccgccgcggcctcggtgtgctccgcttcgtggcactcctccttctgcggcgctggtcgtctcagggtaccgcctggacgcgcaccaccgctatagcgctgccacggaaactgcagcctgtcgtggtcggccttctcgacgtctatgtcgcagacgagcaagccattgtggattctgaggttcaacaagtagaagtagctgagcaggagctcattgaagg

SEQ ID NO: 140394 - DNA, 1675 bp, Zea Mays
cttgtccacgacacgcagatcactttccttttccccccaagaagatgggcgagacgagggccaaggagggggtgtcgcttagactagcgaatccatccgccaagattccgtgcacctcgaccgccgccgccgctatctgtttgtccccgcccccgcgaccgcggcagcctagcaggaggggaggatccatgtctagtttctagagcagctgcttgcgtcccttgcaaatcacatcgaccgatggggatacccagcgacgacgtggtgcaaatccgccacgccgacgccgctggcgagcccaccgtcgtcaccgtcagctgccccgacaagacgggcctcggctgcgacctctgccgggtcgtcctcctcttccgcctcagcgtcgtcaagggagacatgagcacggacgggcggtggtgctacatcgtgctctgggttctgccacgcggggggcggccggtgcccgtgccatgggacctactcaaggacaggttgcttcagctctgccccgtcgcgccgccgttcggattcgacaacgcgtacctcgcagcggctggcctacaggaccttgcgcctcccccaccaaagctcttcttgctcaagctatgctgcttcgaccggatgggactcttgcatgatgtgacacgtgttctgtgcgagctagagctcacgattcggagggtgaaggtctctaccacgcctgatgggagtgtgctggaccttttcttcatcacagatgccagggagcttctgcacacaaagagcagaagagaagaaacccaggacaaactggaggctgtcttaggcgactccttgacatgctgtgaaatagatcctgctggtgaagacatgttgtcttgcctccaatcctgggcctcgctgacgcctgctatcacggaacagatgtttaacacagaggagcaaccgatcagcacaaggggtggcaccatctccgtgacgatggacaactcacttagctctgtccacactcttattcagattcagtgcggtgaccataagggcctcctctatgatatcatgaggacagtcaaagacggtaacattcaggtttcgtatggccgattctatgcgagccaaaatggaaggtgtgagatcgatttgttcgcggtgcaatcagatgggaagaagatccttgatcagcacaggcagcgagcactgtgctgccgcctaaggatggagctcctccgaccactgcgcgtggcattggtgaaccgaggtcctgacacagagctgctggtagcaaacccggttgaggtttctggaaagggcaggccgctggtgttctatgacatcacccttgctctcaagaatcttcagaaacgaatcttcttggctgagattgggaggcatgttgtggaagatagggagtgggaagtctacagattgcactttggtgaggagcatgagctctcgtctgcgctgcggagcaagatcgtggatgaagtcaccaacatgctgatggggtgggactcatgacactgctctgccgtgcctctgaaaaattatcattactgttccagcaggaatcaattaacttatttggtgcatgtaaaaaaaggaacgacttatctcttaaatgtagcggtatttaactaatccatagacgatctctactattataatgcacaagttttgtgcatggatcatttcgtgc

SEQ ID NO: 140395 - DNA, 2131 bp, Zea Mays
atgtgccccatgtgcggtgccaatccttcttcctcgttccttcccctggccaggcttggtggagtgaggggggcgatgcgaggcggaaccgctccaaacgtgcgcggagcctggccatcgcggccgtccatcctcccacacgtgtcgctcccacgcgaccaccgtgcgtccgtgccaacaatatcactcgcccagtaccaggttcagcagcagcacgccgccgcacgcctcgcacgcgcgagcggccctactgctcctactcctcccacccgttcccctcttccgcatctgcacccgcggcacgagatcgagatcccggcagaccggtgggatgcagcaggcggggctggccgatgacgacgacgaggagatatgggtaaaggaggaggatgacgaggaggaggaggacgggtactatatggacccccggagcccggccgtgtggacgcccggcggcagggcgggagggacctcaaaccggcggcgcgcgcgcgaggagaaggagcggaccaagatgcgggagcggcagcggcgcgcgatcacggggcggatcctggcgggcctgcgccagcacggcaactacaggctgcgggcgcgcgccgacatcaacgaggtgatcgccgcgctcgcaagggaggccggctgggttgtcctccccgacggcaccactttcccctcttcatcctccttcgccgccgtggctgcacaggtcgttatgtcatttcatgaatgtggtggcaatgttggagacgatatatccattcccctcccacattgggtaatagagattggaaggagcaatccagatatctactttactgacagggcaggaagacgtaatacagagtgcttatcatggggagttgataaagaaagggttttgcaaggcagaacagcagtggaggtatattttgatttcatgagaagcttccgagtagaattcgatgagtattttgaggatgggatcatctcagaaattgagattggactaggggcttgtggagagctgcgatatccatcttatccagcaaaacatggctggaaataccctggcattggagaatttcagtgctatgacaggtacttacagaaaagtttgagaaaggctgcagaagcacgagggcataccatatgggcaagaggacctgacaatgctggccattataattctgaaccaaatctcactggatttttttgtgatggaggagattatgatagctactatggccgttttttcctcagctggtactcccaggcattggtggatcacgcggaccgtgtactgatgttagcaaggctggcttttgagggtacaaacattgctgttaaggtctccggggtgcactggtggtataaaactgccagtcatgctgctgaattgactgccggattttacaacccgtgtaaccgtgatggctatgctccaattgctgcagtattaaagaaatacgatgctgctttgaactttacatgtgttgaattgcgcaccatggaccagcatgaggtataccctgaggcatttgcagatccagagggcctagtatggcaggtgctaaatgctgcgtgggatgctggtatacaagtggctagtgagaacgctctaccttgctatgatagggatggattcaacaagattttggagaatgccaaacctctgaatgacccagacggacggcatttgttaggtttcacctacctaaggcttggcaaagatctgtttgagagacccaacttttttgaatttgagcgcttcatcaagagaatgcatggcggtaatatcagctgatttttgagctgttaaatagagaactcgctgctcaatttttaactctagtcttcaagaaggaagacgagttgagttccgtataatcggtgaattcacatccttttgtcgccggcggctccacatgtgccatcatctcatggccatggcgcaatgttatgcagatgtagtgtgaaatccgaagaacctaggcattctgctcatctccatctccatatcagcgtcaaatgctcaaattttttagttcaagtgactgctgatacgcatggaacaaaacgggaataagtgtctcgatcctactgtcttgcgtgtaatgatgttcaacaatgcagattgtgagtttggatc

SEQ ID NO: 140396 - DNA, 743 bp, Zea Mays
agaggacgtcacggacctcacggctttcattgcgtgggtttctcttttctccgcccttcccgcctcccgaggacgcgctccaccactggccagtggccaccgcctcctcctccccgggtcctcccaaattcggtgccacctgatctgggtcaaatgctgacgcgtgctcctcctccaccttctgtgttcctccagccgccccgccccgtgatggtcgccgccgcgtcgccctccgccaccccgctcgcgctcccggcctcctcggcgctccccctccgcggcatcgcgcccgtcgccgcgcgccctatctcccaccgccccgcgcccgcgttcgctctcctgttgcccccgcgggccgccgcggcctcgcgatccccggccgacgacgttcccgacgggaattcctcgcacctcctcgccgtccccgtccctgtccccatggaccccgccgccgctgaagacgtccccgttgccaagcagctgcaggtgcccgatgtgtcgccgcgcccgcctgagcgggacttcgccggcacgccctacgtgccggtctacgtcatgctccctgtgagtacccatctcttccatgtccttcgattggacctgcgcgatcgtgttccatatcccagtcagaagcgtatttttggcagcttggggtagtgaatggtaacggtgaggtggtggacgctgacgagttggtcgggcagctgcgggtgctcaaggcatctggagtggatggtgtcatg

SEQ ID NO: 140397 - DNA, 2322 bp, Zea Mays
agaggacgtcacggacctcacggctttcattgcgtgggtttctcttttctccgcccttcccgcctcccgaggacgcgctccaccactggccagtggccaccgcctcctcctccccgggtcctcccaaattcggtgccacctgatctgggtcaaatgctgacgcgtgctcctcctccaccttctgtgttcctccagccgccccgccccgtgatggtcgccgccgcgtcgccctccgccaccccgctcgcgctcccggcctcctcggcgctccccctccgcggcatcgcgcccgtcgccgcgcgccctatctcccaccgccccgcgcccgcgttcgctctcctgttgcccccgcgggccgccgcggcctcgcgatccccggccgacgacgttcccgacgggaattcctcgcacctcctcgccgtccccgtccctgtccccatggaccccgccgccgctgaagacgtccccgttgccaagcagctgcaggtgcccgatgtgtcgccgcgcccgcctgagcgggacttcgccggcacgccctacgtgccggtctacgtcatgctccctcttggggtagtgaatggtaacggtgaggtggtggacgctgacgagttggtcgggcagctgcgggtgctcaaggcatctggagtggatggtgtcatggtcgattgctggtgggggaacgttgaggctcacaagccgcaggagtacaactggactggctacaggcgcctcttccagatgatcagggaactcaagctcaagttgcaggtcgttatgtcatttcatgaatgtggtggcaatgttggagacgatatatccattcccctcccacattgggtaatagagattggaaggagcaatccagatatctactttactgacagggcaggaagacgtaatacagagtgcttatcatggggagttgataaagaaagggttttgcaaggcagaacagcagtggaggtatattttgatttcatgagaagcttccgagtagaattcgatgagtattttgaggatgggatcatctcagaaattgagattggactaggggcttgtggagagctgcgatatccatcttatccagcaaaacatggctggaaataccctggcattggagaatttcagtgctatgacaggtacttacagaaaagtttgagaaaggctgcagaagcacgagggcataccatatgggcaagaggacctgacaatgctggccattataattctgaaccaaatctcactggatttttttgtgatggaggagattatgatagctactatggccgttttttcctcagctggtactcccaggcattggtggatcacgcggaccgtgtactgatgttagcaaggctggcttttgagggtacaaacattgctgttaaggtctccggggtgcactggtggtataaaactgccagtcatgctgctgaattgactgccggattttacaacccgtgtaaccgtgatggctatgctccaattgctgcagtattaaagaaatacgatgctgctttgaactttacatgtgttgaattgcgcaccatggaccagcatgaggtataccctgaggcatttgcagatccagagggcctagtatggcaggtgctaaatgctgcgtgggatgctggtatacaagtggctagtgagaacgctctaccttgctatgatagggatggattcaacaagattttggagaatgccaaacctctgaatgacccagacggacggcatttgttaggtttcacctacctaaggcttggcaaagatctgtttgagagacccaacttttttgaatttgagcgcttcatcaagagaatgcatggtgaggcggttcttgatctgcaagtataagattggtagcatattgcatacacgtatacaagtgactgattggctcaggccttatggcttacatttttttcttcttttgctttgtgtttttaggcggtaatatcagctgatttttgagctgttaaatagagaactcgctgctcaatttttaactctagtcttcaagaaggaagacgagttgagttccgtataatcggtgaattcacatccttttgtcgccggcggctccacatgtgccatcatctcatggccatggcgcaatgttatgcagatgtagtgtgaaatccgaagaacctaggcattctgctcatctccatctccatatcagcgtcaaatgctcaaattttttagttcaagtgactgctgatacgcatggaacaaaacgggaataagtgtctcgatcctactgtcttgcgtgtaatgatgttcaacaatgcagattgtgagtttggatctgttgagcac

SEQ ID NO: 140398 - DNA, 3249 bp, Zea Mays
ctagcgctgttcatcccatcccatttccaatccgcgccaccacaaacaaagcctcaaaggcgaagagtcgccatgaaaggccgcgtggtcaagctccgtgaggcgcacaaggctggctcgccagccctctgttccgcctcctggggccccagcggacaacacgtcgtcaccgcttccgccgcggacactgccgtcctgatccacgacgccgccacggtgctcgccggcggtcggggctcgggttcgtcggcgctggctactatccgtctccacaaagacggcgtcacggcacttgcagtcgcgccgggccccagcggctcgctggcatcgggatccatcgaccactccgtcaagttttacaccttcccagaggggcagttccagagcaatgtcgcccgattcaccctgcctatccgatcactcgcttttaacaagaaaggcaccctactggcggccgcaggtgaagatgatggcatcaagctgatttcaaccattgacaacacgatatcgaaggtgctcaaaggacacaagggctccgtcactgggctggatttcgacccgagaaacgattacctagcatctgtggacagcttcggtaccgtcatctattgggatctttgcattggtgctgaggcccgtaccttgacacgtattgctcccacgtttcggtcggataactctgtcaggaatgttctgtgctggagccctgatgggcagacccttgctgtgcccgggttgaggaacaatgtggtgctgtatgatagggacacgggtgaggaggtgtgcacgctatatggagatcatgaacaaccagtgagcagcctttgctggtctcccaatgggaggtatctggccagtgctggcttggataggcaggtgctcatctgggatgtgaagtcaaggcaggacattgagaggcagaagtttgatgagcggatatgcagcttggcttggaaaccaaatggaaatgctttacttctgattgatgtcatgggcagggttggcatttgggaatcagtcgtaccttcgactatgaagtcgcctaatgagggcatacctgatctcaactccaatatggttcctctatttgatgacaatgacgatgagccagacacctcagttggcttggaggatgatgttgatgatactttcagcgattcaataactttcaaccacaagagaccaaggaggaagtctacgtttgatggagatagtgagaatgaagatttaatacatcaattggaatataccaaaagaatgaaagataagcaaaataaaaatgaggatgctgggaaggcaagaggtgattctgccacaccagtgacgttggttacatcaacaatgcaagctgctttccagcctggatcaacgccaccacagcctggcatgcgaaatttcctcgcatacaacatgcttggaagtatcactactattcaaaatgaggggtattcacatgtggaggttgacttccatgacacaggaagaggacctagagttccttccatgacagactattttggtttcacaatggctgcaatgaatggatcaggaagtgtgtttgcaaatccgtgtaagggtgacaagaatatgagcactctaatgtaccgcccttttggtagctgggctggtaacagcgagtggtcaatgagatttgaaggtgaagaagtgaaggctctggctcttggtgctggatgggttgctgcagtcacaagcttaaattttttgcgcattttcaccgaaggaggcttgcagatgcatatcctctcagttagtggcccggttgttacagcagcaggttatgaagaccagctagctattgtgtcacatgcttctgattgtttgccctctggagatcaggtgctggatgttaaagtattcaacatatctgaggggacacaatcaatgtccggtcgccttgttttgacaccattgtctcgattatcttggtttggattcagtgagaatggccaacttagttcatatgattccaagggaattctgagggttttttccaatcagtttggtggaagttggcttccattatttagttcggtcaaggcaagaaaatctgaagatgaaagccattgggtggtcggtttggatgcaaataatatattctgcattttatgcaaaacccctcaatcttatccacaggtgatgcccaagcctgtgctaagcatacttgagctgtcatttccacttgcgtcatcagatcttggggctaatagtttggaaaatgagttcttgatgaggaagttacagctatcccagattcaaaataaaatggaagaaatggctgcattgggccttgacaccacttcatatgatgatgaatcgttcaacatggaggcaggacttgaccggtgcattttgaggcttatctctagttgctgcagtggtgataagctcgttcgagcttctgagcttgcaagattattgaaactagagaagtcaatgaagggagctctatcactagtgacacgcctgaaacttcccatgctgcaagagaagttcagctccataattgaggagagggtgttaaatgataaaataatagctggagcaggaggattttgctctaatgctacaatcatgacgaacacaccagtgctgaccactcaggcaactctaccttctatgtttatgcaagatgggaaccgttcgcttgaatcttcattacccaaactcaatattgtcaatcaacaatgcaattcaactgaaccaaagaagccagcaggagaacgagggattgaaattaaggatagaactcaaaaagattcatctgcctctgttccatttgccaaggtacctaaaaacagtgaaaatcagaatcaggaaggaggcattgatcatactggtgcaaaaaaagagagcactaaatattgcaatcgagcagagcctcagaggccagttaacccttttgcaaaatcatcatcaagcaaagaacagtcatcatctcttttagattccataaaaaaaatgaaagttgaaaaacccaacgcaagaatttgaaatgaattattcttacttatgtcatggcctgtagggggacaaattgttagacctccactgacatctgcaggatctatttttttagttttcttctgctagcatatgtaataaccatttacttgtaaatttgtttctcatgtttggtggattattgtgccgttgggatgtcaacattatctgatatattacccctatttatgaaattagttgcctttgaattgctgtcatataatattg

SEQ ID NO: 140399 - DNA, 477 bp, Zea Mays
ctacttgaggacgtacttcatgacccctggaatgtggatcttgtagaagtagtcgtcccagtcgatggtgtttgggtcgaagttgaactccagccggtcggcgacaggcatggccatcctgagtctctccatgttggcgtcgtcgaagatgcccttgaagagcgcgaagggcccgtagaggtcgacgagatgcatgacgaacctgtacttgcggtccaggtcggcgtagaggcgcgagaagaggaggccgccggagaggaggctgagcaggcgcagaagctccagcggcagcctgtagcggagcagcatgtaggcggtgaaggctgcgacggtgccgaagaagtgcaccttgcgggtacgcacggggcggccgtccttgcccacgcgcgggtggtcgcagaagtagcggattcccgtccggtacagcaccgcgtacggcgcagggttgcggagggaagacgtcgcgtggtacaccgt

SEQ ID NO: 140400 - DNA, 213 bp, Zea Mays
atggccagccatggcgagcaggagggcaagggcgtcggctatggagaggagcttggctatggcttggctggagaagacgcaggtcgccggcgagcagagagggcacaagctccaaggttgaagctcaggagccagggaggagagggtgtggggagccgccgacgtcgcagcaggggcaaggtccaacgattggcagcggaggaggaccgctag

SEQ ID NO: 140401 - DNA, 484 bp, Zea Mays
atgcctatctcgcgcccaccagggcctcgggctgaaggagatgtgtgggagcgtgcggccgcggacgattcccgccggggctgccggtccgacctcgacgactgttggagaggaagcggagtgcttggggaagtcgtgcgggtgcaacgtccggtgccgctgttacctgtggccgtggtaccgctgttacctgtagcttccggaaaaccggtgccttctgtgggcctcgacaacctggctgccgcaagcccagtcgttgccgcgcgctctgcctctgctccggactggggcaccatcgctgcgccggataaagcttggagacggagagagccaccgtgtggctgctaaggcgaggtcgaagccactatccagtatcgagggcacctccatggcgagcaggccgccgggtgaacctcgcctgtgttgtgtccaccactttgggcgaggtgtggcttcaggccatcagcggtcctccgtggggaca

SEQ ID NO: 140402 - DNA, 178 bp, Zea Mays
ttcttggtctctgtatttctcatatgtattgtcttgttgaaggatgcgttagaactagagcaactcatcagttacctaataaataaggaaaattctgaaggagtaatattgcttggtcatagtactggatgccatgtatactatttcgaataactgctactactttacaaccatgaaa

SEQ ID NO: 140403 - DNA, 456 bp, Zea Mays
atgacgggcaggacagccagctcgccagagacggcgagcaggaagcaccagggagcagggcgagctcagcgacggcacccaaggctgagcagcagtaggcgccgtgagctccatggcggggtcgggctcagaaacggcgaggttgctgtgcgtcgtccgatggccagccatggcgagcaggagggcaggggcgtcggctatggagatgagcttggctgcggcttggctggagaagacgtaggtcaccgacgagcagagaggggacaagctccatggttgaagctcgggagccagggaggagagggtgtggtgagctatcgacggcgcagcaggggcaaggtccaacgagtggcagcggaggaggaccgccagagctcgacgccgggtcaagctcgccagagagaggggctgggcggggagatgaaggctgtgcggcggcttcaacccaggagatga

SEQ ID NO: 140404 - DNA, 2778 bp, Zea Mays
cgcccgacgacctgtttctgccagtcatatttcccgggcagcgcgcgatctcaacgctcccgtcgcgccctgcccctgcgcttcaaccgctccatccaggcgagatcctgcggatggaacccccggcggcaaaggaggcgccgtcaccgccgctccagcctgcggcggaggaggacgcgatgctctctgcgacggcggtcatggcgaaggaagcctctgtagcgttccagggacgtcgctacgccgactgcgcagaagtgctcacgaggctgctggacatgaaagagggcgatcccaaggtccaccataacatggccatcaccaaagccttcttggatggttgtcctgattcaaacaggctgcttaaaattctttgtgatgctaagagaagaagtgaagagcttgcatgtgcaactagagaacaagctgattctgcaaatggggtaggaaatagtgctccttcaggatcaagagggagtggcgttgcactacctttttctgctacacataatgtgtcgacttatggggatgagtttgacacgaccataattacattcaacatggctgtcatcctgtatcatcttcatgactatgaatctgcactatctgttttggacccattgtaccgaaacattgaaccaatggatgaggtattattagcgatattgtagctttgtcataagtgaaaattgtgtcaacactatttttttactcttacagacaactgctcttcatgtatgctttttattattggatatcacattagctttgcaagatgcaacaaaggctgcggacataatacagtacatggaaagggcatttggagtagctaacataacgagcccgaatgaaaatccaagcatagctcagcagcaattagctcaaccgaagcctcctgtgaaaattagcgtgcctccagattctgaattaaatgcttatgctggtggatatgagaacctttcggctggaattttaccagatgatcaaatagaatttgaatctctatactctagttttgatggacatcagaatttgggcaggcgtatctttaatgatttctcaagggcatctgctgatcttgctgctactgctgctgatttgaaagttagacttcagatttacaaggttcgccttctactgctcactaggaaccttaaggttgcgaagcgagaactcaaagtactaatgaacatggcacgtggtagggattcatctacagagcttctcttgaaatctcagctggagtatgcccgggggaattataggaaagctgtgaagctattgagcacaccacataatcgggctgaaccagcaatgctagccattttctacaacaacctgggctgtatactccaccgacagagatcgtatcacacctctatatggtgctttagcaaagcgctgaaatacactttatcacttcgttcagagaaaccaatgaagctgtctacattatcacaagacaagtcttgccttatttcatacaactgtggtgtccaacatttgatgtgtgggaagcctttgttagcagcttcttgttttcgtgaagctatgccgctcttctacaagcgacctcttttctggcttcgtttttctgagtgtagtctgctagctctagaaaagggtctcctgtgtgcaaaaggtgcttcttcatgcaacgatgagattgaagtcattgttgtggggtcaggacaatggaggcagttgattgtcaaccatgtgagcttgagaagtaatttaggttgtgcaggtgtgacttcaggtgaacataaaaagttggtttcacttggatttgctagacagtgtctactcaatgcgctgctactattgaatgctactgaacaggaaaattgggtaaccacatctaatgcagaggattacatccaaggaacattacaaggatataaaaactcaggtcagaagaacactacaagtacggattctaaaacaccttctgccccaactctagctaatgtaaatggtgaacaaaagggaacgagcttgaatgctaccttgcagagttctcttgctttctataatgagatctgtcgaaaagagaacctgaaaatgagacaggccatcctggggaacttggcgtttgttgaattgtgtcttgagaaccccttgaaagctttgtcttatgcaaagtcagtaatgcaggttaaagactgttccaggatgtatatattcctcagccatgtatacgcagctgaagctttgtgtactttgaacagaccaacggatgctgctgagaagctatcagtttatataagagatggcaatgatatcgagttgccgtataatatggagaactctgaaaaggccttggttgagaaagacagtgacagtgaagacttggctgctgctacagtgacaaaagtagccacagaagaatctgagtactcagagggcctcaggcctgaggaggcccgtggtgtcttgtatatcaaccttgccatgactgctgcagtgcagggaaaagttgagcaagccaactacatggtcagccgtggcctggcgatgttgcccaacaaccctcgagcagtgctagcatcggtttacatagacctcttgcaagggaagtcccaggaggctgtcgtgaagttgagacactgtaggaatgtgagatttagacccggtagcatagcagccagcagctgagcatagagaagcctcacttttcatggtttctgtagtttacaattaccatcatgatatttttggacgctgaccccaatgtggatgatcaaagatggtaatgttcctcctgtgtaccat

SEQ ID NO: 140405 - DNA, 116 bp, Zea Mays
cttttatatttgggataacttgagttgttcaacaaatatttgggaacgcgagacgtcgacccgaacgatgctgatttcagacttagaagaattcgaattctgaaatcagattttta

SEQ ID NO: 140406 - DNA, 1608 bp, Zea Mays
tcagggaccatcccttcactaactcatatggaacaacaacctgagatcaatatcacatcccgagctatgagccttccaaatatacttaatcaggctggctttgaacttctatatcgaatatgtggtacactcttctgccattatagttggaatatattttctttgcagtatgctgctcctgtccgtatacctacaaacagcacggtagaagatgacaaagttgctctgatgatgcctgagcaagtgccctcgttgacccaggtttcgccagcacaaacacaatcaacatcaccatctccattttctgttaaccagcttatggcggctattccacgtcaagagatacgtttcaaaataaatccaaagctcggctcccttggtccacaactgcaatatagcaagattatggatttggctttggataaggctaacagggagataatactccctgttattcaaagaagtgtgaccatagcaagccgaactacaaaagaacttattctgaaggattatgcattggagtctaataacaatacgataactcgattcgcacatttgatggttggaacattagccggaagtctggcacatgttacttgcaaggaacctcttcgtgtttcactatattctaatcttcgaaatctcattcagaaccttatgagcggcagtgaaactatcgagcaacttattcacatgctaatcaatgataacttggatcttggctgtgccatcattgaggctgtggcaacacgtcaggtagcttcttgacaattctaattctgctgaactaagtacacctttgacttctccttaagcagatttaaaagcttaaggtttacaatcccggattgtttttacaattctaatggagttgtcagttttctggacatctgacaatgattactcaaagataaactatatcgtgttaaaggctagttgggtactaccactgtcctgaaatataatcgatttgagtttgtcctaagtaagtacattaagtttgaccaagttcatagaaaagagtattaagtattagtggcattgaggagatcaactataaaaatatatttcataaatgtatgagttgaaaatgatgttcatctattatcgtaaatattattcttctctataaatttgccaaatttaggatagtttgacgtagagcaactcaaaaacattatatttcaagatgggtctatttattattaacatcttctgtctgatcaccattggaagttgatctggcttggggtatagtagattgaatatagaggtacatgggatgtacaatatataggcaaggatcatcaagtttgacgtcggcaacgtggtcatggtgactggcgggaggaacaccgggcgtgtaggagtcatcaagaacagggagaagcacaagggcagctttgagaccatccacgtgctgcttggagctttttgctatgtctagttttctcctatttgttgtacaggaaaacatagaatagaattcaaatttggtggtcgcaaaagtgtggagactttaattcatataaagctaggcttaacattagtgcaaacagttgtattttagtttagatttagagtacacttatgtatgcattgtttgac

SEQ ID NO: 140407 - DNA, 484 bp, Zea Mays
tttacggtctgtacaagcctcagaactttcgactgaaaaattacaattaatacttattactacttactatataaaaggaacaaactgaataggccctgctcattggtcagtcgtgggtaccaatctcggactcaatttcagtttttgcagtcctctgacaatttgaagtttataatgttgcaggggctggacgagaatcaaactacgaagagaggctaggcaggcacgacagatgtttgaggaggctgaagatgctattcacagggatgactctagtgatgatgatgaaataggagacgggcaactatgtgttgtgtgcttaaggaagagaaggagagcagcttttattccatgtgggcatcttgtctgctgttccgaatgcgcattaacaatagagcgtacacctcatccattgtgccccctgtgtggtcaagacatcagatacatgatgagggtttatgactcttaaggtaattggaaaaca

SEQ ID NO: 140408 - DNA, 294 bp, Zea Mays
atggccagtgaagctcaccgtgtctgctgcttcaactctactgtggtgcactgcccggaatggggttgcgccgccgtagactggagccgtggacagctccaccgtcgcccgaccaacttgaatcgtccccggccaatctcacgtgcacactgtgaccaaggaagggatcacatgggtaccatcatcgtcatctatgttgcgccaaggtggcaggtccggcgctgcatcgccggagttgggcacgacggtgtcgtggacgggaccttgcaaaagaaacgaagtcgaggggtttaa

SEQ ID NO: 140409 - DNA, 471 bp, Zea Mays
atgccccgcctggccgagctgaaggaagcgtggaccagagacagagtgggcaccaggggcgagttcacggcaacagacacgcttgacgaccacagacgcaaccgaataattaaaaatactacgacagccaagaatcggctcggagacgacgaccggcacggaagagaggagctcgacgcggaagctcgacacgccgttgcgagcagagaacttcgtgcacacaacagattcacgcacacaacagaggagctcgacacacgcagcagggccaacgcagtccgagcaggggcgaaccagaggcacgcgcgcgacaccagagagccgagcttgaagtgcgcgcggccatggaaaagatccgagctgggctgcgggagctccgagctaagcgcacacagggaagctgggtgccgagcgatagagcggtgctcgcagctacgcgcagggagaggaacgccatccacggcgagctag

SEQ ID NO: 140410 - DNA, 969 bp, Zea Mays
acttcctcctgacctttttgagtctcttcttccacccggcggcagcgggcagcgcaggcgagcagaccaagtcgcctgcagagtgcagactgcagatacagtccgtgctctgacggagcaacaggagaagcagagcgagccgaggcggagtcgacaggcgagtggttccaccgaccgtctcccctgccgcaagcgaacgggtgagcggggcgccgtggatctgatgtccctttgagattctactctgcttctgttctccctacagcttggtgccttatcatggaggaagcggggaggggctgcggcttgctcaaggtggttgtgacgcacggccggaacctagccgtccgggatttcacgtccagcgacccctacgtcatcgtccacgttgccgacaaggtgagttcaattaaaagaagagcgaaatgaaggatttatgctgcctgcgcctgaatcgctagcaaagaaactagtatcaattatgctgacacagcaataatgttaatgtctgtcttggggtgctgattttggaaagtcagcttgatctactggtccaggtggttattcatacttaaataaattgtaccaaattaagtgtcttaattgtcatttcttctaggagtagtataatatataacacctgtctgtctcttccttcgctcctttcttttcttgtaccatgcagaccacaaaaacaaaagttatcaacagttgcctcaatccagtttggaatgaagagatgacattctccatgaaagaaccagtaggaataatcaaatttgtaagtttctatgccgacgaattctactctcgtcaaaaaagcaggattcaggacctgtttggatcagtacactaactgtccatgaatatggatcaatacactagcattgacaatctgaaatctgtggtgaattttcttgttcctttttctcagttttcggtctctctgaattcaatacattaactgtc

SEQ ID NO: 140411 - DNA, 1019 bp, Zea Mays
acttcctcctgacctttttgagtctcttcttccacccggcggcagcgggcagcgcaggcgagcagaccaagtcgcctgcagagtgcagactgcagatacagtccgtgctctgacggagcaacaggagaagcagagcgagccgaggcggagtcgacaggcgagtggttccaccgaccgtctcccctgccgcaagcgaacgggtgagcggggcgccgtggatctgatgtccctttgagattctactctgcttctgttctccctacagcttggtgccttatcatggaggaagcggggaggggctgcggcttgctcaaggtggttgtgacgcacggccggaacctagccgtccgggatttcacgtccagcgacccctacgtcatcgtccacgttgccgacaagaccacaaaaacaaaagttatcaacagttgcctcaatccagtttggaatgaagagatgacattctccatgaaagaaccagtaggaataatcaaatttaacgaccatcacctttggcaggaggtgttcgactgggaccggttcaagtacgacgacaagatgggccaggctttcctggacctgcagcctgtggcggcggcaaccaagctgcggagggcgctgcggctcacagctggcgagaccaacctgcggaaagtgaacccggacgccgacaactgtctgctctcagatagcttcgtgacgtacgccaacggggaggtcgcgatagatgctaggctgcggctgcgtgaggtcgagtccggcgagctgttcgtcactataaagtggattgaacctgacagcgccaacactggaaagcaagcggatcactagctagcgatgcattttgcttgcagcactgcaaatatgtaatatgacctgatgtgggctgatttatgaggattttttttaaatcgtatatttttattatcaattacaatgtagaaggtgttgtatgagaatttgagatgcatcatgtcggtcatccagtgcccgacgtgtcacctattagcagcggctatcct

SEQ ID NO: 140412 - DNA, 800 bp, Zea Mays
ctcctgacctttttgagtctcttcttccacccggcggcagcgggcagcgcaggcgagcagaccaagtcgcctgcagagtgcagactgcagatacagtccgtgctctgacggagcaacaggagaagcagagcgagccgaggcggagtcgacagcttggtgccttatcatggaggaagcggggaggggctgcggcttgctcaaggtggttgtgacgcacggccggaacctagccgtccgggatttcacgtccagcgacccctacgtcatcgtccacgttgccgacaagaccacaaaaacaaaagttatcaacagttgcctcaatccagtttggaatgaagagatgacattctccatgaaagaaccagtaggaataatcaaatttgaggtgttcgactgggaccggttcaagtacgacgacaagatgggccaggctttcctggacctgcagcctgtggcggcggcaaccaagctgcggagggcgctgcggctcacagctggcgagaccaacctgcggaaagtgaacccggacgccgacaactgtctgctctcagatagcttcgtgacgtacgccaacggggaggtcgcgatagatgctaggctgcggctgcgtgaggtcgagtccggcgagctgttcgtcactataaagtggattgaacctgacagcgccaacactggaaagcaagcggatcactagctagcgatgcattttgcttgcagcactgcaaatatgtaatatgacctgatgtgggctgatttatgaggattttttttaaatcgtatatttttattatcaattacaa

SEQ ID NO: 140413 - DNA, 919 bp, Zea Mays
cctgacctttttgagtctcttcttccacccggcggcagcgggcagcgcaggcgagcagaccaagtcgcctgcagagtgcagactgcagatacagtccgtgctctgacggagcaacaggagaagcagagcgagccgaggcggagtcgacaggcgagtggttccaccgaccgtctcccctgccgcaagcgaacgggtgagcggggcgccgtggatctgatgtccctttgagattctactctgcttctgttctccctacagcttggtgccttatcatggaggaagcggggaggggctgcggcttgctcaaggtggttgtgacgcacggccggaacctagccgtccgggatttcacgtccagcgacccctacgtcatcgtccacgttgccgacaaggaggtgttcgactgggaccggttcaagtacgacgacaagatgggccaggctttcctggacctgcagcctgtggcggcggcaaccaagctgcggagggcgctgcggctcacagctggcgagaccaacctgcggaaagtgaacccggacgccgacaactgtctgctctcagatagcttcgtgacgtacgccaacggggaggtcgcgatagatgctaggctgcggctgcgtgaggtcgagtccggcgagctgttcgtcactataaagtggattgaacctgacagcgccaacactggaaagcaagcggatcactagctagcgatgcattttgcttgcagcactgcaaatatgtaatatgacctgatgtgggctgatttatgaggattttttttaaatcgtatatttttattatcaattacaatgtagaaggtgttgtatgagaatttgagatgcatcatgtcggtcatccagtgcccgacgtgtcacctattagcagcggctatcctataacaacgcatgttttagacatt

SEQ ID NO: 140414 - DNA, 708 bp, Zea Mays
gtctcttcttccacccggcggcagcgggcagcgcaggcgagcagaccaagtcgcctgcagagtgcagactgcagatacagtccgtgctctgacggagcaacaggagaagcagagcgagccgaggcggagtcgacagcttggtgccttatcatggaggaagcggggaggggctgcggcttgctcaaggtggttgtgacgcacggccggaacctagccgtccgggatttcacgtccagcgacccctacgtcatcgtccacgttgccgacaaggaggtgttcgactgggaccggttcaagtacgacgacaagatgggccaggctttcctggacctgcagcctgtggcggcggcaaccaagctgcggagggcgctgcggctcacagctggcgagaccaacctgcggaaagtgaacccggacgccgacaactgtctgctctcagatagcttcgtgacgtacgccaacggggaggtcgcgatagatgctaggctgcggctgcgtgaggtcgagtccggcgagctgttcgtcactataaagtggattgaacctgacagcgccaacactggaaagcaagcggatcactagctagcgatgcattttgcttgcagcactgcaaatatgtaatatgacctgatgtgggctgatttatgaggattttttttaaatcgtatatttttattatcaattacaatgtagaaggtgttgtatgag

SEQ ID NO: 140415 - DNA, 797 bp, Zea Mays
ggcagcgcaggcgagcagaccaagtcgcctgcagagtgcagactgcagatacagtccgtgctctgacggagcaacaggagaagcagagcgagccgaggcggagtcgacaggcgagtggttccaccgaccgtctcccctgccgcaagcgaacggcggggaggggctgcggcttgctcaaggtggttgtgacgcacggccggaacctagccgtccgggatttcacgtccagcgacccctacgtcatcgtccacgttgccgacaagaccacaaaaacaaaagttatcaacagttgcctcaatccagtttggaatgaagagatgacattctccatgaaagaaccagtaggaataatcaaatttgaggtgttcgactgggaccggttcaagtacgacgacaagatgggccaggctttcctggacctgcagcctgtggcggcggcaaccaagctgcggagggcgctgcggctcacagctggcgagaccaacctgcggaaagtgaacccggacgccgacaactgtctgctctcagatagcttcgtgacgtacgccaacggggaggtcgcgatagatgctaggctgcggctgcgtgaggtcgagtccggcgagctgttcgtcactataaagtggattgaacctgacagcgccaacactggaaagcaagcggatcactagctagcgatgcattttgcttgcagcactgcaaatatgtaatatgacctgatgtgggctgatttatgaggattttttttaaatcgtatatttttattatcaattacaatgtagaaggtgttgtatgag

SEQ ID NO: 140416 - DNA, 1547 bp, Zea Mays
ggcagcgcaggcgagcagaccaagtcgcctgcagagtgcagactgcagatacagtccgtgctctgacggagcaacaggagaagcagagcgagccgaggcggagtcgacagcttggtgccttatcatggaggaagcggggaggggctgcggcttgctcaaggtggttgtgacgcacggccggaacctagccgtccgggatttcacgtccagcgacccctacgtcatcgtccacgttgccgacaaggtgagttcaattaaaagaagagcgaaatgaaggatttatgctgcctgcgcctgaatcgctagcaaagaaactagtatcaattatgctgacacagcaataatgttaatgtctgtcttggggtgctgattttggaaagtcagcttgatctactggtccaggtggttattcatacttaaataaattgtaccaaattaagtgtcttaattgtcatttcttctaggagtagtataatatataacacctgtctgtctcttccttcgctcctttcttttcttgtaccatgcagaccacaaaaacaaaagttatcaacagttgcctcaatccagtttggaatgaagagatgacattctccatgaaagaaccagtaggaataatcaaatttgtaagtttctatgccgacgaattctactctcgtcaaaaaagcaggattcaggacctgtttggatcagtacactaactgtccatgaatatggatcaatacactagcattgacaatctgaaatctgtggtgaattttcttgttcctttttctcagttttcggtctctctgaattcaatacattaactgtccatggactgaaatctagatctctaaacttgccaaattaatacactgcctatgttatgtgtttgcttacgtgaccaacatggacaccgatcagtgggctcaatattgtgatagcaattgttctcacagcgatcgaaggaaatgtttgcagttaaagtgaaaaaataatagtatgacacttctattacttaacaatattaagcccacggatctgtttcctgaacagaacgaccatcacctttggcaggaggtgttcgactgggaccggttcaagtacgacgacaagatgggccaggctttcctggacctgcagcctgtggcggcggcaaccaagctgcggagggcgctgcggctcacagctggcgagaccaacctgcggaaagtgaacccggacgccgacaactgtctgctctcagatagcttcgtgacgtacgccaacggggaggtcgcgatagatgctaggctgcggctgcgtgaggtcgagtccggcgagctgttcgtcactataaagtggattgaacctgacagcgccaacactggaaagcaagcggatcactagctagcgatgcattttgcttgcagcactgcaaatatgtaatatgacctgatgtgggctgatttatgaggattttttttaaatcgtatatttttattatcaattacaatgtagaaggtgttgtatgagaatttgagatgcatcatgtcggtcatccagtgcccgacgtgtcacctatt

SEQ ID NO: 140417 - DNA, 937 bp, Zea Mays
ggcagcgcaggcgagcagaccaagtcgcctgcagagtgcagactgcagatacagtccgtgctctgacggagcaacaggagaagcagagcgagccgaggcggagtcgacaggcgagtggttccaccgaccgtctcccctgccgcaagcgaacgggtgagcggggcgccgtggatctgatgtccctttgagattctactctgcttctgttctccctacagcttggtgccttatcatggaggaagcggggaggggctgcggcttgctcaaggtggttgtgacgcacggccggaacctagccgtccgggatttcacgtccagcgacccctacgtcatcgtccacgttgccgacaagaccacaaaaacaaaagttatcaacagttgcctcaatccagtttggaatgaagagatgacattctccatgaaagaaccagtaggaataatcaaatttgaggtgttcgactgggaccggttcaagtacgacgacaagatgggccaggctttcctggacctgcagcctgtggcggcggcaaccaagctgcggagggcgctgcggctcacagctggcgagaccaacctgcggaaagtgaacccggacgccgacaactgtctgctctcagatagcttcgtgacgtacgccaacggggaggtcgcgatagatgctaggctgcggctgcgtgaggtcgagtccggcgagctgttcgtcactataaagtggattgaacctgacagcgccaacactggaaagcaagcggatcactagctagcgatgcattttgcttgcagcactgcaaatatgtaatatgacctgatgtgggctgatttatgaggattttttttaaatcgtatatttttattatcaattacaatgtagaaggtgttgtatgagaatttgagatgcatcatgtcggtcatccagtgcccgacgtgtcacctatta

SEQ ID NO: 140418 - DNA, 794 bp, Zea Mays
agcgcaggcgagcagaccaagtcgcctgcagagtgcagactgcagatacagtccgtgctctgacggagcaacaggagaagcagagcgagccgaggcggagtcgacagcttggtgccttatcatggaggaagcggggaggggctgcggcttgctcaaggtggttgtgacgcacggccggaacctagccgtccgggatttcacgtccagcgacccctacgtcatcgtccacgttgccgacaagcttgatctactggtccagaccacaaaaacaaaagttatcaacagttgcctcaatccagtttggaatgaagagatgacattctccatgaaagaaccagtaggaataatcaaatttaacgaccatcacctttggcaggaggtgttcgactgggaccggttcaagtacgacgacaagatgggccaggctttcctggacctgcagcctgtggcggcggcaaccaagctgcggagggcgctgcggctcacagctggcgagaccaacctgcggaaagtgaacccggacgccgacaactgtctgctctcagatagcttcgtgacgtacgccaacggggaggtcgcgatagatgctaggctgcggctgcgtgaggtcgagtccggcgagctgttcgtcactataaagtggattgaacctgacagcgccaacactggaaagcaagcggatcactagctagcgatgcattttgcttgcagcactgcaaatatgtaatatgacctgatgtgggctgatttatgaggattttttttaaatcgtatatttttattatcaattacaa

SEQ ID NO: 140419 - DNA, 705 bp, Zea Mays
atggcagcacaacaccaccacgagacggaggcgaactggcaacgatggcctaggacgggtgtggaggttgacagcagggaactctgcgatgggcagcaaggctcgacggtgaacgacgtgacggtgggcagggagagagtgcggactggggaaagactcggcgagcagcgacgcgagggagcaaagcgaggttgcggccgggcgggctcggacacaaacacacgcagcgacttcatcgcgtccatcacgtacgcgtcacggacagcaggaaggagttcagcgcagtggccattggcggacagcggagcaggcgattcgacgagagcagggggcgagcaggaaaaggactcggcgagggagcttgacgtgccgtggcgagcagagggacacggctgcgcgcgcagcagggagaagcttggaggcggtgaccagggagagcacaggggagaagcagctcctgcttccggtgtccacgagaagggaggcagggacggcggcacaggagagaaggaacagggagccgagagggcggggacgctcggtcatggggagcaagcagcgggcgcggctatgagggagatggagggagaggagggagctggagaccgagctggagagcaagcagggaggggcgagcgccatgggaagccaggggctcggatgcctgcgactgcagaaaggatgaagacggcggccaggggataa

SEQ ID NO: 140420 - DNA, 832 bp, Zea Mays
accgctgtgcgcgtccctatataccaccacccctggtactccgttcagctccctctccctgatattcttcatcgcgcggagctctctccaactccggccggatctcctaggcgctcggcctctatttcttctgcgggagcacgcccagccgagcggctcttccccacggcgttgttctccctgcgctcgcacggccttgaagctcccatggcgcgtgccaagccacccttccgttctcctcctcgccacgatgctccatggcgctcctcgctgctcgcccagccatcttccccttccccatggccgcggcctccctgcaaggatacgcgccggtgcccaacccggccgctcgaccccgccagtccctgcgtgccgcgcgctgctttctggtgctcggactgcttctcagctcgcccgaccggagcgccctgctcgccctcctgcgtcgagctccctcgctgtacgcgccgttgaagcttcacgggccgtgcgctcctctgtcccgaccaccagcatccaattccagtattctcgccattgaagaacagtcgccgcgctctgcgttctcgccgcgttcgtaaagctgtcgtggaattgcggtcatttttctttgcgtcatgtgtgcaacacgccatcgtcttcgtgtttttggtaagtcccggcgagcgctcgcgctagccatcctctgctcgacctcgttgacgagcttcgccttgccggtcgttttagctgcgacccgtcgtgaagctctcatgtggtggtgtgcgtaaagctcgtatagtacccgccaaacgctcgacaaattgcttggatagaaaaatcattaccgatc

SEQ ID NO: 140421 - DNA, 832 bp, Zea Mays
accgctgtgcgcgtccctatataccaccacccctggtactccgttcagctccctctccctgatattcttcatcgcgcggagctctctccaactccggccggatctcctaggcgctcggcctctatttcttctgcgggagcacgcccagccgagcggctcttccccacggcgttgttctccctgcgctcgcacggccttgaagctcccatggcgcgtgccaagccacccttccgttctcctcctcgccacgatgctccatggcgctcctcgctgctcgcccagccatcttccccttccccatggccgcggcctccctgcaaggatacgcgccggtgcccaacccggccgctcgaccccgccagtccctgcgtgccgcgcgctgctttctggtgctcggactgcttctcagctcgcctgaccggagcgccctgctcgccctcctgcgtcgagctccctcgctgtacgcgccgttgaagcttcacgggccgtgcgctcctctgtcccgaccaccagcatccaattccagtattctcgccattgaagaacagtcgccgctctctgcgttctcgccgcgttcgtgaagctgtcgtgcaattgcggtcatttttctttgcgtcatgtgtgcagcacgtcatcgtcttcgtgtttttggtaagtcccggcgagcgctcgcgctcgccatcctctcctcgaccttgttgacgagcttcgccttgccggtcgttttagctgcgacccgtcgtgaagctctcatgtggtggtgtgcgtaaagctcgtatagtacctgccaaacgctcgacaaattgcatggatgaaaaaatcattaccgatc

SEQ ID NO: 140422 - DNA, 114 bp, Zea Mays
ctgggacacgcggcgataatttactcgtcggtccagggaccccctagggtcgaaacgccgacaatatttgacttataaaatttagattataatttcaaatctcgaaaaaataaa

SEQ ID NO: 140423 - DNA, 1137 bp, Zea Mays
ccgcgctttttctctctgctgacgccgccgccgccgggagccgtaccccgggagagccccccagcccttatcaaaccctaaatcaaaaactatccaaaaaaatccgcaaaaaactagaaaaaatcccaaaaatcaccacttgattggagatggcggcgcaagggcaggcggcggctggatccgcgtccgagtctggcggctcaccggctgcctcagctgctgcagcggcggcggctgcgttcccggcgacttctctctacgtgggtgacctgcacgagagcgttcaggacgcacagctcttcgacgtcttcagccaggtcggcggcgtcgtctccgtgcgcgtctgcagagacatcaactcccgcaagtcgctcggctacgcctacgtcaactacaacaacactagcgacgctgcacgggcacttgaactgcttaacttcactcctatcaatggaaagcctatcaggatcatgtattctaaccgtgaccccagctcgcgcaaaagcggtgcaggaaatatatttattaagaatcttgataagtcaatagacaacaaagctttatatgacacgttctgtgcatttgggaatatcctttcatgtaaaattgcaacagacccctcaggagaatcaaggggatatggttttgttcagtttgagatggatgaatccgctcagtctgccattgataaactcaatggtatgcttatcaatgacaagaaagtgtatgttggaccttttgttcgtaagcaggacagggaaaatgtctcgaacaatatcaaattcagtaatgtgtatgtgaagaatctgtccgatactgttactgatgatgagttgaaggagatgtttggaaaatatggaaccataacaagtgctgttgttatgcgggatagtgatggaaattctaggtgttttggatttgtcaattttgaaaatgcagatgctgctgctcaggctgttcaagagttgaatggcaagatattcaatgataaggaactgtatgttggaagagcacaaaagaagtctgaaagagagatggagttgaaggagaaatttgaaaagaatattcaagaggtagctgagaagttccaaaacactaacttgtatctgaagaacttagatgataacattgatgatg

SEQ ID NO: 140424 - DNA, 1181 bp, Zea Mays
tggaagcaagcccctttatgtagctcttgcacagcgtaaagatgacagaaaggcaaagctacaggcacagttttcacaaatgcgtcctgttgcaatggcaccttcagtaggtcctcgcatgcccatgtttccacctagtgttcctggagttggtcagcagctgttttatggtcagccacctccagccttcatcaaccctcaggctggatttgctttccagcaacctatgatgcctggtatgaggcctggtggtccaatgccgaactttatgatgcctatggttcagcagggacagcaaccgcaacgtcctgctggtaggcgtgctgggtctggtggaatgcagcagcccatgccaatgggtagtcagcaacaggtatgctgtatcattcttggcatttttcatttttgttcgttgaactgtggcttgaaatttctgtatggctgtagatattccctagaggtggtcgtggctaccgctatgctactggacgtggaatgcctgatcctggcatgcataatgttggtgctgtgatgccatctccatatgagatgggagggatggcaatgagagatgctggtgtctcacaacctgttccaattggggcactagccactgcgcttgctaacgcctcaccagatcagcaaagactgatgcttggtgagaacctgtatcctcttgttgaacagctggagcgtgagcaggctgccaaggtcactggcatgcttttggagatggaccagacggaggttcttcacctgctggagtcgccagatgctctcaaggctaaggttgctgaagccatggaggttctccgctcagcccagcatctccagcagagcaatgcctccaccgagcagcagctggctaatctatcactgaatgatggcgtcctctccagctgaatgtttctgatgattcagaaattgctggcaatttttgcttgatacctatctctagaatgcaattactttgtttactttattggaattttaggtgctgctctataattagctgaactagggggtggatttaattgccttgaattggttattttggttatatgaatatgttatgtcggagctcaggtctgtcattttggtatatggttatgttagcccttgtccgtttatcacccgaattatcacagattgaattttagagcgtcattgcttttctagct

SEQ ID NO: 140425 - DNA, 1107 bp, Zea Mays
tggaagcaagcccctttatgtagctcttgcacagcgtaaagatgacagaaaggcaaagctacaggcacagttttcacaaatgcgtcctgttgcaatggcaccttcagtaggtcctcgcatgcccatgtttccacctagtgttcctggagttggtcagcagctgttttatggtcagccacctccagccttcatcaaccctcaggctggatttgctttccagcaacctatgatgcctggtatgaggcctggtggtccaatgccgaactttatgatgcctatggttcagcagggacagcaaccgcaacgtcctgctggtaggcgtgctgggtctggtggaatgcagcagcccatgccaatgggtagtcagcaacagatattccctagaggtggtcgtggctaccgctatgctactggacgtggaatgcctgatcctggcatgcataatgttggtgctgtgatgccatctccatatgagatgggagggatggcaatgagagatgctggtgtctcacaacctgttccaattggggcactagccactgcgcttgctaacgcctcaccagatcagcaaagactgatgcttggtgagaacctgtatcctcttgttgaacagctggagcgtgagcaggctgccaaggtcactggcatgcttttggagatggaccagacggaggttcttcacctgctggagtcgccagatgctctcaaggctaaggttgctgaagccatggaggttctccgctcagcccagcatctccagcagagcaatgcctccaccgagcagcagctggctaatctatcactgaatgatggcgtcctctccagctgaatgtttctgatgattcagaaattgctggcaatttttgcttgatacctatctctagaatgcaattactttgtttactttattggaattttaggtgctgctctataattagctgaactagggggtggatttaattgccttgaattggttattttggttatatgaatatgttatgtcggagctcaggtctgtcattttggtatatggttatgttagcccttgtccgtttatcacccgaattatcacagattgaattttagagcgtcattgcttttctagct

SEQ ID NO: 140426 - DNA, 381 bp, Zea Mays
atggatggaccagcggcacggtccgtcgtcgaagtgagcggaggttggtggctggggcgctggttccagggagccgacggccaacacatggccagactggcatggtggcggaggtcaactagcagggagcaccagggagcagggcgacgaccggacctgaggagcctgaacggaggagcagatacgagttccatggtcggaccagcgagcacaagggagagttggaacggagctggagcaggggcaatggcctgcagcatggagcccgttccggccaggaactgcgggtgctgcgcggacagcaccttgtccacggcggttgggtcccgctgccccagcgccaacgctagcaccttcttcccaacggcctactgtggatga

SEQ ID NO: 140427 - DNA, 264 bp, Zea Mays
atggcgcgcgtgcctgctcccctgttggccgcgccctgctccctgctgcgcgcgttggctccagcccgtggagcttcttctatgcgcgcgcttctgttctgctgttcagccatcatttgcttcgttggacgctcaagccatgtggtggccatcccttttgtcagagcagtccacgccatagagttcgcttggcccgaccccatgcgccaacgcgcgtccgtggtcgtgttcatcgagttcatcaacgttctattgccgatttga

SEQ ID NO: 140428 - DNA, 488 bp, Zea Mays
aagcttattgtatttgcagatgtatagtgctcagatgggatctcaaatgggacccccagttcacccgtccgtcacaatctggataaaccccaaacaccaacgaaacacagggttcttagaccggacaaggaaacccacagatggacatacagtggtcgatgtcccctagaggacagattcttcctcctccacaaccaggtatgggatattggccgccaccaccatggggatatcctacacatccaatggggccttggggacgcccccatggccaacacaaccacttccatcaccagcggattccggctctcatcaagtgactcctccccctcacgatgactttgtggacagatctctcaattctagtggtggagctatgaacaacaatccgatgtcctgatcgagagcgatggagctaatgtttgaacttgtgaactaaaaatgtgaactatggatgtgaacttgtgtgaatttgtgaacttatgtat

SEQ ID NO: 140429 - DNA, 551 bp, Zea Mays
atgcattccaaaaatagaaactaatacaaggaaaagtatcacgacagtgtaagaaatgttcaacactttccaaacattgtcacatatatacaaccagcggcctccaaaagtaatgtacaaatagcaaccaagccgcctaccacctatgggtcgattaattaggacgatagaaacctccaaaggcgtggtgtacaactaaaggcctcaggtacacacacaggtaattaacactctccaacgcacaccaggaactgctctcctctagccgcccctcgtgcctttttctatagccgccacgagcacctgctcaatttattttccaacaacagtaggacctgttgtcctcttactgcccctcatgtgccttttctcaatgctctctgcatacgtcaggacccctcactgcttagtttaccttccaacacagcaaggacctactctgctaccatcaagacccctcactgctcagtttatctgccaacgcatagaaagattcactacatgacaaggtggacagcaatgagatccccaataccggtcaattgtcttgg

SEQ ID NO: 140430 - DNA, 410 bp, Zea Mays
aaagaataaataatggccagtttgcttgctgtattgatattttctctttttgggttggtgtacagaatggagggtgtctaccgcttacttttgcatgaaaggaaacttatgcaggatgttacttctgatgcaaagtttcatgctccaatacaatatgagagagatgtgtttactgctcttggaactaccaaatggcagctggagcaatttgagagggaggtgaatgctgctgcattctctgacaagtcaaagtcaagagaaaatgcaatcttaaaattcaggcaattcattagagcaattgcagaccagatttctcaggtggaagaaagtttggagagtcttaggctaggttctagcagaactcaaaaacatttatactcaagtgaacatgatggtgatgggctggcatc

SEQ ID NO: 140431 - DNA, 435 bp, Zea Mays
atggcgtccctgttttttcttcttccctgcgcgcagctcgttctttctctgtttgccgcgtgcgtctctctctgcgcgcttctctctcccgccccttctctcccatggtgcgccctggtccttgcttctttctctctctgctcatccccaagctgcgtcctggagtttgagttcgtcatcttcaaccttggtccaagccactcgctctctgccacgcgccatggaactctctgcgtcgcgcgtggtcctgctcttctcaccgcgctcggattccgtctccctgcgcgcactctcggattccgtctccctcacgcaccccttgccgaacccgtggtcacggtctcgccttgctgccacagccgcgcctactaccgcgaccgacctgctcccttgtgcgcgctctgcttccttgccgagctcatccctgtgcactga

SEQ ID NO: 140432 - DNA, 723 bp, Zea Mays
ggtccgattctgttgctcaaaacgcaagattattacaggttgctgtgttaagtccaagcttattacatggattcaacacaaggttttcaacccaggacattttctataaagttgtggccaccaagtgaaaggctcatgcttgttgagaggatgacaaagactatgtccacagagtccattttctctcgcaaatatggtcttttgggcaagcaagaggctcatgagaatgcaaaaaggattgaagaactttgctttgcatcggctgatgagcatttcaaaaatgagccagatggtgatgggagttctgttgtccagctatatgcaaaggaatcaagcaagatgatgttggaagttctgagaaaaggcccaaggtctgctgcagaattggagacacctatagctgatacatctcttgtgtctgctgatgcacctcgtgtgcttgctgatactgtactggatatatctggtggggagcgtgcttttattgaggcagatgaagcaaaggaactgcttagtccacttaccaaaccagggaattcatataaaataatttgctttagcaacaggagctttggtattggtgctgctaatgttgctggtccaattcttgagtcagttaaggatcagctcacagaggttgacatctcaaattttgtggcaggaagggttaacaaatcgtcttattctaagaggggtccaaatctgttgctcaaaacgcagtaa

SEQ ID NO: 140433 - DNA, 357 bp, Zea Mays
atggctgggcgctacggcgtcgagcagatccctgcgcgcttgcgcccttggagtaggggactggacacccatgggagagagggcagagttactgcgttccagggatccaagcgccaggggggtgagctcgggcttgagccatggagcagggagggcgctgcttgggggcttggctgggggagagaagagctcctgctcctgcggcaaggcacacagggaggaaaaaggccggcgtcgagcacctcgctggtttgctgcgtcgagggggagcgagtggagggaggcgctgggagaaaagacagccggttgggggagctcggctgccggattttctggacgccatggctgggagcttga

SEQ ID NO: 140434 - DNA, 1137 bp, Zea Mays
ctcacaataattagattatctccacagtcatattctctctgcagctaagttctcggaaaaggcggtaaaaaagttgaccaaaaggacacactggatgcacattgacagcttactctcccgtcgcagcctgaagctgtgcgccccggttcggtgggcgtgaaaggggagaaaagagggcgggaaggaccgcggattttgctagggtttgcggtttctgcttcacactgcctcctcagtcctcaccaccacagccgtcgcgcgcaggaggtttgggaggatgccacgtaagatcaccttggtcaaggagggggagccgcagccggtggacgctgctcaaggggagcccgctccggcaccggcggcaccgacggccgcgttgacggaggcggaggtggacgagctgcccagggccatcgtgcgccgccttgtcaaggacaagctttcccacgtcgccggtggggaaggagccgaggtcatcgtcaacaaggacgccatggccgcgttcgccgagagcgcccgcatcttcatccactatctctccgccactgccaatgatatgtgcaaggaatcaaagaggcagaccatcaacgctgatgatgtcctcaatgctcttgatgacatggagttttcggagtttgtagagccccttaggacttcactgcaagagtttagaaacaaaaatgcagacaaaaggtcagaagcaaagaaacaacagaaggaaaagagaaggaaattaaatgaagagacacttccgcagaaagaaaatgatccagctgatgatgccaaggagaatggagtagcttaatcgcaagaaaaatgaagaatgaatacaattaacttctctgctggaggggcagtaacacgcagaatcaaaaccatggcagtatttgttggtagttgtatttgcttttgctccatgtagcctctactccaaaacactttcttgacttgatatgatgctgtataattctagtgtcctatcagttttcagcttgcttatggtgcaattaaaattctatgtgcctgatgaaattgttcttatgaatgaagaatgataccagcactatgttcgttggcaaattactggttttattcttccagtactagaatagctcacgacttccttagatgttgaaa

SEQ ID NO: 140435 - DNA, 1580 bp, Zea Mays
gaccaaaaggacacactggatgcacattgacagcttactctcccgtcgcagcctgaagctgtgcgccccggttcggtgggcgtgaaaggggagaaaagagggcgggaaggaccgcggattttgctagggtttgcggtttctgcttcacactgcctcctcagtcctcaccaccacagccgtcgcgcgcaggaggtttgggaggatgccacgtaagatcaccttggtcaaggagggggagccgcagccggtggacgctgctcaaggggagcccgctccggcaccggcggcaccgacggccgcgttgacggaggcggaggtggacgagctgcccagggccatcgtgcgccgccttgtcaaggacaagctttcccacgtcgccggtggggaaggagccgaggtcatcgtcaacaaggacgccatggccgcgttcgccgagagcgcccgcatcttcatccactatctctccgccacgtctgtaacatcacattccctccacagtcccaccatctctgattagatccagattacccccagttactgtgattcttatcctctgttgctctgtatgggggttggaatttggaactcggaagagaaagcaactaatctgatatttttgttgaacagtagactcagtaatagtgaggtacagcaattttatccaatcaaattctgcgtattttggggtataatgctgccatcaatggagtggatccaagtaatatatgtgatgtattttaatgttgttgagtaactagcaggatatttttgttccatagcaatctctgctcgttttttagtagaaaaaggtacatagaagggaatggacataatctatcctctcttttttttaagaaagggttcttgcatattgtagcctggaggctcccgatttttccagatggaaaacagacttcgagtgtcggtataatctgcttttcgttatcaatgcatccatgaaaataatacgatcatggttttatctgcagtgccaatgatatgtgcaaggaatcaaagaggcagaccatcaacgctgatgatgtcctcaatgctcttgatgacatggagttttcggagtttgtagagccccttaggacttcactgcaagagtttagaaacaaaaatgcagacaaaaggtcagaagcaaagaaacaacagaaggaaaagagaaggaaattaaatgaagagacacttccgcagaaagaaaatgatccagctgatgatgccaaggagaatggagtagcttaatcgcaagaaaaatgaagaatgaatacaattaacttctctgctggaggggcagtaacacgcagaatcaaaaccatggcagtatttgttggtagttgtatttgcttttgctccatgtagcctctactccaaaacactttcttgacttgatatgatgctgtataattctagtgtcctatcagttttcagcttgcttatggtgcaattaaaattctatgtgcctgatgaaattgttcttatgaatgaagaatgataccagcactatgttcgttggcaaattactggttttattcttccagtactagaatagctcacgacttccttagatgttgaaa

SEQ ID NO: 140436 - DNA, 963 bp, Zea Mays
ctagcccagcccaggatagtagtggtgccatggcctcctgcatagccccatccacggaggtcgcatccctgcgcttgggccacgctcggcctcatccccagtcgagtcgatgtctctgattctgcagttgacgcacaacaacccacgccggccaccaccctccaggcctcgcgatcttctcccatggtgctcggccccgcgctccttgtgtcgacatccgcctacttccctaggccctcgttgttgtaccactccctgtccctgggtcgagttggtgcttgccaatcgaggtgggcaggatggaaccgccgccgggggaactccgattcgccgttccccaagcctctttcgtggtccgggtggcaacctgggcgttgtgaaacctctcatcggcgccgcattgactgcgcttgctgtccacccatcgcgacccggaagtctccgttcgtgtaaagcccaaaattggtaaaaaaaacaataataataataatgtaatagataaataaatttaagaatcgtcctttaatgattttttgaaaccttcttgtatttctaatgcccttgaatgtttaacttcaaaaagaaaagaggaaggaaattgtattaaagttatttactattgctagaattaaataggaacaattggatctataccattaaaagatctaaactttagatatataccatgaaccccacataccattgactcatgtggacccacatgtaagtgagatagtaatggtatggatccaaagtggtgatcttttaatggtatggatccaaatttcccaattaaatagtgggaagaagaataaataatatacaaatataatttcaaagagcaaaagtatcattcaagatagaattgtgaattcaaagttcaaaacatgaatttaaatttagtttgggatttgagaataagagaaaggggaatagaaaataaaatagagaaggaaagaaaag

SEQ ID NO: 140437 - DNA, 104 bp, Zea Mays
gtgaggttgataatcaaggaaattataattgagatccgattatcacacaaattgctcataaccaaggaatcagatgttcagaccccagataaatttgtgtccgg

SEQ ID NO: 140438 - DNA, 1587 bp, Zea Mays
cctccatccgtcgtcgcctctgttgatttttcatcgtaccgtctctctcccggctcttcttatcttcaccgagcgaactcctctgcgtcctcatctcgtaaccgcccgtggggtcttcaaatatccagtccctgcacctttcttcttcctagccgctctctctccgtgcagtgcgtcctccgtgcccagtccgagctccccatggcgcgcccagctgaagctccctcttcctcctcggcgctgctctatctctctctggtgctcagctccctccgcgcgtccttggctccaagcccccgcgtggagctcgcccagctgtgaccctgccgagctccgccccgactccacgtctcctggtcgggctctcgttctatgcttgatgccgctgttccctggtgctccctgctcggtccctgcccagcgcctgactacagctccagctcgcggcgtcccctctgcttagccaggattgtcgtgcctctgctccctgatttctccagcccgtggagcttttgctatgcgctccctccctgctccggtcttctccatagccgagcgcccgacgttctccctgggtgctcgcccaagtcaccgttgcagctccagctcggattccccttcccatggcggcgcccacctccctgtgctccctgttccagctcgtcggggatgccccttcctccagccgtgttctgcttctctccctgcgcccctattcatctcctgtgcgccttggttttggtcccaagctccatggccgcctcgctgcagctctctggtgctcggtcgccaagtctccctgctctatgcgttcttcttcctccctggctcctgcgcgttatgtgcccagctcccttttccgcatatgcgcgcttatctcgctttcctgcgcgcccagcgttctgctcccgctcgtccctgcgcgccaagctccgtgcgcggtccttccttgagctcggtcctgcgcttttcctttctctgtgtcgtgctcgccgtgccgtgagtcactggccagcagtccagctcgcttcagaatcaatctcgacgtcgttccacgcgtcagcaagaaatctcaagagttgggtgaagttggaggccaacagcatggtattcaccatgtgcgcgacaggaagctcgagccaggatttatccgcattcgtacgagtattgggtcgcgtttgatactggtacgttaattaatcgcgcgatgcagaagacgacccaagtcgaccccaagcgtgggctactccgcacggtgatgctgatggacgaacatgtctgatcaagtgccaggatgtgagctgctcgccaaaggatcatcgtctaacaacactaacctagtgttacccaggcaagccccggtgcatgcaacccctttccttgtgtttttaaatactttttgcacacttaagtctagtgaaatgtgcattaggttcataggagttacttgaaaccctttgatgcattgctttccttgatatccatacctttatagatacttctgtgaagtatcaaaatatgatttacaaaaatgcttagccttgcttagatcttgtggatagaggttgtcctcaatttaaccatgga

SEQ ID NO: 140439 - DNA, 663 bp, Zea Mays
ttcttacccgtcagggccaaatttacagtagccacatatgcagcattatatatcgaccgtattctcagtttgcatggtattccaaagaccatagtgtcggatcgtggacctcagttcgtatccaagttttgggaagcacttcacaaatccttgggtactaagttactccacagttcggcctatcatccacaaaccagtggacagactgagagagtaaatcagatactcgaggatatgctgcgggcatgtgttctggacttctcgcaaaaatgggatgaatgtttgcccttagtggagttttcatacaataacagttatcaagaaagtatcaagatggcaccttttgaagctttatatggacgacggtgtcgaactctgctaaattggtctgaacctggagaaagatacttctttaggcctgatatggtgaacgaggtcgaagaaaatgttcagaaaatttttcttaatatgaagaaagctcagactcgacaaaagagttatgcagaccgacgacgacaacccttatgctttctggtagacgactatgtctacttaaaagtttcaccaatgaagggtatatcgtgtttcggggttaaagggaaacttgcacccaggtacattggtccattcctggtgcttgagcaatgtggaccagtggcatac

SEQ ID NO: 140440 - DNA, 963 bp, Zea Mays
atggcggcggcggagatctcggcgatgctggaccttctagttgcctccggggagacggagccgccggtacgccgcctccggtcgcccgcggcgcgcccggggctcgaggccctagcgggggccctcgccgccggccagtcggctgacccaggcgccgcacgcaccgttctcgctgccgcccgagccgtcgtgtttcccgtcctccctgcctcagtggagcaagtagacccaacagttgtggagattgtggagagatctttggaattctgtctcttacatctagaaaaatcatcatatgtgtgtgatgactttggcttactgaatgaggttgcctgttttgtggaatctgtgttgcttaaaggtaccctcaataaggtatcctcattggaacccagcattataaatgacatcattgagcagtggacatctgtccaagctgaaactgagcgcatgagcccacaagggaaatatttctgctatctaaaaggcttcaactgctcgaaaagtgaagatgaccttaaacagtttcatttggccttattaccagaatacttgcagcgagattatgttattttagagaattcccaatcatgcagtgcagtatctccaaatgccatggtgccattagcacagcattttgcggttgctcacttatgttgtatgccacgccttcttacactggttcagaagctttgccagtctcccgctttggaaatggttgaagatgtaaacattggcttgaggttgtctttcgcccaaaggattttgaaattagtctgtggtctcactattgagtttcctcctgatgcctctgatgccatgatgttatcctcagtagcgagatgtgctgatagtcttccagccttgtttagactgaggttcaatttctctaatcatgacagagtcttttctgtagatggtgttggcactatcttgctgcagatactggaagaatttttacag

SEQ ID NO: 140441 - DNA, 240 bp, Zea Mays
attgttgtctttttttctatattaataaaaagaagaaagatacaaggtccatctagacccaggtacaaaggtccacctcacagcggccagaatctagcatacacaaaatgatccatctaccaacaagagaacttaatcaccactgggagggggctgcaaggattaccccttttcccagaaaactcccatatccgacactcctccccagcatgagttataactacaacaatactaggagag

SEQ ID NO: 140442 - DNA, 1052 bp, Zea Mays
tccagatgctagcaaggtttgcaacaggcgcttcgtttagcacagactgcaaaggtggggggagggagagcaactcccggtttcttccattcatggtccagatggcttcttatctttctgatggaagtgccaaccagcagcgtcatgtgatggccaaagctgtcaccacctacttgtccggctccccaacactggaatctcctattcgagtttcagcatctctctctgggtcccgtggtggttcaggttcctctgaggagactgtacagttcatgatggtttattcacttctgtcggagtcatacgagagttggctccaacaccgccctgtgtttctacagaggggcatctaccatgcctacatgcaacataggcacgggcggtcgaccctcaagctgtcatcggactcgtcatcatcagcagttcgggcagacgaaagttcatcctctgatacaagtgacaacaagaagctcttcgccatagtccagccgatgctggtgtacaccggcttgattgagcagctacaacagttcttcaagaagggcaaatcgtccagcttgatcaagacggatgagaaagatgaatcctctgccagcctccagcaatgggagatccagatgaaagagaagctgggcaacatgaaggagatggtggggctgtccaaggacctgctctcatggcttgaagacatgacctcgtcaggtgatctgcaggaggcctttgatgtgatgggggcattgacggatgtattctcgagtggttatgcgacatgcgaaggttttgtccgggcggccatgaatgccagcaggagctggtcgtgagaacggaatggaggtttatatgccttgtgcctgtctgttttgtttctatgggtatgcagctgtaaacattattgcctttttcgtggccctggagagagacaaaatgaggcccttgtatcttgacaaatgaacgttgtatctgccgtgtttgttaagtgacagtgcatgtcaatgctggttgcattggattggtggatgataagtgagtaatgacgattactgagttagaag

SEQ ID NO: 140443 - DNA, 2146 bp, Zea Mays
attctacaacatttctataaacatacatattcacacgtatattcgcacatcgaccaattcatacgaatcgtaaaccactaatctccaactcacaaccattatgtacttacttcccaattcgtgaacacatacatgtttatcatatgaacagagcaattcaataattatcctaaaacaaactaactccattacacaacttgaattacgagcttacttgaccactcgatgtgtctactcgaaatcgtgagcacaaccatacactaaatgcgaagcataatttaacgaacacataatgcgcattgactcaacttataatcatagaggaaagtgatgactaattatgacatgtcatcacctcaccacacaagccaaagcaatccctagccacatcgaccgaacttctagtcgagtaaaacctacacctccttgtcacgaatacaaccatattgcggcatgtattcggaacactgccatccacctaacgcaacacttgatgtaacatactccagcacacatgttcaatggcacactcttcgtgcatacttacgccagcaaatttatatatatatacaatacaaaataatgtagactacttattggtcgctgcttggaacactaagcataccctacgcattaaaagttgtgacaatcaacacactattatataacaaggcgtttaaccacgatttaatattaccacgacgcatttgtgcaacacataaagaatcattgtaattaccaaaatatattttatccgttaatcgaacactacccgaaacaacaaatcggcttaccataaacaaacccggtcggtgccgctgcacacatggcgtggagatgaacgcgccaacgtgtaccggagagcggagcaaagccggaggagcatgacgggcaccacgatgcaacaaggtggagcacgcgccatggaggagctactgcggctgctgttttgtgtggcaacaacaggatggcgtcgacgggcaggaatggagcagggcaccaaaaagcgacgacactacacattggggatgttgctgctgggcattttgtcgaacagcacgcaagtgctacaagggtaagacataggggcagtgtgctgctgcagctagtgcagcacagcgaggcatgggacagcgatgggcacggtagggacgagctgggagacggcatcgacgtgctggagttgcatgggcggcggggctgcatgagaaaatgacgagcacagcaagatcgatgatgctctccacgactcgctgccctacttagcatttcgtcgaacaccccatttacatggcaacaacagtccgaaatggggatcgatggtgagctgccggggagggcgtgctacggaggagaggcgaagaagcgacacgacgacggaggaacttcaaggcgatggacaacaacaactatggacaaggagcagtgaggctcgcggctagcgtcacttccagtgaggattccggccatggatttggagcctgggcagaggcgtgcagcgacttgggagtcccgacggcgagctcgagagaacacttgggcatggcggaggcttgctattttggtggggaagagaggaggagcaggggcctagtgccatggcaaaaagaggggctcgacccaatgctcaaagccgaccagggaagggcgtcggtcaagccttgccgcacacctgcgcggtgctgggcgcctccagcgcccatggggagttcatgcagggcaaggacgccagggaagctcggatttgaggggaacatggggagagcggccctggcgcggctgagcgcgcgtcctgctagaggcgtcggctggcatggaggaatggagctcgggcgccgagcgcccaccatggcagggacgtcgaactcggctctgtggagaggagcagggccggcatgaagtgggaggaaggagatgtccagcgcataaaccaggggaggacatcggcctaccctgctgctatggtggcgtccatggtgagatggagaaggggggctggatgagcaggagcttggagctcgcatccatggcagagggaagaagcagggaggaggaagaactatgctggctgctgctgcagtgctgccgtgagggaaaaggagacagggagagggaaggtcgcggctagggggaatcgaaaatttcc

SEQ ID NO: 140444 - DNA, 237 bp, Zea Mays
atggccacgcctgtagctcttcgcttccttctctgcacgctgcttcaccaccacgccctgtgcgcagcccagccagcgagcctcgccccacctcgtgctcgctcccacgccgaccgccgttgttctacgtcgcgcactagctccggcgatccacccagtcatgcggcgagcctttcttcttccctaaccgctctaccctggccagcgccccagcgaccaaccggccaagtcccttga

SEQ ID NO: 140445 - DNA, 648 bp, Zea Mays
ctaatcagtctccatatcaaatactatacctagattatcagataatataccccgtgcagtagttttgattaattaacccctgtgaacaataatagtgtgaaagtagaaaagtggcgctatggaattatggatacaatgcaggaacacctttaagttcaaaaccaaatggcagaaaaagggttaaccaaagagcaactttgctttaaactcctacctgtgaccatcctgagctagcagtgttttttacagttctgatgaggaacaacagttgatgaataggctggctgattggccatctcttgttcctccatcgtcctagctatagctagcatttgctcaaactcaaccatgcatctccaatatcttcattcttgataggacactggcccaaccccagctggagtactagtactatgataagccatcgtcattgccaccgctggtggatgaagaatggaatgcagaaacggtgttcatcggccaacttgaattgccactgccagtgccaccaccactgccgctgccaccagcatttccatcccaaacactgtgtgatcctgatccgtggtgtagagctgtcgtgtactacttctgtaagctcgcgtcttgtcctttgctatcatcccccatcttcattgctgacccttc

SEQ ID NO: 140446 - DNA, 1541 bp, Zea Mays
accaaacccactcgcaacaacggataacgctctcttccttcggctcctcccctctcgctcctatcctctcccctccaatggcgaccgccatttcctctctagtaactcctccgaccctccaccgccgctgcctgggccctgcctgcgtctccgtctccgtgtgcacccctatccgcatctccttccggcccgccgccgcgcctcaggtgtcgcgccggggctcggcgctgcgggtgtccgcctcctcggcggtgctcgaggcgccagaggcggtggcggcgcggaagctctacgtggggaatatccccaggaccgttacaaacgacgagctccgcgacatgttcgctgcgcacggcaccgtcgagcgggccgaggttatgtacgacaagtatacgaatcgcagccggcggtttgggtttgtcacgatgagcacagcggaagaggccaatgctgcagttgaggctctcaatgggactgaggttggtgatagaaaaattaaagtgaacgtcacagagagcttcttaccgaacattgaccgatcagcaccagaaccagaggctctgtttgtagatagtcagtacaaggtttatgttggtaatcttgcgaagactgtaacaaccgaagttcttaaaaacttcttctccgaaaaggggaatatcctcagtgcaacagtctcccacattccggggacctccaagtcaaaggggtatggctttgtcacattctcttctgaggaagaagttgaagctgctgttgctactttcaataacgcggtaagcttctcttgcaaattttatgcatttctgccatttctttccaacctcataaaatagtagtcaccatttggctattgccaaacaaaagaaaaacgttgtgctacaatcttctatgttatcatttaggtgtcaaatagatggaaatatggaattaacatattgactgttaattgtacagatgagttagaattacatcatctcaactacgtcaactggtgccatattgttctgacatatcattcccacagaaacttatttgctgatattaataacattgcccgttcttcaaccgtacttcagcacacatcaagaccataatctcctatatttgctattcaaaagatttctgaagccttgaaagttggcatgcttttgatatcaaactttggaacataacctgtcgctaatgttttatattgttctacaattaaatgtggtgtcaggaattggaaggacaactcattcgtgtgaatagagcttagattagcagaaatttgcaggggcaccggaggagggggaatatcttggcgaatacatgtagtaggagggatgttttgaggctagattttgataacaaagtgatcaagaccttcaatgtgatttcgatatgtcatacaatttttgtaccataacagtatatttttcttaacggcacttctaaatgataacataaaggcagtatggtttcagttatatagtatgtttgtttatttgaaacgaattctacaccatgtacattccaacattaatgttgtcagttcaatc

SEQ ID NO: 140447 - DNA, 1106 bp, Zea Mays
accaaacccactcgcaacaacggataacgctctcttccttcggctcctcccctctcgctcctatcctctcccctccaatggcgaccgccatttcctctctagtaactcctccgaccctccaccgccgctgcctgggccctgcctgcgtctccgtctccgtgtgcacccctatccgcatctccttccggcccgccgccgcgcctcaggtgtcgcgccggggctcggcgctgcgggtgtccgcctcctcggcggtgctcgaggcgccagaggcggtggcggcgcggaagctctacgtggggaatatccccaggaccgttacaaacgacgagctccgcgacatgttcgctgcgcacggcaccgtcgagcgggccgaggttatgtacgacaagtatacgaatcgcagccggcggtttgggtttgtcacgatgagcacagcggaagaggccaatgctgcagttgaggctctcaatgggactgaggttggtgatagaaaaattaaagtgaacgtcacagagagcttcttaccgaacattgaccgatcagcaccagaaccagaggctctgtttgtagatagtcagtacaaggtttatgttggtaatcttgcgaagactgtaacaaccgaagttcttaaaaacttcttctccgaaaaggggaatatcctcagtgcaacagtctcccacattccggggacctccaagtcaaaggggtatggctttgtcacattctcttctgaggaagaagttgaagctgctgttgctactttcaataacgcggaattggaaggacaactcattcgtgtgaatagagcttagattagcagaaatttgcaggggcaccggaggagggggaatatcttggcgaatacatgtagtaggagggatgttttgaggctagattttgataacaaagtgatcaagaccttcaatgtgatttcgatatgtcatacaatttttgtaccataacagtatatttttcttaacggcacttctaaatgataacataaaggcagtatggtttcagttatatagtatgtttgtttatttgaaacgaattctacaccatgtacattccaacattaatgttgtcagttcaatccctgactttgt

SEQ ID NO: 140448 - DNA, 175 bp, Zea Mays
ttttttttccatcatccggttgttgttttggggatttggaattttgtggaaaacattcacaactagggcagtagaatttatttggtttgacgcttgcgttgcggtcgggagctgtcgcgtgggttagttgggccgcaattggtgtttcggcccattaaccctcccaaaccctagc

SEQ ID NO: 140449 - DNA, 1448 bp, Zea Mays
ttttttttccatcatccggttgttgttttggggatttggaattttgtggaaaacattcacaactagggcaatagaatttatttggtttgacgcttgcgttgcggtcgggagctgtcgcgtgggttagttgggccgcaattggtgtttcggcccattaaccctcccaaaccctagctgcctccctcctaaccccctcccccttgtgcagccgccccccctcacttctccccccttgtccgccgccccctgcccatctcctctctcaattcttgcagccaccaaaccctagcccccccccctcaatcccctcctcccaaggtgccaatccttgccgctcggatcatcgtcacgtggtgcgagtcttcaatcgttttggtggagggaagaagggaggaaggaaagggggagaatccaaggtggtggactcccagatcattcttagggatttgcccaaacttccggtgaaggcaagtaaaactgtgatggttattccgtctgtcagatgaggagtcttatacttgtttatgttgtgctattatgttcaaattcatattttcttttgagtacgatcatttgaaaatgttcatgtttcatggatttcatatgttgagtttgaggtttgattatgttactcaagtggttattatgtggaatgggtggaagtaaatgcctagcacatttttatttgggaagaactcatgatgttgtcatgcataatgcactcatcatccattgcattgaagtttcatcgcgatcttatggtccgaccgtaccggtacattgagcatcatatgttgcccgagaaggggtatggtgcagcttcatatccttagagatatggaggcagaagtcattattgcatttgtagccatgtgcattcatgggagaggtgttgaatctattatgtggatgtggataatttggacttgtgcatggtgattctacttggcgttgagtttttagttacttgtttacttgctgcaatttactgttcaaaagaaagaaaagaagtcctgaacacgtggttgtgtaagcacagttgatttacaatgtcctatttgttgttgttatgtttacttgttgagatgtgttatctcacatcttgcattgcttgatgcaggcacctaatttctgctttgggaatagagggatgtagcagcacggccactacacctttaataaaggaaccaccatttaataatgttgttaatcagagttggacaagtctagtgaattgctttgttcttggttgagcgtttattttggggtgggctgagtttcttatcccatttgttttgctttagttgggtcataattaagttttaccacttttgcatttcagtttctactatgtgaattatatgtctttatatcttgtatgagcttcatgtttcccctccttgttatgctagttttcaaaggaggtgctaccggatttttgctatata

SEQ ID NO: 140450 - DNA, 376 bp, Zea Mays
tgcaaatcatccgatgtttgcccattggccattgctttctatccagcgtaacaactcttgcctaaatccgtttcaacggaatccgtataatccgcctggatcgctgctaatcatgcacaacctgacgggaaaaaaatctatataaagtgccatgccctctgctctctgtattccatggtcgtcggactccacaacactgcagtcacggtcgcccatgtctccgctccaaatagtgtgctctgcatcagcatggagctgctcctctcatctctccttcctccccatgcgcgcgaacagcccctctgctcggctccctgctcccacggccgcttcacccgtcggcagtgggcctcagcactccaatcctcggtaagga

SEQ ID NO: 140451 - DNA, 252 bp, Zea Mays
atgcagagcatccaacaactccaacttcccgaagcagctaacaggcgaaccaaacaaaaagcagacagacagcccgaaacgaaaggtctcaacaagtcatcgttgctgggctcaggcacagagcagctccgacttccaatcttaaccctccgccctgcctccggtttttgcccgacctccgaaacattctggaccacgaagaagggaggttcgcctcgtgttatcgttgccgagccacatccactgatgtag

SEQ ID NO: 140452 - DNA, 209 bp, Zea Mays
atgcttgcgttgatggttgcgatgagatcacacaccaagtcgctggcttgcttgatctggtcaaaattgccttccagctcgatgttctttaggttggggttagactggtggtcacggatggatagcttgacgcatgtaactcagcttatctgcttagtgttgaccccacccttgtcgattatgccaccggccagagaggcatccacact

SEQ ID NO: 140453 - DNA, 4397 bp, Zea Mays
ccacatgacaccttcctcagcttttctgatggctgtctccatgttggggtttgtctaatcgaaaacacaattgtttcttctgtggttccaaatggtccaagctcctaggatgattaacgaattaaggccttgccttgcgatgccctgcacttgctcagacacttttccaccagtccatgaagacataatcacctggctgaggcgccaaggtctggaggttaacaagtcctaggaagcggaaccaggattctctagcaaaagggcaatcagtgagcagatgattaattgtttcgggagcctgatcacaaaggaggcatctgttcaaatgatcaagaccacgcctctataaacgatgcgtcgtccagcgtcacctaagagcagtaagccacatgaaaaatttgcacgtcgagggtgcccaggtttccaaatgatatcatagaaagcaaactgtgttgaacctataaacatgctgtcataggcagccttggccgaatattcctcattactagcaaaccagaaaatgtgcttgtcttcactatccatctgcaactccgtattttctaaagcatcccaaagagatagaaagtcagcaagaacacctactgtaaggctcccctaatattggaaatccatctgtcagtgagggcttgtctaactgtcctgatgttggcaatgcgcttggggacagcagataaaagtctaggagcaaagtcaccgatgcattggccatgaatccatttatcatgccaaaactttattgagataccactaccaagctcagagatcacaacagtatggaacatgaccttaactttattagaaatttggaggggcagattcagccaaggccaggagggatcagttttgacaagccacaaccatctcatgcggagtaacaaaccaagctctttgaggctgaaaaccccaagaactccaagctccaaaggccggcacactcttccccaggccactaagtggtgactacctttaacatccttccttccccaccaaaggaaccctttcataatcttgtcgatttccttaaaagcccaagggggcagctcaactgccatagctaagtagataagcaatccggttaagacaaactgcacttgaacttttcgaaccatcattgtcatcaaatctgctttccatctcgacagctgctcgctattctatcaatgataggttgaacctaattcttagtgagctttttcaaggaaagaggaaggcccaaatatttgcaggggaagctagggacagcacaagggagatgatcctgtaaaactgcaatttcatcatgtcaacatcttatagggtacacactgctcttttgaacattatttttcagatcagaagcttccccaaaaggttcaaaacttggagcacaatttggatatcactttgatcagggtgaaagaagaggaccacgttgtccatatacagtgaaattctatgttgcaagggccttgatgggagtggctcaaggagaccgtcaatctcagccttcgaaatcaggctgctcaagacaccaccttatcctttactaatagcctatacatgttccctaatacccacccgcagtcacagcgggaggatctcagtcgcaaagactaaaccgaaaattagtaaactgtacaattaagcctttagtcatgatgtctgcgaactgatgcgaagatggagcatgaaacaaccgaacatgtcccaaagtacaacgatggtgcaccagattagcagtcatgtagacagcactaacattattgcaacacatgacgattccataagcaatcgagacatgaagttcctgcagaagctgacaacactcggcgacgaaatatgcaacaacacggtactcggcctgagcaagaaactgtggtttgacacttggtggacccagagaccaagcctagagtctcgacagcccgccaatcagcatcaaagtatgacgtgacccatgagagaacgaggtgacgaaacgccgatgtggagaccgataaaaagtgtgcctttgacatagcgcaggatacactttatcaaggtggtggaactcacggagattgtgcataaacaagcacacatgttgcacagaatatgccaggtccgagcgagccagggtcagatacttaagagtagttgcaatactcctgtacttagaggggccaacaaccggagaaccgactgtcacggacaggttggtccgagtgtccacagatgtcgctatagagtgacactcggcaaattgcctgcacgttggagcagatccacggtatactgacgctgagagaggaacatgctagccaaagagcacatgatggggatgcttagaaagtgatgcaagtcgccgaggtcggtcattgcaaactccgaatgcagaagagccatgacacactggaggagaggaggcgaggatgatgttgtcgacgtacaggagcgcgtaagtgttagagtatattaggcaactcctaatatggttagtttatgattgattggattgattgtaatcccgaaataaccttccttatgtctaggataaccttcctcatctctaggataggcttcttgccctcaagtcatgtacccctatatattctccctagaggctcaatgcaatacattccaagcattatacacaatctctccttcctacatggtatcacgagcctaggttcaaacccttggtcttcaccttcctctgcctcgccactagggatccggtagctacaggccatctcgccaccgatccggagccaccgggggctaaggaccatgccgccgccggttaggaggaagcgggatcgcgggccaccaccgctcgtcctagtcgtgccacccaacgctgtatctcactgttcgtatcgtgatgcggtgattgctacgcctgatgtgcaaccggctgaagcggtccctaaggtggcagacgctccctccgtgcggacaagtcacgcccaaagggagagtgcgggcggattgtcggttaggttgtgtggggcgtctcaggacgttcaaacatcaggagagaaggatggcgcctggaaggcagttcatctccctgtagggcagagactagctccagaggtggcgcctgtcaggagtgccagtaatggggatccttctcgacctgaagctccggctcggtctgaaggaggatcaaatggccagcacttgacgacagcatgtcgtggtgatccttctcgacctgaggaaattgcctcggtctggacaaggatcaaacttccgaagaatgacatgatcaatgttggtggtggaagcattcattctcgacccgaggctcgtgactcagtctggagaaggatcagttcgacatctgtgtctacggaccaggacacggcacctgtggtcaaggcaagagataagacccacggttccaaaaggtgcatcgtgttggacgtctggccaacacccttgttcttgttccaacgcttgtcaccattggcccatttggctgtaccgtcgtcaccactcttggtagtctaccgccgcctgaactgctcctgtcaccctgcacgagggctgcagtgcaaattggcacctatccgaggaggtgcaggaactggtagcaatgaggtcagtaccagcgatgactttgtcgtcgttggtgaggtgtagctcctttaggagcagcatgtcgcaagcccaagcaaagtcaaggagcacgatggcgttggtgatgtcgtcggcagtgttggagaagcgagggttgttgtcacgcaacaggttgagaacaagttgatcgtcattcacatggtggccaacgtggctgatgtcacaaaggacattggcggagaccttcatgcgctgatagtagtcggcgatgacggagccaccctgttgcaagaagtggaactcggtggcgaggaagatggtgtttgacgccaggttggcatggaagatgtgtttgatgaccgtccataggtcacgagcgatctaatcatcatcctcgatgactaggttgaggacaaagtcgctgacagaaccagagatctagctatggatgcatcagtccacctgatcccaggacagatcatcgggacgagggagaatagagtcgtcgatgtgcgacctgaggccaaacttgtcgcaagtagatttgaagcgggaagcccactttgagtagttggagtgtgccaagtccagggtgactgagacgtgagacttgacgcaggcggtgccataaagatgaatagccaccagttatgtcaaggaaggaagagggtcgttggtgtccatctccgtggagccagaggtggcagagatggtagtgtggtagagggggcggccgacatggcgctgcaggagagatggggaagggtcaacacatgaagggaaggtggcgatcggcatagattaagattggatctaatcagagggagaag

SEQ ID NO: 140454 - DNA, 637 bp, Zea Mays
gtctccctggaaaaaaatctcgccgccgccgccgaagactccgtccatccccagccgcgactctctcttcctcatcttcctccctacgtgcgccgttttccccagcagcgagctgcagctgagcagctcgccctctccagccgcggtgcgcatctgcatggcggtcgagctccccttccatggtttccgcgccctctactcctcccagctggccgaggtccttcccatggcgctcgactttccccaggtccgaccggtgctcctccctgctccctggtgcttcctgctcgccatcacgcatggccgcgacctcgccttggctctctgctgtagctcgcttccatggacaccgttaaatgtcccttgtgtcgtcgtggtgccgtgagccatggccggctggccctgcttccttgcgtgtgctctggtagccccgtcgacctcagcaaactcgtcttctccaagcactatcgtgcctgggtgccggtccgacgacagggctcagtcctggtcccagtgcggacgtgagcttgccctgcagttgcacttcttccccagcgtcagccacagtcactgcgctcggccttaggtgtccaagctccctagccgacctccttcattagtctcaagctccgcccct

SEQ ID NO: 140455 - DNA, 110 bp, Zea Mays
gagtttccatggtcatgggtctagctgttcatactattgttgtatttctaactatcatctagtgtgtgtgggtttgtgcggaattgtaagaggtttcccctttttacctc

SEQ ID NO: 140456 - DNA, 240 bp, Zea Mays
atggagacagcagaagttgcgatgaaggaccaggtgatgaacgccagcaccaccgagagcgcgtaccggccgcacgacaactgcgggtacatcctgcagaagtggacgtccctctcgaacaggatggtcacgcccgcggacgccgacgcggcagcaaacgacagaattgcagtgaccttgcaaaggcgggcacatcataatgttccgttagagttttctttagataaatgttcacggtag

SEQ ID NO: 140457 - DNA, 635 bp, Zea Mays
aagaaaacagaacttataatttcttataatttaaaaacggatgaagaacaagatattgagtcaaatcaaagatgtttgtatgtaacacttagggttggtccatacaattacagagaacaatatagccatataggagccacacaattaccatgacaaactgttccaaacatttaattgcaacttacaacctgatacattgttcccaaagcgaaggagcaagtagacgcagtaatttatacttgagaaactactcggcaacatgctcgttgatcctcactttttactctctggatggcataggccaactgaaaactgacatccacacggcatgttttagttgcggcagcaaccgtccgcttcttgtggtagcaatatgtccagtgagagatgaatcatgtggtccgtgcggagtgcctataatcactggattcaagtttgtttcattaaccctttctgtcagcattgaagacctcgtattaattcatcgccatcagactgccgacagatcaatcatcctctaccccatctttggcccaaaagatggcggcactccctgtaaattgcaaaccaaccaagcaagtgtttgtatgtatgtatgtataagatttcacagagtgtgtatgttgtatatataa

SEQ ID NO: 140458 - DNA, 739 bp, Zea Mays
acataatcagtgatgcttgcccatatatatataaccctttggttgggttcagtgaaggtttcctccctgctcacgaattctgtccaaagataactgcaagggtgttgtggcgcatgtgttcctgctagtattaatcttctccccagtccctagatcgatttgcataagctgttatgtgccaccccctgtgctggtgaccacgcgtgcagttctcccacctcgccatggctcggacgtccttaggagttgctggcccatatgaagcttgtttcgtaatcatctcagagctcccaaaataaagagtgaagattcaagatgaagtggttgctaaagaggactctactccagtgcctggtcatcaagtggatggagccatctaactggggtttaatagagggatttagacctccgtctctgcaacaaagagctcccaaaataaagagcgaagattcaagatgaagtggttgctaaagaggactctactccaatgcctgctcatcaagtggatggagccatctaactggggtttaatagagggatttagacctccgtctccgcaacaaaggcaagccccgatgtatttaccccttcattgtatttttaaaaagacttttatacacttaagtctagtcaaatgtgcattaagtttataggaattgcttggaaactatttgatgcattgactaccttgatatccatgcctttatagatactttgatgaagtatcaaaatatgattt

SEQ ID NO: 140459 - DNA, 1057 bp, Zea Mays
gtgatattttggtgtagagcttgaccaggttcagtgtttctttggacagtgcatgtgagccagcaaagtatatgtgcatgggagccacgttgagttgctcctgcagtgctgctgtgctggcatgccccagaattcatgttcaccaagttgtggtcgagttccatatgcctacctacataatcagtgatgcctgcccatatatatacaaccctttggttgggttcagtgaaggtttcctccctgctcacgaattctgtccaaagataactgaagggtgttgtggcgcatgtgttcctgctagtattaatcttctccccagtccctagatcgatttgcttaagctggtatgtgccaccccctgtgctggtgaccacgcgtgcagttctcccacctcgccatggctcggacgtccttaggagttgctggcccgtatgaagcttgttccgtaatcatctcagagctcccaaaataaagagcgaagattcaagatgaagtggttgctaaagaggactctactccaatgcctgctcatcaagtggatggagccatctaactggggtttaatagagggatttagacctccgtctccgcaacaaaggcaagccccgatgtatttaccccttcattgtatttttaaaaagacttttatacacttaagtctagtcaaatgtgcattaagtttataggaattgcttggaaactatttgatgcattgactaccttgatatccatgcctttatagatactttgatgaagtatcaaaatatgatttacaaaaatgcttagccctgcttagatcttgtggatagaggttgtcttttgcaataatgcctagctcaagggttatcctgaggaaggatggcttctacctgcaagaatattttcattgggagcatatggtgggatcttactgcaaagttctccataatgctcttttcatccttaggaacacaaaacaatcctaagggtggaagtacttagctctagacttgggattggaacaggtgatgctccacccaggttaattaaggattggatgcgtaagtaggcctgcatg

SEQ ID NO: 140460 - DNA, 266 bp, Zea Mays
cagcggttcattacctcggttctttcagttaagccttctgcccacggtgaggtgcgggtctgtggactagcgttgatgccagcgagaaatcatcgatggtctaataccccccgattgccaattgatgactcatatggcttcaacacactccgatgatacacctagagcgccgaatcggagttaagcgccgacgacaacgtaatttgcccgcggcggcccaatgctctccactgccggtgatgggtcacgaggcacgacgctggctt

SEQ ID NO: 140461 - DNA, 259 bp, Zea Mays
tcattacctcggttctttcagttaagccttctgcccacggtgaggtgcgggtctgtggactagcgttgatgccagcgagaaatcatcgatggtctaataccccccgattgccaattgatgactcatatggcttcaacacactccgatgatacacctagagcgccgaatcggagttaagcgccgacgacaacgtaatttgcccgcggcggcccaatgctctccactgccggtgatgggtcacgaggcacgacgctggctt

SEQ ID NO: 140462 - DNA, 297 bp, Zea Mays
aggaactgtcctacggcttggcgtggtcaattttgtggccgaaatggtagagcatcgatgatactcgaagctgtagcatcgtatgatctatggatttggcatgctttttttggcatgcctgggacaaacaatgacgtaaacgtgctccaccgatccccagtatttgaccctatgacaactggtcgaatgccaccagtcaattacacagtaaatggtcatgcgtacaacttcggttattaccttgctgatggtatttaccccaactggcctacttttgtaaaagcaatccgacaccca

SEQ ID NO: 140463 - DNA, 188 bp, Zea Mays
atgtcgacgaccatgattgtgatgcccttctggtagacaacagagatgacctacataggctactccaacgtctgtagctggcacgtgactatctcaaggagcccttcaagtctgaggtcgcatcccgtgagaaggtccatttctccatctccaagtgggcggacgacaagcaggagaagcccaatgag

SEQ ID NO: 140464 - DNA, 100 bp, Zea Mays
tttttttctgcgcgcggaacgggttagggcagaacggcagactactcttaccttcttaataagtagtatagattttggtacttatttgctactagaattc

SEQ ID NO: 140465 - DNA, 1095 bp, Zea Mays
cgatgtcttgaacagatatgaaggcctggcattattgacaagaattgttgggggcactcatgacttctaggagatcacaatttaaagcttctgcgccaggactgctacataagtcatcagaataagttcatcaaccatcttgtcaatcaacttgctgctcacctatttctgaagatagcctgccagctcgaagaacagataaaaatatcgagtgcctactcatttctgaaagctgtagaattggaattgcagggctacttctcagcttttgatggccgcctggtattgttgttgagttcatccgttaagacagcatattatttagcctcttgtcattttcacttgtgttcttacaaaatagagtatctactacatggatatatagggccggcacaatttgactgatcaagcagcatctgaaatgtttgaagagggatcagttgacgacagcgattcttatcttcatgttgtgagggatatccacatgtgcttgggatgttcttttgactaccaagctggagtaatccattcacgttttcaattttttttgtaggttcccaagcaacgtcaccagaatatgtgtcatcatatggtttgatcgggtagataacagagctgcacgatgagctccagtaccttcagcatgagaccgaaaatgtccttccacgtgagcaaggaagatgcaccgacgaactataaagacataattcaaatttgaggggttatttctctactcctttaagaagcgagcaaggatagccaatgcctgagtcgtcgtcggtgactatcgtgcgtggggccagcaggagcagaaagactaggggaagaggtgctagaagcaaggatcagagtgcttgaagtgtgtgaaaaaatgattattcgcatgcatgctagacgttggcgtaacatcacccagctgatggagagattttagtttgctagatgaatctttagactttgcatgtaatagaactgaaagatcacttcagaatttagaaaacatgtatgctattatttttatatgttcatcacacaaattgtattccaaaacaatatatgttggaattcaaagtcaaagattgatctctttctttt

SEQ ID NO: 140466 - DNA, 432 bp, Zea Mays
atgatcaccgcaacaactgcaaacaacaaacaaggcagtcctcaggaatcaggttctttatatgatggtgagaatgttgaggattctggtgaagaggatgttagcatggaattccaagctcgtaagggtgtccctacccacatcatcaatgatggtgaacatatgtcaacaaaagtaacaagaggaaataaaagaattatggcacctgtgcaggaacgactagttagagtcactagacaaagagttgctgaagtaaaccaaatgtctacccatagcctaaatatttctacacaacccagttcaagtgccgccacaaaccatgatttgacccacaaccttattgttcctacacatcctagttccaataccgccacaaaccatgagcccatccaagacatggatactgttgcaagacctactttccagatatag

SEQ ID NO: 140467 - DNA, 1317 bp, Zea Mays
agctgagacaagaactctgagcatgagccgcagaaagaacactgtcctcgcccttgtggcatggatcatgttgcttgcactcttcatcacaacggcgacggcctcactcccatgccaatgctgctggctggtgcagcatccgaaggtgacatgcggccacgcctgctgcggcgacaactgttgcccgcccacgccaccaccgtccacccgctgaattcgagatagatcataaatacagtatcatgatgatacataataaactccgccggaaagttgttatagtatcccgccacttttctgtgagcatatgatatatatgctgcagcatgcatgacaataaaacatctctttggttccatcaggtgctacaacaaaaggagaatttaccatagctttaatatagtatattatctcagttcttgaatatttatcgaccactagatcatttttgaactaaaacacgacaaataaaaatgaacggatgtagtatatagttcccgggaactaatggaaaacagattcagagatgggcataattttcaacaataaattaaattatatatataaatcctggtttcctaatctcatgtggcgacagtgcagtccattccttcctagacctagaagtcaattgtacaatctttctaaacattggcacaaaggtatatcaatttgagaatcaagcggaacccatcattctaaggtacgtgagcacccacaaagctaaaacccagagtccacagcagaccccgcagcatccaccgccacaagaggcgactgcagagctcttgctatcatcaacaccaacaagaaagcggcattcgcccatagatgggtcaaggtatgttatcatcccaagcccaccaaaatcacaactctttgggtcctgcttctgctgctgatagtagctgttgaaagcatatgaaacattgcccttctccccgatgccatagcatgaacctccgtagtacagagtggtacaatccgccatgctgcacgcaagcttcatgtgatctgaaacactgtcaagatcccgagcagggtttgcgacacaccaacgtgatggaaggtacggaacctctttggcattcttcagtactgaatttcccagcccaagattcagggggtatttggcttgtccatcgaaggagaagattccccagtgccgctcaaagtttcctggtagtatgctcttcccctcttcatcgagaaggctgaaaagatatacatcagctggtggcacaccaggtcggagtggagttcccttgttgcttgtaatacgattgataagcccttgattgaatgcccttgctgcag

SEQ ID NO: 140468 - DNA, 1009 bp, Zea Mays
cgtgtctcaaacacacgagagctcctcttgtcttgctcagcaatcatatcgcacgagatactattgactccaagtacagaccagtccagtactgttgtacggcctggttccgtggaacagagatgggcaagcaaaagattgtgctcaagttgcccctggatgacgagaggaagaggaggaaggccttcaaggcagctgtgggaatgaacggtgtgacgtccgccacgatggagggcgacaagatcaccgtcgtcggcgatggagtcgaccccatcacgctcacaaccatccttcggcgcagcctcggctacgcggagctgctcagcgtcagctccggcgacgacaagaagaagggcgacgggtacggctacgggagcgccggtggcatgatgtacggtggcggcggatacggtggtggcaaagagggcaaggagagcaaagagagcagcggcggcaagagcagtggcggcggtgggggctacggcggccattaccaggcgatgccgtcggtctcgtaccctgccgcctaccagcagtacaacgccatgccgccctaccccgccgcctactcctatcctgcagcatacccgcagcaagaacaggaccctggatgcagcatcatgtgaaaaaacatcctacaagttaatctgaggagttggttgaaggtggccgaacacatggagatcagattaacatggttgggttcgtccggacaagatgatccatgctgccttgagctgtgcaacagaggatgatgatccaggatgtgatgggcattatcatccgtgtaattatgtacagggttggccagcaaagttgacggattgatctgttggagttggaggtgttggtggaatgggaggcagagctgttccgcaagattatgattcaagtgcagactaagtagcagcaccgatgtttccttttcgtttctttcgtttttggtaaagttgtagtgtttgttgaagaaaaggattgcaataaaattagtgtttatacactatccgag

SEQ ID NO: 140469 - DNA, 449 bp, Zea Mays
aaataaagaaaagatgtccacgttacctcattatctctactaatccttaagggtggacggagggcgtccaccacggcaccgtgcccccacccgcgatttttttttgcctccgcgcgcgtcttcctcgctcccgcgaatcacgccccgcgcgcgtcgccctcgccgccgattccgtgcgcgcccccgccccgtcataggcgtctcttccccgcctgtgtgatgcccgtcgtagtcccccgcccctcagtccctatctaccggtgtggcatggagcccaagctgtcttcggtcggcgttcgcgaccttcgccgtgtcgtcatgcccacccctgtcctcgtcgtcctgctcgacgcccgccacgacctccatcgtgtcatcatccccacgcccgtccggacccctatcgccagcatcgcagtgcctcccgcacgaggtcgctgcgcttgtcg

SEQ ID NO: 140470 - DNA, 1468 bp, Zea Mays
tcatgcatggtaagtataatcaaatcaccgtttttgcgtgttactaacaacaattgcttcagcatacgcccttgagtttcatttgataccaggtggatacctcactgttctttagggcatggttcaagactttgcagctttggatggtcttttggctaaagacaggatgagttttggtgattttgaagatgaacttatccacctgaagacctagagacatgttcttaacaatcacttgctttgaggttccatttggatacccatgactagatccagtttaatattattgtatatcttttgttctagctatttcaattgtttttctttctatccatacattatcaatttgatgatcctgacgatgcccctgaggtgcatacgcatgatctcgcaacaggtgcagaaaatgacgcccaattactgccctcgaggtgttgttagacttagtgggtcactacgcgaacaatcagtgtagttctaatctgaacattttagtttcatgtaattgttatgctctaacattttttaataaataatgtgccgttgcaacgcacggacataatgaaaattataaatagcacggttgctgagtatgttcgaaaggtatctgttattctggaattctctgaatctaaatgtaaaattgttggttatgcttctgagaggctattttatatggggttcagtattatgtggtgctgccaacttttgtggggataaaaatcaactcaattagcatattactattgttgtaatcatttctggtcatgaaacattggaagcgtcgtaccaagctgcagttattaggcatgtatttatttacacatgtttacctgtttctcatataagtattacaggagggcctgactgcatcaagttggtagagtgttcagcagagctacgaagaacttgaagcagcatttgagccagggaaagaattctgctttgacgcgacagttcgtttaaactaagcttgccactaggattgatcaccagcctcctctaatattgtgacctcattagtagttgttaagaaatgtttgtcacgtgaagcagaattgtgtaaaatatcatgaggcatgagcgtaatgtatttgtgtggcagtaacccataaacacaatgatgctctcgtttatacaatggatcaatacaagtgacggagcaagagcttatgaagattcttcagaagtagacttggattgtgagtatgcaaattgaagacctccgttgaccgtggctctctgagcatgaaccattttccaggttgccttgggattcttctctggtcgctgttttttaatagaattttgtgtcgcgaggtcgcttctgagaactacctgaactaaaagcttcacgcgattcaagattactaggaaattttgattgttcagtgtgtgtgagatgatattttgacagttagttggaaaagtgaagtgtggcattcgtttcggctcaccctacttcggc

SEQ ID NO: 140471 - DNA, 3856 bp, Zea Mays
cccggctcgcaactcccctccaaagccagcacgagagcaaggtcccctgatcgccgccgcttccctcgccccaccgccccagcaccacctgctgacctgcacatctccaccacccgtcctcctctgcgggttctccgcaggacgcgacccttggccgcggcattcgcccgaggaatcgccgctcccgcgaggcctccgtctctcgccgtgcccggatcccccgagctgccttcagggtgcaagatctcttccgtgatccggagccttcaccgtttcctcctctctgatcttagctcgatatcggagcgactggcccgagcttctcttaccccatgggcggcggcggcgggttccggggcagctgcagggttggtgccgtgctgcttttctccgcctgggtcgctcttgcagctctcagccgcttgctgcgtccggtgcccaatggctgcgtcatgacctacatgtacccgacctacattcccatcgccgccacgccccggaacatctcctcagatagatatggcttgttcctgtaccatgagggctggaagcagatcgacttcgccaagcacattaggggactcaggggcgtgcccgtgctctttattcccggcaacggaggaagttacaagcaggttcggtcattggctgcagaatcttttcgagcttatcagaatggtccacttgagcccaccttttatcaggaagcatctagtagtttaccaggagatggactcaacaatttttctattccttcacggtatggccgcatgttggactggtttgctgttgaccttgaaggagagcactctgctatggatggtcagatacttgaggagcatactgaatatgttgtctacgcgattcataggatccttgaccaatacaaagaatcacatttggagagatcaaagggtggtgctcaatcctctcctgacctgccatccagtgttatacttgttggccattcgatgggtggttttgtggctcgagcagctgtagtccacccaaacctgaggaaatcagcggtggaaactatactgacactttccagcccacaccagtaccctcccatcgcacttcagccatccttgggtcattttttctcccatgtcaatgaagaatggagaaagggatacaagactggtgtatcacatgcaatcagttcaaaattatctaatgtagttgttgtctctgtatcaggtggcattcatgattatcagattaggtcaaggttggcatcattggatggaattgtgccttctactcacggctttatggtaggaagctccagtatgaagaatgtttggttatccatggaacatcaatctatcctatggtgtaatcaattagctgtacaggttgcacacactcttcttagcataatagatcctgttgacaggcagccattttcaagcacacaaaaaagagtttttgtgttcacaaaaatgctccaaagtgcagttcctcagtctctgagttcaatgactcatgttcctgcttctctgtcacgaaatttacctgccaatgagaatcaggatgctggcgaactacacaaaaaagattcactttcttgcccatcatccactgaatggactagtgatggccttgaaaaggacctgtatattcaatcaaattctgttactgttttagccatggatggcaggagaagatggttagatattaaaaagctgggatcaaatggcagaggacactttgtttttgtaacaaatcttgccccttgttctggagtaaggattcacttgtggccagaaaaacatcattcgcctgtgcaaaatgaattacctgccagtaaaaagatagtggaagttacatcaaagatggtccaaattcctgcaggacctgctccaaaacaggttgagcctggcagtcaaactgagcaaccacctccttctgcatttcttctactgagtccaggagaaatgagtggtttcagattcatgactatatcagtagcacctcgaccgacaatttcaggtaggcctcccccagcagcctctatggcagtggggcagttcttcagtcctgaggaaggggcaagttcattttctattggtacaataatccgctccagctttgctcccaaagaaatatttctgttggaggatcacccattggctctaaacttgtcattttctgcaagccttggccttctaccagtaactttatcactgaaaactgccggatgtggaataaaaaatcctggtgatcaaatggaagctgagagaaataacctttgtaaattgcggtgctttccgcctgttgccttggcatgggattctgtatctggcctgcacatcattccaaatatatactcagagactgtagtggttgattcatcacctgccttttgggattcacctgaggggactgacaaaactacagtactgattctggctgatccacactgctcatacgaagtcacttctcgtgcttcactaagtgatgcggcaagcagattctttttgttgtactcatcagagattcttggtttcatggtggccataatgttttttggaattatgcgacagacttcagcatgggaatgtgattcttctatgccatccattttgtcagccatagagtctaatcttggactcccaaaggcattcatgtttctttgcttcatgccaatacttgtattttgtgcctttttcattttcacggcggagcaaaaaccaccatttgggaccttcttattggttactctgatctgctacatagttgctaatggtttcacaattttgttgatactaagttcgaaattgcttctgtatgtggttgccattctacatgtctttactaaaagacgatggcaatcatgggggaatggtgttcaatcagcatttcttggtcaattcctcagtttctcctcgtttcagtcagtgaagatgcttaggaacaatccaaatataattgtagcagttgctacattaccactcgtctgtttggttcatccagccattggccttggtctgctacttctctctcatgctttccatgctcattcaaatctatgcagttttttagcagcttcttttcgtagcatcactcagaaaaaggacctgtacaagtccaagatgggcgatggttcagttctgctatccaaaagtaaatccgatgggctgcagcaacttctgccaatggatgatagcccaacagcttcaaaaagttttaccgacagccaactagaactgtttgattatcggcatggcgtcatgatcttgcatcttctaagcacactcatgtttgtgccttcacttgttgcctggctacagagaattggtatgggacaaaattttccctggttcattgattctgctatttgcgttggtgttatactgcatggactttttggatcccaaccaaatgtcagctgctgcatatttttcaagttacctggcaggagaggccgtgaaattggtctgagtttcctctacctcgtgggtggctattattcctttgtcagctccatggcgttggcaccttatagggccttgtatgccatggcgaccattggttatatatgtttcatttccagaattctcgagagaagaaatatggtaaggggtgacattaactctaggaggactcggaagcactcacacagacactgacacaccacagaaagtgtgatttctttaaaattatttgtaagagatagagaatagggttgaggaacctttcctccaacctaagttatctccttttttgtttttttccaaatcttgcttatgtgcatgtgattgtgtacggccatggttttgaaagttgttatcggatatggttatcctcggtgtgtggggtcttcataaattgcatcaagaatagcaaa

SEQ ID NO: 140472 - DNA, 3865 bp, Zea Mays
cccggctcgcaactcccctccaaagccagcacgagagcaaggtcccctgatcgccgccgcttccctcgccccaccgccccagcaccacctgctgacctgcacatctccaccacccgtcctcctctgcgggttctccgcaggacgcgacccttggccgcggcattcgcccgaggaatcgccgctcccgcgaggcctccgtctctcgccgtgcccggatcccccgagctgccttcagggtgcaagatctcttccgtgatccggagccttcaccgtttcctcctctctgatcttagctcgatatcggagcgactggcccgagcttctcttaccccatgggcggcggcggcgggttccggggcagctgcagggttggtgccgtgctgcttttctccgcctgggtcgctcttgcagctctcagccgcttgctgcgtccggtgcccaatggctgcgtcatgacctacatgtacccgacctacattcccatcgccgccacgccccggaacatctcctcagatagatatggcttgttcctgtaccatgagggctggaagcagatcgacttcgccaagcacattaggggactcaggggcgtgcccgtgctctttattcccggcaacggaggaagttacaagcaggttcggtcattggctgcagaatcttttcgagcttatcagaatggtccacttgagcccaccttttatcaggaagcatctagtagtttaccaggagatggactcaacaatttttctattccttcacggtatggccgcatgttggactggtttgctgttgaccttgaaggagagcactctgctatggatggtcagatacttgaggagcatactgaatatgttgtctacgcgattcataggatccttgaccaatacaaagaatcacatttggagagatcaaagggtggtgctcaatcctctcctgacctgccatccagtgttatacttgttggccattcgatgggtggttttgtggctcgagcagctgtagtccacccaaacctgaggaaatcagcggtggaaactatactgacactttccagcccacaccagtaccctcccatcgcacttcagccatccttgggtcattttttctcccatgtcaatgaagaatggagaaagggatacaagactggtgtatcacatgcaatcagttcaaaattatctaatgtagttgttgtctctgtatcaggtggcattcatgattatcagattaggtcaaggttggcatcattggatggaattgtgccttctactcacggctttatggtaggaagctccagtatgaagaatgtttggttatccatggaacatcaatctatcctatggtgtaatcaattagctgtacaggttgcacacactcttcttagcataatagatcctgttgacaggcagccattttcaagcacacaaaaaagagtttttgtgttcacaaaaatgctccaaagtgcagttcctcagtctctgagttcaatgactcatgttcctgcttctctgtcacgaaatttacctgccaatgagaatcaggatgctggcgaactacacaaaaaagattcactttcttgcccatcatccactgaatggactagtgatggccttgaaaaggacctgtatattcaatcaaattctgttactgttttagccatggatggcaggagaagatggttagatattaaaaagctgggatcaaatggcagaggacactttgtttttgtaacaaatcttgccccttgttctggagtaaggattcacttgtggccagaaaaacatcattcgcctgtgcaaaatgaattacctgccagtaaaaagatagtggaagttacatcaaagatggtccaaattcctgcaggacctgctccaaaacaggttgagcctggcagtcaaactgagcaaccacctccttctgcatttcttctactgagtccaggagaaatgagtggtttcagattcatgactatatcagtagcacctcgaccgacaatttcaggtaggcctcccccagcagcctctatggcagtggggcagttcttcagtcctgaggaaggggcaagttcattttctattggtacaataatccgctccagctttgctcccaaagaaatatttctgttggaggatcacccattggctctaaacttgtcattttctgcaagccttggccttctaccagtaactttatcactgaaaactgccggatgtggaataaaaaatcctggtgatcaaatggaagctgagagaaataacctttgtaaattgcggtgctttccgcctgttgccttggcatgggattctgtatctggcctgcacatcattccaaatatatactcagagactgtagtggttgattcatcacctgccttttgggattcacctgaggggactgacaaaactacagtactgattctggctgatccacactgctcatacgaagtcacttctcgtgcttcactaagtgatgcggcaagcagattctttttgttgtactcatcagagattcttggtttcatggtggccataatgttttttggaattatgcgacagacttcagcatgggaatgtgattcttctatgccatccattttgtcagccatagagtctaatcttggactcccaaaggcattcatgtttctttgcttcatgccaatacttgtattttgtgcctttttcattttcacggcggagcaaaaaccaccatttgggaccttcttattggttactctgatctgctacatagttgctaatggtttcacaattttgttgatactaagttcgaaattgcttctgtatgtggttgccattctacatgtctttactaaaagacgatggcaatcatgggggaatggtgttcaatcagcatttcttggtcaattcctcagtttctcctcgtttcagtcagtgaagattgtgcagatgcttaggaacaatccaaatataattgtagcagttgctacattaccactcgtctgtttggttcatccagccattggccttggtctgctacttctctctcatgctttccatgctcattcaaatctatgcagttttttagcagcttcttttcgtagcatcactcagaaaaaggacctgtacaagtccaagatgggcgatggttcagttctgctatccaaaagtaaatccgatgggctgcagcaacttctgccaatggatgatagcccaacagcttcaaaaagttttaccgacagccaactagaactgtttgattatcggcatggcgtcatgatcttgcatcttctaagcacactcatgtttgtgccttcacttgttgcctggctacagagaattggtatgggacaaaattttccctggttcattgattctgctatttgcgttggtgttatactgcatggactttttggatcccaaccaaatgtcagctgctgcatatttttcaagttacctggcaggagaggccgtgaaattggtctgagtttcctctacctcgtgggtggctattattcctttgtcagctccatggcgttggcaccttatagggccttgtatgccatggcgaccattggttatatatgtttcatttccagaattctcgagagaagaaatatggtaaggggtgacattaactctaggaggactcggaagcactcacacagacactgacacaccacagaaagtgtgatttctttaaaattatttgtaagagatagagaatagggttgaggaacctttcctccaacctaagttatctccttttttgtttttttccaaatcttgcttatgtgcatgtgattgtgtacggccatggttttgaaagttgttatcggatatggttatcctcggtgtgtggggtcttcataaattgcatcaagaatagcaaa

SEQ ID NO: 140473 - DNA, 1572 bp, Zea Mays
ttttttttttcaccattgattataattttcaccattgggtggatgagcaagcgttacttagatgtcacataatttcttatacaggtaccctcccatcgcacttcagccatccttgggtcattttttctcccatgtcaatgaagaatggagaaagggatacaagactggtgtatcacatgcaatcagttcaaaattatctaatgtagttgttgtctctgtatcaggtggcattcatgattatcagattaggtcaaggttggcatcattggatggaattgtgccttctactcacggctttatggtaggaagctccagtatgaagaatgtttggttatccatggaacatcaatctatcctatggtgtaatcaattagctgtacaggttgcacacactcttcttagcataatagatcctgttgacaggcagccattttcaagcacacaaaaaagagtttttgtgttcacaaaaatgctccaaagtgcagttcctcagtctctgagttcaatgactcatgttcctgcttctctgtcacgaaatttacctgccaatgagaatcaggatgctggcgaactacacaaaaaagattcactttcttgcccatcatccactgaatggactagtgatggccttgaaaaggacctgtatattcaatcaaattctgttactgttttagccatggatggcaggagaagatggttagatattaaaaagctgggatcaaatggcagaggacactttgtttttgtaacaaatcttgccccttgttctggagtaaggattcacttgtggccagaaaaacatcattcgcctgtgcaaaatgaattacctgccagtaaaaagatagtggaagttacatcaaagatggtccaaattcctgcaggacctgctccaaaacaggttgagcctggcagtcaaactgagcaaccacctccttctgcatttcttctactgagtccaggagaaatgagtggtttcagattcatgactatatcagtagcacctcgaccgacaatttcaggtaggcctcccccagcagcctctatggcagtggggcagttcttcagtcctgaggaaggggcaagttcattttctattggtacaataatccgctccagctttgctcccaaagaaatatttctgttggaggatcacccattggctctaaacttgtcattttctgcaagccttggccttctaccagtaactttatcactgaaaactgccggatgtggaataaaaaatcctggtgatcaaatggaagctgagagaaatagtgagctgctacttctcgtctgtcaatcttttttttgagagcagcataagttttgcaagtgtcttagtctttggtaactttgggataatataactgctaatagcaaatgtagatttctatactactatgtggagtgatatcaacaattgctagatgtccaataacataggatagcatgtaatgctctgtatcttggctgcacatttacactcaataaccttttgtatgttgtatttgtatattagacctttgtaaattgcggtgctttccgcctgttgccttggcatgggattctgta

SEQ ID NO: 140474 - DNA, 780 bp, Zea Mays
tggacaaagtttcatgctgctacaaaggtgtggttcactgacttcaaagagaataagctaactgtttccaactttgtagtcacactttttacttttctaggctttacacctagcctcaaaggcagaggtgtggacacatatttaatattgtccatgttttgttcaggtttatagcgcacttgggcatggcttatgccatcacattttttgcctgttatctactattgaaggagtatgaaagtatttctaacatgaggctgcactttctagcttcagagaaacaccaactagaccagttcaccgttgttcttttgctactatgttcctgtttattatagcagaagaggaaaaatggtcagtgagcacccatatctactatattaaaatatgacacagccattaccattccactatattcaaatttctaagcttctatttgatcatgctctgcatacctcgtgagtgtttaatcaatctcggtgctgatttgttagttgtctttgagagggagttgccgagctttctcaacaatagcgatcgtggaaggcgtcaaccagattgtggatgttgaaactattctatctacttttggatctaagttataggatatttaaacatttttaatgtttgatacctggatgctttatgctttagttatatgtggatgctagaaaaagttgtgtacacatgtttttgacaaaattgtacacacgatttggattgcattcaattgaatgatcgttttattaactgacggtgaattaaatacgttataaacaa

SEQ ID NO: 140475 - DNA, 732 bp, Zea Mays
atgatgatgtcggacgatgacgatgctgagccccagctcaacgcggtggagggctactacttcgttgactccaagaacgagaaggagcctgtctgcttctccaccctgcctttctggttcggggacactgatgatcttcctgacggcaagaagaagctggtgctgcgcgggactggtgacccgggcgtcaaggtgtacgatgaggtggtggcctgcaggctgggtctcgaggggaaacaacccgagtttgcagtgctcacagcaaaaggcagacgttggatacgtctcattaggcccttgaacagctacgaggaaatgatcaggactgtgttgatcacagcgcagatgctgcattttctaaggaggaagcctcatgagccagaaaaaaccttgtggaaccacctttgcaaagtttttaacaagtttgacgttccaccctcagaggacgatttcaggaaccactgctcactgatgaagcagtttgcggcaaaagatcctgtcttagcaaaatcagagattttgcgagtatttattgaaggaaaatctagaaaaaaattcactgaggttggtgcagaccatattgatgtcaagcagccgttcatcactgatgatgagggcatagatgaaatgaatgtggaagatgtcgataatgaatctgatgaagatgacgatgaatatttgtttgattcaatatgtgctatttgtgacgatggaggagacatattatggtag

SEQ ID NO: 140476 - DNA, 1319 bp, Zea Mays
catgtcaatatctaattttctccagtatatacttgttctatctgtcgatgtggtcatattcttctgtgatggcccatgtatgcgctctttccatgcaaaagaaggaagtggtgaagactcctgttgtgttacccttggatacactgaggcagaagttgaggcaatgaaattatttctttgcaagaattgtgagtataagcaacaccagtgtttcatctgcggagtgttggaaccttcagatggagaagcagccaaggtgtttttatgtaacaatgctacatgtgggcacttttaccacccgaaatgtgttgcccaacaacttcaccccatcaacattgatgaagcctcagaattggagaagaagataacagaagggttttcatttacatgcccaattcactggtgctttcattgcaaaggtttggaggatagaacacaagaacctttgcaatttgctgtttgcagacgctgtccaaagtcatatcacagaaagtgtttaccaagcgaaatttcctttgacgaaaatgaagaggacgatatcatcatacgggcttgggaattatcaaaaagaattttgatatactgcctggaccatgagattgatagtgaacttgagacacctgtcagagatcatatcaagtttccaaagattgaaaaaccacttcaatttgtaaagaagggatctagcttgttgcctaagaagaaaaagaggacttacagtgagacagttcttgagcaatctcccaaagatactgtgaaaaggaaaagcaaggttcacatgctagaaagggaacaaaacaaacaagacaccagagaagtttctgcaaagagtttcactcaaaaccttgttgacacacctgtaaagaaaaaagccaagttgaaagagaaaatacagttgccgtatgtggccaaggatcattttataagcagtccaaaatctgtgaaagagcaagaacaagagttggtacctttgcccttatctgccatcaggaagagttcatttcctaaagtggacagtgaaactgaaaagagggtgattaccatattgggaaataaagtgtcttcattgacaataaaagatgtaacgaggaattgcagtttgccatcaactcatgtatactctggcagattgactgacaagataccactgggaaagattgaacgttctgttcaggctgtagaagcagctttaaaaaagctggaaaatggaggtagtgtcaatgatgctaaagcagtatgtgaacctgaagttttaaggcagcttgcaaggtggcatgtaagtaaatactgaataaatatttatccattgttttgcacaa

SEQ ID NO: 140477 - DNA, 870 bp, Zea Mays
aaatactttaagtgtataatctcttattcttcaaatatttggaattatttcacagcgaaatttcctttgacgaaaatgaagaggacgatatcatcatacgggcttgggaattatcaaaaagaattttgatatactgcctggaccatgagattgatagtgaacttgagacacctgtcagagatcatatcaagtttccaaagattgaaaaaccacttcaatttgtaaagaagggatctagcttgttgcctaagaagaaaaagaggacttacagtgagacagttcttgagcaatctcccaaagatactgtgaaaaggaaaagcaaggttcacatgctagaaagggaacaaaacaaacaagacaccagagaagtttctgcaaagagtttcactcaaaaccttgttgacacacctgtaaagaaaaaagccaagttgaaagagaaaatacagttgccgtatgtggccaaggatcattttataagcagtccaaaatctgtgaaagagcaagaacaagagttggtacctttgcccttatctgccatcaggaagagttcatttcctaaagtggacagtgaaactgaaaagagggtgattaccatattgggaaataaagtgtcttcattgacaataaaagatgtaacgaggaattgcagtttgccatcaactcatgtatactctggcagattgactgacaagataccactgggaaagattgaacgttctgttcaggctgtagaagcagctttaaaaaagctggaaaatggaggtagtgtcaatgatgctaaagcagtatgtgaacctgaagttttaaggcagcttgcaaggtggcatgtaagtaaatactgaataaatatttatccattgttttgcacaa

SEQ ID NO: 140478 - DNA, 359 bp, Zea Mays
ctgtatgataatgtaaacgatgtttgaagtccgcatactgttatatgactatatgagatcttctatttgcagggtgattaccatattgggaaataaagtgtcttcattgacaataaaagatgtaacgaggaattgcagtttgccatcaactcatgtatactctggcagattgactgacaagataccactgggaaagattgaacgttctgttcaggctgtagaagcagctttaaaaaagctggaaaatggaggtagtgtcaatgatgctaaagcagtatgtgaacctgaagttttaaggcagcttgcaaggtggcatgtaagtaaatactgaataaatatttatccattgttttgcacaa

SEQ ID NO: 140479 - DNA, 1271 bp, Zea Mays
ccccacctgactaagacgcctcccctagcgcctctccctgcaccctaactcgcgcctctacctgggccatgcgcggtcccgtcgactcggcctacgccatgcgcggccccgtcgccttcgcctacgccatgtgtggctccatcgaccccgcccacgccatgcgcggctccgtcgtcgagcggtgcggccctgtcgtctggctcgcttcgtcgaccccaccttcgtctaccaccgtcgcgagcggcctgctacctcgccatccaccgtcaccccgaccacgttcacccgatggcgactcgccgggcggaggacgttatccgccccgtcgagcggttggtcctgacggtcgacacacctctggacgcctcactagtttcctccgttcgcgctgccctcagcgatacccactggcgtcgcaccatggaggagtacgcggcctactggccaaccacacctgagacctgtgccacgtccaccaagcaccaacgtggttattagcaagtggatattccgtcacaagctgacctcgtatggcttactcgaccgctacaaggctcgttgggtcatttggggtttcacccagcatgcctcggagtggactacgatgagaccttaagccccgtcgtcaagttcgccactgttaaggccagcctgtccctcaccctttcccgagactgggcggtccatcagctcgatgtcaagaatgccttcctccacgacactttgacagagatggtctatagcagctagcccaccgacttcgtcgactctgctcgttcggatcttgtgtgccggctgaaccgctccctgtatggcctcatgcaggcgccgtgggcctgatacagtcgattcacttcctacttggcctccctcggcttcgtcgaggtcaagtcgaacacgtccctgttcatctaccgatgcggcgacgacactgtctttcttctactctaagtcgacgacatcgtgctcacgacatccactaccgactttcttcagcgcacgatagtcgccctttagtgggagtttgtgatggacctggggcctcttcaccactccttggcatcaccgacgagcgacgacctcaggctctcttcctccattagcgctagtacgcacttgacatcctgaagcgggttggcatgtccgactgcaagctctgctccacgcctgtcgacactcagacaaaactctctgaggacgacagaccaccggtcgtcgacgcaatggcctactggagcctcaccgccacgcttcagtatcgaggactgagc

SEQ ID NO: 140480 - DNA, 229 bp, Zea Mays
gatcgtcgaaaagtgactgtaatctggtggcgagagcgtgccaagcccccacgcgagagggtaggatctatcgtgcgggccgcaacatccacctaggatgggcccaacatggcatagcggccgacaggggagtggcgccggcggcaagcgtagccgacgacggcgggggagggctagcggcgggcgacatggagatccagcggctgacggatgtgagaaagtgggagag

SEQ ID NO: 140481 - DNA, 96 bp, Zea Mays
cagagtaaactcagagtgtatatatcaccttttattcatggcacaaggtacagttcctttggtagacattttacaaaggtggagaaacttgttgag

SEQ ID NO: 140482 - DNA, 456 bp, Zea Mays
atgccacatggcccacatgtcatagagagagggttcttctaccttgactcatgcaccacgtacacagacaaggaggaggtcgtgcatggcgctgagcatggcgagactgcaaggaactcggcgtcgctgggctggaaccttggcgcggcaaagggaatgtctgtcgatggaggaaggggtgaggtccggcctgccgatctcctgcgcgagctgggcgccggctatagcagccatggggagaaggaagcgtcatgggaggagaaagggctgctactcctggacttgtgttggcatggggatgaggagaggctgctgctgtgttttggaacagagagaagtggcgtgtgggggaagggaaggagagggggtggatggtgggatattttaaagaggagggctggttgcttaggagctaaggaatggggttccttagataagaagcaagaggtagcttag

SEQ ID NO: 140483 - DNA, 75 bp, Zea Mays
ctgagattggggagggtgtcggtgtttggtaccgacgacgcactacggtgtatcccacgtagtgcttttgggagg

SEQ ID NO: 140484 - DNA, 2431 bp, Zea Mays
cagaccctgagtgtgcccaagccctagtgaatagtagatttctgctgtggggcaaatgattttagccgtcttatgaaagaaaaactcgacaaagttcagaagaagtgccatttcaagaattatgatcttatccaaccacagaatcgcttctgctttgaaaagagggattggatgactgtgcagccaaacgagctgcctcatggatcccaactaattatgggtcttaatcctccttttggagtcaaagcaagtcttgcgaacaaatttattgacaaagcattgacattcaagcctaagctcattgtactaattgtccctaaagaaactaaaaggttagatcagaggagaacaccttatgatttgatttgggaggacagtgagtgtctttctggcaagtccttctatttgcctggttctgtggatcttaatgataaaatagttgaagggtggaatgcatctgcgccacccctctatttgtggagtcatcctggttggacaaagaagcacatgcaagtggctgaagagcatggtcatacttgtatggggaagatagcttgccatgttgaagagagtaatctatcagatgacctgtccgtgaggaaacaatctgatgctacaaacaaactgaactcgagatcagggaaagagactccattcaatgacagaatgtccaatctacttgatgatggttctgctaggaagcaagcaagatctgaagaagagaagagaactctagggaagatagaacaccatgtgaaaaaggctaatataccagataacctcccagtgaagaaagaacctgaagcttccagcaaagtcatgtcgcattctggaaaagatagaaagattggcagatacaacaggaggagacatgacaacaggagcagcaaggggacacctgatcacacagagagcctcccccctgaaaagcaagtggaagttgcatatgaggaaacaagagttattcctagcaaaaagattgctcataatgaaaaaaagagcgcgcagtacaactacgagcaaactgcagcagggatgccaaacatgaggtctagaggaggggattctgacatgagtatctcacccccagtcagttgcaatgctcgaagcaaacccatgagctattccctgacgagaccaattgaacacttggatacgaatgctcaccttttggcagaagaacctagtgactctgtgctcaatagggttccaaatcatgacagttatttggcaatcaaagaggaatactgtgatggatttaagaggaaaaatgatcctatcttcagtcacattgatgatagctcaaggatgaggggctccagcatcgaagaagtgaccaagccgtatattactgctccaaacagtgatccgtggtctaaaggagatggcagcttttacaggcatccgagctcagaagatttaaacgctaatgctgatgtgcttatgccaggatacagtgcaagatatggacaaattggtggtgacagtaacccacaagctagtatggtcccactagcaacagattcaagactgcatggtggaacggttgctgataattacctctcggcaagatactcccttggatcttcaggtgctcgcgttagccaaccagctccaactgttcccccttttgggctctcaggtgcaagttcacaacgaggctcagtaatggacaggtattcgtatgggctttcgggtccgactggaacacagcgctcagttattgacaggtatgcgccgtccctcgatggaacgaacacaacaagatcgaggagctccttgcctgagcagtacccgttcggacaacctggctcttccggtggcgggtggcctcatcactgatcgctggaacttggtcctcagatttgaccagcaaaagtgcaaccgatttcttgagtccggtggagcctacaacctatctacggcctaactttttggatcctactagtcgtttcttcctggcgccttcgacgaagacatcacctgtgtctaccaatacagaagtgtagacttcaattcctacaaatacagaagtgtaggcttcaatcctattgtttgctctggatttctgtttatgagcgtatttacaagagtatgtttggtctatgttagtatattaggaatacaattccaaaaccgttgtaccgtgccaaagtttaatactatacgtttgggtctgtcgatgagaaaaaaggacgagtgggtgagaagatgctgccctccgcagaactcgatcaggccggttcctctgcgcgtcctgctatgagaggctaacctgagcccgacagaaccggcttggtcgatttgggacctggtaggccggtatttttttattgaagtgtaactttctaaattaggtcttgttggtttgcgttggattgcgtccggaatcgtttcaagtttatataaattagagaagcaatccggttag

SEQ ID NO: 140485 - DNA, 78 bp, Zea Mays
tataactcacactgaacagataatggtattttcgagtataattacagacatattaagccacaacatagatatatacat

SEQ ID NO: 140486 - DNA, 1068 bp, Zea Mays
actgacaggatatcgccacatgattctactggggttaaaattcttatattattatctctgtttcattcagggtctaaatatttttaggtttgcaaacagaataccacttctctttgaacaaggtgctgatgtcatcacaagaactgctgcaaaaaggatctcttggagcagctacaaaatcaatcaacagcaagataagattggtgtctttgtgagcattgtaagtacaaagatacctttcaaaggaaccggaaaggagtacattggggatgacataactgaaatatcatctgctgttaagtcagccctgaagcagtgctgtcttcaactgaagtctaagattgtgaagaaacttcaggctcgtgagcggcaggacaggaaaaggaacctgaacagatatattcctgatgttgcaagagcggttatggaaactctagtagaaattgcagatcaatctcccccaaaacggccacgttatgataaggaagatgaggaactccttgagaaggtaaattctcaggaggtaacggagatgacatttagagactgcttgactcagcatgttgaacaggtcgactatgaaatggcgctggactacgccatgcagagtggagtaagcgaggagccccgagaagcaatatatttgaactcacttgaaggatcttataagtttgttgacttacagagtccagtcttcgtgttcagatttgttcattgagaagtgaaacttacagttgtacacgtccatcgataccaagttcccatagtacctgggatggaaactgtccatgaattatattgatgttgtacctgaattttatgcttaggctgttgtgactgagctgttcatgtagcataggcattagtacattacaagttgctaagtagcttgagccaaggattcctctgtatgttgcttttagggagaaaataatatttattacatgtaattcaaactgcattgggtccaaaagttcagtactcatgagtcagaacttgagacattagctatataattctgaaggagaaaatataaaagttgatgcggctgcttgccacatgctgtcg

SEQ ID NO: 140487 - DNA, 291 bp, Zea Mays
gagcaccgagcgaggaagaaaaacgccggcaccatcgacattggcttatgccatcgcttgaacccccaccctgtgtccggtggagtcgggatacatcctccgccttgatcgaacaagaagattggcacggagatcactagagacctggggattcctcaccggagcagtgcgcctccgggaatccatgccgcacatggctggcatcgttgagggcctactcattgacgaacaagtgaccgaggacctaggtgttcagtaggtggaaactgttgagcaggagctcattgaagg

SEQ ID NO: 140488 - DNA, 1570 bp, Zea Mays
ccgtctccatccagtcgatgcgtgcctctgcagtctgcaccatcgctttcctggctgtgctgctccctctcgtcttccttccctgccatggcacttctctccctggtgatttcccatggccgcctctcaccctcctctgccatggatgctagtcaccgcggcctgcagagctcccttggtgagcgcccaggtcgttcctctccggctctctctgctggcggctgagttccctggaagccgtgctctgctcgccatggatgtcgtccaccatggtgctcggcctaaacgtcgattccctcgtcgcagtgagctccagccgattccttgcctcttccccgtttaaatcatggagcatcagccgctgttccctattcccggcagccgagcccctgcgcgcgcatcctcccgcgcagtccccagcgccaccggccaacctcgccggccgagcttcctcgccttcaatccttaagccgtcgcgcccctcagctcgctggccgtgacctcgccaaggtttttcccatggccggctcactgctcaacccaaaccgaggtcttgtacgaaacagcatctcccatggccgctgcgtcgcgttccttgtgctagcgcagctgaacgtcatactgcgcagtgttttgtccgacgtcgagcttagctcagtctctgtttctctgtgcacgtcgagttccttgccgcgcgctgagctttctgtcggtctccaactcgccatggtgtccaactcctgtaccaaccgtgacctacgcttggtcttcctagctgcgttgacctgcgtcgacctctgctcacttcgctcgggatgtcgtgctgggtcgctccatacttggtgcacacccagccgggcgtcgcgatgttgtgcaccatgtgtcacccgtcatcctcatcctcaccatggccagcagcttcaaaaacatggacgcccaagccttttccccatctttcacgcccacctcggtcttcatcctcaacctttgccaggaattcggttaattgggcgaaccagaagatctccagaattttatggatgaagaagaaaataaagtcgaagagtgacgctcgctacatgctcgacgaaaggcgtgaactgaagatttatcactattcctcaattgccgaattaaattttattgaggtgagtgattcgctactcctccataatagatcgaagcatggaatggtttcgtatattagatgcgataattttcttgtcgtggttaggatgcgttgtggctgtattaaatattcgttgatgtatcatatgtgcgatgtatgtttgaattggtgacgagaaggataggtctagtatttttattgactagccatcatatttttcaggattatgctagttttgtttattaagatgtagtcgatgctcggctctagtagtcattattttctatgttcggtgaccgattaaatgtcttaagttgatgagaacgtagattagacaaggagtgcttaggtagacgtgtaggtctagtacgcttgaatcagttctatgtttacgacgtgaagtataacgatgatgcgtggaataaatttagtatttaatta

SEQ ID NO: 140489 - DNA, 543 bp, Zea Mays
atggcgagttggagaccgacagaaagctcagcgcgcggcaaggaactcgacgtgcacagagaaacagagactgagctaagctcgacgtcggacaaaacactgcgcagtatggcgttcagctgcgctagcacaaggaacgcgacgcagcggccatgggagatgctgtttcgtacaagacctcggtttgggttgagcagtcacgaccagcgagctgaggggcgcgacggcttaaggattgaaggcgaggaagctcggccggcgaggttggccggtggcgctggggactgcgcgggaggatgcgcgcgcaggggctcggctgccgggaatagggaacagcggctgatgctccatgatttaaacggggaagaggcaaggaatcggctggagctcactgcgacgagggaatcgacgtttaggccgagcaccatggtggacgacatccatggcgagcagagcacggcttccagggaactcagccgccagcagagagagccggagagggacgacctgggcgctcaccaagggagctctgcaggccggtga

SEQ ID NO: 140490 - DNA, 1302 bp, Zea Mays
gacgatatgagcccctcgcagatttggttccctcccttatcctattccctcgtgtcatggcgcttctcctgcgcctcgctgctccgtcggtgccgccccggcggagctccggcctcagagcattgccgcgcgtcgtccttccggaggtcgtttccaaacaatcatttcttcgtttactagttgacagcactgcaagtatgccctgtcctattaagtgttctgcggctcggtgtgccccatcattgactgaacacaacgattctaggaataatggcatccatgcatctagtgtatatggacatgatctcatgaagtccatgtctgatctccaggaagttgtattttcctcctttagcaaagcatgtcttctcagtagttgtatcatatatggtctaccacccagttgtatagcagaaccatgtgagcaagaatactttctccctaacatgcctttgctgttcgcaatagccatggttggtgctactgttggagggctccttgcgagacagaggagaggggagcttgcacgtctaaatgatcaattgcgtcagataaatgctgcattgagaagacaagccaagattgaatcttatgctcctgccttgagctatgccccagttggtagcaagataccagaatcagaagttattgttgatcctcagaaacagcgcctaattgcatatctcaggaccggaaagaactatctgagaaaccaagctcctgacaaggcatttcctgagtttaaggcagctcttgatcttgcacgatctttaggtgatcatgttgaagagaagaaggcagcacgaggattaggggcatccttgcaaagacaaggcaagtacaaggaagccataaattatcattccatggtgctaaacatctccaaggtgaccggagaggatgcgggtgtcactgaagcatacggagcaatagcggattgctacaccgagcttggtgagctcgagaaggcaggcaagttctacgacaagtacatagcaagattggagaacgaatgagaaaacagtgctgattggcaaatctgtgagagcagaaacaaagacaaggctaatcatatctctactcttgtcgtcatgtattctactatagatgtgcagttcccagctggaactgatgtttgttatcatgattcaagtttctttttggcagaattatcccagatgtttaggtacagatcagtatcatgctgtgcacgtagttgttttgttaattagggtctcaatggtccgtacaggcattcatgtcaatctgctagttgcgccggcttaattttatagttttgct

SEQ ID NO: 140491 - DNA, 1405 bp, Zea Mays
cgcagatttggttccctcccttatcctattccctcgtgtcatggcgcttctcctgcgcctcgctgctccgtcggtgccgccccggcggagctccggcctcagagcattgccgcgcgtcgtccttccggaggtcgtttccaaacaatcatttcttcgtttactagttgacagcactgcaagtatgccctgtcctattaagtgttctgcggctcggtgtgccccatcattgactgaacacaacgattctaggaataatggcatccatgcatctagtgtatatggacatgatctcatgaagtccatgtctgatctccaggtatgatggaagttgtattttcctcctttagcaaagcatgtcttctcagtagttgtatcatatatggtctaccacccagttgtatagcagaaccatgtgagcaagaatactttctccctaacatgcctttgctgttcgcaatagccatggttggtgctactgttggagggctccttgcgagacagaggagaggggagcttgcacgtctaaatgatcaattgcgtcagataaatgctgcattgagaagacaagccaagattgaatcttatgctcctgccttgagctatgccccagttggtagcaagataccagaatcagaagttattgttgatcctcagaaacagcgcctaattgcatatctcaggaccggaaagaactatctgagaaaccaagctcctgacaaggcatttcctgagtttaaggcagctcttgatcttgcacgatctttaggtgatcatgttgaagagaagaaggcagcacgaggattaggtctgttcattcttttgtgaattatagttgtatggtttatttttgcagatagttccatggaattgtgagaatctttaaataggttcctttttgtttttaatttggttaaatggtacatgatatgcaagataacgagggaaaatgttttccttgaagttctttttccccttgcgttacagcaaaaaatgaaaccacaacacagtctgacgtctttgtgaaaagtaacgaaattgctttgcattctccaggggcatccttgcaaagacaaggcaagtacaaggaagccataaattatcattccatggtgctaaacatctccaaggtgaccggagaggatgcgggtgtcactgaagcatacggagcaatagcggattgctacaccgagcttggtgagctcgagaaggcaggcaagttctacgacaagtacatagcaagattggagaacgaatgagaaaacagtgctgattggcaaatctgtgagagcagaaacaaagacaaggctaatcatatctctactcttgtcgtcatgtattctactatagatgtgcagttcccagctggaactgatgtttgttatcatgattcaagtttctttttggc

SEQ ID NO: 140492 - DNA, 1282 bp, Zea Mays
cgcagatttggttccctcccttatcctattccctcgtgtcatggcgcttctcctgcgcctcgctgctccgtcggtgccgccccggcggagctccggcctcagagcattgccgcgcgtcgtccttccggaggtcgtttccaaacaatcatttcttcgtttactagttgacagcactgcaagtatgccctgtcctattaagtgttctgcggctcggtgtgccccatcattgactgaacacaacgattctaggaataatggcatccatgcatctagtgtatatggacatgatctcatgaagtccatgtctgatctccaggtatgatggaagttgtattttcctcctttagcaaagcatgtcttctcagtagttgtatcatatatggtctaccacccagttgtatagcagaaccatgtgagcaagaatactttctccctaacatgcctttgctgttcgcaatagccatggttggtgctactgttggagggctccttgcgagacagaggagaggggagcttgcacgtctaaatgatcaattgcgtcagataaatgctgcattgagaagacaagccaagattgaatcttatgctcctgccttgagctatgccccagttggtagcaagataccagaatcagaagttattgttgatcctcagaaacagcgcctaattgcatatctcaggaccggaaagaactatctgagaaaccaagctcctgacaaggcatttcctgagtttaaggcagctcttgatcttgcacgatctttaggtgatcatgttgaagagaagaaggcagcacgaggattaggggcatccttgcaaagacaaggcaagtacaaggaagccataaattatcattccatggtgctaaacatctccaaggtgaccggagaggatgcgggtgtcactgaagcatacggagcaatagcggattgctacaccgagcttggtgagctcgagaaggcaggcaagttctacgacaagtacatagcaagattggagaacgaatgagaaaacagtgctgattggcaaatctgtgagagcagaaacaaagacaaggctaatcatatctctactcttgtcgtcatgtattctactatagatgtgcagttcccagctggaactgatgtttgttatcatgattcaagtttctttttggcagaattatcccagatgtttaggtacagatcagtatcatgctgtgcacgtagttgttttgttaattagggtctcaatggtccgtacaggcattcatgtcaatctgctagttgcgccggcttaattt

SEQ ID NO: 140493 - DNA, 571 bp, Zea Mays
ctttcaagctctgtttgcctctctttgaccgttgatgctcatcttggttcgttccgcgccagctgccagtcgaacagccacgtccggtaccatgtcggatgcgcccccaacaagttctctactcgcacaacctccttgctgctcgtcgccgccgatctgcttgtggtgctggtgctgcgccgctcgctatgccgcttcaccaccgtgttccatgctaccgagatctccttcaccgtgtcccgcgacaccgagagtccctgtccgaagctccatgcgctgcgccagtctccctcgccagcgccatcaaacccgccatcgttgccgtaccttgtcgccagttactgcttgcctgctacgccgtcgtgtgtcgtagccggagtcgtcgccatcgtcgttctgggcacctcttcggtgctcccttctcgctgcggcgatctgtttctatccacgatccgaagatagaagaaaggtccgatttattttcacgtcttcagttaaacatattttagctctacgatatttttcagtttgtaaaaaatgattaattagagttcaaacaattgggttctga

SEQ ID NO: 140494 - DNA, 849 bp, Zea Mays
tcaaaacagtggcactaattgtaattgataaacaataatattacaaaattataggactgaaatgggtcaatttggactaaatatggattttctaaggattcttcttccctaccatgacacctagcgcggctatggagtcgacgacgtggttgaccacgtcagatggcggatccgtggccaccgcatcagaccgacgagcaaattcggacgagtccgcccatcacctcgctcccgggagttacctctaggtttgctgcacaccggtagtccctcgccctcctcccgaggccggaccgtcagccaaggtaggatccgaacgcgacggcgacgagctcggcttgcagctgcccagcggcgaaccacggactccataggaaacaaacccaataccccgatgaacttctatgctcatcagcgaacctctctagcaggccctggtgccgcgaccttcgctccacatgatccgacgaactccccctttctctctcctcgagtgcggctccagatctcccctgttggtttcctgcgctcaccctctctctccaatggccacgacacaccatgggcgaacgcgctgccttacttctggttgactagggcggtgagttccagggccatgatcgctcctcttttatgcgcagcgaacgagtggtcaattcccctccggactgcaagggatccgcaccccacggatctctccgtccactgcgcgcgcgtctggtaggaggagtaacgtgaagctaggcagtgggtcccgccagcggccagccccatccatccgttggccgcgtgagcgagggacttcggtggatcctggcgcgattcagttgcgcagctgagcggatcttg

SEQ ID NO: 140495 - DNA, 339 bp, Zea Mays
atggcgaagaggctgctcccgtcgctgaaccgggtgctggtggagaagctggtgcagcccaagaagaccgccgacggcatcctcctctcggaaacatccaagcagctgaatgctgctaaagtggtggctgttggccctgagaggatgacattttgtggactgattcagatcgcgggcaagcgggtggtgagatgcgtaggatttgaagctgggagcagcggcgggacggcagccggcaggaggtactccatgacggcgtcgtgcacgggcgccccgggggtgatgaggccgacggccgtggcagccaggccggccatgatactgaccagaggagagtag

SEQ ID NO: 140496 - DNA, 612 bp, Zea Mays
atggccttgatgttgtcgatgaccgaaattcgtttttcggttagtagcgaaaacgggaaaaattatcgagattcggtgattccaatgcgggatagtaaacagtggtccaggctgggatgtcaggatccggaggtggagatcatcttcgacagtgtaagcgtcgaagccgtggtgcctgtcggccgacggacaacgcccacgcttcccaacaccatcatcaactgtgggaaggctgtaatggattctgtgctcatgcgccgctccagggaagaaacgtttaaaatcatagatgcagtgagcgggacaataagatcatccaggtgcttttcttgtgtggccagaatgacacttcttcttggagcacccggatcaggaaagacgaccctgttaaaagcactggcaggaaaactagattcttctttgaagatccatggagatgtcaaatacaagtgtaatggggaaacaatgtcatctacatcgcagcacctctgtgcgtacgtcagccagaatgacctccatcatcccgaaatgacagtgagggagactattaatttcgcttcaaacatgcttggggccaacaatgaattcgggaggggggacatcctcacttga

SEQ ID NO: 140497 - DNA, 556 bp, Zea Mays
ttctctggcatgataactgggatggtattcccaaagcaacacagtatccagaactttggtccttctctgcttgcaaagacatcattgtactacaagcaagattggttgactcccaagaactgttccatgcaccgttgtccattgaggcctttgttcaactcttcaagagttgaatgattgcttggataatcttccacataataatcacaaagacaaatggagttgctctacttcttctagcttattttcctcgcaaaagatttatgctcatctgatgggtaaccagtggacacatcccattttctcttggttgtggaaatccaaatgtcaacccaagcacaaggtgttcttttggctactactgaaagacggactaaataccagagcttttctaaggcagcggtccatgtttctggactcttattcctgtgacaactatgtccttcaagttgaagagacgaccattcacctcttcttcagatgcaattttgctaagagatgttggtcactgattggaatctctccttcacattctgcggatttactcaacaccatt

SEQ ID NO: 140498 - DNA, 522 bp, Zea Mays
cctgaggaaggagcaacgatgatcagtgccacggagcggggcggctacacggcggaggatgacggccgacgagcaattcccgccgttcgagtgctagtctctacggtccgagcgcgcgtacggtttccccgtggttcggcgaacacctcgacacacccttaggacccccaacttgaggattgagcaatggcactaacctgcgcatggcacaacacgagttaatggtctccagcgagcaattaaaaccccccaatgtataattccttctcccgcgaccctccatgcgtcaaggaatgatcaatgaaggctacgaacacaaccatacctgcggtggtgcggtacgggagtcaatttcctcccgcgtggtacggagccgaggtgccgccgagctctggttctcggttccgaccacgcctagccacgacaccgaagcagtcaccccgacgcgaacaggtcaacaccttccgccaggcccaaggtcagaaccccggcgggactaggcacgacaacaatgcgcaagta

SEQ ID NO: 140499 - DNA, 222 bp, Zea Mays
gcaatggaaattgatcctgataattcaaccttgtatgcaaagaggagcctttgctttctgtacacaggctatgaaggaaaggctttggaggatgctactacctacagagatatgcaaccagctcttgctctggtcaagggaaggacaatccgtgaagaaaggttattagtgtacagggaagaaagaaggttgttactgcacaggaaaaacagaggttcctag

SEQ ID NO: 140500 - DNA, 1047 bp, Zea Mays
atggagagtgaaggctctgttggtgctccggttgatgttgatgcatatgaccctatggctgatccaaagcggagagcaaagtccaatgatcacgaatggaactatggctattggacagcaacttggaaccgagataaggtcgcatgcagtattttcaagaccgtgacaactggagggatcaaaaggttgaaagaacatcttgcagcctctaaaaggacgagagctgcatctcagtttaggggagcagctccacaaccatccaacatggaaaaagaaacagaaaaaattgcaaccatgctttggagaactccggaacaagttgtggatgacaggcgctcatcagggtcgcaccaaagcaccatagaggctagaatgaagctaaaggctgacagagattatgtgaatgagcaatgggcactgtggttctatgagtgtggcattccttttaatgccattagttcccagaagtttcagattgcttgtgaagctcccgcacaatatggttcagatatgctagctgatttgcttgagagaattgatattggaaaatggaaagacttcaagaagcctactgcacaagccaaaagggtcaccagttttatttataggcatggaagaattttaagtgcaatgagggagaagacaggtgggatggatctgatgcatacaaagaagagaaatcagttgttacacaagaagttgaatgacttggtctatgtttcatacaattggaagatggaaagtaggttccaaatgagaagggagaaagccggctcaagttatgactcgttagttattaaagactttgattgggacaataagtggatagacccatcagtggcagaccaaacctacacaaagcatgcaagaatgaggacacaagttgaagaagatggagaagaagcacatgattctactgatgatgacattgagcctgatccaccagatgacatagatgtgagtgatgttgatgaagcttttggtggggaagaaggcagagaagacaatgttgatcccattgttgataagtctgacaatagatattga

SEQ ID NO: 140501 - DNA, 2300 bp, Zea Mays
cgtggcagattggcggcaccacagaattagctatcacacgcctccaccccacacgctctatcatcaagtccgcagcatcccgacgaactcctggtgtcctggcctgcacccaaaatatccatatccttccgccggctgccaaataatctctttcttgccgagatcggcgcgtatatcttttccggtgtccgatgattcatgcattagcaatttttgactcgtgcgtgcgtgactacagttgcatgctatggccatggtcaccacttcgccggcaactgtgcagccatcatcatgcaagcacacgagccgcggcgcggcgcggtgctgccctcctcctctgctgtcctggaagacacgaagctttgggcagcaggtgacgacaagggccacggcggcgagctcccgtgggcagcccgcgggcgtggcacaggcagggggagaagagggcgacagtatcaggcggctgcagaacgggtcggacgtgcggggcgtcgcgctggagggcgagaaaggccgggccgtggacctcacgccgctggcggtcgaggccatcgccgagagcttcggggagtggctgcgagaggaggagctccggctccggggccaggagcccgagcagctgcgtgtgtccgtcggccgcgacccgaggctgtcggggccgcggctcagcgcggcgctcttcgcggggctcgccagggcgggctgctccgtcttcgacatggggctcgccaccacgccggcctgcttcatgagcaccatactgccacgcttcaactatgacggctctattatgatgacggcgtcacacctcccctacacccgcaacggcctcaagttcttcaccaagcgcggcgggctcacctccggcgacgtcgagaacatctgcgaccgcgcagcgcacaagtacgtggcgcggaagacgggagtcggcggcggcggcaggggcacgccgccggtggtgatgcgcgtggacctgatgagcgcctacgcgcagcacctccgcgacatcatcaagcagcgcgtggcgcacccgacgcactacgacaccccactgaggggcttcaaggtggtggtgaacgcgggcaacggctgcggcgggttcttcacctgggacgtgctggagaagctgggggccgacaccacgggcagcctccacctggagcccgacggcaggttccccaaccacatacccaacccggaggacgccaccgccatgtcgctcacccgcggcgccgtgctggcgcagggcgcggacctgggcgtcgttttcgacaccgacgtggaccgcagcggcgtcgtggacgccgggggcgcggccatcaacggcgaccgcctcatcgcgctcatgtcggccatcgtgctgggcgagcacccgggcaccatggtggtcaccgacgcgcgcgccagcgacgggctcacgaggttcgtcgagtccaggggaggccgccactgcctgtaccgcgtcggctaccgcaacgtcatagacaagggcgtgcagctgaacgccgacggcgtggagacgcacctgatgatggagacgaccgggcacggcgcgctcaaggagaactacttcctcgacgacggcgcctacatggtggtgaagatcatcattgagatggtccggatgaagctagcaggggtggagggaggggtagggagccttatcagggatctgcaggagcccgccgagtccgtgctcctccggatggacgtcatgggtgagcccaaggatgccaaggaaagggccacacatgcagttgaggcttttaagaactacatccaggaggacaaacttttcggttgggtgctggacgactgcggggattgctcagttgccgagggatgccttatggacacaaacaatgatcccatcgatgttgatgcacacatgtacagagcaaaactatacgacgagaatcagagagcagtaggcatggtccacattcgtcaaagcgtgcataatcccaacatagcactaaacatgcagtcctatgctcctggtggctgcaaatccatggcaaaggatcttcttgagaggttcttgctggcaagcggactgaatgggtttcttgacataagccaagtagagaagtttgtccagtagttcttatgcttattataggatcttagatttacctactctgtatatgtaacagctcagaacctagctaggagttcactactgttgcgagtgtacatctattacattattctcctatcccatccatggtaaaccttgtatgtgtttagcaaatatacatagcattaccttttttgattttagcgtttttctaaaagta

SEQ ID NO: 140502 - DNA, 2418 bp, Zea Mays
cgtggcagattggcggcaccacagaattagctatcacacgcctccaccccacacgctctatcatcaagtccgcagcatcccgacgaactcctggtgtcctggcctgcacccaaaatatccatatccttccgccggctgccaaataatctctttcttgccgagatcggcgcgtatatcttttccggtgtccgatgattcatgcattagcaatttttgactcgtgcgtgcgtgactacagttgcatgctatggccatggtcaccacttcgccggcaactgtgcagccatcatcatgcaagcacacgagccgcggcgcggcgcggtgctgccctcctcctctgctgtcctggaagacacgaagctttgggcagcaggtgacgacaagggccacggcggcgagctcccgtgggcagcccgcgggcgtggcacaggcagggggagaagagggcgacagtatcaggcggctgcagaacgggtcggacgtgcggggcgtcgcgctggagggcgagaaaggccgggccgtggacctcacgccgctggcggtcgaggccatcgccgagagcttcggggagtggctgcgagaggaggagctccggctccggggccaggagcccgagcagctgcgtgtgtccgtcggccgcgacccgaggctgtcggggccgcggctcagcgcggcgctcttcgcggggctcgccagggcgggctgctccgtcttcgacatggggctcgccaccacgccggcctgcttcatgagcaccatactgccacgcttcaactatgacggctctattatggtagtgaagtaatgatacgtattttacgtttgcgtcgtgttggtgtgcgtgcatgccatgcaatgcatgtgtttcacttgtcaattactacgttcggatcggagttgcatgcatgcagatgacggcgtcacacctcccctacacccgcaacggcctcaagttcttcaccaagcgcggcgggctcacctccggcgacgtcgagaacatctgcgaccgcgcagcgcacaagtacgtggcgcggaagacgggagtcggcggcggcggcaggggcacgccgccggtggtgatgcgcgtggacctgatgagcgcctacgcgcagcacctccgcgacatcatcaagcagcgcgtggcgcacccgacgcactacgacaccccactgaggggcttcaaggtggtggtgaacgcgggcaacggctgcggcgggttcttcacctgggacgtgctggagaagctgggggccgacaccacgggcagcctccacctggagcccgacggcaggttccccaaccacatacccaacccggaggacgccaccgccatgtcgctcacccgcggcgccgtgctggcgcagggcgcggacctgggcgtcgttttcgacaccgacgtggaccgcagcggcgtcgtggacgccgggggcgcggccatcaacggcgaccgcctcatcgcgctcatgtcggccatcgtgctgggcgagcacccgggcaccatggtggtcaccgacgcgcgcgccagcgacgggctcacgaggttcgtcgagtccaggggaggccgccactgcctgtaccgcgtcggctaccgcaacgtcatagacaagggcgtgcagctgaacgccgacggcgtggagacgcacctgatgatggagacgaccgggcacggcgcgctcaaggagaactacttcctcgacgacggcgcctacatggtggtgaagatcatcattgagatggtccggatgaagctagcaggggtggagggaggggtagggagccttatcagggatctgcaggagcccgccgagtccgtgctcctccggatggacgtcatgggtgagcccaaggatgccaaggaaagggccacacatgcagttgaggcttttaagaactacatccaggaggacaaacttttcggttgggtgctggacgactgcggggattgctcagttgccgagggatgccttatggacacaaacaatgatcccatcgatgttgatgcacacatgtacagagcaaaactatacgacgagaatcagagagcagtaggcatggtccacattcgtcaaagcgtgcataatcccaacatagcactaaacatgcagtcctatgctcctggtggctgcaaatccatggcaaaggatcttcttgagaggttcttgctggcaagcggactgaatgggtttcttgacataagccaagtagagaagtttgtccagtagttcttatgcttattataggatcttagatttacctactctgtatatgtaacagctcagaacctagctaggagttcactactgttgcgagtgtacatctattacattattctcctatcccatccatggtaaaccttgtatgtgtttagcaaatatacatagcattaccttttttgattttagcgtttttctaaaagta

SEQ ID NO: 140503 - DNA, 1041 bp, Zea Mays
ttaccctgacatattttgtagagctagtgaacctagcagaaatcgattaaaataatacgcagcagccgattgcactcgaccaagagaagcaacgactgcatctctggtctcccacgcctataatcccattcccctccttcaaagccctgcggcgatttcgattcttcccttctatctccaggtatacccatcggagcagcactgacaaaaattctccagatatggcaagcaaaaggattcagaaggaactcatggatctccaaaaggacccaccgacatcatgcagtgcagggcctgctggagaggatctattccactggcaggccacaatcatgggtcctagtgacagcccctatgcaggcggggttttctttattaatatccattttcctcctgactacccctttaagcctccaaaagtgaacttccaaacaaaagtttatcacccaaacatcaactctaatgggagcatttgccttgatatcctcaaggagcaatggagccctgcactgaccatatcaaaggtcctcctctccatcagctcgctcctcaccgaccccaacccggacgacccccttgtccctgagatcgcccacatgtacaaaaaccagaggcagcgctacgaggaaactgcacgggcctggacccagaagtacgcaatgggctgattctgtcccactggacagtacttcccctgcaaagatcgtcacggtgttgtaagaatcaagttgcaccgttttcctgtcgtgtgatggtattaagagcccagatggctgtgtcaattgtactcgcttctcagaacaaagtctctctgtgtgtacagtgcttttgaagctggatgatctgagttctgtgctaaaaccttggtttgcacttcactttgttccctgaaatgggtttgcgaccactgaatttgcatgtgtaacctttccaagaaaccagtagcagtttgtatgttgtcaagatgttaataattcagatgggtggcctgcatccatctgaaatggagcgctatttgttaaaaccgtgcagataacagtt

SEQ ID NO: 140504 - DNA, 1744 bp, Zea Mays
ttaccctgacatattttgtagagctagtgaacctagcagaaatcgattaaaataatacgcagcagccgattgcactcgaccaagagaagcaacgactgcatctctggtctcccacgcctataatcccattcccctccttcaaagccctgcggcgatttcgattcttcccttctatctccaggtatacccatcggagcagcactgacaaaaattctccagatatggcaagcaaaaggattcagaaggaactcatggatctccaaaaggacccaccgacatcatgcagtgcagggcctgctggagaggatctattccactggcaggccacaatcatgggtcctagtgacagcccctatgcaggcggggttttctttattaatatccattttcctcctgactacccctttaagcctccaaaagtgaacttccaaacaaaagtttatcacccaaacatcaactctaatgggagcatttgccttgatatcctcaaggagcaatggagccctgcactgaccatatcaaaggtcctcctctccatcagctcgctcctcaccgaccccaacccggacgacccccttgtccctgagatcgcccacatgtacaaaaaccagaggcagcgctacgaggaaactgcacgggcctggacccagaagtacgcaatgggctgattctgtcccactggacagtacttcccctgcaaagatcgtcacggtgttgtaagaatcaagttgcaccgttttcctgtcgtgtgatggtattaagagcccagatggctgtgtcaattgtactcgcttctcagaacaaagtctctctgtgtgtacagtgcttttgaagctggatgatctgagttctgtgctaaaaccttggtttgcacttcactttgttccctgaaatgggtttgcgaccactgaatttgcatgtgtaacctttccaagaaaccagtagcagtttgtatgttgtcaagatgttaataattcagatgggtggcctgcatccatctgaaatggagcgctatttgttaaaaccgtgcagataacagttcagtgctcttgcatatggaacatgtcgtctgcaccacgtgattgaaatggagctttccttgttgcagccactgctttttgattttgaatggcagaagttattacagaagtggcttgcagatctgctgccttgcttcaacatttgctagtctcgtggaaactgtcaggtccatcgctgttggttgaatgtggccatactttctgcaacgctgctgtttaccctctcccagctttcatctgcacaagcagtagaaagtcatagcctgccctttcttcttcgagatggacaaaagaggttgcatctgatggccaaccggccagtttggtctttctgtaccaggtcacttgtgtccttgtgcctttacttccatgtctccatgataatattcatagctgttctttttttagtgtattaccgggcgaaaattttgaagtacaggtgctttctccccctttgctataaagtcatgtgcaggtcttcatttggtatacctgtagccacacgctgggaaaaagcctgacacttgtgtacatacttgtgtaaggttgtacatgcacatgtggcagttgttatctacacactacaggagatagctgctttgccgcgtggcaaagcccaaaaaaccgctaggcaagaaaacactcggcaaactctttatttagatgagggctggcaggatgcaggacaacatagcagaacctgc

SEQ ID NO: 140505 - DNA, 895 bp, Zea Mays
ctagcagaaatcgattaaaataatacgcagcagccgattgcactcgaccaagagaagcaacgactgcatctctggtctcccacgcctataatcccattcccctccttcaaagccctgcggcgatttcgattcttcccttctatctccaggtatacccatcggagcagcactgacaaaaattctccaggaactccaagaattcatctgatatggcaagcaaaaggattcagaaggaactcatggatctccaaaaggacccaccgacatcatgcagtgcagggcctgctggagaggatctattccactggcaggccacaatcatgggtcctagtgacagcccctatgcaggcggggttttctttattaatatccattttcctcctgactacccctttaagcctccaaaagtgaacttccaaacaaaagtttatcacccaaacatcaactctaatgggagcatttgccttgatatcctcaaggagcaatggagccctgcactgaccatatcaaaggtcctcctctccatcagctcgctcctcaccgaccccaacccggacgacccccttgtccctgagatcgcccacatgtacaaaaaccagaggcagcgctacgaggaaactgcacgggcctggacccagaagtacgcaatgggctgattctgtcccactggacagtacttcccctgcaaagatcgtcacggtgttgtaagaatcaagttgcaccgttttcctgtcgtgtgatggtattaagagcccagatggctgtgtcaattgtactcgcttctcagaacaaagtctctctgtgtgtacagtgcttttgaagctggatgatctgagttctgtgctaaaaccttggtttgcacttcactttgttccctgaaatgggtttgcgacca

SEQ ID NO: 140506 - DNA, 486 bp, Zea Mays
ggcccacctaggcccgagggtggcgcacagccgagttatatggcaagcaaaaggattcagaaggaactcatggatctccaaaaggacccaccgacatcatgcagtgcagggcctgctggagaggatctattccactggcaggccacaatcatgggtcctagtgacagcccctatgcaggcggggttttctttattaatatccattttcctcctgactacccctttaagcctccaaaagtgaacttccaaacaaaagtttatcacccaaacatcaactctaatgggagcatttgccttgatatcctcaaggagcaatggagccctgcactgaccatatcaaaggtcctcctctccatcagctcgctcctcaccgaccccaacccggacgacccccttgtccctgagatcgcccacatgtacaaaaaccagaggcagcgctacgaggaaactgcacgggcctggacccagaagtacgcaatgggctga

SEQ ID NO: 140507 - DNA, 133 bp, Zea Mays
tttttcttttctgtttttcttttccttattatttttctattataatttgcaaatttcaaatttagttctgagttgggcacccaaattcaatctaaatgcacaatcaagaaaagtctagcatgttaatgcaaag

SEQ ID NO: 140508 - DNA, 825 bp, Zea Mays
atggccgagcagagcgagcgtatggccaggagagcacacggcaggatgctgggagagaaccgcggcgcgagcagggagccgaccacggcgagcagaggggcatggctgcgcgcacagggagctcgacatgggcagcagcccgcgtccacgacgagcaggcaggggagagcgcgcacagcaacgagcggacaccagggcacgcgcgcaggggacttcggctgggcgctggagttggagtcaggcgcgccgaggagaagccggcagaggagcgcggcgagcaccagagagcagcgcgcgcggcgcgcggcaaaggagctgggaacgcgcggaagagaactcgacggcggcaatccggggcgagcgcagcagggagccgggacgagaccgcagccgagcgagctccggccggcatgggcgcgacggccagggagcaggagggcgcgcgcaggaaggctgaagcttgcagaggagaacgtaggggatgggcgcgccatgggagaagctcctgcgcgcagagaagaggaccgagcagaggaagtcggcgcgcaggaaggttgggcgccgagcgccatggagatggggcgtgcgcatccctgcgaccagagggagagccgcggccacaggggcgcgagcacgaccagggagaaatgccaagcgccatgggagcgctcaggggcacgtaggccgagcgccatgagtgggcagaggggattcgacgagctggagccagggacacaacatgagagagagctcagggagatgagcgcgtgccggctgggaggagaagacaggtcctcggcggcaggatttttttacaggccatga

SEQ ID NO: 140509 - DNA, 1571 bp, Zea Mays
cgatcagtcaactcgcacggcctcgactataaggaggagcacgtagctgatcccttttcacccaccaaactccacacaactcacagctttttcagtgtgggctagtagtaggtagctgtattagaagtttagaaccagtgacccaccgtggtggtggtggtgggctacagccactcagccatgtcgttgctgccgtgcctgctcgtgctatcgtccctgcaagcgccggccatcgtcgctgcttctgcagctgcaggtggccgaccgccggcgatgtttgtgttcggggactccacgctggatgtgggcaacaacaactacttggcggggccgggcgtgccccaggccaacaagccctactacggtatcgacttcccgggctccgttcccactggacgattcagcaatggctacaacatcgctgactacctcgcaaagagcatggggttcgcgtctagtcctccgccatacctgtcgttggcacctagcaccggccgtctggtcctcacagctcgtggcagcggtgtcagctatgcttccggaggagctgggatcctcgactccactaacgcgggcaacaacatcccattgtcgaagcaggtgcagtacttcaagtccaccaaggcacagttggtcacgaagctgggctcccgtgcgacccacctcctgctctccaggtccgtcttcctcttcagcgtcggcagcaacgacctattcgtcttcgccaccgcgcaggcgtctgcgcacaacaacaagtcagctgccgaccagcagcgtgacgtcgccacgctctacgcaagcctcatctccaactactcagcaaccatcactgagctgcacaccatgggcgcgaggaagttcgccatcatcaacgtggggctgctcggctgcgtccccgtggcgcggctgtccggcgggacgaagacgggcgcgtgcttggacggcctgaacgagctcgcgtcgggcctggacgacgccctcgcggtcctgctcgccagcctcgcctcccgcctgccgggcttcacctactcgctcgccgactactacggcctgtcgatggccaccttcgacgacccgggggcgtcggggtacacggacgtcgccgacgcgtgctgcgggggcgggaggttcggcgccgaggcggactgcctgcccaacgccacggtgtgcagcaaccgcgaccagcacgcgttctgggacagggtgcacccttgccagcgcggggcgatgctcaccgcgcaaaacttctacgacagccgcccgggccgatacacagcgcccatcaacttcaagcagctggcttccaccagtttatgaattatgatgatcttcatatggatagaacaaaggaaaaccaccgtacgtcgagtatatacacagggcctatccttaattattatcccttaattaatttattttccaaccttcaagtttatacgtatagtatatttaatgtctatggaacactatgtaacaataatatgaaagtttttttgacctgaaattgtaagagaaaccctcaagctcaaagcatgcggtggatttaattttcacagacggattcagtcgcc

SEQ ID NO: 140510 - DNA, 366 bp, Zea Mays
atgagcggctctctcgtcctcggtggcaccgaaggcggcgagggcatgcagtatgtgcccttggtgaagagcgcaacgggtgacaagctatcgtacgacatgtactactacctggcgttgaggggcgtgacggtgggcgagaaggcggtgtggctctcggtgcgggcgttcacggccaacgcagcagggtccgaaggcgccgtcgtggactccggcaccacgttcacgtacctggacccgaccgtgttccagcctgtggcggacgcggtggtgacggtggtgggcaggcggtacaaacgggccaaggacacggaggtcgggctggggctgcacccctacttcgtgttgccgcaggtcgccaggtag

SEQ ID NO: 140511 - DNA, 2088 bp, Zea Mays
aaccccttttctcctatccctgcactccccccccccccccccctgctgccccgcgccgaagcaggtgtggcggcgctgcgagcctgcaaccatctccgcagactccgctgcgactcatctgggctacgacccacgtcaaggctgctagttgcgttcgttggagttgcggcttccgcgaatcccccaatccatcccagtcatggcgttctggggggtggaagtgaagcccgggaagccctacacccacatccatcacgctgaccatggccgcctccgcatttgccaggctacactgggcaactgtgatgctgctgcaaggacggtgctgcaatgcaatgttggcaacaagattcccatcaaactttgtagtctaaatccgaaattggccgagacatgccatctagaggttgagtttgaggaggttgatgatgttatcttctcagtaattggtcatagttcgatacatctctctggatactatgtctgtgcaagcaacaggtctaatgtgggggatgatgaatcagaatcttatggggaagatattgggcactccagcaccgatgaggagcatgataccagtgaggacagctatgaatctgacttcattgatgatcgtgaagttccattatctgagaagtatgggtctggttctatagatgacagtgatgatgagtgcacccaacgatgccacagacaaaaagctgaaaaaacgactcaaaatgctgaaagacggcggcgcttgaagaagcaccaagtaggtagcactgattacgatgatgatgatactccagtcatgaaacatgttgcgaagcgctgtgctcctaaaatatctgatagtggtgatgatgacactcctgtcacaaaacctgttgtcaaacgtagagcttcaatatttgatagtgacagtgatgaagatgataatgtacctatttctcttgcattgggtaagaaagacaatgctaaggttgctgaggaaactgaacatcaaaatggacaggcaaatggcatcaccaaaaaaaggattattgatgtcaagaaaagaaaacagtcttccatcagcgaggatcctgcatcgtcaatggatatgacagatgctaatgcaccatctgtttcaaaacaagttgatgaaataaaaaagaaatcaaagaaaaagatgagaaatcaatcaggggaaaataatgagaagcagtccaatataagaacattggatgacgggttggtggttgaatatttgtcaatgggaaacaatgatgcaaaagtggcttctgatggctgcaaggtctatatcaaatatgttggcatgttgaaggatgggaaaattgttgagtctaatgttagtgaaaagccttacaagttcaagcttggtgctggaaaagttatccgtggatgggatgttggtattcatggtatgcgtgttggcgagaaaagaaagcttacagttccaccttcaatgctctctggcggtaaatcagtgggagaagtacccgaaaattcttcagtcatatatgaaatcgagttagtgaaagtgaaataaagaaaaaatatgtcaggcttttgcatgtgccctatctcagcagctgcaacagttgcaggaattttgttgatatacagatgactcatgctcatgttttgcttccttctggaagaatttatatgtgccactcgtgccacaccataggacatcgagcagtgaactgcagcgggtgctttatccatgcatgccttgactggatacttggttttgcactatctggctacattactttgtaaactgcatacgatggttgaagcactattgtggtctggtgatttgccatatgtttgtgactacttcgcggttcactgctttgaatcatgtttgttttgccaatattgattgagttctgtaatagtttgatcagggtctcttggcttacgtgccagtcttttactgtagaagtggattttttttttccttgttacgtttggcagacgttgaactggtgcaaggcctttaaagtaatggctaatatatcgtccgtgcgtcacgaggatacaaattattcaaaagaatattagagcaaaatgattacttaaaaataaacaata

SEQ ID NO: 140512 - DNA, 1959 bp, Zea Mays
catgccatccggtcccttgtggccttctcctcgcccgctcgttcccaccactctgctctgctctcctcactagtctgctctccccaaaccccacagaaccctaccgtccccgccgcgccgccatggccgccgccggccggccgtggcgcgtgataccgcgtcctctactggagaccgtacttcacaactatgcgctccacccgcgcgtgccacagccgctccttttccacgggccacgcggcgtcggcaagtccacgctactcctccaccgtctcctcccgcggtggtccgaccagccccacgccgtcgcattcatcaacttcctccacccctcgccgagttctcccgccgcagccccgtggtcccttctccccgccgacccagcgtctccccactcgctgcacgacctccgccttcgcctcgagtccgcgcttgagggcctcgcccgcgccgccgtcctctgcggtgctgtgggctctaaggacgtgctcgccgcgctctcccgcaaccacggcgtcagtaccgcgctctcccgcctcttgatccccccggccacacgctcctcggccacctctgtgccagcccgccgctcttcgtcgacctccgttccggcgctctggtcgagggccgtgctcgccgcggtgcacagggacgacaccgcgttctgcattggcgagggggaggcgactagctgctccatggaggagaaggcatacatgcaggaggcaatggcagccttgcgagtggctaaggaggtgcttgggatgcaggaggggtggaggaaggaggcaattagggagatgaacagaactgggcgattctcgcgctcattggccaattcggctactgactggccgtgcctgttgctggatgttctgtcacgtgcggcagaggaggaattcttccagccaaagctgatcctgaacaatgtggatgtgttgaggaaggcaatttgtgaggatgagacgatggtgcctgcagcgatgtaccatgatagcttcatttggagggtgattgcacttggcgccaatgaaaagtgcttgccagttattatgtcgacttcagatgggtactattcttctcaagcattcgttgattttggttttccgaacatatttatttctcgtgagacatttggttggacgccacaagaagctaagctgcatatggtttctgaattcttcagtgaacaggaggtagctactatttttagacctgctaatgttacccttttgtgtgacatatatgtattcttcctacaattttcccgttgtgcaatctctgtacgtaatttgtttttgatttttattgaagttgtagtggaaagttgtcgatgaggttcttgggccaaacccacggcagttatctgagatatatatgctgaagcaaaaggcgaatagcccagagtaagtaacttgcatccgtagtttgtcattgaacttcatttgccttaccccatgttgacagtatttatcccaaaatatgattcacttttgtttctgatcttatttgggtaagatgacttcttctggcctcctgttattaataaatagaagggaaaaaaccctctatgcttattgcttttgtagaccacacatattttcttgaaaatcactagatggatgagttgatcaattccaggtctttttcccctctgaacaaattctataagttcatcagtttcacttcgtttccctgttaagtttgaactaatttttaatatgtattagggtttgtccactatgccttcttagtaaatccttctcgtttagttatgctttatatacagggttcaaagtgttcgtttctgaaacatttgctattttttctatattcaattatgtggtttgcagtaaagtctcagtaagcagcacaattttattatatttacaagttttaaaatatacatgatagcagcgcccgccttagttttattaactgcacacgctgcatattgct

SEQ ID NO: 140513 - DNA, 2472 bp, Zea Mays
catgccatccggtcccttgtggccttctcctcgcccgctcgttcccaccactctgctctgctctcctcactagtctgctctccccaaaccccacagaaccctaccgtccccgccgcgccgccatggccgccgccggccggccgtggcgcgtgataccgcgtcctctactggagaccgtacttcacaactatgcgctccacccgcgcgtgccacagccgctccttttccacgggccacgcggcgtcggcaagtccacgctactcctccaccgtctcctcccgcggtggtccgaccagccccacgccgtcgcattcatcaacttcctccacccctcgccgagttctcccgccgcagccccgtggtcccttctccccgccgacccagcgtctccccactcgctgcacgacctccgccttcgcctcgagtccgcgcttgagggcctcgcccgcgccgccgtcctctgcggtgctgtgggctctaaggacgtgctcgccgcgctctcccgcaaccacggcgtcagtaccgcgctctcccgcctcttgatccccccggccacacgctcctcggccacctctgtgccagcccgccgctcttcgtcgacctccgttccggcgctctggtcgagggccgtgctcgccgcggtgcacagggacgacaccgcgttctgcattggcgagggggaggcgactagctgctccatggaggagaaggcatacatgcaggaggcaatggcagccttgcgagtggctaaggaggtgcttgggatgcaggaggggtggaggaaggaggcaattagggagatgaacagaactgggcgattctcgcgctcattggccaattcggctactgactggccgtgcctgttgctggatgttctgtcacgtgcggcagaggaggaattcttccagccaaagctgatcctgaacaatgtggatgtgttgaggaaggcaatttgtgaggatgagacgatggtgcctgcagcgatgtaccatgatagcttcatttggagggtgattgcacttggcgccaatgaaaagtgcttgccagttattatgtcgacttcagatgggtactattcttctcaagcattcgttgattttggttttccgaacatatttatttctcgtgagacatttggttggacgccacaagaagctaagctgcatatggtttctgaattcttcagtgaacaggagttgtagtggaaagttgtcgatgaggttcttgggccaaacccacggcagttatctgagatatatatgctgaagcaaaaggcgaatagcccagaagttcttcatgacagaaatattgaggaaattattgatacatacctggcacacttgcaagtctctgtcgttaatccagccatggagaaggcattaaaaatgctgcaggagtttgcctcagatgtccgtgagggtaaagtaccaaagatcagatcgtcctttggtgcaccctggagacatccacctcgtgatgacaatcctgacttgtcctataaatgggcgaagattcagctaatggattttatccaatcttttgtaaacactgagtttggggtgaactacctagcagatgacagcttggaaatattggatgatcctgctgctgttgccatgatggaggttggtttactgtatcaacaaagagaaccatcctttatgcgaccaatcactcgagggattcagcgttgtcttgccagatggcttgctgaacagagattacaattgaacattcaagaaacactagcattcttttggcaacgtttgatacggggtcgaagctaccgccacttgatgaaagaagttggctacaaataaagaggtgatttccatggactaacattttgacatgatatctgcataagaatgtttcaagggtacaataattttctggccactcattttctcatctgtttaatacagccagcgtggtctggaagtttggaatcaaatcaatctcagatagaggtggatgaccagttttacatgttctgttgctgacgaaaagaatcaatcattttcttaattaataagcgaggaatgcaaatgtttattgtttggactagagtgaagttgcatcagaagttgatgctgaagcctgaaggcactcgaaaaatgttgcagatgcatttctacctgtatggcaatatttagggagtcgaatatctgctgtatgtcaatgagaaaatgggttttcacgtattgcaactgcatgagttaatcttctgggtttccatgtctctggtaaccaacccgtacattggatagtggcccggcaccgcgtctcatacttgctcttccgatcaactgtacatttgtactggaccttgctctgtgattcaacagcacgggtcatgcacggtcgattcgagctgaattatttaaggatccaaacggggccttactttttttttggagagtaataattcaattgaatcagccaatcaaaagcgcttattcagattccagt

SEQ ID NO: 140514 - DNA, 535 bp, Zea Mays
gatctgttcgggatctctacagtgcaattgtttaagagaattagacaattatagtattgtttcttcccaattattatttggaaaaataggcggcatgcactagaatcaagcctaaccgcttggcttgttattacattgtgcttctacattacattgcttcactgtttgaatttcatctctatttttgttagtagtaatagttaacatgtttgtgttatgcattagtaaactttttttgcttgtaagtttcaaagtatacacactatttttaatgtgcaaagtggcatgctacttatttcagtttattgttgcaaaattagccatttcggtttgttgtaggtcagcatggtacaagcctacaaggagaaagtttatccaaaaaacaaggtatgtttggttcatgctaatcctcacctccttcccttgctgccgtctcaggtaaataagatggaactttaaaagaaagttcagttgctatttatgcatcaattgcttaacctgtttgttttggtgacgagctactatcagtcgcgcc

SEQ ID NO: 140515 - DNA, 873 bp, Zea Mays
ataaacaaaggattggaggaggtcatcgctgaaggatgccaccaagaccaccagatcggaggagttgatcagtgaaggacgcccgaaccgtcgtacagatcgtcgaccctcacaacctgcgcctcgcgcgacgctgtcgccgtcggagccacctgcgcctggcgtgaccactgccgccgaagacggccacgcctcgcgcgaccactggagggtgcaacactgtcgtgcgcacatggggagccgccacacgagcctctgcccgcttgctcctccccgggccgcgaccggcgctcgctcctccgaggccaccattgccgttgcgcgcgatttcggggtcgtcgccatcgacgagtgagggggcgcggatggcttgctcgtgcctcctgggccgcctacgccgcgcacgcctcctggatcaccgtcgccactcgttcctcggggaaccgctgccgttgctcgtgcgtcaggatggtggcatcaaaaaataaaccctagaggtctagaactcattttatagacaccggaacctgattaggttggaccgcgtagcttagtgtctgacgtgggtttctctagttattggaagtccagatctttatatatatatgaactacaaaacttattgaaggtgttgttgtccctttctgttagagagcgtatgtatgtcgcttaattctttcatcatctccttgttatctattatatatattctgaggatacctaagctactatctgctttttttagtctacagagaacactatgatgaaagtcactattctaaaacaaagattgaggtttattagtttgaggatgttcagaaaagacatcccaacagttctgctagaggcctgtttatataaaaaatttaaaaa

SEQ ID NO: 140516 - DNA, 1752 bp, Zea Mays
atgcatacttacaatactacagtggatcgagtatataagcacacagcacagctcccaggcttccatcgtatcccctctcattaattccagctccaacatctctctcctagctacatctctccactgtctgtttgcctgtcgaggccgggcgccagcagcaacaatggcgaggatgatcagccggccggccgtcctcctctcccccctggccatgatcgtcgtggccgccgccgtcatggcgctggcaccggcgccggtggccgcgaccaagtacaacatcaccaagattctggcgccctacaaggagtactccaagttcaacgacatgctgtccaagacgcgcctcgcgtacgacatcaaccggcgccagaccatcaccgtgctggccgtcgacaactccgccatgtcggcgctcgaccactactcgctgcagaccatccgccacatcctcgagctgcacgttctcgtcgactactacggcgacaagaagctcaagaagctcgcccatggctccaccgcttcctcctccatgttccaggctaccgggtcggcgtctggcatgtcggggtacgtgaacatcacccggaaggacggcaaggttagcttcatgacggaggacgccgacgacaccgcgaagccgtcccggtacgtcaagtccgtcaaggagttcccctacgacatcgccgtgctccaggtgagctccatcatctcgtccgccgaggccgaggcgccggtgccgcccccggcgcccgtggacctcgaggagctcctatccaagaggtactgcaagtccttcgcgtccctgctctccgccaacgccgaggtgttccgcgccgtgaacgagaccaaggacaacgggctgacgctcttctgccccgtcgactcggccgtcgcggccttcgcggccacgtacaagaacctcacggccaaggccaaggcggccatcctcctctaccacgccgtgccggactacttctcgctgcagctgctcaagtccaacaacggcatggtcaccacgctggccaccgccagcgacaagaagatggactacagctacgacgtcaagaacaaaggcgagacggtcacgctgcagaccagggtcgtcacgtccagcgtcaccgccaccgttggcgacatggagccgttggccgtgtatgccgtgaacaagttcctgcagcccaaggagctcttcaaggtcgtcgaggcgcccgcgcccgcgccggagccgtccaagaagaagaaggctggtcgcggcgggagtgacgacgattcctcggacgattcgggagattcgaccgccgatgctgagaagggcgacgcagcaccggctctgctcgtgcgatggctagtcaccgcggtcgcgacagcgggagttgcatatgccctgatgggataaacttctatcagtcacctgaattatattcggactttcatttgatttgagtattctttttctttcagtgttaaatttgttttcacttattataatggtgctctcgatcggttaaggtatataaactataagagtttattataagctttttatccaggccaatcatgcagaaacagatatatagttcaaacacattgcttccaacgcaaagacctgcttgtactttctgacctatgactcagagcgcgatgctccaaccgtgtccaaattatgaacctttattttgacgtcaagagcctgttctttttttaatgtaaatggcagaagaaaaatgagtaccgcagagacgatctttgtct

SEQ ID NO: 140517 - DNA, 1696 bp, Zea Mays
ctctcattaattccagctccaacatctctctcctagctacatctctccactgtctgtttgcctgtcgaggccgggcgccagcagcaacaatggcgaggatgatcagccggccggccgtcctcctctcccccctggccatgatcgtcgtggccgccgccgtcatggcgctggcaccggcgccggtggccgcgaccaagtacaacatcaccaagattctggcgccctacaaggagtactccaagttcaacgacatgctgtccaagacgcgcctcgcgtacgacatcaaccggcgccagaccatcaccgtgctggccgtcgacaactccgccatgtcggcgctcgaccactactcgctgcagaccatccgccacatcctcgagctgcacgttctcgtcgactactacggcgacaagaagctcaagaagctcgcccatggctccaccgcttcctcctccatgttccaggcatggacatgtatacaggctaccgggtcggcgtctggcatgtcggggtacgtgaacatcacccggaaggacggcaaggttagcttcatgacggaggacgccgacgacaccgcgaagccgtcccggtacgtcaagtccgtcaaggagttcccctacgacatcgccgtgctccaggtgagctccatcatctcgtccgccgaggccgaggcgccggtgccgcccccggcgcccgtggacctcgaggagctcctatccaagaggtactgcaagtccttcgcgtccctgctctccgccaacgccgaggtgttccgcgccgtgaacgagaccaaggacaacgggctgacgctcttctgccccgtcgactcggccgtcgcggccttcgcggccacgtacaagaacctcacggccaaggccaaggcggccatcctcctctaccacgccgtgccggactacttctcgctgcagctgctcaagtccaacaacggcatggtcaccacgctggccaccgccagcgacaagaagatggactacagctacgacgtcaagaacaaaggcgagacggtcacgctgcagaccagggtcgtcacgtccagcgtcaccgccaccgttggcgacatggagccgttggccgtgtatgccgtgaacaagttcctgcagcccaaggagctcttcaaggtcgtcgaggcgcccgcgcccgcgccggagccgtccaagaagaagaaggctggtcgcggcgggagtgacgacgattcctcggacgattcgggagattcgaccgccgatgctgagaagggcgacgcagcaccggctctgctcgtgcgatggctagtcaccgcggtcgcgacagcgggagttgcatatgccctgatgggataaacttctatcagtcacctgaattatattcggactttcatttgatttgagtattctttttctttcagtgttaaatttgttttcacttattataatggtgctctcgatcggttaaggtatataaactataagagtttattataagctttttatccaggccaatcatgcagaaacagatatatagttcaaacacattgcttccaacgcaaagacctgcttgtactttctgacctatgactcagagcgcgatgctccaaccgtgtccaaattatgaacctttattttgacgtcaagagcctgttctttttttaatgtaaatggcagaagaaaaatgagtaccgcagagacgatctttgtct

SEQ ID NO: 140518 - DNA, 2183 bp, Zea Mays
atggacaagagttgggtgagcaaaccaagaacaagtgatgactataagattggtgtgacccaattccttactttcgcatttcataatgttcgaccgggtggcaaggttaattgtccatgtgttcagtgtaaaaacaagtcaacaaaatgttatgaagaaattagaacccatttgagatgcaacggcattctgcaaggatatactatatggaatcgacatggagaggaacacggttcaacaccagctccatttgctcacatatcatcaagcacacacaaccatgctccatttgaacgtccttgtacttctcctgcacaaactggaagcaagagaaatgatgacatgcaagggctcctaaatgcagcatttcctatggctgataagtatgatatagtgtccagttcagatgaagaaatggatggtattaataattactatacaatgtccagttcatcagatgaaccaatagatgacaatgcatttgagtttgctaacacaaatggtagtcaacaagatgttacatcagaggaggttgaccatgaaactaaagatgacattatttccatcatccttaaagatgctaaggcaaagctacatcctgggtgtgatgcattcacgaagctttcctttcttagtgctggtgaacccatagggaaagctactgttgtaaaccaatttgacaataagttgctcagtcaagcgcatagatatgtattgagacactgtgatgaactagaagatcttcgtagggagtatgtggattcattgataaatcagcagcgccaacatctcacaccttccaatactcaggatttggttgataagcattttgctgattggttggagcagaagatactacttagtgatgatggcttaaacattactggaattacgcgagcattggctggaaaaccaaacagatgtgggatgcgttacagcggctttgttataaatggtttcaggttccatactaggagtctaattcttagatcaatctctgtcactgaatgcaactatttgatgggtaaggccttcgatgaattagagaacaggagaaaggacaaggggacactttctactagtgattatgatgatgtgtttgagaatgtcataagaaaagacttgaacattcgtgggtactatgatgatacgtattggagcaatggaacttattcacatgttcaatcagaggagaataaaatgattagaagggacctagagcttgctatttctgggtttaggaacattagagcattcctagaaaaaaagtttccagaagaggaattgctaagcacaattctagctactggatctagaagcaccacacaggttgatactaaagacaatgaaaatgtctcattgcaatatgataatgtagaacgatccagttatgagaaatcaccttcaccatacaatgaacagatttatactagagattataatattgccaaggtgggttgctctgatcattcagtaccaaatgacaacatagctttcagggaatcacaagttacaaggtctagtgacttgaaccaggaactcaacaatggatcactatctccagataaagaaatgtctgataaggaaactcaaagcaagcaacaacaacaaagcaaattgcaacagaataaacagaagactgtcttgttgtactcaacaaggaaaagaaaactaggccaagttgttgctgttggtaatcttatatctagagatactactcatgaaattggaggaactgtacttggggatggatattatgctgttgcggttcattatcttaacaatgttgaagatgaaagattacctcgaccacacggagatcttaaaactttggaggatgctgtgggcatgtgtgttgcttggcctcgcacacatcttaaaagagtgaagccaactactgagaagcgcacttgaatggttagaagactgaagatgcaactaatgaatgagcaagtgttatagtggagagtagttctaggatcaaaagttctagttgtcaatctacttgtttaattgtgttaggaacctcattttattcattcttgtatgtctaatctacctcaagaccacttcgtttggattgaaaatacttatgtattgttgcttacacatgaagcatttaattgatctgttatatatatgaaccttgtgtcttgtatatatatgtgcacaaattgagtgtt

SEQ ID NO: 140519 - DNA, 3611 bp, Zea Mays
ccagcaaaatcgccactcaacctttcgggttcaagcttccaccccaaaggaagcggcgcgtggtcgctggcgatggcggcggggactatctcccgcatccggctagagaacttcatgtgccactccagtctccacatcgagctcgacaagcacgtgaatttcatcaccggccagaacggaagcgggaagagcgccatccttacggctctctgcgtcgcctttggctgccgtgctaagaacacccagcgcgccgcctccctcaaggatttcatcaagaccggctgcagctatgcagcaattactgtggatattaataaccatggggaagatgcgtttaagcctgaagtatacggggacactattatattggaacgcaggattactgaatcagctagttctacagttttgaaggatcaacatgggaggaaggtggcacatcgcaaggatgacctaaatgaaataattgaacattttaacattgaagttgaaaacccttgtgtaattatgagtcaagacaaaagcagagagtttttacattcaggaaatgacaaggataagttcaagttcttttttaaggctactcttcttcagcaagtgaatgacttgcttgctacaataagagacaacctgaacattgcggcctctatagttgaagaactggaagcgtcaattaggccagcgcttagagaacttgatgagatccaggagaagataaagaatatggaacacattgaagaaatagcacatgagatcgaaaatctgaataaaaagttggcttgggtatgggtttatgatgttgacaagaagattgggggacaacaagagtatcttgagaaactcaaagagcgtatccctgcgtgccaagaacgaattgatcgaaatatagccattatagaggaactgaggaaagaatttattgtgaagaaagaaaattttaaatcctttttggagaagacacaagaagcaaggaggatgaaggaaaaaatggatcatgacattcgtgaggctgtgaaactgaagatggatctagagaaagagcatgctcgtggaaggcaaacattgaataaaatgaatgcccgtgtggtacaactagaggagcaagttcatgaatttgagctgcagcatatgcaacaaactcaggctgaagtatctcaagttgaggatagcatacgggaattacagcaggagataaactctgcccatttaaatgctacaaggttaagtgagaaagaaaaaaaatcatctgaagaactacgggccattattaaaaatatcggtgacattggaaaagagatagaagaagatggacgtaggatcaatcaactgagaagtcaaattgatgatatacgacggcgccaacaaaacaaactaacggccttcggaggagatagagttccgagcctctataaatcagtagagagacacatgagtaaattcaaatgccctcctattggtccaataggatatcatctgcaactggcaagcgattcctggtctgttgcaattgaatatgcattagggaggttattagatgctttcattgtctcatgtcataaggattcactcgttttacgagaatgtgcaaaagaagtgaactaccgcaaccttcaaattattatatatgacttcactaaaccacggtaagacaataaggtcttctattttgttcatatttggttgtctgaattcttattccatctttgaatagggttgacattccagatcatttgcttccgtcaacgccacacccaacagtactttcagttattcattcggaaattcctactatattaaatgtgttagtggatcagggccatgcagagagacaggtcctagttcgggatgatgaaacgggaaagtctgttgcatttgatcagaggatacggaatctgaaggaagtatatacttctgatggttgcaaaatgttttgtagaggttctgttcagaccattcttcctgcaaataggaactggagagctggtcgtttgtgcacttctctagaagaaaaaataactgaaatggagcaggaagctactgaaattaagcaaataaactcagagaggttggatcgcaaaaggaaattatttgctgatcgagacagcatcgatttagaattgagacagttaaagagaaaaagagaagatgaggagttgcatgtggagcgtaaaaaggcacagttggttgataccaagaaaatttctattgacaatagtcatgcagctgctgtggatacctctgagctagtagttgaaatgatgcaagtgaaggaagacattgagaaccaagaattagttgtgcagaaaattaatttgaaacttacagatgctttgcaagaagagaataatagaagagcgtcttacaaggacttcattgagtctgtacatgctgaaatggggtctattagcgatgctgagcgtgaattgcagcttgttgaagaaaaaatacatgatgctgagcaggagaaggctcactatgaacgtgttatggaaacaaaggttttaggtcctattacagcgactgaatcagagttgacacgtcttcaacaacttcatcaggagtattttgaaaaggcttcaacaatttgtgccgagagtgaagtggaagctcttgggggtgttgaaggatcaaccctagaacaattaagtgctcgtattaagaaattaaaacagaaatttcagcaagaaagcagaagatatactgaaaccattgatgatctgagagcactgcatgacaagaagggacagaagatcctgagaaaacaacaaatgtattcaggttttagggacaaattaaatgcatgtcaaaaggcactggacttgagatggaagaagtttcagagaaatgcgggtcttttgaagcgtcagcttacgtggctgttcaacgagcacctgggaaagaaaggtatcagtgggcacatcaatgtagattataagaatgaagttctgtctgttgagctgacaatgcctcaagatgcgtctcgtgataccattagagacactagaggactttcaggtggagaacgatctttctcaaccctttgcttcaccttgtctcttcatggaatggccgaagcaccatttagggccatggatgagtttgatgtattcatggatgcggtgagccgcaaaataagcttagacaccctagtagattttgctgtcgcacaagggtctcaatggatatttataacccctcatgatatcagcatggtgaaggctggggataggatcaagaagcagcaaatggctgctcctcgcggttgacagtgttgagacccctgacccttgtaaatgaagcctgagagccttgggcatgggagtgaatctgcttggaactactacttttatattttgtttgtagtttgtacatagcacattttgaggcaatgggcgtgtccctggtcaagagtttgttcctgggcagcatcagcagttctgtagttgcattgctgtttggacagggtcccactgtgctatgttaaagagtggttgatgcatgtcttttgaaataattgggccttgaacatactgcggatgtaaatgaaagaattgcggctgcagatgtcgatgaaggtagccccgacttggactctgctgattgcaggaacctga

SEQ ID NO: 140520 - DNA, 3741 bp, Zea Mays
ccagcaaaatcgccactcaacctttcgggttcaagcttccaccccaaaggaagcggcgcgtggtcgctggcgatggcggcggggactatctcccgcatccggctagagaacttcatgtgccactccagtctccacatcgagctcgacaagcacgtgaatttcatcaccggccagaacggaagcgggaagagcgccatccttacggctctctgcgtcgcctttggctgccgtgctaagaacacccagcgcgccgcctccctcaaggatttcatcaagaccggctgcagctatgcagcaattactgtggatattaataaccatggggaagatgcgtttaagcctgaagtatacggggacactattatattggaacgcaggattactgaatcagctagttctacagttttgaaggatcaacatgggaggaaggtggcacatcgcaaggatgacctaaatgaaataattgaacattttaacattgaagttgaaaacccttgtgtaattatgagtcaagacaaaagcagagagtttttacattcaggaaatgacaaggataagttcaagttcttttttaaggctactcttcttcagcaagtgaatgacttgcttgctacaataagagacaacctgaacattgcggcctctatagttgaagaactggaagcgtcaattaggccagcgcttagagaacttgatgagatccaggagaagataaagaatatggaacacattgaagaaatagcacatgagatcgaaaatctgaataaaaagttggcttgggtatgggtttatgatgttgacaagaagattgggggacaacaagagtatcttgagaaactcaaagagcgtatccctgcgtgccaagaacgaattgatcgaaatatagccattatagaggaactgaggaaagaatttattgtgaagaaagaaaattttaaatcctttttggagaagacacaagaagcaaggaggatgaaggaaaaaatggatcatgacattcgtgaggctgtgaaactgaagatggatctagagaaagagcatgctcgtggaaggcaaacattgaataaaatgaatgcccgtgtggtacaactagaggagcaagttcatgaatttgagctgcagcatatgcaacaaactcaggctgaagtatctcaagttgaggatagcatacgggaattacagcaggagataaactctgcccatttaaatgctacaaggttaagtgagaaagaaaaaaaatcatctgaagaactacgggccattattaaaaatatcggtgacattggaaaagagatagaagaagatggacgtaggatcaatcaactgagaagtcaaattgatgatatacgacggcgccaacaaaacaaactaacggccttcggaggagatagagttccgagcctctataaatcagtagagagacacatgagtaaattcaaatgccctcctattggtccaataggatatcatctgcaactggcaagcgattcctggtctgttgcaattgaatatgcattagggaggttattagatgctttcattgtctcatgtcataaggattcactcgttttacgagaatgtgcaaaagaagtgaactaccgcaaccttcaaattattatatatgacttcactaaaccacgggttgacattccagatcatttgcttccgtcaacgccacacccaacagtactttcagttattcattcggaaattcctactatattaaatgtgttagtggatcagggccatgcagagagacaggtcctagttcgggatgatgaaacgggaaagtctgttgcatttgatcagaggatacggaatctgaaggaagtatatacttctgatggttgcaaaatgttttgtagaggttctgttcagaccattcttcctgcaaataggaactggagagctggtcgtttgtgcacttctctagaagaaaaaataactgaaatggagcaggaagctactgaaattaagcaaataaactcagagaggttggatcgcaaaaggaaattatttgctgatcgagacagcatcgatttagaattgagacagttaaagagaaaaagagaagatgaggagttgcatgtggagcgtaaaaaggcacagttggttgataccaagaaaatttctattgacaatagtcatgcagctgctgtggatacctctgagctagtagttgaaatgatgcaagtgaaggaagacattgagaaccaagaattagttgtgcagaaaattaatttgaaacttacagatgctttgcaagaagagaataatagaagagcgtcttacaaggacttcattgagtctgtacatgctgaaatggggtctattagcgatgctgagcgtgaattgcagcttgttgaagaaaaaatacatgatgctgagcaggagaaggctcactatgaacgtgttatggaaacaaaggttttaggtcctattacagcgactgaatcagagttgacacgtcttcaacaacttcatcaggagtattttgaaaaggcttcaacaatttgtgccgagagtgaagtggaagctcttgggggtgttgaaggatcaaccctagaacaattaagtgctcgtattaagaaattaaaacagaaatttcagcaagaaagcagaagatatactgaaaccattgatgatctgagagcactgcatgacaagaagggacagaagatcctgagaaaacaacaaatgtattcaggttttagggacaaattaaatgcatgtcaaaaggcactggacttgagatggaagaagtttcagagaaatgcgggtcttttgaagcgtcagcttacgtggctgttcaacgagcacctgggaaagaaaggtatcagtgggcacatcaatgtagattataagaatgaagttctgtctgttgagctgacaatgcctcaagatgcgtctcgtgataccattagagacactagaggactttcaggtggagaacgatctttctcaaccctttgcttcaccttgtctcttcatggaatggccgaagcaccatttagggccatggatgagtttgatgtattcatggatgcggtgagccgcaaaataagcttagacaccctagtagattttgctgtcgcacaagggtctcaatggatatttataacccctcatgatatcagcatggtgaaggctggggataggatcaagaagcagcaaatggctgctcctcgcggttgacagtgttgagacccctgacccttgtaaatgaagcctgagagccttgggcatgggagtgaatctgcttggaactactacttttatattttgtttgtagtttgtacatagcacattttgaggcaatgggcgtgtccctggtcaagagtttgttcctgggcagcatcagcagttctgtagttgcattgctgtttggacagggtcccactgtgctatgttaaagagtggttgatgcatgtcttttgaaataattgggccttgaacatactgcggatgtaaatgaaagaattgcggctgcagatgtcgatgaaggtagccccgacttggactctgctgattgcaggaacctgagttgatgaaggttctgaagttatgctatttttttcatgaaaaaatatgtgggtcccactcaaaactttgacctaactaaatatatccaaacaattgattgggtctgtcttaattgctagtttcttttgtacgagatgcggcagattctatacatgcatggctgatatcatgttctacagtttgacttgtttcccaaat

SEQ ID NO: 140521 - DNA, 869 bp, Zea Mays
gtgtttgttcctatcacttcgttgattttttctgaaacctataccgcgctaggctccttatcttgttggcggccaagctcttcacgccagccatctcccctccatcttcccattctgcagaaatcccgccatggccgccctccctggtgctcgccccagccgaggtctctccatggccggctgcagctccctggcgcccctgctcctccctgttctagcttggtgctcagagccccatcgtcggccgcccttctgctcccttccccatggcgtgcctgctccctagacggcgctcggattcctccttctcggccatctccatcacgccctgctcgcccagcggcgacgagctcggcctctgctcctcccctgctcctatggtggcgccggtcggatctccctggcgcctcaccctactctctgtctgcccatggagtcgcccagcccaaccgtgcctgctccctccctgtgctcgccatggtcgtcgcctccaagcttctccctgctgcgcgcgcggccgtgcccctctgctcgccacggcgcgtcgagctcccgccccgagtccttttcctgttcgcccgtgacgcccggcgtcctgcctgctctgctcgccgtccgtccatgtgccatccgtggagcaacggaggaaaatctgcagcctaagccttggtcaatgtctgtgtggatttgggaaagaagactgtgaagtcggatccagccgttgtctatctcgtcaacatattttatctgccgtggttcagctcgccatgggcctggtcaacgtccctgctttgccttccccaagcagccgcgtggatggccttgctctcgttgtcgttcttacaaatatcgagtcgacttaactctaa

SEQ ID NO: 140522 - DNA, 1110 bp, Zea Mays
caactctcaactcgcgctcaatgcatccgctatcgtctctcctcctgttccgttccgccgcgccgcccagcgcgctccccttgcggcggcggcggcggagtcacacgccagtgcgagcatcatggcaggagctggcgggcgtgctggtgttttccgccatccccttcactgcagtcaaggccctcgccaacagtcccctgggtgcccgcctccgccgccgcctcgaggacaggaaggccgccgcagctgccgaggctgacgctctccgcgctgcctcgcgcggcgcccgtaacaacagcttttggtacggtggagatcggccacggtggcttggtcccgtgccttacgactaccctgagtatttgacaggagagtaccctggagattatgggttcgatattgcaggtctgggaagggatcctgttgctttcgcaaactacttcaacttcgaaatcttacattgtcggtgggccatgcttgctgccctcggtgttgttgttcctgagctattagatctatttgggttagtgcattttgtggagcctgtctggtggaaagttggttatgcaaaacttcagggtgataaccttgattaccttgggattcctggattccgaattgctggtggtcaaggcgtcgttgtaattgcaatctgccaagccctcttgatggttggaccagaatatgcaaggtattgtgggatcgaggcactagaaccattgggaatatatcttcctggtgacataaactacccaggaggacccctttttgatcccttgggcctgtccaaggatcccgtggcatttgaagatctcaaggtgaaagaaatcaagaacggtcgccttgcgatggtagcatggtttggattttacatccaggcggctgtcacaggcaagggccctgtacagaacctggttgaacacttgtccgacccactaaataacaatatattgtcctccttccactaaatgaaaatatgcaagagtggcacgaaccatagcaacgggtgtatattgtattagcgtttacagttttacactaatgggttctgaaaattggctattatatttatttagatagacatttaacggtgattagtgatctatttgc

SEQ ID NO: 140523 - DNA, 1239 bp, Zea Mays
caactctcaactcgcgctcaatgcatccgctatcgtctctcctcctgttccgttccgccgcgccgcccagcgcgctccccttgcggcggcggcggcggagtcacacgccagtgcgagcatcatggcaggagctggcgggcgtgctggtgttttccgccatccccttcactgcagtcaaggccctcgccaacagtcccctgggtgcccgcctccgccgccgcctcgaggacaggaaggccgccgcagctgccgaggctgacgctctccgcgctgcctcgcgcggcgcccgtaacaacaggtgcagtccgttctattgcttcattaaaaggggaacacgtcgtttgatttgtctgagctgtatccgagtggcaacgattgcagcttttggtacggtggagatcggccacggtggcttggtcccgtgccttacgactaccctgagtatttgacaggagagtaccctggagattatgggttcgatattgcaggtctgggaagggatcctgttgctttcgcaaactacttcaagttatgaccaacaatgattactgcttttgacagcttcataaaatcacttcgaaatcttacattgtcggtgggccatgcttgctgccctcggtgttgttgttcctgagctattagatctatttgggttagtgcattttgtggagcctgtctggtggaaagttggttatgcaaaacttcagggtgataaccttgattaccttgggattcctggattccgaattgctggtggtcaaggcgtcgttgtaattgcaatctgccaagccctcttgatggttggaccagaatatgcaaggtattgtgggatcgaggcactagaaccattgggaatatatcttcctggtgacataaactacccaggaggacccctttttgatcccttgggcctgtccaaggatcccgtggcatttgaagatctcaaggtgaaagaaatcaagaacggtcgccttgcgatggtagcatggtttggattttacatccaggcggctgtcacaggcaagggccctgtacagaacctggttgaacacttgtccgacccactaaataacaatatattgtcctccttccactaaatgaaaatatgcaagagtggcacgaaccatagcaacgggtgtatattgtattagcgtttacagttttacactaatgggttctgaaaattggctattatatttatttagatagacatttaacggtgattagtgatctatttgc

SEQ ID NO: 140524 - DNA, 1105 bp, Zea Mays
aactcgcgctcaatgcatccgctatcgtctctcctcctgttccgttccgccgcgccgcccagcgcgctccccttgcggcggcggcggcggagtcacacgccagtgcgagcatcatggcaggagctggcgggcgtgctggtgttttccgccatccccttcactgcagtcaaggccctcgccaacagtcccctgggtgcccgcctccgccgccgcctcgaggacaggaaggccgccgcagctgccgaggctgacgctctccgcgctgcctcgcgcggcgcccgtaacaacagcttttggtacggtggagatcggccacggtggcttggtcccgtgccttacgactaccctgagtatttgacaggagagtaccctggagattatgggttcgatattgcaggtctgggaagggatcctgttgctttcgcaaactacttcaagttatgaccaacaatgattactgcttttgacagcttcataaaatcacttcgaaatcttacattgtcggtgggccatgcttgctgccctcggtgttgttgttcctgagctattagatctatttgggttagtgcattttgtggagcctgtctggtggaaagttggttatgcaaaacttcagggtgataaccttgattaccttgggattcctggattccgaattgctggtggtcaaggcgtcgttgtaattgcaatctgccaagccctcttgatggttggaccagaatatgcaaggtattgtgggatcgaggcactagaaccattgggaatatatcttcctggtgacataaactacccaggaggacccctttttgatcccttgggcctgtccaaggatcccgtggcatttgaagatctcaaggtgaaagaaatcaagaacggtcgccttgcgatggtagcatggtttggattttacatccaggcggctgtcacaggcaagggccctgtacagaacctggttgaacacttgtccgacccactaaataacaatatattgtcctccttccactaaatgaaaatatgcaagagtggcacgaaccatagcaacgggtgtatattgtattagcgtttacagttttacactaatgggttctgaaaattggctattata

SEQ ID NO: 140525 - DNA, 621 bp, Zea Mays
tccattccattccaatttccactggcagtgaaacagccaaagaacagaaaaaaatataaaaaggtgggcgtgcaactttcccttccttcgccgaagccgcgcgacggaaaccccaaacccaacctcatctcttttctcggcctctaccgccccctcgatcggtcggccggtcagctatgacgccgggaagctcggccgccggatccggcgtcgtcgttcctcggaacttcaggctcctagaagagcttgaacgtggagagaagggcattggagatgggacagtgagctatggaatggatgacgcagatgacatctacatgcgatcatggactggcactattattggccctcataatgtgagattattgtttctttattgaatctgttatttttttttccattttctcacaatgagcctgagtaataaaaaaaaacttggtgcaaattttccaagatcttgaagccacatttttgctgttgttttgcattatttgagaagtacttggtgttggtgaaacatgtcatttgaaattttgtagtagtacagaaaatttcgtccgaagttttggctggtaattagctactgctggtgtttcttgctttgctgtaaagtatgaaaag

SEQ ID NO: 140526 - DNA, 525 bp, Zea Mays
tccattccattccaatttccactggcagtgaaacagccaaagaacagaaaaaaatataaaaaggtgggcgtgcaactttcccttccttcgccgaagccgcgcgacggaaaccccaaacccaacctcatctcttttctcggcctctaccgccccctcgatcggtcggccggtcagctatgacgccgggaagctcggccgccggatccggcgtcgtcgttcctcggaacttcaggctcctagaagagcttgaacgtggagagaagggcattggagatgggacagtgagctatggaatggatgacgcagatgacatctacatgcgatcatggactggcactattattggccctcataataccgtccatgagggtcgcatctaccagctgaagttgttctgcgacaaggactaccctgagaagccaccatcagttcgatttcattcaagaataaacttaacatgcgttaatcatgaaactggagtggtaacctcttcatgtctttgtggttgtggttggtgcagaatac

SEQ ID NO: 140527 - DNA, 1575 bp, Zea Mays
tccattccattccaatttccactggcagtgaaacagccaaagaacagaaaaaaatataaaaaggtgggcgtgcaactttcccttccttcgccgaagccgcgcgacggaaaccccaaacccaacctcatctcttttctcggcctctaccgccccctcgatcggtcggccggtcagctatgacgccgggaagctcggccgccggatccggcgtcgtcgttcctcggaacttcaggctcctagaagagcttgaacgtggagagaagggcattggagatgggacagtgagctatggaatggatgacgcagatgacatctacatgcgatcatggactggcactattattggccctcataattttatgtcgagttgtattaatctcttttcttacttgaagaccgtccatgagggtcgcatctaccagctgaagttgttctgcgacaaggactaccctgagaagccaccatcagttcgatttcattcaagaataaacttaacatgcgttaatcatgaaactggagtggttgacccgaagaagttcagcgttctgggtaactggcagcgtgattactcaatggaatacatcctaacccatctcaagaaagagatgacatcgccacagaaccgcaagctagttcagcctccggaagggacattcttctaaagatggcagcaactcatgtccatccatggtgactcggaaacagcttccgcacctggttcctatattttatatatttagtctgatctcccagttatctgtaaaccaccgagatcgagtgcaagcagacttggttgatttacaatttgcccggtggttgctaatgatatgggatgaaacggttgccggtttggctgctattaaggttgtgtaatctgatgggcaatttcagcattctaatgccctaatgatgaatctttggccatttgctgttctgccttgtctttgatcgtcaactgcatatttgcacacttttttttcccactttgcgccgctgcacacctaatactctcaaaacaatagtttaggagtaaaggtgaaaatacttagtccaacagctcctgtgccctcaatttatttggtgctccaaaaccaaagccactgacgccctatctgtggtttttttaatttcctgtgcctagaagacgcccgcgtttttttttcatttcctgcgcctagaagcgctgtgctccattatttttctgctgcggtacatatttcgtttcgtactgctgtacaaatttgctcagtgcagcagttaaggaaaagcttaactaagctagatgggttgcattatggtatttttaagcagttattggagttgagtataatttttttgagcttttagacttttgagagaagcccaatatagaaatattggcagtaaaaaataccaggagctgttgaaggtgctctaaagataaaacaggcgctaggagggcaataatgcgaagttgataaaagaagagcgcaagtgaaggccaaaatctgtcatgcaaattggctaaacaatcgacttggactacaaatcctattgttaggcaaaccaccatcttctcctagccattgtattgga

SEQ ID NO: 140528 - DNA, 1536 bp, Zea Mays
tccattccattccaatttccactggcagtgaaacagccaaagaacagaaaaaaatataaaaaggtgggcgtgcaactttcccttccttcgccgaagccgcgcgacggaaaccccaaacccaacctcatctcttttctcggcctctaccgccccctcgatcggtcggccggtcagctatgacgccgggaagctcggccgccggatccggcgtcgtcgttcctcggaacttcaggctcctagaagagcttgaacgtggagagaagggcattggagatgggacagtgagctatggaatggatgacgcagatgacatctacatgcgatcatggactggcactattattggccctcataataccgtccatgagggtcgcatctaccagctgaagttgttctgcgacaaggactaccctgagaagccaccatcagttcgatttcattcaagaataaacttaacatgcgttaatcatgaaactggagtggttgacccgaagaagttcagcgttctgggtaactggcagcgtgattactcaatggaatacatcctaacccatctcaagaaagagatgacatcgccacagaaccgcaagctagttcagcctccggaagggacattcttctaaagatggcagcaactcatgtccatccatggtgactcggaaacagcttccgcacctggttcctatattttatatatttagtctgatctcccagttatctgtaaaccaccgagatcgagtgcaagcagacttggttgatttacaatttgcccggtggttgctaatgatatgggatgaaacggttgccggtttggctgctattaaggttgtgtaatctgatgggcaatttcagcattctaatgccctaatgatgaatctttggccatttgctgttctgccttgtctttgatcgtcaactgcatatttgcacacttttttttcccactttgcgccgctgcacacctaatactctcaaaacaatagtttaggagtaaaggtgaaaatacttagtccaacagctcctgtgccctcaatttatttggtgctccaaaaccaaagccactgacgccctatctgtggtttttttaatttcctgtgcctagaagacgcccgcgtttttttttcatttcctgcgcctagaagcgctgtgctccattatttttctgctgcggtacatatttcgtttcgtactgctgtacaaatttgctcagtgcagcagttaaggaaaagcttaactaagctagatgggttgcattatggtatttttaagcagttattggagttgagtataatttttttgagcttttagacttttgagagaagcccaatatagaaatattggcagtaaaaaataccaggagctgttgaaggtgctctaaagataaaacaggcgctaggagggcaataatgcgaagttgataaaagaagagcgcaagtgaaggccaaaatctgtcatgcaaattggctaaacaatcgacttggactacaaatcctattgttaggcaaaccaccatcttctcctagccattgtattgga

SEQ ID NO: 140529 - DNA, 1509 bp, Zea Mays
ccaaagaacagaaaaaaatataaaaaggtgggcgtgcaactttcccttccttcgccgaagccgcgcgacggaaaccccaaacccaacctcatctcttttctcggcctctaccgccccctcgatcggtcggccggtcagctatgacgccgggaagctcggccgccggatccggcgtcgtcgttcctcggaacttcaggctcctagaagagcttgaacgtggagagaagggcattggagatgggacagtgagctatggaatggatgacgcagatgacatctacatgcgatcatggactggcactattattggccctcataataccgtccatgagggtcgcatctaccagctgaagttgttctgcgacaaggactaccctgagaagccaccatcagttcgatttcattcaagaataaacttaacatgcgttaatcatgaaactggagtggtcatgtaggttgacccgaagaagttcagcgttctgggtaactggcagcgtgattactcaatggaatacatcctaacccatctcaagaaagagatgacatcgccacagaaccgcaagctagttcagcctccggaagggacattcttctaaagatggcagcaactcatgtccatccatggtgactcggaaacagcttccgcacctggttcctatattttatatatttagtctgatctcccagttatctgtaaaccaccgagatcgagtgcaagcagacttggttgatttacaatttgcccggtggttgctaatgatatgggatgaaacggttgccggtttggctgctattaaggttgtgtaatctgatgggcaatttcagcattctaatgccctaatgatgaatctttggccatttgctgttctgccttgtctttgatcgtcaactgcatatttgcacacttttttttcccactttgcgccgctgcacacctaatactctcaaaacaatagtttaggagtaaaggtgaaaatacttagtccaacagctcctgtgccctcaatttatttggtgctccaaaaccaaagccactgacgccctatctgtggtttttttaatttcctgtgcctagaagacgcccgcgtttttttttcatttcctgcgcctagaagcgctgtgctccattatttttctgctgcggtacatatttcgtttcgtactgctgtacaaatttgctcagtgcagcagttaaggaaaagcttaactaagctagatgggttgcattatggtatttttaagcagttattggagttgagtataatttttttgagcttttagacttttgagagaagcccaatatagaaatattggcagtaaaaaataccaggagctgttgaaggtgctctaaagataaaacaggcgctaggagggcaataatgcgaagttgataaaagaagagcgcaagtgaaggccaaaatctgtcatgcaaattggctaaacaatcgacttggactacaaatcctattgttaggcaaaccaccatcttctcctagccattgtattgga

SEQ ID NO: 140530 - DNA, 477 bp, Zea Mays
aatgaagacttcaacatattgagttggtggcatgaacataaacttatctatcctattctttctctccttgctaaagatgtcatgactgtccctgcttcaactatatcttctgaatcaagttttagtcttgttggcagagtgattgaggagcaccggcgccgactcacaagtgatatggtggagattttatcatgtataaaggactgggaattagcggactcacatatgcagcacaatgtggagaaggacactaaagagatggaacttatacatgcaagtatgatccttgaagatgcaacctctgtttgaaatgtttgtaatgaacacttatttgttttctgtactgtggactgtaatgaacactattactttaatttggagctagctgtactcttttttcctttctaggggtttctcacgaggtgtgagtttttacctagaaaggtttttaacgaggcagcattgcacatcagctcc

SEQ ID NO: 140531 - DNA, 576 bp, Zea Mays
acctaaacttggctgtattttataaagttaagcaaaatctttcagttcacctgcttgttgtagatgttgaagtagatgttgaagaggtaccagagcccgaagagcgaccccagctgcagcgtcttgacgagccctccccccgcttcctctacggccccatcagccgccgccaccttcccggccgcggccacgtgccggccggccctgcatctccggtactcctcctccagcggcgagtccggcagtaggctggcgcgggcggagaggcagaggccgcggggcgcgaggatcggctgtgcggcgccgctgcacgcgccggcgccgcgccgtgggctagggtaggtggggagtggccgcgcggcgcatggccgaacgagaccgatggcagccgtgctctgcatgcccgtcccgggaggagatgagaccgcggtactctggaagaggcgggcggaggcggcggagggcacgaggttttcaccggcttggcgagggctggcgcaggcggtggcgtcagctgacagtgcgcgagatttggagtgagggctttcagaccagggtttctgtattgagttgaat

SEQ ID NO: 140532 - DNA, 411 bp, Zea Mays
atgctggctgtgccactgctgccgtttcgagcggagctcgtccccatgccacgcgggccgctagattcaccgccagcgcccagcggtggggtacagagcgaggggcgcctggggatacaacgaggctcctggggtggttggtccacgtcacctccaaaggccgccatcgatgatgagggcggacggacggacgacagacgtgcctcaagaaggacaaacgcgtcgcagatccaacgaggcatcgacgaaaatccttcggacgctggcagcacgggaacaagacatcgacgaagatctgcaaaagggccggagctggatgaatgccatggcgaaccgggtgccgcacctcgccgacgatgccgcgcctcactgaggatgaggagcggcggcgcagggccgcggactcactga

SEQ ID NO: 140533 - DNA, 1041 bp, Zea Mays
agccttaccttgttaccttgcattttcccccacttgctgagccctgaccataaagaggaggagaggaagggcagcggtggcgccgccgccggcggcggctcgacccctggggcgaatctaagggacctggtgtcgagggaatactacggccacaagaagaaggtgcactctgtagcatggaactgcctaggcacaaagcttgcttcaggatcgatcgatcataccgcacgtgtctggagcattgatccacatgtccattctaaggttaaagatattgaactgaaaggccacacagatagtgtagatcagctttgctgggatccaaatcatcctgatacagttgctactgcagctgctgacaaatctattcgtctttgggatgctcgaagtggaaaatgtcaagttgttgaacttagtggagaaaacatcaacatcacatataaacatgatggcactcagatagctgttggaaacaaggaggatgagctgacgatattggatgttaggacacttaaagttgctaagaaacacaagtctacttacgagatgaatgagattgcttggaataaagctggagatctattcttcattactactgggttagggcacgttgaggtggttaaggatcttgagtttttaaagccctgcaagctgaatgctcatacagcagggtgttattgcattgcaatggatccacttgataggtatttcgctgttggaagtgcagattcacttgtcagtctttggaatgtcaaagagttgttatgcattagaaccttcacaaaacttgagtggcctgtaagaacagttagcttcagtcatactggagaattcattgcatatgccagtgaagatcctttcattgacattgccaatgttgagactggacgatcaattcatcagattccatgtaaagcagctatgaatagcgttgaatggaatcctaagtacaacctcctggcctatgcgggagacgacaagaacaagtatatgactgatgaaggtgttttccgggtatttggcttcgaaacacataattga

SEQ ID NO: 140534 - DNA, 1461 bp, Zea Mays
gattggaattggattactcccctcccggacaaaacggggcgagagcgcatggagagcagagaggaggagaggaagggcagcggtggcgccgccgccggcggcggctcgacccctggggcgaatctaagggacctggtgtcgagggaatactacggccacaagaagaaggtgcactctgtagcatggaactgcctaggcacaaagcttgcttcaggatcgatcgatcataccgcacgtgtctggagcattgatccacatgtccattctaaggttaaagatattgaactgaaaggccacacagatagtgtagatcagctttgctgggatccaaatcatcctgatacagttgctactgcagctgctgacaaatctattcgtctttgggatgctcgaagtggaaaatgtcaagttgttgaacttagtggagaaaacatcaacatcacatataaacatgatggcactcagatagctgttggaaacaaggaggatgagctgacgatattggatgttaggacacttaaagttgctaagaaacacaagtctacttacgagatgaatgagattgcttggaataaagctggagatctattcttcattactactgggttagggcacgttgaggtggttaaggatcttgagtttttaaagccctgcaagctgaatgctcatacagcagggtgttattgcattgcaatggatccacttgataggtatttcgctgttggaagtgcagattcacttgtcagtctttggaatgtcaaagagttgttatgcattagaaccttcacaaaacttgagtggcctgtaagaacagttagcttcagtcatactggagaattcattgcatatgccagtgaagatcctttcattgacattgccaatgttgagactggacgatcaattcatcagattccatgtaaagcagctatgaatagcgttgaatggaatcctaagtacaacctcctggcctatgcgggagacgacaagaacaagtatatgactgatgaaggtgttttccgggtatttggcttcgaaacacataattgatgctgacttagactaccctcatatagaatggtttgcattgtagattcactttcgaattttgtttacactgatacattttgtagatgttcagtgtaacttggatgctaatcaatcttctgccggcttgaactgaacgtcattgttgtagtgtatcacaggatacccatgtgactaacgtatttccgggatccaattctatttttattacacttactttttattatagtatggagatgtattcattttctttgaattgattttgatccgcaatactatcgaagtaaaaagggatctaagtaagaactaggctaacttttttattttttaacttctaatttttttagtaacaagtaaatactctgtttggacataagaaacttacaatatcaagtgaataaacaccaactaatcaag

SEQ ID NO: 140535 - DNA, 991 bp, Zea Mays
gaattggattactcccctcccggacaaaacggggcgagagcgcatggagagcagagaggaggagaggaagggcagcggtggcgccgccgccggcggcggctcgacccctggggcgaatctaagggacctggtgtcgagggaatactacggccacaagaagaaggtgcactctgtagcatggaactgcctaggcacaaagcttgcttcaggatcgatcgatcataccgcacgtgtctggagcattgatccacatgtccattctaaggttaaagatattgaactgaaaggccacacagatagtgtagatcagctttgctgggatccaaatcatcctgatacagttgctactgcagctgctgacaaatctattcgtctttgggatgctcgaagtggaaaatgtcaagttgttgaacttagtggagaaaacatcaacatcacatataaacatgatggcactcagatagctgttggaaacaaggaggatgagctgacgatattggatgttaggacacttaaagttgctaagaaacacaagtctacttacgagatgaatgagattgcttggaataaagctggagatctattcttcattactactgggttagggcacgttgaggtggttaaggatcttgagtttttaaagccctgcaagctgaatgctcatacagcagggtgttattgcattgcaatggatccacttgataggtatttcgctgttggaagtgcagattcacttgtcagtctttggaatgtcaaagagttgttatgcattagaaccttcacaaaacttgagtggcctgtaagaacagttagcttcagtcatactggagaattcattgcatatgccagtgaagatcctttcattgacattgtgagtcgtgacacacgggaaaaattgcttttttttcaatactagatgatgtaaaaagtactgttattttatgtttttttattatacttccatcaggccaatgttgagactggacgatca

SEQ ID NO: 140536 - DNA, 813 bp, Zea Mays
ggcgcttggaggggttggatgaagaaacggtgataagcattcattcaaagaaaaaccttgataagtggagcaagtagatgtaatcctccttccagtttcaataagcttacaaagatttatatctttatttttattcttacttctcataggtggcctgtaagaacagttagcttcagtcatactggagaattcattgcatatgccagtgaagatcctttcattgacattgccaatgttgagactggacgatcaattcatcagattccatgtaaagcagctatgaatagcgttgaatggaatcctaagtacaacctcctggcctatgcgggagacgacaagaacaagtatatgactgatgaaggtgttttccgggtatttggcttcgaaacacataattgatgctgacttagactaccctcatatagaatggtttgcattgtagattcactttcgaattttgtttacactgatacattttgtagatgttcagtgtaacttggatgctaatcaatcttctgccggcttgaactgaacgtcattgttgtagtgtatcacaggatacccatgtgactaacgtatttccgggatccaattctatttttattacacttactttttattatagtatggagatgtattcattttctttgaattgattttgatccgcaatactatcgaagtaaaaagggatctaagtaagaactaggctaacttttttattttttaacttctaatttttttagtaacaagtaaatactctgtttggacataagaaacttacaatatcaagtgaataaacaccaactaatcaag

SEQ ID NO: 140537 - DNA, 2340 bp, Zea Mays
ggttcgacggttccatctcctcgcggcaagaagacagaaacgcgattggcaatggggagttccaagctctccttgctttgcctcgtccccttccttctcctcgccggcggcgacacgcttaccacattcatcgtgcacgtgcagcgcccggagccagaggagaaccagaccaccggcgaccgggaggtatggtacaggttgttcctgcccgaggacggccgcctcgtccacgcgtaccaccacgtcgcaagcggcttcgcggcccggctgacgcaggaggaggtcgacgcgctgtccgccatgcccgggttcgtggcggcggtcccggacgagatgtacgagctgcacacgacgcacacgcctctgttcctcggcctggacgcccggcaaggcgacagtccgtctcacggctccgaacgcggcgctggggtcatcgtctgcatgctcgacaccggcatctccccgacccacccgtccttcaacgacgacggcatgccgccgccgccgccggaaaagtggaaggggcgctgcgacttcggtgtccccgtgtgcaacaacaagctcatcggagcccgctctttcatgtccatccccaccgccggcggcaactcttcgtcgccggtcgacgacgctggccacggcacgcacaccgccagcacggcagccggagccgtcgtgccaggtgctcaggtcctaggccaggccgcgggagtcgccgtcgggatggcgccccgcgcgcacgtcgccatgtacaaggtgtgcaacgacacaatctgcgccagtgccgacatactcgccggcgtcgacgccgccgtgggtgacggctgcgacgtcatttccatgtccatcggcggagtgtccaagccgtactaccgtgacaccatcgccgtgggcacgttcggcgccgtcgagaagggaatcttcgtggcgctgtcagccggcaaccatggccccaacgccagctccgtcgcaaacgaggcgccctggatgctcaccgtcgccgcgagcaccatggaccgctccatccggtcgacggttcacctggggaacggacgctccttctacggagagtcggtgtaccagccggatgccccggcctccattttccacccgctgatctacgccggcgccagcgggaggccgtacgccgagctctgcggcaacggctcgctggacggcgtggacgtctggggcaagatcgtgctctgcgactacggaagcggaccggacggcaaaatcacgaggatccagaaaggcgtggtggttcgaagcgccggtggcgtcggcatgatactgatcaacgcgtttccccaaggctacaccacgctcgccgatgcgcacgtgatcccggcgtcgcacgtcgactacgccgccgcctcagctatcatgtcctacgtccagaacacggcgaaccccacggcaaagatcctcttcggtggcacgatcctcggcacgtcgcctgctccgtcgatcgccgccttctcctctcgcgggccgagcctccagaaccccgggattctgaagcccgacatcacggggcccggcgtgaacgtgctcgccgcatggccatcgcagctccaggttggtccgccgccgacggcatctgctgctctccccggaccgcgaggaccgacctttaacatcatctccggcacgtccatgtcgacgccgcatctcagcggcatcgcagccttcgtcaagagcaagcaccctgattggtcaccagcagcgatcaggtcggcgctcatgaccaccgccgacgtcacggaccgtgccggcaacgccatcctgaacgagcagcgcgtggcgtcggacatgtttgccaccggtgccggacacgtcaacccggaaaaggcggtcgaccctggcctggtctacgacatcgcgcccagcgactacgtcggctacctgtgcggcctgtacagtagccagaacgtctcgttgatcgcgcggcggccggtggactgctctgccgccacggtgatcccggagagcttgctgaattacccatcggtctcggttgtcttccagccgacgtggaataggagcacacctgtggtcgttgagcggacggtgaagaacgtcggagaggaggtgtcgacggtttattacgcggcggttgacatatttgacgacgatgcagctgtcgccgtgtttccaagcgaactggtgttcaccaaggtgaatcgggaacagagcttcaaagtgatggtgtggcggagccacaataataagggtgccaaggtcgtgcaaggcgcgttccgttgggtgtcagacacgtatacagtcaggagccccatgtccatatccttcacttgacactacaaatctacctagctt

SEQ ID NO: 140538 - DNA, 1102 bp, Zea Mays
actaaacacaattcgatcgagagcgagcgagcgagagagagagagagagagagagagagagagagcagggctgaagaagttggaggaatcgctgccagtggaaagcggcagcagcagaagcaagaaccagcaagaaaggggagagagaaagccgaaggacttttcctcggattgcatccttcgcttttgagggaaggagaaggaccctctctgtcctcgcggggggcggcaggaggagcagatgttcccgcctggcctgatccaccaccgccctgacgctaccgctcccggcgatgggccaccgcgctccggccccggtgggccgagccttgtactgacggcggaccccaagcccaggctacggtggacggccgacctccacgagcgtttcgtcgacgccgtggcccagctcggcggacccgagaaagcaacaccaaaaactatcttaaggacgatgggtgtcaagggtcttactcttttccacttgaagagtcatcttcagaaatataggttaggtaaacaatctgataaagaggggtcagagcaatctaaagatggtaagttgttatccagttaatgttcaattctttctgtggtgtttctaattttttttatgatttcaaagttcaatttgaatcaacgcaacctgtattttattaacaggtgcactttttctttatgacactctgtatgatgtttattgctattatgattgatcaatggtctctatgtgttagtttccttattgttttttgtgaaatgatatatcacctatgtgtgaacatatagtatgtagtcttttatgaaagatggaagttgatgataactttgtaaaggagaatctggtcttttcctagttataaaatggacatctgttgtggatcaacagcgtctgtggtaaggatgcagaatgagactaataaggaagactacaggaagggtcagagtagtctgttcttatgatgactaaatatgcaggattttttagtcatagtgaggctatggttgatagggatgcagagcagattgatactgccgaaattactgcatcatgggaggtagaagagatggcctggacatttgttacttgattaggatgttg

SEQ ID NO: 140539 - DNA, 1471 bp, Zea Mays
actaaacacaattcgatcgagagcgagcgagcgagagagagagagagagagagagagagagagagcagggctgaagaagttggaggaatcgctgccagtggaaagcggcagcagcagaagcaagaaccagcaagaaaggggagagagaaagccgaaggacttttcctcggattgcatccttcgcttttgagggaaggagaaggaccctctctgtcctcgcggggggcggcaggaggagcagatgttcccgcctggcctgatccaccaccgccctgacgctaccgctcccggcgatgggccaccgcgctccggccccggtgggccgagccttgtactgacggcggaccccaagcccaggctacggtggacggccgacctccacgagcgtttcgtcgacgccgtggcccagctcggcggacccgagaaagcaacaccaaaaactatcttaaggacgatgggtgtcaagggtcttactcttttccacttgaagagtcatcttcagaaatataggttaggtaaacaatctgataaagaggggtcagagcaatctaaagatgcttcctatcttctagatgctcaaagtggaatgagtgtgtcccctagagttgctgcccaggatatgaaagaaagccaagaagttaaagaagcactgagagcgcagatggaagtgcaacgaaggctgcatgaacaagtggagcaggtccaaaagcgcgtgcagatcagaatggaagcacttgagaagtacatcgacagtatcctagagagcgcatgcaagatggttactgaacaatttgcttcgagtggcttcagtatctccaaccctgatctcccggagatatcccctggaggggtcatgtgtggctccacggacacgttgggctcgtcggtgttgaaccagctttctgtgagctccatcgactcgcacagtccaggaggcaaaccttctccatcaggcatggaaggtccgacactgctccagaagtcgcctgagctcaagcggaggtcctcttgaactgtgacagcgaattctgaggttggcggtgatggctgtctctgtggagtgtctgaatatggtggtgacaatggaaatggtggcccagtcttgtggtagctgactttctctccaggtagcaggacgtgctgtgtttgttgatcaatccaagtatcaaacggacctactatgttcatgtgaacttcctcaagtgctagttaaaaagttttcatgcttctgtcatgagattatgatcctagtagcatccttagcacacttgaaacgttgactcgtgtcctagtgtcgtttgtgttagtccatatgtgaacaatgattcatgttggaacatgctagctaacaccagatgattcaagcttcgtatttttgtctcaattgtccatgcaggcttcccagcacttgctgcaatttattcccagcacttcctgcaatttattcgacttaaaggctactgtatttagc

SEQ ID NO: 140540 - DNA, 1378 bp, Zea Mays
aaacacaattcgatcgagagcgagcgagcgagagagagagagagagagagagagagagagagcagggctgaagaagttggaggaatcgctgccagtggaaagcggcagcagcagaagcaagaaccagcaagaaaggggagagagaaagccgaaggacttttcctcggattgcatccttcgcttttgagggaaggagaaggaccctctctgtcctcgcggggggcggcaggaggagcagatgttcccgcctggcctgatccaccaccgccctgacgctaccgctcccggcgatgggccaccgcgctccggccccggtgggccgagccttgtactgacggcggaccccaagcccaggctacggtggacggccgacctccacgagcgtttcgtcgacgccgtggcccagctcggcggacccgagaaagcaacaccaaaaactatcttaaggacgatgggtgtcaagggtcttactcttttccacttgaagagtcatcttcagaaatataggttaggtaaacaatctgataaagaggggtcagagcaatctaaagatgcttcctatcttctagatgctcaaagtggaatgagtgtgtcccctagagttgctgcccaggatatgaaagaaagccaagaagttaaagaagcactgagagcgcagatggaagtgcaacgaaggctgcatgaacaagtggaggtccaaaagcgcgtgcagatcagaatggaagcacttgagaagtacatcgacagtatcctagagagcgcatgcaagatggttactgaacaatttgcttcgagtggcttcagtatctccaaccctgatctcccggagatatcccctggaggggtcatgtgtggctccacggacacgttgggctcgtcggtgttgaaccagctttctgtgagctccatcgactcgcacagtccaggaggcaaaccttctccatcaggcatggaaggtccgacactgctccagaagtcgcctgagctcaagcggaggtcctcttgaactgtgacagcgaattctgaggttggcggtgatggctgtctctgtggagtgtctgaatatggtggtgacaatggaaatggtggcccagtcttgtggtagctgactttctctccaggtagcaggacgtgctgtgtttgttgatcaatccaagtatcaaacggacctactatgttcatgtgaacttcctcaagtgctagttaaaaagttttcatgcttctgtcatgagattatgatcctagtagcatccttagcacacttgaaacgttgactcgtgtcctagtgtcgtttgtgttagtccatatgtgaacaatgattcatgttggaacatgctagctaacaccagatgattcaagcttcgtatttttgtctcaa

SEQ ID NO: 140541 - DNA, 2131 bp, Zea Mays
gggatatattcgccaacaaactcatttcccgtctccacttgttcctcctctgtgctctcgcctttccattcctccaccggcctcatcccccaactccgtcgagcattaccgtcagagggcggcggcgcggcgcggcgccgccggcgacggggaccgcgtgaggcaggctcccctcaaggctcgtcctcctcgtcgggaggcgtcgccgttgccccgccctctgggctggcgcggcgtggaggggacagctggagatccgcccgtctctgcttggattgcttccttctcccgcagagggtatgagcaatgtactcaccaaaaccagagtctagttttggcccaaatcccaactcaggtacacaccagcagcaaatggaattaactggggccaacatgggtcctggtaatggagcaaataacaataccaacatggctgggaggcaacgcttacgctggacaaatgaactgcatgaaagatttgttgaggctgttactcaacttgggggtcctgatagggcaactccaaaaggagttctgagaattatgggtgtacaaggattaacaatataccatgtaaaaagtcacttgcagaaatacagactagcaaagtatattcctgatgcttcaactgatgggaacaagaccgataacaaagacccaggagatttgcttgccggacttgagggatcctcgtatgaacacataattctaattcgtttaattttactgaagaaggatataattcaaagtctagttatttattcccttatgagccattttgggtgaaattttactgtcctagtggcatgatatcagatggaagtatgatgatttatgggattagttagctgtgaacgtatcgtaattgtagctactcctattttagagtgatttctgcaaaatgaacaaaaacatattgattccatctgctcattattttttacctttaatgtcataagatgcataactgttagacaggaaatacagagaactcaaaataatttcaaaatcgaacagtggtattttttatttcttctaatgaaaatggttaccatttcagtcccttttatttcttttctactagaaatatttttcttgtaaggacctttaattgtataagtttttgttcacagtggattgcagatatctgaagccctcaaactgcagatggaggtccaaaagcggctgcacgaacagttagaagtacaaaggcagctgcagttacgaattgaggctcagggaaagtacctccagaagatcatcgaagagcagcagcgcttaacaggtgtgaaatctgaaactcctgctggaggtgcttctgtcactgtatcaagtgatcaattcccagactcggagcggactgagccctccacacctgcaccagcatccgagtctccaactcaagttggtgcttccaatagggacactggagaccgaactgaagcaaccaagagcacctgtcatggtgattctctttcccgcaacgagccactaacccctgattccaactgccagaacggttctcctgtcgctagtccaaaccatgaaagggcagccaagaggcagcgaggcagtggtactgaattcttagattctgaggctgagttttcccttccgcgccacatcttcgagtcgagttcaggctcagagttccaacaatactcaatgtcctactcaggacagtagcttctgatgttcacatcatctctgcaccgttgctagcttgttcagcacgatgcgcatggtccgtaggtctgggtaggttgatgtctcaaggagcgtgttgttggtaaacaaagctgtaggtgttcagtgattgtctacatggtatacgtgaccagctatttaagttcctaggtttgtaacatgtatgtccgcctgcagttcagttgagatgcttcaaggctaaggttctgttgtgtgacctgtagacacgaggctgtcagcttgtattctcttggtaatgtgtgtcagcagagcgttagcattaagtctaattgaacagtgctgttatctgtaacgtctgagtttgatcagaaactgaagttaattgaggaagacatcaacaatgttctgatactattggttgcttgtgttattagattcgacctcatttatgtgggagtaggac

SEQ ID NO: 140542 - DNA, 1685 bp, Zea Mays
atattcgccaacaaactcatttcccgtctccacttgttcctcctctgtgctctcgcctttccattcctccaccggcctcatcccccaactccgtcgagcattaccgtcagagggcggcggcgcggcgcggcgccgccggcgacggggaccgcgtgaggcaggctcccctcaaggctcgtcctcctcgtcgggaggcgtcgccgttgccccgccctctgggctggcgcggcgtggaggggacagctggagatccgcccgtctctgcttggattgcttccttctcccgcagagggtatgagcaatgtactcaccaaaaccagagtctagttttggcccaaatcccaactcaggtacacaccagcagcaaatggaattaactggggccaacatgggtcctggtaatggagcaaataacaataccaacatggctgggaggcaacgcttacgctggacaaatgaactgcatgaaagatttgttgaggctgttactcaacttgggggtcctgatagggcaactccaaaaggagttctgagaattatgggtgtacaaggattaacaatataccatgtaaaaagtcacttgcagaaatacagactagcaaagtatattcctgatgcttcaactgatgggaacaagaccgataacaaagacccaggagatttgcttgccggacttgagggatcctctggattgcagatatctgaagccctcaaactgcagatggaggtccaaaagcggctgcacgaacagttagaagtacaaaggcagctgcagttacgaattgaggctcagggaaagtacctccagaagatcatcgaagagcagcagcgcttaacaggtgtgaaatctgaaactcctgctggaggtgcttctgtcactgtatcaagtgatcaattcccagactcggagcggactgagccctccacacctgcaccagcatccgagtctccaactcaagttggtgcttccaatagggacactggagaccgaactgaagcaaccaagagcacctgtcatggtgattctctttcccgcaacgagccactaacccctgattccaactgccagaacggttctcctgtcgctagtccaaaccatgaaagggcagccaagaggcagcgaggcagtggtactgaattcttagattctgaggctgagttttcccttccgcgccacatcttcgagtcgagttcaggctcagagttccaacaatactcaatgtcctactcaggacagtagcttctgatgttcacatcatctctgcaccgttgctagcttgttcagcacgatgcgcatggtccgtaggtctgggtaggttgatgtctcaaggagcgtgttgttggtaaacaaagctgtaggtgttcagtgattgtctacatggtatacgtgaccagctatttaagttcctaggtttgtaacatgtatgtccgcctgcagttcagttgagatgcttcaaggctaaggttctgttgtgtgacctgtagacacgaggctgtcagcttgtattctcttggtaatgtgtgtcagcagagcgttagcattaagtctaattgaacagtgctgttatctgtaacgtctgagtttgatcagaaactgaagttaattgaggaagacatcaacaatgttctgatactattggttgcttgtgttattagattcgacctcatttatgtgggagtaggac

SEQ ID NO: 140543 - DNA, 819 bp, Zea Mays
gaaaatttggcgccattccaggaatcgcgaaaagaaaaggtcctacctcgtatcgcgtccaattgctttgctcattctcgtgctcggcaggggaacggtgcgaagcggaggagcggcgatgcagatccgggtgcagtgcgcgtgcggcgagtcgtcgtgcccggaatgggccgtcgtggagctgcagggcgtggtgcagccgcaggcctccttcgccggcgacatccggggactccacatcggccgcctctgctcctccccttccccagcctccgcctcgtccaaggcagggttcaccttcacggtggggtaccacgagctcgccggcacaaaggtgacgctcaagaagcccctgctggtgctcaggaagaagaaggttaatgctggtgctcaggaagaagagccaccgacggcggcggaggtggagctggaggtgatcggcatcatccggcacaagatcctattcaaggaccgccccaaggccctcatctcaaagccgccaaccaaggagaagaaggccgtgcagccagcagcaaagtgacgcgacgccagcaactccgtgccccttgagaatctgaagctctcttggtttggctgcgtattccctgaatattgcgcctgttgtagtcatgcctggtttggccgatacttagtcagttgtagtcgcacgttcttttttatttgtcacattttaatttaaaaatgaacttgtgagtgacaaatattttagaatggaaaaagtataagtttaaggatgtttcctctcggaaaaaaaagtttaaggatgatcacttgtattgtctgtttctttgtttgtgg

SEQ ID NO: 140544 - DNA, 815 bp, Zea Mays
gaaaatttggcgccattccaggaatcgcgaaaagaaaaggtcctacctcgtatcgcgtccaattgctttgctcattctcgtgctcggcaggggaacggtgcgaagcggaggagcggcgatgcagatccgggtgcagtgcgcgtgcggcgagtcgtcgtgcccggaatgggccgtcgtggagctgcagggcgtggtgcagccgcaggcctccttcgccggcgacatccggggactccacatcggccgcctctgctcctccccttccccagcctccgcctcgtccaagggttcaccttcacggtggggtaccacgagctcgccggcacaaaggtgacgctcaagaagcccctgctggtgctcaggaagaagaaggttaatgctggtgctcaggaagaagagccaccgacggcggcggaggtggagctggaggtgatcggcatcatccggcacaagatcctattcaaggaccgccccaaggccctcatctcaaagccgccaaccaaggagaagaaggccgtgcagccagcagcaaagtgacgcgacgccagcaactccgtgccccttgagaatctgaagctctcttggtttggctgcgtattccctgaatattgcgcctgttgtagtcatgcctggtttggccgatacttagtcagttgtagtcgcacgttcttttttatttgtcacattttaatttaaaaatgaacttgtgagtgacaaatattttagaatggaaaaagtataagtttaaggatgtttcctctcggaaaaaaaagtttaaggatgatcacttgtattgtctgtttctttgtttgtgg

SEQ ID NO: 140545 - DNA, 382 bp, Zea Mays
gcaagccaaacatcgaggtcgaggactccgtccaccccaacttttcgagggtccctcggcacaggctacgatcctgcaaggagcgaggggtcccaatgtgcgaaggctacgtgacaacaaaggctttaggaaagaagacatgtctgagttaccaagccactatgggggctacccggagagcccatgtgtaagtgtaaccatagggtaaaattgtgagtgcatgtgtccactaggcacgacggtgttgtaattactcgctacatagaatattgtaggaatgtagttggtaaccgggggtacggatgcactttaggccacctaccctagattgccctatcttattgctggacaggacacgtataatgagacgctacagttctct

SEQ ID NO: 140546 - DNA, 136 bp, Zea Mays
ctaacccacgcgacagctcccgaccgcaacgcaaacgtcaaaccaaataaattctactgccctagttgcgaatgttgttcacaaaattccaaatccccaaaacaacaactggatgagggaaaaaaacaaaaagaac

SEQ ID NO: 140547 - DNA, 581 bp, Zea Mays
gtgtaatattgtaacatttatgtaatcattgtattcgtgatacaaatcctaacacgtatatggttcgtattcggttgccttctaaaatcagttgtgagcctctaatcagtgaagctgctcttcatagcacctatgaatctatagctaccgaactgtcctcccttcactttcccttcacttatccatatcatcctctatgcccgtgcgggtacccatgccgtcccttgaatggcactgaaaccgctgtacaggctcagctgttcatcgcagaggtaggtagtcaacgaatgggtatcgctggcttcgcggccccatctttgttgctggccgagttgggtgatccttaacccgagtacgcctacggtcgcgaattgtttaaccaccatgtaatcagtgactgaccctcgggccctggtggtttctgtcgtttccatccgctggcaactcgccggttgatgtctctgtcttttgtaattgtttttttactttacgtaaaacatgtgaaggcatattcttagactagtttggcaactcctttttccaaaggattccttttttaaaaaaaactaattttatttgag

SEQ ID NO: 140548 - DNA, 1835 bp, Zea Mays
aattcccttttcccctcttcccgagctcccttgctaggttcctcgtccgcctctctgtcctagtctcgtcagcaacagcacagtgttgttactgacgcgccttcactctgttgacctgcatctagccaagtttatttggagactccaacctttggtctcccaaacttggagctcccaaggggagaggttctgccaaaattttggcttctgagcatccattttcagggggaggttctgccaaaatctgctcctgtgaacatagatttctcaaggggaggttctgccaaaatttcctcctgtaaccaccagctttccagggggagattctgccaaaatttcctgcactgatcatcattcttctaaggggaggttctgccgaagttttcttgtgtgacgacgacgatcagtttccagggggagattctgccaaaattttctgcactgaccatcagtcttccaggggaggttctgccaaaattttcttctctcactatcacttctccaaggccaagccctgccaaaatttccttcatatatcacatgcatcgtagacatacagacaataaactctaatttgcaaaggtaacaaaaaaaaaaagagtgctttcctccttggccttgatggtaggctagtagagaaaaccgcgcgcagcatctgtttacatgttgttgctcgtcctgtccgagcacctcctttccagatttatggtcggttctgccctaacccgccttgtccagtccttctctgttgttttcctctactggttttatgtcttctcagtaagccgccagtagttggactcaccttttcaagttatctaggcatttcctatatatttaccacatataaaaattatactaaggcagtaacaaaagaggtgcctttatatctgacaaacagaagggagtgaaaaagtttagattacacctcagtttgcctgtggtgacaactatgtcaagtggcacttcgtccggatcgagccggtgggtccaaagttctagatccgaggatgacctagatctccaggcccagatggagaggaggagaaagcggaggaaggagtcgaatcgggagtcagctcggaggtctaggcaacggaagcaagaacaccttgacgacctcacctcacaggtaaatcagctgaaggaccagaacaagcagctcagcatggcactgagtataaccagccaaaaccttgtggcagtgcaagcgcagaactctgttctgcagacccagaagatggagctggacagcaggctgggtgccctgacggagatcctctggtacatgaactcaagcaccagcaccagcactgctcctacaaatccagccatagcgaacgacttcacagcatggagcagagcctctgatattcttggtggaaccagctacagcgccatagacctgtaccaatgcttctagctctaagctctagctctagaagagagaaggtggctgtggcatatgacatagtggtagggccaggaagaaaggaggcgggcaggcatcaagttctgttcaatcgtgtggggcctttgtgtcactgttgatgtgtgcagtgtgtgcttgatgcttctccctccactgtttattttcgaggcgacggcgatgttttggtttggtagagactcaaggacggacaaaatggcagaaagttgccttggctttgtgtgacgtaaatgcagttgttctccggtatttatatggcaaataatattgggccagctagtgaaaaagacaggcagatgatttgatgtggctcttgatatatagggaaataatatgcgtaacgatgattataatgtttattaagatgtcgatttgatgtcaattg

SEQ ID NO: 140549 - DNA, 807 bp, Zea Mays
gatcgttaattatttctttttcactaaaattgtctaaacatagcagaaacaagctaggattgaattcatatatctgagcggtgtattattgcggactgaaacaggtaaatcagctgaaggaccagaacaagcagctcagcatggcactgagtataaccagccaaaaccttgtggcagtgcaagcgcagaactctgttctgcagacccagaagatggagctggacagcaggctgggtgccctgacggagatcctctggtacatgaactcaagcaccagcaccagcactgctcctacaaatccagccatagcgaacgacttcacagcatggagcagagcctctgatattcttggtggaaccagctacagcgccatagacctgtaccaatgcttctagctctaagctctagctctagaagagagaaggtggctgtggcatatgacatagtggtagggccaggaagaaaggaggcgggcaggcatcaagttctgttcaatcgtgtggggcctttgtgtcactgttgatgtgtgcagtgtgtgcttgatgcttctccctccactgtttattttcgaggcgacggcgatgttttggtttggtagagactcaaggacggacaaaatggcagaaagttgccttggctttgtgtgacgtaaatgcagttgttctccggtatttatatggcaaataatattgggccagctagtgaaaaagacaggcagatgatttgatgtggctcttgatatatagggaaataatatgcgtaacgatgattataatgtttattaagatgtcgatttgatgtcaattg

SEQ ID NO: 140550 - DNA, 678 bp, Zea Mays
atcgttactagttacgactactgccaactccaagaagatctggggaaatgcaagaagatcacggcgcctcatagatccagaagacaggtgtacgtgagccttccaagtgtaagatggagaagaaaagcaagacaacaaaaggggatcggataaactaaataccaagcagtgccaggtacaatggacttccatcacatccatgctgaaccgctcaatctgcagtttacagggatgagctgtccgctatcttcgatgatcgtatccgtcaatgagaacgagctctttgtcgccgacaagaacgataagctacattcaggttcggagatttgtcccctgagattagatatataaaagggggaaactaattaaagaaatattagctagcaagcttgcatgcatgggaggaggggagctaggtacatgcttgcctcctctctagctctataaaacccccgcctcctcctcagttctgcaccacagcaagctctagcgcgccacaaccatatctgaccacagctagctagctcatcagtcagttcatcaagtgaacttgtagccatgaggaccatgagccagggcaagcagaaggggaaggtgggcagagctctcaaagggcagagaggcaggctctacatcatccgacggtgcatcgtcatgctcctctgctggcacgactga

SEQ ID NO: 140551 - DNA, 529 bp, Zea Mays
ccacgaattctcaaatttagagtctctgaaagtccttcaagacatcaatgcgtccattttcctaaaacatcaagcataaattgattggtttatgaatattcagtcaaataaacttacgaagtttgtgagaatccatgaagatgaaattcattttatagagaatatgggcatcacaagggctacaacagcaaactacatcataaacggcctcggccaacctgaagaaacacaagcggttaatactattgaaggtccaattacaactgttacaactgggaagggtgtgtcaggaattgaagcttaaaccgaatgacctcagacgcagcaaacgtaacctaattgggtgtgcttcaattgttcgttgatgtcacctaccttgtttggattgtgaatacgactgttcctaaaaggctaaatctagaggcaatgttctagctttagctagatatctacatagcaagtaaaatggatgttggacaaatttgtagcgccagtttgtcatttacagtgtaaaaatgacccggtgtga

SEQ ID NO: 140552 - DNA, 163 bp, Zea Mays
cacaaatggatttcgatattttgattaattcagatgaagctgctgataaacaggaaggctatggatctgggaaagaaaaggcagggaagaagttatcagaggtaaaagaatcttcaggtaaaaagaagtcaaacacagggagtggccacaaatcaggtcctcc

SEQ ID NO: 140553 - DNA, 1616 bp, Zea Mays
ctccccccctcctagagataatcccggggtcggcttcaaccgaatgccgcgagatccctgctggtgggcgcggacttgggcgtctcccaggggtaaataaggatgccctcgacccctacgcatcctgaggcaccactaaccgaggtcctgagtgtcgccccagctaaagagcccaagtagaaatctgagcgcggccggtgagggatcgagggcaactgtgagtgttctctcaccgggcagttgttgcgggtcaccgaggtgggcacgccagccgtgttcgcgacctcgccattgaaggttgcagtcttggttgataaaggagtcatcctcggggagtgatcgctgccgtgaaaccattgcgcggcgtggagaacttccctgctaccttgacctacgacgagcaagcaaccgtggagccaggtgctcagcaggtggaaaatactaagcaggggctcattgaaggcaagttgtgcccttgatcacttctatttacccaataatgttcctgttagtcattatgatctgtataggttaattttatgggacccaataggtcaccctagtttggttatctttataccttgtttaccactgaacttttgggtagtacctgctattgctttatgtggttttgggtgttaagatacacattattcatgatcatgcttttattaccaatgtgcaagatcattatgttaattggaacgtggagcgaccacccgggaaaacagtgctaccacaagggtggtatgggacacccttggctgactaattaagaaagctagtggaggactaccttacatgaaaagggcaagggcggtattggagttgtcagtatagggaggttctcaggttgattttgctgagatggcttttcagacggaggattcctgtattgcgctcctcagaaaccgtagcggattttcagaagttagtggaactttgtaaatgcctcgtagtgttaccctgttttgcttcattggtggaggtgtatggggcccgtacaactccgtggcagatgggtaacatgacttgtgggtaaagatgtgcaacctttatagagtgtaaaactggtatatcagccgtgctcatggtcatgagcggctcggaccctcacatgagtaacttatagaattaaatttaattggtcatttgcatcgcattgtggtttatttattaattgcgatctcttattttttggggttggtatttacttatacttagtaactgctaataaaatttgaccaacttattaaaagcagtgctcagctttaaccattatttgttgatcagccttacacttcacatgagctcccacctttggtgcgttgatgcacattattccccacaacttgttgagctatgatcttttgtgagcttacccttatgatatataacccccacaagagaagaacaggtagcccaggaggaggactactacgaggagtacaaggaagtctaggtggcgtctctcaatcagcttgatggcgtcgaggaataattattagttcactttattattatcatttatttttgtaagacacttctgctatgtaataatgtggtgacatttatctctatacacttggtcattatttgtgttgttttctttggcg

SEQ ID NO: 140554 - DNA, 354 bp, Zea Mays
gcggacttgggcgtctcccaggggtaaataaggatgccctcgacccctacgcatcctgaggcaccactaaccgaggtcctgagtgtcgccccagctaaagagcccaagtagaaatctgagcgcggccggtgagggatcgagggcaactgtgagtgttctctcaccgggcagttgttgcgggtcaccgaggtgggcacgccagccgtgttcgcgacctcgccattgaaggttgcagtcttggttgataaaggagtcatcctcggggagtgatcgctgccgtgaaaccattgcgcggcgtggagaacttccctgctaccttgacctacgacgagcaagcaaccgtggagccaggtg

SEQ ID NO: 140555 - DNA, 1741 bp, Zea Mays
ccttctgcagtgcagtgaggcgagcttgtcgccttgttgtcatccttcctcgtcagtagcactgtagcactgccaaatgccaatggctccagccctgtcatcgacataaatcactttatatggatccgcaattgcttcagagagctaccgccaccagctattgagctactgcctctgaccaagtccccagctgcgctgcgcctgctatgtcgtcgtcctcgcccgtatcggcggtctcatcagccaccgcgccgcacgtcgtggacgactgcctcggcatcgtgcagcttcttagcgatggcaccgtgacgcgctccgcggactactccgccatccctctcctgggcgaggtgccgtccaacctgcccgtccagtggaaggacgtcgtctacgaccccgcgcacgcgctccgcctccgcatgtacaggcccaccgacaccgacggcggcaagacgaccaacaacaagctgccggtgctagtgtacttccacggcggcggcttctgcatctgcagcttcgagatgccccacttccacgccggcgggctccgcctcgccgccgagctcccggcgctcgtgctctccgccgactaccgcctggggcccgagcaccgcctccccgcggcgcaccgcgacgccgaggccgtcctgtcctggctccgcgcccaggccgaggccgacccgtggcttgtcgagtcggctgacatgggcagggtgttcgtctgcggcgactcggccggcggcaacatcgcgcaccacatcgccgtccagtacggcacgggccacctcgccctcggccccgtcgtccggcttggcggctacatcatgctgtggccctacttcgccgccgaggagaggacggcgtccgagacggccggtcttgacgtcgaccaccagttcgttagcacggcgctgttggatcagatgtggcgcctggcgctgccggtcggcgcgaccagggaccacccagcagcgaacccgttcggaccggacagcgtcccgctggaggacgtcgccttccagccgctgctcgtcgtggacccagaccaggacgtgctgcacgaccgcacacaggactatgccgctaggttgacggccatggggaaactggtcgagctcgtcgtgttcagaggccagggccacgggttcttcgtcttcgacccgtgtggtgaagcttccgaccagctgatccacgtcattcggcgcttcgtactgttgcataagcatccatgtaatcttgttgatcttagtactaccatgtagttgcattagtgagtcatgtactcatgtgttcgtcagtcggacaagtttgtttcgtagaatcgcggacgagctggagagtgcacagcccgtgcagtgaccgcgtctagggatgtgtttccgccacggtgtgcatgtcatgcacgtcgcacgttcgtccttagaagtcggatcgtgcagctgtattccgtggcggggaaacgtggaactaccccagtgtatttggttcacgaaatgcatgtgtgagaggtgcgcgagacgcatctgaaaatcagtttgtctatgttcctcctctcacccatggtgatcgtgctctggggacactgcggcaccgttcgtcgagccacagattgtgctcgtcgtcgctcgctgtagatacttggtccaacagtctggtatcagaacccggtgtatatactacggtggaccggtgaggcggtgagtccaccaagggagccggcgaataagaaggtaattgttcc

SEQ ID NO: 140556 - DNA, 307 bp, Zea Mays
cctgccaaccagtcaacccagtagcttgcaatatttaaaactctgtttgttgtaaaatttgggactgtgtttaccaatggagtttggtattcactcaaagttatgttttttacggtgacactcaaaattaggttatgtgtaggtttttaatgttaacttgtttggaaagaatctatatggttttcttgcaaattgacagttctttccccaaattttggtctaaagaaaccacatcaccgatagaattcagatcccatttatcggtcacctccaatgaatgttttctataattaagaaaggagaccga

SEQ ID NO: 140557 - DNA, 2867 bp, Zea Mays
acacgcataagcaaaaaaatgttttcattacaacatgtacccctgcactaggaaaataaggcactcggcactcgtgagccgtcgcatttccccccgtgtgaccaattcctctccgggccgagcagccgttccaatccgctcacgccgcctctctcgctgccccgcttgaccgcctgctagcgctgcagtttgatgctgatgacctgatccctccgttgggtaggttcttgggcgcggaaagaacaaagaactcgtggtgggtccgggtccgcaagaccctaggtgttcgtcagcagcgaggatgcccggcctgcctctgcctcaatcgttaaatcagaatattggatgtgaatatgcctatcctgggtctacaggccaggccttccgtcagcagctaagaactgcattgtctccagatgagaaacttaccgctgaaaaagatttggctctgtattgcaagccagtcgagctctacaatattattcaacggcgagccatgaaaaatcccctttttattcaaagatgccttctttataatatacatgcgaggaggaaaaagaggattcagataaccatatcactttctggaagtacaaatactgagttgcaaacacattatgtctttcctctttatgttctgttagctagacccactagtaacctttcacttgaagggcattctccaatttatcgattcagtcgggtttgcttgcttacttcctttagtgaacatggaaataaggacaacagtgaagctacattcatcattcctgacgtgaagagtttgtcaacctcccgtgcttgcaaccatgatattatctttattagctgtgggcaagttggacaaagtaatggtgaagataactgctctgggaaccatgtggaagattcttctctccaaatgcttgaagggaaatgctcctggggtaaaataccaactaatttacttgcttcatctttggagagttgtgtcaatttaagtttgggacatattgtggagttggcatctaaagttacaatgagaccaagcttcttagagccaaaatttctggagcaagacagttgcttgacattttgctctcataaggttgatgctgtgggttcatataaactacaactatgcatgtccgcacaagaggctggtgcaagagatatgtctttgtctccatatagtagttactcatataatgatgtcccaccttcgtcattatcagatatcataaggttaagatctggcaatgtactttttaattacaagtactacaataatacaatgcaagagactgaagtcactgaagatttctcttgtccattttgctatgtacgatgtggaagcttcaagggtctaggatgccatttaaactcatcacatgatctattccactatgagttttggatatctgaagagtaccaggttgttaatgttagtctgaaggctgatgcttggagaacagaggtaaatttatgacagacataaagtttaagctgttttttttttcagattcaatttctgtttggtatatggagctgtagttgatgagtttcgtactttatatatgtgtttaacactttaacttaatatgtccctcagtgttcttccaaaggttcgtttaaatggaggctccacttagttgggcaaaccgaaggcattgcatgttccttagtccaggacgactccctgctttgtgatttccttcctttcttgagtgcagaagccaaggatgaaagagcattggctattctatatctccaatcaaattccttacatagtgtattgtgtacctcaatgattttttggtggataatgttttacatgcttaacaatgcatggttactatttctttaaatggaagcactcttaactgtatttggtaactaatgatcctaactggcagctttttgcggagggcgttgatccaaggcatcaaacattttcttatcgctcaaggtttaagaagcgtagacgatcaaagaacacaatggagaaaatcaggcatgtacactcacatattatggaatcaggttcacctgaagatgaggcaggatctgaggacaactttgtgcaaggggagaatgggacttctgtagcaaatgcttcgattgatcctgctcaatctttacatggcagcaatctttcaccaccaacagtactacagtttgggaagacaaggaagctatctgagagatctgaccctagaaatcggcaactcctgcaaaaacgacagttcttccattctcacagggcgcagccaatgcaactggagcaagtgttctcggaccgtgatagtgaagatgaagttgatgatgatattgctgacttcgaggatagaagaatgcttgatgattttgttgatgttacgaaagatgaaaaacttattatgcatatgtggaattcatttgttcgaaaacaaagagtgttagctgatggtcatataccttgggcctgcgaggcattctcccagttgcatggacgacaacttatacaaaatcctgctctgctgtggggttggcgtttcttcatgattaaactttggaaccataacattttagatgcccgcactatgaacacatgcaatacagtccttcaaattttacaagaagaaagcacaggactaaagtaattttgatgcttctgatgaaaattcaagggaagaagatttctttaccatttccaagaagaaagcatagaattggagtaactttttattgataatttcattcatatctattgtcaattgtattaatggtttttaaaagagacaaatcatgtctaactctcacgctgtaatattctaagtcgtacgtgaatttgatgaatattcattgttgttttacttaagagttatcgtattgagatccttaacata

SEQ ID NO: 140558 - DNA, 2428 bp, Zea Mays
acacgcataagcaaaaaaatgttttcattacaacatgtacccctgcactaggaaaataaggcactcggcactcgtgagccgtcgcatttccccccgtgtgaccaattcctctccgggccgagcagccgttccaatccgctcacgccgcctctctcgctgccccgcttgaccgcctgctagcgctgcagtttgatgctgatgacctgatccctccgttgggtaggttcttgggcgcggaaagaacaaagaactcgtggtgggtccgggtccgcaagaccctaggtgttcgtcagcagcgaggatgcccggcctgcctctgcctcaatcgttaaatcagaatattggatgtgaatatgcctatcctgggtctacaggccaggccttccgtcagcagctaagaactgcattgtctccagatgagaaacttaccgctgaaaaagatttggctctgtattgcaagccagtcgagctctacaatattattcaacggcgagccatgaaaaatcccctttttattcaaagatgccttctttataatatacatgcgaggaggaaaaagaggattcagataaccatatcactttctggaagtacaaatactgagttgcaaacacattatgtctttcctctttatgttctgttagctagacccactagtaacctttcacttgaagggcattctccaatttatcgattcagtcgggtttgcttgcttacttcctttagtgaacatggaaataaggacaacagtgaagctacattcatcattcctgacgtgaagagtttgtcaacctcccgtgcttgcaaccatgatattatctttattagctgtgggcaagttggacaaagtaatggtgaagataactgctctgggaaccatgtggaagattcttctctccaaatgcttgaagggaaatgctcctggggtaaaataccaactaatttacttgcttcatctttggagagttgtgtcaatttaagtttgggacatattgtggagttggcatctaaagttacaatgagaccaagcttcttagagccaaaatttctggagcaagacagttgcttgacattttgctctcataaggttgatgctgtgggttcatataaactacaactatgcatgtccgcacaagaggctggtgcaagagatatgtctttgtctccatatagtagttactcatataatgatgtcccaccttcgtcattatcagatatcataaggttaagatctggcaatgtactttttaattacaagtactacaataatacaatgcaagagactgaagtcactgaagatttctcttgtccattttgctatgtacgatgtggaagcttcaagggtctaggatgccatttaaactcatcacatgatctattccactatgagttttggatatctgaagagtaccaggttgttaatgttagtctgaaggctgatgcttggagaacagagctttttgcggagggcgttgatccaaggcatcaaacattttcttatcgctcaaggtttaagaagcgtagacgatcaaagaacacaatggagaaaatcaggcatgtacactcacatattatggaatcaggttcacctgaagatgaggcaggatctgaggacaactttgtgcaaggggagaatgggacttctgtagcaaatgcttcgattgatcctgctcaatctttacatggcagcaatctttcaccaccaacagtactacagtttgggaagacaaggaagctatctgagagatctgaccctagaaatcggcaactcctgcaaaaacgacagttcttccattctcacagggcgcagccaatgcaactggagcaagtgttctcggaccgtgatagtgaagatgaagttgatgatgatattgctgacttcgaggatagaagaatgcttgatgattttgttgatgttacgaaagatgaaaaacttattatgcatatgtggaattcatttgttcgaaaacaaagagtgttagctgatggtcatataccttgggcctgcgaggcattctcccagttgcatggacgacaacttatacaaaatcctgctctgctgtggggttggcgtttcttcatgattaaactttggaaccataacattttagatgcccgcactatgaacacatgcaatacagtccttcaaattttacaagaagaaagcacaggactaaagtaattttgatgcttctgatgaaaattcaagggaagaagatttctttaccatttccaagaagaaagcatagaattggagtaactttttattgataatttcattcatatctattgtcaattgtattaatggtttttaaaagagacaaatcatgtctaactctcacgctgtaatattctaagtcgtacgtgaatttgatgaatattcattgttgttttacttaagagttatcgtattgagatccttaacata

SEQ ID NO: 140559 - DNA, 1274 bp, Zea Mays
gctagctctctctcccccatcagcagaccaccacccaatcacaccagctctctctagagctagccctctcttcctccaacacttgttgatcccctcccatctcctcaagccttcttcactgaatttctggccggtcgatcgtcatgcacagctacagagccatgcacccgtacactcatcactcgtaccagcaccacaccgcggccgttgcgcccaccaagcacggccacggccacggacatggacatggccatggcgacgaggaggacgaccagtccatgctgctcctctccctctggcctcctggccaccaccacggcaacgccgctgcttcatcggcgtgctcgtctcccccgatctgcgccagcgccaccaccacctctatggcagccgctgcctcctcccccgcttcttacccttggctcacccaccaaagcctttacaataatgccggctgcggcggagggagcagcagcagcagccacagtagcttcctgttccaggagcatcagcaggagccaggtgtcagcatctcactgtccatagccccgccgtgcagcaacaacgcggcttcgtcctgtggtggcggtggcttcgctgcaccgccggcggcaccgtcgacggtgacgacgaccgtgacgccgggcgggggccaggttcccagacagtactggatcccctccgccgccgagatcctggtcggctccacgcagttctcctgcgccgtctgcaacaagaccttcaaccgcttcaacaacatgcagatgcacatgtggggccacggttcgcagtaccgcaaggggtcggagtccctgcgcggcgccatcacggtgggcacggctccgccggcgtcgctgatgcggctgccgtgctactgctgcgcggaaggctgccggaacaacatcgagcacccgcgggcgcggccgctcaaggatttccgcacgctgcagacgcactaccggcgcaagcacggcgcgcggccgtacgcgtgccggcgctgcggcaagcggttcgccgtgcgtggggactggcgcacgcacgagaagaactgcggcaagctctggttctgcgtctgcggctccgacttcaagcacaaacggtcgctcaaggaccacgtccgctccttcggcggcggccacgcgccgcacctcgtcgagtccgtcgctgtcgaggacgaggaggaggaggacgacgaccacgacgacgacgacctgcagacttttgacgacaacggcggcgccggcgcagaccccagcgacatggtcgtcatctag

SEQ ID NO: 140560 - DNA, 123 bp, Zea Mays
gggaaaggtaacaattctatatgtacataaaaccaagagagattataaagttattaattagcgtggatattggaattaaagagagagaaggaaatagtttattttaagaataattatgtcttc

SEQ ID NO: 140561 - DNA, 452 bp, Zea Mays
ggaggtactgctgtatatctcattaccaaacaacaccttcggtgaaactagtactacaatacacagggttgcacagggtttcttccaaacaagtcctctagtttacaagttacacagggttgtattgtacagttgcctgcttcgagtacacagcggcagtttttggcctatatcatgcatgcatgcatgcgtccatcaacctgccgctacccaggggacaaatgacaaatcacttcgatcatgccgcctcaagtttcagtctggcagctggaagcagcagttacagtttatgatgcccaagggcatgcacgaatgccacaattcaggcttgcagtagactccaaatgggagagaactggccatccgtctgtctatgctgcgaccgcaaatgaaccgcgaactagctggcggagcagcaaaccatgacaaccctgtgtaagaaaaaaaataaa

SEQ ID NO: 140562 - DNA, 924 bp, Zea Mays
aaataaaattgatttcaaattcaaatctctcaacgaccaccacagcgcaccggctagatctattcctacatcgaaagaaagggaggagagccaggcaggcagtcaaccctcttccctcccacacaaaacgcaaactacccgccaccgtcggcaactactttcctttcgtcgtcgtccccggctcctccacttcaccaccacgaccggacggacccggatgtcttcgcccgcacatccaccccatacccgcaaatccgcagcaaacgcttgcagcggcggagacagttggtagccgcgatcgagaggcgacgggtaacctgccccgccgcggccgcggcgtatatattaccaccccaaaattccaggagacgacgaggcgccgatccgtagcggcgccgagggcgatatcgaggagccgctggtctcacgccgcaccgagacaatggcagaccagttagggtcttacacaattagatcccatggaatgatattggcaagattacacatgtatgactggataatacttctcctccttgctgtcatagacgggctgttgaatataattgaaccatttcaccgttttgttggaaaagacatgatgaccgacttgagatatcctatgaagggcaatacagtgccattttgggctgttccagtatgtcctggtatcattatcttttagtatgttttttcttttctcaaacacgcagaaaagttgtgcatcattatattaagaagaataggggtccaaatagagcaacaaaatgcaagcctccttatggaattatactgtcacatccatgcaaaagttcttgtgtggttcttaggctcttaactgtttttcttattttcagctgattggaattatactgccttgggccatctttgttggaatttacttcaagaagaacaatttttatgatc

SEQ ID NO: 140563 - DNA, 1796 bp, Zea Mays
aaataaaattgatttcaaattcaaatctctcaacgaccaccacagcgcaccggctagatctattcctacatcgaaagaaagggaggagagccaggcaggcagtcaaccctcttccctcccacacaaaacgcaaactacccgccaccgtcggcaactactttcctttcgtcgtcgtccccggctcctccacttcaccaccacgaccggacggacccggatgtcttcgcccgcacatccaccccatacccgcaaatccgcagcaaacgcttgcagcggcggagacagttggtagccgcgatcgagaggcgacgggtaacctgccccgccgcggccgcggcgtatatattaccaccccaaaattccaggagacgacgaggcgccgatccgtagcggcgccgagggcgatatcgaggagccgctggtctcacgccgcaccgagacaatggcagaccagttagggtcttacacaattagatcccatggaatgatattggcaagattacacatgtatgactggataatacttctcctccttgctgtcatagacgggctgttgaatataattgaaccatttcaccgttttgttggaaaagacatgatgaccgacttgagatatcctatgaagggcaatacagtgccattttgggctgttccactgattggaattatactgccttgggccatctttgttggaatttacttcaagaagaacaatttttatgatctgcaccatggcatactggggattctatactcagtgctcataactgcagtgattactgatgcaattaaggatggtgttggacggcctcgtccagattttttctggcgctgtttccctgatggaaatgatgtttatgataacatcactactggtgttatatgcaatggagtgaagagcgtaatcaaggaaggccacaagagctttcccagtggacacacttcatggtcttttgctggtctaggcttccttgcatggtacttagctgggaaactcacggcttttgatcgcaaaggacatattcggaagctatgcattgtgtttctgcctcttcttactgctgcgcttgtggctgtttctcgagtggatgactactggcatcattggcaagatgtatttgcagggggtcttataggtcttacagttgcttcattttgctatctacagttttttccatatccttttgatggcgatgctttgtggcctcacgcatacactgtccagttagccgaggaagggagcagcagaaatacaaactcctacagcgtgagaccagccgagatcgaaacagtcaatattcctggtcacggtgggatcaccctaagagatactctaaatgatatggagtctggtagcggcaggagattgtgaatgagtctggaagttttgaaccatataccatgagagctgcttgcaatatatacacaagtagatctattgtagagctgttgagtgctgccaccgtgataggagagggttgtttagatgggtctgtcactaaattacttggtaggggtgttgtatcttctgacaacctttggcctttctttatactccacctgtggttaaagtttgtttgcttacgaactctttgatgtcagcttggtcgttgcattcagcaaccatgatctaaccatcgtgaattgaaaattttgtcgccaaatataaggggattaatgctgcaaccaaatggaactctctgaggaacaaaattatagagaccggttgtgatatactttgtatccaggaaacaaaaggagaacaattcaatgaaacatacattcgtaacttatgt

SEQ ID NO: 140564 - DNA, 1704 bp, Zea Mays
aaataaaattgatttcaaattcaaatctctcaacgaccaccacagcgcaccggctagatctattcctacatcgaaagaaagggaggagagccaggcaggcagtcaaccctcttccctcccacacaaaacgcaaactacccgccaccgtcggcaactactttcctttcgtcgtcgtccccggctcctccacttcaccaccacgaccggacggacccggatgtcttcgcccgcacatccaccccatacccgcaaatccgcagcaaacgcttgcagcggcggagacagttggtagccgcgatcgagaggcgacgggtaacctgccccgccgcggccgcggcgtatatattaccaccccaaaattccaggagacgacgaggcgccgatccgtagcggcgccgagggcgatatcgaggagccgctggtctcacgccgcaccgagacaatggcagaccaacgggctgttgaatataattgaaccatttcaccgttttgttggaaaagacatgatgaccgacttgagatatcctatgaagggcaatacagtgccattttgggctgttccactgattggaattatactgccttgggccatctttgttggaatttacttcaagaagaacaatttttatgatctgcaccatggcatactggggattctatactcagtgctcataactgcagtgattactgatgcaattaaggatggtgttggacggcctcgtccagattttttctggcgctgtttccctgatggaaatgatgtttatgataacatcactactggtgttatatgcaatggagtgaagagcgtaatcaaggaaggccacaagagctttcccagtggacacacttcatggtcttttgctggtctaggcttccttgcatggtacttagctgggaaactcacggcttttgatcgcaaaggacatattcggaagctatgcattgtgtttctgcctcttcttactgctgcgcttgtggctgtttctcgagtggatgactactggcatcattggcaagatgtatttgcagggggtcttataggtcttacagttgcttcattttgctatctacagttttttccatatccttttgatggcgatgctttgtggcctcacgcatacactgtccagttagccgaggaagggagcagcagaaatacaaactcctacagcgtgagaccagccgagatcgaaacagtcaatattcctggtcacggtgggatcaccctaagagatactctaaatgatatggagtctggtagcggcaggagattgtgaatgagtctggaagttttgaaccatataccatgagagctgcttgcaatatatacacaagtagatctattgtagagctgttgagtgctgccaccgtgataggagagggttgtttagatgggtctgtcactaaattacttggtaggggtgttgtatcttctgacaacctttggcctttctttatactccacctgtggttaaagtttgtttgcttacgaactctttgatgtcagcttggtcgttgcattcagcaaccatgatctaaccatcgtgaattgaaaattttgtcgccaaatataaggggattaatgctgcaaccaaatggaactctctgaggaacaaaattatagagaccggttgtgatatactttgtatccaggaaacaaaaggagaacaattcaatgaaacatacattcgtaacttatgt

SEQ ID NO: 140565 - DNA, 1817 bp, Zea Mays
cagtcaaccctcttccctcccacacaaaacgcaaactacccgccaccgtcggcaactactttcctttcgtcgtcgtccccggctcctccacttcaccaccacgaccggacggacccggatgtcttcgcccgcacatccaccccatacccgcaaatccgcagcaaacgcttgcagcggcggagacagttggtagccgcgatcgagaggcgacgggtaacctgccccgccgcggccgcggcgtatatattaccaccccaaaattccaggtgcccgttcttgatttgaacccacaggagtaggagtagttcaaattagctagcacggacgcgctccttcaccttctttattattgctccctactagcttttttgctttatgtcccctctctctctctctctctctctctctctctctttattattgctccctactgtctctgtctcttggcttattcattcccgcattctggtaggagacgacgaggcgccgatccgtagcggcgccgagggcgatatcgaggagccgctggtctcacgccgcaccgagacaatggcagaccagttagggtcttacacaattagatcccatggaatgatattggcaagattacacatacatgatgaccgacttgagatatcctatgaagggcaatacagtgccattttgggctgttccactgattggaattatactgccttgggccatctttgttggaatttacttcaagaagaacaatttttatgatctgcaccatggcatactggggattctatactcagtgctcataactgcagtgattactgatgcaattaaggatggtgttggacggcctcgtccagattttttctggcgctgtttccctgatggaaatgatgtttatgataacatcactactggtgttatatgcaatggagtgaagagcgtaatcaaggaaggccacaagagctttcccagtggacacacttcatggtcttttgctggtctaggcttccttgcatggtacttagctgggaaactcacggcttttgatcgcaaaggacatattcggaagctatgcattgtgtttctgcctcttcttactgctgcgcttgtggctgtttctcgagtggatgactactggcatcattggcaagatgtatttgcagggggtcttataggtcttacagttgcttcattttgctatctacagttttttccatatccttttgatggcgatgctttgtggcctcacgcatacactgtccagttagccgaggaagggagcagcagaaatacaaactcctacagcgtgagaccagccgagatcgaaacagtcaatattcctggtcacggtgggatcaccctaagagatactctaaatgatatggagtctggtagcggcaggagattgtgaatgagtctggaagttttgaaccatataccatgagagctgcttgcaatatatacacaagtagatctattgtagagctgttgagtgctgccaccgtgataggagagggttgtttagatgggtctgtcactaaattacttggtaggggtgttgtatcttctgacaacctttggcctttctttatactccacctgtggttaaagtttgtttgcttacgaactctttgatgtcagcttggtcgttgcattcagcaaccatgatctaaccatcgtgaattgaaaattttgtcgccaaatataaggggattaatgctgcaaccaaatggaactctctgaggaacaaaattatagagaccggttgtgatatactttgtatccaggaaacaaaaggagaacaattcaatgaaacatacattcgtaacttatgt

SEQ ID NO: 140566 - DNA, 2020 bp, Zea Mays
cagtcaaccctcttccctcccacacaaaacgcaaactacccgccaccgtcggcaactactttcctttcgtcgtcgtccccggctcctccacttcaccaccacgaccggacggacccggatgtcttcgcccgcacatccaccccatacccgcaaatccgcagcaaacgcttgcagcggcggagacagttggtagccgcgatcgagaggcgacgggtaacctgccccgccgcggccgcggcgtatatattaccaccccaaaattccaggtgcccgttcttgatttgaacccacaggagtaggagtagttcaaattagctagcacggacgcgctccttcaccttctttattattgctccctactagcttttttgctttatgtcccctctctctctctctctctctctctctctctctttattattgctccctactgtctctgtctcttggcttattcattcccgcattctggtaggagacgacgaggcgccgatccgtagcggcgccgagggcgatatcgaggagccgctggtctcacgccgcaccgagacaatggcagaccagttagggtcttacacaattagatcccatggaatgatattggcaagattacacatgtatgactggataatacttctcctccttgctgtcatagacgggctgttgaatataattgaaccatttcaccgttttgttggaaaagacatgatgaccgacttgagatatcctatgaagggcaatacagtgccattttgggctgttccactgattggaattatactgccttgggccatctttgttggaatttacttcaagaagaacaatttttatgatctgcaccatggcatactggggattctatactcagtgctcataactgcagtgattactgatgcaattaaggatggtgttggacggcctcgtccagattttttctggcgctgtttccctgatggaaatgatgtttatgataacatcactactggtgttatatgcaatggagtgaagagcgtaatcaaggaaggccacaagagctttcccagtggacacacttcatggtcttttgctggtctaggcttccttgcatggtacttagctgggaaactcacggcttttgatcgcaaaggacatattcggaagctatgcattgtgtttctgcctcttcttactgctgcgcttgtggctgtttctcgagtggatgactactggcatcattggcaagatgtatttgcagggggtcttataggtcttacagttgcttcattttgctatctacagttttttccatatccttttgatggcgatgctttgtggcctcacgcatacactgtccagttagccgaggaagggagcagcagaaatacaaactcctacagcgtgagaccagccgagatcgaaacagtcaatattcctggtcacggtgggatcaccctaagagatactctaaatgatatggagtctggtagcggcaggagattgtgaatgagtctggaagttttgaaccatataccatgagagctgcttgcaatatatacacaagtagatctattgtagagctgttgagtgctgccaccgtgataggagagggttgtttagatgggtctgtcactaaattacttggtaggggtgttgtatcttctgacaacctttggcctttctttatactccacctgtggttaaagtttgtttgcttacgaactctttgatgtcagcttggtcgttgcattcagcaaccatgatctaaccatcgtgaattgaaaattttgtcgccaaatataaggggattaatgctgcaaccaaatggaactctctgaggaacaaaattatagagaccggttgtgatatactttgtatccaggaaacaaaaggagaacaattcaatgaaacatacattcgtaacttatgtacaagatccttggacaaattgtatttctgtccctctaatggtgcttctggagaattattactatctggaaaagtttgtattttgatgctaagttgattcaacaaaatgagttcagcc

SEQ ID NO: 140567 - DNA, 902 bp, Zea Mays
atggccgtatcatctaaactttgtgttgtcatttcctatttacactacctcagggtcttttgctggtctaggcttccttgcatggtacttagctgggaaactcacggcttttgatcgcaaaggacatattcggaagctatgcattgtgtttctgcctcttcttactgctgcgcttgtggctgtttctcgagtggatgactactggcatcattggcaagatgtatttgcagggggtcttataggtcttacagttgcttcattttgctatctacagttttttccatatccttttgatggcgatgctttgtggcctcacgcatacactgtccagttagccgaggaagggagcagcagaaatacaaactcctacagcgtgagaccagccgagatcgaaacagtcaatattcctggtcacggtgggatcaccctaagagatactctaaatgatatggagtctggtagcggcaggagattgtgaatgagtctggaagttttgaaccatataccatgagagctgcttgcaatatatacacaagtagatctattgtagagctgttgagtgctgccaccgtgataggagagggttgtttagatgggtctgtcactaaattacttggtaggggtgttgtatcttctgacaacctttggcctttctttatactccacctgtggttaaagtttgtttgcttacgaactctttgatgtcagcttggtcgttgcattcagcaaccatgatctaaccatcgtgaattgaaaattttgtcgccaaatataaggggattaatgctgcaaccaaatggaactctctgaggaacaaaattatagagaccggttgtgatatactttgtatccaggaaacaaaaggagaacaattcaatgaaacatacattcgtaacttatgt

SEQ ID NO: 140568 - DNA, 342 bp, Zea Mays
atggatcaggtgaggctgtcattggaagattccccaaagccaccagatcggaggaggtcgtcgtcggacgatccacactatctcagtggcgtccggctcatcggagctgcaacagtccaaacagccggctataatgcgaagcaaacatccccaagggggctcgctgcagccccacgtacgtgtcccgaaggctcaaactctttcacaaacagtaaagtccaagtcccgacgaagtcagggacgcaatatcgcggggtcaagggtgccatgtgcaagcgaaggccatgccagattatagtggggctcaggctcaacctcatcaccattcgggcccatctgtaa

SEQ ID NO: 140569 - DNA, 1573 bp, Zea Mays
ggagaaccgagaaagcgagaagcatcccagagacccagacagcaaaggaaccttgagcctgccggcaactctaacgacgacgatggccgaaggggacggtccaactccagcccgcggcgctcgcgtcgtgctgttcccactgccgtcccagggccacctcagcccgatgctgcacctcgccagcgcgctccacgcgcgggggctcgcagtcaccgtcctccacacggcgtacaacgcgccggaccccgcgcaccacccggggctagccttcgtcgccgtgcccgacgtcatcccggaggccgtggcggcgacgacgaatggcatcgcgaagatcctcgccctgaacgccgccatggaggcgtcggggcacgtccgcggcgcgctcgcgtcgctcctcgcggaggaggcgggcggacagcggctggcgtgcctcatcttcgactccaccctcttcgccgcgcagaaggccgcggctggcctcgggctgcccacgctcgtgctgcacaccggcagcgccgccggcttccgtctgttcaggtccgacacctacaacatgctccacgacaggggctatctgccagccacagagtccaacctacacatgccggtaaaggagctgccgcctctgcaagtgagggacctgttcgacccaagcaagctccccaacaaggaaatcgtgcagaagatcttgggtcgcgccacggagagcacgacgaactcgtccggcgcaatcctcaacacgtttgaggctctcgagtcccgcgagctcgagatgatccgggacgaacttgccgacagaggtatcccacccttcgccgtcggcccgcttcacaagctcaccgccgccccctccaacgatggcgccgacgagactagtctactcagccaggaccgcgtctgcatggagtggctagacgcacggggccctggctccgtgctgtacgtgagcttcggcagtgttgttcatgtcaccgcggacgagttggtggagatcgcgtggggcttggcgaacagcggcgtgccgttcctgttggtggtccggcgtggccttgtggtcggagtggacaagcaggagctcccggacgggttcatggcggccgtggagggcaggggcaaggtgatcgagtgggcgccgcagcaggaggtgctagctcacccggcagtcggaggcttctggactcacaacggatggaactccacgctggagagtatctatgagggggtgcctatgctgtcgaggcccatctttggagaccagttgccaacggcaaggtacgtgtgcgacgtgtggaggattggagttttgctggagggtgtgctggagcggcgggaggtggagaaggccatcaagaagctgatggaagaagacgagggagttggtatcaggggaagagccaaggatttgaaggagaaagtgcggatgtgccttgagagcagtgggtcttctcaacttgccgtcgataagttggtggatcacatactttctctttgagtttttttttatcacacaaacactgtgttgtgtctgttcatggtttcaactcaataaattaataactgctggtttatgata

SEQ ID NO: 140570 - DNA, 1244 bp, Zea Mays
cttcccccatttcctcgcagtcgcatcgcatccgccctccttgcttcacacgcgcgacgcgatttttctattctttttttgggtggtagttggccaggtcggcgtagggatggagacggcggccgcggcgatgctggaggccggggtggggcggttctcgcgggcgccggcgatggccgcggcgctgctggcggagatgtgggcgccgctggccgtggcgctagcggcgctggccacgctgcccagcctgctgcgccgcctgcaggtcatcgtcctgcgcctccgctcccgcgggaaggaggccatccagttgcacatggggacctactactcgtcctgcgacgacgacgacgacgacgaggacggcgacgaagacgagagctccgacgacgaggtcgacgccagctcctcgggcgacgacggcgaggatctgaagcgaatcgggttctacgagggggccgcggacggcgtcttcccctggggcggcgccgtagtccggacctggcagggcctcccgcgccgcttcacggcctgcgcgtcgggcgtgggagctgtcggcggcgccagcggaggagcgttccctgccgctgtcaggctgtggggcgccggcacggccagcggccagccgtggtgggcctgcagcgccgatgaaggcggctgccgcgacggcgcggccgcggaggtggaccaggtcgtcgtcgggtggcggcgcgagcacgcgtcgcagcagcggcgccggcggcgtgccgttcccctcgctcacacgggcaactgaaacggaacggaacggcaacgggcaaacgaagttacgaagtgggtgtgtcggatttgtgaatatgctgcaggtcgaccagctggagatgccgattccacgattagggcccacctgtaagtgggtgggacgggcccaggccaatgaataaggcgaagggacggtgagagtgccgggaaggggaaggattggttaggcgccgcgccggatcggttggtgacaacattattattttttattagtagtataggaaaggaaaggaaaggaaaagaaaaaaaaactggggctggtgcagacgtttgcactacatgttgtactactacggttactccctgggtgggtgggttagaaatgcgtgatgcagccgcacatcttttacctgtggtgatgactgatgatgtgcaccttgcacgcatgcaacttgtaccgccattctttgattgaatcatgtggtgatctaaagagaggaaaa

SEQ ID NO: 140571 - DNA, 2237 bp, Zea Mays
ggacattggatgtgccgtcatggagctcatgcaattttagccaaatctcattagcagttttcaaggtaaatacttgattgaaaatatccatgctaagagattcatacaagcaatttttggctctagcatttaaatggatttctttttcctcactcgtggtgggtttctcgggattcttgaggggtttcatcccgtcacgagtgactctccaaacacctagatcaacggcctctaggtaacaagccattctagcactataatatgggaagttagtgccgtcgaagtgtggtggcctatgggtatccatcccttcctctaaaaagcgtcgactcttttagcggtgaagctaaagcgtttcaaatgagccaaaccgggctctgataccacttgtaggaaacgggtgacgcctaagagggggggtgaattaggacttctaaaacttttactaaactaggccacaattaaatccctagagcagaacctatgcaaataatcaaaactagaatgtgcaaactaggttttgtctaagtgttgctatctctaccgcaaaggctaagtttcaatctacactaaataagtatgactacaagattgaaacttaaatgcttaatataaatgcggaatgtaaagagctaagtagagaagcaaactctcgtggatgacgccggtatttttaccgaggtatccggaaccacgcaaggtcccgactaatcctcgttggtgcccctacgcaaagggaagcccacgcgagggccaagcaccacggtcgagtaactccgtagagagccacgggccttctccacgcgcaagtggtgctccgcttccggctcctctcggacgctccccgccgtctccactatcaagcttccggccgaaacgccgcgggcctcgttccctccggtacacggtggcggccgtgacacaaacgcggttgtcacggtctcgcaagactctcgccccactcggtacaattacaacgactcacgcaagagccgaggggttgtgaggtttatctaaactcactcaacaatctagggttcacctagagcaagcgctaaagcggtctaactaacctaagcacttcgcaaagcacctacgctaatcaccgagtgattctattaagcacttgggtgtttgagctcttggaaatatgcactatgtgtcttggtatgttgcttgggctctcacacttgagaatggccggttggggtggtatttatagcctctacaccccaaactagccgttggacagaaagcagcagctttctgtcgtcgggtgcaccaccggacatccactgtgcagtgtccggtgcacgccacgtcagccgaccgttggcgcctgtagcagtcgaccgttggatccgaccattgccgtctgcccgtggcacaccggacagtccggtgcacaccggacagtccggtgctacagccagagagcgcctgtctgcggcctctctgcgcagactgtctggtgcctcaccggacagtccggtgcacaccggacaccaatgtccggtgcgccaccaggcgctggctgacagcccttatcttggatttcttcgctgatttcttcgggcttctttgttcttgagtattggactcctatgcatctttttatgtcttcttttgaggtgttgcatccttattgccttggtccaattctcttcgcatcctgtgaactacaaacacaaacacttgaaaacttattagttcacggattgtgttgttcatcaaacaccaaaactcaattagccaaaaggcccggggtccattttccttacagcgggttatttttgatatagtcagggggtcccttatgcaaacatgacacggcgaaggggtaccattgaacctggaccgttggatctgaagcccacggtgcagattaaactaatcttataaacaaaccagtatgcgctcgcggtcgttcgataccagatccacagccctcgcgcgaccacgccattaacaaatccgaacccttggcggtcccgattttattacgtgaagggttatcctaggatctaatctaagcctcatgtcgcgagatcaacggtccacagaccatcgcctccatccgattcctctagcacggcgtggctgagccactgcggcgaagcggtcgccggcgtaaggctcactggcgccacggagcactattctatattcagacacgcgctacacagagcgggccggagcgccatgcgcctaggcgaagcgacgatcatgaccctcga

SEQ ID NO: 140572 - DNA, 103 bp, Zea Mays
cggagacaaatatgaatttgaattaaagcaatcaacagttaaactcgacaagttaactcaaatcataatcacaagatgacaagatagcaagataacaattaat

SEQ ID NO: 140573 - DNA, 465 bp, Zea Mays
atggtgagcaacagcgacagaagagggctgagcggccctgaaggcggaggcgttagcggcgtgctggtggtgatcggcccccgagggggtcatcttagccggtggagacggcacgaccctggtggtcttggcccgatgcgagtaacgcctgttctgaaaccagttccacacctgcttgggctggatggccaccttgccggcgcgctcgggcgaggcggagaacttatcggcgagagtctggagcatggcgcgggtggggatgccgttgttgagctgcagcaagcgcgcctccatctccgccacctcggaagggaggaagcggaaggccggagcaccagtggtgctcggcggacgacccatcggaccggcgctcttggacggcgaggggaggaggatgcagtgagaccagatcggtggtggatcggcggacgggggtggggaaactttaggagaagtgtgagttag

SEQ ID NO: 140574 - DNA, 558 bp, Zea Mays
atgttcttcggttctgacgaggctgagtaccacacgacccttatcaggtcgccctccaatcccgtgaacaggggtctcttctcagatgaagtggcgccaagtcttcatagggagcagtttatcccttctccgcgatctggtagagtggatgggctggacctcaactccagcgacgtggagttccagaacatcgcatcatttcaagaccttcgtcagtctcagtctgctgccaactactctgctactccagttcttgatggtcataggggtcgcaatcattctcgatcagttcttggccgcggtgttacaggcagaggcttccgagcaacacggacgaccagtgagggtcctagaggtggtcgtggagcacgaagcatcttatctcgtggacgtagtatgcctcgacctattggtgcttcctcgtcaggtggtcgttgtgccacaagtggtcgtggtgccaatatttcagcgccaaatgccgctcacagtcaagaggacaatgacgatccctttgcacaagtaactcattttcctaacttggtcactccaatgttgtag

SEQ ID NO: 140575 - DNA, 1288 bp, Zea Mays
aggatgtcagttcgcgtctctttctctccctcacaccctgctcggcgcgtcgtccacctccgcgcagcccaaccggcatcccggcgtcgtgcaccagctgcgggcgaggctcgcaccatggcgcggcgcctctgccccgacgtgctcccctgccggtgcagcgagcggcccccgcccagcgcgacatgcgcatgtgcgcgctccccaccgctctgcgcgctggagccccacgcgccgcgttcccgtcgagcagcgcgttcagcgccctcaccatcgggccccaccgtcatcttcaatccaacagcagcatcctgcagcccttgtcgcagcacatgatgtcgtgtgccggagcatcgctgttcgccatcgtttcgccatgagcgcagcattcctccagtcatcctcttcatctccaatgagcattttctcttctcttttctttctcagtttttcgttactgtgcatccttcggccttggcaagcgcccatgccccttgcggtcagcccacaacatggctccgtccaacccctagcagccccgtcgcaccctcgctgtcgtgcgattcgacactgcgtgcagcatgtctgtcttgagctcaagtcacgtgtcgtcgcgcgtcgttcacgcgccgttccacgtaggtcgttcgcgtagtcgtcgtccatttgcatgatcgtgcacgcgcgcgtgcccggcccgcacgttacttgtgtgctgtggtgcgcgtcgcacgtgctgtttcgctcgtgctaattcacatgctgtccatacgcgtcgtcattcacacgagtcgttattcacacgctttaataaaattgtttcgccacatcattcatgttaagtaattaattacttatttagtgttggttatttaaaataacagttcaatcaaaccaaatttataattttaattacacgttcgcaaatacatgttattgtgattatgccaacttaaatgcatatttaatattggtttaatataaaaaaacgatacagtttaatagtattcgtaggtcacgtcatttattagccgcgaattgctaattattcaatacgttatgcgtcgcaaacctgttttgactccatagcagcgttaatttcatattagtaacattattttgtcacgacgtaagttctaatcaaatagttagtatttggtgtacaatatttattagaataacaatttgaataaaattaatttctagtttttatttgtgcttttatagatacatattaatatgattacgcctgctcgaatgttttggaattaatacttgttagtataga

SEQ ID NO: 140576 - DNA, 805 bp, Zea Mays
atgtcggaatcctcggtggcgggtgtgctcgaagcacagtccaagaccctgacgacgcagtccaacctcttgcagcagatttgcgagtgcctggacgcccaggattgccattgggagactcccaggaagacagtgaccagcaacatggatgcgattcgcgcaatgtcgatgctgcaggaggatctcgccaaggtattggtctcgcggattcagaccgaggtgtctgaacttcagttgtcgacatgggagcgagtcgacgcgttggacaggatgctgatggcatgtgtaacagcacttgagtcggctactgcttccttccagcgttggagaccatgcgtcgagcacttggtgggcgtcattcaggccacagtcaacttgttgcgcgccgacgtcaaccgccttcctcgtcatcaggaccaacataaatgctccagctcccccaagtcagtctggactctggagtccgggttctcctgtctccaccaagtcccaactccagtccaccatgccttcttgatcgcgagcaccgcaggcacaccaacccggattcccctcgcgacttcaatctccgccgccatgctggcctcggcaagggggttctgggcgcggcatcgccggaagatcctcgtcactctgggcgtcgctgggttggggtacgccgcctaccgcttctacgataggcgccgcgcccagctcgtgcgggtcgagcagctgcgcgccatggaggagcgggccgccgccgacctcgttaagaaccagctcccgcacactttgagaaggtgaagatgatctgcgacactacaac

SEQ ID NO: 140577 - DNA, 835 bp, Zea Mays
gatgattcatcactcctaaatgatttcagaaagctagaccaactaatgtctgagacacgaatagtactggcaagtgatgatttcagaaatatcatggagaggtcattgaggaagatagcagaagtggtggtaggggacctggctgtgcagacaactctaggatcaggattacccttagcaactctcttgcccaaagttggtcatctgagttccccattgcttgaggagccaaacaataacaaatacatccagatcatcagaagtatgcctgaagtggaactcttctacacattcctgtacgcaaacatgccaccagaaacatgatctgtacattgatgcgaaaagaacacttgcttctgaattttggctccaaagatctggtggtacatgtggatgatgttcaaccgtctgaaatcaggaaaccaacaaacgcagacagactggatttctgcccttgtatatactgagatattccgttgttgctagcaggaaccgagtaaagctccttccatttcgattctttctttctttgaagtttcggttgtgcacgtttagatagtcacacgcactggggctgctatttcgctatatttttgatcgatgacagatgttccagaagttttacttgccacaagtggctaatgtatacattgcaagtctgttgaatcctgtgttgggtgaatgaatattcgagcccacagtttgcgatcctgcaggcatatgattgcttgtgtagttttgctttaggaagaactggattgcctgaatgtttgaaacagctgagtttcttgcattatgtaattttcttcgtgacgcttgaaaacttttgtcattt

SEQ ID NO: 140578 - DNA, 1315 bp, Zea Mays
ctaacttggtaccagagctaggtttagttttttccctttctctcgggcgccgccaccccagccgcccaacccgccgcccccctctccttcctccggccgccgccggcccttccccttgccccggccgccgcctcctgcccctctgcttccggcccgcggcccctctcctccacccagccgcgctccttcgggcgcttgtctttctccaaacgcgcgcgagccgccgaccggcgggggcgccgcgctgccgtatttcgacgccttcgccgaccgcctcggcgccggcccgcaggcgctcctcaggttcccaggcgtggaggcgctgtcggtggccgccgtcctcgaggcgcccggggaggtcgtcgccaagtccgcgcacagcacgctgtactgcaccgccgtgcgctccggggaggccgccgtgctgctgaggttcgtgcgccccgcgtgcgtcgtcgtcggcgccgacgaggcctatgccgccgcgcggcggatcggcgctgtcagccaccccaacctcgtgctgccccacacggtgttcatcggccctagggtgatgatttcagaaatatcatggagaggtcattgaggaagatagcagaagtggtggtaggggacctggctgtgcagacaactctaggatcaggattacccttagcaactctcttgcccaaagttggtcatctgagttccccattgcttgaggagccaaacaataacaaatacatccagatcatcagaagtatgcctgaagtggaactcttctacacattcctgtacgcaaacatgccaccagaaacatgatctgtacattgatgcgaaaagaacacttgcttctgaattttggctccaaagatctggtggtacatgtggatgatgttcaaccgtctgaaatcaggaaaccaacaaacgcagacagactggatttctgcccttgtatatactgagatattccgttgttgctagcaggaaccgagtaaagctccttccatttcgattctttctttctttgaagtttcggttgtgcacgtttagatagtcacacgcactggggctgctatttcgctatatttttgatcgatgacagatgttccagaagttttacttgccacaagtggctaatgtatacattgcaagtctgttgaatcctgtgttgggtgaatgaatattcgagcccacagtttgcgatcctgcaggcatatgattgcttgtgtagttttgctttaggaagaactggattgcctgaatgtttgaaacagctgagtttcttgcattatgtaattttcttcgtgacgcttgaaaacttttgtcattt

SEQ ID NO: 140579 - DNA, 585 bp, Zea Mays
tttggacggatagagtaatttccaaatgaatatggatggtgtattaataggtcacatcaaatcaaaacagacaaagcaagagttccaagttcaactcgctacacttcaaacattgttctttatcagctaattctttccagcctgacgaaagcaaaagggaattaggccgatcgctagtgcctgaagacgatcaaaacagcagtgcagttatccttgcatcgcctctcgcgaacagcttccttcacgaggcggcgcaccgcaagtgtggctgatgagaacaccttcaactgattctgaacaaattcgacagcatcacctggtccaaataccttgttacacagatataaagcaaatttcagaattaagaaacaataattggtacagaacaaactagagggagggaaataaacatactccccataagccatcgcaccctagaatgatgaaatggtctttcttagtaagttcaaaggaatggacatctggtgttgcaatcaacccaacctgcattgtttttaagttcaaaccgataatgcacatagacggggaaaagaaaataacgtcagtattttcccctttacagta

SEQ ID NO: 140580 - DNA, 789 bp, Zea Mays
aaataatgagtaatttaatggagtggagtgttccgatcggcgagttcctcgagcggatccatctgctcgtccggtcagaggcggccgccgggcacgcgatccgcgtcgacggcacgtgtctcgtgctcgctggggtgtacctgacgcgtttcatcggcagccacgcggcgcgggtcgcggggatcgtggtggagccgtccaccgcgcaccgattggtggccgtcgcgctgttcctgggcggtcactcccccaagaactgggctgccgcgttcgaggcggtctcagaccgcgcgatccgcacaggtgagatcgcagccctagaggagcggttcttgcgcgcgatcagctatcgcttgttcgttggcgggcaagagttcaggggcctctgcgaggtcctggagaaggtgcccctgccgccgtgcgggtgctgtgccagtaggaagaggcaggcggacgccgttgtcggggacgaggaggaggagcaccgccgcgtgcgcgctcgcctgccatcacccgtcgtgatgcccccattaggccattacgaatctttttaggctgaaatctaacgaattcaattcagtcgatggttcttgttttttgttgcttgttttacttcgtgtcgtctcttttttgctgtaggcacagggccatgaggagaagacggtgcatggtcgtggctatcttcgactcagtcagcattcaattcaatcaaattcttctagttttggttgcttctcctacttctacttcgtctgtcttgattttgctgtaggcacgaggccagagaag

SEQ ID NO: 140581 - DNA, 720 bp, Zea Mays
aaataatgagtaatttaatggagtggagtgttccgatcggcgagttcctcgagcggatccatctgctcgtccggtcagaggcggccgccgggcacgcgatccgcgtcgacggcacgtgtctcgtgctcgctggggtgtacctgacgcgtttcatcggcagccacgcggcgcgggtcgcggggatcgtggtggagccgtccaccgcgcaccgattggtggccgtcgcgctgttcctgggcggtcactcccccaagaactgggctgccgcgttcgaggcggtctcagaccgcgcgatccgcacaggcacagggccatgaggagaagacggtgcatggtcgtggctatcttcgactcagtcagcattcaattcaatcaaattcttctagttttggttgcttctcctacttctacttcgtctgtcttgattttgctgtaggcacgaggccagagaagacgtagacggtagatgctctcttgctcgtggccacgctcctcggaagaggacgatgctctcgtcattgatcaagctcgctggaccagaacggggtggagctggagcatccccacagttgctgcctagcttcaagttttattagtgattggtcttgttgtttccagctctggtagagagctcggcgtcgctgctcactagcagagcagcttgctgtgttttatgtgtactggatcagcaagtaccaataaaacctgtcgttgcatcaa

SEQ ID NO: 140582 - DNA, 318 bp, Zea Mays
gatctcggccgtcgtaacaagctgcttcaccggcgctgctcacacaacttgctgccccttgacgccgtttctccaccgagcatagaagacgctgcggcacgagttggctccgacgtacgacgcgtgcgagcacagaaaacatcctgcaggtgctactgcgggtgggccaccgcgtcactgagactgtccgcaacggtgtatcctaaatttttccctctagaagttactatacaaccacgtcagcaagattctcttccctatattcactcatcccgcaaccgttcccaataaattcccctatatatccctctacacatt

SEQ ID NO: 140583 - DNA, 1098 bp, Zea Mays
atggcgcaggtgagcgtggtgacggcggcgaggagggagctagcgggcgcgctgaaccccgacgccagggagttcctcccgtggtggcgcctagggggcagcaggaagcagctctcggccgacgcgccagagttcacgcggtccagcttggggcgagcggtggccgcagccgccgccaacggtgcggtgatagccgccccaaacaacgccggcgtggggaaggcggcgcggaggtctgcaagcaataatgggcaacacgcagagtcgacaatgcctacatttttcaagtctcacaggtctcagtgggatgaaacagtgaaaagaacaatctttgtcaaatacattgatcacaatgtcactgaggacattctggcttgtctatttcagttgtttgggacagtggtggattgccgcatttgtggagatcccacatctgatgatggtctcaggtttggatttgttgagcttcaacacgaggatgaagcaattgcttcgttggatcttgatggatatattattagcgtatcccctttgagcgtttcacgctcaaggactgcaatctgccctattaaccccaagttccttcctcagtctgaagctgagtgggagacgtgcttgaggactatatattgcaccaatatcagcaaaaatgtcacaagtagtaatttgagatccttttgtgaggcgtactttggcaaggtgtgtcgcgttaggcttctggataataaagagcgctccaccaatatagctttcattgagtttgttgaggtttatggtgctattgctgctcttgggtccggtggcatttatgtggatggcgttcctatcaggatgtgcccatccaagagcccgataaggacccattgctttgggaagcttagtagctaataagctggagtgcaggacctaatgccatcatggtgtgtcatgatccggcaatatatatctgcatattatccgttgcatttggttgactcatgacatgagccatgaacaacctttaaacttttgctttagctttaatgccccagaacaataacaacaacaacatttcagaatattatcatactatactatacaacatttaactaaacatag

SEQ ID NO: 140584 - DNA, 484 bp, Zea Mays
atatatatatatatactgtatttatatattacacctgggtgcattcaatatagagaatgcacccaggccgaacctatgtgccaggtccgagccaaccgtcccacccaggccggtttcgtccctcccgcacgctccggacagaaccttttcattttcccgcccccgcccctctttctccgtgaacgggctcctccgcgaacggctcaacctcttcacataagtgcaatcacaccagacttgcagttgcaatcattgttttgtttaacagatttttggacatagttatatagaagttgcaatcacaccagaccagcagttgcaattacaccagacacagttgcaatcatttttttgtttaacagatttttggacatagttatataggagttgcaatcacaccagaccagcagttgcaattacaccaggcagcagttgcaatcattgtttgtttaacagatttttggacatagttatatagaagttg

SEQ ID NO: 140585 - DNA, 561 bp, Zea Mays
gtgccacaccctgttctcccgacatcgacgtcgggtccctgcctcgtctggtcctctcggtgtgggaaggaaccaaaccgagatggaggcagagtgcgacgcctgccttccctcttccgccgagcgcccgctgcgtcattcttgtccctcctcttcatcttcatcggccaaccgattaccactgaatccagccatcggcgactgtccctcggtttttctttaacgatttccgatttgattccatggccggctggaccgattccagcgcatccctcctcctcgtgatgcccgctccccaaggacctgtgcctgcggcagcgggaggagatcaggacgctcaaatacgtcatcctattcctgcacgtggagccggagccagagctcgaccgccgcctttgggacgatatttccatgctcaccgaccagatccagtgcctcacgcaggagctcgccgctcaggttaaggccgagaagcactcagcaaggtcgtgctttgacgaggatggatactgatcttcccctaggacgtcggggtttaacgaggataccgctttctctctg

SEQ ID NO: 140586 - DNA, 98 bp, Zea Mays
tttcgcttttcatataattattatataaataacattctgtcagtgggtgacatcatcagatgtacaataacattatcttagaataatacatacagcag

SEQ ID NO: 140587 - DNA, 591 bp, Zea Mays
atgtggaggatggcgcagggagtgatggctctcaaggcgtggacgtcgccgccttcctctggacgaagaaccatcgctccgcacggcgcggacatctcgccgtcccttacaaccttggctggcctcgctttcgacaggttaatggacgatccagctgattcaatccagcggtatgatctgacgtgcgccgcgccgtacaaaaccttgctgagcacggtcattccaggatggttgtggagcgggatgatggatgatgccggcatgcaaaacatcccaatcgagaagcttgcgcactcctatatatggcgatatctgatggctgggctggaatggaaaaccctcttccggcccagggccgcccgtgggctcctccaagcacgcacagctccagcctcgcgctcaaggccgacgtcggacggggtaaccatgtctaacgcagcacggacgttgtcgagagagtcacgaggagatagaggccccttctcggacagtgaggctctgcagacgtcgtacagcttctggatcgcattgtttgcatccgtcgaagcgggaggcatttgctataacttaacgagggcagtgtcagactga

SEQ ID NO: 140588 - DNA, 1578 bp, Zea Mays
atcggatttctatttcaaccccttccccaaaccgtccttgttgctcttctcgtcttccccctctcctcccaccgcatacatttcgtttcctccagccaaccaaaaagcacagcgggcgtcgccatgggcgttattgagctggcgaacacgtgggggcatcctcccgaagggatcctcgagcacatcttctcctacctcccatcctatgccgaccgcgcgtcttgcgcatgcgtgtgcaggcagtggtacttctacgccagggagaaggagagcacgaccccgctgttcccgtgtcttctgaggccgtccatcagcggggcctcctgcttccacttgttcagcaggacctgcacgagcatgcccaccgtccccgccgcgcgcttctgcggatccatggagggccagtggttcgtggtcgcgcgtgaccagtggcgtgggtacgcgctgctccacctcgcctccggcacgcagatcctgctcccgcaaggcctgctgcaggaagacggggatcgcttcaacttcaacgacctctgggtcggcctcgaatcaaccgacctgatcatccgtgccgcgaccgcgttccgcgcgccgcgttatccggacggcgacgagcactacttcgtcgccgccatcaccctcggcgagcacagggccgcggcatgtctgagcgggaatgggcggtgggctctactggagccggaccaaggcataatatgtccagacttggacaagatgctggtcatgtacgaagagatggaggacgtgatctactacagctgcagtggactagatggcttcttcttccttacgactgaggagcatcttatggtgttcttaccggatgacgacggggaaggccacatcaccggcgaggtgttggcctacctcttccggggccatactatggcctcgcccccggaagccggccacgtggttgctgcccggtacctcgtggagtcggagggtaggctgctcatggtgaagaggttcgtcagtccatgtcaggggcagcagtccacggtgtctttccaggtcttcacgctcatgtgggacaactggaaccggaaagtccctcgctgggagaagtcctcgcccacctccgcccctctgctcgggaagatgctcttcgtcggccgaggctgctcccgggccatcggaaccggacgtaccggcccggccttcatctacttcttggacgacgcggttgcatcgccttacgagttgctgaccactattatcagaaccgagaaggagtaccgttgcagcgacatgggctggtgccgctatgaccagcagtacattggaaaggactggccccaagggcccccggcagactgctcgccatggatttggctctaccgttgatcaatttatggtggagcaattcttggcatatccatagtctgaaactagtaggaaatgttgatgtcgaggcacgaacgattcgaacctactactgctagtaaggtgggtgcatgaaactttaattggtactgagtgctcacttcactgaatttgtagttgctgctttgctggaaatggaagtatctggtctcaacttccttttggcactggaaa

SEQ ID NO: 140589 - DNA, 93 bp, Zea Mays
actatttattcaactggggaggaggatcagaggatcatgcacatactccaacacacctacacaccgactccattcatcatcacaaaatcccaa

SEQ ID NO: 140590 - DNA, 1923 bp, Zea Mays
ccaaccctgtgctcttcttcttggttcttgcgcgacacgaccacgacgacgacgatgaaagcgtcggctccattcagcacgagccagcctctttcttgtcgcacccatggcggtcggccgtcgtccatgtccatgtctgccggcgcacggaccgcaacatcagtgggcaccagctctaagaggccttggttcggtgacctcctggggcgtctgtcgtccacgatggacggagcgtccagggccctcaaggatgcgccgcagaggtttctcgatgcgctggttgacgcaaccttcagattcaccgatcaagctctgaattccgccgagagcaatttcgcaccggtcgatgagactggtgaagccatagagatacaccagagccagatccaaggggcgataccggacggtttccccgagggggtgtacatcagaaacggttccaacccgctctttggcgccctccattccacgtcctcggtcctgggacagtccagggagatctgggtcgagggggagggcatgctccacgccgtctacttcaccaaaagcagcgcgggtcatctatggtcagtctcctacgccagccgctacgtgcagtccgagacgctggagctggaaacggcgcggcacaaaccttgcttcctccctgccgtcgagggcgactctgcagccatcgtcgccgcctacgttttcaactatcttaggtttggcaaggtgagcaaggacatcagcaacaccaacgtgttcgagcattccggcagggtgttcgccgtcgccgagaactctctgccctacgagatctgcgtaggtagcctcgacaccagagacgcctgggacgttggtggggaatgggatcgccccttcacggctcatccaaaggtagctcctggatcaggggagctcgtcatctttggaacggacgcgaagaagccattcctagtagttggagttgtctcagctgatggaaccaaactaaagcacagagctgacctcaagctggacaggtgcacactttgtcatgatataggagtcactccaaagcacaatgtaatcatggacataccacttaccatggacgtcggtagaatcgtcaaaggcggacagctgattcagttcgagaaggaaagctatgcgagaatcggggtgatgccccgctatggcgacgcagattcagctgtctggtttgatgtagaaccgttctgcatgttccatcttgtgaactgcttcgaagaaggcgacgaggtcgtggtacaggcactccgttcgccggactccataataccaggctcaacaattgccctcgacaagctcgactctgaaatgcctgaggttgcaggagatgacaagcccgcgaaacggccaactgccgaggagtttttctttcggttgtaccagtggagattgaacttgagaacaaggagtgtctcaggggagtatctatctgggacagactattcgctggagtttccgatcatcagtagccagtacacgggcttgcagcacagatacgcctatgcgcaagtggtggactcctgtggcaattgtgggaaagtaaacccaaagtatggaggatttgcaaaattctaccttgacgagagaagcaacgcagagataccaggtgctagccttgtaaagacgcaataccattggcttggtaaacacgagttctgctctggagcatcgtttgtaccgagagctggtgggtcacatgaagacgatgggtgggtagtttcatttgtacatgatgaggaaactaatacatctcaggtgcacatagttgatgcgaagagattcgaggatgctcctgtcgcgaaaataacgtttccacgaagagtgccttatggctttcatggaactttcgtcagtaagaaaatgaatgatgtaatgtgattccatcagatgttaaattttgttttctctctc

SEQ ID NO: 140591 - DNA, 128 bp, Zea Mays
gcttcaggtaccattactggagaattctactgtagagatcaatttcctagatttggaagaccctttgtgttcaatgcagagattttaaaatggtatatcagtgtaattacaaattatgtcatgcaaga

SEQ ID NO: 140592 - DNA, 1677 bp, Zea Mays
gccattcagggaagcgaggcagagtaccgaaggtgcagcgcgtcgtcgacggcctccctgcttctctgagacggcgagaggatggccggcgggtttattggcggaggcggggcggccgccgggagggccgagttgtacgagggcaagatcaccggctacttcatcctcgcctgcatcgtcggctccttcggcggctccctcttcggctatgacctcggagtctccagcggcgtgacttccatggacgacttcctcagaaagttcttcccggacgtgtaccggcggaagcaggcgcacccacacgagacggactactgcaggtacgacagccagctactgacgctcttcacctcctctctctacttcgcgggcctggtctctacgttcggcgcgtcctacgtgacgaagcgccgcggccggcgcgccagcatcatggtgggcgccaccagcttcttcctgggcggcgccatcaacgcggccgccgtgaacatcgccatgctcatcgtcggccgcgtgctcctgggcgtcggcatcggcttcggcaaccaggccgtgccgctctacctgtcggagatcgcgccgtaccgcatccggggcgccgtgaaccagctcttccagctcaccacctgcctcggcatcctcgtcgccgacatcatcaactacttcacggaccggctgcacccgtgggggtggcgcctctcgctggggctcgccatgggccccgccaccgccatcttcgtcggcgcgctgttcctgcccgagacccccaacagcctcgtggagcgcggccacctggaggaggcccgccgcgtgctggagaaggtgcgcggcacgcgcaaggtggacgccgagttcgaggacctcaaggaggccagcgaggccgcgcgcgccgtcccgggcacgttcaggaacctgctcgccctgcgcaaccgcccgcagctcgtcatcggcgcgctcggcatcccggcgttccagcagctgtcggggatgaactccatcctcttctactcgcccgtcatcttccggagccttgggttcggctcctccgccgcgctttactcctccatcatcaccggctccatgctcgtggttggcgcgctcctctccatggtcgccgtggaccgtctcggccgccgcttcctcttcatcgaggctggcatccagatgatctcatccatggtggtcatcgctgtgatccttgcgctcaagttcgggaaaggcgaggagctgagcaagggcgtgagcacggtgctggtggtggccatctgcctcttcgtggtggcctacggctggtcctgggggcccctgggatggctggtgccgagcgagctgttcccgttggagatgcggtcggcggggcagagcgtggtggtgtgcgtcaacctcttctggacggcggccgtagcgcagtgcttcctcgccgcgctgtgccacctccggtggggcgtcttcatgctcttcgcctcgctcatcttcgtcatgtccatcttcgtcatcctcctgctgccggagaccaagcaggtgcccatcgaggagatctggatgctcttcgacaggcactggtactggaagcgcatcgtccgccgggaccccaagtaccagcagggcaacctccatcaccagcagcaggagatgtcctccagagcatgaacatgacaaacagtaattttctatata

SEQ ID NO: 140593 - DNA, 1525 bp, Zea Mays
gcacatttctcttctggaacataagtagcgtgcaaacttcgaccgggaccggcgatatccgccatggccaccaccactgccgccgctcgctggagcttccccgcccgtctccagctcctcaccagccgccgcttttgcttccccgcctcctctgccgcgccgcccagttctgtagcggggttcagttgggccgacgccctccgcgtcgctggggacggcgggcgcggcgacgagtccgacctctccgggtacttccggaaggtcaagagctgcaaccgcggaatggataaaaaagggcagttcgtgaagttctctgtggaggatcaggtcgtggggtacatccacaagggatttatcgaacacatcagagactttcatgatgtttttaccattgtcatggatgacaatggcagcaacactgtggagcatgtgtctctccagtcatcactaaggactccagaagaccgaacacatgctattggaagtgtcattaaaagccttggagaattgattccaggtattcgaaatgagctctacccagtaacgtcatcttatggcatgcctgtgtacttctctctggaacgtgctgctgctccttactttggtataaaagcttatggagttcatatgaatgggtatgttgagaaggatggtcagaaatttctttggattggtaaacggagtgatgtgaagcaaacatatccaggaatgcttgatcatcttgttgcgggtggcctgccatacggaatgtcctgcaaagagaatatcatcaaggaatgtgaggaggaagctggaatcacaagatccatatcaacaaatgctacttctgttggagcggtttcttatatggatattgaaggctttagatacaaaagggatgttctcttctgctatgacctccaacttcctgctgattttgttcctaataatgaagatggtgaggttgatagcttcagactagtccctgttatacatgctgcaaacattataaggaggacagattttttcaagccgaactgcaaccttgtgatcatcgacttcctcttccgtcatgggtacataaacccagattctcgttgttacttagatctgctgcaaagcttgaggagtggtgattgttcctaactctcttttgctgtccacatttataatcattgttcaatttaatgaaacaaaaaaaaaatcatggagtagtctggtattatggttgatcataatcataattatgcctgggactccattgtcattttagtatgaacagagcattcacgtgcggttggggattatgcctgggactccattcatcgagttccgttggttggggaagcttctccttcccaaagcatgacgcaagtgctcatcatgtgcggttgctggaggtgccatttctgttcttggattcagccctttgcttgcattggttgttctggttgagagcaaacttgttgcttgcattgacgtatgatcgtgaagtacaaagataggcaatcaaaggacatgaatgattatagaaatttaaaaataa

SEQ ID NO: 140594 - DNA, 2408 bp, Zea Mays
accactcccaccaccaactaagcagattcgatctcctcccatcacctccatcgcaacctctcgacggcagactaggtttcatccccatctcaaccggcggcagcctagggcttcatcccccacccccaaatccatggtatgtggatctgaacccgcccactcccaaatctccaatccgctcgtcggcttttctcgtgcccagttcatgacatttgctcggggatttgaccaatgtcgttttctgctcgtgttcctcgcagccgctcaggttggagatcaattggaaattttctcaatggtcagagagggtcaagttggtggacttgcaccccacggaggcatggatgttgagcctgtactcgaggagtgcctgcatccgggattatcacacacagtcaatttgtaggagaggggacgccatacatcaaagatgactaaagaagaggaagatgaagaatacctcgaagaggaagaagatgcccttgctggtgcaggggggaacacatttagtttcacaaccttcatgctcttaacccctctgatcctggtgcgtggcagattagactccgatggggaagtcactagcgaggtggatcaagttcgtgctcttcaggaagaagtcgtcatccaggtccagctccaccaaggccaagaatttatcgataagaatgctgttacgatttcaagtgtggctctacatatgcatctccagctatggagtagggatttgttctagccactattgcccttatttttcaatatgtggaaaggtgtgagtaacaaaggggaaactgctgccaggaaggagcccacgttctctgagagctctccagtgatctcagagcttgtgcttgttagcgcccataacaacgagatcatgcgggaggtggcaaagggtgaaaattctagcgtgcaagaagtgctagtgactgatgtcagtcaagacttggagaagcaggtagtgtggggctgatacgtccaataatgcgctagtgactgatgtcagtcaagacttggagaagcaggcagtgtggggctgatacatccaatgatgctgagagggtgagtgaacagcgagcggtcatgatggcacaagctaccttcccttattatctgatgattttggattcaagctgaaagaagaggctatgctgaataaagtactaaaggagacagtcttgtcaaaggtagttgccattgataaattgcaatctggtctggcatcttcacttcgcatccaagatgttatgagaaatgagatccaaagagtccaggatgaactttcttgcataacccacaaagctaagcagttggagcttcaggtatccaagatggatgagtcaatcgatgagatccaataggatttctaggaatctacgaaggagctggctgctcttcgtggaacactgaaaacggtgattgaagacagggacctgtcgtggcaggaggtgaagtagctgagaagaaacatcagcatcatgctagaacgaggttgtgtcgctgaagaagatcgaagccttggacaaagacatacttgtcaaggagggagagatcacgatattgcaggacaacatcgacaagccgttcaatatcatctgcagcccaagttcgatgcaggagttcggcatggggtgaagatggctgctattttgtaagtgagttggtggatgaaaattcaagttattgtagaagacaacacatttctttgcatattacatcctgctatgatgttctgaactatgattggttcaacgggtgccatttttctcttagagctattgttgacatggaagaaatggtggcagcaccagcttagtatggacaacaactgaaatctcctacagaagttgtttctaatgtgctattgagctccattgtgttttggcctacgcaatcttgttctccagtctgcctccaagaaaagctctatagtcccatagtttctgctaaggttcaacaacttcaggatcaattataggctgagaagcaagaaaaaatggacttcgtgatgaagcggaaaccattgatagtatgaagaggttgatggaagaaaataacaaccttcttcgtcaactataaagcttcaattgaagaaaagtgcctccatcttaagtttggttgactactataggacatgcagccttgtggtagctatagtagtagtagatatttatagttgctctagatttgaagttataggattatttttaattatgtttaatgtttaataatttgagttgaagttataagatttgctttgaattttaagttaaaggatttgagatatatggtttggagttatatgattatttgatggatggaatatttgtgtacaacaaattcatgtgatattttggctatgatgtgtaatattctatgacgatatcaattcatatgatgtgttcctt

SEQ ID NO: 140595 - DNA, 502 bp, Zea Mays
tccttgctgctggaatttctgggcaccatgggaggaagaggtggacgagctgctgctcgccgtggagcagggagaacagcgagctcggccaggcagcaaggggagagggctcgcggggaggggctggagcttgggtgccggccatggaaattgaagggggcgccatgggagactagggaagctgctgctgctgcgcttgaaggggagaggcgtcgagcaccatggtggccgcggggaggagctgcgcaggggccgtcgggacctgggcgtccctgctggaatggagctcggccaggggaactgctccctgcgcctgcaccagggaaggagcggtggggaggaagataaacatgtgctggctgggagatgcgacgccctagaggagaggagccgccatgggagggagcttgctaccggagaagatgggcgccgccgctgctgcgcaaggaagaaaacagggagaagagagaatggcggcttaaatattttgaggggtgggagt

SEQ ID NO: 140596 - DNA, 360 bp, Zea Mays
atggtgaagcaggcattgggcgtggagatgcagcatctgtacaccatggaatctcagaagccttcgggtgttgatcagtctcatggccaggacacgaggaggggcaacactgggggtccagcccacaggaggggaaagtcacaacaccagtgccaccacccctatcgtggcaaaccctctgaatcgggtacttcaggagggagtactcagaggtatcgagctgttcctaagcctgggttggggatggccactgtctacatgatgtcaagcgctggacagcaattttctgtaccatcccctcaaaagcagttctatatgcccgggactccccagttcatgcctatgccaggtttccattag

SEQ ID NO: 140597 - DNA, 264 bp, Zea Mays
ttctttttttagttctcatttttaattgtaattccacctaaatgattatgtttctgggctgtttttatttattctgactgttttctttactactggctaatttagttctcaatttcttgtgcagtgtccatgactccatgtactatcttgtgcggattccgcgcacccatatcacctcctaccggatcttttcagctcttcatcaggttacactttttacccttgcttcagcttggctcaggctacttatgtttcagattttca

SEQ ID NO: 140598 - DNA, 225 bp, Zea Mays
atggcggcacaagagctcgccgctggcttctatggcctagaggcgagtccgggtaggtgccaggagtccgaccaaagcgggttgttgcggatttggcagcgaagtcagattcgccctagatcgcaacggcccagcagcatagcccgagtttgttacggtagcaacgtggagaagaagaccctggaatgcgggcccctccggtcagatggcaccgagatggcatga

SEQ ID NO: 140599 - DNA, 212 bp, Zea Mays
tgttccaaatagttacgtgcatgtgcaacttgctcacagatgagttcggactatgccagctgggatgcgatgacaactaaaatattcattgacctatgcgtcattcagaagaaccttaataacttcaatagcatgggcttaactaaatatggatggcaacaagtgtatcgcagcttcaaagagcagactggtcttgattatgaaaacaaaaa

SEQ ID NO: 140600 - DNA, 1343 bp, Zea Mays
agatgtctagatgatacaatacacagactgattttcttgtgagaccgtctctcctctgagttttttctacgcgaccacctctccgaatggtatccggaccaaattccggctctaccacaataattaatctaagggctcctctgaactttttgattcagggagagtacagcaaaaaaaaaaaaaactttttgaatgaaaatggaagaaaaaaaacccaattaggcacccccgcgaaatcccttgtgcgaccagccatccttcggagggagtactagtactagctgacaactgcacagaactagtgattcctcctccggagatcgatgacgaccaccgagacgttgtcggagcttctcctcgcgagggccagcttggtgagcaacgcggcggcctcggcacaccacttggcccggcccctgcggaggcaggcgcgcgccacctcgcacgcggcctcgttgctcaccacgtcccagagcccgtcgctgcccaggatgaggcactcgtcgccgtcggaccggtcggtcaccgtcacctcgggaacggacgacacgtacggcttcaggtatccgtccccgacggcgcgggacatggcgaggacgcccagaacgcgcgcgccctcccagaagatgacgcgcccgccggcggactcgatgcgctccagctcgtcggggcggtcgggcttgtggtccgacgacagcggcagcggcggcgcgccgtccccacggcagagcacggcgcggctgtcgccgcagttggccacaatgacgctgtgctcctccacgacggccaccacggccgtggagcccacgtggtcgcacctgtgcgcgtcgcagcggcaggtgctgcttctggcggcggcggcgcgcccgccggccgacgtcacctcggcgtccatccgcgcgaagctgcgttccatcgccacggtccaggccgccgccgcggagactgagctgtcggcggcggtggcggcgagctcctcggcgaccagctcgtgcatccggtcccggcacgcctcggccacgtgcgagcagccgtggccgtcgaacactccgtagaagtcgcgcctcccgccgtcggccgtgccctccgcgcagaacgcgtcgcgcacggacacggcatcctccatctccctcctgcggccggccaccgacgccgccccgtgcttccgcgccaccagcagctcccctgccccgagactccgcttcctcgtagcatcggccactctccggcccggctccgcctctcggcgcgcgccctggccctggcctccgcctccgcaccaaccaccggtgccgccgtcgccgctacggccgagtcacagcagacctgcgccatcgacatca

SEQ ID NO: 140601 - DNA, 474 bp, Zea Mays
aaatgacagtaaagttgatcaaggaagaacattgcctcttaccctaaacaaacatatcaagactcaagagtaggtggggccagtacagatgatccagcaattgctccctgaaatttttctgtttcagccttaccctttgcttggtattcatatgttgctttatattcctttcttccctctgttcctcagtcatttcagcaccagacgacccttatcccattgcattttacgttcacaagggcaacagttacggctgtagtggtgtgcccaaggttacaacacttgctcatggtcatggacaattgcatagtcatatattattgattttggaagaaagattggccgaggttacaacacttgctcatggaaaattgcatagtcatatattattacttttggaagaaagattacaaatattgatttgttgcattgtattttataaggattgaggagtagtattaaatggtctgctgt

SEQ ID NO: 140602 - DNA, 896 bp, Zea Mays
atgtggctgtgggcgctggcgcaacgagaaggtagtgatggcgggtgcacacacgaggaagggatgtgtgacgtcctcggcccaaatttcccctgcgccgatttggacgcctccccgcacttcgcgggctcacggccacgcctgcggcgacgcgtgcccgggcctcagacccaattttttttgtccttcctgtccgactccgacctacggccaatcgccatccagattcccgcgccatccctccctccacactgctacctcctcctcccgacctcgctgcggtcgccagcgctgcggggcaaggacctcaacgacatgttcccggtgacggacgcggaggcgccacccaccgccaacccccgcggcttcgccaacctcctctggaagcagctcgaccacctcgggaacgcggggttcgatctggcgctcttccgggtggacgcgtatggtctacctgcacgccgactttgcctcgcccctcgcctgggacatcgaccactggttcccgtgcgccaggggagggaagacggtgccgagcaatcagcggataatgcagtggcaggtgtgcaggaagaagcagaacaagctcgagttcctcatgccgtggtgggatctgcagctcggcgtctctgtcaaccagttcctgtccatcttcgcctcgaagaattccgacttcagaaacagagcattggcgttcttgtttacccatggcgccagcgaggaactgagctcgctgcaggtggtggaggcacacgcgttccctcagcacttctctgagatgaaaacgaaagtagggctcgcccctgctgcaattgtttcctctaggggttctgacaactcggtgctgacgatatatttccgttgcaacgcacgggcacccatctagttgaacaata

SEQ ID NO: 140603 - DNA, 560 bp, Zea Mays
gactcggtcagaacttctgtcaccgcagcaacaagggaagtgcccaagaaggaagaatcaaataccaattgtgacttccttggcccggatttcccctgcgctgagtgagttacgaggagtaccagggaatcgaagaagatagccaaaaagttgaaggaagcaaaggggttgagcaagcaagaagaacaggtatgtggaggatggcggtggcgaactggcgagatggagaaaagggaaggcggcaggggattaggagccaggatggaaaccaccgccgtggttttccccaacgcacacggacctggctggttccttcggcttcgatcgaagtgaagccaccgcttccataaaacatcacatgtatagttattgtgatgacatgtgccatgaagaatgacactgggggagcgccatttgcgtctcactctacttgatgcagttgctgcaagacattatcatcagactagttcaattttctgttctgccacccaagattgttttggctccagttgtaccatttcaatctacaagacacaattatttatatcatcatccaaaaa

SEQ ID NO: 140604 - DNA, 129 bp, Zea Mays
atgtgtttccccgtttcgtcgtttttcggttctcctttgcctttgtctcccttttcttttctttgggggttgagctctgaggttttcatatggggtttcatctctagcctacgccaacgtgcttgggac

SEQ ID NO: 140605 - DNA, 1194 bp, Zea Mays
atgcatagtacaagagcggacagaatgaagacaatcaaaagaaggttggactttttagtaaaagattctgtcatcttcagtttgatgcagtacccttttcctgatgttgagagatttgataatgaagcatttgatagagctgcagtcgttggaagagataatgacaaagcaaagataaaggacatgatcttgcaaagtaatgcacaaaagttctcaatcattcccattcttggcctcgtggggttggggaaaacaactcttgctagattaattttccttgaccagggagaaggttgggattttgatcttcgtatctggatatccttaaataggaaactaaacataaaaatgattgctagtgatataatctcgcaatgtaatcatagagaagaaaagcttttagatgttcgtacggacatggagatccaggaaaactttcagttgctaaagaggtgtttgcaagaggcactccatgaaaaacattgtctgattgtcttggatgacctttctagcacagataaaaaccagttggatgaattgaaggaaatgctgaagggtacaaatgagtctatcaaggttttagtgacgacctccagcgaaataactgcagaactactgcacaccattccaccgtacaagttgtgtcctttatctgaagacgacagttggaaaatattttctcaaaaggcttttgggaattgtgatggtgataacactgaccttaagaaaatcggaaaggaaatagtaaaaaggtgtgagggaataccattattgactcattctcttggtttagttgtacaaaatgaagtcacaaatgtgtggttagctgcaagggatgaagagatatggaaactagaaagaagagttgccactaaaatagaattgttttcaccattatatcaaatatacaatgacttctcctcaactattaaattgtgctttctatatttatccatatttcctaaagggtctacaatagataaggaaaaactgatccaacagtggattgcactcgagattattggatcaaaacatgactccttgcctccttatgtgaatggagagatgtgcatccaggactttttgtcaatatattttctccaagttcgagatacacactcagtaagttactacatacttattaacttgggagtcatccttttcatgtctagtatgccttcaagccttaaacta

SEQ ID NO: 140606 - DNA, 2816 bp, Zea Mays
gaaactggaagttcttatactccggagatgttgtagacttcgaattctccccccctcctttgcaatgattaagtaccttcgaattcttgatctggctggctgtgaagcacttcatgtaagtactgagatgctaacaaccaatttggagtatctgaacctacaacggtgcctaaatcttcagactcagccatactatttcgaaaacttcaataagttgaagtttttgaatctttcccattgcctccctaccgttgattgcctggaatctattagttacttgttcaacttagaatatctagatctgtcagaaacttcccttgacatacctatgtcttttgcaaggcttcagaagttgcacacactgaacctcactggttgtgctccaatgcatccatcctctaatgtacaccaaacatggccaggtatattagcaaaaattacaagtctcaagtctgtgctgacgatggacccagtattagcggcctctcttcaaggacacaccgagtgctctgctgactatgattatcactcactcacaacaaccgatgagcttgttattaaagagatcacaggcggttcccgaggccttcgtattgctgagcagttgaatctgcagaatcgactggaggtttgtttccttaagctggaatgggttcctaggtcccaatcagctcaagatcaactattggaatatacagatgaggaagtgctggagaagttccaaccaaatgagactctggagcattttatgctagttaaatatacaggcaatgtgtttcctacatggatgatgaacaaactgacttcactcccataccttgtcaatctttgtttgttccacctgcataactgcagtgctctccctccaattggccatctacaaaatctgcgttacttgcatattaaagatatgcccaacctcacaaatctagagatgggtctttctggggggcctgtgtccttggggaaattgactcacctcaaactggaagcactgaatttagaagagctgtctatactcttgtcagccaacaatgagagtccctgtttcatgtttcccaatcttgaggagttatctgttctatcatgctctaagcttgtcttcaaaccatctgtgcctaagtgtgcgaaatatgtaataaaagagagtaacatggttctgtcatgttggcagcctctggggccattctcatctccaccaatagaaaaagtagagataagtgggtgtgtgatgccttctggttggttgcaatggcttagatccatacagactcttgagaaagtagtgatagatggtgaagctctttcatcttttgagctccagaagatatatgcatttcaagaagcatctggtagtaagatttcaaaggaaactgtaagttcatctaggacaaatatgtcacgtgagttgaccactgaggatggtgcccttaaagctattggtatcgacaactcaacaatcaaacatattccaaggtttaacaccacttctgaactctcagtggatactatttcatcctctaaagtaagcacaccatccaaggagatcccatcaactttacgccgtccggacaagtcaaaaatgcctgcactaatacctggagatggatctttaaacttaagccttaagcaggttcagaaggttactcataatttctcacctttatttgagttaggtgaagggggaacctgggcagtttacagggctgtattatcagataaccaggttgttatcatccggagagctaaaaagggccacgttcaagaggcaaaacatcttatggaagtgaagctccttacaaaaattaatcactggagtttggtgagattcttaggttttattgatgaaaaagatgagtgtattcggatcacagagtatgttccaaatggcactcttagggaacacctacatggggacgctttaatctgttacaacttgaggacgtcaaacatcctactgacagagagctaccgagccaaagtgtgctgttctgaactgtcaaaaagtggtaatatcgtgctattaaagggaacagggggctacattgatccagagtacttggagacctcagagctcactgccaaatctgatgtctactcttttggaataatactcttagaaatcatatcttctcatgggccacaagactgggatgtattgatgaaccaccggcaaagcagtgttgtacaatgggctcttgagaaattctatgacgacctcatgaatgagatattggattaccgtatggaggatcgcgtggatggagatgtggtcagggacttgctcagcttagcgttgagttgtgtggtttcgcgtggcgctgatcgcccaagcatcgtagttgtcggggagcgactgtggaaaatatggcaagatcatcgaagaaacgtaggggaacagcacgagtaccaaggaagctgggcagaatttatcgaacaagagggaatcctgaggcatcacaagtgtgtgctcaagagaagttgggagccttcaacaacgcagcaggattggtctgtgtatgttaggcagattgaattagttcaagaagcttacgataccccatggggagaggaaattttttcggggtctgtttcattggacgatatcacagtatattctcggtagaaagcttcaatacgattatattactcctgttttctccgcggtattacatgtgtagattggaggacaataacctatttgttctatttctgtttcattggacgataaatcatagtgtctcctcggtatgaactcttgaaagtttcaactcgttgttttcctcactctatttattcagtgatattgctgttag

SEQ ID NO: 140607 - DNA, 1059 bp, Zea Mays
gctattatcttctccttttcattagatagtttgaattacttgttttttcccttaacctccttgcagaccaacgtaagagaatcctgaattttaatcaacgtatagtgattgcccttgatgttgctattgcattgacttatctccatttgtgttctggggacgctttaatctgttacaacttgaggacgtcaaacatcctactgacagagagctaccgagccaaagtgtgctgttctgaactgtcaaaaagtggtaatatcgtgctattaaagggaacagggggctacattgatccagagtacttggagacctcagagctcactgccaaatctgatgtctactcttttggaataatactcttagaaatcatatcttctcatgggccacaagactgggatgtattgatgaaccaccggcaaagcagtgttgtacaatgggctcttgagaaattctatgacgacctcatgaatgagatattggattaccgtatggaggatcgcgtggatggagatgtggtcagggacttgctcagcttagcgttgagttgtgtggtttcgcgtggcgctgatcgcccaagcatcgtagttgtcggggagcgactgtggaaaatatggcaagatcatcgaagaaacgtaggggaacagcacgagtaccaaggaagctgggcagaatttatcgaacaagagggaatcctgaggcatcacaagtgtgtgctcaagagaagttgggagccttcaacaacgcagcaggattggtctgtgtatgttaggcagattgaattagttcaagaagcttacgataccccatggggagaggaaattttttcggggtctgtttcattggacgatatcacagtatattctcggtagaaagcttcaatacgattatattactcctgttttctccgcggtattacatgtgtagattggaggacaataacctatttgttctatttctgtttcattggacgataaatcatagtgtctcctcggtatgaactcttgaaagtttcaactcgttgttttcctcactctatttattcagtgatattgctgttag

SEQ ID NO: 140608 - DNA, 626 bp, Zea Mays
tctgttcttccacgcagcaccagacgcacgactctcctctgtcttctctgtgccgcctcctcgccgagctgcgcgctgccaaccgcgctggtgaactcgcccggtccggcgcactgctcatctcggctcctttggaaatccttcgcgaacgtctcgccaagttgtcaggcccgtcttcgagtttggtggagtcccaagcttgcgcgccgtcggcctcttcctcctgtgtcctaacgtcgtcgtccctgctcacttcatccaactgctcccttcatctcggccgaactcgacgtccagcaagccgcctgctcgtgttccatctcttcaaccatcagcttccgtggaacacactgatcacgttgtctgttgatcaatcacttggtggagtaattttctagagaccggtcatcaccctgaagactcgtgacattttattttcttagtcttcggctcttctctgcaacaaagacaagccccggtgcatccaccactttccttgttgtttacaaaacttttatcacttgatatgatgcattaggtgataggaattgcgtgatcaaacaattgatgcattaccaaccttgagaatttgaataatcattccttgatacctgttttatgaacaa

SEQ ID NO: 140609 - DNA, 833 bp, Zea Mays
cccatccgaatcactccacgcatgtctgtaaaaatctcaccgctgttgatcctctcgcgagctcggcttccagctgtgtccggtgttgtcttcagccgccgcacctgaagcaactcgcctctctgttcttccacgcagcaccagacgcacgactctcctctgtcttctctgtgccgcctcctcgccgagctgcgcgctgccaaccgcgccggtgaactcgcccggtccggcgcactgctcgtctcggctcctttggaaatccttcgcgaacgtctcgtcaagttgtcaggcctgtcttcgagtttggtggagtcccaagcttgcgcgccgtcggcctctacctcctgtgtccgatcgtcgtcgcccctgctcacttcatccaactgctcccttcatctcggccgagctcgacgtccagcaagccgcctgctcgtgttccatctcttcaaccatcagcttccgtggaacacactggtaggggttctaatccctgaaattgatgtggggtgtgtgtttaagcgtgtatgggggtgctctctgtgcatcggattagaggttagatggttgccgatagctgttgtcgtctggatttggccggcggggaaaagggatcaccctgtgcatcacgttgaagaagaaggggctctttgtgtgaaaaagagaagtctagggggttttgttgaaaagagttttagagttttcttttatttcaggatttgtactagaattagaagtgttgtaggaaattgtaggaaaatgctaaaaatacgaaaccagtttttttagttcacaagaatgagtacttattgataaaaatattggttaggtaaaaa

SEQ ID NO: 140610 - DNA, 613 bp, Zea Mays
tggatggaatcaaacgtgcttagcgcaaacggtgatacccgtagagaatgaacctacacgcaaacacacacacaaaggaaacaaacatagcgctaagtaacgtagattaccattaaaattaattatcacgaagctacgtaaacctgtgaagatctcccgctatacacagatcatcagcagcgcgtcatgatgaactccaaaaacaacgacggcgacgacgcagagcgcggaaacacgctacacggaccggggacaaaggtgatgtgcgtacggagggagtgaaccagagggcggcgttgggcgctcacggatttgaagctgctggccatggcgaagttaaagccagacaaggagcagatggcgcagacccagttgtgagccggaggagctggagactggcagctcggcggaggtggactcacggccatggatggagcagcggcacggtccgtcgtcgaggtgagcggaggttggtggctggggctggggcgcgatggccagaacgacggtgaagagctcggctattgaggaagcgatcgcgaaggagataagctctgggaggtgctgggtcgagaacacgaaggaacaggagcgtgtgcagtgcatgagctga

SEQ ID NO: 140611 - DNA, 622 bp, Zea Mays
tgcaggagatggtcccagttaccttacatggttctgttggacacaatgaagccatccagatatgctattaaaaattctgctagtcattatggctttaaactgtaccatgtatgttctattttcagctaggcagagcatgttctatttacagcaggccagcagacaccaggcagtaaggtgatgtatgagtcaattatcaggtggaaatgttttttggcagctttctcagtgaattagtatcaccgcagaaccattttggacacccagatgtcgagagatgcccattcctgaggaatatcaatggagctacaaccttttcccctcacttctgctttgccagtagctgctcaaggaggcaagggtccaatttttgaggaagggtcaggctttgagtcagcattcaagcttttccatctagggtccaatttttgaggaagggtcaggctttgagtcagcattcaagcttttccatggccgagatggaatagttcccctttgagaaagatcatatgtatctgatgaaaaccacaatttagagtacacttatgtatgagttatttgacaatgcttatttatgagttatttgacaatgcttatttatgagatattgaatgttatttat

SEQ ID NO: 140612 - DNA, 524 bp, Zea Mays
agatggtcccagttaccttacatggttctgttggacacaatgaagccatccagatatgctattaaaaattctgctagtcattatggctttaaactgtaccatgtggaaatgttttttggcagctttctcagtgaattagtatcaccgcagaaccattttggacacccagatgtcgagagatgcccattcctgaggaatatcaatggagctacaaccttttcccctcacttctgctttgccagtagctgctcaaggaggcaagggtccaatttttgaggaagggtcaggctttgagtcagcattcaagcttttccatctagggtccaatttttgaggaagggtcaggctttgagtcagcattcaagcttttccatggccgagatggaatagttcccctttgagaaagatcatatgtatctgatgaaaaccacaatttagagtacacttatgtatgagttatttgacaatgcttatttatgagttatttgacaatgcttatttatgagatattgaatgttatttat

SEQ ID NO: 140613 - DNA, 402 bp, Zea Mays
atgcagcagcagcaggaggaggaggctgcgggaggagctggcctgcagctgcagacgagagggaaggaggaggacgaggaggagccagtgctggccacgtgggactgcggcagcccgctgtacgactcctttgaggtcgcgtcgctgcactacgtcctagagaagcacacaatgatcctgccgttccccgacgccgccgcggggtcccgatcgcggcggcgtacacagcagcgtcggcatcatcgtggtggccaccgcgccgccatggcgcccgacgtggccaagaccggcaaccgccgcgtgggtgcaggcgcggcgaggagaacatgggggtggtggggcagcaaggccgcggcagctatattcagggctgttacgtgtgctggaggagcgaggttatag

SEQ ID NO: 140614 - DNA, 608 bp, Zea Mays
ctttccccttggccgccgccccccctgcccacctcctcctccctccattgttgcagccaccaaaaccctagccgcccccccccccaatcccctcctccctaggtgctactccgtgccgctcggatcatcgtcttttggtgcgaatctccaatcgttttggtggaaggaagaagggaggaaggaaaaggggagaacccaaggtggtggacttccggatcgttcttagggattttgcccgaacttcggtaaaggcacctgatctttgctttgggaaagaagggatgtagcagcacggccaccacacttttaaataaaggaataactgattattaatgatgttaaacaggaagggtcaagtctagggaattattacattctaatcttcatggtagttgaactgtttagtttggtgggctgagatgtctatcttttgtctggtcatgaatgttcttttctaccgttgcattttgattatactatggcaattatctttcttttatatcctgtataaactatatgcttcccttgttatgctactttcaagggaggtgctgccggattttgcaatactttctttctctatgtgctgcataagttttgtagaaagg

SEQ ID NO: 140615 - DNA, 879 bp, Zea Mays
atggcggagcttaccagccgatacggcagtggcgggctccggcgaaacggctccgacgagggcgggtggcgacgacgggcgaggcaagcgaggcgcggccagggcgaaggccgaatgcatagggtcgggcatggccgcagcagcggggcgaggagcggcttcgccgacgatggcgtactggccgcgcgcacggggatccggcggcaggaggaaagcggcgacgctggacgagctgggcacgcagcagcagggccggtgctcggtcgccgtggctgcgcggctggaaaaaggagggagcaaggatcctcctggaagctgcacggcgaggatcacagggctaaccccgtgctaaggagagtgacatctgacacccttgcaaatccgccgaacgacacccttgcgcacatcattgagctggtgctgaagagcagcgaggacagaggccggcgcgagatgaagtctctggtcctgaagctgttcaaggagagcagcaacggcagcgctaatagttcttcagcagactcgtcctgtatcacgaccttgtggctgcagcacgggtgccgctgtttgaaccgcgccgcgtggaagaacggcatcgagcagaccgtcctaactcctgacgctaccactggaggagcagcagaccgtgctactagcgtggctgggcaggttcctcaaggccggaggcgacgggttccccaacaagcagcgggcgttcgaggtgtggtggaggtggaccttcatcaggcagtacgccgagcagcctgggagtgggagatcatcgtggtcgtcgtcgtcgcggcagcactgaccgtcatccagtggttggctggaaacgacaacagtccatgcgatgcagtttctttcaagtttcagtag

SEQ ID NO: 140616 - DNA, 1900 bp, Zea Mays
ctaaaataactcgtcgttctcgtaggcagcgcgccagcgccgccgtctactctcctttcttgccgcgcggcgccgccgtctactctcgctcaccggaatgccgtcccagcctcagccgagctccatcggcggaacctcccagaccccggcgccgttccagaccgcgcccgtcttcaccggcggaagcccccggaccctggcgacgctctccgctcagtccgtcccccgcgtcacgcggagaagcattgcgctcgtcgattggtgtttggagagggtggagggcgaggagggcaagatccgcgtcgctggaaccacctacaccccgcaaacgagcccgcaaacgaggagagaagcatcgtcctcaaagggaagcaggaaagtggcaggccgagtgttcagatcatctgctattgttaggcgccatgatcacttcagaattatgtccgaggatggttacctcatacggataggctgtctcttgaatattcccaaaacacgtaacaatggattttctgaagaggtgtgtgaatgctttgagtttggctttccaattcaatggcacaggcttgttaatccaaagatggtgcccgataataaacatgcactgtcaccatcagaaacaactgctagtgcaccaagtcattcagttggatattacatggagaagttcttaagtgacagtttttccaattctaacagatattctttcacagagaatgattcttacacatctgtagtgtgtactggcagcagaaatggacttactacccaaaccctttcaaacttaccagatgataatgcaggaaacataactgtatcttggggattatatggcctcgggatggacatgtctgagaaaccttggacaccacctgcagaagcgtgtaataatagacaagaaagtgatcaacatgaaagtatgcaaatagatgcatgtaaacaagagttagttaatcgctccatgagttctgtttcagttaagcaaagtataagttccatcagccccaactcaaaagtagacggcaacagaattgtaccatccaaaattatgtcagttgtgaatgaaagttacaggagcacagtaggttgtggtcaggctgaggaagacgttggtattcagcaagagaaaaagcacagctgttcaagtgagcatggaatggttactctttctattaactgtacatcctctcaactaggtgcaccaggaattccaaaatttgggaaagattcagtgaacctttggactacagatgcattagaactatcaactgaagggatgactccaaagattggagctgacagtactgacaggagattacgaagtggcaaaattcttggaatgccaagtggtggactaatgaatagaggccacaagctgaaaaagatcaagcaggaagcatccagtaaacagatggttaatcaaggggctacatgcactgtggatctgacttctcatgaaaatgatttttcagcagctgagattgtcgttgaagaaaagctggaatcacatagttcatgccttaaaggacgaggaggaccagcgaaggggaagaggaagagggagagatggtaggattcagcgtgtctgttttcaagccggatgtgaaccgtgtttcagtttgtttctcggcttgagtagctaacttatgtagatgggtcgtgtgtgccagttccatgagcagatggtgccactaagggtgtgtttagtttgaggtcaaagtaggatgagtcaggggcgacatcgttccctcgactttttgggatcacgtcgccacaaaaaactactccggggtttttctcgctcatgcgtgattctcatccaaacactgttgaaactgtggtcactctatttcattcctccatttacatccaaccaaatacactctaatttacacgcctc

SEQ ID NO: 140617 - DNA, 2119 bp, Zea Mays
aactcgtcgttctcgtaggcagcgcgccagcgccgccgtctactctcctttcttgccgcgcggcgccgccgtctactctcgctcaccggaatgccgtcccagcctcagccgagctccatcggcggaacctcccagaccccggcgccgttccagaccgcgcccgtcttcaccggcggaagcccccggaccctggcgacgctctccgctcagtccgtcccccgcgtcacgcggagaagcattgcgctcgtcgattggtgtttggagagggtggagggcgaggagggcaagatccgcgtcgctggaaccacctacaccccgcaaacgagcccgcaaacgaggcatctcctccgcggttccatttatcgatttcgttttcccaattaccctcccaaatgtgctttagttgtacatcctgtttggaaaattttgatagctttcttttcctcaattaagaaatttagtagatcggtaaatatgatattttctttggcaatttgagaaattcaatggtagcaagggaatgccaaaagatttccatcggtactccacaattaatctcacggtgctgtagcctactatgcaaacaggagagaagcatcgtcctcaaagggaagcaggaaagtggcaggccgagtgttcagatcatctgctattgttaggcgccatgatcacttcagaattatgtccgaggatggttacctcatacggataggctgtctcttgaatattcccaaaacacgtaacaatggattttctgaagaggtgtgtgaatgctttgagtttggctttccaattcaatggcacaggcttgttaatccaaagatggtgcccgataataaacatgcactgtcaccatcagaaacaactgctagtgcaccaagtcattcagttggatattacatggagaagttcttaagtgacagtttttccaattctaacagatattctttcacagagaatgattcttacacatctgtagtgtgtactggcagcagaaatggacttactacccaaaccctttcaaacttaccagatgataatgcaggaaacataactgtatcttggggattatatggcctcgggatggacatgtctgagaaaccttggacaccacctgcagaagcgtgtaataatagacaagaaagtgatcaacatgaaagtatgcaaatagatgcatgtaaacaagagttagttaatcgctccatgagttctgtttcagttaagcaaagtataagttccatcagccccaactcaaaagtagacggcaacagaattgtaccatccaaaattatgtcagttgtgaatgaaagttacaggagcacagtaggttgtggtcaggctgaggaagacgttggtattcagcaagagaaaaagcacagctgttcaagtgagcatggaatggttactctttctattaactgtacatcctctcaactaggtgcaccaggaattccaaaatttgggaaagattcagtgaacctttggactacagatgcattagaactatcaactgaagggatgactccaaagattggagctgacagtactgacaggagattacgaagtggcaaaattcttggaatgccaagtggtggactaatgaatagaggccacaagctgaaaaagatcaagcaggaagcatccagtaaacagatggttaatcaaggggctacatgcactgtggatctgacttctcatgaaaatgatttttcagcagctgagattgtcgttgaagaaaagctggaatcacatagttcatgccttaaaggacgaggaggaccagcgaaggggaagaggaagagggagagatggtaggattcagcgtgtctgttttcaagccggatgtgaaccgtgtttcagtttgtttctcggcttgagtagctaacttatgtagatgggtcgtgtgtgccagttccatgagcagatggtgccactaagggtgtgtttagtttgaggtcaaagtaggatgagtcaggggcgacatcgttccctcgactttttgggatcacgtcgccacaaaaaactactccggggtttttctcgctcatgcgtgattctcatccaaacactgttgaaactgtggtcactctatttcattcctccatttacatccaaccaa

SEQ ID NO: 140618 - DNA, 830 bp, Zea Mays
atcaatttcggacacctattactcgggcggccaccacctcattcggtctcttgctctctccctccttgtgcacagccatgtctagacgcttccagctgccccccatcctctccttcctaatcaccgtgctgatcagcggcacggcgtcggcagacacgccggactgcccatacccgtgcctgccgccgccatccgctgcaggagccatcaacggctacccgccaccgcaaccgtccactggaggcggcggcggcctcggcggcagctatccgccacctccgccagggagcttccagctgaccccgccgggagcgatgcccgcgggcttctccccaccgtacagtggattcccctctgggccagccccgccgccgccgaaccccgtcctcccgtggttcccgtggtactaccagcgcaccaacccgatcacggggtcgacgacgtcggcgtcctcacctgccatggacgcccggtggacagtcacagtcgcggtgcttttccatctgcccttgctcgttcttcttcgtgttctgtagagagtacctggctacctgcagccgataggcgagttaattaaggtgcttcgttttgctattttataagtgctagaaacgtgttatatatagaatatattacttaagtttgtgaagtagtgttattttatttttggtgtaatttattttgtctgtgagtgacccctcacatgcatatcgctctttttttactgtattctgagcaaagttttacatggttatcatgatcagattttagaggactggactagtacatttttttcctaccctccaagtcttatattatatggttttcta

SEQ ID NO: 140619 - DNA, 240 bp, Zea Mays
atggcaatcgatcgggcttgcgtctctggccgtggaagggagactaggagcatcgccaggacacgggaaaattgtacctatctccgaatcaacgactgggcgattggtgttcaacgaatttctccccagagattaactccgtcacagatcaaggccatcccgtggccagtagtctttatcgcaccaattccgtgcacccaggcgcggtggcagatttgccggtcatggcaccgccgatag

SEQ ID NO: 140620 - DNA, 569 bp, Zea Mays
gttctttggcatacctttcttgttgaggaatcaacatcagcaggtaatctgagccatgcggagaatgcaagggattcatagacgccaacacatccatcagtgttgtcttgccagcaccactgacacccataagagcagaggaatccacccaaaagcatacatatcagaatgccgaatgaaccaagggtgcttgcaacaacctgatgccttgcaagcccagcaatgaaacggaacaatcctgatgatgcctcgttcattagtaagaggagcaggaactgtctaaaaagtctgcagtgggtttatcaaatttgatcagagcagcaggatggctcgtactcttgtcgaatgggacagccaactcatttcgtatagcctcaccaacatggaacgattgaaatgcttctgcaaactccttcacggggacgtatcggaagtcggctacacctttccgctgagggcatttgaagccaactgactcaaagaactcaaggacatattcacgaggaccactgtagacaacctgactatctgacaggaggattatatcatcaaacaggtcatatgtctca

SEQ ID NO: 140621 - DNA, 117 bp, Zea Mays
tcaatgcaggtcgcgtaaaaggcagggccgtctcaacaatttcaatggacgacccttgtctaagaaagtggcaagagtctagcaattttaacggaaaagccaaaaaaatcgtacaag

SEQ ID NO: 140622 - DNA, 1449 bp, Zea Mays
acacggtcacacacaccacaacccagccacccaccacctcccccaattgcctcttctcttctcccagcagctgccgcgacgcagtcctactcctgcggtgcctccagtttcgcagcaccgttgccacacatcgccaactaacgccatcgatcacccggcggccgcccagagtcctgccctgccatatccgaacctgctcctgcagctagccagcaacacagacagaataggtcggtcggtcgatcgatcgatggccagcgttatcgacggcaatggaggcagccggctggtggtgacggagctgggccacctcaaggagctggcgatgcagctggaggggcacctcggcggctcctcgccggacctctgcaagcacctcgcctcgcagatctcctccatcaccgaccgctccatcagcctgctcatcaccgccacctcatcaagcccccacggcggcgcctctgacgcgccgcccttcatcagggctactaccaagaaaaggaagaggatggacaagaagaggcatgaggtgagggtgggctcggccggaggcggcggcggcgaccatccggccgacgacggctacagctggaggaagtacggccagaaggagatccttggagccaagcacccaaggggctactaccgctgcacgcacaagagctctcagggatgtgcggcgacgaagcaagtgcagcgcaccgacgaggacccggccttcttcgacgtcgtctacctcggcgaccacacctgcgttcagagccagagggcggcagcgacggcgggtcgtcaggctgccgcggacgcgcaggcgccggagtacgacgccaacctcatggtgaagaccgaggggccggccctggagccagagcagcagcggcggggctgggaggacgcgcccacgccctttctcttctcctccacgccggcgtgccttgtgccggagcgcagccccttctccgcaccgtccacgtccgagaactggggcgtgtccccggcgacctcggactccaaccacgtcgtctctttcccgcctttcgaggtcgccgccgccgctgccgcgcagttcgagttcgaggaagtcatgtcagcgatcgacagagccgacggcgagtttctcgaggacctcgacatctatgtctcaagcttcttagcgtgatctgctggatgtaatgtaaccgatgaacgctagggaatgggaatctgaggcagctgttaccatgagttgctctctgccgtttgtccaggggcagagcagggaagaacacatgttcttcctcggcccgtcccgttgtaaaccttagggtgtgagaatattgaatgtcccatctctctctctctttttcttcggtcgagggtttgcaaggaaaacaatttcgtaatagtgctgtcagttcagctaaacatgtgagtttctcgtgaatttaaacatttttccaacgtataaca

SEQ ID NO: 140623 - DNA, 1206 bp, Zea Mays
caatctcatctgcacgtgttcttatcgcaacttcgcaagtggaatcgaaatcattttgcctctgctttctttgtcttctttccatggcggggctgcagctagtattgtcctggtggaaatgtcagtacagcctctttttgcttgtcttgttttgcaattgtttggctggcctccactttttgtccgatgtcgggggcgaacagggattcatcatatcgtgcgaatcttgctctggatgcacaagaaaattctctcttctccttctcctcctcctcctcctcctcctcttttttcccctaacaaacaagatgccggagctcacaagcaaaatctcatgggcctgcctgacctacctgcccggacctgacatgatccaccgtgcgaaatttccaggggctactaccgctgcacgcacaagagctctcagggatgtgcggcgacgaagcaagtgcagcgcaccgacgaggacccggccttcttcgacgtcgtctacctcggcgaccacacctgcgttcagagccagagggcggcagcgacggcgggtcgtcaggctgccgcggacgcgcaggcgccggagtacgacgccaacctcatggtgaagaccgaggggccggccctggagccagagcagcagcggcggggctgggaggacgcgcccacgccctttctcttctcctccacgccggcgtgccttgtgccggagcgcagccccttctccgcaccgtccacgtccgagaactggggcgtgtccccggcgacctcggactccaaccacgtcgtctctttcccgcctttcgaggtcgccgccgccgctgccgcgcagttcgagttcgaggaagtcatgtcagcgatcgacagagccgacggcgagtttctcgaggacctcgacatctatgtctcaagcttcttagcgtgatctgctggatgtaatgtaaccgatgaacgctagggaatgggaatctgaggcagctgttaccatgagttgctctctgccgtttgtccaggggcagagcagggaagaacacatgttcttcctcggcccgtcccgttgtaaaccttagggtgtgagaatattgaatgtcccatctctctctctctttttcttcggtcgagggtttgcaaggaaaacaatttcgtaatagtgctgtcagttcagctaaacatgtgagtttctcgtgaatttaaacatttttccaacgtataaca

SEQ ID NO: 140624 - DNA, 1332 bp, Zea Mays
atggcgacccgtaggatggagcagtgcgcgtgggtggcggaggtggagcgggcggtggccgacggcggcgcgtcgtcggaggagtcctcgcggtggcggcagcagtgcatctaccgcgtgccgacgtgtatcaagaacctgaaccgtaaggcgtaccagccgcaggtggtgtcgctgggcccgttccaccacggcgagccccagctgcggcccatggacacgcacaagcgccgcgccctggtccacttcctgcgacgcgcgcgcaagcctctggcggcgttcgcgggcgcagtcgccgcggcgggcgagcggctggaggccgcgtacgaggggctcggcgacgagtggcgcgtcggcggcggagcggctgagaggttcgtggagctgatggtgaccgacgggtgcttcctcctggagacgatgcggacggccaccggctgggaggtgaacgactacgacggtgaggaccccgtcttcagcgcccacggcctgctctacaacgtgccctacatccgccgcgacatgctcatgatcgagaaccagctgccgctgctcgtcctggaccgcctcctcgccgttgagaacggcaaggatggggtacgtaacgaggatgtgatcaaccggatagtgcttctgtttctgtccccgacggcggcgtggccgctgacgacgggcaccggcctggctctccatccgctggacatgttccgcaggagcctcctctgcggtagtccgacgccgtccggcggccctcgtgcgccgccgccggactcgccggacgacatcatcaggtcggcggaggagctgtacgaggcgggcgtcaggttcaggcgcagcgcgacgagcagctttttggacatccgctttcacaggggcacgctgtacctgccggccatcgtcgtggacgacaccaccgagtacgtgctgctcaacctgatggcgttcgagcgcctgcacgtgggagccggcaacgacgtcaccgcctacgtcttcttcatggacaacatggtggactcggcgcgtgacgtggcactgctcacgtcgcggcggatcgtgtacaacaccgtgggcagcgacaaggcggtggccaagctcttcagcggcctgtccagggacgtggtgctggagccgcacagcgcgctggacgacgtgcaccgggaggtcaatgcctactgccggaagcgccggaaccggtggcgcgccaacctggtgcacacctacttccggagcccctggtcgttcctctccctcgctgccgccgtcttcctcctcgtcatgaccgtcttgcagactgtctacaccctcctaccgtactacagcgacaagagctag

SEQ ID NO: 140625 - DNA, 468 bp, Zea Mays
atggtcctcgcctcagttgccaccacttcgttggccattctacttcttttctctctcccctcatgcctccacctccgcgccaccccattctcggcagagggtgtaggagcctgcgcctcctcctcatattttttcgacaccagccccggcaccaactcgcgcagtggctatttcacgtccacgagggcgttttacatcatgcgcgcaccatcattttcgccgtcgtcggacgtctcgttcttcttcccggtcttcgccctgttcttcctccccaacatgctgcccccgcccacggtcgcagccgcaagccgactgatgcttgtcgacgcgggtacggcgcgagtcggtcatgctcctggcctttctccgtgcatgtcgtcgaggaggatatggtggcgcctaccacgcttaggttatcttgccgatgaggagtccaggtctgagatattgaacaaccaaggcccatag

SEQ ID NO: 140626 - DNA, 252 bp, Zea Mays
atggagatgcgggactcggcagaaggtaagccgcgacccgcaggaaatctaaacgtcgagcgccatgaacgagcaaggagctgggcacacggcggtcggaaccaagaagcagggaacggagagggagtgagggaccggaatgcactggagatggccggcggccaagcagactcggcccggcagctcgacgaccagggccatggaggcgagcagggagattcactgggagaggatcatggccggagtggatga

SEQ ID NO: 140627 - DNA, 1372 bp, Zea Mays
cctatctccaagcgtcgctcgctctccctgctagctgcgacctccctagtggcgcgtcgttctccctgcgctcgccggcggagctcccatgccgcgcgcgcccttgccttcttcctccccctgcgtccctattcggttcctgcgcgcgcgctctgttctctcctaccggcacccagccggattcctctacgtcgtgccctgctcgccctctccagcgccggtcgctcctacccatctccctgctccagctctgttgccgcgcgagctcgccgtggagctctgcgcgccgagcttctccccggtctcccatggcgcccagctcagatctcgccctgctcctctgcgcgcagcccctgacacgttttcctccctgccgagctcgtctcgagctccgctcaccctctgcccagccgtcgcttgcccctgccccaacgccgtgcctctgttatttacggtcgtcgctctcccagcccggccggatctcccagcgtcgcgccctgttgtcctccctttcccatggccggcgctccgttttcctctgccggctgagtctcctcgacatggagcatctccctgcgcgcgttgaacttctgctcggcgtcctgctggccgaagcttcggattgccgcgccgatggccgagcccggcccgcgccttccctgtcctctgtacgcgcgcagctcgccccctcagctcgtcgcgcgcctgggatgcttgccggtgctcagctccaccgcgctgtgaagtctctgcgcgcaagctatctgttggccgcgcgcgaactcctctgcttggcccgtcgtcgttcttcagctccttaccgcactcgattgtttcgtcgtctcgtcttaatgtcagtccctacgtgacatctctgacgtatgttcatgccgacaaaagaatcccaagaaaatgtagagaagcaagcctttggtcgatgttcaagtggtcggcgaaaggccagaacaagaatcatcaccgtttatgcggagttatacttaatatgaaaagattccaagaattgtggatggaagagaaagtgaagcttcgtgctatactcgtcagctgctcgatcgaagacttcaatcgaagactatcgtcgttcccgccaacactgaatcaagttgataacggtgagccaaatcactatttttactatggattttatgatagtgaaataagacgcttagtttgcataggaagttaaaattagaaatacccatgaggcgaggtgtgcttcgaggggtttagtggctgaatatattcgaactagttctattttgtagaatatagtattttggtgacgcgtaggttaaattcaggattttatgcttttgtcgatagctctatcaatgctaatggtgttcaatgc

SEQ ID NO: 140628 - DNA, 1374 bp, Zea Mays
cctatctccaagcgtcgctcgctctccctgctagctgcgacctccctagtggcgcgtcgttctccctgcgctcgccggcggagctcccatgccgcgcgcgcccttgccttcttcctccccctgcgtccctattcggttcctgcgcgcgcgctctgttctctcctaccggcacccagccggattcctctacgtcgtgccctgctcgccctctccagcgccagtcgctcctacccatctccctgctccagctctgttgccgcgcgagctcgccgtggagctctgcgcgccgagcttctccctggtctcccatggcgcccagctcagatctcgccctgctcctctgcgcgcagccccctgacgcgttttcctccctgccgagctcgtctcgagctcccgctcaccctctgcccagccgtcgcttgcccctgccccaacgccgtgcctctgttatttacggtcgtcgctctcccagcccggccggatctcccagcgtcgcgccctgttgtcctccctttcccatggccggcgctccgttttcctctgccggctgagtctcctcgacatggagcatctccctgcgcgcgttgaacttctgctcggcgtcctgctggccgaagcttcggattgccgcgccgatggccgagcccggcccgcgccttccctgtcctctgtacgcgcgcagctcgccccctcagctcgtcgcgcgcctgggatgcttgccggcgctcagctccaccgcgctgtgaagtctctgcgcgcaagctatctgttggccgcgcacgaactcctctgcttggcccgtcgtcgttctccagctccttaccgcactcgatcgtttcgtcgtctcgtcttaatgccagtccccacgtgacatctctgacgtatgttcacgccgacaaaagaatcccaagaaaatgtagagaagcaagcctttggtcgatgttcaagtggtcgacgaaaggccagaacaagaatcatcactgtttatgcggagttatacttaatatgaaaagattccaagaattatggatggaagagaaagtgaagcttcgtgctatactcgtcagctgctcgatcgaagacttcaatcgaagactatcgtcgttcccgccaacactgaatcaagttgataacggtgagccaaatcactatttttactatggattttatgatagtgaaataagacgcttagtttgcataggaagttaaaattagaaatacccatgaggcgaggtgtgcttcgaggggtttagtggctgaatatattcgaactagttctattttgtagaatatagtattttggtgacgcgtaggttaaattcaggattttatgcttttgtcgatagctctatcaatgctaatggtgttcaatgc

SEQ ID NO: 140629 - DNA, 2446 bp, Zea Mays
aaatttttcttgaagttaatggagccgagctacatcacgtccgccctccccctctctctccctctccctctctcgacgacacaccaggccaccacgcacatgctttgtcccatggatgccgaccacctcatggtgttcaagaccatgctcgccgtcaggtggtagtcccggcgagcgagatctccccactccaggctctctcccatcgctcgctgccgcctcatgttgtttgcggccgtgctcgccaaccgcggcacggaggcgtcgatccgaccgggagcccttcgcaatggacaaagccttcctcctctccggcaatgagggcatcgtcggctcgtcgctaacgtgagcacgtggcagaccctgctgcccccatccttcttcatcttcactaagtgaggaactctctcgacccccttccccacccttcttgtcttcggagttcggatggctggagaacacggtgtttggtcatggcttctagaaggtggtgttttgcatttaaaaaggaaaaaattggagcataatccaaagctttgtttgcagatggggaagaggtaggagtagctcagcagtaggatggagtggccaggacagctcggtgcccacccgtcttcatcgatcgggaccctcttcccctctagcgagctattcccagtttcgagaacaagattaaaatagcttcgtaggcttttatgtggtttagatttgcatatctatctctcaccattaaagcacaaccagatctggtagcttcagctccaaacaacaagaaacactgagagctgtgaagagtctgagatggcttatgtaagccccgcgactgatgatacatcaacagatctagatactgacgagaagaaccaaatgggactcccttctggaaggtcatcagcttcaagtgcggcttcgctgcatcagcgccaaccgcaatcagacattcatagtcatgagtaccatcagctttctcttttgcttatgttagccagcctgacttctattttccacccccttgtatgtctggtggacacgcagatggccaaaccagagtaccaggctatggagaccggacgaggtatatttagatatttcagctctttattcatctctttaatcaccaatttcttaccagtagtacatgatggcagactgatcaattatgctctcacagcctccaaaagaaggtgcatgatagggtattttaacagaaacaataaatttcctcgaagcatcaaagtctccagcaacctgcacaggaaaacaaatatttataattatgtcatgttcccaacaatttagtgcaaggtaaatctgattcaagaattatatttacctcaaaactaacagccgtcatttgaatcttggcaatgtcatgttcagggtgacttggtaagccaagatagtagacaggagcaatctgggaacaagggataatacagtagctaaaacaataggaacatagagtaccactaatttgtaaacatacatcaataaaagaaacatgtgtgttactgttaataaagctttgaattttaggtgtggactttgtttatgtgtctcagagtccaaggagaccaccccgcgattcgtcaacgtctccgggatggcgaagccgcaacccgacgcctccctgtcctttttgttacctccggacgccgctgccgaggggctgcatgacatgattctgaatgctcgcgacgaccttgatgttttatctccgtggtcggtgggggcgtcggcgtgtggtgtaggcagatgagggaggcgacgatgttcttctgtggtgacccatcgacgccgcagtgggtcgaccaacaccatcaccacatggagattcacagggctctcttctgaagcagctagcaaacaagagtatcagtggtggtgtagctgttgttctagctgaaacgaacaagtaagagatggagatggacatagcaaagctagaagttggcttcatgggaacatctgtaatatgtaggagtgacgctcctctaattctagcagacttgaggaagcctcgacaaacctgaagtttgaacgtatgacagatgacatcttggttacttttgtggatggacatcttggtcgcttttgtggttggcttttgtggatgcgtgaagctacaattgtagttgtgtaagatttatgtgcataactatgtgggttgcatcagctctccgtactatgtatatacctcccgcgtagctgcctacctatccctaacttgcgacccataaacgtagacttcgatcctataatcttatttgggatcagtttcaggctgtaatagccctgaccgtcttactatggaacacgttaaagtatggtctaaaactttaatgcggattatgttcggtctatctatgtttggtctcatagttgctttgttgctccccgcgctaaacggttttattggagacttaatcatcctttgctgaatttt

SEQ ID NO: 140630 - DNA, 1555 bp, Zea Mays
aatttttcttgaagttaatggagccgagctacatcacgtccgccctccccctctctctccctctccctctctcgacgacacaccaggccaccacgcacatgctttgtcccatggatgccgaccacctcatggtgttcaagaccatgctcgccgtcaggtggtagtcccggcgagcgagatctccccactccaggctctctcccatcgctcgctgccgcctcatgttgtttgcggccgtgctcgccaaccgcggcacggaggcgtcgatccgaccgggagcccttcgcaatggacaaagccttcctcctctccggcaatgagggcatcgtcggctcgtcgctaacgtgagcacgtggcagaccctgctgcccccatccttcttcatcttcactaagtgaggaactctctcgacccccttccccacccttcttgtcttcggagttcggatggctggagaacacggtgtttggtcatggcttctagaaggtggtgttttgcatttaaaaaggaaaaaattggagcataatccaaagctttgtttgcagatggggaagaggtaggagtagctcagcagtaggatggagtggccaggacagctcggtgcccacccgtcttcatcgatcgggaccctcttcccctctagcgagctattcccagtttcgagaacaagattaaaatagcttcgtaggcttttatgtggtttagatttgcatatctatctctcaccattaaagcacaaccagatctggtagcttcagctccaaacaacaagaaacactgagagctgtgaagagtctgagatggcttatgtaagccccgcgactgatgatacatcaacagatctagatactgacgagaagaaccaaatgggactcccttctggaaggtcatcagcttcaagtgcggcttcgctgcatcagcgccaaccgcaatcagacattcatagtcatgagtaccatcagctttctcttttgcttatgttagccagcctgacttctattttccacccccttgtatgtctggtggacacgcagatggccaaaccagagtaccaggctatggagaccggacgagagtccaaggagaccaccccgcgattcgtcaacgtctccgggatggcgaagccgcaacccgacgcctccctgtcctttttgttacctccggacgccgctgccgaggggctgcatgacatgattctgaatgctcgcgacgaccttgatgttttatctccgtggtcggtgggggcgtcggcgtgtggtgtaggcagatgagggaggcgacgatgttcttctgtggtgacccatcgacgccgcagtgggtcgaccaacaccatcaccacatggagattcacagggctctcttctgaagcagctagcaaacaagagtatcagtggtggtgtagctgttgttctagctgaaacgaacaagtaagagatggagatggacatagcaaagctagaagttggcttcatgggaacatctgtaatatgtaggagtgacgctcctctaattctagcagacttgaggaaggtataatattcataaattattgtta

SEQ ID NO: 140631 - DNA, 1698 bp, Zea Mays
gccctccccctctctctccctctccctctctcgacgacacaccaggccaccacgcacatgctttgtcccatggatgccgaccacctcatggtgttcaagaccatgctcgccgtcaggtggtagtcccggcgagcgagatctccccactccaggctctctcccatcgctcgctgccgcctcatgttgtttgcggccgtgctcgccaaccgcggcacggaggcgtcgatccgaccgggagcccttcgcaatggacaaagccttcctcctctccggcaatgagggcatcgtcggctcgtcgctaacgtgagcacgtggcagaccctgctgcccccatccttcttcatcttcactaaatggggaagaggtaggagtagctcagcagtaggatggagtggccaggacagctcggtgcccacccgtcttcatcgatcgggaccctcttcccctctagcgagctattcccagtttcgagaacaagattaaaatagcttcgtaggcttttatgtggtttagatttgcatatctatctctcaccattaaagcacaaccagatctggtagcttcagctccaaacaacaagaaacactgagagctgtgaagagtctgagatggcttatgtaagccccgcgactgatgatacatcaacagatctagatactgacgagaagaaccaaatgggactcccttctggaaggtcatcagcttcaagtgcggcttcgctgcatcagcgccaaccgcaatcagacattcatagtcatgagtaccatcagctttctcttttgcttatgttagccagcctgacttctattttccacccccttgtatgtctggtggacacgcagatggccaaaccagagtaccaggctatggagaccggacgagagtccaaggagaccaccccgcgattcgtcaacgtctccgggatggcgaagccgcaacccgacgcctccctgtcctttttgttacctccggacgccgctgccgaggggctgcatgacatgattctgaatgctcgcgacgaccttgatgttttatctccgtggtcggtgggggcgtcggcgtgtggtgtaggcagatgagggaggcgacgatgttcttctgtggtgacccatcgacgccgcagtgggtcgaccaacaccatcaccacatggagattcacagggctctcttctgaagcagctagcaaacaagagtatcagtggtggtgtagctgttgttctagctgaaacgaacaagtaagagatggagatggacatagcaaagctagaagttggcttcatgggaacatctgtaatatgtaggagtgacgctcctctaattctagcagacttgaggaagcctcgacaaacctgaagtttgaacgtatgacagatgacatcttggttacttttgtggatggacatcttggtcgcttttgtggttggcttttgtggatgcgtgaagctacaattgtagttgtgtaagatttatgtgcataactatgtgggttgcatcagctctccgtactatgtatatacctcccgcgtagctgcctacctatccctaacttgcgacccataaacgtagacttcgatcctataatcttatttgggatcagtttcaggctgtaatagccctgaccgtcttactatggaacacgttaaagtatggtctaaaactttaatgcggattatgttcggtctatctatgtttggtctc

SEQ ID NO: 140632 - DNA, 1752 bp, Zea Mays
gccctccccctctctctccctctccctctctcgacgacacaccaggccaccacgcacatgctttgtcccatggatgccgaccacctcatggtgttcaagaccatgctcgccgtcaggtggtagtcccggcgagcgagatctccccactccaggctctctcccatcgctcgctgccgcctcatgttgtttgcggccgtgctcgccaaccgcggcacggaggcgtcgatccgaccgggagcccttcgcaatggacaaagccttcctcctctccggcaatgagggcatcgtcggctcgtcgctaacgtgagcacgtggcagaccctgctgcccccatccttcttcatcttcactaaatggggaagaggtaggagtagctcagcagtaggatggagtggccaggacagctcggtgcccacccgtcttcatcgatcgggaccctcttcccctctagcgagctattcccagtttcgagaacaagattaaaatagcttcgtaggcttttatgtggtttagatttgcatatctatctctcaccattaaagcacaaccagatctggtagcttcagctccaaacaacaagaaacactgagagctgtgaagagtctgagatggcttatgtaagccccgcgactgatgatacatcaacagatctagatactgacgagaagaaccaaatgggactcccttctggaagatggccaaaccagagtaccaggctatggagaccggacgagcctccaaaagaaggtgcatgatagggtattttaacagaaacaataaatttcctcgaagcatcaaagtctccagcaacctgcacaggaaaacaaatatttataattatgtcatgttcccaacaatttagtgcaagagtccaaggagaccaccccgcgattcgtcaacgtctccgggatggcgaagccgcaacccgacgcctccctgtcctttttgttacctccggacgccgctgccgaggggctgcatgacatgattctgaatgctcgcgacgaccttgatgttttatctccgtggtcggtgggggcgtcggcgtgtggtgtaggcagatgagggaggcgacgatgttcttctgtggtgacccatcgacgccgcagtgggtcgaccaacaccatcaccacatggagattcacagggctctcttctgaagcagctagcaaacaagagtatcagtggtggtgtagctgttgttctagctgaaacgaacaagtaagagatggagatggacatagcaaagctagaagttggcttcatgggaacatctgtaatatgtaggagtgacgctcctctaattctagcagacttgaggaagcctcgacaaacctgaagtttgaacgtatgacagatgacatcttggttacttttgtggatggacatcttggtcgcttttgtggttggcttttgtggatgcgtgaagctacaattgtagttgtgtaagatttatgtgcataactatgtgggttgcatcagctctccgtactatgtatatacctcccgcgtagctgcctacctatccctaacttgcgacccataaacgtagacttcgatcctataatcttatttgggatcagtttcaggctgtaatagccctgaccgtcttactatggaacacgttaaagtatggtctaaaactttaatgcggattatgttcggtctatctatgtttggtctcatagttgctttgttgctccccgcgctaaacggttttattggagacttaatcatcctttgctgaatttt

SEQ ID NO: 140633 - DNA, 1513 bp, Zea Mays
ccctctctctccctctccctctctcgacgacacaccaggccaccacgcacatgctttgtcccatggatgccgaccacctcatggtgttcaagaccatgctcgccgtcaggtggtagtcccggcgagcgagatctccccactccaggctctctcccatcgctcgctgccgcctcatgttgtttgcggccgtgctcgccaaccgcggcacggaggcgtcgatccgaccgggagcccttcgcaatggacaaagccttcctcctctccggcaatgagggcatcgtcggctcgtcgctaacatggggaagaggtaggagtagctcagcagtaggatggagtggccaggacagctcggtgcccacccgtcttcatcgatcgggaccctcttcccctctagcgagctattcccagtttcgagaacaagattaaaatagcttcgtaggcttttatgtggtttagatttgcatatctatctctcaccattaaagcacaaccagatctggtagcttcagctccaaacaacaagaaacactgagagctgtgaagagtctgagatggcttatgtaagccccgcgactgatgatacatcaacagatctagatactgacgagaagaaccaaatgggactcccttctggaaggtcatcagcttcaagtgcggcttcgctgcatcagcgccaaccgcaatcagacattcatagtcatgagtaccatcagctttctcttttgcttatgttagccagcctgacttctattttccacccccttgtatgtctggtggacacgcagatggccaaaccagagtaccaggctatggagaccggacgagcctccaaaagaaggtgcatgatagggtattttaacagaaacaataaatttcctcgaagcatcaaagtctccagcaacctgcacaggaaaacaaatatttataattatgtcatgttcccaacaatttagtgcaagagtccaaggagaccaccccgcgattcgtcaacgtctccgggatggcgaagccgcaacccgacgcctccctgtcctttttgttacctccggacgccgctgccgaggggctgcatgacatgattctgaatgctcgcgacgaccttgatgttttatctccgtggtcggtgggggcgtcggcgtgtggtgtaggcagatgagggaggcgacgatgttcttctgtggtgacccatcgacgccgcagtgggtcgaccaacaccatcaccacatggagattcacagggctctcttctgaagcagctagcaaacaagagtatcagtggtggtgtagctgttgttctagctgaaacgaacaagtaagagatggagatggacatagcaaagctagaagttggcttcatgggaacatctgtaatatgtaggagtgacgctcctctaattctagcagacttgaggaaggtataatattcataaattattgttatccttgttccatgtaatacacagtggtctttgatttcatctcattccatattaagatctcaaataattgaccc

SEQ ID NO: 140634 - DNA, 1588 bp, Zea Mays
tgcggccgtgctcgccaaccgcggcacggaggcgtcgatccgaccgggagcccttcgcaatggacaaagccttcctcctctccggcaatgagggcatcgtcggctcgtcgctaacatggggaagaggtaggagtagctcagcagtaggatggagtggccaggacagctcggtgcccacccgtcttcatcgatcgggaccctcttcccctctagcgagctattcccagtttcgagaacaagattaaaatagcttcgtaggcttttatgtggtttagatttgcatatctatctctcaccattaaagcacaaccagatctggtagcttcagctccaaacaacaagaaacactgagagctgtgaagagtctgagatggcttatgtaagccccgcgactgatgatacatcaacagatctagatactgacgagaagaaccaaatgggactcccttctggaaggtcatcagcttcaagtgcggcttcgctgcatcagcgccaaccgcaatcagacattcatagtcatgagtaccatcagctttctcttttgcttatgttagccagcctgacttctattttccacccccttgtatgtctggtggacacgcagatggccaaaccagagtaccaggctatggagaccggacgagagtccaaggagaccaccccgcgattcgtcaacgtctccgggatggcgaagccgcaacccgacgcctccctgtcctttttgttacctccggacgccgctgccgaggggctgcatgacatgattctgaatgctcgcgacgaccttgatgttttatctccgtggtcggtgggggcgtcggcgtgtggtgtaggcagatgagggaggcgacgatgttcttctgtggtgacccatcgacgccgcagtgggtcgaccaacaccatcaccacatggagattcacagggctctcttctgaagcagctagcaaacaagagtatcagtggtggtgtagctgttgttctagctgaaacgaacaagtaagagatggagatggacatagcaaagctagaagttggcttcatgggaacatctgtaatatgtaggagtgacgctcctctaattctagcagacttgaggaaggtttctgtttcgaaagcacgggccattattgtgttaacatctgataaaaatgcagaccaacctcgacaaacctgaagtttgaacgtatgacagatgacatcttggttacttttgtggatggacatcttggtcgcttttgtggttggcttttgtggatgcgtgaagctacaattgtagttgtgtaagatttatgtgcataactatgtgggttgcatcagctctccgtactatgtatatacctcccgcgtagctgcctacctatccctaacttgcgacccataaacgtagacttcgatcctataatcttatttgggatcagtttcaggctgtaatagccctgaccgtcttactatggaacacgttaaagtatggtctaaaactttaatgcggattatgttcggtctatctatgtttggtctcatagttgctttgttgctccccgcgctaaacggttttattggagacttaatcatcctttgctgaatttt

SEQ ID NO: 140635 - DNA, 852 bp, Zea Mays
tcacagttagttatgcttcttttcaattgtgctgggaaatattgctgaaatattctatcctgaaaaaaggttcatcaccttatcagaatgtattgcccctaaatatcgtttagttggtgattgttaactcaattttcacaattaaatatgcttgtgtacaatgttactttgaaatcgtatgaacatgttctatcctattgtcattcagtgtactcaacatgcttacgatatctgcactgtggaccagggctctcttctgaagcagctagcaaacaagagtatcagtggtggtgtagctgttgttctagctgaaacgaacaagtaagagatggagatggacatagcaaagctagaagttggcttcatgggaacatctgtaatatgtaggagtgacgctcctctaattctagcagacttgaggaagcctcgacaaacctgaagtttgaacgtatgacagatgacatcttggttacttttgtggatggacatcttggtcgcttttgtggttggcttttgtggatgcgtgaagctacaattgtagttgtgtaagatttatgtgcataactatgtgggttgcatcagctctccgtactatgtatatacctcccgcgtagctgcctacctatccctaacttgcgacccataaacgtagacttcgatcctataatcttatttgggatcagtttcaggctgtaatagccctgaccgtcttactatggaacacgttaaagtatggtctaaaactttaatgcggattatgttcggtctatctatgtttggtctcatagttgctttgttgctccccgcgctaaacggttttattggagacttaatcatcctttgctgaatttt

SEQ ID NO: 140636 - DNA, 1913 bp, Zea Mays
catcggacgtcggcgcgtcgacgcgtcgtgccgtcgtgctcgttctcgtccataccctgcttggctcctcagtcctccccaccttccccctggccttaaccagcaattcccatatcgccactcccccaaaacgggagctcagcggcggcggccgcaacccctcccctgaaccctaccccgttctacccggccaccaccccacaacatggccctctcccgccgcctcctcccgctcttcctccgccgcggcgcctccatccccacccgcgctctctccacggctgtcgcacctgcggcggtggcctcggaggaggacgaggcggccgtcaccgtcaagggcgtgcgcatctcgggccgcccgctctacatggacatgcaggcgacgacccccgtcgacccgcgtgtcctcgacgccatgctccccttctacctctctcgctacgggaaccctcactcccgtacccacctctacggctgggagtccgacgccgccgtagaggacgctcgcgcccgcgtcgcctcactcgtcggcgccgacccgcgcgagatcttcttcacctcgggcgccaccgagtgcaacaacatcgccgtcaagggcgtcatgcgcttctaccgcgagcgccgccgccacgtcatcaccacgcagaccgagcacaagtgcgtgctggactcctgcaggtatctgcaacaggagggattcgaggtcacctatctccccgtgcgcaaggacgggctcgtcgacctcgcgcagctcgaggacgccatccgcccggacaccgggctggtgtctgtcatggctgtcaacaacgagatcggcgtcgtccagccgctcgaggagattgggcgcatctgcaaggagaaaggcgtgccgttccacactgatgctgcgcaggcgctggggaagatcccgattgatgtgaacaggatggggattgggctcatgtccttgtccggccacaagatttatggccccaagggcgtgggggccctctaccttcgtcgccgccctcgcatcagggtggaaccacagatgaatggtggtgggcaggagcgtggcatccgcagtgggactgttcctacacctcttgttgttggatttggggctgcctgtgagattgccgctcaagagatggattatgaccacaggcgtgtcagtgctctgcagcagaggctgcttgatggcatacgtgcgcaggtcgatgatgttgtcatcaatggaagtatggagcaccgttacccaggcaatctaaatttgtcatttgcttatgtggaaggggagagcttactgatgggtctgaaggaggtggctgtgtcaagtggtagtgcctgcactagtgccagcttggagccctcatatgtgctgcgggcacttggggtggaggaggatatggcacacacttctattcgtttcggcatgggtcgctttaccactgacgaagaggtggacagagcaattgagcttactgtgcatcaggtgaagaagctccgtgacatgagcccactctatgagatggccaaggctggcattgacctcaagagcatcgagtggtcacaacattgaggcagttttcatgacaaacggtcactcgaaagcgtacacggatcgcatacataggtatatggctctaactgcctgctctttgctatattccattttctttcaaaatggatgatgccatggtgccttgtttactatcacatgataaaataattgcgcacctgttcaacatatctgatgagatttagaatgataacatgtgcactattttcttggtgatttgttctgggtggacatctgtgaatcagatattttctctatgatgttaaaattaacttctgatcaatttggataagtgcaacctagtaaggtcttgttctgttacatcaaatgcaatatttagagcaagaataaa

SEQ ID NO: 140637 - DNA, 257 bp, Zea Mays
ttttttctaaaaaaatgtattaacatctacatgttcaaataaatgcagtatccagacatttttatgaagaagttaacgaaactagtttcatatgtaaatgttggtgcaattttttactccatatgtttcaaactgtaaatagttttagctttgtcacaagtcaagtttgtctctaagtagtttatagaacaaaattattaacatccacatttcgtggtgtataaaatatatttcatggtgtatcaaataaaaaaaca

SEQ ID NO: 140638 - DNA, 3734 bp, Zea Mays
actatttttttttctcccgttcacctagcgtgaggcgtgcgctctcgtggcgactttggacaccgccggcgcctaccctctgtctcgtggcgacgagccgccgccgccgacctaagcgaggtctctgtgggactctttgctggtgacgagcaaccatcaggtccgcccctgatgagcaggcccaacactcgcaacaagagcaagaggccacgatctgatgaatccattaatccgtctgcggctgttttcaagaagatacactccgccggtgatatctcgaaagacgatatctgccagctttacatggtgtggaaaccgccttgccatggctgccatggcaatactaaggattccccaaattgtttctgtgggttgatccctgctgccaatggggttcggaagactggcctctggcagaaaatgcaggaaatggttcgtggtctcggccccaatccatccaaggacctccgcgattccactgatacgcctgctggattgactaacctgggtgcaacctgttatgcaaatagcatacttcagtgcctttacatgaacattgcattccgctcaggcattttctctttggagctggacgttttggagaagcatcctgttctggatcagctagcacggttgtttgcacagctacactcaagcaaaatgttattcattgattcagcgccttttattaagacactggaattagacaatggtgtccagcaggacagccatgaatttctcactttgtttctgtctctgctcgagcaatcgttaagtcattccaaggttcctggagccagaacaatcgtgcaaaatctgttttgcggcagcgtatcacatgtaacaaggtgctcgtcatgtggaaaggaatctgcagcatcttcaaaaatggaggacttttatgagctggaattgaatatcaaaggtttaaataatttggaagaaagtctgaatgagtactttagcgaggaagcactggatggggagaatcaatacttttgtgagtcatgtcaaaaaagggtagatgccactcgttgtataaaacttcgatcacttcctccagttgtcaattttcaactgaagcgttatgtattcctcccgaagacaacaacaaagaaaaaaatttcttcaacattcagtttcccaggacaacttgatttgggaaaacgattatcagagccttcatctagttgcacttatgccttgtctgctattttaattcacaagggtactggtgctaacagtggacactatgtggcacatataaaagatgaaagcaatgggcaatggtgggagtttgatgatgagactgtatccaaacttggtttgcatccttttggtgaaaaaccaggaaaggcatcaaacaaagatgatcagaagtcccaaaatacctccacagaaggttctgtcacaaacaataataataatggccaccatgaggcagcgcctagttctaccatgggggagatgttttcatctaccgatgcttatatgctgatgtacaaatgtatcactaaggatgtcaatcccactgaaagcaataaaattgtggagataaataatgatttacttccacaccatcttctagatgaaattaatgaactaaatgcatcatatacaaaattgtgtgtggaataccaaagcaagaaggacagccatttggcatatataacagagaggcgtcaagaagtaaaatctgttctgacagaagcacctgcaggcccaggagatgattcatatttttggatctcaacagactggcttcgtcagtgggcagataatattactcccccctcttccatcgacaatggtgcaattcaatgtgaacatggaaaggttccagcatctaaagtcacatcaatgaagcggttatcatctgtagcttggcagaaattacattcgaaatatggagggggacctatattgaacagtgacgatttttgcatggagtgtcttaaagacggggcaaaaagtgcagtatctgctgatgtttaccgtgaacgaagagcatcattgaaaacactcgcagaagcagcacttgctggtaattgtccagatggtccttcttactttatctcaaagacatggttgactcattggctgcgtagaaaaaatgctgatatcccttctgatggggataacggaccaacaagtgctttaagatgttgccatggggattttctgccagaacatgctccaggggcaaaacgggtatctgtaccagagatcctctggctatttctctaccaaacagtccatgagaagaaggctgatgatacagtgacttttccatcagatagtcatccatgtgaaacctgcagccgagaattgtctgatgttgcttctgtggaggttaatcttagagcagtgaaactcaagcaacgacagaaccatgaaaagttgatatctgggaaaagctttgcgcttcatcctggtcaaaaatattatttggttccttcatcttggttgtcagaatggagagcttatattacagcaactgggaaaaacatttcttcattaccagaacctcaaactctggaagctgttgccaggtcacttatatgtgaaaagcattcaagattgctgcaaaggcctttggatcttgttttaaagcgtgggagcatcattcagaaagcatcaaatactgatgggttaaccataatcccagagtatgattggaaattattctctgaagagtggagtgctacacctggaaaaggtatatctgctgaaattgcttttagcaagagttctcaagacaaactgcatggatcatctgaagcagtgccgattacggatggaaatctaggccagtctcttgatgacacaaacgatgatttgggagccagagagccttatatcagaactgatcccgaggtttgtgaagaatgtattggcgaaagggagagctgtgcattggtggaaaaactcaactatcaaaatgaagatatccacgtttactttgtccatggaaaagaagcaccaaagtctattaaagaagcatctaaagctgttactgtaccagatcgtcggacatcgaagcgttcccggagaacaagctctggaaactcaatcagtttgaaagtctctggctctacatctgtctatcagttgaaactgatgatatgggaatctttagggattgttaaggagaaccaaatgcttcacaaaggctctgttgagattgaagatgattttgctactcttgctgataagagtatttttcctggggattttctctgggtcagagactctgaaatatatgagaaccgtgacattgcagatgagatttcagaacaaaaggatgatatgctacaggctgaggaaggctttcgaggaactctgttgacatcaactgtctcagctcagctttgtcaggatatagcttttagtgaatgagttcccacatcagatatgtagctgcatatctgctgacttaagctggtgaagcctgctgggaggtgatgctgactagcttattctttgtttttattgcatattgctgttttttctgaatggcgatcactacttctacatccttctccctctgactatcaaagtcccacttgtatatgcacctgcttccactgtcgatcatgcaaccgacagaacttcaaagttaactacggttttgaacccttattttcattatgtatatattattcatcttccgttccatgcgccgtgtatgaaatgaattttaggatatcaacaaagttggaatgtcagtttta

SEQ ID NO: 140639 - DNA, 3801 bp, Zea Mays
actatttttttttctcccgttcacctagcgtgaggcgtgcgctctcgtggcgactttggacaccgccggcgcctaccctctgtctcgtggcgacgagccgccgccgccgacctaagcgaggtctctgtgggactctttgctggtgacgagcaaccatcaggtccgcccctgatgagcaggcccaacactcgcaacaagagcaagaggccacgatctgatgaatccattaatccgtctgcggctgttttcaagaagatacactccgccggtgatatctcgaaagacgatatctgccagctttacatggtgtggaaaccgccttgccatggctgccatggcaatactaaggattccccaaattgtttctgtgggttgatccctgctgccaatggggttcggaagactggcctctggcagaaaatgcaggaaatggttcgtggtctcggccccaatccatccaaggacctccgcgattccactgatacgcctgctggattgactaacctgggtgcaacctgttatgcaaatagcatacttcagtgcctttacatgaacattgcattccgctcaggcattttctctttggagctggacgttttggagaagcatcctgttctggatcagctagcacggttgtttgcacagctacactcaagcaaaatgttattcattgattcagcgccttttattaagacactggaattagacaatggtgtccagcaggacagccatgaatttctcactttgtttctgtctctgctcgagcaatcgttaagtcattccaaggttcctggagccagaacaatcgtgcaaaatctgttttgcggcagcgtatcacatgtaacaaggtgctcgtcatgtggaaaggaatctgcagcatcttcaaaaatggaggacttttatgagctggaattgaatatcaaaggtttaaataatttggaagaaagtctgaatgagtactttagcgaggaagcactggatggggagaatcaatacttttgtgagtcatgtcaaaaaagggtagatgccactcgttgtataaaacttcgatcacttcctccagttgtcaattttcaactgaagcgttatgtattcctcccgaagacaacaacaaagaaaaaaatttcttcaacattcagtttcccaggacaacttgatttgggaaaacgattatcagagccttcatctagttgcacttatgccttgtctgctattttaattcacaagggtactggtgctaacagtggacactatgtggcacatataaaagatgaaagcaatgggcaatggtgggagtttgatgatgagactgtatccaaacttggtttgcatccttttggtgaaaaaccaggaaaggcatcaaacaaagatgatcagaagtcccaaaatacctccacagaaggttctgtcacaaacaataataataatggccaccatgaggcagcgcctagttctaccatgggggagatgttttcatctaccgatgcttatatgctgatgtacaaatgtatcactaaggatgtcaatcccactgaaagcaataaaattgtggagataaataatgatttacttccacaccatcttctagatgaaattaatgaactaaatgcatcatatacaaaattgtgtgtggaataccaaagcaagaaggacagccatttggcatatataacagagaggcgtcaagaagtaaaatctgttctgacagaagcacctgcaggcccaggagatgattcatatttttggatctcaacagactggcttcgtcagtgggcagataatattactcccccctcttccatcgacaatggtgcaattcaatgtgaacatggaaaggttccagcatctaaagtcacatcaatgaagcggttatcatctgtagcttggcagaaattacattcgaaatatggagggggacctatattgaacagtgacgatttttgcatggagtgtcttaaagacggggcaaaaagtgcagtatctgctgatgtttaccgtgaacgaagagcatcattgaaaacactcgcagaagcagcacttgctggtaattgtccagatggtccttcttactttatctcaaagacatggttgactcattggctgcgtagaaaaaatgctgatatcccttctgatggggataacggaccaacaagtgctttaagatgttgccatggggattttctgccagaacatgctccaggggcaaaacgggtatctgtaccagagatcctctggctatttctctaccaaacagtccatgagaagaaggctgatgatacagtgacttttccatcagatagtcatccatgtgaaacctgcagccgagaattgtctgatgttgcttctgtggaggttaatcttagagcagtgaaactcaagcaacgacagaaccatgaaaagttgatatctgggaaaagctttgcgcttcatcctggtcaaaaatattatttggttccttcatcttggttgtcagaatggagagcttatattacagcaactgggaaaaacatttcttcattaccagaacctcaaactctggaagctgttgccaggtcacttatatgtgaaaagcattcaagattgctgcaaaggcctttggatcttgttttaaagcgtgggagcatcattcagaaagcatcaaatactgatgggttaaccataatcccagagtatgattggaaattattctctgaagagtggagtgctacacctggaaaaggtatatctgctgaaattgcttttagcaagagttctcaagacaaactgcatggatcatctgaagcagtgccgattacggatggaaatctaggccagtctcttgatgacacaaacgatgatttgggagccagagagccttatatcagaactgatcccgaggtttgtgaagaatgtattggcgaaagggagagctgtgcattggtggaaaaactcaactatcaaaatgaagatatccacgtttactttgtccatggaaaagaagcaccaaagtctattaaagaagcatctaaagctgttactgtaccagatcgtcggacatcgaagcgttcccggagaacaagctctggaaactcaatcagtttgaaagtctctggctctacatctgtctatcagttgaaactgatgatatgggaatctttagggattgttaaggagaaccaaatgcttcacaaaggctctgttgagattgaagatgattttgctactcttgctgataagagtatttttcctggggattttctctgggtcagagactctgaaatatatgagaaccgtgacattgcagatgagatttcagaacaaaaggatgatatgctacaggctgaggaaggctttcgaggaactctgttgacatcaactgtctcagctcagctttgtcaggatatagcttttagtgaatgagttcccacatcagatatgtagctgcatatctgctgacttaagctggtgaagcctgctgggagaaggccgattgattcatgattatggtggttctggcagccgccgaggtggaaatttttgtcgaccccttatctccatgctcagtcaagctaaggttgtttagcgaggaaaatgtatggggtacctactgtagttaaggccccgtttggtttgagggactaaagattagtccctccattttagttccatttagttcctagattgccaaacggtaggactaaaaatgagactaaactgttttagtccctagtctctcaaaatgtggctaaaaagactaaaccatattaattccacatttgcccatcatttagttcaattgtactaatagcacgagaatgttaa

SEQ ID NO: 140640 - DNA, 94 bp, Zea Mays
atatccatgttatagtgtatcacataagctaacaatggcatgtcgacatggctctttaacagaaccatgtaacctttataggtcaaatattgag

SEQ ID NO: 140641 - DNA, 695 bp, Zea Mays
accatagttgtttccttcttcatgtttcaaaagggacttcatacatttatgtttttccatcaagctatgggatgggctttcttgttctttatacttgtgtgcttctttcaactgctccaaatatttaaatagcttacatgtgctcttgttacattcagattgttaaggagaaccaaatgcttcacaaaggctctgttgagattgaagatgattttgctactcttgctgataagagtatttttcctggggattttctctgggtcagagactctgaaatatatgagaaccgtgacattgcagatgagatttcagaacaaaaggatgatatgctacaggctgaggaaggctttcgaggaactctgttgacatcaactgtctcagctcagctttgtcaggatatagcttttagtgaatgagttcccacatcagatatgtagctgcatatctgctgacttaagctggtgaagcctgctgggaggtgatgctgactagcttattctttgtttttattgcatattgctgttttttctgaatggcgatcactacttctacatccttctccctctgactatcaaagtcccacttgtatatgcacctgcttccactgtcgatcatgcaaccgacagaacttcaaagttaactacggttttgaacccttattttcattatgtatatattattcatcttccgttcca

SEQ ID NO: 140642 - DNA, 814 bp, Zea Mays
accatagttgtttccttcttcatgtttcaaaagggacttcatacatttatgtttttccatcaagctatgggatgggctttcttgttctttatacttgtgtgcttctttcaactgctccaaatatttaaatagcttacatgtgctcttgttacattcagattgttaaggagaaccaaatgcttcacaaaggctctgttgagattgaagatgattttgctactcttgctgataagagtatttttcctggggattttctctgggtcagagactctgaaatatatgagaaccgtgacattgcagatgagatttcagaacaaaaggatgatatgctacaggctgaggaaggctttcgaggaactctgttgacatcaactgtctcagctcagctttgtcaggatatagcttttagtgaatgagttcccacatcagatatgtagctgcatatctgctgacttaagctggtgaagcctgctgggagaaggccgattgattcatgattatggtggttctggcagccgccgaggtggaaatttttgtcgaccccttatctccatgctcagtcaagctaaggttgtttagcgaggaaaatgtatggggtacctactgtagttaaggccccgtttggtttgagggactaaagattagtccctccattttagttccatttagttcctagattgccaaacggtaggactaaaaatgagactaaactgttttagtccctagtctctcaaaatgtggctaaaaagactaaaccatattaattccacatttgcccatcatttagttcaattgtactaatagcacgagaatg

SEQ ID NO: 140643 - DNA, 615 bp, Zea Mays
gctctagctgttgcatgctttttagatcctcggtacaagatgaaagtggtcgaattttattattgtgagatgtcagaagattatggatttaaatgaggatccaaggagaaaaagactaaatttatttctaagggacaactatacatggccaaatgggcggcccgggcacggccaggcacggcacgattaggacattcgcaaacacagttaaaacatactaaaatagctaatattgagttgtttagtgcaatggctgactcattaaaaacctatctaggtaaaaactcacccttactattggccatctatagggacaacatggaattgggccaagatcaaactgagctagagcaatatagcaaagaaccattgcttagttggaaagatggtggccactttgacatattgagctggtggaaggcacatggcacaaagtatccaaacctttctcaaatggcaagggacgttttggctattccagcatcaacattagcatctgaatctgcattcagtgttggaggaagagtagttaacaagtatcatagtcgtttggaccctcaggtggttgaggcacttatttgcaccaaagattggattagggcttcaaacaaaggt

SEQ ID NO: 140644 - DNA, 503 bp, Zea Mays
cgaactatggcaagactgagatcaagaatcacatggcttaaagaaggggatgctaactcaaagtttttccacgtgcacacaaggcatcgcaaaaggaagaatctggtcactaaattggtggatggagatcgcatccttgtaaaccatactaacaaagcttcggcggtggatgacttctactccactctcattggacaatcgatcatgaagcccttggtctgccaagacatgcgctttcggaccttgactctcctttctctgagcatgaggtttgggaaaccatcagtgagctcccttcagataaggccgctggtccagaagggttcactggacggttctataaggtctgctagagcactataaaagatgatattatggttgccttggttgctatttggagcaggaagtttgatcatttcagtaaactcaacacggcatacattacattgattccaaaaacagatggggctgatcaggttaaggactttcgatgaatcagcctt

SEQ ID NO: 140645 - DNA, 669 bp, Zea Mays
tttaccttatacaagttttggctttaaacccctttcccctcgcttgccgctgctccgccgtcgccgcgccccgaccagcatcggcgaatacctcccgcgcactcaaccgatggtctcactacctacgactgttcccattcccgagctccgattcggggctcgacggttcctggcccctttgtttcttggataaccgatgcaatttttggttctggataggttgtagttgaatgtaatcgattggtgttccctggcaccatctttgtctgagttccgattctggaattgcgggattggttggtcgggtccggtgagcacgctcggggcggcgccggccgatggcggagctggtggggccgcgcgtctacagttgctgcaactgccggaacaacgtctgcctccacgacgacatcctctcaaaggcttttcaggtccaaactccgtgaatcacctttcctccacttccggacgtgtcgtttgttcactagcgcttatcaattcagcaattacctgttgtgcttatctatatcctagctaggagttgctccgagaatcgacttcttgtgtaggtgcgatgctggatgcacgtttgttaattctggaggacccggttgcattgtactacttctgattccactataagaaactgattgaagcgtatttcttttt

SEQ ID NO: 140646 - DNA, 751 bp, Zea Mays
tatacaagttttggctttaaacccctttcccctcgcttgccgctgctccgccgtcgccgcgccccgaccagcatcggcgaatacctcccgcgcactcaaccgatggttgtagttgaatgtaatcgattggtgttccctggcaccatctttgtctgagttccgattctggaattgcgggattggttggtcgggtccggtgagcacgctcggggcggcgccggccgatggcggagctggtggggccgcgcgtctacagttgctgcaactgccggaacaacgtctgcctccacgacgacatcctctcaaaggcttttcaggggagatacagccgtgcctttatgttctcccatgccatgaatgtagttgtgggggcgaaggaggatcggcaactaacgatagggctacacaaggttgctgatatctactgtagtgattgccgtgaggtgttgggctggaagtatgagagagcatatgaagaaacgcagaaatacaaggaaagttcatatttgagaagtcaaagattgtcaaagaaaactggtagtgtccaaattgtgactcagcaaacgttctggtgaagatgaaatgttataatatgcttttggatgtctgcgtccttgtagatagctgtcctccatggattgcagcccggaagtgctttaatgttcttgttgtagtgacaattgtaaagcacacttatttctgttcatttgtgtgaataagatactgcatatggttatttggccttgaaaca

SEQ ID NO: 140647 - DNA, 2316 bp, Zea Mays
acagagcgcccctcttctaaatttggcacggagctctcgtcgccttcccgtctttcagaattcagagggccgcacacgttccctgccgctgcctctacccctctccgggctctccctccccctctccaccgtctctacaccgccgccgctcacaccccaattcctctcgccccattgccggccgcctccctccgtcctctcgcctcgcttgctgcaggttcaatcgccgccgccatttctgcagtttttaattcccacgtcctgttccggcccggccgtgcactccaaattcttccaacaaggccagcccacgccacccggccgggatcccagaaaagttgcgctcggccttcgcgcgttacgtctcccacccagcccttcgatcccgtgatttcagaggcgcccctgtaccgaaagcctagctcccaatcttccttggattcgtcttttttttggatcttggggactgcactgcacacagtttgcctctcttacctttttttggatcttggtggtgccgagccgacaagcaatggggaggaagtactactgccacgccgtggccgcgctggccgtcgtgttcgcggcggccgtcgtcgtcgctgccgaccggcgcctgtcgctggtggtcggcgccgcggtggcgcccgaggaggtgagtctgctccggaaggtggccaatctgatgtggaacggcgatggcaactcgtaccagcacgtgtggccgccaatggagtttgggtggcaaattgtgctggggtcactgatcggattcttcggtgccgcgtttgggagcgtcggcggagttggtggcggcgggatcttcgtgccgatgctgacgctcatcattgggtttgacccgaaatcatctactgcgatatcaaagtgtatgattatgggagcctctgtttcaactgtttactacaatctcaagctaaagcatccgactttggacatgccagtgatcgattatgacctggctgtgctcatgcagcctatgctaatgcttgggatcagcattggtgttatttttaatgttatattccctgactggctggtcacagttctgctgataattcttttcctaggcacatccacaaaagcctttctgaagggcattgagacatggaagaaagagacagtaatccaaagggaggctgcgaaacttttggagcaaactgcaggtgaggaagcagagtatgcagcacttcctactggaccagatgttgcagcaaacaaaaaagccctcacatcagatgaggcgccatcgcttataaagaacatacactggaagaaggttggtcttctttcatttgtatgggtggcattccttgttcttcaggtcacaaagaattacactgctacttgctccccatggtactgggtcttgaaccttctccaggttccagtgtcagtaggagtgacactgtatgaaggatttgggctgatgagtgggaagagggtgttatcatcaaagggaagtggacaaactaccatgaaatttcatcaggtagtcgtatacggtctattcggtatagccgcaggactagttggtggactccttggtctcggaggtggcttcattatggggccactgttcttggagcttggcatccctccccaagtttcaagtgctactgctacctttgcaatgatgttctcatcttccatgtcggttgtcgaatactacctcttgaaccggtttccagtgccttatgctgtttatttcatcgttgttgcatttgttgctgccatcattggccagcatgtggtgaggaagttgatcaactggctagggcgagcatcacttatcatcttcatactggctttcatgatctttgtcagcgcgatttctctcggtggggttggcgtctctaacatggttcacaagattgagcgacatgagtacatggggtttgaggacctttgcaagtacgatgcataagaagcagggaagctgaagatgtgagctatgtggtgtgcagttctccgcaagcagaagtgggataattcaaggatagaagggttccatgatgcaatttggtgcgtaggaccgaagaggttctagcagcgacagttcctcgaagggaggctagctgcatggattggcttaagatgaattttgggcactgaattttcaaaacaaatgtagagatgattttctgccacggcagaatgtcgtcagtgcatttcgttgtaggaaatgtacactgcacatcttcagataaccatcctatagtactacgcgatatgaaatatcacatgatagacatgagatgggtgcctcttatggatttaacgtctttagcctagctc

SEQ ID NO: 140648 - DNA, 2270 bp, Zea Mays
tccctccccctctccaccgtctctacaccgccgccgctcacaccccaattcctctcgccccattgccggccgcctccctccgtcctctcgcctcgcttgctgcaggttcaatcgccgccgccatttctgcagtttttaattcccacgtcctgttccggcccggccgtgcactccaaattcttccaacaaggccagcccacgccacccggccgggatcccagaaaagttgcgctcggccttcgcgcgttacgtctcccacccagcccttcgatcccgtgatttcagaggcgcccctgtaccgaaagcctagctcccaatcttccttggattcgtcttttttttggatcttggggactgcactgcacacagtttgcctctcttacctttttttggatcttggtggtgccgagccgacaagcaatggggaggaagtactactgccacgccgtggccgcgctggccgtcgtgttcgcggcggccgtcgtcgtcgctgccgaccggcgcctgtcgctggtggtcggcgccgcggtggcgcccgaggaggtgagtctgctccggaaggtggccaatctgatgtggaacggcgatggcaactcgtaccagcacgtgtggccgccaatggagtttgggtggcaaattgtgctggggtcactgatcggattcttcggtgccgcgtttgggagcgtcggcggagttggtggcggcgggatcttcgtgccgatgctgacgctcatcattgggtttgacccgaaatcatctactgcgatatcaaagtgtatgattatgggagcctctgtttcaactgtttactacaatctcaagctaaagcatccgactttggacatgccagtgatcgattatgacctggctgtgctcatgcagcctatgctaatgcttgggatcagcattggtgttatttttaatgttatattccctgactggctggtcacagttctgctgataattcttttcctaggcacatccacaaaagcctttctgaagggcattgagacatggaagaaagagacagtaatccaaagggaggctgcgaaacttttggagcaaactgcaggtgaggaagcagagtatgcagcacttcctactggaccagatgttgcagcaaacaaaaaagccctcacatcagatgaggcgccatcgcttataaagaacatacactggaagaaggttggtcttctttcatttgtatgggtggcattccttgttcttcaggtcacaaagaattacactgctacttgctccccatggtactgggtcttgaaccttctccaggtatgacatgtcagaatataaaagattagtgtgcggttacaaatttacaatattggccacacccatatgtatcaaacacagcttgattaaatcttcctgctggttggacataggttccagtgtcagtaggagtgacactgtatgaaggatttgggctgatgagtgggaagagggtgttatcatcaaagggaagtggacaaactaccatgaaatttcatcaggtagtcgtatacggtctattcggtatagccgcaggactagttggtggactccttggtctcggaggtggcttcattatggggccactgttcttggagcttggcatccctccccaagtttcaagtgctactgctacctttgcaatgatgttctcatcttccatgtcggttgtcgaatactacctcttgaaccggtttccagtgccttatgctgtttatttcatcgttgttgcatttgttgctgccatcattggccagcatgtggtgaggaagttgatcaactggctagggcgagcatcacttatcatcttcatactggctttcatgatctttgtcagcgcgatttctctcggtggggttggcgtctctaacatggttcacaagattgagcgacatgagtacatggggtttgaggacctttgcaagtacgatgcataagaagcagggaagctgaagatgtgagctatgtggtgtgcagttctccgcaagcagaagtgggataattcaaggatagaagggttccatgatgcaatttggtgcgtaggaccgaagaggttctagcagcgacagttcctcgaagggaggctagctgcatggattggcttaagatgaattttgggcactgaattttcaaaacaaatgtagagatgattttctgccacggcagaatgtcgtcagtgcatttcgttgtaggaaatgtacactgcacatcttcagataaccatcctatagtactacgcgatatgaaatatcacatgatag

SEQ ID NO: 140649 - DNA, 1874 bp, Zea Mays
cacaaaagaacaatttgtttgtttttaccagcgctcacttgctggtttagcagttctgcgtcggattaagtttacaaagttggcaagatgttgcatacaaattttggtaggtccggagctcatctgctgctctggatttgtcatgaaatccagtttgggccatgcagatagaactgatcgagctatactatactacaacatcctattgaatttgcgatgacctacatatacttttcaatagttattgctgtttaatgctttcaaggcatggcgttttaactcggtgaatcttatgggggttgctttctgcagccaatggagtttgggtggcaaattgtgctggggtcactgatcggattcttcggtgccgcgtttgggagcgtcggcggagttggtggcggcgggatcttcgtgccgatgctgacgctcatcattgggtttgacccgaaatcatctactgcgatatcaaagtgtatgattatgggagcctctgtttcaactgtttactacaatctcaagctaaagcatccgactttggacatgccagtgatcgattatgacctggctgtgctcatgcagcctatgctaatgcttgggatcagcattggtgttatttttaatgttatattccctgactggctggtcacagttctgctgataattcttttcctaggcacatccacaaaagcctttctgaagggcattgagacatggaagaaagagacagtaatccaaagggaggctgcgaaacttttggagcaaactgcaggtgaggaagcagagtatgcagcacttcctactggaccagatgttgcagcaaacaaaaaagccctcacatcagatgaggcgccatcgcttataaagaacatacactggaagaaggttggtcttctttcatttgtatgggtggcattccttgttcttcaggtcacaaagaattacactgctacttgctccccatggtactgggtcttgaaccttctccaggttccagtgtcagtaggagtgacactgtatgaaggatttgggctgatgagtgggaagagggtgttatcatcaaagggaagtggacaaactaccatgaaatttcatcaggtagtcgtatacggtctattcggtatagccgcaggactagttggtggactccttggtctcggaggtggcttcattatggggccactgttcttggagcttggcatccctccccaagtttcaagtgctactgctacctttgcaatgatgttctcatcttccatgtcggttgtcgaatactacctcttgaaccggtttccagtgccttatgctgtttatttcatcgttgttgcatttgttgctgccatcattggccagcatgtggtgaggaagttgatcaactggctagggcgagcatcacttatcatcttcatactggctttcatgatctttgtcagcgcgatttctctcggtggggttggcgtctctaacatggttcacaagattgagcgacatgagtacatggggtttgaggacctttgcaagtacgatgcataagaagcagggaagctgaagatgtgagctatgtggtgtgcagttctccgcaagcagaagtgggataattcaaggatagaagggttccatgatgcaatttggtgcgtaggaccgaagaggttctagcagcgacagttcctcgaagggaggctagctgcatggattggcttaagatgaattttgggcactgaattttcaaaacaaatgtagagatgattttctgccacggcagaatgtcgtcagtgcatttcgttgtaggaaatgtacactgcacatcttcagataaccatcctatagtactacgcgatatgaaatatcacatgatagacatgagatgggtgcctctt

SEQ ID NO: 140650 - DNA, 1386 bp, Zea Mays
gtaatgcttatgtactgttttagttgactagtgataaaagttttaactgatattaacattgacaatacatgggcgataaatgaggctaagcatctaatttttattcctgtcaaagtttttattaattatcatcagttcgaattctttttgtcttaggacatccaacatgatatactgggaagaaaaagatttttacacccttgtgaattccagccactttttacattctctgcaaattctgctagaagcattacttttgcactcaccgtcttgtttgcaatttggtgttttcttctttggtatgtatacaagacatcctcaaatcatctcctaacaaaaaagggggttaatgttaggtgcatcttggcagatatgaaatatagtactatacaagagagccacatgttacaagacaattgggttatagctacaagttagttatatattctgccagcttcgttatatgttctgacatgagttacttttgtgttacgtagaaaaacaagaatcatgagtgcaatggcaaatggaatgtgaaggcccttttgattgacaacttaggtatacttactgtttcattacacatcttgcacaggtaactataagcctgcttccttcctatgacgcttagccatttttagtctcgatagctgccttcctagcaatacctatttattgaaaaattatagcaccctttcatattcacatgataataacaaagtagtatcaaggaactgaataatgtgtccacctgtaagcaaaatatgcctggtcgctggagcacttgtctcgggatatagtgtggcaaagtttggatgatgatattggtctagctattgctcatttcttgagctgtttcattgggaacatttcttggaaagtttggatcatgatattggtccaactattgcttgatgagatagcaaatgttcgagaacagttgctcgacttcttcatgaatgaggtgatagacattggtggattatgtagggttgaggatgcttcacataactaaatctagcattcatatgacctttttgatatgccataatataaggtgttcaaccgtgtctaactactcactattgtcttctcttatttgttgtataggaaaagatggaatggaactcaaattttggtggtcggtcaagtgtgtagagttgaaatcatatacacttagttaggctcaactttagcgcaaactgttggtgaccatgtttttcagttagtattttagtttggatttagagtacacttatgtatgagttatttagcaatgcttatttatgagatattgaatgatacttatctacattatattaactataatgttattaaatatatgtgtgtatgtatattataatgtggtatctcaaaaatgattat

SEQ ID NO: 140651 - DNA, 689 bp, Zea Mays
tcatcttcttagcgccacacataagcatcaggggtgccactgcggtgagccatgggggtgggcgaaggtccgccgtcgtgggcctactcgtctaccggcattgggggcaccggtgaccattcaggggtgctccaggggtcacatggagggggtctgcgctgtcgctaggctaggggtggaggacgaggcctagccaatttctcgtcatacttcgctgggccccgctgcaccactgcgcgttgtggccggcctcgtcggaacaccctcatcggtgagaaacccttctatcgtgctcaccataaccgtagggcgtgtctaccatattgtgttatggcggggcgctgtggcatgcagagtccatggccaccggcgggctgtgccgtcaattggctcctctccgccgtgtgctaccaagggtggggaagaaacatcaggaagcattgatcccgtgaacggatggcttagattagattaaggccttgttcgtttatgccggattggtgggtcggaaacgaacaaggtgatcgcggtgaatattggtcgtcaattggatggagggtgtgcaattggaacgattccgggtgcaatccgacggaaacgaacaaggcctaaggatatcgttttggggttgtaaatattggtcgtcggatgatggatggagggtgtgggtgtgatcgcggtgattttaa

SEQ ID NO: 140652 - DNA, 2590 bp, Zea Mays
gtggaatgacatacatgaacaaattggtactaaggaactgttccatcagtggaagcatacccccatacattggcacatggacatctcttaagcatctgtaataaatcacaatttatctaagtgctaaaatgtttttataattaacatattttgttataacattgtttattcagggatctcagctttaataaactgagtggagaaataccaccttcttttgctagcatgggagctgtagattacatatatctatctggaaattcactcaccgggaacatacctggatggttattaagaagaaacaagatcgcggacatatcttttaataacttcacgatggggagttcaggtccgagccaatgccttcaagggagtgtcaatctggtggagagctattcagctgaagtgaaccgtttaaatagtattcatccatgcttaaagaggaacttcccatgtgttgcttcgaatggacaatatcactcttcactgcatatcaattgcggcgacaaagaagcaactattaacggaactaaatatgaagccgacacaacacccaaaggggcatcattgttgtatgtgtccccaggcttgaactgggcattcagcagcaccgggaacttcatggacgacaacataaatgacgacaactacatagcaacaagtgcatcaaaattggccgtgcccaattcagatctgtacaacaaagcccgtctttctcctctttcgctcacatattatgggctttgcatgttaagtgggagctacacagttaatctccactttgctgaaattgttttcacaaatgacagcacatattatagccttggcaaaaggagattcaacgtgtttatacaggggagaatggtgctagaggatttcgatattgaacagtcatccggtgcggctgcaaaaccagttaccaagacttttcaaacatatgttacaaatcacactctagagattcagttctattgggcaggaagagggacaacaggcattccatatagaggttcttatggcccactgatatctgcaatatcagtaactccaaatttccaaattccattggctgttgaccctcccaaagctggaagtagggaaaaaaggagttcaagggcatctattgctttaggaattggaattcctattgtagcaatattcactgctctgattctcggcatttattgtattaagaagcagagaaagagttcgatgcatgaagaactcagagcccttgacctgcaaattggctccttcaccttgcgtcaaatcaaagcagcaactaggaacttcgatgcagctaacaagattggtgaaggaggatttggttcggtttacaagggtttattatccgatggcaccatcatcgctgtcaagcagttatcatcaaggtctaaacaagggaatcgggaatttgtgaacgagataggcatgatatctgcactccagcatccaaaccttgtcaaactctacggctgctgtacagaaggaaaccagctgtcgctagtttatgagtacatggaaaacaattgcctcgcacgagctcttttcgttgaacagtatagactgagaatggattggggaacaaggcataagatttgccttggaatagcgaaaggtctagcatatttgcatgaagagtctgcaataaggatcgtgcacagagatataaaggccagcaatatactgctcgacaaagatttgaatgccaagatctcagattttgggctagcaaagcttaatgaagatgatcacacccacataagcacaaaagtagctggaactatcggttacatggctcctgagtatgctatgcgtggttatttaacagataaagctgatgtatacagttttggtgttgttgttttggaaattgtcagtggaaaaagtaacacaaactacaggccgaaggaagactttgtttatcttttagattgggcttgtgttctacatgagagaggaactctactggaattggttgatccagatctaggatccaattactcgacagaagaagcgctcctcatgctgaatgttgccctgctatgcacaactgcggcgcctacactcagaccaaagatgtcaaaagttgttagcctgcttgaaggcagtgccccactgcagcctttgctgtcagacctcagccttgcagcaaatagcctgagctcaagtggtgtacgcaggaacttctggcaaaacccaggtgagagtcagagcctgacagcacaagcttcatgcagcgatactaatgaatcatccaccattgatatagatggtattctactggtaagttagatgtagtttgctgtgcatcatgaactaggtttacatgtaggaactactaagcataggccagcatgtttgtattaagttcaccagtgcaatgtaaatagcaagtagcatactaatgtctagtacaggtagagccctatgcattttacaccagtgcaatgtaaatagcaagtagcatactaatgtctagtacaggtaaagccctattcattttagtagtctctgtttcatattacatgggaatattaagatgtctgtgacagaacactggaagttctctatggactatagtctctga

SEQ ID NO: 140653 - DNA, 348 bp, Zea Mays
gctggtggcgtcgaggagtgcacttcctgcggctgccgggaagacgacgaaggctgtgccgtggggtacggcgacggcgaggtgttcgaccgcgcgtcgttctcgcggctcctgtggaaggcgtcgctcagggaggctaaagagtattccatgatgtcctatctctgcaacatcgcctacatgatccccagaattcaggtaaccatcaccgtcagtttctttatactgatgatctaatctacatcgtcagtgcaagacaaggccggagctagccctgaccagaagcaggagcgtagcaccaagaaagacgaatctggcgatcaagaatccgaagttgtcgacgatgcg

SEQ ID NO: 140654 - DNA, 2354 bp, Zea Mays
atgcagtttgtacccgggctttataccaggcttgcgtgttcattcgttgtgtcctcttcttctttctgttctccccgcgtgctctgtctctctcttcctctctgcctctctctctctctctcagcggcgactagggacagccgctgcctccctacgcctggtgcccaggtatcctttgccggcgacgagcacccggtaggggtatgggaatggaggtcgttggtgctgaagcagcaccagcagaggtcaaaatatccgatggagaagtgaatctattccaagagaaggaaagcaaagcaactgcaaaagaacgtgaggaggcagctgtttttggttcagagacaactgcgaatgtcactgatctggcacctccaaaggatgcgaaggatgagtggcctgaaccgaagcaaacttatgtcttctacttcatcaagatccgctcatttgaggatcctaaactgagggtaaaactcgagcaggctgacaaagaattccagaagaagatccaagctcgttctaaacttattgaggcagtaagagccaagaaggcagagcgttccagtattatcgcagagttgaagccattgagtgctgagaacaaacaatataatgaagttgtgaatgagaagataaaagagatggagcctcttcgaaacagcttgggaaagtttcgtgaggaaaacaatgccatgagggcacagagtgcaggcttatgctcttccatcgaagagcttgacctaacgatcaagatgctgaatgatcgcatggtacatgaaagcatacctttatctgaggagaagcgtctagtgaaagaaattaaggaccttgagaaaaccagatcgaaagtcatctctaatgctgctaacagggctaaattgcaaggtacagtggttgaaaaagaggctatacaggaccaggtcaaaatcatcggggagggcattgatggaataaagaaggaaagacaggcagtaagatctaagattaaggtcctggaggatgagctaaaacttgttgatgctgagattggattgcttcaagaagatttagatgcagcaactgccagaaaggataaggcatatgaatcgttgcaagaattgagagcagtgcgtgatgcaaaaaacgcatcctccatgcataaccgtacagttttaaccagagctagggattattcttcaaggaatatgctgacagaattgcaagagctccacaaaactgaggtcgacaagttcatgacccaatggtgtgaaagtaaggccttcagagaggactacgagaagagaatcctcacatccctaaatagccgacagctgactcgagatggtcggatgaggaatcctgatgagaagcccatatttatcgagtcacaggcgccagctccagctccagagcccatccctgtaaaattgcctgcaaaacaagccaaggaagtgcctgctccccaggcagatgatgctcccaagactgaagctccttcgaaaggacctgtcaagtcgcacaaggcaaaagctgctcttgatgctgatgatgattatgaggccgagcccctgaaggagaaggcaaagcctacggaggctgatgtggctaagttgaaagagatcaagaggcaggaggagattgagaagaacaagcttgcattggagaggaagaagaagcaggctgagaagcaagcagcaaaagccgcggcccgggcacagaaggaagctgagaagaagctgaagaaagaggagaagaaagccaagaagaaatctggcgcagctgacactgatgagccctcagaatcggacgccaagtctgatgaagccatggaagccccagtggagcaggaagtggccccagcttccaccatgataaagaaggaacagaaggagagtgcccggcacaggaacgtggtcagcaaggccccaccacccaaggcgatcctgaagaggaagaaggcgcagtcctactggtcatgggctggcccagctgccatggtggctgccgtgctggttgccctcctcgcggtgctgggatactaccagtactacctcccagcgaatgccagcaactgagtgggcgaggtcggtgcactcgcggccaggccattcatttatgacgtggagaccaattttgcaggtgagaagaaagagtgcaaggtctgcttgagacgtgaaggaccagaggagagtcttgttcgctttcgatgttgttagttggagccgaagatacagttgtttttggttgcgactttgctagatctctctctatatactgcgactgatatatcccgtgtacttttgaagtgatgcgtatattgacatctggaataacaatgcctttcagtttcattatctcaataatggcccttcctgtgc

SEQ ID NO: 140655 - DNA, 2350 bp, Zea Mays
atgcagtttgtacccgggctttataccaggcttgcgtgttcattcgttgtgtcctcttcttctttctgttctccccgcgtgctctgtctctctcttcctctctgcctctctctctctctctcagcggcgactagggacagccgctgcctccctacgcctggtgcccaggtatcctttgccggcgacgagcacccggggtatgggaatggaggtcgttggtgctgaagcagcaccagcagaggtcaaaatatccgatggagaagtgaatctattccaagagaaggaaagcaaagcaactgcaaaagaacgtgaggaggcagctgtttttggttcagagacaactgcgaatgtcactgatctggcacctccaaaggatgcgaaggatgagtggcctgaaccgaagcaaacttatgtcttctacttcatcaagatccgctcatttgaggatcctaaactgagggtaaaactcgagcaggctgacaaagaattccagaagaagatccaagctcgttctaaacttattgaggcagtaagagccaagaaggcagagcgttccagtattatcgcagagttgaagccattgagtgctgagaacaaacaatataatgaagttgtgaatgagaagataaaagagatggagcctcttcgaaacagcttgggaaagtttcgtgaggaaaacaatgccatgagggcacagagtgcaggcttatgctcttccatcgaagagcttgacctaacgatcaagatgctgaatgatcgcatggtacatgaaagcatacctttatctgaggagaagcgtctagtgaaagaaattaaggaccttgagaaaaccagatcgaaagtcatctctaatgctgctaacagggctaaattgcaaggtacagtggttgaaaaagaggctatacaggaccaggtcaaaatcatcggggagggcattgatggaataaagaaggaaagacaggcagtaagatctaagattaaggtcctggaggatgagctaaaacttgttgatgctgagattggattgcttcaagaagatttagatgcagcaactgccagaaaggataaggcatatgaatcgttgcaagaattgagagcagtgcgtgatgcaaaaaacgcatcctccatgcataaccgtacagttttaaccagagctagggattattcttcaaggaatatgctgacagaattgcaagagctccacaaaactgaggtcgacaagttcatgacccaatggtgtgaaagtaaggccttcagagaggactacgagaagagaatcctcacatccctaaatagccgacagctgactcgagatggtcggatgaggaatcctgatgagaagcccatatttatcgagtcacaggcgccagctccagctccagagcccatccctgtaaaattgcctgcaaaacaagccaaggaagtgcctgctccccaggcagatgatgctcccaagactgaagctccttcgaaaggacctgtcaagtcgcacaaggcaaaagctgctcttgatgctgatgatgattatgaggccgagcccctgaaggagaaggcaaagcctacggaggctgatgtggctaagttgaaagagatcaagaggcaggaggagattgagaagaacaagcttgcattggagaggaagaagaagcaggctgagaagcaagcagcaaaagccgcggcccgggcacagaaggaagctgagaagaagctgaagaaagaggagaagaaagccaagaagaaatctggcgcagctgacactgatgagccctcagaatcggacgccaagtctgatgaagccatggaagccccagtggagcaggaagtggccccagcttccaccatgataaagaaggaacagaaggagagtgcccggcacaggaacgtggtcagcaaggccccaccacccaaggcgatcctgaagaggaagaaggcgcagtcctactggtcatgggctggcccagctgccatggtggctgccgtgctggttgccctcctcgcggtgctgggatactaccagtactacctcccagcgaatgccagcaactgagtgggcgaggtcggtgcactcgcggccaggccattcatttatgacgtggagaccaattttgcaggtgagaagaaagagtgcaaggtctgcttgagacgtgaaggaccagaggagagtcttgttcgctttcgatgttgttagttggagccgaagatacagttgtttttggttgcgactttgctagatctctctctatatactgcgactgatatatcccgtgtacttttgaagtgatgcgtatattgacatctggaataacaatgcctttcagtttcattatctcaataatggcccttcctgtgc

SEQ ID NO: 140656 - DNA, 1712 bp, Zea Mays
gcaaagagccaaagagtccttccaatcttatctgcctcagtagccgccagcagattttttaacctaggactagcagtgattatcactagttaatatagtatgtctttctgcctcagcctcagtagccggcagagtgaggtgaagatatgtctgctttcgtgctcgccggcgccggcgctgccttgcttctcggcttcctctacatcgtcaagaaccggtcgagcaagagcaaactcccgccgtcgcccgtgtctctgccactggtcggtcacctccatctcatcggccgcctcccgcaccggtccctgcacgagctgcaactccgatatggcggcgacggtggccttctcctcctgcatctcgggcgccggcggacactggtcgtctccacggccgcggcggccgcggacctgttccgcaaccacgaccttgcattctcctcccgcccacacaacgcggcggctcacaagcagacgtatggctcccgcaacatctccttctcgccgtacggggaccactggcgccgcgccaagaagatcgcggtggtgcacctcctctcccagcgccgcgtagacgggttcgcgcccgtccgtcaagctgaggcggccgcgctggtggcgcggacacggcgagccgctgaggctggagaagctgtgcagctgaaggagctcctgtacggctacaccaactcggtggtcacccgcgccgcagccggaaccgccgggacgacggccgagaggctgaggcagctcctggcgcacggcgcgacgctagtggcggggttccaggcggacgacgtgctgccgagcgcggcagcaagggtgttcaggtgcgcaacagggctcgagaagaagatcgacgacatgaacgagaactgggacaggttcctgtcggagatcgtggccgagcacaaggagaagactagactggggcaggggctggggcagggacaggatggtgacttcttggacgtcctcctgcagctgaaggaaggaggaggcctcgagggtttcgagctcaccgatgacgatggcatcaaagccatcgctaaggacatgatagccgcggcgacggacacaacagccgtgacgctggaatgggccatggcggagctcgcccgaaacccgcgggttatggccaagctgcaggacgagatcgcgcgcgtggccggcggcaacttcgagcagttaacggacctcggagacgcggagctgaacaagatggtctacctgagggcggtggtgaaagaggtgttccgcctccacccgccggtgccgctcctcctcccgcgcgaatccatggccgcggcgggtgtgcagggcggcaggtacgagatccccgcgaagaccgcgctgctggtcaacgcgtgggcgatcgggagggaccccgcggcgtgggacgcgccggaggagttccggccggagcggttcctggcgggcagcgaggcaagggcggtggacgtgagggggacggactaccagctcctcccgttcggcacggggcggaggatctgccccggcatcagctttgcgctagcagccctggagctcgcgctcgccagcctcctgcgccacttcgactgggagctccccagcggcacgcactcggcggacatggacatgctcgaggcgccggggctctcgacgccgccgcgggtaccccttgttctcgtccccaagtggaagccgcttgcttaggcatgcagcgcacgc

SEQ ID NO: 140657 - DNA, 1198 bp, Zea Mays
tttcttttcgtttctgttttcctcccacctccccctctccagctctcctactgtcccctcggcctcccgccggtgagcgatggagcggcggtcctccgtccgctttgtgccatccgagattgcaaggatggagaaattggctgcagatagaaaagaccaagtctttgataacaagttctgccagaagcttgcagaagaatttaatcgttctgttggccgtgctggaagtaaagcgttacaagctacacaggttcaaggatggtttcttaataagtttccagcatcagccactaaacctacttgtgtgcccactgcttcccaagaaaagacttcagcctcagaaataaatgtatcagtttctgaaaaaagatctgcagcttccgaagagaaacttttccctcttgatacaggtgtttcaaataatgaggatgaggtttctcctgtttttccattagaaactaaagatatgattcctgaacttgaagacctggagtttgaggccaagtctacaaaggattttgcctggaagtccgggtgagattcgagggttttggggcggatgaggatgagtgggtgaatgtcaagaagttcatccgccagcgttccattcctctggagtcctcacagtgcaaaagcgttgttgaaggtgaccttgttctctgcttcagggagggaaacgaggaggcattgcatttcgatgcacatgttcttgaggttcagcggaagcagcatgatattagggggtgcagatgtgtattccttgttgaatacgatcatgaccaaagccaggagagggttagcctgagaagattgtcccggcggccaaagtacttttgaaggctgctcctgttagcctgatgggcatatctattctggaactggaactaaccggagcgtgaaacttaggtgaagttagtttgtggcgtccttggtcatgtgtgtattagcaaccggcggcagcaagcatgggcttgcatctcaacccctttggcacaggactggctgactgaattttataaactcgttatcgtgcagaagagggaagagtacgcggcttgagcacttagggtgtcacttaggatgtgtttggttcgtgaagtcaccttatgcttcatgaggtgtatcatgaattcatcctataattttttgtggcatcaacctattcctcgtttatatattaattattagtttatgagtt

SEQ ID NO: 140658 - DNA, 1250 bp, Zea Mays
tttcttttcgtttctgttttcctcccacctccccctctccagctctcctactgtcccctcggcctcccgccggtgagcgatggagcggcggtcctccgtccgctttgtgccatccgagattgcaaggatggagaaattggctgcagatagaaaagaccaagtctttgataacaagttctgccagaagcttgcagaagaatttaatcgttctgttggccgtgctggaagtaaagcgttacaagctacacaggttcaaggatggtttcttaataagtttccagcatcagccactaaacctacttgtgtgcccactgcttcccaagaaaagacttcagcctcagaaataaatgtatcagtttctgaaaaaagatctgcagcttccgaagagaaacttttccctcttgatacaggtgtttcaaataatgaggatgaggtttctcctgtttttccattagaaactaaagatatgattcctgaacttgaagacctggagtttgaggccaagtctacaaaggattttgcctggtatgacattgccctattcttggcacacaggaggaacagggcgggtgaagtagaagtccgggtgagattcgagggttttggggcggatgaggatgagtgggtgaatgtcaagaagttcatccgccagcgttccattcctctggagtcctcacagtgcaaaagcgttgttgaaggtgaccttgttctctgcttcagggagggaaacgaggaggcattgcatttcgatgcacatgttcttgaggttcagcggaagcagcatgatattagggggtgcagatgtgtattccttgttgaatacgatcatgaccaaagccaggagagggttagcctgagaagattgtcccggcggccaaagtacttttgaaggctgctcctgttagcctgatgggcatatctattctggaactggaactaaccggagcgtgaaacttaggtgaagttagtttgtggcgtccttggtcatgtgtgtattagcaaccggcggcagcaagcatgggcttgcatctcaacccctttggcacaggactggctgactgaattttataaactcgttatcgtgcagaagagggaagagtacgcggcttgagcacttagggtgtcacttaggatgtgtttggttcgtgaagtcaccttatgcttcatgaggtgtatcatgaattcatcctataattttttgtggcatcaacctattcctcgtttatatattaattattagtttatgagtt

SEQ ID NO: 140659 - DNA, 1746 bp, Zea Mays
gacaataatgtccttattttggagctcgcgccgcccgccgcccgccgccgcgcccgaacgcagccatcgattccccatttctttcccgcctcctcactcccgcctcttctactcccaaaatcccaaaaccctagctcgctaacgaccccaggcagacgcgccgtcctcccctcccccatggcgctcaagcagaaggacaccgacgccgccgccaccgccaccggtaccaagaagcgccgccgcgtcttcttctccgacaccgatgctggtgttgaggcaaatgagtgtatgaaagtgtttctagtatggaatccaggcgagggagggaaaggaataacagatctaaagcctgttcttcagaacatttttggagaaaacttggtagaaaaagaggaattcctgcatacattttcgaaggaatgtgaatatatcagaactgcagtgacaaatggtagtgccattaagcatgatggctcatatgaatcagatcctgcagttgagattgttcgagttgaactccaaggtgctgctgcatttctttattctcgtctggtacctcttgttcttcttctggttgaaggttccacgcctatagatattggagaacatggatgggaaatgcttctggtagtaaagaaggcaacacaagaggctggttcaaaatttgaactgctaggttttgcagctgtgcataacttctatcattatcctgagagtattcgcttacgaatcagccagatacttgtgttgccaccttatcagggtgaaggccatggtcttggtcttcttgaagcaatcaattatattgcacagtctgagaacatttacgatgttacaatagaaagcccttctgattacctgcagtatgtgcgatcatccattgactgcctccgtttgctcatgtttgatccgatcaaacctgcactcggtgctattgtcttgtctctgaaggagaccaacctgtcaaaaagggcccaaagtttgagaatggttccaccagctgacctgatggagactgtccgtcagaagctgaagataaacaagaaacagttcctccggtgctgggaaattctgatcttcctaagcctcgactctcaggatcataagagcatggacaacttcagggcctgcatatatgaccgcatgaagggggagatccttggcagtgcctctggaactaacaggaagcgtctgttgcagatgccaaccagtttcaataaggaggcatcttttgctgtgtattggacacaggagattgaggatgaggatgaacaaactgttgagcagcagccagaggatctcaagacgcaggagcaacagctcaatgagctcgtggacatccaaatcgaggagattgctggggtcgccaagaacgtcacttcacgttgcaaggataagatgacagagctggtggttcaatgaatctgggtgaggttcctacttcaaacgatgttaaaatgctgtcgtagcttatctggtgaggtctcttttatgggttggcttcttggtagaaagggaatgtttggttattgcactgtcatcgtagtgttagaaccaacacaagcataggcactgagtagattgtcacggcagattattatgtacttcaattctggaatatttgatgggaatgctattttagattgcttggtaagtggtaaccgcctcaaatcacagaagtagaaccagcttctgattcagccggaaccatttattgaattttatggtgatcactgattagtaatc

SEQ ID NO: 140660 - DNA, 1908 bp, Zea Mays
gacaataatgtccttattttggagctcgcgccgcccgccgcccgccgccgcgcccgaacgcagccatcgattccccatttctttcccgcctcctcactcccgcctcttctactcccaaaatcccaaaaccctagctcgctaacgaccccaggcagacgcgccgtcctcccctcccccatggcgctcaagcagaaggacaccgacgccgccgccaccgccaccggtaccaagaagcgccgccgcgtcttcttctccgacaccgatgctggtgttgaggcaaatgagtgtatgaaagtgtttctagtatggaatccaggcgaggtgagctctgtagactgcactgctattcagccatttgacctaaaccatttttttggtgaagatggaaaaatatatggttacaaaaatcttaagataaatgtgtggataagtgcgaaatctttccatggatatgctgatgtttcatttgacgaaacatctgatggagggaaaggaataacagatctaaagcctgttcttcagaacatttttggagaaaacttggtagaaaaagaggaattcctgcatacattttcgaaggaatgtgaatatatcagaactgcagtgacaaatggtagtgccattaagcatgatggctcatatgaatcagatcctgcagttgagattgttcgagttgaactccaaggtgctgctgcatttctttattctcgtctggtacctcttgttcttcttctggttgaaggttccacgcctatagatattggagaacatggatgggaaatgcttctggtagtaaagaaggcaacacaagaggctggttcaaaatttgaactgctaggttttgcagctgtgcataacttctatcattatcctgagagtattcgcttacgaatcagccagatacttgtgttgccaccttatcagggtgaaggccatggtcttggtcttcttgaagcaatcaattatattgcacagtctgagaacatttacgatgttacaatagaaagcccttctgattacctgcagtatgtgcgatcatccattgactgcctccgtttgctcatgtttgatccgatcaaacctgcactcggtgctattgtcttgtctctgaaggagaccaacctgtcaaaaagggcccaaagtttgagaatggttccaccagctgacctgatggagactgtccgtcagaagctgaagataaacaagaaacagttcctccggtgctgggaaattctgatcttcctaagcctcgactctcaggatcataagagcatggacaacttcagggcctgcatatatgaccgcatgaagggggagatccttggcagtgcctctggaactaacaggaagcgtctgttgcagatgccaaccagtttcaataaggaggcatcttttgctgtgtattggacacaggagattgaggatgaggatgaacaaactgttgagcagcagccagaggatctcaagacgcaggagcaacagctcaatgagctcgtggacatccaaatcgaggagattgctggggtcgccaagaacgtcacttcacgttgcaaggataagatgacagagctggtggttcaatgaatctgggtgaggttcctacttcaaacgatgttaaaatgctgtcgtagcttatctggtgaggtctcttttatgggttggcttcttggtagaaagggaatgtttggttattgcactgtcatcgtagtgttagaaccaacacaagcataggcactgagtagattgtcacggcagattattatgtacttcaattctggaatatttgatgggaatgctattttagattgcttggtaagtggtaaccgcctcaaatcacagaagtagaaccagcttctgattcagccggaaccatttattgaattttatggtgatcactgattagtaatc

SEQ ID NO: 140661 - DNA, 1467 bp, Zea Mays
gagtcaagtaacaacagatttttcacagaatattgtagcacataatctgttgataaaaaacagatcaaagacagataactcctccagaaattccatagaatctttataagcatccattgatcaaagtatttaaaacatgcatacataaataaaaacttctagaagttcactgcatactggacatccacaaaatcaggagaacactcttcaccaaatgctcttgagattcttgagtgataatttgaagtcacttcctttgagcttcatctgaagagaacaagtataacacatgagtacaagaacgatatgtaatatgcacattgaagataattatctttctatcattagagtgaaagataattatctttctattatcagagttgaaccgtacataattatctttctattatcagtaatgtctcatgtcacagtgtaaaagcacagataacttggtgcacaggtaaaagtagctgcaaaagaacagataaaccatgggaaaatcttttttgcttctatgaatccttctactatttgcaactgctagtgataattatttagaaaataccacttcacctataatgtgaactgcctgaacccgaacaaaacaactccggttgcttattactgatgatggatgatttgtcacaagacaatggctaattgactgacagtaaggatgctgattgaccgatagtaaggacgctaattgactgacagtaaggataatgtatatatttatgtgagccacacagatagtaaggatgctaattgactgatagtaaggatgatgctaattgtgagccagacagaactgaataaaatagctagccttacatgaaattccacaagaaaaagcgataattatatttatttctaggaaacttcgatcaggacgccaatcaacaaaggaaaaaagtgaaatgtttagagcttgatattgacacgaatgaacaccaaactccaaacaagcatcatactcagtacatgcatgaaattgttcttggcacaaaatgtcacgcacacatgcatggatggttgtctagattcaagaagagttaggtagagatcagacttgttagagactggataaatgacagattcatggagcagatcgtgtagtaaagatgggagtagcggaggtaaggctaacaagcaaagcaagtggctggagcagcatgtgtaccacaatggggagaactcgaagaggcggccacgactggagaagatgtggcctcttcaagaaacgacgcagaacaacacgggagattagggtttcgggggaaatttggagatagagctggattcaagagggagggaggggagagagagagcgagggagggagatggagaggttacgtcctcacctgtagaggccgatggtgcaagggaggcagcggccggcggcaatggtgcctggacaaggacgcggggcatgttctcacgcgggggagaggagtcgtgggaaag

SEQ ID NO: 140662 - DNA, 138 bp, Zea Mays
tttgcgggcgccgggaatggggagggtgaagccatggtagcactaggtatccacattaagtttttaatatatatactaggtatatgtccatgcgttgccacgagagttaaaaattagtaaaaaacatagatatggaat

SEQ ID NO: 140663 - DNA, 381 bp, Zea Mays
atgccgggggggccaggcaccaggcggggatggcatggggtcgatgcagcagtcgccttcttctcttctctgaggcgagcgatgacggcggaggtgctcgtgtcggggggaccaggcgggaatggcgcgataacagcgaggagtcaggggatggtgcgaggtggatctgagggaggggaggttaacgagaggaagcgaggtgtcgggtggcgtggattgtggcattcagtgagcttgcgtggcccatggtgcaaggcagaagaggagaggagtgcgggcaagaatggaaggggcgtgcatgtggatcattggagcacggacgaggatggaagggatgcgggaggagtatggaaggggcaggctaggatgaaagggaggtag

SEQ ID NO: 140664 - DNA, 1136 bp, Zea Mays
caattgagcaaacttgtgacagcaagtgagaagagcacaacatccgttgagtctttggcaagaaaggaggacattgggtgctccattagagatatcatggcattggtgaaggagtgtggtgcagttctaggaacaaaagaacacttcatagcatctcaagtttttgtcaagagggcagagagggaaatgtttatgactttggacacactggaagaacgcttcaactggcttacaatgaaacatgattgggtcactaggatgattcactaggatctgtaattttttgtagcactgctgtgttgtaccatgcgcttgaagctgacgaagatttatttccacacccccctctaggaaagtactatgttgttgatgctggatatccaaatagggatgggtacttggcctcgtacaaaggacaacggtatcatgttccggaatggagaaatggtcctccacctaatggtgagcaagagctcttcaatcatttacactcaagtctacggaatgttgttgaacgcacatttggtgtatggaagatgaaatggagaattcttcttaagatgccaacttatcctatggacaaacaaaaaatgattgttgttgctacaatgtgtcttcacaatttcatccgtgagaatagtgcattggatgaggattttcagagatgtgatcgagacccagattatatccctactattccatcccgttataggcgacatgtccctcagaatgcatcagatacatctaccacagggtcgagtagtaggaacatgaataggttctgcgatgatgtatcgaaggtactttgggagtcgaggtgattagaaaaggtggttcgtgtcatattttggatatcgtgtcgtgctagttttatgcaatttatggattaaacatttgagaccattttatgcactaatatgatgggaatattttatatgttattgtttcatattttttctgtatatgcatcttacttattggtttgtaacaaagttgaactacaaagggtaaaacagacaatcgccacagaccaccaactttcaacatacaagaatcagtttacttgtcaaacggttttaaaaatgattctgattctctaggagaatcaggaggatcagctcctcaggaggatcatg

SEQ ID NO: 140665 - DNA, 477 bp, Zea Mays
atgagcatgatcgacgtgatcacgcgggtggacgccatctgcaagaagtacgagcggtacgacaccgacaagcacggcgaccccttctcgcgcctctacgctgccgtggacgccgggatcgacgccgccatcgaggtctccggtctcccctcccttggtcttcccttggctgccttaaagacgaaatcggcgagggccgcgaagaagaagaagaaccgggcggcctcggtgaccctggacgccgacgtacggcggaccaaggcgcggctcctggaggtggtggtcaagctacagaaggtagccgccaggaaggtgaacgggctctcgccggaggagaaggtgtcgcgggctggtctggtggccgcgctgccccacaggatccatgccatccccgacagccacggcggtgtaacacccgacactggctcaccacgtgatgggcctcgatgtcgcatggcccaactcggagcagcctaa

SEQ ID NO: 140666 - DNA, 525 bp, Zea Mays
tctaagctagggactgtgattgcaagtgatgaatactggaagaaaaatacaaaggggcatcctgattggaagaaactgaaatatggccctccagaaaatgaagatttcatgacacaaatgtttgaacatattgcagtggatggatctacatcatgcgctccaggtgaattttatgatgtggaaaatcatgagactgaggttgatggtattgatggagttgattttggcacatttgaggcagactgtgatgctcaatatgatgaatttgcgtctccttttgctagtggcagcaagtcaactcagtcgaagagaggcgtctcaactcagtcaaagaaaagagctagtcctactgttgttaatagcccactgaagcgctcaaagaatcccatggttaaggtcatgaataagattcataatactttggagatcaattgcaatatttcaaacaaagtaatgcttggtgagtataggtatgaatcaatcaagcaatgcatggaatgggctattgagtgtggagcaactgaa

SEQ ID NO: 140667 - DNA, 240 bp, Zea Mays
atgccccattgtagctattggctggctttctgcgaggaatcgaccgttgcagcagctaggttggagccggtcgtggtccatgactccttgatgatctacaaagtacggaagctaactgtaagcaaggttcagaagacactgccactggagaacggcgaccaggccgcagtcgaagccaggagaagcaagcgcaccaagaagcccaatgtcaagtacgttggaggcccatgggtgaactag

SEQ ID NO: 140668 - DNA, 748 bp, Zea Mays
ttccatgtggcctagctagctactgttcctcccgtccccccctccgtgatctgttgtgtgtcagtccatgtaccctcctcgatcgtagtgtctatatctcctgccttgcagctttctgcagggagctgcgccaacgatgggcgtcttccaggacaccggcgtcggtggcggcgccggcagccgcacgtccaggagggttttccagtaccagaggctggagtgctgctgggacgacggagccacttccaggtggcggtgtccgccagccgcgaatggtaagaaggctgaagccccctgtttgttcagtgtcaggcggctcaagtggagcaaggtcacctcggttctgataccgaggaaggtcgccgagttgtctgcaaagatctgccacgcccgcgccaggacggaggccgtcgtctgcccggccgtcgtcttcatgtcgccgtggggcctccctgtgctctcccgcccgctattggtcggccacaacacttgcaggtatcaccgtggaagagacaccttctggtgagcaggtagctgcacctcgatctgtattcctggcggtggtagtatcggtatatgcgtgtgtgatatatgtggccagcttagttgatcttgtaggatgtgtattattactcctccattttgatttctgcaatacttgtgttgtgttttgccggctgcatctgaacttagatgctgtttggttcatgatggttaatagttaacgttaaatcatgtttatttaagt

SEQ ID NO: 140669 - DNA, 1155 bp, Zea Mays
actagagctttagcgcctccacaccacaaacacacatcaggatccacagatcgaacagagtccaacaactcagacatggaggaagcggaggcggaggaggagaacaagagtaccaaggctgcgggaatgggatgcaagaagaatgtgacgaggctccagaggtcattcctccacctgtccagagcgctcgggaagctccacggccgccggggccacgggaacgcgaacggcgaggcgtcgctgtcctcgtcgtcctccgctgccacttcgtcgttcctctccgggtgcatgcatccccggacgcactccttcgccttgggccgccgccaccgccacaagcgcgacggcggcgggtcggggtcgggggacgctctcgccgtcaacttcaggtcgctccaggtcgacgacgagggcggctcgtcgtcagcgcagcactgttatcacggcgaccgcgggagcgaggcggacgagcccaaggcggtggtccgtggcgccggcgtcgcggtggccacgctctccgcggcgccgtacgaagacttccggcggtccatgcgggagatggtggaagccgccgcggggacggggagcggcggcgccgccgcggcggccgtggactgggacttcatggaggagcttctgttctgctacctccgcctcaacgaccgcgccgtgcacaaggacatcctccgcgcgttcaccgacacggtcgccgcgatccggcgccggcgcagggcggcgaagagcagccgcacgcgtcgtaggcggcgcaggcagccgaggcccggaggagacggccccggccgtggcgacgactgtgacggcgcggaggcggtgacctcgtcgtgactggtgccaaatgtgtacgtgtgcatacaccggcgaagcgccagcggccgcgcgcctcgctgtccggccggtcagtcggtgatagcacgagttaatgttttgttcatacgctttacggctttagctaaagtaacgtaacgtgcattgctgtgtcaatgtttcttcctccgccagccacctcagttcattttcgtcacccatttgtggctacttcgatcgatttgttggtaacttctctgcattttcatagctaaaagctaaagttgcccaaatcccgtgacagcaatctgtgcccaatacaaaaaaaaa

SEQ ID NO: 140670 - DNA, 503 bp, Zea Mays
accagcttttgtcagatatggcatgacatgtaatcaaacaatcaaataaccttgcacatttgaccgggaaaattacaagaataaagcaatccatcaattgctaaactaacatgttcagaaatgtagagctcttagaagtgtcttgtgcctgactgtttgaatactgaaaaactccagagctatcttcaacgaggacgccttattttttttcttgctttccactataatacaactgaattgatagcactatcaacaggaaattttgtggagtatagcagtttggaatgatcgttcaggttttgacctggcttcaacatggtattagcccctgcaaccacgccaggcctagaccatgtttcaataggcggaactggaccggaactggcccttggattgttgttttgatttcttgacgtttgaacaacatctcatgctactcttttactaaaatcaagtacttgaggaccaactgcatcactaagtgaccagctaggtgaatggtt

SEQ ID NO: 140671 - DNA, 651 bp, Zea Mays
atggagagggcagatgctttgaggacaaagattgctaaccaactatttgagaaggagagggcagatgctttgaggacaaagattgctaaccaactatttgagaaggccgtcgaaatctttatcaaggacgttaaggtatttgcatcgttcaatggggagttgtttaaggagatcacaaaacttttgaccttggagaactttagtctatatatatcttttaagttgacgacccttgtgatgctgaaactgatgaagacctccgatgaagaaagagacatgctgcacatgcacgagatagatgtcggctctatggacaaacactcgaccaagtcagatgaggagtatgaggacctagccatgcgtgacgtgatggctactggcgtctgcttctatgctttgagttgtgctatagagtggttgtgccaactactgattttaaaagaaaaagaaatgatattgaaagaagcatcccagagcagcgtagaacattacacattcataccaaacggaactcctttcaatttgaagatactgcaatcagacatcgatgtaacggggcaaattaagatctgctgctggcataacattacgacaatagttcatccgttcgacaacaaattttggcacaacttccacaggttcagcacttga

SEQ ID NO: 140672 - DNA, 324 bp, Zea Mays
tgaacctcccctcaaaatttgcccaaaattacccgcaatttgtattattgcttgtaattgatttgttgaacgcatgtttggtgtatgcaagatgaaatagaaaattcttctaaagatgtcaactagacaagaatcactttacttgccaaacggtttaaaaaatgattccgattctccaggaatcagaaggatcagctccttataaggattaggatctagagctaaagaatcaggaactggagctgtaccaaacgggcccttaggattcgctcaaatgccattatgggaacacgcttcgctaagagaccactatcaaacgttgtc

SEQ ID NO: 140673 - DNA, 327 bp, Zea Mays
atgtgccaggtggatgactgccaagcggatctgaccagcgcccaccggtggagctcgccgagcgtcggtggaccgccccggtggagggagagcgccaagcaccggtggaggagagcgacgtcgccgtcggttttggtggaggggacagaggatagagaagagagcgccgtcgggtttgagatgccggcgctttttgttcgaggggcaaaagtgtccagtcaaaaaataaacaccctagaacttcaaaggttgttgatggtagaaggcaacattcagttttgggaagatttcttgggagttttttctcggatactcatgggtccttga

SEQ ID NO: 140674 - DNA, 1121 bp, Zea Mays
gatataggatattaggagaaaaaaaccaaccacggggtcggggaggagaggaaaggagacgggaaacaaaaacacagcgcaggcagagagagacgtaaagccgccgcttcgtgcgcgtcgacgtcacctcgccgccggggggccagggctgtctcaccgcggtgtcccgtagggctcccttccctcgccggactgggcgggcgccggacggatcgggaggcgacgacctgaggggactggctgggatgaccgggaagaagcgcaaggcggaggcggcgcgcctggaggagacggaccaggcgctctacggggccttccggggcgccgcaaactcgctctcgcagctctacactctcgccatgggtgcgcagaaagcctcctttaacgccggcgaacgccacgccatggaaaaactttatgaatggatcctgaggcagcacgaaaatggtttgaggctaacagttgctgatgtagcttcccgtatccagcttgagattcagtatggaggtgacaatgcatcagcctctccaaggccacaataccctagccaaagcactgcacctacagtgcacatccccaacacaagcaaccagcaaccatcgccaagcttatttgctccaggaaaccctggtctgacacaatccaagaattccatggtcttttcaaacgcattatccagccccatccggcggagcctgcagccttaccacctagaacaggacggagacacagggtactttgtgaacggcgcaagccgcgacatgaaccccacggcttcgaacgattcatccatggacatgcactcggacagcccagttcatgactcctactgagcagctcccttcacggaaccggaagaacagcatttccagtcgaagaagtgccaggcctagtaggaatattcaatttaacaccttccgtagcctcttacactaagcgtgtgatgccttgtggcgttgttgctactacttaccacctgttgctttgccagaatactgaaatttgcatgtactatactgtaccatttgatttatctgtgcatattactagtgttggtacgtgacgagtgcaggaaacaaaccattggaaagaatttacaacgtgaacagtttgtgatggcc

SEQ ID NO: 140675 - DNA, 101 bp, Zea Mays
cccctgaccacatgattccggatcaactatcagatttttatgaagcccggtccgttacatccctcggatccaatctcaatggtctgtgttcagtccaagcg

SEQ ID NO: 140676 - DNA, 2901 bp, Zea Mays
atggattccccgaggggtcccgcgagcttcgcaacgcaggccaacgccctcctccgcaagaacctctgcgttcagaaacggaacctcaagacaaacatcggcatcactttcttcccaatcctgatttgcgtgcttctcatcgtgctccagaacgtcatcaacagcgagcttgacaagcccaagtacaaatgcggttgcgtctgcctcgagaccagtgccaacggaaggtgcgtaaggaaagagtgtggcattcagtactcgacgctggatcaggtggggagctgtccgattcccagcccgccacagtggccagccctgattcagatcccccgtgctgatttccgggctgcaaggacgttctcccaaccgtttaatgatttgcctgatccattttgccgtgactcctggtcttgccctgcaactgtccttgtcactgggaaggacagagcggttgcagaagctatatcaagagggctgtttcctgtcctttctccgtctttgaatgcaacagatttactggatctcttctccaagatagtcgctggctcagatacacagccatggtacacacagttgctagagcctgcatttttctctggtcgtacattgtatgtgatccagcctgagtgcacacctgtcatgtcacagaccattacatataatactgggggcataccctttcagctcagttatgacttcttgggcacaacacagtatggcctcggtgtaaatgtttggtacaactctacttacaatgataacaatgcatattcatttatctcaacattgcgggttccacgcttggtgaatgcagtatccaacgcttatctgaaattaatcaaagggactggggtagacatgctacttgagtttgtaaaagatatgcccaaagttgggacaagttttcagttggatctgtcttctcttctgagtgtcttattcttcacatggatcatcgaacttcttttcccagttatgttgacatatctggtgtatgagaagcagcagaagctaaggattatgatgaaaatgcacggtctgaaggatgggccttactggctgatatcttattcttatttccttgctctatcaatcgtctatatgttattctttatgatttttggctccttgattggtaattgtattacaacgttactcatgaatattctgttgtggcaaataaatcttcattgtcttgactagccttcttctgttcaggtctcaattttttcagagtaaatgaatatagcatacaagctgtttttttcttcgtctgtataaatttgcagattgcacttgcattttttgtggcatctttctttttgtctgtcaagatggccacaggttaataactcaaaccttttaccttcaagtcagaactttattttttgaaagtgacagagggaatttcattttgctccttctgcagtgattggctacatgtatgtatttggctctggcttacttggtgcatttcttttccgtttctttgttgaggacaaaacttttccctatggttggacattagtcatggagattgtcccaggattttccctctatcggggcctatatgaacttggtcagtatgcattctcgggaagcagtataggaactactggtatgacctggagaagtctgaaagatcccctcaatggaatgcgtgatgttatgatcgtaatgagtgtagaatgggcagtgctgctcatattagcattctatttagatcaaacctctttgctaggcggtggtgtcaggaaaaatccttttttctgcttcagatgtttacagaagaaatgtgcaacatcattgcatgaacctagctttgtccaacaggattccaaagtcattctcgatatggagaaatctgatgttgctctagaaagaaaagtagttgagcaatttttgatagatcccaatgcaaaccaagctatcatctgtgataacctcaggaaggtttatcatggaagggatggaaaccctgacaagctggctgttagaggtttatctcttgtccttcaaaagggccagtgctttggaatgcttggtccaaatggagccgggaaaacatctttcattaatatgatgattggactcattaaacctacatctggtactgcttatgtccacggaatggatataaatatggacatgggtgacatatatacaaatatgggagtgtgcccacaacagaacttgctttgggaaacactgactggaaaagaacatcttttcttttatggtaagttgaagaatcttaaaggttctgcattaatgaaggctgttgaccactctctgaagagtgtaaatctatctcatggtaatgttggtgataagcaagtgaagaaatacagcggaggcatgaaaagaaggctcagcgtggcaatctcattgattggggaccctaaagttgtcttcatggatgagccaagcacaggaatggacccagcatcaagaaataacctatggaatgttgtgaaggaggccaagaaaaaccgtgcaattattcttactactcactcaatggaagaggcagaggtattgtgtgaccggcttggcatctttgttgatggcgatttccaatgccttggaaaccctaaagagctaaaggctagatatggggggacatacatattcacagtgacaacacccccagaccaagagatggaggttgaacatctagtgcgtcagttctcgcccagcgcaaacaagatctaccatctatctggaactcagaaattcgagctgccgaagcaagaggtgaaaatagcccatgtttttgacatggtcgagaaggcgaagcgccggctctcaatacatgcctggggactggtcgacacgaccttagaggacgtcttcatcaaggtcgccagaggagcacaagtgttcaacgagtttgcgtag

SEQ ID NO: 140677 - DNA, 2968 bp, Zea Mays
atggattccccgaggggtcccgcgagcttcgcaacgcaggccaacgccctcctccgcaagaacctctgcgttcagaaacggaacctcaagacaaacatcggcatcactttcttcccaatcctgatttgcgtgcttctcatcgtgctccagaacgtcatcaacagcgagcttgacaagcccaagtacaaatgcggttgcgtctgcctcgagaccagtgccaacggaaggtgcgtaaggaaagagtgtggcattcagtactcgacgctggatcaggtggggagctgtccgattcccagcccgccacagtggccagccctgattcagatcccccgtgctgatttccgggctgcaaggacgttctcccaaccgtttaatgatttgcctgatccattttgccgtgactcctggtcttgccctgcaactgtccttgtcactgggaaggacagagcggttgcagaagctatatcaagagggctgtttcctgtcctttctccgtctttgaatgcaacagatttactggatctcttctccaagatagtcgctggctcagatacacagccatggtacacacagttgctagagcctgcatttttctctggtcgtacattgtatgtgatccagcctgagtgcacacctgtcatgtcacagaccattacatataatactgggggcataccctttcagctcagttatgacttcttgggcacaacacagtatggcctcggtgtaaatgtttggtacaactctacttacaatgataacaatgcatattcatttatctcaacattgcgggttccacgcttggtgaatgcagtatccaacgcttatctgaaattaatcaaagggactggggtagacatgctacttgagtttgtaaaagatatgcccaaagttgggacaagttttcagttggatctgtcttctcttctgagtgtcttattcttcacatggatcatcgaacttcttttcccagttatgttgacatatctggtgtatgagaagcagcagaagctaaggattatgatgaaaatgcacggtctgaaggatgggccttactggctgatatcttattcttatttccttgctctatcaatcgtctatatgttattctttatgatttttggctccttgattggtctcaattttttcagagtaaatgaatatagcatacaagctgtttttttcttcgtctgtataaatttgcagattgcacttgcattttttgtggcatctttctttttgtctgtcaagatggccacagtgattggctacatgtatgtatttggctctggcttacttggtgcatttcttttccgtttctttgttgaggacaaaacttttccctatggttggacattagtcatggagattgtcccaggattttccctctatcggggcctatatgaacttggtcagtatgcattctcgggaagcagtataggaactactggtatgacctggagaagtctgaaagatcccctcaatggaatgcgtgatgttatgatcgtaatgagtgtagaatgggcagtgctgctcatattagcattctatttagatcaaacctctttgctaggcggtggtgtcaggaaaaatccttttttctgcttcagatgtttacagaagaaatgtgcaacatcattgcatgaacctagctttgtccaacaggattccaaagtcattctcgatatggagaaatctgatgttgctctagaaagaaaagtagttgagcaatttttgatagatcccaatgcaaaccaagctatcatctgtgataacctcaggaaggtttatcatggaagggatggaaaccctgacaagctggctgttagaggtttatctcttgtccttcaaaagggccagtgctttggaatgcttggtccaaatggagccgggaaaacatctttcattaatatgatgattggactcattaaacctacatctggtactgcttatgtccacggaatggatataaatatggacatgggtgacatatatacaaatatgggagtgtgcccacaacagaacttgctttgggaaacactgactggaaaagaacatcttttcttttatggtaagttgaagaatcttaaaggttctgcattaatgaaggctgttgaccactctctgaagagtgtaaatctatctcatggtaatgttggtgataagcaagtgaagaaatacagcggaggcatgaaaagaaggctcagcgtggcaatctcattgattggggaccctaaagttgtcttcatggatgagccaagcacaggaatggacccagcatcaagaaataacctatggaatgttgtgaaggaggccaagaaaaaccgtgcaattattcttactactcactcaatggaagaggcagaggtattgtgtgaccggcttggcatctttgttgatggcgatttccaatgccttggaaaccctaaagagctaaaggctagatatggggggacatacatattcacagtgacaacacccccagaccaagagatggaggttgaacatctagtgcgtcagttctcgcccagcgcaaacaagatctaccatctatctggaactcagaaattcgagctgccgaagcaagaggtgaaaatagcccatgtttttgacatggtcgagaaggcgaagcgccggctctcaatacatgcctggggactggtcgacacgaccttagaggacgtcttcatcaaggtcgccagaggagcacaagtgttcaacgagtttgcgtagataacacctttaggactgccttcgtagcaagcacgggaccccaattattggatgggcggactgcatagagaatcttgtggttttgtaggtatttttcattagtgagtcattcttgtgtggaaaataggctccatatgcttggtttacgtggttgtacataaataaatacatttttgagactgcagttgcagaatagaataattgtccagttgtgtccatatatattttttctttt

SEQ ID NO: 140678 - DNA, 124 bp, Zea Mays
taaacgatactcttggcctaccaattcggcggtcggtgagtggaagagctcggcccatggtgaggacggttgggggcgagttccttgcttcaacggtcaatccactacacgactggaggggatc

SEQ ID NO: 140679 - DNA, 903 bp, Zea Mays
ctttctccatccacttgtgtactttcgacgtcgtcttcctcagtagcgcccccttctttctccacccgccgtcgacgcagctgccttccagccatctccatatccgtttcgccgtccccttcctcctcatcagtggctcgtcaagcgcgtcgtcgggatgcatgggggctccgtcacctaccttgtcgaccccggcaacaacgactcctcctccagaaccgtcgtggtcatgcatttttcctgtagtcaaggatggtgaaggtccaatcatataaactacgcctatgctcgagacaatgaaacactatttgatattattagtgtgaagatgaacctctcaattgacaagcgatgcaggataaataatttgtccacaagcatgattgcattatcctagcggcggcggggccgtacaaagagatgctggaagtggtgaacgcgtgcgcgacccggatccggtggcgcctcagtccagcttccaagcgccgcctcctcaacggttgcgtcctgtggtactggtcgactatggtggcacaatgcctcagctacaagaaaatctttgtggcctgctatatcttgcccgacagttcaagctctacaaggttaggtctgttcagtttggctagaaaggcatcccctacctgaacacctacgacgaccgcaccatccgctaccccgaccctctcatcaaggccaacgacaccatcaagatcgatctggagaccaacaagatcatggacttcatcaagttgtatttgccctttcatggacttcatcaagttatatacttagttaggctcaatgttagcacaaacagttgatgagcaagtttaaatttagagtacacttatgtatgagttatttgacaatgcttatttatgagatattgaatattatttatct

SEQ ID NO: 140680 - DNA, 1939 bp, Zea Mays
ctttctccatccacttgtgtactttcgacgtcgtcttcctcagtagcgcccccttctttctccacccgccgtcgacgcagctgccttccagccatctccatatccgtttcgccgtccccttcctcctcatcagtggctcgtcaagcgcgtcgtcgggatgcatgggggctccgtcacctaccttgtcgaccccggcaacaacgactcctcctccagaaccgtcgtgataaactacgcctatgctcgagacaatgaaacactatttgatattattagtgtgaaggtatggagcttatcaggatatccaggaaattttctgcaatttatgtattttggtatcaattatcaatttgccaatcaatcattttcttttgctttcttcgataaacatttattggcaagacagatgaacctctcaattgacaagcgatgcaggataaataatttgtccacaagcatgattgcattatcctaggtgcttatgaaagtttttaccttttcttcaatatgaagtctgaatgtgtggtgtggcttgtctgatctatctagcaggtttagtggtactcgcatcagctaaaccttaaacttgttttcttcttaatgcctccgtgatcggtttaagttctttcgttgcggagatggcagcggcggcggggccgtacaaagagatgctggaagtggtgaacgcgtgcgcgacccggatccggtggcgcctcagtccagcttccaagcgccgcctcctcaacggtcagtgcccactcgcttgctgctttctcttagtagttgtagtcgttttttaacgggaaatacaacagggaagccaccagcccaccactatgtaggattttattaattgaaaaatagtgttgtagttgttattatctctatttaggacttgttgttggcaattgtcctatttcttgcttaattcgctaccgccatgctgtctttctgttctactgctaaaacacttattttttgtggtcgttgaatgaattgttaaccaaactcaattgcagaagacattcatccactaatcgtcacatgatccaccttagttcataagtttataccaccgtagttataggtcacttggtcagtagctgcaacttgcaagtgatttagggtttaataaaaaatttctggtagtaaagttgaaaggtatggtttgaggagagtgaatggtatcatgtcgaattacagtacattacaatttacaagtaaattgattagtcctctggtcttttgattggtagcatgtttttcctatgtaattgcctctgttcttctttaggggctaggttcgttgtaatcatttgaccgtggggatgtttgtactaaattcttatttctcttaaggaaaatcatgctaatgcacgaccacgaagaaaaagtaaattcatgaacaaatctacctaacttatgatttctgttggattttaactctagtctacctctttgaaattaaaaggttgtgctgtggttgttgatgaacaaacccagttgttgccaaatatcctgtttctctgcactaggttgcgtcctgtggtactggtcgactatggtggcacaatgcctcagctacaagaaaatctttgtggcctgctatatcttgcccgacagttcaagctctacaaggttaggtctgttcagtttggctagaaaggcatcccctacctgaacacctacgacgaccgcaccatccgctaccccgaccctctcatcaaggccaacgacaccatcaagatcgatctggagaccaacaagatcatggacttcatcaagttgtatttgccctttcatggacttcatcaagttatatacttagttaggctcaatgttagcacaaacagttgatgagcaagtttaaatttagagtacacttatgtatgagttatttgacaatgcttatttatgagatattgaatattatttatct

SEQ ID NO: 140681 - DNA, 1034 bp, Zea Mays
attgagatgcataggaattaggagacgtgcgttttttagtaattggtacctacttgcgcctgagactctagtctaggcaccaaagtcagggaggtgtttctctgagctctgcttcaaaactgtattatctgatgtttgtctgagccacaagtcatgaattttgcctgtagtcaaggatggtgaaggtccaatcatgtgcatatcattggtttcctcttgttatgatgaccaaacttgtatctaatatattgatttgaatatgatgacctctatattgtaagtttctgaatttttgcaacacaggtcatgcatttttcctgtagtcaaggatggtgaaggtccaatcatgtgcatatcattggtttcctcttgttatgatgaagagatctggattcaatacttgatttttcatttgtttttaaatatttgttaactgttatggtgtatgtcaatggaatttgggcattggttgctttgactgtttcttggaatgcagataaactacgcctatgctcgagacaatgaaacactatttgatattattagtgtgaaggtatggagcttatcaggatatccaggaaattttctgcaatttatgtattttggtatcaattatcaatttgccaatcaatcattttcttttgctttcttcgataaacatttattggcaagacagatgaacctctcaattgacaagcgatgcaggataaataatttgtccacaagcatgattgcattatcctaggtgcttatgaaagtttttaccttttcttcaatatgaagtctgaatgtgtggtgtggcttgtctgatctatctagcaggtttagtggtactcgcatcagctaaaccttaaacttgttttcttcttaatgcctccgtgatcggtttaagttctttcgttgcggagatggcagcggcggcggggccgtacaaagagatgctggaagtggtgaacgcgtgcgcgacccggatccggtggcgcctcagtccagcttccaagcgccgcctcctcaacggttgtgctgtggttgtt

SEQ ID NO: 140682 - DNA, 3393 bp, Zea Mays
gcagtgcagtgctctcgctgcggccctctcctctccctcaccctgtctctctcactcttcccatccaatctttatttccacaatccattattccttcccccttcgcttcgcttattcccccactcacttcccttccacaccgccgcctccggagaagggtccacggcggcgtccttcctcgggaggcgctcggctcggattcgctcctgctcggcggcggcgtcgccggctggtgggctcgcgcgcgcacctggtgctgggctccgcgggcgctcctcgtgcgtgacacgcgcccgatgcgtcaggatcgcgcggccggcgcccggggcctgccgtgattctgcggggaggctggatctcggtgcttccgcgtgcgggaaccagtgagttttctttttgtcttctcttccccggcggctagcggcgggccgcttggtgcacgtcagcgcgggaggccggaggttagccgatctggtgctctcgccgcccggagaggtggtgctgggcccactgccgggttctgcttagtaggaggcggaggaggtaagtccctcgtctcatggggctcgcgccgccggagctgggccagttcgacgggtgggagagctccggggaggaggagcgggagcgggagcgttggggctggtgccgccgcagccgccgcggcagcagcaggcgccgcgcggcccccaagggcaccgacgacgacaccgcggtcgacaccggctgctgcatccgcctctggcccgtcgggacatgccctccgccgccgcagaggtccaaggtcgacacctccaccagcagcgccagcacgcacgggggtagacgtctctttctctcctgtcacctggatactcactcgcattgtgctttctttgctgtcttgctcgcgtggtagatgggatttgctcctctaagtgaccataattgcgacgccgtactgttagccttgatctcgttctgggtaatgatgttacgcacgtcgcactttatctcctgatgttgagcttgcagctgattgatcgtaaatgctgaggacgtgttctgtttttggtagttagtatgctgctgtttgtgggagatatgtgaggctgcatctgggaggcttggaacaacaactcttttggttatatccttgtattgagcattgaatttgtggatggactggtattgattgccttctgcatatacaaaacataaggatcaccaatctgttgccaaatcctgtacaacaagcatctttcttgctgagcagcagcacacatgatagtttgggttctggaggagcatgtgtgagtggaccagcgtcattagttgtttcctgagtatctatttttagaatagcataagcatgtgctgattttgcctcaatactgttcacactagatgtacagcaaacttggggttactgtacgaaagaatgctattgccttctccattgcaaatagttgttagtgcgttagattcatacacgtgactttgattttgatgctgtaatctcagcatcaggtgtggtgtttgaagttgtggttttgtcggatgaataaagtaaaattcagaaggactgcgggtattagcttgtttatcaagacatgcggctgcagtttggttgctatttactgtttgttatgctcagtatggtggtgtgtctcatatagacatagaagcccagtttgccaattcatgtactgtattatgctatgccagggaacctactaacttaggtgttcagtcccagccatgtgttacataagtgttatgctaatgagtaaaaattgacatattggttaattaatatttccaaaagtaaaataagaaaaaatgctgtaaaagatcacttcaaagacaaattcatctttagaaggtttttcaccatctgcgcgatagatcgtctaacaactgtatgcaccaagaaggatttgtatttctatggagtatagttagcaattaaatcattctagaatgaatcgaaacacccccttcataatcggaactaaatgactaataaacttaaaagtacggaggatatgtgatgaatgatggcagttagcattttgatacttttaataggagcataaagtgctcgtttttgtatttgcaaaagggatttaaatgaaaataatgaatcgatgcacctcttcagagaagtcaacagaaaatggtagtaggaatcaaccggtggcattggtagtctcaggttctacaactactagtaatgctgaaagcagttcatctgcatctaaagtcggagaagagataaaagttgcctcccagctgcgcaagtttgcattcaatgatctaaaatgtgctacccggaacttcaggcctgaaagtctccttggagaagggggttttggatgtgtttttaaagggtggattgaagaaaatggaactgcacctgtgaaacctggtacaggtctcacagttgctgtcaagacgctgaaccatgacgggcttcaagggcataaagaatgggtggctgaagttgattttcttggaaatcttcaccatcccaatttggtcagattgattggatattgtgttgaagatgaccaaaggttgctggtctatgaattcatgcctcgtggcagtttggataaccatctttttagaaggtctcttcctctcccatgggcaatcagaatgaaggttgcactcggagcagcaaagggtctggctttccttcatgaagaagcagaaagaccagtcatttatcgcgattttaaaacatctaatatactgctggatgcggagtataacgcaaagctctctgattttgggcttgcgaaagacggacctgtaggtgataaaactcatgtttctactcgagtaatgggaacctatggatatgcagcaccagaatatgtcatgactggtcatctgacatcaaagagtgatgtctacagcttcggggtggtgcttcttgagatgatgtcagggcgcaggtcgatggacaagaaccgcccgaacggggagcacaacctggtggaatgggcgcgccccctcctaggcgagaggcagcggttctacaagctaatcgaccctcgcctggagggcaacttctcggtgaagggcgcgcagaaggcggcgcagctagcgcgcgtgtgcctgagccgggaccccaaggcgcggcccctgatgagccaggtggtggaggtcctgaagccgctgcagaacctcaaggacatggcgagcgcctcctacttcttccagacgatgcaggccgagcggatggcgcactcgagcagcatgaacgggaggagcagcatgaacggcggcttcaagacgcagagcccgtttgggcggcatgggcagccgcctcccgtgaggagcctctctgacgggccccgcgcgtctccgttccgctactcgccgaagcctaacgtgaagtga

SEQ ID NO: 140683 - DNA, 2071 bp, Zea Mays
gcagtgcagtgctctcgctgcggccctctcctctccctcaccctgtctctctcactcttcccatccaatctttatttccacaatccattattccttcccccttcgcttcgcttattcccccactcacttcccttccacaccgccgcctccggagaagggtccacggcggcgtccttcctcgggaggcgctcggctcggattcgctcctgctcggcggcggcgtcgccggctggtgggctcgcgcgcgcacctggtgctgggctccgcgggcgctcctcgtgcgtgacacgcgcccgatgcgtcaggatcgcgcggccggcgcccggggcctgccgtgattctgcggggaggctggatctcggtgcttccgcgtgcgggaaccagtgagttttctttttgtcttctcttccccggcggctagcggcgggccgcttggtgcacgtcagcgcgggaggccggaggttagccgatctggtgctctcgccgcccggagaggtggtgctgggcccactgccgggttctgcttagtaggaggcggaggaggtaagtccctcgtctcatggggctcgcgccgccggagctgggccagttcgacgggtgggagagctccggggaggaggagcgggagcgggagcgttggggctggtgccgccgcagccgccgcggcagcagcaggcgccgcgcggcccccaagggcaccgacgacgacaccgcggtcgacaccggctgctgcatccgcctctggcccgtcgggacatgccctccgccgccgcagaggtccaaggtcgacacctccaccagcagcgccagcacgcacggggagaagtcaacagaaaatggtagtaggaatcaaccggtggcattggtagtctcaggttctacaactactagtaatgctgaaagcagttcatctgcatctaaagtcggagaagagataaaagttgcctcccagctgcgcaagtttgcattcaatgatctaaaatgtgctacccggaacttcaggcctgaaagtctccttggagaagggggttttggatgtgtttttaaagggtggattgaagaaaatggaactgcacctgtgaaacctggtacaggtctcacagttgctgtcaagacgctgaaccatgacgggcttcaagggcataaagaatgggtggctgaagttgattttcttggaaatcttcaccatcccaatttggtcagattgattggatattgtgttgaagatgaccaaaggttgctggtctatgaattcatgcctcgtggcagtttggataaccatctttttagaaggtctcttcctctcccatgggcaatcagaatgaaggttgcactcggagcagcaaagggtctggctttccttcatgaagaagcagaaagaccagtcatttatcgcgattttaaaacatctaatatactgctggatgcggagtataacgcaaagctctctgattttgggcttgcgaaagacggacctgtaggtgataaaactcatgtttctactcgagtaatgggaacctatggatatgcagcaccagaatatgtcatgactggtcatctgacatcaaagagtgatgtctacagcttcggggtggtgcttcttgagatgatgtcagggcgcaggtcgatggacaagaaccgcccgaacggggagcacaacctggtggaatgggcgcgccccctcctaggcgagaggcagcggttctacaagctaatcgaccctcgcctggagggcaacttctcggtgaagggcgcgcagaaggcggcgcagctagcgcgcgtgtgcctgagccgggaccccaaggcgcggcccctgatgagccaggtggtggaggtcctgaagccgctgcagaacctcaaggacatggcgagcgcctcctacttcttccagacgatgcaggccgagcggatggcgcactcgagcagcatgaacgggaggagcagcatgaacggcggcttcaagacgcagagcccgtttgggcggcatgggcagccgcctcccgtgaggagcctctctgacgggccccgcgcgtctccgttccgctactcgccgaagcctaacgtgaagtga

SEQ ID NO: 140684 - DNA, 2352 bp, Zea Mays
gcagtgcagtgctctcgctgcggccctctcctctccctcaccctgtctctctcactcttcccatccaatctttatttccacaatccattattccttcccccttcgcttcgcttattcccccactcacttcccttccacaccgccgcctccggagaagggtccacggcggcgtccttcctcgggaggcgctcggctcggattcgctcctgctcggcggcggcgtcgccggctggtgggctcgcgcgcgcacctggtgctgggctccgcgggcgctcctcgtgcgtgacacgcgcccgatgcgtcaggatcgcgcggccggcgcccggggcctgccgtgattctgcggggaggctggatctcggtgcttccgcgtgcgggaaccagtgagttttctttttgtcttctcttccccggcggctagcggcgggccgcttggtgcacgtcagcgcgggaggccggaggttagccgatctggtgctctcgccgcccggagaggtggtgctgggcccactgccgggttctgcttagtaggaggcggaggaggtaagtccctcgtctcatggggctcgcgccgccggagctgggccagttcgacgggtgggagagctccggggaggaggagcgggagcgggagcgttggggctggtgccgccgcagccgccgcggcagcagcaggcgccgcgcggcccccaagggcaccgacgacgacaccgcggtcgacaccggctgctgcatccgcctctggcccgtcgggacatgccctccgccgccgcagaggtccaaggtcgacacctccaccagcagcgccagcacgcacggggcagagaagtcaacagaaaatggtagtaggaatcaaccggtggcattggtagtctcaggttctacaactactagtaatgctgaaagcagttcatctgcatctaaagtcggagaagagataaaagttgcctcccagctgcgcaagtttgcattcaatgatctaaaatgtgctacccggaacttcaggcctgaaagtctccttggagaagggggttttggatgtgtttttaaagggtggattgaagaaaatggaactgcacctgtgaaacctggtacaggtctcacagttgctgtcaagacgctgaaccatgacgggcttcaagggcataaagaatgggtggctgaagttgattttcttggaaatcttcaccatcccaatttggtcagattgattggatattgtgttgaagatgaccaaaggttgctggtctatgaattcatgcctcgtggcagtttggataaccatctttttagaaggtctcttcctctcccatgggcaatcagaatgaaggttgcactcggagcagcaaagggtctggctttccttcatgaagaagcagaaagaccagtcatttatcgcgattttaaaacatctaatatactgctggatgcggagtataacgcaaagctctctgattttgggcttgcgaaagacggacctgtaggtgataaaactcatgtttctactcgagtaatgggaacctatggatatgcagcaccagaatatgtcatgactggtcatctgacatcaaagagtgatgtctacagcttcggggtggtgcttcttgagatgatgtcagggcgcaggtcgatggacaagaaccgcccgaacggggagcacaacctggtggaatgggcgcgccccctcctaggcgagaggcagcggttctacaagctaatcgaccctcgcctggagggcaacttctcggtgaagggcgcgcagaaggcggcgcagctagcgcgcgtgtgcctgagccgggaccccaaggcgcggcccctgatgagccaggtggtggaggtcctgaagccgctgcagaacctcaaggacatggcgagcgcctcctacttcttccagacgatgcaggccgagcggatggcgcactcgagcagcatgaacgggaggagcagcatgaacggcggcttcaagacgcagagcccgtttgggcggcatgggcagccgcctcccgtgaggagcctctctgacgggccccgcgcgtctccgttccgctactcgccgaagcctaacgtgaagtgagcggagtggtggaggcgcggttttctgccggctggaaggcacggcccctggatgaaacctggtttgttgggggtgactggttcgggccgtgcatttgcattgcattgcattgatgtgtgtgctgtagattgacatgtgcacaaagtaaaaggatataggcgaaaaagggtggtgtaggtatcggagtttgcttggcggatgtttgctctgaggttttaactgaatgaatgcggatgcaccgttgctatatattttttttgccccaaacaagtatggta

SEQ ID NO: 140685 - DNA, 432 bp, Zea Mays
atgcccaaacttgggtgtacaataagcttcattcaagaaatactagcagtaattcttgttatggaaaagcactctgtactgatgaatgatattggccaagcttttgctacaaattgcaattacacaacgacgagctcgacacaagcagctcatgagcgcaccaacaacctgcctgatcaaaattacaggcgcatggatgcagagagcagcaaggtgccaagccaaggtcaagggcacaggctacgcaggcttctgatcgcgcaagtagcgcacagcggctgcggctcgcgcgtcaccgacaacccgaactggttccaagcgtccaggtactccatcctccagtcctctctcagctccgcggagtcacggtaccattgcctggtgatccacagaacgatgagcaggtttgagaacacaagtgtgagctactga

SEQ ID NO: 140686 - DNA, 1421 bp, Zea Mays
gtattaggacagaagtcgattctttaagaccagcatctggagctgctccaaacgcagccctaattttccggcgctacttccaaatagtcgccctctcaacttttgttgggtccgtctgtggattgtccccggcctccttaccgtcgcgtccaaatcatcctcacaccccgcagcatctccacgccgccacacctcgtcgcgtcgcgtcgtctccgccgagaagatggtcggaccaggcctctacaccgagatcggcaagaagaccagggatctgctgtacaaggactaccagacagaccacaagttcaccctcactacctacagctccaatggcgttgctgtcactgctactagcacaaagaaagctgacctgatcttcagtgagatccattcacagataaagaacaagaacatgaccgtagatgtgaaagcaaactcagagtcaaatatcattactacagttactgtcaatgagattgcaacaccaggactgaagactatcttaagctttgctgttcctgatcagagatctggaaaggttgagcttcagtatttgcatgattatgctggagttaatgcaagcgttagtctgacagccaatcctgtagccaacctctctgctgcctttggcactaaggctctcgcagttggtgcagaaatctcatttgattctgccactgggaacttcaccaaatacaatgctggattgatgttcactcatgaagaccttatcgcatcccttaatatgaacaacaagggagacaaccttactggagcttactaccacaaggtgagcgaattgacaaacacagctgttggggcagagcttacccacagtttctcgaccaatgaaaacaccctcacctttggcgggcagcacactctggacccactaaccgtcttgaaggcacgcatcaacaactcgggcaaagccagcgtcctgatccagcatgagtggaggccaaagtcgctggtcaccatctcggctgaggtcgatacaaagaccattgagaagagctcgaaggttggaattgctgtggccctcaagccctgattgattatcaagactattttttcttctaaggtcctagcatgactgtttgggtcatatcaggtcagctggggaaaacaaaactgttggggttaccggcatcttttggtcgttgcagtctgttgatttcatgaactgcgaaatgtttcattgaggaaatttttgggtcatctgcttagcgctctgttaaatgagcaacttccaaaataattcgagcccagtagaattctgaacttgtttacaatggttgatggtgacattgtcaattgaggtaggggtggttcagttttctaactgcgttttttggaccggtttgtttcatcttttttctgacaagcttttctaataatctaagaatttatctgtggag

SEQ ID NO: 140687 - DNA, 2016 bp, Zea Mays
gactcacgaaggaggcgcgacgtgcgcgtgccgctgtgctgcactgctagtgttcctgcgcgccgtgctgtccggcccgcccgcgccgcgcaccgatgccgccaccgtcttcctcgcgctactccccgggccggctgctcgccgcgcgcccggcgtccgccaccacggtggggagatgggcgcgcttgtcgtgctcgctgtccatgaacgggtgcgcgccgggcgccggggaccgcggcgcggtgtgcgtgcgcgagacgcgggcgctgccggccgcgccggcgccgcacgacgcagtggggcggctcagggccgccgtggacgcgctctggtccaacgcagcgccaccggccgcgccctccggcatcatccgcatcgaggtgcccatcacgcagcgggtggacgccgtggagtggctgcacgcgcagaccacgctgccccgctgcttcttctcggcccgggcgccgttgcccgacgcgcccgccctcgccggcaacggcaacggcaacggcagtgtccatcggcagcagccggtgagtgtcgcgggcgtgggttcggcggtcttcttccgagggacggagcccttttctctagctgattggcgcgcaatcaagagatttcttccaagggactgtccactggtccgcgcatatggcgccatccgtttcgacgccacgagtgacgcttccgttgaatgggaggactacggctcattctacttcgttgttcctcaagtcgagttcaatgagctcgaggagagctcagtcctcgcgacgaccatcgcgtgggacgactcgctctcatggacatggcacaacgccgtggaggagctccaatcgactctgcgaaagatatcgccttgctcttctgttcaagcgaacaaggccagcctacagacagccatcgtaagtctcaatcatgtcccgaccaaggcgtcttgggatcttgcagttactaaagctctccatatgatcaagggcaggcaaagagaattggtaaaggttgtactggcaaggtgtagcagatacattactgacacttgcattgaccctgtggaactgctggcttgcttgaaggctgagggccaaaatgcttatcaattctgcatacagccaccgggtgctcctgcgtttgtcggaaatagcccagagcaactatttcatcggaagtacttgaacatttccagcgaggctctagctggtactcgggcaagagggaagacaagggcagatgactttcaaatcggtcaggatttgcttctaagtagcaaagaggacatcgaattcactatagtacgggacagcatcaagaacaagctggagatgatctgtgatgaggtggttgtccatcccagcaaggctctgcggaaacttccaagagtccagcatctgtcagcgcagttagctgcgcgaataaggaacgaagatgatgagtttgagattctaaacaccctccatccgagtccagctgtttgtggcttgcccactgaagaggcacgccaattcatacgggattgtgaaatttttgaccgtggaatgtatgctggtcctgttggctggcttggaggagctgagtgcgagttcgctgtcgggattagatcagcgttacttggaaaaggtcacagcactctggtgtacgccggtgcggggatcgttgaaggtacaaacccatcttttgaatgggatgagcttgatctcaaagcatctcagtttgcaaagctgttgcggtaccaagaacgacctattcgctaccaagaggctgaaaatctgggaacggtgatctgaatagagaagtacagaagaaactagaaagtcatcacaaagttcggcattcatttagcgagttatttatacaattgtttgtttgatatagtaagctagaagggggattcagttggatttgtgtaattatggaatccagaacagcggcagtgctgaaaaatacattgattgaacctgaatgggaaattgttcaatgtaacaaaaatatgtttacaacataaactatttgattgaa

SEQ ID NO: 140688 - DNA, 2098 bp, Zea Mays
gactcacgaaggaggcgcgacgtgcgcgtgccgctgtgctgcactgctagtgttcctgcgcgccgtgctgtccggcccgcccgcgccgcgcaccgatgccgccaccgtcttcctcgcgctactccccgggccggctgctcgccgcgcgcccggcgtccgccaccacggtggggagatgggcgcgcttgtcgtgctcgctgtccatgaacgggtgcgcgccgggcgccggggaccgcggcgcggtgtgcgtgcgcgagacgcgggcgctgccggccgcgccggcgccgcacgacgcagtggggcggctcagggccgccgtggacgcgctctggtccaacgcagcgccaccggccgcgccctccggcatcatccgcatcgaggtgcccatcacgcagcgggtggacgccgtggagtggctgcacgcgcagaccacgctgccccgctgcttcttctcggcccgggcgccgttgcccgacgcgcccgccctcgccggcaacggcaacggcaacggcagtgtccatcggcagcagccggtgagtgtcgcgggcgtgggttcggcggtcttcttccgagggacggagcccttttctctagctgattggcgcgcaatcaagagatttcttccaagggactgtccactggtccgcgcatatggcgccatccgtttcgacgccacgagtgacgcttccgttgaatgggaggactacggctcattctacttcgttgttcctcaagtcgagttcaatgagctcgaggagagctcagtcctcgcgacgaccatcgcgtgggacgactcgctctcatggacatggcacaacgccgtggaggagctccaatcgactctgcgaaagatatcgccttgctcttctgttcaagcgaacaaggccagcctacagacagccatcgtaagtctcaatcatgtcccgaccaaggcgtcttgggatcttgcagttactaaagctctccatatgatcaagggcaggcaaagagaattggtaaaggttgtactggcaaggtgtagcagatacattactgacacttgcattgaccctgtggaactgctggcttgcttgaaggctgagggccaaaatgcttatcaattctgcatacagccaccgggtgctcctgcgtttgtcggaaatagcccagagcaactatttcatcggaagtacttgaacatttccagcgaggctctagctggtactcgggcaagagggaagacaagggcagatgactttcaaatcggtcaggatttgcttctaagtagcaaagaggacatcgaattcactatagtacgggacagcatcaagaacaagctggagatgatctgtgatgaggtggttgtccatcccagcaaggctctgcggaaacttccaagagtccagcatctgtcagcgcagttagctgcgcgaataaggaacgaagatgatgaggtgacctatgacaaaacttctactacttgagttgggtgaacatcatataaggtaacgatagcaacttgtgctggcgatgcagtttgagattctaaacaccctccatccgagtccagctgtttgtggcttgcccactgaagaggcacgccaattcatacgggattgtgaaatttttgaccgtggaatgtatgctggtcctgttggctggcttggaggagctgagtgcgagttcgctgtcgggattagatcagcgttacttggaaaaggtcacagcactctggtgtacgccggtgcggggatcgttgaaggtacaaacccatcttttgaatgggatgagcttgatctcaaagcatctcagtttgcaaagctgttgcggtaccaagaacgacctattcgctaccaagaggctgaaaatctgggaacggtgatctgaatagagaagtacagaagaaactagaaagtcatcacaaagttcggcattcatttagcgagttatttatacaattgtttgtttgatatagtaagctagaagggggattcagttggatttgtgtaattatggaatccagaacagcggcagtgctgaaaaatacattgattgaacctgaatgggaaattgttcaatgtaacaaaaatatgtttacaacataaactatttgattgaa

SEQ ID NO: 140689 - DNA, 1021 bp, Zea Mays
caacgcaccaccactaaataacgcactctctcccgagtccgatcccaactcaacccaaggcagtctcactgacagagtgtgtcgaccgacgacctgatctcggtcgatcgagacagagagagaacaacgacgagaatcatgcagagactgcccacggcaacggccgccggcgccggcatgacgtcgttgctggtggtgctgctgctcgtctcagtcttgccgggcgccagtggtgccgactctgggccgctcgacggcaggaagatggtgttcgccggggagaccgcaggagtacttgcccgctattccttcaacaaggacgcgaatgtcgaaacggcatcaccgccgccgccggcgttggccggttcggcggcgcagttccgtgggcaggcgcagctcccgcgcttcgccgcgccgcgccgctacgacctgcgcctgcgccccgacctcgtcacctgcacattctcgggcactgctgccgtcaccgtcgctgtctccgcgccaacccgcttcctcgtcctcaactctgctgacctctcaatcgacagcgcctccatccgtttccgggatttggcgcctaaggaggtggtgtttttcgcggacgacgagatcctggtgctcggattctccaaggacctggtgctcggtgagggcgtgctcagtatgaagttcaacggcacgctcaacgaccagatgagggggttctaccggagcaagtaccagtataagggaaagatgaagaatatggcagtgacacaatttgagtctgtggatgctcggcggtgcttcccatgctgggatgagcctgcattcaaggtgattatagtactaaatgaaatatctaataatatgggtgtgctccttcaagtgtttcatctattaggcttttgtgctctgagcaacatctttgttgcacttaaaagaatacatatgtagtagcaagttctactccaacctgtagctttatgatctttccagtctcatgtacacaagcctaataaaatatcaactatttcttaca

SEQ ID NO: 140690 - DNA, 1306 bp, Zea Mays
actcctctgctccttatcctttcacgccaatttctccgtacagatttttccagccgcttgcgttatcttctacgcgcggccgtcccagctcctcgtcctggccacggtactcctctccctcgacgtggagctctcacggcgctccattttcccagcgcgcgctcttctccctctccctggttccacgcgggcgcgcgccctgctccctaacgaggccccatggcgcggtcgcctctccctggtgcctcgcccagcctctgctcctcttctccccggcgcctggtcggatgtggatcctctgctcgaagctcccagcgccggattccctgcaagcttcagcttccctgcgcgccgacttcactgctcgcgccgtcgcccagcctgttggcgcgcgcatgctccctgccgcgttcctgctcggcgcccggatcccctgcttctctccctgcaggcgcgctcaatttccagtgctcgctggacgctccagccatggagtccctacgcgccctcccctctgttcgcttgtcgccatgactcgccgcggtgcccgtccctctgcgcgcagccgcgtgctccctgctcgccactaccctgctgtacgccattgtctacagtggagaagctaagcccctccgccaacgcccttgcctgccactccgtggcctcgcctgatacacagtggtcgccttcccttgacagcggcgttgctggccaccgtgttgctcatctcggccatgttcctcttcgtgctcagcacctaggcgtcgcgtccgaccccggtaccctaaatcctcagcagtcgccttggctcctgcagccgcgtccatgacgtgctcgccatcctagcgactcgtttccctgctgcgcgctacctatgctgagtccagtagttgtatttcatcgacggaggagagaaatcaccagaatgtgtggagaagcgtagtcccatacgacatccgctaggtgctcgataaaatatcagaacatgggattatcgtcgtttccgcatactccgagtcgatttggttatggtgagctgacctgttgtcccttcttattggtttattggttgagctgattgaattattaatgcgagaaggatagatttagtgtctctaacatttagctgatatgtgtgtgttgtcagtgttgttatggtgagattagtttgtatagtgaagtcggtgctctattttagtagttaggatactctacgtttattgatcgagttcttgttttaggtgaatgttaatggttactctaagtatttggagtagcgtcaacaagctaattttaattaaattcc

SEQ ID NO: 140691 - DNA, 358 bp, Zea Mays
caagcagcagcctctctatgataacccatttgttgcactggatccgaaaaccatgggctgttgttggtgccttacgagcaacttgcaggaggctttctttagcatcagtgtactccaactgaattgtcctaattttgcccaagtagaacaagtatcggtagaactgcaaccacatgacctccagaagatcaaaggccaaaaacacttgttgctactgctaacatattttcccatttctagcaggcagcatggacagacctcacaattccacagtctctgtattgttgttcaactttgtagatatatggagcttgttccctgcagacttcacaccaatttgcataaaactcaacaatag

SEQ ID NO: 140692 - DNA, 1482 bp, Zea Mays
gccgcactctccctgctcgcgctgggatattttcctgaagcagctaccgtccttatctccatgatatttccagccgagctccctgatttttgtcacagccgtcttcctcccttatcctcgccgccgccctggtcttcaaaaaatctgccgcgccgcttcagctctggataaaatcccgccggtgctgcccagccgctccttccccagcgcagaccgctccttctccctcctctacgcagtgccgcgtccacctccatctttgccggctggagctccctggtgcttgctcctctgcagtacggagctcctccctgaagcttctatcccctgccatggcgcttcgcttcccctgcggcattctcctttctctaatctccctgctcgccggcagcaacatccagccgcgcagctcttgactcgccggccgagctctctgctcctccctctgttcgctcgcgtgaagccgcgcctctgcgctcgcccagtcttcgcgcggcagctttcccctgccggtgcctagccctgcggccctcctctatcctcccgagcttctgcacagccagcgcgctcgagcccctctcagccatggtcgttcctctgtgcttgggttcaagcttctgcgcgccctcctccctcagggcgacgctccggctcctgctcgctctgctcgcttggctgactcgcgcgcatccctggctcgcctggttcatcgcgcgcacgcccagcgccctggattccctggccgtcgcagccgaggtcctccccatggtggcttcctctgccacgcccagctccctctgctccatgcgcgcgagctcgccgtctctgctcgctgcgcgcgcgctctgcatccatggcggtccccagctccctctgccggccgtcgtcgagccctctgcacacgtacgccgcgcccagctccagcgcttgttccctgctcctatggcggccgagctctccggtgccgcgcgttgagctcccggccgtcgctcaactcgtcggcgtgtgtcctactccttacgcgccgtgtgccggaaagtccctgcttgcaagctatctgttggcctcgcgcgaagctctctgttcatcgtcatcgctcgatcgctgcgtgtcgtgtgtcgcacatcttaggtcctcgtcgttgggtttcgtgcgtgctcgcgtttaccgtcgagtcgtcgaacccgtcatcctctgttcaaaccccacctcaccagctcgcttcaaacaccaccagctcgcttcaaacacgatctcgtcgtcaagcttcgctttagccttagctcgtcggtcacgctcgccagatgttcgatcaaggacttcagctgaaggccgtcgtcgttcaagcaactaccaaatcgagttgtgatgtggtgagctgattcgctatttttactatcggttttatgatcgtaaaataagacactatgtatacgtatacgattaaattagaaataccagcaaagcaaggtgtgcttcgag

SEQ ID NO: 140693 - DNA, 1897 bp, Zea Mays
cagccgtcttcctcccttatcctcgccgccgccctggtcttcaaaaaatctgccgcgccgcttcagctctggataaaatcccgccggtgctgcccagccgctccttccccagcgcagaccgctccttctccctcctctacgcagtgccgcgtccacctccatctttgccggctggagctccctggtgcttgctcctctgcagtacggagctcctccctgaagcttctatcccctgccatggcgcttcgcttcccctgcggcattctcctttctctaatctccctgctcgccggcagcaacatccagccgcgcagctcttgactcgccggccgagctctctgctcctccctctgttcgctcgcgtgaagccgcgcctctgcgctcgcccagtcttcgcgcggcagctttcccctgccggtgcctagccctgcggccctcctctatcctcccgagcttctgcacagccagcgcgctcgagcccctctcagccatggtcgttcctctgtgcttgggttcaagcttctgcgcgccctcctccctcagggcgacgctccggctcctgctcgctctgctcgcttggctgactcgcgcgcatccctggctcgcctggttcatcgcgcgcacgcccagcgccctggattccctggccgtcgcagccgaggtcctccccatggtggcttcctctgccacgcccagctccctctgctccatgcgcgcgagctcgccgtctctgctcgctgcgcgcgcgctctgcatccatggcggtccccagctccctctgccggccgtcgtcgagccctctgcacacgtacgccgcgcccagctccagcgcttgttccctgctcctatggcggccgagctctccggtgccgcgcgttgagctcccggccgtcgctcaactcgtcggcgtgtgtcctactccttacgcgccgtgtgccggaaagtccctgcttgcaagctatctgttggcctcgcgcgaagctctctgttcatcgtcatcgctcgatcgctgcgtgtcgtgtgtcgcacatcttaggtcctcgtcgttgggtttcgtgcgtgctcgcgtttaccgtcgagtcgtcgaacccgtcatcctctgttcaaaccccacctcaccagctcgcttcaaacaccaccagctcgcttcaaacacgatctcgtcgtcaagcttcgctttagccttagctcgtcggtcacgctcgccagatgttcgatcaaggacttcagctgaaggccgtcgtcgttcaagcaactaccaaatcgagttgtgatgtggcactctaaatgtggagggctccgggagtgcgctatccacgctgctcgtccaccagccgccgcgaggaaacttccgcgtcctcctaccccgcgctggcgactgcatcttccggggccgagccctcgatccagcgcgcttcgccgccggcatcgaggcaggagggcgagaagcggccgtgcggaggcgggtctgtcggcgtagagctcgcaccccttcgaaccgaggccgcgcgacccaccgcaacccaagatccaagccagcttccccctgttcgtcgccggagagtcgccatcggcaaaaggcttcgtcgtccaccgacttcgtcgaaggcagccgacaaaaggaagagaagctcctcgccgccgtcgtcttcgtcttcgattcggtccaccgagccagatccgcaaagagcgaggtacgaactacacaaatccttttttgtttagtactgaatcattaccgtattttattgttcggatttgggggcatggattagggtttgtgggatgtttagggtttacgatctggagcattctaaataatgcgcttcaatttcatgcatcaatggcttattgttgtatccggatgcttaaatttagaccggttttgggggatcca

SEQ ID NO: 140694 - DNA, 1416 bp, Zea Mays
atggattcggagaacgaaaagctccgtaaagcactggctactctgctcagagttgttcaaaagcgtagttgtgacatcgttgatgtcgtcaaatcagccttccagcctttcaactcacctttggtcgacgaattgaaccgagcactagttgagattgacgacctcgccaaggatcttgaagacgtagcagtgcaaactcagtgggaggtagaaaatatggctaacagtcaagtgaaagaacatccacatcaagaggaagcagtagaggaccttctcatacaagatggttcagaagacgacctactgatagacgaagagtcaccaattaactatgaagaccttgtgggctacgacgatggtcgtgactactcaaccgacgacacatatccaatggggagtgattggaaccaggtgatgtctcaatatggaagcttccttagccagattgacgagcagcctattggaacacaacattctgaatttccagttgatgggcaacccgagggctcaagaacaccagctgttactaaaaagccaactcaaagaactaagctagcaaacttcactgctgaagaggacacaagggtatgccatgcatggcttgctgttagttgcgatcccattattaacacagggcagaaacgtcaaggattttggagtaggattactcaagcatacaactcaagacgaggaacattgccagaaaggtccacaaaatctttgatgagtagatgggatactatcaaaacacattgttccacttttgctggatacatgatggcagtcctccgacagaatcctagtggactcagtgacgcagacaagacatcactggcagcttctaggtttgcagcaattgagaagaagcctttccactttttacactgttgggccattcttaaggaccaaccaaaatggatggacaaccacatgggtcaacaacatcagcaagccaacgctaatcccacacattctaacactgtcgatttggatgcagaagaatctgtaccatcaagcttcacatccaagaggccacttggtcgagattcttctaaggaaaaggcaaagaggactaaatctgtggacacatcttcatcagattctgagtttatgacacgcatgggagatctttctttggagcgcctgtcagtgtacaaaacagctgttacaactgaggaaaagaagttggattcaatgaacagaaatgaggggcagaaattgctccttgaaaagaagaagttgaacctagagaaattaaggcttgaaaggcagaaactaaaggaggacaaggaagaggagataatgatcttaagcatggatttgagcaaatgtaaccctctactccgccagtactatgaagccaagcaacaagagatactggcaagggttactgggtctacttcatctggccagtga

SEQ ID NO: 140695 - DNA, 2632 bp, Zea Mays
ctccaacctcgtattgggagagatccgctcgccgcctcccccgcggcttcctcttcctccgcgcaaactcgccgtggcagagttatctcgcgccggtaccgcacgcatcgggggaaaaacaaggtttttgggatgccgggggccggtgtggagccgccgtcgccgccagccgaggccgcggcatggctaccgccgcgcaggttgagacctgggagggtctccgccaagcggtgctggccgcccgggtgcggtcggttcccttcgcccccgccagcgccggcctctgcggccgaggcaggtcctgaggtgaagggcgtggatggcgcctccaccatcgtcgtcggcagagccgatgagaagcccgcccccgccgtcatttcgccttcggctcagaatggatgcccagataaggtggaggcccccgcccccgtttcacctgcgcctgagagcggcgccccgcctgctgataaggtggaggaggtggctgaccccgccgccgtttcacctgcgtgtcagaactgcgccccgcctcagcaagaggaaaataaggtggaagttgtcgctgctattttgcctgcagcgcacagcagcgccctcccacatgccctgactgagaaggatcagcagaatgtagtcatccgggagaatggagaggcacaattgctgggcgatgcaggcaagctgtcattggatggtcagcaagggaacaatgtggtgcaggtagcagtactgggtagttcgagcaccgttggtgctagttatttgcagaacggtgacaaggggggtggattgttggtggctgaggagaagggacgtggtggcagcagtgatgtggggcaggaggttgctgttaatggggatgtctcagagattgcaaacaaaacgggcactggtgagttacagagaaaggaaaatggaactgcaggaagcagaacaaaacggtggtttgtatcctctctgaatcctccacccaagaggagggaagtctcagccgtacgtagatttccacctggctgtgggaggactgctgttaccaccacagacagcggtgttttggaggtctcacctataagcacatttgctcctggtcatgggagatctggtgttaataccacaggcagtggaaatgaggggttgccttcagaagccacccctgtcaacaataatgatgccttggtggcaagttcggttttaggagagttggcttctccaacttcagcactagaggcctccaataagaaattggaaagcaagagaatagtgggtgaaggacatagcaaggctcacaataaggtccaagttcaagatgattttgccggtaccaaacaagatggtggccagcgaaatgttgttccaaaagctacgccgaggagtgtttctgatgggaagatgaaggggaaactcccagcacataaagcgaatcaggtagcacaagaagtgatggttggtaagatgaaaaataaacttgatggaagctttcaaagaagtaatcttaggacgcctttgagcaatcccattgatgcaaagacaaaagtaaagaggtcggatagtgacaagatgaatgctggagtgcatggtaatgcaggggcctctgcaggtgggaagatggaaaataagactttgagtgctaaaaaggaagtggggttcccaaatatgaacacaaagcaaaagaaggttgctcctaagttgaagggtgatgtcataggcaaggataatatgcatttgtccgccagggagctcaagcttggaaaatatgttgcaactgatcatactgaagagcctaagaagcaaataattgttcaagcattgatggctcctgacaattgcccttgggcacgaggaagaaagtcaattgctagtgctttcaagtctcttggtcctatgaacaaggcaaaggggaaggatgctagtgcttccaaacaatgttcaagaaaatgttaggcgctagccaggtgttaggctactgaccagcgtctaggaagtttaaacgtagattaagcatgcttaatcattcttttgtagattttgtgctgctgagagcaaggtcagtagtaagtactaagtaataataacacaactcttgctgttgctgcacacctgtttttgacataagttgctttcctccttggcttcttgcatccaacagcagctgatcatctatgagggatatctcaatattgtacatgcacagccaagcttccaaacaacagggcagcatcacaaggcaaaggatcacaagaaaatatacacaaaaaaacactcacagttcatcacatgccttaatgatttaagttattccaaagaataggtctatagatccttgtcccttgtattggagaagagttatttgatgattggtgggagaagattatttttgtttaactacaggaaggcctcaactcgcttgtgattcttaggatctggaccattttagatcaccgcaatatatttgtttttgatagtatacatccctgtttggctagaaccttgttattgcttgttagcaaggaaattcagttgtgggtttgttgggactaaatgtatcttttacctttttgcccagtcgcctgagtatgtttgttcttaggttacatacccttctgtttcttgtcgcgaaagtgatttgtagctt

SEQ ID NO: 140696 - DNA, 3003 bp, Zea Mays
atggcgctgctcttgccacctcccgccctctccacgacgcctccatttctctccgctccccgaccagcacggctaccctgtctcagatgcactagaactaccaccgccacctcaagcgtctccacctgtcctcccgcatcgacgtcttctccctcgacctcctcgccggtggcgtcggacggcgcagttggaaggaagagcaagaataagagcaggcccctcaagccgagttttgaggaacaggccctccgccgctggtccgcccgggcaccttcccagcgtgcctcggtcccctgggaacaacctcagcagcagtcgcctttgccgccttcgctgccgcaccgggctggccgaggaagtggtgatgcgggcgatcaaaaacgcagtggtggaggctcaagcgcaacgttgcgctccatcgtggactactttgctggcggctcctccgatgacgaaggagttcgagtagaggaaggggcgtgcgacaccaccgcagtaccggaccaagcggcacgggagcaggacgatggatcgcattttcggccgagctatctgcttgggagccacccattctctgcgccatggattcacagggaggaatcgaccaatgataggggggtttccggtccggtggccgaagaggaggaaaggttggacattcgtgatgcttctgatgatgaactgggcttggtggatgaggataaggaagagacggataatggtgaggagcttcttactgggggtttagaagatgaattttatgatgattatgccacaccaactatgaattcttcatatggagtggatttgtcagtggacaaagatgcttatggtagcaggttcgataggagtatgatgcagagcagtgtaaacaccatagttaaaacattgaggaattcgatggaggaaagtgacccgaatgccacggttgagttgtctaatgcagaagattttgtccagaaattgggccctgcactcctgccatgggaaagggaggaggaagatgatgaggcattcagcggtggcagggcggtgaggcgcagcaacacggagctggccgagaggtctattccagagcctgaactgcggaggcttagggacacggcgttgaggatgaaggagaggataaaggttgggccagggggtgttactcaagacatagtggagagcatccacaggaaatggaaggtggatgaggtggtcaagatgaggtttgaaggccctccaagcctgaacatgaagagaactcatgatttactagaggacaggactgggggagttgttatatggaggtcagggagatcagttgtgttgtataggggaatgaattacaactttcaatgtgtgcagtcatatgctaaatttatagaaattgattcgggtaagggagttagcgatgctaatagtgctgtattgagccatgatggtcacaacttacaggcctcaagagcagatggcatgaagagtttaacgtctactggcaatttttctctggagtcctctgaaacatttgatattgataacttcttggatcaattgggaccacggtacaaggattggtctggtcgtggccctatccctgttgatgccgacttgcttcctggtgtagtacatggctacaaaccaccatttagagtacttccctacaagattaaaagcactcttagagataaggaaatgacaactctgcgtagacttgcaaggcaaactgctcctcatttcgctctagggagaaacagagaacaccaaggcttagctgctgctatggttaaattatgggagaaaagtgctattgcaaagattgccatcaagagagggattccaaacacatgcaatgacagaatggcagaagaaatcaagaaattgacaggaggagtgctcttgtcaaggaacaaggagttcattgtcttctacaggggcaatgatttcatagctcctaaagtaaggcaggtcttggtggagaagcaagaacaagccattactcaacaggatgaggaagagctggctcggcttaaagcatcagcctcaattattactatccccaaggatataaagggtcctctagttgctggtactctggcagaaactacagaagcaaaatctagatggggaaagtcagttaatgataagcagagggaagaggagatgaagcatttgtctttgttgaagcatacctctcttttgaagaacttgaagagaaaactgattttggcaaaaacaaaagttgcaaaagcagagaaggctctagctaaagtccaggaatttctcactccagcagagcttccaactgatctggaaacagttacagatgaggaacgcttcttatttcgcagaatcggcctgaaaatgagggcctttttgatgcttggcagacgagaagtttttgatggaactgtacaaaacatgcatttgcattggaagcatcgagagttggttaaaattgttgtcaggggaaagagctttgcacaagcgaaacatattgcaatctctctagaagctgagagtgaaggtgttctcatttcacttgacaagacaactaaaggatatgtaatcattttctaccggggtaaaaactacaggcgaccccaaatcatgaagcctaggaatctactaacaaggaggcaagcattggcacgctctatagagttgcaaaggcgggaggccttaaagcatcacatctcaagtctgcaaggcaagatctcgaagttgcagtcgcaacttgtacaaacaaaggttgcaagtgagaaacatgatctgaagctgcttcaaacagttgaggatgacttctcatcatcagatgatgatgtagaggatgatggggaagaagcttatttgcagacttacagcagcgctgatgaagaagatgccgaggatgatgctaatgaatatatttagactggtgcggttataactaatgaggcttaaggtggtcgtgttatgttctgaagcagtaaaagttcaatggtaaagacagtctccacgtgactacacatctgcaacgcc

SEQ ID NO: 140697 - DNA, 909 bp, Zea Mays
caaactataatattttaggttgtagctacgttacctacaagtatcctaatcctccttatttgagcattgtgcagctcctcatgctctttctctaaaaagtccatttacatattcatcaagtactgaatagacagaacaataataacagataatgtatagcttgttgtttttctatttatgttttcgactctaacatctctatttatgtaatcgactctaacatctctctagcatttaaatatatgtatagcttgctaaagcatttagatatgcagtaatcgactctaacatctctgtttctgtttctgtataccaaagcacaatttaacatggaagaaatggtagcagcaccatttcaggatggacaacaaccaaaatctcctacagaagttgtttctaatgtgctactgggctccagtgtgttcctacacaatgttggtcttcagtctgccttcaagaaaagctccacaacaactgtttcggcaatggctcaacaacttcaggatgaactagagatcgagaagcaagaaaaagatggccttcaggaagaagtggaaaccttgaaggcttaagcacaagcatctcaggagaccactgatagtatgaagaggtcgatggaagaaaataacagcctccttcgtctactattaagcttcaatcgaggccaagtgcctccatcttaagtctggttgaccactataggacctgcagccttatggctgctatagtggctagcaacagtagctctagatttgaagttatcggatcattttaaattatgcttaatgtttaatactttgagttgaagttattggatttgttttggattttaagttaaaggatttgcagatatatgttttaaagttatattattctctgctagatgaaatatttgtgttgaacaaattc

SEQ ID NO: 140698 - DNA, 3153 bp, Zea Mays
atgcacaagacaaacagacgagaaggtatgtcttctccccctatcccagcccctccccccgaccccaacccctccccttcctccaccagccaccacagcccctcgacggctgctactccggcgccggcgaccacacctctgccctgttctcttggcttctgcacctctcaggtggggcggtccaagttccagcgatgggatgacaacgcttcgggttcctcctctggtggtacggtgcactcctataaagaggccctcctttcctcttctagcgccacctccctggagttggacgtacacacttctaccatagcaaggccgaagctctgtgacaaggaaaggaggttgtgccggcgtgaagacctggtgccggtcgacaaggaggatggctggcaggtggtgaagagcagaaagcagtctcgttgtgcttcggcgcggagagggaccagtgtgaacctccgcgggagatgcttcaactgtctctctccaaaccatctcgtggcttcgtgtcggtgcccccctcgctgttttaggtgtttcaagctcggacatcaagcctctcggtgccctgccattcaggccggccctctgcaactgaagaccccaggtcgcttgcgtgaccgtctggaatttgacaagtcatacccggtgggcaagaggtcagtctggcatcgtttagaagagcccagcaaacgcctctcggtgttcaagaggctatcttctcagaaggtctcccccccgcagtgcagagctgggagtgctgctcctccaaagaagaagaagtcagtttgggtgcgtatctctcccgcaccccaaacatccgaccagaagactaatcagccatctccaatgttgaacaactgtgccccggatgttgatcaacgttcctttcgcaacaagaggaaaagaagaaggtccaagagcaaaaaaggaaaaggtcctgctgaagctgcgggttcgggtgtgtgttcagattcccctccctcatctcctgaagctcatttctcccagtcgaggatggaattccataccgcatctcccccaaccgttgaagcttcacgtgttcttacgttcactgatgagatggcaagggaagagatcaatctacgaaaagccctgttcgtcaccatcgcaggtactagacctgtggtacagggatcggaggtgttggatgaggtggctcgcagctttggggtatgtattgataacatgtccatccaacattccacaccagaggattttctgcttttcctgccggatgaggacactgcctccaggattttcaatgggggcagattattcactggacctcgtttctgcttaatgttcaaaagatggtctcgtttctctcatgcttctatgtctcgcatgtctcacttagtggatgtgcagattaggggaatccctgaacatgcatggtcttgctccactgcggaagctgttcttaacgactcatgtcatattgttgagatccattctgataccctgatgaaaaagagtctctcatcctttacagtgcgagcatggtgttttgattttaaaaagttacaacggcagatgacgctacacattattgagagagggttgcagagcaatgacaagggttgtttatcatacaagatcaatatcagcgcaaccatggtcaatcctgaggacacggatttggggggattgcactcctcgcccccagatgacgctcatcagccagaagattttgaagatcaggatattggcaacagtatgttccctcgtcctcctcgtatgggtgccccttctgctggtcggcagtcagtccattccaggctgggaccacagccgccacaaggaagtggaggggtctcgcgtgccaacagagagctgaacacgcctgccaccaccaaggatgcggttgatttcctgaagctggggcatttaaattccttggacaatgggaaggatgcggctggaggagatctcttgtgtattcccgaagcaacagtgctggacccaaggtcggctgatgaagatatcctggcgccggagcatttaagtatcttggacgacggggaacatgcggctgatttcctgaagctggggcatttaaattccttggacaatgggaaggatgcggctggaggaaatctcttgtgtattcccgaggcaacagttctggacccaaggtcggctgatgaagatatcctggcgccggcggctggacttaactgcctgggtattcccgaggcatcaaggctggacccaaggtggaagacaaacagtaccctaggcatggcccccactgtcttcatgagtgaggcacgcgggtcgctgaaccctcccaggaatatttcgccccagtccatggtgactgggccgctggaattaattgggttgggatcgccccatgcgccaactcctgttctccccccgactgggctcgtccctgggtcgccggagatggtcagtccatctgtggtctcgccccacataattgggccgctggagacacacaatctcagatcagtctcgccccagggactcgagtttgaaggggacgcctctgtttttgagtctgggccgcctgagacggttagtgtgcatgcgatcttgacccttactgggcaggtcgagaccaagtgcgcagtaccagtctcgccccaactccagttgaagcagagttcttgtaagccactgctcaaggtatactcaagaagaaaatgtggaacaactcagctgatggaaaggaccactgatcttcaggacagtgaggaacccagtcaaggcatttcggatgggataattaactcggccactgacatctcagaacaactgacgattccatcatcatccctcatcaacatgattagcagaaagccttcacacctcctccctgcacccgggactggactgaagaggcaaaaggacctaactgtgactatgcctcgacgcagtaggcgtgtggctggaattggcgtggagttctccatgcaggattggcgcagcaaggcatccaagaaagcaatgagggctttacgtattatcaatgagtctgataagattacttctgatgctatcatggagtatgctttactttttaaacgcccgcttatccagtctcatgttgatgccttagctgctctgtttgggtggtctacacctgaagacttaaggtcttag

SEQ ID NO: 140699 - DNA, 171 bp, Zea Mays
atggatagcttccacaatagcttcaatctcttccttggcacgctcaaacacattcggacctttgactttgtcaactggtgtgttctcatttatgtcagcacttgttccgtgagtttcatccgtgtgggcttttattttgtgcaggctcccctccttgccttccttatgtga

SEQ ID NO: 140700 - DNA, 453 bp, Zea Mays
atggtgccccccttcgggcgtggaaagcagtgccgcaagctcctgctcgctgaaaatgagcaccacccatacgtatgtatgatctcctgcagaagcagaacagtggacgggactgtcgaagcgcatgggcagcggcggcggcgacgcgcccatgcgtgggcagcagctccgatccatggcgcgcaccacagaccgcacccacaggcttgcgtttggcaggcccaggcggggcggcacgtacctttgctcttgttccacgacaggacagagcaggggagtagattcgtggctttaaaaacccatggacggacggacggacggatcgcgccccattgcgttggctccggcgccatcacgttgtttactggtgtgggggtaaactcgcaacccccctccctccctgccacggaattcaattccgatcgcatggcctccgccctggagacacgatga

SEQ ID NO: 140701 - DNA, 2175 bp, Zea Mays
cgaagtttgtcactgtcccgttcgtcgtgtcccaaagtccaaaacccaacccacaatggccgccacctcgccggccccggcgccgccgcgcatcctcctcgccggggatgcccacggccgactccaccagctcttcaagcgcgtcaaatcggtgaaccagtcaacggggccgttccacgcgctgctctgcgtggggcagtttttctcccccgagggtgctgcagagggctcaccggaggacgtcaccgactacctcgaggggcgcgcttccgtgcccatcccgacctacttcaccggcgactacggcccagccgcgccgcgattgctatcgaaggccgccgctggtgctcgcgggttcgcacccggtggcatcgagatatgccccaacgtcttctggcttaggggaagcaaccgcttcaccctccacggtttgtcggtggtttatttgtcagggaggaaagggttaggagggcctggctgttacagccaggatgatgtggatgccctacgggctcttgcagaagagccagggattgacgatctgttcttgactaatgaatggccgactggagtggtcagtgggtctgacacttccaatgtgcctaatcaggttttggatcccaatgggtatgatcctattgttgctgaattggttgctgagattaaaccaagatatcacattgctggcacaaaaggtgtcttttactcaagggaaccatatgtcaatgattctgctgctcatgttacccgctttattggacttgctaatgttggaaacaaagagaagcagaaatttattcatgcgatttctcctactccagcatctgtcatgtccagtgctgatatcaatgccaagcctccaaacgccactttgtcaccatatgttggttcagcaaaatcagttcctatcgaagaagctccaaaacgtgcagcggagaacatagattcacaatattggcgttatgatgtcaagcggcaaaggcatggggaagctggtgggggtggattgtgtttcaaatttgtatcctcaggatcctgtcaaagagggagtagatgcagttataggcatgatgaagaggcagtggagcattaccagagaaatgtctgttttgattttctaaacaaaggaaaatgtgagaggggcccagaatgcaagtttgttcacagtctttctggggagactgctctaagggatgcaagacctcctagtgaaagaagacgagtggagagcagttgctggttctgcttgtcgagtccagatgtcgagtcacatcttgtcattagcatcggtgaaggttactactgcacacttgcaaaggggccacttgttccaaatcacgttctaatgattcccgtggaacactgccccagtacattgatgatgcctccggaagcagaggcagaacttgggagatataagattgctctgagtaagtactttgagaagcaaggaaaaactgcagtctactttgagtgggtttcaccacgctctcaccatgcaaacctgcaggctgttcctgtaccattgtctaaagcagacgctgttaacaagatatttcatctagcagccaaaaaactgggatttgaattctctatggtgaatccagatggtgcaaaaactgctagagaatcattgatgtctcaatgcgaaagcaaatcagggctgttttatgttgagctcccggaaggtagaattctcttgcacatggtcgacagtaacgagaagttccctgttcagtttggacgcgaggtgttagcgggactgctaagcatggcggatcgtgcagattggaggaactgcaagatttcaaaggaggaagagattaaactggtggacgatttcaaacaaggtttccgcgaatttgaccctgcagagtgaaaacaatgctctgcgcctgtgtttttgttttgcaatttgtagtctatttttgaggtctcatttgaaatggacatatatgaagcacaagaatgtagtaacgttttccaatgccgcaatttttgttttagggctagttttggaaccacatttttcaagggattttcattctcctaagcaaaattagttcattttcttttgtgaaaataggttggaaaaatggtgttttcaaactagcccttagataaacgtatgtctgatctcggcgtgagtgggcacgcctagggatgaaaacggac

SEQ ID NO: 140702 - DNA, 771 bp, Zea Mays
tcaccgcagcctcccttgctgttctgtgttctctgcgagcggcagcagagagcaggggccgcgcgaggaagaagaataatccttaccctaaccgagcagagccagctggggctgggctcctgagaattaatgacgacggcgtggtggtggttcgtcgccatgaacgcggtcgtcgtggctatcgccttgctgtcgtcctcccgtgcgcggccatctcttgtacagtccccacgccgccagcgctccggggtcacgctcacgcgcagggcctcctcggcggtgctgcagagcctcctctctttctccgtcttctccttcccgtcgacatgcctgtcgccgtacctccagcccgacgctgcgaccaccgaccgagaaacagaaacagaggagctcacggtacggtcatcacccatcaagccctcggcgtcaccgcgcgcgctccagctgtcggcgccgtcgcccgcgacggctgcagatgaggaggaggaagaagaggacccgaacgcgatgagcatggacgaggcttacgcgttggtcctggcttcgcagcagcggccggagagggagagggaggaggatgccaggaggtcggaagtggacgccaaggcagaggagttcatccgcagcttcaaggaggaactgcggcagcagcggctcaagtccacatccaactaagcggcggtctgacggtctcctcccaccgccggctgttactattttttgtacatatgcgtttttgcttcgcatgtgctcaggtttaatttgttcagt

SEQ ID NO: 140703 - DNA, 923 bp, Zea Mays
ccacatcatccatcaactcggagcgcagatttttgggaactcgaagcagagccagacacagcacagcccaggagaagcgagcgcagacgatggcggcggtgtggtggtggtgggcgccgctgccggcgtggctgacctccagtgcgttatggttcctcgtcgtcaacgcggtcgtcgccgcggtcgccgtcctttcctccaggccgctgccgctgcaatcgccccgctgcggtgccggggtctcgctcacgcggagggcctcgtccgcggtgctgcagcgcctccgctccttctccatcttctccttcccctccgcctgcctcaactacaccacgccatcgacgttcacgcagcctgacgccgccaccgccgccgcccaagaaacagaggagacgtccaggacaccgacgacggccaagccgtcgccgcgcgcgctcccgctcccgctcccgccatccccgctgtcgccgtcagtgcgcgcgccggcggcagacgacgacgtgcccagcgggatgagcatggacgaggcctacgcgctggcgctggaggcgcgccggcggccggaccgggagagggaggaggaggccaggaggtccgaggtggacgccagggccgaggagttcatccgcggcttcaaggaggacctgcgccagcagcgcctcaactccatcctcaactacaccaagatgctcaagcagcgcgcgtttggcggcggcgccggcgccggcgcccgccggcagccggatgcccggccagatcagctttgagtcacgtgatcaattcgttcgtttaagatatttggtcagcgtttttcagggagaccaaatcagttttgagttctgtacataggatgctgctttcaacagattgtttgtatagtttaaacacattgtttgcatgtttttttcccttcttatttcgca

SEQ ID NO: 140704 - DNA, 2476 bp, Zea Mays
ggaggttcctgtcctctcgtatcgaacacctgaaacccaccgcccgccgatcacgaagcggcggcggcacagcaagatgctatcccgcgcgcggcgcctccaccccgccgttcgccgattcctcctcccaaacacgcctgcaccctcccgtcatcctccgctccctcctcaacacagcgcttccgccaaaacctctaaacccttctcgattctcttccgccgccacctctgctcctcaccaccggcaacgccaccgccaacatcaccgcctccagcggtggtatcttctgaccttccggctgtccacgtcaatgaagtttgcccaggatgcgggatcgccatgcaatcctcggaccccgagctcccggggttcttcttgctcccctccgcaaaatcccccaactaccgcgcgcgcctcgcgcctgtcaccgccgacgacacccgaatctccgcctccctcaagtctggtcacctccgggaggatatacagccgtcgggtggcgacaagccggccgcggcggcggctgagatggcggaggccaagggagaaggcaaggttttggtgtgcgcgcgatgccactcactgcgccactacggccgcgtcaagcacccggacgccgagcgcctcctcccggacttcgacttcgttgccgccgtcggcccgcgcctcgcgtcgccttccggggccaggtcgctcgtgctgctcctggcggacgcctctgacttcgatgggtcgttcccgcgcgccgtcgcgcgattggttgccgcagccggcgaggcccatcgcgcggactggaagcacggggccccggccaacctcccacgcgcgttgctcgtggtcaccaagctcgacctgctccccacgccatcgctgtcccccgacgatgtgcatgcgtgggcgcactctcgcgctcgcgccggtgcgggtgccgaccttcggctcgctggggtgcacttggttagcgccacgcgcggatggggcgtccgcgacctgctcgaacatgtgcgcgagctcgcggggacgcgcggcaatgtctgggccgtgggtgcgcggaatgttggcaagtcaacgctcctcaatgcgattgccagatgctgtggcatagtcgggcgaccgaccttgacggaggctccagttccgggaacgacccttgacgtgattaagcttgacggcgttcttggcgctcaagcaaagctgtttgacactcctggtcttctccatgggcatcagttgacatctagactgacgagcgaggagatgaagttggttcaagtgaggaaggagatgagtcccagaacttacagaataaagacagaacattctatacatattggtggactggtgcgcctggacgtagaagagttaactgtaggatcgatctatgttacagtttgggcatcaccacttgtcccacttcacatgggaaagacagaaaacacgacaacattgataaaagaacactttggcttgcaattacagcctcccataggccaggagcgggtaaaggagcttggtaaatgggtgaggaaacagttcaaagtttctgggaacagttgggatacaaactctaaggatatagccatcgctggtcttggttggtttggaattgggctgaaaggagaggcagtgttaggattatggacatatgatggtgttgatgtcatctccaggagctccttagtccatgagagggcttcagtttttgaggaagctggtttcacagtttcacagattgtttctaaggcagatagcatgaccaataagctgaagagcaccaagaagccaaaaaaggagagaatgaaacgtacttcccccacagagccggaagcttgagacctgcttccaccgatagatacttgagtcttttcatccagtcctgtgactggagtatcattttggtgatcatgttacacaatgttccgcattggccctagaaactgttaattgaattcagaagcagcggctgagtatacaatgtattgttctccagaaggaacctgccctaatcggagtgtctatgttttacaaagctctaaattttgatcctttgctagtttgctgagctggagagtcaggaagtattctgagatgtcagtcagttacggaacacctatctggagagtcagtcagttaggaaatactctgtgagatgttttgatgttaacttataaaatccaacatgaggacttgtgttccagcattaaagggaaggtgtggagacattccagattgcatttgatgttatcattcagttttaggattcatgattgtgcctccttgtaaagttgtagctgaactataatgatgtaggttccacagatgcatatcctgtttttcgtcaacattgcctgcattatagattccgtgggcatcgttctcagaccacagcttgttttctaatgaactttctctcaattgcttgttgagctattggatgcaatgcgttttgtattgaatccaaccattgtttctaaa

SEQ ID NO: 140705 - DNA, 614 bp, Zea Mays
ttttatttttctttcatatatctaaggcctctagaaaatttacttttgagttgatatatcttgccaattaattcccgtaacacggccacctagtaatttcttaatttgaatctgaggcccccatccagtaaaatttatattttttcttgtttcggaacatgtacatgatgctgtagtgtagtgctacactcattgattcgaagtttgatcggtctatttaaatgtttctattttcttttctttttcatccaacaacatcgacatcaattaccagaaggatatattcattttgtttgatccaaaggatcaattctggacatgattatttcatatggaacacgaatcgccactaggcaaattatgcagacaacattaattagcttttcccattagaataaagacaatctggcccaattaaaccgtctgaaacagatatcgtatttagggcccgtttggcacagctctagctcctgattctaagcgaggatctggggagccgtgccaaacgggtatttttttaaactgattctcgtgtggagccgaaagatcgggagtcgtttttgtgaagaaaggtgagatctaaaaaaacctgctccaccctcccttaaaacagc

SEQ ID NO: 140706 - DNA, 1133 bp, Zea Mays
agccttcttctagtagctacggagtaccattcatcatcagagctagcaagctcaaagaaaactgagctcgtgtgtggtgagcagcgagtgagtgagggactggtgaccatttcaagaacagcgccgcagcagggagctaattcgttcgttcatcgtcgcatcatcagtttgtgatccttcgcccccgtagcttcctgcaacttcgagctcactaaacaaccatgggaggaggcacgctggagtacctgtcggatctgctaggcggcggcggcggccggcgccggtacaagaagaggaagcagttccagacggtggagctcaaggtgcgcatggactgcgacggctgcgagatgaaagtcaggaacgcgctctccagcatgaaaggggtgcactccgtggagatcaaccgcaagcagtacaaggtgacggtgcaggggtacgttgagccgcacaaggtggtgaagcgggtgcaggccacggggaagaaggccgagatctggccctacgtgccctacagcctcgtcgcgcacccttacgccgcgccggcctacgacaagaaggcgccgccgggctacgtgcgcagggtcgacgccgtcatgcccgtctcctccacctacggcgggcccgcggcggcggccgggccgccgcaggaggagcggctcgccaccatgttcagcgacgacaaccccaacgcgtgctccgtcatgtaaattagaattactttttcttttcccctacacaccaccgtgggtgcatggcgcagctctcttcgaccacagaaaatgtaaaccgtacgtggatgcatgtcaaaaccatagatgatcgcctcggttggatgtctatgtccatcacatgtgcttgtacgtacgtagctgtatgttgttgtatgctttgtatattattgtttgatggaaccaaaagaaagcatgcatgcgtggtagagagatttttcccaaaattaattaaagttagtcttcttcctcgctccacatgtgctgccgaatcttagcctacctttaaattctgttataaatttcatctgtagagttgtgtgttgcatgtatatattctattaatgaacctatgatgatgtgtctgtacttgacagtgcagttggattgctctgtttcatt

SEQ ID NO: 140707 - DNA, 127 bp, Zea Mays
attttgataaagataccccaatttctaaataccccacgagccttatgatgtttttcaaaatctattttgggagtatttgatcacctgtgaataaaaagaaaaagaaaagggatttcaaaattcggag

SEQ ID NO: 140708 - DNA, 135 bp, Zea Mays
gtaatatttagtatgcaaacatggatgaatctaaaaacaacatggatgattctagttggttaaaacaaataaagaatcttcctggggaaacaaattatctattttcggtgcactccactgatctgcacctcaaac

SEQ ID NO: 140709 - DNA, 204 bp, Zea Mays
atggcaggggagtatcttggtgctggtatgcccttggcaccttcatcaagcgtccaagagacaagggttgagaacttggctacaacaatggaggttgccgcctctcaggccaaagtcggcgttgtgaatccatctgaggatagtgatgacattgatattggagaagacaacactaccatcgtcctacaaagccaagtcacgtga

SEQ ID NO: 140710 - DNA, 1447 bp, Zea Mays
acaccgcgcacggcatacccaccactcgatccaccacacgagggcacgagagaagaaccacttccatggccggcgcctcatcgtgagctcctcgcagcatcgctaccgcgcccttgcgttagctctgtcttcctgtcgcacgtacgcttgtgagacaagcgagaaggcacgtacgtttagtttattcattttcttggagcgggatctgaggttccaaccggcaaaagagagatgatggtagggaagagggagcgggactgcaagaacccgatgcggcggacgacgagcatgacggagttcgcgccgcccgacgcgctcgcggcggtgatggaggacgaggagggcccccagctgtccgacgacagcagccgtgacggcgggcagcaggactggctgtccgcgctcggcggcggcggcggcggcgtcgggggcgccgcggcgcaggaggactggctcgcggcgtaccacgcccgcgcggcgccggcgcgggcggggctccgccggaactcggccgactactccgccgtcgagaccgccgcgttcctgcgcgcctgcgggctctgccggcgccgcctcgggcccggccgagacaccttcatgtacaagggcgaggcggcgttctgcagcctggagtgcagggagcggcacatgacgcaggaggagtggaaggacaagtgcgcggtgacgtcgatcaaggacgctgccgcgggctcggccaaggtcaagggccgccgcgccggctccggcaaggctgggggcacggtggccgcagcatgacgacgatgctgatttgctgaacctacacctagctacctagctaccaccagcttctcctcaactagccagctgcaagctccgattattcacccgtgcaaccatctatatactaaccatgcatcatatatgatatatccccagctagctcaatcgattattaattatttgttatccggatccatcgctcatcgctgcatgcaagccatactgatagatataatactataccattagcttgattccatcatcgatcatccgcgcacgcatgcttggtaaaagaaattcttcaagctttgttgctatatatgctactggagtactatagatgttgctatacactttagtgtagcgatacagcagcatgagtagacgtccttgtgtacaagtggaaaaaagaaaggtgaagggaggaaattgatgtggcttcggcactactagcttggcagatgcactgggccacggatgatccctgtcactgccactagccctgagaacaagacggtgtgaatttcagtgtttcattattacctcaaattgactctgggcatatcgttgtccctccgtagggggagttttattattttactaattttctgtttggatttttattattcaccgatgcaaatcatcatttgttcaataaaactcgaatcaacttattatttgcaag

SEQ ID NO: 140711 - DNA, 1379 bp, Zea Mays
ggcatacccaccactcgatccaccacacgagggcacgagagaagaaccacttccatggccggcgcctcatcgtgagctcctcgcagcatcgctaccgcgcccttgcgttagctctgtcttcctgtcgcacgtacgcttgtgagacaagcgagaaggcacgtacgtttagtttattcattttcttggagcgggatctgaggttccaaccggcaaaagagagatgatggtagggaagagggagcgggactgcaagaacccgatgcggcggacgacgagcatgacggagttcgcgccgcccgacgcgctcgcggcggtgatggaggacgaggagggcccccagctgtccgacgacagcagccgtgacggcgggcagcaggactggctgtccgcgctcggcggcggcggcggcggcgtcgggggcgccgcggcgcaggaggactggctcgcggcgtaccacgcccgcgcggcgccggcgcgggcggggctccgccggaactcggccgactactccgccgtcgagaccgccgcgttcctgcgcgcctgcgggctctgccggcgccgcctcgggcccggccgagacaccttcatgtacaagtacgtgtccgctcgctcgccacctgccccgcagcaagactccttgttttttgtccctcgtcacttaccgtctcgttacgtggtctgcctgcaggggcgaggcggcgttctgcagcctggagtgcagggagcggcacatgacgcaggaggagtggaaggacaagtgcgcggtgacgtcgatcaaggacgctgccgcgggctcggccaaggtcaagggccgccgcgccggctccggcaaggctgggggcacggtggccgcagcatgacgacgatgctgatttgctgaacctacacctagctacctagctaccaccagcttctcctcaactagccagctgcaagctccgattattcacccgtgcaaccatctatatactaaccatgcatcatatatgatatatccccagctagctcaatcgattattaattatttgttatccggatccatcgctcatcgctgcatgcaagccatactgatagatataatactataccattagcttgattccatcatcgatcatccgcgcacgcatgcttggtaaaagaaattcttcaagctttgttgctatatatgctactggagtactatagatgttgctatacactttagtgtagcgatacagcagcatgagtagacgtccttgtgtacaagtggaaaaaagaaaggtgaagggaggaaattgatgtggcttcggcactactagcttggcagatgcactgggccacggatgatccctgtcactgccactagccctgagaacaagacggtgtgaatttcagtgttt

SEQ ID NO: 140712 - DNA, 567 bp, Zea Mays
agcacaagcgccagcgccagcccgatgccgccggcgaggagctcaggcaggacgaccaaagctgccgtgttttgccggatcaggatcaaccactgcaaggtgaaggccgtggcggctacgacgtcgccaagggccgatcatcgattacgctcatcggagggaagcaagaaagactactacaaggtgctgtcgctggagcacccggcggccgtgggcgcggaggaaatcaggcgcgcgtaccggcggctggcgctgcggtaccaccccgacgtgtgcccgccgtcgcgccgcgccgagtccacggagctcttcctcgagctgcggcgcgcctacgagacgctctccgacccggcgcagaggctacggtacgacgccgagctgagggcgagcggggacgaccccggtgctgcgttcgcgagggacgtgtgggaggcgcagctgtgtgcgctgcgcgcgcgctccgagcagcggcaaagcgcgaggagcgctggcgtgcgcgctcgcggggcaccgcgcgcagtggcggattcacacccggggctgcccgggctgcagccccggtcgtga

SEQ ID NO: 140713 - DNA, 129 bp, Zea Mays
tttagagctagtttggaagtaagagtatctccaatagttttccagaagtctcacctaaatcaagttttagagctagtttgggagctccattttcccaagagattcctattttctcaaaaaaaaaataaa

SEQ ID NO: 140714 - DNA, 2178 bp, Zea Mays
agcatagtaatccgtaatcaggaatcactcactcctccaaaaattacggcgacactgcgatgaaactgagggttaggggggcgctaatcaaatgcggcgaggccgcgtcgctataaaagagctcctcgcgcctcctttccacctccccgccccaccaaacactcccgcagacccacagccccgcccgtccccgtccgtccacagccagctccgcctcccatccagcgcccgtccacagccgccgcagttccagtgagatcgagcgaggtaagcttagatctgagcgatttctctcgcgcgtcgcaggtaaagttcactcgacttcgactctctcatcctcttctgttcttcctggttccgtcttcttcctcgagcagacagcgagagacccgtggccttttagatcccgggcttcagatctgctgtttcttcttcggtttggttctagttctagcagtgtactagtactagtcgttaggttggtagccaagagaggttctttttccacacctcccttgcgcaagtgagtcctgtcctgagtggatctacccaccactgccatctgtttttactgtggctgttgggttccgccagtttcttcgtttgttcttggtttgctagagagagaggaaaaaaaacaaaaaaacaaaaaaaaacagtctagatggctgctactatagatctgtcaggggaggagctgatgagagcactcgagccttttatccgggatgcctctgctcacggatccagtccgctcctccacccgcaccagccacttagcccctcgtcgccgttctccttccaccaagccgtcgccgccgcctcctcctacggagggaactacccgttcgccgcggccgacgaggcgggccagctgagcccttcccagatgcagtacatccaggcccgcctccacctgcagcgtcgccaggcacagacctccgtgctgggcccgcgtgcccagcccatgaaggcgtccgcgtccgcggcccccgccccggcgcggccgcagaagctgtaccgcggcgtgcggcagcggcactggggcaagtgggtggcggagatccggctcccgcgcaaccgcacccggctctggctcggcaccttcgacaccgccgaggaggcggcgctcgcctacgaccaggccgcctaccgcctgcgcggcgacgcggcgcgcctcaacttccccgacaacgccgcctcccgcggcccgctccacgcctccgtcgacgccaagctccagagcctgtgccagagcatcgccgcgtccaagaagggcgccaagaagccggcctccgccgcagctgccgcgtcgtcgtccgcccccaccagcaactgctcctcgccgtcgtccgacgacgcgacctcgtcctgcctcgagtccgccaccgagtcctcgtgcccgtccccgtcgccgtccgcctcgccagggccgacggtgccggagatgcagcagctggacttcagcgaggcgccgtgggacgaggccgccggcttcgcgctcaccaagtacccgtcgtacgagatcgactgggactccctcctcgccaattaatcgtcgccccttgttggctggctggctggctggctcccatcctacccacactgccgtcgtgcagcaggaggagggttaaagaaggttaacggccgtcgcgcagatgggattttagacatcctgcgcgggcactagttggatcattagtgctaatccccgtccgtccgttcgttggttggttctgtgtagatgtccgtccgattcgtttggtccttgtcactggtgagtcagttgtagatctcgggttatttagggtttggttctccggaggaggagagaaccacaaccgacgggaagccggcgtttttgtgtccggcgttctccggtggtggccggtacgtgtcacactggtcagtgaccccacccccccggccgttcaggtgtccgttgtcctggtagctgtttttgttgtgctagatggtgtgctgtgctctacaggttgtaaagagcagcacggtgtgatgtgaggagatgcttgtcaagcagtagtgctccgtatgatgtatgttgtaaaatcagctagctagctgtgtccaggagttgtaatttgatgaactgctactgttggtgctactattgtatggtttattgttgtataaacaatctgtgttcggctgttcccc

SEQ ID NO: 140715 - DNA, 1454 bp, Zea Mays
acaatacaatacaacccaggatctctgtgttccttctatactctgatgcctgtgtgtccctcgccctctttcttttgcctcaatatcagaagctagctttcttcttcatcgcgttacgatctcggtgaggatcgaacgttcttcgtcttgccttaaggaaaaacccctctgacctctcgatcgtcgcggcattgccaaccgggatggcgatggcgtctcgggatggaggaggtgcggcgggccgggcggcgctgcgggtgggccggacgcgggagtaccggacgggcatggagacggagctgctgtccatcgacgccgggtcgtcgggcggcccggcggtgagcctcttcgtgctgtgcggcgacggcttcgaggccgcgcgcctgttccggtcggggaccctgtcgctgcacatggcccgcgtggagggcctcgtcccgatgtccatggccacggtcgccgtcggcgaccaccggtggatgctggcgcgcgacgccctcgtggcgcgcgtcgacgagcgcaccttcgtcttcgagctccccggcttcttctacgccgtcgccatgccgcccgacgccgagagggagtgcgcctcgatggcggagatcctctcgcggttctgctcgtaccacgatcttgccgccgacgccgccgccgatggtggaggcgaacttgctggtgagctggacacaaacccgtgggccggtgctcacgccaggataagtcgcctcaagaggcagcacacctcgccggctgccgccgacgcgccgtccgaccccgccaggcagatggagcgcgccgtccgcacgtcagcggtagtcaagctacttacccgatccctgctatctggcgtgctccagccgggccggcacctgaccgtcaccaccggcaccgcctccgccatcgccggcaccagctcgtggccctccacggcagcgctgccaagcagatcggtcgtggcagacctgctcgacgccatcgagacgaaccgggccgtgccgcgctgcggtggatccggtggcgacggcggactcggactcgggtggtggaacctcaacgtggagggtgtaatgctgttgctcagggtcgtccaggcggtccggggaaggaacaatctagcggcgccggcgccagggggaaagaggccacgggacgagggaccagctggccgcgacaccatgagaggtggcgttgtgggaggcagcagcgcggcacggcggtggtgtggcgctggcgggcggccggggaagattgggaatgcaccgttggcgcctgtggctgtggggtccagaccatcatcaaatagatgcttgattgacgatcggtaggggtttagggtaattagggaacggtttgatttgttgatatgctcagactgctatcgtacgcgatgcatgattgatgatcggtatgcttcgagaagtcaaattctttattagttctcgtcgagacca

SEQ ID NO: 140716 - DNA, 107 bp, Zea Mays
gtggcgggttggtgcagtggcgacgcgacgcggtgcaggcagacccgcagtggctaggaagacaagtatcttctctgtaaaaaataaacaagcatgtcaaaaaaaaa

SEQ ID NO: 140717 - DNA, 1658 bp, Zea Mays
gtctcctcccctcccctcggcacctcaatcttttcttccctcatcgatctctactcccctcccctttttataccgcgtcgtcggtccgaggcaaagcttttcctctttctgcgtctgccactcgtccctcctggatcagtgagtcccggagtggaagatccggcctttttagctgcttgtagtggtagttggttgtttctggggagttgcaccaccgggaagcggggcaggagaggagggttggtgggattgcggtgatggactccggcaacagcgggagcctccagtcgtctagcggcggcggcgacgacgagtacgactcgcgggccggcggcggtggagggggcgtcgactcctccgcgctcgccgcactgctccgaccatcgccgtcgccctcggccgccgcgttctcgctccacggctcctacttcggcctgcaagagctgacgtcgtcggcgccgccgcctccgcagcagcagcagcaggcgggtacctggtcattaggggcgttcgctggcgcctcggggctgccctcctcctcgtccccgcgcgtcgcgcaagccgactcgggcacgggcgggcggcagcaggctgctgacaccacgacactgggcggcgcgcccgcgccggcgcagccaccgagggggacgcggaagcgagcgcgcgcgtcgcggcgggcgcccacgacggtgctgacgaccgacacttccaacttccgcgccatggtgcaggagttcacgggcatcccgtcgccgcccttcgccgcgggcgtcggggtcgggggccccgccgcgtcgctccgcacccgcttcgaccatatcttccccccgccgtcctcctccctgccgccgtacctcctgcgccccttcccgcagaagctccctgctgcgccctccagtttcccgcccttcacgacgacgacgacgacggcgtcgtgctcgtccacgcccgtcggcgtcgccaatgccaatgccgcgacgggcacgtccgccaccgcagcagcaccctccaaccctgccgcgccggcagcggcagcggcagccggagcgggcgacaccttccatcatctgacgtcctcggcgcttctccggctacaggaccccagcggcggctacctctccttcccgaacctcctcgacccgcagccgccgtcgtcgcagtgcattttcggcgcggcgggcgggttcgggcaggcgtcgaggctgcacgacccggcgccgtcgccgtcggatttcctggccagcggaagcctcggcctcagtcacggcggactcttgggctccgagggcctaaacttgcaccacccaaggaccgacgacgagctgtcgggtgtggtcgcggccggcgcttcgggcggcagctgcaagctgaactactcccacgccggcgcggccacctcgtcaccgggcgccgacaagccaccggacggcggcggcgccggtgctggcggaaccggaaggccgggacgaggcgagggcctggatccgtggatttgtacatcggagtagggatggcatgctgcttcgtcctgtgtgagctgtgcgatacggcggggacgaacacgaaaccgagccaaatccgccatgcatgagcaatgacaaaacgaaggtctgattataccttttgttacttattgttaaatcatcacttctttgccg

SEQ ID NO: 140718 - DNA, 1941 bp, Zea Mays
attgactcgtcctgaatgcctcctcctaacctttggatcaacaatggagggcggggaacgcacgcgttgcaattgcaattgcaacatccgaacgcgtcggcgagctaggcgagcagatgaaccccggtcactgttcccaacatctccatcgacgaacatttccacgaaaatctcgctgctctcgcgaaaaaaggacgccacccgcccttgcttgctctccagtttgcaccctggaggcaggtgcaggggcgctcctcgccagcgggcagtcaaccgcccgcgtcggccatggcggaggcggggaggcggacgcttgcgctggtgaacctggcggccatcatggagcgcgccgacgaggcgctgctgcccgcggtgtaccgggaggtgggcgcagcgctgggcgccacgcccgtggcactcggcgcgctcacgctctaccgctcagccgtgcaggccgcctgctacccgctggccgcctacgccgccgtgcgctacaaccgcgcccacgtagtcgccgttggggccgttctctgggccgccgccaccttcctcgtcgccgtctcagacacctttgcccaggtagcgatagctagatgtttgaatggtattggcctagcacttgtcaccccggcgatccaatctctggtggcagattgctctgatgacaacactcgaggcgccgcatttggatggcttcaacttacgggaaacattggttcaattattggtggtttgttttccctgatgcttgcacccaccacagtcatgggtattgccggctggcgtgttgcatttcacattgttgctgttataagcgttgtagtcggtgtgttggttggcctatttgcagtggaccctcatttcctccatgttgaaagtggcgagcagctgttacgcaagtctgcatgggcagagatgaaggatttggtgagagaagccaaggctgttgtgaagatctcatcgtttcagatcattgtggctcagggtgtcacaggctcgtttccatggtctgccctggcctttgccccaatgtggctggagttgatggggtttacgcacaacagaactgggctcctgatggtaacatttgcattggcaagctcacttggagggctgttaggtggaaagatgggggatcactttgctactcgcttcccgaattccggccgaatagtcctgtcgcagataagctcagcttctgctattccgttggctgctctgttgcttttggggctccctgataactcttctggttccttgcatggacttgtcatgtttatcatgggtctgagcatctcctggaatggtcctgcaactaacaacccgatatttgctgagattgtacctgagaggtcaaggacaagcatctatgcattggaccgttctttagagtcagttctagcttcattcgctccaccagttgttgggtttctagccgagcatgtctatgggtacaatcccgtcccctacggagctgcagataacaatgttggcagggataaatcaaatgctggcgccctagccaaagctctgtacacgtcgatcgccatccctatgctgctgtgctgcttcatctactccctgttgtaccggacgtacccacgagacagggagagggcaaggatggactctctgatcactccagagctccagcagattgaactggaaagatgtcatgggcaagcggattattattctggaaggaaggacaaggacggctctactgtcttcgatatggattacagaggaatcgacgcctatgatgacgagaagggattaatcgatcagcaggctaagcagagcggcaatgtcaagtggcacaggagtcattcacagaatttgtgacgtttttgccaaagtatcagtgctctcggatctgtacagaaaacgtgagtgagagtgagttacctctcgaaggacgattacatagggttgtttaga

SEQ ID NO: 140719 - DNA, 1987 bp, Zea Mays
atcgacgaacatttccacgaaaatctcgctgctctcgcgaaaaaaggacgccacccgcccttgcttgctctccagtttgcaccctggaggcaggtgcaggggcgctcctcgccagcgggcagtcaaccgcccgcgtcggccatggcggaggcggggaggcggacgcttgcgctggtgaacctggcggccatcatggagcgcgccgacgaggcgctgctgcccgcggtgtaccgggaggtgggcgcagcgctgggcgccacgcccgtggcactcggcgcgctcacgctctaccgctcagccgtgcaggccgcctgctacccgctggccgcctacgccgccgtgcgctacaaccgcgcccacgtagtcgccgttggggccgttctctgggccgccgccaccttcctcgtcgccgtctcagacacctttgcccagcaggtagcgatagctagatgtttgaatggtattggcctagcacttgtcaccccggcgatccaatctctggtggcagattgctctgatgacaacactcgaggcgccgcatttggatggcttcaacttacgggaaacattggttcaattattggtggtttgttttccctgatgcttgcacccaccacagtcatgggtattgccggctggcgtgttgcatttcacattgttgctgttataagcgttgtagtcggtgtgttggttggcctatttgcagtggaccctcatttcctccatgttgaaagtggcgagcagctgttacgcaagtctgcatgggcagagatgaaggatttggtgagagaagccaaggctgttgtgaagatctcatcgtttcagatcattgtggctcagggtgtcacaggctcgtttccatggtctgccctggcctttgccccaatgtggctggagttgatggggtttacgcacaacagaactgggctcctgatggtaacatttgcattggcaagctcacttggagggctgttaggtggaaagatgggggatcactttgctactcgcttcccgaattccggccgaatagtcctgtcgcagataagctcagcttctgctattccgttggctgctctgttgcttttggggctccctgataactcttctggttccttgcatggacttgtcatgtttatcatgggtctgagcatctcctggaatggtcctgcaactaacaacccgatatttgctgagattgtacctgagaggtcaaggacaagcatctatgcattggaccgttctttagagtcagttctagcttcattcgctccaccagttgttgggtttctagccgagcatgtctatgggtacaatcccgtcccctacggagctgcagataacaatgttggcagggataaatcaaatgctggcgccctagccaaagctctgtacacgtcgatcgccatccctatgctgctgtgctgcttcatctactccctgttgtaccggacgtacccacgagacagggagagggcaaggatggactctctgatcactccagagctccagcagattgaactggaaagatgtcatgggcaagcggattattattctggaaggaaggacaaggacggctctactgtcttcgatatggattacagaggaatcgacgcctatgatgacgagaagggattaatcgatcagcaggctaagcagagcggcaatgtcaagtggcacaggagtcattcacagaatttgtgacgtttttgccaaagtatcagtgctctcggatctgtacagaaaacgtgagtgagagtgagttacctctcgaaggacgattacatagggttgtttagatagactcagaagcatcagaacaattcggttatgttcagcattatatatatatatatatatatataataatagtataagacttttggaggaatatggaggtgaatatatatttgtatttgatcagaccgacgaggctactatacaaattatgtaatcagtaaaacaaaaatataaactgcccgtctagctc

SEQ ID NO: 140720 - DNA, 1259 bp, Zea Mays
gcaaaggcatatccagtggcggtcgggcggctgacctggaggaaggtgtcggagacggcgacgaggaaggtggcggcggcccagaggaaggcccccagcgcgatgacgtgggcgcggttgtggcgcgacgcggcgtaggccgccaccgggtagcaggcggcctgcacgatggagcggtacagcgtgagggcgccgagccccgtgggcgtggcgtgcagcgcggcgcccacctcccggtacaccgccggcagcagcgcctcgtcggcgcgctccatgatggacgccaggttcaccagcaccagcgtccgccgcttctccggcggcggacccattcttctggtacctgcaccctctctctctcgcctctcctgttcaggccgccggacgctcagctccggcttgggctatcgctccgctcggaatggccgccattagtcagcaactcagcaagcaagcaagtagccaagccaccggcgggcgatctgggtcttctctcctcgggagaatttttatatttaccgctcgtctttggttcgagtatagccgtgtagcatatgacacgtgggccatcttacatgtgggatgttatgtcagtgatggagtcaggtacgctggcaagttgggcaagcaggcaaaagcgactagcgacgagcgagctaggcgaggtagttggggagcttcccattggttggttaactgaaaccccatgggtcccgacttgtcagtaacacaggcagagcctatacaggagttggatgcagaggacggtgtcgcgcgattgtttttttttgggtgaacgacgagaaaactatttgtacgatgctacgtatgcgcgcgccctcgcgctgagggtatttctgcagtacatacgtttagttttcggactgaaaagcagttaaaagtcatatacaacgacgcagcacaggacaaatttaaatactactagtcggttgatcgtgcattgcgacggctcacaacaatactcacgtaaattatccaccaaaaagatcttaagattttttattattgtctccactctccgcataatattttttttaatttgactaactgatgttgttatttacttcatccaatatgtcttgttacaacacggtcaatgaagggagcgatttaaagagagttcacaatgactgactaaacgaacagaaattatagaatgacataattccaccgtacaaagactaaataagagaaagtttatgagctcaagtttctaaaataagtcacatgaactcaaa

SEQ ID NO: 140721 - DNA, 321 bp, Zea Mays
atggctgcttacaacgcacaggcacaacaagcaatgaactcttggtttccagagcaggcacaacaacaaccatttgttttccctcaatttcagccgccgatgcctcagtggggattacgtgctccgccacctccaccttcacctcagggatccggggtcatgggccacaacacgccactaccggtgataccagcaccaggaggagcttatgcaggggagggagctactccaggagagaatccaaacccgttacacgacttcgtcaacgagttttttgcttctggaggtagtggtcacaactccaacgaccccgatatgtga

SEQ ID NO: 140722 - DNA, 562 bp, Zea Mays
tggcgccctttccatcgacggatagcgaggatggctgcgcagactgttggtaactcagtatccgagtttctgtcgggcttcagcgatgggaagacagactcggcagcgagagtttctttcaagtacgggtgcacgaggggagtctttggcgcgccgtttttctttgtgaacggtttcctcgagcctaggggcggatcgcccatcgactacagcacgtggattggcatcctggacccccttgtttcccagaacggtgaacgggtcgagatgtttacttcgatgtaagtgattgaagtggccttgctacggaggatacgaccgtacagatgtttcgctagtgccgacggcggacaagcaaacaactattatgcaattgcaaactgtgtgtaagctctgcagtggtaaacagcatcccactttgctcgttggactgttaagctagcagttgtgtgctagctacagctagtatatcgggtaagtatgtgaagaaactcttgcattggagcctgcgatatgttaaacttcgcatgatcctatattcgcattcgctcttctccatgct

SEQ ID NO: 140723 - DNA, 179 bp, Zea Mays
gtgagtattttcttttttcacagttccttaactctgctttatgtgctattgaacatgtttttccctagaatttcaatatagctaaaactacctttcattacgagatactaagccttagataaacactataatattagaaccaagcaataacaaaagttgtcatatataaagaagggtcc

SEQ ID NO: 140724 - DNA, 1488 bp, Zea Mays
agactgaagctcaaagctgtctacatgtatgctgctggattttacacatattcaattttcgctcttctgttctgggaaacaaggcgttcggactttggagtatcaatgtcccaccatatagcaactgttgttctgattgttctttcctacattttcagatttgctcgtgttggctctgttgttttagcccttcatgatgcaagtgatatattcctagagattgggaagatggccaagtacagtagctgcgagtggctagcagttgtggcatttcttcttttcgtggcatcgtggatacttctccggcttgttatattccctttctggatcctaagaagcacaagctatgaagtactgctgaccctggacaaggagaaacatcagttttatggccccatatactattatgttttcaactgtcttctgttctcactcctagttcttcacatatattggtgggtactgatatggcggatgctagttaagcagattcaatcgaaagggcatgttggtgatgatgttcgatccgattctgaaggcgaagaggaacatgaagattaactttttaggttgaatgcttaactgaagaactatgttgtgtgatacctacagcaaggcacaccttctgaaaccacctttttccttctaaagaagatttgcagatattagattttattagatcatatcattctttcagcatcaaagatgacaactatcatttgcgagttgccactgaagccgtctgtgctcttggatgtttgcatgaaaacagaagtgaattgtatttttttcccagtcaaccgtcgtttgtaaaagatacagaataatcgcttgttcatccattcttgtaactagacagttgatttgatttcaaatcatgtaatttgctacatcagcttagttgattacttggtgtatcatccattatgatgtaaatgggagtcttgggaagttcacaacaagaatgtgacactatgtactgttatttctcctattattttaataagagcacagagaagtagcccaagtgcaaggatatcatatagctgctttgatgttcagtttgacatttttacatgacaccgtgactccatgagtatcaaagatccacagacattagactgatgtaatatcctgaaagttctacaaaagaatcaatattgagcctatccaaggactgaatgacgtcaagcatgggccaattttacatcatattggctctgtactgtataacaaagaaatgagaggaactccagggtgatctagggcaagtattttgcaatgagcttgtcaacatgaagaaccacatcagaaatgtgagggcgcattacagcttcaggttgaagcatccagataacaaaatggcgaagctcatcaggataaggaggtttgggtcctgctggccatttcaactgcccgtttacaatggcaagttgcagacttcctccagattcaccaagagcatactcaaatggtgaaacattgtac

SEQ ID NO: 140725 - DNA, 2154 bp, Zea Mays
atgtcatcagaaactgcagctacaccttctaaaactgaagcagctagagcgaatctcgtaaaaagaaattcagatgatgttggatgggaatatggtgttcttgttgatgctaacaacaaagacaaggtgaagtgtaagttctgtgacaaggagatgaggggagggatttataggttgaaggagcatcttgcccatgttggaaagaatgtgaagaaatgcacgtctgcaacaccgcaggctctagaggctaaagagaagtgcaagaaagcaatagaggctgtaaaaaggaagagggaggagaagactgttcgtgagctagaacttagagaggaagtgaatgtatctagggttggagaggagtcagaagaagtcacttgtgttggaagctcacaacctcacaaattagggccaattgacaaatggacacgtgctattgatcccaccaaggctgattctttcaaacaacagcagttgaacaaggaactgtggaaagaaagagagcatgagatgcacaagtttattgcaagatgggcctataatcgtggaatacctttcaatgcatgtgacaatgatgagttcaagcaaatgtgtgaagcaattggacaatttggaccaggacttacacctccaactcaagatgcctttcgaggtagtttgctggaagaagaatatgaaagaaccaagtgtttgttgcaggaacgtgaagccgagaagatgaaaaatgggtgctctattatgaccgatgcttggtcagataggaagaggagaagcataatgaatatatacactaattgtgctgatggaacctccttcatcagctcaaaagagatgtcagatgtgtcacacacaagtgaagtcatttttgaattagtggacaaagcaattgaagacattggtgaagaaaatgtggtgcaagtagtcactgacaatgcctctaacaacatgggagcaaagaagctattgcttgtgaagacaccacaaatattttggacctcttgtgcagctcacacaatcaacttgatgctccaaggaattggcaacttgcctcggttcaggaaagtgattgaccaagcaaagtcatttaccatatttgtgtatggccacacaagaacattggagtgcttgagatacttcacagaggggaaagagctagtgggactcattaaaggatgtgaaatcaaagaaaggaatctggccacagctactatattgagtccagccttttggaaggatgtgaagctaatgttggctgtttttgagccattggtcaaagtcctccgtttggttgatggggatgtgaagccatccatgggtttcctttatggagagctactaaaggcaaagagagaggtcaaagaggcctttggcaatgttgagtctcgattcaaagatgttatggctgtaattgagaagaagatgaatggaagacttgattctccattgcatttgacagcttttttgctgaatccacactatagctatgctaacccatcaatctttgatgagcccaaaatgaatgaagccttcatatcttgtgttgagcaattttattatcatgatgaggaccaacaagaacaggctaccaactttgaattgaaaaaatttcagaatagagaaggaccatttagcaagaagcttgcaagaacttttcaaaactatgattacattccaggtagagctttacagaagatggctacaaggatattatctttgacatcaagctcttctggttgtgaaagaaattggagtgggtttgaagggatacacactaagaagagaaataggctgactacaacccgcctcaacaagttggtctatattcagttcaataacaggatgatgaataagagagaaaagattaagtcaaagaaaatcactaatgttctcttgtctagtgatacaactgaagctcaaggttttctccaagagggtggagatgattgtgcacaaattgtctttagagatggggaggaagatgagatggaaggtacagggataccttggtctgttattggagaggcagtgggagcagaagaacagcttgagcctcgtagaagtgcaagagtgagagagctctatgaaggagaagagtttgagtctgaagaagaagagtatgaagatgaagatctgtgctacagtgaagatgaaatatga

SEQ ID NO: 140726 - DNA, 489 bp, Zea Mays
gtttatcttccaggtgcactcgatgatgctgccattacagagtcattagaactacacaaaattaagagccgccaatgggcgattttcaaaacatctgcaataaagggagaggggctcttcgaaggtttggactggctcagtaacacgctcaaatctggaagcagctaaggagcctccgcctcgtcatgaatcatttgctggaggctaaagaatagccgatgcttgcaagtcagcgcgcaaatcccattctctttgttttaactccagaagttctacaccgccatcaattatctgtaaagtgcgtgttaaattttttggatactacattagatgtacccccaggttgagatcaagaataggtctgtggcaacttcagtgtaagtataggtaaattatataagctgaactgactacagtgacaaaacaaagataaaaaaaaatctaggcgagaaataaatttaagcggacacaccaacgacataaacaaaa

SEQ ID NO: 140727 - DNA, 1361 bp, Zea Mays
atcggcacgtcaatttactactagcactctatcagtagtgttcagctgctcccgagctagcgagcgaagcactgtcggcacagtaacccccccctgtgcgcgtcgcgtgccgagtgccgcagagcacgagaagctaggccgcacagcaagcttgacatcatggcagctgctgccactcgttcattgcactccttcctcgcgcttcttctcctgttggcagctgcggccgcggctgcggcgctgtcgtacgaaaccaagtccatagatcctggactcgtcgtgatgacgctgccggagccggtgtccgggccggagagtctcgccttcgacgggcgtggcggcgggccctactccggcgtctccgacggccgcgtcctccggtggcaaggtcccctccggggatggaccgagttcgcctacaactccaagcacaggagcgtggcgttgtgcgcgccggacaagaagctggtagtgccggagagcctgtgcgggcgcccgctgggcctgcagttccaccggcagtccggcgacctttacgtcgccgacgcctacctggggctgctcagggttgccgcgcgcggcgggctggcgcaggtcgtggcgacggaggccgccggggggccgttcaacttcctcaacgggctcgacgtcgaccagcggaccggcgacgtctacttcaccgatagcagcgccacgtacaggaggagcgactacctgctggtggtggccatgggcgacgagacgggccgcctgctgcgctacgagcggcggaccgggcgcgtgggcgtgctccaggcgggcctgtcgtacccgaacggcgtggcggtgagcgcggacggcacgcacgtggtggtggcgcacacggcgctttgcgagctgcggaggtactggatccgcggcgcccgggcgggcacgtccgacaccttcgccgagctgccggggtacccggacaacctgcgcgccgacggccgcggcgggtactgggtagcgctgagcagcggcgtcgcggctgatgaggcggccgccgcgcccacggtcgccgtcagggtctcccgcgacggcaacgtgacggaggcgcttgacgggttcagcttcgtgtccgtcagcgaggtggcccagcgcggcggcgcgctctgggtcggctccgtggacacgccgtacgccggccagctcaagcggcgtgccagctagtgccgtgccgttttgtcatccattgatatcatatatgcagttgtgttgcgtgtgcatgcaccgtgaacaacatttgactgtacgtaccccaatgtcgtcgtcgtcgtcgtctcgtagctagtgttcgttgctcctcctgatgtggactccgttcgcggtaattagagttg

SEQ ID NO: 140728 - DNA, 957 bp, Zea Mays
atgggcgaacctgtcggggtggcagggttagggttcggccatggcccgctctcactgccggaccacctctccccgcagatctctggtgagctccaaccagacctcgacccttgcggcgtctaccgcgacggtgtccaacaccaccgagtcgaagctccctctgccgaggaggacccacagccgcaggtagaggtggtggagtcaaccgagttggagtccgcgcatcctcctctcgccgtctacgacaactacatcgagcacgacctctacagcttcatcccgctgctcttctgcaccgagcaaaccaaagaggaggaggtactcgtcgaagatccctatgcagaggaggacctgcaaccgcaagcggaggtggtggagtcgttcgagtcggagtccgctcctcccgtcgtctacgaccgctacgacgagccgaaccacgacgagattgccgaggtgctcgcgctactagagtacaacaaggggacttcgtcggccacagtcctcgtcgactataccaccaccagcaagtcgcctaccaagtgttcgacgatggatttctccgacgccgacagcgccgcctacgatgagcccagcttccactgcttcattccgccacccttcccgtacgaggttgacgcggaccacccgggctccgaggtcgcagccgtcatggctgccgcgaccgccgtgttccactgggctggggacgcgcactacgcgcacctactgctccaccatgtgcagcagctgttcgacttcgccaacacctactggggacgctacgacgccgcgctgcaggagctagataggtggcttgaaagctgcgatgaacagggtgaatcaattggagtcaacaagatccatgtgcagcctcagttctttgatgtgggcaaggactataactgggcgaggggcatccggagcaccgagatccagctcgctgatggcaagtgttga

SEQ ID NO: 140729 - DNA, 1708 bp, Zea Mays
gggatgcagtgatgcagagacaaccatggccaccacctatgcaatccaaccgtgttgtgagcatcaccgaccgccacaccgaggaggccagccccgtgcgcaaactggttgccgagatcattggtgtgcttgggtcaaaacacatgagaactgtcacgccgcttcctgacaccggtcaatggctgcttctatcattgatcgagaagctccctcaaagcgtggttgatctactgagagctcatgttatcaatctccatcattatctgatgttgtttagcttgctgggattttcagttctgttcgactgtatcaaagcacctgactcgaatgctatctgtagaggcataacacaggatatgacatatgctgctgttcaagcttacacagatgcatataagcctgattgggaacgtatcaacttcattgtagacattttgagatcgactcctggagaagggccttcgtggtaccatcttttgaagaaagttagtggcggctgcaatgatcttaagaacaacgaacacatgcttgttgttgtccttaccaaacagcaagctattaagacaggagacaacttccagatcgtggagtatttcctggttgaggcaatccaaatccagtcatatggagcagagggcaataccgagctcaacctttcaactggtgactacatagtggtaggggtgtcagatgtccaggtctggtgtggctgcgatctgctattccgcattacagactggcacattccatggcatatcatcttggcggtatcaaaaatttccatcggcttgggagccagccgaagctcaagaatggagaaatgtcagccatatgtccagtcgtcagtcacttcccgtgacaagcaaaagttgtttgtccgattctttggtgtgctctacagagtgttcaacaagatgaatttcatgctgctgttggacgacgattgggagccactgatggataattaccggcctttgggaataaaatctctgaggttcaacacattttctcttggaaatatgtcaccaaagatagaagagcaaaaaattcagtacaccattcataccattggaggaagcttaactgcagttcatggattttttgtccaacttggtgtcaatgtggatacgagtgactgggagcttcaagctctgggaagactttcggttactgtggcaaagcaagccaagctcgaccgcttccccatcaccattagtgatccaatctcagctacgttcggtgaaccatttgagaaagccaacccaagccattcctccacagcaatcgtttgtcgagctggttcaggaattgatatggttgttggccttgtttcttctagtctaggtgctgttgctagtggccaaggcaatttcaaagtcttagtttgggatcctggtggttatgcatatcacagcttggggacaagctgtatttcaagcggtggggaatgtcagcatctcagacaggagcaatgagcagacaacgagaacaagccacggcacgtgagagtccatcgtccaaacgccaaggttactgagccaatatgggccaagtagtgggtccgctatctatgggtcgcttgatgttcgagtagtactatataaaagacaaacacttgtgtaataggggcatgaacaatttagctatcaaatatcagataaactcgtcttcctcccagctattcccttctccaagtcttattctcctc

SEQ ID NO: 140730 - DNA, 630 bp, Zea Mays
cggcgggcgtggtggtgcgccccgacactctccctctcctcctcctcgtctctgggtcttcttctgctgctgctgctgcttgtgcagttgccgtccatggccagctgccacgaggagatgaagtccatctacgtgggccagagggttctccccgtgcgcctcggccggccggcgttcgggcccgagagcctcgccttcgaccaccgcggcgacgggcccttcaccggcgtctccaacggccgcatcctccggtggcgcggcgcccagcgcgggtggaccgagttcgcccacaaccacaagcacgagacggtggccatgtgcgcggcgaagaagaggctggtggtgccggagagcgcgtgcgggcggccgctgggcctgcagttccaccgcgcgtccggcgacctctactacggcgacgcgtacctggggctgatgcgcgtggggcgccgcggcggcctggcggaggcggtggccacggaggccggcggcgcgccgctcaacttcgtcaacgccgtcgaggtcgaccaggagaccggcctcgtctacttcaccgacagcagcgccacgtaccagcggaggtacgtacggtccgatcctatccgatcccgcgccacgcacacacaggcacac

SEQ ID NO: 140731 - DNA, 118 bp, Zea Mays
tttctttatcgacttaattaggtttaccagaatgtacgtacacctatcacctaaatccacaagatccataaaagctccccctcccctgagacatgctctagaaactcctaaaaactac

SEQ ID NO: 140732 - DNA, 875 bp, Zea Mays
tggaggggagattagagctcccctctcccccataggaaaatcctctcaccccgtggagtggctgggggatgtccccgccctgtcaggggaggtatcaaggagtccgcctaggcctaatcaaccgtacaaatgtcactggtctgcaactgttcgctgctgcacatgcgcggcttccaatcctgcccaaatcccaattttagctgtacccggctaccccgactacatcatgatcatcctgaccggggaagcgacgggtcggctactgcggtacgacccggccacgggcagcgccgccgtgctggcgtccggcctgtccttccccaacggcgtggcgctgagcgcggacgggacgcacgtcgtggtggccgagaccacgcggtgccgcctgctgcgccactggctgcgcggccccgccgccggcaccaccgagcccttcgccgacctgccggggtacccggacaacgtgcgccgcgccggcgacggtgggtactactgggtggcgctcaaccgggacaagtcgtggctggagcagggggaccactcccccggtccgtggctgccgtcagggtccacgctgagacgggcgtcgtcgtcgagggcgttgcgcgggctcggcaacgccacggtcagcgaggtcctggagcgccccggcggcgcgctctggctcggttctgtcgacacgccttacgtcggtctgttcaagatcggcctctagctagcagcgtacgtgtgtagccgtgtatgtctgtcgtttgtcctaaattaagagtagtcgatcttctatctgtcgcacacgtacgtgtgacagcaatgtaatatatgtgcactagtaatgtcggacgcctatctataatatattgtcatcgtagaaatgc

SEQ ID NO: 140733 - DNA, 525 bp, Zea Mays
atggagatcagcgaccctcggcaggaaagtaggaaaccgaacatctccaatctccatggcggagaaagctcggatggcatcgtcgcgggatatcggatagcagagagcgcagaagcggaagagccgcgccccgcaagcgaaccggcgagaatgagaagcgagcccagaaggtgtgtgaacggtgaaccccggcagcgcggcggcgaagaggaagaaccggagggagggcacgggaaggttgcggcagccgccgctgcggacgtgaggcgtggcgcggaggtcgtgccccggcccgcgttagttgctgagcacacggcagagcgcgccgacgagccgcggatcggggcccggggccggatcgggccgcggatccagctgtccggcgggcgaggcggagtagaagccgcacaggaggagagaacgcgggcttcgcggcacggccgcagcgcggagcctggcggcagatttcatctcgcgccgatgtgggcgcagggggttgttcagtgggagcagattcgcgggtaa

SEQ ID NO: 140734 - DNA, 684 bp, Zea Mays
ctgtgaacccgaagtgccggcaccgccgctgttgcagaagttgcctcttttttacgtcttgtttctcctccaccccggcgacgcgaatggagaagggcagtggaggcagcaatcctccgccgccaccgctccacatggaggacttccaactggaggggaagaagcccgtcaagaacccctttgtgcccatcggcgcactggttactgctggagttctgactgctggtctgatcagtttccgatatgggaactctcagctgggtcagaaactgatgagggcacgtgtagttgctcaaggcgctacagtcgctctgatgattggcagtgcttactactatggcgatcaaatcaagctgttcaagaaagggtcgagcccatgatcttcccatgaatattgctgtttttggtgtatggaggaatgccttgtatacgcataaatttcacctggactctgctgcccctttttaacatcattttggcctgacacgtggtagctaacaagaaatcgctgttggtccgatcggcaggattgaaaataaataattttgtttgttgatttttgtcaggatttgttggttgattaattaggctatatgcatcaattgttatatctttgtacaaacacgcgttctgttgtctgcaatcagcggctgaagtgaccattttgcaattctggctagagat

SEQ ID NO: 140735 - DNA, 97 bp, Zea Mays
tttttgatattttattatggggtaatggaatacaaacgctgctctctaactgaaattgttgttgagttgtatatgcttggatggaacaaaataaaaa

SEQ ID NO: 140736 - DNA, 1875 bp, Zea Mays
ggctcgctccaatccttaacccaatcggttggtggttgcgtcgcgttgtgtcggaggttggagttggagcgtctcgcgtgcgagaggatctgagcggagaaggccatggaggagagtaattagcggttgctgggtcgggaggaggtggtgtggttttgatcgtagtcgcgtttgccggggctcgatttcgatcagaaaactttttttaccggatattcttgggtgggtgtgtttttgggccgcaaattgttatcgccggtgttcggggctcgattttgaagaagaacccaatttattaggggggaaatttcctgcttttgttttcggggcaatggttttggactcccagacgcttcggattagagaatttttgccccaataacgagccattttttcagttgtgctactcgtcaatcaatccagtgattctgaactctgaaagaaagaagaagctttcctaattttcgtgctcactgtgtccaaaagctttccgttggatctacttgtgaatcggttccttttttttttaatctgagatatccttgtcgctttaggttttcgactcggcagatccaagggaacgacgaatttgcctgatttctccgcgatttttggtccgatcgagaggctccaagcctctttttttctcgcgaggagaagcaagggttttccttttttttacgccatgtccatggcgctgagccgcttcacgcaatggctatggccggggagcgccgcggcgccggtggccgcccacgagcaccccaacgaggggctgacgagctcctccttcccggacttcccctccggcttccgggagcccgacaccgtcacgttctacaccggcaggggcgccggcggccgccgcgcgcgcccgaggagggtcaggaaccggcgccgcagccgcggtgagccccgtgtcgaccgggagtacgacatggtcatcgtcccgtccgacggcggtgggtgcctctccggctctgactcggacgactccgactggtccatcggctggctcgagccacaggcaccggagcttcagacggatggcgaccccgagaactgcttcgccgtcctcgtgccctgctaccgccacggccgccaagagcagcagcccgggaggcacgagggcaggtttcttggcgccggcaccctcaccaatggtggattctctgatggaaagaattttgtagagcagtggctttcttctctccagaactaataccgtccgacctgtcctagctaccctgtaaatagtatcactctgttttgttctactacgtttgtcctagtcgcagaatgtatcgatgaaggaagacatggaaaagccctaaaaaaagaaggaaatctaaaaagaaaaatgaggagcagtgggattctgaagcggcaccaaatgggtatgtccttcctgaggtgttcccagaatcccaggctattctactcttgcaaagcaatgcgaaagctgaactacacaaactgcacgccatcaaaaatgattttgccgtcctgatatgtgcggagtgctaacctgatgattgataacacgtagagatgaactgctattccattgttaatttgtcccacttgctcgtggacctcgaattctactgcatgtacattctgttcttgcagtgtatatatatatagtcttgcccagagctgcagtggcgtgattgttcagtctgcctgtatatagtgttcttgcagtgtatatagccttgcgcagagctgcagttgcgtgatttagtgtgtggtgcgtgtgtcctattcttgtacatgggaattgtattctgatgaatgaatctatgaatgaatctatctatctgctgtatacaaattttgtgacaatgtgagctcaattctgctgagtcttcc

SEQ ID NO: 140737 - DNA, 807 bp, Zea Mays
agcatttctagggttgtaattactataaatgttttgattgaatgttttgtcgcagagaagctccttagtgaaaaaatggaggtgatcaaggtgtaaagggattaaagtcccttagagttagggatctctcttatcgcctcactatatatcttacttggtcctttatcattttcaaatgccaatcagtgaacaccaaattttaggtttgttaaatgcctgttaccagtcagaaatgagatattatcttcagatgataaataaaaaaactgggaactgggaattgtaccatatgttgtgtacttagttcctatctaattctaattccttagtttattcttcaataacaaatttctaggaggaggacaatgcactctttctacagtgatgttgtgcgccttcagggtctaagggaaaggttttcacattgcaactcaaacatggacgcgaaccaggtacaacctgtgttggctccagaagcatctgaccctcaacattcatggctagactgcagattggatattagcaagcgcagccctaaacaacttggaattctccaaggttggtcgtctctatggttggaagaaatgtccaaatgctcctattgtgatggctttaaagcaacaaaatgaagatgtgaagagggagtttaatacgagactcacatatattgttacacaattcaagatggtgatgctgacagctcgttggacaggctgtggcagaagaaggctgagatcaagcagtaggtcttgcacgtagttccaccaggaatggactcttgagggatactgtgttagctatgtttta

SEQ ID NO: 140738 - DNA, 2171 bp, Zea Mays
atggcgaaggctgtggctgtcactgcacttgcagcagcactcgtagtgctgctgctgcttgcatgctgcccatgtcgggcgcgagctgacgaatcggccaacgtcacggcgtcgctcgtcagcttcttgaccgcgctggccggcgacgacggcgggcagacggcgatcaggctgaggtggaacgcgtcgatcaacccgtgtgttcccggcaccaaagcctcactgtggagcggaaccgtccagtgcttcgaccgaggcgtaaacgacgggcacatcaagaggatcgacctcgacgagcagggcctgaacggcaccatcgacgcggcgctgctctgcgccgcgccggctctccgcgtgctgaactttcacaacaacagcctgcgcggcggcctccccgcgggcatctcggcctgctcgggactcacccacctggtcgtcagcggcaaccggctctcaggtaacctgccgtcttcgctcgcccagtccaggagcttacgcgtcatcgaggtttccggaaacaacttctccggcgagctccccgggggcctcggcaggctcaacctagagaggttcttggcgaacgacaaccatttcgacggcaccatcccggacttcgacctcgacagcattgtgggcctcagcttcgacgtgtccaacaacaacctcaccggaccaatccccaaggacgctgtcaggttcggcaaagggaggttctggcctaacgccgctggcatatgcggcgagcccttattcgctccttgcccgtcgccgacgccgcccagctcgggctccgaggccgaagacgacgggaaggggggtgacaaggacaaggagaagaaaagaacagtgcctaagatcgtcatgtatctcggctacgtcctcctgggcgccgccatactggccttcgtcctgtacaggttctgcttcaagaagaagcggagcaagctggggcggaattccaagcccagcggaggcagggccgtgtacgacagcagcaggatgacgacgaccacgaccacgacgtcggcgaccccgagcaagacggcctattcgctgccgacgtcgggcgagcacagcacggtcgccgccgaggcgggcgcgccgtcggcctcgctggtagtgctgcgccgatcgggcacagcctcgatcacgtccaacgccgcggcggcggcggccaagaacctgcggttcgaggacctgctcaagtcccccgcggagctgctgggccgcggccgcttcgggagctcgtacaaggtggtggtgcccggcggtgcggcgctagcggtgaagcgggtgagggacgcggcggtggacgaggacgagttccggcggcggatggagcgggtcgggctcgccaagcacccggccgtgctaccgccgctggcgttctattgcgccatgcaggagaagttgctggtgtacgagtttcagagcaacggcagcctcaccaagcttctgcacggctccatagagagcagccaagcgccgctggattggccagcgcgcctccacatcgccgccaaggtcgccgacggcatggcgttcatgcacaccaccctgcgcggcgacggcgggaccaccaattcctcgtcaggcggcccaatcgcccacggcaacctcaaggcctccaacgtcctcttcacggccggcatggacccgtgcatcagcgagtacggcgtcaccgcgccgggcagggacggcgccgcggcgttccgcgccgacgtgcgcgcgctcggcgtgctgctgctcgagctgctgacggggaaggcgacgtccgcgcagggcgacggcgcggagctggcgcggtgggtgacctcggtgatccgggaggagtggaccgccgaggtgttcgaccgcgcgctgctcgccggcaccggcgtcgggtcatccgagcaccgcatggtgcggctgctgcaggtcgcgatgcagtgcgtcgacgcctcccccggctctgccccgccgccgaccatgcgggaggtcgccggcatgatcaatgccatccgcggcgacgaggacgacgggtccgtctccttcggggcatgatgccatcaaacgaggagcaaggaccggagaactcgactcgtcgtcatcgaccacagcgctgcggtactctgcgagagatgtactagtgttaaaatctcttgtggtggtgccgttacacataaacatgt

SEQ ID NO: 140739 - DNA, 1025 bp, Zea Mays
atgtcctccacgctatctacttcttcccctgcaccgattccgctacaccatgctgccacgattcggctcacgaagagcaattatcttctctggcgtgctcaactcatgccctatcttagaagcgcgaagctcattggcttcatcgacggatccacatctgcaccggcccagatgattgcctcctcgacggcgaccggtgctgaccaagttcctaatccggactatggccgttggtgcgatcaagatcagcatcttctaagtggtcttctctcaacaatgactgaagacgttctgcgtgacgtgatctctgccaacacctccaaagaagcctgggatattcttcaacggatgttctcttcatccactagagctcgtacggttcaaatccgtgttgaactcgccacaaccaagaagcatggcttttctgctgctgattattttcgaaaaatcaagaatcttgccatcgagatggctgctgctgatgctccattgcgtgacgatgaggtgattgcctatctccttgctggtcttggtgctgactatgatgcctttgttacatcaatgaccacaaagtgtgagaccctatctcttgatgatgtttatgcatacctaatggtttttgaagcctgtcaatctcagcatcaggctgagatgcagctgcatactggatcctctgttaattatgctggtcgtggtggttcctcgcgttctcgtggtcgtcctgaccgcggcgatctcgcggtggcccctttccccgttcaggtgacaccagaggtgatcgtcgcaatccctctcgtcctccatgccagatttgtggcaaagagggacacactgtcgtgcgttgctggtaccgcatggacgcatcctataatgaagatcccccttctgcagcgttggcagccacatcttcctacaagattgatcccaattggtacagtgataccggcgccacggatcatattacaagtgatcttgaccggcttgctcttcgtgaacgttatcatggtggtgaacaagttcaagtg

SEQ ID NO: 140740 - DNA, 1770 bp, Zea Mays
gcagcagcgtcagctagcctaccagtacgatacggctgcgtgcgacgagcgagttggtaccaccggctgcgagcgacttgccatatatcatatccatccagagctcccctggccctggttgacttgtttggctaggtgcctccttccattggccatggccatggcctccttgtcccggtttggtgcctgatcgctcgacctcaactgactcatcgctccgtcgtctataatatatagctgctgctgctgctgccgtcccggtcggacagcggatgagtgccgctgcactggtggcgatccagctgggagcgaaaggggcgcaagcaggaagaccgagatggcggcggcggggccgaggagggccggcgcccggttccttctcgcgcggggcatcgggagcagcgtcgcccatgtgcattccttgggccgcggcggcggcggcgttacaatgccgcgcgcgttgctggcggactcggcgcccgcgtccgcgccggcgatgaccgggagggccccgcccgcggcctcgtcgtccgcctccgccgcggcgtcgaggatcacgccggcggtgctgttcgtcacggtggtcctggccgtggtgctgctcgtctccggcctgctccacgtcctgcgccgcctcttcctcaagagccaccacgccggcgccggcgccggggagcgccacctgcagcacctcttcttccccgcgcacgacgacggcgcgggcgccggctccgggtccggctcaggcgcaggcggcggcggcggcctcggccaggacgccatcgacgcgctcccggagttcgcgtacggggagctgtccggaggaggcgccgccgccgccgcccccgcaagcaggaagggcaaagagaaggcggccgggccgttcgactgcgccgtgtgcctctccgagttcgcggaccacgaccgcctccgcctgctcccgctgtgcggccacgcgttccacgtggcctgcatcgacgtctggctccgctccagcgccacctgcccgctctgccgcaccaagctctccgcgcgccacctcgtcgccgcagccgcggacgcgccagcgccagcatccgtcgccccggacgtcggggagcagaggccgcagcgggaccacgcgccagaagccgccgaggccgccagcagcagcgtcgtgctcccggttaggctcggccggttcaagaacgccgacgccgaatccgccgaggccgagtccagcaacggcggcgccaccagccgcgtcgagcggcggaggtgctactcgatgggctcctaccagtacgtggtcgccgacgagcacctgctggtctcggtgcacctgcggcacggcaccagcgccgccgtagccgcctcgagcggcgtcgacggcgacgaccggcagcagcatcagggcaagaaggtgttcgcgcgcggcgacagcttctccgtgtccaagatctggcagtggcgcggcagcaagcggctgccgggcgccctgtgcgccgacgacggcctgccgtgggcgccggccaaggacgatcgcgccagcgcctgcacgaggcaacgcggcgacacttgatcattcattcacacggtagtagacagacagacagccgacacacacacatgtatgtgtctagcttctccttttttttcgctagcggcttggtagaattttgggtgatcttgatccgaatccttctgtacaatatatgtgtttcattcaggatatcgtagtttcatgagtcatgactgacgttcacataaagcccatagcttttaatttgt

SEQ ID NO: 140741 - DNA, 1212 bp, Zea Mays
cccccctgcccatctcctcctctctcaattcttgcagccacaccaccaaaaccctagccgcccccctcccaatctcctcctcccaaggtgccaatccttgccgctcggatcatcgtcacgtggtgcgagtcttcaatcgttttggtggagggaagaagggaggaaggaaagggggagaatccaaggtggtggactcccagatcattcttagggatttgcccaaacttccggtgaaggcaagtaaaactgtgatggttattccgtctgtcagatgaggagtcttatacttgattatgttgtgctattgtgttcatattcatattttcttttgagtaccatcatttgaaaatgttcatgtttcatggatttcatatgttgaatttgaggtttgattatgttactcaagtggttattatgtggaatcggtggaagtaaatgtctagcacatttttatttgggaagaactcatgatgtcgtcatgcataatgcactcatcatccattgcattgaagtttcgtcgcgatcttatggtccgaccgtaccggtacattgagcatcatatgttgcccgagaaggggtatggtgcagcttcatatccttagagatatggaggcagaagtcattattgcatttgtagccatgtgcattcatgggagaggtgtggaatctattatgtggatgtggataatttagacttgtgcatggtgattctacttggcgttgagtttttagttacttgtttacttgctgcaatttaatgttcaaaagaaaagaaagaagttctgaacacgtggttgtgtaagcacagttgatttacaatgtcctatttgttgttgttatgtttacttgctgagatgtgttatctcacatcttgcattgtttgatgcaggcacctaatttctgctttgggaatagagggatgtagcagcacggccactacacctttaataaaggaaccaccatttaataatgttgttaatcagagttggtcaagtctagtgaattgctttgttcttggttgagcgtttattttggggtgggctgagtttcttatcccatttgttttacttcagttggggcctaaatgagctttaccactttgcatctagtttctactatgtgaatgatatgtctttatatcctgtatgaacttcatgttttcccctccttgttatgttagtttcaaaggaggtgctgccggattttgctata

SEQ ID NO: 140742 - DNA, 2550 bp, Zea Mays
atcgcctaacacgtgtcagcacatccacgtggcatgatcccaagcctctgcctttgcctcgcaacacgtgtgccacctcctctataaatatcggctctagcgctacgaattacggctacctctaaacttctcttcctactttaaccgtttaatgtgcccccttcttcccgttacgattaccagcgtcaccgccaatgccgccgcctccaccaacgggcgaaccgaagcgccgccggctgctatccctcatggcagtctacccatgcgagagcatcgcgccggcgcctctgttcagctcgcttctcgcacttgcggccgacttggcgagccaagggctcggcgccgacgccggcgccttccctgttctccggcgcggcttacggcaggcagtgcggattgcaggcctcctcctcgcgtttctggaggaggtccaagacgtgtcagtgacgaagacggcacctctgccatcatcggcggtgctggggctcacggagctgcacgtggccatgcagaagctgcggttactcctcacggactgcgcgcgacggggcgcgcggctgtgggtgctcgtgaacgccggattggccgcgtctgagctcagggtgattctcgggtccgtcgctgcggccatggacgcgctgccgaaggacgtcgtggacgcgtccgtggaggccggggagctcgcgcggctcatgtcggagcatgcgtggcgcgtggccgtgcgtccggacgccagtgacgagcgcgcggcgaggagcgtgcggtcgatactggagcagttcaagagcggcgtctcgccggacgccgaggacgcgaggcgggtgctagagcacatcggggttagaagctggaccgagtgctccgaggagattgccttcctggaggacgagctgcgcacgcggttggacggcgcaggcggcgacagcagcagcgacgcggtgctcatcaacagcttaatggcaatcctggtgtactgccgtgtcgtgctgttcgaccagaccgacgcgaatccaaaagcggacgcggcgtcacggccggcgaggtgcccggactggctcagaccggagatgttgcagtgcccgatcgcgctggacctcatgacggaccccgtgactgtgtctactgggcagacgtacgaccgcgagtccatcacccggtggatcaaggccggatgccacacgtgcccggtcaccggcgagcggctccgcaccgccgacgtcgtgccgaacgccgcgctgcgcgggatcatcgagcggatgctgctcagcaacggcgtctcgcttccggacccaagcagctcagggcaccgtcacggcgcgctcggcaacacagccgtgccattcgggccggccgccgcgggcgcggcccgcctcgccgtcgcctacgtcgtggcccagctctcgatgggctcgacggcggagcgcaggaaggcgacttgcgaggcccgcaagctgtgcaagcacaacatgttctaccgcgcgtgcctcgtggaggccaacgccgtgccgtggctgctgtgcctcctgtcctcgacggacgcgtccgtgcaggacaatgcggtggcgtcactcctgaacctgtcgaagcacccgcggggccgggcggcgctcttcgaggccggcggcgtggggctcgtggtggacgtgattaacgtgggcgccagggcggaggcgcggcagaacgcggcggccgtcctgttctacctgtcgtcgaacgcggagcacgccgaggagattgggcgcatcccggaggccatcccgactctggtgcagctgatccgcgatggagcgcaccgcgggcgcaagaacgccatggtcagcctctacggtctgctccagtgcgcgagcaaccacggcaaggccgtcggggctggcgccgtgtcggctctcgcgggcctcctgtccggcgaccgggacgacctcgccagcgacgccgtgacgctgctggcgaggctcgcggagcagccggcgggcgcgcaggccgtgctggcgcggccgggcctggtcgcccgcgtcgtcgaggcgctcgccacttcggcgtcccggtcggggaaggaccactgcgtggccctgctggtctcgctgtgccggcacggtggggacaaggtggtggccctgctggggaggatgccggggctgatgtcgtcgctgtacacgctggtggccgacggcagcccgcagacgtgcaagcgggccagggcgctgctcaacctgatccaccgccattacgagatggacggccagcagccgacgtcggaggtgcccggcgagcgtgtcgttcgcgtgctatagccgcagattccggacctgccgtaagtacagtaaataggtgtagatctttacggtgtgccatttgagaccatttcttgttttctgttctcagctcgtgttttagaagagctgagaacgatttttgctgcttccgttttgaagactgctgtagtcacagacacacacacagacgcgagagtatagataaatatgtttgcgagcttgagacttatagcagataatgaaagtgtgacagcatgggattactgtttgcaacgct

SEQ ID NO: 140743 - DNA, 459 bp, Zea Mays
atgcaagcagtaatgcaggggcggatgcggacgacggatcaccggatcggagcaccgagcacctcgtgctcgtgggcgctacgtggcactgcgccaggggcggatctccaaagagagtttgaggatgatccagatctttatgtgctgaagcctttgaagcaccgtgtagacttatatctcaaacgtatgcaagtaaaagctggttcagttttcaacaacattctgatttgtgatgaccctgagtatgcaagaaaggttgttgaggaaacttggggtgcaaatagggaggctgaaaaggaagcttttgaagaagctgaaaaggagaggaaagctagggaggataggccagacagagaaaaacagacttgctctctatgtctagcgcgtcgctctgagatcacgcaccggcgactccgcaccaccattgcagttcgtcgtgaggtcgggccaacaatctag

SEQ ID NO: 140744 - DNA, 1750 bp, Zea Mays
tcccaaaaggccaaaacacaagcctccaagaactaaggccaagagaagcaacaacggccatgactacatctcctgttccttcccaagccgaccacgttgccatcttcccgctcatggcgaaaggccacaccatgccgctgctggacctcgcctgcgtcctgcgcggccggggactcgcagccgtcaccttcgtcacaaccccgggcaacgccgccttcgtccgcgccgctctgcggcagggcggggccggcgacgcggccgtcctggagctggcgtacccggccagcagcgcgcccgcgggcggtgagggcgccgagggcgtcgcctcggcggcctccttcgctgcgttcgcggaggccacgtcggcgctccggccgcggttccaggaggcgctcgcggcgctgcgcccgcccgcgagcctcctcgtcgccgacggcttcctgtactgggcgcacgcgtcggccgccgcgctcggcgtcccgagcgtgtcgttcctcggcacgtctgcggtcgcgcacgtcgtccgggaggcgtgcgtgcgggacagaccgggagccggtgccgacgtcggcgcatccgctggcgccaccacgtgctacacggtgccggagttcccgcacctccagttctccctccgcgacctcgtgccgccgccgccacagatgatacacctggatgctaagatggcggcggccgtcgcggcgagccgcggcctcatcatcaacaccttccgtcaactcgaaggccgctacatagagcactggaaccagcacatcgggcctagggtctggcctataggccctctgtgtctggcccggcaatcctactcccccggcggcaccggcagtcaacaacgacacgacgccaagccctcctggatgcagtggttggacgacatggcggctgccgggaagcctgcagtgtacgtctcactggggacgctggcatccatatcacaggcgcagctgaaagaggtgtccgacgggctagacagtgccggggtgaatttcctgtgggctgtgcggcggcctgacaacgccgatgatcttggcacggggtacgaggaccgtgttgttggacgaggcaaggtggtcagagaatgggtggaccaacggcgggtcctccggcacccaagcatccgaggatttctaagccactgcgggtggaactcggtgctggagagtgtcgccgcgggtgtccccttggtagcatggccgtgcgacttcgaacagcctatgaacgcgaagttcgtcgtcgatgagctgcgcatcggcgttagggtccataccagcgacggagcggttggaggtttggtcaagagcgaggagatcgcgacggcggtcaaggagctcatgtttggggaggcaggaaaggcgatggcactgagagcgaaagggatagcagcacaggctcggctagccgtgtcagatggtgggtcgtcatggaaggaggtcgaggagatgattagtgagctacgtctacgtggggtagatatgaatggaaaagccaacggaggtacctgtgcaagcatactgtagtaccgtacaagggataactcaaaaagaaatggtgtgttggatctttgcactactttggttctgacttctgaacctctgctgtagctccttttctaaagtgctttttgtaaagaaagttctcctgtggccaccagagcaaaagcaagttttcaagccgaatttgtacgattggaaaacaaatctatgaattggatttggaaagactataacat

SEQ ID NO: 140745 - DNA, 1377 bp, Zea Mays
atggcgaaagctgctagtggagacagtgaaggcaaaggaggtggcgctgcgatgttgagggcgagtcaggcgacagagaagaggaggcgacggatggtggaggcatgggtggcgggaagattagccagatatgcaagacatggagcagtcagccctttgatagctcgctacaggcagagtctttgtcgaggagatagaaaagggacgagacttggagttatcgaatccaagagtgattggaatttacctggggtttcacttgtgcatcgttgccccttcctccctggaggcatctgcaccaaatcagatggagaggctgaaggattggaggctacgaagccgctagttccaaggatgggaaggctccacgcacgggcacatctctcttatcctgttttccaccgcccttggtatgttcctgaagacaccaccgcccagccctatctcttgcacgcacctcatcttctccatcccctccccatctctgaccttcccaagctagtcgaaggtttgaagcgtctagcaaagtccgatcctatggttctctgtacaatggaagaatctggtgagcatatcattgctggagctggtgagcttcatcttgagatttgcctgaaggatctgcaggaggacttcatgtgtggtgctgaaattattgtttccccacccgtcgtctccttccgtgaaacggttcttgagaagtcctgtcgtactgtcatgagcaagtctcccaacaagcacaaccgtctgtacatggaagcgcgccccttggagaagggtctcgctgaggccatcgatgacggccgtattggcccacgtgatgatccgaaggtgcgctcccagatcctttctcaggagtttgggtgggacaaggacctggccaagaagatttggtgttttggacctgagaccactggcccgaacatggttgtcgatatgtgtaagggagtacagtatctcaatgaaatcaaggattctgttgtggccggtttccagtgggcatcgaaggagggtgcactggctaaggagaacatgcgtggaatttgctttgaggtatgtgatgtcgttcttcatgctgatgctatccacaggggtgatggacaggtcattcccactgccaggagggtcatctatgcttctcagctcacggccaagccaaggctgctggagccagtgtacctggtggagatccaggccccagaaaatgcactcggtggtatctacggtgttctgaaccagaagagaggtcatgtctttgaggagatgcagaggccgggcaccccgctctacaacatcaaggcttacctccctgtcatcgagtcctttgggttctccagccagctgagggctgcaacctctggtcaggcgttcccctag

SEQ ID NO: 140746 - DNA, 292 bp, Zea Mays
tacaataacagtaagaatattttcaacacaaaagttctctcaaacaagagaaagaaacatacctttttcatatatagatttagaatatgttccctatgctaactgggttcattagttatggtcaacagatagaaatagtaaatttgaattgagacacatattctatgacagattttaacttaccctctattttcgtacctttagtaggcttagtatttccggtaattgcaatgacttccttatttctttatgtgcagaaaaataagattgtctagaaacgacggggccaaat

SEQ ID NO: 140747 - DNA, 2464 bp, Zea Mays
cttcttctctcatcttcctgctcaacatcagtagcagctttagctgtagcagcgccaccggccaccgccacgccatggccaccacgttgcacaagccccttggggcgatcaccgttgacgacctcgccgcggcggcgcctgggtcggacgccaccgcgctccacgcagcgctccggcgcgcgctcgactcgcacggacccaccgaagtgtggggcgagctctgccggtccgtgctctgtccgtctgtccccttcgccgtccaccggatgctctactacggttgcttcgccgggttcccgtcccccacgccgccggcctggacgcccgaccccaaggagtctgtcttgaccaatgtcggccgtgtcctcgaggcgcgtggtaggaacttgatcggcgacgcgtacaaggatcccatcaccagcttcccagacctccacaagttctccaacgagaacccagaggcgtactggaagatggtatttgaggatatgggtatccaattcagcgtagagccatcctgcatctggagagagaacactgcatatcctggtggcgagtggctaccaggcgccgagctcaacgctgctgttaattgcttgactgctaaacccgggaggagctccgacggtccggccattgtatggagggatgaagggaaggactctgatcctcttaacttcatgtctttggaggacttgaggaagaaagtttgcctagtggccaatgcaattgatgccctggaactgccgaagggatctgcaattgctattgacatgcctatggatgtcaatgctgttgtgatctaccttgcgatcgtgttggcgggatatgtggttgtctcaattgcagacagttttgctgcacctgcaatatcaatgaggttgaagttatcagaagcgaaggcaatttttactcaggattacatccttcgtgatgacaaagaactaccattgtacagtagagttgtggaggctaaggcccctatggcaattgtgattcctgtaagggggtctttgctaataaagggactacgtgttgatgacctttcctggcaagatttccttggaagggttaattataccgaggctgaaaattacactgctgttaaccaacctgcctatgcattcaccaatattctattttcatcagggaccacaggggagcccaaagcaattccatggacacatataacacccctaaaggcagctgccgatggatggtgtcacatggatattcgtaaaggagatgttgttgcttggccaacgaatcttggttggatgatgggcccttggcttgtttatgcctccttgctgaatggagcttccatggctctgtataatggctccccaaatagttcaggctttgcgaagtttgtacaggatgctaaggtaacaatgcttggactggtacccagcatcgttcgtacttggaagaatacggactgtacagctggactagactggtcctccatccgatgctttagctcctctggggaggcatccagtgtggatgattatttatggctgatgggaagagctggttacaagccagtaatcgagtactgtggaggcacagagattggtggtggatttgttactggatcgatgctacaacctcaagcgttgtctgcattcagcacacctgccatgggttgtaacctgttcattcttgatagcagtgggaatcctttgccacaagactctgtcggcattggtgaacttgcacttgatccaactttatttggatcatcaacaacacttctaaacgctgatcatcaggaggtttacttcaacggaatgccagaatggcacgggaaaatcctccgcaggcatggagatgaatttgagcgtacttctgacgggtattatagagctcatgggcgtgcagatgatacaatgaaccttggtggaattaaggttagttccattgagatcgagaggatctgcaacagagtacatgacgccatccttgaaacagcagctatcggggttccacctgtagggggtggccccgaacaactaaccatagccgtcgtgttgaaggaccagagctctcaaatagaggacttgaaccagctgaaactagcatgcaacatggctctgaagaaactgaaccctctcttcaaggtttcctccgtcgtcatcgtcccgtccctccctaggaccgcctctaacaaggtcatgaggagagtccttcgcaaggagttcagccaggccgcccaggcaaagcattcaaaaatataggtagttattagaaataattagtgttttctgctgcaaatgcacctgcagaaagagtaaaacaccaaactgggcatatcgggaagtcctgttgtttgccaccaaaacggataaatgagatgtacttagatttcgggaaataagggagctgtattcctgccaacgttcagcactcacttgatgtgctgcactaataaaacactaatgcaatcacttgcattaga

SEQ ID NO: 140748 - DNA, 1303 bp, Zea Mays
gttcctgtctccgtctccgcgtcgctccctatccaatcttctcctccctcccttccccgcgtcgcggcaagacgacctcgccgctccctgcctccctctccccgccgcaggtgctggagatgcaggcgactgccgcctccttcctcgcccgcccactcccgcggcttcgccgcattggcagctggggagcggatgcggcggtggtgcgtgagggcgttatcgcgctccctctgcggctgcgggggccgcggtgctccattagcctctccatcggcgccggcgccggcgctggcgccgaagctgaccacgagttcagctacgagcatgttccggtgttccctagataccgaatacgagatccctacaagcttcttggtgttgatcgtgacgcatctgaagaagagatccgaggtgcgaggaatttccttattcaacagtatgctgggcatgaaccgagtgaagaagctattgaaggtgcttatgagaagataattatgaagagctaccagcagcggaagaagacaaaaattaacttgaaaaccaagttaaagaagagagtagaggaatccccttcatgggtcaaagcacttcttggttgctttgaggtgccatcgatggatattatctccagaagattgtttttctttgctttcattgctggatggagcatagcaacttctgcagagaatggacctgcgtttcagctcgcgatatcgctattctcatgcatatatttcctcaacgaaaagatgaagaaccttctaagggcatcaaccactgggtttggaatacttgttggcggttggatcattggttctctactggttccactggtcccaacattcatcatcccaccttcatggtctctagagctacttacctcactagttgcttacattttcttgtttctgggatccactttcctgaaatgaatctgtttcaatcttgtaactggaactgttggatcttttgagagggaaattacgatgactgatctctggatttgagttttagaaattttttgcttgtactggcctcttgagattggaatactggcgttgttgtgggcttgtgacataggcttcccttttgggtctttttttcatctgatgtaaacagtttttctccctgtctggtgacggtgcagagacaaatgtggcatcggtacccatatctgggccgtgtttttgacagagatacgaaactggccagaatgcattggtaggcttgattactctgtttatctctgctgttggatattatattttctattattggatcgtcatggttggatttggacttt

SEQ ID NO: 140749 - DNA, 1105 bp, Zea Mays
acccatctctgctgctgtgatctctttcctgcctcacactcttcttttcctactagtatttgtatttcctactaggctcaatcccagtcaatcatagagcagagcagcccgtgaccccgtgggcgtgtgctgtgactgcgaggagggaggaggaggaggaaaaagagtgccgccgtttcctgggggcagccagattccattccttgcgcaggagtactacggctactccttgtactatttcctagtagcaggctgccgtggaatcagctgcctagagcaatgcgagattatcaacaccagcacagcctccctccctcgctgccttttcccactcatcccagcgatcgatattcctccttccttccttccttcctcgtgaaggcgtcgagtgagtcctgcgttcttgctctcctctgctaggcacttgtcacaggaaggccccctcgtgttcgcgtcctcttgccttcacacccgggacgggagttccttgctagggggagagcttcccttgctcgtgtcctcactcacgcactcacagactcactcattcaccgacggtcccagtggactgaggtgagacttcggtcggagccggccggacggaacatacaggatggccgccgcgccgccgcccaaggccgacgagctccagccgttcccgcccaaggagcagctgcccggcgtcgccttctgcatcaccagccccccgccatggccggaggccatcttgctagggttccagcatttcgtcgtcatgctgggcaccaccgtcatcatacccagcgcgctcgttcctcagatgggaggcggaaatgaagagaaggctcgggtggttcagaccatactgttcgttgctggcataaacaccctgttccagacgttattcgggacgcgccttccggtcgtgatgggcggctcgtacgtcttcgtcgggccgaccatctcgatcgtcttggctggacggtacagcaacgaagcagaccctcacgaggtaccttctgctgaactgctctgtttccttcaagaacgatagaactagagatggcaatgggtaaaaacccgctgggtattacttgcccaaacccgtacccgcgaagaaaaaata

SEQ ID NO: 140750 - DNA, 2515 bp, Zea Mays
ggctcaatcccagtcaatcatagagcagagcagcccgtgaccccgtgggcgtgtgctgtgactgcgaggagggaggaggaggaggaaaaagagtgccgccgtttcctgggggcagccagattccattccttgcgcaggagtactacggctactccttgtactatttcctagtagcaggctgccgtggaatcagctgcctagagcaatgcgagattatcaacaccagcacagcctccctccctcgctgccttttcccactcatcccagcgatcgatattcctccttccttccttccttcctcgtgaaggcgtcgagtgagtcctgcgttcttgctctcctctgctaggcacttgtcacaggaaggccccctcgtgttcgcgtcctcttgccttcacacccgggacgggagttccttgctagggggagagcttcccttgctcgtgtcctcactcacgcactcacagactcactcattcaccgacggtcccagtggactgaggtgagacttcggtcggagccggccggacggaacatacaggatggccgccgcgccgccgcccaaggccgacgagctccagccgttcccgcccaaggagcagctgcccggcgtcgccttctgcatcaccagccccccgccatggccggaggccatcttgctagggttccagcatttcgtcgtcatgctgggcaccaccgtcatcatacccagcgcgctcgttcctcagatgggaggcggaaatgaagagaaggctcgggtggttcagaccatactgttcgttgctggcataaacaccctgttccagacgttattcgggacgcgccttccggtcgtgatgggcggctcgtacgtcttcgtcgggccgaccatctcgatcgtcttggctggacggtacagcaacgaagcagaccctcacgagaaattcctgcggacgatgagggggacgcagggcgctctcctcgttgcgtcgacgattcagatcatacttgggttcagtggcctctggcgcaacgttgtcaaattactgagtccgctggcagctgttcctctggtatcactggtcgggttcgggctctacgagcttggctttccaggggtagcgaaatgcgtcgaagttggcctcccagaactgctcctgttggttgtgttttctcagtatctgcctcaggttctggacttcggcaagtccgtcttcagccggttcagcgttctcttcaccgtcgccatcgtgtggctgtacgcctacatcctcaccatcggcggcgcttacaagaactctccgcccaagacgcaggtgcattgccgcgttgatcggtcgggccttatttcaggagcaccttggataagtgttccctatccctttcagtggggtgctccgacgtttgacgccggagaagctttcgctatgatgatgacttcgttcattgctcttgtagagtcaactggcgccttcatcggtgcttcgagatatgcgagtgcaactatgattcctccatcgattatcagtcggggcgtgggatggcagggcattggtctgttgctcgattcatttttcgggacagcgaacgggacatcggtttcagtagagaatattggactgcttgcgttgacacgcattggcagccggagagtggtgcagatatctgcaggcttcatgattttcttctctgtccttggtaacttgcttttgctgatttttcttcttcttagatatactgcaatgcagttttctgctatgttcatgtatattttcaccgatgccgtggtaggttgatgatgtttgtccttgtccaaaccaggaaaatttggagctttgtttgcgtcgattccgctgcccgtatttgccggcatgtactgtctcttcttcgcatatgttggtggcgttggcctgagcctccttcagttctgcaacctaaacagctttaggaccaagttcatcatggggttcgctttcttcatgggcctatcggttcctcagtacttcaacgagtacacagccgttgcaagctatggtccggtgcacactggcgccagatggttcaatgacatgatcaacgtgccattcacgtcgaagccgttcgtcgctgggttggtagcctatatcctggacaacaccctccaggtaaaggagagcgcggtgcggaaggacaggggcaaccactggtgggagaagttcaggagcttcaagaaagacgcgaggagccaagagttctactcgctgccgttcaatctgaacaagttcttcccgtcggtctgatctcaaatggcgccgccgctgaatcaattctggaagcaacccttgttcatatgggcgttaatgaggaacataattctgctggtctggccagtggaagcttctgtgtctccattgttggtcaattttgtgtgttttcggacgagatgggagtaattgaactgtagaaattattacgattgaagtatatcgcgttctttttgtaatctacatgaatcagcgcagattaaatatttgtaggcgtagatactttgatcagtcaa

SEQ ID NO: 140751 - DNA, 2420 bp, Zea Mays
ggctcaatcccagtcaatcatagagcagagcagcccgtgaccccgtgggcgtgtgctgtgactgcgaggagggaggaggaggaggaaaaagagtgccgccgtttcctgggggcagccagattccattccttgcgcaggagtactacggctactccttgtactatttcctagtagcaggctgccgtggaatcagctgcctagagcaatgcgagattatcaacaccagcacagcctccctccctcgctgccttttcccactcatcccagcgatcgatattcctccttccttccttccttcctcgtgaaggcgtcgagtgagtcctgcgttcttgctctcctctgctaggcacttgtcacaggaaggccccctcgtgttcgcgtcctcttgccttcacacccgggacgggagttccttgctagggggagagcttcccttgctcgtgtcctcactcacgcactcacagactcactcattcaccgacggtcccagtggactgaggtgagacttcggtcggagccggccggacggaacatacaggatggccgccgcgccgccgcccaaggccgacgagctccagccgttcccgcccaaggagcagctgcccggcgtcgccttctgcatcaccagccccccgccatggccggaggccatcttgctagggttccagcatttcgtcgtcatgctgggcaccaccgtcatcatacccagcgcgctcgttcctcagatgggaggcggaaatgaagagaaggctcgggtggttcagaccatactgttcgttgctggcataaacaccctgttccagacgttattcgggacgcgccttccggtcgtgatgggcggctcgtacgtcttcgtcgggccgaccatctcgatcgtcttggctggacggtacagcaacgaagcagaccctcacgagaaattcctgcggacgatgagggggacgcagggcgctctcctcgttgcgtcgacgattcagatcatacttgggttcagtggcctctggcgcaacgttgtcaaattactgagtccgctggcagctgttcctctggtatcactggtcgggttcgggctctacgagcttggctttccaggggtagcgaaatgcgtcgaagttggcctcccagaactgctcctgttggttgtgttttctcagtatctgcctcaggttctggacttcggcaagtccgtcttcagccggttcagcgttctcttcaccgtcgccatcgtgtggctgtacgcctacatcctcaccatcggcggcgcttacaagaactctccgcccaagacgcaggtgcattgccgcgttgatcggtcgggccttatttcaggagcaccttggataagtgttccctatccctttcagtggggtgctccgacgtttgacgccggagaagctttcgctatgatgatgacttcgttcattgctcttgtagagtcaactggcgccttcatcggtgcttcgagatatgcgagtgcaactatgattcctccatcgattatcagtcggggcgtgggatggcagggcattggtctgttgctcgattcatttttcgggacagcgaacgggacatcggtttcagtagagaatattggactgcttgcgttgacacgcattggcagccggagagtggtgcagatatctgcaggcttcatgattttcttctctgtccttggaaaatttggagctttgtttgcgtcgattccgctgcccgtatttgccggcatgtactgtctcttcttcgcatatgttggtggcgttggcctgagcctccttcagttctgcaacctaaacagctttaggaccaagttcatcatggggttcgctttcttcatgggcctatcggttcctcagtacttcaacgagtacacagccgttgcaagctatggtccggtgcacactggcgccagatggttcaatgacatgatcaacgtgccattcacgtcgaagccgttcgtcgctgggttggtagcctatatcctggacaacaccctccaggtaaaggagagcgcggtgcggaaggacaggggcaaccactggtgggagaagttcaggagcttcaagaaagacgcgaggagccaagagttctactcgctgccgttcaatctgaacaagttcttcccgtcggtctgatctcaaatggcgccgccgctgaatcaattctggaagcaacccttgttcatatgggcgttaatgaggaacataattctgctggtctggccagtggaagcttctgtgtctccattgttggtcaattttgtgtgttttcggacgagatgggagtaattgaactgtagaaattattacgattgaagtatatcgcgttctttttgtaatctacatgaatcagcgcagattaaatatttgtaggcgtagatactttgatcagtcaaacgttataggagcaaaccaatctttttt

SEQ ID NO: 140752 - DNA, 1187 bp, Zea Mays
aagccccaaactcacgaccaccgtctccaccacggcaccaccatcactccaacaccaccgcctccctctccgttctcttcctcccaacgactcaaaccgccaccgtcgcggctccctgaaccaccagaccagcccagagcccagcccaccacaaacgctgctgctgctggagagaggggcgcgcgggcggacgggagcgatgggcaactgccaggcggcggaggcggcggcggtcatcatccagcaccccggcgggaaggtcgaccggctctactggtccaccaccgccgccgaggtcatgcggaacaacccgggacactacgttgccctcgtcatactccgtgttcctgcagataacaagcccgccgccgccgccgccgccgccgccggggacgccgcggcgtcctccggccccggcagtggtggggccaagatcaccagggtcaagctgctgaagcccaaggacacgcttctccttggccaggtctaccgcctcatcaccgcgcaaggtttgttagcactcagctgtcctggccatgggcttaaggcccatggcgcggttcaatttactcgggcaatcttgaaattctcaacccgatcgtgctccgcgcgcagaggtgacgaaggcggtgcgggcgaggaagaacgagaagatgcagcggtgcgaggccatcaggcagcagcacgagcagctccggcgcggcgacggggctcaccagagctcttccagccaggtcggtatgcgattctctgacaccatttttttctttttatttcctggtgcaacaagcagctactgattcttctgtggcttcaggacgggaagcaggacaaggaccggcaccggggaagaggccggcactggcggccggtgctgcagagcatctccgagtccgcgagccagagcagcagcagcatcgtctctgaatccgccaccagctaatgctactgaccggactgtgccatccggccggtgctctctttctttctttttcttttgggatttctgtttgcttgttagtatagagtgcttgagcctagccagaaatggaaaaaaaaactgtaaatcagagtgtcagggcaggactaataggaagtttgtttcgtctgtcaatgtgatttggcatggtgaaactgacactaaaaccgcgtattcagatcaatcgagtggtttgccaattgcaaca

SEQ ID NO: 140753 - DNA, 1125 bp, Zea Mays
aagccccaaactcacgaccaccgtctccaccacggcaccaccatcactccaacaccaccgcctccctctccgttctcttcctcccaacgactcaaaccgccaccgtcgcggctccctgaaccaccagaccagcccagagcccagcccaccacaaacgctgctgctgctggagagaggggcgcgcgggcggacgggagcgatgggcaactgccaggcggcggaggcggcggcggtcatcatccagcaccccggcgggaaggtcgaccggctctactggtccaccaccgccgccgaggtcatgcggaacaacccgggacactacgttgccctcgtcatactccgtgttcctgcagataacaagcccgccgccgccgccgccgccgccgccggggacgccgcggcgtcctccggccccggcagtggtggggccaagatcaccagggtcaagctgctgaagcccaaggacacgcttctccttggccaggtctaccgcctcatcaccgcgcaagaggtgacgaaggcggtgcgggcgaggaagaacgagaagatgcagcggtgcgaggccatcaggcagcagcacgagcagctccggcgcggcgacggggctcaccagagctcttccagccaggtcggtatgcgattctctgacaccatttttttctttttatttcctggtgcaacaagcagctactgattcttctgtggcttcaggacgggaagcaggacaaggaccggcaccggggaagaggccggcactggcggccggtgctgcagagcatctccgagtccgcgagccagagcagcagcagcatcgtctctgaatccgccaccagctaatgctactgaccggactgtgccatccggccggtgctctctttctttctttttcttttgggatttctgtttgcttgttagtatagagtgcttgagcctagccagaaatggaaaaaaaaactgtaaatcagagtgtcagggcaggactaataggaagtttgtttcgtctgtcaatgtgatttggcatggtgaaactgacactaaaaccgcgtattcagatcaatcgagtggtttgccaattgcaacatttcagagcatgaacactaagcaaaaaggaagaagaaaaaaaaa

SEQ ID NO: 140754 - DNA, 1042 bp, Zea Mays
aagccccaaactcacgaccaccgtctccaccacggcaccaccatcactccaacaccaccgcctccctctccgttctcttcctcccaacgactcaaaccgccaccgtcgcggctccctgaaccaccagaccagcccagagcccagcccaccacaaacgctgctgctgctggagagaggggcgcgcgggcggacgggagcgatgggcaactgccaggcggcggaggcggcggcggtcatcatccagcaccccggcgggaaggtcgaccggctctactggtccaccaccgccgccgaggtcatgcggaacaacccgggacactacgttgccctcgtcatactccgtgttcctgcagataacaagcccgccgccgccgccgccgccgccgccggggacgccgcggcgtcctccggccccggcagtggtggggccaagatcaccagggtcaagctgctgaagcccaaggacacgcttctccttggccaggtctaccgcctcatcaccgcgcaagaggtgacgaaggcggtgcgggcgaggaagaacgagaagatgcagcggtgcgaggccatcaggcagcagcacgagcagctccggcgcggcgacggggctcaccagagctcttccagccaggacgggaagcaggacaaggaccggcaccggggaagaggccggcactggcggccggtgctgcagagcatctccgagtccgcgagccagagcagcagcagcatcgtctctgaatccgccaccagctaatgctactgaccggactgtgccatccggccggtgctctctttctttctttttcttttgggatttctgtttgcttgttagtatagagtgcttgagcctagccagaaatggaaaaaaaaactgtaaatcagagtgtcagggcaggactaataggaagtttgtttcgtctgtcaatgtgatttggcatggtgaaactgacactaaaaccgcgtattcagatcaatcgagtggtttgccaattgcaacatttcagagcatgaacactaagcaaaaaggaagaagaaaaaaaaa

SEQ ID NO: 140755 - DNA, 105 bp, Zea Mays
gctgctatgataaagacctccataaagaatggtgaaccgtgcaagtccctgccttgttgaaaggttgcaaagaagtcaatctggtagttccactgaatattcaga

SEQ ID NO: 140756 - DNA, 946 bp, Zea Mays
ttatttatcaccgactggctgctctggctcaagtcgtccgacctgggcttcgacgcctggcgcctcgacttcgcccagggctactcccccgaggtcgccaaggtctacgtcgacgccacggccccgaccttcgccgtcgccgaggtatggaacagcatggcgtacgacggggacaacaagcccgagtacgaccaggacccgcaccggcaggcgctggtggactgggtggacagggtgggcggggcggcgtcgccggccaccgtcttcgacttcaccaccaagggcatcctcaacgccgccgtcgaaggcgagctgtggcggctcatcgacccgcaggggaaggcgccgggagtcatcggctggtggcctgccaaggccgtcacctttgtcgacaaccacgacaccggctccacgcaggccatgtggccgttcccctccgacaaggtcatgcagggctacgcctacatcctcacgcaccccggcaacccgtgcattttctacgaccacttcttcgactgggggtttaaggacgaaatcgccgccctggtggcggtgcgcaagcgcaatggcatcacgccgacgagcgagctcaccatccttgagcacgacggcgactcctatgtggcggagattgacggcaaggtcatcgtaaagatcgggtccaggtacgacgtcggccatctcatcccggcgggttttgaggttgccgcccacggcaacgactacgccgtctgggagaaagccggcgccgaacaagtgactcgagcataatagagtgctcgagataccgatttgattctcagtacaatgtacacgggactgcattgataaaataagtggtttctcctctaataagtaagggagcgtaaaagggcaattggagccatatgtaaccttaaaatattgttgagtaaaatataaaggtgatccctaaattctccttttc

SEQ ID NO: 140757 - DNA, 1551 bp, Zea Mays
atgcatggctccaattgcccttttacgctcccttacttattagaggagaaaccacttattttatcaatgcagtcccgtgtacattgtactgagaatcaaatcggtatctcgagcactctattatgctcgagtcacttgttcggcgccggctttctcccagacggcgtagtcgttgccgtgggcggcaacctcaaaacccgccgggatgagatggccgacgtcgtacctggacccgatctttacgatgaccttgccgtcaatctccgccacataggagtcgccgtcgtgctcaaggatggtgagctcgctcgtcggcgtgatgccattgcgcttgcgcaccgccaccagggcggcgatttcgtccttaaacccccagtcgaagaagtggtcgtagaaaatgcacgggttgccggggtgcgtgaggatgtaggcgtagccctgcatgaccttgtcggaggggaacggccacatggcctgcgtggagccggtgtcgtggttgtcgacaaaggtgacggccttggcaggccaccagccgatgactcccggcgccttcccctgcgggtcgatgagccgccacagctcgccttcgacggcggcgttgaggatgcccttggtggtgaagtcgaagacggtggccggcgaagccgccccgcccaccctgtccacccagtccaccagcgcctgccggtgcgggtcctggtcgtactcgggcttgttgtccccgtcgtacgccatgctgttccatacctcggcgacggcgaaggtcggggccgtggcgtcgacgtagaccttggcgacctcgggggagtagcccttggcgaagtcgaggcgccaggcgtcgaagcccaggtcggacgacttgagccagagcagccagtcggtgagctcccgctggacgcggtcgttgaggtggtcgatgtcgggcgccgcggcgaagtcggcgccggtgtcgaggttggccgtgccgtccgagtatatggtgtcgtcgcggcagatcatgtgggggccccagtccaggcggccgtcgggcgtgccgccctcgaagatgcagtagatgccgcgggcgtccttgtagtcggcgcaccggtggttgatgacgatgtccgccaccacctgcacgcccttgccgtggaacgcggcgatcagggacttgagctccgctgccgtcccgtacttggacgcgtccaggtcgtacagacggccaggcatgtaaccttgggtggagacggagtgcgacggcggcgggagccagacgtgcgtgacgccggcggaggcgatgtcgtcgaccttccccatcaggaggttataccatccgccgctctgcttccacgactcccagttgaacgcctggaacaggacctggccggacgccagtcccaggagaaggagcaagcacaggcagcagaggtgcctgttccccattgctctctctctctctctctctctctctctctctctctctctctctctctctctctctctctctctctctctctctctctctctctctctctctctctctctctgttcctcttcccctctctatactga

SEQ ID NO: 140758 - DNA, 464 bp, Zea Mays
cttccaccacgccactgacgggtcctccccgggcatgggcgaaggcagcgtcgcgggggcaaggccagtctcgtcattggctatggtcatggatccgtacccgacaccgacgcccggacagtacgacagctcgcatttcttccacggccatccgaggtgatcaaacgtccaccatgattgacacggctagcctagctaagatagctggtgctggtttcgttccatttgggcatgccatggccatatgcatccttcaatatttcgctttattagaagaaggattatcgatcatcaccaaattcagatgtccacttaactctattcctatatgtcagaacaatgcaccccagtacctagtacactatagagcagtatacaacatatacgcccagtacccccaaatgatggacaagaataatgcatatggtctgaaaatggagaatttgcttttcctcaatgattaa

SEQ ID NO: 140759 - DNA, 2004 bp, Zea Mays
cgccatggcgctgcaccacctccgcctcgcgccgctcgcgctccttcgcgccgcaagcctcccgcccctcgcctcctcccgtatcgccgcgcgcggccaccgccgcgttctcctctttgcgccgccgtcgtggccgtggcgccttctgtcgcccggtgcgaggccgcgcgcgcttgccaccgctgcggcagaggccgacgatgctacctcgggctcgggcaacgaattcttcgcagagagcacgtcgtgggcttcactcggcgtatccgaacgcctcgcgtccgccctttgcagtgccgggctctcgaggccttcccttgtccaggcaacctgtataccacatgttctcatggcaaatgatgtaattgtcgcagcagagactggtagtggcaaaacccatggttaccttgtacctttgattgaaaagctgtgctcaaaatcttctaccaccaaagatgacaattgtcaggacaccaccccaggagcacatgacatggtgttggtcctttgtcccaatgtcatgctctgcgagcaagttgttcgcatggctaattcattacttgacgagtctggcaaaccacttaaaagagctgctgctgtttgtgggccaaatggctggccagctgttcatccagatattcttgtagccaccccagctgctctattaaactatctatttgactatgacccggaaaagaggcgaagagagagattcatgcgtaatgtaaaatttgtagtgtttgatgaagcagacatgctactctgtggaagttttgagaaccaggtcattcgtctcatcaatatgttgagatttgatgaaaagctactttctagagcacaggattctggaaaggatatatcacttgggagtgatgatgaatatcatgaggattcaaagtttgagactgctgaatttggtagttctgacaaggaaattgaagacaatattgtggaagatagacttgtcaagttggagaatagtcacgttggagcacacaaggactggaggagagttagaaaaatatacagacgcagcaagcagtatgtctttgttgctgccacccttcctcagagtgggaaaaaaactgctggtggtgtgctacaacgtatgtttccggatgctgtatgggttagtggcacttatctgcaccgtcacaaccccagattagaacgaagatggatagaggttactgctgatacacaagttgatgctcttctgaatgcagttaaatatggcctgaagagtgaagttcatgatgctaaagatgttccaagacgcactatggtctttacaaacaccgttgatgctgctaattcagtctctgatatattgcatcgagttggtattccatgtattttgtaccatcgtgagagttccttgaaggagcgggctaacaatttacagtcttttcgggaaaatggtggtgtgcttgtatgcactgatgctgctgcccgtgggcttgatgttccaaatgtttctcatgtcattcaggcagaatttgctgcctgtgctgttgattttttgcacagggtgggccgcacagccagagctggtcaatctggtatagttactagcctatacacagaggcaaatcgtgatcttgtaagagcagttcgtcaagcagaggagttggctcagccagtggagggagcattcagcaggaaaagaagctttcgcaacaaactaaagaagcaagcattacaaaaacgcgaagcactgctatcttgatagcgtgactcactatatttgtagtaaggagaaaatatatgttttttttctctattactgggtgatgaatgtttttgtagtactatatagaaagctgctacatattaaatagaagttgtattcagaccgagtgcgttgaagtaatctgaccaacatgtagtctcttggataattatatccttatggcgttttcgtggtatttttaccgcattattgcaagtgattacaagtatttttgagaaaattaactatatggccaaaaaaagtctgcctta

SEQ ID NO: 140760 - DNA, 1515 bp, Zea Mays
ccctccgtgtcgtcaacggcaaagccaaacccatcaaacccgccgtccaaaccagctgaccacagcagcagctctccatcggacggcagagagcagccgttcgccacttggattcaaacgccccgtcactctaaccgctgctgaaactaccaaattacccctagcccgctccctcagcttcctgctcccccctctgtcatggccaagacgaagcaagggaagcgggatgtcgacgcctataccatcaagggcaccaacaaggtggtccgagtgggggactgcgtgctgatgcggccagcggacacggacaacccgccgtacgtggcgcgggtggagcggatggagtcggacgggcgcggcagcgtgagggtgcgggtgcgctggtactaccgccccgaggaggccaagggcggccgacgcccgttccacggtgccaaggagctcttcctctccgaccacttcgacacgcagagcgcccacaccattgagggcaagtgcatcgttcactccttcaagagctacaccaagctcgacaacgttggtccggaggacttctactgccgatttgactacaaggccgccaccggtgcattcacccccgaccgtgtcgccgtgtacaaagctcttccttttctgtaaccttttgtcatgtggtggttaatcagtttgtattatttttgcttctgatgtaatgtgggatttttgatcttatgtgacattgtttgtatgtgaagatattgcaagtgtgagatgccgtacaacccggatgacctcatggtgcagtgtgaaggatgcaaggactgtttccttttgactgcgaggcgaagtataattcatctggaatatctactttggtcaggattaggaccaaacaatgaatgatgaacatggggttccttagagccttatgctcctgtgtttgcttggtccttatgtaagatatatatggttccatccgtcttgtatgggaatgaccattgagcaagcaaaaaagatagatcattacatgtgctcggattgtgctaaagaaaatggtgcaaagagaccctcaaattcatactcagtttcaccaaactcagattctaagattgaatcaaagaggcgcaagagataaatgctgcggcagaagcacccctggcaaaggagatgcggtatttatggtgtcagctcctcattactggtgcatatttgagatgttgatgtgtacactgcgagagaagagccaagccaattgtagggcaaaacctatttgacttatcattcttctgtgtattctgcctagacattagtgtgatgagtaggtgagttccccgttgcggcgtgtgcatgatcagctgctggaggcgggatgtcgggaaatgctagaattatgctgactcttgtcgatgtaagtgtatcgtgtgtgtgtgttaacatatgcactggctggaaacgttcccatgtgtgaatggaggatgctgatgatagcttgactgttgtttcatattcagttagatgtttgcggagagttgaaat

SEQ ID NO: 140761 - DNA, 1556 bp, Zea Mays
ccctccgtgtcgtcaacggcaaagccaaacccatcaaacccgccgtccaaaccagctgaccacagcagcagctctccatcggacggcagagagcagccgttcgccacttggattcaaacgccccgtcactctaaccgctgctgaaactaccaaattacccctagcccgctccctcagcttcctgctccgttggaacggacagccgcggcagtccccagcccccccgcttcctgcaccctcgctgctagggttttctcgcaatccagcccctctgtcatggccaagacgaagcaagggaagcgggatgtcgacgcctataccatcaagggcaccaacaaggtggtccgagtgggggactgcgtgctgatgcggccagcggacacggacaacccgccgtacgtggcgcgggtggagcggatggagtcggacgggcgcggcagcgtgagggtgcgggtgcgctggtactaccgccccgaggaggccaagggcggccgacgcccgttccacggtgccaaggagctcttcctctccgaccacttcgacacgcagagcgcccacaccattgagggcaagtgcatcgttcactccttcaagagctacaccaagctcgacaacgttggtccggaggacttctactgccgatttgactacaaggccgccaccggtgcattcacccccgaccgtgtcgccgtatattgcaagtgtgagatgccgtacaacccggatgacctcatggtgcagtgtgaaggatgcaaggactgtttccttttgactgcgaggcgaagtataattcatctggaatatctactttggtcaggattaggaccaaacaatgaatgatgaacatggggttccttagagccttatgctcctgtgtttgcttggtccttatgtaagatatatatggttccatccgtcttgtatgggaatgaccattgagcaagcaaaaaagatagatcattacatgtgctcggattgtgctaaagaaaatggtgcaaagagaccctcaaattcatactcagtttcaccaaactcagattctaagattgaatcaaagaggcgcaagagataaatgctgcggcagaagcacccctggcaaaggagatgcggtatttatggtgtcagctcctcattactggtgcatatttgagatgttgatgtgtacactgcgagagaagagccaagccaattgtagggcaaaacctatttgacttatcattcttctgtgtattctgcctagacattagtgtgatgagtaggtgagttccccgttgcggcgtgtgcatgatcagctgctggaggcgggatgtcgggaaatgctagaattatgctgactcttgtcgatgtaagtgtatcgtgtgtgtgtgttaacatatgcactggctggaaacgttcccatgtgtgaatggaggatgctgatgatagcttgactgttgtttcatattcagttagatgtttgcggagagttgaaataatgagtttgatcttgaacttgaaatgtgcagaacggtattggtgatgagcaggatatgcttgctttccgtgagaaaacatag

SEQ ID NO: 140762 - DNA, 1411 bp, Zea Mays
ccctccgtgtcgtcaacggcaaagccaaacccatcaaacccgccgtccaaaccagctgaccacagcagcagctctccatcggacggcagagagcagccgttcgccacttggattcaaacgccccgtcactctaaccgctgctgaaactaccaaattacccctagcccgctccctcagcttcctgctccgttggaacggacagccgcggcagtccccagcccccccgcttcctgcaccctcgctgctagggttttctcgcaatccagcccctctgtcatggccaagacgaagcaagggaagcgggatgtcgacgcctataccatcaagggcaccaacaaggtggtccgagtgggggactgcgtgctgatgcggccagcggacacggacaacccgccgtacgtggcgcgggtggagcggatggagtcggacgggcgcggcagcgtgagggtgcgggtgcgctggtactaccgccccgaggaggccaagggcggccgacgcccgttccacggtgccaaggagctcttcctctccgaccacttcgacacgcagagcgcccacaccattgagggcaagtgcatcgttcactccttcaagagctacaccaagctcgacaacgttggtccggaggacttctactgccgatttgactacaaggccgccaccggtgcattcacccccgaccgtgtcgccgtatattgcaagtgtgagatgccgtacaacccggatgacctcatggtgcagtgtgaaggatgcaaggactggttccatccgtcttgtatgggaatgaccattgagcaagcaaaaaagatagatcattacatgtgctcggattgtgctaaagaaaatggtgcaaagagaccctcaaattcatactcagtttcaccaaactcagattctaagattgaatcaaagaggcgcaagagataaatgctgcggcagaagcacccctggcaaaggagatgcggtatttatggtgtcagctcctcattactggtgcatatttgagatgttgatgtgtacactgcgagagaagagccaagccaattgtagggcaaaacctatttgacttatcattcttctgtgtattctgcctagacattagtgtgatgagtaggtgagttccccgttgcggcgtgtgcatgatcagctgctggaggcgggatgtcgggaaatgctagaattatgctgactcttgtcgatgtaagtgtatcgtgtgtgtgtgttaacatatgcactggctggaaacgttcccatgtgtgaatggaggatgctgatgatagcttgactgttgtttcatattcagttagatgtttgcggagagttgaaataatgagtttgatcttgaacttgaaatgtgcagaacggtattggtgatgagcaggatatgcttgctttccgtgagaaaacatag

SEQ ID NO: 140763 - DNA, 1314 bp, Zea Mays
ccctccgtgtcgtcaacggcaaagccaaacccatcaaacccgccgtccaaaccagctgaccacagcagcagctctccatcggacggcagagagcagccgttcgccacttggattcaaacgccccgtcactctaaccgctgctgaaactaccaaattacccctagcccgctccctcagcttcctgctccgttggaacggacagccgcggcagtccccagcccccccgcttcctgcaccctcgctgctagggttttctcgcaatccagcccctctgtcatggccaagacgaagcaagggaagcgggatgtcgacgcctataccatcaagggcaccaacaaggtggtccgagtgggggactgcgtgctgatgcggccagcggacacggacaacccgccgtacgtggcgcgggtggagcggatggagtcggacgggcgcggcagcgtgagggtgcgggtgcgctggtactaccgccccgaggaggccaagggcggccgacgcccgttccacggtgccaaggagctcttcctctccgaccacttcgacacgcagagcgcccacaccattgagggcaagtgcatcgttcactccttcaagagctacaccaagctcgacaacgttggtccggaggacttctactgccgatttgactacaaggccgccaccggtgcattcacccccgaccgtgtcgcctgtgagatgccgtacaacccggatgacctcatggtgcagtgtgaaggatgcaaggactggttccatccgtcttgtatgggaatgaccattgagcaagcaaaaaagatagatcattacatgtgctcggattgtgctaaagaaaatggtgcaaagagaccctcaaattcatactcagtttcaccaaactcagattctaagattgaatcaaagaggcgcaagagataaatgctgcggcagaagcacccctggcaaaggagatgcggtatttatggtgtcagctcctcattactggtgcatatttgagatgttgatgtgtacactgcgagagaagagccaagccaattgtagggcaaaacctatttgacttatcattcttctgtgtattctgcctagacattagtgtgatgagtaggtgagttccccgttgcggcgtgtgcatgatcagctgctggaggcgggatgtcgggaaatgctagaattatgctgactcttgtcgatgtaagtgtatcgtgtgtgtgtgttaacatatgcactggctggaaacgttcccatgtgtgaatggaggatgctgatgatagcttgactgttgtttcatattcaaaatagacaataagaaaagaaaaa

SEQ ID NO: 140764 - DNA, 2756 bp, Zea Mays
ccctccgtgtcgtcaacggcaaagccaaacccatcaaacccgccgtccaaaccagctgaccacagcagcagctctccatcggacggcagagagcagccgttcgccacttggattcaaacgccccgtcactctaaccgctgctgaaactaccaaattacccctagcccgctccctcagcttcctgctccgttggaacggacagccgcggcagtccccagcccccccgcttcctgcaccctcgctgctagggttttctcgcaatccagcccctctgtcatggccaagacgaagcaagggaagcgggatgtcgacgcctataccatcaagggcaccaacaaggtggtccgagtgggggactgcgtgctgatgcggccagcggacacggacaacccgccgtacgtggcgcgggtggagcggatggagtcggacgggcgcggcagcgtgagggtgcgggtgcgctggtactaccgccccgaggaggccaagggcggccgacgcccgttccacggtgccaaggagctcttcctctccgaccacttcgacacgcagagcgcccacaccattgagggcaagtgcatcgttcactccttcaagagctacaccaagctcgacaacgttggtccggaggacttctactgccgatttgactacaaggccgccaccggtgcattcacccccgaccgtgtcgccgtgtacaaagctcttccttttctgtaaccttttgtcatgtggtggttaatcagtttgtattatttttgcttctgatgtaatgtgggatttttgatcttatgtgacattgtttgtatgtgaagatattgcaagtgtgagatgccgtacaacccggatgacctcatggtgcagtgtgaaggatgcaaggactggtaaaatcctgtgaaaactccacacttttctcccattagtgcatgttttgagaggggtttatctagtaaaatcactgtgaaatggctccacattttgccctcaacaataaatctcttgaaatggtgctgatgtggtggttatatgaactgcctttcatcaagatgttatttttttctgctctcttgccctatgtctactttgttatgcagaatgaactaattaatttatcttgtgtttatttagtttccttttgactgcgaggcgaagtataattcatctggaatatctactttggtcaggattaggaccaaacaatgaatgatgaacatggggttccttagagccttatgctcctgtgtttgcttggtccttatgtaagatatatatggtattcactactgactagtattgcttacacagtctttgtagatatatttagtttcaagaactgtttaaacacatcatcaaggactggttttctgcaaaatctcgtagcatttatctgttttgttctgtttaattatacctgttgcacattggtttttcttgcttgacaagcagctagcttagttatatggacctgattgtggcacatgtgattctctctggagtactatcaaactaatatagaattggattagaatttagaacagtaggtgccatgcagtgtttttaggatttgcatgacctgacattttatttattttttctaagaagcttttaagatgtttgatctacatgaatatgattgcttacgagaacatttagacatcatgcagtatgctatctctggattttgtcacatgataaatgtatgtcatatgttctacataatgatcaaagggctgcatgatgtagttatgatggttgtccttttcgttggctttctgctgaaatgatttcttgagagctgatactcttttgccatttatatagaatatttgttattatttgtatccaatatcatcttattgttgctaaccattattacgggcctgtttggttttccacctaaagcgccacaatctgcctaaacttagtcgttggaattgagaactaaccttagacaaaaaaagttaggcaaattgtggcgccttaggcacgaagccaaacaggcctaaatcctctacatcctggtgccatggatatgagtcatatgacttgtacatataatcctgttttttctatattctatggaaaatgcttatttaacttgttaacaatgtaattttgtttctgttatttgtatgatgttattgttcttctttattaccatttttattagttatccaacttttaactcttgtaggttccatccgtcttgtatgggaatgaccattgagcaagcaaaaaagatagatcattacatgtgctcggattgtgctaaagaaaatggtgcaaagagaccctcaaattcatactcagtttcaccaaactcagattctaagattgaatcaaagaggcgcaagagataaatgctgcggcagaagcacccctggcaaaggagatgcggtatttatggtgtcagctcctcattactggtgcatatttgagatgttgatgtgtacactgcgagagaagagccaagccaattgtagggcaaaacctatttgacttatcattcttctgtgtattctgcctagacattagtgtgatgagtaggtgagttccccgttgcggcgtgtgcatgatcagctgctggaggcgggatgtcgggaaatgctagaattatgctgactcttgtcgatgtaagtgtatcgtgtgtgtgtgttaacatatgcactggctggaaacgttcccatgtgtgaatggaggatgctgatgatagcttgactgttgtttcatattcaaaatagacaataagaaaagaaaaa

SEQ ID NO: 140765 - DNA, 1623 bp, Zea Mays
ggattatgtgcagaagaagttgaaaagatccatagagtttaggatctagaaagtgacagattcatactattgcaacaacttagtcgatttcgtgtttatgttgattttagatagtttttaccaaatcgatttttatagaagttgactgaaaaactgaacgtttgatcgtccgcagcagtttttgatggctagaagctgaaacaaatagtgcatatattggtttttacgtacatgattattatatcggtgttaaaatatagtacatttttttattgtgtacctctatttgtatctatatataaaaggaatattttgatctatataaagctaaaaaacacaagatatgaatagttatgatcattacagtaatgtttttatgttggcttaactatttttggcgagttatacagttcgatgggcattttacggaagccagacgccggcatatctccacgccaacggcaccaccaccgtggcctgaatcacgaggcatagcgacaaacggtagtagaaggaaaagccgagaccggggcgtgctggtgaagagccgggggtccccacggcacaaaaaaaaaaaaaaaaaaaaactccgtggacggcaggatccacatggatagacagaccatccgcggcgccgaggcaggggcccggcaagcgtgagcgatcccggcgctttccccaaaaaatccttcgcttttcgggaaagaaccccagcgccgagaggaagaggagggatctcgtcgacacgccgtcgggaacgcgtcccccgttccctcgccgctgccccgacacggtgccgttctcgcccgaatcggcgaatccctcccaccgcttcgcctataaatctccccctctgtggccctgatcctcccgtacaacagtgcccagtgcccaccgcggcagatcttcgacgcctccgagggcgatggaggaggacggcggctccggcagcgatagcatggagttcgtcgcgggagcggagactagcgctggcgcaggcacaaacgccggcaggaaccgcggcgtgggtgcagggaccagcgtaggcggtggcggcggcacgaagctgccgcatgtgctgcaaaagagtttcggcgaggtgcaagggattctggagcacaaccgcgtcctgattcaggagatcagccagaaccaggagacgcgcgacgcggacggtctcagccgcaacgtggcgctaatccgggagctcaacactaatatcgcccgcgtcgtggacctctacggcgacatgtcagggtccttcgcccgcgccgtcgccgccaagaaagacgccgcaggcgacaagtcgggccctaagaggccccgctccgccggcgctggagggcagcagcagtagagccggcgtcttatccagttaatccatcagaggaggctccgtcgtgattgacggcgggggtcaggaaacttcggggttggggtgggtgcactgcattggaaacctcctctttttttttctccgtccggtgaaaggtgacttgaatgatgtactgctggattaactagtttggtgttgagaattgagatggacatggcgtggacaccttcttgttgtcagtcggtgttgattgctgaatcaaagatgcagctaaaaaactgattcag

SEQ ID NO: 140766 - DNA, 1189 bp, Zea Mays
gatcttttttcgagcctcgctctctctctcgttttcttttctttttccgggatagagtaaggattttcggaacttctcttgaaaaattcgtgggcggacagggcgatggaggaggacggcggctccggcagcgatagcatggagttcgtcgcgggagcggagactagcgctggcgcaggcacaaacgccggcaggaaccgcggcgtgggtgcagggaccagcgtaggcggtggcggcggcacgaagctgccgcatgtgctgcaaaagagtttcggcgaggtgcaagggattctggagcacaaccgcgtcctgattcaggagatcagccagaaccaggagacgcgcgacgcggacggtctcagccgcaacgtggcgctaatccgggagctcaacactaatatcgcccgcgtcgtggacctctacggcgacatgtcagggtccttcgcccgcgccgtcgccgccaagaaagacgccgcaggcgacaagtcgggccctaagaggccccgctccgccggcgctggagggcagcagcagtagagccggcgtcttatccagttaatccatcagaggaggctccgtcgtgattgacggcgggggtcaggaaacttcggggttggggtgggtgcactgcattggaaacctcctctttttttttctccgtccggtgaaaggtgacttgaatgatgtactgctggattaactagtttggtgttgagaattgagatggacatggcgtggacaccttcttgttgtcagtcggtgttgattgctgaatcaaagatgcagctaaaaaactgattcaggttctggtgagcgtgtgcatggacgacagtgcagagcacctccggcggccaagccacgaggcatgagcggatcaggtggacagcatcttgtgtgaaggttcagacggcacggcaccgtggccactaccatgatggccgaacgaagggctgaagaaacaatcaggtatcctggattctaagtagcgtgcagtactgtcctttctgtgtgctctgcagtcccgccgtaccgtacgttcgtgcactgcgagtcgatgggcaggtacaatcggatcacaaatccggcctgcaagcaatagttgggaaaggcggctccttgtttttcttctgaaacctgcttgccgtctcgaaaccagcggcggtgttccctttactaagaacagattgcg

SEQ ID NO: 140767 - DNA, 2157 bp, Zea Mays
aagcaagcagcgactccgtccgcgcacggcaccttcccctcccccgcacggccgcacacaccagacaccaccaccactcgcaagtctcttcgccgtctcgccgagttattagaaggcggggaaaaaaatcaactcgaacgggcgggtggcaaccaaccaccaagcggcgagggcgatggcggcgtcctcgccgcggaagcggctccctgctgcgcgcctcatcttcgccctcctcctgatgtcctccgtgctgccgcgggacgccggggcggtggaactggggctgaagctgcccttcagtccgggggacgtgctccccgtcctgccgcggcaggtggcgtggcccgtcatgaacacgctccacagcgccgtcgacctactgccgtccttcgtcgccgccgtggcgcccggggcgccggcgccggcggcctggaaaggcgcgtgcttctcggagaacgaggccgctatcgagctcacgcccggggaccgcaacgggaccgacgtcggcggtgccgtactgcgcctcaagactgcttcagctcatagttgggcatgcatggatctctacgtttttgcaacaccatataggataacatgggactattattttgctgctcgggagcacactttggagattaaatcatgggaggaagaagcggaattgaaatatgtgaaggagcatggcatttctatttttctcatgccatctggaatgctcggaactttgctatctttgattgatgtcctgcctttgttttcaaacactgcctggggccaacattccaacctagcctttttagagaagcatatgggagcctcatttgagaaacgaacccaaccttgggttgctaacattagaaaggaggatatacaatctggtgactttttggctttatcaaagattcgaggacgatggggtgggtttgagacattagagaaatgggtgactggtgcatttgctgggcatacctcggtttgcttaaaagacgagaagggtgatctttgggttgcagagtcaggctatgaaaacgagaagggagaagaaatcattgctatagttccttgggatgaatggtgggccatggctctcaaggatgaatcaaatcctcagatagccctgcttcctttgcaccctgatgtgcgtgccagattcaacgaaagtgctgcatgggaatatgcccggagcatggttggaaatccttatggctaccataacatgatatttagctggatcgatacaataggagataattatccacctcctcttgatgctaacctggtaatggcagttatgtcaatgtggactagattgcagccagtttatgctgcaaacatgtggaatgaagccctaaacaaacgacttggcactgaggatttcgaccttcaggggatcattatggagattgaaagacgtggaatgtcttttgatcagttgctcaccatacccgagcaagacgaatgggtgtacagtgatggtaaatcaactacttgtgtcgccttcattcttgcaatgtacaaggaggctggaatattcacccctttctcggagtcgatccaggtcaccgagttcactattcgtgacgcatacatgctcaagatatttgaagacaacccggcaaggcttccaggttggtgcaacgcaggcacggacaagcttcccttttgccagattctcggagagtacagaatggagctaccagagtacaacacgattgaaccttatgcgaaaatgaacgagaactgtccgtccttgcccccaacgtacaaacgacccgcacgctgctgactacgagattgtctactatgtatctttctgcagctgctgcctttacacagtggcattagagtgttgttgctatgttctgtaaataaaagacactatatatataggtgcttggtagatggtagttcttaccagtaatgtagctgcgatgtattcaggttcacggttttcagtcgatcagttctgaagccacggcgtcggcgaccaatatgaaggttaggatttgtcagctccggaaagttgcttatatgtatcaatgtatgtatgtaggcaacattatggcttggtcataaattgtgaactccgtcaagaaataaatctataatgcaacgtcaggtgattctgatatgtgattaagaaaataaaaaaacaaa

SEQ ID NO: 140768 - DNA, 932 bp, Zea Mays
tatgtgatatgtaccgcatgatctaaaacacgcggccacgatttaattagccatgatcagatctagatcgccagccacaatccggcgacacacatccacttaagggcttgttcggttattttcaattcatatggattagaggggattgatacggattggaggggattttgacttactaggaattaaaaccccctcaatccccctcaatccatatggattggggtagaaccgaacaagccctaagttgaagtgttacgcttcatctaatccgatccgcccatggctggatcaacgtcatgtgttcatcactcacgcccacggtcactaggacggcggagcacgcgacaccccggtggaccatcgccagcgatgagccatctagccaacccgaggtctaatcctgataaaaacagtactatacatagaggggaacaaggcggatttggaggaagctcacttatcgagaattgctcagtatataatcccgatgactacacaaagtggcattgcggtagtgttggtgcgacgacgaagaagtccggccatcccgatgtctcatgcacaccaattatcctccccgcctgatccattcgcacggtcggacgtcctcgactgcaccgcatcctctgaacggcggtggaggcaagggatggcggcggtggcacgagttctcccacatgcgttcacagtggccctctgctttggtgcggttccttatcgacccccatgcgatggactagaggggtcccagcatgggtatttatgctcgagggggaggaggatccggttggaagagtccgtgcggagggggtgcgaatcacagctcccagcttcggttagcgcaagatgcggagaaggtttgggagggaaggggatagagctagccaacagcccccacatggcgtgacacggtcagcgtggggcgcaccaac

SEQ ID NO: 140769 - DNA, 1960 bp, Zea Mays
tctcctccaccacccgtttctctttctctaggctcgcgcctgccccgccttcgttgtcgcgcctgccacctgctcgacgaatcgccgcttccgccccacgccgcgatgccgacgcccctcgccgcggcgctgctgccactgcccgcctctcccgcactgcactttccgcggccgcggcccggtccctcatggcgtgcgcggccggccgtggttagggcggccgctctccgcgccctgccacggcgcctcgagctctgtccgccgtgccttgcggcggtcgagagtaacccggccccgccacccttagctccgccaccgccggacgaggcgagcgccggctcaggcctcgatgcgagggccgggggaggtggcggtggtggtgacggaggtggcggcgctgatcttgggtggttgagggctttcccgcatgtgttcactgcgtcaatggcaaacttcctattcggttaccacattggggttatgaacggtccaatagaagatattgcaacccagcttggttttcaaggaaatccgttcctccaaggtcttgtggtgagcatattcattgttggtgccttttttgggagcttaggctcatctgcattagtagataagttcggctgcaagaggacccttcagatcgacagtattccattgattattggagctctcctgagtgcacaggctgattctttggatgagatgcttttgggaagattccttgttggcatcgggatcggcgtaaacactgttcttgttccaatatacatctctgaggttgctccaacaaaatataggggcactttggggactctgtgtcaaattggaacatgtctaggcataattgctgcactttccttggggataccttctgagagtgatccacattggtggcgaacaatgctttatgctgcatgtgtacctgggattcttattgttgctgggatgcaatttgctgttgagagtccacggtggcttgccaaggttggaaggttcgatgatgctagaaaggttgtagagagcctttgggaaccttctgaagttgagaagtccatggaagagatcaaagctgttgtgctaaatgatgattcacggggcagctggtcagaccttctggtggaaccacataatagagttgcattgattggaggatcccttttctttctgcaacagtttgctggaataaatggtgttctttatttttcatcattgacattccgtgatgttggtatcagtagtggtgctttagcaagcttatatgttggaataaccaattttggaggggcactagttgcttcaaatttgatggacaagcaagggcgaaagaagcttttgataggaagctaccttggaatggcttttgcaatgttccttatagtatatggtattagcttcccgcttgatgaaggagttgcccacagcttatcaatcgctggaactcttttgtacatttttacttttgcaattggtgctggaccagttaccggtatcattataccagagctcagcagtgctcggacacgctcaaaagttatgggcttcagtttcactgtgcattggatatgtaactttctggtgggactatttttcctggagcttgtgcacaagtttggggttggagcagtctatgcaggttttggtggggtctccctgctgacagcactcttcgcctacaatttcatagttgaaacaaaaggacgttcgcttgaggaaattgagatgtccatgagcagtgctacccctggcaagcaagagtagaacatctcaactgtatggacaaactgaacaactgacgggaggaatttaataagagaagagggggcctaatcccatgaatcttcagcagcagcagtttgttgcaaacaacatcaactcctatagataatgagcacaatcaaattcagcttttctttggtagcatgagaatcgttgtacaatattaaaaagggtgaagaaaacg

SEQ ID NO: 140770 - DNA, 1060 bp, Zea Mays
agggtctggggccggtcagtgttgtgccgcccgttgaaaccaccacgtaacgtctcggacggctagacgcggtccacgctagctccttgctatctccgtcctactcctcctcatactttaccgcaaagcgcgcaccacgaattgcacctacccatttcgctaatctccctccacgagccgaccaaatcgaatcgaatcgcgcgcagcgcgcccgcgcagcgattgccggcgatggcgagcctcaccctgccgccggcgccccccaacccacggcaggacgccatcgacctccaaaaggccttcaaagggtttggctgtgacagtacaacagtgataaacatacttactcatcgcgattcagtgcagcgtggactcattcaacaggaatacagggctatgtatcatgaggaactctcccatcgcatttcatctgaactcaatggaaaccacaagaaagctatgttgctgtggattcttgatcctgctggacgtgatgcaactgttttgagagaagctctaagtgttgacactatggatctgagagcagccactgatattatatgttccaggacgccatcacagttgcaaataatgaaacagacttattatgctagatttggtacttatcttgagcatgacattggtcaccacacatctggcgatcaccagaagcttttacttgcctatgtggggattccacgctacgaaggtcctgaggttgatcctaccattgtgacacatgatgcaaaggatttgtacaaagctggtgagaaaaggctgggtacggatgagaagacctttatccgcgttttcactgaacgcagttgggcacacttggcatctgtttcgtctgcctaccatcatatgtatgaccggaaattagagaaggttatcaagagcgaaacatctggaaactttgaattcgcacttttagctatcctcagatgcgcggaaaacccagcaaagtattttgcaaaggtactgcgcccatgttgttttcagtaaagaaatattgtagattttgaaatcctgtgcaggcaccataggtgtataaaatcac

SEQ ID NO: 140771 - DNA, 1717 bp, Zea Mays
agggtctggggccggtcagtgttgtgccgcccgttgaaaccaccacgtaacgtctcggacggctagacgcggtccacgctagctccttgctatctccgtcctactcctcctcatactttaccgcaaagcgcgcaccacgaattgcacctacccatttcgctaatctccctccacgagccgaccaaatcgaatcgaatcgcgcgcagcgcgcccgcgcagcgattgccggcgatggcgagcctcaccctgccgccggcgccccccaacccacggcaggacgccatcgacctccaaaaggccttcaaagggtttggctgtgacagtacaacagtgataaacatacttactcatcgcgattcagtgcagcgtggactcattcaacaggaatacagggctatgtatcatgaggaactctcccatcgcatttcatctgaactcaatggaaaccacaagaaagctatgttgctgtggattcttgatcctgctggacgtgatgcaactgttttgagagaagctctaagtgttgacactatggatctgagagcagccactgatattatatgttccaggacgccatcacagttgcaaataatgaaacagacttattatgctagatttggtacttatcttgagcatgacattggtcaccacacatctggcgatcaccagaagcttttacttgcctatgtggggattccacgctacgaaggtcctgaggttgatcctaccattgtgacacatgatgcaaaggatttgtacaaagctggtgagaaaaggctgggtacggatgagaagacctttatccgcgttttcactgaacgcagttgggcacacttggcatctgtttcgtctgcctaccatcatatgtatgaccggaaattagagaaggttatcaagagcgaaacatctggaaactttgaattcgcacttttagctatcctcagatgcgcggaaaacccagcaaagtattttgcaaagctcttacgaaaggccatgaaaggtctaggcactgatgacaagacacttataagggttgtggtgacgaggactgaaattgatatgcaatatatcaaggcagagtacttcaagaagtataagaagccattagctgaggctatccactccgaaacatcaggaaactatcggacattccttctttcacttgttggtcctggacattaggttatgtttcgaccatgggacatgatattccatccatccaccctaaatgcagcgacctacctggaaaacttatgatgttgccatttgtcagtggtgactcgtggattcgtctaacttccacatatgcggtatctagtatgcttgactaaagtattcgtgtttaaatttgtatctgggtttcttgttggaaaattctgtgcgggggcacaacagctgttgttggtcacgctaggcttgacttgtgtctccatgacatcaataatattatgtcatgttcgtgtgtggtcattccactattagagaaagcaccatatgtaccggttgggaattggctttaaagaggagattttagtaccggttcttggtatgagctgatactaaaagttacatatttagggctagtttgggaaccacattatttgaaggaattttcatttttcaagggaaattagtttattttcttatgggaaaatagaaatctttcggaaaaacgaggttcccaaactaggcttaacattagttcattccactggag

SEQ ID NO: 140772 - DNA, 1289 bp, Zea Mays
tcctcctcatactttaccgcaaagcgcgcaccacgaattgcacctacccatttcgctaatctccctccacgagccgaccaaatcgaatcgaatcgcgcgcagcgcgcccgcgcagcgattgccggcgatggcgagcctcaccctgccgccggcgccccccaacccacggcaggacgccatcgacctccaaaaggccttcaaagggtttggctgtgacagtacaacagtgataaacatacttactcatcgcgattcagtgcagcgtggactcattcaacaggaatacagggctatgtatcatgaggaactctcccatcgcatttcatctgaactcaatggaaaccacaagaaagctatgttgctgtggattcttgatcctgctggacgtgatgcaactgttttgagagaagctctaagtgttgacactatggatctgagagcagccactgatattatatgttccaggacgccatcacagttgcaaataatgaaacagacttattatgctagatttggtacttatcttgagcatgacattggtcaccacacatctggcgatcaccagaagcttttacttgcctatgtggggattccacgctacgaaggtcctgaggttgatcctaccattgtgacacatgatgcaaaggatttgtacaaagctggtgagaaaaggctgggtacggatgagaagacctttatccgcgttttcactgaacgcagttgggcacacttggcatctgtttcgtctgcctaccatcatatgtatgaccggaaattagagaaggttatcaagagcgaaacatctggaaactttgaattcgcacttttagctatcctcagatgcgcggaaaacccagcaaagtattttgcaaaggcagagtacttcaagaagtataagaagccattagctgaggctatccactccgaaacatcaggaaactatcggacattccttctttcacttgttggtcctggacattaggttatgtttcgaccatgggacatgatattccatccatccaccctaaatgcagcgacctacctggaaaacttatgatgttgccatttgtcagtggtgactcgtggattcgtctaacttccacatatgcggtatctagtatgcttgactaaagtattcgtgtttaaatttgtatctgggtttcttgttggaaaattctgtgcgggggcacaacagctgttgttggtcacgctaggcttgacttgtgtctccatgacatcaataatattatgtcatgttcgtgtgtggtcattccactattagagaaagc

SEQ ID NO: 140773 - DNA, 287 bp, Zea Mays
gtaaatcgttgctagcaattggatactttgctctgcattatgcagttctttgatcgctcaaagcatgattattcagatttctgcttttatcttgctgcaaatatcagatgatgtaatgccacttcttttcaataatgtccatgtgcagttactcaaatcgaaatgtgcatgcaactagatgttgctactgaggtctattcaatgcgtgttggtgacacgttcaacatggttctagctctcactctgaacctggatggatcatcagacactggctactacacacaggt

SEQ ID NO: 140774 - DNA, 878 bp, Zea Mays
acctaacccttcggccttcgttgcggacccgccactcacttcttctctcgaccgcatcttttctccgcgccgccgctcgcctgcacttctacgtgtgaaccgcgtccgcgcctatggcctgcccgtgcccagctgccccctctccacacgagcctctctaggcgtcaagcgtgccattaagcaaccgtggcccccacccctcctcggctctctgcgtgagcacaagcacgtctctgtagcccatgttcaacggaagcgaaagtgccgctggaccacatacgattgttgatggtaaagaagttgtgaactttgcatcagcaaactacctcggtttaattggcaacgaaaagattattgattcttgcatcagttcattggagaaatatggtgttggttcttgtggtccacgtggcttttatggaacaattgatgtccatcttgactgtgagtcaaagatagctaaatttttggggactccagactccattctttattcatatgggatttctacaatattcagtgtgatacctgccttctgtaagaaagaagatatcatagtcgcttaactgtacatgggtagtttgatgtgattgcggtgacgagggtgttgactgtttggtgaaatgcttgggacaaagtggccaacaagaatggagtcatggaacatcgacaggaggggtgcggcagcagcaaccgatgtatcccttggacaatctggttttgacaagatgcaaatcaatccgctgtacactgtattccgcacttgcacagattgtttggttaattacaagattatctcagtgttttgattggtacacttatgtatgaaatattgattggtactcatctatattatatgaattatattattattaaat

SEQ ID NO: 140775 - DNA, 1125 bp, Zea Mays
acctaacccttcggccttcgttgcggacccgccactcacttcttctctcgaccgcatcttttctccgcgccgccgctcgcctgcacttctacgtgtgaaccgcgtccgcgcctatggcctgcccgtgcccagctgccccctctccacacgagcctctctaggcgtcaagcgtgccattaagcaaccgtggcccccacccctcctcggctctctgcgtgagcacaagcacgtctctgtagcccatgttcaacggaagcgaaaggtgtcagtgctagaggatttggaaaggcgctgtttgataagaagacaaacccgtgtcctgcccattaattccactgaagaaaacatagaatgtgcatcataatgtcacagaaggcctaaaatgttgtagtgtgcggccattgctcacgaggaggcagagtgccgtgttgccgagtgccgctggaccacatacgattgttgatggtaaagaagttgtgaactttgcatcagcaaactacctcggtttaattggcaacgaaaagattattgattcttgcatcagttcattggagaaatatggtgttggttcttgtggtccacgtggcttttatggaacaattgatgtccatcttgactgtgagtcaaagatagctaaatttttggggactccagactccattctttattcatatgggatttctacaatattcagtgtgatacctgccttctgtaagaaagaagatatcatagtcgcgtaagttcaccgtattacaaaattatgaaattcacaagtattattggaaccttgacttgtttggtgtatcgagttaactgtacatgggtagtttgatgtgattgcggtgacgagggtgttgactgtttggtgaaatgcttgggacaaagtggccaacaagaatggagtcatggaacatcgacaggaggggtgcggcagcagcaaccgatgtatcccttggacaatctggttttgacaagatgcaaatcaatccgctgtacactgtattccgcacttgcacagattgtttggttaattacaagattatctcagtgttttgattggtacacttatgtatgaaatattgattggtactcatctatattatatgaattatattattattaaat

SEQ ID NO: 140776 - DNA, 1058 bp, Zea Mays
acctaacccttcggccttcgttgcggacccgccactcacttcttctctcgaccgcatcttttctccgcgccgccgctcgcctgcacttctacgtgtgaaccgcgtccgcgcctatggcctgcccgtgcccagctgccccctctccacacgagcctctctaggcgtcaagcgtgccattaagcaaccgtggcccccacccctcctcggctctctgcgtgagcacaagcacgtctctgtagcccatgttcaacggaagcgaaagttctaggtgtcagtgctagaggatttggaaaggcgctgtttgataagaagacaaacccgtgtcctgcccattaattccactgaagaaaacatagaatgtgcatcataatgtcacagaaggcctaaaatgttgtagtgtgcggccattgctcacgaggaggcagagtgccgtgttgccgagtgccgctggaccacatacgattgttgatggtaaagaagttgtgaactttgcatcagcaaactacctcggtttaattggcaacgaaaagattattgattcttgcatcagttcattggagaaatatggtgttggttcttgtggtccacgtggcttttatggaacaattgatgtccatcttgactgtgagtcaaagatagctaaatttttggggactccagactccattctttattcatatgggatttctacaatattcagtgtgatacctgccttctgtaagaaagaagatatcatagtcgcttaactgtacatgggtagtttgatgtgattgcggtgacgagggtgttgactgtttggtgaaatgcttgggacaaagtggccaacaagaatggagtcatggaacatcgacaggaggggtgcggcagcagcaaccgatgtatcccttggacaatctggttttgacaagatgcaaatcaatccgctgtacactgtattccgcacttgcacagattgtttggttaattacaagattatctcagtgttttgattggtacacttatgtatgaaatattgattggtactcatctatattatatgaattatattattattaaat

SEQ ID NO: 140777 - DNA, 571 bp, Zea Mays
ctttttccctagccaacattcttcctccctggcgcccccattctccacggcattgcagcatggagccctttccccagcgcgcaatagcaaggcctccatgggcgcgcgacccctcggctccagcttccgcggcgagctcccttccttcctcccctcgacacccagttttctgcagaagctcccaagcgcagagcctttcctcctcttcttccaagcgcgtgcgttcctcccacggagccaagctccccttgctcggacgccatagcttcgaaggccgcccccctgcgtgtcgggtggacgccagtcgggctcccccatggccgaagctaacgtcccctgctcctccacggcggcgggtcggcgcaggcacccactccgatggcgcctctgctcctcccatccagggcgtccgaactcctctcctttttcctccccgctcggagctctgctatggcttctcccatggcgccttcccccagcgggattcctcctctcccatggaaatcagcagccctacagggagcctctccccacgccctcggatgcttccctgtcggcgcaactccctccc

SEQ ID NO: 140778 - DNA, 1365 bp, Zea Mays
cagctcagcgttcgcctcaccaacagaaaacctcgcagctagcagcaagatcttagcacaaacaccacagcccacaggctgattaatcactccaagactaatcaaacgaacgcttagctaatagcgcgcgatcttttttccccctccccctcttgagtcttgagcgtgcgagaagagatggcgctgaacggcggcaagacgacgttggtgcaggacgaggagaagcagcagcttctgctggagaagcacaccgagaagcacttcacagcgggcgaggtggtccgggacatcatcatcggcgtctccgacggcctcaccgtgcccttcgcgctcgccgcggggctgtccggcgccaacgcctcctccgcgctcgtgctcaccgcggggctcgccgaggtcgccgccggcgccatctccatggggctcggagggtacctggcggcgaagagcgaggctgaccactacaaccgggagctgcagcgcgagcaggacgagatcgacaccgtccccgacgtcgaggccgccgagatcgccgacatcctgtcgcagtacgggctgggcccggaggagtacggccccgtggtgacctccctccgcaacaaccccaaggcgtggctggagttcatgatgaagttcgagctcgggctggagaggcctgagccccggcgcgcgctggtgagcgccgccaccatcgcgctgtcctacgtcgcgggcgggctggtgccgctgctcccctacatgttcgtgccggaggccgcgcgcgccatggccgtgtccgtcgccgtgacgctcgcggcgctgctcttcttcggcttcgtcaagggccgcttcacgggcgaccgccccttcttcagcgccgtccagaccaccgtcgtcggcgcgctcgcctccgccgccgccttcgccatggccagggccgtgcagtccatatgaagactggtgtgatgcagcaaaaatagtgaagcaggccggtcgccgcatgccccatatcaatcatcaccggccggctaggttggcgagggaaaataagtgcagctctatatgcatacgtggctacggtcactgcttctttgtttgatggctgcgtggtgtactattgtcagatgtggattattatttaggtcaagtcgattccaaactgtgacccgctgggctttggatccatttgtttttatctatctactggtaaattaaatgactgatgttgggctgtgtaattcggcaaccggaggcccaaactgggttccgctttgggctttgcctctattttctcctcaactactactactacctagtagtacacctagcaaggatttctagaagcgtgttcctaactgccctgtaaatccttctcgaaagaaaaaa

SEQ ID NO: 140779 - DNA, 4551 bp, Zea Mays
ttgtttccagcaaatcgcccgagttgtattactagtattttattcggcgcgtctccatcgcgaggccactcggctcggctgctcggctccggatcggcgtctctgctactaaactaaaataaaataaaacgctaaagcttatcgcaactcgttctctcggctgctgctcctgctgcttgctacttaaacaaacacatctcagcgtctcttgcgatcgctcaagagccaccaccaccagtccaccacgccccctgcacgcgacccgaggccaagaatcgcttccgttccgcgccgcctcctatatccagcgagcggcgctgccagcccacgcctcgctcgaatccctcctccttcctggaaacggggtttgctttccctgccccgccaaatcctttcttctccatccagccggttcctacccatcctgccggctgcggctgcggcagcggctgcctggcgctgccgtgcgttgcagagcgagggcgaggcggaggtggccaaatgccggtccaggaccgggtcgtcgtcgtcggcgagcgcgcgagactctgtctcccccctgccgccggtctgtcgaggtgtggtagtggtagtggccgtcccagctggagcacctgagacgtcgttgctcggtcgtccggattgatttcggccgaaagctgcttgtgggtttttttttccggaaagggagggagggagggagggcagccttttcggttttctgattgttactagttgctctgcggattcgattcccttgccgagatttatctcttcgccgccggagactggtggacagcagatcctcttccatctccgccggccgttcattcttaagctgcctgcgaagctttttcttgagaccctctccagagtactgttcgccggatcttggtttggagggcgagcggtgaaagatcgaatccttgtttggaggttcagcggcaggcagctcgctgtgacgtcgcccgtgcgggcatggtgtccagatcctactcgaacctcctggagctcgccgccggcggcagcggcggcgagccgctgccgtcgctggggcgccgccggataccgcgcgtcgtgacggcctccggcattgtgccggacctcgacgtctccgacgccgcctccgccgccgaccagtcctcccacgcgccgcgggagcgcgtcatcatcgtcgccaaccagctccccgtccgcgcctcccgccgcgccgccgccggcgccggcggcggcgggtgggacttcgcgtgggaccaggacagcctcctcctgcaggtcaaggacagcctccgcgcgcaccacggccgcgcggacgtggagttcgtctacgtcggcggcctccgcgacgacgtgcccccagccgagcacgaccaggtcgcgcacgacctcctcgagggcttccgctgcgttcccaccttcctgcccgccgacctccgctcccgcttctaccacggcttctgcaagcagcagctctggccactgttccattacatgctgccactgtcgccggagctaggcggccgcttcgaccgcctcctctggcaggcctacgtgtcggtcaacaagatcttcgccgacaagatcctggaggtgatcagccccgacgaagacttcgtctgggtgcacgattaccatctcatggtgctccccacattcctgcggaagcgcttcaaccgggtcaagctcgggttcttcctccatagccccttcccgtcgtcggagatctacaagaccctgcctgtgcgtgaggagctgctccggtcgctgctgaacgccgatctgattggcttccacacttttgattatgccagacacttcttgtcgtgctgcagcaggatgctcgggctcaagtatgagtcgcagaggggctacattgctctggagtactatggccggacagttactatcaagatcttgcctgtgggagtacacttggagcagctacggtcagtcctcaacctcccggagcttggggtcaaggtggccgagcttctgaaacagttctgtcatcggaaccgtctgctgttgcttggtgttgatgacatggatatcttcaaaggaattagcttgaagcttttggcgtttgagcagctcctaatgcagcatccggagtggcggggaagggtggtgcttgttcagatcgccaatccagcaagggggcggggaaaggatgtgagggaggtacaggaagagagcgatgcaatggtgaggcgcatcaacgacgcgttcgggcagccaggttaccagccggtgatactgatcgaccagcctctgcagttctatgagaggatggcttactatgtcgtcgcggagtgctgtttggtcactgcagtgagggacgggatgaacctgatcccatacgagtacgtaattgctcgacaagggaatgagaggatagatagtattctaggccttggtccggcttcaaggaagaagagcatgcttgtcgtgtcagagttcatcggctgctcgccctccctgagcggcgctatccgtgtgaacccttggaacatcgattcagtagccgacgcaatggactacgcgctggagatgccggaaggggagaaggtgttgagacatgagaaacaccacagatacgtgagcacgcacgacgtcgggtactgggcgaacagcttcctgcaagatcttgagcggatttgcctcgaccataacaggaggcgttgctggggcatagggtttgggctgaagttcagggttgtggccctcgacccaaacttcaagaagcttgcggtggagcacttggtcttggcctaccggaggacgaagaagcgtgtcattctcttagactacgatgggacgctgatgccgcagacttcgctcggtaagagtcctacctcaaggacgatagacatgttgaacagcctttgccgcgacaggaacaacatggtcttccttgtgagcgcaaagagccggatgactctgaacgaatggttcttaccatgtgagagccttggactagcagctgaacacggctgcttcctcaggtaaaataataacttcctgctgtctcccaagcagttcgtgatctgctactgctggagagcacacacactaatcgctgatgctgtcgacggttgtgtaggctgagaagagacgcagaatgggagacatgcgttccggtgatagactgcagctggaagcagatcgcagagcctgtgatgaagacctataccgagactacggacgggtcgactattgaggacaaggagactgccatcgtgtggtgctacgaggacgccgatccagatttcggatcctgccaggccaaggagctccacgaccatctggagagcgtgcttgcaaacgagccggtctcagtgaaagctggacccaacctcgtcgaggtgaagccacagggcgtaagcaagggcctggtggcgaagcggatcctgtcgacgacgcaggagcggggcgacgccgacgacgacctgccggacttcgtgctgtgcgtgggcgacgaccggtccgacgaggacatgttcgaggtgatcgcggcggcggcggccgcgaggggcgtgtcctccctgcaggcggaggcggaggtgttcgcgtgcacggtggggcgcaagcccagcaaggccaagtactacctggacgaccccgcggacatcgtgcgcctcgtccagggcctcgccagcgtctccgacgacgaccagacgcacgccccaccgccgccgcctccctcggcggcgacgacggcggcggacaccgtgccgaggtgaaccgtgtcggcgtgcgggggtgcggtgcagttagctctaggcggcatgagaccttgtggttgtggtggaactagtggaagggaccgtcgctcgcgactgttcgcaggtggtgtacaaaatgctctaggaatgttgtggtctgggaatgtccttgttcgtgctgcctcgtcctcgtcgcgtggccaccgcactgtgtacataaacataaggcactcgtcgaggtcgccggtcacgtcgatctgccgccctgaagctccaaaggtcgccgagacgctgcgggtcgcgttgcattccttctgtctgtgggtcgggtggggtggtgaccctcgtagccctcgctgcagctaatgatggcgagcaacagtgcagtggaggggaggggagtggaggtggtggttgcacttgctgacccgccgcacagcaacagtcgcgggcggtagccttatcctgttgcctatcggggcaaaggttcttctgccggtctaatcatgtttggtcgggataaggctctcgtgccgtgtttagcaacgagaatacaagagcgagattcctgccctcgatcgccgatggatggttggtctccagtggatttagcagcgcgtttcgtcttgggccctgggtggtccggctgccgacctggtccgggcacttgtgtgctctggaactggaaggcgaatagatagataaggctggagtagggtgtaactgtaagtcacctcgtagctgaatatggttctcagttgtaacatgtatctaccggttcgttttggtcgactccttttgaatgcatacatgcccggattgcgtt

SEQ ID NO: 140780 - DNA, 3699 bp, Zea Mays
cccttgccgagatttatctcttcgccgccggagactggtggacagcagatcctcttccatctccgccggccgttcattcttaagctgcctgcgaagctttttcttgagaccctctccagagtactgttcgccggatcttggtttggagggcgagcggtgaaagatcgaatccttgtttggaggttcagcggcaggcagctcgctgtgacgtcgcccgtgcgggcatggtgtccagatcctactcgaacctcctggagctcgccgccggcggcagcggcggcgagccgctgccgtcgctggggcgccgccggataccgcgcgtcgtgacggcctccggcattgtgccggacctcgacgtctccgacgccgcctccgccgccgaccagtcctcccacgcgccgcgggagcgcgtcatcatcgtcgccaaccagctccccgtccgcgcctcccgccgcgccgccgccggcgccggcggcggcgggtgggacttcgcgtgggaccaggacagcctcctcctgcaggtcaaggacagcctccgcgcgcaccacggccgcgcggacgtggagttcgtctacgtcggcggcctccgcgacgacgtgcccccagccgagcacgaccaggtcgcgcacgacctcctcgagggcttccgctgcgttcccaccttcctgcccgccgacctccgctcccgcttctaccacggcttctgcaagcagcagctctggccactgttccattacatgctgccactgtcgccggagctaggcggccgcttcgaccgcctcctctggcaggcctacgtgtcggtcaacaagatcttcgccgacaagatcctggaggtgatcagccccgacgaagacttcgtctgggtgcacgattaccatctcatggtgctccccacattcctgcggaagcgcttcaaccgggtcaagctcgggttcttcctccatagccccttcccgtcgtcggagatctacaagaccctgcctgtgcgtgaggagctgctccggtcgctgctgaacgccgatctgattggcttccacacttttgattatgccagacacttcttgtcgtgctgcagcaggatgctcgggctcaagtatgagtcgcagaggggctacattgctctggagtactatggccggacagttactatcaagatcttgcctgtgggagtacacttggagcagctacggtcagtcctcaacctcccggagcttggggtcaaggtggccgagcttctgaaacagttctgtcatcggaaccgtctgctgttgcttggtgttgatgacatggatatcttcaaaggaattagcttgaagcttttggcgtttgagcagctcctaatgcagcatccggagtggcggggaagggtggtgcttgttcagatcgccaatccagcaagggggcggggaaaggatgtgagggaggtacaggaagagagcgatgcaatggtgaggcgcatcaacgacgcgttcgggcagccaggttaccagccggtgatactgatcgaccagcctctgcagttctatgagaggatggcttactatgtcgtcgcggagtgctgtttggtcactgcagtgagggacgggatgaacctgatcccatacgagtacgtaattgctcgacaagggaatgagaggatagatagtattctaggccttggtccggcttcaaggaagaagagcatgcttgtcgtgtcagagttcatcggctgctcgccctccctgagcggcgctatccgtgtgaacccttggaacatcgattcagtagccgacgcaatggactacgcgctggagatgccggaaggggagaaggtgttgagacatgagaaacaccacagatacgtgagcacgcacgacgtcgggtactgggcgaacagcttcctgcaagatcttgagcggatttgcctcgaccataacaggaggcgttgctggggcatagggtttgggctgaagttcagggttgtggccctcgacccaaacttcaagaagcttgcggtggagcacttggtcttggcctaccggaggacgaagaagcgtgtcattctcttagactacgatgggacgctgatgccgcagacttcgctcggtaagagtcctacctcaaggacgatagacatgttgaacagcctttgccgcgacaggaacaacatggtcttccttgtgagcgcaaagagccggatgactctgaacgaatggttcttaccatgtgagagccttggactagcagctgaacacggctgcttcctcaggctgagaagagacgcagaatgggagacatgcgttccggtgatagactgcagctggaagcagatcgcagagcctgtgatgaagacctataccgagactacggacgggtcgactattgaggacaaggagactgccatcgtgtggtgctacgaggacgccgatccagatttcggatcctgccaggccaaggagctccacgaccatctggagagcgtgcttgcaaacgagccggtctcagtgaaagctggacccaacctcgtcgaggtgaagccacagggcgtaagcaagggcctggtggcgaagcggatcctgtcgacgacgcaggagcggggcgacgccgacgacgacctgccggacttcgtgctgtgcgtgggcgacgaccggtccgacgaggacatgttcgaggtgatcgcggcggcggcggccgcgaggggcgtgtcctccctgcaggcggaggcggaggtgttcgcgtgcacggtggggcgcaagcccagcaaggccaagtactacctggacgaccccgcggacatcgtgcgcctcgtccagggcctcgccagcgtctccgacgacgaccagacgcacgccccaccgccgccgcctccctcggcggcgacgacggcggcggacaccgtgccgaggtgaaccgtgtcggcgtgcgggggtgcggtgcagttagctctaggcggcatgagaccttgtggttgtggtggaactagtggaagggaccgtcgctcgcgactgttcgcaggtggtgtacaaaatgctctaggaatgttgtggtctgggaatgtccttgttcgtgctgcctcgtcctcgtcgcgtggccaccgcactgtgtacataaacataaggcactcgtcgaggtcgccggtcacgtcgatctgccgccctgaagctccaaaggtcgccgagacgctgcgggtcgcgttgcattccttctgtctgtgggtcgggtggggtggtgaccctcgtagccctcgctgcagctaatgatggcgagcaacagtgcagtggaggggaggggagtggaggtggtggttgcacttgctgacccgccgcacagcaacagtcgcgggcggtagccttatcctgttgcctatcggggcaaaggttcttctgccggtctaatcatgtttggtcgggataaggctctcgtgccgtgtttagcaacgagaatacaagagcgagattcctgccctcgatcgccgatggatggttggtctccagtggatttagcagcgcgtttcgtcttgggccctgggtggtccggctgccgacctggtccgggcacttgtgtgctctggaactggaaggcgaatagatagataaggctggagtagggtgtaactgtaagtcacctcgtagctgaatatggttctcagttgtaacatgtatctaccggttcgttttggtcgactccttttgaatgcatacatgcccggattgcgtt

SEQ ID NO: 140781 - DNA, 1098 bp, Zea Mays
atggagcaaggcggcaagatggcccatgggtgggctgccagggatgcctccggcctcctctccccttacagcttctcaagaagggttcagggggacgacgacgtgacgatcaaggtgctcttctgcggcatctgccacaccgacctccacatcatcaagaacgagtggggcaatgccatgtaccctgtcgtccccgggcacgaggtcgtcggcgtcgtcacggacgtcggccatggcgtcagcaagttcaaggccggggacacggtgggcgtgggctacttcgtcgactcctgccgctcctgcgagagctgcagcacggggcacgagaactactgccccgacctcgtactctcctccaacggcgtggaccaccaccaccacgacggcggcgcgagcgcgagcgcgaccaccaaggggggcttctccgacgtgctggtcgtcagccaggacttcgtggtccgggtgccagagagcctgcctccggacggcgccgcgccgctgctctgcgccggagtcacggtgtacagcccgatggtgcagtacgcgctcaacgggccgggcaagcacctcggcgtcgtcggcctcgggggcctaggccatctggccgtcaagtttgggaaggcgttcggcatgacggtcaccgtcatcagctcgtcgcctgccaagcgcgaggaggcgctcggacgccttggcgccgacgcgttcttggtgagccacgacgcctcgcaaatgaaggctgcagccgccacgatggacggcatcatcgacacggtctcggcggggcaccagatcgtgccgctgctggcgctgctgaagcccatggggcagatggtggtggtcggcgcgccgagcacgccgctggagctgccggcgtacgccatcatcacgggcgggaagcgggtggccgggaacggcgtcgggagtgtcgcggactgccaggcgatgctggacttcgcggcggagcatggcgtcaccgctgacaccgaggtcgtgccgatggactacgtcaacaccgccatcgagcggctggagaagaacgatgtcaggtaccgcttcgtcgtcgacgtcgcgggcagccagatggataccgttgcttag

SEQ ID NO: 140782 - DNA, 784 bp, Zea Mays
gatcgagtcaccaacaagagtagtagtcggagccgtccgtagtagctagcgtacgtacgtgtgagtttgtgaccaattcagagaagcctcgatcatcgttcgcttcgcttcgcttgtgtgtcgatatatatggcgagatcgccgtttgttccgatggatcaggggaaagagcaaggcgccggacgaggagcggccggcaataataaggagcggcaggaggaggaggtgctgctggtgcacagccaggtgcggcggatcaagaaggaggacgaggaggccttcagggagcgcctcctgaagctgcgcctgctggagacccggcccaacaccggcgccggcggcgtggcctggcgagccccgcgctccctgtcgccgctccgccgtgccggcagcgccatcatcccggtcccggtgagcgagtgactagtagcgagcatccgtcgacacgcggttctctcggctgcccgcgcgcccgccgccggttgtagatatcgctaggcgcgtacgtagcgagcgtgaccagtgttcttggggggtgttagtgagtgagcctgcccgtgctttgcgcctgcgcgcgcggacatgggatcggagcttggtagacgacgacggtatatagtaggtagcatcgccatgtgtacgtactgcgtggttcctggtacagtagcatagcatgctctgtttctgtatcctgctgtgctcttcttcttggtggtggtggtgtgtatgtatatataaatatatgtttacgatgagttatgagagggagtttattacctgctta

SEQ ID NO: 140783 - DNA, 521 bp, Zea Mays
ctcgccattatcagacacctacttggagcatagatagaaacgcttctatggtccagtaggtagaatattattatttaggatcatagacttttacaagaccacactttaaactctaaaggcttacaacactaatgaacacgtccattaagtagaattcagattttaactgaagcagaccaaacaatgccattcactactaataatctaaacgatcaatatccaacttcgacatttatcgatcaacaagcatggattaccatagccattatatacaacaagtcttcaacaatcaagaatcaagaatttactaatcctacctagccaaacaagaatgactcgagaaatcaacttaatacttgctgattttggacagcagcacaacagttatgtgtttagctcataactcacaagatatgcatccaaaaatattaaactaggactttttggaaagcttataaagtcctctataacttttgtattatcatcataacaagattcgacctttagaaaggtcaaactgt

SEQ ID NO: 140784 - DNA, 388 bp, Zea Mays
catacttcctagaagcatacaggcccatgaggaaaggagaccttttccttgtcatgggtggaatgagaagcgtggaattcaaagtgatagagactgacccttctgaatattgtatcgttgcccagatactgaaatattttgtgatggggagcctattaagagagaggatgaggagcgtcttgatgaagttggttattatgatgttggagttagaaagcaaatggcccaaatcagagagcttgttgagcttccactacgccatcctcagcttttcaaatctattggtgtgaagccaccaaagggcaatgggccacctggttctggaaagactcttattgctcgtgctgttgcaaacgagactggagcctttttctttctaatcaatggt

SEQ ID NO: 140785 - DNA, 546 bp, Zea Mays
ttgttgtcgatgatggccatggttattgactccaggaaaagaaaatgatatggtagaagagttggtattacttatgggccaatggaggaaagggatatgatgagacttgattatcttaacactaaaatatggatgactgatacaacatgtgtgaacatgcttagacttagtaggtctagtttctttcgcttttgcacgggctttagagacaggggtttacttgaagatacaatacacatgtgtgttgaggaacaagtggccatgtttttgaacatagtgggacacaaccttagtcgttacttcaacaaagtgcttcatgctattggagagctacgagctgaacttattaggcaaccatcattggatactccatccaaaatagtaggaaatccaatatgggatccctactttaagatgtgatgttctgttatccaatattctccttcaagaattttcactatttaaacccataaggcccttaactgtattttggcttgtattgcataaacataggattgcattggagatattgatggcagacatata

SEQ ID NO: 140786 - DNA, 2316 bp, Zea Mays
cgcacggcctcttctcacgccgcctcgacttcctcttccagcccccgccatccatcctcctcctctgcacatgtacactcacctcaaaacccccaagcatcgtgctaaaacccggcctagccctcgaatccccccttgcccgcgcggagtagacgagcccagcccgtcccatcgaccatggcatcctcagggtccgccgctaacctctggtactgcttggcctaagcatcgcgggcgtcctcctggcagcgcggcgattgaggcaccatacgcgccctgaccacgacgctttcatggcccgcctagagctcctcccaccgccacagcctccgccgtcgcaaggaggccagcccgggcgaggtggcgcaggccatcgccatgttccccagatcctgttccacagcgtcgccttcttccaggtacacccagctctcgccttcttcaggcacagctccaagccgtcaagcgccacccagtcccgattcccttcacaccgtctctcgccctatcctatctgacggtccaagactctgagtttgccgtggtgagtgtgcttcactgcttctctaattcctcccgttgcattggttcgatggaatatggcgctgaggaggaggcggcgaccgatgaccccagtagcagcgggggcaccaggcgttgggcgactgaaggggagcccgaagctgactgtggatgcggacatgcgagatatggcgaagacggccgcgtggagcgttagttcctacagggctggcaacggtgtcacggccctgcacgacaacaaccttgacacctgccgacagtctgatggggctcaagtgtacagccgcaaatggtgaacatccagttccagaagaagttgcaggcgtgtagctgcagcctgcagctcgtcgtgatatacgtggatttcaagctcgaagaagtgctccactaaaaatgaaacgttagaattcagctgagcatcttactctacattgcagcaaactgtgacgtgctttgctgagttagattagtctggcatgcttgagtttcccatggtagggcgccgcgaagcgcgcctctttttctagtaaacaaaagcgcaaatggaagccgcttcacgtagcagcccgtgcaaagcaagcgaaagggacccgcgagcagcgaagcaaccaggccaagcgcaacacgacctacaccgtggggccggccatccaggagacacgcgtattccgtcctggacaaaggaccgcatccacttgctagctcgctagtcattacctgatttcgccgcgggcgtcgtcgtctttctccttcctcgtcctttataaaggaaggtggcaatggcctttccctctgcaccgccaagttagcttgcctagccacatcaaagcaaagctagctacggccagctttggcgatctgcttgcttctctctgagcgtttctttacaactaaaccaactgagcaatggggaggcaaccgtgctgcgacaaggtggggctgaagaagggcccgtggtcggcggaggaggacgagaagctcgtcaccttcctcctcaccaacggccagtgctgctggcgcgccgtgcccaagcttgccgggctactgcggtgcggaaagagctgcaggcttcggtggaccaactacctgcgcccggacctcaagcgcgggctgctgtcgtcggaggaggagacgacggtgatcgacctgcacgcgcagctgggcaaccggtggtccaagatcgcgtcgcacctgccgggacgcacggacaacgagatcaagaaccactggaacacgcacatcaagaagaagctgaggaagatgggcatcgaccctgccacccacaagcccctccacccacagccagcagctcctcctccgactcagcaggagcaggacacgggcgggtcgcccgaggaggagggggagaaggccgacgcggtcatgatggcagcagctacgccgattatcgggcacgagacggcgccgttctttaccgacgaggaggagatgctggcgcacctccttgacgacatcgacgacttcccacccgcggcttattctcccgacgactcttcttcgccctcctcctcctcctccgcgtcccggtcgtctcactcggcctccgtcgtcacagcgccgtcgtcgagcggagctggtggaagcagcgtcgccgacggcgagcggccgctgcagatggtggagtggcctgagtccatgtggctggacgacgacgtggtgcccggcctggccacgacgccgtgggagttcgaggacgacaaccccttcctcgcctaccagaggaacaacgctctgttcgatcaccagctggag

SEQ ID NO: 140787 - DNA, 2560 bp, Zea Mays
cgcacggcctcttctcacgccgcctcgacttcctcttccagcccccgccatccatcctcctcctctgcacatgtacactcacctcaaaacccccaagcatcgtgctaaaacccggcctagccctcgaatccccccttgcccgcgcggagtagacgagcccagcccgtcccatcgaccatggcatcctcagggtccgccgctaacctctggtactgcttggcctaagcatcgcgggcgtcctcctggcagcgcggcgattgaggcaccatacgcgccctgaccacgacgctttcatggcccgcctagagctcctcccaccgccacagcctccgccgtcgcaaggaggccagcccgggcgaggtggcgcaggccatcgccatgttccccagatcctgttccacagcgtcgccttcttccaggtacacccagctctcgccttcttcaggcacagctccaagccgtcaagcgccacccagtcccgattcccttcacaccgtctctcgccctatcctatctgacggtccaagactctgagtttgccgtggtgagtgtgcttcactgcttctctaattcctcccgttgcattggttcgatggaatatggcgctgaggaggaggcggcgaccgatgaccccagtagcagcgggggcaccaggcgttgggcgactgaaggggagcccgaagctgactgtggatgcggacatgcgagatatggcgaagacggccgcgtggagcgttagttcctacagggctggcaacggtgtcacggccctgcacgacaacaaccttgacacctgccgacagtctgatggggctcaagtgtacagccgcaaatggtgaacatccagttccagaagaagttgcaggcgtgtagctgcagcctgcagctcgtcgtgatatacgtggatttcaagctcgaagaagtgctccactaaaaatgaaacgtagggcgccgcgaagcgcgcctctttttctagtaaacaaaagcgcaaatggaagccgcttcacgtagcagcccgtgcaaagcaagcgaaagggacccgcgagcagcgaagcaaccaggccaagcgcaacacgacctacaccgtggggccggccatccaggagacacgcgtattccgtcctggacaaaggaccgcatccacttgctagctcgctagtcattacctgatttcgccgcgggcgtcgtcgtctttctccttcctcgtcctttataaaggaaggtggcaatggcctttccctctgcaccgccaagttagcttgcctagccacatcaaagcaaagctagctacggccagctttggcgatctgcttgcttctctctgagcgtttctttacaactaaaccaactgagcaatggggaggcaaccgtgctgcgacaaggtggggctgaagaagggcccgtggtcggcggaggaggacgagaagctcgtcaccttcctcctcaccaacggccagtgctgctggcgcgccgtgcccaagcttgccgggctactgcggtgcggaaagagctgcaggcttcggtggaccaactacctgcgcccggacctcaagcgcgggctgctgtcgtcggaggaggagacgacggtgatcgacctgcacgcgcagctgggcaaccggtggtccaagatcgcgtcgcacctgccgggacgcacggacaacgagatcaagaaccactggaacacgcacatcaagaagaagctgaggaagatgggcatcgaccctgccacccacaagcccctccacccacagccagcagctcctcctccgactcagcaggagcaggacacgggcgggtcgcccgaggaggagggggagaaggccgacgcggtcatgatggcagcagctacgccgattatcgggcacgagacggcgccgttctttaccgacgaggaggagatgctggcgcacctccttgacgacatcgacgacttcccacccgcggcttattctcccgacgactcttcttcgccctcctcctcctcctccgcgtcccggtcgtctcactcggcctccgtcgtcacagcgccgtcgtcgagcggagctggtggaagcagcgtcgccgacggcgagcggccgctgcagatggtggagtggcctgagtccatgtggctggacgacgacgtggtgcccggcctggccacgacgccgtgggagttcgaggacgacaaccccttcctcgcctaccagaggaacaacgctctgttcgatcaccagctggaggcatggaacaacgacggcagggtcgagctgttctgaggcgctgagatgatctacttcttcctcgatcgtcattagattagatgtagttaattaatacgtcatccccggcctacgatcgagcagttcgcgttgcacagaccagagcactcacggccgttgaaaataagcaagagaaagagatgaaagtggttgcacgcccggtttcttggttttctaaaacctttggccgggccgaccacaacttgcaaaggaacagttggagagaaaaaaaaatgttcgttagcaatctgccagtgctgtttggcattggagaacccttccgtggattgtttattgga

SEQ ID NO: 140788 - DNA, 248 bp, Zea Mays
acagattctactccctttgccttgcgattcgatggttttgagatttaattaattctatgtcgtgcggcagctcgtcgtgatatacgtggatttcaagctcgaagaagtgctccactaaaaatgaaacgttagaattcagctgagcatcttactctacattgcagcaaactgtgacgtgctttgctgagttagattagtctggcatgcttgagtttcccatggtaaaattatcattcatttgcattgta

SEQ ID NO: 140789 - DNA, 132 bp, Zea Mays
atgggtaaagagtcaatcagaagatcaacaaggagggaaccagtttgcctcggatgtagggatggcaacgggtcggactcggatcggatattggaaatatccgtccgcagacatatccacggttatagataa

SEQ ID NO: 140790 - DNA, 569 bp, Zea Mays
atggttcaaaaaaaaaaaacccagcagcctaccaatgaactgcaactcaaacggtttaaggttcattgtgatgcagcaggtagcggctcactggcctcgagaagctcatcaagcaaaccggtgaaaaccacggaatcagtctccttgggaatgaacttgaggagcgcggaagggactaggtcctcctcttgtagggtgcgtgcccgctctcccgggtttggaaaatgtggcaccacacgtggcttaggaatggctggagagatgagttcgaattccaaaccttgttgcttcagagcagatgtgacgaactcatacagcgaaccggtggcctcccctggtaggaatatgccctgaagaatcattctatctggaaactgaactcgtatgactgcttgtttatacttctgtcgagcagccaatgcgtgcttctccttgtaagactttggtatcagcaacctagattgttctaacctttccctcctcatctttgcttcattccttatctcctcaccactaagcttgtaaaaggaatctggtacatcattttgtggcacagaactcccgggaac

SEQ ID NO: 140791 - DNA, 2648 bp, Zea Mays
atggctacccaagaagaaaccatggtaactgaatcatcaccctctagtgattcatctatcactattgggttggccgtgagcagctccaagtccagcaagtatgcagtgaattgggctctgaaaaacttcggtaccagacagaggataaggttcatgctcattcatgtccggcaaaaggtcacactcgttccaaccccgatgggcaactatgttcctgttgatcaagtgagggatgacattgccagtgcatatgaaaaagaagtcgaatgtgaggcccaaaatatgctccttatgtacaagaacatgtgtgatggcaaggttgaagctgaagtattggttgtcaagggtgatgatgtggcagaaactatttcaggtggaagttcaagggcactaggatgttctctcgaatatgcaagtgtgttccaagcttttgtatggtgtatgctatttcaaaaggtgggttgtccatggtttattctcttggatcagaaagtgacaacagttctaagatactccaggtcaacgagagttctaacagtgaactttattcagataagtcatcagtatcagatattacaccttccataatttccagatccaactcgctcgatgggaatctggatagtcccccatctacacatcataattggtcacagtctttacaagaacacctctctagaagcacttcatctaccattggtaaagatcaaaggatcagtccttgtactgatggatctagtaacttggggatcttagacaaaaccccaaccatgagcagggcactgcaggaattgatgttgttagaggacgaggcaagcgctccttgtgctactggtcaaatttctgcatctactaatttgcctctctccgacaaagctctaactgtaaagagtgcgctgcaggaattgatgctttcagaggacaaggcaagcactcattgtgctagtggtcaaatatctggatctagtaacttccccatctcatacaaagctccaacagataatgccaattttgagcttgaaaaactcaggattaaactagaacatatgaaaggagtgtgcaaacttgttcaggatgagtctaccagtgcttctcagcaaatgattgacctagttgaaagacgtgctcaagaggaagctcggctggcggaggtccgccagaggatcaacattaccactgaggcagcgcggaaagagagggagcagcggtacgctatagaggcgcaagctaggcatgtgagggaccttgcaaaagaggaagctttgaaaaagcagaatttgcagcttaggttatcaagggaggctgataatgtgcaaaagctggagaaacttcttgaattgggaggcaagtcatacacagtatttacatgggaggagatggaatctgctacatcatcgttttcggaggcacttaagattggatcgggagcattcgggacagtgtacaagggcaaagtccaccataagactgtggccataaaagtactcaaatctgacgacagccacattgccaaacattttgaaaaggagcttgagattttgggtaagacccgacatcgccatttgttgctgctgctaggtgcctgtctggacagagcttgcttggtatacgagtacatggagaatggcagccttgaggatcggctgcagtgcaaaggagacactgccccactcccatggtaccaccgtttccgtattgcatgggaaataacattggcacttatcttcctacacagttcaaaaccaaagccaattatccaccgtgacctcaagcctgcaaatatactccttgacagaaatttcactagcaaaatcggtgatgcaggccttgcaacatttcttccattaagggacacttcgtcaacacatacaattcgaaaatcaacagatctagttggtacactgttttatctggacccagagtatcagaggacaggtcaagtttcagcaaaatctgatgtatacgctttgggcatggtgttcttgcagcttctgactgcaaagtcaccaattgggctagcagacactgctgagagagcaatggaagaggatcaccttattgacattctggaccaacgtgcaggaaattggcctgtgcgagaagcgcatgagctaactcagcttggcctccgttgtttggaaatgcgaagcaaggatcgacctgacctgaagtctaaggttcttgtagttttagagcggctgaacaatcttgccagcactgtgtatcattcggtgcagcccatcccaactgcaccaccaagccattttatctgccctatactcaagagggtaatgcaggatccatgcattgcgtctgatgggtactcgtatgaacgggttgcgattgagatgtggcttaatgagaatgatgtgtcaccattgacgaaggcgcgacttcctgacaaaaacttggtgcccaatcttgccctgatatgcctgatcaattcttggaagggagaggtaggagctactgggcccattcgctgagctttactacccaaggatatcgcattagaagctaatgctgtacaggtttgtcttgataacctccatacactgtagataccgtgatcgggtgagttctctgtaagtagcagttttgcagcatctcttagatagtacagtgtgatagatcctgaaggttacttc

SEQ ID NO: 140792 - DNA, 1410 bp, Zea Mays
ctggatttgttaagtgcagtgagtacctactacaaaaacaaagctgagcacgagagtgaagccacagcccatccgatccgttccattgtcgtcgtcttccaatttccaaacgagctgagcgcccataagtttcctattgattttgcgtcgcaacagtacgttgcacgatcgcgatgcgccgtcgtctttgcgcatttggttttgcccgtgtcctactcctagctaagtccaactagtgtcacgggacggcttcgggataatgattggttaattgttccctataaccagctctataggtggccttgcagttgtgtgtttaagctgcaactcgatcagaggagttgttgttgcaagggaagggatcatgcatgcatgcccactcacctctttcttcaacgccggcgctggagccgccgccggcgccgggttcttgccggacatcagcgcggagggcggcggcgctgcgacgacgccctggtccctggccacgcacagctgcatgatccgctcggcggcctcggcggggtcccggctctcctgcatcagccgcgccacgtcggccttgggcaggcgcatgcgcagccgcaccgcgccgtcggcgcccacctccacggacgacggcggcgacggcgacggcgacgcggcggcgaggcgcgcggcggcgggcggcggcaggatggacgacacgtccgagacggtgcgccgggacagcatcaggccctccaggcgctcgcgggcgcccacgcgcagcgcgcccgaccacgtcttgcgcggcgcgcgcgggtcgtcgccgtccccggcgccgccgcgggggatctgcaccaggaagtagagcttcccgggcttgagcggcgcgtcgcggtccagcgggcgcgcgcgcacgcccagccgccgcacctcctccgactccaggagctggtggcccgggtggccgcgcagcgccgcgcacgccgccgcgggggtcttgtagcggaacgtggcgccgtccaccgtcatcaccttggccgcgcgccgcctgcccgccagagcgttgcccatggcgcggtggcgtggccgcacgccgcgcgcccgcaggccttcgggtgttgctttgctagcgacgaggagatgctagctgctggggaggaacaagtgacggccttcttccagaaacgatgatgggaaaacgagagaagatcgagatcgggactgggcaactaaccgaccactacaacgcccgtatcgccaacgtcgtagtaccatgtatcatcgtcctttattgcaatcatcatcagtcatgatggaacacgcgcacggtgttgtgtgtgcgcgcgcgaatcgcgatatcaacataattagggctgatttgtaggagagaaatctccttacaattcaattttaaataacaaggggattccttcttatggattc

SEQ ID NO: 140793 - DNA, 1839 bp, Zea Mays
ctctcagtaggggccggaataaaaatctcctcgccttcctctcctacgccgcctgacctctgctgtccgcctcaacggtccaaccctccggttcgacgtaggcgccggcggcgaaatgaaggtctccgtgaagacgctcaagggatccagcttccatatcgaagtggatcctaccgacaaggttgccgacgtgaaaaaggttatagagagtatacaagagcaggcttcctatcctgctgaccaacaagtgcttatacaccaggggaaggtgctcaaggacgacacaacattggaggaaaaccaagtagttgaaaataattttcttgttataatgctcagacaggtaggctacttgtttattattctggttgacacatgggcacatgacaaatcacgggtgtatgacttggtatgataataaaattattactgagatatgaataactgataacattaactgaataactgtcatagtgcattggattatttgaaagaatttgtgcttcaatttctatggctagcttattagcagtattttatatatggatgcaaaggctgctgtgaatttggaatgtctacgatagcatcagaaatgttctatatatcttatcaattgtaacctttcacagaacaagggatcatcaagtgcagcaccagctaaggtaaccgcgaatcaggcaccctctactcagacagtgcctgctactccacctcaaacgtcagcagccccagatgcaccggcacctattgtacctgtcagtgcaccggctgcaactgctacagcctcagcagctcctgctgttgctgtctcgtaagtttctgattttccttctatcttagatatttaactaatcttgtaataaacataattgttgcttgatgatgtattgatatttcctattaaaaatagctcactgaggcggatagttatggtcaggctacctcaaacctagttgctggcagcaacttggaaggaacaattaaatccattcttgaaatgggtggcgggacatgggatagagacactgtactacgtgctctgcgggctgcgtacaacaatccagagcgtgctgttgagtacttatattctgggattcctgaacaaatggaggttcctgcaccgcctccgagttcccaaccagtcgaccctgttcaggcggtacaaccagctcaagctggaccaaatgctaaccctctcgacctctttccccaatctcttccgaatgattccgctaatgccaacacaggaaatcttgatgttttgcgtaataactcacagttccaaaacctacttggtttggttcaggctaaccctcaaattttgcagccattgcttcaagaattgaggaaacaaaatccccgggttatgcagctaatccaggaaaaccaagcagagtttatgcggttgattagtgagccactagagggagacgaagagaatgaaatgatgctggatcagatggcagatgcaactgagaccattgcagtcactccagaggagaatgaagctatacttcgtcttgaagggatgggctttgaccgggcactcgtcctggaagtgttcttcgcctgcaacaagaacgagcagctggccgccaactacctcttggatcacatgcacgagttcgacaacgatgacgggctcggagggcctccattgtgatgcgatgcgaaggctgtggacagaaaataggaaaacgttttgggatttgtctcgtctgtccgctccgctccccctacatttctttgctgtttagtacataattctagatttacagaaaagacaaagtttactcttttctggatcatatgttttgtgctacttattgctgttctggc

SEQ ID NO: 140794 - DNA, 1745 bp, Zea Mays
ctctcagtaggggccggaataaaaatctcctcgccttcctctcctacgccgcctgacctctgctgtccgcctcaacggtccaaccctccggttcgacgtaggcgccggcggcgaaatgaaggtctccgtgaagacgctcaagggatccagcttccatatcgaagtggatcctaccgacaaggttgccgacgtgaaaaaggttatagagagtatacaagagcaggcttcctatcctgctgaccaacaagtgcttatacaccaggggaaggtgctcaaggacgacacaacattggaggaaaaccaagtagttgaaaataattttcttgttataatgctcagacagaacaagggatcatcaagtgcagcaccagctaaggtaaccgcgaatcaggcaccctctactcagacagtgcctgctactccacctcaaacgtcagcagccccagatgcaccggcacctattgtacctgtcagtgcaccggctgcaactgctacagcctcagcagctcctgctgttgctgtctccactgaggcggatagttatggtcaggctacctcaaacctagttgctggcagcaacttggaaggaacaattaaatccattcttgaaatgggtggcgggacatgggatagagacactgtactacgtgctctgcgggctgcgtacaacaatccagagcgtgctgttgagtacttatattctgtaagaatgattctttgtcctcgttactttctaggccttacatgcgatgaactttcagcgatttatgtgtgcccaggtacgtttaactagtgaacacatctattatataaagtagattgaagctgcatgcacatatgtttggtttgaatatttcgtgaccttagaagtgaattgccgttttcaacctgcaacatgaggatacaattttgttttacaattgtagacactaatgtccttcatcttctgtttaggggattcctgaacaaatggaggttcctgcaccgcctccgagttcccaaccagtcgaccctgttcaggcggtacaaccagctcaagctggaccaaatgctaaccctctcgacctctttccccaatctcttccgaatgattccgctaatgccaacacaggaaatcttgatgttttgcgtaataactcacagttccaaaacctacttggtttggttcaggctaaccctcaaattttgcagccattgcttcaagaattgaggaaacaaaatccccgggttatgcagctaatccaggaaaaccaagcagagtttatgcggttgattagtgagccactagagggagacgaagagaatgaaatgatgctggatcagatggcagatgcaactgagaccattgcagtcactccagaggagaatgaagctatacttcgtcttgaagggatgggctttgaccgggcactcgtcctggaagtgttcttcgcctgcaacaagaacgagcagctggccgccaactacctcttggatcacatgcacgagttcgacaacgatgacgggctcggagggcctccattgtgatgcgatgcgaaggctgtggacagaaaataggaaaacgttttgggatttgtctcgtctgtccgctccgctccccctacatttctttgctgtttagtacataattctagatttacagaaaagacaaagtttactcttttctggatcatatgttttgtgctacttattgctgttctggccgcattgggccagcatgcagttattcacgggttcaacctgac

SEQ ID NO: 140795 - DNA, 1713 bp, Zea Mays
ctctcagtaggggccggaataaaaatctcctcgccttcctctcctacgccgcctgacctctgctgtccgcctcaacggtccaaccctccggttcgacgtaggcgccggcggcgaaatgaaggtctccgtgaagacgctcaagggatccagcttccatatcgaagtggatcctaccgacaaggttgccgacgtgaaaaaggttatagagagtatacaagagcaggcttcctatcctgctgaccaacaagtgcttatacaccaggggaaggtgctcaaggacgacacaacattggaggaaaaccaagtagttgaaaataattttcttgttataatgctcagacagaacaagggatcatcaagtgcagcaccagctaaggtaaccgcgaatcaggcaccctctactcagacagtgcctgctactccacctcaaacgtcagcagccccagatgcaccggcacctattgtacctgtcagtgcaccggctgcaactgctacagcctcagcagctcctgctgttgctgtctccactgaggcggatagttatggtcaggctacctcaaacctagttgctggcagcaacttggaaggaacaattaaatccattcttgaaatgggtggcgggacatgggatagagacactgtactacgtgctctgcgggctgcgtacaacaatccagagcgtgctgttgagtacttatattctgtaagaatgattctttgtcctcgttactttctaggccttacatgcgatgaactttcagcgatttatgtgtgcccaggtacgtttaactagtgaacacatctattatataaagtagattgaagctgcatgcacatatgtttggtttgaatatttcgtgaccttagaagtgaattgccgttttcaacctgcaacatgaggatacaattttgttttacaattgtagacactaatgtccttcatcttctgtttaggggattcctgaacaaatggaggttcctgcaccgcctccgagttcccaaccagtcgaccctgttcaggcggtacaaccagctcaagctggaccaaatgctaaccctctcgacctctttccccaagaaatcttgatgttttgcgtaataactcacagttccaaaacctacttggtttggttcaggctaaccctcaaattttgcagccattgcttcaagaattgaggaaacaaaatccccgggttatgcagctaatccaggaaaaccaagcagagtttatgcggttgattagtgagccactagagggagacgaagagaatgaaatgatgctggatcagatggcagatgcaactgagaccattgcagtcactccagaggagaatgaagctatacttcgtcttgaagggatgggctttgaccgggcactcgtcctggaagtgttcttcgcctgcaacaagaacgagcagctggccgccaactacctcttggatcacatgcacgagttcgacaacgatgacgggctcggagggcctccattgtgatgcgatgcgaaggctgtggacagaaaataggaaaacgttttgggatttgtctcgtctgtccgctccgctccccctacatttctttgctgtttagtacataattctagatttacagaaaagacaaagtttactcttttctggatcatatgttttgtgctacttattgctgttctggccgcattgggccagcatgcagttattcacgggttcaacctgacaa

SEQ ID NO: 140796 - DNA, 1795 bp, Zea Mays
ctctcagtaggggccggaataaaaatctcctcgccttcctctcctacgccgcctgacctctgctgtccgcctcaacggtccaaccctccggttcgacgtaggcgccggcggcgaaatgaaggtctccgtgaagacgctcaagggatccagcttccatatcgaagtggatcctaccgacaaggttgccgacgtgaaaaaggttatagagagtatacaagagcaggcttcctatcctgctgaccaacaagtgcttatacaccaggggaaggtgctcaaggacgacacaacattggaggaaaaccaagtagttgaaaataattttcttgttataatgctcagacagaacaagggatcatcaagtgcagcaccagctaaggtaaccgcgaatcaggcaccctctactcagacagtgcctgctactccacctcaaacgtcagcagccccagatgcaccggcacctattgtacctgtcagtgcaccggctgcaactgctacagcctcagcagctcctgctgttgctgtctccactgaggcggatagttatggtcaggctacctcaaacctagttgctggcagcaacttggaaggaacaattaaatccattcttgaaatgggtggcgggacatgggatagagacactgtactacgtgctctgcgggctgcgtacaacaatccagagcgtgctgttgagtacttatattctgggattcctgaacaaatggaggttcctgcaccgcctccgagttcccaaccagtcgaccctgttcaggcggtacaaccagctcaagctggaccaaatgctaaccctctcgacctctttccccaatctcttccgaatgattccgctaatgccaacacaggaaatcttgatgttttgcgtaataactcacagttccaaaacctacttggtttggttcaggctaaccctcaaattttgcagccattgcttcaagaattgaggaaacaaaatccccgggttatgcagctaatccaggaaaaccaagcagagtttatgcggttgattagtgagccactagagggagacgaagagaatgaaatgatgctggatcagatggcagatgcaactgagaccattgcagtcactccagaggagaatgaagctatacttcgtcttgaagggatgggctttgaccgggcactcgtcctggaagtgttcttcgcctgcaacaagaacgagcagctggccgccaactacctcttggatcacatgcacgagttcgacaacgatgacgggctcggagggcctccattgtgatgcgatgcgaaggctgtggacagaaaataggaaaacgttttgggatttgtctcgtctgtccgctccgctccccctacatttctttgctgtttagtacataattctagatttacagaaaagacaaagtttactcttttctggatcatatgttttgtgctacttattgctgttctggccgcattgggccagcatgcagttattcacgggttcaacctgacaagcgctggctgcagcagcgaggtgtttgtaggtttcgcggtgattcgtctacccaaatctggaaccgtactgatactgaagaccgtactgatactgaaggcattatccggcgtaaactgttaattcaaacattattacacgaatgcataaggctgagcacggcttttgggcttgaactcgttagactgccaccaaatagcaaatcatgcatatggtcgcatgaatcaacggtttgtactgtatactttttacacagtggacttttggactattcgtacagtaaagtttaaaattcgcact

SEQ ID NO: 140797 - DNA, 1795 bp, Zea Mays
ctctcagtaggggccggaataaaaatctcctcgccttcctctcctacgccgcctgacctctgctgtccgcctcaacggtccaaccctccggttcgacgtaggcgccggcggcgaaatgaaggtctccgtgaagacgctcaagggatccagcttccatatcgaagtggatcctaccgacaaggttgccgacgtgaaaaaggttatagagagtatacaagagcaggcttcctatcctgctgaccaacaagtgcttatacaccaggggaaggtgctcaaggacgacacaacattggaggaaaaccaagtagttgaaaataattttcttgttataatgctcagacagaacaagggatcatcaagtgcagcaccagctaaggtaaccgcgaatcaggcaccctctactcagacagtgcctgctactccacctcaaacgtcagcagccccagatgcaccggcacctattgtacctgtcagtgcaccggctgcaactgctacagcctcagcagctcctgctgttgctgtctccactgaggcggatagttatggtcaggctacctcaaacctagttgctggcagcaacttggaaggaacaattaaatccattcttgaaatgggtggcgggacatgggatagagacactgtactacgtgctctgcgggctgcgtacaacaatccagagcgtgctgttgagtacttatattctgggattcctgaacaaatggaggttcctgcaccgcctccgagttcccaaccagtcgaccctgttcaggcggtacaaccagctcaagctggaccaaatgctaaccctctcgacctctttccccaatctcttccgaatgattccgctaatgccaacacaggaaatcttgatgttttgcgtaataactcacagttccaaaacctacttggtttggttcaggctaaccctcaaattttgcagccattgcttcaagaattgaggaaacaaaatccccgggttatgcagctaatccaggaaaaccaagcagagtttatgcggttgattagtgagccactagagggagacgaagagaatgaaatgatgctggatcagatggcagatgcaactgagaccattgcagtcactccagaggagaatgaagctatacttccttgaagggatgggctttgaccgggcactcgtcctggaagtgttcttcgcctgcaacaagaacgagcagctggccgccaactacctcttggatcacatgcacgagttcgacaacgatgacgggctcggagggcctccattgtgatgcgatgcgaaggctgtggacagaaaataggaaaacgttttgggatttgtctcgtctgtccgctccgctccccctacatttctttgctgtttagtacataattctagatttacagaaaagacaaagtttactcttttctggatcatatgttttgtgctacttattgctgttctggccgcattgggccagcatgcagttattcacgggttcaacctgacaagcgctggctgcagcagcgaggtgtttgtaggtttcgcggtgattcgtctacccaaatctggaaccgtactgatactgaagaccgtactgatactgaaggcattatccggcgtaaactgttaattcaaacattattacacgaatgcataaggctgagcacggcttttgggcttgaactcgttagactgccaccaaatagcaaatcatgcatatggtcgcatgaatcaacggtttgtactgtatactttttacacagtggacttttggactattcgtacagtaaagtttaaaattcgcactat

SEQ ID NO: 140798 - DNA, 1475 bp, Zea Mays
ggggccggaataaaaatctcctcgccttcctctcctacgccgcctgacctctgctgtccgcctcaacggtccaaccctccggttcgacgtaggcgccggcggcgaaatgaaggtctccgtgaagacgctcaagggatccagcttccatatcgaagtggatcctaccgacaaggttgccgacgtgaaaaaggttatagagagtatacaagagcaggcttcctatcctgctgaccaacaagtgcttatacaccaggggaaggtgctcaaggacgacacaacattggaggaaaaccaagtagttgaaaataattttcttgttataatgctcagacagaacaagggatcatcaagtgcagcaccagctaaggtaaccgcgaatcaggcaccctctactcagacagtgcctgctactccacctcaaacgtcagcagccccagatgcaccggcacctattgcaccggctgcaactgctacagcctcagcagctcctgctgttgctgtctccactgaggcggatagttatggtcaggctacctcaaacctagttgctggcagcaacttggaaggaacaattaaatccattcttgaaatgggtggcgggacatgggatagagacactgtactacgtgctctgcgggctgcgtacaacaatccagagcgtgctgttgagtacttatattctgggattcctgaacaaatggaggttcctgcaccgcctccgagttcccaaccagtcgaccctgttcaggcggtacaaccagctcaagctggaccaaatgctaaccctctcgacctctttccccaatctcttccgaatgattccgctaatgccaacacaggaaatcttgatgttttgcgtaataactcacagttccaaaacctacttggtttggttcaggctaaccctcaaattttgcagccattgcttcaagaattgaggaaacaaaatccccgggttatgcagctaatccaggaaaaccaagcagagtttatgcggttgattagtgagccactagagggagacgaagagaatgaaatgatgctggatcagatggcagatgcaactgagaccattgcagtcactccagaggagaatgaagctatacttcgtcttgaagggatgggctttgaccgggcactcgtcctggaagtgttcttcgcctgcaacaagaacgagcagctggccgccaactacctcttggatcacatgcacgagttcgacaacgatgacgggctcggagggcctccattgtgatgcgatgcgaaggctgtggacagaaaataggaaaacgttttgggatttgtctcgtctgtccgctccgctccccctacatttctttgctgtttagtacataattctagatttacagaaaagacaaagtttactcttttctggatcatatgttttgtgctacttattgctgttctggccgcattgggccagcatgcagttattcacgggttcaacctgacaa

SEQ ID NO: 140799 - DNA, 257 bp, Zea Mays
gaaaatgtgccccgggccctggcacggtcaatcactcaatcccaattatttaacataatgcagcctattctgcccctaagtgttatattgtttgtggaacaaggggttctggagtcttatcgatgcagaaaacttacgaataagaaaaccacaatctagcatatcgtcggtaaagagatttaggggcaagctacgaacatgaacaatttgccgacgtacatagtatcaaagacgtccacatgttcaacagacctttc

SEQ ID NO: 140800 - DNA, 4632 bp, Zea Mays
tccgcaatggcgtcgcgccgagccagcaacggccgctctcccctcgtgcggaaacagagtcagatcaccgcctttttctcctcccctaccccctctccgtccccctcgggcccgagccccggcgcatccaagccctctccatcgccgctgaaccctagtgcgaggacgaggtccccacttgccgcggtatccccctcctctcccaagctgccacagccgcagcagaaacagaaggaggtaaagaaggttaaggaggagcatgatgccgccttggtgcctgcgcccgcggccgcggaggtggtggggaggtgtttgcgggtgtactggccgctggacgacgcgtggtacaagggcaaggtggaggcctacgacgcggcctcccgcaggcaccgcgtgaagtatgacgacggcgacgaggaggaggtcgatctcaggaaggagaagttcgagtgggccgccgtcgttgaggagtcgaccttgctgccggcgaggaagctgcggcgtctccggcggatgtctgatatctcggtggcaaaatcaccggctgaggcagaggatggcgcaggggattccactgaggacgaggactggaagagggatactgttgtggaggatgcttctgaggaggtggagctggatgaggaagacgaggaggaagttgttgcagtgcgatcacgaaagagaaatccaaagaattccttgatgtcaggttcaacaccatcgacattgggttctggtttgacatcagaatcggagccaagaatttcgaagaggaggaaaaacgtggatgtggcctcattggattttgctaaaaggttcaccttcgaagcagttaataccaatagaaaagttgacccagaagtgccaatgagctgtggccagaaggggcaaactacggggaatgactacactgctcctactggggatgcagctgagcgctttgggcagcgggatgctgagaagtttaaattccttggagaagggcgcaaagacgcaaaaggcagacgtcctggaaacccgggctttgatccgagaacacttttattgccacctcagttcttgaagaatttgacaggagggcagaggcaatggtgggaattcaaatcacagcacatggataaggttctgtttttcaagatgggcaaattctacgaactatttgagatggatgcacatgttggagcaaaggatcttgatcttcagtacatgaagggtgaacagccccactgtggattcccagagaagaatttatcagtgaatttggagaagttagctgagaagggttatcgagttctggttgtcgagcaaactgaaacacctgaccagcttgaacttcggcgtaaggagatgggtataaaggacaaggttgtcagacgtgaaatatgtgcagtagtcacaaaaggaacactaatagaaggagagcacctactggcaaacccagatccttcatacctcctgtccgtgactgaaagttaccaacgaagtccaaataagagccaagacacatgtaccattggtgttagcatagttgatgtttctacaagcaaatttattgtaggacagttccaagatgatccagagcgccatggattgtgttcaattttgtctgaaatgaggcctgtggaaattataaagcctagtaaaatgctgagtccagaaactgagaaggcattaaacaacaacacaaggaagcctttaataaatgagctggttccgtccacagaattctgggacgcagaaaagactattgatgagataaaacagtactacagctcagccaataaacagaaaaaagccgatgatatacaagactgtgtggactgtctgcctaacttattacgcgagttaattggagcaggtgataaaacatatgcactttcagctctaggaggttccttattttatttaaggcaaacccttctggatgagaaaatacttccatgtgctgagtttgagccacttgcatgctcggggttcatcaacaatatccgaaaacatatgatacttgatacagcagcattggagaatctagaacttttggaaaatacaagaactggtggcctctcagggaccctgtatgcacaactgaatcattgtgttactggatttggaaagagattgctcaaacggtggatcgcaaagccattgtatgatcgcagagaaatacttcggcgtcaaagtgctgttgctactttcaagggagttggccaagattgtgctgcacagttccgtaaggatttgtctaggctccctgacatggaacgcctgcttgcacgtctttttctcaagctgtgatgaaaacaagagaagttcatcagttgttctttatgaagatgcatcaaagaaaactgcttcaacagtttacttctgcgctttgtggatgccagcagatgttccatgcatgttcttctattagtacattgatatgctcagagggatctcaacttattgatttgctgtcaccaggcaaaggcctatcaaatatttcatctattttagaccgattcagagatgcatttgattggtcagaagcagaccgcaatggtcggatcattccttctgaaggttgtgatcctgaatatgatgccacttgcaatgcaatagaagagatcaaatccagtctaaaagagtacttgaaggagcaacgaaagcttttgagacctgcatcggttaattatgttaatgttggaaaagatatgtacctaattgaagtgcctgagagtttgggaggttcagttcccagaaactatgagttgcagtctacaaaaaagggtttctatcggtactggacgccagaactgaaagagctaatattagaactttcaaaggctgagtcagagaaagaatcaaaattgaaagccattcttcagaatctgattcagctatttgttgagcatcacactgagtggaggcagctggtttctgttgttgctgagcttgatgtattgacaagtcttgctattgcaagtggttattttgagggaccaagttgctgtccaactataaaagaatcaaatggcacagacgatactcctactttccatgctagaaatcttggacatcccattctacgaagtgattccttaggcaagggttcatttgtaccgaatgacgttaagataggtggtccagggaatgccagttttattgttcttactggtccaaatatgggtggtaaatcaactctcttgcgccaagtttgtcttaccattatactggctcagattggagcagatgttcctgcagaaaaacttgagctttctcttgttgaccgtatcttcgttcgaatgggagcaagggatcatattatggctggccaaagtacattcttggtggagctcgaggagactgcctcagtgctttcatcagctaccaagaattctcttgtggtgttagatgagcttggacggggtacatcaacttctgatggacaagctatcgcggcttcagttctggaatatctagttcatcaggtgcagtgtctaggcttgttttctacacactatcataggttagcaatggaacacaacgataccaaggtatcgctgtgccatatggcgtgcgaggtggtcgagggagtaggaggtctggaagaagtgactttcctttatagattaacacctggtgcttgccctaaaagttatggtgtaaatgttgctcgattggcaggaattcctactaaattgcttcaaagagcgaatgaaaagtcgagtgaatttgaggccaattacgggaagcgacacaagatgaccaacgataagcacgtcagtgcacagagcgatgataagttttctgccataagggatctgtttcgaattgtgaagacatggcctcgtcctgaagatcaggaagcgagtataagcatgctccgtaaattgcagaagcgtgccaaggtataggctgtggaaggctaggtaggcgattgttacatagcatgctcgcctggtagagatggcctcgttttgctaccttggtggcattttttttgttggattggcgtcataccgagaggggagaaaattacgtggacacgggttccaatcgaggacagcattgccctaggtttagtgtggaagcagaaaaaggctcagtcccatcggatgtgtcaggattcattgatgggacgtggattgagaattctgcgtctacagctttactatcccttccaacaattttgtgccctcactaattctcctaccaggccaggagccccaaggtattggtctgtcctggtttgttcgagctcggtagggtgttggatcagtgctgacctgagacgtggagaaacatcccggactgtaactttcctgaagggttaattatgattactatatgtaaatcagaactactctctcgaagttgcaaggcaacttaggattaattttagtgcctttttgtattctgaaaagttcgagcttgtatttagtcgagatttgagctgtaatccaaaacaaaataggccccactccaacgttttatagccttatcgtagaacgatacaggacacgtggacatgaatcttactacggttattcccatctgggttagtttgtgaacttaaatcctttgggatctcctggggtgaggaattttaggagatactatttaaataagatatttaattatttatga

SEQ ID NO: 140801 - DNA, 2600 bp, Zea Mays
aaattaggcaaactgctcttggagctggtgtaacctcttacactagtattgttgcttttgcagttccaagatgatccagagcgccatggattgtgttcaattttgtctgaaatgaggcctgtggaaattataaagcctagtaaaatgctgagtccagaaactgagaaggcattaaacaacaacacaaggaagcctttaataaatgagctggttccgtccacagaattctgggacgcagaaaagactattgatgagataaaacagtactacagctcagccaataaacagaaaaaagccgatgatatacaagactgtgtggactgtctgcctaacttattacgcgagttaattggagcaggtgataaaacatatgcactttcagctctaggaggttccttattttatttaaggcaaacccttctggatgagaaaatacttccatgtgctgagtttgagccacttgcatgctcggggttcatcaacaatatccgaaaacatatgatacttgatacagcagcattggagaatctagaacttttggaaaatacaagaactggtggcctctcagggaccctgtatgcacaactgaatcattgtgttactggatttggaaagagattgctcaaacggtggatcgcaaagccattgtatgatcgcagagaaatacttcggcgtcaaagtgctgttgctactttcaagtgatgaaaacaagagaagttcatcagttgttctttatgaagatgcatcaaagaaaactgcttcaacagtttacttctgcgctttgtggatgccagcagatgttccatgcatgttcttctattagtacattgatatgctcagagggatctcaacttattgatttgctgtcaccaggcaaaggcctatcaaatatttcatctattttagaccgattcagagatgcatttgattggtcagaagcagaccgcaatggtcggatcattccttctgaaggttgtgatcctgaatatgatgccacttgcaatgcaatagaagagatcaaatccagtctaaaagagtacttgaaggagcaacgaaagcttttgagacctgcatcggttaattatgttaatgttggaaaagatatgtacctaattgaagtgcctgagagtttgggaggttcagttcccagaaactatgagttgcagtctacaaaaaagggtttctatcggtactggacgccagaactgaaagagctaatattagaactttcaaaggctgagtcagagaaagaatcaaaattgaaagccattcttcagaatctgattcagctatttgttgagcatcacactgagtggaggcagctggtttctgttgttgctgagcttgatgtattgacaagtcttgctattgcaagtggttattttgagggaccaagttgctgtccaactataaaagaatcaaatggcacagacgatactcctactttccatgctagaaatcttggacatcccattctacgaagtgattccttaggcaagggttcatttgtaccgaatgacgttaagataggtggtccagggaatgccagttttattgttcttactggtccaaatatgggtggtaaatcaactctcttgcgccaagtttgtcttaccattatactggctcagattggagcagatgttcctgcagaaaaacttgagctttctcttgttgaccgtatcttcgttcgaatgggagcaagggatcatattatggctggccaaagtacattcttggtggagctcgaggagactgcctcagtgctttcatcagctaccaagaattctcttgtggtgttagatgagcttggacggggtacatcaacttctgatggacaagctatcgcggcttcagttctggaatatctagttcatcaggtgcagtgtctaggcttgttttctacacactatcataggttagcaatggaacacaacgataccaaggtatcgctgtgccatatggcgtgcgaggtggtcgagggagtaggaggtctggaagaagtgactttcctttatagattaacacctggtgcttgccctaaaagttatggtgtaaatgttgctcgattggcaggaattcctactaaattgcttcaaagagcgaatgaaaagtcgagtgaatttgaggccaattacgggaagcgacacaagatgaccaacgataagcacgtcagtgcacagagcgatgataagttttctgccataagggatctgtttcgaattgtgaagacatggcctcgtcctgaagatcaggaagcgagtataagcatgctccgtaaattgcagaagcgtgccaaggtataggctgtggaaggctaggtaggcgattgttacatagcatgctcgcctggtagagatggcctcgttttgctaccttggtggcattttttttgttggattggcgtcataccgagaggggagaaaattacgtggacacgggttccaatcgaggacagcattgccctaggtttagtgtggaagcagaaaaaggctcagtcccatcggatgtgtcaggattcattgatgggacgtggattgagaattctgcgtctacagctttactatcccttccaacaattttgtgccctcactaattct

SEQ ID NO: 140802 - DNA, 732 bp, Zea Mays
agtcaagtacggctgcaagcaaagcgaagcacaccaaagcgagcatcaagcagcgcctcgcacgctaatcccttcctttcctctgctggccgcccttaacagcactcggtcctcgctctccctgcggcggcctttttcacactctgcacctcctcccctccggccagtcgaaaccgtcgccgccgccgccgggaggagaagagctccatggactacaggcagtcctactgcatgaccctgaggatgaacatcgactgcaacgggtgctaccagaggatcaggagggcgctcctccagatgcgagagctggagaaacacctgatcgacaagaagcacggccgggtcgtagtgtggggcgccttcagcccgcaggacgtggccatcaagatcaggaagcggaccaaccgccgcgtcgagatcctcgacctcagcgaggcctcgccggcagccccagaaggcggccccgacggccacatgtcctgaaggaaccacgtcaccaatacgtactctggagaactgcttgctattctcttcactcttcaccaaggcaggcccgcctcagaggacgtaaccatatgcctgcctggcatcttttaccttcttgtaatttaggaatcctgcatcattttgttctgtaactgtgaaggcttgttgaagtaaccagaaaaaaaatctaggtaccgttctaaaagtccatctgatgcgaccagagaggctatgctcgtttgcttt

SEQ ID NO: 140803 - DNA, 931 bp, Zea Mays
cgcctccatgcaacttagcaccgtcgtctcctcctctccatgccagcgcctccccctacccagcgttctccccaccacgccgccaatgttgtccatccccaccgcgcccacgcctgcaccctctagccccaccgcgtcggcctacgcccagtcgagcatgacatctcgtttccagtgaggcggcggtggcgaatcggatctggtgcagttgcatctggagtcggttctcttggtggcgctaggtggcagcacaactgatctgcaccacacctgctcgactctagaggatctctccttgggcgccttcagcacacaggaggaggaagcgaggcatacgatatcgcaacgatcaaggtccgtggcctcaacgccttcaccaaatttgacatgagtcgctacgacatcaagagcatcctggatagcagcgctctccccttcggcgacactgccaagcacctcaaggagaccgaggctgccgcgtccgcacgagatcataccggcgtgctaagctatgacatcgggggtgacgcgcacagtgcggtcagagttggcacctagcgtttgctgcagcggagtgaagcacacggggcagcccttgtggagatggtcagtctacaaatcggtgcacagggtgttggaggtatggcccataccatatttgatgaaatgcctctaaacatcggcgaggaagaaattgccctgttctctggtggttattctgattattcagtgtttgatgaaatgccacttggggatgtgatttgggatgaggaatatgggcatcatgatttgttggatcagccagcaccagatgcatattacttagctgccaagaggacgccctatgactccgtcccaatgaacttattcaatgatgttgcagtctctgctcccaagtatgatgatctgactaatgttgggcaggccaaag

SEQ ID NO: 140804 - DNA, 1369 bp, Zea Mays
caaagcaatgaaactgtgtcgatgattgaagcatacctgcgagctaacaaaatgtttgtggacaagcatgagcctgagacggaacgagttttctcttcatatctggagctggaccttagtgaggtggagccttgcgtttcaggccccaaaaggcctcgtgatcgtgtccctttgaaggaaatgaagtcagactggcatgcttgcctggacaacgaagttggtttcaagggctatgcggtgccaaaggaacagcaaggcaaagttgtaaaattcgacttccatggaaggccagctgaaatcaagcatggcagtgttgttcttgcagcaatatgtagctccacaaacacatcaaatcccagcgtcatgattggtgctggccttgtggcaaagaaagcctgtgaattgggccttgaggtgaagccatgggtaaagacaagccttacccctggatctgtggttgctaccgagtacttgaaacatagtggccttcaagattatctgaaccagcaagggttccatgtcgctgcgcatggctgcgccacttgtgtgggcaactctggtgacctagatggatctatatctgttgctatcacagaaaatgatatcgttgctgctacggtgctgtcagccaaccgaaacttcgaggggcgtgtgaaccctcactcaggctaactaccttgcctcaccgcctctggttgttgcctactgttgacattgactttgagaaagagcccattggagttggaaaggttgggaaggaagttttcttgagggacatatggcctttaaaccaagagttgatgaggttgtggagtccagcgtgcagactcacttgttaattcaagaaagtgtacgactccatcatggaactcaaattttggtggttgcactagtgtggagacttgaattcatgtatacacttagttagactcaacgttagcgcaaacagttgatgaccaagttttttaattagtattttagtttggatgtatagtacacttatgtatgagttatttgacaatgcttatttatgagatattgaatgacacttgtctatgttatattaattataatgttattaaatatatgggcatgtgtgtatttctctttcaaattattataccgtggtatctcaaaaattcaaaaatgattataaattgaagaatgtactgtcatgtaagtcatttcatttaaattcccaaaacgtccaatatcagtctcctaaataagatggttcctaaaacgtccaataccagtatcttaaataagatggtttttctgtttaaaacgtctattattataggatattttagacagttcgataaatgctttgtgacttataatgttcgtattctcaaccgttgtttag

SEQ ID NO: 140805 - DNA, 1807 bp, Zea Mays
aatcccacccaccgccgcccgtctcccgctcaagccccgcctgccgagctagctagcttccctccagccccgtccgctcgcctggaagctgcctgcgcttgcgcacgtgggcgcgcagtgggagaagaacccacccacctcccgcgtctgcgtacgtttttcacccggccgcctcgggggctcagggctcaggcaggccgataccctccccaatccccaccggcaccgaggcgctggccgacgaggccagcatgaagccgcgggcgttcctggagcgcctggcccgccccttctcctcctcccgccgctcctcctccgaccagtcccgccgcgacagggaggaggaggcggacctcgaggcgatcgcggcgcgggagcagcgcgcgttcaggtacgagaccctggcggcggcgacgcggagcttctccgagaagaaccggctcgggcagggcgggttcggccccgtgtaccggggccgcctggaggacggccgcgacgtcgccgtcaagcgcctgggcgccggctcgcggcagggcgcccgggagttccgcaacgaggccacgctgctgtcccgcgtgcagcaccgcaacgtggtcaacctcatcggctactgcgcccgcggggcggaggacaagctgctggtgtacgagtacgtgcccaacgagagcctcgacaagatcctcttctcctcctcctcctccgcccgctccagcagcaacagcgaccggtcacgacgagcggagctgacctggccgcggcggcacgaggttgtggtcggcgtggcgcgtggcctgctctacctccacgaggatgcgcacacgcccatcatccaccgtgacatcaaggccagcaacatcctcctcgacgaccggtgggtgcccaagatcgccgacttcggcatggcccgtctcttcccggaggccggcgatggccactcccgtgttcatacccgtgttgccggcactaacgggtacatggcgcctgagtacctcatgcacggcgacctctccaccaaggccgacgtcttcagcttcggcgtggttgttctcgagatcgtctcaggccgcaagaactccgcctttatcccgcccccggacgccgaggccgacagcctcctggaatacgcatggaggctgtacaagaaaggtcggagcttggagttgcttgaccacgcggtcaagtcgtcggcggtgccggagcaggtcgagctgtgcgttcgcatcgggctgctgtgcgtgcaggctgacccgcggctgcggccggacatgaagcgcgtggtaatcatcctgtccaagaagcagagcacgctcgaggagccgacgcgtccgggggtgcccgggtcgcggtaccggcggaggccccacggcctgcgcggcacgcactactctgctgggtcatcgtccggcaccagcttgccgtctacgtccgcaacatcggacgcgtcagcgtcagcgtcagcgtcggtctccaacgccatgacgacgtcgagcacccacaccatgaggagccaaggcttgccctcgcaccgagaagaacacgagtaggagtaacagggcgagccccaactgtgtacatttgtcaattctttcctgttttcttcagtttggtgttaattccgatcagggtggtgaatgggattgcagagtaggtatagatgtcatgattgttttgctagcttaggatggtgctgaaaattaagctattgacgggtccatcaccgaatctgtggtagactgcaggcaaaaactgtgtatatataaaaacgagaaaaagcaattttttttaacgagaaagaacaaattctaag

SEQ ID NO: 140806 - DNA, 2709 bp, Zea Mays
gtttttcacccggccgcctcgggggctcagggctcaggcaggccgataccctccccaatccccaccggcaccgaggcgctggccgacgaggccagcatgaagccgcgggcgttcctggagcgcctggcccgccccttctcctcctcccgccgctcctcctccgaccagtcccgccgcgacagggaggaggaggcggacctcgaggcgatcgcggcgcgggagcagcgcgcgttcaggtacgagaccctggcggcggcgacgcggagcttctccgagaagaaccggctcgggcagggcgggttcggccccgtgtaccggggccgcctggaggacggccgcgacgtcgccgtcaagcgcctgggcgccggctcgcggcagggcgcccgggagttccgcaacgaggccacgctgctgtcccgcgtgcagcaccgcaacgtggtcaacctcatcggctactgcgcccgcggggcggaggacaagctgctggtgtacgagtacgtgcccaacgagagcctcgacaagatcctcttctcctcctcctcctccgcccgctgtgagtcctcttccttccttccttccttctccattgttccctccctctctctctctctcccacgcacgccgtcaatttccactggttgcttcggtccatcgatcgctcaagttcgcgcgattcccgtttcgtgcgatctcacgacggggttgccacttcgttgggaggggattagattcgcagtttgtagtataccaccacaacacagggagaaatgcaattaatccgatccgtttgctgattgaaaacagaggcagccgatgcgtggttggtggcgatatttttttcccctaggggtagccgggtaggcggggtagcgcatcatcaatgcgccaggaaaattaaagtcgcgcatggtaccgttgttgtgttccctacggtctcaggctggctggttgattgatcattgatccgttctacaaaccacacaaaccgatggtatgaatggtcctcgcatccacttccacgcttccacttccctacgacgatagcctgtactcgtcctccgtgcatgcatgcgacgcgtccctcgtctctccaagggtcaattggtcataactcataactaaccagcacccgtatccacgagcattaaaataactaaacatgtgcagttgccagttgggctgtgatcatgacatcatgtagggcccaaagggtcccaccccaccagtcttctgacgtagtccgaaacatgtttgtttttaagaccaagcagtactaatcttttcggtatagttgtagttggctactacttggcgtccgataaacaatcattgtcatcaacttataatctttttggtagggccttgttgaagtttcgtcaccgtccagatgggaaaacagtttttaacgccaaaaatctaagtaatggttgctttaaggccatgaccctgacgagccactggctagcttctctgtatccgttgttttagacttgtgcttctcttatttggttccaaacctccaatggcagtgcgtgtgtttattaaaaaaaagcactgtaggtgcgcactagatttgtttgattttgttggactcggtctatccttccttgtacttaaggatagagtgccgcactagtggtactgctccatgtgcagcgtgtttgactcctctgtgtgtaaccgtgtgcgcgcacgcgctccaccggtcaccggagaccggacgcgctcttttgcttgcacttgcacgcgttccctccaccggtcaccggagaccggacgcacttgcaagcgtctgtccggtctctagccctgactcatgagtgtcgtcatcgtgatgcaagaacgcttgtaggagggagacgacaaaagaggctagtactagattgttttctcactggaacgtgcgtctctctgaagggagcatatctggtgcacatgccatcttggtgcacatgtgcacatattaaatctcagcccaccatctttgatctaacgtcaactgacaattttgcaaagagaccctcccgcagccctccatacgttggaaaccccctcgctcttttccatctcacggactcgattggaatctgaacgtttcatcttctttctcagcctcatcgccgccagccgagctcctcctgccgcagccgtggaactcgttccctggcacagcgtcatggccacgcctccggccgtcggacctggcggaggcttgatggccctactgactgccatggacacacactacggaggccccactgacgcacgcgaagcaggctgtgctggccactgacgcacgcgaagagcctgatgcctgatggcgctattgactgccatgacgcaccctgtagaggccgccctgacgcacgcaatgtgctggccacagcggcacacacctcctctcaatcctgtgttgcaacacgatggagcagcaaagcaggctgtactgatcctgttttcagccatgtagatgacgtccacataccttctcaattaaactactcgtgcaaaatttctgtatcaatcagaattcagaagaaatagtacagcaagaatactgatgagaagaaacaccagataatagaacaaaataagtagcagtcagagaaagtgctggtagttatttgcctgcgtaacttagtgaagatgagcaaaattgtaaaacaaaacagcaggaaattcatattttgaggtggctaattcattgca

SEQ ID NO: 140807 - DNA, 749 bp, Zea Mays
tcgctagcccagctttagtttatagcactctctcactcagtagtcagctccctccatttgtccattctccaaaggtagttagctaggttaggcacacgcgcgccactcgactagctagcagctatggagggagaagatgacggcgcccaaatgaaactgcagcaacaacaacagtcgccttgcagtgacaacttgagcttgtccgccgcctcctcatggctgccgccacaggtaaggtcgtcgtcgtcgtcgtcgtcgtacacctgcgggtattgcaagaaggagttcagatcagcacaagggctgggaggccacatgaacatccacaggctggacagggccagactgatccaccaacagtacacttcacaccgtattgctgctccccatccaaaccctaatcctagttgcacatcagttcttgaccttgagctcagcttgtcgtcgctgctagcgcatggtgctgccagcagcgacggaggcttgtctgttccagtggcaaagctggcgggcaaccgtttctcctccgcatcgctccccacgaccaaggacgtcgaggggaagaacttagagttgaggataggagcgtgcagtcatggcgatggcgcggaagagcgtctggatcttcagcttagactgggctactactgagccagacagaggaacgaactgctacaatgggtacgtgcagtgcatgatgatggaatgactggctttgtataataataatgatgatccgattattgtta

SEQ ID NO: 140808 - DNA, 1492 bp, Zea Mays
aacaaaacccacacacacgataggggtcctagcaacaaaacaccaaaaattaagcttcactctcacaactttctgcttcctgtgtccacgcaccacaccggccgctttcaccatctctagctttttcatcgatctgtttttgcgaccttaattggttttctcttcccctttttaagctttgatacacacaccgcgccatacccagtcgaaatggacacactccacctcttgctgtgaagatctgttccatttccagtgtagtccctgtcccacatgtgagaggaaccgatctagcaagcgaatgaggaagatgatgaagaaacagtagcagtggcagtaccgctagaactagaactagctagatctcctctcttactagctagaagcttgtacaaacaatgcaccacagatgctaccttaccctaaccctcaccatcatttcggcgtctcccaagagcccccgcacccaaaccctactaccggcttccccatgcttccgcggggcgcgcatctggatcagcgctacgtggaccatcacttcttccccggccacggccacaccaactccgaaaccctggaggcggtgctgaggccgacgcgcgccgctccagagtgcgaggccgccgtagtgacggcgccaccgcagggtggaagtggaagacgaaacggcgccgtgcctgccgccggcggccagggccagggccacgcccacgcccacgcccgggcgccgcggaagcggccgtttcggacggacaggcacagcaagatccggacggcgcagggcgtgcgcgaccgccggatgcgcctgtccctcgacgtcgcgcgcgacttcttcgcgctgcaggaccggctcggctttgataaggccagcaagacggtggactggctgctcacccagtccaagccggccatcgagcggctcgccgccaccaccgagccctcacagagaagcgtcggcggcagcgacgacgctgctttgtcacccccgacgtcaggggtggctgatggatcaggtatgaggggaggtgttgcggagaagttgggttccagaagtggggggtcagcggcgtccatggagatggagatggagcacgcctccgagctggaccgcctcgtgtcggccgcaccagtgcttcgtcagtactactacggcctcagcgagatgatgagcaacgacaacggaggagatggcgatgacgacggtgagtacgaggaggaagacggtgatttcctcgacggtatgaaatattagtatgtagttatgtgtactagctagcagcttgcatggtttctacgtagtactagtagccgctggcagcttacctagagttaatcctttatttgtcaagcacttcttcactatcgtttttttcctactatatgcatttgtactcctttaagttaatgctatgtgtcacatgttactcttgttctttgttgttactagtagcagtatatgtaatagaaatgtgctccgcttgctttcgatttt

SEQ ID NO: 140809 - DNA, 2218 bp, Zea Mays
agaaaataattctcacgagtgcaagcttgttgcagtctacagaattgggcacaattcttaatggttgccttttgatttaactaccattcaaattagcaactcccgaggagatttattagacccaattgttgtccgagataagatgacctttgtatagattcttcagttgccatttcaacgatttattgtgattgtaatgcttggcatatcagtatcctggatgatgtccataatacaccacataccattgaatactgtgcatcagttgtatcactgggaagtgttattctcactggtaattgcaggttattgtaattcttgcaactcgctgtggaagatacctggacaaatgacaatatatttatattgggattatagaagacatcaatttgtcctaattgttatgtgactttgttcatggtgggagattcattctttgaagcagcaattgtgctaaataatttatcaaatctttcgctgaatttgaatatggcacgaacaaaagttcattcatgtttttcccttgagttggatagggcgcccttcaggcgctccatgatctagtattgttgataaacttcaaaaattgacttaatacaaacgagattgaaaataaattcttaatttcaaaaataatattttttatagatattgttgatcaaagattcaaatctactgccttaagacggaatcttaaaatatcgaatagtgtattgttaatgcattacgacattgtacaacaatcgttgtacatggttttccaaaaccagtgtcgaaagcttctgcacgaggagcgaaggcacgctacagcggggcaggagaagaacgatgccgatcgggtccccgtggcacacagcgcgcgcacaacaccacgaatctcaaccgcccaaggattgtgagatgctgccgtagccgtcaaaattagaacaatcatctattgcagacgtagatttgctcccgagatttttaggagttatggacgtttcatatatagatagaacagaattgtgtgcgggcctaaagcaattagaggctgtttgtttacatttataatctcctctgttcaaaataagttgtattatataatctggtggtaacctactctgtttaaaataagttatgttatataatatcctataattttataaatttataattcctctgttttactggacggaattttaacgaattaggtttctactaactaaaactatgacttcatagattttccatccaaaaaaagcgtttctactttaaactccacatttctagacattctggtagttcgaccgtgtattttttttgttttggtatctctagaatatgagtgtgtgaagcaggccagtattcctcagatatcaaaaacgatttacaacatttatcatgtgcagttgttcacacgatccaatcaattaactatcagaatgtaatataacatcgtaggaagtataaagtctgtagaaaatgaaacacaaacctatagacgatgaaatttttttgtgagggtcactatgtaaagggaagatgaaaatgtacggcaatactctgcaaatgcctcagatttaagtttttttcacagcggaatcgctacaaagtatatttaacaccatcatcggcaatttgctcgagataatacaccagcctaaacttgtgttaaacagcctaatggtacacttgacaacgatgataaaatgacagaaaaacgaattaatcacattggaaaaagaacagattcaagaccacagtctgcctcagtggtagtgacaatttgtggatcgtcatggaacaattccgataatacgtgcattttttatgcatcatcggcagccaacgaacatgacaagaagcaagaccccgaaagaaagatacacagagaaaggagatttagttttggaaaagctaaagcattagagggacggccattgaaggcgagttttggatttggaaaagctaaagcatcagagagattcccattatagacttggtctatcatgcccggaaaagggttctgatgtccctgtcttgttctcatcacctgcttgcatccaatctcaatccaaatcgacaagaagaaaaacgataaactcaagcaaccaaagatctcagagcataaaagaaagaagagcaaagaccagcccgcagcacgaatagaaggatgcaaacaacatagtggagagtatcgcatggaaggcgcggctgccgtcggcgaggactgtga

SEQ ID NO: 140810 - DNA, 183 bp, Zea Mays
ggtatctctagaatatgagtgtgtgaagcaggccagtattcctcagatatcaaaaacgatttacaacatttatcatgtgcagttgttcacacgatccaatcaattaactatcagaatgtaatataacatcgtaggaagtataaagtctgtagaaaatgaaacacaaacctatagacgatgaaa

SEQ ID NO: 140811 - DNA, 799 bp, Zea Mays
gagagagagagagaggagatccagtacatagcagctgtcccaaaaaaatcaaacttgcatatctagtggcagctggaatgtactaaccgcaatgcaacatttgagacggcgatcctcgaccttcatttgctgcagaaccgattggttttctgaaattttgaaaccagtagcctatccttggcacatacagtcaggtgcaggataagtgtagatggattgcgttgcctttctcaaccggatttgcccgtatcttcctttgtgtcctgcctgtacaacctgctgaaactctggccactccatgctcttattcgcaaaggtgcgcccaagcagtgccatgtttggccttatggtcttcaagttctcatagcttcggtgagccacctgaggcgaagaattgttctagtgaaggctacgcgttaaaggaatgatctaataaatatagaggcaacgataacttaccaaagcattgtgcatgtttccaggagatgcagatatgaaaatgtcgctatgcatgctgatataatagtcaagagctgctagaacagaagccttcccttcaacattagcaagttcatcttcagatgcaaggctcctcttgtcctccatcaacggaaatagtttgcgcaagctagagatcctggcttctccaccatatacctggatatatgcaagatagagtcgagttctgttgtcaaagccaagggctaccagtaacagcccaatctcttctggggtcaatgggcagcgtcctgtgttccgaagctcctcatcagttagctgtgaatttaatacccttcct

SEQ ID NO: 140812 - DNA, 606 bp, Zea Mays
attattgagagcttgagagatagcgtactgcactgtcgactagactactacccttgcaatgaagagggcaccggctgtgtgtcttctggccaccttgttggcattctacttcttggttccctccattgctgtagctctctcaagggtgcaaaagatggccatgcaagaggatggtcagataccatcggttcaaagcagcactctacagccaaagatgaaaaatgagaagtttgtgccagaggatgatgaatccgtgatcaccgcgaggatggccttcgagacacaggactacgctcccccggggcccaacaaccaccacaagccacctgcaggctggagatgaactcggggctcacttttgatcagtgtgtcgtgctcttggctcacgaaacttggagagccagcgcccgttgcaatgttgtttgtcctagctataatagaatctacctattcattatgtcacgaagagaaatgtgatgttttctgttgttgactattatgattactgttacatatggccgtgtggttatgttgtaatgtgtaagttcccttaaaagattgagtttaaaaggaattatattagattattttttgtaaacaagacaa

SEQ ID NO: 140813 - DNA, 303 bp, Zea Mays
atggacgagccggagcaccacggccacagccatgggagacgcgagaggcagctgggcagggagacgtgcggccggcagagaaagctggaagactccgtaagggagaagatgacgctgagcccttgggcggcagaggataacgaccagaagatattcagaagaagagatattttgaggaagaaaggagaacggcatggagaacaaaaaaatgtccagcccctagcgtcattacggatagaagtaggagcagttaattggataagaaagataggagagatgatggcaaagaagctcgggttctag

SEQ ID NO: 140814 - DNA, 792 bp, Zea Mays
gtttgcctcttaacttatttaaactggattatataataaacaaacatgaccttatgaaaattcgatccatagcctatagtgtaaagcatgtacacgaagcgccattctcacagtttgcattttgcagggaattaagttggaaaaaaggtgctctttcatgtgtagttggatggggaacatagcaacttcacaggctgtttcatgttttttacctcaaagtaaaggctcagtcaaaatccggggagcattcaacatcatccccttcgcgtgcctgaccaaaggagctgtaagccaagtgatcacccttcttcaccttgccactcagaatgctctccatgcccttgtcatcatgctgcagccgtccggttacctccaggcacagaccattcttggcaagcctcttgctctgtttcgctcggtcagtttttggtttgactggacttgtttcgacgaacacaggttgctctctgattgtggggttgggctgtatgcggtggctctggtccttctcttccggcggtcgcatgatcgggtgctctgtttccacctcagtacttccatccttgttcaaaatcacctgaataaaacacttgcgaacttacgtctacatccaaatactctgccagagcgtctagacaaaagttcaactaagcgcagatattttaaagtgaggttgcaaaagcactgatgtccagcaggaattaccttacggcccaccaaatcaaatgtaacaatcactttacccttttggattttagctgcttcctcagcttcctcttgctgctgcttcag

SEQ ID NO: 140815 - DNA, 1765 bp, Zea Mays
cgaacctcgagatagctggtggcgtcggagggaggcgcgagctcgcagaaggagacgaggcccgagatgagatccgagtcgaactccagcgagctgcccttacgctcccgaagttcctgcagcgcgcccttgagccactcgccggacgtgctcgccgacgtcgccatcgccgccgccaacacaagcggacaagaaggcctaacttctcttttgctatgcggaccctcaatctataggatatttcacgagtacctttacaacttctgttttcacctggtagtgtgcatgattttctaaagactcctcatcttatccccgctaagccgcgagacagcagagcagagggggcagtgcagaaggcatgtttccgatggcgtcttcctcactgtcgtcgccgccgctatcacttatcctcctccggccgctcccgtgcatacccgtcctcctcttgagacaaaggaagccattcccagctgtccgcgtagaagcaaggtctcagcagcggttgcagcggaggccggtgactggccagtggaggaggagctgcagaaggggcggaggctacgcgtgtttctcctacaatgccaagaacaagacgcccccgccttcagataagagttcagacgagtgggcgatcgttcgccgatgggatgtgccatgggaatggcaaactgttgtgctcagcatggtaggctgtggagtaagctttgttctgacaggattggttgagcaattggctttgcaagaactgggatttaaagctgtggaggcaactatagatgagaaggcagaaatactcttctttgggcagctgagtgtgacagtagtagtgcttggtgttatatttggcatcaccaacacttttcgaccattcccagatgatgtgtttcgttatgatattaaagaaccgttcaagctgcaaaatggatggcttttgtgggctggaattggtctctttggagcagtaatttctattgccttagccggagctgctatgacttatctgaatggtgaaactccagcgagagagactgattcactagtccttttgttgccgctgattggctcatccactaccagtactgcctttttggtgggaatcactggagttctagcaccacttctcgaggagacactgtttcgaggatttctaatggtgtccttgactaagtggtttcctactccagcttgtgtacttgtcagtgctgctgtatttgcccttgctcatctgactcctggacaatttccgcagctgtttatacttggtgttgcattgggattttcatatgctcagacccgcaatcttctaactccgatcacaattcatgcattttggaactcaggagtaatacttctgctaacctttcttcagctgcaaggatatgatctcaaggagctcttgggagcatcgtgaaggtttgaacgaaccaggcacatataatttgtgcataatatatatggtatcaaggagatccgttgggtatgtgctcttgtacacctgatgccaacaaaactacgtgaaaggaaatatgagtcttcaagttagctgatggttgcgtttccagaagtgttacgaggcatcactagtctgtaaagctgtttatacagtataagatggcagattgaacttaacgtaagaacagctgcccttttgagagtgtttcttacaactggagtactcgattaaattgtgctgatattgtttgttaaagaaaggtgtaatgacaactcacatcatgttttatgtgtacacatgtgacggaac

SEQ ID NO: 140816 - DNA, 998 bp, Zea Mays
ctcgagatagctggtggcgtcggagggaggcgcgagctcgcagaaggagacgaggcccgagatgagatccgagtcgaactccagcgagctgcccttacgctcccgaagttcctgcagcgcgcccttgagccactcgccggacgtgctcgccgacgtcgccatcgccgccgccaacacaagcggacaagaaggcctaacttctcttttgctatgcggaccctcaatctataggatatttcacgagtacctttacaacttctgttttcacctggtagtgtgcatgattttctaaagactcctcatcttatccccgctaagccgcgagacagcagagcagagggggcagtgcagaaggcatgtttccgatggcgtcttcctcactgtcgtcgccgccgctatcacttatcctcctccggccgctcccgtgcatacccgtcctcctcttgagacaaaggaagccattcccagctgtccgcgtagaagcaaggtctcagcagcggttgcagcggaggccggtgactggccagtggaggaggagctgcagaaggggcggaggctacgcgtgtttctcctacaatgccaagaacaagacgcccccgccttcagataagagttcagacgagtgggcgatcgttcgccgatgggatgtgccatgggaatggcaaactgttgtgctcagcatggtaggctgtggagtaaggtaagccataacctttgcgcatcaggtatttgaattttatgttgtatagagtgaggctcgcaagtttgattttactgtacatgtgtattgaataaatcattctgagtgttctttagacagctttgttctgacaggattggttgagcaattggctttgcaagaactgggatttaaagctgtggaggcaactatagatgagaaggcagaaatactcttctttgggcagctgtatgatacatgttttttatgcatatgtgcacaagacctttcaattcccttgatggcaagctgattatct

SEQ ID NO: 140817 - DNA, 1764 bp, Zea Mays
ctcgagatagctggtggcgtcggagggaggcgcgagctcgcagaaggagacgaggcccgagatgagatccgagtcgaactccagcgagctgcccttacgctcccgaagttcctgcagcgcgcccttgagccactcgccggacgtgctcgccgacgtcgccatcgccgccgccaacacaagcggacaagaaggcctaacttctcttttgctatgcggaccctcaatctataggatatttcacgagtacctttacaacttctgttttcacctggtagtgtgcatgattttctaaagactcctcatcttatccccgctaagccgcgagacagcagagcagagggggcagtgcagaaggcatgtttccgatggcgtcttcctcactgtcgtcgccgccgctatcacttatcctcctccggccgctcccgtgcatacccgtcctcctcttgagacaaaggaagccattcccagctgtccgcgtagaagcaaggtctcagcagcggttgcagcggaggccggtgactggccagtggaggaggagctgcagaaggggcggaggctacgcgtgtttctcctacaatgccaagaacaagacgcccccgccttcagataagagttcagacgagtgggcgatcgttcgccgatgggatgtgccatgggaatggcaaactgttgtgctcagcatggtaggctgtggagtaagacagctttgttctgacaggattggttgagcaattggctttgcaagaactgggatttaaagctgtggaggcaactatagatgagaaggcagaaatactcttctttgggcagctgagtgtgacagtagtagtgcttggtgttatatttggcatcaccaacacttttcgaccattcccagatgatgtgtttcgttatgatattaaagaaccgttcaagctgcaaaatggatggcttttgtgggctggaattggtctctttggagcagtaatttctattgccttagccggagctgctatgacttatctgaatggtgaaactccagcgagagagactgattcactagtccttttgttgccgctgattggctcatccactaccagtactgcctttttggtgggaatcactggagttctagcaccacttctcgaggagacactgtttcgaggatttctaatggtgtccttgactaagtggtttcctactccagcttgtgtacttgtcagtgctgctgtatttgcccttgctcatctgactcctggacaatttccgcagctgtttatacttggtgttgcattgggattttcatatgctcagacccgcaatcttctaactccgatcacaattcatgcattttggaactcaggagtaatacttctgctaacctttcttcagctgcaaggatatgatctcaaggagctcttgggagcatcgtgaaggtttgaacgaaccaggcacatataatttgtgcataatatatatggtatcaaggagatccgttgggtatgtgctcttgtacacctgatgccaacaaaactacgtgaaaggaaatatgagtcttcaagttagctgatggttgcgtttccagaagtgttacgaggcatcactagtctgtaaagctgtttatacagtataagatggcagattgaacttaacgtaagaacagctgcccttttgagagtgtttcttacaactggagtactcgattaaattgtgctgatattgtttgttaaagaaaggtgtaatgacaactcacatcatgttttatgtgtacacatgtgacggaac

SEQ ID NO: 140818 - DNA, 798 bp, Zea Mays
tttttttgaggcattgtaattcattattttatactcatgaaaatgttcctttcattgactcagactgattcactagtccttttgttgccgctgattggctcatccactaccagtactgcctttttggtgggaatcactggagttctagcaccacttctcgaggagacactgtttcgaggatttctaatggtgtccttgactaagtggtttcctactccagcttgtgtacttgtcagtgctgctgtatttgcccttgctcatctgactcctggacaatttccgcagctgtttatacttggtgttgcattgggattttcatatgctcagacccgcaatcttctaactccgatcacaattcatgcattttggaactcaggagtaatacttctgctaacctttcttcagctgcaaggatatgatctcaaggagctcttgggagcatcgtgaaggtttgaacgaaccaggcacatataatttgtgcataatatatatggtatcaaggagatccgttgggtatgtgctcttgtacacctgatgccaacaaaactacgtgaaaggaaatatgagtcttcaagttagctgatggttgcgtttccagaagtgttacgaggcatcactagtctgtaaagctgtttatacagtataagatggcagattgaacttaacgtaagaacagctgcccttttgagagtgtttcttacaactggagtactcgattaaattgtgctgatattgtttgttaaagaaaggtgtaatgacaactcacatcatgttttatgtgtacacatgtgacggaac

SEQ ID NO: 140819 - DNA, 1305 bp, Zea Mays
agcacaagaacaggcaggcaggatcaggcttcaccagcctcatccatggatgacgacagagctgatacgaacaagccagatgaggttcttcttccaggcttccggttccatcctacagatgaagagctcataagcttttacctcaggagaaagattcagcaaagacctctgtccgttgagctcattaggcagctggacatctacaagtatgatccatgggatctcccaaagctttcgagctccggggagaaggaatggtacttctactgcccaagggaccggaagtaccggaacagtgccagaccaaacagagtcacaggagctggattctggaaagcaaccggaacagataggccagtttactcttctgaaggggccaagtgcataggcctgaagaagtctcttgtcttttacaaagggagagcggcgaaaggaatcaagactgattggatgatgcatgagtacaggcttccttcactcggcgacccctcacgccctaataaaacaccaaaagacaaaaatattccagccgatgatgcatgggccatttgcagggtattcaaaaagcctaattctgtggcacaaagagtgctatctcgctcatggggtcctgcatcaattgcaacagcagacccagagctgttacctgctttgcagtccatacaagcttcccgttttgcattggaaacctccacttgctcagcaaatcgattcaacagccaacagcagcagaatcttagcagttcacaggatggttcttcatgtaaagtcataactttcaaccgtagcccatatctaccatcagagaaagacatccacagtagttcagtcgtcatcttgccgttagaaatacaatctcagcagaaatcatcagatgtcacatcagcgctgctaagcatggcccctggaatactcagcagtgcgaatgaagctataccaaacacagagtttggactgcttggaccatctaatggatatcccattgattgggctacagacacgagtggaggtattgtaaatagtgatgatgacccatacaaaagaaaatctggtaacggatacagctcaggctacgagtgtggaatcccacgaaaaataaaattcccatttaatttagggaacgatatgatgttcctgatggttcatggtggagaggttattattgatggtggtacaaagtcatcgatgggtggtggacgaagagcttggaacagctcacaacaaatatggtcggacatagcaccgtatgacttggacggaagactgatagaatctagatggctagaagatgtgaatagcctgtaa

SEQ ID NO: 140820 - DNA, 1810 bp, Zea Mays
tttctttgttttgtatgctatgatatcagattttaccaaggataaaaaatggatcagctaattaggaatagaagagaagaggaggacgaggagttaatgctctttcttttccctgttaattagtaataaagggagagagaaaaaagcaaggcatgcttctattctatttggcaaggagagacttaatgagattctcgaaggacatgagaagaattgtcttgtcacattccgtatggagcctagtatattcaaagatatagcaacatttcttagagaataacacatcctacatgatacaaggggtgttactgtggaagaaaaattgggaatgttccttttcatgttgtcccataatgctagttatgaggatttacaacatgaattcaaacatagtggtgaaactaacaaccgacacatccagtcagttttccatataatcccatctctcatgtatagatttgtgaagcctgccactagaatttcagttcattggaagattagcacggatgaacgattctttccttacttccagaattgcattggagctattgatggaacacatgtttcagttaccatttcagcagaaaagcaagctccctataggaatagaaaaggcacactaagtcaaaatgtaatgttggtttgtgattttgacttgaactttacttttatatcatctagttgggagggatcagctatagatgctagggttctaaggtctgcgctacttggaggattccatgttcccgagggaaagtattatcttatcgatgggggatatgctaacacaccatcattcattgcactgtaccgtggtgttcgataccacttgaaagaatttgtccatggtcaccaacgagcaagaaactataaggaattatttaatcacctacatgctttattgtggaaccatatagagagagctataggagttttgaagaagcgtttccccattctaaaagttggaacacaccacccaattaggaaccaagtgaaaatactagctgcggcagtgttgttccataatattatacggatgcacaatgggaatgaagattggttgaatagacaaacaagtaacatatcgccagaaacttttgttggtcttcctggaggagacaattactatagcaatgatgtcgtgtcgcttaatagccaagtggataatgggaactctgttagagatatgattgcattgaatatgtggaatgattatagctaacatcgttcatgatatatgtaagtctcacttgtttggatgtttaaactcatatatttctatatatgtaagtctcaatcatttggatgtttatatatgcaacaagaatgttaggaagaggatctcctaggatgaacttgatccaagctgcatgtaaagaatatcccctagatctactactaacaagcacaagaagagaacatcaccaaaaggtattttgttacctgttcttgcttattttagactgacacctactcacatgctttattttctcttcatagttggccgtcttagagcaaattggaatagtggactagaaaagggtttagttgaaattcttcaagaccacaacaatgactgttataagggccaaaatgggttgtcatcgaaagcatggaatagaattgtcaagttattccatgagaaattcccttatgtcacatttacaaaatgccaaatccaagataaagagaaagagttaaagagagactacaaggctcttaaagaggcaagacaacaaagtggggtatcatgggatagcggttgtgtagaatagaggcagaagaacccatttggaataacctcaccact

SEQ ID NO: 140821 - DNA, 581 bp, Zea Mays
tgatacacagtgataatttcataggtagtttcagtgacatacaaaaacatagttgcatacacagtaacaattttggtcgataaacatttaggtctcgagagaataacaaaaaacatctgttaaagatccttaatgaacaataatctttttggcatgaaacataaactagcagcagtggaaagagtctgtgatcaagcttaaagctagcaacaatggaaggggacacctagatagcatcagaagcccaccgaatgacgcataaatctccctggaagtgaaaagaaaagcaacatgtgagaaaaacagcacattaaactatcgagcaaaaggagaaatggccaaaagcaaataaatgagtgcatgttgctttcttgctgaatgtaatcccacatacatatggaaacaaataaaccctacactacaattctcctctctgcattcttttattgtgccagcacatcgcagtagtaaaatagcaaaaaagaggatatattgtttaataaccaatttccactggcaggaagagtgttgctgctagctgggtccaaacacaactgaataaactgaaatagcaaaacaac

SEQ ID NO: 140822 - DNA, 791 bp, Zea Mays
gtgttccagacttccagtgtgtgtgtgccagccactactgtacaatagctctcttctttctctcgccgtagcttcgctcgtgctgtgcgtgtgtgtatatataagcatcctgcccccactccttttatctctctactcgtctccacggaatcgatcgatcggtgctttgatctctgagcctgagcaagcggtcgagctcaccaaccgccacgctcaagacaggtcgagtagctagctagctgccggagtggaaaaggaggcggtgcagtggcatggggaggccgccgtgctgcgacaagatgggggtgaagaaaggcccgtggacccccgaggaggacctcatgctcgtctcctatgtccaggagcacggccccgggaactggcgcgccgtgccgaccaacaccggtgtgtgatgaatcatctggtgatgcagggcttgatgacgcgcgcggcggatggaattgcctttcaagatccaagctccgagcttacttgatttttttgtttgtttgttggtttggtcggcacgtgtgcgcgtgtgtgcagggctgatgcggtgcagcaagagctgccgattgcggtggacaaactacctccggccgggaatcaagcgcggcaactttaccgagcaggaggagaagctcatcgtccacctccaggctctccttggcaacaggtgatggtcactcgcctgtcgtcgtcttaaagcttttgttcccgttttgttttttccgctgtaacaaatggatcggacaaaccaaatcatccacggcacgaggtgatcgtgtgct

SEQ ID NO: 140823 - DNA, 1456 bp, Zea Mays
cgctcgtgctgtgcgtgtgtgtatatataagcatcctgcccccactccttttatctctctactcgtctccacggaatcgatcgatcggtgctttgatctctgagcctgagcaagcggtcgagctcaccaaccgccacgctcaagacaggtcgagtagctagctagctgccggagtggaaaaggaggcggtgcagtggcatggggaggccgccgtgctgcgacaagatgggggtgaagaaaggcccgtggacccccgaggaggacctcatgctcgtctcctatgtccaggagcacggccccgggaactggcgcgccgtgccgaccaacaccgggctgatgcggtgcagcaagagctgccgattgcggtggacaaactacctccggccgggaatcaagcgcggcaactttaccgagcaggaggagaagctcatcgtccacctccaggctctccttggcaacaggtgggcggccatagcatcctacttgccgaagaggacggacaacgatatcaagaactactggaacacgcatcttaagaagaagctgaagaacatgcagggcggcgaagggggcgcgggagggaagcgcccggccgttcccaaggggcagtgggagcggcggctgcagactgacatccacacggcgcggcaggctctgcgcgacgcgctctcgctggagccttcggcgacgccgctggccaaggtggagcctctgccgacggctccggggtgcgcgacgtacgcgtctagcgccgacaacatcgcgcggctgctggaggggtggctgcgcccgggcagcggcaaggggccggaggcgtcgggttcgacgtcgacgacggccacgacgcgccagcggccgcagtgctccggtgagggcacggcgtctgcgtcggcgagccacagtggcggggcggccgcgaacacggcggcgcagacccccgagtgctcgacggagaccagcaagatggccggcagctcggtcggcgcgggctccgcgccggcgttctcgatgctggagagatggctgctggacgacggcatggggcacgctgaggtggggctcatgaccgacgtggtgccattaggggaccccagtgagttcttttaattaaggcacaagtaccaccaaaagcaaactgatcaagtagagatgcaagaacaaaaagaagaaattaatcgccgggttaggtaactagttaagcagaaatccaacaaaactaacggggcgtttggatcccttcattttagaggaattagaattcactcaataaagtaacttatttagtttggattttgacattccaccactttctaaagtttagatataagtctatctcaaattcatggggtagagggtgggaaatgattttatgcattagtagaatttgtttctactctgtaacttacatgacactcttcgtctcactcatctatagtaaaaatgtagcatataaata

SEQ ID NO: 140824 - DNA, 1415 bp, Zea Mays
cgctcgtgctgtgcgtgtgtgtatatataagcatcctgcccccactccttttatctctctactcgtctccacggaatcgatcgatcggtgctttgatctctgagcctgagcaagcggtcgagctcaccaaccgccacgctcaagacaggtcgagtagctagctagctgccggagtggaaaaggaggcggtgcagtggcatggggaggccgccgtgctgcgacaagatgggggtgaagaaaggcccgtggacccccgaggaggacctcatgctcgtctcctatgtccaggagcacggccccgggaactggcgcgccgtgccgaccaacaccgggctgatgcggtgcagcaagagctgccgattgcggtggacaaactacctccggccgggaatcaagcgcggcaactttaccgagcaggaggagaagctcatcgtccacctccaggctctccttggcaacaggtgggcggccatagcatcctacttgccgaagaggacggacaacgatatcaagaactactggaacacgcatcttaagaagaagctgaagaacatgcagggcggcgaagggggcgcgggagggaagcgcccggccgttcccaaggggcagtgggagcggcggctgcagactgacatccacacggcgcggcaggctctgcgcgacgcgctctcgctggagccttcggcgacgccgctggccaaggtggagcctctgccgacggctccggggtgcgcgacgtacgcgtctagcgccgacaacatcgcgcggctgctggaggggtggctgcgcccgggcagcggcaaggggccggaggcgtcgggttcgacgtcgacgacggccacgacgcgccagcggccgcagtgctccggtgagggcacggcgtctgcgtcggcgagccacagtggcggggcggccgcgaacacggcggcgcagacccccgagtgctcgacggagaccagcaagatggccggcagctcggtcggcgcgggctccgcgccggcgttctcgatgctggagagatggctgctggacgacggcatggggcacgctgaggtggggctcatgaccgacgtggtgccattaggggaccccagtgagttcttttaattaaggcacaagtaccaccaaaagcaaactgatcaagtagagatgcaagaacaaaaagaagaaattaatcgccgggttaggtaactagttaagcagaaatccaacaaaactaaatgtatttgaattctcggtgaatttgatcgagttggatgtcgatatagtttttgttttagtcccttcttttatttttttctctgttgtttctctgatgttagggtttgtaactgatcatgtaagcttatactaatgacaggttcctaaatggaccctgcatgaaaatacatcttataaattaaaagatctataca

SEQ ID NO: 140825 - DNA, 225 bp, Zea Mays
atggaaacaccccgcaaatgttgtgcatcaaccgatcacgcgcatgaatcttccatgcgggagagcgaggcgatgttggcggccgagttcttcatcgccattgaagatgaaggcttcaagcctgccgactcggaggagtggagtgatggcgtcttcgataactgtgacatcatcctttccataatggaagacgaagaagcaatgtctcctctggctcgaggctaa

SEQ ID NO: 140826 - DNA, 1317 bp, Zea Mays
aaccaaaaccctagaaggcccacggccaccgtggcaccgtgccgcctccccaacctcagcgactccggcggtggtcgagtcgagcccgctagaaatctttctgcttcggttctctgcttgcagcgatgatggacagctctttgcaagtctagatgtgtgacctagtacctaagaaagattaatgcattgtggccttgtaccccccactcaagttaggaccagccacaggtcatagcattttgtgccggccttcgaggccttaatgtttctgcgtgtaattgatcgaccatccattgccatcctcaggaaaggagaccgggactagggtagctgcatggctgcgacctgctgaagaattgagcaaagccaagcaccctagcttcttagatttctaagctggcatgcaatgccgatgacagggacctactctttggggattcttaggattcaagtatccttcactggtcactttttaatgttctgaaagggagaaaggggaaaaatacagagagaaggggaaaaggccactgagtgaggtagggcaaaaagggactccaatctaaggctgtctttaatggcccaacaattattcagctctgcgattgtgaggtggaatttgctggaccatcaatttagccagcccaattcggtcttgtactgctccacatgtgaaaatttttgcatgccttgccacaccaccagagggcgtcatcctgtgctgaaagggggaggaagctgacgatgaagaggctgttgatcctgcaaaggtgtgagccgatcgtgcggttcagctgctgcagcgtgcgctacggggactgccgtcggaaccatgcagcgagtactggaggccacgcagttgatggatgccgagagttcatcgctgaaggggaggagggcaccagtggtgctctaaagtgcgccgcctgcggttgccaccgcagcttccaccgcagggttcaggtgtatgaggttgcatggggttatggatccgacacgtcgtcgactgagtagagaggggaggtgcaagccacttggagcttggatttgtgcttcctgcagcggcaaacgcccaacaatattggccccccttcttctctgtctccggtgacaagctgaccggtggatgtataggagccttttgtgattgtttgtagctccgtacgccctgatttgacacgtcggaattcttacctaaagtttctttgtctgctatgctacacccgtgtattgtattctgagtgaagtatacatgagatgagagttcaaactatctatgtattctttccacctgaaatttcgtgttggtgggattaattc

SEQ ID NO: 140827 - DNA, 152 bp, Zea Mays
ctaaattccaaaattgtacctttgggttaaatcccaattctcatctcattattatattcccacattattcctttttaacattacaaaattccaattctaatctaagataaagtttaagaattcaaatttttaatacatactcaaaaaaattt

SEQ ID NO: 140828 - DNA, 1712 bp, Zea Mays
ctcacacacactagtgactagccttcctgctgccctttttattcttatctcctcaccctcgcgctctcttcacctcccttgacccgtcgtcccatgctaaaagcccagggttaggagctagaggtaatctctctcccgtctctccccagtgggcgtgggggcgccgcatggaagccatggacgtcaagtacaagcccgtcatgttccccaacggcgccggcctcaagaagccgaagccggcggcggccgtggcgctggccggggagccgctgtaccgggagtgcctcaagaaccacgccgcgagcctgggcgggcacgccgtcgacggttgcggcgagttcatgccctcgccgggggccaaccccgccgacccgacgtcgctcaagtgcgcggcgtgcgggtgccaccgcaacttccaccgccggacgctggagggttcccctccgccgcccgcgcccgcgccgctggcgctcccgcctccgccgagcgtgatgcacggccagccgcaccgcgcccgggaggagacgcccgaggaccgccacccgggggtcgtcgacgccgacgactccgattccgactcggaaggctcggagtacgacgaggagcggtcggtgtccccgccgccgccgccgcaccacctgctgccggcgccggtggcgcagcagcccccgccaccgtcctacttcccgacggcgccgcacatggtgctctcgctaggttccggcgtgcccgggcccgcggtggcggtatccccggcgcagaggctggccccgacccagctgacgccgtccagcgcgccgccccacgccgggggcgcgatgcccatgcccaggaagcggttccgcaccaagttcaccgccgagcagaagcagcggatgcaggagctgtcggagcggctcgggtggcggctgcagaagcgcgacgaggccatcgtcgacgagtggtgccgcgacatcggcgtcggcaagggcgtcttcaaggtctggatgcacaacaacaagcacaacttcctgggcgggcacagcgcccgccgcagcgcctcctcgcccgcccccgcccccgccgccgcgtcgctccaaaccccagccgccggcgccggcgctgctgcagcaccgtcattccacccgtccaggatcacccctccccctcccgtcctcacctcgtccccgacggccgccaccggcttcaacatcaacggcgccgcctcgtcggcgcccaccgtcgccaccgactacaccacggacaacgccaacggagcttcgtcgccgcactccgcttgaactagagaagggagaagagaggaggggggaagggaagggagagcggagagagagaaacatgtagcttaatttcagtgatcactcgttttttttttctttagacttcttgccatctactaagaaattaaccccaagaaaaagcatgccgctgtgcgccatgcctagaaatccaagcttcttcctcccctgtactagtactgtatgctcttgggatccgatgatgatgctgatgctgatttaggattagattatctcatcccatccccaaccaaaaaagaggtagtagccttcttggtggttgttcttgtcctctttgattgagctcaaccaagagccgtgctcgtggtcgggagcaaggcaagagagagacagggttcttccttctagactcctaggaggatcccatgctgttgtgctgtggcatgttgcgcg

SEQ ID NO: 140829 - DNA, 2610 bp, Zea Mays
aaccccttccttttgctctcccgttgcgcgcttctcctcctcctcctcacacccctctctttctgtcggcggcgactgggcggccgtcgctgccgtcctacgccagctgcccaggtcttcctcgcgcccttcgccggcggcaaccaccgccagggtaagccagccatcagccatggctttgaaggcgagctccagcgacaaccggaccaggagcacggtatccctgtgcatagtgattggcatgtgctgcttcttctacatcctcggggcgtggcagaagagcgggttcggcaagggggacagcatcgcgctggaggtcaccaagcgcaccgactgcaccgtcgtgccgaaccttagcttcgacacccaccattctaaagccagtggcaactctagcagcctggtttctccgtcgaagaagttcaagccgtgccctgatctctacacggactacaccccctgccaagaccagaacagggcgatgaagttccctagggagaacatgaattacagagagcggcattgcccggcgcagaaggagaagctgcactgtttggttccacccccaaaaggctatgtggctccgttcccgtggccgaagagccgggactatgtccctttcgcgaattgcccatataagagcttgacagtcgagaaagccatccagaactgggtccaatatgagggtaatgtattcagattccctggtggagggacgcaattcccgcagggagcagacaagtatattgatcagcttgcatcagtcgttccgatcgccaatggaactgtcaggactgcacttgacactgggtgcggggtggctagctggggagcttatttgttgaagaggaatgtcttggccatgtcgtttgccccgagagattcacacgaggcacaagtgcagtttgctctggagagaggtgtccctgctgttattggcgtccttggtacaataaaacttccctatccatcgagggcctttgacatggcccattgttccaggtgcttgattccatggggagcaaatgatggaatgtacatgatggaagttgatagggttctaaggcctggtggctactgggtgctgtctggccctccaattaactggaaggtgaactacaagggctggcaacgcacaaagaaggatcttgaggcagagcagaacagaatagaggaaattgctgaccttctatgctgggaaaaagtctcagagaagggcgagatggcgatatggaggaaaagggtgaataccgagtcttgcccttctaggcaagaagaatcagctgtgcagatgtgtgaatcaacaaacccagatgatgtctggtacaagaagatgaaggcctgtgtgacaccccttccagatgtaaaagatgaaaacgacgtagctggaggtgcaatcaaacccttcccagccaggctcaacgcagttcctccaagaatcgctaatggtttggtcccaggcgtttcatcccaggccttccagaaagacaataaaatgtggaagaagcatgtgaagtcttacagcagtgtgaacaagtatctgcttactggtagatacaggaacattatggacatgaatgcacagtacgggggattcgccgcagcaatagagtccccgaaatcttgggtgatgaatgttgtgccgaccatcgcgaagatgcccaccctgggggctgtgtatgagcgaggattgatcggcatatatcatgactggtgtgaggctttctctacttatccaaggacgtatgatcttatccacgctagcggtcttttcaccttgtataaaaccaagtgcagcatggaagatgttctcctggagatggaccgcatcttgaggcccgaaggcgccgtcataatacgggacgacgtagacgtcctgaccaaggtgaacagcctcgctctgggtatgaggtgggacacgaagatggttgatcacgaggatggccccctcgtgcgcgagaagatcttgtatgccgtgaagcaatactgggttggtggtaagcagacggctgtagcttgaagcaagcacgtttcatgaggctctaacatgaggaattctgcaaccaaaccttacccgacaaacaaggattagcttaaatgatcaacccttgtagggcttgttcggttacaacaattcagaagcggattggaggggattaaatccttttctagttaaaaatgactagaagaggatttaaacctcaccaatccccttatggattggtgtaaccgaatatgcccgtagggggtagcactgaagcagccaggataccgtgctcgctggtgatcactgcaaccacataatcttctttggtcgtgtactcttttcaaaaagcttgtatctttggaaatttctttacggtcctcgtacagattcgggtgtaacgtattaagtagactagctttatgtaagcgagaaatacatgttttctttggacaaccccaggtctatttgtgtactcccgaatgatcctgaagaaaagggctccttacggctccactgttgcaacttgaaatatgctggcgccaggcacaacttcgaagccagaatttatttgggtgtccgtgtacctttctgtaagcaagaaaagaagtacagataaaaaaaaa

SEQ ID NO: 140830 - DNA, 234 bp, Zea Mays
atggcgggcggaggggtggcggcgctgggcgtgaagacggagcgcgcggcgcagtacaaggggcgcatgacgctcgccgtcgccacgacctgcctcgtggccgccgtcgggggcgccatcttcggctacgacatcggcatctccggaccaattattcgcctcgtcgttggtagcgactcaatttccgcttggccgtactcaccaccagacaatttccgcgacagggttgtgtag

SEQ ID NO: 140831 - DNA, 456 bp, Zea Mays
atggcgctcatcatgctcatcggcgatggtagcactacgtgccacgccgtgcggcatcttgctcacgccctgcccctcgtcgctcctatcgctgtctcgagaatttatgtcgtgccgaagccgtcgatcgtgcccgtgggcacccttccactgatgctcgccatatcgacgattcctgtggtgggcgccatgccacggatccatgtggtgccgaacaccgccgcactgccccctatgttagctgcagtaccacccatcatgccaaaattgacgctgccgctaatgcccgtcgtcaggccgaaggttggcgactcgccaccaatgcccgtcgtcatgcctaaggttggtgacttgccaccgatgtcctatgtgtggcccgtgcctaaccgtcgatgccctctatcccggcagcattggtctccattaggtcccacgaacgtgacacgaactcgatga

SEQ ID NO: 140832 - DNA, 1857 bp, Zea Mays
atatatatatttgtgacaattcaatcagtttttcgagtgcagatggattatgacttgttggagagaggcgtgacatccatggacccattcctggagaaattcttcccggtagtgttccaccggaagaactccggcgggaagaacaactactgtaagtacgacaaccagggactagcggcgttcacatcgtcactctacctcgccggcctcgttgcctccctcgtcgcgtcccccgtgacgaggaactacggccgcaaagctagcattgtctgcggcggcgtgagcttcctcatcggcgcggccctcaacgtggccgccgtgaatctggctatgctcatcctcgggcgcatcatgctcggcgtcggcatcggttttggcaaccaggctgtgccgctgtacctgtcggagatggcgccggcgcacctccgcggcggcctgaacatgatgttccagctcgcgacgacgctgggcatcttcacggcgaacctgatcaactatggcacgcagaacatcaagccgtgggggtggcggctgtcgctgggcctcgcggcggtgccggcgctgctgatgacgttgggcgggctctttcttccggagactcccaacagcctcattgagcgcgggcgcgtggaggagggtcggcgcgtgctggagcgcatccggggcacggccgacgtggacgccgagttcacggacatggtggaggcgagcgagctggccaacaccgtcgagcacccgttccggaacatcctgcagccgcgcaaccggccgcagctggtgatggccgtgtgcatgccggcgttccagatcctgacgggcatcaactccatcctcttctacgcgccggtcctgttccagagcatgggtttcggcgggaacgcgtccctctactcctccgtgctcaccggcgccgtgctcttctcctcgacgctcatctccatcggcatcgtcgaccgcctcggccgccggaagctcctcatcagcggcgggatccagatgatcgtctgccaggtgatcgtggcggtgatcctgggcgtgaagttcggggcggagaagcaactggcgcggagctactcggtcgcggtggtggtggtgatctgcctgttcgttctggcgttcgggtggtcgtggggcccgctgggatggacggtgccgagcgagatcttcccgctggagacgcggtcggcggggcagagcatcacggtggccgtgaacctgctcttcaccttcgccatcgcgcaggcgttcctgtcgctgctgtgcgccttcaagttcggcatcttcctctttttcgcggggtggatcaccgtcatgaccgtgttcgtctacgtcttcctgccggagaccaagggcgtgcccatcgaagagatggtgctgctatggcggaagcactggttctggaagaaggtcatgccggacatgccgctcgaggatggctggggcgcggctgagggtcatgcggcacctgccagcaacaatcacaagggatgactggagtgaagcatgcatggttgcctggttggtttcgtggacactttatataataactgaagaaaacaagacacacactaacatgtaggcggctgcttattcttattgtattttgtataaagcaggctgtgtgatatgcagggataaaaacgaacgagatcgttccaaataacctctcttttgttttcatttttacattttatttgggaaaaaagattgaagaagggactagcgggataacgaaaacgaactaaaatgaacataacaaattaataatagatcaaaatcgaatataaaaagtatgaacatcaccgctttctcttttctaaaaaccaaaaaaatgatcaaaatatctataaatacgaa

SEQ ID NO: 140833 - DNA, 351 bp, Zea Mays
ggctggattaacagagctattgccatctcgtgcgaaaaccttgtttacatcacttcacacccccgttggatcaccttgcaccagagagcaagttccaacaggaatattgcccatgttattaacatcaacttggcaaagttatggattcttggagcccttgaaataattaatgctgcaagaaaatctaatactgctctgatgatcggtggcatggtcgagactaggattgctatgggctttgctcgtcatttaggtgctggccttggatgctttagtttcgttgacctagacacacctcttttactgtctgaagatcacgtgtatggtggctatgaaggtaatcttacacaa

SEQ ID NO: 140834 - DNA, 84 bp, Zea Mays
caaattaaatttattacataatcaaattccaactgtcggacataacaagctaaacaatattaaacatacaaaaattttaatact

SEQ ID NO: 140835 - DNA, 90 bp, Zea Mays
tcatttgcggttcttctccctagcttcacgccttgacctcacctcatgtagccatttccatcttgttgtgtggggttggatttagggtat

SEQ ID NO: 140836 - DNA, 401 bp, Zea Mays
aaacattacaagttgcctgaaggagatactcatacggaacacgcacactccgtgttccataggaatgtggcaagtgttgtcggggatatgatgtactatgctcgaattcagcattcgattccatggatagctgccaatgatgctgcttggcatgcattatgtcgttactgggcttcggctgaattcaaggcaaagtctgtgcgacatagttccaatcgtggaaccaagtcgtatcacaggtatggaggtgatgatcactttcgtttggcaaaacgaatggtaagtacaatttaagccatttttgttgattgtagttgacttgctgtaatttctggttatagtgtttgtcaaatgtacatacaggaagctagcactggtgcagtgcccagtgatgttcaaat

SEQ ID NO: 140837 - DNA, 486 bp, Zea Mays
atgtctagtcagcatggactagactatgactggagaacctcacctattgatcctcaggctatgtatgcaagtggtggaaaagctcatggaaggtacacaatgtttgctaacgtcatcgactcgagccaggtgagggttcagcatggaggttcatcgaggtttgctgctcgtagctcccgtcgctgcactcaagatccagcagaagtggagcaactacgagaagaacttaggcgacatcaggattacttgaagcaacaagctacgcaacatgaatattatgctacacagattcagcaacagcaaacactcatacaattcgacaaatttgtagcaactagcacaggcctaagggatacacgtcctggtgccctcaccaccaccacctcccattcattatccttggtcttcacctccacctatacctacatctccatctaccgaacatcagctgttgatatatttgttatgttgtggaatgtggtgtaa

SEQ ID NO: 140838 - DNA, 1202 bp, Zea Mays
gcgtccggtctcatccttatccccatcgcccttatcccctggtctgtgccgctcgtacttggagaaaaatctccagccgccttacctgctgccgccgcttcccatccgacagattatttgtttgcagtcactgatcttctccctcgctcagccgagtggtcttccactcctcccagccgagctctccctctccacgcagctccctcgcggtgctccctccatagcgcccgagcgctctgtcctcggatcggagcttctctgcgtgtcgcagccaagcttccttccccatggcgcccggcgcccaagtccccagccgtgaccctgccgagctccgccccgactccacgtctcctggtcgggctctcgttctatgcctgatgccgctgttccctggtgctccctgctcggtccctgcccagcgcctgactacagctccagctcgcggcgtcccctctgcttagccaggattgtcgtgcctctgctccctggttttccctacgcgcgagctcgctggcgttgcccctgctccgcttggccgcgtccccctcagtccaccactctgctcggccatggaagacacgccgcaccctggttccagctcgcgatactccctgcacgccggagtcgcccagctcggccacctacctccctatgcgcgacctcctctagctccctgtttctccagagtgtcttcctctgttggctcgccggcttcctgctccctgctcaccagcgcacgcttctcctttatgtgccgtgcctgcgtgctgctcgccccagctcccagccatggcgtcggccaaagctcctgcgcgttatgtgcccagctcccttttccgcgtatgcgcgcttagctcgctttcctgcgcgccccagcgttctgcttccgctcgtccctgcgcgcccaagctccttgcgcggtccttccttgagctcggtcctgcgcttttcctttctctgtgctcgtgctcgccgtgccgtgagtcactggccagcagtccagctcgcttcagaatcaatctcgtcgtcgttccgcgcgtcagtaagaaatctcaagagttgggtgaagtcggaggctaacagcatggtattcaccatgtgcgcgacaggaagctcgagccaggatttatccgcattcgtacgagtattggatcgcgtttgatacttgtgagccgatttataatttttgtaagtttatttaa

SEQ ID NO: 140839 - DNA, 701 bp, Zea Mays
agtttgttagttacttttggggtccaatccggctcatgggtgatgttttggtaagccactaacctcttttttttggtacttaacttcatgttattgtctaaaattatgatatattggtatttttcctatgttgtttaaaactacgcttaaactttgtttaaacatttaaaagtcaaaacttcacccatgagcatttcaacgttttatcgttttaataaccttgctcaccatacccatgtacagaaagtgcggagccaaaagctcgatacaaagagtagcggcgtcgggcagagaaacgtgtggcgtgggcgcggcttcccacagcacggtcgtgtagagggcgtcgagggaggcaggggatccgatatcatgttagtgggactgaaaccctaaccctaaccagagttagaagatgtatttataataggtgtagttagggcctaagcccattacacaaatacaacacattacaatagacattacacagtagctctaacaattaacattgtttattggtgcaagggtcccgaactttataatagtaatgatacctcagaacacatactagaacaattgtatattaagtagcatatggttcagagctatcttccagagctatcttccagaaaacaacctacctagtgaccatgcatattgtacaaaagatagcatgcatggtgctcagtaaactcaccaaaaac

SEQ ID NO: 140840 - DNA, 1943 bp, Zea Mays
atgaagtgtgcaagggtcccagaggttgtttcaaaggacatgcaagcttatcttaagaagaacacaaggtctgcacttgttttggttgacgatgaaagtatagaaggagaagacgatgctgctgctgcccccgtttcaaaggacatgcaagcttatcttaagaagaacacaaggtctgcacttgtttctcaagctgcaatgtcctcctttgttgtttctgctcctccgaagccagttactcaaaaaggtagtaaatcagtagctgccatgctttgcaagagcccagaagaagtgattgctgaacggcacagcaacaaagcttcccagtccactctagagcactgcacgaagaaaggcaaggaggtccagcaaattgttgatgaccacgttgctgatttcttgtacgagaacaatattccgctgaacgtggtcaactcaagaagctgggagatcatgttggagtcgatagggcagtatggtcctggctaccgtggcccatcgtaccacgacattagggttccgtggcttgaaagggctgtcgagaggacatcattaatgacggcgaagcatgaagaatcgtggaaggagtatggctgctcattgatgtcagattcatggacagatgttagaggacgtcatctaatcaactttttggcaaacagtccagcagggacacactttttgtgctctattgatgcatcaagtgagatagctaatgccaacatgttggcagatttgctagaaaatcagattgacaaaattggcagagaaaatgtagtgcaattagtaactgacaatggagcaaacttcaaagctgctggcaggcttcttatggagaggattccacatttgttttggacaccgtgtgctgcccattgtttggatttgctgctggaggacattgggaagattaagtacttcaacacttgcatcaaccaagcaaagagggtgtgtcggttcctatacaaacatgggaggctgcacaaccttatgaggcaaatgattggaggtgaccttgttaggcccggtattactaggtttgccacgtcttttctcaccctggctagcatgctcaagcataagaatggtttgaagagtgtgtttattagtaacgaatggcagcaaagcaagttctccaccagtcaagaaggcatccaagctgaaaatattatcctctctacagagttttggaatagtgttgagttctgtctacgagcttctcaaccaattctcattgccctaaggattgctgatggtgatgagacacctgctgctccagagattatggcagctatggataaagcaaaagccaccatcaaagaggcattaaaaaataagggcaaattacttgcagaagtaatctcatgttttgacaaaaggtgggaaagtcagatggagcagaagctgtacggggcagccctatttttgaatccgggcaaattctttgacataagggaaaaggacaggaggcaggctgcaaggctaagatccatgtttaacgatgttatgtggaagatgatcagtaatgaagatgagcaaacaaagattagtaagcaagcagatgactatgaaaggtccgaaggggaatgcttctcgaaggctggagcaataagagatagggggaaaaaatccctgtaagtttatttctaaattctctttgtattaactgaaatatgcagtttatgtgtttgcgactaaacttacaatgtttgtctacttcagtgctatggtggggtgcatatggagggtttgctttcgaactacaaacccttgcaaaaagagttataagcctctgttgctcggcctctggttgtgagagaaactggagtgaattttcagcagtaagtgtctctactttgttgtttgttcaatgttcatatgcagtaactgaaatatgcagtaagtgtttgatgacttcttgaatttgcttgtgtagatccaca

SEQ ID NO: 140841 - DNA, 318 bp, Zea Mays
atggagaatggagttggtgttgccgctaccacactccaggcaattcactgccaccttgcacctgctgtgggggcgccggtgatcgcacgggtcaccgggaacctggatgcagcggagatagtcgcgtggggagcctcgggctgtgatgaatctctcaccggagtacggattctcggtcatggccgcagtttatcgtggcctggctactcgacacatcatgggacagtaattcacctcctatcgttttcgccctggtaccttctgcatgcggcactttattatgcacgaatccacgtaccgggcgccgggttgggctag

SEQ ID NO: 140842 - DNA, 179 bp, Zea Mays
aaagggaaggatttttattcattcaagaacagtacatcgagatgatacaagtccttgaaagtcacttccggcctctgcccataagagcacacagcccaacacaacagagtttaaaaacacacactagtggcaatcaatccgaagactagaccgccaactataacactataaaagtcttc

SEQ ID NO: 140843 - DNA, 194 bp, Zea Mays
aactgcgaaactccctcgccatgcgctctggcatcggctaccgccgattccgccattgagttcgcaagcactccttgttctgttcgtctcgccgtgggcgatttctctacgcttcaaatccgtgctgctcgccccgcatgcgctcactcctcatccatcgggttttggcgtgttcgcatttagcgtcgagttgt

SEQ ID NO: 140844 - DNA, 462 bp, Zea Mays
atcaatgtgggcagcctaaaccctatcttccgtcacccgcacagccgccgaggtggcttccatctcgctcgtgcgtcgatctcactgagcccccgccgttcttctctccacttcctgcgttctccagccgccgtcttcgctgataggctacgccgcctgctggcctgcgcgcgccgcagcctaaccctgtgtgcaccctgttcctaaccctgcgtgtggccgccgccgactggcttgcgtgcgcccgcgcctccgcctaaccctgctagcttgcgcgcccaacgccagaagccagatgccctgagcccaccgccggctgtctgtgcacgcaagtgaacccatccggctacctgggcacgccatccgacctccctgcgaacctctgtatcggccgtattcctcaagaacacagggcaaacaataagttctggagacagcaaaaccttaaggtatacaattgat

SEQ ID NO: 140845 - DNA, 853 bp, Zea Mays
aacttgtcagggctactctccatttagtggttatggagtctcccaggaagcataaggccagtgccgtgccagtcaaggagaaagtgaagttagaagatggaaatgatttgttagtcaagcgcagaaagactgaattttcagggtccattgtccaaccagaacgggaaattgaagtctttgacccggagaacaaagtgcctgatggtctcccagttgaatattctactgacaaggatcccatggatgcgctcactagttgtgcagtacagaactttggtcaagcgaaaggtaacacatcagcaagttcgagactgccaaaaatatgcaaggcagctggctggaaagaaccatcatttgactttgaagaacaaggacctccgcataacagaatattcacatgcaaggtgaccgtccacttggatggactggtcaacaccattatggagtgtttcagcgaccccaaacctaagaagaaagctgcacgggagaacgccgcacaaggggcattatggtgccttgagcgctctggttatgtcaagtcatcttcagatgttcctgacctgtgcggccatcagcccttctgctagccagatctacccttgtaggagtattaatgttggtagacgggtgcagcttgttgctgtggcacagtggttatccatgcactgatgccatgatactcttgagaagttgagtcccttatgaatcttgagccggctgtgttggctcgtgtacctagtctctagctcgtttggttacatgcccaacgcctgcacttgtactgtgtaaatactgaactccggcgatcagtgcaatcaaactggagctcctagtcgagctctgtcttgcaatt

SEQ ID NO: 140846 - DNA, 1401 bp, Zea Mays
cgaacatcagttttgggatctgaaaaaaactcggccgaggagggaaagaccgtcctcccggtattatattaagaagagacagaaacatggtcccggcagagaaaatccccgaaccctggccccccatcactagcgggccgtcaccgcccactctgcaacggcccaaccggagggtggcgcgcaggacgtaacccgggagcgggcagggcacaacgaggagatttttttaaccaagccagaaattcgtccccgagggggatcgaacccaggacctggaggtgctactcggaagccttaaccattacgctagaggccctttcgctcagttttgggatctgtctgcacataatattcattgcaattaaatctacaaaacaagatcccacttgcctacattttgattgaaaagaatgtttatgacatgtggacctcgaatttcacataagtttcaaataatttaataatggccttagtccaaacactcattcttcttcatacatacatttaccttgcacacaattggcatggcctcaaaccctcatcgtagatttggcctagttttggcattgcccacgttttggcatttctaagttttggtttggctcgccggagttgtgaaccaaacaggccatatttgcgctaattttattcatttttgaaagttggccaggtgctatggcacacacttgagtatacatgcatcggtactctttggttcttccttgactagtatctagacttcttttatttttccgtataagctattgttttactgaatatctagacttttttttttccgtataagctattgttttactgaaatccagtggttatataggtaacacatcagcaagttcgagactgccaaaaatatgcaaggcagctggctggaaagaaccatcatttgactttgaagaacaaggacctccgcataacagaatattcacatgcaaggtgaccgtccacttggatggactggtcaacaccattatggagtgtttcagcgaccccaaacctaagaagaaagctgcacgggagaacgccgcacaaggggcattatggtgccttgagcgctctggttatgtcaagtcatcttcagatgttcctgacctgtgcggccatcagcccttctgctagccagatctacccttgtaggagtattaatgttggtagacgggtgcagcttgttgctgtggcacagtggttatccatgcactgatgccatgatactcttgagaagttgagtcccttatgaatcttgagccggctgtgttggctcgtgtacctagtctctagctcgtttggttacatgcccaacgcctgcacttgtactgtgtaaatactgaactccggcgatcagtgcaatcaaactggagctcctagtcgagctctgtcttgcaa

SEQ ID NO: 140847 - DNA, 350 bp, Zea Mays
tcagtggaccgctgaaaactgcacaagaacattgctcgctgaacaattgcaacttacaacaatgggaagagaaatcctctctgaattaagaaccaaagccggttcactgaattgtgaaccaaagtggcttccacctagttcttccgggcatagacgatgttagttctgagtcctctattatgtgtaatctagttggaactgtcagtcttaggccctgtttgggaacaaagtttttgaaaaccacagtttttgaaatactatactatactttagttatgacaataccgtagtttataataccgcagttttgaaaactgaggtccagagctaagtttagaatgccttaaaac

SEQ ID NO: 140848 - DNA, 474 bp, Zea Mays
aattctctgcctccgccgccaggacgacggcaaatccgcccagacagggtggacgtcgacgccggcgaatcctgctcggattgcacacatcaccgccacccgtcgtgcgccgacatctgtaggtcgccagccaacaaccttagactgaggcaccctgaatccatctgctattgttcagcttggtgttcgggcaatccttgttctcgcctcagcacaaatagatcgccaaggtatgtctatgttttttgcttgactttgttagatctagctttcgaaacctgtgaaaaattgttaattgatgtttttttgcgatgctttattagatgaatagaagttggttgaatggtacattgttttcccctgaatatatcaatggtgtcaaagaatttatgagctttattcaaagaaaattcggtgaggatgaagatattttgtgtccatgtagtagatgtctcaaccaaaagtcctttcatc

SEQ ID NO: 140849 - DNA, 1304 bp, Zea Mays
aattctctgcctccgccgccaggacgacggcaaatccgcccagacagggtggacgtcgacgccggcgaatcctgctcggattgcacacatcaccgccacccgtcgtgcgccgacatctgtaggtcgccagccaacaaccttagactgaggcaccctgaatccatctgctattgttcagcttggtgttcgggcaatccttgttctcgcctcagcacaaatagatcgccaagatgaatagaagttggttgaatggtacattgttttcccctgaatatatcaatggtgtcaaagaatttatgagctttattcaaagaaaattcggtgaggatgaagatattttgtgtccatgtagtagatgtctcaaccaaaagtcctttcatcaagcctttgtggagaagcatatattaatgaatgggatggaaagtacatatactcgatggattcatcatggagagaactttgaggaagatgccggtcattcgatacatgggacaggtgtgattgatgatgacagctatggtgatgattgttttgatgggatgttacaagacctatgcactgcataagagcaagataaagaggatggtgaaaatgaggatggagacaatactaatgatgacaatgagtcattttatagtgtagtgctgaaagaggcgaaacgtcatatttatcctggttgtaccaaattttcaaggttgtcctttgttgtaaagcttcttcatatgaagtcattatataggatcactaactctgcatttactgcaatattaaagttgttggttgaagcattcccaaagtgcaatacactcccaaaatcatataatgaagcaaagagtcttctaaagaaattaggtcttggatatgtatcaagattagagagcaagaagagatgaagaagaagcaagatgccatggatgctaaacttgagcttatgctaagtcagattcaaccaagttaaagctaactagtatggggtgttaggctttgttggtacttctcttttgctgatgctattgcattctattgatggataaatacgtttcaatccattttttgtctgttgtgctgctagagtagctttagcggcatgtgtggtgtgttggagtggcttacgtgtcagtggttggatacttgctgtaatgacatgctattggatacttgcatgtaatgacatgctggagtgtggtcagtattttttgtgatgagatgctggattaaaatctgagttgtgatgtaatagaattcaacattttgtcattatgttctggattataattaatatatatttaaattattgtgtttgc

SEQ ID NO: 140850 - DNA, 1130 bp, Zea Mays
atgcccgacctctgtgacctcgctgccaatgcccacaccgcgctcgtcttcagtgagatggatagtgatactccacgacgggggggtagtgggagtgggaagaatgaggaggttaatggcggcaacggtgacgtgcagagctccaacgggatctgccatgaacaccatgcatacactccaagaggcccccttcagatctctttttttctaaaccatggtacaatgccatactctgtatatatgtgcagctgcgctgatgcattgcccatccctatcaagatgcgactcaacatttccgtgatgttgatatctaaaaacattaatgtgttttgtgttgtgttgtgttgtgttgtgttacaagagcaatatggtgttgttagtgggttaagagatggtggttacttagatgatatgacactcgttgcaatagtagcagaggtagagatgcacaagagcaagcggaagctctctggcatcctgcacgagggtttcaagcctgataaatggtccaaccattatgttcttccaagaaaatactggcaacactgctcaccgtttgtaatttgttcgattgatgatgcaacgactatagtgcaatgtttttatgcttttcctatagagggtatggtgagagtgatggttatccttttcagaaagggatcacatatgatgcacatgttgcacttgatcatctagctcaaaggaaggacattgacataaccaggatagttatctttggaagatctttaggaggtgttgttggagcagttctttccaaaaacaatcttgataaggcttggaggataggaagaattgacctcgaaaattcaaaaataatcaggtcacaggtgcttaccattattggaactggtccatgcaaatatttttttcgctcaaaatccaacatggccaatcattggagaggggactggagcgagagcagcatcaatggtggcgagaagcggaggaagagggggcaggcgagcaggctggacaaggcgagttcctcctcgtcggcgtcagtggcgtcctccacgtcatgggcgagtggctccactgtcatggaatgggacaacgacgaggttgcccagctgcagagcggcgacgacttctccctcctcgtctgttag

SEQ ID NO: 140851 - DNA, 222 bp, Zea Mays
atggcgacgaggacagagggagagggcaagggcgctggggtgagctcaggctccaagacgccatgggagggaccacggccggctgggcagagcaaagggtgcgaggagcagggacgcacgcagtggccaggagaagctcaacgacgagcagagccgcgcggtggagagctgagggagatggcgagctggagagcagtgagcatggagggcgtagaggggtga

SEQ ID NO: 140852 - DNA, 1718 bp, Zea Mays
acagagatgagacctagcagcgcatcttctcctcgacctgtatcgacacgttcaatccaccaccatcatatccttaagggaagagataatcatattctcaagggaagggaagagatggaggagcagctacctgacgatatgcttgtggaaatcctgagccgcctcccgcccagcagcctagcggcgtcacgctgcgtctccaagcacttgtgctccatcgtggacgcccgacgtctcctgcgcgccggccacctccttcctctccgcctcgacgccttctactgcatcagcctggcctcggtcgatcgggagacatatcttttcgcacggccatcggtagcgcgtcggatccccggcgcctgccttgacttcagggtagatcttgaggttgtggatcactgcaacggtctactgttgctgtgtgacatggtgctcaaccctgccacacggcaatcggcagccctgcctaacgccccggatccatccattgagaacatgcttggggtcgccacagtttgggccgggacagcgccgcaccgccccccattttacttgtatacagactttaatcttgtgtacgaccccatggccgagtcgccggagcatttcgaggtatttctgatccccgtgttatcgtgcggccatagtggtttgatgtccgacaatatcaccatcaaccttgaggagcaagaatggccgccatcgacattcagaacccacgtcttctcgtcgaggagctggaggtgggaggagaggtcctgggtccgccaaggggagcctacggggaccatggccgatatgctgcgctccgagcatggctcgaatcagaaggctgtctattttcgaggtgcactctatgtgcattattcaaatgaatctgtcatgaggatatccatatccaaggataggaatacatatcaaatgatgagacttccagcaatacggagcaaacagatagttgagagtgctaccttttacttgggaaaatctgagaaaggagtatattgtgcgttgttttattgggcccaggatgacagcgacccccagtttcgagtctggtctcttatggaggaagagatgaatggacgtgatggacaaattcatatgaagtggttgataaagactagcatcagccttaaacccctgctggcacaacttcatcattgtggtcacgacttgactccagatgaatggatgatcatctataaccgccatgaccgtgaccttgctggttcatctgcacaagatgataatgatgatgaatgggactttgaaaatgctcatgagattgtccttgaagcacctaacaatgttaaagactggtaccctatagattttctcggatttcatccttacaaggagattgtcttcttttccttatcatggaagacaatatcttataatttgaataccacaaaggttcgacagctgggctgcgcagcttatataccggtgggcataaaaacttgttttccatacacaccctgctacctgacgatggagaaattaactaacagttgatcgtcctccgcccaccacttttgatgatgattagtgcttataattacttacttaactagagagtgcacatctttcttccactttacattatatttgtcagattatctttaattttggcaatacatattttacttccgtttttttaaaaagagatgataataataaagaagcagtggacatattatattaattagcta

SEQ ID NO: 140853 - DNA, 101 bp, Zea Mays
gcctattctgggtgctcgacaataagaggtgtcaccatctctctcaagtgaccaataactttttatcaccatcatttgcgcttcttctccctagcttcacg

SEQ ID NO: 140854 - DNA, 1431 bp, Zea Mays
cccattcatcgagtctacgctcttcgtctttctccggtccgaattccccaatcggactctcctcttcttgccggatctccccaccccattccaccccgcccatgggtgcccccacccctcgccgctgacctgtgggtacactgccccctgctcccccgccccgctcccgctcgcccacgcgaaccctaggcagctaggctttgctgctagaagagctccagcgaccgacgaggagaggagaataaagctcaaatcttggatgcgcccgaaccgatggcgacacctgccgcagagaagccggaagatgtagagatccgtgaggtttgggcggacaacctcgagacagagttcgccgtgatccgcgacatcgtcgacgactatccgtatgtggctatggacactgagtttccgggcgttgtgtgtcgtccgctcggcacttacaagtcggcggccgagttcaactacgccactcttaaagctaacgtggacatgctgaagcttattcagctcgggctcaccttgtccgacgagcatggtgggctgccggcgctaggcccagacggtcgtccctgcgtctggcagttcaactttcgaggatttgaccctcggactgatgtggctgcagcggactccatcgatcttctacgccgtagtggtattgacttctctcgccatgctgctgatggagtcgactctcgctgctttgctgaactgctcatgtcctccggcgtagtattgaattcagatgtgcattgggtgacttttcatagcggctacgactttggctacctgctcaagctactcactggcacaaatctccctgatacgctgccaggattcttcgatctcatcaagatttactttcctgttatctacgatataaaacacttgatgaggttctccaatagcctccatggagggctgaacaagcttgctgagctgcttgatgttgcaagggttggaatctgccaccaggcagggtctgattcgcttctgacagcactgtctttcaagaagcttaaagaggcatacttcaacggattaactgagaaatatgctggtgtgttgtatgggcttggctttgagggtgtagagaccacctctgctcactgagtaatggataattaaataaaagatgaactatttatgaaaatggagaaatctgtttggtgtctttgtctgacaatttcctgttgcttgcgctggtgaaggtattattttccctctcagttttgatttcccctgcaagttacttcagctaagctgttctatgatctagattgtggcttgatggaatgtgctgttgaagtttctttgaggcctgtattgatacactgatcaccaagtcaccaactgaagactcaaacattatcgaactctgtaatgctatggtaatcaagtactctacaacaagtcatcaactgctgtgct

SEQ ID NO: 140855 - DNA, 1665 bp, Zea Mays
cccattcatcgagtctacgctcttcgtctttctccggtccgaattccccaatcggactctcctcttcttgccggatctccccaccccattccaccccgcccatgggtgcccccacccctcgccgctgacctgtgggtacactgccccctgctcccccgccccgctcccgctcgcccacgcgaaccctaggcagctaggctttgctgctagaagagctccagcgaccgacgaggagaggagaataaagctcaaatcttggatgcgcccgaaccgatggcgacacctgccgcagagaagccggaagatgtagagatccgtgaggtttgggcggacaacctcgagacagagttcgccgtgatccgcgacatcgtcgacgactatccgtatgtggctatggacactgagtttccgggcgttgtgtgtcgtccgctcggcacttacaagtcggcggccgagttcaactacgccactcttaaagctaacgtggacatgctgaagcttattcagctcgggctcaccttgtccgacgagcatggtgggctgccggcgctaggcccagacggtcgtccctgcgtctggcagttcaactttcgaggatttgaccctcggactgatgtggctgcagcggactccatcgatcttctacgccgtagtggtattgacttctctcgccatgctgctgatggagtcgactctcgctgctttgctgaactgctcatgtcctccggcgtagtattgaattcagatgtgcattgggtgacttttcatagcggctacgactttggctacctgctcaagctactcactggcacaaatctccctgatacgctgccaggattcttcgatctcatcaagatttactttcctgttatctacgatataaaacacttgatgaggttctccaatagcctccatggagggctgaacaagcttgctgagctgcttgatgttgcaagggttggaatctgccaccaggcagggtctgattcgcttctgacagcactgtctttcaagaagcttaaagaggcatacttcaacggattaactgagaaatatgctggtgtgttgtatgggcttggctttgagggtgtagagaccacctctgctcactgagtaatggataattaaataaaagatgaactatttatgaaaatggagaaatctgtttggtgtctttgtctgacaatttcctgttgcttgcgctggtgaagattgtggcttgatggaatgtgctgttgaagtttctttgaggcctgtattgatacactgatcaccaagtcaccaactgaagactcaaacattatcgaactctgtaatgctatggtaatcaagtactctacaacaagtcatcaactgctgtgctaaatgttatttggtagcaaaaagaacacttaacttgccctttgatatgtgaaactgaaacccctcagttcttgttttacatggtttctggtgctaccccttgaatagttgatgattttaggcactattctgatttctataccaacctataaaagcaagacaatatgctggacttctgattgtaatatgttatagtgtctatgtagttttgtagttccttaaactcaagcaacatatgccattatcagttttgcaaaattttgggagttcaacaggaagaaatctgataaacaagttcatatc

SEQ ID NO: 140856 - DNA, 849 bp, Zea Mays
ccgccacgccttcctccggacgccagtctgcgagcgccgagcgcccgagcgcagccaggtgtcgcccgcccgcccgcctccggcaaatgtgacttgcagacgaaggtcgctgcagtggcccgtgctcgatggtggcaaggtgcgcgcacgccgacgccggcgggttccgcatctggccgatcttctccgccgcctcgctgcggaggaaggtgctagaggttctcgcgtgcggcggcggtggcggtggcggtgacggaggcggttcctgccgtggacggacggcctaccggtcgccacagcggattccgaggccgagaccgcggtcggacaggctcgcggagctgctcagggccgagcagccgtccgagtgcagcgacgaggctgaggccgaggccgaggcggcggccaggaaggtggaggcgttggaggagctgaagggcgtggtgggggcgctccgggacggcgggggcgacggctgcatgtcccgcgtcgaggcggccatggccgtgcggagcaaggccaaggacgacgccggcgctagggagatgctcgcgatgctcggcgccatcccgccgctcgtcgcgatgctggacgagggcggcgacgtgggggaggatgtcacgaccgcagcgctgtacgcgctgctcaacttggggatcggcaatgacacgtgagttgtctgccttctctgtttcgtgatcagatctggggggattcggtttcggaatgtgcagagctgtctgcatgattgttgccaggaacaaggcggcgatcgtgcaggccggtgccgtgcacaagatgctccgcattgcggagggcggcgcgctaacggaggcggccgtggtcgcc

SEQ ID NO: 140857 - DNA, 2293 bp, Zea Mays
ccgccacgccttcctccggacgccagtctgcgagcgccgagcgcccgagcgcagccaggtgtcgcccgcccgcccgcctccggcaaatgtgacttgcagacgaaggtcgctgcagtggcccgtgctcgatggtggcaaggtgcgcgcacgccgacgccggcgggttccgcatctggccgatcttctccgccgcctcgctgcggaggaaggtgctagaggttctcgcgtgcggcggcggtggcggtggcggtgacggaggcggttcctgccgtggacggacggcctaccggtcgccacagcggattccgaggccgagaccgcggtcggacaggctcgcggagctgctcagggccgagcagccgtccgagtgcagcgacgaggctgaggccgaggccgaggcggcggccaggaaggtggaggcgttggaggagctgaagggcgtggtgggggcgctccgggacggcgggggcgacggctgcatgtcccgcgtcgaggcggccatggccgtgcggagcaaggccaaggacgacgccggcgctagggagatgctcgcgatgctcggcgccatcccgccgctcgtcgcgatgctggacgagggcggcgacgtgggggaggatgtcacgaccgcagcgctgtacgcgctgctcaacttggggatcggcaatgacacgaacaaggcggcgatcgtgcaggccggtgccgtgcacaagatgctccgcattgcggagggcggcgcgctaacggaggcggccgtggtcgccaacttcctctgcctcagcgcactcgacgccaacaagcccgtcatcggcgcgtccggcgccgcgcccttcctcgtgcgcgcgttccaggccgcgtcctccactgagcaggcgcgccacgacgcgctgcgcgcgctcctgaacctctccatcgcgcccgccaacgcgctgcacctgctggcggccgggctcgcgccggcgctggtggcggccgtgggggacggccctgtgacggaccgcgcgctcgccgtgctctgcaacctcgtggcggcctgccccgagggccgccgcgccgtgagccgcgcccccgacgcggtgccgtccctcgtcgacgtgctcaactgggccgacgagcccgggtgccaggagaaggcggcctacgtgctgatggtcctggcgcaccggagctacggtgaccgcgccgccatggccgaggccggcgcctcgtccgcgctcctggagctcacgctcgtgggcacggcgctcgcgcagaagcgcgcgtccaggatcctggagatcctccgcgccgacaagggcaagcaggtcgcggaagacgcctcgggcgtcgtggcgacggtgtcggcgccgcaggagcgcgggtgccgcggggaggagtcggtggacggggagttcgccgacgccggcatgagcgcggagaagcgcgccgtgcggcagctggttcagcagagcctgcagagcaacatgcgccgcatcgtccgccgcgcgcggctgccgcaggacttggctccggcaccgactgagagcctcaaggcgctcactgcctcctccacctccaagagcctaccgttctaggagatcatgcagaatccatatgccagaagaagaagaaaaaaacgcacagacagttaaaaaagaagaagaagaagaaaaactctctctgaatctgtcttggcagcagggaagatgaggccaggagagttgatgaggagactttgctgcgttccgttccgttgctgcatgcgtcggagaccgggaatctttcgggcgccctgaagcggaagcggagtgacgagaagatgggggctaatctaaagcagttgtttaaccgcgctgctcgttgccgcttttttttcttctcgtgcctgctgacggaacccacgtgcgcggaccgacctgttcaagtccaggctctgacagacgagagctggcctcgagatgttctcctaatcgctttcgcatttcttaatcgccttcgactcgttatcttccgcttctgtatatgggaatagctataggatagtaagtagtttgtttagccatactacacctagtggtcagtgtgttcggggcttgctctttgggcacatgttctttcttgttgttgctgaatgtggtagtagggtagtggaaagtcttagaagaactagaaagaggatgcgtgtggacgttttatatatatgtaaactatgatgatggtttcatctttgagtacctgatttcagtgcacgggacagcttcagatttacttcaaaacagtcaaattgtataaaaagttattcaaacgctctagctac

SEQ ID NO: 140858 - DNA, 2236 bp, Zea Mays
ccgccacgccttcctccggacgccagtctgcgagcgccgagcgcccgagcgcagccaggtgtcgcccgcccgcccgcctccggcaaatgtgacttgcagacgaaggtcgctgcagtggcccgtgctcgatggtggcaaggtgcgcgcacgccgacgccggcgggttccgcatctggccgatcttctccgccgcctcgctgcggaggaaggtgctagaggttctcgcgtgcggcggcggtggcggtggcggtgacggaggcggttcctgccgtggacggacggcctaccggtcgccacagcggattccgaggccgagaccgcggtcggacaggctcgcggagctgctcagggccgagcagccgtccgagtgcagcgacgaggctgaggccgaggccgaggcggcggccaggaaggtggaggcgttggaggagctgaagggcgtggtgggggcgctccgggacggcgggggcgacggctgcatgtcccgcgtcgaggcggccatggccgtgcggagcaaggccaaggacgacgccggcgctagggagatgctcgcgatgctcggcgccatcccgccgctcgtcgcgatgctggacgagggcggcgacgtgggggaggatgtcacgaccgcagcgctgtacgcgctgctcaacttggggatcggcaatgacacgaacaaggcggcgatcgtgcaggccggtgccgtgcacaagatgctccgcattgcggagggcggcgcgctaacggaggcggccgtggtcgccaacttcctctgcctcagcgcactcgacgccaacaagcccgtcatcggcgcgtccggcgccgcgcccttcctcgtgcgcgcgttccaggccgcgtcctccactgagcaggcgcgccacgacgcgctgcgcgcgctcctgaacctctccatcgcgcccgccaacgcgctgcacctgctggcggccgggctcgcgccggcgctggtggcggccgtgggggacggccctgtgacggaccgcgcgctcgccgtgctctgcaacctcgtggcggcctgccccgagggccgccgcgccgtgagccgcgcccccgacgcggtgccgtccctcgtcgacgtgctcaactgggccgacgagcccgggtgccaggagaaggcggcctacgtgctgatggtcctggcgcaccggagctacggtgaccgcgccgccatggccgaggccggcgcctcgtccgcgctcctggagctcacgctcgtgggcacggcgctcgcgcagaagcgcgcgtccaggatcctggagatcctccgcgccgacaagggcaagcaggtcgcggaagacgcctcgggcgtcgtggcgacggtgtcggcgccgcaggagcgcgggtgccgcggggaggagtcggtggacggggagttcgccgacgccggcatgagcgcggagaagcgcgccgtgcggcagctggttcagcagagcctgcagagcaacatgcgccgcatcgtccgccgcgcgcggctgccgcaggacttggctccggcaccgactgagagcctcaaggcgctcactgcctcctccacctccaagagcctaccgttctaggagatcatgcagaatccatatgccagaagaagaagaaaaaaacgcacagggaagatgaggccaggagagttgatgaggagactttgctgcgttccgttccgttgctgcatgcgtcggagaccgggaatctttcgggcgccctgaagcggaagcggagtgacgagaagatgggggctaatctaaagcagttgtttaaccgcgctgctcgttgccgcttttttttcttctcgtgcctgctgacggaacccacgtgcgcggaccgacctgttcaagtccaggctctgacagacgagagctggcctcgagatgttctcctaatcgctttcgcatttcttaatcgccttcgactcgttatcttccgcttctgtatatgggaatagctataggatagtaagtagtttgtttagccatactacacctagtggtcagtgtgttcggggcttgctctttgggcacatgttctttcttgttgttgctgaatgtggtagtagggtagtggaaagtcttagaagaactagaaagaggatgcgtgtggacgttttatatatatgtaaactatgatgatggtttcatctttgagtacctgatttcagtgcacgggacagcttcagatttacttcaaaacagtcaaattgtataaaaagttattcaaacgctctagctac

SEQ ID NO: 140859 - DNA, 2287 bp, Zea Mays
gccacgccttcctccggacgccagtctgcgagcgccgagcgcccgagcgcagccaggtgtcgcccgcccgcccgcctccggcaaatgtgacttgcagacgaaggtcgctgcagtggcccgtgctcgatggtggcaaggtgcgcgcacgccgacgccggcgggttccgcatctggccgatcttctccgccgcctcgctgcggaggaaggtgctagaggttctcgcgtgcggcggcggtggcggtggcggtgacggaggcggttcctgccgtggacggacggcctaccggtcgccacagcggattccgaggccgagaccgcggtcggacaggctcgcggagctgctcagggccgagcagccgtccgagtgcagcgacgaggctgaggccgaggccgaggcggcggccaggaaggtggaggcgttggaggagctgaagggcgtggtgggggcgctccgggacggcgggggcgacggctgcatgtcccgcgtcgaggcggccatggccgtgcggagcaaggccaaggacgacgccggcgctagggagatgctcgcgatgctcggcgccatcccgccgctcgtcgcgatgctggacgagggcggcgacgtgggggaggatgtcacgaccgcagcgctgtacgcgctgctcaacttggggatcggcaatgacacgaacaaggcggcgatcgtgcaggccggtgccgtgcacaagatgctccgcattgcggagggcggcgcgctaacggaggcggccgtggtcgccaacttcctctgcctcagcgcactcgacgccaacaagcccgtcatcggcgcgtccggcgccgcgcccttcctcgtgcgcgcgttccaggccgcgtcctccactgagcaggcgcgccacgacgcgctgcgcgcgctcctgaacctctccatcgcgcccgccaacgcgctgcacctgctggcggccgggctcgcgccggcgctggtggcggccgtgggggacggccctgtgacggaccgcgcgctcgccgtgctctgcaacctcgtggcggcctgccccgagggccgccgcgccgtgagccgcgcccccgacgcggtgccgtccctcgtcgacgtgctcaactgggccgacgagcccgggtgccaggagaaggcggcctacgtgctgatggtcctggcgcaccggagctacggtgaccgcgccgccatggccgaggccggcgcctcgtccgcgctcctggagctcacgctcgtgggcacggcgctcgcgcagaagcgcgcgtccaggatcctggagatcctccgcgccgacaagggcaagcaggtcgcggaagacgcctcgggcgtcgtggcgacggtgtcggcgccgcaggagcgcgggtgccgcggggaggagtcggtggacggggagttcgccgacgccggcatgagcgcggagaagcgcgccgtgcggcagctggttcagcagagcctgcagagcaacatgcgccgcatcgtccgccgcgcgcggctgccgcaggacttggctccggcaccgactgagagcctcaaggcgctcactgcctcctccacctccaagagcctaccgttctaggagatcatgcagaatccatatgccagaagaagaagaaaaaaacgcacagttaaaaaagaagaagaagaagaaaaactctctctgaatctgtcttggcagcagggaagatgaggccaggagagttgatgaggagactttgctgcgttccgttccgttgctgcatgcgtcggagaccgggaatctttcgggcgccctgaagcggaagcggagtgacgagaagatgggggctaatctaaagcagttgtttaaccgcgctgctcgttgccgcttttttttcttctcgtgcctgctgacggaacccacgtgcgcggaccgacctgttcaagtccaggctctgacagacgagagctggcctcgagatgttctcctaatcgctttcgcatttcttaatcgccttcgactcgttatcttccgcttctgtatatgggaatagctataggatagtaagtagtttgtttagccatactacacctagtggtcagtgtgttcggggcttgctctttgggcacatgttctttcttgttgttgctgaatgtggtagtagggtagtggaaagtcttagaagaactagaaagaggatgcgtgtggacgttttatatatatgtaaactatgatgatggtttcatctttgagtacctgatttcagtgcacgggacagcttcagatttacttcaaaacagtcaaattgtataaaaagttattcaaacgctctagctac

SEQ ID NO: 140860 - DNA, 1734 bp, Zea Mays
atggcagccgccgcgcccgcgcaagggaagttgcttcccaaatctcgcagacaagatttcctctcgtggatcccccaggcgctccttccatcctcgcggatccgagcgcgcatcccgcagccgccccacgtgctcacccctcctcccacattcctccactctcgtcgttgccattgccaggaggcgctcaccatcgcttgtcgtcgtgagggcgaccggaggattccggtcaacgcgtcgtccgtcgactttgtcttcgcggggcgtgcccttgacgccgccaagctcttggctgacctggcgccgaggccgcgcggatcctcaagcccgatgattgatccagcacaatgccgaggagactggagactagacttggaggtgctactgaaggatgtgacttttattcaaagggtaaaagtgataatgagatttgtgtgttgtattttcattcctcgggacataaatgttatttgtaggtggtttgtgccagttaatatagcgatcacgttcattatcggtggcaccctgggctggatagcttgcagcatattgaagccaccgcagcacttcaggggcttgatcatggccttctgctcagccagaagtccggtaagatgtacaacaagatgcagtctaaaagcatctagttcccagccgacagcgacgaggagcatgagcaagcgaaagaagatgggccaactgggctgcgctgacgaggaggcacctcttccgacatcagtcaagcctcgcgagcacgagcacggggaagaggaagaacaccaaatgtcgactgcatcgtcggcggccatgcatggtcacggtggaatattgggagaaactgactcgtcagaactacaggaggtccctctcttgtcctgcgagagcgaggtcgctgacaaggggttctggacgaagctgaaagacgctatccaccagttcatcgaggaggtgatggcaccgcccaccatatccgcgataattgggttcgttgttggcctggtcccatggctgaaatccctaatcgttggcgacgaagctcctttcaaagttatacaggattccctccagttgatgggcgacgacacaatcccttgcatcacccttatcctaggcggaaacctgactcaaggtgggcgctatttcgatcagaatcagacacagtggcgatccaagcacgtccaccccctggacgggacgaccgcgcgttctgaaactgatctgaactctgaagtcgctatggatgtgtgcgtgcatggcttcagaaagtcggggctaaagcgtgcggtgatcgtcgtgatcctgtgtgtccgcttcgtgctcctcccgctgatcggcatcgctgttgtccgcgtcgcgtacggcctcggcttcctgtcccgtgacctgctgtaccgctacgtgctgatggtgcagttcgccatgcctcccgcgatgaatatcagtaccctgattcctgagagactcgtgtggttcaggaacgatggctcagctgttcgacgttggacaagaggaatgctccgtgatttttcgctggacgtacctcgttgccgcggttgcgctgacggcgtggtcgacggtcttcatgtccgttctgtcttgattgaagttggtcaccggaaccaatgcacagtagcattttctgagcctattgttgctcaaggcattcagcttagcaacaggaaaggaggggatggtgatgggtctcatgtctcaatgagcaggagcaaaagctaa

SEQ ID NO: 140861 - DNA, 375 bp, Zea Mays
atggcccgtgggcatccacggcaagccaccgctgtccgctgcatctgggtcagttcatcggtgtgcgacggggcggcatcagctaacggtgaggcggcgtcggcaagcggtggctccaacaacacggcgcggcaagaagagcgccagcaactccacgtctactcccacttctccgtgagctccaaccgtcagttgcgccaccgtcgtctgcggcaccccagcggagattcccctcgcacctgcaggctgcagcaaccaccaccatcaattgatggtttctggcccagacacagcggcagcagtggagcaggtcactcaccgcaaggaaatcaagctaccaatatgtggtactctacttccttcttgttgaattaa

SEQ ID NO: 140862 - DNA, 2180 bp, Zea Mays
ccggcccacgcgcagctgccgtcgccgcgaccacatctcccaaatcccaatccatggcggatggctaatgggtaatggcgctacccaagatacccatgcgccaccataaagcccggcgcctgtgtcgtgtgagggagcgtctgagctcgccagaaaagaccctgacagtccgacacccgcaagccacaaagtgcagcctcgttgctacaggaatgctgagaaatgtctgaccttgccggaaagcgcaacctgcgcagtggccgcaactgccaccgcaagcacgtcgaggacgggtaggttcatcggtctcgtcgccgggttttcaggtaaagtcaggtcaggccaactctgtcgaagaaggaacatcgaagaaaggaaggaggtgggcggcaatggaggatgcgatggcggcggacgggaagagcgtgctgcaggggcggtacgagctggggcgggtgctggggcacggcaacttcgggcgggtgcacgcggcgcgggacctgcgcacgggccgcagcgtcgcggtcaaggtggtggccaaggacaagctggagcgcgcgggcatggcggagcagatcaagcgggagatcgccgtcatgaagatggtgtcccaccccaacatcgtggagctgcacgaggtgatggccacccgctccaagatctacctcgcgctcgagctcgtccgcggcggggagctcttctcccgcatcgcgcgcgcggggcgggtccgggaggacgtggcgcgctgttacttccggcagctcgtcgccgcggtcgacttctgccacggccgcggggtgttccaccgagacctgaagctcgagaacctgctcctcgacgaggtaggcaacctcaaagtggcggactttgggctcagcgcgctcgccgggcacgcgcgctccgacgggctgctccataccgcctgtggcacgccgtcatacgtcgcccccgaggtgctcggcgggaagggctacgacggcgccaaggcggacctctggtcctgtggcgtcatcctctacgtgctcctcgttggcagcttgccattccacgaggacaacctcatggtcatgtaccggaagatgcagcgcggcgagttcctctgcccgccgtgggtctcagcggacgcccggaagctcatcggcgagctgctcgaccccgacccgagcacgcgcatcaccgtcgctcgcctcgtcgagacgccgtggtaccggaagccgttgcccgtcctgccgccgctcaacctcaaggagccaaccccggacgcgcgccgcgccacctctgacaaggaagagcccgaggtgctgaacgcgttccacctcatctctttctcggagggcttcgacctgtccccgctcttcgaccagggccgtggcggcggcgtagggaggtctagcgcgggcggcatccgtttcgtgacgcgcgaggccgccagcagcgtggtctcccgtctggagtcgctggtcaccggccgcggagccaacatgcgcgtgacaaagagcggctcgcggggcgttcgtttggaggccgtgtcgcgcgggcgctcgggggcgcggctggcagtggccgcggagatcttcagcgtggcgccgtcggtgctcctggtggacgtgaagaaggacggcggcgacacgatggagtaccggtcgttctgtagcgaggagctccggccggcgctcaaggacatcgtctgggcctccagccaggacacaccgggcgccgcttgatgtcgtcgctgtcgctcctgccaccattattgtccttgcccatcaattgctgttggtgtccgtgtagggggggtcgtgctcgtgcattattgtttggtgacgaagtgatgtttgtttgtcgtttgccactctcgtagttggtttctgctgtggtgcagcggctgctggcagttgcagttgggctgttgcccgcggggcgcgagcaaagcagaatcagcgggaactagcattcgtatcctgcatgcacgcccataccgtgtcagctctgaagtgggaagaactgtaacaagtagtagtacgaatgtaccagggtgatgtgctttcgagtcacttgtgtatatattcatttttttatcagcttaccgtgtcagctttgattgagggtgatgagttgtggagtaatgtccacaattacatcttcatatgtatatagaaaaaaaatgcttataaaaataa

SEQ ID NO: 140863 - DNA, 1655 bp, Zea Mays
tggcgctacccaagatacccatgcgccaccataaagcccggcgcctgtgtcgtgtgagggagcgtctgagctcgccagaaaagaccctgacagtccgacacccgcaagccacaaagtgcagcctcgttgctacaggaatgctgagaaatgtctgaccttgccggaaagcgcaacctgcgcagtggccgcaactgccaccgcaagcacgtcgaggacgggtaggttcatcggtctcgtcgccgggttttcaggtaaagtcaggtcaggccaactctgtcgaagaaggaacatcgaagaaaggaaggaggtgggcggcaatggaggatgcgatggcggcggactttgggctcagcgcgctcgccgggcacgcgcgctccgacgggctgctccataccgcctgtggcacgccgtcatacgtcgcccccgaggtgctcggcgggaagggctacgacggcgccaaggcggacctctggtcctgtggcgtcatcctctacgtgctcctcgttggcagcttgccattccacgaggacaacctcatggtcatgtaccggaagatgcagcgcggcgagttcctctgcccgccgtgggtctcagcggacgcccggaagctcatcggcgagctgctcgaccccgacccgagcacgcgcatcaccgtcgctcgcctcgtcgagacgccgtggtaccggaagccgttgcccgtcctgccgccgctcaacctcaaggagccaaccccggacgcgcgccgcgccacctctgacaaggaagagcccgaggtgctgaacgcgttccacctcatctctttctcggagggcttcgacctgtccccgctcttcgaccagggccgtggcggcggcgtagggaggtctagcgcgggcggcatccgtttcgtgacgcgcgaggccgccagcagcgtggtctcccgtctggagtcgctggtcaccggccgcggagccaacatgcgcgtgacaaagagcggctcgcggggcgttcgtttggaggccgtgtcgcgcgggcgctcgggggcgcggctggcagtggccgcggagatcttcagcgtggcgccgtcggtgctcctggtggacgtgaagaaggacggcggcgacacgatggagtaccggtcgttctgtagcgaggagctccggccggcgctcaaggacatcgtctgggcctccagccaggacacaccgggcgccgcttgatgtcgtcgctgtcgctcctgccaccattattgtccttgcccatcaattgctgttggtgtccgtgtagggggggtcgtgctcgtgcattattgtttggtgacgaagtgatgtttgtttgtcgtttgccactctcgtagttggtttctgctgtggtgcagcggctgctggcagttgcagttgggctgttgcccgcggggcgcgagcaaagcagaatcagcgggaactagcattcgtatcctgcatgcacgcccataccgtgtcagctctgaagtgggaagaactgtaacaagtagtagtacgaatgtaccagggtgatgtgctttcgagtcacttgtgtatatattcatttttttatcagcttaccgtgtcagctttgattgagggtgatgagttgtggagtaatgtccacaattacatcttcatatgtatatagaaaaaaaatgcttataaaaataa

SEQ ID NO: 140864 - DNA, 2654 bp, Zea Mays
tatatatatagggcccttttgtcataaattttctcacaaccatagccggaaaaggcaccaatctagctagtacgcctagcaataatcagcaccttaggccgagtattttctttagatgaaataaaaaaatggacagaatcccatcctcgattcctcatgaaccatactatctcccaagtccaaccctagcaacggcgccactggcaagaacaaggtaactaggggaccatctcctctatataagcactcttccacggggtagacggtaccaccagaacgggtgtagaagcccagccagtaggataagccctcccagatctggccgggcggccggctgctgccttcttccccaattcgggaaagacgactatgaagatcagtttgtgtagcgtggtttggttcttctctctagctgtatctccttgctcccccgcgcgcgctctctctctctccgtgtccagttcttgttgcgtctgcttggtactgtactttgcagcggtggtcgacgttgggatgatgggggcgctggctggagccagcagctcgacggtgtggctgacagaagagagtgagcacgcatcggccagactgcatctatatacggctgctcctggcgaatggatagatgccaaggcgcagctgctgttgcgtgctcacttctctttctgtcagctccctctcctcctagggacttgttccgccgtatgcatccaccaccgtcccagtagtcccacttccgtccatcgcagcgcgccaatgatgcgtcgtcgtcgtcgtccaggcgcagccgttccccttatcacatcggtcgccgttctctgaggcgcctgccggccttgtcgtgtccctacctgaaaccttatcttgtctcccgctcggatttcgatgacctctgctctttggaataaggtactcttaaaatctcagggaagcttagccgcccagcgcatgtacgccatggacccttgcgctgcgggctgcggctggcaacgtttcttttcttttatcggtgaggtcctcgttgccgtctttgtggcttccgatgatggaattttagccagctccgttccgtccttcaggcttcaaccttgggggaagggacgcgtgaaggtttggttaacttaacacctgtgtctttgctctcctccctaggagtccgcttaacggaaagcactgtttgactgctctctctctctcccccctccctctcttatctactcttcctttccgtaaagatttcacacaaaaactattggatcttttccccttttgttgtgctcatctcatgtggttctgtgactgctgagagataggtgggcgaggcagccatggagttgatggtcggaggcagatctgcttggatgcaagtggagagggggctggcgcgccgcacgcggcacctacctccagcagcggcgccagcgccggcggcttcttgtagatctggaagcgccaatattttcttctctagccgtttagcaatcatcatatataggaatgtggacgtgctccatgtacctcttcccctactaatcaagcaaggtaacttttatgttacatttttggttggattgtacattatgcatttttggtagtcatatattatgcattttaatttggttgttggctggcttttggacattggttatttttatataattggaccaagactaatgttatctaagaagttgttctttgttgatttgagatgctcaaatattctatttggtgcaatcaaatcatggaagtccaatttagtttagcttatactacttgattagttaagtcatctatatggtttggacacatattgacatcatggttcaaatagaattgcaatgtagatacactttgagccctatatatctatctacctcggtgatggataaagtcattgcaaaggacctacaacaagtagatatccctcggtgtatatatgttcttttgttgactacgtagtgctagtaaatggaaattggtggaagactaggttttcgctggcaaactagagacaaagattttagatttcatcataattccaacactacttaacctaaggagtgacatgctagtttggaagatcaattaatgtagaaggaaaccttctgatatttgggattgatggtgcaaagagatagtggcattagcagaaatgttaaccgtagaatgaaagttagtgtggatgaaatgacaccaagaatctagcattctcttagatgtatgacaagaaggtgccacataggctaaaaaggcagggcccatagaacaacggtaaaaatacattgttatttagtctagaatgttgacataaaagtagacattcgatgtttaaatgttgtagaaatgcattagttgtattgttattatgattgaatgctccaagaaggggtgggtcaggttgaatagggctctaaaagaagttaaagcttatcaacaataacctatgcaattctacttcaagcattgcatgaattttcatagaaataataaatagagatggaacaagaagggtccttagcttcatgtcaagctgaaccatatatatgaagattgatcacaactaagtgcgtaaatgcaaaaccaaatctacttgtcaatcaacatcttaaaggcacaaacaaattgcaaaaagtaaattcaagaaaataaaaaga

SEQ ID NO: 140865 - DNA, 1854 bp, Zea Mays
tatatatatagggcccttttgtcataaattttctcacaaccatagccggaaaaggcaccaatctagctagtacgcctagcaataatcagcaccttaggccgagtattttctttagatgaaataaaaaaatggacagaatcccatcctcgattcctcatgaaccatactatctcccaagtccaaccctagcaacggcgccactggcaagaacaaggtaactaggggaccatctcctctatataagcactcttccacggggtagacggtaccaccagaacgggtgtagaagcccagccagtaggataagccctcccagatctggccgggcggccggctgctgccttcttccccaattcgggaaagacgactatgaagatcagtttgtgtagcgtggtttggttcttctctctagctgtatctccttgctcccccgcgcgcgctctctctctctccgtgtccagttcttgttgcgtctgcttggtactgtactttgcagcggtggtcgacgttgggatgatgggggcgctggctggagccagcagctcgacggtgtggctgacagaagagagtgagcacgcatcggccagactgcatctatatacggctgctcctggcgaatggatagatgccaaggcgcagctgctgttgcgtgctcacttctctttctgtcagctccctctcctcctagggacttgttccgccgtatgcatccaccaccgtcccagtagtcccacttccgtccatcgcagcgcgccaatgatgcgtcgtcgtcgtcgtccaggcgcagccgttccccttatcacatcggtcgccgttctctgaggcgcctgccggccttgtcgtgtccctacctgaaaccttatcttgtctcccgctcggatttcgatgacctctgctctttggaataaggtactcttaaaatctcagggaagcttagccgcccagcgcatgtacgccatggacccttgcgctgcgggctgcggctggcaacgtttcttttcttttatcggtgaggtcctcgttgccgtctttgtggcttccgatgatggaattttagccagctccgttccgtccttcaggcttcaaccttgggggaagggacgcgtgaaggtttggttaacttaacacctgtgtctttgctctcctccctaggagtccgcttaacggaaagcactgtttgactgctctctctctctcccccctccctctcttatctactcttcctttccgtaaagatttcacacaaaaactattggatcttttccccttttgttgtgctcatctcatgtggttctgtgactgctgagagataggtgggcgaggcagccatggagttgatggtcggaggcagatctgcttggatgcaagtggagagggggctggcgcgccgcacgcggcacctacctccagcagcggcgccagcgccggcggcttcttgtagatctggaagcgccaatattttcttctctagccgtttagcaatcatcatatataggaatgtggacgtgctccatgtacctcttcccctactaatcaagcaagtgttgaagaggtgaggaggtggacccctcaatccatgggagattccatagatgacgctcgaatcataccaactgaatctagcgtccatcaatgatcacaagtgtcatttcttgcatgttgtaaaaaatgaggtgatttgaagttggtgggactttggaccaccaagcggtggggttagttgaccccacactgaccccaattacacatatcttacatagtgatgagtctactacttagggatgtggctatgggttgctttggtgtatatgttcaatggtggttatgtgctgggtccttcaatccttatcatgt

SEQ ID NO: 140866 - DNA, 2045 bp, Zea Mays
tatatatatagggcccttttgtcataaattttctcacaaccatagccggaaaaggcaccaatctagctagtacgcctagcaataatcagcaccttaggccgagtattttctttagatgaaataaaaaaatggacagaatcccatcctcgattcctcatgaaccatactatctcccaagtccaaccctagcaacggcgccactggcaagaacaaggtaactaggggaccatctcctctatataagcactcttccacggggtagacggtaccaccagaacgggtgtagaagcccagccagtaggataagccctcccagatctggccgggcggccggctgctgccttcttccccaattcgggaaagacgactatgaagatcagtttgtgtagcgtggtttggttcttctctctagctgtatctccttgctcccccgcgcgcgctctctctctctccgtgtccagttcttgttgcgtctgcttggtactgtactttgcagcggtggtcgacgttgggatgatgggggcgctggctggagccagcagctcgacggtgtggctgacagaagagagtgagcacgcatcggccagactgcatctatatacggctgctcctggcgaatggatagatgccaaggcgcagctgctgttgcgtgctcacttctctttctgtcagctccctctcctcctagggacttgttccgccgtatgcatccaccaccgtcccagtagtcccacttccgtccatcgcagcgcgccaatgatgcgtcgtcgtcgtcgtccaggcgcagccgttccccttatcacatcggtcgccgttctctgaggcgcctgccggccttgtcgtgtccctacctgaaaccttatcttgtctcccgctcggatttcgatgacctctgctctttggaataaggtactcttaaaatctcagggaagcttagccgcccagcgcatgtacgccatggacccttgcgctgcgggctgcggctggcaacgtttcttttcttttatcggtgaggtcctcgttgccgtctttgtggcttccgatgatggaattttagccagctccgttccgtccttcaggcttcaaccttgggggaagggacgcgtgaaggtttggttaacttaacacctgtgtctttgctctcctccctaggagtccgcttaacggaaagcactgtttgactgctctctctctctcccccctccctctcttatctactcttcctttccgtaaagatttcacacaaaaactattggatcttttccccttttgttgtgctcatctcatgtggttctgtgactgctgagagataggtgggcgaggcagccatggagttgatggtcggaggcagatctgcttggatgcaagtggagagggggctggcgcgccgcacgcggcacctacctccagcagcggcgccagcgccggcggcttcttgtagatctggaagcgccaatattttcttctctagccgtttagcaatcatcatatataggaatgtggacgtgctccatgtacctcttcccctactaatcaagcaaggtagcaagaatatgtactgcttgggaccatgagatgctagagcctgacatgctagagccctcatcctccatgtttgatgtggttatcatctgattcaagtaaccttgtcacttgggcaggtgtcatctaaagaaagaaaaagagaggttcttggaagccaaatccagagttgatgctgacttcagaagaaaggggtaccttgtattagtggattcatacacgaaggtcactaaaatggaatggtttttccacatagatagagcacaaaataattgatctcgatctagatgaagttaattttgtgtacaagttatttttcatgcatggattaatgatcaacacgcgtacttattttcctaaaggtcaacaaggctaatattaacatgcttcgcagggtcgagccatatgttgcatatgagtaagttctcttagctaatttagttcatgtcttgctgcttaatggatgttccactgaaaatacagttgaaaacagattatgctgt

SEQ ID NO: 140867 - DNA, 2040 bp, Zea Mays
tatatatatagggcccttttgtcataaattttctcacaaccatagccggaaaaggcaccaatctagctagtacgcctagcaataatcagcaccttaggccgagtattttctttagatgaaataaaaaaatggacagaatcccatcctcgattcctcatgaaccatactatctcccaagtccaaccctagcaacggcgccactggcaagaacaaggtaactaggggaccatctcctctatataagcactcttccacggggtagacggtaccaccagaacgggtgtagaagcccagccagtaggataagccctcccagatctggccgggcggccggctgctgccttcttccccaattcgggaaagacgactatgaagatcagtttgtgtagcgtggtttggttcttctctctagctgtatctccttgctcccccgcgcgcgctctctctctctccgtgtccagttcttgttgcgtctgcttggtactgtactttgcagcggtggtcgacgttgggatgatgggggcgctggctggagccagcagctcgacggtgtggctgacagaagagagtgagcacgcatcggccagactgcatctatatacggctgctcctggcgaatggatagatgccaaggcgcagctgctgttgcgtgctcacttctctttctgtcagctccctctcctcctagggacttgttccgccgtatgcatccaccaccgtcccagtagtcccacttccgtccatcgcagcgcgccaatgatgcgtcgtcgtcgtcgtccaggcgcagccgttccccttatcacatcggtcgccgttctctgaggcgcctgccggccttgtcgtgtccctacctgaaaccttatcttgtctcccgctcggatttcgatgacctctgctctttggaataaggtactcttaaaatctcagggaagcttagccgcccagcgcatgtacgccatggacccttgcgctgcgggctgcggctggcaacgtttcttttcttttatcggtgaggtcctcgttgccgtctttgtggcttccgatgatggaattttagccagctccgttccgtccttcaggcttcaaccttgggggaagggacgcgtgaaggtttggttaacttaacacctgtgtctttgctctcctccctaggagtccgcttaacggaaagcactgtttgactgctctctctctctcccccctccctctcttatctactcttcctttccgtaaagatttcacacaaaaactattggatcttttccccttttgttgtgctcatctcatgtggttctgtgactgctgagagataggtgggcgaggcagccatggagttgatggtcggaggcagatctgcttggatgcaagtggagagggggctggcgcgccgcacgcggcacctacctccagcagcggcgccagcgccggcggcttcttgtagatctggaagcgccaatattttcttctctagccgcaatcatcatatataggaatgtggacgtgctccatgtacctcttcccctactaatcaagcaaggtagcaagaatatgtactgcttgggaccatgagatgctagagcctgacatgctagagccctcatcctccatgtttgatgtggttatcatctgattcaagtaaccttgtcacttgggcaggtgtcatctaaagaaagaaaaagagaggttcttggaagccaaatccagagttgatgctgacttcagaagaaaggggtaccttgtattagtggattcatacacgaaggtcactaaaatggaatggtttttccacatagatagagcacaaaataattgatctcgatctagatgaagttaattttgtgtacaagttatttttcatgcatggattaatgatcaacacgcgtacttattttcctaaaggtcaacaaggctaatattaacatgcttcgcagggtcgagccatatgttgcatatgagtaagttctcttagctaatttagttcatgtcttgctgcttaatggatgttccactgaaaatacagttgaaaacagattatgctgt

SEQ ID NO: 140868 - DNA, 742 bp, Zea Mays
caaattctcttgataatatctaacagatgaggttttttattgcaatatataacagttttcaatcaaaatcaaccagtgttcacataatccatgaaattattctatagcgagttaagtagtgactgattctttaggtgaacaaaaaagagaaggtgctgggtgcaacttctgaccctgaagtattcagaatgatctcaattataaaaacacatgtttaatctgcattcagatcactgcatctaggtagtttgatttttcagtgaaaaatcctatacggcttttgaatacaaaaatgtttacatctactcattccaaccttttgaaggcctaacattaaagttgagttcctcaatgcgcatatttgtatccttacttgctaatgttatagcgccactacatgataactatttgattatttgcagtttagcaatcatcatatataggaatgtggacgtgctccatgtacctcttcccctactaatcaagcaaggtagcaagaatatgtactgcttgggaccatgagatgctagagcctgacatgctagagccctcatcctccatgtttgatgtggttatcatctgattcaagtaaccttgtcacttgggcaggtaaaatatgattgatttgagtagatagaaagtttcaagtgtaagtaggatcggttcactttcaattcttgtatctagtattatgtaaactgactattgagatttgctgaaatttgaattctaatagtcgttt

SEQ ID NO: 140869 - DNA, 974 bp, Zea Mays
caacgaagtttggttgtcatcatcttttaactaccacaatcattcatgggacaagtcacaaacataagtaagttgtatagtctaagcaccatgatacactagagattactactacaatctaggccctagcagactaatacaagttatgaaccagtaaataaaagatgataatatttactcaactctttccaaatgccataaaagaatcctaaatggtcactcaaatagagataatgtccatgaacgatcactcaaatagagataatgataggtataagtggagagactgccaacagacctggcatgtcctttgctttccttcagtccttattctctaagcatttctacacaagtagggctttgcctaaatactgaagtgtggacttcctaatgatatgattacaactgagagatgtctctctatctatagtgttgaagaggtgaggaggtggacccctcaatccatgggagattccatagatgacgctcgaatcataccaactgaatctagcgtccatcaatgatcacaagtgtcatttcttgcatgttgtaaaaaatgaggtgatttgaagttggtgggactttggaccaccaagcggtggggttagttgaccccacactgaccccaattacacatatcttacatagtgatgagtctactacttagggatgtggctatgggttgctttggtgtatatgttcaatggtggttatgtgctgggtccttcaatccttatcatgtacatcctaagtcaatgatctccaacaatgtaaaacaaactatgtatgatgatgagaagtatgaatcctcaatgtgggccaaagttggagaggattgaccacaacccaaagtcaagtgaccccctcttaagctcaatttagcccatttttaggtgggtccctaaacaacaatattctgcaaaatatacatgtataccttattttatgaaatatacgcttgcatctttctcaaa

SEQ ID NO: 140870 - DNA, 121 bp, Zea Mays
gttagtccaattatttgtgttgggcaattcaaccaccaaaatcatttagaagaaggttggaccctatttccctttcatgatgttatacaccctcctcccaaaatgttgggagaagaagcac

SEQ ID NO: 140871 - DNA, 1643 bp, Zea Mays
caggcgatcatctttttactgctctacgatcccctacgggctatggccctatttctaccgccacgcccgttcttctccccgcgtgttcgagtccatcttcttgtgccatccaacccctcgtccgtagatcgatcgctgctacgcgcctgcatgctgacggttcggcgccgctgatgcgatgaagctctcgtagcccgacgttagcgagaagacgggatcgcacaagtactgaggtctcggccaggtgtcgatttggttcaaccgagggagcacctgtgcattgctataacaacaatgctggatcgggttgccatgtcagctgaggattctgccctggctgaagatttgcaggttgaagaggttctccggttctcaattcagtcggggaaggcctgtgcagtttgcaaagaaggcatccgatcattggatgcctcgtggaaacctgaaaattgtgaccatgtcatctgcattgcctgcttctgccagtatgcacctgagactgaggccactggactgcccaggtgcgcggtggcatcttgtgattctttgtgcaatacagagacacatcagggcaccaatgtgcctcggtgcacttcgatctcgattgaagacatggaccggaaagggaagaaaccactaggtagtagtacaattcaagagcttggtcaatgctctcgaggtgcgagcacaaatatcagcagtgagttatactgtgccatctgcatggagacagtgcacatcggagagtcctttcccgtggatggatgtacgcacacattctgcatcagttgtgtgagccagtgcattgctgcgaaggttgaggagaatgtgctgtctatcggctgccctgccccggggtgcaaggatggtgtgttgcacccagatgcatgccgcgacgtgatcccggcgcagctgttccagagatggggtgctgcgctctgtgactcgtcattggggtcactcaaattctactgccccttcaaggaatgctctgctctgttggttgatgatcctgggcacggtgaggaggtgataacaaacgtggagtgcccacactgctgccggatgttctgtgcccagtgcaaggttccatggcacgccggtgtcacttgcgcggagttccaacgactggggaaggatgagcggggcagggaggacctactgctgaggaaggtcgcgcaagagagcaagtggcagaggtgccccaagtgcaagatatatgtggagaggatcgagggctgtgtattcatcatctgcaggtactcctcacaaataaaacattcattacactgatcgctgagtacaaaatgatgatcatcttcttctttatttacaggtgcgggcactgcttctgctacctttgtgcatccccaatgtctagggacaaccattgttgcaaaacctgcaaccgaacctggtgaatgacttgaaaccgccaagctctacctgaaggaaagaaactctcaataactagtatttatgtatttatgtgtgaactgctaagttctacccgtagaaaagaaatccttaactagtagtatgtgtttagatgataagttgctgttatgactgtttcagttggcactggcttgttgcactagtagcaaattggtattccacgttgatgttctacttcttgttct

SEQ ID NO: 140872 - DNA, 1651 bp, Zea Mays
caggcgatcatctttttactgctctacgatcccctacgggctatggccctatttctaccgccacgcccgttcttctccccgcgtgttcgagtccatcttcttgtgccatccaacccctcgtccgtagatcgatcgctgctacgcgcctgcatgctgacggttcggcgccgctgatgcgatgaagctctcgtagcccgacgttagcgagaagacgggatcgcacaagtactgaggtctcggccaggtgtcgatttggttcaaccgagggagcacctgtgcattgctataacaacaatgctggatcgggttgccatgtcagctgaggattctgccctggctgaagatttgcaggttgaagaggttctccggttctcaattcagtcggggaaggcctgtgcagtttgcaaagaaggcatccgatcattggatgcctcgtggaaacctgaaaattgtgaccatgtcatctgcattgcctgcttctgccagtatgcacctgagactgaggccactggactgcccaggtgcgcggtggcatcttgtgattctttgtgcaatacagagacacatcagggcaccaatgtgcctcggtgcacttcgatctcgattgaagacatggaccggaaagggaagaaaccactaggtagtagtacaattcaagagcttggtcaatgctctcgaggtgcgagcacaaatatcagcagtgagttatactgtgccatctgcatggagacagtgcacatcggagagtcctttcccgtggatggatgtacgcacacattctgcatcagttgtgtgagccagtgcattgctgcgaaggttgaggagaatgtgctgtctatcggctgccctgccccggggtgcaaggatggtgtgttgcacccagatgcatgccgcgacgtgatcccggcgcagctgttccagagatggggtgctgcgctctgtgactcgtcattggggtcactcaaattctactgccccttcaaggaatgctctgctctgttggttgatgatcctgggcacggtgaggaggtgataacaaacgtggagtgcccacactgctgccggatgttctgtgcccagtgcaaggttccatggcacgccggtgtcacttgcgcggagttccaacgactggggaaggatgagcggggcagggaggacctactgctgaggaaggtcgcgcaagagagcaagtggcagaggtgccccaagtgcaagatatatgtggagaggatcgagggctgtgtattcatcatctgcaggtgcgggcactgcttctgctacctttgtgcatccccaatgtctagggacaaccattgttgcaaaacctgcaaccgaacctggtgaatgacttgaaaccgccaagctctacctgaaggaaagaaactctcaataactagtatttatgtatttatgtgtgaactgctaagttctacccgtagaaaagaaatccttaactagtagtatgtgtttagatgataagttgctgttatgactgtttcagttggcactggcttgttgcactagtagcaaattggtattccacgttgatgttctacttcttgttctcgtgatctctctcatcgccatgtctaactggtccacgttgatgttagcctgttctagcttttgtaactcactattttgtttgtgc

SEQ ID NO: 140873 - DNA, 1370 bp, Zea Mays
aagcgcagcaggctgctgggccaaatgtcaaacaacatgctgctgggccaaatggcaaacacaccctaaaagaccgcgggtggctgatcaacggtttccagtagcagcagcacaactgcacgacccctcgccggccatggaggcctccgccaccggcgccgcggatccgcacttcccgatttacatctcctcggacgaggaagacgggcacgcctatttcatcgagtcctatagccccgaggaggtccagattcagcagaccattcttctctccctgtatacctctcgcgcccagacggccgccgcctgctccgcttcctcctcttaccctactggtgcctcctccacccctaaggccggtacctcctccacccctaaggaaactcctatcgatcacaaaagaaagcgcaagcttaaactagaagacgacacgaacgactccaaaatgaagcggtccacgcgcaaccgcttcaactgcgccatctgcttcgagatggttctggctgcggagaagtttgttgtgagtcactgccctcacgcgttctgcaacagttgcatcggaaggtatgtcgccggcaaggtagccgacaacgtagccgtgatcgggtgccctgaccccgcgtgtgagacggggtttattgagatggatctgtgtcgggatatcatcccgcctgaactatttgaccggtggagtgtcgtgctgtgcgaggagctactgggtgatgataagttctactgtccgttcaaggattgctcggcactgttactaaatgatgattcggcgaagatcagggaaacagagtgtccccactgtcacaggctgttctgtgctcgctgccatgtgccatggcacgatgggatcgagtgcaaggaatttaggaagcttggggatgacgagaagggggagaatgatttgatgcttaagaaacttgctgacaaggagaaatggcagaggtgccccaagtgcaggatgtatgtttcgcgaaaatctgggtgcttgttaataaattgcaggtgcaaacagtacttctgttaccattgtgctgcaccaatggatagggaaactcactattgtgagaattgcaagcactagagaagtagattaaggtctttttagataatgagtaggtaaagctcttagttaacaatgcaggctccgtgcgcagtcgtaggtgatacctaagtagaattttatccccttttagtggaagtaagttccacctttctgccatcgtgatattgttgagctatagagttgatgtgctgaagttatccttaaagcatcctgcattcctgcatcatgaactccctccgtcttgtaatataatgctttacaaaatattttaagataacttgagagaatatccaaa

SEQ ID NO: 140874 - DNA, 590 bp, Zea Mays
aaatgccataaaacgcatgatttgttttgaccacctacgtaccagtgttaggggtaacccatgggcacttcaccggcctcgccgacgtcgcgatggattctccgttccacatgcccaccaccggcggcaccaccaccacctgagcagtggctgcaccaccgcctggcacgatgacgctgccagcaggcttcctggacgccgccggccgcgcggagggaggaccggcagaggcagccgccctccgccgtggaggccccgcggggcggcgaccgatcctgcccgtggacgcccggctgcagaacgactcggtggacgcctccgacgcgcacgagacgctgagcgaagacgacactgctgctgcgccatggcgcagcagcgtggacgccgccgcggcgccccttgtcggggacggggccaacgacaacgtcggtagcagcctcctcctggccttgtcggccgccgccgcgggggcgttgtcctcgcgctggggtaggaggctccagcttgtccctgcccagcctccgggcggcgccgggcacgcggggagccgccgccgccggcatggagcgagcgaggtagcctacacctag

SEQ ID NO: 140875 - DNA, 761 bp, Zea Mays
gcgtttattccacgccgcaccgtcctttccagaaccctctggtctccgcgtgcggcggcgcgatttctttgcttctcccttccacttcgagagattgttgattattctagagccagatccgggtaacagattcgagtttgcgcccgccctgttcggcttcaggtacctccattcggtaaccctaacttcgctccagttcattgctagtagcaactagcaagcaactgtgtcgttagactagcagagtggtggcaaataatgctgcttgttcttggtaaagggtttatgatttggtctgcttttcacgttgtcagtttgcgtacgggagagaatagtcgcttcgatttttgtcttcaggattctgccgggggttagcttgaaggctagggtcccatacaagcaaaatttcagcatccaaatgctatgtggggttgcagaaaaaaatgttaggtctctaggctagattgtgtttatgaatttggaaagatacccctgccaaccaaacagtcattgaattacgagcacggataaccaaactgtaggaattccttaacgccaatggatatttctcatcgtttctgagcaggccattaataggatctcttcacagatatgtgaagtacaagctctgcagtctgctgaaacccaataagggcttgttcgtttgtccaggaatggatttggaatcgttccagctaatcaaaacttatatagcttagagaagaaatccagctaggaattgttccaggccttcgttctgt

SEQ ID NO: 140876 - DNA, 979 bp, Zea Mays
gcgtttattccacgccgcaccgtcctttccagaaccctctggtctccgcgtgcggcggcgcgatttctttgcttctcccttccacttcgagagattgttgattattctagagccagatccgggtaacagattcgagtttgcgcccgccctgttcggcttcagccgccaaactgccagacgcacagccgcggagccgccagagacagacgctgccgccgtcggccgtcctccgcccctccaggtggtgcagcggtgagggtctcactgagtcaccaggtttcaaagcagccttttcgcatttgcgggggaacgctcatcttggtttatcccttccccaaacctccctcgtgtgggagcctctgacactggatatggggaacactacatctgtgcaagctgaggcttcagattcagcgcagaaacctgccacaacagctcctgcacctgggtcaaagccgaaaaagatctgctgtgcttgcccagatacaaagaagctgagggacgattgcatcgtgcagaatggcgaggatgcctgcggaaagctcatcgaagcccacctgaaatgcctgagagccgaagggttcagcgtctgacgtggtgctccatcatggcaactccacacacctgtttctgcagtaatctgattttgatcatgaacagtgtgatgaataaggacttctggtagagtgatagaaacaactcgcagttttatttctagactggaaggaggaaatcccctgaacattgccagtttgcaagagtttttctatcttttttcaatgcatttagtgccacacatatctgcaattctggataatactttatggagcatatgtatatggaaattgcttttttttggtccactgtttggagattgagcaccacactgtatggaacaactgttgcaaaagttttctactggctagagctttcagtcacttaatccagtgatgtatgaatgaagaagatattaccctct

SEQ ID NO: 140877 - DNA, 851 bp, Zea Mays
gcgtttattccacgccgcaccgtcctttccagaaccctctggtctccgcgtgcggcggcgcgatttctttgcttctcccttccacttcgagagattgttgattattctagagccagatccgggtaacagattcgagtttgcgcccgccctgttcggcttcagccgccaaactgccagacgcacagccgcggagccgccagagacagacgctgccgccgtcggccgtcctccgcccctccagatatggggaacactacatctgtgcaagctgaggcttcagattcagcgcagaaacctgccacaacagctcctgcacctgggtcaaagccgaaaaagatctgctgtgcttgcccagatacaaagaagctgagggacgattgcatcgtgcagaatggcgaggatgcctgcggaaagctcatcgaagcccacctgaaatgcctgagagccgaagggttcagcgtctgacgtggtgctccatcatggcaactccacacacctgtttctgcagtaatctgattttgatcatgaacagtgtgatgaataaggacttctggtagagtgatagaaacaactcgcagttttatttctagactggaaggaggaaatcccctgaacattgccagtttgcaagagtttttctatcttttttcaatgcatttagtgccacacatatctgcaattctggataatactttatggagcatatgtatatggaaattgcttttttttggtccactgtttggagattgagcaccacactgtatggaacaactgttgcaaaagttttctactggctagagctttcagtcacttaatccagtgatgtatgaatgaagaagatattaccctct

SEQ ID NO: 140878 - DNA, 772 bp, Zea Mays
gcgtttattccacgccgcaccgtcctttccagaaccctctggtctccgcgtgcggcggcgcgatttctttgcttctcccttccacttcgagagattgttgattattctagagccagatccgggtaacagattcgagtttgcgcccgccctgttcggcttcagatatggggaacactacatctgtgcaagctgaggcttcagattcagcgcagaaacctgccacaacagctcctgcacctgggtcaaagccgaaaaagatctgctgtgcttgcccagatacaaagaagctgagggacgattgcatcgtgcagaatggcgaggatgcctgcggaaagctcatcgaagcccacctgaaatgcctgagagccgaagggttcagcgtctgacgtggtgctccatcatggcaactccacacacctgtttctgcagtaatctgattttgatcatgaacagtgtgatgaataaggacttctggtagagtgatagaaacaactcgcagttttatttctagactggaaggaggaaatcccctgaacattgccagtttgcaagagtttttctatcttttttcaatgcatttagtgccacacatatctgcaattctggataatactttatggagcatatgtatatggaaattgcttttttttggtccactgtttggagattgagcaccacactgtatggaacaactgttgcaaaagttttctactggctagagctttcagtcacttaatccagtgatgtatgaatgaagaagatattaccctct

SEQ ID NO: 140879 - DNA, 819 bp, Zea Mays
cacaattgcatataaacgggatgagtagtaaaactgtgtgctgatcaggcattgcaaggtaatctaaatattataggacaggtggtgcagcggtgagggtctcactgagtcaccaggtttcaaagcagccttttcgcatttgcgggggaacgctcatcttggtttatcccttccccaaacctccctcgtgtgggagcctctgacactggatatggggaacactacatctgtgcaagctgaggcttcagattcagcgcagaaacctgccacaacagctcctgcacctgggtcaaagccgaaaaagatctgctgtgcttgcccagatacaaagaagctgagggacgattgcatcgtgcagaatggcgaggatgcctgcggaaagctcatcgaagcccacctgaaatgcctgagagccgaagggttcagcgtctgacgtggtgctccatcatggcaactccacacacctgtttctgcagtaatctgattttgatcatgaacagtgtgatgaataaggacttctggtagagtgatagaaacaactcgcagttttatttctagactggaaggaggaaatcccctgaacattgccagtttgcaagagtttttctatcttttttcaatgcatttagtgccacacatatctgcaattctggataatactttatggagcatatgtatatggaaattgcttttttttggtccactgtttggagattgagcaccacactgtatggaacaactgttgcaaaagttttctactggctagagctttcagtcacttaatccagtgatgtatgaatgaagaagatattaccctct

SEQ ID NO: 140880 - DNA, 858 bp, Zea Mays
actgaaggaaggagtggtagcgcacccagtcacgccgccccgccgccgccccctataaatgcgccaagcccgagttaaccaaattaaagaaaaaggaaattttcttgggcgttcttcggcttcgttgtcacaaggttcgagttcgtcaccgtctagtacgactgtgcgagggaggaagaggcgaggagaagatgcagatcttcgtgaagaccctgacggggaagaccatcaccctcgaggtggagagcagcgacaccgtcgacaacgtcaaagccaaaatccagcagatcaacagcgactgatattcgctggcaagcagctggaggatggacgcacgctggctgactacaacatccaaaaggagtcaactcttcatttggtcctcaggcttaggggtggaaccatgatcaaggtcaaaactctcactgggaaagagatcgagatcgacattgaacccactgactcgattgacaggatcaaggagcgtgttgaagagaaagaaggcattcctcccgtgcagcaaaggctcatctatgctggtaagcagcttgctgatgacaagaccgcaaaggactacaacatcgagggtggatctgtcctccatcttgtccttgctctgaggggtggttactagtctaaacctgatgaactagcagtcagataaactgttgtgttggctgcgaaatgtgcaggcctgatgttgaacttgcaaggagatagtaacaaattatcagctttgcgcctttgcccagtggaaggggctgtcttccaagttattgtctgatatggaattgttccagattatcatgtctcggcgtttacccattattattatttgatttgaaccttgctatgtta

SEQ ID NO: 140881 - DNA, 527 bp, Zea Mays
cccatgcaagtaacggctgcccgtttcccctccatctcctctacccattcactccaagaaggaatggccgccatgccattaatggcgttgaagacaccgaccgttctccctctctctacgacgtccctccctcctccttctctctataaaacgcgagctcgtgcacatggagctgattcttggtcgccccaacctctccatgatctctccctctctcccgccgtagagaatcgctgtcggttcgctgctcgccgccgttcgacgtccggagccgaagccgatgccgcgccgacgacccccactgctgaggtcgtgccctgcttccccttgctgctccatcggtcatcgcaccctgctcctttaccgaccccctgctcttcaatttcgtccacacgcaagaaccaaagtcgattgtgtgctagaggatccgaatctgtttgaggacgacccgcgcgaaaattttgagcaagtcaagtggattctccatctgcatttctatttgtacccaagtaatgcatataataatg

SEQ ID NO: 140882 - DNA, 77 bp, Zea Mays
gctaatgtctatttcagtgactcttcaaccaaacaaaggatggagccattctgttctagttcactctgcaaccaaac

SEQ ID NO: 140883 - DNA, 1095 bp, Zea Mays
atggcaagggacgaggcagcgctgcggagggccctgttcgtcacagttgttggtatcaggccggaggttctagcagttgacatcatcgaagaaatagctcaaagtttcaacgtcaatacagataacatgtctattcatcgggccttgccggaagatttcttgctgctttttcctgatgaagatacggtttcaagggtgttcaatggaggaatgatctttagagggccatggtttgatcttgttttcaagaggtggaagagttgtgcgaatgcgtttgcggcgacattaccagcgctaatggatgtggagattaggggtattccgtcgcatgcgtggtcaagagctactgtcgagaagctgctgcgtgattcatgtattatcgatgacttacacccggcgaccgtgatgaagtctgattactcatccttcatgttgagagcgtggtgtataaaaccgacgaatcttcatcgtaatatggatctcctcatcacggagataggtcctggctctagtgagaagagatgtttatcctacaagctaaacatgacggcaactcctgttgatgatcgtgggccatctgacctggttgaagatggcgcccttcctgctgatgatgaagatggtgctccccccgatggcgatggcggccaccccccgagaggcggcggcggccaccagcctggtggcagccaaagccattttggcgggccttcttccccacgtcgggagtcgttcaccggcaaggtcggcgatgcggcagaagatctactgccggtgttgcacccttctgttgagggcgcggagctcaatgtgagggaagcgcgagagatggtttgtgtgctggaaagacgagctgaagatttggtgcatggtctcgaggcagcaggtattcaaactgttgctgggctggaagtgatcagcgatgaagctcttgaaaaatatggcaggttgttcaactctcctttgtctgaatcccatattaaggccttgtcagctttgttcgggtggtcagtgcctgttgatatccatcttctggatgtccaggtggatgtccaggtgatgtctgctggcctaggtccagaggatctggagtaa

SEQ ID NO: 140884 - DNA, 448 bp, Zea Mays
cgaatggtaagtacaatttaagccattttcgttgattatagttgacttgttgtaatttctggttatagtgtttgtcaaatgtacatacaggaagctagcactggtgcagtgcccagtgatgttcaaatataccttagggggtatagaggaccagatcctacaaatccagatgtgttgtgcagccaaaaggcaatagatcgtgtggtgagtgtttggaaatgtttggtaggttctgtttatatggatttttgtatgtaagattgcattgttcttttgtatgaggctgcatatggcgaggcgatgtctagtcaacacggaccagactatgactggaggacctcacctattgatcctcaggctatgtatgcaagtggtggaaaagctcatggaaggtgaggactctacatatcttatattgtttcattggttgagtgcaatacatgtattc

SEQ ID NO: 140885 - DNA, 1229 bp, Zea Mays
actgctggcggccgttgcaattgcagccacattcaactcaggctccaggccgctgcaacccaagccgccagcagcctgcccctcctctccgactccaaaccaatccaatggccctccgccccccgctgtctcacctcacgcgctctctgccctggcctgcccccagcatgacgcgatgctccgcactgcgtcggatacatggacgatattgctggggagcgggggaggaaaggagacgactcttcccgtgccgtgctgacgccaccacgcggccccggtctcctctcgccctcctctccgtctagatctgatcctatcccctccccaccctccgccgccgtcctcgccctcccggccgcagccacgagcccgagcgccgggctcctggcctcgtctcgcctcaccggcgagatggacggcggcggggagacgctgctggtgcggaggagcaagggcaagaagaggcggcagccggcggcgcccgcggagaggggctccggcagcggggacaggttccgcgcgctctggcgggactaccacgacctgctgcaggagaccgaggcaaagaagaggaggctggcgagcaagaagcgaagaagcctcgccctgcttgctgaagtcaagttcttgcgaaggaagtatcagtcctttccgaagggtggctcgcagcagacacattacaggttgaagaagcaggctcggtacatgccatccccattgggccatggtgcagggaccgaagtgccttctaccagcagaaacccaaaccttgacttaaatcaagattctgtcctgaacgatgtggggaatgattgccaggggcaacatggccatccagaagttgaaaagttagatcaggtcgaggtgaatgaagatacgatgacacctgatgtcaaattatcagtttgtagggatacaggagagtactctcctgtaagtgaaggtaagagggcggttccatggcaagaccggttcgcgttgaagacctaggccctcagttgatgtggctaagaaataagctgcttctctgacagctagttttgctactgtatccctcaaatgctcagtagtgctctgtacagaaacaatgggacatgatacttatatgcatgttacattgcctgattgacaaactcagatgtttgtagcatgcttctaagcaagttagacaagtgagttgtgattctatgaatggttctgtccagaatttggattggcccatttgattt

SEQ ID NO: 140886 - DNA, 573 bp, Zea Mays
ggcctcagctacaagcccagccgggccaccgtcctaggctgccaggccgtcaacgtcgccgaccacgcctgcaccgagaccgtcggcttcgacattagcgtgacccagtatctcattcacttggtgctccctccttatcactccgatgggaggttgaaggaaaaggaagtaattgttatacccacatgggttgcactttccatctgccctcggcctggtgtgtgggaatatgtgagggccaatgtcatcaagctcattgttgaggagctgggggtccctgagtacctgcagttcaaggaacaacttatggaagaaggggttgaggctgagagaacttaccatcagagagttcttgagatacttgaccaattggaagaaatttggcttaacatgattgatgaatatgatttatatgaagttcttgacatatatctgcttcatggtatatacactatgctgactcgcagcatgcagttgcttctcgcaatgggcgtcacctacaaccaggtcatggaagcctacaacatattcgacgaggatgtggattgtcctgtgtgggctctcttcctttga

SEQ ID NO: 140887 - DNA, 3638 bp, Zea Mays
cgctgcgacgcgcgcgtcccacgagcggaagccccccgcgccgacgcgagcgcgggggctcgaccgaccgacccaacgcctccatctccaccgcgcgcaccaaatcgcactcccgtccgccccgccgatcgaacagccaccgctcacctctcccacccgccaaaaacctccggcctcctctcatattcatatagctagcccctgccacaaggtagagcgtcgctcacacctgcgtcgccctgcctcgcaatcgcgaatctgtcgagcacctgaggggtcggaggccgagagctagcctagcacgccggcctccgcgcgcgatggaggccagcgccgggctggtggccggctcgcacaaccggaacgagctggtgctgatccggggccacgaggaccccaagccgctgcgggcgctgagcgggcaggtgtgcgagatatgcggcgacgaggtcgggctcacggtggacggcgacctcttcgtcgcctgcaacgagtgcggcttccccgtgtgccggccctgctacgagtacgagcgccgggagggcacgcagaactgcccccagtgcaagacgcgctacaagcgcctcaaggggagcccgagggttgccggggacgatgacgaggaggacatcgacgacctggagcacgagttcaacatcgacgacgagaatcagcagaggcagctggagggcaacatgcagaacagccagatcaccgaggcgatgctgcacggcaggatgagctacgggaggggccccgacgacggcgacggcaacaacaccccgcagatcccgcccatcatcaccggctcccgctccgtgccggtgagcggtgagtttccgattaccaacgggtatggccacggcgaggtctcgtcttccctgcacaagcgcatccatccgtaccctgtgtctgagccagggagtgccaagtgggacgagaagaaagaagtgagctggaaggagaggatggacgactggaagtccaagcagggcatcctcggcggcggcgccgatcccgaagacatggacgccgacgtggcactgaacgacgaggcgaggcagccgctgtcgaggaaggtgtcgatcgcgtcgagcaaggtgaacccgtaccggatggtgatcgtggtgcgtctcgttgtgctcgccttcttcctccggtaccgtatcctgcaccccgtcccggacgccatcgggctgtggctcgtctccatcatctgcgagatctggttcgccatctcctggatcctcgaccagttccccaagtggttccccatcgaccgcgagacgtacctcgaccgcctctccctcaggtacgagagggaaggggagccgtcgctgctgtcggcggtggacctgttcgtgagcacggtggacccgctcaaggagccgccgctggtgaccgccaacaccgtgctctccatcctcgccgtagactaccccgtggacaaggtctcctgctacgtctccgacgacggcgcgtcgatgctgacgttcgagtcgctgtcggagacggccgagttcgcgcgcaagtgggtgcccttctgcaagaagttcggcatcgagccccgcgccccggagttctacttctcgctcaaggtcgactacctcaaggacaaggtgcagcccaccttcgtgcaggagcgccgcgccatgaagagagagtatgaggagttcaaggtccggatcaacgcgctggtggccaaggccatgaaggtgccggcagaggggtggatcatgaaggacggcacgccgtggcccgggaacaacacccgcgaccaccccggcatgatccaggtgttcctgggccacagcggcggccacgacaccgagggcaacgagctgccccgcctcgtgtacgtctcccgtgagaagcgcccgggattccagcaccacaagaaggccggcgccatgaacgctctgattcgcgtctccgccgtgctgaccaacgcgccattcatgctcaacttggactgtgatcactacatcaacaacagcaaggccatccgggaggccatgtgcttcctcatggaccctcaggtcggccggaaggtctgctacgttcagttcccgcagaggttcgacggcatcgacgtgcacgaccgatacgctaacaggaacaccgtcttcttcgacatcaacatgaaggggctggacggcatccaaggcccggtgtacgtcgggacagggtgcgtgttccggcgccaggcgctctacggctacaaccctcccaagggacccaagaggcccaagatggtgacctgcgactgctgcccgtgcttcggccgcaagaagcggaaacacgccaaggacgggctgccggagggcaccgctgatatgggagtagatagcgacaaggagatgctcatgtcccacatgaacttcgagaagcggttcgggcagtccgcggcgttcgtcacgtcgacgctgatggaggaaggcggcgtccctccttcgtcgagccccgccgcgctcctcaaggaggccatccatgtcatcagctgcggctacgaggacaagaccgactgggggctggagctggggtggatctacgggtcgatcacggaggacatcctgacggggttcaagatgcactgccgcgggtggcgctccgtgtactgcatgccgaagcgggcggcgttcaaggggtcggcgccgatcaatctatcggaccgtctcaaccaggtgctccggtgggcgctggggtccgtcgagatcttcttcagccggcacagccccctgctgtacggctacaagaacggcaacctcaagtggctggagcgcttcgcctacatcaacaccaccatctaccccttcacctcgctcccgctgctcgcctactgcaccctccccgccgtctgcctcctcaccggcaagttcatcatgccgtcgattagcacgttcgccagcctcttcttcatcgccctcttcatgtccatcttcgcgacgggcatcctggagatgcggtggagcggggtgagcatcgaggagtggtggaggaacgagcagttctgggtcatcggcggcgtgtccgcgcatctcttcgccgtcgtgcagggcctgctcaaggtcctcgccgggatcgacaccaacttcaccgtcacctccaaggccaccggcgacgaggacgacgagttcgccgagctctacgccttcaagtggaccacgctcctcatcccgcccaccacgctgctcatcattaacgtcatcggcgtcgtggccggcatctccgacgccatcaacaacgggtaccagtcctgggggcccctcttcggcaagctcttcttcgccttctgggtcatcgtccacctctacccgttcctcaaggggctcatggggcgccagaacaggacgcccaccgttgttgtcatctggtccattctgctggcctccatcttctccctgctctgggtcaggatcgaccctttcatcgtcaggaccaagggcccggacgtcaggcagtgtggcatcaattgctgagctgtttattaaggttcaaaattctggagcttgtgcatagggagaaaaaaacaatttagaaattttgtaaggttgttgtgtctgtaatgttatggtacccagaattgtcggacgaggaattgaacaaaggacaaggtttgattgttaaatggcaaatga

SEQ ID NO: 140888 - DNA, 3473 bp, Zea Mays
caaggtagagcgtcgctcacacctgcgtcgccctgcctcgcaatcgcgaatctgtcgagcacctgaggggtcggaggccgagagctagcctagcacgccggcctccgcgcgcgatggaggccagcgccgggctggtggccggctcgcacaaccggaacgagctggtgctgatccggggccacgaggaccccaagccgctgcgggcgctgagcgggcaggtgtgcgagatatgcggcgacgaggtcgggctcacggtggacggcgacctcttcgtcgcctgcaacgagtgcggcttccccgtgtgccggccctgctacgagtacgagcgccgggagggcacgcagaactgcccccagtgcaagacgcgctacaagcgcctcaagggtaccccgagggttgccggggacgatgacgaggaggacatcgacgacctggagcacgagttcaacatcgacgacgagaatcagcagaggcagctggagggcaacatgcagaacagccagatcaccgaggcgatgctgcacggcaggatgagctacgggaggggccccgacgacggcgacggcaacaacaccccgcagatcccgcccatcatcaccggctcccgctccgtgccggtgagcggtgagtttccgattaccaacgggtatggccacggcgaggtctcgtcttccctgcacaagcgcatccatccgtaccctgtgtctgagccagggagtgccaagtgggacgagaagaaagaagtgagctggaaggagaggatggacgactggaagtccaagcagggcatcctcggcggcggcgccgatcccgaagacatggacgccgacgtggcactgaacgacgaggcgaggcagccgctgtcgaggaaggtgtcgatcgcgtcgagcaaggtgaacccgtaccggatggtgatcgtggtgcgtctcgttgtgctcgccttcttcctccggtaccgtatcctgcaccccgtcccggacgccatcgggctgtggctcgtctccatcatctgcgagatctggttcgccatctcctggatcctcgaccagttccccaagtggttccccatcgaccgcgagacttccttgagtggactggacgacgctgcacgatgcaggtacgagagggaaggggagccgtcgctgctgtcggcggtggacctgttcgtgagcacggtggacccgctcaaggagccgccgctggtgaccgccaacaccgtgctctccatcctcgccgtagactaccccgtggacaaggtctcctgctacgtctccgacgacggcgcgtcgatgctgacgttcgagtcgctgtcggagacggccgagttcgcgcgcaagtgggtgcccttctgcaagaagttcggcatcgagccccgcgccccggagttctacttctcgctcaaggtcgactacctcaaggacaaggtgcagcccaccttcgtgcaggagcgccgcgccatgaagagagagtatgaggagttcaaggtccggatcaacgcgctggtggccaaggccatgaaggtgccggcagaggggtggatcatgaaggacggcacgccgtggcccgggaacaacacccgcgaccaccccggcatgatccaggtgttcctgggccacagcggcggccacgacaccgagggcaacgagctgccccgcctcgtgtacgtctcccgtgagaagcgcccgggattccagcaccacaagaaggccggcgccatgaacgctctgattcgcgtctccgccgtgctgaccaacgcgccattcatgctcaacttggactgtgatcactacatcaacaacagcaaggccatccgggaggccatgtgcttcctcatggaccctcaggtcggccggaaggtctgctacgttcagttcccgcagaggttcgacggcatcgacgtgcacgaccgatacgctaacaggaacaccgtcttcttcgacatcaacatgaaggggctggacggcatccaaggcccggtgtacgtcgggacagggtgcgtgttccggcgccaggcgctctacggctacaaccctcccaagggacccaagaggcccaagatggtgacctgcgactgctgcccgtgcttcggccgcaagaagcggaaacacgccaaggacgggctgccggagggcaccgctgatatgggagtagatagcgacaaggagatgctcatgtcccacatgaacttcgagaagcggttcgggcagtccgcggcgttcgtcacgtcgacgctgatggaggaaggcggcgtccctccttcgtcgagccccgccgcgctcctcaaggaggccatccatgtcatcagctgcggctacgaggacaagaccgactgggggctggagctggggtggatctacgggtcgatcacggaggacatcctgacggggttcaagatgcactgccgcgggtggcgctccgtgtactgcatgccgaagcgggcggcgttcaaggggtcggcgccgatcaatctatcggaccgtctcaaccaggtgctccggtgggcgctggggtccgtcgagatcttcttcagccggcacagccccctgctgtacggctacaagaacggcaacctcaagtggctggagcgcttcgcctacatcaacaccaccatctaccccttcacctcgctcccgctgctcgcctactgcaccctccccgccgtctgcctcctcaccggcaagttcatcatgccgtcgattagcacgttcgccagcctcttcttcatcgccctcttcatgtccatcttcgcgacgggcatcctggagatgcggtggagcggggtgagcatcgaggagtggtggaggaacgagcagttctgggtcatcggcggcgtgtccgcgcatctcttcgccgtcgtgcagggcctgctcaaggtcctcgccgggatcgacaccaacttcaccgtcacctccaaggccaccggcgacgaggacgacgagttcgccgagctctacgccttcaagtggaccacgctcctcatcccgcccaccacgctgctcatcattaacgtcatcggcgtcgtggccggcatctccgacgccatcaacaacgggtaccagtcctgggggcccctcttcggcaagctcttcttcgccttctgggtcatcgtccacctctacccgttcctcaaggggctcatggggcgccagaacaggacgcccaccgttgttgtcatctggtccattctgctggcctccatcttctccctgctctgggtcaggatcgaccctttcatcgtcaggaccaagggcccggacgtcaggcagtgtggcatcaattgctgagctgtttattaaggttcaaaattctggagcttgtgcatagggagaaaaaaacaatttagaaattttgtaaggttgttgtgtctgtaatgttatggtacccagaattgtcggacgaggaattgaacaaaggacaaggtttgattgttaaatggcaaatgagtgcagtcatgctaaatgtaatccaaatag

SEQ ID NO: 140889 - DNA, 3874 bp, Zea Mays
atgagggcccgcacggccattctcctcctgatgctaatccttgtcgtcctcttcctcgccgcgtcgacgtcggccggcgacgtaccggggcggcagaagcgacaggccctgctgcaggagaaggcgactctgctggccctgaagcaggggctcaggctgccatcggcagcggccttggcggactggaacgagtccaacgcccacgtctgcggcttcaccggcgtcacctgcgactggcggcaagggcacgttgtcgggctctctctcgccaacgtgggcatcgccggcgccatcccaccggtcattggcgagctctcgcacctccggatcctcgacctgtccaacaacaaaatatctggccaggtaccggcgtccgtcgccaacctcacgcggctggagagcctcttcttgaacaacaacgatatctccgacaccatcccttcgatcttcagcagcctgttaccactccggatgctccggaacgtcgacgtctcctacaacctcatctccggtgacatcccgctggccctcggcagcctgattggggagcagctccagagcctcaacgtctccgacaacaacatctccggcgccattcctctgtccatcggcaacctgactcgcctcgagtacctgtacatgcagaacaacaacgtctctggagggatccctctggccatctgcaacctgacaagcctcctggagcttgagatgtccggcaaccagctgacggggcagattccagccgagctctccaacatccgggaccttggcgcgattcacctccgcggtaaccaactccacggcggaataccgccttccctctccgagctgacggccatgttctatctcgggctcgagcaaaacgacctgtccgggaccatcccaccggctatcttgctgaactgcacacagttggccctcctcgacgtcggcgacaacaatctttctggcgaaatcccccgcgccatctcgagcgcccgctgcctgttcgtcgtcatcaatctctactccaacaatctgaacgggacgcttccacggtggctcgccaactgcacccaactgatgacgctggatgtggagaacaacttgctggacgacgagctgcccacaagtatcatctcgggcaatcaggagctcacgtacctgcatttgtcgaacaaccgtttcctgagccacgacaacaacagcaacctggagccgttcttcgtcgcgctgtccaactgcacgctcttacaggaggtggaggccggcgctgtggggatgcgtgggcagctgccatggcggctgggatcgctgctcccgatgaacacggggcacctcaacctggagctgaacgccatcgagggcccaatcccggcgtctataggggacattatcaacatgatgtggttgaacctgtcgagcaatttgctgaacgggacgatcccaacgtccctctgccggctaaagagactggaacggctcgtgctgtccaacaacgccttgacaggcgaaattccggcgtgcattggcgacgccacgggcctcggcgagatagatctgtcgggcaacgtgctgtcaggggccatccccagcagcatcaggagcctttccgagctccagactctcaccctgcagagaaacgagctgtctggcgccataccttcaagcctcggccggtgcaccgctctgctggtcatcgatctctcctgcaacagcttgaccggggtgataccagaggagatcaccggcatcgccatgaagacactgaacctgtcgcgcaatcagcttgggggcaagctgccggccggcctcggcagcatgcagcaagtggaaaagatcgacctgtcctggaacaacttcaacggcgagatcctgcccaggctcggggagtgcattgcgttgacggtgctcgacctgtcacacaactcgcttgccggcgacctccctccggagctcggcggcctgaagaacctcgagagcctcaacgtctcgaacaaccacctgagcggtgagatccccactagcctgaccgactgttacatgctgaaatacctcaacctgtcatacaacgacttcagcggcgtcgtccccaccaccggccctttcgtgaatttcagctgcctctcctacctcggcaaccgtcgcctctctggtccggtgctgaggcgttgcagagagcgccaccgctcgtggtaccagtccaggaagttcttagttgtcttgtgtgtctgctcagcggttctggcgttcgcgctgacgatcctctgcgccgtcagcgtccgtaagatccgcgagcgggtcgcgtcaatgcgggaggacatgttcaggggtcgccgcggcggcggctcgtcgccggtgatgaagtacaagttcccccggattacgtacagggagctggtcgaggccaccgacgagttcagcgaagaccggctcgttgggacgggcagctacgggcgggtgtaccgtggcgcgctgcgcgacggtaccatggtcgccgtgaaggtgctgcagctccagacggggaactcgaccaagagcttcaaccgcgagtgccaggtcctgaagcgcatccggcaccggaacctcatgcgcatcgtcacggcgtgcagcctgccggacttcaaggcgctggtgctgccgttcatggccaacggcagcctcgagcggtgcctctacgcggggccgccagcggagctgagccttgtgcagcgggtcaacatctgcagcgacatcgccgaggggatggcgtacctgcaccaccactcgccggtcaaggtcatccactgcgacctcaagccgagcaacgtcctcatcaacgacgacatgaccgcgctcgtctccgacttcggtatctcccggctcgtcatgagcatcggcggggtggccaacgccgccgacgtcggcgcctccaccgcgaacatgctgtgcggatccatcggatacatccctccagagtatggctacggctcgaatacgacgacgaagggcgacgtgtacagcttcggcgtgctggtgctggagatggtgacgaggaggaagccgaccgacgacatgttcgaggccggactgagcctgcacaagtgggttaaggcccactaccacggccgcgccgacgcggtggtcgaccaggcactggtgcgcatggtccgggaccagacgcccgaggtcaggaggatgtcggacgtggccatcggcgagctgctggagctcggcatcctctgcagccaagaccaggcgtccgcgcggccgaccatgatggacgcagccgacgacctggaccggctcaagcggtacctcggcggcgacaccacggccaccttcgcgtcatcgctgggattctcctccaccacgctggaagtggaagacatagattgagcagctatagactaaagattttgacgtgatgcatacatacatgcataggcataggcgagcattcctaatcctccatgacctgatttttaaacggatgcataaacttaggattaattctttgaaggtgtctgattgttgtaatataagccttggccatagatctatctatatgccactatatatgatttctgtttctctttctgaactgctcgctcgtctgtttctttctaaacttcgaatgtcttctatcttttcagtaattgcgtacgtacgtatatcataatacctgaataattacaagctcctcagcaagatggcccacgcaagcagcgcttatagctatcttttctcgttgtaagttgtagcatatgtttctttttctacttgagcattacttttttcccaatggtttttgtttgataataagggacacaaagcaaaacattgtctatactatttttgcatagtcctatttatgttgcatttctacgcaacactttttaggccatctttg

SEQ ID NO: 140890 - DNA, 2248 bp, Zea Mays
caatttgtgaacgccttctgatgggtcagcaggtcagccctcaacttcaacttcacaagctcaagtcttccccagtccattccatctcgatcccccacgagctccaataaactaattacagatttcaagctcgcttcaaattcttaaatccaaccccattttcacctgagcacacgcattgctcgagaactcgcgtagcaagaaaccatcaacaagggaagggagcttaggcaaagaatccaagaaggcaagaaccatgctggaagatgacgccgccatggacgcggatagcctcgtcggccaggacccgaggtcgggggtgcggccaagcggtggtgagcgcgactgggcggcggccgtgctggagccagtgcggtggatgcggatgctgtgccgggagctgggagcgacgttcgtggctggggtggtgctggtgtacggcctcagccagggcttcgccggctccttcttccgagtggcgtcggactactactggaaggacgtgcagcgggtgcaaccagccactgtgcagttcctctccgtcttcttcttcattccatgggtgctcaaaccgctctgggggatcatgaccgacgtctttcccatctgcgggtaccgccgccgcccgtacttcctcttctcaggaatacttggaacggtttcagctgctatcgttgcagtaactattggattgccaatgagttctgctgtactttgcttgatgggaatctcaacagcagtcgccattgctgatgtaacaatagatgcttcaatcgcaaagaatagtattgataagccggcgctggctccagacatgcagagcctttgtgcattctcctcatctctaggtgcacttgttgggtatgctacaagtggattatttgtccatcatcttggagcacagggtgcgttaggtgttatggctatacctcctgccacagtggttttccttggttttttcatatatgagctgaaaacacatcaacataatgttaaagagaaggttttaaacaaggttggtggggcagtgaaaggaatggttcggactataaggtatccagtagtgtggaggccatctctttacatgttcctttcgctggctctgagtatcagcacccatgaggggcaattctactggtatactaacaagacaccacctaatcctggattttcacaggaattcgtcgggctggtccacgccatcggcgcggtggcgtccatgctgggcgtgctcgtctaccacaagtgcctcaaggattacccgttccggagcatcctcttgtacgcgcagctcctgtacggcgtgtcggggcttctggacctcaccttcgtgctccggtggaacctggcgctgggcatccctgacgcggcgttcgtgaccctggaggagtgcgtctcccgcgtggtggcccgcgtccggctgatgccgatgatggtgctgagcaccaagctgtgcccgccgggcatggagggcaccttcttcgcgctgctcatgtgcatcgacagcctcggcatgctggcggccaaggccggcggcgcggcggtgctgcgcgcgctgcgcgtcaccaggaccgacttcggccacctctggctcgccgtgctgctcaggaacgtgctcaggctcgccacgctgggggccatcggtctcgtgcccaccgcgggccagactgacgtgctggtgccgcgcgagctccttgtgagctcgccggctggtgtggccgatgacgaggaagagaggctgcagctggcgatgctcacttcacacactgacgatgtataatatgttagaaagttaggcatttttagttttaatttaatccagaaaaacagtgcgatatatgtgatgacatgtatgtgcatgtgtgtataactactcgcataagcagtaaatagcaataaaacatgcacgaatacgaagaatagagtgtacccagcggagggaccgatgctcaaggcatcagtggctccattcacacgagtcatctcgtgtgtttgttcgatgtagccgtacgaagtcgatgcaggaaggtgtacgcagtgcagtccctcgaacggtcgccgggaagaagacgaagcagatcacgcgagcagtcgcgaagacgctccccaaaaatctgatcgcccgcacacccgtgcaagtgtatctctacggtcggtgatttcggaggcctgctctcccactctctctgtgctcgcagaaggtgggacgggaatgtgttgcttgcaattcgcgtgaggcaattcgcgt

SEQ ID NO: 140891 - DNA, 2099 bp, Zea Mays
caatttgtgaacgccttctgatgggtcagcaggtcagccctcaacttcaacttcacaagctcaagtcttccccagtccattccatctcgatcccccacgagctccaataaactaattacagatttcaagctcgcttcaaattcttaaatccaaccccattttcacctgagcacacgcattgctcgagaactcgcgtagcaagaaaccatcaacaagggaagggagcttaggcaaagaatccaagaaggcaagaaccatgctggaagatgacgccgccatggacgcggatagcctcgtcggccaggacccgaggtcgggggtgcggccaagcggtggtgagcgcgactgggcggcggccgtgctggagccagtgcggtggatgcggatgctgtgccgggagctgggagcgacgttcgtggctggggtggtgctggtgtacggcctcagccagggcttcgccggctccttcttccgagtggcgtcggactactactggaaggacgtgcagcgggtgcaaccagccactgtgcagttcctctccgtcttcttcttcattccatgggtgctcaaaccgctctgggggatcatgaccgacgtctttcccatctgcgggtaccgccgccgcccgtacttcctcttctcaggaatacttggaacggtttcagctgctatcgttgcagtaactattggattgccaatgagttctgctgtactttgcttgatgggaatctcaacagcagtcgccattgctgatgtaacaatagatgcttcaatcgcaaagaatagtattgataagccggcgctggctccagacatgcagagcctttgtgcattctcctcatctctaggtgcacttgttgggtatgctacaagtggattatttgtccatcatcttggagcacagggtgcgttaggtgttatggctatacctcctgccacagtggttttccttggttttttcatatatgagctgaaaacacatcaacataatgttaaagagaaggttttaaacaaggttggtggggcagtgaaaggaatggttcggactataaggtatccagtagtgtggaggccatctctttacatgttcctttcgctggctctgagtatcagcacccatgaggggcaattctactggtatactaacaagacaccacctaatcctggattttcacaggaattcgtcgggctggtccacgccatcggcgcggtggcgtccatgctgggcgtgctcgtctaccacaagtgcctcaaggattacccgttccggagcatcctcttgtacgcgcagctcctgtacggcgtgtcggggcttctggacctcaccttcgtgctccggtggaacctggcgctgggcatccctgacgcggcgttcgtgaccctggaggagtgcgtctcccgcgtggtggcccgcgtccggctgatgccgatgatggtgctgagcaccaagctgtgcccgccgggcatggagggcaccttcttcgcgctgctcatgtgcatcgacagcctcggcatgctggcggccaaggccggcggcgcggcggtgctgcgcgcgctgcgcgtcaccaggaccgacttcggccacctctggctcgccgtgctgctcaggaacgtgctcaggctcgccacgctgggggccatcggtctcgtgcccaccgcgggccagactgacgtgctggtgccgcgcgagctccttgtgagctcgccggctggtgtggccgatgacgaggaagagaggctgcagctggcgatgctcacttcacacactgacgatgtataataatgatccaggttgtcttacacagagggagatactgatccattgagcaagagcaggagcgaggcctccaggaaaaatgtttcttcgtcgaggatgatctgggcatccttacttccgcttccgagtcctgttaaaaatcagattcacatactctagccaggggcgtcttgagatttttggaggccatgtgcaaaattaacacacataaggtctctttgattcaacttttttttactagcttttctaaaaaaaactgtctgtagtgagaatctaaatatcatgtggattacgtgtggagtaagattatggtgttcataaa

SEQ ID NO: 140892 - DNA, 1983 bp, Zea Mays
acggccagccgccagctgctgcgcctttgttcccatgcgccgcaacaagcctacctcacctatcacttgctcacgccaccgagaatctttcaccctcctcctcctcccatcctgacctctctctctctctcctcttctccctccctcccgtgagtgagtgagctggagccaagctagccgagcgagtgatggcatggggagcttgcactgctgtggcagctgctctcctgctgctcctcctcctcgccgccgccgcagcaggtggtaatggcggcgtgcattgccttgaccttgaccttgaggaggggaggcggcaccacctgagcaggagagccttgcaagggaggcagaggcggcaccacctgaggggcggtgggtggcgccacggtgctcgagctgaggcaccacagcttcagccctgcgccggccaacagcagggaggaggaggcggacgctctcctgtccaccgacgccgcgcgcgtctcgtcgctgcaagggcgcatagagcactaccggctgacgacgaccagctcgtcggccgaggtggcggtgacggcgtccaaggcgcaggtgcccgtcagctcgggcgcgaggctccggacgctgaactacgtggccaccgtggggctgggcggcggcgaggcgacggtgatcgtggacacggccagcgagctgacgtgggtgcagtgcgcgccgtgcgagtcgtgccacgaccagcagggcccgctgttcgacccgtcctcgtcgccgtcctacgccgcggtgccgtgcgactccccctcctgcgacgcgctgcagcagcagctggccacgggcgcgggcgcgggcgcgccgccgtgcgacgccgggcggccggcggcctgcagctacgcgctcagctaccgcgacggctcctactcccgcggcgtgctggcgcacgacaggctgagcctggccggggaggtcatcgacggcttcgtgttcgggtgcggcaccagcaaccagggcccgccgttcggcggcacgtcgggcctcatggggctcggccgcagccagctctcgctcgtgtcgcagaccgtggaccagttcggcggcgtgttctcctactgcctcccgctcagcagggagtccgacgcgtcgggctcgctggtgctgggcgacgacccgtcggcgtaccgcaactcgaccccggtcgtgtacacctcgatggtgtccaactccgacccgctgctccaggggcccttctacctggtgaacctgaccgggatcacggtcggcggccaggaggtggagtccacgggcttctcggccagggcgatcgtcgactcgggcaccgtgatcaccagcctcgtgccgtcggtctacaacgccgtcagggccgagttcatgagccagctcgcggagtacccgcaggcgccagggttctccatcctcgacacctgcttcaacatgaccgggctcaaggaagtccaggtgcccagcctgactctcgtgttcgacggcggcgcggaggtggaggtggactccggcggcgtgctctacttcgtcagcagcgactcctcacaggtgtgcctggccgtggcctccctgaaatccgaggacgagacctccatcatcggcaactaccagcagaagaacctgagggtcgtcttcgacacctcggcgtctcaggttggtttcgcgcaggagacgtgtggttatatttgactttgactcggattgggattgggattgggatgcagcgggcggccatgggctctatatatgtgaatacctttatacttacttgcagatttgtttcgagattacccctggtgattggcaaatggtaacaaggtgttcagttgttggcaaatgaacaagcactgctcgcggttacctttttttttttttttaccctggcttcccgccgtttctctgtgcttcatccgagatcaatttgcgctgcagggaacccaatggggattctttctgcgtttaccttctaaccaaatctgtaggcaa

SEQ ID NO: 140893 - DNA, 1988 bp, Zea Mays
acggccagccgccagctgctgcgcctttgttcccatgcgccgcaacaagcctacctcacctatcacttgctcacgccaccgagaatctttcaccctcctcctcctcccatcctgacctctctctctctctcctcttctccctccctcccgtgagtgagtgagctggagccaagctagccgagcgagtgatggcatggggagcttgcactgctgtggcagctgctctcctgctgctcctcctcctcgccgccgccgcagcaggtggtaatggcggcgtgcattgccttgaccttgaccttgaggaggggaggcggcaccacctgagcaggagagccttgcaagggaggcagaggcggcaccacctgaggtcgagggcggtgggtggcgccacggtgctcgagctgaggcaccacagcttcagccctgcgccggccaacagcagggaggaggaggcggacgctctcctgtccaccgacgccgcgcgcgtctcgtcgctgcaagggcgcatagagcactaccggctgacgacgaccagctcgtcggccgaggtggcggtgacggcgtccaaggcgcaggtgcccgtcagctcgggcgcgaggctccggacgctgaactacgtggccaccgtggggctgggcggcggcgaggcgacggtgatcgtggacacggccagcgagctgacgtgggtgcagtgcgcgccgtgcgagtcgtgccacgaccagcagggcccgctgttcgacccgtcctcgtcgccgtcctacgccgcggtgccgtgcgactccccctcctgcgacgcgctgcagcagcagctggccacgggcgcgggcgcgggcgcgccgccgtgcgacgccgggcggccggcggcctgcagctacgcgctcagctaccgcgacggctcctactcccgcggcgtgctggcgcacgacaggctgagcctggccggggaggtcatcgacggcttcgtgttcgggtgcggcaccagcaaccagggcccgccgttcggcggcacgtcgggcctcatggggctcggccgcagccagctctcgctcgtgtcgcagaccgtggaccagttcggcggcgtgttctcctactgcctcccgctcagcagggagtccgacgcgtcgggctcgctggtgctgggcgacgacccgtcggcgtaccgcaactcgaccccggtcgtgtacacctcgatggtgtccaactccgacccgctgctccaggggcccttctacctggtgaacctgaccgggatcacggtcggcggccaggaggtggagtccacgggcttctcggccagggcgatcgtcgactcgggcaccgtgatcaccagcctcgtgccgtcggtctacaacgccgtcagggccgagttcatgagccagctcgcggagtacccgcaggcgccagggttctccatcctcgacacctgcttcaacatgaccgggctcaaggaagtccaggtgcccagcctgactctcgtgttcgacggcggcgcggaggtggaggtggactccggcggcgtgctctacttcgtcagcagcgactcctcacaggtgtgcctggccgtggcctccctgaaatccgaggacgagacctccatcatcggcaactaccagcagaagaacctgagggtcgtcttcgacacctcggcgtctcaggttggtttcgcgcaggagacgtgtggttatatttgactttgactcggattgggattgggattgggatgcagcgggcggccatgggctctatatatgtgaatacctttatacttacttgcagatttgtttcgagattacccctggtgattggcaaatggtaacaaggtgttcagttgttggcaaatgaacaagcactgctcgcggttacctttttttttttttttaccctggcttcccgccgtttctctgtgcttcatccgagatcaatttgcgctgcagggaacccaatggggattctttctgcgtttaccttctaaccaaatctgtaggcaa

SEQ ID NO: 140894 - DNA, 1234 bp, Zea Mays
tcacttagcgtttcagtctatttatataaaaactgtttttggtgaaaatcatctaaatcaatatgaagcagaatcggtcgagtcgtcgtgatagtaagacgtcgtgatagaacggagttacataccacctatcaaccaatgctatagctctgtgaaccaatacaaaatgttctaaccaaacacgaaacaacgtaattaatttactccatgaatcgataacggacaaaaagaccaaaccaaaccgcacgatagtcttagtcgttgctgcgtgcagctgttctaaattataaaatattttagcttatagtttttttactatacatatgtatatatatacattacgtataaaaaagtgttaaaatatctttgtaaagggactagggcactagcacagccacagccacaggcccacagcagcagagcagctgatgctcaaactgcctaaggaacaggactggtgttagcgcgatcgatcgaaccagtggacccagtgggaacaggaggcccacgataccctgcctcctgccgccccgcctctctcctacccgaagcgaagcgccggaggagtccctccgtgcgatgcagacgccggcggcgaccatctgcggggcccacggggcagccttcaccccatgcccccgtcgccccacccctcctggaagcctccggaagcctttcactggctcttctcggcggactccaaggcgccggctcctcgctcccatggcctccaccgtcgactcacccgggagctcatccgacttcaccaagcgtatagagcgcgcctggctaatctcccagcaaccaagaccagtttcttgctcttcctgtcaatctgctggccacgttgagtgcaagtggtgtgcaggaacaggcttctttatccttggtgacaacatattgtgtgaagtaccctcaagaaattcaaaatgtgtgatatgctctggaaagggcttcacaagttgtgctgattgccaagggacaggttttcgtgccaagtggctggaagaacctcctattgacaaatgaggaagtcaatcatactgtaaaatttaccatttcacagtaaactagctacttttatgcttttctgtccatatccttcaatgtaactctgataatattattttccttttcctgtaattgcatcaattccatattatgacatgttcttaattattcaacatacattttctgtaagaacatgagtatcaagaggtattttttgctctaa

SEQ ID NO: 140895 - DNA, 787 bp, Zea Mays
gttgcgtgtggtgctggtttacgctgcctagttcaaaataacaaacatgactagtccatttggtgcatgctgagcgagccatgctgaacctggttgatccctggaagctgctggggcgtcgtatgactgacgatcaggggttgctttaaagcacaggtagacttcaagttctgtttcccgcaagttgccattgcggtcctgaaatgaaaaaaccaggtgtgggaatgcggaactgtccatctacaaaatcagtggcagggatcctctcattataaagttatctatagagagcaaggacaagaaagaaaatagatatcttggctattcttttgtccagctgggcaatcgacaaggtgatgaacgcagcagttggacagaatgagtgtagttcaaaatcttcgttgtggagtagcttcacaaataatggagttggaatacggaaggtgtttggcttggagattagctcgagctctaggaatacaattcaagagggttttgtgggaattatctagtgtgctctgcttttgtatgtacgccattttgatgcacctaagcatttatgcatttgtaaatgataagtgctcctttggatagcaggaactttggagtatttgaatcattagaattattttttttcataaggaattcttctgggttgccattcttaaccccaattccatagagagatcaaacatgagcttgaacctcaaatttagagaagtcagctacattttcccctttttattggtctactctcttacaaattacaatgcaccatccctccaaa

SEQ ID NO: 140896 - DNA, 1830 bp, Zea Mays
gccggccaatgagatggagcagagcaaagaatttcagagagagagagagagaggagagagaaaggccggcctgtctctcccgtctctcttctttcctcctcctttgctcatttggcatttgccctgctctccaaacatcaactaaatttggccgccccatcaccaatcccttcccagtctctccctccgcgtcgtctttaaaacggccacctccaaaggccccctgtagttggccacccacctctccctcctcctttcttctgtcgtctctctctccgcacgcgcaatggcgaggcctcgcaagaacagcgccgccgccgccaacaacaacaacagcaacaccaccaacgccggcaacgccgccgtcgacctcgcggcgcgcgtcaagccgaagcgcacgcggaagagcgtgccccgggagtccccctcgcagcgcagctccgtctaccgcggcgtcacacggcaccggtggacggggaggttcgaggctcacctgtgggacaagaacagctggaacgagtcccagaacaagaagggcaagcaagtttacctcggtgagtgaggctctcgagtcacggtcttggcatgacacacatgaggaggaggaggaggagctccgcccacactccctccctctctctctcggaaaaagaaaaaagaaaaacattttttcagctctggtatgtatccatcaatggcgtagcgtgttgctcaccatcgtctccctccatggtctccatgcaggcgcgtacgacgacgaggacgcagcggcgcgcgcgtatgacttggcggcattgaagtactggggccccgacaccatcctcaacttcccggcgtctgcatatgaagcagagttgaaagaaatggaggggcagtccagggaagagtatattgggtccttaaggaggaaaagcagtgggttctccagaggtgtttccaaataccgaggtgtcgcaaggcatcaccacaacgggagatgggaggcgaggattggtcgcgtcttcggaaacaagtatctctacctcgggacttacgggacgcaggaggaggcggcgatggcgtacgacatggcggcgatcgagtaccggggcctgaacgccgtcactaacttcgacctcagccgctacatcaagtggctccgcccgggcgccggcgccgcgcagaacccgcacccgatgctggacggcctggcgcagcagctgctgctgtcgccggagggcaccatcgacggcgccgcgttccaccagcagcagcacgaccaccgccagcagggcgccgccgagctcccgctgccgcccagggcgtcgctgggccacacgcccaccacgtcggcgctcggcctgctgctgcagtcgtccaagttcaaggagatgatccagcgggcgtcggcggccgagagcggcaccaccaccgtcaccaccacgtcgtcgtcgtcgtcgcagccgcccacgccgacgccgacgccgtcgccatcgccacctccgacgccgccagtgcagccggccagggacgcctcgccacagtgcagcttccccgaggacatacagaccttcttcggctgcgaggacgtcgcgggcgtcggcgccggcgtcgacgtggacgccctcttcttcggcgacctcgccgcgagaatggagctctctcgccatttgagaaccaagaaaatggtgagacacacaaaacaagagaggcagcagaacagacagacggcgcctagtctgttttgagagatttatttacagtggtaactagtgacatttactgaacggttaagattgtattattcaaatttttttcacattggtaacaagggattgtttcatttgtttc

SEQ ID NO: 140897 - DNA, 1776 bp, Zea Mays
gccggccaatgagatggagcagagcaaagaatttcagagagagagagagagaggagagagaaaggccggcctgtctctcccgtctctcttctttcctcctcctttgctcatttggcatttgccctgctctccaaacatcaactaaatttggccgccccatcaccaatcccttcccagtctctccctccgcgtcgtctttaaaacggccacctccaaaggccccctgtagttggccacccacctctccctcctcctttcttctgtcgtctctctctccgcacgcgcaatggcgaggcctcgcaagaacagcgccgccgccgccaacaacaacaacagcaacaccaccaacgccggcaacgccgccgtcgacctcgcggcgcgcgtcaagccgaagcgcacgcggaagagcgtgccccgggagtccccctcgcagcgcagctccgtctaccgcggcgtcacacggcaccggtggacggggaggttcgaggctcacctgtgggacaagaacagctggaacgagtcccagaacaagaagggcaagcaagtttacctcggcgcgtacgacgacgaggacgcagcggcgcgcgcgtatgacttggcggcattgaagtactggggccccgacaccatcctcaacttcccggcgtctgcatatgaagcagagttgaaagaaatggaggggcagtccagggaagagtatattgggtccttaaggaggaaaagcagtgggttctccagaggtgtttccaaataccgaggtgtcgcaaggcatcaccacaacgggagatgggaggcgaggattggtcgcgtcttcggaaacaagtatctctacctcgggacttacgggacgcaggaggaggcggcgatggcgtacgacatggcggcgatcgagtaccggggcctgaacgccgtcactaacttcgacctcagccgctacatcaagtggctccgcccgggcgccggcgccgcgcagaacccgcacccgatgctggacggcctggcgcagcagctgctgctgtcgccggagggcaccatcgacggcgccgcgttccaccagcagcagcacgaccaccgccagcagggcgccgccgagctcccgctgccgcccagggcgtcgctgggccacacgcccaccacgtcggcgctcggcctgctgctgcagtcgtccaagttcaaggagatgatccagcgggcgtcggcggccgagagcggcaccaccaccgtcaccaccacgtcgtcgtcgtcgtcgcagccgcccacgccgacgccgacgccgtcgccatcgccacctccgacgccgccagtgcagccggccagggacgcctcgccacagtgcagcttccccgaggacatacagaccttcttcggctgcgaggacgtcgcgggcgtcggcgccggcgtcgacgtggacgccctcttcttcggcgacctcgccgcgtacgcgtcgccggcgttccacttcgagatggacttgtagctcatcacacgccattactcgttaatcactatctgggttttttttttgtcgataggagaatggagctctctcgccatttgagaaccaagaaaatggtgagacacacaaaacaagagaggcagcagaacagacagacggcgcctagtctgttttgagagatttatttacagtggtaactagtgacatttactgaacggttaagattgtattattcaaatttttttcacattggtaacaagggattgtttcatttgtttcattcctcagttctgataaaagaaaagaagcaaccaatcaat

SEQ ID NO: 140898 - DNA, 1247 bp, Zea Mays
gctctccggtagaggaagggtgggtggacacgacggcggtgtgcttcaactgtcgcaacactggaatgcggttgcacggcgtccaaaatcctccacacgccgtgttccgggcagtcacttttggatggaacgagggggaaaaattagcaattttacctgcagaattttcatataagatatatatacgtagttcctatcggggaaaaagaaaatcattccatgcaaagaaaaattcaaattcctgcgaaagatggcgtgtttttttggtgctgatcagcctgttgcgtttgcgtgtggaccgtgctgtgcgcgccagggacgcaggaggaggcggcgatggcgtacgacatggcggcgatcgagtaccggggcctgaacgccgtcactaacttcgacctcagccgctacatcaagtggctccgcccgggcgccggcgccgcgcagaacccgcacccgatgctggacggcctggcgcagcagctgctgctgtcgccggagggcaccatcgacggcgccgcgttccaccagcagcagcacgaccaccgccagcagggcgccgccgagctcccgctgccgcccagggcgtcgctgggccacacgcccaccacgtcggcgctcggcctgctgctgcagtcgtccaagttcaaggagatgatccagcgggcgtcggcggccgagagcggcaccaccaccgtcaccaccacgtcgtcgtcgtcgtcgcagccgcccacgccgacgccgacgccgtcgccatcgccacctccgacgccgccagtgcagccggccagggacgcctcgccacagtgcagcttccccgaggacatacagaccttcttcggctgcgaggacgtcgcgggcgtcggcgccggcgtcgacgtggacgccctcttcttcggcgacctcgccgcgtacgcgtcgccggcgttccacttcgagatggacttgtagctcatcacacgccattactcgttaatcactatctgggttttttttttgtcgataggagaatggagctctctcgccatttgagaaccaagaaaatggtgagacacacaaaacaagagaggcagcagaacagacagacggcgcctagtctgttttgagagatttatttacagtggtaactagtgacatttactgaacggttaagattgtattattcaaatttttttcacattggtaacaagggattgtttcatttgtttcattcctcagttctgataaaagaaaagaagcaaccaatcaat

SEQ ID NO: 140899 - DNA, 80 bp, Zea Mays
ttattaagccatttaccacattaataattcaatcacggttaataaatgagattaatctataccctctattcttaacaaag

SEQ ID NO: 140900 - DNA, 231 bp, Zea Mays
atgaatatgctatcagggacttcagccagacaagctagtaaggtaattggaatcgctgaaggcctgttcgccgatgaagccgtgaaggggatcacatgcgtaccagccgaagatggggatcgacaggtccctgcgtctgcggtcatcgccggcgcgagggagacttcacccgtcggagatgcggctctggacgacatcgccggaacctgtggtgcaatgcctcggccgtga

SEQ ID NO: 140901 - DNA, 1810 bp, Zea Mays
gaccgtccccgcgtcggcgcgtcccgcacaccgcgctcccgctcggccgctcctgcctgcgcgctgcagcagctcggctgctcgcggtcgcttgtcccgtgcgcccggcggccggctgcttgccccgccgacctattcggctgcttcctgcttgagtgcttgtcccatccggcggcccggctgcttctgcttgttcgcttagtatcaatccaggctctgatttggtggctgaagctctgtttctccatggcgcttcgtttcgagatattaggaagattcaatcgcgcccgcgcagctcgcttaactcttcccccactttacttgtcaaacaccactttttatgcctgttggaactcaaggtacaataaaagggttaaccactgaccagttagaggagataggttgccagattatacttggaaacacctaccatcttgaattacgtccagggtctcaacttattgatgatttgggtggcctgcacaaatttatgaattggaaaagggcattgctgactgactctggtggtttccaaatggtttcgttgctgcatttggctgatattactgaggaaggagttacgtttcagtcacctgttgatgggaagcccatgctcttgacacctgaggaatctattcatattcagaacaatattggagctgatatcatcatggcacttgatgatgttgtaaagaccacaattactggcccgaggataaaagaagctatgtatcgcaccattcgttggattgacaggtgcatagctgctcacaagaaacctgatgtccagaatttatttgggattgtgcaaggaggattggatcctgttcttagagatatctgtgttaggagcttggttgagcggaatcttcctggatatgcaattggtggtcttgctggtggcgaagacaaggattcattttggcgtgttgttgcccaatgcactgctggattgcctgaaaataaaccacgatatgtcatgggtgttggctatccacttgatattgtagtatgcagtgctttaggtgcagatatgtatgactgtgtttatccaacacggactgctcgttttgggactgcacttgtgcctgagggtgtcctaaagttgaaacataattcaatggcgactgatgaacggccaattgatcatacgtgttcatgcatggtctgcaaaaaatatacgcgcgcctacttacattgcctggtcacaaaagatgctatgggttctcagctgctgtcatatcataacttatcatttatgatgcggttaagtagagacctccacatgtctattcttgaaggacgatttccagaattcgtgcgaggattcttgagggtgcagtttccaacgggagacgttccgcagtgggttcgcaacgcgatggaggtcgctggcattgacatatccgagtgctgtgcttccaccaatgtctgacaccaagcgtataggggccacctttaactgtaccggttgactgcaaatggagttgtgccgagttaagactcttcggcaagcaaaagacgacgacaggctttcacaaagaagtttttttccgtcatacatgtagggtctcacacggattcagcataggattttccaatagtatgctgaagcttggcgacaggttttgttagtgttttgtgttgtgtttggaaaccgcagaggtatgctatgctattcttctggggtctaggttatgcttcgtcttaatcactggatgtgatttttagtggtacggtcagatcaaaggaaggtgtacccaactctgacgaatattttttgttataacgaaaagaatgttatagtcct

SEQ ID NO: 140902 - DNA, 349 bp, Zea Mays
cgtcattatcactttgctctgatatatgcatgtctttcaggtcgctcggttaatgagtttgttgatgcctgcaagaaggcaactggggtcaacatcaaaattgggtacctcaacagaaggccaggagattatgcagaagtatacaacgacccaacaaagatcaacaaggagctcaactggacagctcaatataccgatctcaaagagagcctatcagtcgcatggaggtggcaaaagtcgcatccgcggggctacgggtcaaactaaataaagccagctgatctataattcacttaatcgtcgatacatattaattctttagttagagatataagatcttgctatgata

SEQ ID NO: 140903 - DNA, 2585 bp, Zea Mays
gttttaaggcattctaaacttagctctggacctcagttttcaaaactgcggtattataaactacggtattgtcataactaaagtatagtatagtatttcaaaaactgtggttttcaaaaactttgttcccaaacagggcctaagtgtgcaagtgcaagtgcaaccgcgagcgcgaccttttcccgtgggcgcctaggaaaaacagccgtttcctgcgcccgtccctcaccttcacgtcggcgaccgaccggcagaccgacaaactcgaggcaggccccaatggcgttggctcgcctccgcctcctcgaccgctacggtctcctgtcgccggcgctctctgcgacggcgctgcggtccttgggagacctgcgcgcgctctgcacgctctccaccacgctgcggtccggcgccggcgaggacgagatcgagcgcatccgccgcgagttcgatgacgccaagcgcaactacctcagcattcccgccgccatcaaggacatgcccaagatgaatccgcaaggcatttacgtcaacaagaacgtcaagctggacgacctccaggtctacggcttcgactacgactacacgctgtcgcactactccgagcacctgcaatgccttatctacgatcttgccaaaaggcacttggtcaatgagttgaagtatccggagagttgcttgcagtacgagtatgaccgcaccttccccatcaggggtttgtactatgacagacttaaagggtgcctactcaagcttgatttcttcggctctattgaaccagatggttgcttctttgggcggcaaaggctgagtttgagtgagataaaagagctctatggcacacggcatattggcagagatcaagctcgtcatcttgttgggctgatggatgtcttctgttttagtgaggcatgtctgattgccgatattgttcaacactttatagatgcaaaactggagtttgatccatcttacatatatgaggatgttaatcaatcgattcagcatgttcacagaagtggtttaattcacaggcaaattctttccgagcctgagaaatttctgataaaaaaaagccaggtgttccgtttcttgaagatgctgaaagagaaagggaaaaagctatttcttcttactaattcgcctttctactttgtagatggagggatgcgttatttgctagaggaccaacattttgatggaaattcctggagggaactgtttgatgttgtgattgcgcaggcaaataaaccaactttctataactcagatcacccattcagggtgtatgacactcaaaaggacaccttaacttttactgcagttgacaagtttctgccagatcaagtatactatcatggctgtttgaaatcatttctacagatcacaaaatggaaaggctcagaggtgatatattttggtgaccatcttttgagtgacttgagaggaccttcaaaagctggttggcgaacagctgctgtaattcgagaacttgaggatgaaatagaaatccaaaacggtgacagctaccgattccaacaggcaaaattgagtataatacatgatctacttgggaaagtccatgcagctgttgttagcaccgagaaaggccaagtctataaagcattgctcaatgagttgaatgcagaaagacgtcaatgccgatctgggatgcgagatttgttcaatacctcttttggtgcaacatttcttacagacacgggaagggaatcatcattttcctatcacattcatcaatatgccgatatttacacgagcaagcttgagaacttcttatcatatgcccctgaatcttggcttcatccacctcatgacataaagatcatgccacacaatgcgaaggtcccagcgagccttttcagtacctcctagttcatcctttctctatttcggtggagaaccaagccgtagtacccccacctatggtttctgtgcgtgaccacgtgacaggattgtggactgctgctgcattcgcttgcgttatactataactgaagcaccatatgatgcatcaatccagcagaccagcaagttagcattctctagaattgccatggaattatcagtcatgtgagtagttaaccgactcatttgcctgtatgacgaagcctctgttttccgtttaaaataaaaaaaggaagcatctgagaggccgcatacttgtgttcccatgaaaccctaccaacctgtaatggccgccaataaaacagtcacacgcaacccatctcgtttccccattttattcgcattctgctacactctttgctgcactcatgttacactgaactcgcctggtggcatctgacaagttttttgggatgagcagaagataatttgggttcgggcaacggataaattataaaatgcttatttgtccttgtctggaacaggaaggctatcttcaattctattgtttatggtcctagagactggatggagttccagttcttgctttgcatgaatgtggagatctggaatgtcaagaataatggcaattagtgcactcatatgaacacagaaaacataatattctgattcttcactgacgaagattttgttaaaaacta

SEQ ID NO: 140904 - DNA, 749 bp, Zea Mays
gttcagtcatgtttatttgccacatgcccagaaccagagccgtagccgtagccgtgtccctcgccgtagcctgagcctgaaccttctccgtatcctcttcctgaaccctcaccgtatccagatccttggccatgaccggagccgtaaccttcaccgtagccggatcctgatccttggccagagccggaaccggagccttcgccgtagccggatcctgatccttggccagagccggaaccggagccttcgccgtagccagatcctcgaccggatccacttccctgaccgtatcccgagccagacccagaaccctgtccctggcccgacccatgcccttcgccatatccagacccttgcccttgcccgtaccctgaacccgaacccgctccggacccagctcctgaacccgcaccagagccagagccagagccggcgccggcgccagatccagcatacgatcctgcaccagagcccgcactggacccggaacctgaggccgagccggagccggagccggagccagacgccgagccagagccagagccaccggcaccaccaccaccgcctatgccaatgctaatcccagcaccgatcccgatgcctgccccgctgccaccgccgaggtcgatgcccaggtccttccgagaaacgcggccctcggacgtgagaacgagggcggcaagcacggcgacaaggaaagcggtcatggtcggggctcgaggcatcctcctgagtcctgaccttccttt

SEQ ID NO: 140905 - DNA, 92 bp, Zea Mays
ctgcagtcggaggctgaaatagaacctgcagacgatgaagcacttgatccggcacttgaactacttccagaggaccacgccctgaagctagc

SEQ ID NO: 140906 - DNA, 1035 bp, Zea Mays
caaccactccgcgcactcgcgtcgcgcgccttttcggcacagcggcagcactgctccatccatgatcgctccccaacaccacggtcgcccacgcccacatgatcgcgcgcgctttgcggtacgtctcgcggccaaagctgtcgtcccccgtcggttcctcttggcgccgcgcatcatgcgcgccggctcctatataatatataagcgatcgagcagcacgccagcggctttctgcaccgcaccggtgagcccaagtgtccgagacttcgagcgcgcgtggtcgtctgcggatcgagttcgaggtggtgggatcgatggcaggaggcggcggcaggggcgctgcggctgcggctgcgagcgctctagcgctggcggctctggtgtgctcgctgtcctgcggcctcgcgcagggccgcgtggcgaggaagagcctcggcatcggcctgggcggcggcggtggcggcggaggcgacgggctgggcctcgggcttggactgggcctcggcgtcggcgcaggtaccggaggagtgtcggtgtctgggtctggctctgggtctgggtcggcgcctgtggtgggatctacctcagggtctaggtctgggtctatatccgttggaggggccagctcgtccgccggatcgagtgccggatcgtccgcgggctccactgggtcggcggccggctcttctgcgggctctggcggcgggcaagggtacgggcagggcggtgggagcgggtcgggatctgtgtatggggagggtagtgggtcgggcaatgggttggtgggtatagggactggccaggggtatggtcatggttctaacttcggtggaaatccttgaagtcataaaatgtttgtattgtatggcgcggtgtggtgtattttgttctataacagtggaatatactatcttttcttagaggtacatatacatatgactggcgtgtgtaaacgaaaggatttgtgtttggtatttcaagattttattaggtagtaattcactgtcttgtctcaagttattgtgagtaggaaat

SEQ ID NO: 140907 - DNA, 1116 bp, Zea Mays
cccaaaaagcccacgaactttcgacggttccttcctccctccctcccgctccaaccaaggcctacatatacgcccgcccaccacgcccccgaaaccatcaacccaacacggcgtccccgtcccgagtcaccaccgacccaagcaaaaccgcacgcaccctgccagcggccccccaactcccaacccaacccctactccagctagctcgcggcggcggccagcggccatggccttccggctgagcaacaacctgatcggggtcctaaacttcgtcaccttcctgctctccgtcccgatcctgggcgcgggcatctggctgggccaccgcgccgacggcaccgagtgcgagcgctacctctcggcgcccgtcatcgcgctgggggccttcctcctcgccgtctccctggcgggcctcgtcggcgcctgctgccgcgtcacctggctgctctgggcctacctcctcgccatgttcgtcctcatcctcgtcctcttctgcttcaccgtcttcgccttcgtcgtcaccaacaggggcgccggcgaggccgtctccggccgcggatacaaggagtaccgcctcggggactactccaactggctgcagaagcgcgtcgagaacaccaggaactgggaccggatcaggagctgcctccaggactccaaggtctgcaagagcctgcaggacaagaacgagaccgtcgcccagttcatgagttccagcctctcccccatcgaggtaattattaactatctatcgttcacgtcaaaaccgtatgtattgatccgtatgtctgccatccatagatacatacacagattaaagatctttttcacgtgtcgtttttgttacttttgtagtggttgagaattgtgatgtgacattggaagccaatccgccagtgccaaacgcaaaaaacttatctagggcgacagtgatggttacttgcacgattgtgcatacacatatagggtttatttggaatacataatagactcgattaattaaaattttattttttctaataaattttacttatcgattagtctctattttatttgctagaccatagttagctaatacttaggctttttatttggcttccaagacttgacctaaat

SEQ ID NO: 140908 - DNA, 1343 bp, Zea Mays
cccaaaaagcccacgaactttcgacggttccttcctccctccctcccgctccaaccaaggcctacatatacgcccgcccaccacgcccccgaaaccatcaacccaacacggcgtccccgtcccgagtcaccaccgacccaagcaaaaccgcacgcaccctgccagcggccccccaactcccaacccaacccctactccagctagctcgcggcggcggccagcggccatggccttccggctgagcaacaacctgatcggggtcctaaacttcgtcaccttcctgctctccgtcccgatcctgggcgcgggcatctggctgggccaccgcgccgacggcaccgagtgcgagcgctacctctcggcgcccgtcatcgcgctgggggccttcctcctcgccgtctccctggcgggcctcgtcggcgcctgctgccgcgtcacctggctgctctgggcctacctcctcgccatgttcgtcctcatcctcgtcctcttctgcttcaccgtcttcgccttcgtcgtcaccaacaggggcgccggcgaggccgtctccggccgcggatacaaggagtaccgcctcggggactactccaactggctgcagaagcgcgtcgagaacaccaggaactgggaccggatcaggagctgcctccaggactccaaggtctgcaagagcctgcaggacaagaacgagaccgtcgcccagttcatgagttccagcctctcccccatcgagtctggctgctgcaagccccccaccagctgcggctacacctacgtcggcggcacggactggacgccggtgaccaccaactcgacggacccggactgcaagacctggagcaacgacgcctcggcgctctgctacaactgccagtcgtgcaaggccggcgtggtggccacgttccagcggaactggaagcgcgtcgccgtcgtctgcatcgtcttcctcgtcttcatcatcatcgtctactccgtcggctgctgcgccttcaggaacaaccgcagagacaacgcctaccgcggcgggtggaagggcgggtacgcttgatccaccatcgcgtcgtttaggagcggagccatgcacgcgcgctcggtgctctgctctgctccctgcccgccgctgtcgtcgtacgtacatgtttagtaggctcgttgtagctctgtacaggtgatggagatcgttgttgcggattcttatcgtcttcctggttacatacttacattattgttatgatctgatcagcggtaggttttgtatacgctgctcattgattcgtctgcctgctattttcgtatatcgatgcacttgttttaccagttgctttcgttcacgcttttccacg

SEQ ID NO: 140909 - DNA, 246 bp, Zea Mays
actattcaccaaaaaggtctcaagattttttattaattgtctacgctcttcatataatattttttatttgactaactgatgttctgtttactccatccaatatgtcttggtacaattccggactagcacgattatattttttattttacaaaaaatcgtatatacatatgtacaatttatataaaatattaaaaatatctgagcattatgttctactgattagacgacttcaatcggtgtctttca

SEQ ID NO: 140910 - DNA, 621 bp, Zea Mays
ttactaaaattattcgttttccagatatttaccatgtgccatattctttttttatatatggcccttggttcacactaatcctctcacataccagttagccatgtgttctgtttgacaaggagaaggaaacaggaacaaggtcggaggagaagagaaactcaactccagctaatgacaagcccatgtgtgcattgtgataggtgagagcttcgaaggctagctgctgcttcttgcctcttgcatttctcttttcttgctcgcgctccaaatcttcttattgcggtggcttggcaagcgtagtggttgtctgtgtctgcctggcgacgacatttgctgcacgcgatctcttgcagtcgctactcgctacaacaaggcttctggggatgccattgttagctgattcttttcctcactggtgaagggcagctggttgcttcagctaaaagagtcgagcagaccaacaatgcaatttagctggagcatgatcagaattcttgtctgtactgcagacactgctctggggtctgtttatgcgcaacaacggtttatgagaggagaggtggcccccatctgtggccgcaaaggagcttggccaactgcgacaacgacatcctggctctg

SEQ ID NO: 140911 - DNA, 1369 bp, Zea Mays
gaatggtggccgcgccggagcagctgtccagggtgagacttactccgtacaggatgcaggggaactcccagagcgagttcagcttccagatctccaggtagttgttgggctccaggaacagcgccatggcggcgcactgcaaggtggccaggaggcacatccaggtcgccagagacacagggtccaggtacgacttgcagacgggcacctgaaacgccgccaccggtgagtgagtagtgagtgattcaccttcccagggcggatggtcggtcagtactcagtagttgcaatacctgcaagatgtaccagatggagacgcagatggcgtttcccacgaggtagatgcctcccttgacccagtcgctgttgtcgctggtggtcgagggaagagccgcgccgaggagcgccgggcccttgaagaacgccatggatgctgctcccgcgaggcagatggcggtgccgacgatcttggccacgctcctcgggctcctgatgtccaccttctctagcctgcgagccggatggatggcgtgccggagtgggggtaacaatttgggcagcccaaaacaggaaggaagaaagaaagaaacagtcacctacccgatgacggcggcaatggcgaaggtgatgcctggagcgaggttggtggtggccctggccatggacggcgaagccaggtggaggccctggaggtacaagtactggccagtggcgctgtcccattcgcactgaatcagaaaaaccagagcatgcagcaggcactccactagtctcctgtccactgactgaggatcatcacgactcacgtggctagggacgccgcgaagagcagcgcgaagccccgcgcgccgacggccatgggccgcagcgtgcaccccctggcggcgagcgacgcgaggaggagcgtggcggcggcgatcccctggcggtaggcgacgaagacgatggggcgcatgcccagcccgtacgccgtcttcagcgccacgtccaccagcgcgtagaacagctgcaccagcaccatccccacgctcggcccgcaccgctccagccacggcgccccgccgctggccatggcgcgcgacgcgaccgagatccgcgagcgcgcgtggagtggggagggcagaggtcagcgaccgtgatccactctctgtttctcgatcgcggcgcgcgcccagtatgtagctactcgatcggtcgatccgccgcctcggcagctaagtagtaggagctgggagcatccatgtgcgccgtcaccgttccattttttttaatggcttgagcgatttgtatccttctctgtttcctctcctggtcaaaccaatcgcggaggagctaatgcaagctgaccacgcagttctgctggaatctc

SEQ ID NO: 140912 - DNA, 1547 bp, Zea Mays
agaacacacaactgtcctggcctgtccacggtccacacacgccttccttatatcggcgctcacggttctataaaaaaaacacagtacgagcagagcaaggcggccgtgagctgagctgagggaaggacgacgtacggcacagttgctagcccggccgccggagctctccgtgatctgggccgccagcaacagcatgggtgccgcgctcttggcttcttggccatgggacaacctcggcttctacaagtacgtcctgtacgggccgctggtgggcaaggcggtggcgtcacgggcgtgggaggcggcgagccccgaccgctggatcctcctcctgctcctcctcttcggcctccgcgcgctcacctaccagctctggagctccttcagcaacatgctcttcgccacacgccggcgccgcgtcgtccgcgacggcgtcgacttcgaccagatcgacaaggagtgggactgggacaacttcctgatcctgcacgccctgatggcggccgcggcgctgtgcgcgttcccgtcgctgcggcatctcccggcgtgggacggccgggggttcgccgtcgcgctcgtcgcccacgcggcggccaccgagcccctctcctacctggcgcacagggcgctccacggcagcagcggccgcctctacgcgcgctaccactcgctgcaccactccagcagggtgccgcagccgttcacggcggggctggccacgccgctggagcacgtggcgctgggcgcgctcatgtcgctgcccctcgcggccgcgcgcgccgccgggtgcgcctccgtcgcgctcgccttcgcctacgtgctcgccttcgactccctccgcgccatgggccactgcaacgtcgaggtcgtcccggcctcgctcttccgggccatcccggccctcagatacgttctctacaccccgacgtacgtacgtgcgttaatcctctccctctggcctctgcctgcccgcttcttctctccgacgtccctcttttcaccccgattttatataaaaccatgcatctaaccgaactgatgtgcactctttctatcaccatcttctacagactctcgactattttagctagcagtgccaagtgaattatcctatgtctatttgttgctgcaacatttcgagctctgactggaaagcatacacagttactacgtactccatggcacatccacagttgtcagccaagaatacgtagaaatacatacatatggctctgcttgaaacatgaagcggtgctctgctaagctgcttccatctcgctttatggcttgtcgcgcaccagcttcgcttctaaccacctttaatttgcccacataatcacatatataatagtacgtacgtactacccgttgtcgttgcttgcttcgtactcctcctacctacgactacgacgtcgtagtatatatatatgtgcaatcacgtgctgaatcatgcatgcctggatgcctacgtacgtgacactactgattctgcatatgcatgcgtgatacagtgatactgttgtgtatcactctcatgcatggctggc

SEQ ID NO: 140913 - DNA, 2345 bp, Zea Mays
agaacacacaactgtcctggcctgtccacggtccacacacgccttccttatatcggcgctcacggttctataaaaaaaacacagtacgagcagagcaaggcggccgtgagctgagctgagggaaggacgacgtacggcacagttgctagcccggccgccggagctctccgtgatctgggccgccagcaacagcatgggtgccgcgctcttggcttcttggccatgggacaacctcggcttctacaagtacgtcctgtacgggccgctggtgggcaaggcggtggcgtcacgggcgtgggaggcggcgagccccgaccgctggatcctcctcctgctcctcctcttcggcctccgcgcgctcacctaccagctctggagctccttcagcaacatgctcttcgccacacgccggcgccgcgtcgtccgcgacggcgtcgacttcgaccagatcgacaaggagtgggactgggacaacttcctgatcctgcacgccctgatggcggccgcggcgctgtgcgcgttcccgtcgctgcggcatctcccggcgtgggacggccgggggttcgccgtcgcgctcgtcgcccacgcggcggccaccgagcccctctcctacctggcgcacagggcgctccacggcagcagcggccgcctctacgcgcgctaccactcgctgcaccactccagcagggtgccgcagccgttcacggcggggctggccacgccgctggagcacgtggcgctgggcgcgctcatgtcgctgcccctcgcggccgcgcgcgccgccgggtgcgcctccgtcgcgctcgccttcgcctacgtgctcgccttcgactccctccgcgccatgggccactgcaacgtcgaggtcgtcccggcctcgctcttccgggccatcccggccctcagatacgttctctacaccccgacgtaccacgcgattcaccacaccaagaaggaggccaacttctgtctcttcatgccgctgttcgatctgctgggtggcacaatcgaccgacgctcgtgggacatgcagaggaagatgagcgcaggtgtggacgaggtgccggacttcgtgttcctggcgcacgtggtggacgtgatgcagtcgctgcacgtgcccttcgtcatgcggaccttcgcctccacgcccttctccgtgcagctcttcctgctgcccatgtggcccttcgccttcctcgtcatgctcgccatgtgggtctggtccaagaccttcgtcatctcctgctacaacctccgcggacggctgcaccagatctgggccgtccccagatacggcttccagtacttcttgccgtttgccaaggacggcatcaacagacagatcgaactggccatcctcagggccgacaagatgggcgtcaaggtcctcagccttgcagccctgaacaagaacgaggcgctcaacggcggcggcacgttgttcgtgaacaagcaccctgacctgcgcgtgcgcgtcgtccacggcaacacgctgacggcggcggtgatcctgaacgagatccccaagggcacggcggaggtgttcctgacgggcgccacgtccaagctcggcagggccatcgcgctgtacctgtgcaagaagagggtccgcgtcatgatgatgacgctgtcgacggagcggttccagaagatccagaaggaggcgccggcggagttccagcagtacctggtgcaggtgaccaagtaccggtccgcgcagcactgcaggacgtggatcgtcggcaagtggctgtcgccgcgggagcagcggtgggcgccgccgggcacgcacttccaccagttcgtcgtgccgcccatcatcggcttccgccgggactgcacctacggcaagctcgccgccatgcggctgcccaaggacgtgcggggcctcggcgcctgcgagtactcgctggagcgcggggtggtgcacgcgtgccacgccggcggggtcgtccacttcctcgagggctacacgcaccacgaggtgggcgccatcgacgtcgaccgcatcgacgtcgtctgggaggccgcgctcaagcacggcctccgccccgcgtgatccgattgctggccccccgccggctcgaacgcctctgttgtaccaaccaggccgaaacgaacgggcctggctttgttactttccctttgttttccaagttcgtcgagtgtgaattggtggttcctggagattcaattttcttttcctgcttcctccacaatatgtatactgtaaactatataatctgtatactatatacaagagacaaaaggatgtaatgagagaaaatacaaggacaaaaaatatcaatatctataacatcaaagcaaattctttcatcatttct

SEQ ID NO: 140914 - DNA, 1572 bp, Zea Mays
gtccacggtccacacacgccttccttatatcggcgctcacggttctataaaaaaaacacagtacgagcagagcaaggcggccgtgagctgagctgagggaaggacgacgtacggcacagttgctagcccggccgccggagctctccgtgatctgggccgccagcaacagcatgggtgccgcgctcttggcttcttggccatgggacaacctcggcttctacaagtacgtcctgtacgggccgctggtgggcaaggcggtggcgtcacgggcgtgggaggcggcgagccccgaccgctggatcctcctcctgctcctcctcttcggcctccgcgcgctcacctaccagctctggagctccttcagcaacatgctcttcgccacacgccggcgccgcgtcgtccgcgacggcgtcgacttcgaccagatcgacaaggagtgggactgggacaacttcctgatcctgcacgccctgatggcggccgcggcgctgtgcgcgttcccgtcgctgcggcatctcccggcgtgggacggccgggggttcgccgtcgcgctcgtcgcccacgcggcggccaccgagcccctctcctacctggcgcacagggcgctccacggcagcagcggccgcctctacgcgcgctaccactcgctgcaccactccagcagggtgccgcagccgttcacggcggggctggccacgccgctggagcacgtggcgctgggcgcgctcatgtcgctgcccctcgcggccgcgcgcgccgccgggtgcgcctccgtcgcgctcgccttcgcctacgtgctcgccttcgactccctccgcgccatgggccactgcaacgtcgaggtcgtcccggcctcgctcttccgggccatcccggccctcagatacgttctctacaccccgacgtacgtaccacgcgattcaccacaccaagaaggaggccaacttctgtctcttcatgccgctgttcgatctgctgggtggcacaatcgaccgacgctcgtgggacatgcagaggaagatgagcgcaggtacacacgtcgtctcgttttatgtccctggtccatgacaggccaccaaactacctatattggactaacccattttagctttaacaaccttactagctaaggcatccacacacacatacccatacaacttagcaatcctgcactagccggaacactgacactgaaacaaagagcggacccctttgaccagaactgcctagtaaacagacatcaagaaagagtgttagggcaaccagccgctacagacaagctaaacatccaccaacgagctctttcaccacctgcgcaacttgctctgttgttctctgttgtccattgaagattatgttgttgctttccaaccatacgctccaccagaagtaaattagtaggccatcgaaactttttcttgattgcttgctatagagcatcctcagtctatgccaccaagtgtatagggttcccgtctttggagtaccgtctaggaaccacagatcggtccaagacaagatcatgctccacacttcctcatatatcaccaaagcaaaaaaagaagaaaggaa

SEQ ID NO: 140915 - DNA, 1492 bp, Zea Mays
aaccccaaaacgcagcccacttccatcgaagctacgaaacccatgtcttagcgcggccttggtgccgtcgactcgacgcgctccaccatggcgccgccgcgaagcctcgccggcgccgccatagctgccacagccgcagccatcatcctctcatgcttgttctacaggcgcaaatgcgctcgtctggccgcgcgggtccgcgagttggaggcgtcactggcggtcactgcagagaaggccgccgccgagcgccgcggcagagtgcgggcccagcagtcactgagggctctgagtcagctggagcctggttccgacgaagcgaggccgaccaaggccgccgcctcagcatcttacccgctggtgccgattggtactgtcgagtcctgcttctccactaggaacggtacaccaaggcagcctttggtagttacattagccagggcaactttggtgcttgatccagcccgagtcccagcagcagcgctggaggggctagctagttactcacattgctggatcctttatgtttttcatctgaacactgatcttgataaactgtggaaagatcctgctaggtctaagctaaaagcaaaggtaagggtaccgagattgaaagggggcaagatgggggttttggcaactagatcgccacatcggcccaatccaatcggactcagcgtagcaaaggtggaggcggtgaatggacatactcttttgctttctggagtagatttggttgatggcacgccagtccttgatattaaaccatacctgccatattctgacagtgttaaaggtgcagctgttcccagttggttagaggttgacggtgcgttagcggtggagtcagtccatttttccgaacacttcatttctgcgctctccacctgctggatgcatgtacagcagatgtcgctgtatgcttcagcagacgagttccaggatctgatcaagcaggccctttcctgggacatcaggtcgatatcacagcggaaccgtccccatcaagtgagcgtggaagctgatgccaacggccactgtggcgaagacactgatgatgaccaccaccacagggacacaggtcgctacggtgtggtttaccacttacatcttgaaggcatcgatgtgtcgtataggatcgatcagggctccaacattttcgtcgaggacgccacccttcttccagacgccgtccagaaacggcatggttatttggcgtggagggacaaacttggcagcagcgttttgtagcatggccatggcgcagcgttttgttatcgttttcaggagtgctgcagtgtggtgtaggatgtcagtagtgatgccaatgaatttgaatgtggtggcgtctagtatctgaattggatttggaacgtataccccctgttttgcgttgagtctctgatttcttgatgttacacacaagcagaggatctggcagatcataagtacattgaaaaaaagatgagaaaaaggtgacatccgttgagag

SEQ ID NO: 140916 - DNA, 1489 bp, Zea Mays
aaccccaaaacgcagcccacttccatcgaagctacgaaacccatgtcttagcgcggccttggtgccgtcgactcgacgcgctccaccatggcgccgccgcgaagcctcgccggcgccgccatagctgccacagccgcagccatcatcctctcatgcttgttctacaggcgcaaatgcgctcgtctggccgcgcgggtccgcgagttggaggcgtcactggcggtcactgcagagaaggccgccgccgagcgccgcggcagagtgcgggcccagcagtcactgagggctctgagtcagctggagcctggttccgacgaagcgaggccgaccaaggccgccgcctcagcatcttacccgctggtgccgattggtactgtcgagtcctgcttctccactaggaacggtacaccaaggcagcctttggtagttacattagccagggcaactttggtgcttgatccagcccgagtcccagcagcagcgctggaggggctagctagttactcacattgctggatcctttatgtttttcatctgaacactgatcttgataaactgtggaaagatcctgctaggtctaagctaaaagcaaaggtaagggtaccgagattgaaagggggcaagatgggggttttggcaactagatcgccacatcggcccaatccaatcggactcagcgtagcaaaggtggaggcggtgaatggacatactcttttgctttctggagtagatttggttgatggcacgccagtccttgatattaaaccatacctgccatattctgacagtgttaaaggtgcagctgttcccagttggttagaggttgacggtgcgttagcggtggagtcagtccatttttccgaacacttcatttctgcgctctccacctgctggatgcatgtacagatgtcgctgtatgcttcagcagacgagttccaggatctgatcaagcaggccctttcctgggacatcaggtcgatatcacagcggaaccgtccccatcaagtgagcgtggaagctgatgccaacggccactgtggcgaagacactgatgatgaccaccaccacagggacacaggtcgctacggtgtggtttaccacttacatcttgaaggcatcgatgtgtcgtataggatcgatcagggctccaacattttcgtcgaggacgccacccttcttccagacgccgtccagaaacggcatggttatttggcgtggagggacaaacttggcagcagcgttttgtagcatggccatggcgcagcgttttgttatcgttttcaggagtgctgcagtgtggtgtaggatgtcagtagtgatgccaatgaatttgaatgtggtggcgtctagtatctgaattggatttggaacgtataccccctgttttgcgttgagtctctgatttcttgatgttacacacaagcagaggatctggcagatcataagtacattgaaaaaaagatgagaaaaaggtgacatccgttgagag

SEQ ID NO: 140917 - DNA, 1595 bp, Zea Mays
aaccccaaaacgcagcccacttccatcgaagctacgaaacccatgtcttagcgcggccttggtgccgtcgactcgacgcgctccaccatggcgccgccgcgaagcctcgccggcgccgccatagctgccacagccgcagccatcatcctctcatgtaacctctcactcttccctcacctcatcgtttctagctccaagttcccagcatcaacctctcctccctcaccaacgtgcctatccggctatcccacaggcttgttctacaggcgcaaatgcgctcgtctggccgcgcgggtccgcgagttggaggcgtcactggcggtcactgcagagaaggccgccgccgagcgccgcggcagagtgcgggcccagcagtcactgagggctctgagtcagctggagcctggttccgacgaagcgaggccgaccaaggccgccgcctcagcatcttacccgctggtgccgattggtactgtcgagtcctgcttctccactaggaacggtacaccaaggcagcctttggtagttacattagccagggcaactttggtgcttgatccagcccgagtcccagcagcagcgctggaggggctagctagttactcacattgctggatcctttatgtttttcatctgaacactgatcttgataaactgtggaaagatcctgctaggtctaagctaaaagcaaaggtaagggtaccgagattgaaagggggcaagatgggggttttggcaactagatcgccacatcggcccaatccaatcggactcagcgtagcaaaggtggaggcggtgaatggacatactcttttgctttctggagtagatttggttgatggcacgccagtccttgatattaaaccatacctgccatattctgacagtgttaaaggtgcagctgttcccagttggttagaggttgacggtgcgttagcggtggagtcagtccatttttccgaacacttcatttctgcgctctccacctgctggatgcatgtacagcagatgtcgctgtatgcttcagcagacgagttccaggatctgatcaagcaggccctttcctgggacatcaggtcgatatcacagcggaaccgtccccatcaagtgagcgtggaagctgatgccaacggccactgtggcgaagacactgatgatgaccaccaccacagggacacaggtcgctacggtgtggtttaccacttacatcttgaaggcatcgatgtgtcgtataggatcgatcagggctccaacattttcgtcgaggacgccacccttcttccagacgccgtccagaaacggcatggttatttggcgtggagggacaaacttggcagcagcgttttgtagcatggccatggcgcagcgttttgttatcgttttcaggagtgctgcagtgtggtgtaggatgtcagtagtgatgccaatgaatttgaatgtggtggcgtctagtatctgaattggatttggaacgtataccccctgttttgcgttgagtctctgatttcttgatgttacacacaagcagaggatctggcagatcataagtacattgaaaaaaagatgagaaaaaggtgacatccgttgagagaact

SEQ ID NO: 140918 - DNA, 1335 bp, Zea Mays
ttggtgccgtcgactcgacgcgctccaccatggcgccgccgcgaagcctcgccggcgccgccatagctgccacagccgcagccatcatcctctcatgcttgttctacaggcgcaaatgcgctcgtctggccgcgcgggtccgcgagttggaggcgtcactggcggtcactgcagagaaggccgccgccgagcgccgcggcagagtgcgggcccagcagtcactgagggctctgagtcagctggagcctggttccgacgaagcgaggccgaccaaggccgccgcctcagcatcttacccgctggtgccgattggtactgtcgagtcctgcttctccactaggaacggtacaccaaggcagcctttggtagttacattagccagggcaactttggtgcttgatccagcccgagtcccagcagcagcgctggaggggctagctagttactcacattgctggatcctttatgtttttcatctgaacactgatcttgataaactgtggaaagatcctgctaggtctaagctaaaagcaaaggtaagggtaccgagattgaaagggggcaagatgggggttttggcaactagatcgccacatcggcccaatccaatcggactcagcgtagcaaaggtggaggcggtgaatggacatactcttttgctttctggagtagatttggttgatggcacggtaccaatttgagcatttccagtccttgatattaaaccatacctgccatattctgacagtgttaaaggtgcagctgttcccagttggttagaggttgacggtgcgttagcggtggagtcagtccatttttccgaacacttcatttctgcgctctccacctgctggatgcatgtacagcagatgtcgctgtatgcttcagcagacgagttccaggatctgatcaagcaggccctttcctgggacatcaggtcgatatcacagcggaaccgtccccatcaagtgagcgtggaagctgatgccaacggccactgtggcgaagacactgatgatgaccaccaccacagggacacaggtcgctacggtgtggtttaccacttacatcttgaaggcatcgatgtgtcgtataggatcgatcagggctccaacattttcgtcgaggacgccacccttcttccagacgccgtccagaaacggcatggttatttggcgtggagggacaaacttggcagcagcgttttgtagcatggccatggcgcagcgttttgttatcgttttcaggagtgctgcagtgtggtgtaggatgtcagtagtgatgccaatgaatttgaatgtggtggcgtctagtatctgaattggatttggaacg

SEQ ID NO: 140919 - DNA, 418 bp, Zea Mays
attatttgtgatcttttctttttctataatgtagtgaggaaatggtgccgacgcttcttttcgcaaacgtttcagagtatcacagcgaatttacatgtgcctgctaaacgaattaaatccttgcgaaaaaaggctaaacaaactgaatgaaatggtcaaattactgcatttcacgcaacggaatagcaattgcatgatgagagaagtagtgatattttcatttggcagaatgtgcagcttcgatttcgttatgctcatcggcgctcctgtttttgcttcgacggggaggaaaaacgtaagccatacttgttgtggcgccgccgcgccggtggtggctctcggacgcggcgtttgtttcttcatgcatggcccatggccatgggcatgcccaataccaacgttcagcgggtcctctgcc

SEQ ID NO: 140920 - DNA, 528 bp, Zea Mays
atgaaagcgggagcggctgcaggtcagctggcagcgggtgcgcgctcgtctggttccgcggcactctcgttccttcctctcgccgtcctcctcctctgcctcgtcggcgccgagcaggcgccggcccttgctgccggtgccggagacaggcgggtggacgtgggggtgatcctggaccgaacgacatggctggggaacatcagctgggcgtgcatggagctggccctccatgacttctatgccgacgcgagccacgccaactacagcaccagggtcaagctgcacctcagggacaccccagccgggccgagcgccgtcgacgccgcgtcggcaggtggagtaaagaagatggccctttatttggctcttctagctagagtcggtcaggtcagtaaactggatcttcaaagccgatctaaagatagagagaatcacattgatcccttcaattctaagaacatcaaccatctgatatcacttgaacaacttcctaatgagcttcatcagaagattcagaatcaagcttga

SEQ ID NO: 140921 - DNA, 1288 bp, Zea Mays
cctgacgtgagaaaaaaatatcgtgcccactgcggtggtcggctcgagccaagccagaaaggacccaatagccaatgtggtctgtcagtcgtgggctcgccgttgactaaagcagacaccagctcagcccaacgacggcccagagagttctagcccatagcaacatgccaacatcccgccccggagctctcagttctcacttttcggacggcagccgacgacacttccggcgggcggcggcgaaagattctccttctcccgcgccgccgggaccctatcgactcgctcctgctctccttgtcgtttcatttctctcggcatttaggtttgtgcacgcaaattggggtttcccatggttccatggacgcctgagagctacaatgccgaatacgtagctcatccttgctttcattttggataagcccatagatgcttattttaaaccttgttttttttctgcttctgaagtttcccttttgcatcctagtctcagaatccctggatctgctgcaggtttcaaactaattttgcatgctcaggtgttgatttactgaaaaatgtccatgtgcaagcaatcgtcgggccacagacatctactcaagctaaatttcttacagagcttgggaacaagacatcagttccaatcatttccttttctgcaaacagcccgtcccggtcatccagccagaccccatatttcatcaggacagcatggaacgactcctgccaagctgaagctattgcctcacttgtccagaaatacaattggagggaagtcattcctatcatcgaggacgatgattccaacactagatttatccctgatctcgttgatgccctgggacatgtcgatactcgtgttccgtacaggtgcaagatccatccttctgctggagaagatgagataaagcatgctatatcaagcttaaaagaatattggacaagtgtctttgttgtgcgcatgtcatatcagttagcccttaagtttttccagcttgctaaggatgagggaatgatgggccagggctttgtctggattacagcatatggtttgacagatatcttcaatgtagttggttatcctgcacttgatgtgatggaaggtgttgttgggattgagccttatgttcaagaaactgcgaaactaaacaaatttaggcaaagatggtgtgagaaatataggtcagaaaatcctggtacatcaattaatgagtctataacgtctggtctgtatgcgtatgatacagtatgggcaatagcattggctgcagagaaggccggatatgtt

SEQ ID NO: 140922 - DNA, 282 bp, Zea Mays
ataaacacaaaagcaccacaattatatattcacaaaagaatcacaattataacatcattcacaactagatcatttacagatagctagctagatcattcacaaaagctccagagatgatcagtcacaaaagcaccacaacgacatcactccagcttgaagcagttcaaaagcccacaactacatcactaatgtttcatatcactccagctattgttcaaaagcccacaactaccagctcttcttttaaatcaacgttgaaacagcagataggagctgagcaag

SEQ ID NO: 140923 - DNA, 237 bp, Zea Mays
atgccccagcccctgttcgcaggtcgcagcagccgccagcacctagatcctagagtcccagaccatgccgccaccgcgccaccggagtctagtggccagccactgccctcatccactcgcgagcagatcgtcagtgagagatggaagaagccgcagcggccatggcggcttaaaagagcggaggagccaggctatgagctacagaggttcaatccatgcagagatgctagtggatag

SEQ ID NO: 140924 - DNA, 994 bp, Zea Mays
aatttttttttgttgaaatttccatcgggctttatcgccaaaaaccagggaactctctgttcgatagatcgatcgattaatctgctgtataagtagataaattggttaaaaaccgagccaatttaaaatttattttggatttaaattctaccggtttctattagtttacgtcgatttatcgtgatttgctatgcgttcgacggcacacggcactacggcagtggcagtgcccagcggttagcggcgagagaagagatgccgctggccgccgctgtttctctcccctcgcccacgccagggccgcgcgagccccgcctccgtcggactctcgatgccgtccaccgaccttcgccgcctcactgcccgcatcgtcgacctcccgccgggctcgcccagatcatggaggacgtggaagcaactgcgcgggggcgggtttcgcaacaccatcggcatgaacgtggttctagaggcctgcgtgcgctgcggcgacgtcgaccgcgcgctccggctcttcgaggaaatccgtgggcccagggggtgtggtgtcgacggtgtcctacggcatcctgctcaaggtatgcgattgtggtatctgttcatgcacgcaaccttgacacatgcaattgccaaaactcatttggtcaattgtttgttctaactgtttgagtaacgatggaattgtggagatgaactgaagaaacattgtgagtccaacaacagatctatcctgaacatgcatgataaggatgcatatccagtaagtcctgtttggcattgatggaagagaaatgacactcgtctttgtttactaattgtttgctgaggttgttgtagcatcagtttgctagatttcccacaaattgttactaaacatttcatgtaagttgtacacaccatgacttaattctctgtctgtttttgccaaaaccagttgtaatattagtggtctcaccggtcatccaagcagcaaattacatttttgggtggaacaata

SEQ ID NO: 140925 - DNA, 580 bp, Zea Mays
aaattaagaggaagatcaagtctagcaattaatctacatatctgagttctagcacgattaggacagtatcccattcgcagccaaagttgaaagcttatatggatacaccaactctcttctaaggccctgcatatttccacaggtggtacattcttatcttgtatccctttctctgctttactctgttcaaatctgaagttctgtccattgaaattatagatattcttgaatgatccagttgagaagtatatggttccatttcaagaatctgaaccattacctgctgacttaatcttagggaaggctgtgatatgattcttgaaagatgacgactcagttcctgttgtcgatgattggggaggttgtgttggtattgttcaccgtgatgattgtaccttgattgtaccaaggtacgctgcgctgtctccttcaatccgcgtcagaaacacatggtcgatccttggacgcaaagctaatgaaacggttgtcactgatttcagcagatagattccttttttgacacgtcgttttcttaatgattttggccaagctaccgatgtctacaaagaaaaaaaaacaa

SEQ ID NO: 140926 - DNA, 473 bp, Zea Mays
atgacgactcagttcctgttgtcgatgattggggaggttgtgttgctggatgcacctcttcttgtgcctacttcaaccaccgtggagcacgtcattgacctactcctcagggagaaatccgagatggtggtggtgaagagcggtaacatgtacgaaggcagctcaagacccttgggtattttctccctcgccatgctgtggagtttcaccagcgactactcgtcggaatcagatgtcctcgacccaggcgtctcctgggcaaccaaaccaaaacaagatgtcgacacctacaatcacggctgattcagcagctagtttggtgtcctttaccagcttatagcaattgtagtttagatggttagctggtctgagtatgttcgagttgtcttatctgtatgtcagagtttttttctttttcttttttcttatagcaagtccgcatcgtgatgccgcgcaaaccagtaatgtaatgg

SEQ ID NO: 140927 - DNA, 104 bp, Zea Mays
ccaaaaactctgcatctaaaactgttaggaacgaatacgacgcaaagaagctcaatcacatagaagacacagatttaacatggaaaacccctccaaggcgaaga

SEQ ID NO: 140928 - DNA, 824 bp, Zea Mays
ctcacagccaaggaaatcttccgttctcaaaccaacctaggcaattcgccgcagcctctcaccctcgcgagtcccgacctcccgcagccgccgcacagatggcacccaaggcggagaagaagccggcggccaagaagcccgcggaggaggagcccgcgacagagaaggtggagaaggctccggcggggaagaagcccaaggccgagaagcgcctcccggcgggcaagtccaaggagggcggcgagggcaagaaggggaaaaagaaggcgaagaagtccgtggagacctacaagatctacatcttcaaggtgctgaagcaggtgcaccccgacatcggcatctcgtccaaggccatgtccatcatgaactccttcatcaacgacatcttcgagaagctcgcggccgagtccgccaagctggcgcgctacaacaagaagcccaccatcacctcccgcgagatccagacctcggtgcgcctcgtcctccccggcgagctcgccaagcacgccgtctccgagggcactaaggccgttacgaagttcacctcgtcttaggatccttgtaatggtcatgtgggcgtcggcggtaggcgtggctcagtttatgtgatactgctagcgatggatgatgatgatctgcgtgtaattgaattaaagaattgtgctgatctttctacaacactgttccacatcactcgttgcccgccagtgagccgccaattacatgtgcaaatctacatcaactttctgaaagaagctagttacttgaatttttttggttgcattgaaaacatgaaatctttaatgcttaaaaaagttagaaat

SEQ ID NO: 140929 - DNA, 1060 bp, Zea Mays
tccccgcgcgcaccaccacaaaaatgaaagaaaaacctcgatcaatcacgcgctcctcgatccgccctcccgcacctccaccaatagcagtcgagctcattccatccaacggtccgcgccatacctcgcgcccctcacgcggatcgcgccgcatccaacgcctcccgcttcgcctcgcatcgctatattactcatcgccgcctgtccacatccaatccatcttctcccccagctccccagcaccagtccccaattatttggcctccgtcagagaggggagaaagacccgttcgaggcggcggcgatgtcggggcgcggcaagggcggcaagggtctgggcaagggtggagccaagcgccaccggaaggtgctccgcgacaacatccagggcatcaccaagccggcgatccggaggctggctcggaggggcggcgtgaagcgcatctcggggctcatctacgaggagacccgcggcgtgctcaagatcttcctcgagaacgtcatccgcgacgccgtcacctacaccgagcacgcgcgccgcaagaccgtcaccgccatggacgtcgtctacgcgctcaagcgccagggccgcaccctctacggattcggaggctaggcgcctcttcgtagctggggaatgcttagggggatacacgtctctgtcgctgtgggccatagtgttgctgcgttcctggatgtaatccatttatttttctgcaatgaagagatgctggcaagcatgctacctgcatatgtcagaaatggtagtaacagtgaatctttgttcacgaaccaacatgttttcgtgcttttggttgttcctatttcggtttactgcccagtgcgtcagtttacaggcggtgacaatttggcacccaattagcaaacctttcaaggtgtttcggtgccgttcatcgatcatggacgggagacccatttcccaagggctagaagccatgaggttcacatcgatgctgcgccaggaggcagtcggacatcttaaggtggtgtggtcgcataccgccctccaaaaaaagctttccggctagattatttttat

SEQ ID NO: 140930 - DNA, 267 bp, Zea Mays
atgtcggggcgcggcaagggcggcaagggtctgggcaagggtggagccaagcgccaccggaaggtgctccgcgacaacatccagggcatcaccaagccggcgatccggaggctggctcggaggggcggcgtgaagcgcatctcggggctcatctacgaggagacccgcggcgtgctcaagatcttcctcgagaacaccgtcaccgccatggacgtcgtctacgcgctcaagcgccagggccgcaccctctacggattcggaggctag

SEQ ID NO: 140931 - DNA, 261 bp, Zea Mays
atgtcggggcgcggcaagggcggcaagggtctgggcaagggtggaccggcgatccggaggctggctcggaggggcggcgtgaagcgcatctcggggctcatctacgaggagacccgcggcgtgctcaagatcttcctcgagaacgtcatccgcgacgccgtcacctacaccgagcacgcgcgccgcaagaccgtcaccgccatggacgtcgtctacgcgctcaagcgccagggccgcaccctctacggattcggaggctag

SEQ ID NO: 140932 - DNA, 107 bp, Zea Mays
cggaaggtgctccgcgacaacatccagggcgtcacctacaccgagcacgcgcgccgcaagaccgtcaccgccatggacgtcgtctacgcgctcaagcgccagggccg

SEQ ID NO: 140933 - DNA, 891 bp, Zea Mays
caacggttcacgccactcctctcacttctgacgcggatcgctccccatccgacgcctccaacttcctctcccacctctatatattgtcttccaccgccagccgatacattcaccaaagtccaagcaccttcccaaaaaatcccccattttcttcgaggcgaggagagcgtgaaagacagggcaccggcagcgacgatgtcggggcgcggcaagggcggcaaaggtctgggcaagggcggagcaaagcgccaccggaaggtgctccgtgacaacatccagggcatcaccaagcccgccatccggaggctggctcggaggggcggcgtgaagcgcatttcggggcttatctacgaggagacccgcggcgtcctcaagatcttcctcgagaacgtcatccgcgacgccgtcacctacaccgagcacgcacgccgcaagactgttaccgccatggacgtcgtctacgcgctcaagcgccagggccgaaccctctacggcttcggaggctaggctggatgcctcttctccttgctgtcgtggatgcctgtttgttgttagggttacttcgtttagttccttgtctgtgacgtgttggactattgttagtagtattcttgaagttgtgtttcgaatgtaatccaatcttatcgttcgagaattgaaatgattcctgggcaacattttgcaggcaatctcgttcgagagttaggtccattatatctgttaagattttttttccatacagcattgactaagtatgaagcccattccatcctgaagatcgtgtatttcagagttgcaattcagttgtcaaagttctagcgtgtatgctaaaattttaagagggatacatcgtctccttgctgaatgaatttgtctcatgatctgaagcta

SEQ ID NO: 140934 - DNA, 267 bp, Zea Mays
atgtcggggcgcggcaagggcggcaaaggtctgggcaagggcggagcaaagcgccaccggaaggtgctccgtgacaacatccagggcatcaccaagcccgccatccggaggctggctcggaggggcggcgtgaagcgcatttcggggcttatctacgaggagacccgcggcgtcctcaagatcttcctcgagaacactgttaccgccatggacgtcgtctacgcgctcaagcgccagggccgaaccctctacggcttcggaggctag

SEQ ID NO: 140935 - DNA, 261 bp, Zea Mays
atgtcggggcgcggcaagggcggcaaaggtctgggcaagggcggacccgccatccggaggctggctcggaggggcggcgtgaagcgcatttcggggcttatctacgaggagacccgcggcgtcctcaagatcttcctcgagaacgtcatccgcgacgccgtcacctacaccgagcacgcacgccgcaagactgttaccgccatggacgtcgtctacgcgctcaagcgccagggccgaaccctctacggcttcggaggctag

SEQ ID NO: 140936 - DNA, 567 bp, Zea Mays
atgcccaaagggaaagtgagttgcaaagcaacttaccagagcataagcttgtggctgtgcaacagcagcattaccagagatattaagcctgataatttgcttctagataaaaatggtcacatgaagctgtcagattttgggctgtgcaagccaattgactgttcaaagctctcaacgttgagtgaagatgaacccatgggtgatgacaacatgagggaatcaatggatattgatagttctttgtccaatacagcaaatggtagaagatggagaagtcaacacgaacagcttcagcactggcagatgaacagaagaaaactggcattctcaactgttgggacaccagattatattgctccagaggttctgctgaagaagggatgtgaaatggaatgtgattggtggtctctaggcgcgatcatgtatgagatgctagttgggtatccaccattttatgccgatgatccaataactacatgccgaaaggtttgtttttcgtcggcatttatttggctcagttctattgttttatcttattaatatagtttgttgaatgttatttagctt

SEQ ID NO: 140937 - DNA, 2004 bp, Zea Mays
cgacgcggggggcaggacgtggcagagcgccgcccaggcggacgccaagtgccgagctaccagggcaccttctttattccgtccttgctcagtcacacctcgctctcgctcactctcgccgtccgcacagccgctcatcgtctcccactgcctgccctctccctgcgccggccggtgccccgacgcgccatgtcgtacaacaaggccccgtccatcaccgccgagaccataaatcccagggtcaagatcatcagatacgcgccttgcggggagatcgtcaagcacgcagcgcggctggagcaggagatagaggagaaccctgcttctatccctttccaagagataatatactgcaacctcgggaacccccaggtccttggtcagccgccactaactttctttcgtgaggttctctccctgtgcgacaacccagccctcatggacagagatgaagctcgtgccttattcagcccttgtagcataagaagggccaggaggatcctaaactcgatccccagcaaagacactggtggatatactgattgccggggaatcaaatgcctgcgtcaagtagtagcagatgggattaccgcaagagacggttttccatcgacagcggacgatatctttctgacagatggagccacctcagcgatcaacttgatgatgcagatactcatcaggtctcacgaagacggcatcttgagccctctacccgaataccccttgtactcggcctccatcatactgcacggtggaacgatggtgccgtacaatctcactgaagataacggttggggcctagagatctttgaagtcaagaggtgcttggaagaggctcgttcggctggcctcactgttagagctatggtggtaataaatcccggcaaccctactggacaggtgctatccgtcacaaaccaggaggagatagtagagttttgtcggaaggaaggtctggttatacttgctgatgaggtataccaggaaaatatctacgcagagaacaagaagttccattccttcaagaaagtggccagatcacttgcttacgacgaaaatgacctcaccctagtatcacttcattccgtttcaatgagctatggggagagtggcagaagaggaggctacatggaggtgtctggtgttgcagctaatgtgaaggatcagatttacaaggtggcttctttaacactctgccccaacattgctggccagattctcgtcagccttgcaatggatccaccgaagctaggagatgaatctttcgagtcatttgataaggagaaggaacagatccgttcatccttctgcaagcgagccaagaccctggagaaagctttcagcggcctggagggcgtgacttgcaacaagttagagggtgcgctgtacttgttcccacggctccacctcccctccgctgcgatcagggccgccgatttcgagggagtttcacctgacatattctacgctcaccgcctgcttgatgccaccgggattgccgttgtgccgggctctgggttccaccaggcctctgggacgatccatatccgatgcacgatccttcctgacgaaagaaaaatcgaggcgatggtcgcacgcttgagggcgttccataaggcgttcatgaacgagttccggggctctcagcaggtcatgaacgatctccgtcgctgatggtgtcgatgcatggcacggttaggcctgtgcgtgtgcccatgggcaatcaagacaacttctgagctctggagttgttgtttgttgttctgtgttcttgcttcctcgttgagctgtgccccgtttgtcctcacttatgcagtcagtggtctgtctgtagtctgtactgcttaaagataagctgtgctttcaggaataaaaagtctgcagcttgtgcatatatatactgactccgttctcaaatattatatttatggtaggctagtttatttttaaactaaaacgtgataaataaaaaataaaaagaaagatgagtacataataaac

SEQ ID NO: 140938 - DNA, 1893 bp, Zea Mays
cgacgcggggggcaggacgtggcagagcgccgcccaggcggacgccaagtgccgagctaccagggcaccttctttattccgtccttgctcagtcacacctcgctctcgctcactctcgccgtccgcacagccgctcatcgtctcccactgcctgccctctccctgcgccggccggtgccccgacgcgccatgtcgtacaacaaggccccgtccatcaccgccgagaccataaatcccagggtcaagatcatcagatacgcgccttgcggggagatcgtcaagcacgcagcgcggctggagcaggagatagaggagaaccctgcttctatccctttccaagagataatatactgcaacctcgggaacccccaggtccttggtcagccgccactaactttctttcgtgaggttctctccctgtgcgacaacccagccctcatggacagagatgaagctcgtgccttattcagcccttgtagcataagaagggccaggaggatcctaaactcgatccccagcaaagacactggtggatatactgattgccggggaatcaaatgcctgcgtcaagtagtagcagatgggattaccgcaagagacggttttccatcgacagcggacgatatctttctgacagatggagccacctcagcggtgccgtacaatctcactgaagataacggttggggcctagagatctttgaagtcaagaggtgcttggaagaggctcgttcggctggcctcactgttagagctatggtggtaataaatcccggcaaccctactggacaggtgctatccgtcacaaaccaggaggagatagtagagttttgtcggaaggaaggtctggttatacttgctgatgaggtataccaggaaaatatctacgcagagaacaagaagttccattccttcaagaaagtggccagatcacttgcttacgacgaaaatgacctcaccctagtatcacttcattccgtttcaatgagctatggggagagtggcagaagaggaggctacatggaggtgtctggtgttgcagctaatgtgaaggatcagatttacaaggtggcttctttaacactctgccccaacattgctggccagattctcgtcagccttgcaatggatccaccgaagctaggagatgaatctttcgagtcatttgataaggagaaggaacagatccgttcatccttctgcaagcgagccaagaccctggagaaagctttcagcggcctggagggcgtgacttgcaacaagttagagggtgcgctgtacttgttcccacggctccacctcccctccgctgcgatcagggccgccgatttcgagggagtttcacctgacatattctacgctcaccgcctgcttgatgccaccgggattgccgttgtgccgggctctgggttccaccaggcctctgggacgatccatatccgatgcacgatccttcctgacgaaagaaaaatcgaggcgatggtcgcacgcttgagggcgttccataaggcgttcatgaacgagttccggggctctcagcaggtcatgaacgatctccgtcgctgatggtgtcgatgcatggcacggttaggcctgtgcgtgtgcccatgggcaatcaagacaacttctgagctctggagttgttgtttgttgttctgtgttcttgcttcctcgttgagctgtgccccgtttgtcctcacttatgcagtcagtggtctgtctgtagtctgtactgcttaaagataagctgtgctttcaggaataaaaagtctgcagcttgtgcatatatatactgactccgttctcaaatattatatttatggtaggctagtttatttttaaactaaaacgtgataaataaaaaataaaaagaaagatgagtacataataaac

SEQ ID NO: 140939 - DNA, 1315 bp, Zea Mays
ataagtaaccctcatatgtatttgcactcatgcatcacaaaacatccttctatcagtaccatcaatcatcattcatcttagtagtataggcaccaaatcaaatctgcaacatcaattatctaactccaaaaaccatgaagctggtgcttgtggttcttgctttcattgctttagtatcaagtgtttcttgtacacagacaggcggctgcagctgtggtcaacaacaaagccatgagcagcaacatcatccacaacaacatcatccacaaaaacaacaacatcaaccaccaccacaacatcaccagcagcagcaacaccaacaacaacaagttcacatgcaaccacaaaaacatcagcaacaacaagaagttcatgttcaacaacaacaacaacaaccgcagcaccaacaacaacaacaacaacaacagcaccaacaacaacatcaatgtgaaggccaacaacaacatcaccaacaatcacaaggccatgtgcaacaacacgaacagagccatgagcaacaccaaggacagagccatgagcaacaacatcaacaacaattccagggtcatgacaagcagcaacaaccacaacagcctcagcaatatcagcagggccaggaaaaatcacaacagcaacaatgtcattgccaggagcagcaacagactacaaggtgcagctataactactatagcagtagctcaaatctaaaaaattgtcatgaattcctaaggcagcagtgcagccctttggtaatgccttttctccaatcacgtttgatacaaccaagtagctgccaggtattgcagcaacaatgttgtcatgatcttaggcagattgagccacaatacattcaccaagcaatctacaacatggttcaatccataatccaggaggagcaacaacaacaaccatgtgagttatgtggatctcaacaagctactcaaagtgcggtggcaatcttgacagcagcacaatacctaccatcaatgtgcggcttgtaccactcatactaccaaaataatccatgcagcagcaatgacattagtggtgtttgcaattgaagaattgtgtctacctagccgttatactcatataacggtgttaagcaataaagtaccatacattatgatgtttgtactatgatatttgaataagaatactaattgtaattataatgctactaaacccttgtgtgaactaaaactagcatgtcttgttcatcctacccacattttggttagggatgaggaggggattgttattatcccatggttaatcacaattacacaaacatatggctacactcaaaacttag

SEQ ID NO: 140940 - DNA, 2118 bp, Zea Mays
gcaccagtttcaacgatcgtcccgcgtcaatattattaaaaaactcctacatttctttataatcaacccgcactcttataatctcttctctactactataataagagagtttatgtacaaaataaggtgaaattatgtataagtgttctggatattggttgttggctccatattcacacaacctaatcaatagaaaacatatgttttattaaaacaaaatttatcatatatcatatatatatatatatatatataaaccgtagcaatgcacgggcatataactagtgcaacttaatacatgtgtgtattaagatgaataagagggtatccaaataaaaaacttgttcgcttacgtctggatcgaaaggggttggaaacgattaaatctcttcctagtcaaaattgaatagaaggagatttaatctctcccaatccctttcgatcatccaggtgcaaccgtataagtcctaaagtggtgaggaacacgaaacaaccatgcattggcatgtaaagctccaagaatttgttgtatccttaacaactcacagaacatcaaccaaaattgcacgtcaagggtattgggtaagaaacaatcaaacaaatcctctctgtgtgcaaagaaacacggtgagtcatgccgagatcatactcatctgatatacatgcttacagctcacaagacattacaaacaactcatattgcattacaaagatcgtttcatgaaaaataaaataggccggacaggacaaaaatccttgacgtgtaaagtaaatttacaacaaaaaaaagccatatgtcaagctaaatctaattcgttttacgtagatcaacaacctgtagaaggcaacaaaactgagccacgcagaagtacagaatgattccagatgaaccatcgacgtgctacgtaaagagagtgacgagtcatatacatttggcaagaaaccatgaagctgcctacagccgtctcggtggcataagaacacaagaaattgtgttaattaatcaaagctataaataacgctcgcatgcctgtgcacttctccatcaccaccactgggtcttcagaccattagctttatctactccagagcgcagaagaacccgatcgacaccatgagggtgttgctcgttgccctcgctctcctggctctcgctgcgagcgccacctccacgcatacaagcggcggctgcggctgccagccaccgccgccggttcatctaccgccgccggtgcatctgccacctccggttcacctgccacctccggtgcatctcccaccgccggtccacctgccgccgccggtccacctgccaccgccggtccatgtgccgccgccggttcatctgccgccgccaccatgccactaccctactcaaccgccccggcctcagcctcatccccagccacacccatgcccgtgccaacagccgcatccaagcccgtgccagctgcagggaacctgcggcgttggcagcaccccgatcctgggccagtgcgtcgagttcctgaggcatcagtgcagcccgacggcgacgccctactgctcgcctcagtgccagtcgttgcggcagcagtgttgccagcagctcaggcaggtggagccgcagcaccggtaccaggcgatcttcggcttggtcctccagtccatcctgcagcagcagccgcaaagcggccaggtcgcggggctgttggcggcgcagatagcgcagcaactgacggcgatgtgcggcctgcagcagccgactccatgcccctacgctgctgccggcggtgtcccccactgaagaaactatgtgctgtagtatagccgctggctagctagctagttgagtcatttagcggcgatgattgagtaataatgtgtcacgcatcaccatgggtggcagtgtcagtgtgagcaatgacctgaatgaacaattgaaatgaaaagaaaaaaagtactccatctgttccaaattaaaattggttttaaccttttaataggtttatacaataattgatatatgttttctgtatatgtctaatttgttatcatccatttagatatagacaaaaaaaatctaagaactaaaacaaatgctaatttgaaatgaagggagtatatattgggataatg

SEQ ID NO: 140941 - DNA, 1183 bp, Zea Mays
actgagccacgcagaagtacagaatgattccagatgaaccatcgacgtgctacgtaaagagagtgacgagtcatatacatttggcaagaaaccatgaagctgcctacagccgtctcggtggcataagaacacaagaaattgtgttaattaatcaaagctataaataacgctcgcatgcctgtgcacttctccatcaccaccactgggtcttcagaccattagctttatctactccagagcgcagaagaacccgatcgacaccatgagggtgttgctcgttgccctcgctctcctggctctcgctgcgagcgccacctccacgcatacaagcggcggctgcggctgccagccaccgccgccggttcatctaccgccgccggtgcatctgccacgtgccgccgccggttcatctgccgccgccaccatgccactaccctactcaaccgccccggcctcagcctcatccccagccacacccatgcccgtgccaacagccgcatccaagcccgtgccagctgcagggaacctgcggcgttggcagcaccccgatcctgggccagtgcgtcgagttcctgaggcatcagtgcagcccgacggcgacgccctactgctcgcctcagtgccagtcgttgcggcagcagtgttgccagcagctcaggcaggtggagccgcagcaccggtaccaggcgatcttcggcttggtcctccagtccatcctgcagcagcagccgcaaagcggccaggtcgcggggctgttggcggcgcagatagcgcagcaactgacggcgatgtgcggcctgcagcagccgactccatgcccctacgctgctgccggcggtgtcccccactgaagaaactatgtgctgtagtatagccgctggctagctagctagttgagtcatttagcggcgatgattgagtaataatgtgtcacgcatcaccatgggtggcagtgtcagtgtgagcaatgacctgaatgaacaattgaaatgaaaagaaaaaaagtactccatctgttccaaattaaaattggttttaaccttttaataggtttatacaataattgatatatgttttctgtatatgtctaatttgttatcatccatttagatatagacaaaaaaaatctaagaactaaaacaaatgctaatttgaaatgaagggagtatatattgggataatg

SEQ ID NO: 140942 - DNA, 496 bp, Zea Mays
ttaaagactcgaagctaagcttcatcgttgtatccgtcagtttaatgtagcatattaagcactttgtgttgggtcaacatcgtcggagctcgagtacatagtgagtgtgatttcatagagtaaaagaagagtgggatgagtaaaataaaagtggtgtaagcaaaatagagagtgataggtgcgaatgaatccaaacatcttctcaacttaaaggccagccatattctaaaaaattaaaaaaataaaaaatataatttgtagcctttaaacggttaaaaactagctaacatgatatatgtatatagattagaatatgtcatgtcgctaaagtcagcaactatcgacctaaccgaccgtctaacacgttggctccaacaattaccagcgatcggtatctaattacctcttgttcaaccatcgccggctccaacataatggataccgatccaccggtcagcaagcccaccaatcaacaggccaacgttgacaccggatc

SEQ ID NO: 140943 - DNA, 556 bp, Zea Mays
taaaaacacaattgagattaatataaacaagaagcttacaccagcatctaaccaactactgtaggagcttgtctgtgttatcagttgttacatgttatataagcctcataataaccactaaattaacgagatgatacattcgaatactactacatacctggaaggccttgcccatctttccatcagcctattatctactctaatgattcttcccataaacatgggaccaaaggaaaagaaaaaaaaaacaagaaaattaagcatttcgtggtacagatgctgtatttgaaaaaccgttagctgcttttggtggtggtggcttcttcttgtagtttgctaagctacagtgggggcagatgtattccaaaccatctgtcttagcgtaatcctgcaagtaaagcacatgatggcatcaagtaactgatttccggcaagggtgagatcaacacaacccatcttcttgtttaccttgaaagtgcctagtccttgtcgtctgtcgcaaccaaagtgagcccattcaccacataaaccgcagttcacccaatctccaggtgcg

SEQ ID NO: 140944 - DNA, 2225 bp, Zea Mays
cggttctgccgtcaacgcgccgcggatcccccgccctcctccccgtctgcttcccgccatcaacgcgcacgcgacctctgctctccgccatcaacgctcactgcatgcctgcgccacagatcccccactctctccccgccatcaacgcgcaagcggatgccgcggatccgcctatccgccataaacgccgatccatagatccacgctcgccctgcctcctacgacaccaaccaaaccctcaacctctcctacgacaccttctccagtccgctcctcgacgacatcgagcgcctggctttcacagcggcgggacatggaggatgaacgagcaccgggagagagtcggttagatctaaatttccgtggaggtgagcttggacgaggttcaaacaggcatatctctgaacaccttgggctctctaggctatgagatagatcatggatcgagacggagaatagcagtgtgtcattctaaactgggtgatcagccgaaaagatcccatggataatcattaatgattatatgagggagggaaccaacaaaggcactccatgggggaatggttgtggccaggtttgttaatggtgttgcggctgcaagcgtcgtgtggcatctgtcgcgaccaagcattacgagacagtctcctccagcgctttgcactgctcctatcaaggtcactcttattggcagtctagaaatgccaaaggatgacatatggcttgtcacagctatcctatctggtctcattgaataatgtgcgaagatataagtcactggctatcaatttctgtgaatcagatctttcttggcctcctatcttcgcctcaggcagctgggatgagtctgtctcattacgatggggtgatcttgggctttctgtttcacatatcttcaggcctgtgcctggatgctgtaccatgcttggtcctatgaatactgaagtaaagcaacggaaagttgtagctgtcggtaggaaacggactgcacggccaacagaaaatacctgtcctgaagagcttgctgagtcttcagaggaagtaaagacagacactgacaggaatgtcttagttatgtttgatatcctcaggcgaaagaagagcgcaaaattggaaaaccttgtgttgaataggctttcatttgcccaaacagttgaaaatgtttttgcactatctttcttagtgaaagatggtagggtggaaataactgtagatgatagcgggcatatagtacggccaaggaatgcacctgctgctagcgctatagcctcaggagaagtctcatacagtcattttgtttttagatttgacttgaaggactggaagcttatgaaagaagttgttacagagggagaagagttgttgccacataggacttcccagagcaaattttgcaacgaagaaaacgaccaaccaaatctggaggtacgtgcacaaataatgcctatcaggaaactcacccggaaccgaggattggtcttgcaggatcatgtagtcgaggaaactcctgaagagaaccaagcgtctaagcgcaggcgccttttgaggaatcaagattgacctagcaattgcttggcatgagtagtgtaggcaggcaacctggcttgtgttgtatgcaaaaaattgcctgagcctgagtaacgtgtctttcactaggtctgttgtgccatgctgtcttgttcttggcacagctcgtgcttatctgaacttccagttgtgccagcggagtagggctgtaattataaattgtttgaagttctggtcacatcttgcaactacagaatggtgtttgtagggctgagtgtaactagccagcttggctcgtgttgggtcattaagggtgtgtttggttggatgtatatggagggatggaaagggacgaccacatattctatagtgtttggattagagtcgcgtggggcgagataaacatcggagtaattttttggtggcggtgtgattaaaaaatttgactactttgatctcaaactaaacacattctaactcatttatcatggcaagatatgtctcgggtaaacttgttaggctgtcataacttatccatcctatctcttattttaaattttatttttttgtaaatattataatttacagtgcaaaataatgttttacacgtctatatagacgatctactacaaacaaccttaagaaatgagttaaaagttcagcttaacatcttgagctaatcaatgctaaagagaagttgc

SEQ ID NO: 140945 - DNA, 1919 bp, Zea Mays
agagtggcgcgggccccaccgcagctatctcctttggcgtctctgtccagtagtgcgtcagcgtcgcttccgattatttaagtagcacggccacggctagctaccatctccccaactccgcctcccaagtcccacccccactccctcgctcaccagaggaactagcggaccaggcaaagccgagccgcaccgcaaccgcgaagatcttgcgtggcctccttttcccagctcgtcactgtgccgctcgtgccctacactcccggtccgcccaaccaataatccatccatccatccatccaccaccaccccgctgcggcgatgtgcggcggcgccatcctctcgggtttcatcccgccgtccggggtggcggcggcggcggcggcggccaagaagcagcagcagcagcagcagcggtgccgtgtgactgcggacctgctatggccggggcccggcagtaagggagctccccaggacaaggaggaggacttcgaggccgacttccgcgagttcgagcgcggcctcggcgaggatgacgtggacagcgccggcgaaggcggcgaccccgaggtccaggagcttcctccgccggagccgacgaggtttgccttcgccaccgcggccaaggcggcagttgatggcgtgatgactcctcctccaaaggatgtccaaggagatagagcagtaaaaaagcgcggccggaagaaccagtacaggggaatcaggcagcggccttggggcaaatgggcagctgagatcagggaccctaacaagggcgtccgcgtctggctcggaacctacaacaccgccgaggaggcagctagggcatacgacgccgaagctcgcaagatccgcggcaagaaagcgaaggtgaattttcccgatgacgcgacaggcactcgtcacaggccaacgaccgatgagatctttaacaacctgaagaacgacgacaacaacaacaacgatgatctgtttgcgatgtttgcgttcggtgacaataagaagaaggttcctgcagcgaagccagccgccgccgagggtggcagtggcagtggcagcttcctcgtccctgcgcctgcggtggcggtggtgcccggtaataagaggaggtcgtccgcgaccaacactatgctctccgtctccgacgaccagcgcagcaactcctacggctccggctcctccgacttggtggggtcgtggtcgtgggacgacgacgcggcggccgccgccatgacctcggactacacctcctcggtcttcgctcccgataacgccgtgctgccggcggcgtcttacacgcaaggcggagcgccgaagagaatgaggagcagctacggcggcgcgccgcccagcctcgcacatgacgcggccatgcctggctttggccttgataaagtgagctaccaccactaccaggcgttgcctccttattacgtcgggagcagcaacgcgtcggtgggcaacctcggtcttctgcagcaggctgatgatgctccagctccacaggatggggcgagcgccggggatatctggagcctcgacgagctgctcatgctggcagcagctggtgcttattgagaaccgcaagaaaaaaaaaatgtgttggcgctgctagctggagacgagacgagagggcgagaggcagttgcatccgccatccgctatcgttttgtctctcctatatctagtatatatatgcttctggcagtcgaactctatggcaatgcgtgtgtatagtgtgttgctgccgtctatgattggaagcgagctcgagactggttcaataattcacctttgcctaccgtcgtaccgccggcctgctggactgtagtgtgcgtactgcatatatatgccatagttatgtatgcactcctcctatatatactatatattattatgatgtgcttatactagtactgtgc

SEQ ID NO: 140946 - DNA, 1491 bp, Zea Mays
ttcttctttttttcctgagagaatgacattatttatgcttcagcctctttgttgtttgctactttttctccaattcagcaacccgaacaaactaccctacaaacaagtagagtagctattcgttgattacaaacaaacaaacaattcatgctagatacgttttgttgagacggactgactgatagacgacagtctttttattatagatggcgtgatgactcctcctccaaaggatgtccaaggagatagagcagtaaaaaagcgcggccggaagaaccagtacaggggaatcaggcagcggccttggggcaaatgggcagctgagatcagggaccctaacaagggcgtccgcgtctggctcggaacctacaacaccgccgaggaggcagctagggcatacgacgccgaagctcgcaagatccgcggcaagaaagcgaaggtgaattttcccgatgacgcgacaggcactcgtcacaggccaacgaccgatgagatctttaacaacctgaagaacgacgacaacaacaacaacgatgatctgtttgcgatgtttgcgttcggtgacaataagaagaaggttcctgcagcgaagccagccgccgccgagggtggcagtggcagtggcagcttcctcgtccctgcgcctgcggtggcggtggtgcccggtaataagaggaggtcgtccgcgaccaacactatgctctccgtctccgacgaccagcgcagcaactcctacggctccggctcctccgacttggtggggtcgtggtcgtgggacgacgacgcggcggccgccgccatgacctcggactacacctcctcggtcttcgctcccgataacgccgtgctgccggcggcgtcttacacgcaaggcggagcgccgaagagaatgaggagcagctacggcggcgcgccgcccagcctcgcacatgacgcggccatgcctggctttggccttgataaagtgagctaccaccactaccaggcgttgcctccttattacgtcgggagcagcaacgcgtcggtgggcaacctcggtcttctgcagcaggctgatgatgctccagctccacaggatggggcgagcgccggggatatctggagcctcgacgagctgctcatgctggcagcagctggtgcttattgagaaccgcaagaaaaaaaaaatgtgttggcgctgctagctggagacgagacgagagggcgagaggcagttgcatccgccatccgctatcgttttgtctctcctatatctagtatatatatgcttctggcagtcgaactctatggcaatgcgtgtgtatagtgtgttgctgccgtctatgattggaagcgagctcgagactggttcaataattcacctttgcctaccgtcgtaccgccggcctgctggactgtagtgtgcgtactgcatatatatgccatagttatgtatgcactcctcctatatatactatatattattatgatgtgcttatactagtactgtgc

SEQ ID NO: 140947 - DNA, 4418 bp, Zea Mays
atgccacacagccacagcaacgaactgcgggagctttacgctcgaaaagccgcgagccttcgttcgtccccgtcaacgtcgcgtttcctctttttcccggttccccgatcccctccgcgttttcctccaccacaccaccacttccctcgccgccactcgcgttcccgcccccaaggattacaccgtggcatctcgctacagccgccgctgatgcatctctccttccatccccctgctccgtcgcatctccctcgccggggcggcgtcgcaccaaccacaaccccatccttcgtcctccggaggaaccagcggaggcggcgccaccaccaccgcccgtaccgcctagccccccgcgcctctctctcagacctcatcgccaacctcccctcctccctcgcgctcgtaggtcccgcggcgctcgcggctgcggccgcggtcgccacctctttctcctcctggtcctcctcgtcccagaccagcctcccgccgccgccccaggaatccgaggactacaacgcgtgcggggatgtcgcgggcgagtgggttctcttcaccagcccggcgccattcaaccgctgcgtgctgctgcgttgcccgtccgtgtctttcgaggacgggctcgacggcgtcaacgagcgcctcctcaccgaggagcggcactacgtgaatctgagcaggggctgcatccccgtggtgcgcggcggggacggtgcctatgatatctcttaccagaggatttgcatcgccctggaggacggtggggtgatcgcgctcgattggcctgataatttgtacttggacaaagagcatggactggattccacggtgcttatggtgcctggtacgcacgaggggagcatggagaggaacattaaggtgttcgtgttagatgcactgaacaacgggtactttcctattgtaatgaaccccagagggtgcggcggctccccggtcactaccccaaggttatttacagcagctgacagtgatgatatctgcacagtggtacagtttataaacagcaagagaccttggacaacactaatgggtgttggatggggctatggggcaaatatgcttacaaagtacctcgtggaagttggagagtcgactcctcttactgctgctgtttgtattgacaacccttttgatatagaagaagcaacgagatcatttcctcatcatataactcttgatgaaaagctcacagctggcctggttgatattttgcgttctaataaggaactctttcaaggtaaagctaaaggtttcaatgttcaaaaggctttatcagccagttgtttgcgtgacttcgatgttgctatatccatggtttcacatgggttcgatactcttcatgacttctatgctgaaattagtacaaggctgtcagttgcccatgttagaatacctctactttttatacagagtgatgatgggactgtgccgcttcttgcagtgccccgcagttcaatatcagaaaatcctttcacaagccttctcttttgttcttgtgtacactccactatgtccatgtttcagagatacagtgtgttatggtgccagaaccttgccttagagtggttatcagcagttgagtttgctcttctgaagggtcgccatccacttatcaaagatgtggacatcacaattaacccgtccaaaggtctagcatttgttgaacctcaagtgaatcaaaggaaatctccaaaaggaaatagttttcgtcaacattctgagcttattttgtataataatgttgcacatggaataaatggactgctagttgattctgcaaataagtactctggtgctcaaaacaaagaaaatgggcagttgaataataatggtgacataggaactgtagacaaagatctggaagaagagttagaagagagttctgaagatgttgagaaaggtcaggcactacaatcagcaagtcttgtgatgaatatgctagatgctacaatgcctggcactctcaatgatgatcagaagaagaaggttctggtagctgtggagcaaggggagactcttgtgaaggctctagaagaagctgtacctgaagacgtgcgcggaaaacttacagcttctgtaactgaaattttacattccaaacgagaaactttcagtttaggtgcattgaatcgacttggctggaacaatgtaagaccaaccactaccaagacattggcccaggaaaagctcaaagattcagatcatgaaagcgggcttaaggataccaaaatggttgatcagaacaggatttctgcaaccgcttttgagggggatctgaaagacattaatatgacaaatgatgataaacctggagaaagcatcgaatcgtcacagggaaagccttctcaaacttctgaacctgttggaacagcgacagaaattggaactgaacagccttataaatcagataaagctaattatggaaccaatgatagcagtgaagggcagcatataacagaacaggacaatgaaatgactccaaagcaagtttctgatgatcagtcagtggccaactgtaatgggccttctaaagaaagggagcaatcagcagatgctacaacagaccagaatctacaatctaacacaacaacagaaaaggaaggtgacacaagtcgcacaggtgaagataagactgctcataatgtgaatgatcaaagcacacaagtctctaaaacagaagaatcaaaaccttcccccattactgtgacccaggcattagatgcattaactgggtttgatgactcgactcaaatggctgtcaacagtgtttttggagttcttgaaaatatgattgatcagtttgagaaacaacaggactctgagaatggtgaaagtgctgatggaaatgatggtatcacttccgtggatgagacagaatctcatgtgaaagagaatacagagaatgtgtcaagtggagaagatataaaccactcatctaaacaaccagaaggtagcagtcctggaaaaactgattcaatcatgtccaaatatgattgtgcttttggtgaggaaaatcccaatttaagcattgtttcatatggtagaggaaaaatgagatattaccgaggaaacaaagttggtgatcatgtgggtgctgatggtatcgagcgagtcagtggcttgcctgactatttattagatatagctgtcaactcttacttgaaggcgcaatatgcaatgtatcttcgtgaatttctttacacagaattgcaactcaaatcaccagagtctaattcagcaactgatcttttccttgatccacaagagggtaaatggaaaattgaagaacagatgggcaatgtgcaaaatgacaattttgaatcctcacaagagtcatctaagatggacaatgctattgagccaccctactttataccaggaaaaaatccagacatcgcatacaagtccaataaatggaataatacagtagcaaccaggtcaaaacctggtaatgatttgaacgaggcacttacacactttgttagagatgaactatcaagtgcccttaaaattgaagttggtcgcaaaatagggataacagatactaagcaacttgaaaggagtcttgcaaatgatgtagaacagattgctgctgaagtttctaaaactgttgtccttgactgtgagttgtattcagccatacatgtgcaaagaagtccaacaactatcaagtttggttcaacacatggaaaaaatgttgttgaagctgtgtcgactgcagttcagcaatctcagcatctgaggaatattcttcctgtcggtgtcatagttggtgtaactttggcatgtttgagaaattacttccatgttggtgtctctaagcatggtgaccatatgatagccactatgaagtcagatatttttggtgaggaagttattgttcaggacagcagcaaagagaatgttcaggatagtggaaaagcaaatacaaacgataataatattgaaaaaaccagtggggagaaccagcaggatatgacgaagtcacagggtcaagatatgatggtcggggctgtgacggctgccctaggtgcttctgctttggtagcacatcaacaaaataaggatgaaaattgcaaggattttgttgagatagaaggtgccaaacatgaggaaactgcacaggaaaagagccagaacagtttgatgagcagttttgctgagaaagccatgtctgtggcaggacctgtagttcccacaaagggtgatggtgaggttgatcatgaaaggtctgttaatattgctattgttgtgttcctttgtctttacttctttttctttttttttccttttttgtgtgaaaatgtttatcatgttctgactttctgcaagcaggcttgttgcagttctagctgaactcggacaaaagggtgggtttttgaggttcattggaaaaattg

SEQ ID NO: 140948 - DNA, 6236 bp, Zea Mays
atgccacacagccacagcaacgaactgcgggagctttacgctcgaaaagccgcgagccttcgttcgtccccgtcaacgtcgcgtttcctctttttcccggttccccgatcccctccgcgttttcctccaccacaccaccacttccctcgccgccactcgcgttcccgcccccaaggattacaccgtggcatctcgctacagccgccgctgatgcatctctccttccatccccctgctccgtcgcatctccctcgccggggcggcgtcgcaccaaccacaaccccatccttcgtcctccggaggaaccagcggaggcggcgccaccaccaccgcccgtaccgcctagccccccgcgcctctctctcagacctcatcgccaacctcccctcctccctcgcgctcgtaggtcccgcggcgctcgcggctgcggccgcggtcgccacctctttctcctcctggtcctcctcgtcccagaccagcctcccgccgccgccccaggaatccgaggactacaacgcgtgcggggatgtcgcgggcgagtgggttctcttcaccagcccggcgccattcaaccgctgcgtgctgctgcgttgcccgtccgtgtctttcgaggacgggctcgacggcgtcaacgagcgcctcctcaccgaggagcggcactacgtgaatctgagcaggggctgcatccccgtggtgcgcggcggggacggtgcctatgatatctcttaccagaggatttgcatcgccctggaggacggtggggtgatcgcgctcgattggcctgataatttgtacttggacaaagagcatggactggattccacggtgcttatggtgcctggtacgcacgaggggagcatggagaggaacattaaggtgttcgtgttagatgcactgaacaacgggtactttcctattgtaatgaaccccagagggtgcggcggctccccggtcactaccccaaggttatttacagcagctgacagtgatgatatctgcacagtggtacagtttataaacagcaagagaccttggacaacactaatgggtgttggatggggctatggggcaaatatgcttacaaagtacctcgtggaagttggagagtcgactcctcttactgctgctgtttgtattgacaacccttttgatatagaagaagcaacgagatcatttcctcatcatataactcttgatgaaaagctcacagctggcctggttgatattttgcgttctaataaggaactctttcaaggtaaagctaaaggtttcaatgttcaaaaggctttatcagccagttgtttgcgtgacttcgatgttgctatatccatggtttcacatgggttcgatactcttcatgacttctatgctgaaattagtacaaggctgtcagttgcccatgttagaatacctctactttttatacagagtgatgatgggactgtgccgcttcttgcagtgccccgcagttcaatatcagaaaatcctttcacaagccttctcttttgttcttgtgtacactccactatgtccatgtttcagagatacagtgtgttatggtgccagaaccttgccttagagtggttatcagcagttgagtttgctcttctgaagggtcgccatccacttatcaaagatgtggacatcacaattaacccgtccaaaggtctagcatttgttgaacctcaagtgaatcaaaggaaatctccaaaaggaaatagttttcgtcaacattctgagcttattttgtataataatgttgcacatggaataaatggactgctagttgattctgcaaataagtactctggtgctcaaaacaaagaaaatgggcagttgaataataatggtgacataggaactgtagacaaagatctggaagaagagttagaagagagttctgaagatgttgagaaaggtcaggcactacaatcagcaagtcttgtgatgaatatgctagatgctacaatgcctggcactctcaatgatgatcagaagaagaaggttctggtagctgtggagcaaggggagactcttgtgaaggctctagaagaagctgtacctgaagacgtgcgcggaaaacttacagcttctgtaactgaaattttacattccaaacgagaaactttcagtttaggtgcattgaatcgacttggctggaacaatgtaagaccaaccactaccaagacattggcccaggaaaagctcaaagattcagatcatgaaagcgggcttaaggataccaaaatggttgatcagaacaggatttctgcaaccgcttttgagggggatctgaaagacattaatatgacaaatgatgataaacctggagaaagcatcgaatcgtcacagggaaagccttctcaaacttctgaacctgttggaacagcgacagaaattggaactgaacagccttataaatcagataaagctaattatggaaccaatgatagcagtgaagggcagcatataacagaacaggacaatgaaatgactccaaagcaagtttctgatgatcagtcagtggccaactgtaatgggccttctaaagaaagggagcaatcagcagatgctacaacagaccagaatctacaatctaacacaacaacagaaaaggaaggtgacacaagtcgcacaggtgaagataagactgctcataatgtgaatgatcaaagcacacaagtctctaaaacagaagaatcaaaaccttcccccattactgtgacccaggcattagatgcattaactgggtttgatgactcgactcaaatggctgtcaacagtgtttttggagttcttgaaaatatgattgatcagtttgagaaacaacaggactctgagaatggtgaaagtgctgatggaaatgatggtatcacttccgtggatgagacagaatctcatgtgaaagagaatacagagaatgtgtcaagtggagaagatataaaccactcatctaaacaaccagaaggtagcagtcctggaaaaactgattcaatcatgtccaaatatgattgtgcttttggtgaggaaaatcccaatttaagcattgtttcatatggtagaggaaaaatgagatattaccgaggaaacaaagttggtgatcatgtgggtgctgatggtatcgagcgagtcagtggcttgcctgactatttattagatatagctgtcaactcttacttgaaggcgcaatatgcaatgtatcttcgtgaatttctttacacagaattgcaactcaaatcaccagagtctaattcagcaactgatcttttccttgatccacaagagggtaaatggaaaattgaagaacagatgggcaatgtgcaaaatgacaattttgaatcctcacaagagtcatctaagatggacaatgctattgagccaccctactttataccaggaaaaaatccagacatcgcatacaagtccaataaatggaataatacagtagcaaccaggtcaaaacctggtaatgatttgaacgaggcacttacacactttgttagagatgaactatcaagtgcccttaaaattgaagttggtcgcaaaatagggataacagatactaagcaacttgaaaggagtcttgcaaatgatgtagaacagattgctgctgaagtttctaaaactgttgtccttgactgtgagttgtattcagccatacatgtgcaaagaagtccaacaactatcaagtttggttcaacacatggaaaaaatgttgttgaagctgtgtcgactgcagttcagcaatctcagcatctgaggaatattcttcctgtcggtgtcatagttggtgtaactttggcatgtttgagaaattacttccatgttggtgtctctaagcatggtgaccatatgatagccactatgaagtcagatatttttggtgaggaagttattgttcaggacagcagcaaagagaatgttcaggatagtggaaaagcaaatacaaacgataataatattgaaaaaaccagtggggagaaccagcaggatatgacgaagtcacagggtcaagatatgatggtcggggctgtgacggctgccctaggtggcagcagcgcgacattgagcaggagaggtgagcaaatggggcgcaggtgctcatggtcatggtggtcctcaatttagttgatttttcccctttttctggacattcttttataaaacatttaactttcatatttcagcaaaataaggatgaaaattgcaaggattttgttgagatagaaggtgccaaacatgaggaaactgcacaggaaaagagccagaacagtttgatgagcagttttgctgagaaagccatgtctgtggcaggacctgtagttcccacaaagggtgatggtgaggttgatcatgaaaggcttgttgcagttctagctgaactcggacaaaagggtgggtttttgaggttcattggaaaaattgctctactctggggcggaattcgtggtgctatgagcttaactgataggcttatctcattcttacgtatcagtgagcggcccttatttcagaggattatgggattttctttaatggttctcatcctatggtcccctgttgtgattcctctactgccaacgcttgttcaaagttggacaataagtgcttcaacggggattatcggatatgcttgcattgttggattgtacatttctataatgatacttgtcatgctgtggggcaaaaggatacgtggctatgaggatccagttgagcaatatgggatgaatatttggtcggcgtctaggctgcgagagttttttcaaggtttggttggaggcgtaacggtcgtagggttggtgcactcgataagcattctactcggttttgcagcgtttcggacagggttctcttcatctttagctagaccccttgatcttctcaagtcttctagtaatgtgtttctgctagctcttcgagggcttgccacagcaactagcattgctgttgtggaagaaatggttttcagatcatggcttccagaggaaattgcagttgatcttggttactacaatgccattctgatatctggacttgtgttttctctaattcatcggtcactaccctcagtaccaggtttcttgctactttctctggtactttttgggcttaggcagaggacacaaggaaagcttgctgcacccattggcctacgttctggaatcatgactgccagttatttaatacaaagcagtggtgttttaacatccaaacctgaaacaccgttttggatgattagcacttaccatctgcatccttttgatggtgttatcggcttaagtatctgctccttgcttgctatctttttcttccctcaaaagcctgttcagaaggatacatctgtgtgatgaggctcagaagagtaaaacataatgctggagtgagcttccaacaaggactaatcaccatgcgtatgctgcgagcaatgaagggtttttcctaccatacatgttaaaatgcaatgccctgcaacttgctggcagcaaagagtatgtgctcggttagcttcttgctcatctgactgagggtactgctgattggaatggcttttggatctataactagagtatccaggtcatttgtacttaggcaagtgtgtatactactctatactggattatcgaaatgggggatggtttcttccctacgttgtaaggtggcggaggaacagatgatatgcctaggaagaggaactagtagatgataagagtttgcccctgatattaggcttcctctgaaatgcaggaattctagaggaatatacaggaatttcacaggaatcagtccattctcacagaaaaaatgcaggaaactgaaaaaaaatccccgcattccaaagggggcatcatctaggatttcttcataccgaattatcgattgacttcgaccacataccgtgcttttgttcatgtctttgaacacaggcacacccaaatttcgaggtttacaaggaaaatcgccaggcagtaaaccttcaatgcttttggctaggttttcattctgaaagtcatgtcttccgcgtcagcataatcctgtattcctgtataacctctgttcggacttcgtagtgctcatctgagttctgattcggccgggcaactgtaaattctgtagtgttcgagaaaaaactgtaaattctgtaatattgccaagaattatgaatttacatgaactttacaggtataaggtatttgctttaatttttatctgcaattatacaataataattgctt

SEQ ID NO: 140949 - DNA, 1738 bp, Zea Mays
ggcctcgtggccaaatcgtcagctcgtgttcgattgtttgtttcagttgcccgcctcacttcaccggctcaccgtgcttcacctgctatcttccatggcggcggctcacctcttctgctccgcaccggccgcctatcgcgccgcgaacccacggccccttgctacccgtggccgcgccaaccccgccacgggaacgtatctggtgctcaaaggggtatggtgctcatgtgcacatttcccccgggccacaccatcgagaagattcttcccctgccgcgcgtcgctcagccccgatggatcgctggccatgctcggggctcccagtcccaggatggcgccaccgatgaggaagccgtacatgcgggagcactcttgcctcatcttcccgcccccgcgcggtcgacgcccgctggcggtcatcaagttcctcggcggcgccttcatcggcgccgtccccgaggtcacctacggctacctgctggagctcctggcgctggagggctttgtggtcgtgtgcgtaccatacaacgtcaccttcgaccacgaggccgccgcgcgggaggtattccagagtttccatgcctgctacgacgcgctgctcgcgtcggggctcccggaggccggcctcagcgccctggacatcgcggagctcccgctctactctgttggccacagcaacggggcactgcttcagctgctagtgggaagctacttctcagaaaggataccagaggctaatgccattgtctcattcaacaataggccggcatcggaggctgtgccttactttgaacagatagggcccctttttaggcaactgatgcctatgatggaggcctcgcctgtttactcgatggccagaaatgcatcaggatatgcatggaaagctctatttgatttagctggaggtcttttacgtgagtatgatcaagaagctacggtatctctgagcaaatttattgatcagttaccatcagtaatgaaccaggtcaaattcactgtagatgctattgatgatacagacatagttgaagatgtcctgagaccccgcgttgattcaatcggtggacaaataaagaaggtcatactgtcaggaacacatctaactccatgtatacaggatgtcaaatggcaagttggttcagaatacactccagcagatgccattgcacaaggattgaaatcattggctcttagtgaaacaagagtcctctcaagaacaattgctgattggtttacatccctttaaattttgagttattcaatacatctgttgaagtttggagttcttcttacaaaggaatgccttcatcaggtctcaacttcccattttgttgaagcagtccactattgtaatgagatgtaaggatacaatgtattatgtatggcacataagagcagtgcatttttgggctgtgctgagctggtcatgctcacccgcaggccctagccgtactacaaatatctgatcaagattggtggtttggggccttacttggatcgtagttgcaagctataaaaagcatcgaacccaaaagtccaagcagctcgatcctgtttgaggtacggtgccagcaaggttaagttggccaaatctgttgcacgcagacagcccaatgggggtttctgcaggctggcgaaagtaaaggcgtgcgataggaaatctgggaatgttttatattgccacattgtaattccacgttataggcgtatagctcaaatacatttggacggtttg

SEQ ID NO: 140950 - DNA, 1092 bp, Zea Mays
tgctgccacacgtaaaagtgtgcactgttgtctgatgacatttgtaaaatgaaagaacgaatcaagggtatgaacttttgcttgacatgcttcatgtactgttttaaaaagatatgattccatgactttaggatatgcatggaaagctctatttgatttagctggaggtcttttacgtgagtatgatcaagaagctacggtatctctgagcaaatttattgatcagttaccatcagtaatgaaccaggtttcagaaggtgtgtctgaatttaaaccaacaccacctgaaaaccgtgaattctgcaagaattcctacagtgtacccaatacattattggtcaaattcactgtagatgctattgatgatacagacatagttgaagatgtcctgagaccccgcgttgattcaatcggtggacaaataaagaaggtcatactgtcaggaacacatctaactccatgtatacaggatgtcaaatggcaagttggttcagaatacactccagcagatgccattgcacaaggattgaaatcattggctcttagtgaaacaagagtcctctcaagaacaattgctgattggtttacatccctttaaattttgagttattcaatacatctgttgaagtttggagttcttcttacaaaggaatgccttcatcaggtctcaacttcccattttgttgaagcagtccactattgtaatgagatgtaaggatacaatgtattatgtatggcacataagagcagtgcatttttgggctgtgctgagctggtcatgctcacccgcaggccctagccgtactacaaatatctgatcaagattggtggtttggggccttacttggatcgtagttgcaagctataaaaagcatcgaacccaaaagtccaagcagctcgatcctgtttgaggtacggtgccagcaaggttaagttggccaaatctgttgcacgcagacagcccaatgggggtttctgcaggctggcgaaagtaaaggcgtgcgataggaaatctgggaatgttttatattgccacattgtaattccacgttataggcgtatagctcaaatacatttggacggtttggaggt

SEQ ID NO: 140951 - DNA, 1063 bp, Zea Mays
tgctgccacacgtaaaagtgtgcactgttgtctgatgacatttgtaaaatgaaagaacgaatcaagggtatgaacttttgcttgacatgcttcatgtactgttttaaaaagatatgattccatgactttaggatatgcatggaaagctctatttgatttagctggaggtcttttacgtgagtatgatcaagaagctacggtatctctgagcaaatttattgatcagttaccatcagtaatgaaccaggtttcagaaggtgtgtctgaatttaaaccaacaccacctgaaaaccgtgaattctgcaagaattcctacagtgtacccaatacattattggtcaaattcactgtagatgctattgatgatacagacatagttgaagatgtcctgagaccccgcgttgattcaatcggtggacaaataaagaaggtcatactgtcaggaacacatctaactccatgtatacaggatgtcaaatggcaagttggttcagaatacactccagcagatgccattgcacaaggattgaaatcattggctcttagtgaaacaagagtcctctcaagaacaattgctgattggtttacatccctttaaattttgagttattcaatacatctgttgaagtttggagttcttcttacaaaggaatgccttcatcaggtctcaacttcccattttgttgaagcagtccactattgtaatgagatgccctagccgtactacaaatatctgatcaagattggtggtttggggccttacttggatcgtagttgcaagctataaaaagcatcgaacccaaaagtccaagcagctcgatcctgtttgaggtacggtgccagcaaggttaagttggccaaatctgttgcacgcagacagcccaatgggggtttctgcaggctggcgaaagtaaaggcgtgcgataggaaatctgggaatgttttatattgccacattgtaattccacgttataggcgtatagctcaaatacatttggacggtttggaggtatttcgttggtgtgctggcagttgtttctgtatcgtgcatgtctgttgcaag

SEQ ID NO: 140952 - DNA, 966 bp, Zea Mays
tttgccacgaccagacgaccgtccatcgtcggtcctcccctcctctgctctgttgagctgctctctccctctggcctctctctctccgttccacttcttgaccgacacggcaatggcgaagggcgggctgagcaagcttaagtgcatgatcaagaggtggcactcctcgagccggatctcgcgcacgccgtcagggtgctcggcgcgctctcacgacgtcggcgacgctggcgccgggttcgctctggagaactcgtggaggaagggcgccgctgcctcgtccgtctttgccttcggcggcggtggcacggggtcggcatcgttccacggcaccgacggcctgcccccgggcctccacccggtctacgtcggcaagtcgcgccgccgctacctcatcgccgcggacctcgtcggccaccccctgttccagaacctcgtcgaccgctctggcggcgccggcgtaggcgccggcgggaccgtcgtcggctgcgaggtcgtgctgttcgagcacctcctctggatgctcgagaacgccgacccgcagccggagtcgcttgccgagctcgtcgagtattacgcgtgctgaccgcctacccacggtcacggccacgtccgatccacgatgccggcagcgcagcggcgcccccgagctcgacggccggggtcgaggggtaatttgggtaatctggttcctttgtttaatgttaggggtagagttgtaatatatgcagggttgcgagggcaaggagtaatccacatggagattgctaaccttggggtgcttgtggtaattgtgtcgagatagccgtgtaattaccgtgcacccaaggtaatgctatcccggggaagttaattactctctagtgcctgatcatgtaacaatgtggcttgcatgtttcttctgctagctgtttcttttaagcagaattgaataagatttcaggaacggatgtatgtatatctata

SEQ ID NO: 140953 - DNA, 1361 bp, Zea Mays
aaatccaagaagaaaggagcatagaacataagaggagagaccgcactacacacctcacgcctgaagttcagatctaagccttctcgtcctcgcccaaggacaacgataaacatctaagaaccaaacaaaaacagagcacgaccatcggtctctaagcaaaacgcgcagcacgccgggcgctccacgcacgtaggctagcagagcgcgcatggggcttctggaccagctgtgggacgacacggtggccgggccgcgcccggactccggcctcggcaagctccgcaagcacgcgtccttctccccctcgtcggccgcgccgtcgccgaccgcggagggcgcggcgccgcccgccgtgacgcggagcatcaccatgctgcggccggcggcgctgtccgtcgccacgtcgccgcgcagcgagtccagctccgcgccgtcgtcgccgtcgcccgcaagcggcgctccggactcgcccttcggcgcaggtgaccaccagctctcgccgtcaccttctcttcttttttttcccccagttctcgtcgtcgctgcgcggtgtttgactgtttcgttggagctcgcggaagggatctttgggtcagtcagcgttgtaaaaagcaaaaagaaaaaaagaaaagaaatatacggtatctggttaataatttcgcagctgcacgcttcgttttagcggaattctgtagcgaatttgaagctacttttgtatagtcgaatgttggagatctgaagcatacacacgcacacccccggctgatgttgtggtctctttttctgtacgtacgttgccaccgtgatgctgcagcgacgacgcccaggggagagggctggaagaagctgcgccggaaaggcaggatggccgacggcgccgacgcccccggcacgccgaggagccccactgtgtacgactgggtggtgatcagttcgctggaccgctgaagcagccggccgggccaagacgaggacacagcacaaggatggaggaagccagccaccatcagcagcagctagcggactgaaggaggatcggaacagagaggcccccccggccatgcgacctgcttaacagagcttctggtcacggttctgttatactacgcgttaacggtgtatgtatatacgtcatcttcctgtaaatctccgtggtgtgaggtgctgctgattttgaagagagtgatgctcctgttatgtgctactagctagctagtgctgttgctgtatgagtacagtgtagtctactattaagggttgtcgtttggactgttagtctatagagacagaaaaatgtagaagtacgtattaaagccaatcgaatagacatgtttgtcgccatgtaaaaaaagtataatcct

SEQ ID NO: 140954 - DNA, 1029 bp, Zea Mays
aaatccaagaagaaaggagcatagaacataagaggagagaccgcactacacacctcacgcctgaagttcagatctaagccttctcgtcctcgcccaaggacaacgataaacatctaagaaccaaacaaaaacagagcacgaccatcggtctctaagcaaaacgcgcagcacgccgggcgctccacgcacgtaggctagcagagcgcgcatggggcttctggaccagctgtgggacgacacggtggccgggccgcgcccggactccggcctcggcaagctccgcaagcacgcgtccttctccccctcgtcggccgcgccgtcgccgaccgcggagggcgcggcgccgcccgccgtgacgcggagcatcaccatgctgcggccggcggcgctgtccgtcgccacgtcgccgcgcagcgagtccagctccgcgccgtcgtcgccgtcgcccgcaagcggcgctccggactcgcccttcggcgcagcgacgacgcccaggggagagggctggaagaagctgcgccggaaaggcaggatggccgacggcgccgacgcccccggcacgccgaggagccccactgtgtacgactgggtggtgatcagttcgctggaccgctgaagcagccggccgggccaagacgaggacacagcacaaggatggaggaagccagccaccatcagcagcagctagcggactgaaggaggatcggaacagagaggcccccccggccatgcgacctgcttaacagagcttctggtcacggttctgttatactacgcgttaacggtgtatgtatatacgtcatcttcctgtaaatctccgtggtgtgaggtgctgctgattttgaagagagtgatgctcctgttatgtgctactagctagctagtgctgttgctgtatgagtacagtgtagtctactattaagggttgtcgtttggactgttagtctatagagacagaaaaatgtagaagtacgtattaaagccaatcgaatagacatgtttgtcgccatgtaaaaaaagtataatcct

SEQ ID NO: 140955 - DNA, 117 bp, Zea Mays
atgaacaaaggtaagattgttgtaagggaagaggaaacaggaatagatgaaggtttttcagttaaggtttttcagttaagttcaggtcagttaagttcagttaagcagttatattaa

SEQ ID NO: 140956 - DNA, 2355 bp, Zea Mays
caatagccaataggtagcggagcaccgcaccgcgaagcaaacgagaggggaaaaaaaagcacgaggaggccgcgcccgcgaaggaatcacttgcccgggcgtgggccgcccaccggccaccgcccagccgctgccgcagtgccgcccgcctgcctgcctgcctggtgcggtggtgcctgcccacgggaacgggatagctggctgacggacgcattgcggagcggactgggagactacgggtaagataataaaagggccaggcgtggcggggcgcaaccaccgctgtgcctcggagaggaggacagctctcgcgccgcggctgccgccatgtggacgccgtcgcgcgggagcaacgcccggcgcagcggccaccgccgcatcgcggactacctggcggacgaccagaccaccaccacagccaccgacgcctccgacaacgagtcctacactaccgcctatggggaggagttcttcgccgccgccgccgccgggagcggcggcgccggcggcatgctgccggcattcctggcggaccagggggacctggtggaggtcatgctggagctggacgaggagtccatggtggtgcgcagcgtcacgcccaccagcgcggcgctctacggcgccgcctccctcccggcgccgccgtccgcgggggtcctcggggtgtcgccgtcgccgcgccgcgcgccttcggagggcggcggccgcctgagccggtgctcgtcgacgtcgtcgcggatacggaagaagttcgcgtggctccggtcgccgtcgccctccccgtccccgtaccgccccacgcccgccgagcttcagcgggaggccgccatggcggcgcgcgagcggcggcgggagcaggcgcagctcaaccggtcccgcgccggcgccaggcgcgcgctcaagggcctccgcttcatcagccgcaccacgggctccgtcgaggccgccgagctctggcgccgcgtcgaggagcgcttcaacgacctcgcccgcgaagggctgctctcccgcgacgacttcggcgaatgcatcggaatggtggactccaaggagttcgcggtgggcatcttcgacgcgctggcgcggcggcggcggcagaacctggagcggatcaccaaggaggagctctacgacttctggctccagatctccgatcagagcttcgacgcgcggctccagatcttcttcgacatggtggacaccaacgtggacgggaggataacgagggaggaagtacaggagctgatcgtgctcagcgcgtcggccaacaagctggcaaagctcaaggagcaggcggaggagtacgcgtcgctcatcatggaggagctcgacccggagaagcttggctacattgagctgtggcagctcgaagcgctgctgctccagcgcgacacctacatgaactacagccgcccgctgagcacggccagcggggcccagtggagccagaacctcggcgtcggcggcgcgctgacgataacagggggaggaggagacggcggctgcggcgtggacggcgaccacccggggcctccgcgcgagcgtcgccggagctggggcgtgcggaaggcggcggcgcgggtgcgcgtggcggcggaggagaactggcgccgcgcctgggtgctggcgttgtggttcgcggccatggcggcgctgttcgtgtggaagttcgtccagtaccggcgcatggcggcgttccaggtgatggggtactgcctccccacggccaagggcgccgcggagacgctcaagctcaacatggcgctcgtgctgctccccgtctgccgcaacacgctcacgtggctccgctcctcctgggcccgcttcttcgtccccttcgacgacaacatcaccttccacaagatgatcgcgacggcgatcgtggtggggatcacgctgcacgcggggaaccacctggcgtgcgacttcccgcgggtgatcgcggcgagcccggaggagtacgcgctcgtcgcgggcgcgttcggcgcggacaagccgacgtacgcggggctcctgtcgggcacggagggcgtgacgggcgtggccatggtggtgctgatgaccgtctccttcacgctggccacgcacccgttccgcaagggggagcccaagggcgcgggcgcggccgccggcacgtcgcggctcccggcgccactgaaccggctcaccggcttcaacgccttctggtactcgcaccacctcctcggcatcgtgtacgcgctcctgctcgcgcacggctacttcctcttcctcgtccggaggtggtacgagaagacgtctgaacagcttcggagaattactgttgccatgacgatgccactcgagattgtagcagcgcgccagcgtgcgtga

SEQ ID NO: 140957 - DNA, 1512 bp, Zea Mays
gtgttgagtttaagcacatgtttttttaatacgctaatactgatctcatggcggtttcagacatggatgtacatttcggtcccgctgctgctctacgtcggtgaaaggatgcttagagccttgaggtcaaatgcttataccgtgaaaattctcaaggtgtgtcttctacctggaaatgtgttgaccataacgatgtcaaagccctatggatttcgttacagaagtggacagtacatatttcttcaatgtccaataatttctccatttgaatggcatcctttctccatcacttcagcacctggagatgactacctcagtgtccacatccggacaaacggtgactggacacaggagctcaagcgcatatttgtggagaactacttctcgccgcatctcaacagaagagcttcgtttagcgagctaggtgcggcagaaccaagaagcttgccaaaattactcgtagatggtccctatggtgcccctgcgcaggattttagaaactacgacgttctacttctcgtcggcctcggaatcggggcaacaccgttcataagcattctacgggatctgcttaataacattaagatagctgacgagctgatggacttggcaatggagaccagcaggtctgaagacagcgccaacagctttagcgtctcaacggcgagtagcaaccggaagagagcatacagaacaagccgtgcacatttctactgggtcacccgagaagccggatcctttgaatggttcaaaggggtgatgaatgaggttgcagaaatggacaagaagggtatcatagagctgcacaattacctcactagcgtttacgaggaacgcgacgcacggacaactctgctgtccatggtccaggctctgaaccacgccaagcacggcgtcgatatcgtatcggggaccagggtgaggacgcatttcgccagacccaactggaaggaagtcttcaccaggatcgcctccaagcatccgaattcaacagttggtgtgttctactgcggcgcaccgacgcttgccaaggagctgaaggctctggcgcacgagatgagccacaggacgggcactcgcttccatttccacaaggagtacttctgagtttcgacggatagaatgggcagtcgatgctcgttctaacgtgatctggtcttttctgatctgatctcgatagcgttaggtaccggtaaagaagacagaattttgcacagatgcaagacaaaccaagctgacctctcctcctgatctggaactgtacatagcataaaagaagcaccacagggttagcttagtatacgtagcacaattcaaataaatatattgacaaagaaaagagagacagagaaagggcaggatagaggctgttgttgttaactcgaagatattgatgataggcatggcggtatacgtgtatacattatagttaggtgctaggtggtagttatatatatactgtatatgatatgggtcgatgaatatacgaggagccacatgctgctgccattc

SEQ ID NO: 140958 - DNA, 1578 bp, Zea Mays
gacatggatgtacatttcggtcccgctgctgctctacgtcggtgaaaggatgcttagagccttgaggtcaaatgcttataccgtgaaaattctcaaggtgtgtcttctacctggaaatgtgttgaccataacgatgtcaaagccctatggatttcgttacagaagtggacagtacatatttcttcaatgtccaataatttctccatttgaatggcatcctttctccatcacttcagcacctggagatgactacctcagtgtccacatccggacaaacggtgactggacacaggagctcaagcgcatatttgtggagaactacttctcgccgcatctcaacagaagagcttcgtttagcgagctaggtgcggcagaaccaagaagcttgccaaaattactcgtagatggtccctatggtgcccctgcgcaggattttagaaactacgacgttctacttctcgtcggcctcggaatcggggcaacaccgttcataagcattctacgggatctgcttaataacattaagatagctgacgagctgatggacttggcaatggagaccagcaggtctgaagacagcgccaacagctttagcgtctcaacggcgagtagcaaccggaagagagcatacagaacaagccgtgcacatttctactgggtcacccgagaagccggatcctttgaatggttcaaaggggtgatgaatgaggttgcagaaatggacaagaaggtagaatcttctgtgctgacattggaactcgttgccatccgtcttattgacgtctttctggtcgttccttcagtttacagtattcccacagtattttctgtgctgacattggagctcgttgaaaccagggtatcatagagctgcacaattacctcactagcgtttacgaggaacgcgacgcacggacaactctgctgtccatggtccaggctctgaaccacgccaagcacggcgtcgatatcgtatcggggaccagggtgaggacgcatttcgccagacccaactggaaggaagtcttcaccaggatcgcctccaagcatccgaattcaacagttggtgtgttctactgcggcgcaccgacgcttgccaaggagctgaaggctctggcgcacgagatgagccacaggacgggcactcgcttccatttccacaaggagtacttctgagtttcgacggatagaatgggcagtcgatgctcgttctaacgtgatctggtcttttctgatctgatctcgatagcgttaggtaccggtaaagaagacagaattttgcacagatgcaagacaaaccaagctgacctctcctcctgatctggaactgtacatagcataaaagaagcaccacagggttagcttagtatacgtagcacaattcaaataaatatattgacaaagaaaagagagacagagaaagggcaggatagaggctgttgttgttaactcgaagatattgatgataggcatggcggtatacgtgtatacattatagttaggtgctaggtggtagttatatatatactgtatatgatatgggtcgatgaatatacgaggagccacatgctgctgcca

SEQ ID NO: 140959 - DNA, 1692 bp, Zea Mays
gactctcacttcctgtgtgctctcgtcgcctccgatcgaatcgtgtcgggcgggctcgtgcccgatcttgtctggtcctgtcttggctccccgccaggaatagcgcaccgagatcccttgcgcgcacggaccagcagatcgcgcgcgggagtgagagggcgacagggcgtggccgcgaggtgggcatgggatcggagggacgggtctggaatggcgcgggcgtggccgccggcagcggctatggcggcagcgtcgaggcgaaagcgaccaccgcggcgcccgcggacgttcccacgtcggcggcctccgtcgacatctcgctgccgctcccggagatgtcgcctcacatcataggtctctgcaaggagttggtcaaagggtggtcgtcgattgacagctcgcgcttctccatcgagaccgtgtctgggggcatcaccaatctattgctcaaggtttctgtcaaaggaaacaatggcaatgattcttctgttactgttcggttgtatggaccaaatacagacttggtgattgatcggaaaagggaattgcaggcgataccgtatctctcagctgcagggttcggggctcggctgcttggaatgtttgaaaatggagtagttcagtcattcatctatgctcgaacactgtcacctgcagacatgaaagaacctaaaatagcagctgaaattgccaaggagctacgcaaatttcatcaagtagatataccagggtctaaagaaccacaattgtggaatgatatattcaagtttttgaagaaagctgcagcattgaagtttgaggataacgagcagcaaaagagatatgtaaagatctcatttacagaaatacaagatgaagttaaagaacttaaggatctcttggacattctgcatgcacctgtggtttatgcacacaatgacttgctttcaggaaatctgatgctcaatgatttggaagggaagctatattttattgattttgagtatgggtcatacagctaccgtgggtatgacattgcaaatcatttcaatgagtatgcaggatttgactgtgactttaatttgtacccagataaagatgcccagtatcacttcttcaggaattatctgcatcctgatagacctagtgaggtgcaggcacaagatatggaagtgctttatgtggaaacaaacactttcagactagcatcgcacatttactgggcattatgggctcttattcagcacttgaatgcaggcaaaggtatccccaattgactttgactatcttggatacttcttcttacggtatggtgagtacaagaaacaaagggactcctgcttcgccttggcacaaagtttcctctccgggctaagaaatggctagagcctgagaatctggtcaagggtttgcactgttgtacgcatactcggggcgggtacgcgttgtgatcatcgtctgctactcagaaactctattatagtggtggtagcagcctcattttgttgtatctgatggtagtttcgtcatcgcctgataggaaagtctcatgatcgccctcgggaacgcagggtggcgagatctgtacttatatttgtaataaacacaatccggatgggttctgtcctgtgcaatttgttgtgcgcataagcattccgtgtttttatacattattgtgaggaattgcataagtttttttgtttttcgattaaa

SEQ ID NO: 140960 - DNA, 1679 bp, Zea Mays
gactctcacttcctgtgtgctctcgtcgcctccgatcgaatcgtgtcgggcgggctcgtgcccgatcttgtctggtcctgtcttggctccccgccaggaatagcgcaccgagatcccttgcgcgcacggaccagcagatcgcgcgcgggagtgagagggcgacagggcgtggccgcgaggtgggcatgggatcggagggacgggtctggaatggcgcgggcgtggccgccggcagcggctatggcggcagcgtcgaggcgaaagcgaccaccgcggcgcccgcggacgttcccacgtcggcggcctccgtcgacatctcgctgccgctcccggagatgtcgcctcacatcataggtctctgcaaggagttggtcaaagggtggtcgtcgattgacagctcgcgcttctccatcgagaccgtgtctgggggcatcaccaatctattgctcaaggtttctgtcaaaggaaacaatggcaatgattcttctgttactgttcggttgtatggaccaaatacagacttggtgattgatcggaaaagggaattgcaggcgataccgtatctctcagctgcagggttcggggctcggctgcttggaatgtttgaaaatggagtagttcagtcattcatctatgctcgaacactgtcacctgcagacatgaaagaacctaaaatagcagctgaaattgccaaggagctacgcaaatttcatcaagtagatataccagggtctaaagaaccacaattgtggaatgatatattcaagtttttgaagaaagctgcagcattgaagtttgaggataacgagcagcaaaagagatatgtaaagatctcatttacagaaatacaagatgaagttaaagaacttaaggatctcttggacattctgcatgcacctgtggtttatgcacacaatgacttgctttcaggaaatctgatgctcaatgatttggaagggaagctatattttattgattttgagtatgggtcatacagctaccgtgggtatgacattgcaaatcatttcaatgagtatgcaggatttgactgtgactttaatttgtacccagataaagatgcccagtatcacttcttcaggaattatctgcatcctgatagacctagtgaggtgcaggcacaagatatggaagtgctttatgtggaaacaaacactttcagactagcatcgcacatttactgggcattatgggctcttattcaggcaaaggtatccccaattgactttgactatcttggatacttcttcttacggtatggtgagtacaagaaacaaagggactcctgcttcgccttggcacaaagtttcctctccgggctaagaaatggctagagcctgagaatctggtcaagggtttgcactgttgtacgcatactcggggcgggtacgcgttgtgatcatcgtctgctactcagaaactctattatagtggtggtagcagcctcattttgttgtatctgatggtagtttcgtcatcgcctgataggaaagtctcatgatcgccctcgggaacgcagggtggcgagatctgtacttatatttgtaataaacacaatccggatgggttctgtcctgtgcaatttgttgtgcgcataagcattccgtgtttttatacattattgtgaggaattgcataagtttttttgtttttcgattaaa

SEQ ID NO: 140961 - DNA, 1653 bp, Zea Mays
atgggatcggagggacgggtctggaatggcgcgggcgtggccgccggcagcggctatggcggcagcgtcgaggcgaaagcgaccaccgcggcgcccgcggacgttcccacgtcggcggcctccgtcgacatctcgctgccgctcccggagatgtcgcctcacatcatgcaagtacccccccctactctcctatctctcttcgatcctcttgcttccgctcgcacctcgggctggtctcgtgccgctgtgcgcctgtcagcagctcgtgtcatgttcgagcattcgcgagcgcgcggggcgtcgtacccgtgcccgcgaaccagccgaggtctctgcaaggagttggtcaaagggtggtcgtcgattgacagctcgcgcttctccatcgagaccgtgtctgggggcatcaccaatctattgctcaaggtttctgtcaaaggaaacaatggcaatgattcttctgttactgttcggttgtatggaccaaatacagacttggtgattgatcggaaaagggaattgcaggcgataccgtatctctcagctgcagggttcggggctcggctgcttggaatgtttgaaaatggagtagttcagtcattcatctatgctcgaacactgtcacctgcagacatgaaagaacctaaaatagcagctgaaattgccaaggagctacgcaaatttcatcaagtagatataccagggtctaaagaaccacaattgtggaatgatatattcaagtttttgaagaaagctgcagcattgaagtttgaggataacgagcagcaaaagagatatgtaaagatctcatttacagaaatacaagatgaagttaaagaacttaaggatctcttggacattctgcatgcacctgtggtttatgcacacaatgacttgctttcaggaaatctgatgctcaatgatttggaagggaagctatattttattgattttgagtatgggtcatacagctaccgtgggtatgacattgcaaatcatttcaatgagtatgcaggatttgactgtgactttaatttgtacccagataaagatgcccagtatcacttcttcaggaattatctgcatcctgatagacctagtgaggtgcaggcacaagatatggaagtgctttatgtggaaacaaacactttcagactagcatcgcacatttactgggcattatgggctcttattcaggcaaaggtatccccaattgactttgactatcttggatacttcttcttacggtatggtgagtacaagaaacaaagggactcctgcttcgccttggcacaaagtttcctctccgggctaagaaatggctagagcctgagaatctggtcaagggtttgcactgttgtacgcatactcggggcgggtacgcgttgtgatcatcgtctgctactcagaaactctattatagtggtggtagcagcctcattttgttgtatctgatggtagtttcgtcatcgcctgataggaaagtctcatgatcgccctcgggaacgcagggtggcgagatctgtacttatatttgtaataaacacaatccggatgggttctgtcctgtgcaatttgttgtgcgcataagcattccgtgtttttatacattattgtgaggaattgcataagtttttttgtttttcgattaaa

SEQ ID NO: 140962 - DNA, 2100 bp, Zea Mays
cgtcactcgccgccgctggcaccaccctccacgccccgtccgcactttttaaaactacgacccagctgccgaatcaaccgcctcccccggcgagcgcctccttcctctctcccatgggcccccgcgcccgagccgggaccgcttcgcccaccggccggtgcgcgcgccatagatagattccacaagcttcgcgaccagatccgatgctggaggccaccgccgccgcctcctccccccgcgccgcggccgcggcagtcgccgccggggcggccgccgccgcggtcgtttcctccccgcggcggggtggaggctccgcgcacaaccaccggcggtgggccccggccccgttcagggcttgcctgctcgcgctctggttgctgggcttcgcgctcgtcttcctgtggcagagcacctccgtgggccgcgtgcggctctacacgcgcccgccgatgccgaagcgcgccgtggcgtcgttggggcactgggcggcctccccgcccgtctacgatctgagggagttcggggcggtcggggacgggcggacggttaacacggccgcgttcgagtctgccatcgcggcgatcgccgagaggggcgggggcaggctcaccgtgccagccgggcggtggctcaccgcgccgttcaacctcaccagccacatgactctcttcctcgctgctggcgctgagatcctagggattcaggatgaaagatattggcccttgatgtctccattaccatcatacggctatggaagagagcacaagggacctcgatatgggagccttatacacggccaagacctgaagcatgtgactataacaggtcataatggtactataaatggacaaggtcaaagttggtgggtaaaatttcggagaaagctccttaatcacacaaggggtcctctggtgcagctcatgcggtcaagtaacattatcatttctaatatcactcttcgtgattctcccttctggactcttcacacgtacgactgcaagaatgttactatctcagaaaccaccatcttggctccaattgctggagctccaaatactgatgggatagatccagattcttgtgaaaatgtggtgataaaaaactgctacatttctgttggtgatgatgggatagccataaagagtggttgggaccaatatggaattgcttatggccgtccatcagctaatattactatccagaatgtcgtaatccgctctatggtcagtgctggagtatcgattggaagcgagatgtctggtggtgtctcggatgttttggtagagaatgttcatgtctgggattcacggcgaggcgtgaggataaagactgcacctggaagaggggcctatgtaaccaatgtcatttaccagaacataacctttgaaaacgtacgtgtcggtatagtgataaagacagactacaacgagcacccagacgaaggcttcgacccaaaggccgtccccaccatcgggaatatctcttacacctcaatccatgggcatcgtgtgcgagtaccggtcaggatacagggaagcgcgcagatccctgtgaagaatgttaccttccatgacatgtcaatcggtatagtagacaagaagcaccatgttttccagtgctccttcgtccaggggcaggtcattggctacgttttccctgtgccttgcaagaacctggacctgtacgacgagcggcgtgggctggttaaacaatcaacgttacagaatatctctgatatcgactacagtttctgacaatggcatttgataccactgtactattgctgtaggtgtattcagtattcacagccgtcacagtcctttccacacatttagaagcaaaattttgggtagcttttacactcttcacctcacagtcaggcatgtatctaaggaagatcgacttgaccatactgtctcgtagagggacgccaggaatgttgccttttcacttttttgatcactgtatgattacacttacttggttacacagtcgacagtacacttttgatagtgcttactgttcatggcagactacatttaccttgccctttttaaaacagatgtggatgtatatgtatttggtagtttgaacctggaa

SEQ ID NO: 140963 - DNA, 781 bp, Zea Mays
atgctcctgccgcccttctcgcaacacccgcccaccaccaccgcatcttctcctacgctctcgcgctccgccacgaccttggtctgccactgccaccgctgtctcgccggcttcacgagccttctaaaacctggcgacgtcgcactcactgctcctgtgagcgcacgtcactgtgcccgcccgccccgcatgccgtggttctgctcgcgttgggcgaatcgggggacgaggaacctacgccgcattattatctccaacaatggtgtcacagacgccaggaaacgtcgtgctggcgcaaactagagtgccatcctcccccaccccgctcatttgcaaggctgtcgcggtgccgacgtgtccaaccgcacgtcgtggcacttaggctcttccaattccaaatcgcaaatgaggtctctccctcgcaaagagctacctcgaaacgagctatccagaatctgcgatgttgatgttgaagttgcattgagaactagctcctcaaagctgctaaagtcgaagggctcaacccaaaactcaaagaactgtcaaaacaaaacatccacagctgcactatgaatctagtgctcaaacactattacagagtgaaaatgatatcccacacctcaagtggtatggtgtcgatgaggagtaccatgttatggtgattgatcttcttggcccaatcttagaaaaattgtttacttcctgtaataggaaattttctatgaaaacaatacttatgcttactgatcaaccatcgagttcatccattccatattccata

SEQ ID NO: 140964 - DNA, 2733 bp, Zea Mays
agtgccgcccgcggcccgccgtcagccagtaatccgcctgccggttggttaattaacacaaggaagcccaaacgaacgaagccaaatcgccgagatgaacgaggggattagataaagcggggccagccgagcagacagcgcccctcgtctcctctcctcgcttcgcttcgcgccgccgccgcgaatcgctgggagcagcgtactgccactcatagcgggactgcaaagtccgtgagggttgcgcggccacgtaactgggaggggaaaaggagggaggggaggcgaggcggcggccagcatggaggcatccgcggcggaggagctggcggccgcgaagagggtgatcatgcggtgggattccactgcgtcggcggcgtgctcagccggcggggacgaccagatgctgttcgacggcgccgccaaccgcgccgaggcggagcggttcctccgggcggtggacgacctccgccgcctggcgccgccgtcgccggcctccgtcggcagcccgcgccgtgcctcggcggcgggcggcgtctgcgacgccgtgcaggtcgccatggcgcggctcgaggacgagttccgccacgtgctgtcggcgcgcgcgctcgacctcgagatcgaggcgctcgccggcctcagctcgctctcgatggccagcgaccgtaggaactccgacgccaccgaggaggcggccgcgggggacgacgacggaagcggcggcggcggcggcagctccgtgtcgtcctccgtcggcaggcgcagcagctaccgctccctgcagagcatccgcgagatcgacctcttccccgcggacgcaatctccgacctccacgccatcgcctaccgcatggccgccgcggggtacggccgcgagtgcgtccaggtgtacgcctccgtccgcaagccggccgtcgactccgccatgcgccggctcggcgtcgagaagctcagcatcggcgacgtccagcggctcgagtgggactccctcgaggccaagatccgccgctggatctgcgcggcccgcgccgccgtccgcggcgtcttcgccagcgagcgccgcctctgcttccacatcttccacgacctcccgctgcgcacttccaccgccaccgccgcgtatgccaccaaccaagacgcgcccttcgctgaggccgtcaagggcgcggcgctgcagctcttcggatttgccgaggccatcagcatcggccgccgctccacggagaagctgttcaagatcattgacctccacgacgcgctctccgatatgctgcctgacatctccgacatcttcgccgcctccaaggccacggagtcgatatacgtgcaggccgccgagatcaggtcgcggttggccgatgccgtgcgtgggatactctcggagttcgagaacgccgtgctccgcgacccatccaagactccagtgcccggcggcaccatccacccgctcactcgctatgttatgaattacatcagcctcatttcggactacaaggccaccctctctgagctggtcatctcgcggccatcagctagctcccggactgctgctgagggcaatgaggctacaccgtcctttcctgatcttgacccgcccgatcctgacagccagttgccccttgccgcccatcttatctggattattgttgttcttgagcacaaccttgagagcaaggcgtcactctacaaggatgccgcactgtctcatttgttccttatgaacaatgtgcactatatcgtgcacaaagtaaaggattcagctgaacttcgggggctaattgggaacgagtatttgaagcgactcacagggaagttccgccaggaagctacaagataccagagaactgcgtggttgaagatcctgaattgtctcagagacgagggcctccatgttagtggtggtttctcgtctgggatatccaaatctgcactacgggagcgattcaaggctttcaatgctgcgtttgaggaggcacacagggtccagtctgcgtggtatgtgccagacacacagctgagggaagagcttaggatctcgatttcggagaaactgctaccagcatatcgatccttccttggcaggttccgtcatcacatagagaacagcaggcaccctgagttgtacatcaaatactcagttgaggatcttgagataacaatggcagatttctttgagggatctccaccaccgcataataggaggagatctcatggatgaaatatatcttgaaaaaacttatcttttttgcaatgaataatacgtattctttagttctttggggacaggccaaccgacgcggttgggtcttgtgttttgtcctcctgatgctgagggttgtagttggtgatgatttcttcgactagaggtaatctgaaacaggatcaggatcttgataaaaagctgtcagaagtcccatttcttcttccactgcaagcgatcttttttttttcatttgttacacttgtttatattcttgcgaatagcgtgtttataataggaatgttcttttagccatataacatagttgtaagttctaacttctgcatctgtttaacatagtgttgtatcatcgttttggtggttcacatgtatctgaaaaatgctgtttgatagatgaggtgcaaaaagaaactgtaatgttaaggttatgcacatatgatgcaattgtgaatgccatttttttttctggccttgaaatatgtttgtagaatttttttcttctttatatgtctttg

SEQ ID NO: 140965 - DNA, 423 bp, Zea Mays
atgcgttgcaaggtgagcgtgaaatggctgcagacaacatgctcctgggtgaattggatctcgttggcattccacctgctgcctccaagaggcatgcatgccttagatcgaggtcacatttgctattggcgccgatggaatcgtgacagtctctgcagaagatacaggtcgcactgtcgcaggaaaggagacgaccatcgccactcgatcctccggccggtgtgctgtctgagggctgacgctgacatccagaaccagaagatggttcaggaggccgagctgcatgcgccggaggaccgcagcaggaacgaaaaggcactcatcgacatcagaaacaatgcggacagaactatctgcggcaccgagaagagcttgggagagtacagggacaagatccccggcagaggttgtgtccgggattga

SEQ ID NO: 140966 - DNA, 115 bp, Zea Mays
caactgttgaagagaaagttaggtttagggttacgcaagtcatgtggaaaaatctagaaaaatggctagctatgcgaatttttttctaataaaaatggcaggctgtggctagtag

SEQ ID NO: 140967 - DNA, 1743 bp, Zea Mays
ccgcgaggtccccctccagccttcactgggcgaaggagaaggagaaggtgaagggaaactccgcgcgattgccgccattaactccctccccccacccttctcgcaagcgccaccggatccggtccctccccacccgccctttctccccacctcacggaaccccgcccgcccttttaatagtttcgccccacatgcgtggcgcgagtgccgccgccttccgacgcagcagccgcggccgggatgtcgcgtatccgtagcggggtggaggtggtcgccagtagggggtgcgcgcggatggtgatccccgggatgcatcacaacccctcatccgccgcatccgtctcctcctccgcggcatcgcgcgcggcccccgccgccggttccgggccggcggcgcatgccgatgggcccttcgcaggcctcgtcatctgcgtcactgggctgtccaaagaggcgagagttcaggtgaaggaggcgacggagcggctcgggggcgagtacagcgggagcttgcaccccaagtgcacgcacctcgtgcacagctttgccggacgcaagttcgagcatgcactgaagcatggtccgaggaatgggctattcctcgttacgctgggttggtttgtggactgcgtgaggaggaacatgaggttggatgaatccttgtatgccatcaagagcattggggagaatggtgtgccgcccggggagttcagccgccttgttggagttcctgttaacgagaagtcttgccttccaccgttgatatttcaggacaaggcatgctcagatatgacccagaagcattcgctccagactcctgggaacggtggtggtcatgatgggttggtttttatgaatgacacaatctacattgaccctgggatatctgatgagatgaggaaaaagatttctgacgctgttactagagaaggtggaaagttgctggagcactggtttattggttgccctacaacttatattgtctgtgaggatgtttgcgttaagagatatgtaggccactcagaaaacattgttactccgctttggatcttgaaaacagtgaaggaaaaaaacttgcagcgtcttgtccatttgtcttccgacctagctaggcatgttgccatggttctggaaaatgttcagacatctgaagagaataggaaacttggaagtgtaccttctataaacacaagctcatgtggtcgtccatcaaccaaagaggagatcaatgaagtccatcaagcgaagcaaaagtttgttgaaggagcaaagaaagaagtccgagaccgccgtgcccgtcgtatgcagccagtcatgtgaagtaaccattcatccaatcacaccggccacacttctggattcaatctgctggacaatctctgagccaacttcatctgcgtcaatttatatggactcttcgtggtccgatgatgccaatgagcagcaaagcaccacttactttgatgcaaatggggacgtgagggatccagatcaacctaatgacaatttttcccgtccactgaaagaaaggtgacacactgatccttagttggaattgaaattgatcaagcctcgtccgatctgctattttagttgctttcatttgttcttgcagtgagcgaagtgagctgatcttcaagaatcacttccttaccatactcttccctgttgatcgttttggagaacttggaccttcctcaaagacgttctataacaatggtggctttacgtgtatacaagtac

SEQ ID NO: 140968 - DNA, 801 bp, Zea Mays
aactgagattcgtcgtctctttctctttcctcgccggcaatccttctcctccctcccattcccattcccatcgccgcttccaagtcccaaccgttcccttctccgccctcgccgccggccaacatgatgcacatgaccttctactggggcaagtcggccacgatcctgttcgacggctggcgcacctccacgtggcccgactaccttctctccctcgcggccctgctcctcgccgccgctttctaccagtacctcgaggccctgcgggtccgcgtgaagctcgtcgcaggaggaggcgccaagccagccccctcctccatcatcccgccaccggccggctccgacccgcggacgccgcttctcgcgcccgccttcgcggccggcgccgggcgctggccggcgcgcctggccgtggccgcgatgttcggggtcaactccggcctcggctacctgctcatgctcgccgtcatgtcgttcaacggcggcgtgtttgtcgccgtcgtcgtgggcctcgcgctcgggtacctcgcgttccgcagcagcgacggggaggatctcgtcgtcgttgacaacccatgcgcctgcgcctaaaggtatggggtcgccggattgccttgtacttacccaggtttgccttccttgttcatgttgttgtataacacaggtatcttcgatccaattgttgtgtttggaggattttcagttttcaaagtgtaattttttttcctttgggggggggggggggggagggtggtatagggtaactaatcagtaatattgtcttgttgctttctatcgatt

SEQ ID NO: 140969 - DNA, 975 bp, Zea Mays
gcgcccagcttatctccctcgacgctcgcggctctctctctctctctcccccctggtccctgccatggccgccgcgctgcagctctctggtgctcggtcgcccaatctccctgctcggcgcccgactgcagctcgccggagcttcctaccgagtccctatggtgcgccctcccatgccggcgcgcgtgctacctccctgctctctctctgccgcagtccagcttggagtttctctctcagctcgcccgatggtgctcggccgagctccctggcgcgcacgtcccggtcgcagctcggatcttcatgaccacagcaccctccatggacgcgagctccaagctcctgctcgtccagcccctttccagacgcccctgcagagtccctagccaactcgcgcccagccccatgtccctggattgctcgtgggtgtggccggagtcgctcacctcgatctctctcgctcttcgtctatcggatttcgcgcgtgctcgcatttgctgttgagtcgtcgaacccgtcatcccctgctcaaccccacctcaccagctcgctccaaacacgatctcgtcatcgtttcgtgtgtcgtcaagaaatcccaagcgtcggatgaagacgtagccaacagcgcgatattccccaagcgctcgacaaattgcctggatcggaaaatcgctaccgatctcgcagattcgtgtcagctgctgaagcggaacgttaatcaatcgcgcgatgcggaagacaagccaagtcgaccccaagcgcgggctactccgcaggatgatgctgatggacaagcctgaagatactcgtcaagtggacgtcacctaacaacactaacctagtgttactcaggtctagtgaaatgtgcattaggtttataggagttgcttgaaaccctttgatgcattgccttccttgatatccatacctatatagatacttctggtgaagtatcaaaatatgatttacaaaaat

SEQ ID NO: 140970 - DNA, 560 bp, Zea Mays
agcgtaaacctagtggaatgagccctagaggcactttggttgttgcattcatgctgttgcatagtgtttctaagtgcaaaatgtgtttgaaacatgttaacatatcttatagaagcgctcggtaaattttcatatttttcggaatatttttctattttccggaaaccaaaatctatttatttgtggaacttaaaaatgtttttagaaattctaattatgttttttgagttcattaggtcccaaaacatttataggaatttttctggaatttttgaaagtatctataatattttgagcacaaaatatggatttctaggctttttcgaattttaaaaataataaaatccgaattttaaccgaatttttatctcgtccaaaccctaggtatatatacatgtccggcttcatctcgtcgagcccattccagaacaccaaacgtttcccccaaatccaatccctagctcccggtattgctcgccgaagttcggggcggttccaactccggcgacaactccggcgagcaattactcccaatccgtgcatcgtctgcggaatccgag

SEQ ID NO: 140971 - DNA, 2590 bp, Zea Mays
aaagaggagcaagcgtcaacagtgcttattatgctgatgctaactggctccttatttgaaccgatcgaacgcctctgcacagccagactcattcggtgaagctcactccctcacccaacgctccatagtccacactcgccgtgctccccatgcagcaaccgcttgtgctcctccttctcttcttcatcggctcggccaagtatgccgtcgcctcccgcgccgacgccggtgcggctacctacattgtctacctgaaccccgcgctcaagccgtccccctacgccacgcacctccactggcaccacgcgcacctcgacgccctctccctggaccccgcgcgccacctcctctactcgtacacgaccgccgcgccgtccgcgttcgccgcccgcctcctcccatcccacgtggcggcgctcaccactcaccctgccgtcgcgtcagtgcacgaggacgtgctcctgcctctccacaccacgcgctccccatcgttcctccacctcccgccgtacagcgcgcctgacgcggacgccgggggcccggacgtcatcatcggggtgctcgacaccggcgtctggcccgagagccccagcttcggggacgccggtcagggccctgtgcctgcgcggtggcgcgggagctgcgagaccaatgccaccgacttcccgtcctcgatgtgcaaccgcaagctcatcggcgcccgtgccttcttccgcggctactcgtcgggggccggcgacggctctcgagtcggcgccgacctaatgtcgccgagggaccacgacgggcacggcacgcacaccgcgagtacggcagccggggccgtcgtggcgggcgcaagcctcctcgggtacgcgccgggcacggcgcggggcatggcccccggggcgcgcgtcgcggcgtacaaggtgtgctggaggcaagggtgcttcagctccgacattctggcgggcatggagaaggccatcgacgacggcgtcgacgtgctctcgctgtcgctgggtggcggcgcgttcccgctctcgcgcgaccccatcgcggtcggcgcgctcgcggccacccgccgcggcatcgtcgtctcgtgctccgctgggaacagcgggccgtcgccgtcgtctctggtgaacacggccccgtgggtaatcacggtcggcgccgggacgctcgaccggagctttccggcttacgcccagctcgccaacggcgagacccacgccggcatgtccctctactccggcgatgggctcggtgacggcaagatccctctggtgtacaataagggcatccgtgccggcagcaactcgagcaagctctgcatggagggcacactgaacgccgcggaggtgaagggcaaggtggtcctctgcgacaggggcggcaactcgagggtggagaaggggcagatagtgaagctagccggtggcgtgggaatggtgcttgcgaacaccgcccagagcggcgaggaagtcgtggcggacagccacctgctcccggcggttgccgtcggcgctaagagcggggacgccataaggaggtacgtggagtcggacgccaacccggaggtggcgttaacctttgccggcaccgcgctcgacgtgcggccggcgccggtagtagccgcgttcagctcccgtggacccaacagggttgtgccgcagctactcaagccggacgtgatcggcccgggcgtgaacatccttgccgggtggacggggtccatcgggccgaccgggctagccgccgacgagcggcggtcagagtttaacatcttgtcagggacatccatgtcgtgcccgcacatcagcggcctggcggcgttcgtgaaggcggcgcacccggactggagccccagcgccatcaagtccgcgctcatgacaactgcctacaccacggacaacaccgggtcgcccctcctcgacgccgcgaccaacaccacggccacgccgtgggccttcggcgcgggccacgtggaccccgtcagcgcgctctccccgggactcgtctacgacgcctccgtcgacgactacgtcgccttcctctgcaccgtcggcgtcgcgccgcggcagatccaggccatcacggcggaggggcccaacgtgacctgcacgcggaagctgtccagcccaggggacctcaactacccgtccttttcggtcgtgttcgaccggaggtcgtcgcgcagcaccgtgaagtaccggcgcgatctgaccaacgtcggcagcgccggggacacgtacactgtcaaggtcaccggacccagcgacatcagcgttagagtcaagccggcaaggctcgagttcaggcgggccggagacaagctcaggtacaccgtcacgttcaggtccgcgaacgccagaggacccatggaccccgctgcgttcggttggctgacgtggagcagcggtgagcacgatgtgcggagcccgatatcgtacacttgggggatgtagcactgatctccacagctgatccgagcatttatcttaccgccggagtgaattgggtctcagggatgccggaaatatatatcttcaataatgatacgaattcgcttgttatttactcggcccgtttcaaaatatatatggtt

SEQ ID NO: 140972 - DNA, 2380 bp, Zea Mays
ttcggtgaagctcactccctcacccaacgctccatagtccacactcgccgtgctccccatgcagcaaccgcttgtgctcctccttctcttcttcatcggctcggccaagtatgccgtcgcctcccgcgccgacgccggtgcggctacctacattgtctacctgaaccccgcgctcaagccgtccccctacgccacgcacctccactggcaccacgcgcacctcgacgccctctccctggaccccgcgcgccacctcctctactcgtacacgaccgccgcgccgtccgcgttcgccgcccgcctcctcccatcccacgtggcggcgctcaccactcaccctgccgtcgcgtcagtgcacgaggacgtgctcctgcctctccacaccacgcgctccccatcgttcctccacctcccgccgtacagcgcgcctgacgcggacgccgggggcccggacgtcatcatcggggtgctcgacaccggcgtctggcccgagagccccagcttcggggacgccggtcagggccctgtgcctgcgcggtggcgcgggagctgcgagaccaatgccaccgacttcccgtcctcgatgtgcaaccgcaagcctcctcgggtacgcgccgggcacggcgcggggcatggcccccggggcgcgcgtcgcggcgtacaaggtgtgctggaggcaagggtgcttcagctccgacattctggcgggcatggagaaggccatcgacgacggcgtcgacgtgctctcgctgtcgctgggtggcggcgcgttcccgctctcgcgcgaccccatcgcggtcggcgcgctcgcggccacccgccgcggcatcgtcgtctcgtgctccgctgggaacagcgggccgtcgccgtcgtctctggtgaacacggccccgtgggtaatcacggtcggcgccgggacgctcgaccggagctttccggcttacgcccagctcgccaacggcgagacccacgccggcatgtccctctactccggcgatgggctcggtgacggcaagatccctctggtgtacaataagggcatccgtgccggcagcaactcgagcaagctctgcatggagggcacactgaacgccgcggaggtgaagggcaaggtggtcctctgcgacaggggcggcaactcgagggtggagaaggggcagatagtgaagctagccggtggcgtgggaatggtgcttgcgaacaccgcccagagcggcgaggaagtcgtggcggacagccacctgctcccggcggttgccgtcggcgctaagagcggggacgccataaggaggtacgtggagtcggacgccaacccggaggtggcgttaacctttgccggcaccgcgctcgacgtgcggccggcgccggtagtagccgcgttcagctcccgtggacccaacagggttgtgccgcagctactcaagccggacgtgatcggcccgggcgtgaacatccttgccgggtggacggggtccatcgggccgaccgggctagccgccgacgagcggcggtcagagtttaacatcttgtcagggacatccatgtcgtgcccgcacatcagcggcctggcggcgttcgtgaaggcggcgcacccggactggagccccagcgccatcaagtccgcgctcatgacaactgcctacaccacggacaacaccgggtcgcccctcctcgacgccgcgaccaacaccacggccacgccgtgggccttcggcgcgggccacgtggaccccgtcagcgcgctctccccgggactcgtctacgacgcctccgtcgacgactacgtcgccttcctctgcaccgtcggcgtcgcgccgcggcagatccaggccatcacggcggaggggcccaacgtgacctgcacgcggaagctgtccagcccaggggacctcaactacccgtccttttcggtcgtgttcgaccggaggtcgtcgcgcagcaccgtgaagtaccggcgcgatctgaccaacgtcggcagcgccggggacacgtacactgtcaaggtcaccggacccagcgacatcagcgttagagtcaagccggcaaggctcgagttcaggcgggccggagacaagctcaggtacaccgtcacgttcaggtccgcgaacgccagaggacccatggaccccgctgcgttcggttggctgacgtggagcagcggtgagcacgatgtgcggagcccgatatcgtacacttgggggatgtagcactgatctccacagctgatccgagcatttatcttaccgccggagtgaattgggtctcagggatgccggaaatatatatcttcaataatgatacgaattcgcttgttatttactcggcccgtttcaaaatatatatggtttaaaaaataacctgtttgcaccgcgagagaaac

SEQ ID NO: 140973 - DNA, 1923 bp, Zea Mays
atttccctgccctttcccaccccaccaagtgccacagcagcttccacaggcgcgcggttcatccctgcgctcctatataagaaggtacggtgaagcaacttccggcaccacctcaccagctctgcacactctctactcgacaatcctctctagctcggccgtaacaatggagcttccaacatgggcgtccttcctcggcgtggtgctcgccaccgtgatgcttctgaaggccatcctcggccgccgcagccgccgcgtgtacaacctcccgccgggtcccaagccgtggccgatcatcggcaacctcgatcttgtgggcgcgctcccgcaccgctccatccacgagttgtccaggaagtacggcccgctgatgcagctccggttcgggtcgttccccgtggtggtcggctcgtcggtggacatggccaagttcttcctcaagacccacgacgtggtgttcacggaccggccaaagacggccgccggcaagtacaccacctacaactaccgcgacatcacctggtccccctacggcgcgtactggcggcaggcgcgcaagatgtgcctcaccgagctcttcagcgccaagcggctcgagtcgtacgagtacatccgcgccgccgaggtgcgcgtgctgctgcgcgacctgcactccgcgtccggctccggccgcgccgtcatgctcaaggactacctgtccacggtgagcctgaacgtgatcacgcgcatggtgctcggcaagaagtacctggacagggaggaggcggccgccggggccgtgaccacccccgaggagttcaagtggatgctcgacgagctgttcctgctcaacggcgtgctcaacatcggcgactccatcccctggctcgactggatggacctgcaggggtacatcaagaggatgaagaagctcagcaagatgttcgaccggttcctggagcacgtcgtcgaggagcaccaccagcggcggctgagcgagggcaagggcttcgtcgccaaggacatggtcgacgtgctgctgcagatcgccgacgaccctacacttgaggttgagctggacagggaaagcgtcaaggcttttactcaggacctcatcgccggtggcacggagagctcggcggtcacagtggagtgggccatctcggagctcctgaagaagcccgaggtgatcgctaaggcgacggaggagctggaccgcgtcatcggccgcggccgctgggtgacagagaaggacatccccagcctcccctacgtggacgcaatcgtcaaggagacgatgcgcctgcacccggtggcacccatgctggttccccgcctgtcgcgcgaggacacggccgtggccggctacgacatcccggccggcacgcgcgtgctcgtcagcgtctggtccatcgggcgcgaccccgcgctgtgggacgcgccggaggagttcatgccggagcggttccttggcagcaggctggacgtgaaggggcaggactacgagctgctgccgttcgggtccgggcggcggatgtgccctgggtacagcctcggcctcaaggtcatccaggtgagcctcgctaacctgctgcacggcttcgcgtggagcctccccgacggcgtgaccatggaggagctcagcatggaggagatctttggcctgtccacgccgcgcaagttcccgctcgaggccgtcgttcagcccaagctgccggcgcacctctacgccgagccttgatcgatgtgtgagtggttgtgcagcgcagtcaccatttttggcgttgctgtccactgttcagtgcgcgtgtgctagcttgcgtcatgcgctgcgttgtgacactatagttatagtggaataatggtgtaatcaattttatattatactatacgtttatacaacctagataaaatactcctacttttctcagatcgagcatatct

SEQ ID NO: 140974 - DNA, 894 bp, Zea Mays
gtcgcgtcactccccacacgcatctcgtcccttctctgccgcatagaccccgcccagcagagctcgctccggcgccctgcgagcaacgactgcggccccgccaactcctcgggcctcgccgctgccgccgtgtcaacctggcccgctccctccagccggtgggtgaggagcggctgtagccctgcaggaacccccggcaaggacatggacaagccaccgccccaattcgccttctatcacctcatccctgccctcaccttctcatgcctctccatgtgagtccccaaatcaatgagtgtcgttcccagcctgtcccttacacgtctatccctcgacaacatgttcctttgtggcatcctggatgacatgaacaggttcccaccaatcataggaaccacaacactcggttggtggccttctaggagctgttttgtgctttcttcaggatcttcgctactccaagagctgatttgcggatcagacaccacctcccctctctcagtcttagatcatgcgtatgtgcacacccatgtccttcactgtatctgcgcatgtgcacacccatgtcttttacagggcctgcacctgcaattgtgtgtgctttgcactgaaagttttccaatcaagaaaatttgcttacgtgctgatttcagagtttgtgttggaggcttgtcctcgtctggagagctctcgccatcctctagcggcagctgtagctcttttggccctctctgatgcttctccgcggtcagtacacattattagaaacaatcagatttttcacaggacaagagttcatagacatacagtaagtagattgcgtgttttagatgttagtatattacatatgagtaactaaggtgcttcggacaaaatatgttctttctcgtagca

SEQ ID NO: 140975 - DNA, 1849 bp, Zea Mays
ctcctctctctgcccccgctctcccgtttctctctctctctcaaccccacgtcacgccgtccccccctctctgccattattgcccgcgcagccatcctctctctccctctcgtcgcccccgctcacagtgtgatttatggggacgtccggctcctcgcttcctcatccagacctcccaccacctcctccgcatcctctcgccctgcttccgtcgggcgcgcgaacgcgagcttgtccgccacacccgcctcgtacgtgcgataccctccaccgcctcagcccgctgtgccccctgctcgtcaccgcgatttataccgtaccaccatcagccagccaccactcgctcctcgacattccgcttctctagtcccgaacaccggccgggactcgttagccgggtgtgcgccggtacggtgtgggaggtactctgctagcctccgctagtacatgtgaggtccatgggggaggaggtggcggtggtgctggagccaccacggcccaagtcgccgccgaggtacccggacctgtgcggccgccggcggtcgcagctggagctgcagatgctcaaccgcgagatcgaattcctcaaggacgagctacaattacttgaaggagttccaccagtttctagaagttgtaaagaggtaaatgactttgttggtactaaacaagacccactaataccgataacgaagaagacacacagatcatgccgtcttttttggtggatcagatcaaaactgtgcatatgcgtgccatggttctgctgttcctgccattgcatgcccaactgcaaaaggccatgcttcttggattgctcctgctgctcatgcccagatctgtcatgctgctatcccagctgcaaatcatgcaacaaaccatgctttgggcccaacagctgctcatgttgcgacatatcatgccgcaagccagattgcccatcctgtacctcgagctgcagctcgtgctgcaatcggccatgtggcaacccagactgcagctcgtgctgcacctgcaatccatcatgctgtaaaccaagctgcaactcgtgctgcagaccaaactgtagctcgtgctgcaatctgtcatgctgcaaacccagctgcagctcatgcttctcatgctgtaaagcgaactccagctcatgctgtaaacccaaatgcagctgcttcaaggccctctcgtgctgcaaattacagtgcagcccaaactgctgcacttgcagtctcccgagctgctcaggctgcaacccctgcggcagttgcaagcaatgctgctcatgccccagcgactgctttgattgcaagccaaactgcggctgtttcggcgcgcaatgctgcagctgcgtgggatgctgctcgtgctcctgccctcggtgctcaagctgcttcggttgcttcaagtacttcaagtgctccaacctgttcgggtgctgctcctgcaagcagtgcttcaagtgccagtcctcgtgctgcaagggggcgccgtcctgctgcaaatgccagtcgtcgtgctgtgagggtgaagacggcagcagcagctgctggaggtcatgctgcagcgttccgaagccggattgccctgggtgttcgtgcgggtgcgtttggtcctgcaggaagtgtacagaagggtgccgatgttctgggtgccgcaaaccatgctgtgccaccggatgcttgtgctgaagttgaactagacgttttcttgtttttttttatttgcgtgtgctatttagatgcctgttggcttcgttcgtgcttttgctatatggtgtagcgtccttgcctgtaaagaaatcccatatcaccagaagaatttgagacgtcaacagtcatcaagtactataaaa

SEQ ID NO: 140976 - DNA, 577 bp, Zea Mays
tggttagttacactgccagagttacaaggtttattatccaggtgtgcacaaggttcctcttccaccccatagttctgtcaaaaaatattatacgggtctttctgctcaggtcaattatatttggaaacaaaatggaatttggaaccatgtgagttgaaaacaaagcttctgtcaataaaaatacaagagctccacaggcaagttaaatgtcttcatatcctgagtcccaacacctatataatgctcatgctatcatgcaatgcgtagcaatattacacaagaatatttaccagagacacctatttgaccatttctcctctagcctgagaaagatgggaaagaaagtatgaaacttcagatattcaccggtgtatgtgacattacactcaaaagaataaagttctgcatataactagattctgtccagaataacacatactagcagagggataaccgaatgaattaattagccttggaaaggctgcactattatcaaaaactaaattttctcattagacgaccaaatcagtaaagatcacatggatatacaggccaatagcaagttactaaaaactaa

SEQ ID NO: 140977 - DNA, 1599 bp, Zea Mays
tctccccaactaagcctatctctctctctcttctctcccagaccttccctccggccagcctcaatctcccgcgtgagctcctcgaacgcacctctctcgatccgactgacatggccggcgcccagtcctggaggacctacctgtgctgcgtgggcggcagcgcggcggtcgaggacgacggctcgacgctgcggcggcggcggaggcgcggctgcggcggcggcagcagcaaggacagcccgaggtcgtcgtcgtcgcggatgtcgctcacgagcctcggctcgtcgtcggagacgctctcccccgaggacctgtcgctgacgctgtccgggtccaacctgcacgccttcacgtacgccgagctgcgctccgccacggccagcttctcccgcgccaacttcctcggctgcggcgggttcggccccgtgtacaggggcgccgtcggcgaggccctccgcccgggcctgcgcgcgcaggacgtcgccgtcaagtacctcgacctggagggcggcgcgcaggggcacaaggagtggctggctgaggtgttcttcctcgggcaactgaggcacaagaacctggtgaagctcatcggctactgctacgaggccgagcaccggatgctggtgtacgagttcatgagcttcgggagcctggagaaccacctgttcaaaagtaccaacggcgccctcccatggatgacgaggatgaagatcgccgtcggcgcggccaagggcctcgccttcctccacgacgctgacccgcaggtgatctaccgcgacttcaaggcctccaacatcctgctcgactcggtaagcgagctcatagctatatatatatagtttccctttctacttgcgtcaggcaagcacttcccgtcacagcacactgctaggcactcgcccacaaaaggacgcggttccgaaatgcaagctcacttgcaaacggtaactaccaacaaaagaggatgacaaacctggggcccaggtcccacaattgcatgaattcaatttaccagcagaaatcttataaaaaatactgtattaattttgaaccttttgaccacgcgagtcacccaagtggccattcagtaccacatcctgcagcgtcacacgtttctgaaccacgcacacttttgctggcacgtcatgggaagccttgacctgattggaacttggaagattattgctgggcaaacagccaaacaccaaacctgagaaaatctctggttatccagcctacactcacatcaacagcaactcagcaagccaaaatatcctaaccgtcactgtcagcctgtcccacacaggcaccccacaggcgatcaaacgtgaacagttctcaatagaccactaatacgtagatgaatccaacatgcctactctgtcgacctaactgtatcttctctgcttacaggactacaacaccaagctgtccgacttcggtctggccaaggacgggccacagggcgacgagacgcacgtgacgacacgtgtcatggggacgcacgggtacgcggcgcctgagtacatcctgacgggccacctaaccgccaagagcgacgtgtacagcttcggcgtggtgctttctagagctgctctc

SEQ ID NO: 140978 - DNA, 995 bp, Zea Mays
tctccccaactaagcctatctctctctctcttctctcccagaccttccctccggccagcctcaatctcccgcgtgagctcctcgaacgcacctctctcgatccgactgacatggccggcgcccagtcctggaggacctacctgtgctgcgtgggcggcagcgcggcggtcgaggacgacggctcgacgctgcggcggcggcggaggcgcggctgcggcggcggcagcagcaaggacagcccgaggtcgtcgtcgtcgcggatgtcgctcacgagcctcggctcgtcgtcggagacgctctcccccgaggacctgtcgctgacgctgtccgggtccaacctgcacgccttcacgtacgccgagctgcgctccgccacggccagcttctcccgcgccaacttcctcggctgcggcgggttcggccccgtgtacaggggcgccgtcggcgaggccctccgcccgggcctgcgcgcgcaggacgtcgccgtcaagtacctcgacctggagggcggcgcgcaggggcacaaggagtggctggctgaggtgttcttcctcgggcaactgaggcacaagaacctggtgaagctcatcggctactgctacgaggccgagcaccggatgctggtgtacgagttcatgagcttcgggagcctggagaaccacctgttcaaaagtaccaacggcgccctcccatggatgacgaggatgaagatcgccgtcggcgcggccaagggcctcgccttcctccacgacgctgacccgcaggtgatctaccgcgacttcaaggcctccaacatcctgctcgactcggactacaacaccaagctgtccgacttcggtctggccaaggacgggccacagggcgacgagacgcacgtgacgacacgtgtcatggggacgcacgggtacgcggcgcctgagtacatcctgacgggccacctaaccgccaagagcgacgtgtacagcttcggcgtggtgctttctagagctgctctc

SEQ ID NO: 140979 - DNA, 1264 bp, Zea Mays
cttcaatgcagcagttgctgggtgcttctttgccattgaaactgtattaagacctcttaaaccagaaaattcacctccatttacgactgcaatgataatattggcatctattatatcatctactgtttcaaatgttttacttggagccagaccagcttttatagtgccagcctatgagctaaaatctgctgccggttggaatggctgctacactagcttcagtctgttcagtcccattgacttcagtactgcttctctttgagctgacaaaggattacaggattttgcttcctctcatgtgaacaagggagaatattatgaactgaaggtcatgtatcagcgaaaagcaggctttcctcttgtagcaattgtgcactgaaaaactacagtgcccttatgacaccacaacagtcgctcgaatgcaactgtctggcctagcatccaatcgacctcaaccactcttcatcccacgagtgtgtggagctgatgaacttgtcgatgtaaaaatattcaacttcgaatatctttggctttagtgactagtcttctccattgtttctctagactttgaggttctaagcatgagcaagctgggttatgatggtgttgtggcactgctggttgctgatatatcactttcaatcggtcctgaccatattgaagctttgtatcagtatgccaaatttcagtttgagtgtggtaactactcaggggctgctgattacctttaccagtatggtgctttgtgcacaaacagtgagcgaaatgtgagtgccctctgaggaaagctggcagcagaaatcctaacgcagaactgggacctagctttggaggaactcaaccgcttgaaggaaataattgattcaaaggtacttgaatgctatacagacaaatgcacaccatcttattaggtatctagctacttcagttgttgtcaacaaaaggagaaggaatatgcttaaagagttgattaaggtcattcaacaggagcaccatacctacaaggatcccataactgaatttctggaatgcttatatgttaactatgtagttgtgggcttttgaacaatagctagagtgatatgaaacattagtgatgtagttgtgggcttttgaactacttcaagctagagtgatgtcgttgtggtgcttttgtgactgatcatctctggagcttttgtgaatgatctagctagctatctgtaaatgatctagttgtgaatgatatcataattgtgatgcttttgtgaatatataattgcgg

SEQ ID NO: 140980 - DNA, 755 bp, Zea Mays
aataaccctagttaataagtcttcatgatgccgcctcttcctgttcttaccttcttttccctgaagagctgcggtgtgaggagatacaacgatggcgcaacatcaacaagcgatggaggatccatgaaccatcccacctccttcatctcgaccaccaggtctaccatggtgtggatttgactctagctatagtgggtctaatggtagtggctccagcgatgactggtctcgacctctacttggcgccattccttccacgaccatgacaatagtggagctcaagcagaggcattgtgcttggctcctcggcggcggcgacgcctccaaatctgagcgggtcgttggcggcggcgactagatctgggtgacgacgcattaactcgatggtgaagaaaacccagtggcgacgatggacaaaattagttgcgacgacaacctaaccttgacgagcttggatctggagtcgacgggtttagatccaggctcacaaattttttattatttttaaatgggcctttacaagcggtctacgtaagagcctgcttctaaaaatagtgtttgtacaaatggttcttgaccaccgcttgattaaaattagattttctcaagctcttaaatggtagcgcccatggacaccgtatagaaaaaattgttttcaaccacttgtaaagacttttttttgtaatagtgtaaactaggtgtggtatacacattttgataattgatattagcctggtcagcattattattgtcca

SEQ ID NO: 140981 - DNA, 1630 bp, Zea Mays
aatggaggggcccaacgcagtatatagcagccgggtggtgccggacatccgacgctcgtgccagcaggccattcttctcgccttactccctcacagaacccagtaaaatattgccagtcccgccgtcgagatggccccacgccgcctgctcgtcctcgccgtcgtcgccctcgcggccaccgccgccgcggccaactccggcttcgcggactcgaacccgatccgccccgtcaccgaccgcgcggcctccgcgctcgagtccacggtcttcgccgcgctcggccgcacccgcgacgcgctccgcttcgcacgcttcgctgtgaggtacggcaagagctacgagagcgcggcggaggtccacaagcggttcaggatcttctccgagagtctccagctcgtccgctccaccaatcggaaaggcctctcctaccgcctcggcatcaaccgcttcgcggacatgagctgggaggagttccgtgcgacccggctcggcgcagcccagaactgctccgccacgcttaccggcaaccaccggatgcgcgccgccgccgttgcgctgccggagacgaaagactggagggaggatgggattgtgagcccagtgaaaaaccagggccactgtggatcatgctggaccttcagcactactggtgcacttgaggctgcatatacccaggcaactggcaagcccatctctctctctgagcaacagcttattgactgtggttttgcattcaacaatttcggatgcaacggaggccttccatcccaggcctttgaatacatcaaatacaatggtggccttgacactgaggaatcttacccttaccaaggtgtcaatggaatctgcaagtttaagaatgagaatgttggagtcaaggttttggactcggttaacatcaccctgggtgctgaggatgaactgaaggatgctgttggtctggttcgcccagttagtgttgccttcgaggtgatcactggtttcaggctgtacaagagcggagtttacactagcgaccattgtggaactacaccgatggatgtgaaccacgctgttctggctgttggctacggtgtcgaagatggtgtaccctactggctcatcaagaactcatggggcgctgactggggtgatgagggttacttcaagatggaaatgggcaagaacatgtgcggtgttgctacgtgtgcatcctaccctattgtcgcatgaggcccttacgaagtgttacatggtctgtttggcatcaataatgcatgtttaacctgagcttggcgatgggttatacagaacggaaactctgtttgtgaatagaaaatcatgaagggaaggagttgaccggacccctgcttgtacgtctccccgactgtgtaggtagattgtcagttggggttccgaagtactctactcatacgtgtgtatgacagtttatttatgaaacaaaatacgcattgatcgttatggtgcagcctgggatttcttattataacataatgtatcgtatgtataaacggaccgtcctcagcacggacctaatataagcacgacctgttggcatcacatcagggatgggccgcatggcacatcgcacctagagagatgacaatgggaatccgaatgcccgacggt

SEQ ID NO: 140982 - DNA, 896 bp, Zea Mays
atcagcgcccagcggctcagccataggagcatagtcctttctcctttgtgacccggcgcaaaaatatggcgtcgtcaccgtccctgcgccccacggacagactccgcaggcctccggcctctcccgcgttctgctccttttcggctgtctccctgcgcggcctcgtctcgctctccagcgcctctagggttctctccgtctccttccggcagcgcctgctgacggctgtgcggagctccagagaccctggagaggtgattgctagaaaaactaaagagatatggtgttgctggggttctgtcatatggactacttaacactgtctactatgtgactgcatttttgttagtctggttttatgttgcgcctgcacctggtaggatgggttatggtgcagctgttgagaggtttgttaaactaatggcaatggtctgggctggcagtcaagttactaagatttttcgagctggaggagcccttgctctggctccttttgttgagagagggctgaaatggttcacagtcaagttcaacttcaagtcagaagggaaggcttttatgactattgtagggttgtgctttgctgttgctgctctcatgttctttggattaacaatactttgggcatagaacatctgctttcctgacacagttaggaatcttgaagagatgctgtggatccaatcagtaacgcagtgatcacactctactgaaaaatctcacctaatattttcagtgtggttgtccatagcctgcatgaatatgtatcttcatggttcgttagtgatcgcaaacatcttgagtatacatatccctgtaaggtcctgttggaccgtgtgcagtcatgacacattttcaaaacaaaacatgtttgctagtggaattttgccatccaa

SEQ ID NO: 140983 - DNA, 1497 bp, Zea Mays
atcagcgcccagcggctcagccataggagcatagtcctttctcctttgtgacccggcgcaaaaatatggcgtcgtcaccgtccctgcgccccacggacagactccgcaggcctccggcctctcccgcgttctgctccttttcggctgtctccctgcgcggcctcgtctcgctctccagcgcctctagggttctctccgtctccttccggcagcgcctgctgacggctgtgcggagctccagagaccctggagaggtgattgatgtggctagtggtgaaggaactgagctacctggaggctccactggtccaagaaaagatggaaaagagactgccaaaagtttctcaactaaagagtattcactaactgtaaacccaaacgtcaatgatgataaatctgccatatcctatctagatgtcatggtataatttaataaggtcatggatgtcgaagcttatttttacattggaaattttgttgagtggaagtaaatcttgcacttgaagaggcagaagacctcccagaagtcaattctcttagaattattaatttaacaggtttgaaataaatattggcgatgtttttttgtcaacttattagactgaattggctgagagagctattgcttggatggatagagttaagataaaaaatggaattggaaataagaattattggttaaataaccactatgtatggatctagatctatcttgtttatactggccactaggaaatttgcaagccattctcatgaacatttacacacttatacttgtccttgtaatgacattagctttgccttttcaattccgtactacaagtgacattattgatcatgtatttctacaagtgacagattgctagaaaaactaaagagatatggtgttgctggggttctgtcatatggactacttaacactgtctactatgtgactgcatttttgttagtctggttttatgttgcgcctgcacctggtaggatgggttatggtgcagctgttgagaggtttgttaaactaatggcaatggtctgggctggcagtcaagttactaagatttttcgagctggaggagcccttgctctggctccttttgttgagagagggctgaaatggttcacagtcaagttcaacttcaagtcagaagggaaggcttttatgactattgtagggttgtgctttgctgttgctgctctcatgttctttggattaacaatactttgggcatagaacatctgctttcctgacacagttaggaatcttgaagagatgctgtggatccaatcagtaacgcagtgatcacactctactgaaaaatctcacctaatattttcagtgtggttgtccatagcctgcatgaatatgtatcttcatggttcgttagtgatcgcaaacatcttgagtatacatatccctgtaaggtcctgttggaccgtgtgcagtcatgacacattttcaaaacaaaacatgtttgctagtggaattttgccatccaa

SEQ ID NO: 140984 - DNA, 991 bp, Zea Mays
atcagcgcccagcggctcagccataggagcatagtcctttctcctttgtgacccggcgcaaaaatatggcgtcgtcaccgtccctgcgccccacggacagactccgcaggcctccggcctctcccgcgttctgctccttttcggctgtctccctgcgcggcctcgtctcgctctccagcgcctctagggttctctccgtctccttccggcagcgcctgctgacggctgtgcggagctccagagaccctggagagattgatgtggctagtggtgaaggaactgagctacctggaggctccactggtccaagaaaagatggaaaagagactgccaaaagtttctcaactaaagaattgctagaaaaactaaagagatatggtgttgctggggttctgtcatatggactacttaacactgtctactatgtgactgcatttttgttagtctggttttatgttgcgcctgcacctggtaggatgggttatggtgcagctgttgagaggtttgttaaactaatggcaatggtctgggctggcagtcaagttactaagatttttcgagctggaggagcccttgctctggctccttttgttgagagagggctgaaatggttcacagtcaagttcaacttcaagtcagaagggaaggcttttatgactattgtagggttgtgctttgctgttgctgctctcatgttctttggattaacaatactttgggcatagaacatctgctttcctgacacagttaggaatcttgaagagatgctgtggatccaatcagtaacgcagtgatcacactctactgaaaaatctcacctaatattttcagtgtggttgtccatagcctgcatgaatatgtatcttcatggttcgttagtgatcgcaaacatcttgagtatacatatccctgtaaggtcctgttggaccgtgtgcagtcatgacacattttcaaaacaaaacatgtttgctagtggaattttgccatccaa

SEQ ID NO: 140985 - DNA, 994 bp, Zea Mays
atcagcgcccagcggctcagccataggagcatagtcctttctcctttgtgacccggcgcaaaaatatggcgtcgtcaccgtccctgcgccccacggacagactccgcaggcctccggcctctcccgcgttctgctccttttcggctgtctccctgcgcggcctcgtctcgctctccagcgcctctagggttctctccgtctccttccggcagcgcctgctgacggctgtgcggagctccagagaccctggagaggtgattgatgtggctagtggtgaaggaactgagctacctggaggctccactggtccaagaaaagatggaaaagagactgccaaaagtttctcaactaaagaattgctagaaaaactaaagagatatggtgttgctggggttctgtcatatggactacttaacactgtctactatgtgactgcatttttgttagtctggttttatgttgcgcctgcacctggtaggatgggttatggtgcagctgttgagaggtttgttaaactaatggcaatggtctgggctggcagtcaagttactaagatttttcgagctggaggagcccttgctctggctccttttgttgagagagggctgaaatggttcacagtcaagttcaacttcaagtcagaagggaaggcttttatgactattgtagggttgtgctttgctgttgctgctctcatgttctttggattaacaatactttgggcatagaacatctgctttcctgacacagttaggaatcttgaagagatgctgtggatccaatcagtaacgcagtgatcacactctactgaaaaatctcacctaatattttcagtgtggttgtccatagcctgcatgaatatgtatcttcatggttcgttagtgatcgcaaacatcttgagtatacatatccctgtaaggtcctgttggaccgtgtgcagtcatgacacattttcaaaacaaaacatgtttgctagtggaattttgccatccaa

SEQ ID NO: 140986 - DNA, 1000 bp, Zea Mays
atcagcgcccagcggctcagccataggagcatagtcctttctcctttgtgacccggcgcaaaaatatggcgtcgtcaccgtccctgcgccccacggacagactccgcaggcctccggcctctcccgcgttctgctccttttcggctgtctccctgcgcggcctcgtctcgctctccagcgcctctagggttctctccgtctccttccggcagcgcctgctgacggctgtgcggagctccagagaccctggagaggtgattgatgtggctagtggtgaaggaactgagctacctggaggctccactggtccaagaaaagatggaaaagagactgccaaaagtttctcaactaaagatgacagattgctagaaaaactaaagagatatggtgttgctggggttctgtcatatggactacttaacactgtctactatgtgactgcatttttgttagtctggttttatgttgcgcctgcacctggtaggatgggttatggtgcagctgttgagaggtttgttaaactaatggcaatggtctgggctggcagtcaagttactaagatttttcgagctggaggagcccttgctctggctccttttgttgagagagggctgaaatggttcacagtcaagttcaacttcaagtcagaagggaaggcttttatgactattgtagggttgtgctttgctgttgctgctctcatgttctttggattaacaatactttgggcatagaacatctgctttcctgacacagttaggaatcttgaagagatgctgtggatccaatcagtaacgcagtgatcacactctactgaaaaatctcacctaatattttcagtgtggttgtccatagcctgcatgaatatgtatcttcatggttcgttagtgatcgcaaacatcttgagtatacatatccctgtaaggtcctgttggaccgtgtgcagtcatgacacattttcaaaacaaaacatgtttgctagtggaattttgccatccaa

SEQ ID NO: 140987 - DNA, 543 bp, Zea Mays
tttttttctatgtttgtgggttgagcatgatcctatggagattatagagactgttaaggtgtgtattaaagaggcagttggcagagatgttaaacacaatatggttactaatttgaaggccattgggataacaaattatagggaaaccatggtcctatagagtaaatccactagctatccactttgtaatgccattgtgtggatggatgctcgcacaaatcttctcatcatgcttcaacaatacaggagattggaaaatgagctgtcaggcggtagaacccactttgtggagacatgtgggttgtcgatcagtacctattttagtgctatgaaattattatggttaatggaaaatgtggtttccatgcttctgctattgcataggtatatagccttcagatacaacataattttggagaagagtttggaattgttcacatgtgatttttgaccttttcagattgaggaagacaattttttggtaccatattttggtgtatctagggttggtgctccggtaatttgggtttaacccatccaaca

SEQ ID NO: 140988 - DNA, 2651 bp, Zea Mays
tcctcacctccccaccgagctccattaatggcgcctcccctaattttgccataagtgccgagaccacgtggggtctgggaaggaaaggctactgccacttcagaggtcggcctgggaggctgcatcgcatccacatggggtaccagcccatgcacggcaacggcgggacagccggtgccgggacatcaggctccggcggcggcggcggcggagaccacttgcgccaccaccagcagcagcgcctgcacagcccccgcatggccggcggaggctccatgacgcgccgggccagctcgttcaagcgcggcgggggcggcgagatcgagctccagatcggctctccgcgctcgccgaggtgcgacgggttggggagccctccctcggactccgtggagtcgtccggtagcggcctcctcctccaccagagccagcagaaccagcacctccggttccggctcttcaagccgccggtctccggcggcagcgcggtcggacttggtctggggatccgcgagaggaggaagctcgggaacatgctgttcctcgccttctgcggcgtgtgcttgctcctcggcgtcgtcaagatcttggcgggcggctggttcgccctccctggcaatgacaaagacgccgatttgaaggatctctctatctccttctctggtgagaaagtgcatcaagctgatcatcacttcgtatacatgggaggaaaagagagtgacaggactttgatgacagtggaatctagcatcggtggaagagaagacggtgtggctgaggcctctgatatctggtctcagccaagcagtacaaatttcagacaatgcattgtttcaaactctcataaaaagcaagattctcatacgaatggttacattctcataaatgcaaatggaggtttgaatcaaatgagatttgggatatgtgacatggttgctgttgctaagatcctgaaggcaactctggttcttccttcactcgatcatacatcctactgggcagatgacagtgaatttaaggaccttttcaactggaggcacttcattgagtcactgaaagaagacattgatattgttgaaacacttccccctgaatacagtgacattgaacctttggctaaagctccggtatcttggtcgaaggtgcattattacagagatgaaatcctcccccttctgaagaaacacaaagtcatttactttacacatacagattctcgccttgctaacaatggccttcctagttacattcagaaattaagatgccgagttaattacagatctttgaagtattctcatacaattgaagatcttggtaataccctagtttcaagaatgcgtcaggaccgaagcccatatcttgctctccatctaaggtacgagaaggacatgctagcttttactggttgcagccataacttgacatcagaagaagaggaggaactgcgtaaaatgcggtatgaagtcagtcactggaaagagaaagaaatcaatgctactgagagaagaagccttggtggctgtcctttgacgccaagggaaacttcaattttactcaaaggactgggtttcactcgaagcaccagaatttacttggttgctggtgaagcttttggcaatggaagcatgaatgctctgaaggacgattttcccaatatttattctcattctacgctggcaacagaagaggaacttgcacccttcaaaaaccatcagaatatgcttgctggtcttgattacatcgtggctcttcagagtgatgtctttatttacacttatgatggaaatatggcaaaagctgtacaaggacatcgtcgttttgagaacttcagaaagactgttaatccagacaggatgaattttgtgaacctgatagatgaattcgatggaggaagagtgccttgggatatattcagctcagaagtgaaaagattacacaaagatagaataggtgctccatattttagggagcctggcgaattcccaaagctagaagagtctttctttgcaaatcccttgcctggctgtatatgtgagcaacatagtgaagaatgaagatgcaggtgtgctgatggttcttaacccacgcctctgaagtcagaaaatataggcctcttactgcctgccagatgttacttacaccgttgtcgagccacggtcagtgaattcgttccaatgaatacaccactgctgggacaattaattccagtctcagcccttactggactacacagtatggataatggatgttctgcaacgggcgtgactgaatcagtttttgcacgactgtagtatgagtggctaggcctatgaggctatgaaatttgctgcaattggtacataaaagatacacacactggaggagtgtatgccgagggcttataattttccacaacttttgtacttgattatttgtaacaagacattgtttgcagaattgcacaactacatttgcaaatacaatggtacatacaacatacatttccagtgctagccattcagaatgcagcaacggattttgattgtgcatacaaccctagcttatatgttcaagtctcaagaaaacagtttgaacttgtgcaaaatgtgtcaggttatagctatccatatatccgactaatttacatgaaactggccttgtatcccccactg

SEQ ID NO: 140989 - DNA, 196 bp, Zea Mays
cccagactgggccgtcctcggcccacacccataacaaaatcacgcacaattcccactgggccatccacggcccacatctttgacaaaaatcacgcacaattctcacaacgcgtgcttagtttttacaatttttatgtacacagtcccatgattacaatcttttgagattttttttttcgatttagatatttagaat

SEQ ID NO: 140990 - DNA, 2598 bp, Zea Mays
gtacccgcctacgtgcaccgggcgcatgggagcgatcgttgtggacctgtggcgcggcggtgtcccccagcctcttctctccctctcgcgcgacctcacaagcgcgaaccccacgaagccggagccaagccacgacgggtcgaccggtcgacggcccctcgacctgcccgcctcgcttcctccgacgcctagggttttctaccggacgccgccgccgccgcagcagcggcccgggatgcaggtgtgcccgcgcagttagccgccgtcggacccaccgccgccgcgcgccatgtcattcttgcggcggcgaaagccgctgccgccctctgacggtgacgagtccgaccacgacgacaacgacaaggggaagaagccgtcctcatcctccgggtcgccgtccaaggagcccacgaagcggaccaaggccaagtggtcgtgcgtggacagctgctgctggctggtcgggtgcgtgtgctccgcctggtggctgctgctctttctatacaacgcgatgccggcctcgttcccgcagtatgtcaccgaggccatcacggggccgctcccggacccgcccggggtcaagctgcagaaggaggggctgcgagttaagcaccccgtcgtcttcgtcccgggcatcgtcaccgggggcctggagttatgggaggggcaccactgcgccgaggggctcttccgcaagcggctatggggcggcacatttggtgacgtatacaagagacctctatgctgggtcgaacatatgtcattggacaatgaaactggattagacaaacctggaataagggtcaggccggtcacaggcctggttgcagcagactattttgtccctggatattttgtttgggctgtcttaattgccaatttagcacgtattggatatgaagaaaagaccatgtacatggctgcatatgattggaggttatctttccagaacactgaggtccgtgatcaaactttgagcagaataaagagcaacattgaactcatggtagcaacaaatggtggaaatagggtggtggtgatcccacactccatgggggtcctctattttttgcattttatgaaatgggtcgaagcacctcctcccatggggggtggcggtggtccagactggtgtgagaagcatattaaagctgtaatgaatattggaggacctttcttaggagttcctaaggctgttgctggccttttctcatctgaagccaaagatgttgccgttgctagagctatcgctcctgatgtcttggactctgatttccttgggcttcaaactttgcgccatttgatgcgtatgacccgaacatgggattcaacaatgtcaatgattcctaaaggtggtgatacaatttggggaaatctggattggtctccagaagatggcattgaatgtaaagctaagaagcacaaagccaatgatactggggtttctaaggatagcaatgggggaaatatcgaggttcaacctgaacctattaactatggaaggctggtatcttttggtaaagatgtagcagaagcaccttcttcagagattgagcagatagaatttcgtgatgctgttaaaggtaataatatcgcccattcaaatacgtcatgccgggagatctggacagagtatcacgaattaggatggggtggaataaaggcagtcgcagactacaaagtttacactgctagttctgttgtagaccttcttcattttgttgctccaaggatgatgcagcgtggaaatgttcacttttcatatggaattgctgataacttggatgatccaaaataccaacattacaaatattggtcaaaccccttggaaacgaagttaccgaatgctcctgacatggaaatattttccatgtacggagtaggcattcctactgaaagggcatatgtctataagttggccccacaggcagaatgttatatacctttccgaattgacacctcggctgaaggcggggaggaaaatagctgcttgaaagggggtgtttacttagccgatggtgatgaaactgttccagttcttagtgcgggctacatgtgtgcaaaaggatggcgtggcaaaactcgtttcaaccctgccggcagcaagacttacgtgagagaatacagccattcaccaccctctactctcctggaaggcaggggcacccagagcggtgcacatgttgatataatggggaactttgctctaattgaggacgtcatcagaatagctgctggggcaaccggtgaggaaattggtggcgatcaggtttattcagatatattcaagtggtcagagaaaatcaaattgaaattgtaacctatgggaagttaaagaagtgccgacccgtttattgcgttccaaagtgtcctgcctgagtgcaactctggattttgcttaaatattgtaatttttcacgcttcattcgtccctttgtcaaatttacatttgacaggacgccaatgcgatacgatgttgtaccgctattttcagcattgtatattaaactgtacaggtgtaagttgcatttgccagctgaaattgtgtagtcgttttctttacggtttaataacaagtgacggagcagtacaccaagc

SEQ ID NO: 140991 - DNA, 665 bp, Zea Mays
cttctctccgcggaagacccgtgcctggctggtggaccccggcgctcggatccgtcttcttcgcgtcaccagccgcgcggacttggcaaacgccacgctggaacctcgccgcgcatctcggaggcccaaccgaatcccagtcgcgcggccaaccccaaaatcgcgaggagaagtgcgtagtcgccggtgtgcaagggaccggcatggggccgccaccgtgaagtcttggttcggtggtgcctctgccccaatttgagtctcccatgcatcgccggtgagaatagaagctgccggtgggaagaatcgcgcgggggtgctgttgtgggctcgggaatttctccccggagtctagccgccaccgtagagccgcgcctggccggggccaggctgaatgctgctgcgatccacggtgagacatcctccaaccagttcgtttatgcattcacttacgtttgtgcgcgatagggctcgggtgggggagatctgcgtccgatgaacccggaattccacaccggagcctggactcgtggccaagccgcagtgtgctgcagctagctcccctctccgccctccaacgatgacgagcaggctacacaggattctgaggttcagctggtagagagagctgagcaggagctcgttgaaggcaagttgtgcccttgatc

SEQ ID NO: 140992 - DNA, 465 bp, Zea Mays
caggccagccccaaaatcgcgaggagaagtgcgtagtcgccggtgtgcaagggaccggcatggggccgccaccgtgaagtcttggttcggtggtgcctctgccccaatttgagtctcccatgcatcgccggtgagaatagaagctgccggtgggaagaatcgcgcgggggtgctgttgtgggctcgggaatttctccccggagtctagccgccaccgtagagccgcgcctggccggggccaggctgaatgctgctgcgatccacgggctcgggtgggggagatctgcgtccgatgaacccggaattccacaccggagcctggactcgtggccaagccgcagtgtgctgcagctagctcccctctccgccctccaacgatgacgagcaggctacacaggattctgaggttcagctggtagagagagctgagcaggagctcgttgaaggcaagttgtgcccttgatc

SEQ ID NO: 140993 - DNA, 1949 bp, Zea Mays
actcgctcctcgagcctcctgcctgccatcaacgccagatcctagcccgccattaatgccgttaacccgagctcgagatcggaggcggcggccccgtgttcgcgccaggagtggccaccgtacgtgtgacacgcgccgccgccgtttataaaagcacaccgccgctcgctcgctcgctcgcccgcccgcccgccactactcactcggctcgggttctgctctgcacctcagtacctcacactgtcaccgcgcttctgtgacctgacgaccttcggcggcaggatgctcacgtgcatcgcgtgctccaagcagcagttcgccggcggcggcccgccgctgcacgaaccgccggaggacgacgatgtagttgacggaggaggcggcggcacggcgacgcccagaacacggcacgccatcaaggcgctgactgcccagatcaaggacatggcgctcaaggcgtcgggcgcgtacaggcactgcaagccctgcgcaggctcctcggcggcggcctcgcggcggcaccacccgtaccaccaccgcggcggcagcgccttcgggggctccgacgccggctcggcctccgaccgcttccactacgcgtaccgtcgcgcgggcagttcggcggacgccacgacgtccatgagcgtgcgcacggacttccctgccggcgacggggaggacgacgaggtggcgtcagaagccgctggcggatgcggtggcaaggacgacgacgccaaggagtgggtggcgcaggtggagcccggcgtgctcattaccttcgtctcactggcgcaaggtggcaacgatctaaaacgtattcggttcagccgtgagatattcaacaaatggcaagcacaaaggtggtgggctgaaaattatgacagaattatggaactttacaatgtgcagaggtttaaccaaactgtccctctagtcccgactaccccaaaatctgaagacgagagctccaaggacgacagcccagtaacaccaccactggacaaggaacggctgcctcgcactttccacagacaagaaaagttgggtgcagcgatgggctactcgtcatcagattctctcgagcatcactcaaaccgctactgtactggcctcctgcaccagcatggacaccaatgctgtgattcaatgggcctggcatcaacaccgaagttgtcaagtatcagtggggccaagacagaaacctcatccatggacgcatcgatgaggacaagctcgtcacctgaagaggtcgacaggtctggtgagctcacggtgtccatcagcaatgcaagcgaccaggagagggagtgggtcgaggaagacgagcctggtgtatatatcacaatccgggctttacctggcgggaccagagagcttcgccgtgttcggttcagccgggagaagttcagcgagaggcatgccagactatggtgggaagagaaccgagcgaggatacacgaacaatacctctgagaagaaacgcccgagaccatcagcatcagaagcacagaaagctttccttcggttgagctgatggtacatctggcactaacacttctacatgcatttccagcttcattcaatgttttgatgaccgaagaggcgaaggggtcccgtttccggcattttacattctttcagtccttttgccgttttctcgtcagttttgaactggaaatgcgtgagcgactcatttagctcaaaaaggtctctcgttttgggggtggggtaatgtacgtctttcactgctgagcctgtagtttccactttccggcaaccaaaaggtctctcgtttttcatcaataatactacatatctacctgttgtttcccataggacaaaatagcatgtttgtgtcgttgggcactattttgctgttgtcactgtcttattgtactactcttccagacagcacaattatcaacacacaagttggtactgagtgcgcc

SEQ ID NO: 140994 - DNA, 954 bp, Zea Mays
cctctcgatttcgacaggcctcgtgccgctaaccacgtgtccgaaaccgccacgttttgcggcctcgacgtcgtcctcatcgtcgtgatcatcatctccgatgctgaaccggccatcgctgccgctgccgcctcccttcaccagcggcaggtactgcggctcctcggggtagagcttcgccatctggaggtagaacaggacgacgaacaccaccgtgccggtgaggtaccagctgaactggaggttgacgagcgacttggcgcggtcgagcgcgtcgtcagtgcggcaccggacgacgtcgtgcccttcctcgaagttgaggaagcagcccttgggtatgagcgccggcgtccacagcatgacgcccatgacgacgaaccagacgccctggaacacgaggctggcggaccggaccaggctcaccgcgaagctccgcgggtaggggatacccagcagcgtggtcgcgagcgtgacggcgatggccgtctgcagcagccagtggaactgcccctccacgcccatgtggtccgccgagtggaggtggaagatgagcagctgctgcgcgaacgccgcggcggccacgagctgcgacacggcgtcccgcatgggcgccctcgccctgtccaggtggatggtcaccgccgcgaagacgagcagcgccagcgagatggacgcgtgctcgaagttgtggaggtggtcggacgggatggtgccgtcgtcgtcgaacggctggtgcttcgcggggccgatgacaagctccatcaggatggacagcaccgtgccgatgattatgagtatgagctccaggtgccgcacgcccggcaccgggaaccagaccggggcagagtacgagctcggccgcagcaggaacaggcgggtgtggctgaacagctgccacaggccgatgaggaggaagccggcgcccggcgcgacgtgcccgacgagggtgcccat

SEQ ID NO: 140995 - DNA, 1182 bp, Zea Mays
aacagcagccgggcagtcgagagaactcctggagccgtgggtgcctgggtggctagctgtaggtcttccttcttgcttccctacacatccgatcccttaccctaggggcacatctcgcgctcttgcgctgcgacggcgaattggcaatgagtgagcaagacgggcagcacgtcgggggcagcccgccggacgcggccatcgagtccttctcacagctccccttcgtgcgccccaagcccccgcagccggcgtcctcgtccagtccgtcgtcgatccggctgttcggcttcgaggtcccacccgacgccgccacgtcctccaccgcaaccagtgacgctaccgccgccagcgccaccgtagcgggccaggcggcggcgtcgggcgcggcgggtgcaggtgcaggtgcaagcgatggcaccggcggagggcgcaagttcgagtgccactactgctgccggaacttcccgacgtcgcaggcgctgggcgggcaccagaacgcgcacaagcgggagcggcagcacgcgaagcgcgcgcagtaccagagcgcgatggccatgcatcacgcccactacccaggccacccccacgcgtaccccgccttcactagctaccaccagcagcagcgcttcggcatggcgcgctacgagcccccaccgccgggaccgccgccgcactacccctcgtggtccccgcaggctgctccgccagtggtgcccagatactacggcagggcctgctccctgtcgcagcccatcaacggcagccccatcccggctgccgctctctggcgggtcccggccgtcaccgcggccgcgccactggtgcgccaagagcggccgacgccgctgtccttgggcggacgtgacgaggaggaggcaatgacaggagcaagaagagggaacgtcgtagctgcaagacaggtaggctcgcgctcttcctcctcgtcatccacggcgtcgcagcacgaacgccgccgggcaggtgctgctgagaacagagagaacgtgagtctggatctcactttgtaattctagacgaacagtgggtgttatcatttagcgggttcgtgcagactgagaaaactattattctctagctcttgaatttgtttaggcagtggccttcagttgagagactcatttgttcgatttttatctaattcttgggttcaatttctttttg

SEQ ID NO: 140996 - DNA, 250 bp, Zea Mays
ctacttattaaggcggtaaggggtaggttggcattccgtgttctgccattcccattcctccctccccgcactgtctttctcattctcccctccccgcaaagcccattcccattcacggctgccattccgtgttctgccagtgttctaccattcccattaccccctccccgcactgtctttctcatttccccctccccgcaaatcccattcccattcccacgtgcatcacacgcctagctaaaattaaatt

SEQ ID NO: 140997 - DNA, 846 bp, Zea Mays
catcacatattcacatcgcatcaagcttgatttacttcgatccaagaaagccacctgctaatcacctcacctgagataccaaacgttcacgaaccgccagccgaaggcctgaagccacagctaaggagcgagatccatggggaactcatacagcgggggtggctcggcgccggcgccggcggcactggaagtgccgctgcacctgtgcttcttcctgctggtgctgctcctcttcctggcctgctcgtggtacacgagctacgagtcggccgcggagtcgttcgcctaccaggcgcgcatcgtgctcatggcgtcgccgttcgcgctgctgctggccgtgcggctgctgtccagcgtctctggcgagggcgcgggccggagcgtgggtcacctgctggcggtgccgatgcctgagcgggactccatccaccgcgccggcgggtcgccgtggggcgtcggggtcctgctcctgctgctcctcgtcatggtttcctaccagtccaacttccgggagaaatggttcccgctcgcaagcaggtgagctgaaccatccatgcatggcgcggttggtgccgggagacgtccatgtatgtaaacaaacgcttgccgattgtggcggtgcgcttgaggctttcacgtctacttgtctgtaactgtaaaagtgtacgtgatgagttatatccgcggtaaatgcaatctccaattgtcaatacaacgaatcagtaatactggctctggctgtgtggtgtgctcaatgctaagtggctggccagcacaaggcaataagttgcgagcagctctcacgctctatgtaagttgttttattaattttaattaattttattt

SEQ ID NO: 140998 - DNA, 1808 bp, Zea Mays
accaaactgcattacaccacgatacactccactacaccctctcgagcaacaccaggaaccataccaaatcccaagtagagaagagcaagggctgcagctggcaagaagctttgctcagaaatggagttcctgtcgcagatgtggtcgctcctgggcctgctcaccatcctgcagaacgtcctccccacgcagctgctctccttgctgcactcgctgtggcagtcgctccaagactctctcacgccctactcctacttcgacgtgcccgagttcctcggctctgcggccgtcgagcccaacgcgctctaccgccacatccagctctacctccaccgctccctcctcctctcctcgcctccgccgccacgcctcacgctctcgctgccgcgctcctccgccggctccggcggccacgcccacggcgctgcgccatccccgccgtcggtgtcgctctccccaaaccactcggtcgcggacaccttcaacggccaccgcgccgtgtggacgcaccacgccgacacgctccaggactcgctcgaggagcgccggtccttctcgttgcgcctcccgaagcggcacgccgcggcggtgctcccggcgtacctcgcgcacctggccgacgcggcggaccacctggagcgctcgtcgcgggcgcggaggctgcacacgaacgcggcgtccccgcgtggcgccgcggcgtgggcgtcggtgccgttctgccacccggccaccttcgacacgctcgcgctcgacccgggactcaaggcgcgcctccttgccgacctcacggccttctcccaagggagggagttctaccgccggacaggcaggccgtggaagcgcggctacctcttgcacggcccgcccggctcgggaaagtcttcgctcatcgcggccatggcgaaccacctccgctacgacgtgttcgacctcgagctcacccgtgtggccaccaacgcggacctccgcgcgctcctaatccagaccaccaaccggtcgctcattgtcatcgaggacatcgactgctccctccacctcactggcgaccgaggcctagcctccgagaggctgcacaagagacgcaagctccacgccgcttcctacaacgacgactcatccgactcggacgacgacgccggtgccaatggcgacgacaaccaccggggcaaggtgacgctgtccggcctcctcaacttcactgacggcctgtggtcgtgctgcggcgaggagcgcatcatagtgttcacgacgaaccacgtggacggcatcgaccccgcgttgcttcgcccggggaggatggacgtccacgtgcgcctcgacgcgtgcggcacgcacgccatgcgcgagctggtgcagcgctacgtcggcgttggcgaccatgagatggtcgacgccgctgaggactccatcaggggcggcgccgagatgacgccggccgaggtcggagaggtgcttcttaggaacagagacgaaccggaggcggcggtgacagagctcgccgccgagctgaaagcgaggagaagcgcggctgacaatatccatgagtgggacgactccgcggcggagctctccgacgggtcgccgaccaagaaggggaggaaggggttgggatgggagggcaagatcaggatcctgggaaggctgagaagcctcaccaagtcggagtcgggccgccgatgagttagtttgactttgttttaggtcaggtcttcgtccgatccgcatttctgtttacatcggagggttatcagcaaattaatcagacggtcgagcagtcgttggacgccccccgcggatctatttaagtc

SEQ ID NO: 140999 - DNA, 1023 bp, Zea Mays
atggacgctacacggctcgccgcagcctgcgccaagattgacgagtacgctgccgtgggagcacccatgagcggcgccaaaatcgcggccatctgcgctataatcgaagacggcgccaccgctcgcaagcaccgcaggaaaaagaggaggaggaggctgtgcgtggacagcacccgcagctacaagcagataggcgaggtcggcattggtaatttcggcgccgtcatcctggcacgccaccgcaagaccggtcaggccgtagccataaagacattccgagggcgagacggcaagaaatcccccgacgtcggcgaggtgctgcgggaggcctgcttcctggcggcctccgccggccaccccaacctcgtcggactccacaccgtggcacgcaggccgggcaccaaggagtacttcgtcgttatggaattcgtcgggccgagcctgcgccacgccctgaataagcacctgcgtatccacgacgccccgttccctgaagccgatgtgcgtcggatcatgaggcatatcctaaccggtgcccaggcgatgcactcgctctgcatcgtccaccgtgacacaaagcccgtaaacatcctcgtcaaagaggacggcagggtcgtgaagatctgcgactacgggctggcgatatccgactacgacgagcgcgtggacctgtggtccatcggctgcgtcatggcggagctgctctccggcaaggtgttgttcaaggtggagaacggcgtgcgacagatcgacaagatcttcgacttgctcggcgcaccggccgaggaaacgttcgagacattcatgtcgccgttcatgtgcggcaaggtgctgcgacggcgagcccggctgccaccaccgcgccgcgacagtcgactgcgcgagctcttacccagtgatgtgctgtcagaggatggatacggtgtcttgaaggggctcctgacgtgtaaccctaaggagaggctcacggccgccacggctctccaactcccgtggttcattggcaccgctggtgtcccgtag

SEQ ID NO: 141000 - DNA, 935 bp, Zea Mays
gatcgagttggctcattaacaattcagtttcgttaacaagcctggagggaaaaaggacacatcacccaaaggcacagggaatcgcaccatcgtgggacccgtacagcgcaccgcccagccgccggatctgcgccggcgacgcgcccggacgtcggatctacgccgccgcaggaggggggaggcggcgctgtggccgttctctgcccgtgagcgcccggatccgtcccgccggtgagtccccgcgccagctcctcggcctgtgatgaatgtcgttcgacgggagccacagcgggcggtgctagtccggactcgctaaatttcttgattttggggacgtgtttgatcgaaatgagcgcctgcaaccgccagtgattccgtgccatttctctcttttatcgatccaggtcataattccagaccgctggcgtcgtcgggtacttaggttccgacatgttcattcatgaagcgtgttttggctttctgattttttggtgttattcaattgcaaatacgtgggcttcggatctcgtataatttcttatcaaacatgttggattactcgtggagtgtttctcacttgtgtgaaaccgtgtgagctatttgaacaattcgatccggtcagcaaagggaaaacttttttttaaaaaaatatctgtgtggggggatcgatttgttcctagcatcctgtggacttaaatcagttgaactttggagtccttgtttagcttgtcaccgtcaattaattctacttcatttctggccgcatgcaaaatctgcctaactaatcgtaaacatttctggtggcatgcaaaatccgcactgatcccaatcactggattgtattacagacctatgtgattctgatgatatttggtcacctagtaccaaaacaggcggaaatggttgttttcctcgagaagctaattattattttt

SEQ ID NO: 141001 - DNA, 579 bp, Zea Mays
gatcgagttggctcattaacaattcagtttcgttaacaagcctggagggaaaaaggacacatcacccaaaggcacagggaatcgcaccatcgtgggacccgtacagcgcaccgcccagccgccggatctgcgccggcgacgcgcccggacgtcggatctacgccgccgcaggaggggggaggcggcgctgtggccgttctctgcccgtgagcgcccggatccgtcccgccgaattattaccggtatggggagttcgacacctgcttcggcaagtggggcgatcttatgggctgcctcgctctcaagacaaagcggaaggcagaggtggaggagatcctcatcgcgcgggagaaggccaaaccacatatctggacctaccggacggtcgatgaggcatcggagaattggtggcggatgtacaagcatgctgtgatgatgtcaccactgccaggttctgctcagcttcctcccaggtccgatgaatcttgatagtcgaggggatttgtgcaagtgttttgtttgcgcttatgtcacattatggcattagcgatcatttctgttcaaaatcttactgtaaac

SEQ ID NO: 141002 - DNA, 1268 bp, Zea Mays
gatcgagttggctcattaacaattcagtttcgttaacaagcctggagggaaaaaggacacatcacccaaaggcacagggaatcgcaccatcgtgggacccgtacagcgcaccgcccagccgccggatctgcgccggcgacgcgcccggacgtcggatctacgccgccgcaggaggggggaggcggcgctgtggccgttctctgcccgtgagcgcccggatccgtcccgccgcaaggattatggatccgaaagagaagccaaatgtatcgagcagtccaccaacaccacggctggactgcataaaatgctttgatatgctctggttctgttactcaccattccaccagatgcagaattattaccggtatggggagttcgacacctgcttcggcaagtggggcgatcttatgggctgcctcgctctcaagacaaagcggaaggcagaggtggaggagatcctcatcgcgcgggagaaggccaaaccacatatctggacctaccggacggtcgatgaggcatcggagaattggtggcggatgtacaagcatgctgtgatgatgtcaccactgccaggttctgctcagcttcctcccaggtccgatgaatcttgatagtcgaggggatttgtgcaagtgttttgtttgcgcttatgtcacattatggcattagcgatcatttctgttcaaaatcttactgtaaactacaataccaagagatggaaccattgaggtaggcagaacatgtactgctgaagattgagaatttgaaatcgccttggattcagaagcaaataaatgaacgaggtttcctttatgttctgtttcttgtttggattcagaagaatgggaaatgtgttcattttgtaaaggaatcagtagtacatctgaagagtgcaggtgtgttcgcagttcttatgctgtggtgctgctaccttcgtaaatatgcagcacattttcacaccgaccagtttttttttgtgtaccctacgaaccaaagtaatgtaattatggtatttggtaccagttcagatgacatataatttgttaaagattatggcgcagtgagtgaaaataatcaacgtttcttgagagatgtttggtgggataatttcgatcctcatgtcaaaatgaaagacatataccgtgcaatcacttatttggaggaagcctgtaattaaactattaagagcatctaatttatatccatcgttttatatggaagtggttaaacgttaaatagacactaggttttagatgaaaaaagattaa

SEQ ID NO: 141003 - DNA, 1349 bp, Zea Mays
gtatttcctagatttgtctagaatcttacatttatcattgcatgaacgttcattttgtgttatatagtattcatttatcatatatatcaatcaaaatggtcctgtgatatcgagcttcagttgatgcagaggtggtgaaaacatcttgtcttctccaaagactgctgactgcaagttgcaaaagtttgtctttagcttgctgtgttgtttcttcctgcggagtacacgagaagtttgtagatagagtttctggtgtgccttttcctgtaccaatgtgtataaatcttacattgctggcctcttattatgcagcaaggattatggatccgaaagagaagccaaatgtatcgagcagtccaccaacaccacggctggactgcataaaatgctttgatatgctctggttctgttactcaccattccaccagatgcagaattattaccggtatggggagttcgacacctgcttcggcaagtggggcgatcttatgggctgcctcgctctcaagacaaagcggaaggcagaggtggaggagatcctcatcgcgcgggagaaggccaaaccacatatctggacctaccggacggtcgatgaggcatcggagaattggtggcggatgtacaagcatgctgtgatgatgtcaccactgccaggttctgctcagcttcctcccaggtccgatgaatcttgatagtcgaggggatttgtgcaagtgttttgtttgcgcttatgtcacattatggcattagcgatcatttctgttcaaaatcttactgtaaactacaataccaagagatggaaccattgaggtaggcagaacatgtactgctgaagattgagaatttgaaatcgccttggattcagaagcaaataaatgaacgaggtttcctttatgttctgtttcttgtttggattcagaagaatgggaaatgtgttcattttgtaaaggaatcagtagtacatctgaagagtgcaggtgtgttcgcagttcttatgctgtggtgctgctaccttcgtaaatatgcagcacattttcacaccgaccagtttttttttgtgtaccctacgaaccaaagtaatgtaattatggtatttggtaccagttcagatgacatataatttgttaaagattatggcgcagtgagtgaaaataatcaacgtttcttgagagatgtttggtgggataatttcgatcctcatgtcaaaatgaaagacatataccgtgcaatcacttatttggaggaagcctgtaattaaactattaagagcatctaatttatatccatcgttttatatggaagtggttaaacgttaaatagacactaggttttagatgaaaaaagattaa

SEQ ID NO: 141004 - DNA, 803 bp, Zea Mays
gtatttcctagatttgtctagaatcttacatttatcattgcatgaacgttcattttgtgttatatagtattcatttatcatatatatcaatcaaaatggtcctgtgatatcgagcttcagttgatgcagaggtggtgaaaacatcttgtcttctccaaagactgctgactgcaagttgcaaaagtttgtctttagcttgctgtgttgtttcttcctgcggagtacacgagaagtttgtagatagagtttctggtgtgccttttcctgtaccaatgtgtataaatcttacattgctggcctcttattatgcagcaaggattatggatccgaaagagaagccaaatgtatcgagcagtccaccaacaccacggctggactgcataaaatgctttgatatgctctggttctgttactcaccattccaccagatgcagaattattaccggtatggggagttcgacacctgcttcggcaagtggggcgatcttatgggctgcctcgctctcaagacaaagcggaaggcagaggtggaggagatcctcatcgcgcgggagaaggccaaaccacatatctggacctaccggacggtcgatgaggcatcggagaattggtggcggatgtacaagcatgctgtgatgatgtcaccactgccaggttctgctcagcttcctcgggtccctaagccgacgagtgagtgtgctgcgtgccccagcccagatgggtcgagcgcgtgggcgagcgcggaggggggagaggcgaggcggccggagccgagcgtgagagaggtggaagtcccgcggcct

SEQ ID NO: 141005 - DNA, 596 bp, Zea Mays
acgacttctgaaacgggtaatgctagtgctgagctgctgaagacggttgtgctctcaggcaccaaaacattcggatctgaaatcctaaacggaagtgagacgcccaatcggtgatccaccgcttccccgtcggtaccatgtccgctggaagcgagaggccgtacgccttctcgcccccgtcggcggtcccgggccccttctcccgcggctccggctccgctcccaccacggccgcgacagatagcactgggaggagctcgtcctccgtggcgccgacgaagagccgaaagccaccgttccggcccgccgtggacgacacaaagcccgtcctccgcgatccggttcgtatcccacctggccagtaggaaactaggaactgctcctcgtcgcatctcttgttcgtgcagagttgctgatctagtgggttctggttctgtgattttcgggggcgttgttgcagatatcacgctcggacctggcggtcaccgagcaggtcgtgctgcggctgccgccgttcccctaagttcgcgccacccaatggtacgccgtaccactctaccagctactgtctggatcagttttagttctgtagcatt

SEQ ID NO: 141006 - DNA, 858 bp, Zea Mays
acgacttctgaaacgggtaatgctagtgctgagctgctgaagacggttgtgctctcaggcaccaaaacattcggatctgaaatcctaaacggaagtgagacgcccaatcggtgatccaccgcttccccgtcggtaccatgtccgctggaagcgagaggccgtacgccttctcgcccccgtcggcggtcccgggccccttctcccgcggctccggctccgctcccaccacggccgcgacagatagcactgggaggagctcgtcctccgtggcgccgacgaagagccgaaagccaccgttccggcccgccgtggacgacacaaagcccgtcctccgcgatccgatatcacgctcggacctggcggtcaccgagcaggtcgtgctgcggctgccgccgttcccctaagttcgcgccacccaatggtacgccgtaccactctaccagctactgtctggatcagttttagttctgtagcattaacaacgattgtgcatgctttggttcacctgttgtttaacgctagctacagaagttcttcactaccctaccaacaatattcaggtgttgaatggtccgatgtgtatccagcataagattttgtggggtcttctctttgtttggaatgaatgaacacaacccacatgtcactgcacgaaatgttgctaatttgctcaaggatatagaaggagatcctgatttggccgaaatagagttatacatttatccacagctcttcttaagtagattgggggttctccctatcgctggttggaccctaactgtgaaaagctttcttgttccagactctgttgtaatgcttaacattatgattttctttataacataggcatatgaaaat

SEQ ID NO: 141007 - DNA, 682 bp, Zea Mays
acgacttctgaaacgggtaatgctagtgctgagctgctgaagacggttgtgctctcaggcaccaaaacattcggatctgaaatcctaaacggaagtgagacgcccaatcggtgatccaccgcttccccgtcggtaccatgtccgctggaagcgagaggccgtacgccttctcgcccccgtcggcggtcccgggccccttctcccgcggctccggctccgctcccaccacggccgcgacagatagcactgggaggagctcgtcctccgtggcgccgacgaagagccgaaagccaccgttccggcccgccgtggacgacacaaagcccgtcctccgcgatccgatatcacgctcggacctggcggtcaccgagcaggtcgtgctgcggctgccgccgttcccctaagttcgcgccacccaatgttctttgctcaaccatattaatctaaagatggtgccctttctgcgcatgttcgtcaactcgacagtttgtcaattggaaactttgcccgtctaattatggttctggaccattagtggtttttgtattcaattagtaaactgagttatatagaagtaatgataattggttatctacatacatgtttgatttaccctggtaaatcagggttaaattactagtataagaatttacacaagtggtgctgtggccgggaaacaata

SEQ ID NO: 141008 - DNA, 732 bp, Zea Mays
gaagatatgtatacctataattttagctccgaggtgactagagactagagcatcatatggatttttttgaagtgataatcatgtttcataattcgttggcctatcaatgtacatagaaggcgagaatgtggaacattgaaatttggagcttgaccagttcggttaatgtaacaatatgttgtacaagtctgtgcagtaaaagtaggataattagtacttcatttttcatgttttctgattagcttttcatagcacacatctcaatatatttgtctaaataatcaagctatgtgttttctttgttctttcaatcttattgtgacttctgaatttattcatgagcataactgcttattttatcctttaagactgtcataatctgctgaaatgctgctactttttttgttttacatctaagtctgttttttgtttcttctctaatttgttccgtcggtgatgcactgatgcttgcagttctttgctcaaccatattaatctaaagatggtgccctttctgcgcatgttcgtcaactcgacagtttgtcaattggaaactttgcccgtctaattatggttctggaccattagtggtttttgtattcaattagtaaactgagttatatagaagtaatgataattggttatctacatacatgtttgatttaccctggtaaatcagggttaaattactagtataagaatttacacaagtggtgctgtggccgggaaaca

SEQ ID NO: 141009 - DNA, 3032 bp, Zea Mays
ggcctaccgcacccgcaaaatttcccaaaccccgcacacaattgccggaaccctagctccactccatcctcccagcccgcaccaatgacggaccaacaaacccaggatctcgtcaaggagctcgtccaccgcctcctctccgccgccgaatccggcgggcgcggcggcgggcgcgacacgggcggtgcgctgcggttcgcgcaccgaatcctctccagccgcctcgcccccgcggtcctccccgatgagcacgcgctcgcggagtccatcaagcgccgcctcgccgcctcgggccgccccgatgatgcgctctcattcgctgacctccactccaagctctccgtccgtgcccgcccagcgtcgctgtggccgctcctctacctgctcgactctctctcctcgcagtaccgcgccgccgccgcggcttcgtgcctcccaaaccttcccatcgccgccctaccgcagaatgccacctcggggacggcgccgggcgccggtgtcaggccgggttcgcggacgcacggggcgccgccgggcggcctggtgctggtctccaaggatccggacaacatccgcgagatcgcgctgcgtgagtacaccgagctggtgatcgacgagacggaggtgtcggaggccgcgcttgtgcgggacgtgctgtacgcgtgccagggcatcgacggccgctacgtgcgctatgacaagtccgtggactcctacgaccttccagacggtgttcgagtgccgcgatccacgcgcaccctcgttcgcaagctatgcgagcttggctggctgttcagcaaggtgcggggcttcatttctgacaacataagccgctcgccctcagatgctgccactgaggtgggcactgttacccaggcattctgctcggcgctccaggaggagctgtctgattattataagctgctggctgttctggaatcgtactcattgaatccaattcccacacctggatctgattcaggtgtgtccagtaattacctctcactgcgccgtcttgcagtgtggcttgctgagcctgcagtgagaatgcgcctaatggctgttctggttgatggatgccggggactgaggggtggtgctatggctggtgtgatccatgggcacgcacaacacggagatcctatgtttcaggagtttatgggccgattactgcgccgggtgtgctcgccgttgtttgagatggtcaggagctgggtgctagaaggggaattggaggatgtatttgcagagttttttatcgttgggcagccagtgaaagcagaatctttgtggcgggagggctaccttattcaatctgatatgcttccagctttcatatctccagtgctcgcaaaacggattcttagaactggcaagtcaatcaactttcttagagtatgctgtgacgatagtggctgggctgatgctgctgccgaggctgctgcatatgttggcactacaacatctcggggtggccttggttatggggagactgatgctttggaggcattggtggttgaggcagccaagaggattgatcgacatttgatggatgtcattcataagcggtaccgatttaaggaccactgccttgctattaagcgttacttgcttcttgggcagggtgattttgtccagtatcttatggacgttgttggccccgagttatcagagccagcaaataggattagctccttccaattggctggcttgcttgagactgcaatccgagcatccaatgcacaatatgatgactgtgatatcttggaccggataaaggtaaagatgatggatcatggggatggtgatcgtggctgggatgtcttctctttggagtatgatgctagggtccccctggacactgtgttcacagcttcagttatgaagatgtatctcaaggttttcaacttcttgtggaagctcaaacgcgtagatcactcccttaccggagtgtggaagactatgaaacctaactgcattgtttcttctccattttacaaggaaggaacaagcatcagagctcaatttgtatcagttcttcgtaaatgtcaagttctattcaatgagatgaatcactttgtgaccaatttccaatactacattatgtttgaggtcctggaggtttcgtgggcccgtttttctgatgaaatggatgcagcaaaggatttagatgaccttctcttagcacacgataaatatctcaactcgatactggagaaggccctgcttggtgaacattcccaaggacttttgaggaatctgtttgaactgtttgacattattttacagtttcgaagccatgctgatcgatggtttgaaaggatatatgagttgcagctaaggggaaagggtaaatcaaaatcaaaggatacaggttcatggtttgatggcggcagaaaagctatgatccaactagctggagaacttttctggaaaatgggtgaagacctggatagcatcgcaaaggattatacagcttctcttgatgcttttattacgcagctgcccatgcaacagcacgtcgatttgaagttccttctcttccgccttgacttcactgaatattacagtcgtgtttcctccaacaaatgaatgtgagccgcttatgtgaaaaactaggagttagattgatcgtttggttgggacttggaaagcattatttttataccatatcccattaattgatcttggtcgcttgattggcaatggtcacttccattttccttgcacctcctgtagaagaggatctgaatacccttttactgaggattgccaatgctacaatctggtgattctgtcagctgtttgcatgctgatgcttatgtgccgattcaacgaggctaaagccacgcatttcatgcaactctgtacacaattgtaagtttgttttgatcttgattttcatggatgttctggtgtaaatttaatatttattttttctctattaatttcttgagaattaaagctggaggtcttgaagatttgtccttaacagtttgtattgtcagttttacaagagcagataactcatt

SEQ ID NO: 141010 - DNA, 142 bp, Zea Mays
ttttctcttttttatctttttcatttcctgttttctatttcttgttttattttattttcaaacttggagttcagaattccaatttcaaatttgcaaataatatgcaacaataaaaaaatacccagcatgaaaataaataata

SEQ ID NO: 141011 - DNA, 3971 bp, Zea Mays
atggaggaacctctgttggaccatgaatcttcttccttatctgaagcaacaggtcgtagatcacttttctcagatgctggattgtttagtaatatcaccttttcttggatgggtcctttacttgatcttggcaagaggaaaacactagaccttcatgatgtgccattcttggatgacagtgacagtgtccacggaatcacccctaagtttaaatcaaagattgcctcgatttctgccacagggcaatacactgatgttacaacagttaagttagtcaaatctcttgtgctcacaacatggaagctaatcattatcactgcagtttatgccctaatccgtaccgttacttcatatgttggtccctatctcatcgagcacttcgttgactacttaaatcaaagcacacgatccactaaaagaggataccttttggtgttggcatttgttgctgcacagctgatggaaggtctctcatcaaggcatttgctctttagatctcaacaattaggcttgcgcgtgcattctgctcttattgcaattatttaccaaaagggtcttgccctctccagccaatccaagcaaggtagttcaagcggggagctgatcaatgttgtgaacattgatgctgagcgagtaggagatttcaattggtctctgcatgaactttggctgctcccagtgcaaattagtctcgcaatgattatcttatactctactcttggcttggcatcattcgctgcccttgctgcctgtgttttgacaatgttggctaacatacctttggggcggattgagcaaaattaccaggagaaaactatgaatgccaaggatgctagaatgagtgctatgtctgagatattacagaacatgcatattctcaagcttcatggttgggaattggttttcttgtcaaagattaaagagataaggaaggttgagatgaactgggtaaagaaatatgtctacacctcatcaatgcttatatctgtatttttttgtgcccctgcatttgttgctatgatcacttttggaacttgtataattatcggcatcccattagaaacagggaaagtattatctgctctagcaacatttaggcagttgcaaggtccgattcacagtctgccagacgcgatctcatcaatcattcagacaaaagtatcacttgacaggatatgttcatttctctgccttgaggaattagcaagtgatgcagtaactaagcttccgagtggtagcaccgatatatccattaaggtgagaaatggtagcttctcctggcaaaaattctctcaggtgcctactctccaagatctggacttgtgtgtgcaacaaggaactagagttgctatctgtggaactgttggatcgggtaagtcaagcttattgtcttgcatacttggtgagataccgaagttatctggagaggttcaaacttgtggtacaattgcttgtgttagccaatcaccatggatacaaagtgggacaattgaagaaaacatacgttttggtacacaaatgaacagggaaaggtacaaaaatgtccttgaggcatgctgtttaaataacgatttggatatattacctttgggtgaccaaacaattataggagaaagaggaatcaacttaagtggtggacaaaaacagaggatacagattgcccgtgctttgtatcaagatgctgatatcttcctatttgatgatccatttagtgcagttgatgctcgcactggactgcacttgttcaaggagtgcttgctagaatttttagcttcaaaaactgttatatatgttacccatcatgttgaatttttaccttcagctgatcttatcctggtcatgagagatggaaaaataacacagtcaggggattacactgaaattctgaaatctggagaagatctcttggaattagttgcatcccataaagatgccttatcaactttagacatgctggagcgccctattgaaaattttgagagtacatatcatcctggtggcaatgaaagtaacctgtttatagcgggggataagaaagaccagaacgaggaaggagatattcaaaatggtcagctagtacaagaagaagagagggagaaaggccgggttggatttattgtctactggaagtatattatgatggcatataatggagcacttgtgccacttattttgctagctcagataattttccaagttcttcaaattggatgcaatttctggatggcttgggcagcaccaatatctgaaaatgtgaatcctccaatcagtagtttgcagatggtaaatgtgtactttgcattagcaattgttagctcattgtgcatattcattcgatcacatcttcttgtcatgaccggatgtaagactgctaatattctatttgagaacatgcacaactgcattttccgagcaccaatgtctttctttgactccacacctagtgggcgaatcttgaacagagcttccacagatcaaagcacagtggatacaagaatttttgacctgatgggctatcttctatttcctgctattgagattctaggaacagttattctgatgtcacatgttgcatggcaagtcttcatagtttttgtccccattattactgcatcgctgtggtatcagcaatactacatagatgcagctagagagttgcaaaggttggttggagtttgcagatcccccgtgcttcaacatttttctgaatcaatggctggctcaaatataattagatgctttcaaaaggaaagacaatttatccgttatattggatatttggtggataatttatctcgaccaagtttgtataatgcagccgcaatggaatggttgtgctttcgcttggatatgctttcatcctttgttttttccttcacattgatacttctggtctcttcaccatctgctttaattgacccaaagactgctggtcttgcggtcacttatggactaagcctcaatatgctacaagggtgggctattgctgtcctctgcagtttagaaaatagaatgatatcagtggaaagaatgttgcagtatacgactattccttcagaaccaccacttacaatatcagaacgccaaccaaatagacagtggccaacaaagggcgaaattgagtttcttaacctccatgttcgatatgcaccgcagctgccttttgttttaaaaggcctgacgtgcaccttactcggaggaaagaagacaggtattgttggtagaacaggtggtggcaaatcaaccttgattcaggcactatttcgcattgtggacccatgtattggccaagtgtttatagatggcactgacatctgcaccattggactacatgacctccggacaagattgagcatcattccacaagatcctgttatgtttgaggggaccttgcgaaccaatattgacccccttggggagtacagtgacgagaaaatctgggaggcattggattcatgtcatcttggggatgaagttagaaagaacgagcttaagcttgactctacagtgacagaaaagggcaaaaactggagcacaggtcagcgtcaacttgtgtgtctgggaagggtgattctgaaacggaggaagatcttggttttggatgaggcaacttcatccgtggatccaattacagacagcttgattcaaaaaaccttaaaacaacaatttctcaaatgcacaatgattacaatagctcaccgtatcacatcagttcttgatagcgacaaagtcttgcttctggataatggtgaaattgcagagcatgacgccccagcaaaactgctagaggacagttcatccctattctccaaacttgtatctgagtataccatgggatctgataagtggcgaatgcaagaaagcagctaaatcaatactctacagataatacaggacaaacgccctaggaagtgtgagtatctacgtgtcaccaattttatagcttaataaaaagcaaatttttaaaaaac

SEQ ID NO: 141012 - DNA, 3971 bp, Zea Mays; identical to SEQ ID NO: 141011

SEQ ID NO: 141013 - DNA, 2344 bp, Zea Mays
ccggaggcaataaacaatcgcgccagcaaggggctctcccgtccaatcgcatcgcctgcacgagccttatcagtccacgaccatcatcatcaccactcactgcagcggcccgcactcggccgcgactgcgagcgagccgtcgccgcgagatccagcgccgtcgtcgcgcctccgccactgccgccgccgccgccgctgcccaagatgccgagcccgacgatccggaggctagacgtggcatcgccggtgccggcggacatcgacatcgccaactccgtcgagccgctcccaatcgccgacatcgcagcagagctcgggctccggcccgagcactacgacctctacggcaagtacaaggccaaggtcttgctgtcggttcttgatgagctcaaggcgcaacaggacgggtactacgtcgtggtgggcggcatcacgccaacgcccctcggggaggggaagtcaaccaccaccgtcgggctgtgtcaggctctcggcgctttccttgataaaaaggttgtcacttgcctccgtcaaccatcacaagggcctacctttggaatcaagggaggtgcagctggaggtgggtacagccaagttatacccatggatgagttcaatcttcatctgacaggcgatatccatgcaattacggccgcaaacaatcttcttgctgctgctattgatacgaggatattccatgaaaattctcagtcagataaagcactgttcaacagattgtgtccggcaaacaaggaaggcaagaggcactttgctgacataatgttccgacgtctgacaaagttgggcgtttcaaagacagaccccaatgagcttacaccagatgaaatcaggcgttttgcaaggcttgatatcgaccctgagtccattacatggagacgggtgatggatgtcaatgatcgtttcctgagaaaaattactgttggacagggccctgaagaaaaaggtatggtgagagaaacaggctttgacatatcagtagctagtgagataatggctgtattagctcttacaacttcccttgctgacatgagagaaaggcttggaagaatggtgatagggaacagcaagtcaggtgagccgataactgctgatgatcttggtgttggaggtgcattgactgtcttaatgaaagatgctattcatcccaccctcatgcaaactcttgaaggcacaccagttttagtacatgctggaccatttgctaacattgctcatggaaactcttcaattgttgctgataagattgctttgaagttggttgggaagggtggctttgttgttactgaggcaggttttggtgctgatattggaactgagaagttcatggacatcaaatgtaggtatagtggattggtgccgcagtgtgctattatcgtggccacaattagagctcttaaaatgcatggaggggggcctgaagtggtggctggaaagcctctggatcatgcatatgtgagcgaaaatgtggcccttgttgaagctggatgtattaatcttgctaaacatatatcaaacacgaggagttatggagttaatgttgtagttgcaatcaacaaatttgcatcagatactgaggcagaaatgaaggcagtgcacagtgcagctatggctgctggtgcttttgacgctgttgtctgcacacaccatgcccatggtggtaaaggagcggttgagcttggacttgctgttcaacgagcatgcgaaagccaggcagaacctctgaagtttttgtatcccttggaatctagcataaaggagaagattgagtcaattgctaagttctatggtgctagtggcgttgaatattccgagcaggctgagaagcagattgagatgtacaccaagcaagggttctccagcctccccatttgcatggcgaagacccagtactcgttctcacatgtcccgtccatgaagggcgccccgaccggctttgttctgccgataagagacgtgagggccagcatcggcgctgggttcatctacccgctcgtgggcaccatgagcacgatgcctggccttcccaccagaccctgcttctaccagatcgacgtcgacactgccaccgggaaggtcatggggctgtcatgaattgaagtccctgatggtatcattcagagaacgtaaattcggggcattcctggatcgagttaaataagagccgttcctggcatcctgcaagttcagtggcgcttcctttttttacttgattttgtaaaccggagactgtaaatgtgcttgaaccgtgcttttagacccatgcctcaaatcctgcatccaataagtgtctttgaacagcctgaggctgctgagactgttgacc

SEQ ID NO: 141014 - DNA, 1292 bp, Zea Mays
ctcacagtccactcagtctttacacactgtctgcctcactcacgtccttctcctgctgccgctacaccgagccatggaaagggaggtgcagctgatggaggggaggcaagcgtggccgctccacatgatggggatggctgccgctggtacgaccgccacctgcttcgacaactacagcagcagtggcagtggcggcggcggcggcgactgcttcgtgctcgggtgggagcagctagcgccggcgccgttcggctgcttcgggctcctcaccgccgacgtccacgacctcttcccgctcttcgccacaggcatggagccggcgctgcccgcgctgccgccgtcggcgcacgacgtggccgccgcgatccccggcgagctggacgaccttctcctgagcttctgggacgcgagctgccacgacggcgacgtgggcgagccgctcaaggcgcagcagcaggccgccttcaattccagctgctgcgtcacgcacgagcggggggaggactactgcacccccaccaccgactccttcgtccactatgatgacaatgatgacggcgatgatcccttgagctcgattttctccgcgggcctcgcgccggcagcggagggagcggtgtgccccgccgccgcagaggcagagcccctccccagctcgtcctcgtccaactgccgcgggggggacccgcgcgccggcggggtcgacctgcagccgcagggacagatgcagcagggcaccgcgcgggcgcggggccgggccgggaccccgccgctgccgaggacctccgcgccctcgctgaaacgcgcgacacgcgaagagtcgtcgtcggagcacgcggcggcggcggcggcggaggagtgcagccagagcggcggcggcagcaagcggcggaagggcgcgggggtggtgcgcccgttcgcgctgctgaagcccgacgggctggacggcggcgcgacgctggcggacatcaacgcgcgcatcctgatgcggcccgcgcggccggtccggcaccccgtgggcgagttcgcgtgcgcgccgcgcgtgtccgcggaccagccgggcttctcgggcaaggccgtcgccagcctcacgcgcctgcacacccccggcgggcgcggcaccatcaccatcataaggacgcgaggctaggctaggcttgtactatgcatgaatcatggcggtgtatgtaggattagctagctagccacctgttgtggtgtaaattatgagcgtaacctgcaatgtaaatcgaacgaataaatttctccaatcatggcggtggtggctcatg

SEQ ID NO: 141015 - DNA, 671 bp, Zea Mays
gggaacctcgtcgcgggtctgagctccgcggcgtcctacaaccggtgagcggcgatcgttgccgcgcgcaatgtcacccatcgtaccaccaaaacccctcccgttcctcaccacgctcaccacccgcttctcacttgcctgcttacccacgcggcgtttcacccaaacctgctgttccagtgccgggcaccgcggtcccgcggtcgcggccactcctcgtcccggtggagtttgcagggtccattccccccttaggtctcttctccttgccagcgcggcaacttcggcccgaaccgcggcagcggcggaagacatgtctgacccggagctgaggctggtgctcgagcttgctactgacgaggaactgatggaggtcgaggagatcctctacggcaccagctattttagcccattgctaaaatcaattgcaagaagaccgaactcagatggtgttgttgttttggatgatatcgaggagagagatcatttcatctcaaaattagagtcaaggttcctgtatcttgctgcagatgctcgttttgttatgaggtcagtcaaggaggccttttgttgacctatctctaattgaaaaaggaaaaaaataatggccccatgacagtgaaagatcatggctctaggaatacagcaccaaactgatctggtacacttta

SEQ ID NO: 141016 - DNA, 1525 bp, Zea Mays
gggaacctcgtcgcgggtctgagctccgcggcgtcctacaaccggtgagcggcgatcgttgccgcgcgcaatgtcacccatcgtaccaccaaaacccctcccgttcctcaccacgctcaccacccgcttctcacttgcctgcttacccacgcggcgtttcacccaaacctgctgttccagtgccgggcaccgcggtcccgcggtcgcggccactcctcgtcccggtggagtttgcagggtccattccccccttaggtctcttctccttgccagcgcggcaacttcggcccgaaccgcggcagcggcggaagacatgtctgacccggagctgaggctggtgctcgagcttgctactgacgaggaactgatggaggtcgaggagatcctctacggcaccagctattttagcccattgctaaaatcaattgcaagaagaccgaactcagatggtgttgttgttttggatgatatcgaggagagagatcatttcatctcaaaattagagtcaaggttcctgtatcttgctgcagatgctcgttttgttatgagggggtggagaccatcgtacagagatgtcttgctcagagtaagaaaaaaaattggtgttcagtgctctagcaaattgtgtactgcagaccttgaggcagaaatatttcttcacctcgtgaatgaatattcaagccaccagaaagaccgactttcatttccatgggataaacgaaaatctccaaacaatatctctagccttggtgcaaacaagtggaagatgcttactgatgtggcttggaggattggaacaaagggaatggaaagtacctttctgaagggtggtagtgcattgactatgaaaacaatatatgaatcgttagccaatagattgactggaaaactgctgaaggaggctgcaaattacaagataaagaaagaacttgttaagcagggtgggagattggctgctgttaacctggagtctagagctggtttgcttgcagctaggcagggtttggttcgtgctgcatcgagatacgttggactcaggagtgtcgtgacatttcttggaccaatattgtgggggacgctcttggctgatattgtgattcaaatgttgggcaccgattatgctaggatcgtccaggcagtctatgcatttgctcagattcgtttgactcggacaagttacgtggaatctgatggtgaaggaccagagtaagatcgctactggactagcctaactggcattctgatctaaaagcaaccgtattgtacattctagccatgaagatcaccatctgattctgcgggttccagtgcaaatactccacgggacaacgaggttatagcttcagacttcggagtactgtactgctaatgtgagtgcgtataagtgacagacgagcggtgttacaagacgttgggtcgcagagacagtcatagagcacaacacaaccggctactcccctgatcgatgtaaagcttagcaaaaataacctaaccgtgacaatgaaaatatgatacagtaatgttt

SEQ ID NO: 141017 - DNA, 1411 bp, Zea Mays
cgcctcacagtgatcacgcgcgcacactccaccaccaccagaccgtccaagctttctaaatcctgggcacttaccgcgtgagaccaaggcgccgatggaaccactacggcgaccctccctcgcacactgtacgccataaagcgcgcgcctgcaccaccagctccgcggcgtccggtccggcgacatggctgccaataataagacgatggtggtcagcctggggagctcgcggcggcggaagcgcggcgagatgctgttccggttcgagtccttctgccagcccggctaccccgctccgctcgccggcgggggcgccttcagggacaacgtcagggcgctgctcggcctcgcgcacctggaggccggcgcgcatggcgagaccaagtgctggtctttccagctcgagctgcaccgccacccgcccaccgtcgtcaggctcttcgtcgtcgaggaagtggtcgacacgtcgccgcagcgccagtgccacctctgccgtcacgtcggttggggtcggcatctgatctgcagcaagcggttccacttcgtgctgcccaagagggagttgtcagtggaagctgacggcctgcactacgggatcaaccacagcccggagaaaccgtccaaaggcacggcgacctccaggggccacctgctgcacggcgtggtgcacctcaacggcttcggccacctcgttgccctgcacggcttcgagggcggctccgaattcgtcgccggcgagcagatcatggacctctgggatcgcatatgctcctctctgaacgtcaggaaggtgagcctcgtcgacacggcgaggaaggggcacatggagctgcggctgctgcacggcgttgcgtacggcgacacgtggttcgggcggtggggctacaggttcggccggcccagctacggcgtcgcgctaccgtcctaccagcagtcgctgcacgcgctccagtcggtacctctctgcgtgctcgtgccgcacctgtcgtgcttcagccaggacctccccgtggtggtgaccaagtaccaggccatcagcggccacaagctgctcaacctcggcgacctcctccgcttcatgctcgagctgcggacgcgcctcccggcgacctccgtcaccgccatggactaccgcggcatcatgtcggaggcctcgtgccggtggtcggccaagcgcgtggacatggcggcccgcgccgtggtggacgctctccgccgcaccgagccgcccgcgcggtgggtcacgcggcaggaggtgcgcgacgcggcgcgcgcctacatcggcgacacgggcctcctcgacttcgtgctcaagtccctgggcaaccacatcgtcggcaactacgtcgtgcgacgcgcgatgaacccggtgaccaaggtgctcgagtactgcctggaggacgtgtccagc

SEQ ID NO: 141018 - DNA, 1449 bp, Zea Mays
cgcactcacgctcttggcttttgttcttgagttcacgcggccatgcacgcatccttgcctccttggtctttgcactcatgcgaggagcgctggtggagagcttcatagagcaccaggacacttgcaacgccgggcgggcacgggcggacccctcgccggcgtgtggcgccgggagcaccggtgtggctgctgctagtgctgggtcgcagccgcaggcgccgccgcccatgtcactgtcgaggaccgcgtcgagcaccagcccgtccagcgacattgtcatcagcccggtggccgcctggcccggttcgtcggcaccgacgattccaagccctgcgaccgccgcgttccaccggttcgaacaagtcccgtcgccgcggacaccgccatcggaccaccatcaccgcggcgggcacaacctcgagctgcagctcatgccgccgtccggcagcggcgtggtgggccgtggcgcgccgggggtggcggagtacggcgtcgcgccacgcactccggccgctcctccacagagccaccccgccaccatgcagctgcagctgtccatcggcgtctgcggcggcggggggttcggggacgaggcgatgctggcagcggcgagggagaaagaggaggtggaggcgcgggagcagctgcggcaagctgtggcggagaaggcggcggcgaacgaggcccgcgcgcaggcgaggcggcacgcggagctggccgagcaggagctggcgagcgccaagcggatgcggcggcaggcgcaggtggagctgagccgagcccacgcgctccgggagcacgccgtgcgccaggtgaacgcgacgcttctccagatcacctgcctcggctgccgccacaagttccgcgcgcgtccgcagctcctggatgcggccctgggcgcccccgaggtgacctgcagctacatgtcctccgtcgtgacagaaggcggcgacgccgaggccgacgatgagccgcccctcgacggcagggacggcatgctgcagcggcgccgacacgccatggcaatggacgtcatcctctagctaacctgaaatgagatgatggtcttcgtttcaaatagtttcttgtgtttttgccggcaagacgccggggttgcatttgcattggcccctgctgtatgaggtgtatcagatgccgatgcctgatggtgcgtagacagtggaagaccccgctagctcgatcgggccagtgctgcctagacttcgagtcctgtgatgagaaggaaggaccggagaggtagccattaggcaagtccaaggagagacgaagacgagggctagctgctactagcttactgtgacgtacgtgcatggaatctttcggtgtttgcttcctattggatcttgttggaaagaaacattcattatattgctcatggaaagcaagttgatgatgccctttgtaaaggtcttcagtagccaacaggga

SEQ ID NO: 141019 - DNA, 1080 bp, Zea Mays
ccccgaattcctttcgttctcaggtctgtctccgctgccgtcgtgcagcgcggctccgttgtactgccgcaggagtccgccacttctcaaggtcgccatcgctaagacgcggccagctgttcaccaatctgctcctgcaagcttccgaaaatgtgcagctatgtcagaacatggacgtcaggaactccggaccaatgagtaccagctggatgatgatgatgagccgttttggctggcagtggtcagagaccttgctgtgtaagtgaggattgccccccttgttggtttgtctgaatgtgaaattgaattctgttactttgtactgttaggggtttcaagggattggtagctttcttagctgagcagccgaggcaactgaagcacctggagtggccgggctttctacacacgctgaagacggccacacttactcttgtattggtagctatgtttattgttgcattatcaactattgatgctgccctctgctacatgctggcctggctacttcgaaaatctgcctagaataatgctggaatatccatgtattgcttgaatatgatttagccagacaggatagtagcaggcactgcagctggaactcaagctcttgttgtcgtcgaggtcagcaatgttaatcagactggaggtagcaggaaggtggatcttgcacggtgtgccattttatttttgggaggattgagaaaatcaaaacagctgccctacaaatagtgctgatgtcatgtgatgcagatgctcatagtggcatttcaaagggttaattagatctgtgccattataactttgctgttttggaggcacaccgttacatgttgaggtccaatttaacagagaaagagcacatcatggataggatccgagaactgtgtgtagtgatttgtaacttctcttttatgttaagcagacttgcttgtaacttgttggtccgtcagctaggatatggagtatttttaagacatctggtctactttgtaggcttaacaagtcttccactctgatttctcattagtattggattggtgaattcttatctagattgtctgctgttgagctacaaaa

SEQ ID NO: 141020 - DNA, 1334 bp, Zea Mays
ccccgaattcctttcgttctcaggtctgtctccgctgccgtcgtgcagcgcggctccgttgtactgccgcaggagtccgccacttctcaaggtcgccatcgctaagacgcggccagctgttcaccaatctgctcctgcaagcttccgaaaatgtgcagctatgtcagaacatggacgtcaggaactccggaccaatgagtaccagctggatgatgatgatgagccgttttggctggcagtggtcagagaccttgctgtgggtttcaagggattggtagctttcttagctgagcagccgaggcaactgaagcacctggagtggccgggctttctacacacgctgaagacggccacacttactcttgtattggtagctatgtttattgttgcattatcaactattgatgctgccctctgctacatgctggcctggctacttcgaaaatctgcctagaataatgctggaatatccatgtattgcttgaatatgatttagccagacaggatagtagcaggcactgcagctggaactcaagctcttgttgtcgtcgaggtcagcaatgttaatcagactggaggtagcaggaaggtggatcttgcacggtgtgccattttatttttgggaggattgagaaaatcaaaacagctgccctacaaatagtgctgatgtcatgtgatgcagatgctcatagtggcatttcaaagggttaattagatctgtgccattataactttgctgttttggaggcacaccgttacatgttgaggtccaatttaacagagaaagagcacatcatggataggatccgagaactgtgtgtagtgatttgtaacttctcttttatgttaagcagacttgcttgtaacttgttggtccgtcagctaggatatggagtatttttaagacatctggtctactttgtaggcttaacaagtcttccactctgatttctcattagtattggattggtgaattcttatctagattgtctgctgttgagctacaaaatgcaacttacatggtttggtagttatgggaggctgcaaaattggattttatacatcagaggaaggatgcaaattttgcaaacatggttaacttctgtatgaattagcaacattgcatgcctgtactactactgtaccgatgtgaaaatactactgaagggaagtttgcaggctattatttgaaatctggagtttacagatcctggtatgatacagaagtcatacaaaaaaaagtggtagatgcaagagttttggaaggaatatatgtatcaatatttcatgcaataacattactggcttcttcagataatgtgcacatttataat

SEQ ID NO: 141021 - DNA, 1585 bp, Zea Mays
cgtcactgccgtttgatccctccacccgtttccagaagcttcgcggctccgtcatgcgtcccgccgtcgtcacggtgctcctcctagtagcagcggccgcctcgccggccgccgcactctactccgccggttcccccgtcctccagctcaatcccaacaacttcaaatcgaaggtgctgaactcgaacggcgtggtgctggttgaattcttcgcgccgtggtgtgggcactgcaagcagctggcgccggcttgggagaaggctgccggcgtgctcaagggcgttgccacggtcgcagcgcttgatgccgatgcgcaccaggcgctcgcgcaggaatatggaatcaagggatttcccactattaaggtgttttcccctggtaaacctccagttgattatcaaggagcaagagatgtaaagccgattgtagagtttgctctgtcacaggtcaagtcccttcttagagataggttgagtggtaaggcatcagcagggtcaaatggcaagacatctggaggctcaagtgagaaaagtgaaccaagtgcatcagtagaattaaattcacgcaactttgacgagcttgttgtcaaaagcaaggacctttggattgtggaattctttgcgccatggtgtgggcactgcaagaaattggcacctgaatggaaaaaggctgcaaagaacttgaagggccaagtgaagctagggcatgttgattgcgatgctgaaaagtccttgatgagcaagtacaaggtggaaggttttccaactattttggtatttggtgctgataaggagagcccattcccctaccagggggctagagttgcatctgccattgaatcctttgcattggagcagttggaagccaattctggcccggctgaagtttctgagttgactggcccggatgtcatggaagagaagtgcgcttctgctgccatttgttttgtatcattccttccagacatccttgattcaaaggcagaaggaagaaacaagtaccttgagctcctgctctctgtagctgagaagtttaaaaagagtccatacagttttgtctggacagctgctggcaagcaagctaatctcgagaaccaggttggtgtgggcggctacggctatcccgccatggtagctctcaacgtgaagaaaggtgcatacgctccactccgtagtgccttccagcgcgacgaaatcatcgagttcgtgaaggaggcagggcgtggtggaaagggaaaccttcctctgaacgatgcacctacagtagtcgcgtccgagccgtgggacggcaaagatggagaggtcattgaggaggatgaattctccctcgacgagctcatgggcgacagctcctcagcaaacgatgagttgtgattctgatggttcttggactgatctgcgtgtcggttagccagactgtaaatctgaggaactctgttttgaaaaatcattccttgagtggcataattttccaggttatggatgctagaatggattaagattaaggagaactgatgtgatagaccttttctttaacgtttttttttatccctgaagtaaagtcagtttggacgtatatgttgaac

SEQ ID NO: 141022 - DNA, 1867 bp, Zea Mays
aaccaacacccgactcgctcggcccagcagagggagcatcgcaattcacaccagcgcagcgcgacgaggggaagaggagtttctcagccgcagtcgccgaaccacacgccgccgaggccgtaggcgcgcttgctgtcccgccgcccgcatggcaccgaagcgcccggccgccgcagcggcggcggcctcggggtcggcgtccgaggcatccgacgcggaggcggacgtgggccaccagccgtcctccccatccccgtccaagacgccgccgaccaaccctaaccctaagtccgctgccgctggccccgccgaggactccaccgcggccggatccgactccgaggccgcgtacgactctgacgcggaccaccgccccgcgcaccggaaggcggcggtagcggcgtccccatcgcgcaagcccaggagccccaggccgcgctcccgctcccgctccccggacgcagcctcgtactccgacggcgcggcctcagatgccgacgctgaccctgccgcccgagacggcgccgactccgccgacgacggcaacgcctctccgctcgcgctcccgcgcctatcccgcgccgaggctgccgccatcaagcccctcagctcgcgccccatggatccgccgcgccgctccatggtacactctttctccgagctgcgctcgaagcgcccccgcagcgccgccgtcccgtcatccgttgagcagctcaagaggccgacgcggctctggagcctccgtgacgagatcgtcatcctgcggggcttggtcacgtaccgcgccaagcgtggggtcctccccggcgccatgtatgacatttctatgttccaaggccacatccagagcgagctcagtgttaacgtaacccccacgcagctcagtgacaaggtacggcgtctcaagcagaagtacaaccagcttgcgtcccgtggcaagaacgggcgggatccagacttgcccacccagcatgaacagagtgtttatgagattggcaagaaggtatggggaacaagtacgggtggtgatgggtatgagattggtggtgacagccaagaggagcatgaaattggagagagtgacgaggatgtggagagtgggtgggatgaacgtgcccgcaagaacaggaggctgatgccaatcactatggcaaatggacacggatctgggttcggggctggcagagggaagtttgatgttgagaagggaaaggatgcttatccatacctttgggagactgtagaggatctgtcaaaggagcacccgaatggggtagcattcaagaaagcctttgagctgatcgaaggcgccagagcgcgtgggatggaggagaagctacgaaaattcaggctgacagagatcagacaccagctgcgacgtatggaattgatgaaggagacagtgaagatggtgcttgatgcgctggaaggttgactgagtaatgatcttctggtgggtgagttgtgcaatgtttaaaggagcaatcagtgtcttcttttgtttctagatagagtttctgtgactgaattacttgacttgcatagacaagttgcacttgtgtctcttgggtgctaacttttgcattatatggtatacagtttctatgctcacttaagtttggttacttaagttcggtttgatgcatctgatgaaggttttgttctatcttactccttttgcagtttttttttttgctactgtatctacaaattggaataccatgattggtgaatatcatggttcctaacctactagatttaggttgtttgctgtgctaggagggttaattttaaatggcatgtagttgatggtcaaaaccaaggaggaattgtgtgttgctattgaagaataaaaggtttattctaa

SEQ ID NO: 141023 - DNA, 2644 bp, Zea Mays
atggctaacgacgtaaagttcaaaaaacagagtgctatggatgtggatgttagagttgatattgagaatgggtctaatgagaatgaagtgcaagccccaattatagatgatggcaatgctcgctgcgatgaccaagttgctgttgaaccttctgatggtgctaatgttgctgctacccctcttgttggaaagaagaagaaattcatgggtgtagagaatcgtgcggtcaaacagcgaaccactactcctgtgagcaagcttaaggcatccaagtcagtaggatcaaacaaggatagagctattgttttagtgccatcatttgcaaaagctgtgcaaagcgcaaatgcaagtgcaagtcaaagcgcaaatgcaagtgcaagcactccaagtgatagccaatgcgcaaatgcaagtgcaactgctcaaggaagtattggagacaacgaagaagaaaatgatgtcaagattggaaaaaaactcacttcatgggtttggggtcacttcacaaggtatgagttagaggttcaacaatctgatggttcgattattaagcaaccatgggctaaatgcaatagatgtacacataaagctaaggcagaaagtggtaatgtcatcactgcaaaatcaaccacaaaaacctcaaaaggtgctagttcaaaagagagcgagtttgttcgacataaaaatactttggtggatgaggatgatgatgaggttgatcttgatgagtttaccagtgatccagatcctggcgcactgcaccagactggcaatcgcagaggatcctgcggggacgcactcacacacacacgagaccccggccaagccaagatccaaagcacgcacgcattcccagcgtccggcacacggaggggtcgcgtttctctagtctcgttctccactctcagtgactcaggcgacccgcggccgaccatgcgggcagcagcggcgtccctggtgctggtaccccgcctcgccctcttcgtcctgctgctgtccggctccggcgtgccgactgccctgtcgaagtcgacgctggagtcctgcgcctcctccagcgcctgcccggcgctgctctcctacacgctgtacgcggacctgaagcttgcggagctggccgcgctgttcgcggccgacccgctggccatcctggccgccaacgccatggacttcgcggtcccggacccgggcgaccgcattctcccggcggggctcgcgctgcgcgtgccggtgccgtgcgcctgctccgacggcatccgcaaggccacctccgcgcggtacgtggcgcgggcgggggacacgctggcgtccgtggccggcagcgtctacggcgggctcaccacggccgactggatccgcgactccaacggcatggccgaggaggaggacgccgccctcgacgccgggaccacgctgttcgtgccgctgcactgcgcctgcttcggcggcgccgacagcggcgcccccgccgtgttcctgacgtacccggtggccgagggcgacacggtgccggccatcgcgcggaggttccgcaccacgggcaacgacctgatgagcgtcaacgacctggccaccgccgacgtcgccgccggggacatcatcgtcgtgccgctgcccgcgtgcgcctcgtcgttccccgcgttcgcgtcggacgccggcctggcggtggccaacgggacgtacgcggtcaccgccaaccgctgcgtgcagtgcagctgcggccctggaaacctggacctgttctgcgtgccggcgccgctggccgactccacgtgctccagcatgcagtgcagcaacagcagcatgatgctcggcaacttcaccctcctcatgaccagcgccggctgcagcgtcacctcctgcagctacggcgggtacgccaacgggaccatcctcgccacgttaacgacgtcgctgaaaccccagtgcccaggtcacacttatcattcctcttgccactgttgtttccaacctggatataaaagcaaataaataaatgagtaaacgctgtgtcgttcgttcctgcaggcccgcaccagttccctccgctgatgccgccgccgacgtcgtcgttcttcgagacctacctcggcccgtcgccgacgccgatggcgtccgaaggcggcatgggtccgcagatggctggcatggcgccgacaagcagcccgccggtgagttcagggccgccgacggcaggttcacacgtcggcagtgacgctcttgcacaggtcgcttatctctgcctcgtcgccagcctgctgtggtagactggtagattgggctgcctgcgagacagcgagaggatactctagcatagcttgttccgaaaggggattcttttgtacggaaacagtcagttatttttttgcgcggcgtgtaatttttttgtcatccttcgttctatctgtcgtccatgtattatcgcgaactcatgcaaatacggagtactgtattcgtctatgaaggaaagtgacaatggccggggattgtgtaggatcggagctattactgtaggtctaattgaggatgacacgagatgagataatgttgtctccttttttcaaatcaggtcgttccttacatttttttttttgataatgaaaacatgagttccggctttagcatggtaatatatagagccaac

SEQ ID NO: 141024 - DNA, 2549 bp, Zea Mays
atggctaacgacgtaaagttcaaaaaacagagtgctatggatgtggatgttagagttgatattgagaatgggtctaatgagaatgaagtgcaagccccaattatagatgatggcaatgctcgctgcgatgaccaagttgctgttgaaccttctgatggtgctaatgttgctgctacccctcttgttggaaagaagaagaaattcatgggtgtagagaatcgtgcggtcaaacagcgaaccactactcctgtgagcaagcttaaggcatccaagtcagtaggatcaaacaaggatagagctattgttttagtgccatcatttgcaaaagctgtgcaaagcgcaaatgcaagtgcaagtcaaagcgcaaatgcaagtgcaagcactccaagtgatagccaatgcgcaaatgcaagtgcaactgctcaaggaagtattggagacaacgaagaagaaaatgatgtcaagattggaaaaaaactcacttcatgggtttggggtcacttcacaaggtatgagttagaggttcaacaatctgatggttcgattattaagcaaccatgggctaaatgcaatagatgtacacataaagctaaggcagaaagtggtaatgtcatcactgcaaaatcaaccacaaaaacctcaaaaggtgctagttcaaaagagagcgagtttgttcgacataaaaatactttggtggatgaggatgatgatgaggttgatcttgatgagtttaccagtgatccagatcctggcgcactgcaccagactggcaatcgcagaggatcctgcggggacgcactcacacacacacgagaccccggccaagccaagatccaaagcacgcacgcattcccagcgtccggcacacggaggggtcgcgtttctctagtctcgttctccactctcagtgactcaggcgacccgcggccgaccatgcgggcagcagcggcgtccctggtgctggtaccccgcctcgccctcttcgtcctgctgctgtccggctccggcgtgccgactgccctgtcgaagtcgacgctggagtcctgcgcctcctccagcgcctgcccggcgctgctctcctacacgctgtacgcggacctgaagcttgcggagctggccgcgctgttcgcggccgacccgctggccatcctggccgccaacgccatggacttcgcggtcccggacccgggcgaccgcattctcccggcggggctcgcgctgcgcgtgccggtgccgtgcgcctgctccgacggcatccgcaaggccacctccgcgcggtacgtggcgcgggcgggggacacgctggcgtccgtggccggcagcgtctacggcgggctcaccacggccgactggatccgcgactccaacggcatggccgaggaggaggacgccgccctcgacgccgggaccacgctgttcgtgccgctgcactgcgcctgcttcggcggcgccgacagcggcgcccccgccgtgttcctgacgtacccggtggccgagggcgacacggtgccggccatcgcgcggaggttccgcaccacgggcaacgacctgatgagcgtcaacgacctggccaccgccgacgtcgccgccggggacatcatcgtcgtgccgctgcccgcgtgcgcctcgtcgttccccgcgttcgcgtcggacgccggcctggcggtggccaacgggacgtacgcggtcaccgccaaccgctgcgtgcagtgcagctgcggccctggaaacctggacctgttctgcgtgccggcgccgctggccgactccacgtgctccagcatgcagtgcagcaacagcagcatgatgctcggcaacttcaccctcctcatgaccagcgccggctgcagcgtcacctcctgcagctacggcgggtacgccaacgggaccatcctcgccacgttaacgacgtcgctgaaaccccagtgcccaggcccgcaccagttccctccgctgatgccgccgccgacgtcgtcgttcttcgagacctacctcggcccgtcgccgacgccgatggcgtccgaaggcggcatgggtccgcagatggctggcatggcgccgacaagcagcccgccggtgagttcagggccgccgacggcaggttcacacgtcggcagtgacgctcttgcacaggtcgcttatctctgcctcgtcgccagcctgctgtggtagactggtagattgggctgcctgcgagacagcgagaggatactctagcatagcttgttccgaaaggggattcttttgtacggaaacagtcagttatttttttgcgcggcgtgtaatttttttgtcatccttcgttctatctgtcgtccatgtattatcgcgaactcatgcaaatacggagtactgtattcgtctatgaaggaaagtgacaatggccggggattgtgtaggatcggagctattactgtaggtctaattgaggatgacacgagatgagataatgttgtctccttttttcaaatcaggtcgttccttacatttttttttttgataatgaaaacatgagttccggctttagcatggtaatatatagagccaac

SEQ ID NO: 141025 - DNA, 2234 bp, Zea Mays
atggctaacgacgtaaagttcaaaaaacagagtgctatggatgtggatgttagagttgatattgagaatgggtctaatgagaatgaagtgcaagccccaattatagatgatggcaatgctcgctgcgatgaccaagttgctgttgaaccttctgatggtgctaatgttgctgctacccctcttgttggaaagaagaagaaattcatgggtgtagagaatcgtgcggtcaaacagcgaaccactactcctgtgagcaagcttaaggcatccaagtcagtaggatcaaacaaggatagagctattgttttagtgccatcatttgcaaaagctgtgcaaagcgcaaatgcaagtgcaagtcaaagcgcaaatgcaagtgcaagcactccaagtgatagccaatgcgcaaatgcaagtgcaactgctcaaggaagtattggagacaacgaagaagaaaatgatgtcaagattggaaaaaaactcacttcatgggtttggggtcacttcacaaggtatgagttagaggttcaacaatctgatggttcgattattaagcaaccatgggctaaatgcaatagatgtacacataaagctaaggcagaaagtggtaatgtcatcactgcaaaatcaaccacaaaaacctcaaaaggtgctagttcaaaagagagcgagtttgttcgacataaaaatactttggtggatgaggatgatgatgaggttgatcttgatgagtttaccagtgatccagatcctggcgcactgcaccagactggcaatcgcagaggatcctgcggggacgcactcacacacacacgagaccccggccaagccaagatccaaagcacgcacgcattcccagcgtccggcacacggaggggtcgcgtttctctagtctcgttctccactctcagtgactcaggcgacccgcggccgaccatgcgggcagcagcggcgtccctggtgctggtaccccgcctcgccctcttcgtcctgctgctgtccggctccggcgtgccgactgccctgtcgaagtcgacgctggagtcctgcgcctcctccagcgcctgcccggcgctgctctcctacacgctgtacgcggacctgaagcttgcggagctggccgcgctgttcgcggccgacccgctggccatcctggccgccaacgccatggacttcgcggtcccggacccgggcgaccgcattctcccggcggggctcgcgctgcgcgtgccggtgccgtgcgcctgctccgacggcatccgcaaggccacctccgcgcggtacgtggcgcgggcgggggacacgctggcgtccgtggccggcagcgtctacggcgggctcaccacggccgactggatccgcgactccaacggcatggccgaggaggaggacgccgccctcgacgccgggaccacgctgttcgtgccgctgcactgcgcctgcttcggcggcgccgacagcggcgcccccgccgtgttcctgacgtacccggtggccgagggcgacacggtgccggccatcgcgcggaggttccgcaccacgggcaacgacctgatgagcgtcaacgacctggccaccgccgacgtcgccgccggggacatcatcgtcgtgccgctgcccggcccgcaccagttccctccgctgatgccgccgccgacgtcgtcgttcttcgagacctacctcggcccgtcgccgacgccgatggcgtccgaaggcggcatgggtccgcagatggctggcatggcgccgacaagcagcccgccggtgagttcagggccgccgacggcaggttcacacgtcggcagtgacgctcttgcacaggtcgcttatctctgcctcgtcgccagcctgctgtggtagactggtagattgggctgcctgcgagacagcgagaggatactctagcatagcttgttccgaaaggggattcttttgtacggaaacagtcagttatttttttgcgcggcgtgtaatttttttgtcatccttcgttctatctgtcgtccatgtattatcgcgaactcatgcaaatacggagtactgtattcgtctatgaaggaaagtgacaatggccggggattgtgtaggatcggagctattactgtaggtctaattgaggatgacacgagatgagataatgttgtctccttttttcaaatcaggtcgttccttacatttttttttttgataatgaaaacatgagttccggctttagcatggtaatatatagagccaac

SEQ ID NO: 141026 - DNA, 1193 bp, Zea Mays
atggcattggcattggcatcgctgaccctgcctgtccctctccgacgggacgcgccatcgagggcgcccagcccgcagccgccggcgacgtcaaggtgcgccagcgttttcttggaaggggcaaaaggggacgttcattcgcttatattcacacagccggcagctgatggccacaccgtcttgaacaaatcatacatatacagaaaaagaagaagaagaaaaaagaaacagggcgaaacagcgtcccgacttctaatggagtataaaaaacaaatggtgctttcagtacgtccttcgatagctggacagtggcttcgatatcttcaagaccgttatagcaaccatcagcggtccggtcagggccaaattaactgggaactgatggctgttagaacttttgctgcagccgcggcatcagagggaggatttcagccattcaggagggccaccgtacgcagcgagaccagccagcaggcggcgatgttcgcgacggcggtgcggtgggcggcgaagaaggggaagcccaagatggcgccgatcgagctgacggcgccgccggagcaggcgcagtccatcacgcgcgccatcttcgacgccgtccgggagcacggcccgctcaccgtctccgacgtctgggaccacgtcaaggatgtcgggcttcgaggtctggcaagcaagaggcagatgaagatcatgctgcggtggatgagggagcgccagaagctaaagctcatctgcgaccacgacggcccgcacaagcagttcctctacaccacctggtttaccaaccccaggaacgcgccgcagaggcccaatccgaagcccaatgtcaaagcggataagctccccaccttcccttccccttcgaagcaactgtgacgaggacttgtttctgtgctctctgcacttgtttctgctgcccccgacataatgttcagcatggaaacaaatgctagatttgttcaggcgaatttaggcttgttatggctatattgttctatgcaaacacctaattgttgtctatgcatatataaaccatattatttgagatgtataacctaaggttgttccctgaggattaaagccagctgtttggacggctacagctgcaattcatagaaacaaaaatattgtagaaacattataaacctgtacggattaaagtcaagcgaataactatgtgtgcccccaaa

SEQ ID NO: 141027 - DNA, 75 bp, Zea Mays
gacttatcctcgcatggctccgttgcatgggggcttcagcgcgggaaagtcgggtctctgttgcgatttactcgt

SEQ ID NO: 141028 - DNA, 631 bp, Zea Mays
ggtgttacagagtagaccggatattatgcttagtgtatgcatgtgtgctagatttcaatccgatccaagggaatgtcacttagtggccgtgaagcgaattcttagatatttagttgctacgccttgcttcgggatctggtatccaaaggggtctacctttgacttgattggatattcagactccgattatgctggatgcaaggtcgataggaagagtacatcagggatgtgccaattcttaggaaggtccctggtgtcgtggagctctaagaaacaaacttctattgccctatccaccactgaggttgagtatgttgccgcaggacagtgttgcgcgcaactactttggatgaggcaaaccctccgggactttggctacaatctgagcaaagtcccactcctatgtgataatgagagtgctatccgcatggcggataatcctgttgaacacagccgcacaaagcacatagaaatccggcatcactttttgagagaccaccagcaaaagggagatatcgaagtgttttatgttagcaccgagaaccagctagccgatatctttaccaagcctctagatgagaagaccttttgcaggctgcgtagtgagctaaatgtcttagattcgcggaac

SEQ ID NO: 141029 - DNA, 2043 bp, Zea Mays
cactcgtcatcgctactcgctcacacatgcgcgccttggcacctcgcccctcgcagagtcgcagtctacagcagccgcgcaacctttgccgcgccctgcacaccggagtccaggcggcgcccggcccagccctcatgaatctggccgccttttcctccacccttgccacgctcccctggtatgagatgccatcaataaattcctccgcaactttctcgtcctcactgctccgccgctcgctctgcgcgtcgctccggacgatctcccacatggcctccgccgccgcccccacctccgcgcccgtcgccaccaccgagaacggcgccgcgaaggcgatagagcagcggcccgtgcaggtcgcagagcggctggaaaagttcaagacaacaattttcactcagatgagcatgcttgccatcaagcatggagcaataaaccttggccagggctttccgaattttgatggcccagactttgtgaaagaggccgcaattcaagctatcaatgctgggaagaatcagtacgcaagagggtttggtgtgcctgaactgaactcggctatcgctgaaaggttcctgaaggacagtggattgcaagttgaccctgacaaggaagtcactgttacatctggatgcactgaggcaatagctgcaaccatactaggtctgatcaatcctggcgacgaggtgatactgttcgccccattctacgattcatacgaggctacactgtcgatggccggtgccaacgtgaaggccattaccctccgcgctccagatttcgcggtcccgcttgaggagctggaggctgcagtctccaaggacacgaaagcgataatgataaacacgccgcacaacccaaccgggaaaatgttcaccagggaggagctcgaatccatcgccgccctctgcaaggaaaacgacgttttgctgttctcagatgaggtctatgacaagctggtgtttgaggctgaccacatatccatggcttctatcccgggcatgtacgagaggacggtgaccatgaactctctggggaagacgttctctcttacaggatggaagatcgggtgggcaatcgcgccgccgcacctgacatggggcctcaggcaggcgcactcgttcctgacgttcgccacctgcacaccgatgcaggcggcggccgcggcggctctgagggcaccggacagctactacgacgagctgaagagggactacagcgcgaagaaggctatcctgctggaaggactcgaagccgcagggttcatcgtctacccatcgagtgggacatactacatcatggtcgaccacaccccgttcggtttcgacagcgacgtagagttctgcgagtacttgatccgcgaagtcggcgtctgcgctataccgcccagcgtgttctacctcgaccccgaagagggaaagaaattggtgaggttcaccttcagcaaggacgaaggcacgctgcgggccgcggtcgagaggttgaaggcgaagctcaggaggaaatgaatgaaggggggattacatgtttgtggctggtgattgttgaataatctgtgctgggtttcaactgcgcccggatgcctgtactgtctctttttttttttgctagcaatagttatgctgccagcgacttcatgcctagtgtcgttactatttgttttgtctgtgtgtaagcagatggcgatggatcaggatacctgccggctgccgctacacttttgtaacctatggagcaatttgtgtccgctgtctgttcacccttgtcaacctgtcctatacgtcacgttcggagcggccaataaaataagctgatcaaaccagatcctcgcaacagcgagcttgttcttgtacgtacctcgcaacagtgaggccgctgtgctggagagactcgtagctgtgactgtgagagccccttttaagtgcacagcgttttattttatccccgtcgcatgattccgcacgactacacgtctgcacttgtcgcatctctatccagcaatccacagcgatgagacaccatcgtgcccaaccaccaaaaccg

SEQ ID NO: 141030 - DNA, 1776 bp, Zea Mays
cactcgtcatcgctactcgctcacacatgcgcgccttggcacctcgcccctcgcagagtcgcagtctacagcagccgcgcaacctttgccgcgccctgcacaccggagtccaggcggcgcccggcccagccctcatgaatctggccgccttttcctccacccttgccacgctcccctggtatgagatgccatcaataaattcctccgcaactttctcgtcctcactgctccgccgctcgctctgcgcgtcgctccggacgatctcccacatggcctccgccgccgcccccacctccgcgcccgtcgccaccaccgagaacggcgccgcgaaggcgatagagcagcggcccgtgcaggtcgcagagcggctggaaaagttcaagacaacaattttcactcagatgagcatgcttgccatcaagcatggagcaataaaccttggccagggctttccgaattttgatggcccagactttgtgaaagaggccgcaattcaagctatcaatgctgggaagaatcagtacgcaagagggtttggtgtgcctgaactgaactcggctatcgctgaaaggttcctgaaggacagtggattgcaagttgaccctgacaaggaagtcactgttacatctggatgcactgaggcaatagctgcaaccatactaggtctgatcaatcctggcgacgaggtgatactgttcgccccattctacgattcatacgaggctacactgtcgatggccggtgccaacgtgaaggccattaccctccgcgctccagatttcgcggtcccgcttgaggagctggaggctgcagtctccaaggacacgaaagcgataatgataaacacgccgcacaacccaaccgggaaaatgttcaccagggaggagctcgaatccatcgccgccctctgcaaggaaaacgacgttttgctgttctcagatgaggtctatgacaagctggtgtttgaggctgaccacatatccatggcttctatcccgggcatgtacgagaggacggtgaccatgaactctctggggaagacgttctctcttacaggatggaagatcgggtgggcaatcgcgccgccgcacctgacatggggcctcaggcaggcgcactcgttcctgacgttcgccacctgcacaccgatgcaggcggcggccgcggcggctctgagggcaccggacagctactacgacgagctgaagagggactacagcgcgaagaaggctatcctgctggaaggactcgaagccgcagggttcatcgtctacccatcgagtgggacatactacatcatggtcgaccacaccccgttcggtttcgacagcgacgtagagttctgcgagtacttgatccgcgaagtcggcgtctgcgctataccgcccagcgtgttctacctcgaccccgaagagggaaagaaattggtgaggttcaccttcagcaaggacgaaggcacgctgcgggccgcggtcgagaggttgaaggcgaagctcaggaggaaatgaatgaaggggggattacatgtttgtggctggtgattgttgaataatctgtgctgggtttcaactgcgcccggatgcctgtactgtctctttttttttttgctagcaatagttatgctgccagcgacttcatgcctagtgtcgttactatttgttttgtctgtgtgtaagcagatggcgatggatcaggatacctgccggctgccgctacacttttgtaacctatggagcaatttgtgtcaaaaaaccatggcatagaaagaaaaaaaaa

SEQ ID NO: 141031 - DNA, 264 bp, Zea Mays
atggcgccaattgaagagaacctcgatgtttctgctattccattttttccttttggggcatcgaatgttgagacactggtcatggggggtgaagacactgcaggaatgactgtaactcctccaggaaatctcaacagctcgaaacaacatggatgcccaaaaagtggtgtcaaggataggttcacttgctggagaatcatctctattaaggatgatctcaacacacttagagctggcaaacttattgaagcatcttttggataa

SEQ ID NO: 141032 - DNA, 1667 bp, Zea Mays
atgtaagtgacagcggagcaggtacacgtggtgagtttatacaaattgaacatgtgactgtgaccactgacccgttcctgctgccttcgaggaaagtaggtcttcaactccacaggccacacgcatcatcctcgccggccttgcccccgactgctcgtataaaacggacggggaggcagcctctccaactgaccggggaagtcacactcacacgttcgcgtgttagactctcctgaaaccagcgtgctgtgccgcccgggacgatggcgccgcgccagccgctgctccccagtttcctctacgcggcgtcgtccggcgtcaacggcagcagggaggcgcctccggtggtggcgggcgccccgagcgagccgctcggcaagatcgagatgttctcgcccgcatactacgcagcgggcgccttgggaggcgccgcggcctgcgggttcacgcacgccgccgtcacgccgctcgacgtcatcaagtgcaatatccagatcgaccccgccaagtacaagaacacctcgtcggcgttcagcgtggtgatgagggagcagggcctccggggcttctacagggggtgggcgccgacgttcgtgggctacagcgctcagggtgcgttcaagtacggcctctacgagttcttcaagaagacgtacgccgacatggccggccccgagcacgccgccaggtacaagaccctcatctacctggcgggctcggccaccgcggaggttttcgccgacgtcgcgctctgccccatggaggccgtcaaggtccgggtgcagacgcagcccggcttcgccaggggactcagcgacggcttccccaagatcgtcagggccgagggctacgcagggctattcagaggactggttcctctttgggggcgacagattccttacaccatgatgaagttcgcgacgtacgagaacatcgtggagatgacctacaagcacctcatccccacgccgaaggatcagtgcagcaagcctctccagctcggggtaagcttcgggagcggctacgtcgccggagttttctgcgccgccgtctcgcaccctgcagacaacttggtgtcgttcctgaacaacgccaagggagccacagttggagatgctgtcaagaaccttggcctgttgggcctcttcactcgtggcctccctcttcgcatcctgatggtcggcaccctgactggcgctcagtgggtgatctatgattccttcaaagttatgattggactgccaacgactggcggagcgcctgctcctgctactgtcccaatggaaggactcggagagctaaaagcctctgcctgaagttctaaagtttgacagagagtatgcatgcttccgtccatagcgtatactggtgactgtaacagaccctcacccccaccagaaaatattgtctcaagctggtgattttgttttgaataagataagttattactgtatgctacgagtatataatacgacatgtagaagactataagttactagtcacaaagttgataaatcatttttgggtgaaatttatttgggttcgtactggattgtgttcctccaatataaattgtgttcctccaatataaatgtattcatatcgaactatatatgtatatatgttgcaacatggcttcaatcaaatatatattgtcttttttgggg

SEQ ID NO: 141033 - DNA, 229 bp, Zea Mays
gcggatgatggatggactggtcgcatctaaagacatacagtcgtcaaacaaagaaacaaattgtctgctttcatgttagaaaatccaaacatggaaaaactagctatccacatctgctcaccatcgacgtcccatgtacatggaccggtacatccccccccccccccccccccccaacaagattgcaggccatagaaatacaataatcagaaatcggcatggcaagcca

SEQ ID NO: 141034 - DNA, 2031 bp, Zea Mays
atcggagcgctcgcaaaacctccacacaccttcctgaaatagtagccactagcttcagctgctccccgaggggtcgatcgagctcctcagccttcctcacgcatagctagaaccggctagctcaatcaacaccacaaccgatggagtttgacctgctgaattacagcccggaagcgcagcttgagctgatgaccacgatgctccagctggagcagctaactgcgctcgacggccatcagtttccgacgatggcgcctgtctcgccgccgatatccccgatgcaaacccatcatgcaggtcacagcttgtcgcctccgccacacatgtcggcgacgacgacgaccaccaccaccgggtacccagagcagtacacgccggcggcggccgtgtacggcgccaccgctaccggcctcgagcacctccaggactacgtgctgtccccgccgggcggcgactgcggcggcgcggcggcggcgcacgcggggtcgacgtcgccgacgtcggcggacgcgatgcgggaggcgatcttccacatcgccgcgctgcagccggtggagatcgacccggaggcggtgcgtcccccgaagcggcgcaacgtgcgcatctccaaggacccgcagagcgtggcggcgcggctgcggcgggagcgcatcagcgagcgcatccgcaccctgcagcgcctcgtcccgggcggcaccaagatggacacggcgtccatgctggacgaggccatccactacgtcaagttcctcaagtcccaggtgcagtccctggagcgcgccgcccaccgcgccgccgcgctcggcgccgccgcctacccggccttccacgcgccgtggcagtacgcgctgccccacggcgacatgtaacgcgacgcgcgcgacagacgaacgcgcgcgcgtgccggtcgatcgttaccatcgagctatgctagcgcttcggccggccggccggccagcgctctccgttgttggcgtctcgacgggacgacgacgacgtacggccggcctctctgccgatgctcttgtagcgttgtctgtgtgtgtgtgcactgcatcgtgaactagctagcgcatgatcgcatgcctgtgtaaagacgtaggatccttgatacatttattgcctgctgtagccgcatacggcatacgacgtggctgctccaattttttgttggagtcgcagcccgtgcatgcgcgtgatcgatgagtacgtgtacgtgctggtctaccctacgtaggctgtacatttacattgtactaccccttttttatctctctctctctctatatatccatgcagtgtttcttcatctctctctctctctctctcttcgcacgacacacgttagctttcgcggcacaccacagtctacagggtgcgtgatgtgaacgtgatccttaaatttcgttcgcatgcgcccacccaagggcaagaagcagatgtcctttctctccttggttggtgcatgcgacgcgagcgactggcaaatttggccgacaagacaagctaaaagttgaccgtccatcaatggagacggtggccgtgcctccgctgtgccggtcgattcgtccaggcctatctcgcgtcacgtcgatccgtgcatgtcgtctttgccccaattgcatggatactacttgtctatctgcaatcgcgcgcacgcaggcaggcaggatgaacagaaaggaatccatggcatctcgcgatcgagccgcaacccgcaacggtaaatcggccggccatgcctatagcatgctcgtagcagcagtagatgcaggtgctgaatcgtttgtgtcgggcgccgtttcgtcggcgcgcgcatgtggcggtgtccgccggccggccttgaatacagtttggtgcctttggggggaggtggttgccgttgtttcgaaaccgttgcggaattatgaggagctaggcaggaggaggccccaccgtggatagtgttcggtaatgttggctcgcgctgctgcatgtgtgtatgtatcgtcagttactcagttgctcattcatcatcgatcgatcgaccat

SEQ ID NO: 141035 - DNA, 3735 bp, Zea Mays
aacttagaaattctctgttggaacgtccggggtctaaataatgttgcacgacgtgaaaccgttcgtgagacaattgccacaactacttgtcatctggtttgcttgcaagagaccaaactgttttcggttgaccgattcctagcagcctcattgggaggacctaagttggatatgttctgtttcaaacctgctggtggctttagtggtacccgtggtggcattcttattctgtggaacagtgactttatggagcttgttaactgtacccagggtgagtatcacatctcagctcatgtccacatgaaggaatcgaacgtcgcattcctcctgaccacggtgtatgggcctgcgagaaatggtaacaaggctgcgttcctacgcgaactgcaagacctcaagcctcagttgggaacatcatggctcattctaggagacttcaactgcatatacaaagccagggacaaaaataacaattgtcttaacctgtggctcatgaatcaatttagacaggcaatagatgagtgtgaacttaaagaattacacttacagaataggaaattcacttggagcaatgaaaggcgacgcccaacattggtcaggctggatagaatattttgcaacggtgaatgggaggatctctttggcagtcatgggctgcaagccttgtcttcttcactatcagatcactgcccgctcctcctctcaaatcaaaccagcccaagacgacctcgttccttccggtttgagaacttttgggccaagctgccggggttcaagcaagtggtccaggcagcatggatggcgccgtcggttcatcatgagccattccacaggctctaccacaaattgcaaaacacggcagctgcgttacgtgagtggaataataaaatcattccagatgcaaggctctatctacatatggctctagaagtaattcttagactcgatttagcacaagaaaataggcagctatcccccgctgaatcgagtctaagaaataagttgaagcagcgtattatcggactggcggttgtggagagggcgcggagaaggcagaattcgcgcttaacaacccttaagttaggagacgccaataccagattttttcatcagagagcaacttctagaaggcgcaagaatttcatccaaaaacttaagaaagagcatggttgggctgtcacgcatgaggacaagtctctggaggtccaaagttttttccaaagcactatgcaacgtcctcaagctaggcaagtggagattaattacggcatcttcaactctcagcgatataatttgtcctcccttgacatgccttttactgaagcagaaattaaaaaaagtattgaccttctgccggctgataaggctcctgggcccgatggttttacggggaccttctttaaatcttgttgggacataatcaagcacgatgtgatggaggcagttaaggcatttcacgaccttcggtgcatgaacctgcaactcatcaactcggcaaatattattctacttcctaaaaaggagggtgcggaggcagttggtgattttagaccgattagcctcattcactccttcgtcaaaatcatcaccaagactcttgctctccgattagcgccacatatgcatgaaatcgtctcaccatgccaaagcgcgttcatcaagaaacggactattcaagataattttatggccgtgcgtagtgcagtgaggcgctaccaacgcatgaacataccctcgctcttcatcaaattggacattgcgaaagcctttgattcagtccgatgggaataccttctctcgctgcttcaacatctaggcttcccttctcgatggagagattggattgcagccatcctctcaacatccacctcgagggtctttgttaatggggccccgaatccccccttgtctcatggtcgaggacttagacagggagacccactctcaccattgttatttgtacttgccattgacccattgcagaaaattttagaactggcaacagagaggggacttctcagcaaaatcaggggccgctcgccttgccttcgtctctcattgtatgctgatgatgcggccttgtttattgcaccaaaaaaagaggaggtcgatacaatactaaagctgctcgggctatttggtgaggcgtcagggctgttgacaaacttccataagtccacagttgtgcctatccgttgtcaaggcattgacctaaacgcggtcctaagaaatatgccggccagaagggctaccttccccttaaaatacctgggcctcccactctcatcatccagattgaagaagagcgactttcagtttttaattgacaaaatttcgaacaagctcagtggctggaatgggaaaaacctctctatggctggcagactgactttagttaagtcagtcattacctcccaagcaatataccttctctctgctttacgggctcctaaggaaatattgaatctaattgactcgagaaggaaaaaatttctttgggctgggtgtgcacaaattacgggaggtaaatgcaaggtaaattggctccgttccgcaaggccaaaagagtgcggaggtttgggtatccttcatttaaccaaatttgcaagggccctgcgtatgcgttggctgtggcaagaatgggcttcatcaactaggttctcgacaaccttggaactcccttgcacgacaaaagatcggcagctcttcgcagcaacaacatcgatttcagtgggagacgggacaaaggtgtccttgtggaatgatgcgtgggtgcaagggttaagaccgaaggacattgcgcctctcattttcaatgtgtcccgaagaaagaacagatctttgagtgaagcgttgtggaatcatacttggattagggacctcaacctgttttctgctgaggtgacagaacaacacattgtggagtactgtaggctttggtcaattttgcgaagagtatccttgcaaccgggtatttgcgactctattagttggaaactctcagaagaccgacagtattcggcgaaatcagcataccttgcccaattcctcggctcagagcttacaaatatgaactggatcatttggaaggtatgggcgccaccgaaatgtaaattcttcagttggctagccatccaaaatagaatttggacagcggatcgtcttgcgaagagggattggccccacaacgctacctgtgcactgtgtgggcaaaccttggagtcaggattgcatctcttcgttgagtgtcgtttaaccaagcggatttggggagaggtggctgtatgggcagcggtggagggccttagtccaagcaactgggaccacagtgagtctgtcctacaatggtggacgtccctagctacaactcaagattgcaacaggaagggcttgagaagcctcttaattctagtgaattggaccgtctggcgtgagagaaatgctaggattttcgaccataaatcctccacatgtgctcagattctcgcatctattgtatctgaggcatcagcctggatacgtgcaggagccaaccagctggctaatctcctagcatcactttagttttgtgtgtttcagcttggtttttcttctagtctcctttcagattagtcttgtgtgtttgtgttttttcggcttggtcatgcttttgtggagtgtctttgtattttaaccctggctcctctctttttaatataacgggcagatctcctgccggttcgtttcaaaaaaaaa

SEQ ID NO: 141036 - DNA, 1824 bp, Zea Mays
cccccttcctggccccccacaatccgaggatccgaatccccgacgcaacccttgcgtggtggcgtcaccacccaaatcccaccatccggatctgccgatccgccgccgccatgtcccgctcggagcgccgcctcgcctcggccgtggtgcgccttcccggccgctccagggtctccgcctcgccatccccgcgccgccgctcccagtccccatccccgcgccgcgaccgccgccgccgcgaccgctccccgatcccttaccgcgatcgctccccaagtccatatcgagcccgtcgccgtgaccgctccccgagcccttaccgcgatcgccgcgaccgctccccgagcccttatcgcgatcgccgccgccagtggtcaccctaccacaacgaccgcggccgggaccgtgaccgggtcctgcccgtccgtagcggcgggggcgcctggtccgatgacgacgacgacgacaaggaactccagggcctcagctacttcgagtaccgccgcctcaagcgccagaagcttcgcaagagcaagaaaaggtgcatctggaacatcacgcccagcccgccccgtgttgaaggcgacgaggagaactacggctacagcgacgtggaagaggagaaggtatctccgaaggcctcgccggaggctagcgaggaggagagcaaggatgcgtcggagtcagaatccggtgagtctgatagcctctccgagtccagcggatcggaagcttctatgaggaagaagaaagggaggaataaaagtcgccgtagtagcaagcgcagccggcagcgccaccgccaccgctcatacagttcggagattgaggacgaaagcaagagcgacgatgattctgtgggctcttatgattcggaggagtctagggataggagcaaaaagaggtcgcgcaggcataatagatctaagaagaggagcaggagctccaggaggaagaagaggaggagccaggatacagcatcggagcaaagctctgaggaggaagaggaggaggatagtaagaaaaagaataagggcttgaagaggaagcggagcaagcgatctgattctgaagaatcggtcccttctgatgccactcctgatgatgtaaaagaaattgaagaaactaaagtgccagaaattgatccagaagcaatcaagttcaaggaaatccttgaggcccagaagaaggcttccttggagaacgatatgcctgttggtccaatgccacttccacgcgcagaagggcatattagttatggtggtgcacttaggcctggagaaggtgacgcaattgcacagtatgttcagcaagggaagcgtatcccacggcgtggtgaggttggtctgtctgcagaagagattcagaagtttgaggatctggggtatgtgatgagtgggagtaggcaccagaggatgaatgctatccgtatcaggaaggaaaatcaggtttatagtgctgaggataagagagcattggccatgtttaactacgaggagaagtcaaagcgggagcacaaggttatggctgacttgcagcgcttggtgcagagaaccattggccatgatgtgggaccttcacatgatccatttgctactacagatggttgagtaatgatttcttgttcaactagtcacctgtatcaggtgtgctttacctgtttgtgtttccttccctacattgtaattagtgtttttgaacttgcctagttatgccgcaaattgcttatgacattttgcatgtgaaccatagtaaaaaagagcatattattagcttgtatcttgtatgtgcaatattttttgttatgatgggttatatgtgctt

SEQ ID NO: 141037 - DNA, 1542 bp, Zea Mays
catacttatttgtttggaccacgatacaaacaacagtatctgttttggagatggtattgcggtccaaataagaagtttgctctgtggattcatgtccatctgtttgctctctgcagctgtctgtagattcatgtccatgataccatgtttattgtcatagcttggtagctaagctcattctccgcgcccaattaacaaattttataagcagtttaatgcttttcacaggtaaacaaagttattgacttgatgtttataattgcaccacaacataaccaaatatccatatcccacatctctgaatggtttgaattgactgtagtgtttattccaataactcatctaggacactcttgggagtacagacagtaaacaatcgcctgagaacggctgcgccgtagctaggacgtccggttttgcggcgagctgctagaccttgctgtgccctgaggaggtcatcactggtccgcaaggaaagcaaccactcgatccatgacctcaaccgccttgtggctgccggggttgaggacgaagaaaccgtggtcctcaccttccgtctcgaaccactccaccttcccgcgccacccgctggcccgtacggcctcgcagtatccgggccccctcggcgccctcgggtccaaagacgccgtgcagacgagcagcctttcacccactagcttctccaggctcggcgcgccgtccgccatcgggttaatccttggatcgtccgccccgccggtcgcgcccgggaagatgaccgcccacctgctattgttagatcgccagaactcctcttcttctacatccatcttctgttcgccggaaaaggaagggtggagcaggatcacgccttctatgcgcggtggttcagcggccggcaagccgctcacgcccacagagatggccatgttgtgggcaatgttaccgccggcgctgatgccgaccaggaagacgcggccgaggtcgccgtggtcggacagccactggtccgcgccggagaccgcccacttgagcgcggcccaggagtcgtcgtaggctgccgggagcgggtgctctggcgcgaggcggtagtcggcggagacagcgacgacgcgtgctctggcgaccagcgagttgacatagcgatggtacataggctcgcgggctgagccgacgatgaagtagccgccatggaagaagacgacgactgggagcttcgtcgtggctccctggactggtggtaggtagagccgcacggtggcgccggtggcgacgtcgatgacgacgtctttggatgccacgcccgtgtccgcgtcgaagccggcgggcacggtttccatgcgttgggccgcacgctcgacttggccgtccatgtagagtttgaaggagctgcaatcgaaggcgatcactctgctgctggaatccattgcccttgcccggcacgtgtagcaagctgcggcggcgtgcactggagtggctgcacaggaagaaaggctatccttgttccaatcttctgcacctgcaggcggtagagtatttgatgagaaccctcactctttctca

SEQ ID NO: 141038 - DNA, 2673 bp, Zea Mays
cgccgcttatcatgcgctggcgaaggcgattgagcgagttcagcggctaatagattttcagttttatttccgggagaatgcggggtggcggcggggcttcctggctttcgtttcgcggcgtggtggtggaggaagaagaggcggtggtttcggcgccggaaaagccaatgcggcgggggcggcggaggtggggagcggaggtggacgacggctactcgccgagctccacgggcggcggcgggagcagctgctgcgattccttcggctgcgactcgcctttggccgggttcgtgcgcccagatggtgacccagacacagatctggagacagatgggttggccacttccacctccagtgcctttaccgagcggcaggacgacgaagcggaagaggcgctgtacggggtgaaggaagaggagtgggctcagatacaagaaccagccaagaatccggcattccgtgccaccccagaatgccacaaacagcggtaccggacggatgctgctgttcttttgcatggtaggaaggggtcgaaacagcggccggcctcacttgacctcggtagccctgggttccatggagccacgttttctccaagtttcgtgattggtggtgtggggttgatgaacaaaggacttggagcatcagtcatcaggtcagacgtgtttcatagtcctgggacgccgaactatccgcgccaccgtgcatcagtgttagggtgccataaagggtggagctctgagagagttccacatccttctaaaggaaataggcggtacccaggcagcagcatggcatttccttacagcaatgggaggacattgccctcgaaatgggaggatgcagagaggtggatcttcagtcccaattccagcgacgcgcttggaagaactacggttgctcatgctcggcgaccgaagtctaaaagtggccccctggggcctccaggaagacttggtggacagtattcatctgtttcttcagtgtcattgcttgataatgggagagctggacctattacagcaaattcaccttttgcggctggagtactaatgccggaacatgtttgtgaaggaaaaagtacaaatggaacctattcaagtagaccaattggtaacgaaatcaacattggaagaggagtcaaaatttgtccactgaatggtgggtctcatcctgttcgaacttccagagttcgccagcgattagattatgcagtcgaatcatctgtttcattgcctagcacgcaagaatctgtccaagacgagcaggttgaaatcacagaagattcagcttctactattgcttctataatttctagaaaagatgctgcaacccagaccagtccagagctaagtaggtcctcttcacccaacactagaccaacatttaatggttccttgtcaacagaacaagtgaaagagaaggggagctgtttgtcagatcttgatatcagggatgttcagatggatgatcgagtgactttgactaggtggtcaaagaaaaatgtaacacggtcgtctaacaagaattcaacaaacataatagagtggagcgaaaagacagtggaatcaaaatcttcgtcctggggctttgccaaagcgaagtgcatttctaagattgatagagaggacacagaaattactgcatgggagaatattgaaaaagcaaaagctgatgcagcaattcagaagttagtgattaagttagagaagaaaaggtcatcttcgcttgataagattttgaacaccctcaaatctgctcaaaggaaatcccaggtgatgcatgagcatgagcgtgatgcagtaacagcaaaccaagatggaaaaggctctaggaaggcaaaaaagagagcacaactcagcaagaatggccaaatcagttcactgagtggctgcttcacttgccatgctttctgatacatgtaattccaaaattgagaatcaggatccgacaaattccttcgcattccatgcaccaccttcatgttccccacatcaaaatctgggtgaagttcggagatccatcacatatcagtacataatatgatgatcccacagctggagattagacagagatctttcgaagatgctagctgcaggctccagctgctatgatagggacaatgccaaggggacaaataaaatgcagcacgaaggaaaggaggaacagtactgcgtacaccccatgtgcccgggtcgatgcctcctttatcattgtgctctgccttgtagctaggcactgtgaggctctgattgcaatcttgttgccaaagctgtatggatcatactaagagcaattccattgcacccaagggacagcaaaatcttgaggtacgaggagaaatcatgtcctgcttgtgcgtgtgactatttgagtgctctgctgggcgctggaagggaaccacgccccgttgtctcttttgtttggtacagtgctttacgaaggtgccatcggggtgactacttgcatttgcttttcagcagcgtcggtgtgttgtgttgtgtgtacctcttctctttgggaaactgagatgttggtttggcctggaaacttcggaatatcatatacagggacgaaaataatcatcactatgacgatttgttgtgggtgtcattttacggcagttattcatctggaatgctagtggcctttttaacatattcttcacttgcc

SEQ ID NO: 141039 - DNA, 685 bp, Zea Mays
cgcctgacccaatgtccatgtccaacacaatcaacctgcataggagctggcggtcgtggggtgatcgccttccgcgtgccgtaggagcagttcaccgccgaccactccatcggcttgtactccaagatggttcgggccaagaagaagaacacggactgtatctacacactcaagatcatggacaagaagttcatcacaacaagatctcatacgtcaagatggagcgcatcatgctcaaccacctaggcgtcatgaggatcttcttcactttctaggacatgtactctctctacatggtgctcgagtcgtgtgaaggtggggagttgttcaaccaaatcgtccgggttaatgtccaactgcttgtaatatagttcattcatgttctacctttgcttcttgtgctcataatttgtttgtagaaaggtcggctctctgaggataatgcacagttttatgctgctgaaatcgtcaataaattggagtttttgcatggctctgggctaattcatccggacgttatggtagtgtgaaatgaaaattaggatggagttgctcatgacattttatatttaggaaatttggatatgtaccaaaaaatctactgcttatttctggtgggcacataaagattgctgactttggtagtgtcaagcatgcaagggatacttcaaatcgaagttctccc

SEQ ID NO: 141040 - DNA, 137 bp, Zea Mays
ttctccaagcacatgagacaactaagagactctattgtacaatggagtgtctctaaacgtagtctattaataaatacagaattaaatgtatttgtatagcatcagatcgatagaacagacgacaaattcgtacagtg

SEQ ID NO: 141041 - DNA, 224 bp, Zea Mays
cagctacgttactgctgaagatccagccgacacacatagacaccatcggcgaagaagaggccagagagaggatgatactggtcgtgctcttcgccaactccgatggaaacatccttatcgagcgattccatggggttcccgcggaggagaggctccactggcgctccttcctggtgaagctcggatacgagaacctcaaagggtccaagaacgaggagctccac

SEQ ID NO: 141042 - DNA, 349 bp, Zea Mays
gcataaacctagttagattcttatgtggtgaggtcacaactatttaattccattatgctctataggttgcatgtacacgagatagttcacgggcaactactgatgaagtggttcctaaagagcttcgggctatatgacagtaacatactgatgaagtggttcctaatacaagagcatacagatgaagtggttcctaatacaaggactgaagaagtggtgactggagggctgggggtgtctcatcacagattgctacgatagaagctggtagtactatttcagcaggagcaacatcgtctccacgcattgttagatgtttaattaaaaatcaccccgaagaagaagaaag

SEQ ID NO: 141043 - DNA, 107 bp, Zea Mays
tttttttatcagaatgggagatgtgaaaagagtttaccatggagtaagcagattatctatagtctgacgctccaaagttgatgccatcaaacacgaaggccggggaa

SEQ ID NO: 141044 - DNA, 833 bp, Zea Mays
tccaccgactccaagatgaggatgcgcaaggccccggagctgctgaagaaggcggcgactgtgttcaggagcaagactgacaccctaagaacaaagctcttcatcctggcctcgctccgccgcaagatagcaacggtccgggcaatctctcgcaggatacatgcgctggtgtcatcgtcggaccgggagaatcaggccaggttggagtatggcgacgatagggcgcttgtcttgcagaaggtggctgcggggatccagcaggcgccagctgatactaatactgattgtgaacaagatggtgtggtcgatctctctgaggtggcgatgtttgtagaagatgatcacgattactaccctgactggacgcactcattgttcgatgacgaatattatgacgacgacaaggatgacgacgatggagaagaaggccaccgtgacgatgatctcggtgcacttgatgcgctcgacgagccctccgtcatcgacatcatcaggagcaaccggaaggtggaaggtttggagttcgtcatggaggatgagattgaccaggcctgtgacatgttcataaagaggtttcggaagaggatgaataggagcttctagtgcatgatcctgttttctgtaaggacaaaagagagtgctactaactagttgagtgacaatagaaggtgggtggaatttataccgtggtgcagtaataactagatacgagagagcatgcacgaagttctaggttgatgcaaggcatcgccgtttggtgtaacagagagagtggttttcctctaatgatgaaatacatgaatataatgctcttcttccatttaaacatagaa

SEQ ID NO: 141045 - DNA, 102 bp, Zea Mays
ccatttattcgcttatatttatgaaaattggaactgctaactggaggaatgaatgctatcaagacacgctagaaagaatatagatattagagaatcctgaaa

SEQ ID NO: 141046 - DNA, 1671 bp, Zea Mays
aggcgatgagcgcctctcgcgacgccagggcggagagctagccggccgggagcccacacgcagctggaagcaccagaccgatcgtgccggccgagcggcggcgcaggcgcaggcgcttacatgggagtagaggcgggcgggtgcgggcggagggcggtcgtcaccgggttctacgtctggggctgggagttcctcaccgccctccttctcttctcggccgccgtcgccgccgcagactcctactagcaagctaccaaccttctttctttcattcccttaggtagctcagccgtacacacaacaacacacaagtcatcagttactagctagttagtagcctatacaacacatacatacatacaaaggtgagtgaggttcgcgtgcaagcagagccaatcgtgccgatcgagctatatacatagccggcggcgagggatgggagaagcggccgcggccgtggcggcgtcgaagaggggcggcgggccggcgccgttcctgaccaagacgcaccagatggtggaggagcggggcacggacgaggtgatctcgtgggcggagcagggccgctccttcgtggtgtggaagcccgtggagctggcgcgcgacctcctcccgctccacttcaagcactgcaacttctcctccttcgtccgccagctcaacacctacggtttccgaaaggtggtgccggaccggtgggagttcgcgaacgacaacttccgtcgaggcgagcagggtctcctgtccggcatccgccgccgcaagtcaacggcgctgcagatgtccaagtccggatccggcggcagcggcggcgtgaacgccacgttccccccgcctctgccccctccgcctcccgcgtcggccaccacgtccggcgtccacgagcgcagctcgtcgtcggcgtcgtcgccaccgcgggcgcccgacctggccagcgagaacgagcagctcaagaaggacaaccacacgctgtccgccgagctggcgcaggcgcgccggcactgcgaggagctcctgggcttcctctcgcgcttcctcgacgtccggcagctcgacctccggctgctcatgcaggaggacgtgcgagcgggggcaagcgacgacggcgcacagcgccgcgcgcacgcagtggccagccagctggagcgcggcggcggcgaggaggggaagagcgtgaagctgttcggcgtactcttaaaggacgccgcgaggaagaggggccggtgcgaggaagcggcggccagcgagcggcccatcaagatgatcagggtcggcgagccgtgggtcggcgtcccgtcgtcgggcccgggccggtgcggcggcgagaattaactgtcatccaatgtgaggttgatgacaaggacagtttcatccatcatatcgagcaagtaacaaagccagtgctgtggtaaaactgcaaagacagaacacaggacacaggagaaatataggcgtaagcatgttaattaagaattaattatatatgggatgcttttgaagtagcaagattggaagtagagataagtaaaacgggctagaagcagcgcccatgtgttcagaatggaaaattagcgtttccgtgtgtgtgttaagaaaaacttatatgcgctttctgcgagcacggttgattcttaagagcgacagcaaatgaaaggtgtattattaattgaa

SEQ ID NO: 141047 - DNA, 2509 bp, Zea Mays
agtttagtcataataatgattcaaaatgtttttctttgtaaggcaacccattgctttttattattggggaaacactgtgatactacatattaattaaaataattttcttgaacatggtgattactttccaggtaccctacgtcaagtctatccatgataattttctaaactggacattctgtaaactcttgtatcctacagaatggatgaagtgaatgaggaaaatgggccacagatacttgttccttctgaatctattgatctagtgacaagtttgtttgattcagaacctcctacatcctttgatttctctaaaagtgtcccggttgttcatagtagacatttaagtgaggatttaagtgcccttacaattaatgatctacgcttgaacaatggagacaacaattgcaatgaccagattgaacagaatggcataaataatcactctagacattttagtgaagatttaagttgccttgcaactaatgatttttatgtaaacaaagaagaggagaatgatcattactcgagtgaacaaaaggtagaaagtctccctaactctgctgaaagaaacatttataaggcagcagagattgctgagaggttcattcagtctatgaataatagggtgtttgtcgacaccggagcaccaatagaatctgtcaaagatgctgtaagcaaatttggaggcattcttgattggaaagagagacgtaagcatgtccaaattgaacttgacaaagcactagaagatgctcctaagtaccaaaaaagagcggaagttgcagaagttgagaaaaataaagttgtcatggaattgtgtaacactaggagagccattgaagggttgaagctaaatttggagaagacacaaaatgaggcaatacaagcacaacaagattcagagcttgctgatgtacggttcaaagagattcaacagggaattgccttcagagagagtgccgcagcaagagcagagattgagcttgcaagatatcgctatgctagtgccatggcagaactacatttagtaaaggatgagattgaacaacttcagaaggagtatcaatccttaaacactatgaggtacaatgctgaaacaaaagcatgtgaatctaatgttgcatctcagaagattgaggaaactgtggatgaccttaccctcgaaattattagattaaaagaggagctcacctcttcacaagctactcatattatagcagaggaacaaaaattgaatgttgctttagcaaatcaacaagaaaaggagaaatggcagaatgaactaaggcaagctgatgaagaggtccaaagtttgcgtcatgcaacatcggtcaacaaagatcttgaatctaagctaaaaaatgcctctacacttttggtgaagttgcaagatgagttttctagttatttgaaaggggaatgcacacaagaggttagtatagatggagatgcagagagacaaccattggtgtttatcaagatgaagctagcaaatgctaggaaggagcttgaggacatgagagcagacattaaaaaatccaaggatgatgttaggaaactttggaatgtcgcagctacatttcgggctgatatagatagggaggaggcaggtctactagcattagagcacaaagagcaccttgcttcgatttctgtatcatctcaccaggaagagctaagcaacattacatatgagctcaacatcatccatgaaagaacaaaagcaactaagatgcctatagagctacaacaagcaactgaagttgtggaacaagcaaaagctaaggctttgatggcccattatgaggtggcaaaagctagggaagatgcagatcaagttaagtcacaattaaatgtcattaaattgagactagaagcggcgtcaagggagatacttgcagtgaatgcatctaaagaaattgcaaccacctcagcaaatgcattgcaagaatacaaagatgaagcacatatagagccccaagatgagcagataagaaataactatatgacattatcacttgaagagtatgacgccttgagcaagaaatcccaagatgctgaacgcctcgctaagaagcgagtcatcaaggctattgagaaaatcaaagaagccaaggatgcagaggtgaggagcttgaatcagctagagcagtcgaccaagaagatctatgagaggaagttggagctaagggttgcgcaggagaaagccaattcagcgcaatatgtcaagctaaccatggagaacgagctgagaaagtgcaaggccaagcatgagcaacagaagaaagtgggcgagtcagtccattccatttctgacgtccccaatttgaagagtggatcattgtcttttgacgcagcatcttcaacctccaatcctcacatggttggagcattgtctagagctgacactatagcaacaactagagtgaaagagccaaaaccacgaaagtcactctttccaaggtccgtagtggccatgttcgtgtctaggaagaagacacgttga

SEQ ID NO: 141048 - DNA, 115 bp, Zea Mays
atgttttctcattttttttctttccttacgctatgtacccttgatttaaattgtttgcttattgaacccttgctcttggtgcattagagatgaactcaatcatatccaaggttga

SEQ ID NO: 141049 - DNA, 412 bp, Zea Mays
cttctcgaagtagaaattcattggaaaaatatgaagtggacactgaatctaaaaatgaacatgacgtgttcagaccttatgcttggccaagacctcaggtgcagtcctcccagagacgcaaatcatgaagacgaaaagccaaacttctccctgtcttgggcatttcactctatgagctcctgcagcgggtggaagaaaaaacaatccatactttatatatgacatataaggaaaactgagagttgatgtagccgttgggccatcaaatctatggttgtggagagcgctgatgattgctcctccttgctccacctaaaccagaaaggaaacatagattaccaacgcagtgactggcacattagatccattggcgagtagcactcgcatccgccaccatgtgccatggctggcg

SEQ ID NO: 141050 - DNA, 1069 bp, Zea Mays
aaaggcctgaagtcattcggctgctgtaattttgtaactttctcggcggtataaaaccttttggttttctgtacatttgcaaggagttccgtattagaatcttattatgcttggcacgttggtatggtccatctggtcgccctgctttctggtttaagattgcctacactgcaagctccggaggaattccacattctgaaactttgtgcagctctgaggcatatgtattctcgcaaactttgctgatggcaggcgacatgtaagcgcttaagacgaagggcatccatcgcctctagctagccctaggcgcagagcagatcaattactcatctcatcgcaaaacaatgtcccatctgaacattctctccttcaagtacaaccttgcgaagctccggtccaaagccgggcgccggcgaattgggcgggcgctgtcggccagggaccgccagttctccgacctgagcacctacaggcccgacgaggaggagatgaggaaggttttcggcatgatagctggccagccccgtggcgtcaacaagagagacctccagctgctcctggagcggttcgggaaggcggacgccgccgccgaggcccggcggatgctgtgcgtcgcggaccacaacaaggacgggtacatggacctggaggagttcatggaggtgcacaggaacggcgtgcagctgggggacatccggcgggcgttcttcgtgttcgacagggacggggacggcaggatcagcgcggaggaggtcatggccgtcctgcgcaagctcgggcagagctgcggcctggacgactgccgggagatggtgagggaggtcgacaggaacggcgatggattcgtggacatggacgattttatggccatgatgacgcgcccgcgtaggaggccgtgagcgccgccggcctagcttccgtgtgcacgtccgatcccctgatgtaaatatgccatgcaaatcacatcctggaattaaagagtgtttgctatctttgctgctgcttggcttgccggtctatatattgataaaggagtaataaacgggtaaatataaaagaaaacaacaaa

SEQ ID NO: 141051 - DNA, 297 bp, Zea Mays
atggccggtggcagccagagatcaagcgcagcggcagcggcagcggggcggggatgggctgcggaggcagaggcgagattgacagctaagtcacctcataaatttgagcactgtggcggtgatcaccaggtaggaggagaggactgctggtgctggacgggagatgcgacggggcccgcggctgctgcagaggcagaggcagaggcgcagagcccgccccctccgtccgatccgcgccggcgcaagaggacagaaataaaagaggccggcatgccggtcgcgggcgggtttgattag

SEQ ID NO: 141052 - DNA, 1160 bp, Zea Mays
cgcgaaatgaaacggaactgggacagcaaaggaagatacggcgcgatattttagattacaggagagtaggagaccggcgccgaaagctccgtggcctcgtctccttccccacttcggcctcggcagttccgcgtgccggccggagcctcgtctcgcttcgcatctcgcacttcgcgccttcgccgctgcgattcctcagcagctcctcggccgctccacccacccctgcgccggcgagatggagctcaagcccggcatgtcggcgctcgtcaccggcggcgcctctggcatcgggaaagcactttgtattgcttttgcaaggaggggtttatttgtgactgtcgttgatttctcagaggaaaatggaagagaagttgctacattagttcaaaaagaaaatagcaaatttcacggagatcttagaattccatcttcaatatttgttaagtgtgatgttagtaatgcagataatcttgctgcttgttttgagaagcatgtacagacatacaatggactagatatctgcatcaactgtgctggaattgctaataaaacactagtttatgatgatacatctgatggaactagaacatggaggcatgctgttaatgtgaaccttgttgctgtcattgatggtactcgcattgcaagtcaaataatgcgaaaccaaaagaagcccggtgtcataataaacattggttcagcggcaggtctttatcctatgttcctcgatcccgtatatagtgcggcaaaagggggtgtggttatgtttacaagatcactttctccattgaaacgccatggtgttcgtgtcaatgtgctctgcccggagtttgtccaaaccaatatggcggaacaaatgagccgcaaagttatagattcatctggtggatatttggagatggaagatgttgttaacggtacaccatttctgtaatctagtgttattacaggactattagctttgtaaccatattttatgtgccatgatgatcaatgcaagcgtcagatgaattgttttaaacttctagtgttatgttgaggtggggtgttttaaagatgaactgcacaaaaacatttgttatcactgtaaaacatgtgaattccattgatataaattcaataatgtacatggtaggttgtgtaacctgcatgaatag

SEQ ID NO: 141053 - DNA, 2433 bp, Zea Mays
aggagaccggcgccgaaagctccgtggcctcgtctccttccccacttcggcctcggcagttccgcgtgccggccggagcctcgtctcgcttcgcatctcgcacttcgcgccttcgccgctgcgattcctcagcagctcctcggccgctccacccacccctgcgccggcgagatggagctcaagcccggcatgtcggcgctcgtcaccggcggcgcctctggcatcgggaaagcactttgtattgcttttgcaaggaggggtttatttgtgactgtcgttgatttctcagaggaaaatggaagagaagttgctacattagttcaaaaagaaaatagcaaatttcacggagatcttagaattccatcttcaatatttgttaagtgtgatgttagtaatgcagataatcttgctgcttgttttgagaagcatgtacagacatacaatggactagatatctgcatcaactgtgctggaattgctaataaaacactagtttatgatgatacatctgatggaactagaacatggaggcatgctgttaatgtgaaccttgttgctgtcattgatggtactcgcattgcaagtcaaataatgcgaaaccaaaagaagcccggtgtcataataaacattggttcagcggcaggtctttatcctatgttcctcgatcccgtatatagtgcggcaaaagggggtgtggttatgtttacaagatcactttctccattgaaacgccatggtgttcgtgtcaatgtgctctgcccggagtttgtccaaaccaatatggcggaacaaatgagccgcaaagttatagattcatctggtggatatttggagatggaagatgttgttaacggcacatttgagcttatacaggatgagagcaaggctggtgcttgcctttggataacaaaacgacgagggatggagtactggccaacaccagaagaacaaagaaagtatatggtgaatcctaacaaatcaaaaaggatgctgacaaacaatatatatcctagcatccgaatgcctgaattctttgagaagatagttgttcacacactcagccataattttcgcaatgctacaagacttgagcgtgtgcaactgagatttcctatcaaagcgcatagtgctctggttaaaataatatatgctggcgtaaatgctagtgatgtcaacttcagttcaggacgttattttagtggtaatcctaaagaaactgcttcacgccttccatttgatgctggttttgaaggtgtgggaattgttgccgctgttggagattcagtcagtcatatcaaagttggcactcctgtggcccttatgacttttgggagctatgctgaattcacggaggttccagccaaacatcttcttccagtgccaagaccagaccctgaggttgttgcaatgttgacatcaggactgactgcatcaattagtcttgaaaaggcaggacaaatgacatctgggcaagttgttttagttacagcagctgctggtggaacaggacagttcgcagttcagctggcgaaattagcaggcaacaaggttgttgccacatgtggaggtgaaagtaaagctgaacttctggcttccttaggagttgatcgtgttatcaattacagaaatgaacgagtcaaagatgttctgaagaaagagtttccaagaggtgtagatatcatatatgaatctgtaggtggggaaatgtttgacttgtgcttgaatgcacttgcagtccatgggcatctcattgtaattggtatgatctcccagtatcaaggagaggatggctggaagccaaagaactacactggactatgtgagaagattctagctaaaagtcaaactgtggctggatttttccttgttcagtatgctcacttgtggcaagatcatcttaacaaactttttgacctgtatgcctctggaaagctaaaggtttccctagaccccaagcaattcttgggtgttgcttcagtcgtagatgcggtcgaatatcttcattctggcaagagtgttggcaaggtcgttgtgtgtattgatccatcatacggtcagatcgttgcaaaattataatccatggacatgatgcgcattgtcttccatggtcacgtaggttattgtcttatagttacacatatacatcaagaccgtattttcccagcgggtgacaaatgaataagggaacatgttggtgtatagtttagtttcatttttccaaagtgtaagatgcacaactatactgaaggacaagcatgggcatggaaatcgattaagtttctaatcccgtgcagtaggatatgcattcgtgtggcctcgttccacgttgtatgtatacagtatatattatataacttgtctcagtgccacatgcttcaattcgaaccggtaacaataattcaaacagctcatgcagatgcattctcaaataca

SEQ ID NO: 141054 - DNA, 990 bp, Zea Mays
gacagaaagggatgagagatcatcatcagagaaaaagagctcgtgatgagggaggtaaacacgaggagatcgagccggccggggcgggcaaaccgccatgcgcgtctcggttccttcgttgccgtcgtctgttcccatccagcttctcgacagatccgctggcacgcaggccgcaccacgtactactctgatcttctcgcttgtccgttcgcctcgtctcatttcacatttctccctcgcctcgcctcgcctcgcctcctccgtcacccacgctctcccccctgaggctcggtcgggatggagctgaagccaggcttgtcggccctcgtcaccggcggcgcctccggtatcgggaaagctctatgcattgctcttgcgaggaagggtctgtttgtgactgtcatcgacctctctgaagaaaacggaagagaagttgtttcattagttcaaaaggaaaacaaacatgtccatcaatatgctagagttccatccgccatattcatcaagtgtgatgttaccaatggagaggatcttgctgctgcttttcgaaaacatgtggacacatttggtggactagatatatgcatcaattgtgctggatttgtcaacaaatcgttggtttacgatgataaatctgacggaacttccacttggaggcgtgctgtaaatgtgaatcttgttgctgttatcgatgggacgcgcattgcatctcaagtaatgcgatcccagaagaagcccggcgtcataataaatattagctcagttgctggcatatatcctatgagctatgaacctgtgtatagcgggacaaaagggggtgtggttatgtttacacgatcacttgctccactgaagcggtatggcattcgtgtcaatgtactgtgccctgagtttgtccaaactaacatgggagaacaagtaaatcgtgtacttgtggatgcgcttggcggatttttaaaggtggaggatgttgttaatggtaagctattt

SEQ ID NO: 141055 - DNA, 81 bp, Zea Mays
cgaacacgcaggagagctgcgtatcattgtattaagaagaagggtctaaaaattagaccaaatacaaacacaacagaaaaa

SEQ ID NO: 141056 - DNA, 711 bp, Zea Mays
atggcattggaccttccttcttgggctttaaaggccattgacaaaattcggagaaatttcctttggcgtggaagaaaagaagctatgggtggccactgtttggtggcctggaacaaagtgactagacctaaagagcttggaggcttgggcatctcccacctgcagcatatgtgttgggccctcagattgcgttggctctggttaaaaaaaactgaacctgaccggccttgggcagccttcaattttcatgtgcacccttcagttctggccttcttttctgcagcagtttcttctgaagtgggcaatggcaggaatactctattttggacagataaatggttaaatggccaaagcctacaacagttggcacctcatcttgtcaggttggtatcttcaagggctaggaaaaggagtgttcaggatgccctcactactgggagctgggttcaggacattagaggggctattactgttaatgtgttgactgaattttttcaagtctgggacctcgctgccaactggattttgcacccggaacaggaagataagcacttatggctgctctctagttcaggaaattataccgccaagtcggcttatgatggtttctttattggctcaacaacctttaggtcatggaggtggatttggaagagttgggctcctggaaaatgtaaattcttcatgtggctagtggcgcacggccgctgc

SEQ ID NO: 141057 - DNA, 528 bp, Zea Mays
atggaacatgatatgaatgaagttccgggaatctatagggttgttcacacactcagccataacttccggaatgctacaaggcttgagcgtgtgcgcctgagattacccattgaaccgcacaacactctagttaaaattatatatgctggtgtaaatgctagtgatgtaaatttcagttctggtcgttatttcagtgttaattctaaagaagctgcttcacaccttccatttgacgctggttttgaggccgtgggaattgttgcttctgttggagattcggtgaaacatatcaaagttggcacttctgttgcccttatgacttttggaagctatgctgaattcgtgctgatttcagccaaaagtcttattccagtgccaagaccagacccagaggtggttgctatgctaacatcaggattgactgcatccatcgctcttgaaaaggctggtcaaatgatatctggacaggttgttttagtcactgcagctgctggtggaacaggacaatttgctgttcaggtgagctga

SEQ ID NO: 141058 - DNA, 1452 bp, Zea Mays
atcccctagttcctagtttctcttccaaatttcagacctctacgcacgcaggtcgtaggctatcctcaatccccgatcccgtgcggcggcggttccatagcaacacagtacggcaagacggcaagtccaagtttgcagcgattgcagctccactgctccccaccttctcgccgtgcacgcctgcgcagcgcgcggcgaacggttcgtcggtgccgtggtcgtggtcgtgcgcgagcgcctgtccacggcgggcccacggcgaggtgcgaagccgctacagggcccacggcgagcactgaccgccgagcgggcgaggccgtgacaagcacccactaggtgtccagcacaacagcacgccaggaacagtggtccagctcccactatggttctaaccagcaatatttcggttcagaagaccttgtacgaggttttatctgtgagtgaagacgctacatacgatgagatccgcgcagcatacaggtctgccgctctgaacacgcaccctgacaaagcgcagacaactctcgagtcatcatccgtgccttccactgagcaacaggaattttctagcgtgcagaaagcatgggaagtcctacgacatcctacatccagagcatattatgacaagcagctgcagtcatccagacaaagcatcgagatcatcgcatctgaaatccaagtcggggacatgatcgtcgagagcgctgctggtgctctagagctgctgtacccatgcaggtgtggcgattatttctccatcacttcgggtgaacttagcgggatggggattgtcgtcactggggatggagaagaggtagaagggctgcaggcgtcggattccgggtcggcttctgtcgttctgggctgtggctcctgttctctcaaaatacggctggttatagatggaacctcatgatcacatttcaggctctggttgcgcgctattcagcagtgtggtcagtttgaatgcttaacaaccaccaccacatgtttgtcaaacagtatgcaattcctgctctgctgaaaatcgtgcagcttatcccaatggtggttgcattgtgataaatggcgttttgaccgttgttatcagctaaccaccatcgtcaagtccagctgctgggagttcaaagccggtggtggttattcggtagatgtttagttaatgttgttttttctaggccaatttaatggtctcatctgtcagccattcacttaaacgatggctaaactaacggttttttttatttggtatcagctgaatgaatgcctgttgtttttgatagctgctgatgagaaagaagtgttggctgcggccgttggtgttgtattgaataacttgtgaccgtatctgtactgctaagcatgggcagcatcccatacagaagtagaacggctctgtatctgtatcctcagaatttgatatgcgtaaaactgtgcctgccgttaccgccg

SEQ ID NO: 141059 - DNA, 1386 bp, Zea Mays
cttccaaatttcagacctctacgcacgcaggtcgtaggctatcctcaatccccgatcccgtgcggcggcggttccatagcaacacagtacggcaagacggcaagtccaagtttgcagcgattgcagctccactgctccccaccttctcgccgtgcacgcctgcgcagcgcgcggcgaacggttcgtcggtgccgtggtcgtggtcgtgcgcgagcgcctgtccacggcgggcccacggcgaggtgcgaagccgctacagggcccacggcgagcactgaccgccgagcgggcgaggccgtgacaagcacccactaggtgtccagcacaacagcacgccaggaacagtggtccagctcccactatggttctaaccagcaatatttcggttcagaagaccttgtacgaggttttatctgtgagtgaagacgctacatacgatgagatccgcgcagcatacagcgtgcagaaagcatgggaagtcctacgacatcctacatccagagcatattatgacaagcagctgcagtcatccagacaaagcatcgagatcatcgcatctgaaatccaagtcggggacatgatcgtcgagagcgctgctggtgctctagagctgctgtacccatgcaggtgtggcgattatttctccatcacttcgggtgaacttagcgggatggggattgtcgtcactggggatggagaagaggtagaagggctgcaggcgtcggattccgggtcggcttctgtcgttctgggctgtggctcctgttctctcaaaatacggctggttatagatggaacctcatgatcacatttcaggctctggttgcgcgctattcagcagtgtggtcagtttgaatgcttaacaaccaccaccacatgtttgtcaaacagtatgcaattcctgctctgctgaaaatcgtgcagcttatcccaatggtggttgcattgtgataaatggcgttttgaccgttgttatcagctaaccaccatcgtcaagtccagctgctgggagttcaaagccggtggtggttattcggtagatgtttagttaatgttgttttttctaggccaatttaatggtctcatctgtcagccattcacttaaacgatggctaaactaacggttttttttatttggtatcagctgaatgaatgcctgttgtttttgatagctgctgatgagaaagaagtgttggctgcggccgttggtgttgtattgaataacttgtgaccgtatctgtactgctaagcatgggcagcatcccatacagaagtagaacggctctgtatctgtatcctcagaatttgatatgcgtaaaactgtgcctgccgttaccgccgagtctggcatgttcggctcctggattggtatccggaacgatttat

SEQ ID NO: 141060 - DNA, 699 bp, Zea Mays
ttagattttaaaatctgcaataaaagaagacaacatgcattgcgttatattcattcacaatgaagaactgtttgggcatatattacatccaagaaccaaaatttgctgggtatattttacacttactgtttttttacccctgcatacagtggtccagctcccactatggttctaaccagcaatatttcggttcagaagaccttgtacgaggttttatctgtgagtgaagacgctacatacgatgagatccgcgcagcatacaggtctgccgctctgaacacgcaccctgacaaagcgcagacaactctcgagtcatcatccgtgccttccactgagcaacaggaattttctagcgtgcagaaagcatgggaagtcctacgacatcctacatccagagcatattatgacaagcagctgcagtcatccagacaaagcatcgagatcatcgcatctgaaatccaagtcggggacatgatcgtcgagagcgctgctggtgctctagagctgctgtacccatgcaggtgtggcgattatttctccatcacttcgggtgaacttagcgggatggggattgtcgtcactggggatggagaagaggtagaagggctgcaggcgtcggattccgggtcggcttctgtcgttctgggctgtggctcctgttctctcaaaatacggctggttatagatggaacctcatga

SEQ ID NO: 141061 - DNA, 1216 bp, Zea Mays
cgccaacaggctctccttgcaagcctctctttttaagttacggggcacttgtcatgcacatgggcgaccgagctcttccatttatatctctaccactcctcatcggtgaccggacgaacgccgggagaaacaggccgatccgtagctgcctgcacacatcggtgatcgttcgatccatgtgcgattgattgatcagggaggagcgagtgatataatgccttgcttggcgcaagagttccacccgaagctgcccgcggcgaaccactactgcaagtccttgtcgtcgctcatccgggagacctacgcgcactgccatgtcccctgcgtcgggatcgccgggtggagctccggcggggacagcgacgacgacagcgtcctcgacgaagcgcgagataccaagcaggtgatcctcagcgagatgaggagccggcagatgaagaggcggtccaggtgcagcgtggactcgccgacgccgctgcccctgccgtcgtcgagctccgctttcgcctggtcgtactcgtacgctccgctcggtccgagaaccgttctcgacgagctgtcgagtcccaagacgtgcgtcgtggtggagggggcggccgtggccgacgacgacgatggggacgtctactgcgacgcggacgacgagagcgaggcgttcttctccgtgaagagctgcttcacgcgcagcacgagcccgagcccgagccgggcggcgaccgcggcgtcgtcgccgcgcatgatgacaggcccgtccccgccgatgctgcgccggtcgcccgaggcctgggagcgcttccgggactgcgacgggtggccgttcgggctgtgccgtcgcccagccgtcctcccgctgctgccgccgctgcccagcacgccagccgactcgtggaagtggcgcaagagcgtcagtacagtagcctcgccgcgcaggcgcagcccaaccccggcttacagacacaaagcagccactgctgctacgctagcagtaaatgaccgcgccgccgctagtggcctgcgtgcttgaatgcgagagttccatagggattctacatttctacaggacacgaaacagttcatttgctccgacaaaatggtgaagcttcccgcaggattcctacgcgaagatgtggcatgcatgcttgttcgaggccttgatcttttgcaaggatttttcaggtgcacgtgttctcaaaaataaactctggtttacttttca

SEQ ID NO: 141062 - DNA, 1596 bp, Zea Mays
tcgtttctccgggaacggctccttagtgtggtcggacacgaaggtgtgtggggtcatgatctatgccaagctcgggcgctagggctggggtgtacgggtgttgatgtttatgcaaaaactacagcggaaataagccatgaggcgtgctctgtgtcacaggatcacgtgctatggtaggaccgggccccggattttgtctacgccattgattccagcgatttggccggggtcagtagctaacgttccatcccagaaaaccccatcttatcataggaagtctaccagttttgccaccaaggtcacaccatccaccacggccatggagtccggcgcagacgaggtggcgttcgagtccccggcacatttccgcatctacaagagcgggaggatcgagcgcctgaaccggcccccggtccttcccgccggcctcgacgaggccaccggtgtcacctcaaaggacgtcgtcctggacgccggcaccggcctttccgtacgcatctacctccccaagctccaggaaccatccaagaagctcccggtcctcgtctacttccacggcggcgcgttcctcctcgagtcggccggctctgccacgtaccacacctacgtcaacccactcgcagccgccgcgggcgtcctggtggtgtccgtggactaccgcctggcaccggagcacccggtcccggcggcctacgaggactcgtgggccgcgctccagtgggtgacgtcggcgcaggacgagtggatcgtcgagcacggcgacacggcgcggctcttcctcgccggcgacagcgccggcgcaaacatcgtgcacgacatgctgatgcgggcgtccggcgccggcgggccgcgcgtcgagggcgccatcctgctccacccgtggttcggcgggaacgcgcccatcgagggcgagccggagggtgccgcagcggccaccgctgggctctggacctacgcgtgcccgggcgcggtcggcggcgccgacgacccgaggatgaaccctctcgcgccgggcgcgccgccgctggagaggctcgggtgcgcgaggatgctggtgtgcgccgggaagaaggacgcgctctacgtgagggaccgcgcgtactatgaagccgtggcggccagcgcgtggcccggggacgtggcgtggctcgagtccgaaggagaggagcacgtcttcttcctcccgaagcccgagtgcgagaacgccaagctgctcatggaccgcgtcgtggccttcattgccggggcctgacttgctctcttgtggccttgttggcgcggcaccgcgcgacgcagcatcaggtcgccattgaagattgaagttgtggacttgtgggcaagtttctctcgctgaatattggtcttgtctaaatttttttctggtacaagtgtggtactgaagtcttgaaactgattttttaataagcaaactataagtccacattattcattattccagctccgccacaatgtctaagcagggcagatgtccagttgtcctgaatctcgttgcttttactctgctacaaagctttacgatgagttctcgcgaatgtaaaaaggtttcttatcactttgccactattttttgtatcg

SEQ ID NO: 141063 - DNA, 1552 bp, Zea Mays
ccaccatctgttctgtgccggaattttcgttcccaggaatttccacaaggccaacttctacgcttccgcgtcactcagcccctaaatatcgatttggttggctagttggtacctttgctgcctgctgcaatcagtgatctgtgccgcctggggtctcggaccatcagatctccagctagcttccttgctacttactcccctacccgctgcaccctcgccatggatccgccgagctccgatatcgtagtcgacactccatacttccgcatctacagtgaccggcgcatcgaccgcttggtcggcaccgataccgtgccggcgggctttgatcccaccaccggcgtcacctccaaagatgtcgttgtagacagcgacgccggcgtctacgttcgcctgtacctcccggacacggctacggggtccgatgattccaagaagctcccggtgctagtctacttccacggcggcggctttgtcacccactcggcagcgtctccgccctatcagtccttcctcaacaccctggccgcgaaggccggcctgctcatcgtctccgtgaactaccgcctcgcgccagagcacccgctgcctgcaggctacgaggactccttccgcgcgctcaggtgggcggcctctggtagtggggacccctggctgtcacatcacggcgacctggcccgcatcttcctggccggcgacagcgccggcgggaacttcgtccacaacatcgctgtgatggcagccgcgtcggaggtgccagtgcgaatcaggggcgcggtcctcctgcacgcggggttcggtggcagggagcgcatcgacggagagacgccggagtctgtggcgctgatggagaagctgtggggggtcgtgtgcctcgcggcgacggacggcctgaacgacccgcggataaatccgttggctgccgccgcggcgccgagcctgcggaacctgccgtgtgagagggtgctcgtctgcgcggcagagttggacttcctgcggccgaggaacagggcgtactacgaggccctcgcggcaagctggcggagcggcacggtggagtggttcgagtcgaagggcaaggagcacgtcttcttcctctacaaccccggctgcggcgaggccgtggagctcatggatcgactggtcgcgttctttgctgggaactgaaattcgtcatgtgtggatgtgaccgcgaccacatccacatccagtgcagtgagacggatggatcaaacgaagatgcagctcatcgctgaatcgaatgattgagctgggtccaggaaaagaaaactaaaagtgactagaataattgagatcggagccttggattgatcagtttgtgctatcaatttactgcacgggtcagcgtctcttgttttctttttcatcgagaataatatactagtaggaccgaaactatctcagcatccgaaagtatcagcttatgtcgatcctttcgtgtaggcgtttttttcctttgcatatattattgtataactcttctgtgtcaatacatgtccaattaatttagaggctctttggtttcacggct

SEQ ID NO: 141064 - DNA, 1618 bp, Zea Mays
ataggaacacacgaatacgcgaccacacgttcacctcggccatgatccaccaacacagcagctccctccctgaaatctcattcccatgagccatgaattttcacacggccagcttctgcgcttccgcggcgataggaggcctgccaacagcccccaaaatatcggcttcgttggctactggtcgctttgcctgccgcagtgagaaatctctggagacctggaccttcactgcttcacatctcctgctactagctgccttcttgctgctactcccacccgctgcaccctcacagacaccatggatccgagctccgacatcatactcgacactccgttcttccgcatctacagcgaccggcgcatcgaccgcttggtcggcaccgataccgtgccggccggctttgatcccgccaccggcgtcacctccaaagatgttgttttagacagcaactccggcctctacgttcgcctgtacctcccggacacggctaccgggtctgaccgctactccaagaagttccccgtgctagtctacttccacggcggcggctttgtcatccactcggcagcgtctccgccctatcagcccttcctcaacacccttgccgcgaaggccagcttgctcatcgtctccgtgaactaccgcctcgcgccagagcacccgcttccggcaggctacgaggactccttccgcgcgctcaagtgggcggcctctggtagcggggacccctggctatcacatcacggcgacctgggccgcatcttcctggccggggacagctccggcgggaactttgtccacaacgtcgctatgatggccgccgcgtcagagttgcgaatcgagggcgcggtcctcctgcacgccgggttcgctggcaaggagcgcatcgacggagagaaaccggagtcagtggcgctgacgcagaagctgtgggggatcgtgtgccccgaggcgacggacggcgtggacgacccgcggatgaaccccttggccgccgcggcgcccagcctgcgaagcctgccgtgcgagagggtgctcgtctgcgcggcagagctggactcgctgcgggcgaggaacagggcgtactacgacgccctcgcggcaagcgggtggggtggcacggtggagtggctcgagtctaatggcaagcagcacgccttcttcctctacgactccggctgcggcgaggccgtggagctcatggatcgactggtcgccttctttgctgggaacttgaattcgtcatgtgtggatgtgaccacacatcacacgaccacatccggtgagaccctgagatgaatggaacaaacgaagatgcagctcattgctcaatcgaaataactgagctcagtcctcaaaacaatgaaaaaagaggaaagaacagttgagatcggagccttgtactaatcagtttgtgctatcgcttgggtcatcaatttctataatcgtgtgcacgttttgttgcatattactgaaatttttattatatttgatcctaacctattaaaataattataaaatctacaatatatttgcctaggataagttatgatattatctactgaccaacaaatttgaattgcaaaacataatttgtacataaagaaataaaaaaga

SEQ ID NO: 141065 - DNA, 1447 bp, Zea Mays
catcactccgcaggattttgtattctacagttcgtagcagcagaagatgagagaccacagacaagcagtagttgtttgttcaatcgtctgccggggttgcgggttgtcaaatctcacttgttttctcctaccaagcagagccaagcctactcttccaatccctgtcagggtggttagtctttgagctggtgggatcatggttgccaagacgaggacgaggcgacagctcgccaagctcgcgctgcttctactcgccctgctcctcctgctcgccgccatcctgctctgcgtcttcttgatcccgcgccaccacaggaggccgctgccccccgcctcgccgccgggggcggggaacgcctcgaatcccgacgacagcatcgtggcgttcgacttctcaccgtacctcatcatgtacaagagcggccgcgtgaaccggctggacggcaccgcccggtgctcggccggcgtggatgaggccacaggggtgacctccaaggacgtcgtgatcgacagcgggaccgggctcgcggcacggatgtacctgcccccggcgccccgcgggacgcaaagcaagggcctcggcaagcggcacccggtgctggtgttctaccacggcggcgcgttcgtcatcgagtcggcgttcacgccgctgtaccacgcctacctgaacggcgtggcggcgaaggcgcgcgtggtggcggtgtccgtggagtaccgcctggcgccggagcaccggctgccgacggcgtacgacgactcgtggcaggcgctcaactgggtggccaggaacgccgggtccgggccggagccgtggctgcgggaccggggcaacctgtcccggctgttcgtcgccggggacagcgccggcgccaacatcgcgcacgacatggccatgcgcgcgggcacggggggcgggctggacggcggcgcggccatcgcgggcctcctgctcctggacccctacttctgggggaagaagccggtggccggggagacgacggacccggccaggcggcgccagtacgaggcgacgtggtcgttcatctgcggcgggcggtacagcatcgacgacccgctggtggacccgctgtcgatgccggcgtccgagtggcggaagctggcgtgctcgcgcgtggcggtgacgtcgtcgggcctggacgacttccggccgcgcgggctggcgtacgtggcggcgctccgcgacagcgggtgggacggggagacggagcagtacgagacgcccggcgagcggcacgtctacttcttggataggcccaaggaccccaattccgtcaaggagctggccttcgtcaccggattcctgagccgggagtaggtaggtagccatcacggcgagggcgtacagtttaggtgcaatcgtgaggattgcttgctgatcgaggcacgtgaatacgtgattgattaatagagactattattgctagca

SEQ ID NO: 141066 - DNA, 1169 bp, Zea Mays
atggcgcgggcacgcgctgcgatcgagggaggtgaggtaggcgtggaagacgaagctgacggcggtgtggaggcagaagccgccgccgaagtacacaaggtttggaagcttcttactgcttccaccattgtcatcggtcttcttggcgagcggcgggaggaaagggcggacggcaacatctggggagacggcgcggtcgttggaggcgacgtccatagcagattagcagcgtccgtggcggccgggacgccgggacgcgagcatccggtccccgctctctacggggacgcgtggacggcgctccagtgggtggccgcgcactccgtgggccgggggcaggaaccctggctgactgcccacgcggacctcgggcgcgtccacgtcggcggagagagcgcgggcgcgaacattgcccaccacgccgcgatgcgcgctggcagagaggagctgggccacggcgtgaagctcagctcgctcgtgatgatccatccctacttcctgggaggcgagagctccgagacagacgacatgggcgtagcgttgctccgcgagctcgtccggctgtggccggtggtgtgcccgggcacgagcgggtgcgatgacgacccgttgatcaatccgatggcagagggtgcccccaatctcgctagcttggggtgccgacgcgtactggtgtgcgtcgggggaaaggacccgatgagaggcagaggaaggctgtattgtgagaagctgaagagaagtgggtggcgcggggaggtggatgactgggaggcggacggccagggacacggtttccatctctcgtgccccatgagcgcagaggcggaggcgcaagtccgggtcatcgctgagtttctgacctacggatgacatatctgttttcccactccttcacgcggccatggtgcattgttctcgaatctgatatacattttttgtttcgagtttggattgaggacatgcatgtttatattttatatttttatctactatttcataagcttaataaatgtttggctatgggttccagattctcaattttcatcagaagaaggggttactgagctgtattagacttacctttgggttaatatctattggtgcaagacccagattggctatacctttgtaatcgaatttgctttgcctggctaaagtttatgacaaaa

SEQ ID NO: 141067 - DNA, 377 bp, Zea Mays
acaggcgaatttggaaactggctatatggtgcgtgcctgtcataggacagagctgactaatgacgaagctctcaagagatttgcgaagctgctgtctgatgaaaggcaaattcgtaaggcaagatggccaaaatgaagaaagcccttgtggttgtttcaacacacagagaactctgcattacttcaattaagaattatggttgatattatttgttgatatgaattgtaacaataaaacaacttgtattggatcatgctgacactatgaattgatgatgttggcttctgccgggtgccggctgtcttttgtagcgtgtgaaggaatggaaaatattaatattctttttgataaatataagcattggattacttgtata

SEQ ID NO: 141068 - DNA, 276 bp, Zea Mays
atggccgccggtctcgtcgtcaagccgtcgtgggcgtgcattgtgatcatcgtcttgatcgtcacgttgtccagcggcgcggcgtccggcgaggcgaggaggctgctgatggcggagaaacacgcggccgagggagcatgcgccggtggttgcagtcctccggtgcaaggtctcacggcgacgacgaccagcaagatggcgaccaccgacgggcggcccacggctcccggacacagcccaggcatcgggaacaagatcgctggcaacacccgatga

SEQ ID NO: 141069 - DNA, 736 bp, Zea Mays
ttgtatctaatcagctgctcagatttggtgatcaccaagtattgatttgcataacagttgttggtgaagttaccagtcaaatactccctccgttcttttttttatttgtcacagtttatatttgtcccagtttagtttgaaaatgaaccagggagcaacaaatattcgagaatggagatagcaatgaactcgtatgctgtgacagtcgtgaactcactaaaacttgtttaacgtcactttttccacccatgaattaagaacggaagctacactagtccagcagcaacagcaaagctcgcagtgctgaccaaaaatgtgaaaaatgcaggtgaccccggtgcacgccctgggcgctggcatcaacccgatgcagggcctggtgatggaggtgatcctcaccttctcgctgctcttcgtcacctacgccatgatcctggacccgcggagccaggtccgcaccatcggcccgctgctgacggggcgcatagtaggcgccaacagcctcgccagcggcaacttcaccggcgcgtccatgaacccggcgcggtccttcggtcccgccatggccaccggggtctggaccaaccactgggatcgccccgctactcggcgggtccctggccggcttcatatagtatatctgtttggcacaaaaagagccaagcggacggtccggccctggagccagacggtccgcggtccggacagtccgcgcctgtgggccggacggtccgcg

SEQ ID NO: 141070 - DNA, 2044 bp, Zea Mays
ccgcccgctccatgcctccatggtcgtccatgcccatccgcaccccccccccccctaatcggaagtcggaaacaactcgagtcgacgtgtagcccgccggggccgggtcaggcaggcaggccgacatcggcgtggatccggtcaaaatccccgacggacggcctgccagccgtccacgcgctccatcggacggccgccgccgcccacacataccctcctccgccgcctgctttatttagcctagcttctcccgcgagctgctcctcctccacctcctcctcctcttcttccctccactcgcctccaaatcttctctctcctttcctcctctcttctcaccgcatcacctctccctccggcgcgcgcgtccgggtacagcgctagagtcactcaccaccatgcaggcggcggcggcggcggcgaatggcgcgggcgacgtgcagaagcctcagcagcagccgctggtggcgggggcgccgcccccaccgccgccggcggccgtggtgccgccccattgggtcgccatgccgttcgcgccgcctcccggggccgcggccatggtgatgcagccgcaccatatggcgcctccgccgccgcagttcgcgccgactcacttcgtgccgttccacgccgtcgcgccgccgcgggcagcagcggtcgcactgggttccccggcgccgcatcagccggggcaggaggagaacaagagcgtctgggtcggcgacctccattactggatggacgagaactacctacacagctgcttcggctacaccggcgaggttgtggcgatcaaagttatccgcaacaagcagactgggcagtccgaaggatacgggttcgtcgagttctacagccacgctgcggctgaaaaagttctcgaagggttttctggccatatcatgccgaacaccgaccagcctttcaggctaaactgggcatcgtttagcatgggagacaggcgctcggattctgcctcggaccattccatattcgtaggcgaccttgcctctgacgtcaatgacgccacgctgctggaggccttctccagcaggtactcctctgtcaaaggtgccaaggttgttatcgatgctaacactggtagatccaagggctatggcttcgtgaggtttggagatgacagcgagaagacacaggccatgactgagatgaacggcgtgtattgctcgtctaggcccatgagaattggcccggcaactccgaggaaatcatcaggtacttctggatccaatggttcagctgctcgatcagacggaggagatttgacaaacacaacggtatttgtgggtgggctcgacccaaatgttagcgaagaggaccttaggcaaaccttctcccagtacggagagatttcttctgtaaagattccaattgggaaacagtgcggcttcgtgcagtttgctcagaggaagaacgcagaggacgcattgcaaggattaaatggcagcactattggcaaacaaaacgtgcgtctttcatggggccgcaacccagcaaacaagcagttcagaggcgacaacggcaaccagtggaacaacgggggcatgtactacgcggcgcccccgttctacaacggctacggttaccctgcggcggccccgttccctgatccaggcatgtacgctgctccagcctacggtgcctacccgttctatggcaatcagcagcaagtgagctgacctggactaccgcgacacgcacgcctcgctcggagctggagactggaggtgttaggcgcttaggtgtagctctcggtagaagaagaagaggaagaaggtagacgacgacggtttcttaggtgagctagataccgtgactagtctcgtatagtgcgatttgttatacgtgctatggtctagcgccgccgacgactgagagtccgagtgtccgacacacctattgactggccacggcatgtcgaattgaacgacaaaaagaatttctgatgtcctggagctgcatgcatgctaccttgaagcagaacaataagctaatggaatcctttggcctctgctattcgatt

SEQ ID NO: 141071 - DNA, 1566 bp, Zea Mays
cctcctcctcttcttccctccactcgcctccaaatcttctctctcctttcctcctctcttctcaccgcatcacctctccctccggcgcgcgcgtccgggtacagcgctagagtcactcaccgccgcagttcgcgccgactcacttcgtgccgttccacgccgtcgcgccgccgcgggcagcagcggtcgcactgggttccccggcgccgcatcagccggggcaggaggagaacaagagcgtctgggtcggcgacctccattactggatggacgagaactacctacacagctgcttcggctacaccggcgaggttgtggcgatcaaagttatccgcaacaagcagactgggcagtccgaaggatacgggttcgtcgagttctacagccacgctgcggctgaaaaagttctcgaagggttttctggccatatcatgccgaacaccgaccagcctttcaggctaaactgggcatcgtttagcatgggagacaggcgctcggattctgcctcggaccattccatattcgtaggcgaccttgcctctgacgtcaatgacgccacgctgctggaggccttctccagcaggtactcctctgtcaaaggtgccaaggttgttatcgatgctaacactggtagatccaagggctatggcttcgtgaggtttggagatgacagcgagaagacacaggccatgactgagatgaacggcgtgtattgctcgtctaggcccatgagaattggcccggcaactccgaggaaatcatcaggtacttctggatccaatggttcagctgctcgatcagacggaggagatttgacaaacacaacggtatttgtgggtgggctcgacccaaatgttagcgaagaggaccttaggcaaaccttctcccagtacggagagatttcttctgtaaagattccaattgggaaacagtgcggcttcgtgcagtttgctcagaggaagaacgcagaggacgcattgcaaggattaaatggcagcactattggcaaacaaaacgtgcgtctttcatggggccgcaacccagcaaacaagcagttcagaggcgacaacggcaaccagtggaacaacgggggcatgtactacgcggcgcccccgttctacaacggctacggttaccctgcggcggccccgttccctgatccaggcatgtacgctgctccagcctacggtgcctacccgttctatggcaatcagcagcaagtgagctgacctggactaccgcgacacgcacgcctcgctcggagctggagactggaggtgttaggcgcttaggtgtagctctcggtagaagaagaagaggaagaaggtagacgacgacggtttcttaggtgagctagataccgtgactagtctcgtatagtgcgatttgttatacgtgctatggtctagcgccgccgacgactgagagtccgagtgtccgacacacctattgactggccacggcatgtcgaattgaacgacaaaaagaatttctgatgtcctggagctgcatgcatgctaccttgaagcagaacaataagctaatggaatcctttggcctctgcta

SEQ ID NO: 141072 - DNA, 1932 bp, Zea Mays
gaccaattccgccatactacccaaggaaacctgcgcaccgccatcaccgccgccgcagcctctgttcccacagacgcctctctcctactcccaaccccaatcaaacgcaccgctgaatcgcctgcagtagctggagcgcaccttggtgcgatcctaccacacctctgagctcacgaggaatctttaatggcgtcggagtggcatcgccagccatagcagcctggctggctgaggtgcaggctgccaggctgccgaggcgatcacttgccaaccctctgctctccttttctaggcgcactgtcttgctttgatgcatacggcaccacagatgaatgcccggtctcggaggccggcggcggcgcgcggtgcgaaagcgcccccgaagagcgacagcagagtgacggagacggatccgaggaagaccgtgacgccggtgaagggatcgggcaacgccggtaccaggggcaccatgaacaggatccagtcgaggagagagcgaaagctcgcgctacagcaagatgtggataagctgaagaagaagctgcggcacgaggagaacgtccaccgtgcgctggagcgggcgttcacgcggccgctcggcgccctacctcgcctgccgccgtacctgccgtctcagacgctagcccttctcgcggaggtggcggtgctggaggaggaggtcgtccggctagaggagcaggtggtgagtttccggcagggaatctaccaggaggcgaccgtcttctcctccgccaagaacacccaactccccggcggcgatgctcccgtgccggcgcagctcacaccgccgaacccggtgctgaattctgacatctcacccgcgacagaaagccaccatcctcccaacgctcgtccatcgtcgccgcacaacggcgtggccaatggcaagcaaacgccaacaaagcccgtcgtcaacactacctcgccgagccaggatgaccggtccggggcagggaaagagaaccagtcctgcagcaactcgtcgagcacgagcggccgccggacgcccaagtccaggccgacggcgacgccgcccgacagacgcagcagagctactccctctcagctaaatttaaaaaaacaaacagcagaggcatgcattctgtgattcagagttgtccgccgctgataattgatcagcgtgtagatgctattgcatgcatcgtccacgcagacagacaaaaactgctgcgcctgaccgtaaaacgcctgctgacgctgctgctggcactggcagcacctctgacaaagcgacgtcccacgacgactcgatctggagcgtgccgaacatagctgctccgatgcctgctgaccatcttctccgatgcctgctccgaggacaaggaaacgaggatcagcaggcgctgtccccgtcggtctccggctccagcgagagctcgtcggggtacgccgcaggacccctacgggctacggcatcctggagctgggcgccagggacaccgggccctacaagcggttccacgtggtcgacgccgcgtccttggaccccaatgcgctggccggcgacggcgactgaaattcggctgcctggcgatcgggtggcggtttgactttgaacgcgcggatgctgatcggggagatgcccaattatgtgctgatctgctgggtcttgctgctggctgctgcggaggctgtcgtgggttgacctggcgtggggctctcccatcagcacaagctggcgttctggatcaacgtctacaatggctgcatgatgaaggcgttccaggagcaagggatacctaccactaccaccccggaaatgctcgtggcgatgacggacacacccaaggtgccggcacaaccgaacccttcccacctccagataggcaggcgtacgcgcgcagggcattcactgaaggtaccctgcgcacaggttttgcttggcaataa

SEQ ID NO: 141073 - DNA, 1164 bp, Zea Mays
agtctggaacatgttattgtcgagtcggcaagaaaggaatagataccagagaaattcctggcgtgaaccacgggtgttgttcacatttggtaccagagccaatactggatcctccacacgggtactggacgagatcgcaatcgaagttgggcggcatggcgccagcgaagacggacgatcctttgtcccagcttctggcgaagatcgaggagggaaacaaggagactcaccgacgcatggaggcgattcagggggcggtgggaaatatggaggcggcggtcaaggtggtgatgacggagcagggagatcttcagaagtggaaaccggaggtggaagcgaaagtgacggagatttctgatgctctaaaggcgatccagatccagatgggaaagatggagaagaagccgctcggtttcgggtcgagacaggaagaagaaggagaagacggatttctgaagccgccaccatctgattcttcgaatttggagtttcgtcgtgaagaagggcggacccaattctcgcatggagtattgggcatgaactggatccagcaatacagtccgatgaaggtggattgggcgaacaagtgggcagtcattccatataatggatcgccagcatacttgcaaggtgtgcaggtgacattaccagccggcgctgtcaccgaacttttgctcttgtcagtggaatcacaggctacacccgctggacaatcggtcgatccaaaagtccaagcagttctggatcagttcgtggaggtatttgaggatccagtcggcttaccaccaagcagaacatgcgaccacactataccattggttccagggacaaatgtgtgtgtactaccactgtccagtaagctgtcgcagtgccagaccatgctgaagatgacaacaccatcaggggctgctctataggttcgggcacaacttcagactcgtcatctgttccctgactgaacatctcacggaaaagctcttccggattgtgagtactagagcagatgaaaatgaagtgagcagagtggaatatgtaataaaaaatagattgcagccacaaccagtttgccctcggttgcttgatgcatatgtgtgaccagaccaatctgatatccaaaaacttcttgccataataaatgaggctatcctagaaaaaagacaacaa

SEQ ID NO: 141074 - DNA, 86 bp, Zea Mays
tttgcggagcggtcgcggcgggcggttggcgggggcggggtcgcggcgggcggttggcggaggtcgcggcgggatcgagcgggcgg

SEQ ID NO: 141075 - DNA, 1845 bp, Zea Mays
cggccactcagctgtttacaccgatctacgagtatccccacgagaaacccccattccaccatcctctacccacccaatggatccgtccgccgttggctcctcgcggcggaaggcggagcagtggttgagcgtggctgagaagctcatggtggcgcgggacattgaagggtgcaagcagttcgcctcgcaggccctggccgccgatccccacaccccgggcgccgacgacctccacgccgccgccatctccctcctggcagcccagcagcgccgcctccctaacggtcagcctgatccctacggcgtccttggtctggaccccgcaaaccccgcatcacgccgaccggatgccatccactcacaatatcgccgcctctctttcctcctcaatcgttcccaccaggaccgcccctgctcgctcgccttcgccgaagctgcccggctcgtcgctgatgcctgggcttttctctctgatcccgttcttaaatcctcccttgacgtggacctcgatgccgccgccgcagctcgcgcgtaccactctcctccaaatctaccgcagccgcactcgcagccacatctgcctgcacggctaactccgccggtggctgctccctccccgcggtcgactccgccgctggtttctccccttccgcgggcaacatcaccgccggctgcttcccctccacggcaaactcagcggccggctgtcccccaaacaaggtcaacaccgccgccggctgcttctgctccacgatctactccaccaccaccggtttctcctcaaacactgtcaacaccgctgcctgccgctcccgctcccgctccacggtctacaccaccacctgttgttccccaaacaccgtcaagtacgctgcggccgactactccccaaacgccggtggctgcaactgtcccagcagcgaagtctggtgcggcaccttcatcaacgttctggacagtgtgctcggcctgctgccacattcaccagttcgactgccaatatgagacgtgcaaattactgtgccctagttgccgccagccatttgtggccaaggcaatggctgagccaccgcctattgtgccaggcaccgacatgtattactgcacttgggggttcttccccgttgggttccctgggtgtcctggctttgaaagaatggtcaatgcacagccatcgggagtagatcagctgaatgcgccatggcttggaagcgcaggtggtgtacatggtaatgctcagaatggggtgccaccagttagtgccccagtggtagaagtgccagtcaaggatcccatagaggtgcctgcagtgacaccgccagcgaagccgatgcgagtgaaggtgggtgcgaagaagcgtggtcgccccaagggtagcaagaacaagaagaaattatgaatgccaatgatgaacatgatggttatcatcatagatcacatgaattaactgagatatgcattcaatcacactgccattgtagtcaaccgaagcactcgtctgctggttgaattctcacttgctgttgccaggatctctaatgtggagcaagcaattttattgctgaaagacttctttttcaatggtagaattcttccttttcgagattatgatgttaatctctggttcgtccccactgccgtacttgacattatgctttagctgtaactattgtatttgcatattcgtctaatttctgcttccctgaagacagttgtattgatctaaatcgataggtgtctagttactgtttattgtacgttttgagtttggtgctactctgctctagtgctctgtgtcgtaatgctgcaataaatggaatggtttaaagctctaattttaacgcg

SEQ ID NO: 141076 - DNA, 164 bp, Zea Mays
aggccaagaccgggggggggggggggggggagcagaagggattagggatgaaaacggacggaaacggacggaaaaacccctctcccgtttccgtatccgcattttatcatcggaaacgggttcgggtccggaatagtcgggaacggaaacgggagcgggataaa

SEQ ID NO: 141077 - DNA, 1067 bp, Zea Mays
gcaaacggcagccagacccagaccgacgtgtgtgagctagcttgttgccgtgttcgcacgtaggactcgagccaccggcttcccgcctccttttccttttcaaaacaaaaaacaaacaaaactgctcaggctcgctcgagcaacacgtacgatgatggttcctgtcgggagtgatgacgaaacagcggatgtggcgatggacagggagtcctcaccgccggcagcgacgacgcggagcggtgggacgagcagaagccacagcgaggcggagcggaagcggcggcagcgcatcaacgcccacctcgccacgctgcgcacgctcctccctgccgcgtcgcggatggacaaggcggcgctgctcggggaggtagtgcggcacgtgcgggagctgcggggcgaggcggacgcggcggcggcgggcgcggccgtggccgtcccaggggaaggcgacgaggtcggcgtcgaggagggccagcagcgctgcttctgccaccacggcggcggggagagggagagggcggccgccgccagcgccaggcgcgtcagggcgtgggtgtgctgcgccgaccgcccggggctcatgtccgagctgggccgcgccgtgcgctccgtcagcgccagggccgtgcgcgccgagatagccaccgtcggtgggcggacgcggagcgtcctggagctggacgtcggcgggcagcacaacggcgacgacgcgggcacgtcgtcgcgcccagcgctgcaggcggcgctccgggccgtgctgctcagccgggaggacatgctcggcgccgagtgctgctacaagaggcagcgcttctcggcgcacctcgccagggtttagtaggacagtgggcagtggcgctgtcgaagcgggtgactgattggagacagaagggaaagggaaggactctggcatgtgtgctacggtgctactcatacctttttacatgtgagaatatcacggaatttccattgccgacccttccattccaaacaaacaacattgtcaccaagcaaatttgacgagaccgtatatatctcagttataatgatacaacaaatggtacaaa

SEQ ID NO: 141078 - DNA, 186 bp, Zea Mays
atggaggacgccgctagccatgcgagcacggagctgggcgtcgaggcgtccgggcctggggcatttgaggaaggggagctcgtggtttcctgggggcgaccgacggaccgcgcgggacgtgcgggtggcgttgccgttgtcggcttggatgtgcggtggaacgatcctcaccgtcgatttccctag

SEQ ID NO: 141079 - DNA, 1143 bp, Zea Mays
aatacactttaacccacctgaaattggaataaacaaagtgtatcgaagcgaacggggccgacttctccgaatcgcatcccctcccccactcaagcagccaaaccctagattgggcaagatgctcggcggcctgtacggcgacctcccgccgccgtcgtcggccggcgatgaagacaaggcctccacggcttccgtttggtccagcgccaccaagatggcgcctcccaccctccgcaagccgtccaccaccttcgccccacccccatctattctccggaaccagcacctgcgcccgcccaaagccacctacatccccgctccccccgtcgttgccgccgaacccgccccggccacctccttccagcccgcgttcgtcgctgtccagtccaccgtgctggaggagtacgaccctgccaggcccaacgactacgaggactaccggaaggacaagctccggcgcgccaaggaggctgagctgaacaaggagcttgagaggcggcgccgcgaggagcaagatcgggagagggaacgcgagcagcgggagagggaggcccgcgagcgcgaggagaaggactaccaatccagggcctcctccctcaacatatccggcgaggaggcgtggaagaggagggcagcgatgagcggtagcggttctgctgctagaaccccatcgtccccacctcacggtgatggcttcgccattgggagctcatcttctgctgggttgggtgtgggtgccggcggacagatgactgctgcccagaggatgatggccaagatgggatggaaggaaggtcaggggcttggcaagcaagagcagggcatcaccgcgccactagtggccaagaagaccgataggaggggaggagttattgttgacgagagcagttctaggcccccagaaaagaagccgagatctgtcaactttgatgggcaaccaacacgagttttgctgctccgcaacatggtaaatgccattgctgcatcaatataggcctgtttgttaatgcttacatgttgtcttttgtatgaatctctgaggctgactatcgtgatgcataacagcatagatttaatcagtcaatgagttgcagattgtgtaccggtttattcaatttatccatcactcaatttattcataca

SEQ ID NO: 141080 - DNA, 1550 bp, Zea Mays
aatacactttaacccacctgaaattggaataaacaaagtgtatcgaagcgaacggggccgacttctccgaatcgcatcccctcccccactcaagcagccaaaccctagattgggcaagatgctcggcggcctgtacggcgacctcccgccgccgtcgtcggccggcgatgaagacaaggcctccacggcttccgtttggtccagcgccaccaagatggcgcctcccaccctccgcaagccgtccaccaccttcgccccacccccatctattctccggaaccagcacctgcgcccgcccaaagccacctacatccccgctccccccgtcgttgccgccgaacccgccccggccacctccttccagcccgcgttcgtcgctgtccagtccaccgtgctggaggagtacgaccctgccaggcccaacgactacgaggactaccggaaggacaagctccggcgcgccaaggaggctgagctgaacaaggagcttgagaggcggcgccgcgaggagcaagatcgggagagggaacgcgagcagcgggagagggaggcccgcgagcgcgaggagaaggactaccaatccagggcctcctccctcaacatatccggcgaggaggcgtggaagaggagggcagcgatgagcggtagcggttctgctgctagaaccccatcgtccccacctcacggtgatggcttcgccattgggagctcatcttctgctgggttgggtgtgggtgccggcggacagatgactgctgcccagaggatgatggccaagatgggatggaaggaaggtcaggggcttggcaagcaagagcagggcatcaccgcgccactagtggccaagaagaccgataggaggggaggagttattgttgacgagagcagttctaggcccccagaaaagaagccgagatctgtcaactttgatgggcaaccaacacgagttttgctgctccgcaacatggttggtcctggtgaggttgacgatgagctggaagatgaggtggcatcggagtgtgccaagtatgggacggtttctcgggtgctgatatttgagatcacacaggcagacttcccagctgatgaggctgtaaggatattcatacagtttgagcgggcggaagaagcaacaaaggcaatgattgatctgcaagggcggttctttggcgggcgtgtggtgcaggcaaccttctttgacgaggaaaggtttgggaggaacgaactggctccgatgccaggggaagtgccagggtttttcgactaaagaaagaagttttcatgtggtatcagataagtggtgggttgtgaacttgtgattctttcttttaatcgagatgaactagaacatacagtcaggcaatttacttgctttgtagtgctagtgcagtgtactggaaatattatggatataaattatggtttttgagctgtgcctcctgctgctgaactactaccttgtatagttgtatgtacatgagcattttgaccgctttagcatgctttgtcgtgcagttatcttgattttgatcatcttgaatatgtgcttt

SEQ ID NO: 141081 - DNA, 540 bp, Zea Mays
atgggcgtggccggtgcgtgcccagctagcgccctagctgagctgcttctagcctgctattttacggtgctagtagtgcgcagcaccagagagagccacacagctgcagcagagctcagcaaacgaggagtaaaaagctcgcgaccagcgttcatgtgcatgcagcatggtctatggtggggtggtggcggggcggcgcaggctacgcgcagccaggtacagcaggaacgtacccacgcggccttcgcccgtctctctcttcgaccccctggtttttctccggttccggtcgtgccggtgcgcgcctgcgcctccctgaatgaaaaagcttacaggtccggccggccccggcactgcctcctgcaggcaggcgaggcgatgttatctgggctgcagcctgcagagcgcaggcaggcttgcgcggccgccggccgacagggcaaaggcaaaaggcgaagccatcctttggaccgcgactcccggaagaccgacgacgactaccgcgcgtccgagccagacacccgtttccctgcaatgtaa

SEQ ID NO: 141082 - DNA, 452 bp, Zea Mays
ctcgatgaccaccgatggtgtcggaccccgcaccgtcgtcggcaccgcgctacttggcgtactcgctgccgtcgaaccacctccccggagaggacatcctcttctgcatcaacgtcgacctcgaggtccacgccaagatgaagtctgctgtcgtagcgtcctcggatccatgtccaccacgtcgcagaccaaggccgaccgggccaagctcgacggcatgtacgagtgcatcctctgcgcctgctgctccacctcctgcccgtcctactggtggaacccggaggagtacctcggcctggccgcgctgctccacgccaacaggtgaacagggcttcagcagggacactggtttagcaaaggaggcgatacattccttgtctgcttcaaaatcaagttatccaatggttgatctcacccaactcttcatgacagctacccaggaagggaaaata

SEQ ID NO: 141083 - DNA, 1449 bp, Zea Mays
atgacacggggcccacttagttgcttatgtgagcaacccaacgctattattacgccacgataacccaaacaaaccaatcatcctctccgtgtaggccgcgggattccgtgtccctctccaatccggcgtagccatcgtcgccggatacaggatccggtccccgcgatggagccctcaccaacctcctcctcgccggctgtggcgcgccggttgtcgccggaggtaaggagggtgccgaagcgggcgctggaggagttgttggagcaggtccagcgggctgttgagatgctgcgcgatgccgacgctgatctcgccatctctctctcggaggagaccgcagcagcctcgccggaggccgaggaccgcaaggacgatgttggtgtcgatggagatggcatggcgacgtcgtcggttgcgagtgactccgattacgagacgacgcagatgtgtgaccttcttaaatctaaggttggatcactcgagttccttcaaaagctcaatggtattcagaagtcagtagatcagaattgtgcagttgaacctgatacatcatgggatataataaagtcggatttgtgggaagatggtgactcagatgatggatatgttcttgttaaacaggaagatgtggttgatgggatcacttcctttatggctgcatgcctgttatcacttaaaagaaccaaggacctgcctcctgatcaacttcagaaagcacttaggaagatgttttcagctgaaaagaagaaaagtaaaatcagaaaggcttgggatggaactaaactcatttataatgttacttcatggggcgccactgctgttgggttctacaataatcgagcattgcttacggtcgcaagtacagcatttcggacttcctgccgtgtgatatccaagttcctttgaatattgtgtagggtatgttagaactgcttgcgtctgcttttccgttcttcagctaataaaaaggtagcataaagtcggaatccatttgcttaaatctgtcctgtttgccagcgacatcaagatttcgcagtcgagttcgactgctaattacgtattctcttcattttttttatttgtcgcggtttagttcaaaaatgaacaaatattagcatttagcagcgcctctagtccaaagcagcgttggtattgcacaactgtaaatgttgccttgcattgaacaaacttgcttccgtgccagaattttattttggtcacctgaaattattactttgtactattttccgtatcaaacaaaactaaaatccttgatattgacctgctcgatgtacatatcagctacttgcacatttttttgagggatgcggatctttagattgacaaggatatacggatgtaagatgtgtgatgctttggaggcttgaagcgaacgcaatggtacatgaggagatgcggacaccaccgtattttttttttgcttttgga

SEQ ID NO: 141084 - DNA, 2347 bp, Zea Mays
ctgttctgcacgccggttcatacaaaaagggcctcacggcacacagcatatttgctcttgctcactcgcccggtcgcccctcctcttccactcctcgctcgcagtcgcagcaagccgggaacaacacgagcagggggaggggaagaagaggagacctaccataccatagattcggagccagatactcaatcagtatcctgtaccattaccaccaggcgcgcaccaggttaccaaaatctcgtgtggagggaaatggcgcccagcagctacgaggtggcggcttccatcctcctctgcgccgaggacagcagcagcatcctggacctcgaagcggaggccgaggaggaagcgctactggcgcggagcggggagcccggcggcggcgcggagttccccgtgccgtccgaggaatgcgtcgccggtttcctggagtctgaggcagcgcacatgccgcgggaggactacgccgagaggctgcgcagcggggggatggatctccgcgtccggacggacgccatcgactggatttggaaggttcacacgtgctacggtttcggccctctcactgcctgcttggccgtcaactacctggaccgcttcctctcgctctaccagcttccggaaggcaaggcttggatgacacagctgctgtccgtggcgtgcttgtccctggccgccaagatggaggagacctacgtcccttcgtccctggacctgcaggccggggacgcgcggtacgtgttcgaggcgaagacgatccagaggatggagctcctggtcctcagcacgctcaagtggaggatgcaagcggtcacccccttgtcgtacgtcgactacttcctccaccggctccgaggcggcgccgcgccgagcagacgcgccgtcctccgatccgcggagctcatcctgtgcatcgccagagggacgcactgcttggatttcaggccctcggagatcgccttggccgtcgccgccaccgtggccggcgaagagcgcgccgtggacatcgacagggccttcacccaccgtgtacataaggtatacgcgtgtacctgcctcagcagacgttctcgctagatttgtcgtcggattcgatcggctagcgtctttcatcaatgcagcgcaatgcagtccgttagcgtttaccgcatgcaatgcatcgaagccgtaggtttgcggccgtccttgacttgcctgtgcagcaactagccactagggcacacctgccgaagcgcgtgtgagccgcatttacaacagccacggcgatttaataatgccttgttgctttgcgctgcatactgcggctgcaggagagggtgtcgcgatgcctcgaagcgatccagcaggccaccgccaccatggccctgccgcagccgctgaaaagtgaaggcccgagcagcagcggccgcagggcctcgtcttcctcggccaccgtgccgcggagccccaccggggtgctggacgctggctgcctgagctacaggagagccgccgccgccgccgcctcgcacgcgagctccagctggcgcgacgaggacgacgacgactgccccccggctgtctgcagcaagaggaggaagattagcagatgattaaagccaatgatggacggatgaaaaagtcaagcggtttttgatcgcactgactgaagggtttggtttgctgtgggagcctccgacgccggatttcaaccaaagcgcctgaaaggcaaaaaagaggcgcagacagccaaaaaaaagcagggcatttcggacgtgacggatccggcaggcacaaagacgtagtacgacgcccgggaataaagacggcccgaaacgcatggtagaaacgtactccgaatttcgtgagctttttttttttttgcaacagtaggcactaggcagtcagccaccacaaaagcccacaacggcatcgccagaaaaaaaaaagcaaaggttttgcaggttgacaaagctgagagagacgggacgagacgactgaaataaaaggtcctcgagacgatggggattgggcgtagtttgctctgttttgtaattttgcgaccaatttccgtttgtaaaaaaaggaaaaatgtaaaaagagaagaagaaaaaacaattcttgctcaaaaattgaaaaaaattaatagcggataatcaactagtactggaatccaccaagaagcacgaaaacaaaccaagaacgtaagacaggaacccagaagagctggaaacgggtttcttttcaaggggtcacgagctatcagcgtcagcaaccatcggtttttctcgctatggaagtttgaaacactaggacaccacctcgctgccaccgaaacatttgtttgactgcttgtctgcaaagacca

SEQ ID NO: 141085 - DNA, 1458 bp, Zea Mays
cgcccggtcgcccctcctcttccactcctcgctcgcagtcgcagcaagccgggaacaacacgagcagggggaggggaagaagaggagacctaccataccatagattcggagccagatactcaatcagtatcctgtaccattaccaccaggcgcgcaccaggttaccaaaatctcgtgtggagggaaatggcgcccagcagctacgaggtggcggcttccatcctcctctgcgccgaggacagcagcagcatcctggacctcgaagcggaggccgaggaggaagcgctactggcgcggagcggggagcccggcggcggcgcggagttccccgtgccgtccgaggaatgcgtcgccggtttcctggagtctgaggcagcgcacatgccgcgggaggactacgccgagaggctgcgcagcggggggatggatctccgcgtccggacggacgccatcgactggatttggaaggttcacacgtgctacggtttcggccctctcactgcctgcttggccgtcaactacctggaccgcttcctctcgctctaccagcttccggaaggcaaggcttggatgacacagctgctgtccgtggcgtgcttgtccctggccgccaagatggaggagacctacgtcccttcgtccctggacctgcaggtgagctagagagcaataatgcagacgcatagtactccgccacacgcgttacagacgtccatctggccggcccctgcgaccttgttcccgatctcactgttgctggatcctgtcgggcagcaggccggggacgcgcggtacgtgttcgaggcgaagacgatccagaggatggagctcctggtcctcagcacgctcaagtggaggatgcaagcggtcacccccttgtcgtacgtcgactacttcctccaccggctccgaggcggcgccgcgccgagcagacgcgccgtcctccgatccgcggagctcatcctgtgcatcgccagagggacgcactgcttggatttcaggccctcggagatcgccttggccgtcgccgccaccgtggccggcgaagagcgcgccgtggacatcgacagggccttcacccaccgtgtacataaggtatacgcgtgtacctgcctcagcagacgttctcgctagatttgtcgtcggattcgatcggctagcgtctttcatcaatgcagcgcaatgcagtccgttagcgtttaccgcatgcaatgcatcgaagccgtaggtttgcggccgtccttgacttgcctgtgcagcaactagccactagggcacacctgccgaagcgcgtgtgagccgcatttacaacagccacggcgatttaataatgccttgttgctttgcgctgcatactgcggctgcaggagagggtgtcgcgatgcctcgaagcgatccagcaggccaccgccaccatggccctgccgcagccgctgaaaagtgaaggcccgagcagca

SEQ ID NO: 141086 - DNA, 1790 bp, Zea Mays
cgcccggtcgcccctcctcttccactcctcgctcgcagtcgcagcaagccgggaacaacacgagcagggggaggggaagaagaggagacctaccataccatagattcggagccagatactcaatcagtatcctgtaccattaccaccaggcgcgcaccaggttaccaaaatctcgtgtggagggaaatggcgcccagcagctacgaggtggcggcttccatcctcctctgcgccgaggacagcagcagcatcctggacctcgaagcggaggccgaggaggaagcgctactggcgcggagcggggagcccggcggcggcgcggagttccccgtgccgtccgaggaatgcgtcgccggtttcctggagtctgaggcagcgcacatgccgcgggaggactacgccgagaggctgcgcagcggggggatggatctccgcgtccggacggacgccatcgactggatttggaaggttcacacgtgctacggtttcggccctctcactgcctgcttggccgtcaactacctggaccgcttcctctcgctctaccagcttccggaaggcaaggcttggatgacacagctgctgtccgtggcgtgcttgtccctggccgccaagatggaggagacctacgtcccttcgtccctggacctgcagcaggccggggacgcgcggtacgtgttcgaggcgaagacgatccagaggatggagctcctggtcctcagcacgctcaagtggaggatgcaagcggtcacccccttgtcgtacgtcgactacttcctccaccggctccgaggcggcgccgcgccgagcagacgcgccgtcctccgatccgcggagctcatcctgtgcatcgccagagggacgcactgcttggatttcaggccctcggagatcgccttggccgtcgccgccaccgtggccggcgaagagcgcgccgtggacatcgacagggccttcacccaccgtgtacataaggagagggtgtcgcgatgcctcgaagcgatccagcaggccaccgccaccatggccctgccgcagccgctgaaaagtgaaggcccgagcagcagcggccgcagggcctcgtcttcctcggccaccgtgccgcggagccccaccggggtgctggacgctggctgcctgagctacaggagagccgccgccgccgccgcctcgcacgcgagctccagctggcgcgacgaggacgacgacgactgccccccggctgtctgcagcaagaggaggaagattagcagatgattaaagccaatgatggacggatgaaaaagtcaagcggtttttgatcgcactgactgaagggtttggtttgctgtgggagcctccgacgccggatttcaaccaaagcgcctgaaaggcaaaaaagaggcgcagacagccaaaaaaaagcagggcatttcggacgtgacggatccggcaggcacaaagacgtagtacgacgcccgggaataaagacggcccgaaacgcatggtagaaacgtactccgaatttcgtgagctttttttttttttgcaacagtaggcactaggcagtcagccaccacaaaagcccacaacggcatcgccagaaaaaaaaaagcaaaggttttgcaggttgacaaagctgagagagacgggacgagacgactgaaataaaaggtcctcgagacgatggggattgggcgtagtttgctctgttttgtaattttgcgaccaatttccgtttgtaaaaaaaggaaaaatgtaaaaagagaagaagaaaaaacaattcttgctcaaaaattgaaaaaaattaa

SEQ ID NO: 141087 - DNA, 895 bp, Zea Mays
gcccggtcgcccctcctcttccactcctcgctcgcagtcgcagcaagccgggaacaacacgagcagggggaggggaagaagaggagacctaccataccatagattcggagccagatactcaatcagtatcctgtaccattaccaccaggcgcgcaccaggttaccaaaatctcgtgtggagggaaatggcgcccagcagctacgaggtggcggcttccatcctcctctgcgccgaggacagcagcagcatcctggacctcgaagcggaggccgaggaggaagcgctactggcgcggagcggggagcccggcggcggcgcggagttccccgtgccgtccgaggaatgcgtcgccggtttcctggagtctgaggcagcgcacatgccgcgggaggactacgccgagaggctgcgcagcggggggatggatctccgcgtccggacggacgccatcgactggatttggaaggttcacacgtgctacggtttcggccctctcactgcctgcttggccgtcaactacctggaccgcttcctctcgctctaccagcttccggtaagaatcatcaaagcctacgaagtgatgatgaagcggcactgtttacttcttggttcttggaatgaagatggccggcgttcggaaacaagaatctgcaccatatgttccagtggttcagtgccggtaaccatgtgcctctctcgccatttttcaggaaggcaaggcttggatgacacagctgctgtccgtggcgtgcttgtccctggccgccaagatggaggagacctacgtcccttcgtccctggacctgcaggtgagctagagagcaataatgcagacgcatagtactccgccacacgcgttacagacgtccatctggccggcccctgcgaccttgt

SEQ ID NO: 141088 - DNA, 1462 bp, Zea Mays
gcccggtcgcccctcctcttccactcctcgctcgcagtcgcagcaagccgggaacaacacgagcagggggaggggaagaagaggagacctaccataccatagattcggagccagatactcaatcagtatcctgtaccattaccaccaggcgcgcaccaggttaccaaaatctcgtgtggagggaaatggcgcccagcagctacgaggtggcggcttccatcctcctctgcgccgaggacagcagcagcatcctggacctcgaagcggaggccgaggaggaagcgctactggcgcggagcggggagcccggcggcggcgcggagttccccgtgccgtccgaggaatgcgtcgccggtttcctggagtctgaggcagcgcacatgccgcgggaggactacgccgagaggctgcgcagcggggggatggatctccgcgtccggacggacgccatcgactggatttggaaggttcacacgtgctacggtttcggccctctcactgcctgcttggccgtcaactacctggaccgcttcctctcgctctaccagcttccggaaggcaaggcttggatgacacagctgctgtccgtggcgtgcttgtccctggccgccaagatggaggagacctacgtcccttcgtccctggacctgcaggccggggacgcgcggtacgtgttcgaggcgaagacgatccagaggatggagctcctggtcctcagcacgctcaagtggaggatgcaagcggtcacccccttgtcgtacgtcgactacttcctccaccggctccgaggcggcgccgcgccgagcagacgcgccgtcctccgatccgcggagctcatcctgtgcatcgccagaggtgagcaacgaccaggaagttctcagttctcacccggcgggggttttttttttttactcatgcaaaaccacaccggcgcattccgttccgatcggtctgacggcgttgctgctacgaacgcgtggcagggacgcactgcttggatttcaggccctcggagatcgccttggccgtcgccgccaccgtggccggcgaagagcgcgccgtggacatcgacagggccttcacccaccgtgtacataaggtatacgcgtgtacctgcctcagcagacgttctcgctagatttgtcgtcggattcgatcggctagcgtctttcatcaatgcagcgcaatgcagtccgttagcgtttaccgcatgcaatgcatcgaagccgtaggtttgcggccgtccttgacttgcctgtgcagcaactagccactagggcacacctgccgaagcgcgtgtgagccgcatttacaacagccacggcgatttaataatgccttgttgctttgcgctgcatactgcggctgcaggagagggtgtcgcgatgcctcgaagcgatccagcaggccaccgccaccatggccctgccgcagccgctgaaaagtgaaggcccgagcagca

SEQ ID NO: 141089 - DNA, 1754 bp, Zea Mays
gcccggtcgcccctcctcttccactcctcgctcgcagtcgcagcaagccgggaacaacacgagcagggggaggggaagaagaggagacctaccataccatagattcggagccagatactcaatcagtatcctgtaccattaccaccaggcgcgcaccaggttaccaaaatctcgtgtggagggaaatggcgcccagcagctacgaggtggcggcttccatcctcctctgcgccgaggacagcagcagcatcctggacctcgaagcggaggccgaggaggaagcgctactggcgcggagcggggagcccggcggcggcgcggagttccccgtgccgtccgaggaatgcgtcgccggtttcctggagtctgaggcagcgcacatgccgcgggaggactacgccgagaggctgcgcagcggggggatggatctccgcgtccggacggacgccatcgactggatttggaaggttcacacgtgctacggtttcggccctctcactgcctgcttggccgtcaactacctggaccgcttcctctcgctctaccagcttccggaaggcaaggcttggatgacacagctgctgtccgtggcgtgcttgtccctggccgccaagatggaggagacctacgtcccttcgtccctggacctgcaggccggggacgcgcggtacgtgttcgaggcgaagacgatccagaggatggagctcctggtcctcagcacgctcaagtggaggatgcaagcggtcacccccttgtcgtacgtcgactacttcctccaccggctccgaggcggcgccgcgccgagcagacgcgccgtcctccgatccgcggagctcatcctgtgcatcgccagagggacgcactgcttggatttcaggccctcggagatcgccttggccgtcgccgccaccgtggccggcgaagagcgcgccgtggacatcgacagggccttcacccaccgtgtacataaggagagggtgtcgcgatgcctcgaagcgatccagcaggccaccgccaccatggccctgccgcagccgctgaaaagtgaaggcccgagcagcagcggccgcagggcctcgtcttcctcggccaccgtgccgcggagccccaccggggtgctggacgctggctgcctgagctacaggagagccgccgccgccgccgcctcgcacgcgagctccagctggcgcgacgaggacgacgacgactgccccccggctgtctgcagcaagaggaggaagattagcagatgattaaagccaatgatggacggatgaaaaagtcaagcggtttttgatcgcactgactgaagggtttggtttgctgtgggagcctccgacgccggatttcaaccaaagcgcctgaaaggcaaaaaagaggcgcagacagccaaaaaaaagcagggcatttcggacgtgacggatccggcaggcacaaagacgtagtacgacgcccgggaataaagacggcccgaaacgcatggtagaaacgtactccgaatttcgtgagctttttttttttttgcaacagtaggcactaggcagtcagccaccacaaaagcccacaacggcatcgccagaaaaaaaaaagcaaaggttttgcaggttgacaaagctgagagagacgggacgagacgactgaaataaaaggtcctcgagacgatggggattgggcgtagtttgctctgttttgtaattttgcgaccaatttccgtttgtaaaaaaaggaaaaatgtaaaaagagaagaagaaaaa

SEQ ID NO: 141090 - DNA, 1089 bp, Zea Mays
ggagtggagtagtatgcctgaccaacgcgactggtcgactgctagcccgtagctgcgctgttggcctgttgccatgccatatccgtcgagctgaagcctgaagcaaccaccatttcgatacgcgcgagggaacggggccggccggccggccggggatcggaactgaagtgtgggcacacaagagtcacaacagggggagtgggggacattccaatcagttccctgcgtgtgagcgatgcagcgggacgcgagaagctggtcgccggcgccggccacggacgccgccggcccttacgcgatgccttcgcccgtgcagccgtcgaccaagagtccgtgcgcggtggcggtgccacaagtcacctgaactatatgtattcttccctgctgcccgacgcttatccctgacgtttcttttttttctctctctctcgatcggttgttccgcgcgcgcgcaggcacgaaggagacggtgaagaatgcgctgtcgcggtgggggcggaaggtcggggaggcgaccaggaaggccgagggcctgtcgcgcaacacatggcagcactgtgggcgactctgctctgttcatcaactctctctaactatatacaccatcgccgatcagactggttgaggacggcgccgagcatcgcggaggccgcggtggggaggatcgcgcaggggaccaaggtgctggcggagggcggccacgacaggatattccgccaggccttcagcgccccgcccgacgagcagctgcgcaagtcctacgcttgctacctctccacggccgccggcccggtgatgggcgtcctgtacctgtccacggccagggtcgccttctgcagcgacagcccgctgtcctacgaggcttccggcggcgacagaacggagtggacccactacaaggtggcgattcctcttcaacggctgcgggcggcgagcccgtcggccaacaagaccaagcccgcggagaagttcatccagctggtgtcggtggacagtcacgagttctggttcatgggcttcgtcaactacgacggcgcggttgcgcacctgcaggaagcgctgagcgggttccgcaacctgcaggcgtga

SEQ ID NO: 141091 - DNA, 1022 bp, Zea Mays
accaccatttcgatacgcgcgagggaacggggccggccggccggccggggatcggaactgaagtgtgggcacacaagagtcacaacagggggagtgggggacattccaatcagttccctgcgtgtgagcgatgcagcgggacgcgagaagctggtcgccggcgccggccacggacgccgccggcccttacgcgatgccttcgcccgtgcagccgtcgaccaagagcacgaaggagacggtgaagaatgcgctgtcgcggtgggggcggaaggtcggggaggcgaccaggaaggccgagggcctgtcgcgcaacacatggcagcacttgaggacggcgccgagcatcgcggaggccgcggtggggaggatcgcgcaggggaccaaggtgctggcggagggcggccacgacaggatattccgccaggccttcagcgccccgcccgacgagcagctgcgcaagtcctacgcttgctacctctccacggccgccggcccggtgatgggcgtcctgtacctgtccacggccagggtcgccttctgcagcgacagcccgctgtcctacgaggcttccggcggcgacagaacggagtggacccactacaaggtggcgattcctcttcaacggctgcgggcggcgagcccgtcggccaacaagaccaagcccgcggagaagttcatccagctggtgtcggtggacagtcacgagttctggttcatgggcttcgtcaactacgacggcgcggttgcgcacctgcaggaagcgctgagcgggttccgcaacctgcaggcgtgacatggaggacctcaatgcaatggacagtgttgtcttgtacgtgctcgccagaactgattgatcgaacagagcgattgtgtacccgctctctgtgtgtgttgcggtgctagtgtttgcatcgtgttgtgcgtgtgcggatttgtatgacatttttttgatttggttgccattgtcagcgagagaacagtccaatcattttattcagatttcagagaagaccatggttatc

SEQ ID NO: 141092 - DNA, 1904 bp, Zea Mays
caaaggagaaccaggcaggccaatggccccaaacgcccaaaccccacctccacgcctccaccccaccgtcctcctcctcatctcactcactcccttttcctcacgccccctccccgcctcgagcccctcgctggctcgctcccattcccatctcgcaccaccaaccttccggatccagtgccgcacgcctcactccccgtccccgacacccatgacacgcaagaggcgcaagcacgccgccgccaccgccgcctagggttccgatcccttcctcatggattcgctgccgcgtaagcgcaagggcgcgcgcgccgcgtgctccatggccggatcccgccacgatgcgcctgccgcccgcaagcgcacctgccgcgagcccaagccgcggcccgagaagaagaagccctcttccgccgatgagggctccgcctccgcccgcggcggcgtggtgatgacggcgccgcccgccagcgggcgggcggcgcctgatagccccgggcgtgggctgaagcgcaagctgggctgcatcgactccgccactcggatggggcggaagaagcggctcgagagcgagtacgagctcggcgccgagatcggccagggcaagttcggctccgtccggatctgccgcgctaaggtcggcggcgacgagttcgcctgcaaggagctgcccaagaacggcgaggagacggtgcaccgcgaggtggagatcatgcagcacctctcgggccacccgggcgtcgtcacgctcagggccgtcttcgaggatgccgacaagttttacctcgtcatggagctctgcagcggggggaggttgctcgatgagatcgccagggaggggaagttttccgagcagcgtgctgccattgtgatcaaggatctcatggcagtgctcaagtactgccacgagatgggtgttgtgcacagggacgttaagccggagaatattttgcttaccaaggctgggaaagtgaagcttgctgatttcggactcgctgcacgggtcactaatggtcagaaaatgtttggtgttgctgggagccctgcatatgtggcacctgaagttctttctggaagctattcggagaaggttgatatatggggtgccggtgtgctactacatcaccccatgggaatcaatatcagttcttggacgggatcttattgggcgaatgctaaatcgagatgtctcttgcagaatgactgctgatgaagttcttagtaggttcaaacttcaaagagtctcatttagcgttgttataattttttagaatttctttacttactgatacctatttcaggtcacccatgggtcgtattttacacagaatgccccctgaaggtggtagctgctaatttgtgtctccctaacaaggttatagcacccaaaattccatgggacagacacaaatcagaatgtgactcagtgtcagacgcaagccaaaggtcagaggatcaggatgagtgtggcatagttgacgcattggcggcagcaataacacgtgttagaatatcagagccaaagagaagtcggctctgtagccccgcaattaccattcagcaggaatgctcgtcaaacttgaagaataatctttgcacggctttctgacctgacctagtttatagcacctgatcggaatggcgtccattcttctcgctgagaaggtcgttctgatttaggtgttgtagaggcgaggataataactcagcttttccagccagcaacaaacgtctggtatttagtgtttctttcagtgttcctgatgaaccccgcagttgtagctgctgtaaaattctgtaaatagcatggtcctttctcaagctgcgcctgggttgctaatttgtgccaccaaaaccgtttcacgcaatgttcataattcatgatcgagttgtgcaagacctgt

SEQ ID NO: 141093 - DNA, 2132 bp, Zea Mays
caaaggagaaccaggcaggccaatggccccaaacgcccaaaccccacctccacgcctccaccccaccgtcctcctcctcatctcactcactcccttttcctcacgccccctccccgcctcgagcccctcgctggctcgctcccattcccatctcgcaccaccaaccttccggatccagtgccgcacgcctcactccccgtccccgacacccatgacacgcaagaggcgcaagcacgccgccgccaccgccgcctagggttccgatcccttcctcatggattcgctgccgcgtaagcgcaagggcgcgcgcgccgcgtgctccatggccggatcccgccacgatgcgcctgccgcccgcaagcgcacctgccgcgagcccaagccgcggcccgagaagaagaagccctcttccgccgatgagggctccgcctccgcccgcggcggcgtggtgatgacggcgccgcccgccagcgggcgggcggcgcctgatagccccgggcgtgggctgaagcgcaagctgggctgcatcgactccgccactcggatggggcggaagaagcggctcgagagcgagtacgagctcggcgccgagatcggccagggcaagttcggctccgtccggatctgccgcgctaaggtcggcggcgacgagttcgcctgcaaggagctgcccaagaacggcgaggagacggtgcaccgcgaggtggagatcatgcagcacctctcgggccacccgggcgtcgtcacgctcagggccgtcttcgaggatgccgacaagttttacctcgtcatggagctctgcagcggggggaggttgctcgatgagatcgccagggaggggaagttttccgagcagcgtgctgccattgtgatcaaggatctcatggcagtgctcaagtactgccacgagatgggtgttgtgcacagggacgttaagccggagaatattttgcttaccaaggctgggaaagtgaagcttgctgatttcggactcgctgcacgggtcactaatggtcagaaaatgtttggtgttgctgggagccctgcatatgtggcacctgaagttctttctggaagctattcggagaaggttgatatatggggtgccggtgtgctactacatgtactactacttggttcacttccatttcaagggggctctctggacgccgttttcgagtccataaagacacttgaacttgatttcagcagcaccccatgggaatcaatatcagttcttggacgggatcttattgggcgaatgctaaatcgagatgtctcttgcagaatgactgctgatgaagttcttagtcacccatgggtcgtattttacacagaatgccccctgaaggtggtagctgctaatttgtgtctccctaacaaggttatagcacccaaaattccatgggacagacacaaatcagaatgtgactcagtgtcagacgcaagccaaaggtcagaggatcaggatgagtgtggcatagttgacgcattggcggcagcaataacacgtgttagaatatcagagccaaagagaagtcggctctgtagccccgcaattaccattcagcaggaatgctcgtcaaacttgaagaataatctttgcacggctttctgacctgacctagtttatagcacctgatcggaatggcgtccattcttctcgctgagaaggtcgttctgatttaggtgttgtagaggcgaggataataactcagcttttccagccagcaacaaacgtctggtatttagtgtttctttcagtgttcctgatgaaccccgcagttgtagctgctgtaaaattctgtaaatagcatggtcctttctcaagctgcgcctgggttgctaatttgtgccaccaaaaccgtttcacgcaatgttcataattcatgatcgagttgtgcaagacctgtcttaattctgatgcttgtcacccgaaactatatttggcacacgtatcatgaatagcttggtaccaccgatacccatgtgctacccgttctaaactgtggtaatggatatcattcaaatgtttcttcacaatttatttgagttcttaattaattttagtttaaaaatataatttgtttgagtttataattaattttaattcaaaaatatatagaaatata

SEQ ID NO: 141094 - DNA, 2187 bp, Zea Mays
cttttgctctctctatctctctcgtggcaacgactgcgcgagcgccggcgcctacgccaggtgcccaggcctccgtcggtcatttcgccaggcattcgtcgcgggctcttcgccggcgacgagcacacccaccaagttgaggattggtcctttacgagcatgttataatgggagagaacggagttcagctgacactgacctccactttgaagagcacaggcaagccacggatcaatgcggacgggctgaataatggatcacatactaccaaagagaagcatgaacacggtggcactttccaaccatcaaaaggccagaagcagcagctgtgcacaacatgtgcaaaagggcatacttgtcaatcggtcatcaaccggacaagacaaatgcgagctctaatcgactcaaagaagccttaccaagcacactctgtattcaagcacttaatggatgaggggcacaagccttcattggtcacatacacaattctactgaccgccctgacgaaccagaggatgtttgagtcgattccatcactgcttgctgaagttgaactagctggagttaggccagactccatcttcttcaatgccttgataaatgcgtttgttgaggcgaagcggatgggcgaagcgataaacacattctggaaaatgaaacattctggctgccacccaactacaagcaccttcaacacactgataaaaggttatggcattgtaggcaaacccgaagaatcacagcgcgtcttcgacatgatgggcgttgaaggatcagtcaggcctaacctcacaacatacaacattcttgtgaaggcatggtgtgatcacagaaatcttgaggaggcctggggtgttgtgggcaaaatgcaagcaggtggttttgagcctgatattgtaacttacaataccatagccagtgcatatgccaataatgacgagacatggagagcagaagagctcattgtggagattcagactagagtgcgcaccagtgagcgaacatggggcataatcattggtggttattgccgggagggcaggttggaggaagcattacgatgcgtccagcaaatgaaggatgcaggaagtgttcctaacgtcgtcatcttcaacacactgctgaagggctttcttgatgcaaatgacatggctgctgtcaataagatcctgggtctgatggagaaatttggcatcaaacctgacatcgttacctacagtcaccagttgaacacattcagctcgctgggccacatggctaaatgcatgcatgtatttgacaaaatgatcgaagcaggaattgagccagatcctcaggtatacagcattctcgccaaaggatttgttcgtgctcagcagcctgagaaagcagaagaccttctgttgcaaatgagccatcttggtctctgcccaaatgtcgtcactttcaccactgtcattagcgggtggtgcagcgtggccgacatggagagtgccatgagagtctatgacaagatgtgcaagtcaggcgtctatcccaatctcaggacatttgagactctgatctggggctacagcgaacagaagcagccatggaaagctgaggaagtccttcagatgatgcgggagactggtgtcaagccgaagcaaagcacctactgtctcattgctgatgcatggaaggctgttggtttgactgagaacatcaacaactcaaatggttcccccaatggtccttatgcaatcgagaaattggatcattcaaatgacaattgcaacgtgcgaatatcagaagacaataataacaagctgcagttttttgatgaaagtaatgggcgtgcaatgaatggccgttcacgttccagttttcttcagataacaaatgcactaggcagcagtggtatagtttctgccaaggtcatgaaggctggagaatttccatctgaaagactgaaggctatcaaaaacacatcctttccacaaggatttcaattgttgcatctcgagttttgtaggaagcagcttcggaagaatggtggattctgtagtcagagcatcaactcattcaaaatgggtttctctagcagaggatgcatttattaattcgatgtacacattgggctgaaacttaaacaaaaacaaatctcggtgttccaagtctccgcctatgatgcgggccatttttatgattcagacgcagttcctgcag

SEQ ID NO: 141095 - DNA, 622 bp, Zea Mays
tatcattatcctctttttatgaagcatgttcatacttctaactccagcagatattggattgctaattcatacgaagatagattcatatctggccttgaacctgaaaatgttgataaggagtttttaaggctttggttcaagaacaactgcaatccatatgaagacacggttctgccagaagctccagaagagttggtttgtgagttggcccggcgctacattttcctgtttgaaacatcacgaagacgaaattcgagatcccggaagcacaggaaccaattcatgaaaggatatcaaggaatgtcgctcaaggcttacgggacctatgattgctgatagaggatcctggggcagagtttgctgtggggtgcatctctggtaccaatattcccgtgagagtagtaagtagtatgcgcgcatgccatatgcgcgtcctgtgagggttgccattgcgtcttgctgaagcagaggtatccgcatttctttacgatctgtgatgtaatgtggtaataaactccaactggaggtggttgtgtttatgtgattgtgagcaaccgccatgcgccgctggtgagatttgccgtgtttggagcacgaggggagataaattgaaaattgagtt

SEQ ID NO: 141096 - DNA, 1243 bp, Zea Mays
gtgactgtgatctatactataaggtgaacaagatctctttgtctactgtagttgcagcaccagcagcagcagcagaagagcagcgcctgagctccagcaataatggccgagaagggcgtgaaggtgttggggatgtgggcgagccccatggtgatcagggtggagtgggcgctgcggctgaagggcgtcgagtacgagtacgtcgacgaggacctcgccaacaagagcgccgacctgctccgccacaacccggtgaccaagaaggtgcccgtgctcgtccacgacggcaagccggtcgcggagtccaccatcatcgtggagtacatcgacgaggtctggaagggcggctaccccatcatgccgggcgacccctacgagcgcgcccaggcgaggttctgggccaggttcgcggaagacaagtgcaacgctgctctgtacccgatcttcaccgcgaccggcgaggcgcagcgcaaggcggtgcacgaggcccagcagtgcctcaagaccctggagacggccttggaggggaagaagttcttcggcggcgacgccgtgggctacctcgacatcgtcgtcgggtggttcgcgcactggctccccgtcatcgaggaggtgaccggcgccagcgtcgtcacccacgaggagctgccgctgatgaaggcctggttcggtcggttcctcgcccttgacgtggtgaaggcggccctgcccgacagggacaggctcctcgccgccaacaaggcccgccgtgagcagctcctctccgcgtagatatggctagtaattctggagcagctagtttcaccgccgacgctcatatattgctgaataaggactggttgcacttttgcacgttgtgcagtgcagccgaggtttggatgacctctgcccctctgttccatttcagaatggtagtcccataataatgcatatacatcatgcataaccttcgtggcaccgcacggtgcgtcaaactgttggcctgttgcccaatcccagtagctgattttcttcaggcgtgcaaggtagcaacagaaagtaacacatagaaacagacatttcttcttttttttatattcgttcagattagatcagtcctgtactgggatcggcccacaaagtgcgccggtccagacttactgtccgaaccgaacgtggtactgccaaggtacatctacacaccatgcagcacagtattggccaacgtccaccgccgaacagaagagcacccacaccagaagcg

SEQ ID NO: 141097 - DNA, 792 bp, Zea Mays
gtgactgtgatctatactataaggtgaacaagatctctttgtctactgtagttgcagcaccagcagcagcagcagaagagcagcgcctgagctccagcaataatggccgagaagggcgtgaaggtgttggggatgtgggcgagccccatggtgatcagggtggagtgggcgctgcggctgaagggcgtcgagtacgagtacgtcgacgaggacctcgccaacaagagcgccgacctgctccgccacaacccggtgaccaagaaggtgcccgtgctcgtccacgacggcaagccggtcgcggagtccaccatcatcgtggagtacatcgacgaggtctggaagggcggctaccccatcatgccgggcgacccctacgagcgcgcccaggcgaggttctgggccaggttcgcggaagacaagtgcaacgctgctctgtacccgatcttcaccgcgaccggcgaggcgcagcgcaaggcggtgcacgaggcccagcagtgcctcaagaccctggagacggccttggaggggaagaagttcttcggcggcgacgccgtgggctacctcgacatcgtcgtcgggtggttcgcgcactggctccccgtcatcgaggaggtgaccggcgccagcgtcgtcacccacgaggagctgccgctgatgaaggcctggttcggtcggttcctcgcccttgacgtggtgaaggcggccctgcccgacagggacaggctcctcgccgccaacaaggcccgccgtgagagtaggacgcgaggccccagagcgagagcaccagcgcca

SEQ ID NO: 141098 - DNA, 1558 bp, Zea Mays
tatttctcaagaccagtttattaattagtttcattttattcttatcagcatgctctctctcattttttcatactgttgtgtttggatggtgtaccaccagtgttttacaacagtttggcttttggaattgctactgctaaaacttcgttcctctaagaagaccttttgtttttgcattcccagctgaggagctgagggacagcgaagtacttgtattattacaaaatcttttcttagtataccacatatttatacataagttatcatggtattataagtttccgatgcaacacacgggcacttacctaatatcttgaggtatgtttctgatctgaagtacttatttacaacttctctcacttgtcatctatgtaccatgtatgtttctgaaattacatgaacagtaatgtttttttggaagacacagcatacctttaattattcagctactgtacaatgtacaaattcttaatttactgctaggcaaatcaatgctctcaaccatttcaacttctgttgccatgagatgagagaactgaaatgatagtctcattgttagtactttaactgtgctgttctatggatccttcatccttcactatctagcagtcaatatgcttcagttcaaattgtttgcattttctttcctttgttggtctgacatgtaaaactttatgctgcagcattctcactgggcttctgtccttcatgatggacgatgcactgacaactggaagcatcaagacatcagatgcagaaaagaggcgtttagcaaaagcttcccttgcctacaattgtgagagcaaaaactgtccgcacttcaggaaacttttcccagagtatgttgagaagtacaatcaacagctacaattggagaacactgctgcagagccggtgcctcaggagaatcctgcacctgctccatcccctgctgcccagcaagccccgaccgtggccaatagggcacaaccactggcggaggcgcgccgtgacaagaaccagaagaaggcggtgcccttctggatggtgctggtcatgttttcagttttcggggctgtgatggcgtgcccctaatgcaactttgacaataataaagacaataagaacgtgtgatgccagggccgtaattttgtatagttttctattggtttgtctgagtgatggctactgctatggctgtagagtcatagagatggcattggagttgtatggtgcatgttatttaaaaaacaagccagaaataatcatttagttgtgcgggagccacggagcatactgcatgcgttcaacatagccttgtgttggcgtgctgcttcttttctgaaatacactgagttgaatcgtcgagaatcacttgcccttgcttcagatggattgaattatgaatgcaatgaggctccatcataggcaggcttataggttcgtagtatcgttaggacgggcatcttactataacaatataagacacattttgtatatataacacatgtgcatatataagttatcgagatattatatgtctctgttgcaacgcacgggcactgatctataaaagtat

SEQ ID NO: 141099 - DNA, 1707 bp, Zea Mays
cgcaacgggccagcggcgcaggcagctgcgttcgcgtcgcgtcgcgtgtccctccagccccgtagcgccttccagctccaacctgttgctacaactacaagaagccgccacacaaccaccgcgctcccaacggctcaccgtcaccggccgggaggcgatcccatgggagagacgacctaacttttctcggattctagctcgggtctgcactctgcacgctgctgctgctggtttcttgagaggcgagaccctgaagggatggcactggaggccgtggtgctttcccagcaaggcagtcgctttgggtgtggtgccatggcagcaggagggccttggagtggcctgttttttagtggaatggagggcgtggtcgagatcggtagtggcgctggcggcggccgggacgtggccgggtgctcgccgccacagctcctgcaggagccggctgcccgcgcgctgcctgtggcgtcgtccgtggggagcgcgagtggcggcgccggtcaggatgccccggcggcacttgctgtgaccgcgacagcggcggccggaaccggaagaaggaagcggcgaaggatgaggccactgaagaacgaggaggaagtggagagccagcgcatggtccacattgccgtggagcgcaaccggcgcaagcagatgaacgagtacctcgccgcgctccgctccctcatgccgcccgcctacacgcaacggggcgatcaggcgtccatcgtcggcggcgcgatcaacttcgtcaaggagctggagcagctgctccagtcgctggaggcgcagcagaggcgttcctcccggcggcagggccccgcgtgcgccgtcgatccggacgacgcagggccgttcgcggacttcttcaccttcccgcagtactcaatgtgcgctgccgcggcggccccatcagagaaccccggcgccgacgccgacgccgagcaggaggcgtccgggtcgaagccgtcgggcgtggccgacgtggaggcgaccatggtggagagccacgccaacctgcgggtgctgtcccggcgccggccgaggcagctgctgcggctggtgctggggctccagggccaccgcctcaccgtgctccacctcaacatgagcagcgccggccacatggtgctctactcgttcagcctcaaggtggaggatgattgcccgctcacctcagtggatgagattgcaggtgcggctcatcagatcgtcgagaagatcaacgaagaacaaggcggcggcagcttagagtagtgctttcttgcggtgcatgttatcttttttctttagctcctgtagcaagtgaagtggttttctcccttccctgtgtctgtgtgcaagcgaataatgtactgatcagcttagccggtctctgaaacagtagtatgcatcagaacctatctttgttcatagataatgtccatggccaagcatgcatgcaaggtctccgaaacagctctctccatttccatggtgtgtgtggtggtctggtggagacgtgggagggggagaaaggcatccatgacattcccttggggggctgggggccttgtgggcgctaccgtgttctgatgttcaccacacgatctgacagaactgggctggacaggtgcagacgctgttccagacctggaagaattcttctgtatttctgttccccttgtgaagcaagctagcaccgccccatgccccccaaagcgccaa

SEQ ID NO: 141100 - DNA, 987 bp, Zea Mays
tgttcgtaaatacgagtttaaatcttagttattagctctacattcacacttagccacaaaacacatatatttttgtattttgtattctatactcaaatataatgtatatattttataaaaaaaagaaaaactcaatagaacttgtccgtcatgtcatacctatgtaatatatgaacgggtggtcaaactagttgcactaatttcattgcgacattgcactcaccgtccacttccacttccgacgatagtaaaaaaatagtcgggcaattggcacgaggccacattatagaaataaaatgctaaacgatctatataaataggtcatccagctagcacggtcaggtgtgcaacggcaacagggggcaattggtccgttggtaaggtgtcgttatctcccgtccactgccgccggcgtgcctcggagactcaacacgtcgccagactagacgcgccatggccaagaacagctatgtggtttatgtcctagtgctgctcgtcgcgggctacacggcggcgctagcctcggccacgacgacgacgttcatcgtcggtgacgaccagggctggatgaccggcgtggactacgtcgcttgggtgaaaggaaagacattcgcgatcggagacaagctagtgtttaactacccgagcgaggagcacacggtgacggaggtgagcaggaccgactacttcgcctgcgccggaggcaacgcgctgagcaacgaccgcagcggatcgaccaacatcacgctcacggggcccggcacgcgctacttcctctgcaacatcccaggccactgcaccatcggcatgaggctcgccgtcacggtcgccgggggcggatcgcctccgggcgccacgccggccggtggcgcggcgggcgccacggctcggccggcgatgggatccttcatcgtcaagacgaccgcgtggctggctgtgatcaagctcacgctgtcctgatgaggtgatgacgccgtgactgattca

SEQ ID NO: 141101 - DNA, 687 bp, Zea Mays
gtgcatagcagcagcaaatagtggttggcctgttggtactctatatcgtcccttccagtgtacccgtcctccagcccattatacattatacttgctccagataagaccaagagcgtcatggccaacgccttgcctctcatcgtcgcgctggtcgccgccgccgggtgcgcggcgctggcttcggccacgtcgtacaccgtcggcgactcgcagggctggacgacaaccggcgtcgactacagcagctgggccagccgcaacactttcgtcgtcggagacacactagtgttcaactacgtgagcaaggcgcacacggtgacggaggtgagcaaggccggctacgacgcctgctccggcgccaacgcgctcagcgacgacgacaccggctccaccaccatcacgctccagaccccgggcacgcactacttcatctgcaacgtccccggccactgcgccagcggcatgaagctagcggtcgccgtctccgcctcgccctcgggcacggccccttccgccggagccctgcaggttccggcgatggcctccgtcgtcgccgcggccgcgggcgctgccatcaagctcgcgctcttctgacggagcacggccgggtcgtctcaggggagagacatgtatgcatgtgtgtatgctactctgcggtggcgagtgctttttctgatgcctctgtcg

SEQ ID NO: 141102 - DNA, 846 bp, Zea Mays
gtgcatagcagcagcaaatagtggttggcctgttggtactctatatcgtcccttccagtgtacccgtcctccagcccattatacattatacttgctccagataagaccaagagcgtcatggccaacgccttgcctctcatcgtcgcgctggtcgccgccgccgggtgcgcggcgctggcttcggccacgtcgtacaccgtcggcgactcgcagggctggacgacaaccggcgtcgactacagcagctgggccagccgcaacactttcgtcgtcggagacacactagtgttcaactacgtgagcaaggcgcacacggtgacggaggtgagcaaggccggctacgacgcctgctccggcgccaacgcgctcagcgacgacgacaccggctccaccaccatcacgctccagaccccgggcacgcactacttcatctgcaacgtccccggccactgcgccagcggcatgaagctagcggtcgccgtctccgcctcgccctcgggcacggccccttccgccggagccctgcaggttccggcgatggcctccgtcgtcgccgcggccgcgggcgctgccatcaagctcgcgctcttctgacggagcacggccgggtcgtctcaggggagagacagtgcatgcaggctacgttcttggcggttcatagttttccgctggcgattgttcgccgcgcagttcatgtatgtagtgtatgcatgtgtgtatgctactctgcggtggcgagtgctttttctgatgcctctgtcgttgtgtgttcatcaccgtcgtgtgcgattgttctttgggatgtctttgcctcaataaaactgcttcattctccagtattctata

SEQ ID NO: 141103 - DNA, 1927 bp, Zea Mays
cgagttcccggacccgagctccccgtcgcccccctctctctcgctcacgccctttattaacgcacagaggacagcacactgtattgcgggaactgaaagcaaaccaaaaaagaaagagagggggagagacacagaggcctcactccacacactgtcttgtctctcagtcccagagctttcttggatcgcgaggaatccactggaaattttgcaattgtagtagagaactgtatcgtccgacgaaggtgcatggtgttggccatgggtcacggcagggaacagagacgagcaggtcggcgctctccccccagctcattgatcctgtcctcgctataaggtagtcctgcggtggcctccgaatttcactcgatcgaacacgacatgaagcggccacgcggcgccagtccccctctggctgcgatgaccaatccgaacgatgatggttacggcgtggtcgggatggaggcggacgcagacgcggacgcggacgaggagatgatggcgtgcggcggcggcggggagaagaagcggcgcctgagctccgagcaggtgcgcgcgctggagcggagcttcgaggtggagaacaagctggagccggagcgcaaggcgcggctggcgcgcgacctcggcctgcagccgcgccaggtcgccgtctggttccagaaccgccgcgcccgctggaagaccaagcagctggagcgcgactactccgcgctccgccagtcctacgacgcgctgcggcacgaccacgacgcgctgcgccgcgacaaggacgccctcctcgccgagatcaaggagctcaaggcgaagctcggggacgaggaggcagcggcgagcttcacgtcggtcaaggcggagccggcggcctcggacgggcctccccccgtaggggtggggtcgtccgagagtgactccagcgcggtgctgaacgacgcggacccgcccgtggcggaggcgccggtgccggaggtacggggtactcttcttgacgcgcccggcgccgtggcggcgaaccatggcggcgtgttcttccacgggagtttcctgaaggtggaggaggacgagacggggctcctggacgacgatgagccctgcggcgggttcttctccgtggagcagccgccgccgatggcgtggtggaccgagcccacggaacactggaactgaaccgaggcggaggtagatgcagcgcagcgtagactcgggatctgggccgagcggtggaggaataaagaattcggagcgagaggcgggggcttttctgcaaattttgtaaaatggagttttacgtagccctctttcgtcaattctcgcgcgaatattttagcagtagcagtagtctttaggaacccagtcgagatcagtacctggttgcgtttggactcgaatgcaaaaaaaaatgcaagaaaaagagatgagaccaaacactgatgcagaaaggggagagagggacagtgggaagaggagtgtagaggaagagctgagcgaggtagggagtaaaggacaagctgtatgtcactgttagtgggcccagggccacgtgaaagtcaggcattgttggcgcccaattgaccgccggacttgtcagtgatgcggatcggcgacgtgaacgtgtctggccgtgcgctcccccaatggcctcttccgcggaagcgtggctctggctccttcgtcgacctgtcgtgcgtctctgtatctaattttggatgctcgccgacgccgctagatagctgtttggatgccgtgccgtgagaaatggcgatcgtttttgtgccctcttgctcgagcagatgcttgtccttgttataaaaaaaaaccctgcgaggtgttatataggctagtgtggggttctatctttttctccaataaatatgtagccctttataataactaatgaataaaagataacgcaagaaaaagattttct

SEQ ID NO: 141104 - DNA, 231 bp, Zea Mays
atgaccagaggcatggttggcgctgctggcgtgactagcgacgtggacacccgcatcgatggcaccgatggcggtcatcatcctcgtcaaaacgtaacaaaggtgacaagagataaggcagatctagttctattatctaaaaattggaatgaagagaatatagaaatttgtttaaaaaaacgggacgaaggtagtagtgatgacagcatcttgagtttactcaagctttag

SEQ ID NO: 141105 - DNA, 2466 bp, Zea Mays
acagctcatcccccggctgctcgctttttatcacttctcccttctcgaaacacagacgaacacctttcttttattactctcctgtccccctccctctctcatcaaccatcacctccgtcccgtccgcctcccattcgctcaaaccggaaggaggaggagggcgaattaaagcctcgcctcccgcccccgcccccgcccccgccccccaccgcgtcgccggcgccgatggccgacggcggggccggcgcgtaccgggagttcaaggcgctggcggaggcggcggaccgcaagttcgcgcgcgcgcgggacctgccgctctacggcggcggggaccaccacagccggaaggcgttcaaggcctacacgcggctctggcgcctgcagcaggagcgccgccgggagctcgtcgccgccggcctccgccgctgggagatcggcgaggtggcctcccggatcggccagctctactacgcgcgctacctccgcgccgccgagccgcgctcgctcgtcggcgcctacgtcttctacgaggccatatacagccgcggctacttcggcgcggccgcggcagcggtggggacggacggcggcggcggcggcgtcagccgccaccaggcgctcctgatccggtacaaggagcttcggttcatcgcgcggttcctcgtcgtggccatgctgatgcggcgggccgaggcggtggaccacctcgccgcacgcctacgtgcgctcgtcgaggagaccaaggctgcgtaccccaaaacaaacttcaaggaatggaagcaagtacttcaagaacttggcagatttttgaaggctgatggagcatataaaggatctagatcactaagatatgacaacttatttgattcttatccatcgaaccttgtatctattgcacgattccattcaaaaagggtgctcaaactgaaggaagctgtgctaacaagctaccgcagaaatgagatcaagttcacagaactaactttggatacattcagaatgctacagtgtttagagtgggaacccactgggtcttatcagattgctgctaaagaacttacagaaaatggcactgtaagtgatcagagtggaccctctggtctgattgatattcaactgtcaacagaaatatctgatggaagtcttccttcaaatcctcaaaaggcaatcatatatcatcctacagccgctcatcttttagcagttctagcaacaatttgtgaagagctctctcaagatagcattttactcatctatatatcagcgtcagggtctgctgagcagagttttgctagtcaaaagtttggctctagctcatctcgtgcgagggctgcctctgccttccccactgataagccaaactcgcataacagttctgataatcatctatggcttggcccccgtggaagtggaggtccaaacaatctttatccagatgatctaattccatttacaagatatccactgttccttgtaattgatagtgaaaatagccatgcattcaaggtcatacataattcagagaagggagaaccagctgctttattactttctcccaggacatcatcagccatgcctggagtagaatccacggctcacggaagccagtttacatacttcctcactgctccaatgcaagccttctgccaactagcgggaataacttctgacatagacactgatacatacgcaaatgcagagaacatacttttctctgctttggaagaatatgaaggaatactctgcacttctgttggattaaacaatgtctgggggcaaattttaccagacccatttctcagacggctgattctcaggtttattttctgccgggcagtgcttttctatttccactcagatgagcacgaatatctaccgacctgcttacctagtcttccagagtcagtctccccgcatgcagaggccataagaactcctatcctttcgcttgcagaaaaccttgtcgtcagcgaccggtttgacttccgagactccacacgcaacaagaaatgatgaccagcagcaataaccataactcatgccttctgtagatacctctgtggtaaatatagtccagcgatttgttgattgttttgcatttatacagccaacggagcaattagtcagcaccaattagcagcggcatccgcgcctggatggtgtgaattgaatggcgatatgaagaattttgacctgtctccgttgagcgtctgtacaagtttgtttaggtgttctctaatttgctctaggcactgtaggcatgtagccttgtcgtcgattttttttctattttgttgtcttggagaggacggtttgtaagctggaagaggcgtttttaaagtactctagaaggcagattgttttgtagagtttggttaactcaccatatttgacggcagtttacggttttccaattttcgtagcgctacgtttgcctcgtgctcctgttggattaatgtgggcttg

SEQ ID NO: 141106 - DNA, 1320 bp, Zea Mays
tagatgaattttatgcctcctgttatcctgtacaggggggaaaatctaacttgcttcttagcttatcacggattcaaagcagtctctctgcatttgcagaggggaagtttgcctcggtttatcccagaccccacttgtgtaggagcctcgggcaatagatctgcccttcttagcatgataaattgagaaccaatccttaagttaactatttttttttgttaaaggtggcactgaatttcatgggctattcgtcttcttgttttttgtttgtgatttttttgggtccaatctatctgtagcagtactgcctacctttttttttttttttgcaaattatcatttggtcgtgtaacttgccaggtcatacataattcagagaagggagaaccagctgctttattactttctcccaggacatcatcagccatgcctggagtagaatccacggctcacggaagccagtttacatacttcctcactgctccaatgcaagccttctgccaactagcgggaataacttctgacatagacactgatacatacgcaaatgcagagaacatacttttctctgctttggaagaatatgaaggaatactctgcacttctgttggattaaacaatgtctgggggcaaattttaccagacccatttctcagacggctgattctcaggtttattttctgccgggcagtgcttttctatttccactcagatgagcacgaatatctaccgacctgcttacctagtcttccagagtcagtctccccgcatgcagaggccataagaactcctatcctttcgcttgcagaaaaccttgtcgtcagcgaccggtttgacttccgagactccacacgcaacaagaaatgatgaccagcagcaataaccataactcatgccttctgtagatacctctgtggtaaatatagtccagcgatttgttgattgttttgcatttatacagccaacggagcaattagtcagcaccaattagcagcggcatccgcgcctggatggtgtgaattgaatggcgatatgaagaattttgacctgtctccgttgagcgtctgtacaagtttgtttaggtgttctctaatttgctctaggcactgtaggcatgtagccttgtcgtcgattttttttctattttgttgtcttggagaggacggtttgtaagctggaagaggcgtttttaaagtactctagaaggcagattgttttgtagagtttggttaactcaccatatttgacggcagtttacggttttccaattttcgtagcgctacgtttgcctcgtgctcctgttggattaatgtgggcttg

SEQ ID NO: 141107 - DNA, 94 bp, Zea Mays
ccgctgggtacactcttttcttcgtatttatgcatgtttcattgctgtttactgcttatgcgagtagttatacacacatgcacatacatgtcat

SEQ ID NO: 141108 - DNA, 3080 bp, Zea Mays
ctcgcacccaacccgcatccgcattcctcgccgcgccgccgctctaaacctcagagcctcaaaccgtcagaactcagaagtaaacccctcctagtctgtcgtctctcttcgcacgccgccaccgagaggacgaaggagcgcgcacgcgcgtgacagagtggtaagatgggaggcgggcggaagcgcgggcgcacgcagcgccgccacttcaagcagggccgcgagaacgtctggaagcacaaccctcagcgtcctcccgccggcgaaggaggagaggcgcgagaggacaatccctcgtggcagcccttcgctaccgagaacccagccttcgaggagtactacaaggagcagcaaattgtttctgaggaagagtgggatagcttcatgagcatgctccggaagccattacctgccacttttaggattaatgcgagctgtcaattttttcaagatatctgctcgcaattggaaaacgacttcaggaaatcattagagactgaggtgaccgatgatcatgaagaagatgctattcggcctttgccttggtacccgggtaatcttgcatggcatttgaacttttctcgaatgcagctgaggagaaatcaggcacttgagagttttcatgaattcttgaagcgagagaacgaagttggcaacataactaggcaagaggctgttagtatggtcccaccactgtttctgaacgtgcaacctgatcatcatattcttgatatgtgtgccgctccaggatctaaaactttccagttacttgagatgattcaccagtcaacgaagcctggactgcttccaaatgccctggtggtagctaatgatgttgatgtgcaaagatgcaatcttcttattcaccaaaccaagagaatgtgcacagctaacctgattgtgacaaatcacgaagcacaaaactttcctggttgtaatcttgcaaagttctgttcaaaaatgtgtatggatgaggcaaaggtgcagaggttggagtttgatcgcgttctttgtgacgtgccttgtagtggcgatgggactgtccgtaaggctcctgatatgtggaggaagtggaatgctggtatggggaacggacttcatcacctgcaagtggaaattgctatgcgtggtatgagcttgctcaaagtgggtgggaggatggtttattcgacatgttcaatgaaccctgttgaaaacgaaggcgttgttgctgagattttgcggagatgtggggactctgttgaacttcttgatgtttctaatgaactacctgaattagcccgtcgtcctggacttagcacctggaaggtacgggatagagggtcttggtttggtgttcatgaagatgtacctcgctacaggaagcatgtgatatcagcaagtatgtttccttctgggaaaggcagcaaagatagtggtacggggagcagcagcgttgaggtcaacacagatgtagctgatgcagacatgaaggattcaacagacatgggagagggagaacaagaaacaactgtaacaattgatgacagcaataatggtgacaatctgaaaaccgaagagggaactaaagttgattgcgagtctggtgaagtcacaactagtagtagttataaaaagttaaattctacttccatccgtacggaacattcagattacccactgcatcgctgtatgagaattgttcctcatgaccagaacagtggggcatttttcattgcagtccttcataaactctctcccctgaatgagaaccaggtggtagatggtgtcagaattgaccagaatatctcaaaagacaagactgagaaacttgagaaggatttagtatcacataaggcatcatctgaagaaaatactgtgcatcagcaagtgattgataatgcaaatgttctggatggagaacagaatagagacagggataacaaaagttcagaagataagagctcagaggattctaaggtcaatgttaatgaggcagcaaagggtcaagcaggaacaagggataggaggaggcagcaaaaccaaggcaggtggagaggggttgaccctgtgatattttttaaagatgaagtgacagtcaaaagcattgtatctttctatggtatcacagattcatttccacttgaaggtcatctggtgactagaaaccctgatactagtcatgttaagagaatatactatgtgtcaaaatctgttcaagatgttttggagctcaacataaaaattggcgaaaggctaaagatcacctcactgggcctaaagatttttgaaaggcagtcttcaaaggaaggctccccatgcacatttcggttgtcatcagagggattgccgctcctgcttccatacatcacaaaacagattctatatgcatctgcaattgacttccaacatcttttacagtacaggactattaagtttcctgatttcgtggatgcaaaatttggtgaggaagcttcagctttgcttccaggttgctgtgttgtagttttacgtgaagggcatcaggatataggatccatagctacagatccctcggccattgccattgtttgctggaaaggaaagaccaatttgtgcgtcatggtttctccgctagatggtaaagaattgcttgagaggatttctttgcgccatgggctcaaaatccccaaaggggataaagagaaacccagccaggagattgctggatcagacgagctgcttgattgtgccactgaggtggacgatcaagagtctcttcctgaaagcaaagcatctgacatcgaaatttcagatgctaaggaggctgagtagcttttgttttatgtcactacgcatattacacaggaggtagctgtatcctcgagatggctattagcttttttaagtcacttcggttgccaagggagagagatgatagcccaccacatgggaatgacagactcaaaacaccatctggtaatcgttcacggtgacacagaatctatagacttgtaacttcttggttttatttcttcgagaggatgtattgcatcgattttaatttgttgcactcaacacagaatctagtaaagattgagaaaaacattttttttgagata

SEQ ID NO: 141109 - DNA, 2484 bp, Zea Mays
cctctccggcgccccttcccctgcccaccacctcccctcgctggtgtcggccctggccccagcgaccacctcctcggctactgcttctgcggggttgatctcccccctcccggggagaaaattttcatgaattcttgaagcgagagaacgaagttggcaacataactaggcaagaggctgttagtatggtcccaccactgtttctgaacgtgcaacctgatcatcatattcttgatatgtgtgccgctccaggatctaaaactttccagttacttgagatgattcaccagtcaacgaagcctggactgcttccaaatgccctggtggtagctaatgatgttgatgtgcaaagatgcaatcttcttattcaccaaaccaagagaatgtgcacagctaacctgattgtgacaaatcacgaagcacaaaactttcctgtggcgatgggactgtccgtaaggctcctgatatgtggaggaagtggaatgctggtatggggaacggacttcatcacctgcaagtggaaattgctatgcgtggtatgagcttgctcaaagtgggtgggaggatggtttattcgacatgttcaatgaaccctgttgaaaacgaaggcgttgttgctgagattttgcggagatgtggggactctgttgaacttcttgatgtttctaatgaactacctgaattagcccgtcgtcctggacttagcacctggaaggtacgggatagagggtcttggtttggtgttcatgaagatgtacctcgctacaggaagcatgtgatatcagcaagtatgtttccttctgggaaaggcagcaaagatagtggtacggggagcagcagcgttgaggtcaacacagatgtagctgatgcagacatgaaggattcaacagacatgggagagggagaacaagaaacaactgtaacaattgatgacagcaataatggtgacaatctgaaaaccgaagagggaactaaagttgattgcgagtctggtgaagtcacaactagtagtagttataaaaagttaaattctacttccatccgtacggaacattcagattacccactgcatcgctgtatgagaattgttcctcatgaccagaacagtggggcatttttcattgcagtccttcataaactctctcccctgaatgagaaccaggtggtagatggtgtcagaattgaccagaatatctcaaaagacaagactgagaaacttgagaaggatttagtatcacataaggcatcatctgaagaaaatactgtgcatcagcaagtgattgataatgcaaatgttctggatggagaacagaatagagacagggataacaaaagttcagaagataagagctcagaggattctaaggtcaatgttaatgaggcagcaaagggtcaagcaggaacaagggataggaggaggcagcaaaaccaaggcaggtggagaggggttgaccctgtgatattttttaaagatgaagtgacagtcaaaagcattgtatctttctatggtatcacagattcatttccacttgaaggtcatctggtgactagaaaccctgatactagtcatgttaagagaatatactatgtgtcaaaatctgttcaagatgttttggagctcaacataaaaattggcgaaaggctaaagatcacctcactgggcctaaagatttttgaaaggcagtcttcaaaggaaggctccccatgcacatttcggttgtcatcagagggattgccgctcctgcttccatacatcacaaaacagattctatatgcatctgcaattgacttccaacatcttttacagtacaggactattaagtttcctgatttcgtggatgcaaaatttggtgaggaagcttcagctttgcttccaggttgctgtgttgtagttttacgtgaagggcatcaggatataggatccatagctacagatccctcggccattgccattgtttgctggaaaggaaagaccaatttgtgcgtcatggtttctccgctagatggtaaagaattgcttgagaggatttctttgcgccatgggctcaaaatccccaaaggggataaagagaaacccagccaggagattgctggatcagacgagctgcttgattgtgccactgaggtggacgatcaagagtctcttcctgaaagcaaagcatctgacatcgaaatttcagatgctaaggaggctgagtagcttttgttttatgtcactacgcatattacacaggaggtagctgtatcctcgagatggctattagcttttttaagtcacttcggttgccaagggagagagatgatagcccaccacatgggaatgacagactcaaaacaccatctggtaatcgttcacggtgacacagaatctatagacttgtaacttcttggttttatttcttcgagaggatgtattgcatcgattttaatttgttgcactcaacacagaatctagtaaagattgagaaaaacattttttttgag

SEQ ID NO: 141110 - DNA, 2584 bp, Zea Mays
cctctccggcgccccttcccctgcccaccacctcccctcgctggtgtcggccctggccccagcgaccacctcctcggctactgcttctgcggggttgatctcccccctcccggggagaaaattttcatgaattcttgaagcgagagaacgaagttggcaacataactaggcaagaggctgttagtatggtcccaccactgtttctgaacgtgcaacctgatcatcatattcttgatatgtgtgccgctccaggatctaaaactttccagttacttgagatgattcaccagtcaacgaagcctggactgcttccaaatgccctggtggtagctaatgatgttgatgtgcaaagatgcaatcttcttattcaccaaaccaagagaatgtgcacagctaacctgattgtgacaaatcacgaagcacaaaactttcctggttgtaatcttgcaaagttctgttcaaaaatgtgtatggatgaggcaaaggtgcagaggttggagtttgatcgcgttctttgtgacgtgccttgtagtggcgatgggactgtccgtaaggctcctgatatgtggaggaagtggaatgctggtatggggaacggacttcatcacctgcaagtggaaattgctatgcgtggtatgagcttgctcaaagtgggtgggaggatggtttattcgacatgttcaatgaaccctgttgaaaacgaaggcgttgttgctgagattttgcggagatgtggggactctgttgaacttcttgatgtttctaatgaactacctgaattagcccgtcgtcctggacttagcacctggaaggtacgggatagagggtcttggtttggtgttcatgaagatgtacctcgctacaggaagcatgtgatatcagcaagtatgtttccttctgggaaaggcagcaaagatagtggtacggggagcagcagcgttgaggtcaacacagatgtagctgatgcagacatgaaggattcaacagacatgggagagggagaacaagaaacaactgtaacaattgatgacagcaataatggtgacaatctgaaaaccgaagagggaactaaagttgattgcgagtctggtgaagtcacaactagtagtagttataaaaagttaaattctacttccatccgtacggaacattcagattacccactgcatcgctgtatgagaattgttcctcatgaccagaacagtggggcatttttcattgcagtccttcataaactctctcccctgaatgagaaccaggtggtagatggtgtcagaattgaccagaatatctcaaaagacaagactgagaaacttgagaaggatttagtatcacataaggcatcatctgaagaaaatactgtgcatcagcaagtgattgataatgcaaatgttctggatggagaacagaatagagacagggataacaaaagttcagaagataagagctcagaggattctaaggtcaatgttaatgaggcagcaaagggtcaagcaggaacaagggataggaggaggcagcaaaaccaaggcaggtggagaggggttgaccctgtgatattttttaaagatgaagtgacagtcaaaagcattgtatctttctatggtatcacagattcatttccacttgaaggtcatctggtgactagaaaccctgatactagtcatgttaagagaatatactatgtgtcaaaatctgttcaagatgttttggagctcaacataaaaattggcgaaaggctaaagatcacctcactgggcctaaagatttttgaaaggcagtcttcaaaggaaggctccccatgcacatttcggttgtcatcagagggattgccgctcctgcttccatacatcacaaaacagattctatatgcatctgcaattgacttccaacatcttttacagtacaggactattaagtttcctgatttcgtggatgcaaaatttggtgaggaagcttcagctttgcttccaggttgctgtgttgtagttttacgtgaagggcatcaggatataggatccatagctacagatccctcggccattgccattgtttgctggaaaggaaagaccaatttgtgcgtcatggtttctccgctagatggtaaagaattgcttgagaggatttctttgcgccatgggctcaaaatccccaaaggggataaagagaaacccagccaggagattgctggatcagacgagctgcttgattgtgccactgaggtggacgatcaagagtctcttcctgaaagcaaagcatctgacatcgaaatttcagatgctaaggaggctgagtagcttttgttttatgtcactacgcatattacacaggaggtagctgtatcctcgagatggctattagcttttttaagtcacttcggttgccaagggagagagatgatagcccaccacatgggaatgacagactcaaaacaccatctggtaatcgttcacggtgacacagaatctatagacttgtaacttcttggttttatttcttcgagaggatgtattgcatcgattttaatttgttgcactcaacacagaatctagtaaagattgagaaaaacattttttttgagata

SEQ ID NO: 141111 - DNA, 2019 bp, Zea Mays
ctatgttatcctgatattagggatttgttactcatgaggtttgcgtatttggttttttgttgcttgttcaggtatgagcttgctcaaagtgggtgggaggatggtttattcgacatgttcaatgaaccctgttgaaaacgaaggcgttgttgctgagattttgcggagatgtggggactctgttgaacttcttgatgtttctaatgaactacctgaattagcccgtcgtcctggacttagcacctggaaggtacgggatagagggtcttggtttggtgttcatgaagatgtacctcgctacaggaagcatgtgatatcagcaagtatgtttccttctgggaaaggcagcaaagatagtggtacggggagcagcagcgttgaggtcaacacagatgtagctgatgcagacatgaaggattcaacagacatgggagagggagaacaagaaacaactgtaacaattgatgacagcaataatggtgacaatctgaaaaccgaagagggaactaaagttgattgcgagtctggtgaagtcacaactagtagtagttataaaaagttaaattctacttccatccgtacggaacattcagattacccactgcatcgctgtatgagaattgttcctcatgaccagaacagtggggcatttttcattgcagtccttcataaactctctcccctgaatgagaaccaggtggtagatggtgtcagaattgaccagaatatctcaaaagacaagactgagaaacttgagaaggatttagtatcacataaggcatcatctgaagaaaatactgtgcatcagcaagtgattgataatgcaaatgttctggatggagaacagaatagagacagggataacaaaagttcagaagataagagctcagaggattctaaggtcaatgttaatgaggcagcaaagggtcaagcaggaacaagggataggaggaggcagcaaaaccaaggcaggtggagaggggttgaccctgtgatattttttaaagatgaagtgacagtcaaaagcattgtatctttctatggtatcacagattcatttccacttgaaggtcatctggtgactagaaaccctgatactagtcatgttaagagaatatactatgtgtcaaaatctgttcaagatgttttggagctcaacataaaaattggcgaaaggctaaagatcacctcactgggcctaaagatttttgaaaggcagtcttcaaaggaaggctccccatgcacatttcggttgtcatcagagggattgccgctcctgcttccatacatcacaaaacagattctatatgcatctgcaattgacttccaacatcttttacagtacaggactattaagtttcctgatttcgtggatgcaaaatttggtgaggaagcttcagctttgcttccaggttgctgtgttgtagttttacgtgaagggcatcaggatataggatccatagctacagatccctcggccattgccattgtttgctggaaaggaaagaccaatttgtgcgtcatggtttctccgctagatggtaaagaattgcttgagaggatttctttgcgccatgggctcaaaatccccaaaggggataaagagaaacccagccaggagattgctggatcagacgagctgcttgattgtgccactgaggtggacgatcaagagtctcttcctgaaagcaaagcatctgacatcgaaatttcagatgctaaggaggctgagtagcttttgttttatgtcactacgcatattacacaggaggtagctgtatcctcgagatggctattagcttttttaagtcacttcggttgccaagggagagagatgatagcccaccacatgggaatgacagactcaaaacaccatctggtaatcgttcacggtgacacagaatctatagacttgtaacttcttggttttatttcttcgagaggatgtattgcatcgattttaatttgttgcactcaacacagaatctagtaaagattgagaaaaacattttttttgag

SEQ ID NO: 141112 - DNA, 2536 bp, Zea Mays
atggcgtccgggcagaagcagcagcagcacctccctaacgtgccgagatggacgccgagcccgccgcggcgccaggcccgcggagacgcgcacgacgaagaggacgcggagtcggcgctgggagcgtcgtcgtccatgcgcagcaccgacgaagcatcgttccccttcggcagcggccgcgcgcgctcgttcccgttcccgctgactcagccctcgctggagatcagcgtggtggcggcggcgaacgggacagccggtagcggcggcggcggcgccgatggccccgtggcccgcgagaagtcgctgcgccgggccgacgaaggcgtggtggtatcctgggaggacctgtgggtgtcggcggccggcggtaataagggcggccgcgtgcccatcctctgcggcctcaacgggtacgcgcgccccggcgaggtgctcgccatcatgggcccgtccggctgcggcaagtccacgcttctagatgctttggcagggaggctgggttctaacgtgagccagaagggagacattctgatcaacggcctgaggcagaagctagcctacgggacatctgcgtacgttacgcaggaggacgtgctgatgacgacgctgacggtgcgcgaggcggtgcactactcggcgcagctgcagctgccgagcgcgatggcggcgcccgccaagcgcgagcgcgcggaggagacgctgcgggagatggggctggaggccgcggcggacacgcgcatcggcgggtggatgcacaagggcatcagcggcgggcagcgccgccgcgtgagcatctgcatggagatcctcacccgccccgcgctgctgttcctggacgagcccaccagcggcctcgacagcgccgcgtcctaccacgtggtcagccgcatcgcgcgcctggcgaggcgcgagggcatgaccgtggtcgccgccgtgcaccagcccagcaccgaggtgtacggcctcttccacggcctctgcctcctcgcctacggcaggaccgtcttcttcggcgccgccgccgagaccaaccaggtaaacaactgccaaagagaagtccgcatacaacaacgttctggtacgttctttgctctgagtggattcccctgtccatcactgatgaacccttcggaccacttcctgaggaccatcaacaaggacttcgacaaggatatcgaagaaggcctgaacggagagaccaaaatgaccactgccgaagcaatcgacacgctggtgaactcgtacaaagcctcggcctacatggagaaagtgacgaggcagatagccgacacgcgggaagctggaggggcggtggtgaagaaggaatggcaggcaagtttcctgacgcagtccttggtgctcaccaagaggtccttcgtgaacatgtacagggacctgggctactactggctgcgcttcgccatttacatcatgctgtgcctctgcgtcggcaccgttttctacgacgtcggccacagctacggatccatcctggcccgtggctccctgctcaatttcgtcgccgctttcctcaccttcatggccatcggcggcttcccgtcgttcgtcgaggacatgaagatcttcgggcgggagaggctgaacgggcactacggcgcggcgccgttcacgatcgccaacacggtgtccgcggcgccgtacctggcgctcatctccgtggtgccgggcgccatagcctactacctggtcggcctccagagcagcttcggccacttcgcctacttcgcgctggtgctcttcacgaccatgatggtcgtcgaggggctcatgatgatcgtggccagcgccgtgcccgacttcctcatgggcatcatcaccggcggcggcatccagggcgtcatgatgctcaacggcggcttcttccgcctccccgacgacctgcccaagcccgtctggcgctaccccatgtactacatcgcgttccacaagtacgccaaccagggcctgtacaagaacgagttcctgggcctcaccttccccagcaaccaggcgggcggcagtgccactgccgccaccctctccggcggccagatcttgacggacttctggcaggtggagatggggtacagcaagtgggtcgacctcgccatcctgtgcgggatggtcgtgctctacaggatgctcttcttggctatagtcaagctcactgagaaggtgaagcccatgatcaagggattcaggttcaggaacaccgcgcagtccgtgcacgtagtcgacagaggctccggcagtccatgaatgatgaatccacgacacagccgatcgacgacaaagcccatgaagaggcaacgcgcggtacttgtcaaccgtagatgtgcgatatgtatagccagcgaagagccagcagtgcaataatggatatgcaagcgaagtacgtgcaatattgtcactgtcggaatatggttctttgtcaggtgcaatgaatatgtttgtgacactcggcaaaatagtctgttccgatattatgtcattatgttctcattgacaacgaggacatatatttaagcttgcgtaa

SEQ ID NO: 141113 - DNA, 2073 bp, Zea Mays
gttttcaaaattaatggggtggtgcaccataagattggcaccctacttccacagcgtgggacgcaaccaaaatttgcccagttgtacacatatgacacggaacatgagacccagaataggctaggcatgtttgagaccgatgatggcgctggcggccagccagaccctgaaatggcgtcgtcgctgctcgatatgcttaatgaaaacaactcgcttgtcaaagcgttccgatacgcgagagagcgccttgagcgtgagggtgatcaaaagataacactcagattgctaggctgcaacacacgccatgatgtacaatacaacctaccctcaaatggcgagatcgctgccattatatacccattgttgtttccttacggtgaacatggcttccatcttggtattaggtactttggtgctgacgatgttggctcatcaaagcgaaaatatgttacgatgcttgagtttgtaaggagacacctgcactacaggctggacgagccgaacccatacacatgttacggtagattaagtgatcaaatagatgtcgatgcgtattcaactatcgagggcaacaggctacagttcatagcaagccatcaaagtgatctacggtcagaaactgtgcagggcatagccgacgccattgataagggctctgttaatgctgattcggttggcggtcgggtagttgttcctgccagcttcactggtggtagaaggtaccatgtcatgaattaccaggacgcgatggctatatgtaggattagagagggaaagacatttggttccatacttgcagtcctgtacactgttgaattccagaagcgtggcttgccgcatatacactgccttgtgtggctagccgatgggaacaaagaatttagtgcttctattgttgacagattcatttgtgctgagattcctgatatcgcctctgaccctttagggtttgctttggtcgatgaattcatgatgcatggtccctgtggtgctgacaacagaagatgcccatgtatgaaaaacgacaagtgcagcaaaaatttcccaaagcccttccaagatgagaccatcttagacggctttggctttactatctataggcgcaggcctgatggcagaaatgttctcaagaatggtgtgagacttgataatagaaacgttgttccatataatatgcacctcctcaaaaagtataatgcgcacattaacgttgaatggtgcaacaagtcaaacatgattaaatatctattcaagtatgttacgaagggaatcgatagagcaaaggtgtactttgaaatcaccgcaaacacgtctaacgcgtcgcctggtgcgcagatagcaccgccgaatgaaatccaggaatacatcgatgctaggtatttgtctacatgtgaggcattgtggcgcgcatttgaatatgacattcactttagagtgccttctgttgagcgacttgttgtacatcttcctgggttaaaccacgtgcgctacgaacctggcacggacctacatgcgttgcttgctagctctgcggccaaaaacacaatgctaactgaatggttcgagactaatttgaggcatgaacaagctagatgcttaacgtattgcgacttcccaaagaaatggacatgggatgcctcagctcgatgttggaaatcgaggtctcgctgcacaaaaattggccgcatgtactatgtgcatcctactgctggcgaactatactacttacgcatgctattgatgatagttaagggttcaacaagctatgttgatatcaggacgtacaatggtcaagtgtatgacacatttcgtgatgcgtgcgaggcgcgtgggttgcttgagagcgataatgagtggaagatgttgtttgacgaggcgatcatctctgcgtcgtcgtaccaacttagacagctttttgtgaccgtagttatgttctgccctgttggtaacgtgcgtgcattatttgatacatactggctatcttttacagatgacattggtcgacaacttagagatgcgttgggaaatcctaactacaacataccgcaggaacaactcatgtccctcctgata

SEQ ID NO: 141114 - DNA, 526 bp, Zea Mays
cccacttccccactaccctttcaagtttcctagaaattacccaccattgccattataatctaccgaatcgtttttgcgcctatcggatcggagaagcccgccgtccaacagaaacacgccagataatctgggtaaacaaacatgactactcagattatataatccaaattatataatccagattatataatcctccaaaaataatccagattatataatctattggggtaaacaaacaggcccttagcttagttttaactggtgggtttaaggggtagggatattgcgtgcgtgcgtgcatgcatgccgcatgcagcgtcggcttgctacgggtaccagtacatgggcacgatgatcgcggcggcgagcgatgtcttctggaacggcggcgcggcctgcggcgaccggtacgcggtcagttgcaagggcggcaccaacgagggcgtgccgcacccgtgcaccggccggagcgtcaccgtccagatcgtggacctctgccccgccggctgccagggcaccatccagg

SEQ ID NO: 141115 - DNA, 594 bp, Zea Mays
atgaggcgagagtccaaggccacatggactacaggtggaaatacctggaacactgcattgcaagcaaatgttctccccgctgcctttggtagcaacagaaggtcaaggagtgagaacaagaaagccttctttgaagttgggttgttgaggtgctctgaagaacttactggggacaatgctgaagagtgcaacagtaatgaatctgggtggacgatgtacctgggctccccagtgaacagtgatgatctcaaagccaatggcagcaaatggagtaatgttggcagtggctgtagcaatggtagaagcaaaaacgacaacatggattatgatgatggagactatgattcattagcttctgatgcttccacaggaccagctcaagtgaaggtgcttaatggcaaggaaaagaaaattcatgagaaaagagacaattccatagaagaacaagatagcgatgagcaagacgaacaaaccaagctccctaacaactgtgacaaaaaggcaggcaagatgaagaaggaagagaagaccaccagaaggagccacaacaagagacgtagttcctgttcttcacgaacaagcttctttaggtaa

SEQ ID NO: 141116 - DNA, 477 bp, Zea Mays
atggaggtgagagcatatgtccttgcattgctgcagagggctcgcgacggcccaagcacttcaagggacacgtcggctacaagcgccacagggaagcgtcgccacggaggcaaggtgcataccaaaagaagaaataagatagatgtacaacatgcaagtgatcttgtctttgttcaattaaatgcaagattgcttagcaaaaaagagagaagcaagactaaaaatgtcgatgtacttctacctaatgttgcttctaatgttcaagactggccggttgaaggatgtgacgatattgatgaagaaaatgaagctatgcaactttgtagaagttcaagagttagagaacttcatgaagatggttttgagtctgatagtgaatgtgaagacatcaaaatacaggatgaggatgttgagtttgaatcagaccatgatgaagtgctcccaacagatgattatgagcaagacgatgaagattga

SEQ ID NO: 141117 - DNA, 1970 bp, Zea Mays
gtgccgtgcgttctcggcgagtcggctctcctgccggccgggcgcgacccagtggccgcgtggcgcgcgccgtgctctcccgctccacgcacacgcttcgctgccagagcaatgccgccccctactgtccccttcttcctcacctctactacgctcgccaccaccgcgaagaaaccgcagccgcaatcgccgttatgcgatgcgcaagcccaggccgccgctgcctccctggcctcggcggcgtctgcttcgtacgccgcgcgcatgcggctcaacccgcacctcgcgctccgcctgttcgaccacctgctccgctcgggcgctgacccggaccccgcggcgtacgagctcgctttcgcgtcctgcgcgcgcgccagggaccgtgctacggccgcgcagcttcacgctcacgccgccaagcgcgggctcgtcgcctcgcaccgccgcgtgcgctgcaggctcgtccacgcctacgccgtttgcgggatgctcccccacgcgcgcagggtgttcgacggcggcaccgacaacgacatggtcgcctggaactgcctgctgcgcgggtacgcgcaggagggtggggacgaggacttgctccgcgatttctttgccaggatgccgtcccgggacagcgtctcatggaacacagtcctttcatggtgcgtcgtgaatggggagtatgatgaggcaatcgcagtgttccgggagatgcttgcgagccaggagtgtcagcctgatcgggtgacattagtgagcgttgtctctgcaattgcatacttgggggcacttgcacacggtctttgggcccatgcgtatgtcttcaggaaatgtattgaagttgaggagaaactgagctcagcattgataaacatgtactcaaagtgtgggttcattgagggtgcagtttatgtgtttgacaatgttggaggaaagaggagcttggatacttggaatgcaatgttagctggttttacggcgaatggttacagtgagagagctctggagctcttcaccaggatggagtcaacaaggctgatgcctaacaagattacttttaacactgtactgaatgcttgtagccacggggggttagttgaggaaggtatgaagtattttcagagaatgtctagattttatgggattgaacctgacattgcacattatggttgcatggtggatctgttctgccgtgcagggatgtttgagaaagctgaggagataattcagacaatgccgatggagccagatgcttccatgttgaaggccctattgggtgcttgcagaactcataagaacttagagttgggaaagaaggttggccacaggcttattgaggctgccgcaaatgatcacgccgggtatgtgttgttatccaacatatatgcactagatggcaactggggaggagtgcataaggtgagaaagcttatgttggatcgtggcgtgctgaagacccctgggagcagttcagtggaacttaatggtgtaattcatgagttcatttctggagacaaaagccactcgaggaagagggatatatataagatgctaggtgagatttgtcaacaacttaaaagttcaggatacactcctgacacttcacaagtgctgctagatattgacgatgaagatgtgaaagagagctcactagctctacatagtgagaaactcgcaatagcctttggactgatcagcactgctcctggcacgcctattagggtagtaaataacctccggatctgcggagattgtcataatgccataaaacttataagcaagatttatgggaggtgcataattgttagggatgcaaatcggtttcatcatttcagaaaagggtcttgttcttgcggggattactggtaatattttgatagcaatgatgtttcttctttttagttattatacactaaaatgtatattatacgagacaactgttggcaatggttattattgcctagaggaattct

SEQ ID NO: 141118 - DNA, 2434 bp, Zea Mays
tgccctcccaccctctttcgtagcgcttcttcctatgcctctcgccggaacggaacagcagatagcatcacaatctccagtggctgtgggcatctttccttttcctgccataggctctaggccgtgacgggagctagcttctcgcttgcgtgcgtgcttgctccggctatcatattgcctgcctgcctgcctatgaacctctccggccaatggaggagctacttcttcttctctagcctttctcgtctctgatccacccattgaccttcggtgcgcccggccactctgcgccggcctctcgcgtgcgtctctcgtgtgagtgctacaggcaagcgaagcgatggacatgaacgagagcggcgagaaagggatggagggcaacgcgtcctccggcatcccggtggactggcagacccaattcagcgccgccgccttctcgtgcgcgccgccgcagcagcagcaggttcccatgatggactccgccttcgcgtccgccggcctgtgggcgtccacctcccaggccatggcgctctccgacgcgggcggcaggtcggccgcgcgggccggcttcttggcgccggtccccggtttcctcccgcagggcctcgcccatttccccgtggactccggcttcatcgagcgcgccgcgcgggcttcctgcttcggcggcggcggcggcggcggggtgatggctgccttcggcgcagcagctgatcatcaacccatgaacagcgcgttcagtggatcctcggaggcgctgctggaccaccagaggacgaaggacggcagcgacaagggcgagccggagctcggccggaacggccacgacggggttctgagctcggaggcggctgctgcgggggactgctcgtccaaggggacgtccgactccaagaagaggagaaggcctaacgaggtgatgggaggcgatcaggtccagtcgtcgaacctgcccgccgactcagcgaacgagagcgtgcacagcaaggacaaaggcgaggagagcagcctggcaacaaccaccaccggacccggcaagtcgaaaggaaagggggcgagagagacctccgagtcccagaaggaagactacattcatgtccgagctcggcgcggacaggcaaccaacagccacagcctagcagaaaggttgaggagggagaagattagcgagaggatgaagctgctgcaggacctcgttcctggctgcagcaaagtcactgggaaggcggtgatgcttgacgagatcatcaactatgtccagtccctgcaaagacaagtcgagttcttatcaatgaagctcgcaacggtaaacccaaggctcgacctcaacatagaagggcttctatcgaaagatcttctccgcttccctggcgttccttcgtcttcccttggattctccccggaaatgatgcacccacagctgcagctctcgcagccaggcctgatccagggcggcgctgccggcatggccaatccggacgtgttcaggagaatcatgcaggcacagttaagcgcaaaggacgggtctcagatgccgccccacgcattgaatggggcattcagtgacgtcgcgcagcagcagatggcgtacccgtcgtcccaggacctgagcatcgggccgtcgcaggacgggtttcaaatgtgactgaacatgcccagctgcacatactagtaaaagatgcaaaaaaagggcttcttccatctgaggagtatctgatcggcgaacgtgcgggcgcgcagggggccgcgtatagctgcctgctggtgccgggagcagcagcgcctgctcagcgcgacgccttgaaccgcgtcgacccacggctgtgcctgtgctgctgcatcggtcaggtttttttatcgtgttcagaaggaactgaggaaaagctcgtggcgctggcctgtggcgttgcctggatagatggctggaaattctgtctgtttcggcggtcgcgtgcattcatggcatggcgcgcagtgcagtaacagtgggctgcgtgttggcacttggcacagcgaccaaatgagctgctgcaggatgtgatgcaacgcgaggagccttgttttgttagtagtttccaatgctttttttttgtttttgtttgcataatagctaagggtgcaagaaaacactcataaatttgggggtggggggcggcggtccggcgatgtctatgttgaaacatcatacatttggcaaatttctccttgcgccacaaatcgaaaggaggatagatggatgctacgacgtacgatcatgctcgcggcgagaagatcgttcgtcggccatcgcaggctgtctgtgaggcctaacaaacggtagggtgcacgatcgacggactactgggaggagatgtgctgtgccgtgtgcccgtgcatgtcacgtctactgtctagagatacagagatgtgtccttctctggcttcgacttgcgac

SEQ ID NO: 141119 - DNA, 2541 bp, Zea Mays
tgccctcccaccctctttcgtagcgcttcttcctatgcctctcgccggaacggaacagcagatagcatcacaatctccagtggctgtgggcatctttccttttcctgccataggctctaggccgtgacgggagctagcttctcgcttgcgtgcgtgcttgctccggctatcatattgcctgcctgcctgcctatgaacctctccggccaatggaggagctacttcttcttctctagcctttctcgtctctgatccacccattgaccttcggtgcgcccggccactctgcgccggcctctcgcgtgcgtctctcgtgtgagtgctacaggcaagcgaagcgatggacatgaacgagagcggcgagaaagggatggagggcaacgcgtcctccggcatcccggtggactggcagacccaattcagcgccgccgccttctcgtgcgcgccgccgcagcagcagcaggttcccatgatggactccgccttcgcgtccgccggcctgtgggcgtccacctcccaggccatggcgctctccgacgcgggcggcaggtcggccgcgcgggccggcttcttggcgccggtccccggtttcctcccgcagggcctcgcccatttccccgtggactccggcttcatcgagcgcgccgcgcgggcttcctgcttcggcggcggcggcggcggcggggtgatggctgccttcggcgcagcagctgatcatcaacccatgaacagcgcgttcagtggatcctcggaggcgctgctggaccaccagaggacgaaggacggcagcgacaagggcgagccggagctcggccggaacggccacgacggggttctgagctcggaggcggctgctgcgggggactgctcgtccaaggggacgtccgactccaagaagaggagaaggcctaacgaggtgatgggaggcgatcaggtccagtcgtcgaacctgcccgccgactcagcgaacgagagcgtgcacagcaaggacaaaggcgaggagagcagcctggcaacaaccaccaccggacccggcaagtcgaaaggaaagggggcgagagagacctccgagtcccagaaggaagactacattcatgtccgagctcggcgcggacaggcaaccaacagccacagcctagcagaaaggttgaggagggagaagattagcgagaggatgaagctgctgcaggacctcgttcctggctgcagcaaagtaggtctatcttccacacagaagaaagaaaaggggaacagaacttgcttgtgtgtttttatgttggttttcattacaaatgaacatctctgtccattggaatccaggtcactgggaaggcggtgatgcttgacgagatcatcaactatgtccagtccctgcaaagacaagtcgagttcttatcaatgaagctcgcaacggtaaacccaaggctcgacctcaacatagaagggcttctatcgaaagatcttctccgcttccctggcgttccttcgtcttcccttggattctccccggaaatgatgcacccacagctgcagctctcgcagccaggcctgatccagggcggcgctgccggcatggccaatccggacgtgttcaggagaatcatgcaggcacagttaagcgcaaaggacgggtctcagatgccgccccacgcattgaatggggcattcagtgacgtcgcgcagcagcagatggcgtacccgtcgtcccaggacctgagcatcgggccgtcgcaggacgggtttcaaatgtgactgaacatgcccagctgcacatactagtaaaagatgcaaaaaaagggcttcttccatctgaggagtatctgatcggcgaacgtgcgggcgcgcagggggccgcgtatagctgcctgctggtgccgggagcagcagcgcctgctcagcgcgacgccttgaaccgcgtcgacccacggctgtgcctgtgctgctgcatcggtcaggtttttttatcgtgttcagaaggaactgaggaaaagctcgtggcgctggcctgtggcgttgcctggatagatggctggaaattctgtctgtttcggcggtcgcgtgcattcatggcatggcgcgcagtgcagtaacagtgggctgcgtgttggcacttggcacagcgaccaaatgagctgctgcaggatgtgatgcaacgcgaggagccttgttttgttagtagtttccaatgctttttttttgtttttgtttgcataatagctaagggtgcaagaaaacactcataaatttgggggtggggggcggcggtccggcgatgtctatgttgaaacatcatacatttggcaaatttctccttgcgccacaaatcgaaaggaggatagatggatgctacgacgtacgatcatgctcgcggcgagaagatcgttcgtcggccatcgcaggctgtctgtgaggcctaacaaacggtagggtgcacgatcgacggactactgggaggagatgtgctgtgccgtgtgcccgtgcatgtcacgtctactgtctagagatacagagatgtgtccttctctggcttcgacttgcgac

SEQ ID NO: 141120 - DNA, 784 bp, Zea Mays
ggttatcacaataacccgactctcggacccacgacgagttaagcccggagggaaaaaggacaaatcacacaaaggcacagggaatcgcgccaccgtgggacgcgtacggcgcaccgcccgcccgccggatctgcgccggcgacgcgcccggacgtcggatctacgccgccgcaggaggggggaggcggcgctgtggccgttctctgcccgcgagcgcccggatccgtcccgccggtgagtccccgcgccagctcctcggcctgtgatgaatgtcgttcgacgggagccgcagcgggcggtgctactccgggctcgctaaatttccgcaccaccgcgaacgagagaaaaagggccaggtccggtcactggatgccaccgctccctccctagcccctgacaacgatctccaggcattcgcttccgcagtccgcaccaccgccatttcacgcacaccgccgctgggtgcgcggacgcgtggtcactcccacagtccaaactccacagtccccgcatctgccgctattgctgtgctcggctcggcacactcagactcggagtgagagcgaccaagaagaggggatgatggagaagtgacacggcgccggaggttgcaccctgctccgcctcctcggcgccacagccgccttagcggttcgacttagtgctacttcatttgtgttcttgattttcttcttctttttaggaaagaacatctctgtgttgagttcaacaataatgctaaaactgggtaaaatcaattgaaataatgtttttcagagatgca

SEQ ID NO: 141121 - DNA, 881 bp, Zea Mays
ggttatcacaataacccgactctcggacccacgacgagttaagcccggagggaaaaaggacaaatcacacaaaggcacagggaatcgcgccaccgtgggacgcgtacggcgcaccgcccgcccgccggatctgcgccggcgacgcgcccggacgtcggatctacgccgccgcaggaggggggaggcggcgctgtggccgttctctgcccgcgagcgcccggatccgtcccgccggtgacttcatctccgctaatccaacggataggcaaaactctaatctttgtcaaccatcaagttgatgcagaggtggtgaaaacatcttctcttctccaaagactgctgactgcaagttgcaaaagtttgtcttcagcttgctgtgttctttcttccctctctggcggagtacacgagaagtttgtagatataggcactaggcagctcctttcagctcttctatgtccagggatttggactgtcctgttcagacacagatggctgtggcagtcctggaccggagcttcagcagtgaatatcctggaggcagcagaactgaggggaggcaactgagctggaagagagtctttgtgcaaactgacaatggttctgtccttggcattgagctggagagaggagaaaatgtgcaaactgtgaaaaagaagctgcagatagctctcaatgtgcccactgatgagagttcattgacctttggtgacctggttctgaatgatgatcttagcagcattcgcaatgactcaccgttgcttctcaaaaggaatcagattcaccgaagcaattccacaccttgcctctcccctactggccaggatgtttggcaaagagaccggagtggacccattgaaatacttggctgttcaagccct

SEQ ID NO: 141122 - DNA, 929 bp, Zea Mays
ggttatcacaataacccgactctcggacccacgacgagttaagcccggagggaaaaaggacaaatcacacaaaggcacagggaatcgcgccaccgtgggacgcgtacggcgcaccgcccgcccgccggatctgcgccggcgacgcgcccggacgtcggatctacgccgccgcaggaggggggaggcggcgctgtggccgttctctgcccgcgagcgcccggatccgtcccgccggtgacttcatctccgctaatccaacggataggcaaaactctaatctttgtcaaccatcaagtatatatatatatatcaatcaaaatggtcctgtgatatcgagcttcagttgatgcagaggtggtgaaaacatcttctcttctccaaagactgctgactgcaagttgcaaaagtttgtcttcagcttgctgtgttctttcttccctctctggcggagtacacgagaagtttgtagatataggcactaggcagctcctttcagctcttctatgtccagggatttggactgtcctgttcagacacagatggctgtggcagtcctggaccggagcttcagcagtgaatatcctggaggcagcagaactgaggggaggcaactgagctggaagagagtctttgtgcaaactgacaatggttctgtccttggcattgagctggagagaggagaaaatgtgcaaactgtgaaaaagaagctgcagatagctctcaatgtgcccactgatgagagttcattgacctttggtgacctggttctgaatgatgatcttagcagcattcgcaatgactcaccgttgcttctcaaaaggaatcagattcaccgaagcaattccacaccttgcctctcccctactggccaggatgtttggcaaagagaccggagtggacccattgaaatacttggctgttcaagccct

SEQ ID NO: 141123 - DNA, 974 bp, Zea Mays
ggttatcacaataacccgactctcggacccacgacgagttaagcccggagggaaaaaggacaaatcacacaaaggcacagggaatcgcgccaccgtgggacgcgtacggcgcaccgcccgcccgccggatctgcgccggcgacgcgcccggacgtcggatctacgccgccgcaggaggggggaggcggcgctgtggccgttctctgcccgcgagcgcccggatccgtcccgccggtgacttcatctccgctaatccaacggataggcaaaactctaatctttgtcaaccatcaagactgtagagactatgaacaacactcattgtcttcttctcaattgaataagggagctgctacatataattgcattccaaggaaaaaaaacaatattgatgcagaggtggtgaaaacatcttctcttctccaaagactgctgactgcaagttgcaaaagtttgtcttcagcttgctgtgttctttcttccctctctggcggagtacacgagaagtttgtagatataggcactaggcagctcctttcagctcttctatgtccagggatttggactgtcctgttcagacacagatggctgtggcagtcctggaccggagcttcagcagtgaatatcctggaggcagcagaactgaggggaggcaactgagctggaagagagtctttgtgcaaactgacaatggttctgtccttggcattgagctggagagaggagaaaatgtgcaaactgtgaaaaagaagctgcagatagctctcaatgtgcccactgatgagagttcattgacctttggtgacctggttctgaatgatgatcttagcagcattcgcaatgactcaccgttgcttctcaaaaggaatcagattcaccgaagcaattccacaccttgcctctcccctactggccaggatgtttggcaaagagaccggagtggacccattgaaatacttggctgttcaagccct

SEQ ID NO: 141124 - DNA, 2621 bp, Zea Mays
gtccacgtcgccgcccaccccctcccctcaaatctgaaatccaatcgactcattaaccccggagctcggcagagagagagcatcggcacggcgcggtggttgattaaccagaaccagaagccagcacgtgcgcgccggggctggtccgccgcctgggtctgcgtacatatgcgtctgtctgagcgggcgccgcgaaggaaactgacggggggctttgcttggcgtataaagcgtctcgcgagcgcctaccggcagccatagctggtgagtagtagtagtatactggaggaggaggaggaggaggagagggagaagacgaagcgaagccagggcaaggtcgtcggagccggagagggaggaaggtggagaacctctacctgcgtcacgtgacaactgtctcctgacccacaggagcggcggactccctctgctcgccgcgcgcggcctgttccggttcggtcggcggccgacggccggcggcggaggcagcaggaagctactgtaccaaccggcccaagagaattgcgggtccagaggcagtgatggcggggcgctacgattgacgtgctacgattatgggcatccaagggaacaaggcggcgacgcacgagcacgacttcctctcgctgtacgccgccgccgccgccaaggacgctcctctcctgctacacgactccaaggcgccgcctccttctcaaggtaatttcctcttgaagacgcacgacttcctgcagccgttggatcagaagccgggagcgccgccggagccgtcgccgctgcccgcttccgccgcggagagcaggcaccagccgcagcagcaggtcgtcgtcgcgaaccagcacgcgctgcccctgcccggcggcgtcggcaccttcagcatcagccccgcgcccgtgtccgtcgcgctgccggcggccgtcgtcaagtcggagccgccgttcgtgctctggggccagcctgccgcgacgctccatccgggcgcgcgagggcaccagcagcagtgggcgctccccttcgccggcgccgggcaggtcaggctgccgccgcagcaggcgcctccggatagaaagggccggggcggcgccggtggcggcgtcatggagtctggctccagatccagcggcggggcggggttcgacgacgacgacggcctcacgacgcgccgcgaggtctcctcttcgctccaagatttgacagtaagggtggaccggaagggtgggagctgcagcgatggtggtacggatcagcggccaaacacaccgcggtcaaaacactcggccacagagcagcgcagacgcagcaagatcaatgataggtttcagatacttagggagctgttgccacacagtgatcaaaagagagacaaagcaacatttctcttggaggttattgaatatatacggtttttgcaagagaaggtgcaaaaatatgaggcaacatttccagaatggaaccaagaaaatgcaaagatgcttccatggtcaaatatgtattttcgatcattctggaaaaatgcacagagtaaaggccaaatctcaggagattccccgcctgacccttcacatttcatgagaaatggatcctcccctggatctaatttcactgggaaacttgatgataatcacaacatagtgacatctgcagctgcatcaggggcacaggatcaggtagaaaccgaccacatggctagcggatgctacagatcagcagaaactacggcgaattttacaaataatgctatgtctcagtcccaacctcaatggactggtccgtcccctgtggatgactctgcagtgaacagtgagacgcttaacaaccagcagttggtgattgatgaaggaacaatcagagtgtccagtaactattcccaagagttgcttaactcgttgactcatgcccttcaaagctcaggtgtagatttgtcccaagccaacatctctgtgcagatcaacatgggaaagcgtgccgccaagagacccgctgctggtgtatccagcaactccaaggaaccagctgatccggcatctagcaacgaattagggcatcagttgacgctgtcgggtgccggtgccgactgcctctctcacgcaacaaagcggcataaacggagcaacagctgatggccgctctccctcacctcgctccccgaccgacggacggacggatgacggattggtgacattcttcttttccctcccagccaacggggaggctcgtggattggctggctggctgtacattgtgtgctgtgcttggtgacaagctgagacctccggcgtattctttgattcgatcacccccgcgcccgccatcccattgtttacgtagagaagaggaaccgtggagcttttcatcgcggattgtgaagccgctcttgtacacaggcttccattcaatgtgagaagcttccccctccttgacacatctccgtgttgtagacctgtagccacctgtaagatatgtgatgatgcccaacaatcaactctgccagaccactggctagtcgagttgttgggttactttatgtacggtgttctgttatgctgggagtgtaattgccccgccgtctcagtgaactgttcgtcagttgtgtgcttgtttgtccaacggtttactatgtg

SEQ ID NO: 141125 - DNA, 2366 bp, Zea Mays
cgcgagcgcctaccggcagccatagctggtgagtagtagtagtatactggaggaggaggaggaggaggagagggagaagacgaagcgaagccagggcaaggtcgtcggagccggagagggaggaaggtggagaacctctacctgcgtcacgtgacaactgtctcctgacccacaggagcggcggactccctctgctcgccgcgcgcggcctgttccggttcggtcggcggccgacggccggcggcggaggcagcaggaagctactgtaccaaccggcccaagagaattgcgggtccagaggcagtgatggcggggcgctacgattgacgtgctacgattatgggcatccaagggaacaaggcggcgacgcacgagcacgacttcctctcgctgtacgccgccgccgccgccaaggacgctcctctcctgctacacgactccaaggcgccgcctccttctcaaggtaatttcctcttgaagacgcacgacttcctgcagccgttggatcagaagccgggagcgccgccggagccgtcgccgctgcccgcttccgccgcggagagcaggcaccagccgcagcagcaggtcgtcgtcgcgaaccagcacgcgctgcccctgcccggcggcgtcggcaccttcagcatcagccccgcgcccgtgtccgtcgcgctgccggcggccgtcgtcaagtcggagccgccgttcgtgctctggggccagcctgccgcgacgctccatccgggcgcgcgagcagggcaccagcagcagtgggcgctccccttcgccggcgccgggcaggtcaggctgccgccgcagcaggcgcctccggatagaaagggccggggcggcgccggtggcggcgtcatggagtctggctccagatccagcggcggggcggggttcgacgacgacgacggcctcacgacgcgccgcgaggtctcctcttcgctccaagatttgacagtaagggtggaccggaagggtgggagctgcagcgatggtggtacggatcagcggccaaacacaccgcggtcaaaacactcggccacagagcagcgcagacgcagcaagatcaatgataggtttcagatacttagggagctgttgccacacagtgatcaaaagagagacaaagcaacatttctcttggaggttattgaatatatacggtttttgcaagagaaggtgcaaaaatatgaggcaacatttccagaatggaaccaagaaaatgcaaagatgcttccatggtcaaatatgtattttcgatcattctggaaaaatgcacagagtaaaggccaaatctcaggagattccccgcctgacccttcacatttcatgagaaatggatcctcccctggatctaatttcactgggaaacttgatgataatcacaacatagtgacatctgcagctgcatcaggggcacaggatcaggtagaaaccgaccacatggctagcggatgctacagatcagcagaaactacggcgaattttacaaataatgctatgtctcagtcccaacctcaatggactggtccgtcccctgtggatgactctgcagtgaacagtgagacgcttaacaaccagcagttggtgattgatgaaggaacaatcagagtgtccagtaactattcccaagagttgcttaactcgttgactcatgcccttcaaagctcaggtgtagatttgtcccaagccaacatctctgtgcagatcaacatgggaaagcgtgccgccaagagacccgctgctggtgtatccagcaactccaaggaaccagctgatccggcatctagcaacgaattagggcatcagttgacgctgtcgggtgccggtgccgactgcctctctcacgcaacaaagcggcataaacggagcaacagctgatggccgctctccctcacctcgctccccgaccgacggacggacggatgacggattggtgacattcttcttttccctcccagccaacggggaggctcgtggattggctggctggctgtacattgtgtgctgtgcttggtgacaagctgagacctccggcgtattctttgattcgatcacccccgcgcccgccatcccattgtttacgtagagaagaggaaccgtggagcttttcatcgcggattgtgaagccgctcttgtacacaggcttccattcaatgtgagaagcttccccctccttgacacatctccgtgttgtagacctgtagccacctgtaagatatgtgatgatgcccaacaatcaactctgccagaccactggctagtcgagttgttgggttactttatgtacggtgttctgttatgctgggagtgtaattgccccgccgtctcagtgaactgttcgtcagttgtgtgcttgt

SEQ ID NO: 141126 - DNA, 1704 bp, Zea Mays
tgtttgcgaaataaaaaaaaaatagtagcaaaagctaaaggcgggcgcttttgtgtgtttcttgtgttgtgggtctctccaccaccaccagcagggcaccagcagcagtgggcgctccccttcgccggcgccgggcaggtcaggctgccgccgcagcaggcgcctccggatagaaagggccggggcggcgccggtggcggcgtcatggagtctggctccagatccagcggcggggcggggttcgacgacgacgacggcctcacgacgcgccgcgaggtctcctcttcgctccaagatttgacagtaagggtggaccggaagggtgggagctgcagcgatggtggtacggatcagcggccaaacacaccgcggtcaaaacactcggccacagagcagcgcagacgcagcaagatcaatgataggtttcagatacttagggagctgttgccacacagtgatcaaaagagagacaaagcaacatttctcttggaggttattgaatatatacggtttttgcaagagaaggtgcaaaaatatgaggcaacatttccagaatggaaccaagaaaatgcaaagatgcttccatggtcaaatatgtattttcgatcattctggaaaaatgcacagagtaaaggccaaatctcaggagattccccgcctgacccttcacatttcatgagaaatggatcctcccctggatctaatttcactgggaaacttgatgataatcacaacatagtgacatctgcagctgcatcaggggcacaggatcaggtagaaaccgaccacatggctagcggatgctacagatcagcagaaactacggcgaattttacaaataatgctatgtctcagtcccaacctcaatggactggtccgtcccctgtggatgactctgcagtgaacagtgagacgcttaacaaccagcagttggtgattgatgaaggaacaatcagagtgtccagtaactattcccaagagttgcttaactcgttgactcatgcccttcaaagctcaggtgtagatttgtcccaagccaacatctctgtgcagatcaacatgggaaagcgtgccgccaagagacccgctgctggtgtatccagcaactccaaggaaccagctgatccggcatctagcaacgaattagggcatcagttgacgctgtcgggtgccggtgccgactgcctctctcacgcaacaaagcggcataaacggagcaacagctgatggccgctctccctcacctcgctccccgaccgacggacggacggatgacggattggtgacattcttcttttccctcccagccaacggggaggctcgtggattggctggctggctgtacattgtgtgctgtgcttggtgacaagctgagacctccggcgtattctttgattcgatcacccccgcgcccgccatcccattgtttacgtagagaagaggaaccgtggagcttttcatcgcggattgtgaagccgctcttgtacacaggcttccattcaatgtgagaagcttccccctccttgacacatctccgtgttgtagacctgtagccacctgtaagatatgtgatgatgcccaacaatcaactctgccagaccactggctagtcgagttgttgggttactttatgtacggtgttctgttatgctgggagtgtaattgccccgccgtctcagtgaactgttcgtcagttgtgtgctt

SEQ ID NO: 141127 - DNA, 1665 bp, Zea Mays
tgtttgcgaaataaaaaaaaaatagtagcaaaagctaaaggcgggcgcttttgtgtgtttcttgtgttgtgggtctctccaccaccaccagcagggcaccagcagcagtgggcgctccccttcgccggcgccgggcaggtcaggctgccgccgcagcaggcgcctccggatagaaagggccggggcggcgccggtggcggcgtcatggagtctggctccagatccagcggcggggcggggttcgacgacgacgacggcctcacgacgcgccgcgaggtctcctcttcgctccaagatttgacagtaagggtggaccggaagggtgggagctgcagcgatggtggtacggatcagcggccaaacacaccgcggtcaaaacactcggccacagagcagcgcagacgcagcaagatcaatgataggtttcagatacttagggagctgttgccacacagtgatcaaaagagagacaaagcaacatttctcttggaggttattgaatatatacggtttttgcaagagaaggtgcaaaaatatgaggcaacatttccagaatggaaccaagaaaatgcaaagatgcttccatggagtaaaggccaaatctcaggagattccccgcctgacccttcacatttcatgagaaatggatcctcccctggatctaatttcactgggaaacttgatgataatcacaacatagtgacatctgcagctgcatcaggggcacaggatcaggtagaaaccgaccacatggctagcggatgctacagatcagcagaaactacggcgaattttacaaataatgctatgtctcagtcccaacctcaatggactggtccgtcccctgtggatgactctgcagtgaacagtgagacgcttaacaaccagcagttggtgattgatgaaggaacaatcagagtgtccagtaactattcccaagagttgcttaactcgttgactcatgcccttcaaagctcaggtgtagatttgtcccaagccaacatctctgtgcagatcaacatgggaaagcgtgccgccaagagacccgctgctggtgtatccagcaactccaaggaaccagctgatccggcatctagcaacgaattagggcatcagttgacgctgtcgggtgccggtgccgactgcctctctcacgcaacaaagcggcataaacggagcaacagctgatggccgctctccctcacctcgctccccgaccgacggacggacggatgacggattggtgacattcttcttttccctcccagccaacggggaggctcgtggattggctggctggctgtacattgtgtgctgtgcttggtgacaagctgagacctccggcgtattctttgattcgatcacccccgcgcccgccatcccattgtttacgtagagaagaggaaccgtggagcttttcatcgcggattgtgaagccgctcttgtacacaggcttccattcaatgtgagaagcttccccctccttgacacatctccgtgttgtagacctgtagccacctgtaagatatgtgatgatgcccaacaatcaactctgccagaccactggctagtcgagttgttgggttactttatgtacggtgttctgttatgctgggagtgtaattgccccgccgtctcagtgaactgttcgtcagttgtgtgctt

SEQ ID NO: 141128 - DNA, 98 bp, Zea Mays
ataagtttttatcaacaggaacaattcttggtgcgttcctgcagaatcgaacaggccctaaggtggtttacttccactctacgactatcactactccc

SEQ ID NO: 141129 - DNA, 102 bp, Zea Mays
ggccactgctcctatggttcagaaagcaatggattacattgtttgacaccaaacattgaaacaaatcaaactaatcaaattagttcatgttctcagatattc

SEQ ID NO: 141130 - DNA, 324 bp, Zea Mays
atgcccctgtcctttggcaactccgccactgaggatttagcggctgccgtgaaccttaagcccaaggccaaggtcaggaagaaccccatgaagcagtcgcgcttcgacttcaccaaggtggacgctgtgcttctccccatcgtcttcctcgttgtccgccccaatgtcggcaagtcagccctcttcaacagcacaaggatattcgtgtatcagcacgccgctatgctcaccaccacacacggagccattagtcatgaaggtcctaaccgttccttcgcaccgccggccaggtgcatgacaacccacctatttagtaactactaa

SEQ ID NO: 141131 - DNA, 1357 bp, Zea Mays
gccagtggtatcacgctcacacaaggagctgaagtgcacgccaccactatccatcctgctccggtgctcccactcccggactcccctcagtccctcactcccacgcgcacgcataggcatagcaagcaccgcgcccagccggccgcacctccgctccgcgctctcgccccgcccacacaatgcgccgcgctgccgcgatcctcctgtccctcgccctcgcagccgccgccaccaccacggcggcggcggccgtggcgaaggctcccgtgccgccgccgccgccgccgccgcctccgaacgtgacggcggagatggccaagggcgggtgcaaggcgttcgcgggcctgatcgcggcgtcccccgacgcgtcgtccacgtaccagtcggccgtggagggcggcatgacggtgttctgcccctccgacgacgccgtgcgcgccttcctgcccaagtacaggaacctgagcgcggacggcaaggcggagctgctgctgttccacgccgtgcccgtgcactactcgctggggagcctcaagtccaacaacgggcccatgaacacgctggccaccgacggcgccgccaggaacttcaacttcacggtgcagaaccggggcgacgtcgtcaccatcgccacggccgcctccgcgcccgcgcgggtcaagtccacggcgctggacgaggacccgctcgccatctacgtcatcagcgccgtggtggagcccgtggagctcttcaagcccgcgccggcgccggtgccagcgcccgcccccgcccccgctagtgtcgcggacgcgcccaggcccggcaaggccgccgcgggccggcgccacccgccgcccgccgcggccgacgcgcccggccccgccgcagaggacaacgcggctcccgtggaccagaaggacgccaagaagagcgcggccgccggcgcgccgtgcgctctgtggtggctcgccgccgcgctggccgcggcctcagcattggcttagcgatcggtgttgtttgtgcctttagttttttcttccggtgttgatccattggcgtgcgatcgtggtttgtgatggcgtatttgcgaggtttgtgcttttttttttctcgatcgggagaaaatagtgtatgcctgcttcggtttagatgtttcttcttgcctttttttttctagttctacctgttaccacaactagagtgaggatcagcgcgtgtttatcaggaggtgtttgtatttttggttatgatgatgacggacgagtgaggtcggggcactgaattgctgctctgtctgacggcgacgagcttctggtggtttccttgttatcgtaggttaaaatcgctggtatggtacgccaatttctaatgttca

SEQ ID NO: 141132 - DNA, 512 bp, Zea Mays
cacaacaagcacagagacaccaagcgttgaactcgcctaagcagctaccaaccaaccctagaaagctagacaccgtacccatggctcgcgctagcgtcgtctttgtcattgctgctctcctcttcgtcgccatggtcgtagcaccgatggccgaggcaaagtctgccgatgcccctgtggctgacgcgccggccgatggacctagcgggccggctgctgcacctggcccccagggtgtcgaaggcctgtcaggcaatgaggatgacgatgatgactccaccaactgaggccacacatgtcggcccggttaaatttggaacaagacatggaagaaaaatgagagcaatgtctttaaaaccatgaatccataataatgtgtggtcatccatggatacatccttgctctccctctttttctttctgtttgattttcaatgtgttatcatgttgttagttaactgtatcgactcatggtatcaaggtctaaaaaattatcgtcgttcttgtgttct

SEQ ID NO: 141133 - DNA, 349 bp, Zea Mays
ttttttttagcatgcaagacggtgtgcccccattttcaaaaggaatttgaagagcctgaactgcctggcttaaagcatctccaaccataagttctaaacaagagtcctaaaacttgaaaaagaacccggtttaaaatgtttaaggctcaattaacttttttaactccaacggtggaccctataataaagtgtttttttggtttttatccttacctgtcaaagtattggagtcattttttctgttttaactccaaaagcagtttcatcggttggaatagagggaaataaaaagatagagcccgaattgatgggtactatatatggcagccactatatataggaccccaac

SEQ ID NO: 141134 - DNA, 610 bp, Zea Mays
atggacggccaaaggttccctacctataatagcccgcctccaccaccatataaacttggcctcaccaccctcgtccctcaccgcaccacaacaagcatagagacaccaagcgtcaaacttgccaagcagctagcaaccaacccaagaaagctagacaccatacccatggctcgcgctagcgtcgtcttcgtcattgctactctcctcttcgtcgccatggttgtggcaccgatggccgaggcaaagtccgctgatgccccctccgccgacgcccccgcccccgctgctgacgcacctgccgatggacctagcggaccggcgggtgcacctggtccccagggcgtcgagggtctatcgggcaatgaggacgacgatgatgactccaccaactaaggccaagcacgtcggtccggttgcatttggaacaagacatggaagaaaagtgagagcaatgtcgtttaaaaccaaaagtccataataatgtgtggtcatccgtgatatgttcttgctctccctctttttctttctgtttgatttcgatgtgttatcatgttcttagcctataattgtatcaattcttgatatcaaggactccaaaattatcgttttt

SEQ ID NO: 141135 - DNA, 691 bp, Zea Mays
agacctgccataagccgtagcatcagctcagttgaatcgccacgcccaaggcacacgtatgtctcgcgcgctcgcgcttgcgatcctcctcctggccgccgccgccgcggtggcgccgctggcctccgccggcaccgaggagttcaccagcgtcgggtccagcggcggcaagatgttcgacagggcggtcggagccgatcccgacccgtccccggccggcggactgccggccgacccggcgcccgacgcacgcccctaaggccacgcacgcaccgtcgtacggccccgtttccgtgtacgcttcacgcgctggtactctcgccgcccgtttccgtcgcccctaagacgtagtatgttcatgaacacgacgcgccttgtacatgtctctggaatgtgcagcctgcatgtgttttgcttgcgagcgtttttcctttggctgtcgaccgatcgtgaatccgtcacgcagcactcagcagtagtgagcttagcattctgccgtcagtgtggaaatggcactctgatgcttgggttccatgttagctccagccagccagccaggctacccgtgtgaaacttgaaattaatcgtgcgtatgttttgagatcgacgctgccatctctccgatccatgtttgttcatgagccatgcttcaccgcgtggacaacgttcctttcctctcaaaaaaaaaaaa

SEQ ID NO: 141136 - DNA, 6573 bp, Zea Mays
cgcgtcccccacaagccacagatcttgtcgtcccattcctcactccagcctcggtcgccctcctgcccgattcaaaattttcgagcctttcaccaccgtcccactcctacacccgcttaccgttgctggccctcttccacctccatgcccaaaccctaagccccgcagcgacctccggagagccgagccggtcagccatggagcatctgttcatgcaggctttcgagagcagggaccgggtggccgcgcaggtgcagcagcaggccgacttctactcccagaccctcgcctccagcctcctcgccgccggtcaccagcccccggaatggctcatcccttccaccaccctgccccaagagctgaatggcaaaccaattgttctgactggaagacagatcacaacaccagctatcaataggaccgtctttctgcctctagctattcctagcactctgtccacaaaatcaggggatccaaatggatatgatggctacccaaacactaattgcactgctatgggtactaaccaacatgaagaggagcatcaagagcagtcttcacttgcccaggagcttactgagtcttgcactgcagacaaaatgttttcaaggattcagcgttccaggacaaggcaaatgcatattgaagatcgtgtgcatggacaggatcaagctgcaaagagcggaagctgtgatgggatgcataggtctaaccttaagactgtggggtcaaacagagctgctgcatcatctttgatgccgtgtgatgatgtcccaaaccttgctgcaacaacatcagatccaggccagggtagtggtttttgtgccattcaagggaagtcaattgacttcttgaagtgcaacaacaatcctgaagaccaaggagttaagttagatggtttcccgccgttgattgtggagaacaaaattatctgttctgatagcgatatcggggtcagtaacaactgttctattagagattcactgggtgcgccacttccagatttctctaagccaaacactgcagatagtgtatgcctatgccaccgaattcctgaaactcacttactggttgagccaaaaatacttcaatttgatgttgctgaatcagtttgtatgaatccttccagtgaacaaacaggtcagcagcaggaatctagtctgaaaagtaaccatcttgatcttgcttttacaaatccttcaagtgaagacccatcttctaccagttctcagggacctcattctatgggaaggttgttgcttaatcatgttaagtcaagaaatttgaaccctgacagtgaaccagtggagcagcaccacaaatatacttcagaatgtggccatcctgatcttactagtatgcattctccaaataagaaaccatctctgacgtgtcctgttgaagcaccgaattctatgggtgaaccattacttcataaggatacagaacatattcctgaaaccaattctttgggaagagcatactccaagttcagccaaccacttaaaatagatacatcaaacagtaatgaaaccaattgttctgtggtcaactcactgcttgataatgatacattgcaggccactgaggatactgacaaactgaaatctcatgtctcacctccatacagtggacctttgcagctacctacccaactagctgatgcaaggtttggggctcatacatcaccaggaatactaccgaacagtttgttaggggtggatgggtgtaatcacctttcaaatttgcaaaaaaatgacacaaatagccgttgctcccgatacaggtctgctgtaagcctagagctgcttccacctcaaaattttatttccactgatgcttgtcaatcaaggctcttgtcttatagaacacaaagtaatgacaaacattccagttctgttgcttctgctatgaatgcctctaaatctgcagatagtaagttacctcaggaacagtatttattggtcagaccatctttggaatttaatggaagtatttcagatgcggaaactcccttgggccgttctcctctgggcatgcaaaatgaaatgctccaagcagacccagtatatgactcagccaattgctctccaggaattttgggtgatgatgctcatgtcagcaaagcctatggtggttctgctgataacagaaagaacatatctgtggttccgaaagttggccccatcagttcatctagaatcagagatatgcaaataacagaaaagaatgtggtcgcttcatcagaaaaaaacaatggaaaactgcaagaaggaaaagcacaagagacccctcatcctaaggatgatgtgcaagtaaatgctgattcatgcacagctgaaaacattgagaaaatgaagtctccatgtacgtcagaatcatgtgaggagaacaacaagcaccaggaggatagaggacatgctcagaagaagtcagctgcagatgtcgtccagatcaatgggggtatgtcatccaaaagaaaacgaatgaagtgccaagacattgcatttcccagttctcaagacacaaatccattatttccgaaccaccaagatggcattggcacccatgtcgtaattgcagaaaaaatctcaatggaaatacaaccttctgatccttacatcctaagaagtacaggatttgatgacttcatgcttctcaaatctgagacaaagaatgatgcagtgaaccacagtatttcagttgcaagtgatgttcaacaaaacgagagttcttctcccaagctaagaaataggttcagcctagctgaggttgctctctgtaactcgtctagagcaaaggctttatcacctaattttagttgtgatatcagcagcaggaatgtagctgaagaaatggacctccaaaactatcaagcacagttacaaaatacttttgatgttgctacaagttctattatgcctagcagatctgatatttctcttgatagtgtggagctctgcagtcaagaggaaaatacttacttaaaaggagagggtttaagtgtttctaattccaatgtggaacattcacggatggctcctcagatggatgaaatattgtctcagagtgtgatactgaatccagcaaattatctcagcactgattcaacaaatatattcctgaattatgccttggatcaacatggtaaacatgcaccttctccagttaagaaattaagttatggctctggcgtagaagctgataggaaatttagaagtgaagatctaacaggatgtttgctatatgatggtactacctcaaggaaaaaggatagtgactctgtgaaatttaatgatgcaatgccacaatttgagagctttgatttttctcttccattggatagctcaactactgaagaaaaggcatttgggagtgttcatgattccatacaatttggtacatttaattcagatcccgctaataaacatgagatgagtgcagtaagtggcatgtatcagctattggcaactatgtcagggaaagctacaaactgcttgtttaatgatgatgaaaggcaacccggtgaaagtattgatggtagtgtaacagatatttttggttcaagtggattgggacataagggttctttcattactcctgattttgcagcgtcatgttcttcaaatgctgcgaacaaaaaggataatggtgaaaatccattgaccccttctgttgaaaagtattgtctggggaaactttcagaaaaaaatggatctgtttcggagcatatgggttcgattcctgagcttttatgcttccgaattgatgaagacaatgacattgcagaaggaaatgattaccgagagatattacctagatccataggcaaccaggagcaatcaggaaggaaagcacttcaggatatcactggactatgtcaaagcattgggaattctgcctcttattcgataggtatgagtatggatacaggtgacacagacatgactgtagaaacttgcagcagtgaactcaatcatcatccagatctcaggaatgatggtgataacaagaagcctaaagaaagttgtggttctttattaaaaaaaggagggaaaatgtctcgctcccttcataacagattaagcaagacagaaacaaggcacatgaatgaagcaaatcctggaaagcgttctaagcctagtaatattgttgctaatgtggcatcttttatacctcttgtgaagccaaaggtgcaaccaacagcatgtgtgaaaaaagatgttagagtgaaagcacttgagacagctgaagctgcaaaacgtcttgaagaaaagaaacgaagtgaacgtgaaatgcgcaaagcagcagcaaaactagagcgtgagaaactgaagcaagagaaagagttaaagcaaaaagaggaagaggaacagaagaagaaaagaggtgctgatgtggcaacaaggaagaggcagagggatgaggaggaaaggagggagaaggagagaaaaaggaaatgcattgaagaagctcgaaaacaacagaagcgacctattgaaagaaaacatgccaacattaacaatgctcatccagaaggtcatgataataaggagctgcagcagaattcggctgaagcggtgaaaggcccagtaaaatttgatgaaatgacaggtcttggaggaaatgccactaacagtaacaatgaaatggttgtgattaccgatgagaggcctgcaatttctggacctaattgtcaggaaaatatcccaaacagtattgaggagtcatacataatgactccatataaagattctgatgatgatgatgatgaggatttcgaacatatagaacattcaaggcgtaggaggaaattggttccttcatgggctcggggagagaacttggagaaaatcttgttatccaattatgttttggaccctaggaaaatctttgcacgaaaacgctcctctgatctctctgaaatttgtcctgcccacataccgcaacgtggtttcagatgagtttctttcctagttcgaaaataggtcccagatgagcttgcattgactgaactcttggttgtacgctgctgcctttcgtcaggcagtttgtgtataagctggtttcactagtttcatatatgtaagaacaacattcttgtaccgttaggcaactgcggcaacgatcgtacgttgttgtacatagtttcgattagttcaccaaggcttttgattcgacgcactccgtgcaaggagatataagctgttggttgacaagagtatttatcttgtctgagcactgtgctcaaaggagcagccatggttgttaaggtgtttctgtgtaacatcatgtaatgccatgatggagtaacttgtacacatggaaacgataaagatcggctatttttaacgcaaagaaatgacgcatcggattgtttaaacgatttggatcaatcatgcaaagttttctttgaataatgtggctggacattatgtacgaagaaaaaggaacgcggatcaaatagaggcaaagaacacggagcaaccatatgccacgagaatgttgcgtagaagaatggcacagtatttcccctgaagttaattatgtccgcgtggtgttcgtgcggcctgggctagccggctgggactgaggaacgcagcacgcagaatatctggtgtcggttgcaaaacgaacatgagacctatagtgacggttgagtccaggtcgcggcgcgtgccgtaggcatagtcggcggccgcattgtggcgagcgggtcgacgacgacgaagcctttgaggatggcaagtcgcacgtcgctcgtcacaatgatcgccgtggagcccggcgccacggacgcctgaactggtgggagtagaggcagagacagcggtgcccctccccgtgtgccgctccttactgctggcctcgtggagcttgtcttgatccttcgccccgccggcgactgtgccacaggtccacctgcagccgcaagtatattgcacatgaaacatccgcataacccacgagaagaagctagctgcactgcatgcgttgcatggccccccgagagatcacggttcggtggcctgtgggcgatgacagtgagagcagagagcacacggccctcgcagaagcgaggcttttcctcgctggtgctgggttgtgctctctctcttctgtcatcgctcccgaggtccactcgaccgctctctccatccctgcccgggcccccccgccggcgtcggccctccccctttgccacggaccctgcaccgagaggaaaacccaataagccatccatatctgccacgccagacgccacaccatcgtgcatgcgatgggactatgggaggagcgccactgcaccagcagatggccacacgcctgaatcatcagagaagtgtgggtggacggaggagtttgcttagcttcgccagttcgccgggagggagagaaacagcgtgaccatggacgacgagactccgatgctcgcccgccgctggcttgtggtgcgtgcttgcgaggagacggtgtgtgtgtgtgtgtgtgagagagagagagagagagagagagagagagagagagagagagagagagagagagagagagagagagagagtgagcagtccg

SEQ ID NO: 141137 - DNA, 5304 bp, Zea Mays
ccaccgtcccactcctacacccgcttaccgttgctggccctcttccacctccatgcccaaaccctaagccccgcagcgacctccggagagccgagccggtcagccatggagcatctgttcatgcaggctttcgagagcagggaccgggtggccgcgcaggtgcagcagcaggccgacttctactcccagaccctcgcctccagcctcctcgccgccggtcaccagcccccggaatggctcatcccttccaccaccctgccccaagagctgaatggcaaaccaattgttctgactggaagacagatcacaacaccagctatcaataggaccgtctttctgcctctagctattcctagcactctgtccacaaaatcaggggatccaaatggatatgatggctacccaaacactaattgcactgctatgggtactaaccaacatgaagaggagcatcaagagcagtcttcacttgcccaggagcttactgagtcttgcactgcagacaaaatgttttcaaggattcagcgttccaggacaaggcaaatgcatattgaagatcgtgtgcatggacaggatcaagctgcaaagagcggaagctgtgatgggatgcataggtctaaccttaagactgtggggtcaaacagagctgctgcatcatctttgatgccgtgtgatgatgtcccaaaccttgctgcaacaacatcagatccaggccagggtagtggtttttgtgccattcaagggaagtcaattgacttcttgaagtgcaacaacaatcctgaagaccaaggagttaagttagatggtttcccgccgttgattgtggagaacaaaattatctgttctgatagcgatatcggggtcagtaacaactgttctattagagattcactgggtgcgccacttccagatttctctaagccaaacactgcagatagtgtatgcctatgccaccgaattcctgaaactcacttactggttgagccaaaaatacttcaatttgatgttgctgaatcagtttgtatgaatccttccagtgaacaaacaggtcagcagcaggaatctagtctgaaaagtaaccatcttgatcttgcttttacaaatccttcaagtgaagacccatcttctaccagttctcagggacctcattctatgggaaggttgttgcttaatcatgttaagtcaagaaatttgaaccctgacagtgaaccagtggagcagcaccacaaatatacttcagaatgtggccatcctgatcttactagtatgcattctccaaataagaaaccatctctgacgtgtcctgttgaagcaccgaattctatgggtgaaccattacttcataaggatacagaacatattcctgaaaccaattctttgggaagagcatactccaagttcagccaaccacttaaaatagatacatcaaacagtaatgaaaccaattgttctgtggtcaactcactgcttgataatgatacattgcaggccactgaggatactgacaaactgaaatctcatgtctcacctccatacagtggacctttgcagctacctacccaactagctgatgcaaggtttggggctcatacatcaccaggaatactaccgaacagtttgttaggggtggatgggtgtaatcacctttcaaatttgcaaaaaaatgacacaaatagccgttgctcccgatacaggtctgctgtaagcctagagctgcttccacctcaaaattttatttccactgatgcttgtcaatcaaggctcttgtcttatagaacacaaagtaatgacaaacattccagttctgttgcttctgctatgaatgcctctaaatctgcagatagtaagttacctcaggaacagtatttattggtcagaccatctttggaatttaatggaagtatttcagatgcggaaactcccttgggccgttctcctctgggcatgcaaaatgaaatgctccaagcagacccagtatatgactcagccaattgctctccaggaattttgggtgatgatgctcatgtcagcaaagcctatggtggttctgctgataacagaaagaacatatctgtggttccgaaagttggccccatcagttcatctagaatcagagatatgcaaataacagaaaagaatgtggtcgcttcatcagaaaaaaacaatggaaaactgcaagaaggaaaagcacaagagacccctcatcctaaggatgatgtgcaagtaaatgctgattcatgcacagctgaaaacattgagaaaatgaagtctccatgtacgtcagaatcatgtgaggagaacaacaagcaccaggaggatagaggacatgctcagaagaagtcagctgcagatgtcgtccagatcaatgggggtatgtcatccaaaagaaaacgaatgaagtgccaagacattgcatttcccagttctcaagacacaaatccattatttccgaaccaccaagatggcattggcacccatgtcgtaattgcagaaaaaatctcaatggaaatacaaccttctgatccttacatcctaagaagtacaggatttgatgacttcatgcttctcaaatctgagacaaagaatgatgcagtgaaccacagtatttcagttgcaagtgatgttcaacaaaacgagagttcttctcccaagctaagaaataggttcagcctagctgaggttgctctctgtaactcgtctagagcaaaggctttatcacctaattttagttgtgatatcagcagcaggaatgtagctgaagaaatggacctccaaaactatcaagcacagttacaaaatacttttgatgttgctacaagttctattatgcctagcagatctgatatttctcttgatagtgtggagctctgcagtcaagaggaaaatacttacttaaaaggagagggtttaagtgtttctaattccaatgtggaacattcacggatggctcctcagatggatgaaatattgtctcagagtgtgatactgaatccagcaaattatctcagcactgattcaacaaatatattcctgaattatgccttggatcaacatggtaaacatgcaccttctccagttaagaaattaagttatggctctggcgtagaagctgataggaaatttagaagtgaagatctaacaggatgtttgctatatgatggtactacctcaaggaaaaaggatagtgactctgtgaaatttaatgatgcaatgccacaatttgagagctttgatttttctcttccattggatagctcaactactgaagaaaaggcatttgggagtgttcatgattccatacaatttggtacatttaattcagatcccgctaataaacatgagatgagtgcagtaagtggcatgtatcagctattggcaactatgtcagggaaagctacaaactgcttgtttaatgatgatgaaaggcaacccggtgaaagtattgatggtagtgtaacagatatttttggttcaagtggattgggacataagggttctttcattactcctgattttgcagcgtcatgttcttcaaatgctgcgaacaaaaaggataatggtgaaaatccattgaccccttctgttgaaaagtattgtctggggaaactttcagaaaaaaatggatctgtttcggagcatatgggttcgattcctgagcttttatgcttccgaattgatgaagacaatgacattgcagaaggaaatgattaccgagagatattacctagatccataggcaaccaggagcaatcaggaaggaaagcacttcaggatatcactggactatgtcaaagcattgggaattctgcctcttattcgataggtatgagtatggatacaggtgacacagacatgactgtagaaacttgcagcagtgaactcaatcatcatccagatctcaggaatgatggtgataacaagaagcctaaagaaagttgtggttctttattaaaaaaaggagggaaaatgtctcgctcccttcataacagattaagcaagacagaaacaaggcacatgaatgaagcaaatcctggaaagcgttctaagcctagtaatattgttgctaatgtggcatcttttatacctcttgtgaagccaaaggtgcaaccaacagcatgtgtgaaaaaagatgttagagtgaaagcacttgagacagctgaagctgcaaaacgtcttgaagaaaagaaacgaagtgaacgtgaaatgcgcaaagcagcagcaaaactagagcgtgagaaactgaagcaagagaaagagttaaagcaaaaagaggaagaggaacagaagaagaaaagaggtgctgatgtggcaacaaggaagaggcagagggatgaggaggaaaggagggagaaggagagaaaaaggaaatgcattgaagaagctcgaaaacaacagaagcgacctattgaaagaaaacatgccaacattaacaatgctcatccagaaggtcatgataataaggagctgcagcagaattcggctgaagcggtgaaaggcccagtaaaatttgatgaaatgacaggtcttggaggaaatgccactaacagtaacaatgaaatggttgtgattaccgatgagaggcctgcaatttctggacctaattgtcaggaaaatatcccaaacagtattgaggagtcatacataatgactccatataaagattctgatgatgatgatgatgaggatttcgaacatatagaacattcaaggcgtaggaggaaattggttccttcatgggctcggggagagaacttggagaaaatcttgttatccaattatgttttggaccctaggaaaatctttgcacgaaaacgctcctctgatctctctgaaatttgtcctgcccacataccgcaacgtggtttcagatgagtttctttcctagttcgaaaataggtcccagatgagcttgcattgactgaactcttggttgtacgctgctgcctttcgtcaggcagtttgtgtataagctggtttcactagtttcatatatgtaagaacaacattcttgtaccgttaggcaactgcggcaacgatcgtacgttgttgtacatagtttcgattagttcaccaaggcttttgattcgacgcactccgtgcaaggagatataagctgttggttgacaagagtatttatcttgtctgagcactgtgctcaaaggagcagccatggttgttaaggtgtttctgtgtaacatcatgtaatgccatgatggagtaacttgtacacatggaaacgataaagatcggctatttttaacgcaaagaaatgacgcatcggattgtttaaacgatttggatcaa

SEQ ID NO: 141138 - DNA, 813 bp, Zea Mays
tttttttattctgctatatttgggcatgctaagagcctaaggttaattcattttgcaacaatttgatatgcttttctttgttcttgtttgttctttttttatttctctcttaattgttgtactctctgtcttttgctattctcccagtcgacctatagtcctgagtcttgacgcttcaggttcaagaaaaggagctttatgatggaaaaatggagttcagtctgctcaacccttactgttactgtgtcggccgagatgtgctagggtcgctggtggttgagatttcagatcaggagctctggagtctagactctggattgcagcgagccaaagaattcaaatcagtcactggtttgtttcccagatcgcggacagcggcaacctgcagtcgcttgctttcgtccttgaattgccagcgtcattgtcatcaacgcaaagtagtgtagaaaggttgtttggcttcaggcggtctccagtagcagcatgtctatcccacttcatatttcactgctagttttaaactctactatataaatagtatatttacaatgtaaaacagtattatgtacgtttatatgcacactcttactagagatggcctcatagagaaagaactccaaacttatacaacccctgatttagatggatattatggtggagtttgtttcagttttctttccaatttcttacactcagaagctattgtgaactgtaaaacgttcagcttttcagaccgttttttatgagagtcgttttggtaaaccatccaaaatcaacgtgtagctgtaaatgttgtcaagtttttttagtgcc

SEQ ID NO: 141139 - DNA, 1924 bp, Zea Mays
gctgcggccacccgccgggaccagcctcgccgccgcgcgccaaaaccctaacccctcccggcgtccgcccctgccgcgtgacggccccagagatggggcgagacaagagccgtcgtctatacggcagccgccacttccggcagcggctggtgctggcgacgctcacctctaccgctgtcaccatcgaggacatccgctctggggacgcttcgccggggctccgcccttacgaggtctccctcctccgcctcctcgacaagatctcagaccatcacaccattgacctcaacgagacaggaacgaagctgaggtaccggccgggggtgattatagggggaaagggccttgagcacgactgcggggtgcaccggggtattggatactttcttgagccactcatactgcttggtctattttcgagggcccctatatcgattcggcttaaaggaatcactaatgatacaaaggatccttctgtggatactttccggacaacaaccttgcatatgctcaagcactttggtgttcctctggatggtttcgatctaaatattgacagccgtggatctcctcctcttggtggtggtgaggtgtttctccgggttcgcaatataaatagcacattgacggcagcaaattgggtagatgaaggtatggtgaagaggataaggggtgtttcgttctccactagagtatctccacagttggaaaaccgcatcatttatgctgcacgtggaatcttcaatcgtttcattcctgatgttcatatacacacggatcatagatctggttctgctggtgggaggtcaccaggctatggtgtatcgttagttgctgagaccactacgggatgcctgctctctgtagatgtcactgtgagttatcctagtgttgatgaaataaatgaagaatctgagaagcctgagctgacttctccggaggatcttggtgttcaagctgcatcaatgctactagaagaggtggctcaaggaggtgttgttgattctacacatcaggtctgggcttttatgcaagcattctatgtatttctgaattttgcctggtgttaagctcgatgatagctgtatatattgttatgggctcagtgaagcttagacaggagtacaggacagtgaagcattttgttcttttggactgtttgtgtctactacagacaagctgcaagttctacatggcatgtggataactagatatgatttttttcaacgatctactttctcttaaaaaatgttgtcctctcttggactgacagtgctgtacatttatgtttgcccatcttaaattgcttgttgtctatcctgatgatattccatgcataagttacagatgcttttgtttagtgattttatcttaaatgcttgcagggcctcctatttattctgtgtgctttatgcccaccggatgtatcaaaggttcgtgtgggacagttgactccatatggtatagagacacttcgaaacatcagagattttcttgacgtcaagttcatcatcaagcctgatcccaattcaaacaccgttactttaaaatgtgttggcgcgggagtgaagaatcttgctcggaagatttcataagcaacatgaccattaatctgatgaaggatccatgccacatcaagagactactatgagaccctatttgtaactgcaaacaacagtgtaggagtttcccttagctgttactgctgaaattctattcgaggtccatgatgtcttagacatcaccgatgtacatcagtattagaatggattgttctgatcatgatgccctgtattgtcgacacatttttgcatcacattgcttcactccaactatgccatgacatgctgatacatagaaatgaagaaaaggtgacaaacgtccagactaaatgtttgttttaccatgtgcattttgtttgatc

SEQ ID NO: 141140 - DNA, 1555 bp, Zea Mays
gctgcggccacccgccgggaccagcctcgccgccgcgcgccaaaaccctaacccctcccggcgtccgcccctgccgcgtgacggccccagagatggggcgagacaagagccgtcgtctatacggcagccgccacttccggcagcggctggtgctggcgacgctcacctctaccgctgtcaccatcgaggacatccgctctggggacgcttcgccggggctccgcccttacgaggtctccctcctccgcctcctcgacaagatctcagaccatcacaccattgacctcaacgagacaggaacgaagctgaggtaccggccgggggtgattatagggggaaagggccttgagcacgactgcggggtgcaccggggtattggatactttcttgagccactcatactgcttggtctattttcgagggcccctatatcgattcggcttaaaggaatcactaatgatacaaaggatccttctgtggatactttccggacaacaaccttgcatatgctcaagcactttggtgttcctctggatggtttcgatctaaatattgacagccgtggatctcctcctcttggtggtggtgaggtgtttctccgggttcgcaatataaatagcacattgacggcagcaaattgggtagatgaaggtatggtgaagaggataaggggtgtttcgttctccactagagtatctccacagttggaaaaccgcatcatttatgctgcacgtggaatcttcaatcgtttcattcctgatgttcatatacacacggatcatagatctggttctgctggtgggaggtcaccaggctatggtgtatcgttagttgctgagaccactacgggatgcctgctctctgtagatgtcactgtgagttatcctagtgttgatgaaataaatgaagaatctgagaagcctgagctgacttctccggaggatcttggtgttcaagctgcatcaatgctactagaagaggtggctcaaggaggtgttgttgattctacacatcagggcctcctatttattctgtgtgctttatgcccaccggatgtatcaaaggttcgtgtgggacagttgactccatatggtatagagacacttcgaaacatcagagattttcttgacgtcaagttcatcatcaagcctgatcccaattcaaacaccgttactttaaaatgtgttggcgcgggagtgaagaatcttgctcggaagatttcataagcaacatgaccattaatctgatgaaggatccatgccacatcaagagactactatgagaccctatttgtaactgcaaacaacagtgtaggagtttcccttagctgttactgctgaaattctattcgaggtccatgatgtcttagacatcaccgatgtacatcagtattagaatggattgttctgatcatgatgccctgtattgtcgacacatttttgcatcacattgcttcactccaactatgccatgacatgctgatacatagaaatgaagaaaaggtgacaaacgtccagactaaatgtttgttttaccatgtgcattttgtttgatc

SEQ ID NO: 141141 - DNA, 1486 bp, Zea Mays
ctgcggccacccgccgggaccagcctcgccgccgcgcgccaaaaccctaacccctcccggcgtccgcccctgccgcgtgacggccccagagatggggcgagacaagagccgtcgtctatacggcagccgccacttccggcagcggctggtgctggcgacgctcacctctaccgctgtcaccatcgaggacatccgctctggggacgcttcgccggggctccgcccttacgaggtctccctcctccgcctcctcgacaagatctcagaccatcacaccattgacctcaacgagacaggaacgaagctgaggtaccggccgggggtgattatagggggaaagggccttgagcacgactgcggggtgcaccggggtattggatactttcttgagccactcatactgcttggtctattttcgagggcccctatatcgattcggcttaaagcactttggtgttcctctggatggtttcgatctaaatattgacagccgtggatctcctcctcttggtggtggtgaggtgtttctccgggttcgcaatataaatagcacattgacggcagcaaattgggtagatgaaggtatggtgaagaggataaggggtgtttcgttctccactagagtatctccacagttggaaaaccgcatcatttatgctgcacgtggaatcttcaatcgtttcattcctgatgttcatatacacacggatcatagatctggttctgctggtgggaggtcaccaggctatggtgtatcgttagttgctgagaccactacgggatgcctgctctctgtagatgtcactgtgagttatcctagtgttgatgaaataaatgaagaatctgagaagcctgagctgacttctccggaggatcttggtgttcaagctgcatcaatgctactagaagaggtggctcaaggaggtgttgttgattctacacatcagggcctcctatttattctgtgtgctttatgcccaccggatgtatcaaaggttcgtgtgggacagttgactccatatggtatagagacacttcgaaacatcagagattttcttgacgtcaagttcatcatcaagcctgatcccaattcaaacaccgttactttaaaatgtgttggcgcgggagtgaagaatcttgctcggaagatttcataagcaacatgaccattaatctgatgaaggatccatgccacatcaagagactactatgagaccctatttgtaactgcaaacaacagtgtaggagtttcccttagctgttactgctgaaattctattcgaggtccatgatgtcttagacatcaccgatgtacatcagtattagaatggattgttctgatcatgatgccctgtattgtcgacacatttttgcatcacattgcttcactccaactatgccatgacatgctgatacatagaaatgaagaaaaggtgacaaacgtccagactaaatgtttgttttaccatgtgcattttgtttgatc

SEQ ID NO: 141142 - DNA, 98 bp, Zea Mays
ccatgcccgtcgccatcatcgctttctctccctcggagcaaaataatcaccacttctgcaggccgttgccagccccagccacctctcgtcgtctatcg

SEQ ID NO: 141143 - DNA, 2616 bp, Zea Mays
ctcctctgcacttcgcctcgccgcctgaatccccccacaagcacccccacaccaatcactggaggcggagggagggagggctctcactcactctcggtcccagtagccgcccgcaatgcagctctggtccgcgtcgcgccgtcgccatggctcagtcatgtgagtctcctacaggcacaggaggcgccatctctcacctctccgcagtcagcatcggcagtgccatggccgctcctcggtcctactagcaaagatcaggagctggggattgccctgccactctgctgaaagttttggagaagttgtggtgtttccctgcctattagagtctgcgcttctgtgttcctgatcaactgctactacgcgattgttgtcttctcaatctgtctggccaagcatggctggccagacgtcaaaggcaaaggaagcaggaaaagatgacagagaagaacccggagctgaggcggcgaaagagaagttagtgccgtctcaccagcagcaagagtctccagcttctgtggtggacaaggattcttcaggtgtgtcttcagttcctggtgatgagtcaccggtcctagaaggggattctgttgagttgaaagtggaggaaaacttggatggtaatgggaataaggaaaataaaacgtcccagaagagcagtacaagtgatggctttgcttctgctaaagtgagtgatgggacaagtagtttgaggaagaccagtggtagtgtggccatgagtactcgggctgatttcactgagagtgggaagagcagcatgtgccgtgcgagcaccgccagtgacattagcgatgagagctcctgcagcagcatgagcagtgccaccacgaagccacacaaggggaatgattcaaggtgggaggctatccatgtggtgaagtccagggataaagttcttggactgaatcatttcaggctgcttaagaagttgggctctggtgatataggaagtgtgtacctatctgaattgagtggtacacggagttactttgccatgaaggttatggataagacttctttggcaagtcggaagaagctgcttcgagctcagaccgagcgggagatcctgcagtccctggaccatccatttctaccaaccctgtatactcactttgagacagataagttttcatgcttggttatggaattctgccctggaggggaccttcacactcttcgccaaaggcagcctggaaaatatttttcagagcaagcagcaaagttctacgtagctgaggtgctccttgcattggaatacctgcatatgcttgggattatataccgtgatctcaaaccagaaaatgtcctcgttcgggaagatggccacatcatgctgtcggacttcgatctatctcttcgctgttcagtgagcctaacggtgatcaagtccgcaaatcctggcctagatgcattgcagaggaacaatgcagcgtactgtgcccagcctgcttgcatcgaaccatcctgcattcagccctcctgtgtagctccaaccacttgctttggcccccggttcttctccaaatccaagtccaagtctaagtccaagcccaagaaggagaagtcgaagcctgatggtccaaaccaagagaacctcttcccggagctgattgctgagccaactgatgctcgctcgatgtcctttgttggcactcatgagtacttggccccagaaataataaaaggggagggccatggaagtgctgtggattggtggacctttggcatattcttgtacgagctgttgttcggcaagacccctttcaaaggttccggcaaccgggctacactcttcaacgtcgtgggccagcccttgaggttcccggagtccccgatagtgagcttctctgcgagggacatgataaggggattgctcgtcaaggacccgcagcaccggctcgggtacaagcgtggtgctaccgagataaagcagcaccctttcttcgagggcgtgaactgggctctcataaggtgcgcgagccctccggacataccaaagcccctcgagctcgagtgtcgcccaaagcaagtgccatcagcaaacggaaaggtcgcgccggtcgctaaccaaaagggcccagataattatctagagttcgaattcttctagttttttgttttgtttttgtttttgtgatttctgaactgcaagagtgcgtctgggctgatgctgtgaaagaaagtgaaagatgataacctactctaggcatgcgcttcgctggatttttttcttcttctgccattagactgtactacgctcgtttcaggatatccgagttatttttttttctctgttgaactgcttaactctaaggtgtactcaatccatcatgtatgttgcaattttcagaacctgcctatggtacttgaaatgtatttcagggctgtgttattgctattgtaactttgtaattgatgcctcctcttagaacatgtcttcctctacactacaaacgctgatatctgaacatggcattgctacttatctttattttattccattttagtctctaaatagctaaataccgaaacaaaaagtctaaaatagagttttaattttcatatttataaactaaaatagaataaaatagaggg

SEQ ID NO: 141144 - DNA, 3669 bp, Zea Mays
tcctgcgctttccctgtagtacaaacaattcatggggtctccccctctacaatcccaatgcttgcgagaggcgccacctcacagagccagccatccaccgcattgccgcccccctcgcctctcctcacgtcacccgcccgtctcagcctcaccaccgaggcgcgcgctgccaatgccgccacggtcccgcgccgcggcaccgaggctcgcgtttctcgtgccgctcgccttcgccttcgccttgctgctggtgccgccgtgccactgcgtcaacgagcagggccaggcgctgctgcgatggaaggacaccctgcggccggcgggcggcgcgctggcgtcgtggcgcgccggggacgcgagtccgtgccggtggaccggcgtgtcgtgcaacgcgcgcggcgacgtcgtcgggctgagcatcacctcggtcgatctgcagggccctctcccggccaacctgcagccgcttgcagcgtcgctgaagacgctggagctctctggcacgaacctcaccggcgcgatacccaaggagatcggcgagtacggcgagctgaccaccctcgaccttagcaagaaccagctcaccggcgcggtccccgccgagctgtgccggctggccaagcttgagtcgctcgcgctcaactccaactccctgcgtggagccatcccggacgacatcggcaacctcaccagcctgacgtatctgacgctctacgacaatgagctcagtgggccgatcccgcccagcatcggcaacctgaagaagctgcaggtgctccgcgccggcgggaaccaggggatgaagggtcccctgccgcaggagatcggcggatgcactgacctcaccatgctcgggctcgcggagaccggcgtctcagggagcctcccggagacgatcgggcagctcaagaagatccagaccattgccatctacaccactctgctctccggccggatcccggagtccatcggcaactgcacccagctcaccagcctgtacctgtaccagaattctctctccgggccgatacctccgcagctcggctacctcaagaagctccagactctgcttctatggcagaaccagctcgtcggcgcaattcccccggaactcggacagtgcaaggagctcacgctcattgacctgtcgctgaattcgcttaccgggagcatcccggcgagtttgggcgggctacctaatctccagcagctgcagctgagcacgaaccagctcactggcaccataccgccggagctctccaactgcacgtcgctgacggacatcgaggtcgacaacaacttgctgtccggggcgatcagcatcgacttcccgagactgcgcaacctcaccctgttctacgcgtggaagaaccggctcactggcggcgtgccgacgagcctcgccgaggccccgagcttgcaggcggttgacctgtcatacaacaacctcaccggtcccatccccaaggcgctgttcgggctccagaacttgaccaagctgctgcttctcaacaacgagctgaccgggctcataccgtcggagatcggtaactgcaccaacctgtacagactccggctcaacggcaacaggctgtccggcgcgattcccgccgagatcggcaacctcaagaacctaaacttcctcgacatgagtgagaaccacctcgtcggcccggtgcccgcggccatatcggggtgcgccagcctcgagttcctcgacctgcactccaatgctctgtccggcgcattgccggacacgttgccgcgcagtctccagctcattgacgtctccgacaaccagctcaccgggccgttgagctccagcatcgggtcattgccggagctgacgaagctgtacatgggaaacaaccggctgaccggtggcatcccgcccgagctcggttcgtgtgagaagctccagctgctggacctcggcggcaacgcgttctccggtggcatcccgtcggagctcgggatgctaccgtcattggagatctcgcttaacctcagctgcaaccggctttcaggggagataccgtcgcagttcgccggccttgacaagctcggcagcctcgacctgtcgcacaacgagctctccgggagccttgagccgctcgcggcgctgcagaacctcgtcacgttgaacatatcctacaataccttctctggggagctcccgaacactcccttcttccagaagctgcccctcagcgacctagccggcaaccgccatctcgtcgtcagcgacggctccgacgagtcctcccggcgtggcgtcatctcgtcattcaagatagccatatccatcctcgccgcagccagcgcgctgctcctggttgccgccgcctatatgctcgcccgcacgcaccgccgcggcggcggccgcatcatccacggcgagggctcgtgggaggtgacactgtaccagaagctcgacatcaccatggacgacgtgctccgagggctgacgtccgcgaacatgatcggcaccggcagctcaggggccgtgtacaaggtggacacccccaacggctacaccctcgccgtgaagaagatgtggtcgtcggacgaggtgacgtcggcggcgttccgcagcgagatcgcggcgctgggctccatccgccaccgcaacatcgtgcgcctcctcgggtgggccgcgaacggcggcacgaggctgctcttctacagctacctccccaacggcagcctgagcggcctcctgcacggcggccgcgccgccaagggctcgcccgcggacgagtggggcgcgcgctacgagatcgcgctcggcgtcgcccacgccgtggcgtacctgcaccacgactgcgtgccggccatcctgcacggcgacgtcaagtccatgaacgtgctgctcggcgcgtcctacgagccgtacctcgctgacttcggcctcgcccgcgtcctggccgccgcgagctccatgctcgacaccggcaagcagccccgcatcgccggctcgtacggctacatggcaccagagtacgcgtcgatgcagcggatcagcgagaagagcgacgtgtacagcttcggcgtcgtgttgctggagatcttgacggggcggcacccgctggacccgacgctgtccggcggcgcgcacctggtgcagtggctgcgcgagcacgtgcaggcgaagcgtgacgcgtccgagctactggacgcgcggctccgggccagggcgggcgaggcggacgtgcacgagatgcggcaggtgctgtccgtggccacgctgtgcgtgtcgcgccgcgcggacgaccggcccgccatgaaggacgtggtggcgctgctcaaggagatccggcgccccgcggcggtggacgacgcgaagcagcggccacccacggccgccgcgccggtgtcgccggtgagcgcgcactcgaggggccaatcgtcgagctgctccttcgccgtgtcggagtactctgcctgacgggacgcgaatttttgcgagtgtagtgaacctagtaaattactactaacatcttagcgagccgtaaacagtgttgattagccaaagatgtactactggtaatgttgtacttaggtgtaatctgccattgtacattactctcgagaatgtcggtttttgtagcagccttttggcctaacacatctgccaaatctcaacctgtgtgttgatatgaatgtatg

SEQ ID NO: 141145 - DNA, 1828 bp, Zea Mays
gcaaaactgcaaatgcgggcgaccaggcaacgaagacactcgggagtcgggtctcggggttccagttcgacgacgacccttgagtactacttgactcgagtccacaatgcttcgcctccagggacggcgcacgagcgcgcggatggctaacgacgtgggggtgtccacgccggatgtagggcacgaagcggcggcgctgagcggcgggacgggggatgaggagccattggtgtccaccgggacggaggagccgccggcaacggaggatggggtgccggcggaaatcgaggaagaggggaagggaccggcggcgccattggaggggtcaccggcggtgatcaccgtggaaggagaggaggaggtgaagtggctggggcattactcctctgcgcagaccattctcatcgtcggcgacggagacttctccttctctctggcgctggccaccgcattcgactccggtgccaacctcgtcgcgacgtccctcgacacctatgaggtcctgaagcgtaagtacagcaaagcggaggcaaatatagtgattctgaaaagattgggcgccacggttttgcatggtgttgatgcgaaacgaatgaggtttcacactgacttgaagaacagacggtttgatcgtattgtctttaattttcctcatggtggattcaaaggaaaagagaatgacttgcgtatgatcaacttgcacaaggagttggtgtgggtttttttccgcaatgcacgccaccttgttcggcaacttggtgaagtccatgttacccacaagtctggggaaccatacgacagctgggatcttgagcacctggcctctgagtcttcttttgctatgtttgacaaagttccttttcgaagggaagactatccaggttataatcaaaagagaggagatggtaagaggtgcgacaaaccttttgatcttggtgcatgttgcacattcaagttccaaatcagaaacttgaagaagcagaagcaaatgaataggaggtctcgtttaatcccaaaccttgtaggcagcaactttcatccaggccattcggtaactgacaggggggtatttcatccagttgcacctgttgaagcaaggtcttggcaccatttttctccgccagctcacacagagagcatgctgatgtctccacagccttacacagttaatcaatggcaacggtcaggttttccactgaactctgatggcattgtggctggaccttatttgcataaacaggagagttgccacccggtggtgagcatgccaggcccatggctgaatgatttgcccgctcaaggtggcattcctccacctctaccaatgagcagaatcccatctcctgatctccttgcacctcgggagcagccttggtatcagcagagaactattcttgatcacccaggagtcgatgactacttctttgcccgggaacaccaaatgagtctacagagggagtatgaaatgaagaggcaagtcattccattggaacatcgccgtagggacagggagtctgttgagaagctagagtggctgcacaggatgatcgcattgtatggtaggaagtgaaggatctttgggaggtgccagtatgaaggagctgggcctaccagtttcaggcttctataggactacaggtaaaggtcattttgtatggcatgcactgaccacggcaatgcgatgagttgctaacttgctattttgctgttaatactgtctgtacgctatactcctaggcagttaagcatgcctgcttttgaagtggagctgtccgaagagagttcctgattagttgctcattctgcaatagagtatggcttacatttt

SEQ ID NO: 141146 - DNA, 132 bp, Zea Mays
ggagctgggcctaccagtttcaggcttctataggactacaggcagttaagcatgcctgcttttgaagtggagctgtccgaagagagttcctgattagttgctcattctgcaatagagtatggcttacatttt

SEQ ID NO: 141147 - DNA, 1802 bp, Zea Mays
atgcgccatggcccatggcccaacaaggagcggaacacgggccacggagactgtaattcgtcgggctcatccgccttgtgggggcccctcaaccgagtcgtccaagagaaggttttgaatgcactgcgacgcttggactccgactctccgtgcatcgtccactaccagtctaccactctacccacaagagttcatggcgttcggggcagcctcaccacttcaccagcggtagggcacgactcggcgccggcggcgaacggcggcggatcgagggagggagcggggcctgcagaggaaggggtgttgggaatgcgggtagtggagggggcaccggaagctgacgaggaggaagagaagtggctagggcaatactcttctacgcagagcatactgctcgtcggcgacggggatttttcgttctcactggcgctggccacagggtttggctccggggccaacctcgtcgccacgtcgctcgacacctacgaggcactgggcaacaaattctgcagagcgaagtctaatataacagccctgaaaagtttgggagctactgttttgcatggcattgacgtgaagacaatgaagttgcagattgacctgaaaaacagacggtttgatcggattatctataactttcctcattctggcttcaaaggaaaagaacatgaggtgcacatgatcaactcgcacaagaagctggtgagggaatttttctgtaatgcacgccgcctacttcggccttatggtgaaatccatgttagtcacaagagaggaaagtggtacgaaaagtggggtcttaagcatctagcagctgagttttctcttgtgttggtcgagaaagttagtttccaaaaggcagactatcccggttatcaccagaagaaaggagctggtccaaattgtgacaaacctttcccgctaggtacctgttccacattcaagttcagaattggaagctcgaagaaacagaatgggagaagggctggaccaatctcatccattggaggcgacacaaggccatgtcgtcctctttcacttgttcagccatggtccgggctacagtttgttccacgagattacatagttcctgtgcccatgactgcgccatctcatgtagttgatcaaaggcagccaggccgcattccttcaccaatgggcagaatctcgagcaactgtttgttcgctcgtctggggcaaactctgtatgaaaacagaatcattgctgaatcgctaggaaacactgactacttcgcatgcgaataccaaaggagtctgctgagggagtacaggatgcagagtcaactagtccctgaggcaaccagcttgagctattctgccttcttggaagctcgccaatgggagtctgttcagagacaggagcggctccgcaggaggatcgcatacggtcgttcccagtgaaggatcgtctccctgaggccgaacttggtcttcccagatacgaccacaatgtgttttgtgtatatacaggtacggcccttttgtgtggcaaacactgccacagcagcgaaaggaacgctgatccaagttgctgcgtggagatgtattcctagacagctaacctgcttttgctgtatggagctgccttgaggagacaggagtacattagctgtagcatgtagtaacctcaccttttgggaacagtactttgtgtggggttactgtcaaataccgtaaactggaggtgccagtatactagctactccattgttgaggaacgagtaccaggtactactagcaattgctgagaaaagtggttacagttaacaatggctacaata

SEQ ID NO: 141148 - DNA, 1910 bp, Zea Mays
atgcgccatggcccatggcccaacaaggagcggaacacgggccacggagactgtaattcgtcgggctcatccgccttgtgggggcccctcaaccgagtcgtccaagagaaggttttgaatgcactgcgacgcttggactccgactctccgtgcatcgtccactaccagtctaccactctacccacaagagttcatggcgttcggggcagcctcaccacttcaccagcggtagggcacgactcggcgccggcggcgaacggcggcggatcgagggagggagcggggcctgcagaggaaggggtgttgggaatgcgggtagtggagggggcaccggaagctgacgaggaggaagagaagtggctagggcaatactcttctacgcagagcatactgctcgtcggcgacggggatttttcgttctcactggcgctggccacagggtttggctccggggccaacctcgtcgccacgtcgctcgacacctacgaggcactgggcaacaaattctgcagagcgaagtctaatataacagccctgaaaagtttgggagctactgttttgcatggcattgacgtgaagacaatgaagttgcagattgacctgaaaaacagacggtttgatcggattatctataactttcctcattctggcttcaaaggaaaagaacatgaggtgcacatgatcaactcgcacaagaagctggtgagggaatttttctgtaatgcacgccgcctacttcggccttatggtgaaatccatgttagtcacaagagaggaaagtggtacgaaaagtggggtcttaagcatctagcagctgagttttctcttgtgttggtcgagaaagttagtttccaaaaggcagactatcccggttatcaccagaagaaaggagctggtccaaattgtgacaaacctttcccgctaggtacctgttccacattcaagttcagaattggaagctcgaagaaacagaatgggagaagggctggaccaatctcatccattggaggcgacacaaggccatgtcgtcctctttcacttgttcagccatggtccgggctacagtttgttccacgagattacatagttcctgtgcccatgactgcgccatctcatgtagttgatcaaaggcagccaggtatgccactaaacttcgttggcatctattctcatcaagggagcactgcccgttcactgctcagcactccagggtcatcgctgacgaatgctttgggcgctccaggccgcattccttcaccaatgggcagaatctcgagcaactgtttgttcgctcgtctggggcaaactctgtatgaaaacagaatcattgctgaatcgctaggaaacactgactacttcgcatgcgaataccaaaggagtctgctgagggagtacaggatgcagagtcaactagtccctgaggcaaccagcttgagctattctgccttcttggaagctcgccaatgggagtctgttcagagacaggagcggctccgcaggaggatcgcatacggtcgttcccagtgaaggatcgtctccctgaggccgaacttggtcttcccagatacgaccacaatgtgttttgtgtatatacaggtacggcccttttgtgtggcaaacactgccacagcagcgaaaggaacgctgatccaagttgctgcgtggagatgtattcctagacagctaacctgcttttgctgtatggagctgccttgaggagacaggagtacattagctgtagcatgtagtaacctcaccttttgggaacagtactttgtgtggggttactgtcaaataccgtaaactggaggtgccagtatactagctactccattgttgaggaacgagtaccaggtactactagcaattgctgagaaaagtggttacagttaacaatggctacaatactt

SEQ ID NO: 141149 - DNA, 2805 bp, Zea Mays
ctcacccccatgccgtgtcatgccattgccacccatccttgggagctgcagctgcctatataataccaacagtgccgaagcaagaacatccaccctgcaccaccaccaccgggcaccagcgtcgtcgaagctgctcactccatcgccgctccaagctgtgagtccgagcatcagcacaagaagatgcgctatccagctcgtccgagaaatctccgcgctcttctgtccatcgctctgctgctcgcttgtgctctgcagcagcggccggcctcagctaccaaaaagtcgtacgtcgtctacctcggcggccacgcgcacggccgcgcgggcgcggcgctggcgtcctgcagggcgcgcgccaggagctcgcaccgcgcgctcctgggctccgtcctgcgcagcgaggcccgggccagggacgccatcttctactcgtacacccgctacatcaacggcttcgccgcgacgctggaggaggacgaggcggcggaggtctcgaggcatccgcgcgtcgtgtcggtgttcccgaaccgaggccacccgctgcacacaacgcgatcgtgggagttccttgggatggaggaggaaggtggccgggtgaggcccggctccatctgggccaaggcgaggttcggcgagggcgtcgtcatcggcaacctcgacaccggtgtgtggccggaggccggcagcttcagggacgacggcatgggcccggcgccgcccgggtggcggggaatctgccaggaccagcaggcctctgacgacgcgcaggttcgctgcaacaggaagctgatcggcgcgcggttcttcaacaaggggtacctggcgacggtggggcggcggcagcagcagcaggaggtgaacccggcgagcacgcgggacacggacgggcacggcacgcacacgctgtccacggcggcggggcggctcgtcccgggggccaacctcttcggctacggcaacggcacggccaagggcggggccccagcggcgcacgccgccgcgtacaaggtgtgctggcgccccgtgaacggcagcgagtgcttcgacgccgacatcatcgcggcgttcgacgccgccatccacgacggggtgcacgtgctctccgtgtccctgggcggctcgcccgccgactacttccgcgacggcctcgccatcgggtcgttccacgccgccaggcacggcgtcaccgtcgtctgctcggccggcaactccgggcccggcgccggcaccgtgtccaacaccgcgccgtggctgctcaccgtgggcgcgagcaccatggacagggagttccccgcgtacctggtcctcgacaacaacaagcggatcaaaggacaaagtctctcgcggacccgccttcctgccaacaagtactaccagctgatcagctcagaagaagcaaagggagccaatgcaacagtaacgcaagcgaagttgtgcatcggggggtcactggacaaggcgaaggtcaaagggaagatagtcgtgtgcgtccgtgggaagaacgcacgagtggagaaaggtgaggcggttcaccgggctggcggagctggcatggtgctggcgaacgatgaggctagcgggaacgaggtcatcgccgacgcacacgttctccctgccacgcacatcacctacgctgatggagttacgcttttggcctacctgaaagctacaaggttggcatccggctacatcaccgtcccgtacaccgcgctggacgcgaagcctgcgccgttcatggccgccttctcgtcgcagggccccaacaccgtcacgcctgagatcctcaagcctgatatcaccgcgccaggggtcagtatcctggcggcgttcaccggggaggcgggaccgaccgggctcgccttcgacgaccgccgtgtcctctttaacgccgagtccggcacctccatgtcgtgcccgcacgtcgccggcatcgccggactcctcaaggccgtccatcctgactggagccctgccgcgatcaagtcggcgatcatgacaaccgccagggtgcaggacaacatgaggaagccgatgagcaactcgtccttcctccgcgcgacgccgttcggctacggcgcggggcacgtgcagcccaaccgcgccgccgacccgggccttgtctacgacgccaacaccacggactacctcagcttcctctgcgcgctgggctacaactcctcggtgatcgccacgttcatggccggcgccggcgacggccacgaggtccacgcctgcccagcccgcctgaggccggaggacctcaactacccgtcagtcgcagtgccgcacctgtcccccaccggcggcgcgcacaccgtgacgaggagggtgaggaacgtcggccccggtggcgccacgtacgacgcgaaggtccacgagccgcgaggcgtggcggtggacgtgcggccaaggcggctcgagttcgccgcggcgggggaggagaagcagttcaccgtcacgttcagggccagggaagggttcttcctgccgggggagtacgtgtttggccggctggtgtggtcggacggacgcggcaggcaccgcgtgaggagccccttggtggcgagggtcgtgaacaccaagaagaagcacatttccatagcttgacgaactcgcttaggatctcatgcatggtgatgagctgagcagtgaagcctggccaaagaaggtttggcttcatgaacaatataatgatatactgacaaagtgacaacggaaacggatctgcagtggtctaaaagttcagagatttggttcattttctaacatgcggatgtggatttgaattctacaacgatccat

SEQ ID NO: 141150 - DNA, 138 bp, Zea Mays
agcaggactctcaatcaactactaactgagatggatggtttcgagggcaacactggaaattattgttattgctgccactacccgggctgacatattggatccgctttacttagacctgggcgttttgatagacaggtt

SEQ ID NO: 141151 - DNA, 2612 bp, Zea Mays
ccgccgcctccatgaaaaagcaccacaagtttctctttttcttccaccgctatatccatcgccgaacatccaagccctacacctcggcagctcaccgcgccgtccccatatccttcccctccagccccgcctcctccaccggccttcgcgaactcgacctccttcacgcgggcgagctcgcgccgaccccgcgcttatatcactccatcatcgctgcttgcgcacagttcaagaacctcgccggtgctcgtgccatccacgcgcacctgtcccgctcctgcctcgcgggcgatgctttcctcctcaactcgctcatacacatgtattgcaaatgcggcgccgtgtcggacgcgcgccacgtgttcgacaaaatgcccagccgggacgtggtctcatggacctacctcatcgcgggctatgcacagaactacatgccggcagaggccattgggcttctacccgacatgctcagggcgcggttcaggcccaacgggttcacgttcaccagcctcctcaaggccaccggcgcctgcggtggctgtagcattggggagcagatgcatgctctggctgtgaagtacaactgggatgaggatgtctatgtggggagtgcacttctggacatgtatgcacggtgtgaacaaatggacatggccattatggtgtttgaccgtctggtctcgaagaacgaggtgtcttggaatgccctgattgctgggtttgcaaggaaggccgatggagagaccacgttgatgaagtttgcagagatgcagaggaatggatttggggcgacacactttacgtactcgagcatgttctctgcatttgctcgtataggtgctcttgagcagggcagatgggtgcatgcacatttgattaagtctgggcagaaactaactgcctttgtggggaacactatgcttggcatgtatgcaaagtccgggagcatggttgatgctagaaaggtgtttgatcgtatggataagagggatctagttacttggaacacaatgctcactgcacttgcacagtatggtcttggaaaggaagcagtcgctcattttgaggaaattagaaaatgtggcatccagcttaatcagatcaccttcctttctgtcttgacagcctgtagtcatggaggcctggtgaaggagggcaagcactactttgacatgatgaaagactataatgtgcagcctgagatcgatcattatgtaagctttgttgatcttcttggtcgagctggcttattgaaagaagctctgatctttgtgtttaaaatgcccatggaaccaacagctgctgtttggggagccttgcttggggcttgcagaatgcataagaatgctaaaatggggcaatatgcagctgatcatgtctttgaacttgatccagatgatactggtccacctgtgctgttgtataacatatacgcttctacaggtaaatggaatgatgctgctagagtgaggaagatgatgaaggcaactggtgtaaagaaggagcctgcatgcagttgggttcagatcgagaattcggtgcatatgtttgtggcagatgacgatacccatccgaaatcaggagacatatataggatgtgggaggagataaacatgagaattaaaaaagcaggatatgtccccaatacagctcatgtgcttctgcatataaatgagcaagagagggagacaaagttgaagtaccatagcgagaagattgcacttgcatttgcgttgatcaacatgcctgcaggggcatcaattcggatcatgaagaatattaggatatgtggggattgccattctgcattcaaatatgtctccaaagtattcaaaagagagattgttgtgagggacactaacaggttccaccatttcagcgaaggctcttgttcctgtggagattattggtgaatggtgattgtggattttggatgttggtgaattctcaggccctaaaaggctaaaaggaaaaacaaaacagtgaagtgggagctttgtaataacaactggatcaagcctttccttcggtagatcacaacagccatgcggctcggagaatttgtttccctctagatcatccacatgcatcaaattaaccttcaaccaggtgccgcagattgcattagatggtgttggactgtggatggaaagtaccaggcaaaatcagcttatgatgcacaattcaaggacatctttatttccttcaagtcaaacctaattttgaagacaagagctgaaaacaaatgtgaattctttgcctcttggactgtcatacaagagaagatcctcacagccgatggtttggcaattcgtggctagcctcatcaatcagtctgtgttctttgcaatggtccctagattacctttatgcctgcagtgcccttatgcataattgatctggtcacaagtcctagcctcggaacggattattctgcctcatacgtgtgcctgggatagctttccttctggtaattttctttcctagaatccattttgctgtgttgacataaaccagatagcttgtgagatgatatttgttcacgagaatgacacagtgagtgtagacataggtaataggttcatgattctttactggcggatgattttgct

SEQ ID NO: 141152 - DNA, 782 bp, Zea Mays
agactagctggcaggcatcgcagtggctcgggcgggcgtcgtcgcacgtacacgcgctcgatcaaggagcataccgctgcactagcgacattggtctcctggtcgttcggtctgttcgtttctggcgttgggctaatatataggcccggccagccgagcgtgagccttggtgtggcgtgcgtgcaaaacgttagatcgcccgtcccgctgtccatgtcctccgtctaccgtctaccatcgacaccacctcgccaggcagcgcgcaaaacctctcccatccgatcctgctctccgctgtcttctcgaccgtacgagtgcgtgcatggaccagcggccgccggagcgcaatgcgaagcgcgcgagggaggaggagatccatgccgcgcccgcgcagccggacttccccttcgaggaggaggaggaggaggaggaggaggaggaggaggccgcggcgggggcgggcgaggcgtcgcggcggccaccgggggtgttccagttcccctggcagaagtgccgcggcgggctgggcgtgtccgccgctgggtcgtcacgggagctgcgcgacgtcttcttccgctccctcgtcgacgggggcgccgcggccatcggcgtgccgggggaccggctggtgtcgccgccgcccggcaggcgcgcgctcctcgagggcgtcgacgcgtggctcgccgcggccgccgacggcgaggtggacccggtctggcggtccgcgctcatggcccgctcgtcgaggatggacggacgtgggccctccccgcgcatgcttc

SEQ ID NO: 141153 - DNA, 1116 bp, Zea Mays
ataaagggagaccgctataaaggcaacaggcgcagtgcttcacacccaccgcttccaccaccacaaccggacagggacacggcactagctcgtagaaggtcggccggccagccagagtcacagccgaaggtgaaagggagcggatatgggggcggatcgtttcctgagcgtggcggagggcggcctcggcggcgaggcgctctacttcgcggtcatcctgtggctgtccgtcatgtcgtggatcatcttcacctgggtcggcgacggcggggaggacgggaggcgggggaggaagcgccggggcagccgcggcagcccggtgttcgtcggcgcgtcggggatctgcgacggcaccgggcccgagtgcagcggcgggtacggcatctgcggcacctgcctcgactagcctgctctgctactagtaagtttgtgtgagcgtcaaaagcgcggccatgtttgtagctgtagcgtctacatgtcgtcgtcgatgcgtggcctcgatggagaagctggcgttgctctggtgatatgatgagagcagagcagctcccctgtgtgaagacaataagagggaggagcctactcatcagcctacttccatcttgcttattaggctgctcaaactgagttgtcgttagctcttttttttatttctccttcctttaaagtttgatctcgatcctctgtaaatttaagctgcagaagaaccaaatacatgtctcgaacagtactatgtgagacgagatccttcttcgtccgcgaggtttgttagtttcctgctgcgtttagctgctgtgggggggaatttctctcgttgtctgaggagctctatcctatgacagatagttgggcacatgtccttttcaggtaggcaatctgcagtggttagtgggaagtctcaagacggctttcggcaagcaagccaaagcttatctcgcttcctcaccacaaaagccactgttggagcaggctgcacaggaaacgttaagcatcagttaggccctgttcggatggtgattacattggttatcgtttacacctataataagtggtttttgagttgtatattcttatatcttatgcacaagaataaatggtgaacatatagtttgggaa

SEQ ID NO: 141154 - DNA, 555 bp, Zea Mays
tctggaagtgggagtgtatgtgcaagcacaggagcatctcctgctgctatatcacccattggcactaatcagtctgcacctagaacacaacaacttgtcggtgctatggttatagtagatgagtccaatggcaccgaggaattaggatgtggtgaaaagaggaaaaaaacaaacaaaaaacctacctccaaggtttgggaccacttcaccaagtccacggtgatgcagaagggagatgatgggaagatggaggaacaagtttgggcgaaatgcaagaagtgcacgttcaaaactcgttgtgaatcctcgaggggcacaaccgccttctggaaccatttgaaactaaagcactatataaagaaagggcagcaagaattacaagtccaaaatgttgaagattgcaagattaaggtaccatcaattattgatgatctcattttagacaacaaggaatgcagctctggaaatgaggaggctcaagctgaaggcctggctaacgaggaactctatggtgatgacgatgaggacaacgacattgacgacatggagatctaa

SEQ ID NO: 141155 - DNA, 1140 bp, Zea Mays
acgtacccgttccatctcaagtgaaagagatgacaactgtcctaacaaacaaactagggctcaaaactaacttcaaaaaaatcacccactaaaagcaccttcctcttcctcttcctccgcccccaatccccctcgtctcacaaccctagctgcccccgaatccatggatcctaacaaatccagcaccccgccgccgcctccagtcatgggtgcccccgttgcctaccctccgcctgcgtaccctcccggtgtggccgccggcgccggcgcctacccgccgcagctctacgcaccgccggctgctgccgcggcccagcaggcggcggccgcgcagcagcagcagctgcagatattctgggcggagcagtaccgcgagatcgaggccactaccgacttcaagaatcacaacctcccgctcgcccgcatcaagaagatcatgaaagccgacgaggacgtccgcatgatcgccgccgaggctcccgtggtgttcgcccgggcctgcgagatgttcatcctcgagctcacccatcgcggctgggcgcacgccgaagagaacaagcgccgcacgctccagaaatccgacattgccgctgccatcgcccgcaccgaggtattcgacttccttgtggacatcgttccgcgcgacgacggtaaagacgctgatgcggcggccgccgcagctgccgcggctgccgggatcccgcgccccgccgccggagtaccagccaccgaccctctcgcctactactacgtgcctcagcagtaatgtatcatcatcacgttattgttccgtctatgtgcctgagcaataatgtatcatcattgccttattgttccggggcagttgtgttatttgtgtctgtttagttgctgctgctgttaccgcgtaatagcatatgtgttatctgtgtctgtttagttgctgctgctgttgccgcgtaataaaacttggtcatttacggggctccctcaagattaagaattgagttgtttgatggtagaatcctggtaaggttgttgtaactggggggcgcctttgtttgggctggtagtgtatgcctaggcctcacttatctgatgctgtaatgcgacaagtattatgtggttgtctggtaattattgtccaattactgctcttca

SEQ ID NO: 141156 - DNA, 1194 bp, Zea Mays
tcagagctatactacgtcaatgcacttgcggacacatcgtcacgaagattttattccaagctccaaataacttctgtttcatgtcaccatcaccattgtcgtatatatagttattataattataacaatggcaacatcatgtcagcacaaaatcatccactggtgacctggccgaatcaggtctacaaagtacatcagatcaggaggcacttcctataaatttggtgaccgggtttcctcgcaagtagccacgcacaaagagggacttgctcgagggtttagctagcttggaagccctccgcaaactcccatggcgtgcctcctcgtgctcgtcatcgctgccacagtactaacggtgcaacacgaagccatagcccgatcagaacatgattcagagacgcagctggtgtcagtttttgtttgtttgtttgtgctgaacaatgagtcgtgtctcttgatcctcagggtccaccgggaaaactgacgcacgccgctcggacgtcgccggcggaggccttctggcatgcggccctccccggcgctcccatgcccgaggccatccgcgagctcttgcgcccagctggtgctgccgggaccaacgctccagacgccgctaggtccaggcaccacgacgccgatccgccgccgatgaacttcaagtacgaagactacaggtcctcgcgtcggaacgaagccaccgccacctccgccgaggccctggaccgcgctggcggcgccgggaacgcggccgcgtcgccggcggtgttcttcctcgaggaggcagtgcgcgtcgggggtgtcctgcccttccgtggtatggtcccgcggggcaccgccagcgtggcagtggcctcgcctccgatgcggctgtacaaggtccgcgccgtgcgggccatcgacgggcgcaggttcatggtgtgccgccgcgaccgcgaggacggccccgacggcgacgccgtgtacgggtgccgcgcgacgggccccgcgagggcgtacgctgtgggcgtggtcggcgagcgcggggagacggtggccgcgaccgtcgtgtgccgcaccgacacgtcccggtggaaccgggtgcgtgccgcgttcaggctgctcgacgtgaagcccggaggcgcggcggtctgccacgcggcgctcggcgcgcaggtaatcccagtcaagaacgacagtggctcctccttggtgtga

SEQ ID NO: 141157 - DNA, 1338 bp, Zea Mays
tcagagctatactacgtcaatgcacttgcggacacatcgtcacgaagattttattccaagctccaaataacttctgtttcatgtcaccatcaccattgtcgtatatatagttattataattataacaatggcaacatcatgtcagcacaaaatcatccactggtgacctggccgaatcaggtctacaaagtacatcagatcaggaggcacttcctataaatttggtgaccgggtttcctcgcaagtagccacgcacaaagagggacttgctcgagggtttagctagcttggaagccctccgcaaactcccatggcgtgcctcctcgtgctcgtcatcgctgccacagtactaacggtgcaacacgaagccatagcccgatcagaacatgattcagagacgcagctggtgtcagtttttgtttgtttgtttgtgctgaacaatgagtcgtgtctcttgatcctcagggtccaccgggaaaactgacgcacgccgctcggacgtcgccggcggaggccttctggcatgcggccctccccggcgctcccatgcccgaggccatccgcgagctcttgcgcccagctggtgctgccggtgatcatctaagaaacagaatcattaatctatggcagaccatttgtgacgcgaacaccattgccacaccacacatgcataaaactggaacgcgtgctgcgtgcagggaccaacgctccagacgccgctaggtccaggcaccacgacgccgatccgccgccgatgaacttcaagtacgaagactacaggtcctcgcgtcggaacgaagccaccgccacctccgccgaggccctggaccgcgctggcggcgccgggaacgcggccgcgtcgccggcggtgttcttcctcgaggaggcagtgcgcgtcgggggtgtcctgcccttccgtggtatggtcccgcggggcaccgccagcgtggcagtggcctcgcctccgatgcggctgtacaaggtccgcgccgtgcgggccatcgacgggcgcaggttcatggtgtgccgccgcgaccgcgaggacggccccgacggcgacgccgtgtacgggtgccgcgcgacgggccccgcgagggcgtacgctgtgggcgtggtcggcgagcgcggggagacggtggccgcgaccgtcgtgtgccgcaccgacacgtcccggtggaaccgggtgcgtgccgcgttcaggctgctcgacgtgaagcccggaggcgcggcggtctgccacgcggcgctcggcgcgcaggtaatcccagtcaagaacgacagtggctcctccttggtgtgaaggaaggctcccacgtgttccgtttgtcgtcgtcgtcg

SEQ ID NO: 141158 - DNA, 1299 bp, Zea Mays
tcagagctatactacgtcaatgcacttgcggacacatcgtcacgaagattttattccaagctccaaataacttctgtttcatgtcaccatcaccattgtcgtatatatagttattataattataacaatggcaacatcatgtcagcacaaaatcatccactggtgacctggccgaatcaggtctacaaagtacatcagatcaggaggcacttcctataaatttggtgaccgggtttcctcgcaagtagccacgcacaaagagggacttgctcgagggtttagctagcttggaagccctccgcaaactcccatggcgtgcctcctcgtgctcgtcatcgctgccacagtactaacgggtccaccgggaaaactgacgcacgccgctcggacgtcgccggcggaggccttctggcatgcggccctccccggcgctcccatgcccgaggccatccgcgagctcttgcgcccagctggtgctgccgggaccaacgctccagacgccgctaggtccaggcaccacgacgccgatccgccgccgatgaacttcaagtacgaagactacaggtcctcgcgtcggaacgaagccaccgccacctccgccgaggccctggaccgcgctggcggcgccgggaacgcggccgcgtcgccggcggtgttcttcctcgaggaggcagtgcgcgtcgggggtgtcctgcccttccgtggtatggtcccgcggggcaccgccagcgtggcagtggcctcgcctccgatgcggctgtacaaggtccgcgccgtgcgggccatcgacgggcgcaggttcatggtgtgccgccgcgaccgcgaggacggccccgacggcgacgccgtgtacgggtgccgcgcgacgggccccgcgagggcgtacgctgtgggcgtggtcggcgagcgcggggagacggtggccgcgaccgtcgtgtgccgcaccgacacgtcccggtggaaccgggtgcgtgccgcgttcaggctgctcgacgtgaagcccggaggcgcggcggtctgccacgcggcgctcggcgcgcaggtaatcccagtcaagaacgacagtggctcctccttggtgtgaaggaaggctcccacgtgttccgtttgtcgtcgtcgtcgtgatgcaacgtttctagtagtagctatgtatgcatgtggtgaagcaagtgctcgtcggtgtgtagtgttcgctcttctgatccattgtctgtgctctgtactgtagtgatcagcgtcaaaataaagaaatgcatgtccttgtttaaaataaattgatcgctctgtcttttggtactc

SEQ ID NO: 141159 - DNA, 889 bp, Zea Mays
gcatcctctaacgcacactgccgcgccgccctcggtctcccctctcctctcccttccttcctcttccacggacacgggaggagaagggttgatcacgaccggggaggacgcgtggccagagatgggtctccacggaggcgtcgtcgtgctccgcgcggccgtgctcgccgccgtcctcggcttcgtcgccgctgccgggttcatctcaaacgacgcgctgctggagcgcgggcacgacaccaccggccggagcctgctgcaggccaagaaagattgcccggtgagcttcgagggcgccaactacacggtgatcacgagccggtgtaagggcccgctgtaccagccgacgctgtgctgcggcgcgctcaaggacttcgcgtgcccttactccacctacatcaacgacgtgagcaccaactgcgccgccaccatgttcagctacatcaacctctacggcaagtacccgccgggcctcttcgccaatacctgccacgagggcgacaagggcctcacgtgccccgaggacaccccgcagatcgaacccgggcagaaggcctccggcgcggccgccgtcgccgcgccggccgcggccctggcggcggccgcgttggccgtctcgttgctgctcatgtcttgctgagagacccgggttgcagatggccgtgacagcgcaaccaactgcgttgctgtaccgcttcttttaccacttctttttttctggatggatgatttccaagatacatggatggatatgtttacatctgaaaaaatgaattcagaaaagggtggtagacatgcaatgcaaaccagctaaagtctgctttcacttgttcaacatggtaaaatttcttgaaatgcagtagtcaaaaattaaacatgcagtgctgtc

SEQ ID NO: 141160 - DNA, 925 bp, Zea Mays
cgtcgttgctactagttgctagtgctaccaagaacaggaaggaaacaccgccgccgccgcgccttccattccagtactcgcggaggaaaggaacaccagccagcgccatggtcacgtcgacgaccgccgccgccgtgctgtccccgccgtccgtggccgggcttcgcctggcgccgtctccccgggcgcgcgtggcgttccgcgcggcgcgggcgcggcggtccgtggcggcgcgcgcggagctgagcccgtcgctggtgatcagcctgagcacgggcgtgtcgctcttcctgggccgcttcgtcttcttcaacttccagcgggagaacgtggcgaagcaggtgcccgagcagaacggcaagacgcacttcgacgccggcgacgagcgcgccaaggagttctcgggcctgctcaagtccaacgaccccgtgggcttcaacctcgtcgacgtcctcgcctggggctcgctcggccacatcgtcgcctactacatcctcgccacctcaagcaacggatacgaccccaacttcttctgagcggccggctgcgggcatgttcttgagcctgcctgtattctactccgtgtgtgttgagccatatatctgatgctcaaggattggttaatttgaacaagtggtgcaactgcgcgtgtacatggatttgctcttcctctatgtctctgtctctctgtctccggttactttccctgtttcactatgccatgcacatagacattgccatgttctgctgccagctcagggcttgtgaataacacatacataaggagagcagatgtctgatagcatacaatagcataatgaaacaccggcaaggggaaaagaaaaggcagaaatagcatttccaggatctagggaatccaggagtagttttgcgcaggccccgcattaataaaaaaaatgaagtt

SEQ ID NO: 141161 - DNA, 1905 bp, Zea Mays
atcttatgtgcgcctttactgttaagtcacctctcacctgtcaccatgcataaagatttggcgtgtccacaactgcgtgtaagaccgaaaagtctaccacttggttcaatgtataaatcaaagtagtcaagtttggcagactatggcatgatgcttattcctaatgagaattactaattaaacaacacggggagttgttgtgcacccagcgcttataagagcttgcggggcagcgtcctttggagcatcagagccactgagaccgaccttatggagtctgccatgtttgccggctgctggctcctcgcggcttctctcgtgctcgcaacgctcgcgtctccccaccgtctgggcgcggcggcgggtgaaggaagcgagacgaagtggcacgttgtgagcgtcaactcgctgctgcccagcacggtctgcacgcccacgaaagcggcacccagctcgtcggcgcttaccgtcgtgcacgggcacggcccgtgctcgccacaggagtcacgccgcggcgcaccgtcccataccgagatcctaggaagggaccaggaccgagtcgacgccatacgccgcaaggtggctgccgtaactactgcggcgtccagctccaagcccaagggcgtgcccctgcaggttggctggggcaagtatctcgacaccaccaactacttcacctcgctccgcctggggacgccagcgacggacctgctagtggagctcgacaccggcagcgaccagtcgtggattcagtgcaagccgtgcccggactgctacgagcagcacgaggcgctgtttgaccccagcaagtcgtcgacgtactctgacataacctgcagctcgcgggagtgccaggagctgggctcgtcgcacaagcacaactgctcgtcggacaagaagtgcccgtacgagattacctacgccgacgactcgtacaccgtcggcaacctcgcgcgcgacacgctgactctttcgccgaccgacgcggtcccgggcttcgtcttcgggtgtggccacaacaacgccgggtccttcggcgagatcgacgggctcttgggcctcgggcgcgggaaggcgtcgttgtcgtcgcaggtggcggccaggtacggcgcgggcttctcctactgcctcccgtcgtcgccgagcgccacggggtacctgtccttcagcggagccgcagccgccgcccctaccaacgcgcagttcacggagatggtggccggtcagcacccgtcgttctactacctcaacctcaccggcataacggtcgccggccgggcgatcaaggtgcccccgtccgtgttcgccacggcggccggaaccataatcgactcgggcaccgcgttcagctgcctgcccccgagcgcctacgcggcgctgcggtcgtcggtacgaagcgccatgggcaggtacaagagggcgcccagctccaccatcttcgacacgtgctacgacctcaccggccacgagacggtgcggataccgtcggtggcgctggtgttcgccgacggcgccaccgtgcacctacaccccagcggcgtgctgtatacctggagcaatgtctcccagacgtgcctcgcgttcctgcccaaccccgacgacacgtccttgggcgtacttgggaacacgcagcagaggacgctcgccgtcatctacgacgtggacaaccagaaggtcgggttcggcgccaatggctgcgcctgaaatcaaccgtgtttcgcaaaagatcaacggctataacgtgatgcactgatgcgatcatagcgatcgtggtttagctttcgtagcggtgatcttgcgaggaaggtttttagactttccagggttggtgtgcacggtttgtatcaagggttggtttgcacgtaatatgttctctcgtaatagtcaccaatttaaaaaccctat

SEQ ID NO: 141162 - DNA, 1753 bp, Zea Mays
atggagtctgccatgtttgccggctgctggctcctcgcggcttctctcgtgctcgcaacgctcgcgtctccccaccgtctgggcgcggcggcgggtgaaggaagcgagacgaagtggcacgttgtgagcgtcaactcgctgctgcccagcacggtctgcacgcccacgaaaggtagtcttgttcacatgtgctattttattcgagagaaaaaaaaatattgcgtcacatgactagcttcgcgcgccctacacgattcgggtcatcagttctcttgctgctgacctccatgcagcggcacccagctcgtcggcgcttaccgtcgtgcacgggcacggcccgtgctcgccacaggagtcacgccgcggcgcaccgtcccataccgagatcctaggaagggaccaggaccgagtcgacgccatacgccgcaaggtggctgccgtaactactgcggcgtccagctccaagcccaagggcgtgcccctgcaggttggctggggcaagtatctcgacaccaccaactacttcacctcgctccgcctggggacgccagcgacggacctgctagtggagctcgacaccggcagcgaccagtcgtggattcagtgcaagccgtgcccggactgctacgagcagcacgaggcgctgtttgaccccagcaagtcgtcgacgtactctgacataacctgcagctcgcgggagtgccaggagctgggctcgtcgcacaagcacaactgctcgtcggacaagaagtgcccgtacgagattacctacgccgacgactcgtacaccgtcggcaacctcgcgcgcgacacgctgactctttcgccgaccgacgcggtcccgggcttcgtcttcgggtgtggccacaacaacgccgggtccttcggcgagatcgacgggctcttgggcctcgggcgcgggaaggcgtcgttgtcgtcgcaggtggcggccaggtacggcgcgggcttctcctactgcctcccgtcgtcgccgagcgccacggggtacctgtccttcagcggagccgcagccgccgcccctaccaacgcgcagttcacggagatggtggccggtcagcacccgtcgttctactacctcaacctcaccggcataacggtcgccggccgggcgatcaaggtgcccccgtccgtgttcgccacggcggccggaaccataatcgactcgggcaccgcgttcagctgcctgcccccgagcgcctacgcggcgctgcggtcgtcggtacgaagcgccatgggcaggtacaagagggcgcccagctccaccatcttcgacacgtgctacgacctcaccggccacgagacggtgcggataccgtcggtggcgctggtgttcgccgacggcgccaccgtgcacctacaccccagcggcgtgctgtatacctggagcaatgtctcccagacgtgcctcgcgttcctgcccaaccccgacgacacgtccttgggcgtacttgggaacacgcagcagaggacgctcgccgtcatctacgacgtggacaaccagaaggtcgggttcggcgccaatggctgcgcctgaaatcaaccgtgtttcgcaaaagatcaacggctataacgtgatgcactgatgcgatcatagcgatcgtggtttagctttcgtagcggtgatcttgcgaggaaggtttttagactttccagggttggtgtgcacggtttgtatcaagggttggtttgcacgtaatatgttctctcgtaatagtcaccaatttaaaaaccc

SEQ ID NO: 141163 - DNA, 1572 bp, Zea Mays
atggcgtccgtgacgcggcgcgctctgtcccgtggctgctgcctcgcggctgtgctcgcgctagcagttgtcgcgtcagtggcggcggaggacgagaccaccagcgggccgagctggcacgtcgtcagcgtcaccgccatgctgccgagcgcggactgcacgcctgcgagaggtaggcttctcgtctgtctgttgctatttctcctccttgcactgctgatctttttgggtttcggtgctatggaaactgctaccgtgctatggtcggcattgccattatcacccttgaacccaaaggatgcacggttagcaataaccggtgtatatcatgcagcggcatcaaactcgtcggccctcagtgtggtgcaccggcacggcccatgctcgccgctgctggcacggggcggcgagccgtctcacgcggagatcctagacagggaccaggacagggtcgactcaatccaccgcatgaccgctggcccgtggacggccggccagtccagcgcctccaagggcgtgtccctgccggcgcacaggggcctccgcctcggcacggccaattacatcgtctcggttggcctcgggacgcccaggagggacctgttggtggtgttcgacaccggcagcgacctctcgtgggtgcagtgcaagccgtgcaacaactgctacaagcagcacgacccgctcttcgacccgtcgcagtcgacgacctactccgccgtgccctgcggcgcgcaggagtgcctcgactcggggacctgctcgtcgggcaagtgccggtacgaggtcgtctacggcgacatgtcgcagacggacggcaacctcgcgcgcgacacgctgacgctgggcccgtcgtccgaccagctccagggcttcgtcttcgggtgcggcgacgacgacaccggtctgttcggaagggccgacgggctgttcggcctcggccgcgacagggtgtcgctggcctcgcaggcggccgccaggtacggcgcggggttctcctactgcctgccctcgtcgtggcgcgccgaggggtacctgtccctcgggagcgccgccgcgccgccccacgcccagttcacggcgatggtgacgcgcagcgacaccccgtccttctactaccttgacctggtcggcatcaaggtggccggacggacggtcagggtggccccggccgtgttcaaggcgcccggcaccgtgatcgactcgggcacagtcatcacccgtctcccttcccgcgcctactccgcgctccggtcctccttcgcgggcttcatgcgcaggtacaagagggcgcccgcgctgtccatcctggacacgtgctacgacttcaccggccggaccaaggtgcagatcccgtcggtggcgctgctcttcgacggcggcgccaccctgaacctcggcttcggcggtgtgctgtacgtggcgaacaggtcgcaggcgtgcctggcgttcgcgtccaacggcgacgacacgtccgtcggcatcctcgggaacatgcagcagaagacgttcgccgtggtctacgacttggccaaccagaagatcgggttcggcgccaagggctgcagctga

SEQ ID NO: 141164 - DNA, 2070 bp, Zea Mays
ctcgtctctccgttcggccgtgtccagtctccagtccgcaacggaaggagaggaggcgtcgagggaaaatcgcgccaaccgggccgaacgaatcgtcggaaggccggggaggaggtctagaaggtgtgggaatggcgacggggcttgccttggcggcggcgcctcatgttgcttcggtcacgggatcggggacagtggaggagcaggcggcgggggtcggcatcttgcttcagatatcaatgctcgtgctctcgttcgtgctcgggcatatcctgcgccgccgaaagttctactacatccccgaggccagcggctcactcctgatcgggatgattgttggagggcttgctaacatatcaaacactcagaaaagcatcaggagatggtttaattttcgggaggacttcttccttctctttttactgcctccaattatattatatccttgattgtattctgcttttatttcttattggttcttgtagaattgttcatgttttacttgactgcatcttacccagtccggattcagcttagcaccaaaaccattcttttcgaacttcgatgctatcataacatttgcaatcctgggaaccttcattgcctccattgttacaggtcttttagtctaccttggtggattactatacattgtctacaggctcccactggtggagtgtatgatgtttggtgctcttgtatcagcaactgatcctgtgacagttttgtctatatttcaggagcttggcactgatacaaatctatatgcactggtttttggagaatccgttttaaatgacgctgtagcgatatccttgtacaggtctatggcatctatgaggacgcaccattctggaaaaaactttttccttgtaattctgaggtttcttgaaaattttgttggatcaatgtcatcaggcattggtgttggactaatttccgctctcctcttcaagtatgcagcactgggcgttgagaaccttcacaatctggagagttgcttgtttgtgcttttcccatacttctcgtacatgctagcagaaggcattggtctatctggcattatttctattctcttcacgggtattgtgatgaagagatacacattctctaacttatcagatgattctcagcgttttacagctcgcttttttcaccttctttcttcactagcagaagctttcgtgttcatatacatgggatttgatattgcgatagaacgtcaaagctggtcacatattggattcatatttttctcaattatcttcatactagttgcaagggctgcaaatgtcttctcttgtgcatacatactgaatttggcacgacctccacattgccaaatacctaggcaatatcagcaggctctttggtatagtgggcttagaggagctatggcttttgccctcgctcttcagtctgttcatgatcttccggatggacatggcgagacaatttttactgctaccacatctattgttgttctaactgtactccttattggtggctcaactggaacaatgcttgaggccctacaggtagttggggacagcaaccgttattgccaactgtatgagctgcaggagagttctaatggcaacgacactggttacacgggacaaaattatgatgaaggagcatccacttcaagcaaattcagatctaaacttagagatctaaggagaagcacctcgtctttcgctttactggacagaaattaccttactcctattttcacttcgcaaaacggcgactgcaatgataacactacagaaagtcccaatgaagaattgacgatattcagaggacctggggatttggaggtacatgattgatgactgcagatatgaagtgcttatcttccatgaatctacacgatactccttgtaccttcctcggcgacccaaagtggaaagtgcaaccagacattcggccatagcattgccatattattaatctataaacattagttagctaggatagttcaacgtaagtctttgtacgtagaatataggtgtaatttatcagccttgaaattctgttctgatccgtttcagaaactttgtgcgt

SEQ ID NO: 141165 - DNA, 290 bp, Zea Mays
atttatccagaacttctctcttttcctcggtgaaacaaagaatttgttttgctcaaaccaaaggcaaaggagcgcttactttagccttttatttcttttgtgctatgtcttccttaaggattcatccaaatgtaatccccacttcccttctttttgatttcccttctatttagatatgatatagacctaattcttatacaaagaaaactcttttgcttcactttgtctcactttctctagaatctctagaaaaaagaattgctctaccctttatttaatgacagtcagag

SEQ ID NO: 141166 - DNA, 234 bp, Zea Mays
tgtgcggatttggtaaagggagccaaggacaagcatttgagggttaagggacctgtcaggatccctactaaggacgcaaagattcttcgaaggaactttgtaattgatctattaagttacgaggagaattcatgccgctatgccatccctcgaaacatacaacaacgactaatcaatatcgctaaaaaaagattagatttatgtacaattgtcgacatatttggctattattaa

SEQ ID NO: 141167 - DNA, 680 bp, Zea Mays
cttccggaagcgcaaatgataccctccactcctccagcagcgaggcccatccgcccatgccgaacctcccggaagcgcaaatggcactccagcaccagcgaacgagtctgggtctatgtcgaactttctagaagcgcggcgccaaataaataccccactacctcaatcctcgctgcccctctcgattcggaaaacctccaaggctccaaccctagccgcgatccgacaacgcctccatccctagccgactgctgcaagcttcagagctcaagagtcagggcgccatggcgacagagacggagaccttcgcctttcaggctgagatcaaccagctgctctcactcatcatcaacaccttctattccaacaaggagatcttcctccgggagctcatttccaactcttccgatgcgttggacaaaatcaggttcgagagcctcactgacaagagcaagctcgatgcgcagccggagctgttcatccacattgtaccagacaaggcttcgaacacgctctccatcatcgacagcggcatcggcatgaccaagtccgaccttgtcaacaacctcggtaccatcgccagttcggtgtcggtttctactctgcctacctcgtcgccgagagggtcgtcgtgaccaccaagcataacgatgacgagcagtacgtgtgggaatcccagg

SEQ ID NO: 141168 - DNA, 2377 bp, Zea Mays
cttccggaagcgcaaatgataccctccactcctccagcagcgaggcccatccgcccatgccgaacctcccggaagcgcaaatggcactccagcaccagcgaacgagtctgggtctatgtcgaactttctagaagcgcggcgccaaataaataccccactacctcaatcctcgctgcccctctcgattcggaaaacctccaaggctccaaccctagccgcgatccgacaacgcctccatccctagccgactgctgcaagcttcagagctcaagagtcagggcgccatggcgacagagacggagaccttcgcctttcaggctgagatcaaccagctgctctcactcatcatcaacaccttctattccaacaaggagatcttcctccgggagctcatttccaactcttccgatgcgttggacaaaatcaggttcgagagcctcactgacaagagcaagctcgatgcgcagccggagctgttcatccacattgtaccagacaaggcttcgaacacgctctccatcatcgacagcggcatcggcatgaccaagtccgaccttgtcaacaacctcggtaccatcgccaggtccgggaccaaggagttcatggaagcccttgctgctggcgctgatgtgtctatgattgggcagttcggtgtcggtttctactctgcctacctcgtcgccgagagggtcgtcgtgaccaccaagcataacgatgacgagcagtacgtgtgggaatcccaggcgggcgggtcgttcactgttactcgtgacacgtctggggagcagcttggcaggggtactaagattacacttttcctcaaggaagatcagttagaataccttgaggagcgtcgcctcaaggatttggtcaagaagcactctgagttcatcagctaccccatctccctgtggaccgaaaagacaacggagaaggagatttctgatgatgaagatgaggaagagaagaaagacgctgaggagggaaaggttgaggatgttgacgaggagaaggaagagaaagaaaaaaagaaaaagaagatcaaggaggtttctcacgagtggtcattgatcaacaagcagaagcccatctggatgaggaagccagaagagatcacaaaggaagaatatgctgccttctacaaaagcttgacaaatgactgggaggagcatctggctgtgaagcacttctctgtggagggtcagctggagttcaaggctgttctctttgttcctaagagggccccatttgatctcttcgacacaaggaagaagcaaaacaacatcaagctctatgtgcgcagggtgtttatcatggacaactgtgaggaactgatccctgagtggctgagttttgttaagggtattgttgactctgaggaccttcccctcaatatctcccgtgagactcttcagcagaacaagatcctgaaggtgatccggaagaaccttgtgaagaagtgtgttgagctcttctttgagattgctgaaaacaaggaggactacaacaagttttatgaggctttctccaagaacctcaagcttggcatccatgaggactcgcagaacaggggcaagattgctgagcttctgagataccactccacgaagagcggtgatgagctgaccagcctcaaggattatgtgacgaggatgaaggagggacagaacgacatctactatatcactggtgagagcaagaaggcagtggagaactcccctttcctggagaagctgaagaagaggggctacgaggtcctgtacatggttgatgccattgatgagtatgctgttggtcagctcaaggatttgagggtctgtgcaagatcatcaaggaggttctgggcgacaaggttgagaaggttgtggtgtctgaccgtgttcaaaaagactatggaaatcaacccggagaacccaatcatggatgagctccgtaagcgcgccgaggctgacaagaatgacaagtcagtcaaggatcttgtgatgttgctgttcgagacagctctcctgacctccggcttcagcctggatgaccccaacacctttggcacccggatccatcgcatgctaaagctcggtctgagcatcgatgaggacaagtctgctgaggccgaagctgagatgcctccgctggaggatgacgccggcgaaagcaagatggaggaggtcgactaagcttcggatcactgtcgtttatccctaattacatatgataagctaaatcttgactactgtttgaggttttccgcacgttaacggttctcctgccggccaggcaatgagtttgctgtagctatatggtactctgttttacagtttgttcttgttatctgtaatcctactagtatagtacatgttctacatgtcgttttgcctga

SEQ ID NO: 141169 - DNA, 2688 bp, Zea Mays
cttccggaagcgcaaatgataccctccactcctccagcagcgaggcccatccgcccatgccgaacctcccggaagcgcaaatggcactccagcaccagcgaacgagtctgggtctatgtcgaactttctagaagcgcggcgccaaataaataccccactacctcaatcctcgctgcccctctcgattcggaaaacctccaaggctccaaccctagccgcgatccgacaacgcctccatccctagccgactgctgcaagcttcagagctcaagagtcagggcgccatggcgacagagacggagaccttcgcctttcaggctgagatcaaccagctgctctcactcatcatcaacaccttctattccaacaaggagatcttcctccgggagctcatttccaactcttccgatgcgttggacaaaatcaggttcgagagcctcactgacaagagcaagctcgatgcgcagccggagctgttcatccacattgtaccagacaaggcttcgaacacgctctccatcatcgacagcggcatcggcatgaccaagtccgaccttgtcaacaacctcggtaccatcgccaggtccgggaccaaggagttcatggaagcccttgctgctggcgctgatgtgtctatgattgggcagttcggtgtcggtttctactctgcctacctcgtcgccgagagggtcgtcgtgaccaccaagcataacgatgacgagcagtacgtgtgggaatcccaggcgggcgggtcgttcactgttactcgtgacacgtctggggagcagcttggcaggggtactaagattacacttttcctcaaggaagatcagttagaataccttgaggagcgtcgcctcaaggatttggtcaagaagcactctgagttcatcagctaccccatctccctgtggaccgaaaagacaacggagaaggagatttctgatgatgaagatgaggaagagaagaaagacgctgaggagggaaaggttgaggatgttgacgaggagaaggaagagaaagaaaaaaagaaaaagaagatcaaggaggtttctcacgagtggtcattgatcaacaagcagaagcccatctggatgaggaagccagaagagatcacaaaggaagaatatgctgccttctacaaaagcttgacaaatgactgggaggagcatctggctgtgaagcacttctctgtggagggtcagctggagttcaaggctgttctctttgttcctaagagggccccatttgatctcttcgacacaaggaagaagcaaaacaacatcaagctctatgtgcgcagggtgtttatcatggacaactgtgaggaactgatccctgagtggctgagttttgttaagggtattgttgactctgaggaccttcccctcaatatctcccgtgagactcttcagcagaacaagatcctgaaggtgatccggaagaaccttgtgaagaagtgtgttgagctcttctttgagattgctgaaaacaaggaggactacaacaagttttatgaggctttctccaagaacctcaagcttggcatccatgaggactcgcagaacaggggcaagattgctgagcttctgagataccactccacgaagagcggtgatgagctgaccagcctcaaggattatgtgacgaggatgaaggagggacagaacgacatctactatatcactggtgagagcaagaaggcagtggagaactcccctttcctggagaagctgaagaagaggggctacgaggtcctgtacatggttgatgccattgatgagtatgctgttggtcagctcaaggagtttgagggcaagaagcttgtctcggccaccaaggagggtctgaagcttgatgagaccgaggatgagaagaagaggaaggaggagctgaaggagaagtttgagggtctgtgcaagatcatcaaggaggttctgggcgacaaggttgagaaggttgtggtgtctgaccgtgttgtggactcaccgtgctgccttgtcactggtgagtatggctggacagccaacatggagaggatcatgaaggcgcaggccctgagggactctagcatgtcggggtacatgtcgagcaaaaagactatggaaatcaacccggagaacccaatcatggatgagctccgtaagcgcgccgaggctgacaagaatgacaagtcagtcaaggatcttgtgatgttgctgttcgagacagctctcctgacctccggcttcagcctggatgaccccaacacctttggcacccggatccatcgcatgctaaagctcggtctgagcatcgatgaggacaagtctgctgaggccgaagctgagatgcctccgctggaggatgacgccggcgaaagcaagatggaggaggtcgactaagcttcggatcactgtcgtttatccctaattacatatgataagctaaatcttgactactgtttgaggttttccgcacgttaacggttctcctgccggccaggcaatgagtttgctgtagctatatggtactctgttttacagtttgttcttgttatctgtaatcctactagtatagtacatgttctacatgtcgttttgcctgagttccggtgtttggtttcattagtccgtgtcacatcatcgtaatgtttgaatgtcaatttgagtatttaatagtctaaagaataaacaactacacaaaaaa

SEQ ID NO: 141170 - DNA, 1946 bp, Zea Mays
caggactgtgttcattttctgtgtagttatttgcttttctgtgaaagctgttggtgtttcttgtactcacctttcaacttctctcttgcagttagaataccttgaggagcgtcgcctcaaggatttggtcaagaagcactctgagttcatcagctaccccatctccctgtggaccgaaaagacaacggagaaggagatttctgatgatgaagatgaggaagagaagaaagacgctgaggagggaaaggttgaggatgttgacgaggagaaggaagagaaagaaaaaaagaaaaagaagatcaaggaggtttctcacgagtggtcattgatcaacaagcagaagcccatctggatgaggaagccagaagagatcacaaaggaagaatatgctgccttctacaaaagcttgacaaatgactgggaggagcatctggctgtgaagcacttctctgtggagggtcagctggagttcaaggctgttctctttgttcctaagagggccccatttgatctcttcgacacaaggaagaagcaaaacaacatcaagctctatgtgcgcagggtgtttatcatggacaactgtgaggaactgatccctgagtggctgagttttgttaagggtattgttgactctgaggaccttcccctcaatatctcccgtgagactcttcagcagaacaagatcctgaaggtgatccggaagaaccttgtgaagaagtgtgttgagctcttctttgagattgctgaaaacaaggaggactacaacaagttttatgaggctttctccaagaacctcaagcttggcatccatgaggactcgcagaacaggggcaagattgctgagcttctgagataccactccacgaagagcggtgatgagctgaccagcctcaaggattatgtgacgaggatgaaggagggacagaacgacatctactatatcactggtgagagcaagaaggcagtggagaactcccctttcctggagaagctgaagaagaggggctacgaggtcctgtacatggttgatgccattgatgagtatgctgttggtcagctcaaggagtttgagggcaagaagcttgtctcggccaccaaggagggtctgaagcttgatgagaccgaggatgagaagaagaggaaggaggagctgaaggagaagtttgagggtctgtgcaagatcatcaaggaggttctgggcgacaaggttgagaaggttgtggtgtctgaccgtgttgtggactcaccgtgctgccttgtcactggtgagtatggctggacagccaacatggagaggatcatgaaggcgcaggccctgagggactctagcatgtcggggtacatgtcgagcaaaaagactatggaaatcaacccggagaacccaatcatggatgagctccgtaagcgcgccgaggctgacaagaatgacaagtcagtcaaggatcttgtgatgttgctgttcgagacagctctcctgacctccggcttcagcctggatgaccccaacacctttggcacccggatccatcgcatgctaaagctcggtctgagcatcgatgaggacaagtctgctgaggccgaagctgagatgcctccgctggaggatgacgccggcgaaagcaagatggaggaggtcgactaagcttcggatcactgtcgtttatccctaattacatatgataagctaaatcttgactactgtttgaggttttccgcacgttaacggttctcctgccggccaggcaatgagtttgctgtagctatatggtactctgttttacagtttgttcttgttatctgtaatcctactagtatagtacatgttctacatgtcgttttgcctgagttccggtgtttggtttcattagtccgtgtcacatcatcgtaatgtttgaatgtcaatttgagtatttaatagtctaaagaataaacaactacacaaaaaa

SEQ ID NO: 141171 - DNA, 1431 bp, Zea Mays
gacacacgaaattctcaggtcccggtcccgggtccaggcacccttctcgctcggttgctcgggagctttccccttcctgttcctgaagcttccgacatccgaccgcctcctcctcctcgttctactcgccgccccttctagaatcatccagaggcgtgccggtgaagcgcgagagcggtgaggcatggcgatgcagacgggggtcgcgacctccaaggtcctcatcctcgtcggtgcagggatgacgggctcgatcctgctgcggaatggccgcttatctgatgtgttgggagaactccaggagattatgaagggtgtaaatcaaggaacttcttcgggtccctatgacattgcacttattcaagctcagattcggaatttagcgcaagaagtcagagatttgacattgtcaaagcccattaccatactgaatggcaaatctgactcgggaggcagtttatcatcctacatactgccagcagcagcagttggagcaatgggttattgctacatgtggtggaaggggttgtctctctcagatgtcatgtttgtcacaaaacacaacatggcaaatgctgttcagagcatgtcaaagcagttggagcaagtttcatcagcactagctgcaacaaaaagacatctaactcaacggcttgagaatttggatggcaaaatggatgaacaagtagaggtctccaaagctattagaaatgaggtcaatgatgttaaagatgacctgtctcaaattggatttgatgtcgaatcaattcagaaaatggttgctggattggagggaaagatcgagttacttgagaacaaacaggacgtggctaatactggtatctggtatctctgccaagtagcaggcggtttaaaagatggaataaacaccaggtttttccaggaaaccagtgagaagctgaagctctcacattcagctcaacctgaaaacaagccagtgaaggggcttgaatttttttcggaaagcaccatggaacagaaagtagctgactccaaaccaattgcggtgacagtcgacgctgagaagcctgagaaaaccgctgctgtaatgggcaccacagtgcacaggtctatcaggttctcatatcggaaggcaggccttgctttgtgatcaaatcctctccgcttgagatgcacgtggccttcctggttgctttttcttttttggcaacaaccttcctggttgctttgtgtgatggtcagaaaacatagaagaataacctgcaactggagtgacagaatttcttttccccgcagtagacaggtgtgcgttatttggttggaattatctccagtccactatcaattttttttccttggattttgattcattttatgtttcgatttgttgccttatatactgtaaagtcattggaaagaataaataaaacacgaatgttttttgtcaaa

SEQ ID NO: 141172 - DNA, 588 bp, Zea Mays
taaagagggataagagaacaatgccaaaaacaaaaaaacacagtagtgttcttagatcgacgatggattcattcaaactaagactagctgttgattaaccaccaccaccgtaccgtgcaatgctgcaatatgcatggagaggaaagctaacggaaagggtacttgttggactgcgagaaaaatgcctggctttcccatgtatgccgccgccgaaatcgccgatcgagttagaccctacacacaccagcaccaccaccacaccaccagttagctagctccttcagcctcggattggacgatcaccgccacctccgttccttggtcgtctctgtcccgccatgcgcggaaggcgcgcctgctgggccggcctctcgccaacaccagagagggcacgaagcagcgcacgcgcgccctcctcatctttgcccatgtcggctaggtagctacagatgcatgcaccgctcgagctagctactcgagagggctagaatgtctggcagcgaacgaaagagacggggggaggcagaaagaaaggtttgagaggtgctgctgctgcttgctagctagctgagcgcctgagctgcctgc

SEQ ID NO: 141173 - DNA, 966 bp, Zea Mays
atgtccaaaagaatgactccagcaacccattcaagacgaaatcaagtgtggggggcaggggaagcacgaacaccacacatggcaagaacggacccacaaccacaagtctcctcaccactggagaatcaagcagcctgctgcggcggcgagcagcaaggaactggcaacgccgacggcgcccgtgtcgcgcgcggcgctggtggagtcacccttgccgcccgtcagcccgccggccttgccggccgccgggccgggggcgtcggacgcgccgggctccggggcgggcgcgggcaccggcgccagcggcgggtccttgctgaagagctgcatgggcaggagcaccttgttgagcgcgtagacggcgacgggcctggtggcgtacacgctgctggcgatcttgggcctggaccacatggactgcacgtagatgctgcccatgtcgtcggtgaggttgagcgtgtagggcgacccggcgaaggtgttcaccgggttgagcgagctcaggttcttgaactcggccagggagtagaacttgggcaacgcgtggtacagcagcagcgtcttcagctggtcggcggtgaggttggagaaggtggactgcttcagcgccgagaacgccgagtccttgggcacgaacacggtgatgcccaccttggtgttgttggcctgcccctggaaggtctcgatcacgttgctcttctccaggtagttgaggaacgtgtggaacgggcccgccacgctcaggagctccgcgaggtccacgtagtgcggcgccggcgccggtgccggggtcggcggcagcgacatgggcgccggcgccggcgggctgctcttctgacccaatgccggggcgaagaggacggccagtacagccgcggcaagaataattgctgccttggactccatcattgcagcgtctgtctcgcgcacctgatcctctctactaccttctctgatgcaagcccc

SEQ ID NO: 141174 - DNA, 902 bp, Zea Mays
gaccagaccacgacgtcgcgcgcggccaccactgggctcgtcgccgatcgctataaaacgcggccgctgccttgccgcctttcttcaagccgagaccaagaaaacacaagtacagactacagagccatctttgatctttccagtccaagatgagcgtggagatcctcgacgggcggacggtgcagagcttcgtggaggacgagcgcgcgttcaactcgtccgtggacgcccgcttcgcggcgctggacgtggaccgcgacggccgcctctcgtacgccgagatggccggggagctcatggcgctgcgcgtgcgggaggcgcacttcggggccgacgcgccggcgcccgcggccgagctcgccgcgctgtacggggcgctcttcgcgcgcttcgaccgcgacggggacggcgccgtggaccgcgacgagttccgcgccgggatgagggaggtcatgctcgccgtcgccagcggcctcggcgtgctccccgtgcagatggtggtcgaggaaggcagcctcctcaagtgggccgtcgacagggagctggccactaccatgccagcttgaccagctcggctccatcagctagctgcctgacagtgtgcactagcgctagtgtactcaccgctagctgaatgagagctttatcacctatgtatgtatgtaaccgtacgccgagggtgtcggtctaatttgggctcgtttaacgttttcgtgtttgtagacctgacatgagtatgtaacgtacgcactgaaccttttttatcagtccgaaaactagcgttttacacttttactccaagagacttcatgcatcgttgcaagatgcgagttgtaaaatggaattggagcaccacccacccaatctcctcattggaggcttggagccctccttgtatcacc

SEQ ID NO: 141175 - DNA, 1717 bp, Zea Mays
cgcgatcggcccaaagtgggtctggactcgcacgagtacccctcgtgcgccgcatgttcaatgttgctcgcttcacctgctctgtcgccgccgaacaccgccgccaggctccccctcctcactgcactgaacgaaaaacggcagcaagccgcccgcccacgcccacgcccacgcccacgccccgcccaccgacccgacaaaaatgccggggatgttggcggcgcagtttacggctctctctctatcccagtcaccttcgccacagtccagcttacgccttgccatccgcccttcgctggcggcgagggcccgctttgtcgctccgcggacagcagcctctgcggccgccgtatccgctaaaccggcggcggtttcgtctcccctaattgaggaccgcactgtcgtccgtatcgggctccccagcaagggccgcatggccgagcaaaccctaagcctcctcaagagttgccagttgtcggtgaggcagctcaacccgcggcagtacactgcagatatcccgctgattccaaatttggaggtttggtttcaaaggcctaaggacattgttcgtaaacttcagtcaggcgatcttgaccttggtgttgtgggttttgacatagttagtgaatatggaaacggcaatgaggatttagtggtcgttcatgatgctcttgagtttggacattgtcgtttgtcccttgcggtacctaaggaaggcatttttgagaacatacatactatggaagatttgctaaagatgactgaatggacagaagaaaggccactacgtgttgttactggatttggatatctaggcaataagttcttaagagagaaaggttttaagcatgttcgttttttatctgccgatggagctcttgagtcatatcctcctatgggtatggctgatgctattgtggatctcgtgagtagcggaacgaccttgcgtgagaataacctaaaggaaattgatggtggagtagttctggaaagccaggccactcttgtagcaagtaggaaatctctgcacaagcgtaaaggtgtgctggaggttactcatgagttgcttgaaagattagaagctcacctaagagcaactgcagaattaatggtcaccgcaaacatgaggggcaacagcgcagaagaagtggcagagagagttcttagccaaacatcaatatggggattgcagggcccgactgtaagtcctgtctatcgcagacgtgatggaaaagttgatgtggaatactatgccattaatgtggttgttccacagaagttgctttacaaatctatccaacaactgagatcaattggtggcagtggagtcttggtaacaaagctgacctacatattcgacgaggagacgccaaggtggcgcaatctcctctcggagctggggttgtaacttgggcgcatggtcaacttcgggtctcttctacaagttcccatatgtactgcaccacattcgtttgtcagtaccgaagcatgtaaacccatatgcagaagtgagaccgtgtggtatctgttttgtacctcttcgcttcaggaaattttggcctgtatcttgaccatctgagatgtattgatagagttgggtaatgctgttgggcgtatgtgtatttcttgtgcggttgtgcctgacttctcttgccggggcactgaataatcggccatgtttgaataaagaaagccggtatggttctcattcatgacc

SEQ ID NO: 141176 - DNA, 679 bp, Zea Mays
gctcgatcgatctcactctcagctggtcgctcactcttgcagctcctgctggtcccgaggagactcccgcggccgagcaggaggcagccgccgaggaggaggctgctgctgctcctcctgctggtgccgaggagcccgccgcggccgagccggtcgccgaggcagaggctgctgctcccgaggagctcgccgcggacgagccggaggctcctgctcctgctggtccccaggagccggccgccgaggcggaggaggttgctgctcctgaggagcccgagaaggccagcgagtgaggccgtgcgcacgcagcggcggcggccagggcccaggggatcggcgtgcgcgcgtggcggggtagtcgctcgcgcgcgtacatggcagtatgacacgggattttgctgttcagtacgctacggttattactggcgtctctctctgtgtgtgtgtgtgtctcgtacgtagcccggtacgtagctagcagtgactgtcgcgtggacgtgtccggtgcgggctgcgagtgacgtgggctaaataaagtgtgcgtcgggtggtaatggtggtggggcccggtgtcagtggcgcggtgccccatgcctgccgctgctgcagcttgttgtgtcttgtgttggttggttcctgttctttctgtctatctattctcatgcatggcagtttgggt

SEQ ID NO: 141177 - DNA, 121 bp, Zea Mays
gttggtttagatacaggatctgttttgtggatatggtcggttttagagataggatctgttttgtggatagggtcggttttgtaggatggaagcggatggacagaatcaaactgaaccaaaa

SEQ ID NO: 141178 - DNA, 1303 bp, Zea Mays
gagcagctgtcgcttttgacctatcggggggcgccgggcgggcgtaacggaaccaaggcggccaggtagctgctgtgctgctacgagtagtaagcactatatatataacgggcaacggcaaagccatcgtcgtcgtcgtggaactcgtacttgcgtgcgtgcgcacaagaacgcgggtcagagctgctggcggttggaggagcagaggagatcgctgtgcgggcggcgatggagaagccccggcaggtggcgcggaaattcctggcccggccgcagcacgagggcgccggcgccgtcgtccgccgcagcatcggcaggttcgagctgaggtacttcgacccgttccttgtcctcgacgagttcacagtttctgctccggccggcttccccgaccacccgcaccgaggcttcgagaccgtcacctacatgcttgagggcgccgtgacgcacgaggacttcgagggccaccgtggcaccatcaaggccggcgacgtgcagtggatgacggccggccgcggcatcgtgcactccgagatgcccgccggccccggcacgtccaggggcctgcagctctgggtcaacctctcctccgccaacaaaatggtcgagcccgggtaccaggagatccagagcaaggacatcgcgtgcacgtccgacggcgacggcggcgtcacggtgcgcgtgatcgccggccacgccatgggcgtgcgctcgccggtgcgcacgcgcacgccgaccatgtacctggacttcacggtgcgcccgcgcggcgcggtgcggcagcccgtgcgcgcgtcctggaacgccttcgcctacgtgctggagggcgagggcgtgttcggcgccgagcggtgcgcgcccgtcggcgcccaccacctgctgctgctcggccacggcgacggcctcgaggtctggaacaagttgcccgaccgcccgctccgcttcctgctcgtcgccggcgagcccatcggggagcccgtcgcgcagctcggccccttcgtcatgaacaccgaggaggagatcgacatgaccgtcaacgacttcgagtgctacgccaatgggttcgagaaggcccgccactggaagtcgcaggcgatgctggcgcttggcgtagagtagggcgagacatgagcacaggatcaccaaagaaaacgaatagatttttttttgcttcttttttccccattattatcgttccggtttgttgcgttcaattttaacccccaacattggatcgctttgtgtacatatctgccgtaaattatttttttatcaataacgaaattaccagctgttcataaaa

SEQ ID NO: 141179 - DNA, 93 bp, Zea Mays
atgcgcgaagtaggagttgatgaacacccatgcctctcggtttgctttcaaactgtctcaaagatgtcagcattccacttctcagtcctgccc

SEQ ID NO: 141180 - DNA, 2017 bp, Zea Mays
cacgggatgaacgcaactcactgccgtgtagtattacttttcgttattaccgtggcagccgtgtttgtgtgttctcccagtttcccgcgcctatagaagcagccagcaaacctcactcctcaagacctcaacaaagcaagcaatcgaacgggcacggctggtttccgacgagttctgtcgtgccatggatccgcgacgcgcatgctgggagagctcgacggaggacgtgacgaggccgctgctgcccgtgcacgacgacaggcctgcgggacgctgctcttgctccgggctcgggtccctgctcaccaccaacaagtacctggccgtcgcgtcgggcccgctggcgtgcgcggtgatctgcgcgctgggagacttcggcggccacccggcggcgcgcaacatgctcggggtgctggcgtgggtgttcctgtggtggatcacggacgccgtgccgctcggcgtcgcgtccatggcgccgctgttcctcttccccgcgttcggcgtatcctccgccgacgccgtcgccaaggcctacatggacgacgtcatctccctcgtcctcgggagcttcatcctcgcgctcgccatcgagcactacggcatccaccgccgccttgccctcaacatcacgtccctgttctgcggtgacccggtgaagccgcacctgctgctcctcggcatctgcggcacgaccgtgttcatcagcatgtggatccacaacacgccgtgcaccgtcatgatgatccaggtggcgacggggatcctgcagcggttcccgcgcgaccagcagctggagggcggggccgacgcccgggagctccagcggttctccaaggcgctggtgctcggcatcatgtacgcgtccaccatcggcgggatggccacgctgacgggcacgggcgccaacatcatcctggtggggatgtggtccacctacttcccggagcagcgccccatcaccttcagctcctggatgtgcttcggcctccccatgacgctcgtcctgttcgcggcgctctgggtcacgctctgcctcaggtactgcaccaagaacacggggagggtgctctccgcttacctcgacaggaatgacctcagaagagagctcagcttgatgggtccaatggcgtttgcagagaagatggttttggccgttttcggggctctcatcgtcctatggatgaccaggagcctgacggacgacatccctgggtgggcggtcctcttcgacggcagagtcggggacggaaccgtcactatcatgatgacgacgctgctgttcatcatcccgagcggcaagagcggcggcgagaagctcatggactggggcaagtgccggaagctgcagtggcacatcatcctgctcctgggcgcgggcttcgccatcgccgacgggttcaggtcgagcggcctcacggacatcctctcctcggggctgggtttcctgaagggcgcgccggcgctggccatcgcgcccgtggcctgcgtcttcagcggcctcatcacggagttcacctccgacgacgccaccaccacgctggtgctgccgctgctcgccgagctgggcaagtccatcggcgtgcacccgctgcttctcatggtccccggcaccgtcggcgcgcagctgtcgttcctgctgcccaccgcgacgccggggaacgtcgtcgggttcggcaccgggtacatcaccatcagggacatggtggtcactggcatgccaatcaaactcgtcggcgttgcagctctcacgatactactgccaactctaggttctctggtttttggcatggattcgaaaatgtaggaacttggacgttagtctagtagcagttgtagaacgttcaggctgtacagtttgtcaaattcgttgcctcaggaagaaaatgaggttgtattgtgttgatcgtattccttgcttcaggtccgagttagaagagagatttgtacgcaaatgatttcatatgtaaacatgagatttatagcttatctccctgacctgcattgccgtacattccaa

SEQ ID NO: 141181 - DNA, 1842 bp, Zea Mays
accacacaagctaagcgtgtctaccacactgtagccggaggccggagcaacttgtagatgtagcccaggacgatcctgcaggtagctagcagtgcaaagccctcctagctagcttagctactaccagctccgatcctgtgctgctgccatggagaatccctacacgagcttcttcaacagccatccgcagcaccaccgctactactaccaccccgcgccgccaccgccagcgccggcgccagccgcctaccacccctccctgcctttcttcgctgcgcaccgccagccacctgctccgacggcgcccgccccgccctcgcccccgctccgggaagccctgccgctgctctccctggcccccacgcggcatgaggagcgggagcgccgcgcccggccaccggcaccagcgttggaggattctgaagagaacggccgggacgagggagaagaagagcaggaggaggaggagggccccaccgcgagcagcaagagcaaccacggccagcaccagcgcctgggagtgggacgacagcgagggttcttcgccgacctgaacgccagcgcggcgggtgacgatgacgacccgatggacgtggagccggaggctgcagccgacggctccggctccggctccgcggcggcgggcgacgacgtgaccgtggcgctgcgcatcggtctgccgctgccgggacctgccgagctggtctcggacctctcctcttccggcggcgcccgcaggcaacagcaccagcacgacggcggcggcggcgaggaggaggaggaggatgaggagggtgacggggagaacggtggcggcggcgaggaggaaggaaccaccgcggcggcgccgctagggttcccgtcctcgccgattgggcggctcaacaaggggcagtactggatcccgacgccgtcgcagatcctcatcggcccgacgcagttctcctgccccgtctgcttcaagaccttcaaccgctacaacaacatgcagatgcacatgtggggtcacgggtcacagtaccgcaagggcccggagtcgctgcggggcatccagccgacggccatgctgcggctgccgtgctactgctgctcgccggggtgccgcaacaacatcgaccacccgcgcgccaagccgctcaaggacttccgcacgctgcagacgcactacaagcgcaagcacggcctcaagcccttcctctgccgccgctgcggcaaggccttcgccgtcaagggcgactggcgcacgcacgagaagaactgcggcaggctctggtactgcctctgcggctccgagttcaagcacaagcgctcgctcaaggaccacgcccgcgccttcggccgcggccacggcttcgtcggcggcggccctcctggcgccgggtgcggcgggggactcgacgacgacgatgacggcgctgtttccgacgtcgagcacgacggtgccgccacggcggccaggtcgatgtgaccgatccatgcagctgccatctatggatcgatcgagctctctatattcctagccggccggcaggtcaatattatatatacttattagtaggccgaccgactggtgcaagtgcaaaagaaaatctgttgtaccatatagtaacagattatcaagctgttctttcattttgcagctgctgtagcgctactgctatatagagtcggttctcttcgtctgctccgtcctagttaagtgcagcacacggctcatccctggcacgagaaataaatcacgggcatgcgtgtgtcaacagctagaatatgtgctcgattgatgcacagtgtgttagaatttattgtccattttctaataatattttttactgttgaagttca

SEQ ID NO: 141182 - DNA, 1300 bp, Zea Mays
ggcgagatcgggctgttctcgtcgtcgtcgccgcaccagggcatcgacggcgagtggagcgacaagagcgggatcattgtgtaccgctggaacgactaggggaggcggcccaacacaggccacgctaaatggaagaagcgctggagctactgcaggagcgcgaggaggacgcgccgccggccgtgccgacgccggttgcacgtctcctacgacgacggctactccctccatccgtggggtgcatatgtgctgtgccaataaaaccttgtaccggtatcagacgacaaattacctgtgatgtctatcacttgagtagtacagaagacatctagttgagattgccgtggccgaatgaaatgaaaccatgtggcccgaggcgggctcgacagcaaaacacggttaacgagcttggcgagtgaggccacggctgacgctctgtggctcccgacagcccacgctgacgctttgtggctccaaggtcctcgcttccatccaccccgacaggccacggctccgcccccaccgctctcgctagtcgctaccatggtggtatcctacacggaggagcacgtgtaccgccacccctggcaccgggtgaccgccgcggcgatgcgcaagttcacggacccggccgcgcgcgccgcctccggggcgctctcccacatcctggacgtccacacgctgtcccgcgacgtggacgcgcggtcgggccggctgcgcgccgtgcgcgccatcgcggggcggacgccgccgctcccgttccctatccgcgccgccgtggcgggagcgggcggcgacgtggtggtgctctgcgtcgagcgcacggacgtggacgcgcccgcgcgcgacatgcgggtggcctcccgtaacgccacgctccgggggctcgtcgacgtgcgggagcggtgcagctacgagccccacccggcgcggcccgacgagtggaccctgttccggcaggagacgaccatccgctgctgcgcgccgctggcggccgtggcggccaaggtggccgagctcgtggagcggcgctgcgcggagaggttcgcgcagaacgcgggcagggggaaggaggtcgtggagcgcatctgcgaggaccttgcggcggagcaggactcgctcgccagctgaggtacaagttggaacggcgaccaagagagcgtggtgtttgtgccagtgccgaaaattgctgatgcatcacggtgctttgctgtctgtgtgcagaggcttgggccttgtgtgatgtgtgattgtgaatgctccacgtcaaataaaaaaaaggtgaaaatagttcgaaaaa

SEQ ID NO: 141183 - DNA, 1606 bp, Zea Mays
atgcacagcgtgccatgttattcacattcctttgccgtctgcgccagggtgcgagccccgcggcctaggtcgcgacaggtggccagccgaaaccgggaggcaggagcgcgaggcagaggggcagcgtcatcacccgggcgcgcgccaacgacaacgaggccgaggccggaaataacacgccgggcgggcgggtcactgctgctgcctttgccgctgcgcgtccgcggaaggggacgcgtccccgtccgtcttcccacttttccccgataaaaccacgggcgcctctcgtccattcctcgctcgcccaccctccccgcggatcacagacagcctgtgcccgccttccagtccacaatctccctgcctctcctctcccaccctccctccgaaaagcaagctccggcccggaccgccccaccgcgcgcgcgcatacacagagagagagagagagaccgcacggtcgttcggggttcctttggccaggcgcacgacacgagcatggcgcagcgcgacaagaaggaggagcccacggagctgcgggcgccggagatcgcgctctgcgccaacaactgcggcttcccgggcaacccggccacgcagaacctgtgccagagctgcttctcggcgtcgaggtcgtcgtcgtcgtcttcgcagccgtcccctacctcctctccctcagcttccgcgccggccgccgcggtgccgcagccgaggccggcgctcctggacgcggcgctgcagctggcgcctccggccgcggccgcgggccagcctgtggaggcctcggccaggacttctgccaaccggtgctccagctgccggaagcgcgtggggctgacggggttccggtgccgctgcggcgacctgttctgcggcgcgcaccggtactcggaccgccacggctgccgctacgactacaggggcgccgcccgggacgccatcgcccgggagaacccggtggtgcgcgcggccaagatcgttaggttctgattcgaccggcgggcggaggaaggaattgcagagagggaaaacgaagattccaagggcggaaggggggaaaggcatgcgaaatcagagaggtcttcggtgttactactatgctgttcttggacgtgtttgatttttaatctccttttatatatatatatatatataattttcctacggaggtgggaggagaggaggtggacgaagaatagtgtaatgataatggtggtggtgcagcggcggtggttgagggcccaaaacgatgaacacatggggttgggttgggtgtatgtatctatctgtcacacgcagcttttgtgcaagactattatactacatcgctggtccctccaatttgctcgatcgttcaggctcctaatcatatctgccgaccccccgtatttcctccgcttaaactttttgctcgcggagaatgagaagcactgaagcaatcaagtcctctttttttttcccgtctggcccacatgccaatctccataatggaaccgtcgcattatcgcgccgcggtcggcacaatagtcatctcccgggccggctggccagcgtgccacggcgtcgccgaattttttttgtattttagcctttcaacagaagtaaa

SEQ ID NO: 141184 - DNA, 1715 bp, Zea Mays
ggcgctccaagtccccgcccgcccttggcaacaagcgcgacacgccacgacacggcccgcgcgatcacgcacgctcatgccactggcgccactcatggagatcgacctgcacgccgtgcgcgcggtgcgcgtgctgggccgcggcgccatgggcacggtcttcctcgccgtgaacggcgccggcggggaggcctacgcgctcaaggtcttcgacaagcgctcccccgcggtagcgtccaggccgtccgcgggcaccgacgcggcgcggcgcgcgcggtgggaggtgtccgtgctgtccaggctcgcgcacccgcacctgccgtccctgctcggctgcgccgagacgcccgacctgctggcgtgggcactgccctactgccccggcggggacctgaacgagctccgccacgcgcagcccgaccgcgtgttctcccccgcggccatccggttctacgtcgccgaggtggtgtccgcgctcgccgagctccacgccgccgggatcgcgtaccgcgacctcaagcccgagaacgtgctcctccgcgccgacggccacgtcacgctgaccgacttcgacctctcgcggcagctcccgcccaggtccccctccgccgcatccacgtccacctcctcgtcgtgctcggcgacatcgtctccgccgccacaggcccagagccacggccggagccagcaccgccacgtgaagaacatcttcaagagaagcgagtccgcggtgaccgcgtcaacctccggacaggaggaaccgcgcaacctcgcctggtacctgagcaaaagaatcgacggcggcgccgaccagatcaagaaggcgaagtcggccagggtgtcgccgatggaccgcggcaagaagctctcgagcttctgctccgccgcagcagcgggggagcggtcgttctcgttcgtgggcaccgaggagtacgttgcgccggaggtggtgcgcggcgacgggcacgagttcgcggtcgactggtgggcgctcggggtgctcgtctacgagatgtcccacgggcggacgccgttccggggccggggccggaaggagacgttccggaacgtgctgctccgggagccggagttcacggcggacgcgcggcggcggtggccggagctgacggacctcatcgcgaggctgctggagaaggaccctgcgcggaggctgggtttcgccggcggcgccgacgaggtccgggcgcacccgttcttcgccggggtggcgtgggacctgctcggggaggtgtcccggccgccctacattcccgcgccggccgatgacactgtctcctgcgagggattcagcgtggtggagtacttcgataggcttcaccagcctccgctgtcgccagcggagtactcgcccgaggaagagctcttgccggagttctgacactggttgtgccgtcgccggcggagcactcgcccgaggaagagctcttgccggagttctgacgtcggttgttccgttgttgtcgctcgagatttgtgctccctgttgttttcgttctgcgccctctaagatcgatcactatgtgtgaacagagaggggcttttgttagttaaccaagatacagtcgatgattcgacactcgacagatgagacttgtggtttcaagtctctcgtcagtttttactgtatactgtaaccgtaactgaactactgaaggtgtcaggcactgatgcacgaatatgaattccttgtgcat

SEQ ID NO: 141185 - DNA, 1279 bp, Zea Mays
atgttttaaactgctacgcctacaacacgcctccccagtcaacacagctcagctcagctcggctagcgagctcctcgctcggctctactagctagtgtgttgggacttgggagctaggcggggttgattgcgattgggggaggcgggagtaggtgatgtacggcgcgccgttgcccaaggacctgaacctgccagcagccctgccgcagccgaccaggacgccaccgcagcagcagatgggctccccgggactgctgcggtacaggtcagcgccgagcacgctgctcggcgaggtgatgtgtggtggtgatcaggacttccccgcggctggcggcgcagggcacggaccaccggaccacgccgccgcggacaacgtcctcgcgcgctttctcgccgggcaccactccgagacccgcgactgcaagcctccccgccccgccgccgccgctcacttcatggacgaagctgccgtcgcgtccatggccgcctcacagcagcagcagctcatgtaccagtcgcagcaggagcagcagatggccgccatggaggggctgtaccgcaacgtcagctccggcggcacggagcacggtgcagccgttggcgctggtaacaacagcctgatccgccagagcagctcccccgccggcttcctcaaccacttgaacatggacaacgggtacgggagcatgctccgggtgggcatgggcggcggcgggttcaggaacggcgtcagcgacgcgcggctcaaggggcagctgagcttctcgtcccggcaggggtcggtgatgtcgcagatctcggaggtgggcagcgaggagctcgacggaggcggcggcagcggcagccccgaggcggccggcagcaacgccagcggcgcggcgcgtgggtacagcggcatcccggggtacccgatgggcggcctcgcgtccggcgcctggccggacgaggcgtcgccgtcgccgacgtccggcgcgaagcgcccccgcgactccggccccgcgctgcagcagccgctggcgccgcagctcagcctgcccagcggaaagaacaagggcggcagggcggcctcggcggagatggcggcgatcgagaagttcctccagttccaggacgccgtcccctgcaagatccgcgccaagcgcgggtgcgccacccacccgcgcagcatcgccgagcgggttcgctgcattcctgctcgctgctactctcgaattcctcgcttggttttaattcccagcccaatccaaaaagagaacgaaagcaaaaaaaaaaaaaaaaa

SEQ ID NO: 141186 - DNA, 1713 bp, Zea Mays
acagctcagctcagctcggctagcgagctcctcgctcggctctactagctagtgtgttgggacttgggagctaggcggggttgattgcgattgggggaggcgggagtaggtgatgtacggcgcgccgttgcccaaggacctgaacctgccagcagccctgccgcagccgaccaggacgccaccgcagcagcagatgggctccccgggactgctgcggtacaggtcagcgccgagcacgctgctcggcgaggtgatgtgtggtggtgatcaggacttccccgcggctggcggcgcagggcacggaccaccggaccacgccgccgcggacaacgtcctcgcgcgctttctcgccgggcaccactccgagacccgcgactgcaagcctccccgccccgccgccgccgctcacttcatggacgaagctgccgtcgcgtccatggccgcctcacagcagcagcagctcatgtaccagtcgcagcaggagcagcagatggccgccatggaggggctgtaccgcaacgtcagctccggcggcacggagcacggtgcagccgttggcgctggtaacaacagcctgatccgccagagcagctcccccgccggcttcctcaaccacttgaacatggacaacgggtacgggagcatgctccgggtgggcatgggcggcggcgggttcaggaacggcgtcagcgacgcgcggctcaaggggcagctgagcttctcgtcccggcaggggtcggtgatgtcgcagatctcggaggtgggcagcgaggagctcgacggaggcggcggcagcggcagccccgaggcggccggcagcaacgccagcggcgcggcgcgtgggtacagcggcatcccggggtacccgatgggcggcctcgcgtccggcgcctggccggacgaggcgtcgccgtcgccgacgtccggcgcgaagcgcccccgcgactccggccccgcgctgcagcagccgctggcgccgcagctcagcctgcccagcggaaagaacaagggcggcagggcggcctcggcggagatggcggcgatcgagaagttcctccagttccaggacgccgtcccctgcaagatccgcgccaagcgcgggtgcgccacccacccgcgcagcatcgccgagcgggtgaggaggacgaagatcagcgagcggatacggaagctgcaggagctcgtgcccaacatggaaaagcaaaccaacactgccgacatgctggatctggccgtggactacatcaaggatcttcagaagcaggtcaaggtactgaacgacggccgcgccagctgcacctgctccgccggcgagctgcagggccagttcacccgttaaaaaggagccgcgccacctttttctcaggggggccagttcagctcgcatagttgcgttacgttacatggtgaggactgatcgaggaggtatatattggaattgagacgatagtagctagtctgtacatgcaacaagttcattagcaggcagagtaggcctcgcatgttagtgatagctgcgtcagttaatgtacgtttagattgcacatgtattcatcttgatttacatgtgttagagtagtttagtgtggattttagtttaaatttcacattaatccacttcaacatacattaaccgatgtgggtatatatgaccatctaattagaatctttatatacacatgtatttactcaatccacatgattagcctgtcc

SEQ ID NO: 141187 - DNA, 730 bp, Zea Mays
tgagccactgcggcgacgtgcggagcgcgtaccggtcctgcttgggcttcatcaaggggtcgagctcgccaagcttgttggcaagcttcatgaaggagctgccctccaagatgtgctccatgatggcagcagcctcgatctgtcccgggtggtgcttgagcttgtgggtcaggtggtcggtgtactctggcttgcctgtcatgacctcgcagaacgcgacggacaggacctcggcgaggatggcaaggatgttagcctcgaagagcacagtggaggcgaggccagagcccacggtcgtgccattcaccatcgcaagaccctccttgggctgcagctcgaagaagccgccctggattccggcaatcttgaatgcctcggtggcgttgaccttgctgccgtctagggcgagcgcaacaaagttctcacgtccagtgacgaggtcggcaatgtaggagagcggcacgaggtctctggacgcggtgaccgtgccgcgcagcggcaggcacgtcgtgacgttggcgttgagcagcttgacgatcgcctcgaggatctcgaagcggatcccggagtacccctggaggagggtgttgatgcggacgagcatggccgccgcacgcgttgcctcggccgggaggacgtggccgtccgtgccggtgccgaaggcgccggcgttgaggaacctgatgagctccctctggagagcgccgcctgttgaacttaatctcgtgcg

SEQ ID NO: 141188 - DNA, 291 bp, Zea Mays
ctgtttaaccaattgattgttatcatacagaacgaaaaagaatagttgtttggtcaattcaatatgtcataggtgggcttctcatttctgaaatatgtataagttcatatcaacttccttgggtttctttttagctattttcacttgtattgtagtaagaggtatagagcctacaactgtttcagtttcagtatttgtggtctttttcctcccattgtgatgaaccacaattgtccatccatcttctgctgcacgagcctctctttatttcttttcctcaattaactgatg

SEQ ID NO: 141189 - DNA, 3192 bp, Zea Mays
gtggagcgtggaccggagcgaagagagtacgagcagaggagaccgaggaaatctcgggacgtgcccgctgccgaccgatcgggggctcgaacccggcgcgtccgagatccacgagcggaatctatccaggctcacactcactgcctcaggtgtgtcacgggcggcacccgggggcgcgtccccggccgccgtccatccactcgacaaaaagcaaccgagacgagggcggtcctttctccgggctctggtaggggaggggaaggggaggagcagagccgggagccatggcggagccgggcgacgggagtaggcggcggcgggaggcggaggcgccggtggtggcgctggagtgcgtggcggggagctccaaggcggaggagtggggaggcggcgcgggcgtcgtgcaggagggggacgtggtggaggccgtccgcgtcggccgcggctccggcggcgggggcgccgcggccgcgctggagctcgaggcgccattcaagggcgggcgcgccgggctgcacaaggcgctgcacgcggcgttcaagcgcggggacacctccgtggaggtgcgcgtgcggggcggcaggcagctgcaggcctgcatcgtgccgcaccacgccagtcccggcgccggcggcggaggggtcaggaagcagtacgtcctgcggtcgctgcacgaccccaactacttgctcggattcgtcgaccgcctcgagagcgagtgcctcgtcttacaaggaacgaggagcacaagagtcgcgtcagccttgagcaaggcgcagctccaggatggctatgtcgcgtacccatgggacaagaagatgcgcgacacgctgcacacgcccaactccagctgctacctctcgatgcttgtcctgcccaaggctctggacagcaatgcctgtcactacgagtccttcgacgacaccgtggcgcgtgccaatgcatggttctactcttcgcaggccgccgggatacccatcgacttcatgaatgtgcagagcgaagctcttctcaccaagatatctggagagacagcgtccgcgtctgtgaattcgagctcattatctgatctgtcgaacgtcactaatgcgacgctctacggttttgaagattaccatggagtggatattggtgtggtaaaggcagcacggctttggtacagctgcgtaggaggagaattgctgctggaaatcccacttgaagaaggtgacacaaggcttggctttgctatcagccgaactgaagagggctttatctacatatcatctgtagtggaagatgacaaggaaagcgaggcaccatctacgcggtctgggctctgtgatctgttcaaccgggccaaggaggcgtcgaaactgctgatcatctcgagggtgtccaatgagaaggtcctaccttggatgatctccagttcaggggcagtccgctgcttcgacaccatctccctcagccagaaactctccttgcaccgcctcgcagtgcgccccatccagctgcatctacttgcctgggagaagccttctgctcccaacccagcagagagggccgtgcgttccccaaagctcaccatgccttcaacgctgctccctcacctacagcaaaaccttgtggagaccatagaaggcggagtagatgctgaagaggagtacgtggggaatttgtcgtttcggatcgatgatatctcatttgagagcagctgggtgtgattccaggtttcaattttgtcatacaggcggctgatgtgcatacatatgttttcatcttgtctagttctctagggcggtaatgctcagttctgtgcttcagaaaatgcagatgctggcttcaaaatgttcagaatatttcttgttttctagccgaatcagggatggataacatctgaaaagtatcttgtaatggaacatttttgttgatcataacataacaaaggagtgatccaaacatgttggtcaaagaaagctcaggcttcacttcgttagttgtttactccaaatctacagcaaacatgcggttcagcacctcaagtttcttgacctttggctcaaaacaaaaaaagaaaaatgttacacgagtgagttgacaccacactagctgttggtcaaagagacacaattatgctgccgatcttgttttgaggaccctgcacttgagcactctatcttgcacgtaaaaccccggcgtcaccattatcttcacttgacaaggactctgcaccggctgcctgtcatgcaggatgtcttccatgtacagctcatcaaatgcgcggccgtcttggacgcgcaggatcgtcagcggcgggccgaaggagaaggccagcaggtggagcagccagacgcacttggcggcgacgaagaagcactgaagcaactgctcgggccacggccgggaccaggcaagcgtcgccacgacgacgctcatcttccggtcgcagaaacggctgaagtcctcgctgtagtacttggtgcccttccgcagaacctcgttccagctaaggttgcgcagcgccacgaaggctgcgaagctctgccggctgtcttccgccgggtcgaggcacctcggcgagccgttccgctggaacgcggggttctcgaagtcctggaacatgacctggttcatgatcgcctcaagatggtacagcacggccttcgagcagtgtttgctgacgctgccgctgctgagcgcgagctggtacgggcgaaggagcaggttcagcttgtcggacaggccgtcactggactcttcgttcacctgctggatcagcgccttgcagagctgcttcacagagagccgcgcctccgacgcgatctgcaagaagccttccaccatcacctcgtggctcaccggcatcgagagctctcggctgggttcgatcgatttcgtcggtctccgggagacggacggcgagttggtggcctgccgcagtgccttcttgagctccgagcagtacgcttccacgctcaccagcttggtggccagctcccccagcgacgacctcacctcggcagcttcgtgcagggcggcgtcccggtgcgcgttggcctccgcgagctctttcttgagggactccatagatagcgccccccactcggtcagcagctgcggcatgttgccgcgctcgatggccgtcggcgacgtcatctccggtggcttggctttctttctcgacttggggaagagccacgagaggatctg

SEQ ID NO: 141190 - DNA, 853 bp, Zea Mays
tttacttctcccgttcgtcccccgtgctctttctccctctcgtggcgctgggcgaccgcctacgcaggccaggcgccgtcgccctaagctacgccaggttcccgggtcttggtcggtcccttcaccggcgaagagcacccaccagacgcgccggtgcctggatccggaggaagtgctgcgggtttcggcggttcgtctctctcgttgtttccggcggggttatgaaggcggtgggatacaacctctacgatagcagcgggactgatgacgatctccctccagcacaaaatagaggattgagaggacgggttttcagtgggaatggccgagcatctgctggggcatttccttacatgagggcaaataatgatttggagagtgaaatacatcgagttgagcaagatgcatatactggtgttcttagggcatttaaagtgcaatctgatgcaatatcctgggaaaaagagagcttgattactgaactcaggaaagaactgagggtttctgatgaggagcatagggagctattaaataaagtcaatgaagatgggagcatccgtcaaatgagggagttaagacaggcaggtggaatcccaagtggtctgcatcgtggcaacagggttttatatgatgcagaacctgggcccactaccaagaggcaaagggcatctcattcgattccttcgcaatctgcaggcctccagtcccctatgatgccctcccactcagtttcatctgcaaaatggggtcctttgtcagcaagaggcaagaaggcgaagatggtatgttcagaattttatgcataatattttttgcatcctgtgatatatttatataacagcctgagaacaat

SEQ ID NO: 141191 - DNA, 1710 bp, Zea Mays
tttacttctcccgttcgtcccccgtgctctttctccctctcgtggcgctgggcgaccgcctacgcaggccaggcgccgtcgccctaagctacgccaggttcccgggtcttggtcggtcccttcaccggcgaagagcacccaccagacgcgccggtgcctggatccggaggaagtgctgcgggtttcggcggttcgtctctctcgttgtttccggcggggttatgaaggcggtgggatacaacctctacgatagcagcgggactgatgacgatctccctccagcacaaaatagaggattgagaggacgggttttcagtgggaatggccgagcatctgctggggcatttccttacatgagggcaaataatgatttggagagtgaaatacatcgagttgagcaagatgcatatactggtgttcttagggcatttaaagtgcaatctgatgcaatatcctgggaaaaagagagcttgattactgaactcaggaaagaactgagggtttctgatgaggagcatagggagctattaaataaagtcaatgaagatgggagcatccgtcaaatgagggagttaagacaggcaggtggaatcccaagtggtctgcatcgtggcaacagggttttatatgatgcagaacctgggcccactaccaagaggcaaagggcatctcattcgattccttcgcaatctgcaggcctccagtcccctatgatgccctcccactcagtttcatctgcaaaatggggtcctttgtcagcaagaggcaagaaggcgaagatgcccattcctttggtgctaccatctgtggatccaagttcgttaataaaccataaagtttatacaaggtggccagaagacaacaacttctatgaggccaccataacaaaatataatgctgtgacgggtgagcatgaactcgtctatgacatgggcacacaagccgagacttgggaatgggttaggctttgtgatatggcacctgaagatataagatgggaatttgatggacatctttcaaatcatgatggctggggcccttctggccctatgctgaagaggcacatgaccaacaacggtgctatggcaggttcaatcaggggaagaggaaggttatcgataaatgagcctataaaagactatgctccacctcaaaatgacatcaataggaattttgattatattgacataccaaatactgaaagtgttgttactgaggtggagagggtgttggccaatccaaatatgcctgaaatcgagaaggcaaggaaactgctgaaagatcaggagcagtcattacttgatgcaattgccagacttgatgaagcatctgatagcgatagtgaagatatggctatggaagaccgaaggggttctgctggggtcctggggaatggaacggcattgctacttagttgttggaattggaagattaacatgcatctgtgtatcacctacctcgaccacagaacaaacaaaccacattatggcaaaaaaattgacatgccagaaaatggtgcctggaaactgttgatgcctgaaatgggatttgctggctacacaaaattgagcgcacgaggagcagggatatgcaaatgtcagaactgtttgaatggtgtttcctatgtagcgtagtaaaagtagcttaaatgttctagatgattagcacggatcacttagcattcctgattcagtataggtagatgtctaa

SEQ ID NO: 141192 - DNA, 1590 bp, Zea Mays
tttacttctcccgttcgtcccccgtgctctttctccctctcgtggcgctgggcgaccgcctacgcaggccaggcgccgtcgccctaagctacgccaggttcccgggtcttggtcggtcccttcaccggcgaagagcacccaccagacgcgccggtgcctggatccggaggaagtgctgcgggtttcggcggttcgtctctctcgttgtttccggcggggttatgaaggcggtgggatacaacctctacgatagcagcgggactgatgacgatctccctccagcacaaaatagaggattgagaggacgggttttcagtgggaatggccgagcatctgctggggcatttccttacatgagggcaaataatgatttggagagtgaaatacatcgagttgagcaagatgcatatactggtgttcttagggcatttaaagtgcaatctgatgcaatatcctgggaaaaagagagcttgattactgaactcaggaaagaactgagggtttctgatgaggagcatagggagctattaaataaagtcaatgaagatgggagcatccgtcaaatgagggagttaagacaggcaggtggaatcccaagtggtctgcatcgtggcaacagggttttatatgatgcagaacctgggcccactaccaagaggcaaagggcatctcattcgattccttcgcaatctgcaggcctccagtcccctatgatgccctcccactcagtttcatctgcaaaatggggtcctttgtcagcaagaggcaagaaggcgaagatgatggcacctgaagatataagatgggaatttgatggacatctttcaaatcatgatggctggggcccttctggccctatgctgaagaggcacatgaccaacaacggtgctatggcaggttcaatcaggggaagaggaaggttatcgataaatgagcctataaaagactatgctccacctcaaaatgacatcaataggaattttgattatattgacataccaaatactgaaagtgttgttactgaggtggagagggtgttggccaatccaaatatgcctgaaatcgagaaggcaaggaaactgctgaaagatcaggagcagtcattacttgatgcaattgccagacttgatgaagcatctgatagcgatagtggtaactgatatggctatggaagaccgaaggggttctgctggggtcctggggaatggaacggcattgctacttagttgttggaattggaagattaacatgcatctgtgtatcacctacctcgaccacagaacaaacaaaccacattatggcaaaaaaattgacatgccagaaaatggtgcctggaaactgttgatgcctgaaatgggatttgctggctacacaaaattgagcgcacgaggagcagggatatgcaaatgtcagaactgtttgaatggtgtttcctatgtagcgtagtaaaagtagcttaaatgttctagatgattagcacggatcacttagcattcctgattcagtataggtagatgtctaactctagcataatatccaacttggttgttcttgtactctaatgtgaaaaaggacgttgttcactctttt

SEQ ID NO: 141193 - DNA, 1665 bp, Zea Mays
tttacttctcccgttcgtcccccgtgctctttctccctctcgtggcgctgggcgaccgcctacgcaggccaggcgccgtcgccctaagctacgccaggttcccgggtcttggtcggtcccttcaccggcgaagagcacccaccagacgcgccggtgcctggatccggaggaagtgctgcgggtttcggcggttcgtctctctcgttgtttccggcggggttatgaaggcggtgggatacaacctctacgatagcagcgggactgatgacgatctccctccagcacaaaatagaggattgagaggacgggttttcagtgggaatggccgagcatctgctggggcatttccttacatgagggcaaataatgatttggagagtgaaatacatcgagttgagcaagatgcatatactggtgttcttagggcatttaaagtgcaatctgatgcaatatcctgggaaaaagagagcttgattactgaactcaggaaagaactgagggtttctgatgaggagcatagggagctattaaataaagtcaatgaagatgggagcatccgtcaaatgagggagttaagacaggcaggtggaatcccaagtggtctgcatcgtggcaacagggttttatatgatgcagaacctgggcccactaccaagaggcaaagggcatctcattcgattccttcgcaatctgcaggcctccagtcccctatgatgccctcccactcagtttcatctgcaaaatggggtcctttgtcagcaagaggcaagaaggcgaagatgatggcacctgaagatataagatgggaatttgatggacatctttcaaatcatgatggctggggcccttctggccctatgctgaagaggcacatgaccaacaacggtgctatggcaggttcaatcaggggaagaggaaggttatcgataaatgagcctataaaagactatgctccacctcaaaatgacatcaataggaattttgattatattgacataccaaatactgaaagtgttgttactgaggtggagagggtgttggccaatccaaatatgcctgaaatcgagaaggcaaggaaactgctgaaagatcaggagcagtcattacttgatgcaattgccagacttgatgaagcatctgatagcgatagtggtaactgaagatatggctatggaagaccgaaggggttctgctggggtcctggggaatggaacggcattgctacttagttgttggaattggaagattaacatgcatctgtgtatcacctacctcgaccacagaacaaacaaaccacattatggcaaaaaaattgacatgccagaaaatggtgcctggaaactgttgatgcctgaaatgggatttgctggctacacaaaattgagcgcacgaggagcagggatatgcaaatgtcagaactgtttgaatggtgtttcctatgtagcgtagtaaaagtagcttaaatgttctagatgattagcacggatcacttagcattcctgattcagtataggtagatgtctaactctagcataatatccaacttggttgttcttgtactctaatgtgaaaaaggacgttgttcactcttttcatgttggctgcttggctaggactttgttgtgcacgcttttcatttatgctgctggacgtatcttattaact

SEQ ID NO: 141194 - DNA, 1340 bp, Zea Mays
ttataataattcagaacatgtccattcattttgtaaaataaaaaatgaatgacacgaggtcgaggaacatcaacaaggcaaaaagaaactcaaactcaagaacaataaaagaagaagaaaaatacattttgcagttcacccttcaattgttgcacgaccagagctatcagttcaaacacaaccagaaacacaagatctgtctgtcgcacaaacagcgtgtcagctcggctcctctacctaccacaacctacgtaatttacacagctgaaactgaaactacggcttcacttgctatcaccgcttatgaggtctttccacggtcattcttatcctacctgccttctcccgccacgctttcccgttcccaaagacttctccgacctgctgctgttcgtcttggtcctcttggacggtggcggagtggctggtgctaggcctcgtttctgcggccgcccgacgcctctcttcgccccggcagccttgccgcccctcctggatccaccgcgtccggtgccctccttccgtccggttcctctcttgcgtttagtcgtctgctcctccatcgccgccggccgctttcgcgtcgtacccaggtgggaccccgacccccgcttcctggggggcgactggttcaggcgctttaggaagtctacggcgttccgcttcttggcgagcccgtcagtgccagcaccggcgcccttcctcggcccgtcagcaccgtccgctaggtttcggcctggacccgcggagttcttgccaccgcggctcttcttcgtcctcaccccccacgtcttgtccttggtcgccgcagccacggatttcttctcgtcctccgtctcttccgccgtctcacccttcatcgtgttctcctcctttctcgcagacgctgcggccttcgcgatggagctccgcttgcggcacacaatcagcggcttccccttctcgatcagcgaaccaacgatgtcggcgcttgccggtgccggcgcagccacagccacgttctcctgcttcggcttgtggagcaccgccgatgcgtgcccggtgacgagcgcgcgggcctcgacagccgcggagttctcgggggtgccacccgggaagaagaccacgatgttcgtgcagagcagcagcaggtcgcgatagagctcgtgcgcagaggagtggctgtcatcgtcggcgcgcgagccggccgacgcgttcagccgacgccgcagagtctccaagtccacatggcgcctgatcgtgtcccggtacatggcagattcctgtaattagataggattgaccacgacataaatataaagacaataaataaaaatagaaacgaaaaaagtaaatacgag

SEQ ID NO: 141195 - DNA, 1438 bp, Zea Mays
gttttcgcgtaaccggtccagcacgcaaccgagcttggccaagaccgcgtcgagcaggaaagtgagcggagaggacttggacgcctccgcctccgcctcctcctcttcagcgttcccgcttccacggcggcggcggcacaagctcgccgagctccgcacttcgctgctgtctttggaatcgaccgccgactcaacggacgcttcctgtttcgcaaccttctcctccttagacccgtcgcctagctggctgggatgtttgggcggcttcagatctgtggagttcgactccctgcatgagcacccgggctcctcgcttgagaggcgatcgtggtcgctcacagcctcgccggaggctctctgctcccgctccgctttcagccgtttcacttttgactgcagcgtcctgcgcgaatttaaaaaaaatgagattagcctcccattaaataaatccccaccgaacgatcatcatcaaacgagagatcgcatcgctcgacgtcgcgacggagctcggcgacgcgcagccgccggagctcgtccacccatccctcggcagcggaggcgtcgggatcctcctcggcctcctcgaccccgccgctgccgacggtggagaagcggcggtggaggtggcggaagcggaggcggcagctgtgcggcgtgaggcctggccgcgccgccacggggatccgtgtctgcacctccatggccaccgagtcccagctcgccgtgccgtgccgcgtcacggcgcacgccaggagcagctcctccagcgttccccagatctccccgctcttcccggctgccgccgtcgcctccgactccggcgacacgtcggtgccgtccgccatccttcctgcgttctcgtccgtgaggcagtggaggtgtggtggtcttaggctctcagccctggtccgttgccctcgtctccgttgctttcccccgtcgccttttgcttcctcggcccggattgatttttatcggtaaagaagatggcatggtggtcactggtcatggaaatcagccattcagccgcgccccgcgcgcaccctggcccaggggcttttctgtaaaaacatcggagtgggtccacctacggctatttcttgtgtaatgaccgtgttgtccctggtcagtggtcagctaccaccaggcaccagcttgctgtttgctagtacgtacgtgtgcgtgcgctcgttgtctggcaaagcacaatctacacgactgcactaggcaccggaataaaactgatcgtctgatggagctaaaccaagtccaaagcatccaaaattcaatcgatgggaataacatgatccggaaggtatattctggtaagcaattgcagaatatcgtttttaacaagtttacaaggctgcctgtttatttgaaaagcaatctgcttttaaaattagtttcatgagttcttagatattttgttatgtgt

SEQ ID NO: 141196 - DNA, 249 bp, Zea Mays
atgacgcggtcttggatgtccgcgtccagcgcctcctgcagctccttcacgaaccggtctacaaccgccttgatccgcaccgacatcgcggccccgcccgccttccccttctgttcttcccctctccttcctgctccccccgcgccacacgcctcgggcgcagcaataaacaaggtcaaagaacgtaccactccttttgcgtatcgctaccggcgccggtctccggcgatatccatgggcggcggctag

SEQ ID NO: 141197 - DNA, 504 bp, Zea Mays
atggatgcgggcaccaatgctagcgacatggaaccatcggggccgtactttcttggccgaccacgcttcttcttgggcaccggctcacccgcgccaccattgcctccaacgccagccaagcttgaagcagtcacggcgctgccgcccacgggctggtacgtcgccgtcgcgggcagcacggagacggagatcaccggggtgaagatggcggtgccgtccgtcgtgtacgccatgcgcaggctctgcgtgctccccgcggacggcggcgtcgccggggtcttcgggagcccgaacggctcccttcctgccataacttcttgctcgggggacgggctcaccttcatcataccacagttccacactgaacaagtgtgcggaagcaggagcgggctacgaatctgcagctctctctgtctctctctacagagacttcttggactgaaggctgcagttcttcacttcttctatttcacagcaaatcttacaaccggcgaagcaagctag

SEQ ID NO: 141198 - DNA, 536 bp, Zea Mays
atggatgcgggcaccaatgctagcgacatggaaccatcggggccgtactttcttggccgaccacgcttcttcttgggcaccggctcacccgcgccaccattgcctccaacgccagccaagcttgaagcagtcacggcgctgccgcccacgggctggtacgtcgccgtcgcgggcagcacggagacggagatcaccggggtgaagatggcggtgccgtccgtcgtgtacgccatgcgcaggctctgcgtgctccccgcggacggcggcgtcgccggggtcttcgggagcccgaacggctcccttcctgccataacttcttgctcgggggacgggctcaccttcatcataccacagttccacactgaacaagtgtgcggaagcaggagcgggctacgaatctgcagctctctctgtctctctctacagagacttcttggactgaaggctgcagttcttcacttcttctatttcacagcaaatcttacaaccggcgaagcaagctaggaactgcaaaacccataaaggcataaactcag

SEQ ID NO: 141199 - DNA, 1654 bp, Zea Mays
gaagcatccaggcatccagcaaatccagcgggtccgtactcatctgcttcacctccgggctccggctacggcggcactcttctctggcaaccggtaaacctcctctccctttcttttctatggtgcggtgcattcaagatgtccggatgtacgtgcgcatcgggtttgggatcggattgcgcctgctgcgacatagggagtataccgtgctcttttgtttccccatggattgatactttctctgtcgattcttatcaggtcggaagatgttggatcttccgcttcaaatcgacgcataaaggatgcagattagttttgttcgcgtcaaatttattttgctcggtgtagttctgtccattaattaattatttgtactggatttaaggtgctgctattttgaaggttttttctcccggaaattttcacatcccgaaacgactggaaattgaagtagccatttgatgctgttacctgggttcataagttgttagacttgttgttatttgtttgttaatcctatagctattgcatattgtgtgcctgatcaggaccacagaaacctctaggcgacgaatcgagcaggtagaggagtaatcaggcatccatggctgagcatcttgcgtccatctttggcacggagaaggaccgcgtgaactgccccttctacttcaagatcggcgcatgccgccacggcgaccggtgctcccgcctgcacaacaagccttccatctccccgacgctgctgctctgcaacatgtaccagcggccggacatgatcaccccgggcgtggacgcgcagggcaaccccatcgacccggagcggatccaggaggacttcgaggacttctacgaggacatcttcgtggagctgagcaagcacggcgagatcgagagcctccacgtctgcgacaacctcgcggaccacatgatcgggaacgtgtacgtggagttccgcgaggaggagcaggcggcccgcgccctgcaggcgctgcagggccgctactactcgggccgacccatcatcgccgagttctcgccggtgacggacttccgggaggccacctgccgccagttcgaggagcacagctgcaaccgcggcggatactgcaactttatgcacgtcaagcaggtcggccgggacctgcggcggaagctgtttggccacctgcatcgctccctccggagccacagccgaggcagccgcagcccgagcccataccgccgccgcggtagctcgtccaggtccagggaccgcgacgattaccacgactactactaccactactaccgtagtggcagtggcagccgcaggagcagcgagagacaccgcagccacgacagcgacgggagccgccgtcgacgcgggcggtcgaggagccggagccggagcccggtgagggaaggcagcgaggagcggagggcaaagattgagcagtggaaccgcgagcgggaggcagctcaggtgtaagcaagttccccttccctagttgccatgttggttgctgcagtgttattggccttgctagttgccatgttgctgttgctgaagcctgttatcatgtattgtggtgtggttcaggcagggtaaggccataaattgagcctgaaattggactgtgatctcttttgctgtggacgggttaccattaaactt

SEQ ID NO: 141200 - DNA, 1620 bp, Zea Mays
gaagcatccaggcatccagcaaatccagcgggtccgtactcatctgcttcacctccgggctccggctacggcggcactcttctctggcaaccggtcggaagatgttggatcttccgcttcaaatcgacgcataaaggatgcagattagttttgttcgcgtcaaatttattttgctcggtgtagttctgtccattaattaattatttgtactggatttaaggtgctgctattttgaaggttttttctcccggaaattttcacatcccgaaacgactggaaattgaagaccacagaaacctctaggcgacgaatcgagcaggtagaggagtaatcaggcatccatggctgagcatcttgcgtccatctttggcacggagaaggaccgcgtgaactgccccttctacttcaagatcggcgcatgccgccacggcgaccggtgctcccgcctgcacaacaagccttccatctccccgacgctgctgctctgcaacatgtaccagcggccggacatgatcaccccgggcgtggacgcgcagggcaaccccatcgacccggagcggatccaggaggacttcgaggacttctacgaggacatcttcgtggagctgagcaagcacggcgagatcgagagcctccacgtctgcgacaacctcgcggaccacatgatcgggaacgtgtacgtggagttccgcgaggaggagcaggcggcccgcgccctgcaggcgctgcagggccgctactactcgggccgacccatcatcgccgagttctcgccggtgacggacttccgggaggccacctgccgccagttcgaggagcacagctgcaaccgcggcggatactgcaactttatgcacgtcaagcaggtcggccgggacctgcggcggaagctgtttggccacctgcatcgctccctccggagccacagccgaggcagccgcagcccgagcccataccgccgccgcggtagctcgtccaggtccagggaccgcgacgattaccacgactactactaccactactaccgtagtggcagtggcagccgcaggagcagcgagagacaccgcagccacgacagcgacgggagccgccgtcgacgcgggcggtcgaggagccggagccggagcccggtgagggaaggcagcgaggagcggagggcaaagattgagcagtggaaccgcgagcgggaggcagctcaggtgtaagcaagttccccttccctagttgccatgttggttgctgcagtgttattggccttgctagttgccatgttgctgttgctgaagcctgttatcatgtattgtggtgtggttcaggcagggtaaggccataaattgagcctgaaattggactgtgatctcttttgctgtggacgggttaccattaaacttgatttggatgtgctgatggaatctagttgctgtttgagtaaggcttaccgtggtgagtcggcggccagcgagtacgtccatccattgggcgttgagattgagcagtggaacccagaatgtgtgacggatacgatttcgagagtagtagaaagtattgacttccgtgcagacccgatcaaactgtagatcggaactcatcctctaaggctctaacacatttactattttg

SEQ ID NO: 141201 - DNA, 1535 bp, Zea Mays
gaagcatccaggcatccagcaaatccagcgggtccgtactcatctgcttcacctccgggctccggctacggcggcactcttctctggcaaccggtcggaagatgttggatcttccgcttcaaatcgacgcataaaggatgcagattagttttgttttttctcccggaaattttcacatcccgaaacgactggaaattgaagaccacagaaacctctaggcgacgaatcgagcaggtagaggagtaatcaggcatccatggctgagcatcttgcgtccatctttggcacggagaaggaccgcgtgaactgccccttctacttcaagatcggcgcatgccgccacggcgaccggtgctcccgcctgcacaacaagccttccatctccccgacgctgctgctctgcaacatgtaccagcggccggacatgatcaccccgggcgtggacgcgcagggcaaccccatcgacccggagcggatccaggaggacttcgaggacttctacgaggacatcttcgtggagctgagcaagcacggcgagatcgagagcctccacgtctgcgacaacctcgcggaccacatgatcgggaacgtgtacgtggagttccgcgaggaggagcaggcggcccgcgccctgcaggcgctgcagggccgctactactcgggccgacccatcatcgccgagttctcgccggtgacggacttccgggaggccacctgccgccagttcgaggagcacagctgcaaccgcggcggatactgcaactttatgcacgtcaagcaggtcggccgggacctgcggcggaagctgtttggccacctgcatcgctccctccggagccacagccgaggcagccgcagcccgagcccataccgccgccgcggtagctcgtccaggtccagggaccgcgacgattaccacgactactactaccactactaccgtagtggcagtggcagccgcaggagcagcgagagacaccgcagccacgacagcgacgggagccgccgtcgacgcgggcggtcgaggagccggagccggagcccggtgagggaaggcagcgaggagcggagggcaaagattgagcagtggaaccgcgagcgggaggcagctcaggtgtaagcaagttccccttccctagttgccatgttggttgctgcagtgttattggccttgctagttgccatgttgctgttgctgaagcctgttatcatgtattgtggtgtggttcaggcagggtaaggccataaattgagcctgaaattggactgtgatctcttttgctgtggacgggttaccattaaacttgatttggatgtgctgatggaatctagttgctgtttgagtaaggcttaccgtggtgagtcggcggccagcgagtacgtccatccattgggcgttgagattgagcagtggaacccagaatgtgtgacggatacgatttcgagagtagtagaaagtattgacttccgtgcagacccgatcaaactgtagatcggaactcatcctctaaggctctaacacatttactattttg

SEQ ID NO: 141202 - DNA, 1428 bp, Zea Mays
gaagcatccaggcatccagcaaatccagcgggtccgtactcatctgcttcacctccgggctccggctacggcggcactcttctctggcaaccggaccacagaaacctctaggcgacgaatcgagcaggtagaggagtaatcaggcatccatggctgagcatcttgcgtccatctttggcacggagaaggaccgcgtgaactgccccttctacttcaagatcggcgcatgccgccacggcgaccggtgctcccgcctgcacaacaagccttccatctccccgacgctgctgctctgcaacatgtaccagcggccggacatgatcaccccgggcgtggacgcgcagggcaaccccatcgacccggagcggatccaggaggacttcgaggacttctacgaggacatcttcgtggagctgagcaagcacggcgagatcgagagcctccacgtctgcgacaacctcgcggaccacatgatcgggaacgtgtacgtggagttccgcgaggaggagcaggcggcccgcgccctgcaggcgctgcagggccgctactactcgggccgacccatcatcgccgagttctcgccggtgacggacttccgggaggccacctgccgccagttcgaggagcacagctgcaaccgcggcggatactgcaactttatgcacgtcaagcaggtcggccgggacctgcggcggaagctgtttggccacctgcatcgctccctccggagccacagccgaggcagccgcagcccgagcccataccgccgccgcggtagctcgtccaggtccagggaccgcgacgattaccacgactactactaccactactaccgtagtggcagtggcagccgcaggagcagcgagagacaccgcagccacgacagcgacgggagccgccgtcgacgcgggcggtcgaggagccggagccggagcccggtgagggaaggcagcgaggagcggagggcaaagattgagcagtggaaccgcgagcgggaggcagctcaggtgtaagcaagttccccttccctagttgccatgttggttgctgcagtgttattggccttgctagttgccatgttgctgttgctgaagcctgttatcatgtattgtggtgtggttcaggcagggtaaggccataaattgagcctgaaattggactgtgatctcttttgctgtggacgggttaccattaaacttgatttggatgtgctgatggaatctagttgctgtttgagtaaggcttaccgtggtgagtcggcggccagcgagtacgtccatccattgggcgttgagattgagcagtggaacccagaatgtgtgacggatacgatttcgagagtagtagaaagtattgacttccgtgcagacccgatcaaactgtagatcggaactcatcctctaaggctctaacacatttactattttg

SEQ ID NO: 141203 - DNA, 1504 bp, Zea Mays
aagcatccaggcatccagcaaatccagcgggtccgtactcatctgcttcacctccgggctccggctacggcggcactcttctctggcaaccgatgttggatcttccgcttcaaatcgacgcataaaggatgcagattagttttgttcgcgtcaaatttattttgctcggtgtagttctgtccattaattaattatttgtactggatttaaggtgctgctattttgaaggttttttctcccggaaattttcacatcccgaaacgactggaaattgaagtagccatttgatgctgttacctgggttcataagttgttagacttgttgttatttgtttgttaatcctatagctattgcatattgtgtgcctgatcaggaccacagaaacctctaggcgacgaatcgagcaggtagaggagtaatcaggcatccatggctgagcatcttgcgtccatctttggcacggagaaggaccgcgtgaactgccccttctacttcaagatcggcgcatgccgccacggcgaccggtgctcccgcctgcacaacaagccttccatctccccgacgctgctgctctgcaacatgtaccagcggccggacatgatcaccccgggcgtggacgcgcagggcaaccccatcgacccggagcggatccaggaggacttcgaggacttctacgaggacatcttcgtggagctgagcaagcacggcgagatcgagagcctccacgtctgcgacaacctcgcggaccacatgatcgggaacgtgtacgtggagttccgcgaggaggagcaggcggcccgcgccctgcaggcgctgcagggccgctactactcgggccgacccatcatcgccgagttctcgccggtgacggacttccgggaggccacctgccgccagttcgaggagcacagctgcaaccgcggcggatactgcaactttatgcacgtcaagcaggtcggccgggacctgcggcggaagctgtttggccacctgcatcgctccctccggagccacagccgaggcagccgcagcccgagcccataccgccgccgcggtagctcgtccaggtccagggaccgcgacgattaccacgactactactaccactactaccgtagtggcagtggcagccgcaggagcagcgagagacaccgcagccacgacagcgacgggagccgccgtcgacgcgggcggtcgaggagccggagccggagcccggtgagggaaggcagcgaggagcggagggcaaagattgagcagtggaaccgcgagcgggaggcagctcaggtgtaagcaagttccccttccctagttgccatgttggttgctgcagtgttattggccttgctagttgccatgttgctgttgctgaagcctgttatcatgtattgtggtgtggttcaggcagggtaaggccataaattgagcctgaaattggactgtgatctcttttgctgtggacgggttaccattaaacttgatttggatgtgctgatggaatct

SEQ ID NO: 141204 - DNA, 1605 bp, Zea Mays
aagcatccaggcatccagcaaatccagcgggtccgtactcatctgcttcacctccgggctccggctacggcggcactcttctctggcaaccggtcggaagatgttggatcttccgcttcaaatcgacgcataaaggatgcagattagttttgttcgcgtcaaatttattttgctcggtgtagttctgtccattaattaattatttgtactggatttaaggtgctgctattttgaaggttttttctcccggaaattttcacatcccgaaacgactggaaattgaagtagccatttgatgctgttacctgggttcataagttgttagacttgttgttatttgtttgttaatcctatagctattgcatattgtgtgcctgatcaggaccacagaaacctctaggcgacgaatcgagcaggtagaggagtaatcaggcatccatggctgagcatcttgcgtccatctttggcacggagaaggaccgcgtgaactgccccttctacttcaagatcggcgcatgccgccacggcgaccggtgctcccgcctgcacaacaagccttccatctccccgacgctgctgctctgcaacatgtaccagcggccggacatgatcaccccgggcgtggacgcgcagggcaaccccatcgacccggagcggatccaggaggacttcgaggacttctacgaggacatcttcgtggagctgagcaagcacggcgagatcgagagcctccacgtctgcgacaacctcgcggaccacatgatcgggaacgtgtacgtggagttccgcgaggaggagcaggcggcccgcgccctgcaggcgctgcagggccgctactactcgggccgacccatcatcgccgagttctcgccggtgacggacttccgggaggccacctgccgccagttcgaggagcacagctgcaaccgcggcggatactgcaactttatgcacgtcaagcaggtcggccgggacctgcggcggaagctgtttggccacctgcatcgctccctccggagccacagccgaggcagccgcagcccgagcccataccgccgccgcggtagctcgtccaggtccagggaccgcgacgattaccacgactactactaccactactaccgtagtggcagtggcagccgcaggagcagcgagagacaccgcagccacgacagcgacgggagccgccgtcgacgcgggcggtcgaggagccggagccggagcccggtgagggaaggcagcgaggagcggagggcaaagattgagcagtggaaccgcgagcgggaggcagctcaggtgtaagcaagttccccttccctagttgccatgttggttgctgcagtgttattggccttgctagttgccatgttgctgttgctgaagcctgttatcatgtattgtggtgtggttcaggcagggtaaggccataaattgagcctgaaattggactgtgatctcttttgctgtggacgggttaccattaaacttgatttggatgtgctgatggaatctagttgctgtttgagtaaggcttaccgtggtgagtcggcggccagcgagtacgtccatccattgggcgttgagattgagcagtggaacccagaa

SEQ ID NO: 141205 - DNA, 1419 bp, Zea Mays
aagcatccaggcatccagcaaatccagcgggtccgtactcatctgcttcacctccgggctccggctacggcggcactcttctctggcaaccgaaacctctaggcgacgaatcgagcaggtagaggagtaatcaggcatccatggctgagcatcttgcgtccatctttggcacggagaaggaccgcgtgaactgccccttctacttcaagatcggcgcatgccgccacggcgaccggtgctcccgcctgcacaacaagccttccatctccccgacgctgctgctctgcaacatgtaccagcggccggacatgatcaccccgggcgtggacgcgcagggcaaccccatcgacccggagcggatccaggaggacttcgaggacttctacgaggacatcttcgtggagctgagcaagcacggcgagatcgagagcctccacgtctgcgacaacctcgcggaccacatgatcgggaacgtgtacgtggagttccgcgaggaggagcaggcggcccgcgccctgcaggcgctgcagggccgctactactcgggccgacccatcatcgccgagttctcgccggtgacggacttccgggaggccacctgccgccagttcgaggagcacagctgcaaccgcggcggatactgcaactttatgcacgtcaagcaggtcggccgggacctgcggcggaagctgtttggccacctgcatcgctccctccggagccacagccgaggcagccgcagcccgagcccataccgccgccgcggtagctcgtccaggtccagggaccgcgacgattaccacgactactactaccactactaccgtagtggcagtggcagccgcaggagcagcgagagacaccgcagccacgacagcgacgggagccgccgtcgacgcgggcggtcgaggagccggagccggagcccggtgagggaaggcagcgaggagcggagggcaaagattgagcagtggaaccgcgagcgggaggcagctcaggtgtaagcaagttccccttccctagttgccatgttggttgctgcagtgttattggccttgctagttgccatgttgctgttgctgaagcctgttatcatgtattgtggtgtggttcaggcagggtaaggccataaattgagcctgaaattggactgtgatctcttttgctgtggacgggttaccattaaacttgatttggatgtgctgatggaatctagttgctgtttgagtaaggcttaccgtggtgagtcggcggccagcgagtacgtccatccattgggcgttgagattgagcagtggaacccagaatgtgtgacggatacgatttcgagagtagtagaaagtattgacttccgtgcagacccgatcaaactgtagatcggaactcatcctctaaggctctaacacatttactattttg

SEQ ID NO: 141206 - DNA, 2450 bp, Zea Mays
attgtgttagccgatgtcactctgcttttagccttttgccaagtgccaacagccaggtcgaaaggacatctgaccggcagcaggcagacatccgtcgcccgccatggagtcctcatggctcctcctgctctcgtgccttccggccgtatgggtgcttgccgcggcggcggcggcggcggcggggcggagtcccggctgcgcgacgaggtgcggcgagatcgacgtcccgtacccgttcggcctggacccgcagtgcgcgatccacgcgggcttttggctcaactgcaccaccgtggatggcgccaccaagctgctcgacaagaactcggaggtgaccaagatctccgtggaggatggcaaggcctggttcaagaacttcatctcccggcagtgctacaaccaatcctcgggtgacatgttcgaaaacaacgcgtgggtcgactataccggcgagccctacgttctgtcggcagaggataataagatcatcgtcctcgggtgcaatagtatggcctacatgcagagcgactcttacataatcggctgcatgtcgacatgcgacggcccactgaagaacggctcatgctccggcaccgctggctgctgccaggcggagctcccgccgggcgtccagttttaccaaggcttcttcaactcgctgcacaacaccaccaagatatggaagcaaacaccctgcaactacatcaccgtgatggagagcgcggccttcagcttcagctccacctacctcacctcgacggtgttgtacgactccgacgacgggaggacgccggtcgtgatggagtggggaatcacacggcagaagtgcgaagaagccaaagccaacaagactgcgtacgcgtgtgtcagcgaccatagcgactgcgtctacagcgatgccgccggctaccgctgcaggtgctccggcggattcaaaggcaacccgtacgtcgtagatggatgcgcagatattgacgagtgcttggacagtgctacctacccctgcgctgggatatgcaaaaacacactcgggaatttcacatgttcctgcccacgaggaagaagcatgatcaatggcgtttgcgtgaaaagtcagaggtcaacttggatggcgccggttgttggcgcaagtgttgggctggtgactctcgtgatcggcgttacctgcgcatacctggtccgagaacggcgaaagctgcaccgcgtcaagcagagctacttccggcggcacggcggcctgctcctgttcgaggaactgaagtcgcagcaccaccagcagggcgccgccgcgttcacgatcttctccgaggaagagctgcagcaagccacggacaggttcgacgcgcagcgggtccttggccacgggggccacgggaccgtgtacaagggagtgctgaagagcggcaccgccaccgagatagccgtgaagagatgcatgaccatcgacgagcagcagaagaaagagttcggcaaggagatgctcatcctgtcccaggtcaaccacaggaacatcgtgaagctcctcggctgctgcctcgaggtggaagtccccattctcgtctacgagttcgtcccgaacggcacgctgttcgacctcatccacggcgaccacggccagcgcgtctcgctggacacccgcctcaggatcgcctacgagtccgccgaggcgctggcctacctccactcctgcgcgtccccgccgatcctccacggcgacgtcaagtccaccaacatcctcctagacggcgactacgcggccaaggtctccgacttcggcgcgtccattctggcgccgaacgacaagtcgcagttcgtcaccgttgtgcaaggcacgtgcgggtaccttgacccggagtacatgcagacgtacgagttgacggacaagagcgatgtgtacagctttggggtcgttctcctggagctgctcacgggcaagaaggcgttcgacctccaagggtctgagcaggacaggagtctctccatgaggttcttgtacgcgatgaaggagaacaggcttgaggacatcctagacgatcagatcaagaacagtgagagcatcgagtaccttgaggagatcgcagagctggcgagacagtgcttagagatgagtggtgtgaataggccgacgatgaaggaggttgcagataagcttggtaggttgaggaagatcatgaagcatccatgggcacatgaggatcctgaagaattggacaggttgcttggagagccgtctactacaactaactcgaccgctactactgggaatttcatcattgcaattggagagccgtctacagccaactccaccgctaacactgggaatttcagcattacaaagagagctgccatgggcttggaatcaggacgttagctactgtaaatgaaattatatttacctcattccatatgtatataacagatagagactgtacattttcttggcggtacaa

SEQ ID NO: 141207 - DNA, 1529 bp, Zea Mays
ctcgggtctgtcccgttgaatgtctcctttcgcagcggtcttcagggggagaacttggggagttggtatgcgctagtaaatcggatagcggggctttctttaaacccttcgaaagatactttcagatggagcttgcatcaaaacgggaagttttcctcccagtctatgtatgctgcattgatagggagggaaatacctcggcaggaaactctcatctggaaacttaggatcccattgaaaattaagatcttctgttggttcttaacacgaggggtgattttgacaaaggataacttaatcaaaaggaaatggaatgggtcaaaaaaagtgtgttctgttcccatgatgaaaccatcccacatctttttttcgactgccactatgctagatttctttggcgatcgatctactttacctttggtattagagaaccaactagcttgcaggatatggggtcttcttggttgcaggggttcaataaagacacaaaggcaaagatatatgttggagccatagctatctgttgggcactgtggcttagtcgaaatgatgtggtttttgacaagaatcctattcaaacttacttgcaggtactctttcgaggaacctactggtgtcgtttctggggactactccaaaagcgtgaggaggacaccataaggattaaagatgcttgcagggtgctggaagccaccacgatgcaaatcttcgcaatgcacggttggagctttagaaacaggctaactaatagctagttttccaggtcccaactgcgcttgggtttgtttgccgcttgtggcttctttcgttttttatgtcagtacttgtggttgttggacggctgtcatctttgatgtaggccgggaaccctttttcccattatctaaaaaaacttctgagtttgttcccctcacaatttattccgtgacccaaaatttgacaaccaaagttacaattcttttaaccctcacagcaaactaagattcggaagcaagtaaggttcccctcacatgcagaagtagaggcttggtgcaggttcaacctacatcttggcttcctttgtattcagcttgcggagtctggtttccaccactaactgctgacagcgctgccaccaccaccctgtgtccctgttgcatgtgctctccaatctttgaaacagctttgtttgctgcttccagcttctgcttgatcttgtccagatcctcctcagccatggctgccctcagatcagagacagcagactcgatctccttggtgacttcagcagggaccttgtccttgtactcgctgacactcttctcaatggtgtagatcgtggtgtctgcagagttcttaagatcgctaggggacttcctttcctgatccttctgagcatgtaactcagcctccttcaccatcttttcgatttcaaactccgacaaactcccagaagaatttatggtgatttcttgttctttgcccgtggctttgtccttagctgacgtgtcttcgacttgttgccaaccaaattgtaaacatggttgcaa

SEQ ID NO: 141208 - DNA, 1503 bp, Zea Mays
tacttgccatgcgacaaacgtgctcagaactcgctgcggacgctagcgatcgtctatcgatataagacgagcagcttagcagtggctgtgacacgggaaaggagtacggagtaccggagacatcgtcaacgccatggccggaggaggtgcaacggtgtgcgtgaccggagccggcgggttcatcgcctcgtgggtagtgaagctcctgctctcccgcgggtacaccgtgcacggcaccgtccgccacctcagtgacgagaagacaggccacctgaagcgcctggagaatgctgccggaaaccttaggatcttcaaggctgacctgctggactacgacgccatggcagctgcggtcgtcgggtgccagggggttttccatgtggccactcctgtgccttcggaggacctgactgacccagagctacaaatgctgggtcctgctgttaccggcaccacgaatgtgctcaaagctgcctccagcgcgaacgtccagcgagtggtggtggtgtcgtccatggttgccgtcgagatcagccccaaagattggcctgaaggtaaggtccgagatgagaggtgctggtcagaccgagagttctgcaggagcattgagagctggtacccggtggctaagatcatctcagaggaggcggcgctggcgtacgggcagcaaaccgggctcgacgtggtgactatcaatccagggttggtgttcggccccatgctgcagccgacggtcaacacgaccatccagttcctcatctacttcctcaaaggaggccccgacccggtgaagaacaagctctggcatatcgtcgacgtccgtgatgtggccgacgccatgctgctgctctacgaggtgcctgaagcgaccggcagacacatctgcgcgcctcatgttatcagtgcccgcgacctgctggatctgctgaagagcatgtaccctgactacccttgcattgccaacgagagcatacttgacagagaccacccagcgccgatgacctctgacaagctgaagaagatcgggtggagctgccgaccgctggaggagacgatcgtggacaccgtcgagtgctgcctgcgggctggatttctggaccatgtgggtggggagacttcctgtcgcttccctcctcttttaaaccagatctagcctcggcgaaagcatgaattgtgattgcctatgctcttgcttatgttaccgtggacgacgagcgtcagcttttaaataaacgttgttgcatgctgttgtattccttatattactgtggacaagcatcgatcagagcttttaaataaatgtcattccatgtgttgtattcggtggtggtgctcacgtgaatgtgatctcgaactaattctaagattaattaagacttactcactccgttcttttttatttgtcgcgctttagttcaaaaataaattagcggacaacaaatattctcgagaatggaagtagtatttttttatctatttatcagtaaaagagtgatatgtggt

SEQ ID NO: 141209 - DNA, 1333 bp, Zea Mays
gacgagcagcttagcagtggctgtgacacgggaaaggagtacggagtaccggagacatcgtcaacgccatggccggaggaggtgcaacggtgtgcgtgaccggagccggcgggttcatcgcctcgtgggtagtgaagctcctgctctcccgcgggtacaccgtgcacggcaccgtccgccacctcagtgacgagaagacaggccacctgaagcgcctggagaatgctgccggaaaccttaggatcttcaaggctgacctgctggactacgacgccatggcagctgcggtcgtcgggtgccagggggttttccatgtggccactcctgtgccttcggaggacctgactgacccagagctacaaatgctgggtcctgctgttaccggcaccacgaatgtgctcaaagctgcctccagcgcgaacgtccagcgagtggtggtggtgtcgtccatggttgccgtcgagatcagccccaaagattggcctgaaggtaaggtccgagatgagaggtgctggtcagaccgagagttctgcaggagcattgagagctggtacccggtggctaagatcatctcagaggaggcggcgctggcgtacgggcagcaaaccgggctcgacgtggtgactatcaatccagggttggtgttcggccccatgctgcagccgacggtcaacacgaccatccagttcctcatctacttcctcaaaggccccgacccggtgaagaacaagctctggcatatcgtcgacgtccgtgatgtggccgacgccatgctgctgctctacgaggtgcctgaagcgaccggcagacacatctgcgcgcctcatgttatcagtgcccgcgacctgctggatctgctgaagagcatgtaccctgactacccttgcattgccaacgagagcatacttgacagagaccacccagcgccgatgacctctgacaagctgaagaagatcgggtggagctgccgaccgctggaggagacgatcgtggacaccgtcgagtgctgcctgcgggctggatttctggaccatgtgggtggggagacttcctgtcgcttccctcctcttttaaaccagatctagcctcggcgaaagcatgaattgtgattgcctatgctcttgcttatgttaccgtggacgacgagcgtcagcttttaaataaacgttgttgcatgctgttgtattccttatattactgtggacaagcatcgatcagagcttttaaataaatgtcattccatgtgttgtattcggtggtggtgctcacgtgaatgtgatctcgaactaattctaagattaattaagacttactcactccgttcttttttatt

SEQ ID NO: 141210 - DNA, 210 bp, Zea Mays
ttaattgagaagtggtattatcttactagaacaaaacacgctgatccaaatgccaattcatagtaccatgattctctaccaatacaagcttagtttgtgtactccatcaatctgtgcagatacagtactacataatctgatgataagcattggtgtcaagcaagcaaggacttgcctcaggatcaacaatcttatcttcaggcaccgccg

SEQ ID NO: 141211 - DNA, 2554 bp, Zea Mays
gccagccgagggcgaggccagcacggttggggcccaacgaaccatggtgggcccagcctgtcaacgagtccgctgaggtcacggtaaccggcggcgaagctatatgaggtcgcccgggtcgagatcgatctctcctcccaaatcaaatccccaaaccccgggccactgctccgctcctcctccttgccgccgtgcggttgagcgccgacgagcaagcccgacgccaccctatggctatggaggtccgccgcagggttccgccgccgcacgggagcgccccacggcgccagcaggcgaccggcggcgaggggcagcgggtgcgtgtgcaggcgggggacgcgctgccgctgccgatccggcacacgaacctcatcttctcggcgctgttcgccgcgtcgctggtgtacctgatgcggcggtggcgggagaagatccgctcctccacgccgctccacgtggtctccctcgccgagatcttcgccatctgcggcctcgtggcgtcgctcatctacctcctcagcttcttcgggatcgccttcgtgcagtccgtcgtctccaacagcgacgacgaggaggacttcatcatcgactcccgccacggacaggcgcgggcgccgccgccgcccgcgccggcggccccgtgtgcgctgctggggagccccgccgccgcgccggagaaaatgccggaggaggacgaggagatcgtggccgcggtcgtggcagggaagatcccgtcctacgtgctggagactaggctgggagattgccgccgggccgccgggatcaggcgggaggcgctgcgcaggatcaccgggagggagatggacgggctcccgctcgatgggttcgactacgcgtccatcctcggccagtgctgcgagctgccggtggggttcgtgcagcttcccgtgggcgtcgccggcccgctccttctcgacggccgccggctctacgtaccaatggccaccaccgagggctgcctcgtcgccagcaccaaccgcggatgcaaggcaattgccgagtccggtggggcctccagcgtcgtgctcaaggacgggatgacgcgagccccggccgtccggttcccatctgcacgccgcgccgccgagctcaaggcctttttggaggacccagcgaactttgacaccctggctatggtgtttaacaggtcgagcagatttggaaggctgcagggagtgaagtgtgcgattgcagggaggaacctttacatgaggttcagctgcagcacaggggatgccatggggatgaacatggtctccaaaggtgtacagaacgtgctggactacctccaggctgacttccctgatatggatgtcatcagcatatcaggtaacttctgttctgacaagaagtcagctgctgtgaactggatcgatggccgtgggaagtcggtggtttgcgaggcggtaatcaaggaagaagttgtgaaaaaggttctcaagacaaacgtacaggctctcgtagaattgaacgtgatcaagaaccttgccggttcagctgttgctggagctcttgggggtttcaatgcccatgcaagtaacattgtggcagccatcttcattgctactggtcaggaccctgcacagaacgtggagagttcccagtgcatcaccatgttggaagctataaatgatggcaaagatctccacatctctgttactatgccatctattgaggttggcacagttggtggaggcacgcagctggcctcacaatctgcctgcttggacctgcttggcgtcaaaggtgccaacagggaatctccggggtccaacgcgaggctcttggccacggtggttgcgggtgcggtcctagctggggagctgtcccttatctctgcgcaggccgctggccatctggtcaagagccacatgaaatacaacagatccagcaaggatatgtccaagacccttgcagaggaaacagacaaacccaagaaatgctgaataatatcaagtagttgttctatagccctttgggagaaaaggagcagaaagggtcgtacaggatgactttcttgcggcatgctcaggtggaaaggggggaaaaagaccttcaggcgaaaagagataattcagtcgccttgtcatatttaccaggcggtgagacctgttgtggatcctggagtatgacctatttaatttgttgatgttgttgttatagttcctctaccgtacttgaccccgtttgcatcttgttttgaccgtcccatgggcattggagaatctgaccatgggttttgtcccaagcttgcatcacactggggggacctctgctttgcggcggccccgtctcagaaaaaaaaattgcgctggtaactgccgggtactgtgtatttcagctttgaaacttttatccaatgcttttgagtcgaagagtcagtggactcgatgatgtggttgtaaagaaaaaaaaatgcttttgtgtggaagagtcagtggagtcgatgacgtggttgtaaagaaaaggtgtgcttcagaacaagagtacatcacgttgcctctctgctttctctgtagcgtgttcgtctcaa

SEQ ID NO: 141212 - DNA, 957 bp, Zea Mays
tgagatggcatctggaatggcatcggtctatgctgggcacttgcagaaaattgtttgttagtgtcatcatcttgtggccaggcattatgctatataactgatgaggtgttgtcctgacccaaacacaggttggcacagttggtggaggcacgcagctggcctcacaatctgcctgcttggacctgcttggcgtcaaaggtgccaacagggaatctccggggtccaacgcgaggctcttggccacggtggttgcgggtgcggtcctagctggggagctgtcccttatctctgcgcaggccgctggccatctggtcaagagccacatgaaatacaacagatccagcaaggatatgtccaagacccttgcagaggaaacagacaaacccaagaaatgctgaataatatcaagtagttgttctatagccctttgggagaaaaggagcagaaagggtcgtacaggatgactttcttgcggcatgctcaggtggaaaggggggaaaaagaccttcaggcgaaaagagataattcagtcgccttgtcatatttaccaggcggtgagacctgttgtggatcctggagtatgacctatttaatttgttgatgttgttgttatagttcctctaccgtacttgaccccgtttgcatcttgttttgaccgtcccatgggcattggagaatctgaccatgggttttgtcccaagcttgcatcacactggggggacctctgctttgcggcggccccgtctcagaaaaaaaaattgcgctggtaactgccgggtactgtgtatttcagctttgaaacttttatccaatgcttttgagtcgaagagtcagtggactcgatgatgtggttgtaaagaaaaaaaaatgcttttgtgtggaagagtcagtggagtcgatgacgtggttgtaaagaaaaggtgtgcttcagaacaagagtacatcacgttgcctctc

SEQ ID NO: 141213 - DNA, 1433 bp, Zea Mays
aaaaatcgcgtcctcgaaaacctctagtctagttccgaaagcgcgcacacaacgactacaggagaagacacgcgcgacggccacggccaggtagagacagatccatctctcacctcgccccaccgccctcgccgatcggggtccgccgacccccagatcgcttcttcgcttcggtaggtggccgagtgtacgcgtacgaggagcctcccggatcccgcctcgccgtcgtctgtaagatcttctcgcacatctcgatctctctattggagctttgggtttcgtctgtctgtctgtctgtctctctctttgcgaggtttgggttttgtgtcgtggagcggtggaggtgccgtgggagcctttggttaatccagggtgatctctgatctgcgatctgtgttggggcgtatggctctggcgtcttaacagatgacgtgtttttgctgtggcgtgcaggatcggggcgcgatccgcggggaaacagcaatgacggcggaggggacggcgtgcaacggcgccggcgaggcgccgaaggcggaattcgtgcccgagaaggtggtcaccgcgtcgctggaggagaaggcggccggggagcgcgagggcgaggacgtcggcgggccttttgtggtcgtgaacggcggcgattctgacgggcactccgaccgtggctcagatctgggcaaggcgtccggcgaggagtcgtcgtccgaggaggaggacgtgcccggctccaatgtagctccggacttggccgtgggcggagatcacgggtccgcccgaggggaagtgagtgctcagggtgcggcactcggtgcttcgtcggcggacggcagtggtcgtgcttccgacggcgctgagggtggcgcggatgagggcaaaggcgaaccaagttccgattttgatgctgaagcggcgccgcaggaggacgttggtgaagaggacggtggggcagctgctctggcgtccagcgggtgcgaacctgccatcaccggtgctgattctgaggcggcaccagctgtggatgatgaggttgaaggcaaggagggcacggtggatggaagtgctgttgctgatgtcgctgaagcggtggtgcatcaggaagttagcacagagcatgatgatgccctaacgcttcccaagtcttctgcttccatggagtccgaggttattagagaggataacaaagaacagagcaccgctgatattgtggggccacatgagcagggtacatgtggggcaagtgctttggtggagaatgagcatctttgtgctgacatgagggctgattcatttgtagctgttactgagcctgacagtcaagaggattatgctgtggagtcctgcatgcgcgatgatgtcctaatttgtaccgagtctggttctgccgacatcgagtctgaggttaatggaaaggatagcaaacaagaacagagcaa

SEQ ID NO: 141214 - DNA, 4566 bp, Zea Mays
gactacaggagaagacacgcgcgacggccacggccaggtagagacagatccatctctcacctcgccccaccgccctcgccgatcggggtccgccgacccccagatcgcttcttcgcttcggtaggtggccgagtgtacgcgtacgaggagcctcccggatcccgcctcgccgtcgtctgtaagatcttctcgcacatctcgatctctctattggagctttgggtttcgtctgtctgtctgtctgtctctctctttgcgaggtttgggttttgtgtcgtggagcggtggaggtgccgtgggagcctttggttaatccagggatcggggcgcgatccgcggggaaacagcaatgacggcggaggggacggcgtgcaacggcgccggcgaggcgccgaaggcggaattcgtgcccgagaaggtggtcaccgcgtcgctggaggagaaggcggccggggagcgcgagggcgaggacgtcggcgggccttttgtggtcgtgaacggcggcgattctgacgggcactccgaccgtggctcagatctgggcaaggcgtccggcgaggagtcgtcgtccgaggaggaggacgtgcccggctccaatgtagctccggacttggccgtgggcggagatcacgggtccgcccgaggggaagtgagtgctcagggtgcggcactcggtgcttcgtcggcggacggcagtggtcgtgcttccgacggcgctgagggtggcgcggatgagggcaaaggcgaaccaagttccgattttgatgctgaagcggcgccgcaggaggacgttggtgaagaggacggtggggcagctgctctggcgtccagcgggtgcgaacctgccatcaccggtgctgattctgaggcggcaccagctgtggatgatgaggttgaaggcaaggagggcacggtggatggaagtgctgttgctgatgtcgctgaagcggtggtgcatcaggaagttagcacagagcatgatgatgccctaacgcttcccaagtcttctgcttccatggagtccgaggttattagagaggataacaaagaacagagcaccgctgatattgtggggccacatgagcagggtacatgtggggcaagtgctttggtggagaatgagcatctttgtgctgacatgagggctgattcatttgtagctgttactgagcctgacagtcaagaggattatgctgtggagtcctgcatgcgcgatgatgtcctaatttgtaccgagtctggttctgccgacatcgagtctgaggttaatggaaaggatagcaaacaagaacagagcaatgctgatgtcgtggaggtcatagggcagggtgtagttagggcagatgcgctgatggcaaatgggcatctttgtgccgacatccaagcagattcttctgaagctgctactaagcctgataacattgctaatgagagcaaactgactgaagttgcagaatcaggagaggatgctgctgccagtggagaactggatgccatcgatgcatcatcacaaaccaatgggcatatttatgttgcctcgggtgctgattcttttataattgcttctgagtccaagtctcattcctttgagacggatggacaagaaactgatcagcaagaagaggaagttccacaaactgaagctgaactattggatggagtgctaaaaccaactgaaaggaactgtgcacgcagtgttgaggaactcataggagaggaagttgacacagatgggcatcccagtgtagacggtacagctgatgcttctggggagcaagaagccaagcccatgcaggtagaaggtgaggccacatgtggtattctcgaatttgaagaagtggataaggatggtgaggatagtttgtgtaatgactgcatggttggtgttgtttcctctaatgaggaaacagagcttcctatgaaggaaagaacagatgaagctgtccccagtgttaatgttggcgagtcagagcaagtaactgaggatacaagccaagatatcatgcagggtggattggccaggggagtttttataggcacaatttttgttaagccagtatcagatcctcatgttgaatcaagcctcgtacataaagtcaaggcagaagttcatttagttgatgaaatcacagcagcagatttgaaagctgaaaatatggtcgaagtgaaaagaacagatcgtgaagttgacgaaatagaggtaaaagcgccaggtactcacgaaattgggaattcttcagaagtagaaccgaaggaagagtttgagatggaggttgatgatgctgtttcattgcatgaagctgcagcttctgcatcagaaaatggttctgaagaaaaatctagcaacattgctgttgatcaagttgaacctgtcaacctgaatgtagatgaactcgcggtagatgatgatcaacccagttttaatccaggttatggatctgctaaatcttctgatgtggccgaaacaaaaaatgtggaagcacaagtgacagaacagaagggcaatgcacaccatgcttcaggtgagtggcatggagatcatacgcaagtcattggaccacagaggatctacataattaaagttccaaaatttgccggtgatgatctctgggataagatccaggctgcacaggctcacttagaccaactgacccaggaaagagacgcaattaaccgccgtaggcaaaaacaaaaggctatatgtgatgaatacagggagaagtttgaggcagcacgtcaagaagagcgggaagcaagggctgcccatggagataagaagaatgatttaaacagtgtgcgctcagtattagagaaattgcaccaagcaaattcagttgaagaacttgatgagcttattgcaaagaaagagaggattatgcaacatgagaccatttctttgaaagaagaaaagcttttaattaaagagattaatgaattaaaatcccaacggaagcagctgtccgccaccatgggctcaaaggctgaaatcaatgaggcatttgaccaaaaagatcacattcatgagcggcataaggtgttaaagaaggattctgatgttttattcagcaacctgaaagtcctagaggagaacacaagaaagattcaaaaatcttttgctgatgaaagaacagctctcagaaaattaacagaggaacaccgagcagctaatgaaatacgtcaaaaggcctacagcgattggactgagcttagatcagagcccagcaagaagaatgaatactttttcaagtacagggacgcccgaaatgcagcagaaaatttcagagccaatggagatataaatggacttatatcacactgtaatagtcagattgagagagttatggaaatatggaacaaaaacgaggacttccgcaagcagtatgttgaatcgaacaaggttagcacactaaagagattagggacccatgacggacgaaaacttggccctggtgaggatcctccggtcattccaagccgaagaccaagcaacatttgtccattgtctgcctcaagcccggaaatgatcaccttagcttcaacaccagcacctgtattggctgctgcagctgcagtcccttccaaagagaactcctttcctgctttggcagcccctcagaccagtaagcgcgccaaatcaaaagcatctggtagctctgcccagattaagaacaaatctgttatagtatcagaggaagaagatttggaacagactttaaaggagaaggctcatcaattggagttagctaggaaggcagaggagttagataggaaggcagaggagttggcgcggaaggaggaggaactaagaaaagagagggatgcagctgaaaaggagcggcttaggatggagcagaaggctaaggctaaggaggctgaggagaggaagaggcggaaagcagagaaggacaaggaaagagccgagttcaaagcacgcaaggaagctgaggagagagagaagaagaaagcaaagagagacaaaaagaaaggcgcagcaccagcagattcgagcgccattggtgacagccatgctgctgcttcggctacagcagatactgacagtaatgcatcagacaacccaagggaagctgacgtttctcaaccagcggtggctcccaggaggccggctagaccagcggcggcaatcaagcaactgaacaggttgcagcccatgccagcgcccctgcgtaacaggggcaggaggaaactgcggcagtacatcctgatcgcagcggcggtgctaacggtgctggcgctgttcgtggcaggcaactacattcccaggctgaggtcgcactcctaattttatcgttaggaaaggagtgccagttctgtcgcggtgaacctggtggtggttctacctagaggattcttcttttttcgactgttcgggttggtttgtatttagcttcccttattataggtttgtgataaaagttattaccggatggtggtgaaatattcgttagaacatgataataatgactatagattcttttttgtacataggtctctggtgctaaccttagcgtatatgatatttaatcatattctatggcgttggctgtc

SEQ ID NO: 141215 - DNA, 869 bp, Zea Mays
cacttgcccggaccggcgcgaccaccaagagtccaaccgagatcaacatcaacctactagcaaagcagccagactgacaccgaccgatccacaggaacaaggcagacacatcgcgaggaagaaatgggcgccgcgtgcgtctccttctcgcgctcgccgcaggcgtcgccggctgcagagccgtcccagcgagcggcggcggccacggtcaaggttgtgaacctggacggctccatggcgcgcctcgcggtcgcagggacggtcgtcacggcgcgcgaggcgctggcagcgggcggccgcgccaccggacgctgccgccgccgccgctcttcctctgcagcgccgacgagctgggcttcgacgcgcccccgcgcgcgctggccgcggacgaggcgctccagccggggcagctctacctcgtgctgcccgactccgcgctgcgccggccgctgaccgccaaggacatggccgcgctcgccgttaaggccgccacggcgctcgcggccgaggcgggtctcgccgccggcctgtcgccggggcgcgacagccgaggcgggacgccggcgggcaagaggccgcggcggcagtcggcagcgcgagtggctcctcttctagtcgccgtgagcaaggagagcagcccgcctccgcctggcgatggtgctgctcggaagaacgacgtgcaccgtgggtacgcagcgcgtcctgcgggtcaagacggtggacgcgcagcggggaagacgaggaagggagctagctacagagcccgcggttctcgccatcgtgccgtcgtgcagaggctaagcgctatctcggaggacggcgagtgatccgtatatcgggctatcggctcagctgtccttatcctcgct

SEQ ID NO: 141216 - DNA, 947 bp, Zea Mays
cactcgcccgtgtccatttcaactctgctccatccatatcccatcacgaacccaccaaaacatcctctccgtccccggtacatgcacagaaccagagtctgcaagagaagaaggccaatgggttcgtgcgtctcccgctccggcgcgatgtcgacggcggcggagtccgtgcacgcgctcacggccaaggtcgtggacctcgacggctccgtggcgcagttcgcgccgcccgtcacggcgcaagaggccctggccgccaccgccagcggagcgcagccgtcgtcgtcgtcgcgcttcctctgctgctccgacgcgctggacttcgacgcgcccatcagcgcgctggccgcgcacgacgcgctgcacccggggcagctctacttcgccctgccagcgtccatgctcggccggccgctgtccgcccagggcatggccgcgctcgccgtcaaggcctgcgcggctctggggacagcgccggtcggcagcgtcccgtcgtcgtcgtcgtcgctggacagaagcgaggcccgtgcggccagcagctggccgcagcggtggcagtccacgggacgagtcgcgccgctcgtcgtcgtgcgcgctgacgcgcacggggagtggaagacttacccggtgcacggcgggtacaaggcggcgcgtgttggcggcggcggcggcggcggcgaccagacggtggggaagacgaaaaacggagtcggttacaagggtatcgcccgtgaccttgcacccattcagaggctaagcgtgatcgtggaaggagcagagctagtgagtgatccattcattgaacagtattcagtagtactagtaaactagtacggagtagtttgatcaagccggcaatttagtttacctgctcccctgttccgtttgagaggagatcggtgtactgtgtacaatatgttttcaataaaattttgattctttggttc

SEQ ID NO: 141217 - DNA, 2666 bp, Zea Mays
gtaaccaaatcccacctgccctccctgctcccccacctaacaatactccatgatccatccatccatcctcacatatcctttgccacaaatacaaaacaagatttggtgcctgcctgcctgcctgcttgtgacgctgctactgatccggccagattatctgctgctactgatacatacagccagactatccgctgttatcattaccactaccagtggtgattagattgcagtggttgatttggggggagatggagtaggccgctagcctttccctgttcctccggttaaagaattaacagcggtgggacaacgaggattgatgcccactgtccgattaattgattcctctttcttcctcctccctcccttttaatacccgcccttgctttccctgcccgtcttttccattcccatttgttttggcggcggcggcggctgccgcgccaccagctttcctgtgcctctttcgcctcgcgggctatttctcctcctcctacctctcggcctcgtccttatacgagcgccattgtgaattttcgagcagcagctagctagcctgtcgtctcctccctcttgttcttggctactgatcctgttctgtcggcgatatccaagaaaacaaagacttggtctttttcctctgcgtgagcgagctgagtgagggagctcacttcttcgaacagccggagcctggagcagcagttgagctcccccggagaaagctgagccacggcgcctttgttgctctccgccgcacatggacagacagctcgctcttcccggcagtaacagctcaaggttctaggtctcggtcggcgatggagagggagtcgaggtcaagggtgctctcggagacggcgtcctgcgccggcacgccgaggtcggttcagtcgacttgcagtctccagcgccggtactcttcacggagcattctgaagccacatgatggcgcactggacatgtcgccacggttctcctactgcaagcctgccgccgacagagagaagatgttcaacagaagacactccctgaatttaccagagcaattgccaggtcattactccagaaaagcaacagaacggacccaaaaggctagctcaaagtctgttgcagatttggttggggagatcgcagcgctcgagcaggaagtcatacgcaaggaactgcacctgctcgctctctacagaagagcgtttgatcaatacgtatctgaatcctgcagcttcacaagcgagcaggtggaccaagaatttctgaaaagcatcgacgagggcgcgctacgtctgagggacataaagcgctccgcggcgttcgacctgccgacgacgaccatctcaggctctgaggagcaggaggaggcaccaccagaggcaaaggcaggcgcgaggcattccagcctcgtcaacttcctgagcgcctccatctcggagtacgtgcccaagatctcgtgcaagctgtcggaggacatcctgggctgcatcgccgccgtctactgcaagctctcgggcgcggagggggagtgctgcgtggcttcgccgagcccttcggtctcgtcttggagcaccttctctccgaggcgccggaacgatagctggagccctcggtctcggtgcaacaacttcgatagctggagcccgcggccgtgtggagtcgagaaggagagcggtgagcagagcccaggcgtgatgatggtcgtcgttccgaggatacgcgtcgacgctgacacgtttgagtacgcgtcgaagatgctcgagactaccaggtctctgatacagcgcctggagaaagtcgacccggtgaagatgacgcacgaggagcagctctgcttttggatcaatatccacaatgctctggtcatgcatgcttttctggcctatggtctgcacgacaagcgcatgaagagcacggacatgattctgaaggctgcgtataatgttggcggccaatcagtaaatgcgcagactattcagaactcgattcttggatgccgccagtcccaccgtccatcattgtgggtccgcgcgctgttcacgccggcgaaaagatccgcggcgaggcacccgtatgcgctccagcacccagaacccgttgcgcatttcgcgctgtcgaccggagcgttttcggacccacctgtgcggctgtacacggcgaagaagatacagcagcagctggaggcggcgcggacggagttcatccggggcagcgtggcggtgcggaagcaggcgctgctgctgcccaaggtgctgcactgctacgcccgggacgccgcgctggagctgcggcacctggtggagctggtgtgcgagaccttgtcggacgcgcagcagaagcagctgcagctcggcctccggcggagggccgtcgacaagtgcgtcgagtggatgccgtacaagtcgtccttcagatacgttgtacatagggatctggctgacgactaggcgggagccagccacgtacggtttgctctgtgtgattgcttgcttggttggttggtttacaaagtgtacaagtagtgggggtgggggtgtacatgcatgcatgtaaatacaggtgtgcatgctcactacttttgagctagtgagctgtggctttgaaacactgtacattctctctttgtgggctttgcgttgaggaatttgggatttgagactgaatcttgatgctag

SEQ ID NO: 141218 - DNA, 860 bp, Zea Mays
gtcttttccattcccatttgttttggcggcggcggcggctgccgcgccaccagctttcctgtgcctctttcgcctcgcgggctatttctcctcctcctacctctcggcctcgtccttatacgagcgccattgtgaattttcgagcagcagctagctagcctgtcgtctcctccctcttgttcttggctactgatcctgttctgtcggcgatatccaagaaaacaaagacttggtctttttcctctgcgtgagcgagctgagtgagggagctcacttcttcgaacagccggagcctggagcagcagttgagctcccccggagaaagctgagccacggcgcctttgttgctctccgccgcacatggacagacagctcgctcttcccggcagtaacagctcaaggttctaggtctcggtcggcgatggagagggagtcgaggtcaagggtgctctcggagacggcgtcctgcgccggcacgccgaggtcggttcagtcgacttgcagtctccagcgccggtactcttcacggaggttagttcgcgcgctgtactttctctcgcacgcgccctctcagctctcaaacgctgtgaaacctgaatggagatttatttttttcctctcccgtcctctacacgcagcgattttttgcattgtttcagttcggcagcctattaacttcctgctgtacaattcaaccgtcctcttcacgccgcatcgaattcctttgggccacaagtacagtacccgctagctgtagtgtagtccactgcccggagaccatcctcatgaacaccggttgacaatggtgccaggctgccagcatgcatggatcgaactcacactggctgtaaaaatagttt

SEQ ID NO: 141219 - DNA, 713 bp, Zea Mays
tttgcaaacaaaaacgaatgagagcaaacaaaacaaactgacgtgaatgaaatctgcagtgggtccgcgcgctgttcacgccggcgaaaagatccgcggcgaggcacccgtatgcgctccagcacccagaacccgttgcgcatttcgcgctgtcgaccggagcgttttcggacccacctgtgcggctgtacacggcgaagaagatacagcagcagctggaggcggcgcggacggagttcatccggggcagcgtggcggtgcggaagcaggcgctgctgctgcccaaggtgctgcactgctacgcccgggacgccgcgctggagctgcggcacctggtggagctggtgtgcgagaccttgtcggacgcgcagcagaagcagctgcagctcggcctccggcggagggccgtcgacaagtgcgtcgagtggatgccgtacaagtcgtccttcagatacgttgtacatagggatctggctgacgactaggcgggagccagccacgtacggtttgctctgtgtgattgcttgcttggttggttggtttacaaagtgtacaagtagtgggggtgggggtgtacatgcatgcatgtaaatacaggtgtgcatgctcactacttttgagctagtgagctgtggctttgaaacactgtacattctctctttgtgggctttgcgttgaggaatttgggatttgagactgaatcttgatgctag

SEQ ID NO: 141220 - DNA, 441 bp, Zea Mays
atgcagggaggacgctggcgctcgcgctcggccgcagggacgctcgcgctggagctgggccgcacccgtaggaacgctcgtcgctcggacgcagggcgcagggccgcaccgccgcagggaagctcgcgctcggctgccgcgacgctcgcgctggagctggctgggccgcaccgcactcgcagggatgctcgtcgctcgcgctcggacgcagggcgcagggccgcaccgccgcagcccgcagggacgctcgcgctcgactgcagggagctgccggagtgctggagcctggagctggccgccttggaggctgagagcctgagacggcggccggatgggagtctccagtcgggaatcgggatcgatggcggcggattgggacacgggagaaaaacggcggccggtagcgacgtagggtttcactgtttcagcctttcaggataa

SEQ ID NO: 141221 - DNA, 1608 bp, Zea Mays
ctgagttgctgcctgcccgggcgcgtctcccccctgacagcctcccgccaccgacacccacatctctccccgtcggcacatgtgtagttgccacttcgctttcccgttctctcaccttacctcacactcctctccatcgattaatctcctccccctcaacaaccgcgagatcttcagctaccgctctctccggtcgcgtttgcatccgcattcctcagatccagattcgagccccagccccgcttcgagatccagctagctctctatcaagcatccggcggagcgagcagcggggggctcggcgagagagaagatgaagcggaagacgcggaacaagatcatcgtatggacgctggccctggctgcagtggcgattctggtgggcggcacgattgcgctggtgctcacggcggggacgtggaaggccaagataaagaagtcgcaggagaagatctgtaacaaggggtgggagtgctcggggagcaagtactgctgcaacgacaccatcaccgacttcttcaaggtgtaccagttcgagaacctcttcgccaagcgcaacacccccgtcgcgcacgccgtcgggttctgggactaccaggccttcatcaccgccgcggccctcttcgagccccaggggttctgcaccaccggcggcaagcagatgcagatgatggagctctgcgccttcctcgggcacgtcggcgccaagacttcatgtgggtacggcgtggcgaccggcgggccgacggcgtgggggctgtgctacaaccacgagatgagccccgaccagacctactgcgacaagacctacacccagtacccctgcgtcgagggcgccgagtactacggccgaggcgcgattcctgtctactggaactacaactacggcgctgccggtgacgggatcaaggcggatctgctccaccacccagagtacctggagcagaacgcgacgctggcattcatggcggcgatgtggcggtggatgacgccgatcaagaagagccagccgtcggcgcacgacgccttcgtgggcaactggaagcccaccaagaacgacacgctcagcaaacgcctgcctgggttcggcgccaccatgaacatactctacggcgagtcgatctgcggcaagggatacgtcgacgccatgaacgttataatctcgcactaccagtattaccttgatctcatgggcgtcggccgtgagcactctggcgacaaccgtgattgcgccgagcaggcaccgttcaacccctccagcccgacggatgaccagaagcagcagcaatcaggaagctaagacggactcattgcgccattgccactgatcaagcttccacagcgctagattgagctacagattcttcaggatgcgtgaagctgcatgcatcgtgttgatgttgttttgaatagactgtatgtactgtctatgtgaattgcgagatttgtggttatttactaccatgttgtccatagatagtctgttttggtttctttggttctgtcagatacgttatacacatgtttaaagagaactgaacataccaggaccctttttccgcttgaacttctctgtgtgcttcctaccgaaacatcacctggcctttt

SEQ ID NO: 141222 - DNA, 849 bp, Zea Mays
gagttgctgcctgcccgggcgcgtctcccccctgacagcctcccgccaccgacacccacatctctccccgtcggcacatgtgtagttgccacttcgctttcccgttctctcaccttacctcacactcctctccatcgattaatctcctccccctcaacaaccgcgagatcttcagctaccgctctctccggtcgcgtttgcatccgcattcctcagatccagattcgagccccagccccgcttcgagatccagctagctctctatcaagcatccggcggagcgagcagcggggggctcggcgagagagaagatgaagcggaagacgcggaacaagatcatcgtatggacgctggccctggctgcagtggcgattctggtgggcggcacgattgcgctggtgctcacggcggggacgtggaaggccaagataaagaagtcgcaggagaagatctgtaacaaggggtgggagtgctcggggagcaagtactgctgcaacgacaccatcaccgacttcttcaaggtgtaccagttcgagaacctcttcgccaagcgcaacacccccgtcgcgcacgccgtcgggttctgggactaccaggccttcatcaccgccgcggccctcttcgagccccaggggttctgcaccaccggcggcaagcagatgcagatgatggagctctgcgccttcctcgggcacgtcggcgccaagacttcatgtaacatccttgctccctctctggtgcttgggctgcaggaggaaccgattgactgactagcggctacgaaactgattgcaggtgggtacggcgtggcgaccggcgggccgacggcgtgggggctgtgctacaacc

SEQ ID NO: 141223 - DNA, 1414 bp, Zea Mays
gttcggtcagcccacctgcttattcggcgggcgggcgggcgcagattgcactggagtatgtagtgctctctggttttcgcaaaaaaaagaaaagcttgctaatagcctggtcatggccgggttttgtgttgctacttttagctactgattgctcgctagcaaagttggtggcctttgtgtaagatggcactacctctgcatccttctccttcctttcctacgctgtatctctttctttctttctttctgtgtgattgtgtgtggaattcggccgctcctccgctatatatatagcgacgcccggcccgcacacagacagctccagagtccagacgcctgatcggaaagcaacgtcgttgcccccacctcgtcacgagtcagagagctacacaacaaccatcctgttcccgcccgcatacaggactctagctagctagctagcgttgttccgttgtggttgctctcgctctcgttcggtcgatcatggagtggagggacagcttcttggacctggcgctcatcccgctcagcctgctcctccccatggcgtaccacgcctggctgtggcgcgaggtccgcctccgcccgctgcgcacggccgtcggcatcaacgccgccacgcgccgcctctgggccatcggcatgatgaaggacaacgccaagaacgcggtgacggtggtgcagtcggtgcggaacgtcatcatggggtcgacgctgatggccacgacggcgatcctcttctgcacgggcgtggcggcggtgctgagcagcacctacaccatcaagaagccgctcagcgacaccgtgttcggcgcgcacggcgagtacatgatggcgctcaaggactacatcggcgacgtcctggagcgcggcttcaccctcaacctcgtcggcaacaggctcttctacgccggggtgcccctcctgctctggatcttcggcccgctcctcgccttcctgtcctccatggtcatggtccccatactctacagcctcgacgtcgtcaacctcatgggccacagcggatgcgtcgtcgtcagcggcaaatctgcggagatgaacggcgggagcgagtgcgcgcgtgccgtctgaagctgccggacttgtgtcctcaacaaaccatatgcatgcgatccgtacatgtgattcggttgagactgttgccgcgcgcaacggcctgtgatgtgtcgagcaccaaggagacggcatgttgttcgtcgtcgtcgttctctcattcatgtggggttataggctagccgcgcgccgtcgtagctgatgctgatgtactaggaaaaccttcgttgcatggatgacacggaacccataccccacgcggttcagttgctttgctgctcttggtgctcgacaagttgacagtgtgtgccactacaacacatattccaagtcggcttta

SEQ ID NO: 141224 - DNA, 1577 bp, Zea Mays
ctgcttattcggcgggcgggcgggcgcagattgcactggagtatgtagtgctctctggttttcgcaaaaaaaagaaaagcttgctaatagcctggtcatggccgggttttgtgttgctacttttagctactgattgctcgctagcaaagttggtggcctttgtgtaagatggcactacctctgcatccttctccttcctttcctacgctgtatctctttctttctttctttctgtgtgattgtgtgtggaattcggccgctcctccgctatatatatagcgacgcccggcccgcacacagacagctccagagtccagacgcctgatcggaaagcaacgtcgttgcccccacctcgtcacgagtcagagagctacacaacaaccatcctgttcccgcccgcatacaggactctagctagctagctagcgttgttccgttgtggttgctctcgctctcgttcggtcgatcatggagtggagggacagcttcttggacctggcgctcatcccgctcagcctgctcctccccatggcgtaccacgcctggctgtggcgcgaggtccgcctccgcccgctgcgcacggccgtcggcatcaacgccgccacgcgccgcctctgggccatcggcatgatgaaggacaacgccaagaacgcggtgacggtggtgcagtcggtgcggaacgtcatcatggggtcgacgctgatggccacgacggcgatcctcttctgcacgggcgtggcggcggtgctgagcagcacctacaccatcaagaagccgctcagcgacaccgtgttcggcgcgcacggcgagtacatgatggcgctcaagtacgtggcgctcatgctgctcttcctcctcgccttcctctgccactccctcgccatctgcttcctcaaccaggccagcttcctcatcaacacctcggcctgcctcttctcctcctccgccgactccgacgccgccgtcctcggcctcccgctgccgcccaccagggactacatcggcgacgtcctggagcgcggcttcaccctcaacctcgtcggcaacaggctcttctacgccggggtgcccctcctgctctggatcttcggcccgctcctcgccttcctgtcctccatggtcatggtccccatactctacagcctcgacgtcgtcaacctcatgggccacagcggatgcgtcgtcgtcagcggcaaatctgcggagatgaacggcgggagcgagtgcgcgcgtgccgtctgaagctgccggacttgtgtcctcaacaaaccatatgcatgcgatccgtacatgtgattcggttgagactgttgccgcgcgcaacggcctgtgatgtgtcgagcaccaaggagacggcatgttgttcgtcgtcgtcgttctctcattcatgtggggttataggctagccgcgcgccgtcgtagctgatgctgatgtactaggaaaaccttcgttgcatggatgacacggaacccataccccacgcggttcagttgctttgctgctcttggtgctcgacaagttgacagtgtgtgccactacaacacatattccaagtcggctttatctcttcctgtcc

SEQ ID NO: 141225 - DNA, 258 bp, Zea Mays
atggccgatgttcctggtgtggattccaccgcggcaatgcgggaggacatggaggccatctgcgtggcgaagagccccagttggcgctggacttcagcaagggcggtggtgattgctgccaactccgacggctgggctgaagctgcagtttcagcttcagcagatcctggcatatctgataccaggttgttagaattaccccggctgcggaggttgtatgagtggctaatggttggagggttggaggaagaggtgtga

SEQ ID NO: 141226 - DNA, 183 bp, Zea Mays
gccaccgggctaggtctcgggatctggctgctttcctcaaacttacagccactcgcgcaccctggccaggcggaggatgttgccaccacatggggtcgaggcaataggaccttccctgcagctttcggccgtgttggagccaccggggagcggaattgcatgtttctattcggaggtgagcat

SEQ ID NO: 141227 - DNA, 1140 bp, Zea Mays
atgaatagtacagattgcttttccaggtgtgtggagagacatgtgtattcctcctatgacgaattcctcaggctccatgaagatgagttccacgcatcaagaagtcaagattccaggaggcctaaaatagtgtatcaatttgtcttagtatttttattcgtggggatgcctgactcaaatgaactcatgttcaacactgagcaacctacttataattttggagcctataaaaattctaagctaagaaagaggagcaagaggaagaggatagaggaggcgccacctaaggagtcggcccgggagaagaagcgctctgagaaggagaggagggcgcagcttgattcaatccatgtcaagtcagaggctgctgcgaggtcctgcttagctttcaggtggatttatcttgcaaatggtatgtggatccgttccagaggcaatgagccttgcagccaggtgaattgcaaagaaatggtctgttcgcaactggtgctctcaggcgactccatcaccgagcagcccttcgccccggtggctgcggtgtcgcactggctgacacctgcttgcagtcgcattacaagttttactgactatgtattttcagtgtacctacactcagttggaaaacttcaaccacactgcaacaaggtttataaaaggtttgctatgaggaaaaacaaatttatgggctcaaacaaagttactatagctgtctgcatcgagactgttttgtgtcttgaactaagaaaaactctccatggtttgcagaaccaagacaagaaaacagatatcaactgtgacgccacactcagaagcttgtttggtgggagggacaaggttgggatgctggagatctccaagcttttgagtcgtgacttcccgaaaatctccaagcttttgtggtccatggagccagggatggctctttggtaaaagacttcgttgtggatggcctcttttatggtccatgttaagtctcaagtcccactaggtggttaagcagaaaaatcttgtgatggcattaagactttcagactttgtttttgggtctgatgcatgtaaaaaggattcccagtgtttctgttgctcttgcgatcctgtgaggacacatatgagagaaatatttagtctgttgatggcaaa

SEQ ID NO: 141228 - DNA, 732 bp, Zea Mays
gcactggccacccctgcatccccgctattaacttccgccccccaaaatccaaaagcagcgcagcgagggaagcggtcacgcgccgccatgggctaccaggatgcgccgggcggcggcgggaagctatcgctcgccagcgtgggcttcgccggcccgggcgcgggggcaggagggggcggctacaaggagctgctcgtcatggcgctgcctcaggacgacggcctcgacggcgccaaggtcgcggaggccatcggcgtcaggctaccggacgtcggaggggccgtgaggactgttttggagagcagagaggccagagaatttgctagtggagcactagctggtgctatgtcaaaggctattcttgctcctctagagactatcaggacaaggatggttgtaggagtagggtctaggcatatttttggtagtttggtggagatcattgaacaaaatgggtggcaagggctttgggcaggaaatacaatcaacatgctccgcattattccaacacaagcagttgaactcggaacatttgaatgtgccaagaggagcatgatagaagctcaagagaaatggaaagaagatggatacccaaagatacaacttggtaatatgaaaattgagcttccacttcacttcttatctccggttgctatcgctggtgctgctgctggaatagctggcacattggcatgccatcctctcgaagttatcaaggatcgcttgactatc

SEQ ID NO: 141229 - DNA, 787 bp, Zea Mays
attatgtcttggcccctgttttaattttctacagcatacatcgttgatccctgatggtaaacttgctgctattgtgggggacaatcctgaattcctgatggacttttgattgacgccaattcaggaaaggtaagtggaacgtagtgtacaatcactgatttttatataataaatgtatgattgatatatacaagcttgcattgcatctgtttgtttctcgcaaacggttcacgaactcattccatggccatttggattactcctttgcatcagcaaggaacctagatgacagaacattggtcacgagaaaccaagacaaggcgtgcaaggtctcgaacgtccacaatctgtctaattgtattgggtggcaacgtcggagccatcaggttgattcgctacacacccaatggaagtccatggccatgactaacacgcggagttcatccacatctttgatgtcgggagtaggtatagcaggagctggacttctttggtgagatcacaaacatatagttcagtccaaacactgaagatctctttgtcggtgtgcatgatcgcgccttcagctgtctcctacagttcaatcggcgacggttctactcataccttgattaccctgaactagggtgtaaatggtgtcaattcatcatttatatgacaaactataattggattggtgaactaggtgtaaatggagtcaattcattaattcaaatacgattatgtgtcgttgcaacacatgattattgtactagtataaagaatataacagaaatgatcgtggaac

SEQ ID NO: 141230 - DNA, 861 bp, Zea Mays
tattgaagtccattctgttggcatcgtcccatctcccttgaaccctttcgcccacaccacagcaccgctgccgaaggtgggaaagaaggcggcggcggaggcaccggcaccggcaccgcctaggaaaggaaaccgaggaaactacagccatggtggtacggatccgtctggcgcggttcgggtgccggaatcggcccttctaccgggtgatggccgccgatagccgctcccctcgagacggcaagcacctcgaggtcctcggctactataacccgctcccagggaaggatggaggcaagaggatgggcctgaaattcgaccgggtgaagtattggctgtcagttggggcacagccatcagatcctgtgcagagtattctctttcgtgccggacttctgccaccacctccattgctagctatggcacggaagggtgggccacgtgataggcgccccattcatccaatgactgggcgccctctggatctcgagggtgtcgcaattattgataattccaatgctcctgaaggcgatactgaagtgcctacagatgaggtggctcaataagccttttgtattagcatagcatatgtagcggtgctgcaaaagaaaacttgtttgatgtgcttgtggcaagactttgggtactcgtacaatgtggcaaacttttaaacaggtaactttcatccatttctcttcttaaaaatatgtcagttcccgctgtttgttcttaaaaaaaatggtgctgtgtgcatcagtagcttttgttctgcagcaccatcaatttgtggtatctagtattctctgcacttgcctgataaggtttgtctgtgaaatggaatatgcgtgataagttgggcct

SEQ ID NO: 141231 - DNA, 745 bp, Zea Mays
gggaaatgaaatcccttagggctaatttggtgaccagggatcaaggggggattgagggggaaattagttgatttccctttcaattccttccaatcccccgtgatcctcttgtaaccaaatcaactcttaagaaaatgaggtttccaaaactagcccttatctatttcctgcattgaaatccatgtaacaaaaaacaactttttctgctgtaggtattggctgtcagttggggcacagccatcagatcctgtgcagagtattctctttcgtgccggacttctgccaccacctccattgctagctatggcacggaagggtgggccacgtgataggcgccccattcatccaatgactgggcgccctctggatctcgagggtgtcgcaattattgataattccaatgctcctgaaggcgatactgaagtgcctacagatgaggtggctcaataagccttttgtattagcatagcatatgtagcggtgctgcaaaagaaaacttgtttgatgtgcttgtggcaagactttgggtactcgtacaatgtggcaaacttttaaacaggtaactttcatccatttctcttcttaaaaatatgtcagttcccgctgtttgttcttaaaaaaaatggtgctgtgtgcatcagtagcttttgttctgcagcaccatcaatttgtggtatctagtattctctgcacttgcctgataaggtttgtctgtgaaatggaatatgcgtgataagttgggcct

SEQ ID NO: 141232 - DNA, 318 bp, Zea Mays
atgacatggccttacaccacaaattccactgcatcgactggtgccaccgtcgccctggtagatttcttcatcttgttcgtctccttcgtgccgaggttggccagtgaaataattgcctccgccttgcctttgctacctaggactggatctgggagcggcctagtgattgacataagaaattcatcaaggctagggatggaaggtacctccggcggaggagcagagagctgtccagtgctcatagtaggagacgccacgtcctccatgggttgggtggactgcagcacctgcacaagcttggccaccctagctgcctga

SEQ ID NO: 141233 - DNA, 1555 bp, Zea Mays
cgcccagagcttctgttcgatgccccctccttcaccacccgcctcgcaagtgcgcacgtgcgatgctggcgccgcgcagtcgcccacgcgcgggacggtgagtgagatggcgcgatacttccgcagcagcaacctcgcctctagggtcttcgagcgtcagctcatctccccgcgccctggcgctaccgttaacactattagacagttctatgaaaatttggtcccaagctatactatatatgacatagattgcccagattattcgtttcgcaagttcactgatgatgggaaatattttgtggcctttagccgaaaccatcaagatttgattgtataccgtccaatctggttgacatattcatgcaatgaagaatgtgatcctcatgagcttccgccaaaggcaaagaagtttgacagcttctttaagcagctttattcaattcctcttgcatctggcaatgagtatatttgcaaggactttttcctgtacatggaatgccatcgatttggtttatttgcaacatctactgcacaaagtaacgaatcaactgccactgagggtgcaatacatggggtgccattaattgagaaaataactttccatcttgtgaggctagaagatggtgtgatacttgatgaaaaggctttctgcaatgattttatcaatctggcacatagtattggtgcttacatgtatgaggaccttctttgtattgtttctttgcgataccaaacaatacatatcctacagatacgagattcaggcaaccttgttgaggtacgcagcattggtgcattctgccgggaagatgatgagctatttcttcactcacatgttcagactggttatgcgggttcctttcttcctggcataaagcaacggttgttgtcgtatattttttgcaagacgtggaatgaggttccagatcagactttgagggtccaacatctaaagaagttctattttcacttccaagattatgttgatcttatcatatggaaggtacagtttttggatcgccatcacctatttgtcaagttcggtagtgtggatggaggggtttctcggagtactgaccaaaacctagctttctttgccgtgtacaacatggagacaacggatatcgtttcacttcatcagaattcttcggaggagctctatgccttgtttgaacaattttatgaccattttcatgcaaacccacaagcttcatcacatggaaaatttatctcctctcattccaatgatattcatgctctggatcaacttcgggttataaaaaataaagcaagtagctcctcacagtttgtgaaaaagatgatgacgtcattaccttacacttgccaatcacagagtccatcaccgtactttgacctgtccctttttaggtatgatgagaaggtatgttctgtgacatttaaaatttctgctatgagcagtgcatgtgcgcagcttggctagtttcttgtttggatgtaacatgtaattttaggtcctatagtcaagctcaagcatatcacgagcattccagtgtatttgcatactttcaccacc

SEQ ID NO: 141234 - DNA, 2166 bp, Zea Mays
cgcccagagcttctgttcgatgccccctccttcaccacccgcctcgcaagtgcgcacgtgcgatgctggcgccgcgcagtcgcccacgcgcgggacggtgagtgagatggcgcgatacttccgcagcagcaacctcgcctctagggtcttcgagcgtcagctcatctccccgcgccctggcgctaccgttaacactattagacagttctatgaaaatttggtcccaagctatactatatatgacatagattgcccagattattcgtttcgcaagttcactgatgatgggaaatattttgtggcctttagccgaaaccatcaagatttgattgtataccgtccaatctggttgacatattcatgcaatgaagaatgtgatcctcatgagcttccgccaaaggcaaagaagtttgacagcttctttaagcagctttattcaattcctcttgcatctggcaatgagtatatttgcaaggactttttcctgtacatggaatgccatcgatttggtttatttgcaacatctactgcacaaagtaacgaatcaactgccactgagggtgcaatacatggggtgccattaattgagaaaataactttccatcttgtgaggctagaagatggtgtgatacttgatgaaaaggctttctgcaatgattttatcaatctggcacatagtattggtgcttacatgtatgaggaccttctttgtattgtttctttgcgataccaaacaatacatatcctacagatacgagattcaggcaaccttgttgaggtacgcagcattggtgcattctgccgggaagatgatgagctatttcttcactcacatgttcagactggttatgcgggttcctttcttcctggcataaagcaacggttgttgtcgtatattttttgcaagacgtggaatgaggttccagatcagactttgagggtccaacatctaaagaagttctattttcacttccaagattatgttgatcttatcatatggaaggtacagtttttggatcgccatcacctatttgtcaagttcggtagtgtggatggaggggtttctcggagtactgaccaaaacctagctttctttgccgtgtacaacatggagacaacggatatcgtttcacttcatcagaattcttcggaggagctctatgccttgtttgaacaattttatgaccattttcatgcaaacccacaagcttcatcacatggaaaatttatctcctctcattccaatgatattcatgctctggatcaacttcgggttataaaaaataaagcaagtagctcctcacagtttgtgaaaaagatgatgacgtcattaccttacacttgccaatcacagagtccatcaccgtactttgacctgtccctttttaggtatgatgagaagctgatttcagcaattgatcggcatcgacattgcacagagcatccaataaaatttatatcagtgaggcaaaatgttgtcaaatttaagatcaagccaggttcagattctggtgcttctgacagcagaataaaaagaatctcgtctttcttgtttcacccatttttcccgcttgcactttcgattcagcagacttatatgcagccaactgttctcaacatccatttcaggagatagaaaaggtataacggttgccctaggtgtatctatgtcattagtgaacttgcagcattgctcgcggcaaaattttggccatatgtactctctagtagataagctgacagatgttacagtaggggataagatccattgtctggcggtgagaatggctagtttgatttctcttccaaaacaaagtacaaaatgcaaatgggctcaatattcatctattgatgtggcttcatgggctcatcagtcatcattgcggcttcacagtgttgatctatgctttcatatgcctagctcggagtgtcagatgtgcttgttattggatttgaggcataaggacacgtatattggatggcatggagttggtatattggatgcttcatgcttgaggcgagggtgatctaagctgcgaatttgttttcgaggatatataggaaatatagcattacaaatagttttgagttgtcatattatgatgaagtaactactatttactgaaactgttatgcaaagataataattatttttctgtgttcaat

SEQ ID NO: 141235 - DNA, 2083 bp, Zea Mays
cgcccagagcttctgttcgatgccccctccttcaccacccgcctcgcaagtgcgcacgtgcgatgctggcgccgcgcagtcgcccacgcgcgggacggtgagtgagatggcgcgatacttccgcagcagcaacctcgcctctagggtcttcgagcgtcagctcatctccccgcgccctggcgctaccgttaacactattagacagttctatgaaaatttggtcccaagctatactatatatgacatagattgcccagattattcgtttcgcaagttcactgatgatgggaaatattttgtggcctttagccgaaaccatcaagatttgattgtataccgtccaatctggttgacatattcatgcaatgaagaatgtgatcctcatgagcttccgccaaaggcaaagaagtttgacagcttctttaagcagctttattcaattcctcttgcatctggcaatgagtatatttgcaaggactttttcctgtacatggaatgccatcgatttggtttatttgcaacatctactgcacaaagtaacgaatcaactgccactgagggtgcaatacatggggtgccattaattgagaaaataactttccatcttgtgaggctagaagatggtgtgatacttgatgaaaaggctttctgcaatgattttatcaatctggcacatagtattggtgcttacatgtatgaggaccttctttgtattgtttctttgcgataccaaacaatacatatcctacagatacgagattcaggcaaccttgttgaggtacgcagcattggtgcattctgccgggaagatgatgagctatttcttcactcacatgttcagactggttatgcgggttcctttcttcctggcataaagcaacggttgttgtcgtatattttttgcaagacgtggaatgaggttccagatcagactttgagggtccaacatctaaagaagttctattttcacttccaagattatgttgatcttatcatatggaaggtacagtttttggatcgccatcacctatttgtcaagttcggtagtgtggatggaggggtttctcggagtactgaccaaaacctagctttctttgccgtgtacaacatggagacaacggatatcgtttcacttcatcagaattcttcggaggagctctatgccttgtttgaacaattttatgaccattttcatgcaaacccacaagcttcatcacatggaaaatttatctcctctcattccaatgatattcatgctctggatcaacttcgggttataaaaaataaagcaagtagctcctcacagtttgtgaaaaagatgatgacgtcattaccttacacttgccaatcacagagtccatcaccgtactttgacctgtccctttttaggtatgatgagaagctgatttcagcaattgatcggcatcgacattgcacagagcatccaataaaatttatatcagtgaggcaaaatgttgtcaaatttaagatcaagccaggttcagattctggtgcttctgacagcagaataaaaagaatctcgtctttcttgtttcacccatttttcccgcttgcactttcgattcagcagacttatatgcagccaactgttctcaacatccatttcaggagatagaaaagtaggggataagatccattgtctggcggtgagaatggctagtttgatttctcttccaaaacaaagtacaaaatgcaaatgggctcaatattcatctattgatgtggcttcatgggctcatcagtcatcattgcggcttcacagtgttgatctatgctttcatatgcctagctcggagtgtcagatgtgcttgttattggatttgaggcataaggacacgtatattggatggcatggagttggtatattggatgcttcatgcttgaggcgagggtgatctaagctgcgaatttgttttcgaggatatataggaaatatagcattacaaatagttttgagttgtcatattatgatgaagtaactactatttactgaaactgttatgcaaagataataattatttttctgtgttcaatatattacaaaaaacttcataatctacaa

SEQ ID NO: 141236 - DNA, 750 bp, Zea Mays
agaataattgtgtgaagaacaaacttaatcgtgagaaggtgaaatttccacagtgcacaggatctcaatcatacgttgcaaaagcttatgtagtgagacaagaaaaatataaagatgtcaaacctagtgcaattgatcttttcaaggagatgcattgtagcaagaaaaaaggatttagtgaagttgttcagaaagctataggtgatatggaagcaatggtggcaacaccagtagaagatggacagcttgcaaagtctgcaagagaagttgtttccaatgttctgcctggttcaagtaaatttcttcacaatgctggccttttgccctcctccaagagaagcaacacagggactgtttcagcaagaatgcaagaactttagtctcaattggacaatgagaggcgagaaaaagatggacttcgagaagatatggataccttaaaggccaagtcagaatcatctgaggcaaccattgctaatcaatcaactgagattgcagatttaaagaagtccttagcagaaaataacatcctacttcgacagatattaagtattagtcgtgatcaggtcaatccttaagcatgcttgctaagatgctagtgtcaaccatcctgaagacacatctcacaaaattgtggacctccttttatccttatgtttgctatatggaactgcaacttacaatctattatatgtgttctcttactatagagttttagtacatgtctggttaaagaattatgaacaatgt

SEQ ID NO: 141237 - DNA, 1468 bp, Zea Mays
agactggaaaagcatcggcacgggcggtaggataaagtagcatagcataccacaaaaggtgctgcttgacagatggcaagcttcccacacctcacgcagatggagcatggcctagccagtggtgcctcccatggcacgccgagcttcttcttctgccatggcacagccacggcggattcagcctcgctggagacctcgtctggtgttctcgacacctccccacgaggcacttcttctgacgacaacaaggcctgcaggaagcacaaggaagatagtggtgccagcttcagctctgctcgctccaaggactcaaactcaaaggaaagcagcaaaaggagcggaggaaaaagagacagaagcagcaagaaggtggacgaggaggagcccaaggggtacatacatgtcagggcgaggagaggacaagcaacggacaaccacagccttgcagagagggtgaggagggagagaatcagtgagaggatgagggtgttgcaggccctggtccctggctgtgataaggtcactggaaaagccctcattttggacgagatcatcaattatgtgcagtccttgcagaaccaagttgagttcctttccatgaggattgcttccctgagccctgtgctgtatggttttggcatggacagtagtgatgctttcagtgaccttataactcagatcgaagggatggcccaccatgaggcgttcgcgatgcctagcagctctgtcctgaacggcactccgtcggaagctctcgtggacacgcacacctccagctcctccccgtcctacgaggtccacggcgacggcggcaccgccagcgtctctttccctcaggacagtggcagctacatggtgcaaacagtaggtgagccaaggcaagagctgttcagccaagtggtgttcagtaaccacatgtgccctttccagtagggagagagcgagaggatggaaggacgacaggtaatgcagcaaaattcggtggatcggagccatatgcccatatatgtctgaatcattctaactatttagtatctactatatgatataacttagtatatcttgcagaatgtgtgtatatctttatcaaatttaattctgaataattatgttttctgttttttcttcttcttccacttgtttttaaaaacttgcaggaagcaataatgttgagatcctatggaggtggaggccaccaccagacgagtttgtgatgttggacgcaatccatcccctcgtcggtggccgtaacgggaacccctgcggtagctagcattagcagtagtaataatagtaggctgttggttacatcatcctgttagatctcaaggtctctgtcggtaccgcatcatctagtaggcattgttgctgcttagcttttgggctctcttattaccaagggttgcatgcatgccattgtattgtactctccaattggaaaaaaaagaaaaaaaatcatttgttcata

SEQ ID NO: 141238 - DNA, 1297 bp, Zea Mays
agactggaaaagcatcggcacgggcggtaggataaagtagcatagcataccacaaaaggtgctgcttgacagatggcaagcttcccacacctcacgcagatggagcatggcctagccagtggtgcctcccatggcacgccgagcttcttcttctgccatggcacagccacggcggattcagcctcgctggagacctcgtctggtgttctcgacacctccccacgaggcacttcttctgacgacaacaaggcctgcaggaagcacaaggaagatagtggtgccagcttcagctctgctcgctccaaggactcaaactcaaaggaaagcagcaaaaggagcggaggaaaaagagacagaagcagcaagaaggtggacgaggaggagcccaaggggtacatacatgtcagggcgaggagaggacaagcaacggacaaccacagccttgcagagagggtgaggagggagagaatcagtgagaggatgagggtgttgcaggccctggtccctggctgtgataaggtcactggaaaagccctcattttggacgagatcatcaattatgtgcagtccttgcagaaccaagttgagttcctttccatgaggattgcttccctgagccctgtgctgtatggttttggcatggacagtagtgatgctttcagtgaccttataactcagaagatcgaagggatggcccaccatgaggcgttcgcgatgcctagcagctctgtcctgaacggcactccgtcggaagctctcgtggacacgcacacctccagctcctccccgtcctacgaggtccacggcgacggcggcaccgccagcgtctctttccctcaggacagtggcagctacatggtgcaaacagtaggtgagccaaggcaagagctgttcagccaagtggtgttcagtaaccacatgtgccctttccagtagggagagagcgagaggatggaaggacgacaggaagcaataatgttgagatcctatggaggtggaggccaccaccagacgagtttgtgatgttggacgcaatccatcccctcgtcggtggccgtaacgggaacccctgcggtagctagcattagcagtagtaataatagtaggctgttggttacatcatcctgttagatctcaaggtctctgtcggtaccgcatcatctagtaggcattgttgctgcttagcttttgggctctcttattaccaagggttgcatgcatgccattgtattgtactctccaattggaaaaaaaagaaaaaaaatcatttgttcataaacacagtcaatttgtgctc

SEQ ID NO: 141239 - DNA, 989 bp, Zea Mays
gacttgccttctccacgcaaaacacggggttcctcgcctccacaaaataaaaacaaaacaaacacatatacacaatttaatcaccggagaacaatgccgatgtggaatcaaacaaagatcatcgtcgtctcaccggggtgaacgtcgtcgatgttggggctgcgcagatccggcgaagtgagacgcgtagacggtcgaactgcacagatcaacgacacgacatgggctgtccccaaataccaatgcgacggcgtgggtcgggactgcgcagatcgagcgaagcacgcgatgcagaggggatccaaggctgctgttttggaccggcatcgctgcgcacagaacttggatgccatggctgccggcagaacaggggttccttgctgtcgcactaggggaaaaggaggtaggaggcgagcagcagcaggggaggggatggtgctgtccttggctgggagagcttgcgcgcactgctctgatgccggtctggaacagagaggaaaaaaaggagggcgccgttggggagaggaggaaggcaacttggggaagattgcagggggcgcttggtagagagagagaagcaggggcgagctcaaggcgctactggcttgggcgtccatggcggctggaggatgaagacaatgggaaaaactgctcgcagggggaaaggccgactggaaaaatggaggctagggcgagctcggctgctgcggtgcgaggaagaaggagcaggggcgccatggacgacggcgaggaggatgtcgccgaggaatgggagctgctgctccacgccatggacatggagttcggcggccctggaaaaaatggagcccacgcctgggctggtgagcgtctgctccaagggagctcggccatggagcagaaggggcgctgctgccctgcacgctagagcttggggaaggctgggcgcagggaggaagaaggtgtgggctgctgccgtgtgggagaagaagacagggagaaaaacaaag

SEQ ID NO: 141240 - DNA, 582 bp, Zea Mays
atcaccaaacaacatgaacaactcgcttcatgggttcatggcaactactgcgataactatactcgcaaccacatgtctccaccgcttaaaccacctaccctcaatctacattctagccgccagtccataaaaacataacacgattacgatttacatgccaacatctaataccgacgcaacctcctcgcctccacggttaaatgaaacggtaggtttcggtaaagcggcccctcacctccttcgccgcagcggagtagcccctcgccacctcagccgccgccgccgggcggagccttcgcaaaacctgtcccagcatgggaccggatccaagctgcctcctcgcggcgcccagcatcctcctccccctcgggcctcggcggccggcgcggtagatggaggaattcgacgcgtcctggaaatggaggcggcgataaaagcgggagggaggaggaggagacgccctgctgtgctggatgggagaatggcaggtaggaagaaggtgggccgtagaggaattggttcgttggccttggccgcgactgcgatagaggagaggaggcgaaggaaagcgtggatttgtct

SEQ ID NO: 141241 - DNA, 1218 bp, Zea Mays
atgtatgaatttgttttgaacaaagctcagagactgacatttgattcatcatcaccaaatgggatccttatgttccgagaggtgaatcccgggaatgctccattggtagtggggcaattacttgatgatgaatgccctgaagattttatcaagggtttgatcctctctgttcgttctctcctccctgttgagcctttggttgatgaatgtgagaagagcaacaacaatcctgagcatttccttactaccaacccattttacgactctcgtgttgtgggtaaatattgtgaaaagcgggatcctacacttgctgttgttgcttacagacgtgggcagtgtgactatgaacttattaacgtcactaacaagaattcgttattcaagctgcaagctaggtatgtggttgagagaatggatggtgatctatgggataaagttcttcagcccgagaatgaatatagaaggcaactcattgaccaagtggtttcgactgcattacctgagagcaagagccccgagcaagtgtctgctgctgttaaggctttcatgactgctgacctgccacatgaactgattgagcttcttgaaaagattgttcttcagaattctgctttcaatggaaatttcaatctgcagaacctgctcatctcgactgctatcaaagcagatccatctagagtcatggactatgtcaacagacttgataacttcgatgggcctgctgttggagaagttgctattgaagcacaactgtatgaggaggctttcgctatattcaagaagttcaacttaaatgtgcaggctgtcgatgttctcttgaacaacatccggagcatagaaagagctgaggaatttgctttccgtgttgaagaagatgttgtttggagccaggttgccaaagcccagttacgtgaaggtctggtcagtgaagcaattgagtccttcattcgtgcagatgatgctgcacacttccttgatgttatccgtgcagccgaggaagctaatgtgtacaatgatttagtgaagtatcttctgatggtaaggcaaaaggcacgggaacccaaagtcgatggagaactcatttttgcatatgctaagattgacaggctcagtgatattgaggaattcattcttatgccaaatgttgccaaccttcaaaatgttggtgactgtctgtatgacgaagaactatatgaagctgcaaaaatcatctatgct

SEQ ID NO: 141242 - DNA, 250 bp, Zea Mays
ggccatggcgcatgtagagcaggctcagatcctaggtttttggtctgcttgtttgatgatgttgctctggataagcagctttttggtctgcttgaggaatttgtacacacttggcaatgaaaagatccttggattgagttgtcattctcgctcatgtttccagttttgtttcgatttgtagtgctcacatttcaaaacctgtgttttaactctacatatgaggctgttgtattactgaattggctaaacg

SEQ ID NO: 141243 - DNA, 2044 bp, Zea Mays
gcagtatcacagccgcacagcgcccgctgctacgcacgccgccgtctacccccactcccccagcacgtgcgtgcacgcgcaggtgctcgaggacttctcccccgtttccgcccacatccgccgacctgcctcgccattccgccgcgccttcgcatcgtccgcgcgcccggcccttttcgttctaccccggtacgactcgacggtggtcgtgggcgccgaaggtgcggctccgaggcgccaggtggttcgtttgctgtttgcgcgatcgccggaggagtctgtgcaagctgtgctggctaagggtttgggggttcggattcagtggaggggctgcggcaggagggagctagagatgtacggaccgccgtcccgaggcggcgggggagctggcactgccggagagcagcctagggtttaccaagtttggcgaggaagcaacgagtttttcttgcaaggccggttcatatttggacctgatgtgagatcattgtttctcaccatattcctcattcttgcgccaatggtggtcttctgtatatttgtggccagacatcttatcaatgactttcctgatcattggggagtttcagttatggtcatagtgattgtcttcactgtatacgatttaacattgctgcttcttacctctggtagagatcctggtatagtgcctcgtaacacccatcctcctgaaactgacgctattgaaatgaacaatgatgctggaaatggtcagacaccacaacaattgcggttgccacggacaaaggatgttattgtaaatggggtcattgtgaaggtcaagtactgtgacacctgcatgctgtacagaccacctcgatgctcacactgctctatctgtaataactgtgtggagcgctttgaccaccactgcccttgggttggccaatgcataggattgcgcaattatcggttcttctatatgtttgtattctctacaacattactgtgcctttatgtatttggtttctgctgggtgtacattatcaagattagagacgcagaacagtcgtcgatctggaaagcaatgttgaagactccagcatcaattgttctgatcatatactgcttcatctgtgtgtggtttgtgggtggtctgtctgttttccatttctatctcatgagcaccaaccagacaacctatgagaacttcagatatcgctatgatcggcgggccaacccgtacaacatagggatcttgaacaacttcatggagatattctgcaccgcagtccctccttccaagaacaacttccgagccagggtcccagtagagcaaggtttacagcaatcgcgtgcgccagcaaggggtttcatgagtctaaacatggataaacctgttggggacttcgaattgagtaggaagccagtatcatgggatgaacctcggtcagcagctgatatcagggacttggaggttggtctagggggtctactggacgagaaagaaggcaggatagcccatgcgtccccggatctgagcagagatgcccttcctgagcttgtggaagggagggctggtatgcattcgaggcgatcaagttggggtcacagaagcgggacctcggagtccgtggacagcattgctgtgcagatggggaccggagattctcactggggctccattagcagtgcccatggcacaaccagtggagctcactagcaagctacgccacgtctttgacgcatcttcttgtgaaacctgcctgataccaccaacgaagaagcgacctttgggcgctctctgtgcacatgtgctttcactccactccacctaggatatacgtctgcagtgctttcttactcagttgtcctgagagcgcatcagttctgatggtttgcttcccgtttggtgttttaagcaaaaataacagaagagccccttaactccccctgttgtttggattatccactgtatatatgtatctttgcaaatcggaattgcctgcagagaagatttgtcatgtttggctttcgcgattctagtttcttcacgcccttcagatttgcactgtgttggaac

SEQ ID NO: 141244 - DNA, 1699 bp, Zea Mays
cagagctcttctatataaacagtggttccctgcacaatgtgattcatcgcatacaggggcaagagtgtagtggcgtaggagcaaagttggtctctgatctttcccctgcaagggaaagagaagaacagagacacaccagtgtatagggtttcggcttgcctgtgcgtgttactgtcgcaatggcaggaggtctcttctccatggagcacccatgggcctctgtttttggcattctaggtacgctgctgcctgtgctgtgttgtgcaccaggaatgctggatttcgttctcaccgtacgatacgacttgcatgcatggcagcatgatcgatggcatgatgcgtgccaaacgattgctcgtcgtcgtcatcatcatcactcatcagtgttttttttacaccgagtgaaaatattcccacaggtttactgacagaaattcccatatgatatgtatcttcctttgttaatttcctgcaggcaacatcatctcatttctggtgttcctcgcaccagtgccgacgttcctccgcgtgtaccggaagaagtcgacggaggggttcagctcggtgccgtatgtggtggctctgttcagctgcacgctgtggatcctgtacgcgctggtgaagaccaactccagcccgctgctgaccatcaacgccttcgggtgcgtggtggaggccgcctacatcctcctctacctcgtctacgcgccgcggggcgccaggctgagggcgctcgcctccttcctcctcctcgacgtggccgccttctcgctcgtcgccgtcgtcaccgtcgtgctcgtcgcggagccgcaccgcgtcagggtgctcggcagcgtctgcctcgccttctccatggccgtcttcgtcgcccccctgagcgtcatcttcgttgtgatcaggacgaagagtgccgagttcatgcccttcaccctctccttcttcctcaccctcagcgccgtcgcctggttcttgtacggcctcttcaccaaggacccctacgtcacggtacggtcaccaaatcgccatgcgacgcatgattacgatttacgaacgtgagattgtgagaagcatgcaataataagtcgatggacgtgagtgattctttgttctgcatgcatgcagctcccgaacgtgggcggcttcttcttcgggtgcatccagatggtgctctactgctgctaccggaagcgcaagccggcgtccgtggtcgtcctgccgacgacgacggccgccgcagccgtggcacagcagctggaggcggagatggagctgcccctcgccgcccaccagcaccagctggccgtggccgtactgcccacgtgcgcggccccggtgctggccgagctgcagaagctggaggaggcgatggggtcgccgcgcaagggcggcgtcaaggccatctgaccatggcctgcgatgaaccgcgcgcgatgcatgcatgtcctgctctagtgctagctggatcagttgcgtgcttatttgattattgttatgcatggcttggtagatccgaattattaactgactgcaagtagacagacatatatatgcgtgtgccttcttttctttactattatatatataatcgttcgtttgtgtgttcttaattatatatagctatatataagcttgcttgtattggagatggataaattaatctggtgggttgtgcaataaaagaagagaacatatctaatgc

SEQ ID NO: 141245 - DNA, 1405 bp, Zea Mays
cagagctcttctatataaacagtggttccctgcacaatgtgattcatcgcatacaggggcaagagtgtagtggcgtaggagcaaagttggtctctgatctttcccctgcaagggaaagagaagaacagagacacaccagtgtatagggtttcggcttgcctgtgcgtgttactgtcgcaatggcaggaggtctcttctccatggagcacccatgggcctctgtttttggcattctaggcaacatcatctcatttctggtgttcctcgcaccagtgccgacgttcctccgcgtgtaccggaagaagtcgacggaggggttcagctcggtgccgtatgtggtggctctgttcagctgcacgctgtggatcctgtacgcgctggtgaagaccaactccagcccgctgctgaccatcaacgccttcgggtgcgtggtggaggccgcctacatcctcctctacctcgtctacgcgccgcggggcgccaggctgagggcgctcgcctccttcctcctcctcgacgtggccgccttctcgctcgtcgccgtcgtcaccgtcgtgctcgtcgcggagccgcaccgcgtcagggtgctcggcagcgtctgcctcgccttctccatggccgtcttcgtcgcccccctgagcgtcatcttcgttgtgatcaggacgaagagtgccgagttcatgcccttcaccctctccttcttcctcaccctcagcgccgtcgcctggttcttgtacggcctcttcaccaaggacccctacgtcacgctcccgaacgtgggcggcttcttcttcgggtgcatccagatggtgctctactgctgctaccggaagcgcaagccggcgtccgtggtcgtcctgccgacgacgacggccgccgcagccgtggcacagcagctggaggcggagatggagctgcccctcgccgcccaccagcaccagctggccgtggccgtactgcccacgtgcgcggccccggtgctggccgagctgcagaagctggaggaggcgatggggtcgccgcgcaagggcggcgtcaaggccatctgaccatggcctgcgatgaaccgcgcgcgatgcatgcatgtcctgctctagtgctagctggatcagttgcgtgcttatttgattattgttatgcatggcttggtagatccgaattattaactgactgcaagtagacagacatatatatgcgtgtgccttcttttctttactattatatatataatcgttcgtttgtgtgttcttaattatatatagctatatataagcttgcttgtattggagatggataaattaatctggtgggttgtgcaataaaagaagagaacatatctaatgcaccaatcctccatgtgcaccagatatgtcctcataaaagaagggtgcacgctctttaagct

SEQ ID NO: 141246 - DNA, 1784 bp, Zea Mays
cagagctcttctatataaacagtggttccctgcacaatgtgattcatcgcatacaggggcaagagtgtagtggcgtaggagcaaagttggtctctgatctttcccctgcaagggaaagagaagaacagagacacaccagtgtatagggtttcggcttgcctgtgcgtgttactgtcgcaatggcaggaggtctcttctccatggagcacccatgggcctctgtttttggcattctaggtacgctgctgcctgtgctgtgttgtgcaccaggaatgctggatttcgttctcaccgtacgatacgacttgcatgcatggcagcatgatcgatggcatgatgcgtgccaaacgattgctcgtcgtcgtcatcatcatcactcatcagtgttttttttacaccgagtgaaaatattcccacaggtttactgacagaaattcccatatgatatgtatcttcctttgttaatttcctgcaggcaacatcatctcatttctggtgttcctcgcaccagtgtaagtgcactgtatatacacacgagcatgcatgcatctgccctagctaaaagttgctgtgagcactgctgatgaaatagggatctgcagaccacgtatatgaatgaacgaatgaatgaatgaacttgtgcatgcatgcaggccgacgttcctccgcgtgtaccggaagaagtcgacggaggggttcagctcggtgccgtatgtggtggctctgttcagctgcacgctgtggatcctgtacgcgctggtgaagaccaactccagcccgctgctgaccatcaacgccttcgggtgcgtggtggaggccgcctacatcctcctctacctcgtctacgcgccgcggggcgccaggctgagggcgctcgcctccttcctcctcctcgacgtggccgccttctcgctcgtcgccgtcgtcaccgtcgtgctcgtcgcggagccgcaccgcgtcagggtgctcggcagcgtctgcctcgccttctccatggccgtcttcgtcgcccccctgagcgtcatcttcgttgtgatcaggacgaagagtgccgagttcatgcccttcaccctctccttcttcctcaccctcagcgccgtcgcctggttcttgtacggcctcttcaccaaggacccctacgtcacgctcccgaacgtgggcggcttcttcttcgggtgcatccagatggtgctctactgctgctaccggaagcgcaagccggcgtccgtggtcgtcctgccgacgacgacggccgccgcagccgtggcacagcagctggaggcggagatggagctgcccctcgccgcccaccagcaccagctggccgtggccgtactgcccacgtgcgcggccccggtgctggccgagctgcagaagctggaggaggcgatggggtcgccgcgcaagggcggcgtcaaggccatctgaccatggcctgcgatgaaccgcgcgcgatgcatgcatgtcctgctctagtgctagctggatcagttgcgtgcttatttgattattgttatgcatggcttggtagatccgaattattaactgactgcaagtagacagacatatatatgcgtgtgccttcttttctttactattatatatataatcgttcgtttgtgtgttcttaattatatatagctatatataagcttgcttgtattggagatggataaattaatctggtgggttgtgcaataaaagaagagaacatatctaatgcaccaatcctccatgtgcaccagatatgtcctcataaaagaagggtgcacgctctttaagct

SEQ ID NO: 141247 - DNA, 871 bp, Zea Mays
gcatgcatttgattgacgtgcatgcgggtccatgctgtgcatacgtacgtacatcagttcgttgtgatcaggacgaagagtgccgagttcatgcccttcaccctctccttcttcctcaccctcagcgccgtcgcctggttcttgtacggcctcttcaccaaggacccctacgtcacggtacggtcaccaaatcgccatgcgacgcatgattacgatttacgaacgtgagattgtgagaagcatgcaataataagtcgatggacgtgagtgattctttgttctgcatgcatgcagctcccgaacgtgggcggcttcttcttcgggtgcatccagatggtgctctactgctgctaccggaagcgcaagccggcgtccgtggtcgtcctgccgacgacgacggccgccgcagccgtggcacagcagctggaggcggagatggagctgcccctcgccgcccaccagcaccagctggccgtggccgtactgcccacgtgcgcggccccggtgctggccgagctgcagaagctggaggaggcgatggggtcgccgcgcaagggcggcgtcaaggccatctgaccatggcctgcgatgaaccgcgcgcgatgcatgcatgtcctgctctagtgctagctggatcagttgcgtgcttatttgattattgttatgcatggcttggtagatccgaattattaactgactgcaagtagacagacatatatatgcgtgtgccttcttttctttactattatatatataatcgttcgtttgtgtgttcttaattatatatagctatatataagcttgcttgtattggagatggataaattaatctggtgggttgtgcaataaaagaagagaacatatctaatgc

SEQ ID NO: 141248 - DNA, 1070 bp, Zea Mays
cgcgattattccaagctccccgagcccatggccgcaatggctccagctgccgtgtcgttcctggcgatggcgctgctgttgctcagtgacgcggaggccaagttcctgcccaacaacatcaccgtcgttggctccgtctactgcgacgcctgctccaacaataccttctccaagcacagcttcttcctgaaaggggccagggtgctgatcaagtgcagcttcaaggtgaactcgacgtcgtccgaagagctgtccctggaagcggagcgcaccaccgaccagcacggcgtgtacaagctggacgtgccccccgtggacggcttcgagtgccgcgagggccacgagctccggtcggcgtgccgcgccacgctcgtccggagctcctccgccgcctgcaacgtcccgggcctcggggcctccacgcagcacatcgagctccgctcccgcgccaccagcgcctgcttcctcaacctcaacgcgctcaacttccgccccgccaaacgggacggcgcgctctgccacgcccaagggggcgacgacgcgttcggctcctcgcttttcttctggcccttcctgccgctcttctggccgccgttcagggtcccgggcggcggcgccggcgggacggtgtcgttcccgtggccgttcccggtgccggcctggctggtgccgttcctgcggccaccgttcttgccattcccgctctacgagccggcgccgtcaccaccgccgccgttctaccgtttcccgcctccccgagaagcggtttctcggccttgaaatcccatgagccaagaagcttgtcaagatacgctattttagcctttcttggcattagattgtgtgttagtgatgagaaactgatcagaggtcgtgtgatatttggcccggccccatgataggttgacctccgtgcgcatgtaaccgatgctagtactgatgctgccatgtagttcattgtgctcgtgaactgatgaacacgtgtggtctgatatttagtagtggcaaactggcaatggttacttgttacatctcctatttgaaggttcagccaagaaagcccatggtgt

SEQ ID NO: 141249 - DNA, 801 bp, Zea Mays
cgcctctatagtcttgccaagcgcccaagtcctgtgtttgccgcgtgcccatggtggagaaggagctcacgggcacggccatggcggagagagggaggaagccggggctcatcacgaagacgctgggccggtgccgcagcggcgcgcggaggagcaggccggcgccggaggggtgcttcacggtgtgcgtcggcgcggggcggcagcgcttcgtggtgcggacggagtgcgtgaaccacccgctgttccgggcgctgctggaggaggccgaggaggcgttcgggtacgcggcggccggcccgctcgcgctgccgtgcgacgccgacgccttcgtgcgggtgctggagcagatcgaggacgctggccgggccgcggccgtggcgaggtgcggccttgtccggggccactccgcgtaccgactgctcgtccccgcacgccctctcctcgtcggccggtcatagcccgggagatcaggtgacgacggtgctcttgatctcaccccgatttgcacctccaagattagtcgtgtgtgtctactgaatagtgaatactcgtgtgtgcaaaccatgtatacaccaccacagctggttggtgcaccgtagtaatggatgagttctttttgtcgagcacttgagcatatatttttattgtcagacagacagaatgtcattgtgctttaggagtgtatgtatatttgccctcacaggtcaccgctcacatgatgtaattacagttttcccttttctaggatcaagaatatagctcctataatcagttattactgataatttcgtttggacg

SEQ ID NO: 141250 - DNA, 1178 bp, Zea Mays
actcgccgcctcctccccactgcctcgtgtggccgtcgtctcccgttcggaacgccaagccccccctccggcgaaatggcccccaagcgaggtggcagggcgccggtgccggccaagaagaagacggataaagtgacgaaccctctattcgagaagaggccgaagcagttcggcatcggcggcgcgttgccgcccaagaaggacctgcaccggttcgtcaagtggcccaaggtcgtgcgtatccagcggcagcgccgcatcctcaagcagcgcctcaaggtaccaccggcgctcaaccagttcacccgcaccctcgacaagaacctcgctacgaacctgtttaagatgcttctcaagtaccggcctgaagacaaggctgccaagaaggagaggcttctgaagagggcccaagctgagaatgaaggaaaaactgttgagtcgaagaaaccaattgttgtgaagtatggccttaaccatgtgacttacctcattgagcagaacaaggctcagcttgttgtcatcgctcacgacgtggatccgatcgaacttgttgtgtggcttccagccctgtgcaggaagatggaggtcccttactgcattgttaaaggaaaggctcgccttggatcgattgttcacaagaagaatgcatcagtcttgtgtcttaccactgtcaagaacgaggataagcttgagttcagcaagattttggaggctattaaggcaaacttcaacgacaagttcgatgaggtcaggaagaagtggggaggtggcatcatgggatccaagtcgcaggccaagaccaaggcccgggaaaagctgctcgccaaggaggctgcgcagcggatgacctagattgtctactgctgtgtctgccctgtagtttaacggggaagaactgatgaactcgtattgtggttttccgaatctagtttcatatgtttctgtccaccagaccatgtttagaagctttgcaagacagagtttacagtgtttatgtgatgcctcagatccatgcagctttgcttctaattgcctaagagcaacctcaaaagtatttcatgaaaaaatgcccttctacagctttttaaatttagaattttaaatgttgccatcttttgtgactgtttgcgagcgaatggtttttaaatgaggatttagaaagtgggtttatgctctaa

SEQ ID NO: 141251 - DNA, 976 bp, Zea Mays
cccggcgcaccacacaggctttctccaactctccgccctcgccatggccatgaccgtggcagccgcctggcttccgtcgaccgcctctcgccggagaatcttatcctctccgctccctccgttcgcggcccctatctccatccacatgccacggcgggcgccgcctcccagtcccatccatccaaagccgcgcctcttcgtcgcctacgcgcagctcgatttctccagagctgttcaaacagcatggagggtcggtaacgatgctgtggaggcaggaagtaatcttgtcccaggttcagttccacgaccaattgccaggataggtgttgcctttgctgctgtgtcagtcgcctttttccttgtcaaatccattgtgtccactgcattatttgttctggtaagcagtcacgacatttgcggtacgattctcctgccattgacgatcaatgcgctgtgcacaatattgaatggcacttagtcctgcagtagcttacttgacaaatagcgaatgtacactgcacttccaataattgacatatttacgagagctgaagactatccattatccattcaacattccagtcttttatgtttcagttttgatggtacttgatacgatcaaattgacgggtcctgtggtcgcaggcaatgatgggccttatatatctcagcttcctggctatgaacccaaaggaggcatccggctctaggctggatgaagcaatgggcaacccatcggaggaccctgttgaagaggcccgtaggataatggacaaatacaagtaattaacctgtgcaaaggtgctgtactctcagaggtatgatttgtctgtagagcttccttgcgtgacgtgaggggtgatggatgggtggatctgattttagcatactacactacactcagtgttttgatatatgtaaatatagttgcacggttgatgaccaaatgaattccgcaaatcaacaagaggttacc

SEQ ID NO: 141252 - DNA, 859 bp, Zea Mays
cccggcgcaccacacaggctttctccaactctccgccctcgccatggccatgaccgtggcagccgcctggcttccgtcgaccgcctctcgccggagaatcttatcctctccgctccctccgttcgcggcccctatctccatccacatgccacggcgggcgccgcctcccagtcccatccatccaaagccgcgcctcttcgtcgcctacgcgcagctcgatttctccagagctgttcaaacagcatggagggtcggtaacgatgctgtggaggcaggaagtaatcttgtcccaggttcagttccacgaccaattgccaggataggtgttgcctttgctgctgtgtcagtcgcctttttccttgtcaaatccattgtgtccactgcattatttgttctggcaatgatgggccttatatatctcagcttcctggctatgaacccaaaggaggcatccggctctaggctggatgaagcaatgggcaacccatcggaggaccctgttgaagaggcccgtaggataatggacaaatacaagtaattaacctgtgcaaaggtgctgtactctcagaggtatgatttgtctgtagagcttccttgcgtgacgtgaggggtgatggatgggtggatctgattttagcatactacactacactcagtgttttgatatatgtaaatatagttgcacggttgatgaccaaatgaattccgcaaatcaacaagaggttaccaatttccgggtcacaaaaaaaaaagaggttagcaacaatttcattcttaatattgtactacctccattttttatttgacgtgagatagtacaaatttacactaacaaatgtctaataaaaaaatcggaggg

SEQ ID NO: 141253 - DNA, 291 bp, Zea Mays
gtataaaaccatttccaaacttgctgcggcgttacatggtaaaaaagaaaaggttgtccaggaaggaaaatataggctgccaaagacaaaacagtctgctcgaattcccctgtttctatacacctccgaggacggtcagcaggagcgcgcagagctcgtagagcagccgcgactggtgcgcgtccgccgccgcagccggcgccgctggcctcatcacgccgtccctggagcctcggaggggatgagatgggatgggggtggggaggccgaaatggtggtttgcttcgcgtt

SEQ ID NO: 141254 - DNA, 703 bp, Zea Mays
atgatcagtacaagaaatcaattgccttgtgtcatttacaaggacggtagattgatgacctttagttgcaggaccgctgctgtgaaaccagtttgcagacagcataccctgctgcttatgtgtttcggccgatccccaatgtgtgatgggcagaccacaagctccatatggagaagaataaggggcacttccagaactggaagctcgatgacacgctgtactaatagggtcatatgccacattgtcttcgctcgtgtgctcaaggatccaaagcctttctcccacttggcaagcacttcctctgaaatcctaagcaagtccacctcatccttcccccatgcttctgcaggaaattattcacacccttcaggtgctgactgcttgccatatggtaaatggcattgttaccagcggagcggctgtcgaggtcgacgatgtcagtggagcagaagggacaccaatgacgggcccgcggcggctgggaagagggggagccatggaggaaggcacagcggaggtcggagagattggagcagaaggaggtgagcgcgtcgttgagatttcacatgtgcttcatgatgtagcgatggcgccgaccatggtcgtggtgatggcggcacaactcgcagtactccaactcggcggcggccgacgtgtggcgggcattgcggtggctcccggcgtttgtgcgtctgaactctga

SEQ ID NO: 141255 - DNA, 1821 bp, Zea Mays
cagaacttggacagcatcacgtcgctggatcagagtgccatttctgttctcagaaggtttctttgtgcctcagacgacccatcatcctccgcataactccatcgacgtcgatggcctgcatgtacatcaacggtcactgccttgtccagtaagtaacacgtacgagacgccgccatggcgggcaacaagttctcgtcgtaccacctcgccgcggccctccgccgcgagccggaccccgccgccgcgctccgcctcttcctcaaccctcccgcatccgccaccccgttccgctattccctccgctgctacgacctcatcatctccaggctcgccgccgcgcgcctcttcccggccatggagtccatcctctcgcgcctggcctcctcctcgggtccccggccccgcgagcagctcctctgccgcgtcgtctccgcctacggccgcgcccgcctccccgccgccgcgcgccgcgccttcgcgcacccggccttccctgggccccgcaccgccagggctctcaacgccctcctccacgccctgctcgcctgccgcgctcccctccgcgacctcctcgccgtctgccgtgacgctgggaccccgccggacgcgtgcacctataacattctcatgcgggcagcggctgcgtccggctcccttgcccacgcgcgccacatgttcgacgaaatgctgcgacggggcatcgcgccgactgtagtcactttcggcaccctcgtcgccgcgctgtgcgctgctggccagctggaaggcgcgttcgaggtgaaggaagtgatggtccggcagtaccacgtgttgccgaacgtgtatgtgtatacaagtctgatcaaggggctctgtgagaaaggggatgtggatgctgcggtggcgctcaaggaagagatggcagggaaggcagatcttgtgctggattctgctgtgtatgcgacgcttgtacgggcgttgttccaggtagggcgaaaaggtgcggtagttggattgctggaggagatgaaggggagtggggttgtggctgatacggtggtgtacaatgccatgctcgcaggcttttgtgaggatgagaaggatcttgctgctgcgttcgctgtgcttgacgatatgcagaagaatgggtgcaaggcggatgcggtgagctataatacattagttgcagggttgtgcaagctgggccggtggcgggatgcacatgaattggttgaggatatgccaaggcaggggtgccatccagatgtggtgacctacagaatgctctttgatgggatgtgtgctgctgaggagtttcttgaagcaaaccaggttttggatgagatggttttcaagggttttgcgccaagcaacgatggtgcacagaagtttgtccaggggattgagaaggaaggagatgtggtattgctagagtcagtgttgtgccgactagcgaaggtgaatgctttggtgccaagtggatgggaaaaagctgtaagtggtgcgctgaatgatcccacagagttgaggctagagaagcagcttgactctttaagaattgcttgattagacaccatagtggatttgatcaatacagtttgagtagcaaaaaaatggcaagcatgatttttaaagaaatcaatttgttcatctgttatacaaggctgccttgcaggagtcttacccaattcaggttagtttcttgcaggtagtattattaaagtcagagaaagattaaaatggaatctaaggtgtgcaacttattcaagtgaagttaatttgccataagattggaatataagatggatctatggcaaaaaagaatattcgtgtttgcaagta

SEQ ID NO: 141256 - DNA, 1272 bp, Zea Mays
ggagctaaaattttgaaggagaaccccagaccacctcggcccacggacccacggaccatagcccagaaaggaccaaggtggaagaaacaaaacgaaaggcggtgtcagctgctcctccacttcccgtgtttctaactccggtggctccaccactagcaacccgtgcagcgagcccaccccgaccactgccatgtcgaggcgcggcgactgggtctacgagaacaacggcgggacctgcgtggccatcgccggcgccgattactgtgtcgtcgcggcggacacccgcctctctgtcggatacagcatcctcacgcgcgaccactctaagatctgcgacctgtgagtccctgaacccgatctcgtgcttcgatctgtccatctgggctttagggtttgtggattgggaggcacgagtgaattttggtgtggcgtgggctaaaatatgggtgacaaggctggattcgtagcaggatttggtgctgccactggttcttttagctagggtttggtgcgtggaggattgtgtcgaaaattatgggggaaatacctttacattctatatgttttatacgtttttcgttaatggctagttagttcagcgtcctctttgtgaacgggaatgcttaactggcttgctactgtggtatggtcttttgttcatcaatttgcttacttaataatgctgagcacactgggttgcatgtggttcattcttcattcttcctagccctagttttatgtcctatgtttgctctttcattcagatgactaggtcatcatagaataatattttagattctgctttctgcacaagtagggtaaccttcgttgctaaacaaacttctggttttggcagatgagcatttcattagcatatcattgtaggtaagggagatgtaggcttgacatttaggtttacttttatattgagtaaaatacatttccggtccttgtcgtgctatgtcatctcggtccataaactttcaaagtgtgtctcttaaagccttaatcgttgtttgggtctcagttaggtccaaacgggttgtggttttaccatacagcctagcactggcatatggaccccacatgtcaacctatgtatctcttttctctgttttctctcaccttcccgcatcttgctcatgtcgtcgcgcgccacaccgtgtgcctccgtcccgacaacaccgaggcttgggagcgctgcggatgcagcttacttgcactctggaagccagccgcacacgacgcagccggcttgggcgccgccttgcg

SEQ ID NO: 141257 - DNA, 1236 bp, Zea Mays
ggagctaaaattttgaaggagaaccccagaccacctcggcccacggacccacggaccatagcccagaaaggaccaaggtggaagaaacaaaacgaaaggcggtgtcagctgctcctccacttcccgtgtttctaactccggtggctccaccactagcaacccgtgcagcgagcccaccccgaccactgccatgtcgaggcgcggcgactgggtctacgagaacaacggcgggacctgcgtggccatcgccggcgccgattactgtgtcgtcgcggcggacacccgcctctctgtcggatacagcatcctcacgcgcgaccactctaagatctgcgacctggctgacaaatgtgtactagcatcttctggctttcagggtgatattaaagctctgcacaagaacctagctgccagagaattgctataccaacaccagcataacaaaaggatgagctgccctgccatggcacagctcctctccaataccctgtactacaagcgcttcttcccatattacgccttcaatgtgctcggtgggcttgacagcgaggggaaagggtgtgttttcacctatgatgcagtaggttcctatgagagaactggttatagtgctcagggaacgggatctactttgattatgccagtcctggacaatcaactaaaatcaccaagtcctctattgctccctgccagggatgctgtcacaccattgtcggagtcagaggccatcgatctagttaaggatgtgtttgcatctgcaactgagagagacatctacactggagacaagttggaaattgtagtcatcaacaaagtcgggactaagcgcgagtacatcgacctgaggaaggactaagccaacgcttcagttgtgctgcagctgtcatttgcttcggacatgtttcctagtctggggatttatgtctaaagccgttgcttgcatagaaacatatgttattacttgcatatgtcctgtaccagggttcagtcagcttgttttttttttgttgaaacaaattgcttggatattgaagcggtacttactggcggaaagtctatatttggttgggagcttaacattaatggcctcatccgaaatgtcacaatcacaagtctctttatatctcttctactcattcggattcgaattgccttttgtctttaaagatctttaacttttatgtagtacctcccttttaaattatatgatgtttttagtttcttttagtatattgt

SEQ ID NO: 141258 - DNA, 1178 bp, Zea Mays
gagaaccccagaccacctcggcccacggacccacggaccatagcccagaaaggaccaaggtggaagaaacaaaacgaaaggcggtgtcagctgctcctccacttcccgtgtttctaactccggtggctccaccactagcaacccgtgcagcgagcccaccccgaccactgccatgtcgaggcgcggcgactgggtctacgagaacaacggcgggacctgcgtggccatcgccggcgccgattactgtgtcgtcgcggcggacacccgcctctctgtcggatacagcatcctcacgcgcgaccactctaagatctgcgacctggctgacaaatgtgtactagcatcttctggctttcagggtgatattaaagctctgcacaagaacctagctgccagagaattgctataccaacaccagcataacaaaaggatgagctgccctgccatggcacagctcctctccaataccctgtactacaagcgcttcttcccatattacgccttcaatgtgctcggtgggcttgacagcgaggggaaagggtgtgttttcacctatgatgcagtaggttcctatgagagaactggttatagtgctcagggaacgggatctactttgattatgccagtcctggacaatcaactaaaatcaccaagtcctctattgctccctgccagggatgctgtcacaccattgtcggagtcagaggccatcgatctagttaaggatgtgtttgcatctgcaactgagagagacatctacactgtaagctgcatttgctcattgccaaaatattgcgcctgtttctcttttatatatatctaccctgttgatccacaaacatgcaaaatatgcagggagacaagttggaaattgtagtcatcaacaaagtcgggactaagcgcgagtacatcgacctgaggaaggactaagccaacgcttcagttgtgctgcagctgtcatttgcttcggacatgtttcctagtctggggatttatgtctaaagccgttgcttgcatagaaacatatgttattacttgcatatgtcctgtaccagggttcagtcagcttgttttttttttgttgaaacaaattgcttggatattgaagcggtacttactggcggaaagtctatatttggttgggagcttaacattaatggcctcatccgaaatgtcac

SEQ ID NO: 141259 - DNA, 1160 bp, Zea Mays
gagaaccccagaccacctcggcccacggacccacggaccatagcccagaaaggaccaaggtggaagaaacaaaacgaaaggcggtgtcagctgctcctccacttcccgtgtttctaactccggtggctccaccactagcaacccgtgcagcgagcccaccccgaccactgccatgtcgaggcgcggcgactgggtctacgagaacaacggcgggacctgcgtggccatcgccggcgccgattactgtgtcgtcgcggcggacacccgcctctctgtcggatacagcatcctcacgcgcgaccactctaagatctgcgacctggctgacaaatgtgtactagcatcttctggctttcagggtgatattaaagctctgcacaagaacctagctgccagagaattgctataccaacaccagcataacaaaaggatgagctgccctgccatggcacagctcctctccaataccctgtactacaagcgcttcttcccatattacgccttcaatgtgctcgggaaagggtgtgttttcacctatgatgcagtaggttcctatgagagaactggttatagtgctcagggaacgggatctactttgattatgccagtcctggacaatcaactaaaatcaccaagtcctctattgctccctgccagggatgctgtcacaccattgtcggagtcagaggccatcgatctagttaaggatgtgtttgcatctgcaactgagagagacatctacactgtaagctgcatttgctcattgccaaaatattgcgcctgtttctcttttatatatatctaccctgttgatccacaaacatgcaaaatatgcagggagacaagttggaaattgtagtcatcaacaaagtcgggactaagcgcgagtacatcgacctgaggaaggactaagccaacgcttcagttgtgctgcagctgtcatttgcttcggacatgtttcctagtctggggatttatgtctaaagccgttgcttgcatagaaacatatgttattacttgcatatgtcctgtaccagggttcagtcagcttgttttttttttgttgaaacaaattgcttggatattgaagcggtacttactggcggaaagtctatatttggttgggagcttaacattaatggcctcatccgaaatgtcac

SEQ ID NO: 141260 - DNA, 1145 bp, Zea Mays
gagaaccccagaccacctcggcccacggacccacggaccatagcccagaaaggaccaaggtggaagaaacaaaacgaaaggcggtgtcagctgctcctccacttcccgtgtttctaactccggtggctccaccactagcaacccgtgcagcgagcccaccccgaccactgccatgtcgaggcgcggcgactgggtctacgagaacaacggacctgcgtggccatcgccggcgccgattactgtgtcgtcgcggcggacacccgcctctctgtcggatacagcatcctcacgcgcgaccactctaagatctgcgacctcatcttctggctttcagggtgatattaaagctctgcacaagaacctagctgccagagaattgctataccaacaccagcataacaaaaggatgagctgccctgccatggcacagctcctctccaataccctgtactacaagcgcttcttcccatattacgccttcaatgtgctcggtgggcttgacagcgaggggaaagggtgtgttttcacctatgatgcagtaggttcctatgagagaactggttatagtgctcagggaacgggatctactttgattatgccagtcctggacaatcaactaaaatcaccaagtcctctattgctccctgccagggatgctgtcacaccattgtcggagtcagaggccatcgatctagttaaggatgtgtttgcatctgcaactgagagagacatctacactggagacaagttggaaattgtagtcatcaacaaagtcgggactaagcgcgagtacatcgacctgaggaaggactaagccaacgcttcagttgtgctgcagctgtcatttgcttcggacatgtttcctagtctggggatttatgtctaaagccgttgcttgcatagaaacatatgttattacttgcatatgtcctgtaccagggttcagtcagcttgttttttttttgttgaaacaaattgcttggatattgaagcggtacttactggcggaaagtctatatttggttgggagcttaacattaatggcctcatccgaaatgtcacaatcacaagtctctttatatctcttctactcattcggattcgaattgccttttgtctttaaagatctttaacttttatgtagt

SEQ ID NO: 141261 - DNA, 1242 bp, Zea Mays
gagaaccccagaccacctcggcccacggacccacggaccatagcccagaaaggaccaaggtggaagaaacaaaacgaaaggcggtgtcagctgctcctccacttcccgtgtttctaactccggtggctccaccactagcaacccgtgcagcgagcccaccccgaccactgccatgtcgaggcgcggcgactgggtctacgagaacaacggcgggacctgcgtggccatcgccggcgccgattactgtgtcgtcgcggcggacacccgcctctctgtcggatacagcatcctcacgcgcgaccactctaagatctgcgacctggctgacaaatgtgtactagcatcttctggctttcagggtgatattaaagctctgcacaagaacctagctgccagagaattgctataccaacaccagcataacaaaaggatgagctgccctgccatggcacagctcctctccaataccctgtactacaagcgcttcttcccatattacgccttcaatgtgctcggtgggcttgacagcgagggtaaagtttgttgctttactttctcacatttattgtttgaacactcaagtaagcatgttgtgcacctgcacagggaaagggtgtgttttcacctatgatgcagtaggttcctatgagagaactggttatagtgctcagggaacgggatctactttgattatgccagtcctggacaatcaactaaaatcaccaagtcctctattgctccctgccagggatgctgtcacaccattgtcggagtcagaggccatcgatctagttaaggatgtgtttgcatctgcaactgagagagacatctacactggagacaagttggaaattgtagtcatcaacaaagtcgggactaagcgcgagtacatcgacctgaggaaggactaagccaacgcttcagttgtgctgcagctgtcatttgcttcggacatgtttcctagtctggggatttatgtctaaagccgttgcttgcatagaaacatatgttattacttgcatatgtcctgtaccagggttcagtcagcttgttttttttttgttgaaacaaattgcttggatattgaagcggtacttactggcggaaagtctatatttggttgggagcttaacattaatggcctcatccgaaatgtcacaatcacaagtctctttatatctcttctactcattcggattcgaattgccttttgtctttaaagatctttaacttttatgtagt

SEQ ID NO: 141262 - DNA, 1014 bp, Zea Mays
cctcgcctgctggccgtatcctatgtgttctctaacgagggtctgtttggtcctgcaggacctgcgtggccatcgccggcgccgattactgtgtcgtcgcggcggacacccgcctctctgtcggatacagcatcctcacgcgcgaccactctaagatctgcgacctggctgacaaatgtgtactagcatcttctggctttcagggtgatattaaagctctgcacaagaacctagctgccagagaattgctataccaacaccagcataacaaaaggatgagctgccctgccatggcacagctcctctccaataccctgtactacaagcgcttcttcccatattacgccttcaatgtgctcggtgggcttgacagcgaggggaaagggtgtgttttcacctatgatgcagtaggttcctatgagagaactggttatagtgctcagggaacgggatctactttgattatgccagtcctggacaatcaactaaaatcaccaagtcctctattgctccctgccagggatgctgtcacaccattgtcggagtcagaggccatcgatctagttaaggatgtgtttgcatctgcaactgagagagacatctacactggagacaagttggaaattgtagtcatcaacaaagtcgggactaagcgcgagtacatcgacctgaggaaggactaagccaacgcttcagttgtgctgcagctgtcatttgcttcggacatgtttcctagtctggggatttatgtctaaagccgttgcttgcatagaaacatatgttattacttgcatatgtcctgtaccagggttcagtcagcttgttttttttttgttgaaacaaattgcttggatattgaagcggtacttactggcggaaagtctatatttggttgggagcttaacattaatggcctcatccgaaatgtcacaatcacaagtctctttatatctcttctactcattcggattcgaattgccttttgtctttaaagatctttaacttttatgtagt

SEQ ID NO: 141263 - DNA, 704 bp, Zea Mays
caccggccacctcaccaactcccctacaagccgccgggccgaacgaccgaagcatccacttccaaagtgtactgtttgctgcccgcctggcgcctgcccccataactactctgccaccaatccggggaggaatcaacctagcggtaagcggacatggcggcggcgaagatagcgccgtcgatgctctcgtcggactttgccaacctcgcttcggaggctgagcgcatggtccgcctaggcgccgactggctacatatggacatcatggatgggcacttcgttcctaacctgactattggggctccggtgatccagagcttgaggaaacataccaagtatggtcttttgatcctttgcttatatggatgacttcttaatctgcatagtcccaatggttctaactgttggtttttagagcatatttggactgccatcttatggtcacaaagccttcagattacgtagaaccatttggaaaggctggcgcttctggattcacattccatatagaagttgctagaggtgaacacacatctgttgaatggcctagtattttcagttctcctcttatggaaaaactttatgcagacaactggcaagatctcatccaaagcattaaatcaaagggtatgcggcctggtgtatcattgaggccaggtactccagtggaggaagtttttcccctggtaacttaaagcacttac

SEQ ID NO: 141264 - DNA, 1171 bp, Zea Mays
caccggccacctcaccaactcccctacaagccgccgggccgaacgaccgaagcatccacttccaaagtgtactgtttgctgcccgcctggcgcctgcccccataactactctgccaccaatccggggaggaatcaacctagcggtaagcggacatggcggcggcgaagatagcgccgtcgatgctctcgtcggactttgccaacctcgcttcggaggctgagcgcatggtccgcctaggcgccgactggctacatatggacatcatggatgggcacttcgttcctaacctgactattggggctccggtgatccagagcttgaggaaacataccaaagcatatttggactgccatcttatggtcacaaagccttcagattacgtagaaccatttggaaaggctggcgcttctggattcacattccatatagaagttgctagagacaactggcaagatctcatccaaagcattaaatcaaagggtatgcggcctggtgtatcattgaggccaggtactccagtggaggaagtttttcccctggtggaagcagaaaatccggtagaattggttcttgtgatgacagtcgagcctggttttggtggtcagaaatttatgccagaaatgatggataaggtgcgcacactgagaaagaagtacccttcccttgacatagaggttgatggtggtctaggtccttcaaccatagacgtggccgcatctgctggggccaattgcatcgtcgctggaagctctatatttggcgctgcggacccaggagccatcatatctgtgctgaggaagagcgtcgagggctctcagaacaaaaactgattttggtgtttctgctgtaaagtactccctccgtttttttttattcgtcgcgttttagttcaaacatgaactagcggacgactgatattcgagaatggagggagtacttcgaccctgcacgtcagatgagctgatcctcacattgcaccggaactgttcggcgagaataaaatttgatgttagaccttgaacgtcttttgcaatatgcttttttgtctgccctgattatattctaccccttcatataacgcttgatgtgccgtcaagaaatggcgaaacattggcatgactgtaaacaagaaactaaatacgggtataaaaatcgtgtcatgtcatgtcc

SEQ ID NO: 141265 - DNA, 1241 bp, Zea Mays
caccggccacctcaccaactcccctacaagccgccgggccgaacgaccgaagcatccacttccaaagtgtactgtttgctgcccgcctggcgcctgcccccataactactctgccaccaatccggggaggaatcaacctagcggtaagcggacatggcggcggcgaagatagcgccgtcgatgctctcgtcggactttgccaacctcgcttcggaggctgagcgcatggtccgcctaggcgccgactggctacatatggacatcatggatgggtgagttggtctctaattctcaatgaggatattttacttctattgtggtttgctactgaagtgtccggtggcacttcgttcctaacctgactattggggctccggtgatccagagcttgaggaaacataccaaagcatatttggactgccatcttatggtcacaaagccttcagattacgtagaaccatttggaaaggctggcgcttctggattcacattccatatagaagttgctagagacaactggcaagatctcatccaaagcattaaatcaaagggtatgcggcctggtgtatcattgaggccaggtactccagtggaggaagtttttcccctggtggaagcagaaaatccggtagaattggttcttgtgatgacagtcgagcctggttttggtggtcagaaatttatgccagaaatgatggataaggtgcgcacactgagaaagaagtacccttcccttgacatagaggttgatggtggtctaggtccttcaaccatagacgtggccgcatctgctggggccaattgcatcgtcgctggaagctctatatttggcgctgcggacccaggagccatcatatctgtgctgaggaagagcgtcgagggctctcagaacaaaaactgattttggtgtttctgctgtaaagtactccctccgtttttttttattcgtcgcgttttagttcaaacatgaactagcggacgactgatattcgagaatggagggagtacttcgaccctgcacgtcagatgagctgatcctcacattgcaccggaactgttcggcgagaataaaatttgatgttagaccttgaacgtcttttgcaatatgcttttttgtctgccctgattatattctaccccttcatataacgcttgatgtgccgtcaagaaatggcgaaacattggcatgactgtaaacaagaaactaaatacgggtataaaaatcgtgtcatgtcatgtcc

SEQ ID NO: 141266 - DNA, 1145 bp, Zea Mays
caccggccacctcaccaactcccctacaagccgccgggccgaacgaccgaagcatccacttccaaagtgtactgtttgctgcccgcctggcgcctgcccccataactactctgccaccaatccggggaggaatcaacctagcggtaagcggacatggcggcggcgaagatagcgccgtcgatgctctcgtcggactttgccaacctcgcttcggaggctgagcgcatggtccgcctaggcgccgactggctacatatggacatcatggatgggcacttcgttcctaacctgactattggggctccggtgatccagagcttgaggaaacataccaaagcatatttggactgccatcttatggtcacaaagccttcagattacgtagaaccatttggaaaggctggcgcttctggattcacattccatatagaagttgctagagacaactggcaagatctcatccaaagcattaaatcaaagggtatgcggcctggtgtatcattgaggccaggtggaagcagaaaatccggtagaattggttcttgtgatgacagtcgagcctggttttggtggtcagaaatttatgccagaaatgatggataaggtgcgcacactgagaaagaagtacccttcccttgacatagaggttgatggtggtctaggtccttcaaccatagacgtggccgcatctgctggggccaattgcatcgtcgctggaagctctatatttggcgctgcggacccaggagccatcatatctgtgctgaggaagagcgtcgagggctctcagaacaaaaactgattttggtgtttctgctgtaaagtactccctccgtttttttttattcgtcgcgttttagttcaaacatgaactagcggacgactgatattcgagaatggagggagtacttcgaccctgcacgtcagatgagctgatcctcacattgcaccggaactgttcggcgagaataaaatttgatgttagaccttgaacgtcttttgcaatatgcttttttgtctgccctgattatattctaccccttcatataacgcttgatgtgccgtcaagaaatggcgaaacattggcatgactgtaaacaagaaactaaatacgggtataaaaatcgtgtcatgtcatgtccata

SEQ ID NO: 141267 - DNA, 918 bp, Zea Mays
atgggtaatgctatgatggaaaagtttaacaagtattgggaagaaaagaataatgttatggtgattgctactattcttgatccaaggtataaaatgagatttattgagtggtgcttcaataagatatttgatgaacatcaagttttgtttgaattagaagatgttcgtagtgagttagaaaaactttatggggattttgaggtgcagcatagagagagaaaagagtctcaaagcaaatctaatgcttcctcatctttgagtattgaaagatcatgtagtttgccatccgcttcatgtcaatttcagtctttcttgtcatcaactcagtctaacccatcaaagagcgagttgcttatctatttggaggagactaatgtgtgtttatcggacaaagagtttgatttgctgaattggtggaaggttaattcacatagatttccagtggtgtcgagaatggcaaagaaattcctaactataccggcgacatcagtgtcttcggagtctacttttagcacgggaggtagaactcttgatgattatcgtagttctctaaggccttcaatggtggaggcattggtatgctcttctagctggatccgaggaacacatgatggaagcatgatatatgtggtatgctgatcttgtatatttcttaaagttttattatttcacacattaattgaactttgtattttatcaggaagaagatgatgaggacaatgttgagaacattctatttccaaaaagcttggtggaaagcaactaaatttggaagaattggatggagacaagtaaacaaagtcaagactcaagagaaaagatgcatcatttgaattaattttgtcgttgaaactttgagatactgaatattttgagcttatcaatggattatgcattgctcttgtatactttgagata

SEQ ID NO: 141268 - DNA, 1297 bp, Zea Mays
ctctcgcatgtaccatttggttttggacttgacgcactagctctccaagaagttgaacaacacagaagaactcggcgggccggccgttgcaccggccatgagaggtttctcggattcccgaggttgttttctaagtttcttcctcggagctgcagtcgccgcggcctgcatcgtgctgctacagccgtccgctctgtgcccgttcgacggcctcacgccggcagatcgtcaagagctggcaatcttgagtaatagaactcatgctgctccctgctcgaagaagcttcacatgcctgctactacctcaccggacgacgtcaggcttctggcgctcctgagaagggcctccatggacgacaacaccatcataatgaccttcacgaacaaggcgtggaccgcgcccggctcgctcatggacctcttcctcgagagcttccgcgtaggcgtgaggacggagccgctcctcaagcacctggtcatcgtcgccgtcgacgacaaggcgcacgagcggtgcgggcaggtgcacccgctctgctaccgcctccgcgtcaggggcgtcgactacgcggcggagcagtcgttcatggagaaggactacctcgacatgatgtggcgccggaaccggttccaggcccgggtcctgcggctcggctacagcttcgtcttcacggacatggacatcgtctggctgcggaacccgttgctgcgcgtgcccgtcggcgccgacctcgccatgtcgtccgactacttctacggcgacaacccgtacgacctgaacaagacggccaacggcgggttcgtgtacgccagggcgagcgcccggacggtggccttctacggcggctggtacgaggcgcgggaggcgtacccgaggaggaacgagcaggacgtgttcgaccgggtgaagcacgtgctgtcggcgcggcacggcgtgcgggtgcagttcctggacacggcttacctcggcggcttctgcgagctccgcaaggacttccacaaggtgtgtacggtccacggcaactgcctcttcgggctcagggacaagctccagaagctcacccaggtgttggacgagtggaagcagttcagggccgacgccgcgttgatgggcagcaacagcacagcgctgacggactgattagctagcatagcgtagcagtcgcggcgtacgtcaatgtgatctttctttcttcgaagaagataaaatagggcaggttgaactttctcaacatgtccgtgcttcatcactacagtagaaaaaacaagcttcgtcccccagtggaaggagattttgatt

SEQ ID NO: 141269 - DNA, 153 bp, Zea Mays
atgcaggaactgctgccgctcttctttgtgaggcgctgctgcagaagcagagccgttcatgcttttctcctctccttcctctatgcaagtaagagaatcaactatatcatcctgttgacactcccttctgtagtcgagagtgattgtttgtaa

SEQ ID NO: 141270 - DNA, 412 bp, Zea Mays
atgaacggatctggtccttcggcgcggctgttggatggggcgggggctcaccctggcggcggcggccaccctccgcggcgccttctccgcttacctcggggtctctggcggcccaccgtgcgccctccaccacctgtcgatgccccacgccgccacctcaagccctcggcccgccctcctgcccgcggcgtcctcccgctcgctctctgctccgtccgaacgccacgacacacacacaccgagtcagcagtgctaattgctaaaggtactcgtagcaacaaagacaggaacaggcaaggcagaaacggagctgcgaggcagctttaccgtggcgatgggccggaggcgagaagaagtcgtcggggagtaagctgtcgaagtcgtcgtccaggtcatcctcggcgtcgagtag

SEQ ID NO: 141271 - DNA, 897 bp, Zea Mays
agcacgacggaggcagtccagcgatgggagagccgacggaggcagcgccgggaaacagggcaggacgaggcggcggaggacgagcatcgcggcgaggtagctgcagatgacggcagccgcgaaggacgcggtcgcgccgaccgtgcggcctggctgccagcgggacgaggccacggccgggtgctccaccaggagccaccgcgaccggctcagcagcgacgcggccgccatcgatcacgcctcgtcgtccgagagaaggaaagagggggaaaaggaccaggccaaattcatcggtggcggtgtccgaacccacctcatgccgtccctcgcaagtaacgagccttctctactgcggctacacgtcccccgcctagatcgagcggccagccggcgagaaaatggtggcgtcgagtggtggcgcgtgaggggtgctaccacttccggatctgaatctcgccatcaagtccgctttcttgcctccaggtctgggcgccgtcaggaggagagaatggcctccaggacgtcgccgctggtgttcaagagggtggccgggatccgaaccatcgctgagtccggccgcttcaaggcaagctccttccacttcccaataatcaagctattacctgctttaatcacaatcgctctgcccctcctggtgctttgctggccttcgcgggtcactgtccacagtagtagctgcaaatgcttgggattcgccttgcgactagccgcggaatgcacgattctgatcactagaacgcaaattccgatcaccagaggctactccgttcggagcaagattctactcttaggaaaattcattgtctatgcttcaggtaccatcttcaaacttgggctaacctatgtttggtgattgtagcaaacctttcaactagc

SEQ ID NO: 141272 - DNA, 650 bp, Zea Mays
tcaaaatcacatgaaccctagatgactagagtgaacgaaaagattgatgagttgaagtcccggatggaggagctaaaagcagacttgatcaaagcaaaaaatggaagcccctaggttttgatacagaggggaagccaaagaggaacttggctcctgaagcgattgaaaagaagattgcaacgcttgaaggcaagatagagaagatggagatgaataagaagataaaagaggatctgaaggcagttgcacttggaacgtcaaaggtcaactaccttgattctagaataacagtggcatggtgcaaacgccatgaagtccctattgagaagattttcaataaatctcttctcaggaaatttgtatgggcaatggacattgactcggaattcagattctaggagagcattggctaccatgtgcgagccagtttggtccaatttctagcccttctcgtcggacactaattacagctaggaaggaaagttcgaagtcccctgctcctagaacgaaggaaagcacccgacattttctttgtggacccttcttttttcttcttctttcggttcaattgcgttaagttcagtatgtattatgctgagaaatttgagctcgtttgaggacgagtgagtttgaatgcactagagctaatg

SEQ ID NO: 141273 - DNA, 644 bp, Zea Mays
agggaacaaacgccagagggttgtggcagtagatcacctctctcccgattggggagcagggtccagcttgcagccaaatggcgtacaaaccggcaaagagcctgctaaggaggttcccaaggaaccatcttttacctgcccaatatgttggaataagatggaggagccttccacaacgacttgtggccatatcttctgcgacacgtgcatcaaacaggccatcaaggttcagaagaaatgccctacttgcaggaaggggctgaaaatgaatagtgttcatcgtattttccttccgaacgcttctagttaaggtcgattggctttgtcaaaggaacttctggtaacacaaggctgtgcaatgtacagtgaggatcagaagttcttgggtgaacagcagatagatgtttcatcctagtctgtatcatttaacagcatcactaggagctcatcatgaaaacttcctgactagggaagtggatatcagcctcagttttactggcctcttattgcatccgtggttcataatgttatttcgctgttgtatgtattaggttattactgtggtggattagtgtaactgggatttgcttcattgtaaaatgataatgacgagttgaaacgtttagcatttttggatgcttttg

SEQ ID NO: 141274 - DNA, 1365 bp, Zea Mays
tccacaacactgcctgaaccagaccaaccgtatcagcatcagcgtaccggccgcggaggagccatctctctctctctctctctctctctctctctctctctctctccaggcgcatcaagccatggctgctcccaagaagacgatgagagctctgcggtacgacaagtatggtggaggagctgaaggcctaaagcatgtggaagtgccggtcccatccccgagcaagggggaggtgctgctcaagctggaggcggccagcatcaaccccatcgactggaaaattcagaagggcatggtccggcccttcctgcctaggaagttccccttcataccagttggagacatgtctggcgaagtggtagagctaggcagcggtgtgaccgacttcaagccaggtgacaaggtcatctccatcagtttcccgaatggaggcgggctagccgagtacgcggtggcgccggcgtcgctcacagtggcacggccgccggaggtgtccgcggcggaaggcgcgtctctgcccacggccgcgtccaccgcgctgcagcagctcaaggccgcgggggtaagcagcttcgacggcggctccggctccggctccggctctggcgccgacagtgacggccccaagaacgtgctggtcaccgcggcctccggcggcgtgggccactacgccgtacagctggccaagctggcggggctccgcgtcacggccacctgcggcgcgcgcaacctgggcctcgtcgcgggcctgggcgccgacgaggtgctggactacaagacccccgagggcgccaggctgctgagcccgtcgggcaccaggtacgacgcggtggcgcactgcgcgactggcaccccctggtcggtgttcgcgccggttctggccgacagggccacggtcgtcgacgtcaccccgggggtcgccgccgcggccaagtcgttccttcagaaggtcaccttctccaggaagaggctggtgccgctggtcctgatccccaagaaggaggagatggagtggctggtggagatgaccaggcaagggaagctcaggacggtggtcgactccaggtactcgttgagcagagcgcaggaggtgtgggccaagagcatcgatgggcatgccaccggcaagatcgtcgtggaaatgggcggtgctgcagagtgaacccggcaagcgggcatgcgtgcacattgtgttggtttgttcatggattgttctctctgttcgatcatcgcgacagccattcataataagccatccatctgatggaagagaactttgcacaccaacacactactgacttactgagtactgactgacacaattgtttacgttcacagtacgtacttgtaagcatgttcgaaggc

SEQ ID NO: 141275 - DNA, 1996 bp, Zea Mays
aatccgctctcctacaagaagacggcaagtcggcaaccccgaggtctcagaacgcccaggcaaacgccaacatagcagagaagccatggccggtccgccgctcttgagcttccccttcttcttccttctctgcgtcgccgtcgcctggagcgaggcgtatggggcaagcggtggctacgggctcggcgtcaactacggccgggtggcggacgacatcccttcgccgtggcgctccgtggagctgctccgcgcggcgggggccgggtcggtcaagatctacgacgccaacccgggcgtgctccgcgcgctggctgggacgcgctggcccgtctccatcatggtgccaaaccagatcataccggacctcgccgcctctgcggccgcggcggaccggtgggtcgccgagaacctggtcccctactacccggcgacacgggtcaagttccttctcgtggggaacgagatcctctccgacttgtccatcgcgaactccacctggccacaccttgtcccggcgatggagaacatccaccggagcctccgaaagaggagcatcagcagcgtcaagatcggcaccacgctcgccatggacgcgctcgccgacggcgccttcccgcgcccaccgtcggccgccgcgttccgcgccgacatcgccgaggcagtcgtgcgcccgctgctgcacttcttgaacgggaccaactcgtactacttcgtcgacgcgtacccctacttcgtctgggccgacaacaacctcaccgtctcgctcgactacgcgctcttccagggcggacgcacacgctacgtcgacccgggcaccgggctcacgtacaccaacctgctcgacgaaatgctcgacgcggtggtcatcgcgatggcgaagcttgggtacgggcacgtgaagctggccatcgcggagaccgggtggcccaacggctgcgactacaaccagattggcggcaacgtccacaacgccgccatctacaacaggaacctcgcggcgcggatggctaagaacccgggcacgccggtgaggccgggcgcgaagatgccggtgttcgtgttctcgctctacaacgaggacctcaagccagggccgggcaccgagcgacactggggactgtactacgccaacggcacggcagtctacgagatcgacctcaccggacggcggccactggggtcgtacccgcccctgccggcgccggagaacaacacaccgtacaaaggaccgatatggtgcgtgctctcggccgccgccagcaacaagctgaacgagacggcggtggggaacgcgctgtcgtacgcgtgcgggcagggaaacgggacctgcgacgccattcagcccgggaaaacgtgctacacgcccaacacaacggcggcgcacgccagctatgctttcaattcgtactggcagcagttcgagaagactggagcgacgtgctacttcaacaacctcgcagagcagactatcaaagacccaagtcatggatcctgcaggttccctagctcgtcggggtcgccttgaaggggtgcagagcgggcgagaagacagcatttgggtcctgattttgtgtaaccagacgacttgggacctagtgaagtgtggagcaacgtagatgttctaactaacacagcactctctccgttcttatttatttgtcgcgttttagtttaaaaataagctagctcgcgacaaatatttgagaacggagttaccagacttgtgccatgacagtgaaggctcactcggttgctcctgctcgcttgagaatcagaaatcgaaggtggaaacgtagttcgtttcagtttttagtaactgtgagttgcactgcatgagagctattggaagtacgtatcacttaaccctcgtgtcagtttgccacaacaagacgcctctttattctagcttctactgtttatacgatatttttatctctagaattgtaattgtagcagtccaaacagtcggctttattaatctgcagtcggctttatt

SEQ ID NO: 141276 - DNA, 3115 bp, Zea Mays
atggagaccaacgagaagcggcacggctggaaggaggcggcggcgctcagcgggggccacctctgccacgtctgcgggtaccagtacccaaacccgaaccccagcgccaagctccgccgttcccaccgcaagcactgcggcaaggcgctgccggaggctgcggaggaggcagtggtggcggaggttgacgaagccgttgtgggggtcggggtttgcgtgggtgagcgggaggacgtcgccggcaaccgcaatgcggccgggcggacggtgctcggtgaggaaggaggacggcagcgagaggagattggcacgggcgaggccaatggaggaggcgcggcgctgcgcggatctgcgggagaagttgacagttctgttgaggacaaggtgattgcagcagaacaattttctcctacctgtattggagctcaagtcactgccaccgaattaagtgaaaaccacctgattaattgtggcagcagtgaaaatgtttttcttgaagatactgtacctcaaatggatgccagtgaattaagtgaaaacggccttgttgactgcaccagcaattctattgaaattgtaaacgaaagcagtgggactgaattactgattgctttgactaatggaagtcaaaatatcgtggaacgtccagctgagcgagaagacagcattgatgaataccaggatgcatctccgtttcttcatccatcagattctgaagatggcgctgcaccaagttctgcattttctacagaaatgagtaatttgaatgctattccatcagggtcaagtgtaactacagatgtaaattctctaggaacaaatggattactcaaagatcaaatttctggggaacccaatatgacagaaatatctgctgactctaaagctggacgtaatttggaggaaggagctcttagattggctaaacatgaagtaaacctgaagcttgggggtccatatgaacaatctgtgaatgttgactacacttacacagatatggttgatagtaaatctgatgaagcatctgttcatagtgtgatgatcgaacctttggatgcttcaccccttcaggaaacccgcctgacaattttggaaccagaatcagagtctacatgctcgaaaatggtggaaggttttatggaagatagaatgcatgttcttcttaccatgcctgaagcatcaccaaaatcaaaagtagtaggatcagataatgttcagttggaaacaataaccaatcctagcactaaccccatgtcaactgggagtgatctgaatgttgtttacactgataatactgctacagattgttccatggagctccccagactgaactggagtgttgaggatgttccaggtgatagtcaacctgttgagaattctagcaagaaaactttgagatgtcccactgccgtttttgaggatgatcttcctgttaccaagatggatgatactcctgttactaatgtggacgatgtagaattcacctttcatgagaagccacagacagatactgtagaagaaaatctttccatacagaagactaacgggttcactaaagaggaagtctgcaacaagcagattaaccctgagatccctacagaagatcaattttctaggggtcagaaacatgacactttactaatggatcgagtaccttctgtcaagaatccatttaatctagacgatgacaggaatgacgacttatttgaacttcccactgagagctgctttttggaggtaccaaatgttgttgaatcgagaaaacaagttgactctacatcccgaatggtggttccaccaatagtctctaaccaaattaggatggctgaagttcaacaatgccataactcaattgaacgcatattatcttcatcaagtgccagtgaaaatggtgaagtggttggtccggaagacattactgtcaggagtagttctgaactggtgaacaagacttgcttgactgaccatgccctgcaggaaaatggacatacaagtggtgatatttttgtgccatctcaggcagcctccacagagcttagcacaatatctatgcaggatatcagtgcactcagtgaagttgaaattatgcaaaccgaagatgctagtgcaaaggacatgactgcagtatgtagcattgattgtattgaaatgaaacaggctatcaacactacagcaaatgatacatatgcagctattgttgaagaaaagaagttgattgaaggcaccactgcaaggatgaatggggtgcgagagacatattatgttgaagaacagacacaagctagtgacacaaaggagttgagtgcagtacagaacatagggaattctgaagaaaataagcagactgaaaatactgatgcaaaggagactaatgcacggtttaatgcaaacgatgttgagcacaaaacacagactgcaaaggagattgctgcagccgaaagcacaagcagcgttgaagagaagcagcagctaaacatcgtggttgtccaagatggaagcaacaagaagatgaatgaagagattgcatcgacaggtgcccaactgaattcaggaagagttcgtgtcccgctgaaggtcctcctcgccgaggcaagcatggagaaccaagtgaagaaacccagcactaaggaacgaatgctgtcgttccggcgccaggtgaccaaggacaacaacttgtcagtgaaatcggggtcacgcaaatctggccctgatgaccaccattggagctccccagccaaactgccacataaggacgttgacaagatttccagagaaaagaagcagccgtggatgccgttcatctgctgccactccgtgcgctgataatatattttgcatcagttgacaactctacatacatgtgctgctgtaactaatgctatccgtctttgtgtagatagtctgcaatctagtatctgatattttgaatcagtgcaattttgatgtatccgctacctgacttgttagacatttgcgcgtgaatctgtcctgatgttcagattcagctagtgtttctgtggactgaacaggcctggaatcttgtaccggattaagctcggtgtggcctgctggtaattttgcggcaacgaaaagaagcaaagtgaaattaacgaaa

SEQ ID NO: 141277 - DNA, 856 bp, Zea Mays
cccaaaccaaacaaaacagttgtgaaccactgagtcctgccgctgtctgttataaaggcacagctcttctgtctccacgagattgttgaattcctctctgccctagcaccagccatggcgaagccgcagcttcttctctgtttcctactcgccgcctccgcgccgctaatcgtcgccacggccaagaaatccggggacgtgtcggagctccagatcggcgtcaagtacaagccggaatcatgcagcattcaagctcacaaaggtgacaaggttaaagttcactaccgtggaaaacttactgatggaacggtttttgattcaagctatgaaagaggtgacccgattgaatttgaattgggcactggacaagtgatcaaaggatgggatcagggtctcctgggaatgtgcgttggtgaaaagcggaagttgaagatcccatcaaagcttggctatgggcctcaaggctcgccacctactattcctggtggagcaaccctcatatttgacacggagcttgtcgctgtcaatggagaaccaaccaaccaatctgacgagctttagattcatcaaacaaatgaatccattcacctttttactcggaactcagcagatgtaatactttccaagaaatgagccttcattccctgccactttcatagtttctttcgctgttccacactgacatctatgatttttggagcaaactctgatctgttttgactagtttacacgtttgtgtgtggaatctgaagagctgttctgaaatgttactttccttttttaaccattagggccttggttcaggcttcatttgcataaatgggatccataaatgattcggttattttttcacttg

SEQ ID NO: 141278 - DNA, 838 bp, Zea Mays
cccaaaccaaacaaaacagttgtgaaccactgagtcctgccgctgtctgttataaaggcacagctcttctgtctccacgagattgttgaattcctctctgccctagcaccagccatggcgaagccgcagcttcttctctgtttcctactcgccgcctccgcgccgctaatcgtcgccacggccaagaaatccggggacgtgtcggagctccagatcggcgtcaagtacaagccggaatcatgcagcattcaagctcacaaaggtgacaagggaaaacttactgatggaacggtttttgattcaagctatgaaagaggtgacccgattgaatttgaattgggcactggacaagtgatcaaaggatgggatcagggtctcctgggaatgtgcgttggtgaaaagcggaagttgaagatcccatcaaagcttggctatgggcctcaaggctcgccacctactattcctggtggagcaaccctcatatttgacacggagcttgtcgctgtcaatggagaaccaaccaaccaatctgacgagctttagattcatcaaacaaatgaatccattcacctttttactcggaactcagcagatgtaatactttccaagaaatgagccttcattccctgccactttcatagtttctttcgctgttccacactgacatctatgatttttggagcaaactctgatctgttttgactagtttacacgtttgtgtgtggaatctgaagagctgttctgaaatgttactttccttttttaaccattagggccttggttcaggcttcatttgcataaatgggatccataaatgattcggttattttttcacttg

SEQ ID NO: 141279 - DNA, 672 bp, Zea Mays
gttgaattcctctctgccctagcaccagccatggcgaagccgcagcttcggaatcatgcagcattcaagctcacaaaggtgacaaggttaaagttcactaccgtggaaaacttactgatggaacggtttttgattcaagctatgaaagaggtgacccgattgaatttgaattgggcactggacaagtgatcaaaggatgggatcagggtctcctgggaatgtgcgttggtgaaaagcggaagttgaagatcccatcaaagcttggctatgggcctcaaggctcgccacctactattcctggtggagcaaccctcatatttgacacggagcttgtcgctgtcaatggagaaccaaccaaccaatctgacgagctttagattcatcaaacaaatgaatccattcacctttttactcggaactcagcagatgtaatactttccaagaaatgagccttcattccctgccactttcatagtttctttcgctgttccacactgacatctatgatttttggagcaaactctgatctgttttgactagtttacacgtttgtgtgtggaatctgaagagctgttctgaaatgttactttccttttttaaccattagggccttggttcaggcttcatttgcataaatgggatccataaatgattcggttattttttcacttg

SEQ ID NO: 141280 - DNA, 808 bp, Zea Mays
ataaacgaccacgcgcccacggtgaactgcttgtctagggttcagggataaaagaccccgctcctgtcccgcaggcaactgagcgccggcccgcccgcccgcccaccagccgccgccgcaccgccaccgcgcgacctcccttcttcgccgcaaaccgctctgggcgcttgaagatggcggtgccgctgttgactcagaagatcgtgaagaagcgggtcaagcagttcaagaggccccacctcgaccgctacaagtgcctcaagccaagctggcgcaggcccaagggtatcgactcccgtgtcaggcggaagttcaagggatgcaccttgatgcctaacattggatatggctctgacaagaagaccaggcactacctccccaacaagtttaagaagtttgtcgtgcacaatgtttctgagctggagttgcttatgatgcacaacaggacatactgcgctgaaatcgcacacaacgtgtccactaagaagcgcaaggaaatcgtggagcgagctgctcagcttgacattgtggtcaccaataagcttgcccgtctccgcagccaggaagatgagtaaactgtttctagcagtagttttggaatggtgcggctttagaggacttgctgtgtatgatgattcagttatcatttctttttgcttcatgattctgagtactgtgaacccacttgctatcagtagcaacttaactgtggcactgttattatcttttaccatctcaaatacagcagttttgatataaaaaaaatgtctgcattggttaatgttaatctgtgtttttgttggcgccc

SEQ ID NO: 141281 - DNA, 2019 bp, Zea Mays
tctcggcctgccggcgcggcggcctcacctccacccgccccgtcccgttttgacggccctttctcccctctcctccgcgagcgccgccgcagtagaacccggtggtaacccactgccgcaagcatcccaccgcgccgagctacgcgacggacgcggcgcgcggcccacaacccaaccgcagcggcaacaaccgctctataaagcaatccccccacctaccggctccgcggcctcgttcgcttcgctttcccccaaatccaccgcgggctcgagctcggaggagaggagacgagacgacccaagactttctcacccccctttgcttcctgcgcaattcctgcggcagcgcctttctctctttcaatggacagcgactacgttgccagcctgctcatgggcatgggctcatccgcccctgcgctcgacttcgccgcgctggacgccgggttcctcgaaacgctctgcggcggcggcggcggcctcttcggggtgtccggggtcgccgcgggggccgggtgtggcggcgtgtccccggaggggtcgtcggtgtccgacccggcgtgggcgcgcgccaggggcgatgacaatgtcaggaagcgcaaggcgccgcccacggggtccgccggcggcaaggaagcctgcccgggcaaggtgcggaaacgaccagcgcagactggattcttcagataccgagcgcttcgaatttagcttgctggttcttgatgcgctggtgccgttctgaatattggtttgcaggctgcggaggccaagggtccggacgggaagaggtgcagagtgggcggcagcgacagcccggtgaagccgaaggtagaggaggtggcggcgagcgacgcctcggttgaactcaaagcgcagaagaagggcaaggggaagaccgccaagccggcagtcgaaccgcccaaggactacgtccatgtccgggcgcggcgagggcaggcgactgacagccacagcctcgcagagagggttagaagagagaagatcagccagaggatgaagtttctgcaggacctagtgccaggatgcaacaaggtagttggcaaggcactcatgctcgatgagatcataaactacgtccagtctctgcagcagcaagtcgagttcctgtccatgaagctcgccactgtgaacccacagcttgacttcagcaacctgtcgacactcctacacaaagacatgtaccaaccatgtggcccttcggcaaattcggtctttccactggaaagtgacggtgcagctttcccattctgtgaccaagcggatcttttccacagctttggttcgggttcggctgctatggaggatcagtgctctctaagcctgctagacacggctctgccccacgcggccaacccacagttcgcttttcaaaagcagcagagggacttctgggaggatggcctacagaacgccttgcctaccggtagtgagcaaagacaggaggaggatgggcttttagtacccaactttgatggtacgtaacctgtgcctaaatgatgggcgatcgattgaagggcacgcacgctttggagattaaccatttggctgataccccatcatacgttgtgtctgatgcaggccagttacatgctgaccagacaaaggttgagttctagtccctggtgatcctcccaaggttgatatttttgtatataggtgggtaccaagacctgtggcaagcaaagcgctctctctctctgtgtgtccgaagctgaccatcattagagtctaggcctgcgaactgatttcgttccgtgataatgctgcatgtatggcatctcggttcttcccacagagatcatgtgatgtgatcgacctcgagaaattaaaagtagattgtgtactagatatggcgcaaatattacatgcgccatcttctaaagttgtactgattggtatgtaagggcgctgggtggtgttggaacggataccgtgtactgttttgttgcttttttttctctagtattaatgattatgatgacgaaagtccaagtatcc

SEQ ID NO: 141282 - DNA, 1726 bp, Zea Mays
cgccgccgcagtagaacccggtggtaacccactgccgcaagcatcccaccgcgccgagctacgcgacggacgcggcgcgcggcccacaacccaaccgcagcggcaacaaccgctctataaagcaatccccccacctaccggctccgcggcctcgttcgcttcgctttcccccaaatccaccgcgggctcgagctcggaggagaggagacgagacgacccaagactttctcacccccctttgcttcctgcgcaattcctgcggcagcgcctttctctctttcaatggacagcgactacgttgccagcctgctcatgggcatgggctcatccgcccctgcgctcgacttcgccgcgctggacgccgggttcctcgaaacgctctgcggcggcggcggcggcctcttcggggtgtccggggtcgccgcgggggccgggtgtggcggcgtgtccccggaggggtcgtcggtgtccgacccggcgtgggcgcgcgccaggggcgatgacaatgtcaggaagcgcaaggcgccgcccacggggtccgccggcggcaaggaagcctgcccgggcaaggctgcggaggccaagggtccggacgggaagaggtgcagagtgggcggcagcgacagcccggtgaagccgaaggtagaggaggtggcggcgagcgacgcctcggttgaactcaaagcgcagaagaagggcaaggggaagaccgccaagccggcagtcgaaccgcccaaggactacgtccatgtccgggcgcggcgagggcaggcgactgacagccacagcctcgcagagagggttagaagagagaagatcagccagaggatgaagtttctgcaggacctagtgccaggatgcaacaaggtagttggcaaggcactcatgctcgatgagatcataaactacgtccagtctctgcagcagcaagtcgagttcctgtccatgaagctcgccactgtgaacccacagcttgacttcagcaacctgtcgacactcctacacaaagacatgtaccaaccatgtggcccttcggcaaattcggtctttccactggaaagtgacggtgcagctttcccattctgtgaccaagcggatcttttccacagctttggttcgggttcggctgctatggaggatcagtgctctctaagcctgctagacacggctctgccccacgcggccaacccacagttcgcttttcaaaagcagagggacttctgggaggatggcctacagaacgccttgcctaccggtagtgagcaaagacaggaggaggatgggcttttagtacccaactttgatggccagttacatgctgaccagacaaaggttgagttctagtccctggtgatcctcccaaggttgatatttttgtatataggtgggtaccaagacctgtggcaagcaaagcgctctctctctctgtgtgtccgaagctgaccatcattagagtctaggcctgcgaactgatttcgttccgtgataatgctgcatgtatggcatctcggttcttcccacagagatcatgtgatgtgatcgacctcgagaaattaaaagtagattgtgtactagatatggcgcaaatattacatgcgccatcttctaaagttgtactgattggtatgtaagggcgctgggtggtgttggaacggataccgtgtactgttttgttgcttttttttctctagtattaatgattatgatgacgaaagtccaagtatcc

SEQ ID NO: 141283 - DNA, 1734 bp, Zea Mays
cgccgccgcagtagaacccggtggtaacccactgccgcaagcatcccaccgcgccgagctacgcgacggacgcggcgcgcggcccacaacccaaccgcagcggcaacaaccgctctataaagcaatccccccacctaccggctccgcggcctcgttcgcttcgctttcccccaaatccaccgcgggctcgagctcggaggagaggagacgagacgacccaagactttctcacccccctttgcttcctgcgcaattcctgcggcagcgcctttctctctttcaatggacagcgactacgttgccagcctgctcatgggcatgggctcatccgcccctgcgctcgacttcgccgcgctggacgccgggttcctcgaaacgctctgcggcggcggcggcggcctcttcggggtgtccggggtcgccgcgggggccgggtgtggcggcgtgtccccggaggggtcgtcggtgtccgacccggcgtgggcgcgcgccaggggcgatgacaatgtcaggaagcgcaaggcgccgcccacggggtccgccggcggcaaggaagcctgcccgggcaaggctgcggaggccaagggtccggacgggaagaggtgcagagtgggcggcagcgacagcccggtgaagccgaaggtagaggaggtggcggcgagcgacgcctcggttgaactcaaagcgcagaagaagggcaaggggaagaccgccaagccggcagtcgaaccgcccaaggactacgtccatgtccgggcgcggcgagggcaggcgactgacagccacagcctcgcagagagggttagaagagagaagatcagccagaggatgaagtttctgcaggacctagtgccaggatgcaacaaggtagttggcaaggcactcatgctcgatgagatcataaactacgtccagtctctgcagcagcaagtcgagttcctgtccatgaagctcgccactgtgaacccacagcttgacttcagcaacctgtcgacactcctacacaaagacatgtaccaaccatgtggcccttcggcaaattcggtctttccactggaaagtgacggtgcagctttcccattctgtgaccaagcggatcttttccacagctttggttcgggttcggctgctatggaggatcagtgctctctaagcctgctagacacggctctgccccacgcggccaacccacagttcgcttttcaaaagcagcagagggacttctgggaggatggcctacagaacgccttgcctaccggtagtgagcaaagacaggaggaggatgggcttttagtacccaactttgatggccagttacatgctgaccagacaaaggttgagttctagtccctggtgatcctcccaaggttgatatttttgtatataggtgggtaccaagacctgtggcaagcaaagcgctctctctctctgtgtgtccgaagctgaccatcattagagtctaggcctgcgaactgatttcgttccgtgataatgctgcatgtatggcatctcggttcttcccacagagatcatgtgatgtgatcgacctcgagaaattaaaagtagattgtgtactagatatggcgcaaatattacatgcgccatcttctaaagttgtactgattggtatgtaagggcgctgggtggtgttggaacggataccgtgtactgttttgttgcttttttttctctagtattaatgattatgatgacgaaagtccaagtatcctctca

SEQ ID NO: 141284 - DNA, 1353 bp, Zea Mays
atggtacagaagaacatcaatctcagtaacatcttcaacaccagcagagcacaatcaaaactactcaacatttcactcgtcctcttggctgcggagcctggcgagcttgttggtgaccacgatgtccagttgcgcagcacgctccacaatctccttgcgcttgcgggtggacacgttgtgggcgatctcagcgcagtaagtcctgttgtgcatcagcagcagctccagctcggagacattgtgaacaacaaactttttgaacttgttgggaaggtagtgcctggtcttcttgtcggagccatatccaatgttgggcatcaaggtgcatcccttgaacttacgcctgacgcgggagtcgatacccttgggcctgcgccagcttggctacagaaaacattgtcagcaagattagtttcaacagacagaaatgctagtgcagatgactcaaatatacagtgccaatgcattggaaagatgtgcccatctttttataggatatctacttacacctagtgatagaagtaatatctgagactcaattcatggctctccacaggaaataaaatggaaggaaaattctggcaggtttaggtatggtatggcaaattctggatccatacagttaccagcatggctagaagcaacgagcattttgctaaactggtacagtattgtgcaagggacatttcgagctgcaaacatggtcagaactcagaagtaatatgcattttctaaacttacagaatcagtggcattacatcagcataaactaatcaatttccacaaacagaagggatttgatctctaagcaggcattatgctaatgagctaatccagtacttgtcaagcaaagcttgcatttcaggccgctggagcaaagatttctatctaaatcggacacaggccaacgagctgctagtccaaactgaaatcgtgcaaaaggtattcaaattggtgcacatgtggccattctttcggtgaacctaatggagtgccagtcgaccaacaaggaaccaacgaaggccttaccaaatgctcgcttggcacgcacaagcacaacaagggtcaaggcaacgggtggtgtttttcctaccttaaggcacttgtagcgatcaagatggggcctcttgaactgcttgaccctcttcttcacgatcttctgcgtcagcagcggcaccgccatctgcactagcaaaggtcacgcaaagcaattaaacaccaggtggacggaccaaaccacaaatccggtagcacgagagcaaggaattcgagaacatcgtggtcggggtcgcgccgcctgtggctgtacctttgcgaaccttcggtgatgcggcggtgctggcgagataggcg
